United States Patent Application Publication US 2015/0240253 A1 - sequence listing, part 6

SEQ ID NO: 23072 - DNA, 853 bp, Zea Mays
gctagcagaccggccgaacggggccatgaccagcgctcccgagcgtcggacaccaaatcggacctaccctgaacattttccctaagttaattgcacagttggtgagctatcaagctctgtccgcgtgaaccgaatgggtggcggacagatgagtgcgttcccgatgattggtggtctctcagttcaaattggtgacacggtaagcattacagagctatgagagtgctcaaacgaggaagcaggggacagggactgaccggaaaaggcctggccacggcgaggtgttcttcgcggtggcggagacttgatttgggggaagtttgaaattccagagctcggttgaacgattacgggtgggagtgggtgctaaggcttcacgatgacatagtgcagctaccccgaccatcaatttatagagggcatcgacgatggccgggaatttgaagaaggacgcgcggcggtcggaggagaggaagggcactggcgcacgtgaatccgtgtccatcgtcgtggcaagctcaccggcgatgatctaacggctgtaaagagtcacggtgacgcgacagaggtgctcggatacgtggcgtaaggctgagcgacggtgatcaccggcgtttttatccaattctgccgcggtgaacgcatgtacggtggccggaatattttatcggccgaagtttatccacggcggggacccttgcttgatcccaagtgttatccactcagtccgcacgaatcacggcgagcaacgatcaacggcgacgagctaccggcgacgagcaggggggtgggatcttctttagttcatctattactgtaccatggcaatcgccattcagtcgattgacagaac

SEQ ID NO: 23073 - DNA, 607 bp, Zea Mays
gggaaatatggacggtaacaggaacggaatcagtaagagttgtttcccgaccgaattaacggttcccgtattttatccggaataatcccgtattcccgtgtgtatcccgcttgcgcttggcccaaatgcgtgtgtggcccaaatgtgtacagtgtgcttggcccaacaaatgtaactctagctggctagcgcttgccgtcacggacgtggtgcatcagtgcatgtgccgtgcggacgtggtgcatcagtgcatgtgacgtggcttctctctcctcctctgcgtgcggcattgccgattgcggctggacggcgaacgggctggttgctgagcgcctgagcggagtagaggaagcgattgctgctagccgattgctgctgcggatggctctgctgttaggcacttgggcatactactctctgctgttcggcactggtagttctaattcctaaactgaataactgatattgttagtctataagtaatagtcgtgatatgttggtctattgggcacttggtctgcaatttttcgtgttaccgattcccgatcgtaatcgactcgttcccgattgaaaatgttccgttcccgatatctcgtaatatcggttt

SEQ ID NO: 23074 - DNA, 590 bp, Zea Mays
atggcattaacctagttaggatcagataaagcaagtccaacatttcggggctcaaaagtagcaacaaaagctgagtgagcaaaatgagaaatttgttgtgacctggagctagtgactcactcatgaagctccccaatcatctactgaggtgggtgacgttgctgaatgtgttgaggagcttcccttgaggaagtgacctccccctcaatagcagcctcaactcatccagtctcagcaggagctcactcgagcagaccccaggtggtggaagaagtggaatcggatccgtcagccgtagtagtggaagcaggctcgacaggggcagtcggtggagttggcttaggggcaacccaatcggcatcgtcgtgctcctcctccacaaagatgatctatcccatatgatctggacccgctggctcaaagacaagagatggacaaggtgtagtctcatcgaatctgacctcacaagtctccataatgcagttagtctccaggttaagaacacgatatgcacgagaatgtaatgcctaacccagaaaaaccccatcagaagaccgacactcaaatttgtccaaattacactgttttag

SEQ ID NO: 23075 - DNA, 352 bp, Zea Mays
gcttgggacactgttctgccctgaccgccgtaccaacttgcctcacggccggtccagataacctcgtcggagttggccacctgccgctcgggtgccacgtgcctaagcgcaataccacgtcgtagtgactcgccttagcatgtccggtcatcaccggtggtcttgccacggtgaagtgccacggtaaccctgcaccagtaactctccccctcctcggtcgccattctaaaatcaagagccaccaccctcgggcactataaattaagcatgccatcagctctgttgggtcatcacgaagccagagcaccccgctcctgcctccgattagcaaccagagagctccaatttcttt

SEQ ID NO: 23076 - DNA, 364 bp, Zea Mays
cgaaccggtagtgccttcaccaagccgccattgcagggagagccggagggagtcagagagatgaagtccgtcgttgcccatctgacccgtcgcgtcttggcttgagttcgcgcctcgctcctgtggggttaccagagccgcgccgtggattcccagcgtgttgccgggcgtgggcagaattcctcgtcggagcctattccctgtcgcggcaaacacctcaccgtcgatgggagtcctcgcgccatgattcactggtatgtgcgcccctgtcaaatccccatgctcctagcatcgtttagcatctaaagaatgggggattcgagggcatggacggcttatcggctgacgccggccatggcttcgc

SEQ ID NO: 23077 - DNA, 683 bp, Zea Mays
atctgtcggcaataatgtcgagctattgtggcagtccatctgtcggtaaaactgattatgcgtggcacaaagtctgtcggaaaaaagtagcatcagatcgtttgtcggtaaatggatgtcatgatcctatagcaaaaaaaataacgagtgtgagtatgtaggaatcgggaatcaaactcgtgaccctttgtaaaaagagaagacacatacccattggactagtgatgattattcaatcagtttttggtatttttttataaacctgtacacgttagttattgaagggctacaattttattggaatcaacatagcccagtaaaaaaacctggcgccgtgtcacgcgtgcgtcccgacctagctagcagcaggtggcgtcgattgagaagcttaggtcgtgaggtcttttgtctctactatacttaaagcgtcagtttcaacggttatcctgcatcaaaattttacacaaatctccctcactttttcttctatcaacccaccatcctctcctctgtctgtctcttccacttttatctcaaccgcacccaaaagcatagcccgattctcgcttggtccacctacgtcgactgctacgcccgctcccgtcgccgttgtcttcgcgtcgacgagaagccgctcctcaccgtgcgccgcaagacgcgcctcagcctcgtggagcattggg

SEQ ID NO: 23078 - DNA, 319 bp, Zea Mays
caacagtacgtgacgtgaggtcccgtgcaatccctttccaaaatcgagctatgccagctgtagtagctttactcttctttttctcgaatgtggacaccaattttggtagagggaatttagatttctttgattgtcgtgaatcccttgatggctgtggagaaggtggtggtgtcctaaatgttgatgcttgtggcggagacggtggattagaaagaggatgaggagcatcatgggaagattgtggaggtgatgatggatgtaaaggtactaaagtttgaggaggcagagatggttggggatgagacgacgacggcattgg

SEQ ID NO: 23079 - DNA, 421 bp, Zea Mays
ttttttggctctagtctgtacatgcatgtctgctttagtttgttgaaatccagcccagacttgtagcttgttttattgatgagaatctgatccacatttccctgtaaatttgcaggctttgcatctgtagatcacttctgctattactatctcaggttttgaacttagaagccctagcaactcggtggcaactggtaacaacagcctagaattgtggttgttggagatgtttgtatttttaattcttgatcacgatgaggacatgtaaaaagttgacaaattagcattgttggtggtaactggtagcagcaactctgttttattttcatgtagtgtatttcctaaaaaagttatttaaatattgtgtaaactacaaattagcataacgcagttgattgtgggaacaagcgaattgcaagca

SEQ ID NO: 23080 - DNA, 356 bp, Zea Mays
gtgggactgatcatcttgaacatgttgcaggagagacccctgctgttgtggttgatccgcagaccgtggcacgtggttgcttcggcgatggatttattgcctcgaacagtcctgagtttaggaatgaagaggagccatatgcctttgctatggctgccgattcagatgatgatcgcctggttggtgaactcacagagagtgacattgagatgttgcaacgtgtttttctagacggtcgggatccaagagtgcatgagttcagcgatcttagtctttctcatcaggcaaatgcagaaggaagggatgatgagctgctagatgctcctgaggctggtcctagcatgatgattgaaaag

SEQ ID NO: 23081 - DNA, 587 bp, Zea Mays
caaatttaaaatgtaaattttgccaatggcctcggatgggaaaagtgtcaaaacaaaagttgtagaactccaaaaagttatgaaactttgtagttgacaatttttttcgtttgagttcgtttacagcctcaaacaatcaatttaaacttagttggttataatatgtggtcaacaaaactgtaatatagaaacaaagtaagtgatatacaaagtggtagatgggttatacgcgagggcgaggtcgtatctacgtattttgcgtgaaaaatattgtgacttgcgactttaatagacggggtagtgaggcctcctaataaaaatattttttaaaccctttttgtatgttttttgaaaaatattttcgcctatagttttattacctcgaccaacatatccgcttgactggaatggataggcttctgcagcgctggaacttggcgtgattcctcgccaatttccctctccatctatctctagtctccatcccatccatccatctatctatctaggaccaaagtctgtggtgcaatgtggggagccagaagaatatcgcagacccctacatgcctacacacatgaggctttgc

SEQ ID NO: 23082 - DNA, 493 bp, Zea Mays
gtcgttcttcctatgtaatgattcatgaaatatatattggcattgttagggcccatgaagaaataaaacatgaatgtgtgtgtatttctaagtagattcacgtgtgccagtctatcgtttaatctataccccttaattatatatcatctcaagtacaaatacatgatggttgttagagtcatcgatggaagtctttatgacggattcttttgaagccatgaaatgaccgttttggaatcttgccccatcccaaaatggagtacatgactagttgaccactgtgtggtttctctctctctctctctcctctctttctctcatcacttcacctcactgatgtcatttcatgaccgatcgacatctgtccttcattccatggcgttctttttgtgcgtgtctgaccaggtctgtaatggggtgtttgggttgaggaatcactccatgggatgacctcattcctcacattagtactgtcggggaccataattagggg

SEQ ID NO: 23083 - DNA, 471 bp, Zea Mays
taggtatgcatattgatatggcgcaggtgggtatgggggtgggggtgtccatgtaggtacattaggtcttacatgaatatcgtgatgtgttgacttctccgattggtgagatgacccaatcagtcttacatgtcgtcgctcctaagtaggtgatcgaggtcgcttattggtcagtcacttggttcggccttctttttcacatatttagataacaattgattgaaggtcgggccagatttgaccaatcgaccggatgccttaatcatgtttgtcttttccatgtacctatttttggtcatcgatgtttgaagctatgcggtcatcgctgcacctgggcgttgccagactatccgcttgatctgttcggactgttcgctgatgtcttggaccgtccgcgcctatacaccggaccgtcctcggtgcgcaaaatagggggtcgtgcggtcgtgcctggccgtcggcctgtgcctg

SEQ ID NO: 23084 - DNA, 519 bp, Zea Mays
agatggttggttaggactagtcaccatgatatttatagggctattacataactcaacttgcttttgatattttggttgaaccacttaactcgagggcaaaacgacctaacttttggttggtgcatctgatggccacaagctcttcttgacttcgttcgcctcaacataagcttcatgatgacaccatgtgtttctcaatctccttcctaaactcaaacatggtttcaaatgccaaacccatatatcatgtgttagtggatttgatgtacaaaccactagaccctctagagaagcgtatctactatacctccttcatgatctctatgtatgtcactatctatcctcgaccgcccgatcaccaagtcctttagtgcatctagttaacttagtcaacaaccatcttgaattagtcaatatggtctacccctccacatgtatcttgcttgtcaatgttcccatatgtactcatgctccatcttttgatcctctcgatccctctatccaagattcagtgtttat

SEQ ID NO: 23085 - DNA, 1110 bp, Zea Mays
attggagagaaaagggcaaactatatacttgagcttcgagaggagtcaccattgaaagaggtaaaccttctatattgaatgtttaaaaagttaagtttaaacaatatgaagcggagaatatcaattaaactattttcttcttttagattgatgatcttaaaagcataattgggatgagcaaaagagaggtaggtaactctactataaatatttgttttggaaacaatcaaagtattgtaattcaaaaaatgttgcatcgtcgctggagatggtggtgcatatctgttagtcaagtatgtgttctaggtgatgttagcacgcatggtagaaaagctgagttgctgccttctgctttctgttccgttcagatcgacaagatgatgtcaaagttgatttcggactcggagatgaacgagtaagggttgtattgatctcttcccacttaggaaaggaggagaaggtcatagttctaaatttaaatatcgatgcttgttgttatcagatcgctgtggaatccagatgattttgggtgttgcttgtgagaatattctgatgttttgtttttttaaaaaaaattacaggaatgtcttctctacgtataggttttatacaggaatgtcttgtctacgtaacgtataagttttgtttttaaaaaaagaatataatcgggtggaaggctttcaggtttgctgtattagacaaaaacctatcagttaccctgtcatattgtgagtgtgcatattgtcatattgttagaactgtgagaacaagatatgtttatttggctccgccaatattgcttagcggcaaagtatctgtatcgtcagcacagtgcctggtgtcctcttggtcacaacaatctgcactgttcgcagtggtctctcctaccctaacattgctgattccttcgatcaatggccgggagggacacccaatccagcggcggcagcggcagcggcaccaaccactccaacgcattcgcatcgaggaaaagaaaggcgatgataaaaattttaaaaatcgcagcactaactgtcgcaactttccaacatccaaaagcccaacgaaagcgcatagtgaaaggttcagtgtaagcggaagccagactag

SEQ ID NO: 23086 - DNA, 1443 bp, Zea Mays
gtcgcactggaaggagaaggagaatgctccacctctcccgctctacccaagcggcgcctctaacccctctcatctcctcccctgcaagcgcccgctgcaatccccatccccatgcccaccgctgcgccggccgctcgtcgatatcactggcaacgcattggaacagcggggcgggtatgggtatacaactcccctcccgaacgcttccaggccttgcgggtttcttctgcacgacgacgaagacgacatgaacgaggcattcttgcgggaggtggacgccatctgcgaggagcgtgcgcggtccacggccaggaaggaggaaaaggagaaggagaaggagaaggagaagaagccagcagaggagcataaggggacgggcggagtggcgctcatggcggcagcgggcacgattgacgccgctggaacagagacagcaacggtacggttcttgtttcatcgaagtgcctggaaatggggttaggaatccggtgggtgtattttatttacaaatgctggatattcagattctaaggaaatatggagagccaatgcacgaaggacgttattatttgtttaactggggtttgctttgaagtggaaacgccatttagtgacattttttgaaaaaggaactcacattgttgctctcttatttggacggaaattagcttgacgatgctttctgggaggaggtgagcgccatctgtgaggagtgtgatgcccagtctgctgccaagagccaggagaggacgaaggaggaggggagcttggtgctgtcctgcgatgatgcttcactcccccctgctatttccatcaccgcggagggtggggaggtatgtgaatattctgtgttcatgatgtttgtttttgattccatgaatcagaggaggaaattgggacgttcttgtatcgagtatggtgcatgggattgttatagatttggggagaatccttaagttatgagagcacttcacaataacttaattttttgtttcatgaactgaaatgattttaggaaatgtctgtgaaacatagcaaattcatgtttattgtgtgtgtggcgaagataggaaataggcatgcacaatttggggtttattgtttcttgaaatgcgactgtgttaatgtaccttatttgtaagagaaatttattgtgttgaatctctgttgaatttcttttgagatgaatttagtttgaagatgcattctgggagatcaatgccgttatggaggagcacaatgccaaagctcatgccaagtatcaggaggggctcaagggaatggaggagaaagatggattgttagcactgtgcggtgatcatgatccttcagtttccccagtaatatccgttgcaatggggggtggagcggtatagcttttttcttcagacaatggaacaccgagtagttgtaggacatcagacagtttttgtttcctgtgtc

SEQ ID NO: 23087 - DNA, 561 bp, Zea Mays
tgcacttctatatttatatgtggtacaagctgtcttcaaagtgcagggtattttaagacaggaacttcaattccgctgcaacctactcgaagggtctttcattccactgcgatccagccttcgagtagagtaagaatttccggttctaaagtgataattattattcgcctattcacccccctcctctaggcgacatccagatcctgttctcgggcatagggaactttcagttgccccggtaagctccgccctatcccccgccacctagaacacccctcggtttgcccctaatccctctagtccgcccggtccgcgctcaccggagttcctcctgtgcagccggagctccgccaacgtcgccccgtcgcgtccctgcgccaccgccgttgccccgtgactccaacgcttcccctcgaggtgagcaacttacccgcacacttaatttggtcgttactgccctggttagcgcgcgattgttcgccagagttgccccgcgccgctgttagcccgcctcgccatgtgcagcaccctctggtgctcccacgccggcgtgatgcccat

SEQ ID NO: 23088 - DNA, 743 bp, Zea Mays
ttgtaaccttcttcacttgatgtttgtctatccatcatacacaaagaggacgtagggtattaactattaagcatcttgcggcgtgaacctccgcaaatcacttgtgtgctggtagctaggtagtacctactacctaggatcaacgtgcctccagcttacacccatcgctctatccttcaactctctcggatacctatggtacactggtgttgtaccacggcgacagatagatatcatgagctgaggccttctacagttgatgtttaaacacaatgtgtgcaacttagatatttgttcttttgaattatgaaccagcacagcctatgatgtatagagtgtttgcattgcttgatttggttttcttgtgtgtagaaaaggtcagatctattgttttaaattaattcatttgacagtcagtggaaggttctttgctacttgcattcctgtattaatgtgatatcttggtattacagtgctaccacttatttctattgatgatttatgcggcatagttgtcacaacgatgcttaggcatcctgttggttgttgtatgtgggttcatgctatgatccggcatctttctgctctatcttgcctctggttctgttcaatgttgtgatctacaggcatcatccccatctggccactagtgcaatcttctgtacagagcgctgaaggaaagctagggcgctacttaaaaacatgatatgtcaccttgagtatgtttgaggaatgtattaatt

SEQ ID NO: 23089 - DNA, 446 bp, Zea Mays
cgtcggcctacgggaggtcgagttggtgaagacgcgctcgcgccatcggatcttcctagggaggtctagattgagtggtgtgtggaccgttgatgtcatgggtatggctgggattgggcgccaagcgtgcctattcggtatgattcgatcatgacccttgatatgtagatgggcggccaggattagaagaccgtgtaccccttcgtctattttatttggacggatagatcgtgatcggatgactggtgtttcgatcggctgtggtccgttgaatttagatctggcggtccatatcgtgtaccaattcacttaaagactaatctaatccgggacctcaattttggatccaacggccagaaaacgttcatagcctttcggttgagaccttttctataagagaccctgtgctcttacgaaaataacccaccatgcccgggtataaaaag

SEQ ID NO: 23090 - DNA, 620 bp, Zea Mays
gccgaaggcaccttcggttgagctagttgaaacgaagtttaacaaagataaagatgaaaggtcgaaaactgaagaagtaacaaagatgtcagggattttaagtccttcaacagaagcaacagcgttgaaggcacaaaagagttctgccacaactcctaggagaaggaggatggtaaatgtattagatgtattggaaacaaccgactccataagtctcgctcccacagggaaggttgtcaaagctgacaaaatgcaacccaaagctgatactaagcaaatagaagttgaagctacaataacccaggctaaaactgaggcagggccctcagtgcatgctgagatgaagcttgccccaaccgagcagggggccgaaggaataattccagatactaatatagcttttgagaaaaatgtggccaaagaagccgaatcccttactcccgaagcactctcagaaggctttgattatatcgttagacatgattcgggaaaaagactatccgaagaagaaatttctgaagccaaacattatgccagggaattgcagtatccgaagggggccctagtgtttaattgtacaaccgaagatgactttttgtactgcatctcggacaacaaag

SEQ ID NO: 23091 - DNA, 395 bp, Zea Mays
ggaaaatgaagatgaactgggctgtattatacccctcttaagcatgtcgcccacttgagcctcaatctcatcttttagagcaggaggatatcgatagggacgaacacacacaggtcgggctccagcgaccaagggaatagagtgatcacactgccggacaggaggtaatgaatctggcaccgtgaacaattgtgagtaggtgtcgagcagggtggctactgccggatgcaccaccgtatcctaggactgtttaaccactgcaacatgaaggaacaaatcatcaggcataccctgtccgcatccttgcaaaagcaccggagtcccatgaaactgaatgagcagccatttagctttccaatccactctcatcgggctaaattgctccagccagtcca

SEQ ID NO: 23092 - DNA, 282 bp, Zea Mays
atcaagtacacaacttagagggttggtcaaacgggacgttgtggaacagctgctggaaatccgagtggcaacccagactgacaattcaggaatacccccggtgattgaacaactggtgggtcgttatcaggacctgttccagaaaccaaaggcattgccaccaaaaaaggtccatcgatcactctatccctctaataccgggtgcacttccatttcggttgaggccctatcggtataccccacagcaaaagtctgaaatcgagaaacaggtgaaggagatgt

SEQ ID NO: 23093 - DNA, 393 bp, Zea Mays
aaagcgcaccccttatgtcagccaccaaatttagatcagttagagcatctttcaccaaccttttggaagcaatacgcctaggaacatgctcaagaacctcaggtgccacctctccgatgcatctaccgttcagccaccgatccttccaaaaaaggataacatttccatcacccaaatcagacacaactgcaatattgatcaaagcctgcactgctccacaagcctgaacagggaggaccgaccatggcttagagtggccagttttttggagccagggccacctagcccgaagagccacgctcaacagccgcagatcagtgatccctagcccacccaagtctttaggcctagtaaccttgccccacgccaccaaacagtgacctccattggctt

SEQ ID NO: 23094 - DNA, 332 bp, Zea Mays
ggggttccttcgtttttctccaacctttaggtaatttggtttcttctggtctgactatactccaggtagacttctgttcttatactcatctgtttttaatgtcaggcattggttgacgagatggctggtcagctgagattgtagggtgcctctgtcccagaaggagctatctctgacacattggaatccagtgctgcttcggcagcgggtatctgatttggagatggtgaatgctggttagtgccctttgtttcttctttggctgcttgactgatctgctctttagctgaacacccttgtgtgaccgttttcttgatagataaggcccggcg

SEQ ID NO: 23095 - DNA, 1019 bp, Zea Mays
gggagaggagaggagagagggagagggaagagagaggagggagagggaagagagaggagaggagagagggaaagggaagagagaggaaagagagtggagggagggagagagagagaagagagaggagggagagggagtgtataggaaagagagtggagggagagggggagagagagaggagagagagggaaagggaagagaggaaagagagggagagggagggagggaagcatgcatacaacgccatttcctctgccatagttaccgtgttaccgtggtcataatcgccttcacggtgtacgcaagagagacatgaatggcatagaaagtttggatgatacccataaagaagaagatgatggcccaaatagttcagtggcaaatacgagtcatcgtcaatagcgcgccacacacattccatagaattacgatggtgtgttgacggttgccgatgcacatttcgtagaactagatgcttgattgttgtctgttgatacgtttagcatttatttcttgaattgtgattagaattagcacatgatctctgatatgggtttttagtgagacgcgaaaaaaagactaagtaaagagatgcgaacgggtgagaaggaggacacacggagagtagcgggcgagcctagttggcaccccttcccttcacacagcatgtgggccgcacatcaagcagctgcctacgactctccatctctctctctctctctacgtcctatacgactcctcctatacgttctatacgactctccatctctccctctctacgtcctatacgactcctcctctctccctctctatacgttctatacgactctccatctctctctacgttctatacgactctccctctctccctctctatatgttctatacgactctccatctctctctacgttctatacgactctccctctctccctctctataagttctatacgactctccatctctctctacgttctatacaactctccctctctccctctttatacgttctatacgac

SEQ ID NO: 23096 - DNA, 626 bp, Zea Mays
cgagaggttcgattgacaaaaatgggagtatgtatgtcagagcgcgtatgtaatccaccacgacctattggtggacagtggctcaaccacttcgtagctattaagtcaacaaaggacactggataaaccgctgtaggacatgactgagtgtaacggcgggctccagggtggcctaggtgtgcctacagtaccctgacggaggaagaaggcgtcatccatggcgttccttgactgatgggaacccaagaggacaacgaactacacgacaatgcgtgacctttattctcttgaccgttaggctcttgtaacagtgttggtctttgaccttggcctataaaggaagggaaagggacacgattccgaggacaagcaatcacacacacacatcactagcacaagtcaaagcacatagcacttataaccgcacacatattcacacactagagacttgggagctcgatccctctctcgcccgtttgtaaccactactacaaaccagtgcaaggtaacatgagcaggtcaactggatttatggatgttatgcccaaactagaataaacccttgtgtcctctttgtacaccatccgctcgaagacacacacagcacaataattactagccagtgg

SEQ ID NO: 23097 - DNA, 303 bp, Zea Mays
attctgaagacaagtcgaccacgaagtcctctcggctgtcgagggcgagcttagtagtctgagcaagtatagtgaggtgtgccatggtgtcgctctacagggcctgaaggcggtatagtgcgctcatgcactgaacagtgatcctcccaacttggtcgggatgcatggcccatagatctttcacatggctcaaacggttgcaccacatggggtcatccctcttctcagcggggaagagtcccagtgggtgcattaccatctccaagggatggtagccgcagaaagtcgtcagggtcttcatag

SEQ ID NO: 23098 - DNA, 550 bp, Zea Mays
acctagactcactctcagcacgtgacgaccatcgtaggaagggtctgcccataaactgctcaaatactgagtgaacccccaagcaatcaacatggattactcgggggctacatctagcatatgcgcttgcacacacccaagaatttggtgctaagagaaagcctccatgcaactccaaggtgttacatgaaggctcgggggctgctggtgagtaaccgggaaccgtgtaccgaaataggcctagcctcttcaaaaacgacccacctaccgaccaagtctatgtcaagcaactctacgaggtggatccaccggccaactttaagaggcggacaagctgacaaactctccggtgaacaactttgatgaccaactcggatgaccaactctctgatgaccaactccactgaccaactccattgatcaactctgcgaggcagaccagctgaccaactctccgactaccaacttcgccgaccaactctatgaggcggaccgactgaccaactctccgatgatcaacttagatgaccaactctgatgaccaactctc

SEQ ID NO: 23099 - DNA, 669 bp, Zea Mays
tagcaccagcatccgctttctatgaaagagtgctagtgctaggtaccacatcatcaagactacgagaggcgccctccgatactgaatgctccaccccaccggaagccatgaaggtcatgtcttcagtgtcggttgacagggtgatgctcctccccgacccgacgtgggccaagcgctcccttttcttttccctcttcctatgatggttgtgtttcttccacgccaccatggccgcctcctctgcctcccgttgccttttcctctccgccttgatagtggcgtcgccaaggagggggccaagaggtcacaacggtacagagcccctacaagagtggatgtcagaacagaccaaggcaaaagggaatggggaaaaccaaaacatactaggtcaggaactcttgcctgattaaaaggcaaggggccgctcacgtccatgaagtcggatgtcacccccaccgtgatggtgagtacgtgggccaccacttcctccttctccaggttcactgtgtcgtggtgatctaagtcaccctcactggtgaattgtcacattatcctctagcaggccacgagaggctaaagccagcattgcaagaaggtaataattagcctctcgcacagaaggccccatttgcgctacttggtgaacatgtccagtatatacgatatctt

SEQ ID NO: 23100 - DNA, 632 bp, Zea Mays
agcaatggaggcgaatgctgcacgtgcggcagcgacagagctcgaggctctggcgacggcggccgggtcaacggagatcacagcctctacaggcggcgagactctccctcctcgaatcagtacgatggtcatcgcggggtccaggctgttgttagggacatcggtcccggtggtgggtggtctaccctcaccaagactaactacgtcgagtgggccgcagtgatgagggtacgactccaggttcgccacatgtgggaatcagtttggtatggcgacgtcgactattcaaggatcgacgggcgctggatgcccttattgccgcagtcccgtccgagatgcagttttcgcttttccagaagcggattgccaaggaggcctgagatgccatcgctgcgacctgcattggcagcgaccgtgctcgcaagaccacaaagcaggcacttcgcaaggcgtgagagaacctggccttcaagccaggtgaggatgttgatgactttgctctccgcctcaacactgttgtagaagatggtgcagttcggtgatgtcacctacgatggatgagagttgttgagaagctcttccgttgcatccccaagaagtacaagaagattgcttgctcgatcgagtctctg

SEQ ID NO: 23101 - DNA, 1033 bp, Zea Mays
ctttgttcctgatgtaaagcatttgagaacaaggaccaacaggtatggtgcacgtatacgagaaactacagttcccctagtttgtttcgttgtgcatctgagctttcacttgttccctgagtgtttgggttcacctgtcagctcagccgcgtgacagtgcccaacatttggcgcccaccgtttgcgcgacgaagacaacacccacgatgtctcccaaaaagatcacccgtgctagcccaccaccaaacgacgatgatgccaagaccgcccttgccaccaagaaaggcaaggtagccctcgccactgatcattcaccaccaccaaccagaaagccaccaccgacccacagtgcaaggacctcctcgcaaaacaaaaacagatagcagtctccaccgaataagcaggcaaggtccacaccaccagctcagaagactcaggagatcccccacccaacccaaaaagctagccttaccaagacaaggtttggcaagacatgacaaggaacctgcctcccgccccaccgggcttcgcccccacggtcggtcctcaccacccattcgggatgccctcgaaaaacgacggtgaagacatataggccagcctggacctcggcatcaacactaaggattagctgctgatcaaaagccttcgcacgcgcaactccaacctatagaaacaaagagatgccctcgcggccagccgtccaggtagcaccgcagcgagacccaaaccagggggtgcctcccaatcctgtaagagaaagagcacctctaggccctcaagcaagaaatccagcaactgtaggcccaagacctagcacaccctttgcatggaaacatgagaatgagcagttttgatgaagttaggtagaccccacagagcgacacattctaggccttcaatttcacggacaacagttgtccactcttcgctagactgtaggcaacgtcgtggccatgcaactatagggccaacaactggccaaggtataatggaaaggccaacccttcgcagtttatcacgagtgatcaag

SEQ ID NO: 23102 - DNA, 482 bp, Zea Mays
ttcaggtgctgtctcatagaggatttggacctaaatggcttaactggattcggaatatccttcaatctggcacgtcatcggtcttacttaatggagtgccagggaaaccatttcattgcaagcgaggggtcaggcaaggcgatcctctctcacctttattgtttgttttggcggcagatttacttcagagtattatcaataaagcaagacaacaaaatttattccagttacccctcactgaaaattgtggctaagattttccatcccgatgacacactactgataatggaagcctgcccaaagcaactattttttctcaaagcagttctcaactcctatgcaacttcgacggggctcagtgtgaattataataaatcaagtatgtatccgatcaatgtttgccggagaagatggagattctctcaagaacgttcaactgtcagacaggatcagtgccttttacctatcttggacttcctctg

SEQ ID NO: 23103 - DNA, 683 bp, Zea Mays
gctcccacaaggtcgcgcacccccggtagagggaagacaagaccggtaacactggcccgctagggaggacaaaaggcatgaactctctagcggcaagctcatcggagtggataacaccggcgcaaatccttccgccgagcgccagcgcattccatctaagcaggcggtataccatttcgagcactcactcggtctgggcgtgctcgggatgaagtcacaaggccatggaaaactacgacaacgcgaagcagagaccttgaaggcaaacgggcgcggagcactcggaggcgaaagagcgccgcgagtgggaaagaagcaagacatggctgctactcgaggggtgaaccccattttaaaggcagatttccccactcgcgccccgaagcgtcacgggcaaggtctcccccgatgcgcaccagggttcccatcctatgacacgggggccaggcctcacatgtcatacaagctggcccgaagcgcgaagaaggcgaatcgtcgcacagggagcatgacaccgccccgcggtagcacgccccttcatcttcgccgcaaccaacggtcaagaaggcaaaccgccgcacaaggagcgtgcaaccgccctgcggatatacgccctttcatcttcgctgcaaccagcggtcaagaaggcgaaccgccgcataagaagcgtgcaactgccccac

SEQ ID NO: 23104 - DNA, 454 bp, Zea Mays
ctctggcgaaagggacggcttggacctccactgcttgcggtcgagcgctggcccatcgctcgacgggacgaggcgggcattggcctcggcgctggcaatcacccagtcgctgcaccagttttcccaccttgcgccgccaaaggtggggatgtagatgacggctggatctagcctcgtctggaagtagtaggcaccgatgtggtccctagtcttctcggacttgaccagcacgaagaagtagcggaagagggaagtacagggggccacacctacgaacatctcgcaaaggtggacgaagatggctgcctggaggatggagtggggcgtgaggtgttgaagctgaagcccgaactcctccagcagcagcaagaagaagggcgagatcggcagcgccaacccacaggagatgtaggaggtgaacagcacaaactccccgacggcgagattgccaagg

SEQ ID NO: 23105 - DNA, 527 bp, Zea Mays
aaatggcactatactaccaactccatagtactcgcagtcaaggtgaggtaccttcaagggtacgaagcaatgtacccgcgtaagcaacaaagagcatttcaaccaaagtacagcaggtaattacaaagcacaggaccggcacacagtaggatctcgacaatagaggaccccttttacctttacgcactcccccacggggatccttgtaacaagctccttccttgaactataaaaaggaagggtcggcttcaacgactaagagagacacacaagaagaacaaacacgagaaggagtaagagtccctagagcctcgaagcacttagacctagatgaccatagctcacgtcatacgatcccgacccacgcacactcacaccagagttttttgaacttttctctttctcgcctgcttgtaacctcctattgagcaacttggtgtcgatagtgcaatacacgaagactagagtagggacattcgacccgaacctgtataactcttgcgtccacctcgcacatatataatttg

SEQ ID NO: 23106 - DNA, 310 bp, Zea Mays
aggaggcaaagaggttgtaccatgtctatggtgtctgtttgaggtcatacaaagagcgattgagcttgcacaccatagtagatgaacggaatcgatgaaactatcggcttggatattgtacactgtctcggtgagtgtgccatggagaaaggcgttcttgacgtccaatttgtgcaccgccgagttctaagagagcgctagggagaggacagtctggacggtgatggacttcacgaagggctaaagatcttatcatagtgcactctaggatgttgtgaagccttgaaggacccaacatgccttatattgt

SEQ ID NO: 23107 - DNA, 705 bp, Zea Mays
tctcatagaagacgacagtgagtagcatgagaatggttccgcccacgacgaaccccatctgcgcgtcgagctcgtctatcatcccgggccggtaatcaaagctggcgatgtgcgcaaggaggtcgtgcgtattgatagccagcaacctggcgacatcagccattaagttgttagctgttaatctttctgagccaagacttcttcgagaaactaatctggaaacatcagctcacgactccgacacgaaccactgggtggaaattcatcaccgttgtggcaaagtattttctagttgagttgctcgccgtggcgcggtcgaccataccggggcggaggcacggcaaccctgtagagcgcggcgaggtggcggtgtgtgccggcacttgggacttgggagagctcttgacgggggtggaggggaggacgaagcacctaggtaacggcgtttgagggcggggagtggactatctagaaccttcacgacaaatagagatgccggataggggtagctgggggttgtacgaaaacggtcgcctaacggctccttcgtgcatcatctagaatggtccttcgcttggaggagaaagagcgtgtgttagagaccactaggatgcgtgagatgtgattatgaccgttggatttcgatcatgcggctaaaacagaaagtgctgacgtggaggcacctgtaagcagaattgctccctg

SEQ ID NO: 23108 - DNA, 679 bp, Zea Mays
gaagactctgcctcggaaggacccgcccccaaatagccccaaggcaccgagctcgggatcgggcgaggcgaaggcagaagggggcagggggtcgagtgaaccaagagaaagccactcgagtggaaaccacatccgaccaaggactgacccaccataaatgactaaccacattaactgtgcctagcaccgagccacggtagggaagttggtcctccttccactcatgacctacaaggccattgacctgcaacccactcatgacctacccagtctaggcctgagtaccctagcaatctatagggcccgcaacatgatgagccacactgagactcatagtacgaagggcaggggttggtgcgatgacgctggagctcctcgctgcccacgcataaccgaacttaaagatcctagccagagagctcatacgaccgaggtgcataacgacaagcacgtttttaccgatgtagaatgcttcgttctaccatgacgtagtaactccttccacgagaagctacctataaccgatcccctccttggtctataaaagggggaggattggctgagacaaataggggacaatgtaggcaaagccgaagagcacaccgccacgacacccaatgcttagctaggtagtgaacactaggtacatagtccttagaccttactacacataagagaa

SEQ ID NO: 23109 - DNA, 398 bp, Zea Mays
gttctaaagctttgaccatttcattctgttccatttgctgcgttaagattagtcgtggtccctttttctggagaaaatgcattatttcatactccacaaagtttttgacatacatactaaagagaaagttaatgtttagacaatgattgtactcatactagttgttttgcaactactatggggctggaggggatacatagtgctgtccttgtgtaaaagagcttaaaatgcttaaatgattcctcttggatgtcggggaaaggaaaaatctcaagcagagtggtgccaataagatactctttgttggtggtatgatatatttgcaagcttcgttagaagctttctaggatatgccatatttctaattgatgaattaaatgcagcttttgtcatttgtt

SEQ ID NO: 23110 - DNA, 1158 bp, Zea Mays
ccaaatagcacctcacacacacgcagaatctgccaacccagacaaacacagcacatggaattctttagtatttaagctatacgctaacgtcaactatgatatcattgatacgctgctgcgggtctctggaagccggatcctcccagcccatccttatcctgcgcgtatttttcctggcagcagcggcgtgccgtagcgagttccatagatcgcgggacgttgcaactacctcctcatatctcgctcgaccaccatcctcttggcttattcggatgtatatatatagcccgagcctgaagaacaagctcgttcctcgttagttgccgcacccaggaccgtaccgaagaagccgccgcctggtaggagccggtgacccggagggaaggcggccaccatcgcccttcgcgtttgccgttgaggcttgtgctgtgtattccggtaagtgctcctccgaacctcgtcgtttgaagtccgcagtgtggttgaggatggcgccgggacgcgtgctggcttgtcgtggcgtcgtcgggcgggttggagtctttgccaccgaggcccgggcttctaggattttccttgtcgcgatcacggaccgccgtattgccgccacggtgcgtgactggggctgtcgccctctcgactcaaggtatgagaaccaccatcacgttcgccctctctctagcttcgcgtagcaccgaccgttcgtgtatatgtgcgctagatcatcgtcggatcgcacgccggcatgttgtccggcgagggcgcaggtgccctgaccggtttcggacgcggggtaggagaaggacatcttgccgtgcgatcggattcgtgcggctgtgatttggttgaggttgtgattcggccaaatccgatatccgtcgttggatcctttatcaacatgtaggatcagatcgtgttcaaaagtgacctgggccgttgatctattatctaatagccctcgttgctcaccagtacataacgcgcccagaaccaatcctcgccgctagatctaatccgggcggctcagatgagcctataccccccccccccttcggcccaacctttttgctaaagtgcccctgatctttttcgtatttaacccgccatcctgcgtggggtgaatatgagtcttgggaaaatttatgccgagcccctgca

SEQ ID NO: 23111 - DNA, 677 bp, Zea Mays
cgcctggatcgactcgggctcggtcacagctaagctccacatacccacttgctcgtcgatcggtcgagatagacctcgccgccgttggccgacttaccactgtgcgcacgtgctaaagcactgaaccacgtcgcagtgaatctagccatgcattcccggtgatccctggagagccgccacggtgaaagccactaatctcgagcgccagtgactcctttcttctccgaccgccaccgcgcccaacccaaattcatgcgccaccacccccggagtctataaattgagcgtatccgcggctccgttaggtaattacgcatccattgcaccagtccttgccccggattatccaccagagcctcccaatttctctcttcccccaatttggttctccgcgccgtcgtgtgttggctcaccatggtaagcgtactgcaggtctgttcatgctccctgccctcttgtttctgcacccatacctgcccctgatactcctcgaccaactcgattgagttaagctgctttagatcaccgggaacgcattagaatgtctattgatcatacagtcaccatagacagagtgagttagtggtccgaaagtgaaattgagtgaggggaaatgattaggagatatccaatttggtgtctgtcgcatgggagcaccagctgttgcgagatccgac

SEQ ID NO: 23112 - DNA, 558 bp, Zea Mays
tggtgcgaccaaactgagtggaaacctaagcgaacaagtgcagaagagtggaaaaggtatcagactacgaacgtaagggaagagttctcgaagaatgagccaatcatcaagaaccaccagataatatttgtaactcaaaacactgataacaagagaggtccacaaatcatagtgtatgggatcaaaaattatcacagcctgagaggaggagctagtgaagggagtcgaacatgacgattgagctgacaggcatggcatagatgcttagatgtacccctagttcaagaagtgactgaaatatacataagttggacagcatggcagccggcagggctaggatgactgagccggcgatgccatgtgctagaggtagtggaagtaatcggtgcgtgtggttgcggcgatgacgaaggcgatgataaagcagaagtagtagatggagaagtagacacatgcaaccgtagtgtgtacaggggctagagctatcacattgggtgagatggctctaggtagcgagaaccttcacggataagccaaaaggatcaaactcaatagcgc

SEQ ID NO: 23113 - DNA, 823 bp, Zea Mays
gaattcagactcacattgtgattgagcaaaccttgaactgggattcgaccatgatccaataggaatttgactagagatgctatagtaaaaatgaagatagattataggtctataactttgatgcagatgaattatgaggttatcacatagaatttggagaaaatcagccctgattttgctctgtcagtcgttctgaaggaactatgtgatggtacagtatcctgatcggattgccagctcagtaagctcgccgccggcgatccacgtgtccagatttgcgctggtcgccgtgattcgtgcttggcacgcagaggatatccctgagaaggtaaaagatctcacgggggaagggatttgatcgcggattgaagtttatcaccgtggctgtagccgttgcgacgtggccggaccgccagcgtcgccgtggaagctccggtgacctcggttgtgccacgctatagcttgtactgtgtggtagtaatcgtggcaccctttggagtataatccttgagtcgttgcaccggtgaacgccatggtcacagccacccgtgttcttccctatctccggccgccagcacgccgtgaccaaattgagagccaccgaccccgaatcctataaattgagcacgccctcggctccgccatgtagtcaagcactcaacgcacccacccgtgcctccaattagtcaccagagaactccaatttgggattttccccaaatcggtcaagaacaccgcagaagtgagctcaccgtggccagctctccactggtccgatcgtgttcccctcgctcttgttctagcattcctgtgtgttcttaaa

SEQ ID NO: 23114 - DNA, 312 bp, Zea Mays
caagtttgctgcagacggattggcatgttctggcacaaaaatccgagatctaggcgttgcaagttgctctatcaggcgtttgaagggagtctgattgtacagtgaactaaacatgatcccaggttcagccccctcatcgccggcggcctttgcgcccggattcgcgccggccgtcgcgattcgtgcctcgggcgagtggatttcgcttagccgtgaaaaaatctcgccgcggatgggtttgggttactgtggcctcgctgtccctcgaccacttgcaccggcgacgtggccttgcggccgtcaccggagttt

SEQ ID NO: 23115 - DNA, 375 bp, Zea Mays
ctcggtatttatgctagaactggacaaatttgtggtggttttcattgatgatattctggtatattcaagaaatgaagatgagcatgctatgcacttgcatatagtacttcagcgactgcgcgatcatcacttgtatgccaaactgtccaaatgtgatttctggctaagggagatcaaattcttgggtcacaccatttctcaggatgggatatcagttgatcctgagaaagtacaagaagtgatggattggaagcctcctaccaccgtgcgatagattcggagttttctgggattggcaggatactatcggcgattcattccggatttctccaggattgctaaaccaatgacagaattgttgaagaaaggagtgaa

SEQ ID NO: 23116 - DNA, 607 bp, Zea Mays
gggttctcagcctctaaagcagacatctcaccttttctcttcaacaaggatggcattcagatttatttcctcatttatgttgatgatatcctcatcattagttcttctctcgctgccactgatcggttacttggatagctatgagatgattttgcggtcaaggacctagggccactcagatacttcttggggattgaagtgtgtcatcaccctgctgggctcactttgactcagcggaagtacatacatgatctcttattacgcacaaacatgctctcagctagtggcgttaccaccctcatggtaccgaccgacaagattgcatccatggatggtgcttgtttatctctagatgatgccaccaaatatcgaagtattgtgggcggcctccaatatctatctttgactcgccccgatatttccttttctgttaatcgggtgtgtcaatatatgtaaacacccactacagttcattgggctgcagtgaaacgtattcttcgctatattcgccacacaattgatcttggtcttcgctttacaaagtccagctccatgcttctcagtgccttctcggacgctgactgggctggcaatatggatgatcggc

SEQ ID NO: 23117 - DNA, 422 bp, Zea Mays
ggagtgtttgggttcattcatatctctcactctctatttcacttctaccactttctatttcactcctctcgatctccttttacgccaccaaaccactcttgccacgccttccttacgctttgacattgagatgattgaagatgaggtactcgatgtgttgcataaaactatgatggatgcagcagtgaagcttgccttcggatcttcaacgagagggagaaggactacatcaaccacgatcatgaatcctctcacaatcggctaatgcgagactaatttaaagacttatgtgtctacccttcgctcttctttcatcataggtactctatgtggaggagtctctttcttcaaatcttgaagaggttcggtaagtattcctcctatttcactcttagaattgatgcactcaaccacaactgttt

SEQ ID NO: 23118 - DNA, 402 bp, Zea Mays
ttggggttgtgcgtaggagcggtgttgagtattagcaaatgttatgtgaatgtttgtactaagtttaatgcccacaataggtggtggggcttcggatcgtaactagtgtcattccgaattctcagcgaaggcaagtaaaatgcagtggtggtttgctatcgcttgattcgtatcttattctttgtcattgagtattcataagtattgcatttgttaaacatggaattctatgatgatgttttatttgattgaaagtattgatggtatatgatggtataagttaataatgttgatgaacatgatttgagaatggtatatgtggttgactcacgtcttcgaggaagttgaagtttctattatgaagcatgttatatgtagtgaagtgttgttggcatgtcttgc

SEQ ID NO: 23119 - DNA, 378 bp, Zea Mays
ggccagggggcgtcagcgacctgaggcaggactgactggtcgagcccagctgccggatgcgggtgaggggctgaatccgagcggctggatctgaatctgacggttgaggttgggttgggctaaataaaagttaggtcgttagatcctagatggatgcctaagatctgatggcgagctcgagatgggttgctgaccggttcacggtggcgctgcccgactccacgacgaagtttcgctggaggcggcgtatggccacggcgtgggtctagggcactaggaaagggctcagacgggatcgtggcgacacgacggactcagtcgtgagcatgacaccagcgcagaccgcggcagagcggcccaacggcggcgcaaacttcc

SEQ ID NO: 23120 - DNA, 355 bp, Zea Mays
taatagatggaatatcatcgactgacctggcatcacttatcgtggggagctgttgcagcacggatgacatgtaatcggcgtctatttctctctcctttacgaccttctggtggcgatctaccttgaagtgcgagaggtaccactttttcgccaccttgagcatctgatcttgttgtcgttggatctcctcatccatcttcttcatgtcatcttttaagttttcatgctctgcggccgataaattagtcagccttgtgtcgctgtttggagaagcactgttgagatctttaggatcggccatgtaagcctgattttgtagatctgcaacctcggtccccagcagagtcgccaaaaa

SEQ ID NO: 23121 - DNA, 464 bp, Zea Mays
agtaaacaatccgagtggacggcgggttttatttttaagaaagccaggggctcttatgcataataggcgggccaaggggtatcggccaacttgagtcgtccgatcagaattgagggcccagattagaatcatgctttaagtgaaccggagcatgatgtgggccgcccgatcacgatccaacgcaccggatgagacgtcgaaccggtacgccgtcctaaccattagatcgaggatcgatggctaggatctgacgaacgaaagggtatgtggtggcgtgatctcgaccatccacgacccatccaacggccaaaagatcatcttccacctcccggttgcgacagggagagggcaagtggagcaccaccggcgagcaggcgaccccacaccccggtaacctaatcgcgatacggttcgatcccatacaaagaggagaaaaatgcgcatcgatctaggtacaactcacc

SEQ ID NO: 23122 - DNA, 1244 bp, Zea Mays
gtttcagccatcacgtcctgagaagaatggactaaaaccttaggcccttgggggctcgggtcgcttccacacttgagttctttcgtccaccaccatccacaagaatgacctaaaaatccgggaggggggggggcagggcactcctgacagttggacacttgcgcattctcttggtcattcggggacctctagcggcccttcgatctcaaaggtcttcgcccttagataattcaaatggccggccaaggctccatggggcctggaaccttctgaggggacaaagggactcctacagcgactatggacttgacaacctccaaatgcacaatgacttagacaatgagataagactttatgatgacttatcgtctgagataaggctttatgatgacttatcaaggtctactcctgatgactttatgatgacttgagataaggctttcatacaatacattaaatgtgatgtgcaaaattatggtctgataggcattgttgccatgacttagacaatagtatactcaagaccactatttgatacatgctatcgaccctctagccacacattggtgcactagtgtaacaactagtattataaagtacatattgctacatcagttaccaattacaccgtactcgacgacatggactccggtgtccgttgatacgccataacatacctgcccctgcgtcaaatacgtttgccctacagcaggacattcttgacactattgcatgaccgaaggcatggcaccatgtacaactccaggataagatcggggttgttgggccacaactgaccacacaatccagccgatatgtaatcctttctcctcccttggtctataggggggagtagggcaacgagaaagcgattcagatttgaagggttcggcttcatagaaagggatattagaaagtgatccagatccagattcaattagggttgggtttgattcagactttagaatccctaaccttctaagggcagacataaaggcgaactagtgatcaattgatacttgagattgtaaatcttctttgcttttgtgttcatcaatctattacatacaagaggatgtatgatattacacacaacgcatctcgaacctttttaaactgccctcatgatggtacttggatgcacccaggttcaacgcacaactaacctatgtcctcgttctatccgttatatttttcatcttttgggtacctcccgtacctcggtgttgtaccatgacaacaat

SEQ ID NO: 23123 - DNA, 694 bp, Zea Mays
gtggtattaagtcctttattcctcttttgaggactctatttttgcttgtttgcgtcgagttattgtccatgtctttagggactaagatttgtccatttaaaatgaccttgttttatctaatcactgtattttagttgtttgggtgagttcttagttttcctttcttttgatccatctctttatgttggtgttaacaatgcactcattaattgggagattgtgaacatatggttgatatgtgcttatggtgttcattgtgatgagtgattgtcaaggagatgataggatttggttgcatttgagactaacattagtgtgagtgagttggtgttgtgcaacatatttcttgtcttatggtgcgtaggtgtggagcttggcgatcgacagtaatgaagatcaagtggtttcatgctaatgggctagacaaatgacatgaggcttagactgagggaccaaggaggttagatgattgatcatgaatggttgacacttagggacatcaacaagtgcaagtgtgcatggggtagactgattgaccatgttaaggcattggttgaccaagtcaagcaaaagcactagatgacttggtaattgggcagttgtgagttgatggtgtggcacatgttgcgatcatggaacagttatagtggatacgcttctttagagctattcggtgatttgggcctcaaaacca

SEQ ID NO: 23124 - DNA, 1042 bp, Zea Mays
ctgttaagattatcttgattaaattccttgtgtggtgcttgatcgtagctttagtaattacaatgttgtccttttttattttgtttatatctagctgcacgagctgcactttgcttctgaacgatcctgtttgcctgcaaaggacactgtacacttttctgccctgttggaaaaggtatgtttcccctctactcgtttaatctgcaatggttgtatgatccattctgtaattgtctgccttggagtaacatacacacagattatagcttgttaacataaatctgaactttttttaatacggaactgttttcttgtcccattccctttctttaaattacttatgtacaaatgtcattgccacaaatgtgattccctctctctaaagccagctaatcagaactactgttaataatatccattaatagaattcatacatcttatggttaggacacttaagcaacatatattgttctagccctaatatgctacaatcagtgataattaaattctgcaatacataaccctttgtatttgttagctgctaacttctgagtcctctaaattgtaatttgacataatcagtaaatggttgataattaaggacattaaatacaataccagacttgtgtgtatttggggtattctttgggctgtataaagtttatagcatgcttccggtatatagaggtcgatgctaattcttagataaacaaatgatagttgggaggcttagctggtagcatgctttttgtatgttgcacttgcactcgcccacaattctttctctcaccctcttctcttcatgcttcttttttggatctaccatttagcgcaagcgaacacccttaagggaaagtattgttgcttatatctctttttctaaacttctttagtgctttccttttagtttgagtcctgcttgttcaaccacacaagatgagtaaactatgcgccagctcatgtccaggaaactaatctccatcaacaacttcgtatccatcaacaatttcgtatccatcaacaacttcctcttacaatgtca

SEQ ID NO: 23125 - DNA, 1204 bp, Zea Mays
cttgccatagcgctccatgacctgacgactttggtcctagtttcgaaaaagttgtctggcatatcgtgaatccatctatcattggtgttgtccatgcattccacgctggcaacattaaccttgacaacatcaatagatcttacatcaccctcctgccaaaaaacatgataccatcgtagttggcgactttcgctccatctacctccaaaactacaacataaaactcctctccaaaatccttactatgtgcctcaaatctgtcatgggatccctcatcaacctagaccaatctggtttccttaaagggagatctatctcagaaaacttcatctatgcccttgcactaatccaatgttgtcacaaacggaaaaccccaacccttgtcctcaaacttgatttcgccacaacctttgacacagtcgactagggcaacttacttaagatcgtgttcacccacgggttcagcgactcttggaggatgtgggttgaaaaaaatcatggcctcctcaacaacttctaccctcattaatcaggcccagggccctggttctcctgcaaacgtgggttgcgccaaggtgacacgttgtcctctaccttttcatcctcattgctaatttactgtaagctataatcagtcacgacaccttcatcagacaccctctctttgccaaccaaacttgcactgtcctgcaatacgcggacgacactctcatcctcctcaaaggccaacgagacgatgcctcccgcctaaaatcttcccttgacctgttcagtagcttgacaggactaaagatcaatttcaacaagagtgttactgtccccatgcatatgagcgacaatcacatccaacaaatcacctcctatgttggctgccgactgggagatttcccacaaacaacctaccttggcctctttctctcccctaccaaacttcgcatccaacttttctcccccaccatcgcaaaaatagatcaataccttgcagggtggcaatcgtcccttcaaaacccaatgggccacctaatactcatcaactcagtccttgacagtcacctaaactacatcatgagcgttgtccaactccccaaaggtgcaggccataaactcaatcaacgtcgtcgcggcttcctctggttcagcaaagatgttgcccctggagctcgatgtctcgtcccctgggacacggtgcttggaagcaagtctg

SEQ ID NO: 23126 - DNA, 425 bp, Zea Mays
cgaagattctattgtcttttccatggcgaggactcagcacacccaacctgggattgccctgaaaccaaggcaacaaaatatcgaatggctagaaaccaaccgactgacaaccaaagagatgtagcccgcacctaccatccccatcagtacaaccagcaacaattccacaatgagcatttccatcctcaccaacaaaaccacaatatataccaacaacaccaagaaatcccagctctacctcctccaccaccatagcatccaaatcaatcattaccaccaccacccccaccgaagcaagaggacttcatcgatcaaccctcgaggggtcatccacatgattaccggaggatccagctccgaatttgacacaaatcggcagaagagagaccactatagaagggtcaatcatgtagccctcaccgggc

SEQ ID NO: 23127 - DNA, 515 bp, Zea Mays
cagactggacgatctctctgaaagggcgaaaagaatctgagcggggtgtcggccacttcttcttcatagatctgacacagggccctcaatgccttgcgagcgacgacttggcaggtgtctttgaatctatgcccagcagcagtgacactccattccacatggtgcggactggatccaatgtatacaggcacgacacacttctccgtgccatgctcgatgaattcacgaccatcatactctggctggctcctgattccgaggcggaccgtgcatgctctcagcaacttggggaaaccatcttcattctggcaaaaactgatttggcaacggacctccatctgacttctgagagaaggaaagggggaaagcatttttgaaatgaagggatgagagcaagaaatttttttaagaaaatagttttgactcaaaaacttttgatcaggctaagggttacgtcctgcagccaacctaacagctctgataccacctgaagtgccccaatcctctgggactca

SEQ ID NO: 23128 - DNA, 331 bp, Zea Mays
ctaccagtagatgttaacttcatggactgcaaacctgcattcaattggcattcatatctgactatccgacattgccgattagtttaggagtactctgtactttcagtggcatgttcgtgctgaatttaaaatgtctggcattgtgctgattgcacatagctacggattcagcatgaggatttcaatttgcatagcaaatggaggagcttgtcactgacaattcgcttgtgttctataatagtaggttgagttgttttttgagagacatagttcaacaagatgactgatttctgtgcaaatttgacatgatcgactttcttcagtgtgctgc

SEQ ID NO: 23129 - DNA, 713 bp, Zea Mays
cgtgctctggttctagagtcacagccccgtgaagcatgggtggcaatgggggaggcacctctagtggatcgccgatgaacttcttaagaagcccaacatggaagacatcatgcagcttggaacgcgagggcacggcgaggcggacaacagcctcgttgatgcactcggtgatgcggtacggcccgacgaaatgcggcttgagcttgcccttggacagctacggtagggaagcggtagtgcgctatcaaaggcgtagaagcacccagttgcccacagcataggatactaggcagtgcatctggtcatagaacttcttttggacgtcttgagcttgcaccagccgatagctgacatccacgaggagctcttcctgagcagccatggtcttggccacagcagccacccgtgtctcccctggttcgtaggaccagatggatggaggatcccggccatacaccacctttaagagggtgtcctagagcgacaactggtatgccatgttgtagacgtactctgcccatgacagccaacgcagccagtgcttgggccagtcccccgtgaagcaccggtggtacatgacgatgactttgttggctgcctccatttggccgcccgactgggggtggaaggcgtacatcatctatagtttggccccggatagcctcatcagctcttgccaaaatgtcgaggtgaacacgtggtccctgtccgac

SEQ ID NO: 23130 - DNA, 521 bp, Zea Mays
tccggaggtgcggggaggtgggtctcaatcccttctccaccggcttctccttcagctcctaggggaaaccttgctcccatcccggaggcggtaggcgtggttttatccgaagccatctgccagggggagagaattactactatgcatatgccaatttttttcttcaatcatgttattttattcatcacacaagttcattacaagcatatagttaccacaagtcacactacacgcgagtgctttctaaggtgcttccgaactccctttctaaagtgtccccaaattccttgagaaggtcgtcaaggctagctagggacatatcctcgacgtcggacaggttctctatcctggagggaggcagtgctggtggggcttcctttttccgctcagtctggcatgcttggctcttggtcctcttccggatcttcttagtgggggcgagcttctttaacttcttgtcgtaatccatcttcagggttcggtaggcttcacgagtgttggcctcttcaccttctgctatt

SEQ ID NO: 23131 - DNA, 435 bp, Zea Mays
gcctcaaattcataaaagggcagggactctggcgcaaataaatcccagacacaggcgtccctgacctaggactgcgggttgaattccaatttactcaggggctcttttgaaagaaacgcacgcgaaagggtatgagtcaatctcggccgctcgatccagaaccgagggcccagattagatgtacccaaaacgaatcggcatgcgcgattcagtgcctcagatcagagatcaacggctccaattctgacttactgagatcaacactcaacccttggattctagatttacggctatggccacttagaccgaagaggtatcctgcgctcaatcgtgaccgttgatctacatctgtgcggtagggaaataccaagggcgcgatctgatcctggccgtacaagtcggatccaatggccccgagcctatcgactaccaccc

SEQ ID NO: 23132 - DNA, 691 bp, Zea Mays
gagagattgtagacatattcacgataagcaaccgcaaattggtggagttggggttgtagttactgtgccaggttggcgtggtggtcccatatccataaccataataagggcatgcccgcacataggtgactagaggagtcaagaggttctcggttgatgatatcatcaaagaaacaccatgctcgctcatggcctcccgtgacagacatatgaagaaacagattgaggtggacatgggaatggcaatcctaggccacgtatacgagaacaatcctatcccatatattgcagggtttcgatgacatgggtccacccaaatcatctaaaggatgacttcgccatgcctactctaggtgggatcacattacaaggagtggctagcaacaaggaagtactttggacttaaagcgacatcatcttggagaagacaccacaaccctcgccatttaacatcgaccacaacgacgacgataatgacactgacaatcttctgttcgagagcaatccatacgaagatacacaaccaccaccatccaccacactcacacatatatggagatactagcagagtttttgactcttcagtcgcacagcaaaattttatcaccggttgaatggcccatttcggatgattgccacgaaaacaatgagaacgacaagtatgttgaccttgggcaagcttgtagaggac

SEQ ID NO: 23133 - DNA, 627 bp, Zea Mays
cgtacctcggcttcagcatcgatctgtgcctggaggtcgcctgcacaacagacagtggtaagagccctcgtatctgtctagccttcgtcttcctcgcgtgtagctcgacgagaagcattgttggcggtcccctgctcaggtctggaggggggctgcggccacggcgtcgccggggtatggtctgcggcatggagaggtgggaggaagacaaccggtgaccgtcgatgcgtaatgggcggcctggattaattggattgtaccacttcgattggagcaatccaagccgttggattggctaaggaggggtgggattagatccgggttctggacccttggattcagatcgtgtggtccatgtcgcgtaacggttcacttaaagatgaatctaatctgggccgttcgtctgtgatccgatagatgtgattcatggataccccttcggccgtgcgaaggttgcaaaaaggcccttgacctttgtctaaactaacccgccatcctcacatgtataaagataattacacttagaccctgtttttcacaatttagcccctgaactctcgggattttgtttcctcggtccgagcactattaaaataaatcccagaaattgtttctaggtataaaaat

SEQ ID NO: 23134 - DNA, 481 bp, Zea Mays
acgcttttgagattgcttgtgttgaatatctttcaattaatgattcatgacttccaagatcataatcatgcttgctcaatcatgactgtgtgttttataagttatatctcttgaatcattcatgggtagcttttcatttgatatatctaccatgattaactctcttggtgtatgtggctaaacctgtatctttttgtaaatcatgttgtgtggtttttaatgattatgtattaacctatgtgcaagcatgatagttttgtttagtccatgttcacatgattactttgtcttggtactctgtgtataccaaaacaagaaatccatgttgtgcctctaatgcaccctctcgagctatgaggtgcatgagcaaaaggagccctcaattggtgacaacatgtgctctcactccacactacctaaaagaatggatctcatggcattcaggtaaaaggcaaaggtatggagaatggaactatgcaat

SEQ ID NO: 23135 - DNA, 353 bp, Zea Mays
cttagttctaggtttgataggtcatgagtgggccgcatgcctaggggtcgataggccatgagtggaaggaggattgattctcccgttgtggctcgatgctcggcgcagttaatgtggtcattcaattatggtgggtcagtcctgggtcaggcacaaatccactcgagtgtcttcctcttggttcaccctaccccgcttctgacttcgcctcgcatgatccaggggtgggtccttctagggtggacctttccctcgtcctcctactaacttgtggacctaggggcttggggatatttccccgatagtttcccttgagtccccaagggatagtgtctccccttggtggcttcccc

SEQ ID NO: 23136 - DNA, 485 bp, Zea Mays
atcaaaatcagaagttggccactcatttgtctcttattacattacattggagtgtgtgcatttagataagaacaaaccaaagggagagagctattttttcatttgaacaacataacatactgactatccaacaagcaattcagacgactccacctgcaaggaaatgcaagtattaaacgctagaatttctccacgcatattaataatttcatatcaaacataaacatgctagaccatattggtattttcgagttaaatcacatatttgctcatagcccaagattggtagggaaatgacaaacatgcctaataatctaaaaagaaagcagttcatgaaagaattgtgctttgcttgcaactaaaataggaaaataggaaataaaccataagggaaaataggaaatgctcaaataaaccataagcagtacatcattattatgatgttcaaatagatttttaagagaaaataggaaatgtaatgctca

SEQ ID NO: 23137 - DNA, 768 bp, Zea Mays
tccttgcgcctttaaataccggctgaggtgctctgcgattcaacaatcccgtatggcatcgaggctgggagatcgtagcatagagctgagcatcaaaaccaaaggaagaggacggagagagatcgagagagagaatggccgccaccgacgaaccgtggtctggctgccgtgatgactccatggtggttcccggggacctcgcaaggcttcgggagtccgctcggcgcccaatcaaactggaagcatgggcatggcgcgtaccttgctagacgacacattccatggcggatctgtactgcgctgctgtcgactccaccggccggtgagtctttacacccataaaattcgcctccatatattctcatcgtgggggccgttgcatgggagaattgggggctgtgggcgagcggggctcaactaaattctcgccggagcgctgtcgcttccgtggaactgccctcttcgtagacatcaccccctacgtctgcattgccggtaagaagaagtacctcctggagttcgcttaactcccctcgtggatccgtgcgtgtccactctagagctggggcaccttggcgccgggtcgatggacgccggtgtgttcaccgccgctgggcactcggtaccgcctcatgcggccactgggaggaagaagagtccctggtcgtttgtcttattttgaacggctacgattaaatcatgtcttcactgaaccctgaccgtagatccgtgatcgaaggaacgttatcgcgggtcggttcgataggg

SEQ ID NO: 23138 - DNA, 476 bp, Zea Mays
aaaagcttcgacaaagtaaagaaaaattttcaacttcattcaaaaaaacaagaaattcaatcatcagatggccagagtgtgttccacagctagagttacacgcgacggagaggaagccgaaggtgctgaaactgccccaatctctgaagtgatgaagcgctcagggctggtagcatcggaggatgcacctgccgctgaagcagagcaggctgatgttgaggagactgagcctgaagatgattacagcgcggtgccaagtaaacctagccacctggatttcgagaaatccaccatctccgaagatgatttgcctaagttgctgaatttgggctattttagtgaagcgaagaaagggctgcttcattttggtggggaagagactactccgaagccaggaaaggatgaagtagtggtcttcaaaagtttctttaaagctggtttaagatttcctttgaacaagatgattgctgatgtat

SEQ ID NO: 23139 - DNA, 382 bp, Zea Mays
gtgtaattgttttatgcatgtggtcggtgattgggatagtcgaggcgaatggggagtatgattagtcttgttggagttactatgatgttgatgccttgtgcgtaaagtgaggacacatatgtgtgtgccgtggtgtattagagtagtggtggcgtaagatatttgtttgaggtgtgcgggtatatgccgtaatatggttatactcacggtgaggaaagatgtatgtattgtgtaacacgacgcttaggtcgctattatataatcatgtgaaggatgctcaggaaggtcgtgtgattgaggagtcatgtaatggcaagcgagaagtaagttgagtttttcaaacggttagtggatagtgtccgtcggtgttgtcatgtttttt

SEQ ID NO: 23140 - DNA, 554 bp, Zea Mays
aactatagacaaccaatactacacacaattttccccgcacagaagcttataagcaggcgtgtgcacgttttgttagccatgtggtgctatatggtgtgaagacaaagccaaacacgtcttgggtggcccatatctcctttttgtggcccatacttccttcccagcccagcgagccactccctgctgccaccgccaaacgaaccagcgaaccccccccccctcgtgttcctcctcaagcttggtcttctcagagcaactgccctgctattcctctggcacatagcacgctccacgacctccacttctcccagttgagggcgcaataatgaagataaatactgaccatcctgcagttcatcgacgtcgcgcagaccgactcctttgcctcccgccatctccaaaatttgtggcggagcgctcgccaaagccagagctgcatggttcctcgccgcctcgaccacccacaccttccttcatcggcgcgacggcttcatagccttctccaaaatccgtggcagagcgctcgccgatgccagagccgcagtggttcctca

SEQ ID NO: 23141 - DNA, 640 bp, Zea Mays
tccactaaaggagcacagcttataagctggtactgcaattgttggctgcccagtatggtactataatttacaagccaacaaccgatgacgacaggccgcgtgggctgtgttatttggtgcggcccacgtagcatgcccagcacgtcgcaagctctcgggccaacctggcgttcgggtccccactccctctatctctgattctctgcccagctttctcctcccttcctctatcgcttcgcccaccccacccaaccgccccgtgacgcctgcccacaccctacaccaccgaccaccgtctgcgcttcgcccccaccccgcggccgaccatcgccatgcgcatccaccactacgtcgcgtgcctcctctcctccaccaccgttgccccctcctcgccgtcgcgacttcccattgcgtcctggctccacactgatgatgacgatgcaaactgcgccttctgcaagctcagccgctcggccccataggtaacccgatccccttctcctaccccctcctctatcgatgtattattcgccctcatcgagccatcgccgtgaaggggcgcttttacttctttagggcggggcgggggttgtaacactgggggtgtcccctagaatcgctagagggagcaccacttccc

SEQ ID NO: 23142 - DNA, 689 bp, Zea Mays
atctgggagaaaaataggaactcacgctcgtcgccttcctccaagcaaatgccaacgtcttcgcttgggagccgtcgcaaatgccggggatccccagggaggtgatcgagcaccagctaaaggtttacccggacgccaagccagtaagccagaagccacgaagacagtccgtggaacggcaggacttcatccgagaggaagtccggaagctgttgcacgctggctttattgaagaggttcatcacccggtgtggctggccaacccaattgtcatgccgaaagccaacagaaagcttcggatgtgcatcgactacagcagcatgaataaggtgtgccctaaggactcgtatccactatcgcgtatagatcagattgtggactctacttcggggtgcgacctcttatccttcttggacgcttactctggtttccaccaaatccgaatggctaaggaggataggaagcataccgcttttgtaacagtagatggactatactgttatgttgtaatgccctatggtttgaggaatgccttatcaacctttgtacggtcaatgagcaataccttcggggatctgatccgggataaggtggaaatttacatcgatgacatcgtggtcaagactagggaaaggtcggctatagtggaagacctggccctggttttcggcaagctacgggcaacccgc

SEQ ID NO: 23143 - DNA, 498 bp, Zea Mays
gtgacaacgatgatgtcgaagatcggccatggaggccaagtcatgttatgttcagaaaatccactgttaagaaaggacagattgaggcaatgaaggggaaatatttccgtgacacaacaatagtgagggccgaaggagagaacattgttcctcttcctgaagctgatgaagtggtagttttcaagggctttatgaaggctggattttggtttcctttgcataagatgctggtcaaagtgcttaaaaggttcgagatataccttcatcatcttacccctaaagctttaattaaaattagggtttttatttaggcaatgaggagccaagggctggtaccagacgtcgacaacttctacaatatacacgaattatcttaccatacgaaggcgatggggaaagaacaatatcataacaactttggcagttattccttcgtataccgctctgatgcgaaacaccttgtgccaatattttggaagaagtggctaggatcctagg

SEQ ID NO: 23144 - DNA, 983 bp, Zea Mays
ccagtgtcctaactcggttgacacctaatttccaatcgtggcgatcccaatctatccgtcaattgcacgaatccggcccagagttcttctgcccacgatgacggcgagacccaagagaaaattgaggtgttcacgatgattcagtgcggtccaattcaatcaaacgggcctacgagcaaaaggagactcgagggatgctagaacacgaagcaaagaagtatgaattgacctgtggatggctggccacgatgagatgctaacggcggcgtggagaaccgatttgggggaaatcccaaattagggcgctgtggtggatgatcggaggcgagggctggtgtcctgggttcgtaacaacatggcgaagtagactggggcatcaatttatagaagctttaagcggcgactccgaatttgggaggagagtggagcttttctccctggtgagacaatttccgaagcccgtcgtggagcgcatgcgttcaccgtgcgatagtcgctatctaggggatgccatgatcacggcaatgcggtgaatcaggtgactacatgtcccttgctacgatcacggcgagcaccagcggcgatattttaccgaccgcgtgggcaagtaggtacgacaaggtcggcctgatccattcccgcttcggatcttttaccccctccgcgactatcacctcgccagagagcacgaatcgtagcaccgacgcggatcacgacgcgagggtcaccgacggcgaagtgcactgcatcactgatattttcagacactgtaccatcaggatcttcttcagggtgcctgacagggcacattgaagggcgtttttcttgaatttttacgtgacaacctgctaatgcaactacatcaaatttgttgtccaatgtaccagctttaatcttgttattaagaccttgatcatacattcactgaatcccccgcaaatcggtctcaaagttcatccaaacactgatagtcaagattcagt

SEQ ID NO: 23145 - DNA, 589 bp, Zea Mays
cccttttctaacagctcatctatctgcttcttgagttccaccaattctggtccagacactcgataggctcttttagaaatgggggcggtaccagggataagctctatggcaaattcgacctttctctcgggtagcatgcctgttaattcttcgggaaacacatctggaaagtccgacacaaccctgatagcctcaagcgggttggcctccttgctatcaaccgaaatctggtgacaatctcctttcgttgttttaggcatccttagccactacctcctctccaagcagggacttcagtattacggtcctcttgtcacagctaacattcgcttcatatttcattaaccaattcatccctaggatgacatctatcccaggggtgtctattactattaggtcgctggggaaccctatcccccttatttccacccttatatttgagcatattttatctgcttgcactttaccactgaccgaattaatcatcatgggcggcatcattgcctctactgagatgttatgcatttctacccatgttgcagtgacaaatgaatgagttgcaccagtatcaaacaacacttttgctgga

SEQ ID NO: 23146 - DNA, 636 bp, Zea Mays
ttgagttcatagacggatctctttgacaaactaagcacgtaccttacgtttgaaccaggaaatgaaatcgggcaacccatttctcgcaccctttctaagaagagtgtcatattcctgtggagtggggtcccttgatcgacaccagaattcatgaagaaattgttccatgtatggcgtcacctcttcaaggttggtcaatacatatagcatgatatgccgccactcttcatgtgtcagggtcttggtggtcgagccacttgcgcttccgagttggcctcgaaatatgctaaggttcgattcattgtcgccatcattgtaacgaggggtggattatgcacgctcgacagtttgtcaccataataagttgttgtgaagtttgacacctcctctagaatgtatgcctctgcaatggaagcctcgattttgcatttatttatacatttcttttgaatagtctttagacatctctcgattggataacaccaacgtccctgcacgggcccccccattcgtgcctcataggggagatgaagaatgaaatgttgcattggattgaagaagtcgggtggaaatatcttctcaagcttacacagtaacacgagtgccaatctttccaagtctgcaaccacggtccga

SEQ ID NO: 23147 - DNA, 714 bp, Zea Mays
tggatccaccctgtgtcgtgaaaaaggggtgtctgcactcctttatccggtaaatcctctcccctttagttcaccgcacaatctgggttgttgcgcacctcgtggtgatttgtttgggctgccaggcatcgagtattgctcatcgacggtcatggcaacatcgtagtgtcgtagagaccgtggttagcagtctgggcatgatgatcagggtggagaagtaggctagcagggtcgtaatagagagggctttgtgtagaatcagtcgtatcaagtattagagcctagggcgcggagcatacgacctctagccatggcgcgccgccgcgaaatcgtctctgggtcggtcaccaccgcatctggcttccagggttgaagacaaggcacgtccattgatttgatctgaacggctgggatcaaaccgtagatatacccttttagcactttaaatctaggccgcaagtcgtgcatccgagggctgggagtgggcactgtcgtggttggatcttgggcgttggcttcggatccaacggtcacgtttgtataccggttcacataatgcgccatctaatcgcgaccctcagagtaagatctagcggctcagattcaccgataccccttcgtttggcttatttactaaagagaccccgaagaaatcacaaatcaacccgccatccagagaaccctattcactgagtctcggtaatcttgcgccag

SEQ ID NO: 23148 - DNA, 488 bp, Zea Mays
tctttgaccaaccgattgttggcaagacgcaagggcaccatatcaaacattgcaggagttatgtccttaatacatctcccatccaaccatctgtccttccaaaaaagggtattagctccatcaccgagcttagtaataacggttgcagcaatcagattttgtaccaccttacaaacatgagtggggaagtccgcccaaggcctactgggatctgttttctgcagccatggccaacaagctctcagagcccaacagaggctctttaactcattaatcccaagaccacccagctccttgggacgggtaaccttaggccaagccaagaggcaatgaccaccacagaactctttcctgcccctctagaggaagcccttcctcagtttatcgattgctttgatggcccatacaggaaggtcaagtgctaaagctgcataaatcatctttgccgtcatgacgaactgcacatgaatagctctaccagccctggt

SEQ ID NO: 23149 - DNA, 406 bp, Zea Mays
gggggatggagtcctctgtgccaatgataaagggtggcagaaaggctagtgcttttcgcgtcaggatagcaggaaggaggaaaatttgtggaagaaaccagatggcgactttgccaagatgcccccgttttctcaatagtataatcagccacttgaatttcaaggatacaccagcagtattaggaccgaaaggtgaaatttcattgtaaatatgacaaaaccgatcgtattcgaacaacacaaagccggtcatattcaaacaacacaggtttatgttatgcattaggccgttcgttgtcccaaatccatgagggttgagggggaataagtccactgctagtcaaaacccatctcaatccacttcaataccccttaatccacatggtttagatataaaacgaacaag

SEQ ID NO: 23150 - DNA, 402 bp, Zea Mays
caaacttatcatgcaagacatggccatgttgttcgagttccctcacaataagttggaactcatgagtctgttccacgacagaacggtcatcaaccattctaaagtcatggtattgcttcatcacatacaactcacgcccagcgtctgaggcagagaacttatgttcaagcacctcccacaatttagcagcactcttcatgttcatttaaacatcacacagtcggtcagagggaacgttaagaacgcatccgacgaaaactgccgtagccacagtacactcctgcacctctttctcagatccaggaggtggtgcgggaggattactgatgacccaaaacacgcccatagccgaaggccataactgggctctcgtctgccttctctcgaaattcacacaatgaa

SEQ ID NO: 23151 - DNA, 468 bp, Zea Mays
gtgccggagtcagggttcctggcaggggatggacgcgagggcctaaacgctcgaagaaagagcaccacaacgttcgcaacatccatgaacggtagcgcgacacccagtagccgcggcgacaaacaggacgacgacggaccccaactcgatggagagcattgaacagagcgatgaaagtaccatgtcgtaagtcgattctagccattttggaacttgtcgtggtggattggaggccttcgtgcctcctgttcgttgtcttgtgctcaatggagagcatatgtatctaataacatgtttgagtgtgaatgtaaatgaaaggaacgaatagaagaactatcttgcattgatctgctgttggaatatatatacacggtgaagggttgcactgaacgggtgtcagttgctaagaggcaaccgttcatgcactatgccaaaggacatgccctttagttacatagtaaactgtct

SEQ ID NO: 23152 - DNA, 456 bp, Zea Mays
caagatggtatgggaaggggctgtaaggtacctgccaccttcaaatgactggccttgactctttggcaagtgtcacacttagatacatatttagcaatttccctcttcattctagtccaccagtacaaggatctgagatcatgatacatcttgttattgccggggtgcatggaaaattttgaaaggtgagcttcatccaatattttctttctgagctcgggatttttaggaacaaccaatcggtctccaaaccataaaatccccttgctgtcctgacggaaacatttgtacttatccaccttttgttcgatcatttccttaatgacttgaacacccttgtcaccaatctgtgccatgactatctgctcatgtaaagtgggctccactgaaatataactcaaggcacctgaggaaacaacttctatgttcaacttgcataactcgtcacacagagtg

SEQ ID NO: 23153 - DNA, 490 bp, Zea Mays
tgaaaataaaagcaccactaagttcatcaagcatatcatctaatctaggaattggatgtctataccttacggtgatgttattgatagctcggcaatccacacacattctctaagatccatctttcttaggaactagaaggacagggacaacacaaggggaaagactttcttgtacataccccttttaatcaattcttccacttgttgctgaatcttctttgttttttctgggttggtgcggcaggcagcacgatttgggagggaagcgccagacacaaggtctatttgagttcaatctctctcttaggtggtagctctagtggcacttcatcgggaaacacatcctcatattcttgtaatgcattaaagacaatagttggaaagtagagggtaagttgttagtagaaagaagggtgtccttgtacaggagcacaaagaacatggcattaggttcactcaattcttttagatcccccttcctagtcatcat

SEQ ID NO: 23154 - DNA, 716 bp, Zea Mays
ccgctgcctttgcacacacaccattgcacccccctccctttcttgaacactagaaagcaaaaccctagcactgaccatggcaagctgcctcgttcaccacggaacggaacggaacgacgccttccatttgcgcccacagatgcttttgagcgcctactagaatcaaacggtccggccgggtctctgcgaatttttattttatttgaaaaaatcttcgtgctttataaagctttcgtgggggagaaggagtctgaatttcgtcaggatctggtgcagttccacgtggggattgatttgaacgaccgtgattataaagcgcggctcacctttcgatcaacctagtattccttgcttgcttcggtttaaaacccaccctaaccagatgcatctttcgatcagctgtggggggaatccagttaacaacgactgcatctgaaatctggggagctgtgcaaaaccactggcggagcaatgtgactgggaatccagttaacaatgactgaatctgatctggggagctgcgcaaaccactggcggagcaacgtgaccgaacatgagcgcggcagccttccagtgcatcaccggccggccacatgtggacagattagcgcatgcgtaagtgcgtaacccatgtccctaagcagtattcaagcggggcacacgggtacagcccgcctcggtttctgcgctaaggaatcgagagaggtcttattcat

SEQ ID NO: 23155 - DNA, 476 bp, Zea Mays
cggacctggagcatgctgaccacgatgagatcactttgcgcggtgctcgggaccgatttgggggaaatctcgaattagcgagctctagtggatgatttgaggcacgagttgctggattaggtgcttgactacctagcggagccgagggtgtgctcaatttatagtgtgcttgagtggtggccagtgaatttgatggagacgcgcggcggccgaagaggaggaggggcactggcgcaaacgattagtggctttcaccgtgtcagactcaccggcgacgagccagtgatatagagcggcttgcggcgaagtggtgaagcttcaaggcatgtggcatctgatcgacgggcgaccaactccggtgaacttatctaagccggccgcaaagcaaaagggggtacggcggccagcctccggtgttatcctgtggcgaagatcttttacccagaagcgttatccgggcactagtgagctcgaat

SEQ ID NO: 23156 - DNA, 499 bp, Zea Mays
tgatgacacaccgcagcaaggtgggaggaggagaaacagttgaagcacaggcctcggagatccacaatggaccctcgacaaggaaggtgcacactctgggtcttcttcctgcactgaaccacctaccagccaaactcgtcctgatacagtcccataggctgactctgcaccatcgaggacacatcgaccttctccttctccttcacagcctctggagctcttgagcttgtcatggtatgagaaggagcctggattggggtagggaggcgcttggagccagacacgaaggtatctttaaaggagcaaggcacctgggaagaaccaccagacgaggagtcatgaccagcgtcactccaacgttgtgtctttgaacgcccaccttgtcgagcctggtagctgaaaggtccttcaccttgagaggtacgcagggaggttgttggggtggtcgccgagtccgaagtggaagtcagtgagaagccttggctatggttgaaaatgg

SEQ ID NO: 23157 - DNA, 443 bp, Zea Mays
tggcgattgccttgcctagcccccgagggtgttgtcggtaatgatccggctcgggtgggtagcgcaagctgcaacccagcccccgagggtgtttccaatgatgatccggctctgatgggcagtgcgagctgcaacccagcccccgagggtgtccgagcgagctccccttctcatacctccatggatgtccacgtcgagtcttctccgccacactctggtggcataatagcagtgtatgcttcggatgagggagtcgccttagaggtcagcgtaccggatgctagggttctgatgcctactagtggtgttgaattaatccctggcgatgttcttcagactgccccggttgatattccttcatcgagccaccacttagcttctcgtgacttgggatttacttcgttcttttctaatcttcaggtaatttggctttttctgttctg

SEQ ID NO: 23158 - DNA, 444 bp, Zea Mays
gaagaggtgatatattccaggatgtcatcagtggatccggacctccacgagagagcaccggacccctgtacactcaacccggacctccgagtacagtctgggactcccaagtaagcatgtcgggccccttgggtgggatccgaacccttctgagtgaggtccggaccacctacagcaaagtaccgggacgggggataccctggcctatgtcaagaacaggcaagggtccggtactgacatgtgtctgggcttcgccctgtgcgctcccgctccccgttgaggcggagacccgatgctgccacgtggcctatcgcccgtgacataagccagcgggcggagcctaatgtaaggcctctgggccatgctgcctctgcatttaatgtggataagacatgctgcctatctatcccgctgaccgacgatgtgacccctcagcatttaatg

SEQ ID NO: 23159 - DNA, 761 bp, Zea Mays
gctttggcggcgggacacggatcgggggttagcttgagttggttgggttagggtttgtgctagctattgagattcggtgggttttgctttcttgcggcggctgggggcactgctttagccggggtcgacgcgcgaatcgggatgagttacgctactgcatctttgcgatttcactttctgatcgcggtttaggcttcggatggagtgttggatggtttgatcgagctgatatttgtgggttgttggagatcattgactcgccatctttcggttttgctgggggcgccttctggtttttgaatcttttgacctggaatggatcgctggacatgtagatttaggactatttattcggtctttcctagtttgaggctaagtttcttcgtttttctgtgtggcttcgtggggttagctcgatcatttttgtttggatttgtactcgttgggaatttcatacgattcttgaccttttcctctgctcttcgtcactgaggtttggggttgtagttcatggtaaactcaaaccgaacttcagcaatgcgtgatttatcacttgtaggataccgtcaggtcaaaaaatgtatagaacttgatcaaactctttttccatagtctcatgtagcacaatgagcattccttcctagcttagttacatcaatagtgtgagcaagaggacgcataacagttctggacttgaggattcacttgtttgttagtattgattaaatggatcgtcaccttattgaacgtgcttctattgg

SEQ ID NO: 23160 - DNA, 369 bp, Zea Mays
ttcggccactgacctatccaaggtgcggttgacgatagaagcgcaaaggattgggtgccacacccatcgcttatccattgccttacggtgacaggtagcagcccgatgggatggcgacatacagttgaaacacttccccaccaagtacgcagggatcaggcttcaggggcacggtggagggtgcaactgttgtagacaagaccaacaactctcatacatctggcaatcgtcgtccttccgttcaacctaaagcgggggcttcaagctaacctccgggcatttggcagctggcggagaaatcaagacattgtggtaagaagcgcaaatgttcgagcttggactagaattcttctacagctaagctttgga

SEQ ID NO: 23161 - DNA, 380 bp, Zea Mays
tagctgccagtttgtttcgctcgcgctcgcgctctgcagttcactgctgtgtgggcccacgcggtcagtcgtcccttcttcaacggaatcgtccgtatcgcgcgggtggccggcgctcgacgcgagatcctcggccatgaccgccctggactcggtctccccggttataaaggtggaaacccccctcgcaacactttcctgtggcgttcaagtccggagaccctaaacttatcgtaaagccgagagagtagagagaagcgcgtcgtcgccgggaattcgcgctccgtgtgtgctgcgctcggagctgatcaatcacttgtaagacctccctcgtttctccgcatgtccttccttgtttcaatttgagcagaattgagtta

SEQ ID NO: 23162 - DNA, 725 bp, Zea Mays
tgaagaagaggacgaaatccctctgattcggaaaaatagccgttgttacatagttagtggggaaagtagcagtgttccttctcccgccttgtctgcccttattggtctgcaagaattatctctggcgaactttgatcaggctcttgaggacatgattccagaagatctgttattagaaccggcggacggtggcgcgatggatgtatgtgttaatgtgttcgacaccgggttggggtcctcccgggcagcgtcccgcgcctcatcgaccttggagcgcggtcttgagggtcaggaggctggtttggattgccctgctcctatggaagtgactgagggaccttcaaccttagaagtggctgctgtagagaactcggccctcaatgatggtgctggcgcttatccagtccccgagggtgttgcaggagatgatccggctcggatgggtagcgcaagctactacccagccccagagggtgttaccggagatgatccggctcggatgggtagcgcaagctatgacccagtccccgagggtgtccgagcgggttctccctcttgcacttccatggatgttcacgtagggtcttctcctccacactctggttgcatggtgatagcccaagcctttggtcaaggggtcgctttagaggccagcgtacctgatgacagagttttgggttctgctgatgacactgaattggtccctgttgaatcgttgcaagttg

SEQ ID NO: 23163 - DNA, 291 bp, Zea Mays
atcacaagggccatagctcggtattctgcttcggcagtgggacgagataccacagattgtttcttgcttctccatgatactaaatttcatccaacaaacacacaatatcatgaagttgaccttctatcatcaaggcaactaccccagtctgcatcagagtaaccttccacctttagatgaccatgacctttaaagattattccctttccaggtcaagtcttcaagtatcgcagtatacgatacactgcatcaagatgtccacttctggggtcatgcatatatcgactcacc

SEQ ID NO: 23164 - DNA, 290 bp, Zea Mays
ggattggggaagaaaagagcgatcgtcaattggctgatgagcggctacgattagatgtagataccgattcgtggagaatccagcgcggccgcgagatcttgatcctacgcgcgggagtgtccctcgccactttaaatcctaagcgttgatctgcaatccgagggccgtgatcgaataccgcttcatttgaatgacaatctaatccgggccgttcaatcgtgatctggcagccagtactatccgatacccctttgccgcgcgcactttctaaaagagaccctggggtttta

SEQ ID NO: 23165 - DNA, 658 bp, Zea Mays
aacctagccgagctgtgcatggaaacactcctttcttcatggtttatgggtcagaggcagtattacccgctgatctcaagtttggggcgccaaggttgatcttcaaaagcatagcagaagccgaagctactaggctggaggacattgatgtactcgaagaagaacggctgaatgcagtaattcaatcagcacgataccagcatactctgagacgctatcacgacaaggtcgtacaacaatgatccttttcagtgggagatctcgtcctccgccgaattctaacgggggagggacgacacaagttgtcaccctcatgggaaggaccattcatagtagcagaagtcactcggccgggatcatatcgtctcactcaaatggacggcacagaaattgggaactcctggaatatagaacacctcaggaagttttacccctagctgtacttcaaaagctatcgggacgataatgtactctgtaaaatgggaaatatgtcatcaataaaaaaaggcttcaagaatactcagtttgttcatgattgaccggcattcttatttaactcggggtgaccactatgccctgctaacggagcaatcggcttaagtcggcaacgacttaagatggtgcaacatgctcgcgcttacttaactcggggtgacca

SEQ ID NO: 23166 - DNA, 314 bp, Zea Mays
ctggggattggggtctgcggtagaagcagcggccgtggcggtggtgtcgtcgaggacgacgggctggatcttgagctcaggctcgggtgcgcatgggagtgatgactgatgactgatgaggcacacgtacgtagtgtgtcgtcgtaagtgtgaaccatgcatgcatgcaggtcggtgtagtgtagggttaaattaaatggtcgtcgtagctgtcattatgtgaaccttatttccttttattttattacacgtgtcctccctcgctagctctcgtccatgtatgaactatgtgcgcccccgcagcagcattgcca

SEQ ID NO: 23167 - DNA, 420 bp, Zea Mays
agtatgaaccaaaacctctgtcacatggtccttggccatatgatacacgaccagcattctgtcgggcacgaccaccacgtggtgtcactgcctaatacctagaggcaagaggcaaaacacctctaggcctcccaggacgtctctgaataggctgagcatgaacaccatgagaggggcggttcatgtccttcctgctcgactcagaaacccgccactcatctctcttcctcctaaagcaaaaagaagctagatgcccatccctctcacaatattcacaatggtacctcacccctctcttgagtggattttgtttgtggaagaggattttttttggatggctgaggggctctaggaaggggatcgctagagatgtcgggaaaggtgtcaagtgtgttcctaagatggttaggttttggaagc

SEQ ID NO: 23168 - DNA, 809 bp, Zea Mays
attgggtgtttctcaaattacagccatacgtccagtcttcagttgctcatcgggctaaccagaaacttgcctttaagtttttcgggccatttcaggtgatccaacgtgtggggtctgtcgcctataaactgcaacttccttcatcgtcgcgtatccatccggtttttcatgtctcacagttgaagcgagcgctggggaaaggtttggtggcctcacctgcattaccatctgatcagtaccgtttcagtgttccagttaagattttgcagcatcgttcttctgttcgtgggctcaattcctgtccccaagtgctggtgcaatggtctgctatgcctgaggagctggcaacttgggagaatgtccaagatttgcaacaacaatttcctaatgaagctgtctggggacatccagcaggcttagcaggggggaatgttagcataactgaagagaaggacaacgacagtcagcaggaaggagatgatcaatgggccggaccaaccatagtgcctgttgggcccccgtatgccaaaagggtgagaaagtgtaatgcgaaagtgtatgggcctgcctgggtgaattgaggagaagaacagtagaataaatagtagctcgcgtggagttttgagttatgcggtaacagaactatgaattacttcttcttgtcgtccaagtatcaatacagccgccttccctctcctcctctcaatatctgattctgcctctctcttctcgagtccttctggtaggagaggttaacaggaaggtggtctactacgagaccaacacttcatcaccttctacctccggct

SEQ ID NO: 23169 - DNA, 310 bp, Zea Mays
gtcgtactctgtgcaagggctaatagacatgctcagaccgtccagctatacacgcgaactgtcaaagtatacctccagaccgtccgcgtattacacgaaaccatcagccatagggcatgcagaacaggatgtgggttatttccagtaatccttaaacccgcctcaacaaatctttcctgttgggaccagttgacacgtggacaggtgggcccaatcacttggggaacaggagagttcaggtgcataatgagatagtaggtagggaactatagcatcttgttgtgtgtgtcccatccgtgtacagtggggg

SEQ ID NO: 23170 - DNA, 518 bp, Zea Mays
ggacaatccataatcccaactcaagcgacgataggggaaatcacactcaaggccatcagcaaagctcccgatcatcagggacgcaacaaagttcctacaggccaccagctccaagaggcagaggaggtagaagcttcggtggaagattcagctcccaaccaagaaggttgttttgtctattctgtggggaagataaggggcatacaacaaggacatgtcaagtcactattcaaaagcagaaagaaatagctgaagccgaagcacgacagaatcagtcgaagtaggtcctgcataccgcttcgtgctattccttgtacatccccgagtatgtgggcaaccaacaacccatagcatcagttgctttggcaagccactcacaagctgcatgggccccactaccaccaccaccactcatggctccaacctcgtctcacaaccaacagctagaagggcaccgccaagtacaacaacagtgtgatgcatgcgaagcatctgaagctcggacagtcaacaacatt

SEQ ID NO: 23171 - DNA, 447 bp, Zea Mays
cttcaacgcggcaacttggtataccattagtgtgctgccaggaagttactgtgtcaggttgcatttcttcccttcgaccttcaagaatttgagcgcaaacaactccgcgtttgatgtcacggcaaatgatttcaagcttgtttcaaaattcaatgcgtcagaggagattgcttggagagcctctgtgagcaattcggtcaccagtgcagttgtaaaggagtactttcttgtagtcggtgctcgtggcctgagtattgagtttgatccaagacctgggtcgtttgcctttgtgaatgcaattgaggtcatgctgaccccagataatttgttcaatgatacaatgagcaaagttggcagtgcaggaacgcagcttcctcttggtttgagcggcagaggtgttgagacaatgtaccggctgaacattggaggtcctgcacttaaatcgcc

SEQ ID NO: 23172 - DNA, 684 bp, Zea Mays
agaatgcagtggggacacgtatgcgtgtgtgtgccgaagtgggttacatcaagtgttgcgttaggtggcatggttgcgtagaaaaatttgagggtcgtcgagttgtgtttgtctgaggtgttgacaaaaattaaaaatatctgtcaagtttatacgaagggcgagtctgtggatgattgtgtgtgctgagatgcgttgtagtagtgatggcgttaaattaaacggaaatgtctcgagtgcacgccgccccatggttgtatgcgagacaggaaaatataaggtgtgctcgatgggaatgttcggtcgttgtaggtggaatttgtctttacttgattagagaggtggtgacatgccgaagtagtcatcgcttactccatgtttataagtcgagtcaaaatgcagggtactagtggtacgctaggcagacgatgttccaaattaaggaatcagttgatgtggtagttgtcgtgcgtgaattattgttagtaagtagttaaagtacgagctatgtgagaatcatgctagaaactagtgtgcggcgtgtaactgtgttcgtgtgataaataataggtcagttggtattgttggtgccattagcaaatggggatgattcctgttgtgcgataaaatttgaaaggcaaggaacatgggtagtgtgtcgatcaagttaaccgataggttccg

SEQ ID NO: 23173 - DNA, 426 bp, Zea Mays
gcgacgggccgtgccgggtcgggccgtgccggcccgtttggccatctatatgccaggatggccgagcgcacaatatgatggggaagaaggcctggggtgcgtcggatcgaaattaatggccaagattggaacatgtgaagcgctatcttcgtgaccgtggatcctggatctaaggactagcatgtcttgcatgcatgggggatcctcggtcgtcggttgttgatccgatgctcaagatcgcataccggttcgatgaggtaacgatctaatctgggtcgtccattgcatatcttacggctaaggattacccataccctttcaccgtgggaatttcgcttaaaagaccctgaacgttttatgaatcaactcgcagtccatggcagattaaggaatgttttatgcgggtcctgttttcttacacgttag

SEQ ID NO: 23174 - DNA, 519 bp, Zea Mays
aaaaggtgcccacttctcagggacacccaccgagtgatcagtcggtccagccggagcaaagaatttggcccagagcctagagaactggacagctctattcctctcctcaatcatctgaaaggctgggtcaggctgccagtcctgatgcagcatgagattcatctccagattctgatggtgaatgttgttaggcccatcaaccgggacctgagggagctcaacctccaaatcctgggcctgatccacctgaggtggtggtccatcaacctcctgtggcccattgaagggggcagcattgatttccattccgttcccaatcagagcatgaccattcactgcaggatgaccattcgcggggggtgcaagctgaccagcaccaatggagctatcagacgacaagccagaatgctgattgctgtgttgcagctcttcctgctgaatgtgttgctcatctggcaaggggggttgggggtcttgctgaatgggctgctcattcacaatccactgatcccactctcc

SEQ ID NO: 23175 - DNA, 610 bp, Zea Mays
cgttgggatagggttttgcgtgggcctggagattgatcgctttcaccttctgctccaccactgttggatcggtggagaaagccacgatggagcgcgcgaggggaggccctctctctctaaagtgacgagccgaggggcatgataacgaggaaagggcggagggcgtgttggcgagtagatagtcagggtcgtggtgatgatcggaggcacagtgacgaacgggggcacgacatgacgtggcaagcgggattgctggagggtgcaggccgcggtgagctggtcgcgattgagcggtagggggcagcggggcactgtgctgctcacgtggggaaaggaataggaatgagaatgagaatgacaggacatggaatgacaaaacagtgaatgtcaccctaccttcgctgacataataagtagtagagatatgtgggggacagatatcccccaggtccactagaaggcgaaagatccttgcacggggcaacgggccagttaccccgcaaggccatctcatcgtgggccgggcaaagactacgagtggaatgggccgacccgagaagacaatggacttaagcccaaattgtccgtcgtatcgtgcactaccccaaga

SEQ ID NO: 23176 - DNA, 589 bp, Zea Mays
agcactgccaaccaacttcgaactattccagacagtaatgaaaccccccgaatttcctatcgaagggacaaaagcaaactcatcaaaagaattgggacagaaccttcttaggtcagcccggtcaaaaaattccttcttcgtctcctgcaagcagatgatgtcgcaattagattccctaatcacacaatgaatatcattccccttagccaccgcgttaatacctcggacattaaaacttaaaacggaccagtcggaaaaattaatagcattgtgactattcatcaaaaggatcaagttcgttgatgggaagggacccaaacccaattactgggagggcaaaagtgaatatgctaaaacgaaacaaagcactaccagaaaccaccaagttcttgtacacaaaaagcagacagagacgccagggccgagacagccaaaaagcctggcgaaattgagacctgcaaaataatcccacccgaagcagtatcaacatatcagttgtcatcatctgaagagtcttgtttcttatcccccttatcttttttccctgacttgttggagccaacacagccaggcgggttcttctttttct

SEQ ID NO: 23177 - DNA, 610 bp, Zea Mays
tcaggttccttgtggtgtgggtggtctgggaggagcccgctctaacctaaatggtcttcacagagatgctgactgccccataaggatatactctagtcgtctttgcaggtgccatggtactcgaggtcgaggggtcgtttctcctatcgtccgggtgtgtagcgactgtcgagagagcatatagcttctcaatggctgcgcacagaggccaacgcctcgcgctgatgctgacggaaagacctcgaatgctgcccgaccacctcatgggtgtcgagcagcggacacgccctagtccataccgaactggaagcaatttgggctaggttgaggaggaggtcgacgtcatcacgtcactgcctcattgcctcgtgggagggtgcagagcatgggggattgcagagcaactccctagctgctgacaccgccccaccagggatgccccatgaggaagctctaggtgctgagtctagtgtgtgctacggcacaacgtgtgcagtagcacgtggagcgaggcaaggagcaacccgcggtgtagatgacaccaccccctgccccatctagatgtcgtcggaggaggaggagacaagatggtcgacgatttgcatcgtca

SEQ ID NO: 23178 - DNA, 548 bp, Zea Mays
ctctacttcatgttgagactgagtattagagtatcactagtttacaagggtcacagatgagatgtgagtagtggagagtgagttctcctgccaatctagtggtggtgtggttgctgtgagagggctaatgagctatgaggtggtgacgagctgagatatgatgagttgagagatgggttcgtaggggtaccccctcaccttatatagatgaccaaagggttatccctttacaagtcgtgatcactctctaactgaatcctccttttaacgcagcacgccatccagcttatccagtgttcagttgcccttcatctgagtcatctccgagtatctagcacttctagtacgctcaacctccctgcccgagatagcagcgcatgactcggtcgtccggtctttgcctccccaggtcgagcttatccagcttggttgcggcccgagggcatgccttgctaggcaagtcattgagaggaccatcaagcagcccacagagcgtttctgcactcacgcccgaggtcagcctcgggcaagttgcaactgcatctccc

SEQ ID NO: 23179 - DNA, 624 bp, Zea Mays
gggcaaggatgtagcagcgaatgttattttacatgccggcctcatcctcttttatttacgcagggggccgaaactagtaagttattgcactcgatcaggacgtgagagatagagtcagactcgttcctctaacattttttcccctcatatttccaagagaaatagaggttcttattgctagctggaggagtcattatgctatactatcttatcatttcctggctgactaaatagaactgcatagttgatctttgcatgcatgtgaactgtctgaattcttgtcacagtgcaacaaccggcgttctgtattcatatatcactgtgtatgttaatcattgctctggttgctggataagttaagttttgtcataaaccacccgtctcagtcttccatttataaatcatttgtatgcacatggcgcttcttccccccccccctttttttttgcaatttgattgagcaagcactagtcgaaggctggatttcaggttggccacaggaaatctcatcctctcccatgtaatgatgtcgtgccggccggagatgacgctcgtccacattggcacatcgtgctgtatacggttctcaatcaattttcagtgcggtgtcatgagctttgtatt

SEQ ID NO: 23180 - DNA, 336 bp, Zea Mays
gcgtgatgacaacggcgtaatccacccgattctacggcgatggcggtgggttacgaggaataggggaggaccggtcctagaccaacggctttatggccccggggagtccgaccatggcgcccgcaactgcctccgcgaacggcgcatgcacccgagctccacagatttcgagcgcgcgcggggaggagacggtcagacgatgcggggtccgtggcaaggtgggccacggggatttcggccggggaggttggaggtcaggtcgcggacgcagtcggccgaaccagcgtgacctccgtgcggaatccgccgtccgccgatctcggcgagagatttctg

SEQ ID NO: 23181 - DNA, 365 bp, Zea Mays
aaagggttgatcggcgaagtcctcttgcttcggtaggggtggtggtggtaatggttgatttggatgctgtggtggtggtggaggaggtagagctaggatttcttggttttgctcgtatatattgtggttttgttgatgaggatggaagtggtcattgtggggtttggtgctggttgtactgatggggatggtaggtgtgggtgacaactctttgattggcagtcggttggtttctggccattcgatcttttgttgctttagtttcagggcaatccctaattgggtgtgctaagtcttcgccatggaaaagacaatagaatcttcgctgctgcgggccatggcctctacccctgcctctagttgcg

SEQ ID NO: 23182 - DNA, 691 bp, Zea Mays
gctggccggtcatttctcaggacttctacgacttatgtgagcaattttatcatggggatgtctgtcttcgaagtattaatggttcttttattgttctgattctgaaaaaagaaaatgctcaattggtgggagattttatgccaatttcgcttctaaataatagtatgaaaatcatcactaagttgttggccaatcgattacagacagtgatgacctccctggttcataaaaatcaatatggcttcatcaaaggaagaaccattcaggactgcctggcctgggcttatgaatatattcatttatgtcatgtttccaaaaaagaaatcattgtgctcaagttggattttgaaaaggccttcgatactgttgaacataatctgatcctgcaggtgctgtccttcagaggatttgggcccaaatggcagggctggattagggatatcctccaatctggcacgtcttcggtcctccttaatggtgttccaggcaaaactttccattgcaagcgtggggtaagacaaggagaccccctttcgcctcttttattcgttctagcggcagatctgcttcaaagtataatcaacaaagcgagacagcaaggccttctccagctgcccctcactgcgaactgtggtcaagatttcccaattgttcaatatgttaatgacactttattgattttggaagcttg

SEQ ID NO: 23183 - DNA, 355 bp, Zea Mays
gccatcgtgtatcaggacagatcggtatgctcggtctaatctaaaccgcccaagggacatccaacggcccacgatcgtcttctactctacaccctcgttcaccggcgtcggacgatagaaacccgagcgccgccgcgacgccattgccgcctcacgcgatacgacgctagcgtgacctaaactcgaattcaatcggcgctacacgatgcacaagcaaaagggaagagttcggatagctgctcaccgacaatcacgacccgcagtgccttggccacgaagaggtgctgttcttcgccgcggacgcgctccggtgagcaattcccttcacaccgctgcaccttgcgctcgaattctc

SEQ ID NO: 23184 - DNA, 563 bp, Zea Mays
cacgcttgaacgaggaggccaggccgatccccttcccagcccatcccacggtccctctctctccgtgattgcatgacaagtggggtcatcatgtcagtgccctcatcttcaacccactgctcgttttctctatttggtaccgtgtgtcgttcattcgttcgggcagtcgccgctcacaggacgctgctgcactcgtcgattgctctaccccgccgcctcgcctaaccactgtggatgtgctgtaccgaccaaacccctacagaaccgccgcgaccctctccctctcactcgcgccttctcctctcccccactctttctctcatgtaacggctgccgacagccatcaatggagttcaatggccgtccgtcgcaactctctctctctcagcgtccctctgcttcctccctcactctataaaatcccgaccacttcatcctctccccacactcccagatcgctgccttcgcgacgtcgcgccgctgacgcccagacgatcttctcctctgctgaccgcccgataaactgtccagccacgctgccatcaacttcccttgagttttgc

SEQ ID NO: 23185 - DNA, 622 bp, Zea Mays
cggcgacggaggggttttctctgcttcttcgtctaccttcggttcagtatagggtatctggtcaagcttccgcttcatagaaattgttgcctttggctctggcgcagtttttactttcttcagggccttttcgtcttcttttatggaccgggcagcttgcctgcttaggatgctgacaacccttttacttttcacaccccctgccccttcatcaaacctctcataatctaggtattcgaagttcaatgcatccattacctggttcagcctttgttcggctgggtaccgaaggcagtagtcattagctggtccttcttcgtacagttgccaagaatctcattgcacatggtctcgatcatttccagccattcattgcatggtttcttgaactatttctcaaatttgaagcgataggggagccgaacatgctcatactttcccccttcctttttcttcggtatcacccatccgctagaggttggaaatgttctatttgccaaatattcctgcactaggtccctagtgcagatctcggcagctaccactctaaatttaacttcggccagctggcacggggagccaagttgcatgcagcacaagggccttgtcattccgaagctta

SEQ ID NO: 23186 - DNA, 495 bp, Zea Mays
ttgaactagaactttgcgccctaccctagtcatcaaatctgccttccaaccaggaagctgatctgcaatcttgtcaatgattggttgcacttggctcttagaaatcttcttcaaggataaaggtaaagccaaataactacaaggaaaagcagaaacctcacaagggagctgctcattcagaattgcaatgtcctgatcatcacatctaatagggtaaacattgctcttctagacattattcttaagacctgaagattccccaaaagggtgcagaatactgagaatcatctgaatatcactataccttggatgcaagaaaagagcaacatcatctgcatacaacgaaatcctctgcggtaaggatctagtagaaagaggttgcaaaggcccttctccttcagctttagataccatatcaccgagtatatccatcaccaaaataaagagcattggagacaagggatctccctgccttaaacccctttttaagtaaat

SEQ ID NO: 23187 - DNA, 392 bp, Zea Mays
gagggatttagtccaagagcacatagccttcagagtgtggctgcttgtagagcaatggaaaatgccaaaggaaactatcagcaagtctgacgaaggtgggctagttaggttgaaatacaccttcatatatgaaggtaagtttattaagccagatgatgattggctgatgtgcatcgaagctacaagcgacgaactgcttggaccatattcaaaggcagaagataacgcgttatctgcggccttcggaggccggaagaagaagaggctgaatagagttttcgatgctattgggtttatgtaccctgattatcgctacccgctgaaagggaaaaagagaaaaagtgcaacttctgggaaaggtgatgcttcagctgctctaagtgagcccacgc

SEQ ID NO: 23188 - DNA, 646 bp, Zea Mays
ttctattacaaactagtcctcagggaactattcaattgagttagtggcttaacacataacccctgaacttttaaacaatccaacccgcaatccagccggaacagtggctgtggggaaggaagcggcggtgtggcttatcggcggcagtagagttccattggggtggtcgagcatgtcggtgatgtcgaggggatcacgtcgaggtatgactcgtcatctgagatggccagagctacctggtccacgtgtgcatgcggcggtggtcgacggcggctccaaattctagtcaatgacgacggtagagtttgatccaaacggtggggaagcttcacggggtagtggtagtgttgtgtacatgagaaattgaatggaggtgcgctagggaaaccgacccacgttcaccgacggagcagcctactatggtgagcagtggtggtggctctgacacggcagtgagctagggagtggctaggtaggttcgctggagctcaaggattgtggcggtgtgcttggatggggctgcggcggttcagttcactaggctcacggtggtcgtgcgttagggagaatggtgggcggcagtgctcagtcaacgacagtttccagtggccgatggctcaggcatggcggcagggtcaagtagttc

SEQ ID NO: 23189 - DNA, 748 bp, Zea Mays
ccgctcctcccgttcactaatttacacccccctgtgcccaatttatcgcaagagtcgtgctccacgtgaccactgcaccctcaccgtcgtgcacccacgtcgacctcatggctgcgacatagcctactcctatcgaatcgactacaccacactagacttgtcccacctaaccccggccacacctgacccctcttgcaaccccgattactcgctaaagctattttcaccctgatagagctgccatgccatcatccacacgatctcgggcaccccgccatgactgggaccctcaccgtcgagctcctcggaccaccctccacctccctagcccaccttacatgcgtcaaactctctggaacacccacatgcctcaactccggtgagccatcaccatgctccgagggcattgcctcctcagttgaccaaagacggaggctgaactcggtcacctgatctccatcgcccatctcaaatcctaaggcctagatttaaataatttggatcaaatctcaaccaattgtcccatatcccaatcacatgataccccttcaccggattcattaaatttgagtcacagatctcccatccaatggccccaatcaccgagcaccccttcgcccgtgcattataatcttgactgtcgatgtgatgatccatggtgtttgataccccattggacgggagaatttattaaagagccttggggctttaaggaaattaacccaccatcccccaacttgcaccaaag

SEQ ID NO: 23190 - DNA, 473 bp, Zea Mays
gcaggttccctaggaaggagctacagtgtcgtggtaaaatggggcgttctatcttggtaaagctgcgtttgtccgtatgtgcctcagtcgtctaggcttacctagtcgcactctttatggagggcgatgtgggtggcgaagagctccagcatcatcattaccatctctgtggcacgccgaccctaccttcgtagtctgggtctcggcgtggctcgtcgtgttgtgggtcctataggtggaaaatgcacttaggcctaggctagataggtcatgagtgggtcgtaggcctaggggaccgtaggtcatgagtggaaggtggactgactctccctctgcagctcggtgccaggtgtagttaatgtggccggctacttacagcgggccagtcttgggtcaggcgtggaatccactcgagtggcttcctcttgatccacttgacccccctttcggttccacctcgcccaaccccggac

SEQ ID NO: 23191 - DNA, 325 bp, Zea Mays
ttgcccttttgtttatgatggcaccatcaaacatgggaagcacttctaattatccaggagttttgatacaacacagcacatattccacatgcaattcatgatcttatgttttatacgtgtacctgaaagaatataatcatcttattgtttagtccttgtttagcactttggaaattaataactactgtataaatctactttctttgaaggaactttgcttgctcttgtagttcttgcagttccctcaacggagactacaattcaaatttgacattactattaaaaacaatagttggattgtcagattggcatcatcatgtttgtt

SEQ ID NO: 23192 - DNA, 398 bp, Zea Mays
tgccagggaaaacatttcattgcaagcgtggggtcaggcaaggcgatcctctctcacctttattgtttgttttggtggcagatttacttcagagtgttatcaataaagcaagacaacaaaatttactccagttacccctgactgaaaattgtggccaagattttccgattgttcaatatgccgatgacacactactgataatggaagcctgcccgaagcaactatttttcctcaaagcagttcttaactcctatgcaacttcgacggggctcagggtaaattataacaaatcaagtatgtatccgatcaatgtttgcccagagaagatggagattctctcaagaacgttcaactgtcagacagtatcaatgccttttacctatcttggacttcctctg

SEQ ID NO: 23193 - DNA, 525 bp, Zea Mays
gaggctctcaagtatcttatcggggtggaagtggagctaaaggttacaaagtggagtcctagttaagtcttgtcttggcggcggggctttggcctctaggtcctcatcgctgcgtcctcctcctgttcgtcggtccgtctaggcgtcttctcctctggggcccgtctgtgtgtgtgcatccgttcatcttagggccaaggcatttgaggccttgcatgatcatcccattagcccgctttgacttgtctgtttgcccaggggtgggccacggcgacccagtccacgaggatgtggtattcatcgcagaactctagtaacttgttcccggtgaactatgtaccattgtccgttgtaattgaattcaacaccccgaagcggtggatgatgttagtaacgaatttcacggcctgctcggatgtgatctttgcgataggccacgcctcgatccacttagtaaatttatgaatcgcgattaagacgtgtgtagtcctcgggtgcccttttgagaggtccgaccagatcgag

SEQ ID NO: 23194 - DNA, 610 bp, Zea Mays
aacagccggccaacagaaaagctcgcacgggagcttccatggcgagggagagggacaccgcgactatggcgaacggcagtagggagcacgaccagagctcttgcgcccacagctgcccgaatgctaccagcacgcggcatgggagaggacaggagccgtacgcgtccacggcgaggatgaagcagggggtgcatggtggctgagcggacgcagttggagcagggaagaacgtcgaggaggaatcctgggcgctgagcgtggagggtgactgacgcaggggaacctgacatcgacacgacgaagtagcgctcacaatggtgaaccatagaagtggagctagagcaggtgcctccatggctactaacataacggtgggacgaatcgatgtcagcacgacgaagagatcgaaggggtgcgcgtgggagacataggtgacaccgagcgccatgggagggaccaaactagggccggcgctggtggctgggcgcggcggccctggcgagcaggttgggcacgattgagcaggggcaagcacgaagaagacgagcttgaggcggacaccaccgacgaaaaaaaggggcaacagagggatttaccgagaggagcttag

SEQ ID NO: 23195 - DNA, 459 bp, Zea Mays
tctgggctttggttggtggtgctttctaggggcgcgagacaacgtggccttcgaacttagagataagacagtgggcgttgtgctatcctaggatgaagtctctttcgatgttacgagcagtctgttggtccccgtaaattgttattgcgtcgagaggtccttggattttcatgcacatgtaaaggcagtgaattgctgcttcaagtttgttgatggaccttctccccattatggtgttgtatggatagaccatgtcgactatgtcgaaggtcacatgctctaatcttacattgggttttgtgccgatggagagggggagctctatcttgctaagtggaaatgtaccctttcctccgaaaccatagagtgggttgtcggcatgctggagtaggttgtagttgatgcccatttggtcgaaggcatgcaggaagatgatgtcagcttggctcctgttgtcaa

SEQ ID NO: 23196 - DNA, 380 bp, Zea Mays
ggaggaaggttcaacactcaacccaggagattgttctgcttattctgtggggaggataaggaatgcacaacaaggacgtgccaagtcacgatcaaaaagcagaaggagatagctgaagccgaagcacgacagaatcagccgaatcaggtcttgcatactgcctcatgctattttccatatatccctgagtatgtgggcaaccagcaacccacgacatcagttgcttcggtaagtcattctcaagctgcatgggctcagttaccaccaccaccactattagcacctaccttggctcataatcagcagccagaagggcatcgtcaagtgcaacaacagcgtgacactcgagaggagtccgaagctcgcacaatcaatagcac

SEQ ID NO: 23197 - DNA, 942 bp, Zea Mays
agcttttggcccataccccggcgctgttacaacaactacggcatgggcgacctctctcttggggacacgggcgcacgaacaaccccttggtctctgcattggctctctacgagaaatcagtaggcacgaatcaacaacacagttcgccgtcacatcggcctgcagacgacagggcatctctccctcggatacaacacccggcttcattgaggacactccccttcgtgtataaatagggcagtggtccctccatggaggccatccacaacacacgcagaagaacgctcactcctccactttgtcttagatattggcagttgcctcaatcatctttagggacttggggacttcccttttcccgtcgtgcttgtaaacccctaatacaggcaatacagtgcgagtaatataagcctcatcctctctgctgtaagtaaggccttgtgttgcccgaaccaggataactgcttgtgtcacctcgcacaccatctagagtcggccacgcgacacatttactagttggttaaggatccatggtccaaacgccgacagttggcgtgccaggtagaggcttgtcacgtgaaacactctccgttctcactagcactctagatggctggtttccaccacccactcaggcttgggatgacgattaggttcgggagtctagagttcatgtctctcgacatcgagtatgacatgatactcctcccacctatccctcttgagtgtccaagctcccgtcgtcacccttcttgccgcatgaggtagagacggagcaatcacgatcgtgccacctagggcactccgtgcactggaggagccaccgggatggatgacgcatcgagtccctctcaagggacttagccagcgttaacatttcacccagagcaccgccagccacacctgcaccaacattcctggcactacctccttcaatgtggg

SEQ ID NO: 23198 - DNA, 626 bp, Zea Mays
cggggttggacgttcgccggcgagtacaccgccgggcgagctctgtttctcgcgcggggtgttccgtcgatggcgtggggcgtatcctccgtcgatcagtgaacgaacggacgcgattagttcatcttactggtgcgagggggacgaagtttggtcgttggatcgtagatgaaggagtggaatcggatctcgcgcgtattaaatcgggggccttggatctagatctaatgatccctggcacatacagattcctcaatggcaggatctaatcctggccgcaggacttagatcgtgtggctcaagttatcccataccccttcggccgacgactttgcaaaagaatccctgaaccttgcataattaaacccgcagtccaccgcgggtaggttctgagtctgtggaacctttgcgttttaaccccgaactctctgcaaattatgcacgccatccaggactcgaaagaaagaaataaatgaatatagaaaatgaattcctagtgtaaaaataatcctaaaacttgtttaattcatacaaaactcattttaactcctttttagtccattcaagttctcataattttgtattaatattgcctactacttggtaacactgttttgacatgaaac

SEQ ID NO: 23199 - DNA, 531 bp, Zea Mays
tcacgtcattaaccaactcgtgttcagcaggagtcgatcgcgttaagtgattgcgatatacatattgtgtctcggagtgctataataatgagttagcagacttgttagatggttttgggttaagttcgaggtcacgatgaattgcttgttgtagtctaaatgcgtgtggttatggtagcaggtaaaaatttagtagtgctcatgtggtgtctaagttaaaaggcgaactagtgggtgaaaagcacttcgatatacatatatgtcggatgatgattgtggtgaatgcattgattaattgtgtatggtagttctagagcgcgaaataacttgtataaaaattagtaagtctacttgttaattctcacttggttattttaactctaacaattgtcaaagtgttagaataattcaagtatttagaacgcgacaattcttgaattgtataggagctgcaatttattaattgctgttttggactgcacgcagtgatttccccgtgttgtatgtttgatgaactaaattgtgttttct

SEQ ID NO: 23200 - DNA, 714 bp, Zea Mays
gacataaatagtaatatagcatagtagtaggtagtaggtagtggtagtagttgtagtagtagtattagtagtgaaaatgtaaatggtggtgaaagggtgagggatgacagggtcggttcataatgagttggcctcttttctttgtaatgacctctttctgatgaacaaggtctggttgttgtgcctaataccttctattttgttcgtcttgtgttcctcctgatcaatccaattgagaaaatgcgattgacagttctgtctaacaggattttactcacatatccgactggtaacattgctactagtgagttcgtatgataggtccgactaataaatccacccgactttccatttagttgaggactagtccgaattacttgcctgccacaatgtgcccgacttagtgtgcgtatatacgtccctgttggtagtttctcggcgcacgaaccctaactctgttttttgttcgccgcaatacagtctctgagaccctcgctcatccttgcggttgcgctcaagcttgcctgctcgtgaggtcttgatggcgcccaggaagaagaaataggggatagttacgcccgccattcccccaatcaatcctaatagccaacttcaattatgcggtaactaagcttctgttgtctctgagtctgatcttcaccatcttatcgaagtcagtgttctcccgcccaaggaacagggctcctggcggat

SEQ ID NO: 23201 - DNA, 367 bp, Zea Mays
gagtcttgatagaggagcgggtgagtgcgacgaagccacctcaatgtagattagggatgatctataaaccaccgagaccacggtaaaaatccgatgtctccattggtgtttacattgttgtgatcttcattacttgtgcttattgtgttcttcatattcattgctactcaaattgatctcttgctcactcttgattgcaaaccaaatttagctcaacataggctagatgatttaattctcttgttattctaattcaattgcaagtgtctttgattttagttgaaaccgattattcaccctcactctagaatgtacccttgatcctacataagcttcaacaacgtcctctaaacagagatgatgttct

SEQ ID NO: 23202 - DNA, 352 bp, Zea Mays
tcgatttctgtgagcaaaaaggcattcagatcaagtacgcttcggtagcacacccgagggccaacgggcaggttgaacgagccaacgaaatgatactggaggcactcaggaagaaggtctttgaaaaaaatgaaaagttcgcagggaaatggataagggaattaccctacgtcgtttggagcctaagaactcagccaagccgggctctacatggaaatactcctttcttcatggtctatgggtcagaggcagtattacccgctgatctcaagttcggggccccaaggttggtcttcgagagcatagcagaagctgaggctactaggatggaggacatcgatgtactcgagga

SEQ ID NO: 23203 - DNA, 490 bp, Zea Mays
cgtcgtcgcgagccgacaccgcggaaccgctccgcaacgtgagcagaatccgtgcacatccgacccacttaagcgatggctctatgtgatttgctagaggctccgcttcctagatctcgagttgggggtaggaatcagggctctgggccgcgattgggtatttttccgatgatgcctcgccgtgtggggaggtatacgccgccgccgggcgcaccgtgggggaagacgagtcgtcggtcgcggatccacgaatgaacggataggattaagtccatcgtacccctttggtcaagtgtatctgtgccttagatcttgatcggacgccttggcatttgggttggacactttaaaatatggtgcgttgatcatcaatcgaacgggagcgagtgcttaccggttgatgggcgggtagatctaatactagccgtagatgtaggatcgttcggccctggtcgaaacataccccttcagctagacgactttataaaag

SEQ ID NO: 23204 - DNA, 521 bp, Zea Mays
ataaagagatcttatcaggactaatctagtcataccaacctaatctagattctatctaatctattatgatctaatctaaagtgagttacttaatggaccagttaatacttgtgaaatagattagaccctatccatatgttttaacttagttcaccctacactaaataaagaatgatagaccaacccaaccaatagagtcttgatggattgcataatctgcctatccccacctaacatcaaacgaacttttgacctacatcatgtagtttatctcatccatatctatcttaaccatattccctagcctgataatatacactaactcctaatcaatgagacaagaccggagaagatgatcaacttcatcaagaaaggatgagcaccaactcaagtcttcaaggatcaagtgaggtcaccaagatgagtcaagatccacaatcttggatggagtcttttcttaccccactccttacccaaaactatatatgctctaaagatatcattcatcctgcataataaag

SEQ ID NO: 23205 - DNA, 358 bp, Zea Mays
ccggcatacttcatgtatttgatgaattcagtgtttatgctagaattggacaaatttgtggtggtcttcattgatgatatcctggtatattcaaaaagtgaagacaagcatacaaagcacttgcacaccgtacttcagcgactacgggataatcgcttgtatgccaaattctccaaatgtgacttctggctaagagagatcaagttcttaggtcacaccatttcacaggacgggatagcagatgatcctgagaaagtacaagaagtgatggattggaagcctcctaccaccgtgcgacagattcggagttttctgggattggcaggatactatcggcgattcattctagatttctcca

SEQ ID NO: 23206 - DNA, 767 bp, Zea Mays
gcgcggcaagtgcccacggcaacagagtagtgatagtgggtcatgccctgtccaccccaacagtcgacatagcgcctcggaatgctgggagatccttaagctcgtgaagcgcatccgcgagcggcgcgagcaggcctccaaggatggctcgccgcctcattgccggcctagcaaggagaaggtcgatgaaggcgacctagccgcaggagagcgggacctcaggtatcaggcccccgagcaagtcctcaaggacatcctcactggatactctgactccggtgatgacaacgaccgccgcaagaagttgtacgtgatgtatggcggaagctgggagctcacctcccgtaggaacgtgaagtccctacgccgtgaagttctttcggcgaccctaggggtcccgaaggcagcccccatcagcggtggcagagcaccactatatccttcggcatccgactgccccgaaaacatggcaggggctggtatactaccactcatcgccgcccctgtcagcgccaacatgaagctacatcatgtgctgattgatggtggggtagggctcaacgtcatcagccacgctgcgctccagcagatgtagatcccagggtcccgaccgggaccctctcgcccattctctggagtgggccctcaactggtgtatccccttgggagcatcgcactcccgattacattcgggaccgaggagaacttccacactgagaacgtccagttcgatgttgcggaggttaacctccatttcaatgccatca

SEQ ID NO: 23207 - DNA, 627 bp, Zea Mays
tcgttctctcactggccctctctcgttctttgccaattcatcaggtaggtgtcaagaatgccttacttcatggaacacttacagagaccgtctattgcagtcagtctgtcgactttgttgactctactcaacctaacatgatctgaaagctcaacaagtccctctatagtctaaataggccctccacgcttggtacaacaagtatgccacatatctgctctccctaggctttgttgaggctaagtcagacacctctctgttcatctactagcatggcagtgacactgtataccacctcctgtatgttaatgacattgtgctcattgcctcttcttcgggcctgctacaccagatcattaccacccttcagcacaagttcgcaatgaaggatttgcatcttcatcatttctcgggattgatgttgagcctcgtctggatggtttatttcttcagcaacaccagtacatcgtatcataaggtgagctgacatgctggattgcaagccatgagccacaccagtcaatgaccccactgcctaccacagtcttatccgtgatctttggtatcttaccttcacccagctcaagatcatgtatgttgtccaataggtctgcctctacatgtatg

SEQ ID NO: 23208 - DNA, 718 bp, Zea Mays
atgtttattgaacgtcaatgaacaagaaaggctgatgcccacatggtcactaggaacaggatctgcattcatgacatttagtttccagatggtaccagccccaaatgtgcaggaagtgattcctccataacttccatggtttaaaacttcacctttcattgtattagtttgaggtgttacaatgaactcttggcgaccaagtatcccaaatttccaacagaaggtaattatagctgtagtgatttgatgtaaattgcctctgtttgctgtatagaactttcggaaaagttgaattctgtcgagcgtaatgctaactgtatcttcttttggactgttggtggttattgattttgttcagaattgagatgccctggtcagatggacatacagtatgcggtcacaaaatgaaggtgttgcgggatactacagagcaatctgaatgttaatattttttgtttggttcatcggttctttttgagaggttgagaactgaaccttgtttttttggtcacaacatttatcactctgaagcaaattctataccaatgaaagactacacaacatctaatctcatagccatgttgatagacatgcatgatgctgtgaagttatgtatttttggtctaaaactctggcagccggccgatgagtgcaattaagtaaaaaatagacgtcaccataatggagtcaatcattgatcttttgtatttgcatttgt

SEQ ID NO: 23209 - DNA, 307 bp, Zea Mays
ctaatctatatcttattcaatctaacgagagctaacccaaccaatagagtcatgatagattgcataatttgtctatccccacctaacctcaaacaaacttttaacctacatcatgtagtctatctcacccacatctatcttaaccatattccctgacccgatgatatacactaacctcgaatcaatgagaccaagaccagaaaaagagcaagatcaacctcatcaagaaaggagagaagtcaaacttgatcatcagatgcattaccatccaacacagagttcttctcaccataaactgtcttacccc

SEQ ID NO: 23210 - DNA, 386 bp, Zea Mays
aactccaccagcgcaaactcgagtctcagaggaaacccaaagatactccgcagtccagccgcacgtggacgaggcctttgcagccagactccagtcgggatggccgcaatcagcagcaagtgcacaacatcgccaaccagcaccccggtggcgaggccccccgccgccaagaatatccccccagggccgcggtaacggaactcgcggtcggggccggggacgtgcgcagcagccgcgccgattttactgcctattccacggcgaagactgcgcccaccaaaccagagactgcccagagacgaaggccaccagagacaggatggcacgggcacaaccagccgacaaccctagagttttcgcgcacacatatcagcaaccccctccac

SEQ ID NO: 23211 - DNA, 1063 bp, Zea Mays
ttgttaaaacacttcgtcgtaaagtagtgtgttagctgtggtaaattaataaagcgtaaaacatgcttggtaatttccgcagtcggctaagatgttcgtctatgttaaaaatattttatgtattcatcgtggtgtaggatagagtggatcgaaaatataaattatgtgacatgtgattcgtgttttaaagatgagatgtgcgaaggatcggttagtgtttcacttgactagtcgataaacattgtcataaataattgtgctaaaattggtcatgagaatgcagtggggacacgtatgcgtttgtgtgccatggtgtattatagtggtggtggcgtaagatatttgattaagatgtgtgggtgtatgccgtaatatggttatactcgcgacgaagaaagatgtatgcactaggtaacatgacgcttaggtcgctgttgtataatcgaataaaggatgtattttttagcatgagtcaaaatgtggggtactagtggcacgctaggcagacggtgtccaaataaattaatcggttgatgtggtagttgtcgtgcgtgatttattgttagtgagtagtgggattacgagttatgtaaggattatgttagaaactagtaggcggcgtgtaactgtgttcgtatggtgaataataggtcagtaggtattgttggtgtcatgagcaaatgtagttttatggagttttacgtcatgtgtaaatgccttcatgttagacctcctaaaatatggtgttttaagtgacttgtgtgttaactaattcgagtggagaaatggttaagaaaaactaattaacctgcttcaacccatgtttcgagttacaatgtctaaaatggtttgctaagtcttatacggcgttagccaactcatgttaagtaagagtcgatagcgtaagtgattgtgatatatatacatgtggtgtctcggactgcgttaataataggcaagccgacgtgtatgtcgtatggcgggctatgccattcctttggttaatcaacttgttagatggctttggttaagctcgtagttatgatgaattacttgttgtagt

SEQ ID NO: 23212 - DNA, 600 bp, Zea Mays
tggcggcgcgaaaaactgatttgggggaaatcccaaattaaggcgctatggtggacgatttgaggcgaggagcgatgcactgggcgcgtaacaacctagcggagcacgctaaacgctcaatttatagtgatcaacagcggtggtgcccaatttggggaagacacgctggcggccggagagagggggaggtcgctggcgcgagctatcgtggctttcactgaggcaatgactctggcgatagacgagctatctactgcggtctactgtgacgtggtgaaatggctgacgatgtggcatgatcaagggaaacggcgacacgatggtggtggtcgcgcagccatgtcgtcggtgcaagtgggtacgtcaaggctggttctatcctttcccccattgatcttttcacgtctatgataatatcctgcctgagctaagcacgaatcgcggcagacttcatggatcgtggtgcggcaatcaccggcggcgaggttcagggaacccaagatcttctttagactactgtacaatcagagtcttcatcagagcgcctaacagaggtagttagagggcttggttctccaatttttgtgtggcaacttaatc

SEQ ID NO: 23213 - DNA, 330 bp, Zea Mays
aaggtctatagagtaaaagttcctaagacacagagcgatcccgcagtggactgtgggttattaaccaaaaaactaaggggcctaattgataacgcgactggccgaaggggtatcgcgggatccaagccgtttgatctgaaatgactggctccaattagatctgtggcccgcacgaatcagtattctacgaggtccctcggatccatatccgacgcccacgatttaatgaaacccagtgtgagtaaccaccattcgatcccgatcagacggttacgattcaattgatcgaagcagtattcccttacccgatcacagccatcggtgaacaga

SEQ ID NO: 23214 - DNA, 1427 bp, Zea Mays
ctttattgatgagtcatggcagctgcataagaggatcattggttttttcttggtcaagggtcataaggcagatgacataggaaaagacttggagagatgcttggtggcttggggattagacaaggtgtttaccatcacagttgacaatgcttcagctaatgatggtgcagtctcctacataggaagggtcagtaataaatcaaagactagcatcttgcaagctaggttgcttcatatgaggtgtgctgcacatatcgtgaacctgatagttcaagatggattgaaggagctggatacatctgtcaagcgtgttcgtgcagctgttagatacatcaagagctcccctgctaggattggtaaatttaagaaatgtgctgagctcgagaaagtcaataccaaggcattcttgtgtcttgatgttgtcacacgctggaactcaacatataacatgttgaatgcagcagtagcatatgagaaggtttttgagagatatgcagaagatgatccatactacacaattgatttaaatgctaacaaacaacctggagtgcctgattctgatgattgggaaaacgcaacaaagatggctgagttcctgcagcatttccacaagctgactcttcgtgtttctgtcaccctccaccctactgctcacatcttctttcatgaggttgctgaacttatcatcttgctgcggtcctggtgtgaaagtagtgaccctttacgcaaggaaatggctaaaagaatgttagtaaagtacaacaagtattggggcgatcatactagcttcaatattctcatatttgtggctgttgcacttgatccaaggtataaactttcaaactacacaaagattgctaccttagagatgtttggtgaggtcaaaggagaggaggtttggaaacaaatgactcaaacacttaccgagctatttgaagagtatgagaaaaaatatactccaagtgagaaggtaaccaaatcaaatgaagaaaagagggaggatgaagaggaaggtggcagcttgatgaggattttgattgctaagaggatgaagatgaataattgtggtgttagtgtttcaaaatcagagttagagaagtatcttgctgaagaggttgagccacaaaccagcaagtttgatatcttggactggtggaaaaagaattcttctagatttccaatgatagcgcgcttggctcgtgatgtcctgtccattcccatctccactgttgcatcggagtctgcgtttagtactggtgggcgtgttttggatgattttagaagctctcttactccattcatggtggaagcccttatctgcactcaagattggctgaggcgtgcgtctcctatcactaatgaagagaatactgaggagctagccaagctagaagaaggtacaatccgtaatattccctgtgtggctg

SEQ ID NO: 23215 - DNA, 1096 bp, Zea Mays
cagaagggaagaacccgcgcgtgcccgcgcccgcggtgtcgactatgcgaataggcccctgcttaaccaaataactggcgaagaatccctagccactattcattgtctcactgacaaatgcacagaggtcccctagcttttgtttcttctctaaattgatccaagcccacggcgtgctcaccgtcaaccgctctgctgctcggaccggccaagattggcgatggctgcccaaattaactactgggcaagcattactgacccgaggtgaacctagaacaggctttagttgggttaatccgaccctgactacacacgaccacgacgacggcgaacaccgaacacaatcccaagcgttccggttgattgagtgtggttaagcataaagggtcgagctgatgagtatcacgagcacgtacgggtgctaaaacatgatcaaagagagcgggagtagacctgggaatggctggccacggtgaggtctctttcacggtggcggaaacccgatttggggaaagtctcgaattggcgagctctggtggccgatttggggtacgagttggtgttttggttgcttgactaccatgtggagccgactgcacactcaatttatagattccaggggtggtggcgcctgaattggagatggcgcggtggcggccggagaggaaagaggtcactggcgcaagtaaatcgtggatgctatcgtggcaagaccaccggcgacgagtggatacaccaaggcaatgtagtgcgacgtggttaagggcctggggcgtggcacaatcgccgtgaaggacgcaaactctagtgacggccgttaggccacatcgccagcgcaaatggtcgagggatagcgtggccacagtgttccgaactcatctgtgacgagatctttttacggccgaacgcaatccacctcccagcgacacgaatcacggtgatcaacgcgaatctgagcgcacggttaaccggcggcgaggtgcactgcacctgatctcattcagtgcactgtaccatcgcgaggccattcagttggtctgacagagcttgtttagggcgaattttctccaaatttcgtgtggcgactagatcaata

SEQ ID NO: 23216 - DNA, 882 bp, Zea Mays
gtccttccatttagcaaaatatggactaaacgggactaaatattagtccatctaaccaaacggggtctaagacgtggtccgtcttttttcctgaagagctgaaaataccaaagtttctagttttctgttagaggagctcgcgtgtagtcgaaacagtgattgccattggcatgggttggcatatggtggtgattggtccaacttcctcttccgtacccagtactgccgaattcagtatatgttggttttttgcttgcatagctaaaactgggcctgttcttttttccccaaaaagtggccttggaaggctagaagtagctgttagtgttattggttacgaactctgaaattagaagcttgcatggcttatctcctctccttttcattcctggtaagatcgatgtctggagtttaaggaccaacagggtctctttatctccatcttccatcgatccagctgaatatctgtatttggatttattctctgaaattttcagagttccatcttatgtgccaacttgatttctggacatgacttaccattttttgttggtacagttttctcaaactgatttgtgattttgcttccctgaaattatttgcgaaaaaagaactacgagactgctgtctaattccttatcagtgttctctaaatgttgatggctgtgttctttgccttatatgttgatagctttggactctacgcacatcatatcaactacatttttgtgactatttttggattccaaagaaaacaagaaaggactcttacggtccatttggttggagagccacgtgagtggagcggtttcattccagatctggagagtggagcggcggtccgtttggttggagagccacgtgagtggagcggtttcattc

SEQ ID NO: 23217 - DNA, 395 bp, Zea Mays
atactaggaatagttgggcctaggcccattacagagggacccggtaggggtaaaccctaatacacctaatatagttctaaacagaggacatggtcacatgggcgctagggagggaggagactgagctggggttggaagacgagggcatcgatcacactgtgttgtcttatatagttatattattcttaatgcctgttgtttagaatgactgacccactagaatgacttgacttatctctcagtagttctcattaatgactgaggttaaaagatgaaatgactgagtttgttcacttcatttcttgtaatacctatttttagaatgactgactcactaaatgcctcctatctcaattattctcaagaataactgaggcaaagaaatatgaaatgac

SEQ ID NO: 23218 - DNA, 779 bp, Zea Mays
ggagattggagatttcagataacgggcatagggtaatcaccaaggtaagatcgagagatgggataggtggaggcaataacaaacaaaagcaccacaaaggacgaagttacaaactcgcaagccaaagaagaggatacgaccaaggtaaagataggtaaagtacaatgcttagattgagatggaaaagaggagattttaaagggccagtataagataaacatcaaggtaagatatagaggtgataagggtaaaggtgataatgatgaaaaacataaccatggacagagtcaaggcaagactgacgaagtggagaaaacaatcaagggtaagatacgtaaggttccaacaaaatggtcgaagtaatagaaattattactgagggaagttataaggaaacgatgagatcagcaaggatgtgcgaaatagaatggtaactcatggatcattaggaaataagggtggtcaaaagcatgttaaccaaaatgtcttaaacaaacaatgggatataaaggcaagcacatataaaaataagagtatgcaagattccaatggtacgagcataccaagacgaagagagtacaaattgccaaaagatagcgacttaacaatagaataggaaagggtctcaaagacaggaaggtcatggacatataaactgaaatgtttaagcaggcagtagaaacttagaggcaagtatttgaaacgagagtattaaagggatacaagcatgtcgataccaaaggactagagttcgccagatggtagcaatttaatgacga

SEQ ID NO: 23219 - DNA, 799 bp, Zea Mays
tgttagaattcaacagtatctacaattgtagaagtaaatgtagtgtgatggttttgaaatttcgtcgtggggcatagacgtttccctaagatgggtgatcgcaaacatgtcgagtgtgccatgccaatttaagtcagtgccaacttaaaccgaccgctccgttagtagggcatagtggccaccccgagttaagtaagcgtgagcatgtcgcaccgccttaagtcattgccgacttaagtcgattgctccgttagtagggcatagtggtcaccccgagtttagtaagcatgagcatgtcgcaccgccttaagtcattgccgacttaagccgattgctccgttagtagggcatagtggtcaccccgagtttagtaagcgtgagcatgtcacaccgtcttaagtcattgccgacttaagccgattgctccattagtagggtatagtggtcaccccgagttaagtaagtatgccaattgacagcgaacaatttgagtgcctttgaagtctttttattgatgatatatttctcaatttacagaatacatcgtcgtcccaatagcttccgggatgtagctaggggtaaaacttcctgaggtgttctatgttccatgagttcccaatttccgtgccgtccatctgagtgagacgatatgatcccggccgagtgacttctgctactatgaatggtccttcccatagaggtgacaatttgtgccgtccctcccccgttagaattcggcgaaggacgagatctcccactgcgaaggatcgatgccgtatggccttatcatgataacgcc

SEQ ID NO: 23220 - DNA, 339 bp, Zea Mays
tggagtaaagaataaaaacgtgctgccaaaatttaatcatcaagcgcgaaggtgcattactctgacagctttgaatgccttctgtcaaatggccaagagatgtgcgtatcgttatcattgtattaaagaaaggggtacaaatctctactactctataaggttgtattgtaggcgtccacaactgagtggcgcacggttctgcccccgctctgctccgcgattctcgcagccaatacgcgcagatctcgtctcctccgcggctccgccatcaacggaaggtgtccgaggatctcctcccctctcctccgcgatccccgtcatcggcgccgccatcaacgc

SEQ ID NO: 23221 - DNA, 284 bp, Zea Mays
cgatgcacatcctcctagtgccatctttcgtctccacgaataggacaggggcggcccaaggtgaggtgcttggccttatataacctttctctgatagctcatcgatctgcttcttgagttcaaccaactctggtccagacactctgtaggctcttttagaaataggggcagtgccaggaagaagctctatggcaaactcaactttccgctcaggtggcatacctggtaagtcttccgggaacacatctgggaattcggacacaaccttgataatctcgagtgaa

SEQ ID NO: 23222 - DNA, 519 bp, Zea Mays
agaatttggtcgctcggctggttggactatgggtccagttgtctgtagggacttcgcctttgataggcatacttttagtcctgcatttgttgtggatcttggtgaccgttctcgggacacctttattgtggagatagaaaaagaggcggaagagcttgtcggtccggtgactgaactagaggtagagaagggtgtatagctgctcagtggccatgtgcgcctgaaatgtgtattcagccagatggggcttgtttttgaagagcacaaagcacactagaagagggggaggagaacgttgactaggggctccactcaatcgcaaacatcgatagagacttcctccgccttcttaggggaatttgatgtgggggccactgaagcttttgtcactgagctagcggagatgtgtgggccaaccgtctcgacgcacgatgcggaggctaaatccgcgatggacttcgtcgagcgggtcaccgggggtaagttggggagagatttgattcccatgcatgttggttc

SEQ ID NO: 23223 - DNA, 450 bp, Zea Mays
atcaaatccaccgacgttggggggcaagcgtaggcaggcgaacatgatcattcccttgttctgcgcatcatggatggtctggctaggcagcacggacggttcatgtagcttgggcagacggtccggcagtgtctagagataacaacagttacgtaccttcaagccacgacgatctgaaataggtatgtggaggcaaaattcagcgaaagcacctagatggctgattaaggttggtcccacttttgatcaattattatctaagtacgtcaacaaaagggttggtcctcgtgaccggctagtaaagcgacatcgttcgcccaccatgagaagataggtgaaagaaaatacttcaccccagagggaaaggccgaataaatgaactcgaaacactattcactgatcccaaacacaccagcatggacacctccatatcgacccatgaacccacca

SEQ ID NO: 23224 - DNA, 422 bp, Zea Mays
gccgcagatgggcacgggtggagagatggcctagagactgtggctccggacgtccgctctgcaggatgggccgccgctgatgaaatgtaggcccgaaacgggtccatgggcctgggctggcactttcggtggtcctggcagtaaaatatacgtactcctccgccaaaccaaacatgcctgatgccatgaaaagtccgtccgcgcagtctgaaaccacaggatacatgccgaaacagagtccggcccgaggcccggccggccgtcgagcgagaaaagagtcagaccaccgctttacgacgcctttacccagagcaatacaatgattgcctccatgatggtggtggtggatgaactacgcctgcatgcgtatccggtatccacccagcgacagcctgggtgtgtgtgtgctgctgctgctcctc

SEQ ID NO: 23225 - DNA, 492 bp, Zea Mays
cagatctggacgatgttacggagggccgaggcagggcacgctcagcgttccctgtcgttgccgctaggcatggcgcgcggcaagcctggtctgggcggacagcaaagcaacggacatggcgatccctcctgcctgttgctactagctactactggtgtcgggcgattgttgtagcctggacaacgtgaacagaggcttccacgagaaggcaagaggattgtagctcaagtgtccacgagaagccaagtgatcgagcttaaacaggcttgcatactacacgttaatgggctttggcctttattgatctttgtgctttaatctacataagcatttcctatatacggggagggccccctggttcttggaggcccgatgcgaccgcaccgctggcacctgtccagggccggccctgattgtacaatgtttgtgttgttgtaccttacgacgtcacacgatgaaagtacccaatatataataatgagagaaaattac

SEQ ID NO: 23226 - DNA, 645 bp, Zea Mays
ctggatgtatattttggttctagtttcctaggaaccaaaatctggttccttaaaacctgaacgagtttgaagtcctctccgtgcttcacgggctcgcaagccatctgcgtgcccacgcgtggcaacccagcaccagcatccggtcctacgtggcagtgtcgtggtatgcccatgtatagatagtggtatgcgtcgccatcaaacagtgtgtgctgtgtggttgagtagtgtgtcggcttttgtcctgacctcgtggcacccccacaccttacaaggacttttgcataagggtgaagaatgagttgatgagtcactgctcactatgccacactgagacatgcttcagctcgctgtttactacaggggagggaactgttggggacatgaaactcctctcactgtcgcgatgctcaggaggcatggtcgcggctgtcgtcaaagtgatgctcgaccatcacgcgggcccctctacaacgcgtccatatttcgtggactccccatcgccccgccccaactcagtagctcacacgccagatccagtacaaagcctacagaactttccccacctttgatttgagttgtctgcttccagtcaatcgatgtcgccgctgaactagaagttgaaaccagctcgcccggggtccg

SEQ ID NO: 23227 - DNA, 942 bp, Zea Mays
gtgcagtgagtgggctgctcaagacacccactgtagcagtcacgttgccagcagtgacaacatccggacactcttgggtgtcagcctcctgcttggcgcgaactccatcctgcagcaagacaggggcagcaccgccagcagcatcgacgagggagactccgtcttcagtagcgcctaggacacttgcagcaacctgaggcacgtggccagcaggggcagtgtccaggcacaccatgcggttgttagtaggggcagtgttcgggcgctcttcatttgtggtcgcgcctgggatacttgcagcagcctgaggcatgtggccagcaagggcagtgtccaggtacaccatgcggccagcagcagaagtgtccaggcgctcttgggcggtagtgcgacgtgccacctcctgccgtgatgggacgggggcagcagcactggatgggaccggagcaataggacctgtagaatacatagtaccaacaggcaaagaagtgcaatccaagtccaaaagaaaatcaaagtgggatgaaggtgggttagaaatttcagcaaaaggaaaagaggactcgtcaaaagtaacgtgacgagagatgataattctatttgtagtaagatcaagacatttatatcctttgtgttctaaagggtatccaagaaagacacatacggtggaacgcggagcaagcttatgaggagctgttgccgacaggtttgggtaacacttgcacccaaaaacacgtagatgggaaagatcaaggtggatgcgaaacaaggcaaagtacggtgtagcaaatgatagtgtttttgtggggcgcaagtttagcaagtaggttgctgcacgaagagcctcgacccagtatgtggtaggaagactagcctgaaacataagtgttcgcataatatcatttgtggtgcgaataatgcgctcggcgcggccgttttggg

SEQ ID NO: 23228 - DNA, 761 bp, Zea Mays
atgacctcctccaccttgagggtgcagatggcatactcgatggcggcagctatgtcaggcgtgcgatgcaaggggcaaacccagagccatcgctggtgtactccacgacgatgggacggtcggtcgatgagccccagaagagcgactcgctggcgagcggcgagagctgcttgcaagcggggattgaaccataggtgggtgcgtcagcggggtgtgggttgatttagaaaaattaaggaggaagaagcgcggttgtgggcggaggaaaaagcgcgtggaggttgcgttatggcacacggggatggcaggcgcgtgagaagcaggcggaggaagaagcgcgtggaggttgcatgcatccctatctaggtgcgtgagaaagaggcgaccgagatgaggacaatggaggttgttggtgacttggcgtcgttccgatgtttgcggtcggggcagctcgtgcgcggagtggtaaaaagctcgattgatctacatgatacactgcacatttggaataaagttgtcccgtccatggattgaaatggtgcgaaataaaccaaaccatataaaaaccgaattcgaacaacagctacatatccgaatctatctagatcactgttcgctgcaaagaacacctcacaagagtttactgtgcgtcctaaagataaacccctcctatcttcagaaattaaaggtttttttacatgcagacgcttccctcctcgaaatcagaatgaaacgaaactgaataccaaaatatgtcctcg

SEQ ID NO: 23229 - DNA, 911 bp, Zea Mays
caccactgaaacttgaaatggatctgacagtaagttttgatgaactttagacctgattcaagctcgattgagtaagtgaatgatcaaggttgctatagcaaaattgaagatggattatagatcaataactttgatataggaagattagtgggctatcacataaaaattggagaaaactactcctcaacttgggctgtcagaacgactgaaggtggtggccatggtacagtactaaaaaaatcttcagattcatccccctcgccgttggtgacctccgcgcaaggattcacgctaatcgcggtgatttgtgcaggactcggacaggatagtaccagggggtgaaaagatcggaaggggagtggatttggtcgcggggtgaagcttatcaaccgcacttgtagccatgcgacgtggccggaccgccggtgtcgtcatggtactccagcaacctcagctacgccacgccgtagctctttaccacgtagtagtaatcgtggtgcgcctggacttgccatttcaagagacgttgcaccggcaagcgccacgactgaaccgctagtgatcttccttctctctggccgctagctttcatttccaaaattcggagcctcctcttaattcccctataaattgatggcccggtctgctgcgccatgttgtcatgaagccagagcaccgactcccgccttcgattagccaccatagccggagaatttcattcttcccccaaatcagttgtctgcgccaccgtgagatgtcgcgccgtgcccagccacctccaggtccgccctcgctctccctgttcatgttttagcacccacgcgtgcttgtatggctcgtcggctcaacccattgagctagaccgcgctcaatctaccggaacaccttgatttgtatatggtgtttgccgc

SEQ ID NO: 23230 - DNA, 271 bp, Zea Mays
gttgatggtgacagtgtcatgtttgctctcctccacaggggtgatcctgttgttagccttgcgttggaggatcaagtaagatgttgttgcatatgatgttggtgtggttgtaactgttgtcagtgtgggcgacaaggagattccatccgaaggcagttttggatctgctatcggctgaggaagcgttacaggtagcgttgttataggtgttacctccggcttaggcttgatcatgaacaggttgtttcaccctacacgatctcgagaacta

SEQ ID NO: 23231 - DNA, 752 bp, Zea Mays
cgatgcccttggcaataaagaaacaacgaatagagcctcgaaagccccgactcccctgccgggcgagccgatcgacatcatttgaagcctcgacctcctccacctcaatctcttagtaggtgggaacatgcggccatgtgcaccgcaattcatttttgcaaggccatgcaggcatcgggtcacattcagggactgttgttcggtttcccctaacaaggtcaagaggcagacccaattccctcgtcaaatgggaccacccacgtttcgactcaggaatgcctcgtgatctcatcgatcggggggctccttactctcggggagccttaggagaccctcaccaatgccatagtgtgcactgcgatgtcagccccatctcaacttgactcgtcatgccaggaatcgccaccagggcgagacccctgctcgagatagccgaggtcccctgttgggaagcgagtgttgcctcgatggcgaatagggaagctacaatggggcatttggcaaacgtgcattgaatcagctcgtgccccgcattgcccgatctgcagcaaggttgtaccaccacagttccctcggacacgccggaatgtcgcggttgtcgtagcactcctaagcaagctccccgaggcgatagttctgagtgaacgaggaaccaactaagaaagtcaaagcctactccatctcgccgcgcggtagcaagacaaatgtctcgtaccacgacatcgggagctaggagctaaacagagctccac

SEQ ID NO: 23232 - DNA, 516 bp, Zea Mays
cgcccccctctcacctccaggtgggcccaatgcggtgcactgttcttcttcatcgcgaagacatgcccagccgcacccgcgaccgccatctcggccgctcggccttctcggcctctcggtgttccgcacctataactgttgtctgtttcctcttctccctcccccatttcttgtccccattcatgaaggaaaccaccacctatgatggccattgacaatcggccatctatcacccctgcgccccttctccctcttcccctctctctataaataggaccggacggagctccctctcccctgccgagcttgcccctctcttcctcctcgcactctctatccttgcttcctcgccgcgaccgtgccgtcgagctttgtcgtgcccagcccggtccccctgagccctgccaatcgaaccacgtagagtcgtgcccacaccgtcgagctccgtcgtttgccacgccgtgattcctctccttcccactgccccgccctcaccgaacaccccctcatcgaagc

SEQ ID NO: 23233 - DNA, 1199 bp, Zea Mays
agggggggttagattagggtttcaaacctgggttagaatttgggatgttacaaacctactccacttaaaggaatctcaccctcgagattcggacggggcttgagagaaggtaagggtattccttcctcagagagtcctcactttcccaggtggcttcctcttctccatctctgctccactgaaccttacagagtctcacttctgagttgcgggtccttcggactgctgagtcgagaatctttattggcttctctcggtactggagatccttttgaatctaaattgcctttgcctcgatgtggttctctggtacttgcaggcatttgcggagctgggacacatgaaacacattgtgaataactgacatggattctggtagctcaaagcggtatgctgtgggtcccactctgctaatgacggggtaagggccgacgaaacgcggtgctagctttccttttatttggaaccttttgacaccacgcatcggggagaccttgagatatacgaaatctccttcctcaaatctgagttctctccgtctgttgtctgcataacttttttgtcgactctgagcttcaagtaacctcttgcggatcagggcaactttctcttcggcttctttaacaaagttgggtccttctagtgtcctttcccctacattggaccacattaggggggtctggcattttcttccatacaatgcttcaaacggtgacattttgatgctggcctgatggctgttgttgtatgagaattcggcgtacggcaaactggactcccaatccctgtcgaacgttaacacacaggctcttagtaaatcttcgaggatcttgttgactctttccgtttgaccatctgactgggggtgataagcggtgctgaaatctaacttggtgcccatcgcttgctgaaggcctttccaaaattttgaggtgaactgcgtccctctgtctgacactatcttccgcggaatgccatggagcctgactatctctttaagatatattcgggcaagggcggctcctccaaaagtggtttttactgggatgaagtgggccaccatggtgagacgatcgattattacccagatagaatcattccctttttgcgtttggggcagtccggttacgaaatccatgcctatttcttcccacttccattcaggcactgggaggggttgcagtaggcctgtaggcttc

SEQ ID NO: 23234 - DNA, 377 bp, Zea Mays
aaagactaccaggccgaaggggtacgaataagctctgaccacccgattagagatggagggctcagatcacattgggacggcatcgaaccggtaaccaatatggaccgtaagatcacgatcccccggttcataaccaacatgcccaagatcgattctgatccatccgatcgacacccggccgcccggatttaaacacctgaaagggggtacacgccacctaatcctatccgtgcgttgacgcttcaatggttcggatcgatcctggtcacgatcaatccagaacgccccttgatagatccaacggctagggacccttcttcccccgactggacctgagcagaggcagcacgaaagtgcccagggcggcggcgtccgag

SEQ ID NO: 23235 - DNA, 727 bp, Zea Mays
gactatcctttttataggcccagggagagttgcctcgtagactggagctgtctacatactgtgaaggggtgtcttcataccttgtagacagtatgggcttgtactttgtcgttgacttgtgcttgcttgttttctgttgagagccgaggccgaggcggagggctcggtcacgtacccaagccccctggcatggggttgcccataccgtagtggtcgacacagtgcccgtcatgggaaaaagcatgttgtgggatgtgtcagctccactgtttctgatgacattgggaatgtcctctatcacagatatcgagggaagaaccgagctcggacgaggcggaggtccgtctgaggttgcgaccaagccttgtcttgagatctgatgacacgtgccacaatcgacggagtggccttccacaggattcacgggtgaggcggagttagccccgaggctgagttctgcgttgggcaaggcagaacttgtgtccgcggtgtggtccgcatcctgtcgtattacgcatcccatcaggggctgtcagatggcgtgcgcacgcgtaatgatgttggtgaatcttttgacaagaccgtgatcctattgaaagattcacctgtggcccggcgtgaggtaggtgtgcgcatttaatgcggttgtctcccaacggccctcgggcatgctttgtctttatcgcctgaggcgggctcggacgaggcggacatggctgccctaggg

SEQ ID NO: 23236 - DNA, 459 bp, Zea Mays
ggaaaatccaattcctcgggctacagtggagggattgaggggaggagtggtgcactgggcacgtaataagaaggcggagcaagggaagccttcaatatatagtgaccactcgagcgcttcgcgagtttgggatgaaatgatctcgtggccgaaaagaaggtgactcaccggagtgcaactgttgtggcgctcggtgaggtaaggaccctggcggtaaatgggttgtccattgtgacctattgcgacgtggtaacgcccccaagcacgtggcatcctcgcggcgagcgacggatgccgacaatgtcatttcggccggtcttgaagcaagtgggtacggtggccagctcacaatctgatccgctgtcacgatcttttcacttgcccggtaatatctgcgtcgagtcgtgcacgatcttcacggcgagctcgaatcaccgcgtccgatcactggctgtgagg

SEQ ID NO: 23237 - DNA, 685 bp, Zea Mays
gcagtaggagcgctgctgcggaaactcgtcgctggtaggattcaagcgtcagcgaagccattcaggctttgttctaccatcgctgcaactaggggaagatctaattggaagggcaccagctgcaatcggaggaattactcgctgaccggccaacctcgccgccattcgcaactcgccccgcgcagtgagcttcgcgccgtgtctgccagtaactcccttcccttagctgcgtcacgttccttgatcggtagcaaatcacctcacacccgaattttactagcatagacttcggaattgctcgacgacatcacatcccgtcgtgaaatcgccccatccatggttgagaacctctgcggcgggtaacagtgggcaaagccctcggggcaacccccatcgcgcccacttccattcgcactagtttgcacaggggattggctccgggagtcgggggattggattaacgacgatggcgccgccgctcggctggggtcggggtttgtgcaccgttggatacgagaggtgcggccctgattagaatcgaacactggttcggccagggcctctggtggccatcgatcccagatccggtggcggaggatggttatgcggttcattaaaatcgggccgcaaatcttaaatcgttcggtctgcgtagaataccgttttaggaaggtctagatctaat

SEQ ID NO: 23238 - DNA, 1170 bp, Zea Mays
gtgggccaccttggtgagacgatcgattattacccagatagaatcattccctttttgcgttcggggcagtccggttacgaaatccatgcctatttcttcccacttccattcaggcactgggaggggttgcagtaggcctgcaggcttctggtgttcggcctttgttcgctgacaggtgtcacacaaggccacatactgtggtatctccttcttcatccctttccaccagtatctggctttgaggtccaggtacatcttggtggttcctgggtggatggagtaagctgagttgtgggcttcattgagcaggacttcccgtgcctctcccattggtacacacagacggttcttgaaccaaagaactccttgttcatctgtcctaagatccggaagttgctccttgcgagctctttccataagtctggctgtctctgtgtccaggcgttgagccttgcatatgagatcttctagcattggcttgacttccaggctaccgttgtcccccagacatgcatttagctgagctgattcctccttccaatcttctaaaaagttgatcccctttatcccgaaaggttttcggctgagggcgtctgctaccacattggccttcccggggtggtaatggatctcgaggtcatagtccttgatcaattcaagccatcttctttgacggaggttgaggtctggctgagtgaagatgtacctcagactcttgtgatcagtgaagatgtggcatttgttcccaatcagatagtgcctccatatttttagggcgtgtgctatggctgccaattccaagtcatgggtggggtagttctgctcatgtggcttgagtaacgggatgcatgggcaataactttctctttttgcattaagacaccctaaaccttgccttgaagcatcacagaagatgacgaaatcctggtgtatatctggtagtgacaaaacgggtgcggtcgtaagcttatccttgatgatctggaaacttccctcacattttggagtccacacaaacttattgtcctttttgagaagttcggtcataggttttgctatgctggagaatcctttgataaatcggcggtaataccctgccattcccagaaagcttcgtacttcactgacgttggatggctgtttccattttgaaacggcttctaccttgga

SEQ ID NO: 23239 - DNA, 736 bp, Zea Mays
gattgctctcgtctcaagaatacctaacctggtactacttacaatgcatgcatatgggtacgatcgatacgaaccgcctgtgctaactggaccggtggtggctgtctcgacaccgcctccacttgcatcctctgagtctctgactgatccacttggatggatggacggatggaggtcgttgccgtacgtgactgtgaacatacatgcatacacacacaagcagctagcgcgtgcgatacgacgacgagccattgagcagcagagagtagatgttgggggactagacattacacaaggaataaaataaaaaaaggcaagcgatggctcgctttagtgtcatcatccggatatataacaacctttcggagaacatcgatcgatcacgtatgttacgtacgtcgcgcttagcttgctttactagctagcgtcaacaacaacaacaacaaaaaaacaaatctaaaaagaaggcagttttggtcaaaagacgcacgcacgcacacacagcgcggccgggacgtacgagaaacatgcgtgcgtactgcgtaggcgtttagtgcggcacgactgtaccagactaatggcacacacgcatgcatgtggtaaggtcagcgacagtgtttaatctatatacggcaggtgcaccacatacatacattgctctggaagtctggacggccgggacgacagacggagtagtcatgctcgtggattgaacacaacacacgcaacaatcttt

SEQ ID NO: 23240 - DNA, 345 bp, Zea Mays
agatggtagttcccattttcttgaagaatagggttgttggggtaaagatcctcggacccctagggcccaccgatcagggagagcgcgcgagggaaggacctccggctaccaggggccacccgttagtgaggaggcaagggaatagtctacccagaaagcacccgcccccgaataaaccctgaggcaccaagcctggggtcgggcgtggcggagcatcacagggggccaggcaaaccgaaaggaaagcactcgagtgggttcttcgcttggcccaagactaacctgccgtaagtggtcggccgcattaactacacctggcaccaggtcatagtagagaaccggtcc

SEQ ID NO: 23241 - DNA, 305 bp, Zea Mays
attacaaaatagggagacaaaagcaaaggcactaaaggggttctcgccgatggtgaagatggcgacgaggctagccacgttgatggtggcccgacggcagataacttgctccgacaagtaatttctcggttccccggccacactccgagctcgatacactttgtagacgctctgtggacacgtgcagacccttgagccgcgaccctagggtccaagcataagtgaatcgcgaccctgtcgatggcggctcccacgttacaaacgtcagactcctctattctccgttctctcctctcggttggctt

SEQ ID NO: 23242 - DNA, 679 bp, Zea Mays
gcttactctggttgattcaggcagttcagcaaccttcatcgatatagctatggtggcttagttgggactatccacacagtgttgtagggcgatggttgtgaagatagctaatggtgacatgatgattacttataatatggtgttcgaagtggattggagggttgttggccatgcttttgtcacgctaataaggatgctatacaatggggtttatgatgcaatactagggtatgactggatatgagcacatagtcccatggaatgcgattagataaataaggtgttgacatttcaggatcaaggaagttgggtgcagttgagaggagattatgttccaatggaagaaatcacacaggtgatagttattctagttgagaagacgatgagagggaatgagatttggacctttgtgttgtgggaagaaaggcatgaaactaacaagcatcatgttccagagaagatttagggtttacttacagaattctaggatgtgttcgaggttccaaaagggttaccaccgtctagggaatttgatcctctcattccactgctccctagggctataccatacaatgctagatattatctatattctccactccataagcatgagattgagaggcaggtttgggctctgttggatgatgggttgattataccaagtgctagtctatttgct

SEQ ID NO: 23243 - DNA, 589 bp, Zea Mays
atgagggaatatcaaccggggcagtctgaagaacatcgccagggattaattcaacaccactagcaggcatcagaaccccagcatccggtacgccgacctctaaggcgactccatcatttgaagcatgcactactattatgccaccagagtgtggtggagaagacccgacgtggacatccatggaggtatgagaaggggagctcgctcggacaccctcgggggctgggtcacagcttgctctacccatccgagctggatcattaccggcaacaccctcgggggctgggcaaccaccaacaccacccttaaggactgggttctctgcaacagccacctctaaggctgaaggattctcagtcacctccatgggaattgagcgaccttgaccaacctcttgactccgaagaccgccttccaaggtcgacgatgcacgtgatgctgcccgggatacctctaataccacatctggagtgtcagagcagacgtccatcatatcaccatcagttggctctgacagcatatcttcaggaacaacatcctcgagagcccgatcaaaattttctatggataattcttgcaggctaacgag

SEQ ID NO: 23244 - DNA, 695 bp, Zea Mays
taaaaacagaatagtacaggggcccctgcgcaaattgtaccgagactcagaagtatcccgcggggacggtgggtttatttccccaaaacccagggcctctttagaaaatgtttcacatcgaaggggtgcaagaatcccaatacacagagcacagttaaattggactgcgggttagttcctaaattccaggagggctctttaacaaaatagccggggcaaaagggtatcgtgggatgtcggtcgttggattagatacaggcggtacgtattagatccagaacgcgacgatcggttgatccatgtgggccacagattccgtgatgaacgatcctgatttaaaacgacctaatctattcttccgaaccagatcggaatcggacggctctcggtgtttccaactgagacaagccaaccgccaccgattttggcagtcaacccgatccaacggccagatctcttccccccttaccctctcaccacgccagccagcagccggagccgtcaccagccatggcggcgccaccgttgacatcgcctgactctgaagatcggtgcccaagtgcgaccctaacatggtgtacaggccactacgaatctatttgtaggctcaatttcacctttggaaccccatgtgtagcgatcaccatgatggcgcggcccctaggtacctaagtaatttcgacgacaaattcccc

SEQ ID NO: 23245 - DNA, 558 bp, Zea Mays
acctctaatcgctcaacaagatatttatttatccaatgggaatggaatgcaatatttgacaaagcgaaacatcgactcgccatacaacaaaaatcatgacgacaccgatatatgctatcaactaaccgtttaaaactactaaacttacttctcgcttcgccactacaccatcctttagtcacatgaccatcatgcgcatccttcacacgattatacaatagaaacctaaacgtcgtgttacacaatacatacatctttccttgtcgcgagtataaccatattacggcatatacccgcacacctcaatcaaatatcttacgccaccaccactctacttaagccaaaacaatttctacctacaccatccgaactttcgtgtcgagcacaccttatatttccctgtctcgcatacaaccatgtggcagcgtgcactcgagacaattccgtttaatttaacgcaatcactacaacaacgcatatcggcacacacaatcatccacagactcgcccttcgtacaaaattggtagacatttttaattcttgtcaccacatctaac

SEQ ID NO: 23246 - DNA, 328 bp, Zea Mays
attctgccaacactgttacaatgagagcaccttttaaatcagcgacccactgaaaattgggtagggcctcactaaccaaccttttactaactagtcgggtaggcaccaactgaaacaatgaagggccacatctttaacacacttgccttacagaaaccgatctttccaaaatagggtgttagaaccatccccaatttgagtaaggactgccacactaaacagatttcgaacctccttacaagcctgaataggataatcagtccatggcttgctcaagtcgctttttggagccacaaccagcaaactctcaaagcctagccatgaaatc

SEQ ID NO: 23247 - DNA, 519 bp, Zea Mays
cctccacagtagttggtatgtcagaagcgacaagacaagacgtcataccgaatggacgaatccatgcgcacggaaggacaacgtagggcccacgatggcaggagaaaactatgttgtatccaccgagccctaaggcagaatcatgggacccgccacacatcatcgcaaggacgttagccatgaacccgccactagaatgggagtgatgagcggcgccataccggaagcactactttgcacaaccaggggaggggggcccaccacgacaaccaaaggactctctctttctaagagagacaacaatgtaaggcatgtcctttgagatataaaagggaaggtccctcttcctttcgcacacaagcacaccagttgtaagcaatactacgatcaacactacactggagtagggtgcgaacccgaacctgtataaaccatgtgtcccaagttcattgttcgagtcctagagaatcaccattcagagcaagtctgcactagcaccccttccaaacacaaatctat

SEQ ID NO: 23248 - DNA, 651 bp, Zea Mays
tcctcatccttcatcaggtaggcgctcgccaccgcatccgcatccgcccggtcctcacttcctcggctcgcctcgcccgtagggtcttgcagacctcatacgcatcgagagggtgctggtgtgcaggatcatatgagagtgttcaatgcgttggatcaagtggaaattcttgtaattttgtgctcaggtagactgatctattgagtattgacttagttggaacagctgctaaaaggcagttattgttttatgtgagtcgtgatcaagtgtatgtcgcagtcagttttattgcgttggttcagctctagttttgtttgcccagcagcatgtgatgaggctgggattttacagtaggtcctaaaagttgattatgtccttttagtcgctagtgatccactatgttgcaggcagcttgaagccttggctacctacctttttttgctgttagttcttaatttgcatcctgagtgtttgccattcctaggcttcttgctgctgcttttttagatattatttatgtgagaaatgaagccatttgttttacaatttggtttcgtgtaggatgatctgttatgttctatctgaatcagtgcgtttgaccaccttgcatagttcagtttctttgttttggctgccgtgttatgacttatg

SEQ ID NO: 23249 - DNA, 422 bp, Zea Mays
gtcgccgaggcggccgtggaaggtggagtccagcatgatgttgctggctttgatgtcgcggtggagcaccatatgctcatgctcgtggtggacgtagtgaagccccgcagctacgtcggcaatgatgccgtagcgggtagtccatccaaggatgcgaccttggtgctccttgttgggaaacaagtgatggtcgaggctgccgttgggcatgtactcgtagataagtaggagctctcctttctcgtagcaccaacctgggaaaagactttaaaatacgtgatcaaaatcatgattaattgctagcatgcatggatccagaatatttgtaggggtaaggggtgtgaaacttaaatgagctaatgtttaatttgcacaaaaggagaatggcaatcgatctactgctctttacaattccaagaaag

SEQ ID NO: 23250 - DNA, 426 bp, Zea Mays
tgactgtttacaacatatgtgagtgctgatatgttggtgtcttttcagttatcaggtcatagtttcaactgtttgcattttttttgtggtaaaaggaggctaaatatctcgatatgttaggatcctattttcttgtaaatgcacttaacgaattgagtactcagatatggtgtataacttgtattagtactacagtgacctcacactgcaacacatcccaacccaatatatatctttttagctttaacaacaaaatagtgacacttgtagtgtgctgcctatgcttgacatggtaaccttttatattgaattaattacaagcaagaaacactgccaatagtggtaggtatgtggtgacctgatgcattgtatgcatcattcattattttaccttgaacttgaagactccacttaaaataagctcac

SEQ ID NO: 23251 - DNA, 369 bp, Zea Mays
ccggcagcaacaactcatcgacattagtggccatgggacatgacgtacaggtacctgctctgctctacttactcccctaccaagccatggtgttccactaaaattcattacgaacttgcttactgaaacagattgatcgagatagtcatttgttctttgttgcgaataatcgtattatttacgtctgatccattcttcaggtccaccacacgtcttcaattttctctaagcttccttttgttcacatggctttcttggctgatccaccatgcttgcaaattcaagaaccacaaaaatattgatcttctttcatagggtgcaatgtggatcatctaaggcgggtatctaaacatatcaagcaatgataac

SEQ ID NO: 23252 - DNA, 533 bp, Zea Mays
gtatggtacaatatttgcgcagcggtgacaacgacggtagtccgcgtgggctgtgttatttggtgcggcccactagcatgcctagcacgccgcacttatctggcactggcccagcttaccgtttcagtcccccgccaacgctctcactgctctgtggcccccctctagctctccctcgcattgtctctcgagaggctgagacgcggcgtcgccttcgtcctcgcaaccgctgcgacgtcttcggtccatgcccgcatcccccatcttcacgacctccacttcgtcagctcttctcctccttgatctctagcacgcgcgcgcaaatgatgcagataaatggaaaccgtgcggaacctaggtcgagcgagggcttgccgcacactctgacacgctctgcatctgtcgttggggcttcgatgcacgcacccaccacgcgctcgacgtgctcgtccaccgcgaggcctccatcgacgccttcgtctcgctcgcgctcgaccacctccactccatctccaccaagggctcaccaccgg

SEQ ID NO: 23253 - DNA, 473 bp, Zea Mays
gctgagtctcacctttgggttaaggacaccttatagcgtttatgatctttttaatctttgggcccggagattctcccccaaggatagactaaagattctagtaggggctatagccatatgctgggcaacttggctaagtaggaatgatgtggtttttaataaaagtccgatcaaaacttacatgcaggtactttacagaggaacctactggtgtcgtttctgggcgcaacttcaaaggcatgaggaagacgccaatgttatcagggaggcctgcaggaagcttgagacgacagtgatgcagatcttcgcttttcatgggtggcagtttagtaataggatcgctctgtgagcgttgtttttactttttgctgtccacccaactgcgtttggggtttgtatcgccgcttgtggctctttgagttggatctgttggttttgtgttggcatgacaggccgtcatcttcgtgatgtag

SEQ ID NO: 23254 - DNA, 606 bp, Zea Mays
aaggattgtttgatgtgagttatggtggtaatgaatgaaaagagtactcagattcattaagcatttgtaaacctcatccccagttcacagaagcattattgttgccatttaagttcatataggcaacatacaaaagcattcatgtttagctagcatttttgttgccctctgtagataacacacacaaaagactgatcaagagcatcagtgcatcatacaaaaacattcatgctcaactattatagttaaaggcattcatcggccttgatcaaactgcatacatctacttcaattcttattattcttggtccttgtttctcccttatttgttggtggttttgcaatcctctttcttgttgtgttccttccttctttggttgctgatgtgaggactataggtcttggcacaggaatgtttgctatgatgaatttacattcgacacagcttgtttaggttcctgtgaaagtagttgactaggaccaacctaccaaaaaatagtgattagtttagttgttaaggtgactatgggtggaaagtgcatttggcagtagctgacctgttccatcatttgaagtagcatcgttgagctcatttctatcatcaaa

SEQ ID NO: 23255 - DNA, 476 bp, Zea Mays
catacagcagggatgtcatcacagcgctggaagtagaagctaagaacacaggccaaggaaaatctaagggattcagaggtgataggtccaatcaggggcctgaaaagtgaccaaggttggtaatccggcctttcaatcaaaaccattcttcacctcacccaccctcctacccatttaaacaacatgtcttcattcgccctgccactgcccccacttcaacaaatcagccgagtgcccctggtgctcgtttccccgctctccctagttcctcaattggctgcttcaattgtgggaagtctggacattttatcaaagactgcccatatccgaggcagaataaatccaacaatcagcagaactcagggagctcaaatcaaggcaaggggaacatggcaaataatttagcgggcaagaatattaagaagacagggcgaatatattacactcaagtggccactacactggagggagagccg

SEQ ID NO: 23256 - DNA, 413 bp, Zea Mays
gaggagaacgaggtaaacccaccacaaaatccatggtgatatgctcccatttccactccagaatttccaatggcttcagtaaacctgcaggctgcttatgctcggccttcacgcgctgacatacttcacaggcgaccacatacttagaaacgtcaaccttcatccgcttccaccagaagttttgcttcagatctcggtacatcttggtttcgccagggtgaacggtgtaaggcgttttatcagcttttctcaatatatccatcttcacctctgatttttgaggcacacaaaggcggcccctgaaacgaaccaaatcattctcatcgatggagaactcctggggtttaccatcaccaaccctctttcgagcttcctgcaataaacgatcctgctgctgagccacacgcactctc

SEQ ID NO: 23257 - DNA, 456 bp, Zea Mays
ctttgacactattcttcgtggaatgcaatgaagtctgactatttctttgagatatatccgggcaagggtggctccttcgaaggtagtttttactggaatgaagtgagctaccttggtaagatgggcgattataacccagatagaatcgttccctttttgggtcaggggcagtccgattacgaaatccatgcctatttcttcccattttcatttgggcactgggaggggttgcagtaggcctgcaggcctctgatgttctgccttagttcgttgacaagtatcacaccaggccacatactgagctatgtcctttttcattcctctccaccaatatctggtcttgaggtctaggtacatcttggtagaccctgggtggatagaataggctgagttgtgggcctcatctagcaggatttctcgtgcctctcccttcggtacacacagacggtttctgaa

SEQ ID NO: 23258 - DNA, 505 bp, Zea Mays
tgcggacctgagagcggctagcccagacggggtgattcacgacgacacagatgataaatttgggggaaaacccaaattctttggctatggtggctaatcggagatgagagttagtgtcctgggttcgtaataacttggcgaagtagagtggggcatcaatttatagaagctttaggtggcggcttcgaatttgggaggagagtggagcttatctccctggtgaggcaatcaccgaggctcaccgtggagcgcatgcgttcaccttgcgaccgtcactatctcggggatgccacgatcacggcaatgtggtgaatcaggcgactacgtgtcccttgctgcgctcatggcgagcaccggtggcgatattttaccgaccgcgcgggcaagtgggtacggcggtgactcagccctcgctaagaccttcttccacgagatctttttaaccctcatggttatctactctttatcggcacgaatcgtggcatcatcgtgaatcgcagtgtgg

SEQ ID NO: 23259 - DNA, 479 bp, Zea Mays
gtgatatcgatctaatctagactccatctaatctactatgatccaatctaaaatgagttacctaacaggatagtcaatcctggtggaatacattagaccctgctcctataaacaagtttgagatcttagatcaactcgaccctacccaacaacttgacctacaggttacacaactaattccatctagcatatagctattgaaccctctacccatcttgtcacaaacccggatgaagacaccaaagctcaaggaagaaaggatcaaccgcgtcaaggaaggataagagtcaagccaaatctggtcttcagccccaactcaagccttcaaagatcaagctagatcatcagatgaatcaagatccacaaatcttggatggagtctttccttaccgcacacttcttacccaaacctctctatgctttaaagacatcttttaccatacacaataaagtggatatacatacccatgctctcctaa

SEQ ID NO: 23260 - DNA, 370 bp, Zea Mays
gtaccgtttggcgtgagatgcagcaagccgcttgggggcttgggccacagtatggtatttctgtgctagagaatcacctcgtcatgccttcgccgtattgaacgtgttccgaagtttacatgtgaaggcaacaggttccaaattttattactcctagatgccaccatctcgtttgtgctagttttggcctggatatgattggaatgtaacaagttcacgctgcatcatctagacggtctacaactggttgccctttcgaaattgtgcgctgaaaattgcacatttttccagcatgcaacctaaaacaaatgtgagcaacttatttgtccaagcttagctttggcttgtgacaagttatcacggacatcac

SEQ ID NO: 23261 - DNA, 755 bp, Zea Mays
attaataagaagtcgaagggatctttagcaaaattgacgaggccgaaagggtatagggttatcacaaccgtccgatctgaaacgaggcgcccagattagatctctattaactcgaaccggtatgcagcgtgagatgtccaatctgagatcgacggataaggatccatctaccctaactcgattgtgggccgtccgattaaaatccacggtctcaattgatctgattgaatcgatacacagtgtgccactccctgtcgtccattctcagatcgacggccaccgcactgtcaacgcgaggaaacgcatatgctaatcctatccgtccctcaggacatcgacggtcctcggacgtcttctatctccggcacgcagacggcgacgcgcagactccccccacgacagccgatcaccggcgatgacgcctaacggcaacccagtgcccaaagtccgaatcgactagcgcacagcccctacgagattatggcgaactgattaggaggtgaaattacctcgattctcggcgaaaatatccctgtgcacggctcccgcgacggaactcgtcacgaacacccccaggtcaaattccccagcaccaatgacttcgatctccaatggtgagactgcgctcacgcccagcgtgcccaggcgacccgcaatagctactcgccgagaggaacccacggcagccacgcgttctgcgacggtcactcgcaacacacatgcagcctggattcttaggctagggtggtgcccgg

SEQ ID NO: 23262 - DNA, 495 bp, Zea Mays
catgtatatgtgtacgtgaatctatagggtcacacacttaaaggaaaggaagcctaactcggattggatccaaaattgtactaggttttagggttgctgatgggtctcggagtcagaagcccgccagaacgcctatattatgaggagcgggggcacggttggggtgaacctaattcgtcgccagcaaactagcaatcgtgcccctctcgccctcaccaagtcgccatcatgaatgtagtagttcggtacacggcgcttcctcccagtatgtgtggataccttgaaggtgctgcatctggagcactaggacgaactgcacgaggacgtgaaggacaccaatgactgcacgacacttctcgatgtgtcgtctacattgacatggcttccactgccctatgacctagtggtaattccatgatctataacaacagtacttcttagtttatggggtcgaaaattttgttttgcgctagtgtagcctccccataatcctac

SEQ ID NO: 23263 - DNA, 744 bp, Zea Mays
catcgtatcagtcacgtttagctgcaactttaccccaacttaattttccaaaatttgacggacatcatcctaaaatgtggaaggccaaaagtgagaattattttgatgtgttcaccgtaccccgtgagctttgggttaagattgcaacaatgcattttgttggatcagcggcgttctggttacaatcatctgatccggtgttgcgtctggcaccgtggtcggagttttgtgctgcagtgtgtgctcgctttgagcgtgatcaacacaactctcttattagacaatttttccacattacacaaagtgatacagttactgaatacgttgaacagttcgataccctcatccaccaaattcttgcacatgatcctcaatttagtgtttctgccatagtaaatagattcattgatggtcttgcaccagaaattcgtgccatagttctgattcatcgtcccctcgatttggatactgccgtgtctctcgctttgttacaggaagaattggtgcaaccactggtgtctccatcttcaagccggctgaatgattcttcaacacacaaatctgtttatcggccgttggaacacacaacttcatctccaccagctgcagcaggacaagggatgcaaaaacagacatcacctgattttcgcaaaaggggtcaggatgaccgcaagggggcagctcttatggcgtaccgtaaagcaaaaggattatgttataaatgtggattacgttggaatccag

SEQ ID NO: 23264 - DNA, 396 bp, Zea Mays
cggacccgctgacccacagtacctccggtggtcagagttcccaattgtctttgactacagcgaccacccgaataggatcccacatcctaggacctaccccctcgtcatcgagtcaatcgttgactcgaaatggatgggagaagcagcctcaacatcatatattttgagacctacgacagcttggagatcgcacgctccatgttgtgacccagctcgacaccattatacagcatcatcaccagccaccaagcctatccactcaggtggatcactctgcccgtcacattcggtgacccctccaacttctgcaccgagcgactacagttcgaggtggtggacttcctagggtcttacaacaccatccttgggatgtcgtgctacacaaagtttatggcc

SEQ ID NO: 23265 - DNA, 566 bp, Zea Mays
cgcggtcatcgacttgctgcgccgttcggggctcggttattgctctacggggatcggcgtcgggccacgaagcgctaggtgtcgtcggtgggcggcgaggacctcgtggccaccggaatttctcgtcgtcgccataaacccgcgccgcgccgtcggcgggcgttctcgtggcccaactgctggtaagaaacttcccttcatgttcagcgtcatctcggctttgcgtagaacgtattggtgggggtcggggggcactcgagcgccggggcgcggtctctggtgagcgcgccgccgtgggagggatgatggtccgccaccgtggcgtgcttccggggaggaagaaagcccttgcgccgttcatctatggatgggcgatcaagattagatcaggaaaccattaagcccagaccgtccgatgctagttgaacgcttgggatcacgcccgtacttaccccttcgtgttatagaatctgaacccttgatatcaaatcctgtgtccggggtcacgtacccctttcacgatctaatcctgaccgcagaacgtgatccaacggctcacatccaac

SEQ ID NO: 23266 - DNA, 377 bp, Zea Mays
ccgcggagctatgttcccagaagctgtccgcggccgttgatgcagcccgtgacacaatgaaagcttcagctaccgcctgtatggttgccggtgattattgcgccacattttccttaggtaacgatgtggtttctactcttgatgttcttgaatccgctgtggcggcggaaaaaagtgctatgagttcttacaaccaggcgagtgcagccgtcgattgtgctaaggagactgttgccaaatattgtgaggtttgtattctcaaactattcttatgccaggcaatgattgagattgtttagccctgtgattgaattgcgaagtgagtaagtgtgaagtgaggaaatgtttctgattatttgagattatcatgttgctag

SEQ ID NO: 23267 - DNA, 518 bp, Zea Mays
ggaagaggtcccttcaccaaattcaggcactacgaccgtttcaatatatcgaggctggtgggttaaaacctttattttcttgcccttcggcacgatagtggtggccaaagcggtagttttcctcttttttccttgccttctcaaggggtagcagtaatcaggatatatgaagccaattgcatcaaaaaccctgttcaatcttttcttgccccgacccccaaaggctgaggacaaggcatcatcttcggccctagtatatgtcccaagcaactcgtcgctagtagcctcaatgcatttcaaccagtcatcatttggttcatcaaacttctctctgtatctgaaggtgtatttcaatcaaactaatccaccttcgctggattcagcagtagtctcctttggcatctcccagctatccacaagtggccacactctgttggctatgtgctcttgaattatatcccttgtgccaatgaaagcacagacattgctaaaagccttctgacacgcttcggcatcac

SEQ ID NO: 23268 - DNA, 591 bp, Zea Mays
cactagagttcctttagaccaccagccctaagaggcagaagaggatgaagcttcggaggaagatacaactcccagccaagaagaagactattatgtctgttctgtggagaggataagggacacacaacaaggacttgccagctcacaatacaaaagcagaaggaaatagctgaggctgaagcatggcagaatcagccgaagcaagttcttcacattgcttcgtactactctccatacatcctagagtacgtacccaaccaacagccacttccacagtctacaacttcagttgcctcaccatgtcactctccagctaggtgggttttacctcaaccacccgtgtaagttccaacttcatcttacattccgtatccttaggggcaatttcaagatcagtagcagcatgatgcgagggaagaatctgaagctcgaacaatcaacaacactattctagaatctaaacatatctattgaaacactagggggctgggtcaagaacctaaaacacatctattgtaattttttgtttcctttgctttacgttttgtcttaaaaacactttaagaaggcacatccttcgacagtttgtaa

SEQ ID NO: 23269 - DNA, 338 bp, Zea Mays
aagtcataagttcagtcttgattaggtcccaaaaggcttggaaaaactcggtcgggaagccatcagggcccggtgccttattatgctgcatttgggaaatcgctttcctaatttcatcttcactgaactcagaagtaaggtaagaattttcctccactgagacctgaggaatatcatgaaccaggctctcgtctagagtaatctcagaagtcggcgccggtccaaacaaccccttgtagtaagaagtgatatacctctttagttcggcatcaccttcaaccacgtcattcccgttcctgagctggaaaattctagactttctatgccttccacttgcg

SEQ ID NO: 23270 - DNA, 713 bp, Zea Mays
ctctgtgctctctggctatctgccctctctggtgattccccgtctgctcactggcggtgatcgtcggcgacgtgctcctgtgactttctccagcgtgggcacctctgcctcctctcggtgagcagccttgccttccctctctctaatctctacttcgctggtcagtgagcttgccaccccttgattgctcaaattccaaattccttccgaattctgtgaatctctgtgcttgaatgagtccctagtgccacattatatccccctgcaggttcctagctccttagggagggcttcatattctcacatgagcttttctccaaaaccctaattccctgcacgccacgtgctcggtgaaatgtccaaaccactcaaaattgctccgattgaacccaaacttttcaggcaccttcataacactttcagtaacatattcgcgcaatttcacgccaatccgatataccaggcttcaatttcacacaattccccgtttcggcgatcggttccgagccgagtgccaaaatttcattttctttgcctaaattcaaaccaagcacacacttcactcatatttacccatataaacctattcatgaagtatcggctcaattccacgtaatttcatgcctcaattcgaattccaaacctcctatggcactatttctcgttcaaacgtcgttttcgcgtcgtttgacctctcgattgccatatctctc

SEQ ID NO: 23271 - DNA, 1196 bp, Zea Mays
gttaaaaacgctccatgcgaaagacgcccaagggtccagccggacaggcacaataaaatacgccatcgaagtctctcgccaagaaaatggccaacatgcaacattacaatacaagttacagttacatacacacggcgagggcaccatatactacatcggctcaaccttcgggatgatacccatctccctataattgaatagcattatcctcaactcctcacactcaaaaagatttcgcagatccccctcacctatgctcgccccagtcgacgaggataacaattctcgtttaccaatccggtctactcgaagacggccatgctccatccccatacgacggcgcctaccacttcgcgaaaactcacccacactgtgtttcgacaccacccttcgccgcctgtgctcagcactcgcactaggaggatcagcagcctcaccaacctccgcacgtggtgaagactccgctgcggccacatttaacgcagcaaaataatccaatccttcattcgaggactcctccgtccaggaaaacgaactcccagactcaccatcagacacaaaacactcagatccagagccaaataaattattatcggcaggcacaacggttgtggccgccacaaaatcagtattaccagcagcggttgcttgcgcaggcccaaatgttggaacctgcacagcaaccgaggttcagtatcacaaaaataaaagtttacaccgaaagccctagcccctattccgccacctgcgatggcccgaccgacgtcgctgggtcttcggcagctagttcatccaccacattcgaagcatcctcatccgtcggtgcagtggtcaccaaggggccctcgccagcatcggatgggggccccagctccacctccgacgcctcgggcagtgtgttgtccagatcatcgaggtcctcgacctcttcatcatgcgccatctagagcaatagcacactcattcaacaaccacacaaatacacacacacccacacatataatcacacagatgcacccttacctgatccagcgcccggtcagacctctcccggacagtctctcggccgtgtgggccccacatcctatcgaaaagtgccccagccgaccgcttcagaaccgggtcctagacctggaagatttcgcgctcgaagccttcatccgactggtcgaagacctcaaagtgcccgcatccct

SEQ ID NO: 23272 - DNA, 282 bp, Zea Mays
tagaacttaaaccgatgctaaaagacctcattcgcaaagctcagtgtttggacgtcgagatgacaggacttgcaggaaatgctaacaaggaacaactcctagatctcagaacagatgaaaagagaactctttggtttaggaaccgtctgtgtgtaaccaaagggagaggcacgagaaatcctgctagatgaagcccacaactcagcctattctatccatccagggtctaccaagatgtacctagacctcaagaccagatactggtgcagagggatgaaaaag

SEQ ID NO: 23273 - DNA, 401 bp, Zea Mays
gcggcggtcctgggtgctgccgctggccgatgtcgggcggtggtgaagcaaccctgtgcgtagatctgttggcgaacagccacgattagaagttagggggttgccttggcgaccgtcagatcttcaacgagtggataggattagaacgtggtaacgtttcgagtgaatcgatctagcgtcgttgatctgttaacgaacgaatgtggttagattcagggctttcaaatcatggtcgtctactaaaaatcgaacggctagagctgcataccggttcgaggatgcagggatctaatccgagccattgaccgatgatccaagggctagaatcccgcaataccccttcgatcggttcttttacaacatagcccctcggtaatttcaatatgaaccctcagtcctgg

SEQ ID NO: 23274 - DNA, 636 bp, Zea Mays
tgtgtgctttcattggcatgagggatttgattcaagagcatatagccttcagggtatggcccttgtggagagctaggatatgccaaaggagaccactgccgattccagtgagggtggtctggtccgattgaagtataccttcagatttagggagaagtttgatgagccagacgatgactggctgaagtgtattgaagctaccagtgatgagctactcagggcatactccaaggccgaagataatgctttgtccacaactttcaggggtcggggcaagaaaagattgaacagggtatttgatgcgattggcttcgtataccctgactaccactacccactacgagggcaagggaaaaagggaaagactgtcgcttcggccaccccagctaagccaaagagcaaaaaggtgaaggttctgacccaccggtcgcgttatattgaacaggtcgtggtgcctgaatttggcgaagaagcctcttcaactgccgaagcaagacaaggtgctccaattgtgcatggcgttgaagagccaactatagtgccgaagatgcctacagttgggccgatcgaagctaaggatgataaggctgaagagccaaaggtggaaaaagtgataaaagtgccagaaatcctgag

SEQ ID NO: 23275 - DNA, 602 bp, Zea Mays
cttaagggatccaccaaaaaacttgtaggagttttatcagctctttgaaaagtatgcccgattagaagagctccacaagaggaaattcatgtcccaacgaaaacctaaatagactctgcaatccagtataacatggattaggccttcgcaaccagactcagtctagcaagaccgtgcccagtcccaggtacacaatattgcaaatcagcagcaaccaggagatacccccctcatcgtcaagattacccccgcaacaagggtgcggtggcaacgcgatcatgggcagaggcaggggacgagcacctcaacaacagagaagattctattgtattttccatggcgaagactcaacagacctgaccagggactgcccagagactaaagcaacaaaggaccgaatggctagggccgctccagctaacaaccaaagagtcatcgctcatacctaccaaccaaccagcatcaaattcaaaatgaacaccactattacccccagcatcaaaaccacaatctttttccacatcaacagcgccttcaacatcaagaaattctatcattgccacctccaccacctcaacatccaaaccaacccttaccacttc

SEQ ID NO: 23276 - DNA, 331 bp, Zea Mays
aagaaaaggaagaatcagtgggcatataaaagcagggacagaagacctagtatggtgaggtatatggcgcctgccgtaacttgattccgacttaagtaactctagcgaataacttgacgctatctcatttctatagtccgatgtctcaatctgccatagccttctagcgaagcaacgaggaagagaacagacaacttttaggctattatctaggcttgaatatgctaaattgcaaatgagcttctcttaaggacagcacttatacaatgagtggccatgacaaccgcacattaagtggtataaagtggcccatgcgtccaccacccaagcc

SEQ ID NO: 23277 - DNA, 551 bp, Zea Mays
atatttcccaatttacagagtacattgttgtcccaatagcttttgagatatatagataggggtaaaacttcctgagatgttctatgttccatgagttcccaatttccgtgccatccatttgagtgagacgatatgatccaggccgagtgacttctgctactatgaatggtccttcccatagtggctacagtttatgtcgtccctcccccgttagaattcggcggaggacgaggtctcccactgcaaaggatcgatgtcgtatggccctgtcatgatagcgcctcagagtttgctgataccgggccgactgaatcaccgtattcaatcgttcttcttctagtacatcgacatcttccagcctagtagcctcagcttctgctatgttttcaaagattaaccttggtgccccaaacttgagatcagcagatagcactgcttccgaaccatagaccataaagaaaggtgtgtttccatgcaaagctcgactaggttgagttctcaggctccaaacaacatacggcagctctctgatccactttcctgcgaacttt

SEQ ID NO: 23278 - DNA, 505 bp, Zea Mays
ctggtctagaggatgtgtgggaggtgggagtggtgtgactgtgtgagagctagtaggtatgtggtggaggatggggatgatgaataagaagtgctccccttggtccggcatgagcggtgattcaaggcttgtggtaacagctcgagccttgctgccattaaaatgatgagcatccgaggtttgactatgtatgctatagatagtgtgctggaagacaccattcctgaggacgaagtatcttctcctagaggtaagcctaccagtctgccctggtactttagatcgtgagggtcctccagcccccgagggtacttcggttggctctccttctactgtttcaatggatgcccatgttggattgctaatgcccaatattgatgatgttgttgtaacgagttctgttgtgcccattgagccagccaacccaaccaccttggagatcagtggttctggtgctgaaaacccaatgggtttctctagcgctgaaaacccaatgggctttctt

SEQ ID NO: 23279 - DNA, 1350 bp, Zea Mays
ctcaaaaccatggtattgcatagaaactctagaaatacttcactcccaaacttgccctaagtatggtggtggcaaaagttagcacaactcattccatctgccttgcatctttacatcttgtgtgactatgtattgcttgttctgcctttgggctatatagtgttccttccatagtttttaaggcattgcttaagcagtaaggcgctctcccgccttgcgggcacgagtaaggtgtttgccttaggggtcaaggcgtagccctagcaccttgagcatcgacaaggcgttgctttgcggactccttggatgtagtgtttggggtagagtttatgtgagtgccagagaagttcacgggcttacaaacaaggtcccgatcgcggtaagagaaggcagcgctcgggggatctctagcggcggcggcggcgcaagctcagtgaagtccaggcgagagggcgcaatgacgagctccccctcccctcccggttcgcgctctttattctctcaccctctctgcgttctctgctatctaaatatggatgtgagttatcctctgttgtagatttatgatagagcactggctctaatcctgttgcctctgtggatgtggatgcaaacacatatgaccctatggctgatccaaaactgatgaggacatcctccactattacccgttggcaaagacgcaattggcccagttggcccaattgtagtcggatgacgaccgtgtgagcctcagaattatcccacctcgcttaacttgggaggaggaagccactttaaaagggagagccacccttcccccattggactagtcttttggggcgattgagcctttccctgagttgggtgtgcctaatgaactgttgggctccgggcaaccctaatttgttgggcctcggccaaccccacctgggctgggtgtatcatctggtatcagagctagggcccattttaagaaggtgggaatgatgaggacatcctccactattacccgttggcaaagacgcaattggcccagttggcccaattgtagtcggatgacgaccgtgtgagcctcagaattatcccacctcgcttaacttgggaggaggaagccactttaaaagggagagccacccttcccccattggactagtcttttggggcgattgagcctttccctgagttgggtgtgcctaatgaactgttgggctccgggcaaccctaatttgttgggcctcggccaaccccacctgggctgggtgtatcaaaaacggagagcaaagtctaatgatcctggatggaactatagctattggacggagattgggaaccaagataaggttacatgcaacctttgcaagaccgtga

SEQ ID NO: 23280 - DNA, 495 bp, Zea Mays
atcgggactgtcgaaaataactaacacttaattatctaaaatataccaaccaagttttcatgcataaattttcccatccaataccaacaatcaacatacaccaatatcgcatctaaattatataacaactaaacttgaacaagaggaatgagaggaggtggaggagctaggggatgggtcgatagcgagagaggggcatgtacacaacactagtggcggaatgggcgcacacgtggagcggcgatggttggtaatatagacctgttcaaacgtcaggtcagatcgaatcaaggccgggatgtggattgttttacgtggcccgttctcgtcctgtgtcaagtgttgagtccggtcggggttgtgcttcctattggatatgtcgggtcaaggttttttttgggttaggttaggttttttggctttggatcgggatttttttaagttaggtcaaattttggataaaaaatcatgactcgtgtctaacccttattgcag

SEQ ID NO: 23281 - DNA, 581 bp, Zea Mays
gaataatgcaagtctttatttcatatgcatggcgaactacgtggacggagcagccagagtatcatatcagccatgcatgcatgcatggggcatcattgttttaacccaccatcagccagaacagaaacacatgactaatgtccaaagtggttagggtatggattcagtccaccactccacctacagccaggtagcctgctgtaggtacggtcgtacggacgaacaataaaattaactaaacaatgcttaccaagttaccagcgatttctctatgagctccagggtacagaggcgcgcggcgtacagcgtccaggttgtctggtttacgttgcacgcgtgatggggtacaggcgacggctccgcctcaatgattccctcccttttgtcccagaatcattcctgcatgcaaaagggcagctagctagctagcttattggtgatgaacaaaaggccccggcgtcgtcggttcgcttcaagatcctctactatctaatggcttcttgctgcctgcccccgattttgcttcagagtccacggtcccagctagccgcaggactgtgtatatatactgctaattctat

SEQ ID NO: 23282 - DNA, 663 bp, Zea Mays
gaaacttatattactcgcacctaagtgcttgcaataggaagtaataggaagtacaagcgaagcgggggagggaaggatcccatgtccctatgtttgattgaggcaagtgacaataccgtgaggaagagaaaacgtgtgaagtgttcccttcttccggaagccgtaagctatcctatttataggcctagggggagcttcctggaggatgagaataggccaggcactgtgagatgtctttgtatccctatagatggtatgacctgaggtatggtcttgtacttgttgttgacttgcacctgcttagtttctgctgagagccaaggtcgaggccgagggctcggtcacctaccgagcacccctggcgagagattgcccataccgtaatagttgacacggtgctaagtatggggaaaatcttcttaagtgttgtgtgattgcttcagctctgcagtattcgatgacattggggcgtcctccgttgtggatatcgaggtcagagctgggctcaggtgaggtggaagtctgcccgaggtcacgaccgaaaccgtcttgagattcaaagacatgcaccacggttgaagaaatggcctcctgtgggattcgcgggggagcaggtagccgagaccgggcgacgcagagttttgtgtggagggcaagttatgc

SEQ ID NO: 23283 - DNA, 281 bp, Zea Mays
gtgcaatccaggtaaacaaactattccacaacaacaaggtatcaccaaccgaagatctacggaacgagacgttcaaaggaaccctttcgagaacagacaccaatgtaccactcttgtttcacactatattatacagcgaaggatattgaagcataaaaggttggttcccaatccagcggtcttcctagaacctgatctgagtcccattttcaagatgaaggaaccttgctaaagaaaggtgtcctttactttcattaaccccatacataagtgagagtccc

SEQ ID NO: 23284 - DNA, 472 bp, Zea Mays
ctaggacgaaagaggtagccggtgaccatgtactcattactaggttgcttgaggtatttgaaggtgaaggcagactaggccttggttcttgtgactgagtttggacatattgtgggacgtagggtgaacaatatgaagatgtactgaacacctcttttagctattaaaggttgagtagctgacgaagcaagctctttctacttgttgatggtgtgatggcatgttcttgtagtgtggcctttgtactcaccacaaaacaaacagaatggcttccttggaggcgcaacaaatctgccactaaagcttcgtcctccccttcctcttggagcaggtgataggaatgtgttttgtgaagattgctgctaagagcttgcctgttgtcctgattaatcatgtgactaggtcatcctttcctcgccttatgatgggttatggatgctttaggctgtgatgaaactgtggcagaaccacc

SEQ ID NO: 23285 - DNA, 676 bp, Zea Mays
ggggatagtgggtcatggtggaggggtcaatttggccggtgggggcttagaacggtcggtccgcggtgaggtggcggcgcctgcgacagtgaggtcgctggtgatgcccacgagtgtaataggtgaagggaaaggtgcgcgatgttcgtgatgaagtggtgaaccttgcgagccaaactaattgaactctaggctaccagagaagggagggagggctcaccggagcggaggaagagggcggcgtgctggctcgattgagctcagggaagggggagagaggtgaccgaagctggtgtgaaggaagctggagctcgggcggtcccttttataggcggccagggagggggaaagaggagaggtggcgagcaccggcgacattcctggcaattagatcaatgtagaactccacttctctttctgtcggcattcctggcaattcttttgggaatacatccatgaattcttctactacagatatgctttctgctgctagattaaacaccattggatcttgggtgggtggctgagcctgacatgaaactgactttccttggtggtcagtgagaaggatggtcttatctgcgcagcttatgacaacattatgcttggttaagcagtccatccctaagatcacatcaattctgtgggatggcaatacggctaagtctgccaagaa

SEQ ID NO: 23286 - DNA, 945 bp, Zea Mays
gcaaggtctcctctaattgctgaaggagaaggcagtggagaagggagtgaaacccacctccccgcaccttcggagctgcccttagatttagcccaagttctggccaaccaaacccgactcattgaggtcctcacccgaagccttgagaaccaacacccgaatggtggaaggcctcaggacagaatgggagattttctaagactcaagcctcccacattcgctagatccagcaatccgcttgacgctgatgactggttacgcataataaaaaggaagttagaggccaccggatgccctaagaaccagtgtgttcatctggctactcatcaactttctaggatggccctatcctggtgggataccttcagtgctgccgtcagagatgctacctgggcagaatttgaagccaccttccgagaacatcatgtgccccaagggatcgtcgagctcaaagaagatgaatttcgggaattaactcaaggaggaagatctgttagtgagtacgtgcacaaattcacagaattgactcgctatgcgcctgacgatgttagcacagaagccacgaagatggcccgtttcttgaaggggctaagaccagaactcaagactatcctcgctagccaagacttcatcagcttctcgcatctctcaaacaaggccatacaagtagaaagggctaaagaagaagaaaagggtcacctcaagagaaagttacaggtcctccgagctcagcagcaggacaggcaccagagaattcgatcctttgggtttccacccaagggaccaaacttcaacaagccagctagacccactccatcatgtttcagtcagcagggccaaagctcccttcaggccccctccgttgcaagcaaccaacctccagccaatgcctgttggcactgcggagaccccagtcactacaagaataattgtcctcagttgaag

SEQ ID NO: 23287 - DNA, 370 bp, Zea Mays
cggctgactcagccagacagtccgcccatggccagaggcgtcagcgtccacacaaagcaaggaaagagacgcaagggcaaagccaacatgacgcatatggtcggctggtaaaagctggccctacattcgatcgattgctagcaaaatatgctggcaagaaggccgttctatgcgatcggccaacaaagaaaccccggtcacccactaaaacaaaacgaccgagtaaaacgacccgaaagacgacacaacaagcatcgtctgttcatcctgtcatgccaagatgcttcctacccacctactcatcgtcgatgtattgtcctgttcaaatatggaatggtacgatgatgaacccatggtacatgcgtactcc

SEQ ID NO: 23288 - DNA, 544 bp, Zea Mays
tggagccgtggctcagcccgctgtccaccttcacgaggctggtgaacatccttccccccgaatgctggaggaagaagcgggaaggagcgtcgcctccacagacatcccgcggaggtaggagatgatggccgcctgaagggtgaagtagggcgtaatgtgtaggggttggaggccaagcccctccaacagcagcacgaagaaagatgggatcgtcagcaccaacccgctggggagtttggagacgaagaacacaaactctccggcggcgaggtcgccgtgaggagagagaccgacacagatccttccggcaaacgtcagcacaccccatccgagcgggttgcgcaccaagttgagtgacacctcggactggaggcgctcgggaggatctagcaaggccatggtggctacgacggcatgagagcgcggagaactcgagggcgaaagggcgctgcgagcgatgagaatggctaccacgctcgggggagtccctttttaaagaaggattccaccactgacgccccgaagcaccgtagaagacctcgcc

SEQ ID NO: 23289 - DNA, 463 bp, Zea Mays
ctcgttttggtggaaagatattctcaaaatccatgattcttttaaggaaattgcccaagtgcaaattggaaatggtaaatctacgcttctctggcatgatcgatggaatgggcaatgtttatctcaaaagttcctggagctccggtcttttgcctctatcaaaaagattaccatccatcaagcttgattagcctcctcgaatgaaatgctccatatccccctctctgctgaagcgttcgagcaacttctctcacttcaggacacccttggtaatattcagttgcttgatcacaatgatatttggagatgcagtgcctcttccactcggttttcctcttagacggtttatactcacttgactggcacccgtcaaacgctccctctattcgtttggttatggaagtctaaatgtcagcccaagcacaaagtcttcttctggctgctgctcaaaaatagtctgaat

SEQ ID NO: 23290 - DNA, 633 bp, Zea Mays
caggggctcaagcgcaataaaacccaagactcagtctaacccgagaagtactgcgggttgaatctatagtaatctagggactctttagaaagaaagccagggccgaaggggtatggggaattaccagccatccgatcacaatccagcgtcctagatccgcagtggcgaaagggtatgcgcgatctaatcggaaccgtccaaactacgatcaacggtcgacagcttcatctaggcaaaggggtagcactttctaatctaaggcgtttatcaccaatcggacggcccgtgttcatctcctacccagagcaccccggtcgcacggcgcggtgacccgccgcagcagcgccatgggcgaccaccgtgcggagctcgcgcccgagtacgaacccgaatactattgcgtaaaaacaaaatttgggtcacataggaacggacgggaggaatttcaccgatgattgccgcacggacagccccggccacggcgaagtgcggttccgcggcggtgctcgagctccgacgagcaattgaggtggttccagtggataatagccaccggagagaccacggtcgagtcctgcgctacatggagaagcctcccagcaaagtttggaggcccacgcgacgaccgaactc

SEQ ID NO: 23291 - DNA, 795 bp, Zea Mays
agaagttaacgctttggttgcctcgctcggggaaattcctgatgatgagcggcaagtccactttgaggtacctttggatcctagtgacgcagagataagtgctatgcttgatttgctggctgaggactcttctgatgctgctcctgctgggacgttggtggtagcacctcccccagaaactgatatagccttggatattcagaagcctgtcagtgctcgcccaaggcgcccttcccgagccaatcaacttgatcctcctgctgacgagccgaaaaagaaaaagagacgtctccggcgagtatctagtttggatcgggatgttggtccttcggttcctgctgctgaagaagtgcctgttcctgaatttactgacgctgaactcgatgggggtgctctacctgctgttgaccccaatgggggtgctccatctgctactgatcccaatgggtgtgctccatctgctgctggtcccagtgggggtattgtttgtgttgttggtgaaaacgacggggacgaagaagatgaggtccctctgactcggaagaacagtcggcagtatgtcgctagtggtgaaagtagtggagttccttctcctgctttgtctgctctcattggtctgcaagaattgtccctggcgaattttgatcagactcttgaagatatggttccagaggatctgttatcagagccagcggatgatggtgtgatggaggtttgtgctgatgtgctcgatgctgggttgaggtcatcccgcgcctcatcgaccttagagcgcggtcttgagggtcaggagac

SEQ ID NO: 23292 - DNA, 665 bp, Zea Mays
cattcggacattccttagggaccacaaaagggagggaattcattccctgctcctgcaaagttgggggaatatctgacagcagaaaggtcttcgaccaattgaaagcatcaggctgaagcagattcgaaaggaaaaaaggtgcccacttcttagggatgtccaccgagtggtcagccgacccagcaggagcaaagtatttggcctagagcctagagaactgggcagatctttttctctcctcaaacatctggaaaacggggtcaggctgccattcctgagagagcatgaagttcatctctaaattctgaaggtgattattgttaggctcaccaacatgggctgatggggcaagtcctccatatcatggacatggtccacctgaggcaccggtccatcaacctcctgaggaccaatgaatggggtagcattgatatcaaatccattcccaagcagcacatatccattctccacaaaatgaccattcggaaggggtgcaagctgaccagcatcaatggagctatcagacgacaagccagagtgctggttactgagttgtagttcttcctgctgaatgggttgctcctctggcaagatgggctgcgggacctgctgattgggctggacattcacaatccactggtcccaatctccttggccaaagccat

SEQ ID NO: 23293 - DNA, 934 bp, Zea Mays
cctccttgttttaacttcataaattcctcttgtttcatatgcagcactccttcgggtatgtagtgctcacggaaggctgctttaaactcttcccaggtgatttgatggttgacatgttgaatagccacaaaatttccccaccaagtactggcagggccacgtaattgttatgctgcgaataacggcttctgcgtttctgaacagcggagaagaccaaacttttgttcaataacccgtatccactcatcagcttctagtggatcctcagctttgacgaataggggtggacgggtttcagagaagtctagataggtggtttcacgggggccttgctgataaccccttcctgcctgctgctggaattgctgctgacccgccatttccctaaggaagcgggtattgtctgcggtagcattcaccaaggcggcaatcgcctcggctaaagtgggaggaaccgaaggtgggtttggggtaacatcccttcccccagaagttcctgctgcgtcctgtcctcgagtcctggtcggcatctgtggcaaagaacatttgaagtaaacataatatgccagagaaaccttccattttacattactataaaaagtaatgatacagactcgatattacataacaggatacattacccattatacaaaagttcaacctattatacaacagtaccacctacaatacactactctacttttattacaccattagtcctgctgcccattactcttggcggcctcatcgtcaggtgtgggagtccagacgtcaaccaacctcaaagaaggagggggctcaaaaaggtctaactccccacccagtgcgcgtcccgcaacgtgagagggtccggcttccgcctcagcagggtgtgcaggcacactagggtgtaattgtgagtatagtacatggacttcctcatgcaacatattgc

SEQ ID NO: 23294 - DNA, 332 bp, Zea Mays
gcttatttcttttgaaatgagttgaagcagaggaagactggctagcattgctatacttttcagtgatccctatcggcatgtcagaaaggacttcgaatggattagaagaggttctcttttgagttgagaagggagcacgtgatgatgttgaccttctcgaccgtccaaccaacctttcatgaatagggcgagcatggttggatgtcgagttactagtacatcccaccctactagccatagagtcagctggaagtgccaactctcttcgtttgttggcagcacgactagcgcgcacattaacagcttgtttgacatacttcttgcgttgtggg

SEQ ID NO: 23295 - DNA, 333 bp, Zea Mays
ggtgcctcgcaacggccatcccctcgcggatcctcatcggtttcttccccaaatttttgcagccgccattgttaaaagctttaatggctacgaccgttccttcgctgagtaatcgtcgttcttcaattgaccatcaataatgttaattcagctctaaatctcctccctccccactccctataaatcctgcagccacgctttcttcccctgctcgatctacatcccttctcagtttcagcgtacctgctccctcctcgctctgctgcttccccatcgactgcagttgccgaccttctctgaccgccgaccgaacccctctcttgctcgttgtct

SEQ ID NO: 23296 - DNA, 776 bp, Zea Mays
ggatgattgtgggatgttgtcggcgaaggcaaccttagatttcttagtgttggtgagggccgcctggtcgacttcgtccatgggggaggaattggccccagtgttgactttttaggagccatcatgggattggtctttagagcacaaatggtgggtgccaaatgttggttccgacaggtgggccccaacactcgtgagtaggtgagaagctcgaagtacaacaaaacgttaggtagggaactgttgcgtctcgtcgagcgtgtcctgtccaactacaaggtggggatatttatagggtaactggggtcaataacctaaaatgcatttgtgtcgtgcccctggttaccaactacatcccaagaatatgatgtacaacgggataattacagcgtcgtaacgctcagggtcggacgcaccaaaatgttcacccgattactacactgacaagtgggtccatcgaagcggcccacaaagccttgggcgactctgtggtatctatgcttcccccaggtctttgtcctccaagcgccctcacacctaatggttgggcacctcagcaatgtccatgtgggaggtccgtgaagggagccttcatcctcagggcgtctagctcaatacacgccagcctttgcttggttgacatgacgtggatacttcatttcggctagcccatgtagagatgtctttgtgaggttgtcgtcggccacggtgaatggaggctctactcgtagcatgagctcatcgaagtctctggtcttcgcctagcttggtcgatc

SEQ ID NO: 23297 - DNA, 476 bp, Zea Mays
gcgagagaggaagtagaggctctcaattcactttataggggtggaagtggagcttaaaagctacagagtggaatcctagctaagtcttggcttggcggcggggctctggcctcctcgtcctcgttggcgctactcctcctatttgtcagtttgtcaggggttcgtctttgtgggtgtgtgtccagatgaactcaactccgtctaccgtagtctctatgttttgtccgtctgtcctccctttcatgagggctaactcctctcatttataggcctagagagggatcgaccagcggtggcttccttaaaaaggagccatgaggcaaggttaaaacaaatgttatttctcggggtaaaaccacacgtactcgtggacccctgggccacccggctatctcgtatttactgtggcagacagcgtggggctgcctgggttccaggctccatcatttaggctaagccgacccctgaccttcata

SEQ ID NO: 23298 - DNA, 483 bp, Zea Mays
aaacagtattgggctggaatcaaaccaggcggcccagtccagaggggaaagcgcgcccgcgcgctggcatctttgcagaaagaccctcgggtttttagctaactagagaacgagcttctttactattcctatgtgtcgctgccagattacacctaagccctctggtttctaactctttgcaggatgaagtccacgacggcgtcgcgcggaggatgaactccggcgagcacgcagaccggccggaggaggccaagaccagtgcttagcgtcggcctaaaccaaattcattatctagagaacgtttcccctaagttaatttgaagaatggcactctactttgccctgcccacggtgaccgagaacgttatagagggatgaaggtgttcccggcgagtggtggtgatctagttcaattggacggttcaaggagttcgtgggatgcctacggatgctagaacaagcaacagaaggacgcgagctaac

SEQ ID NO: 23299 - DNA, 1172 bp, Zea Mays
gccgtactccagccaagcggccatccagctcttcctgcaccttcctttatgaacgtgcggagccagagagcaggctgctctctctctcccccctctcttctatctctctatctctacagtctacacaaatcatatttccccagcgtacaccttctgtctgctggattactgtggatttgaccatcgtacggcagcccacatcgctgcttctcccccggtcggttactgtagcaccaaagtttgatcttgccggggtttggaggaggtgaaaggttggggttttcttggtcctgggaatctgtccaggttcgtctctctatgtgaagattctgagaggttggctgtgagtcaagattttcggctcggcggtggcgaatcctctgctcctgactccgatttgggtattctcgttcttgattcctgactcttggcccgaaacttctgttctgttcttgccgaaatcgaagggaaacagctccattctggttgcaagttctttgtaaagattcgaggtggcattcagatttcggttacctgtgcttgtgctgttggttttgcttcgaaaatttgctgtttgggtagaccaaggttactgacggcctccgccgccgcagatgtgcggatttgagatggaatcgcagtgagagggttgaagagttgttcctgtccctgattctggtggcttagtttctggtgctctgtttggcaacttaagcgcttccattttcggttcatgcaagggtcgctttcggccatcggggagctctcagccgtgaggttttgaggtgggattgtgtcattgtgacctcaaggttgaaggagatgcttatggcgtcgatgtcagatagcgagacgaccaaccgaggcagcatgtgggaactggatcagaaccttgatcagcccatggacgaggaggccagtcaactgaagaacatgtacaaagaaaaggtatcgttttcatccttgctatcatcgcatttagattattagtctctgtatatctgaaagaaacatggtggtccttcgatagttcgatgtacaatattctattgatggttcaggggatcatttcaatataaaggggtatcggaaactgtatgtaacatgtgctgttactgctgtttttttcctgttgcaggaactatattcagattcttacaacttgttttgtc

SEQ ID NO: 23300 - DNA, 807 bp, Zea Mays
ccgggagcacgtcggagatcaatgctggcagctccgacactagaatagggctcacccctagcggcactagtgttgtgcttgcctcgccggcccacacgacaatacgctggaccccgaagcggtgcttcgcctggagatcttcaagtgctttcctggtcgcctccatcgcccggggacctggcgccgcctgcgccgcctggaactgctggatacgctcctccagctccttttctttcttctccgcctcgagctcgtgcttggccagcatctcgcctcgctgggttagcatttcttcccggaaagtgagatccgtctcccgcctagcgaggtccgtctctcgcctctccaaggattgctccttcactttaagtttctcctcggcgagggcggcgtcgctggcctttccctcgagctcttgctgcaacttttgcagcctctccacagccatggtctgctggacccgctgctcttccagggtctggtccagggcactcagcttggcccgaaactctgttgcgagggcctcccgctgagacatggcctcctccctcctggccacctttatctccctccggtgcgcctccagctctctgcatacaccttctggaggtcctttttgtactccttacggtcccgctcaagttgggaccgctcagagatgaattggcgggatgccgtcctggtgcgctcctccaactgggagctccagtcgctgaggcgctggtgctcggcctcaagggcctcccattcccgcaaaattgctgccccagtgtcactaaggacctggcgggcgcgggacagcatgcg

SEQ ID NO: 23301 - DNA, 485 bp, Zea Mays
cccgagtctccaggggggcaggccacgtgcggcctgggttataagtcgtgccccggccttgattaccgcatgtcgccaatcgccttccggccttccccctcgagctttcacccgcaatacgtgctacgtcgtgtgcttgcgcgggtgagatgggtggatccgccgctggccggtccgggggtatatcatagtttgggtcgtcaccgaggggttgttgagcttcatcgatatacgaggagcgctcctgcgaagtatcaaggtctgcgggttggttgcagctttggaattcttcgccggtgtcaattctccgacgtgcgccttgggaaggatatttgcgtccctgggacctcggtgagtaatccattaatgactccttactgtcattccctacgtatttccgtctctatatcgaagtttaagcacagagattgggggttgagaaacctcggccatggcgccgccgtgctgtgggtgccgtcaccgtg

SEQ ID NO: 23302 - DNA, 727 bp, Zea Mays
ctttcctggatgatcgaagttgagccattgatccgcccgggtaaaggtgatcgggtgttctgaccaccgatagggggcgagggctctggtggttgccactagtatctgtcgatcgttgagcttctgttgccttttgttttcttgcgacccgtgtcccccaaagatgacgtcgacctctccgttgacgcgtggaaattctccacctcctccctcttcctactgctgaggtcgtcgaggttcaccgggccctcctcatggtgggggaggtggtagaggttggaagggtcggccattcccgacggaatgcttgaagtctctgcaattcctcaaggtgtggcgcatatccttgtgatacgggcattgggcatcgaggatgtcgtctagtgttcgctcgcctccgctgggtacacctcgggcacgagagacgagtggtgcagcggcatggacctcttcacgaggcctcttctcccagcgcttgtcggtctgctgatttgcgtcacgccgcggtgcagacggagtaggcttcgctcccctgatgaggtcctaagccctttcgtcggtggtgatgtagaggtccgcctcccttaacagctgctcggaggtggtcggcgccttttgtagtatggctcagacgaaggccaagtcattggatccctagtagaagtcctcgatcactgctgctttagcgacctcagggatgcgatttcttatggtctaaaacctcttg

SEQ ID NO: 23303 - DNA, 487 bp, Zea Mays
gcaagagtcccaagcgatgcatcaccatctccaggggatggtagccacagaaaagtcgtcagggtcttcatagctgccgcctcggttgtgtcgtctgtcctaaatccaacagtctcggagtcaaggggacgccaacccggctgaagggtatgagcctctagagtcagccagactcagcaacatggcacccgatgctcctcgtacagctgcactgtgtacaaagggggcgtagggtaatcggcggagttgaacacttcccacaagatggaaggaaaaccatcgtgagaaaggaaatcagaactgaaacgagtgtctcctccattggcgggggtgggtgaagtcatctgtggaagagtatgagatgtaaagattatggtggaagaagaaaaataaaagagcctgggtggtttaaaaaagaagcgggttagatcaaattttttacttctttaatttctaatccttttagtttttataatgcatgcattct

SEQ ID NO: 23304 - DNA, 553 bp, Zea Mays
tttggacttaatatgaaatttctagggattaaacaagtttctgtaattaattttgtattaaaaatcatttctgaaatgaatttctctgttttcaagaggtctggactgcgcaccaaaaactatgaagcgcaggggtcggtgcgtaaaatgacccaagacacagatcgccaggcgttggactgcgggttaaatcctatttcccctggggtttcttttgcaattaccccaggccgaaggggtatcgttgtgctggggccgctagatcagttatggacggtccggatcaggccgcggcttttatgaaaggggcatgttgaacccaccgtgggatcgagatcggatgcccacaattaactcgaagcccaaacgaaacagtacgcaatctcgattgtacgatccgagatctacggtcaatctcctacctccatcccgatctaatcctggacgcatacgaccgatccaacgaccatcgctcttcccttcaatctccagccgaacaacccacagaacgggcggtcgcggcgcacaacagaacccagatcgccgccgcggc

SEQ ID NO: 23305 - DNA, 912 bp, Zea Mays
ggctgatcatctcttgcggcgcgatctaatttccaccgtgcctacgcagatcaacgacgagtattcagctaagcgaagggggtaaaccccgatctaatattggcccttcatcaaaggaccaacgaccaggagtcgtcttctacctcaagccgctatccttccctggtacacgccggactacgacaacagcaaaggagtaccgatgatggaggaggggggggggttctcaccattgatggaggcagagctgaccggccgacgatggaaagcagtgcgcggcgaggcataggtccaagcgttcgacacccttccgagcatgcccaggtcggcgacacaatcggacgacggtgcccgagaagtgagttctcgcggccagcggtagccaccatgccgcgaacaagcagcaccagatgaccacccgcactggcagacacacgccattccactactcgtggtttctatcggcacatagtcgcatctatggctacaacatggcggtagtcgcagggcattcacgcggcggtgccctaccttttctcttttagcgacgatggcgagcggtggttcggagctagctcatatagataggagaagcgacacatagctatatagggctcgggccagagaccggaacggccagctagagacccctgattcccacggagcgcgcagagaactcgcgttctgtttgagggaggaggaatcggtccgaaccggccatccgcgatcctggcgagaagaacgactcggtgccgtgggcccaccagtcagtggcatgagcgtggggcgcacagcgcggtgtgagacaccgaggacccaggcccgcacgtcagtgacttcacagaaaagaaaaagggaacgaggaaatgggctgccgtggggtagaagagagaaagagtgggccgaattgga

SEQ ID NO: 23306 - DNA, 1030 bp, Zea Mays
tctgctaatagaaaatatgtcataacaaaagttgattaaatttcaaaatatagtttcataattatgctaacaatcaaacagctactgtgacagcaaaagaatactgccacaaaaaatccccaaacaaaagcaaaaaaactggaacaaccaaacattgaggtagcaaactagtaatcgattatcacatatacagtgcatgatataatcacctagcattacaaataccacagaatgacagtagaaatcattaaataaaaaacaacacgcaatcaattgtgtggaaataagtgaagccaaactaccaaagaacatttactctgttcaattcaccggtaaggtcaatcttaaaggatgttcctactttatagttacctttactgacacttcttccaagattgttgtttgtacgtaaaggatcaataacattaaaatgttttgaaacaaatggttgaccctggttctcctgggtgtgaggcacaactccatatgcagaactacaagtatcgaggaaggacttgttcagcaacaactcaccactgtccatccgtggggggatcgctgcatgatgtaacatgaatgatcaaaacgcacatgtctcaatgaaccattgatctatcaaaacaaagctatacatatgaattaccagtcatatccggaagtgaactaataggaactgggccccacaagctcaaacaaaatttctcccaatcaaagttgctgaaaaattctaagaaacggtacaacacctggacatgcacgaatagaaaataagcactggtttcatatcagggtacgtttaaaagacgagaaggcaaagtcacctcaagaggtccagtgaaagagttgttgaatatatgaaatatgtacagaacaagtgtctccaatgcataagtagatataagaccatgatgagctccaagaatacggctctcgtagaaacaccatgcctttatcaatatgatactcctcttgaataaatggttttggctgatcaagttgtcaatctattaaaatgcagaatcattagaag

SEQ ID NO: 23307 - DNA, 756 bp, Zea Mays
gaatattcagcaaaagaccccgcactcatgcagtatcttgcagctgttcgcagtcttgagagacaattcaagggtttcaccttgcagcatgtggaccgcaccaggaacgaagaggctgatgcattggccaaagcagcggccagaggcgaagccttgccctccgacgtgttctaccatgtcattggcacaccagccgtccacaatctagagggtctacaaataaccaacgacgtcgagggccatcgcatcgtcaacctcatcatgactgaagattggtgggccccaataaccctgttcctgcatggatattaccaccgaagtgacgtcaacgaggccaagcgcctcaagcaccgaagccgggacttcgcactcattgagggccagctatacaagaagggggtcagtcaacccatgcttaaatgcgtcaccaaaatcgaaggcatccagatcctgcgcgaagtccacaacggaacttgtggctctcactcggggcctagggccctcgctgccaaggtgatccatcaagggttctactggcccgccataatctacgtcgtgaatcgagtcacgaggtcgtgcgaaacctgccagaagttttctccccgctcgggcaacccttcgcagttcaccaagctgattgcccacacatggccacttcaacgctgggggctggacattgtcgggccactacccatggctcaagggaacctcaagttcaccttcgtcgccgtcgaatattttaccaagtggatcgag

SEQ ID NO: 23308 - DNA, 471 bp, Zea Mays
tgaatttatacccacaagagaactcgacctaagggagaggtgaggtaccactgcgagcattgccatagagatggtcacttggtagagttttgctttagaatgaagagagttgagctatagggttttgacatgagaagtaggaatatgtatcacactcttcatgatgtacatgtccctcctaattagaggccgactgctaggtctagaagtgctttgcctaaggttgctaggcctcaagtagtaagaccacacggtggttgagctcggcgggggctttgtttccatagttctaggccttgtggtggaggctttgttcccatagctctagcggatcatgacttccctctcatggagctcgctacccccctatgggaccggtgatgtttggcctccttctaacgtttttaggggcaaatgccacagtactagtgatctttatagtttactaaccccgatgatgtgccatttgtc

SEQ ID NO: 23309 - DNA, 514 bp, Zea Mays
aattaatttcatactaaaaatcattttccttaatcatttatccctttttactgacttctggactgcgcattaatttctgaaaagtacaggggcgactacgtaacaatcccgagactcatacaacagtactcgggatggcgggttgatttcgtaaacaccagggggctcttttgcaaactaggcaggccgaagggctatgggttgtttttggccgcacgatcagaaaccagcgcgccagatcagatcagatcattgcataaatcggcacttgacgtagacccacagatcgcgatcgaatggatgaaaatccgtcacggcacccgctaatctgcaccgcccctatgatttagccccgaaccggtacgccagagtttaatctgagccgtccattagctgatccaatggctacactgcataaccactcttcgccctctatacgtacggcagaggacggcagcgcagccgcgcagcacggcggacgccaccacctgcgatgcccaaacattgatcccac

SEQ ID NO: 23310 - DNA, 608 bp, Zea Mays
gctaaagagcttcaactagtggtgaaggacggtgcaaaattaaggtatggtgaggttaacaacatgtacaacagagcaatattgaaaaccatatcatagtgccttttgaattagccaaacatttactagtgaaataaatataacaattgaataagtgagttgtaaacaagatttaaagaatattacaatacattgtgtatgtgctaggctgagcacttaggccactgtggacgtacatggtgcccgttgctgctaattgtctagttgccttatttttgttgtactgcctcatatggtatcgattttttttttttgcattcagcctacggaacgaagtattctcgttttaaatcttttgttcggcaccatagaccatgacgccgaggtaacacgactcagcactacacctcttgtcatgaagatattgaccttacttgcgtgtgcgaaccaagctaatgatacgcggcagacctcaacatcaaagatcgtggcagcgaggtgcgtgcaccaggaaccagtattgcggggagcagttaggacgttctggcttagctcatagtgctatcacgttgtgggtcaccctgttgttgcttctggtgcatcatgtg

SEQ ID NO: 23311 - DNA, 1777 bp, Zea Mays
aaacaactcaatctacactattgttcgataggtagttaggttgatgcggactccctgctttcgatggaggctcagtaggaggttgtggacaagaacgcaggaaataggagtgggaagggggaggaggattcctggtggcgttctggacgctggagagttcctccagtgcgccccaggtaacctcctaagactaggagatttatttcttcttttgataatccctagtacaagctacccttggtctcttatagactgagcccaggttaatatagaaacaaatcatatcactctcaacttgctagaaaacagactgactaaatatagaaacttatctgctgtctcttttattccttatatgctgactgactaaatatagaaacttatctgttgtctcttttattccttatctgatgtttcctttattcctggcgattccttctctggtatacctttcctacaaatgcatcggtatcatttcccccctcccccaaaaacaggtcgtccgcgacctggacaccaggaaaacggcgacgaaagtcctccagctgaacccaagttgcatcagctgctgattgtcccagccattgcacgagcagtcccacacgcctcagttcttgcgtgccttagtaaccttctcaggctgaggtaggactctgccatgtaatattgggggtagaggaactattgcagccgggggagccccagtatatttctttagtaaagagacatgaaacacattatggatgcgggcgtgagatggcagggcaagcctgtaagatactgtcccaatttcctccagaacctgatagggaccatagaagcgaggcccaagcttagagtaggcggctggtgtgattcctaaagttgtacgctgttgcagtcgaacccacacccaatccccggtagtgaactgcacttcccttcgagacttatcctggaattgtttcattgtgagctgagcctgtatgaggcgttccttgatctgagctaaaaattcatcccgatcttgtaactgagtgtcaatagcagctacaggggaaagtcccggttggtaagagataatagctggagggtctcgtccatacacaactcgaaatggtgaacaacgaagggctgtttgaaatgaagtgttataacagtactccgcctaggacaaccactgtaaccatgtgtggggtcgatccccagctaagcatcgcaagtacatcaagatgatccggttagtaacttcagattggccatcagactgtgggtggaacgctgaactcatctgcaacttgacccctgtcctggtgaacagctcagtccaaaatgtactagtgaaaactggatcacgatcactgacgatggagcaaggaataccatggtgacgagcaatatgatcaaagaaagccttagctaccgaagatgctgtatagggatggctgagaggcacgaaatgagcatactttgagaagcggtccaccacggtaagaataactgatttgcctccaacctttggaaacccctccacgaaatccatggctatatcgctccaaacccctgaaggaaccggaagtggttgtaacaaacctgccggatgaaggtgttcggacttattacgttgacagactgaacagcccttgacaaaatctcttatgcggctggcagcaaggggactatggaaggaagccctccagcggttgagggacttttcgatgccctcgtggccttcttcatgaactgaagctaacaacaggggccacatggatgaggcatctggcacaaaaaattttcc

SEQ ID NO: 23312 - DNA, 683 bp, Zea Mays
ccactgacaagctgacccgcggccagtgctaccctgcgtgtgaattggggtcacggacgggtggcccccagtgctctgactcatcttctccctcctcgcgatcacccgctggaaccgcgcgcagctaaaaaatcctccgctcgaatcgcggagtccgttgtaactaaccggcaaaatccagccgggctggggatcctcggcttcggccatataaatgcgggccccgctaccaggatacaccccctcgaatccatctgataagccacgcccaccaccacggccgatttagcggtaagagagggagagagaaacgagaagacgagcgcaggatttggatcttcaacgtggaggcgggggcagaccacagtgttcttgcgtactacgctgagatccgtcgcgacatcaacgagtctacgggccggtatatcaccgtcgacaagcaaggagcaccatcgcgcaacaccttctgtgggcagctctgcttgcgctcctagctccactgctccagtatggacgcgatctggcaattcgttatcttccccgtaccgcgtaacacaaatcgcgctctaggccgcgttctcggacggctaagcacgccgctcgccagtgccgcacttctctggtgcgggcgcccaccatgcggggatgaaggaggaagaaggcgtcggaaccgtggatgtcgc

SEQ ID NO: 23313 - DNA, 426 bp, Zea Mays
ataaactctacaaccacacacttgggttcatgaagaggcgaaggagaagttcttgtcacacttcatagtggaccgacatagaagattaccaagtaaggggagatcaagctcgcttcccttgtaccttcgctccaaattatcaatgtaagtaattctaatggtgatcaatctattaagcattatatagatcagccaagggattagttaggacaactcatgagaggggtagaggagtcactcaagaaactcgcacgtgcattcgaaaaatctactggtcctagtttcccatcacatgaggctagcaccaagatatttatgcctaacccatcaactacaaataggcccttacaagaccagccattttatggtataccgatgaactcatatccaaggcaaccattgcccccataatccatgtgcgatatg

SEQ ID NO: 23314 - DNA, 403 bp, Zea Mays
ggtgtgttcagatgcaaaacgagaaagtcattgcttatgcatcgcacctactcaagccgcatgagcagaattatcccacccatgatttggaattggcagccatagtgcatgccctgaaaatatggaggcactacctaattgggaacaaatgtcacatcttcaccgatcacaagagtctgaagtatatcttcactcaaccagatctcaacctctgttagagaagatggatggaactgatcaaagattatgaccttgagattcattatcacctcggaaaggccaacgtggtagcagacgccctcagccaaaaacctttcgggataaagggaaccaactttttagaagattggaagaaggaatcagctcagctgaatgcatgtttgggaaacaacgacagcctaga

SEQ ID NO: 23315 - DNA, 441 bp, Zea Mays
ggatgtccaaagaggaggcagtgaccacgatgtcatcgacatataggaggaggtacacaatgttattgccgcaccgatagatgaacaaagatctgtccgacttgaccttaattaaatcagggggcaaatatgtggcacaacagatgtaccaagtgtgagggcttgctttagaccacaaggagacttgttgagcttgcataccatatcgggatgagtagggtgaacaaagccagcatactgactgcagtagacggtctttgtgagtctcatggagaaaagcattcttgacatctagttgatgaactgtccaagaacgggagaggaccaaagtgtgaactgcatggacggtagcaggctttatgatgggaccgaacgtctcatcatagtcaaagccataacaccaatgggccttgtactgtttagagagtcattcgccttccg

SEQ ID NO: 23316 - DNA, 560 bp, Zea Mays
ctctcatggtattagagcccacctcctaaagacctaaaccctagctgctaggactatccagaaaccctaatcctagccgccaaaaaaatcaatatgccatggtgagttcttcaactttctctgctagttcgcaacttctgttgagacaagcaattgcagagaaactcaacaagaacaattattctctatggagggcgcaagtcctgcctatcctccagggcgcccaactgcaatgttatcttgacggcttgtgtgccgctctgaccgagaagattgaagtttcaatcggtgacaagaagatgtagatcaatcctgagttgacatggtggttagcaattgagcaacaagtatttggtttccttctcaccttcatgactaaagaagtcatgagtcagatcgtgacttgtgaaacacctcataaggtgtggactatccttgagcagaccaatgcgccaagttctcaagcaagaatagtcaatacaaggattgcacttgcaacaactcaggaaaggtaacatgtcaatttctgagtatatcgtaaagatgaagtcacttgtaga

SEQ ID NO: 23317 - DNA, 558 bp, Zea Mays
cgactgagggcgtctgttaccacgttggccttcccggggtgataatgaatctcaaggtcataatccttgatcatctccaaccatcttcgttgacggaggttgagatctagttgagtgaagatatacctcagactcttgtgatcggtgaaaatgtgacacttgttcccgattaggtaatgcctccatatctttaaagcgtgtattatggctgccaattccaaatcgtgggtggggtaattctgctcatgcggcttaagtaggcgtgacacataagcaatgactttttcgttttgcatcagcacacaccctaagccttgcctcgaggcatcacagaaaacgacaaaatcctgatggatatctggtagtgtcaaaacgggtgcggttgtgagtttctcctttatgatctggaaacttccttcacattttggggtccacacaaatttatggtctttcttgagaagctctgtcataggtctcgctatgctggagaatcctttgataaagcggcggtaatatcctgccattcccagaaagcttcgaacttcactgacgttggtc

SEQ ID NO: 23318 - DNA, 527 bp, Zea Mays
taagcgcgagcatgttgcaccgtcttaagtcgttgccgacttaagccgattgctccgttagcaggcatagtggtcaccccgagttacgtaagcgcgagcatgttgcaccgtcttaagtcgttgtcgacttaagccgattgctccgttagcagggcatagtggtcaccccaagttaagtaagcgcgagcatgttgcaccgtcttgagtcgttgccgacttaaggcgattgctccgttagcagggcatagtggtcaccccgagttacgtaagcacgagcatgttgcaccgtcttaagtcgttgccgatttaaaccgattgctccgttagcagggcatagtggtcaccccgagttatgtaagcgcgagcatgttgcaccgtcttaagtcgttgccgacttaagccgattgctccgttagcagggcatagtggtcaccctgagttacgtaagcgcgagcatgttgcaccgtcttaagtcgttgccgacttaagccgattgctctgttagcagggcatagtggtcaccccga

SEQ ID NO: 23319 - DNA, 364 bp, Zea Mays
ctgccggagaacgtcgcgacccatctgagaagggcggtcggaacaaagccgcgatgtgagctgtagctggagcaactccgtcgtgagggcgacgaggaggatcagaggtaccatagcacaagctatgaagacaagtcgatgactcattgaatccaaacagctggcgaatctagctagcatgaagtgtaacatcctctcgctcaaagcggaacctcatccactggtgatcggggtcgatccatactgacgcattgaacacacggacccactcctcaacatatctgccgctggtagtcagaagagtgagaagtcccagcaaatatgtgagatgcatctcagagtctgcaccagcggctagcagaac

SEQ ID NO: 23320 - DNA, 485 bp, Zea Mays
acatctttatcaccttatttctcgtaactcgagtcaaagtatccaaaatcttgatcgggtactccgtgtaagtcaaatcaccttgaacactgagctcttccatgggtaactgttcttcaggcaccctgagacatttcttcaactgagacacatgaaatacatcatgaacatccgcaagatgatctggtaactccaattgatatgcgacctctcccactcgctttaagattaagaagggtccaataaaccgaggggacaactttcctttgactttaaatcttctcatacccctgagtggtgacaccttgaggtacacatgatcacattcctcaaattccagtggtcttcttctattatctgcgtagctcttttgtctggtctgagctaccctcaaattccctcgaattatacggacttgttcttctgcttcttgaatcagtttaggtccaaagaactgccttcccctagtctgatccaatatagag

SEQ ID NO: 23321 - DNA, 1201 bp, Zea Mays
caaggaacccaggaactaccagaaactggccatctgcttgatttcagtcgccatctgcaaggaacccagaaactatagctaccagaagaacagcaaaatggcaccagaaattggcactgcttcatttccagtcgccagatacgtgtccaaatgaacagcaaattggcaccagaagaacagcttctttttacagttaccagcttctgtccaaatggccattacacatgtccaaatgacagaaatttgaatggacagaaaatagtaaactggaaacacaagttcaagttaccgagggccatattcagataaccttaatgaaaacagaatggacaacgttacaaaagctatcgagtgccattcaacactcgacagaatggacaacccaggttgacagtacttcactaccaagttcagttaccttacacaaactaactattacacggataccttacacaagctgtcccttacacaaataacacatatagtgccgttaaacaacacccatattactctacttcatctgacgatccgaaagctcttcagaactgacatcatccagtgcccattccccaccacccatttgttcatcttcagcaaattggttgttgaactgctccgataatggtggcgacggaccagcttcgagatcatctaaacgctgtgcttcgtcctcaagtgacagagcaagttcatacacgcgccacattgcgaagttcactgacacatctttggccgtatctggcgaattcataatctcgtctccagccaaatctttcaactccttcccaactacacgcatctttgtaatggcttgggcgaggtcactacgaactgtttcaaatcgggtaatctgcgaaaccacaaaaattgctattggatttgaacatagtactgcatattattgaacttagttcaacccttaccgacactgaacgaggtgccgagcagtgattgacgccggctgtgagctctgttcgacagaaaacagttaacaattaaagccactctctgcttctagcactaatggtcactagacagtttggataaaaacagtttcaaaatacagaactctacaaatatcactgcccaacgtcaacagcttcacatccctctagcttcgtgcgcaacatccaacgttgggcagttaaccccacgaagctagagaagcggcaaggaactcacctgcacaaccaacgtcaac

SEQ ID NO: 23322 - DNA, 500 bp, Zea Mays
cttctgccgcggatgggatacagggaggctaccacacatatccagtggctccttggtgccctggtctctcactacgagtttgacgttgtggatttccttatttgtgagatcgaggacaccgttttggaaggtctgtgtgcccgtcgatagctgccatatgctcactacctatgtcacatttttgctcagctgattcggcctccacagttccagggcacacttgaggcctcacgccttgtctttgggtcctaccgtcctacgcctgaggctcctgtgccagcttttgctccagtttttgacactcaggtcgaggatactgcacttcatcagtttgaggctcaggacacaacagttgatgatgatgatgatgagtttgggattccgcctccgcctcctatgcctccacgctcacatgatcatgaggctgggagttctcgtgctacccctgctgcctcttctgtcgttgaccctgcttttgcttcgattctccagacacttac

SEQ ID NO: 23323 - DNA, 308 bp, Zea Mays
gttttgtgcaccaactaccctcaccaagtactcgggagaaacaaagactgagttgtggctcgctgattaccgcttggcatgtcagctgggggtacaaatgacgacaaactcagcattcacaacttgcccttgttcctgtccgacaatgcccaagcctggctcgagcaccttttgcccacacagatccatgactgggatgatctagtgagggtcttcagaggaaacttctagggaacatatgtgcaccccggtaactcctgggacctcaggagctgccgatagaagctagatgaagccctacacgagta

SEQ ID NO: 23324 - DNA, 424 bp, Zea Mays
tactgtgcttcttagaaaagattgcttgtagagaaaaccagcttctgtgaaaagcacctacaagttaagctcttccaaacatggcctatatatttttcctccatctggtggaaaatttatagtgagtaattacagttcattttcatatgtgatctagactcaaccatttactaatttactgttactagaatttattcaggagctctgaccctatcttgtcagtgaagatgtgaacacatatagggaagggatacattaaaggaaaaatcttgagaatgttatcatttactccctttgtttcactatgtttgtccatggccttgggataatacgtcctgcaatgtttgtcaattgaggatatcaagagtttaagttggtgcaacattttcaatctattatcactaattaaatgctttcaaagaag

SEQ ID NO: 23325 - DNA, 571 bp, Zea Mays
cttccgtaagcatcaccagggtggttgcgacctgtgcatggctgttcagacttggttccctcggagtatatgtctggcaacacctttggccatggcgcagataatggttaagctaggctgccaggctaaaccttagtcgagcggagcgagagaaagacaaagaagggtatgtcgtcgcggcaggcgatcgtcgcgtgcacggccaggtctgagcgcgacatgtggtatagaaggatagcaggagatcaggatcgtgcgcgtgcgagtttccatgcagaagaccatctggggatgcaagatccctcgtcgaagatgcaaagctgtcgatctgtttccagccatatgcaacctcgccttcacctctacaactgtggtgagtcacccgatctaatcatggccccgcggtgcgtagaacctcttgcatgaaatttagttcgctggaaaatctgggtcgtgggattggagttggccggcaatggcaccgtcgccctaggcgctctcatccctcgcgtccgtcggtcggagtgaagaagacaaccgggatccattgatccgggagcgtacggctagg

SEQ ID NO: 23326 - DNA, 578 bp, Zea Mays
gaagttcagggactaaaacagaaacattcctaagactcagtattcccacagtgtggactgcgggttagtttctaggtttcctagggtttcttatgcaaaaaggaaccagcgaaggggtaaggagcaaccagaaccgttggaccagacacgcgcggctctgattagaatcgaaccggtacggctcgggatcccttggattataaatgaacggcctagattttatgaggattgatttgctctgaaccgcacgatcaagatctaaaggcactgatccattcacgtgaacgggtatgcgggacaatatctctaccgtccaactcaaatcctacggccagggccctaaattcctcttcccctccaacaccgcgacgaccaccgcgttggccacggcggcgacctcgtcgcaggaatcacaatccagcgctccacacccccaaactcaaattaaacggcgcaacacgaaattggggacatagtttagcagtgtagaaggttctcgtaggcaatctcggagtggttcccctcggccacgacaccaggcggacggcggtgcagcacggcgatgttcggtcaacaac

SEQ ID NO: 23327 - DNA, 282 bp, Zea Mays
ggggaaggtcctcgacggcgtcgcgcggaggatgaactccggtgagcacgcagaccggccgaattgctccaagaccggcgcctagactaagactaaaccaaatccatgaccaggggagtatttcccccaacataattgcactaatgatcaaggggtgtgctctggccacggtggccgtgaacatcacggcaataccgtcgtgttcccggcgatctgaggctacttcgtacaaattggtgattcggaaagcatcatagagcgtcaaggatactcaaacgaggg

SEQ ID NO: 23328 - DNA, 376 bp, Zea Mays
taggtatgcttgagttcagataatttacatagtagacttagacttagggcatagccgacctcccaaatccaatgtgttatcaggctacatactccttttggaatcagataagcatacgcttgcattagtggcgtgtgtgcggagtccgcctaattaaaatcccactgaatcacacctgcatgtcagcacatccaactgtttcctctgcgtcgctcgcgcgtcctgctaagcttttgttggaaccattattacccatgtgcaattagccaactttgctccgatataggcatctagcccaatccaccgccacgttgacccgcgctaacccaatgtccgcaatttcttgttatcgagtctccactcatccatcgcagca

SEQ ID NO: 23329 - DNA, 461 bp, Zea Mays
gaagcatggcactattgctagcaacttagtttgctgctctgcacagagaggcgaacctcgggccgatctcgagggtcgaacgagacgaggacggaagaagagggttgaccgaatcagataaaatctcacggggccggatcaagcatgtgcggggtaatcatgttatcaccccatatctatccccactatctctccgttcggcacaacatgacaatggtaggatcgtgcccttttctccggtcaaacactatgcttcttttaatctgggacaacattagagcccacgacccttgtacgacaaatagagcaagacatgacgaatggactacaaggtacgagggttggtgagagtgtagggtacaaatgaaactttcacagaagcaggcccatcctgggagcttacgtcgccattacggacggcactatcctaccaagttcaaggtacacacggtccaagtcag

SEQ ID NO: 23330 - DNA, 657 bp, Zea Mays
tcaaggttagtatgcacgctggcgcctcccgctcccagcctgttcaaccattcttgtaattgcgtcgctattcgaggcgttctatatttattctggtttttccagaactttcgtggactgtggggattttaaatttgctctcgtgatgtcctcgtgtgtcagttgttgatgaactggttgactgtttattgattaattcggattgttgtgtgcttcattttgcagctctacgaggatgatatgtgcttgtgcatcctggatgctaaacctctaacaagcgggtaagggtttaatgctcttctcacttgtcagctctatcattacttcagttcttggtgtgcttaatttcgttaagttactcgagtttgtcacccacgattaaaaccaaatacagatagtgacttgttgtgtaacgtgagttttcactgggtgtttgattttgtttgagtaacatgcagtttttgttatttgtctgcatcaagtttgtattgctttgtttgctatgttctattgacgtgaattgacaaagaatgtctgaaataatatgtactaatagtctgtatgttgggtactgaaggagttgagatcgcttgctcgataaaggggtaatctagactcttttttgtgcaattgactaaatagtttttgaataggcca

SEQ ID NO: 23331 - DNA, 529 bp, Zea Mays
tggaaatacatttgtaggcacaacaaagttccacaatcttgggaagacttcaaaattcattttagagatgcattcattcctacatactttgctgatcatttgctttctaaattagacaccttaaagcagggtgctaggactgtgaaagattattattatgattttaaaatttgtaccatgtttgctcgtttagatgaatgcatggaagatgtaatgacaggttcatgaaaggactcaattctgaaattcagactatagtaatgcatgaagcatacaaacacatttctcacttgtttttgcttgcatgtaaagctgaaaatgagattctattatacaattatacaagcactgaacatgtgagccatagttcctcttttgcatctgctctacatgctgatcaagaacacaaaaaaatgaaaccagctgttgtttttccatcatcacaagaagaattgattgttgacacttgtgatagtgaagatttgtgggataatgattcacatgtactaaggcaacaactagtaaatga

SEQ ID NO: 23332 - DNA, 1160 bp, Zea Mays
cggcggtgtggtgggtggtgagcccacgtacttccggagcacgccgacatgaaacacgtcgtgcaggcgcgcgccgggtggcaattctagccgaacagccacgtcattgatgagctcggtgacgcggtagggtcccacgtagcgaggcttgagcttcccagtgatggttcgcggtagggacgccgccacacattggcgaaggcgaaggaatgcccagtccccaacctcatatgtgacctcccggtggtgcttatcgtactgcagcttttggaccgcctgagcctgctcgagacggaagcggacgtcagccagaaaagcttcccgcgcttccatttcttgtgccaccgccgccacccttgtgtcgccgggctcgtaggagcggatggagggcggatcacgaccgtagaccacccggaacggggtgtcgcgtagggatgactggtaggccgtgttgtagacgtactccgcccagggaagccagcgaagccactggcgaggacgatcccccgtgaggcagtgtaggtacatgacgatgacacggttggccgcctccgtctggccatccgtctgcaggtggaacgccgatgacatgaggagcttggtgcccatgaggcgcatcagctcgctccagaacaacgaggtaaacagcgggtcgcggtcggagacgatggactgcggtatcccgtggaggcggacgatgtcggtgaagaaagcctgtgccacagactccgccgtgtacgggtgcgctaggggatgaaatggcagtatttgctgaagcgggcgacgacggagaggatgaccgtttttccgtgcacccggggtagcgcttcgacgaagtccatcgcaatgtccgcccagaccgtcgagggcaccggcagcggctgcagcaagccagctggatgtagatgttccgacttgaaccgctggcacgtcgtacacgcccgtactaagtcctgcaccaggcatctcatgttggggaagtggaagtcccggcgcaggcggtgaagggtgcggtggacgccctcatgcccatcgtcatgcacggcggccacgatctcctgcagcaggggcgacgccggcggaatgtacaggcgcccatcgtaggtgaccatgccgtcagccaccgcctagggtgcatcgcgggtgctggcgctgactcc

SEQ ID NO: 23333 - DNA, 354 bp, Zea Mays
caacctcgcgaggtgaaacaaatgacgaagtcccaaccgagcaaaccacgcgaggcgaagcgaacgaccaaatccctgcagagcaatctcgcgaggtgaagtaaacgaccaagtctttgatgagcaatctcgtgaggcgaggaggactaccaagtccctacagagcaaactagcgagacgatgcagacgaccaagtccttgccgatcaaccccgcgaggcagagtggacgaccaacttattgacgagcaatcccacgagctggggcaagcgatcaggtcccgtatcgatctaactggcataaaagaaggggtggcccaatgctacgtgcccgcgtcaacgtgacaagacgcatc

SEQ ID NO: 23334 - DNA, 609 bp, Zea Mays
ctcgcccgcccccagtgcgtgggtctcaggaacccaagcagccagccctagcgggcggtctgttgcgaccagctcggtggctcatgtccccagcgcgcggtccgtccccggtgcaaggtccaacacatccaatgtcctgccgtccgctacggtgagctcccttcttctttctctgtttattcgtgcattttttctctttcgtgcggatgtcgcaccatggctagttctcggagcagcttccctggccgagcccagcaccccctgcatgcccccatgcacagctgtatgtcatggtcgtacaccttgtgagccccggtgacccacaccctgctgaccgcgacttcccctaggcccgcctcgcaatcccaatcctcattgcatgtcgtgcgattcccgtggcgaagaaagagaggagaaactgtccccactcgacatgcatatcccacctgggtgtgattgctactgggaaaatgcctgtgggcctcacctgcatggctattttctctctcccactattcccttgtcgtgtgtatgaccatgaccccatcgcatgcaccacgcaaattcagagctgctgcatgcgacacgattacaccaaatgcaaaaccg

SEQ ID NO: 23335 - DNA, 357 bp, Zea Mays
ctcttcaatataccagcagctcaaggaaacagatgaaatacttgaatcctttgtgtacctcagaagaaacaaaatgagcttatgcagaatgtaacagaactaaaaaaaggaaacagccatatgggacagaatgacatacgcatagatgattaagaaagaaaacaacacccctgaaacaatacctttgagcattatcttgtaaagtggctcttctatatagctggataatggtgtaatagcgatatttgacttcatcctccaaaacaggatcactttcgcccatcctatctacctgttcacaaccagaatataatcacctaaaatggtcctggaaaggttgctgtcacacccggattt

SEQ ID NO: 23336 - DNA, 873 bp, Zea Mays
cgcggatgaactaacaatctacacgttcccggtgattggtgagctctcagtccaaatcagtggttcggcaagcatcacggggttatgagaatgttcaaacgagggagcagaaggcgtaggctgacctggttcacgctggccgcggcgaggtacactttgcggtggcggagacttgatttgggggaagtttgaaattcaagagctctggggaacgatcgaggctaattcgtggtggctgggtgtgtaatgaccttgcggggttggcaggggcttcaatttatagggatcaatggcggtggccgagaattttagtggggacgtgcggcggtcggaggaggaagaagagtactggcgcggtggcttggtgtccagcgccgtggcaattgctccgacgatcaacggggagccactaaggcttacgacgatgcggtggaaagttagagccacgcggcggacgccggtgatggcttaacggcggtgagaatccttatccacgggttcggtgagcaagggggaggcacggcggcgagtcaccggagttatccttaggcgcatggcttttacctggcggccttatctagtcactggtggcgtaaatctcaacggcagcggcgtgaattgcggtggagatcggtcgtcggcggtgagattgccgcgctggcgttctgctctgcacaggcactgtaccatggcaattggcattcagtcgttctgacagaccattctttgagcttgattttctcccagattcatatggcaacacaaccagtgatctgcagcaatattgtagtgctataaaccagctacaactttgctatattgtgctcccacaaaaagtcaatggatcttgcttgaaattgagcttgaagttca

SEQ ID NO: 23337 - DNA, 523 bp, Zea Mays
gtgggggagtggaagacagcccagccgcctccaatgtcctttcgcgggggccatcgacaaggtcgttagggcaacaggtgtcgtggtggcatcaccctccaggggaggccgggagggcaatggagctcgcctcagcgtcatcagggtgggaggagatgcccatagacgaagggttccccgctccaacggaggccataaaggtcatgtcatctacatccgtggacggggtgatgctctcccctggcctggcatgagcaagaccactgcttcatctgcctcccacttccgtttcttcttcgctttgatggcggcgtcctcaagaagagggggcagagaaaccgtgacattcccaagccccaacagagacgcacgaatgcacgatggtgaaacatcgaacaaagccgaagagagaaaaagaagaatctaagactcaccaggtcactcaacctcccatggttgaaaagcaggggccattttcgtccataaagtctgacgtcacatttgtcgtgacgataagtacgcg

SEQ ID NO: 23338 - DNA, 678 bp, Zea Mays
gcggtgctgaaatctaacttggtgcccatagcttgctgaaggcccttccaaaattttgaagtgaactatgtccccctgtctcacactatcttccgagggataccatggagtctgactatctctttaaggtatatccgggcaagggtggctcctccaaaggtggttttcactaggatgaagtgggctaccttggtaagacggtctattattacccagatagagtcattccctttttgcgttcggggtagtccggttacaaaatccatgcctatttcctcccacttccattcgggcactaggaggggttgcaataggcctacaggtttctggtgctcggcttttgttcgttggcaagtgtcacaccgggccacatactgtgctatctctttcttcatccctctccaccagtatctggttttgaggtctaggtacatcttggtggttcctgggtggttggagtaggctgagttgtgagcttcattgagcaggacttcccgtgcctctccttttggtacacagagacgattcttgaaccaaaggactccttgttcatctgtcctgaggtccggaagttgttctttgagagcttttgccataagtcttgctgtctccgtgtccaagcgttgagctttgcgtatgaggtcttctagcattggcttgacttctaggctgtcgttg

SEQ ID NO: 23339 - DNA, 390 bp, Zea Mays
tcgagactgacgcttgcttgacaccactagcccacggagcgacggccggccaggacaggacccaagcttagagacgatgcacggccgatggagaaagatcgatactgactgactgacgcttgagaccacggagcgacggccattcttcgtgatccgcgacggcgcaaggcgtgttgtttggaagctagcgtccctgtccatataccctactacgtactctacctagtacagtcctagtagcgtgccagcagcatacggcggtggtgcttgccgacggtttgtcgatgtatagatccgtgcatgctctctctctcactcgctctagttttacgtgctctcactgttcagttgtacagcctttgaccgtgaattcccttttcctatccggta

SEQ ID NO: 23340 - DNA, 837 bp, Zea Mays
aaaaatctcatcccctgcgaggaaaagagtgtggggcccactaagatagtgtctgcaaaaattactaaggcgcgaaggccttgggactagatgaagaattttcgtaagttatccacattccatgagtgctctaggtcttcgccggatggtgaagcaagcctataggcattgggggaagtttttgtcttgacgatgaagggcccttcccatttgggttcaagcttgccccgggactctgttctggtggttctggtgaggactaggtctccttcctcgaattctttggggatgacagtattgtcgtgccatgccttcgtatgcgcttggtatttgttcagtgcctccagggcaagaacatagcctccgtcgataaagtccttggaggttgactcatcgacatcaggagtggttgtggagctcgctcgtggagatccgtgcttcagctcttgcggcatcattgcttcggatccgtacatcaagcggaaaggtgtaaattcggtcgctctagattttgttgtgttcagtgcccatatgactttgggaagctggtctgcccatttgcctttcttgtcgtcgagtagcctttccttgatggcactgaaaatcttgctgttggcgcgttcaactactccgttggattgcggatggtagacagaagcgaacactgccttcatgccaatagagttgcagaattctcggaagtctaggttgtcgaactgttttttgttgtcgactgttagctctaatgggactccgaaccgacatacgatgttttgccagaagaatttttgcgcagttttggaggttattgttgataccgctctggcctcaatccac

SEQ ID NO: 23341 - DNA, 400 bp, Zea Mays
ctggtgggggtggtgggaggccttggatctcttggtgttgctggtacatatggttttgctggtaggggtggtattgttcattgtggaattgtcgctggtgatattgttgggggtggtaggtgtgggcgatgactcgttggttttcagccggttgatttttggcaatcctatctttggtggccttggtttcagggcaatccctggtggggtgtggagtctttgccatgaaaaagacagtaaaaccttcgctgttgcgggactcggcctttgcctctgcctctggggttgctgccgcggccctgttacgtggggtactcgtggcgacgagcggtgttccagtctgctgttgattggcgatagtgttcacttgggactgttacggtttggtcggccggagtcg

SEQ ID NO: 23342 - DNA, 436 bp, Zea Mays
gtggtgctagctgagcccatgcagcttgagaatgacttgccgaagcaactgatgttgtgggttactagttgcccacatactcagagatatatggcgaaaagcatgaagtagtgtgcaggacctactttggctgattttgtcgtacttcggcttcagctaccacttattacttttggatcgtgacttggcacgtccttgttgtatgtcccttatcctcccccatagaataaatagaacaacctcctgggttcggagctgaaccttcctccgaagcttcttcctcctttgccccttggagctagtggcctgtaagagctttgttgcattcctgaagattgggagctttgttggttgccttgagtgtggtttgccctatcatcacttgagctgggattctgggtagttctgacatgcctagggtggagccttcctctga

SEQ ID NO: 23343 - DNA, 777 bp, Zea Mays
ttagccctgaggattcaaacaaaaaatttgcggagattatcgatattccaggaatgctctaggtcctcgccggatggcgtagttagcctgtacgcgctgggggacgccttcgtcttgacgatgaaaggaccctcccactttggctctagcttgccctgtgactctggccgagttgtccggacgagaacgaggtccccttcatcgaattctcttgggacgactgtgtggtcgcgccaggccttcgtttgagcttggtatttgttgagagcctacagggcgaagacacggtctccatcgatgaggtctttggaggttggttcgtctacgtcggggacggctgaagcgcttgtccgtggtgacccatgtttgatttcctgcggggtcatggcctccgatccgtatagcaggtgaaagggagtgaatccagtcgcccagcattcggtcgtgttcagcgcccagactggttcaggtagcaggtcggcccatttacccttcttgttgtcgagaagcattttcttgatggcagtgaaaatcttgtcgttggcgcgctccatgacgccgttggattgtgggtgatatactgaggcgaaggctagcttggtgccaatggagaagcaaaagtccctgaagtcctggctgtcaaactgtttgccattgtcgattatgagctcagacgggactccgaatcggcagataatattttgccagaaaaatttctgggcagtcttcgacgttattgtggatactgcccttgcctcgatccacttgataaaatac

SEQ ID NO: 23344 - DNA, 658 bp, Zea Mays
gtgaaaacttacaattatctgtgtctcaaagtcgaacggctcgttgacgttgtctctgcagtaggtggcatcgacgctcggccccagaacctgactgtccataacgatgtgactattgtgtcatatccccaaacccaagcagtaggacacacaacagagtgtcacgacaaggaggaacaggtccacacacatgagggtgccacaacacatcctaccggtgtcgccgccgtgtgcgctctatgacctgtcgttcgcaatggcctagccgtggctagagcagcaaggtggaggaagacacaaggtgaaggaaatgggatagaattgactccagtcgcctttgcagttgaatttgtgcgtgaatttcttattgtccgttccgacaatcttcaaattctcagcccgaccatgctctaggcgcaaaggtgacaaaggcattgtgggcgaggaaggatgagaagatgtagaggtgtgaagccatcaggcaacaccacgaacagctctgcaactaggtcggttagcgatccatccaagccattttttcctgctaccagaaacagttccagatttttgcccacactatctgttgcttcaggatgggaagcacgacaaggacctgcaccggggaagaggcatgcaccggtggtcgatgctgcagagc

SEQ ID NO: 23345 - DNA, 301 bp, Zea Mays
tcaaaggtcgaacagtgcatgttggttctagaggtaaggttgaacattgcatgatggttctagaggtaagacctttgcaatatatacgtggtctcagtcgactggttgatccagattggttacacttcatttctgggtttgtttagactggtgccccctggaaaatgaatttggacaacgtttgcggaaaaaatgacgagagctcgcttgcactccatctactccgtaccccatacaggctagtggacgagaacgaggtcaaaggaaacgacaagcagcaatagctagcgtctgataaaat

SEQ ID NO: 23346 - DNA, 567 bp, Zea Mays
tgaagttgctttcttgggaggcattgtgagattggtttgtcgaagcacgaacggtgggcaccaaatgttagaactgactgacacgtggtcgagtaggcccaaacaatgggaagttggaatgctcatgtgctcaacaaaataatgggcatggaacgacaatgtctcgttaagtgtgtcccgtcaatggacagtgcagaggtatttataggtaaccgggtgggtgggaatgcccttctaagtacgattatgcccccggttacctgcttctccctcagaatattccccccttgggggtcattacaggtcattacagcgaagttaagtacaacctgattaaatacaccacaaacccctaccccaggatggggcttacaaatggtccagaatagccagcgaggcgtcgcgtgggcccatttcacagaccacgcgggtagggagcggcgatcttcgctcgagggcaccgggtcttcgaaccttgccaagacttgtactcaaagttgcctaagcgggtggtgatggcgagcgaagtcttgaagagcccccgctttaagcgacgtgtcccttcgc

SEQ ID NO: 23347 - DNA, 382 bp, Zea Mays
cttctttttcctgcattcgcgagcccagtggcccgtattcccgcagtagcgacactcatctttggtgatcgaatgcccaccgtgaccgaatcttccttcgccatgacgacctccattcctgccgcgcccgtgcccatgcctgcgcctgcggctacgaccgtgtgcttggtcattgcctgacgccaaggcacctccggttgaactggatccgccatttcccacgatcttgaggcaagaagtgatcctagagatcagtttgtcctcggtcagatttagtcggggcagcacgacaccgtgttcacgcaccagtctctcctcgaccgccttcaaatgcccaacatgttcgtcgactgagatttctctcaaatcgagcaacgtctca

SEQ ID NO: 23348 - DNA, 425 bp, Zea Mays
ttctagggctggagcaacacagattctgggaagatgacttcaacattattacgccgcctcctattctcatctgcagtggcacaacaatcaagtgaagcacaactcaagaggaggccaaggcatgcacaatactgctcagtaagtgaacagagaacattgaacaaccaaaatatcagagcaattaccgtctgaagaggtcctcaatcctcatctcggtctatgaattctaaacagaggagtggtcgcctactcgcctgttcagccgctgaacagacaacagaggacagaagcatgttgaaaggggccctctgcaaactacaaccgccgcgcgatggagggggtgcagctgctgctcgagcagagggtcgccagagcacaacagggtggcaggagaggagggcgacaacgatggagaaggggcgacg

SEQ ID NO: 23349 - DNA, 423 bp, Zea Mays
tccgcttgggagccatcgcaatctcgtcggcggattgaacagaagcgaaatcagagggaaacagaggaatggcttgaggcggaaatgtgaagttagggctcagaacgcagaggcgtgcggcgacgagatataaatggggttttcccgggttggacaccgtttctaaaaagggctaagtcatcactcaggaaaacaagatttctgacataactcggctgtcacctctaaaatgccgatgtcgcccagcataactcggttgttacctctagaatgctgacgtggcccagagtaactcggttgttacctctaagacaccgacgtcgtcaagcaccactcgcctgttacctctaaaatgctggcgtggcccagcataactcggttgttacctctaagacgctgatgtgatctagcataactcggttg

SEQ ID NO: 23350 - DNA, 442 bp, Zea Mays
acacacaatcacccaatatgacataattggagggagcttgtggccgccagaacgttaggttgtaaccaggtaggtcacctgcagtattgaatcagtataatagactagcatatgatgccctactacaagaaccagaataaggaacaaaaaaagtgtagtatgtcacatgcacataccttttggtgagctccaaattcgcttaaagtttgtgcaagaaattagtgggctaatattaccaaactgcaatgctgcaagagtttggttttgcagtttaagcataagagaagcaacactcagagaaagatggatgcaaacatctgtcgacaccaacactatgtttgtcttttcattgactgaagtatatttccatgaaacatctacaggttcaagaacaagaagaccagaaccagcttcaattgtaaggtctttaatgacagatcga

SEQ ID NO: 23351 - DNA, 845 bp, Zea Mays
tcttcacgaaggagcagaacagagctcaacataggttttgtctcttcaaactcagtgtgtttgatccaacttgagttcgagggggcgttagatatctatgtgcgtccttgttgtattcggtttcatatatatataatccttgttagatgtatatgcatgtgttcttgttgtatttggtctcatatatagagtccttattccacacggtctctattctatatcggtgtatatattcgggtctagtaccctcatattgagtatagtgcaatttataacaatttgaactccatgcaccatgcttaaatatgcaacataagataaaacgtccatacaattaaagatgcagtaaaatatattgtgcagaaccaatgtcctactttataatcctactaatgatgcagtaagatatattttggattatggagtagctcactagatattcgagagctgcaccttgagtcactaatcacatagccttgtgcctgggtgtgtttcgttggccttggtcgtgtagtccttgttcgcggtaattcttgtactgtgggtgtgtggtgtgtccgcgagcctctcctctgtagcaggagtggactcttgaccaacacatgtggtttgaggtgaatacaagcgcatccaaagaagtcctcaggtgggaaaatgtgctgcatgcttctcgccgtattgctgttcctataatccagtagtctgtcacaaatccaacattttgctgttttgcagttttgtcttgtttaatttaatgcaagtataacatcagttcatccagtgccgtggttacagcatttaacatgtcaatatactgcacttccgtttgtaatatgccatttttc

SEQ ID NO: 23352 - DNA, 324 bp, Zea Mays
tagatttgaagcccttattagttttgatagacctgaactcgtcgttggtgagatcggcgaactggttgacaccgagccagaacttattattcccaccagcgttgaacgactcgatgaacttaacgttagccttgaacacctcgaaccgccgagccttctcggaggcgtctttgtagacgcggctgtactgcgccatccactgctcatgcctcgccaccatggcagagtcgtcgctcaggtcgcgggcagccaaggcagcaccgcagaagaaggcgaaaccaaggatggccaagatcgatgccttgagggtggccatggtcgatc

SEQ ID NO: 23353 - DNA, 706 bp, Zea Mays
cgcgtgtgaagaagctcgacaccaatatgatgctgttctggcgtcgagaggcgaggcgatggagagccggcgtgagggatggatgaacacgagcgacggtgatgaagaccgggcgtcggtgaggtgacaggagttggtacacagggcctggcaaacatggagataagaacgatcccttcctttcccccccctccggctgctctttatatggacacagaaaagctccaacagtggctggtttcagggaataaacagcgaaggatacttaggagatgtgggcaactgcatgggcgtgagtgcgtggctccattccaagcatccacgctggtcgcatggacacagcaaggcaggaatagggtagatttttttttgctgttacctcccaccgagcacaacagattcagtcgccagaataaatgcctttcaattcacctaggatatttcagtcctggttaaagtctgaaccgaccctgcaattcatctcatccctatctcttcctctgcacaaaagtgaaacacggcagtgaccaagaaatcttctgcagattaataacgtgaactccatcacatgactgaaccttctctgttcagccccccttttccttttggactgatttcgagtgccatgaaattgtggcaaatgaacccccctttaacacagatcttctttagcataatacacaccagaactccctagaaaaactag

SEQ ID NO: 23354 - DNA, 710 bp, Zea Mays
gagaatttgccctaggtcaccacatcaactatgtagatctatcttaggtgaacaactttgcttaagtgggcaagtcatgttctagtgagaaatttagagattatcatgctcaaactttggctgtcaggttgattaagttctgaatttcagacaagtagtgcaattgcaagcactttgggcatgaattaatgcatgatcgagcaagtatttgcctaggattgctataacaatattgtagctggatcttagggctataactttgttaaagggtgtcgatcatgttactccacaaaattggaggttattggctctgtaaattcccctgtcagaagcactgctggagcattccatggtacagtaacccgagtggatcagaacgccagcgtagcctgctcgccgccggtgaccctccctgcgctaagattcgcgccgccaccgtctcaattcgtgctctggatgtcgtgataaacgctcggagcacaccgccgtggataagcccggcgattaaagtatcccgaccaccatacaaagttcaccgcggtggaaccagataacctcgccggtgcactgcccccttctggccttatgccgcgtgtcctaaccgcgccaccgcatcgccatgactccctctagcctctccgttgatcgccggaatgaccgccacggtaaaagccacctagcgcttgcgccagtaccttcttctacctccg

SEQ ID NO: 23355 - DNA, 1097 bp, Zea Mays
cacccctagaagatctgcgatattagatgacttgtggcatgaaaccttgaagttcaattattattcagaaagaatgtgggttctggagataataaggaaaggaaagacaaagaaaccaaacaaaacaagtgaacaactgtattttgtatggttatcaatttatcattaccatataagaaaggaatggcaggtgtcagctcccaagaaatctgcaaactaatcgagaatgatgtgtgacaatttttcttttaccatccaaccatttgcaaaagaactttcagctaaaggtacacataaattttcaccaatagctcacaagctaagtccagacagtggataaaactaacaggagaaaaccatgcaacagatatgacgcatcaaagcccataggttatcagattttttggatcatacgaaggcataggttcagcaggcacacatgtaatcaagagcagcatgacaagaagcgaaggacacgatgaatctcaccaacagctagaatgtcaaaacagcctcgcagacgcaggtaccgcgacagagggatcaaatctaccccaggtactagggaatgacgacctaccgtcctccccaatagggacggacccagcaagaatatggatttacagtttacacatgtttacccaataacttttttgcaaaaaaataataataatcgaagttagaatgcataatacacgtataaacttctaattcgatcagatcggaatacaaatagacaaatagctcatgttggggttcgggtgttcggtttcgcacagcaggaagggaaaagagagggtgggcatgcctggtgcgtggtcgtcgtcggcaaagctcaatgaaagcctggtcaccggacgtagggcggcggctgcggcggtagcccacgcccggatgaagcgaacgcggggtgaacgggacacggcaggtttatcgaatgcggattcggtgacttccttgggaaagtgagtttctccctgctagacttgatcatggaccgttcgattcgaccgatataacctgtgcaaaaacaatccaacccgacctaattctactccctagtccctaccatacaccctccaatcaaaatccagtcc

SEQ ID NO: 23356 - DNA, 559 bp, Zea Mays
tagtagaactctagggaatggtcacaaaagcatcaatggggctcaggaattgtgatgatgcgctcggctagggcgggaggtggctggagatgagtactcatgtaagcagggacctcgacggcgatgccaactttagtgaattctttggtcgcaatgatggccagtgaatgggagtgggaaggcacgaccaaggtagggagacacaaatgcaactcgagcatgacttaaataggagctaacatgttggagaggggtaataatggcgggtcggagatgggagcatgaccagtgcgcgagcgtggatgaggcacgccaacgaacacatggcgagtgccttctgcgtgttttaaaacatgctataggccatcaaaacgtgcatatctaccctaaatctctatatgagatatcttctctgattttcactcttcaaatcttgtgtaagttcactcttcaaatcttgtgtaagttccaagtggattaggggttaggttcaaaagtaatggattagggcaaattggtttgtccaactattgaaattagtgattaattcaatgtcaaa

SEQ ID NO: 23357 - DNA, 822 bp, Zea Mays
caaatatcgaagaaacggcaaaaacatatatgcaattgtagctaagcagagccaagaaacatttaagccacaaagggagagagacatcccaacggctggtctcggtaaccctaagcattctggtcgtgtacgaggaatctcgtctaaggaaggatggaaggaaggattcagaccatagtgggaaggtttgtacaagaaacgtgattgatacaaagaagagttgtcggattatttaagtaggaggccaagaaatagttcaaaggcctgatgtctcaaatgctatcaaatcctcctctagaattgatgcagcaattggtgagtgcgatgtctgttcaacagatgaccactccacagatgcaaataattccagcagctcaaccctcggcttccaccgattgtacgactgtcccaagctctatcgcgtcaatgggaaataaggtccgttatccagttgatgacatcataaggcatgtggcgtgcacactggttataagatatggtattaacaatcatcgtacgaagaaagtaggaacatgtgttgcgatcccaggacacaagtttcagggaagcgacattccagatgattattgcagggtagaagtgatgacagtcatccaaggatccgaggacaacatgttagacatccatgggcccaaaggtatcgagacacttggacaagccataaaaaatttcatcctttggcctcgaagggatgtcgaattggttgatccaccaacgccatcgtcgccgcatccccaaccatctctacctcctcaaactttagtacctattgtacatccatcatcacctcctcaatcttca

SEQ ID NO: 23358 - DNA, 627 bp, Zea Mays
tggcttctgctacttcaccacgggtcgaacagagagaaaatgaagaagagagagaactagagagttggccgccaacatggatctcgtgcgtagacaactacccggcccgacgagtgttctaggcgtgtcgtgggatgccgccgcgcgtgcatgtgacctcggcaagcgaggaccgccgccatggggtcgatgattcctcgccggtgaatgggctgcggcgacctgcgtgttggtcacctattgccaccgtggggaagaagaggttgcctgcgccgttgattccctcttgcacggctatgatcaggtgagtgcttcccctttcgtcttattgaatccgtatcgtcgatccagtgatgaacggtcctgtgcgctcgactcttgatctgatctggatcactggttcatgatccaatggccattgatgtaccggttcgattattaaacatgatctaatcgtggccgttgaagtctaatcttgcggccaagataaacgtgtacctcttcggccctggctttctttctaaagagcccctctgttttcctagattcaacccgcagtccactcgggtgttcccctgagtctggggaatccttacccgagaccccctgcacttcccagaaatctgc

SEQ ID NO: 23359 - DNA, 335 bp, Zea Mays
cagtgttcaggacatcaatagtccaggcaaaaatgcacctcctgttcaaaagcaaaagaaatccaaggaacaaaactttacagcactagaagacatactcctttgtactacatggttgcaaataagtagtgaccctattgtccacactggacaaaggagggagggtctttgggccagaattgaaaaaagatacaatgaacaaaggggggaatttccttgtagacttaacagagcacttagcagcagatgggacaagatcagggctgatgtcagtaaattctctggatactacgccagagtcctaagagagaaacaaagtggtataagtgacgagg

SEQ ID NO: 23360 - DNA, 600 bp, Zea Mays
ggctaagtgagttaacaaactccgccgcgatgtccgccggaagctaccgccgcggatcgagctaaacgggcagacagtagtctgctcagctaggtggaacgacgatattttcgtggcctcctcgttcttgtggagtcgtggttactgaagtggggtggggccgtgggggccacgaacgccggatgggacgaaggagaaggtgggcaatgtggcatggcgcatgcatggcagttggcactttggcaggctaccaggaccagctcagcggagtattttacagccttttgctgacagctaaaccccgggcccgatggcaactgtcacgccagctgtgctcaccagactggtctttgcccatgcgcgcatggccgtttcctaccgagatcctctgcatccgcctctctatgcgcccctcgtggggctcatgacgcctcattgcctctcgactcgacgcgttctatacttgcaccagcgcacacgaattcgtgcaaacgcaccatgtccgaaaacaacgggccaaaatcactccaccgcaggatccgaactcggttcggtgccatgaaacgtctccaagcaactttttttccccaagtatagcca

SEQ ID NO: 23361 - DNA, 643 bp, Zea Mays
ccgggacaggggataccctggcctaagcaagggtccggtactgacacgtgtcctggctttatcctgtgcgcttgcgctccccgctcaggcggagacccaatgctgccacgtggattgtttcccgtgacgtaagccagcgggaggagcctaacgtaaggcctctgggctgcacagtctctgcatttattacagagaggacgtgccacctgtccaccctgctgacaggcgatgtgccccctcagcatttaatgtgtcatgtccactccgctggcaggcggcgttagggccatcctgcagacggcatgcttgtccagtccattgtcaaacagtgcccccgtgctgcaaggtgcattgtgtccatcatcacttatacgagaagcttcctctgcacgccgatactacgcagatctcggatgtcagggcgcaagaagattgctccagcggcgagcattagtagctccaagtactacatccgttatgttcctaggcccacatgtcggggctcagtacccttgtacgttccccccttagctataaaaggggaggcatgcaacgttacaaaagagaggtccacagacagacttagactctcaagcttccatagcaatccaacacacagtggagtagggtattacgctccggc

SEQ ID NO: 23362 - DNA, 461 bp, Zea Mays
ggcgaagattggatctggcgtgttatgtactggtgagcagcgaggaccattggataatggatcaacggtccaggtcacttttgaacacgatctaatcctacgcgctcgccccgcatcagacgaccctaccaagccgagccaatcggtacgcgatgccctaatcccgatcgtccgaaggtcatccaacgatccagtgttgtctccctcaccagattcaatcctagccatccatttcaaatcgacggccccgaatccttctcctacccagggaccagaccgcggcggcgctgccccccctacggcagggagttggccggagtttgccatctccgcgcacaagcacccaggcgccaattccctagtgctaaacataaagcgaaataaggcgatctcgattgagggctccttaccggatttcacagtgtggaggtcctcggccacgacggtgtgcggcaacgcgg

SEQ ID NO: 23363 - DNA, 370 bp, Zea Mays
cttgcagcacgtggaccgagccaagaacgaggaggccgacgcattggccaaagaagccgccagaggcgaggccttgccctccgacgtgttctaccacatcatcggcacgccagccgtccgcagtccagagggcctacaaataaccaacgacaccgagggccatccggccatcacatagtcaacctcatcatgaccgaagattggcgggcaccaatcaccctgttcctgcagggatattaccatccaagcgacgtcaacgaggccaagcgcctcaagcaccgaagccgggacttcgcactcattgagggccagctttacaagaagggggtcagtcaacccatgcttaaatgcgtcactgaaatcgaaggca

SEQ ID NO: 23364 - DNA, 471 bp, Zea Mays
ccaccgcacaaataaatacaatcgcactttctcccctccctctttattgcgagccgggggagggcagcgttttcactcactaccgtaagacaagagtgagggcaccaaacatactacatcggcttagccttcgggatatggcccgcctcccgataaataaacaacatcattttcaactcctcatcctcaaaaagattccgcagatccccctcaccaatactcatcccaaacgacgaggacaacaaatcttgttggccaccccgatctacccgaaggcgggttcgctccatccccatccgacggcgccaaccacttcgtgacatctcgccaacgctatgcttcgacactactcttcgtcgacgacgatctgtccttgcgctagccgggggatccaacgcttcgcgcacctccagctgtggtgaggactccgccgcggccacatctaacgcagcaaaataatccaaatcttca

SEQ ID NO: 23365 - DNA, 413 bp, Zea Mays
aaaacactcgtaccaaccgaccatcattaacttcatattcaaagaaatagttcgggtccaattccttcaacatatgcaagttgtcaataaacatctgagcatcaacatctttgattttgttcctaaaatcactatagtagttttgtagatctctttttgtgcagcccacatactcaaaaccttctgcaccaacttgaagtagcctgtatgcttgtgaagtgcctatgcttgctttatggcaattgaaaagagtagtttttacctgctcactgacacaacgattggatcgaagtaagtggcgtttgctgggtgtcacaaactcatggttatgtccctcatgtagacctgttatttggtacttgccttcacttgtgcgcttaatataaatataagcttcacatccacatcatgtc

SEQ ID NO: 23366 - DNA, 667 bp, Zea Mays
ctagaagtcgtggcggggagctcctccatagtacttggggttcacacgtgggagcgccgagcgaattcaaccaccggggcagctttgaattgctcaccgtcgacctcgggccgccgcagaatcgttgggcgtcgtgggcggagctcggtgcgccgccagcgctggtaagaacttccccctcggattcgcgacccttccttctacgttttagaattgtctggcgggtcgggggtggccgggttgctgttgcaaccggtcgccggcgtggggccgtcgcggctgttcttgctcgtgcgtggcctggtgccggatgaagatgacgactggtctaccgtcggatagccattggacggtgtgggttagaccgtgcatattggttggattccagcccttggatcgtgatcttgcgcgtaggattagatcgcaccttcattaaatagtggacgtcgatctttgatccgacggttcgtataatgtatcggttcatttaaaagttattctaatatgagccctaggttttggatccaacgacccacagtcacccatacccttccggccagggactgtttcttatgagcccctgaactccatagaaattaacccgccgtcctcaccagtggcgctcagagtcttaagaatacttacacgttggcccctgagttttcca

SEQ ID NO: 23367 - DNA, 409 bp, Zea Mays
aaatgagcacaagcactattttcgggggtcactgacagtttgcagaaacaccccggaatttctaatccttcgcaacccgagtccctggcggcgagcaacgtcgtgcagagctccgacgagctcgcgcacaagccaatccacgcaaagactagcgctctccgttgacaagcacctaattcacatctcccccgaagtttcccctaaatcaatttcatcaatcacgcactacaacgccctggccacggtgacagtggttatcgcggacacctgaccgcgttcccggtgattaacgaggttctagcttaattggacgggtcgacgatcatccagagcaagtaagaatgccgaaacaagaacgtagatggcgagaatggacctgatttgggctggccacggcgagcttgatttc

SEQ ID NO: 23368 - DNA, 852 bp, Zea Mays
aggcgaaagcgcgcgcgcccacgctgtccattttgcgcaggggaccctaacggtttgaaatacctataaagagccctccccactgtttctctgtctcgctgacatttgcacagagacccccaaggttctaatgcttcacaagggaaagtccacgatcatggacggcggagcaggaactccggcgagcttgcactagccaggatacgcgatgaccggtgctcccacatggctaacacctaattcaacccttaataactgtttcccctcaatcaatttcactagcggagctctaattcgtccagtccacggagacagcgcagacaatggatgaacaaacgtgttcccagtgatctagggcagtccagctcaattgaatgggtcgagcagcattaggagaacccaaggatgctgagacaagagagcagagagtataaacaaacctagaacaagctagccacggtgaggatgctttcacggtggcggaaaccaatttggggaaactttgaaattggcgcgctctagtggatgatttgaggcacgagttgctggattaggtgcttgactacttaacggaactgagggtgtgcataatttatagagtgcttgagcggtggccagtgaattggacggagacgcgcggcggccggagaggaggaggggcactggcgcacacaattagtggccttcaccgtggcagactcaccggcgacgagccagggctatagtgcggtttacagcgacatggtgaagcttcagggcacgtggcatccgatcgacgacagccaatctcggtgaacttatctgagccggccgcaaagcaaagggatacggcggccagccgccggtgttatc

SEQ ID NO: 23369 - DNA, 1276 bp, Zea Mays
taactcctcaatgataggaacagggtatttccgcttaaccgtgagggcgttgagatgtctgaaatcgacacaaaaacgccatgattgatcctttttccgcactaacaagaccggactcgagaacggactgttactgtgctgaattatgccagacgcaagcatctcattgacttgtcgttcgatttcatctttgacagctggggcataacggtatggcctaatgaaaactggctggtaaccttgaattagaggaattgagtgatcacaagaacgtgaaggaggtagaccttgcagaatatcaaacactggttggaaactctgcaatacttcagaaattttgggatcaacatcccccattgccgagtcgctgtccatagcatgcaataaatagaccacatggaacaagtctggactgtctgtatattgatatttgccttgaagtaccacggtatggcccttgtagggaattgacaaccatttttctgtccaattaattttcatgggactaaattgttcaagccagtccatgcccaacactgcatcataagtctttaggggaaacacccgaaaatcagtaaagaatgtgtagccctgaactgaccatgaaatggagctgaaaaattgggaacaagaaacattgcctccatcggccacttggactgtcacaggatgaggtagaggagatataccagagagctgctcagctaatgttgagctaacaaatgaatgtgagctgcctgaatctactaacagaacaataggatgcccttggcattcgcccgagaattgtatagtccggcgcgaaggaatccctgaaactgctgacagtgagagagacagtagctcgcctggtggtgagagcccagtatccacttcgttagtgcttgacttgtcttcaattaattcccacaattcttccagggcatgaagttggactgttggtgcacaacgatgtcccgacacccatttgtcagcacaccggtcgcataacccacgagctctgcgataagccttcaatgatgcaagtttatcatccatctgacgagagcgaggcagggaattcagcttgccagaatcagccaccaacgcttcaggttgtgggggtcggggcaggggcagcggagaataagctggtcttgtggaagaagtggatataaacttgcgatgatctgctcgccccggctccgagacttcctcctgcaattgggcaagagcacaagcagtatcgagagtcgaaggtcgctgtaacaatacagcagacttgatatgatctttt

SEQ ID NO: 23370 - DNA, 462 bp, Zea Mays
gttcggaaaagcctggattggtgatggggagtggaaagggtgtctgatggatgggtataggcatggtagatgtgggtggcagcaaggctgaggttggcggtggaaggttggttgaggtggatgggagtggagcggctgtggtggtgattggcgatgatggtatgggtggcgcggcggggtttgacaagggaggtatcccgccataatctggcatgccatatgggatggaagtaggtctggtggacgctgggggcggtggtggtattggcggcctactgatcatttgagtgatggcggtggtgagatcggcaagggccttcgtcatggtgtcgatcttttgctctagcgctgcgttggcggaattggtcgcggcagcagatgcgacatcgctggtgttgtcgtcgttgcctggcatctctgataccagattgttggagctgtggcttctaagaaggtatgagt

SEQ ID NO: 23371 - DNA, 533 bp, Zea Mays
tgactggtggacctgggttggcagcgctatcctctccaacgaacaccgaggatggcggatcgtagctgtggcgcgcggtcaggtggccctgggatggtgcaccagcacaccgagatccacgggggcataagcttataagttccgtggactccgccattggcgcaggcgtttgaccctgaaaccaacccgtgcgagtaagagcaccgacatcgagagagagagagaaaaggagaagggagaaggtacgcgtggtcttgtacgccgtcttgggctccatatcgtcgcactcggggatctacgacaccttacacgcggaccggagccatggccgtggtcagggactggcggaatcactcaccggcgttcattggcgccgcttctccgccccgcgtcgaggactgtcctcatcaccacaaatcctctggtatggtcgctttcgttggggtcgttagctaattccggtggtgtagaatcacgcgggggaggaaattactcctcattggggcgagaattgcacaccggtgttcacccag

SEQ ID NO: 23372 - DNA, 436 bp, Zea Mays
aaggactacgacttggaagtgcattaccaccctaggaaggccaatgttgtagctgatgccctaagtcggaagtcacaatgcaactgtatgatgatggattctcacatcaataccttgtgtgacgagttgagtaagatgaggatcgaagtaattccttctggtaccttgtctcacatctctgccgagccaaccttgttagaccagattattatggcccaactcggtgacaagggagtacaaatcatcaaagagaatcttaatcagaaagtggagaagtataagtgctatcgccaagacagcaaagggatactatggtttgaagacagattggtggttcctaaaaatagggacctcaagaagaaaatcttggatgaggctcatctctccaaattctccatgcacccgggaagaaccaatatgtaccatgatctaaaac

SEQ ID NO: 23373 - DNA, 657 bp, Zea Mays
gaagcggacaccgacggaacaacgtcggtcagctattggtgtttccctcgtggacgtcaatgtagatatcgccactggatcttgtgcagatggagctcgtgccgccgttgttgtctccgtgccgtggtcttcgcgtggtttctttccaagccatcgagacgaggattttttctatgctgggatgaggtgggaactgctggggttaagacctgagttggcgtaaatgaacacagttattttgtgggttaggttttcatccaagtgagtttgatccatatggttttgatcccaatccagaccattctaggccccaaacgaacaaggcatggggaagttgcctctctcatccatccatgtggggtatggtgtagtggggggttggaggtgtttgtcagttgtcaccccataatccactatggggtggagggagggttacgtggtaccatagaagatggtctgagcacgttttggaatggctctcgtgtcgggtgaagtctccatgctgacatgctccataatctaaaatggctctcagcgtcgatttgcatgataatccatttcagctatcaaactcgatgtttttccaaaaatccaactggttcctccaaacatgtactgcgtacatggttgcccctgctcaaggctgcaattctgttt

SEQ ID NO: 23374 - DNA, 785 bp, Zea Mays
caggaggatgccctcgcctacgagggctgacgaggcgacgggggtgaagggggctgaagttggtcaagctagccgggagttgtctgtggacgagtacttgattgaagatgtcgacatgttcaacgctcatacggggttgtcggctggcgatgagtgtgtttactgccgtgtaggttttttatatacggggctgtcagctggcgatgagtgtgtttactgccgtgtaggttttttatgatggtatgtgttcttctattggtctatttttggttgcaagggctgggtctaggcagatggtggtggtgtcggcaaagccggttgaagtgaggacccaggcgaagactgtgatgcgactttgctagacccatgggcacgattctactctgctgttgacatgggcgaagaggtcgccagcgtgtctgcggctaagggtgtggcgacaactgtctcacgacaactgcgttacatgagtgtaacattcatgatgttaagcattctcatacatttcatatgcatcatgaaagcatcatcataagcataatttatcattcaccacttatatcagaatcttgaaccgtttgctgttggtgtgaagtgatttcatgcttgaattaatagaaagcctatgttctagaatcttagattattaaggagtacttgtgtgtataggtaaaccaagttgaatgaatttagatgttgttttggttagatttcaaccctgttttcatgtgatgatatcttctaaacttgtatgtgacgtcatttgacagattttgacacggtta

SEQ ID NO: 23375 - DNA, 675 bp, Zea Mays
atggtgggccctaccatcgagaggacccaggtacggttgcaggcttgcagcgggcagacgacacagtccgcctcgtggtcgtcgtcgtcgtaccaccacccgacggctgcgcacggtctccagatctgaacagagaggcgacccaacagctgcgcacggtctccagatctgaacaggaagcggcatggtcgccgttggctgccactatttccctgcttcgacccaatcgtgcttcttccaccgtatgggagccgcatgggatcgatccaccttcaccttcgagccggtctgccgctgctatggtggcccctggctccgtgcggacccacgcgcaactacagcgagcaggggatgcatcctttgtctgatcctcgtcggtgaacccagcaccccacggctgcgtacgcttcagcactgcagcgacatagtggccgacgctgttgtcctctccacagaaactgggttagtaccttccttcagtttattatgtgccccctacacctcgtcccttcttgacattttagagacctacctctatcgtcgtcctcagtccagctcttctttattttgggttcttgccggacaccgttctcaagactcccgctttgccgctgatggcgttcgtgacctagatgctgtgaaaccttcgtgtatccaggttagttcgcctattga

SEQ ID NO: 23376 - DNA, 575 bp, Zea Mays
tattatattgtatattcctacaaacgcttaagcacgattaatctacgcctaagctctctaggcgctaaacagtggcctaacgcctagagcttattgtaaccttgaaccttacctttccttcttccatcattgtcggtaatgggtcgactttgcctgtcacctcaataggtgacacggttcttcctggtcctttataccacaataacattcttgttgcccctaacatcatacaaaatcttatctcggtttgtcgcttcaccactaacaaccattgtttcatagagtttgatctctgggggctcaccatatgggatcttatcgctcgtgatgtggtcgcctgatgcgacaactccggtctgctatatactatttgttttccacccccacctcccttatcccatggttgccacaccccacaccctacgcgtccgtcgctactaaatctagctccacttggcaccgtcgtcttagccaccctggccacgacctcatctccagacaatcgttcacctcggccattcctcggccccgtgacaacgctgcctcgccttgccatgcttgtcagcttggtcgcc

SEQ ID NO: 23377 - DNA, 443 bp, Zea Mays
ccgccaaggtgtcgactggtgcggcccttcccattgaagaagaaggctagtaggtggttgagcgtagacagaggacccgtggtgtgcacctccctcgtcgagggtcccgtgtggatctccgaggtcggtgttacaactgcctctctacttctcaccgggttgctacctgccggcgtccaacaaggtgctttcggtgtctcagctttggacatcgggtggcagtctgctcgtctctgccggtcgattctcagaaacagccagtgtggcagcgcctgggcgacgtcaaacagcgtcttccgggaagacaggaaacctcccatcgtgccttggtgaggccgaggattccggtgcggcctccggtgtggcagaggttgtctggcatggacaaggctcattctctggagggcgcgcgcaagacctcggtctggagacgtcttgcttcg

SEQ ID NO: 23378 - DNA, 435 bp, Zea Mays
gccaaactaagggggtatcgggttgtctcgaccatcagatgtcaggtcaatggccaagaaaagatcccagttcttggctatcgatggtggaacgacggaaacaaagggtggctagggtcgtaacggagaggcgggactgagcgtaggctcaatttaaaggaagtcaccacgacgatggggggcggcggcgatagcctgaggagctccacgttagcctcaagggtgtccacaggccagtaacgtggcagacttaacacaaacccattatggtggttcaatactcgagcctccaaccagctgcatggatggccagagcgtccggtggctggctacggcggcggtggatgattcatggtgaggacacgtggtgtcagtggctagagcggtaattcgatcatcgaatccgagcgaagatctttttaccacgcattgatc

SEQ ID NO: 23379 - DNA, 1241 bp, Zea Mays
atctacgtaaacacacataaaaatagtgatacctcccttgttgtaaaagaacagagaagtatcagatttggaagcctgaaaacccagtttcaccaacttttcactgagtcttgaataccaaacccttggtgcttgtttgagtccataaatggccttatcaagtttacaaacataatttagtctcaacttatcttcaaatcctggcggctgtttcatgtaaacatcctcctccagaatgccgtgaaggaacacattctgtacatctagctgcctcaataatcaacctctggatactgctaaggataagatgactctgatagttgctgccttgacaaccggactaaatgtatcttcataatctatgtcgtagcgctgtttaaatcctttggctaccaatctagccttgtacttatcaagagtgccatctgcctttgttttaattttgtatacccatttacaatctataacatttttcactccctcctgtggaactagatgccaagtattgttcttaactagagcatcaaattcggcattttcatagcaggtctccaatttttatcagctagagcttcagacaaaccttcaggttctccagtattagtaagacagcaatatctgattcgaggcatagttccatcttgaagccttgtatgaggacgctgatctgtgtagagaataggagacaacattgattctgaacttctagacatacaaggtgctgggttctcatcttctgcaggttccagatctgctgcagtagtatcagatgctattgctgcttctggaggttcagatgttgcaggttcagatgctgcatcagattgtgcagtagtatgctcccgccttttatgccgacggcccgacgctgatagacaatgcttggtgttggcttctgttcatacaccttgtcacgttgtgcagcagtaggttgtggggctgaggcagactggtgagaagatggtgttgtatgtactagagcctcctgagccttgcttgcatttgaatcctgtgcatcagtacatatatctccagaagtatttgcataattgcattagtatcaactggatgatcattaggcaataaggaagcagctgaaaattgttgtcccatattttcaaagttagatgaaggtagcaaggtggaagggagaagattaatctcagcccgtaggtgcgcaccagcattagcatgcaattcgctgaaagggaaaactgcttcatcgaaaaccacatcatgag

SEQ ID NO: 23380 - DNA, 885 bp, Zea Mays
tctgttcgtgcgtaccatctcgtcctcgccgtcggcgcgagcggcgctcaggtcctgcgactgccggtacctttccttcaccctggccagcttcagcagcgtggaacgggcgagcggcctccccgacgacgagaacctccccgggaggcacatgatggtctcggcggcgaggagctggcaccgagggaagtcggcgttcttcaggcactggatgaggcagtccagggcttcctcgcggtacatgctgatcttcctcggctccaccaggagatcaagctggaggagcagccccgccacgacagggctgtgctccggcggcgccgactgaaggtacaccagcagcgtgtgcatcatgctgaacgagccaccctccttgattgtgcgaagaagacgctccgccgccgatcgcctgaagaacatatatatcattcgatgtgatggatcaagcagcgggtaggtgcatcaagattacgaatggcattcttaatttgcggggtcgacttgccactggtacaccctactttttcagcttgagcagctcgtagaggaagcgcacgatgtcgatcttgtcggcgtcgccgacggcgtggaaggcgtcgaggacggccccgagggacgccttctcggcgatgcttctccgacagtggccgtcctcccagatgcacctgaggaggatgcgcatggcggctagcctctcctccaccggctcggcctccaggctggcggcgaggctccgaatgaacctctcggacatcagcgcagacctcggcaccggcggcgtggaggagctgtcatcgtcggcggcggcagcggcgtcctcgacgaggatctggctgaggaggatgaccgacgcggccttggggctgacgcacatcttgagcgggt

SEQ ID NO: 23381 - DNA, 637 bp, Zea Mays
ggcgacctcgaccgttgtgcctgccgatgataatttatctggctctagatttgagtgttttgagtctgatggtgagtctgggagttcgttttcttggatagaggaatcctcggatgaaaggtttggattacttttgctgcattagatgtggctgcagcggagtcttcgccccgtgtggaggttggcgagacggctgatcttcctagtgcgagtacttgcaggcggcgaagggtggtgtcgaaacgcagtgtgggtgagatttcgcgaagtggtaggcgctgtcgtatggggatggagcgtggccgtcttcgagtagaccggattggtaaacgagaattgttgtcctcgccgattggggcgagcataggtgagggggatctgcgaaatctttttgagggtgaggaattaaagataatgttgttcaattatagggagatgggtatcatcccgaaggttgagccgatgtagtatatggtgccctcgctgtgtgtatgtaactgtaacttgtattgtaatgtggtttgttggccgttttggcatgcctgtgctgatccgactgcacccgtaggcgacttttgcgtggagtgtctttttcgataaaagacttcgattaacacacttgttgtgctgttctggc

SEQ ID NO: 23382 - DNA, 603 bp, Zea Mays
gtacaccatagtggttaactcaagtggtggaaggttattccagtgatgcacatgcgcaacagttattgtctgaactgtcagtaactgggcattcttagggtaattttaccttctctcaaggcattttgaggtacaagggtcgagtctggctgggggctaatgagaccttgcaactccaggtgattcgggccttacatgacggtccaatgggcgaacattcgggttttccagtgacatatcgctgtatcaaacagttgtttgcttgggctggaatgaaaactcaaatcaagtcttatgtcatgaattgtgcagtctgccaacaagctaagccggacaggaatcgctaccctgggcttttgcagccattgccggtacctgaacatgcctggcagattgttagtatggattttatagagggtcttcctcgatctggtggtgctaatactgtgctggtggtggttgatttgttctccaaatatgctcattttattcccttgtcacacccattcactgctcttaaggtggctcaagtatttgtggattcagtttatcggctccatggactgccccattctattgtttcggacagggatcggattttta

SEQ ID NO: 23383 - DNA, 353 bp, Zea Mays
gctcgttgttgctgaccagctgctgttacatgggagtcggacgcgtcccgatgcgagccgcggtcgagtcggtcaggtggcgcggcgggcccggactcgggagtggcgaggtggcccgtgccgaggaggggagaagtgaggaactgaggactgacgaggacgcgggttgagatcgggcaaagcaaccgccgctgcgccgaagaaggtggcacacggatgaatggatctctgtggcgaggcgaccgagcccgagctagaataccgagcggagctcaaacgatatttccccgtagctagagagtatctgtagactgtaggatatatcatgtcggacatggatacgtacgccacgc

SEQ ID NO: 23384 - DNA, 405 bp, Zea Mays
tagaggtaatagccgagtaaggttagatcacgtcggtgttttagaggtaacagctgagttataccgggtcacgtcggtgttttagaggtaacaaccgagttatactgggacacgtcagcgttttagaggtaacggccgagttatgctgggccacgtcggcgctttagaggtagcggccaagttatgctaggccacgttggcgctttagagctagctgccgagttatgccaggacgtcttgctttttccgagtgatgacttagcactttttagaaacggtgtctgacccgggaaaaccccatttatatcacttcctcgcatgcctctacgttctgagccctaacttcatctttctgcctccaaacattaccctgcttccctctgatttcgcttcctttcaatccgc

SEQ ID NO: 23385 - DNA, 503 bp, Zea Mays
tcagaagcctcgtagacaatctgttgagtggcaggacttcatctgaaaggaggtccggaagctgctagacgctggcttcatcgaagaggttcatcacccaatatggctagccaacccagtcatcgtccccaaggcgaatgggaagctttggatgtgcatcgactacaccagcctgaataaggcatgtcccaaggacccgtacccacttccacgtatagaccaaatcgtggattgtacctccgggtgtgacctattgtcattcttagacgcttactctagtttccatcaaatccagatgtccagggaagataggaagcataccgcttttgtaacagtggatgggctttacggctatgttgttatgtcgtacagtctgaaaaacgccttgcctacatttgtacgggcgatgagtaagacttttggggacctgattagggacaaagtagaagtctatatcgatgacattgtagtcaagactaagagaaggtcgaccctagtggagg

SEQ ID NO: 23386 - DNA, 334 bp, Zea Mays
cccgtggcatacaaattgaagttacctccaaaactgtctgctatccataatgtattccatgtatcccaactaaagaagtgtgttcgattgtcgactgagatcatagcagaaccagaattagagatagagtcagatctatcgtaccaagagtacccctccaaggttctagattgcaaagaaagatcaactcaggctaaatcgatcaagatgtataagatccaatggagtaatcagtcagaggaagaggctacttgggagactgaggaatttctgcgttccaacttcctcgattgcctacctaaggagattggtatttaaccatgcccaacccccc

SEQ ID NO: 23387 - DNA, 653 bp, Zea Mays
ggcggtcgacgatgtgatgcgttagggtttgggctgtcaagatgctgtctgcatagcttgcataggattccagttcaggagtgctgctggaggaggaggagctgctctcccactgcacgtgagcttctcttgtccggacgggactggagatatgcacgcagcaatcttcctgactgacacggtcatttgacggcagttcctcttttcgcctcgtaatccacgccctcgcaactgcagagtctctctctctctctcccccggcccggctagtttgcatccccacctgttcacgagatggatgcgtgcatggcgacttgccagaactgggcgcgcagccgggctctgccggggtgccggctggcttcgacccgtcgtacggcggctccggttaattgttcagtttcgtcctcactcgtttttactagtcacaggcctgtatttttctgtacttacgttacgtacgtacagctggtggtgtgcatcggtcgtacgtacgtacacgtacgttcctcgctgtagtgtagatgcattgtttttttctctcgaatatgcaaaaggaatactaagatcaagagttagtgagagtagttacaccgacgtcgcaacacgaacatggcacgctaggacgagggttgggtcgtgtcttacaatcg

SEQ ID NO: 23388 - DNA, 514 bp, Zea Mays
atatacagaaatcttcatagcactgaacaaatgatcatcttcactgacagcttctcagataaagaggaaagtggaaataaatgaattacccaactaaataattgactttattaataactacaccaagttgcaggagatacccacaccgtgatgacaattattacaaagatccaacttcattacatgttcatcatgataagcatcaaacatatggtaagcaaactaactctaactaagactgactagactaagacactgaattaagcattattacagactctgactctatcgatctatggatccaaatctatccggatcctgtagtcagggataccatagtcgaagcgaccacggggcggtgagcggtaagggtgctgaatcccgacaggggcgggagaaccaccattcaaatagtggcgtgctgcgcattcagcacgcaattccgcaacctctgcccgaaccttgcccaactcgtcaagggcgcggtccagctctgtgttgagcacgactgcca

SEQ ID NO: 23389 - DNA, 391 bp, Zea Mays
gttccacatcaaacaccttacagtaaccatcttctagcactattttgcatccaccctcttccaattggcctaaactgactatattgcttttcaatttaggaatgaaatagacttcagtcaataccttgtgcccattcttcttcgtttggagtatgacagatcccataccttcgatagcaacgagtgatccgtcgccaaacctcaccgcgccgcctaccgatgtgtcaagcgacaccatcgcctcgcgccgcccggtcatgtgattgctggccccggtgtccaggacccagacatcactatcctcctcacgatcagcaggaatcaccttttcttcattcagatgcacgacctggctcaaagcccgtcgcgttcctccctgaatgcgcacggc

SEQ ID NO: 23390 - DNA, 1161 bp, Zea Mays
ccctaacactaacaacctctccagaccagcttttggcttttaagactaacataactttttgcagcgagagccaccttcatgccctccagaagccaaataaaggatgaaagcgacaatagtgtactaggaatttcaatgtgaattttgcacccatttgacataacaaagttaaggcacatacttttttcccgaacgcgcaggagaactgcatatctttatagataatagagaaaacatgccttaaaaaaacaaaaccgcacggacacacaatgcactacaaccaaccagggactacctgggtgccatgagggtgtcagctaaagcaaaactacctagttgcttagctccagccatcacccaacaagagagagctcatcaaggaagtttctaagcaccgagttaatagagggggagatcttatcaaaaaccactattctgctgcaaccagagaaaccaagcgccaagcatgatgacactgttgacacccttcttgtctttgtagaccttagagcatacttcaccccaccaattagcaaaggaggagtcaaccgaacccggaatgagatgtcctaacccgaagggagacaaaatgctgaaccaaagctgtcgagcaaagacacacgaagtcaagaggtgctgtattgtctcatcatcttgatcacatagagtgcgagcctcagggtgcggcagaccattcttgtgctgtctatccgcagtccaacatttgtccttcatggccaaccaaagaaacatcttgcattttggaggggcccacgattttcataatctcttccatggttcaaacgtgatggagcctataaataagagcttgtagcaggaagcagaagagaaacagccagaggcctcatgcctccgttcatgcttatcgtcatcatcattcgggccacctcctccaaaaaatcccacaaaattaggtattgctgaatatcaataagagaaagcggcgacctgatgtccatcacccaagatctctccacaagagcctctgcaacagttcgggatttaatagtttttttgtcaactttacagaacacttcctgggccagaatcaaaatagaattctcattcagctacctatcagtccagagtcttgtattgttgccacttcccaccctagtgacagctgaacaatcgaaaaag

SEQ ID NO: 23391 - DNA, 374 bp, Zea Mays
gaacaacagcaagggccagcgtcgctgtgcgagcagcagaagctcgacgccgatggtgtgcagcagcggcgcgacagcagagcatgtgcgcagagcagttcgggtgggagaacgcagagtcgagcatggaaggatagaagagctcaggcagggagagggagagggctcggcatcagattttataggggagaaggggaagagtaagagagccaggggagggagaaacgaccatggcttcaaggcgccattaatggtgttcatggaggagagggagtaatggtggaggaaagcggacgcaataaactccaataacgcagaaatgaaactgtcgcgggcgtcggttcttgcggacggcatcggggtttgctgctggc

SEQ ID NO: 23392 - DNA, 377 bp, Zea Mays
ctttttcctgttttatgctaattgattagctagtgaggcatagagatcgccataagatgagtgatcgtaagcatgttatactaggtcgagtaggcgtgagcatgttgcactgtcttaagtcattgccgacttaagtcgattgctccgttagtagggtatagtggtcaccctaagtcgagtaagggtgagcatgttgcactgtcttaagtcattgccgacttaagccgattgctccgttagtagggtatagtggtcaccctaagtcgagtaagcgtgagcatgttgcaccgtcttaagtcgttgccgacttaagccgattgctccgttagtagggtatagtggtcaccctaagtcgagtaagcgtgagcatgttgcac

SEQ ID NO: 23393 - DNA, 932 bp, Zea Mays
cttttccgtctccttatcgtctatttggttggttgggtccgcgttcttgccgtcatggtggaaggattgggtgtgatttgtttttttttttggcgggggagttgatttcacttctcatctgcctgcttgcagtatgtaactgaaattcccgctgcatctgctgcaggatgtagttatttagcaggtagtaactaatttccatttctgtggtggcggtggagagggagcacggcacttccattttatttctggcacgtctgcttggatgagatgagtttctggttgtcgtgcagagatgtatgctaatgaattctggcacgggaaggggaagccagttggatgacttgcgtagcagattttgtgagctcttttcatgatgatgcctgctgcagctttgatgtttttcccctgtattggttgatctattgtttgtggtccgtgttggttatatgtgcttgtctacaataggttacatgttattctctttttcttcgcatatgatcttgaggtgtttgcaattgattgtctagtgcccctgttatgatgttagctagtggtctatagttgtcttttctggtggttgtggtggcatttacttttccatcttatgctcatgttccccttttcaaagactttcatgttgcttcatttgatctcatgaaactttttttctaatgtgtcacttcgcagcatggaccattcccattatctttgttattgtcttctcgtactgcattgctagctttatttacaatagaaatgcatatggtatatattatgcccgtttacttatgttgcttgggttgggtagttctggttgacttagtgctacttcggtattcccatttaccgccaagaaatcctaaaatatgtatggtgcaatcgttaaatctgtgcatgattgtttatgagtgtatcattgttgggaaaaa

SEQ ID NO: 23394 - DNA, 1138 bp, Zea Mays
ctaactagttacaacgttaagtaaaaatagctcacctattagcttttctgtcatatccgctatagataattttgactgatttttagccatctaacagttagctttgtgccaaacagacccttaatcaacacaaaagtcagaggttatctttattatctaaaaataggtcacactggtcctaggtcttggttgaagcaactcatgataggagccactgatgaatattgtagaactaggcgactagaccacaagttagtttaatgcaatggaccagatcatcaaggccgaactgattcaacaggcagtgtgtttattttcttttggatggcatgaacaaatcattgccaatcagtggggtcagcagtgtgacagcaacatgaagcgaagatggtgacagaaaaaaattgggggccatgcaggccaagggagatgtgcagttctattcatttgaaagattaaggccacctaattttgggtgcttttgattttggaagatgaccagcagaacagtgcaaaacgacgctcaatgttttctcgtacttatgtaaccacggaagttcacctaagcatcagcatcagtgtggaataccatacaggcgggtgcaaatagagtggagaaagaaaaggctatcgccgtgccaaagaaaataaagtgaatggaactacagcagctcgctgaaggcataataaacacataaacaactgcagaaaagaactactaaaaaagcatttgtactatggcaatatctaatgcacccgacaaggtgatatcgaatgcatccagtaacagcgtgcacacatcttttctaacccatcgtctatttctattattccgtccataccattttgtccttttgtttttttcttcacaaaaagatcttatcaagaatttcacaaccctgaatatagtttatattttctcaaattttaagagttccgacaggaaacagaatcaatttagtattgaccaaattcgtaccgccacaccgtcagaatgaaatttatagttcctgcacagatcacaattattagctttattttattttgccttgtcatatcatgtggacgcacgtagtcaactatgttaatggaagattggttggagtagaaagatatcatatattggagaacacgaggc

SEQ ID NO: 23395 - DNA, 377 bp, Zea Mays
tgagtttctgaatattccaagtacgtggtgtctttggggacttggtgttgacctctgcctcccagctgatgaatttgattcccagccatttcttgaagaaaacgagtgttattagcagtgtcattgattgcggcagcgatagcctctgcaagcgtgggaggtacaggcagcgggttcagagtttcctccccaccacgggaagttccagccccatcctgagcacgagttctggacgacatctgaagaagaaaacatacttgattattacatgccacgattacacaacctctgttacattattccaaacttgttctaattatacatactcaacttatacaactcacttttccttatttagattacataaggaaaccaca

SEQ ID NO: 23396 - DNA, 638 bp, Zea Mays
tgcatgccacaagacatgcaaaacatcgcaatgtaacaaaagtgcaaggttgtagctggccacaaatgttaacttgagagccaattctcgtgctgcaaagtgatgctctagtatggtgtagaaaatgcacatgaggtcgacaagcatataatcaggggcggagggcccaatatggctctgtattgctcgagcaataccttagcccaaccaataagggaccagccgacaaaaaaaatcctaaccctaactcatgttcgacactgttccacgcgaggaattgccctctgccaaacgaacagtgcctgccgccagcctccaagctccgtcgaccgtgccccaagctctaaccctctgcatctggatccggccagagctccgccatgcctccacccagcagcctaggccacatgcatgcatcgggctcctccccatcaccggtagccgcgcgcctgcaccgagcttctccctagtagccgtgccgaactcctcccttccctagcagccgcgtgcttgcaccgagctcctccccatccccgatagatcttccccggcagatgtgccgacgccgagctcctccccggtcatcgcgtcgagctaccgcctctacttaggccgagcttcaaccagccgcgagcatc

SEQ ID NO: 23397 - DNA, 486 bp, Zea Mays
ttgttgtgcaaaatacaaatcggagaggtgattagatattaattaagtaaaacaaaaatagaagataaacctctcaccgctcaaccattttcttattttatgccatcgcattttcctggatttctcctgtacacgtgctatccttatcctctccgctactttatcctctcgtgccttctcctcaagcgatgatttccagcgtctgctctggttgtttctgtggatcaccagcacaccgcctggacacttgctctcagcgctccagatattccagccgacgcgctggatggaaaaatctggtcgtctggccttatcccgccgctcaccgccggtgaagattccgccgtcgtcatcccaatgccgctcaagccaccacccttgagctcctacaaatccctctactggcgctttctctagctcgctcgagtccctccgtcgcgccctgcgtttgccatcgacgcgcgccgatttctcaagacccctcca

SEQ ID NO: 23398 - DNA, 699 bp, Zea Mays
cttgactgcagaaggaatagaagtggacccatccaaggtagaagccgtttcaaaatggaaacagccatccaacgtcagtgaagtacgaagctttctgggaatggcagggtattaccgccgctttatcaaaggattctccagcatagcaagacctatgaccaaacttctcaaaaaggataataagtttgtgtggactccaaaatgtgaggaaagtttccagatcatcaaggagaagctcacgaccgtgcccgttttgacactaccagatatacaccaggatttcgtcatcttctgtgatgcttcaaggcaaggcttagggtgtgtcttaatgcaaaatgagaaagttattgcctatgcatcccgcttactcaagccgcatgagcagaattaccccacccacgacttggagttggcagccatagtgcacgccctaaaaatatggaggcactatctgattgggaacaaatgtcacatcttcactgatcacaagagtctgaggtatatcttcactcatccagacctcaaccttcgtcagagaagatggcttgaactgatcaaggattatgacctcgagatccattaccaccccgggaaggccaacgtggtagcagacgctctcagccaaaaacctttcgggataaaggggaccaactttttagaagattggaagaaggaatcagctcagctaaatgcatgtct

SEQ ID NO: 23399 - DNA, 595 bp, Zea Mays
ttccggataaccgaaggcttggctggctaaattgaagctagggaaaggtttctgggttcaccagagatgacgcacacgctaagttttgggctaggcacgagcagaaaggtggggcgacggaaaggttgtcatggcggcgttttacagcgcacgggtgtgttccggtgatgggcttcggccaaacttcaatttgccgcatccaagagcaataagagatcaaatactaactgaaacagggagcaatttgataattactgacccgaggagcgctggccacgaaggagttcttcacgacggagcaagaacagaggagagagggatttgtgggttctttggtgaaattgagccgagtgctcgatcgcgaaggtgcaggatgtgataaagaagtggaacctgggcgcaatttataggccaacgaccggaattggatgaggaccgcggactttagattgcgcaggcgagctcaccgcgcggcagtacccagtgatggcacggtggccgccgtttaaccggagcctgccaccttagtgatttgctgccacgttgccgaggatatttaccgcggccgccagcccatcccgaccgccgtggcgtt

SEQ ID NO: 23400 - DNA, 980 bp, Zea Mays
ctaaaattgaagcttgagggagcttcacgggttcactagagactatgcacacgattgaatttaggccgaacgagggtaggaaagcgagtcgacagagagggtgtacgaggcggtgttctacgggactatggggtgttccgttgtttgggctttggtaaaattcaattggccggcaccgagagcaataggaggctaaagacaagctagaacaagagacaaatgggcgagtactgacccgaggagggctgcccatgaaggagtccttcacggcggcgctaagaatggtgaggaggagattatggcctatctgagtccctcagtggaattgggtagtttgcacaagcacacgtgtgtgtgatgcggtgaagaagcagcgctcgagctcaatttataggaggatggccggaggtggacgagattcaaagatcttccagttggggcagagccacggcgagcgtccgatgaacaccgattaaatagacagcgccacctcatgtttatgcgccacgtcgcggaagatttttaccgcggccgcagtccgatcctcagccgtggtggcgatcttatctctagcgagatttgctgaactacggtgaacagtacgcctgcaggccgaattcaaatggctattgcttcaaattttatgtggttgcttgcaaacgaatctacatcaaagttgtacctggactaatgttctttcattttggtataacgaccatgtcgaaaatcctcacagattaatcaggccaggacgctcaatttggcgcaacattgaaccctgacccatatcagatgcaatgaataaatacctatcaggccgactgacggcgccttttcaacctcatatatctcccatttttgtgtaacactagtgtttgattacttaaccaaatttgttctccatacatggctctacaagtttgatgtgttgaccctaggcagattcctcatgatctgagagaggtagggttccaaagttg

SEQ ID NO: 23401 - DNA, 457 bp, Zea Mays
gccggtgcaggcgcatcgtctcggggccgtgcatcatcgtggactgcgccacatccatcggcgttgtgagtaaatctctcctctctgagtttgctgtcacccccgcatcgagtaggctcaaccggcgttgtaattagggctcggagtggcctagtcgtcgatcgctggcggaagccccgtcgtggaacgcagcaccgccgcgctcgagctggagatgggagaagacaagtccgtcgccgtccgatccttttcggagggctgataatagatgtatgtaccccttcgcgcatagttagatcctggccgctagcgctggatcgtgcagagcatattagatcacccatatttgaaacctaaaccatagatcgccgatccaacgaccagagtcacgtaccggttcggtatgtggatcttttaatcctatgcgtggcttcagatcggacgaccagtatttgtc

SEQ ID NO: 23402 - DNA, 584 bp, Zea Mays
catccaaaattctcatgaagaccatctcctctggctttagtctgatagtgtagttcatggactcgacagaaaccttcgccgaacggttccactccttgactacgaagggcccaaatataaacacttaatctaacaatggcattaggggtcagctgatgaaggtaaacccaaaatttcttcaaaacgtcagcaatcatcccattcaaaggaaatcttaatcctgctttaaagaagcttttgaacactactacctcattcttttccggcttcggagtagtttcctctccgccaaaacgaaccagctccttttttgcttcgctgaagtagcccagcttcaccatttttggaaggtcagcttcagagatggtggactttccaaagtccaaatgactaggtttagttggtaccccgcagctgagctcatcctcagaaccaacttcttcaacatcagcttgtgttgctttggcagcaggtgtgtcctctgctgtaactagcccggagcgcctcatcgcttcagaaatcggaacagtttcaacagcttcggcctcatttccatcacgctcaactctagcagtagagcgcac

SEQ ID NO: 23403 - DNA, 589 bp, Zea Mays
gccggaacgacgtgaggaggaagaaacaacagaggggaggggtcccgagaggcgtaaggacacggtaagcgaaactgaacctgagcgcactcttcctttatttatgcgagtaggcagggggcagtcgcaaacaagcagacaaggaaccacccatgggccaggagatgcctcgagtatcgagcaaggggaccatgtgttttgcaggaccactctgcctgaggtagagcaccaggaagatacgttgcgacagatatagttgtcatgggacaaaggttaaccaagcccccacgctacccgagcgcgacgcgacagacgaaccgtttttagtcccatcaggacacccatgccaaagcaacattatgatggccgcccattactggtgcaccacaactataactccatcgagccaaccaggtaagaaaccgaaacacacccaaaaaaccccaagtagagcaaggggtggaccgagcaagctcctagtgagtcacaagctagatgatcggcccataggtcatttgctcgaatccacatccaaggtcatacctcgcattctccctcgaaaacctagctgacggggtggccacggagc

SEQ ID NO: 23404 - DNA, 553 bp, Zea Mays
atgctctgtcaggtgctccgaatggcattctaatggtacagtaactgaatatgatctcaggttcagctcccctcgccgccggtgatctcgcgcccggattcacgccggcgtcgcgattcacgcccagttaaacgcagataacgatccttggatgaaaaatctggtgctggggatgagttcgggacaatgtttcgccctagctgtcgtacccccttgccttacagccggtccagataacctcgctggagttggccgcttgctgctctggtgccacgtgcctaggtgctctaccacgtcgcagtgacttgctttagcatgtccggtcatcgacggtggtcaggccacggtgaaagccatgaatcaattgcgaagtgacctccccctctccggccgccagtgcgccatttcaaattcaagatccaccaccctcgggcactttaaattaagcatgccatcagctttgttaagtcatcacaatgccaaagcacccgctactgcctccgattacccactagagagctccaatttcattctctccccaaatcagttttct

SEQ ID NO: 23405 - DNA, 474 bp, Zea Mays
gtggtttggtggttagccccaattttatggagcagtgaggcgtgggttcgagtttgctctgcattatttttgtgtggtgtggtaaatgcgcgcgtggggtcgggtgctggctgtgcaggcgctgggggtccacaggacagtagctgagagagggttgcgtgggctgatgcagggcgtgtcagcgcggagggtgaagttgtgtaccaccagatgcccacattaggttcttaatagagtagtatagattgtgctcgagaggacaaaagtgctcgagacaccttttattcacaacattgccctcaatagccgagcgccacgacctatcaaagccatcctacaattacaaagagcattttggtgagtgctaagagcatctccatttgttcttaaaaaaagctccctcaactcatgtttataaagttgctaaatagctattgagagtaaaaaaacagtttggtctccaacaattcctga

SEQ ID NO: 23406 - DNA, 418 bp, Zea Mays
ctgtggtcgccgattttgtttttaagaacattcagccgctgaaggacagagcgtacccagcttatctgtatcgtggcattactgattcgacccgggttaccaatataaggattcctgctgtggacctggtaagccggcttgagatgattcttagaggcaaggtgtcgaatgttggtgctcctgttgcgtattcagcctggaatctgcctcctcccaaaacgttcatcagttttgtgtcaaatcctcctgctggggatagtggtttgggccttagagtgtggccctctcccgaggaggttgaggctttggttgcttcgcttagtggaatctcgaatgacgagaggcaggttcactttgagatgcctactagcccgagcgacgcagaaataagtgccatgctggatatgttggctgagga

SEQ ID NO: 23407 - DNA, 563 bp, Zea Mays
gacgacaaggtcaggcttcagatcttttgcttgtgcctcattgaagagttctagggccctctcaatgtcaccctcggcacacagtccgttgatcagtgagcaatatgtgacccggtctggtacaaaacctttaaagacagcatctttcagaagctcagtagcttcctgcagcatgccgctcttgcagtagccatcaatgatggtgttgtaggtgaaatcatctggtatgcagccctgattcatcatcctaccaaggtactgtgcagcttcctggaccttggagtccttgcaaaggccacgcatcaatgtgttgtaagtgacaacatctggcgcaacgtaggcacccatcctttccactagcgcaacagcctcttccaacctgccgtcttcacagaggccacggatccatatgttgcaagtgaacttgtttgctgacatgccccgcttgaggaccttggccagtagtgcccccgactccatgacatcccctttctggcaaagagcatgcaaaacattgttgaaagtggcaacgtcagggaagacatccctgccgagcatttcat

SEQ ID NO: 23408 - DNA, 996 bp, Zea Mays
ttcatcaaaccatgtcggaagacttccttctgtttttgccggatgaagaagtggtgacaagagtgcttaacgaaggaaggccattcagaggccctatgttctcgctcgtgttcaagcagtggacaagatttacacacacttcggctacgtcattgcctcatttgatggatattgagatctgtgggaccccagcgcacgcgtggggtctgaccacagccaaggagcttctccacgactcctgccacattttggagttgcatcccgcctctgcgagcaagtctgatctctcctcactcaagcttcgggcatggtgtttggatcctatgaagcttcgcagggatatggacctccacatcattgagcgagggccatttaatcaggaggcgagatgtctgacctacaagattagcattgctgttctttcggctccccttcagtttctcccggagagcagtctgtctccttcggatgaggatgagctccatggtgaggagctccatggtgaggaggacgaggatgtctggggtcagtccaaccctcggatccgacaactgggtcctttgcagcgtcagtctgtccaccttcgcctcggttcccatcagagagcgggcagagaacggactgcagatgtgcatggggatatggttgaggcgccagttttagctctggaaggtggtgctgctttatgtgttggtgatgactcgctgacctcccctagatcttcttcgcctcagcgcagaagtttggctgagccgctagagaaggctgggttgagctcgccccgttttgccactcaagttccaagcatgacaacttcaaagaacattttggaagatttatctcctcgctgccatgatcatgatccagttgttcccggtgctgttttgtcagttcaggatgatctagggtttaacgtgcctggcgaggctatatcaacggaaagcattaacggcgtgcgagcacttgaggtggtgccagttgtgccatctgtggaga

SEQ ID NO: 23409 - DNA, 437 bp, Zea Mays
ttccgccatgcgttttgcgcctaccgctgcggtggtgtgtgtgtgtcgcttggctcctgacgtgccgtacctgtcaaggcggtctgtacttgcatagtagtagcactgtaactatcattggcctggccaagcgggcagtgacgctgctagtgctagcgcgtggtgggcctcgtcacgtggcagcgcggggacaggagaccttgatgacatgacagcggaggagaggaaagcgggcacgcacggcacgactacagcaacaggatggaagcgacgttctgttctttagcacccacacacatggaatggaacctttggtcactgtctcactgacctctgggccgtcgatggatggatcgatcgaaagcctacacgctacgcgggctgggcccaatccctcgacggtggcagccctccgcctcccacctcttttatggccc

SEQ ID NO: 23410 - DNA, 836 bp, Zea Mays
atttagtttctcattaaaaatcatttccagatatcatttatccatttcctatgaactctggattgggcgcattaatactgagaaaggcaggggcctcggggtaacttctccaagacacaatgcacaatacccgcaggacggcgggtactattctctaaaatcgtaaggtccctattgtaaaacttacccgcgaaggggtacgcgctgatcctggtcgcacgatctaaattcgaaggtgcagtttagatccccactactcttaaccgcaatcaccaaccggccaccggatttagatccaacggcgaggacctagtgaggcgcacagggtcgccagacctaatccgtgccgaccagtggccgatcgacgcaccagattacactaacgcgaggagatgcacgagttcagatctggttcgttcatcaacctgccaatggtttatagccagcccctgagcgatctaatcttgacccttgttttgtaaatgaacggtaaccgtgtgtcttctccaaaccgcgcccagacacggtggctcgagcgcccacgacggcggacgcctaaacctatcttcacccgccattaccggctaccctgcgcttgcccaggacctagcacgagtgccgcaggggaggttggccggccacaggagtgctcccaactatgctaccgtcatccccaacccaacgcgtcgtctacctccagccggttctctctcttctctcttttctttctccagtcaatttgccgcggccgagcgcccaagacacggcagcaaactgcccgagctcgccattcgagcccccaacctacggcgcaacccttcatctcctcaaactcc

SEQ ID NO: 23411 - DNA, 353 bp, Zea Mays
aagattggagaagaatgaaggaaaacccaaatcataagaagccaggtggtggctcgatgaaggaacatcaaccggggcaatctgaaaagcatcattagggatcaatccaacatcaccagtaggcatcagaactctagcatcaggtgcgccggtctctaaggcgacttcctcgtttaaagcatgcactgttgccatgctatcagaatgtgggggagaagacccaacgtggacatccatggaggtatgagaaggggagcccgcccggacaccctcgggggctgggtcgtagctcgcgctacccacctgagccggatcattaccggcaacaccctcgggggctgggtaaccgcttg

SEQ ID NO: 23412 - DNA, 798 bp, Zea Mays
cttgagaccgggacgttgaaccctcatcacgagcatcaacatcactggtttcgtgggttggagagtgcgccggagacaacacttggtggttggaccagagttgaatcaaggaaggcgaagaagcgtcgccttcgtgcactgcgggcacgtcgcccggtgccaaatgacttgaaaggtcgctgtttcaattgcttcgcggataatcacctcgctgctttctgccaccttgagccaaggtgttttcgttgcaagacagttggtcatcgctcctactactgccccgggcctgtgaaagctgacaggaaggttcctgtacatcgacggctgttgagaggaacggtttggaacagactttcgacagttgagccaacgatcgctgatcgtgttccgcagtatcagttgcctcgggtcccggtctggaagagacttcagccttctgtgcccctttcatgcaagaagaaggtctgtatctggcgtagaatctcccctccaggcattgagaagggtccagcacatcacatgatgatagcagggggagtggatgcacatggttctgattctccacccagggaggttggagctgcggctaggtcggcttcgctgggcaccctcccgcctcgcccgcgacgcaggcgccatcggaagcgcaagtcatcttctaggggtggttctgatccgggttggatgcaatctgatcaacccggaaatgacgaggcccctctgactgaaactgggtcagcgcatcatcagcaaccttgtgtgattggttggaacagtttgatggaaaaagcagaggag

SEQ ID NO: 23413 - DNA, 463 bp, Zea Mays
caacgtaggtcaacctaatggagcagctgaacaatgttgaagcttggaacgctaatctgcatgaggaggttcactagctgtatgcctagctcaatccaatcaacccgcaagaaccagaagaagcaaatgccaccacagccgacgatggaggtgtaggctccgagaccggcagcatgcaggtgtagttgttagctgtcgctagaggataggctaacccttttggatagtgttcctaggagtaggaacaggtctcatggagtaaggccaatgtaatgatggcttctgacgcaggtgtgtgtgtgggaaaacactcttttggttggttgtgcatgcgagtggaaaaatttgcttgtatgtgcatttatatattatgaagtatgtgatgatgttgttgcgcatgttgggatgtgattcttgccttacaatttttcacatgaagttttcttctatgagatattgtacg

SEQ ID NO: 23414 - DNA, 2567 bp, Zea Mays
ctttccagcacttgacatccgagtaaagaatgttgcagggacctattccttagagcataaaggagaaagcgatctttttagccagttatttgatctcctggaattggacatacagaatgatgatgctcttcgtagggagcttgcgtcatgtacaggcgcgatacaaacgtgtctcagccaacatatgtccaaggaggaagaacaggttggttgtcagtaccatatgcacctttaaatctcatttatcacattaaccatgccatgtcatgctggacagataaaacagtctgtctgcagggatttagttcctaaaatcagtggattgtgttaaaagatttcgttgttataattgaaaactacctgtaaacttgtggttcatactcttatctgacatttcattaagagttttattgtcgttaattagttgaagtttcctaggccgcagtgtttaaaaggcgacaaggcgtccaggcgtcactgtttcccaaggcgagctgggtacacctggacaccttgtcgtcgcctagacgatgcctttgaaacactgctaaaaatggtggtgcaaactttttttaagggatcccctgggtccaggtgctcccgatagtcctgggcgtctgtcgcattgtcaaaaatagtgaaagggaacaagggaagaataagacaaaaaatgtttagcaagaccaagcagtcaccacatgcccatctccgctggatccagtgcaggtggctgttgcagaactccatccagtcagctgcagtgatgcacttcaaagaggtggttgatcttaaggggcagagaacaggagggaggactggagtgctagcggtggtagtgaaacacaaagagcaaggtgggaagcgagtgagggacgcgacactgcgaaagtaaggtggtgcatcatccaggaactgagcatcatcaactgacaggggaagcacaaattgtccggatggtgggctaggagcctaggacaccctcttccttttcttttcctcttttttctttccttcctctccctgcttctgttctgctgtttatcaggctggtaaggtgccttggctctcataatcgcctagtaatttggaagggggtgggttgccatgcctcaccttacccagttgccaccttaaggataaacgcggcatctaactaaagtaatcatatgcagcagtgtatcaaagttataggcagatttgttctagttgtaacagccttgtggtagttcttgatagtggttccagtgaagaatttagttagtctgttgcctgtactttttgttgaagggcaattagttttcactgccatgttggtgaattggtgatgtgagcttcaagttctgcattgtgatcagaagtatgacctgacttctgcatacttattaaagaaattgggccagccttggtgcatttggttacaggaaagtcaaagtttgaatcttcgctatcctatactagagtatagagagggtggttcttttgcatcatgtaatttttctccctagtccgtgtaacacatttttgtctgaaataaagagaaaaaagtcatctcattgtgctgcacaagctttttatattcaagttattttagctatctagacaaaggattgatactaagtctcatcttctgtcttcaatatttgagtcaaattttattttggtgcttcgatggatcatgcctccactgtgctagctgcattttacttttgaggtaattgattgtatagactgatggattgagaatttattcatttagaggtgggatggtttgtttcttgtttggttagtgcatgatagttcaggcggtatgttggaatttgagggtcgagatgtcaccattttaaacttatggggatcattggtaatcagtaggtcatttctacctttcatcttgacttatgtttgcaattgtgaactaaagatttatagtttgacatccattttctttatagggtattgaggctaaaaatccaatttctcatatggccagtgctacgtctgtaaacttccatttggccacaggccacccaattataatcaaacatggcacagctaattaacatttagtgaaccggctgtgctataattaattttgttagtgtctgataaagggtcgcttaaatctgtttcaggtctttccattgctgacaaagaaattttcatgtgaagaacaagctgatttagtgtggcaattcctctgcaacattcctgtcaatatggtagcagagttccttccatggctttcaacttctgtcacatctgatgagcaccaagacatccgtgactgcttatgtaaagtagttcctgatgagaaacttctccaacaggtttttctgagcacacctcttactttttccttggacattgcttcgtatcctgttaaatttttgtgatataacttgtgaaggttgtattcacatggatggaggggaaagcagcaagagaagtggcagagagctttgccactggtaatttagtaagaaatcatagtgctgaggatgtctcagaccatggggagatttatgtttgttcacagcaagaatctaaacttgggagtaaaaactgtg

SEQ ID NO: 23415 - DNA, 1061 bp, Zea Mays
tcaaacttatctccacaagcatagcacaacccatctagttttctaaactccctcacttgtctttctttggataaatcatcatctcctgtttgagcccttccttcatctctaaatccagtattcaacattttgtctcccacatatggccttgttaccttcatcttacccctctctagcacctcttgttcggtttgggccaacaaaatggctctatccaccgttgaaggcagttgtacctctaccacactttggatttcaaatttgaggcctctaacaaattgggtcacaaaatatgttccatcatattgtgggttgtgaactgtgacaccatatctggcctgctcaaactctaaaatataggcagcaagactttcaatttgtttgagtgacatcaatctccttaaagcctttggatatgcagtagctccgaacttagctattactgccccctcagactcctgccaacctccaattccgtttctcattttgtaactcttccaccactgtgatgctatgccttccaaatttagagaggccacagaaacccagatagacttaggcactcggtagattgttaaatactctctgcactagtctaaccataccacagaatcgccctccgagaactttggaattggtagtttgggtattgcttgattacctaaatcagcagactgacgaggatcacctctcatgcctcactgttggttcccacggtcctgaccaccacgagactgctgctgattccttagaacatctccaccatgttcctgagtagaggtcaatgtttcacccagctctcttcccatctgctccaacctcaattgagacacttctcatcctgtttcctccaatttctggtacagatcattcctctcaaaagcgacttatttagccaccactgccgccagctctgactgcatcaacaactgttgctggactctctccacctcctttagtcttccagtcacaaactccatagattcaaacatacggtcccaatttccttgcacttctcgatctctctcatccatggcttctagcagaaatcgagtctacac

SEQ ID NO: 23416 - DNA, 794 bp, Zea Mays
tttgggcatgaattaatgcatgatcgagcaagtatttgcctaggattgctataacaatattgtagctggatcttagtactataactttgttaaagggtgtcgatcatgttactacacaaaattggaagttattggctctgtaaattcccctgtcagaaccactgatggagcattccatggtacagtaacccgagtggatcagaacgccagcgtagcttgctcgccgccggtgacccccccccctgcgcaaagattcgtgccgccgccgttaggatttacgctcgctggtaaccggataacgcttcggtagaaagatcttcgccgccgtcaagctggaagccaccccggtcagccacgatactcctcccctggctcaccgcccgcgggtaaagtgctcaccgtcgtcgtgccatcactgttggccactgcgtgtcctaaccgcgccatcgcatcgccatgactccctctaaactccccgtcgaccaccagagttactgccacggcggtgaacacgtgttcactgcactagcattcttcctcaccgccgaccgccgtgtgtctcgtccaaaattcacggccaccgctcgctccgcctataaattgagccctcccctagatgcgtaacatcatcacccacccagccaccaacaaccgttagcaaccgtgcctccgagagcttgaattttggtttctccccaatccgagtttccgccactgcaaaactcacctcaccgcggccagcccctttccggtcagctcatccttctctctccctcatttgagctttgtcgcaa

SEQ ID NO: 23417 - DNA, 448 bp, Zea Mays
agaaagtgtagaaccccattgtactagaaccagactggagaaagacagttctttggactagagatcatccaagaagctgaggaataggtctagatgatcagggagaatctgagaaccgcacagtccagacaaaagagttatgctgacacccgaagaagacagttggagtttgaggaaggtgatcatgtgtacctaaaagtgtaaccaatcaggggcatgaaaagattcaaagtcaaggggaagttgtcacctcgctttattggaccctttaaggtcctaaagcgggttggacatgtggcctaccagctggaattacctaaccacctgtcagatgtgcacgatgtgtttcatgtgtcccagttgaagaagtgtctcatggtcaccgaggaacagttgcctatggaggagcttagtgttcagggtgatctgacctatatggagtatccta

SEQ ID NO: 23418 - DNA, 355 bp, Zea Mays
ctcggagtggtgaatgttttttgcctactaataattgcatgttttgtagactcctccaccgctatgtgattttgagcagtggattgacacagaaatatcagggaaagacaagaagtggttggagaatcttaaaaagtgggatgcagaggacaaagagaggatggagaaaagacgagaggagcttgctgccgagcaacaacgtgaagacgaacatgaaatgaggcgtgttgctgaatgcagtgaagagaaggagaagaagcttgagcgtgcacgtcgtgcaaaggaagcaatggagaaccctaatgcattgcgcaagggcaaatggccccgttgcactcaatagtctaggtgtttt

SEQ ID NO: 23419 - DNA, 735 bp, Zea Mays
tcctccatgtcgaaaccgctggattatgggtgctggtgttgaattcagttcggatgtgctctctacaaggtctaagaggaaggctctaagatcccttgagcttattggggagaatgaggggttacatgatcaagccctacaggagtatgcaaggcttttcgctaaacccctgtctgattctcatgtgactgcccttgcgaccttatttggttggcatcttccgaccgatgattcttggatggctgaggatggaggagtgatggcccattaaatctggtcatctactcttgccgtctagagtcattgttattgttttacaatggatcctattaaaaattctagtgtggaatgtcagatggctcaattcctctgctaggtaggatgttgttcgtaacttggtcgattctatacaggtgggtgtggtctgccttcaagaaactaagatggtgactatctcgaggcgggtgatccttaccatgcctggtgccaattttgatgattttgtggagttaccggctgttggtgccagtggctgtatctttgttgcttggaggagaagtgtggaagccacgtgccagcttagaattgatgccaatagtgtttccgttcagttttcctcccattcgggtgcatcttggtggctgacttgtgtttatgggccacaaagcaatgaagataaaatccaattcttgcaagaattaagggacatcagatctatttgtcttggtccttgga

SEQ ID NO: 23420 - DNA, 1149 bp, Zea Mays
agaagcagaaaggctttgctgcaagatcatctcttctcaagcgaggtggtccgctagctcatgaattggctcggcatcctgttgtcctcaagatcaatgactggattttttgtcatggtggccttcttcctcaccatggtgagacccttcacctctccttggcatccttgttacccttggcaatttgcatacgtgatctcagtctaaaacataaatctggttcaaggtcagaacctgcccgacaggagcactgcataaaccaaaatgcaggataggctcttgcttgagcctaccattatcaagcaggaaccttgagatttaatcacaaatgttctttttaacaatacatattgcaccaagtgaaccgaagtacctcaattcctttcccttcctatttgcagttgaatatgggattgagcgtatgaacagggaggtatcaatgtggatgaaatgttcaggcgaagacagtggtgacgagacagacatccccttcatagctactagaggttatgacagcgtcgtgtggagtcgaatgtactcgcaagaccctgccgaaagaacacgacgcgctttgatggtaagaaatcgttaactatatgatgctttctcatgtataatggtccatggagatgagtgtcagagatctcaaaaaatattctgaacttcacaaattattatacaaatgttcatgttggtttcagctatcttctattgctgctgaacaaacgctagaagctgtaggagccaaagggatggttgtagggcacacaccacagacgcatggggtgacctggtatccatttctcttaatctcaatcagtgatttgatctgataagaatcttaatggagctttataaaccaattaaactgatggataactttatggttgactactattttgttatcagtaaatgtgatggcaaagtctggtgcgtggatgtgggcatgtcctgtggtgttctttgctcaaggccagaggtgaagtcttcccgctgagattgaaatcttttagaaaaataagattccttaagacaatgaaaatttgagatgtcttaataactaccattaaaacactgtgcttaactgctgattctcgtcaaaagattctactccctccgtgccaaattaaaattcgttttaccttttta

SEQ ID NO: 23421 - DNA, 781 bp, Zea Mays
gggagatctagagggaggaggaagttatggagagggtagagggcagctgcaaatggggaggagaggaagagggaggaggcggctgcaacaattggggagggggagagggggtcggctagggttggggaggagaggggggggctctcatccatcggatcgagatcaatggctcgaactcgctctcccatttgagctcccgaccccagtggaaaaaatgccaaaagatctactgtttccctgaggaatgcctcctggaactccaaaccccaatgccacagaacatgaaagaaaagagaaatggaaatttaacttcttttcagaaaattggggtatcacactctaccccccttaaaaagaattcgtcctcgaattcgaccactccaagcaaagtatccaaggtaccccatatagcaccaccattcaaaacaggaatccattattggtcttaattaacacaagaacttctacctcggactaattgtctaaggaaactacacaacctgatatccaacatgaatcaacatgcaatgaagctcaaagcaagtcatagatgcaatcaacactacgatttcacaccttcgaatttggatgcagctatatatcaacatcaatgtattcaaacaacactcttttatgaaggggtaatatgcactaagcacaacccttactagcttcaacaattcattttaattcaatggtgaaacatccacaccagatgaatgtataagaagatcaaacacctcacctcaaagcaccataaaacaagtggttctattgaaac

SEQ ID NO: 23422 - DNA, 1114 bp, Zea Mays
agaaggggcagggaagggctgaggcactagcgcacggggcccacgggtcagcggggtgcgctagccgctagatcatcaatcaacggttttggctccacggtccacgcagatcgttatccgtgcatccgggccatccgatgaagtctggacggttaggatcgtgcgctagggattttgtcctctccagccggctagggacggcacaatacacacctgtgacggtgcagctgccggcggcgaagtagactcggctcctaggggcgctaggggtggtctgggtaagcagggaggttagggaggacccggcgaacactatggcgggattggggtagcaggaacgggggtgaggcaaccggacgatagagggggagtcctcgatggaccgggggcactctggcgagcgatcgcgggcgagaaagtgcaaggcaggaaaaaataagggcaggtttaggacggtttccttgagtgaagactcaggggctcacgaacaacgtccgaggtacgacaagggcgcgggttgacagtggcggctctccggcagtgtgagaaacgctctgatgagcgtggaccaggcgaatagagggggagaggacaaaccaaggggcgtcccaagttgctggtgataaggcagagcttaccggggcaacgaacatgataggggctcgacggcgaccgcagaaccggcgcgaaaccccggtgagcggcgaaacttcctgggcacgcgcgtagggcaagagagagcgagagtgctcggctgagggcgcaaatgagtagggggagtgggtgagcaggatgtgggctcaaaagggggtcgagggcgtgcggaggtggctaggaaatgcgcgacgtgggcgcgttcacggtcggaggtgagggcgagaggttagcgaagcagaggggactgatgggtggggtccacgggccagcgagaaaggactcgcgaacgggtgatcagcactgacggaaggggtccatcgggcagtgagagagaacgggcgcgtgcgcaaggggatcggcgtcgacagggcggccccatcgggcagcgagagagagagaaagagagtagagagcacgggctgtgggggcacgcgcggagggggggttagctgggttg

SEQ ID NO: 23423 - DNA, 365 bp, Zea Mays
ctaatctatctccctggatcatctaatatcggcctcttagtggggccagcctagaggctgcttagaccttctttcataaggtatgcccatcataacatctttccagtcctccgcgaacagctcgtcctcaagctggaactgagggtaagaggtcttgaactgctgcagcgctgtaatccgctccattgtaccagaacatgtcattcacctcgccatagtcacaccttgagtaccttttctaggagggcagaagccggccattttccattgctggtagggcaggcagcagtaagggggaggcccccgatatggcttgagaatacccacatggaagacgtcatggatgcacgctccaggtggaagtt

SEQ ID NO: 23424 - DNA, 432 bp, Zea Mays
ccgcgttcggtgagctctcgattctttaccctcgctgtgttcccttacctagctaatgtcgcgtcgtagttaatcgtgggtgaattgggaacgaatttggcctttgtgcggggaatgtcgttcgggcgccgcccgtatcatggtcgggggtgttcggctgcgtggaggtcggcgaaatcattcccctgtgttctccttgagttccgtttagggctagactagtttgatttgggcaggcctcgtcggccatatggcgcggccgtgggcattccctgccagagggtgctcggctcaccgggagagcggaagaaaggagaaagcaccagatccgttgatctcaggatgaacggcccggggtcagatagggtttcgaccgtgggatggttgttgtgcggctcagatcaaacggtagtatacctccttcgcgcatta

SEQ ID NO: 23425 - DNA, 286 bp, Zea Mays
cgaaacacgcagcaaacggcctaaaaggtttcctctttctcctctggaactgacctgatcggtttcccacgacgacggcgactccagcagccgcaaatccggtaggtttcggaatcgagggtcggagactctggggttctggaaggaggagctggtgaggaacgaaacgggaatgaatgaatgcgaatggaaagaaactgactggggatccgcgaagcgagggagagcaaatgcaaggtgttttccgttaaattgcggtccgtggcgggctttgcctgaatgtccg

SEQ ID NO: 23426 - DNA, 1001 bp, Zea Mays
gttcttcagccagtttctagcatactttttaacgcaccagatggctgtggccttgtttcggttgctaggtgcaattttgaagacaatggttgtagccaatacatttggcatgtttgcaatgcttcttatcttcctgttcgcagggattctcctacccagacgtaagtgtcttttcctcaaaaggaagtatgtcattgtggagaatgaacttagtccccatggttgcctgttaagcacatttgtttttttccaaatcttttctcattgaggtttcttatgtttcctgaatattgtactttgcattgtgaagtactgttgtttcttactgacttactgttccctcttgatatttatgtgtacagaggacattaaacattggtggatttgggcctactggtcatctcccatgacatacagtaataatgctatatcagtcaatgaattccttgccactagatgggccatggtaagtttctgcacacacacataaaaaaattcttctaaatgtcatactttctctatattattaggtacaaggaatgcaattcatgccctccaagatagatgtttgtacagagatcccatgccaagttttttcagtagtttgaagaaaagaaaaccataatatctatctttttcacttatactaatttctaggttcttgatgtgcttaattatttgtaagcggcgaatatcttgaactaatatagcatttacctgcagccgaacaatgaagcaaacattgttgcaccaacaatagggaaggctattctaaaatataaaggctactttggtggtcaatggggctactggctttccatcggtgccatgataggatatactattcttttcaacattctctttctttgtgctcttacattcttgagccgtaagtttttttccctgaaattgttattagcttgatgcctaggtgaagcacttaatgaattatatttcctacagctggtggcagttcaaatactgtagtttctgtttctgat

SEQ ID NO: 23427 - DNA, 423 bp, Zea Mays
ttatgtctatgttcaaacggacgatgatgaatttatactactactattaagaaactatcatgggtgtccacagctccatgcccccgcccctgtctctcgcccgcgacctcccacaccacgcgtcagcccgcgccccctctcccaacgcccaaatcctgcgcccactcgtgcgccatggtcctaccgtgcccaatcttcgatccgctccagctatcctcagccacgcaggattcgctaccacccctccatcttcgccccactgaccatctacggaagccaatgaccgaccctgccatcctttcctcgctccctgccatccccttccattagcgccccctccatcctcgcccgactctacagctgtcgcacggtggtgcccttccatcggcgtccacacacctgtgcacaactaccttgaccgcc

SEQ ID NO: 23428 - DNA, 945 bp, Zea Mays
aattcaatccccaccacccgatcacgcatcaacggtctacctttataacacgaaaggggtatggaacgatttaatcggatccacccatcgagcatccaatggtcggggccaaaccacccccccggctccgagcccggcggcgccgcccgatgtccacggcgggaccatggccggcgaaggcccggttagtgctcaagtgctctgatttccaaattaactggcgctacactatgctagggttacgatgaacgaatgggagaccctactcactggatttggtggcgaagagaccccgaccatggcgaggtgcagaccgcagcaaacttgggctccggtgagcaattcacgggacaccatcgactccggcgaccaagggccaggctgtacatgatcaacgctcaataacgatgcaccctgactccacagcgagcactgagcggaagtggaggcaaggtgaggggcgcggtggctttctttcatccccaggcgtagacgacacgccaacggcgatacttggtgcttgcgatgctccggctagatgggcgagacaataacggaacctggattatatagcgtggagtccgatgtgctcgaccggagctaacccgagatctccgcaaggtggttgagatcaccgcgctctgcgggggaaggtgacccagctgtctaacgcagagggtccacctaccatcgacaccgtggcacgagcgcgaggcaaaagagagactagttagcgggcccaggctgtcggtgctgagatctaagggaaatgtgcggaagaggctgaggctgacaatgtgggccctggcgcccgtgaccgagcatgcacaggagcacgcgtgtagcactggctagagggtggggtgggcctagcagtgaaagaaagaccagcgcgcgttgggctggcgcgggttagtcgttaggtgggccaagggagggggattc

SEQ ID NO: 23429 - DNA, 328 bp, Zea Mays
acccgcactggcgatcatcaatcgcaaggacgcgcacaccaatcgacggtggtaatagtgtcgaaccagattccccctggcgtaatggcggcgtggcgcagatctttgggtggcttagagggaagaaggaagtgcggcagttgaggtttttatgtccatggagtccgagcgcgagcgggggatggtaggcgagtatccagggtactcagttgaactggccaaggtcagctgcggagaagtcggcggccgttgaggaggatgaaactgataggattgccccactcgacagcgggtggagagggatcgcgcggtgacgagtggatcggcc

SEQ ID NO: 23430 - DNA, 457 bp, Zea Mays
tggacatgctttctcttccttttatacaagatatgtaaagaaaatatagaaaaggaagatttaggtacaagtttgaatgaaagaaagtagttttacccttttgtaccttcatatagagacgctctcttcattgtgcattgtccttagtcttagttgcttaagacctatacttaagacaatatatggaaatatgttgcacaagagagagttctacaactagtgatccttttccaagttaatgttagattaaattaaatggatcacaaattgtataaaggcaacatgaattctcctttcaacttagtgcatatcaagagatattgattgattttatatgagacactaagaagtataagtgttaatagaagttattcaatgatcaaacaaataacagatgtgaacaaaagaacaacatgagcgttagattaacaaataagcttattataggagaatccag

SEQ ID NO: 23431 - DNA, 361 bp, Zea Mays
ctcaggcgcaaagtgtcccgagacacagcaaaaccaggccgtggactgcgggttacttatctaataactgaagggctcttctgcaaatcttgcggccgaaagggtatctcttgattttagccgttggattcgatccgatggatcagatttaatgaaacgtgatcctcacataaccctacgatctgtgatcaacgattatcctttggtccaggtgaaccggtacccacatgctacatctagaccgcccaatccgtgatccgacggtccggaaccatcgtccacccaagcgttcccagggcggcggcgctagaaccctggcgcggtggcgccatggctaggaagcttccctggtgcactagca

SEQ ID NO: 23432 - DNA, 1118 bp, Zea Mays
gaacaactttgtttaagggatgcaacactgttgttatgaaaaatgtgaagaaaaatacacccaaagatgggctgtcaggctgtctggagactgaacctggtctgacagtatgatgaggcaatctttgaacccagatttgaacatgatccgacgcaagtttgggcatgatccccatagcaagattgcagttggttaattgggctataactttgatgcagtgggatgatggggttgtcacatgaaatgaggagaaaagtggctctaattttgctctgacagactaactgcatggtaatcaccatggtacagtgaatgggggggattaggtttagagaaccttgccgcggacaagccgcgcgcagattcgtgcctttgccaccgtgattcgcgttcggatcgactggataacgctcggggttgagtaagtatcatcgccattaaactactccggccaccgtaccgagcttgccacggtcgcttcggatgagctcgccggtgacagccgcttcacggccttgcgccacgtacctgggcacattcaccgcatcgccgtgactcacttcggccgtctgatcatcgctagtgagggctgccacggtagatgccacgaataccttgcgccagtgacctcccactcatccggaccgcccgcgcgtcatcgtccgattcaatggccaccactcttgcctactataaattgaggccaccatgagctccgtagggtagtcaagcaccaagccacccaaactgtgccctccatcgatcatcagagagcttcaattttggatttcccccaagaacactcaagaacaccgtgacaaagacctcgtcgtggtcagcccgattcaggtccaatctcgccctcggtttccttgtttcaacacccttgcttgctcttgatgctcaccgacccatccaattgagctagaacctcataaatcaccgggaacgcgttggattgcccgtggtgcttgcggtcaccgtgggcagggcgctgtagggcttcaatccagaaattagttgaggaaaacatttattaaggttcgaattaggttgcagtcatcagggagcaccggtcttggcgtaacccggccagtagtggctcaccggagctcggc

SEQ ID NO: 23433 - DNA, 423 bp, Zea Mays
gctcgtatgtggcgttgcttcgcctatcatcatgcgccccacgtcaccttccatcatgtgccccttgtcttttccgatatatgggtcactactaagactttagtgttgaggtctcctatgaccgaggctgaccaaccccacgaggcaactggagtacatatgaactgtttgaggggcatactatcgtgctaatggtgactccctatcacccgttttgtgtgccacgtgcacgtctgagcgtggctaggtgatgacatatcttgtcgcaactatcgtaggctcgtagcactagacttggatctccgcctcgcaagcttgctcgaaagagacttggtcagccgctccgcctcgcagacttgctcggcagggacttggtcggctgcttcgcctcgcaggcttgctcggcagggacttggtcggtcg

SEQ ID NO: 23434 - DNA, 763 bp, Zea Mays
cagccaattgaacacgctaattttcggggcatccgatggcttccaatttcctcttgatcgtgtgcagccagtcatcgacatcgaggggattgctagatccagcgaacatgggaggcttgagtctcagaaattctccgatcttgtcctgtggtcttccaccacctgggcgctggttctctagacttctagtgaggacttcaatgagtcgggtttgattggctagaacttgggccaaatctagtggtagttccagaggtgcggggaggtgggtctcactcccttctcctccagcttctccttctgctcctaggggaaaccctgctccaatcccggaggcggtaggcgtggttttatccaaagccatctaccaggggaaaagagttactaccatgcacatgccaatttttttaacaagttactttattcattacacaagttcattacagcatacaactaccataagttcattacacacgagtgctatctagggtactcccgaactccttctctaaagtgtcccccaaattccttgagaaggtcatcaaggctggctagggacatttcctcggtgtcagacgagttccctattctggtaggaggtagggctggaggggcttcttccttctgctcagtttggcatccttggcttttggtcttcttgcagatttttcttgcgggggcgagcttctttagcttcttgtcgtaatccatcttcaaagtgcggtagacctcacgggtgttggtttcctcgccttccgctatc

SEQ ID NO: 23435 - DNA, 398 bp, Zea Mays
gtgcgatgcaagagggtaccatgaaacgtatctgcgccggcgcgcggcggccagagcagaacgatgaacctcgtccatgtgagcgtcgctgactgactagatagctgatgagatcgagttaaataacatgacaacaggtgctaagagtgtgtggcccttgcccgtggcgacgtgaaggaagcaacaggggttgcggtgctctgttgccaaggaatcctcctgccgccctgcgggaagctgaggaaacgcatcgaattgtgctgcccgagaggaacgggggctgccatgagctttctacttacttggattggagagtcacctcctcgcgtaaaatttgataccagtttgtaacaaagaagccaccgctaggaccgatgtacatgctatctcgcaagggc

SEQ ID NO: 23436 - DNA, 509 bp, Zea Mays
ccaccgtcctcccccgctctgccatcacatcagtgccagtggatttaggcaccgcttcgtcctcacccactatgctcacacccccacacgacaacctgccccgagccgtcctgtcctcggtgctgtgcgccattatcaccgccgctgcacacctcgccagtgtccgccatccccactccccctcttctctaggcgcctataaaagggccgtcccgagcccctcatctcctcgccccagcctcaaccactatcctccccctgagcttaatcaagctggcaccaccgcttctccctctgctccggtgagttctcccctctccgatagcctaatgccaaattaaactagctcactagcttcaccactttgtcatgagcacggaacactgcatcccctcccagtcacaccccaaggcctcgctggtgacctcactgtcgcttgagccccgccactttgctgtggtcggccctttccgaaccactatcggcaaaatcctccccaccaccgtgac

SEQ ID NO: 23437 - DNA, 457 bp, Zea Mays
aaaagacactccgcgcaacagtcgcctaagggtgcagccggaataacgttaatcgaagtctctcattacaaagacactccgcacagagtcgcccacgggcgcagccggaccaacacaagcgtacaaatacggccaacatgccacatcaccatacaaattacaattacatacacacggcgagggcatcacatattacatcggctcaaccttcgggatgatacccatctccctgtaattaaacagcattatcctcaattcctcactctcaaaaagcttccgtagatccccctcgcctatgcccgccccaatcggcgaggacaacaattctcgtttaccaacctggtctactcgaagtcggccacgctccatacccatgcgacgacgcctgccgctccgcgaaaattcacccacactatgttttcccaccacccttcgccgcctacacccagtactcgca

SEQ ID NO: 23438 - DNA, 745 bp, Zea Mays
caccaaaccatgggttttaccttggtaatggtctgctagacagatcacacttgagtataccatatcttctctgccagtgagtaaaacccgactactctcatacaacatatctaacttagggtataagaaacaaatcgtagatgaagattttgctaagatcaggctcgaacaagcgacaatacgcaagggaggaggccaaacgaacatgtgccaggtgttcgatgtcggttggcagcagccaaataggctatgtctgtctgctcgcgtgccaacccgtgcccaagttcatgctctacgccatggctagggaaccgcagtgtcgcccgtgcccatgcctataagtagcgcctcgcccttggcctctccctccctggccactagcaaaccattcctcgtcggaattcaccgcagccaagcacaccaccgcctgcattgccacccgagcgccaaccaccgtggtccgacaggtgcagccaccctacaaccgagcaaacgccaccaaaagcttccctgagtcgtagtgaagctcctcagccaagccattcaccctctactcccctccagcaacgtgccaccgctcgtcggactttactcgagcgccaacaaacgtggccagcactaacccgtgcactatcacccgattccttgcaccagtagccccctcgacttagtgtgaagcttccctgtcggtggaattgaactctaccaccgtcgttggttaggatttggagccgtcgctcatcac

SEQ ID NO: 23439 - DNA, 413 bp, Zea Mays
ctgtgttaaaattcaacttcgcattcgttctctcatgaaaacttttccaaaatctgggggtaaactgtgatcctctatccaaaatgatctcctttgatactctacgtaatcacacaatctgagccatatataactctgccaattgagatcccttataagtagtcttgaccggaatgaaatgagccactttggtcagtctatccacagtcacccatatagcatcatatcctttctgggtgcgaggcaatccagtaataaaatccatatcagtctcttcttacttccacttggacatctttggtgggtgtaatagtccagctagtctttggtgatcggtcttaactctttggcacacatcgcacatagccacatgtgtagccacatctctcttcaatccataccactagcatttt

SEQ ID NO: 23440 - DNA, 738 bp, Zea Mays
ttccagatcatctcatttatctcatctctcttaatcaatcgcatacaatggtcagtgtttttttggatcatcccacatccccacccgcctctagcccccagcctcaccgggacgatcaacaccgccatcgccctagcctcgtgcctgccttgcctagacgaacatcaactcccctcgtgatctccctcaatgacagcgatgttggtggctgcacaggagctccacagcccacgtggagccgatgtgagccccgtggccacgacgacgactttgggtggccaactaggctacctgtggcacaacagctaacgtaacctgcctgctgcgctccctagattgtccgtcttcgagcgtgatggatagacaaaggatgtggatctgcaatggagcggtccaacatcagcgtgggaacatggctagatatggatgcggtggagagggcaccaccatcatgaagcaatcgttgattgagaggatgaaggagatacgcccacatggaatggtgtgggagtggacaaaaacgatgttgaaatgctaaacacaagaaattatttcttcggcatcgaggatggcgtgaggacgacatcatggcaagcacctccccagcgagcgacagggggtgcgctaactctccactgggatgcgcgaggactgtgtcacgacgagcacctcccccaataggcattttactagtaatgagtaagagaagagttccttaaccttactcgtgcctctttg

SEQ ID NO: 23441 - DNA, 661 bp, Zea Mays
cttgggttaggctatctttatgttccgttgagaagacgttaagaaatgaggggcaacttagtcttttattttagtgcaagacgaaggaatataggatgcgtgcggtttcatggtttcgtgcgggagtagcagtgctattaggtgaattagtagaataccggtgctattctctgaacaccgcgtaagaccggtgttattctgtgaatttccccaagttacaccccaatcaacttcaatacaagtgtattgaggtcaatactgggcctgacggagacgagtccgatgcgggcgggggtcagccgacaacgaactccaggttatgcgctgagtttgatttgctccgtacgatgtatccgtatagggacgtctatcgaatcctaatgaccataccttgaatcctaacggattgcaaccacccatcatcagattctcatcggatcggatcgctgcggtagctacggtagtgaggaagaagaagagggaagaaagggtcccacatggcagtgtcagtgatgaaatggaggcgtgcggtgaggctggtgcagcgaccccacatgtccgcgcgtcggtgccacagtgcgtgtgtgggagcgactgacaccgcggtcccagctgtcactgcagaaaggctacatgagatggtggctacgtgaggtaagtg

SEQ ID NO: 23442 - DNA, 317 bp, Zea Mays
gtgcgtgttccgggctccggacggtgtgcgcggtcggtgcaagattgttactagttcaggctgaacgtccctacatccagtctttggtggcttgcactactagtaccattgctgatcaatgcttgtagtaggggttacaaaggagcgaaagagagaggagaggctcccaagtctcttgttgtggaggaggtggagctaagggctacagagtggagtcctaactaagtcttggcttggtggcggggctctggcctctgggttctcgttggtgcgtcctccttcctcccgtcagtacgtcgtatctacatcttctatgt

SEQ ID NO: 23443 - DNA, 296 bp, Zea Mays
gttgttgcggcgttggcggcggaggagtgaagcgaagctgacagcgatgtcctgaacaagcaagaagaaccatgcccccgtgagcccaacatgaacggacaacatatacccggcccctcgccgctagcttgtctatgtcgagagtactgaaactaataaggtagcaaaaggaagcaaacgaccatggtcgcgaacccaagaacctccatggacgactgcacggacagtctgatcaaaagctacttgtgctaccagaagtacgaggaaggaaagcatgggtgttagataactcttgc

SEQ ID NO: 23444 - DNA, 599 bp, Zea Mays
aaacattccatgggctgcttgatgagcccctcgatggtttgcctagcaaggcatgccattgggccgcaactaggctaaatgagctcgaccaaggaagacaaagaccaggacaaccgagttatgcgtagaaggagcgttgatgtctcgcgcagggaaattgaagagctagatactcaaagataactcagatgaaaggcgaccgaaccccggataagtaggaatgcatgtcggttaaaagatagattcaaatagagttagatagtcatcacgaattgtaaagggatagtcctcaggtcacctatataaggctaagagggtacccctacaaggctacaaacgcatcctatctcgtcaaatcccaccgtcatcacatagctcattagccctctcatagcaactacaccgccactagatcgataggagaattcatccttcaccgcccacagctcatctgtaacccgtgaaaccagtaatacttaatacttagtatcgacgggatgtagggtattacacattctagcgactcgaacctgtataaactcacacataccattgagtcgcgatcaacgacgttgtcctagccaaaagcatcatgtgcg

SEQ ID NO: 23445 - DNA, 273 bp, Zea Mays
tgactgcccattttcacacatatcaatctcaaatatctctaccttgaaaatagctaggacaaaatgccttggtgctagcaactcctagcgcctattgccaccttttaaacagagatattcactgttttcaggtcgggtgactagctgggcgttccagaggtccgaccaggcgcctaatcacgattagggcgacgattttggcgcctaatcggtcttggtcgacctttggttgtctcctaatcgtcctagatatttctggatgtatgtataatt

SEQ ID NO: 23446 - DNA, 456 bp, Zea Mays
aggataagtgtaaggacacgagagtcacaaccgaacgtcgtgggagagaaagaaagagcgagaggtggagttgtcgaactcatgaccgttatcacactgaagggcacgaaccgagcgacggaactaagtggagacccaggcgaagaagtgtgatggttggaaaggtgtcggacttcaaccgcagcgaaaagtccaagaaaatgagagaaaccatccaaaatcaccaagtagtatctatagtaagaaagactgggtataggagatgcccatagatcacaatgaataagatcaaaagcctactcaaccctagaagaagagctagcaaaagggatacgagtatggcgacctagctgacaagcatgacacaagccctcaaaatgtcgcccactacaagaaatgtctgaattactagtgagcttggacatgacgtagggtccagcacgacggagacccgga

SEQ ID NO: 23447 - DNA, 439 bp, Zea Mays
acctcattccacgaggcctgtgactaggcatgacttgccatctacacattgttgtgaaccatccttgactcaacatgacccatttcttgaggtcacgtcctagactcgaaagccacgacatgtggctccacttccttctcagttgtagcctcaagacctgtgacaccatctacactggcctacaagacatgcaagttgctatcaagccctcgttcaaacatcgtcacaacaaaggggatcgtatcttgcgactccctcaagaaccatctctgcttgcaagcttggatgcttattaactaatccaccccatcagggctaagtgacggtgctcacatccttactccgttagatagcatggccatataagttttgctcccaccttctaaagaagtacgatgggaccatcaatatcaactgagctcctacaaatctatgccac

SEQ ID NO: 23448 - DNA, 391 bp, Zea Mays
ggagaagccaccgacgccaactcgtgcagttatcgttgttgcgtcttcacagaggggttgaggtggaaggatgaggtacaccgatcacgcgcgtagcacccttacaccatggggttgattggagtcacctctattgctcgctgggggtcgagaggagatccaccaccatagaatcgggttcacatcgctgttctgccctcgggtgtgaaaccaagagcttcactcagccgcgcaaaaggtgtatgtaacttctcttgggcggatttgcggtcggggctaccaggattgcttgtcagagttcaccccacccgctgatccgtagagcactgtcgaccggcttgaccacgacgccaacggcggtgagatttcttccccagtgtttgccattgtc

SEQ ID NO: 23449 - DNA, 755 bp, Zea Mays
tatctagggatgctataacaaagatgaagatggtttgtaggactacaactttgctgcagagcattggttatgttgccatatgaatttgggagaaaatcgagctcaaagatgatctgttaggccaactgaatgaggaatcccatggtacagggcctaaacaggatcagaacaccagctcagctcaccgccgacgacctccgccgcgattcgtgttgccggcgtctggattcgtgctcgtggcaagtggataacatctcgggtagaaggatcagcaccaccgttgagctggacaccactctggctagccgccgtacctccccccttgctcaccgatccctcggataagattctcaccatcattgaaccatcaccgtcgtccgccgcgtgtccaaacgctttaccatgtcgcggctaaccgtgctttgcatgtccggtgatcgccggaggtgccgccacggtaaaagccacgttgcgcggccaccagtgactcaccccgttttacggattgtaatccgccgctcaaattcactgcgctcacggccgatcgctataaattgaagccactgcaagctccgtagggtagtcatgtaccccgacacccagtattgccctcagttgattgccagcgagctcgaatttcacagttcccccaatttggttttccaccaccgtgaaaacgatctcaccgcagccaacgcaattccggttagttcatgttgtctgctctctcgtttaagcattctcatgcgtccgtg

SEQ ID NO: 23450 - DNA, 474 bp, Zea Mays
aaagtagccacaaacctgcgcttgggcctgaaccaacacccttggcccagcgccacttccacgccgtggcccaagtcacacccgtgcagcccacgcgtccattgcctaataggcgggcccaaccggccagaaatgttgcgcgcatggtcggttatgctgcggccgaggccctctggtcagtcatactcattcttccgcgtcacctacacgtgggaccaacttgtcatttccttccctgccgaccgtaacaaactccgccgttctcgcctgggtcatcagactcgatgtggtctggcgtgcctcctcgggtatataaccagctcgggtctggagcttcctccatcaaatccatggttgttagggtttaatcatgcgcacaaagtgagggatgggaggtcgagaaagaatgtcgctgcccccgtagatccaccgcgtgtaaaattcgattcaccgtcaatcgggtcccaagatttg

SEQ ID NO: 23451 - DNA, 557 bp, Zea Mays
atttgttacagagagattaacacattctcacgcagaaatccaagatcttggcgtcgcaagttgctcggtcaggcgctccgaatcagatcttcaatggtacagtgccacacaaatatcaacagattaagggtacctcgctgccggtgatccgcgcgtccggagttgcgccggttgccgggattcgtgccgggcacgctgtggatattcacggggaggtgaaagatctcgcggggaggcagatagggtcgcaggggaagcttatcaccgtgcctgtagccgttacgacgtggccggaccgtcagtgtcatcatggacactccggcgacctcaattatgccacgccgtgactcttcactacgcggtagtaaccgtggcacacttaggcttaccctctctgaaccactgcaccggtgaacgccacgattgcgccaccagtgacctcttccttctccagccgccaccgcgccaactccaaattacgagccaccgcccccagagcctataaattgagtgtgtcgttgggtccataaggtagtcaagcacccaatcgtccaagc

SEQ ID NO: 23452 - DNA, 956 bp, Zea Mays
atgaaattgatggagacaaaccagaattttgttgtgagagatccaaatagagcacatttattctatcttccatatagctctcgtcaactggagcataacctttatgtttctggctcaaatacagttgagccactgtctacgttaaaaactacattgacattatctcggccaagtacccatattggatttggacaaaaggagttaatcatttctttgttgcttgccatgactggtatatttcttccttgaatgaccatcatgtaaattatggatttttaatcaatacctttttactggtttttatcatcttttttagaaaatgtttgatcaactatcgaggagaaacatagatttaatttgaaaaataatttatgtacttgacattatatcttctttcaggggacttacacaacaaaattgcatgatgaattgaattgcacgatgaattgcggaaggacactattaaagctctctgcaatgcagatctctctgtttgaatttttatccgtggaaaagatatttcccttccggaaacatttcttagatcaccaagaagacctctaagagatattggaggaagacagttgcacagaggactatcctgatcttctttgcagggcagatgcgttgtcgagtttgacctgtacttctcaagtattggggagacaaggatgctgatatgagaatgtataagtaggctgccacactgtactatattatataataccataaagcgtgtcaaagaaagatgatagttactataaataattgatgagtggttgtgtgcatatgtcgtctcatatctgaaggtgatcaaattgttagtgctcgtgcatgtgctgattgaaactgaaacaactgttggtggtgatgatatgatgttaagatttacctagagatagcttgttaagatttgctcttcatataagaatatctcatgtaatttgatcttctct

SEQ ID NO: 23453 - DNA, 700 bp, Zea Mays
tggcggggacgaagtcgacgaactgccctgttattacatgcagcttgaccaggtgagctacggggtcagacgggaggcctacggtcccatctacctggtcacgtagacgactgggactgaagtatctgttccatttcatgtgctgttgtcttgtctcggttgcctgtccgtgttcgtcatggcaatcttcttggttgccggacaatatcatatatcttcagaaatgctgctaccatgcgtgtgcaataaagtgatcttctgactgaactgaaagacaggaggctagcagccacaggtttctctagtgtaaaatctcgccacagctgtggtatcaggagtttggcgccaccatagcttgacgtgttgtgtctgggaagcgctgtataatgcattcctggcttttctccaacagcctagacaaacggccacgtagagcagaaatacctcttccacggcactgtagcatgatcaataaataatgcatacgaagtacaatttacgcttcaggaaagaattgaaccaaaaatgaataccaccctcctttttcgaggcatccagccacaaagtaacgaccgcttcctagaacctacaaacccattctagaaaatgcccacaaaccaaccgtcagagcgaaagagaggtcaatttgcgtcggttgttgcacatccaactgttttacatgccgccgcacaagcactgt

SEQ ID NO: 23454 - DNA, 558 bp, Zea Mays
aacttatttcaaagaagaatacatgtggcttagcgctaacacaattagccatctccatatttaagtggatctatctgtaagcaaaaccaagttaatcagatgaatactgaagtttgctaaggaattgggtaaaaaacataaggagcaacttttgttaggagtcagggtgtgcctttcctggtatgaggtggggatgtctcgttgctaacttggaagataggcattcgttttgttagagaactggcgaaataatagatgttgacaggaggaactgctgcggagaggcgatgggggcgacaggtcccgcccgtggagcatagtagatgcggtttgtgatgcctacgaacagcgcctcgccgttgggcctgaacgcagcgacgaccacctcctcgaacatagccacctccctctatacccggtgtatgtgcacgaagtcggcagcctcagccgcgtttcggaacctgctgtcggggaagaagcagagactctggacggcgccgatgtagcctgtgtaccacacaaatgacttcgagaagctgaacgtgccccacggttggc

SEQ ID NO: 23455 - DNA, 955 bp, Zea Mays
cgctgcagggaggcgaataggcgatcgtgtattgtagaagggtggcactggatgccataagcacgatgtcatcgacgtagagcaagaggtaaacagtgtcgtcgtcgcgttgaaggattaacaacgacatgtctgactttgcctaggaggcgatgcgactgtatcaggcttgtggcgcctattttaagaccataaaaaactacatgaagagaggtgatgacacggtgggtgaggagatcgaggcaccgataccccttgtgatcagaagagtacccgtgaaaaatacgagtgggtcagtgtgcacgtttgtggggagcactggcaaaggtgttaggataggaggcacgaccatagacgcggatgtgcgtataggaggggtggtgccgaacagggcgaagaaaggagtgggatgactatccaccttggagggaagacacttgagtagataggtggcaatgttgagacttgagcgcctccacccagtagttgtcgggcagagacctgtaagagtaagcaacacaacatgttggtggtaatgtgaatcatggattcggcccgaccattctgaggggtggtgtaggggtacgagagtcgcagctgaacaccatgagaatggatgaaggagcaggaggagtcatcgaacttgtgatcattttcacactggagagcacaaatagggtggtcgaactaggtggagacctaagcaaagaagtgcaagagagtggtgaaagtgtcagatttcaaacgcagtgggaaagtccaaagaaagtgcggaaatcatctagaatcaacaagtaatatttataccccgagaggctgaaaataggtgatgtccacatatcacggtgtttaagatcaaaagcttgagcagcccgggaagaggaaccggagaaagggagacgagcatggcggtctaactgacaaacatagcacagactatcaaaatggcccctgc

SEQ ID NO: 23456 - DNA, 378 bp, Zea Mays
cgactgtggggcattccctacacacacgttgatcacactcttccaacttatctcctagctaatagcgaacagactttgcttatcttgatgaaaacctggtggctccgttccgagctatctccggcatttgagggcgtcgggcgcgggaaaaacgaacggcttcctcgggatcatgcctaatcccacgaacgatccggacgtgagctcatcaccttcttgggtcgacccatttcaactgtagtctttgcccatccaacgatgcgatgaccttgcaggacgactggcttgtggccccaaatagggttttcgccttctagtggacctgggggtatctgtccctcacaaccccgcaatctttgagttgattttgaaataatc

SEQ ID NO: 23457 - DNA, 353 bp, Zea Mays
gcatagacattagttctatatcaggaaccatgccctaaagttgcctgagttctttggctagtgtccaacccctcgcctagagaggatgggtgacataacattcgctcactctgagaccactctgagcgtgatgactaggattcaagagttgaaggatcttggtctcaatgttgtacatgtggtggggaattcaattgagtgtcgtgttctctcattttgtcagaaggaaacctacacttgggagcatgttgggatgattgatccgtcctagccctcaaatgaggcaattctgatgccgaaggtgaaggcctagcttcaccaactcttctctttgattagtgattggctaaaat

SEQ ID NO: 23458 - DNA, 1124 bp, Zea Mays
tcagcagaaacagaatcgcctataaaattgtttggctagctgaccatgtgattgatttttttcttgggtaataacaaaagggaactagtctttgcaagcattaaaaaatatatccaatattgtgcaaaagaaataaccaggaaataaagtcaatattgtgctttggaggtgagtgggctgcagccacttgggagcaggcaacagcaacagctatgcatccaggcgttcggcagctcaacagcaggttgggctttgtcaaaaaaaaacaaaaaaactagttggtggttgtccagctgtcaatggcttggcgaagcagcagctgtatagcagaagtgccaagacgaccgacgcggtgaagcaggcggccgaatgacacaggccatggaaggaagatggacaaggctaggcagcagtgcaactttagcacttggtgggcacgcgtcgcgatgctacctacggtggtgcattcggtccgtgagtactctcatttttgaaggcctaagccgataagggtgatggcaaatcttgtaattcctagcgaaagaaagaggaagcgcatgaggtagaaacacgaataagtgtgaaacgccgaaaccacgctacagccgtttcgtctgccaagggaaaaaagcatgaaacgttctggctccaaatcgctggcgccatttcttgtgattctcagcagaaacgaatatgtttcacctatccaaacagacccttagtatggtttgacctaaggcaacagaaaatccctaatatttcaggacggagggagtacgtaagcaacacttgacagtagtggcaaagggagacagagaaacttgacgccgtggtacatccaagaggattttttctgtagtacatatgggtcaacaaggttttttagtggcacataggtaattctctcaataacttcagttaagagaatagtagacatagacaaacagtgtgtacctcaggaaagtacccaagagctaataatgcttgtcggccagaatcagacctgtatcacaatgaaaacctatgtggtgaaaatcatatggagtcattgaaaagtctacaaaaaagaatgttggaaacaagaatctttctcattccagaagtgcaaacctttgtgctgagaa

SEQ ID NO: 23459 - DNA, 372 bp, Zea Mays
ttcgtctagttgctttcgctccgactgccatatctgctcaccagctgacgtgcatatgcttgctctgcgtgcatatagatagttggttggcgttccaattctaaatggcaacaccagtactgtgcattgacacaatgacaggaaagccagttggcgaggcaatccattcaaatctgagggcagctggtacgtggagtaaatctgagtttattgtttatcgtcggcttcacttttgagaggaatagcaatgttttcgaattttatcgagacatacctgataaacttatgtggcgttctcccgtctgcaccctctgcttctgcccctttgcccctatggcccagtgacgtttctgcatggacactgaaacattt

SEQ ID NO: 23460 - DNA, 393 bp, Zea Mays
aaaaataaccacaaactatacctttggattctgagacaacaccacagaagcaacaccactataaacatcattgttaacacaacctgttgccgctgctgatgttgcacctagattaataggccttctattaggatttgcatgtgacttaagtaaatggtcttaatgatagtacgccattgagagaaatataccataaacgacatgggtggctataggaggagcaagttggcctagcccaattggaacaccagctggctcgtgtggacatatagcagctgcagtatttctgccccttccattgtgatcactttcatcatctgtaatttgaaggtcaaaaagacccataagtgagaaaagctttgtacatggaaagagacccaacttatcagtttt

SEQ ID NO: 23461 - DNA, 1185 bp, Zea Mays
aagtggtatgcttcctatcttccctagacatctggatttgatggaaaccagagtaagcatctaagaatgacaataggtcgcacccggaggtagaatccacaatttggtctatacgtggcagtggatacgggtccttgggacatgccttattcaggctggtgtagtcgatgcacatcctaagcttcccattcgccttggggacgatgactgggttggccaaccatattgggtgatgaacctcttcgatgaagccagtgtctaccagcttccggacctcctttcggatgaagtcctgccgctcaacagactgtctgcgaggcttctgactcaccggcctggcgtcggggttgatctttagatggtgctcgataacctccctggggatcccaggcatctgcgacggctcccatgcgaacacgtcggtatttgcctggaggaaggcgacgagcgcgagttcctatttctcgtccagatcacccacaatgcgagtggtctaggtggaatccacgacaagcaagatggttttgacggggacaccatctgctctggatggttgtacttttggctccttggggagcgccttggtaccggaggttgaggggttcctccctccgtcgtccgagcgagcagtctctatcgccagggcgtgcagcttctctacggctgcaagtgcggcggcatggtcaccctgcatggtgaggaccccagttggggatggcatcttgaggaccaaatacccgtaatgggcaatggccatgaaccggtacagggtcggcctgccaatgatggcgttaaaggggaagttgacctccgcgacgtcgaacacgacgttctccgtgcggaagttctcctcagtcccgaatgtaaccgggagtgcgatgctcccaaggggatacaccggccgtgggcccactccggagaatgggcgtgagggtcccaaacgggaccccgggatttgcagctgcttgaacgcagcatggctgatgacgttgaggcctgcccgccgtcaatcaacacatggtgcagccacatgttggcgatgacaggggaggtgatgagtggcagtatgccggcccctgccatgttgtcgaggcagtcggatgccccgaaggagatggtgatgcttctccatcgttgatgtggggcagccttcgggacccctggagttgccgacaggacctcacg

SEQ ID NO: 23462 - DNA, 280 bp, Zea Mays
aagacttagtacattctatttgggagctgccaccagcataccaatgcgatcttttggattgctgacacctcctgactggtttggactttggacagtgtaatgaacactgcaacttacttatgaagagtatgaagttctcacacaatttgcggacaagtacacacaaggtgtaattcattgttggatgttccgattgatttatgactgttaataactatatagtagttggattgtttcttgttcattcagcttttatgatatgacctttttgattctgctg

SEQ ID NO: 23463 - DNA, 331 bp, Zea Mays
gtggaggaaggtttagcaatcaacccagaaagttgtaatgtcttttgtgtggtgaggacaagggccacacaacaaggacatgccaggtcacaatttagaaacaaagagaaattgctgaagccgaggcacggcagagtcagccgaagcaagtcctccacactgcttcgtgctattctccatacatcctagaatacgtaggcaaccaacaacctatggcttttgttgcttcgacaagccattcccgcgcctcctggcctcagttgccaccaccaccaccactggtccacaatcagcagctagaagggcgcaatcatagtcagcaacagcgcga

SEQ ID NO: 23464 - DNA, 570 bp, Zea Mays
cttgggcaaggctatcaaccagggccatgggaattcgtcgtcggtgtccgatttgctgccgcagtcgcactttaccgtgggctgccttgtcgccgtacccaccgccggtaaggaacccaccctcgcattcgcctttgtacaccatatctcatgcaccaggtagattcgagaaggtggggttgggggagtagttaggctccgtgtcggcgagggcgccgccgcagggcgctagcgccgctgttttagccatcagtaggtgcggatcgggaagacaaccggccagccgttggatggccgatgggcagatcagattactttgggcgtatcgattcaggttggggagatgagggtcgtctgatttagatcggacagatgagagtttattttagggttttgaatctggagcatagagggtggatcgtgcagttcacgttgcctgctatctcaggcatggcgggatctaatccatgccgcccgcgcgagatccaacggccagtgctagacgataccccttcaccgtgcacttttcttaaagagcccctgcgttttctagaaactaacccgtcgtcc

SEQ ID NO: 23465 - DNA, 815 bp, Zea Mays
gctctaggcttggttgacggtcgcggggcgcataactactgccgccttccctgggatcgtagcccactctaatttctcccacgctccaaccctttcgaccgccgccgccgtaggaaaccatgtgccgccgccattacagctgggaaaactgccaccgccgcgggacctcgcctgggtcgtcggtccagcctcggcaaccggtttgagacggagagaagggcacgtagaaggtatacgtgggcaacagcgggcacgaaatcgggcggccagatgccaattcgtcaccggtggttgaaatccgccatgaatctacccttcggcgcggtcagggacctcgacaccactattccggtgaaattctcctccctattaaattgccttcgtctctaggtcatgctacacctatcgaatttgagtttggagccctggagcatagcattgccttcctccggcggggtcgccgccgtggccaacgcgggggccgtcgcggcgttgggggaagatagtgttgggagtcctagctgtaagatttgtgatggacagccttgattagaagatagggtaacgattcgaaccagtgaatcgtggtcgttgatctacctgcgtacgaataggattagatcaggttaagatgaaatcgggaccgttgtttttaaatctggtggtatagattgcgtaccgcttcgtgaagtaatctgaaccctagatctctaatccaatggctcgcagtgcgtcctgattcagttttgagtgaatctaatcggggcccttggagtatgatctaacggcttggatctcgcaataccccttcgcgg

SEQ ID NO: 23466 - DNA, 1133 bp, Zea Mays
aaagtacatttgtgttagattgggctgatcaggcctgccatgtgtggtgattaggcctgccatatgtgttagattgggctgatcaggcctgccatgtgtggtgattaggcctgccatatgtgttagattgggttgatcaggcctgccatatgtgtcttggcgtttatggtagtcgatcatagattaggcaaggatctctattgattgggtgttttctataaaccttagatgatccttgtctatatattgtacaccacttgtacctatataatcaagctactataccccaagccatatctcctttcatggtatcacgagtccatgtttcaccttggcttccccctcttccgctgccctagcacactggccctccaccatgctgcgtttacgcggcggcctcctctgtcgtgccatggctactctcctccccaccccttggcaccatgttccccacgccaccacagtcgtcgaagggcaacacaataagacggatgacaatggcgtgttagattgggttcaggctgcctgtgttttcaagtcatccgattaatcgcgattagttggctgatcggttttgggtggccgatctgggcaggtgacccgattaggacacctgatcgccctggtcgttcgagtcgccgactagctatgattagtcgctcgatcaagagatcatgactgaccagggtccggcgcgcctcaaattttcatgggcttttttctggcgggcggcccagctgcaaggaggtgaaacgccccatagaaccttccctgacgcctgacagaatgtttccaaaacatctcgattcccgtcgtctcaatctcttcccttttgcttctcgttgttctcattccacctctccacggcaaaccggcgcgcggctgccacttgatcgccggcgtctccagttcaccggcgcgtggcttcatcctgatcgttggcggctccagttcaccggtgcacagcgggtctagttcacatgcgcgtgcatgagttcatcgtctggaggttggtctgaagtctgaaccctgatattatctgtccatcttgtttttcaaaacctctgttcattacctgtccatggtctgaaattctctgaagtctgaaccctgatattatctgtccatcttgt

SEQ ID NO: 23467 - DNA, 525 bp, Zea Mays
ccccatagaccaccggagttactgccacggcgataaacacgtgttcaccgcaccgccgttcttcctcacttccgaccgccgcgcgtccttctcaaaattcacggccaccgccttaccctcctataaattgagggcggggatagttgcgccatgtaatcgtcaagctattgcacccactcccatctccactcgctcaccgtagctccgcaattcgggttttcccccaaattgatctccgccaccgtaaaacaccacctccccgtggactgtccgttctggtaaggcaccatccaattcgcgcattgttctagcaccctttcatgctggtgatgctccccgacccctttaatcgaaccaaaccgactgggaccgctgggaacacatcgatctagtcgccatgctctcggccaccatggccagagttccttagtcgatcattagccaaattaagttgggggaaaggtttagggcagatccaatttagtgtctgctgctcggagaacccagccatagccccaatcggcc

SEQ ID NO: 23468 - DNA, 750 bp, Zea Mays
gtcgtgtagacggccagccagccgctcgggtcctacttggtttcatacttgacgacattggaaaccttgaagtttggcggccattgaatcgctcggagccggggtaagggctgagactccgcacgtcccccggtccacccggcgatgatcatgatgatggacctgggggagagtgacatcgtgcatcatgtcgcctcgatcggccttggttcgagatgttggtgaggctgctaccgactcggtcctggtgacacagctacacaccggtgcaccatgatctcggtcatactcttttcaccgtctcatctcctcctcatgccggcgatcacgcgaagcgttgatattgctccgcgtgtctcatcgactactgatggcgtggcgtagatcattcggcggatgagctagaggaagaagatggttcgtcgcctgggtgaggacctgccgatagcctttccgcgtctggggtgcgtggtaagccgttggcgacttgagccaggactcccccaacttcactcaatgtattcagtgctcgagcaaagtcagggaataggttccgagggagaagcaggttcgcgtcggagcctggtgtcctgttcagcttgttcccgttcgcggtcctgagcatggcgatgatcacggcaacaggagttgtggcattcttggagcgctttgttgttgggattttcccctacttcataggcttcgtcctaggatacgtggtgacgccgtacaacgcctgttttgacgtcg

SEQ ID NO: 23469 - DNA, 807 bp, Zea Mays
taacatgtgagatatttgcattgacccttttagttgaccctcaccagatacatatagcagtatgagattacaatattctaactaccaaatatactctaacaacgaaactagctatcagtatagagagatctaaatgtccacctgttattatgtcatcaaaaggtgctagaaaaggtagcacgacctgttgtcttgaagcaatgaagcatatcatatgaaagctagctaaattttattttcttgaacgacgcaggagaagaatgaccacccaaacctacctagaaattacatgagaccaagatatgctggacaatatcattagcttggtcacaaagagggcaaacagtagggtgtggcaagccacgcttcgcaagatgttcttttgtccagcatctatctattattctctgcaagagcttttccaaatctgcttccatggtgcaaatctagtaccgatgaaaaagcatcatgcgaacgctcttgcagtgcgatggatgtgactcccgatggggagtgcgctcgcccgggtttgattcctatctagatcaatctggatgtcgcatcggggacatttctcccgaggggaccgagtgtgcctgcctgggattgattcctatctggatcaattcggatgttgcaccggggatattttccctgaggggaacgagtgtgtggtgtggggagtgcgctcgcctggatttggttcctgtctagttcaatccagatgccgcaccggggatatttctcccaaggggaccgagtttgctcggtgggtagtgtgtccctgtaggtttgattcctgtctgg

SEQ ID NO: 23470 - DNA, 707 bp, Zea Mays
gctgaggggaagaaaaagagacggcttcggtgagtgtcatgttcgaatcaggatgccggcccttctgttcctgctgctgagggagtgcatgtagaactttctattggagctgatcccaatgggtgcgactcagctgacgctgaccccaatgggtgcaatccggctgaccttgatgatgctgatcccaatgggtgtggtgttcgtattgtcgatgaggatgaagaagaggaagaggaaatccccttgatttggaagaacaatcggcgctatgtagtcagtggggagagtagtgaaattccttctccagctttgtctgcccttgttggtctgcaggaattgtctctggcgaattttgaccaggctcttgaagatgtgatccctgaagatctgttgtccaagctgacagatggtggtgtgatggacgcttgcgctcatttgcatgatgtcgggttagagttgtcccaagcagcatctcgcgcctcatcgaccttagagcgcggtcttcagagtcaagaagctgatccagatttctccgttcccatggaaatgactgagaaccccccagccttagaggtggctggagctgagagtccggtcctcaaggatggcgccagcatttgcccagcccccgagggtgttgccggtaatgatccggctcaggtgggcagcgcgaactgtgacccagcccccgaggatatcctagcggg

SEQ ID NO: 23471 - DNA, 646 bp, Zea Mays
aatttgtcacctatcacaaaaaattaagatcgcattgcagagtgcatgtgttggttctcttcttcctcacgccaacaccaacgccggacagaggccggcaacagcagcggcactgtaggtctgtctctttccttcttactctctctcttcgcatggagtctggctctatcgttaaactgtttggatcactagattggtaggataaaactgagtgaagttcagtcacaaacttggctttgttcttattcttcataccgatttatgttagtgccgttactatctgtctgcttgagtaataacaacatactgtatggcactgaatcatttggtggataaagaatcatttggtggtctttttagcattgtgtgtgcttgcttcgcctgtattgtgtgtgcgaggagagagatgcctgtattgtgtgtgcttgcttcgcctttttagcattggtctagaagcatttggactgtaaactgtattcgtagctgcttggatgtaaagcaagttcaattgcagcggggaaaaagtagagggaaacgaataccaagcctgagactgattcctcatctcagactcaagaatatacttatcacttaggtacgaagtcacctctcatcggccaggtaaggagaatatattgctcggggc

SEQ ID NO: 23472 - DNA, 569 bp, Zea Mays
gtttgattccaacacagctgcaattgctctctaggagtatgagttctttgggaggaaaagaggatatttctcgagtgacctagcaaggagaatgacaaatgatcacaatatgtttccatccagttgttgggcagtgtttgggtcagagacacagactctacaatgtgttgtgaagcggcttcttgcacagtgtgtttcatcaaatgagcgtgaacgcaattggagtatattcgttttcattcgtacaaagctccgcaacatactaggatacgagaagctacatgaactggtgttcgtgaattacaacatacgtctacgaattcaatgtgcatcatgtatgcctgggcctagtgaatttgatcccgccttagccctcatggatctctcgttacataggcataacagagccattcatgattggatggaaagagggagatccaatgtggatccaacattggatgaggactcatcttacagtgacacacccgttcctatcaagctgtttacatcaattgcccaaaaatatggagacatagaggatatacatggatgggctgatacaacagttg

SEQ ID NO: 23473 - DNA, 634 bp, Zea Mays
cctgtgcaaaaattaggggaaatgatgttcaaagttgtgctgtcagactagtgaattctgactgtcgacctgagtgacttactctaaattcctgtctgttggatcaactttggagccttatagagactattctatgtgattaggagccaagttggtgtaagcaaagttggagagctagtattcatgagcaagttttattaggagggcctgccatgatgtcacataaatttaggagataatggtgctcaaactacctctgtcaaaaggaaaaattggatggagactgtaggccgaaattcagaaaaaactggaatggtaccagtgtgatgtagctggtttttgggtgccataacttctaatctatgaggtttgggtccaagcaccctatagtaactttgaagatcttggattagtgaacaagttctgttaacagagacaaatctgctcttaacgaatatagagagaaaaaggtggctgaacagtgggggtcagtcgagtgctgtagatcgtgatgatcagaaatatctgccactgatctttttcccttgccgtgtcttactttggtataaagtgaagatagagatgagaggaaatagcagggattttcagaactttgtccatcaccgacatatcc

SEQ ID NO: 23474 - DNA, 900 bp, Zea Mays
ccgagaacaggtaaacgcgcccgcgtgcgcgcgcccgcacggtggttttgcatcgaagccctcaagggtttgaataactagggaagaatcctgcgcactatttgactgggtcactgacgattgcaaataagcccttgcacttctatttcttcacagcccacagtcctcgacggtgaacagcgatgaaccgagctccggcgaacctgtaccggccaagataagcaatggtcgatgctctaacttggatgtcacctaattcaacacctaataatcgatttccctcactcaattgcacaatccgagccctaaatcgccctgtccatggagacagtgtgaactacagatgaatagaagtgttcccggcgatctagcgtggtctagcttaattgaatgggtcgaggagcatcagtggtatgtaagagtgctgaaacaagagagcagagggcaagatcggacctgaagtgcactggccaaggtgagagcttgttcatggtggcggaaaactaatttgggggaactgagcaattcgggggctctggagagtaattggaggcacgagtgggtgtgttgagtgcacaattacatagcggtgtcgagggtgtgctcaatttataggtcccttgagcggtggcccgttaatttgcgattgcgcgatggttatcggagagaaggggatgcactggcgcaagcgattagtggctttcaccgtgccgagctcaccgacgatcaccggatatgcataacgcgagctactgcgacgtggtaagacgccagggcacatggcgcaaggttgtggggtggctaactccggcgagcctatccaaaggggttgtgactcaagcgggtacggcggccgaagtagaatagtggccggagtccatccacagcgcgatatttctt

SEQ ID NO: 23475 - DNA, 546 bp, Zea Mays
gttttaatgtccgcggtattaacgcggtggctaaggggaatggtattcattgtgtgattagggaatccaattgcgacatcatctgcttgtaggagacgaagaaggaattttttgacagggctgacctcagaaggttctgtcccaattcttttgatgagtttgcttttgtcccctcgataggaaattcggggggtttcattactgtttggaatagttcgaagttggttggcagtgctatttttcagaacgagtatgctctctcggttgagttttctgctatttcgtcggatgaatcttggattgtcactaacgtttacgcgccctgttctccgcatgggaaaattgaattcctccactggttctccaatattaatatgccctcggaaaggcgttggttgattgttggggactttaaccttacgcgtaggcctgaaaacagaaatatcgctggggggcattaacttgatgctgaaatttaatgaggcaatcagtcagctagacctgatggaaattcccctccatggcctctcctttacttggtcgaac

SEQ ID NO: 23476 - DNA, 276 bp, Zea Mays
tccgtatagtcgacgcacatgcgccaatccactttattctttttgagtacaagaacaggatttgctaaccactcgggatgtagtacttctctaatgaatcctgccgcgaccaagtgagccagctcagcacggatggcttctctcttgtcgagcgtaaaatgatgtaacttttgtcggatcggcctcgcctggggatagaccttcagtttgtgctcggccagctctctggggactcccggcatatccacaggttgccatgcaaatacgtctcggtta

SEQ ID NO: 23477 - DNA, 936 bp, Zea Mays
aggggaatgcagttccgaagacatggaattaacaacatcacagacattgacattaccactggtaggggcagacttatcagccaatgaatcaagatcatgttgcagactctggtccctcctagaataaaccagaatgggcttgcagtatcgagggcaagagggtccaggaaagatatcaggccgaaccaatggcgcagcagaccccatgcgggagcaattcatcatggccgaacattccaaacgtgaataatccgcagaatccagaccaacatccgaccctgcccccgaggccacagggagtgttggcacaacagctgacaatccctcagcaggaaacgaggtagtcccagacgccaccagctctacaaccgaagcatcagggagagctggcgcatcaaatggtcccaccaacctcgaaaacgagtcatccaccgccattaaggaagaaaccgaggatttagcaggtgccaccaacgcattaatcccaacagcaattgggacaataactggtctgccagccgccgagcataaatggccgcacctcccttgaataggcgcagaagcagatccttgggactccgaacagtcttcatggggataatccgcagcattaacagcgacgagaacagggccagacgctgctggcacaacacccgaagcatccaatagcattgacacattagctggcccctccatcgcaggaaacgaggcaggtccaggcgccgccagccctacaaccgaagtaacagggagagctggcgcatcaactggagcagtcagcgtcggaaacgaggcatcatcagctgggtcaatccgcgtcagaaacgaggcatcaactgccattaaggaagagaccgactggattgcaggcgtcaccagagcagtaaccgcatcagcagggataacgcggccagccgccgagcagtgatggacgcg

SEQ ID NO: 23478 - DNA, 645 bp, Zea Mays
cagagtcaaaaaaaccagcaggttggctacaatagactgtctcagaaagagtaccgtgaagaaacacattattgacatcaagttggtggataagccagtctctcgactgagctagtgagaggactgtgcgaatcgtagttggtttgaccaccggactaaaagtctcatcataatcgaccctaggacgctgagtgaaccctcgacatacccagcgaacttgtgacggaaataccatttccctgtgatgacatgggcacctggaggacgaggaacaagttcccaagtattattggagatcagagcctggaactcttcttccattgcacgacgccagagggggtgagctaaaccttggcgaactaaagtcggcttgggggagatagttgcagcagtgaaagcagccagcacacgaaaaccagccttggcccgggtggtcattggatgatcgttgaccaccgcaggtgtaggaatggcaccaggaggaagagcagaggcctgtgaaggcgctgatgcagactctgcagccggtaatgaagaagtactagaggcgccaacctctggaagatctgcaggggaggtagtttgctggtgccgacgagtgtacacctatagagacaggggcgtcggtgtagctccatgtgctag

SEQ ID NO: 23479 - DNA, 371 bp, Zea Mays
ctccgctgggggcagacaccgtgagagatgggagagagaatgagaggcaagggtgtctggaggaagaagaagagggcgccgccgtcgatctggaattggatgacactgattatggctggcataccgtttcggccgggtcagatcgtggtcgtagatcgtggattggatggttgggagcttatttagatcagatcgactatggaccgttggattgggatatgatgatcccggttgcgtaccggttcattacgcgagccaatttaatcgtggccgtagaatctggatcggacatcccatatccaacgatacctcttcactgaactcttttgcgaataagcccttggcttttgcataataaaacccgccatcca

SEQ ID NO: 23480 - DNA, 478 bp, Zea Mays
attattttattgcttaccctggacacctctatatcctacattgatatttgtctcataccttcccctataaatctcccctcttccacctcaatctgagcattgtactttacctatttttctgttggtcatatcctattccttgtcgcttgtgagtcttcagctccatcctttgttgtgcctctgtttagtgttgccttgacctttcccatatctcgaccataccttagtgatgacattatttctattatctaaaatctccaatctcctatcccaatttgagagcagtgttttacttatcttatccttggcaacatcctcttctttaccgcgtgtaagccttgacatacctccattctttattgtacttataccactggcacttctatgccttcatcttttctcctatactcttgtctattatcgcctttgacccttgcgatatttatgtcttctacctaaattcttaccttgaacttat

SEQ ID NO: 23481 - DNA, 1054 bp, Zea Mays
cacccatcagacctcgtccctaacctctcgcccgcgcactcccaccgtggacatgcccacgtctgcgcgtttcccggccacctccgcatgccctcgcctcctttagagctcgcaccctgctcgcccactcccccctgttcatttgcgccctcacccgagcaccctcgccccctctctcgccctgcgcgcgcatccaagaagctccgccaccgctcaccgaagcctgtcgctcgttcctcgaccgttgttgagcccccgtcgcgtcgttgcctcggtgaggtccgcctcgccgtcagcaactcgggacacccctcgatttgcccttagcccatcttgttcgcccggtccacgctcaccggagtgtttccctgtgcagccagagtccatcgccttcaacccaaggcttccccacgtccccgccgtcgcccaagcgctcctatgttcgcactcaaggtgagcaaccttcctatgcacttatttcgtccgttactgccctagtgtccgcacaattcatcgccagagttgatccacgccaccgttagaccgcctcgccgtgttccgcgccctctggtgcctctgtgcctgtattgcacccacgactgagtttgccagatcgccctgagcatgcctgagcccttccctaaacccctagagctctgtcgtggtcgttcctcttgtctccggcgacctcaccgccgaggagcaagagcggcgctgcccgcaaccgtaaaaccttcccggtgttgatctccaccgttcgatcctgatcgcgtggtctagatcaccgggtaccgattcgcgcccgcgtgcccagtctccgggcccgccaaacagcgcctacaccccctggagttgggcccggctggtcagcccgccttcccctctagtcgctgacgcctcgtccccacttgtcagctacactcgcccgtctgcgcccgcacgctcgtctgcgggatctaatctgggccgttgataggagatctgacggtcaatttagccctgcaccccttcacgtggcggttttgcttaagagaccctcggattttcaagaatc

SEQ ID NO: 23482 - DNA, 479 bp, Zea Mays
tagcggggaagtctatcccccttatttcaatccttagattcggacaaatcttatcggactgaacttttcccccaactgaattaactcttaaaggcgggatcattggttctatgggaatgttatgtgcttctacccaagatgtagaaacaaaagaatgagtggcaccagtatcaaataatacttttgctggataggattcgactggaaacatacctactgccacgtcctgagcatcctggattgcttcggcctccaggtgattcacctttacacggttgtaggcctgaccacggactcctggcgcttgctgtggcgctccttgtcttgctggggcattgactgctggcgactgctgagctgctttctttggacagttcttcacccagtggttttgttctccatagtagaagcatgcacggcatcctacttgcgctagaactgcttggctattatggttggttgctggggcaggaaggcga

SEQ ID NO: 23483 - DNA, 621 bp, Zea Mays
ggagcctcttccttcacatcttggagaggctgggtgagcactcccccacttgactctttgaaccgatgcaatcaaccacaatagtttccccccaccagaagtgcacaactgccgcttgcgtaaggtagcgttgcccactccatcaatgagtacatcaaaatagagaaaagttctaccttagagtatctcgaacgtttctatacatgtgttattgcttgtttcgggggtggagtacatgtgtcattccactactgaagactttaggcgtctattagctaaggaagaggaaatgggatttccttgtatgatagggagtatagattgcatgcattggaaatggaaaaattgtcccattggatggatagggaattcacaagaggggatattggatccttgaccatcaagctcgagcaattgcctcatatgacttgtggatctgtcataccttttggggtgggaggatcggacaatgatgtgaacatgctcaaccactcactgatgtgcttaagggtgaagcaccaaacacaaacttcatggtgaatggccacgagtacaactagaagtactaccttgctgatgacaactacccttggtacccagtgttcatgaagactattccgc

SEQ ID NO: 23484 - DNA, 398 bp, Zea Mays
gccggctgatatttctataatgacgacagctaagagagtaggcagggcaggggtttggttttgtgagcacgtcacgaagctactaattatcatgtttgttctgttcgcaacttctgtgttaagaaacctggtaggccggtactaggtgcgggtgcgacaataatgacacctatacatcagcgtttccgcgcctactcctcacctttaaaaccgatgctgctgacacgcgacgatgtgacaactgacaagccatccaaattttcgtccacaagtcaacgatgatcccttttgtgtctggcggcagatttgacttccaacttccaagagaggaatcgaaagcctcttttgactcctgctctttgtcctccatttccatcgtcaccaacacccaacccaac

SEQ ID NO: 23485 - DNA, 558 bp, Zea Mays
accgaaccagtttaccaaatacgcctttagaggacaagactgaagatgagaagcccgtcgacttgaagaaggatggcaacaaaaagagaatcaagaagatcgtccactataagacaaactcttctacatcgccatccccttcaagtggcgaagaatcttcctccaagcgccatgaggagaaaccggttaaatctaaattcaattgcactctatttaattactctcgcattttgaatgcccaattgctttcaatacctcttgccaaacctcctcactttgatggggataactatttgtcgtggtttcgaaaaccagagacagtagaatttgtgttcggtggggaaaggctagcgtggactcacttcgaatgatgaatcaagtgactcgaggggggttataatggttcagaatcgcaccctacgtgcagtgtagtgctgattatagtattgctctagggaacatgttacaaagggtgcaagtgtgagaatgagaggaaggggagaactccggctgaatgctcctagctctcctgtcccatgcctattcggtcgcccccgt

SEQ ID NO: 23486 - DNA, 316 bp, Zea Mays
tggaaagcgacactaagtgaaagcttggtacccaatgcactatgaagactctcccagaatttggatacaaatttggagtctcgatcatgaacaatggacttaggcaccccgtggagcctaattacttccttcatatacaaggggaccaattatgaagctgaatttgtggtcttcatgggaataaaatgcacagacttagtcaagcaatccactaccacccatatagcatccctgccccgaggagaacgaggtaagcccaccacaaaatccatggtgatatgctcccacttccactccggaatttccaatggcttca

SEQ ID NO: 23487 - DNA, 571 bp, Zea Mays
caaccaaaacaagtgcagaccttgtgttcttcttaagataagcttgcatgtcctttgaaacaacctctgggacccttgcacacttcatcgtgtcgccgaatctgccggcgaggtgctgtttgaacctctttattccagagggcaccactttcatgcaaaagatacattgcacgaactccttcttagacggatcaggccaccaaccgaacttccagccagggtcctgtgacttagccttccgcttcgaatcgttagcttgttcagcaaggtctggaggcagacctgctattgccttgtcagcaagcgtgcttgagtctgcagcagttgacgacgccgatggaacatgatctgtgctgccagtttcagccgcagaggacgccttccctcgggcaatttgggactgtgggaagatgacttgaacagcagcaacacgacgtccatcaccatgatgtccatgcatatctgcgacgtcaaacatcttaatagcagctctgcctcaagagtccagaccttgctggacaaagaggaatgaagaacagaggggggggagagagcagagaacaaagagtga

SEQ ID NO: 23488 - DNA, 600 bp, Zea Mays
gctagttgtgcttgccttgatcgtcattggagcccgccgatgtgggggatagatatccctaggtcattatggcattgttatgcttcgtgggccatctacatggaccccaatggcatgatcgtaaggtgacctcagtcgggtacaaccgaagacgactcaaggagatgcacacgtgagcatgaaggttcccaaggtcgtgctctacgcatgtagcgtacgtgtgggcttcacaaagaccaactgacctctggtagatggggcacacttctagcgaaaagtcagatgataagggtcgtgctctaggatagtgcaggggatctctcttaagtcgggacccctacgaaaatagcagacacacacacaccgcgagcatctccatcctctataatcctcaacctctaggcaatacatcaaccagaaactcacaggacatggggtattacacatctaggcggaccaaatctataaaattcatcgtgttccgtcgtgccctgcacaaaccatcaagctgtgatcgacttcgccgtccttctaaaagcactatgtggtatatcccgtagtgcgccatcggtacaaaaccctgatagctagcacgctagg

SEQ ID NO: 23489 - DNA, 718 bp, Zea Mays
tagtcacatagtcataagcatatgaaatgtgaataaatacatacacagagagatatggcacgagacgggacgatcaagaagtcaaacgacgtgaaaatggcgtttgacagacaaatagtgacataggatgatcgaaattcgaattgaggcacgaaacgatatgggattgagccgagacttcacgaataggtttatataggtgaatattagtgaagtgtgttcttggtttgaatttaggcgaagaaaagggaatttgggtactcggctcggaaacgatcgctcaaaacgggaaatttggtgaaatttaagcctggatctcggattggcgtgaaatttggcaaggatgttgctgaaagtgttgtgaaggtgcctgaaaaatttgggttcaattggagcaagtttggctggtttgggcatttcaccgagcacatggtgtgcggggagttagggttttagggaaatggccatttgaggtatgaaaaccctcccgaaggagctaggatcctgcagggatacataatggggacaaagagacacattccaccaactggattcattggatttcacagaaattggatttgtgcacaagggggtggtgaactggatgccacagagcctttcaaaccgagagcagggagatagagggaaggagaggggggatgactgctcaccggagagggaagggtcacggagagcaccaggtcgccggagagacgcc

SEQ ID NO: 23490 - DNA, 518 bp, Zea Mays
tcgctcaccggagcgtttcttgcacagccagagagccgccgccgtcgacccgcatcgtcgctgtgccctaggcttcgttcgtgcgcccctgagcctccacttgagttaaccgtcctaaccctgcccttattttcccctgtcgtgtactttctcgaccacgattgctcgccggagtgcccccggtctgccgaggacctccccctccgttgtccagtcgcctcacccccgttcctgttaccctgttcccgccatagtgttcgctaggtcctccctaacctccctagccacccagaccacccttacctcccctaggagccccagtccactttgctgccggtggatgcgttgtcgcgggtgcgaatggcatcgcccctggtcggccggagaggacaaagtgcttagcgcagatccgaaccgtccggtcttcatcgggtgggccggatgtgcggataacattttgcgtggatcgtgcagccggagtcgttgatccatgatctagcggctagcgcgccccacac

SEQ ID NO: 23491 - DNA, 534 bp, Zea Mays
taggatgttctctcgaatatgcaagtgtgttccaagcttttgtatggtgtatgctatttcaaaaggtgggttgtccatggtttattctcttggatcagaaagtgacaacagttctaagatactccaggtcaacgagagttctaacagtgaactttattcagataagtcatcagtatcaggtaaagtctatggaatttatattgcgttgtgaggatagaacaataaattactacaacttgatttttgttatagttaccaccagagtagttgtgtggagcctccttgtatttgtgaagctggtatagtcatatagggagcttgtttgctatgtttgtacttgtgaagtttggagctcgtagtttcctttttgtgatctaaaattctaaatggtgtattgttggctctttgggtttcaataggaaagaattgggtgtcatttggttcaggcacaaaccagtcctagaaatttatccttttcatcccatgcagatattacaccttccataatttccagatccaactcgctcgatggga

SEQ ID NO: 23492 - DNA, 635 bp, Zea Mays
gtcagaccaactgaatgacctcgcgatggtacagtaactggatcagaacgccagcgcagagaacctcgccgccagtgagctgtgcgcctggattcacgccgccgttgtgattcgtgctcatcggtgaccggataacacttctgggtaaaagatcttcgccacagggtaacaccggaggctggccgtcgtacccctgttgctttgcggccggctcagataagttcaccggagttggccgcccgtcgatcggatgccacgtgccctgaagcttcaccatgtcgccgtaaatcgctccatatcactagctcgtcgctggtgagtccgccacggtgaaagccactaattgtttgcgccagtgcccttcctcctctccagccgccgcgcgtctccatcaaattcactagacaccgctcaagcacgctataaattgagcactccctcggctccgttaggtaatccaacatccaatccaaccgcttgtgtccttaattactcaccagagcccacgaattgctcttttcccccaaaccggtttccgccaccgtgaaagaaccctcgtcgtggctagcttgttccaggtctgttcatactctctgctcttccgttttagtgtccttaggttctcctaatgctac

SEQ ID NO: 23493 - DNA, 640 bp, Zea Mays
cagcatctcctctcaacttgatgcttccatgtcgcacatgaggaaagcgatttcaaagaagaggagagtgatgcctaccatcggtgagggcggaggagcgaccagaccgtcaagttccttcctaacgacacttgcgcagggtaacaccagggggatgtcctgggttcgtttgacgttttcgagcggtcctttcatggatctggcgggggcgactgatgctctctctttttctcttattttttgtttttgtggttagctcgggagctacgttcgtcggcatggtggaggttgcggctccaagggggacaacatccctccttgtttatggggagccccagaccctacgttcgtccagctcgctccatactgctctacagacggcgacgaccccctggccctatgtagggagctgaatgaagagaacgatgtgactgagaaggtgttgcggtgcagcctcgatcgactttcgactacgcgccaaaaggtaatggtaagtcgcacatggatggcttggcgagggaaatgatcctcttgctaatcgacttgttgtatgattttcgtgttttcagtcgctcatagggacgctggcgggcaggtctcgccttcttctcgaccaaagggaggtgtaggagtgttccac

SEQ ID NO: 23494 - DNA, 451 bp, Zea Mays
catctcacccaagatgaccaagaccaaaggcctcaacatagaatcttcactgacagcttctcagatacagaggaaagtggatataaatggattacccaactaaataactgacttttttaataactacaccaagttgcaggagatacccaccccttggtgacaatcattacaaagatccaacttcattacatgttcatcatgacaagcatccaacatacgataagcaaactaactctaactaagattgactagactaagacactgaagtaagcattattatagattctgactccatcgatctatggatctaaatctatgcgggtcctgcagtctggggtaccatagtcgaagcgaccacggggcggtgaacggtaagggtgctgaatcccgataggggcgggagaaccaccatcaagatagtggcgtgccgagcattcagcatgcaattccg

SEQ ID NO: 23495 - DNA, 683 bp, Zea Mays
tgcatcacatgaacacatatataagaatataaaaaacttacaccactataatcacatgcgcatgataagctaataatcagttcataatagctccacaacatgttcattacagctgattaataggtctaaaatagattcgaaacagtctgaggtagttgctattacaatacacacacaaatatgtatatataatggtgctaaacattcagctatgagcagcaccatccatctccttaagccttattgatcagcttagaagacgtgcaaaagaatgaggcatcaccaccgccataaacatcacctggccactgagcaaaataacaggcaaccacctaaggaattcacaccaaaacagccagccaacaacaccacccttccatccacaaaagagtacctggttgagcctaaaacaagtgcaaaacatatcagctaagtacaagttgaaacaataaaactaatgatatgtgaatcacctaatcacttcacagtagtgttgaatcactcaaaaacttgaatacccatgactgaaatgttgtttcagctgaagcggataagaaaccacgcatgcccttttaatcctttgatgctagaaatgtcccaactatcagtttttgatcagtagtcaatgtcattttttcaagcctttgccataattcggcatcagagttcaaagaaggtataat

SEQ ID NO: 23496 - DNA, 312 bp, Zea Mays
ttatttttgacctccaaaatagcaaatctaacacgatggcatgctgaaggtcgaaaaaaagatggtttacttagacatccagcagattgacccctgtggaagaactttgacaacaaacatccagagtttgctgcagatagccgtaatattcgccttgcatttgcaactgatggctttaatccatttaggtccatgaatgtcagctatagtgtttggcctggtatttgtattccgtacaactttccaccttcaatgtgcatgaagcaatcaaatttcatcctttctttgttgattcctggtcgaaatgaactg

SEQ ID NO: 23497 - DNA, 572 bp, Zea Mays
acaacccagcttgcctggcgcggaagttacggggaagagattcgtgttcgttacagagggagaagacggatttgtggacatggccccatgtttcaggcgaacccgcggcaaaagaggccccacatgtgaaccagagtccgcgcgcagagctcaggcggagaccgcggtattcgcttgagtttgttatggagtccgttttgctgtacaggagcccgccgcgttgattggagatgacgattctggacagtgggccccacacgtaagccacatacgtgaacgacagtgagcgccatgggctgagcggggagagaagctgagttgggccggccgaagaggaaaacggcccagccgggatttctctattttctctttttcctttctatatttttctcccatttgtaatccctccttttaaattcaattcaactcatgttatgaactcccaagttttcaaatatccaacacacccttgaagaaaatataacatctattatttccaatattttatttattgttttccttgtcatttatttagggggaaataaatgatttcctttaaattcccatcattt

SEQ ID NO: 23498 - DNA, 567 bp, Zea Mays
ctcgaaccggtaatggatggtgaccactggatcaatatccgactgcccggattttatgaagtctgaactgttctcacccctttgatctatgatctacggaagagaagcaccctggccgatctgttagttagccaccagatctaagccgctcgttccccgatcaacgctccagctctcatccacttcccttgacactgcccaagcggcgccgccaagccctcacggcggcaacttcgccggcgtgagacgactccgtgattctgcccccaaccaataccccgaacggcgctaggcggtgaggagatcatggtaagacacaccttaccgatgcttagtataccgacgaagcagaccacgcatcaaggcggatccgcggcggagctgatacgacgacggcaaattcgcgtcgatcacatgacccagcaccagtagtttctatcgctcttcttccttacatcaccttgaagcacccccgcacggatcggacctcgaacgatggcgcacattgggttttccccacggcggcccatggcggcaaaaagatggagcctgacaaagtagccaccc

SEQ ID NO: 23499 - DNA, 432 bp, Zea Mays
ggagcatatccgctacctatgtttcaatttcatctttaacagctggggcatatctgtatggtcgaatgaatactggttgagctcctggaatcaggggtattgtgtgatcacaagaatgggagggtggcaggcccttaggttcttcaaatactgtttgatgtttgtgcaacactgaagaaattatgggatccaggtcagctgagaagggagcactattatccaactgaaggagacacaccacgtgcagcatatccaattgatctgataggggcaacacaccttgcagcacaatgtgtttcccttggtatggcatagaaatccatttgtccttctagtggatcttcatagggctgtaagcttccaactagtccattccgagcaccacatcatacgcagccaatggaaaaattcgtaaatccgtcttgaatgaat

SEQ ID NO: 23500 - DNA, 1065 bp, Zea Mays
gtcttcgtcgaacagccgccggggttcgtgctaaagggccaagaagggaaggtcctgcgcctcgtcaaggcgctgtacggactccgtcaagctcctcgcgcctggtacgccaaactggacagctccctgctggaacttgggttccaacgcagcagctccgagcatgctgtgtacttccgcggtgctggcggacatcgcctcgtcgtgggagtgtacgtcgacgacctggtgatcaccggcggcacccaagacgacatcgacaagttcaaggtccagatgaagggcatattccacatgagcgacctggggctgctccactactacctcggtctggaggtgaaccagactagggacggcatcacgctcgggcagagggcgtacgcggcgaagatattggagaacggcggcctagctgagtgcaatcccagctgcatccccatggagccgcgcctcaagttgagcaaggcgagcacggctcccgccgtcgatccaacagcgtataggagcatcgtcggctcgctccggtacctggtgaacacaaggccggacctagcattctcggtgggctacgtgagccgcttcatggagaagcccaccaccgagcatctggcggccgtgaagaaggtgctgcgctacatcgccggcacgctagactacgactgctactacaccaggaaaaaggagggtcagctcgtcgggtttagtgatagcgatcacgccggcgacgtcgacacgcgcaagagtacatcaggcactctgttcttcctcggcgacaatgcgatcacctggcagagccagaagcaaaaggtggtcgccctcagctcctgcgaagctgagtacatcgcgggcacagcagctgcctgccaaggcacttggctcacacgtctcctgtcagagctgagaggcaagaaggagggtgcgatcacgatctttatcgacaaccagtccgccatccagctcagtaagaaccctgtttttcacgaacgcagcaaacatatagacaccagatatcacttcattcgtgagtgcgtcgaggaaggcagggtgaacgtcgtctccatcgac

SEQ ID NO: 23501 - DNA, 409 bp, Zea Mays
aactctttttaccgcattgactatcattcagagttcatccaaggtgctttcataccaccaaagatccaagtataacaatagttggaatattgggctaaacaaatgactggtttggcaacacaaactgttgaaaatggatcaaaatgctccgagttgtcacattggctacacaatcacataacatccgagaccgatgactggaatttagcactttgaagtattgaatccaatcaagaagcgctgcaagcattggtgatctctaaaccaatagggtccactgactcgaatgatgcaccaaggagactcaataagagactgcaaggcgatattaacaaacactatacagccgcaggtttagctcattgatgcaaaagaacgcataagctcaagccaggctaataagggacag

SEQ ID NO: 23502 - DNA, 659 bp, Zea Mays
tatttatgtaggcagttggaaaacgtaccaaatactttgtagtggcgacgctaccctgaggcgtcaaaggtgtcagaggtgaagacaaggtgtctgtcttgtgaggagtgtcttccatgttgctgcttgcaccttgtgagaacataagcgaagactggtgtgaccctgcggttgatgttgaaatgtcaacattttgattgcctagttcctttatagtagcattgacctggaagcagacgtttccagagttgtccatgagtgaagaccggtttcttgaggtaaagcccaaccctggacagggtttgtccttggctcttattaattgtcattgcgtagcatactcgtactgggaattgccttctctagagtgtgaacggccattttacatcagtagtattgagggttattcttggtattaaaaccgcagcacccacattagagcctgtgagagcaatacatctcaatatacgttgtccaggctcggtaacgagtagtcgtgtaccattgcagaggcccatgctttgattaaggtttctcaacaacatcattatgacaccgtttttcagcataagctcgtgagatgggaaattgtttgcattaatcgaatttaagaattcagtaggatagagcacatcgaaatctggtattctttctgatga

SEQ ID NO: 23503 - DNA, 867 bp, Zea Mays
gggttgtgatcgcgtgtaggctgctggctgcatgtttgacgaggatgaagaggaagaagaagtcccgctgatccgcaagaacagccggcactatagaggcagcgagggcggtagtgatattccttctctagctctatcggcacttgtcagtcttcaggggctttcaatatcagattttgatcaagtattcgacgaggtcatccccgaagacatgctttagagcctcctgaagatgatatcctagccgtctgttcggaggttccagatggtgggcttccgttgcttgactccgccgggcaaaaggtaacccgagtggtgtcccatgcatcgtcgaccttggagggcagtcttccatgcagagatgctgatctgagtcatccgactcccataggggtggatgaaaggcattattcatccttagaggcgactactacagaagacccagcccctaagggtggcactagcggccacccaccctccaagggtgttgctggtagcgatccagctcttgtgtgtagtgcaaactatgatccagccctcgagggtgttcaggtgtgctctctttccaatgcctccatggatgtccatgtcgggttgtccccacctcggttcgacggagcggcgacagcacgtgtttccacagctttaactggacaagttgccttagaggtcggcgagctagatgcaaggagcctactttctgccgatggggctgaggtcaccctggatggtgctcttcagattgttccttctgaccttccctcgtcaagctatgcctcagctcctcctgccctgggtctaccactgttcctttccaatcttcaggtgagtcggtctctttctctatgttgtacattttagcgaatt

SEQ ID NO: 23504 - DNA, 528 bp, Zea Mays
tggaactggagcagtttcttgcgaggctcgtataatacgcccatttcaagtgatgtgcaagcctgttaccacactaccatcacatagaagtagaacagtagaacattcgtaagccatgttgctccaggaattaaaatcaatggggcactggtagcgcattttgcaaaactctggggtatcaggcaaaaaacagtcaagtactctcaagtcattgaaaacactgaaatgttcggctagtcctaaaacaagcccctagaatatccctaacaacaatgcacgtacagaagcagagcagaaggtaacagccgcatgcgcacagaacaaacaaaatacgacgccgccgtgactgcactttgcagaactagtcgacaaaattgtgctgttagcctagaaacgtggctaagcgtactgaaacccacggtcctaggaggaggttccaaagcacacaacatctagaaccgcgtccacggtcgtcgacctccccccacccagtcaataacagaatcgccgcaacggcacacggaaatc

SEQ ID NO: 23505 - DNA, 377 bp, Zea Mays
gttttaacatcttaaaagatttattatcatccctttgaatatagatataaaaaaaatcgaaggctagagcgactaatcggaattgtcttgacccttctcctacgtgccgtacctgcctactagcagcaactaatgctctgacagaaacgtcattcttggcgaagttcatcgtgcaggcaccccgcacccatgccatgccacaaccttcaacaagatagaagttggcgtgcaacttcagtgaagaatcccagcagagcagacaaaagaaacaagcgtgggattttggaacggcgcagcatagcccagcacagcacagcccctctctttgcgtaaaagaaaaacagcaaatagatcatgttagtagctgggagccggga

SEQ ID NO: 23506 - DNA, 563 bp, Zea Mays
aatgagatttgggcactcggctcggaaacgatcgctcgaaacggggaatctggtgaaattaaagcctggaatatcggatgggcgtgaaatttggcgaatatgttactggaggtgttgggaagatgcctgaaaaatttgggttcaattggagcatttttggctggtttgggcatttcaccgagcatgtggtgtgcgaggatttagggttacggtgaaacggctatttaaggctgtgaaaccctccctaaggagccgagaacctacaagaatgttcaaggcacacagaggaacacataccacaacttggtttcacaggatttcacaagaatttgaaattgacacaaaggggtggaagaggggggcttcactggtggcaggagcacagagagaaagggggaaagagagagaaggggattctcaccagagatggaaggggagatgcacttggacgccgccggtgaagagatcgccggagaggaggggtggtcgccggcgaggaagagatcgcgagaccgagagagaggggcagagaacagagaagtgaaatgccaggcctcgggcgc

SEQ ID NO: 23507 - DNA, 500 bp, Zea Mays
tgacaggttttatttcagacttagtctatggctgattgagacctgaatttcagataaaagtgtcaagtttggagctccttggtggtcaatccctttgtttttaggctataatttctatagcaaacttggagaccaatgttgggggagtaatccctagtgagggacatacccttgaaactgcttagaaatgagagaaaacactgcacaaagttgtgctgtcagataaaagagtattgactgttgtgcagtagcctaagtctgaaatatgtgtgtctggttaaactttggagctttgtggtgcttgatctatatggttttggactgaagttattgtgaaaagtttgaataccatatgttagtgaataagtttctttaagtgtgttaggcgtgaccctacacaaaaagtggtgtaaatactgcccaaagtgggactgtcagtcacacaaactgaatttcattcagtccaatgaaaactgaatttcagtgcaatttgttgaact

SEQ ID NO: 23508 - DNA, 869 bp, Zea Mays
ccttaaccggctcactgccgccatcaagcaacatgcaaggaaagcctccccatcgaccctagtggccatcatcgaccaccaaccaatgttcgtccttgacctgctcacgaacaactcaagccacgcctcgatagagcccaactacgacatagaaaaggcaatgggaagtgcctgtttcatggagactccaccatgaaacgacaatggtggggagacaaggaatcccctaaccgggaagaggagtaccaacacaccagcgttaggcatgcatcctcaccggtgaggcctctcttcggcaacaggaggaggagctcgataccctcgtccaaaagctcgatcgggtttacagcgacatcaagcagaaacgccttgaagccgagaaacttcagacgaggaaggtatgtgaccgggtccccgagagtagcgacggggcgcaatacttcttcaaccccggacagaacatggccacaacagccatgatgctttggtccatccccaagcaagacgaaccagaggagagggcgatgtactgaaacctccgcaacttagtagagaaagtcgtgatgcagcaagccgaaattgatcggtagttgcccaccggcacagatagacatggcccgcacaaaacctcatcctagagcaggggcacaaccctcccaatccacgaaaatgtgtgtcctcctaaatgattgcctcagggacatccgcggcgcctagcacatcatcgataaccggcgtcgggagcaagaagaggtcaaccaaccacacgaaaggaggcatgagcgtagccctagtccccctgggtcggggccatgcacctttggacgctttatccgcaaggtgcagttccttgcaaaggtaagagcgac

SEQ ID NO: 23509 - DNA, 290 bp, Zea Mays
ggggagcacaggatagtggacgtgccggcaggagcgcgatggcacggtggagaggcggcgatcaggtggatcggcgcggtagagggatgcgcagcggaagagacacaggatgagtccggtctcgcgataccatgaaagcggaagaaagttcacgcgatatcacttccattggccatcaggcatacatataggagagatacaatcgagggagagattacaggagagattgattgcatctgcctaatctagacttgccaatcgcgctgacaacgacagcgcgtgatgcacgg

SEQ ID NO: 23510 - DNA, 383 bp, Zea Mays
gatattttggaatggaaatcacccacaacagtgcatcaagttcggagtttccttggattggctggttattaccgcagatttattccagatttctccaaaattgttaaacccattaccgggttattgaagaatgattctaagtttgactggtcctctaagtgtaacgaggcctttgaacaactaaaggtattgttgaccactgcaccggttttggcccaaccggatattgaaaaacgatttgatgtgtattgtgacgcgttagacagtgaacttggatgtgtcctgatgcaagaaggacgagtaatagcctatgcttcaaggtagctgtgccggcatgaagaacattatcccacacatgatttggaactagatgcagtagttca

SEQ ID NO: 23511 - DNA, 854 bp, Zea Mays
atttggaggaactcaatgggcttaatgatgtcatcatactctctaaaaggtggaggtaaaacttttgcgaccatgccgatcgtcgtagtgttagggtgagcgtcatacaatcggcatcgaaggggtggaccatctgaacagcctgtcctggaggtggcactaattctagagggcgcgactgctctcgactccctcatcacgatggcgatcgtgcaagtcatggacaccatgcaactattggagtctatggtgaggcacatgaggcaacgactagggaggcagaactttatgccatgactctagaacttgggggtatgacctcgatgacgaacctaaagagaccatcatagacacatgggagcatgtggttagcacattgtgctcggttgtagccttcttagagcaaggctacacaggctaagagggtgcaaggttaatcccggcagcaactatggacctaatgacgtcctattgtcactgttcagtgatcccttctcgagtgtagggcactggatgattgcggagaagggcttctgggatgtcaagaggccatatggtgtcattggtgctgaacttgaggtgccgacgagcatgtcgagatgccgctaagtggaaccttaatgcttggagattgcctcaccatacatgtcctcacacaaagatggaggagtggcatgcgccgaagtgtcaccatcccacaacacttagggaggcaggtgtcatgacaactgcatcgcttcttgaccataatgtcgtccatcatattttatacgatcgatggaagccttatctaaacagtcaataccacatggttgttttgagtagagacagatactggtgctatttaatatgtg

SEQ ID NO: 23512 - DNA, 412 bp, Zea Mays
ctattatccatgcaacaggacaaaatggaggaccaacaccaaatataggaggagcacaaaatgagagagcgaatggaggaggagcattgtatgatccatatggtggagcattagatggataccgatatggtgatatgagtatggaggacgatagggataagtgaatggttaaggaggagaattgtagaagcgatgatggtatgagtttcaatggttggagtatcatttgtagaattttcattaggaagaggacgagcttgattggtagggataaggaggaggaggatatggtatgaaaatgaaggttgcagacatagaaaatggtgacaggcagaaacatcgtcctggcgataatgtatgagagaaaggtcatggaagaagacttgccccacatcggtaggtgtaatacaac

SEQ ID NO: 23513 - DNA, 1152 bp, Zea Mays
cggcaacgtgagcagtgccaagagctactctgtcgtgagggtgacgaggagggtctgaagtacaatagcacatactgtgaagcctcatcgatgactcagggaaaccaaaatgctctctgatctaagaagcatgcagagtaacatcctaacgctcaaacctaaacctcatatagtgatgatctgggtctatcaaaactatggcataaaagactctgacccactcctcaacatatctgccactgaaggtcaggagagagtataaacctggcagataggtgatatggccctcggactctacatcggccgctgaatagaaagaagtgagatccaaatgccggtgagccctcagagcgatctgagcagacagttgtgccctaaagaaggaatcctgggtcctggtgctaaatagtggtgcaaccgctgggtccctctaagctggcggccacgagtccatgagcatgtgtctgaactgacgtacctcgacagctatggctctctgaagatcaagcagtcgaggatcaacagcaagtggtcacacctcagtctcgtcacgctcccggaagcaaggtggaggaataggtggagcggaagcgggaacgggagcattagaagctggagtggtggaggtggtggtcacatcaggtgtggtggaaggctcgagagcggcaagagctggagaagtgggaggtggagtggtgactggttctgagggagtggaccgagcagtggaggagcgagtccgagacgagaggcgacagactcggaaggcgatctgatcggaggaaatactcatctaacctccctgctctgtatgatatgtcgttgctgctgtggcaactgctgcattggtggctttgtccaaacatctcttcttcttgcccccttgctgctcaaggtagatagccttgcccttatcctatttgaaggggcaaggagggttctggtcatctcctcccctgacggtgtgacattcttcgtccacaccatcctgaactggctactaacacactgcaagataatgagaaaaggtaagcgagagcagtagagcagtagttaaggcctgatttagaatgaaatagctacctaggaatgtctcgagagagagaagaaccaggcaggacaggagatgcgcatgcgggcacgcggaatcac

SEQ ID NO: 23514 - DNA, 1132 bp, Zea Mays
gtccggggcttgcactcgaacacggagttcggtctccgcctcccacggtatcggccgccgcgtgcatctatatatattcggccaccatgcccgcctaacgccttaatcacgctatgctctctcagtccacaaagtcaccgctcaatttcctacctgcccagtgcccacctctcgagcgatcagcgcctctccaatggcgctcaccaagccacgggcggcgaccgatgacgaccaggccgagcgggagtatttataaatggtaacggttagaggtccggggcttgcactcgaacacggagttcggtctccgcctcccacggtaccgacccccgcatccgccgcgtgcatctatatatattcggccatcgtgtccgcctaacgcctcaatcacgccacgctctctaagtccacaaagtcaccgctcgatttcctacctgcctagtgcccacctctcgagcgatcagcgcctctccatggcgctcaccaagccaccggcggcgaccgatgacgaccaagccgagcgggagtatttataaatggtaacggttagaggtctggggcttgcactcgaacacggagtccggtctccgcctcccacggtaccggcccccgcatccgccgcgtgcatctagatatattcggccatcgtgccgcctaacgcctcaatcactccacgctctctcagtccacaaagtcaccgctcgatttcctacctgcctagtgtccacctctcgagcgatcagtgcctctccatggcgctcaccaagccaccggcggtgaccgatgacgaccagaccgagcgggagtatttataaatggtaacggtaggtctggggcttgcactcgaacacggagtccagtctccgccttctacggtaccggcccccgcctccgcctcgtgcatctatatatattcggccatcgtgcctacctaacgcctcaatcacgccaccgctctctcagtccacaaaatcaccgctcgatttcctacctgcctagtgcccacctctcgagcgatcgacgcctctccatggcgctcaccaagccaccgacggcgaccgatgacgaccaggccgaacggaagtacctcacatcctgcctcataatgctctcgtgcggcctccgcgacggt

SEQ ID NO: 23515 - DNA, 601 bp, Zea Mays
ctccgccctttgggtgtataagtaccagctctagtggcgtcccgtacccatcgacttggagctggacgagctctggcgagggtcccgccccgcgccaccattgccgttgccgaaagggccgccgccgctctgtattttatggggaagtcacgacgccgccgcaaccggaatcgagtagaaccatcacatcgccacagggctatccatgacgcggtccgacgagttatgatcagctcggctccaatttgcggtatgctaaaccccccctgcccatactcgccatctatctgcaacaccgtaggctatccgggggaaaactagcgacgtgagtagggtaggaggcccatcgtcgatgtgcggtatgttgccggaggccatcaccgatggacctcaaccagggcaccagtgcgatgttcaacggcgggacgtcatggccaaattgggggcgccgccttcttgtgggctgaaggtgggagatgacgtgccagccgttggtttcctcatgaacgcgtaggattagatctgggtagcccttcgcccgtgaccgttagatgtcgatctgatggattggggtgggcctctagtatttaaaatgtggagc

SEQ ID NO: 23516 - DNA, 658 bp, Zea Mays
ccagtacagcatctggtctacttcatcagtgaagttctagggccctctaaaaagaagtatcctcaagttcaaaaattgttgtacgcagtacttctaactgctcgtaagctccgtcactactttgacgaccacaaagtcatagtagtcaccgggtttccaataggggatattcttcacaacaaagaagctattggaagaatagccaagtgggcctgcgagctgggagctcacgacatcgagttttgacatcgcacaacaataaagactcaagcactggttgacttcgtatcagaatggattgagcaacaagtacctgacaacccggaggctacagaagtatggcgaatgtatttcgatggctcactgaaactgcagggagcaggtgcaggaatcctcttcattgcccctgcaggtgaacaactcaagtatgctcttcagttatcattctcagcatcgaataatgcggcagaatatgaggctctgatacatgggttgaacattgccatatcactgggcatcaagagattgatggtatacgaagattcactggtggtcataagtcagataaataaagactgggattgctcgactgattctatgggcaagtactgtacaaccgtccacaaattagaagacaaatttgaagggctagaatttc

SEQ ID NO: 23517 - DNA, 1157 bp, Zea Mays
cggtgagctagcagaccggccaaacggagcaacgaccggcgttcccgagcggtggacaccaaagcagacctaccccgagcagttcccctaagttaattgcacagttggtgagctatcaagctctgtccacgtgaaccgagggggtggcagacagatgagtgcgttcccggtgatccctggtggtccagttcaattaaaggggtcgaggggcatcaccagcatgcaaagatgctagaacaacaacagggagggtatgagcagaactatggagggctggccacggcgagcttggttctacggtggcggaaacttgatttgggggaaacaagaaatttgggcacactggtgatcgattgctagcaattcttggtggctgggtagttgatgaccttgcggaactggtggagggctcaatttatagggagagcgagcggtgatgatcaattcggccgagccgtgcttgctgccggagatgaagaagaaccctggcgcagtgaattcgtgtccaccatagtggcaacctccccggcgacgatgggacagctctagggagtcacggcgacgcggtggaaaggcagagccacacggcacaaggccgagaggcggcggtcaccggtgaagttatcggagtccgctgcggtgaacatggtactgtggccggagttgtttaatggccggagtctatccacggcgaggatatttacgcgaccccaagtgctatccggttaccagtgagtgcgaatcttaacggcggcgacgatcccggcgcgaagtcatcggcggcgaggggagcggttgatctgatctgtccaggcactgtaccatggcaatgcttaatcagtgtgtctgacagccaagatttagggccagattcctcccaattttctatggaaacatccccaagtctctgcatcaaagttgtagtgctacataccagctacaaatttgttatgggaatcatgctcaaacttgcattggatcatgtttaaatctgagccctaactccatgccattccactgttaatctgaatttcagatttcaagcagtctgacagtccaacttcaggctcatttatctcaaaattcttcatggtaccaaggcatgagttctatagcaaagttattcttcttccatagatctacaatattgatgtggt

SEQ ID NO: 23518 - DNA, 1104 bp, Zea Mays
acagggtctaactcgtaagattccatagactcagtccacagctacggtggacggcgggttgtttaccaacaagcttagggactctttaagaaaatgtgctgcgaaggggtatcggtggagatgagtcgttggattagatctgtacggtccacaacagatcaagggaaggttggactggtattagatctaagccgcaggatcaagatcaacggctaggatcctataataccgggattcattcacatacctcggattataaacttacgaccgggatcttgttgaatgaagaggtacgcagaatctaatccactctttccgccgagagatctacggtccacgccccaactcttcggatcaaatctcaaccattgccatcaagaccaacggtcgagtgcctgtcttctacctaccgacggctaaacacagcggcgtggccccgcccggtggtgcccctcgctggtgagccataccaggcgccccgatgctccaaagtccaacccgtacgaacaacacatgaatatgaatagcgcgaatgcaagagaggcttcattacctcgattaacacgacgttgcccgtacccgccgagcacagaggtggtcggtatttggtgaagaatttcggcttcaacggtggtcaatccttccttccccggccacgagcacctcccaagaaacacaaagaatctcctaaacccacagtggactccaggacgccggttgggaatgaggtcggtgctggcgggcattttctgctcctaatcctctcccctcgatttccgacgtgtatgcactctcctcatgaactggcgagacctgtgatggtgcgtcaccaggtcttcggcggtagggacactactggtgattccaggaagggaccgatgatgcccaccattatagccgcgagggagggtggacgggagggcgacggaatcggatctcgcccggtttctcgcggcggctggtactcgtatttatacggctgcgactaggagggtccagcggagaacgataagtccgctgcatgccccggctccggtagaatagggccattccgcgcgtgcctgttgaagtgcgtgagcgcgactagggcatggcctgaacgcg

SEQ ID NO: 23519 - DNA, 405 bp, Zea Mays
gaagtaggattcccaatcagctgtacaaaagaccctgtcaagctttacaagcattgggttattctgctggtttgactaggtgaactttcagccatgtaaaggaatttcacgaagggcaaggtcatttatcgctgtcctaaaacgacacatcattgccctgttgaggttgttgtttttgtcagaagttttatagatcagattaaaatctcctgctaccacccaagaaccagtacatgctctcctgacctcccttagttcctggaggaaaagaattttgtcagcatgtccctgaggcccatttacacatgttaaccaccagggctgtccatcctctctgcaaaattggacagagacacgatggctgtcaattctctgtatactacctcatgcattgttggaaggaag

SEQ ID NO: 23520 - DNA, 735 bp, Zea Mays
gggaactgttaaaagaatatgtagacaaatctattaaaaaatggacgctttcatataagaaacctactgccctagttttccctcatttgaatccaatacggaaccacctgcgccaaacacatcggctacaaaacccttggcctagccatcgtatggtatgccaatgcacacgttcgtgtcaccatcacaaccgctgccgccaggcatgctactagcattggacacaatcggaccgtccgcgagtcatctcggacagtccgaccctacacaagcccgcatgcagatcacttaggtagcgtcatacacaaccgaaccatctgggtgtaccccagatcgttcggcctggtcgtggaccgtccggccccttatgccagatcgtctggatacgtcacagaccgtacgacatgtttcaacggaccattcgaccttgcgcgaatccgcgtgcagaccacccaagtcacatcgcacatgaccagactatccgagtacaacctcggacaattcggccaagtcgtggaccatcaggcccctcacgtcgtactgtccgagtacggaactacctaggcaacaccatatacgaccggatagtctagatatgcactcgaaccgttcggcccagtcgtggactgtcaggccccttacatcggtccgtccgagtatgcgtacacaaaaccaggagctgcacaatatgcatagttctcgcacccatcgcagcaacactacagtgccccaccg

SEQ ID NO: 23521 - DNA, 685 bp, Zea Mays
cacatgccctcagcatgtcttccaaaatttgatttaccctttcggtctggccatctgtttgaggatggtatgctgagcctcgtattacatgggtcccaagtgattcttccagctgttcctaaaagcgtgccacaaacagtgctcccctgtcagaaacaatggtcttcgaaatgccatgcaagcgcacgatttgatcaacatagatttctgcatatttttctgtcttatgggtagtatgcactggtaggaaatgagcggtcttggttaatctatccacaatgacccaaatggaatcatggtgccgagaggtattgggcaatcccatgataaagtccatggaaatgtcctcccatttccaagatggtatgggaaggggttgcaaagggcctgctgtcttcaaatgattagccttgatcctttggcaagtgtcacacttggatatgtacttggcaatttccctcttcattctggtccaccaatataaggatctgagatcatgatacatctttgtactgcccgggtgcatggagaattttgaaaggtgagcttcatccaatatcttctttctaagctcagggtccttgggaacaaccaatcgatctccaaaccataggattcctttgctgtcctgccggaagcatttgtacttttctgctttttgcttgatcatttccttgataacctg

SEQ ID NO: 23522 - DNA, 318 bp, Zea Mays
ttatatactcgaccgtggggtgttacatgcgggtatgataacaatgtacacctaagtaatagtgaaccgactgaactcatcttcctataatcatgccgacttatcctcatttagttctgacgtctgagggtgctgtgcgggagaattgggtcaatgctacggatattgcttaaatccaatgagccgtctgggcccgagtccatccgatcttgtgtcgatccattctgtcagcagttcctcccctagcccacgaagggatggccttgcgaaataatgggcccaaagcctttcgcgaggccttctagccttctagtgaac

SEQ ID NO: 23523 - DNA, 480 bp, Zea Mays
cgaggatgaagaggaggaagaagaagaaatcccgttgatccgcaagaacagccgtttctacagaggtagcgcggggggtagcgatattccctctccagctctgtcggcactcgtcagtcttcgggggctttcgatatcagattttgatcaagcactggaagaagtcattcctgaagacatattatcggagcctcctgaagatgataccccagccaaatgtttagaggtcccagatggtgggcttccattgattggttctaccgggcaagaagtaacccgagtggtgtctcgtgcatcgtcgactttggagggcagtctcccatgcaaagacactgatgtgagttatccaactcccatagaggtgactgaggggccttcaacttcagaagcggctgctgcagaagacccagcccctgagggtggcgctggcagcaacccagcccccgagggtgttgctggtagtgatccagcccttgtggg

SEQ ID NO: 23524 - DNA, 604 bp, Zea Mays
atcatattgccataggaatctgggagaaaatcaagctccaagatgctctgtcaggtcgactgaatggggatcgccatggtacagtaagttctaaactgaagaagatcccgactcaacccctgcttgtcgccggtggtccgtcaccgttgatcgattgctcgccgtgattcgtgcgttgtggccatcagataagccacccaccccttgctccagtattcttgtttccctccggccgccgcgcgtcatcgcctaaattcgtggccactgctcgagggctctataaattgacctcgcccatagctccgtcaggtagtcaagcaactcctacatcaattcgtgccctgaattatccacccgagagcctcagtttaggattttcccccaaatccaccaagaacaccgtgcggtgtgtgctccccgtggtcagcctattccaggtgaattcatactcctctattgattgttctagcatccctaggtctcctaaaactcctcgaaccctttaattgtactggactaccatgaatcaccgagaacgcgctcatcggtctgcaatgtccacggtcgccgtggctagggcaaaccatttggccatagatgaaat

SEQ ID NO: 23525 - DNA, 593 bp, Zea Mays
acacgcaggcgttgctccagtccccctcccctctcccttccaggttcttgcaggtaccaccgcgccgccctcccgtcgccaatcccactgcttagtttgcgtgtccaatgtcgcgtggcgagacttggaggcgactcactctaagctgtcccgtttcagtttgccgagggccaaggggttctgctcaatgtcaatacccagaaccagatcgaggtattttttttaaaaaataataaatatatttgattgccgctgtcgattgttaatctggaagggatcttgtcatcttgtgtgcaggtttgggacattgatgcgaaaaaactctgttatctgcacccggctgaaaaggcgatcactgcattctctgtgctgcagaagagcttctacatgtgagtcatagacttatagttgttgccgactctgagtcggtgaactccaaaggatttagtgctctaatgtgaattctgtgcctggcagatatgttggagatagttctggaagtgtgtccccattgaagcttgatttggctcagagatgtctagctgacctgccgtactggattccttttactgaatcttatggtatgatgctgc

SEQ ID NO: 23526 - DNA, 3020 bp, Zea Mays
tgatttggcgggggtaccagatatcaatggcgatgcgctgcacgcgagcctggggctgcctcccgcgctcgccgtcgacacagcgcgtgtcgggaagctccagatcacggtaagtaagatgtcgccactctcccgctcgtagctctctgtattttagctgccttgctgtttttccacacggggagtcggggattatgggccgcattggtggcagattcttgcccatgctgcagtcgttttgctaacgtttgttatgttccggtgaattttgttttactctagttgcacttcgtgggcagtagaagcagtaattgcgttggacttgtgactgactgtcgtagtgatggattatcctctcatctatgcaaattagagtaatgtgatggttctacgaagttattctttgtatttagttccgcatccatgttacatttgctgcacttgtgttaatttttgacctgtttttagaatcatggaatggaatttacagttagaaaggaggtgtttggtattttttttctagtttagatgttttacagttatgtagtggccagggggtcgcctcggctagattttgacacttggtgctcaatttgcaatccttaggcgtcacagtgtggttaataaccttgcttttgttagttttggtaacggatttcttctgttcaccactgcagttaccatctctatcaaatgtgcaagtagagccaattgaggtgaacattgacaagctcgatctcgtgcttgtagagaaggacgattctgaaaatctttccagccctagcaggtgcatttcatgtctttatgttgcgatttaaaactaccgtgtgagcattctgtaatcgtacttctatctattacctttttagcactgcatcatctccatcagcaactaagagcagtggatatggttacgctgacaaggtatgtttccttgcgctaaatgtttagcacacacgctttccacatatttatgcatgtacaatgtcctgatgcttgctctgtgataactgattactggaatgccagctccatgatagctgaaattcaacttacccgttttctctgtgattatacctcttctctgatattctgccattttactattatttatgttttagactatatagatactttgagtaatatatacacttgcaagaactgaacttaaccttatatgtcgggcttagattgcagacggaatgacagtgcaagtagggattgttaacctgctactggaaacacatggaggggctcaccgtcaaggggatgcaacatggtatctacctatatttcagcgatttagctcattttttacttttattagtcctttgcatatctaggttcttgtttgtttgtcttaaacttatcccaccaagtatagttcgctgcaatgtttgtgcttggaaaaatgaatgctaatctcttctaacttcaggtcaccgccactagcagcaatcacattccgtgatcttgtattgtacacaacaaatgaaaaatggcaggtattcattctgattgcaaaactacaattaatttagtaaacaatttatatggcattgcctgatttgagtgccatgtttacaggtagtaaacttgaaagaagcaagagatttctccaacaacaaagggttcatttatgtttttaaggtatgtctttaaggtttgaagctcctgacttgcttccagaagattaatacctgcttttactgtttcgtggttattgcaaactaagactgtcaagctcaaagaatttatgatctcacatatatctattaaaatgcacagaaactggagtggcaatcactgtcagttgatctgttgcctcatcctgatatgttcgccgatgcaagatttaactcttctagtagtcaagacgacaaaagagatgatgatggtgcaaaacgaatgttttttggtggtgaaagatttttggaaggaatatctggagaggctaacgttagtggtttgagttttatttttataacatgttgtgtaacttattaacttgttcatttttgctgaacttcctttttcctgggtttcttggctcacactttgctttgaacgtcagatcacggtccagcggacagaacagaataatccacttgggcttgaggttcagctacatattacagaagctgtctgtcctgccttaagtgaacctggtaaccagttcctatctatgaagcttgaccattcggttcaatacttcaattactatttgcaaaaaattgaacttaaactaatatttttgacaggcttacgggcctttcttcgatttatgactggggtatctgtgtgcctaaacaggggagatatagatccaaaagctcaacaggtttacttctgtgtgcttttgatattgtgttgcctgcagtaagatagattatgtctatatccttattccattttctttccttattactctacctgtctgccagcttgcagaagcagcaggatcttcattggtgtccattatcgtagatcacatattcctctgcattaaagatactggttagtagtagtgccaaacaatttcagatatcaacctttttgtcctgctacggtgacttgtttgttaaatcattggtgcaaacagagtttcaacttgaacttctcatgcagtctttgttcttctcacgggtaattttctccaagacttcaactgctgttatactttacagtatgatttgttcactgttagtacagtccgctgatgatatgcttgatttagaatgcatgacctcatagaggatttaattacaagtttttctttatcttaaaggcaagcatttcagacggcgaatgctcaaagaacttatcttgcatcaaggtcggcgggatgtttctgaggtactatatctgtccttgttactcaagactacacaagtcctgatggttgtcattcacttacaaattgaggcattgtgacccctcacgcctaaagtattgaatggcattagaccaatattattttggttaaggcataactgaggttcctgacggttctgaatata

SEQ ID NO: 23527 - DNA, 594 bp, Zea Mays
ctggggtcgcctgacagtctcgtattatttatggcggacggtgcgggcaacgtggggcccaagtgccatcattcaggctataccgacccctggccttcgtagctaggggcttggcatggttcttcgtgttgtgccctgctagatgtctgcactttcaggcctagtccatgtaggtcatgagtgcgtcgcaggtcaggggggtgtgtgggccataaacgcgttgcagtccaaggggttcataagtcatgagtgctctgtggatcgaggggctcataagctatgagtgggaggcggaccgacacctccactttgacttgtgctaggcacaattaatgcgaccggtcacttatgacgggtcggtctcaagctaggcgagggatccactcgagtggtttccctattagactccgccacgactgatctcaggctcgacgccacggggcttgtccagtggtggatgcctccagggtagatgctacctgtctcctccagctgaccaagctcgttgaccgatgggccctagggaccaaggatcttatcctgatagtagcccctgagcctccgaggggaaagtatctctcctctggggctttt

SEQ ID NO: 23528 - DNA, 509 bp, Zea Mays
ggagactccaccctaggcatgttaggacaatccataatcctagaaccagtgacgatagaggaaatcaaactcaagggcaccagtatagctcccaatcttcagcaacacaacaaagctccttcaggccaccagctcctagaggcagaggaggtagaagcttcggtggaagatttagctcctaaccaagaaggttgttttgcctcttctgtggagaagataagggacatccaacaaggacatgccaagtcacgatacagaagcaaaaagaaatagctgaagctgaagaacgacaaaattagccaaagtaggtcctgcatactgcttcgtgctattccccatacatccccgagtatgtgagaaaccaacaacccatgacattagttgcttcggcaagccattcgcaagctgcatggccctgctaccaccaccaccactcatggatccaacctcgtatcacaaccaacaaccagaagggcaccgccaggtacaacaacaacatgatgcacgcg

SEQ ID NO: 23529 - DNA, 352 bp, Zea Mays
caaggactacaatttggaagtgcattaccatcctggcaaagccaatgttgtggcagatgccttaagccggaaggcccagtgcaactgtgtgagtatggatgctaaaatcaccaccctgtgtgatgagttgtgcaagctgaacatagaagtcgtttcctccggtgccttgagttatatttcagtggagcccaccttacatgggcaaatagtcatggctcaaattggtgacaagggtgttcaagtcatcaaggaaatgctcgagcagaaggtagacaaatacaaatgctttcgtctggacagcaagggaattctatggtttggagaccgattggttgttcccaaggaccccgag

SEQ ID NO: 23530 - DNA, 580 bp, Zea Mays
gggaatctcgacgtcatcacgtgccaggacgatgacatgccccgtaagcagcctttggcccataccccgacgctgtttacaaccactatggcatgggcggcctctcccttaggggctcgggcgtacggacaactcctcagcctcggctctctacgggaagtcagcaggcacgaatctactgcatggttcgccatcacgtcagacgccaggacatctctctttcgaatacaagactcggcttcactgcggacgctccccttggtgtataaataggggagtggtccctccatggggcacgggaacacacagagacgaactctcgctttctccccctgtcttagatattggcacttgcctcaatcttctctagggacttggggacttcccctctcccgctgtgcttgtaaacccctactacaggcaccacggtgcgagtaatataagcctcatcctctctgctggaagtaaggccttgagtagcccgaaccaggataatcacttgtatcatctcgcacaccatctagagccggccacgcggcacatttactagttggttaaggacccatggttgtcacatccg

SEQ ID NO: 23531 - DNA, 333 bp, Zea Mays
ccactcgacgaaccgtgcccagccgtgttccctgttggcggctggggaaagcaggaaccgccaccatctgtctgcggtctctcttcacctcttccacctgctggcagatgagcaccacgaccttggcctggccacgcccaagttctccccctggactgatgccttccgcccccataaccagcacgtaattggttcgggccgctgtactggaagccttgacgcggcacacctcttccggctccaacaccactgcctcgacctccttgcgtcgcctgctgggactcatcgcgattctccatgcctggctccggaagcgccctgaccgaatccgcg

SEQ ID NO: 23532 - DNA, 819 bp, Zea Mays
tcttattgtatcagaattcatcagttcgtaaatctgcagtaatgaaatgacgcacgatgattatgaaatttgtttgcgggatatagaagtcatcccctgaattgcataggcatgagcatgttgcgccggcttaagtcgccactgactttagccgattgctccattagtagggcatagtggtcaccccgagttaagtaagcgtgagcatgttgcaccggcttaagtcgttgccgacttaagtcgattgctccgttagtagggcacagtggtcaccccgagttaagtaggcgtgagcatgttgcaccgccttaagtcattgccgacttaagtcgattgctccgttagtagggcatagtggtcaccccgagttaagtaagcgtgagcatgttgcaccggcttaagtcgttgccgacttaagtcgattgctccgttagtagggcatagtggtcaccccgagttaagtaggcgtgagcatgttgcaccgccttaagtcgttgccgacttaagtcgattgctccgttagtagggcatagtggtcaccccgagttaagtaagaatgcgagtcaatcgtaaatgaactgagtatctttgaaacctcttttttattgatgatatatttccactttacagagtacatcgtcgtcccagcagttttgaattacagctagggataaaactttctgaggtgttctatgtttcaggagttcccaacttctgtgccatccatctgagtgagacgatacgatccgggctgagtgacttctgctaccatgaagggtccttcccataagggtgataacttgtgtcgaccctcccccg

SEQ ID NO: 23533 - DNA, 441 bp, Zea Mays
gtggactggctctttactgtgacctagcgtcaggtgtagttaaggtggccgatgacttacctcgggtcggtcttggatcaggcgagggacacacttgaatggtttacttctagtttgctcggttgagtgggggtggaccagctctttactgtgtgacctagcgtcaggtgtagttaaggcggccaatgacttaccttgggtcggtctcggatcgagcgaggaacacactcgaatggtttccttctggttcgctcggttgcccctttgctactttgaacacccaacaccaggcttagtgcctcggggcttatctaggggtgggtgcttcctaggtagacgattcactgcttccttattgatgggtggccccttactgtcggaggtccttccctcgtgcgctctcccttatcggtgggccccaggggtccaaggatcttttcc

SEQ ID NO: 23534 - DNA, 699 bp, Zea Mays
gccatttgtttcccccatgtaatcgaccccaggtggatttaaggcggccgcgtgcctccttctcctaaaccttagaccatcgccgccacctttacctgttcctatgtgccgtgggaaattgtcgctggggatcgggggagaccgagggcgagaagccgtcgcggtgggccatcgaccgcattgcaaccaagctcaccaatccccatcccgatctcggtaagtgctctagcctttccgttacacccataggaacatatgtcaccgatagagagggcggatggattggcaggtagccgggaattcttcaccggagtatcacccggtcgcggaaccgcgccgtgccgtggtcggagctccccatggtccaaatagtcggtaagctagtcctatcatgcttgccttggcccctgctaagtgtagcgctcgtcggattaatgtttgcggtgctagcgcggggttgccggccatgggcgcgccgccgtgtactgcccagtcgccgctctgccggccgaggaagacgagtgggaagggaggagaattggtgtcgtagatctgcggatgtgtgggtgagcgtgagcgctagtgtcgatagatcccgacccttggatggtgatctgacggtccgtacctgataccggttcgatgaaatatggatctaatccaaggcgtccagtattgatcggatggctcaggtttaac

SEQ ID NO: 23535 - DNA, 456 bp, Zea Mays
tgatgatagcgattggttgcataggaacgagacattcaaggcagacgatgttttcacaactagagacctactgacaccaggtacatgactgttcactcaactaattttgcaaaatagctgatttcaggcgatttaacgtatacatgccttattctaggtggtgtgcaagaaactgttggtaacacgcctaaccataatttggaaagggccgcctactttagagagcggtacaaaaacttaactcccaccgagagggagtttaggcgtgaacgcgttaggttgtataataatacaccaaagcggaaagggtcaaagatagagtacataagaaaacgtagagcattgttggctgacacattgagtcaggagtccatcgccacggagtccccaacatatacccctgaggttgtacaccctgcaacaaatgcaattgaacctgatggatccacagttacc

SEQ ID NO: 23536 - DNA, 873 bp, Zea Mays
ctctggactgagcactaattacagaggacctcgggggcaaaaccagaagttttccccaaactcagacaacctgctagtggacggcgggttgattgtataaaagtgcacgggctcttttgaaaaacagtcgtagcgaaggggtacgaggagaccagagtcgttggattataatccgagggtccggattagatcttcatcacttatgaagcggtatgacacgctaaccgtaggatcaaagatcgaccgtccagatttttaaacactaagccccattcacatccgtccgatctgagatccacgtataggatgtgatttccccgaagcagtctcagggatctaatcccgaccgatcagaccgagatcgatggctcggatacactccggacgaccaggtacgctcaccaaatcccggtcgctagcttctcatccatcgcccaaccaacgccccgcgcgtttcttctccctttcagccaggaacggtggcggcgccagataccgagcggtggcgaacccgccggagctcggctccgagccaacccaacagccccgcccaaaccgaagtccctacacgcactgaggttgacatgttgagcatgcaggtagtcgacttacctgccattgaagcagtggagggagcctgaccaatgtccaacgacatcgctgttcaacctagcgacgaagcgacagagggctcactgtgaagcaattaacaagctctggagattccccgatgccacgaacagatgccataggcactacagatcatcccgaattgcgccctgaaggctatggggcagcagggcccaggttccgcgccagtgatcccctcctttcttctctctctcaacgggacagaacttcttctctctcgac

SEQ ID NO: 23537 - DNA, 290 bp, Zea Mays
aggaacgttgccaggttgagcgccatctcgccggagctttctgtgtgcctccgcgtcgtcgtgctggatctgccgccgcaggtggagggcctcctggttggcgcagagtcgaccgttgacctcccacctgagaaggtcgagctactcaaggaggcgttcgatgatctcgtcgcgccgttcgccagcttcgtcgtggagtcccccgcgggcgtgtgccgggccaggcgtacctccggcgtggtggcctcggcctcggtcgccagccccacaggtttattgtcattttcgtc

SEQ ID NO: 23538 - DNA, 461 bp, Zea Mays
cgcactccagcctactgacagccgggcctcgcccgtcggtccctcagctcgtgcgctttgtttatcaacctggcgccgacacaagggtcccactgtctagtcactgactcacgctcgttccttctcccgttccctgtcgcgtgggtccaagacatcatcccctccacgcgcacctaagctggctcaactccatctggttgtgggcccctcctggcagtggcctgaccgcttcttcccccaaacccgcatgggagcttatccatggcgcggattccgggcgccgttgggactctgacgcccaattgaggcctataagccgtgggccatacccactccttctcccccaccacttcttcgctccgaatttctagccaccatcgtgcagttagccgagacctagcagccgcacaacaaaccaagtgaccggaggtcgtgccgccggggaaaaccatctgcgcctg

SEQ ID NO: 23539 - DNA, 488 bp, Zea Mays
gtcgtcgtctcggtccgtctccctatccgtcgcgtcggccagagcggtggcttgcccgtgaatctcggcattcccggccttgtgaattgaggtggcgcggaatctcgacacgggcgggcggcgtacgtacgtggtgaatagtggatcgaagcaagccgacagaggttggtgaaggctcacatgctcacctaacgcgtgggtgcccgtggctggctgagttctcccaaagtcccagccgtggtcattctagcttcgttctcactccagagtctccaggctccaggcaggctacgctccaaacagtgagccctgccctgcccccacagagcagcaggcagcagatagatcctcgccagtttctctctctcgctcgctcacatgatcacatcgcatctccctaaacatgctcttactcttgggtatcaggagccacaggagcgtgtataaaaaggtcctggccctctaaactctgaacctccaagcacgcg

SEQ ID NO: 23540 - DNA, 382 bp, Zea Mays
catgaacgaggcaggtaagtagtaagcccataactatagtggctagctagtttcttcatatacaatagcatgcgcaacgggacactatagctggtgaaaaagggtagatgtagaagaatgttgcctgctttcagagatgcttccagaaatgcatattgtgataagattgaaattaaatggcaaaacatttttcctatctaggaatgggatgcacggggaataggagaatagagctatcgagttcaacttggttttaccggttgggacacccaagcaagtcgtgagtgatcacaacacaacagcatgctcaaaagaggctctcgtatagaaccagcaaccagaaacaacactataagcaataatgataaacacgacctaccag

SEQ ID NO: 23541 - DNA, 516 bp, Zea Mays
gttacatgctcacacttacaaaccaagggtgcatactatactcttctaatggagcaatcgacttaagtcaaagattggcttaagacgatgtaacacgctcactcttacaaacaaagggtgcacaccatgccctactaaggaagtcatatacttgaatcaagaagtggtttaactcggtgtcacgtacatgcatacaaacacacacaaaatgggtccgagcaaaaccccatcaacaagaacaaaacaaaaatccacggatgcccactatgttccccatgcacaattcatcacaatacagcaaagcaactccaaaaactcatattcaaactaaattgtcaaatacatttacaaaaaggagaagtgtctccaagtcaagcaacaattgttctactttccaagtttacaatgtatcatacaggagcatttccgagagtggaatcagccagaggaccactaagggcaggagccttagccgcagtccctgatgcagcttgaacatccacaataatatcctca

SEQ ID NO: 23542 - DNA, 706 bp, Zea Mays
caactttgaactagaaatcaaccctgatctaataagaatttggccatggttgccataacaagattgttgttggatcatcagacaacaactttgttactggccaatcaactggttgccatagaatattgagagagatttgaccctaaaccttggctgtgaggcgcactgaagaagaatttgatggtacagtgaagggatcaggtcgccagctcagcccctcgccgccggcaatcatgcgctcggattcacgtcggtgccgcgattcccgcccagctaaacacggataacgatcctctggagaaaagatctcactgtggatgatcttggagcacagtagccactctgtcgctcatccacttaccggcgacgtggccgcatgtccatcaccggtgtgccgccgttcttcgcagttatgccacgccgtcagccatcttaccacgtcgcggtcgatcgcaacacaccgtccttctattacctaaggccttgccacggggtttgccaccaatcacacgtgccagtgaactttccctcctccgaccgccgcgcgtcatcgttccaattctcggccaccgctctcgcttagtataaattgagcccgtcgtgagctccgcaagatcatcacgcaccacaccacccagtattgcctccaatcttgcaaccgagagcttgaatttcgaatttcccccaaatctgctctaacccgccg

SEQ ID NO: 23543 - DNA, 732 bp, Zea Mays
aaagcatcaaatacctgacaggcttgcaaaccttgaggcttgttgaggcgagctcagagactttatttcaccttggtgctttgacacagttgagaacttttgccatcacaaatgtgcagagggatcagtgtgccgatttgtgcactgttataatgagcatgaagcatcttgttagcttagcaattatggctataagtgaggaggaaatacttcaacttgaagaactttgtttacccccaactctttcaaagcttgaattaggagggcagctggacaagaaagcaatgccccagattgtatcatccttttcagatcttggtaacctcaccttattggccttggcattctccaaacttgatgaggactcattttcatgcctcttgacgttgcatggtctacgtgggctttgggttgataaggcttatgaagggaagaggcttcactttaatgctatgtcttttccaaatcttcgacagcttgcaatatcagatgcaccgcagctcaacagcgttgtaatcgaacgaagcgcactgcaaagccttgttcagctgacacttgtagattgtccagaactgaaggccctgcctgatggcattgagcatcttagaacacttgagaaattatatctgcgaggagcatccaaagagctcacaaagctatttcagtgcaatgaagaaacacatgagtccaatgggaatcttgagaagatcggtcatatccgaagggttactg

SEQ ID NO: 23544 - DNA, 445 bp, Zea Mays
gtgaaacggtaagcgatccccgccgtcggattaacggcatgtggccacgattagaccaaaccagtgttaacaactgagccatgcattcagagatcagcggccaggatcaacatcgacgcgaatcatccaatcgatgaggcacactctagattctaaaacccaaacatcaaccctcgcccacctgatctcacatccacggttcagatctgatcacagtagagatgccttaggttttaatcacagccctccatggctcgatcaatggcatacaccacaccacccttcgccccagtcagacacggcggtgctcgtgcacccacggtggcaccatggcaagaatcataccaaccccacaccacagccctgaactttgattcgaacgacgatacatattaaggagaagaaggtgcagcatttggggaggtgctcaccggcttttggacga

SEQ ID NO: 23545 - DNA, 926 bp, Zea Mays
cctgattacttccttcatatacaaggggaccaaatctgaagctgaatttgtggtcttcatgggaataaaatgcgcagacttagtcatgcgatccactaccacccatatagcatctctgccccgaggagaacgaggtaaacccaccacaaaatccatggtgatatgctcccatttccactccggaatttccaatagctccagtaaacctgcaggccgcttatgctcggccttcacgcgctgacatacttcacaagcggccacatacttagaaacatcaaccttcgtccgcttccaccagaagttttgcttcagatctcggtacatcttggtttcgccagggtgaacggtgtaaggcgttttatgagcttctctcaatatatccgtcttcacctctgatttctaaggcacacaaaggcgacccctgaaacaaaccaaattattctcatcgatggagaactcccggggtttaccatcgccaaccctctttcgagcttcctgcaataaacgatcatgctgctgagccgcacgcactctctccatgagggaagattgaataagcatacgagtctcctcactagcggtgccgacatagcacaaggagatccccaaacggtctagatcagcaatcaactgctaggccacttttggaaccccggacctgctaagggcatcagccaccacatttgccttctccgggtgataatgaatagacaaatcataatatttaatcaattcgagccaccgacactgcctcaaattcagctccttctgagtaaaaatatacttgagacttttatgatcggtgtaaatgtcacaagcctcgccataaagataatgcctccatgactttagagcaaaaaccaccgcggccaattcaagatcatgagttgggtaattcccatcatgcttcctcaactgccttgagc

SEQ ID NO: 23546 - DNA, 518 bp, Zea Mays
ttaaacttggatttgaattgaaatagaaaatagggaaaaagaaaaaaaaaaggaaaggactaaggaccgcatctgggccgatttccccaaacccaacccaattggtcactcccgcgcagccctatcctcaccgtccctttggcgtctatgacatgtgggccccacactgtcagctctatctcccttatcgccatctctgcgaggctcaaacatacagccgttgatatcgcgtccagggcaacagaagcgcgcgctccctgcgcaactcacccgtgaactccgggccgcgggtgtctcctacctcctgactgcgactcggactcgtggctggcaacggaatccgcggacctcgcgcggcagaaaactcccggctcatggggtcttcgtcgtcgttcgtttgctagcaaagctcaacaaatcagggagcaaattccgcgcaagattctcgccaaccgaaccacctcgcttcgttccttggcatataaaaacatatcacgacctcctcccttcccatcctc

SEQ ID NO: 23547 - DNA, 620 bp, Zea Mays
caaagacaattacacatctaggctagcacaatcttttaatgtgttctcttatggtagtaacattgaagatgttgtgtcagctgccatggagaaatcttggaaggttgtggcaaagaagaggatggcctcttcgcgtctcgtggacctgatgaagttggttcatgagaagttggcgaagacagaagcatccatcaagacaaaggcatcggtggagtcttcgcgcgtggcttctttgtgcgtagccccaccgagatgctcctgccacaggctcctgccgtggtggagatcgtttctgactttctgtcatggaggctaggggagacttcgctggtcctcaacacacaagccaccaaaactgttcccgtggtggggctagatatctcgctactagactatcatgtagaggagccatttgattttatgctatctgacttgcttgctattgatgtgctggagtctggtaagatcaaggtatataggcttgtgttgattctcttcgtggtttctactctgatagtagcttgctacagttgtgcaggtgttgggagcaagagtttggtggttagtgaccatcctgtcatgaaggcttcaaccggtgaaggcgacacgtgggctaggtt

SEQ ID NO: 23548 - DNA, 565 bp, Zea Mays
gcaccatcccacgaactcagtcgtgtgtggccggagatatcccaccggcggtcgccatggtgcggtcacttccgccgcggtgtcacccatgcctcgttttccccttactgcgcctcttctctacgtggtagccatgcgtgaacaatgcaatccgcggtcgctgatcgttagtcggaccaccgtggctataaatagcaccatggaccacggcgaggtattcacatctccaccagtgagctcagttgaagcccaaattcacggaatcctctccacctctcccaaaattggtagtgcacggtgaaaccatagtactttacggccgtgtagccccaatctcacctcccaattccacccggaaccgtcgcggcgccgttttcccccttttctatcaccggcaagcaaaaatcctctgtgtcccgtggccagctacttccatgtctgctcctgctcgttttaatcgtgtttcagcaccaatatacactcgtgatactcatcggctccgcccttcttgctcggccacgctcaatcacccggaacacatgaacttgtgttcggtattccccgc

SEQ ID NO: 23549 - DNA, 929 bp, Zea Mays
tcagacaggctgatgaaggtcctgatggtacaatagcctgacaaagatcgtcagatacatcgcacctcgccgccggtgatccccactcgtggattcgcgccggctgtcacgattcgtgctcggcacaaagtggataactacaggggataaaagatctcgcggggagatggattgggtcgtggacagtagcttatcggagggcttgggggctgtgcgacgtggccaaacggtcgtggttgtcagaggtcgccagtggtcctttaccacatagtcgtaaccgtggcatgctcagaattactctccctgcgtttgtaggccgtcgagcgccacggcgtgctcgccagtgcaatgccttgtcaccaccgccctccaaatcccttccaaattcggagtaaccatggccaacctctataaattcagcacctcccttgcttcgactcatcataacgaacccaatgcaactctaacctcgcccggtcatccaccatagcccgagcaattccgttttcccccaaatcggttctccgtgccgcctttagcatctcgccgtggccaaccatccacaagttggttcatgcttctctgcttggtgttctagcatcccttgagtcccctgttgctagtaggcccgcttgattgaactagaccacgctgaatcatcgagaacacctcagttttccctcgagtctcgtcgtcgtcgtgggcaaaagaactccgggctggactagttcaattgagggatggattaggatagctaggggtggaattagatgtagaccgacttagggcgtgaatggtttggtgttgcggctagtgcaagctcaccggagcgcgcacgccgtcgttcaccgtcggggacctagagttgtgaagagaaagaagtgtgaggggttttatgcaaatgtcagagagacacatgaatagtgccg

SEQ ID NO: 23550 - DNA, 737 bp, Zea Mays
ttcgcaagatcaagtccccgacggtgaacggcgacatgcgcactccgacgagttttcaccagccgcaacaccaaaccattcacaccctaagtcggtctacaccaaattccacccatggagatcgtaatccatccctcaattgaactagttcagcccagagttattttgcccacgacggcggcgagacccaagggaaacctgaggtgttcccgacaactaggcgtggtatagcttaattggtggggtcgacgagcatcataaacacacgagagtgtcaaaacatgaaccagaagggtgagagcggacttggagatggctgaccttgatggggtgactcacggcggcgcagaaagtggatttgggggagattccaaattaggacgctacagtggacgatcggaggcgagggctggtgctctggcttcgtaacaacctagcggagctaacggcgcactcaatttatagcctccgggagaggtggctccgaatttgaggaaggaagctagcggccgaagagagggggtgagtcaccggcgagcgctatcgtggcattcacagtgctaggacttacggctgtcactagctatccctcaaggcttgcgacgacgtggtgaaacgaccgagagtgtggcataaccgagagaaacggcggcacgacagcgatggtcgcgcggccatgtcgcgacgcaagtgggtacggcgaactgagcggtaacagggtctgagctcatcccaac

SEQ ID NO: 23551 - DNA, 455 bp, Zea Mays
gtggaatgatggaagtttgcgctgatgtgcctgatgccgggttagagttatcccgagcagcatctcgtgcctcgtcgaccttggagagcggtattaagagtcgagaggctgatctggattgctctgttcccatggaagttgttgaagatccttcagccttagaggtggcagctacagagagctcggtcctcaaggatggagctagcgtttgcccagcccccgagggtgttgccggagatgatccagctcggatgggtagcgcgagctatgacccagcccccgagggtgtccgagtgggttctccctctcatacttccatggatgttcatgtagggtcttcttctccgcattctggttgcatggtagcggcacaggcttcggatcaggaagtcgccttagaggtcggcgctcctgatgacggaattttgatttccgctgatgacattgagttggtc

SEQ ID NO: 23552 - DNA, 684 bp, Zea Mays
cccagaaatacccgcagaagaggaagcccccggagtgaaattaacagaagaaccccactgagccaccggatgaggcaggcgcggagctccaaactgagacggcataggagtagacggtgcaggagtaggcgtggcctaatactgaggaaaaccctgcatcggcacgaactgagaagtcccagacacatagagttgctgcggaggaagaggaactgaaaactgctgctcagcacttgacatcatgttgatggtgccttgagaagaggaggaagtcactggctcccatctgagcttcccattaggattcctcctacacaccacatccttatggtcctgactgcagatagaacacctgccactccactggcactctgcacggcgatgcgcatcaccacagcggaaacacaccagccccagcccgggcttagggacagctcgaaacctctgagtacttcctcccgaagtacccgagttagaagatttgccacggtaaggatggtggtgctggtgctgagacttgcccctcttgtgggctggacctcccatgctgcccctcctcgcgtcctggctacgaggagacttatgcgactccatggtatactggtgttgcatctccacacccagtgcctgctccaccgtggtacggaagtccaccaacggaaaggcccccagagcatgcctgat

SEQ ID NO: 23553 - DNA, 565 bp, Zea Mays
agaaaaagaaacaccactgagatctgagttatatatattggcatccatgttctagttgaggtctcatgttctagttgaagcgtgtgacgcgcggtgggtggtctagggcgtggttcgatcgggtgcggcggatggttaacacgtcaaggttcgtttagtttgatccaggtgatagacatttggtccatgactctagtgatgaatagcgaggtgacactgctgctacattgtacagtagaaatctctaccgtttaaataatgagcatataatctaattaagatccattgacaatctctctgacagtgtgtgcttcgtggcgcgaattccgggcgtacagcagtagactactacatacatacatgggcacgcacaagatggtgatggtccaccgtttacgtcacctgcaagctttttgagaacctcaaagctagccacccacgccgtaccggcactgcttctccagtggaccaatgctagctgcttgctgcagactgcagcttgcaacctgtgcccatgccccatgctttggtgttgtgcctttctgctcctgctccagaaccccag

SEQ ID NO: 23554 - DNA, 384 bp, Zea Mays
gggacttcttctgctgttgagtcggaataccccgctcctgctggtgccaagggagaatcggctgaagtgccgaaagtaatggaacaggagaaatccgagacggtcgaagtgtcgaagcgtcctgccgaagctaaggaaaaaacggtcgaagaaccagaactaaaggagtcggcagggcaggcaaaaaccctgagcctgccaccagagccggagttgccgaaggtgtccaaaattcctgcaataactcccaagaggaggagaatggccagcgtgctagacgctgtcatggagtcgacaaaggtacaaactcctgcttaaagcttgataaagaaggtgatattccgaagaaatctgacgaagctaggatatcaccggatactgccg

SEQ ID NO: 23555 - DNA, 377 bp, Zea Mays
aggaggaaggagtcgggtccgtggatctcgcgatgaacggtggtgattagatgatgacataaagtttcgccgggtggtttgtaaccgttgatctgatcacgtacgtgcaggattagatcgctgtgtgtaccccttcgttcttttgatctgagacgttgatcggcgatccgatgggttggatcggatcacgccttaataaaacccacaccgttggatctttatccaacggtgactactgcgtacccgttcagtggagtcatggtctaatctgagccacccatttaagatcagacgacccatgttagatcataacccttcggctgggtgatcttgcaattgaacccctgtggtctccatgaattaacccgctgtccgcg

SEQ ID NO: 23556 - DNA, 449 bp, Zea Mays
aaggggaggtcagtccctagacgaacgagaggacaccgagacaagaggagacgcctagacagacacctaggcgcaaagacgacaaactgatgggaggaaggaggacgcaccgaccaggactggaggcaaaccaagacttatttgggacaacactctgtagctcttaactccacctcctccacaacaagagacttgggagcctctccttcttctctcgcccgcttgtaacccctactacgagcattgatcaacaaaagtgtcggtagagcaagccgacgaaggccggatgtatggacgttatgtccgaaccaatataaatcttgagcccatcgtgtataccatctgataccagaaacacaaacacaaacacaaatttacttgttggggttagatccgaaacacgacaattatatactaacagtctaactattatatacctaggactggac

SEQ ID NO: 23557 - DNA, 759 bp, Zea Mays
ccgagccaatcagcccgcttctcctgctgaggggcagaaaaagaagaagagacatcttcattgagtgtctagcttggatcaggatgccggtccttctgttcctgttgctgaggaagtgccagtgcctgcctttactgaagctgaaaccaatggtcgtgatctgaccactgctgaccccaatgggtgtgatcctgctgaagttgaccccaatgggtgtactgtccgtgttgttgatgaagatgatgaagaagaggatgaaatccctctgattcggaagaacagccgacgttacatagctagtggggaaagtagtggtgttccttctcctgctttgtctgccctcattggtctgcaagaattatctctgacgaacttcgatcagactcttgaagacatggttccagaagatctgttgtgagagccggcagatggtggcgcgatggatgtttgtgctgatgcgctcgatgccgggttggggtcatcccgggcagcgtcccgcgcctcatcgaccttagagcgcggtcttgagggtcaggaggctggtctggattacactgctcccacggaagtgactgagggtccttcagccttagaggtggctgttgcagagaactcggccctcaaggatggtgctggcgcttacccagcccccgagggtgttgctggagatgatccggctcggatgggtagcgcgagctgtgacccagccctcgagggtgtctgagtgggttctccctcccacacttccatggatgttca

SEQ ID NO: 23558 - DNA, 338 bp, Zea Mays
gtaggagccatgcagtatggtctcttcgcgatgggtgccgtcccagggatcagatctatgtagaactccacttctctttctagtggcattcctggtaactcttttggaaacacatccatgaattcttctaccactgatatacttcctgttgctagattgaacatcattggatcattggcgggtggctgggcctgacaagagactgactttccctgatggtcggtgaggaggactgtcttgtctgcgcaactgatgatgcctttgtgattagttaaccaatccatccctaagatcacatcaattcctttggatggcaaggcagttaagtctgccaagaa

SEQ ID NO: 23559 - DNA, 555 bp, Zea Mays
cagctggggcggccaaagcagcagcttttctcttcttcccctgtccccgcagcgggtagcggtagtcggggtagacgaagccgatggcgtcaaaaactctgttcattctctttttccccgacctccgaaggctgtagatagcgcattatcttctgccttgtaataagctccaagcagctcatcacttgtaacctcgatgcatttcagccagtcatcgtttggttcatcaaacttatccccatacctgaatgtatacttcagccggaccagatcaccttcgctagacttggtgatggtcaccttcggcatttcctagctctttacaagcggccatactctgaatgttatatgttgttgaattaaatctcgtgtaccaatgaaggagcagacagtaccgaatgccttctgacacgcttcggcggcgtcatcaatttcgaccttcggctttcggagactgaagcgggaccatatggggtgcatgataacctccttgatgtcgtccctcgctgtcaaatcgttcttcacataaaaccattcttccatccaagctccggg

SEQ ID NO: 23560 - DNA, 577 bp, Zea Mays
cggggcctggatggaggaatggttttatgttaagaataatctaattgagagggaggatattaaggaaattatccagcgccccatctggtctcgcttcggccttcgaagaccgaaggtggctattgaaagtgatgccgaagcgtgtcagaaggcttttagcaatgtatgtgctttcattggcacaagagacataattcaagagcacatagcctacagagtatggccacttgtggacagctgggagatgccgaaggagactactactgaatccagctaaggtggactagttcgattgaaatataccttcagatttagggaccggtttgacgaaccaaatgatgactggttgaaatgcattgaggctactagcgacgagttgcttgggacatataccagagccgaggatgatgccttctcctcagccttcgggggtcggggcaaggaaagattgaacatggtttttgatgcaattggcttcatatatcctgattactgctaccccttgagaaggcaaggaaaaaagaggaaaattgccgcttcagccaccactgttgtgccgaagggcaagaaaataaag

SEQ ID NO: 23561 - DNA, 546 bp, Zea Mays
ttcattcctggtgaagttgttcaactcttcttgcatggcaattatccaatccggatcacccagtgcttcttcaaccttaagtggctcaagcgaggagacaaacaagtaaaattcacaaaagttagctaaacgagatcgagttgttacccctctcctgatgctacccaggatgttgtccacaggatgatccctttggatagtatggtggactcgaggatggggcactgatggttgtctttgaatttgctcctcctcatcatccacatgataaagaggtacttcatcattaacactttcatgtccaccttctaccacagttggcatcctttgaggttgatgaccttcttcaagacttggatgacttgaggttgatgggtttgcttgggtggaggatttatcacccaccacttttgcgcccacatcgaaaacttcattggtcatccataatgttccttcctcatcatccttttcttgaggtctcacttcacctattgcaaggttctttatggcctcacaaggtggttcttcatttcctgcaacgtcatg

SEQ ID NO: 23562 - DNA, 360 bp, Zea Mays
cgcccgccaaccctactagtaaccccggccgcccgatctccatctaatggaccggatcactcacgcaaagggatacatgtattctattcacagccgcatgataccggatcaatggcccagggatcttcttctctccccgacccagcactacggcggaagcgccccctgcccatggcggcaagtttcgccggagcgcaccaaagccccaccaggcgccccaaatctcgattccttaaggtaatacgcgaagaaggacagcgcgaactcagggggaggcttcctcaccgtgattagcgcgatgcaacactctgcccacaagccacggcggaactaatggatttccccgcgccgatgagcaat

SEQ ID NO: 23563 - DNA, 792 bp, Zea Mays
aggccacggaagtggaacgttaaacttgcagggtctgagtgggtgaacatgtgagcatgtgtgtgtggcccatgagctggtagtcggtcgacccaagtggcgatgtatttaccagtgtttgaacacggcacaagttatggaatatgagataattcacctatcttctttcttcccaagtttcattcgctcttcccatcttcttctctgatctggttctctatcgtacgagtgtgagtggtgttaacaattggtatcagaagtaacttttcttggctaggtgaggttgtgtgtcctggattcttcaacccaccacaatcatcttacgtgtttttgtcgtcgccaaatcctcatgaatccggatacgcaagtgatcctggatgagatttcacgacggttctcggagcatgaggctaaatgggatcggcgcatggcggagcaagaatctcgctgggatgtggcgttctctgactttaccaaacgtcaggagcgccgcgttcaggctctagagaagaacgccgacgtggttgaagattagcgtactttcatgaaggagatggtggatgatcttcgattggaagtgggtaagatctccaaacattgggaacatgctgtggtggataattctacttccatggcgggggttcttttccctctctcgttcaattgtaacccctacagcgagcattgatcagcagggtgttgatagtgcaagccgtcaaagactgaatgtagggatgttctgcccgaaccaatataaatcttgcacccaccatgcacaccgtccggagcctg

SEQ ID NO: 23564 - DNA, 474 bp, Zea Mays
aggatagagttgaggcaagactctcgaagtggcgaagtggataagacaatcaagggtgagataggtaaggtcccaacagaatggttgaagtaacagaaattattaccgagggaagttatgaggaaacggtgagatcatcaaggatgtgtgaaatagaatggtcgctcatggaccatcaagaagcaagggtgatcaagggcatattaactgaaaggttttgaacagtcattgggatatgaaggtaagcatatacaaaaatatgagtatgcaagattccaatgatacgagcgtaccaagaccaagaaaataggaaaagccaaaagataacgacttcacaacggaataggaaggggtctcagaagacaagaagttcatggacatataaactgaaatgtctaggtaggcagttgagatttagagatcaatatttgaattaagggaaagggtattgaagattccagggatacaagcatg

SEQ ID NO: 23565 - DNA, 546 bp, Zea Mays
ccgaagcgagaccatataggacactgaataatccccttaataccctccctttcagcaggtcattcttcacgtagaaccactcctgcatccaggtccccggccatctcttccgaaatgtcggaactaggtagctcacctcagagcgaggcacgaagctgtaacaactgaagtatgatattgctcctttccggtagccttcgtctcataagacagctcatgaatgttacagaaacattttgcacttggttctagtccctgactcctcatggcccatataaacatccccaccttaatgacaacttcgggagtaagttgatgaaggtaaattttgaaggtcttcaggacttcgactaacaatttatccaaagggaaccgaagccctgccttcatgaagcttctataaactactacttcgtcagcttcgggtagaggaacattattttcccctccagccctcataattgagatatcacggaagtaccttcccctcattgcatcaatttgcccttgcttgatagttgatttcccgaagacaacatgacttgg

SEQ ID NO: 23566 - DNA, 865 bp, Zea Mays
cacaactcacctttgggctcacgcgcgtactgcgcgatcgtgcccttgctctcactgaacactagggcctgggtgctagccctcccccgcttgccttgcgccgtgtcacccaatgtgggcaccgacagatggatccgggtgggtagtcgcccttgcgctcgcgagcgcgactacgttcgccgacacttgggcccggatcgtcatggcatcttcttcccccctccacgcgtaacaaacaacaccgggttgttgagcttttcccggcaccgaatcagcacaagtctgttatggttcggttttcgagggactatgtgaactaagccttatcttcccttgggccatccacgtcagtgccgtcgaaagccaccaccaccgaggggagtgcaccatgacggagtcaagggatgcagggtgggtggaggcaagccgccgccatcatacctccactttggggtcgtttgagggccagggaagggctctggatctgtgcctaggcgtgtggcatgggcgcgtgggatagccgggactagaactcgatccgagcgatggcaatggctcaccggatcagtaccgtcgtcgcggacccaccacctcgcaacaacaacctcacctccgctctgatccaaggtgagagacttcccatatagtctgtcatgtccttcactacgtgtaccattatttggttgcgagtttggtcgttgggtcccctgatgggcgagtcacagcaatggcgccaccgcgacatgtttccgccgccttgtttgaccactggggggagggccatgcgcagttgggcgttagatcatggggcacaacggggattagatctgtacgaatccccttcacctgattgatcctagtcgtt

SEQ ID NO: 23567 - DNA, 485 bp, Zea Mays
tgggtagtcaggagcttcactcggacttgcaacgtaaagccatggcaaagcttatggggctgcagttcaaagtcgtttacaagcagggtaaagagaacaaagtagctgatgcgctgtctcgtgtgggctgtgtgatgacattgacagcagtaagtgaggttcaacctctctgggtccaagaagttacgaattcctatgtgactgacccggctgcgcagtcacttttggctcggttgtgtgtccatagcccggatgaacagggctactctctctcccaaggagtcatcaggaagggcagtttgatttgggttggccaaaattctgctctcaggacgaagctggtggcagcattgcatgatagtgcaacgggtggtcactcaggagtgcacgccacttatcatcgactgaagaagttgtttgtttggaaaggtatgaagactgatgtggaggattttgtccatcagtgtcaaatttgtcaaaaggcc

SEQ ID NO: 23568 - DNA, 793 bp, Zea Mays
ctaaattattctttgatttgatgcacatgtttgaattatttgaatttgggtttgtgtttgaatttgaattgagttcactagagaaaataaaaaagaaaagcaattagaaatttagagaaaaagagaaaaccgaattcggcccagttcagcccaacccagcccagcagggccgcacgcgcgcgcccgtgccgcctaacaggtgggccccacctatcagcgacagttctcgcgcctgcgcgctctctccccctccctctgccatctttgccccgcctgtcggcacctctgtttgttgccgtgactgcgcgcctgtgtctctgtcttgcgggaaccgcttgtcagctccccctccctccactaacctccggtccgcgtgcccgccatggtcgtgcccacgtccgcgcaattcccggccactacccccgcacccgacccctactcaaaccccctccggcctgctctaccatttcctccacttgtagatagctcccagcccaccctcgctcgtgcgttgtctcttccccgagctcggaggaccgccgccattcaccgcgcccgcacatccgttctgccgccaccgttgagtcctcattgtgcccattgtctcggtaagttccgcctcggtgtccacaactcgagacacgcctcaattttccccctccccctctggttctctctgcccgtgctcatcagagctttccctgcgcatccagaatcaccgccgtcgacccaggccctcgccgtgtccctgtcaccattcaagggcccagaatcttctctcaaggtaaccaac

SEQ ID NO: 23569 - DNA, 500 bp, Zea Mays
tgcaacgcacgaactaccaactaaaccatggaggcggcagcggggtgctatcacggtgccgctgcggggatacttcgcctctgcttctactggactatcgaggtactctctgagccttcccaaggattgatagaaggtagtcaaagtcgcgccgcgtaggaagcatagctaacgcctccaggattcctcgccggaaacttctagccgccgtataccgcacttcgccgtggatgggagcccttgttgcatcactaccgataataggttcaccttaaagtttgtggtcgatcgtatttcctgtagaactattcgcatgggaattgagtgcactggtggcgtggtctccggtgaactccgccaccgcgggccggtgggtgccgtcaggggtggtcatgagattggtgatggctcagggaccgtcgatccggtcttcaacggttgggattagttgccttgtgtcgcgttgaccggccaaatggtggtcatggatgtgtgatcct

SEQ ID NO: 23570 - DNA, 395 bp, Zea Mays
tgttgctgctcatgtggctaagtgtgatgtgtgtcaaagagtcaaggccgaacatcaaagaccagctgggctattgcacctgcttaagatttctgagtggaaatgggaagaaattggtatggatttcattgttggactaccccgcacccctactgggtatgactctatttgggtgattgtggacagattgaccaaagtggctcatttcataccagtgaggactaattacacgggggccaagctagcagaattgtatatgactcggatagtttgtttacatggagtgcctaagaagatcgtgtcggatcgaggttcacagtttacttctcggttttagaagaagttgcatgagagtttggatacaaagttgaattttagctcagcctaccatcccc

SEQ ID NO: 23571 - DNA, 765 bp, Zea Mays
cccaagccgcagattttttacaggctcgaaagattcaccggacagtgggcagtcgagctacatgtagtactctggagtctaggaaccacaccatctagagcaaccggttgcacaccattcttcttgacattcgtcatagaagttgtgctccccgcggagttagaatatggctctccgaggactgaaggattcgacgacgagcgagcaatgaccgaagcacaactcgctattgacctgattgacgaagcgcacaacgaggtcgtgcttcgctccgccaaatatcaacaagatttacgtcactaccacaaccggcaggtgcaaggcaaatcgttcaatgtcgaagacctagtgttgcgaagggtgatgaccaccaaagataagcataagttctcgccgccatgggagggaccctacattatcgcccagaccctagcccgggagaataccacctcaaagacagtgacgacaacctactgaccaacgcatggaaaattaagaacctaagaagtttctacccgtaaggagcaagttgtgctcccctcgtctcagggcgaaagcaagcaggacctaccgaccaggtcgccatgtgtcgctctggggctggcaaacactctggtcacaacacacccaaaacacaacaaattattgagattatgatcaacactcacaatttacgggaagcaattcaggggcatcagacatttgtttcaagagttcattacaaaggcactagaacagaacatgaatcctagacatcagcagatg

SEQ ID NO: 23572 - DNA, 1195 bp, Zea Mays
gtacgatgccatttcttggtttcaccacagcaccgttgcaggaaagcaaatcgagttttcttttcccttggaacacacttgttggtcgatgcgtgcgtgctttttttgccttttcaaaaaaaatgggcaaagagaatgcactggaatcgcgcttttgttagtagtaattgagcgtttcgaatctgaatggagcaggtcggggtcgggcatgtagtattttacattgtgggcttgcagcagcattttacattgtcaattctcaagcttggtgcatcggtggggtatgactttatttatgagaacgtgggagtgtgaaaactctcggttatcttttttcggagaggatcttttactaatcccaccggtacatctactgttgcaaatctcctttgggggtgtcgagatagcgatggatcccgccttccttttgtcctaagctgtgggggggtctgagatacctcctcctgacttcctcagtgtgccgtgctgcggcccatgatcgcccccatgaacgagcagaggaccacacctcttccctttggtttcttgcatctgagaccacctgctttacgtgctggacttttggcttcgtgctgactgccttttgccaaagcattctggcccttgagaaaaacaacggcattaggtgtggttattgccttattgggtttaggttaggtgccctgcgacgctgcttttgtctaggttacacatgtgcaagggagtccaccagcgtgccgtgcctcacctacagggctgctgctgctgctgctttgtcaccacccttgtctctgctctggttatgtccatgcgcggttgcttaggcgtggtgtctgttttcttaacacagtggagttaccctttttcagaaaaaaaggctaaagaatgatacgtagctactagctaaaagatgtgttggcctcttttatatggcacatgatcctagctgtccttttggtaaagagattgagataaaccagcagatctgtttgggttcgggcctttcggttgagcctaaagactaaagagaagacaagatgcgtcattctgctacagagaggagattgctgtgtgcaagttgaaatatcaatgtgggcaccacttttgtcagtctcatgaatttaaatggatcattccaagtatgaccttccaccagccttctctcattgatgaggattaatatgctggaatctcc

SEQ ID NO: 23573 - DNA, 487 bp, Zea Mays
ccgaaatctaacccgcgctccctggctgacttaaacagtacccgcggcatagattacggcggcgaggcttaccggcggcagtagagctccggcggggtggttggtgacgtccgggaggtcacgacggtcacgacggtgtgcgggtcggtgtcgaaggtggccggagctaccctggccacgagcacaggcggcgggggtcgtcggtggttcctggtccggccaaatcacgacggtatagttcaattaaggtgcacgaggagctccacggggtgatgtagaggccatgcgcgcaacgaattgggaaatggtgcagaggcttacccggtccacgtgtgccggcggggaaagaactccggcgagcacggttacgctattccggtgacgcgggtccccggttcaagcttgagtaagcttcacggcctcaccaggcagctaactgaaggcttggatcgaacggatgaggacgggaaaggggctggccacggtg

SEQ ID NO: 23574 - DNA, 377 bp, Zea Mays
ttgtgttccctcgtcgtcgtccagtgccgggaattgattcgaagaccttcgctgggctgctgcaagggtgcccgattcatttgcagacggagtcggcgtacagggcagcatcaattcgtcatcggcgtgcgtggatttcgcgtcaccgtgggtgcagtcctcttcaccctgacgactggtgagtgccctgcgccaagtccagtaggtttcggtggtcgcgtagcactccgtggggtagggattagttcactagggcgcgtaagccaaaagtcaggcgatggcgccgccgcggttagtagccagtggagtagatggtgcgccgtggctgagttcaatgcgaggaagaagaacgtccttggccgtcgatgcgaagattg

SEQ ID NO: 23575 - DNA, 828 bp, Zea Mays
ttgccataacaaaattaaagctggtttatagaagaacaactttgctacagacagattagtgggttgtcacacgaaaattagagaataaggccctgcaagttgctctgtcggaacaaactgaataggattgcgatggtacagtgtttgaaaatatcagtgatgcaatgcacctcgctgtcggtgatccgcacgcgtagattcacgctggccgccgcgattcgtgctctgagagaagtggataaccgcgggggtttaaaagatcgggtgggggtggatttggtcgcgggcgggagcttatcggctgcactcgatggccgtgcgacatggccaagcggccgatgtcgtcatgggatgccgatgatctcaattgcgccacgtcgtggtcctttcaccatgtaaccataaccgtggcgagcctagagttactatccttgagttattatgccgacgagcgccacgacgaactcaccagtacaacctttgtcaccgccgtgatccgaacctcattcaaattcgggataattgtggccagcctctataaattgagtgcttcccttactccgcccccttatcacgaacccagcgcaactctaaccacggcctgccatccaccgtagcccgagaaattgcaatttctccaaaatcagtcctccacgccaacgcgaacactccctatgtcgactcaccgctccgtcatttcacctgtcttcctagtcatcgttcttgagtcttggtaagttgctgaagcttatcgtgctcccaattcaaacgctaccacgctgtgttgttgggaacagtcccgggcaggcttcaaatccgcgggtgctc

SEQ ID NO: 23576 - DNA, 763 bp, Zea Mays
aggaatagatgggtagctaggtggtattaagtatgtcgtataggctactactttaataggtgaggtgctattacacccctatgcttgatgagaggatgtcaaggatgagtgtgcatgcttcataaacataaaaatgtcatttataaacttgcataatagaaatgtcaccctaacccagtaaaacatgtttaaaccatggtgaggaaccaaatatgattaggtaaagtttttaagtcatgacaagcccaaacctaaacgaatcttctagtcttttacactcaacacattttaaatccaatttcccctcatttacacttacccttgcacagatggctttgcctacacccactgttggaagagacacccactttagcttcgactacctttcacgggagggtttcccatctatattgtgggaggtcctaagcaaagctgggtaccttgcacctccttagtacacactgtagttgtacgaggagcaccgagtgcctttttgtagggtgtggctgaccttggagccccatcccctgcagccagattggtgctcactggactccgagacggtcgaattctaagctgatgacattgtgaaggccacagtcctacgggttttgatgacattttctgggttccacccactagagacactgacgcatcccctcggtctatttcccgctgagcagaagaacgatccaatgtggcacaacagggtgaaccatgcgaaggatatatgggcactacaccctaagtaggccccttgagt

SEQ ID NO: 23577 - DNA, 432 bp, Zea Mays
aacgaaggggggtttcaaagacctctctgctgtagttttggcatagctgtcggagggcttttcgggcaacattttggcaagtgtctaggaagcggtgtccagtgaaggtgacttggaaaggagggtggtttgggtagcttcggctttctcccaggtagactgccatagagcacttctcagttccgttctcgtggtattctttccagacgtactctggcttcttgcggatccccatgcgaagcacgcaactccgcaagagatgagggaatccttccacctctgagcagtaggatgtcctaatgaccaaagagccttccatccggtagaagaaaagaagggtctcttaatatcgggggaaaggagagaagattttcttagaggtaagaggtattttctttttaaggcaaacttttatggtcggggctgcgatct

SEQ ID NO: 23578 - DNA, 398 bp, Zea Mays
cggatatggtcagcagttgctatgctggtaaatgctactgctttgataagaattggcaagcttcacacctctggactaactcggctgcatcactttttgctgtcggccagtagaaaccagacctgaagaccttcccaaccagggtcctggatgctgcatgtatcccgcattgtccggcgtggatctcatctaacagtttcttcctagtagctgaaagaatgcacttcatgaggactcctgttgcgccccttctgtacagtgcatccccaatgagggtgtagtgggctgactgccttgcgatgcattctgctacagctttgtcatccggttcctcttcattctttatatatctgatgatgggctccctccagtcattagagtctaactctagctggctc

SEQ ID NO: 23579 - DNA, 733 bp, Zea Mays
caagcttacagacgtcaagcgcaagcctagccgagcaaaagccgtcactcgattagatgggtttgaccttaatcgatacttgttaatggtcacggcggcacaagggctcaggtgagcgtgtttcgagcaactaaatgcgatagggtctaaattgaagcttgggtgagtttcacggattcaccagaagtcgagtacatgcactaatttggaccgtgcgagggtggaagagtgagtcgatgtgagcgtgttcttggaggtgttccacggcggcgaaatggtgttcccgacaccagaacgtggtagcgctccatcggttaggcagatgagcaacgttaacattcgacgtggtaacaaggccagtaacaaggctatctacagcgatctactgcgacgtggtaacaaggccagtagcgtggcatgcccggggtaacggcgatcatcacggcgacggccgcgcggccatatcgctggacaagtgggtatgacgaagatggttctatccattcccccgctgatcttttcacgtctacggtaatatcctgcccgagctgagcatgaatcacggcggaccgcacggatcgcgacgatcaccggtgacgaagttcagtgaattagatcttgtccaggtcactgtaccatgggattctcatcagtgaggctgacagagaaaattgaaaggcttcgttctccaatttttatgcgacaactcactaatctgcctctaccaaagttg

SEQ ID NO: 23580 - DNA, 372 bp, Zea Mays
atcattcatgctgttgtgatgtaatggtgccagtaggtaagaacatatgtgtgcttcttggctagcaacctacctccatgagtactcgtgctccttgcgaatcgaagaagcaaaggtgatggcggatgtgtgtccctggagagagacgacgacgactgtagtaggaggacaaggagagacgagcactcgcgcagtcgcgcagcagcaagatgcttacggcttctgtcagcggaaaagaaaaggaaggggtaaagggagctacgagaagcaaaggctcctttttaggtccgtctgcctggtgcctgcgtcttcatgcttaatcgcggagaccgagagacgggcattgcaggcttgcagggttagaagttcctc

SEQ ID NO: 23581 - DNA, 384 bp, Zea Mays
caagccagcaggatccgctctgtcacgtttcaaccagcctagtcaaagttccttccacacccagtccattgcaagcagccaacctccagctaatgcttgttggcactatggagaccccgatcacttcaagaataattgtccgcacctgaagacatccgtacctgcctactccagcttgacaaatggccccaagaatgttacgacacctgcctccaaggcaccatccaccaacaaccagttaagcaagactcagttccacggcagggctcgagtgaaccacgccgacgcccaagaagctcagcaagcccctggagtagtactcggcgagtttctagtcaaatttacccctgctgctgtgctttttgattctggagcatctcattc

SEQ ID NO: 23582 - DNA, 576 bp, Zea Mays
ccgttgtctcctagacacgcatttagctaagctgattcctttttccaatcttctaaaaagttggtcccctttaatccgaaaggttttcggctgagggcatctgctaccacgttggccttcccggggtggtagtggatttcgaggtcataatccttgatcaattcaagccatcttctttgatggaggttgaggtctggctgagtgaagatgtacttcagactcttgtggtcggtgaagatgtggcatttgttcccaatcagatagtgcctccatattttcagggcgtgtactatggctgccaactccaagtcgtgggtggggtagttctgctcgggtggcttgagtaggcgggatgcataggcaataactttctcattttgcatcaagacacaccctaagccctgccttgaagcatcacagaagatgacgaattcctggtgtatatctggtagtgtcaaaatgggcgcggttgtaagcttttccttgatgatctggaaactttcctcacatttcggggtccatacaaacttattgtcctttttaagcagttcggtcataggtttcgctatgctggag

SEQ ID NO: 23583 - DNA, 678 bp, Zea Mays
gactactataatgtcatctacataaaccaacaagaagatgctaacattgcctttattaaatatgaacaatgaagtgtcggccttagaggggcagaaaccaagttgctgcagtttatcactcaactttgagtaccaagctctgggggggctgtttcagaccatatattgctttatccaacttgcatacatgatgtgggaatttactatcttcataacctcgtggttgtctcatgtagacatcttcctcaagaacaccatgaagaaacacgttttttacatctagctgcctaagacaccagcctctagacactgctatagaaagcaccactctgatagtagcagctttgacaacggggctaaaagtatcctcataatctatcccatatctatgtttaaatccctttgctaccaatcgagccttatatctgtctatgctgccatctgcctttcttttaattttgtatacccatttgcaatcgataagattttttccttcctgtgctggtactaaatgccatgttttgttatcttgcaaggcactaaattcctcatccatagcatgtttccaatttttattaccaagagctttagataaatcatgtggttcattaccaaccgctaagcatccatagccataccttatagtgccatctgtgtatgcttttggttttctgatcc

SEQ ID NO: 23584 - DNA, 458 bp, Zea Mays
ctctgaccgagatggcgaatgcagtcttcgttgacaacaccaagaaagtcaaagtcaccttcaccaaccaaactccactgaccccacatgaaggcatcccccgccatcgctgatcaatcagcaaaagaaaaaactctcccccatcgccacaaagagtcaatcacctaccctaccctcgaaggaagtctacacttgtctagttcagagactcccagcgatgtccctttcaatccttagagtcacccctaccatcccaaaatctagcccgacctataaataaaccacccaaccgaccaacatcatcccaaggacacctttaggtcttcattgcttgaccaccgactttgccccaggagtgtcgcaagaggccactaccacaaatccaccaccgagaggtagacttcaacaacctataaaaagcgaagaccttaggaacattgaggaacattcactgctca

SEQ ID NO: 23585 - DNA, 635 bp, Zea Mays
ctccggtcgaagaccacgattttgatacagtcgaagtacacttcacttcctgtacctgcgacaaaacatgtccaattgattttaaataagtctgatcgagtgggtgggcgtcctttgctccaacactagctcccgagggaccggttcaactcggtgagctggtcacgaagtcttttctgggagatggccgaacgctgccatcgtcaagtcgaagtggtccttggggggaggtttgaaatgtgaccattgtgaggtgatgttttactgtgggaaccttggtttctcgaggtgcttttttgggcctataaagaccggtccccgccgcggtggaaaaacttttacgtgctggcacaaagaaaccttggcttcttcatctaagaaaacaactgcgcgctttccacttctcgccaccggtgagctggccccgtgaagcaaactgcccgcccccacaggcggtacgttatgttgtcctcttcctcatcaccgtctgccgcgattgcgccgtcgagcgtgtcgtcgtcaaagaagacggttagtgattcaacgacggtagtggagttgtttccggggcacattgtggagtttgggacgttaaggatttactcgagtcgcatgcatgaaatgcagtgtttggg

SEQ ID NO: 23586 - DNA, 414 bp, Zea Mays
ctatgctgatacccggagaagactacttgagtttaaggagggagattatgtttatttgaaggtgtcaccactccggggtatgagaaggtttaaagtcaaaggaaaattgtcccctcgctttattggacccttcttaatcttaaagcgagtgggtgaggttgcatatcaattagagttaccggatcatcttgcggatgttcatgatgtctttcatgtatctcagctgaagaaatgtctcagggtgcctgaagaacagttaccgatggaagaccttagtgttcaagaagacttgacttatgctgagtaccccatcaggattttggatactttgactcgagttacgaggaataaggttataaagatgtgcaaagtgcaatggagccaccacagtgaagatgaagcaacttgggaaag

SEQ ID NO: 23587 - DNA, 549 bp, Zea Mays
aaggaacaagacttggagatcaagtaatggatcttgtagctatggcgcagacttggaggagagtggatcttgtaccggatcttggagatcaagaacaaaaacatggtaacatgagaatgggaaaccctataagtacgtacgggagggtgaagtcattacctcgtgccgtagatgacaacagaagacatcaaaccgagggttgaacacggcggtggaggacactaaaccagcggaaatggacgacgatggagggcgtggtcgcctcatgtcctaatcgtgaccatgttgaaggcagagcgaacaacgggagatcagatagtggcgacacgtcgcctcgtttcgctcgcgtcctttcggtccgtggggaaacctgcctggggtcacgggtcgtgggaacgatccccgagtgaatggtcgagtcagagggagcggtggccccgagggagtgtggtccaaataggctaaagaatgggggggggggctcatctgcacgacatgtttccccaggaaaagaccaaattctcccaaggtattgggcttccaaaccag

SEQ ID NO: 23588 - DNA, 303 bp, Zea Mays
aaactacggttgagatcaagcccaagatccatccaaaggtcctgattttggagcgacgtggagtggcaaggttcgagagctcatggtgcagagatatttcgctattagtagatatgctaaaccagcaccaaacagtgcatctgtcctgtgcgcttaactactggtcgtgaagccccagacctacatcatcaaacgtggcaaaaccatcacaatttgtcaaattacagtttaacactttccctaaaaaacaaattgtgttgcaattgttttggattctggtgcaaaacactcaatcatttgtca

SEQ ID NO: 23589 - DNA, 628 bp, Zea Mays
tgacaacggcaagcagtttgatagccaagacttcaaggatttctgcttctccattggcaccaagcttgccttcgcctcagtataccacccgcagtccaacggagttgtggaacgcacaaatggcaaaattttcacagctgtcaagaagatgctcctcgacgagaaaaagggcaagtgggccgatttgttacctgaagcggtctgggcgctaaacatgactgagtgcagggcgactgggttcacccctttccgccttctatatggatcggaggccatgaccccgcaagaaataaaacatgggtccccgcggatagtctcgtcagctgtccccgacgtggacgaacccacttcgaaggatctcatcgatggagaccgcgtcttcgccctacaggctctaagtaaataccaagcccaaacaaaagcatggcgcgaccatgcaatcatcccgagggaattcagcgaaggggacctcgtactcgtccgaacagctcggacagagtccaggggcaagctggagcccaagtgggagggccctttcattgtcaagacgaaggcatcccccagcgcatacaggctggcaacgccaaacggcgaggacttggagcattcctggaacattgataatctc

SEQ ID NO: 23590 - DNA, 549 bp, Zea Mays
ggagagccggagagggacatacctgccaagtcggagcccagagccggagacgagggtcaagtgcatgacgacgcaggagggagagccggagaagaggagattagggttagggttagggattgggattgccgactggggagggagagccagagagggacgtatctgccaagccgtagcctggagccggaaacaagggtcaaccggtcaagtgcacgacgacgtgggagggagagccggagaagaggagattagggttagggatatctagattggggagggaccgagggagagacggagaggggcgagccgcacggaaggagagtaggagacccatcgatgtcgccggtgaagaagatctagcagtggcgacggcgacggtgacgaagcatcgggcggagcgaatcgagtgaggagagcgccagagtggagagccggagagggagagccggagtgggaagggcgggaggccggatgcccggtcttatgcccccgctccccgacaccgggccggccccgtgcctaccgttttctggtgggccgggccatgcc

SEQ ID NO: 23591 - DNA, 485 bp, Zea Mays
ccgcgacgccgcgacagaggggtgggcaaaagttacctgcaaaggggagtggcagacgtcgtcacagttctcctccaatggcttgcatgaacccagtcacagccggccgccgcacgtccgcctgggtacgtaaaggttacagatggtaggggatagggcagcggacagggaaagagggaaggaggaagatcacctgtagaggagtgggggtagtcgtcgccgtcgccggccagttcggctccgacggccgccgcgaacacatagaggacagaacggcggccgcggacatagagacacctccagagaagacagaggaggaagagtctgaaatggagacgacgtcatgagaccgtaaaggcatagtaggcacgacgcatcgtggccccacctgccagtacacctcaatctactcgtaacctattttgacgaacgccgctcgattaaatgacccatttttacgagttcaccgagaggcggtgtatttc

SEQ ID NO: 23592 - DNA, 761 bp, Zea Mays
gctgatcctttgtcatagcggacaaaccaagttcaagcttctgatactccttgttatccatcatctctcggcaaacattgatctctttactaccaggtagagagtaaaggaagtcatccttattgtctccttcataaaccaaggacccttgcgggtatttcagctccttggcatagtgttgcacttcgacactttcaataagcttcggcacttcagccgtcgaaataggctttggcctacgggtcgggatcttgactctcttcggcttcggcatgctggaagaggtcgaggtggcaattttccttttccctccttactttcgaacagggaaacaatagtcagatacacaaacccgatcacatcaaaaactctatccagactcctttttcctcgagcaccaaaggcaatggtcatggcctcgtcctctaccttcgtgtaggctcccagcagctcatcactggttgcctcaatagcatctaaccaatcgtcatttggttcgtcaaactagcttctgtatcggaaggtgtgtctaagataaaccaaaccaccctggccagagccagcagcagtttccttcggcatctcccattcactcacaagaggccataccttgtaagcaatgtgttcatgtaccaaatccctggtaccaatataagtgcacactgtgttgaaagccattaagcatgcatgcacctcattcccaattgcattcgatggccttctaatgccgaagcgtgaccatatgggacattagataatgc

SEQ ID NO: 23593 - DNA, 506 bp, Zea Mays
catccgcggaaggtagtacctcagaagtagtgtcatcgccaatgtatttttagttgctggtgctgaccgcgtcctcaccaagtgccatggtgcagaggtcttctgtggtgtcggtgatgaagcacaatccgttcagcttgtcctcgacccgcctctcagtctcatcatcgctcgaggaagatacatcgtcatcagtgttgtggtcgaggtcgctaagggaggcgaggaagtcacgctccttgatctttgccttctaaaggtacttcttcttgagcgcctccttgtcgaatccctccttggacttgttcttgccagaggagtacttgcccttgagctgaccagagtgatgatttggtaggccggaatccgccttgcctttcttggtgcagctagcaacgaagtggtcgggatcgccacagttgtaacatccatccttggacccaccacgccgccggctcatacggttgttgtggaaccgtgtgaatcgactgaccacgagtgccagc

SEQ ID NO: 23594 - DNA, 791 bp, Zea Mays
gagaaacaagtaaacctaggccccgaatcaagaaaggaacaaagactacagattcatgagtatcctccataagtacggtgatcccttgccaaacccgccaagagcacaagtccttcgatggaagaacaccaatctcaactaagtgaagcaagtcggattcggagacaactgaggcataattaccatagaaggaagctgattgttgtgattgattgggggaatgatgggtgcagcgctcccctacttcttcttcctgggcaccatgggacttcactaaggcacgaaatcaagcacggacccgtagaggaacgagaatttcaaagggagatttgtggcagaaaaaatagagttgtgtatattcgcacactgtggacctattaagtcaggcactttaagtcggatgatataagttggacatgttcccagccgggcagactaagtcaggtagtcgactattgtgcacaatcaatcagaatatatcagtcagaatataagtcggaaggaacgagtgactcaacaccagtaagcaagatctcaaacacagtatacatatcaaaagaaactcagcattaaggagtatatgcagcaaccagatttcattcatgtgggaaaggggtcattacagaagagaaagggtcgactcattatgaaccgaccctaacaaaatacaacctccacttccgcttcttctactactttactacttctactactacaactacctaccactacatcatactacactatactaatacttatgccggtggcgccttgccaccggcattgccgcc

SEQ ID NO: 23595 - DNA, 443 bp, Zea Mays
tggggcccaaggctgccaggctggcgcgtatttatcgtggtggatgacatgggggcagcaatggtcctaggcaccatcattcgggctatgccgacccctggcttccgtagcctggggctcggcgtggctcgtcgtgtagtgccctgcaagaggtctgcgcactcaggcctagtctgataggccataagtgtgtcacagatcgaggggcgcatgggctattaatgcaccgcagtctaggggctcgtaggttatgagtgctatgcggtccgagtgtccgtaggtcatgagtggaagcggactggtgcccacgctatggctcgatgccaggcgtggttaatgcgatgagtcatttacggtgggtcagtccggggctgggcgcaggatccacctgagtggttcccttctaacacgcccgtcctcccttgtcaggctctaccatcccc

SEQ ID NO: 23596 - DNA, 398 bp, Zea Mays
cgaaacttccatgcaaagaatgatggatgcactatgcatgacaccaacatgagaccaccccatctaacatgtgttaaatatatacttccacttcctcaaaataagaatcaacacatataacatgctcgaacaacgccctcaacatatgtaaatagtagaacatgaataacttcaagcaacaattctcaaaatggaatacgaggatgaacacatttgacatggatatgaatcaagaacaggacacataaatcgaccaacggtataaaccatcactattttacttgccttcaccgggaatttggaaaaagtcgtaagtacgatccagaagtccaccacctgtttttgacacacatcttagtgcacaaatccacataacaaacgctcataaacaacgccgc

SEQ ID NO: 23597 - DNA, 580 bp, Zea Mays
ctgtaacaccccaggtgttacttaggattttcactcaagactacacaagtaagccatcatcacatgtgacttaagttgggaaaagtacaccaaagttggagctcaagatcctaagtaagtgcaacccaccttaaaagtcataccttggcttgttatgcacatataatggggagaattgcccaagccctaatgcaaacccttttggacaagtggagcactagaagtaagcatgaacaaaagggtatgaaaaccacatgatcatgacttgggccaattataaaagatgtagcacacttgataccccacaaatgatagtaagaaagtgaccccaaaaagaattcagaaaaaccccaaaaggttcaccaaagggttgagcacaaaagaaaaatcagaattcttctaagtccaaaaccacccccttttcaaagatcaaacatgttcaccatgatctcaaacttaaaaccaattggccccattgacaaagtggcgcaaaactacctctagaaaaccctggagaagtttgaacccaaccctaaatcgtttgacatgacttggcacaagttttgtcttggtttggaca

SEQ ID NO: 23598 - DNA, 561 bp, Zea Mays
ccgagagagcatacttgttctggaagataacactgccatccagcttcgaactattccagacagtaatgaaaccccccgaatttcctatcgaagggacaaaagcaaactcatcaaaagaattgggacagaaccttcttaggtcagccctatcaaaagattccttcttcgtctcctgcaagcatatgatatcgcaattggattccctaatcacacaatgaatatcattccccttagccaccacgttaatacctcggacattaaaacttaaaacggaccagtcggaataattaatagcattgcgactattcatcaaaagggtcaagttcgttgatgggaagggacccaaacccaattactgggagggcaaaagtgtatctgctaagacgaaacaaagcacaaccagaaaccaccaagttcttgtacacaataagcagacagaaacgccagggccgagacagccaaaaagcctggcaaagttgagacctacaaaataaacccacccgaagcagaattaacatatcagttgtcatcatctgaagagtcttgtttcttgtccccctt

SEQ ID NO: 23599 - DNA, 360 bp, Zea Mays
acctcacctggatggcttgcatatatcgatgatgaggacagaccgactcctcctgtgcttctcatccctcgtctcgcttttgtgtcccaatcctagccaacaacgttggttagagtgcctgtctgcgctctatacgacagctcaatgcagaactcccttcatagcaagtaggtgagccatgaattatctgttactgttttcatcagttgaaaattggagcgatagaagaatggtcataccttgtacactactccgtactcaccctgccaagttctcgttcagttgaaaaattgcatgtgatggctttcaaaaattctattggcaaacatattggttctgcagttggatcctgcagcttct

SEQ ID NO: 23600 - DNA, 586 bp, Zea Mays
gtgttaaaggcacctgatctgcgatcccgaaaaaacgagatgcctgatttggaggggatcccgagatggctaccacatgccaaattgccaatgatcggtattatagaaagcctatttatgtccatgaaagaaagtgaaaaaaaaaactactcccgcagtattagcaagtctaaacccgtaacagcatcggcagcagccatcggctcgtgttcctcgtgtgatcagatgggtggagcgagaggcggcacttctcctgggacagaaataaataaaaaaaacaggtatgaaacacgagcgtgctgttgatgcctgctgctacgttctccggtcggtcgcgctaattaatcagcggatgcaccggtccaggaccgtttgaaccgggtccagggtgcagcaggaccggccaggagtggacgtgcagcggccgaccgaacaaggccaagttgcgacgcgacgaccctcctcgcgtcgtggccgcttctccatctcacaaaggatacggatcgtggcgccccgagaaagcgaggtccagcggccgtagcacgggcacggccggcgatcgggacatgctcgggccggcgggagg

SEQ ID NO: 23601 - DNA, 988 bp, Zea Mays
gctattttgagtatgatccagtaaatatttgtgtatgactgctataaaaaaatcaaagctggactataggacaacaactttgttatagatagattaagtagttgccacatgaaaatcaaagatcaaggccctgcaaatcgctttgttaggcgctctaatgggagttctgatggtacagtgcctgacaaagatcggtagatgcagtgtatctcgccgccgatgaccccgcgccgcgatcctcgtcggtgctacgattcgtgcctggtaacgcgcagataacaatgttggataaaagatcttggcactcgatgagcttggacccggccactgaactattcactgtacccacttgttgtatgactaaccgcggtgtcctcgccggagttcgccgtcttcgtacctgcgccacctgcctaggagcattaccacatcgcagtgaaccgtaatagggagtccgtccatcaccgggagccttgcctcagtaaaagccatgttagcgcttcccagtgatttcccctctctctggtcgacaacgcgccttctccaaattagacgccaccaacattgctctctataaattgatgcccccatgagctccgctaggttattacacacctagtgcaccagctctcgtccctgatcattcaccatagcgtcccaatttcccatttcccctaaatcggatctccgcgccgccgtgagcactgcgccgtgaaccgctgtctccaggtccattctcgtttcccctacccttgtttcagaacccttgcatgctcaggatgctggtcgacccaaccaattgaactagaccacgctagatcgccgagaacacctcggtttatctccggttctcaccgccgtcgtgaacagacgaattcggggccgtatttgtgcaattaacggagggcttagggtcgccgagggtgggattaggtgtcggtcgagttagggctttggtcattaagtatctcgaccggtacgggttcgc

SEQ ID NO: 23602 - DNA, 359 bp, Zea Mays
ttgatcggcgacagattggacgtccggtagatggctctttggctggtcttcatttcgcttcgtgcttcaatgcttctgttgattagacttgtacttcagcaactatttttggcttttctccgatctctatcgatatcttccttctgtcttgatacattcattgcatatactgtatggatgcgactgcttgggaaaatctattgaaaattcctggatgtccccccaatgggtgtagccaagggacggcttggtgcgctgagcgtttagcaaacagcccttgagtagtaacttgacgtgaccgcggggtgtaatcatatcgtccaagcagttgacttcagtcccaatgggtgtcgtgttac

SEQ ID NO: 23603 - DNA, 278 bp, Zea Mays
ggcaaacagatgatgggttaagacttgtcggcatgatgattaggctcaaagaaaaagggactacacttacttggggccctggaccttctagtgaccctggaagcgaggcgatcgccgctcctgctgttgttgcggctgctgctgctggtgtccctgggggtgatcacccctagatggtggtggtggcggtgggaccggaggactgacgcgcctctgcgcgccgtgggcctgggagctggcctcctcggccccacctgcagtcctctggcgcttctggg

SEQ ID NO: 23604 - DNA, 764 bp, Zea Mays
ttatttcaaaatcaactcaaagctcgggggctacacccaatgggtgcacatccaacggagttacaaacgtatcaagtcatacaatgagcccataagcaagaaccagtaacctttgaatcgattatttcaaaatcaactcaaagattcagggcttgtaggggacagatatcccccgggtccactcgggggcgaaaactctgctcggggccacatgctagtcaccccgcagtgacgcctcgtcgtgggccgggcaaagagaatgaaggaaacagaccgacccgggaatgcgatgggcccacgcccggattactcgcggcttaggcgtgatcacgttgaagctgttcgtttttcccgcgtccgacatcctcgaacgtcggagatagctcggagaggaggcgccgggttttcctcgggatagcgaagtttgttcgctattagctaggagataaggaggaagagtgtgatcagtgtgtacgcaggaagcaccctgcggtcgtgtatataaggctaagggggatccccatcactttcatctcattagcagctcaacctggtagacaccacttgtaaacacttcccacatacaaagtcatcccagaaaatagggtattacgctcttcaaagcggcccgaacctgctgaaacttgctcgactctctctttctcgtgcacctggcacgaaccatcgagttacaatccacgaaaccgtcctacccaaaattcaactgtggtaagcatagggaactcagtcccacagtggatgtc

SEQ ID NO: 23605 - DNA, 610 bp, Zea Mays
ccaagactcaggattcaccccacgcggacgacatgtttattttataaaagaacagggacccttttgaaaagatgcagccgcgaaggggtacggttaattctcggccgtccgatcaaaaacaatgttccagattagatctgttattgaattcaaccggtatgcgatctaagccctcagatccagaatcagcggttgatagacgtccccgctgtgatctattcccagcccaccgatctgttctcaacggtcctggtttaattaagcgaaggggtaccctgtgttataatcttggccatcgagtctaggatcaacggtgatcgacacatctcccctcccagaactaccagcacggcggcgcctaagcgcccgcgacggcgcacgccggtgagacgtgcaattggcgcattagtcgccccaaaccccgattggatggatgctacaagaagaggggtcgatggcgagttagggagacgtgatcataccggtgcttaagcggtggtgaggatcgaccacaatgggatgcggactgcggcagacacggggcaccggtgagcaatcaccagtggttcggtgatccaccccacccgagaaggctacaagaatgttcctg

SEQ ID NO: 23606 - DNA, 824 bp, Zea Mays
cgcacaagcagttttcctcatagttttgatcaagcacattatatatgcatgcaagtttggttcagcaataacaaccaaaaccctcactgtcctggaggatgcaagtatgtctcaattttcacaaaaaaaatctaacaaatctggacaccaaacatgaaaaccggaaggaaaaaaaatcaaacctccaatcacttgatttcaactactgtaacaagtaaaaataaaccagtatttcagatcaatgatcacatttccccccaatcaatacatcaaccttttactatttggaactggacaagaggagttgaacaattggaaagtaaataatgtaattttcatagaaatcataggccattgatctgcatcacatgtggctgtaacacatttacaaggagacaaatcatgagcccaaccccgagagtgtggtgggaaagtaaaattgtaattttcacacataccataggccatcgacctttatcctaacgtacgtgagatccaaacgcactggatctaacagagacaaagaacgcatggaaacacacaggctgcgacaactgtgctagcctgacatggggcgagggagattcaacctgggacaccaagagagggatgctgaggatctcatggccaccgacgccggagagctgtctagctattggggaggagctgccacgaccgaggagctgcgttgtggcaagggatgtgagctaccactggatcgtcgaaaaggaggacgttagggagaggagcaggagtcgtggaggtgcgctgccgtcacggagaggcggtgggcgaggtgagggaatcacgctgttgtccccgcg

SEQ ID NO: 23607 - DNA, 553 bp, Zea Mays
cgccgctctccctccccatcgctcaccacgcacggcaatgacgcgatcagcgctggttgtcgtccttccctcacccccaccattactcctgcgctagtgaagttaggcaccgtttcgtcccctgcccactgtgctcgcaccctcacacggcacctccccgaaccatcctatccccggcgttgtgcgccattaccgccgtcgatgtgccgctcgctggtgcccaactggccacagccactccctacccccgggcacctataaaagagccgcccagagctccatcaccccttgcaccggcctcgattactcttctcccctccccggagctcgattgagctagcgtcgccgcctcccttcgctctgatgagcactccgcctcccctctccagtagcctagtgtcaaattaagctagctcactaacttcaccacatcgccccgaacacggaacaccgcatcccacccccaaatcacaccccgtggcctcaccgacgacctcaccaccgtgagagccccgccacctcaccgcggtcggccccttccaagccaccgtcg

SEQ ID NO: 23608 - DNA, 317 bp, Zea Mays
gcaaactgatctatatatggtggtgaggcgggcttgcgcgataatggagggtgctttcagcgtgccgtactacgagtggctcaagccacggtcgtcgccgtcgacgtcctgctggacgacgatgacgctctcaacgccatcatcgatggaccgattattagccgccgttgctggcggccacgacgacgacgaggagcgcgacgccacgatgtgcttgccgcttcttggtaggctcgaagggagggcaaggactcccgagtaccatagtcctgtcaaagaagagctgagcaataataataccaccaccaccaccaccg

SEQ ID NO: 23609 - DNA, 783 bp, Zea Mays
cttgtgcgccgttaccgcgcatagagaaaagacgatgtcgtcgtgagcgattatcaagagcaccctcgtttggggtcgtgcacacgaccagggagggtcgcccatgccccttgaacgcgttgacagcggtggcgtgttgggaggatgacctgagcaccggcaatttctcgacggcgactagctttcgccatggatctgctcatcggcacgagcaagagcttctacgcatgatatcccagtgagacccccatgtagttctacgtatccttctctacatttagcgcacttcggatcggaaatttgggcgtcgggtcgtctgatggttgtgctccggcgggagctccaccgtgtggcggggcgacgtcgttactgcccgggatcgagtggggagaaaggctctggatcattgatcctttgatcaagggctgggaatagatcactgttgtacccctttttgtagattagatccgatccttcaattcgtagatgcacggttacgacttaatattggcataccagtttgaccgtctgtagtgagcccttggatccagatcaaatggctatcacaacataccagttcgtgtcttattcgtggtcgtcaatccgtgatctgatggcctggggtgcacccacgttatgagctgagaaagttttacaaaagagaccatgaaaaatattcatataaacccaccatccatatgagaagtagtaagcttacgcagggacccctagaatttgcaaaatggcccctgagggcattattttaatgcaaagtgaacccta

SEQ ID NO: 23610 - DNA, 835 bp, Zea Mays
gttataagtgttgcgtgatatgagactcgatcgatgtagttaatattgaattggcctgtagagaggtggtgacatgctgaagtagtcatcgcttcctctacggttaagtcggagtcctgcgtgatgatgttatttatgggggtgaatgcgtattgaaatattttatgttgtgcaatatgattaggaagatgaaggatagatatgttgtttcggaaatgttagccaatagattcggacaggcgtgatagaggttgagtcacttatgttataaaattgatgctcgacatgttaggtctcctaaaatgtggtgttttaggtgacttgtgtgttatcccattttaagttgagaaaatgtttaagagaagctaattaatttgctcccacccatgttttgagtcgcaatgactaaaatgggttgaatgaacttgagatgtattacaatagctgtgtgtcgtgccggtcatccaaaaatggcgaaaggtggtgtgtgatagtaattgggaaatagtcacgacattagccaactcatgtcaggtaggagttgattgtgttaagtgattgttatatatgtcgtgtcacgaattatgataataataggcaagccggcgtgtatgctgtctagcgggctgtgtcgttgctctagctagccgactcgttagatgactttagttaagcttgtagtcactttaaattacttgttgtagtctaaatgcacatggttatgatcgcgggtaaaaatctatagtgctcatgtggtgtgtaaattaaaatacgaactagtgggtgaaaagcgcgttgatatgcatatatgccgaaattgatgattgtggtgaat

SEQ ID NO: 23611 - DNA, 314 bp, Zea Mays
aggcataataatccattcacgacaacatcactaattatattacttcatggtgtccaagcattctcgcacacacgcaagttgccagcatacatacactggacttttaaagtatggtcaacacaacatgatcccaagttctacatccaacaagtcttaaaaccgacggacaaactgacaagcttgacgacaaaagaacgcaaaagacagtctaatgtctagcgatacatctactagactacttctcgtggtcgctgtccatgctagaagcgttgtcatcttcttcaccggcttcgtcattctcaacaaccggctcc

SEQ ID NO: 23612 - DNA, 876 bp, Zea Mays
gtcaatgttccaggagtgctctaagtcttcgccggagggcattgctagcctgtacgcgctgggggatgccttcgtcttgacgataaatggaccctcccatttcggctccagcttgccccgtgattctgtccgggtggtccagacgagtatgaggtctcctttgttgaactctcttgggacgaccatgttgtcacgcccaggccttagtttgggcttggtatttgttgagggcctacagggcgaggacgcggtctccgtcgatgaggtctttggaggttggttcgtcgacgtcggggaccgctgatgtgcttgttcggggcgactcgtgatttatctcctgtggcatcatggcctccgatccatataatagacgaaagggtgtgaatccggttgcccgacattcggttgtatttagggcgcagaccacttcaggtagttggtcgacccatttacccttcttgtcattgagaattcttttcttgatggtagtgaagatcttgccgttggcgcgctcgacgacgctgttggattgcgggtgatacaccgaggcgaaggcaggcttggtgccgatggagaggcagaagtccctgaagtcctggctatcaaactgtgtgccattatcgactgtgagctcagacgggactccgaatcgacaaacaatgttttgccagaagaacttttgggcggtcttcgatgttattgtggatactgccctggcctcgatccacttggtgaagtacacgacggcgacgaaggcgaattttaggttgccttgagccataggtagtggtccgacgatatccaaccccagcgttgaagtggccatgtgtgggcgatcagcttggtgaactgagaagggttgcccgagcgggggaa

SEQ ID NO: 23613 - DNA, 332 bp, Zea Mays
ctcggaagacttgcccttctgccactgctcccattgcttagttgttccctagacagagtaatagagagactctcttcagtggtagctatgttggccctggaaccaccacgacctctaccacgacctccgcgacctcttccatagctcccacgaccacgagtaccccctcgtcctccacgagatcctcccctgccaccatttcctctagggttgggacaattgtaactcagatgtcccctttccccacaattatagcattctctatcctcaattgcaacgtatgctggcttcacatgattaccactacccatcactcgaagtctgctctcttc

SEQ ID NO: 23614 - DNA, 502 bp, Zea Mays
attgtacgtgacacgtgctaaactttagccattcaaatcaaacccacatgttcccattaaaaaaaacacgacggctgaaatctattaaaaacaaagaaacacaggacggcccggttatcatttggcccatcctcctcccctccctcccaaggtcccctcctccgctcactggcagcgccaagccgccaatcgatgattgcatatgcaaggtaggaagcgttaactgggccttgacccagtttagccgtatcgtctgaactataaataggaggagaaaactattttcttccaatagaagtagaggaagggaaataacaaaaaaatctctctctgaacaatggagagcagatagctgttgctacaggaatcccgtgtggggtgctggtggtggtggtgctgctatcgggtagctgggtggagacgggagttagcaaggggcatcgatccaaccccatcggccatcggggtgggactggaccggcccgagacaaaagctgcgtcg

SEQ ID NO: 23615 - DNA, 832 bp, Zea Mays
cgggagcgctggcctctaaagcgactccttgaccgaaggcttgggctatcgccatgcaaccagagtgtggaggagaagaccctacgtgaacatccatggaagtgtgggagggagaacccactcggacaccctcgggggctaggtcacagctcgtgttacccatccgagccggatcatctccggcaacaccctcgggggctgggtaagtgccagcaccatccttgagggccgagttctctgcagcagccacctctgaggttgaaggccgctcagtcacttccatgggagcagtgcaatctagaccagtctcctaaccctcaagaccgcgctccaaggtcgatgaggcgcgggacgctgcctgggatgaccccaacccggcatcgggcacatcagcacaaacacccatcgcaccacgatctgccggctctgacaacagatcttctggaaccatgtcttcaagagtttgatcaaagttcgccagagataattcttgaagaccaatgagggcagacaaggcaggagaaggaacaccactactttccccactagctatgtaacgccggctgttcttccgaataaaagggatttcatcctcttcttcatcatcttcatcaacaacacggacagtacacccattggggtcagcttcagcaggatcacacccatcggggtcagcatcagacgggtcacacccattggggtcagcttcagcaggatcacacccatcggggtcagcatcagacgggtcacacccattggggtcagctttagcaaattcaggcactagcacttcctcagcaacaggaacagaaggaccggcaccctgatccaa

SEQ ID NO: 23616 - DNA, 1180 bp, Zea Mays
acgtagaaaactttaccgctccatatgaagtgtacctacacaaaatgttaagaaacatgatctgacaagaaatgaccaagaactaaaaactatgaaaaataactctaaaattattcaaatgtacaacagacagaatttcgaaagaaatgggaaggcgaaatggacaaatttggtcaagaattcctcccataagcaaacaaaatgcaggggagcaaggattgaagaatccagaaaactctactcttccatatgagctttacctacatgatttcaaaattccaaccacagaagtgggtaatcttggcacaaatttgatcccaagggaatgttatcatcagtcatcacaaaagctctagttttgaatacacattgtagtgggaacaaggtgttcagaaacagataactctgtcacacgacggaacactgtgtgtaagaaaatctgaacaagtagacaactataacactggttttgatttctaaacaattcttaataatggctagttttgttcagaaacagacaactctggacatcatgatggggaacaaaaatgttcagaaacaagatattgcaagaaatgaccaagaactgaaaactacattaacaggattcaagaacctagaaaactctactgctccatatgaaattcaaaaatccaaccagaaaagtgggtaatcttggcacaaatttgatcccgagggaatgtaatcatcaatcatcacaaaagctagttttgaatacacattgtaatgggaacaagatgttcacaaacaggcaatcaacattgattgtgatcaaccaagagatactgaatcaaatgtacaacacaccgttatctgacaagatcaacatatgacaaacaataaccattgttgagtaagttctcaagaaggcacgtaaattttaggtctccgaatgggatgggaaggtaagaagtactaatttggttcaacattcttccgtaaagcataccaaagtgcagggaagcaaggattcaagaacccggaaccctactgctccctacataagagacccacacgacttcaaaatttgcctggaaacttttttttgagaaagaatttgcctggaaacggacacgtacaagaaacacaatcatcacatttttgcagttcttgtaaaaccgacacagacaataaacatccagcgttagtgctccaaaaa

SEQ ID NO: 23617 - DNA, 576 bp, Zea Mays
ccgagatacgaccccgatcctagatgcggggatcaacggtgttcgcttagtggggaggaaaggggtatgttgtcttgatcccggccgtttgatcaggcatccaacggcaacggatcgtcttcttatccaaaaggcaggacgcggcggagcagtgcgcgtgcggcggcgctcacgcaggagagagaatatcggcgccctggccaccgaatcgcgacacggggagcagcaaaacgaagcaaaggatcacgcagaccgcatggacaggttcttaccccagtagatagctcggacgcatgcgaccacgatgagtagcgacaccaaggcaccgcgcgaccacggcgagggatttcctagccgcagatcaatctcacacccgccaaccaactcaatccgcttccgcatatgccgaggaagactccctagtagtcaatccaggcaccggcgcaagcttgccgcgaatcgatgatggcagccacgacggcgtagctgaaatccatgccgggagcgggaggacgcgaaggcggggtcagccggagtgcggatggtgcccgcagcgccacgggttttatatacgcc

SEQ ID NO: 23618 - DNA, 549 bp, Zea Mays
aagtagtttacgtcaactaaattgaacttagaaatataattttcgcgtttaaacgtaatataggttgttcgtcgtcacgtcattatttagccgcggtttgttaattatttaatgtgtcgtgcgtcgcacaacgagtgcgcgcgctcgcatttgcttgcgcgcagtgcgtcgacgggactccgtctacgtttgcatacccttcgtctacccctagacggctctcgtctactcccgtctacccccgtctaaccccgtgtgcgttcgtgtcgttcgccatcgcccgcgcgtcgcgcaataaatcgtcgcgtgctgtccgcgcgcgttgtgcgtgctgttcacacgtgtcgtcgtgcgttttacgcacgctaatgattcatctcacctagaatagctcgcgctaagtaaatatatatttaagcaacggttattcgaacaacacactaatcgggactaagtagtaattttactcggcatgtgattattgtctgttaatatgattaagccgaattaaatattataattcatattcgcttagtatacatgtgatat

SEQ ID NO: 23619 - DNA, 535 bp, Zea Mays
tgactcctcctccccaccccctgaccttgattccctcctcggtgctgattgtgtcgacatctcccttccactgccctctttcacgcctacacctcgcacggccccatcagccctacctacgccacaagcgaccccgtccatgtgcgtggccccgcctctctcgcctacgccatgcacgcccccatcaacgagcgtggccccgctgtttctgactgtgccatgcatggccccaccttttttgcctacaccatgcatgaccccattgacgagcgcggcctcactgctcccgcctgctccatgcgtggccccatcaccgatgtcccattcagcgcactttgtcgacctcgcccgtgtctaccaccatcgtgggcggaccaacctatcagtccatcccgccccatcggctcatccctgagccgagaccctggtgagccacacggtcgccatccaccttgaccccacccacattcacccgatggtgactcgctgctcgaccgtagttctctgctccatcgaccggctggtcctaacagtc

SEQ ID NO: 23620 - DNA, 461 bp, Zea Mays
ggcgacatggctggctacccgcggtcactaaggtacgacgctagtgcatggagaccacgtaacaaggaagcacagtgtgatagaatttgggcgcgggcgacaccgcgacagaagcacacgagccacggtgcacgccggtgagatatttttggcccttccccggcctaatccgcaagatggtgaatcggctcagagttatccgccccggccatctctatctcctcttcgtttggacgtatccggattccacagcgacgcggatcttttcttcagatatttcccagcgcctctgatcttcctcgcttaactgaaccgactctatgtagccccccctttctcctgattcttgttaaggacaggttaatctccgttaacaagacttgttcaccatacaagggtcttcaaacttactataggattctaagacctaaactgaataggtcccaagatatggcgctcac

SEQ ID NO: 23621 - DNA, 1001 bp, Zea Mays
acaaaaacaaaaactcagatgcaacatgtcgaaaaagaccacatcgacggtctttggcattcgaccactccgaagtcactgcgagaggaagcgtagactaccctcccgtgcgacactccgcgcaaaagtcgcctaagggtgcagctggaatagcacaacaagtgcgttaattgaagtcttttatttaaaagacactccacgcaaaagtcgcctaagggtgcaaccggaatagcacaacaagtgcgttaatcgaagtcttttatttaaaagacactccgcgcaaaagtcgcccacgggtgcagccggatcagcacaggcgtgcgaacacggccaacaggccacatcaccatacaaattacagttacatacactcggtgagggcatcatatattacatcggctgaactttcgggatgatacccatctctctgtaattgaacaacattatcctcaattcctcaccctcgaaaaggtttcgtagatccccttcacctatgcttgccccaatcggcgaggacaacaattctcgtttaccaatccggtctacttgaagacggccacactccatccccatacgacggcgcctaccacttcgcaaaaactcacccacactatgtttcgacaccacccttcaccgcctataccaagtactcgcactaggaagatccccggcaccctccacacgcggcaaagactccgctgcagccacatctaacgcagcaaaataatccaagccttcatccgaggactcctccgtccaggaaaatgaactcccagattcaccatcagattcaaaacacttagacacagagccaaacaaattatcatcggcaggcactacggttgaggctgccacaaaatcagtattgccagaagcggttgcttgcgcaggcccaaacatcggaacctgcgtagcaaccgaggtttagtatcacaaaaacaaaagtttacacttgaattcctagcccctatttcgccacctgcgaaggcccgactgacgcc

SEQ ID NO: 23622 - DNA, 453 bp, Zea Mays
gcagagtttagcaacgtcatggacatcgctagtggccaacttatctacttctcctcatcgtacaaaccctacctaaaggcgacgatgatagaggcaggggtgatgcataggatgatgttgtgaacctagctggctgatgtgctggatgaagtcacacaacatctccctaggctactactgaacaacattgttgttaccctctgtgccacgttgatggtaggaatcgtagaagtttgctatgaattgccaatagaattcttcccacaaactaatatagttgatggtaaggctcatgagccatgaccaggtagacccagccaataccagatggaagtagttgaccattaccacctcactacctcctataccgaggatggtagtgttatagatcaagagaaattcggtgggttgatggacccatcatacttctcggggatgtgtgggcaaaagttg

SEQ ID NO: 23623 - DNA, 389 bp, Zea Mays
gaaccccaacgttcccctcacctcgcgattctctctctcattcttgcacagccagcctagctccctctcatgctcgcctctcctcacaactgccaccgtcgcgccgcatgtccatcactcgcgctgtcgcgtcctcgcctgctggagcgtcgtcgagctcgtgctcgccgcgtgcgttcgtcgccgacgcgccgtgccaggccaacctcgctgcgccatcaccccctgcttcagagatccaccgttcactacgccggccccttcggagctcgtccccaacattcgtgtcctcgtccgtgcctcgccttgttgccttgacattcgtcgtcgtccgaggtgagcaccttgtcattgtgtaccccatagatagtctacccgtaggtgtctac

SEQ ID NO: 23624 - DNA, 437 bp, Zea Mays
cgcaacgtgagagggtccggcttccgcctcagcagggtgtgcaggtacactagggtgtaattgcgagtatagtacatgaacttcctcatgcaacgtattgcaatagacctgcaggtcgtcgacggttgagctaagttccttaattcgggcctgagcccttgcttccttagcacatgctagcaaacgagactgtactgcccagtcaagtgctaagtcccgatcagcaagctgatcctgcaggtgacggatgtcccttcttagttcatttattctatctccgtctgcgacccaagcatcggtcctgtgttgcagcgctgcttgaagtcgactcactcgggcttcaagatctcctatggggtcattactcccactgctactgctttcatgtcgaggggccagttgatgccggggcacaccgattggtccagttgacttgc

SEQ ID NO: 23625 - DNA, 350 bp, Zea Mays
gttcaatctgggtggaatgttgtgataccggtcctttgcccctttaaaactgtagaaaggaagctcaaagagaccgccaaaaggttataagcttggagcgaaaaaaaggttggtcatgtgcattctcagcttgctttgaccaaggaagtcctccacaggcttgaaatgactcaggatattagagtgctcatccaggttgagatatggctcaaaaaccggcttaaaaagaaagctttactgctatcctctctcatgcgcagcatggctaggcttagatctagaatttcctggctaaaggagggagatgctaatacaaaactgtttcaccttcatgctcgacattgcaagag

SEQ ID NO: 23626 - DNA, 538 bp, Zea Mays
ctttcccatttgcactgctaagtcctctgaggttggatctgactagcctcttgcagtcaagggaaatcgcttcggctgccgagggggaaaacagggggcaaaagaagcagtctatgatgaatataatggaagctattgaacagaccccaccctcggcttcggtagacaaagctaccatacccgtccatgtcgaagctaccaccgcagccgaagccgagaatctctcaaccaccccgttggaaattgacagacttatatcgaacgtggttgcagagaaagatgtagccgcagtaccatctgatgaagggaaaagaattgaagaaacctcttcggaaagtatgaacttcgacattcggcacctgggtggccaacaacttttcgaagaggacatatcaaagttaaaggaatttgccatatcccgcggctaccagcccggatcaatgctcttcggtggggttgatgaagaaattgtgggatgcatccgcgaccgtgctggggctaaaattataagcactctgtcaaagtgcattggattccc

SEQ ID NO: 23627 - DNA, 418 bp, Zea Mays
aggttgagccaatgtaatatatgatgccctcgttgtgtgtatgtaaccgctatttgtatgataaggctgcgcgccttcgttgatccggtcgcgctcgtgggcgacttctgcacggagagtcttttggaaagtacttcgattttgcgggcctattattccggctgcacccttaggcgacttttgcacggagagtcttttggaaaagacttcgattttgcgcgcctattattccggctgcacccttagacgacttttgcacggagagtattttgggaaagactttgattttgcgcacttgttgtgctagtctggctgcacccttaggcgacttttgcacggagagtcttttgggaaagacttcgatattgcgcacttgttgtgctattctggctgcacccttgggcaacttttgcatgga

SEQ ID NO: 23628 - DNA, 518 bp, Zea Mays
ttgcttcgatcccggcattgcgtaggatcactgggtaggcgcgtggggtacaggaacatcggaccgggtgtctccggccatggcaccaccgcggggcgcaagcgcgccgccgcttggccaccgctgggttgggtgatggaaccgatcgtcggatccggatctaacggcgctgtttagatctgcatacccattcggctggactcgatatggaccattgatctggcgatgtgcgagtaataatgcatcacgttcattttaaatcatgttcgtccatctcagattctgcggcggggatcggatctggtcatcgtgagttttgggccgtggatcctagatctggcggcctcagtttagtatcagttcagttaggtcttatatctaatctgatccactaatttctgatcggacgaccctgcatgctgcgtaccccttcgtcgtgcctagtttgcaaaagagaccctgtattaatagtttatcaacccgtagtcctgagccatagataaatcatcgcatttggg

SEQ ID NO: 23629 - DNA, 450 bp, Zea Mays
gggaaatcaacaaaagtatcattgttacctttggaaggcagatcgtccagattgtttcccgccttaagtttttccgcccgatcaagcgagcgttcgctcactgagtcggcgcgacgcttactgcgacggagatcatgcacaattcctgtcacttcctgaataccacctagagcttcaacgctgacaatgccaacatcagacctgtctcctgtggctgcgccaaatccacccgagcaaagacagtgagtggcaactggacccccatctctcccagatttagtcccaaccttgctgtttgttgtgcggatgatgccatgtcaacagcaccagtagaaccatttgactgatccagcagcaccgatcccctactccctttttcgcccaaactgccttccttattttgatcctgaaactcatcatcatcatttgcccccgagtcatccatatcca

SEQ ID NO: 23630 - DNA, 453 bp, Zea Mays
cgccgtgaaaaacacaatgtggtttgcggtctcgcgggggagggggacgcgatcgcaccctctacgcctacctgtacataccctcggctagcttgatgttgctggttgggtacgcgatgggggtcttcatgttgctgctgttgttgttgctattgctttagtaatgttatgtactttctcaaggaacttttgccgttgttgtcctcgagactaggatttgatatttgtagtgtgcaaagactccgtgagcttgcgctgtgtctcgagcttgcgttaatgcatgtcctcataccttgtgtatgttcaaatagttggtatagttcctaaagggatgacggtgggccacgtgtgcagtggctgtagaggtgacctgcgtagagaccgttgatagcgtaatgtatggcaatgctgtcctcgaccgatggaagctaggattgtaaagataggaattgc

SEQ ID NO: 23631 - DNA, 719 bp, Zea Mays
tcctgggctgaattactagttctcggcccactaaaaccctgacttcttctctatgcggcccatcttccccatccacgcgcggtctggctagtggctcttcgcgctgacatgtggggcccaatggccagccactgcccgctctcatggccgtcatcccggtggctctggcgtgtgggaccgcttgtacggtcgcgctcggaccctctggttttcctctctggttggtggacccatgctgccaggattgtcttccccgtgggccacgcgtgaaacaggaacccgaagtcaccgtaggctattaccaccggaacccgcgaactccgccgttgatctcgctgctgctccgctcggactcgccctgcccctataaaacccggtcgctctagctcccttaaccatctcgacgagtacccagtcaccaagtgaaccgtaggcggaagggagagagaagaagattgccgccgccttgtgcatcggtcggggctgcgtctctggccgtggaaggaagacctggagcatcgccgtgacgcggggatgatgtgtgtgcccccacctggcagaatcagcggctatggcgtgcgaatttcctcgccgacgttgatactccaccatggatggcacttcaccgtggccaggtgctccccacgccgctacaaccagtaagacttccttctttatgctcacaaacatcaaagcttcgtgtagctccattcgatttg

SEQ ID NO: 23632 - DNA, 446 bp, Zea Mays
tgtgtcacacgcgaagcacatacgatatgtttttcttccccatgtctcgcctaacaaccatgccattatctcccagatagaccgtgagaaaacacccgagcccaccatgacacgaagccacatacaacacaacactcctggataataccacctcgttagatgaagagaacgagacatcgagcgagctataaaaaagaacatgtctcattttgaactcatacctccttgaccttctagctaagataaagtgtaaattctgtagtttaataactggtacgtgggtcatatgtccactttaattttaaatttatttttatgaggagggttcactttaattttaaatttattttatggggagggtctattacattgtcttgccactagatccgactcttgggtgtcgcacaattgttgcactatactatcgaatatgattgatgtactgt

SEQ ID NO: 23633 - DNA, 530 bp, Zea Mays
cgagattccaggcttaaatttcaccaaatttcccgttttgagcgatcgtttccgagccgagtgcccaaattcctttttcttcgcctaaattcaaaccaagcacacacttcactcatattcacctatataaacctattcgtgaagtatcggctcaattccatatcgttttgtgcctcaattcgaattccaaacctcctatgacactatttatccttcaaacgtcgttttcacgtcatttgacttctcgatcgtctcgtctcgtgccatatctctctgtgtatgtatttattcacatttcatatgcttatgactatgtgactaatacgtgctcacctcttctgtcatttcagtgaccttgattgaccgtgtgccgtctcccgtcctgcctggatcgtcacctctcgtgtgagctttccaggtagtcatctcatcttttgctaatctatcggtcactattgcactgtgcttagacactctctctcatttgcagacatcagttcaggatgccgcgcacgaagaatgtgtcggcg

SEQ ID NO: 23634 - DNA, 613 bp, Zea Mays
atcgagctcccaagtatctgcagtgtggatgtgcttgccgttgcaagtgctctatgttttgacttgtgctagtggtgtgttcgcgtgattgctcatgtcttggatcgtggtcctttaccttccctttataggctaaggtgggagaagcaccctcttacaaaagtctaagagttaggcgaagcatatgaaggccgggcattgtcgcgtagcccattgtcctttagggttcctactggtcgagggacgtcgtgagtaatgtctccttcccccgtcgacatattgtagccatgcctaggccacttcgaagcctatcgttatgctccatcacttcccgcaatggtttatccgaaatcctttgtccactccctagccattgagtggttgcgccggtgtcttcctccatgccgtgggggatgacgtatgttgggggcaaaggtgtatcgccccctcgctcaaccttttcataagagggacaaaacatggaggaaaagcggaagcaaacgaagactgaaagagcggaggccctaagacggagggagcgtgcagagcaggcgaaggccttgttggtccctgtcgaaactaagagcagcgaaggcccctacgactgccaaag

SEQ ID NO: 23635 - DNA, 534 bp, Zea Mays
atacggagttaccaaccaagcttatggtaatgtcacctacaccccaggaattgacttgactctctccctgggaaatgacttgactcagttccaagatcatgctgttgtgcatggcccaggtccaattattcaggtactactttgttttcattacctttggttgcacatgtttatacaggctgttaagaagaatgctcactctctttaatttcaggaaaaccagtcgttcaactctacctcacaagtgcctcaacctgtcaatgatcgaagaaagaagggggttgccaagcgtgagaagaactactccaatttgctgcctattgtttgctgaatgatgttggtaaatagctgaaataacataggaatgatatcagctcaattcccacttcccagagttttctatgcatattttcccccgaacgtccatcaaaagtatgtgtcatgccttttactataagaagatatcaagtgttgatgttacagataaaatacgagtaccagaatggtccaaacttactgtacagctcttatcgc

SEQ ID NO: 23636 - DNA, 459 bp, Zea Mays
cttgcccaatacctcccggcaccatgattccatttgggtcgttgtggacagattgaccaagtcaactcatttcttgccagtacacaccacccacaggacagagaagtatgcggaaatctacattgaccagatagttcgtttgcatggaataccaaggactatagtatcggacagaggagcaccatttgtggcacgattttgggagaaattgcaagaaacacttgggacccatgtaatacaaagctcagcataccatcctcaaacagatggccagacagaaagggtaaatcaaattttggaagacatgttgagggcatgtgtgctacactatggaaaggattgggacaagtgtctttctttggcagagttttcttataacaacagctaccagtccagtctaaagatggcaccttttgaagccttgtatgggagaaggtgtagaaccccgctaaattggtc

SEQ ID NO: 23637 - DNA, 602 bp, Zea Mays
gcctaaacaagggtctagtactgacacgtgtccaggctttatcctgtgcgcttgcgctccccgctcaggcggagacctgatgctaccacgtggcttgttgcccgtgatgtaagccatcggacggagcctgacgtaaggcctctgggccacgcggtctctgcatttattacggagaggacgcatcgcctgtccaccctgctgacaggcgatgtgcccccttagcatttaatgcgtcctgtccactccgctggtaggcggcgccagggccatcctgcagacggcgtgcctgtccagtccattgtcaaacagtgcgcccgtgctgcggggtgcactgtgtccatcatcacttatacgagaagcttcccctgcacgccgatattacgcagatctcagatgtcaggacgcaagaagattgctccagcagcgaacattagtagctccaagcactacatccgttatgttcctgggcccacatgtcggggctcagtacccttgtacgtgcccccttagttataaaaggggaggcatgcaacttcacaagaggacacacagactgaactgggacttagactctcagctctcaagcttccacaacaatccaa

SEQ ID NO: 23638 - DNA, 417 bp, Zea Mays
gtttaggtgtggaccgtgattggtgcgccgccggagaacggcggtgtcgtgtactggtccgggctgtatgcacgccggttgaccaacgggagagagagagagagtactggggagggcacgacgtctatgcatcggcggcatgaggttgaagacgccagggcgtccgtggattaggaaatagacggtcgagatcagatgataggatacctcttcgccagcgcgatccgtgctgttggcgttggatcaaagggtagcgattagatcgtgggctcggtgaatgtggatcgtggatcatggatccaactgcccagatcgcgtaccggttcaatgtaatgtggatctaatctaggtcgtagaatcccgatcggacggtcctgggcgagcgataccccttcgctggctcattttacataagcg

SEQ ID NO: 23639 - DNA, 827 bp, Zea Mays
attttttgtgtggggaatgccaccttgctaatttgtgtatgcccaataatataggctgggatcttttcgcagtgcctctgcagggttcattgggccagttgatattagctaggttgctcattgctctgttaatacagagattaaaaaatgcggccgattgggacacttctgctacagaaaactttttcgtaattgatgcttcaatatatgttgtccttgaggaaaaaaacaagaaaacattagctagcacgcttggttctgcatagaagaggaacaggacgcatgctaggatcacaaggctgttttttttaggttggtgtcatgtctacaaaatagggttggtacgtacttacaagggcatgggtcaccgctctcatgactaagctagcataggaggtcctagcgtggtgtgcggactatctgagaatgtgatgatgatgacatgatgcagggttaggttggtcctggaatatgataccgtgagggtctagatgcaatgctcaaggcaattaccatgtgtagtctaatcttcgcatgattcaggtggatgtgagcgttgcggtagttgctcgttttcatatccaactttgcagcttattctctgtcgccgttgtcacatctgagccatccaaatgaaattcatgtaggacagtaggaggcttgcattcagaaactacgtacattactactaccttttcttctcttcttcatggcaaagtgcataggacactctgcccacaccaacaataagataagataggaaaaggacccaataagtttagggatgacaagacccacgagcacatagtttataaactcgtacccac

SEQ ID NO: 23640 - DNA, 322 bp, Zea Mays
cttcgatcacagcggcttccgtgacctcggggatacgatttctcatggtctggaatcttttgaggtacgaccggagagtttcgtcccctcggcgcttgatggatttgaggtgccatggttgcgccggcttgtcggagagggactggaagttggcgatgaaacatcgactgaaatcactccagtcgtcgatgcagtgtcgtggtaggtgtcgcagccattgcagcgcatcttgcccgaggacgatgggcaagtacgcggtcatcacatcctcggttgccccggcagctcgggcagcagtggtgttgacggccagccagccccc

SEQ ID NO: 23641 - DNA, 454 bp, Zea Mays
tgccacggcagagcgcagatcgcaccgagcaccgattttgtaaccaagactgcaagataaagtagcaagcaggtccaagccaaaaatatctctccgaataaagtgcacaagctcgatatagttttaatctactgatgtcgacactcgtcactcgactatactatagtagcaaagttgtgcagcaaagtcaatgttacatggatatgcagataccccaccagaaacagctaattatgatcatatcttaggtgtgtggcatagacaccgggagagtaacagctacgtttgcatcttctgaacatccatcacgccaccaaagcatcattttctaccgcgtaagctgatcgattaaccacaagagtagcaaagtacgacacgcctgagtcttcattgcatggttccctcttgcagagctttcaccttcacaaatcacaagtgagcggcaagcagccca

SEQ ID NO: 23642 - DNA, 858 bp, Zea Mays
cgaggggagaactgtgggttgattccctagaagtacaagggcgcttatgcaagttggccacgcgaaggggtaggcacggtttctggccgctggatctcactccgaggatctcgatcagatggcgctttaagtgaactggtaatcaaccgaaaccgttggatccaaagccaacgcccaagatccaaccacgccagtgcccatcccacccctcggatgggcgacccacggtcaagatctaaagtgctaaaagggggtatcaatggtttaatcccagccgttcaaatcaaatcaacggacgcgcacatcgtcttcaacccctggctccctctctctcttctttttctccttcctcagttgatattccacggccgaacgccataagagcagtagcgagccaccccgagctcaccatacgagcactaatctctcccgccaatgtactatcctacggccataggccctcttccacctccgacacgccggtgaggatgacccgcccccaacatcttagtctacgaagctctaccgacatgacttagtaaattaaaagggttttagggattgatgggtctcaccagaagctcaagcgccggatcgaccagcccgccgtggcagccccgcacaagtcttcaacgatcggcgaggtgacctggtccgcttcacgtcgcacgcacaggcaagcaccggaatgtccagagcgcggctgtgtcgaacacccgcctggcgaccaccctcacgttctctctctgctcccttttcttctctcccgatgacgcaaacacgtgggagtcgcctggtcaaccaaaatggcgagcgccaggccccagtttataggccgcatggcgttagtgccgaata

SEQ ID NO: 23643 - DNA, 571 bp, Zea Mays
cgatgcgagtggtctggggggaatccgcgctgagctggatggtcttggtggagatgccgtctggccccgatggctgcaccttaggcaccttggccggcatcatggtacaggacgccgaggggtccctccccacgtcatcctggcgagcagcttctgccgctagggcgtgcagcttctcgacagcggcgagcgcagcagggcggtcgccccgcatgatgaggaccccagccggggatggcatcttgagaaccaaatacctgtaatgggcaatggccatgaaccggtacagggccggcctgccaataatggcattaaaagggaggttaacctccgcaacgtcgaactggacgttatcagtgtggaagttctcttcggtcccgaatgtaaccgggagtgtgatgctcccgaggggatacaccggctgagggcccactccggagaatggacgtgagggtcccagtcgagaccctgggatctatagttgcttgaatgcagcgtggctgatgacgttgagcccagccccaccgtcaattaggacatgatgcagccgcatgttggcgatgacaggggc

SEQ ID NO: 23644 - DNA, 352 bp, Zea Mays
cctcgcggtgacttcgatgtggtcgaatgccgaagaccgtcgatgcggtctttttcgacattgctttaattttttgctggggattttcgcgtgtatattacatggctccgcctcattaaaaacctcaccccccgggaggaaaagagtgcgggccggaataaaactgtttggtgaattacaagggcgtgttagccctgaggatttaaacaaaaaatttacggagattgtcaatattctaggaatgttccaggtcttcgccagattgtgttgttagtctatacgcgctgggggacgacttcgtcttgacgataaatgatccctctcactttggctccagcttaccccgtgactc

SEQ ID NO: 23645 - DNA, 674 bp, Zea Mays
gcgggatggtgcagtagtgaagaaattttgtagaagacaagagctatttggatttgattacaaatctgactaggattcgccggcgtcagacgtccgccctatgtgggaggatttgatgccgtcctagcgacggaggcagagaattggggacgaatacaatctgggcggttttgttaagtgtgcagaacagaaggtaacattttgtatacaaaatggtataacatctgattggcagcctagccataagcctggtggtttcctcataggaggtctcaaatttgaatcccttgggaggattcttttttgctagattctttgttttcctggtttaataccttcgcaattcatacctgacacatgggctcaatctgaaatgagctaataaggtggccaactaatggcattttttgcttggttgtaccatgacggtttttattttgtcatagtgacatcatgtaccatgggataaattgtgacatttcatatctaatgatctgtgacgattttgagtcaacgtcactatactttgggtaaggaaatttgggcttgtgtgacgagataaagaaacaggctcagtttctactgcctagtctacatagagctctaagcataggcttgggctcggatcggagttcctccagaggcgacgatgaagaacccaccaatggcaaaag

SEQ ID NO: 23646 - DNA, 367 bp, Zea Mays
aggccagcagtgaagaacgcctcaataacaaccaactcaccctccggctctaggacctcttcggctcctggagcacacccaacaccatccccaaaattccccaaacactgcatctcatgcacgtggcccgaataaatccttgacgtcccaatctccacagtgtgtcccggtaacaactccactaccgcctctgaaacgctaatcatcttctccgacgacacgctcgacggtgtagtcgtggtagacaacgacgaggaagaagataacataacgtactgtctgcaacggcgggcggtttgcttcacgcgggctagttcaccggcggcgagaaatggaaagcacgtagaaattttctcagatgaagaag

SEQ ID NO: 23647 - DNA, 603 bp, Zea Mays
gcggggaagggagagattagcggtcgccggcggggttcgccgtaggctggcgatggcggtcgttctgctcaggcgcgaggtaggggaaagcctgtcggccgtcgatctcacaacgaacggctcagattaggaggatgggtatcggttaggtaaaaagaatcgcgaccgttgatccgcgatccaacgggctgcgcttcaatctcggttatgtgaagcgcggaccgtagatttccaatccaacgggctgcgtagcgtaccggttcacttaagtcgggtcctgatctgggccttggatttctaatccaacggccgagactcgcccatacccccccccttcgcggggcatttttttaaagagaccccgaggaaagcagtaatcaacccgccatccactcgtactgtgctctgtgacttagaagacttacaccgagaaccctgtattttctagaaatcgaggcccagtccagagagaattaaaaacagagaaataatattagaaattcatttttaatacaaaaacaattctagaaacttctaaaatgcatagaaaattcattttagctccaaatcgaaccattccaatttctaaaattttgtaatttt

SEQ ID NO: 23648 - DNA, 555 bp, Zea Mays
cttgaaagctgatggtcggctgacaaggcagatgaaggctagacacacggctcagccggagcatcaggcgggtgcaacggcgaaggaggggatgaaaatggcagcagcatctgccggtgcagttcgtgctgcgcctacgccgtctgccgttacagtttcgcaccggctttctcgaccggaggacaccgggtttcatctggattatgccgggcctagaacacataccccttctcacaactaatgcgcgcgcgggatcagaatcagatcagttcctgaccaagctactcttcctcctaatcttacttttcgtatttgcaagcgacccgtgtacatgacattcccagtcctaaaaaacgtcacattctcacgtacatacctgattgagtacatatctgatctgtctcatcatcctggcccaacaaaatttatagctttttcctcaaaaaaaaaatctagctagcaggccggctagcgagagagagtactttaccaacaactcatccaaattgttgacttctcttgtcttcatcagcgtacactcatatgctaccttca

SEQ ID NO: 23649 - DNA, 1564 bp, Zea Mays
aagaaatattatggcgaacggtagaaatattattcaaattggaatttagtgtgataatgggaaaatctgaagtctaaagtaagaatttaaatttttttgaatctggaaatttgaacttgagtaggaaaaatggaagaaaagaaataagaaaatagaaagaaagaaaagaaaaagggacagaacactgttgggcccgcggatcccttttctcggcccatttcacctggtctactgcgcggcccaactcccctaacccacgccgacgctgacttgggggccccgcatgtcattccgttcctctttcctcctcacagaaacaagcgagcatggagatcggtcgttgaatcggccacacatttttttccccttccgaaccggatactgcgctgtgattaagcctgtcagcgtttcttcctccatgaaaccaaaaagaagcatgccgccatccgcgcaactgaaatctgtttctgcgccgcacatctaccaacctccccgcggactcgagctgagccgtacgcccatatctgaaccaccatgccggctctatcttcttccccatgactgtcgctaacggaaaccgtgaaatctgccgcgatcagggtgttccggtcatcctctcgggacatatattggcggggccatagacctctttccccatcctagtaggagctagcatagtgttgcctcgacaaatcgccgggcttcatcaccatacacggagagaaaaaaaacggggcccccatctactgtaaaccccgccgtggtggccgttcgaagcatgcagcaggggtaggatgtaccacgtgcacgtgaggctcgtgcttggtgaaaccgcgggatgcgctccgccgccgcgtctggccatgggggaaaagttagagcttgcgcagagaatggaggaaggatgtgacgaggtccgccgtggactgattttcgtccacgcccgtgccagggcttcgattgtgaccaggtagcttcgcagtgtcgtggggaagcgattcctaccactgaatcgtcgtgtgggtggccggagctaggccaatggctcgacggagcaattggcgccgctgtggatcgctccgcgccgtggccgagggccacaccaactccaaccactggtaagccacctcgattcagatcactcggatttcctccttgcgttgcaccgacctcgagagcgaatagggtagtggatagcggtggcacagccgccgtcaacctgggcgccgccgcggttgggcaaggcaccgcccagctcgggctgagaaagtagataagcgccttgccgttggatcgatcgccaacggctaggattagtggatcgcctaccccttcgtagcttacgatctgggccatccaatctcgatccaacgaccgtgagtgtgtacccctttagatttatgatgatataatcatggccgtcggttcagatctagcggctgagactccaagataccccttcggcctcaacaattcgctaaagagaccctgtgttttactaaaatcaacccgccgtcccatactgttgtgcgctgtgtcttaaggtttcttgcgctgagccccc

SEQ ID NO: 23650 - DNA, 769 bp, Zea Mays
gtcctggtggcttcagctgcggacagttgttcttgaagtgactgggatcaccgcagtgccaacatgcattcgccgggggttggttgcttgccactgagggggtatggaaagagctctgactctgctggctgaaccatgacggggtgggtccagctggtctactgaagtttggccccttgggtgggaatccaaatgatcgagtcttctagtgccggtcctgctgctgtgcccggagaacctggaactttcttttgagatgccctttttcttcctcctttgccctttcaacttgcatggccttgttggaaaggtgagagaaactgatgaagtcttggctagccagaattatcttgagttttggcctgagtcccttcaggaaatgagccatcttcttgccctcggtactgacgtcatctggcgcgtagcgggctaactctgtgaacttgtgcacatattcgctgacagatcttccatcttgagtcagttctcagaactcatcctccttaagctgtacgagcccttggggcacatggtgctcccggaaagctgcttcaaattccgcccaggtagcatctctgatggtgacgttgaaggtgtcccaccaagctaaggccatcccggaaagttggtgggcagccagttgaacacgctgattttctaggcaaccaatggcttccagctttcttttaatcgtgcgcatccaatcgtctgcatcgagggggttgcttgatccgacgaacgtgggaggcttgagtctcaggaaatcccc

SEQ ID NO: 23651 - DNA, 483 bp, Zea Mays
gaccacagtgccatcctcatccaccaccactgcataacttcacttcttacagtgcatgcaatgcgtgtcattttcgtgatccctccaaaacaacatgcaattcatttcgcacgcgtcaaacttctcatagttcatgccaagactctagacaatctttttagactgatataagttctctggcatcttatggttcggtgggaggacatcaataataagcttcacgatatcattgtagtagttatttgagacgttgtacatggacttcattgtcataagttatgttacgacataaagtacggtcacgttggtgccctcacgcacctttgcattcacgacttctagcaacttgtaaaattgttgcactttcggcgggggcggtcgatctccagtgctggaaactcataccagagccaagcatatggatgctggcctaggcaatccacctcactttccctatactgcggtgctataaagtgtatcttc

SEQ ID NO: 23652 - DNA, 353 bp, Zea Mays
cggggatcaagcgtgagaattttggtggcttgaacggtgatgcttttggtcctcggtgccgctccggatcaaggttgctgcgcagcagccacaccacagcacacatccctacgcagtggcaccgacggcctcacgcccctgcgcaaccggctcatatccttaggtgataaattatagcacaagtgatcattctcgtaaccggctaacccaaaggctccaacaatattgaccgtagctatatgtacaccactaacaagcaagaaacaatagaatgttacctctctatatctatttgttttatgtttttactctatcggctaatcatcagtcattcatcaatatcatatatgttt

SEQ ID NO: 23653 - DNA, 465 bp, Zea Mays
ccatagatggtggatcttatggacaagttttaatgttagcatgttagaccctaatcgtttttacactagatatgttgctgttagagaatctgctacatatggaagggcctgagcctggcaatcctgtgccggccggccactgtaattatagatagagggaattagggagaggagtccgcatctgattgatcctgtgtattattagcttcctagacatagggctttccttttacctctcttcctcctctcctatatatgtacacagtctgtccctcattctatacaacaatcattcttcctcaatcctgcttacttacatggtatcagaggcctaggtctaccgaccgatccttctttttttccacttcgcttccgcctcagtgcgcgcccaccattcggcgctgccatgaccagtcttcccgcgtcgcccctcgacgctgtcttcggctctgaggtgcttcagca

SEQ ID NO: 23654 - DNA, 389 bp, Zea Mays
ccatgtcggtgttttagaaataacttggttactggtgacaccgacgttttagaaataacagccgagtgataacaggccacgtcggccgctttggaaacaacggccaagtgaagactggtaacgtcagcgtttttagaaataacagctgagttatattgggccacgtcggccgttttggaaataacggccgagtgattacatggcatgtcaacgttttagaaataacagctgagtgatgactgggcactttttagaaatggcatctggcccgggaaaaccccatttgtactgcgctgtcgcatgcctctgcattctgagccctagtcttgcttttctgcattcagatcttctctgctttcttgcgatatcgcttccacccagcttgccag

SEQ ID NO: 23655 - DNA, 308 bp, Zea Mays
tctctgtcaggtgcaatcgctcgtcaaagttccagcgccaccaacgagccacccaaccatggaccaccaccctccggtgccctaccttggttctgccccaccatggatccccagcacccttccccatcttccccgaccatcccagcagccctaaacccatggcattcctacacccctcgtctctggtgagcttctcaccgtggacgtgggcggcgtcgcctctagttgctagaggaaagggccgaagccggccgcccgatccccatcgttcactgcagatccataggttggattctaactaacccgag

SEQ ID NO: 23656 - DNA, 491 bp, Zea Mays
cgagtctttctttcagacaaccagtccctgtctcgtgggaggtgagaaagaaaaatctgacctgctgatgcattcctctctagctagatgattatatatggctagatgattatatatatttctttcagattggttaatacgatggatagacgatacattaccaacttgtggaggtgagggcgcggaaggagacttttagggaggaacaggaacagccacgaccacgatgagtccttggcagtgcatgccgtcgactgcaacactactacacgtccatcaggtaacagatgcaacaaggcgtctgccgcccatcaggttcagtcacctaaatgctccaaatccaagaccacgtccaggtgtgtgatccatcaactattttttcaaacaaagatgcagagaattagcctgtcctgtccaactgttggtaaaaatgtttgttactatccacatctctgtcctgtccgcaacgaaccaaataatcatcgtgggaa

SEQ ID NO: 23657 - DNA, 891 bp, Zea Mays
gtaatatttatgaccctattaagtagcagaatcaagtttttgcggtaacaagacaaaataacacagacaaaaacattataaaacggaaggagcacatctctaggtctgaccgtcttagtgaccgagtctggtcaatttattttagtttccggtcccatataggaattgaatatatcgtaatgcacactagtgggtgaagcaacagcatcatcgcttccatattattgcatcttccgactccctcgattcaccagtcaacggcttcatttcttcgctgcaccattaggctccgttctacttctacctaataacaggtgcgttagtttttttttctgcttgcagtaggcggtacttgcaataattatttttggttacagcatttgttcataataagtcagctaggtttctcctagtctgattctgttgacttttctgaggtgtagtggggatctctgatacacagtgcttgtgtatctaggtcaaaccgaggtcaagatctgatcattttctcagcatttcaggctatatctagatgctagtttctagagggtttttttgggggttctcagcgtttgtgctgaagaaatcacttccctttcgaatgaaatcgtgcatctattcggggaatatgcacacaccgttggaacaaagggaaatagtgtttactgtcagatttcaaccatctcattggggggtgtgaagcacttttgctgtttatcatagttcttcagtctgacactctgactcatcgcttattatggacgttcttgcacatgatgtaatggcaagagcaaacgtctgtgctgctatagtggcaaatttcttgtgctctacactctgactcttgctgtttatcatagttcttcgcggccagagcaaacgtcagtgctg

SEQ ID NO: 23658 - DNA, 397 bp, Zea Mays
aagggggcataaaatcatgtattgtccgctgacacggctttgtctcattactgaccttgccggttctaatggtggtcagtttggccggcccgtcggcaggactaccgacgaggggcggatctagtggatagtctatatagaccacgacacaccctaagaatgtagaatagtaattcatatattggtgtaagtattgtatcttgaagttattcgagtcttgataaaccttgttttttgttactgtccaccactattaccgaccgatagggttgatataaaccacattggaccatggtctatgtcaacatgaggacgatttatctaaccatccttattccctcactgcataacctctcttttcatacccatatctttatcttttgtatctccattgttc

SEQ ID NO: 23659 - DNA, 445 bp, Zea Mays
aggcgcgggacgctgcccgggatgaccccaacccggcgtcgagcacatcagcacaaacatctgtcgcaccaccatccgctggctctgataacagatcctctggaaccatgtcttcaagagtctgatcaaagttcgccagggacaatccttgtagaccaatgagggcagacagagcaggagaaggaactccactactttccccactggcgacatattgccgactgttcttccgagtcaaagggacctcatcttcttcctcctcgtcgttttcatcagcaacacagacaacacccccattgggatcagcggtagatggagcacacccattgggatcagcgacagatggatcacacccattggggtcagcgtcagtaaattcaagcacaggcacttcctcaacagcaggaaccgaatgaccaacatcccgatccaaactggatactcg

SEQ ID NO: 23660 - DNA, 379 bp, Zea Mays
tatcgcgaagactatccgcgcagaagtcgcctaagggtgcagccgggaaaaaatctaagtctatcgcgaagactatccgcgcaaaagtcgcctaagggtgcagccggattagcacaacaagtgcggaaaaaatctgagtccatcgcgaaggctatccgtgtagaagtcgcttaaaagtgcatccggatcggcacaacaagtgcgaaaaaaccgaagactatctgtgcagaagacacttaagggtacacctggactagcacaacaacggccgaaacgacaacatcaaaccatccacaccaagaccaactataatcaagccaacacagcacagcaaaacaaatcagtaagtacaaaacgccttcgcacacacacatgcacg

SEQ ID NO: 23661 - DNA, 293 bp, Zea Mays
gtccctgagcatgtctggctagcgctttcaaagttgagttatttcttctgtcagctttgtgcaaaagagttatctcggaccgtggttgcagatttggaaagattggcactcgtgttactgtgtaagcttgagaagatatttccacctggcttcttcaattcaatgcagcatttgattcttcatctcccctatgaggcacgaatggggggcccgtgcagggacgttggtgctatccaatcgagagatgtctaaagactattcaaaagaaatgtagaaataaatacaaaatcgag

SEQ ID NO: 23662 - DNA, 624 bp, Zea Mays
gagggttcgtgcagggcatcgtgacgtacacggtgctggacgacctgacggtgacgcccatgtccgccatctccagcatcaccctgctgaacaccttcgccgtggcggacctcggcgacctggaggagaagaaggtgaagctgggctacaacgaggtcaaagcactgcactgctagatctttcgttcgcacgtttgtcatctattgttgttggatcttgtcatcttggcaacatcgtcagcttgcatgtggatggatttggtgcagggcttggcggtcctcaaggcctccctgcagtccaagacggtgctcacggatgtcttcatccacggcaaggctgcgtcgtctagtgctcgcgcttgaaggccaccgtgctagcgggcgcgactggctcctggcgtgaacgaaataagtaaggtttggtttgctcttttgtgatgggatggatcaacttgctgcgacgacgtcgtccggccgttttagccttttggtttgggtttgtactgaactgatatcatctggtagcttttggttggcggatcgcatggggtcttatttggttgcgatgtcggtgccggcgtgccgcaaagggactgaactttgtacacacatgccctgttcaacg

SEQ ID NO: 23663 - DNA, 369 bp, Zea Mays
gtaaatgatgcatcgacaccaatgtgtttagtaagttcatgcttcacaggatcatgagaaatctgtatagcactcatgttatcacataatacaggtgtaggagtgtcacaagaaacaccaagatcagccaatagccagcgcagccaaatgatttcagcagtggtagttgcaagtgcccgaagttcggcttcaacactagaacgagatatggccgcttgcttcttggatttccaggcaataggagaggatccaagaagaatacagtaacctgtagtagaacaacggtcaacagggtcacttgcccaagtggcatcagaatacgcatgtagctgaagaggactagcagaatcatagagtaaacatcttgat

SEQ ID NO: 23664 - DNA, 494 bp, Zea Mays
gatgaacgcagcacacctatttcaaatgacaaagtaattttaggatcgaagaaaaatgcatatcatacatcacgacgcagaggtctaggagctttcttggtagcctcggcgttcgccttctcaatttgaacaatcatctccaaagccgtcgcactagcatcattggcagcttcggcggcagcactagcaacgaaggcggctttgcgtgcaacgacgacccttgcacgcctggctgcagccagcaaatcgcttaatcgtccgcgacaacaggacctttgcccgactccatgacaacggggaagaagccacaggcggcgaggaatcaaatggtagacgagcagagggggaagaaggaagagctcaggtggaaccctaacgtacctccagtgtgggacctggatccgttttggaggaagaacgggaatgggactcctacgggccagcttagtcaaaacgcgtggttataagccgtttaacagtagatgactatccag

SEQ ID NO: 23665 - DNA, 418 bp, Zea Mays
actgagaactcacaccccacacccacaacctttgccctaaggcagcctaagaaacatcagcagctatgaaaagtgcggactaaacggtgacaaaaaacacatcctactaacatgaaagatcgttcaatcatttcgtggtaatgactaaagatcactcaatcatttcatagtaatgactaaagatcgttcagtaattaccgttgagtgaagctctagggtggcgaataacacaaacacatgtgtgtgtaagctctatttgtcgcctaaggtgatgaaccaatcggtgcatcacctggaacttatggtccaaccgaaccaaccaattagtcaaccaaccggacggtcgaatcagcccactagaccgcgaacgggtccgcacacgcttatttggaatgggtgcgccaccgtgaacaggtcc

SEQ ID NO: 23666 - DNA, 595 bp, Zea Mays
gcatgggttactcctttaccttttctttccctgttgtgctactgcttggttcatgaatggctctggtacgggtcgtaatccgattcccagaatgtgctgtcttgatatgcacttgttgggcgagcacgtctgcactgggagtgggagttggtctgagccctgggttgcaagttggacggacgatcttgacagcctgcacctaggcttctgctgatggaagcggccacttggcctgctgtgggtgtcatgcccggtagtgagctggagaagcctgccatgcagtgggagctgtccgcttcatgggaagaaaggaaaaaaaggtgacactcaagttatgtccctgtagctacattcttgcaattgcaaagcggactacagtactgcccagaatctgaaattttgaatccttcagcgctggcagctgcagcacctctagattagcacggcagtgtccgagtcacttcagcattcagaaaagcgaggaacagatcagtccctttggctttgctgctctgccaagctagatggttgtagagcgcccgggatctaaggctgtacagtatattgttgttagttaaccaaggcgcttgatcca

SEQ ID NO: 23667 - DNA, 290 bp, Zea Mays
cacgaatgtttggctcagcgttgtacaattattcaatcctataacctaatcgcagccatcctatcacgaatgaatggctcagcgttgttctccctcaccagaggcccgcccaaggcagtgcagccctccgccacaattgcggcaacgccggtgattgcctttcttcgccctagcacacgactcctcgcctcatctcgaattaaatgaaggcccgcccatgccgaacacgatgacctacccagacagtggggtttggttttttacggtactactttgctactcaaataatg

SEQ ID NO: 23668 - DNA, 491 bp, Zea Mays
cagctgctggtccctcactacaaatgaagttgcactagccaacgaatatcaggccaaatataacttaaagtctggttgtttaaaaatgaagtgaaatagaagaattagtgttagagctggaacaaatttgtgaatactggatatcaagctcacagggttggcccgtgaaatttctttcgtatttatcacctagacaactgaaacgaagtggaagaacccatcatcctggtaattatgtctggctggctccgctcatgttgataagctctgcaatcacaagatgtacatgactataaggcagaacaagaaccaatggtcctccgatcccttgcctctgccaccacaataccccaaaggcggtgatcacccaaccccaaaggaatatgcaagtgacatgtgttctaaagcctggcagaaagaaatcgccatagatcaggcaggactacaaactaaaatatatagcatgaacaactattggtgcttggcgtgag

SEQ ID NO: 23669 - DNA, 1237 bp, Zea Mays
actttttagctgccaacgacatctttctcctctccctgcagtcccgaaggcataggcacgcaacgcagagtcaagcagcgggcgcaaacgtgagtggcggtcctgtagagggtggagcgggcgagcggcggcctacggagaagcgatacaacggggaactcacacagaagctttggccagcgtgagccaagtccatgggctagaacaagtatggcgtgtgccatagctatccgcgtccgtctgatcagggcgggtagttactcacgatatgcatgcatgtgattgaggtgattaggttagcatctccaaaaggctgttaatctgaccgctaatatgttttttaggaagggaaacataaaaactaaggtccaacagatatcgtaaatctgccccaaattttagcgacgctaatccttcgtgacgagctacgcatatcttcgcggccgtgatgcgcccccaatctccccttgcgtcttctcctgcgcgccatcaaactattctcgcgtgtttcccttttccacaagcctctcccccagtcggaggtcctatgtgcgatggtcgcggcttgaggttgcggcggtggcggcctaatgaatttgagatgcagccaccgaggtcagttggcccggtccggcaggggcaaggatgacgcgactacgagcagatgtatcatgtcccgtccatcggcgtccagcacacccgatggatcagcagcgacgagcagatgcatcctctcatggtctcatggaaggttaggtaccagaccgtcctcatctggcagcccttggtgacgagcattcagatccccttttgacagtcccgttcccttgcagtgacgacctgtcaacaacctttgaacacgcgaacaccagcaactcatttgtcaatggtatgaattttggattctttgttttgatgaaatgatatggataatttactaccttgcccgtctagcttgcacatcaggtctttttttcaataaccttgcagggtctataagtttgtacttaagttttgtccatttagaaattctcagtttgttaaaaattctcagatttaaatttctggtgtgctcagaatggctcataaatggtgtttgttttgtgtagaaaacatacatatctgcagtgttgcaaacgcagaagtgaggttgtctctgcaggtgcgaaggtcatgttgtcctcttgtcagccacatattgtgctagtgattttatattgtacaccgtcattgaaaa

SEQ ID NO: 23670 - DNA, 746 bp, Zea Mays
ggtggtggacaccgtgatcacgcatccgagggagttcgacttctacctgtgcagccactggggcaccaaggggacgaccaggccgacgcactaccgcgtgctgtgggacgagaacggcttcgggtccgacgagatgcagcagctgatacacagcctttgctacacgttcgcccggtgcaccaagcccgtgtccctcgtcccgccggcgtactacgcgcacctggccgcgtacagaggacggctgtaccttgagaggtcggactcggcggcgaccggccggacgactctgtacagggcggcgccattgcagactgcgccgctccctaagctcagagatagcgtgaaggggctcatgttctactgctgatcttatgatgatttttagtggtggttatgaaggggccggcgttctctttgcccatatatcgcgtgcgttctatattctggtgttgtattatttgggaatcatgtatagtgtctgtggagcggcatgtgcaagactgcgagtctgcgatgctcatgatactttgctagtggcatgcaaaaaattccgatccctaactgttaggtgtactagagtattggtagggacccgtgtgcatgtaggatggggcctcgcattttgcaccgtgtgggtaggcacgctggccttggaatgcaagactatttgccgtcttcttgctattcttgtagggtccccgtttggtagctttgtccatcggctactctttcgttctgcactaccg

SEQ ID NO: 23671 - DNA, 387 bp, Zea Mays
gatcaacacgtttccggggattggggatggtctagttcgattgggcgggtgggtgagcatcaccagcatacaaagatgctaaaacgagaacaaagagggcatgatcagacctgtggagggctggccacggcgagctcggttctgcggtggcggaaacttgatttgggggaagactaaaattcaagctctctgacgaacgattgctagcgattttcggtggctgggtgggtgatgaccttgcggggctggcaggggcttcaatttatagggctcaacggtggtggccgggaatttcagtgaggacgcgcggaggtcagaggaagaagaagagcactggcgcgcgtgaatccgtggcatctaccgtggcagtcactccgacgagccacg

SEQ ID NO: 23672 - DNA, 403 bp, Zea Mays
gagggctggtgcaaggtatgacaggggtggtggatctggatcctccagccaaagggtatatcgagggccacttgataggatgatgggaaggagtagggaacaagtacctgagcgtgttaaagactacaatcttgctcaatcctctggaccaaagcaacagaggatagatactggtccctaaacaagtaagggaaggagctcgaaagagattcttggtagggcttgggcaaaggcttgtcatgccattggcatcccgggtcaaaaggtcgataacccatattttagggccgcaattatggagtcccaaaaacaaggtatattttcacccatgccacacaagattcttaccttgatgcacctcattcacagtgagagacaataagcggtcaacatcgttcggttt

SEQ ID NO: 23673 - DNA, 438 bp, Zea Mays
caaacccgccccgccatcagcgccaccaaatcctcggtcgacaccgcgccatcaacaccaccaaatcctcgcagggcggaggagagttcacaggggcacgagcaggccgccgctggagggaagaagcacggcacaggcggagctcggagggggcttgaggaaagcctggagtctggaaagatcgccgcctagaggtctcgaccattgccgcctagagcttctctcactgtaaggctttcttaccccgcgtccctactccatcccacacaccctaccctctccacaaccaaccctgcgagatctgctcccatctctctccgtctcccccatcgcacgaggtccgtgccctcctgctcgccgtcggcccatctcgactccctctgctgccatacgaaaccctcggtctccgtcgtccgaccccgcctcgacgggtcagat

SEQ ID NO: 23674 - DNA, 353 bp, Zea Mays
actcttccgcttgggcgccatcgcaatctcgttggcgggctgagcggaagtgaaatcaaagggaaacagagtaaattcggaggcaaaagtgaggctagggcttagaatgcagaggcgtgcggcgacatgatacagatggggttttcccgggtcagacatcatttctgaaaagtgcttagtcatcactcggtcgttatttctaaaacaccaacgtggcctgatacgactcggttgttacctctaaaaacactgacgtcgccagtcgtcactcagccgttatttctaaaatgccgacgtggctcgaaatgactcgtttgttacctctaaaacgctgacgtcgccaagcacccctc

SEQ ID NO: 23675 - DNA, 345 bp, Zea Mays
ggcaaagcgggcgcatcagcacgtcggtgtggagagtcagcgactccaccgtaaaatgacgacggtgaggcgacaataggcgtgggattgcgagtgcaagcgacgatgcgatggtagatggcgacgatgagacaaaaggcggtggcagcaagcgacagccattgtcgcgttgcgacggcacgacgggacccttgtgagatagcgagggcgggtggtgctatgatgccaaggtagaatcccactaatatcctacccatccgccggtgcggattagaaggcaaagtagttgttctggtacaggatcccaaagtagccggtgagtcgtagtgaagcaccgagaaaaag

SEQ ID NO: 23676 - DNA, 596 bp, Zea Mays
gatgaattggctaaccaaatatcaagcaagccttagctgtgacaagaggactatgaagttagtgtctttatcaggagaggaagtgttagtggagttggtcatatctagactaaggaaaggaagctgtcaccaagtcactgctcatattgaggaaatttagccattagaagctatcaaagtagtatcagaaatcccagatgtgtttcctgaggatttaccaggcatgccacctgaaaggaaagtataattggccatagagcttatacctggcaccgcccctatttccaagagagcctatcgagtgcttggaccagaattggtggaactcaagaagcagattgatgagttgttagggaaaggctacatcagaccaagtaccttgccttggacgaccctagtgttatttgtggagaagaaatacgagacaaagaggatgtgcatcaattatatatctttgaatgaagtcactatcaagaataagtaccccctgcccagaattgaggatttattcgatcagttgagaggagccaatgttttctcgaaggtagatctgaggtcaggttaccatcagctctagatccggccttcggacatac

SEQ ID NO: 23677 - DNA, 381 bp, Zea Mays
gcaatatacattacactgcctagggacgaagtccctttctatgttccaagttgtttctgatctccatagactattattactccctgaggacttggacttttcatgcagaggtataatctgtgactttgaaccccttcccatgaaggcattgttagggtagaccatttctactatgtcgaaggttatatgttgtctttgcattggaggttgtgccaaatgagaagggcaactcgaccttaccaagaggaacagcacccttccctccaaaaccatacacgaatttgtcaattagctagttgtaacaggttgtggtttatgcctatacgatcgatggcatgaagaaagatgatgtcagcttgtctctcgtcatcgataagcaac

SEQ ID NO: 23678 - DNA, 827 bp, Zea Mays
gttggatgtaaaaacgacgggtaggattttattactctagatttgtttccacccgcccgatccagatgaacggaccaaatcaactcaacgtgagagggtaaacagggactaatcctagccgtccggaagaagatcaacggcccacatgatttcccccaatcaccctacgagcgacggcggcgccgcccggaaccacggtggttcgccaccggaatccggccaagtccgcacccagagcgccaatcccgcgttcctacaggcactatgcatagccctatcgactacgaacccgatgacggctcttccttccctggattccaaacacagagccccgcccgcgtaaggttacggcgacgccattgccggcgatgtgaatcctcaacaaaggtgcaccaatcctcaaatcaaacagttctactcgttgcggacacgcaggcgaacaagggcaagggatccataccgtgaatcgtgcgcgtaggtgtgcagtccacggcgaagcgcggtccgcgacggcggtgataacaacagtgaaaaatctccgccgttccgcagcttctcacgcccgattacgcccttgcgcacaatcaacacttgctttaggaccccagggatcgcttcgcgggcgttgggagacgacgatggtgacgaacgactacggcgggtctcacggctcgaagtgggtcctggtggtggcgccccaggtatgctcaacagaggccgagaggggttttatatgcgtggtccgagtctcctcctgtccgcccatagcgccggtccgatagggaggtagttgcgccctccagggaggtgcggtgagctaacgccgc

SEQ ID NO: 23679 - DNA, 287 bp, Zea Mays
ttaaaagattggcacgaaggttacagtcttgggggcataaggcggttggaaatgtcaattctcagctggggctggctcgcgaggtgctgcacaggttggaggtggcgcaggacagcaggctgctgtctactgaagaagtatggctgctgcagaaattgaagcagcactgccttgtccttgcttctttggaaaggacagttgctcgtttgcgttcccggttgcattacttgagagaaggagatgccaacacaaaattttttcatttacaggctcgcctccgcaaaaag

SEQ ID NO: 23680 - DNA, 800 bp, Zea Mays
gaaaagaggataaatagatatacctaccacaaagcatatcagaacaactttggaaagtgggtgaggcaaattctcgtccataaaggcccacaacaatagaacggtgatagcctagacccgcagtctcgatctcggtcagcgcaagaggcttggaggaatggcggccggggttgtcgacgctagagtacttgtacaacgggttttagcaggccatctgaggcttaacccggcgttgcattaaaacacgcataagccacacgctggtaagaccgtgctgcttcaacgtggtgatcgcctttagaagctgctccacttagctcttggaacgtgcatccgtgccatggtgccacttattcgtcgaaagcggctcccatccgatgtacggtacagcactgccgggcagattcttggcgtagaaccactcaccctcgtaccgaatgatggagggaagcaagatcttgaaatactctgccttccagctagagaggagttggatggaggctgagccaccaaacgattgaccgccacgacccaaagtcacccacgcgctaaagagatactgccacaacttccaatagggatcgatgcccataaaagcctcatatagcgtaataaaacacgctatatggaggacggtgttggggtggagattctggatctccagctaatagtagtggagtatcccccatacgaagggacgaaggggcaggccaaacccatgcttgtagcaggacgcaagcacgacacctcgtcgtcccttggatacaacacctcaccctcattttccaatctccaccccg

SEQ ID NO: 23681 - DNA, 439 bp, Zea Mays
ctcgggataaaagttcttaagactcagggcacagtggagagggacggcgggtttattttaactttgcccagggttcctttagcaaaattgactcggctgaagggtacgcacggatcctgatcgtccgatcaaaaatggacagccacgattagaattgagccgcggtgaaccggtacgcacaagggaccctcggatctagatctgacggtcccggtttaatgaatcccagagttatgaccatcatccgatctcgatcggacggttcccgttaccccaacccgaaacgctacacagtcaccacatccggccgtcaaaaagagatccaacggtactccgccatcgtctttgacgcgccctgtttcccctccgtccgccgcagcccgaccatgatggaaaaccccacaccggtgatgaccgccccgaccagacggcgcaccca

SEQ ID NO: 23682 - DNA, 674 bp, Zea Mays
ctacttcccaaccagtccgacgcgccactggaccattactgtagaaggtctggtgcggccaaacatgttgtagtgaggccccttctcttccatttcttctccatttaacttcaactctttgggggtactttcctgtgacttagacacacatgattagagtataatccaattgactaagtcctagcaaattacctctttctcaacttctccccatattttatgtttctcctcaaatagagccccggatggtactttcgctataaatcgagttagagagcaaaccaaagtgccatatacatagtaaaaggtgcatgcgacatagttaagcactcaaaccttgcatacttaaccttttcattgttttgcaccttttggcctgtttgagaacgagattggactccaaagtgtaaagttgacacaacttgaactctaaagttgtccatgagctccaacaccctgcaatagtaacatagaacaatcaaaacacaagaatgacccaaactaaaggttagagagaacttatctcttttggatcacttccagtttctgactttgatactcctcttctttcttgtgaccatgtccaactccttgagaaatgatcttgagccttgtgacgtggaccttaatccataaaaaatacctcgatggttccaagtcacattcttatgtag

SEQ ID NO: 23683 - DNA, 655 bp, Zea Mays
gtccgaggagagctatgctagaaagacaagctgggagtttagagttaaggttcgggttgaagggatccctgtccactgctggggtgaagaggtggcatccagggccttgggcagatgttgcaccattcactatgtccaggagcgctctagacgtagagagcatactcgttcttttgacctttgggcttggtgctctgacccctgcgaaatcccaaaggaggtgtggctgacagtctctgagcctgaccaggaattaccacctgtcagcactcctctacctcttgctggtgctcacattgatgttccaacagatattaaaaaaggtcatgtttacacgcttcgtaaccatatcgaagtggttgaggacctctctttcatccgtgggaggagcaccaggggggcctttgaatcgaaagcctcgcagagaattcgtatggagctatggtgcatctgactctgctggagaaaaaagggaccgttcagaggagcacagaggcagggaaatcatgcgtagggactgggaccatgacgaagatgaagattttcaccagcataggcagcagggtactcgtcggcaccgcagtctctctgggtgggcgcgttcgtcgcgatgccgtggtggtgtggaggactgttacagctcgagtggaaggaa

SEQ ID NO: 23684 - DNA, 377 bp, Zea Mays
ccacaagagtttaaagtatatctttacccagtcagagctcaatatgagacaaaggagatggctcgagctgataaaggattatgaattagaaattcactatcatccaggcaaagctaatgttgtggcagatgcgttaagtcgtaaggctttctgccattgtcttaccatgaagacttctgacaagacgttatgccaagaaatggagaagttgaacctgggaatgattcaacatgaaacttcaaatcatttgaagcctgagtcagtcatcctgcaacaaataattgatgcacaaagaagtgatgagggaataaagcacattcatgagaagatagaagctggaaaagctgactgcttccgaaaagatgatcaaggtgttg

SEQ ID NO: 23685 - DNA, 360 bp, Zea Mays
gcaagctgaacctggaagttgtttcttcgggtgacttaagttatatctcggtggaacccacattgcaagagcaaatagtaagggcacagattgaggataagggtgttcaaatgattaaagaaatgattaagcaaaagacagagaagtacaagtgcttccgccaggacaacaagggaattttatggtttggagatcgattagttgttcccaaggaccctgaactcagaaagaagatcctagacgaagctcatctttccaaattctccatgcaccctggtagcaacaagatgtaccatgatctcaggtctttatattggtggaccagaatgaaaagggaaattgccaagtacatatccgagt

SEQ ID NO: 23686 - DNA, 665 bp, Zea Mays
taattaagtctaaagtctggctgtcaggctaactgaactctgaactttagacttacagtgtaacagagccatcttggacttggattcaaccttgatctagtgctcaactgagttcaatccctataatcgaaatgtagctgggttatagctctgcaactttgctacagagagttgagtaagttactagagaaagtttagagaaatttggacctaaaaacgctctgtcaggttgtctgatgaccctcgccatggtacagtaagcccccaaactgaagaagatcctgattcatccccccgctcgtcgccggtgattcttcgccgagattgatgacggatcgccacggttcgtgcaccgtgggcagcagataagctcgggcaggtaaatatctagcgcccggattgagttgagcctcgtggcagctaagcccgccgtacttccctccctagctcatcggtcaattggataacctcaccgccatcaagctgtcgccgttgtgcgccatgtgcttaagcactggtcctcatcgtggtgactcactaggtgcatgtccagtgatcaccggagtaactgccacggtgaaagccgcttattccacgcacagagctcgtctctcctccggccgccagcactactcggccgaattcatcaccgccgctcgctaagc

SEQ ID NO: 23687 - DNA, 423 bp, Zea Mays
cgggggtgtgctcgatgggcgcaaggtttatactggttcaggcagaatgtccctacatctagtcttcggtggctcctactactggcacctttgttactcgatgctcgtagtaggggtacaagcggtttacaagcgggtgagagagggaagatgagctcccaagtcccttatgcaagcatggacctaaaagactattggactagagtcctacgctaagccttggctctggcctctaggtctttaggtctcgttgagcgtgtttcgttgcctcgcttctagtgtccttagttctggagtcctctgtatgttcatgactgacctcctcatttttataggccatggtgagggtcggctatctatggcttcctagagaaggaatgttgtaccagttggctaacaggagccgaacaggctctgcccgca

SEQ ID NO: 23688 - DNA, 417 bp, Zea Mays
ggaggagaagagaaactcaactccagctaatgacaagcccatgtgtgcattgtgataggtgagagcttcgaaggctagctgctgcttcttgcctcttgcatttctcttttcttgctcgcgctccaaatcttcttattgcggtggcttggcaagcgtagtggttgtctgtgtctgcctggcgacgacatttgctgcacgcgatctcttgcagtcgctactcgctacaacaaggcttctggggatgccattgttagctgattcttttcctcactggtgaagggcagctggttgcttcagctaaaagagtcgagcagaccaacaatgcaatttagctggagcatgatcagaattcttgtctgtactgcagacactgctctggggtctgtttatgcgcaacaacggtttatgagaggagag

SEQ ID NO: 23689 - DNA, 640 bp, Zea Mays
tgggagcctcccctcttctggcactcctcgactccgggtcgacccatgacttcatctccgagtccgcagctagatgtactggcctgcctctccaaagccgactgcgacttacgacgactgtggtgaatggcgaacgcgtcacctgcgtggacatcctccggcaggccgaattcactatccacggcgcaaccttccacgccgatttgtttgtgatgccccttgcaggtttcaacatggtgttgggcacttgctggctggccacgttggggccggtcctctgggattttggcgcctgaaaattgacgttctatcggcagggccagccaatctgttggcagggcgtctaggggacggtggtccccatactgcgcaacacatcggcgtcaccatccttactagacgagctactcgcgtccttcgccgatgtcttctcggaaccgtgggtctcccaccggtacgctcccgcgaccatgacatcactctcgtccacggctcggagccggtcgcagtgcgcccctacctctacctagcgtcccacaaggatgagctggagcgacagtgcaccgccatgctcgagcaagggcttgttcgatggagctcctcggcgttctcctcacccgtcctcctcgtcaagaaatcg

SEQ ID NO: 23690 - DNA, 781 bp, Zea Mays
tataaatttaaatagtttaaagatattcttaatttcaacaataaacaaaatgacttatgtaaatgttttctaaaagtctacaacttttagctctactgttttatggagcaccgaatgacaccaactccactaaatttgctggaggtagagcagtctcaaacagagccttgatcggcctgtgagctcgtgggtcgtttcaatggtacacacgattttgatgtctgtttaaagagaaagggacgattgcaatggattatgagtatgtcttttctgttccaattttgcactatgttctgctcatagccttattcatatgaaattttatggagaacccttcacatctgctaccattggatacgagatgaatgtcctagatttaaaatgtagacatgaccaccatacacctttgggcataggatacgatgccctaaaaataacgttattcatattttagtgtgtttgctgtatcacttcttgcactctagcccaacccaaccatgacaaggcctgcagaagcgctcataccaggactgcgcccagagcgggtgtgtaacatgtaccggtcggccagaacccagaaagagagtgagtagaccgtgaatcgcaaaatgtaaccaacactgaactatcttatttcccaacacgcaacatgtcctcactgacactctgctgccggaactctgatctctattcctctgttcttcctgcgaggttgctattaatcctggtatcaaagccatcggttctcggcttcacgttggattcagcatcctctcacgac

SEQ ID NO: 23691 - DNA, 392 bp, Zea Mays
ccgcaacatacctccttgaactaccagaatccatgtcagatattcacaatgtgtttcgtgtgtcctagctccgtaaatgcctgcaagtaccagagaaccacatcgaggcagagacaattcagattcaaaaagatctccagtaccgggaaaagccagtaaagattcttgactcagcagtctgaaagacccgcaactcagaagtaagactctgtaaggttcagtggagcagagaaggagaagaggaagctacctgggaaagtgaggactctctgaggagggaatacccttacctcttctcgagccccgtctgaatctcgagggcgagattcctttaagtggggtaggtttgtaacatcccaattttcaacccaggtttgaaaccctaatctaac

SEQ ID NO: 23692 - DNA, 1133 bp, Zea Mays
attaattggtcttccttcttggtgtagttgccaaaactttcgttgcacattgtttcaatcatttctagccactctttgcatggcttcttgaattgcttctaaaatttaaatcggtaatggagccgaacaagttcgtactttttgccccctcctttttcttaggcattccccagccactagaggtcgaaaatattctatttgccaagtactcttgtactagatctctagtgctgatttcggctgctaccactctgaattctacttcggctagctagcatggggagctaagctgcatgtggcacaagggccttgtcatgccaaagcttaatttcaatggactcatgaccatggtcattagcttctcccttttcttctcgtctgattttatgtaaaaccatttgcttatccaaccggtcggccacttggtacgatagccaatcaccggggcctttgtaactttccgatatgcgaagttgtagcagccgaagttcttatgaagaccatccgctctggccttcgtttgatagtgcagctcgtgcacccggcaaaaagcttcgacattaagactcataccttggcttcggagatcccatatgtagacactaagtctaacgattgcattgggtgtcaactgatgaaagtatatctcaaaattctttaaaacttctccaatcatctcatgtagagggaatcgaagcgctgctctggagaagctcttaaaaacaacgatttcatcctcccttggctgcggaaccacctcttccccggcaaaccggacaagcttgctcccggcttccccaaagtagcccaattttttcatcataaccatgtcgtctgccgtcatagtagattacaaaattcaatgtggctaggtttcattgggctcagaatagtgttgtcctcctcaccttcattctcacttcctccttcagccacgatctgttcaacttcagcagtggaggtaccttcggcaacagcctcctctggcacaacaagacccgatcacctcatcacttctgatattggtgctgtttcggacgcttcggcctcgtccccctcacgagacaccctagcagtggatcatactctggccattttagtgttcacgctttttaagatgaagctgatctcaa

SEQ ID NO: 23693 - DNA, 824 bp, Zea Mays
attagttcactcgaagacatctattcaagtcataagcacaatcatacacttatttgtgaagcacaatttaaggaacgcctaacgcgtatagactcgacttataattgtagaggaagtgatgactacttatggcatgacatcacctctctaattaagccaagacaatttctacctatattgacccgacactcatgtcgagcacactctattttttgccatgtctcgcatacaaccatattgtggcgtgcactcgagacactttggttcaacttaacgcaatcactactactacgcattcggcatacacgtttgacaacaccgtgctcaggcaaacccacacttccaatctacttatcacatccaaccaacaccacgatgattgcataaaatatatttaacatagactaactcattagtcgactatggaaaccactaagcatgttttacgctttatttattttaccccaactaacacactactttacgacgaagtgctttagcaaacaatttaatacatccgtgaccaatctctacgacgcacaaaaagaaactattgtacctacacatatatccaatccaacaaccaaataacatatcggctcacccacgcacctacgtgtccccacaacacgcacaaggcatcaactgcacaagtgactctaaccggattattcatactctcatttgcatcgactatcacattcaccgatcacatgcataaaacaatacacttttcacgtatacacctatcgatgcattccccaacacataatccgcattttaaaactttagttttgcatttaacaacgcatcacatattttcc

SEQ ID NO: 23694 - DNA, 632 bp, Zea Mays
taacggatgacggatgaccaaggcgactatgccaccgatctgtggatgttttgacaacactggaaacatgcttgctactgttgtgctccaaggatgggatgggatatagtccgttcctacacatgccgtgtagcagtgttcgcctcgtgtgacgatccttgacaagaaagaaatcagggtgaagttcaagaaaaacatcattatcagacgtgagacgatgaacagaagctaagtttcgagtagcttgaggaacatgcaagacattatttagagatatgttacgatagggggtaataaccgtagattggcctatatgctttatcgtcatacctgctccattggccgcatgtacttgatcattaccattgtagtcttgccgcatggtcaatttgtcaagatcgccagtaatatgatccgtggctgcactgtcggcataccacgtcgtgtcaacattataggaggtgacagcagcagaagctgttttctcagggccattgaaattcttgtcaaaccgcttccagcaccgaagagcagtatgaccagttttaccacagacttgacattcatgatctctgtaaggattgttgggattacctcctcgaccaagattgccacgtccagaaccattgcgg

SEQ ID NO: 23695 - DNA, 535 bp, Zea Mays
tggatgtggccacgacggagactttgccgcgtgtggagggtgctgaggatcttccaagtatgagtactgggtgcaggcggcgaagggtggtggggaaacagtgtgttggtaaattttcgcggagcggcaggcgccgttgcatggggatggagcgtggccgacttcgggtagacgtggctgttaaacgagaattgttgtcttcgctgaacggggcgggcataggcgaaggggatcttcaggagctttttgagggtgaggaattgaggataatgctgtttaattacagggagatgtgtatcattccgaaggttaagccgatgtgataggcgataccctcgccgtgtgtgtgtaataggcgatgccctcgccgtgtgtatgtaattgtactggtgatgtggcctgttggccgtgttcgtacacttgtattgttttggctgcgtacgtgggcggctttgtgcggagtgtctttgtaatgatatactttgattaacgctatttcggctgcgcctttaagtgttgcgctatcttttaaata

SEQ ID NO: 23696 - DNA, 287 bp, Zea Mays
cccatctggaagccatgaaggccagtcgtcggacctcatcggtgccatgtcgcccgccaatccggaccttggtcctccaccatgattccccatcctcgcttaacccatccttggtgctgtgaatctagggttcggcggggagaacagggggacacgaacgagagaagagcctcacgggagaactgggagcggcggcggcctgaacaacaaggacttgactcaagtcgccaagggcaaaacggaccttcctcgctgctgttaacgtccgttaccacgaaaagagacgg

SEQ ID NO: 23697 - DNA, 650 bp, Zea Mays
cgaggaaagcgcgtgctttcgactcatcaaggtggaggagtgctgctgcggccggtgccgctggaggtagctcgatgttggcgtgtgctaggagcagagcttcctcctccgtctccgcctatgcgacattggcctagccgcgccgtggttgccgacattccctggcccagtggccaagcttgccacagttgtgacagccgtcatctcgtgccggcttcttgttgccgacggcgccgccttgggcgcctcctcaggcaccaccctcagcttgtcctcgcgccccagcctgggcgcctccgcgcgccttgcgcggcttgccgcgcttgtggccccgtgtcgagtaggaggactccccttcttcttgtcaccctcgcaggcctcccactgctcccgattgagatgtagcttcccaccgatggtgataggcccagagagggcatgtggttcgtcgccgtcgacgaccttgagacgaccaattgcttcttcgatcgtcatcgtggagaggtctagcagagactcgattgagcgagcgatctgcttgtacttctcgggaatgcaacgaaagagcttctcgacggctctctcctcatcgtaggtgtcgttgccgaactgcaccatcttctgcaacagagtgttgaggcgaagagcaa

SEQ ID NO: 23698 - DNA, 954 bp, Zea Mays
cttagctataattctgctcatatctccttgcccagaaccttataccaacgggcatggcatacctttacctgcctgttttcatattcttgctgtccatggcttgttcatgccaatccgacgacaggctaacacctgcaaagccactcctgccgggcgacatgttgatctcacatggtggagtctttgctctcggcttcttctccctgacaaactcaagttcgagttcatatgtcggcatatggtacaacaacatccctgagcgcacatacgtgtggatcgccaaccgcgacaacccaatcactacagatgtgccagggacgaagctagcttttaccaacagttctgaccttgtcttgttagactccacaggccacactatctggatgacgagaagcagcatcagtgcaggaggcggtggaactgctgccgtcgtcctgctcgactcggggaacttggttatccagtcgatagatggtactgccatatgggagagctttgatcacctgaccgacaccgtcatccctggtgtaagtttatcgttgagctcgtctgatgctgctgctagtgctaggcgccttgttgcctggaaggggcctgatgatccatccagcggcaacttctccatgggtggcgactcaagctcagatctccagattgtcacttggaatgggacgaggccattctggcggagagctgcgtggggtggtgaggtgacattcggcacattcgaggacaacaccagcttcacgatgtacgaaacaataacaggcggcacaggggatgactactacatcaaactcaccgtctctgatggcgcaccgatcatacgcgtaagcctggattacacgggcttgtttacctaccgaagatggaacctcaaaacatcctcttggacagtctttgtacaattccccagttcagcctgtgaccgttatgccttctgtggcccgttcg

SEQ ID NO: 23699 - DNA, 685 bp, Zea Mays
ctttgcgggcgatttcgtggaagaggctgaggccatacgccaggatttcggggtggaatttctcaccgacgggcgagtttcaccttgcggccgtagctcctcgtcgggaattcacagcaccgcacaatccttggaaataaactcctccccgtgctcagtatatcatctgcaatgcgtagctaggccgaattagaaattggacgttcgagtgcgcagattggatctccggtcacgggcgcgcgccgcacgaggtttctctctgccgtagctatgcggcgaggtagacggcaaggcgtgggccgttgatcgtgagatatgcggcccggattagagaaaggataacgtttcggccctccaatatgcactgctgaccggcaattggacggatcaacgcagtttatagtaagatgtaatcggcaccatcggttcccaatccattggttactattgcgtaccggttcgggttgatccggatctaatctcgtccgtccagactcgatcggatggcccgtgttggccgataccccttcgccgatcgcttttgcataagagaccttaggtttttagaaaataaacccatggtccatcctggtgggatcctgtgtctgaggagtttttatagattggcccctgcacttttatgtatttgaggcccatccagagatttgggaaaataggaaataat

SEQ ID NO: 23700 - DNA, 314 bp, Zea Mays
gccaaagagactctggccccagcgcccgggaaagagaaggagattgtcgaggatacttcggaggaaaaggattttaattttcaaaacatacttgggcaaaagttgtctagggctgagaaggaagagctgagggattatgcaatatcatgcggctatcaaccaggagcattgctcttcggtggcattgacgaagagagcttaggatgtctccgggaccggactggagcgaaggttgtcagcactctatcgaagagtgttggctttccaaagcttgaggccgaccttagcagatattggcagcaacatatcgccgg

SEQ ID NO: 23701 - DNA, 1222 bp, Zea Mays
agaggctggaggccaagcccctccagcagctgcgcaaagaaagatgggatcggcagagccaacccgctggagagtttggaaacaaagaacacaaactcttgggcggcaaggtcgccgagaggagagacaccagcacaagtcctcccggcaaatgccagcacaccccatccgagcgggttgcgcaccatgttgagtgccacctcaggctggaagcgctcgcaagggtctagcaaggccatggtgtctacgacgacataagagcgcggaaagctcgaaggcaaaagggcgcaaagagctcagaggcgaaaggacgccgcgagtgggagagaagcaaggcatggctgctactcgatggatgaacccctctttaaaggcagactcccctgctcctgcctcgaagcatcacgagaagcctccctcgatgcacaccagggtatccataccatgacacaggggcccggtcctacaggtcatacagctggcgcgctggccttcgagtgcgaagaaggcaaaccgccgcacaggaagcgtgctaccgccctgcggtagtatgcctccttcatcttcgctacgaccaacggtcaagaaagcgaaccaccgcacaaggaccatgctaccgacccgctgtagtgcgcccccttggcttcgccgcaaccagcagtccaacctctgacatgagggtccaggcccacatgtcatgcacccgacacacctgtttctgggtgcagagaagtcgcaccgctgctcgcgccaataccgtgtccctcggggccgttgcagaagaatgagaagataaaatttcaaaaccaatgcagcgactcgaggcaccccaacaaagacattaagtgcggaggtcacgggttagtcagccgcggggacaggcgtggcagtcagcgtgaccatgggcggaccggcagtaattgcatcaacgggcgcgcagggacagcgagctagttgctaatcaaactttggccccacctacaggctcgtatcctcccctgaggcgggcccgggggccactgtcggtacctagaatcaggggtaccccttactacagtatgatgacgtggtgcctgtgcggcgtccctctagccgcacggtgaacaacacctgaccccaccacgtgggcggctcaaggggcaccacgtggcgagaaaatatggtacatctcaggatgtatcagttggaccagacctccaagagggagcaccggacccttgta

SEQ ID NO: 23702 - DNA, 318 bp, Zea Mays
gtcggtgtggctcgccgtggcggcttcagcactggtggtgttgtcaagaattttttcagtgcatctagggcttcctgtgcttctgaagtccactgaaacttatccactttcttgagtagctggtaaaatggcaagcctttttctcccagcctggatatgaatctgctcagggctgccatacattcggtgagtctctgaacctttttttgtgatcgtggtgcttccattttcatgatagcctcaatcttatccgggttagcttcaattccccggtgactgacaataaatccgagtagctttcctgccggcaccccaaag

SEQ ID NO: 23703 - DNA, 515 bp, Zea Mays
aacaccctcgggggctaggtaatcgctggcgccatccttgaggaccggattctctgcaacagccacctctaaggctgaaggattcttagttacctccataggaatggagcaacctagaccagcttcttgactctgaagaccgcactccaaggtcgatgaggctcaagacgctgctcgggataactctaaccccacatccggaatgttagcgcaaacgtccatcataccaccatctgttggctcggacagcagatcttcaggaaccatatcctcgagagcctgatcaaagtatgctatggacaactctcgcagaccaacgagtgcagacaaggctcgagaaggaatatcactactccccccactgaccaggtagcgccgactgtttttctgaattaaggagatttcctcctcctcttcctcatcctcgtcaacaatacgaacaacacaccctttggggtcagtgtcggccggattgcacccattgagatcagcatcatcaagttactactcagggc

SEQ ID NO: 23704 - DNA, 409 bp, Zea Mays
cagcacatacagacccatatagaacacaaagatcacaatatatgtatataatcacttaatcagcacaatatatgaggcccaatcaacacaatatatgtttagacatctaataatcaaattaaaacaagtacatcagtgagaggtaggcacaagcacgaacacgatatatgaaccaaacaacacgtgctgattacacatcaaaattaaaaccattaaccatttggtaagaaacacatattactctaatcacttcttaactgcttcagtagccacctctttcccctttgaactggtagagctatcatgcacttaaatttgctagcgtcagaggtgagaacgtcatacaggtcaagatcagtatcagattctgaaagtgtggaagaattggaggaatagtagttgattcatg

SEQ ID NO: 23705 - DNA, 746 bp, Zea Mays
gttaagttgtgttttatcattatatcatccgagaaccatttcattttctccattttccaatctcgcaattccttcatacatcggccaccatcccacttgttgggccccatcgcgctttccgtctactcgccatgtgtcgtcgagctgtgacgattctaccatgccatgttgtgtgttaatcatagaaggcaatatctattcgtagaatggcagggctatacttagaaacgtatcatctgtatttttggagctgtgtctccttccttccctgcgtgccatgagccgcatgtaacctgccatgtattcatcctctataaatatgagaggacctgcaccatagagagtaggtagcgccattcatcttaacatggtaacagagccataattttctaccaatatcgaccagctcttcttcctcctcctccaccatccctatccaccatgccgttaccattcgccttagcaagacaaactacatgctctcgcgcgcgcaactcctcccgtatctgaggagtgccaaactcatcagatttatcgatgggtctattccccagcctccccagttcgttgcgtcttccgctgcaggcgccgacctcgtccctaatccggcgtacgaccggtggtatgatcaggaccagcaactccttagcggtcttctctcctccatgaccgaggagatacttcttgatgtggtgactgcctccaccgcaaaagaagcctgggacatcttgaagcgcatgttctct

SEQ ID NO: 23706 - DNA, 1063 bp, Zea Mays
gaaatggaaagcctagttattcaaaacttgctaatttcattcttataacttattttatcagccttacctctttaaaatttcaactgagttgactcttctcttgtagatggttcgtactctccaaactacccgcatcaacaccagctacgcccctcagccccggcagatcctggtcctacccagtggtagtcgaggaagttgcggcggatctccctcccatccgagtggagaatgtagtcatcctggaggatagctcggaggagcagctaccgacgcccaccccgttggcagagtccctggccttcacagctaggtcatcgacgtcagcacagcctgcaccagccttccaagcacctgcacccgaaggcgacgacccctatgactccggagacgacgatggcgaggatgacgatgacgaagaaggtggagatgaacacgtccacgaggaagctgactacgcccagcaggactacttcatggggtttggtcctattgtcgaacattatacatcaatgttcgagacagggcacttccccaacctgctgtaagaagtgctgcacgtgctaggcacctacgtccgccccctgtacgaaacaaggtgagtgagcgagcctccccgggcttgctactacatcactcgcatccacgtcagggtgatggatacaggggacaagggattcaggactctgtctgctcatgagtccctgacaccactgtccacctacgctgcctcggtcagcgatgctgcccgtcggaccctgtggtcgctcagccacacctacgggcagtagctacagaacacgaggttcaggcatcttcctcagcgtctgcgtggaaaaagtcagaccagcatcgtcccaggtgaagctggtgaggatcgcctcaacaccctagctggtgtagtggccggtctcaacaccgacctggacagtcccaccctggatctctctagggtgcacttggagctggagaatgcccatgccaggattgcagccctggaagcccaactgcaaggactggatccgcccgaagctcaggtccccgccatggcgttgtctcctcc

SEQ ID NO: 23707 - DNA, 519 bp, Zea Mays
caccgtcgctcgatgcgcctataaattgagtgcgccacaagctccgtagggcagtaagctatccagccaccacgaatcagcctcgaccattcgctagaatccacgaattttgaattcgccccaaatcaatctccgccgccgtgaagaacagctcgctgcggccagcttgattccggttagctcgcgtccctctgttgcttgttctagcatccgtaagcaccccgcgaacccctcgacccgttcaattgaactggaccaccacccatcgccgggaacatcttcatccatctgcaaccttcatggtcaccgtggccagcacaaccctattgatcattagtgaaattaagttgggggaaaggtttgggatgagtccaatgccgtgtctgtcgctcgggaaccctagtcgttgccctatccgaccgatccaggagctcgccggagttcggttgcgcgcgacgccgtcggggaccttcccctgcgaaggattagaaaccagagggcatttctgtaatctgtcag

SEQ ID NO: 23708 - DNA, 1520 bp, Zea Mays
ggtctcacctcctcttgccgttcctcctgctactgtcctcaccatatgtgcaagctcaacagagaatcaccttgggctcctccttaacaacccaagggcctaacagcttttggctctccccttctggtgactttgcctttggcttccggtccatcgagggcaacacctcctcctacttgctcgctgtctggttcaacaagatcagcgacaagacagtggcatggtatgccaagaccgctgatccagatccagcgctggtacaagtttcatccggttcatgcctcgagctcacgtccagtggagcgctctcgctccaggaccctactggcaaagaggtatggaatccagaagttgtgagtgcaacctatgcttccatgctcgatactggaaacttcgtactggctgctgcagatggctcttccaagtgggggaccttcgataacccagcagacactattctgctcactcaggtgctcacccctgaaaccaagctccacagccggaccattgccacagactactccaatggacggttccaccttaacctgcaaaataatggtgttttcttctatgctactgctgtgcaatccgatcctcaacatgaatataattggtccatgcctgggaacgccacaaatttggtattcaatgcgactggcatgatatacatcaccttggataatggaacacaagtaaaaatcacatctgggaagacaagctccatagcggactactaccatcgtgccacacttgatccagatggcgttttccggcaatatatgtatccaaagaagttcagcaaccacctgtacactcaggcatggtcagttgtcgacttcaaagctccaaatatctatatcccaagaaggtcaatagcagagacacaggtcagcagtggaacatgcggtttcaacagttacagcaaggtggatgtcataaacaaccagactacctgcgtgtgcgtcccacagtacacatttaaaggtggaagtaaaggctgcacgcctgacttccagcaaccaagttgtgacttggatgaagcaggtgccacgaagcagtttcagttagtaacaatgagcaatgtggattggcctcaatgtgactatgaacagcatgacaacatacctaacaaccagtgccagcagctctgcctgacggattgtttatgtgctgtcgctgtgtttcgtgatagtgacaatacatgttggaagaagaagttgcctttaacaaataatgttgtaggggatagtgtgcagaggacagtttacatcaaggtaccaaaaaacaacagtcaacaacctgagcttcttgattccaacagatggaagaaagataagaagcactggatccttggaagttcattgtttctaggaagctctatcttgctgaacattgtcctgatctctgttatactcttcggtacttactgtactataaccataaatgaaagcccgtctgtgcagtcatcaaacaatctaggattgcccctgaaagccttcaattacactgagcttgagaag

SEQ ID NO: 23709 - DNA, 771 bp, Zea Mays
gctcacgatggtacagtgcccaaccggatatggtcgccagcaaacccatcgccggtggctttccgccgtgattcacgtcgccggcgtcacgattcgcgctcgggtatgtggataacttcgcggcgtcaaaagatcgtcacccccccgtgacctggaagccactccgactagccgtagtccatctcccctggctcaccgcccgcggtaaagtgttcaccgccgccgtgccctcgccgttggccaccgcgtgtcccaatcgcgccatcgcattgccgtgacctcctctgaactctccatggctcaccggagttactgccacgctataggacacgtattcaccgcgccaggcttcttccttatctccggccgccaccgcgccatcgtcaattcaagcgccaccgcccgtcctccctataaattgagcccgtgactagctccgtgaggtcgtcatctaactagccaccgctaatcagccacaatcatctatcagcgagcttgaatttccaatttcccccaacttcgtctccgccaccgtgaaacgagcctcaccgtcgccagccatactccggttagctcctcccctctgctcccttgtttaagcattcttatgtgtctacaatgcttgccgagccactgaattgaactaagagccctctggtcgccgggaacacgaccgtatagccgctatgctcacggccaccgtggccagagcttcgtagttgattataaacgcaattaagttaggggaaatgatcatggtaaccccgattt

SEQ ID NO: 23710 - DNA, 613 bp, Zea Mays
gagagccgatcatgagaaggattgaggaggtcatcgatgtggggttattaatgatgttgctggtgtgtttctcaacaccatgactatcctcactctagaggcacctatggggcatgtgggagtacacccacatcgtggaagacatgcaggtcatgctagaccctcgacaatacctatgcctcccctaacattatggtggagatggcaagatttcacgtcagctccttcaatgcaaagatgttggagacgttagtggggatattttctctttacaaagacgatgccaccctagattacatgtcccaacacatgacactctgtaaccccactaggctagggaccttgactggttggtctctatttgtagcgggtcgtggagcatttgagggacatgaccaaggcccccatcaaggataggaggtcagcttagatgacaccatccctagttgtttttagaagaagagggaagctcgcactagcaatgctcctacagcgaggaagtcccatcgcatggacactgatgccctaattgctataggacctagcgtcaggcagataacaagccctagtaaatctatttctaagcatagactttaatattttttcctcttct

SEQ ID NO: 23711 - DNA, 422 bp, Zea Mays
cgagtgaatcgggttatggtgttcgtatgggccgggtttgtgagctccggtgtgtgcgccgccgtgcggtgtcctgcacctcgtgtgccagcgtcgaaggaaggcgaaggtcctctaaccatcgattgaggagaggacgacgccgattagaatggggataccctttcggggtgtggaatcccgaccgttgggatgtaatccaagggccagtagcggatcgtggatcttaaaaccgtagtcgtagatcctcaatccgagggcggtcatcgtgtactggttgatgatacctagatctaatcgtggcccttgattcacgatcgggcggccagaaaccgtgcattccccttcgcgggtacattttataaaagagaccctggggtttcacctattcaacccgccgtcctgatacgcgtaaatgaatt

SEQ ID NO: 23712 - DNA, 779 bp, Zea Mays
acgaagaaatcatgtggtgaccacacacacatcgctgggttacttgaggcatttgaggccaaaggcaatctttggcttggctcctacgactgaggctggacatactatgggatgtaaggtgaacggtatgaggatgtactgaacacctcttttgactgtgagggttgcgtggctaacgaaacaaactccttctgcttgtcgatggtatgatgagatgttcttatggtctggcctttgtccttgccacaaaacaagcagaatggtttccgtgggggtgcattcaatctaccaccaaagctttggcctccccttcctcctcttaaagcaggtggacaaaacgtgttgtgcgaaggttgctgctgagagcttgcatgttgatgccctgactgacactaaaactgggccatcttttcctcaccctacaccaggttatggatactttagacatgccttggatcaaaccatcctctgaagcccctagcgacttcagtgtaactatggaattcctcccttctttggcgaaaatcattgtcaacccttatgtactcatccattttttgtagcaatttttcaagggagtgaggaggcttccttgcaaaatactaagcagttggtcctagcctaagccgcttgaccatggcctcgatgacgatatcatcttgtactgccagagcctaggcccaaagccttagaaacctttggagaaatgactgaaggtactcatctgtctcctaggtgcactaaaacaaaacttgtgcagtgatgggtttggacagaac

SEQ ID NO: 23713 - DNA, 366 bp, Zea Mays
cgaggatgtatggccaagctcgcgctcgtgctggtggcctgaatctgtgagagggtgggagtagcggtggagtcgattgcaccattgacaatccagtaatgtccatgtcacttgcctcctctgaccctcatcacgacaacttcgccaaagtcctcgatggttggattgtagtctggcccatggacctcccgtgccatcacgaggtgtactcagtgagacaattgtgggcagtcgggttgctgtacgcctcgggcccatccttgtatcgtaacctcacaagatattaggcccacctacagctgtccttgtcccacggaccttagacagtcatgcagatgcacccaatagcttgacaggaccttctgc

SEQ ID NO: 23714 - DNA, 569 bp, Zea Mays
gactcaatttcgccagagaacttacgcagccccaattccctctctcctccgttcttgctccgccgtgaagaacttcttcgtagccagcgttcctctggtcagtaactctcaacttactccctgttttagttagtccttgatctcctattgctcctagatgtggcaatttatagtttggccgaagctcatcacaggaacgcacccgtgcgctgtcaaacaccgccgtgaccccccccccaccgtcgacccgctcttcgggtcttgttctgcccaaaccgaagcatgtccatggatcctagtgaacccgtaaacctttacccagcctcaatttggccatccccgtcgctgtccgatcggaacatgttcactctcttgtccatccgctctgtctccgtggccaggacattgtagtgcgccgttagtgaaattgatggaggggaaatggtcggggtggatcgaattgtgttcccgtcgcttgagagcaccagccgtggcgtcatctggccggactaagctcgccggagtgcggcgagggctgattcctcgtcgtggactttgctctgtgaaag

SEQ ID NO: 23715 - DNA, 711 bp, Zea Mays
gaaccggtgcttgcaccaatgctgccttcagagcttcaaaggctttctgagcttcatcattccacacaaaaatttggtccttcttgagcaagctagtaaggggtttgctgattatgccgtagtgagcgacaaatcgacggtagtacccggccatgccgagaaaactcctcacctccttgacgttgttgggaatgggccagtctcgaataacctgcaccttttctgggtcagtggcaatgccttctgcactgatgatgtgtcccaagaactcaagggtggtctgtgcaaaccgacactttgacagtttcagtttcagctgatgatcctttagtttctgaaacacttgtttcacctgaagaacatgctcctccatgtctctgctgtagatcaacacatcgtccaaaaataccaccacgcacttcctaagaaagggggtcaaaatcttattcatgaaatcctgaaaggtggcgggtgctcctgtcagtccaaagggcatcacacggtactcgtaatgtccgttgtgcgtctggaaagctgttttgaattcatcaccttctttaattcgaatttgatggtacccagacctatgatcaagtttcgtgaagatcttagtcccacatagctcatccacaatttcatcaaatactggcatagggtacctatttttcaccgtatgggcgttaagacgcctataatccacacataaccgcc

SEQ ID NO: 23716 - DNA, 820 bp, Zea Mays
agagaagcgagggccgccatcatggtcaccgcggctcaattgaaattagtcgcagtatgtggcatggtggtgttcatcgctgcacggggactgtgaacggagttgattcacgcagcgggcgatcatggtcgggcgacgattcttcaacatcgtgcatcggccatcggggaaccacgaggcgtcggggcagcccgccttgactatcgattggaggtgagccactaaccatagggtttgcctagttctcctcttcgcgtaggggcatctggtgtgcggtttgggggctcgattggccgtatggctcatcaccggccatgggcaccgccgggggaaatctgcgcgccgccgagtttggaccgtgggaggaggatgactcctggccatctgatccctatcgggtggttgcgattgatgaggaagtgagaagaatcggaaccgtccacttgggcttgggcggcttagattaaaccctgccgtaccggttcggggtcgcgttggggccattggatctaaatccgtgggctaggatcggtctgggcttcataaaatctagagcgctgatcgctgatccaatgggtacgattgcgtaccggttcgataaagtgaagatctaatctgtgccatcaattgcggatccaacgactgatctttgctgatacctcttcagttgtgtggattagcataagagcccctggatttctaaataatcaacccgccgtccctgcgagagtagcctgtgtctgggttattttgcgagttaaaccccgaccttctctgtattagtgcgcccagtctaggaattaaagaaaataggaaaaag

SEQ ID NO: 23717 - DNA, 505 bp, Zea Mays
atcggagacgaggtgggctcaggttctagggggtctggggtcacccaagcggtccagggccgatgaaggggacccgacgaacacggtggtggggttttggccatgagaaggagactgggaatgggtgaacggtgaagggagtgctctgggcaggtcggtggtgctccggcgagcgattccggtcatggggaggggcgattgagcacaccaaggctgacatgggcttcggtagagagtttgggacatctagggccaaaacatgggcacggcgcggagctgcatcagtcgaacgctatggaggcaagacgtaaaattgaagccaatggagcgcggagtgtggttccttatcttgggatgacgctcataggggcttggcacgacgttgggagctctgatcggttcggcacgcgagcgtgcgacactggcgagcttaggcggcggtggttgtgtgcgaggagggctacgggcgagagaaatgagacaggagagagagggcaggtgtgtg

SEQ ID NO: 23718 - DNA, 411 bp, Zea Mays
gccttgtctactattctcttaccatatgtatctaactcagatggtcaataccaggcggggtggtggaattgatttacctcccaatcgacacactcggaggatatttagacaaccccagccacaaccagtagagatggatcctccaccaccgcctccaccagcaggagttgacccactggttgcagctcagatgaggatgatgcaacagatggtggacactatggcagatatgcgtgctcagatgcaacaggaacgccaggagatgcgccaagagcgggaggatatacgtcgagagctgcgccaagaacgagaagagatacgtcaggaaaggagggcgcaacagcagctgcaacaacaacaacagcaacagcagcaacagcaacaagtaccactgcctccaccacaaccacc

SEQ ID NO: 23719 - DNA, 550 bp, Zea Mays
atgcctgtttcttgagtctgaatttgagccagagttcagcagggctgagcactctaccatcctgggctatttccagcatatgtaagatttctttggcaagagcaagttgggatctcacatgcccaacctgcttttcgctccaggcctgcaaactttttgttgttccttgtaacttcatttccagggttttaaaaggacatgtagccgactcaaaagaattccatgcggcaagaacaatatcctggaacccctcgagcttggtccagaaggattcaaagtggaaacgccttcttccagaattattatccctaagccccagaattagaggacaatgatccgaatcctgtgaggcagtactctgaagaacattggggaagagcaactcctaatccactgagcaaaacactctatctagcttgaccagaaccgacacattttgttggtactgtctgccatgcaagggaatttctttcagtgccatatcctcaattaatcttcgaaatctacccgtcattgctctgttgaaattattattgttcttatctgagtc

SEQ ID NO: 23720 - DNA, 288 bp, Zea Mays
ggagatgtggcaatcactcggtgcgcgcaatacagtgaaggaagcttgggatgcggtgaaattgatgcgtctgggagccgatcgcgtgaaggaggtgaacgcacagaagcttctccaggagtttgagaatatcaagttcaaggacggcgagtctgttgaagatttcggcatgcggatcacaaatctcgtcggcaaccttcgcgccctcggcgaaattgttgaagacatccgcgtcgtcaagaagttcctacgtgttgtaccagcgcggttcacccaggtagtagtcac

SEQ ID NO: 23721 - DNA, 342 bp, Zea Mays
cagtgatcccgcgtcgtgatcgtcaccatcgttgcgattcatgcttagtgaagtgcggataaccatgtagggtgaaaaatctagcgctggggatgagcttgggaaactgttccgccctggccgccgtacccacttgcctcacggccggtccagataacctcgccggagttggctgcctaccgctcgggtgccacatgcctagacgcaataccacgtcaccgtgacttgccttagcatgtccggtcatcgcgggtggtcttggcacggtaaccctgcaccagtaactctttccctctccgatcaccagcgcgccattccaaattcaagagccacagccctcgg

SEQ ID NO: 23722 - DNA, 412 bp, Zea Mays
acatcatgcaacgcgccatcatagatcacatacgtaaaacaaagggctcaacggcaacatcgtacaataatacaaatcacgactattaccctcacaattctattgcgaagagggggagggcagcattttcactcactattgcaacaagagcagtgaggctagcaaaaatgtcacataggctccacctttggaataagacccgcctcccaaaaattaaataacatcatccttagctcttcacccttaaacagatcccgcaagtccccctccccaatacacgtttcggacgttgaagacagtagctcatgttgactacccccatctagtcgaagacgggaccgctccatacccattcggcgatgtctcccacttcgtgacaactcatcgatgctctgtttcgacaccactcctc

SEQ ID NO: 23723 - DNA, 450 bp, Zea Mays
ggtcttcggaagaggacttggattattttgcagtgttggatgtggctgcggcggagactcctccgcgtgtgatgggtgctgaggatcatccgggtgcgagtgctgggcgtaggcggcgaagagcggtggcgaaacggagagtgggtgagttgtcacgaggtgaaaggcgtcatcgtggtgagatggagggtggtcgtcttcgtgtggatgggactggcaaacgggaattgttgtgctcgccggctggggcgagtgtgggtgagggggagctgcaaagtctgtttgtgggtgaggaattgaggataatgttgttcaactatagggaggtgggtatcatcccgaaggttgagccgatgtaatatgtgatgcccttgctgaatgtgtgtaaccataattatgtgtgatgaagctgcgcgctttcgttgatcaggccgttcccgtaggcttctg

SEQ ID NO: 23724 - DNA, 492 bp, Zea Mays
ggaagatataaaaggggtcattcagcaccctatatggtcacactttggcatcaggaggtcagccattgcaattggaaacagcgtgcaagcatgccagacagcttttaatacagtgtgtacttacattggcacaagagactttgtccaagagtatattgcttacagagtgtggccacttgctcatggatggaagatgctgaaggaggctgccgctggctccagccaaaatggtttggtgtatctgaagtatacctttcgatacagaagccagtttgatgaaccgaatgatgactggttaaatgccatagaggtgactagtgatgagctgcttagagcatattcaaaggtcgaagatgaagccatgacaactgccttcggagctcggggcaaaaagaggttgaatagggtatttgatgtcttcgggtttgtgtatccagactattgttatccttcgtgaaaaaaagggaagaagaggaaagctgctacctcgac

SEQ ID NO: 23725 - DNA, 1087 bp, Zea Mays
ttacaaagtacccaagttacataagcgcgtgcgtctttaacataataaaaagtgaccaaccaccatgaccctaacagaaatcaactctccttgtcgccagagcgaggagatgggtgattcctctagctcttgccaatccccacaagtgtaactcctcactggccaacagcaatgctctagcaatatttggagaggccccatcaaacacacagcgattgtggtgattccacaatatccaagcacccaaaataatcatggaattgagtccttttttctaatgagaacacccactttgctaggagttgtttcccaccaatcttcaaaggatttatcatccgactgaggagtgagagcctgcagcccagcccttcgcaacagattaaaccaaaactctcgagcgaagacacactccaacaataggtggttaatggtttcctccgcttgatcacagtctggacagcttgtaggatgtgggagatttctttttgctaattgatcagctgtccaacacctatcccgaattaccagccacataaagaacctacatttaccatggggccaaagatttccaaatcctttcccatgacctgaagatcacccctccctgaaatagatttcataagccgattttgcggagtactagccatcacaagacaaccctccaaacatggcaatcatcaatcctaggttgtaacaccacctcagagagcaaataccagagactaagaaactcattaataactccaaaagttagagctccatagatatccatcacccaagagtgatcagtaagagcttcatgtactgtccttttgctaattctcatcttgggaactgttgcaaagacttgtggtgcaaggtcagcaattctctgaccctgaatccatctatccgaccaaaacagggttgctgccccattgcccacctctgaaaccactgctatggagaatcttgaacacaagatataaatgaatgaatatatacccagtaaataggattagaggaggataactggaatgatacctcccggtaattgttgaggtagatcttgaggggctcaacgtattcctcgaagccaagcgtaccc

SEQ ID NO: 23726 - DNA, 406 bp, Zea Mays
gtttgtactttgtttccacttgcgatcgaaggtcttatgattctgaagcgtgatcgtatagggcgctggattatgcccctcacatcctccctgttactcagatcattcttgacataaaaccattgcttcatccaagagcctgaccattttttccgaaacgttggcacaagacacctcacatcagaccggtacacaaagttgtagcatccgaagtggttgtgatattgctctttcccaactgccttcgtctggtaggataacccgtgaatgttgcagaagcagttggcatctggctccagcccttggctcctcatagcccaaatgaaaactccaactttaatcagagcttcgggagtaagctgatgaaggtatatctcaaatgtcttcatcacttcgactaacatct

SEQ ID NO: 23727 - DNA, 660 bp, Zea Mays
cagagataagtgccatgctggatatgttggctgaagattcctctgatgcagcccctgctgaaacactggctgtagcacccatcccagagactggcaaagctttggatattcagaggtctgatagtgttcgcccgaagcgtcctcgccgagccaatcaaccaacttctcctgctgaggggaagaaaaagaagaagagacatctttgtcgagtgtcatgtttggatcaggatgtcggtccttctgctcctgctgttgaggaagtgccagtgccagtttttgctgaagctgatcccaatgggtgtaatctggccacagctaatcccaatgggtgtaccgtccgcattattgatgaagatgaggaagaggagaatgaagtccctctaattcggaagaacagccggcgctacatagctagcggggaaagtagtggtgttccttctccagctttgtctgctctcgttggtctgcaagaattgtctctggcaaattttgatcagactctcgaggatatggtcccagaggatctattgtcggagccggcagatggtgggatgatggatatttgtgctgatgtgcctgatgccgggttggagttatcccgagcagcgtcccatgcctcgtcgaccttggagcgcggtcttaagggtcaggaggctggtc

SEQ ID NO: 23728 - DNA, 540 bp, Zea Mays
ctgtgcgcagtgagcggcatcgcggcgggcctccaccatctccgcctcttgctcctccaggtccacagcgcaggtatgcgggggtgcctttgggtcgtccgagagagactggagggcggcgggttgaggattttgaaggagggcatcttccaataccacgtatgccatttcctaaatttgaaggggcggaacctcgtatctggattgatcagtgtgtggattatttcactttgtatcgagtgcctgagtcagtttgggtgatgtccgcatcgttgaacatggaggggaatgctaagaggtggtttcagatttttaaaattcagtatgggccatgttcatgggaggaattttgtgaagcagtgatgctgaagtttgggtcggaggagtattcacaggctatgcagtccttactggagattaggcagattggatctgtggaggagtacaaaaaggtgtttgatgaggcgcggtatgcaacttctgtccataatcatgatttagatgagactttgtatgtggcccatttcattaaagggctga

SEQ ID NO: 23729 - DNA, 378 bp, Zea Mays
cattatacatacttaacccatacaactcattttccttatttagactacataaggaaacaccctactactatactagtgtagtcctccacattcttggtcgctctagatccactgctagcttcaggagggcgatcattcatgatgttcatagaaggaggggctccaaagatgtccggctccttcatctgctcctgctgcgccagctcccatctcagcaacttcaggtggcacgtttgggtgtagctggtcatacaacacatgcacctcctcgtgcaggacattgttgtacgcttgtagatttttcaaagccatgctcagctcttccacccgggctcaggtagttgcctcacaatcccaggctatggatcacgaattcac

SEQ ID NO: 23730 - DNA, 471 bp, Zea Mays
catatagtttttttgaagtctcaagcttaggtaataggacagagaccctggtgggtaaaaagtgaacactacaatatgataagaaaatagatagtacaaaaaaaactactaacctattttactcaatggaatgtatgtgcactgatggaaaaatgggtaacacatgttaatttatgctacaacatttgaaaaaatgtggaacttgcttcaatcagtgggatttggtgattccatcgaccaaaaacattccagttccccctaatcagacctagagagcgtgtgtccaccaaatcgaaatcaccagatcaaaccaaccagttcgattgcaccaggatcttcagtatgagaaggattatggcgcttctcgatgaaatatgtaaccctaaacctatatacagacccagagtgcatctgccaaaccctaataccaacatttgcacatgtgcgcaccaggctggaagcatgtcagag

SEQ ID NO: 23731 - DNA, 519 bp, Zea Mays
ctccggtaaggataatcaccttctcagcggattggcaatttttctttaccccatccccgtcggcgctggctggcatgtgaaattgcagagaactagggcacgacatcccgcgcgcccggccgaaacgatctcgtgcgcgtgcctgatctcgtccctggcgggtctgatttaatccctagcgggtccgatctcgtgcgtgagagagaaattttgatgtctgcgcttgcagttatgctctgttcgtgcgtatgcagttagagagcaaattcgagattgtgcgcgtgcagcagtagctatcctctgcaatttccatgcgtgcagtagttagagaacaacctcctacttcttaattagtttggtgctactgctacattatgcgtgcaacagattagttcatttcgaagttcatgtatgtgctgtgtctggccatctaaaaaaacatcgttttcttgtcccttccatttaatttgctctcagccaactctattgaattaggccactgcatgcctgtggcctgtg

SEQ ID NO: 23732 - DNA, 554 bp, Zea Mays
gcagaagaggaagctcccggagtgaagttaacagaagaaccccactgagccgtcgggtgaggcagacgcggagctccaaattgagacatcataggagtagtcggtgtaggagtaggcgcagccagatactgagcaaaaccttgcatcgccacgatctgagaagtcccaggcacatagaactgctacggaggaagtggaactgcaaattgctgctcagtgcttgacatcatgttgatagtgccctgagaagaggaggaagtcactggctcccatctgagcttcccactgggattcctcctacacaccacatccttgtggtcctgactgtagatagagcacctgtcactccactaacactcagcacggcgatgcacatccccacaacgaaaacacagccccagcccgggcttaggaacagcccgatacctctgagtacttcctcctaaagtacctgattcagaggatttgccacggtaggggtggtgacgctggtgctgagacttgcccctcttgtgggctggacccccagtgttgcccctcctcgcgtcctgacc

SEQ ID NO: 23733 - DNA, 336 bp, Zea Mays
tgtcagggcgtggcacagaacgtggagatcgccatcaacgccgaagcattccgcgtcaactgttacaacatcaacctcggtgagtttgatctcatccttggcgtagagttcctcagtacactaggacctataatgtagaatttcaaggacatgtgcatgtccttcacacgggcttcccggtccgtgcggtggactggcttgagctcgcgcaggggccaggcaaccacaccgaccgcctgcgccataccgtccacacccggccagccgctcatggaccgcctgctccagcaatttgaggtggtgttcaccgaacctgcagggctgcctccactccag

SEQ ID NO: 23734 - DNA, 328 bp, Zea Mays
gtcgctgcctatagctaatctgtaggttcagcagtgtatggctgtgcgagcacagtcgtggaagaacggtggtggcgacccgaccgtgttcaggcgtcaggctcagcagctagctgacgccgtggcggggtcggaggcgtacggtacggctatccggagctgtgcattcatcccttgttccaacggcgatgtcctttccttcttggatgtttcctcatcctcctgccaccgacccgacattgttgacactgacatcccaaccacatgcccgtgcctgtgctaacatgaatccacaactcaacggtaccaatctctggtaccaagcgat

SEQ ID NO: 23735 - DNA, 364 bp, Zea Mays
tggcgccataggggcgtggcaacaagacccaggtgtggttcgccttaaaggcctcatactcctccagtcctcctacatggcatgcttttagttaggatcggtgagcgtagtacggacaaaggacaacttgggggagaccaccggagaggaggacgctaagagaacttggcagttgacatgctggaggacaccgacgacccgtgccagtaaccatcgggtggacatacctagggtcctagtggagggcaacagggtgatacattggcagctcgtcatgagagggagtcggtgcatcagcccaaccacaccgctagtagatgtgaatgggatttacgaatcgtgacaaggaggtcccctcagcaaa

SEQ ID NO: 23736 - DNA, 481 bp, Zea Mays
cacggtaaaggatgacgtagggctcatgacgacaggaggagccgcgcttcatacgaccacaccgtgaggctgatccatgggacccacacacactaccacgaagacatcagtagcagactcgctacaggggcccgtatggtggatgaacaggttggtacgccatgttgggtgtatgtctatgtacgatcctatgaatgatgttagcgatactatgtcgataggggacaacatatcgtccccttaccagtagagaatatgacccctctgtaaggctctgcccttaaactataaaagggcagtcccctctttctccaacatacaagcacaccaattgtaacacaagctactgcaattccatgatcaacaatacactggactagggccccaagttgtaacaatataaactgtgtctcggttccatagcctgattccctacgattcaccattcagagtaagtccgcacttgcatcccccaccgaac

SEQ ID NO: 23737 - DNA, 331 bp, Zea Mays
caaaagcactgttgaaatcaagcaggcgcttgacgtccaaagggaagctcttcgcactgttgatgaggaattggcctctgctgaaaagcagcgggcagaaaccatgacgacaattgagaaacttaatcaaattttaatggaggtagagcaaaagagagcgcgacttgaggaaatgtgttctacttcagatttggaggtgaggaaattagagcaggacttgtgtgatgcaattgcagacgcgagcaagaaggctattgatgtttttcagaaggaaacaacagaactgaatcagcaggctgagcaacttcttattgatttaaatagttgttga

SEQ ID NO: 23738 - DNA, 510 bp, Zea Mays
cgggatttgtgctgctcgccgtgattcgtgcatctggtctgtggattgagttcgccggtgaaaagatctcgtcacggatgggttcaagttactgtggcctcgctgttcctcaatcacttgcaccggcgacgtggctttacggccatcaccggagttggcgtctttcaccgcggttgtgccatgccccaggcctttaaccacgtcgattccagccgcaccagctcgccgataaccgccgtagcccctcagccggtgagtgccacggtttcacccgcgccagtagccttctccctctccggccaccagcgcgtcttcgtgaaattggacaccaccgccttgcgctcctataaattgatggtctgttctgttgcgccatactatcacgaagctagagcacccattcccgccttcaattagccaccatagccggagaatttccttcttcccccaattcagtcgactgcgttgccgtgaaccgcctcatcgcggctagctgcttccaggtccgcc

SEQ ID NO: 23739 - DNA, 446 bp, Zea Mays
cttgccttcgcctcagtataccacccgcaatccaacggagttgtggaacgcgcaaatggcaaaattttcacagctgtcaagaagatgctcctcgacgataaaaagggcaagtgggccgatttgttacctaaagcagtctgggcattaaacacgactgagtgcagggcgactgggttcacccctttccgccttctatatggatcgaacgccatgaccccgcaagaaataaacacatgggtccccacggacagtcctgtcagctgtccccgacgtggacgagcccccttcgaaggacctcatcgatggagaccgcgtcttcgccctataggctctaaacaaataccaagcccaaacagaagcatggcgtgaccacacagtcgtcccgagggaattcagcgaaggagacctcgtactcgtctagacagctcagacagagtcccggggca

SEQ ID NO: 23740 - DNA, 550 bp, Zea Mays
tcgccatggccaaccccgacctcgtcgccatggctcggtgtgactcctcgctgtatgttcaacatcaacccctctaggttttgcaccggtcaattttgggttcgggtcgtttgagcggcaaatcgcgtgggcgccggcgagccaccgccgtgggtgagccagcgccgccgctcgggttgctggtttggggctgaattggggcgggtgtcattggccattggatcacgatcagtcggctaggaatagaacttggataacgcttcgggcggggtcatctcaggtcgttgatcggctcacggacggagacaaatagggtgtggctgttttaaatctggggccgttggatcgtgatccggcgggcagcgtctcgtaccggttcgttttgagtaggatctaatccgcaccatccgcgcgtaatcggacggctctcattcgcccataccccttcgtcgcggccattttcaaaaagagaccccctgctttaaccaaatcaacccgtcgtccgtagggttgttcgcctgagtctaggaaagttatagtttgacccctg

SEQ ID NO: 23741 - DNA, 388 bp, Zea Mays
gaacagtgggacaggcgaagggatagggttcggggacttgcctagaccctggagagaggaagctgctgatgggacgtcgagctcggcacgcgagttgtgaagcatctgttggaccttctcgtcgaggacggcggatggatagggttcgcgtactggcatttttcttcgtccactatctcgacaaaactatcaactgaaggcgccttcaaatctccaaaaaaagaagagccagatcagcagactacacaagtaacaaaccacatctcggctatgggggactagcgatactcacgcgcgcggatctggcagtagagcgaagcattcttgtgcgtgacgacgagtggcgcctcggccgcggaggcattggcggcgaggacgacgagggtga

SEQ ID NO: 23742 - DNA, 422 bp, Zea Mays
caagtacataacagaactacagacttactattgacctaaagcagtagagcctcatccaattgaaaagcagcatcactagcagcccctccacctgactcagattcttcttcctcatccacttctccttgagtttgtactggctgttcagctggatgatcactaccatcttcatcatcatgataactaccatcttcttctccaacatcttgagtgttccttggacgcttcctagttcgaacataggtccttggatgaggctgaaaagaagaggtccccctaaccagaccaccagcagccctaggtacatttcggccccagagaccctctgctgcacccaatgcttcatcaacagcagcccaaagattaccactatcagattcctcatcaacccattcattttcccattgaaactcttcaagcac

SEQ ID NO: 23743 - DNA, 705 bp, Zea Mays
actccatgtgctccgcggtgtcaagcggctggtggagaacgatctcgaggatgagctggccaacgagctcctgggcaacaacatggctggggttgagcggatgctgtcgccgccgccgagcaacggaaccaagcgcgaccgcctcaagaagagcatcatcctgcttcagcaatctaaggaggtcgttgcaaacatcatggacaggattagcgcggcagacgaagcctaggcatatgatataatctttcctataatgatgaccgggcgacctgctgtacgatgttaattaaggttcataagcatttcctgtcagttcgacatgaacgactttgtcaaggtgcttgctaacgacctgctgcttactgttatgattgagcatttaccacatgctactagtaaactgcaccattagccatgacaagatttagtgcatgagctttgcgaatgtttttgttggctaacatgccagtatttgctgggcttatcgctaatgcatttccttccattagttgacttaccgttcttctgttccggtgacaagctttagtataactgtacgtcattctcgcaacggatgattattctagctgaagagcttttttcttcttttttgttaagtcccactctttttcggtacatatttttgaagatccagctacatatttttgaagcgcaaattcagatgcagaaagatgcagagagctc

SEQ ID NO: 23744 - DNA, 600 bp, Zea Mays
ggcatgtgtagcagaggcgctttttgagttttgaagacttcttccttccttgtttcttgcttgctacatggttagtgaaaactttcttttccaacaacatgcctttttgttttacatagggacaagatttgattaagtgtcccttctttgagcaattaaaacaaagtttatcatccttaataatcaagtcattaatataggaacatgacttaattgagtgtcccttttcaaagcattcactacacttcttactactctcagtatgaagtgtgacttgattattaccttggatgttaccttttgtggaggcatgattgaggcttttggaggaggcattgatcttcatcttttgcttcttcctcttggcaatcctcaagttcttgacattttcttcaagggattttgtgcatgctacggttgttcccgtctcaagcttcttcaccatgtgatcacggttatcttgagaaggttgagtaatgcacttccctttaagttgtgtcaagctcatatttagcctctcattttcttccttgagcttttgatatatatcatcttttgttcctgcaaatcctagctcaaaggaagagttgcttgtcgacg

SEQ ID NO: 23745 - DNA, 684 bp, Zea Mays
gtcaaagagacaatgggcttatactctatccattttgtgaatttgtcaatggcaaccagcacgtgagtatagcctccttgagcttttttgaagggtccgatcatgtccagtccccagcatgcaaatggccatgttataggaatggtctgcagctgctatgcaggtaaatgttgttgctttgataagaattggcaagcttcacatctctggactaactcggcggcatcactcttcgctattggccaatagaaaccagatctgaaaaccttcccaactagagttctggatgttgcatgtactccgcactgcccgacatggatttcatctaatagttgtttcccaatagcggagtgaatgcacttcatgaggactcccgtcgcacctcttctgtacagtgtgccccctatgagggtgtagtgggctgactgccttgcgatgcgttctgctgccgccttgtcatccggttcatgttcattttttatgtacctgatgataggctctctccagtcattggggtccaactccggttggctcaaggtgttgcattcttctgtctaatctgagacaatactcgggtgtgatatttcttggacaaagatcccgggtgggacctgggcctgactggatcccagcttcgacaacgcgtctgctgccgtgttgcggtctctttccacatgatggaac

SEQ ID NO: 23746 - DNA, 2629 bp, Zea Mays
ggcgaattggcggcggccgcgatccctgatcgtcggtctgagataatgagcgaattacctcgtcgtgagagaaactaccttgtgtgatcgcgtgtgtttacatgctattccctcctctgctctgatgtcctgccccaacacaccccgcctcgatatcctgtcacatttccacagctccagatcggagagctttgggaagcagctgagcagctggttcaactccttcccgctggcgttgcacctttggatgaacatagattcaatagggaattggtagcgtacgttgctatcacctacatcaaatgaaaagccattgctactggaacaagacatccatagggtccttagggacgacaacatctgcaagtgatgcagtggcagaggttggcagctgtacatcttcagtccttttagcttagtcagattatgaaaagccagctcattccaaaatgtgttacctggagtgtccttcccctcaaccatcaaactacattcataattgatattctttacacataccaatttatcaagacatgagctgccagttccttgtatctcaatggaacagggagatctagtccaagggacaggaggaaattacaatagccgtggacaggatcgaatcacgagctatgcgagtctaggaaacaaatctgcacatgtccctttctcttgctgacagcaagcagcatgtgaaaatgacagctccacaagttcagagtaacccctaatgacaagcgcttccaggaaaggaaacaattgacaaggggcatgcacaacccatttctccaaccactgtaagtttacgagctgtaaccttctctgattctcaaacattatattagggatagtgccaaaaatttcctcaccagggacgtttgctagtcatagatctcttataagtggaaatgtcttccaagctacaccatctagacaaagagattccaaacctctgatggagaggttcataccaagccatgaagggcaggtagctccaccatgacctataatggataacttcacaaggttgctgcttggcttaaggctttcaagaataggttcagcaagtgcagaatcactagtagatgggtgagtattccaatgtaatgtcaactcatgtaggcggctcttttgctccagttttgttgtgtctgcttcttccgctgctcaaacattttcaagattagcaatggacaatgacccacaaagctctaccaaatatcctatctgcctaagttaaacccttggccttcctgtttgaccacgaatcttcgtaactcttgtaacaattttagcttcccaacctcgagaatgctagtgtgttgtatcgtctcgaacaagaaaatggcgcaactttacgaggttgctcatatctcttggtaaatcaacaatatcacagttttttgcatccaagaccatcatgtgataaaatgcggaaaatctgtggggaaattgtttgaacaagagatgaactttggatccgaaggtagcgaagatgcaagagattataaaagttgtgcaacaaagcttccacatcataggatgcttcagagagggagacaagacggagggcctttgcctccctaaatagatcaccaaaaaccttcacaaagcagccatggtgttccccaaataacatcaaagaccgtaatctttcaatttttagactcttatccaatgtactgaaaccctccatacagttcttgagagctaatctatctttgacattggtgtcatatatgtttatagacaaatggcgaactgatggctggacttgtaaggagctcaattgagattggcaactgtctatgctaaggcattcatgtgacgaaaccctctgcgccaattcatgtaagagatcatgaataatgtaacaatcactattcactaccatcttccctccttttctttttgaaaaatccatgattaaccaactgtgccaagtagcttatccctgtatcttcaacttttttattttccactgtgtgatgaatgcaaaacatctagtcctatccagaagttaattatatcttctcttttgaattcgtagaattgatgaaacaaagcacaatagaagaaacattgctggagctaagaaggcaggtaatcataactcaacttcagtgcaggcatattgtcagtcttgctgttactttgctcccattccttattttatagcactctagtccaatgaaccaagtcaagttgggttttcagtaatctaccgacagtttttgcagcaagaggggagccctttagtctcgcaactatcctatccctagtttcaagtaagggtatgtggtccttgatagattcgtcttcaccaaacacaatctgtaggaataactcgctgaaatctttatggtctaaaccaagcaaatatatcagagtggcggcaatgttttggtctatttggctttgtcgcaatgatgttgtttttacttttaaaccaaaaccatcaattaagcaggttctatttagggcaacatactagctcagattctagagattgctgcagaaagaagaacctcaacatgaggtccttgcggtatgtcgatccttagaggtggtggctgttgggggtcttcttcttcaccgaaggccctcaagacaaaaacacctttggcaa

SEQ ID NO: 23747 - DNA, 271 bp, Zea Mays
taggggagtttggcattttcttccgtacagtgcttcgaatggtgacattttgatgctggtctgatggctgttgttgtacgagaatttggcgtacggcaaactggactcccaatccctgtcgaatgttagcacacaggctcttagcaaatcttcgaggatcttgttgactctttccgtttgaccatctgactgggggtggtaagcggtgctgaaatctagcttggtgcccattgcttgctggaggctcttccaaaattttgaagtgaactgc

SEQ ID NO: 23748 - DNA, 586 bp, Zea Mays
ataatttacctttgactttgaactcctcattccacgaattggtgacacctttaggtacacgtgatcaccctcctcaaactctagtggtctgtgctacccgcaagttctcccggattatacagacttgttcttctgcctcttgaataacctcaggcccaagaactgcctttctccagtctgatcccaatatagaggagtcctgcactttctgccatataaagattcgaatggtgacatcttcagactggcctggtaactattattataagagaactcaacatatggtagactcttgtcccaactgcctccatgtttaagggcacaagctctcaacatatcctccagtacttggttagttctctcagtttggccatcaatttgaggatgataggccgaactaaaactcaacttagtatccatgttctcatgaaagcttttccaaaatcttgaggtaaattgtgatcctctatcagaaacgatcttcttcggtacaccgtgtaaacacacaatccgagccatatataactctgccaactgagaacctttataagtaaccttgaccagaatgaagtgagccactttggtc

SEQ ID NO: 23749 - DNA, 318 bp, Zea Mays
tagaacaagcagcagaggggcttgagctaacctgaatcgagctggccatggcgaggtgctttcacggcggcggagaacggttttgggggaaattcaaaattcgcgagctctggcgaacgattgctagcgattcgcggtggctgggtgggtgatgaccctgcggggctggtgggggcttcaatttatagggctcaacggtggtggccggtgaatttcaatggggacgcgcggcggtcggaggaggaaaaggttactggcgcagtggctgggtggctagcgccgtggcaattactccggcgagccacggagagtcgcaaa

SEQ ID NO: 23750 - DNA, 612 bp, Zea Mays
gatggcggaaacccggattggggaaaaaccaaaattcaagctctcggaggcacggttgctaacaattgttggtggctgggtggatgatgatgttacgcagctaggggagggctcaatttataggaggagcgagcggtggccgcaaattttggacgagacacacggcgatcggaagtgaggaagaatgctggtgcagtgaacacgtgttcaccgccgtggcagtaactccggtggtcgacggggagtttagagggagtcacggcgatgcgatggcgcagttaggacacgtggtggccaacggcgatggcacgacgatggtgagcactttacccgcgagcggtgagccaggggaggagtacagcggctgaccggggtggcttccagcttgacggcggcgaggatattttaccccgagaggttatccacaagtccggtgcacgaatccaaacgccggcgacacgaatcgcggcggagggatccgtcggcggtgaggacagccgcgctggtggcctgatccgtttggttactgtaccatggggaaatggtattcagacagcctgacagagccatttggagcaccatttacacccaaatttctatggcaacatccac

SEQ ID NO: 23751 - DNA, 420 bp, Zea Mays
gaggaattgaggatgcatgcagtatgaatatgtgtaggcaatctgaaattctgaatatgtgcacgcaatctaaaattctgaatatgtggagataatctaaatatgtgtaggcaatctgaattgattttagtcttctggtgatattcacttgtgccattgaatattcactagtagtgtctgaatcagttttcacttgttggcactgaatctttggccaaacagtggtggcatgctttgacagaaattatctttggccaagcagtggtggtgacactgaacacatggcagcaactatgacataaattgtctttactgtttgtattggtgtgctgcttcgacaacaagtctcatttctatttcttttgtgctactccaatctcttttgacgcctacacaaatatgtgcagaaaacagtctccg

SEQ ID NO: 23752 - DNA, 271 bp, Zea Mays
cgggggtaagttgatgaaggtatatttcgaatgtcctcagaacatcaaccaacatcttgtgtagtggaaagcgaagcccagctttcatgaagctcttaaagaccaccacctcatcagcttcgggaaggggaactgtgctttcccctttggccctcactatagaaacatcatgaaaatatttgcccttcatcgcttcgatttgcccttgtttgacagttgacttcccaaaaacaaaatggctcggcctccacggccgatcttcgacatcttc

SEQ ID NO: 23753 - DNA, 377 bp, Zea Mays
atcctgatcttctttgcagggcagatgcgtggtcgagtttgacctgtacttctcaagtattggggagacaaggatgctgatatgagaatgtataagtaggctgccacactgtactatattatataataccataaagcgtgtcaaagaaagatgatagttactataaataattgatgagtggttgtgtgcatatgtcgtctcatatctgaaggtgatcaaattgttagtgctcgtgcatgtgctgattgaaactgaaacaactgttggcggtgatgatatgatgttaagatttacctagagatagcttgttaagatttgctcttcatataataatatctcatgtaatatgctcttctctataatctgtccctatttca

SEQ ID NO: 23754 - DNA, 392 bp, Zea Mays
gtcttcatagctgcagccttggtggtgctcaagggaacgccaacctggctatagggggtgagcctctagagtcagccaaactcgacaacatggcacccgatgctcctcgtacaactgcaccgtgtacagagggggcgtagggtaaccggcggagctaagcacctcccacaagatggaagggaaaccctcatgggaaaagaaatcagaactgaaacgagtgtcgcctccgttggctggggtgggtgaagtcatttgtggaagaggattagacgtaatcgttagggtagtggaaaggaaaaacatgtgagcccgtgttgttaaaaggaggtgggttagattttaatttttactccttatgttgtttattattatccctattggctacattcgtg

SEQ ID NO: 23755 - DNA, 735 bp, Zea Mays
cgaggactgagatccgaggctcgcagagcagagagggaggagggtgggggatctgcgacaatggtaggaatgggaaccacttacccgggagatctccttacccggggtggttgaggaggggagcactgggagggcctcctgcacgagcggcgacggcgggattcggagtcaaccgcaaaaaccccaaaccctaacaaatccgatgtgatatcacggcgtcgcggggaggacagggggccatgcgacggatctgccttggaggaggggggagcagggaggacgggggccatgcggtggatctggcttggaggagggggcaacgcacgatcaggggcgtcgggcggcggcggctatcgagggacgggaggagggccgagggagaggagagtgggagcaaggggcacgatgtcgcggggtgggaatgagcggagtggatgatgtcgcgaggtgccagtggcaggcagaaccgtgcaccgcgtagctgtggacgtctacgctaccttcttaaggaatagtagagatatatctatatgggccaaactgggtctaggggccctactgactttgggggcctgagcggcagtataccctgcctacccttagggccgggcctgttgccgagtgtccaactcttagcaaacttaggcactcggtaaagcgtcgccagcaacagacgaccgttaattaactatgccaagtgccataggaagacacttggcaaagacactgtctttg

SEQ ID NO: 23756 - DNA, 367 bp, Zea Mays
catcaagggtagagaggatacaacaggtctctacaagatcttcatatttctatcacaaattatcatcactagcagtattgcggtcgagaattgtggctcttccaacgccaagaaccaaggacaaattaatgcctaatgtagcttcaagctctaaggtgatgtggggttccatggctatttttgtactcttcttacttctggtagatcatatatagattatagtaagcatgccaaggggtggaataaaatgtagttctgctacataaaccccagatatatgtctattcagaatcgacctttaccatttggtttatagtatataccataccagtcaaaggactatcccaagtcaattcagtgactataa

SEQ ID NO: 23757 - DNA, 551 bp, Zea Mays
ccggaaaagggagcgggaggaggagcagtggaagcaggggtggtggaggtggtaggtatggctaaggtggtggatggcgtaggagtgactggagcgggcgaagtgggaggtggagtggtagcaatggcaggagtggtagcagtggcaggagtagtaggtgcggaggagcaaggccgagaggcgagtcgacgaactcggtaagcaatctgatctaatgatatctgcagctgaccacctctctctgcctgctcagtggctgctgctgctagagctgctcgggttgctctatccaaacgctgcttcttgcggccttcctgctgctctaagtagacagtcttccccttgacctgcctgaagggacgaggagggtcctcatcgtctcctccccctggcgccgacacattcttcatgcgcaccatcctgacctgacgactacatatgagagagaaaaaccgagcacgagaagagagcagttgataggattacaaaatagaggagaactacgtggaaatctcacgcgagagggagagaatccaggcaggataggagat

SEQ ID NO: 23758 - DNA, 655 bp, Zea Mays
gcgataacgtagaagacaaatcaatatactagaccatttgatacaaatagttccatgataataacatggagattttagtgataatatgagtagtgttctaaaataacataaataccgaaacttcattttggtcaccctaaatgagagttggagagaacaaaggggtggactggcggggactggacgttagggcgaagcgggcgcatcagcacgtcggtgtggagagtcaccgcaaaatgacgacggtgagacgacaataggcgtgggatagcgagggcaggcgacgatgcgacggtagatggcgacgacgaggagaaaggcggtggcagcaagcgatagccattgtcgcgttgcgacgacgcgacgggacccttgtgagatagcaagggcgggtgatgctgtaatgcaaaggtagaatcccactaatagtatacccatccgccagtgcggattagaagacaaagtagttgtactgcgtgtaggatcccgacgcggcgacgagcaccacgactcgggtggggagtgggctaagtagtgaagcaccgagaaaaagttagatcaaagtctagttttcattaaatttagtccaacctactatataaaagtttatttattttattatatatctaagtctatataaaagtttatttatttt

SEQ ID NO: 23759 - DNA, 881 bp, Zea Mays
catcccggacgtgcgccaaccagccgcgcggatcgcacggcggacctccccgttgatatccgctcggccccaaccgactcacctaggccgttaaagggagctcggtcgcggtcctcctctccccttttccgtgctcgcacccatcaacagcctcaccaccgagctcgcagccaattgaagattgtcgtgacgtcgggagtttgaggtcgtcgatctcggctgtaccttcggagtccggtggtgtctgtggagcttcgcgcgaccgcgtggaacgtgtacgactcgtcctcgggattgattagccgctggcgttgggggaattgctcaccgtcgactttggacagccgtggaatcgtcagacgccgtgggcggagctcggcgcaccaccaacgtcggtaagatttccccaacggactcgcgattattccttctgcgttttagagtcattggataggtcgggaaaggtcggggcgccgctgcatccggtcgccggcgagaggccatcgcggctgcttttgcgccggcgctcgttcaccagggagggagaagacgactccctggccgtccatctgggtttggacgctaaggattcggttgtgggaaaacgattaagttaatgcaccagggccgtctgatccaatcatgcgactaggattagattcgcaaacacccttacagcggaatagaattggtgcgtagatctagcgatggacggcttagatcgtgtctgtggtcgcgattgttgggaaccgttgatccgcgatctgatgactctcgaggcataccgcttcgtcgcacttacaaatagatctgagccacccatgtgtgatcggacgatcgaaacgcccacggaatcataacactcactgatctaatctgga

SEQ ID NO: 23760 - DNA, 733 bp, Zea Mays
tcttggatctagatccaatggccaaggttttgcatagcacggatcgctcaacatctgcctgatctaacactaacggttgagatcatcgatccccgaagatcagctccgatccacccgatggggaatctgcggttcagatttcaaatagcggacaccaacctagatccacccgatccatgatccatgccccagatcaacctaacgtgaaccgttactcagatctaatctagatcgttgccaccgagatcaacggttacgaacccgaccactaaaacatctggcagcccacggcgtcgcccgcgacccacgtggtggtgcacagccgcagtagctcccattagtcgcttcggcaccttggactctatccaaaccatgctatatgaagtgtaggatgatatgaatagtagggagggctattaccggctcagaccgcgagttgaagccggtcctcggcatagtgtggccccagcagcggtgacaaggtacgctgacaaatccagccgcgctcgacacaactttggggttgaggaggtcgctagcaccctcgggtagccctcccgacttcaatcacgaaggttgagggtgcctccaaccgcaaatcaccgacgacgccgaccacttctcccttccccgattaccgtatgccctctctccctcgcgatgatggtggttagggctcgacaatggcaccgggacgacctggccaacctctatatctggagcgagagcctcg

SEQ ID NO: 23761 - DNA, 386 bp, Zea Mays
ggaaaacatcaacgaggaagccaacgaagaacaccaagaccactacgtggggttatggcctgtcactgaacattacacttcaatgttcgagacagggcacttccctaacctgctgcaggatgttctgcatgcgttgggaacctacgtccgacccctatacgagacaaggcgagtgtacgagcctcctcgggcttgctactacatcactcgcattcatgtcagggtgatggatgcaggtgatagagggttcaggactctgtcagctcacgagtctctaacatcgttatccacctactctgcttcggtcagcgatgctgctaggtgaactctgtggtccctcagccacacctaccgacagtagctgcacaatacgaagtacaggcatc

SEQ ID NO: 23762 - DNA, 535 bp, Zea Mays
tgtgttgcgatttctactttaattaattatttctagtcgcaaataattaatagaaaaatgtgtgcttaaacatgagaacatttttttacatcagatgtgttatgtttatggattaaatctggtattatttttctgcttttatttccgtagtaaataattagcagaaagatatgaaggatatattgtgcattcttaaatcgctctaaatatttatattgcgttgagcttttaaactcacgatgagcgattaaattgtatagtgggtactcggacacgtcgatcaggctgcgttattaatcggctaagttatggcatcaactatgcattggctgcgccctggcaacacgacgcagtatttgtgtcgtacgaacttagctgcgtcatgtgattgctagcactctcgtttattcggacagctcccgttgagtcgaaccgccatcactgagtcgcgtatttttcgcatgccctgtaggcactgtatgtctgccgtgatcattgagccacaattgcgtctgatgcgcacgttgcgtggaat

SEQ ID NO: 23763 - DNA, 798 bp, Zea Mays
cacattagctgaggctatcactgccttagttaatgccaccgctgacaacactcgtttcctgtgtgaattggtggggaatcagtttcagcaacatggaggcagaggtcaaccctaagggccccgagacaccatgtacttggagttttctgaaactcgcccgtcgctttttgttaaagctaaagaaccttttgaagcagatgaatggatacgagtcatggagaaaaaattcggactgatccgatgtactgagacccagaagcctctgttcgccgcccaacaattgagaggtcctaccagcacctggtgggcaaatttttcagctattcagcctgccggacatctggtcacatgggcggaattcaagcaggcggtcagggaacattatgttccagaaggggatttatagatgaagctggaggagtttatacgtttaaagcaagggggagactaggtaatgcaatatctcaacaagttcaatcatctctcccagtatgctatcgaccaagtggacacggatttaaagaagaaaaattgcttcatgagaggtttgaatgatcgactctagcgcaagatggccacatgcctggatctcacttatagcagggctgtaagcacagcgctgccagtggaagccaagaatttgggacaagggaaaacaaagagatattggggtgaaggatcatcccaagggtctaaaaagcggtcaacgttggtcatttgtcctttcaacccaaatcgctcttctcctcgtccacccacatatcctttcaagcaaccagtgttcatccgtcccactcc

SEQ ID NO: 23764 - DNA, 461 bp, Zea Mays
tgctaacggagcaatcggcttaagtcggcaacgacttaaggcggtgcgacatgctcacgcatacttaactcggggtgaccactatgccctgctaacggagcaatcggcttaagtcggcaacgacttaaggcggtgcgacatgctcacgcatacttaactcggggtgaccactatgccctactaacggagcaatcggcttaagtcgacaatgacttaaggcggtgcgacatgctcacgcttatctaaaactcggggtgaccactacgccctactagcggagcagtcggtttaaattgatgctaatttaaattggcactgcgcgcttggcacgttcgcaatcacccgtcttaaggcaacttctgtgccccatgatgaaatttcgaaatcatcacactgcatttacttctacaaatgcagatactgttgaattctaaacactacaggaattctaaagattcccg

SEQ ID NO: 23765 - DNA, 592 bp, Zea Mays
gtggaggctttgagctgcactttttgatctattttctgtttaatctcaactcctatctaactttgtcctaatggacctgatcagtccaatagacctaacctagttggccccatcaactgctcataacactaccaccccttttcgagcagctcgttcttgagatgcaacacctcctattccatgattgacaaaggcgagcctcaccttctattccatgattgacaaaggcgagcctcaccatgtacggggagggtgtgatgaaggcctgtgtgagggagagggatgcacgctaaagctcgcgatagcgttgtcctcaatcccttgttcctgctttacgatagcttagggtactgttgaggtcttcatattaatcacggtggtagacgttggtgctagacacacaactcgagaagctacttgcacccctcaacagaggtggtgctagttagggcagaagtggcggtagggatcatgatggctgcaatactgttcacatatgaatagtagtcatgggtggttgtttttgggttaggatttaggaatgggaggagatgagatcttagatctagattggattagaggcgtgaatttg

SEQ ID NO: 23766 - DNA, 441 bp, Zea Mays
gcaaaattacgtgagagaactgtccaaacataagttaaggctttaaggcacctttttccaccatatagttgctaaaaagtagaaatgtaaagaattcaaggcaatagatcaccttttaaactaaaaatgatgtttccctaatgtcaaggacattgtattcgcacgagagggtattagggtacaaccagtggatgaagacattattgggctagctaatgaccttttgtgataccaggtttcctataatcccctctattcaaggcatacctagatggtgtttatgtccactcaagtaaaacaccacacatcattatgccacattgtttctcaaaatataataaagaccataggaaatttagccaaattgcgtaagagatctgtccaaacataggttaaggttgtaagacaccttttttccaccatacagttgctaaaaagttg

SEQ ID NO: 23767 - DNA, 553 bp, Zea Mays
agaagctcttcataggaggagatctcaatggccatgtgggtacatctagcaccagtttcgagggtgtgcatggaggcttcggctttgggactaggaatcaagaaggagaggaaatcctgaactttgccctagcctatgacatgtttatagcaaacactttctttaggaagaggacatcccacctggtgaccttcagtagtggccaacacactagccagattgatttcgtcctcttgagaaaagaggacaggcatgcctgcttagattgcaaggttatacctggagagtgtgtggtaacccaacataagcttgtcgtagctgacttccgttttaagattcgtttacaacggaataagcataacaaggtcactagaacaaagtggtggaagcttaaaggggatgtggcccaaactttcaaggagagagttatcgaggagggcccttgggcagaagagggagacataaatatcatgtggaggaagatggtggtgtgcatccgaaagatagcttcagaagagtttgggttgagtcaaggaaacagaagggaagttaa

SEQ ID NO: 23768 - DNA, 657 bp, Zea Mays
atcgctggcaccactgaagtctggagagctagtggtggagcggactgcactggaggcaagcgaacaccggtgtgctgaaggatgtgagtcatgaaagcctggtgctctgccctatctactagaagctgctgctagagagtgtcctggcggtcctgaatggtctgaaacatggatagcatccgctcgtacatctactgctaaattgctgcctgacaatcctacacagcggccaagtgagcctgttgctgggtcagtgactctagaatggctgctagggctagatcgatggtaggatgagcagcactggaaccaccgacctcgtgatgatgtcaacaagatggcacatgaggaggaggtggtggtggaatctcaaggtcctcatcatattgaagacatatcaactactatgccctggtcctcaaactggtggatcacctcatccttatctcaaagctcaggggccaaaggatccaagggagcactggcgggattcgtaccctcacgtgtcaggtggtagaaaccaaacatcagtctagtggagtcaagagctgcctggagttaagggggtcagattagctgcgtgcagatatggcagaggtagtgcgtgtagggcagctgaagccaagcatggagtccatccaatattgtgtcctcaat

SEQ ID NO: 23769 - DNA, 613 bp, Zea Mays
tttctcctcccccatcactccctctcatcaatggaattcatgctcatcgtttatccctctcccctcggcgtctctcccttttccctcctcgctctataaaaaccgcgcccacggagcattaccttccatacccgtgcttgctacccctgctttctccctggcacacgctcatctgctctcgccgagcccagccaagccgcaccaagctctctgtgccactgttcgccgctgctcgccgtcgtcggcgtagtttattggtctttcagagccctgttccagagccctgttcactgtgccgatactactcacagttgctgcgctcattcatcgacgtcgtcggaccccgtggacttcccggcaccacgccatccaaacgtatcaccggagttacatcgtccgtcgtcgacacgatcgcgcagcacaccaactggaccatccgcgcctcgccgtccgaacgcctcgtctcactacgatcgaatccttccattcaccacaaggtcaaagacaacccaaatgtttttattaactccaaaatcgcagtttgaattaattcattaatttgataattatttgttgtgatttggaattcatgtatgcgaacgattgattttta

SEQ ID NO: 23770 - DNA, 337 bp, Zea Mays
aaacgcactatctggtcaatatagatttctgcatacttctctaccctgtgagtggtatgtattggcaagaaatgagctgtcttggtcaacctatccacaatgacccaaatagaatcgtggtgtcgggatgtgttgggtaaacccacaataaaatccatgcaaatatcctctcatttccaagctggtatggggaggggctgtaaggtacctgctaccttcaaatgactagctttgactctctggcaagtgtcgcacttagatatatacttagcgatttccctcttcatcctggtccaccaatacaaggatctgagatcatgatacattttgttactgc

SEQ ID NO: 23771 - DNA, 318 bp, Zea Mays
gcggggtactgtggcatcccaaatggatatggtggcatgccccacatttgatttgggacatatggtggaggtatgtatgtgtatggatatgacataggtggatatggtggtggaggtgtccatgcaggtacgttaggtcttaattgaacattatgaccttccgtcctttccgattggtgtggtggttcaatcggcctaacctgttgtcgcacctgggtgggtaagcgaggtcgctttggtggccggtcgctggggccagccttctttttcacatatttagacaataattgatcaaaagtcgggctggattttaccaac

SEQ ID NO: 23772 - DNA, 279 bp, Zea Mays
ggttgagacacatccacactcaaatgactctatttattccttgctttcgttgccaagctaatgaactgcgtgcgttcaaaaggactagcgataccctatctatcttctacctcaaccgtaagtaccaccatgggtgcacacacagccatagctccagtggtgagcaagatcttctgcagctcctcgcaggccgtgctgatggtgcgcaggcgtcctcctaccgtgaacggcggcggccttgttgttacagaccggaaccagacggccgctttcagggtc

SEQ ID NO: 23773 - DNA, 272 bp, Zea Mays
gccgcgacctgaccacgtaaattagcagatcggcggctgtttctaactccggtctgcaattcgtcgcacaccggctatgctctgggaacgtgcagcacgctacgaagatcgcactcccccgcttttcgtggactaagtgccgatgaacagcgatgccgacgatggcgagttctgcgctgcgatccaatcgttcctgggcagcttatatacccatggagggcagagtccgtgtgggaggcgctagggtcaggccctgcatgaacagagtccgc

SEQ ID NO: 23774 - DNA, 777 bp, Zea Mays
tttcaagccacggcagtggcgaaaaccgaactctggcgagtcgtttccgcatcttccactctgtaggattcaaacagaaagcatagagagtatcagtgaccatgcaaggttatggtgctcaccaaaatcttcttgaatgaactatagttgggtcagacgatgttggtcctgtccatggtggtgttcaccgtctgtcaaggcggcgttccagacaactctgtgcggtacaaatcaatcaggcaggcgcataagcttcaccacaggcaaaggatactagaacttgagaaaagatacacagagggatattaaatgcacctggccacggtgaggggaaaagatgtctgttgtggtcactaaccacagtacccaccgcaagttcaaggtttctcaatgggatcagagggatgtggaagatggagaacttaaactagaggtgtgagaatagtgtgacgcggtgaagaagtatgaagtcggctagaacttggagatctcagattatgctcttgtatacccaaaacaaagacaacagttgtagccggcttggcctttcctttagggtcatatacagagggccaaagagagccaacatgctccatttttcacctacatgacccccacgtaagggtatatgcacagggaaacatcagaggtagtcaatcctcccatggacagcaaaccagcacagtaaataagcaggtgagtcatggctgtcaggctgcagattgatccaatccaaaaaaacccctgggctataaaaatcgttcctgtgaacccccc

SEQ ID NO: 23775 - DNA, 381 bp, Zea Mays
aaaaatcctccagtggagatctccatcacctatgtaagcccttggtggatgaactcgcccattttttaatacaagccatgcagacgaatgcatcaattcaaaacccttgaagcatcaaagtttttcaccatctgcccacaacaatcaaacaaaacaaatcaatgcatgtgggtcgctgggcgtggcagtgacgcaatttgtgcaaccatcctacaactccgttgtgatgagtggccttatattgacaggcaccttcatgttgtcctttaaaggatgcactgcaattgttgcctctaggttctccatcgaaacactaaccatgaattcccctaactaatcacgcaacaccaaagagtaccctaaaatcgcatccaagttgcg

SEQ ID NO: 23776 - DNA, 794 bp, Zea Mays
cacctgttgaacaccccgggccaggcgagcgcgttccaccagagctggctctggaacaatcgccccatgatggatgttgggtaggggcggtgggggcggatggaggtgcccctacaaacttcttcagggtgcccacgtggaagacgtcatgaatgcgggcctgtggtggtagctccaggcgaacgacgacgttgctgatgagctcgatgacgcgatatggccctaggaagcggggcttcagtttgcccgttgtctgttgtggcagtgaggacggagttcgctggcgaagtcgaaggagcgcccagtcgccgactgcgtatgtcactggccagtgttgcttgtcgtagtggcgtttctgcaccgcctgtgcctgctcgaggcgatagcgcacatcggtgaggaatgcctcgcgttcctccatgtcgcgtgcgaccgcatccacccttgtttcaccaagctcataagagcggatggagggcgggtcacgaccatacaccacccggaatggcgtctcccggagcgaggactggtatgccgtgttgtacacgtatttggcccacgacagccagcgaagccattgtcgaggacgcctgcctgtgaaacaatggaggtacataatgatggcacggttggccgcctccgtctggccgtctgactgtgggtggaaggcggatgacatgtgcagcttagtgcccatgagccgcatgagctcacgccagaacgtcgaggtgaacatcgggtcgcggtcggacaccatggattgtggcacgccatggaggcgtacaatgttggcg

SEQ ID NO: 23777 - DNA, 584 bp, Zea Mays
gttgtatgcaagactatctgcgagatcagctttcgtcatggcataaaggccagcttcgagcttcgggaagcccatacttctagccatctctcgacacacagataattctttattgtctgggagacagtacaagaaatcatcttcgtttgtaccattaaacactaaggccccctttgggtactttagttcccgggcatagtgtttggcttcaaaaatttcctcttcagacatttttttccctgcagcatgtcgaataatgtagtcaacatcttcgatcggagcttcgggagtaggagttttggttttttctggtacatcctgccctgctgttttgttctcagatacggtaggctccgtctcggtgggcattgaaggcccagcttcagcttcgatctgagcttttgaagcttcgacaattttcttaggagcagggctcaaagtcttcgttgtttctataacagtgtctaataagctggccattctcctcctcctaggagtggcgacaggaattttttgcatctttgacaaaactatctttgtcggtgggctcaagatttttggcgtttttatcaccttttccactt

SEQ ID NO: 23778 - DNA, 620 bp, Zea Mays
cttcggcgcactagaagaggctaaagtagcaactttcctctttcccccttgccttcggacagaaaacaataattagggtcgacaaacccaataacatgaaaaaccctgttgagcctccttttccctcgagcaccgaaggcaactatcagggcttcatcttctgtcctcgagtaggctccaagtagctcatcactcgttgcctctatagcgtctagccagtcatcatttggctcatcaaattggcttctgtaccggaaggtgtacttgagataaaccaagccactttggctggagccagcggcagcttccttcatatgctcttgaactaaatctctggtaccaatgtaggtacatatggtgttgaaggccattaggcacgcttgcacttcattcccaagtgtgattgatggccttctaatgccaaagcgtgaccatataggacattgaatgatgtccctcacatcctccctctgatttagatcattcttcacataaaaccattgcttcatccaagagcccgaccacttcttcagaaatgtaggcacagggtaatttgcctcagagcggagcacgaagctataacaaccgaagttgttatggtattgttcttttccagtcgc

SEQ ID NO: 23779 - DNA, 470 bp, Zea Mays
cccgtaggaggtggggttagccgagccctttggcccacatgatctaggatctgcgaccaaatccatccacgcccgattcaccccctctcggcccttgatctcccgatcaacgccccggattctatgcgccgaaaggatatcatcacgctcaaatctgagtcgtccaacccagagctaatggccgagaagccatcgatccccccacacgttggagcaggaggcgccatcggcaccgcggcagcgaacgccggtgtgctccccccaacacattttcttgcctcctaatcccttaatcgaacgtggctacaccatgtgtacatcaacgtgaactacatgaaaaagtccttatcggctctccgaggtggtagtggtgatgtccacgagaaatggcggtcccacggccgaccagcgattccggcgagaaatcaccgaccacccagtggtttctccctctgcgaaggcaaccgaca

SEQ ID NO: 23780 - DNA, 719 bp, Zea Mays
tggagctgcaacatcagtaccagatggaatggatacaaaagtttactcttttgccacaactttagggggtgcaggcgcagcagatggtgaagccaagcaatttgttggtgaaatggaatgctgctcagtgtgtggtggtggaacatcgtcagttgcactggagtgttgatcgacagcagcaggtgggtcatctgaacagcgactacctgtagaacctaaaactgtggcaaaaggaggctcgagcgagccattaggtagcaataaatcaagtctgtaatgctgcatatggtcattggaaatagctggttcttcagaaggaaacaaggaagtggagatagaatcagagggtgtggaagatgaggcaaaaggaaaacggcttcatcgatcacaacatctcgagaaatataaattcggccggaagatcgatctaaacatttatagcctttgtgcatagagctatagcccagaaacacacactggatggatcagaaagctagtttttgactgttgtaggggcgtaagtttggccaacaggcacaaccaaatatacgcaaaaaattgtagttaggtgactcatgaaacaaagcttccataggggaagaattctgaagcacacgggtgggcatgcgattgatgagataacatgcagtaaggaaggcttcatcccaaaaccgtataggaagggacgagttggtgagaagagtaagatcagtttcgac

SEQ ID NO: 23781 - DNA, 588 bp, Zea Mays
gttttgtccagattttggagtaacttgcaggcttctggaatctgcttgttagctgttgacgaagctcattgcatatcagaatggggccatgatttcaggttttttcttttgatttgataaatggaacactgaacatatcttgtaaaagtacagggtccttaatcatttcagttgcataaataatatacttatgaaatttgaaaaatcctgtattcactcgtcgaacggatatttgtgatagttatatttatccagatttttttggtgatgctatcgcgcctttatgtgcatgcttttttctatattttcatcccccatcctttgatattgagttgattggaaaaagataaatcagcatttctccctcttataactcaatttccgtaatttgaactctcttacaggacagagtacaagcagctgcattcattgcgcaaccttcttgtgggtgttccctttgttgctttaactgctacagccacagaaaggtatgcattttacgctatcactttgttttcttctttgttgtttctttaccttccttttgagggtgtctaatgctactattttttgtcctttgcttaaagg

SEQ ID NO: 23782 - DNA, 759 bp, Zea Mays
cctatgcattttctatgaattatacaagttctaacatttatttatgcattaaaaactaatttctgatattaattcctgattctcaatactactggattgggcctcaaatactaggaagcgcaggggctctggcgcaagaaaccagagacacagtaaatagcgcccccaggacggcgggttggtttcctgaaaactgaggggcctaaatgcaaaacgcgcgcagcgaaggggtatcgggtgttatgagccattggattagaacccaagggctaggattagatctcccataaaatgaatcggtatgcaactagggccattggatctaacttcaacagtctggattttatttgaccgagatcggcacgaatccatccgatctcacgtcaacggctgggattcaaacatgaaggggggtagctaccaattaatcagagccatccgtttacgatcctatggccaacgttcctttccctgcttttccccctcccagcttggccagacggcggcgccgcccaccaaatcacggggccatcgccggagtagtgcccgcactaatcccgccgccctccagcaattcacttgcgctacactgacataagaccatgggaaacacgatggaggtgaagaataccgggaatcgggcgcgcagacgggttgttctcgcgttggggcggcttagcggtgttgaagacactccgacgagcaattgccggagtcatggtgccctcctgctcccccggtgaccatccgcacttccgc

SEQ ID NO: 23783 - DNA, 435 bp, Zea Mays
catggagcataactctaccaaacatgcctttttttcaaaactatttggtcgcgttaatttttgtgtagctaaatcaaactactttgcccacccgccacttggcttgtcaattggtagactagccatgtgttgacctatcatggcacttattgtcacatcgtcgaatgttgtgccatcctacctagcaggtcataaaggaatatagccatgtgtgatgacatctcttagtactcttgccatgtgttctgttgctctgaccttgtcatgttgttgcatgcccgtttgcctccttagtccttcctcactccctttggcctctatatcactcctttgctccatcccaagacactaaataaacagtgtctttgtaggccctaaaaagatattctatcattacgtctgctccgtttcattgttaatgagaccactaacaca

SEQ ID NO: 23784 - DNA, 625 bp, Zea Mays
agaaaagaaagggaaagagtatagaatttatagaaaatatatacataaaaatagtatctttaaagtcagtactttaatggcacactataaaattgtaaggaagggccaaaaaggtttgaattagatctgaattcaaattgaatttgaaatggggaaaaagaaatggaaaagaaaagaataaaacaaaactaccctaaatgggccccaacctcgtattcggcccatcccctctttcctccccttccgcggcccaagtcttctgcccgcacgcgcctgcaaccctcgctgacaacccggacccgctcgccggtgggtctcgctgcgttgctgccgtgtgggcccagtacgtcagttgtctccttcaagtccgaatcaagatagctccgggtcgttgtgaaccaccgccggggatcgcgggatccctatccggccgggcttcaatcgactcgccctcgcccctacagtataaacgcgggaccccgtgacctcctcacccctcgaatcgagttctgccttggatttgcgccaccatgtccgcgggtgaagaagagtgctgccgcaggggaaattcacgtacgccgccgcgggacctcgcctgggttgccgctcgagcctcggatcggtg

SEQ ID NO: 23785 - DNA, 695 bp, Zea Mays
gcaagttaaaagacgctaaattgagttcatagacagatctctttgacaaactaagcacgtaccttacgtttgaaccaggaaatgaaatcgggcaacccatttctcgcaccctttctaagaagactgtcatattcttatggagtggggtcccttgatcgacgctagaattcatgaagaaattgttccatgtatggcgtcacctcttcaaggttggtcaatacatatagcatgatatgccgccactcttcatatgttagggtcttggtggtcgagccacttgcgcttccgagttggcctcaaaatatgctaaggttcgattcattgtcgccatcattgtaacgagggggtggattatgcacgctcggcagtttgtcaccataataagttgttgtgaagtttgacacctcctctagaatgtatgcctctgcaatggaagcctcgattttgcatttatttctacatttctttcgaatagtatttagacatctctcgattggatagcaccaacgtccctgcatggcccccccattcgtgcctcataggggagatgaagaatcaaatgctgcattggattgaagccgggtggaaatatgttctcaagcttacacagtaacacaggtgccaatctttccaagtctgcaaccacggtccgagataactcttttgcacaaagctgatgtaaaaaatagctcaac

SEQ ID NO: 23786 - DNA, 607 bp, Zea Mays
gttggtggtatttaatgcgccattgctggggcagtttggcctagattgcgctcgggtgtgacagagtttcctcttgaggctgacgccgacctcgggcgaggcggagtttcctcccgaggctgagactgtgcctagatgtcgtatgtcccatccggagttgttgagaacagtgaccggagcgagggaatagtgcccagtattcgcgggagtgaatcatcgtgggtagtgaaagaagatggaaccacgatcacatcgtcctttgttgaccgcgacgtcattggtagagcaggtgttcataccaattgcatttaatgcgcacattttgtgattcctgagaactttggccaaggccgggctcgaagctggcgcagtcgagggtccacatgggcgcagccttcgtctgaggatgtgctcgggcaaggcgtagttttgggcaaccgtcaagcggggtctcgggcaaatcgtgattcgaccccgcgtgacctcggggagcgtgttttgtgccttattattccctggtactcgagtgttcgctatgcttaggggcataatctaggtacccctaattatgatacccgacaggcgccttcctttgagttggcaccag

SEQ ID NO: 23787 - DNA, 449 bp, Zea Mays
cgaacatccatcggcagaggagatctctcgggagaggagcagagatggcggctaggttcctcatttctggattggggaagacagagcaagacgcgcaagctacgacggctagggtttctggattggggatgaagcacacgtgaagcaagcaacggcggcgccaggattttaacggcgtgagcacagagagaattaaacggtggccccagacgcaaatcactgtctcatgtccatatcagcaatagtcggacgggtgcgtctccaaaacatataagccatccccaacgcctccatttcatcgaaaccgcgtctcttttgtttcataatggcaattgtctctcgagagggaggctagtaggcgacggcttcacgagagtggatacggggaaacccttcctgaccctttgaggtcaggggcgaaaatgtcgtgctcccccgcggaatgggcc

SEQ ID NO: 23788 - DNA, 390 bp, Zea Mays
tgaaggcggaggtcgaagcgcctggggcagggcgtggtggagatgaacctcccacatcgcttcttcaggttgggcacgtcgaggcccctggaaagcgacggccattggtccccggggcaacgggagggcggacaaggaggccgacgcggcgtgggatgggtaagcatagtggaggaacaactgcttgacagggggagcggggatccaggttgcgagcgccgcgccgccgccgcttagggttttggatccgaataggggaggcaaaacaggatcgcgcgagcaagtgtgcgtcggagaagagagcgcgcacatcggacgacagagggactctatggcgtatcggacggtccagatcgctggaaggcagaacatgtcagaggcaggctaccc

SEQ ID NO: 23789 - DNA, 733 bp, Zea Mays
tgtattcataagataactagacaacctagattgtcctccattaaagtatatctactttaaatagatccatcttatcttaaaagattctatcttatcccactagattcatcttgtcctaataaacatacttatcccaccctgaccatgatctaatcaaaattaattagatccaatccggtctaagtcataccaatctaaactagatctcatccaatctaaatacgacataatctaaggtcagccgcttaacaagttaatagtggtgaaataaaatagaccctactcctataacacatgttttaaacctaaattggtgccctagaccaacttggccatatacgaacaacctacacattcttgataggtttcctaatctatctatttgaaagcaagattctaacctaccaacctaacctacaagatcctaatgctttgtataacccctctgctttaacctaacaacaacatagagattctgacctacctacaccatgtaatccatcctacccaaatatatcttaacgatttatccctaacttggataagcgcacaaagaccaaaggaaagaagaaggtcaacctcgacaagaaaggatgtgagtagaaccagaacttcagatgaatctggatccaccatttgagatgaagtcttttcttgccatatgctttcttacttcaacctatccttactctaaccatctctaatcttgcctaactgtgtggctaaacataaa

SEQ ID NO: 23790 - DNA, 672 bp, Zea Mays
gtgagttgtacttgccatcgtacttgtcgttgcacttttagatcagaatactctctgttgcttacgcgagaacagggcttcgtatcccgagggtatccgatcttgaccgaagggcaccatgcagttggtagcatagtgtcgtctgcaagttttcgggatgggtcgatgctatggaagtttcgttcgtaccctctacttttgccaacccttgttcctcgtagcccattcgtcgggttttcctttgtctctcgtacaagggtggtggtgctacatttgtcctagatttagaggagcatggggcttgctggagaaaaagggcaggtcctgcctttgtcatgttgtgtagaatgggacaatagtggacacatgtatggagcgatggtacgatcgtctagccccgagaggccctatctaacctgaccgatcctctcctatccatctagagtaggcataattgcatcacagtagctcacctgtaggtacctctaagcttatggcgacgacatcaactcgactggcgtgatgagaaaggagatgctcatgttctgctcctctagccctagtgtgcccagcatctttgtcggcgacatcgcgtttggctatgacgtcgacaacggtgacctctcgtgtaattccactggcacggtctgcctaggccgtgggagcatgtcc

SEQ ID NO: 23791 - DNA, 525 bp, Zea Mays
caatgatcccttggcctcatgcctataagtatttgagcaccacgaccctcgcaagccatcaatcgatgggttgtcttttctgtcgcctcaatcgtgtcaccatcaccgagggcgcaacatcgagaagcgcgaacgagggagagagagccgtcgtgtgggcatcacgactgcgtcaccacaccaagcattccatgtggtcttggcgagtcgtcgggacaccctacacccgtctgtggccttctcaagcaaagtaatccaccggagcgccaccaattactcaccgacatccaacctccaccgtgggctgcattattccatggaccaacaacttcgctacgaaatcaccggtgaatggggatatcaattgtgccctcatcgtgaaggattacggtcggtaccgggtggaattcctcaccggagctgctgatttgccaagcgtcgtcgatgagaatttgcaccacaagactcacggtaatcctctttacggtttcttgttgtacctgcttcatttagggctcatcatgg

SEQ ID NO: 23792 - DNA, 910 bp, Zea Mays
catgggcggaatattgccacaacactgcctttcactcagctctccgcactacaccattccaagtggtctatggaaggccaccaccatccttactgtcgtatacgcaaggaacaacagccacagatgcagtagatgatctattaaaagacagagacatttttctctcggatgtttgagaaagattactgcaagcacaggcatatgcaaaacggcactatgatgaacaccatcgtgagctagaattccaggtgggtgactgggtatggctgcgacttctacacagccaggcacgagcactagttggcaacaagaagagcaaactgggtccaagatatgcaggtctgtttcaggtgctggaaagggtgggcacggtggcttatcggctgtaacttccagatgacgctcgcatccataatgttttccatgttggcttgctcaaacccttcaaaggtgatacaccaagtgctcctctagccctcccagagatgcaccaggggagggtcctgccaacacttgagcgcgtgctacgcgcacgactacgccgccaagaatggcaccttcttatgcagtggtccgggtcttcagcatcagaggcaacttgggaaccactggctcggttcagagaaagctaccccaattttcagctcgaggacgagttgtttctcgaggagccaagagatgttatggtgggcgtccagtacatgcgccgcaacaaggctggtagtcctaattagggggttgaaccggcttaggctaagtgggctgttagcaaggccctttagcagtagaataaagaggctaaaggccttttaggttaatctgtaataggaggttatttataccttaattggaatgaaatgagaacaggctgtgatcaacatattgttgatcagccgccgccctgccctag

SEQ ID NO: 23793 - DNA, 350 bp, Zea Mays
tgcgcttgttcggggtgacccatgctttatttcctgcggggtcatggcctccgatccatatagtagacgaaaagaagtgaatccaattgcccggcattcggtcgtgtttagtgcccagaccactttgggtagttggtcggcgcatttgcccttcttgtcgtcgaggagtcttttcttgatggcggtgaagattttgtcgttggcgtgctcgacgacgccgttggattgcggatggtataccgaggcaaagaagggcttggtgccgatggagagacagaaatctctgaagtcctggctgtcaaactatttgtcgttgtcgactgtgagctcggacgagactccgaatcggc

SEQ ID NO: 23794 - DNA, 498 bp, Zea Mays
aacatggccggtgggtcagaaccttcatctttttgctcttcgacgcaagatcaatctggatgtccgaaacagcaaccttcctctttttctcctgtccccgcggtgggtagcggtagtcggggtacataaagccaatagcatcaaagactctgttcagccttttctttccccgacctccgaaggctgcggacagagcattatcttcggctttgctatatattccaagtagctcgtcgctgatagcctcgatactttttagccaatcatcatttggctcatcaaaccagtctctgaacctgaaagtatattttaatcgaactaacccacctttagttgtttcagcagtagtttcctttggcatagcccagttttccacaagcggccataccctgaaggctatatgttcttgcattaaatcccttgtcccaatgaaagagcaaacagtgctaaaggccctttgatatgcttcagcggcatcatcaattttgaccttcggcc

SEQ ID NO: 23795 - DNA, 480 bp, Zea Mays
cagaggttcacttagatatcaagcggtctttattttaaaagttaccgtccccttcctacaataaaggtcgttttgggttttctaggtatatagtttttggtatgtgactagatactataggatatgcctaaatgtatataatacaacttatgtatttagaaaagccaatgcgatctacaaattggaaaaatatggaagagggagagtataatgtattaacaagatgtattacggaatacggagaaaactgatagcatgtgttctgaatatagatagatgtcgatgtgctccaatattttgcactgactattgtggcatccgctaaatatacttgttatctcggtcccaactggagccccaggtccagagcagatagtttaactaattactgattacagaatgattgcgcttggctttctctggaggctgtgttgcatctctggtagacggtagtggtagggcgccaaagatgccgtgata

SEQ ID NO: 23796 - DNA, 730 bp, Zea Mays
cggtctttccttactctgtgtcatttactatgttgtggcctgactcttttttcctgtgataatcataactatatgcattgtatgtttataagcgggaaatacattgtaagataatttgctgttcctttttgatcttttgctgcagagagttggtatgttggtcagctcttgctgtccatctagagtactgtaggagtatggcaataggccaactatctagtggcatacatcagccatgtagtagttgggggctgagctaagacatgtactagtgtaccatatagttggtacttggcttgtatatatactagagtactagacaatgcaatagagaaagcagttcagtttgctgcacattcagtgcctatgtgtgtgctctgttgtcaccccagttcatcttctagttctacctagccatgggttgtgggagggagtgagctgattggtcacctgtgcagggaaattgagggccattagcaatgttttgctaaagtattgctggatactatttggaactgggaggaaataaattttgttgatctaactactggttgatgagtcaaaaagatttgtgacattcttaacagtgtcagtatttctgatgaaatcatactttatttgaaattcaagtcttcattgtagtgcacgctccccttttgctcgaatactactatagtatctttgtaatgggttttcgaatagccttctttgttagcaatggaggaggaag

SEQ ID NO: 23797 - DNA, 577 bp, Zea Mays
gaaatatgagatatacttccattagctacccccaacgttataatgtggcttggaatattcatttgggttgtccaatgctagttaacaaaagccacttagagtgcttctatagagtgcacaagcttcactatcagaccaaggcactagaaggagggcctccacaacaattttggtgttacaatctttagtatctttgatatatgtttgcactggtgttggactaccaaagcaagtgtttaaacaattgaacaaaagaatggttatactacaaagtggacttagcaaagtgcctgaaaatgaaggagttgattatgtgtccattgaggccctccttcggcctcaaatggctgttgtgcaactctagtattgctcgggtagtgatgattgcttataacattatttgtgagcacatgcacactcaagacctagtacaagagcacatagcgtaccgagtgttctgagtgaaagatggatgggcaatgccaaagcctgaatacgaagaggatatcaaggacaaggttgcctagagggagttgatagcaccgccatgcaaattctatcccttcagcaaatttac

SEQ ID NO: 23798 - DNA, 615 bp, Zea Mays
aaaagagaaatcatcgccgtgctcggttcagatccatcgcgcacgctttaacctgccgctgtcgacgggtcgggggcactattgctgttcctacgaaaagcataaagccgtcgttctccgagttgtattcactggtggtaaatggtaagtactagtattaattcagcgtccgtccaccttgcgatctcctcctctgcgtgtgcttgattgtgtgggtgtggggtgggccacacatgtccgggacgggttcttcctgtgcgtctcgtgacgacctctctttctgaaagcgcccccctgccctgccgccctggccattggaggaggacgaagcggagcatcgttctctccctccctccctatctctctctcttgcgaatggcgtgcagtgcagtgcagtgcgacgcaaacctcggccaccgggttcgttcggttgctcgatccatcggtggatatggattgcctccttccttctgctcgttcgtggcatcacttcacggcactgttgcatggtccaccacgtggcacgtccgtccgcctcctgcacgccacgcaagtggcgacagtagacgcatgcccggacaaaaagttttgcgcaagttttcaggtgcccaacgg

SEQ ID NO: 23799 - DNA, 951 bp, Zea Mays
ggaagctgcagcgctgctcggacgcgtcttcccagcagcaaaggtacgtgtaggagtgcacggggctggggctgtccctttcgtgggatcgagtcgcagtaggagcggtgggaaagcaaaggaagctgctgttcgaacaggactgagttgttgacagcctggttttaatatcacatgttttccgtcttagtttttcctggctgtaccgatgatgagttcgtaggagcttgaaacaaggagattggaggaagaagctgcaaaagggcagcaaatgaacaacatggcagtggcaagactgaagaagatccactaattacaaaaagtgagatgaggtgcatgattcaagaactcatgggactaggtatgattggctccaagatggcgtctggagcatctgaattgaaattggaacttgtaccaaatgatgtgaagctagaaggaagcaagaattatttgagttggtctaggagagtgcaagtgctcgtaggacgtaaagaagtggagcactatttggaggagggttgtgttgaacctgttgagaggcacaaccctgaatggaaggtttggtataccaccaactcggttattgtggcatgattgttggcatccatgtctccgtgtgagtaaggtggttgaagccatgtgcactgcagcacaaatttggaagaccttgagcaatatgtactcaagaaagggaaatgtgatggtgatgatggaaattcatagtaaggcagatgcagtgaaatagatggggagaccagcggaacaatatgcgagtgagctccagtacttgtggggagaactagatcactctgctcctctccaaatggcttgtccacaggatgcacagactgctcataagtgggtagaggacaggagagtgacccacttcctaaagaacctggaccctgaatttgagagtaggagagctgctttttgtcaccaggagag

SEQ ID NO: 23800 - DNA, 619 bp, Zea Mays
gccggcgtggctccgtcgttggcatatgtgccgccaggtctaactggtgggaggaaggggaaagtgcactagccgtccgttctgtgactaacagatgggattggatcggctagataagcgattcggcgatgaaatctaaggtgttgatcattgcaccaacgaccacgattagaaccgcataccggcttggccagatccgattggggccgtagatttcgaatcgggcggttgtggctggattgggtttcataaaatctgggccatcagatctcgatccagtggctcatagcgcataccgtttcaggtagcagaaaatctaatctggggcgtagatttctgatcctacggctggggcgtcccgatatcctttcagtcgtgtacttattcaaaagagcccctgtcctttctccatataaacgcgacatccaccatatgtaaagaccattagatacagactctgatattttgcatgttagaccccgaggaagttacaaatagtggttgccatccacatcacatgaatatctataaaattagaatccgaatatgattttaaggataaaagtaatcctagaagcttagataattcatatttgggtcatgttaactccgatttaac

SEQ ID NO: 23801 - DNA, 327 bp, Zea Mays
gaagaattgtggcagatggtgtcattgtctgagactgaaatgttatcgtcttctgaagctaacttgcgcttgccagagcccgaggaaaatattgaaatcaatatgatgttgtctcaagcagctgtgaaagggatatctactccacgtactatgcgttttgtgggccatattggagatatcgatgtgctagcactcttggactcaggaagttctcatacatttctcagcatagtggtagcagatcagttgacaggagtgtcaaccatgaagacgcctgtgaatgttcaggtggccaatgggtcacaaattacttgctgctcggaattg

SEQ ID NO: 23802 - DNA, 681 bp, Zea Mays
cgggacgcgtggaggaaccaccggacccctcgctcgcgaccgttcaactgttttacttttacagcggtggaggacaaggccggagtccgggcgtgagggagagatcacatcgtgccggactgcctggccataggtaatgtgggcgtggtccttgcggtccgtccgtgtcactctgtataacgtacgtgtgcatcaatcgattggactccgcagtggcagtgagactgcgccgtacgtggggctggatgggcgcttattggtggttgtggaccggatgccagcctctgtctgcgatggaggcaggggtccggtctgggccctggagtactgtatggtgttgtatggacatggacccccacggcacgaccctttcgccttgcaagtggcccgacgatgacctcagccctcggtccaatcgacggccacgcatcacgtacgaggccgtgtcctggacctggagtccaccgcacctcctgggtgctctgaggtttttctacgcctccggctccggtccgggatagcatgtaatgttgctgtcatcgccaatcatcatgcatatgcatgccaatacgttaggtacagcgttcgcatctgtgcggacgttgcacccacttaaatccactgcgtgcctacggtaccagaccagacggacacaccaccagaccagaagctaagcctagc

SEQ ID NO: 23803 - DNA, 809 bp, Zea Mays
aaattatttggtaatgccttttgcttactaatagaatcccaatttgtgatgttttctgtgccaaaaaggctttcatgcattaatattgaatttcttcaggctacttcaggtaaaactttatgcacgaggagagaacagagatttaacttatctgtgtttcattttatttcgatttaatttcccagatttaatatagttgttatggccacttggcgatatatataaatatacgatgccacacaacacaatcaaacaaaatatagagcgaaaacaaaaatgtttacgaaggttccacataatgtgacttcaggaccttgaacaatccaccataatccatacgaatacaagctcaagcgtatccggcgttaatgcgtgtgcagccattagggctaggacaacacaacaagccttcataataagtgcaacaggcacaattatggctcggtaattgggtacacgataaatccacgcaacgtgcgcaacaagcgcaattgtggctgaattgttgcgacacacatgcaatgccttcagggcccacgaaaaatgtgactcgaggatggcggtctgactcaacgggagcgatccgattaagcgagagcgtgatatagcaatcacatgacgtagccaagttcgaacggcacaaatattgtgtcgtgttgccacggcgcagtcaatattcagctaatgccataactcagccgataataacatagcttgatcaatatgttcgagtacccactataatatttaatcgctcggcgtgaatcagaaactcaacgcaccacaaatatttagagcgatttaaaaat

SEQ ID NO: 23804 - DNA, 383 bp, Zea Mays
gcggaagggaatcaaaggtaaagattatggtggaaggaaaaagaaaaaaaaagagcccggatggttttaaagaaagtgggttagctcaagttttaattcctctttgtgtttaatatgcatgcatgctgggagtaacgtttcctctccaaataatagggtgctcttagggcatccttaaatatctaagtactggcccatggggcctaattaataagccacctatccctccctctatgcctaaggcctttcgtcctaggtctagcggtctagtcctgacgatccgtagcagtttctaggcaagttttaatttttgaaaatggtattcatggtttattgtccctctctgtggtggaatttgctccgataccagctgtggcagaacc

SEQ ID NO: 23805 - DNA, 447 bp, Zea Mays
gctcacctcgagaggaaacactggcgcaccagagcaacggtggagacgcagggacgcctcgggtcgatggtggtggagctccgactgcacggggagaactccagtgagcgtggactgggtgaaccagaggggttgggggcgaaccgaggggtgtgcggggctactgacgatcaggcgaaactcattgaggcagcggacacggcgggggctcaatggtgaccgcagaacaggtgcgagaccacggcgagcggcggcagaacttcctgggtgcgtgtagagcgagagagagcgcgagcgaggttggctagtggcgcaactgggtgaggggagtgagtgagtgggcgcgggatggagaaaagggctcaggcgcgagggttgtggccaggagatgtgcagtcgtgggtgcatccacgacggagggtgcaggcgagaggttagggagaggag

SEQ ID NO: 23806 - DNA, 1715 bp, Zea Mays
actgcgcatctatcctcgtgggatagtagcctctatttatatcagagttacaggaatggattgggatcaattgatccggtttacatggatcaagcgtggactgagctgctagacgcacggagccagtcaacagctaccagtaaactagcgaacctctaacagaatacatacacatactcttaacagtccccctcaatcacaacagagggtgcctatgttgaggttgtcacagttcttgatgaatggtgctcttgacagtggcttcgtcagaacatctgcaagttgatctttggatgatattattcggacttccatggctttgcgtgccacttgctctcggacaaagtggaaatccacttccatgtgcttggttcttccgtgaaacactggattactggttaagtaagttgccccaatgttatcgcaccataaccttggagccttgtgcagaaacactcccaattctttcatcaatgactgtatccagattagttcagcagtaacattggcaatggctttgtactccgcttcagtgcttgagcgtgagacagtcacctgcttccttgagctccaggacactagattgcctccgaggaatactgcaaagccactagttgatcgtcgatcatcggggcagccgacccaatcagcatccgagaagcctgaaatcattgttgatgttgatctctgaatctgaaggccatggtccagtgtccccttgatataccgtagaattcggttcactgctgaccaatgtgcatcagttggattctgaatgaactgacatactttgttcactgcaaatgacagatcaggtcttgtcaaggttaggtattgcaatcccccaaccacacttctatatctgaattgttcttcttcattgagtattgttccctgatgcttggacaatttttcagtggctgacattggagttgagataggcttgcaattgtccatctttgcccttttcagtaaatcaagagcatacctcctttgagacaataagattccagtcttcatgttcttgacttcaatacctagaaaatactcaagattgcctaaatctttaactgcaaactcatttgtcaacttttggatcagtttctcagtagcagagtccgatgagctgacaattatgatgtcatccacatatattagcatgtacattgtaatatcagcttgcctgaacacaaatagggaggtgtctgcaatagatggactgaacccaagctcaattagtttccctgtcagcctagagtgccaggctcttggggcctgctttagaccatagagggctttctgcagcttgcaaatataattatctggcttagttgagtcagtgtacccaggtggttgcctcatgtagacttcctcctggagtactccatgtaagaaggcattttgaatgtcaatttgcctcatattccaaccttgactcactgctagagataggacaattcgaatggtggctggtttgattactgggcaaaatgtatcaaggtaatcaatgccatacctttgtttaaaccctttagccaccaacctggccttaagcctttcaactgcaccatcaggcttcttcttcactttaaatacccatttgctatcaatgatattgattcccttcctgggtggaacaagtgtccaggtttgattctttaacaatgctgaatattcagtgtccattgcctccttccatcctggatctgatagag

SEQ ID NO: 23807 - DNA, 500 bp, Zea Mays
tgcaacaattggcgagtgcgatgtctgttcaacagatgaccactccacagatgcaaataattccagcagctcaaccgccggcttccaccgagggtacgaccatcccaagctctatcgcttcaacgggaaataaggtccgctatctagttgatgacatcacaaggcctgtggcatgcacactagttataagatatggtattaacaattagcgtacaaagaaagtagtcacaggccttgcaatcccaggacgcaagttccatggaaatgacattccagaagaatattgcagggtagaagtgacgacagtcgtccaaggatccgaggacgacatgctagacatccctgggtccgaaggtatcgagacacttggacaagctatcaagaattttatcctttggcctcgaagggatgtcgaattggttgatccaccacgacagccgtcgtcacaggcccaaccgtctccgccttctcaaattgctgttcctattgtacatccatca

SEQ ID NO: 23808 - DNA, 579 bp, Zea Mays
atgtttttaaccactcgccagaactgctttgcaactgggcaatcaatagcaatatggaaagatgattctccttcctccccacacactttgcagaaaatttcatgaagaatatgtcttctcttcaattcctgtttggatggcaaataattatgaaggactctccaacagaaaattcttatttttggaggtatattaagcttccatagtttgctccaccagcattcttcatttgatgaacttgctgcatttacagcatgagccttcctgacactttgagtctgcttcaacattcgataacatgaccgaactgaaaacacaccatttttctcatgcgcccaacccagcacatcagcatccatccgagtgccaggcctcagcttcagaaattcctcagcatccatagcaacgaaagacttcctcaccaaatcaacattccagcgtctaaagttcgtccacagattgcacttggactccttcaagatggacagtgggcttcaactgccgaagacttggaatccagttgtcctcccaaatacttattgaagatccaggacccactcttttaatcaagccctgcca

SEQ ID NO: 23809 - DNA, 506 bp, Zea Mays
attcggggtaccgcttcaggatgtggtgatccttgccgttgatcgaccgatggagggatcagggccgatcgtggtatggcttgtcatggaccgtgggatctcggatgtgtggccaagatggggagtgggcaatgtagatcatgactgttggatcgcttatgtataatgtggattagatcctagtgtaacccttcatcccttttaatctgcgccatcgaatcggtatcgtgcggtcctgattagaagccacgtagtgtttcctcctctgttgatctcggccgtagatctagcatcgggtggctgatactgaataacggttcatttaagggcccaaacagatccgtgccgtccggatctaatctaacgaccagaacggatcgataccccttcgccatgccattttgctaaatagaccctacgctttacatatatcaacccgcagttcagttaacagtgctctatgtcttaggaagttttacaccagagcccttgcactcctctgtttt

SEQ ID NO: 23810 - DNA, 512 bp, Zea Mays
ggaacggacgcgatcgtcggtgagcgttcggacggtgaggtacaagctccggcgaggctccacgggcgacgacgatggctctaacggcgaggagagtgagagagagatgggggcgagcatgggtagggaggagctcggcgtgggttttatagaggagagggagggagaggaaaggtcgcccggggagggagagaggtggctgggacttcatggctgccatcaatggcgtcggcatcaatggagggaggtaatgggggaagaaacggcggcattaaagctccttaacgcgcgtagaagaaacggacgacgacacttgggcttcggtcacgggcggcttggcttggagtgtgcaggcgcagtgcgcgggcgcggttagcgtgctggcggcgcgccggggctgctcggccggggtcttcgcgtcctggtgctgcgccagggtggtgttgctcggtcggtcaggctcccgggcgcgtgtagaggcgtgacactacttctgggcgtgggtgtgtcgg

SEQ ID NO: 23811 - DNA, 439 bp, Zea Mays
attgcaggctaaatttgtggagagtgtattgtaaatatgggatactgatgcttggagattcaattttcaagtttgtagagagaatgtagatttgggaacacacggatgccaggaaatttaagttccagttttgtttcttccgaaacttatgttcccatattttcctttctggtttgctaatgtattctcctagtcacagtttatttactttggctgttgcctttgtggtagagatattgcagcattggatcccaaaattccagagtcttactcttccaggtaactgcttgtgccactgccacgtgggtcccacaaccgtctgtgccctcccatgtggtagtggcaagaccgcaagagtgcacatagagtaacatgatgtttggatcgtatggaagttagttggattaaggtttaaattttagattaatttatttctgtg

SEQ ID NO: 23812 - DNA, 770 bp, Zea Mays
gagaaattctcatctctttctaccagtactagaaacataagttctctactaaaacatggatgtgactgcatataacacaatgtaaggaaccaaacacaactgtatcagtgcacaatgattacataaatcaatttacaatatctctgagaacaacaaatgaataattaaactaaatctagcgatggttagggtttaggggttggacctttctgacttctgtgcctccttttgttcaccatcaaggtcgtctgcgatgacccaaatccagcgatggttagggtttaggggattgcgagagcaatgtggatggggcgtgttaggtggaaggggcgagagaaatgcggatggcaatgagatagagcgggatgcggcgagtgaagtcggcgacaacgcagctcatcgacgcaatgagaggtaagggggcggcggtgaggtacctggtcgagggggtaggtcgtcgatggtggatgtgtcccagcggcggcggtgaggtacctggtcgagggggcaggtcgtcgacagcggtcgtgtcccggcggcggtgattaggtttggaaaaaatagtgggggagaaagaagaggagtgggggagatagaggatgagagcggcgtctgttttagtgacaacgacgaaacatgtttttttggcgcccaatgtgttttggcaatgcggaggctaatgcgtttaagtatactatcgctgggtatatatcaaaaacacgtgcatagctcaatggtttgacctactaactatgagaccgagctcccag

SEQ ID NO: 23813 - DNA, 278 bp, Zea Mays
acgaagcggaaataagaacagcaggttatgagaccaggggcaggggaacgatagagttggttccattggagcaaatcgtctagccgtcgccacataaattgtttttggaagaggaagaaacggaagtgccctagaggacaccggcggcggtggaggatcggagggagaggacgactgcacgagcggcctccttttaaaagcgcgagcgacggatcacggttgggtggaccttgcgtttcggctgcaactcaacagcctgctcgtttcagttgaattat

SEQ ID NO: 23814 - DNA, 306 bp, Zea Mays
gcgtaccccttcgtcgtctaatctggtccctggatccaggatcgaacggctcaggtttgatcataccccttcgccttgacatttattctaaagacccccttagcttttctcaaatcaacccgccacccgagtcagtgttaagatcattacagagaagacctcggatttacaaaatgaaccccgaactcctgttaaattgtgcctgcagtacacttattcgctggaattaataaaatagacctagaaaatgatttcttgtgtaaaggaaatactaaatgcttacaaaattcataacttctacgtttt

SEQ ID NO: 23815 - DNA, 727 bp, Zea Mays
attggttttagaccctgagatttgacgccatgaccttggcaccaatgcaaggttaaacgtcccgatgtaaggtatcaggctaccggtggcatatatgttgtcatggcctcttgtcattgagccatggcgtgagagagccagttcgccttccactcatgatttacgagtattaggtctgaaccttactcatgatctacgggccctaggtctaagccccactcataacctacgggctctaggtccaagtcctcttacgtcatacgaagcacgcaaggcgacaaagggaagacacaaggttaggctacaaaaaccgagggtcgacgtaggcagagacagacagacggagtaatgatgacgctcggactcccgtcgtcggcacacttcaccaacggtcttgaagaggcacgatgatagaattatacgggacggataacgacacacgaggagacatttaccgagggataactattttgttttgcaacgcaacaatcacttccaagagaagcgattcgtaaccgatcccccagtctatcaaaggaggagggtcgacccgacgagaatgggagaccaacccgagaaccaacactcgatacgtagatcctctagtagagcaacccttaaagacccaaaatcttttcctctttcgcccgcgtgtaaccctactacgagcaatcaagtgctggtagcgcatgccaccaaggactgaaagtagagacgttcaacctta

SEQ ID NO: 23816 - DNA, 747 bp, Zea Mays
gggagcggccatggcttccacgcctccacaggagtaaacgacccagcaacacgtcaaagctttttacaatgttcggcaacaaccgaagctaagcctaagctagagctcgaatcatgacgcacagaatacattgattctagatctgtgccgtccaatgttgtccacaatactggagattctgaccacagcatataaaaaaagatatgtgttctttattattcttattattatttcttgggtgcaggcagatgcaggtgcgcgtgcccaagtcaacatttccttctacttctaccattcgccgactccttgtgccatccggcctaacctcttgtgatgctcaaagtaaaagcatctgtgaccttgatttcagctcactattctttgttgctaatcaatgtgttggtgtttgactcttctacacacttcacactagcaaaccccaggccgtctctaaggacaaatctagctagtctggtgcagccaaaaggaatcttcgtgttctacactccacaaagaccacaaaaagtgtcatctttttcttccttttcttggtcgacgaaaggaggaggaggaatgagctcataggaggcaacaagtgatgaggggtttaggattcgtgttgctgttggtggcagctgcagcattgatcaggccatcagaagtagtaggggcagaggaggaggactgggagcttttcttgttgcagtggaggcagcataattctcttccatccccacttctcaatgg

SEQ ID NO: 23817 - DNA, 888 bp, Zea Mays
gtttaggatggcagggcagagaagcggcggtgcagggaattgagaagaagaggatgagtcagttgttgtttgtctgtgacctccgactgaaggacgtctgccctttatagacgggtcgccataatccgttgattcgatctgctaaattctaggaaccggcccctggaatatctctacatgcaaccgtccggagatctcgcacgttgtccattactcctagttgatgtgacagtctaggtgtgatatttgataaccaaaataaacaaaagacaaaaattaaagtgtcgtttaggatggcagggcagagaagcggcggtgcagggaattgagaagaagaggatgagtcagttgctgtttgcctgtgacctccgactgaaggacgtctgccctttatagacgggtcgccataatccgttgattcgatctgctaaattctaggaaccggcccctggaatatctctacatgcaaccgtccggagatctcgcacgttgtccattactcctagttgatgtgacagtctaggtgtgatatttgataaccaaaataaacaaaagacaaaaattaaagtgtcgtttaggatggcagggcagagaagcggcggtgcagggaattgagaagaagaggatgagtcagttgttgtttgcctgtgacctccgactgaaggacgtctgccctttatagatgggtcgccataatccgttgattcgatctgctaaattctaggaaccggcccccggaatatctctacatgcaaccgtccggagatctcgcacgttgtccattactcctagttgatgtgacagtctaggtgtgatatttgataaccaaaataaacaaaagacaaaaattaaagtgtcgtttaggatggcagggcagagaagcggcgg

SEQ ID NO: 23818 - DNA, 944 bp, Zea Mays
gaggcccgcaacccgtcgaggacgcgcagacccgaattagatgtgttggtttccagcagacaggcagcaacacggtacaagatacagcgacaaataagatcatacattcatacttcatcagaaaaaagagggcatgaaatgatgaaaggctacatcatacatattacatttagtcaatagcaagtaaacaaggccaacatgacagtcaatactcaatagcaaactgtttgtagcatcagacagtttgtagcagcatacatattacatttagccatttgcatacttcatacaacatacatatatgtctctcacaacatgagtacatgacagtctatagcaaacagtttgtagcacccaacagacagcaagcagtttgtagcagcaagcatctaggtccaacaagcaggttcatctcaaatggttaatcaacaattgttgattcatgttcatcctgcaaaataataaaaacaatcctcaacagctcgagtcaggctcttcaatgcaagtcattaaagcaacaaataaacaataccatctcttcatcttgttcatcaagacaagtcatcaaaacatccatcatagttggagaccctacattgcaacaaagcagccatcattggttgtttcctataatgtgcatgaaatcaaataacatataaatcttgttaaaattctgaccacgtacctaacatgtcagcacgggaccaagcctgcatacacatgagtgcttccaccattgatggtgcaagcttactacggcgtggactaattattcttcctcctgtgctaaacacggactcagatgccactgttgaaaccggaattgcaagaacatcacgtgcaatctttcttaaagtaggatatttaagcccagcatgctgccaccactgaatgatatccaaatcatgtgtcctaggaagcagtggttcctataagtacaaatc

SEQ ID NO: 23819 - DNA, 341 bp, Zea Mays
gagaccacatgtcagtcatccgcggggacaggcttgacagttgacgtgaccgaaaacggattggcagtaattgtaatagaaagcacacggaaacaacgcgccaatcaccggtcaagctttggccccacctgcaggctcgtatcctcccctaaggcgggcccgggggctactgtcggtaccctgaatcaggggtaccccttgctacggtatggagacgctatacccgcgcagctacccctagttgcgtggcaaacaactccctgtcccactacgtggacggctctagggtcgccacgtggccagggaaagaggtacactccaggatgccaatagtgggtcca

SEQ ID NO: 23820 - DNA, 866 bp, Zea Mays
cagttccgtcagggtctgaaaccttctatcaggcatgcactgggagcctttccgttggtggacttccgtactacggtggagcaggcactgggtgtggagatgcaacaccagtataccatggagtcgtagaagtcttcaggtgttgatcagcctcgtggccaggacgcgaggaggggcaacacgggaggtccagcccacaagaagggcaagtctcagcatcagcgccaccatccttaccgtggcaaatcttctgactcgggtacttcgggaggaagtactcagaggtttcgggctattcctaagtccgggctggggctagtgtgtttctgctgtggtgatgcgcatcgctgagcagagtgccagtggagtggcaggtgttttatctgcagtcaggaccacaaggatgtggtgtgtaggaggaatcctaatgggaagctcagatgggagccggtgacttcctcctcttctcagggcactatcaacatgatgtcaagtgctgagcagcagttttcagttcctcttcctccgcagcagctttatgtgcctaggacttctcagttcgtgccggtgcagggttttcctcagtatcaggccgtgccgactcccgcaccgtctactcctatatcgtctcagtttggagctccgcgtctgcctcacccggtggctcagtggggttcttctgttaatttcactccaggagcttcctcttctgcgggtatttctagagcttatgttctacccgctgtggatggcagagagcaaggagacgtggtgacaggtacaatttcagttgattcgtttgcggcccatgctctttttgactctggcgctagctattcgtttgtttcgaaggattttgtgtcgcg

SEQ ID NO: 23821 - DNA, 415 bp, Zea Mays
ccatctacccccaggaggtttgtcatgtttttatagaattatcttagacattggcaacttatatttttctgttttaccagatgcgtacccttttgttacctttttacttgttgtcttttgaagaatttagacaggtatttgctagtctgatccttccccatttttttggttggagcagtgcagacaagcaagaatttcatatcacggggaattcaaagttgaggtctgcttccagtataatgaaggggcacaaatcaggcataccttcaattttggccatttgcctattatgttgatggttgttaccttccctttctactcttgtagacacttcgcttaaaatgatcttgttatgctatgcttttggtcgagtttgtaggtattgaggctaggctaacaagtgagtttattttag

SEQ ID NO: 23822 - DNA, 835 bp, Zea Mays
atagaaactggaatgaactgatttggacattatatgaattttctacaaattaaacaagaatctgcatttaaatatgtactaaaaactattttctaaatgattttccctgttttattaattatctggactgggcgtcaaatactggaaaagtcaggggcctaaaccgaagttctctaagactcagtgaataatgaatgtggacggcgggttgatttcctaattttaggagggctcttatgcaaagtcgccacagtgaaagggtatggtagatttctggtcactggatcaccaccggacggtcaggattagatcccaaacctatgtgaaccggtatacacgactaccgtgagatcaaggatgtatggaccggatttaatgaatcggtcttccaccgggaccacacgatttcatcaaacgacccacattcgatctcgcgaagggggtacactcatctaatcccagccgctgaattaagatccaacgccagaggaatctcccccaacctcccgatggagccgcgcagaggcgccaccgcacggcggagctcttcgccggccacccgaatgcgaccaatcccgactatcaatgcgagtacgtttgcgcgcaaaacgaaattgaggacaatgtgatcatgtagaaggtacctcacgacagatggtcacggcgggggagccgaccacggcacggggcggaatctgcccaaagttggcacggcggcgagcaattcgtcgcaaagcagtcgccaatcgggtcagccaatgggatcatgcgcatcagcgttccactgcgaagatccgcgaccgctacccgaagccgaatcgacgaccaggccgcg

SEQ ID NO: 23823 - DNA, 891 bp, Zea Mays
ggagtggtagtatagcgaggatgggaactacttctagcctgtccttggttagcagtccttcttttctctccaaacccacacctcttgttttctacagcaatcgtcttgtcaattagtcgttgaaaggacggaaacgtgtgcggtatcagttggtattgtagcggtccaatcaaaccttccaggaagagttcctgcttcttctcatcatcctcaacatcccaaggagcatatcgagatggctgaataaatttgtccctatattcgctcatggacatatttcttgcttgagagatagaaactccttccttttaatcttcatgagtccatcaggaatatggtaattcctgaattgcgtggagaattctgcctaggtgattgtgttgatggcagcatgagcagcgcagtacgcatcccaccaatccgcagcgggaccagtaagacgacccgttgcgtacatcactttctctctgtccgagcactgagctatgttgagcatcttctctacaaactttagccagtcatctacttgcagtgggtccacggagttggagaaggttggtggtttgcgactcataaactccggtgcttatccctaggtggagctggtggtggtggtggaggtagtggtggttgctgctgttgcacccttcgctcttggcgcatttcctccctctcttggtcatctcctgacgctcctatcgcatctgtgcgtgcatatcttcctagtatccgccatctgttgcattatccgcatctgggctgcaactgctggattagcaccaactggtggaggatttggatgattcatctctgcatgttgttgtctaagcaccctcgggttatgtggattggcaggtagatcaattcctccgcccttcctggttttgacca

SEQ ID NO: 23824 - DNA, 535 bp, Zea Mays
ccaagacgagatgcccaaggcagaagacgccttcttccggttaactgctgagaggataaagggcggagaggcagagggtgaagggcgtatcttttgaggcaggatatgaaacaacgtttagtgcattatttctcggaggaggcatgtccatttaatgtgaggggacgtcctgtcggtcagccgactgtttgtggcgcgcatgcgcgcaggattcaaaacgatcatcatccggccccagccgttacaatttgctccttggtggcttcgcctgtccctatataaagtcgaccaagacggaggcttcgtaccgttacctctgtcgctctagccttcctgcttccatacgtcatttttgccttttgcaaaaaagagcctttcaccttctccacgttttcttccacctccccgatggctgagaagattagcgttcttcctcctcgcgatccatggcccatctcctccatcaccgacgaggatttggaggcgctggttgaggccggcctactccgctcccgctccacgtggtttgcgcggg

SEQ ID NO: 23825 - DNA, 590 bp, Zea Mays
gcccccttgccaaaagtattttattctagtatggtctatacttctctcaatctattagatctgatctcactcttgtgcttgcgacatctttgtagatgccccctgaccatagcctttagtcttttgagactctttcctcttccattattaaattgctaccatttgacctctattccattttgttattgacatgctcgtatccttacatttttaatacccttatcccttgatctaaagtacttacccttgtacctctgttgcctatttaaacaattcagtttatgtgtccatgactttcttgtcttctgagatcctttcttattttgttgttaagtcactatctttcggcaatttatatgcccttggtcttagtatgctcgtatccttggaatcttgcatactcttatattcttatgtatgcttattttcataccccaataactgttcaagatatttcagttaacatgtccttgaccacccctgtttcttaacggtccatgagcgatcattttatgtcgcccatccttggtaatctcgttgttcctttataacttctctcgataatgagttcttacttcaaccattctatt

SEQ ID NO: 23826 - DNA, 556 bp, Zea Mays
agttcattccatctcatgctgcggtatgcttagttcttctactggcaagaatatatgttgtttcctcatagccttctgccctccatcacttatgattttcttaacccatttgtaggttgtgtttgaccacgatggtgagctgtgcccaggataattcttatattgagtatacacattctttttaatgatttaatatttgcacagtgactcttattgaccaatctttgcaacacacacctgtaacatttttcctcaataagcattgaatatttgccataatgtaacaattgcactgttgaacttattgagcttaataattgcactagaccagcgtattgatccgctgcaaactttaccttgctatttggtttatagttaccgttcaagaatttctttattcaatatattttcatgagagttgtttggttaaatttgagatcaatttatttagggtatttatttttttgggttgggtggagtgtttgttctagttttcctttttctccttgaatttcttcttgaagctgaacattcctagtggttgaaattgtgaaat

SEQ ID NO: 23827 - DNA, 652 bp, Zea Mays
ctgcgatagagacatggggctagcagtgttgcctcgtccgtcactagttgtacctatggtgcgtcgcgaggaggtgaagccagcggcagtgccccctccagctccttctacgccgatggtggcagcccctcagccacagaggagggaagttacctgtaggcgctcctcctggtacgtcgtggttttcttatttcaatcttctttgcccttgtttgttgcctttatttggttgatattattagtgcgtacgtgccacataagatggtgaagggcttggtccttgcggtgaagggggtgccttgacctcccaggctcaaacgccatcgccgccagccagagcgactgtgccacttgttgatgcgacaactgcctctctggtcgtgttgacctccttcgctgtccaggagatgccaacagcgttcgtccccattgtggtccctcctctgttgttggctcctatgtccagcctagagggggtttcgacatccatggcaattgccccgagtgggagtccagcggcgagtgtggcgctcgccgtcccatcattgccgcccctagagtccatgcccacgggcgtagctatgacggtggcctgatcgaggtgtcaccatcgctagaggctgcttagacctaaatccagccataattggtc

SEQ ID NO: 23828 - DNA, 977 bp, Zea Mays
tcgacaggttggtgggatcctgcgcaagcgcaacagaatccgcgggcgccggggcattgagctacctccgtcgttcgcacgccctcggtaaaccgctcattaacctccgccgctcacgttgatttggcgcgagcagttccaatccatcgcggatctcgcggcgtgctccaactcggaatttgggggtcgtcaggggaaggcttgtgccgcggatcacgggaagagtccgagtcctcgaaacctccgcgtctctttcccctgcatataagtatcggagccatcttgccttctcatgccgcgactacactccgtgctcccatcgctggcatagggaggaaatcggaccaccactcccgcatctcacgctcgtcgtgatttggagtcgcggggaactaccagacaacgtggatctcggacgcgtgaatccttggtcggggaaacctcgcgggcttaggcaatcgctcgttggagttcgaccttcaccccgatccgccccacgtcgcggccagacctcaccgttgttcaatcatcggtaaaaacccctttgttgaatttgctacaatctcctctgcgcgtagcaccttacggttgggagaatagtacaccagtgggagaatccccacaactccggtgtgctccggtgttggctccaccgtgggatcctggcggcgcgaccgtaatcgttcgtcgggggtagaagaagctgcgtggaccgtcgatcttttgatggatggctgcaattagaatgcgttaaccccttcgcgtgaattgatccgagtcgtcgatccagatcgtgcggttccgatttaatgcacgatacattaaatctgcgccgtcaatcctcgatctaacggctgtgcctacgtaccggtttggattgggctagatctaatccaggccattgaatcagatcgtgcggctgagatcaaacgtgtacccccctcggccgctactttgcaaaagagaccccgtcttcc

SEQ ID NO: 23829 - DNA, 694 bp, Zea Mays
cacacaataataaggaaaatacacaaaaagtaatctgcttacaagctaaaacatcctcaccttcagaatgttataggcaaggctgtctgcaaggtcatccttcgtcatggcagacaggccaagcgctagcttcgggaatcctatattttctgccatctcccggcaaacagatatttccttgttgtctgggaggcagtacaaaaatcatcttcgtcagtgccattaaacacaagggatcccgggggatacttcaaatctttagcatattgcacagcttcggcaacctattcctctgatagctttttccctgccacgtggcgcactataaattccaatccctcagtagaagcttcgacggcggagaatttagattctttgctggttctctcttcttctaacagtaatggagtttttgcagcatctgagggcccttgttcagtatccttttcaacaagtttcgcaggccctgtttttgcgggaactaagggcctagcttcagcctcaacccgagttacaacagcttcgacggtctcctttatatttttctcactcatgttgggcacttttgtagaggcaggagttggtacctttgtcgactccatgacagcgtctagtacgctggccattctcctcctctttggagtcattgcaggaatttttgatacctctgccgatttcctcaattttgactctt

SEQ ID NO: 23830 - DNA, 922 bp, Zea Mays
tatgcattttctatgaattaaacaagtttctgccattaatttaatattaaaaatctattactaaattcatttctctggtttttctgttctctggactagaaaagcgcagggactttggcgcaaaagaacctaagacacaggccgcaacctagctggacggcgggtttaataagaaagaaaccagggtctcttttaaaagtcggccagggctgaaggggtatggttcaatcctgaccgtccgatctagcatgaacgtcccatattagattgcgattccagtgaaccggtatcgtatcctggtcgtcagatcgtcatcgaacggtttacaccaaccctacgcccgattcaatcctgcccaaccattccattacctacggcacagatcccttcatcgaagggagcactctctcttctaatctggagcgtccgctacaagatcaacggtcctaccctcgtcttcctccacagctggagacgtgcgacggtgctgagcacccacggccggactctcaccggagggaggcggcgcagcgactaaatatgccaaattacaaaccgaaggatgctacacggagcagagacaagggcgagatcggaggagaggttctcactgatgatggcggcgcagaaaatccggcccacggtggtatgcggttccacggtgaagcaccaaatccggcgagaaattagaagcgctccaacccccaatcgagcacgacgataagccagacaggttagaaagacaccggtgatcacatccatggcctctgcaaggcatatgctcccttcctcctcgaattccactgcgacggcttcctttctctctctctctctgcgctcacaagacagcggcgccgctcacagccaccgtgccgaacccatcggaatcctatggtccgcggcccagtgccctaatcctgag

SEQ ID NO: 23831 - DNA, 867 bp, Zea Mays
aatttccagataactcaggggccacaacgcaagattccctagactcagtggacagtggatgggtacggcgggttggtttcctaaaatttcagggtttcttctataaagtcgccggccgaaggggtatcgggtagacctggccactggattagatctggacggcactggtttacccggtctggtacgtgactcacagcggttggactatggatcaatgacgctgattttatgactggagggttacaacccaatctaatctcatccctcgatcctacgatccacggtctcaattggtccgattgaatcggtacgcagtgtgtaatccccgtcgtccattcttagatcgaaagccactgcaccgtcgtcttcctcccgccggtatacagtcgtgccgccccatcccctgccggaggatgaccggagttggcctcacaccgcgccccaacgtcttaatccaaacgtaataagcccttttacgggaaacaaaacatggtggttcgaattaagggttccataccgggggccgatgaataaccagcgttgtctatggcgtcgggcggatccacggttgaccgaaatcatcgacgagaaattatgaagctggtcgactatcacgagcggcacagcctcggccgcacctccccgagtctggtgaaggccctggacaccaccacgacgacagtcacggtcgaattgaagctcccccaatatggcggcactttcttcccactactctctcggtcgctctctcatcgctaggcagtagagaaggaagaggagaaatgcagatgcggcgttccccctccttattatcccaagcagcacccagttgggtagttaccgcaggagccgcgatcagccctcgcc

SEQ ID NO: 23832 - DNA, 535 bp, Zea Mays
tgacaatcgaagtaagtgatctttccaccatgagtaagacggaagcaatccgtatttgaaccgcaatacagacatgccaatctatcatgtgtactccaactggtaaaaatagcatacaccatgaagtcatacaccgaccacaaatacgcgactcctttcgaaagctcattcaactcttcaatcaagggttctaacatgacattgagtttctttccaggatggtctgtagcatcccaaaaatcctaatctaggtttgaaaccctaatccacctttttcccctcccttcatcctttaaatccaatacctccactagtttttctttgcatacattttgttttgatcacaaaagcacctcacttagattatatttttctaaacacttagagtatccacaaaattttttgttccaaagaaaaaaaggggcaaaatgggaaatagaaattagaaagtaaaaagaaaaagggaacagctccctcctccccctgctggaccgaatccaggcccaagcccgcgacctcccctctcccacgcgcc

SEQ ID NO: 23833 - DNA, 361 bp, Zea Mays
tagctgagtaagatctttataacaaacttgtagctggttctttggacgacaatattgacgcagacaagtgatcgagttgttacatgaaaagtagagaatgaagctctccaaaacgcactgtcagagtgtctgatgaagatcgtcgtgctacagtgaccataaagatctcccgtgccgtgagctcgacgccggtgatctgccgccacaattcgtgtccgcctgggagattcatgccgcggggagagtagataacgtcggggtggggtgaaaatatcaagtgtggggtgaatctggtagctgaccggaccggccgtcgtgtcccaccgcagtcaatcgcgctggcatcaccggagttcactgt

SEQ ID NO: 23834 - DNA, 989 bp, Zea Mays
ggacgatacatggctgcggcggcatgattaagaggccacgcgagcgaggaataattagcaacagcgctgctcagctcgagtgcgcccgaccgggtctttaagcggcttcggagatctggggattttctatcccacaagccagcatgtggggtgctcggttcactgcgcttgttcgttctagtgcaggagggggtgggaagggaacgggaaaagagggcgcgcttcattgaattcagccagcggccagcgcggagctcgcacgtcatggcctgcctgcaggcgcaattcattcccttgttgccctcatgcaaggggcgaaatgatgatgataagctttgcgaccatccatggattgggacacattttggtgtttggagctgtaggctgtagccggggaaaaaccttgcttggtggagcagtggcgacacacatgcccactttgagagcaaatgcatcctttgaaaagagagagagaggtggtggtgagtgttctctgtccatcttgactcagtgatccagagcttattatgccagttaggctgttactgctctggagactatgcgagtgatgtgacgacgacaatttttagagtactagtgtatactagctagctcttattaacatgcatcacgaggtcttcctatgctagagctggagctgagttgtgttggcagcagcagcaggtgattagtttattactggtaacgtccttgtttggccgaggtgctccatcatttgactggaggctcgtgcatgtgttggcgagattcctcctgccgacgacgagatctttgccctgctgtgcacgaaaattcatgtattgatttatataataattctgcattccaaatagtatacctaatgagttatttaaaagataaaaaaaatctgtgcgagttgtagggctcgaacccccaacctcaaggtttaaaaccttatgctccaccaactgatctagatggctttgtgctacttctttgcaatacaa

SEQ ID NO: 23835 - DNA, 602 bp, Zea Mays
cgagcagcaccagtgcacggtgcaccacgctcgcacccaaaggcgacagaggacggggacaaacacagcacaggcgcggcacgcgcgggtgccctgccaccactgaccgaggtccaccaggcccatcccgcgccgcgtgacgcgacccacgcagtagctgacgcttcggacccgctgctggtggggtccaagtgtcagtgagtgcgaaagacagcgaaaaagggcagtgagggtgagggtgagggtgagaccgagcccctcgtcagtcgtcacgccgaccgagcgctggccgccaccactcctcgaggcgagcaccagcaggaggggcagggcaacgactcctggtagatccaccacccgcccgcttggtcgcccactccgcctgccttgctccgctccgctccgctttgcttctgctctctcggcttgcgggagtttgggccttggggggcgcaatgcggtgaggtggaggtagaggtgggtgaaaggaagcggagctgcggacaggagaggagaggagaggagaggagacgagatggggtgcgcgcagtcgcggatcgagaacgaggaggcggtggcgcgctgcaaggagcggcgccagc

SEQ ID NO: 23836 - DNA, 1067 bp, Zea Mays
ggccgtttcaccgaaaccctagaaccccgcacgccacgtgctcggtgaaatgcccaaaccagccaaaattgctccaatcgatcccaaattttcaggcaccttcatgacacctccagtaacatatttgccaaatttcacgccaatccgatatcccaggctccaaatttccacaaatccccatttctagcgatcgattctgagccgagtgcccaaattccatttccttcgcctaaaatcaaaccaagcacacacttcactcatatttacccacataaacctatttgtgaagtatcggctcaattccaagtcatttcatgcctcaattccaatttcaaacctcctatggcactattcttcgttcaaacttcgttttcgcgccgtttgacctctctatcaccaaatcactcgatttctgtgtcataccactgtgtgtatgtatttattcaaatttcatatacttatgactatgtaactaatacgtgctcacctcttctgtcatttcagtgacctcgcttactcgtgagcccgtctcctgtcctgcctagattctctctcgtgagatttctaggtatttatcacctcaagtcataatcatttcctctgctctcttctggtgcttagtttttctctctcatgtgcagacttcaggtcaggatggtgcgcacaaagaatgtctcagcgctagggggaggagatgacgaggaccctcctcgccccttcaggcaggtcaaggggaagaccatctacttggagcagcaggaaggccgcaagaagcagcgtttggatagagctgcccgagctgctctagcagcagcagccgccgctaagcaggcagagagaggtggccggctacagatatcatcagatcagattgcttatatagttcatcgactcgcctctcggcctcgctcctccgcaccttctactaccgccactgctaccactcccaccactgctaccactccacctcccacttcgcctactctagtcactcctgcgccatccaccaccttagccatacctaccacctccaccaacttgcttccactgctcctcttcccgctttc

SEQ ID NO: 23837 - DNA, 425 bp, Zea Mays
gtggtacaatccgcggcgagcaatggatcagcggcaccgtccttactccgatgacgaattgcgcccacgatgcaatcccaccgcatcagggaggaccctgcacgacagcggtgaacaccagcgatgccccggggctcccattcgcggacagggacgcagcctagcacgatcaccatggcagcagcacccgacgacgtggtttactggttttccgccagctcgatgatggcgcataccgacctgtgattatcccgactatgtgaggtagataagggagggccgcgattggttatataggggcgactgggcgagggacaggccagaggcgtggggacgcggtctgttatcgacgcccgcgcggatctccggaggttgttgagttctagacagagtcagtcgcgaggtagagggaaacactgacgatt

SEQ ID NO: 23838 - DNA, 328 bp, Zea Mays
ttccatcctccgatgacaacttcaactcaggtgtctgtggccactccttaaattttgacttgaacgtaacagtctcaaacccttcaatcactttgattatatgtgttcttgttcggtttgaatcagagagcaatttctacataggcaattaaagtattaaacaaataaataataaacatcacaacaacatagtcaacaaaaagaagtcattctgaaaatatgcaatatctctaaatatttctaattagcctgaacaagtaactaagcctctaaaagatagaggaatatagatccaaaagacagccttaaaggtaaaaactgaaggaga

SEQ ID NO: 23839 - DNA, 650 bp, Zea Mays
atcaaagtcgttccacactttagatctgggaggacgcttactagaacttgtggcagcagtgcttgtgccggtcggtgtcgggcttgtggagcctgtgcccgtctgaccaccggcacaaggaacagggggggcatcagcatcatcgatgttaatggcagcagcagcaatgccggatctgccaccaaagagggccagagcatcctcttcttcattatggtcttcgagccggtgctcctcctccacagcgaccagatcaagttcatcgtccatgcccactgtttatccggctcctcgtcagcaactccggtccctcgacggctaagcggcaccgtcacaagaacgatacctaaaaagaacaaaagatctggagaagaaagcaatgcaaggaggaggaggagcacggtacaaagagtaagaacacacctgcttagccggagcacccgagtcacctgagtggttgcaagcaccaccgcgaggagcaggagcaccgtcgttgggccaagaggatgctaggatggggattagggttcgggtccttcgagatttgagagtagggaaggggattagaggaaagagaagagcttcgggaagtccaaacaagctgtcgccggcaagcgtcacacgtcgggcgtcgccgtcgtcggcagtcg

SEQ ID NO: 23840 - DNA, 581 bp, Zea Mays
tcgaaatagagcatgagagcaggacaaccaacgtatagctgaattgtcagctaacctcagccgcttgcaatatgagatttcagaacgggattcggccattgattggatcgttatctcgcgttcaatcgcttgggaccgcgaagcaaaagctcgagctcgtgtggcagagcttagtgcggccctcgatagcctgcaagtgtattgtaatactttacatgaagaagtacatgtactgtatgctcgactgcacccgaatgtgccttccgacgttgctgcaataggagccggaccatcgggagcagcaaataaaggacctgatggggagttggacctttttaggccccctccttccatgaaccttgctgacgaacggtctcctgcagcaggaaatgaagcgacaaaggatgacgaagactataataatataatttagatgttatacttatgtgaaataagtactgaagtcaagctgtatgctggagtatgtataattattacattttggtaatgtaatatgatggtgtgtgctggcatgttatattttttccaaatgtttctttgcctcagatgccatcacagac

SEQ ID NO: 23841 - DNA, 603 bp, Zea Mays
gacacagagcgacttggctctgcaataggagcggccccctcaattaacttcggcatgtcggccgtttcaatgcgtctgggccgccgtgtcaaaactttaacctttttttgacttcgacgcgctagaagtcgccgaggtagcagctttcctcttttttccttgcttccgcgaaggataacaatagtctggatatacaaatccgatgacatcgaataccctgttcagcctctttttcccacgagccccgaaggcaattgtcatggcgtcatcttcggctttcgaatatgcttcaagcaattcatcactagtcgccagtcatcattcggctcatcaaactggctcttgtacctgaaggtatacttcaggtagactaaatcaccttggctagagccagcagcagcctccttcgacatttcccacccatttgcaagtggccacgctctataagcaatgtactcttgaaccaagtctcttgagccaatgtaggtgcacactgtgttgaaagctgtctggcatgcttgcacatcattcccaagtgtagtggttggcctcctaatcctgaagcgagaccatatagggcgttgaataatccctatcacatcc

SEQ ID NO: 23842 - DNA, 564 bp, Zea Mays
ggtacagtactgaaaaagatcagcagatgcaccgcacctcaccgccggtgacctccgcgcccagattcgcgtcggcgctacgatttgtgctctctggggtgcggattacgaccgacagtgaaaagatcttaccgcggatgaggtcatgttctagccgtcgtacccacttgctctgcggccagctaaaatgaacctcgtcggagttggtcacttgccgcccatgcgccatgtaatcagtggtgttaccacgtcacagtagaccgctataggtagcctatccatcgcctgtgacagtgccccggtgaatgccatgatagataactccggtgactccttccctttctcactgcctgcccttccccgcctaaattcgtcgtattcacgatcgctctctatatattgagcgctcagcgtgctccgttaggttgttacgtgcccagtacaccagccctcgcctccgattagccaccgtagcgcttcaatttggaatttcccccaaattcggttctccgcgccgccgtgagccaccgcgccgtggaccgccgtctccaggtccgttctcgc

SEQ ID NO: 23843 - DNA, 617 bp, Zea Mays
cggagaacggcagagggcaaataatgaagcacagcgattagggtgagtgggggaggtgggggcggtcgtcgatggagatcgtaggagcgggtgacggcgaggagcggatttttttagggtttcggtggggccacgacgagtgggttgattgtggttgggtgggtctcggatattgaccatattggctcggtcggctagcgggagcgacgcgggactgtggggacccgtagtgtgcgcatgatcagttggtcagtgtgtgtacgtcgtgttcatatgaagcataaagtgttgtccaaaggatcgtaaacagtttatacaagcattaatcccgaaccacagcccgcacgtggtataaattgttgtgtgtacgttgtgttcatatggaggataatttgttgtgtaaaggatcgtaaacactgtgcgttcgattgatatgcagttgttatcatcaatttatacaagcataaaccccgaaccacaaccccacaacgacccgaccacaccgctatgtcgatttatgtaaccgttggcgtcaaaatacacatgcatacacggcacacccccacgcgcgaccccaccacgaccccgttgtacccgcgcggaacccccgccacggc

SEQ ID NO: 23844 - DNA, 840 bp, Zea Mays
gttcacatcactgtttaaattcaaatttgaatttaaaaaaaagggagaagaaatcagaaaaagaaaaggaaaataaaaacagaaccaactaggctcggtcagctcatttcagcccactttcccttctcccactcgcggcccaaccacctcggcccaacttctcaaccgcacaacccaaacactaggaattgggcgccgacgctttggacccacgggtcagccccttaccccctgttcggtcgtgtttccttcacttccatgcgggcccaggatgtcgggggtttcctttttccccactcgctcgacgctgaaccggtctcagctgaacggcgcaatttccgccgctagtgactgctcagatttcgctggtcgttggggttgcatccgccgccccagtgccttacccagatgcatgtaagtagccgcggtctccttaggttataggctcgaactgacctcgcgttcgcgtcctagaaatcacgggcgcaactccaatcgatcctcgctgtcgcgcgcaacgagctccgcaggattcgggcgccagtttcccccatgtagccgatcccgagtggtttaaggcggacgcgagcctcgttaccctaaccccttagaccctcgctgccatcttcaccaatccctgtgcgccgagctccgcaagcgagagagagtgctgagtgccgccaccaggggactccgactcgccgtccccaagcctcttccgcggccagggtgggccacccgtgccccacgaatgcgttgactgcggtggtgtgatggggggatggcctaggcactggcaatttctcgacggtgactagcttccgccatggattcgctcat

SEQ ID NO: 23845 - DNA, 481 bp, Zea Mays
cgcggggtggtcagtggtgtcggggaggtcatggcggtcacgtcggtgtgcgggtcggcgtcagaggtggtcggagctgccctggccacgagcgcaggcggcggaggtcgtcggtggctcttgctccggccaaaccacggcggtagggttcaattaaagtgcacgaggagctccacggggtgatgtagaggccatgctcgcaacaaattgagaaatggtgcagagggttacccggtccacgtgctccggcgggttcacgaactccggcgagcgcgattacactattccgatggggttggtccttggctcaagcttgggcaagcttcacggccttctggggaagctatccgagggcttggatcgagtggaggtgggcgggaaagggtttggccacggtggttgccctcgggcggctctagcgggtcgctgggaggtcgccggagctgggggcgagctcgggagggttaggcgtggtacaaag

SEQ ID NO: 23846 - DNA, 628 bp, Zea Mays
ggcacgatggtgaacagcagccgagaccggaccaaggtgcaggacatggagaggacgacgtgcagcctgatcggcgaacaggtgaagctcgaccaaagagagggagtggaagtggaggtccaacattgcggcatgaccgcacaattgatgcgcttcgctaaaactactgttgtatgggttgcgcatgcctggctgatggcaggagacggctgttggacggtaaaagagctggaggcgagtggtgactggtgagatcgatggccagaagaagaaggatgagcagtgaaagagacgtccgcgataagaaaatcagagggtggctgaaagagaagaagtgaggcaagcattacagggaagatgctagggccaggaatactcgtcgtttatggaccgaaaggagcaggaagttgcacgtggctatccttatcacagtggaaggagcgctatagagccagcaccagtcgagtttggatacgtggccgcgatggaatggcgcaagcaaaactggcttcagttaagcggcaaaaatttggatttagcggtgtccacacaggaggcaaggcagacaccagccgacgcgtagcttgagcatgcacagcgcctccctaaaactgaaactaagttccca

SEQ ID NO: 23847 - DNA, 541 bp, Zea Mays
acctccatgggagtcgggcaatcttgaccaacctcttgacactgaagaccgccctccaaggtcgacgacgcacgagatgctgctcgggatacctccaatcccacatctagaatgtcaaaacaaacatccatcatatcaccatcagtcgactctgacagcatatcctcatgaatgacatcctcaagggtctgatcaaaatctgttatagataaatcttgaaggctaacaagagcagacatggctggagaaggaatatcactatctcctttactacctttgtagagtcggctattcttgcgaattaatggaaactcttcttcttcattgtcctcatcaaaaatgcggacaaaagatggtgcagaatcacacccattgggctcagctgcaataggattacaccaattgggttcaaattcagcagggttgcacccattagggtcagtcagtgcaggtacaccaccagtgggatcaactccagtaaagacctctgccggtacttcttcagcaacaggagcagaagggccagcaccctggtccaagc

SEQ ID NO: 23848 - DNA, 780 bp, Zea Mays
aacagaattgccaaatattccttctcataggcagataatcccatatttgtcattcccagggccttgctcacaaatgccaatggatgaccctcctgctgcagaacagcccccactccagtaccagaggcatcagtttctatggcaaatggtttatgaaaatcaggcaacgctaatacaggagctgaagataacgcttgcttaagagactgaaaggctgattcctgaacatcagtccacacaaagacagcatgcttcttaagcaatgaagttaatggtttggcaataattccaaaaatctttacaaacttcctgtagtggcctgctaggcccaaaaatccccttaattccttgcaagtcacaggtactggccacgacacaacagtagacaccttggacggatcagtagataccccagcttggctgataacatgtcccaaataagcaatttcctgttgaccaaaggtgcatttggacaacttgacctgccaagaatccttgagcaacaactgtaacacctgctcaatatgttggagatgaacctcccacgtagggctataaaccaagatatcatcaaaaaataccaaggcacatttgcgaagcaaaggctgcaaggtcttattcatggccccttgaaacgtcgcaggtgcccccgtaagcccaaacgacattactcgaaactcataatgtccatgatgagtttggaaggctgtcttatgctggtcttgaggagccattcgaatttggtgaaacccagctcgtaaatccagagttgaaaaccaa

SEQ ID NO: 23849 - DNA, 1020 bp, Zea Mays
taggaatatctttagtacgaaaaccggtgctaatcacttcacttttagtagcggttctttttaataattgatactaaagtagtttagacgtgaacctaaaacttgttgcggggacgatggaaaatagcctcaaagtactagttctttgtaagagtcggtacagcaggctaattatttcttgcgccaagttggaaatattttagtaccgtaccggttattgtttccggtactaaagatatcttttagtatcattttggtgtcttctgccggtatgaaagacctgatatattagtattgattagagacagcaataactgcggtaaccatgttctcttcacggactcaatatttatttgaaaccatgcattaccgacgcttgtataactatggattttgaaacaacgaccggaatgacgaaatctcagtctccggttgtgatagctgatgattcgcgtgtgtcgccagcagtagcagaaactccattggactggcgtgcacactttgagcgtgccaataatccgccgccgcatagctagacacgcacaggtgaccagtagcgtggcagacacgtcccgtccgcccccctccatccccccttctagcagctgccactctcagatcttcctctttggcaggcacataataatatagacggtgccctagaaacgacggctaacaaatacatgccaaatcatcgtccatgcatctcaggcggcacagggcaaaagcaaaacatgtttatgcttgcatactacgcatgatcgagcgagcccatggcgatgctgacagcaggtcgtcgtcgatgcaaaaaaaaaaaaaaagtgttcctgcgttaacggcggtgcattgcatgcaaggcgaagcgggcggcgttgcgtttgcgtacggatcggagcaggagaggagaggagagggacgggcgcgtgacgaccggaggggaggagggtaaacgtgacgctggctggccgcgttgccggggccgttgcgccatttcatttctttatcttcttcctcctctcc

SEQ ID NO: 23850 - DNA, 592 bp, Zea Mays
ttcgactttggttgagtttgtggactaacaacggtatgggtgtgcttctatgtaacacgacagagagggattcatggtggacctatccgctgagattgtagagaagatcctccagattgaggagatgggtacccgagtccgtgagctctaggagcaagtggaagtcagggacaacaccatcgaggttctagagaaccaactataggacctgaagttggagctcgatgatgccaacgagcacctcaagatccaccactaggagcagcaaactgatatggaggtagatgaggacatcgaagaggaggaggactcggaggagttggggctagcctctaacctggacaccacgagcttgttctgttccggtggaccgccttcacctaagtctagtgtcgccttgatcgccctttgacttagtagtagaagtgtcaggaagtatgtactcctcacatcgcctagcttacgacctatgatgtaattggctagttggtagagtataatccagatgcagcccctttgatgaacatattttgtaagaaatgattatgatggttccaaatattttaagaaatgacccaagtttcactcctac

SEQ ID NO: 23851 - DNA, 487 bp, Zea Mays
gtcaatttggacagaatatgaattttctagggattaactaagattctgcaattatttgtgtgctaacaaatcattttctaatggaatttctgaatttcctatgattctggactgcgcgcataaaaacagagaagttcaggggtcccggtgtaagttttcctaagactcagtttacccgtgcagtggaccgcgggtttaatccgcagaaacggaggggctcttatgcaaaagagttggccgaaggggtacgggccaatatgtgccgtccgatctgtgtgcagcgggtgagattagatcgcgctgagttatgaaccggtatgtaattataaccacacgatcgtgatccgatggcacatgatcaatagatcgaaagggtatgctcaaactaatctctaccgtccgtctcaaatcctaccatccggagccctcttctagtcctaactgttcatcgcgagatcaatggttctgggctcgtcttcttccccgg

SEQ ID NO: 23852 - DNA, 726 bp, Zea Mays
ggtggtttggaagagtaagactgaggtggtgtggaagtggaaggtggtgtgatgggaataagaacatctggggtagaaacagtagatggtggtggtactgctgaagtttcagaaatgggaggaaggctcatgaaggaggtagactctgtggaataaaaagaagaatgagtggaagagttgtaaaagaagggtcagttttcattaaagctcacatctcgggaaatacgcatgcgacgagaagatggatcataacaccgataacctttatgttcagggctgtatccaagaaaaacacactcaacagattgagcagtcaatttagttcgttcacgaggagataacaaaacataacacgtacatccaaaaactcgaaggtggtcatatcgtggaggagttccaaaaagaacttcaccagatgttttgccagagagtttggatgacgattgtctattgatgagataaaccgcagtagaaactgcttcaccccaaaaatgtgaaaggacaaaagaagatatcaacaaagtgcgactagtttctataatgtgacggtgtttgcgttcagccacaccgttctgtgcatgagcactagggcaagaaagctgagcaagagtaccctctgaagtcaaaaactggcggaaattatcagataaatattcaccaccagaatcagaacgaaaggttttaatatgagtagaaaattgagtgtgaatcatgcgagcaaaggat

SEQ ID NO: 23853 - DNA, 574 bp, Zea Mays
gggtaataggcttaggtggggtgattttgataagcttgggaatgactgaaggtttctctgatggtttcaagctgaacgtcactcctagaactagaagcgaagtctattcctagtcgaccagttcccctcttgaattgactaacaagcatgcccaactaaggctcactacacgacacccagcacaagaccgaccgaaggtatgtgttttcttcctcgatcctgtacttattgtgcctataaaacccaagagtagactgcaaaccctcacaaagtgcacactgcacaggtgcaggggcactcactaagctagccttctcaagcaaggctatcctagtgtttttctctactagctcagtttgtaagccaagacaagcagtacactcacctaacaatctagatcttgatctcaaatcgtcacgtcatctagcaaggtggcgtacttggtctgtaaagttgtgatgttcaatatgtgtagagcgcactcatcacatttagtctcgtcagataccacaactgaacctctatcagactcaagctccctaagcatgatgtcatacttgaatttaaattcttt

SEQ ID NO: 23854 - DNA, 276 bp, Zea Mays
cgctgctgagtaatcgatcactcgactcgacagtgggcagtaaagctaaaatcgtatcgtgtctcactataatctgcttagcaacactgctgtcctattaggtccgcagtcgtgctttttccttttcttttcaccaatcaatttccggtcacgcgcctgctacaatctgacagcacagttactgatgctacaaggtaatgaactgcaacagttttgtgtctaatgtcaatgatcctattgtcgacagttgtcagcgctgcgatttccatgcaccac

SEQ ID NO: 23855 - DNA, 956 bp, Zea Mays
cgcgctcgcggccacaggatccatgatctacggtcagtatctatcagaacgcgatccaatatggtccatccgattcgcccaacggccacgattcattgaagcgaaggggggggtaagggcgatccgattctagccgttgtttcgcagatcaacggtcagatggtcatcaccttccccgagcttcagtacgcccacgcgcgctacaccgcggcggcggccgtcgtcggaccatcacccacgcgcgatacggtggccaaaacccaatcggcgacaggtacgcgtagtacggaatgcggcgaacccgattcggagctacatacccgaggaagagcgacgatgatcagtgcccacggagcagggtggctacgcggcggaaggtgaaggccgatgaggaattcacgtcggcgtggagcctcgcgcccccggatttctccccgagcacaacccacgagtccgcctgagtgcccagaatcgattcactggtgcaaagcgatggcgcagatgagaggtccgcatggcggatcccgtggctggagatggatcacggtgctggcgctaggtatgtccaataaaagggggagagggtcgcagcagaggaagtaggatcgaccgaggaccacgacccttcctataggcatgaggcggtcggagtttgaacaacggaattcccgagtccgcgggtgacctccgccattggtggcgaggtagttggagcggacgaccaacggcctggtcccaccagcagcggtcaatagagtttgcgcggatggtgtaacgggtcccagcaggccgcccaggttgtcgcaggtccagaaattttgccgccacaatcaccgagtatggcggcatccgattcggtcttcggttgaaggagaggaggaaagggatgactactgggcccgccaggcagtgagcgcaaggcgacggaggcggaatgtagtgggtctgaccctggg

SEQ ID NO: 23856 - DNA, 853 bp, Zea Mays
ggagaatgtacttctatggctcgttgaagctgcaaggagcgggtgcagggattctatttattgctcctagaggtgaacaactcaagtacgcactccagctgttgtttccagcatcaaataatgcagcagagtatgaagcactggtccatgggctgagcatcgcggtatcactcggcatcaaaaagctgatggtatatggcgactcgctggtggtcataggccaaataaacgaagattgggactgcttgaccaactcaatgggcatatactgtacagccgtgtgaaaattggaagacaagttcgaaggattggagttccatcatgtggaaagggatcacaaatgcagtagtagatgcattgtcgaagttggggtccagtcgggcctaggctccacctcggatcttcatccaagaaatatcacagccaagcatcgtcacagaccagattgaagaatgcaacgccttgagttagccagaggcagaccccaatgactggagagagcctatcattaggtacataaagaatgaagaataaccggatgacaaggctgcggcggagcgcattgcaaggcagtcagcccactacaccatcatagggggcttgttgtacagaagaggcgcaagatgagtcttcatgaaatgcatccactcggccaccgggagatagctattagataaaattcatgcttggcagtgtggtgtacatgctgcatcaaggactctagtgggaaaggctttcaaatccgttttgtactggccaaatgcgaagagtgatgctgcagagttagtccagaagtgcgaggcgtgccaattcttgtcgaagcaacagtacttgcctgcgcagcagctgcaga

SEQ ID NO: 23857 - DNA, 868 bp, Zea Mays
gacgagtaggattagaaatgtcatttatgcgaaggatgtatatataggtagacttgtgtgtgtgtgtcgtggtgcattgtagtagagattacgttaagttgaacggaagtgtctcaagtgcatgtcgtgatatggttgtatttgagatagtaaattacaagtgttgcacgatatgaagttttgatcgggtagatagaaaattaatttggtttgtagagaggtggtgacatgccaatgtagtcatcgcttcctctatgattataagtcgaggtcatgtgtggtgatgttatttatgtggtgaatgcgtattgaaatggtttatgttgtacggtatgagtagaaacgtgaaggatggataatgtgttttggaggagtagcaaatagggttggcaagcatggtagtggttgaatcacttatgttgtagaattgatgctcgacatgttagatctcctaaaatatggtgttttatgtgacttgtgtgttatccaatttaagttgagaaatggttaagaaaagctaattaatctgctcccacccatgttttgagtcgcaatgtctaaaatggtttgctaagttttatgttctgttagccaactcctgttaagtaggagtcaattgcgttaagtgattgttatatatgttgtgtctcggattgcgataataataggcaagccgacgtgtatgttgtatagccggctatatcgttgctctggatagccgacttgttagatggtttggttaagctcgcggtcacgatgattttcttgttgtggtctaaatgcacatggttatggtcgcggatgaaaagtagtagtgctcatgtgatgtctaaattaaaatgcaaattattgtgtgaagagcacatcg

SEQ ID NO: 23858 - DNA, 391 bp, Zea Mays
ctaaacatgtcctagagaaaccgaattgcagcaaagacaaacagtcgaaccgtcgtcgacaatgtacaactcatcgtaggctgtcgtgcgtgaaccgccgcatctatctctcggatacatgacccggcagccgggcatccgccgcacagcaatccatggcgacggctccacaccgtgggcaaaaaactttcggcaccgccaccaccacctttcagcttaacgcatgcgatggctatcatctttgcattgatttggtgaacattccgatcgtccctttctatgtcagcacggtgcacgggaaagagaagaggagatgcttccgccacgtcgtcgtcaggaatctctccttgcttgtaaacaagggcgcctccagcacaaattcggtgcgctg

SEQ ID NO: 23859 - DNA, 405 bp, Zea Mays
ttgacgctgccgcgctcgtgtccctgtccacggctgtcggttggtagtggcggggaaggaagaatggtgtccgaaccgttgatcggttggggaagggctgcgatttgatcttagtacggattcagctagggctcctcacgaccgtagattcaatgatgaacgggtgatcgggtgtgtgggatacttttgatcccgaccctaggattaggatctggcggtcagtaacgcgtactggtttatcatgtgggctgatctaatcatagccatcagatagaaatccaacggctcactatcaccaataccccttcggcactgcagttttacaatcgtgcccctgcgtttattataaatagaactcgccatccacttccactgttctctgtgtctgcggattattaccccgag

SEQ ID NO: 23860 - DNA, 466 bp, Zea Mays
cgacggttctgcgcatgctacccaagacaggatcaagacaaaattttgagaacttggagacagtttagagcaagtataataagagactataagttggctaaatgttgatgtggaggagagagaagagaagagagagaggagaaacgagttgtaaacttgtagtcagctttggcacaagaaccaagaagctttgtaagagagataagtggggcatgcattaatactgaagagataaccaccatacggatggggctaaatggcaggcttcatggatccttatggctaacagttggctctattattatacttgctcttataggattgtcgacactggcatcacctgttgttgatttagacacgtatctaatgcttgaatttaacattggcatcacctactgttgatttagacacgtatctaatgcttgaatttattgtctttcgtcactgcattggaaatggattagac

SEQ ID NO: 23861 - DNA, 709 bp, Zea Mays
tctccctctgtgctctctgcttcactggcggtccaatctctctgccggtgtctactgttcctctccggcgatcctgtgctcgtgcttccctctctggtgtgtatcctcttctctctctctttccccccttctctctgagctcatgccactagtgaagccccctcttccacccctttgtgcccatttaaaattcctgtgaattccagtgaaaccaagtggtcataagtgttcctatgtgcttcttgagtatccttgcaggttcctagctccttcgggagggttttcccacctcaaatagccatttccccgaaaccctaaaactccgccccccccccacgtgttcggtgaaatgcccaaaccagccaaaaatgctccaattgaacccaaatttttcaggcaccttcacaacatctccagtaacttattcgcaaaatttcacgcccatccgatattccaggctttaatttttccaaattccccatttcgagcgatcgtttccgagccgtgtgcccaaatctctttttcttcgcctaaattcaaaccaagcacacacttcactcctattcacccacataaacctattcgtgaagtatcggctcaattccacgtcgtttcatgcctcaattcgaattccaaacctcctatggcactttttatcgttcaaacgccgttttcacgtcgtttgacctctcgatcgtctcatctcttg

SEQ ID NO: 23862 - DNA, 341 bp, Zea Mays
agaagacaggccaaccccaactgccacaacactaaagactagaattagccctgaccatattaaaggcagcaggaagaccaaaactctcaagatgctttgcaccagccttactccagcactccatttcgtccgtaaacagtctttgaattatgctcatggaaggatttgttccgtcaaaaacagccatgttacgatgaagccacaagcaccagaatgatgacactatgaataccctttctcattcgtttcattgtttgtgcacttttctatgcacattgccccaccacacaacaaaggagatctcatctctatcaggagtgagatggcccatcctcacgggt

SEQ ID NO: 23863 - DNA, 782 bp, Zea Mays
gccgtctgaaggccgcgacaccgaggcgtctgcgccgccaggcgcctcgaaggcggggactggggatcttaggcgagatatgcatttaactccaggcactaatatgtctccgacgtccaaggcgccccttcgggatgttgagcatttaacgacctgtattgatgggtctccagcgtccgaggcgtcccttcatgaggacgacacaccttcaccaatcgccaatgcagcgggacatgttttgatggggaagataaacagtccccgaggcagctaccctgcggagcacgaagtgggtggatcgacggccgcgattctgctggatccccccccccccgaactgtgaataatgggccgaggatgtccctcgggctggacccgccccgttgcctggttgggccgcttgagactacttggccagtttctgtctcgccccaggtgccggttgggccgccggagacatgcattttgatgcctgtctcgccccaactgcgctatgggccgctggagacgaacgcccttacgtatgtctcgccccaactagtttctggataccctgagacgacgggcccaatttctggctcgactcatcagctgactgggatggctgggacggtggcagcaacaagcgatgaagcaacaaaggctctcaaggtctattttcgcagaagaactaaagcaaatctccttcaattcagtcagaatgaggggacaaaggaaggctcatttcagataattgataccttgcactcggccttgaggactacgaatcaacctccaacgaa

SEQ ID NO: 23864 - DNA, 728 bp, Zea Mays
ttcaggggctaaagcataaagtttacgcagactcagtgaatctagtactggaccgagggttgtttttaggaaaattcgggggctcttatgcataataggcggccgaaggggtatcaggatatctgggccgcacgattgcaaataaacggtgcggattaggtccagattaatttcgaactggtactgcatctaggctatcggatccaggattcacggtttggatttaatgactcgaagggatacgccaagattcgatctaggccattccctgcacgatcaatggttgagggccaactttcccctagatctaatctaacctgttgagcacgcaatcaacggtcacgatctcacaagcgacaagggtatgcggtgatgatcctggcccctgattcgtgaatccatggctcaaaacctcacacgcccgaatctaatcccaaccgcaagatggatatccaacagccccacgcatcatcttcttctcccctgacgggccggccatggcggcttcatttgcgcgtttctgttactgcgaggagagggagctaacaccggtgcgtgaccgaccatgcggcccacctgccagcacatgacgcacgcgcatgagtgaaaccagccaagtgggccaggcgccagtgcaagctcccccccccccagcccacgcacgacgggtggccgacccgtgggtcccacctattagcgcaaaagtgaggaggctgcgcggtggaaag

SEQ ID NO: 23865 - DNA, 334 bp, Zea Mays
ccgccatagaagatgccgcccgggagagcgtacaagatgccgtggagacggtggccgctcgctttcagcgtgatcccaccgacaccgaatagtcgatcctgtagaaacaaggcgagggttctgctggggggcggttgtaataacttttggttttgtaacatattctaagaaccgctaatgagggagcactggaacttaaacttatctgtatgttatttgtccttgctgtgtgtagcgtcatcaactttccacctggtacttggccccctggtaggtaggctcgacgtgtcaaggctggatactagtataccaaagagaaaaattggtggtccgg

SEQ ID NO: 23866 - DNA, 383 bp, Zea Mays
ggagaaatgagagggaaatccgcttggacttgttgctcttataaatatataatttgacttagagagcaactcaagtgttatgaatcaaagtccaatcaagaaaatctagagaggggagaggaacaagaacaaattacaatgaaaagtaaacaacacaatagacatgcaaatttgttttatcgaggttcagttccgaagaacctacgtccccattgtggtgttccaaaggatggagtctctctccactctctcaagtgatccaccgatcaaccttgagccctcaaatccactaagtatagagatagagtctgcgcaaggcactccacaagatctggagcctcttgttagattttacaacaaagtatcaccaaaacaagagcaaa

SEQ ID NO: 23867 - DNA, 779 bp, Zea Mays
gtgacatctgacctccctccggtagggttaagtcttggcgagcaatcccactaggggtgcccgacccgctgggggcatctcagtgagtccttccttattcgattctgttccgaccctttggtcggcttggccgaccaaaggggggccctgtggccaccctgtcagttgggttgccgtaggagaatgtgaggtataaccttggacgtggtgccgagcaaatgccctatgggccggtcacctagcttgtgactcactaggagcttgctcgattaacccctcgctctgtgcgaagagttggggttcattttgtttttgtctgattcacgtagtgtaattattggggcggcgcagtaaaagaaggggtcatcgtgatgtcgcttggtgtgggtggcttgatgggatgcgaaacagcctgtttgctatatcgtgcacgagtggcatgattgggtggttaaccgccctgcccgttaccagcgcctctcccaccacgtgctcctctaacgcaccatcctaggtggttcatgccctacaaaacgcatagtcttccacgcggctccctaggcggaggtatcccagagcgatggatccttgcgagcggtttgcggggggcaccttccaagccttgcttgggtttcccattcttgcgcataaaacagagtgggagggtgcttgggtttggttacgcttaccacattctcgtgcccaagcatatgtttcctccctttctttaaagccttcctacgctctcctattcgtcttccttccttccgttgttcggc

SEQ ID NO: 23868 - DNA, 475 bp, Zea Mays
gagcgggaggcaaagttgtcgatggtggtcattattgcaatagagagcatgaacaaggtgatgtaactaggtggagacccaagtgaagatgttggtgagggtgtgaaaggtgtcaaacttgagctgtttaggaaaagtctagagaaaatgagagaagtcatccaggatgactagatagtgccgataaccgaagatgctggacatgggatgtcctaaggtcatagtggatgaagtcaaaggggtgagtaacttgggacatagaagaatagatgggtaagcaagtatgatgcccaatgtggcagtcatggcaaagcgagattgtgtcaccacgagggcaaggaatggccaaggtggctgaaagtcgagagaggacgtcatggtagggatggtcaagacaacggggccaagttgaggcaggggcagtggacgcacgagcgcagggttggacaaaatgggcggaggaaggtggggtggg

SEQ ID NO: 23869 - DNA, 1299 bp, Zea Mays
cgcgaccgccccaccgtccccatagatggtagacatcactctcctcctcttggagtccactttcctcgtgcatgacatcagcgcaacgagacgaaggatgctgctggagaaaataaaaagagagagttaggagccgcgatgaaaaaggaggcgaacgacggagaccaacaaggtccaccacccgctggccgcacccccgacgaacctttgtcttccaggtagtgccttgcccccttggtaccccaagctaagcgtcagtcctgtcacccactctggaggctggcacgagcgtccctagaggtctatcagccagaacctctaacgagcccgagatggaagagctccccctgcaagccgcccctggtggctgattggaggaaggctcgacggatggaggggtgtgcaccaccgggcccatcgaccaaggaaaaagggcggggagctccaggaagtcagcctccatagcgacaaaagtatcggccatctcaccaggaaaaaggtcagagtggagtcaaccgttgacgcatcaagggaggcatcatgaatggcccaaagcttggagcccggacacatgtcatcaatgtccctgtcctcatcagttcagtcggtcttagctccatgtgtcatcatcattcccatcctcatcgtcccttcaacgcctcttctccaccctggttttcttgtccctctattgctgctctgctcgtgcgcgaaccgccttcttcttcgccatgcttcttggcaaagggacaaggtcatcccatagcatcggagaggaaaacgatcagagggcacgaaaacagcacccagagagagatatataagggaacttgacgaattctcaaattccacgaagcccgactttggacgcatcggggggcaaccaaggaacgggaaaacatatgggatgacggccccatccgcacctttgcagacctccatggcttccatgagccagcaagcgatctacacgtcactgggggcggggctataaaaggaggaggtcggccactggacgaacggacgaccggtgagacgacgaaccaacaaaaggaggaaggacacatcaacgaagacccagagacctgagccttgccgccaagccaagacttagttaggactccagctctttaacccttagctccacctcctccacacaagagacttgggagcttcgcctccctctctcgctcgctagtaacccttactacgaacgttgatcagcaaaggtgccggtagcgcgagccgtcgaagactaggggtagggacatttcgctcgaatcaatataaatctcacgc

SEQ ID NO: 23870 - DNA, 392 bp, Zea Mays
ggctggctaggaattacagaggggatgaggaagacgatgtggctgtccgtgctgcgcagcttaatctattgacagggaacgagaggggaggaggaagacgttgtggctgcccctgcttcgattcaggcggggttgttttagatcatgttaattctttttctgtctacacgcggggagaggtaggtattggcgccaatcagtgtggtcgtcgtgaaggcaacgttggattctatttttaacgaccacagaggtcagctcgctaacgatgacatgttttttggtcgtcggctggattggacagagcttgcactgtgccgccgagactcctcacaaccacatattacaagtggtcgttattttctggtcgttgatacacttttctcttgtagtgg

SEQ ID NO: 23871 - DNA, 425 bp, Zea Mays
gatgtatagcaagtagatatgagaaatcacccacatttgcctctgacaaatagaactgccaaatgcactggtaaatagaaccattaagcagtacatcctctacctgcaaatgttcccctgaaagaggatgacttggacatttgaagcttctctgatcaatgcttttttgtcactaaacatacgctcaaccaagccctgaatgtaaagaacaacaatatttccaaacaatcaaatataaccaaaataattaatatcctgtaatgcccctatattgattatacccaatgtaaagaattgcttagcatattgagccatcagttgtttatgtatagcttgggtttgacagtgcataattcaggaaccaaaaactgcaaaggagagaaaacggggaaggacctgagtgttccactttgtggtgtgctttt

SEQ ID NO: 23872 - DNA, 1239 bp, Zea Mays
cagggccaaaagagagggacagatcacaggggtggttccgcacctggttgatgaggggctgtccattctccagtatgcagatgataccatactatttatggatgatgattatgagaaagcctgtaatcttaagctcattctatgcgctttcgaacagttgtcaggtctcaagatcaatttccataagagtgaggtattctgctttggagccgctaaagaatgtgagagtcagtatgctcagctgtttggatgcaaaatggggacatatccattcaggtacctaggcattcctatgaattataggaaactgagtaacactgattggaacggtgtactcgaacgcattgagaaaaagctgagtagttggaagggcaagcacctttcgtcaggagggcggctagttctaatcaactcagtactgactagtctcccattatatatgatgtccttctttgaggtccctcgtaaggttttgtggaaaatggattacctgagatctaggttcttttggcaatcggaccaggaaaaaaagaaatacaggcttactaaatggaatattctttgtcagcccaaggacattgggggcctgggaattaagaatattgatattcagaataaatgcctgttgagtaagtggttgttcaagctgataaacgaggagggtctatggcaacagatccttagaaggaagtatctggggaataaaacccttggtcaagtggttcggaaacaaggagattcccacttctggtcgggtttgatgaaagtgaaggatatcttctttgcgaatgggatattccgagttaacaacggacatgacacaaggttttgggaggacaaatggctgggggatttctcgctccagcatagattcccgagcctatataacctagtgcagcggaagaatgctactgtggccaatgtgctagggtctgtacctctcaatgtatcctataggagaggcttacatggtgctaatttggagagatggcataccttagtcagcctagtagtggatacgacgttgaaccaggcaagagatagttttcgttggagccttcatcaaaacgggttgttctccactcagtctatgtatgcggcattgattgggaacagacaagtacgacaggatggcctcatctggaaactaaaactccccttaaagatcaagatcttcttctggttcttaagacaaggggtaaccttaactaaagataaccttgccaagagaaattggtc

SEQ ID NO: 23873 - DNA, 571 bp, Zea Mays
cagaatttacatcacgtaacgtgttacgtgtcccagcgccaaacgtgcgtgatgagaaaaaaaatctaccgacggcttcatccaatccaataacccaccgcaaaacttcaaacaccatgtcggtttcgggacctcagttgtttttttttgtggccgcgggaattctatgctactactagtactaggtgctagtagagtggcatgcgcgatctcacacgacagcaactcccattctttttttatttatgactgcttaattcaaaaataaaccaaagaacctcaaatattttagaacgagatagtacaatagagatgacatcataggtcattgtagcaatacaaggacattacatcagccccattaaatctaacctctccttgttttggccatcacgctacgtcgcaccttacttttttacatgctcaaaagctacagcgttcttgaggatgtccgtaacagaaagaatcatgtaaaatgcaaaatttacactgtatataatattgcttgtagagtgaaatttgaaacagtgaataatataggagatggaatatggccgctactagaggagag

SEQ ID NO: 23874 - DNA, 782 bp, Zea Mays
cacaatcccgcttgtgaggaatctccatagattggagtctctcacagccttacaagatgatcataatcaaaaccaaagtaagggagggagaaagaacacacacacaagagcaaattacaacaacacatgcaagagatgcgaagaccatagcgcaagaacaccgtgacagagttacaactcaaaaacaacgctcaaatttctctagaatcacttggaggcatggtcgcagtgtatcagaatgttgtgcatctcttgaggtgcttaattacttgaacaaggtgcctaggggtcccttttagggatggaagtggggcaggttcgggtcaggttttggacccgtcgggtccagggtcaggtcctatttatccccacaggttttcaggtttagagtatagatgtccaaatagtgcaggctgcccgtttggcccgtgacccgacatgaatctagcccggtccaaacacggcccgacacggttggttacgggtctaggctgacacgacccgtttagtgtaccgggtatgggcagctaaggcggcccgcgtgttttggcccggcccagcacgagtaatgggctggcatgacagcggcccgcgtatttcacaagtcacccactcacccagtcaccccaccagccatctagcccatccacccacacggccacacacacaccctatccccgtctctcgcctctcggtctctggcgattcggcggcggcgccgttctcgccccatcggcttggcacctcagcgactcccgacctcgacgctaccggctctagtg

SEQ ID NO: 23875 - DNA, 294 bp, Zea Mays
aagacacggtctccgtcgatgaggtccttagaggttggttcgtctacgtcggggacggctgaagcgcttgtccgtggtgacccatgttttatttcctgcggggtcatggcctccgatccatatagcaggcggaagggagtgaatccagtcgcccggcactcggtcatgttcagcgcccagactgcttcaggtagcaggtcgacccatttacccttcttgtcgtcgagaagcattttcttgatggccgtgaaaattttgtcgttggctcgctccacgacgccgttagattgtggg

SEQ ID NO: 23876 - DNA, 622 bp, Zea Mays
gtgggttctatttaaaacaaacgcaggggcttatgcgaaaattcccagctgaggggtatcagtgactctcagccatcagatcagaaatgggtgcctcggattagatcagtttaactcgaatcggtatcgcgggatttcgaccgctggatcagaatcctgcgtaccagattaaacaactccccgcgatcggcccagattcaaccgagagcggatcagcgacctccattaaaattgtgctttctcccccgttccatccgatccaaattggatggccaccttcccatggttgaacgttacgcagcttttaatcgcggctgatggttgtgtgatcaacggtcgcggatcatcgtcttcccccgcccgatgacgtctacgaaacaccgcccaactatggtgacggcagcaccggcgtacggccactcgcacccccacgcagcaataaacctaagtgatgacggtaactcgtaccggaaaacagggcgagtaaacagcgagggtcattactgttggtgttgcgatggaagctggacacacggcgaggcagaccgccgcaggagattaactccggtgagcaattcccaggcgctggcgcacgaatcgcccctggcaacttgataaccac

SEQ ID NO: 23877 - DNA, 2225 bp, Zea Mays
gcttgcaagacgccgcattcaagtattcaactaatgcgatatccttcctgcatgactgcatccaggtccaggccatcagggtctcaacctgcagggttatttcaccgctcacgagtagtgcgggagttcagtttgttgttcatatatatgtaaatgttccgaaatgccccaatttcgtcaaggtgacaaggtgtcaatgctgcagataaccaaaaggccaatctgtcatagcctgagctgatcacgtcatgggacatgaacaaacaccagatcagcaagctttccactgctgcagtactgattcatgtcagatgatttcatctctaccgtaatcaactacatgcagtaatgagtgttcatggccatttttagggtagctttgcaatgctgcatgctggactttaatccaactagaacctgccatcttgctcaatcctctcaacctcatctccttcctcaggctatcagcactactccagttgccctcagcagcaaaaatatgtgacaacaaaacgctgtaaccagcatggccatacttcttctcaatgcagatcaatctctctgtcaccaaattcaccaattcctgcttgtcctgtgctttgcaggacgcgagcagtgttccccaaatagaaacgaagtcaccctcctcccccagttcctgcacaaattcataagcttcctccactctgccggctttagctaacatgtccacaatgcagcaacggtgctgaggagtaactacgaccccaaaagtttccattgatctgtacagagcaagcccttcatcaaccagcccagagtaattacatgctgaaattgctgccaagaaggtcacaccatcaggttttagccccttctcttgcattgagtagaaaagggacaatgcacttttgccaaaaccatgctgaccaagaccagaaatcatggttgtataggagacagtgctcttctcagtcatatcagcaaagacatgttctgcagtagaaatctcaccgcacttggagtacatgtcaacaagagcagtacctacgaagacattggtgtccaaacagcggcgcaaagcaaaacaatggatctgcttccccgcacacaaacctcctcctagaggatcacatgcagggagcaccgaggcaagtgtcactgaagtaggttcaagacatgcctcaatcattgcccggaatgccaagattgcttgttcaggatgcccagtctgtgtgtaccctgctatcatggcattccaggtgacttcatctcttttggcgttaccatagtcatcaaatactctctgagctatttctatgcgaccggacttggcatacatgtcgatcagatagctctccaatccctcaccctcaatgccatgccttataagataactgtgggcttgtttaccaatatgaaggtctcctgtatttgacgcagcagagagaactgcagtcaatgtcactaaatcagctgcaaaacctgatttttgcatctgataaacgagcaacaggccttccagatcaaaatcgttctgcacaaaagcagtgatcatggtgttccaagaaacaatgtccttctcatgtaaccgatcaaagagctcaaaggcagtttggacattgccacatctcgagtacattacaacaagtgcattaccaagtatcactggcaaagtggtgtgcattcctttgatcaagtagccatgcagttgctgacccaacctgccatcctgggactgtgatgctgccgtgagtgctgacaagaaggtcacgacatccaatggaacctctttagacaccattaaccggataacgagacccatagcttcagcaaatttcccgttctgcacatacccagtgatcatcgtgttccaaacctcggtgttcttcttggcagcatactcaaacaccctccaagctgactgcacatccccgagttcagagaacatcacgatggccgagctgacaacgaagagatcattgacatattccatcccatgcttcacaaggaggccgtagagcacgaaggaccagctggggtcttccttggccactgcggggaagacattgacgaagctgactggcgtaggcttgatgccatcctccagcatacgcacaaacatctccagagcttcctggggacgtccggttttgacgtaccaaccgaacagtgtgttccaggaaaccgcgttccgcttgggcatcgcgtcgaacagcctccggacgacgtcgacgctgccgtcg

SEQ ID NO: 23878 - DNA, 1545 bp, Zea Mays
cttgtctgcatctacttctgcccctacttcagatgagccactagcatataatgatcatatgcggcgatatagacttgaactgttagcatctgacagttctccaaagtgttctcctgtgcaggtttcaggttgttcccaggagccgttcacaacaacaacgacatcgacttcatctgatgtttctctgataacattgcccctgccagctccgtgccttcctctgcatactcagacaactgatgttactgacgtccactcgccatcagcttctgagacccaaccgctaatagaggaagtgtctgcagctatgccctccagaacagaggaagtgtctggagctatgccctccacatctacggtgcttactcgactacgcaacaacattgtcaaacccaagattccaacggatggcaccattctttatcatcactctcgtaagggtttctttgctgcacccacctcttacaagactgccttgactgatgaaaagtggtatgctgccatgaagtctgaattcagtgctcttcagcaaaacaacacatggacattggtccctaaacctccaggtcagaacatcatcagctgcaaatgggttttcaaagttaaagaaaagccagatgggtctattgacaagttcaaagcacggttggttgctcggggtttcacgcagcaatatggaattgattatttagagacttttagcccagttgtaaaaccagctactgtccgtctggtcctatcacttgctgtctcgtggggttggtacactcgtcagattgatatcagcaatgccttcttgcatggcgtccttgaagacactgcctacatgcagcaaccacctggatttcaggacatctctcggcctcatcatgtctgcaaactgcacaaagctatttatggcctcaaacaatcacctcgtgcttggtattctcggctaagcgaccggttgtgtcagctaggattccatccctcagttacagatacttcactctttgttttttcagagggatctctcactatgtttatgttggtgtatgttgacgacattgtcatagtcagttcgtgttccccggccatcaagcagctcctgactcagctcactagctcctttcctgtcaaggatcttggtcctctgaatttttttctcggtattgaagcggtttccaattccggggggatggttcttactcaacaaaagtatgctatggacattctcagacgagtacgtatggagaattgtaagcctgttcaaacccctctttgtgcatcagaaaaattgtcaagcttcagtggcactcctcttggcgaccaagacacctttctttatcgcagcacagtaggggccttacagtaccttacccttactcgaccagacttgtcatttgcagtaaataaggcgtgtcaatttctttccaagccaactgatgttcactgggaagcagtgaaacgaattcttcgatttgttaaaggaactgctcatacaggactgaaaatcagaaaatctccatctaccctgctgagcattttcaccgatgctgattgggc

SEQ ID NO: 23879 - DNA, 489 bp, Zea Mays
ctcaagatgaggacccggtgccagtggtcccggaggatggtcagcagctcccttttgagttttttggtttgggtcaacctgtgccggcggtgggctgggatcttaatttcccgctagaagacaatgtccaagctcagccagcagacaacattcaaggagattgggaccaatggattgttaatgttccacctgttcagcaacctcagcagcctcatctggatctgccacctgacgagcaacaggtcagcaacccccattcggacctgtcctcagatagttcttctggtcacattcctggtgccttgctgcagaatgggcagattcagaatgggcagatccctgtggatctggtggctgtggggccggtgcccaactttaatgcccctgccccccttgccttgggtgacctccctatgattgggccccaggaggttgacggcccaccaattcagggtgttcttcatgtgcctggggatattgttattcctg

SEQ ID NO: 23880 - DNA, 1100 bp, Zea Mays
gcgagggtctctttagcaaaactgccacgcgaaggggtacggggttgcgctacccgtccgatctccgaccaaaggtccaaattagaatagcgagcgagggcgcaggctcttgacaggtgggctcgggtgggttgaggcactgacacacggggcccatgggtcagcagtatgaagaggacacgaggagcgttggccactgaattgtagatcgatggctctggttccacaaaccacgcgaaccgttatccacgacttcgggccgtcagatcaagatcgggtggttcggattcggcacgaggggtttagtctcctctggtcagctaggggtggcgctctccgcggacacggcggcgcagtcgctggaggcgaggcagaccggggcttctaggacacttggggttggtctaggtagctagagaggttggggaggactcggcaagcactatggcaaggtctgggtgccgagaacaggactaagacgggcagacggtggagggggaccctcgggcgaacccaagcttactctggcgagcaatacccgtcgcggtgagggttaaaccggcgctctgcggttggcataggctccggggagagggtggggtgctctaggcctaagctcgggctcagggaggggttgcagtggtcgaacgccatgaagatgctgcggctcgccgaggggcaacttctatggccgaaatcccccacgtatagcagaattggcgcaaaagagggacacaggaatgtcacttacccagatacggtgcttcgggtagcttggcacagcacgatggggctctagttggccggacgttgaagaatcacgacggcggcgagctccgacctgcgcaggggagaggtggagcgcaaatcgggtagaggatttgaggaaaggggaaaccaccgtgggttcccggtgcgccaagctcaggcaaagctcaccatggccaaagcgctggcagaagtccagcggagacaacagaaaggtgaagcaacagcggggggcggcgttgcggctgggtgagtgcgagggctgggaaagagcgaatgtgaggcaggggcgagctgagggagtgttcggggtcttcacctagcactcgggt

SEQ ID NO: 23881 - DNA, 371 bp, Zea Mays
tggggaaaatccctcatttccttcatccacatgctgctcctccctcaagcaatcgccttacctatctccatccctagccgctcatctcatccatggccatcgacctccctagcatggtggtcacgctcaggccctccctatgacgcgtggcctccccctgctcctctcctccagcgctcgatgcttagggccccgctcggcgcccgagctcctctaggcacctagctcctagtgccgctccccttggctgagctctcctcctccagggtggcttcctcgcaccactgctcctccatggcgaatcccttacaaacaggagctcatcgagcgctcgctcgccttcgaaccggacaccgagatccatggcaaac

SEQ ID NO: 23882 - DNA, 770 bp, Zea Mays
gttctctatccctagggaaggtaatgttggcggggcttcttccttcaggtcagtctggcacccttggctcttgaaacactttcagatcatcttgacaggggcgagcttcttcagtttcttagcatagtccatctttagggttctgtatgcctcatgagtgttggcttcctcgccttctgccatctcgagactgtcttgaagagccaccttttcccccttcaattccttgatttgctgctctaggctttccacccggtagtgtaagtgggggcagtgggagaaaaggtcatcaaagtggttatcatgggtgtggaatatctggccatgtagattatggtagggtcatctgcattatgatctctccctgacaaggcctagagtctttttctccaagtaggggtattcttgttactaggtggaaaatagcggaggggtgtctcagagacttccctattgtagttttggcatagctggcggagggctttttgggcagcattctggctggtatctgggaagcggtggccaatggcggtgatctaaaagcgagggtgattggtgtagcttcagctttctcctaggtagactgccatggagcatttctcaattctattctcgcggtattccttccagacatactctagcttcttgtggatccccatgcgaagcgcacaactccgaagaaggtgagggaatccttccacctccgagcaataggatgtcttaaggacaaaggtgccttccatctggtagcaagagaagaagggttgtta

SEQ ID NO: 23883 - DNA, 653 bp, Zea Mays
cccggggcgattctacaattttcccaacactcagcgcacaacatctttggattgcgggttaattcctagaatccccgaggactctttagcaaaattcgtggtcgaaggggtatcctccatccagggccgcccgatcagaaacggacgcgcctgattaaatccaggtgagctacacatccgcgtttaccgctgaccgtccgatcagatcctacgatcaggatccaaccacccgaaccggtgcacgagatctaatctgaagcgttcaagcgcagatcaacgaccgagagccaactgagcgaatgggtacacctaatctaatccacgttcattccttcatcatccaacggccgaacccccttctcccccaacaccactacacacagcggcggcgtcaccgcgagcagcagcgaagttcaacggagatcgtgattctggccctcccgagcgccatgccccaattcgcatgacccacgcgaaattgatgactccccgagccccattctacaaccaattttggccaacaccgagtacaggactcggtacacgttgcgccacggcggcgccattgccgtgcaccccgtcctcgcgatacgctatcctatacctcaattcgatggagcgatacccagagaggagggagacgaacatagggg

SEQ ID NO: 23884 - DNA, 565 bp, Zea Mays
gccaagcgggcgtaccgtacacacgatgaaccgacgtggttggctcctcaccaggtcggagctccatcgccgatcagtgctgctgccagaacctctggtgagaatctttcccccccttgccacttttgctttgctcgtccgtgccggtagtactccgtaggctcagattctggggttctggcaatctatgggtcggtcgccgtgcaggcgtggtcctggggcgggtgcagcgtcaccactcggcaagtctgaggtagaagaaaacgccgtgaccgtagatgagcgcggacgactgtgattagctagcagatctggccatcgtttgtgtagcggacgtctcagatcagatcggggatagcgttgattcttggtcattggatcaggatcgatagacaggaaggcgtggtcggctttgaaccgtaggatagagatctgacgaccatagtcacgtatcggtttataatgttggggttctaatctgatccatcagtattgaatcggacggctaggatcgccctataccccttcgtcgcgccccttttgctaaaacgaccccgagttaaat

SEQ ID NO: 23885 - DNA, 335 bp, Zea Mays
gagggcagcatcagcttgttggaggtgctagtttggaacttcgtcgaggcaggaagactgaatatcttgatattcctttgaaagatagtattaagggatgacacttcgaatggttcaccatggagaatcataacaaatcacttcccgctcgatcagggagacaacccaacgtccgaacgcctagctagacagaggtcccaacagactcggagcttgttgagtccaaggtcttgcttgccgagatatatgcgttgaagaacagaggcttgactgctgaagctgttgttgttgaatatgttttcaagaacattcagcctttgaaggatagagtccac

SEQ ID NO: 23886 - DNA, 434 bp, Zea Mays
cacatgtgccatagttgtgaggcgaggtgaatggttttaatggcacgacggaattcagtggatttttgtgtttccactggttttgctgacagtcgattcaaggtttgtagggcgttgatcttgaactgattcatgggagtgaatataattggtgattagctttgtctaagatgagcgagtccagtttccttgtttgcccatgtggagtaagcatgtctgagatgagcgagttcaattttcttgtttgcccatgtggaaataacaaatgttatatgaattggttggtttttatacattgttagggttcctttaaggcttgtgtaaactcattagaaattcccatcatcattttctataggtttttggcacatgtggtttttgtttgacaaacaattaaattattggggttatgtcacctaattcttttgtatggt

SEQ ID NO: 23887 - DNA, 624 bp, Zea Mays
actcgaaatcgctaggctccacacgcaaacgacatagtgtagtcgggagaacaaatcctacacagcgatcttgcccaaattcgcaaagatctgtgccctatcggcgttataactcgggcagaaacaatggggccacatgttcgatcgtgactgacatgcccgattcacggcagtccaagcaacccgagcgctcagccaccgtggccagacccctcccggccagctccgctaaatcccgtgcctcgtttagcttccccagagccccgtagagctccccgaagcaagaaaccggacgctacttcaccggagaagccgttccaccctcgccgaagttgtaatccctgccagcgcacgtggccacggctaaccggtaagccattttccaattcctcacgcctatttcttccctagcatccagtgaagctctctgacccgttcaattgaactataccgcccttgataggccggagtcctcaccgccgacgagttcgcccgcctgcgcacgtggaccgacctactccgaccattgtcggagacgatccgcacatcggtgtgaccgtcaagacgtcccctacaccctagaccacttcaccggagcagtctcgccgccggtaagcccctccg

SEQ ID NO: 23888 - DNA, 845 bp, Zea Mays
agagtcgtatagaacgtatagagagggagagagggagagtcgtatagaacgtagagagagatggagagtcgtatagaacgtatagagatggagagagggagagtcgtatagaacgtagggagagagggagagtcgtatagaacgtatagagagggagagaggaggagtcgtataggacgtagagagggagagatggagagtcgtatagaatgtataggaggaatcgtataggacgtagagagagagagatggagagtcgtaggcagccgcttgatgtgcggcccacatgctgtgtgaagggaaggggtgccaactaggctcgcccgctactctccatgtgtcctccttctcacccgtccgcatctctttacttagtcttttttccgcgtctcactaaaaaaccatatcagagatcatgtgctaattctaatcacaattgtcattcatgtctctcttgcgattatgaccacagtaacacggtaactatggcagaggaaatggcgttgtatgcatgcttctcatttgtgcgagtggcaactaagtaaacaaattgaggaaatgtcgttcggtgtaaagtaatactttccctctctccctcttctctcttctctctctccctccctccactctctttcctctctcttccctttccctctctcctctcctctctcttccctctccctcctctctcttccctctccctctctcttccctctccctccctccactctctttcctctctcttccctttccctctctcctctccactctcttccctctccctcctctctcttccctctccctctctcctctcctctccctctctctcactctctgcagagacg

SEQ ID NO: 23889 - DNA, 514 bp, Zea Mays
acaaccgaataccagccgggcgcatgctcacaagtccgtaaaggtgatggcaccgcaaccctctttcctccccgtttgaggatttctaagctaccgcgagagaaatagagagaatggggagtgaaagtcggagcaccgccgttgtagccgcatactggtgtttgccgcaaacgggtccgatcgggagtcttcatcagagagcggtgaaggttgcagcggttccggtgctgggagaagaccactgggggccatgagatttctcaccagagccagggaagggccaccggccgcaccacgccgtggccaaacatcgtcgcgtcatcatcgtcggtgagtcctcgtcgatcaagctcgcttcgtccctctgcgtgtagagtagactagaacatggtttggagcctgacgtgctggattgggcattccgtgcatggcgccacagtggatggaagggcgccgccgcccggtgccggctatgggaggagatgcgaaggagacctaatcttaggaaaaaaac

SEQ ID NO: 23890 - DNA, 367 bp, Zea Mays
atttctgttttatccgggggttccttagcaaaacgcgcgccgaagcggtatcgtgcaatcagagccatccgattgtcaactgagggtcccgattagatcgagcccacacccgaatcggtatgtgatgctatgcgttggattgggaatcaacggctcagattagaccagacttatgctgaatcggtacacgatcttgacctactatccactgatcaacggttccgattttaaatgcccgaatccattgacgtgcacccgatccagatcggacgatcccgagctaaagaagcgaaggagtatgtttgatctgatctcggccgcacaacacaagatcagtggccccggcgcatcttcaacctccctcgac

SEQ ID NO: 23891 - DNA, 565 bp, Zea Mays
caagattggaggcaatactgggtggtgtggtgcgtgatgatcttgcggagctgacagcgggctcaatttataggcctagtgagcggtggtcgtgaatttgaagaaggacgcgcggcggtcggaggaaggggagttcactggcgcagtggattcgtgtcccacgccgtggcagttactccgatgatcaacggagagtgagagtaggttacggtgatgcggtggaaaggtagagacacgcggcggacggcggtgatggcttaacggcggtgaggaccttatccaaggaatcggtgagcaaggggagaggcacggcgactagccggagtggcgtccagctcaacggtggcgaagatttttctaccccatgacgttatctatccactccgggcacgaattggaacggcgatggcacgaatcgtggtggagggatcgtcggcggtgaggtctctgcgctggtagtctgatccactcaaagcattgtaccatggcgagctcggttgagacagctgacagagcgatttgtagggagattttctcccaatttcatgtgacaacataaccaatg

SEQ ID NO: 23892 - DNA, 320 bp, Zea Mays
cttgcggctgtgatcagatcgcctgagagagctattcgaccgattgaatcctgaccgttgattaaccagttgaagggctaggattagatctaggtaatgtttcgcccgcgaccgtcggatcacgatcggactgctcatggcgtgtaccgattcaaacccctcacgatttaatctggtgcgtccggagttgatcgaacggccctgagatcccgataccccttcgttgttacaaattcacaaaagagaccccgtagttttatagattgaactcgccgtccacccgtgacattggattgggtctcagatttcttgcgcaaaag

SEQ ID NO: 23893 - DNA, 800 bp, Zea Mays
cggcatcaagatctccagctgtagtgtagtaccgtagtctgtgggccagctccaacaacccctgtgcatccctctgccatagcgcctagcgggagcaagaaacgagtgcagcttgcagccggggaaactgatgcatagtgggtggggcctgcatgttagcgagtggaaaggactgccggtggacagcttggttgcttaaacgtctgcatggctggatgtattaggagatatagcctgtgcatggtcatgtcatgtcctttatgtagggaggccattaatttatatttacacactagtttctcgaggaaatattagatcatgattgaaggtcaggcaggcccaggctcgtgtccaataaaactcaaaaaaatgatacttgaattctctcatcctccatttgaatgtggatattggagggcgatgaattaaattgatttcaataccaaattctctcatgctccatttggatgacagaagcacgtttctgctcaagaatagcagacgcaagcttcctgtcggaaatagttgtttcccccaagattagcattggtattaacttcacaaataccaacaagtttgcgaaccagtggctgttgccgctttcatctttcaagaggagctcatcggtgatcacttggcgtcacgcagtcacgcttgccgtcctgcggttgcattagcacatcgttgttaagactttacacccgagaacgttgctacgtacgtcgtctgagatgggacaataaattgggaatatgtatgtacaatgattctagctcgtaactgatttccgcaaaccctat

SEQ ID NO: 23894 - DNA, 496 bp, Zea Mays
agcatgtcgcaccgccttaagtcattgccgacttaagccaattgctccgttagtagggcatagtggtcaccccgagtttagtaagtatgccaattgacagcgaacaatttgagtgcctttgaagcctttttattgatgatatatttctcaatttacagaatacatcatcgtcccaatagctttggggatgtagctaggggtaaaacttcctgaggtgttctatgttccatgagttcccaatttccgtaccgtccatctgagtgagacgatatgatcccggccgagtgacttcagctactatgaatggtccttcccatagaggtgacaatttgtgccgtccctcccttgttagaattcggcggaggacgagatctcccactgcgaaggatcgatgccgtatggccttatcatgatagcgtctcagagtttgctaataccgtgctgattgaatcaccgtgttcagtcgctcttcttcgagtacatcaacatcctccag

SEQ ID NO: 23895 - DNA, 549 bp, Zea Mays
cttctcccggtcagagcattgtgcaataatcaacatcttttccatggacttcagccaatcatctgcatccagtggatcaggagagctagcaaatgtcgatggtttatggctcatgaactcctggtgcttgtcccagggtggaactggtggtggtggaggaggaggaggaggcagtggtgcttgctgctgttgttgctgttgcgcctttctctcctagcgtatctcctctcgctcctagcgcaattcccggcgtatctcttctcgttcttggcgcatctcctggcgttcctgctgcatctaagcatgcatatctgccatagtgtctgccatttgttgcatcatcctcatctaagctacaacagttgggtcaactcctgctgattaaggcggtggtggaggatccatctctgccggttgtggctggggttgtctaaatatcctctgagtgtgtcgattgggaggtagatgaattccaccacccttcctggtattgaccatctgagttaggaacatatgtaagaaagaatagtagacaaggcaggtgattac

SEQ ID NO: 23896 - DNA, 302 bp, Zea Mays
tgagaatgctcatgataatggtaacaagtcattcggttcctcaagcttcatcaagtgattctcatattgtatcaaggatccatcattatattgcaaaagataacatggtcgatcaaattatgggtgacataagtaagggtgtttaaactcgctcccgcattgctttattttatgaatatttctcttttgtatcttgtattaaacataaccgtatagatgaagcactacttgatgttgattgggtgaatgcaatgcatgaggaattaaataactacatccgtaatgaagtttgagagcttgtt

SEQ ID NO: 23897 - DNA, 330 bp, Zea Mays
ttccacccgagtgcagaagttctcagcatacaatatatacctgaagtttactttattaactacaataaaagacatacaatatccaccttaattttactttattaactacattaaaaaggtatggtgcagtggtgagagttatctcgtcatgggttcgaacccatgaagcagcctctccgcatttacggaagaaggcttgactgggtttatcccttccacagaccccacttacgcgagagtctctagcactaggtctactctaactacatttaaaaggtcttatggcttatgagatttagaaggaattcattattaagtgtaaatataaat

SEQ ID NO: 23898 - DNA, 442 bp, Zea Mays
ggtcagcagacaccgctgcggccagccttacgtgcgtcgagcatcaccttcccaggcctcgtgccctctgccagcctgctatgcggtgcctgattcaatagccggctcggtcttcagatgggcgagaagctgctaccaactggctaaataaacgtgtgcactggccgcctatcaggcaagacaccacacacaacactcagcagcagccatgtccagctagctatgcgtccaccggcatggatccagagtccagtccagaccgtgtgggagttgcaacgaggaaagcaactttgcattcgtgcgcgctgccagcgatcgagccataaactgcatccaagagcagcacctgacctgcaccatgctgacgaccaacggaactctggccatgatccgtatggagagcacgagaggttatcgcaacaactatctttttagtttttac

SEQ ID NO: 23899 - DNA, 700 bp, Zea Mays
acggttgccagtacaagcttcaccagtacgcagagttactaaaacaacgcttggattgaacgaaatcttaccagagcgggctggcctcggacgcgctattcttggcggcgcagctgaccgatttggggaaaacggcgtcgtggtgtgctcgggtgaaattgaggatggagcttcggcctatacgaccgcaagggactctagttttatcctgcacaatcaatttgggaagagggggcagaggcaacacgaatttggacttcttctgagcttcactggtggagatgaaaacacctcgtcgtggctccttgctcaatttataggcacggcggcccaacagatgacccccgaccacggatagcagcgcaagcgcatgcctaccacgtcggaaagagatacagtgagggagatggaagcatgggcgacaccgcggcaaaattcacaggtcacggtggccgccggtgaagactccggctgggctagggcggtggcgccacgtatgggttgtccctccccgacgttatccattccctactgcgcacgaacccggacggagacgacgcgaattttggcgcaaagaggtcgccggtggtgagatttttctgccgtggcgatctgatccccaatttagttactgtaccatggcgcacctccatcagtcacctgaaccgaccaccttcctcccacattagctccggatttt

SEQ ID NO: 23900 - DNA, 453 bp, Zea Mays
caaaaagcggtcttctcaatatcctcctcacgaatcctcaattgatgataaccagagttcaaatcaattttggagaagacctgggcacccctcaactgttcaaagagaacctcaatacggggtagcggatatttattcttgattgtcacttgattcaaagcgtgataatccacacatagcctcttgcttttatccttcttctcaacaaacaatactggggaagcccatggagacctgctaggcctaatgaaacccttagccagcagatcatctaattgccgcttcgattcaacctgctcctttggggccatccgatacggggccttatgaataggctgcgtacccagaatcagcttgatctcaaaagctgcatcgcgctccggaggaatgcctagaagctctgccgaaaacacgtcagcaaagtcacacaccacacggatgtcctgtacccgc

SEQ ID NO: 23901 - DNA, 569 bp, Zea Mays
gccaggccagttggactaacgggaagaccagaacccatcgccacagctgagggagaatcggtcccaggaccctcgggggcaggatcatattcagctgcaccctcgggggctgaggcatcctcgtaaactagagcaccctcgggggctggagatacacggcaagctggttgggttgcttcttgcccaaccaaaaaactagcagagggtgcgacgtctgggctctctatacggacgtcgtcagctccagtttcagatagctccaacaaaatgtcctcaggaataacctcctccagcacgttgtcaatgacagacattgtcattccctggaggctaaccagccctaagagagcttggtctggaacgtcattgctagccttactgcgacgatttctatgaacaaaggagggcacgtcctcttgatcctcctctttcaaaacatatctactggcactgacgccaccccaactttccacatcatcttcaagatcgacattcactacgtcatcaccaaggtttggagtagtggagttagcctccaattccaagtcgtacaagcgccgaagttttct

SEQ ID NO: 23902 - DNA, 410 bp, Zea Mays
gttggatttgaggagaagaacttggtgtggtggccaaggccaaatatttgtggatggttcttgggagtgcaaactgaacaggtgactgtacaagtcgcgctttccctgcctcaagataggagatagcagaacgccatctatggccatcatcgtctccacgtcaagcggcaaaccatcgctcccttcccttcccctatggccctatatctcatctccccaagttctcccctttctccaggtcccgcctcacaccacctcacctcatcactacctcacccacccagccccccaagaactacccatcaaccatggcgccgccgtcggtgtccgcctcccacctcctaatcaccgcctcgctcccaaagcccaagccttcctccctccgcccgccgcggctccctctcgccaag

SEQ ID NO: 23903 - DNA, 811 bp, Zea Mays
tacatggctccgcctcgttaaaaacctcacccccccgggaggaaaagagtgtgggctggaataacattgtttgctgaattacaagggcgcgtgggccctgagggttaaacaaaattttcgaaggttgtcaatgtttcaggggtgctctaagtcttcgccggaaggcgttactagcctgtacgcgctgggggatgccttcgacttgacgatgaatggaccctcccatttcggctccagcttgccccgtgattctatccgggtggtccggacgagtacgaggtcttctttgttgaactctcttgggacaaccgcgttgtcgcgccaggccttggtttgagcttgatatttgttgagggcctatagggcgaggacgcagtctccgtcgatgagatctttggacgttggtttgtcgacatcgggaactgctgatgtgcttgttcgggcgacccatgctttatctcttgcagcgtcatggcctcggatccatacaatagacaaaatggtgtgaatccggttgcctgacattctatcgtgtttaggtcccagaccacttcagatagtcggtcggcccatttgccctttttgtcattgagaagtcttttcttgatggcagtgaaaatcttgccattggcgcgctcaacgatgccgttggattgcgggtggtataccgaggcgaagacaggcttggtgccgatggagaaacagaaatccctgaagtcttggctgtcaaactgtttgccgttgtcgactatgagttcggacgggactccaaagcggcaggaaatgttttgccagaagaacttgtgggcgg

SEQ ID NO: 23904 - DNA, 840 bp, Zea Mays
gacgtaccagtggcgactagctccgccgaccgggagggcgaaagttgatgctacgtggaattagtgagaacaaaagggtgtggcgaatgcacgttggggagtgttggagatgatggacggtgaggcaaggaaggttcgtcggtcgatggcattgaacgacggtgcggtgggtcattgttcccagagtcgtcgtaggtggctagaggtgcgcctggcaacgaggtagacggaagctgacgcgcacactgaggagacaaaggaagtccgacaaatgaaaattggtgttcgtagaagacaacatgccgcgaggtaatcaccttgcgtgtgtggtgatcgaagcatctgtagcccttatggtcagcgggatagcctaagaaggcgcatggagcagatcgggcacagagcttgtttgcctttgtcgctgtcagatttggaaatcagatacacccgaaaacacgaagattgtcataagtgaggggcatgccaaggagcagttcgaagggtgtgagaggactggtagctcgacatggacgtcggttgattaaataagttgcagtttgaagagtttcgcccagaaagatgttggagcatgagagtgcaggagcatggtcaggatggagtcattgagtgtgtggatgatacgttaggctttcctgttttgagatgaattgtatgggcaagaaaggcgtaactaaatgccatgagcgttgaagaatgtgcgaagggagaaattatcaaactccttgccattgtctgtttggagggcgaggatcagcaggcgatgtttggtttgaacatatgaatgaaaactacgaatgtgagagaaaacctcacccttgc

SEQ ID NO: 23905 - DNA, 710 bp, Zea Mays
gtttgtacaagaaacgtgatcgatacaaagaagagttgtcggattattttaagcaggaggcaaagaaagagttcaaagaccttatgtctcaaatgctatcaaatccaccaccaaaattgatgcagcagttggcgagtgtgatgtatgttcaacagatgaccactccatagctgcaaataattccagcagctcaaccaccggttccaccgattgtacaaccatcccaagctctatcgcgtcaacgggaaataaggtctattatccagttgatgacataacaaggctagtgacatgcgcactagttataagatatggtattaacaataatcgcacgaagaaagtaggaacaggtgttgcgatcccatgacgcaagtttcatggaagcgacataccagatgattgttggagggtagaagtgacgacggtcgcctaaggatatgaggacgacatgctagacatccctgggcccgaagaaatcgagacacttggacatgccataaaaaatttcatcctttggcctcgaagggatgtcgaattggttgatccaccaatgtcgtcgtcgtctcatccccaaccatatctgcctcctcaaactttagtacatgtacatccatcatcacctccacaatcttcacatgctgctccccatcctctttctaacccaccgtctccgccacaagcatcaacatttaggacaccaccaccttctc

SEQ ID NO: 23906 - DNA, 783 bp, Zea Mays
caaaaaagtgggaggcacgtgcacgaacaaacgtaaagcagagtgctaatctagtttctactgctagactaagatgcaacaatatgggctgtctacacatgcaaattaaaggcgaagttgcgtgccttgctgacagaaaacaaacctctcaagagacgtaaacggagctagataagtatcgagcctgtcatgttcaggaggaaacgggatgcaggtgcagccaaaggaaaatcccaaataaagtgaatttcgtcggccaatttcgtggaccagacgctctccttgcactagcactagcagatgtgcagaatcttgctggaaattcacatggccagcgaagattcacctttcaagacacgggtcctgcagccgttctgttgcggcgggaaaaaaacagagagactgtactacgtgccttgcacatgcctgcagacggctgtcctgcacccacgtcacgctcacgggttttcaaccagttctgttttaagttctagcttcaccggttcaccctaatttcgcggtaaattccgtttccgtttatttatccggcattctctcgcgtccttccatttacattttatctccataaaaatggcgtttttttttacttgaagaaatttgtgtttgttagggggtttcgtttgcactgggggagctagctagccatgcacgattcatgcagcgagaaccgagaagagaaacagtgaaggtgacgaggacgcgagattaaccagggaggaattagttgggtcggcgggcgggcggccctcacctgcgcacggg

SEQ ID NO: 23907 - DNA, 528 bp, Zea Mays
cttatgttggaactatgtatgtgcccgtgcgttacaacgaggcgggggagcatggtgagcggcacctaagctacaaatatattttttgtttacttgtaaacactaaggtatgtgtggtctagtggttagccccaaatttctggagcagaggggtgtgggttcgagtgctcgttctacactattttttgcgggcgctgacatggggagggtgaagccgtggtgtagcaccagatgcccacattaggttcttaatatagtagtataatatagataagtctcgtggtctgtgtgaaggacggcagcaacatcttagttttttgattgcaaggacagcaacagtaacatctcagtcttttgactgcaaggacagcgtgctgcagggacaacaacatctccttttcagcttttgctgcagcagggacaacatctcctttttagcttttggaggacaaccgattgctgcagtctttcttttgactagagtacaacaacacctctatgtagtgcagtttgtaggacagtgtgttc

SEQ ID NO: 23908 - DNA, 777 bp, Zea Mays
agaaaatttaatcttagcataagggtcgtcaggagcacgattgttattaccttgctggcggtgttggtgtagcataccttctgtgttttgatgaagacggcgatgtaggcgcaaatctctggtggccgcttcatcataattaccttcttcataaaacacgacatcatcgggaagacgtggacgaggaggtggtggtggcggcggtgcttgttgttgcgtctccaacacagcaagtctgtcgatgatctgggagaatcgtcgatccagcctctcgtaagtcttgccaaggttcatgttaatgaaggcatcatgcactgacttgtggaccgtctcctccattttctccttcaggagcttgttgtttgcctcaagatcttggcggctaacacattcatcgaagtctgtagggatccttgattcctcgtcgtcgcctgccatcgaaacacaaaaacaggaaacaaatggtgacggttatccctaataatttcactacacgctcctctcaggtggaacacaggaacacactctaatgtatcttaccaagctcttacaagtgtctgacaaaatacaagcaaaggatggtacaatcggaggctggttcgtgatacttaccaagaggtagtgaaaccgcgattgcaaggttacagctgtattgattagaagaaagtatgtggagcttgggagaccaaaactaatatcaaggattagcaaaaatcgagtgcagattagcgaagttcaataagtgtccaaagcacaagtcacaattgctggctaaga

SEQ ID NO: 23909 - DNA, 448 bp, Zea Mays
agtattatgcttacagacatggtggtgaaacaattcagctgcaccttcctacacaaccggaacatgcactacaaaccttccaacctccaacaatagaacataaaactctggagcaactcctgacaatgaacccatatgattacccagtaagaccaataaaaatactacttcccattacttaacaacttcacttttgtactacctaacctttctactattatctttttcaggacacgggatatgaatgcacagtgacagtcactgaaatagatacatcaaacacatggtggtatccatcatgcacaaaatgcggccgaaaaacaactccacataatacaacatattattgtgatttgtgtaaatgggatggctacaaattcaagtaagtaattaacatcttcaacattcatatggtgaataaattagacatactaacaacactttttac

SEQ ID NO: 23910 - DNA, 536 bp, Zea Mays
gtcggtatttcgaacctcactccgacgagtaaatttattgtgcgcgttccgagcttcggacagtatgtgcggtgggcgtaagatttatactggttcagtcagaacgtcactcttaaataaatcggtggcttacgctatcgatatcattgatgatcaaagctcatagtaggggttacaagcgggcaacagagggaggagaggctcctaaatctcttatcgtggtcgaggtggagttaagggttataaagtggagtactagttaagtcttggcttggcggcggggctccggtctctaggtccttgtcggcgcgtcctcctcttattcctcgattcttctggacgtcttctcgtctggggtccgtccttgcgtccgtctgtgtatccggggatctggggtcctttctcgggatgccttcctccttttataggccgaggagggggtcggccatctggcttccttaagaaggagacactggacgacgataaaaccgagggttctaccatagggtaaagccacatgctcgtgggcccccggg

SEQ ID NO: 23911 - DNA, 727 bp, Zea Mays
taaactttggacttgattcaaggtcgatggaataagtaaatgagcaaggtatctatagtcgaattgtagctagtttatagagctacaactttgatacatgtggatggatgagttgctcccaaatatgctctgtcatgcgctctgataaggatcttgatggtaaagtgtgtgcaaaagtatcccagaatcagcccccctcgccgccggtgaccttgcgctcggattcacgccggcgccgcaattcacgcccagttaaacgcagataacgatccccgggtgaaaagatttcgccatggatgaacttggagcacagtagtcgctctgtcgctcatctacttgcaggcgacgtggccgcgcaaccatcaccgtcgtgccgtcgttcctcgcggttatgccacaccgtcagccatcttaccacgtcgcaattgatcccaatacacaacccatctatcgcctaaggtgttgccacggtaacagccacggtcaccgcgctagtgacttagtccctctctccagccgccgcgcgtcttctcaaaattagcggccaccgcagatagcacctataaattgtcgccccagtgagctccactaagtaatcacacacccaacgcacctgcccgtgcctcagattgtccaccagagcgctctaattttgaagttccccaaatcagttagaactccaccgtgagtgagctcgccatggctagctctctgcaggtccgttcac

SEQ ID NO: 23912 - DNA, 783 bp, Zea Mays
atcatttgcctgagcagttggcttgggtccaactggtgccgtgttacacgaaacgacgtcagttgtctgactcattttcaggcggcttgaattgcttatttcttgtgactgtttggtgagcggggtaggaagtggacggtcacccctcgatctctttaaatagcccgattgccttggctgttttcttcactcgcccttgatcacttgctctcttcttcttcgtcacttctccactttctgcacgaccatgggcagaggcaagatgggcaagggatggcctcgccgcgctgacgacaagcgcaagcgtcctccaagtccaccctcggaggactttggtgactcggagtactcagaggaagtttcccgagttacagcctagcgctttgcacccgacttattgtgccaacccatacttctgccgatgtatccccttgaattccgaaccccaattctcactttttcctccgcgctttcctgtttccagagttcttgaatccacccacctcgcttgagagaccatgatggctcctaagaggaagagacatagcgttgttgtttcgatcatcccgccaatcgatcccaacagccaacttccattcgccgataaccacgtgtctgttatttccgaggctgaccttccgcacctcatcgaaactggtgttcttccaccaaaagagttgtattcctggcgaatctggcgcggggttactgtttcgacagaggacaccaacgaagttgttatcttcgtgccatttctcatccgaggactggccctgctagctt

SEQ ID NO: 23913 - DNA, 447 bp, Zea Mays
tgatgatgcagtttgccctcagtttgtgcctgattttcaatggaaatggtactctcgtcctttaaaaagcttccgaactccgaactgttacaatcctgcgatgtgctactgtgaatgagactattcgatattgaaacgctagttttagctgagctccaaggaattgtttcgtggaacggaggagaatgcatttcttagttttgtaacatcagggttgtctagtacgatgtaaactgcgcttctgatactgtgccctgcaacctgttcaggcgtttgcaatttttcggcagtgattttggttcgtaacctgtgagattatatttatagcgttgtttggaatgtagtggggagagccgtctgtccgagtgcactggctctgcattgtgctgtattcttccagtgagtccacaccttatataactattagcttctgccttattttagtaa

SEQ ID NO: 23914 - DNA, 753 bp, Zea Mays
gcagcctcggcatgtccggcagctcgtccacgaacttctccagctgccgcgggcccacaagcatggccccgccgtcactcgcctcgcccaggacgagcaccaccgctgccgcctgcaacaccatcgccacggcgagggcgagcaagcgagcgctagcaggaaacctcctcctctcccccattattattgccgcagcaaccccgaggacctcactgacgatgtggggaagaagaggaggaggaggataggggactgatgacctgaggagagagagagagagagcggggggaggtttcctcggtggagagctcggacttcggtgctgctggcaaggggcaacgatggaccattcagcactgtgccgttttgcttcctggttcttggttttgagggtactgaccggtaggtgatgagacaaaaacaaaatctagtgattggcgggggcagggaaagagacgggccggcgcggggcaggaatctctgtttagacggcttgggggcgtcgacgatttctagtggtctaggattttcactttttcggaggggaagatgtggcattctcttctcccctcgatttttaatacagttttcttctctccatttgtcaagcatcagaagaagtgtagcagcaggaactaggaacaacttttaagccatcttttccatatgatgcatttggtttagacgacggtggcggaatcagaatttgctgaagctctagattgacttgtgacaaaagcacgtcgaaaaaaa

SEQ ID NO: 23915 - DNA, 784 bp, Zea Mays
ggcccggggcgaatgggcgatgggtttgccggattcgaccccacggagagcaacctcgactgtgtgggacttgggagccaagcagaccaccgacagaagaaacccgaaggtgatgtgcgctgctgcacgcgcggcgggcctgtccccaagttgacgacgctgtgcctcgtgtgggacactgacgcatcgccctgtggcttatccggtggcgcagtgccgcgtctcgctctcccacagaccacgaccacgagacggataggttgattagctctcgcattaaccttccttgtctgcctgaacgctcgaaacgcgccatgcgacggtgtgtgcgggcgatctgctccgactcgcttgttagaacgctactccaaagagttccaacaatcgctttagatgttactttcagccagttctcctctacagatgactcctcggagctcattttgtccctaggtgttgcggcatgagcaacacggacaatacactttgccttagcaccatattccaaagtagaaactgtcttgtgcagttcctttgcgtcaggactagcacacagaatcatcaggatttttgatttgtcatcctcgaatgaatcctgaaatgcaatgaaggaaatatttagatcatcattagggaggagaggctgtatcaataaatgtacttttttgtagtagtgtacctgtagtagcattgtgagtttgctgtccctgaatggaacatgggaatcaccattagcaatagactcaaccactcgcttcaaagcagtgttcccttgattgatttt

SEQ ID NO: 23916 - DNA, 956 bp, Zea Mays
actcaccagagtggcccagccacgggcgggctgttcttcgcgatgcggcggaccaatttgggggaaaacggcgtcgcagcggctctgggtgaaattgggggtggagattgaggctatacggccgtaagaggctgtgttttcattgtgcgcaatcaatttgggcgaagatggagagtacagtgcgaatttaacttcgactgagcttcactggtggagatgaaagcacctcgtcgtggctccttgctcaatttataggcacgacggtccggtgattgattcgcggccacgaggtgggctgttagcgcatgtcgaccacataagaacgaagcacagtaagagagatcgacgtatggcgacagcgcggcgaactgcgctgagtcacggcggccgccggtgagtaactctgaccgagctcaggagatggtgccacgtacgagttacccttttcccggcgttatccatccttcaccgtgcacgaatccgggcggcgatcaacagcggcgagctgagccggcgttctgatccacccaaaacactgtaccatggcacatcttcttcagtcgcctgaaccggccacgatccaacccaattttctctggattcttgttagcaacagagcgatctctcttaataaaatttgttcactaaacatcagtctacaaacttactataggattcttgggtcaaaactgaatggattcaaagatatagcgtgtctaaattggctcccttccactgtaaccatttttatttggagttcagtttcagttttctgaaacagttctgacagagcgactttgagtagatttttctctaatttttgtataacaacagcaggagatgtctgcatcaaagttgctctcctataataggtttacaaaatttatgtggtggcctagtgcaaattcttactggtttggaatttacatagctccaaagttgagcttataaccctg

SEQ ID NO: 23917 - DNA, 807 bp, Zea Mays
cagcgggtaaaacggacagtcaaccgcgttcccaacgatctaagatatcttagctcaatcgagttgatcggagagtatcgggagcacacaataatgctaaaacgggagggcagagggtatgagcggacctgagacacgctggccacggcgaggtcacaaggcacggtgttcttggttgatttggggaaaatcccgaattggagctctctggtggaggatctgaggtacgggtgggtgcgctagatgcctgaatacatagcgaagccgatggcgcactcaatttataggctccgggggcggtggcatccaatttcacgaagaggtgctggcggccggaggggaagaaggttactggcgcgcaagcttagtggctttcaccatggcaagctccccggcgatgaacagacggctaatgcgagtcacggtgatgcgatggatgtgccaaggcacgtggcgcaaggccgtgaagcgactgtttggtacggtggccggagtaaaataatggccggagtgtttccacggcacgatatttactgacccccggcgctatccaactgatctgagcgcgaatcacggtggcgaaagcacaaatccgcgcgcggctcgtcggcggtgaggcacctgaatctgatcctatccggttactgtaccatcgggttgttcttcagttaacctgacagaccaagtttggcatcgattttctcctaaatttacatggcaagttgttgatcggccagtagcaaagttgttttctaatgatccatctataaaccgtctgtggtaaccatactcaaacatccatggaat

SEQ ID NO: 23918 - DNA, 943 bp, Zea Mays
cgtccttcggtccatcgtcttgggcgacaactataggtggacctccgccgtgggcgcatgtggtgtgccggtgaatcggcggtggtcctccggcgcggcagatcggcggctgggcgagggcgaccaccatatgacggcttggcggtagatcgactatgctcctccaacttggccatgggcactgggcagtgagcctctgtcgtgggtgcctgtgcggtggctcgttgccgtgtaaccacggccgtcaccgtggatggtggttcctacgacgctaggattggggaatggatactggggaagcaggaggctcatcagggctggcggctgcgagtctgcgaggggaacaggagcaggtgattcaggttaggtcaccgctacagtcagggagaaagatcgagcctgtgttctaatattataaatgttactgtactagcaacacatattgttgtcgcgtcctaattaatcaatacattcccatagcaacacatattaagtgttatcacatcctatttaaacaatggatggtgcttgcaacatctattaaatgttgccaccaccctaataacttaacagatgatgcttgcaacgcatatgaagcggtgcccgctaatttcttacaacacataaaaccatgtgttgttgtggatgcgttgctataggggagtttgtgttgtagtggtcgagcatctcgcgtgagcacttcctcccgagcggcggcctcggtgacgcggaaacctcgacgacgcgacactctggctcctcgtgagcaatggcctccgcacggcgacgaggaggacccattcggcgactgggcgctagcgcgaagctgaaggcgctgaagaggaggggacatggattagggtttctctggacggaggtgcgatcaactttggaaaccaaatccccttgtatccatcccctcatgtcccagggtgagtaatcc

SEQ ID NO: 23919 - DNA, 410 bp, Zea Mays
gacggggtgactcgcggtggcgcggagagtggatttggggaaatcccaaattagggcgctatggtggacgatcggaggcgagggctggtgctctggctttgtaacaacctagcggagctagcagcgtactcaatttatagtgtccaagagcggtggctccgaattttgaaggggaaagctggcgggtgagtcaccagtgcggagtatcgtggctttcaccggggcaacgtcctaggcgatggacagactacctaaggtggtttactgcaacgtggtaacacttctcagtacgtggcgtttgagcggcaagcggtagactccggcgaggtcatctggaccggccgcagagcaagtgggtacgacgactgggcggcttgatccattccccttttggatcttttacccctccg

SEQ ID NO: 23920 - DNA, 341 bp, Zea Mays
ggaacgatatcccatgtaccagtgcgttcaagagcagccaattcatcaatcatagctagctgccactcaagaatcccagaagcttcctgataagtagtgggttcaacaattgccacaccagctcgtgggaaaccatagcgatctggaggttcaatggtaccacgatcacgaagacgatatccctgattaaaaacatcgttagactcacaattgttagtacaagaatcaagtacaagatcagtatcaggaccagccgcaggaatagatcggtaacgacgaatgtatgtttggatgataggtggtttggaagagtaagtagaggatgacgtggaggtggaagg

SEQ ID NO: 23921 - DNA, 725 bp, Zea Mays
atagcgcctgtgcaggtctccgccacgtgatgctgcccatcggccggggcgcgcggtggacgcccctcgccatccctctgccgcagtagtgcgttgtactttggccgctgtgtacccatgtcgtcctctagctgctgccccacggataagcccttggaccgtgggtttcctcttccctccctcctagctctacaacctacctaccagggtggttgattttccctcctggaaaccatccactcgcccccttcaagcgcaaggtattgtaccgttctttctcaactctgatttgtgcaccaaacgcttgctactacacttgtagatctgcttatcaagtgctacctatgcaccgttgtagtgttgctccgctgcggccctggcgatggcgcaggcatgcaaggcttgtgttgctcttcccgtgtgcaacgtttaaaggtaggctgcttgctgtgttgtggatctcatgtgcgctttgtggtgtgcgttctcttctttgtccatgcaagtttaaaaaaactgtaaatatggttttatgttcgcctgctattggttttgcctgattctcagttgtcctagcagtgtgccagtttttgcaaaacagtttttgccgaatcatttagaaattggacatgaaagcagcatgggcagtctctcctgtttctaatctggtaggtttaccaggtaatcaggtttctgaactagaacactgatttagttagctatag

SEQ ID NO: 23922 - DNA, 654 bp, Zea Mays
cctcacggcggagttgctcctggtacagctcacgtcgcgactttgttctgaccgcccttctcagatgggtcgcgacgttctccagcagacttcaccacagcggccaggtttctatatcagctcatgagacggacgcttctgccacggatgggttacagggaggctgccactcatattcagctttggctccttggtgcccttatttctcactcagagtttgatgttgtggattttctcatttgtgagatcgaggacaccgtactggatggtctacgtgctcgtcgacagctgccttatgctcactatctgtatcacatctttgctcaggtgattcggcccacacagttccagggtactcttgaggcctctcgcctcatctttgggtcataacgtccagctccagaggatcctgtgccggcacctgctctagtgattgatactcaggccgaggataccaccttccatcagtttgagactccgggcgcaacagtccatgatgatgatgatgatgatgactttggggttccaccttcgcctccgcctcctatgcctccacacactcatgatcatgagactgggagttccagtgatgctgcccctgctgccattgaccctgctcttgctgcgatcctctagactcttactcagtaggct

SEQ ID NO: 23923 - DNA, 575 bp, Zea Mays
cagcatagtgtggcgggacaggattatccttatagttaacaagtcctggttttaccaaaccagtagcagcttgttttgtttttttcccagatcgattgattggaatatgaagaaagcaaggcttgtcctcaacaatatcgtctacagggtacttggtgcccgatacgaattcttgcacagatcctacgctgctagggactataggtggactcatgtgggcctggcttgagttcaaatgatatgcattatgttttcttcattttgttcatcacgtcattaatagccttttgtaccttttcatcaatagtctgttcaagcgtccttttcgacttctcgtgtttcctatatgacgccgcatactctagaaacgcctctctccaggaaatcttagaagagattccccgagcccgtctagtgtgttcaggattgcctagtgctgcagttagtatgtcattatccctccgaggcttaaattcgcccttctttctcttatctgcatattcttgaatttttgttgaaacttcgcctaccaattctggatgcaaaagtttgccgtcctcactcaaacctacccg

SEQ ID NO: 23924 - DNA, 559 bp, Zea Mays
ctatctaggtggtattctaaatgttcaaccctttttacaaaaaatgtggtatgttctgctcatgaaaagatttccccctccaaacaaccttgagtttagcaagtgaaacccttgtaaaaaaacatgcttgtgttggtgttttctaacccttgtgtgtttcccccttgaagttgcgcctacacggcttgtagacacccatagcttgacccctaaatcgactaaaacttccttgtgcacttgttgtgtcaaaaaaaaattgttattgttggtgtctagttgcgcaaaccctatcaaggccatgtttctttccataaatccttgcccctaaaacttcatagcattcctgttgattatccagctgatcttgttgcctacctctcatttcacctcgatctagtaaatctttacctttgagaatcgtgtggtgactttatcatctgaatctctggatccttcattgattctgccccgttatctgggtatctgctataacccgttctcaagtatcggatgttgatcttgcctaaatctcttaattctggtcattctcataacccct

SEQ ID NO: 23925 - DNA, 829 bp, Zea Mays
actcacctcttcgacctcgtccactgtgaatttggacatctccagttacaagtactatctagtcatcctggaagacttctctccctacctatggacctttcccttccaccgcaagtttgacaccttcaccagtctatctcccttctttgtatgggtgtccactcagtttggtcacatcattcggagtgttcaatgtgataatgagcgagagtttgataagtccacatctcgtaccttctttctcacccatggtgtgcagctgcgagtgtcatgtcttcccacctcccctcagagcggtcggaccgagcacatgattcgcactgccactaatatgttgtgttgccaactcctccagcttttccctaattcgaggtcgtcttttccctccatgactcttccccacctcccgacctcgatccctaattgatgctgattttgtcaatgtaccttctcttcccctgccctcttacgtgccacgcatggccccgtcgcctgcgccatgaccacacgtgaccccgtcgtctttgcctgcaccatgcgcgaccccgttacctctgctcatgccgcatgcagcccaataacatcgtcatcttcacctgtgccacacgcgacctcgcttgtctgaacacctttggctcgcttcactgatcccgccctcgtctaacaacagcatgtgcggcccgatccacaagtcctctccaacgacaaccgaccccatgccctggcccgctcccgtgacgagccactggtgcaccaccctatcgccatccacaacgacccccgccatgtccaaccgatggtcactcgccactcggtcggtgttctccga

SEQ ID NO: 23926 - DNA, 1279 bp, Zea Mays
gcccgggagtcggttatactacgactttcgccgcatacattcagccgccggccgccgcatacggcatggattagattattagataaagatcggatgagtaataagcagtgcaaagttcatgaacctgaaatatgcatgcatacacctgctggcgatctcggccgttgacggagcatgcatgtggtgtgtccccgttccggatggctcgcacagatctactgtctactactagctcccagagcagagcaggcagagatggttggcggttggcacaggtagagaggcagccacgcagtgcagagccgtggtagcgatgcgcgaggcggatggacaggatagggaggggatagcgtaggggccaagtgaccactcgtcggctctggcctttcggcgcccatctcctcctcatctcatctccctccacggtccacttgtttcgttcgctgtgtgacagtagtgtgagagattccagatccaacacctgccgaccccgtcgtgatcctgtccagcggctccagagacagagaggcacgaacacatgccaagctcccagctcctcccctcccccctcacctcacctcaggccctcactcccccaggtactcaatgctctttctctctttcagccgccgctgctgcgttgcgtcgtgtgggagctgagctagtggcactgggtgctctcgaccgcactaggcagaccagacgttgcgtcgtgccccatattcgccgtcgccgtgcctttcagcatctatctgggagtgaatgacttgggctgggtgacggatagctgaccatctcagctctctcgaagaacaagatcgtaggagaacctcctagtcctttgcccctgtcgacactttatatgctggtgtggtgtccatcctgtcgctgctgggggtgccaattgccatgcccattgtttgttcggtcccgttcaccggggatcggatcggatcgtctgtccagcagcactaccagttcggttcagatgcaatggaatggaatggaatgcaccaccgcgcgttgacgctggtcgaataaggaggctaatgctgcctcgtctaattcagcggttacggcagaaggtaccagttgccaaaggtcggtagaataagtacccaccatctggatccacccctccaaacttcagtgctcttataagagacctaaaacactttatcttcgtctacactctagagctctcaacgatttcaaacactttatatcaattttaagctataaatccaacatgagatgggctaactttagactatttatg

SEQ ID NO: 23927 - DNA, 288 bp, Zea Mays
aatggggatttttgtttgggctgtgagaagccagggactggagccaagcgcaaaatgcttttgcagtatgcacgagcttgtatacgagacgaaggccatggacaaagaacaatatcataacaattttggctgttatggatttaccgcccgccccaatgcaagctacccggtgccaatattctagaaaaggtggcctggggcctggatggaggaatggttttacgtgaagaatgacttgaaggcaagagaggatattaaggaagtcattatgcgtcccatttggtcccg

SEQ ID NO: 23928 - DNA, 581 bp, Zea Mays
agggttgatttgggacttagaaggaatgggggtgattccatagtgttctccacttgggggctgatttaggggtcttataggggtctttttgtaaagttcctttactgtcttttgtaacattttggtactcttaaactttggttaaggtttaaattatgaaatgtgcatttgcctattctttctctcaactaaaggcttcaagagaggggggccaaggttcaatccttccttgcccaaggtgattattgcctaaaagcttgggtaatgctttggtccttggcatttcttaactcactcatgcttccaaggtcttaagtgctccctctcctccaagttttaaccacatgtgataataggtatatgtgccattaggaagccagcacccaggtaacacctggggtgttacaaaggtgtaggggcatgagaggcgcaactaacgccattagtgagaaagaaggcacataaggcgtggttatcaaactcgcggccattgtcgcactgcagggcacaaaccgagcgatgaaactgggtggatacccaggtgaagaagtgtgtgagggtggtgaaggtgttagacttta

SEQ ID NO: 23929 - DNA, 784 bp, Zea Mays
cggacaactgtcgctataaatatactattatcgttgaaccgttagtcggcatatcttgccacagatggtgagtcggtataaatctatagtccaactgagcatcagttgttatatgtatacgtgaatagcgtcgcttcgttagtcggcaattcgtaccaatagtttcacaccgtgagtcggcataaaagcagtgtgcaatttggggcgccgtgcccgcgcgaaaacacaaaagcaaaccctactccaaccatttcccccttcccccaaatattgagccgccggcgcgcgtcgtagccacacaaacgtgcctcccaaaatccaccagagcgcgcccctgccaaatccccgactgcgtgccctctacccagatccacgagcacttcccagctccctctcaccaccacgccacgcacaggccctgctcggagctcgatcggttatttggcctgctggttccaccgcttggagctcggtaattatcactgcaaaatatttttcttgtttcttattctcacaacaagttccttctcacgttttgttagatcccattctagaatatttgattttctaatttctacctctcaaaagcatgtccttgctgttctgatatgtgagccaggaaggtgtacgagcttgcaaaattaggaatgaggtacattgaaccaatgaggagaagctactagtacgagctagctatcattttggtgaacgctcaaagttctggtatgttcttggctgcccgtcctttgtctttttttgtttttagatgtgctcacaataaaag

SEQ ID NO: 23930 - DNA, 701 bp, Zea Mays
gatttttgcccactgaaggattggacgtgtttccctttccttgatttgtgttcctagtagtctattgaaggtttgatctattctgcttcgggtagggacaatctttgatgaaatgcccaaacttgccacaattgaagcagccactcgaggaacttggaagggcagggaaacgagcaacaggggcactcggctgattggtctgggcgggggctggagtgggacgaatgaacatgggttgtctgaagggatatgtaggtggacgaggagaagaacggtttggattgaaaggtcggattaccaaccttgtcctcttttcaggtccctgagttgatctttcacccacatatccttttgactttccttataccgcattttttgctacaactgacagcgctgtgctgacagccctgctatatgtgaggtcccgactcgtagccattttgcgctggagtctgtcatttagtcccctcatgaagcaattcttctttttcaagtctgtatccacttgatcgatggcatattgggagaggtgattaaatttgttgagatactacatcacagaatctcccccttgctttaggcgtatgaactcttctagcttcatttgtagcactccttccggaacataatgttccctgaatgccagtttgaactcttcccaagtgacttgatgtcctgtaggctggatggcggaaacgttt

SEQ ID NO: 23931 - DNA, 570 bp, Zea Mays
ggttgcttcactggttgcacaactacctagcagagcaggcggggtcatcaatttatagcaggcttgagcggtggcgtccaatttcacgacgatgcgctggcggccggagaggaagaaggtcactggcgctcggggttagtggctttcaccgtggcagccctccgtcgatcaccgggcatgcatgacatgtttcactgcgacgtggtctaacactttagcacgtggcgcacagcagtgagcgtccaacggcggcgaggtctatcccggctgcacaacgagcaagtgggtacggtgaaagtcatcctcgaccgagcctgagctaatctggtgccaagatctttactccgtcgtggttatccacttaccagagagcacgaatcgcggcgacggcgcaaatcacagcgcaaaggtcaccggcggcgaggggggctgaacttgtaatctgtttcagttactgtaccatggtggttaccattagagtgtctgacagaccaatttacagggctcggatctcaaattttcatgtggcaacttactaatccacgagtaacaaaattgttgcctgatgat

SEQ ID NO: 23932 - DNA, 1097 bp, Zea Mays
tcaccacataaatattataaagcaaactaaggagaacaactttgctcaaggttgtaagctcacttgttgagaagaatccagagataattaagtccaaagtcgagctgtcaggctacccctggactgaattttcagtaacagtgtgatggggtgaactttgagcccgattttgaataagattcagtgactatttgatggtaagcattgtggcaaagttgaagatggattataggtgtgtaaccttgctgcagaaagttagttgagttgccatttgaaattaagagaaaatctggcttcaaagagctctgtcaggtcgactgactgagggagcaccatggtacagtgctcagattgggataaggctgccagcaccggatgttcaccgccggcgacctctctgcgccaaaattcgtgccgccgccgtccgggttcgtgggcggtagggattggataacgccggggagagggtgattcatacgtggcgccatctcctgagctcggccggagtgattcaccggcggccaccgcaccagtcatttccgccacagtgtcactcgcacctcaattctacctcactgtacttatcttctacgtggtatacatgcgctagcaaggttatctgcggccactgatcgcttgtcggtccgccgtggctttaaatagcggcatgaaccacggcgaggcactcactgcctcaaccgcaagcttgagaagaacccaagattcgcactgccttctccacctcctcccaaatcgattgcgcacggtgaaagcacagcctcttaggccctatagccccgatctcatctcccaatttcgcccagagccgccgcgaccccacttccccctttcctgtctccggcaagcacgaaacaccgcgctccgtggccggaccaccctggtaagcccctgcccatattaaatgttgtttcgacagctctgtgcacttgtgaaactcaccgtggcgtctgattactcaatccggctctggttatgcgggaacgcgtgcccatggtcgcggtttccgccgtgcacatggacagaccattctcatggcgttcctgtcaaattgatgtgtgttccgaggccatcttaga

SEQ ID NO: 23933 - DNA, 1365 bp, Zea Mays
cagttagagaaggggcaatatccccaacacttctattaccatccagccatctgtccttccaaaagagagtattagaaccaagtcagcaagaaacagcgccaaacctcccatatcctttggtctagtggctctaggccaagtcagcaaacagcgccctccattagcttctttcctacccttccacaagaaatcttttcaaagtttattgatttctttgatggcccaggtaggtaaatcaatagccattgcaatgtagattagctttgcagtcatgacagactgaatgtaaacagccctgccaacccggttcatcatctgtgctttccaacctaggagcatggaagccaccttatcgatcaacacacggatctggggtcgacacaacttatatagagataaaggaaggcccagataagtgcaataaaacgcagagaactcacagggcagcaagcttttagccaccaccagtacttctgagcaatggatgggaaacaccttgcttttttggacattagtcttgaggcctgatgctgtgccaaataaatgaagactattcagcatcaaatttaaatcaggggggtcaggccgaagaaagatcacagcatcatctgcataaagcgaaatgtggtgttgcaatggttttgagcacaatggttgcaggagatcttcctcaacagccctttgaaccagccatgataaaatgtccatgactaaataaagagcataggcgagaggggatcaccttgcctcagaccccgttggtgcataatacgctctcccggaataccattgactaaaatctgagtagaaaaggtagccaatagcccactgataatatcacaccaaatctgcctaaagcctaacttcttcattacctcaatcaagaaggcccgagaaactgaatcgaatgcttttgtaatgtccaatttgagaagaacgcggggtgcttctgttggtgaagaaaacaggttgtttgttgcactagcatgaagttgtcctctatgaaccgattcttgatgaaagcagaatgggtttgagtaaccataagctgcagctttccagctagcctgttggacaggatcacaggagctttgtgactagtttagcaaagctgtggacaagactaattggtctgaaatctttcacattttgagccccctccaatctctactaactattaagaagctaacgtagaccacaccgtgcccccgcctccccttatcacgcgtcgtatgcacctctcattgcatgcaagagccgcagatgctgcatgctatcgcgcgtcgcatgcacctgggtagacctgaaacttgggccgggccgggccggcacagcacgagcccatcgtgccttgggccttaagtc

SEQ ID NO: 23934 - DNA, 472 bp, Zea Mays
gttgagttggacctttttccataaaagctctcctaacttcatctctaatattaggacgaaactaatcaattggaatgcgaagacccgaatcggagataatatgatccaggctgaactcagttattataccttgatcatttatatcttcctctctttgaccttcgacattttcaaccggcatggatacaacatcctccactgattgagtattccttaaatgagtttgcaccacccctcctcctctaatgtgtcatgaccaactccacttccacgagtactagcatgtgtgctgctagcacgactaaaatagctcttcaaatctgcatattaaactaaattagtcctactcccactacgaaatacgaataactaaaatgtatagataatattgttacacataatacaactactgaactacctcttcctggagcctttgtttttgccgacctcgtcgagcttgaatccattgcaa

SEQ ID NO: 23935 - DNA, 597 bp, Zea Mays
ccgggcgtaaagattccagaacatgttgttttcgattgggtcgactttggtcatagcttgttgtggtatccattgacgtcatacctagaatatttcctcaccctataagcaaagccattggctacttgtctcaactaggcactcatagacgaatctctttggccctgcaagtattcacaagtgcaaagacgctaaattgagttcataaacggatctctttgacaaactaagcatgtaccttatgtttgaactaggaaatgaaatcaggccatccatttcccgcaccctttctaagaagggtatcatattcttgtggagttgggtcccttgatcaacgccagaattcatgaagaaattgttccatggcgtcaccttttcaaggttggtcaatacatatagcatgatatggaaccactctccatgtctcagggtcttggtggtcgaaccacttgcgcttccgagtttgagctcgaaatatgttgaggtttgattcattgccgccatcattgtaacgagggggtggattatgcacgctcagcagtttgccaccatagtaagttgttgtgaagtttgacacatcctctagaatgtatgact

SEQ ID NO: 23936 - DNA, 581 bp, Zea Mays
tctgtatagcactcaggttgtcacataatagaggtgtatgagtgtcacaagaaacaccaagatcagccaatagccaacgcagtcaaataatttcagcagtggtagtagcaagagcccgaagttcagcttcagcactagaacgagatatggccgtttgcttcttggatttccaggcaataggagaggatccaagaagaatacagtaacatgtagtagaacaacggtcaatagggtcacttgcccaagtggcatcagaatacgcatgtagctgaagtggactatcagaagcatagagtaaacatatggatcgtgtcccgcgtaagtatcgaagcacacgaagcaaatgaccataatgaactgaggttggtgtggatacaaattggctcaacatatgaatagcatgagcaatatcaggtctggtgatggtgagataaacaagactacccacaatatgacgatagtggggtctgctagaggtgtcccatcctgcggacgaagttttaaatgaatatccattggtgttgcaactgtccgtgtatcagtaattccagagcgatcaagaagatcttgtatatacttgg

SEQ ID NO: 23937 - DNA, 679 bp, Zea Mays
gaaggccaaacatccacttttactccctataagtaggccatcacttcttgctctactaaacaaaattgcacaaaagcctttcggttcaactaattttctcaggtctcatcagtaagtaacacaatttttatttgtattaagagtttcgtttttttttgttttgagagaaatatttacctttcttatgagacccaattaccatctatgtttcatgataaattggtgtcacaacagtgaagcttcgcgtgttcatcgttgctgtcctgattgtgatcaacttgggcacctgcatggcaaaggttggatcttacggcacaactgtgtcagcgtcaccgaggcaaatccgagtacttaccgccgcaactgatggaagaaatggacctcccagcaatgatcaccagtgcccgctcgggacctaccccaattgttaagcaatggatgtatcaaaacactgaggaacagctcaaatacgttcacgaaaattacacccgtctgtgctgttaggggagcatgaatatcatgaacatggatagctgtattgccatcccacacagtacttgtttttattcttgtgtacacgtcactctcttatatatacttaagaaagatgtattaaatacattgaattcactactgtaatccggctttttgccgagtatcaaacaaaaaatgataggag

SEQ ID NO: 23938 - DNA, 308 bp, Zea Mays
tgaagttctcaagtcattgatctgcaagtgtgtgctggttttcttcgacgacaacctgattttcagcaagtcctgggcagaacatctccagcatgtgaaacaagtattccagctgctacgtgagcacaagctagcactgaaacgctccaaatgctcctttgcagcacattctgtggcatatctcagccatattatttccaatcaaggggtgtccatggatccttccaaggtggatgcagttgaatcttggccgcgtccacaatcgctgcgagctctacgcgggttcctcggcctaactggctattacc

SEQ ID NO: 23939 - DNA, 380 bp, Zea Mays
gaaatgggcatatttggaaaagcgatctaccaccaccaagattgttgtatatccctctgacttaggaaagccttcaacaaaatccatagagatatcttgccacacccctttcgaaatagataatggctgcaacaacctagcaggatgaacatgcttagctttagctttctagcaaatagcacactgcttcacaaagtttgtaacatccaacttcagccctttccaatagaaagcctttttaaccctctaataggtaggaagaatactagaatggcctcccaatacactatcatgcaacacggagatgagtttagttctcagagcagaattttggcccacccaaatctgatcaccacgcctaatcaagccttgatgtaaag

SEQ ID NO: 23940 - DNA, 882 bp, Zea Mays
gctttaaatatgagaacttgtttgcttcttcaaagatgaactcatcgataataatctttgagatgttgaaatctaccaagtgaaataagttggtttaagatttagtgcaattgaaagatcaccaattcaccattatgcttctggaggtaccagtgcaagtcatttttgttgcaatatgaatttttttggggcgcaatccatgtaggcacgggctgaaatactctaaaccaaactaaccgaactgcaccaaatctttttggtgctcagtggttcttgcggtaggggaatcactaactatttggtttatggtgtggtgtttgatatggtttttgagtaattgagtctttgaagctgaatcaccgaaatcgtcgaatgtccgagcactagcaggcagcctactggctgtcagcccatcctctcacacaatgtcccagagcccatgttatgacttgtccaagattgtatctcctttctccatctccaatcagcatgactgcaaggcagtggccatgatgagtgcacaagcccccatggacacaataggggccaagatgagtgatgagcagatggccctagctcgctcgctactcttcacatccaggagtgtgcaggaggtcccgaggagtggtgggctgatggccacaatcggcacgctagcctctgcagtcgcacagtcagtttcagggccagtggacatctcccttgtttggaccacctagacaacaggcatgcaggcagccaaaggtaatctatgatgtcccagagcccatgttatcttagatgtcccagagcccatgttatgacttgtccaagattgcatctcctttctccatctccaatcagcatgactgcaaggcagtggccatgatgagtgcacaagcc

SEQ ID NO: 23941 - DNA, 998 bp, Zea Mays
cagggccaccattggaggtgatgcaagcacgtccataagagttgcgcgcggtggggcaagtagtgccaacgacaggtgatggggaggctgggcggcccgcaacaccggctggcctagtggccgtgacacgatgcttgtaggcccgtgccaggttcatggttgtctacatgtcctggagttcccggagctccatgttgacccgaatgtgctctggaagatcatcgacaaagaggtctaccttttggatcgacggaagattcagtgtgtggcacactagcgcattgaagcgctcctggtagtcctagaccgtggcgtggaaggggagcttcgctagttcggtgagccaattgctatggatggccgtgccgaaccgcagatggcaaatattctcgaatcgctcccatgacgtcatgtcctcatcttgctctagggcatagtaccatgtcgggctgtgctcgcgaggtggtatgaggcgaggcacacccgattcgaggcaagcgtacgctgcacacggaagaattgctcgcaatggtcgagccagttctaggggcccttgtcgtcgtaggtgaagtcgagcttgctgaagcggggaacgcccaaaccaccgagcacaccagcaatgccgatagtggagaacaatggctcccacggaaacgttggcagtggggatatcgaggagggaaaattgatccggtggatgggaagaggggtggacgggtaactgttgctgatgttgtacactagacggtgggggtgggggaggagcggtggttaggttggtggagggcgacacagtggtagcagtgaaggacgggaactccgtcaccccgtaccctagcatcccgcaagggaaacccaagggcatggcgctcatagaggaagatgcttgctggtgctctggcaatgacatgtgggtggagagattggtcggctatgtggcgatgtcttccaggaccttcgtggtggcgtcggtggtcggtgatggtgtgatcaacaat

SEQ ID NO: 23942 - DNA, 597 bp, Zea Mays
aaggcgaggaggccaacacccgtgaagcctaccgaaccctgaagatggattatgataagaagctgaagaagctcgcccccacaaagaaaatccaaaagaataccaagaaccaaggaggccaagctgagcggaggaggaaggcccctccggcaccagctcccgtcaggatagagaatttgtccgacgtcgaggatatgtccctagctagccttgatgaccttctcaaggaatttggggacactttagaaaaagagttcggtagtacctcagagaacgctcgcgtgtagtacgactggtagtagcagtacgcttgtaatgtattggtgtaatgaataaaataacttggttgaaaacaattggcatgtgcataatagtgactctctccccttggtagatggcttcggataaaaccacgcctaccgcctccgggattggagcagggtttcccctgagagctgaaagagaaatcggtagagaggaaagtgagacccacctccccgcacctccagaactacccttagatttagcccaagttctagccaaccaaacccgactcatcgaggtcctcacccgaagtctggaaaatcaacgtccgaa

SEQ ID NO: 23943 - DNA, 837 bp, Zea Mays
aacaccacttttgtaaccatatggctaagtctgattttcagaaattaggttcaactttgggaccttgtaactttcaaacaaaagggattttgctctgggtcaccacatcaatattgtagatctatcatcggggaataactttgcttaagagagtaaatatggttgttatgcaaagttaagagaaaaataggcgccaagttgggctgtcagtcggtttgctgactgaaatatggtcaccagtggtattggtcgaacttgggatcagatttgagctaaatccagtaggaattcgactaggattgctataacaaagataaagaggatctataggactacaactttgctgcagagcctcggataggttgccatggaaatttgagagataattgtgcccaaacattgactgtcaggtgcactcatggcagctcgcgatggtacagtagaccaaaggggatcagatcgccagcacggcaatctcaccaccggcgacctctctgcgcgtagattcgtgccgccgctgtcctgatccgtgctcaccaatgcttggactatgcttggggtcacgaaaatatcgccgccgttgataagtgcggtcactaaacaactccgaccaccgtaccaagttgccacggccactacggataacttcgctggtgaccgccgtcttccggccttgtgccacgtgcctgagtacctccaccgcatcgccgtgaacccttgtgactctctgtggctcgtcggagtgactgccacggtagatgccacggattcacgcgcgccagtgaactcttactcctccgaccgccgcacgtcaccgctaaaattcccggccaccgc

SEQ ID NO: 23944 - DNA, 793 bp, Zea Mays
ctccgcaataagtgcagagactgcgcgacctagaggccttacgtcaggctccgcccgttggcttatgtcatgggcaacaagccacgtggcagcatcggatctccgcctgagcggggagcgcaagcgcacaggataaggccaggacacgtgtcagtaccggacccttgcttatgctagggtctcccctgtcccgagaccttgttgtggcccggaccttactcggagggatctggaccccatccaagggacccgacatgcttacttgggagtcccgagccataatcgggggtccgggttgtgcgcacaggggtcccgtgctccctcgcggaggtccgatccaactgatacatcctgggatgtatcatcttttctcgccacgtggtgccccttgagccgcccacatggtggggttgggtgctgttcaccgtgcggctagggaacgccgtacgggcaccgcgtcgtcatactgtagtagggggtacccctgattcagggtaccgacagtggcccccgggcccgcctcaggggaggatacgagcctgcaggtggggccaaagtctgattggcaattggcttgctgcccctgcgcgcccgttgatgcaattactgccggtccgcccatggtcacaccgactgccacgcctgtctccatggctgacttacccgagacctccgcacttaatgtctttgttgggccatgcgcggggtgcctcgagtcgctgcattggttttgaaaatttatcttctcagtcttctgcgacggccccgaggagacgcggtattggcgcgagcg

SEQ ID NO: 23945 - DNA, 459 bp, Zea Mays
gttgcttcatcttcactgtggtggctccattgcactttgcacatctttataaccttattcctcgtaactcgagtcaaagtatccaaaatcttgatggggtattcagcataagtcaggtcatcttgaacattaaggtcttccattggtaattgttcttcaggcaccctgaggcatttcttcagctgagatacatgaaagacatcatgaacatccgcaagatgatccggtaactccaattgatatgcaacttctcccactcgctttaagattaagaagggtccaataaagcgaggggacaattttcctttgactttaaatcttctcataccccggagtggtgacaccttcaaatagacataatctccttccttaaactcaagtagtcttctccgggtgtctgcataacttttctgccttgactgtgcagttctcaaattctcccttatttgctgaacttgc

SEQ ID NO: 23946 - DNA, 305 bp, Zea Mays
cgcctatcaaggctgcttcagctgaaggatccttcgtatcatctacagagaaggcagcttcggcctgggctacaactttaatgtgatcacatcccgccttctccaagatggctaaaattccccgcgcaccggaaaacgtgcaaacatccccgcgatcactcaaaatttcttcgaaggtttcggcttctccacttatctattcaacaacgcctttgtggtcgcctcgtatgaagttttcttcagcagagtaggcacccactttggcgaagctagcttttattttcttcacgcaatccaaggatttc

SEQ ID NO: 23947 - DNA, 352 bp, Zea Mays
agtctctacagtgaccagaatatctaaaaggatgtaatggatacaccataccgggtgtatgcctacacacatcgacaagtgacatatgcccatgatgacaggcgaagctacgctacgtgttaccgtgccgtggggctgacccacgggacccaccgccactactacgaagatatcagcagtggactcactatagggacccatatgaagaatgagagagacaatgcgccatactaggggtacggctatgcacgaccctacggatagcacgacattgagggcacaacgtcaagccaaggcaatggatcgacctcataccaaggagaaagcaagtctcccctgtaatgtcctaccc

SEQ ID NO: 23948 - DNA, 552 bp, Zea Mays
tcttcagagcaattgaggatgcggccttccgagaacatgaggtcacaaacttcaaccaaatcaccatcaaacatagccagcaagtttagacatccatcagacttccaagatcaccatcatgtgcagattgttgatcctcgtgctaatgtgtataagtgagtgctttcgttcaattttcaccatatttgtactgatactttttatattcggttattgtgtcatcctgaccagaaaatgaatgttataattactctagccattggttatactttcagtacaaaatgtcgtttgctatggcctaaattatagtaccatcatgtacaacttttttcctcgttataacagtaatccattagtcctggatatgacaggcaatgttataccctgggaagtagttcatcttgtccatgttggtcacgtgagtaattttagtaatttaatgctatcatttatgattttatggtttaacaagacatggatgtgttcatggaaccacgaaagttctgtgagctagaattgttagaagtgctcataactttgatctgaatttct

SEQ ID NO: 23949 - DNA, 357 bp, Zea Mays
ggcgaaggaccataccaaacgaggaggggggctcgccgcagcctcagacacaccccgaaggcctttttcgagatagtgaggtcctagtccaggcgaaggcaaggacgtgacttcgcggagtcaaggatgcgacacacaggcgaaggccacgtcagattatgagggacctaagctccacctcgtaatcatccaagcctacttgtaagcccacttcggtagattttgtagtatgtttgaattattgtactctgttccactgtaatgatcccattaaggggaatattacgggaatgtagcaggtaaccgggggtataacagtacttgggaccccactacccctcgcggttacctataaat

SEQ ID NO: 23950 - DNA, 285 bp, Zea Mays
gttgacatacacggagaacggaacagaagagagcacaaaacttccttttgatgataaggaaagagtaggaaatggtactgtgaacggacagatgcatacacacatgacatggcagaaaaattcatttggcggaaaagttcacggtttcatttgccagaagcgaattgaaccagcagagaaaagttcacggtttcatttggcggcagtttcagaaaaattctcatcggctttcgctgattcctgtgcttggagcaattctcatcaagggtggtcgttcaaccgttc

SEQ ID NO: 23951 - DNA, 303 bp, Zea Mays
gataattcttgtagaccaatgagggcagacaaagcaggagaaggaactccactactttccccactagctatgtagcgccgactgttcttctgaatcagagggatttcatcttcttcttcctcctcattttcatcagcaacacggacagcacacccattggggtcagcgtcagatgggtcacacccattgggattagtttcagtaaattcaggcacgggcacttccttagcagcaggagccgaaggaccagcatcccgatccaagctagacactcggcgaagacgtctcttcttctttttctgc

SEQ ID NO: 23952 - DNA, 692 bp, Zea Mays
atgggttgtgccacataatttatatctcctaaagaagtatcaagcacatataaatgtagaatatgtaaataagagtaaattgctcaaatacttatgcaaatatgttaacaaaggaccagataaagcaaccattatctttgaacatataaaaaagggagacaatgaaaatactgataaagagaaaaaagatattgatgaaatcaaggaatatttagactgcagatatatatgcgaactagacgcaatatggagattgctaggttttgagatacactaccattggccaccagtcgagagactaccagtacatttacctctacagaatatagtaaaattacataaaaatacgagattaaaaaacataatagaagatcctaaatataaatcaacaaaattaactcaatggtttgaggcaaacaatctatatgaaaatgctagaaatgtgacatattgtgactttccaaaattttggacatggaatacaacaaagaaaaaatgggtcaaaagagaacaagggttaaaaattggacgtctgtattatgtcaatcctatagaaggtgagcgtttttatcttagaatgctactaatgataataaaaggcgcaacgagttatgaggatataaaaacattcaatgggataatatatcatacttttaaagaaacatgtgcagcacgtggtttactaaaagagg

SEQ ID NO: 23953 - DNA, 336 bp, Zea Mays
aaaacttttactttgctccgacatggcgtgattgacgattggcgcgccatttcagcgtgtctgctgacgcacccacagtcaatctaccttaggtcacgccaactgccatatctatcctcgtggctgactgacccgcggcccccacacctggtggtttcgtcgggccacgcgcggggtgcctcggtaccgctgtattggttaaaaaattaccttctatgttctgtcgcggccctgagcaggcgcactactgacgcgtgcggcagttcgctctttccgcacccaggatccggcacccaaggagtatgacccgtgggcctgggccctcgtgtcatagac

SEQ ID NO: 23954 - DNA, 279 bp, Zea Mays
ttgctgaggggaccctgtaaagcagctcagaaaggaggtggcgaagccaggagcattcggcgatggcgttggcgatggcccgatactcagcttctgcgctggaccgagagacggtggtctgtcgtttagacgaccatgagacgagggagttgccgaagaagatgcagaaacccgatgtagagcgccgtgtgtcggggcatcctgcccagtcggcgtcggagtatgcagtgatcgtcgaaggcgaggcagtgcgcagctggatgccgaagtggatggtgc

SEQ ID NO: 23955 - DNA, 344 bp, Zea Mays
atttgggtcactcatatgtgaatttgcaatctaaaccctaagttttgggcttatatgcaaaaagccacactttttctcaaatgattaagtctgattttcataatattggctcaactttggagctctacatcttccaaattattaagagtttgccctaggtcaccacatcaaaattgtagaccaaactaaggagaacaactttgcttaagagtgtgagcatagttgttgagaaaatattggagataattatgctcaaagcttgactgtcaggccggtttcattctgaaattccgcttttcagtgtaacagggtcaactttgagtatgaattcaaccttgatccag

SEQ ID NO: 23956 - DNA, 409 bp, Zea Mays
tgaagatgggaggccactggatggctcgtagacatggagtaagcgtggaaactttgcacgtgtcctcggtcccggggaggggagtcggttgtaggttgtctcgaccatccccggaatggcccactagtcgaggttaccgccgactcaactcgggtggcacgactccgtgctggtatgtcgtgatcccggtcgtattcctcccgatgccttatctcattttcgtgccgtcagttgcgtgaagcgttgatggagctccgcgcatctcgccagctattgatagcgtgacacaggtcgttcgcaggatgagcgaggggtagaaggtgattagctgcctgagtaagcatccgccggtagccttccgcatctagggttcacgggagaccgtcagctatctgtgccagtacccctc

SEQ ID NO: 23957 - DNA, 576 bp, Zea Mays
cgcctgttggtctcctcatcgctcgaggaagacactacgtcgttggagtcgtggtcgaggtcgctaagggaggcaaggaaggcacactccttgatcttggccttctagaggcacatcttcttgagcgcctccttgtcgaatcctctcttggacttgtgcttgccggaggtgtactctcgcttgcccttgcatcgaccagagtggtggttgtgtgggccagcctcctgcttgcccttcttagggcaactggcaacaatgtggtcagggtcgccacggttgtagcgtccatccttcggcctgccatgccaccgactcatatgattattgtggaaccgcgtgaaccgactggtcacaagcgtcagctcctcatccccaaggctctccacctgctcctctatgatggtcaacaaagaggacaaagcaaccatagcagatgaggggttagaggaagcaccacctatagagaccagggccacggtgggtgcaccagggttctcaatcttggcccgggtctggtggtcaatcttagtggacttgagcttgctgaacagctcatctacagtaagattctcatag

SEQ ID NO: 23958 - DNA, 491 bp, Zea Mays
gctcatacgtagctggacatcagcaagccgaaataattccttccacaggttactgagaaacaccttgtcacgatcggaaactatagaatgaggcaatccatgatgtttatacacttgatcgtggaaaaggcgagcaaccgtcagagctgtaaatgggtgtttcagtggtaaaaaattggcatattttgaaaacagatcgacaaccaccaggatgcatgtatacgaatgtgaactaggcaaagcctcaatgaaatccatagaaatgatctgccataaagaagaaggaaccggaaggggttggagcagaccaggtagcctagcacgatcagctttggcttgctgacatatcaaacagtgagtgacatatgtgtgcacttcagttttcagaccttgccaagcaaacagttgcttcaaccgggcatatgttaccggaaatcccgagtgaccgcccactgcagatgtatgaaaagcagctatcaacttctgatgca

SEQ ID NO: 23959 - DNA, 349 bp, Zea Mays
ggcccaacggtggcggctacaggtctcacctggttcgcgatgagggatgagaggagggatgtggcatggagtgcgcaaagcccaggatttatatcctacagagagggtggagtccgcacggaaggagagagcggtcgatccaatcctggcggcgaactcttaggaagacgctagtggagtttgttgagatcccatgtctgcgtttgcgaaccagcggagaagacggagcacaaccaatgaggcccacacgtcatggaccgaacagacccgtgtgctgatgagaggagaccgacgttgcgaccccacgcgtcattgacatcacgcaggggtgagagcacacagagactgc

SEQ ID NO: 23960 - DNA, 361 bp, Zea Mays
tcagataatctttttcccgaagcatgtcgaataacataatcaaggtcttcggaaggtgcttcgggagtaggagcggcagatttttcaggcaaagtctgttctatagcctcttcctccgctgccttctctccaatttccgagggtttttccttagtaggctctgaaggcccagctttggcactagcctggctcattgcagcttcagcttcggttagttttgttttggcttcaatttgcatttttgaaaccttggcaattttccctggagtagagcttgaagcctttatcgtttctagcacatctagtacacttgccatccttcttcttttgggagtggccgcaagacctttttgtatcttcg

SEQ ID NO: 23961 - DNA, 297 bp, Zea Mays
aatttttccctcttcttctcatcagcttttatatagaaccactcactcgtccacccatcggccatttggtgcggtagccgattaccagggccttggtatcttttcgatacgcaaagttatagcaaccaaagttcttatgagggccatccactctggccttcttctggtagtacaactcatgcacccgacagaaagcttcaacattagcactcataccctggcttcggagagcccatatgtaaacactgagtctaacaatggcatttggtgttaactgatgaagatatatctcgaaat

SEQ ID NO: 23962 - DNA, 816 bp, Zea Mays
aaaaaagccgaaccaaacgtgacctatgattgctgctcactaagtgttacccaaatcgtcagagtgagggggaggcggagggtgaatgtgaacttccggatgtctccaattgcttctgatcctgtccactccattaccaagaatagcactccatgtatcttggagtagagggaggaggagggagctcagccagtcatctatggattggtgccccaaacaacaagaccggccgagagggaagagcggaggccggaggggtcagctcttgcacttgtcaggggaggctagtctaggctaggggatctctgattgcctcctatcctctcctagccctgccctgccgcagcgcaacgactccgaaatctgaatcgccgcctccctccgccattcgcgtcagtgacatctattccttcaattcattcagtcaggtaacatcctcgacgcccccagcatctatttatgtgtttccattccattgtacattgccagttggcgtatagctgattgcgatatggatcatggatcgacaggcgacagcccatgcccttcacacaatcaaaatcgaatgttggttacacaactggaaaaataacgcacaccccgcaacatactaggcacgtctttatctcggatcagtattcggtaatatggttacctgcgcccgttatttttcaccttactctttttgggtgcggagcacaaagctcatgactttatgggcactaacatagtactctgcatctctcaatagggagtaagaacgacagcgcattgccaggatagaaatcgtcctgatgttcttcgtaagtctggcat

SEQ ID NO: 23963 - DNA, 295 bp, Zea Mays
cgacggcctaaggtagctggtcttgtctcagatagcacatgatgtctacgtcttagtggatcagtagacatatcgagtgaaccaacatccttagtctgtgttgaagttggctggaaaggtgtcatgacgaattcagggataacccagtcacaagtggtaactgaggatccatatggttcaattccatatgttgtaggacgtacaacctcaggggtatatactgggtcctccatggcgatggactcctgattcaaagtgtcaccctgcagtgctctacgttttctgttgcactctt

SEQ ID NO: 23964 - DNA, 367 bp, Zea Mays
ctttccggggtgataatgaatctcaaggtcataatctttgatcagttccagccatctcttctgacggaggttgagatctagctgagtgaagatatacttcagactcttgtgatcggtgaagatgtgacatttgttcccaattaggtagtgcctccatattttcagggcatgcactatggctgccaattccaaatcatgggtgggataattctaatcatgcagcttgagtaggcgcgatgcataagcaatgactttattgttttgcattagaaacacaccctaagccttgccttgaggcatcacagaagacgacgaaatcctgatgtatgtccggtagtgtcaaaacgggtgcggtcgtgagcttctc

SEQ ID NO: 23965 - DNA, 403 bp, Zea Mays
ggacggctgggattcggtcgaggatgtagttcggccggctccgatatccgccgttggatcggcaatggatgggtgaggggtcgcggaccggtgatccatccgtgaacggtcgtgattaaaacgtcgacaccgtcttgggtagatcgcttccacaccgttgatcttcagtctagggtcgagatcgggtccatgttactttgaatcgccaccctcggttccggatctatgggttcatataagtatactacggtgatctaatcggggtcgttcaattctgatctggcggctgagattgaagcataccccttcggcccgtacgttttacaaaagagaccccccgctttaaccaaatcaacccgtcgtccgtagggttgttcgcctgagtctaggaaagttatagttt

SEQ ID NO: 23966 - DNA, 274 bp, Zea Mays
atcttctgctacctcaaattgtgggaatgccacataaccatgcgagcacatcacggccgcggggagccctaggaggtcttcggcttcgcttcccaagatataaaaccaataatcccaccagttgccccacttattgtgagcatagggaactaactccacgacttccgccgaagtctttccggtcctcggcgtgaaggtgcacgatccaaactatgcaatcttgtttccaatctttctcttttgccaatgcagacagtaattcttagcgaagacc

SEQ ID NO: 23967 - DNA, 435 bp, Zea Mays
ggcaggttccaggcagaatagacaacatgagcaccagcattttaaactctgcccctcaggatcatatccagtcggctcatcagatcttcagtggggattctcctgttcgtaacccgggtagaatcgttgacgccactatacaaataagcagggtatgcactgtccttcaagggttggatattcttgaaaatgaaatcagcaaccacaacttcaacaatcagacctctatccttcagcaagcagacctcggcaagcaatactctagcctctgttatctccgaaggagtcagagattcttccagctcggtgtgcggacatctggctgcctccctaacataggggggagtgacttgcagtggttctccacaatgaaccacttgagacgtcaccccttaatgatgtccacaaggggaatgtcgaggtactctacttttc

SEQ ID NO: 23968 - DNA, 387 bp, Zea Mays
agtctttcagcataagaaaagatatatagaagtcttcataatactgaacaaatgagcatcttcattgactctcaacatagccaaacacaacatctcagataaagaggaaagtggaaataaaaggttgtccaactaaacgactaactttattaataactacaccaatttgcagggtatgcccacaccttggtgacaatcattacaaaaatccaacttcatcacgaattcatcacgacaagcatcaaaacatatgataagcaaactaacactaagactaagactctgacttaaacatcattacagactctgactctgtcgatctatggctccaaatctatctgggtcctgcagtcaggggtgccataagcataacgaccacggggcggc

SEQ ID NO: 23969 - DNA, 437 bp, Zea Mays
ctcacagccacggtatatttacctggaaaatgaggccagcgaggagaagtcgccatataaaacagatagattttatatggattttacctatgacactaaaaaggtaaaacagattttaatttgggacggagggagtactttatagtggcaatagataaccagtgtgtcttgcaccttagtaaaagcattaccaaaaacccactcatctggaacttgctctgtggaacaatacttgctggtcatctcttccttttcatatggaaactttacatcaaacacacatgttgattttattacagcaaataattgaaggtcgaagactcagagcagccaacccccaccccttttcgtagcatatatcaggatatccctatatctgagaaattagaaatctgataaagaaagaaaacgatgccataggccattttctttaatca

SEQ ID NO: 23970 - DNA, 276 bp, Zea Mays
caccaggttttgttagatggtatgcactggaccaagtttgacaccatcattccttggttcataattagtctttggccattccatgctacaatggttgcatggtgtgattgcaaactgtcagatgtctcttgactctctgttctgaaattcttgtaccaatggagggcggtcgctttttcctggttctcataccaacaggtcaaatttcatataggtgtatcttctggctccacaaacagggtttatctataagtggataaacatgagataaatatc

SEQ ID NO: 23971 - DNA, 375 bp, Zea Mays
aacaggggtaccccttactacggtatgaaggcgcggtacccgcgcgtctatctctagacgcgtgataaacagcacccgaccccaccacatggatgactctggggcagccacgtgaccagagaaggtagcgtataccgcgatatcgttagtggatccggacccatgggaaagtgccggaccctagcatacgtagcccggaccttcgggtacaacccagggcccccacgttccctcggatgggacccggacccctctaagtgaggtccgggccacccacggcaaggtctcgggacggggaataccctagcctaggtcagggacgtacaggggtccggcgtaggcacttgtcagggctttgtccagagcgcttccgct

SEQ ID NO: 23972 - DNA, 671 bp, Zea Mays
ccgaaggtggctattgaaggtgacgtcgaagcgtgccagaaggcctttagcaatgtttgtgccttcattggcacaagagatatagtccaagagcacatagcctatagggtgtggccacttgtggatagctgggaaatgccgaaggagactactgttgaatccagtgaaggtggcctagttcgattgaaatataccttcagattcagagagaagtttgatgaaccaaatgattactggttgaaatgcattgaagctaccagcgacgagctgcttgggacatattcgaaggccgaagatgatgccttgttcgcaaccttcggggtcggggtaagaaaatattgaacagggtgtttgatgcaattggcttcgtataccctgattatcactacccattgtggaggcaaggaaagaagagaaaaactgccgcttcgtccaccactgttgtgccgaagggcaagaaaatgaaggttctgacccaccgaccgtgatatattgaaccggtcgtagtgcatgaatttggtgaagggacctcttcaactgccgaagtaaaacaagctgctcccactgtgcagagcgctgaagaatcgattgttgtgccgaaggtgcctacagtcgggccagccgaagccaaagatgatgcggctgaccaaaattggaaaaaacagtgaaaa

SEQ ID NO: 23973 - DNA, 451 bp, Zea Mays
cccgagcccgaagctcgaaacccgaaaaacccgagcccgaacccgtatagcccaatacccgatacccgaaatatttatgcgggcagtaaaccttaaaacccgatattatttcgggcttaatcgggtagcaacacccggtacccgaaatacccaaatacccgaactgtacaaacatcaccacatagacgacatacatcggcccagcccaactaaaattagaaagtagcaaaccctagtcttcactctccagtctatccagtatccacgcaagccgccaggaaggagtcgctggctggctcacagctcactgccgcggtgtcacccgtggccgtctggagcatccggcttccgacttctgagttccggccatcagcgattcagcaaagcaggcgtgcaactgtgctgatgtggtgcgtacactactacactagctcttgctcttccctgattc

SEQ ID NO: 23974 - DNA, 530 bp, Zea Mays
gagtggaagagtgagcgagagtagtggaagcaggtgtggtggaggctaggggcgcaataggtgtggtggaaggctcaagagtggcggaagctgtcgtagtggaggaaggtggagtggtagtggtgactggggctgatgggtcaaagcgagcaggagtggagcgagtccgagacgagaggcgacagaccctgaaggcaatctgatcagaagcaatccttagctcacctccctgctctacctaatttgttgttgttgctattgttgcatgagtggctctgtccaatttcctcttcttcttgcctcccttctgctcaaggtacacatccttgcccttgtcttgtctaaagggggtggagggtcctggtcgtcttctccccgtaacagtgtaatattcttcgtcctcaccatcctacactgactgctgatacgctgcacgagaatgagaaaagataagcaagataagaaagcagtacataagtatagaaattggaaagatttgctacttaggcacgtttctcgagagaagaacc

SEQ ID NO: 23975 - DNA, 401 bp, Zea Mays
gtcgagaatcgacggcaaccgctcatcatcaagggtcgcctttcatggactttcgccccgactcatggacaggacggtctgcacccgcatcaccggtatgatgcccttccacgtgctcatccttacttcatgatcgtgtaccattcaaccgtgcttcggatttggtcctctgtgtaaaggaattgctcggctgagttccaactctgcctatctccaccgcattgcgtgacctgccttgtctagtgcctttcgcctactcgcagtgcctcgatcgtgttcgccatctactcctctgcctttggcgcgtgttgggtcagcggatagggccccgagagtcacttggggcaattctggtgaagtcctccaccgttcacaggggcggcgccaccgcacgttgggtt

SEQ ID NO: 23976 - DNA, 449 bp, Zea Mays
cgggtggatcacaggtaaattctatcctattacaaaggaagagttcactctcatgctaccttttggatgaatggttaaggtgccccaccaactgcctgagtgacgacgagcgtcggacttcttcggttaagcagtgacatgggtcatcctcgtaggtatcgagggtggagctttgctggcagccgacgatggcaacctcgtacaccatggggcttggctgatgatcatcgtggtggaccacgcagatctttggtactgcctttgcatcccctggtgcaccagatattggcaaggtgccatggatgctatcggagtggacgaggcggggttctctggtggtggtggcgaggaagtcgagagagatgaatgtgatgtggtttcctggagcgaagctctcgtcgccgctgtgttggggggccttcgtcttttgaaggtcctcaaaaacacgt

SEQ ID NO: 23977 - DNA, 393 bp, Zea Mays
gtgggatcggtttatcgagattgaatttattggatggcagcggatgataaaaaccaaactgacccaacacaaatctaagccaacaacataattagggtcattggtgaggcaagtgaagggtgaatgggttcggtttatgggtagggtcagttttatggatgaaatcagtttatcaagattgagtttgttggatggcagcatatggtaatgaacaatcagacctaaaacaaatctaaacctgcaattgactcaacctaggacacggattcagaatcgtggactccaaaactgaattgtgcaaaggctaagacaaagtctgtaggtcaaaatatactaatggtttttaaagatatgacataatgttaggactcttttctctttggcttttttgtg

SEQ ID NO: 23978 - DNA, 401 bp, Zea Mays
gattgatgtaccgttggaagcttgtcaaaaatctggaaatgcttctctgggtagaatgattggactgttctgtggttggattgaatggaatttagcagttcagatgttagtactttgttaaagcgaggatggcacttcttctaaaacaagtgaatggagtatgagttggatgattgattcaagtttctgtttgatgtgatgactcttgactcatggtcactgtattatgaactttactatataaactcaaacatttgaaattgctataacctgtaatctagtgatagcaatttttgtttgggtcatcttggcagcagactaatttatgttccgtcaatcggaccgcgcgaggatgcacatttattagtgtttaatggaataactggttttgactcgaaaac

SEQ ID NO: 23979 - DNA, 513 bp, Zea Mays
tcatcttgaaagtcctgagcttggttcttatttctgtgcaaagtgtgttggttcctgttcttatgttcagttcctgtttgttcttactgttcagttgtgcaaagtggattctgactgttcagttgtgctctcccagtttattctgtgcaaagtgtgtggtgttcctgtttgttctgtgcaaagtgtgtggtggttcagttgtgctctcccagtttcaggaggtgttctgttcatcttgaaggaccaagtgttctgtgtgtaatctgtgcaatctgtgataatttctgttgtaattttagttcaaatctgtgtaatctgtgcaatctgtgataatttctgttgtaatctgtgcaatctgtgataatttctgttgtaatctgtgcaatctgtgataatttctgttgtaatctgtgcaatctgtgataatttctgtgtgtaatctgtgattatatttttagttcaaatctattgtaatttgtgtagtagcgtttaaaattttaaaatttggcggga

SEQ ID NO: 23980 - DNA, 297 bp, Zea Mays
caaaggggtaacggcggctcgtgccctgtacatcccaacggtcgccacagcgccgcggagtgtcgcgagatcattgatcttgcaaaacgcgtcagcgaacatgctagcgagcgacgtgagcagtcttccagagacggctccccaccttgacgttgtcctggcaaagaaaaggttgacgacggcgaggtggctgcggctgaacaggacctcgagtatcagtcacccgaaggggacctgaaggacatcttcgcaaaagactcccactccgacggcgacgactaggcagaccaccggcgg

SEQ ID NO: 23981 - DNA, 373 bp, Zea Mays
tgcctcgctacgtgctgcaactctatccttcatagggaatatatcttcgaaaaaggaggcatcacgagattcagtcacgatgttaacatgcacatctagaaaatcagatttaatcaccagaaatctataggctgcactattatgcgcatatcctagaaagacacaatcaatggtttttggtcccaatttacgtttcttgcacgcaggcacattaactttggctaaacagcccatgcacgtagaaatccaaaagcaggctttctacctttccatcattcatagggtgttttatcacccttagctgatggaactcggtttagaacaaagcatgcggccaaaatagctttgccccaccatgacttaggtaaacaag

SEQ ID NO: 23982 - DNA, 589 bp, Zea Mays
gtgggcgctcctttttatcgcgtattctctctcatccacacaacccaaccatcattccgaacttcctccttccttcgttggtacggcgacacaagatctattttcttcctccgagctatcggggtcacgctcaagttctcgagttttgtctcctaggtcgaaggacgtcgcccccatccgcggcgctgaagcacagtcgactatgaacttcaaatctaccggatcccataatcgtgcaggacctttaattattgcgtactgaccttgaagaaccctgaagcaacgttcgacgtcttttcgatactctgctttcatctggccctccgtaggctagcttacgaattgcagcatgaaccctccagtgtagtggcctccatcagaactgagacgacgctggtcgtccttcgttgctacatctgaaaggctgcgccaagtggcacaaatccaaacgatgaactcgcatctgcagaggaaatcaaaacgatgaactcgcatccgacgggggaataaatgaaaacgatgaacgcgctggcaacctaccaccggggactgcggatggctgcaacagagcagaaatgggatactagcc

SEQ ID NO: 23983 - DNA, 567 bp, Zea Mays
aattcataaagtggatagaatacaagctcatcgcctctttgacctcagcaaaggcagtggagttcatacaggaaataatgttcaggtttggaatatctaacagcatcatcatcgacctaggatctaacttcaccagttcggagttctttgacttctgcgagcagaggagcatccagatcaagtatgcatcagtgggacacccaagagctaatgggcaggtggaaagagccaatgggatgatacttgatgcactcaggaaaaagatgtttgacaaaagcgagaagctcgcaaggaaatggatcagggaactaccatatgtagtctggagcctacgaacccagccgagccgagctctacacggaaacaccctattcttcatggtgtatgggtcggaggcagtgctaccagcagatctgatctttggagcacccagattaacattcgaaagtatagccaaagaagaagcaaccaggctgaaggacatcaatgttctggaggaagaacggctaaatgtggtcattcagttggtcagataccagcagaccctgaggcgctaccacgacaaag

SEQ ID NO: 23984 - DNA, 697 bp, Zea Mays
caggtacgttgtcatgatgtcttccgttgccccagtagccctggtggcggttgtgtagacgaccatcctagcccctgggtcttgcttgggctcgtatttgtcgatgttggagaccttgaagtaaggaggccattggatggcctggagttgggggtgagcatggagaccccgcaaatttcctcctgttgatgatcatgctgccggtcccagggaggggagcgagtctcatgtcgcctcgaccgtccttgaaccggactgttggtggaggctaccgccaactcgatcctggttgcacgtctgcgtgccggtgcaccatgatcccggtcatattcttctcggcgtcttatttcattttcatgtcggcaatcgcatgaagcactgatgttgctccccgcgtctcgtcggctgttgatggcatgccgcagatcgttcggtggatgggcgagacatagaagatgattggccgcctgagtgagcactcgccggtagcccttcgcatctagggttcgtgggaggccattggctatctgcgctaggacccctccaacctcgcttagcgtgttcaacgcccgagtgaagtcagggtataggttctgggtgaggagcaggttctcccgccgaagcctagcatcttgttatgcttgctcttgctcgcgctcctgtgcttggcgacgatcgcagcggtgggagttgcggc

SEQ ID NO: 23985 - DNA, 406 bp, Zea Mays
ggaagttgctgtttgggtagctgttgagggcctgaagccgtctaactgggggcgaccccctcgctggggcattggtgggaaaagctggctttttttgccgggatgcaatagaaaaggcatcagatcactattgatccttgtaaactgggagatttggcgagaacgaaatgcgagaatctttgatcgcagattctcgagctgccaacaaatcattgccaaaatcaagagtgaggcagcagcctggaatttggcaggggccaagcacctagttaccccttaacaactatttagtggggtctgttttttatttctgtttacttctcttcaggttggacctttgcctagtgcttcggtcactgtattgacttaaacctcttgttattcttcttatcaatatatcttggca

SEQ ID NO: 23986 - DNA, 342 bp, Zea Mays
gtgtgtcaaacgaaagaacatcttaagggttgggatgttgtgtataaggtatcaccgcacgagaggttacctgttcctaacgatgaagattacaacttagacccggacacatatgatggagagttcttccaagaagatgggctagaagggcgatttgagatagacttaactgaagctatcggaatggacgtagatattgaaatggttgttgatgaggaggatgatgaggtgcaaaatgataatgacttagtaatccttgaaggcaatgacgaggttgcgtcttccgatggtgttgagattgaaatgcttgatagtgatgatgagagttatgatccggctaac

SEQ ID NO: 23987 - DNA, 436 bp, Zea Mays
gctatcaggtattggcgtccatatctctaggggcgaccgttcacagtttagactaatcactacaacttgaaattcatcctaggccaacggttatccaccatccctcaacatacatgggtcagcaaattatttgggtatgacatgacagttgagtacaagccgggcaaactcaatggagctgctgatgtgttgtctcgcaaagatgaagtcctgctgaatctacgcagtatttccacccccacatttgctctgtttgacactatacaggctgagatgggatctgatttacaggcggtgccgctcaggcagcagttggtggctggaactacgaaggaagggtggtccgaggttgatggtctcttactgttcaagggaaaagaatttgtgccagatgcctcatccatgtggcccgtgttgttagcttcagttcatgaag

SEQ ID NO: 23988 - DNA, 375 bp, Zea Mays
gaactgccaccggattgatgagctctgtgacttgatacggcccgacgaagcgcggcttcagcttgcccttgggcgcgtggggaagggaggaggctgcccgatgacgcaggcgcagcagcacccagtcgcccacggtataggagaccagtcggtgcaggcggtcgtagaacttcttctggacggcctgggcttgttccaggcggtagtgaacatccgctaggagctcctcgcgttcagccattgtcttggccaccgccgccacccgggtatcgccaggctcataagagcggatggagggaggatccctgccgtaaaccaccttgaaaggagtgtccctgagtgatgattggtacgctgtgttgtagacgtactccg

SEQ ID NO: 23989 - DNA, 510 bp, Zea Mays
cccctccatagcacgacgccagtggggtcgatgagggcgacgcgaacagatgaggggacggaggaggcatctggaggagcggcagccgtgtcagtcgtacaaatcagtcggtcgacagggtgttgaacgtcgggtgcgtggtgagtcaccatcgggtggacgtgtctgaggtcactatggatggtgatggggtggtatacgggaggctcggtgcaggtcggtagggtgtcgggagccaaggagggtggcgctactacaccaaagtcggcatcgaggttttagtcctcgatgttttagcggcactcccatgccctctccaaggagatccgggtatcctctctcgcacgtttgcgatcgagttctgcctgcaaatcttcagtccacgctcccctcacatagggagagcgcacggaggctgacacctcacgctaacgtcgacagaaagaccttgaatgctacccgaccgcatcatgagggctaagcggcaggcgttccctagtccgtgtcgaa

SEQ ID NO: 23990 - DNA, 481 bp, Zea Mays
ccacccaaaacagcccgcccgtggccagcttgctctggtaagtcgctatccgatccttatgttgttctagtgcccttgcattcttgcgaaactcataatgacgtccggttgctctaattgaccatggtttggcgggaacgtatgctcccaagctcggtgtccgccgtaacccaccctcaccgtcgacctgctcttcgggtcttgtattgcccaaaccaaagcgtgtccaggatccctggtgaacccaggaacctctccctagcttcaatttatccagcccagccttcggtgatccagaacacataattcgcttgaacacccgcattgacaccgtggccagaacgtgatagaccatccctagcaaaattgattgaggggaaaggtgcggatggagcctaatttggttcctgtcgcttgagaactccagccgtggcgtcatccggtcgatctagctcgtcggagctcggctcctagcttggac

SEQ ID NO: 23991 - DNA, 492 bp, Zea Mays
atcgttgtggccggtgatggcgccgccgggcgcgagtgaccagagaaagggctcggggaggggaatgcgtctgtgctcggatcctggccatccgattgtgatggacggttccgatgagttatgggtttgcaatcatatggattagatctgtaccgttgagatgtgatatgaggggtgatcgtcgatcgcgacctcaactgttgatttccgatccaacgtgcgtcgttagggctagtctagtggcgcacatcgaggatttgggccaccggtttctaatcggactgtcataggcccacgataccccttcgtaggtcagattgacacatgagcccctctgttttaaggaataaacccgcagtccatagattctattccttgagtctaggaaatatttgtagaccagcccctgtgtttcggtttaattgaagctcggtccagagaacatataaaataggtaaataaatacagaaattgattttcaatgtataaata

SEQ ID NO: 23992 - DNA, 653 bp, Zea Mays
gtggaggtgcgcatcagtatctattagcgcggatgggtctaggtcaccggcaatttgtcgtcggcgttgctcaccgtcgcgaagccgcctcgcgtcatgggctggtacttctccgctacacgtgccggtaagaaccctattgtgatcttagttgttgtctacgcttcgcttggatcgatcggatttggagctttggggcagtagagcggggaccatacatcaccggcgatggtgccgccgtggtacctctgcatagtcgcccttgagtcgttaggtaggcagggccccgtggccgtagatctgaacacgagcagctgtgattggggcctggtggccagttcaggcgggtgaatgtggttcgcccgatctgcatcgatggtgtggggttgattggctggttgctctgatctcggccgttgatcaccaatccacttgcccgcgtcccataccgcttcagtgaaacctagatctcatcctgaccgcaaaatcataatcgtgtggtgcagattctaagttaccccttcggcctcgtccgttttgcaaatgagaccctgtagttttattgaatgaacccacagtcctcggctgttgtacactaattgcggtcaggccctaatatttataaaacaacccccaaactcactatgttttct

SEQ ID NO: 23993 - DNA, 343 bp, Zea Mays
attccgggaactgactcaagacggaagatctgtcagtgaatatgtgcacaagttcacggagttagcccgctacgcgccagatgacgtcagtaccgaggtcaagaagatggcctatttcctgaagggactcaggccagaactcaagacaattctggctagccaagacttcctcagtttctctcacctctccaacaaggccatgcaagttgaaagggcaaaggaggaagaaaaagggcatctcaaaaggaaattccaagtcctccgggctcagcagcaagaccggcatcagaaaactcgatcctttggatttccacccaagggaccaagcttcagtagaccaggt

SEQ ID NO: 23994 - DNA, 276 bp, Zea Mays
aatccgattgaagcaattaggattgtgtcagaattccccgatgtattccctgaagagttaccaggcatgccacctgaaaggaaagttgaattttccatagagcttatcccaggcactgcccctatttccaagagagcttatcgagtgtccggaccagagttggtggaactcaagaagcaaattgatgagttgttagagaaaggctacatcaggccaagtacctcaccttgggtagccccagtgttatttgtggagaagaaggatggcacgaagagg

SEQ ID NO: 23995 - DNA, 692 bp, Zea Mays
tttgaaacttctttctatttcacgaggcatagagatcgccctaagacgagtaatcgtaagcgtgcttatgctggatcgagtagatgtgagcatgtcacaccgacttaagtcactgccgacttaagccgattgctcttgttagtggggtatagtggtcaccctgaattaagtaagcgtgagcatgtcacaccgccttaagtcatcactgacttaagccgattgctccgttagtagggtatagtggtcaccctgagttaagtaagcgtgagcatgtcgcaccgccttaagtcatcgccgacttaagccgattgctccgttagtagggtatagtggtcaccgtgagttaagtaagcatgagcatgtcacaccgccttaagtcaccgccgacttaagctgattgctccgttagtagggtatagtggtcaccctgagttaagtaagcgtgagcatgtcgcaccgccttaagccatcgccgacttaagccgactgctccgttagtagggtatagtggtcaccctgagttaagtaagcgtgagcatgtcacaccgccttaagtcaccgccgacttaagccgattgctctgttagttgggtatagtggtcaccctgagtcgagtaagcatgcaggtcgacaataaatagttcgagtgcctttgagaatgaagtctttttattgatggtgtattttccaat

SEQ ID NO: 23996 - DNA, 447 bp, Zea Mays
gtcgacccgtgaccttgtcgtgccccaaccaccgttcgtgagtcctcgagccttccctcaagttaaccgatctaaccccgcccctaatttcccctggtctacccttagttgtgcgtgattgctcgctggagtattccccggtcctccgaggactctccctctgttgtctgaccgcctcagccccattcaggcaacccctgacctcgccataatacgtgtcaagtcatccccaacctctccggctacccagaccaacccctagcgccctaggagctccggtatgcctcgcctccgacgacggcgccgccatgtccacggagtgctccaccctggatgaccggagaaggtaaagcccgtggcgcccatcctaaccacccaattctgatctaacgacccgacttcaattaaaccagatctaatcctaaccgtccgattcgaatatgatcg

SEQ ID NO: 23997 - DNA, 333 bp, Zea Mays
ctgagcttgaggagaaacatcttcaacatcaagccgactcaacccgacggtactccgagcttgaggagaagtattcccaaggttagatcgacctagcttgagtttctgcttctttggacgacgtgcattctttgaattcttctcttaatgctcagcttgactctgaaagggcggctaatgaggtaagctttcttaattagatctgccatgcttttactgcttactggatgcttgagagttgattcttgtttgtaggaggagaaacaagcacttgcagcttctcgcgataatctggatatgttgtatcgtgatgccaacaattccctaaccatc

SEQ ID NO: 23998 - DNA, 287 bp, Zea Mays
tccccccataaaatcgagacccacacctcctctggtaggggatgcggggggaagaatcgcagtcacgctagacgagaagggcgatcgaggaaaggtgtttcgcgccccggcgagggcagcgtccaagcccactataaaaaaggagaaagggtgaacctcagtcgctcccatcgggctcgcgtcaggaccgttcgggagcatcgggagagacaaacctgatgcactgaccccaacggcgtcttgcgaagtcatcaggaaagaggaacctgacggcgcgaccgccccac

SEQ ID NO: 23999 - DNA, 330 bp, Zea Mays
ctcaaccttcacatacatgtgtaaagcgttcatcgaattgaggccatgtgtagaactcttttgcctttctttcttctttaggcatcaagtggccaaaatcgttttggttagattacctccaccttttcactaggccctaatatcgaacaacatatgcgaccactaaacttttggggaagtaggagcactagctcattgtggatctacatcatggtttgcccatcctcaatgttgaatcgagactagtgggaagatcttatagagatggatgaagtatgagagcttgttcttcgatgtattaaggagcttgctatggcaaggatatcttct

SEQ ID NO: 24000 - DNA, 355 bp, Zea Mays
cggggtaaagcaaatgtagtggcagatgcacttagtcgcaaggcctcctaccattgtctaactatggggacttctgacattacgttgtgccaggagatggagaatttgaacctgggtatgattcagcatgggacttcaaatcacttgaagctggagtcagtcatcttacaaaggataattgacgcacagaaaaaatgatgagggtataaaacacatacgtgaaaagataaaggctggaaaagccaattgcttccaagaagataatcaaggtgtggtatggtttaataaccgcatagtggtgccgaagaatgaagagctccgccagcaaattttagatgaagcacatcttagtcgc

SEQ ID NO: 24001 - DNA, 600 bp, Zea Mays
gagcttacacctactggagttctctacactggacaagttggatatgttattagtggaatgcgttcaactaaagaagcacgcatcggtgatacccttcaccaggcaaagagtactgttgagccacttcctggtatggcatcccattctcggaacatttttatggtcttgtctgtatttttttccttcttttattttgtatgatttagactgaaaagaacacacatgatctattgcagtcccatactcctatagcattatttcgtatcccctttctttagtttttggttgcatgcggcatcatacagaatagtctttcaggtttcaagcctgtaaaacacatggtcttctctggtctctatcctgccgatggttccgactttgaagctcttagccatgcgattgagaaactaacatgtaatgatgccagtgtctctgttacaaaggagacaagtaatgcacttggcatgggattcaggtaccactgtacccgatttcctacatgtgaactagttcgtttctgttgttttcattacactgagtatgggacttgcagcaatctgtttttttatgtctgctttacagatgtggcttcctaggatt

SEQ ID NO: 24002 - DNA, 465 bp, Zea Mays
gggtgatgaatgctgttttttcctcgtcttcttttgccaagctgatctgatgatatccggaatagcaatctaagaaagacaacatagaacacccggcggttgagtctaccacctggtctattctaggaagtccgaagggattcttcagacaatgtttgttgagatctgtatagtcgacgcacatgcaccaatccactttattctttttgagtacaagaacaggatttgctaaccactcgggatgtaacacttctctaatgaatccggccgtgaccaagcgagccagctctgcacggatggcttctcacttatcgggcgtgaaaatacgtaatttttatcgaatcggcctcacctaggggtagaccttcagtttgtcctcggccagttctctcgggactcccggcatatccacaggttgccatgcgaatacgtctcagttatcttgcagaaactggacgagcgcgc

SEQ ID NO: 24003 - DNA, 307 bp, Zea Mays
cggcactcgtccgaaatgaagattgaatcgggtgttggatgtcttaaattttgattaccctgactatgagcaactgggcggagatgccgaaggccagaaaagaaaaaggattgccatcgtccttgacaaagagggtactaaattggctaaaaaggataaagaaatttctgagaaaagaaaaccgagccctgagccgaagatagctgctccaaagaaaagaaaagctgcatccccgaaaccaaagacttcgagccaagaggaagaagctcctgctacaccttctgctgccgaagtggaagagattcta

SEQ ID NO: 24004 - DNA, 540 bp, Zea Mays
gggggaggccttggaataggacatggaggaggctttggtggtggaggcggaggtggaggcggagggggagggggactcgacggtggccatggtggtggtttcggtagcggaggtggagttggaagtggtgtttacggcagtggaggagggtttggaggcggcggcggaggaggccttggtagtgggcatggtggaggctttggctctggactgggtgtaggaagtggtagtacacatgaaggtcttgatggtgttggaggcatcgggggtggcggaggacttggtgccgggtatggtggaggttttagcgcaggagcgggtataggaggtggcattggaaaaggtcttggaggtggaggtgggtatggcggcggcttcagagctagtgctagtttcgaaggcagtgttggtggaggcggcggtcattgatagggcagacaaacaagcatggtgttttgtcttgttgtgtttcatgacgtacgtggatcgattgcatgcttgcatgtaatctccagggttcatctctaatttgtctattag

SEQ ID NO: 24005 - DNA, 573 bp, Zea Mays
ctcagtcggtggtagaattcgagccgatagcatttgcttgaatgtaagtgtggaaataagggggatagcgtttcccgctaatctcatagtaatgggtacttagggaatagatgtcatcctagggatgaactggctagataagtatcaggcagttatcagttgtgataagaggacagtcaagttgatgtccccactaggagaggaagtggtgaccgagttagtctcgcctgaaccgaagaaaggaagttgttatcagatggctgttaatagcagtgaagcagatccactggagattatcaaggttgtgtccgagttcccagatgtgttcccaaaggacctaccaggcatgccaccagagcgaaaagttgagtttgccatagagcttcttcttggaatcgcccccatctttaagagagcttacagagtatctggaccagagttggttgagcttaagaagcagatcgatgagctgtcagagaaaggttacatccgaccgagcacctcgccttgggccgcccctatcctattcatggagaagaaagatggcaccagaaggatgtgtatcgattatcg

SEQ ID NO: 24006 - DNA, 520 bp, Zea Mays
cttgaaattgcacctgcacaacttatagacacccatagcttgaccgctagatcaacccaagtctccttgtgcacttgtcgtgtcaaaaaaatttttgtgtctagttgcgcaaaccatatggaagctatgtttctttccataaaatcattgcccctaaaacttcatagcatttctgttaatcatccagctaatcttgttgcccacctctcctttcacctggatctggtaatccttttcctggtgaatcatgctagctgtatcatccgaatctctggatcctttaattattctgccctattatctggttatctgttataacccgttctcaagtatcggatgttgatttgcttaaaatctcccatttctggtcattctcatacccccttctccgaggatcatgacgcttgtttttatcaacttatctctaagcggcatatccatgtggattaatggatgttgttgttatctttgaatctctcatgtctctaaaagcttatcaatctcgatctcatggttggtc

SEQ ID NO: 24007 - DNA, 525 bp, Zea Mays
tgttatgcgtgtcccatccgtgtacagggtaggggtatttataggtaaccaggaggggcagtgggtccccaagtactgttatgcccccggttacccgctacattcctagaatattccccttaacatggtcattacagtggacggagtacaataatccagacatactacgaaatctaccccgcaatgaggcttacaagtgggcccgaaggactacgaggtagagcctgggtctctacgtaatctgtcgtggcctccgcttgtgtgtcacacccttgattccacgaagtcacatcctagccttcgtgggactaggagttcgcatctgggacaaggccttcagggtgcgtctaaggctgtagtgagccccctcctcgtctgacgtggacattcgcctttgcccctatcgaaggaagatgagtggagactgatgcagcctgatccgaagtacccttcgattgatgcacctgtataagaaacgtctggtcgtagccgggttagacagatcaaggttgtgttcgacctccg

SEQ ID NO: 24008 - DNA, 568 bp, Zea Mays
aaattggcagaaccatgtccaaatcaaatcaggacatgtttggatacacatggctagttgctagtttggctaaaaattagctccagttaggcatggcatgcctggttaacaactggttggagacttggctaaaaagttagccgacctattagacccagctaaaattagctagctaacaactaacccaacatagcctccgattatgtccagaatttgtttgtacccacacacacatggttataccaggcgagcataacttcggccccacatcaggcgatctgaaaaatgaccaaactctaacaagaggtttagaatctctgtattctaagcaacaaatcacagcattagctaaatcatcctaaagatggaagttaatccatccttgtgaatcgggtctatgtgaagcacatggcatctcaggataggcacagtcacatgaaatgggataacttacgtagcctcttcaaatcagaagcaacaccatggctatggctcaagtgctccaatcctccaactgaccaccccgccctgccgctgagcacactgcccgtcggctgaccacgccgca

SEQ ID NO: 24009 - DNA, 307 bp, Zea Mays
cgacgatccctttatcgttcccgattttgaattaaaaatggatttgaaaatggttagagggttttcccgatcgttactgaccattttcatccctaatcctcacgtgcctggccaccgtcgtgctgatgtcagcattacgtcaacatgacatcatccattaaaatgcaactagccaattcgtgagtccctcggtcatcctcttcgtccatccaatgcaaatcacaccggatcacaacaaactagccgatgattgtgttaagaaaccagtttaggcctcgaagacccatgtggcctatatagtcgaaac

SEQ ID NO: 24010 - DNA, 774 bp, Zea Mays
tgaccaggtgctgaacgatttttggagtaaaacgctctcaaacttgctctgtcaggcgccctgaagggagttcacggtggtacagtaacctgaataagatcgcgggttcagtgtatctcgtcgtcgatgactccacgccgtgatccttgccagcgctgtgattcatgcccagtggcgcgcggataacgactcagggtaaaagatctcgcgtggggatgagtttggatcactgtattgccctatcgccgtacccacttgcccgacgacgtggcctcacggtcatcgccgaggctactgttgttttccccagttgagccacgccttagctagtttaccatgtcgctgtgcgccgtggaggttaaccagcgatagccatacgcctatgtccaatgaatgccacggtagaacgtcacggtgactcagtccctcttctcggccgccagcgcatcttctcaaaattggacgccaccgctgatggactctataaattgatgccccagtgagctccattacgttgttatgcgtccagtgcaccagccctcgcctccgattagccaccgtagctcgcgaatttcaaacttcccccaatttggttctccgcgacgccatgaaccaccgcgtcgtgaaccgtcgtttctaggttcgttcacatcctccttaccctcgtttcagcacccttatgtgctaaggatgcttatcggcccagccaattaaactagaccacgctagatcaccgggaacacctcgggttgtcctcggttttcgccgtcatcg

SEQ ID NO: 24011 - DNA, 314 bp, Zea Mays
ttaagtatgcgtgagcatgtcgcaccgccttaagtcattgccgacttaagtcgattgctccgttagtagggcatagtggtcaccccgagttaagtatgcgtgagcatgtcgcaccgccttaagtcattgccgacttaagccgattgctccgttagtagggcatagtggtcaccccgagttaagtaagcgtgccaattgacagtgaacaatctgagtgccttcgaaacctttttattgatgatatttttctcaatttacagaatacatcatcgtcccaatagcttctgagatgcagctaggggtaaaacttcctg

SEQ ID NO: 24012 - DNA, 336 bp, Zea Mays
gtttacatgcgtcagcctcctggttatgaagataaaacatgccctgattttgtatgtagactagacaaagctatatatggattaaaacaggcacctcgggcgtggtattctaggctcagcaacaagcttctcgaatttggatttaagatgtctttatccgataactccttattttatctggataaagatggtgcaaaaatgttcattcttgtttacgtggacgacataattgtggctagcgcttcatctcaggctgtcacaacccttctaagaaaacttggagatgagtttgctcttaaggatttgggagatctgagttactttcttggaattgag

SEQ ID NO: 24013 - DNA, 516 bp, Zea Mays
catctatcacatcatatctatccagtgccccaagtgggtgatcaaggcaatcgataaaattaggcgagtttttttgtggaaagggagaaaggatataaaaggaggccactgcttggttggatggcagagagtgtgtaggccctatgatcttgggggtcttggcatctacaatattgaaacattgggatgggcaattgggtgttaaacatgagatggttgtggttgcaaaagactcaaccaggtcgtccttgggtaggtcttggtatgcagttcattctagtgcaacagccttatttgcaatctccatccaatctgtggtgggcaatgaaaaaatactcttttttgagttgatttttggctgcaagggaaaactttatccgatttggccccggatttagtttcagcagtatcttttagatcacgcaagaagaggactgtacaagaagctttagttaacctccaatggtcagctgatataagggatgatctgacccaacaaggattctatgactattt

SEQ ID NO: 24014 - DNA, 726 bp, Zea Mays
tgtgtcctaaagttttagggtccaaccgtcacaatggtaatgtgtccctataagattactctcatatctgttttatgaacagtgcagccgggtatccgattttcaagactttagtgcttttctttttggactcccacaattattcacatgtcttttgcactacaaagaatatagatcatcatgtctatctggaagtatgggtattagtgttttttctttcttaaatataggttgttttaagtgcagcaaaaaatatttgaattcgactactacaattacttcatactttatattattattttatgaagttattttggttttaaaaacagatgttgttttgtgttttcactaaacagtctttaccccaaacaggcatcaaaagacagtaccatgatgtcaatgatataacaagaggcgaagaatgtgtgagcattccaatagtctgtggagaggatggggttcttcctcctccatttcactacatatcacaaaataccaccttccaagatgcctgtatcaacctctcacttgctagaattggagatgaaaattgctgttctggttgttttggggattgtctagcggagccacttccttgcgcttgtgcaagagaaactggcggagactttgcttatacgagagatggcctgcttaaagaaggatttctagatgcgtgtgtctcaatgctccgggaaccacttaaacaaccgcacttctactgtaagg

SEQ ID NO: 24015 - DNA, 383 bp, Zea Mays
gactaatcacatgacccaacagagcaacttcagacagccaaaaagcacacttcttcaattcgccatagaactgattcttcctaagagcacccagaacgagacggagatgccgctcatgatcttcctccgtttttgaataaatcagaatatcatacagaaacacgaccacaaagtcatccaagaactcatgcaacatcctattcattgcttccataaaagcagcaggggcattagttaagccaaaagacatgactataaactcgaaatgcccatacctggtgcaaaaagctatcttctcaatatcctcctcacgaatcctcaactgatgataaccagagttcaaatcaattttagagaacacctgggcacccctcaactgttca

SEQ ID NO: 24016 - DNA, 272 bp, Zea Mays
ggatttccgcttgggcgccatctcaatcgtgctggcgaacagagcgaaggcagtattgcaagatagcggagaaggcctggatgcagaaaagcaaagctagggcacagaacgcagaggcatgcgacagtgtagtacatacggggttttcctgggccagaggccatttctaaaaagcgccgagtcatcacccggcggttacttctaaaacgctggcgtgccatgtcatcacccggcggttacttctaaaacgctggcatgccatgtcatcaccc

SEQ ID NO: 24017 - DNA, 489 bp, Zea Mays
ccaattttcttctttcagacttacaatttcttcattttattttatcgtgtaatgtgtttaactggctatgatccagctttaggcataagcccatggttatcaatctacttgacaccataagtatcaatctacttgacaacaggttggattcgtttcgtattgagtttttttttttgttaaataaatgaggttataagcaactggatgcataagtgatactttcagtttgtgatacaaatatatacttcgagatgaaagtaacggaactgtgctaaggctgtccatgccgctctcctatcatatcttctatttgttctcctattttatattttattgtaaacagtgatgtctatcttataaaatagtgttttatactgacataaacactacacaatctgctgaagttaggctcccttttgaatattgtcccgctttgaagtgagactttttaacttgtgttcatggagccttcgtgatcatacaaatact

SEQ ID NO: 24018 - DNA, 355 bp, Zea Mays
ttagccgcccttagccgcttcatttcaaggctggctaagagggcgctacccttcttcaagctgttgcggaagtccggcccattctcttggaccgaagaggcggaacaagcctttcaagagttgaagcagcacctggtctccctaccaatactggtagctccagaacctggggagtcgttgtatttatacatcacggcggctgtagaagcggtgagcatggtgctggtcgtcgaaaggacggcacaagaaggccaggaacctgagggctcgggaccggctacaggggtccggaccgttcagaggccggtctactacgtcagcgaggtcctccatgaagcaaaggccaggtaccttg

SEQ ID NO: 24019 - DNA, 608 bp, Zea Mays
cttctggcttggtttgatgaatcttcatatcctcagtcttgatgttgaaactgtgagcaacttcctcgatcacctcagaatcatccacagttggcctggttcccactattgtaacgaagagagccctcctgagatttgcctcttcccgtgccatgtcagcattgaactcaagaatacaagatgaccttgtcccccagctcatctctccttgatcatccggcctcggatcaggggactggctaatcatcggagctatggcttcatcagacgaggtcagtgacgcctgaccaggggcggcgacaggcttctttgaaccttttccgtgcttcgaccgtcttctctttcttttgttgcggaggcttctatgagactacccctcagcagccatcctaggggaatcctccatcttcgcaacaacctctggtgtgttgatcttaacccacaccaaacgtcgcctatgggggacagcacactccgaggttgctgacgaggccccgcgctgctccgagaggcgctgccacacagacccccttgcttgttgtttttccaatctctgccacactgtcttcttcctctacacttctcggcggcctagacacctgacagcc

SEQ ID NO: 24020 - DNA, 305 bp, Zea Mays
acggtcaaatgagtcactgcaaaatttagtctttgatcataattagatttttaatcccatgtcaaacagatcaacaagtttaggtacagggtgtaaacagtaaaaaaagttatatatcgctcaagaaaagcttacccagtaatgaaaacaacatatgcagctttagctctagtaatgatctccaagggtctccaaaactgtaaatatccaaccaggctgctgtggatgcgctcaaagcaatctttggtatgatacatcctaaagtccaaatgctattgcattaagatcatcctcagttggaacaa

SEQ ID NO: 24021 - DNA, 525 bp, Zea Mays
ccggggtccttatatgggcgcactcttctttggtgggcttatgatcatgttcaatggcttatctgagctgacgctaattgtcttcaagttgtctgtattcttcaagtagagggatctccttttctttccggcatggtcctacactatacccgcatggatcctcaaggtacccatactgttccaggccaatcaagaggttgaacagagctgtgcaggtgagcatgcattcattatattcccacagttgatattctttgcggtactacatctatggcagatttagtcgctgctgccatacaccagatgctcagatcttcttcaggcccttcgtcggtgaggagtatcacaaggtatgccaatcgcttggtcttatcttcctgctctgcgaaaacaagcacgcaaacccaatttactatgttacaccccttggcttccgacgaggtggtcgaggcgtgaggctgacagtggcgctggtagtccgctaggaatcggatttggacgcgctctccctcgtcactaggtaag

SEQ ID NO: 24022 - DNA, 517 bp, Zea Mays
atttaacaagcgcgccaaaacgcaagcgcattatattcatgcacaactctacaccaagaaactatccacgcacagaccaactacaggcgcaaccagaccaacatgataaatgcgccagaccaagcgcgcaacgcccctatagacatagccggatgcgcgaaggcacatggcttcatcatacaaactatagtaacatacttacaacgagggcatcacaacttacatcggttcaaccttcgtaatgattcccatctccctatagttaaacagcattatcctaagctcctcaccctcaaaaagacttcgcaactccccctcacctacactcgccccagccggcgaggacaacaattcctgcttgccagccctgcacacacgaagccgaccgccattcacctcactcaatctacgcttcgccaccgcccttcgccgcctacgcccagcactcggaccaagcacaacttcagcttctgcaacacgcgaagaagcctccgccgctgccacatccaagaccgca

SEQ ID NO: 24023 - DNA, 333 bp, Zea Mays
ccgggaactttccgtgggcttgcaagaccccgccacggaggggcaggaaagcacgcgccgtgaagccgtcgccggcgacgtacctcagttgcccgtttgggaattgcatgtccatgaacgactgacagtgttcgaacaaaaatgtttaagtcgggaaatatatatggacaggagagagaaagctaaaagtacgtagcagaaaataggctgggtggggacacaaggtcgatcgcctagactttacaaaagcgaacgggttcaggcatagcatggacatgaagaaccatctcttgtgggccgaccagtacgcggggcagaccgagtgcactccgt

SEQ ID NO: 24024 - DNA, 616 bp, Zea Mays
gttagatctatttcggatggctttgattagatccaaaccaatcaacacacccgagccatcgatcccgggatcaacagccagaatcaatcccgcgaagtggttatgtgccttttaatcctggctatctacgcggagatcaacggctatgatctactgggttgaaggggtattccctcacttaatctggttcgttcatcgaccaaccaacggtcacctgcaatccttcctgagctgacacacggcgacggagcagagctccccttgcggcggcgccatgggtgaccaccgcgcagaagacgcgcccgagtacggatctcgaatcctatcgcttgaaaacaaggttcggtttgcagaggaacagacgagagggatctcaccggtggcagaaggttctcactaggatttgtaacacggagcaccacggcctcgacggtgtccgccaggacggcggcgagaaattcgaccggtgcccccaagtttcccccccactgccaaccacgcgcacaatccatgcgacatggccaaccatcacgcactcgttgaaggtccgcacaggggtgctcttcatctctctccaccttggcgcccggattcttgaattggtatcgccagcgcc

SEQ ID NO: 24025 - DNA, 297 bp, Zea Mays
gccattatagcttccctgtcttgaaatttaagcattgcatttgctatgtaggtggcgtatcttgcttcaaaatccttcttcatagtatttatgcgatgcttaacttcgtccgtctttccctttaactcttcattgtctttgccgattctgaaagtgtggctttcctcacatatcagtattgggttcaaatacccaatccttttaccgacattagcatcaggcttggtaccgtaaaggatctcttgttggtcatgttgcattctacaagtcacacgtgcatgtgtcagatattgaaaa

SEQ ID NO: 24026 - DNA, 344 bp, Zea Mays
aaaaatatcaaacaacagacttctaatttttcctatctttttctttgtgcaagagcaatcattctgaagtttggtaactttttgcttaagggaagggtggtaggaatttcttgaactaaatagtctttttcatgaagtaggggcaatgggtattattttgcagctttcaattgggttttgcatttttctctggtggcctacttcattattaatctggtaaaaatttgtttgcccattgttacactctttttggcttgcttatgatttaattgaattatggctcaatatcaagttctaattgttcaccctacttaaaatgatgggctggggtgtttatcattttt

SEQ ID NO: 24027 - DNA, 580 bp, Zea Mays
tccccttgtaacgttgcatgcctcaccttttgaagctcaagggggagcgtacaagggtgctgagcctcggcatgtgggcccaggaatataatggttgtaatacttggagttgctggtgcaatcttcttgcaccctgacatccgtgatctgcgtggtactggcatgcaggggaagcttccctggcaacgcataagtgatgatggacacagtgcaccttgcagcacgggcgtactgtttggaaatggactggacaggcacgccgcctgcaggatggcctggacgccgcctgccagctgagtggataggtcacaataaatgctgaggcggcacatcgcctgttagcagggtggacaggcggcgcgtcctctccgcaataaatgcagagactgcgcgacccagaggccttacgtcaggctccgcccgctggcttacgtcacgggcaacaagccatgtggcagcatcgggtctctgcctgagcggggagcgcaagcgcacaggataaagcctggacacgtgtcagtactggacccttgcttaggccagggtatcccctgtcctaggacctcgctatgggtggccc

SEQ ID NO: 24028 - DNA, 478 bp, Zea Mays
ttgttttcaagaacattcagccactgaaagatagggcctacccagcttatctgtatcgagggctagccgacccgactcgggttaccaacaggggaatcccttctgcagaattggtgagccgacttgaaatgattctcaggggcaaagtgtctaatgttggtgctccagtggcgtactcggcctggaatttgcctcctcccaaagccttcacccttttcgtgtcaaatccacctgtgactgatggcaatttgggccttagagtgcgaccctctgctgaggaagtcagtgctttggttgctttgcttggagagattcctgatgacgaacggcaagtccattttgaggtgcccctgaaccctagtgatgcagatataaatgccatgcttgatttgctagctgaggattcttccgacgctgctcccgctggtacattggcagtggtgccccttccagaggttgatacaactttggatgttca

SEQ ID NO: 24029 - DNA, 501 bp, Zea Mays
gtccatcatggttgctgggctgctgaccctgtcctgttcggctgctcctgcttcctcatgggtcaaggagtaggtcaaggggaagaggaagagcatccctggaggtgattgtgtcatcatcaagttgacacaagcttaggtgccatgtgcagtaacagcagcctggccaacaggacctctactccatggagcacttgctgcggcaatgcttcgtcgcttttctcagaatgtttcaatatcttaaattatttgttgcaagggttttccgggatgtcagactcagtccttgggggatagaccaccccgggtattaaagaagagattttctcgctgcaggatcgcgaaaacaccctgaaggccccatccgcataggttatctgtccaggagcaaccaggatgtggctgcaggttacttatatctctgcagctgcgtcagtggaagaacaggccaacaagggtgaggggtgttccgtgtttttttaacccagccttggaattccg

SEQ ID NO: 24030 - DNA, 621 bp, Zea Mays
aaaaaaaagacaagggagaatgggtcaatgtaacaaattatatgaatttgcagagaggggaggagatgaagaccctcatctttttttacttacctatcagatgattgatatcctgaagtagataaagaaggcaaagaaatcgaaaaagatgaaaaaattaaggagcaaacagataataaagaagaaaaagaagcagacccagtggaggaagagactaaagaggaagtagagggtgacgaggatgatgcggatagagcacatgcacacgatgaagtttcagaaagtttactgagaagatgaaagatcagttgagtgttcagagaatccggagctctatgaatgttgtttcattggagcgaaagatggtcacaaaagatattctcttatctatgagagtcagaactaactcaatcaaaagtgaggtgctgccccaaaagtcaacacttacccagaggccattaagggtccttcctcaaccaaatttagtaagggcaagcgagtttgttactagaattttgcgcttcgtttaagtatattgaagtctacaatatctggacaagtctaagatttgagacaaccgtgagttcttgaaaaataaattcgaaatgatttttattttac

SEQ ID NO: 24031 - DNA, 393 bp, Zea Mays
atcaagaaggcttatgatgacctagcaaaagtgacaaaaaagatgaggagacgggttaccttactcgccacgagtgtatgcgggtgacttcctggctttacatcttggagcgagggaaggagactgtcaagtcttaggtcacagccttgaagaaagaagtggcttactgggtcaaggaggaagagaggctccaggcctgcctgagaggtaggatctttgtacccttactcctcggtatggtactcatcctgaccccttctgctctttccatcgctcatgtcctctttggccaaatttgcacggggaagtttgatgctgccaaggggaatttcatcgaagtgcaacatcgcctaaaaaggacgaagagggagaatggtcgtctatcaaaggcgg

SEQ ID NO: 24032 - DNA, 458 bp, Zea Mays
cggggacccatgtttcatttcctgcggggtcatggcctctgatccgtatagcaggcgaaagggagtgaatctggtcgcccggcactcggtcgtgtttagtgcccagactgcttcaggtagcaggtcggcccatttacccttcttgttgtcgaggagcattttcttgattgccgtgaaaattttgccattggcgcgctctacgacgccgttggactgtgggtggtacactgaggcgaaggcaagcttggtgccgatggagaagcagaagtccctgaagtcttggctgtcgaattgtttgccattgtcaactgtaagctcggacgggactccgaatcggcagacaatgttttgccagaagaatttctgggcggtcttcgctgttatcgtggatactgctcttgcctcgatccacttggtgaaatactcgacggcgacgaaggtgaacttgaggttccctt

SEQ ID NO: 24033 - DNA, 697 bp, Zea Mays
ggtaacacacatgtaatcctttttattttgtaacagtgtgtaatctgtcaggccaagaaagaggcagcatagaaactaagattcaaccatcagttccgatgcagaaactttgcattctatgcacaacttaaatgacatcaagaggcacacttcagtgttgttttcaacaaaaaggttgggcacaaagaaacctttggagtaatttgaaaccaatgatgtccatatccttcaatccataatacccccttcttttcaaacacatactaagtactatatcacacattttgccatacatgttgtagcataaaccaaaaaaatcaggatatgaaagtaccagacaatgtgattgacaaattaatgaaatactaaaggctcctacttcaccgaccaagaactacattttgcaatgtcatgaagaccgttatattagcttcaaagaccagtggtatactaattttactaacaaagcatcactaccgacacatattatcctgtacagccaaccccaaccaccctgaaaaaagttacccattagcaagttaactaaaatccagggcgtgttaggaaggaaagtatttcaaaaccatggttttggaatactacggttttaagatgtcatgacacaactacaatattttttacatcactcttagcaatacatgtttggagacaaagtattttaaaccatggtatttgg

SEQ ID NO: 24034 - DNA, 496 bp, Zea Mays
tccaatgcgtcagagacagagctctttctgggacagaagcaccctgcgacctcagctgaccagccatttcatcaaccaatgtctgacattaaaaacaaatgagtgtaagaacaatatcacaccaggggtacagccagatcaggaaaaaccaaattacctagaggttggagaagaacgaaggaattcccaagtcgtgggaaatcagttgatggctcgatgaaggatcaacacctggagcaacccgcaatgcatcagtggggaccaagtcagtgtcaacagcagaaatcaaaactctgtcatcaggagcgccgacctctaaggcgacttcctgacttgaagcttgagctgctgccatgcaaccagaatgcggaggagaagaccctacgtgaacatccatggaagtgtgagagagagagaaccaactcggacaccctcgggggctgggtcatagctcgcgctacccatccgagccggatcatccccggcgacaccctcg

SEQ ID NO: 24035 - DNA, 585 bp, Zea Mays
gtgggaggctacttgcttggtgcaccgtccggatgatgatctctggggtgcagaggctttctcagagcactattctattactgatagggatactaccgaggcagccatgcaagatgcagcacgacgtgcactttcttagtattgctcgttgttcagcggggtagctaatggccttgatctaaaatactaccctcgtcgtttgatcggcagtgctggaggtgtgattatctcgccagttggtgagggcaatcccaggctgagcagcatggtcaacttggtcgtcgtgctcaacacagagttggaccacgcccttgatgagttgggcaaagttcgggcggaggttgcggaattgcttgctgagtgcgcagcacgccactatcttgatggtggttctcccgcccctatcgggattcagcacccttaccgttcaccgccccgtggtcgcttcgactatggtaccctagactgcaggacccggatagatttggatccctagatcgacagagtcggagtctgtaataatgcttagttcagtgtctcagtctagtcagtctagttagagttagtttgcttattttatgttgg

SEQ ID NO: 24036 - DNA, 834 bp, Zea Mays
gctcggcataaattttcccaagactcatcctacagctgcatggacggcgggttgttttaacacaagtccagggtctcttacacaaagttacaaggccgaaggggtatggggacactacgaccatccgatcggaaatcggccgccaggattagaccgcgattcacacaattgggcacgtcaagctcaccgtgggattcaaatcgaatggttccggttttatggagccctatctaattctgcccctccgattagatctcaacggtcgagacccacccaagggaacgggtacaccctttaatcctgtgcgttgctggtagatcggatggtgcacggtgtctagacgaagggggtatggtcacatcaaatccggaccgcccatctaaatccaacggcccagaggccaccatctttcctctacccttttcctctaatccacaccatccatcgcgagatccacggccacgcacacatcttcttccccccggtctcccacggcagccagggtagtggcgtcgcatcccgccacgacggcggctaccaaccagagaagccccgcgcggcacccagagcacccaaaccctcatggtgaattacgcagcgaaggtcgcggcaattgatacagggcattcttaccaatagtatgccgactgtgagtgagggcaacgacgaggttgactggcgacgagtcccagctgctccggtgagcatttctcacatagcttgcctccattcctcatctcgctgatcccgaatatgattcgcaccccttggcgaatcagctcgacccaccaggattggttgaacggcggcgcacgcaggacgcagttgcgacgg

SEQ ID NO: 24037 - DNA, 646 bp, Zea Mays
ggaacaccgcctgcctagcgtgctactagtaccccgcattttgactcgacttaaaaacatagaggaagcaatgactacttcggcatgtcaccacctcactacacaagccaaaattattattgcttacccacacgcctaaataagaatgatttcaattcaacgcgcccatattttaaatctcggcataagcttggctattggctaacgaagtgaccattttctaactaccaacatacactcctttcaccatttgtggatacttgtatgacacacggctattgtaatacatcacaagtacatacaaccccatcagtaaggcaccagcacatttccaaaaattctcgagactacgacgacaaggcatcgatccgccatacaacaaaaatcatgacgaagacgataggtgctatcaactaatcgttaaaaaaatattagacttacttctctctttgccactactccactctttagtcacatgaccatcatgtgcatcctttattcgattatataatagcgacctaagcgtcgtgtcacaatacatacatatttcctcgttgtgagtataaccatatcacgacatatacccgcacacctcaatcaaatatcttatgccaccatcactataatacaccacggcacacacgca

SEQ ID NO: 24038 - DNA, 434 bp, Zea Mays
aaaaaggtgttgtgagcagtgttctttgaaaaagttgaaagtggtttggtttggttcaaactgatgtgaaactatagattacttcatatgatcttctattcgatcttggtcgatgtgtgtagagaatgatggaagaggtggaaaagagaggacaaagacaaataatttttcagtactcattaatcgatggcagctgggtaatttctttgaacttggttctctaccaacattgcaaaagcaagggtctacctgctttgtaagttgaagcatagaaactatattgaaataggaaacacatgggttgggtgtgaggcctttagtccaactttctacctttccaagcagaagcatgttctaaaagcagtaccaaacacatccgaaatatcaacaataactaagttcccaaatttcaataacggtgaatggagttttag

SEQ ID NO: 24039 - DNA, 565 bp, Zea Mays
atgggcggagcggaaatgggagcgggagggggaatagtggaagctggagtggtggaggtggtgggtatagcgaaagtagaggatggctcaggagcaacatgagtaggtgaagtgggaggtggagtagaaatagtggtggaaggtgtggagggagtaatggagcgaggtcgagatgcgaggcgacgaactctataggctatctgatcagaagggatctgcagctgtcctccctgctcagcctgctctactgctgctaccgctgcaagtgctgcatgagcggctctgtccatacgacgcttcttcctgccctcctgctgctcaaggtaaaccgtcttccccttgacctgcctgaatgggcgaagagggtcctcgtcgtctcctccccttgatgctgaaacattcttcgtccgcaccatcctgacctgactgttgcacgatagagtgaaaagctaagctgaggtagagagcagtcgataggatctcaaatgaagtgatagctacctagaaatttcacgagagagagaagatccaggcaggacaggagacgggtacacggacaggcgag

SEQ ID NO: 24040 - DNA, 352 bp, Zea Mays
gtaagcgaaaggacaaacttcgagaaaatcatcaagacaaagtgagaaaagccattggcaaaggagagctaggtattggaactgggttaaatcaagagctttctcttcaaagaccaggtgatacgcgttggggttctcattacaggacactagtgggcctgtcaaaaatgtttcaatctgtggttaaagtccttgaatatgttgaagaagatggctcggatgatagcaagagacgtcaggctaacggtcttctaaaatatttccaatctttcaattttgttttctatctacacataatgatgatgatattagcattaacaaataacttgtcaaaaaccttacagaggaaaga

SEQ ID NO: 24041 - DNA, 483 bp, Zea Mays
actaatgcgaagtcccagcttctctgctttagtcgtttggcctcattgcgatcacttggatggtagtggccttgcaggtacagagttattggggcccgccagtcttcggccatgatgaggttgacgatgcggtggccttcggcatcctgagttatttctaaaccttctgggttgtggacagctggcgtgccgatgacgtggtagaacacgtcggagggcaagacctcgcccttggccgcttctttggccaacacgtcggcctcttcgttcttggcgcggtcgacatgctgcagggtgaaacccttgaattgtctctcgaggctgcggacgactgtgagatactccatgagcacggggtcttttgctgagtattccttctcaacctgggcggcgactactttggaatctatcctgattatgcatgtggtgacaccgagtgcttgcaatttgcgaagtcccaggatgacgacttcaaactttgct

SEQ ID NO: 24042 - DNA, 329 bp, Zea Mays
gctggatccccattgctctttccttgcgggcatgtcacaggagagtgaggccgcgtggaccttgtcaggacatgcagccaaccgtttgttcctgaatgagactgcatctcgggctggaatggtcgccggtatggatggtgaggcggtctatgctcagccaaaggttggagtcggattggataatgatcattttaaagctgctggtaacttactaattcaccagaatattttacctgtttctccttctttgtttaatattcccgttcaggtatctgatcagtctgttactctgccctttgtatcagatactcaagcgagtggctgttatc

SEQ ID NO: 24043 - DNA, 394 bp, Zea Mays
tatgtacgttctttggcgtactgggattatagatgtagtatctgttagctggattcgttctgaatgagacacaaatagtggggaaaatgttgtcatacctgataggatggatgatcctagggcgactgcagagggtgtaggggcatgtgaccggtggccagggcttgaacccccggaagcggatggtcgccgtgaggatgcgtgtgagcgagagaggatggcgcacgggagaagccctacaacaattttgttgctttgcttgatcttcttaacaattgtttagggatatttatcccttcctaatacacacccttacaccaatctaagatctcatcacctatttttatgggagctaattgggaaataaaccaatcaaacgataattgggcaactg

SEQ ID NO: 24044 - DNA, 458 bp, Zea Mays
gccgcggtaatggcgcgcgaggccggggccagggatgggcgcagcaactgcgcagatattactgcctgtttcatggcgaagattgcacactcccaacaagggattcctagaaacaaaggccactagtgacaggatgtctcgggcacaaccagccgacaaccagagagttgtcgcgcacacatatcaacaccaccacccacaaccatacaacaacggccacgcccagcatctatctaaccacgcatatcagcaccaccaggaggtacaagtcgtaccacccccgctcccgcctccgcatcaaccgaacccacaccacaaaaatcacccccaagcaccaaaacaagaggacttcgccgatccgccgtatcacggagtcatccacatgatcaccagagggtccagcgttgacttcgagacgaagtggcaaaagagggatcactaccgaagcgtcaaccacg

SEQ ID NO: 24045 - DNA, 289 bp, Zea Mays
tggtgagtcattgcccttgctatggtaacgtgtgagtaacagcacggcccacgcagcgtggactgggcatgccgcctgtcactggaatggacaggcacacgtcttatccgtaatgaatgcaaagacgcgcgtagcccagaggcttcatgccaggttccgcccgttggcttacgccgcgcgcagtaggctacgtggcagcatcgggtctctgctcgggcggggagcaagagtgtatgtgataaggtctggatcccaccagatcaggtctagacacgtgtcggcatcgggc

SEQ ID NO: 24046 - DNA, 2017 bp, Zea Mays
ggatcatccccctccatcacaacaactgcagacgatgagactaaagaagctgacaagctaatatgcccaaagtcataacgggtgatgcgtcacatatgttgtagctggagaagccgatgagtcctcatgtaagggtggtagccctttgtaccgatgtcgagatagctgggcttaaaggcaaagctatgctgaagatagccgaggtcgacgtagttgtggtcggtttgtgttggtggagcttcaagcacatgagaggcaacagagtgatgaaggagacatgtcgaggcaattacgtgtgggggggatgctgaggtcgatgcagttagggtcgatgtagatgaaaggcgataatgcaattgaggctgacagggaatcagggatggaacaggagggttgatgttgacatcgatgcagtcaaatcgcttgaatcgaggcatgggttgggtttgccagacccagcaatgtgttcggaacgaaaacgtgtgccaatgtagccaataccagatgaacgaggtagagggcctcaatcatatatcagcatccgagggaccaacagagaaggtctcaatgacgattgcggtgtgcagaataacaggtagaaggtgctgatgtagcatgcaactgtcgaagtagatgatgttggtatggacgaggcgacgacactaacaacgtggttgtgctggatatagtgtgggagcggacgaccggacgcgtcaaacccgaaggtgagcaatttgtgtgggcatggtcgagtagtccggacgtagggcatggtcgtagtggtgtagcggtggcctcgcggagggcggcgacgttctcatgctcacaggtagcgctctgagttgacaacaaagactcgatgagtaggacgaagaccttgtgcagatagatggtgcaacaaagattgcacatctgagtcatcgatgcacggggaacgacgatgtaggtgtatcgatgaagcgggcaacaatgttgcgacttgatgaggcaacacaacagaagccctgttgctcagagaagatgcaagtagtactcgataatggacgtcacaggagttgagtggatcagacataatcagttgtacggatcgagtgcgaacgaggtggagcaatgatgggagaagttggctgagccgtccgatatgtgctggcaatgacaaaccgacgttgtagacgtgtggacaggatgatcgagaagcaatgtgggaaggcgccccctcgacattgcatgctctaccagccacatggttgaagaagtatattgcggtgtagtcaatgtcgatcccaatgctggagtagtgcgcgaggtcgacgggcggtgggcaactcaatccagattagtgatcggacaaactaaaaaaggatattgtagcagcatatgagattcactgtggttgatgaacttgccctcaagaaacctctaggcacgagagggctctgtgaatgcgacttggcaaatcagtcagtgacaagggtagggaagcgtagaggagaggcacaagtgatcaaagcagcaattgtttggctaggatcacatgcaggcaatcagatcaatggtggcatgtgtatagcagtaggcaagagattaggtagggtcgtgtgagtagggcgtagattggccagctatcaccatggtggctcggtgttgggttaacctggcccaaggcaccgccatggagacacatgatgaggcgacgactagtgtacttcacgacgagcgcggatagggtgacgaggtggtctggtgccacaagaagtccctatatgttacttgacgatggcgaggatgacaactggatcaataggattcgttgcctaatggggtggcgctggccccagttgagatctatctcttccgagggggcacggtgcataagctcttagtggctagggtttgggcccaagtgcggttggacaagagtgccatgtactcttctatagcgcgacaccaattgggatcgacaatagcgttatggacggaagacagaacagacgaaatagacaaaaaagaagtcgta

SEQ ID NO: 24047 - DNA, 582 bp, Zea Mays
ggctttccatgaccactttagaggtggtgttacttttattgctcagagatgctttggatgttgttggtgggctactgctggtgctagtgctcgttctacaatggtgtaggaaagagtaatagtagtgacagagggagtgaggaagcagatgacacaggggagacaaatgggtcctatattctaggcccaaagttgacaactacgaatcaagttactatcaaaccatcataattgtgaccttgtgtggcccaattagcatgtttcgagaccccgatctgcaaattcaaaagcccaggatggcaccattgtccaagtgtagtgtcatgatacgattgtatcatgaatgttgcctactatcgtccgactttgaggttgtatcttgaatgtgaggcattgtgtgcccactggaatgtccatatgatgactagcaacacacacaaacacgttttgtggtcaataggcccctaatagagtgtttgcggattgtgtcatctagtttaatttcttggcaaaacacacaataatgtgtcctagcttgaaggcccctaacaatgagtctgtcaattatgtcctccattttaa

SEQ ID NO: 24048 - DNA, 382 bp, Zea Mays
ctgccaattgcgtacgactgtccttgtgatttcatgtggtgctgggtggcgttgcaatacctagtgattaaaagaggggtctcgtgctttgtgcgattctttcttgctgcaactaaaggactgttggttggccttatagaactttgtatttcttgctaaattatgtgctacctactgttggttagtatgcaattactgttgtttaatcgtatgcaattactgttgtttaatctgaaattgtttgtgtagttaaatcatatgctactctttacacgttatatatagttggtcaccgattcttttggcaatgtttgctcaaagggaagccttccccagagtaataatttttacggccttgcctagatgttatggccgaattctt

SEQ ID NO: 24049 - DNA, 373 bp, Zea Mays
tgcaaaggtatgaaattaattgactcatctcgtgtgcactcattcagcattgtcgttagtgaatctttctttactctttattcattatgtaaaggaagaggaggtcaccgaagggaagaggcttcctcttgaggaggtggatgagaacgcctgcatcagccactgaacagaacaagcaggcgaaattttgtgtggttggcatctgccacaaaaggattgaatcaaggagtgtgctctggttgtgaagtgataactaggctaccgcatgttcattttcaaaagttttcgtgtgtgatcgtgatgaggggtgaaaccgtggtttcagccaacgaacttgcagttcctgttgttgcttctccccctttttcctttt

SEQ ID NO: 24050 - DNA, 412 bp, Zea Mays
ctttcgctcattatagtcaactaaaacattcagtcttataattgcctaactcaatgtgttttcatgcaatgtaaacaagccaataatgtcatggcaatgcataaaaataaactgaacttgtatatttgtattgacaaatgaattgctaagacaaaaagtgttgcctaaaagtttggatataaagacaaaggtatcgtcagcttaaagttcttggaccaagtactggtgctaatttgaagaagcatcagttgtcatttatttggaaaaacacatgcatgaatattatttatccttgttagatggcaatgtcctgcttgatattgtttgagttacatatctgttatccgaacggtaaaaaaaaactagtttcataccattttgcacgatatctttgcagcaaaggctctccaat

SEQ ID NO: 24051 - DNA, 319 bp, Zea Mays
ggggcatcacgtggcgtgggcgaggccgcagggccgcgcagggcatgagcagggtcgacgggtccacatggggcatgggcagggtcgaacctgggtggagagtgggggatcaaaatcgacgagtgtcaaagacgacatgatgggagataatgttgcgatgggtggagtcaaggcaacaatatcccttgtggtgaggggtcaaggagtaaccgaggaaaagacatgcagtggagcgggggagagcttgtgaggagcagtggcagaggtattgggatatcaggcacaactaaagacacataggtggataggagggggttgt

SEQ ID NO: 24052 - DNA, 289 bp, Zea Mays
gtcatgagacaatcgggattagttgtgacggagggagccattgacaaaggtgcacctactgccgaagctgaacaagctgatatcgaggaagaaaatgttgatgaagaagaggaagactataacactctgatcccaacaaaaccaaaccacttggattttgaaaaatctactatgtctgaggccgacatgcccatgatgatgaagctgggttacttcgaagaagctgagaagaaacttatttgttttgccagagaagaaaccactccaaagccgaaaaatgacgaagtag

SEQ ID NO: 24053 - DNA, 384 bp, Zea Mays
ctccgcgcggagtggtgctcttcctgggcaaccttggtattcggaggcgtcagaattcctcgccgacgttgcccaacaccattgctccacccctcaccgtgattgggatcctctactgcacgacgtccggtaagaccgcgcctatatgattcgcgtaactgtatgctatgagtagacgatctagggatggtcgtggggccctatagcgaagaaccgacgggctcgccggtgctttctgcaaccgtgagctatgcgccaccgcctgggttttgtctgagggtagaagaacgtttgtggaccgtggatccatacgtggtcggccaagattagagtagagaaaatcgtttgtgcgccgtcgatcccgtgttggacggccatgatcgt

SEQ ID NO: 24054 - DNA, 343 bp, Zea Mays
aacggtcgagtgatgacgggccatgtcggtgttttagaaataacttggttactggtgacaccgacgttttagaaataacagccgagtgataacaggccacgtcggccgctttggaaacaacggccaagtgaagactggtaacgtcagcgtttttagaaataacagctgagttatattgggccacgtcggccgttttggaaataacggccgagtgattacatggcatgtcaacgttttagaaataacagctgagtgatgactgggcactttttagaaatggcatctggcccgggaaaaccccatttgtactgcgctgtcgcatgcctctgcattctgagcccta

SEQ ID NO: 24055 - DNA, 307 bp, Zea Mays
cgagctagcaagtgactgttggtcccactcactgtgccacatgttccaggacagcaccgagtggggtgggcgactggggcccgtcggtcagcgagcacgtccggagaaagacaccggcaattgggggcatgtcgataagttggaggagaaaggtagcgtctaccctagagaaacccgccctcggacgagcccaccgagcccaaggtcaagcgtggcgaagtctaacagggggtcgggcgtaccgaagggaagccactcaagtggatcccttgcctgccctgagaccaacccgtcataaatgatcggg

SEQ ID NO: 24056 - DNA, 1703 bp, Zea Mays
gctcgcagaacagggagcgtagggtaatactttgcgtggcggccgctgcgctcctcccctccaccctcctatccccccacctcactccgcttgtgcggccgcgtggtggtgcctcccgcggcgctgcggctgctctccgatcccgagcgagcacatatcctcgccaccttatcacgaggccctcgcaccgcgccgacgcgatcagcgcgtcgagccaccggagtctccccttgcggttcgtgttctctctctctacccgctctgctcccctatacctcgtcgtcgcgggatcgagcgccgcggggatggcttgcgcgtttcgatctgtgtgaccagatcgtttcatgcgcgtttgggctctcaggtttggatgggaaggaccaggaggagattctagggttgtggactgtgtttgcggtagggttttgtgggtttgtagggtgtcttcaggtttgcggtttggtgcatggatcctgatctggggccgggattgtttgcctagattcctgtcgttgcacttggatgctgctctgcctgattactgattactcaagtgagtgttggctggcgccgtgtgttgtagacaacagtggtctcggagtcagtagggggctggcagggggcatgccgaatgaatgaccctcatgatccatttttttcgttgaaacctttgagatcaacaagaactttagtgcatggtttatatttggttagtagaataacttagttaggccccaaagtcatataatcctagctccatcatgggcagtggagcagatgtacaaagcttgaagaggcataaagacattgttattaactagcaaacatgcccatgccctgcaacaggacgtacatcttatgcatttgctacaatacattttggaatcagactatgtactgttgctggacgcttgctattctaactcgtatgatcagaggttttgagtttgggtcacagatgagatagtaaaccaattaggactctagtctttaatttatcccatattactacttttagtaaaacaggcgaggactctgcttgtgggagtgtagggacagactgaccaatagagtgatgtaccaaaatttggaggaagaaatttctactctttaatattataatagtatatagatatagatatataggtgaagatttattattattaagtgatttgcaacaagggcagggacttccagatgaatgtttttgggtgttctttgttgtcttgcctccttgttgcttgtttgcaatgggtatttattgtaaaagctggtttttgctagtagaattgggtattatgcttgttgcatctgcacattctctactccatgcttgtgacgttcttttagaaggctgcaaaagaaatggcttttatgtgttgtgagtagtagaagtatatttctgcagctattttaatcatgtaagtgcatgcaaatttgaaggcatatatcatatttttttcttttgaaagggatgttcacaaactatgtgaagtttcaatatatgtaatagtacattaatagtacattttctctagtgcagcgatgccatatttttaccacttattttaccaattgcttactttcttgctatctttccattaccctgttggctcagggattgcatctcaagaatatggggagaaagaagaaccccattgtctttctggatgtatccgtaggtgacgagccagatgaaagaa

SEQ ID NO: 24057 - DNA, 272 bp, Zea Mays
ggcgaggctgcgatgtagagcagcagaggcagcgaggggtcgggactggtaagaattgccaggtctgacaggtgttgcttgagtgactcaaaggttgccgcctgctttggtccccatgcaaagtcttttgcgccgcgcagtgtcttgagaaaggtagactccgcttttcgaacttgaagatgaatctgttcagggcggccaatcttcctgtcaatcactggacatccctggttgactgcggggtgccatgttgatgattgcttgaatcttgg

SEQ ID NO: 24058 - DNA, 310 bp, Zea Mays
ctcaaagcaccacgaaacaagtagttctattgaaacaaaactcctaatcttcctaaaccttattcttgccatcatgaaaagataatcatgtaatctaacattctttgcaccccgcaaaagggagtaaatctacagaactaatggagcaataaagccaacaagaagccaataacattctgcacggcacaggtcatcgaagaaatgccaaaagctccacaaagagcacagacagcacaacaacacaatacttggttaaccaatgtcactatacttcatccaacaactcaactaagaaaaatatccaaactag

SEQ ID NO: 24059 - DNA, 345 bp, Zea Mays
gttggtgctcaccggggagcgccaccgtgggggctgggtttttctccacgccgcgactcggaggaagacgatggccttttggccattggatccgacattggcgaccgcgattagatcgtggccgtaggatccatgaccgacggccgtgattaaatcacgacgtaccaattcgctctgtgggatctggagcgttaatgcgataacagacggtttaggttagatcagggtggatcacccttcatccgttgattccggatcagacgatgggggctagttacccattttataacgcgttgatctaatctggtgcgtcggttttagatccgacggccctgaacgactgat

SEQ ID NO: 24060 - DNA, 385 bp, Zea Mays
cgcaaggcgataagcacgatttaccggggtagaacgtctcgttttaccacggctcgatagctccttctaaggagtcagtaatcgacccctgccttagtctataaaaggggagggtcacagactaacgcaaagaaggtggacacacaagtgacacagacaaactagaggagctagaggaccatggagaccggagccgaggagcgaaccaccgtgacgtccaaggcttagcagagagctctagtcccatagtccttaggtctagccaggcataagagacttgagagttcttcttccctctctcgcccgcttgtaacccctaatatgagcattgagcaacaacaatactgctagcgcgagccaccgaagactagatgtggggacattc

SEQ ID NO: 24061 - DNA, 346 bp, Zea Mays
ctgggatatgccaaaggagaccaccgccaattctagtgagggtggtctagtccgactaaagtataccttcagatttagggagaagtttggtgagccaaacgacgactggctgaagtgtatcgaagttactagtgatgagctacttggagcatactccaaggccgaagataatgctttgtccgcagcctttgggggtcggggcaagaaaagattaaacagggtatttgatgctattggcttcatataccctgattaccgctacccgctgcgagggcaagagaaaaagaggaagactgccgcttcggtcaccccagctgagcctgagccgaagagcaaaaaggtgaag

SEQ ID NO: 24062 - DNA, 469 bp, Zea Mays
ccaaaagtggccttgcctttgaccgctgatctggaccgtttggggatcgctttgtgctatgttggcactgctagtgaggagactcagatgtttattcaatcctccctcatggagagagtgcgtgcggctcagcagcgggatcgattattgcaggaagctcgaaagagggttggtgatggtaaaccccgtgagttcactattgatgagaatgatttggttcattttaggggtcgtctttgtgtgcctcataaattagaggtgaagatggatatctggagagaagctcataaaacgccttacatcgttcaccctggcgaaaccaaaatgtaccgagatttgaagcaaaacttctggtggaagcggatgaaggttgacgtttctaagtatgtggctgcctgtgaagtatgtcagcgcgtgaaggccgagcataagtggcctgcaggtttgctgaagccattggaaattccgg

SEQ ID NO: 24063 - DNA, 338 bp, Zea Mays
cgcttttgatatgtcaagcttgacaaaaagtgctgactgtttgctcttatgaagtttttgaataactttttgaacgtagaggaaattatcgtgaattgaacgtttctgaatgaacgcgttttgggctgtggagacgatctcgttcattcttggcgcaagtctatttgctaaaatcttggttaagattttcataaaactgttgatgagactgatcggtctaaacatgtcaatcctgtcagccccttccctcttttgcaaaagcgtgatatttgcctcattaacaagatgcaggcttttgcatctatgattatagaaatcatgaatagcattggatagat

SEQ ID NO: 24064 - DNA, 365 bp, Zea Mays
agccgaccaacgtcagtgaagttcggagcttcctgggaatggcagggtattaccgccgcttcatcaaaggattctccagcatagcaagaccgatgacagaacttctcaaggaccataaatttgtgtggaccccaaaatgtgaaggaagtttccagatcataaaggaaaaactcacaacgacacccgttttgtcactaccagatattcatcaagattttgtcgtcttctgtgatgcctcgaggcaaggcttagggtgtgtgctaatgcaaaacgagaaagtcattgcttacgcatcgcgcctactcaagccgcacgaacagaattaccccacccatgatttggaattggcagccatagtgcatgcc

SEQ ID NO: 24065 - DNA, 389 bp, Zea Mays
atgttgccattttccgctgaagcctatcattgagccccctcataaaacaattctttttcttcaagtcagtatccacctagtcaatggcatactgagagaggtgattgaatttattgagatactgcatcaccgtatctccttgcctcaactggataaactcttctagtttcatctggagtactccctctagaacataatgttcctggaatgccaacttgaattcttcttaggtaacctgatgcccaacaggctgaattgctgaaaattttgcccaccaggtactggcaggccctcttagctgttgagctgcgaacaggggcttttgcgtctccgtgcatcgaattaacccaaactttcgttccattactctcacccatttatcggcttct

SEQ ID NO: 24066 - DNA, 334 bp, Zea Mays
tgggaagcgagccgagctgcggctccatctctttggctttgatggcttcggtgccgcctccaatggtgaccgctggcccggccgctgaagacgccacccagggggtcgtacaagatgtcgcggagatggcggccgcgtgcttccagcgtgaccctactgatgtcgagtaggtcatacctgtagacataaggctagggtcccgcttgaaggcggatgtaataactttgtttttgtaaggtacttttgagtactacttatcgagcactattagcgcttatctgtgtattatttgtccctgttgtgtgtggcgttgccgactcttccctggtacctg

SEQ ID NO: 24067 - DNA, 648 bp, Zea Mays
gcttcattggagccggtgtagtgtaggaagccatgttgggaaagtagttggagtagtgtcccggttgtccacacttaaagcatgccctattggtggttgtgttagaagcaacgggtcctgctggggtgcttgcttgcggaggagcagttggtgcctgttgagtttgctgcccggaaccaccacgagctggtgtacttagagtggtagtatagcgaggacgggaactacttccagcctgtccttggttagcagcccttcttttctctccaaactcgcacctcttgttttccacagcaatagctttgtcaagtagtcgttgaaaggatgaaaatgtgtgtgataccagttgatattgtaggggtccaatcaaaccgtccagaaagagctcctgcttcttctcatcatccccaacatccctaggagcatatcgagatagctggatgaacttgtccctatattcgctcacggacatacttccttgcttgagggatagaaactccttcctcttaatcttcattagtcctgcaggaatatggtaactcctaaattgggttgagaattccgcccaggtaattgtgttgacggtggcatgagcagcacaatacgcatcccaccaatccgcagcgggaccagtaagacgacctgacg

SEQ ID NO: 24068 - DNA, 316 bp, Zea Mays
tacttctttttaatctaactagcagttcaccattgtcatcaagtaatgctgcctcctgaatgggcggggcgaaaacacctaaacccaacacaacacgaaaaagcacacaacgcagcctcgctagccgaaggtgaacaaaaacaacggagttagctataaaaaggagtaggtcccatttttaactcatatctttctcgaccttaggtaaaacttgaaataacatatattataattgttggcgactttttgggcaaaatactaatgatctctagggtttgctcgtgcagtaccttggggatttctctgcaggctggtg

SEQ ID NO: 24069 - DNA, 529 bp, Zea Mays
acaaaagtcccggtgaagtagttgcagtacatgcctattacttcgtggcttaaaaagttgtttctaaatcaggagacaacgaagcaaatgagatggcacaaggaaggggatcatcaggaccaagatccggatatcttttgcatccatcatatggcgaggcatggcaggcacttgaccgttttgatctagaattagcaagggacccaataagtgttcgtcttggtttgtcgacggacggattcattcctttcagcagaaattccactccgtactcgtgttggccggttttcatgatgccatacgatctctcctaccaaatgcatgaaagaagaggtcatgtttcttgctttggttattctgggccctaaggatctgtgtacgaaaatcaatgtatttatgcaactgttgatagaacagctgaaagtgttgtggaaagggggatggaggcttatgataaccatctgaattgtagatttaatctacgagcggcatatctatggtcaattcatgatctcttggcatatggcat

SEQ ID NO: 24070 - DNA, 427 bp, Zea Mays
cgtaagctaccaaagtactgtgaataataggaggaaactgcgaatacccacagctgcggactctgagaaattccatgtgccagtcaacactataagctcccttgttaaagaatttgatgatcgctgtgtaaaatgttgtagcccaactgcctttcctcaagcacaagttggaaatctatcggacctccatcccttatactttaacctgttgcatcagtggattcctttgggagtattgcttgtatcacctagttgtgttaacgagcagaactgtgacatcctcctgcgctacacaagcactgggcaggttctggagtcaaatggagcacgagtaaaaacaaaagatgatgccactaatgatggtttcttaggcagctgcattggtactgctgagagatgggcattgactggagcatatctcatcttt

SEQ ID NO: 24071 - DNA, 327 bp, Zea Mays
gctgtggtgaaatgagatacagagtagtactcatcgacaaaatcctccattctgacatccctaaattctcacaaagcatggttacatggtttgcccgtgtactgccactctttgcaagaacattcacgcaaatgagcattgacaatgtgctttgaatgcacatcattgttatcccttacctcagcaatgtagttgtcagctttacgaactgataaatgacttaaacctcttgttctgtcgtgtaggatatgcagaaccgacggtaaaatccttccttgcaacttctgtgcaatcctcctccgcctgtgaaacatctccataatttcc

SEQ ID NO: 24072 - DNA, 513 bp, Zea Mays
gtttttctttttttcaaaatttatttacttgccaccttttcttcagtagtgaatacttgaggttaatctctgtctgacaggatgacacacaagttctaggcaatgatgcaaatgagattcaacagttttataagaagtactgtgctagtatgagtcatatttcaaaaaagagaaacttgtaaggaatctataaactttattagagtaaaaacattacacctgtttgttatttctcctctgttgtactgttaataaacattttttaatattgaaccagtgaggagatggctagatattaccaagtggtgtatgctctttatgaagtgctacaggatgtaacaaataaaaacattgatgatcaggtgatgtcttgtaattgtcttgttagatatatgctattttcctatttctttggtcaacttcacaattttccactctaggtgttgcggtgtgcagacatggttgaggaaaatggtcgtcatttcaagaactacaagtacaacattattcccc

SEQ ID NO: 24073 - DNA, 1433 bp, Zea Mays
gtaaccgactccaacaaacaagcccactatgcacgttggttatataaatcgggccacacccgcctcagccctagctatgccaccttgaagccatcaggagccaccacactgagagagagggaggcggagagcgctgcagagggcaaccgccgatgatccgagcccacaccaccgtttcgacctcggtgtgtggattagagggctcatcctcgtgcctggagtgcgtgcatggcctaatcaagctagaatatggcttggtggatcgtgaattggtcgtcggggtatgacctccgccgatggaccgccatgcaccgtggctagagcatatgggtgcacgattctcggtaagactcccaccctctgattctctatatgcaaggcatcgattatgacctagggattctcgtatggtgagctggtgtgcgggatggccctcaccgagaggcactgccaaggggttgtgcacgtgcggccacgtgctgttcagggatgaggaagatgggtcttgaaccattgatttggtagacgagggtggagattagaacatcgataccggttgggagtggggaaattgggccgcacgatcgtggatcagtggatgagatgagatcgaacataataaaattaggagtgttgatccctgatctcatggtcggggcttcatacaggttcgtaagtgcaaggatttaatctgagccattaaattttgatcggacgacgtagatcagctgataccccttcgttttcgtaaatttgttaaagagacccccctggtttctattattcaaccccccgtctacctagttcaaaggaataaaagttgggtcctcggttctttgcaaaacaacccttggtatttcggatcaggtccctggtaggtgtttatagtataaaattaatatcaaaatcaacctaaaaattgtgaaattcgtatcttgcacattataactctcatttagtctgttccaattgtgttagcttcataataatattgtctacacagtaacaacatcatttataccttatcacatatctttataattagatattgcaaaacctatatctattagagtaactcttatgataaactatccataattataatctaactaaagtatgatctctaatcaagttataattaaatttgaattaattattcctttaggttatcttttctcatgatttataaaaccaacataagacctagtcttaattgcttaatcacgtaggtcttccgaaaaccatattttttaccttaactccgattttaatggttatcgaacctacgatctcgtagcgaagcgtagaatattcttacatattttattcttatgctttgctgtaatgttaccatatcaattatttgcttgattgtatgttttgctatgcatagaagcgaggtgatgaggaatctgaagatcaacttggtgaag

SEQ ID NO: 24074 - DNA, 316 bp, Zea Mays
gtttgcgagcttcgtgatatacacatgtgcttgttgaatgtctgaggagaagaaggttgtggaccctgctcttgttgggttttacgaggctatggaaaaaacaaacacagagaagatcacaaacgagatgatggtagatttgtctgaagattctgacgatagtgatgactatgatgtggaaagtggggatgaggattccgaaaatcgtccctggcggcgaagccataccatcttcagaaaagtcgtccatcaaacagagccatattgatgttatgaagggaagatacttttgtgacatgtctgttgtgagagttgg

SEQ ID NO: 24075 - DNA, 316 bp, Zea Mays
ataaaagcttatgattttagcgaaaatgattagtgattatggcgaggaacgttaacatgttttatttgataattttttcacagaggactaatattttgacagacccttctgttgagaatcttttttctagcatacattgatgatgaaatccttgaaattatctatcttttcagcacttatatgttgaattagtccattagcggttattgcttttgttatgcagtgtcatagttgttaaggcatcacttaagtggtaaggcgaggtttaggagcaaggcgtccgcctcgccttgcgtccgtgactaaggcgtccgcc

SEQ ID NO: 24076 - DNA, 564 bp, Zea Mays
cggtgggcctggtatctagcggaggggcgtgaccttgggagcagaggggaagaagccctggcaaatagacgatgagttaagacttatcggcatgatgattaggctcaaagaaaaagggattacacttacttggggccttggaccttccagtagggtcccaaggtttcaggacagaacacacccgggccttaatcagggcccaagcgggggtacagtgctgacacgtgtccagacctggtctggtgggatccgaacctatccgcatgcactcctgctccccgctcaggcggagacccgatgctgccacgtggcatactacgcgtggcttaagccaatgggcggaacctagcatgacgcctatgggctacacacgccttcgcattcattacggataagacgtgtgcctgtccattccactgacagacggcgtgctcagtccacgatacatgggccgtgcagttactcacacgttaccatatcgagggcaatgactcaccattactcccacgttaccaggaaaaggttactacctatcaatgctgcatggactgccgccatcatgac

SEQ ID NO: 24077 - DNA, 300 bp, Zea Mays
cgacgcctggctgctgcacatagcccttggcgacgaggcgggccttgtacttgacgatgttgcctttctcgtcatgcttgactttgtacacccatttgaggcctatggcgcggtgaccacgcggaacctcggtcagtaatcatgtcttgttgtcatggatcgacgccagctcctcctccaacgcggcaacccaatttgggtcaccatcggcctccttcaaggtcttgggctcctccacgctgcacccacgctgtgaatattgtccagcgttcggtatcgaagctcccccacatcatcggc

SEQ ID NO: 24078 - DNA, 274 bp, Zea Mays
agacaatagtgatactggaccgcgggttgattcttaagttttctagggtctctttagaaagaaagccagggccgaaggggtatggagaaattagggccgcacgatctgatccggacggcccagatttaatgaatccgagattcaaccgtggctctccgatcaccatctaacgctcgagaacacacatacataccgagcacgcgaggcggatggatccgaaaccgacggtccaaagcgaaccgtggcagctgacgctaggtgcgctaatccagac

SEQ ID NO: 24079 - DNA, 271 bp, Zea Mays
gcttttcatccgggggatcttttgttagcggtcagaaatgacaagattttgaagacaattattggtccgtgtcatgtgcagtgtaaacttgttcgctcgtctttattttagcacaagattccttggtgatatcttgttcgatctattgaagattgttaagtagagtttgggtcatttaagaaaaggtgctttgatgccgtgcagcctgaactctcttctcagaagctcaatatatatatagacaatttgcagttacttttgtcttaactct

SEQ ID NO: 24080 - DNA, 603 bp, Zea Mays
acgccacggctggagctctcaagcgacagggacacaattagatccaccccgaccatttcccctccatcaatttcacctaggggacactgaatcaatcagttcacggtgaccgagcggatggacaagaggatgaacatgttccgatcaaacagcgatggggatggccaaattgaggctgggtaaaggttcacgggttcaccagggtccatggacatactttggtttgggcagaacaagacccgaagagcgggtcgacggtgaggggggtcacggcggtgtttgacagcgcacgggtgcgttccggtgatgggcttcggccaaactccaaattgccgcatctaggagcaacaggatatcaaagactaactaaaacagggagtaatttgataattactgaccagaggaacactggccacgaaggagttcttcacggcggagcaagaacagaggagagggagaattggggactgcgttagttctgcggtgtactcgattcgagtgctcagttgttgaggtgcgggatgtgatgaagcagcggagtccggactcaatttataggccgtcgaccagagttggagaagaagtgtgtattcccgatcgtgc

SEQ ID NO: 24081 - DNA, 974 bp, Zea Mays
gattggggcaacgtctagggtccccaagcgactgacacgaaattggatctaccccgaccatttcccccaacataatttcactaatggccacaaggtttggtctagccacggcgaccgtggtcaaggcggaccgatgagcgcgttcccgtggattcatggcggtccagtacaattaaggggttcaggaagctttagaagagcctacggacgctaaaacaatcaacagagaagtatgaagtcacctggaacaggctgaccatggggagtatacaccgcacggtgttcttggtggatttgggaacaatacaaaattagtgcttactggtgagggtttggggatacaggtaggtgcagtagatgctggaatccatggcggagccgaggaggtgctcaatttatagttcccattgtcggtggtgtccaattccacgaagttgtgctggcggccggaggaaagcaggggtactggagcaggggatgggtggcgttcaccgtggcacttcctccggtgagcactggttgaggagctacggcgattatcggtgagctggtgcggctagtgacgacgtggtgaaaagcttggagcgtggcacaatcgcgatgaagcacggcaactccgatgacggccatacggccacgtcgccggtgcgaagggcagggaacagcgaggccacaatagttcatacacatccgtgactagatcttttcatggtgagcgaactccacatgcccatggcacgaatcccggcgaagaggtcgtcggcggtgagatttttgacgctggcggtctgatcttcaacagagcactgtaccatggctaaaacttgattcagtcgcctgacaacccaacttggagcgagattttctcttaattccttgtgacaacacaagtcaagcattgcagcaaacttggagagcattataccaactacatctttgctctatggtgttgtcacaaaaggccagtagatcag

SEQ ID NO: 24082 - DNA, 461 bp, Zea Mays
gttatgccccggtttgatccagcccgatcatcagtcgatcaacggcccacggtgactctcccagatctaatcccatccgtcctacgtagatccaacagtgtgcgtgatttcttcccagacgacccaagccgcggcgccgccagcatgcccacgcggtggagagcgaggcaagacacccatcagcctcccccgagcaccacagtcaaattgaacggagctacacgatgcgggtatagcagcgaactgatctggggagttcttaccgtgcttctacgcagtagagggtatggccacggcgcacatgtgtgttgcagcggcgcaggaactccgatgagaaattctcgtccacccacggcatcacgaggtccgattcgacttcaattatcatcctcacatgctggtcacgctactgaccagaatcctgaccccgaacaccatgcaccgctggattcgcccttggc

SEQ ID NO: 24083 - DNA, 409 bp, Zea Mays
gccggtcgtgccattgttggtgctgcaggtttggagggtacttccagagctgctgttgactgtccagtggagctgcccgtgagcatcaaacgacgttcatacaccctggccagatgcatagcacgctgcagcgtctctggagtttgtaattccacatcagttcggagaggttcgcctaagcctgctgtgtacatgttggactattgtcgatgagacatgtcgtcacaacgacacaacagggtcaagaattggcgcgaatactcttccacagtgcctgtgcgcttcagttcttttaaatcagccatgccattgaacctgagtggtggcccgaagcgcatctggatgaactcaatgaagcgtgtccaagtcagcacgccgcctagatcgcgctccaaggcatagaaccact

SEQ ID NO: 24084 - DNA, 290 bp, Zea Mays
ggacgctccggcgaggttctgggccggccgatcggggctatggctgggttctccgagcggcggccatgaaatcggggctatcctgaccatttcccccaacccaatttagctattgatcaactaaggagctctggccacgatggccgtgagcatggcggctatacggtcgtgttcccagcgattgggggcatctacattcaaattgatggcttggcgagcatcactgagctatgagaagacttaaacaaggtttgaatcggacagagctttaccagaatcggctggccacg

SEQ ID NO: 24085 - DNA, 511 bp, Zea Mays
tttcctcgtcttcgtgaaactcttgcccaatcgcagttaccatcggctcagtgcaggcatagtcagatgattctccggccagcaggctaagaacaacatccatcttagcatcatcggtgctagatagcatctcgaagtgagtttgcttcttagcctcgggaagattttggaggggagcaattaaggcctcaatgtcctctgaggaggatcgcattctatggcccgggctaccatctcgaacaggaggattggagacaaagtcagagaagggactatgcggaggcaggttccatgcagagtaagataagggggcaccaacattcgaaaccctgccccttaatatcatatcaagtcggcttagcaggtcctcattgggaatttgcctgttagtgactcgggtagaatcgttgacaccagtgtacaagtaagcaggttagactctgtccttcaaaggttgaatgttcttgaagacaaagttagcaactacggcttcggcagtcaggcctctgtc

SEQ ID NO: 24086 - DNA, 576 bp, Zea Mays
gtgatgtggagccgtcgcgcggatggagagcttccctactgctttgatctccggtaataatgcctctctcgagttatgcattgcctgcgcctactttttcacccagaagtgaccgatggggagctcggcctcgatggctgtttctcgtcgatgccgccgtcgtggtctgcatggccaccagtcccgtgcagccgtctggtggggttgtgaggtagaagaaggctgctagccgtcggatctgtgatctgcgatggagatgggtgtgtgtcgatgcgtgcttggcgacgtggatcctgtattgggcggtacagattagaagtagaaaaactcttcgggctgatggattctcgaccgtaaatgggagatcgttcgtccaccagtgcacatccgattcgcatagcacggttttaatcctgatcgttagattctaatctgacgatataacatcctagataccccctcggacggaccctttcgcatttaagtccctgtaaaacttggaaaccaacctgcaatcctgtcagtgggattcttagtcttaaaaccttttgcgcagtggaccctgaactttctaat

SEQ ID NO: 24087 - DNA, 284 bp, Zea Mays
gggagatggctaagagtatgggttttccgaaacttgaagaaggtctttcggttctgtcgaaggatgaacttgctgatagccttgcatacaacaatataaaggtatagaagttaactttgaagctgggaatgaagtattttacttgtcatgctcaattcttttctcctttttgtagggcttaattcttagtaatgccatgagggcacagaagaacgttgaagacaaaggttatacgatggctcttaacaatcttcgttcagaggtgattgaactgagaaacgaag

SEQ ID NO: 24088 - DNA, 497 bp, Zea Mays
atgtcttaattaacatcatcaacgtgaaaggtaacagagtgctcaaagcctcaaactgggtagttcttggatctttcagtggttttttaagttagcttgaactttcgatgtgcacaaacaagtcaaaaacacttgtgcacagaatactgagtctaatgtcttaattgacgtcatcaacatgaaaggaactagatagttcttggacttttcagtggttttttaagttggctcgaactttcgatggtattttacgattttggtggtctttccgtgctaagtacataacttctgcaatctcgaccagcaagtggatagagaagatggagaataaaggaataagccgtaaccatttcggaacccaacaaattcaatacttcaatctttataaagtatgtatatcccaaaataatgcaattcaactgaaattcctcatgatgagattttgtaaaccataaatcatggagaagttttgaagggaccaacataatgaacctgag

SEQ ID NO: 24089 - DNA, 404 bp, Zea Mays
actgtgatcctcagtcatacacgatcttcttaggcaacccatgtagacaaactatctgagtaatatacaattccgctagcttggctcccgtctaattagttctcacaggtatgaagtgagccacttttgtcagtctgtccacaattacccaaatatagtcataccctgcaggagtgcggggtagtccaacaatgaaatccatgcctatttcttcccatttccactcgggtatcttaagcgggtgcagtagtccagctggtctttgattttcggccttgactctttgacacacatcacacttagccagatgtggatcaacatctcttttcagcccataccaccagtacttctgcttcaaatctagatacatcttagtgctgccagggtggatagagtaatcagaa

SEQ ID NO: 24090 - DNA, 385 bp, Zea Mays
ggagaatcaagttgattggctcggcaagggcgcttcgggcgaacactgacaggcctctgaatatccaaggctttaccagcttccgggagagacgccaccaccaatgtcccagcaggagcggcatcagaagaatcctcggctaacatatcaagcatggcacatatatctgcatcactgggatccaaaggcacctcaaaatgaacctgccgttcatcatcaggaatttcttcaagcgaagcaaccaaagcactaacttcttcggcagagggtcgcactctaaggcccaaaccgccatcgccagcaggaggacttcacacgaaatgggtaaaggccttggaaggaggcaagttcctggccgagtaggcaacaggggcaccaacatttg

SEQ ID NO: 24091 - DNA, 707 bp, Zea Mays
cctgatgagcgggagttcgatgtgaattgagtgctgtccagatgggtcaggacgaggaacatcaaaagtgttggtcctggtcttatgctgttgtaaattgaaaattattaagtaagtgtatagcatatcactgaatattatgttgaaattctatgacaaacaaatatataaatagaatcatgccttgaattgtgcatcaacgggtgatacagctgtgtagcaggtctctgaggagcttcggaactaaaaaaggcgtgaaagatggagtaaaacttatacaaacatattaaattgataaatgagattcatatatttaatggaaaatgcaaaacaacatcacaaatatgcttacaaacgggcataaaggtatgtgaacgttatcatatgcatgtaaataaatgattgacacataaaacaaataccgagcaatgtccaaatgcttcttctcctttgcgtatcttgcccttgtcagctcttgtcaaggcttgaataatattcctatcaaagtatttgattcgtggtgttccacgtttgttctggggtgccgctgagtcatgcaaatgatccaaataatacagctccaaaaggcataacatgagtcattataagcaaacaaaagcataaactacgtgtatatggattttgcatacaagattatgggtacatgtaacagacaaaaaaaggatatgcttacgagaataacgatg

SEQ ID NO: 24092 - DNA, 327 bp, Zea Mays
gagattacaagttgggaactatgagtgttgtgggtcaaggtgagatgaaaatggtagggatgcttcctagccttatatacacgaccgaggagagctatcccgcacaagtgattaacgtaatccattcgcctatctccctgtttgtagcgaaccgtcttcctacttctctagaatcctcttcattcatccgcccgagttaccgccgggggcttagcctatctggtgattgcaactgtccgcccgatatgctcgtgctcctgtagcgcttaactcgggtattggcctttatcggttccaagtgggcttgcctcgcctcgttgccttcag

SEQ ID NO: 24093 - DNA, 521 bp, Zea Mays
aattaacagaagaacccaaaggagtcgcaggatgaggcagacgaggagctccaaactgaggtggtataggagcgatcggtgcaggagtaggcatggccaacaactgagggaaacctggcataggcaagaactgaggagtcccaggcatataaaactgatgctgaggggcggtagagaaaattttttctcagcagttgccatcatgttgacagtgccctgcgaagaggaagaagtcactagctcccattaaagtttcccattgggattcctcctacacaccacatccctgtgatcctggctgcagatacagcacctgccactccactgacactcggcacgacgatgcgcttcaccacaacggaaacacaccaaccccaaccaatgcttaggaatagctcgatacctctgagtactccctcctaaagtacccaattcagaggacttgccacgataggggtcgtggcgctggtgttgggactttcccttcttgtgggctggagccccagtgtagcccttcctcg

SEQ ID NO: 24094 - DNA, 384 bp, Zea Mays
aaaatttaagaattacatcgtagtagaccgctgttggtagtctatccatcgcctgtgacagtgccccggtgaatgccacgatagacaactccggtgactcctcccctttctcactacccacccttccccgcctaaattcgtcgtgctcgcaatcgcacactataaattgatgccccagtgagctccgttaggttataacgcacccagtgcaccaactctcgcctctgatcgtccaccatagcctcccaatttagcagttcacccaaatatgttttctgcgccaccgtgaacgtcgcgcagtggaccgccgtctctaggtccgttctcacccttgttttagcactcaggcatgcttgacatgcttgtcgacccgatcaattgagc

SEQ ID NO: 24095 - DNA, 311 bp, Zea Mays
attgccctgaaaccaaggccaccaaacacaggatggccagaaatcagccagccgacaatcagcgagttgtcacgcatacttaccacccctagcagtaccaccaacaacaattccacaatgagccgatccttcatcaacccaatcacatgtaccaccaacatcaagaggtacaagtcctccctcctccaccacatcatcaaaatcctccaccaccagcacccaagcaagaggacttcgccgagcagcctttctgtggggtcatccacatgattaccggggggtcaagcgcggacttcgacaccaaacggcag

SEQ ID NO: 24096 - DNA, 321 bp, Zea Mays
cctgggttaagtaagcgtgagcatgtcacaccgccttaagtcattgccgacttaagccgattgctccgttagtagggtatagtggtcaccctgagtcgagtaagcatgcaaaaaacaattcaagtgcctttgagaatgaagtcattttattgatggtgtatctcccaattacagaatacaatgccgtcccaatagcttttgaagtctagctaggggtaaaacttcctgagatgctctatattcgatgagttccctatttccgtgccatccatttgagtaagacgatatgatctagggcgagtgacttctgctactatgaat

SEQ ID NO: 24097 - DNA, 339 bp, Zea Mays
ttcagattcagtacgcgcgcgtcgttttaactgctcccacacatgcatgggcagagactctttcgccactcgctgtcgtcgttcacgaggggaatcactgtagcaaacgccatatattttcaccatccatgcatgagatatagatatatagctacttagctagctagctagcactgacgtttgtacatgcatgcatagcaagcaagagttgagcggctttgcttgcatatgcaacaataaagttggcaaagacttcgtcgcgatgccgtggtacacagtgaacagcattacgcacttgttgactaaggatctgcgttggcgtttactggctctctctcc

SEQ ID NO: 24098 - DNA, 322 bp, Zea Mays
cagagggcgagttcgcagtggccgaaaaagcttcaaggtgatgtggccatggccccgccggtgacgtgcccatccgagcttcaagggccggatccaagcgttaccgagagcagacgagggcgaaatgtggggcgcggacatgaagggagcataccagtgcatagcgtggcgataccccatccgcggatcggtgcggtcccccgacgaagcatcttcaccggcgagcaattgaccccaggccccatcggcattgtggacgatgaacgacggaggcggcttcccccagtccctctctcctcgctttctatcactgctgtccgcg

SEQ ID NO: 24099 - DNA, 343 bp, Zea Mays
cgaagatgaaggaggcgtactaccacggggcgatagcacgcttcctgtgcggcggttcaccttctttgcactcgaaggccagcatgccagctgtatgaccagtgggaccgggcccccgtgtcatgggattgatacccagtgtgcatcaggggagacttcttgcggcgcttcgaggcgggagcaggggagtctgcctttaaagaggggttcatccctcgagtagcagccatgccttgcttctctcccactcgcggcgtcctttcgcctctgagctctctacgcccctttgccttcaaggtctctgcttcgtgttgccgtagtttgccatggccttatgacttca

SEQ ID NO: 24100 - DNA, 290 bp, Zea Mays
atcttagtgatgcttgtcagtgacacttgtaccatgataaaactttgttcattgtttaatatacatattctattggtgctttaagtttgtttcaggtgtcctgtctgttattgttgtttgaagctattaacttgttttactgaatttccattaacacagggggcgctctcaagccaacagacattgatggactgtgggttcatgttacatgtgcctggtttcagcctaaagtatcatttccggttgatgagacgatggagccagctatgggaataatgagcatccctgta

SEQ ID NO: 24101 - DNA, 279 bp, Zea Mays
cttaagtcggcgatgacttaagacggtgcaacatgctcacaactactcgtcttagggcgacctctatgccttatcagccgagcaattggaataaatcaagaaaagactccaaaaccagcacgacacacttacttccgcaattgttcaggatgactgttgaattctaacaacagaaacaaaatgttatagtttttagcaccaaggacacattctagtaccctatccaccgagtacccgagcacaatgatcacgcacacatatagttcacaaatgcattca

SEQ ID NO: 24102 - DNA, 450 bp, Zea Mays
ctcggtatggattgtgaaaagattgatgtgtgcaaaaataattgtattcttttcatgaaggagcatgcgggagagaaaaaatgtcaaaaatatggacagtctagatttgtggaagttgttaatgatgagggtgacaaggtgatgacagatgttgcacataagcagcttcgctacttgccactaactcctcgagtgaaacggttgtttctatctaaaaaatcgctatgcacatgcgatggcacaaagaaggtgtccgtgagaacgatgagctaatcgtgcacccttcagatggggatgcttgaaaggctctcgacacgtttgatccagactttgcagctgatctgaggaatgttcgaatcggcctcgtgaccgatggcttcacaccttttggtcaaatggcatcatcatactcatgttggcccgtctttgttattccatacaacattctac

SEQ ID NO: 24103 - DNA, 300 bp, Zea Mays
gagcaatcttcttgaaccctgacatccgagatctgcatagcatcagcgtgcaggagaagcttctcatataagggatgatggacacagtgtgtcgcgcggcatgggcgcactgtttgacaatggactagacaggtgcgccgtctgcaggatggccctggcgccgcctgctagcggagtggacaggacgcattaaatgctgagggggcacatcgcctatcagcagggtggacaggcggcgcgtcctctccgcaataaatgcagagaccgcgtggcctagaggacttacgtcaggctccgccc

SEQ ID NO: 24104 - DNA, 472 bp, Zea Mays
tcggcatcaacgatcttgtgatggacaacgaggtcgtcttgctactttctgtacttaatatatatgatacatagttcccctgcgcgttcgagaaaaaaaggtcatggtcacttggccaactataaatgttggacaactgatagattacaaagagttggaaaatgtgaaaccctaaccctaacctagggttgggtgtatattatataaagcaattaggtgggccaatcccattacaaaggggtgatcaagtaaatacaaggggacactagcctaaccctaaacaggagtctaacacccccatagtcttaactctatcttgtacaaatgttgagactggatcaaaactcagtgaatacactcaacggtggccccttggtgaagatgtcagcaaactgggacatggtcgggacgttgagaatgagaacatcaccggtggcgacacgcttgttgatgaagtgaaggttgtgttggt

SEQ ID NO: 24105 - DNA, 754 bp, Zea Mays
ctattttaatttataagttattttcaatggaaagcatcaaattaacaaaagacaattgcatgaagaaacgtcaaagacatcagattatagccaatggggaacaagagcagcaaccattagttcatgtaagtaataaaatgacaataaataaaagtaaacttaaaaggtgtgcatgtacaaactaacgtgactatgtgagtatacaataaatcatcaacaactagatatggtagtgtcgggatctctaaatagtgtacatatttttcctaataatgataaactaactagttgtgcttcataacatatggatgttggtttagactaagattattattttgtaaaacaagtcacttatatattggtatcatgagctaactaaaaacaaaatagtcttcttttccattgatgcggtgggcctgacctgttctagtgctaatgttttatacatatttgcttgcaacttgacatatatggagtggttaataatggaaaacgaagatggaatcatgtacagaggagatcgatcgaatcgatggtgggtatatatcacaccttgttgtgcgagtgatagtcgtagagtagcgtcggcgtcaccgcctaaggactgagccctagggctaagggtgccgacgtgtcatcgaaaaccatcatcgcaagccccaggcctagcaataaggtcgtgccacacggtggggactactacgaggaggaagatgacgatagcgacttcaggtcccaactgctattggaaaac

SEQ ID NO: 24106 - DNA, 278 bp, Zea Mays
ggcgtaggtaggtgtaggtcatcggcgagcttcaatctaggggcctcgcgcagtagaccttcgcggaaaagctcagggagcttggcagggccttcgcgaaactgtcctcgagctcggattgggtggtggagatacggagtgaccggtcctcgtactccggcagcggaccgtgaatggctggcggtggcggggcttctccggcatggtagagttaactcgagcgagtctacaagctgtggaagggtgcggggaagcttctgtgtgcttggttaggtgat

SEQ ID NO: 24107 - DNA, 402 bp, Zea Mays
cgagcacaggatggccggaggcagactcggcaagccttcaacatcaccaggagccacatagaaccaaacatcccaccagttaccccacttgttcctagcgtaggggactatctccacaaccatagccgaagtcttcttagtcctcagcgtgaaggtgcacgatccaaattgggctatcttattccctatcttcctcttctgccaatgcaagcaataatttttggcgaagacctccacggacggctgcccgtcataggaagtaactgcccaggcatacttcgcaagcgccaccactgcgttaggtgtcaactggtggacttgcacctcaaaccttcgcaacacctccaccatgaatcgatgtgtcgggaggcgaagaccgacagcaaaaaacgtctcaaaaac

SEQ ID NO: 24108 - DNA, 298 bp, Zea Mays
ctgcttactgcttcctcccgaactccatctctacgtaccggattataccaaagccttggtggtggctgttgtgttcatgtgattggagattgttaacaattgatattagaggcggttgttgcttgcatccccatcaccaggagccgtgaatctcaacaccaaacttcttctcgtcgagatttccaagctcttcgatgcacaagaggcaaagtgggatgaattgttttctcgtcgggatgcacggtggaaggcatccagtggagccccatacagcttctacattgacattcatcatgac

SEQ ID NO: 24109 - DNA, 569 bp, Zea Mays
gttaacgctgatgttgaagtcatcgcagaattgcaggaacgatttccctgtaaattgggttccatcgtcggtgatgatggagttggccaccccaaaatggtagacgatgccgcagaagaaagtggcggcctccgatgatgtgagcttggcaattggtctggccttgatccatttggtgaacttatcctccgccacaagcaggtgggtgcagcccccaggtgctttcttgatgggcccgaccaagtctagcccccaaaccatgaatggctaggtaatgaggatggtctgaagagcttgagccagcatatgcgtttgtcgtgcagagttctagtagccctcacatgtgcgaacaacctgctcagcattggccatggcgattggccaatagaatccttgccagaacgccttgccgacgagcgcacatggggctacatggagcccacatgttcctcatgtacttcggcgagcaactgtcatccttctttgtatgtgatgcacttttgcttgatgcctgaggcgtttatcttgtagaacattccatcaatgattttgaaggatttttctttttc

SEQ ID NO: 24110 - DNA, 412 bp, Zea Mays
atcaacagaagtcaaaactctgtcattaggagcgctggcctctaaggcgacttcctgacccgaagcttgagctgctgccatgtaaccagaatgcagaggagaagaccctacgtgaacatcaatggaagtgtgagagggagaaccaactcggacaccctcgggggctgggtcatagctcgcgctacccatccgagccggatcatccccggcaacaccctcgggggctgggtaagcgctagcgccatccttgagggtcgagctctctgtaatagccacctctaaggctgaaggaccttcacccacttccattggagcagaacaatccagatcagcctcctgacccttaagaccgtgctctaaggtcgatgaggcacaggacactgctcgagataactccaacccggcatcaggc

SEQ ID NO: 24111 - DNA, 274 bp, Zea Mays
tagatcctctgcctttactgtggattttccaaattcaacatggctaggcttagttgggcacagaatactatcgtcctcttcactttcgttatcactctcaacttcggccatagcttgttcggcttcggcattagaggtaccttcggcaatagctccctcttgcacaaccagccctgaccacctcatcatttctgatatgggtgctgtctcagttgcttcagtttcatcttcctcacgggacacccttgcagtggatcttattctggtcatttcg

SEQ ID NO: 24112 - DNA, 274 bp, Zea Mays
aagatgcaacccatttaatagtgacgtggaccggcccgacacgattcaaagtgggtttgtactggcccagcccgacacgatttaaagtgtgcctgtgccggctcggtctgacatgattatatgttttgttattaactgttagtatatacatatttacaatatcaattttttgtacaacacaaatgaacatgaggtgcactggttagaagatgagggcttggtatcgttctatgaacgagcatggtttaaatctccagggtgctccattttttgc

SEQ ID NO: 24113 - DNA, 365 bp, Zea Mays
gcggtgttgtgctcgatttcctggtgatcactgacgtttaggcttcgactaggttgtgagacgtgcgggagagcaaggccaaggggttgggccatcttataggcgaaggcacgggcacggtcgcggggttgggcgcacggtcgtgccgaccgaagcttgggacacgagtgagcatggacaggtcacgttcccgggtgttagccgaggtcgagcacatggtggcttgcttctgcccttgtcgaagtgcctgtttagctgccctaacatgcatatcttggcaaagatctcgtgtatggtctcttcaccgagccaagctctacctctgttgtgcaagttccaagtgtagatgtggtcagggttaaaag

SEQ ID NO: 24114 - DNA, 406 bp, Zea Mays
agggcctgatcaaaatccgttatggacaattcttgaaggctgacaagagtagacagagctggaaaaggaatatcactatcacccctactacctctgtaacaccggctatttttacaaactagcggaacttcttcttcctcttcttcgtcctcatcaaaaatacggaaaatagccggtgcacggtcacacccattgagatcagcttctgcacggtcacacccattgagatcagcttctgcactattacacccattgggatcagcttctgcatggttacacccattggggtcagctttaacaaggtcacacccattggagtcagctggtgcacgatcacacccattgaggtcagcttcaacagatacaccaccattgggatcagcctcggtaaggacctccgctggta

SEQ ID NO: 24115 - DNA, 350 bp, Zea Mays
taaatctggccccgcgacctattctcctcaccccatcccagtaggaagcgccccgccagaaatagagagagggagaatggagaacctccaccgtcgaaccaggggaagtgtagcgccgccgtgggcggaaccatggcgtaccatcgctcgggctcttgggcagagaacttcgccgaaccccagtgatttgctagtggacatctcggatggggaaactaccttggctcgcccggatttcttgacggggttggtgccccgccgttgacccgctgtgctatgtgggcaacatctctaccgccaccctatccaagtaagccccaccgtaatcagttcaatatgctccgtagaac

SEQ ID NO: 24116 - DNA, 364 bp, Zea Mays
agcactagcaggatacggacgacgcgacgcttacatgaattggcatctgaccgactgagttttggtgggttgacaccagagtagttcaagtggcgtcgagcccatgttccaactaaactatgaccgtaaagactaaacggatacctcggtgagcttcaccagtttataaggacatagaacatggatgcatatacgttgaaccataccatagtcacctggccacgtgaggctgaggcgtcggtgacgtggtcaccaaacacgttgagtcacttgaccaaggaagttgggcgaatccaaggtatagtttggggaaaggaaggcaacagaactatgttgaagctacacaccgtggttgacaacagag

SEQ ID NO: 24117 - DNA, 498 bp, Zea Mays
tgcagatataaaaagtttttcacatgagctgaactctaaaggggtgtgcccatttcctttttggaaacctcggggcatttacaacttaaaggtaatcccagtccaccgtttgtgtgagacaagggtcattgatatgtcgccttattttttcttttacccatttcagtttttaaatatttcttaagtaataacaatactgtctcctgttatctatgcaggaggtaataaaagttatccagatgagatttgagaaggcaaaggaagaggtaaattcagatttggcagtttttgcaggagacttggttagcgtaatggaaaagtatgcagactctcatcctgagtggaaagaaaccttggaggacatgctaatacttgcacgtacctgctgtgtgatgacacctggggaattctggcttcagtgtgaagttatagtgcaagatttggatgaccatcgtcaggagctctcaatgggtgttctgaagaaactatatactcgga

SEQ ID NO: 24118 - DNA, 563 bp, Zea Mays
ttttgaggcgattcatggaggttttgggtattgtagtaggaatcaggagagaggaagtcttagacctggcagtagcttttgacatgttgatagccagcactttctttaggaagagagactctcatttagtgaactatagtaatgtccaacactctgtcagatcgactttgtcctcacaagaagagagaataaacgaacatgtttggattgtaagatgatacatggggagtgtgttgtctctcaacataagtttgtggtggcagtcttctatttttatgtgcgtgccattagggataaacaagccaagattgcgagaacgaagtggtggaaactgaatggggagaatgcatgtcttcaaggaaagggccatcaaagaggacacttggaaggtagaagatgatgcaaacaatgtgtgggacaagatgacaacgtgcatttgtaaggtggcctcagaggtgtgtggagcaactatagggagtggaggtgaagttaaagatacttggtgatggaatgaggaagtctaaagggctattaaggaaaagaaagaatgctacacacatctg

SEQ ID NO: 24119 - DNA, 1043 bp, Zea Mays
ctctatgaccatgtgccatgaccatgtcttcattttcaggcttcaacctccgcaagttctcatcgtccttatttctcttgatatgagaatcgtccaaactttcacggcgattcaaaaccacatcaccacgctctctttgccgagatcccctccactcgccatcatccaaacgcttccgtgaaagatcttcatctctatcattcctatcaatgggcctcatcttatttctatgccttgcaccaccttcaacattgtactccagcctcaaatcttcttctttagctcgtcggctgtgaacaccatcatctctccttggcaaaatttctgtctctcttaccttatcataactcctaccccgcatgtcaacacgatctctgtttacataagattggtggatatcttccctgcctctggagggtaaatgtgatctttccaaatctgattttacatctcgtgagtactcatctttccggcgaagattgtgttcttctgcgtcatgatgccttcttgcattatttactctccttgattgcctatcttgaagaacctcttcacccaattcaaggcgtttctgctgatctttgctgcttccagacatccctttactattttcattagttctcaattcaacaggttcactgccattgtgtccagtaggttgctcaaccccagctatatgtttctgctttttatcagagtgaaccaggtcatcatcctcatttgcatcactaggcatgttggggtctaaagtagcatcatcaccatccacttcaacactaccaaccaatgtggcatcatcatcatcaccaccaccaccatcaaaatgatcttctgtactcagtttatctgtcgtgttatcattagcagcaagtgatccttctgaatcgccctcaacaaggttctcattccgggaatcatggcgtctctctgaagatatttgatgaggtattatgtcgttagagctttcaatttcccgaatagaattctgactcagtgaacttcctttcaatgaccttaggaaaaatatttgggcaagtgttaga

SEQ ID NO: 24120 - DNA, 488 bp, Zea Mays
atagctagagtgagaaagtttgtggttagaaaggactccttgttgggtgttaaggcatctaaagatcaagtttgacttctctccttccttgacgaggttgatcttgttcttttccagtcttggtctccttgatacgaggttagtgtatattatcggagttggggcatatggtcgaagtagttatgggtgagatggactacatgatgtaggttaaaatcttgtttgatgtttggtgggcatagatagattatgcaatccatcatgacactattggttgggttagctcttatgctcacggttgagttggtctaatgcattaatttaggtttaagtgcatgaggggagaacaaggttcataggactaggatccagtttatttcactaatgttaacttgttaagtgactgtccttaggttagctcaacttaaggttagacttcgttaggttagattaatccatcacattagatcagatctaggttagattgt

SEQ ID NO: 24121 - DNA, 396 bp, Zea Mays
ataaccttatacaaggaagactataatcagtctatactaggctatgtacgactgtactttacatatatgtctaacacatgcctgcagtcgcagcgggagggtcccgacaaaagactggatttgaactcgtcgaagagctatataggcaagcctttggtcatgatgtccgtgaactgatgagaagatgggacatgaagcacgtgcacttgtctaagagcaaccttctcacggacgaagtgaatgtcgatctcgatgtacttggtgtggcggtgatgaacggaattggctgccatgtagacaacactcacgttgtcgcagtagacgaccgtcgcagaagcaattgacacgtggagttactcaagaagatgccacaatcagcaacactcagcaacaacg

SEQ ID NO: 24122 - DNA, 287 bp, Zea Mays
ccgcgccaaggttcttcctcatctccgaccgcccacactgtctgctcaaattcagcgccaccgccccggggatctataaattgaccccgcagtgagcttcacaacatcatcgcgcacccagccaccaaatatcgtcctcaatcgttcacctgagagctcgaattcctatttcccccaaatcggtttgaacaccccgtaagaacacttcaccgcggccagcctattccaggtgaattcatactcctctgttgattgttctagcatccctaggtcctccttaagctttc

SEQ ID NO: 24123 - DNA, 544 bp, Zea Mays
gagttgggtacgcgaatagcgagttgacgaagccatgcatcgttccacttccttcctgattgtcctacggagcgagaatgcaatttgtcagaaatcgtacatattaactgctgaactgtcggtgatagctatagagttagaatacaaacctgtgctccaggggcaggtagttgtgccggcggtgtggtaaactgaggctgctgtgccacaagtccctgttgaatacaagaataatacatattcatgagtgcagtgcggcacaagtcgtcgtttttactgtgtaactagataattgacatagaatttcttaccagaggtggaggagggcccatagggacgaacgtccattgcggcggaggcggaggggccacgtagggaatgccctgctgctgagctagtaactattgaccaagcatattagtagtacgcattggatgtgtaaagcaatgaataaacagtaataatgcaatgggcttacttgaagcatctgctgctgctgcgcgtggactgaggcatagtactcactttgagccctcaactgctc

SEQ ID NO: 24124 - DNA, 466 bp, Zea Mays
aacaaacccattgtctcataaatcttttggtattctactccctaccagatgattcatcatctccgacatacaccgttcgtttttttgatgttgatgtctcattccagtgtggtgctgcacctccgattttgttccttgaaccaggaggtcgtcctctcttgcgtccagctaggttagccaatcgaaccctattatcctctatagttaaacacgtacgactgttgtgaccatcagcgatgccacatttttggcacttcctgctcatcttcttagctcctttcgtgcccaatttaagaacttgttgctcactacttttgatagttcttccctctggcttggccttatctggtcttgctaagtttacaccttccctttgaaactccagtttctacaaatcaaagatattaagttagttttcatttttcacatactaatcatatattatagcaatgttattacctttcta

SEQ ID NO: 24125 - DNA, 439 bp, Zea Mays
gtaaaagatcatggcgcacggattggctcggactcggtcactgttgagctcaccatacccacttggtctgcggccggccggaatgatcttcaccggcgttggtcgattactgctcgtgcgccacatgcctcgatggtttaacacgtcgcagtgaatcgccttagcaagcccgtccatcgccggtgaccttgacacggtgaaagccacggtatcacctgcgcaagtgacttcccctctctccggccgccagcacacttccttcaaattggacgccaccgctaatggatgttataaatcaatgccccagtgagctccgttaggttgtcacgaagccagagctcccgcccttgcctccaattagccgccacagcgcccgaatttcctttttccccaattcagttctccgcgccaccgtgagctaccgcttcatggaccgtcg

SEQ ID NO: 24126 - DNA, 400 bp, Zea Mays
ctagcatattgtcagcccacaaaggagtctataacacttcccccctcctcgacaaaaaacttgtccgcgagcgcgaaagttggatgttgctgtttgaattcttccacctgttcccatgaagtatctgcttctaaacgcccgatccatttgaccaacacttcccagactcgtctgttgagtttggccctcagaaccttatctggagctggaacaacacgcccatgtagaagaggtggcagtggaaccaactgggatggagcaggtccttcaaatttcttcaggagaaatagcacatcatgagttcttgcatttggtggtaactgaagcttgtttgaaacaacccctatcctctgaatgacttgatatggacaaagaatttgggccccaatttggatggcgc

SEQ ID NO: 24127 - DNA, 410 bp, Zea Mays
ccggtttgaaaagaggcttagtacttggaaggccaaatttctatcttcgggtggacggctagtcctacttaattctgtgttaattagcctgccaatctttatgatgtcgttctttgagataccggcaggcgtcttgaagaaattggatgctattcggtctagattcttttggcagggaggaggtagtaaaaggaagtataggctggccagatggaatatcgtttgtctacccaaggagctagggggtttaggtgtctctaatctagctgtaaaaaacacaagcttacccagcaaatggctctttaaattactcaatgaggatgggatgtggcaacaattacttaaaaataaatatctaggcgagaaatctctttctcaaatatctagaagacagggggattctcaattct

SEQ ID NO: 24128 - DNA, 467 bp, Zea Mays
caaacgtatttccggaagaattactaggtatgccacctgatcgtgatatagagttttctattgaattattacccggaactgcaccaatttcaaaaagagcttaccgaatggatataaaagatttaatttaattgaagaaacaaatagaagaattactagaaaaaggttttgttcaccccagttcgtctccatggggagcccccagttctatttgtgaacaagaaagatggttcgaggagaatgtgtgtcgactatagaagcttgaacgaagtaacaattaagaacaaatacccattacctcgggttgaagatttgtttgatcagatgtgaggagctaaagtattctcaaaaatagatctaagatcaggctatcaccagttgaagattcggactgaagatgtacctaaaacaacctttgctacaagatatggactatacgagtttttggttatgtcatttggattaac

SEQ ID NO: 24129 - DNA, 900 bp, Zea Mays
gttgctttgataggaattggcatgcttcacacttctggactaactcggcagcatcgcttttcgtcgttggccaatagaaatcggatctgaaagccttcccaaccagagtccttgacgttgcatgtattccacactacccggcatggatttcgtcccacaattgcttcccagcaaccgaatgaatgcatttcatgtggactcctgccacacctcttctgtacaataggccccctatgatggtgtagtgcgtcgactgcctcgtgatgcgttctgttgcagccttgtcatccggctcttcttcattttttatatatctgatgataggctctctccagtcgttagggtccgactctggttggctcaaggtgttgcactcttctgcctgacctaagaggatgtttggttgtgatatttcttggacgaagatcccaggtggtgcttgggctcgactggatcccatcttcgacaacgcatttgttgctacgttgcggtctctttccacatgatggaactctaatccttcgaatttgtcctccagttctcgcacaactgtatagtacttgcccatggagtcagtcgagcagtcccagtctttgcttatctggcttatgaccactagtgagtcaccatataccatcagtttcttgatgttgagtgatacagcgatgcttaacccgtggatcaatgcttcatactttgctgcattatttgatgctggaaatagtagctggagtgcgtacttgagttgttctactctaggagcaataaagaggatccctgcacctgctccttgtagcctcaatgagccatcaaagtacattttccacacctcgataacctatgggttgtctgggacctgatgttcagtccactctaatacgaagtcaactagtgcctgag

SEQ ID NO: 24130 - DNA, 609 bp, Zea Mays
atctctgtgggctaccattgtggaattgggggctcgtgaacctggagaccatttgccgctgaccgaacaccgctgtgctgcaccgccgtccgcctggtgtcgtggccgggaggaaccactccgagatttcctgtgagaaccttctacactactaaaccatgtccccaatttcgtgttgcgccgtttaatttgagtttgggggtgtggagcaccggattgtgattcctctggcgaggtcgccgccgtggccaacgctgtggccgtcgtggcgttggaggggaagaggaaattagggccctggccgtaggatttgagttggacggtagagatgctgttcatttataatccaagggatcccgagccgtacatgttcgattctaatcagagccacgcgtgtctgatccaacggctctggttgctccttaccccttcgctggtaactttttgcataagaaaccatagaaaacctagaaactaacccgcagtccacactgtgggaatactaagccttaggaatgtttctattttagtccccgaacttctcgataatattacgcccagtccaggattcttagtaaattcggaaattaatatagaaatggatttgaa

SEQ ID NO: 24131 - DNA, 344 bp, Zea Mays
atagcttataccataaggaaaataatttgtgcatcaactttcacaagatcgggctaggatggagcacaacacgcaaaagaacacgaccctacacaacgctgcctggtgttcgaccctgtcaaacacgctagcgcgtcgagtggctagactcgctcgtgcccacgcgcaccagtcgaccaccaccatgcctcacgtcgtgctagagcctataaagccacccgagcactcggtcaccctcttcgttccttactcaacccaacgcctagatttgctcgagccattgccgtcgctagtgagctctacgcgcgccgctgccgtatccgagagccaaccctttctggcca

SEQ ID NO: 24132 - DNA, 516 bp, Zea Mays
cccctgcgcaccgatgtggagatggagatgccagagacacttcaacgggcaatgcatttggcccgagtgtatgaaagacgtctgctgctatctgccagctccagcaccacctcatatcaggcaccagcagcgccatccaaatccccaacaactgcagcagcacaaccaacatcatcggcctccagcaggcctcgcttccggcgtctatctcctgaggagattgctgctaagcgagccaatggtgaatgttaccattgcaaagagaaatattctcttgatcacaagtgtactgctcgctgcgtgttcctgctagaactggaggaagatgacaccaccacagaaactggctcaccagaagacttgggtatttcactgcaggctatgaccagaataggagtcgctgacaccctcagacttccggtcagcatcaatggcatcacactcactgcattggttgattctggttccacccacacttttctttgtgacgctgcagtatcgcgcctaggcttacaa

SEQ ID NO: 24133 - DNA, 697 bp, Zea Mays
ctcgagttaaatatgttgtaaccactttgcgggaatgattctcagatgtcattgcacatttcattccaacacaaaagtttccgagagcttagatatgaaagattcaacaaaagggctaagatgagacaccgagagggtaagaaccaagtactacaaatcaaatcaaaggcaagaacatgagccacaaagttcagagaaaatgattgctttgattcaaccatcataggccaataactttgtcagagttttatagatgataggattataaatttcagatctggatctaggaatctcactcaacagaaaaactagaggaaatgaaaaaacctaaactagaatgaagaaaactcaaatgttgaattattacacattcataacatgctaggggaaaaatggtccatcctgagattggtgcatctgagggtcatgggctcttcttgatttacctcttctcgtgcaagatttgggatgacaccatgtgccaccaccagtttttgctagaactccaatcatgttttgaggctcaaaccactaaacctcttataagtagcatatcctatacgctcgctccacaatatcaacatgtgttaccaccaatcctaaacctttcgatcaccaagtatttcattgcttttgcttgacttagtaaattgtcatcttaacttggtcaacatagtatattgctccatataccctt

SEQ ID NO: 24134 - DNA, 629 bp, Zea Mays
cacagagagggcatgctttcgtggggaagttcagggtgaatgctcacaaccgaaatgaggcaagcacggctccattatcggattactaacgttcacactgttcccttgcaactgtgtggtggtaatgtttgaattgtgtgatttttgcaggcgtactgtacgattgatggcgtctcggtggatgttctcattacaggattggcacaaaaccgagcggtatgtacagctctgcatgcatgatgtgctagtaattgggtgtttacgaagctcctcgtaaggaagttttaatgggtagggcaggctatcgcgctaagctcgtgtctctgttgattggttaggcatgcctagaatgtggttttttgcttgctagttacctactcaggaggaattaaaaaggctgccagatttggcatgaaatgacacaggacaaaatccagcactatgttggcatctggattgtgcaaaaaccatctaccttgaggcctcgctggcattgctaaggttgaccttacacatagtagcccttgaccttaagggcaaaagggctacgactggactgtaagcttcatgcttggtcttagcgattaaaaaaatcagacggtgacataaagcgaaggcgggttggggaa

SEQ ID NO: 24135 - DNA, 306 bp, Zea Mays
ccgacttcaaagccccttccgcattgtgagagaaatggtagcccggcgagtagacagtatccccttcgaacctgtcagacgccaggatacgcggcaatgaagtcggacagagaggatcttcgagtgacgtttgcgccgaacacttttctgtaccagatcttgacaatggaaccgtcctggctgttgaaacggggtcgccgcctcccgtgaccgaccaaagcaggtccgattgaggagatggatcagcaggggcgcagagggggagatcttgggcgtacttgcaaggatcctcactgccaagtggtg

SEQ ID NO: 24136 - DNA, 411 bp, Zea Mays
gtttgagtgtcgactgcctggtggaatcgcctctttgcaatttgaaatctatagccataatggatatgacaaggacattttgataatagcgatggaagattcatctatttttgttatcgaggaagaaacggggaaacttttgaaccccaacccagttcagacagacaaaccctctaaagccatccttctgcagatgttgggtgcgctttatggcattgcatacttatcagtttttgttgtatacataaactactgatattctaagtccttgtataaaattgtgtgacagagttatcgcccattgacacaccagcagtttcagataaccaagatacagtatcgaaggaatcattgctgctactttgcactgaaaatgcgatccgtttgttttccttgggccacgcaattcag

SEQ ID NO: 24137 - DNA, 402 bp, Zea Mays
gcgagagtcatgatgatactggaaagcgaaatccattgggaccttgccccagagtacaggtgttcgagattccgtgaaaaaaaagtgtgcagatgatggacatacgattcactataagtccctaacgtcttctactcctaataaccttatcttggttggtttgtcaaggagaaacaaattgctgctccaatttgtagcctcagaatgcaattttgcctccagaacggcactatgctttatgctctttccataacctagctagcagagaccctcatccattttaagccaaatttcattatccatgagaggtagccatcaagttttatgctgtattctcatgactccttgtgctctaagcacaaatcagtgcctctactgtacatatatagttatacatttgag

SEQ ID NO: 24138 - DNA, 446 bp, Zea Mays
gtgaatgagtggtggatgataggatccttgatcctattgtgtggttgcaaagtgcgtaggaatgtgagattgagggtcagggtcggaacttccgagtttggtaaggtgcagtggtggcgtgggtgccgagcagcggctcggcggcgagcaagagagagaacgtgtaggcaaagcccttgaggccaagcaagacgtttgctttgcttccccgcaaatggatacattgcccctatatttgtagttcctagagaacttggttcccaagcaaactataggaggaatccttatagatttggacccccccccctttcctaacaaactaatcctatttcctaaacgggtattgtcacgtcagatttaatttgggcccaacacatgtatgtccgttttccgacgcgcacagaagataccagtcataacagtggaagataagagcaaatggaatg

SEQ ID NO: 24139 - DNA, 588 bp, Zea Mays
tgtcccatctctaccagaagcaaccacgcgcaattaccaaacaaaacctggtacccgttgagccggaacagctagcggggttttgcatttacattaacattaccgctcctcacaaggaaccaaacagcacctgaatgcaagatgccagccacataacccgcctactaacacgtccatccccacgtctgggttgtgcggccggcccactactgaaactaaacatggcttccagagttgttttcccaaacagaagcatcgattttgctctgtggcttcttggtttgcttcgttgtagttcggccgaaatcaggggtctgaattctgaaatcgatgggagcaacaccagcttagagacttcgagttcatacaggtacccagcaatctctgctcttaattagccctactacacaaaaggaacaaatagttctacatgccgaattccgctgaaaaagaaaaggaatatagttcgtgcagccatagatatgtcaagtacttctgctgaaacttgagcaccctttaacgccggagcctcgacgatccttgttctgaaaccgaagccccctgcgacgtccacatcagaacccccac

SEQ ID NO: 24140 - DNA, 273 bp, Zea Mays
gcgcaaaaggttctaagactcagaatctcactgacaggattgcgggttgatataggtaaaggtcaggggctctttaagaaaagcgcacggcgaaggggtatcgcgggattctagccctcggatcatcagtcaatggctcggattagatccctgcatccatgaactggtatgcagcactagccgcccgattttaagtagatggccatgatttaaaaaccctggatctaaccacacccgtccgttaatagatcaacggcgctagatccaactaag

SEQ ID NO: 24141 - DNA, 517 bp, Zea Mays
gcaggatcacctcttctataaatcccggcacctccccccatgccatcctccatcaaccctcgagcatcgttgtcgccattaaagatcggaggaaagcgctggtgggtctcgtccttgccgacggtccaacctcgggcatcgggtcagatgggcggtcgggatcttagcctgattcctgggacccgttccagtgcatcgcggaggtgcgtatagatgataggggtgctgggattgctcgccggtcacgtgactccgccgtcgggccgcatctccaccatggacaggggattactccgtgttagcgcaggtgaggttactcccgatcgactcgcctcttcccctgcatggtgtagcgtctgttagtttggtaattggaacactggtgtgcgaatcaggcttccgctggccatggtccgccgtgggcgtgcgcgcgccgccgtagttcgggtcggctgggaagctgggaaagaagacagaccatagaccgttgatacgtgatggacggctcagatcgtgc

SEQ ID NO: 24142 - DNA, 280 bp, Zea Mays
taaattgctcaaaaaggtggacaaatttcagtggaccacagaggcacaggaagctctagaagcactgaaaaagttcctgactacaccaccaatactcaagccacgacgccgagccacgccgaatcagccagcagaagatctgttgttatacatctcctgcacgactcacatggtaagcaccacgttagtagtcgagcgggcggaggaaggacatacatatccggtgtagcatccagtctacttcatcagcgaagttctcgggccctcaaaaatgaagtat

SEQ ID NO: 24143 - DNA, 288 bp, Zea Mays
gtccaactttgggataagctgaagattgagatgaggtagtagcaggacattcagattggtgcatcactgaaatatcacctgtgcaaatatcctgtacaatgcgcttcatccttaccccctcttttcttttgcccatggataatcttcaccctgcgtgactaggctctaagaatttacgtggatcttctggagggagccacgactacatctcgtgttcatagctatccttgtgcaagatcaaaaatccagccccctgatcttttcactgcctatataaagaacagccgg

SEQ ID NO: 24144 - DNA, 994 bp, Zea Mays
gcctgccccgtggaggtcaagggagcgttttttccctaagacggggcgtcagtgattcgacaacatcttagccattttgaggaggcatgggactcatgccaccgttcgaagtcccaccgtagagggagttgtggcagcagggtccgtgttcggtcaatcggtgtggcctaagcatctcgtggtcgagacaaataacagtctcccaatagcctagctagacctcgcagagacatagtcgcaaggttgttgtgtcgatggatctttgtcaaggtccatgtctaaaggtgagtatcgtactctcccatccctaacttttgatccttttagtcccagtaattcgttgatgggttttcctgtttttaccagtgatggtgctggaggagcttgcgcgtgcggaggagcgtctctaggtccttagttgtgagcgctccaatctgtccacgaccatcgaccctgtatgcgaccaccttggggttttgcaggtaagtgtccgcccgtactcctcgaatggcacttgtctctggctacattcacgaactagaggccactgggtttcggcttggggtcctctatgcctcagtcgttgctcatcctctcgatgaggactcggtcaagcggggttgagcctgcctcggatgcaccatcagttggtcacatggcgagctcttaagacctgaaggcattggcgggacccattgcatggcgctctccctgtggtcgctcattttatgagttccctagagaaggaaaagtagagaaataagtttgttgtggggtactgtaaaagcaaggatatgtttaataaaagtcattagggtccttggcattgtgcttttcgttcgtcttcgctagcgaccgttctgtcgagacgggtgttcgcaagttttcggttccctcaagttccagtggtgaccattaccttagccttcgaggcataggtattcatagtcttgaccagcttccccatcaggtccttccattcacgttgcccgcc

SEQ ID NO: 24145 - DNA, 326 bp, Zea Mays
taaggcccatgtagtcaacacacatcctctagttctcgtttttcttcttaattagtacagaattcgcaacccacaccgagtggtggatttaatttacacaccctgcaactaggagcttcgcgacctcctcacatatggccttgtgtttttcctcgttaaagcgacggagacgccgggtgaccagcctagctgtcggctcgatgttcagggagtgctcgatgacttcccttgggatcgctagcatgtccacgggcttcccaagtatatgttttcttgtgcctatttgtattcattgtgcgtcatgaatagatcctgatccatttccg

SEQ ID NO: 24146 - DNA, 397 bp, Zea Mays
tgagcttgctcgatatgattggactaagggtgagtcacttcaatcactctttgatcggctaatggtgttggtcaacaaaataagagtgcttggaagtgaagattagagtgactccaaggtcactagactatttatgagagcatacaaagaaaaggacaagagtctagcaaggatgataagggaccgtgatgactatgaggaaatgacacctcaccaactatttgcaaagattcaacaacatgagtctgaagaagcgccaatcaagacaagagacactcatgccttgatctcaaatgaacaagatttccccaagaagaacaaagaccacaaggctaagaaagtggtcgaaacatcaagtgatgaagacacaactatgttcatcaaaaccttcaagaag

SEQ ID NO: 24147 - DNA, 286 bp, Zea Mays
caagaattaaagcacggatccccccgaacaaaccaattagccatccccgacgtcgatgaatcaacctccaaagatctcattgacggagaccgtgtcctcgccttgcaggccctaaacaagtatcaagcccagactaaggcatggcgtgacaacaatgttgtcccaagagaattcagcgaaggggacttagtactcataaggaccaccagagcagaatcacggggcaagctagagccgaagtgggaagggccatacatagtcaagacaaaggcatccccaaatgctt

SEQ ID NO: 24148 - DNA, 457 bp, Zea Mays
cgatagggggccgatggccaagatgactccactgctgcctcagggacgcacttgtctacgtgtcggtcagcatgtgaatgactgcaagatccatgacaaccatcgccaccacatgactagcaccacaatggcgcatgtgatgcttgaccaagggctcgacacatgttcagggtatcagctttcaccctgattgcgtgcagtctagtggccacctaatttcaaggtctccaacatcgacaagtacgagaccaagctcgaccctaggggctagctgggcgtttactcgacatcggctcaagtgccagggccactgaagacgtcatggcggcgtatctcccaatcatgcttaggcaggatgcactccagtggctctatcatctcccccaccactgcatcaaccactaggataacttctatgacaagtttgtctccaactttcaatcgcactctaataagc

SEQ ID NO: 24149 - DNA, 365 bp, Zea Mays
tgggatgaactttccagtattcgacggatccaatcctaaattgtggaaacatcattgtgagacctattttgagttttattttgtgcccatggaaaggtggatcagagtagcaaccatgcattttgagggctcagcattgttttggctgcagtctgttgagtctagaatcagagaaatgaactgggatgatttatgcctagccttgaccactcggtttgggagggaccaacacagtatacttatcaggctattctatcacatccaacagaactcttcagtgggggagtacattgagttgttcgatcagttggtccaccagttgctcgcccatgaaaaccagctaaccccgaccatgatcaccacta

SEQ ID NO: 24150 - DNA, 510 bp, Zea Mays
taaaattggagctcactggtgatcgactgggagcaatactgcgtggctgggtgtgtgatgaccttgtggagctcacggcgggctcaatttataggaagcgaccgcgagcacaacgaatttgagcggcggatcgtgatcggtaagaacaaggtgagtcactggtggccggttaacgtggcttttaccgtggcggcacctccgccgatcaccggacatgcaaagcacggttagccatgacgtggtaaagcttctggacatgcggcgaacgacggttatggttcaacggcggtgagaatcttatccgagggatcggtgagcaagggggaaggtacggcggctagccggagtggtgtccagctcaacggcggtgctgatccttctacccgagatgttacccacttgccgcgagcacgaatctagacgccggcgacatgaatcgcggcggagatatcgtcggcagtgagatctctacactggcagcctgatccaattcaggttactgtaccattg

SEQ ID NO: 24151 - DNA, 490 bp, Zea Mays
gactgcaagacatgaataatacgactgcaacacacacaactagcatgagtgggttacctctgattgtgcattacttattgcccaacatacattttctagatctaagggacctagtccctgttcatatatgctttgcacaacacaaaggttatatagactttacattcccaaattaaaagatcatggccatctactcacgaaaccacatgaaacaccaccacaccaggtgaattgcttgactaacttgcctactctcaaagcaaagtcattaccagcataacacatcacattcatacaattcagtaacaatgagttattcttctcacttgaaaacatgtgcggctgagagcacaccttccgtaaactttagggcagagctcctccaatcttctgacctgcctggagcttaccagcgatcattttcccaacaaattgatggcaaacgatatgtaattcaataaattcatacatttttataagttgttaattc

SEQ ID NO: 24152 - DNA, 568 bp, Zea Mays
ttgggttgtgaggagtaattgtcaacaaggggtagtgccttgggttgagtcggttggactaaccgggacacgaggttgttggtgcaacatgtctcttggtttgtggtgtgtaggtgtggagtatatacacggcgatcgatggcgaaggtgaaggtcatgagggttcgtaccgatggattgggaagcaatgaagggtgactagagttgtggtggctaacacctaggacactaataggcacgaggggatggtggagcagatcgtgtcctcgatgcggttgtggaccggcgggaaatgtgtctaggacatggggactcgtatggagtacactacccgtgggtgtttcaatggttgagtctcaaaaccaccatgtgcaacaattcgtagatttcactatgcttgggcctcaaaacctggtagcaaggttctggagggaatcgaaagcggtatgtagtgtcatcatgaaggatgcgtcaaggtgatctagcttcgtgaagattgccatgttcctcatcaaagaagagttcttgagcaaagcctctgatgtgtatgcattcttgtgtactatac

SEQ ID NO: 24153 - DNA, 421 bp, Zea Mays
agtcgactcgcaattgctagggcttcgtgtagtatcgtgtaatttgagtttggcgctgtggcacgccacattggccgtcgtcggcggtgctggatttgggctgcgccgtggggatccgtcgggggaaagggggtcgcggtagggatgacgtcgtcctggccgttagatgagatcggacgacgtaggattgatctgcgggctcggttgatgcgagccgtggatcgctgatccaaccgccctgattgcgtatcgcatccctactggggggttttaatctgggccgctaggcagagatcggacggctaggatctgagcttaccccttcgcgatggccatctcactaaagagccctcggggaaagcgggaatcaacccgcaatccttccctggctagtctgtgtcttaggatcttttgcgccaac

SEQ ID NO: 24154 - DNA, 331 bp, Zea Mays
gaggaaagttgggaacaagattgcactgtttaggtcatgcacctttacgccgaggactgggaagactttggcggaagtagtggagctagttccctgcgcccacaacaagtggagcaactggcatgattactggttctatgtggcgggaggcgcagtcgaagacctcccaggactcccggcgtccttgatgtgttctcactgctatgtggcgtttccgcagtatgatgtggcggagggtgatagtgacgatgaggcccttcgtagtgctgcccgcatgagtagcgggcgcgatgtagttgaggaattcatcggttatggggtgtggcccttg

SEQ ID NO: 24155 - DNA, 312 bp, Zea Mays
tggtccttcccataagggcgataacttgtgccatccctcccccgttagaattcggcggaggacgagatctcctactgaaaaggatcgttgtcgcacgaccttgtcgtgatagcgtctcagagtctgttggtaccgtgccgattgaattactgcgtttaggcgctcttcttcgagtacatcaacatcttctagcctagttgcttcggcctctgctatgctttcaaagatcaacctcggcgccccgaacttgagatcagcaggtagtactgcctctgaaccataaaccatgaagaaaggagtgttcccatgcaa

SEQ ID NO: 24156 - DNA, 919 bp, Zea Mays
acagaagctttggccagcgtgagccaagtccatgggctagaacaagtatggcgtgtgccatagctatccgcgtccgtctgatcagggcgggtagttactcacgatatgcatgcatgtgattgaggtgattaggttagcatctccaaaaggctgttaatctgaccgctaatatgttttttaggaagggaaacataaaaactaaggtccaacagatatcgtaaatctgccccaaattttagcgacgctaatccttcgtgacgagctacgcatatcttcgcggccgtgatgcgcccccaatctccccttgcgtcttctcctgcgcgccatcaaactattctcgcgtgtttcccttttccacaagcctctcccccagtcggaggtcctatgtgcgatggtcgcggcttgaggttgcggcggtggcggcctaatgaatttgagatgcagccaccgaggtcagttggcccggtccggcaggggcaaggatgacgcgactacgagcagatgtatcatgtcccgtccatcggcgtccagcacacccgatggatcagcagcgacgagcagatgcatcctctcatggtctcatggaaggttaggtaccagaccgtcctcatctggcagcccttggtgacgagcattcagatccccttttgacagtcccgttcccttgcagtgacgacctgtcaacaacctttgaacacgcgaacaccagcaactcatttgtcaatggtatgaattttggattctttgttttgatgaaatgatatggataatttactaccttgcccgtctagcttgcacatcaggtctttttttcaataaccttgcagggtctataagtttgtacttaagttttgtccatttagaaattctcagtttgttaaaaattctcagatttaaatttctggtgtgctcagaatgg

SEQ ID NO: 24157 - DNA, 503 bp, Zea Mays
gagacgacataggagtagacggtgcaggagtaggcgcggcctgatactgaggaaaaccctgcatcggcacgaactgagaagtcccaggcacatagagctgctgcggaggaagaggaactgaaaactgctgctcagcacttgacatcatgttgatagtgccctgagaagaggaggaagtcaccggctcccatctgagcttcccattaggattcatcctacacaccacatccttatggttctgactgcagatagaacacctgccactccactggcactccgcacggcgatgcgcatcaccacagcggaaacacaccagccccagcccgggcttaggaacagcccgaaacctctgagtacttcctcccgaagtacccgagtcagaagatttgccacagtaaggatggtggcgctggtgctgagacttgcccctcttgtgggctggacctcccgtgttgcccctcctcgcgtcctggctatgaggctgatcaacacccgaagacttc

SEQ ID NO: 24158 - DNA, 664 bp, Zea Mays
ctgagggcgatgaaatgcatatacttggagaagcggtcgacgatggtaagaataatggatttttcatggaccttagggaggcccttgatgaagtttatggagatgtcgacccacacctaagacgacatgtcgagcggctgaaggaaactggtcgactgcaaggtcgacgtcttgttgcattgggcatgtgacgcacgtacgaacatagttttggatgagtgcctggtcgtaggggatttagacattcgtgtgcagtcgttagaggggcaactccatagaatccctggtggtgttgtcacagagcgagagcgtgtccgcctccgagttgaggcaactagggcggtacttgatccgggaatcgaagccaaacttgtcgatccacaggcgctggggaacaatcgacaatcgttggtccaaaaggaacttgaggatatagtggttgatgccaacgatgaagcagcgaccctagaggtacgactgccaatgctgcacaacttgaacctggtcgatgagttcactcttgtatatcaccagcttgtggtgacgtgtgacgaagggctagctaaagaaggctagggggatcgttgcctagtcgagaacgacattgaaactcgaagcatcacagtcgacgacaaattgtcagttgaagtttggcatttgcaag

SEQ ID NO: 24159 - DNA, 304 bp, Zea Mays
cgcaacctgaaggccaccgcctacccacagggcgagggccacttcgcaaaacaaaaacatatccatttccaccgatcaagagggcgatgtcaagaaaatactccagattcgtcgttgaagactgacaagcacgagaaccccatctagagtgacgaaggggccaaaaaattacccctcgatacaacccttcccaaccatgttgtgttaattggtgaaggcctagtcccgcaggaagaggacaacttacttgactgtctgtgtagaaataaagacgtcttcgcttggtcgtcatctcaccaggtcg

SEQ ID NO: 24160 - DNA, 398 bp, Zea Mays
ccagccgctcctccaccgcagctgctgccatcgctagcccaccatccactgcctcagacaccaacagcaacaccatggcagaaccctccctcgccgagatcatggcacagctgaagtccctcaccgcggagatgacgaccttgaagtcagacatggcggccatcaaggacacgtcttcatcctccggcggcaacgttgctgcccgacgtgcggaaggcctacgtgatcaagacttccaccacaaacatagaaagtgggattttcctcgcttcgacggtacgaccgatcccatgctcttcctccacaaatgcgacgcctatttccaccaacacagaactatggcggaggagcgcgtggcactggcgtcgtactacctggacgacgtcgcccagatgtgg

SEQ ID NO: 24161 - DNA, 613 bp, Zea Mays
tggacattggtatcacaagacaacttgacttcacagatttacttgagttaccaaatgagctcagagctacctcctgttatgacaaacttctgtcttcctggactgctgaatatcaaaaccaccatgataactcatctctacttagagccatgtctaattcttatggatggacatacttgcgtttgggccttcttaaggtatccttttctttccattgaggttgttgaattgagaaaaggatgttgctagatgtcagctctgagattcatggcatacaaaagtcggcgtccttttgttttcacctcttctatggtaaatagcaaatatatccttttttttgcaaggaacaattaatatatcctacaatgagcagattacacaagtgacctgaaacatattatcatagtattacctgaaattccatgaacgacaacatggggttaattatcttagaacaacaaccttttcatgttattactcttatttcaaagccaagcattcttatattgaagttcccactgattgtctttagtttctaacattctattcatgcaggtattaaatgacagcatcggttttgttagccctctgttgcttaacaagtttataagac

SEQ ID NO: 24162 - DNA, 436 bp, Zea Mays
aaaggcgataacaggcaagagtgtaagagataagaggtgaaggcgcacaaaaaccaagggtatgagtacaacaaagaatagagctaaggtaagactggcacgtggcaaagatgaggttatgaccaaaggcgggataagtagagcaccactctcgaattgagaggggagaaggaaggttttaagtggcagacgtacgacaagcatcaaggtaggatcacaagggtaaaggcgatagtgaacaaaacacattaaacaatgaagttgaaagttcgcaagcaacaaagaataggatacatccgaagaaaaatgggtaagatacaactttcaaattgagacggacgagagaagattttagagggcgggtatgagataagcaacagggtgagatgtagagatgacaaaggtaaagataatatcagtgaaagcatgacaaagg

SEQ ID NO: 24163 - DNA, 307 bp, Zea Mays
cggcaaactgcctcaggacgcccgggctctgagcccgttactgatcaggggtctgaaggttggcccctcaaaaaggctccataaccgccccagaacacagagtcagggataactgtgggtgcgcccgtacatggccatagctcgagttgcgacctgaggtatcccaagacatatctgaggtccctgggagcgattcgtgatggtatcccatcatagggaggcatcgagccctcgagacctaacaaacgggttcgggaccaggcgaatcacccgcaggtactttttggggcgtgcctccggactgcta

SEQ ID NO: 24164 - DNA, 344 bp, Zea Mays
gtgaaagttcagctgtaaaaaagaacttgttaatacgaagccaaaaataaacaccgaagttaaattttagtaataatacctatacgtcttgcgcgctcaacatcctctttgactcgcttaccttcttctcgggcatcatgggatcctttttcatttttctgtatagcttcgtcggctatctcgcggctgcccttcatccaaaaattagaatagaacttcccgcccaataaagtagcttcagccgaaggctccttagtgtcgtctatggagaagacagtttctgtctgggctatagccttaacatgtccgcagccagttttctttaaaattgctgcaacccctcg

SEQ ID NO: 24165 - DNA, 481 bp, Zea Mays
ctcgggggaactccgtgtcccccggtctatgaagctgaaagacgccttcctccggaggcccttctggacctcccacgggtccagctgcagtcaggtacatgcagaagtgatcacagctagagacaagggttcccgtgtaaaatgcagataggaaccctgggtcggggcttagccccgcggcaagtgccataccaagaggtgctcagcaactctcccccagctgggaaggaccctccaaggtaacgggagtgcaccgacccaggggcaaccatctagctacgactggaggagtaccttacctcgatgccaaatatctctgtaagttctatccatagagcaagactaaggggtcgagtctgtttcctttttttgtaactaaatgacacatacatgtatgataacccggtggggtctgcccccataaacccggactattggtctgcacacatgcacaacaagttatgaagaagaaactaccccc

SEQ ID NO: 24166 - DNA, 419 bp, Zea Mays
gccggatggagcaaatactggagctcccaggaggcagacaccgaatcaaaccttccccgagcatttcccctaacttaatttgaagaatggcgacctaatttgctctggacacggcgaccgtagaccatgcggacagaggaacgtgttcccggcgatgggtggtggtctagttcaattggacggttcggtaagcatcaagagcatgaaagggtgttggaacaataacacaaagggcgagatcggacctgagttgagctggccgcgagtaggcggttcacggcggcgcagtcgaccgaattgggggaaaacggcgttgcggcggctctgggtgaaattgggggtggggattgaggctacacggccataagaaactatagcttcaccgtgcagactcaatttgggagaagggggcagagaca

SEQ ID NO: 24167 - DNA, 300 bp, Zea Mays
tgaggttttacccctcttccgaacgcttgagagtggtagggatgcaggaggagataactgtgttattgcttatttctcacaggagccggctacaaggctttatagcctgagttgcaacagaaagaggaaactaatctcctctgatttaggatctccactaaagggaaactaatctctataatttaggatttctactaatctctttcctcttctagccggccttccttctctagaggtggcgattgcatgccctgtgattccttccttcttctagccattgatttcttggctttccttttc

SEQ ID NO: 24168 - DNA, 427 bp, Zea Mays
cgtaaggtctctgggccgcgctgcctctgcatttattgcggagaagacgcgccgcctatctatccagttgacagacgatgtgccccctcagcatttaatgcatcctgtccacttcgctggcaggtggcgcccaggccatcctgcagacggcgtgcctgtccagtccattgtcaaatagtacgcccgtgctgcaaggtgcactgtatccatcatcacttatatgggaagcttcccctacacgccgatactactcagatctcggatgtcagggcgcaagaagattgctccagcaacgaacattagttgctccaagtattacatccattatgttcctgggcccacatgtcagggctcagtacccttgtacatgccccccttagctataaaaggggaggcattcaacgttacaacacaggctgattaacac

SEQ ID NO: 24169 - DNA, 340 bp, Zea Mays
taaggatgtgcggagggagaggataacccatagtctatatttatagttggggtgcacttgacttagtggggtagagctcatggttatggcaaaggaatcatctgaactagggttcgggcaaagaattataggcgagcacatggaacaattatatttcggagttttgaagaatatgaaccatgcttagaggatgacatggttggatataggataatttgaaatgaatttagaaatcagagtttcgatggaggagttttgaattttatatccatatgaattagaaaataaaagggatattcttgtcaaggaaatggtccccggtccttgtggcccatcggtg

SEQ ID NO: 24170 - DNA, 348 bp, Zea Mays
gaacgaggtaaacccaccacaaaatccatggtgatatgctcccatttccactccggaatttccaatggcttcagtaaacctacaggccgcttatgctcggccttcacgcgctgacatacctcacaggcggccacatacttagaaacgtcaaccttcatccgcttccaccagaagttttgctttagatcttggtacatcttggtttcgccagggtgaacggtgtaaggcgttttatgaccttctctcaatatatccatcttcacctctgatttctgaggcacacaaaggcgacccctgaaacgaaccaaatcattctcatcgatggagaactcccggggtttaccatcg

SEQ ID NO: 24171 - DNA, 548 bp, Zea Mays
atttttcctaataatggtaaactaactagttgtgcttcataacatattgatgttggtttagactaaaattattattttgtaaaacaagtcacttatatattggtatcacgagctaactaaaaacaaaatagtcttcttttcctttgatgtggtgggcctgaccttttctagtgctaatgttttatatagaccttggctccgccgccaccgcctagggactgagccctagggctaagggtgcggacgtgtcatcgaaaaccatcatcgcaagccccaggcctagcaataaggtcgtgccacacggtagggactactacgaggaggaagatgacgatagcggcttcaggtcccaactgctgttggaaaacaaccatacaatgttctcgccaccgacgctactctacaactatcattcgcacaacaaggtgtgatatatacccatcatcgattcgatcgatctcctctatacacgattccatcttggtcttccattattaaccactccatatatgccaagttgcaagcaaatatgtatacaacattaggtt

SEQ ID NO: 24172 - DNA, 310 bp, Zea Mays
gttttcaacgaggaggcgcactggagctggtccgacaatgaacaaaaggaggatgatggcgagttcacgatccagtacacctcggtgtcacacccagaggtggtgaccacgctccgaccacgacacgcagctacgctggcgtcgcctatttctccaatggatgctacgactccatctcctccagtgactgcggctccatcatctttggcaacagcgtctccatcctctacggcggcttcgacgtcagcaacgcccgcaggaccgacggtcgagtatgctacaccgccaaccgtggatgtggaggatttgg

SEQ ID NO: 24173 - DNA, 365 bp, Zea Mays
aaaagaggtggccacctaggtttttgtgggagaaagaaacgacgcctcagatgacttctaactttgcatccaacggcccacaaccctttccctcatccacgcaccgaagatcaacttttggtcaacatttttttgggatattacaatttcattaccggtctaccaagaactgagaatggtcatgactcaatttgggtgattgttgatagactcactaaagtggcacacttcatcccagtacataccacctatggaggtgataaatatgccaagttatacattgatcacatcgtgaagttgcatggagtccccaagaggattgtgtcagatcgaggcgcccaattcacttctaggttctgggagaa

SEQ ID NO: 24174 - DNA, 299 bp, Zea Mays
cgtgtttggcgggcttcgcgccatccgttacgcgacgcgcgtcctccgtcggtccgacgcacgcggacgtgagacctcactttcgacggacgcgaaatttccagccacacaccttctctcgccacagtacaaacgtacagtgcaggcatggtcgcagttgttcttagctaatggcgatgcgggacctactggagatgtctctgctccatgcaggcatggtcgcagctattcttagctgatggcgatgcgggacctactggagatgtctctgctccatgcctccattacttcatgccgtc

SEQ ID NO: 24175 - DNA, 344 bp, Zea Mays
ggtcgccagactccgcgcgaaggacatcatcaattaactcagcaaatgtgtccgctagttcatactgcttcacaaccatcttggtaagagtactttttatgatggaacacgctttgccaacttcagaatcatactcaacaaacttttcaatgaatttaggccggtcacgtggttggagctgcttgatcttacttgaaagcatatccttgatcaatgggagctggatatgaatagtatgatgaccacaaggatcgggacgagggacatcaaaaatgtttgtcctgtccctatgctgtgatgtaatgaatgataatgcatatgtcataattaattcttagaaacat

SEQ ID NO: 24176 - DNA, 435 bp, Zea Mays
gtggacacaagtgcacgacacagctttccaaacactgaaacaggcacttacttcagctcctgtcctagcacttccaaattttgataaaccttttgccattgaaacagatgcttcgagtaaaggcattggggcagtgctactgcaggataatcatcctttagcctatgtgagcaaagccttgggcgtcaaaaatcaaggactctcaacatatgagaaggaatatcttgcaattctgctagcagtagaaaaatggcgccaatatcttcagacctctgaatttgtcatttattccgaccatcgaagtttatcacacctcactgagcagaagttgacaacaccatggcagcaacgtgtgttttctaagctgttgggtcttcaatataaggtggtgtatcggaaggggtctgacaatacagctgcagatgcgttgtctcg

SEQ ID NO: 24177 - DNA, 897 bp, Zea Mays
aaatggccttgtcagatagactgaatggtattctgattgaacagtgactgaataagatcgcaggttcacccccccttcgtcgtcgacgaccgtgcgcctggattcgtgctcgccacggtgattcgtgcttggctcagttagataacgccgtggggtaagtaaatatcgcgtcatggatgaactccggccgccgtacccgagcgtgtcatggccgctttggataggttcgccggagttagccacctcgcggtcttgtgccacgtgcctcggcatttaccatgtcgcagtcactcgcgttatgcatgtccggtgattgccggtgagcccgccacggtgaaagccactaatccttgcgccagtgcaactcttctctccgaccgccaccgcgccaactccaaattcactggccaccgcccccggagcctataaattgagtgtgttgtcgggggccgtaaggtagtcaagcacccaatccaccaagccgtgcctccaattgctcacgagagctccctaatttcggaattcccccaaattggtccgaaacactgcgccttgtgacctcgtcgtggccaacatgtttcaggtccgttcatgtcctctggttccttgtttcagtatccttgggtgctcttgatactctctgatccatccaattgagctagaattcattggatcatcgggaacatctcggtcgatccattcctcgcgctgtcaccgtgggcagggtgatgtagagctcgaatccagcaattaagtggggggaaatagtcgtgtagggttgaattcggtgtccaacaaaggagagggctagccgttgcgtagtttggccagtttaagttcgccggagttcggcctggcaccattcgtcgtcgaggactgcgggatgtgaataaatca

SEQ ID NO: 24178 - DNA, 458 bp, Zea Mays
cactgatataatcataccctggcaaatctctccctgtcaaacaccgcatattacagtgttgccattctattggcgtttccatgagtgcgacacacatagtggtgtccgcttcaaccacctccatctgatcacctacccattgtactaaaaattgatgcaaagtagatggtacacaaccattagcatgtatccaatctcgccctagcaaaacattatacctccctttcacatccaccacaaaaaaggttgttgggatagttttgctgcccactgtgagttcaacagacataatcccttttgcttgtgatggatcccatgaaaacccactcagattcatcacatccaccacaaaaaaggttgttgggatagttttgctgcccactgtgagttcaacagacataatcccttttgcttgtgatggatcccatgaaaacccactcagattcatatttgtctta

SEQ ID NO: 24179 - DNA, 421 bp, Zea Mays
ggggatacaccgttgaaaatacaaatgagcccacagctgaatgaaccaccatgggccatcagtcctaagtttcttgccactgagaaggttcgagatggtcaagtgtaggaatcggtaaacctctcccaagaacagttttccaagaccaacagggctacctccggctagtcgatgagccagggaaatataattcttagtgggagcaagggaagggccacagaacataaagcgctcaagccaaagattaagaaaagttgtatgctcttttttagttactagaccttgttttggcatgctaggacatgtaagctcccttggatgagagtttgaaacgaacttcaagcatgctgaaggctaaagggctagcaaactcgatatctagaccggtgatcattactacatccataagggtaggagtcat

SEQ ID NO: 24180 - DNA, 340 bp, Zea Mays
gtgggttgcgcatggttccggtgggcatcggtggatggacaacgaccttcgctgaggagggagtgttgatgttcagggggcagcgtatcggatgggttcgccccgccccgccccggagagattcattcagtgccttcgggatgatctctgcgctttgggtcgtctgataccatgggtttcccggcgaagtggcggtgttgggccaacaacagcaagcgaagcctggtcccgtgttacagttagatgttttttgattcgttgggtctggggttacagttgtacggagatcccatcccctaccgcgacgcgaggacacggctccagaatccagtccttcagt

SEQ ID NO: 24181 - DNA, 510 bp, Zea Mays
tcaatctaatcaagtaaggcatcttgcctgtcctcagaggccatcttccacttctctctcctttgtctactccttgcccgtgaccacgactccaatgagccataggggctacacacatcggccatcgatctactacccatacaacttatgcaatttcgtaggattccagatcatgtcaatatggtatcagagataccaggtgacgttgactctgagaagcagtcgtcaatcccaccaccaccgctcgccgacgccatcgtgaagtccttgacagacattgccatgaaagtggccaatgtctccatccgcatgtcgtggctagagcaccaacagacatcctcttttgtgggcgccatgcactaaggtttccctacgagatgtcgggatatggtgcaccaatgatttcgtccttcttcaccgccacctctatgcctcccaccaccaccctacccatgtgcctcccaccaccctcctgcacaccataatagccaacgttgcccctcttcccat

SEQ ID NO: 24182 - DNA, 313 bp, Zea Mays
ctcctcctaaaaaatccctaaacccaatcacgtcatatgttctccaaaagagtacccttctcctcttagtaatttcagcattccctgtcttatttgtacgtgattttgaaaaatctagtttcagatcttctctgaaattcagagcggaagcaccccacagatgatcgatttcagtaatggttcgacacttaggtgactctatcatattcataaggtgaattatctccaaatatgtttcactaagggttgcaccataaatagacaaaagcaagaataggctatgcattcaactgtagcttcaagtaaacataag

SEQ ID NO: 24183 - DNA, 863 bp, Zea Mays
ttttggaatgtgtcgggtgctccagtgagaccaaatgccatgacgcaaaactcataatggcccatatgggtctgaaaggctgttttaaactcttcaccagacttaaggcggatctggtgaaatccagctcgtaaatctaaaccagcaagctccacacagttcatccaacagttcatcgataatgggaaccggatacttggatttgattgtaagggcgttgagatgacggtaatcgacgcaaaaacgccaagtattgtccttcttcttgaccagcaagactggggaagaaaaggcactagaactttgttgaataagaccactggcaagcatttgttgaatttgggcttcaatctcgtccttcattgctggtgaaaaccgatatggccgtatagagatcggtcgagccccttcaatcagcggtattgtgtgatcacaaaatctgctaggaggaagggaagtgggctcctcaaatagagattggaatgaacatagcagacgtcggacgggttcaggcacaggcaattctgatagtgaatgcagctgggctgactccagtggtgatgaatctgaatgtctgatttccaatagagtaccatgtggaacagattgctgaacaccatggaggagcactgttgaatcctgatagttgaacttcagccacttatgtttccaatccacaaacattgggctgtattgttccagccaagacatgcccaggacaacatcataacatggtaagggcagcagcttgaaatcggtttgaaaccgaggagtttgtatagaccattcagcctggcacaactcggacacactctggactatattcccattagcaacccggacggacagaggttggtccaaag

SEQ ID NO: 24184 - DNA, 289 bp, Zea Mays
gctgcatgcaagcatagtgtctccctccattcatgaagcgtcgtggaaattgagggggctggcctggtggcttgctgttgtccgtctgtccctctgttgcaagcctgcagtgctgctcagttgttgtcagttcgatcggttcccctacccggacagggctagccggctagccctatggactcgaggcccggttcgcaatcttactcttacccgctgggcgtagccgctggtagcatcgtacaatctacaatttccagttcgagaataaaatcagctagacaaaaaccac

SEQ ID NO: 24185 - DNA, 406 bp, Zea Mays
gaaaacactaggcatgatagtaggtacgtttccagtcgaatctcatcttacagaagtgttatttgatactggagcaacgcattcaattattactgtatcatgggtagaagcgcataatctcccaataaccaccatgataacaccaattcaaattgactcagtcggtggaaaagtctgaagcgatggtgtatgcttgaatgtaagtgtggaaataaggggatagaatttcccgctaacctgatagtgatgggtactcagggaatagatgttatcctagggataaattggctagataagtatcaagcatttatcagctgtgataagaggacggtgaagttggtgtccccactaggagaagaagtggtgactgagctagtctcacccgagccaaagaaatgaggttgtc

SEQ ID NO: 24186 - DNA, 441 bp, Zea Mays
gggggctatgcgcaagatatcctagacacagagaacagggtccatggacggcgggttggttacacaattttgtagggacacattagcaaaacggccagcgggcagatcgcgcgctaaacccgagccgtccgatctcatcacaacggctccgatccaattgtgcgaaggggtatccttatgatctaatctcaactgttgcccaaggatccgacggtcatggagccgtcttccccaaccgagccaacgcacggcagcgccgccattcccacccggcgaaccacgccggagtaacaccgacctaccccgccagtaagtaattcgtgctcagaatctcacagaaccaaattcgctcctacccgagttgactgggtgggttttatcccgggttgcggtcccggtgatctagtccgccacgcttcgtggctatggtacagtcacggc

SEQ ID NO: 24187 - DNA, 825 bp, Zea Mays
gcccccccccgcactgttggccttgaactcaagggttgctttctgagattttgctttcaccggcccccattctatcattctcatcaactccacagctgaaggaaaaacggtcttgaatgttttcggatcaatttgctcaacagcccatggagttccacccggtagaagcctttccaactccattgtcacattagcactgccaatttccccttctatgacttgaattaaagccaccctggaatcactcttgctcttgatcagtttcttgttcgtcgggatgtgaaaaaaaaccaccattgtttattccaaatcccgccggaatagcatgtgtcttaggagcgttaaccaccggacatctagccttgatgtgggtgtttgtgccacaaacctcgcagaagagctccgcagtgcacccactgatcacgtgcccttatgcaaaacatcggtggcaatgcgctttggcattagcctttgctcccagaccctgatcatcctgcccttccttcttcttggtaatttcaatcaacggcactggtttggatttgtcaccccctgatgatgcaccttcggcctgtacctgctgaccggaaacgccaacccccttctcagcgttgaggttctggatggcactcaacgcctgttggagaagggcctccgccttggctgccttatcatccagtccggcgacactcaccgtcgcacctacaacatcattgatagaaggcctcggcaaggagttacctgtccctcttcctaccggaggtggcaaaagatctcctcttcctctgaactgacctcgacctcctcggccatagcctggtctcg

SEQ ID NO: 24188 - DNA, 308 bp, Zea Mays
gtcgtggacgacgggttggtttcaataaaacacatggtttcttttaaaagatgcgcaagccgaaggggtacgagttaatatcgaccgagcgatccgaaatcgacgggttacattagatccggaactccacgaaccggtacgctggatagactgttggatcagcgatccaaggttaggatctaatgcgctcacgatctaatcgggaccatcgatctcataacggacgaccactaggcgattcaacccaaccgttttccctaatctaatccataccgtccaatcatggatggatgacagagggatcgtct

SEQ ID NO: 24189 - DNA, 315 bp, Zea Mays
tcaaactttttgctatcaaggtgtagcctggtaacgatggaggcttcctcgaagagatgctcagacatatttcgtgtaaaaaaatgagcgcattgcatacatgaaccaaaatcatgcaagtaaataagtaataaggcggaaaagcaaactctgagctaataatgacggcaccatggtaagttgaattgaaaccaacagaagcaaacgaccttgaatctgcacacatgcacagtgacaaccaaagcagcgaaaggctagaggaggcggcctgggtcgacaagtggggacgtgaggagagcataccgtggatgcgcg

SEQ ID NO: 24190 - DNA, 578 bp, Zea Mays
caaacacatgagaggtgagagagagagagagaaaaaaaggtgtgccgccatggttcctcgccccaactgcgttcgatgtgctcggccctcgctggcaatcgctcgtcgtgggaagagaagggcggagccacagctagctaacctgggcatcggctcagaatcccctaggacgcgtagagtgctcgtcgccggggtgtcgtcattcccgcagaatcaccgtgcgccatcgcggctcggcgacgggggctagaagatgaatggtggtcgttgatctccctgtgttcggctcagattagtagtccgaaaccgatttggcctggtgcgatctgaaccgttaatctgatatgatgcggctttgatcgatggggtcgtgtgggccgttgatcggtcatccgatggccgttgcggcgtaacccttcgcgatctaatttgggccttcggatcgcgatcggatggctgacaatcaagcgtaccccgtcagccgagactcattttcagaagagccctcgtctttggaggtattcaacccgccgtccattagtgggttagcctgagtctgtgaaatatttcgagttaga

SEQ ID NO: 24191 - DNA, 531 bp, Zea Mays
agcgggagcagcgggttggcagtggtgtcatcggacatggtgaggagcatccccagctatgggctcttggtgtaaaggcaaagttgtcggtgttggtccttgcggcttcgaggttgtcattacaggtgaaaaacagtatgatgcttccaaacataacctaactagttaaactgaattcatggtcaactcacttaaagctgcctccattaattgccactggaatttcggaagtacaagaacataagatctagctcactagattactcaacctcctactgcaaaatggcattattgagtacacggttgcaagggtaacaatcaacatattctagtaatttataacttttcctatccagtgggcagtggttaatgatcaattcaattgaagagccaggaattgccaccagaacgatgaatcgaatggaatagaggaagtgcgtccaggcattactcaaacctactactgcagaatgctacaattgagtatatcattgcaagcaagcacagcactgaagttagcaaaccccagcg

SEQ ID NO: 24192 - DNA, 380 bp, Zea Mays
cggattaaagccgactgtccgcagctgcaattcataaagataaaaacattgtagatgtaatagaaaccgattcagattaaagccaaggattaaagccaattgaacagggttaaaccatgagcaaacgttattttctaattaggaagctcaaataaagtaattattgtcagaaggaactgtgaggaaaattgaggagccatcgatgaggcgtgtcctcactcctcagtcagctcactgtgtacgcggcgcactaaggggatagcatggatcttgtagcagtagtgcagcgcagtagacttgtggtggaggtggtaggacaccccggtagagaagtgcatgatctctgcggcctgtgcaacccttgaggtcaacagatgctc

SEQ ID NO: 24193 - DNA, 284 bp, Zea Mays
tcggtcatgccgacatccgtcatcttcgtcacctagtcctagctagccttgccaagtgacgacaggacaccagccgctgcagttggcaccacaagcgaaggcatcaaaatggtcgtgactacacccttcatggctccagactttgaccctccaaccgtgccagcgcgaagggcgttcgtctcgcgatgagggtcgaccagtcgtagcggagccttcctcttcttcttcaaagactcttaacggtttttgtccatcatagttgtcacaacagcgccatattccac

SEQ ID NO: 24194 - DNA, 426 bp, Zea Mays
ttggtttgctgagttactacttgggcatggaagttacacagaaggagggtgagatattaatctgtcaaagttcatatgcagcaaagattcttgagctgtgtcacatgactggttgcaaccccactgatactcctatggaacaaagaataaaactcattgctgctaagaaagggactgaaaaggatgttactagatacaagagtgtgattggtagtctgagatacctagtgaacaccagacctgacttatcctttgttgttggacttgtgagcaggttcatggaaggtcctaacaaagagcactggacagcaattaaaagaattgtgaggtatatagcaggaacactgaactatgggataaaactcaagaaagggggaaattgtgaactatctctactaggatacacagacagtgattgctctggtg

SEQ ID NO: 24195 - DNA, 763 bp, Zea Mays
ctctgatatgaaaaatgcttgttcgtttatttgattacctgtctgcttgaattatttttgttttgtggaatgcagcggtttggcaacatggctggggtttttcttgtcatggcatctgcagtcagggctctcgatcactctgacgccgagagcgagttcctccggaaaatcgcgaagattgcaactgctgagattgttacctcaaaggtatctgatactgtcaatgatttttctatgtattaacattagactgatgaattagtcatgaagagtagttacgacttcctatctcgaagcaacaccccacccccgcggctgccaaacctcacatgcagtggaaggttcaccctgttgttgagccacatcccttgaagcagcagctccaacttcatgccgcaagacccacctccacatgtgaaccaagtaccaagaaggcggatttccaacaatgacgccttcaggaagagcacactgccaatagcgtcaccgtcacttgtccaaagagtggattgggtttttagccttgaaagacaatgctagaggggaataagcacgacaccctcaatagggaaagtggcatctacaggcttcatcgtcgccaaggcttttgtgcaaggtgtccctaccacaaacgttgagccatgatgctgaccaccccttgtctgccaccaccgtcgtcgtcattgtccttgtcctgccgccccataggagccgaacttgaccctgtcgcacatgcaacaccgccgcacgtcgtagccaccgt

SEQ ID NO: 24196 - DNA, 473 bp, Zea Mays
gcaccatatccactgaacctagaaaatttgggagcgcagggatagtgataaagtcaaagccctagaggtgaaggtggcaaaggaaggggaagaaaccctaaccctactagaacttagcgtcaagtcaattaaccatacatgtttagttccctttctaatatgattctggccagaaaaaagcaaaaaaaactcatccaagcgctttaattatttttggcttctctcaaatgcggtgagtaccataagccatattaacagagcgcatagattctcccgtaacgcggccaagctctcatgatttcgagaacacaggcgcctccaaatgggcaacccccatgccttcacccaaactaccgcctcctcgcgctagtgcttcctagcctccccttgcctctgcccggtcgatagcctccctgtgcctctgcccgtcggcgcctccccgtggctccgcccggtcggccacctcttcacgc

SEQ ID NO: 24197 - DNA, 845 bp, Zea Mays
acaaaatttgaagtgtcgaagacccaaaaaaagcttcactctaataaaaagaaacctatgaactatcaaatttcaacatcagccatagaatgtgtgcacagtataaaaatataaaatggaaatggaacgacacaaaatcaaaacataattaagtaactcagcttgtctcaacgtgagaaaaattaatgttaacaactataccacaataaagaagataacatggaatactaaggttgaatataacaatgaaacatacccaacttgttaactctttgacaacaagcttgcagacatctcgtattgcaactaaggttgctagaagccaggagacataagtggtatttgatgtgttatcgtacaaactcttgaaaacctaggacataatgcaccaaaacaagcttatcattaagagtcaaaacagtaagttacaaaggacaaacaactgagaaatgtgtatattcctaatcaaatagatcaattaccttttgtgctactgctaatgcagcctcatcacggctaacacacctacgcaagatatcaggaacttccataataacagactgaacacaaacattacattaggtatcatcagataagaagatatgaagcagagcacaatagcatgccacattttgctaagcaaataggccatgaatcctacaagaaatatagatgtacttgagcagtataaacaaaacactgactgacctgaatttccacatctttgccatcattagcaatcaaggcttccagctgtggggaaataatacaatactttagtctaccaataggttgcaaaagaaaacaaaaccatccagggtagattacagggaaagcaaaaaaac

SEQ ID NO: 24198 - DNA, 770 bp, Zea Mays
tggagagtcgtatagaaagtatagagagggagagagggagagtcgtatagaacatagagagagatggagagtcatatagaacgtatagagagggagaggtggagtcgtataggacgtagagagggagagatggagagtcgtatagaacgtataggaggagtcgtataggacgtagagagagagagatggagagtcgtaggcagccgcttgatgtgcggcccacatggtgtgtgaagggaaggggtgccaactaggctcgcccgctactctccgtgtgtcctcattctcacccgtccgcatctctttacttagtattttttccgcgtctcactaaaaaccatatcagagatcatgtgctaattctaatcacaattgtcattcatgtaccacatgcgattatgaccacggtaacacggtaactatggcaaaggaaatggcgttgtatgcatgcttctcatttgtgcgagtggcaactaagtaaacaaattgaggaaatgtcgttcggtgtacattaatactttctatacactccctctccctcctctctcttatctctctctctctctccctccctccactctctttcctctctcttccctttccctctctcctctcctctctcttccctctccctcctctctcttccctctccctctctcctctctctctccctccctccactctctttcctctctcttccctttccctctctcctctcctctctcttccctctccctcctctctcttccctctccctctccctctctcct

SEQ ID NO: 24199 - DNA, 290 bp, Zea Mays
cgggcagtgagtttgcctgtaacaccactagtgttactgttactaaaacttgatcataacatcataagcatcagcatttcatatgtttgacacacctaggatgcattcactaggtaaaaattttcaagcaagttgtattgttatggcattttgcagataagaccctagtgtaggatacttaaccctgaatagggatctaaagggtaaaacaggacccaaatagagaaaaccccaaagattaagtgaaataatcataaaaagttaccaaggatggacctacattacattta

SEQ ID NO: 24200 - DNA, 375 bp, Zea Mays
aaaatataccaggatctcctggtccaatcccacgtgcagcgaatcaagatcaatttctgaattttcagattctggcatggcgaacagatttcggggattcattcttacaatagtgcaccaatcttttttctttgtaccattgacataaaacacctgctcagcttgtgaaccaagaatataaggctcatctaaatagcacaaccgagttttatcaatatcaataattccatactgatccctttggtagcctcgtcctttgttcttggcaataggaacatggaaccagttgcactaaaagaggaaaacttccttaccttgaggaaaatctagtgcaataatttttttaatcacaccataccagtcaatattaccaga

SEQ ID NO: 24201 - DNA, 713 bp, Zea Mays
tatctcatctttaccttgaaacacactgtttgttttttctagttctagttactactggaaggctcttcagtgtttttttaaaaaactacccactgatgtgctaactgcgagacttcaagatttttgtttacagaaatcttttgctatttaagtagctgtcagaaatcttgggagcactactatatagacattttaatataaattgtgagtgctggtagccttatcttgtctttctgtttagggggaatacccttccaaatggtgacatctatgttggcaactttgctggtttagttcctcatggatttggaaagtatatgtggacagatggaactctttattatggcgagtgggatacaagcaagatgagtggtagaggagcaattcagtggccttcaggtgcttcatatgatggagatctttgtggaggtttcattgacggaacaggcagtttcaaaggagttgatggatctgtatataaaggttcttggaggatgaatagaaagcatggaatgggcacaatggtttacgccaacgatgatacttacgaaggtttatggaatgagggcttgccagatggatttggtaaatatacatgggttgatggcaacatctacattggactttggaaatctggtaaaatgaatggcagaggagtgatgcaatggacaaatggcgatactcttgactgtaattggcttaatggactggct

SEQ ID NO: 24202 - DNA, 536 bp, Zea Mays
gttccttcatagtagaattagttcttacattgtgtgggcgagattcagaggacatggtggcaagggtgacagagcaccaaaaggtcaacatgacttcatgcaaaattttagttcattagatctgctattataagcgagctcacatgaataatttgagggcttaacaaaaaatcacattaggttttatatatatagtacttggtaccatgcaagtgacgtacatccagttcagaaatatagatgaaaaaattgccttgatcaaatacctttgcatacaattctaaagattcagaggaagcatgaaccgtaaagaaaatctttatatttagatttatcaaaatatgttataaaaatagaaaaggttaaaatgataagaattaaactaatgtacttttggagatagtcaaatcaacgtaacaaaacttgaactaacgggtggctgaatgcgttgaccctggttcatatattttatatagtcattttgtcaaacacttgacatgcatacaacactacagttcatgtctgaagcaatacag

SEQ ID NO: 24203 - DNA, 633 bp, Zea Mays
gggtgctcctgtcgtcgagcttgccgatgtggccaagctccttggtgaacgtgaggcagtcgaagatccttaggtgagagactgcccgctttgcccatgccaagcctcatacggtgtcatcccgttgagtgccttggtgggcgagaggttgaggatgtagacagctgtcaccaccgcctctccccagaagatagcctacattcccctctgtttgaggagagcctaagccatccccacaaccgtctggttgcatcgctagacgatgtcgttctgctgcggactatacaacgaagtagtggcattgaacgctctcatccacgcagtatgacgcgaactcagccgctgtgaattcaccgctgttgaaggtgcgcaacacacgtagcttgcggcagcactctaccttcatagtgacctgcacacacttgatggcgttcgtagcctctcccttgctgccaaggaccatcacccacatgtagagggagaggtcatcgacgagcagcaagaagtagtgtcgtcctccgggtgtggctagtgtcaccgggccgcacaagtccccatgcacgagctcgagcctctccttggctcggaagctcgactgctggggaaagaggagccgtctatgctttgtcaata

SEQ ID NO: 24204 - DNA, 528 bp, Zea Mays
ggtcactgctgagtcttcatggcttgcgacgagtggtgagatgacttaaggcatgtcactaccgatctagacagcggcacaacggcgacggtcgcacagccacgtcgccggtgcaagttggtacaacaacagggtgaaacagtgccccaagttcatctcctgtgcgatatttttcaccctgtgtagttatctgcactccaccaggcacgaatcgcaatagcggcgaggatcacggcgtgggatcaccagcggcagtacactaaaccattgtgaactcccatcagggcgcgtgatagagcaagtttgagagcgtttaactccaaaatcgttcagcgctaggtcaagcttggtataacaaagttgtttactaatgttagagcttcaactttgccacagtgaccctgaccttatctccattgaattaaccatgaactgcttccaaagttaaccaaatgtcactgaacttaggttttcagagctaaggttgtctgacaggccagcttcaagtctccttttctcccattttca

SEQ ID NO: 24205 - DNA, 549 bp, Zea Mays
taaagatggagattgcttgattacaccttttcacctgactgtgcacgatatgttcccttgttaataagtcataccacacacaaaataccactgcactatattagtctgattggtttggtgcatgaggagcacacggctgatgcgaccctacatcatgggatacgagcctctctgatatcccttcggatgcagcaaaataagttattttgcatccgctcatgcagggtgagcctcccatgtacagacaaccatacagaagcttaagttcaattaccacgtgttttgttgtcgtgccagcaacgtccagactcaccagatgcgttgactatatatgtgcttgtgattggttacctgcatgcaacgatgcgagctcgcacacgcacatgtagcccagttacatttcccaccttcagcctgcatacgtggagatctagggaaagagcttctcgaccaggctggcgtgagcccagttacatttcccaccttcagcctgcatacgtggggatccacggagagagcttctcgaccaggctggctcgcgccagacgc

SEQ ID NO: 24206 - DNA, 387 bp, Zea Mays
gggaggggctcggccggccctaggcagccactctcggccggctgggcgcgagcagaggggagcacgacgatgaagaagccgagcaggagatctaggagcggccatggaagacgagctcgacgtggggaagaaggctggtgcgttcctgggcgcggggtagagaggaggtctcatggttcggagaagactcgtgtgctgggagggaggagtggcgtgggggagaagggagaaagcagactgctgccatttatggaggagaagctccagagcacggctgccacgtctctccattgcagcaattcgtcgaacatgtggtagatgctacagtagcgactttgggcggcactttttggcattttctgtttggattctgtcgaggaccataat

SEQ ID NO: 24207 - DNA, 438 bp, Zea Mays
cactaaatccaccaaacaaattgcacatagacttaacataacatcaaaaccaacaactcagatcgctggatataaccctctctcccttactcaaatcaaatggacgatattatttggatcatctctcatccctcccctcgctcgtgtcatcgccgccatcgaccccttccctctcctccgcggggtcgtagcgttaacacgggctatatgctagtataaaaaaatgtccctaggtccgccgctgaaacaatttatgtgtcctttcttttttagcagtggtgtgcatctatctccctcctaggtcttctccacaacctgagccgcgacacatgccagtgatgaagattgaaatgcacgaaggagagagacaacaacaaaatacgtagctgttggagctcgatcggagtctgttgtgtacatgaacagtgtagtcagtca

SEQ ID NO: 24208 - DNA, 292 bp, Zea Mays
actggctgatacctgttttcaaatggcaccatagttcatcagatgcttcagatggggagttggggacagagatagctagtaggcgtaaattcgatgaccaattcaacaagccatatgattcgaggtctttttgaatgttagaagctgaaaatgtgttgttaggagttagaaccatagacatctagataggaatcatcatggggattttattttgcactattcgcctttttagaacatcttccttctatattcgtgtaatgtacggacagacgtacacgcggcgtcacagggc

SEQ ID NO: 24209 - DNA, 438 bp, Zea Mays
gtgggagcacataatggttgtagggagcctagggagatcttcgacttccccaccagagacataaaaccaaaagtcccaccaatttcctcactagtttcgagcgcacgggactatttccacaacctccgccgaagtctttccagtcctcagtgtgaaggtgcacgacccaaaatgtgcaatcttatttcctatcttcctctttgccagtgcagacaatatttcttggcaaaaacttccacagacggctgatcaccgtatgaggcaaccgcccaaacatacttcgccagggtgaccacggcgttaggtgtcaactggtggacctgcacgtcgaatctccgcaaaacctccaccacgaaacgatgcgtcgggagatgaaggccggcaatgaaaaacgccttgaacacaaccagttcgcccccaggctctgggatctcctcg

SEQ ID NO: 24210 - DNA, 408 bp, Zea Mays
cgctagggtgaacggtgtaaggcattttatgagcttctctcaagatatccatcttcacctctgatttctgtggcacacaaagacggcctttgaaacaaaccaaatcattctcatcaatggtgaactgctgctgtgccacacacactctatccagaagggaggattgaatgagcatttgagtctccttgctagcggttacaacatagcacaaagcaactcccatatgatctagatccgcaatcaaaggcttggccaccttcgggacacaggtcctactgagtgcatcagccaccacatttgcctttgctaggtgatattgaattggcagatcataatcctttatcaactcaagccaccgacgctgcctcaaatttagctctttctgagtgaaaatgtacttgagactct

SEQ ID NO: 24211 - DNA, 297 bp, Zea Mays
tatcgatgcgctcttcacacaataatttgcattttaaattagacatcacatgagcaccactaattttacctgcgaccataaccatgcgcatttggactacaacaagcaatttattgcgattacgtgcttaacccaagctatctaacaattcggctaactagagcgacgacatagtccgctaaacaacatacacgtcggcttgcatattattatcgcaaactgagacacacaacatatatataaccatcacttaacgcaatcgactcccacttaacatgagttggctaacacagtata

SEQ ID NO: 24212 - DNA, 283 bp, Zea Mays
ttctcggcgttcgctgatgccaaggaagaacgcctcagtgctgtggaggtggccgctgaggatttggcggtgtggcgtgtcaagatggacaccaccatggaggacgtcaagttggatttgaggaagctcaacaagcactgggatcgggcatccctcgaggccgcgacagaaccaggattgttgcagaagcctgttgcagctatcggtcgagcactcggtggtcctgagggagaaggttttggaggcatccgtgaggaacccatcctgccggagcagggttttg

SEQ ID NO: 24213 - DNA, 436 bp, Zea Mays
ccacgggtaaccgaacacgttcccggtgatcctagggactctagctcaattggatgggtcaaagagtatcacgagcatccaaggatactgaaacgaggactcagaggacatgaacagacctgagatgcgctggccacggcgaggtcaaaccgctcggtgttcttgagtgatttgggggaaatcccaaattggggagttctaggggatgattcgaggcacgagttgcttcactggttgcacaactacctagcggagcaggcggggtcggcaatttatagcaggcttgagctgtggcgtccaatttcacgatgatgcgctggcggccggagagcaagaaggttactggcgctcggggttagtggctttcaccgggcatgcatgacgtgtttcactgcgacgtggtctagcgctttagcacgtggcgcacaacggtgag

SEQ ID NO: 24214 - DNA, 306 bp, Zea Mays
caaggttgtaattaattgttggtcaaaagttaacaaccgtcagctctctctgtcagcaaaccagtttgattggaacaggttatcctgggttattctactgatcccgttggtccaaatccttgctgagcttgcaatgggtaaaacagttgcacactttactcaagctgttctaagaattaaaaggaagagtctagattggtgtcgatagtgcactacagctcaattctgctctccatgccagtcctttgggagggcacaatggttttccagtgacttacagaacattaaaggaaatgtttgcttggc

SEQ ID NO: 24215 - DNA, 470 bp, Zea Mays
ggaagatgaacgtggtttgtcgccggaggaaggcggtggtgctggtcgactcggcgagggagttggtgctggtgtacggctggtcatggacgtagtcgtgcgctgctgccatggtgtagattttcctgcagaaacattagagcttgcactagcacgttgtccctacacttccctttcagctttgcaagcaagatgaaacaatcgggttacattagcataatctagccatagcagattccctatttaacccgcccaaaaatctagccatagcagattcctcaccctcctctatgttacaacgcaacatacccatttgtaattgttgataatattcttctacacttttagtaccctatctcaactattgcgacttgtttaacatatcacgtacataataagaaggaacaaatctagcctgcatgacccgtttcaacacatcccaagtttgtggcatgttaattaggattctt

SEQ ID NO: 24216 - DNA, 504 bp, Zea Mays
ggaagagcgccgctcccacaaggtcgcgcacctccggtagagggaagacaagaccggtagcaccggcccgctagggaggacaaaaggcacgaactctctagcggcaagctcatcggagtggataacgccggcgcaaatccttccggcaagtaccggcgcatcccatccgagcaggcggtataccatttcgagcactcactcagtctgggtgtgctcgggatggagtcacaaggccatggcaaactacgacaacgcgaagcagagaccttgaaggcaaacgggcgcggagaactcggaggcgaaagggcgccgcgagtgggaaagaagcaagacatggctgctactcgaggggtgaacccctttttaaaggcaaatttccccactcgcgccccgaagcgtcacgggcaaggtctcccccgatgcgcaccagggttcccatcctatgacacggggccaggcctcacatgtcatacaagcccgaagcgcgaagaatgcgaatcgtcg

SEQ ID NO: 24217 - DNA, 446 bp, Zea Mays
atcacccaatggaatcgtagctagcccgggtacgaggtaggccaactacgaaatccattccaatcacctcccacttccattgaggaatctacaatggctacaaatgtccaactggtttatgatgttctgctttagttctctgacaattgtcacaaatggccacatgctctacaatctctcctttcattctgtaccaccaaaacctctttgagaattagctctcgaatagacttgatgtcagggaccatatcacccctttgacaatctctcctttcatccttcaaccatatcaccccttctccatcctcccgaaagtctttgcctttcccttctgatattagctggcgaatctcactgatcttttcatcatctttctgtccttcactaatatcccgctctagggtgggttctagctcaactgtcactccctgggtgctgtttataaa

SEQ ID NO: 24218 - DNA, 466 bp, Zea Mays
tttgtctttcatgaatttcttcaaactgagtaccacccacctgggtctcgagctgcgaagcttgggatggcatatcgggtgtgggttgggtggcatgaacagtgtgtccttgtacacaattatattgaaaataatatatgtcaaaacttgcattatatatcaaatgttgctgtgtatacttgaaaaaaacatatgctgttaactgtacatataacaaaaaccgtatgcacatgtcgaaagataaaatgttctgaataagggataattgtatgactgacctgctgaatcagccgaattccccggatgctatggctcaccagtctcgttttctaaattatcagactcggcatgtagtacctcgtcgatcaattctataaacttgtctgctatgtcgtattgcttctcaataattttgtcaatgctgtcttttatggctatgcatgacttgtcaacctccaagtcatat

SEQ ID NO: 24219 - DNA, 365 bp, Zea Mays
caaaattggttgtctaattagccaaagtatatagatagtcaagttggacactttgtctaaggggttagactatatgctgcaaacttgagtgggttcatgagaaacatccaatgctaactgtcatttcatcgggtttctagttattaaatggggaatgtagataggatggtacctccaatccataagcaagatatcatataggtgacctaggtcggtgtagagctcggattgaagctttcttgccttcttctttctcacctccaatgcaagggagagagtacttcttcctttatttccttcccctagcaatggggtggtttcaggatagttgatgggggacattttgtctagcttccatgttggtc

SEQ ID NO: 24220 - DNA, 716 bp, Zea Mays
cgtagacaaagcagcatgatggatgtcaaattaaggtgggagaataacagacctttgtgcattctttaaaaaataagctttagtgagcttattacagaaactacaatgcagttattttgttctcttctttatgcaattttccaggagttctgagagtatgagcaacttaacaaagctcagaagaaatgcatctacttcctctgatatgagtagcatggcttcgcaaggaccttcaactagtacaggtcataagatgttcttttgaaacacttatagtagcacatgattaagaattcatgtcactgggtaatattcttagttttcctgtatgctatttatgagcaaactgcaagaatcataactatagcattagattgggccttatttaaaaaaaaaatctctttaatattgtgacccatgcgctttttcacaatatgttttttttctggagataacactgcatatagttgaaaataagcaaacaagaatatttgaactcagtaagcatggaggaaacatacaacttgttgcagctgttaccttcgtaattcttgcagtcttgctgcattgttgatttgatttataaatcttttctgttctcatgggcatgttttacaaaaaatgcagctcctcttaggcggtcaagcagttggacttttgatgagaaaattttagtgcaagcattgtacaaggttctgctttcagtgtcaaagaag

SEQ ID NO: 24221 - DNA, 419 bp, Zea Mays
aagagctctgtcgtcggtcggatcccacgttgtgcaccggggagggctcgggtttgcgtctgggctggtctttgggttacactgaagtcgcccacagctccgaattgtagcgcaggtggcggggatctccggaattcctcgtcgcacttccttctccgccgcggcagtacgcccagctgtggacagagctcgtgacggcaaatttcacggtgagaacctccttatcctgcccgcctcggccttgtgcgtgttttgtacacacccgtatgggttttggtcggcatttgcgtcgtattgcctgctcgtcggacctctccaccgttgaagtgcggcggcgccgccgtgttccaggtcgggattgggaggatcgttggtggccattgatcttgcgctgaacgacttagattagatgcaccgac

SEQ ID NO: 24222 - DNA, 309 bp, Zea Mays
ggccatcgtgcactgctccggcgatgcgccgccacgtctgtcgcgtgcgccgctgtgagctatccgtaaactggttgggtagatccgggaccatggatctctacggcaatggcctcgattagatcgaggtaacgtttcgtgacgaattaatcaggtgcgttggcgcgtgatcggacgaattagaataagatcgggagaggatcgcccttcatccatcaatcgccgatctaacatccttgggcgcacaccaagttatttaaaccttgatctaatctagcgcgtttgtctctgatcgaatggccagattca

SEQ ID NO: 24223 - DNA, 832 bp, Zea Mays
acaggagcctgaagcggaggaggtggtgcagactgaaccgggggaaccgagacaccagaatgttgtagcataagagccatgaatgccctgctctcagcccgatcctggagaagctactgctgaagagaaccctacctgaagaattgaagcaagtgcggggtcaatagcaggaggagcagcaggggtagcactagaactcccagcctcatgatcatgtgagcgtggaggcataggaggcggaggcggaggtggaatcccaaaatcatcatcatcatcaacatcatcaactgctgcatcctgagcttcgaactgatgaagagcagcatcctcgacctgagtgtcaaaaactggagcagaagctggtacaggagcctcaggcgcaggacggtaggacccaaagacaaggcgtgaggcctcaagtgtgccctggaactgtggaggccgaatcagctgagcaaaaatgtggcacaagtagagagcatatggtagctgacgacgagcacgcataccatccaatacggtgtccttgatctcacaaataaggaaatcaacaacgtcaaactcagagtgagagaccagggcaccaaggagccatagctggatatatgtggtagcctccatgtatcccatccgcggcagaagtgtccgtcgcataagctgaaataggaacttggctgctgtagtgaaatttgccggtgagcgtcgtgacccatctgagaagggcgggcgaaatagagccgcgatgtgagctgtacccggagccacacagccatgagggcgacgaggagggtcagaggtgccgtagcataagctgtgaagtcgagtcgacgac

SEQ ID NO: 24224 - DNA, 351 bp, Zea Mays
actccacggtgtgttgtattgaatctgtgagcttgagagcttgagtgtatgagagtctgagttggctctaagtcagcctgccttgtaacgttgtgtgccttcctttttatagctcaagggaggcacatacaaggatactgagccccgacatgtgggcccaagggcaaaatggaaggaagaactgatgcctgtaacgcctgggcgatctccaagcgccataatgtccgtagtccatatagtattggtatgccgcgctgcttcctcggtaacgcacgagtcaggatgagtgtagtacatgcagcagtatggatgtgccgcctgccaatggaatagacaggcacgccgcctgcg

SEQ ID NO: 24225 - DNA, 405 bp, Zea Mays
ttcctttgatgaagccatattgatttttgtgaactagggaggtcatcactgtctgtaaacgattggctagcaacatagttatgatttttcatactattatttagaagcgatattggcctaaaatctcccactaattgagcattttccttcttcggaatcagaacaataaaagaaccattaatacttcgaagacagacatccccatgataaaattgctcacataagtcgtagaagtcctgagaaatgaccggccagcactttttgagaaaattggtattaaacccgtcaggccccggcgatttgtcggaggggagagctgcaacaatgctatcgatttcttgctttgaaaaaggctcttctaaccaatgcaagccctcttgcaacataatcaggccagagaggtca

SEQ ID NO: 24226 - DNA, 417 bp, Zea Mays
agctaggataggggcgtccaccaacttgttctttaatgtctgataactgacctcgcaatcgctgaaccagatgaagagaacacccttctccaagagtatagtcaagggcttagtaatgctggaaaaatttggtacgaaacaccgataatatccagcgagccccaagaaacttcgaatttcagagacactagagggtctcttccactccaccacagccgcaacattcttgggatcaaccgcaatgccttgctgattaatcacatgccccaggaaagcgacttcggacagccaaaatgcacacttcttcaacttgccatagaactgattctcccttagggcacccagaacgagacggagatgctgctcatgctcagcctcgatcatagaataaatcagaatgtcatccaggaacacgac

SEQ ID NO: 24227 - DNA, 303 bp, Zea Mays
taacagtttatcaaacatcaaatactggcaatgtttaacgttgaaagatgacctatgtatcaagcaaaccaactgaacagagttttctttttggtgtgcgcaatggcaacagaagaaaaccacgtagtatagacttgataagatcatagattatctgtcaagctgcaacaaagcattacgaatgctacattctggtgtttgaaataggaaaagaaaatcttaaaatcacaacaaagttctaaagcttatccaagatctgattagattaaaatgtaaagggaactattttatactctgaaaaat

SEQ ID NO: 24228 - DNA, 306 bp, Zea Mays
tccgtcggccggtgttatcgacacctcgatcattgtcggtcgtcccataacggtcgtgaggttggtttgtgctggcccctaacctggtcgtgttatcttatgccggagagtcgtagctttctcctccctcgtccctcatgtgtcgtcttgcgaggttggtccttgacccttccactgttagcgatggccgagctgcggggtcgactggaaccatctcgatcagtcgtacgaacatccgacgctcgtgacgcaggtcttcaggtgcgactggcaaggtgaaggctcgtgcggcgagtacgccactcg

SEQ ID NO: 24229 - DNA, 687 bp, Zea Mays
tctaccagagctccccaggtcaaggcacctttgatatcagagacccatcttctattagttagggcctcgcgaacagttcttttagaaacaattctttttggaaaagtcaagaggagccttggagcaatatcagatacacttctggcattaatccacttgtcactccaaaagtaagtgttagcaccatcaccaatttctgtgacaagtacagaagagaagaaggctttagctttgcttgggacatgaacaggaagattattccagagacaggtagggtcggtcctttgcagccatagccatctcatcctaagtgcccaacagagttcagggaggctggaaattcccagacctccaaagttcaagggtctacacacttttccccaagccaccatgcaatgccctcctttaacctctcttctgcttctccataagaaacctttccttatcttgtcaatttccttaatgacccacatagggaaatcaatagccatagcagtataaacagacatcccagtgagaacttgttgcactagaattcttctccctaccctatttaataagtcagccttccagttaggtaatctatcagcaatcttatccaccaggggccagagttgttggtttgataatctatgaagtgatagagggaggcccagatatttgcaggggaaggaggcaatatcacaa

SEQ ID NO: 24230 - DNA, 376 bp, Zea Mays
gccaaagcgggtcaactcaaactcaaactcaagggctagcgacggccgccagcagcaacagctacacacaactaactgtatcctgccaatgccaatgccaatgccgcactagcaatctactcaagtttctgtggcattaaaatggtccagtcagagaattaaatatgccagtgaactctgtcgttgtgttccccctttttatgttaccttttacttctgttttatgctctgtttatacagtgaaatttgaattagaaaaatgtgataggagagctgctagcatgagtgcagcagtgtcgtgggttgtgctcctgccctacctgtatttgtccacgtctccttcgaagcaatgaggccccctcctttcccctcgtgt

SEQ ID NO: 24231 - DNA, 1283 bp, Zea Mays
gccttacatgagaaatcccaggctgagatgcaactttagatgaatgaggttcagtgcttataatgctggaaaccaactccttgcctttgtccagaaactgtgagctagctccgaaggaagaggggttgtatggaggaactgtgggaaattccatctgtggtgcagaggcagagttaaaagctccttgtgcccctacattaactttccctgaaatataagcaagctcatcatcaagaagataagtaattgcactactttatctcaccttagactattatatctgtttaagtataagtaccttcaacagtaactccagacctcactaaattatgaatagaaccttgagaattcttcaaggtttgaacttgtggattttggttccagccaaaaccaggattaaataaacttgctccaccctgtatacttttctgcaactcgattggagcaccagtagaagccagcccttcaggaaaatttggaatttgacccattgagaatggatttgatggtttagtcttgtccattgtcctcccagaaggaccttctgagcgagtcctgagaaaaggtgcaccaccatgtataggtggtacctgaccagtaccaccttgcagtttatgaggttgctgctcatgctcaattcccatggaaggctgaccttgtctaccagccttaccaacctgtttccccttcctggtattctgtccagtggagataacatctgactttgagttgtcttctgaacgcaaatcaccagctccttttgaatccatcctttttctcttggaagaggttttcttacttgttttctcatcggatttcaaagaatcatgtgaattcatagatctggtgtcctccatctgcagacttgcagggctttcaatgccagaggatctaccgcttttttgtgacatggagccttgatgaatatcagctgctgagaaatctcccctatttggccctgtgggtaccctacctgaaatagatgccccatgtcttatcatatcggttgaacctgatgacataaaagaagtgtcaggaagtaaagttaactattgaatatcttttttcaaatctgcttacctgatggaagctgccataatccagcttgtccactactttgggaagcatcacttccgaccatgggagactggttaccaatgacctccttgtcctttgacatgacaccactagaatcccctgcctgaggaccaccagcaaatggaattcgtgatgatcgcaatgcatccatatcaattccatgttggttcacaactgtctccata

SEQ ID NO: 24232 - DNA, 404 bp, Zea Mays
agcttatcatttcctcaagacgttcttgggagggaaactgcatcagaaatcctgaatggcatttagtagctttccacctcttgttccatgggaagtgaaacccgaaatctctctcaagatcttcagccgagacaagtccctcaatcactttaaccagaccgataaaaaccctttttggctttttggtcaatggtttagcgaagtgagacagataaaaccctaaaccatcagcagccaaaccaacaatgggcatggtgggtttgttttgcttaggaagaacacagcgagaagtgacatgtgtctccttgcggcaaatatcacaccacaaagcgttaaaacaatttctggcatgatgtccttcaacaccacatttctgacagaacgcagggcgaacgagatcaaga

SEQ ID NO: 24233 - DNA, 461 bp, Zea Mays
gaaagattccattacggatggtgtatcttgactcatctgatgattccgttttgccctttggagacttgagttggtgcttatcctcccttgacgtggttggtcttctttggccctcagtactggagttgccatccgagttgaggacatatggctatagctaggatagctagggtacatgaggtagttagatttaaacaaagttttactttgcttttaggatatctggattaggcaacctatgatgtaggttaggttgttgtttacggacgagttagtccaaggtattaatttagggtaagatatgtttatagaatcagggcctaatttatgtctaacttaagtaactcaatttggattagctcatgttagattaggtgggatctagatcagattggtataactagataagatctatttattttaggctagatcatggttgttactatagagtggggtaggta

SEQ ID NO: 24234 - DNA, 382 bp, Zea Mays
aatgaaattacttagttcaaaacgaggctatataaaatgcgagtattttgtgaatccagtcatatgttagcatcactacaacaagaaccttacacataacggaatttatcagacatcgtaatagtcttttacatgattaatgtataatagtaatatatacgactactctgacataaacatatgaaagtgtatggcagggtggggatcaaaactgtcagaagaggcctaaattgtttcagcttccatacttctccacaaacaaaaatgaaaatggtactgacgaaagtaagtctggcaccagtattacaacatgtcgataacagacagcaatcgatagtgcatagtactatagtaaacaaacagctaagcaatactatacata

SEQ ID NO: 24235 - DNA, 322 bp, Zea Mays
tagacatctagatttgatggaaaccagagtaagcatctaagaaggacaagaggtcgcacctagaggtagaatccatgatttgatctatacgtggaagtggatacgggtccttgggacaaactttattaaggctggtgtagtcgatgcacatccgaagcttcccgtttgcctttgggacgatgactggattggccagccacactgggtgatgaacctcttcgatgaagccggcgtccaacagcttccggacctcctttcggatgaagtcctgccgctcaacagactgtctccgaggcttctgactcaccggtttggcgtcaag

SEQ ID NO: 24236 - DNA, 526 bp, Zea Mays
agaaagcactggtgaagatccgatccctgtctgaaacgatgctggagggcataccgtgcagtttgtagacattgtcaaggaaaagctttgccacttttgcttctgtgaagggatgagccagaggcaagaagtgactatatttcgagaatctatcaacaaccactaagatacaatccactgatcttgacttcggaagtccctcagtaaaatccatggatactgagtgccaagcctgaggtgggactggtagaggattcagtaaactgggatatcgagcacggtccgacttggcctgttggcatgtgttacaggactgcacataacgatggatgtcacgtttcataccttttcacatgaacaattgtttcacccttccgtaggttaccggcacccccgaatgaccaccgagtgatgaattatgaaacgctacaataaccttggtttgcaacacaacattgctaactaaccacagacgatccttgtggcgaatgaggccattcttcagagtgaacggagagtctgattc

SEQ ID NO: 24237 - DNA, 298 bp, Zea Mays
tgccgaaagaaactactgctggctctagccaaggtggtttggtttatctaagatacaccttatggtataggagccaatttgatgagccgaatgacgattggttagaggctgttgaggcaaccagtgatgagctgctgggagcctacacaaaggcagaggacaaagccatgatcattgccttcggcgcccgaggaaaaaagactgaacagagtttttgatgtgatcgggtttgtttatcctgactattgttttcctgcttgaaaacaaggagggaagaggaacattggcacttcgacct

SEQ ID NO: 24238 - DNA, 298 bp, Zea Mays
aacgctgttagccctcatgcaaatgctaccgtttatgctctacgaggcactaagttttacaccgatcaagttcatttgacctctcttaatagtacgactgtctatccaattaatccggtcaatttcttctctaaacacctgctgaccggcaaaaacaaaaacatatgttttacctttgccttcacttgatccacaatcaatggttataggtcccaaagactttactgtttcctgtggtccagtcctgcattcttatttctccaagaattgttagtccataatcagttgtcattaatta

SEQ ID NO: 24239 - DNA, 764 bp, Zea Mays
gggatggggcgtggcgaacctaaaggcgacagtactatgcaggattcaggggtgccgggatggtgaaaacactgattcatattgtaaacaattcctggattatgcgaaagaatgtagggaaatggaacgaagaaggagagggggaaacgaaccagagcggagaacggcggagggcaaacgatgaagcacgatgattagggtgagtgggggcggtcgtcgatggcgatcgtaggagcgggttacagcgacggcgaggcgcggattttattagggtttcggtggggccacgatgagtgggttgattgtggtcgggtgggtctcggacattgaccatattggctcggtcggctagcggggagcgacgcgggactgcggggacctgtagtgtgcgcacgatcagttggtcagcgtgtgtacgttgtgttcatatgaagcataaattgttgtgtaaaggatcgtaaacactgggagtttatacaagcattaatcccgaaccacagtccgcacgtggtataaattgttgtgtgtacgtcatgttcatatggagcataattttttgtgtaaaggatcgtaaacattgtgcgtccgattgatatgcagttgttatcgtcaacttacacaagcataaaccccgaaccacaaccccaccgcgacccgaccacaccgctattccgatttatgtaactgttgccgtcaaaatacgcatgcataaatgcggcacaaccccacgcgcgaccccaccacgaccccggtgcacccgcgca

SEQ ID NO: 24240 - DNA, 641 bp, Zea Mays
cggcgagctcctggaccggtcgattggggctatgaccggcactcccgagcggctaacactcaattgaactctcctcgaatgactctcctaagttaatttctcatttggtaaactatcatgttctgtccacgtgaaccgcggatgaggaagaaaatggtatgtgttcccggcgatccctggcggtccgattcaattaaaggggtcggggagcatcaccatcatgtaaggatgctagaacagggacaagaagggaatgagcagacctggggaaggctggccgcggtgatgtgtggttcacggcggcggagaatcgatttgggggaaaacccgaattgcggggctacggtgaacgagtggagatgagagtgggtgctatagcttgacgattacatggcacaaccgacctggccctcaatttatagaagggtaaagtggtggccagcgaaattggggaggacgcgcggcggccggaatgaaagggtgagtcaccggcgtgacttacagtggcacttactggttgaggagctacggcggtcatcgtcgagctggtgcggctagtggcgacgtgtttaacggctggaagcatggcacaatcacggcgcagaacggcaactccggcgatggccaagaagccacgtcgc

SEQ ID NO: 24241 - DNA, 468 bp, Zea Mays
ctggaagtcaagccaaatcttgaagatctcatatgcaaggctcaacgcctggacgcagagacagccagacttatggagagagctcacaaggagcaacttccgaatcttaggacagatgagcaaggagtcctctggttcaagaaccgcctgtgtgtaccaatgggagaggcacgggaagtcctgctcaatgaagcccacaactcagcttactccatccacccaggaaccaccaagatgtacctggacctcaaagccagatactggtggaaagggatgaagaaggaaatagcacaatatgtggcctggtgtgacacctgtcagcgaacaaaggccgaacatcagaagcctgcagccctacttcaacccctcccagtacctgaatggaagtgggaagaaataggcatggatttcgtgaccggactgccccgaacgcagaaaggaaatgattctatatgggtaataatcgat

SEQ ID NO: 24242 - DNA, 495 bp, Zea Mays
caaaactcggggtccaatctgtaacaattccctagactcaggctaaaccagggaaggactgcgggttgatactgaggaaatagaggggctcttttgtaaagctgtcggccgaaagggtatcacagaacacgggccgtcagatctaaacagacggtccagatcataacgtgaatcggtacttgccgtgagcgtaggattccaatccaacggtccgcagtgtcgcctcccttacgaccgcatacacgctgatcaccggtcgagatcgatttgactgaatcggtacgcgcaactaaactcaagccgttgatttctcatcccatggccgcaagtcgaaccggtcgacccaacgccccccttctaatctcagccaaccgagaaggatcggtcggcccacgagtcctctccttcccccagcctgctaacccagggcggcgccaccgattccccgcggcggcgcaacataccgacgaccagcgccccagcagatgccccgat

SEQ ID NO: 24243 - DNA, 491 bp, Zea Mays
ttcgaatgaggccaccgtgacttgatagctcatgataaactggatcaaccttccgttgtactttggccaattcccgtccctatagttgcttggccatggcgttgcctgtagtctggcggagagtgggcatctgttatcagtgaaattgaaggcatggaaggtgttgctctgatgagtctatctaactttgtcaaaactgctcaatctcacatggccatgcgaggggtgcgtcggatcctactgggcctgcaacagcgagatttcctgctcaagggcttggaggtgctctttttcttgctagataaggagacgtattatggcctgtgccttactacgttgctgcttggccgcttgagcatctctctgcttctgaaggttggagttgcacatgcaaaggctcttgagtaagagttgctcttcggtgttgacaccaaggtccgggccgtcgtggaggtctgcatcattgtattccggaggcatttcaaatgggt

SEQ ID NO: 24244 - DNA, 1055 bp, Zea Mays
gaatattattacaaaattttagaaattggaatggctcaatttggagttaaaatgaattttctatgcattttacaagtttctagatttgtttttgtattaaaaatgaatttctataaatatttctctgtttttaaacacctctggactgggcctcatttttcagaaaagtcaggggcttctacgcaaaagtactcagactcagaacactccccactggacggcgggttgatatcctgaaagcagaggggctctttagcaatgttgacccgcgaaggggtatgggcaaaaactgatcgtccgatctaaaatatgcggtcccgattagatcagctcaaccatatagggttacttctctcaactaccattgatcaccgaatcaacggacagggttctaaacgatctaagccacacgatcctaaaccgagggctcagattttataacgcgaagaggtattcttggttttaatctcggccgtccatcctatgatcaacggcataagtgatttcttccacccagtcattgccagcggcgatgtccagggggcgccgcggcggagcttggccggagctggcccaaccacgtcctggcgtgctaatcctaaatttaactggcgcatcatgtaacctagagggtagccaatgctgtgggagagtcattaccagagctagaagaaatggcgaagctgcccacgcgcacacccagatccgcgggggggagaatcagttccggcgagcaattcgcgcgccacgacgacaatgtagtgctccgattcgccaggtacgcatacgatgacgtagtccgaagcttttgaaccaagccctgggccccaatgacgacgacggcgcgagatggttgtggcggcggcgtgatgcgatagcagagaggatgcgagcacgggaggaaaacgcgagcgcagggaagaagaaaaagcggggcggagtagctgtgagggaggtttaaatggtcggataggtgcggtcatggtaggatatgcgcggtcgccatgccgaagttaccggcggactttgagccgagcgcgccgtggaagtagtcg

SEQ ID NO: 24245 - DNA, 546 bp, Zea Mays
ttggcgtgagtgtcgacaagggtcgatgtagagtgacactcagccatgccagcgcgctggagaagctcgacggtgtactgtcgctgagacaggaagatctcgtcggaggagcacgtgacggagatgttgaggaagtgatggaggtccccaaggtctgtcatggcgaattccgagtgaagaaggatgatgaagcgctgaagaagatccgtcgaagaggcggtgaggatgatgtcgtcgacgtagaggagtaggtaggcgagactctcaccctctttgtagacaaagagggagacgtcggaggaggcggtgaacccgagctggcggatgtacgtggcgaaccgctggtaccatgccctgggagcctgctttaagccataaagagagcgctgcagaagacaaacatggtcaggagcagcgaggtcgatgaagccgggcggctgctggcagtagacggtctcctcgaggtggccatgaagaaaagcgttcttcacgtccagctggcgaatgtaccacgaacgagaggcggcgatgctgaggacagtccgg

SEQ ID NO: 24246 - DNA, 318 bp, Zea Mays
atttacctttttagggtttgctacctttgttcacggtcgacgacgatcccaggtaatgcggctcgctagggttcggaagaacctcgaggagtttggttgggggatgtcgatgatgaaaccaccgtagatggttgggggagggctaccgtcggactggagctggagtggcacccgttgacggcgggttggaccaggcttctgccgcagaaatgtggaacgacaacggagaatggggaagcagtcatgtcggcggagaatctggggttttctccggtttggagtcccatctcgtgttgcagcagcgacggtagtggagcg

SEQ ID NO: 24247 - DNA, 446 bp, Zea Mays
agtgatgatgctatttggtattccgaatctgaacattatctcctggatgaattccactgcctttgttgaggtcaaggaagcaatgggcttgtattctatacacttcgtaaatttgtcaatggcgaccagtatgtgagtataccctccttgagcttttttgaaaggcccgatcatgtctagcccccagcatgcaaacagccaggtcacaggaatagtttgcagctgctgcgcgggtaaatgctgttgttttgacaagaactggcatgcctcgcacttatggactaactcggcagcatcactcttggtggttggccagtaaaacccggatctgaaagcttttcccactagagtccttgatgcagcatgcacaccacactgccctgcatgaatattatctaacagatgtctcccggtagctgagtggatgcacttcatgaggacccctc

SEQ ID NO: 24248 - DNA, 409 bp, Zea Mays
caggatgctgaggacgaagaatgtcacaccgttagggggaggagatgatcagcaccctccttgccctttcaaataggacaagggcaaggaagtctaccttgagagtagggaggcaagaaaaagagaaggttggaccgagccactcttgcagcagttgccgtagcagcagcagattaggtagagtatggtggtctgttaaggatcgcctctgatcaaatagccttccgagtccgtcgcctctcgtcttggcctcgctccacccctgctcgatttgatccctcagatccagtcaccactccaccttccactatgccagctcctgccactcttgagccttccaccacacctgttgcgcccactgcctccaccacactagcttccactactcctgctctcgcttctgctccac

SEQ ID NO: 24249 - DNA, 484 bp, Zea Mays
cgctccgtctgcaccacggcgcgacgtgaaccagcaaaccgacaaacgctgggagaagaggcctcgtgaagaagtccatgccgccggaccaccagtctctcgcgcccgaggggcaccccgcggaggcaaacgaacattgaacgacatcctcgacgctcagtgcccgtaccacaaggatatgtgtcatactcttcggaactgcaaggacttcaagcactccacgagaatggccgacctttccaacctctaccacctcccccaccatgaggaggacccggagaacctcgacaaccctagcagcaggaagggggaggaggcggagcattcccgcgcgtcgatggagaagtcaacgtcatcttcgacggacacgggtcgcaagagaacaagaggcagcaaaagcccaacgatcgccagatactggtggcggccaccagtgctcccaccccatatcgatggttcgaacacccgatcaccttcactcggg

SEQ ID NO: 24250 - DNA, 456 bp, Zea Mays
gacaataccccgaagatactgaataactgcttgatcgcacccaagtgcggctcacggggatcatgcatataaaggcaaacctcctggacgacatatgcgatgtcgggcctagtgaaggtgagatactagagagcaccggtgaggatgcgataggtggtggggtcacttacggaagcgttgtcgctagagagcttggcatgcgtgtccaccggggtcgcacagggtttagtctagcatgccagcccgcttgaggatgtacatggtgtactgtcgctgttgaggaagagtccatcggagtgatgctcaacgacgatccccagaaattgatgaaggggcccaaatccttcatgtcaaactcatgctgaagggcagtgatgatccggtgcagggagccgaagaggaggcaatgagcatgatgtcatcgacatagaggagcaggtacatggtgtcactgct

SEQ ID NO: 24251 - DNA, 288 bp, Zea Mays
cgcgccctgtgtcaccgccgtgtgggacctagtcacggtggcacttacgtgtggggcctggatgtcaggaacctcttctccctcccttatccgcttttctgttggggcatgccgaattccgttgccgcacaaacagtcccccgcgaaatagcagacgaatcctccgctgtgatcatctattgatggttggcatgcatcctgttggagctctcaacgtcgtgcatatatatacgtgccccggaaccttccctctcatcacagttggttaatcatcgccatatgcggggt

SEQ ID NO: 24252 - DNA, 453 bp, Zea Mays
ccggaccatcgccgtggctctgcccgtgcgggtaagctcgccagcgcggttacagctccgcaattctcatccaattccggccattggcctataaattgagctcgaatcctgtttcttcaccacatcacgcacacaagcacttgagcaatcgactcaatttcaccagaagaactcccatagtccacaaagtcattctgccctgttcttcgcactgccgtgaagaactcctccgtggccagcactcctcgggtcagtaactccccgattgcttcctgttgtagcttgtttatagcttcctattgctctcagagccgaccaattgaagtttgtcagagtcccatcacaggaacactcttctgctccgtagaacgctgccgcgacaccctctctatcgacccacttttctactcttgcccagtccaaattctagcgtgtacataatctctggtgaac

SEQ ID NO: 24253 - DNA, 366 bp, Zea Mays
acagcacaaatgtgagatactacgctcttgaaacattcttagaaatctgacaaggaaaacaaaaaccttttcgacacttgctacaaatgtatctttatcttatagcaaagctactcacaccgatgttgtgaaaacacatactaacttctgagtatacttgtaaccccattagtgtgccaggtttagagccgactttatggtcaacaagcattagccagatggacatggccacactactctaacaaaagagtggcaaaggagaaatgcaagatttcagacatcgatcaaatggttttcaaatcacctaattgacatagtcaccatggtatcaaccagacgaactaattgcaatcaattgtagtgcat

SEQ ID NO: 24254 - DNA, 374 bp, Zea Mays
gtaacttcgaacttctacgcaaccatgatttctaccttaggaggcaaattccttaggagctgctggagaaggtcctcaattccgtatataccataccactagaaaagttgtaatcctacatgagtcagcttcaaattttgcattcctagtgccacttctgtctatacaccgtgaatgtgctgttatgcgccttggcccgtggggggaaaaaatacaattttacctttctcgctcctttgtcccgtcgacggtgaactgacctggaagcaacactgatggctgctgcttatgtgtcggcttctgcaccgattggatgattgacacctccgctatcttttccatggacacgctgacatgcctgccatgggcttctg

SEQ ID NO: 24255 - DNA, 341 bp, Zea Mays
actagggatgctatagcaaaagtgaagatggtttatagatctataactttgatgcagatgggtgatgaggttgtcacaaagaatttggagaaaatctgccttgattgcgctctgtcaggcgctttaaacagagattcaaatggtatagtagcagaaatatctcagatacggcgtatctcgccgccagtgacccttcgccgcgattgacgtcgatcgtcgcaattcgtgcgccgtgacttgtggataaccgtgggcaaggaaagatctcaacttgggaaagggagagagacttatcgccggactgttcaccgtgacacttgccgtgctacggacagtggtgt

SEQ ID NO: 24256 - DNA, 396 bp, Zea Mays
tagtaaaatgatgtgcgatggttttgaaatttgtttgcgggatatagaagtcatccttatatgagtaattgtaatcacgtcagatctccttaagttgctgctgacttaagtcgattgcttttgttaatagggcgtagtggtcaccctgaattgcgtaggcgtgagcatgttgcaccgccttaagtcgttgccgacttaagccgattgctccgttagcagggcatagtggtcaccccgagttaagtatgcgcgagcatgttgcaccgccttaagtcgttgccgacttaagccgattgctccgttagcagggcatagtggtcaccccgagttaagtaagcatgagcatgttgcaccgccttaagtcgttgccgacttaagccgattgctccgttggca

SEQ ID NO: 24257 - DNA, 476 bp, Zea Mays
agcaggtgcataacattgccaaccagcaccccgctggtgagacccctcgccgtcaagattatccccccagcgccgcggcaatggcacgtgtggtcggagtcgaggacgggcacagcagccgcgcagattttactgcctgtttcacggtgaagactgcgcacacctaatgagggactgcccggaaacaaaggccaccagggacaggatgtctcgggcccaaccagtcgacaacccaagagttatcgcgcacacatatcaacaccacctccacaaccatacaaccacggccccgctcagcatccacctaaccacgcataccaacaccaccaggaggtacaaatcgtaccacctccgctctcgcctccgcacccgcatcagccaaacatccaccacccaaatcactccaagcaccaaagcaagaagacttcgctgatcagccttaccatggagtcattcacatgatcactgaggggtcc

SEQ ID NO: 24258 - DNA, 387 bp, Zea Mays
aaggaatataatacatctgatagattaaaacagctttggggcctgccataatgtcaggtgaaaacttacagttctctgtgtctcagtcgaaccgctcgccgtcattgtctctatagtaggtggcaccacgttgtgactattgtgctgtatcccaaccccaagcagtaggacacatagcagagtgccatgacgaggaggaacatgtccacgcgggtgagggtgccacaacacatcctaccggtgtcgccgtcgtgtgtgctcgatgacgctcgatgacccgtcgtttgcaatggactggtcgtggccagagcggcgaggtggaggaagacatgaggtggaggaaatgggagagaattgactccagccgcctttgcagttgcattcgtg

SEQ ID NO: 24259 - DNA, 307 bp, Zea Mays
gtcgtaacctgatccgattggacaagtttgaactctcattcatatttgcaaatatggctttaagccagactatctggtgtggtgcgagcatggagaggtggatgctcctttggagtcaaacatagacaaggatgtagaccaaatggagaacatgcttattgacatctgacatgagtatgcagcactggagaccgaccgactcccgccataggaagtactacagttttacaagttgtcagaagccatggatgcaaaagtgcacgagggcaccaacgtgattgtacttcatgtcgtaacatgagttacg

SEQ ID NO: 24260 - DNA, 278 bp, Zea Mays
tatttacctcggtcatctgagctttctggtcggaatctttaagtttgactacatgtgggcgtagagggacctaggcatcatcattgcacatacccctgaaatttgtagcctaagccttggagcgacacgtcgtgttgcgggtcctgtagatcgtcaggggactcaggcctaggcccgatagaccataagtgggtcgaaggcctataacctcatggtcatgagtggggttctagctcgagtttgcatgtcatgagtgaaaggaggaccgacttcccccg

SEQ ID NO: 24261 - DNA, 481 bp, Zea Mays
gggtacacacacggatgcgtgaaaaaaaaggggccactgccagccagtggtactggtactggtactggtacttttttcctatagcttgtctccctgtcgatctgtctgtgtgggcgtctgacatacgtagatatggaatgcatgcagagcattgcttcctgctgccactgccagccagtgtgtattttgtttgacactgtccacagtccacttcacccatcgccactgagatagtacgtgctataaacgtagtagtagtatatggtgatttgccgtgtgtttcgacttattcagtaaagaccgaaaaacattcggcaaactctttgttacatgcgctatcggccgtagccctaaaccgcgacagtgaccttgaggatatcaccgtgaaattagagggccggggcagtgatagatgtttgatgtcattattattgctggatttgaacaatcaggcggtgttagaaaaacctcaccactgtgc

SEQ ID NO: 24262 - DNA, 283 bp, Zea Mays
agaaggtcctgcgctgccgaaaaaacgaaggattattcaaatagcagatgtgattcatgggacaccgtcaccgacaccggcatcaagaattgctattgaccagactgccgaaaccgccgaagctaaaggcgccgcagccgaagccaccagagcggaaaccttcgaagctgaaactggcgcagccgaagctgccggggctgaaaccggggccacagaagatccgaacctggaagacacacttgaagttattgataacatactcctaaaaatgactgaggaagaa

SEQ ID NO: 24263 - DNA, 379 bp, Zea Mays
atggtacagtaactagatcagagcgctagctcagttaactcaccgctggtgaccgtgtgcccggattcgcgcccgccgcggtgattcgtgctcggtgcagttggataacgcggagggagtaagaaatatcacccagtggatgaactccggccactgttcactctggccgccatgtccgcttagctcacagccgcttcggatccaccctcgccggagttagccacctcgcaaccttgtgccacgtgccctggcattttaccacgtcgcagtagctcgtgttatgcatatccggttatcttgccacggtaattgccaccaatcgtgtgcgccagtgcacctccttctctctgaccgccaccgcgcgagttcaaaattcact

SEQ ID NO: 24264 - DNA, 483 bp, Zea Mays
tggttgcagtccgtagagcgtcgtttacgtttcatgtcatgggaagaattttgtgagctcattcatgagagatttggtagggagcaacatgaatcactgattagacagctgtttcatatcaggtagctaggtcctgtttccgagtatgtagaacaattcgcgtcactagtggatgagttagcagcatatgaatctcgcaccgatccattgtattacactatgcgtttcattgatggtcttagacatgacattaaggctgtaattatggttcagcgtccccccaacctcgatgttgcctgcgctctggctcttgtgcaggaagaggcgttggaatccacaagacgccgacgggtcgagcctatttccaaccggatggcttggcctcacacagcaacgacgactgatcatgatcgtgctgatggcgtaactccaggagttgataagccggtgacggacggccgccggctgggttcatcaacagat

SEQ ID NO: 24265 - DNA, 883 bp, Zea Mays
ccaatcttatggtggaccatcccattaattttgaaaacgtagggtgcagtgtcattatttatcgttctatcgatagctgcaccgaaagaggtgaatgcaaacaatgaattgtaggaccagataagcctcaagaaacgcctcgagcgagtacctccatcaaatctcaaaagattagcaagcaaaggtggcggacgctcaaacggttttaggttcactttccctcctctgcagcaatggttgtacacaatttttttctgggtggagcaggaatcgtttttaacacgctcttggaaccagaaaacagcatggcagtatgggcatacatgttcaggtccaccgtagtatgacctctcagggtaggcatctacacaggaagaagagaaatggtagcaccaaagcaaagcaggaagaatgttaccaaaaatgttgggcataatacacaccttttagagcatctatgtatgacctgtccaaaggaagcgtggttgacaatggctcgtcaggtaccatgtgatgtactctactgcgccggcgtcgcctattgaatgcggcaagcgctgaagggaatgacattatagatctactacctgtgccgacataagcatcactaacaccatattgttttttgttgaagtaatggctgaacaaacatgggtgtacgcacgtgttccctatagaacaggtattggctggttagaggtccccgaaaggttagatgggtctacttcgtcttcaccatgaaaaatgcgatgggcatcagttgtctcaaagactgggcaatctaaagaggttgcgtattttttggcccgcaagagaagtatcgcaaattaggatggataccggccatcgcatgcataaacaaagcagcaaacttgtgaggact

SEQ ID NO: 24266 - DNA, 284 bp, Zea Mays
gcggctagagcgttgtgttcccggcgatccctggtggttcggttcgattaaagggatcggggagcttaaggaggacctagggatgctagaacaatcaacagaggagtatgaattcacctggaataggctggccgcggtgaagtgttcttacggggtgttcaaaccgatttgggggaaattaggaattcgagctctcaggtgaacgattgaggacgatctttggtggctgggtgcgcgatgatgttgcgaagctctctgcggggtcaatttatagatccccgggg

SEQ ID NO: 24267 - DNA, 770 bp, Zea Mays
gctaagtctgacttggcgacggggctccagcctctaggtcctcctcctgttagtcggtcttctaggcatcatctcctctgggtccgtccttgcgttgtccttccaggtggtcgaacctctcgtgtccgggggccggcctcctccttttacagactagggagggggttagcctatggtggcttctttaggaaggagccaccagacgatggtaaaactaggcgtgttaccatggggtaaagccacacgtgcctgcagtcgtttggttgtcccatattctttatacggacgacgccgacagtgtgagctcgggcaccatcatttgggctatgtcgacccctagctttcatagcactgggctcgatgcggctcgtcgagttgtaccctaccagcggtctgcgcactcagatctagcctcgataggttacgagtgctctgctaggttatgataggttttgagggcttgtaggtcatgagtgctatgcggtccgatggttcgtaggtcatgagtgggaagtagattggcgcctctgctacggctcggcaccaggcacagttaatacggcccagtcatttatgatggatcgatcttgggccaaacgcgagatccactcgaatggtttcccttcggcacgctcaccgccatgtctagttcggccacgctcgaccctgtgctcggtgtcgtggggttcgccgggggcggtttgcccatggtagatgttacctgtctcctccgactgaccatcgggctccagttgccagatgccttttcc

SEQ ID NO: 24268 - DNA, 436 bp, Zea Mays
caggaaacagatggcgaccatgcactcatcactaggttgctcggagcatttgaagccaaaggctgatgctgcctaggctcctgggctgaacatattgtggaatgtatggtgaacattatgaagatgtattgaacacctccttcggctgagaaggttgagtagccaaagcagcaatttctttttgcttgtggatggtgtggtgccatgttcttgttgtgtggcctttatcctcaccacaaaatatatagaatggctttcttggtggtgcattgtatctgccactgaagcttcgacctcctcttccccctctcggaggtgatgggcagaatgtgctttgagaggaccgctgctaagtgtttgactgttgttgctggcttagttgcccctgagactggctgttctcctcattttgtgttgggttgtgaatggttcggac

SEQ ID NO: 24269 - DNA, 706 bp, Zea Mays
tgagatcgccagcgcgactgtcctcaccgccgacgactccctccgccgtgattcgtgctgccgacgtcgcgattcgtgcccagggtggatggatagcgtcgcggggtgaaagatcttcgccgtcggtgagctggacgccactccggctagccgcggtacctcttccctttctcaccgcccctcggattagaatctcaccgccattgtgctgtcgccgttgtccgccgcgtgtccaagccttgccatcgcaccgccatgattcactttagctccccgttgctcaccggaatagctgccacagcgttgaacacgtattcactgcgccggtattcttccttatctccggccgcctgcgttgctcggccaaattgcacgccaccgtcaaagctccctataaattgagcccgcggttagctacgctacatcatcacgaaaccagagccccaatcccaccctcaatcattcgccagagctcgtgaatttcgaattctccccaaactggtctccgccaccgcatgatcaagctcgccgtgaccagctcgattcaggttagctcgagtccctctgctgcttgttctagcatccttaggtaccccgcaaacccctcgacccctctaattaaaccgaaccgccagggatcaccaggaacgcgtaccattgtcctcatcgttcgcggttcacgtggacagagcatgatagcttacca

SEQ ID NO: 24270 - DNA, 591 bp, Zea Mays
ccggaggtaccatgaatctttgtgcggggataatgcattcatcgctctctaattgatcgtcacacactcttggctaggcatgcgccaaataagatgggcacaatatcgatgatgatgaagacattcctgtccaaccactcgattctcggaatggcaacaaggactagtcgtctatgataatcctcactacaagtgtaaggctatcaggcacaccagacaatataaaagatgaaggagggtacctcgatgccaacgacatgtatgacttcctcaaggaagcctcctcatagaaaggctctagacatccctctacaagacccaactacccacggtctggtcaggtcaaaagtgataggaccttaggggtcaaacgcgccaacagcagtccgtccttagcagaatatgagatgacctacgactcataggcatgagatggcttattatttttttatgtaacaatgactacttactcgttcgactatataaggaggacacgacctcctgtaggaacccaagccaactaaacatccaaacaatcaagaattccaacaagcaagcaagaaactcccttgtattttatcacacaggcac

SEQ ID NO: 24271 - DNA, 369 bp, Zea Mays
ttccgttgcaacgcatgggcaccatactagttggttgtgaagagtgaaacgttattttttttcttttcttcctccctacaacggttccctaccttctagtcgactctgacccctgtccacccatcgccttcaacgtcaccaaccccaaccacaactggaaccgctaccacaccgcatcaagggtcgtcgtgcccgtgcccgtggttgtattcggaaaactcgtcctctaccacgtgcacgctcaccatcgccaacccgctcacgagcaattccctcgccgcctagcagttgtaacttgtaagccatcgccatgtacagcgccggacatattttcgttaactgcgctacgagcctcggcctccgccccac

SEQ ID NO: 24272 - DNA, 303 bp, Zea Mays
gctggagttatctcgagcagcgtcccatgcctcgtcgaccttagagcgcggtcttaagggtcaggaggctggtctggattgttctgctcccatggaagtgggtgaaggtccgtcagccttagaggtggctgttatagagagctcggccctcaaggatggcgctagcgcttacccagcccccgagggtgtcgccggggatgatccgactcggatgggtagcgcgagctatgacctagcccccgagggtgtccgagttggttctccctctcatacttccatggatgttcacgtagggtcttctcc

SEQ ID NO: 24273 - DNA, 321 bp, Zea Mays
gggagaatctcgtgagcgttcgccggtggaggaaaaggacgccgccgtggaccacactgctccgtggctgggatattccagtgtttgctttgggtgagtaatctcctctctgtttcaccgtatcctcagctgcctctagctctagccgcgaccgcattgggatacctaggcactggctcgttctactctggcacaactccaccgggagggaacactgccaccaccactactgggttccggggggaagaagatgaagcgttaaccattggattggatatctgcgggtaggattaaatcaggttcaaacgggatgtagaccgt

SEQ ID NO: 24274 - DNA, 338 bp, Zea Mays
agaagatgttagcagtaattgatgaggttggggcacaaaatgttgtgcaagtgatcactgacaatgctgccaattgcagagccgctgccgtcataattgagcagaagcaccctcatattttttggaccccttgtgttgtgcatactttgaaatcttgctttgaagaacatatgtgctgctagggaaattgaagatgtgctttatacttaattccagtggattagcgaagtcattggagatgccagcatgattaaaaattccatcatgaatcactccatgaggttggctatgttcaatgagcaaagcaacctgaaattccttgcaattgctgacacaag

SEQ ID NO: 24275 - DNA, 475 bp, Zea Mays
cgggtcctatgggtgcactactaaaactccctagctaaggttgtgtgcaggtccaggtcccagttgagactacctccagggggccaggtcaccaatgttctcttaagtacgctggcatccagccttgacacgtcgagcctgcatcctaggggggccaggtcaccaattttctcttaagtacgctggcatccaacctcgacacgccgagcttgcatcccaggggggccaagtaccaggaagaagttggtaacgacgcacacagcaaagacaaatagcatacagataagtcctgccactattagataaatacttctcaaaagtatcttacagaaccaaaaaatattacaaagccgcatcccagtgggacccttgctctctctctgcagatctaactactcatcatcggtggggtcccgctggaagcgctcggctaccacctcaacggtatcttgtatgccctaccgggcggcatctt

SEQ ID NO: 24276 - DNA, 321 bp, Zea Mays
atttggagccatgatccagggggttcggacacacaggttggcttcccagtctaaatcctacaggtcctgttgcgtaaatcgaaggataaaagacaccagttaatgggtcctgtggctgtgctactaaaactccctagctaaggctgtgtgcaggtccggatcccaatcgagattacctcctggggaccaggtcaccaaatctttcttaaatatactggcatccagcctcgacaagtcgagcctacatcccaggggggccaactaccagggaagaagttggcaatgacgcacacagcaaagggaaagtagcatgcagataag

SEQ ID NO: 24277 - DNA, 481 bp, Zea Mays
ggccacaccatcattacaactacatacacacggcaagggcatcacatattacattggctcaacctttgggatgatacccatctccctgtagttgaacatcattatcctccattcctcaccctcaaaaagatttcgtagctcgccctcacctacactcgccccaattggcgaggataacaattctcgcttaccagtcccgtccacgcgaagaagatcactctccatctcactacgatgacgcctaccacttcgcgacaattcactcactctccgtttcgccaccgccctatgccgcttatacccagtactcgcgcccgggagcccctcggaaccctccacgcacggcgaaggctccgccgcaaccacatctaacgctgcaaaataatccaagtcctcatctgaagactcctccgtccacacaatcgaactcccagaatcatcaaactcaaaacacttagacacagagccaaacgaatcatca

SEQ ID NO: 24278 - DNA, 281 bp, Zea Mays
agaggatgtcacaattactgccagtcagatccgtccgctctttggattcccagagtcgacgactcgccttcacagcctctgctacggcacttctgaccctcctcgtcgccctcacggtggtgtggctccggggacagctcacgtcgcggctctgttccgcccgcctttcacagatgggtcgcgacgttcaccggcagattttactacagcagcaaagttcttatatgagctcatcagacggactcttctgccgaggatgggatacagggaggctaccacac

SEQ ID NO: 24279 - DNA, 373 bp, Zea Mays
cgggcccctacgtcagtcgcgccgtttgaccagggcgcgctcctggtatcactattgcgtgggccagcgatgtcagtgcttcccctttcctcacgcgtgcggccagaacaacaaaaatggagcagggcgtgccgcgatctacgtagtcctcccagctgccttcaattcacgggctcacggctcacatattgctgttgcgaccgttctgtgtgggccccacgttctagaaatccttatcaactgactagtgcgtcttccgcgccaaatccggggagaattcaagctcgttggttgaacacagttgctatgatttgattaagccgcccctatataacccaagccaccgccctcctcgcatccctctagttcgtgc

SEQ ID NO: 24280 - DNA, 329 bp, Zea Mays
ccacgagaaccgcggagactacggacacttgatcgtgttcccgacgattggtggactcctagtgcgaattggtgacacggtaagcatcccagagcgacaagagtgctcgaacgaaggagagtgagggatgaactgacctggaaagggctggccgcggtgatgtgtggttcacggcggcggagagtcgatttgggggaaaacccgaattgcggggctacggtgaacgagtggagatgagagtgggtgctatagcttgacgattacatggcgcaaccgacctggccctcaatttatagaagggtaaagcggtggccagcgaatttggggag

SEQ ID NO: 24281 - DNA, 451 bp, Zea Mays
caaaatcagcgcgagggatcccctttaggccaatggtcaccttggccaaagagaatctttgtgattttgtgcaggaccccgctacttggggcaaggcgtgaaagaatgcgcgctagaggtcaatccagtaataagcaagatcgttagcctggtcggcacactacctgggctcaacacgacaagcgggtcgttccacgtccaatcaggccatccacgcctagcaaaataatgatgaccatcccacctcaccacgtcgagcaaaataatgatgaccatcccgcctcaccacaccactacagtaattattgggcgccaaccaggtaaaatttagaaacattcgaaatccccacgaggagcgaggggtgggctgagcaagctcccattgagccgcaagctaggtgactggcccataggtcattttcttatacccgtgtccaaggtcgtacctcac

SEQ ID NO: 24282 - DNA, 473 bp, Zea Mays
agagaactcaccatcgacgaccgtgtgcccatattcgcacccgccgtggtgattcgtgctcggtgtagttggataacgcagaggggtaaggaaatatcgcgccatggattaactccggccactattctactccggccgccatacccgcctgagtcacagccgctgtggataggttcgccagagttagccaccttgcgaccttgcgccatgtgccctggcatcttaccacgtcgctgtagctcacgttatgcatatcaggtgatcgccggtgagctcgccacggtgaaagccactaatcgcttacgccagtgcatccccttccctccgatcgccaccgcgcaatcacaaattcatgggccaccgctcaagggccctataaattgagcacaccctcgactccgctatgtaattgcacactcaacacacccactcgtgcctccaattactcaccagagcccccgaatcgcttagtt

SEQ ID NO: 24283 - DNA, 580 bp, Zea Mays
tttatttaaaagacactccgcgcaacagtcgcctaagggtgcagccggaataacgttaatcgaagtctctcattacaaagacactccgcacagagtcgcccacgggcgcagccggaccaacacaagcgtacaaatacggccaacatgccacatcaccatacaaattacaattacatacacacggcgagggcatcacatattacatcggctcaaccttcgggatgatacccatctccctgtaattaaacagcattatcctcaattcctcactctcaaaaagcttccgtagatccccctcgcctatgcccgccccaatcggcgaggacaacaattctcgtttaccaacctggtctactcgaagtcggccacgctccatacccatgcgacgacgcctgccgctccgcgaaaattcacccacactatgttttcccaccacccttcgccgcctacacccagtactcgcatcaggaagatctgcaacaccctccgcacgcggcgaagtctccgccgcagccacatccagtgcaacaaaataatacaagccttcatctgaggacccttccatccaaggaaacaaact

SEQ ID NO: 24284 - DNA, 325 bp, Zea Mays
gcaaacgtggacttacggagtcacagacaatgtctacggggcgacgggcagcaggagcagaccacacgctgccatgacgacggtgggtgcccaaaccaaagtggcgaacaactacaaagacgggctagagaagctatcggttccaggacctaataaggcgaacttgaattgaggagagagggaagaaaatattaaaggggaggaaagtactcaccgtcgtgcagcacagagcgcggtgctgttttcagccatgcctgtcactggtgaggcatgggagcgagggagatgactactggtatggcaacgacggctacgcgcccacccg

SEQ ID NO: 24285 - DNA, 446 bp, Zea Mays
atcgatgcgagcctttggtagagggtaatgtgattctgatttctaaaatgtgctcatagtggaggagttggggtcttagtgtcaatttaaattgcgagggaatttgttacgaagacccaacgacaatgaatcgatgtcgagcgctgttgtatttcgagagttggtttcgaagacttggatggattttttgttgttccatagaaagaggttcatgaacattgaggcgtttatttaggcctacatatgtatgtatgtggttcctctgttcagtaaggcccgtgaatggttcacctggagaaatgcagctggacggttgctggagctttagttgaagccagctggacgacgtcaggagccctgagcgtcttgtaaagataggaaatgtcatggacctgtgcaagaaactctactgaaatctggtttgctctctccctctcacacacttg

SEQ ID NO: 24286 - DNA, 577 bp, Zea Mays
gtctttgttgggttgcagacgtcttcaaccacttagacatgtccatagaaagttggggactggtctcagcctgcccctaggtgcagcaagcgctttctcccaggtgggacccatccggtctagtggctgctagctacatcttcggggatctagctcgtcttccattattgttggcaatggcaactcccttcttgttcttgcctagagccactctcttcttccagcttcattctctgatgacctctttctctcccaccgacagtatgtcgttgacctcctacaacgggtgggcatggccaagtttcattctacatcaactcatgttgacactcgcgccaagttctcttccaccagcggcgtgcctattactaatctgattgagtattagagccttgccagcacattgcaatatcttacactcactcatcccgacttggcgtatgttgtccagtaggtctgtctctttatgcatgatccccgtgagccccatctcgtgttgatcaagcgtttcatttggtatgtcaagggcacgttgtcctatgaccttcacatcggcactggcccgcttcagttcttg

SEQ ID NO: 24287 - DNA, 1039 bp, Zea Mays
aagccgaataaacataaccgactagattgtaactacgtaatttcttccatggaagaaaaggtttcatatactaatatttgtcactgcttgatgaataaataaagatggatgaagagaagcaaaataacttgactacgaaggaggaagccagttttgcagtaaatggtagtaatgcagctcaaaagttccatctgaaggctgaaataaattttgatctacagcacaaacagatcaaggtatgccttttgtttcccagtcatgatttcatcttgattaacaatcatgcacatcaacctttctttgacaatcgctttaacaattttatttattatgcttcctaaaggggttgagaggtactgtttcttctatcaagtctggaatggaacaactgaaattgcactactctgaggagttcactaaacttggtaaatcgcagttgatacctttgcactcataaaattagttattccctaaaaaaatataccaattgcttgatactgtctttgtctccatgttgtaatagggaagcatttgtacactatatccaatgctgcttctggataccataaagttcttgaggaaaatcgcaagctgtacaaccagatacaggatcttaaaggtataattttgtgcattgaaggagcaggatttacaggatcgaagtctacactatatataaatgatggtttctttcgtctccaggaaatattagagtttattgtcgagtgaggcctttcctacctgggcaaataagttccttaagcagtgttgctggaatggaagaaagaaccattacaataatgactcctacaaaatatggaaaagatggaaacaaatctttcactttcaacaaagtctttggtccagcagccactcaaggttctaactagttcatatagtacatttcatctaaaaaaacatggcatgactttaccaaggaacgttatgtttcttttttgttaatgcagatgaggtcttttcagatatgcaaccattgatacgatcagttcttgatggttttaatgtctgtatatttgca

SEQ ID NO: 24288 - DNA, 686 bp, Zea Mays
tcctgttggatatctgccgttttgtgattgatttggttctggttgttttctgaacgaataccccggcagattttgcgcatgtttttcaaagtcgagttttgctttagttctcgcattttttgtggacttggggtgctgctgagcgcttcaacataaaaaaatctgaagaactgcgagttagtctgttgccctgttagctgcgtagggcttagatctttggttttcattatgtccagagctcaatttcgctgaccttttactgccgatctcgttggaatttccatcgaattgaaaattgagcatgctttaatttctttcgtttcctgcccccgctacttatttctgttatttggtctggcgtacatcaaatttggatcttagacttcttgttttgattcttttcatgagagaagctcattttacggcttgtgctcgagtatactttttgtctgtgctcattatttcgaattttcggcagaggtagaattttggccttttccctcgactttcttgtgttgtggattgaagtgattttgagctctcaacttggttctgtaaagaacgtctttttgttgccgtaaagcttaataaacttgttctgtgtctgagtgtttttggaataatcaatttggtgcttttagaaacacctttatgatttcgaaaatgaacttttccttttttgtttg

SEQ ID NO: 24289 - DNA, 294 bp, Zea Mays
taacctgccactaattgtaatagggggccatgtatagtcggcccatgctacaggatcccgaccgtaggccgccacgcaggcagggctggcagtgggtcagcccatgtttgtaattgattacgctgtaatgacccgccataacccccaagggggaattttccgggggtaacataggtaactaagggtataattgtctttgacgaggcagggccgaccctcggttacctataaatacccccgtactgtaccattgcgggacatggagaaaaacactgttgccctaatacactgagt

SEQ ID NO: 24290 - DNA, 443 bp, Zea Mays
caactacggtgagctctcccaggcaacctacaccgggctgaacagggagagaagatcaaggtacgctgggtcttgcctcttcaaccgcagagacttcctcagcagggtggatgtatcaaacccgaacctgtatgagatcacgaagttcatatacgcgatgtgcactgtcagcttacctgacgggttcatggtcaagtctctctcaaaggctgcatggagcaggcagtcgaattggatggggtttgttgcagtagctacggacgagggcaaggaactgcttgggaggcgggacgtggtggtggcgtggcgtggcaccatacggatggtagagtgggtcgatgatcttgatatttccttggtgcctgcttcggaaatagttcttccaggcagcgcagccaacccctgtgtgcatggagggtggctttcagtctacacgagtgctg

SEQ ID NO: 24291 - DNA, 645 bp, Zea Mays
tttgctctgtcagtcgttctgaaggaactatgtgatggtacagtatcctgatcggattgccagctcagtaagctcgccgccggcgatccacgtgtccagatttgcgctggtcgccgtgattcgtgcttggcacgcagaggatatccctgagaaggtaaaagatctcacgggggaagggatttgatcgcggattgaagtttatcaccgtggctgtagccgttgcgacgtggccggaccgccagcgtcgccgtggaagctccggtgacctcggttgtgccacgctatagcttgtactgtgtggtagtaatcgtggcaccctttggagtataatccttgagtcgttgcaccggtgaacgccatggtcacagccacccgtgttcttccctatctccggccgccagcacgccgtgaccaaattgagagccaccgaccccgaatcctataaattgagcacgccctcggctccgccatgtagtcaagcactcaacgcacccacccgtgcctccaattagtcaccagagaactccaatttgggattttccccaaatcggtcaagaacaccgcagaagtgagctcaccgtggccagctctccactggtccgatcgtgttcccctcgctcttgttctagcattcctgtgtgttct

SEQ ID NO: 24292 - DNA, 325 bp, Zea Mays
ggccgcgtggtccacgttccaccttcttcaaaggtcagtgaagctcttctagttggtagttccagttctactatcgtgtgttgcttggaacatagcggcgccgtcatgggttggcgccgtaggcagtctccacatcgaactgttaagccgcaccgtcccctgttggtttcacgcacgcatcgtagagttgagaggtctctgaagctccccatctcatttgtttgaacactaccgtgcggtggtcggggaattgagttcgtcggatccagtgttccgccgccgccgtcggtagctagtggtagagtcctctcgggtcgattgagca

SEQ ID NO: 24293 - DNA, 433 bp, Zea Mays
agccacgaccgaacgtcaccaacaaagaaaaacagaaggacgaaggagaacagaaaagagaaagcttgcaaaatcactcacggtgcttctagaaagagggtggggaagtccttattcatgaaggatctcagagacaacgcggtgacaaccttgactcacgcttcaatctcagacaacgcgagcggttcaaaggaatgtcagttaggatcattaacgctggagtacctgtgcattgcctctgacgtgccatcagatgctgaatttggcagtgcatgaagatgcgcaccagcctcgcgcccgtgagaccttacttcttcaacgtactgagcaccgccacaagaggctccaccttgcccttcagtcctagctcgcccagcgatgccaatcgtttgtcgacacttgctcccgatcgtgttcttgacatagaaccact

SEQ ID NO: 24294 - DNA, 419 bp, Zea Mays
gcaagctttgagattggattcgaccatgatccagtaattgtttgactatggttgctatagcaagattgtagctggatcatagggctacaactttgataaagagagatggtcgagtcaccacatgaatttgggaacaaatctccctgcaaattgctctgacaggctgactgaataagaatccgatggtacagtaaacaaagatcttctgttcagccccctcgccgccggtggcctttgcgcccggattcgcgccggccgtcgcgattcgtgcctcgggcgagtggattacactcgacggtaaaagatctcgtcgcggatgaacacaagacattgtggccgctctgtctttttcccacctgcgccggcgacgtggccgcacgaccattgctgcggctatcgccgttctcctcgggtatgtc

SEQ ID NO: 24295 - DNA, 279 bp, Zea Mays
agggacggcgcggactggaggcaccgcggcggctacagcggactggacggactgggcgggcggaatccctattccctaattgggctggccgctgggccaaaatttgctggcggaagtaaaacgcccgaaacgcggcgtttaacgctattttgcgtttaaacgtcaaaacgtgacgtttaaacgtcgtaaaacgacgttttacgcgcaagtgttaaacgttttagcgtttcggtgttctggcagcgttttatagtttaaacgtcgcttaaacgacgtttt

SEQ ID NO: 24296 - DNA, 355 bp, Zea Mays
agaatttatgcataccaaagaatttcctatgatgcaatacctggatgaggaggctggtccatcttgtgcgcctttagttaagccagcagattctaatgttccattccggcgaaggaaatacagttcactaaggccatttagcacaatagcaactaagtcaaacatatttggaagtacttcaaattctaatgctgatgttccagtttgtcagcttgagagattcacacccattgtactaaataagaatgtgcagcgtgtgcaagctgctaaggaattcatagaaaatagtgctggagctgaaaatttggaagatttctctgcagtttggaagcagacatattatcctcaggatggc

SEQ ID NO: 24297 - DNA, 592 bp, Zea Mays
cgaagagcttgaggaggacctaagaacgctagaacaaacgatcaaagcgctgggactgacctggaataagctggccgcggtgaggctaaaccgagtggagttcggaagtgaattggggagaattcaaaattagagttctcatgtggggggtttgggatgcaggtgggtgcagtagctgcgtgaatacttgacggagctgaggacgcgctcaatttatagaccccgaggtcggtagctctcaatttgaccgcgatgtgttggcggccggagatagggaagaacacggtggttgtaaccgtggcagtcaccggtgtaacgacgcaaggagaatactcctaagggtgccacgcttacaatcgcgtagtaacaagcttaggcgtggcgcagccaaggtcaccagcgcttccacggcgactacggtagtctggccacgtcgcagcgactatacccacgacgataaactccaattcgcgatcctatcccttccccgccgtgagatcttttctctgccgtagttatccaaccgccagtgaacacgaatcatggcggcggcgtgaatcttcgcgcagggaggtcgctgtcgacgagcaag

SEQ ID NO: 24298 - DNA, 431 bp, Zea Mays
gcaggagaaggaactccactactttccccactggctacgtagcgccgactgttcttccgaatcagagggatttcatcttcttcttcctcctcattttcatcagtaacacggacagcacacccattggggtcagcgtcagatgggtcgcacccattggggtcagcgtcggtaaattcaggcacgggcacttcctcagtagcaggagccgaaggaccagcatcccgatccaagctagacactcgccgaagacgtctcttcttctttttctgcccatcggcaggagaagcaggctgattggctcggcaagggcgttttgggcgaacactgacaggcctctgaatatccaaggccttactagcttctgggagaggcgccaccgtcaatgttccagtaggagcggcatcagaagaatcctcggctaacatatcaag

SEQ ID NO: 24299 - DNA, 527 bp, Zea Mays
ggggagcagagcaccggaggccggagcagccgcacatggaggtcggcgacgagtcggccgaaggccgtagcagccacacatggagatcgactacgcttcgacatcactccattgcgggatttttggtctttacaacgatgtcgtccacgtagacctccaagttacgtccgacttggtcggtgaagcagtggcacatgcgcctctggtacgtagctccaacgctcttcaagccgaacgacatggagacgtagcggaacatggcgaagagggtaatgaaggtggtggcatgttggtcggtctcatcatggcgatttggtggtagctcgagtatgcgtccaggaaggaaaggaactcacacccgatggtcgagtctatggcctgattgacacatgggagagggaagggtctttggggcatgctttattgagccctatttagtcgacgcacatcctccaattcccattcttcttcttaacaagcacatgattcgttatccacactaggtggtgtatttcccttatgaatcc

SEQ ID NO: 24300 - DNA, 567 bp, Zea Mays
attttcggaaagcacagggtgcactttataaaaaccaggggcctataccgaattacttaacatggaaagggatggcgggttgataagtcaaaagggcgagggttcttttagaaaaggatcatgactgttataatgtgcgggcgaccagagccgttcagatcgaatccaatggtcacaatacaacgcgcgaaggggtacgtaaggatctaatctcatccactggtggttgatccgatgactcacgcgcatcatcactcccacggccgaactcgtatgccaggagcgatcccagccgtctgctatggatccagcggccgcgacttcatcttcctcccgacggcgcaacaaccactggagcagagcggggcgcggcggcgcgccattgcagaggctaatctacccgcacaaccgagcgccaaactcacgtccgaagtgctctacacgaattagggattaagacaatcaccatggggaacttctcaccgaagctgtagatgcagcagcacccggccgcggtggtgagcagtagtggtgcgtcggcgaagaattccggcagtcctggagcgc

SEQ ID NO: 24301 - DNA, 416 bp, Zea Mays
tgagttctgagtcaccttctgatacatctgggtcatcaacttcaaaaacctctgggtccacaagtagctcatcttccaccagcttgcattcagagggtattgtggaaaaaggttcttgtacttctgtcaggcatagaacaaaacgaggtcacgccaaatgcaagaagctagaaaaaggaggtcctcgtcatcttacatttgataaaaatgggattgcccagtcaccggtaaaacatgtcaatgaattctcaagctattgtggttatatagcacacatgcgtgttgatattaggataaaggattggcgaaaagtgcctaaagtggtaaaatcaaacctatgggaggatgtgtcaaagaaatttgtcatgccaagggatgaaacccataccctcaatgtgaagaaggtcgctttgaaa

SEQ ID NO: 24302 - DNA, 634 bp, Zea Mays
actctcgctacgtaccttgacctgagtatatggataccgcgcaacgtcccttctaccccctccctctgcattttccctaattgctcgccaccaccactgcgttgccgcgcaccgagcgggtgagattcgccgccgccgtggaactcgaaaacacaagccctccagccaattgcgtcggtggggaggcttcttccaggtgaggtgaaggttcccttggcgctattggggggaaagcactcacgctttcgccttgaatttctcgccggagctggaattcttgccgcgtcctctcctcgccgtgtgctgcctatgtgtgacctagtcctcggtgagtacggtgcgcatgtagattcctttcatttgcgcaccgcgtagctcgtcctagattaggggtttgtggtctagaaggttgggttggccatcgtcggccatggcgcgccgccgtatggccctagtcggccatcagaattcgaacagagtaggggaggctggggtgaacgtcccgtgggcgctggtttgcagatcaacggctgtgattagtccgcgcgtaccggttcgcctgtatcgatccggtccatccatttctgatctggcgcataggattccatcggagtatattagatcaggtccgtcg

SEQ ID NO: 24303 - DNA, 331 bp, Zea Mays
ggaagcgtggcgcccagaagctgggccagaagccggtcgtttggcgccgggatgcagcttcttgcggccagaagccgctcagaagcggttccaaacaggggctatgtatacttctggactactggagcatccaaatggcaccacccaacatagagaatcaatttgtactgtagcatgcctccactcgaagccgccataccagtctgcctctaaatcatttcactatcgcagattaccactgtatcgagttcatgatttgggagaagggatagaaggaaaaggaaaaccaaataggggaggaagagatgctcaggcatccatcttttggtgt

SEQ ID NO: 24304 - DNA, 414 bp, Zea Mays
gcacaaccacaagggatgccttatatgtagcagaaagacaggagcatggtcaaaccaaacaagcactttccaaagctcaggaaagaaatttggaattgcttaggaaagttgatgatagtgagaaaactttaaacaagatgctggagaatgctcagaggttcttatcttgctgccattatctgtagctgaattttctttactcaagcataatgcaatatctgcaacttaatagagttactcctctccttcaactttgtgaactaatacatattcccttttccttaatgaatttagacttgagaaacatgcaacagcaagggaatccttgcttcttaagacaaagcagaatcttgactgcactacaaaagcgctaactgaagcacgagggagaaaccgagacttattgacaagttt

SEQ ID NO: 24305 - DNA, 735 bp, Zea Mays
cttccttgttggattctgtgacagttctgagctccaacacatgctccacggcttcttgtctgattagtccagttagttggatactagacagaagagtacatgactgtaatttgggtctcaccccttgcagctgaactatcttaccttgatattcaaactccatccacttctccatccagtgtatggacatggggttaaatttttccagccagtccattcctaacacaatgtcataaccggccagtggtaaaaatttaaaatcagcgcagaaattgatgccattacataaccagggacaatcaggtacccaatattcactccacaaggtattaccatcaaccaccttcacctgaagcggatgtggcagtttctgaaccccttttactacctcaataaagtggttactcatgaaacttcccgagcttccagaatcaaccaacaccaacatctggcatccctgaatataagcccacaatctgatggtcttgttgtgctcaccaccatgtactgctgcttcagaaacagctaacacctcctcctcaacaaccttttctggagaatcatctgtttcctcggacttctcatcttcttcaccatgagacacaacagcccacatttcctccactacatgcagtggtacactttttaacagctgtggctaggattccattttttcccacatttgaaacaaaggccccttgctcttctataattcttcaaggttgtaagcttttg

SEQ ID NO: 24306 - DNA, 507 bp, Zea Mays
gcaggtgagaagttcttctaggtctacgtgatagcccgttaacctcgtgtttcctccaccacgtcgtagatgcggtgcaagtcgtcgttctgatcgacgatcgacgagatagatccaaagtggaacatatcgctggtgattgacttgatgttgttaacaaaaatgattgccatggtgctaactgatatcgatatcatctcccctacctgttgcgccagaggttgatgtttggtaccaacatcacttcacgggatacgtcatgatgtgcttttggtggttggtgaggttaaatgtagctcgatggttcgtgtagatcacgacatgacagaagaattatataggttcaggtcgctagagcataaaaccatatatcatgtgtgcgttgaggttgtattgcctgagcttgaggttacaatgatgtgctactaactaggagtttggctatgagattggatctcgtttctgggatcacatgatccgtaggggtccataacccacctaaatatg

SEQ ID NO: 24307 - DNA, 507 bp, Zea Mays
gcggtttagcgggcgattagagggagggttcgggctgcgccgagctgattagcggattgttaattgcggcgggagggagggtttgtggctgcgcacgcggccacgtcgacgccggagattttaaacggaacaggtgtcgggagtggagcgtgggagggcagtgctcggtccaatcaggctccggctttttatatgctggcccccctcgttgcgactaaactaagcgggcgatattacgagtgacctgggaacctcgaaggttctggaacttgtagtacctgattttcgaattttctgcgcttagtggtatggtagtgacatgtggaatgatacgcaaagtgtctgccgggagagataattatattagttgggtcacttgcattcctaccttcctctctctcaagatgttttgtggccgccgtatgcacagtcaggaatggggttggtggagaaaggataaatgatcgtgtgtatcaccgttcctttggactacactacaatcgacca

SEQ ID NO: 24308 - DNA, 288 bp, Zea Mays
cataattattcaaaacttccccaatcatctcatgaagcggaaaccgcaatccagctttgaaaaagcttttgaaaactactacttcgtcattttttggctctggggtggtttcttcaccggcaaaacgaagaagcttcttctctgtctccccgaagtaaccaagcttcatcatcatcggcacatcggcctcagagacagtagatttttcaaaatctaagtggctgggctttgctgggactatagtgttatagtcttcctcttcatcagcattttcttcctcaatatcag

SEQ ID NO: 24309 - DNA, 347 bp, Zea Mays
gttccgtaacgagaatttttactgccttgtccttgtttgttagtactacgtacatacacaggatttaataccccggtcaggcaggaaggagcagacgaattatattaattatagcgatgaagaagtagcactgctccggagtcctggagcgggtgcgaaaatcatggttgggattgctgttacagtggcgcagattaggactcaatcagcgcctcctgctggcttataaaccctaatcaagggagtggcatgcatgcatgcatgcatgggtggaaaagggaatggatggatgagctcatgacccaaccaaaacaaacctcgcaaggcgacaaggcgctgcgcgcgcg

SEQ ID NO: 24310 - DNA, 422 bp, Zea Mays
tcgagatcaaaatctaatcccccatctaatccaaccaagaaaggctaattgcagggcctaaaactcatccaaaacaagagaaaacattcataaagtggagaaaaatagagagaaaggaaatccgaccaattcttggagaggaacgatgacgatggacgatggtatgcaaggcacaaaagggtgatgaatgctaggggtgggaggacttggctgctatggttagggaggtataaatagaagaaaacttccacaatcctaatatccaatggctcagatcaaccagcactcgaaaagactcatccagactccaaacaagacaaactagtaatcgatcgaaatcatctcgacgagatctaaacatctacgacctccaatcatccataggacacaccatatttgaattataaacatggtttaatttt

SEQ ID NO: 24311 - DNA, 656 bp, Zea Mays
tatgctgaccctaggtcgttagactagttagaaatggaaagcctagttattcaaaacttgctaatttcattcttataaattatgttatcagtcttacctctttaaaatttcaactgagttgactcttctcttgtagatggttcgtactctccaaactacccgcatcaacaccagctacacccctcagccccggtagatcccggtctacccagtggtagtcgaggaagttccagcagatctccctcccatccgagtggagaatgtagtcaacctggaggatagctcggaggagcagctctcgacgcctaccccgttggcagaatccctggcctttgcagctaggtcatcgacgtcagcaccgcctgcaccagccttccaagcacctgcacccggaggcgacgaacccgacgactctggagacgacgatgacgaggatgacgatgacaaagaaggtggagacgaacatgtccacgaggaagctgactacaccaacaggactacttcatggggtttggtcctgttgtcgaacattatacatcaatgttcgagacggggcacttccccaacctgctgcaagaagtgctgcacgcgctaggcacctacgtccgccccctgtacgaaacaaggcgagtgagcgagcctccccgggcttgcta

SEQ ID NO: 24312 - DNA, 1145 bp, Zea Mays
gtcgcatccatagccacaccgtctgccgaaattgtgtgtccaaggtaggcgaccgaaggctccccgaacgcacacttggagcgcttgacgaagaggacatggcggcgtagctcactgaggaccgcgcggaggtgtcggaggtggtccgcccatgacttgctgtagatcaatatatcgtcaaagaaaacgagtacaaagcgacgaaggcaagggcgtagtacatcgttcattagggcctggaatgttgccgaggcattgcacaggccgaatggcatcactaagaactcgtagaggccatcgtgagtgcggaaggccgtcttgtggatgtcctcggtcctcatgcgcacttgatggtacccggagcgtaaatcgagcttggtaaagaaccgggcaccatggagctcatcgagtagctcgtcgacgacagggatggggtacgcatccttcaccgtgatggcgttcagttcgcggtaatcgacgcagaaccgccacgatccatcctgcttcttgacgaggaggaccggggaggagaacgcggagtcgctgcgcctgacgatgccttgagcgatcatggcgtggcactgcctctccaactcatctttgtgcgctgcagggtagcggtatggccggaccgccactggggttgcgtcgggcttgaggacgatgcggtgcgtccggccccgctccggaggcaggccacttggctcggcgaagacgtcgtggaattcccccaggagtgcgtcgaggaatggttccctggcctcgacagagtggagacgaccaggggtcttgggagcgaggccctgccagcacacagatctgcccgcatactggaatgccatagtgccagccgccaaattccacatgatgtcccccaatggcgccatccagttggttcctaacaccacgtcatagcctgcaaggggcataagaaacagatccacctggaacgtgagtccgtcgatgagcactggcgcgtgacggagcaccccagggcaggaaacacgctcgccatttgccacggttgccgtcagacgtgggcgctgttcgatgtggacaccagcgcgatgggcagcctcctccccaatgaagctgtgcgtggaaccagtgtcaatgagtgcgatgaagtcgaccgcgcccacccg

SEQ ID NO: 24313 - DNA, 396 bp, Zea Mays
atgagaccaccattcaacatttctaaccatagagttgcaaatcattttgtgtccactggccaccttcacttgtacagttgggcactcttccacctgcaactgtaattgtttagtcatgtgttcactgatgaaagtggaggaactgcctgaatccaccaacattagcatcacttgtttgcccacaatagacctcaccctcatactgtaaatactgtcagaacctgatagggcctgaaaggacagatgacagcatacctctctttgttcatcttcttgttccaacgtctgtaaaacttcatcagccaacacctctggttcctcctcatccaccacaacatttaactgaacttgccctcttttggcacatttgagaatgtgaccaggctcaaatttctc

SEQ ID NO: 24314 - DNA, 540 bp, Zea Mays
acgattctttgtcgtccggccaaccaaagcccctctcaccgtgccaagctgcctcgagcgccgcccctaggtaaggaaccttcccccgcccttcttctgcactaattacatctcatcgtggggaatttcggctcgttggagccacccctcgtcagactgccgcgtcttcacggcgtccggccggtacaaccctccccgtgcccaaacctaggtgtagagcactcctactctctcactgaagcccatgctggtccccgtgcactggattcttctccatcgtgataggtattgctcgccggagtggtcttcggtccgtctgaggtcctcctccgtcgtcttcccaccttagtcttgttctagtgacccaggcttcaccatagtgctcacaaggtcatccccaacctcccttgctacccaaaccaccctagtgcccctataaaccccgacctgtctcgcctcgggcggctgcaccaccgcggtcacgaacgacgccgcccctagccggccggagctgttaaccccccagacgcccgatcctgg

SEQ ID NO: 24315 - DNA, 812 bp, Zea Mays
gattaagggcctaagggtcgataacttcaccgtgccatctgactcctgtatccaccaaaaacgtcacctagaaggaacccaaacccaagccaccacatccataaacaaactctgcaacaggccaacggctctcagttctgcaattctatttgcaccattggaacccaacaagcaacctacagattggtccatgcccaatttattcacggtttccaacacacccaccacctctgcacatgaacccaccaaaccctaggccccaggcccccaacaaatctaacaagcagccaaatctcctgaagcagccccatcgatccatctagcaactagaaccatagcgacagattggttccttgttggtggggtccacttcaatctggaagctggatcccttagcatcttcatgatgaccttcatctcaccgtactggtgtcaactgtgttgagatcaagggttgagacaggagaggggaggaaggagcgagtagggcgagttcttttcagtctcctattttgtcccaagtagaagtgtgctttagcgagttgggtcttgtagtttggtgaatttatatgtacccactgctgtttatggaaggtgtccaaatcagtcaggttgtgatgttgtagacaacatggaagcggtagctggataaggatgcagactgctgacagggtgttcaccatgcacatggtttgcattttggctgtgcagatacgtgcacctctattagttgggccacttgtatatgtatggttgataggcatcattgcacctgtgaaccattcctatttgaaagattgtcaatgtttatc

SEQ ID NO: 24316 - DNA, 392 bp, Zea Mays
cgtcaggatagcaagggagttctatggtttgaagatcgattggtggttcctaaaaatccagaactcaggaagaaaatattggatgaagctcatctttccaaattttccatgcaccctggcagtaacatgatttatcatgatctcagacctttgtattggtggaccagaatgaagagggaaattgctaagtatgtatctgaatgcgacacttgccaaagaatcaaggctagtcatttgaaggtagcaggtaccttacagtttcttcccataccatcttggaaatgggaggatatttgcatggattttattgtgggattgcccaacatttcccgacatcatgattctatctgggtcattgtggatagattaaccaacacaactcatttcttgcc

SEQ ID NO: 24317 - DNA, 326 bp, Zea Mays
ttcggatgggttggatgtcttgctcggtcgtccagtccgcttgtttctctggtcacgaggtcgccgtccccttctctctcccatacttcgtgcttccctccccctcctgatcctctgccgccatcgctcggctcgatgcctctactgcggacgtgctcccactcatcccaaacatcgccgcatcctgtccccctccctctcggatcctccgtcgactcttgttgatgcctctgccaccgctccgaggagagccacggcgatcggatctggatttgttggtcctcggcgaggcgattatcaccgccgcacgcaatgcgcgaagcgaa

SEQ ID NO: 24318 - DNA, 461 bp, Zea Mays
tggcagtctacctgggagaaagctgaaactacccaaatcaccctcccttccaaatcaccgccactggacaccgcttcccagacacttgccagaatgctgcccaaagagccctccgctagctatgccaaaactacaacagggaagtttctgagacaccccttcgctactttccacccagcaacaaaaatactcctgcctggaagaaaagactttaggccttgttagggagagatcataatgaagatgaccctaccatagtctacacttcatacccttgacaaccactatgacgaccttttctcccactgcacccacctaaattcccgggtggaaagcctagagcaacaaatcaaggaactgaaggaagaaaaggcgtcccttcaagacagtctcgagatggtggaaggtgaagaagccaacacttgtgaggcataccggactctgaagatggactatcccgg

SEQ ID NO: 24319 - DNA, 697 bp, Zea Mays
gacacctatcggagagtagacacagtaaacagccgctgtccgtggctggcccacacgtcaacgagaagcacttctgtccccccaccgccccctataggattcaggaaccttcttcttcactggaccgatgcaagttgttccccaaatccactgtcgcgcgcccttgccgctcaatctccgctcacattcaccaagaagcacttctgtcccccccaccgccccctcaaaaccccctgttggcgctgcatccacgttcacgtcgcttgaggaggtgagcactcggatctagctaggtgccgcaagcgagaccatgccatgttccatctccacgcacttttctcgtgagcacgctctgccatcccgcctcctcctagtaacgcgttgctcaaggtactcgacatctctcccccgtccttggtgtccatcgcgaaggacctccgctcacccttctattggtgcactgtaggttactggatctggtgagtcaccgttcagagttgggttcctgttcctggggcgcttcttcttacgttcgcaggtggagcgtccgtggaggaggcggcggggtattgatggaagtggtacccttgatggataggttagtctcaattcctgccatttgcataaccacattaacttgtagctgccagcaaaatacacaaacactagtcgtttgtttctgggattcaaagtcaaa

SEQ ID NO: 24320 - DNA, 512 bp, Zea Mays
attcaagctctcggttgcaagattggaggcaatgctgggaggtgtggtgcgtgatgatcttgcggagcttacggagggctcaatttatactaagcgagagcggtggccgggaattggagcgatgacgcgcggcggtcggaggagggaaagttcactggcgcgtgtgattggtggcaaaccccatggcaaggccttaggtaatagaaggatggtttgttgcgatcgactgagacgtggtaagatggttgacggcgtggcataactgcgaagaacggcggcacgccggtgatggacatgcgaccacgtcaccggtaagtggatgagcgacagagtggctactgtgctccaagatcatccacggtgagatcttttctccaaaggattgttatctgtgtttagctgggcgagaatcatggcgccggcgtgaatccgagtgcacgatcgccaacggcgaggggctgagctggcgaactgatcccttcactgtaccatcgaattcttcttaagtgcgc

SEQ ID NO: 24321 - DNA, 483 bp, Zea Mays
tctccccccggatgagcttaaggcactgtttgtccggccgccgtgtccgctctaccccgatcgccttgaatcgaccctcaccggagttagacacctcatggtcttgtgccacatgccttagcactttaaccacgtcgccttgactcgtactgacctatccagagatcgccggtgaggttgccacggttgcggtcactaatctcgtgcgccagtgactcctttcttctccaaccagcaccacgccaaaccaaattcactagccacaacttagcaccactataaattgatggcacggtctgctgcgttaggtcatcaccaagcctgagaacccgctcctgtctccgattagccaccacaactctccaatttcccatttcctcctattctgttttccgccaccgtggtagagccctcgccgtggtcagcatactccaggtctgttcatgctccctgttctcttgtttcagcatccttaggttctcc

SEQ ID NO: 24322 - DNA, 483 bp, Zea Mays
attattcccctaacttatctgggcagtaactttggttatgtcggttgaaagttttgttttttcttgccggttagatgttatctgtacatgttattggcaggttgcattgattttgagtggcggggttccgttacttgtgtcatgcccgtattatatttggcatgctaataaatgtttccattgtcctacatttgtttgcgacctcttaatctttttcttgccggttagatgttatttgcacatgttattggctcattgcatggattttgtgtggccggtttccgattattcccctaacatatctgggcagtaactttgattatgtcggttgaaagttttgttttgtttttcttgccagttagatgttatctgtacatgttattggcaggatgcattgattttgtgtggcggggttccgttacttgtgtcatgcccatattatatttgacatgctaataaatgtttccattgtcctacatttgt

SEQ ID NO: 24323 - DNA, 371 bp, Zea Mays
tgattacaaaaggctagcacgtacatttaataaatctgttgttgctaattttctcacgcatgaggtcgaatccaaggaaaatatgcatgattcgtcggttgcaaattggcacgaccagtcccaaccactttacggatgtcgatgaactcatatcccgaacaaccacagccttctgcacagttcgagtctgcaacggtccaacaaggatgtcagactactcggtcgcaaatgccaaccaatccaatagggggtcatggagagaaaatatccacgagcgcgaagagaacaacaaatggagatatcatcaagataggcacaacaaatgtcgtcatgcatgagaacaatgaaggatcgatgatttttggtaaaac

SEQ ID NO: 24324 - DNA, 677 bp, Zea Mays
cgaatgcaacaccctttaatgcaaatgtgtctgagggttctgaaactgagtcgtggtcctcagacggggatgattttgggagccctctttcgtggattgaggagtcttctgaggaagatttagactacttcgttgcgttggattcggccgcatcggagtccccgcctcaatatgatgcgtgcaaagagtctgctctcccagcctgggcaatagccgaagaccaccacaggcgaaaagtggtgtccaagcagagctttggtgggatgtcacgaagtgggagacgtcgtcggatgggtatggagcgatctcgtcttcgactagatcggggtagccaatgcgatctactgtcctcgacgttcgggacatgtattggggaggaggacttgtagaatctatttgagggcgaagagttgaggatgatgttgtttaattttcgggaggtgggtcttattccgaaggcagagccgatgtaacatttttgctggcctcgctctcgtgttgcgatggtgagtgaaaatgctgccctcccccgcttcgcaatagagagggagggcgacaaaatatgatttgtattatttgtgcgatgtggccgatagggctttcgttttatgtatgtaaactacaatggcatatcgcgtgctgcatttattgcatgattgtttcgatttgtaattgtg

SEQ ID NO: 24325 - DNA, 567 bp, Zea Mays
gagatgcatgcgcagatgcggcagaaacgccaagaaatgcacctataaaggcaagatatgtgggaggagatgcgttaggagagaatggagaaacagcagcaagccccattgccaccacctacaccaccacttccaccccgggacaagcaccaggaatttatgagccacaagccgcctaccttcgccagctctccagattctctacacgtcgacgactagttgaagttagtagagaagatgctaaacattgcccaatgctccgaccgggagaaggttctctatgcttctggtcgtctgactggtcctgctgctgattggtgggattcttatgttgctgcccatgacgctactgatactattacttgggtggaattcaccacactgttcagaaactaccacattcctgctgggctgatgaaaattaaaaagaaggaatttttgtgattgacgcaagacaacatgtcattcagcgagtaccatgatagattcattcagctatcaagatatgctcctaatgaggtggctgatgataagagaaagcaagagcacttcacagaaggactcaat

SEQ ID NO: 24326 - DNA, 327 bp, Zea Mays
gatcgccggagagccgccacggtgaaagccactaatctcgtgcgctagtgacccctttcttctccgaccgccaccacgccaaaccaaattcactgggccactgcttagcaccactataaattgtcggcacggtctgctgcgttaagttatcaccaagcctgagcactcgctcctgcctccgattagccaccacaactctccaatttcccatttcccccaaatctgttttccgccaccgtgaaagaggcctcgtcgtggacagctcgtctcaggttcgttcatgccctctattcacttgtttcagtgctctgatatgctcctgatact

SEQ ID NO: 24327 - DNA, 346 bp, Zea Mays
ggctgaggactcttctgatgctgctcctgctgggacatcggtggtggcgcccctcccagaggctgatacaactttggatattcagaagcctgccagtactcgcccgaggcgcccttgccgagccaatcagcctaatccttttggtgatgagcagaaaaagaaaaagagacgcctccggcgagtatccagtttggatcgggacgctggtacttcggttcctgctgctgaagaaatgcctgtaactgaatttattgacactgaccccaatgggtgtacctaatccgctgctgatcccaatgtgggtgctccatccgttgttgatctcaatgggtgtgctgcatccgtt

SEQ ID NO: 24328 - DNA, 374 bp, Zea Mays
tttcagtaccgcttatcaccctcagacagatgggcagacagaaagagtcaacaaagtcctcgaggatctattaagagcatgtgtgctagcatttgatagaagttgggaatccagtctaccctacgcggagttctcatacaacaatagctatcaggccagcatcaagatgtcgccattcgaagcactgtatggacggaaatgctagacccctctcatgtggtccaacgtaggggaaaagcactagaaggacctgcctttgtcaaagaggcggaagagaaagttgcactgatccgcagaaggttacttgaagctcagagtcagcagaagagttatgcagacaacaggcggagggaactcagatttgaggaaggaga

SEQ ID NO: 24329 - DNA, 439 bp, Zea Mays
acactactgcatgttttcaggaatcatggtgcactctatctgaccaatcatgcaagcataccaactgctagccaaatcattccttgctagatctcatcacggtgtgcgccttctgcttgcgaaacaaacaaaaaagtatatcacacatcagatttctctgcaagtccgtcggtggatctgtagccaccgccacaagtccactaccatgaacactaggaccgagaaatgactcaactcaagaaccctagctaacaaaagagagagaccaactggatagaagcttgacagtgtagtggaggttgccggcggcggagaggatgtcgtcatcgcgatccccgctcatcaacaccttgtcttctcgcttgcgctgcccccgtacgtcttctcatcgctcgcatgggattcgttcctggcccctcgagtcctggttgcaatccaa

SEQ ID NO: 24330 - DNA, 476 bp, Zea Mays
ccggggagcatcgttggtgggtggtggtgtcgaccgtgggctcggtggtatggatcgagtatcggggaggcgaattgttcatcggttcttgggcaccaccatcgggccgcactccgccatgggcggtggtctccatgcgataagatcgggtaaggacccttcccgtggattagctttgaacgcagtatcttgtagatgcagttgatgtggggaatcgagcactggaccgccgggtagcgcttctcaggcgagctctgccgtgtgaagtgagcgcgccgccacggctggggagcgtggtgggggaaaatgcatcgtcggctgttgattcggaggagtaagggaagaagaacatgccctcgccgtttggatcgagatggatggtcgagattaaaacagccataccctttcccttcaagaaaccgtgttcgtggatgacgaaatcgacagtgtagattaggtccggatttaccccttcg

SEQ ID NO: 24331 - DNA, 302 bp, Zea Mays
gagttatctcttctacatggtttacaactttgggtattacactcaaggagcgcatggaggtcactatggacacgattgtacgcccccatgtacggtcttatgtgtatccccactgacatgtggggtcagtcaaccttagtcatggaaggagatcaacactggagtctctacagtgacccttatgccgggaaggacgggacgacacaccatatcgagtgtatgcctacgcatgctagaaggtgacacagggctcatgacgataggcgaagccacaccacgcatgaccgcgccacgagattgat

SEQ ID NO: 24332 - DNA, 482 bp, Zea Mays
cactaaccaacaacccgacaaacgttgggaaaagaggcctcgcgaagaagtccacgccgccggaccacctgcctctcgcgcccgaggaggacctcgcggaggcgaacacatgctggacgacatcctcgacgcccagtgcccataccaaaaggacatgcgccacacccttcggaactgcagagacttcaagcattccatggggaacgaccgacccttccaacctctgccgcctcccccaccacgaggaggacctggagaacctcgacaaccccaatagcaggagggggtggaggtggagccttcccacgcgttaatggagaagtcaacgtcatcttcggtggacacgggtcgcaagaaagcaagaggcaacaaaagctcaacgaccgtcagatactggtggcagccactggtcctcccgccccatatcgatggtccgaacacccgatcaccttcacccgggcagatcagtggctcaacttcga

SEQ ID NO: 24333 - DNA, 464 bp, Zea Mays
gatcggtgaagatgtgacatttgttcccaattaggtagtgcctccatatttttagggcatgcactatggcttctaattccaagtcgtgtgtgggataattctgctcgtgtggcttcagtaagcgtgatgcatatgcaatgactttctcattttgcataagtacacaccctaagccttgccttgaagcatcacagaagacgacgaaatcctgatggatgtctggcaacgtcaaaacgggtgcggttgtgagcttcttctttatgatttggaagctttcttcacacttcggggtccacacaaacttattgtctttcttgaggagctcggtcattggtctggctatgctggagaatcctttgataaaacgtcggtaataccctgccattcccagaaagcttcgaacttcactaacgttggatggctgcttccatttggatactgcttctaccttggacgggtctact

SEQ ID NO: 24334 - DNA, 341 bp, Zea Mays
gcaatagtcacaggcacgattgtatgcccctttcttataataagcatactacgctgtctgatgggacgaagcagccccggtaagacgtgacctcagcaccgaagcctccacagtagttggtatgtcagaagcgacaagacaagacgtcataccgaatggacgaatccatgcgcacggaaggacaacgtagggcccacgatggcaggagaaaactatgttgtatccaccgagccctaaggcagaatcatgggacccgccacacatcatcgcaaggacgttagccatgaacccgccactagaatgggagtgatgagcggcgccataccggaagcactactttg

SEQ ID NO: 24335 - DNA, 418 bp, Zea Mays
ctcttctcttgcaaagaaaggatcaaaacgttgtccaagccatgtctttggttgttgatgtgagaacacgtttcataaatttgagaaatgatggttgggagccattgttggaagaagccacaacattctgccttgcaaatgatatcccaataccaaatatgagtgatgttgtaccacgatttggtctatcaaggaaaggtgggagaaataatattaccacagagcatttttatcgtgttgatactttctatgctgctatagattctatcaccacagagtttgatcatcgctttaatgagctatctcaagagttgcttgtgtgtttttcttgtcttgacccaagggattcgttctctaagtttgatgtggataagcttgctcggctcgcggatatctattctgatgatttttcttttga

SEQ ID NO: 24336 - DNA, 427 bp, Zea Mays
gtgacttctgctactatgaatggtcctttccataggggtgacaacttgtgtcgtccctcccccgttagaattcgacggaggacgagatctcctactgcaaaggatcgacgtcgcatggccttgtcgtgatagcgtctcagagtttgctggtaccgtgctgattgaattaccatgttcagtcgttcttcttcgagtacatcaacatcctctagcctagtagcctcggcttctgttatgctttcaaagaccaaccttggcgccccaaacttgatatcagcgaggagtactgcctctgacccatagaccatgaagaaaggagtatttccatgcagagctcgactaggttgagttcttaggctccaaacgacgtagggcaactcccttatccactttcctgcgaacttttcatttttatcgaagacctttt

SEQ ID NO: 24337 - DNA, 724 bp, Zea Mays
ggacaacatcctcaaagtaaaaagagaaagcgagaagtagatggtcaatgttggaaacgaagatcatcattgtgggatttgccttattggtcaaatttgaagctacgccataaccttgatgtgatgcacattgaaaagaatatatgtgagtccattattggtacatttcttggcattattgggaagacaaaggacactattaatgctaggcttgacttggaagaaatgaacataaggaaacatttgcatttgaagcgtgatggaaattcctacactgttcctcatgccccctatgtaatgaataggagccaaaagttagttttttgtgacttcttgagaagagtaaaatttcctgatgggtatgcttctaacttagcaaaatctattactagtgatggatgtaaccttcaaggattgaaaactcatgactgtcatatcctactccaaagagttttgcctgttgctatccgaagaattatgcataaggatatatacgaagcaattgccgaattaggtaaattctttcaacaattatgtgctaagactctaaagttagatgttttgcatacaatgaaagctaaaatcccagtcattttgtgcaaacttgagaaaatatttcctcctgctttctttgatgtgatgctacacctagctgttcatttacctgatgaggcaatccttagaggcccagtacaatatggatggatgtacccagtagaaagac

SEQ ID NO: 24338 - DNA, 348 bp, Zea Mays
gaagaagatgaggtccctttgactcggaagaacagtcggcaatatgtcgccagtggggaaagtagtggagttccttctcctgctctgtctgccctcattggtctacaagaattgtccctggcgaactttgatcagactcttgaagatatggttccagaggatctgttatcagagccagcggatgatggtgcgacggatgttcgtgctgatgtgcttgacgccgggttggggtcatcccgggcagcgtcccgtgcctcatcgaccttggagcgtggtcttgagggtcaggaaactgacttggatcgtcttgttcccatggaagtaatcgagggaccttcagccttagag

SEQ ID NO: 24339 - DNA, 320 bp, Zea Mays
gcggtgatcagctcatccctccgtgtgccaccatcaaacctgagagctccggatacaagcgaaatcgatggtgagagaactacatgcgcagggtattgctgcaggggtgattcgcctccactttgaccgagccctcgaggagcgctctagtgcttcctcaagtctgcgggaggtttgccaaggctacgccacccggaatccattgactacaccaccggaattcctagttgttggtagcggtctgccgcgaacacactgctctacagccaaggcgcgactcaacacaaacctaggtataaacacttcccccatgctcgtgt

SEQ ID NO: 24340 - DNA, 364 bp, Zea Mays
ggaagcgatagggacggctcggtaggggtcgtggtcgcagagaccagcgaagaagacggggtagcagagcgtggcggcacaccttttatgcccagggcgaagaaaagtcagcaggccgcagaggtagttgcgcccgcccgtgatttccgttgagctaaccccacttgagaaggaaacggggaagaggaacagtgggtctgcgccccacctgtcagccgaataacgcgcgcggcatggagagaagagaactcggcttcttgcggagcaagccatttggagtagagatgggggcgcccagtatataggaccaggggtatggtcaacaggggcgagtgcgccatgcacggcggccgttggacggtca

SEQ ID NO: 24341 - DNA, 293 bp, Zea Mays
actttactagggtaagatgtcccatttgaccatggcgcagtagctccttccttaggaagctactgatagccgacccccaccttggcttataaaaggggaggtcggacagaactggggatgcgcagatgcatagaagaggcatacacgagacgacggacacacactcttgacgagaccagaagaactagaggctagagccaagacgcgagccatcgcaatgtacaaggcttagcttagaactccagtcccttagtctttaggtccacccatgcataagagacatgggagctcat

SEQ ID NO: 24342 - DNA, 725 bp, Zea Mays
atcatttactaaaagctcccttttgtatacatccaaagacaggtaaaactcaagatgtgttaaattcctgtattagtttgtaatgtgataataaggtggcaggctcttatgctcaggagcgggtggcatgtccttttgaacatctagattcaataacagatgcagtcccttaaaatccttgacattgttgatttagtttattctaacagctgcaggaataatgtttgtcacacaatgttccctattgctcacaactgactcttcttccaggccgtgtttgtgttccgattgaccccagtaactgtgatgattttgatcctgcggctgttccgactctatcacaggtatggtccatagagcctagcatgagaagcactaacatttcatatccttctcccaagcatcatggtgcaatgctgatatgctaaaacaagtgcactcatacagcttttaggagagctgaatgctactggttttcagacagatcctgaaaatagtaagtgattgtagccatgctccttttgtgattcgtgtaaaaacttattatttcataaattgcagaagtaaaggcgttctagtgccaagatgcagccttgcgtaacaggctaacatgctctccttttgacaatcctatcgagtttcagattgggaaagaacgtcccttgggaaatccatcagttttttcagaacttccttcctgcacccattgctgaaagcatgcaagg

SEQ ID NO: 24343 - DNA, 431 bp, Zea Mays
cacccggggaaggctaatgtggtggcggatgcccttagcaggtctggggttccaaaggtggccttgccattgatcgctgatctggaccatttggggatcgctttgtgttatgtcggcaccgctagcaaggagactcagatgcttattcaatcctctctcatggagagggtgcgtgcggctcagcagcaggatcgtcttttgctggaagctcgaaagagggttggtgatggtaaaccgcgggagttcaccattgatgagaatgatttggttcgtttcaggggccgtctttgtgtgcctcagaaatcagaggtgaagctggatatcctgcgagaagctcacaaaacgccttacaccatccatcctggcgaaaccaaaatgtaccaagatttgaagcaaaacttctggtggaagcggatgaaggttgacatttc

SEQ ID NO: 24344 - DNA, 291 bp, Zea Mays
accgttcaccctggcgaaaccaagatgtaccgagatctgaagcaaaacttctggtggaagcggatgaaggttgacgtttctaagtatgtggccgcttgtgaagtatgtcagcgcgtgaaggccgagcataagcggcctgcaggtttactaaagccattgaaaattctggagtggaaatgggagcatatcaccatggattttgtggtgggtttacctcgttctcctcggggcagagatgctatatgggtggtagtggatcgcttgactaagtctgcgcattttattcccatg

SEQ ID NO: 24345 - DNA, 375 bp, Zea Mays
cgagtacttgtgcgtggattcttgattctagtgcttcttttcacatgacctcattacatcgatctttcttctatgtgtccttcctcgttcccttattgctcatacaattgatggaccctctctctttgttgctgggtaggacactcttttgttgaaattttttcatgttcctaacgtttcctgtgttccaaacctaactttaggcttatgtccgctagtcaacttattgatcatgattgtcgtgtgttattcttgatcttgattcttggtctaaatatgttggacatgaactaaagaatgaactaacctaatgaataagttaatgggcatgagcgcgagtactcggactggaaattggtatcctcatcactctgt

SEQ ID NO: 24346 - DNA, 302 bp, Zea Mays
tctgattatcaattcatcagtatagataagaaaggtttcattcctgtaatgctagagccgatggagaatcagctaaatcctaaataaagtttaaatgatgaatacacacaaagttcataagtctctagtcacggacagttcggcctccaaggccggatggtctggtctttcacaaaagggttcagactttaagaccgaacatatatcacagcaaaaggacagtattacggatgatccggtccccgagaccggagagtccgccgtcacacaaagatcttctaattcctctgtggggaacatga

SEQ ID NO: 24347 - DNA, 452 bp, Zea Mays
agaagcctcttctgaatttgtcaatagcatttagagcccattgtggaatatcaacagccatagccaagtatacaagcatgctagctagcacatgttgcacctgcactatcttgccggctcttgtcatcaaatcaaccttccaactagggagctgatccgcaatcctgtccacaaatggctgtacttgctccttggttagtttccaaagggatagagggagaccaagatatcggtagggaaaggaagaaacctcgcaaggcagcaactcatgaaccacagttaagccgtcctcaggacattggataggatacacattggatttctgaacattattatgtagccccgaagcatcaccaaagagctgcaagatctccatagtagaatagatatcatctctcgatgggtgtaggaacagggctacatcatcagcgtacatggaaatgcgaccaaac

SEQ ID NO: 24348 - DNA, 722 bp, Zea Mays
ggccatgtgtgcggcaccgccgttccgctgttccgccgtactccgtcgtcgagatgctgcgcgacttaattgccggtaataatacctcatcaacattcgcaatgttatagacatcgaattacgcctgtcaattttggtaatcaagcctcagtgagcgatgtgcagtttgtgccgatggcgctccgccgtggggatgcctcgcgccgccgtcttgtgggctgggggtggtgtaacgcgctaccgttggatcctcactgtagggtctagattagataagcgaatcgataggatgtgggatgttaatgaccgttagatctgcaatggacggtagagattagtttgggtgtagcttttcgtgagatcggatcgtgacctcagatcgtggatcgtgcggtttggatgagtggaaccatcataaaatctgtgccgtccaaatgaaatctagcggctatctgagcataccgattcatatggatccgatctattctggatcgtccagatgggatccagcggttaggaaatagagataccctttggtcgaacactttttcgtaagagcccctcggtttcattgaaataaacccgccgtccagtgagcgctgttcactgtgtcttgggcaattttccctgtggcccctgcctttctcagatttaatggcccaatccagagccgtttgaaattgagtaaataaattggtaaagggatttttaataggaaaata

SEQ ID NO: 24349 - DNA, 369 bp, Zea Mays
ttttcttcatattcttgcccgctgcattgtttgccgtattccccttgccttggctggaactccccgggttctattgattattagagttgttccgcttcggatatgggtagtctttgatgaagtgtccagacttcccacaattgaagcaaccagaagatgaactcgggagtgcagggaaacgagtaccaggggcactcgactgagttgttgaggtgggggaagtggcggggtggatgaatacaggctatttcaaggggtaggagggtggacaaggtgaagaacggttttgattgaaaggtcggatcaccagcctttgtcgcttttcaggcccttggttggacctgtcacctccatagccctttgacttcc

SEQ ID NO: 24350 - DNA, 428 bp, Zea Mays
gaagtagattctgtgggataataggtggagtgagtagactggttgtgaagaaaggggcgattttcattgaaactcatgtctctagaaatgcgaatacgacgagtagatggatcataacaacgatagcctctgtgttcaggactgtatccaaggaatacacactctacagattgagcagtcaatttagtccgctcacgtggtggtaacaagacatagcatatgcatccaaacacatgaagatgatcatatcgtggaggagtcccaaaaagaacttcacctggtgatttaccagaaagtttagatgaaggttgtctattaatgagatacacgacagtggaaacagcttcactccaaaagtgtgaaggcacaaaagaagatatcaaaagagtacgaacactctcaataatatgacggtgtttgcgttcagc

SEQ ID NO: 24351 - DNA, 383 bp, Zea Mays
ccacaccggcgagattgcaggtcgacggcggcaattgccttgacccacacggtggaggggatttctccgatgaagtgctcagccacccgattaatcatgcgagatcggatcccttgtgttgctgatcgggggagaggaaaagaagtttggttttatagctgtagtccggatggaggagcaatcttttcccaccggaaagctcggccgccgcccgcctggtttgttgcggtccgatggggaagggtctgacgggttggccccatgcgtcataggaggctgtcggctgaggttaaatggatgagggggcatgaggtctagtctttatatcctgcgcaaagcccgactctggtgcacagcccaacccatgaacgcgctaatggcgg

SEQ ID NO: 24352 - DNA, 430 bp, Zea Mays
agcttgaaagtatcactgcaatatgtcgatctgttatgaatctgcatatggaaactgcatgctgctgttactggatgtgtttgggataattggacgatcaagtttttctccgtttttcgttttctttttatgcagatgagtgccccctcctttgtgtgagtgtgtgcacgcgcgcgtgtctgatggtcttagaattttactttccagtttggtttggtgtcagtttaatttaggatttgacttggcgaggatgcagatggggaagtgggagtcaaccacagcggctgcacacattttcttatgtgtgtgcagctttagccacagctgcaacagcagccggcattttaatagtttgtgtttttgttgagcctactggaaatctgagatggtacatggcagaagtatttcattatttcaattggttgaaaat

SEQ ID NO: 24353 - DNA, 720 bp, Zea Mays
gtatagggttcacaatttagggttcagggttcagggttcgggctttagggtttggggctctgtgtttagagtttaggcttttggggttcgaggtttaggatttcaatttgagttttaggatttgaagtttggtgtttaggatatggagtttaggatttggagtttaggatttgaggttttgtgttttgggggttgggttttagttttagggttcggggttccggattcatggtttagggtttgggtctcggggtttaggattttggggttcgaggtttagtgtgctatagctcactggatgctaaaaacatccttacctgtttcagtggccaaaacatgggtggtggacgggaggaatgaaattgttgttcgacgatgaaaacatgtgtcgcgggaggccaaaaatagccttaccggcctccggggccaaatgcgtgtacaatggttcggacactagtgtactatggtttggacactaaattggttgttcggccatgaaaacatgtgttgtagctcacgcgaggccaaaacagccttactttactttttagggtttggagtttggggtttagagttttgtgttttggtggtcgggtctttgttttagggttcgaggtatagggttcacaaattagggtttggggttcaatgttcaggctttagggtttggggctcggggtttagagattaggcttttgggattcgagatttcgggttttg

SEQ ID NO: 24354 - DNA, 353 bp, Zea Mays
gaggccgatatgcccatgatgatgaagctcggttacttcggggagacagagaagaagcttcttcgttttgcccgcgaagaaaccaccccagagccaaaaattgacgaagtagtagttttcaaaagctttttcaaagctggattgcggtttccgcttcatgagatgattgaggaagttctggataattatgaaatttatcttcatcagctgactcctaatgctatcgttaggctccatcttcatttgggcccttcgaagccagggaatggacccaaatgctgaagctttctgccgagtgcatgagctacattatcagacgaaggccagagaagatgggcttcatgagaattttg

SEQ ID NO: 24355 - DNA, 423 bp, Zea Mays
aagagctggattgctggaaggcagcaatgaatctgacagaaatgaaaagagacaacgcaccaaagttttcttcaagtctcagcaagcagagacaaacgattggtatggcatcgaaaaagaaactctggattgtacagtaccccgaatgagctaaaaatattgtcgtagcacaaggaatgaaaaaggcacccatgtttgtgcaatgttgaagagatgtgtgagatctatgtcaatcacattttgcagtggttggtcctgattagttttgtgcttctgctaggacaagaaaagccagggtagtaaacaataccctactaaagcttggcagcaaatggaaagaacccaatgagctatattactatatatcatatctccaagataggtgagtatatgtccactgaggcttgaacacagatacggcag

SEQ ID NO: 24356 - DNA, 405 bp, Zea Mays
acaatatccagagccagtaaaagtgaggcaagaaaatcatacagtcaggagcagcataatttgaaatggaagcgcagccaggagataaagcctgttaagcttcttccaccacttgacacagatgttaagaaagatgctgtttctccaagcaaagaacggatatcttcttggaaaccttttccatcgcctaatacaaaggtcccaaaggaatctattcctactaaatcggaatcacctaataagaaaactgatgcacactctacagttagtagccatgttgaattaagcagtcaagttgaatctttaccacaacaacagcttcctgacaagcatcaacataaaacttcatggggacactggtctgaccagccaaatatttctgaagagggttcaataatgtgccgc

SEQ ID NO: 24357 - DNA, 526 bp, Zea Mays
ctgggggcgtcgagttctagggtttcgggctcgattgattcatgtcgttcgcgggggcgtttcttgttttgcttagtcttaaggtcatgcgaacacagctataggttaggagcttgatttgagctcactgttcgagtttgtgattggcttgcaacatccgagtcccaacccgtgtgcgggtgcgagtgcgagtgtagtagactggagttttgtagctctccctattgcagcatctgattctgagtccatttctgtagatgtattaggttctccatgccgttgcccgttggattgggagccgatttttagctgtagtccgggatgctacgtttgccctttgtttttggacgaacagaacatggccgtttttgcactgtacaagtaactttagactttatagctcttgatagtgtgttttagttcttatttggtccttacaaagcagtatgggtggatcctaacattgtttgccatcgctgtgcaatctattttatctcatgttatgtctcttaaagcctgttcgatg

SEQ ID NO: 24358 - DNA, 293 bp, Zea Mays
atcagagatggcatttgtcctcacagacaatgagaccgccaaggacgccatcatcgtggcacgtatcgacagtgctcacgcccacagagccacccagtagaagttgcatcaggagtggggtcgcctggcgttccggtcgggcaagaacattaacaacttcactctctgcctctctagcctgatgcagcaaatgacgtggtacagcaggagaaaaccatcgagaagtttctccgctttgtccccaagaaatacatgcaggccaccctggcgatggaaacgttgttggacccctc

SEQ ID NO: 24359 - DNA, 305 bp, Zea Mays
ctggaaagtggaaaccaagagtcggcggcgccgcggcgagcagagagatgctggttagctgacaagaaaaaactatccaatccaagggccaaggctccaagccagaagcgatcaagcgtccaagcctccaaggcacaacatagcttgttgatttgatcggtcttagagttcagactaaagcaagccaagtagcaactagcaacgtgctaacaagtagcaaggtaagtagataactagacattttttaatttatatatggagttcctatacattttacagttagtagtacatggggtttctccgtt

SEQ ID NO: 24360 - DNA, 303 bp, Zea Mays
gggaaaaggttaaaccctatttccctctcaccaacgaaaagcgaagtttggacaaatatctgtaagcccgtaaaaccgtgttattttatatttttacaatatttgagtgtataaacataatatgtatacatatacataaattttgttgccagaaaataatgggtattcgattgaataccctaacttctatatgggcccgcccctgaatactaggacgttttgacttttgaattttgacttcaccgaatcgctgttttgtgttccattccattgggttcagtgtctcgctcagttgtcttccca

SEQ ID NO: 24361 - DNA, 397 bp, Zea Mays
gattgatttgggggaaatcccaaattgggttctctggtgaacgatttgagacacgagtgggtgtgctaggtgcttgaatacctagcggagctgagggcacactcaatttataggattcatgtgcggtggcgacaaatttggggaaagacgcacggcggccgaagaggggaagagtttctggttgctcaagcatggcgattgccggtgcaatagctcttgaggtggtaaatccagatgcgccacgattactacatcatggtaaaggactacggcgtggcacatttggggtcatcggcgtaccacggcgacaccggggatccggccacgttgcgcggctgcaggcgcagttgataagcttcaacccgcgatcaaatccactcccttgctgatcttttca

SEQ ID NO: 24362 - DNA, 579 bp, Zea Mays
aatggggtaactggtgagatttttggttctatgtggcttctggtgatgtcgaaggcttgccgagtctgcctccggccatcctgtgctcacactgttatgtggtgtttcctcgattcgaggtggcagaggaagacaaagacgaagggcccttcgacatgctgcccgcctgatcagcgggcgtgacttggtggaggaatttattgcttatggggtgtgacccttgtcgcatggctgggtattgggcgaagtgacccctcattggatgccaaccctaggcgaccaactggtgcgaagtccagccttcgtggtagatttacgcggtcgcaacgcggccacgtttgtgcatgaagtggaggtcgaggccacgaagattgtaggcaaatatgtgccgcagatggaaactctgaggagttgggatatccgcagttcaaatgttaggttgaaccgtgtttttgagttgaaccgtttgtcgtatgccggctacctgggggatgactatgctgatgttgctgtccgctggggcaaacaggcgatgtcaacggccgacgagggcccttcacgggacgaggcgccgggcac

SEQ ID NO: 24363 - DNA, 312 bp, Zea Mays
catttaggggcttagataatactttttatgaaatggatcctacaaatattggagctgcatcatattatgttactggtcaaacaagatggggtgttagcaatgttggaaaatttaatgaggccccaaatggaagttatacaatagatagttccgagcagtttcagaatgcactggattcacaactgttccaaacagcaaggatgtcaccatcatcgctacggtactatggcattggacttgagaatggaaattatactgttgagcttcagtttgcagagtttgcttatccagaatcacccacctggcaaagca

SEQ ID NO: 24364 - DNA, 311 bp, Zea Mays
gacgaaattgggagcccagcacgaacacgcaagatcacgagccaagaacgtcgaatcccacgcgcgtatacgtcgcgggagcacgcgtctcgtctgcatgcatgtaggacctagcaggctagcacgttgcagtactgtggtaccgcggaagtacaatcctcctagtacgccgagttgcctgagagtaggcactaggcagtgaagggacagagcggcacgaatctagatgcatcgtaggcttgcttcctgtgcaccctatccgtacgtttggttttacggcggctactgtttccgcttgtctttagttcccg

SEQ ID NO: 24365 - DNA, 630 bp, Zea Mays
ttttcgggccgcgtgatggagatgcagcggctaggttattttgggaatggtgtcggacgggctctaggggcagaagaggtctctgagccggaggggaattggttgtttttgaagccttttttgctgctggtctttgcctcccgacgcatcggtttgtagtagaggttttgaggaagttcgaggtacaggttcatcagttgacaccaaatgtagtggtggcgcttgcgaactacgtctgggccgtctcctcatacgacgggcagccatctgtggaagtcttcgctaagaattattttctgcactggcagaagaggaaaataggtgataagatagcccaatttggatcatgctctttcacaccaaggactgggaagacctcggctgaagttgtcgagattgttccgtgtgctaggaataagtggggcaattgatgggacttttgattttatgtagctcctggggatatcaaagagttgtcgagtttgccccctgtcatcctgtgttcacattgttacgtggcatttccacaatttgaggtggcagaagaagatgaagacgaaggggcctttagatatgtggcccgcatgagtagcggacgcgacttggtcgaggaatttattacctatgggg

SEQ ID NO: 24366 - DNA, 587 bp, Zea Mays
aacatttctggttccatatggcgcaacatctcttcgcaatcaaattctttaaaatctttattggcatccacagaatccactttaccatccaccttatcttcaattccgacagctctctcgtcattaccaggcacttcacacggatccaactcaccatgttctgaccatatcgtgtaattgtttttaaacccctttttagcagatgtgattgaattactcctgtatctctccaagctatcttattatcacaatcgatgcacggacataatatctccttactctttcgcaaattcgcgtgcttgttggccgcttcaataaagcttctcaaattttgaatgtacgacggatgtggtcttggcacattgtacatccaacctcggtccattacctatccctatattgattaacatcaataaaatcattaattaattgaattcatccctaaaacatgaaaaataaatgtacatgaaagtgaaacaagatcatatcgagaggtacctagcaaatgaactacaaaaaatatttaaaatatccctaattaattgaatttaatccctaaatcatgaacgaaatgatgtgcatgaaaa

SEQ ID NO: 24367 - DNA, 401 bp, Zea Mays
ggtctggagtgggcggtgacgacatggttgggggcagtcctggggccggtgaaccgccgacgtacctcttttgggtctgtggcgagcgccgggtgaccagtaatggtgagaggtgtaggcatgacgcggtcggccggacctggtgtcgtgaggtggaagatgagcagggaccgtccgttttatgatgaatgctctagattgaacgaaaaagaagtgaagcccttgatcgtggatccattgagcaacgaccgtgattcggccgtcatgctgattcatttgtagatgatcctggccctcgattggcagatctgcgcttaagattagattcccatttcataaaatcttgacggttcaattgaaatccggcggccaggataggataccggttaggcgcgtttgtg

SEQ ID NO: 24368 - DNA, 320 bp, Zea Mays
atctgggtatgaagcacatacgagaaaagatgagggctgaaacagccaaatgtttcaaggaagacgatcaaggtgtgatatggtttaaaaaccgcatagtagtgccaaagaatgaagaactccgccagcaaattcttgatgaagcacatcttagtcgttattctattcatcccggaagcactaagatgtaccaagacttgaagcaacattactggtggacaaagatgaagatcaaaattgcacgctatgtggctaagtgtgacacttgcagacgtgtcaaagccatacacatgaaaattgctggtccattacaatctttg

SEQ ID NO: 24369 - DNA, 435 bp, Zea Mays
cgcccggtttggttcgatgtggttgtgtttaatcgctatgtgccctagctttttttttgacatgttttgagatttgctatcgatctttggtcgctcgccctaattgtcaagcttgaatcttaggctttcttcggtggatcgtgtaaaatagggaagcggcactgtcatctgtttggcactgtcatctgttccctagtaccccgcaaataggtttgtccggtcttctgaatcacacagctcgatttagggtaaatatgattcatcgaacttatcctgataagtcattgggttggtctttatcaccagatactgcttggacttgccacttttgtgtgccccataactttttcgtgtcacgtttttgctacttcgtttgaacgtgcaccaagcctgttacaatttcagtgatatagcgagaaatacagtcgtcacagt

SEQ ID NO: 24370 - DNA, 279 bp, Zea Mays
gggtgatcgaagttgagccactgatctgcccgagtgaaggtaatcgggtgctcaaaccatcgatatggggcaggagggctggtggccaccaccagtatctgacggtcgttgagcttctattgcctcttactttcctgcgatccatgtccgccgaagatgacgttgacttctccatcgacgcgcgggaacgctccgcctcctccccctcctgctgttgaggttgtcgaggttctccaggtcctcgtggtgggggaggtggcagaggttggaagggtcggt

SEQ ID NO: 24371 - DNA, 304 bp, Zea Mays
gaaccgatgaaggggcgagcaacaaatgagccttgagacgagcagcgaaatcatcctgatcatagccagactccacctctagcaaccagtgtggtgttgctgaagaaattgtagcacaagacgcatcatgagaaggttcgcggaagagtgcgtcggccacccgattgtccgttccacgcttgtacacaatacgataattgaggcccaacaacatggaaaacacccgctgctgccaagcagtatgaaggcgctgttccgacaattgtaccaaactgcgttggtcggtatggatgatgaattcctt

SEQ ID NO: 24372 - DNA, 432 bp, Zea Mays
gaggacgccaccatcgacctgcattttcgtcactggtgaaccctctgtgccatgccttggtgcatcaccatgtctcgtggatgaagtctatggctgtgccatggggggattggcgacaagggcccctgaatacctcaccggtgttatctctccaccgtcaagccgcagacctccatagatcagcccatcacaattccaatcactggtaagtcggctacttgcatgctcaccatgtcatcctcagtgcgtgtagcggcttcggtttgggctgggctatcgagttggctcggagccgagctccggcgggttcgccaccgccttgtttctggcaccgccaccgtttctggttgaaagggagaagaagtgcggtgtcgattgatcagctaataaatggtgatgggtctgatgtcgttgattttggttggacggctg

SEQ ID NO: 24373 - DNA, 579 bp, Zea Mays
cggggcagccatacgaagcttcggtcgacgttgggggccttctcgggggcgggaattgctcgtcgtcgtgcaagctccgccgtgaatccgctctcttccgtgggcgggactgcaacccttcaatcgccggtgagacccctctctgtagattcactatcatcccctcttgattttgcaccgattaatttctagttcggggtggtttggcaccggattgcgcgttcgccggcgaagctccgccgtgggtgcgccaccgccgccgctcggggtgctgggaattgggggaagggctcctgaccgttggatctcgttgtgcggtcgagattagatcgtgaggataccccttcgccccattaaaaaccagccgttgatctctaatcgtgcgactcacggcgcgtaccggttcggtcggggggaagatctaatctggccccttgattcaagatcggacggctctgatgggtccttaccccttcgctgtggcgaattaacagaagagcccctccacttatttgaaataaacccgccgtcctatgtgactgtgctttgagtcttagaagatttacccagagccccctg

SEQ ID NO: 24374 - DNA, 419 bp, Zea Mays
ccgccataaataccttaccacatttagccacgcttggcactgagccacagtccgcttcccactcatgatcccttggatcgcgtagcactcatgacttacgagcctcccggactgcgatgcattaaaggcccacacgcccctcggtctgcggcaactcatggcctatcggcctagacctgagtgcgcggacctctgatagggaactacacgatgggttgcgccgagctcagactacaaaggctaggggtcggtatagccaaaatgatggcgcctaagaccatcgcagccttgtgtcatctaccatgataaatatgaaacaaacaatcctgggcccccatgagtacacgtggctttaccccgggtaaaacgctggtattatccttgccttacagctccttcccaaggaagccaccattgcc

SEQ ID NO: 24375 - DNA, 371 bp, Zea Mays
attccatgcaagctcactatttggtcaatatagatttctgcatacttctctgccctgtgggtggtatgcactggcaagaaatgagctgtcttggttaactatccacaatgacccaaatagaatcatggtgtcgggatgtgttgggtaaacccacaataaaattcatgttgaggtcctcccatttccaagatggtatgggaagaggctgtaaggtacccactaccttcaaatgactagccttgattctttggcaagtgtcgcattcagatacatacttagcaatttccctcttcattctggtccaccaatacaaagatctgagatcatgatacatcttgttactgccggggtgcatggaaaatttggaaaga

SEQ ID NO: 24376 - DNA, 524 bp, Zea Mays
cttgacacactctgtttctcctcagtcttgggcctaagttgtgtctactactgtttaccttgtgaacattcagctttttattgctctacatggtgtcactcttgagcgtctctttggtcagccactatagtcaccttcgtactttggttgtgttgcctttgtccttcttcagcctcgtgagagaaccaagctcactgcacaatctgttcagtgcgtctttcttggctatgcatttgagcgtcgggatatcgttgttgagaccctgtcgctcactgcattcgggtgtcttgggatgtcacctttgatgagtcccgtcccttctttacttattgttttgtcctcttcttcctctccctcttgaatttgttgatttccttcgtttggttccacctattcttaccaccttgtctccgctaccctcccctattcctctttcatcactgtcacctccacctccatcacctccaccactatcgccttatccacctccaccatcgcctcctctacgccacctccacgtccac

SEQ ID NO: 24377 - DNA, 461 bp, Zea Mays
actcagttcaccgcgctgccgtgagtgagctcgtcgtggccagccttctgcaggtccattcataccctccttgcccttgtttcagcacccttgagacctagccaattgaactaaaccacgttagatcgctaggaatgcctcggtttgtccttagttcgcgccatcaccgtggatagagagattgtgagctagaactcctcaattggttgagggattagtgtcgtcgagggtggaattaggtgttgagcaacggaggggcctagacgttgcgttttccggccggtataagcttgttggagccactgcttcgtcgtccgtggtcggcgatctcaccttgcgaagaaatagaaagggaggggcctaactgcgaatgtcactgacacagagaaatagtgcataagactttttatgggtttttcaaatagccagggtcctctgtgcaaaactggcaacgcgggcgc

SEQ ID NO: 24378 - DNA, 337 bp, Zea Mays
agtaatgagagcaatcatcaagaaccacaaataatacttatatccaaaacactaacaagaggagaggtcaacaaatcacggtgaataagatcaaaagcatgtgcaacttgagaggagctagggaagggaagtctaacatgacgacctagctgacaggcgtggcatagatgctcatgagtgcccctagtacaagagacgactaaactacaagagagcttggacaacacgtcaggactaggatgaccaagtcgatgatgccaattgctggagcgagcagtagtagtcagggcatgcggcgccaatgaagatggtgatgtagcggaagcaggaagtcgca

SEQ ID NO: 24379 - DNA, 581 bp, Zea Mays
gctaaaactccacagaacacctctacctaaacgtagatagccagtgccaaaatatcaaatcaatatgacatgtctggcttgcgtgacactcccagacattaaatgatcattggactttagaaattcttcatttgtttatttccttggtctctaacagttacatgttgtgtatcctgacatagggaaacaacatacatattataaatacgttccttgtcccatttgaatctttctctccctcacttgttccaccttagatcaaatttcagttgctcctccaccaaagacccttagaacaacaagaaccctaagtctctctcagtttcccattgagcattggagcttctccaggccgacaatcgtcgattgattcttggaggttgcgcatagccggtgtgtgacattccccatgagttacaagattgttgtaaccttgatttgatgtaagttaccctcattcataataaaaaccttctcatacttagagcgatagctcttggcttgagatcgaggaagggtgtgtgacccttggcctttgtggctctcctcaacaatgtggaggtaggcaagcctttgtggcg

SEQ ID NO: 24380 - DNA, 310 bp, Zea Mays
tggcagtccaatatggatcaaaaatatttgcagtaaagatcttcacccactacggactccatgggtttccagggaatgtttgaataagtgaaggctggtatgaggcagggttgtgagacttggtttactagctaaggactgtattgaacttgtactagattgatcacaacagacacatcctcttgtctgcttgtcctcttgtgcccagccgtggatgaggttcatcacccctacgtttagctcctatgtgttgtccatgcactcctgctacgtgtccataatcgtggggctactggcctccctggcgtcc

SEQ ID NO: 24381 - DNA, 304 bp, Zea Mays
gatacgaagtcaactagtgcttgagtctttactgttgtgcgaggccgaaactctatgtcatgagctcccagctcgcaggcccacttggctattcttccgatggcttctttgttgtgaaggatatcccctattggaaacccggtgactactatgactttgtggtcgtcaaagtagtgacggagcttgcgagcgattagaagtaccacgtacagtagtttttgaacttggggatacttctttttagagggtcccaaaacttcgttgatgaagtagaccagatgctgtactggatatgtgtgccctt

SEQ ID NO: 24382 - DNA, 461 bp, Zea Mays
gaaaaaagacatctcaaaagaaagttccaggttctccaggcacagcagcaggaccggcaccagaagactcgatcatttgggtttccacccaaggggccaaacttcagtagaccagctggacccaccccgtcacggttcagccagcagagtcagagctctttccataccccctcagtggcaagcaaccaacccccggtgaatgcatgttgtcacttcaagaacaactgtccgcagctgaagccaccaggacccgcctactccaactcggtgaatggccccaagaatacctcggcatccgcccccaaggcgccctcttccgtcagccagcagaacaagaccccataccaaggaagggcacgagtgaatcacgtcgatgcccaggaggctcaacaagctccgggagtagtgctcggtgagttccttgttgaatttactcccgctaccgtacttttcgattctgg

SEQ ID NO: 24383 - DNA, 407 bp, Zea Mays
agtgacctgaggttgaagacgaactcgtgtccactagattagtgatgaatggctaggatcaagtcgcgccgtaacggttcagctgcgggtgtatcgtgcgttgatctgaatccgaggggcacaatcggatctcagataattaaatcccgtccgtcgatctggccgtcaacgatcggtgagcgtatttgattcataaccacgttgatcgaatcgtgaccgtgcactcatgatctggcggccagagctctccgataccccttcggcctgcaccttttgctaaagagaccctagggttaaaggatatcaagccaccatcccagttcgaccgtggctgagtcttagcgcattttgcgagttagccccgggttttcctagaatttggcgcctagtccagagacttagaaaat

SEQ ID NO: 24384 - DNA, 598 bp, Zea Mays
ccaggtgggatttcctcttcctaaagaaagtgtttgctataaacatgtcataggctagggcaaagttcaggatttcctctccttcttgattcctagtcccaaagccgaagcctccatgcacaccctcgaaactagtgctagatgtacctagatggccattgagatctcctcctatgaagagcttctcgctaactggcacactactaaccatgtcctccaggccttcccataactccctctttgagttctcattaaggcctacttgaggagcatacgcgctgataacattgagaaccaagtccccaatgaccagtttgactaggatgattctatctcctagcctcttaaaatctactaccccatctttaaggctcttgtcaatcaagacgcctacaccattcttgtttgctgcagtccccgtgtaccacaacttgaagcctataccttccacttccttcgccttttgtcctttccacttggtctcttgaacgcataaaatatttacctgtctcctcaccgcaacgtcgactatttctcgtaactgacctgttaaggaacctacgttccaactacctacacggaccctagttggctcgac

SEQ ID NO: 24385 - DNA, 348 bp, Zea Mays
gtgggggcactggagagcacccgcgcgcagtgtatgtcggcgccgttgctgttgctccttggtagtggtaactttggagtttagacaaagggtcggacaggatcacagaacaggaccaacctggccaggccacccagtcagagctgggactgggatagtgggctttgcaggtacggagtactaggtgttgccgagctgggttgctgtttggttgatggttgtaagttgtaaccgtgcagcaccgatctgatccgatcccacgtgcgcttgtaacggaaccgtagtccgagtgtcacgggcctcgagtggcggcacgtcatcccggccggccccacccccacccccacc

SEQ ID NO: 24386 - DNA, 320 bp, Zea Mays
ggtggctgagttgattgaaaaagaccttatattagttgggtgcacagctatagaggacaaactgcaagaaggcgtgccaacctgcattgaaactctctctgcagctggcataaaaatttgggtgttaacgggagataagatggaaacagcaattaacattgcatatggtgaagcttccatctatcttgattagtttgtgttacttattctgctccttaaactattctctgccagttttggtttctgggtgttcttttcctgatctccctttcgtctaacatatgcagcatgcagcttggtaaacaatgacaccaaacagt

SEQ ID NO: 24387 - DNA, 466 bp, Zea Mays
gtcttctttcatggtgtaattaccaagaatctcattgcacattgtttctatcatttcaagccattcgacataggggccgctaaaggcattatggaatttgaagcagtatggcagccttacaagatcaagcttctttccttcgtcttttctcttcggcatgccccatccacctgatgtcgggaaagtttaattcgtcgggtattcttgcactaaatcccgagtgctaatgtgcttggctacaactctgaattgaacttcagctaattgacatggggagccaagttgcatattgcataatggtcttgttatgtcgaagctcagcgttaacggactcatcaccatactcatcaatttttccctctttttctcatcggccttcacattgaaccattcattggtccagccagtaggccacttagtacgatatccaatcactggagtcttcatgtcctttcgataggcgaag

SEQ ID NO: 24388 - DNA, 486 bp, Zea Mays
atttgaccttcgagcgttgcctcccctacaacttgtcggggcgagtttaagggagaactcgatagcttgccgtgttgccaagcgctcgggagaattggggggagaatccaagccgccgcaactgattcaagcgtgggtggtcgtcgggtccctgatggatggccggggatgctcgcttgtgttacccgcacgtctccatggtccttccgggcgaggatatcctccgggggtggtctaattgctcgccggagcacttcggttgagccagaaccgccgtgcgccatggtcgtagctttctgctgtgcgattcatggtgagactcatctccacaatttcacctatttgtccttcacgtttagcatgggtctaatcggagattcgggcattggggactcaagtcaagggaacaacgatggcgccgccgtgtgctccatccactggcgtgttcgacctggggaagatgcacgtgggccgtcgatctgcgat

SEQ ID NO: 24389 - DNA, 549 bp, Zea Mays
ggggcttagacgatcaccgtgagttcaggatcccacggagacttggggcactttgggttaatgggagagaacgtagtgtggatgaatgtaggatgcatgaagtacactagatttagagaggttcggaccgttggagcgtaataccctacgtcctcttggttactagttgtattgctcgtaagtagaaaatggtaagtgttcgtttgtacgtttggacgtgtgtgatcagttatcccttagaagggatcccctcttccttttatagtccaagagataggggttacatgatgtgtgagttggcttagcaccagacgtctcctattgttgctattgaaggtgtaatcgtccatccatagctttttggcagcgtcggctccacatcgtgggtggtcgttgtctcccgtacgtcgtggatggaggatgttgtctctagacgtgacggtcgttgtccatgtgtgcacccgcaatggtgcactattgacacacctaggacgatcgagcctaacaccctacatggtgtgggatgtgggcacgatcatgcttatcttg

SEQ ID NO: 24390 - DNA, 415 bp, Zea Mays
cgaggagagtagtggtgttccttctctagctttgtctgccctcgttggtctgcaagaattgtctctggcaaattttgatcagactctcgaagatatggtccctgaagatctgttgttcgagcccgcagatggtggagtgatggaagtttgcgctgatgtgcctgatgccggcttagagttatcccgagcagcgtatcgtgcctcatcgaccttggagcgcggtcttaagaatcgagaggctgatctggattgctccattcccatggaagtggttgaaagtccctcagccttagaggtggctgctacagagagcttggtccccaaggatggcgctagcgtttacccagctcccgagggtgttgccggtgatgatccggctcggatgggcagcgtgagctatgacctagcccccgag

SEQ ID NO: 24391 - DNA, 494 bp, Zea Mays
ttcagctctatttatctatacaccaaaagaacattaacatagtcgttcacacccttcacctcgttcccgcacctgaggtaccggtttagtctgccgctcctacaatcagtctcctcgatctctagctctgccactcttggactcccactcatgtgcctaaaaagaacaaaatgcctctcatgtcaccactatccccttaaatcacaaccccctcatgatccacacctatagctagcccagcctgcttgtgtcaccccacccaagtttggtttttcatccaacaagttcatgttttcttccaaggaccccacacctgcttgattattgtgacatgctcaaggccacacaagccacacatggtcctaccccacaacaccaccaccatattacaaacacccagaatctgtaatcttctcttctctcttcctgcttatggccagtcgtcatcgatgttcttggctcggtccaaggaatgtgtcgtgccaccatcaact

SEQ ID NO: 24392 - DNA, 331 bp, Zea Mays
tcttacgcccgaagggttatgattccgatctaatctcccacgtccgttcacaatcaaacggcagggagcttttctccacgcatccgacgcagccaacgacggtgccgcccctgtcgcggcggaggtctcaccggaggaggggcattgccacccttgtcgcttcaaacaccaatccaaagcacgcaaaatgaggaacatgtcctggcgaacataggaaagggctgcttaccacgaatcgtgcgagcaggagcgtagtccacggtggagggcggcccgacggcggagtcacatgttcggcgagcaatttcaagctgaccagaacacgactcac

SEQ ID NO: 24393 - DNA, 339 bp, Zea Mays
gttagtttgtagtgtaatgtagtttagttagtaaggtaatgtagtgttggatcgagggggcaattggtcgactcataatgagtcggtcttccttttgtaatgatccctgacttatggatggaagaatgaagcatgtttcatgccattcctctattgtgtattctgttcttttgtctgacggtctgatcccaggtaaccttattgttgaatcttaggtttctagaggtactgaccgagtcccattactctattgcgaccaaaactctcccgagacactggcttgttcttctgtgcccgactcagtgtgccaacctgtacatttgtcgacgtcctcttggc

SEQ ID NO: 24394 - DNA, 427 bp, Zea Mays
cagcccaaagttgctctatcagaactgtgttgagccactgaaactgaattctagaacaggaatggtcgcagtggaatggggccgaattggaagctccatatctttgaatccattcagttttgacccaaggatcctatagtaagtttgaagattgatgttcagtaaacaatctttgttaatggagatcaccatgttcttaacacaaatcaaaagaaaaagagggtgaaagggggtcggttcagaaaattgctgaagatcaggacaccgaaatatctgaaaaagtgaggataaagatcagggcactgtagaatcggatgtgtttgagtgaattggggtaaggatcgaccgcggggaggtagctttcgacgtgtcgcgtgctcgcggacctagcccgagcctagccagagataattcaccgacggccacc

SEQ ID NO: 24395 - DNA, 582 bp, Zea Mays
gcgaggtgttcttcacggtggcggaaaccgaattggggagaactcaaaattcgtgagctctggcgaacgattgagggtgggagcgggggctttggtttcgtgatgacatagcgcacctgccccggccttcaatttatagagggcttaggcggtggcgcgcaatttggccgagcaatgctggcggccggagatagggaagaacactggcgcagtgtctaccgtcgtggtgacttcaccggcaacaattagacggctattagagagttacggcgatgcgacggaggtaccagagcacgtggcacaagaccagtagacggccatcaccggtgaacttatccaacccgccacggagagcttggtacgacggccggagttgtttactggccggggcttatccacggcggcgatatttacgtgacccgagcgttatccaggcactggtgagcgcgaatcacctcaccggcgggaatcgtggcgcgagggtcgtcggcggtgagggtcactgaacttgatccgatcggctactgtaccatgggatgcttcttccgtgtgcctgacagtcatagtttaggaccaattctc

SEQ ID NO: 24396 - DNA, 442 bp, Zea Mays
ggatatggaactgcaagtgaggctttggcctgcaagctaccattagtgtttgttcgcagagattacttcaacgaagagccatttttgcgaaatttgcttgaggttcaaacatttcttatcattgtattatgctagaataacttatgtatatataagtgtgttgaaaatgccttcatgctttgtcccatcatgttcaatttcagcactaccaaaacagcattgagatggtcagaagtgatttccttgctggacactggaaaccgtacctacttcgtgctctcacacttcaaccatgctacaatggcccaataaatggtggtgaggtaatttatcatataccgcataccttatcgttgttattatgtccaaattagcttgaaatcaaactattcctgtactcaattgtattatagcatttgcatttatgcaaaaccaaatgctt

SEQ ID NO: 24397 - DNA, 404 bp, Zea Mays
cgggaacgattgctcaaaacgggaattttggtgaaatttaagtctgggatctcggattggcgtgaaatttggcaaggatgttgctggaagtgttgtgaaggtgcctgaaaaatttgggttcaattggagcaagtttggctggtttgggcatttcatcgaacacgtgaagggcgaggaattagggttttagggaaatgaccttttgaggtatgaaaaccctcccgaaggagctagaaacctgcaagaatgtttgaggcacacataggaacacaaatggccacaagatttcactggatttcacagagatttgaattttgcacaaaggagggaaaatagagcttcactgcattctagtcagagaacaagagagaaagggagaggagaggggagagcagctgaccgag

SEQ ID NO: 24398 - DNA, 491 bp, Zea Mays
ccacaccccatctgttgcaagcagccaacctccaaccaatgcttgttggcattgtggagaccccagtcacttcaagaataattgtccgcagttgaagacatctgtatctgcctactccaactcggtgaatggccccaagaatgtttcaacacccgcctccaaggcaccctccaccaacagccagttaagcaagacctagtttcacggtagggctcgagtgaaccacgtcgacacccaagaagctcagcaagcccctggagtagtgctccgtgagttcctagtcgaatttacccctgctgctgtactttttgattctggagcatcccattctttcatcgccactagttttgtggaaaagcatggcatccccactgcatctttagaaatccccttgatcacccaaaccccagggtcagaccttctatgccacctcaaatgctcccaagtcagaattcttttaagtggggtagtattcttggcggacttagtcg

SEQ ID NO: 24399 - DNA, 295 bp, Zea Mays
ctggactgctgatgctaaaaaaccggatgctttgtatgctccaaggtcaagctggagacacctgatcagtatactgttactttggaggaggaactatcttttctagggcatgtgtaatgagccactgacatattaatgatcaggtgattatgctctctttaatcatgcatacacgatcatagatagatatcaatagtaattttaccattgaacacttggctaccgttacaccacactatgactaatttgtgatttgatatgttaaccacactatatcacttctttttaattttca

SEQ ID NO: 24400 - DNA, 467 bp, Zea Mays
cgatggccgaagattttgggcatggatttgcagagtttccaaacggggtgggggtatggatggaaagggaagatgcgatcatcctgtaatggcgtccgtcgaggcttgggatcgtggtcgctgggcgaagttcgcgggagcgggggcaggcgggggcaccagggctgtggacgccctccttacattcttaatagagtagtaatagatatatacgtgcgcgcgtgtgtatttcaattgttgatttgacaaggtggattaggaggggatggttttaataaacaagggatctctgtggttgggttgggtagtgctaaggtcagcacgagcacggctaaaaacggtagtccaaagcgtggcgaaataatatgatacagattaacattgctcaaatgcggagcctaggccggcacggttcaacgaagtcacggtgtggtttagtgtcaggctggaccattatttttacactt

SEQ ID NO: 24401 - DNA, 489 bp, Zea Mays
gggaatgctctgagcaaggccagagtgttttcgaagaaatcgtactcttggtctgatgctcgaagttcaggccccaggcgctccccgtgtttttcggtccacagcagtactccaagatcggtgcctgctcattccggcaatggaggcacagatgtcgcatgttcaaatttcaaaaataaggatgcaggatctggtgctgtcctgatccagacgttttcaattaaaccaggcccacatgtgtctttcaggcctaccaagggcctggtttctctgtttgcacgcacgagaactaaaacagggggacctagggcaccgataaccagacctagtgccgcaccatttggatacaccatatcctacgctgaagccctcgtcggcaacatggatggtggaggacggcggagtggggaggacggaactggacgtggttcgtctgcgggcaatcgtggtggccgcaccaacgggcaaggcagtttgatgaaccacagt

SEQ ID NO: 24402 - DNA, 331 bp, Zea Mays
actgaaggacaatagatttgctttgctgctttggcagttcgcctagttagagtccggccagacgtgcgtgctcgatgcagctgctagccgaccgccgatgtaacgactcactccctcagatcctcccgtggagtggacacgtccctaaggctagtccctcacggttacggtcacagttacgcgcaggcagagccacatgcgaagacgctacgagaccttgccacgtcccaccctcattgcctggcatccgcctgccgttgcgcaacgcatagctttcatcgccatatcgtaaggacctacaaccttcaccagttatcaccgcttgagaagc

SEQ ID NO: 24403 - DNA, 438 bp, Zea Mays
acatcgtttagggaaaatctttatctttactactttataagaatggaatgtaggaatccacattagtataccatgcccccacctccacaaatctcgcctgtccctgcccccacccacgatagagtccagcccaccgccacccccacttgcaaacagatggcgtcgggcgatgttggctattaggcacgactgcctctctcctctctgcccccgccaccgctgcagagtaacgactcatggaccctatgctccattcctcacccttcatgggctaggtgcccaagctcgtgactgaggtcgacctgcttgccttgttccgcaaagtcgtagccattaccgaggtcaccgtcatcaaggacaaggtctcccgagttgtggatctgcctcgtcccatatctgggctcatcgctgtcccttcatcgtgcctgctcccgcttg

SEQ ID NO: 24404 - DNA, 342 bp, Zea Mays
ggcgaatgtggcggcggttgctgctcggcctcggtcgggagaagaagaacatgtgggagtcctcggatccgaaatggagggctggtaccatgcgggtgtgggcggagatgcaggcgaagagcaggccttccgtcgcccagcttggactcaggtaggagaaagaaagctagccattggatcttcaattggacgctctagataacgtttcacccggatccgtccctggccgtctgatctggatcgtgcgcttgacaattgatctgagtgttttaaatctcgggtcgttggatttgcaagcgacgatcaagattagaagagtaaataacccttcggcactttgaa

SEQ ID NO: 24405 - DNA, 558 bp, Zea Mays
ttctcttgctattctccttgaatttacaggagatctactgccatctgcttccaaatctgctgagctgagatgccaggctcttagagtcactgcaaatgtcacttctccacccggtttaatagggagcgcagatttccatgtgctatgagcaatcgaaataacagaatcctgattcttccctgacaatgcaacatttgcttcttcaactggcacggttccggcatttgtcagtgttatcagaacatcacgaatttctccttcataaagaagaatagaaccatctccacccacaacattggcaattaacaatggcagaggaggaacaacagaaatgctaggaaagttgacactcttgaacttgctagagccacagcatctgaaaggatcagaaaggacaagcccttgtgcagctccaaggagcaaacaatcgacctctttgaataggtgttctgtaataacaccaaagcaatgaacaatgcacccaggaattgatatttgtccgacttttgttggaataccagataataaaactaattttgaagtgttaggtggaagact

SEQ ID NO: 24406 - DNA, 442 bp, Zea Mays
ggagaacaagacctcgggtatcagtcagctgagggggtcctcaaggacgttttcactggagactccgactctggtgacgacaacgaccaccgcaagaagttgtacgtgatgtacggcgggagctgggagctcacctcccgcaggaacgtcaagtccctgcgccaagaggtcctttcggtggtcccaggggtcccgaaggctgctccacatcagcggtggaggagcaccactatctccttcggggcatccgactgccccgaaaacatggcaggggccggtatactaccgctcatcaccgcccctatcatcaccaacaagcggctgcaccatgatctgattgacggtgggggtgggctcaacgtcatccgccatgctgccttcaaaacagctgtagatcccagggtcccgactgggaccctcctgtccattctctggagtgggc

SEQ ID NO: 24407 - DNA, 333 bp, Zea Mays
cacaaagtcatagtagtcactggttttccaataggggacattcttcacaacaaggaagctattggccgaatagccaagtgggcttgcgagttgggatcccatgacatcgagttccgacctcgcactgccatcaaaacccaagcactggttgatttcgtatcagaatggaccgaacagcaagtaccggataatccagagactgcagaagtatggcgaatgtattttgatggctcgctgaagctgcagggagcaggagcagggattctcttcactgcacctggtggcgaacacctcaagtacgccctccagttactattcccggcctccaacaac

SEQ ID NO: 24408 - DNA, 345 bp, Zea Mays
cgattggtttgtactctatccattttgtgaacttgtcaatagcgacgagtatgtgagtataccctccttgagattttttgaatggttcgatcatatccagcccccagcacgcaaagggccaggttataggaatagtttgcaaatgctggatgggcaagtgttgttgctttgataggaattggcatgcttcgcatttctgaaccaaatctgccgcatcattctttgttattggccaatagaacctggacctgaaggattttcctaccaatgtttttgatgctgcatgtatgccacattgccctgtatgaatctcatccagtagttgccttcctgtagccaaatgaa

SEQ ID NO: 24409 - DNA, 425 bp, Zea Mays
agcgtggggtgcgtgtcccagtgacgcacgagcaagtgattgtcgaggcgcggaataatactcctggcatcaaggcacgatggtgtctgtacattggggtgcggcggcgagctatggtccatcgtggtcgaggcgtcgggacacagacctgtagtcgaggtgtcgggacgtggagctgtagccgaggtgtcggagtgcggagttggagtcttggcgttgggccacggtgacgccggcagctggccatcgagctgcatcgcaggagcatccaccatcgggagaatacgaacagctcgtggcctggaagcttatgagacaaggaagcttacgtgagaagcttgttctctgttggaagacaaggtaaagaaacaaagatcgtggagtgcgggaggtgttttttgcaaaatagtcaggtaccgttcgat

SEQ ID NO: 24410 - DNA, 959 bp, Zea Mays
caaccatggaaccgtctcacattgtactgtactaacagctatttcagaggtgcttaatccctgcaagagtatgatgtgtgtagtctagattgcttttgaattgcctgaattctgccataaaatttatgtcttatcatacatatttccctatagtatatttggatgaatttacgaattttttgcttacttctcttttgaaaagcagaaatattcttgtcagattcaaatagattctgtaggcggcacttcttgtatctgaactgtttgatcattttatcttctcagttatagtcttgcagcaacttgcatagttgcatgttcctagcggatttgccacactttctgtttgcctaagattaggtatagtaaggttaggcaccaccaaccaaacaggccatgtatgacaataccttattcattgtttactatatgcttgagggatatggtttctttgtaatccacgataacttcagcatcactgagaaaaatgctacataactgtttatcatactatcgctattcatcttgtttttgaaagtgtgcttgaaactatatcgatatactgccttcttttttttgcaaggaccttgaatcatttgggaaatttaatgcagattggacactcagcatatgttgattctccactcgggccagatgcgtttcgggaatatgaaaccttacttattcaggaccatgatgagcttcttaagaagtctgagaatttagacagacataaagaaagcattcataaagaggcgagtgattttacctctgacgttgataattattctaagtggggttctggggtgcattatggctctaattctgaattcagcccaacgaaaagggatttttttgatgacgaaatgggccaggtagaagcaagagggagaagactgtttgtagctgtgcgtcactttccgatgattttctctcctatttcctcaagggtttttgtt

SEQ ID NO: 24411 - DNA, 352 bp, Zea Mays
tcggtattagttgtgggcaattgttcttgaactgactggggtcaccatagtgccaacgagcattggctagaggtcgactgcttgcaacgtacttagtgcggaaggaactctgacttggctggttgaaatgcggtggggcagatcctgctagcttgttgaaatttgaccctttgggaaggaacccaaaagattggattttttggtgactgtctatctgctaagattggagaatttgaaactttctcttgaggtgacctctttcttcttctcgggctctctccatttggatagccttatttgagaggtgcgagaagctgagaaaatcttggctagcaagaatagtcttgagctc

SEQ ID NO: 24412 - DNA, 384 bp, Zea Mays
agcggttggattggatgctggattacctaacggagctgacggtgtgctcaatttataggatttgggggcggtgacttgtgaattggagttggcgcggtggcggccggagagaagagttgcactggcgcaagcgattagtggctttcaccatggcgggctcaccggcgatcatcggagatgcataacgcgagcgacttcgacgtggtaaatgtcgaggcacgtggcgcagggctgcgaggtggccaactccgacgaacctatctccaagcggccgtgacatactcgggtacggcgaccggagtaaaatagtggccggagttcatccacggcgcgatatttccttacccctctgtgatatctaactgagccgagcatgaatcacgg

SEQ ID NO: 24413 - DNA, 314 bp, Zea Mays
gttaaatagagtgtttgacgtcatcggatttatttatcctgaatattgctttcctgcacgcaaaaaggtggtgaaacgaaaaagtacaccaaagacctcctccgcgccgaagcaaaagagagccaaaactctgacttaccggccaaggacgtactatattgagagagcagcagaactgcctgccctgccagatgctaaagctagcaagtcaaaaactgccaaaataattgaagtggttgttgcacctacgaaggtaatgaattttgatttttctttaactttgaactgaattgttaacgctctaatgttttctg

SEQ ID NO: 24414 - DNA, 475 bp, Zea Mays
ccaggatttcaccatccactagggctaggatatcacaccgccacatccgccttcatcgatcccttgatggctcctccgcctacactgccgaccggagcctcctccactctggttgtggccctcaccaccattcaagctatcgtagttaccgattaggaccacgaacgtgtgacaaccctcgcctaggagcaagagcgcgccacgagcgccactctgacctcttagaagaccaaagctcaacgcctccttcttggtcgcatcaatgcacctctaggccccagtgacacaccccacctttaagctcgacgccgccaccatcactactcttcatgctcaagcggtcaatgttcacaaaatccggttcctagtcactgtcatgttggattcgatgtcccgcactacgcccactggcgtgatcagatgctcctcacgctccagcgctacacgctcgtcgaccacgttctcgacgacaccg

SEQ ID NO: 24415 - DNA, 596 bp, Zea Mays
ttctaatcctcaataaggtatgcaggagattcaaattacttggcgggagaaagcccaaaagtaaccaacatcgccgagcaaaattacatctgaagaagagatgaatgagcgtctcttcaatctggaggatgcagttatcgcaggtgaaggaatccaagggcattgaacgatgcctgaggagggagcgggtattcaatccgtctttgagcaataaccagaagaacattttgtgtttaggttgacatttagatttccataaccaagagaagagagggtgcgactgttgggtgccaatcaagtgagcatagaccttctgagatgaaaacagattggaagagccactgcaacgccaaatatcattgtgatcatgcaattggaaattagcaagaatgtcatgaaaagaaagaagatggccaaacgcttcagcagataggggagtgtggaacaattcattcggggaagccaaccgagcttgatgaatgttaatctccctgacagatgcaaaagaccagagctccgggaatctttcagatgtgcgctgtccattccatcaatcatgccagaggagagtagttttcccatttccaacctccact

SEQ ID NO: 24416 - DNA, 391 bp, Zea Mays
tacatcctacacgtcgacttgcctcttattatcgtaatctgagacaacacatttataacgaacacttaacgaaatcgactcctatttaacttgagctagctaatcatagtagaagacttagcgaaccattttagacatcgcaactcaaaaaatgggtgggagcaggttacttaatgtttcttaaccttttctcaacttaaactggacaacacacaagtcacttaaaacaccatattttagggggtctaacataaaggctttaacacctggcctaaaactccgtaagacttacactggctactgaaggacctacagcacccatgtgcatatgttatcggactgttcttcaattttagcaaggattgactcatgaacgctactcgcctccaat

SEQ ID NO: 24417 - DNA, 330 bp, Zea Mays
aggacacccagcccagtccgcatccgagtaaacggtgagagactgaatggggccgacacccaggtgagggccgacacccaggtgaagaccggaggaaagcgtgcccttcaagtagcgcaagatccgtttgagcaaggccagatgtggctcgcgtgggtcgtgcatgaaaaggcacacctgctgaaccgcgtatgccaaatcagggcgagtcagcgtgatgtactggagagcaccgacggtgctcctgtacatggaagggtgggtgactagagtaccaacagccgcagagatcttggcatgagtgttgataggggtcgccgtggagtgaca

SEQ ID NO: 24418 - DNA, 296 bp, Zea Mays
atataattaagatgaccaaagcttagctttgattcatgctaacagaaaacaaaaccctagatgctccagcgtcgttctccggcccgtgcttctcctgctgagttagggttctggtccttctcgaatctcgatttcggcggtggactggtggaggcagacacttgaacccatggtggccggcctcacggcaccacccgtgcaaggtgccagctttccggactggatgagctcatggcttgtgcatcaacaaaccctgagggtagggtgagcgtcaaggagcggccccgagctgtccc

SEQ ID NO: 24419 - DNA, 410 bp, Zea Mays
gtcgagggcttggcatcgctgcgggcgaggccaggagcagagctgggagaggtggtgcagtggtggtgcggcgatgaggtgagagaggagaagcgttgggccaggggcagagctgggcgaggtgggaatggcggtggtgcggtgctgatgtgagggaggagaggcgtcgacactgttcttcggattttgagaagctcatgatcgttgtttggtggccgttggaaaaagatcggacggctgagaacataggagatgacgtggaccctctcacaggcctgctttgcgcttagctttgaattgctagcctggatggatgcatggtttcgttgcaacttgcaagtggccgccgaggcgccgagaagctagcaagcaggtcgagcacatgggatgtggcagtcagtggtgtcgtg

SEQ ID NO: 24420 - DNA, 583 bp, Zea Mays
gagggaatgaacggacctgagatcgaccggccacggcgtgagatcacgcagtggtgttctaagctgatttggagaaattccaaatttaggggttgtagaggctaatcggaggcgagaagtagtgctctggcttcgtaacgagctaatagagcaagtcggggcatcaatttatagtgatcaacagcggtggcgctcaatttggggaagacacgctagcagccggagcaaggtgagtcaccggagttatctgtcgtggcacttattgaggcataggctcaggataatagtttgtcgttcatcatgacttactgcgacgtggtacaacggcacatagcattgcagactccggtaaactatggtcacaccggcggtggtcgagcggccacgttgccgtgcaagttggaacggtgggggttggctcaatcccgacccccgctgatcttttcactcccgcggtgatatccgctactcactaagcacgaatcgcgacgctggcacgaatccaggcgcggggattgccggcggcgaggtgcactgaacctggcattgggttagccactataccattacgagcactcttcag

SEQ ID NO: 24421 - DNA, 302 bp, Zea Mays
tcgcaacaaacagatgctggacattttaatcaatcctcggatcaccacacagctagctcatttacctacgtgctcggtgccgccgatgacaaacgtcggcagatcagcccggctgacgtcggggacgccggccagcggcagcggcgacgactcgagcaccggcctcctccctctaagcttgaggagggaggccttgaccatgtccccgagggacttgaaggggttgctcagcttgctctgcagccagaggaggaacgacacctcgttgacctgccacacggcggtcaggacgatgacggcgc

SEQ ID NO: 24422 - DNA, 680 bp, Zea Mays
atgacttcacgagagaggcatcctcctttttgggaagaagaataatgtaggctgaattgagtaggtcaaagttcagcagcctcctattccagactaccatagcagcagccataatatccccctttataatttgccaacatgatttataaaattgtcctgtaaacccatcagggccaggagccttattggaaggcagggataagatggttttctagatttcatcctcagtaaaaggactgtccagcatggaaaggtcatgagaggggatgtgcaggtgttccagatttatagagtgctctctgtcagttgaacaacccaccagattgaagtagaaatcattaagcaacatctccttatcctcgtgtctggacaaaatgagaccatcagaggataatagattaccaataaaattcttgccttgcaggtggaagaaaacagtgttagcatcccccttagccatctaggtgatcctagagcggctccgagccatagagcgctgcaaggaggaaagagccacaatgtgactatcaagctgatctagcagccacttctctaacacagataatggccttttatcctgggcaatctggaatttatgcaaaatttcacgcgccatcccaagctgagatataatgtttcctacccttttatgagaccatctttgaagatgtctgacaatg

SEQ ID NO: 24423 - DNA, 289 bp, Zea Mays
aaataagaaaaaaaagaggcgaagaaaactcacctggtatcacgtcggccaaaagcacttgtgcgggcccatttatttttccaactcccttcacgtgatcatgccatgggtgtatttcttgttttctttaattctcaaaccgtaaatatcatcgcagtgatatctgcatgcaaataaagccgcttaacgtggttacctggaccgccccgtcttcgctaaacaaacatgctcccgagcgtcgagcggtttggttgcgtgaaatccggcaaagtctgctcgcttctcccag

SEQ ID NO: 24424 - DNA, 290 bp, Zea Mays
cacgaacccactgcgccatgatccttccctgtttccggccgccagctctgcccggccaaattgagcgccaccgtcgaagccctctataaattgatggccggggcagctgcgctatgtcatcgtgaagccatagcacccgctcccacccttaatcattcacccgagcccgtgaatttcgaacttcccccaaatttgatccctgccaccgtgaagatcagctcgccgcggccagctcgattcaggttagctcgagtccctctgctgcttgttctagcatccttaggtacccc

SEQ ID NO: 24425 - DNA, 295 bp, Zea Mays
ctcgagcctaccaagcagtgccaccgcgttggcacatgacattctgtagctcgacggtaacatgtctgaggagcaagtagaggaccacaatatccatccaacgtcgggaggggatatcagggaacacagtgtgggtgagggtatggtcgtcgagcgtgtagcgttacagggtgaggaggacgaggttgcgccagtgggtgcaggaggaggaagctaggtcaaggagaacagaaaccatggactagatgttctagacaccagccgcatatgcatggaggttggcgatgatggcagt

SEQ ID NO: 24426 - DNA, 521 bp, Zea Mays
tgagtacctcgccgtgggtggcggggctatttaaaggcgcgatggtccggctaatgatccatggccgcggattacatcgttcgtgcattgctaccacgtaaaaaagaggcacagtgagggaggagcgaggcatgagtgacaccgacgtggaaatgaccgagccacggcgaccgccggtggaatatctctggccacgctcggctaggttcgcgggacggtgccacatatgaagttatctccccacgatcgatcccttcaccaattcatccgaacacatccgaatctacagtgccccaaatcttagtctttgtttcagatattttcagtgctctagatcttcaatgttcttctgaaccgactcccttccaccctctctttctcttgattcttgttaagaacagggtaagctccattaataaagattgttcactaaacaatagtcttcaaacttactataggatccctggtccaacactgaatggaatcaaagatatggtgccttcaatttggtcccattccac

SEQ ID NO: 24427 - DNA, 288 bp, Zea Mays
ccaccgcctccaccaacaggagttgacccactggttgcagctcagatgaggatgatgcaacaaatggcggacactatggcagatatgcgtgctcagatgcagcaggaacgccaggagatgcgccaagagcgggaggagatacgtcgagagctgcgccaagaataagaagagatacgccagaaacggagggcgcagcagcagcaacaacaacagcaacaagtaccactgcctccaccaccaccaccagttccaccccgtgataagcaccaggagttcatgagccataag

SEQ ID NO: 24428 - DNA, 523 bp, Zea Mays
ggagcccaagatttccgcactcgttctgctggttcgaactgaactgaaccatggaagagagcttcataagcagaactagctgtataatcccctgaagcactaaatttccatatatgtcgatcccttactccaggccgaagaacaactacctcaagcacttcacaaagttccaagaattcagcaatgactctgactaaaattgccccttttacatcggagatccaatgcagattagggagagcgtctttgaccaatagtatgttggcaagacgcatgggcaccatgtcaaacattgcaggagctatgtccctaatacatctcccatccaaccatctgtccttccaaaaaagggtattggctccacaccgagcttagtagtaatggctacagcaatcagattttgtaccaccttacagacgtcagtggggaagtccgtccaaggcctactgggatatgttttctgcagccatggccaacgagccctcaaagcccaaccgagggtctttaaatcactaatcccaag

SEQ ID NO: 24429 - DNA, 538 bp, Zea Mays
aacctgtgctaatctcacccgcataacgacacaagatcccctgccgactgttaaaaacaacagtttaggacgtcatttcaaaaacaaaaacaaacgcgtagctgaacccaaaaaaagtctcagcttgaactcttggtaggcaatagaaaatttcctgttggcatcatggggttggcagcactagctagtactaaatagaagcatcccagctgccaaagttctgtgctgaatagaacgtctgttccaaataaaatacacctgaggagccaaaggtcaagcatcccagttgttcaaactgccactgttacactccacgcttgtgaattgttttcctttctttatccgtaatggactgctaatccaaacctgctacttgtagattcctcattcgtcatgcacttttttccttgataaactggtgaaatacaaaggttcgtttatattatagtagctttttatagacaacgaatatattatataccttacctttgtcacaaatacgatctttcctgcctttctgtgttatctcgaaccagcg

SEQ ID NO: 24430 - DNA, 422 bp, Zea Mays
cttcagactattgtacgcaagactatccgcgagatcctccttcgtcatagcacataatccagcttcgagctttggaaaccccatacttctagccatctcccgacaaacggataattctttgttgtctgggaggcagtataggaagtcatcttcgtctgtcccattgaacactaatgcccccttcggatattttaattctctggcatagtgattagcttcaaagatttcttcttcggacaatttcttccccgaagcatgccgtacaatataatcgtacattttggaaggtgcttcgggggcaccagtgtcagtttcttcacccaaaattgggttctggtacttttatatctttggtcgcctctgcaatttttgcttcttctgctttcaaaggtattaccttggccggttctgaaggctcggtt

SEQ ID NO: 24431 - DNA, 363 bp, Zea Mays
gcgtggactgccacgatagggaggtggaccatccttgtatgtgccgagggatttgggatctccttcatcacttggatctcgccccccgagagggacctcgttagggaggaaagaccctaggccatccaagacgcctctaaacaacacagagtcgagaagatgtgaagattggggatgggaaagactaatctagactaaattacgattactcctaggacaagaaatataaaggtaattataatagattgatttggatagattgtgaagtagtttggcacaacgactcctctctgtctacggcacaaagcagatcgacgatgtccttccactctggtgagaaatcatatgttcctcggccacccg

SEQ ID NO: 24432 - DNA, 362 bp, Zea Mays
tgtctaggccccagcgctgaaggggccacgtgtgggcgattagcttcacgaactgcgaagggcgtcccgagtgtggggaaaatttctgacaggcttcgcaggatctcacgacccgatttgtggcgcaaatcatggcgggccagtagaaaccttggcgaatcacctttgccgctagggccctaggccctgcgtgggagccgcaagtcccgctgtggactacacgcagaatttggacgccttcagtctcggtgacgcacttaagcatcggttgaatgacccccttcttgtaaagttggcccccgatcagtgcgaagtcctggcttcggtgtttgaggcgcttggcctcattgttgtcagttgga

SEQ ID NO: 24433 - DNA, 466 bp, Zea Mays
gggagacgagacggatggcagctgcagcctggaagacggcggatcaaggactccgaggatggctgtacgaaggggagaaagggctttgtgaaatgtcagtgggggttgagatacgtgggaacaagtattgggccgctcgtccctgggtctcaaatttactgctcttgagattaggccctaattttttttgatgaattctattgaaatagggccaccgttggacctcatttttctggatgaagcctcatatttcaaattgtttatgagtttagggcctctattggagttgctcttaggggccagtccaagacaagttcgaattaacacaagactcagttaggatatccatgaccagatctagatggttagaatttagggggaaactgtctccaacgcatcaaatcagattagttccccatcaaatacgtccctaggtgctcatgtcatgactacgacgactatgaag

SEQ ID NO: 24434 - DNA, 668 bp, Zea Mays
ttgattagggcccttttctccctcatggcttcacggcacaacccattaatcattgggagattatggtacgtactgtcactcgcccgcaaccgtctgctcatgatgattgggtaattgtcctggtccaaccgctacctgagcatgaggtcaatttccaattttttctgacattgttcgagagtaccttttggagattagacatgttcagattaggagtgttcagcgctcccacttgggtcaggctttggtgaggtttcgattcatttttgatagggataatctcgtggctatgggtccgcagcaagctttgggctttactttcactatgagtagacacaatgcggcttggaatcaacgagcattattttttaatcatgaatgttggttgttgctccttgggtttcccctggatttttggtcacacgagcacattcagaactctattggttcttttggtcgggtgctcatgtgggatccggacatttctaatgctactagattgcttgttagagcacgtgtgacttctctgcaggaggttccatagtttattgtgttttcagtagctgaaggttttcatggggtttcttggactgttcagtgtgacatagtgcagcagttcatgcttggtaacatgcctgaggatgaagaacctgtgcctccgtatcctc

SEQ ID NO: 24435 - DNA, 312 bp, Zea Mays
ccacgtagtagtaatcgtggcacgcctggactttccatttcaagagccattgcaccagcaagcgccacgactgaaccactagtgatcttccctctctctggccgctagctttcatttccaaaattcggagccgccgcttaatgtccctataaactgatggcccagtctgttgcgccatgttgtcacgaagccagagcacccattccaaccttcgattagccaccatagccgaagtatttcatttttccccaaatcagttgtctacgccaccgtgagacgtcgcgccatggccagccacctccaggtccgccc

SEQ ID NO: 24436 - DNA, 520 bp, Zea Mays
gtgatctgaataagatcagatcgacagctcaaccctcgccgccgacgagccacgcgcgattcgtgccgttgtcgccgcgattcgtgctcggatcatgtggatagcgcttgggatcgagtaagggtcctcgtcgtggataactccggctagtaaacaaatctggccaccgtaccgcactcaccacggtcactccggataacctcgctggtgactgccaccttccggccttgtgccacgtgcctgagcacctccaccgcatcgccgtgacccattgtgactctctgttgatcaccggaatgactgccacagtaataggacaccaatccacgtgctagtaactttccactcctccgatcgtcgcgcgtcgtcgctcgaattcccggccaccgctctcgcttagtataaattgaccccgccgtgagctccgtaggatcatcacgcacccagccaccaagtaatgccctcagtcgatcaccagcaagctccaattttagatttcccccaaaaccttcaagaacac

SEQ ID NO: 24437 - DNA, 463 bp, Zea Mays
catttggtcccgcttcagccttcgaaggccgaaggttgaaattgatgatgttgcggaagcttgtcagaaggcatttggtactgtctgttttttcattagtacaagagatttaatccaagagcatatagccttcagagtatggtcgcttgtagagaactgggaaatgccgaaggagactgtcaccaagtctagcgaaggtgacctggtccggctgaagtatacttttagatatggggataagtttgatgaaccaaacaacgactggctgaaatgtatcgaagctacaagtgatgaactgcttggatcatattccaaggcagaagataatgcattatccacaaccttcggaggccggggaaagaagagattgaacagagtttttgatgccattggctttgtttatcccgactaccgctatctgctgcgaggatagggaaagaagagaaaagctgctacttctgcc

SEQ ID NO: 24438 - DNA, 286 bp, Zea Mays
tgcggagctgggacacgtgaaacacattgtggatatctgacatggattctggcaattcaaggcggtatgctgcgggtcctactctgccaatgataggataggggccgacgaaccgcggagctagcttccctttcacttgaaaccttttgactccgcgcatcggggagaccttgaggtagatggagtctccttcctcaaatctgagttctctccgcctgttgtcagcataactcttctaccgactctgagcttcaagtaatcttttgcggatcagggcaaccttctc

SEQ ID NO: 24439 - DNA, 351 bp, Zea Mays
ctggtctcgcttcggcctccgaaggccgaaggtggctattgaaagtgatgtcgaagcgtgtcagaaggcttttagcaatatctgtgctttcattggcacaagggacataattcaagagcacatagcctacagagtgtggccacttgtggatagctgggagatgccaaaggagactgctgttgaatccagcaaaggtggattagttcgattgaaatataccttcatatacagagagaagttcgacgaaccaaatgatgactggttgaaatgcattgaggctaccagcgacgagttgcttgggacatataccagggccgaagatgatgccttgtcctcagccttcgggggtcg

SEQ ID NO: 24440 - DNA, 364 bp, Zea Mays
gttacaactggcattcttgtgtgtagaaaaaagtggttctgcccttttatagctcaaggacaggaacttatagaggagacttattctctactggtaagaggctgacctattgtcctgtgttgaagtagtgcccctgacgcggcccgtagggtcgtgtgtagctgtacccctggtatggtgtcgacctcgcccattgctctagctcctgtagcgagtccatcgtggacgtcttcgtgatagtgtgtgacgggtcccacggaccagtctcaaagtgtggtcgtatgtggcatggcttctcctgtcgtcatggggaggcgcacgcttggtatggcacggtgtcccatccttctgatgtacatgtcac

SEQ ID NO: 24441 - DNA, 334 bp, Zea Mays
gcagcaatcacctatacatataatctggggagagtacgtaccaacctggtatcggatatgccagaatttaacgccggtgacagcatggctttgccacgacaccaatgtcattggagttgatcaccacgatccttgctgatgtgcaacaccaactatggaagtttgccacctagatgtcatccatatcatctcgcgtcgcggtagtggaacacaacccgggatcgtcgacaactacaccttcatctggttgcccctacggcatgccaggttacgacgacctgcctccatccacggtagggattgatggatacctccctccatagcccacccaaac

SEQ ID NO: 24442 - DNA, 730 bp, Zea Mays
atggggggggaatgacagcaacggatgaacttgatgctttcctcttgggcgccatctcaatcttgctggcgagcggagtggaagcagtatcgcatgagcgcaaagaaggctgggatacaggaaagcaagaactagggcacggaaagcagaggcgcgcaacaatgcagtacatatggggttttcccaggccagataccgtttccaaaaagcgcccagtcatcacccggcggttatttctaaaacgctggcatgccatgtcatcactcagctgctattcctaaaaaagctggcgtgccatgtcatcactcggccgttatttccaaaacggatgacgcggcccgttctaactcggctgttacctctaaaacaccgacgtcaccatcagtcactcggccgttacctctaaaacgccgacgttgccgttaatcactcggctgttacctctaaaacgccgacgtcacaatcagtcattcggccgttacctctaaaacgccgacgtcaccatcagtcactcggctgttacctctaaaacgccaacgttgccatcaatcactcggtggttacctctataacgcttatatcactagtaaccactcggtcgttaattctaaaaacaccgatgtggccctgccatcattcggacactacttcagaagcgccaatgttgtcaataataactcggccgtcaacccaaaaagcgacaatgtgaccccgagtgactcggccacta

SEQ ID NO: 24443 - DNA, 480 bp, Zea Mays
accatagaattcaggatcctcatatttcaatatttatttaatggattgttgtttactacaccttaacctacctgtgggcagagatgatgttgaagcttggtattatattgacatgacattgtctctgtcagttcaactaaagattcaaactgaacttaagctttgaagtgatctgttcacagtggtcactctaagctctgactcttttagatctatagcactgagccactgagctgtcatggacctgatttttacagttaccagttgtactagtgtaatagcttgtccagtcagtttcttttgaaacagcgctacatttcggtgagggatgtggactgtaaaatggtatcatcattaagaatgctggttgcagtgggtgcttgtcatcagaccatgggcaactgctggactggtattgtgttttggtagcacagttcctgaatcctgttgtgtcatatttacttgtttgtttgacataag

SEQ ID NO: 24444 - DNA, 599 bp, Zea Mays
gccgcccgcgcctggaatttttacagaaaccccctcgctagatcggttaaccgcaaaagggttcagtgccctattcttttgtttcgcttacatgtgcaccgaggccctccgttttccttctatttacaaactccggtccacgatcaaaccctgacgagcgccggccatccaccgcctagacccatcgacggcgaccgtctccgatgaaatcgagcccaccaacgtgatcctcgaggcttacctattatttcccctaagttaataggtcccaaacaacctagagcctccccatccacggcgacaacgggcaaccaaacgccggtgaggtggactgaggcgacaagcacggtagagtttaatttgaggtcacgacgagtaccagtgacccatcaagtatatggttctcacctaagttcgctcagagaagctacgatttggtcggtcgatgttgacactgccctcggcggcgttcaccggttaacacgatggtgttccggtaaaaacactgtggtagagttcaaaaggaatattccgtgagcatcactatgatccctgggttctgaaacgtaagcacatcgaacatgttaccttcccaaaaa

SEQ ID NO: 24445 - DNA, 315 bp, Zea Mays
ctgaagtactgattgtttttgttgttagggtatatcagtcatcctgaacaattatgaaagtaaatgtaacgtgctggttttggaactttccctggcttacgccaatcgcttggctggttaggcatagtggtcgccttaggataggtagatgtatcgtgctgacttttaaatcattgctgactttttgagccgattgccctgctagcagggtatagtggttcccctaagccgagttagcatgaacatgtagcatcgtcttaggccgttgccgacctaaggttactgctccgttagtagggcatagtggtcgcccta

SEQ ID NO: 24446 - DNA, 392 bp, Zea Mays
gtaaattcttcatttggcttgcttctctaaatcgttgttggacagcggacagattaagcagacgaggtcttgagcatcctgtaaggtgccccatttgtgaccagtaggaggaaacagttcagcatatcctcgtggcttgtgtgtttgctagggacacttggtggcagactctgtacaaggtgggattgcatcgcttgactccaggattggcaacaacaacctttcaagactggtggaacgaagcagagtgccaggtgccaaaaaactagaaaagaggatttaattccttggtgattctgatggcttggtggctatggaagcattgaaatgaatgtgtgtttgatggtgcatcccccaacatcagcatcatcatgcagcatattaatgaggat

SEQ ID NO: 24447 - DNA, 648 bp, Zea Mays
aacatggtctgtcagactgactgaagaagaatctgatggtacagtgaccagaagaatctattggttcagtgaaccggccgccggcgaccccacgcgtggattcacaccggtgaggtgattcgtgctcaccggcgcccggataacgttccgcggtgaaaagatcttctcccccccggatgagcttaagccactgtttgtccggccgccgtgtccgctctaccccgatcgccttgaatcgaccctcgccggagttagacacctcacggtattgtgccacgtgcctcagcactttaaccacaccgtcgtgactcgtactgacctatccagagatcgctggtgaggttgccacggttgcagccactaatctcgtgcgccagtgactcctttcttctccaaccgccaccacgccaaaccaaattcactggccaccgcttagcgccgctataaattgacagcacggtctgctgcgttaggtcatcaccaagcctgagcacccgctcctgcctccgattagccaccacaactctccaatttcccatttcctccaattctgttttccgccaccgtggtagagccctcgccgtggtcagcatactccaggtctgttcatgctccctgttctcttgtttcagcatccttaggttctcc

SEQ ID NO: 24448 - DNA, 459 bp, Zea Mays
tgttaatattaaactgaacggacagttaggcaataatttccaaaccaaaaagggactacgacagggtgatcctctctcgccagttttattcaatatagtagtagacatgcttgctattttaataaacagggcaaagagagaaggtcagattagtggagtagtaccccacttggtggatgacgggctttctgtccttcagtatgcagatgacactattctttttatggatcatgattacgagaaggcttgtaatctcaagctcatcctatgtgcttttgaacaattatcaggccttaagatcaacttccataaaagtgaaattttctgctttggcgaggccaaagatagtgaacatttgtactcccagcttttcgggtgtaagacagggacttatccattcagatatttaggcataccgatgcacgttaggaagcttagtaatgctgattggtctaccct

SEQ ID NO: 24449 - DNA, 1667 bp, Zea Mays
ggcgttaagacgcctataatccacacataaccgccactctccgtccttcttcttcaccaacaatacaggggaggcaaacgggctcgagctatgctgtataactccttgctccaacatttcaataatctgcttttcgatctcatttttctattggggggtgtagcgatatggtctaagtctgaatggttgggctccagataacaatggtatcgtgtgatccacttctctgggaggaggcagcccagcaggtttgtcaaacaactcatggtattcttccaccaactgagccatttcaaaaggtatgttctggaactggcccttgtcttccacactcaactccaatatgtgttcccaggcctcttgtttaagaatccaatttaactgcaccttggatagttgatggcaggtgctcaactttggaaccaccccttgtaagcgtacaactctcgattcatattcaaactccagccacttaccaacccagtgtactttcatgggactgtgggcctctagccagtccattcccaaaatgatatcatacccacttaatggcagaaatttgaagtcagtatggaaagtgatccctccacacaaccactggcagccaggtacaaagtatttgctccaaagacatctcccatcagccacttttacttgaacaggttcgagtatgctctgaactccagtcacctttcccatcagatggtcactcataaaactcgttgaactgcccgagtctaccagaactagcagctgttggcgttgaattaacgcccaaagacgcacggttcgattaccctcacttccactgactgcattcaccgaaatggacaacactgcttccccatcactatcaatgccaccctcagtcacgaacttcgtttgttcctcttcttcgcctgtaactgttagagcccacatctcctcaactaggtgtagggtacggtgttagaacagcggtgtgcatgcccccattttcccccacatttgaagcatagccctttagcttttcgatatgccttgagtgcagttaatttactgtcctccagcctgcttgcagaaacagggtaagcaaccctgttagtggtagctgacaacgatgatcccgccattgttgtgcccttctgcaacggcttggaaaatccccctccatcttgcctccgatgttcacggcgtcccgaatgcatcagcacgtcctcctgcaacagggcgagggagcaagcagcatccaagttgtttggtcgttgaataacaacaacagacctaacctcctccttaagaccatctaaaaacctcgcagtaatcattgctggagtaagttgaccctcatgagccaacaattgatgtaatagcacatcaaactgctcaacatactcgctcatcgaattggtctgatgtatgtggtaaaattgcctaatcaacatgctgtgttgatcacgaccaaatctagcatttagacacccacaaaattcttcccaactcatctctcccaacctattctccactgactgcaaccaaaaagtagcggttcccacaaaattcatgatagccatcctaatccacatccccctagctactgaataaaaattaaaatatgtctcacacctctgccaccacaattttgggttgttaccatcaaacactggaaaggtcatactcggagctac

SEQ ID NO: 24450 - DNA, 300 bp, Zea Mays
gcgagttgccaatgaaaaagaacttgtggaggtgaggaagcaggaggttcaattgcagaaacaaagagacgaagagaggattatgactatggatcttagtggattgacagaagagcaacagacttactacatgaagttgcgggctaagattttggaccaactttctgatgcttaggtaaaaaggcattgattttcaattacttattacttgtgactgcaattataacttacacaaatacctatctacttgtaggttccaggtgctcgagtgtcagcgctaccagtttactagtctcatat

SEQ ID NO: 24451 - DNA, 336 bp, Zea Mays
ccagtcacggagcctctgtagggcatccaggaggggatatagctaggcctggtgctcccacggtgtgcctcaccaccagtcctcacccacagtagtcatgacccgcttagtgtacgtaggtagcctctcgtcatcgttgcgaaggtagaaccagtgactctgccatcccttgttcgaagaggtaagagtggaagggatgtacaactgtgcccgatctgagcgcacctagagtgtgcagtcaccgaccctcaccgcgtggtggaccttcttcacctcctaggggagggagaacggctctacgtgaaagaggtggagccacaggtcccagtggggctc

SEQ ID NO: 24452 - DNA, 1017 bp, Zea Mays
ccactcgtccgctttgtcggaaccgttgctggtggctccggggttctgcgactgcgcatagggaatggcgatggcggcggcggttttggaggaggcgctgcgatggggtggaggaagcgttggggacgacaacgtggccgcgcgcagggcagaggaggccggtgagttgggttcttgggcacctgctgtgcgcggatcgcgctgaatcagggggtgcggcggattctttagtgtctgttgttgtaaggcgttcttggttttatgtgaacgctttgagaagaaaggttgggcacggatagtctcgtctttgtgttgcggtggatcggtttgacactgaagtttgattcactgaggatggtttcgaattttcaaatttgtcggtcaatttgggtgtcatgatcctcgtgggatgtagtgattcaacagctgaacaacctgtctggtagtttactgtttcaatctgaggtcctgttgagcttactcgcgtagacttaatgtgatccatgctttgtgcatctcggtgggcacaggttttatgttttcttatttacccttttgtatatattagtttgcattaaaacgtgtattcatggccacaatataatgctgtgcaaattgagcagctgtgcaaattatagtgtagtgattgctttcccccttttttggtgaaatgctgctgtgactaactattgatggtaagctaacatcaagcataccaaatcaggaatttgacagctccttttagttggatttcgaccccaccaagaaaattaagtctggccttattattacctgataacctatatgtttcaagggcatctctgtttgtaattattacaacatgtcagaggaaggtgcacttatttcccttgttggttaatgcagcgataagaaggcatgaagcagccagttggttgcgaaaaacggttgggatagtgtgtgcaaaggacctgccggaagagccctctgaggaggaattccagcttggtctgagaaatggcattgtcctctgcaacg

SEQ ID NO: 24453 - DNA, 422 bp, Zea Mays
cggccaattcaagatcatgagttgggtaattcccctcatgcttcctcaactgccttgagccataagcaatcactctgccttcctgcatcaacacacaaccaagaccaatacgcgaagcatccgtataaactgtgaaacacttaccgctctcagtcaaagctaggataggggcgtccaccaacttgctcttcaatgtctgataactgacctcgcaatcgccggaccagatgaagagaacacccttctccaagagtctagtcagaggcttagcaatgctggaaaaatttggtacgaagcgccgataatatccagcgagccccaagaaactttggatttcagagatactagagggtctcttccactccaccacagccgcaacattcttgggatcaaccgcaatgccctgttgattaatcacgtgc

SEQ ID NO: 24454 - DNA, 1125 bp, Zea Mays
gtttcttgttacttgtacacaatattattcatcaaaattgtacttggcatatcttttgaaacatgggctatcaacttttggcatcctggaggatgatttttcagcatcgacaccaacagaggtacacgtagtgcagtgtgaagcttcgtcactcaacaaaaatgtatttggcaaattcagcagccagggtcatgtttggtttgcaaaggatggatgtgtatacaacgcaatgacctgttctttgtgctcttctgaaaacacaagtgccatggtcctcggtgtgcaagttcttgcaactgataggtcaaatcaacaattggtggaaaaggtagtttgtttatctggatgcatatttgtagtttattactgctactgttaccttttagggtttaggttaattgctgtctctttaaatgaaggtgctcttgttcagtgatcgtttggatgtccagtctgagccatcaaagggacaggtatggatattaatttattgtaggaataatatgatggaatacatttagaaaactagctaaacataatgggtttatctactttcatttgaagatttcaagaactcgaagagatgctagtaacatctgccagcaatctgtgatcgaccttgattcttttgcatataaaccattaaagaaagatcctgtggcgctgaactcaagaaggtctaaggtcagttgcctgctgccactgctgttatcttttgcagttctgcttgtgatcgctttcccagaatttcaagtgtaatcaggttcgcatgatcctcgttgcaccaacacagtagacttttcagagtataattgacaactctccaatttttctgcccttggattttctctggagcagcttaggttacctgccccgaacaaatccaccactggtacataatttgatggagagtttgagacaatggcgatctttgccgtgaagcattgggaagaactttgttctgtgagatatgacatgcggggagatgcagatgttacgtcgccatggagatttatagtttcaaacatccacatggattagagaagttccctgagctgaagtagggtgtaaaatgcatggcctggcagtagaaaattaggatgctgatgtctatatccatttaca

SEQ ID NO: 24455 - DNA, 337 bp, Zea Mays
attccgccctcttcctctaccacgtgcaacaccttgattcctcctcccatgttcacttgctcttctagaataatttccttcaccttcttccccatcttcatcatggtttcttgcaccatcaggggtcggcgacgacctctgatttcagccataagtgcctaaagatcttgttccaaccaatcttgcttgtcttctatgctttgtttgagctcattgaattgtatcatggtgacacattcttcaatctcagcgttggaaaccatcttccagtgaaattagtggtgacaaggcaacaaatataggtggaatataaagctatagaatcttacaacctcac

SEQ ID NO: 24456 - DNA, 283 bp, Zea Mays
gtcagtttgctacattggtcggtgggaagttgtctatctgtttcttctatcggcgaataccacctatccgctatccttgttcaccgcttcacggtacaatgccacgcaactgcttgccgcctttgcatcaccacgccatttaccgttcctttctcatcgtccagaggctgttcaacgcttggaagcctccctctctcatgcacgcagcctttgctcccaacttgtgaacgtcgctgcctccttattcctgtgacgcacggtgtttagaggctcccagcgctcg

SEQ ID NO: 24457 - DNA, 573 bp, Zea Mays
gaggaataaccggtggggggtgatgatgatgatgctcaccagggtggtaaccagagggacgtggtggacgctgatgcagagagggttgcgcctccctggagaactgtgaggaagtgtcccactccgccgaaggtcggcgctcgcgtgtgagaagatccaccgccttgcttgtggcttcgagttgttgcgcgaaggtggcttgatctttgagaacctgctccatagccttcacccccaagtcctggtggatctgcatctgctcttgcgcgcgcgcgacgtcgcccagcctggtaaacagcagatcaatgctctgattgaggtgattccagcgttcctcttcacgttcccccgcggcggccatctcgtctaggacgaaacgagtctggacagaaggtttcggcggcgccgtggtgactacccgcaaatcggaccgtggtggcgtgggaattacggggattcaatcgacgccgccggtgctgcgcggcaaacgtcgagaactcaccaaacccgtgcctattacggtgacgatcgacggaatatgcagacacctgcggtagcgtgccgaagatcaac

SEQ ID NO: 24458 - DNA, 425 bp, Zea Mays
tggaggacgttggcctcatttgcggcagtgcccgcgcttcgtcctagcgtgacgtgattgatggtcgcgatgtcggtctcagcagcgtgtggaggaaaaagcgtagggaggcatcgaagaggtgcaatgtgatcggtggtcgcgatgttattggtgcgagcccacgtcgtcgccgtcttggtcggtgccgaggaagcgatggttgaatacgagggagggggtcgctgagataacgatgctcgtgggcgtgcaggaggagcgccattggtttctgtgtgccggttgcgatggtgatcaacagttggagatgatggggcaactctagttgaggtgagggagcgagatcctcggcccagttgcggcgtcagctctctgatggagtgcgggccagcacagatggagcgcatgccgagtacgtgggcggc

SEQ ID NO: 24459 - DNA, 312 bp, Zea Mays
aacgagttgaaagatttggccagaaacaagataatggattcgccagatacggccaaagaggtgtcagtgaactttgcaatgtggcgcgtgtatgagcttgctcagtcactgctggaggaagcacaacatttagaagatctcgaagctggtccttcgctaccattatctgaatgtttcaataaccaatttactgaagatgaagatatgggtgacggggaatgggcactggatgatgtgaattctgaagagattgtggatcgtcagatgaagtagagtagtatgtgtggtgtggaatggttatctgtgtaagag

SEQ ID NO: 24460 - DNA, 412 bp, Zea Mays
atttcctttaattaacacaaatgcagatgagcagatttaccagcataaaagcttggtatggttcaatatagtagaaattgattctggagttttaaaactcggcctaggaggtaagatagtcccgaacattgaattaagaaatataggtcgagaaaaccctcgaactgccccactcatacacatcagccctgtagctcatgtgaccatacacaacggcaccataggccatatgagaaccttgaacccgaccaaaaccaaggttgaccttagacatgtgctttgtcgtaggagagacgagaggatttgttcaaaattgaacagaaatgaattttagccccccctcaatccccatctcgcaaacaagtcctaacggtgttaattcagtccacaaaaagacgtttgtacccttgca

SEQ ID NO: 24461 - DNA, 398 bp, Zea Mays
ccatcaaggatctacacagccggatgactctactccgaagtaatagcaccggcgatttgtaccccctgcgctccacatcgtcttcgccacctgatgtctcccttcaggtctccgtcgatcagtggcacgctcgtttgggtcaccctgaccagcctgctctccggcgtctcctcaataacgttgtctttgattataagcccacaaataatcatagttgtgcatcctgtcgcattggcaaacatgttcgtcttccgttttctgaatcaaacacagtctctccctttcctttctgtcttgtgcattgtgatgtgtggacgtcgcctgtgctgagtaattcaggttatcagtactacctcgtgcttctggatgactactctcactatacgtggacatttccc

SEQ ID NO: 24462 - DNA, 275 bp, Zea Mays
caaaggccgaaccaccaccacctcgtcgacgggcgcgctgccttccttggagattattcttttccagtctataaataccccggccggcaaggtgctccttccagatcacagaactcctcctgtcggccagagtcctagtagcactctagctagaacgaaggtagctatatatcaagattcaaacaatggcgtccatctcctcctccaaggtgctcgcacttggtgcgctcatcttctccttccttgtcacgtatgcctcgtgcgctagaccggtc

SEQ ID NO: 24463 - DNA, 304 bp, Zea Mays
cgcgctagatcgcttcacccaaaccggtatcctacatttaatcagcaccgtccgtttacggatctagggttatcccttcatcaccttctcatctaatctaggccgtgagcctctcatccaacggccacgacattgtcttccccactaaccaagcagcgacgccgccgccatgctcacacagtggagagcacaacgaggcaccaatcggcctccccagagcatctcagacaaattgaatgaagcaacacgaagaggaggttgaggtgagtctgtggggcaggttcataccagagttggagacgca

SEQ ID NO: 24464 - DNA, 424 bp, Zea Mays
gaaaccgagggctaggattagttcagccaaacactgaaccagtaggttttctgggccacaggattgaggatcgacagtccagatttaatgatttgaagggatgcgccgggatttgatctaggccattcaacgcatgatcaacggttgaaggccaatacgagctagatctaatcctagccaaataccgctgatccaacggccagaccactttcttcttcccttggccgtacccagcgacggcgcaggggcaccgcgccggtgagcacgcgcccaacgccccagagcaagattcccagtgccgataggtaatacacgttctacggagcatattgaactgattacggtggggcttacttggatagggtggcggtagcgatgttgcccacacagcacagcgggtcaacggtggggcaccaaccccgtc

SEQ ID NO: 24465 - DNA, 511 bp, Zea Mays
gtttcctgatgttcatctcttggtttggtctatcctgttgttgatcttgtgatgcacactgaaaagaatgtcatcgagacactttgggcaacaatcatggaccaaaccaagagtggatctagttgcgttatgtgatagaccaaaccaagagatgaagccgcatggtagtggaaagacatggagaaggtctaaggctgattttgtcctgagcaaggcccataggagggtagtactagagtggaccaagatgttaatgttccctaatgggtatgcaactaacctgtgtagggggtgaacttatctactatgagagtcctagggatgaagagtcatgactaccacatatggattgaacgaattcttccggcgatggtttgaggctatgtccatgagcatgtatggctagtgcttgcagagttgagctatttcttccaccagctttgtgcaaaggagttatctcggactttgattgcagacttggaaagaatggcacctgcggtattgtgtaagt

SEQ ID NO: 24466 - DNA, 300 bp, Zea Mays
agaaatcgcccgccatctccttcagaacctgtgaccaccgctacggacttgttgggagctccggagagggattaattgctcactggagaatccttccccgccgtggaacaccctctccgtggtcgggcgtcaccgtgcctcggtcgactgagggtaagcttctaccctgttcgtcgtcccctcctccacgttatgctttactgaatcgaaggatagcgtagccgagccctaggaacacggcgcagtcatggcgccgccgtgccggagctggcactccgccgcgacttgggtcaggcttgg

SEQ ID NO: 24467 - DNA, 276 bp, Zea Mays
acaggtgactgaggtgagaggggagtcgtgaggcaggataagaggagagagagacgaacccggttgtgtccccctatatgggtgcggatgtggccaggcgcattaacagattgcgctaagtcagcgcatgccgccataatcggcgagtccattgaagatggaactgaatccccgggtccatacgtcagtggagggaaggagaagcgtgcgcgagtggtgcctggccagtgggccccacgtgccagcgcgagcgtgagcggtgaagacttgggccgc

SEQ ID NO: 24468 - DNA, 783 bp, Zea Mays
ggaaagtttagtcttgatggaaagctaggaattgaagaaaagagtactaatagatttaatggcaaatctgaccctgtctcctcagaggttaaaaaggatacacaaagaggccttttagccaagggcaatgctatccttgaagagaataatagtaaggataaaatgcatacacttgatactcgcacttcaagaccttctcatctgacgaatcatgagaatgtgaagaatgccagtcaaccaacttcaaatatcgatgttgctgattcatctgacaagatgcaagaacataccagtgtcaatcctgcaacaatggaacaaactaaagtagactcagtgctcaatgacaatcctggagagcatcctaaagagatatatgcaatgaaggcagctgttaacataccttctcaggatttctcctgcggtgccatatctagtgaagatccaacacaagggccagcagatcatgtgaacagtaaagatgcacctatagtgaactgtggtaaagttcatgtatcgagggagagtaatgatgatgagcagtcgaatggtttacaatccagggacaccagcattattaattccaatgtgtcaagaagaccgtcgggccaatttaactcccagaatgaggttcttgaggaaagtgtttcgcttaatgaaggaagtcaagacaaccaaagttttagtggcgctcctaagaagtttttaaagaagacatcacatgggacaacaaataccgaggaagagatttcaggtcccaagattctctcttgttcagtgcagagg

SEQ ID NO: 24469 - DNA, 294 bp, Zea Mays
ctcatatgcaaatgtgtgaccgcgaaggggtatgcacggtttctggccgccagatcgcgaatcaagggccacgattagatctaggttatcatcaaccagtacacgatgaccgccctcggattgaggatctacggcccagatctactcaccccatcttcctctctacaccgttcatcacaaatggatgcatcggatttaatcacgcgaaacggtatgatttggtctaatctagaccgtcgatggacatctaacggctgagcgtcgtctcctacatcgcccatcacccgaccgaac

SEQ ID NO: 24470 - DNA, 376 bp, Zea Mays
actagatcaaaattgcctatggatctagaagaagaggtaggaaaaggaattctaacatgacgacctagctgacaagcatgacgcagaaactcaaaagagccctgactacaaaagatgacaaagccgctagacaacttgggcatcgcatcaagcccagggtgtccaaggcggctgtgccaagtggttgatgaagtagcagcagtcatggcatgcatgatggagatcatggatgagaaggcaggcacacatagtgtgtacagtggcccgaagctgtcacatcacgcgagaagggtcctgatagcaagatccttcacaaacaaaccaaaggggtcaaattccatagaacaagagttgttagtggtaaattgatgaactg

SEQ ID NO: 24471 - DNA, 348 bp, Zea Mays
gcaaccccaggtgcacaacatcgctaatccataatagctagacatggtaccccacttacagtcaggacaacccttcgcaacatggttgagggggcggtgcagcaagaggccacaaccgaggtagaggccctcagcagcaaatgaacctttattgtgtctttcatggagaggatgttgagtacaccactaaagattgcccagaaaccaaagaaactaaagatcacatggctagagcagtcccaacaaatagtccaagagccatagttcacacttatcaaccctagtatccccctcgcgatgaagacccccacccaactttcccttaataccacccaaacatcaatccac

SEQ ID NO: 24472 - DNA, 326 bp, Zea Mays
tggtggtcgaaaggaagaagaacgttgtggtccgttggattgggatggacggctaagattagaagatgcggataccccttcacgttttgagtcccagccgttgacgcgagatcggacgggtccgtgctgatctcggtaaaataaaatccagaccgttgatgttgatcggaggggcgcggttgagagccggttcagggtctgatctcaaccgcgggtgtgtgatcggacggctgatcctcgccgataccccttcggtcatgctaaatttctaaagagaccctgccttatttcaaaatcaacccgcgatcctttcttaggtgtagctg

SEQ ID NO: 24473 - DNA, 446 bp, Zea Mays
cagcacccaatcgcccacttggtaggacacttgtcgatggcgacggtcatagtggcgcttatgcacctgatgcgcctgttccaggcggaagtggacatcggcgaggaaggcagaacgctcctccatgtcacgagctagagcagccacccgagtctctccaggctcatatgagcgtagggtgggcgggttacggccgtagaccatgcagaatggcatctcccggagcgaagtctggtaggccatgttgtacatgtactcggcccagggaagccactgtagccattgtcgaggtcgataccctgtgaaacaccttaggtacatgacgatgacgcggttcggactctatctgtccgtcggattgagggtggaaggcgaacgacatgtgcagcttggtgcccatcaatcgcatcaactcgcgccaaaacagcaaggtgaacacctggtca

SEQ ID NO: 24474 - DNA, 530 bp, Zea Mays
tgtcaggccaactgatgaagctttgcgatggtacagtatactgatcagatcgccagctcagagacctcaccgccggcgaccacgcgcgcggatttgtgctattgccgtgattcacgccgaattaaacgcggataatgatcacggggtgaaagatcttgccgcgagtgagctaggatgtactgtgttcttgatggttcatcagtgcaccccggcgacgtggccaagcagctatcaccgacgtgttcgccattcaccgtgagggcgccatgccttaggaagtttatcgcatcggtatgagctgtagtgaccatccagtgaccgccgtagttcagtcgctctgcggttgccacggtagatcgccgccgtgactcattcccctctcggccgctagagcaattcgtccaaattaaacgccaccgctcaagcacactataaattgagctcaccgacgggtccgtagggtaatcaagcactaatccaccaagccgtgcccccaattactcaccaacaagacccaatttcggtttccc

SEQ ID NO: 24475 - DNA, 356 bp, Zea Mays
cctggatcaacttgggtccggtcgcggctaggctcaccgtacccccttgctcgtcgatcgattgggataggtctcatctccattggccgattaccgtcgtgtgccacatgctaacgcactttatcacgtcgtagtagctcggcttgcgatattttctcattgccggtgagttcgccacgacggaagacactaatcccgcgcgccagtaactttttgtttccccggccgccgcgcgtcttcgtccaaatccccggccaccgcttagcgatcctataaattgatggccaggtcaattgcgccatgttatcatgaagccaacacacccatgcttgcctcgaatcacccctagaactctt

SEQ ID NO: 24476 - DNA, 459 bp, Zea Mays
cttcatcgtcgactgtgacgtgtcaaggactggcttcggcgcggtgctgcatcagggcgccgacgtcatagccttcttcagtcgcccctttgccccgcgccatctgaagctcgcggcatacgagagggagctttatcgacctagtacaggctgtccgtcactagcgcccatacctctggggtagacgcttcctcattcgcacggaccactacaacctcaagttcctcctcaaccagcggttgtcgacaatttcgcagcaccagtgggtcagtaagttatttgggtttgatttttctatagagcatctgtcaggtcacctgaacactatggttgatgccctctctcaatgcgacgccgacacactggacgttgcacacctggaggcctcgtcgtagggagcggcacacttcctggctgtcctctcaataccctccttcaagctcgttgacgagttcatcc

SEQ ID NO: 24477 - DNA, 513 bp, Zea Mays
cccaccctgcacccgctatagtttggggacccgaacccatagacccacgtggagaaaattagccccgcccccgccgggtccaaaaaccacggggacccaccccaaacgcgctgcactgccatccgtaaccaaaacatgtgaaacttagtttaactcaaatcatccatcatgaataaccaaaataaagcataagttcaaatagaaaagtaccatataatggttctcatggctagcgaccgccacttagatgattagaactttgttcgccatcgccagctagatgacggtacgtgaagagggactccacaaaaccagttctatctagttcagtcctactaccacccgcatctgccacctatgtaagaagaatgcaaatattcacaagttgatctctaggtgcatatatatgtgacagggggttaaactggtgtgggggtgttaaactggtgtccatgctcctcccatctatagttaatagataaaagtcttgtgtttatctcttgtagctaccaa

SEQ ID NO: 24478 - DNA, 340 bp, Zea Mays
aagcacgaaggcaacatcgagagatgttttgctcaatgcaagtacctagggagatgtctccctagctaggtactccccggcctcggtctagctaaacggacccaactatttggtgaccgtgctattaattaattgagcgaggttttacgctaccccaccttgtagagatccgtatagctagctggtgtgggttcggattagttcgtatccttttgcgtcggccgggcgtgcgcggaacgcagcgcacggtcacggtgtcatgctgctccacgtgccgctcccttggatcctacggatccgccgcgatgaaagcaagagcagtattgctaatgctcccccg

SEQ ID NO: 24479 - DNA, 674 bp, Zea Mays
ccatccataatcaacatattatttgctgtgccatatctctcctacaaatatgacatcaactttgtgtcccaaaaactctagtaacagtccaatcgctggtcaaaggcttgtcttaaagacaaacaagccttgttgtttcaaatggatggagtagcataccatttgaaaaaacaggagctaacaaatgtatgtcacgttggcttcaatttagtaacgggctaaatggacatcacagtttcaccactacagcagctcattctgccatgcaggcaatggcataaccaaggccaagacaagctttgaccatgcaagtccaggtgtacagtggctgctccacaggatcacacttgatccttctatgtaaagttcagcaaggcaatttgttagataatattccttcaggatcacacgtgttagtgtcagttagttagataagacatgagacatatttaactgctatgttatgcctctactatcattaggagatcctaaagatcaacctattccctcacttccattctctaatctctactcatctaccttcttacatgcacctctcaatggtatcgtcagacacaggcaggatgccagcagccagccaaggatcggccagcaacctctcacagctacatgttgcattccttctcccagtgatatggcacattcagtttcac

SEQ ID NO: 24480 - DNA, 436 bp, Zea Mays
gtaaaacttcttgagatgctctatattacatgagttccctatttccgtgccatccatttgagtaaggcgatatgatccaggccaggtgacttctgctattatgaatggtccttcccatagtggtgacaatttgtgccgtccctccccccgttagaattcggcggaggacaagatctcccactgcgaaggatcgatgccgtatggccttatcatgatagcatctcagagtctgttggtacctggctgactgaattactatatttaatcgttcttcttctagtatatcaacatcctccaaactggtagcttcagcttcagctatgttttcgaaaatcaatcttggcgccccaaacttgagatcagcaggtagcactgcctctgaaccatagaccataaagaaaggagtgtttccgtgcaaagcatggctaggttcagt

SEQ ID NO: 24481 - DNA, 510 bp, Zea Mays
ccggatcaaaacgccagcgtagagaactcaccgccggtgaccatgcgcctggatccgcgcccgccgcggtgattcgtgcttgacgcagttagataatgcagaggggtaaggaaatatcgcgccgtggatgaactccggccactattctactccggccgccgtacccgcctgagtcacagccgttgtggataagttcaccagagttagccgtctgccgctcggatgacacgtgcctagacgcagtacttcgtcgtagtgactcgctctagcacgcccggtcatcgtcggtgagcccgcaacattaatgccaccaatcgcttgcgccagtgctcttccccctctccggccgccgcgcgtctccttcaaattcaccgggcaccgctcaagagccctataaattgagcacaccctcaccttcgttaggtattccagcatccaatccacccactcatgcctccaattactcaccagagcccacgaattgctcatttcccccaaatcgggtttccg

SEQ ID NO: 24482 - DNA, 874 bp, Zea Mays
gctacaagtaacacaacatgtgcaggaaaaactcatgagatgtgcgaggactgcatgaggcagtggcggacgcagaacaaaattctaggtggggccgaaagtgcaagagacaaatcaccagactagaccataaatatagattaatgataatatctagtgtttccaaaatgatatgaataccaaaaaacttttttggctaccaaaaggagagctagagagaaaaaaaataggtgcactgactgaggacgaggcactagggcggagcagccgcatcggcgcgtcgttctggcgagtcatcgaaattgtcgtgagatggtgttggtgagacgacgacagctaggaggagcgagtgcaggaagcaaggtagcgatagatgacggtgacggcaagcgacacccattgtcgtgttgcaacggcgcgatgggactctaatgagtcagcgagggacaggtgacgccacggtcccaccaacaacttgcccatctactggtgcggactaggagtcaaaatatcaacattgtctataggatcctgacgagacgacgagctgatgagtgatgagaaggcaaggtgcgctgcagcaggcgggttaggtcaccgacttactggtcagtcgatgatcgaagaagcgagtgagccacaactgggcttgcgctagggaagagaatcaaatggctcaggtgaagagtggactgagcagtgaagcgtcgacagaaaaatagatcaaaacctagtttttattagatttgtccacgctaactatacaaaaaattgtttattttggtgtgtacctaaacctaggtataagaggttaaaaaaattaaggtggggccatggcccaccccttggatccgcccctagcatgagggaagat

SEQ ID NO: 24483 - DNA, 323 bp, Zea Mays
tagggggaggatgtactacaacttgatcctttgaggctaacgtgtttgcttaagcacttttgatatagtctcaaagttgaattgaaagggaaaaggtgaacttggacaaagaaagggcttccactgcattccggtatcaatgtatcttgtcccaagttcttatttgtgttttctcattgcctttgatcttatttgacatttttgtgaggcaatggggttaaacagacaaatagttctcctgttttggtgcaaagcaactcgatcaaccaaccacttgtgaatttcaaaattttagagttagaactcttggtatttgatcaaaa

SEQ ID NO: 24484 - DNA, 652 bp, Zea Mays
atcaatcgggtccgcgggcatccctgggagcttcgggttatcccgtagacgattcgtaggcggggtggtgtgcgggtgtcttctgtgggctggcaattcctcgccgtcgccatcggtccgccgcagacggcatccgctccgtggcctgagctcgacgctgcgcaagcactggtacgagttcccttcccgtcctcgctaagtccgtttattagtgtgcgcgtctcatatggatggttggaccatgggagtgccgcatcggctgtgcgccagtggtgcgacgggagagagaatgagcgcctgggaaggtcgtcctaccgtagtgcgagcgcggggggttgaagacgaccgtggagcgtccattcggtgatctacggctagaattaggcttacgtaccgtttcggtggcctaatcggagcggttgatatgaaatcgtgcggtcgggattgatcggagcttgtgtttcggggtggggtgcgatggcgcgtccgattgcgatcggacgatgttgttgcgctcacatttaattaaatcggaaccgttcatgtgtgatccagcggcttggatccaaagataccccttcggccgcaagatttgcaaaagaacccttacagtattagaaaactaacccgcagtcctggcagtggaagtctg

SEQ ID NO: 24485 - DNA, 518 bp, Zea Mays
tcgaattctgcccctggaacgcccactatctagtttggaatcttgaggtgtactgcactgtggcgtcgccgtcatggccaatcggtcagtttccaggacaaataattgtgacttgtgtctccacgaaccaaaaagtaacctgttgagcttcctgccaatcatatttggttggtgctattactgctggaacttatggtgcttaggttgaattcatatatccaaacaaacattctgtattttttttgaaatgtctgtgtggtaacaaattgagaacgttagtgctgcagagcagttaggaaagtagaggaagccttacatgttaggtaaagggcacttctatctttccttggagcaatggagcagctgaggaagcactcattctttaagtgagcgccatgttatagcttagctagttattatttattggttacacgtcctttaatattttttgtgccactctagtgcctacagtttgtacatgagatctgtggtactgaatatgcttaaaacaaaattag

SEQ ID NO: 24486 - DNA, 878 bp, Zea Mays
gcggggttaatcctagatccatgacttcgtgtttgtgcatggtcgttgtcgtggactgtggtgactcggtcgtggtgtggtcactcttctctagagagactcgcgattgtgttgattctcagttggggatttgtcgtttggtatgcttgagccctctggaacctgatcatccatgttttaggttcatgacttcgtgtttgtgcgtggtcgtggtcgtggtgtggtaactcttatctagagagatttaccattgtgttggttctcagttgcggatttgtggtttagtgtgtttgagccctcttgaacctgatcatccatgtttcaggtccatgacttcgtgtttgtgcgtggtcgtggtgcgggtgcggtaactcttatctagagaggttcgcgattgtgttggttctcagttggggatttgtggtttagtatgcttgagccctctggaacctgatcatccatgttttaggcccatgacttcgtgtttgtgcgtggttgtggtcgtggtgtggtaactcttatctagagagatttgccattgtgttggttctcagttgcggatttgtggtttagtgtgtttcagccctcttgaacctgatcatccatgttttaggtccatgactgtttgtgcgtggtcgtggtgcggtaactcttatctagagagatttgcgattgtgttggttctcagttggggatttgtggtttggtgtgtttgagccctcttgaacctgatcatccatgttttagatccatgacttcgtgtttgtgacttgtgagtggtcgtggtgtgataactcttatctagagagatttgtgattgtcttggttctcagttgaggatgtgtggtttggtgtgtctgagccctcttgaacctgat

SEQ ID NO: 24487 - DNA, 2045 bp, Zea Mays
cctaataggagtcctcatagcttatataaagaacaagcatgatacaaaaaatggagacagaagaaggctgcaccaggagacaggacatggcaatcccaatatcacaataatgttggcattgtaaagcgaagaataaactacatcagtcaagttgataaataaaggtcaaatcattggctgggttcctcagaggcatggttggaattgctcagaaaccatattcagttttggtataatcacaagggttgagctaagccataaccttaagataccgtcctaaactcctaataggatcctcatagcaaatataaagaacgagcacgatccaaaaaaaatggaggcagaaggaagctacagcaggagacaggaaatggcaatccctacatcataataatgttggcattgtaaagtgaagaacaaaactaaataagtcaagttgatagaaagggcaaaattggctgggttcatcagaggcatggttggatttgctcagaaaccaaattcagttttggtataatcagaagggttgaactaagccatacccttaagataccgtcctaataggagtcctcatagcaaatataaataacaaccatgatctaaaaatagagacagaagaaggctgcaccaggagacagaaaatgataatcccaattcccaacatcttaataatgttggcactgaaaagtgaagaacgtaactgagtgtttcaggtggttaaaaaagggcaaatcattagctggttttctcagaggcatggttggatttgctcagaaactatattcagttttggtataatcacaagggttgagctaagccatacccttaagataccgtcctaataggagtcctcatagcaaatataaagaacaagaataatctaaaaatagacagaaggctgcaccagaaatggcaatcccaacatcacaacaatgttggcactgaaaagtgaagaacgtaactaattcagtccggttgatgaggaaagataaatcattggctgggttcgtcagaggcatggtttggatttgctcagaaaccatattcagttttggtgtaatcagaagggttgagctaagccatacccttaagataccgtcctaataggagtcctcatagcaaatataaaaaacaagcatgatcccataaatggagacagaagaaggctgcacaggagacaagaaatggcaataccaacatcataataatgttgacatgaaaaagagaagaacgaaactgcaccagtcaagttgataaaagaagggcaaatcattggatgggttcctcaaggcgatggttggatttgctcagaaaccaaattcagttttgatataatcagaagggttaaactaaatcatacccttaagataccgtcctaatagaagtcctcatagcaaatataaagaacaagcatgatctgaaaatagagacagaagaaggctacaccaggagacaaaatgataatcccaacatcttaataatgttggcactgaaaagtgaagaacgtaactgagtgtgtcaggttgataaaaaagggaaaatctttagctggttttctcagaggcatggttggatttgctcagaaaccatattcagttttggtataatcacaagggttgagctaagccatacccttaagataccgtcctaataggagtcctcatagcaaatataaagaacaagaatgatctaaaaatagacagaaggctgcaccaagagacaagaaatggcaatcccaacatcacaataatgttggcactgaaaagtgaagaacgtaactaattcagtcaggttgataaggaagggcaaatcattggctgggttcatcagaggcacggtttggatttgctcagaaaccatattcagttttggtgtaatcagaagggttgagctaagccatacccttaagataccgtcctaataggagtcctcatagcaaatataaaaaacaaccatgatcaaaaaaatagagacagaaagaggctgcaccaggagacaggaaaagccaatcccaacatcataataatgttggcattgtaaattga

SEQ ID NO: 24488 - DNA, 311 bp, Zea Mays
aagaaattaagaggaaaactgcggtaacaacctcctccactgcgctgaagcaaaagagagcaaaagttctaacccatcgaccgaagtcatactactcggaaagagctgcagaattacctgctgctgaaacttctaaagtagaaactgccgaagtagttgaagagaccacttcacctctgaagggattgtgtttgtttttatttgatctgaatcaagccacttaatggtctaatgttaatgttggaatttttgagtatgagatgaaagaaagtgaagcgattttggtgagtgcaacacacctcattcatttg

SEQ ID NO: 24489 - DNA, 373 bp, Zea Mays
ggaatgtatggggaatagtacgaagtggtgtgaaagacttgctttggttgattatatcgtgctttagcttcgacaatttccttctgcttctggatttgacttgataggcacttcttgtatgccccttgtcctttccacagaaaaggtagaacatttttcttggttgaaagttgaatattcctagtccttcctcctcttccacctcttggggccagtgatctgaaggtattttgtgattgttgcttttgttgggttcctataggttgaggttgactctattgtccctaagtgtgattgtttttgtctttgttctaattcggattatgtatggttctgatatgtcttgggttgaaccgtccaccgaagcccctgg

SEQ ID NO: 24490 - DNA, 430 bp, Zea Mays
atgatccccggtccctagggtccatctgtcagggagcacgctaagggaaagcctctggtcactgggacccattggccagacagaggacatggataacgtctaccctggaggcacccgcctcccatacaaaccccacggcaccgagcctgggtcgggtgtggcagaacctaacaaggggaccgggcgtgtcgaatggaaaccactcgagtggatcctacttccggaccaggactgacctatcatatatgatcggcagcattaactacgctagacaccaagtcgcagtagaggcaccaatccacctcccactcataacttacaaaccccttgggccacaaagtactcatgacctacgaacctctcatgctacgatgcatttaaggcccacacacccctcagcttacggtcactcatgacctatcacgactag

SEQ ID NO: 24491 - DNA, 320 bp, Zea Mays
catgaacgggcctgtagcacgctggccacggcgagctcatgcagcgcggtgctctggaccgaattggggaaagtttcaaattgaggttctctagtcagtaattggaggcacgagtgggtgtgttgggtgcataattacatagcggagccgagggtgtgctcaatttataggattcggggacagtggctcgtgatttggagttggcacggtggcggccggagagggaagaggttactggcacaagcaattcgtggcgttcaccgtggcaagctcaccgacgatgaacgggtgggctaaggtgactcactgcgatgtggtta

SEQ ID NO: 24492 - DNA, 334 bp, Zea Mays
ttcctgttttccattatctacttttttcccttttactttcctccagactaagcgatcggaacctgcttattatgccgcacaatctgctatttttcacttctgattacttgtagtggttcaatgaaaaaagaagagtacttatagtggttgcatgtacgtgatgaccgaggtacacaagtgttctacgtgaagtgttatagatcaagcacttgtgctgattggaattgttattttgtttgaactggccaccatgtcatgtagttctatgattacattgatggaaaataaatgcctttacccttttctgaaaaataaaattaggtatccatttaag

SEQ ID NO: 24493 - DNA, 294 bp, Zea Mays
gaggagcgcagggcgatgcgcgccgccatcgcgggcgctgatgcggggaggagcgcaggggccatgcacaccgtggggagtagggaaaagagggcctacgcaggaaacatctagaaggaggtggttctcgccgacctgggatgcgggtgccgctctgggagggaaggctaagtttcccggggtcgacggcgctggagctgtgggtgactgctggtagggtgggagggaggaaaccctaatctaacctagtctgataccatgtaagacaataaaagtagcattgatgtattgcat

SEQ ID NO: 24494 - DNA, 537 bp, Zea Mays
ggaaaggaagattgtactggtgtgtgcagcaaaacggaacccaatgtgaatactccagcttctgctagcttgggggcatgtgtgtgtccttatcgtgtgcgtgtgattcatttgagagaagaccaatcaccgagaagctacgggggcatagggctgagaaaaagagatccgcgaacctcggcggtgaatctcctttgcagagccgggggtggcgctttccatctccttctctcgccccaatgcagtgctgcctgtgctgtgctactccctaatccctatccattctgcctaattgccctactagagagctagctgcatgactacacacaccgtcctcctctctcctgtcctgtgtcccttcttccacgggtgactgggttataatagtctctctctcttcaacaccagtcatacacgccagcattgcgttgcgctagcggtagccatgtctggtgaacaagaatcaaacgggatgtatggagcttttgctttcagctttctcttttcctttttgtttctgagcgacctctgatcacg

SEQ ID NO: 24495 - DNA, 452 bp, Zea Mays
acgatttgtacctcctggtggtgttggtatgcgtggtgaggtggatgcggagcggggctgtgttatgggtgggacgagggggttgttgatatgtgtgcgcgacaactctagggttgtcggctggttgcgcctgtgccatcctgtctctggtggccttcgtctctaggcagtctcttgtagggtgcgcgcagtcttcaccgtggaacaaacagtaaaatctgcgcggctgttgcgcacgtccccggccccgaccacgagttccatttccgcggccctagggggatactccttgcggcgggggcctcaccagcggggtgctggttggcgatgttgtgtacctgctgctgagttcggccgtcccgactggagtttgcctgcgaaggcctcgtccacgtacaactggactgcggagggtctttaggtttcctctgagactcgactttgcgctggtg

SEQ ID NO: 24496 - DNA, 477 bp, Zea Mays
cagccgcgaaggggtacggttaactctcggccgtccgatcaaatatcgaaggccaggattagatcgacattaagtcgaacccgcacgtgatacagaccatcggatcgagatctgatggccccgaggcctccacgaccaaatactatctcgatcgcacatcatgcgatcgacgactcagatgcaatcgacaaagggacattctaattctaatatgagccattcattaccgatccgaaggccggagttcgtttctacgtgagttaatctcggcccttagctacgagatccacggtggagacgccttcttctacccctcgacccccagagcggcgacgcaacaaagttctgcggcggagctccaccggtacattgcatggccgcgattccaagccccatggttaacttcctcgatactacacccaggcatcgtacgaagatcgagatgaatggttccttaccatcaacatgacaacggac

SEQ ID NO: 24497 - DNA, 641 bp, Zea Mays
gccccgacactccacagcgctcctcctagtggtcaggcatcttctaggggacaggcccctcgtactttgtcgatcagggcccccactcgacctcctatcgtggcccctgctgcccctcgtccgattgcaaccgccaacgaaggtcgtagcccccgcaagggtggatgcgggggtggcagctccacccgtggaggttccactgactggagtggcagccagggctagtcgtcattctacaacccatagactcgaaccatcttcatgtggctaggtcaggctcgagtgcctctcgtcctttggcaccaactctcctgactgagtcccctacgacccaccatcatcgccttcctacaacatgcctccatacggcatgccctcgatgacccaggctccgccccagctctcgccttcgaggagccccaccatgactccctgttccccgctcgctggaggctaggacccagcctccctcacaaccacatatagcaccatggtgttggctcaactctcccttgactaggtcatcaactctagtgcctcctacaacaccacccccacaacaggcatgctatctcgctatcacccacctcattcctcccacctcacctcaatcatcgttggaaatggttccactctatcgg

SEQ ID NO: 24498 - DNA, 698 bp, Zea Mays
ccctcctcgcgcccgtgtcctccccctggcccatctccgacccacccctcgccctctccctctccgccaacccggccccgcttgtcagcaccatcgtctccctcctcctcaggaactcaaagtgctcgcacccttgccatcgatcgccatcctcctcccccttgctgatagacacagttgagctgggcaccgttttttccctcgcccgctgtgcgcatgtacctacacgccaccatcgtccttcaccgtcatggcatcacatcgccacccatgtgcgccaccctttttcacttcctgccggcatccagctggcaaccaagctccctccccgaccgcctataaaaggaccgcccaaagcccctattcacctcgcaccactcaccatccctcctccctgagctcaatctgtgcccacgcggccaccctcccccaactttggtgagatctccatatcctcctccagccgtccagagctcaatcaagctagcgcacaagcttcactgcttcctcatgaccacaatgcacctctcctcacccccaatcaaccaccaccacctcgtcagcagcattaccatcacggtgaccctccaccccaccgtggctggccctccctagcttgcctccggccaaattgagtctggccccatgatcacccacctctccttgtgctagcacacctccccattgcccgggaacca

SEQ ID NO: 24499 - DNA, 593 bp, Zea Mays
cggatggcaacattaccaggcacaaggcatgactcgtggcgaaaggatatgtgcagcgcgccggcattgatttcgacgaagtctttgcgccggtttcacgcctggagtcggtgcggttcatcctcgccatcgccgcacattatgggtggatggtgcaccacctcgacgtgaagtctgcgttcctgaatggggacttggtagaggaagtctacgtcgagcagccaccgggattcatcagccgaggcagagaaggcaaggtgtacaagctgcacaaggcactgtacgggctttgccaagcgcctagggcctggaatgccaagctcgacagctcattgctgtcgcttggattcaggtgcagcaaggaggagcacgctgtgtacgtgcgaggcaccagcgatgatttgctgatcgtcggagtctatgtggacgacctcgtcgtagtgggagcaaaccaggcagaagttgtcaagttcaaggacgagatggtgaggctcttcaacatgagcgatctcggaccactccactactacctgggcatagaggtcagccagagcgcaaggggcattacattgtgccagagtacctacgcacgc

SEQ ID NO: 24500 - DNA, 368 bp, Zea Mays
accacatccgcgagcttgagggtcaagtggaagtcagggataacaccatcgaggttctggaagaccagctccagaacacccagcagcagctcgaggaggcaaatcagcacttggacctgcaccatcaggagatagaggccatggatgcagacaaggccgacgaggacatagacattgagggaggggaggagccggagcccacttctagtttggatactgccggctcagctcaccctggaggaccaccttccccgagtctagtgttgcctcttttgctcgttaggtttcagggctagggtagaagtgttaggaagtggcactcctcaaaaatagcttagcttttgcacatcggatgtactaggctagaa

SEQ ID NO: 24501 - DNA, 304 bp, Zea Mays
tacacacctgattgtggtgtcaatatcttgtgcaaatgagcagctgatggctggtgctgtaacctttcaatttgaagggagcttgttgaaattctattaataactttgtcagctgtcagtggtttactgtgttagtattgctgattgctatctggtttggattagtagtgattgggttatttctatttggttcattgattttctagataataaacacaggctggtagcatttattaattcaagtcatgtcatgcttgacgtaacatatattatcagacaaaagccaacattgatctctctccta

SEQ ID NO: 24502 - DNA, 878 bp, Zea Mays
cgggacgtgagatcgtcggaggcacgacaatcgcaacgcaactcgagataagttgttacgaagtggttttactttctgttattccatattcctgcccactggcattggttcgacatatatggttagccttggccagcccaatacagattcgatacaactccaactggcccacggcccaagtgccagcctaacgattgaatcatcaactactctcacgctttcccaccaacatcactagcagacgccttcccatccttaccaggcatgacatacccagccctacaagttgaagtgggcgacatacctttccccatgccacaaggcagtgcccacctttcgcctctttacggcctctccaaagaaaaccttttcttattctatcaatggcatctaaaccccgttgggggatgtcaactgccattgccatataaacagtcatgctggtaaggacgtgctgaacttggactcttctccctacttttctcaataagtctgctttccaatttgacagttgatcagcaattctgtcaacaaaaggctggaactgctgcctagataacttgtgtaaggaaagaggaagccccaaatagcgacaaggaatttgttatgctatatttataactgaattactagcatgccatcttactttaatgaatttgttgactctgcttgacctcattcaaattgcagctgccaatgttattgaagagtttggccacaaagaagaatatggggctttatgtgttaggacttttgaaattcttagctctgcatcttcaatatcagctctgaattcttcttatacctgtgatcaagaacctgacctagttgaagcatatacctactttacatctatgtttattcgctgctgtccaaag

SEQ ID NO: 24503 - DNA, 427 bp, Zea Mays
gcacaattgacggctcgctggcattttagaggaaatggccgagtgatgcatgtgatctccgcttttccgagttatgatctggcacttttgcgcctgacttatcgagccaactcatatttatgctgacatatccccttgagttccaaaccctaattctcgctttttcctccgccgcttcttgatttcctgagttcttgagcccgtccgcttcgcttgagagattgcaatggctcctaagaggaagagacagagtgatgatgttccaattatcccgccaatcgatcctaatagccaacttccatttgttggcaaccacatgtccattgtctctgagtctgacctcttacacctcgttgaaactagtgttcttccgccaaaggagatgtgttcatggcgaatctggcgtggggttacagttttgacagag

SEQ ID NO: 24504 - DNA, 527 bp, Zea Mays
caaatttgggggaaacgtgaaattgagaggctctagtggatgatcagaggtgagagttggtgtgttaggtgtgtaataacctagcggacctggttgatcacttaaatttataacatcgatcggtggtggcgtccaattttgagagagcgcgctggcggccggagagaggggaagtcactggtgcaagcgctatcgtggctttcactgaagtaatgacttagacgatggactgactatctacggaggtctatggcaacgtggtgaaatggctgacggcgtggcagggcctcgaggaacggcgacacgacgacgatggtcgcacggccacgttgcggcgcaactgggcatgatgacagagcactacagtgtcccatcttcatctcttgcccaagatctttcaccctgcgaagttatccgcgcgttactaggcgcgaatcgcagcgccggcacgaatccgagcgcggggttgccggcggcaaggtgcactgcacctaggatcttattcaggttactaaaccatcgcgaac

SEQ ID NO: 24505 - DNA, 551 bp, Zea Mays
ccctccagacagatctgatattatagttcgagtatatcatatgaaattagaagatttaatgcatgacataaaaaatggatctatttttggcccatgcattgcaggtacgaccacttttgtattaaaaacacatgtatatatatatatataaagatagcaaaccagtattgtacaagtacttcacaaactaataaaattaccatcatctcctacatgcagtgctttacacaattgagttccagaaacgaggactgcctcactcgcacatcatattttggatatcgaattctccatcacaacctacacccactttcatagactcttttatcagtgccgaaattctagatccaacaaccgatcctcttggatattgtttagtggcagaacatatgatgcatggtccatgtggagcattaaacccaaattccccatgtatgaaaaataatagatgctcaaaaaggtatccaaaagaattccatgaagaaactaacttggacgaacaaggatttgctacatacagacgaagaaacaacggtcgctatgtcatgaaa

SEQ ID NO: 24506 - DNA, 568 bp, Zea Mays
ggagaaccgtgccttgacaggatccctaatttccactgcaaaagtttgccttcaagatatcgagacacaaacccagaagatggcatcatgcacaagcgcggttctatgtaccagagttccagagaggttagcagactcaggaatctccaagggaggagcaaactaaattattcgagcaataaagacacatttatgtcctttgaggttgccaatttgtcctctcggcctagcacaagtggtgcttgctcctttccactgcggagcaattcatgcaacacaaggtcttctatggggacaaaccatagaattcatcaagcttccagggaggttatgaggttttcactccatgagattcctgaggatgatttgacactcgagagaccacgcagggactgcaatttgttgaaaattgatgcagtagacagtttcctggagaaagcgcttgaagaagataccaccaatggttcatgcacaaatgcaacccctcattggccagaagacagttgtagcaaagttggaggatcatattgccaacagccagttggtttttgtcctgatgaaagagatg

SEQ ID NO: 24507 - DNA, 498 bp, Zea Mays
ctgtttgtgatttggctgataggattagggaggaaataatggagatgtttcataggaggaggaggattgcacagaggttacaaggaaggattttaccgtcagttctgcatatcctacacgcgagaacaagaggtttaggtcatttatcagtacgtaaagctgacaactacattgcagaggttagagacaataatgatgtgcatagcaagcacattgtcaatgctcagctacgcgaatgttcttgcaaagagtggcagcacacaggcaaaccatgtatccatgcattgtgtttgataacagcacaagaatttagggatgtcaggatggaggattttgtaaatgactactattctgttgctaatttcaccaccgcatactcaagagttattccacctgtgggtgacaaatcattctggccagacgttccttttgcaaaagaagtgggtgctccaattggaaaacgatctgtgggtcgacagaggaaaaataggatcaaag

SEQ ID NO: 24508 - DNA, 479 bp, Zea Mays
cttgagattagggcgtcaacatttcttgtcttatccccattgttcttctgtcctaagtaaatctaccgtagttatgatcactcaaagagaaaaccagttagcatactctaagtaaaccagtgacggacaggttaatattatgctattacaatgctcatattgttcttacgttggatggctccaatttattccgtgttatgtttgctgtcacacaggactaatagcttctcttatggtgatcgatttgtcttggtgctaactgcaacccaccttccaaaagcattcaactgcttgaggttgcaacaaaagctccacgtgatgaaggttggtgctactcagcagtctttccacaggctcaattaaacagttcccggctactattgcagaagggttttgccatgagactcaggtaattctctggcacttttaggcaccatattctgcattcctgattagttctgcatgcaatttgggaaaag

SEQ ID NO: 24509 - DNA, 276 bp, Zea Mays
tgcaatgttttaagccagccagagtcagactctaatgactggagggagcccatcatcatatatataaagaatgaagaggaaccagatgacaaagccgcagcagaatgcatcgcaaggcagtcagcccactacaccctcattggggatgcactgtacagaaggggcgcaacaggagtcctcatgaagtgcattccttcggctactgggaagcaactgttagatgagatccacgccggacagtgcgggatacacgcagcatccaggactctggttggg

SEQ ID NO: 24510 - DNA, 672 bp, Zea Mays
ggcgagttgatttgtgaaaagggcaggggctcatttgtgaaattggctcggcgaaggggtatggttaattctgagccgtgagatctattccggatggccaagattaggtctggcttacgctgaatcggtatgcgatatggaccgccatatctaaatccaacggatcacagccgatctgaacctcagtcatccgatcacgatctgaccgtccagatataatagatgaaggggtacgcggatttataatcttgaccacacctccccaatccaacggcccccagagcatccctctacttctaatcgcggccacaggctagcagatcaacgctgggcgacgcgtcttcctcacaacacccccttctgctctttggtcaggcgggtaagccctcccatgacgacagcctaccagagtgaaagccaatcggtcccctggtgatcgatataccaccccgaacaggcctacgcgcagaggagaccgaggcaaatgcgacgattgaagatttaccagcgattgggtgccgcgacgaccgctgcccacggtacgcacggcagcatggcggagttcccacaccggcgaagcattccggtggtctcgagcgtgattccgcttagaagaagccgcgacgagcatcagagagcactagcgattgtccccggtcgattctgatcgcc

SEQ ID NO: 24511 - DNA, 425 bp, Zea Mays
ctaatacaaaacccctaggggtgggtacatagcctaagttaaggtagtgttctagggtatgagggccataagcacatttgccccaatgattatcaaacaaagataggtagtcaaaaaacactaaaaatagacttgttgccccaatcactatggagattttctaccaaggaaggggtcttagtgtcccatacacatctagtagttgcatcaactatccatgacaagatcaaacaactgacatcgatggagggacacaaaattcttcattcgaaggatactaacacctaaagtgtcatggttcaccaaattacatggtcataatttctcaatctctgaacttatgggcacaaaaggaaaaaaacaattcacacttcactggccaccacagttcacacagcaccaacatatataatccaccctactac

SEQ ID NO: 24512 - DNA, 540 bp, Zea Mays
gttggatgcagcacgtcggatttggagcgcatcagcctcaaggccatacttcaacgcgagcgcatccagaatcacagtggcgcagttagaatccccctagccaagcacattgacgatcaatgcatgatgaaagtcctcctccacctggtcgagcaaccttgaacgcctaaggatatgtgaacgaggggggcaccaccgaaggcaatggtgatgatgccaaagatgagacccgaccagatgcgcccaaaacctccaggtccattttatggtgcctctgaccacgatgagtgtgcttcttcgtcttctctccatcaccatcaccgccgactcgcaaaccaccgtccatagcgcagagaggaacctcctccgggatggccttcctggaaatgggatgccacaccaacaccctcgctgggtgatgtggagtcttctttcgacgtggacacgcgcgcacccgatgcccaggcagacgaccgtgaaaacaccgcaccaaactgccacactcggccgcacggtgggaaggtgagaagcagttgaagc

SEQ ID NO: 24513 - DNA, 290 bp, Zea Mays
aagccacgacggctgagccagaacgaaggacgggccggcgcagccgaaggcccagttccaggatcgcgggagcagagtggattcgttaagcgccaaggcccaagtacctcattgctagttggaggctgactgtaataaatagaagagacttgtaataaaacaaacggttttagttcagcaatcgaaatttatagcagcggccacagcggcgatggcttctccggctcatcgtaggtgaaccaacagtggttgctgacaagtggtatcagactcatcttccggtcctggcg

SEQ ID NO: 24514 - DNA, 574 bp, Zea Mays
ggggatagagcttggaagcgccgttcagtggggttcgccggcgtgttctgaccgccaggcgcggcgccgccgttagaagccaccggggaaggcgatacccgagcaccgtccgatctccaacgggcggctcggattggtgaatcggacaccgttttggtcactggatcatcgccgtcaatgtgaaatcgggcggtcggatggcgtttgggcgttcattgaatcgaaacctttagatcgtgatccgagggctctcgtcgatggtcgtgtgattgatggatagatctaatcgtcaccctgcgattctaatccaacggcccagaactcactataccccttcggccgtgaattttgttaaagagtcctcggggattaagaaaatagaacccgccgtcctgggggcactattcactgagtctgttgagtcttgcgccagagcccctgctgttttctgttattgaggcccaatccagtagtattgaaaatcaggaattaatatcagaaattagtttttaatgcataaataaatgttagaacttgtttaattcatagtaaatgcatatgaactccaaattgg

SEQ ID NO: 24515 - DNA, 299 bp, Zea Mays
gtggtttggagcttacgaactcaacctagccaagcttggcatggaaatacccccttcttcatggtgtatgggtcgaaagtagttttgctagcagaccttacttttggggcacccaggctaaccttcaaaagtagaagcagaagcagaagcaacccggctcaaagaaattgatgtactagaagaggaatggctaaacgtcgttattcagtcagccagataccagcagaccctgaggcactaccacaacaagtgatacgtcaccgagcatttgtggtaggagatctggtgctccaccgcat

SEQ ID NO: 24516 - DNA, 329 bp, Zea Mays
aggaacaaattatgcaattctagttaaaatttgtcctagtatatttgaggatagcataggtattgttgaaatttatatatagttaatgcatgcaattttgaagttgtaatttagcattgaaatgtatgtgcgatgtctgtgccttgacggagatgaatgagtgtgagatgtctgtgcgaactgtgatgtggttctttttaaaggaaatctaggttgctgcctggattctctcttgggtccatcagccagtgattcagacttacatatatatgatgcaactatgtctggtactatataaataggcaaataaaaaaaaagattaagtatag

SEQ ID NO: 24517 - DNA, 377 bp, Zea Mays
ttgatgggtcagtggcaaccccctgcccactgataatatgccccaagtaagcaatagatcttgcagcaaaagtgcatttggacttcttaacaaaccaagagtctttctgtaacatcagcaagacttggtgcagtggtccaagttccgctcaaaagatttactgtagactaatatatcatcgaaaaacacaatgacacatttcctcaacaatggtgctagagttgtgttcattgccccttggaatgtagctggcgccccagaaagaccaaatgccattaccaaaaactcaaactggtcgtggtgagtttgaagtgcagttttaaattcctcgtctgctctcaaacgaacttggtgatatcctgagagtaagtccaatg

SEQ ID NO: 24518 - DNA, 923 bp, Zea Mays
gtcataactaaatattagagacttttttaatcacgctgtctaattaaatgacatttttcagtcatttcgttgcatgttgcaatataagacagtaaactgtcatagtcgtctcttacatgtttaaactcaattataagactttcaactttgttcaataaatcaatgttttgtttcgcagctttattttgcaatgactagaaggacagcagcataattaatacatcaggattttaattaaacagcaccaaataaaaattgcattgttcattaacaaacatctatcatccagcgtctaaagttgaaccggagaatgagcatatgtaagaaattaacatgcccagttcacatgaggtcacgcagaggatcacgtgagtcgtgagatgttatttgtctttttttctccttccaaaaaatggtatttatgcattcttccgagtttgaatcgacacatccacgaggatggtaacagaagatacgcaggcaacggtataatgttctaactgaagcacaacatctagggacgagttgaactgggcatgttaatttctgtcgtatactcattctctatttcaactctatacgttaaatgatagatgacagataatgaaaaatgcaatccttatttggtattgtttaattagaatattataatgtcttaattatgttattgtccttttagtcttttcaaaatgaagctgtgaaacgaaacgtcgatttattaaaaaagttgaaagtcttaaaattgagcttcaacatgtaagggacgaccgtgacagtttactgtcttatattggaacatgcaaaaaaaataactgaaaaatatgtcattgaattagactgcgccatgaaaaatgtctctaccattaaggtatgactatatgtttagataacttgatcgttatctagataaattaaactggcta

SEQ ID NO: 24519 - DNA, 625 bp, Zea Mays
acatcagaaaagaaatatacaaaaccacttcctaccgggaggaaaccttacccggcgatatcttcttccccacgcattcttccttcctcacgtcgttcgcagtgtgcggcggccacggggtcacgacagttggtatcagagaccttcgttcctcggcttggcacgcccggtgctccgctactccgtcgatcggcaccgacacaggccctggtttgtgagatctcaccgtttgccgcgctgaaccggcgacggtgatcgatttcctgtaaatcctccgccattttggtccgatttgcgggtgagcactacggcgccacccaagccatccgttcagacgcgattcgtcctcgacgaaatggcggctgtcgagcagaaggatgaaaagcgttgggcgcacatttcagagagcatcgatctcctcttcactcggctcggtgacgtgacgagggtacaagagcagatccaggtgaaccaggagctgggagccaaagccatggatcaagttctgaaggaccagtccctcctcgcgcagcagatcgcggctacaggaaaagccgtcgcacacctctcaatggagcgcgaggtggaggcggatctggagacctactcgcgcgattcccgcgac

SEQ ID NO: 24520 - DNA, 762 bp, Zea Mays
gtaagcggtagatactgtccaagaacacctgagctatcttgtaggcagtaaaaggatgagcgaggacaatgaaatgggcaaatttcgaaaatttatccaccacgatgacaatgcagtcaaacttgccagatttggggaggccttcgatgaaatccaaagacaacacctgccaagcatgtgaaggaacttgcaacagctgtaacaacctagggtactgagatctatccgatttggcacgcgagcagatgtcacaggagtagacgtattgtcggacaacatacttcattgctggctaggcaaacagatgtttcaggcgactgtacgttactggaaaaccagagtggccaaccgaactgtcgtgcaatgagaagattatctgttgttgtagtgtgggattgtggacaatccaaatgcggcctttgtaccgaataatgccttcctacaacttgtaaggaccatctgttgtagaggaattagacagatctgccaacagtttaaggcgtgagaatcttgatgatatcctaccaccacattcgatagccattgaagagtgcccactgatattgcattgagtgaaagaggcgaatgaggacaccgagagagggcatccacagccctgttggccgatccctgcttgtataccacctggtattggagtcccaacaatttagtgaagacacactactgccaaggagtcttcagacgctgttcattgagatgagttaagcttcactgattcgtgaagatgaggaatgttccatg

SEQ ID NO: 24521 - DNA, 335 bp, Zea Mays
caggccaccaaccccaagaggcagagggaagagaagcttcagaggaaggtttgtcactcagcctgggagattgttctgcttattatgtggggaggataagggacacacaacaaggatgtgccaagtcacgatccaaaagcaggaaatcgctgaagccgaagcacggcagaatcagtcgaagaaggtcttgcatactgcttcatgctattcaccatatatccctgaatatgtgggcaaccaacaacccacgacatcaattgtttcagcaagtcattctcaagctgcatgggctcagttaccaccaccaccaccactagcacctaccttggttcata

SEQ ID NO: 24522 - DNA, 568 bp, Zea Mays
cagcacagttggctggcgttacactgatggacaaacctgtcaacgtacaggtagccaatggctcaaagttatcttgtgcttatgaattggtgaatgccaaatggtcaatcagtggagtatcattttcttcgacattgaaggtgttgccattacctacttatgatctcattataggcatggattggttagaggctcatagccctatggtagtgcattggtcacagaagtggcttcgcatatccttgccaacatctatggtaacactgagtggtttggcttcatcagtgctccacagctcagttattcaggtctgcagtttgttggagttaccagacaaagaacaattgattcttcagggccttcctgcagatattcaggaccttattcagcactatgcgccagtctttgaattacccactggcatgcctcctgccagagattgtgaccaccagattgagttgttaccaggcgctagtccggtccagatgcgaccttatcgatatgccccagccttgaaggatgaaatagaaaaacagatttcagagatgttacaatctggtattgtgca

SEQ ID NO: 24523 - DNA, 428 bp, Zea Mays
gggtattctagctctaatcgtagccacacatccgagatggacgacccagagggcttcatcttcgtccagtacaccgacgcgacggcgcaagcgaggatgcggcggcgccatggtcagattcctccatcctaggccttaatgctcgaatctccgatccgatggatgctaaacgaagagagggtgttcgcgaaccagagggaggtgcttaccatcgtcggagggcggagagggaagctagctgcagcacacgacggcttgaccatgaatccgagctccggtgtgaaattccgggttcatcggccgcgggtctccctcgccacgatgatgaccacctccccggaccgctcgtgaaggtcacaggaacacccgaacacgacgaagggcggattcaccacgatgaaggtcttcggcgaggaattaagccccgc

SEQ ID NO: 24524 - DNA, 796 bp, Zea Mays
tcgaggtccccgacggcgacgagcgtggcagagctccggcgagctccaggactggccaaacggggcaaagactagcgccctacttcggccgaaaccgaattcatgccccaaccagcgtttcccctaagtcaattgcatgaatggctacccaaatgtccctggccacggtgaccgcgaggatgatccaaagaacaacacattcccggcgattggtggcggtccagttcaattgggtgggtcgacgagcatcacgggcacatcagaacacttaaacgatggagcagagggtatgagctgacctgaatcaagctggccgcggtgaggtctttatcacggtgttcttgagtgttcttgggggaaatccaaaattggagctctcgggtatacgattgaaggcacagtttgggtggcttggtacttgactatcctacgcaacggtggtggccacaatttatagtacgcaacggcggtggctctcaatttggtagagaagtgctggcggccggagagaggggagattactggcgcagtggattcatgtcttccgtcgtggcgacttcaccggcgatgagtaactatcgcaagccgacctactacgacgtggtaaagtgcctggacacgcagcgcaggatcagtaggcagccatcaccggtgagcttatccgcgccggccgcaaggcaagggggtacggcgagcttagccgcggccgaactcaagttgatccagacgccaagatctttacccgcccaccgttatccacaatccacagcgcacgaatcccgacgatcgacgtgaa

SEQ ID NO: 24525 - DNA, 481 bp, Zea Mays
tcatttgattgcccttaattgccccaaatgggtaattagagctatagacaagattcgcagggggtttttatggaagggaaggacagatgttagaggaggccattgtgttgttggttggtccaaggtttgtagacctatcaataggggggggctgggaatccacaatttggatgtgctaggctggtctctgaatatgcgttagttgtggcttaaaaagacccagcctgaacggtcatggtcagaatttgactttcaggtgcatccaaatgcagcagcacttttctcagtctctatttgctcttttgtgggagatagccagaatacgttgttttggactgatagatggttacatggaaaatctgtgggtgagcttgctccagctctcctgagtcgcatccccatgaaaattcagaagatcagaactgtgtacgaggctttgctgaataatagatgggtgtcggaccttactggtagtttgtcg

SEQ ID NO: 24526 - DNA, 335 bp, Zea Mays
gactttcacaaaacatggggtgtccgacatcagtagtgtcctaactgtataagtgctgattgagtacctgttggtttgggacttggtggactttctattagagccttggacgtgctttataattttcgctggttatctgcatattagtgacatgtgttctaaggcctatatagtgtatacttgtactcagaagccacgagcccaagacaaattgagctatgctaaaattttagagaatttttgcctaaattctaggtataaaatacccatggatacacggctacgagtttaatgagtacgtacccatacctgttctacccattgggtcctctttt

SEQ ID NO: 24527 - DNA, 651 bp, Zea Mays
ggtccgatgagcttcaagggcacacaggaatgctagaacaagagtgaggagaacatgatcggtcctgtggatcgctgaccgcgacgagctcacacacggtgttcttgaccgatttgggggaaatcccaaattggtgagctctggtggacgatttgaggcacgagttggtgtattgggtgcgtgactacctagcggggacaatggcacactcaatttgtagggcccgagggcggtggcctgtgaatttgagatggcgcggtggcggccgaagagggaagaggatactggcacaagcaattcgtggacgttaccgtggcaagttcttgggcaaccaatgggctatgtattgtgattaaccgtgacgtggtgagatggccgacggcatgtcatgtccgttaggaacggcggtatgatggcgagggttgcgtggccacgtcgccggtaaccggataagcgacagagcgttcactgtgcttcaagttcatccatggcgagatcttttacccggggattgttatctgcgcttaacaaagcgtgaattgtggcgctgtcgtgaatccgaacgcaaggtcgccggtggtgaggtgctctgcaccagagatatttctagcactgtaccatcagggagccattcagagcatctgacagcac

SEQ ID NO: 24528 - DNA, 271 bp, Zea Mays
gctccctaggatagatcaggtggtagattccactgctggatgttctgtgctgtccttcttggtttgctactctgggtatcatcagattagcctggcgaaagaagacgaggaaaaaacagcgttcatcactccattcggtgctttctgctatacctccatgtcgttcggcctcaaaaacgctggagcgacttatcagagagccattcaaacatgcttagccgatcactggggcaagcgtgtggaagcttatgtggacgatgtggtaatcaaa

SEQ ID NO: 24529 - DNA, 462 bp, Zea Mays
gttacaaatctaaaacaactggaacgcgacgaaatggatctacgacgtaaaatatattcaatatttactagttcacgtatttaagatgaggtagcgtattttagttggctaagccgaaaccacaaggagtaccacaaaatcgtggctgcaaccaatcctgcacaacactttttctacgtgagtggtgagccaattttattaaagcgcgcgaatcgcgtctcgctcgaacggcgaggcgagaacagcacaggcgagtcgtgcgcgggttaaaaacggtaaatcagcttcaatggggaaaacaatattaaaaccttagttaaataaatatttaataaaatacctaaaacatgtgaaatgatgaaatagtattagtaacacgaggacaacgtcgttgcaaatccaatgcacttaaaacagattgaaacgagtaattaaagcaaaaggcatggaataattacttaa

SEQ ID NO: 24530 - DNA, 331 bp, Zea Mays
tggtggacgtagacttgactacgacatcgtcaatgtaaatctccaacagattccctatcaggtcatggaaaatgtagttcatggtgcgttggtatgtagcttcggcattctatatcccaaaagtcatgaccacatactcaaataatcctaccgagcctggtaccctaaatgtggctttgtgaatgtcttctggggccatgaaaatttggttgtacccagcgcttccatccatgaagcttaataccctgtgacatggggtattcgtcctttggtgtggccctgttgaggtctctgaaatccacgcataccctccaccggccatcctcctttt

SEQ ID NO: 24531 - DNA, 429 bp, Zea Mays
aatacctcatcgccaatcctggatcctgtgagtattatgcatcgtagaacacgttgacctagctgggaaataagaagccttgtcccattacaaaggcccatagtttggttcagattgcgaagcagcatcaccatcgcaccctctttaagcacaagtttgtggcaaggaaaattgggtgcatttatggaattgaggaattcagttgggtaaagcacatcaaaatctggaatgtgttctgctgattttgaaattgtgtcacagctaatgcactcgacgccactgccaggtaccattgaaacaatacgctcgttgatgtcatcaacagttgaattattaggacaaatgatagcccgcacagctaggtaatcataatttcgatgattcgcaataaaattcgggtacacttcagttataagtgctaggatcttg

SEQ ID NO: 24532 - DNA, 373 bp, Zea Mays
atcaacgctgaaatggccaatgagaagaaaaacgtggaccccacacttaatgttttcgacgaagccatgaaatgctagctgggctatctggagactcaagtgacaacgaaagttttgatattgagagtgacaacgatgatgccgaagatcgaccatggaggccgagtcatgttgtttttggaaaatccactattaagaaagggcagattgaagcaatgaagggcaaatacttagatgatatctattgtgagggttggaggacagaacaatattcctcttcctgaggcagacgaagtggtggtattcaaaagttttatgaaggttgggctttgctttcccttgaataagatgctaaacgaagtgctgataacgt

SEQ ID NO: 24533 - DNA, 301 bp, Zea Mays
gatatccaatataatatgagaaaaacattgaaccttccctcttaccagatgcccataaatgaaataagggaccatttacttgacaaattatctatacttttcaataagtgcggctcaaatataagggattataatttgccacaaaaaactaattctgcgggatcatcctacggtaatcgatatattgaagaacagttatcatacgatttcaatgctttattaagtgaagcgcagaatcttcacatgaaattgaatgagcagcaactgtatgcttttaatacaatagttcatactgttttat

SEQ ID NO: 24534 - DNA, 360 bp, Zea Mays
gaccttcacacaacatataaatcagatgccaaattctagggtcataatatagaagtacatcagtagagaaccaaaccaacaaacaggacgtataactgcaccaactgtctcttacatctcaaggtataattcaaagaatcagatatcacactggatacttagtttctatctatataaaatagttgaatcatcatgaccaactcattgtgccagtgttagttcagttattgactattttttcgggtacagtattaggcatccacacacatgcatcttttgtaattatagtgctcaatcccccatcatacatatgaacagtattaccggtgaccaatctctaccctacagtcctacacaaat

SEQ ID NO: 24535 - DNA, 410 bp, Zea Mays
acagcggagcattactgtttcccagttgttagcagaactagaatacagaaatacaggcagtattaaagtgctgacttgtgaaacttcccagatgccacatgtttagcattatgccaattcccacatgtttagctttgttaaataacaggcgttttactttgcatgcttactctatcaatgtgtactttttcttctcttgtcctccaaattgttgaaaattttgaggtactgaagtagtagtagtaaattccaagctttcatattcattatcagttcaaatattagatgtaggggtgtaccacactgcaatcatgcaagttctgtgtgtacgggcataaactagacattgaattttcctgtaatccttttcttttgtttttgtttggtttttcttttgtttgcgtttgtgt

SEQ ID NO: 24536 - DNA, 558 bp, Zea Mays
accacggacaatcacttcagccgtccccgacgtagacgagcctacttcgaaggacctcatcgacggagaccgcgtctttgccctacaggccctaaacaaataccaacctcaaacaaaagcatggcgcgaccacacagtcatcccaagggaattcagcgaaggagacctcgtactcgtccggacaactcggacagagtcccgggacaagctagagccaaagtgggagggccccttcatcgtcaagacgaaggcgtcccccagcgcgtacaggctaacaacaccatccgacgaagacttagagcattcatggaatattgacaatctccgcaaattttttgtttgactcctcagggccacctcgcccttgtaattcaccaaacagttttattctggcccgcactcttttcctcccgggggtgaggtttttaatgaggcggagccatgtaatatacacgcagaaaattcccgtaaaaaattacaacgccgaaaaaagaccgcatcgacggtcttcggcattcgaccacaacgaagtcaccgcgaggggcagccctggctacc

SEQ ID NO: 24537 - DNA, 317 bp, Zea Mays
tgccaaaggccacaccccataccctatgaattcctcaactagatcgcgcccactactcgagcgggcagcaatccgaagggccacctcattttcatcatcctctgccacttcaaacgacgggtacgccacatgataatgcgaacacataatggcggcagggagccctgggtggtcttcgacttcagcctccgaaacataaaaccagtagtcccaccagttgccccacttgttccgggcacaggggaccagctccaccacttccattgaagtcttcccgaacttcggcgtgaaagtgcacgatccaaattgcgcaatct

SEQ ID NO: 24538 - DNA, 275 bp, Zea Mays
accatcaccgacaacctcgccgatacgatctccgagcgtggcgcctctactcacgtcctgtggcttgccatcgagtcccaatttctcgggaaccgcacgacgcgcaccctctacgccgaccaagccttccgctccttcactcatggcgatctttctgctgctgagtactatcgtcgctacaaaaagcttgccgaagattttcgcgaccttggcgagccggtctccaacaagactcttgtcctcaacatcatccacggcctcaacgaacgctttca

SEQ ID NO: 24539 - DNA, 405 bp, Zea Mays
tgtttgaggatggtaggctgagcttcgtatgacatgggtcccaagggattcctgcaattgctcccaaaatcatgccacaaatggtgctcctctatccgagactatagtccttggtatcccatgcagacgaactatttggtcaatgtagatctccgcatacttctctgtcctgtgggtggtgtgcactggtaagaaatgcgcagtctttgtcaatctgtccacaataacgcaaaatagaatcatggtgcctggatgtattgggtaatcccactataaagtccatgcaaatgtcctcccatttccaagatggtatgggaaggggttgcaaagggtcggctgccttcaaatgactagctttgattctctgacaggtatcacactcagagatgtacttggcaatttccc

SEQ ID NO: 24540 - DNA, 417 bp, Zea Mays
catctaacaagttttctatcctggagggaggcagtgctggtggggcttcctttttccattcagtctggcatccttggctcttggtccgctttcagatcttcttagtggggcgagcttctttaacttcttatcgtaatctatcttcagggttcggtaggcttcacgagtgttggcctcttcaccttctgctattttgagactttcttggagggacgccttctcctttttaagttccttgacctgttgctctaagctttccacccaggagtttaggtgggtgcagtgggagaaaaggtcatcatagtggttatcaagtgtgtggagatatccggtcatgtagactatggtggggtcatcttcagtaggatctcttcctgacagggcttggagtcttttcctctaggtaggagtgttttt

SEQ ID NO: 24541 - DNA, 489 bp, Zea Mays
gaaattttgaagtttagggcttgaagcatagcactaaagggaggaagtagggttatatagtggacgacatggatgtaggtgctggggcttgggcatagggagcgcacatagagcgatgggttatggatggcaaagaacttagctatgaggaagcagatggaagatcacatgcacatgatgtattgaaagcagcctatgtgtgggtgtggtggtgcttgatagtgtgatgaggagcgtgtggcaacatggagcaggggcatggtatgttggtgtgttggcatggttgagcgattatgaggggcgcacaacatggagagaacaaagcgatgaacatgcaatgaaggagctagctcaacgggtgaggtggttgaggagaaagatacacatattgtcgtgaattgaaagaaataagcccatgatccatgtcatagacatgtttattgtgctcccctctaaggcaccagacatgtccagtgatgtaacacaccg

SEQ ID NO: 24542 - DNA, 438 bp, Zea Mays
ctctcccactgttcgccttcacatcaaaagctggtccagacaagccatggccgtcggcgggagagcgttgccagtaccagttgacattgagctgcgaggaatccctgctcacctctgggggttggaaacagcctcgcaacttcttgatgagcactgcctcatccgtgatgtgcacccagcgttcgcggaaggggtcgatctttcagtcttcaagttgagtgcatggtgcgatgagccagagcttgtgccggcggagttggatcttcttgcggaggagccgcagtcgcgtgcctttgactttggccccagtcctcgcacactggtattcccaatctccgtgcgagtgttccgttcagacgggatcctggacagcagccccttgccaccgccgccgcctccctactccggcgacgatcgcgagcaagaccatgacaagcg

SEQ ID NO: 24543 - DNA, 329 bp, Zea Mays
ttgctcagagagataacagcgagaaaggccgtggtggaagaaagcactgacaagtccaaggccctgctcaccaagctggaaatggacagtgtgctcgaatcactgaaagccacggagggcgaagcgaaggctgccaaggaggagaaggcgcagctgcagaacaggctgaggctgctcgagtccaagatcaccgaggccaacctgacctcggaggaggcaaaggtcagcagcctgaggttgaaggagacgctggaagacagggagcgccagctggcgagcattgtacaggagaacagagaggtgcgggcaagagaagcggctgctcaggc

SEQ ID NO: 24544 - DNA, 331 bp, Zea Mays
gcataaagcagccggcggtagagtcgaccacctggtatattctagggagcccgaaaggatcctttgggcaatgtttgttatgattggtatagtcgacacacatgcgtcaatcgactttattctttttgagtacaagaataggattcacaatccactggaggtgcattacttctctaatgaaacccactgctactaggagagctaactctactcatatggcttctctcttgtcgggtgtgaaacgacgtagcttctaatggatcggctttgcttgaggatacaccttttgtttgtgcttggccagctctctaaggactccctgcatgtctac

SEQ ID NO: 24545 - DNA, 512 bp, Zea Mays
ccgtggctgccccttctgctttgcggctggagcggattagctcgccggtgaaccaccgcctcccggccttgcgtcgcgtggctttgctttccaccgcgacgccgtgactcgctacggctgtccaatcgtcgccggtgagctcgccacgacggtggccacgaattcacagcgcctaagttcttcttcatctctggccgccagcacggctcggccaaattgatcactaccgctcgctcctcctataaattgagcccgcggctagcttcacaacatcatcacgcaccaagccacccagtattgcccccagccgatcaccagcgagctctaattccggatttcccccaattcgggtttccgccacccgaaaccgacctcatcgcggccagctcccttcccggtcagtccaaccctccctctccctcgtttaagctttctcacatgtctacgatgcttgccgaaccaccaatttggactgcgggctcaccaatcaccgggaacgcactcaattgtcc

SEQ ID NO: 24546 - DNA, 380 bp, Zea Mays
gcggtcggagaagcgcgcagtcaccagaaattcctcgccgaggttggaagatccgccgtgcgtcgtgggtggcttcattcggctcccatctctggtgagtaaacaccacaccacgttcgctcctcccttactaatgcgtagcacccaacagaatcgtgtttaaggcgctagaaccgagggctccggatggccggcgatggcgccgccgcgcccctatgtggcgccgccgtcgggacagcctgggattggggagctgatcgcggcccgtcgatcgaatgatcgatggctcagattagaagtaggaaacgtttcgggtcagcaaatctgcaccgtacgatctgaaccaggggctgtgattgaaacttacctccattaaaccc

SEQ ID NO: 24547 - DNA, 366 bp, Zea Mays
gaatttcgtgttgagtggtaatgcatttgaagattgagtttaacttctctccttccttgacgaggttgatcttgtccttcttcgatcttggtctcattgatttgaggttagcgtatatcatctgagttggggaataaggttaagatagaatctgccaaggtgagatagatattgactatatgatgtaggtcaaaagttagtttgatgttaggtggggatgaacagattatgcaatccatcaagactatattggttgggttggtctctcattctttatttagtgtagggtgaactaagttaaaacatgtggagagggtctaatctatttcacaagtattaactggtccattaagtaactcactttag

SEQ ID NO: 24548 - DNA, 368 bp, Zea Mays
cgaacgtatcctcttgtcgatgatcttgccatcgatcctagggaggggagcgagtattaagttacctcgattgtccccgggccggactgttagtggaggctgctgctgattcgatcctggtcacacggctgcgtgccggtacaccatgatcatggccgtattcctcccggcgccttatttcattctcgtgccaacgattgcgtgaagcactgatgttgctccatgcgtctcgttggctactgatggcatgacgcagatcgttcggtgggtgggcaagaggtagaagatgattggccgcctgagtaagtacctgctgatagccctccgcatctggggttcgctggaggccatcggctatctgcgccagg

SEQ ID NO: 24549 - DNA, 411 bp, Zea Mays
gagcatcagggacacacaagaacactgaaacgaaagggcagaggacatgagcggaccctgagacgagctagccacggcgaggcctctttctcggtggcggcaagcaggtttgggggaaatctggaatttgtgagctctagtgaacaattgggggcacgacttggtggcttggtgcttgactaccctacggacccgtcggtgtgctcaatttatagtgtgcttgagcggtggtgcttaatttggacgaattgcgctggcagccgagaggggaatgagtcacggcggcgatctaccgtggcaatcgcagggcgactgaactacgggaggtcattggatggtcactacggctcatactgacgtgataaacttcctaaggcgtggcgtcctcacggtgaatggtgaacatgccgg

SEQ ID NO: 24550 - DNA, 544 bp, Zea Mays
tttttaattttcacggaccataagagtttggttcatcttaatgagcaacacttgaagacaccttggcagcagcgcgtgttcaccaagctattgggcttgcaatatcaagttgtctataagcaaggttcagctaatcgcgcagctgatgcactgtcgcgccgtcctcatccagatcacggccttcatgctatttctgtcagcactcctcaatggttatcagacattgcagagagttatatgcagactcctcaagataaacaattgcttactgagctgtctgtcaatactccttctggacattatcagttgacggatgggttaatcaaatataagggccgcatatggttgggacacaatattgatcttcataacaaagtaatggcgtcattacacaacagtgccatcggtggacattctgggtttcctgtgacatatcgccgaattaagcagttgttcgcttggccaactatgaaaactgctatccgtcagtttgtggctgcgtgtgatatctgtgcccgtgccaagccagatcgctcaagatacc

SEQ ID NO: 24551 - DNA, 944 bp, Zea Mays
tgacatggacatccatgggggtgtgagaaggagagctcacttggacaccctcgggggctgggttgtagcttgcgccacccactagagccggatcatcaccgacaataccctcgggggctgggttgcggctcgcgctacccaccagagctggatcattaccggtgacacccttgggggctaggtaactgccagcaccaccctcgggggatgggttttctgcaacagccacctctaaggccgaaggatcctcagtcacctccatgggagtcgggcaatcctgaccaacttcttgacatcgaagactgccttccaaagtcgacgatgcgtgagacactgctcgggatacctctaatcccacgtatggaattttagagcaaacatccatcatatcgccaacagtcggctccgatagcatatcttcaggaacgacatcctcaagggcctgatcaaaatcttctatggacaactcttgaagactgacaagagcagacagagccggagaaggaatatcactatccccctactacctctgtaacgccggctattcttatgaattagcagaacttcttcttcctcttcttcgtcctcatcaaaaatacgaacaatagccggtgcacggtcacacctattggggtcagcttcaggacggatacacccattgggatcagcttctacacggtcacacccattggggtcaacttctggacggtcacacccattggggtcagcttctgcatggtcacactcattggggtcaacttctagaaggtcacacggattgggatcaacttcaacaaggtcacacctattggggtcagcttcaacatgtacaccaccattgggatcaacctcagtaaggacctctgctggtacttcttcacaaacaaaagcagaagggccagcatcctggtccaagcatgatagtcgccgaagccgcctcttct

SEQ ID NO: 24552 - DNA, 804 bp, Zea Mays
caatagtacatgtacaatcagtagcaactgacttagacatgactaaatagctacatggagttacacttgctttgcatctttgactcatagattattgtattttgtttcagtttttgatcactgcttctccctgaaagaggtggaaggggaccatttcgatgctcacattagaggcattgcagcagatcttctggaaaattttcgcgatcactcattcatgatctcgaatttcgggactaaagaggaagaaagccctatataccatattttgtctgagtatggtatgactgtattggactaccctggccactatgagggatgtccactcctcaccatggaaatgatccactgcatcttgaagtccagcgaaagctggctttctttgggtcagcataacttactgctaatgcactgtcaacgagggagctggcctattctggctttcatgttagctgctcttctaatatacctggggcattattccgacgaggagaaagtgctggatatggtctacaagcaatcgtctttggagcttttggagatgatttcacctctgaatcccatgccttctcaaatgagatatttgcgctatatctcgacgaggaatgtcatgcctgagtggcctccagctgatagagccctcacattagattgtgttattttgaggatggttccaaattttcatggccaaggtggtttccgtccaatattcaggatatacggcccggatcatctcatgccccctgatcagactccaaaagttcttttttcaactccaaagaaaagcaaccttgtccgttttta

SEQ ID NO: 24553 - DNA, 465 bp, Zea Mays
accacctctaaggttgataggccctcagccacttccataggaccaggacgatccaagtcagcttcccgaccctcgagatcgcgctctaaggtcgacgaggcacgggatgacctcaacccagcatcaggcacgtcaacgcaagcctccactgcaccatcatccactggctccgacaacaagtcttccgggaccatatcttcaagagtttgatcaaagttggctagagacagttcttgcagaccaatgaggacagacaaagcaggagagggaactccactacttccaccgctggcgatgaattgccgactgtttttccgagtcaaaggagcttcattttcttcctcctcatcatccacattgacaacacaagcagcgcacccattgggatcagcaacaggtggagcacccacattgggatcagcagctgactgggtacacccattggggtcagcatcaacaagtcca

SEQ ID NO: 24554 - DNA, 325 bp, Zea Mays
aaaagagcgaaaaagattctcatgattcaaaagaagcgacgaaggcagctgagaaagcgacggaacttgaaaggcggataggtattgcttaataactttttaattttatttactaattttgtgacttcggacttatttatgttttatatcacagctgaactatctcctcctctagagcccttcgagtcgatggccaacccagaagtagagaaagaagatgaagtcactaaagtggccgaagctattttggacgaagctgttaatcgactgttgaacgaagctgcagaagcagttttaaaagaagaataactttcattgtaaaaac

SEQ ID NO: 24555 - DNA, 313 bp, Zea Mays
gcgcgatacagcagcgccggagaggcgcgctaaacagtggaagagtgaggaacgagaacccaaactcgtgataccatgaggggagatatgctgtagatatggttgatgaatagatgcacagaggttcacaggatatatagagatcaaacggcttatagaaatagggtctgattgatctcctagaaccaggactacctaaatagaaaggatctcttatctattagacccccaatcagagaaccttccaaacaagaaggatagcctatcctatcagatcctgaactgaatatctcctgctttaatactttttttc

SEQ ID NO: 24556 - DNA, 289 bp, Zea Mays
cccatctctaaatgacctaaaacctaaactcgtccttgccacaaccaccacccctcctgtcccattcaccgtcgccacctcccttcccaccgccgactccgcccctccactggaggccgaagcgcatattctcctttactgcatccacccccatcctcacgatgcgaatctgcaatgaacccctctctagggttccttcctgccaccttgccccatgccatccagaggttgtaaggcttgggcgtccacgctcggctacttcttccgtggcggcgggaagcacgacaag

SEQ ID NO: 24557 - DNA, 304 bp, Zea Mays
aacgtgcccttgaccacccttgtttcttaatgatccatgagcggtcattttattttgtatatccttgctaatctcgccgtctccttgtaactccacttggtaattaattttatttacttctaccattttgttggaacattacctatcttacccttgcttgttttctccactttgtcagtcttgccttaactctgtccatggttatgcttttcatcattaccacctttacccttatcacctttatatcttaccttgatgtttatcttataccagcctttaaaatatcctcttttccatctcaatc

SEQ ID NO: 24558 - DNA, 463 bp, Zea Mays
ctgctgccgcgttgcgatctctctctacatgatgaaattctagcccttcgaatgtgtcctccagctttcggatggctgtgcaatacttgcccatagagtcattcgagcaatcccattctttatttatctgacttatgaccaccagtgaatctccgtataccattagtcccttaatgcccagtgatatggcaatgttcagtccatgaatcaaagcttcatactccgtcgcattattggacgctgagaataacaactgaagggcatatttcagttgttcacctccaggcgcgatgaagaggatttctgcgcctgccccctgcagtttcaacgagccatcaaaatacatccaccatacttctacagtctccgggttgtctagcacttgttgctcggtccactctgatacgaagtcaactagtgcttgagtctttattgcagtgcgaggtcaaaactcgatgtcgtg

SEQ ID NO: 24559 - DNA, 281 bp, Zea Mays
tacgacgcagtagcgttcaattggccgagaccgggagtttcactagcactagaggatgtagaaacatggatcagagggatgtgaacggatctaagaatggctggccatggcttgatgcctcacggcggcgttccgaccgatttgggggaaatctgaaattcacgatctatggttgatgatcaggagtgaggagtggtgcattgggttcgtaacagagagacagagcaaggggaacactcaatttatagcgatagtcctcgtgctttgcaaatttggaatgg

SEQ ID NO: 24560 - DNA, 552 bp, Zea Mays
agaaaaccaactagaaaagaaaattaaacgggttaggtctgatagaggaggggagtatctttctaatgaattcggtgaatactgtgcggaacatggaatcatccatgagacaacagctccctactcgcctcaatcaaatggggtggctaaacggaaaaaccgaactttgacagacttggttaatgccatgttggatagttctggtttacccaagtcatggtggagcgaagctattttggccgcatgctttgttctaaaccgagtttcatcagctaagggtgataaaacaccctatgaaggatggaaaggtagaaagcctgctcttggatttctacgtgcatggggctgtttagtcaaagttaatgtgcctgcgtgcaagaaacgtaaattgggaccaaaaaccgttgattgtgtctttctaggatatgcgtataatagtgtagcctatagatttctggtgattaaatctgattttctagatgtgcatgttaacaccgtgactgaatctcatgatgcctcctttttcgaagatatattccctatgaaggatag

SEQ ID NO: 24561 - DNA, 294 bp, Zea Mays
atccgtggtaacatagttattcaacagtcatgtcccctgctgcggctacggttacttgttgctttgcataaggtgtcgtcactatagtcacaataaacgtctacagtggtagcgaccatcaacctagaaacgctgtccccgatcagaaaacacgagatcattttcgttatcactatgtaaaaacctctcacaaatagcgtaccacgtttcttgatcccgttccttgaccctatcaatccaaaaactttatgaccatggtcctcactctcttcttgacggcatcatccacaagag

SEQ ID NO: 24562 - DNA, 377 bp, Zea Mays
attaactcgtgctctgccctggtattgggtcctgctctgctgactgttggaggggagtgccttggaggcaggtgctgaggtattcttggggccattcaccgagttggagtaggtaggtctgggtgccttcaactgggggcagttattcttgaagtgactggggtctccgcagtgccaacaggcatttgctggtggttggttgcttgcaaccgagggggcctgaaaggagctctgactctgctgactgtaacgtgacggagtgggtccagctggtctattgaagcttggtcccttgggtggaagcccgaaggatcgagctctctggtgacggtcttgctgctgagctcagagaacttggaatttcctcttgagatgcc

SEQ ID NO: 24563 - DNA, 475 bp, Zea Mays
gaagaagcgaggagtggtgacgggagggcgacatcgcctcggccgcggacgacggcaggcagcctcgtgttgtggttgctttcttcctccatcgcttcctattccggtttcttccttctgaaggtgacgctcaatgctcccaccctctccctctgttatcccttctcatattcccttcccgaagtcacggaggtcttggcatcgaccttgtcgaacgccgatttgatggtcagaatatccgtcacgcaccgtccggtagtcggcgtgccacttactcccactgttcgcccatccgtgtcctgcgccgtctattcaccttgcctcgctcgctccttccggccgttggcgtctcacctactaccgtcgtccgcccctcccgtcccgtgcgcagccatttctcagtgggccacaggatcgtgcttcctcgcctcgtgcacacatcggtgtgcaacttgctactgtcgtccgtctttcc

SEQ ID NO: 24564 - DNA, 470 bp, Zea Mays
tctcgagagaatcctcgtcccggtcgaggtcccctcaccccagaacgacagtctccgcctcgcccgagcccacctcgggtaagggagacaaaacccagggcgagactcagctgaagtctgccggggacaacaacattcaatgcgcatacctaacccacatagggctgcaggtgtgcaggagtaacaagaccacagtctagtcaaagattcaccaactatgattacgcatgcgaccactgttcctgtacgccgtctgccaactcctgacgggacatacaatacgacaagggtacaggctagccctcgggcgtaaacttcgtttcgcccgaagtagaactcggcctcgggataaactcggctcgctcgagcccggtctcggctacctactccccatgaaccccgcaggaggccactccttcaactgtggcacacgttttcgaatctcagaatgggctcagtcgcgatctcgg

SEQ ID NO: 24565 - DNA, 388 bp, Zea Mays
gcggcgtattcaataccgggaccgggacacgtactcgtacgtacctacgtactcctgcatgcatgcatatatgcacgcgtcctaggtagtatgatcgactagctaggttaatttactcgcgatccatccgatccgatccgatcctacatgccgggccggctacaggaaacagagagagaccacatagaaaacatcattaatcatgggaacagtagcagtagtttcatatccgtcgatcgatctcgatttctagggcactaatcaatgacctcgctcgacgtgggtggccaccctagtagcctggagccgcagctgcttgtgaatttaaggttctcccgccatcatatccgcactgaaggatatgtgtgggcctcccatccaatgcctg

SEQ ID NO: 24566 - DNA, 515 bp, Zea Mays
acgcctgagcccccgagggacaggccgtccatgccgtagtggttgtaaatagcatcagggtatgggccaaaggctacttacagggtgtgtcatcatcctggcgcgtgatgacgtcgagattctctgcaaagctcattgagatcagagtccctgttttggttgatgcagaagtcttcccgaggcgctggctgagccatgcgctatagtcgggcggagtggctgtctgcgtgatttgtggcacagtaggtggctgaggccgagctcgggcgagacggagaacttgttcgaggattgagcctggggtcgggcaaggaagagcggttgcgcccgaaggctcgtctgcttggcttgtcatgttaggtgtcccatcggagggcattaggcagcgtgcgtgcactgtgatgtaggcgtaatcatatcattgtgttggacgtgactgttgtcttgtctgctactgttttctgctgccacagtgcgggttggcacatgcattaaatgcacatgtcccccgccta

SEQ ID NO: 24567 - DNA, 599 bp, Zea Mays
gtagttttgaagcgaaatgtgaagtgggtgttgaggtagaaggatttgtaatggtaatgagaacatcatgtgaggatgtggtagatgatggtgtagtggaagatgaagaccaggtgaaagagcatagatgggaggaagacacatgaaagagtttgagtatgtagaaaaagaagatgaatgtgtgagagagttataaaagaaaggtcggttttcattaaaactcacgtcacgtgaaatacgaatgcgacgcgcggaaggatcataacatcaatagcctttgtgctccagactatatccaagaaaatcacactcaacaaatcaagcagttaatttactccgttcatgagaggctaacaacacgtagcatgtacatccaaaaactctaagatggtcatagcgagaagtgccaaaaaggacttcaccaggagttttcccaaagagttttgatgatggttgtctattgatgaggtagacaacggtagacactgcttcacaccaaaaatgcgagggaacaaaagaagatatcaaaagggtgcgagcagtttctatgacatgacgatgcttgtgttcagcaacatcattttgagcatgtgcacaag

SEQ ID NO: 24568 - DNA, 464 bp, Zea Mays
ccagtcagctctggttgccattgggggcagcttcgtcgtaggaagaggcgcgtgtgcatatgcatctctgcatgattttgaaaacgaaaaaaaaaggatatgtataacagccgctctacgctgaatggttccttgagagttagtaagctggtggaccgtctgttggagaatcattgggaggcgttgctcaactgaattcctcttgcacatgcaagcagcaagagcaagagcatcgtctgcacaagtcgtgcggtctcttctcgccacaccgaccatgcggtgcgggcttggataaaagatatattgccgccagtcacctgtaaaccttcacatgacaagcagtatgatctgaccttagacctacaacccgtaggagcgtgtacagtgtactatatatacaatgcgcccccaagtcaagagtaacatgcgtgccgcgcttcttcaaacaaacaaggccatcccag

SEQ ID NO: 24569 - DNA, 1048 bp, Zea Mays
ggctgtcaggctgattcagtctgaaattcagatattcagtgtagcagagccaactttgagtatgaattccaccttgatttagtgctcaaatgggttcatgtcctatagccgaattatggttggtttgtagctctacaattctgctgcagagcttgggaggagctgccatatgaaattgaagggaaattcctctgcaaaatgttatgtcgggctgtctgaaacgagctctgatggtacagtagttaaaatggatcaggatgccagcatcgcgtgcttgccgccggtgaccctccctcgcgcaaggattcgcgccgctgcgttaagattaacgttcgctggtaaccggataacgctgcgaggtaaaaagatcgtcgtcgccgtcgagctggaagccaccccggtcagccacaatactcctccccttgctcaccgccgtgaataaagctgctccccgtcgccgtgccctcgccgttgtccaccacgtgtcccaacctcgccaccgcatcgtcgtgacctctcctagctccccattgatcaccggagcaattgccacgacacgggacacgcaaccaccgcgccatggtttttacttatctctgaccgccacacatcgccgttaaaattcccggccaccgttgaagctgcctataaattgagccctcccctagctgcataacatcatcatccacccagccactgttaatcgctggcagtccttcgctagaactcgcgaattttggattcgccccaaatccactctccgccaccctgaactcacctcaccgtggccagccttccccaggtctgctcattcccttctcgttcttgttctagcacccttacatgttagtgatgctccccgacccctttaatcagactgaaccgcctgggatcgccgggaacacaacaccttagccgccatgctctcggtcaccgtggccagggctcctcatttggtattagatgcaattgagttgggggaaaagcttaggatagatccgatttggtgtctgtcgctcgggagggccggtcatcgcctcaatcggcc

SEQ ID NO: 24570 - DNA, 787 bp, Zea Mays
acacaggattggctagccattaggggttggttaatctcacggataaaaccaacaacgaggagcttgacaatctcttccctgatggccttgcatttttcttcgtcaaagaagcgttcatcgaatccacctcctcctgttagtcggctcctcctcttgttcgttggctcgtctcggggtccgtccttctggatgcataaccgaaagaactccctccttgcctagggtcaacacctccattttataggccaggaaggggtcagccagcagtggcttccctaggaaggagccacaaggaaagggtaaaaccaaacattctacctagggtcaagccacacatactcatgggctctagggtcgcctagttgtctcgtatttattatggcgaatgacgtgggatgtgtgggtcctaggcgccttcattcaggctatgatgatccttggccttcatagcctggggctgggcatggcttggcgtgttgcgccctgccaacggcctatgcactcaggcctagtcgtgataggtcatgagtgtcccgtaggccaaggggcgagcgggccataaatgcgtcgcggtccgaggggttcataggtcatgagtgggaggcagaccgacacccccgctgtggctcgatgccagacgtagttaatgccgatgatcatttatgatgggtcaggcttaggcaaggtgcgagatccacttgagtggccaccccacatgctcgacccccttgtcaggttctaccacgcccgaccccgggctccgtgcatggggtttgtcaggggcggg

SEQ ID NO: 24571 - DNA, 277 bp, Zea Mays
taatagtgaactgactgaacagaacttcctacaaccctaccgacttatccctaatctgttctgatattcaaggatgccatgcgcgggaaagtcaggtggttgttgcggatagcgtataagctgatgggctgcctcgtcctgagtcggattcctccttaggtcagcccattccgccaatagttctagcccggcccacgaagggaaggtctcgcgaggtaaatggcctgaggccccgcgcgaggccttttagccttctagtggacccgggggatatctg

SEQ ID NO: 24572 - DNA, 415 bp, Zea Mays
gcggtgatttgtgcccagcgcagatggataacgacgaaggggtaagaaatattgcactgtgcatgaactccaaccactattctactccagccgccgtacacgcctgagtcatggccgcttcagatagactcaccggagttagccaccttgcgaccttgctccacgtgcctgggtgctttaaccacgccaccgtgagtcaccttagcccatctggtgatcgccggtgagcttaccatggtaaacgccaccaattgcttgcgccagtgcacccccttttctccgaccgccaccgcgtgatctcaaattcacgggccaccgctcaagggccctataaattgagcacaccctcggctccgctatgtaattgtgcactcaacacacccacccgtgcctccaattactcaccagagccccc

SEQ ID NO: 24573 - DNA, 390 bp, Zea Mays
tgtgcacgtgcatgtggtcaaagaggaggacggactggtcggtcggtcactgcccactgtggtttctcagtttgttgtgcaaggaaaggaaaggaaaggaaatgaaatgaaagattttcactgctcactctttgacaaacgagctagctagctagctagagatcagatgcagcatggcatggcatggtatggggatacctatttcggcttctcctcctcctgctcgatagctctctctggatcacatctaccagtcgtcgtccatcacacaaccgtgaaatgcaactgctagctagctagctagctgctacatgactgaatgaatgaatgaatgaataatgcacgtacgatcgatcgatcgtcgtctcctctctgctcctactagcccgg

SEQ ID NO: 24574 - DNA, 291 bp, Zea Mays
aacatcaccaaggggcctagatgattcacacctccacaggtccgatcacgccctccttgctcttgttttagcatccctgtgtttgtgatgcttctcgacccagccaattgagctaaagcacgtaggatcaccaggaacgcttcgggttgtccgttgatcgcgctgtcaccgtgggcagagagattaggtgctagaactttgaaattggttaaggggaaatggttattaggggtcgaattaggtgtcaaccactccaaagcaccaatcattgtgtatcttggccggtacagg

SEQ ID NO: 24575 - DNA, 338 bp, Zea Mays
taagtgctatgcttgatatgttagccgaggattcttctgatgccgctcctgctggaacattggcggtggcgcctctcccagaagctagtaaagccttggatattcagaggcctgtcagtgttcgcccgaaatgcccttgccgagccaattagtctgcttctcctgctgatgggcagaaaaagaagaagagacgtcttcgccgagtgtctagcttggatcgggatgctggtccttcggctcctgctgctgaggaagtgcccgtgcctgaatttactgaagctaatcccaatgggtgtgacccatatgacgctgaccccaatgggtgtgctgtccgtgtt

SEQ ID NO: 24576 - DNA, 1019 bp, Zea Mays
ctctttcaaccttacaagcaaaatggaataatcgagtaatgttattgtggtccttgtaggctaagatatcttgaatttctcttgtcaaaccacccacgaacctagacattgtagcctcttcattttctaccagaccacatcttagcatgcctatttgtaattcttgatagtactcctcaacagatttgttaccttgcctaagctgttgtaatttatgtaataagtcacgagcataataggaaggaacaaaacgactacgcatgattctttttaaagcattccaagtttgtggtatggcagctgggtgtgtagtttggtactcatgccaccaaatagaagcaaagtttgtgaattcactagtagcagctctaaccttgttaacttcagaaaattcataacatgcaaaattttgatctaccaatagttcccaagttagatatgcatcaggatcatattttccatcaaaaggtggtattgaaaatttaattcttcctagagaatcattattttcacgtacctcacgtcgtggaggtcaaccacccatgccatgacgatcgcgacgttggtgtcgtcgatgcagattagatcagtcatcatgctcggtgtccgctgaatactccatatcatcatctcttgttgtactagcaatggaaccattaccgtcattatcaccttgttgcctaccttcacgcccaaattgttccatcctatctaatcgtgtaataattactacaagagaggtgttagtagcagcaagtgtttgttccaatgtggtcaatgtgtttgttggcaacaatttgtgttatttctaattgaccaatgcgctcattggttacttgaacatcttcgttgagagcatctgtgtgcaaccttacttgacgttcaaaatgttgaatgatgcccgctgttcgtggagaatgtggaggctgcgcatttgcatcctctgccatggttagtgcaaaagagatacaaaaacaagtaatgcagcctagtagttgctaggatgtggatggataaat

SEQ ID NO: 24577 - DNA, 382 bp, Zea Mays
cgatgacgcgcggcggtcggaggagggggagtttcactggcgtagtggattggtgtcctataccgtgacattcactccggtgatcaacgaagagttaaagcaggtcacggcgatgcggtggagatgcctagacacgcggcacaaggccggaaggtggcggtcatcggcgaattcatcctaatccaccgcggcgagctcggtacggtggccgaaataatttactagccggagcttatccacaacagcgtgactccgagcgttatctgatcaacccgagcacgaatcgatacggcagcggcacgaatcgcggcggagagatcgtcggcggcaagaaaaaactgagctggcggtctgatccattttagatcactataccatggcg

SEQ ID NO: 24578 - DNA, 461 bp, Zea Mays
gctggagaccccacatgtggattcacgccggtgaggtgattcgtgctcacttaggcccggataacgcctcggggtagaaagatcttcaccgctattgagccatgggcactattccgtccggccgccgtgtccgcttagccccggtcgcttcgaatctaccctcgccggagttggacacctcgcggtcttgtgccacatgcctcggcactttaaccacgccgccatgactcatactaacctatcaaatgatcgccggtgaggttgccacggttatggccaccaatcgtgtgcgctagtgcacctcctcctctccggtcgccgcgcgtccccatcaaattcactagccaccgctcaaacacactataaattgagcacaccctcggctccgttaggtaatccagcatccaatccaaccgcatgtgccctcaattactcaccagagcccgcgaattgctcttttc

SEQ ID NO: 24579 - DNA, 374 bp, Zea Mays
gtaaccaagcactgatgctgtgtaaaaattggagaaaagcaagcccaaagatggtttgtgagtcagccaaaaacctgaattttgatattcagtgacatgggatgaactttgggagtcttttcgaagatgatccagtaagtgtttgagcatggttaccctagcaagattgtagctggtttattaggctatcactttgatacagagagttgattcagtccttatacaaaatctggagcaaattggtaccaaatatgctctgtcaggccaactgaataagctgcgccatggtacagtgaacgggatggatcgggttcagataacctcgccgccggcgacctgtgcgcccggattcgcgccgacgtcgtgattcacgc

SEQ ID NO: 24580 - DNA, 478 bp, Zea Mays
gaaataccccattggctaagtattcttgcaccagatctctagtgccgatctgctcagtcacaactctgaattctgccacagcctgttggcatggtgaccccgacgacatacggcacaggggcctggttagcccgaagcttaaactcaacgggctcattatcaacgtattcaatttatctcttttcttctcatcagctttgatatagaacctctcacttttatagccggttggccacttggtgtggtagcttagcaccggggccttcatatccttgcggtaagcgaagttgtaacaaccaaaattctcataaagcccatcttctctggccttcgtctgataatgtagctcatgtactcggcaggaggcttcagcatttggatccattccctggcttcgaagggcccaaatgaagatgctgagcctaacgatagcattaggagtcagctgatgaagataaatttcataattattcaaaac

SEQ ID NO: 24581 - DNA, 336 bp, Zea Mays
tttcgctgattggtggtacagtgccaagaagggtctacccaagaaccagcgaaaagggcttaactctctgattattttcggtgcttggatgttatggaaacatcggaacgcttgtgtttgaaagggctcagcctagcatcagaagcctgctttctgatcttcaaacggagcaccagctgtggtgtagggctggggctaaaactctgagggacttgggtcatatagtggtcagagttaggtttcagtggtctggtctcaccccacccccggtctttcgtgtatgtgtatcggcccatcccctgggtccaaggagatgtggtgaagctttgtatggac

SEQ ID NO: 24582 - DNA, 279 bp, Zea Mays
cgaagcatcgtctaaaggtcttgattatatcgttcgacatgcttcgggaaaaagattatctgaagaagaagtttttgaagccaagcacttgcttgggaactgaagtatctgaagggatccttagtgtttaatggtacaaatgaggatgatttcctgtactgcatcccggacaacaaagagttatccgtctgccgggagatggccaaaagtatgggatttccgaagattgaagctggcctctgtgccatgatgaaggctgacctcgcagacagcctcgca

SEQ ID NO: 24583 - DNA, 392 bp, Zea Mays
caccgattgagcctagcgctggcagcctcccttagtcgcctcttccaattatttcgtgaacctgcgcggctgcgtttcctatgtttccagcggtgtgccgcctccattcagtcctctatcgctctccacaccttcagactctacgaatccgacaagagcacaaggcagcaacctccgagtcggtccggcgggctctgactcaggcatccgccactgccagtccgacctccacctccgccagcctgcctccagcgtccctgcgaccctatagcaatgacgcgcgctgcctggcgccgcgccaccacctaaatccgtccctgccattacatcttcttccaaactatataactttctcaacctgattcccttccttttcttattcatagtcgagg

SEQ ID NO: 24584 - DNA, 302 bp, Zea Mays
ggcaattgtgctaccatctccattggcacgacggtcgtgatggcatctagggccatcatctcctcctggtcggaggcgccgtcgtgttcgtctgcatcccaaaggtttcgagccttcatcttgatcttcatcagtagtgcccatcccaaaggtcttggtaaggagaggccaattcacatgtctgtcgacatcgcgcaccgtgcgcgaggagctggactcatcctctccagtcttcttgccgccctggagccctttgatccaggtgacggtggaagtgtcttgtttcccttggtgaaacgaat

SEQ ID NO: 24585 - DNA, 664 bp, Zea Mays
tgacggagggagagaaccgggtgggagagttcgctgccggtctggggtggcgaagaagcttgtctgtggcgcatcaccggactccgccgcgaccttgcgctgccctctactcgaccgcttccgggctctgcgcccttttactctgctcggcgccctattccttgagtcaacggttcatcgccgaccaacgccgcaccgtgagctaagcttctgcgcgccatcaccttcggtgagaattctacccctcggttcaccatcgttgccgtagtgtgtagcacagtttacatcgaggattggggtagtggtcggtgttttcgctctcaccagttatggcgccgccgcggctgaaatcacgtcaccatggtaggagttgggggatagaagaaggctaggcgtcgtcagtttagcagtcaacggtgcagatctatctagggtgtagccttccgcgggtgggcgatctggtccattagatcataaatggacagccgcgatgtgatcctgacgttttaaatccaaaccgtcgaggtccgatctcgcggctgtgattgcataccggttcagggataatcgatctaatctggggcgtccagatctaatcctgtggccgaggatgctccataccccttcggccctgtaaaactgcaaaagagaccctatgttattt

SEQ ID NO: 24586 - DNA, 332 bp, Zea Mays
ttttaatttgtgacgaagggagtagtaaacaaatgacaactcttgtttaagttctgcaagactagcctcagtgacttgtgaataatgacacaactcacaattccaagcccgaccagggtttcaatggaccatccagggtttcaacggctctctcggattcttcaacggtcggctgtcgtgatgcagccacattcagtatgtgaacacagaggctgattttttcttcacatgacagatatacctagaatagttggcaaagcacattcacaacaacaaaattctaaaaagatatccatctggtgacatctaacttgtcctgagaagcattttca

SEQ ID NO: 24587 - DNA, 486 bp, Zea Mays
tggaaggagtatgttttttcttctctagccacaacaaatgagaaacaatatgtagacatagaaatgttttgtgtagacttcagaaatgttttgtatagatgaatttcagtgccatcggtgatcgatcgcaaggctgacccagtcccgtgggcggatctacaccccggaacatctaatccgtggctcgggattttatccatataattctttataagtctctatttaataaaataactaagataaaaggagaggaagaaaacttagtaggttggcctgggtcatagaaaaattgtcgtggctgaaaaaattgcattcagatgatgttgtggaccatggaagtatggaactactgcgccaacataaatagtgaaacactcatgtgttgtgacgccacaccaatcgtatagtgcaacaattgtatgacgtgtgtgggcccatggcaaaccagtgtgacagaccctccctacaaaaaatgaatttaaaatt

SEQ ID NO: 24588 - DNA, 348 bp, Zea Mays
ggattttcttattcgtaacccgagtgaagtcgttgatgccactgtacagataagcagggtatgccctatccttcaaaggctgaatattcttgaagataaaatcaacaaccacagcctcatcagttagacctctatccttcagcaagcaaatctcggtaagcagaactatagcctctgctatcttcgaaggagtcggagactctacccagctcgaagtgtggacgttcgactgcctccctgaccgaggggggagagactggcagaggttctccacaataaaccactcgagacgccaccccttgatgctatccttaagagggatgtcgaggtactccatcttcctcccgc

SEQ ID NO: 24589 - DNA, 306 bp, Zea Mays
gtcggatatcataattaggggtacccagattatgtccctaaagcatacctcacacctgagtaccagagaatcataagcctcgagcccggcctcggccaaagatctcaggaccacaaagcatgcacattaaatgtgattgatacaaatacctgctccgccaatgacgctgcaatcaacgaaggacgacgaaactgcagccaaatctactttcaccgcccacgatgacgcacgtcgcgaataccgcgcattgttcccacgctccggtcactattttcaaaaactccggataagacatacgacgactag

SEQ ID NO: 24590 - DNA, 724 bp, Zea Mays
ggaggacaggtacccaagattcacagtccgctacaagacatcctcatccaaaaggaccacaacatcaaaggaaccgatcacaaggcgtcataaataacacaacgttcaaacatccacccatccagttagaaggtttgctacaaaacatcaaaacaagaaaagaacataacccttaggcactgggaggcggcaccgggctcagaggcccccttagaagcatcttcacgtcaacccggctggcaagtgagcaggcgtgagggtgcacttgttcttcaatagcaaccaaatctttgtcgctctggccagtgacgaaccccttcgcgatcatgcatgtgtcaatctcgttgaaatgggataccatctggcccaaggctaggctacccccatggaacgccccttcgaagaccacacgttccacgtgaccaggaagtgcccgtagccggtcaagtagaggcgtctaggctcatggtggaggagcgaggtggtcgtacacctcactcgtaggtaggtgcagctcttgcagttcggcaccgcactccttcagtgagatttgcacttgagcctacgcgacaatggcaccgccgcacacaattgagagcttgcgtgcttcatactctaccgccttctttgcctcctcgactaccttcgtagcgtagtgagcctcgaaaactccttctgaagatctattggagacaaaccgtggaagcgaccattagcaccaaag

SEQ ID NO: 24591 - DNA, 1195 bp, Zea Mays
attggtgtctcggtcatcccagccctgctatgttgtccaagctttgtagtagttatgtcatatcttctactaggagcaccattgagcatctttgcgacgcttgtcagttaggtcatcatgttcgactttctttctctagctcctctcaggctgtgcagaattttgatgtcatacactgatctttgaacctctcctgttactagtgtatctggttacaaatattgtctggtgactttggatgactgctcattaccctggacttttcccttgtgtttgaagtctaacacttttgcgactcttctccacttattcggttgggtttccactcagttcgttgcatcattaaggttgtccactgtgacaatggccacgagttttataactcctcccggtcctcctcccatggagtctagctctggatgtcttgtccctacactttccctcagaatggtaaggctgagcgcatgatttgcaccactaacaatgtcatgtgttgctctttcaggcttctgttcatgcttgctactaggctgagagcctccacactgctacctaccttattaatcgtcttcctactatggcgactcgtgtccccattccccactttactctctttggcaccactccctcctatgaccatcttcgtatttttgggtgtggatgctaccccaacattcatgtcacatctcctcataagcttgctcctcattttgttcgttgtttcttcctcgggtactctcatgatcaaaaagggtactggtgccttgacctctactcatcgtctccagatctctcgtcacgtcactttcgatgagatagatttccccttctcgcctacctcctacccaccaccatctctctccatgacttggattttctcaatactcctgactctgtggcgcttcctggttagtcattgtttgttcttccccctgcaggctctctcccctaggtgccccggatgcctcatgtgcccagactcctcggctgctcctttgccacctgctctgcctctagggaatggcatcaccctcgaaaccgatggcctcttccactttgtcgctcatgtctcttgggctctctggtgcccttgtctgcgccgactgctcgccgctatgaccaacccatgcatgactatcagtgacgtgccttggtggatccactgccctgctcccgcaccgagccgacaatgtac

SEQ ID NO: 24592 - DNA, 301 bp, Zea Mays
aaggggtccgccgcttgagcatctcgccaggagcaccgctttgggcttggttgacggttgagtaaagtctctagagcacaccaaacacgttcgagacctcaaatggccatataggtggctgggagcatgggaatttctcaccggatttgggtggtgccgccaaaccgcagcacaccgtggccagcatcctccacattctcatcattagtaagtaacctatgcttgagctcaacgtgtaacacctattagattcatctttggatccttttgatgggcggggcacctcaggacagcaagctca

SEQ ID NO: 24593 - DNA, 612 bp, Zea Mays
tttggactagagatgaattttctatgcattttacaagttctagcactattttcatattaaaaattcattttccactattatttaaccaatttacaagtttctggactgcgcaacaatttctgggaaacacaggggctacggcgcaagacttcccagactcagactactatacattgaactgcgggttgattcccaaattctaaaagggctcttatgcataaagcgttggccgaagggatacgttgcactctggccgctcgatctaaaaccgagagtcacgattagatcactaccaccgtgaaccggtatacaatccccacaccacgatctgaaatgggcagctctgattttatattgtctggtctcgcgcaagccacacgatcaagatccgagggccatcctaccatctaatctacatcgtccaacggaaaatcaatggcacacagccatcctccacctctcgaccacccagagcacggcgccgcctccccatgactacggcgaatcctagccggagtgcggcgaaatccatgcccggtcgaccgaaacccaatcccaatattgctacaaaatctcgcggacgcgacaatgctgaatagggactcaccgtgg

SEQ ID NO: 24594 - DNA, 318 bp, Zea Mays
cttccccacaccccactcatgtaggagccgctaacactgggtgtcctgttgttgcaaaggccgatacgattatggcgctgaagctatgcaggaggctatcaggatttattgttggtgcgaattctagatgttgtaggctaagtgatgttgataagtttgctttactgttccaaaactgcacagatgtgaggtctctgaagaagctccatgctcgtgttctgacacttggacttggcagggatgttattcttggctctgaaattttgatttgttatgctagtttaggtgtcctgtgcaagacaagactttgtttccaag

SEQ ID NO: 24595 - DNA, 795 bp, Zea Mays
caggaggagactacatccaccttgttgttcatggtgacaccgttggttgagatgatgttgtcgaggtaggcgaccgatggctccccgaaggagcatttggaccacttcaattgaggtcgtggatgcacaatgcgtcaaggatgtggtgtatgagttgtaggtgcttggaccacaacaagctagagataaggatgttgtggaacaatacgagcacagacctacgtaggaaggacataggatgtcgttcatgaggccctagaatgttgttggtgtgttggagaggtcgatggacatgacgaggaacttgaagtggtcgtggtgggtgtgaaacaccgtattatcaatattccttgagtgcatccgtgcctaggggtagctagactgtatgtcaagtttgttgaagtatcgtgtgccatggagctcgaagtggccgtggtgggtgtggaacaccatcctcaatatcttttaggtgtatccctgcctaggggtagccagaccgtaggtcaagtttgttgaagtaccgtgcacgatggagcttgtccaggcgctcgtcaaccaataggatcgagaacatgtctttagacggcaacgtcatacagaggcccttgaagtccaaagtatggccccagagtccggaggaagtcaacgccgaggacgagatcgaagccatggcaacagacggagaagtcctcaaggctggtgcacagacaacattgtgggtcatgccttcataggggacctggccgccatttggcgctgtacgatatcgctagtctaatgcgacgcatgaccctg

SEQ ID NO: 24596 - DNA, 335 bp, Zea Mays
ctcttgtcaaaggtcaacacacaagctctcaataaatcctcgaggactttgttgactctttctgtctgaccatctgactgggtgtgataggcggtgctgaagtctagcttggtacccatagcttgctgaagactcatccagaattttgaggtgaactgtgttcccctgtctgacactatcttccgtggaataccatggagtctgacgatttctttaagatatatccgggcaagggttgctcctccgaaggtagtttttactggaatgaagtgaggtaccttggtaagatgatcgattataacccagatagaatcattccctttttgggtccgagg

SEQ ID NO: 24597 - DNA, 466 bp, Zea Mays
cagtctctgctggagccaatgcatccatccattccaaccagaaccagcttccgcagcctcctgtagtcgcttcaagttcaaggtgacagacggatgatccacccaactggttggttctctgtggtcatggaaaggctcgagtgctggtcgcaaaagggcgcgcaagtgaatgctgcacagcggcacaagaaagcaaaggcatctctgtggctagtcactgatgcggaggcatgcctgcctacctcaaaagaatgagctgggatcagctctctgcatatgtcacgcacaccacctgcgcctgtgctgcctgctgctgctgctggagggtatgcgtgcacaatgctgctttgcctcggtcctctcttctatcattgcaatctttttgccatcgctgaagatgacacaggacaccatgatcgtatgcccccccccagccttcagttccttcgtcaccgttacccgtcca

SEQ ID NO: 24598 - DNA, 567 bp, Zea Mays
gagagcggaccaggagatggttgtccacggcgcggcgtcacacggtggcgcggacgaccgatttgggggaagaactaaattagggcgctacggtggctaatcggaggcgagggttggtgctctggcttcgtaacaacctagtggagctagctgtgcactcaatttatagcatccgagagcggtggctctgaatttggaagaggaaagctggcggccggagagagggggtgagtcaccagcgcgaactaccgtggctttcaccggggtaatgtctcaagcgatggataggctacctacggcgatctactatgatgtggtaactcttctaagtacatggcacggctacgaagggccgcgaactccggcgaggacacttcggtcaatcgcgtggcaagtggcacagtgaacagtccagtgataaggctccaactcttccctgtgatgagatctttcaccgccagccgttatccgcacactagggcgcatgaatcgtgacgccgacaaggatcgcggcgtggagttcaccggcggcacgttcattgtatctgaagatcttttcgttcactg

SEQ ID NO: 24599 - DNA, 620 bp, Zea Mays
ggctaagcttgcctttcaccgtggtaaattcttgaaaacgtctaatgcccgcccacaatagacagagggagcccacaaccacctgtggcaaaacacatgcgtaaataaatcgtaagcctgcctctagctgccttggcatttgtgcgtcctgacaagccccacctacaccctctgccctgagacagccttgtcatgcacgccaaactgctatattaaaggggcctggttgtagaccttgaagtgatacctcagtgcagaaagtcactccgacaagacctcgtgcacccgcctgaacacacgtcagtcacttgtcgcaatcacaactaaatgaatgccccaccatgagccaagttaccctgccaacctcgggatgttgcgactgcactgtggcaacatcaccaatcatagtacgccggtcgagactccctccattataaactatcgttcctccgcatataaataccgatgcccttgccgcggaacctcacagtccagccaccatctcattgtcaccctcacatacgaacaacgcgtgccttactcttcaaaccagaggacaagctctcaccgtcgatttgagccataggtgagcatgccatgatcttcgacctcttcctccc

SEQ ID NO: 24600 - DNA, 712 bp, Zea Mays
tgcttcaacgtcccttggatttggattgtgcttgctacttggcattattgcaggaagaggtggccctttgttggtgcgtactgatctacacaaggggagttctgcgcttgggcgaagccgtctgcttcgagtttgttagccttgccgcctccgccacattcggtggtacttagtttactgaaaccagatcttcctgagaagaaatccgcatattcctcttctatggatggcaaattgggtgctcttaaggtgtatcgtcgagcatgtgtgttatatgatcgatgtgcagagaaatgcacaggggtcatacttgcaatgcaactattcaactgcatgctcttcaggaggtatgtgatttattatcagatactattgttgagggtgttgaggttgagtccacaccatcagaggaacccatgatcatgccactctctgctgcagttgttactggctcttctataaaaaggtccatgtgtgtttgtgggtcacatgattcaaatggatgtcttgattttggtggattcagacagtgccaattcttttatcaatcaatccactgtcagtaggttgggtttggttactgtatcagctgctcctattcaagtccaagttgctaatgggggtctgttgtcttgttccatagtggttccgcaagctttctggagtcttcaggggtgccattttgtgcaggacttacaagtgttagcattac

SEQ ID NO: 24601 - DNA, 629 bp, Zea Mays
atttggtactgtctgcttctttattggtacgagagatttggttcaagagcacatagcatacagagtatggccgcttatagagagctgggaaatgccgaaggagaccatcaccgaatctagtgaaggtgaactagtctggctgaagtacacattcagatacggggataaattcgatgaaccaaacgatgactggctaaaatgcatcgaagttaccagtgatgaactgcttggatcatattccaaggcggaaaacaatgcactatccacagtcttcggatgctggggaaaaaagagattgaatagagtttttgatgccattggttttgtctaccccgactaccgctatccactgcgaggtcagggaaagaagaggaaaactgctgcttcggccactctagtcgagtctgcgccgaagggcaaaaagttgaaggtccttacccatcggtcacgctatattgaaccggtcgtggtgcctgaatttggcggggaggcttcttcagctgctgaaccaagagagcccattcctcctacgcagaaggctgcagagccggctataatgccgaaggcaacttcggttgatctagctgagtcgaagactgagaaagataaggctgaaaagccaattattg

SEQ ID NO: 24602 - DNA, 551 bp, Zea Mays
ggcagatttcactacagcagcaaagttcctatttgagcttatgagacggactcttctgccgcgtatggggtacagggaggctaccacacatatccagctctggctccttggtgccctggtctctcactccgagtttgacgtcgtggatttccttatttgtgagatcgaggacactgtattggatggtctgcgtgctcgacgccagctaccgtatgctcactacttgtgccacatttttgcgcagctgattcggcctccacagttccagggcacacttgaggcctcacgccttgtttttggatcctaccgtccagcgcctgaggatcctgtgccagcttctgctcctgttttcgacactcaggccgaggatgctgctgttcatcagttcgaagctcaggatgcagcaagatatgatgatgatgatgattttgggattccacctccgcctctgcctcatatgcctccacgctcacatgatcatgaggctgggagttctagtgctacccctgctgcccctccggctattgaccctgctattgcttcgattctcc

SEQ ID NO: 24603 - DNA, 1037 bp, Zea Mays
cagcgatctagggtgacttagctcaattgagttggtcgaggagcatcaggggaacacaagaatgttgaaacaagatagcagggagcatgaacagacctagaagtcgttgaccacggtgagggctcaaggcacggtgttcttggttgatttgggggaaatcccaaattggggaaatctagtggacgattcgagtcacgggttgctgcactggttgcataattacctagcagagtggatgggggcggcaatttatagcctccaacggcggtggcgtccaattttcacgaggatgtgctagcggccggaggggaaaaggggtactggcgctcgggatgagtggctttcaccgtggcagtcctccggcgatcaccggatatgcataccatgattcaccgtgtcgtgggctagtgcttaagcacgtggcacacaacgttgagcgatcaacgacggtgaagtctatcccgaccgcacgacgagcaagtgggtacggtgaatctcatccgcgcccgagcccgagctgatcctgtgccaagatttttacttcgtcgtggttatcccctcaccagcgagcacgaatcacggcgacgatgtaaatcacgacgtaaaaatcaccggcggcgagggcaatgcatctgcaatctatttcagtcactgtaccatcgcaatcttcttcagtcagcctgacagtcgatgtttagggcagattttctcccaattttccatggcaacacaaccaatgctctgcagcaaagttgtagccctacaaaccattttcacttttgctatagcatccctagtcaaattcccattggatcatgattgaattcgagccctaagttcatgcaattccactgtcagtctgaattcagactccaagcagtctgacagcccatgcttgggtctaattatctccaaatttctcatgtaaccaaagcttaatctctatagcaaaattgttccccttttatagatctacaaactttatgtggtgacctagggcaaaatcttcataacttggaagatatggggcttcaaag

SEQ ID NO: 24604 - DNA, 443 bp, Zea Mays
ttgctagcgtcagggtggtggggccagtgggttgcaaggccacctggcacaggggagaagtaaagcagaagcaaagatggaaaacttctcgtgaggcgtgacaagattcaagagaaggagaaaaggtttgaaaaagcctgtgagagcagaaaaactggctacatgtggtactctttgcttggactgtagcaggtagcagtgatacactcactgatacttgagttgcaccagcaacagtccagagcctctatatcttcgataaattgtctctcctataacgcacaaccatatcacctataaattgtctcccctataacgcacaagcatatcaactatattccaccttctacttttatttctctggcagcgatttctcctaaattttctttatatacctcactacaaccataaaatactgttttcataccttttatcatctaata

SEQ ID NO: 24605 - DNA, 438 bp, Zea Mays
ccaccgataaacacagcaacaaggccatggtgcatgtcagcttctaccgcaacagtaagcccgcgccgatgatctcctcgccctacttgaccttggtatggtcagggcttattgatggatgttgggagcatctaaagctttattgcagtttaagtccccatatgtgccatagttgtgaggtgaggtgaatggttttaatggcacgacggaattcagtggatttttgtgtttccactgcttttgctaacagtcgattcgaggtttgtagggcgttgatcttgaactaattcatgggagtgaatataattggtgattagctttgtctaagatgagagagtccaattttccttgtttgcccatgtggagtaagcatgtccgagatgagcgagttcaattttcttgtttgcccatgtggaattaacaaatgttatatgaatt

SEQ ID NO: 24606 - DNA, 758 bp, Zea Mays
agatgtttgactttcttgccgacttgggcgcccccgtcaacaaatggatcctcatcctcaatattctttgaggcctaaacaagaagtttgagtgcattggggccatcatccgacgctactccccctgttgcaagctaaggaaatggcagactccctagctggcttgggcgccgctgtcaacaaccagattcttttcctcaacattctccgaggcctgaccaagaagtttgagcatgtcagggccatcatccgacactacttacccttctcgtcctttctcaaggtctaggacgatcttgttctagaagagctcaacatgactgccattggcactgctattgcttcgataaccttcatggccactcctctgccagtcccccccactagcttccctagccccttactctactctggcacactcctctaggaccaggaggaagcccactcccacctagaatatggcaagaagaaagggaacagtcagggtaatgcttcctagctgactttctacaacccatggacgagcatcatcaccatgtggcccagctcggctcctggtcacccgactttcttggctccgacattccttgttgcgtctacctagcatcgacgtcttggtcaccctggctcggatgtgttatctagtttgtctaatgcttcaactatgccatgtaataaaagcacacatgatatttgtcacacctgtcaggtaggaaaatcatacccgtttacctttctctagttctttcagtcaagct

SEQ ID NO: 24607 - DNA, 419 bp, Zea Mays
atgttattgttgcaggattatcataaaacaagagtagtcaccctagttggagcaccagacaagttatccctggtaggccatgtaacatagtgagaagctaatatggaagtctggaagtgataccatactttggcctaatgatggtgcaattgcattacaggatttacagcataagcggcaaaggaaagaaaactaaaacatgcttcaattgcttaccccctattagctgggactgaaagaagatcagcttgtactgcacacatggagaagtcagtcattgtacaaacaagtccaacaataggtaagctaaccaacctgtaacaatttttagtagagagtctagcttaacagtcacatcattccgaaatatcctaactactcgacagaggtagcccttcaaaggaccctttctaatgcgc

SEQ ID NO: 24608 - DNA, 579 bp, Zea Mays
cttgactccaaagaccacactccaaggtcgacgatgcacgagacgctgctcgggataactctaatcccacatttggattgtaagagcaaacgtccatcataccaccatctgttggctcggacagtagatcttcaggtaccacatcctcgagagcctgatcaaagttagctatggacaattcctgcagaccaatgagagcagacaaagctggagaaggaatatcgctactctccccactgactatgtaacgccgactgttcttccgaattaaggggatttcctcctcttcttcctcatcctcgtcaacaatacgaacaacacacccattggggtcagctctggccggatcacacccattgggatcagcatcatcaaggtcacacccattggggttagcttcagcagggtcacacccattgggatcagcatcatcaaggtcacacccattggggtcagccccagtaaaaagttccacgggtacttcttcagcagcaggaacagaagggccagcatcctgattcaagcacgacactcgccgaagcctcctctttttcttcttcccctcggcaggagcagttg

SEQ ID NO: 24609 - DNA, 305 bp, Zea Mays
gcgcacgggaggatgaccaccggctgctagagactacctgtcagtgaggaggcaaaagaatggtctacacaaaaagcacccaccgttggataaaccctgaggcaccgaggccaaagtcaagtgggttcgtgcccgagactgactcgttataagtggtcggcctcattaactacgtctgacatcaggccgcagtagagagccggtctacctcactcatgacctgcgcaacctctcggcttacagcgcactcataacctgcgcatccctttggtcaccagcgcattcttgacctacgagcccctcag

SEQ ID NO: 24610 - DNA, 672 bp, Zea Mays
aagtgaagaacacgaaacaaacaacaccttccctcacacccctacgtcctcatgactatttcattaacagagtagcaacaggtggcacttctcacctatctgatcagaacttgctagtcaaaaagaaaatgactcttcaacaaaatacatagtttttcacgcaaaacagttcttaagaaaaagtcagttcattattggcaatacgtaaacaagaaatcattgaagacccacaaggaaaaaggtatggttttaaaagaatcagtcatacgtcacacgtgtatgtcatcacttcacatagactaacgagacaaaatcaacatgacgacaaatgtagcataatccacataataactggaaactgataactacgaacctcaaacatgccacattgcttcattgcataatacatcactcacaggctactatcaagcctattctctagataacaaaagcaacttctagctccaccattatggcaactagtaaaaccgacaaacgtcaggtgcagacattggctcaatcgatctagctattgattgatcagctgtacaactttaccctaaaccatagatcgcgacagtctaacgataaatggatcagctacccagctcaggtcagcatgccagggcaggccctagacacatcgcaataccagaatcgtagccatttgct

SEQ ID NO: 24611 - DNA, 403 bp, Zea Mays
tatggtggaggtaaatatgtgtatggatatggcataggtggataagggggtggaggtgtccatgtaggtatgttaggtctcaattggacaatatgaccttctatttcttccgattggtggggtggtccaatcggtcttacctgacattgctcacgaatgggcgagcgaggtcgctttgctggccggtcactggggtcggccttctttttcacatatttggacaataattgatcaaaagttgggccggatttgaccagccgaccagctgctttaaatgtatttgttttccacgtatctatctttggtcatcgtggtttgaaggtacatggtcgttgcaggtcttgagtatgatcggaccgtccgctggaattctccgggccatccggtgttgtcccgaatcgtc

SEQ ID NO: 24612 - DNA, 417 bp, Zea Mays
tgtggagggtgctggggatcttcctagtgcgagtactgggtataggcggcgaagggtggtgtagaaacacagtgtgggtgatttttcgcgaagtggtatgcgtcgtcgtatggggatggagcgtggccgtctccgagtagaccgggttggtaaacgagaattgttgtcctcgccgattggggcgagcataggcgagggggatcttcggaatctttttgagggtgaggaattgaggataatgttgttcaattacagggagatgggtatcatcgcgaaggttgagacgatgtaatatgtgatgccctcgccgtgtgtatgtaactgtaatttgtatggtaatgtggcctgttggctgtattcgtatgcctatgttgatccggctgcgcccgtgggcgactttgcacggagtgtcttttt

SEQ ID NO: 24613 - DNA, 333 bp, Zea Mays
gcgtaagccctctataaattgatggtcggttcagctgcgctatgtcatcatgaaaccaaagcacccgctcccaccctcaatcattcgctagagctcacgaatttctagttttccccaaatcggttcatcccaccgcaagaacatcctcgtcgtggccaatacaattgaggtcaattcaaaccttctgctcccttgtttgagttatctcacatacccgtgatactcatcgacccgcccaattgaactgagctgccttagatcatcgggaacacgcttagtggtccgttgttgccgcggtcaccgtgggcagagcactgtggggctccaatccag

SEQ ID NO: 24614 - DNA, 409 bp, Zea Mays
gaaaatgatgttgaagcatgccaaaaggctttcagcaatgtttgtgctttcattggcacaagagacataatccaagagcacataggctatagagtgtggccacttgtagatagctaggagctgctgaaggatactgctgccgggtccaccgaaggtggattagttcgattgaaatatacctttagatttagggactggtttgacaagccaaatgacgattggctgaaaagtattgaggctattagcaacgagttacttggggcatacaccagagccgaagatgatgctttatcctcggccttcgggggtcggggcaagaaaagattgaacagtgtttttgatgcaattggcttcatataccctgattactgctacccattgcgaaggcaaggaaaaaagagaaaaactg

SEQ ID NO: 24615 - DNA, 284 bp, Zea Mays
ccccgcggccggacctcgccggcgcgaagagtacctggcaccccggtgccccaacttccaaattgaccacggctacacaatctagagatgaaggcggagcttcgaaggtgctttttaccgaaggatggcagcgcaggggctccgttccacgtgatgtcgcctctccgccacgacgcctgagcaacggcgagccattccgccacgctggttccgggttcctgagcagtgccgccatggccaccttccttccgacaagatggatcccagggtaactccaccgagga

SEQ ID NO: 24616 - DNA, 354 bp, Zea Mays
agagcgcaggtcacagtacgcaaattttgaaagaaagaatcaatgaaaacttgcagagacaattcatgacttaaatagtactacttccattctcaaatatttatatttatcgttcgtcggtttatttttaaactaaaacgtggtaaataaaaaagaacagatggcgtagtagttttaaaaatttagtatgtttatacaattcttgatgcatatattttgtatatgtgtctaaatttattatcattcgtttaaatatagacataaaaaccaagaaagtgagaggagtactatgaatcaatgcatataattttagcagctccgttggtccagaaattcagcagaattacagagact

SEQ ID NO: 24617 - DNA, 323 bp, Zea Mays
agctcatccctatatatataccccttgatgtacacgacgtcctcctacctttgactattctttgagcttcgacgagccggatgccactgcggtagcgtggctcgttcgacggtggcctcctccaatccggtggctttagggcataccccaataacgatatcatctgatccatgtgttatgcatcctatgatatttttatgtcgaccactacaatttttatgcattccatttgaggatttcatgatgatgaaaatgttgtctatcatctgatccatgtgttaaccactagccttatgtagtgaatcaacatttacgcaatatct

SEQ ID NO: 24618 - DNA, 450 bp, Zea Mays
cgacattgaagagtgtcagaaggcctttagtattgtgtgctccttcattggcatgagggatttgattcaagagcacatagccttcagggtatggccacttgtggagagctaggatatgccgaatgagaccactgtcgaatccagtgaaggtggtctagtccaattgaagtatagcttcagatttagggagaagtttgatgagctagacgatgactggctgaagtgtattgaagctaccagtgatgagctactaggggcatactccaaggtcgaagataatgctttgtccgcagcttttggggtcggggcaagaaaagattgaacagggtatttgatgcgattggctttgtataccctgattaccactacccgctacgagggtaagggaaaaagagaaagactgccgcttcggcaccccagctgaaccgaagagcaaaaaggtgaaggttt

SEQ ID NO: 24619 - DNA, 311 bp, Zea Mays
tagtcatgaaacagcagatgtctgctacattattgcaaaatatcagtgattctgtcttcctgcagcttgatctaggcatagtatacaagttatgcgccaacggggacaagtcttccctcttcctagaacctggcatggatgtaagaaaccaaatgcttgtgcaaatcaaagtacttggtcaagtcttctgttctaaggcccaggccccagggttttagtgctgaggaggtatacagcatttttgactaagtgggtgaaatattgctgcttccagagtacagagtgtggtcatgcaaacaagaagctaggta

SEQ ID NO: 24620 - DNA, 717 bp, Zea Mays
ttgtccagctgctgcagtgcgcccaataggtttggcgctctccggtgtggaccgccgcatggatctgatcgccaacccactacttcccctcgccatcctccattcaatccagcggtgcgggtcgtcctcgcctgcatggctgcaccgcgaaagctatctggagattagaatctcaccaagcacggacgtcatgagaagagaagtggataaatgtcgctgctaccccatccgcgataaacacatttcccctctgatccgtaaaagtgtgtagcatcgatttacaatgagccggggctgtggttgtgcgggggaagcctaatggctcgctggtggggggggggcagattccggtcgcgccgccactatttttggtcttggctacgggaggaggaagaagcgttgtgagccgctgatgtgtaaatggatggttcagatcaaaactgggcgcactacttcagcttggcgcgtggtggccgttagatcagcgtcatcggtccagatttggggaccctcataccgatttggtggattcgatcgttgtcgtagatcttctatccgagggttctgggcagatcaggcaaacataaaatcgggatcttaatccgatggcctgatgtgcgtaccagttcgcagggctcagatttaatctgagcgcttaaactaggatcggacgaccgaagcctatccatacccccttcgcgatggcgctttacaaat

SEQ ID NO: 24621 - DNA, 326 bp, Zea Mays
gagaagtgttgcccatatccttacccgtgggcaagatttcttacccatatccgtgcccatcgggtatgaaacccgcggatacccgtgcccacgggcagaattgccatccctaccgaggcctgcgaccaccatgtgtggccgtggttgggatgaaccttccccatcctccatgtgaccaaaccctaaacctctcttagtgagaggtaaaagaggagggacaggagccgacacttcttcttgtatctcgtccgcggtctgatctgaatcactctcaatgatgaacaacttccttctttgcaccatcttgaacaaacgacacaaggaat

SEQ ID NO: 24622 - DNA, 355 bp, Zea Mays
gggcaactgcgctagatcatcccgaagccatagcacccgctcccaccctcgatcattcaccagcgcccgcgaatttcaaattctccccaaaacagttcgccgccaccgcgaagaacagctccactgtggccagccctccacaggtctgctcataccctctttgttcctgttctagcatctttgcatgctggtgatgctccccgacccctttaattgatctggaccgccatgaatcattgggaatgcgctcaacagtccgccatgttcacggtcgtcgtggctagaacaaaccttgtgaccattagtgaaattgtgttgggggaaatggtcggggtggatccaatttcgtgtccgc

SEQ ID NO: 24623 - DNA, 1198 bp, Zea Mays
ataacattaagtaccaaatacagggacctaacatccctctcgcagcttgcatttacggtatatttcttggatttgtacaatgtacaccacacatcagttgtttttttccctcaaactatgcatgagagctgtatgtcatttcattaaaaataaaaaggttacaagagctaggtgaaaacatccctgcagagtagttcttaacgaaagaaattgtatctttgtgggtatcaaggttgatatttttttagcaggcatgtggaggggttccgtgtgagtatgatggttcaaaaagttgagcacatatgtttaatctgataaaaatatgtcattagatggttcatgctcaacatgttgtgtagctctttttatggtagaaagtttagcttctcatttaagtggaggcattgatttatttccacatgcaccctgaataaacaaataggatgttttttctatcaattttattggagatcaccttaatggtgaatcaaatttaatgacctgattataccttgatggtagtgataacacattatattagggaagtaactttgctatgcccaatgagtattgtggtttatgatgttaataaattcagttcataagatcattggtgtccagcatgatttatggagtgctcacctgtatggttttccttgtgttttagcttcctatgttttttaatctctgatgtaggtgtgggatgtctcatctggtgagaaccctgaggttgtcggtggagccaccatatttctttttaacagcaaaaggcagcttaaaacaggaagacagaagctgcggctgtggcccacaaaggaggcagatggaggagtccccaccacaactcctggcaaggtaacactcagatctacttttcttgaactcaggattcatctgttttagtcctctcccagctaatctctcacttcgtttttacttattacttcaaggtggacttaccttttttctatgtaacttataggttcctaggaatgagaggggtgagatagaacgtttggaaaggcttgttaacaagtatgagagagggcagatacaacatgttgattggcttgatcgtcttgccttcagtgctatggacaaagctatggaaaaagagtgtgagaggaaggccaatttgtaccctagtctggttgttgaattgtgcagtttcgaacatagaattgtcttccaggttaac

SEQ ID NO: 24624 - DNA, 627 bp, Zea Mays
agaaagtaattctggttaagtgcacttgacggtctctactcctaacattttttgcgcgagaggacacggagctgcaacgaaaaaataactgtcacacgtgggcccatatggtagggcatgcggtgtgcagaacatgagaatgggtttgcacgatgggaatgggtttgcacgatgggaatgggtttagcctagccgcgacgggaaaaaagagacagaggctgtcacgtgggcccacatgtgcagggcgtgtgttgagtgtgcagatgggaatgggttttcacgagaggaatgtgtgtggagtgtgcaaatgggaatgggtttcatgacgaaaatggcagaacatgggaatggcagactactcttagagccttaatctctactactatataagacgatagtgtagacgtacacacccagagtggtgcacggttctgcctcccacgccgcgggccccaccaaggcgcagctctgctccctctcgcgccctgcctcccatgccgtgggccccaccaaggcgtagctctgctccctctcgcgccctcccaacgcatgcaacccagcaggcccatttcctcgccaagcaaaacaaatatcaacattacctaaatcgttctctaccaacgccat

SEQ ID NO: 24625 - DNA, 829 bp, Zea Mays
aatcgtgttggcggccgagaagggtgggggatgagtcactgcggcgatctaccgtggcgatcgcagagcaatgagctatagtgctcactgggcagtcaccacggctcgcgacgacacgataaaggtcctaaggcatggcgccaccacggtgaatggcgtacatgccagtgacggccactcggccacgtcgccggcgcgagtggatgagtgacagagcgcatagtgcctccaagttcatccgcagcaagatcttttacccgaggatcgttatccgtgtttaacaaggcacgtatcacggcgctggcgcgaatccgggcagaaggtcgtcgacggcgaggtgaactgcacctgtgatcttgttcaatgcactgtaccatcgcaattccattcatttggtctgatagagcttatttgggggtgatttgctccaaatttcgtgtagtgacctgaccaactctttgcatcaaagttgtagccctataatccagctacaaatcgactatagagacctggctcatttacccactcctttgagcttgaatcgagtccaaagttgatcaaatcccactgtcagtaaaaattcaggctacaagggtgactgacagcagtacttggagtccatttaactccatcttttgtacaacacttatgtctgatgacttaaccaaagttatactcctttagtagttctataattttgatgtattgaccctagaaaaattccttgtaaattggaagatataaagctcaaaagtttacccatttaaactgaattcaaacttagtcacatatggtttatagggtgctttttgcaaatgggtccaaactc

SEQ ID NO: 24626 - DNA, 307 bp, Zea Mays
cacgtgtgcgcgttgtttctgcccgagttctggcgcgtgtagtcactcgtccatgccttctcttgccttggtcagtgcacatagcctcttccccttccctcaagctaccaatctcgtgtggtggtcaaatgatttggcctactggttccagagatatggagcactcaagtaggatctatctcatagcccgagcccgaggcaaatccttggttttgtcgtgtctaaggcctgaatcccaatgtcatctttatatatatgctagaggggttagtttagcatatatttgtcaatgggagctcacggtttt

SEQ ID NO: 24627 - DNA, 3008 bp, Zea Mays
gttatggaggagctccgctcccgccggcgcgtccgggtctcggcgaagtaattctccctgcacacctacaactttatgtatatcgccggtaccattttttggagccagtgcattgcttgagctgcatgtacggttgaaccctgaatttctgtcaggacatctgaccttttgccattgtgagtggctggctgcacactcaacctcttgattccccccctccgttggtgcatggggaacaggaactgctgtcaactatttcaccataatgtgcctactcttgtgtttacttcaaaaattcatttctataattttgtctatggcgagaattccagaaagcatataacaatgtatgtcggtagatgggcataaaatgaggtaatttaggcacatctcaatgaaagttctatccgagttccatcttcatttaataggttgctatataagcatttctaatgacatgacagcatttccaagaagtgagagaagatttgagtttaatataaataaactctcttggcttgatcaccaactctaatagagtcatggaattagatgtacatacgaaacaatagaataaagccatgcattgagagtgatcgtttcatctatatttcattgcattttagctggtgtggcattcatggaaacaacgttatgaaactctccattaggatggctttcaacaagctaatccaatatcacagccatttatgtgggtaatatacgatgatgctccccattacatggtgttttctcctcttcttactttcattttgaaagatttttatcgtaatttctgaaatggttcatatggctattaaaattggttatcactatttcatttcttctaacaataaaactcactgaaatttactgttggaatttcttattctacttcaggataggattgcagggcacgaaggaattgcctgacaataagatagtcaagagaacattacagaaaggattgctgcttgaatttcagaaagatcctgagagatctttgcttgctgtagttgaaaggcctgatggaaagaaaaactggatggtgactgatcaggtcgtttttgaacggatagctattgcttgtccagttgactatccagtttagttaatttatacctgaacatacatatattgttgttatgggttctctggtgacatgacttttacttttgtatagaatggtgtcatgtcttcgataaagccccagcaggttacatatgttgtacctggtatcatgaattttgactattcaaaaatagacgaatttcttgagaaaacgcaaaatcttttggtaagtattgctgcatgagctgtacatgtgtataatgtgcttcaggatggtcataatatttgttaacaggacccaactattttagaatgtgcttggatggagctgtctgagaaggataaatcaataacagttgaggaatttgcagaggtcagaggctcttcaaatttgtttgattccctaacttttttctttcacatactcatatgttttttgtgatttcctcagatagtgtatggtaccaaggagtctttggaaagctactgtgcacatctcttgttgtcaagggatgtagtgtattttgtcaaggtagagagcagagattattccatgtaccaacctcgttcacctgctcaggtatatttttctagatatatgtgtgagtaaatcatgttaatattttagatgattttgacaaataagattgcacatcttttattgtggtaccatttcagggtactgtgtctagttgttcttgtgataactggaagtttatgtccatggggcagggccacctgtagtgcagtcaatctatacaaactttaattcttcctggaagaacatatttttggggtcatatatttgttttcatcttattcatctagcttcacaattgagtgctatatactatgtaacgcccaatattgcaatctggcatgtgtctttagatatgtatttttacttatgtatatttaatgactgcagatttcctaaaattactcttattcattaatacctgcattgttgcattgcttttatttgcttttatctggtagtaggtagaggaactcctacgacggaagcttgctaaagaggccgctgataaggaactggaagaatttgtccatttactcaagtctgccaaagcattgcctatggagtccaagcctcctaaagcgtcatggttggtggaagaaaaagtcaggcaaaaaatcgagtctcttcaagcatatgcagttgatgcatgtgatgatgaacaaagaagactagcaggaaatgtaatacatcagatcgtactatctttttgccatacacaacatcgtagttgggtcttcaattttcttacaataccgtggtctgctgaatgtccagaaacgagaaacctaatttataataaaattagcttaatgaatattagtgttgttcatgaaagtctgtagtccaaacacattttaatttataccattctttattgaatgaggtgcagttttccatcttttgatgtctgtgaagttggtttttatttttaaatttaatggcagattctcaaagctatgggattcacgaggacatcatcagctgctctaaagcttcttataaatgttggatacttccctgtgcatgtcaatctcgaccttttcaggtacgatgtccgtataaggtacacagatgaagttttgtcagctgcagaggagcttctggtggacagccctgacacagacatggtatagttagttactactcaatgcttccattctatatatgcacatataaattaccccattttgatttttttatcttttcagcatatcaggaaggatctttcaactttgaaagtgtacgccattgatgtagatgaggctgatgaagtacattcttatttcttttaccagcatctttccacagaatgaattgttagttaccaccaataaatctattaaacatttggatttcttggtgactcagcttgatgacgcattgagcgcaaccaggc

SEQ ID NO: 24628 - DNA, 446 bp, Zea Mays
cgccatctgtgcaatgtcttctgaataccttcatgtccactttcatgtgcttcagctagcaaggaagaccacacagaagaggaagcaggaacaaacactttcccattatacaataataacccatcagactcagtccaaccaggaggagccgtcccattctgcagccctgctcgcagttctataccttggaaatcattagccaagtctgcccgaagtgtgtcaaaaagctgaaaaatcggggccgagatgctgtgaagggctgcaacatcttcatcacggcgggataaagcgtctgctgccccgttaagtttcccagggcggtattccaccgtgaggtcatacccaaataatttactgacccatgtgtgttgcggaatggtagaaagacgctggtccaatataaacttgaggctatagtgatcagtccgtaccgtgaatggacgccc

SEQ ID NO: 24629 - DNA, 361 bp, Zea Mays
ctagattgcagtgtaagtgtccttagaagcaaatcctggactgctgccccagccaagcgctgaacgtcgagagtcggggcagccagcccaatccgcatcggaatacgcggtgagggactggcaactcacttaacacaactagattgcagtgtaagtgtccttagaagcaaatcctggactgctgccccagccaaacgctgaacgtcgagagtcggggcagccagcccaatccgcatcggaatacgcggtgagggactggacagggccgactccaaggtggaggccggaggagagagtgcccttcaaatagcgcaggatccgcttgagcagcgccaggtggggctcgcgcgagtcgtgcatg

SEQ ID NO: 24630 - DNA, 390 bp, Zea Mays
caaaggcgaaggaatcagatgcgaaatttaattctgtgcaatttaaaaaaaatgggctcaattcaagttctgaggcgaaagttacggtcgttttaagtttggacttcgaatcagggtttttggcaagacactagaagggtggggcggttttgtgggtatggtcggtttgggtgattgggtcggtttatcgagattgagtttgtgcaatgatagtggaaggtgatgaccaaactgacccccaaaaaatctaacccagcaacctaattagggttgttggcgaggcaaataaagggtgaatagggtcggttttgtggataggtcagttttgtggatatgtctattttgggaaaggattggtttgtcgagattgagtttgttgggtggcagcgg

SEQ ID NO: 24631 - DNA, 691 bp, Zea Mays
aaagggcactaaccagcatttgccatctccaaatcagatacccgcggctaaagcagcactggattccaatgtgttagagacagagctctttccgggacagaggcaccctacgatctcagctgaccggccatctcgtcaaccaaagcatgacattgaaaacaaatgagtgcaaagacagtatttcacccagagtatagtcaggtcgggaaaagccaaattacttggagattggagaagaacgaaggaagccccaagttatgggaagtcagttgatgacttgacgaaggattatcaaccgaggcaatctgcagagcatcattggggaccaactcagcatcaccagcaggaatcaaaactctagcatcaggtgcgccagcctctaaggcgacttcctgacccaaagcacgtgctactgccatgcaatcagaatgtggaggggaagacccgacatggacatccatggaagtatgagaaggggaacccgctcggacaccctcggggactgggtcatagctcgcgctgcccacccgagccggatcattaccggcaacacccttgggggctgggtaaacgctggcaccatccttggataccgggttctctgtagcagccacctctaaggctgaaggattttcagccacttccatgtgaacagagcaatctagatcaacctcttgacttttaagaccgc

SEQ ID NO: 24632 - DNA, 312 bp, Zea Mays
taacttggattagatccgaaattagactgggctttagggttactggtgggccttggagtcagaggcccaccataacacctatataataaagaccgggggcgcggttaggttaaccctaattcgcaaccagcaaacgagcagccgctcgcctctcgccctcgcatagccgccgtcacgaacctagcagttcggtacgcggcgcttcctccctatacgtgtggatacctcgaaggtgctgcatctggagcactatgacgaactaggcgaggacgtgaaggacgtcagcgactgcacaacactgctcgacgcgtt

SEQ ID NO: 24633 - DNA, 391 bp, Zea Mays
gaaattttgagtggtcgtggggatgtctgcgccttctcaggtgccaggggaatcgtggctattttggagaaactaggttgtgaccacgtgaaagctttggcccaaactgaagctaccttatctattgaagatacaaaagacccctcggccgaagcaagcttagttggcgggaaattcttcactgacatctgggaaaatggtggccgagagatggcgcacgagataataaaaaagagtgaaaacgattcttatgatgcaaaagaagcgacgaaggcagctgagaaagctacggaacttgaaaggcggataggtattgcttaattgcttttgactttgtgttttatttctgtgacttcgaactcatttatgttttgtatcgcagctgagctat

SEQ ID NO: 24634 - DNA, 436 bp, Zea Mays
taccaagtgttagaattccggactctgaaagagatggaagaaagaacacgcacgcgatctggacacttgtgtcttggtgctgtaagctgcaacattttctgttgattgtattcaatataaaaaggaattacatgttgtattacaaggaaataaaataactagccaatcccggcatactcgtgatgagtggttgtcatcccaacctcctgggtcataccgtaatcagtggcttaccttctataattagatgctcaggactttattcaaacaggtgtggccggggcgggctggattatttaggctgcagcccaactttgttggcccatcaacttggcagagcttgcaaaatttagcatatggctagattagaggcccaaatgtttgtaagaggctggaaaaggcccatttatatatgcgacagtaggcgtaataaaat

SEQ ID NO: 24635 - DNA, 342 bp, Zea Mays
cgcacacataaaaacagaagaacccagggggttcggtatacaaatctctaagactcagggcgcccaaatacggacggcgggttgattcctaggtttgccagggtcctatgtgcaaaactgcgcccgcgaaggggtatccgcagatatgggtcgtccgatcaagagctagcggctcggaatagatcggtgtgaattatgatctgtgatgcgttcacaatcgttggatcagcaacccgcgttctagattcaaagtgaaccagaataccccatcgcccgcatgattcccatcctatggctctaatatcatatcgtgaatgggtaagctatcatctaatctctgcc

SEQ ID NO: 24636 - DNA, 359 bp, Zea Mays
ttgaggtgagaagtgttgctctgagcgtgtaataagagggcggagcagggagggcactcaatttatagaggtcggctacgggtgttccgaattttagacgaaggcaagctcacgtcggtgaaaaggtgagtcactggagctcgtctaccgtggcgctcaatggggtaaggactcggggcagtaaatggccgtccaccacgacttactgcgacgtggaatgatggcgtatggcatggcacgatcgggtaaacggcggccatgacagcggtggtcgcgcgaccacgtcgccgggcaagtgggtacgacgagaccggctcgatccacaccccctcagatcttttcatcttcgcggtaacatc

SEQ ID NO: 24637 - DNA, 335 bp, Zea Mays
ttgagaaaggtgaagatgagaaagggaaggaaaaggccttggagcctaagaaacatgaagaaaaagcagtcttctagattaagcatattggtggaaagctgcttatgaagaagaatcagatgtgttggtggaatatgttgaagctatgggatatccatcaagggcaactatatttagagggagtgaaagggatgtattggtgtgtgtaccagaaggactgaaatagttaggaatgtaatgcgcaacgtcggcttcccaaagttggaacatggcctctacgcattgaagaagcgaagaatgactgaatgtttagcctattccaatatcaaggttag

SEQ ID NO: 24638 - DNA, 625 bp, Zea Mays
gaaggtttgaagactgttgaatcaagaacaaactttattaaggaagcttgcccagttattcacaagaatcaagtgaattcgtgggtagaaggtggtcggttcagaagaacgctgaagatcgaaccctgacaaatatctgaagaacaccaaaagatctatggtgctgttgctttggatgaacttggatgagtcggtcaggatttgatcgcctgaaagtaactcgatacgtggcacgactccgcgaacccagccgcatgtggccggagttacctcaccggcggtcgccgtgactcagcgttgtccgtcgcgctgtcgcccatgcttcgatttcccttactttgcatttcctctacgtggtagtcatgcgcttaccatgctatctgcggccgccgatcattagccgactcgccgtggctataaatggcaccatggtccatgacgaggtgttttcatctccaccagtgaagctcagtcgaagtccaaattcgcgaaattccctccatcgttcccaaaattgacagtgcatggtgaaactatagtcctttacggacgtgtagccttaatctcgcctcccaattccacccgagaccgttgcggcttcgtttttacccttttctgttacccg

SEQ ID NO: 24639 - DNA, 297 bp, Zea Mays
ttcgactgaaatataccttcaggtttggagaccaatttatcgaaccagacgatgactggctgaagtgtatcgaagctacaagtgatgaactgcttgggctgtactccaaagcggaagataatgcgttatctgcggccttcggaagccagaaaaaaggctaaatagagtttttgatgctattgggttcatgtaccctgactaccactacccgtcacggggcagaaaagaaagagtgcaacttccgggaaggatgttgcttcagctgctccaagcgagcccgcgccgaagaggaaaaag

SEQ ID NO: 24640 - DNA, 309 bp, Zea Mays
tccaacctctaccacctcccccaccacgaggaggacccagagaacctctacaaccttagcagcaggaaggaggagcaggcagagcattcccgcgcgtcgatggagaagtcaatgtcatctttggcagacacgggtcacaagagaacaaaaggcagcagaagctcaacgatcgacagatactggtggcgaccaccagtgctcccgccccctatcggtgattagaacacccgatcacctttactcgggcggatcaatggcttaactttgatcatccgagcaagtacacactcctcgtcgatccggtgatcc

SEQ ID NO: 24641 - DNA, 330 bp, Zea Mays
ttgcgaattcctgcagcacaccttcaaaccgtttcccctctaaactggcaagatcattgcatagatcagccttacaagaatcgccaagctttcctgcctcgtatagtgtcacagcatgcgacttcaaacctgcaacaggtcagtggcaactgtactgtcagttagaaagttcagacacatctcgctggatatcagtgatatcgcgcgtagatttctgccaaacatctgtcaggcaattaaatggaagggaaatatatctaacctggagatagtgagcccatcattaagtatgaagttacattagcatcgacaatgaagcccacataagcc

SEQ ID NO: 24642 - DNA, 328 bp, Zea Mays
cttgagtccgcacccaccgcactattagagacacgtattcctcttctttcgaagtaacccgagagtctggcacgaccccaaggaaaaacccggcgaggaagagggaaggtcgggagcgccgccataggcactgcgcgtgatcgtcgttgttcgaccattgacagggggtctgcagtgatcgcctatgcacgcagattcgggataggaacctgccgtgatgaatcgtgggcaggtcgccatcaaattcctcaccgaagctcagaacaggtcagcataccccttcccgtgggtggagctcggtgcgccaccaacatcggtaagaactccc

SEQ ID NO: 24643 - DNA, 555 bp, Zea Mays
gaagaatgtcacaccgtcagggggaggagacgacgaggaccctcctcgccccttcagacaggtcaaggggaacactgtctatcttgaacagcaagagggcaggaagaagaggcgtatggacagagccgctcgtgcagcacttgcagcggcagcggcggtagatcaggctgaacggggaggccagctccagatttcttctaatcagatagcctatcgagtttgtcgcctcatgtctcggcctcgctccactggtccccccactccttccaccacagtctccactccacctcccacttcgccagctcttgtcgctcccgagccatccaccacgcccgctgtgtccaccacctccaccactccaacttccactgctctagctctcgcttccgctccgcccattccaccacctcgcttcagggagcatgatgagatcgaggtgagaccgcttgctgctgatcagcgtctgcttgatcttcagcgagccactactgcccgggtatgtcggttcaaacacgtactcatggattcttggttgccagcccagagggacccaac

SEQ ID NO: 24644 - DNA, 645 bp, Zea Mays
gtcactctatttaccttgctgctattcgttaggatcaattgaacatcagggagattacacagtggatgagttctacaactagatgtctgcaatttggctttagctcgatgctcttggtccgcagttgtcccctagcacctgtgagttttgccttgatcagttgattgaccttcagtctcatcggatatatgacttcttgactcaactttgcaatgagtttgagcctattcgtgcccaactgctccctcgctatccttctgtttcattgatggatgctcttgcagatgttcgtaatgaggagacttgtcttcgtgcagctgttttactgccatcttcagtgttggctgctcgttctgtgttctcttgacctgctattactccatcacctttaccttcgtcaacacaccctcctacacatggcggggggcggtggtcttcactacaactaccatggtaaagatggtcatgtaaaagctttttgctacaaaaagtagaaggtgcataaggctcagactcgttcttcacaacctactagtagtgccagttttagaggttcttaggggagttttgctgattgtcactaaggagatgctgatgctccatcgcattgctgcctctttactgccaggtgctgctagttatgtg

SEQ ID NO: 24645 - DNA, 469 bp, Zea Mays
ctgacctctgcataatcccaaagagggcggcgaccattgcacatcggtgtcttgtagcgttatcagactattgctcgtgtcagtaagtcgagcccaagttacctgcaagaaaaggtgaatgctctatgacaagcagactgacaggatggttcttcgagtgtatttcttccactttggtggcaccagtttgtggtttcaccagtcgccagttgcctgctacctcgagtaagctagaaagatccctttgtgctcactacaaccaagcaccgttcagcttagcacaaataagaacagaagcatagaaaggaaataattataaaatcatttgactcacgaagctagaatgtgagatgagccctatccctccatacctgtaagtcactgtacagtacaatagtatggtacttcgtttccaataaaaagatggaaacccataggagtcttttaagcacagtactacagtaggata

SEQ ID NO: 24646 - DNA, 749 bp, Zea Mays
atcaggaaaataaaaatggcaaaagtctactacccgtacatgctttagaatttatattgattgatgcaaaataaaaaatggcttacaaacttatccttgcaaaatcagttatcctcttgtcaaaccattaggaaaatgcaagcaaacgttagtctaggaagcaatgtaacttacgccaggtaaacctgctgatatttttaggggcaatagttaaccatggcacagaactcatccccacaagcagaaagcatttcccaacatctcccaccatcaaccacggctctttcttccccatctctctctcacgctcaaccagccacgccaagccaagaactggtggcgccggccactagccggccctccatctccggcaaaaatcatggcgagcagcggcccaatcctaccttcttcactgatcggcagttgaaaagggagagggagcagtgtgcacatcacagggagattaccgcacgatgtctggagaccagggggcacgcggccgaggcgtagcttgagcctggaggagagcctgaaggatccgtgtccaagaggtccggagaaaatgacgtctactgagtagaaagggacggcagagtcgaagttgcagacgacgacattgcggttggcagggcgaccgctaggagaagtagggacggcagcgtggcgaccacaagacgaccgtcccccaaatccaacgaaccctcaacgaatcgagacagtgctgaggaggacgaacctttatatctgag

SEQ ID NO: 24647 - DNA, 599 bp, Zea Mays
ctcggttgctgcgcaggttccgacgtttgggcctgcgcaagcaaccgctgctggcaatactgattttgtggcggcctcaaccgtagtgcctgccgatgataatttatttgtctctggatctgagtgttttgagtctgatggtgagtctgggagttcattttcctggacggaggagtcatcggatgaaggcttggattattttgctgcgttagatgtggccacagcgaagtcttcgccgcgtgtggagggtgtcggggctgctgatcttcctagtgcgagtactgagtacaggcggtgaagggtggtgtcaaaacatagtgtgggtgagttttcgcgaagtggtaggcgccgtcgtatggggatggagcgtgtccgtcttcaattagaccgggttggtaaacgagaattgttgtcctcgccgattggggtgagcataggtgagggggatctacaaaatctttttgagggtgaggaattgaggataatgttgttcaattatagggagttgggtatcatccagaaggttgagccgatgtagtatatggtgccctcgccgtgtgtatgcaactgtgatttgtattgtaatgtggcctgtcggc

SEQ ID NO: 24648 - DNA, 404 bp, Zea Mays
ggcaagctcaccggcgatcaccgaatgggctaaggtgactcactgcggcgtggttaaagcaccgaggaacgtggcgcaaggttgtggggtggctaactccggcgagcctatccaaagcggccgtgaatcaagcgggtactgcggccggagtagaatagtggccggagtccatccacggggtgatatttcttacccccttgccgttatccaactgcgccgagcacgaatcaccgcggcgggcgtgaatctggatgctcggtcgccgacggtgagttatctgagctggtgttctgatctggtcactgtaccattgaaaacctgattcagagcgcctgacaggccgaattgcaatgcctagatctcgaatttttatgcaacaacttgccaatacatctgtagcaaac

SEQ ID NO: 24649 - DNA, 679 bp, Zea Mays
cttgcgatacgctctgctgcggcattgtcatccggttcttctttattttttatatacttgatgataggctcactccagtcatcagagtctgattctggctggctcaaagcattgcactcttccgcctgatccgagggaatgcttgggcgtgacacttcctagacgaaaactccgggtgggacctgagctcaactggatcttagtttcgacaacgcgtctgctactgcattgtgatctctttccacgtgatgaaattctagcccttcaaatttgtcttccagtttttggacggctgtatagtacttgcccatagaatcattcgagcaatcccagtctttatttatctgacttatgaccaccagtgaatctccgtataccatcaacctcttaatgcccagtgatatggcaatgttcaatccatggatcagagcttcatattctgctgcattatttgatgctgagaacgacaactgaagagcatatttgagttgttcacctctaggggcaatgaagaggattcctgcgcctgctccctgtagtttcagcgagccatcgaaatacattcgtcatacttctgcagcctccgggttgtctggtacttgttgctcggtccattctgatatgaagtcaactagtgcttgagtctttattgcagtgcgaggccaaaactcaatatcgt

SEQ ID NO: 24650 - DNA, 327 bp, Zea Mays
gcacaatgtagatgtccttcactagtatgtaatcatagctaccataggggcaagtatgatatgtcacgtccatgagcgttagatcatgtgccatcgagcacgacatagttggtagccggtatatttagcttcgccttcactccctttggttgctccacacacctctaacgccaccttccgaatgaaggttgccatcttctcccatatgtcgtttatgaattcttcttcattccaagtgtcgtctttgatagcccttttattggtgtctccccttttagtttctagcactttgttttcacaaaatcttggcttgttcatcgctacgag

SEQ ID NO: 24651 - DNA, 315 bp, Zea Mays
cgtttctggataacaggaaacaagttcccttactgtttttatgagtcgctgactgtttacaaaaacaccctccaacttctattccttcacccgacacgtcctcgacgacggcagcgcacggaggagctccggcgagcgcgtagaccggccgagcggggccaagaccggtgcttagctttggcgtaaaccgaattcactacctgaagaacgtttcccctaatttaatttgaagaatggtgccctattttgccctgaccacggcaaccgtgagtattgtggctaggcagtcgcgttcccggcgaccagaggattctt

SEQ ID NO: 24652 - DNA, 579 bp, Zea Mays
attttaaattagacatcacatgagcactactactttttacccgcgatcataaccatacgcatttagactacaacaagtaattcatcataacttcgagcttaaccaaagccatctaacaagttgattaaccaaaggaatggcatagcccgccatacgacatacacgtcggcttgcctattattaacgcagttcgagacaccacatgtatatatatcacaatcacttacgccatcgactcttacttaacatgagttggctaacgccatataagacttaccaaaccattttaaacattgtaactcgaaacatgggttgaagcaggttaattagtttttcttaaccatttctccactcgaattagttaacacacaagtcacttaaaacaccatattttaggagggctaacatagagacattaaaacatggcataaaactccataagacttacactggctaatgaaagacctaaagcacccatgtgcatatgttatcggactgttcttaaattttagcaaggattgactcatgaacactacttgcctccaataattattgggctgcgataacgctcatataaga

SEQ ID NO: 24653 - DNA, 309 bp, Zea Mays
atttatagtttccatcgtcggtggtgtccaatttcccgaggttgtgctggcgaccggagggaaacatggatactggtgctcgggataggtggctttcaccatggcgcttcctccggcgatcaccaaatcccttaacataactaattgtgacgtggtacagaacctagacacgcggcgcacgacagtgatcaaccaacggcggtgagctcttatccgatcgaccgatgagcaagtgggtacggcgggcttagccgcaaccgagctcgagtcgaccctatgccaatatttttacctcaccgtagttatccc

SEQ ID NO: 24654 - DNA, 365 bp, Zea Mays
gaactgatgaatcagggaggctttatcttcatgaccagtgacgattctatcgccatcaactaatttagccacaaagttctttctttttcgatgacgggcatgcaagtgaaacagcttggtattagcatcaccttccttgagccaagaaatcctcgatcttaaacatgctatagatcgcttgatggatgacaaccccaaaatatgcttctttagtctagatttaagccagttctctgctggtgttaactgtctttcatcttgtgcaacctcaaatttatgaagaacctcccgcgctagtgccaactgggactgaacatgaccaacctgcttggcactccaagcatggagacccctggcagtagcct

SEQ ID NO: 24655 - DNA, 573 bp, Zea Mays
gattcttggtggctgggttcgtgatgatccaacagagctcacggcagggtcaatttatactaagtgatagcggtggccaggaatttgagcgacgacgcgcggcggccggagggaccaggagttactagcgcacgattagtgtccggttaccgtggccatctccccggcgatggacataaggttacagcgggtcacggcaacgcgatggaggtgccagggcatgtggcacaaggccggaagacggcagtcaccggcgagcttatccaaagcgaccgtggcaacctgtacggtggccggagttgtttactagccggactcatcaacggcggcgatatttacgataccccgagcgttatccaaacactggtgagcacgaatcacctcaccggcgggaatcgtggcgcgagggtcgacgacggcgaggggatgaacctgagattcttcttcagttactgtaccatggcattccacttcagttaacctgacagagcaactccagggcaaattctctctagatttcgcatgacaactttatcatccctctgcaccaaagttgtagagctacaaaccagc

SEQ ID NO: 24656 - DNA, 434 bp, Zea Mays
ctaattcaccccctcttaggtgtcacccgtttcctacattcatccccctcgtcgctaggggagctactcatcatcgctcctagagggacctagatccgagtccgagtccatccaaagtgcgtcgtagatgaggtcctcgccgccaccggccatctccacgaactctaggtcatctgtcgtggggaggtggctgcatgccacgagggcagcaattacagccggggcgtggcacagtcaaggtggaaaggcgccgaagcctcaacgagaactgtcatggtagggcgttgtcactacgtcatatggcacagagagctctgagtaggatacgaagaagactaacagtcgtcatatgagcggtttggccccatatgaatcgtaatctgtcgccttattctatcggccttggaagatggggccagtctgggccctctgct

SEQ ID NO: 24657 - DNA, 296 bp, Zea Mays
aaaaaatgtcgtttggtgtctagttgcgcaaaccctatcaagaccatgtttctttccatagatccttgctcctaaaacttcatagcatttctgttaatcatcctagctgatcctatttgcctttctctccttttgcctagatctggtaatcctttttctcatgaatcatgttggctttatcatccgaatcttgggatcccctattgattctgcctcgttatctggttatctccaataacccattcacaagcatcggatgttgatctgcctaaatcactcatttctggtcattctca

SEQ ID NO: 24658 - DNA, 472 bp, Zea Mays
tttttcccggtccacgcgcgctcaaagacgcgatttggctgggatcgccttggcagggcatgggcatgcgcaatagacaaagattaactagcgcagcctcttgatccggacgacgacgaattttccttggatttggcaaaggtttgcgggggaaaatattccgatggatttgacactgccctgctcgccattcctcttgggattcgttgcggcgctgtaggtgggtacactactattaggtctttgttctccggaccagctgttgtggtagccactttgtttatccactattcaaaatccatcatgccagcctactagcatgaatgactcgtgtgtgtgtgtgtgttttaaaaaaaaaacagctcgtagctagattcgcatggatttggattcctgcttttaacaacgaaatacgattatgttactgcagctttcaatctgcttaccatactattgcaatctctctctcttt

SEQ ID NO: 24659 - DNA, 1276 bp, Zea Mays
gagagggtgtggagctccttctagaacgcggatgtgaacactgggtcgcgctgcggaattccgtgtaggcgaactatctcctcgaagaagaccttggcgactccttctgccgagtaggggtggacgagggggatgaagtggccgtacttggagaagtgtggtccacaaaggtgaggatgacagacttgcctttggcagtccatcgttgaagtccggcgcgatgtcggtccaaaccagttttggaactggaaggagaagcaggaggccgcctgacagcatgtggtcggttttgtagcgctggcatgtgaggtaccccttgacgaattcctgcactgcagcacgaaggttaggggcgtagaagtcacggcagaggcgatgaagagttcgctagatgccctcgtggtcatcattgtggatgtcgtgcactatctcctggagaagggcggaggacgacatgatgtacagcttggagtcgaacgtgaccatgccgtccaccatgccccatggcgtcacatggcgcgtgtactgatgtcgtcgctgagggcggccagtgctggatcggttctgtgtgcttggcgcaagttgtcgatgaaggagaactgaggtgccgccatcgtgaatgctgaagcctcttccatgtcgcagcaggagggcatcggcgatgatgttggtgctgcccggtttgtactgaaccttgaagtcgaatcccagtagcttcccacccaatgatgttgagggatggttgccaggcgttggtcgaggaggaacttgaggctgtagtggtcggtgcggacgcagaaatgcctgccacacaggtatggcctccaatggcgaacatcctatacgaggccaatgagttccctcgtatgccgcaagggaagcatgtcgaggggccactggcctactgtagaatgccaggggtctcttgtcttgcagcaacatggctccaaactcgtaggaggaggcgtcgcactcgacgatgaaaatcttggtgaagtccgacaaggccaacacggtggcgctggtgagtgcctggaaggcggctgtggctatgtccgtccacccaaacccggacttgcgtagcagtgccgtcaagggtgcggctatgaggccgtagtgctgcacaaatttgcgatagtatcccgccaagccgaggaagctgtggagcgcccgggcgaatgccagtaccggcttggatcttccccgcatccatgggcacacctgctgagatgacgtgtccacttggtacgcttgacgaagaggcgatgttgttgga

SEQ ID NO: 24660 - DNA, 461 bp, Zea Mays
gagccgatacttcacgaataggtttatatgggtaaatatgagtgaagtgtgcgcttggtttgatttttggcgaagaaaatggaatttgggcactcggctcggaatcaatcgctataaaggggaatttgtgtaaaattgaagcctgggatatcagattggcgtgagattttgcgaatatgttactggaggtatcgtgaaggtgcctgaaaaatttgggattgattggagcatttttggctggtttgggcatttcaccgagcacgcggcgtgcgagattctaggttttcggtgaaacaccattttaggtggagaaaccctccctaaggagctaggaacctgcatggggaagcataaaggaacaatggtacacatacatgcacagggattcacaaattggctcagttttggttggaggatcaaaaggggtggaaaacaagctcactgaccacagagaagggaag

SEQ ID NO: 24661 - DNA, 798 bp, Zea Mays
acgctcaggaacgcgagtgggaacaagtcgagcatgacgctcggctccgacacaaaaacccactcctctcccggaacctattccctgacttcgcacgggcaataaatatagtgagcaaggtttaggggtcctggcacagatttccaatggtctaccgcgcaccccagatgcggaaggctatcggcaagtgctcacccaggcggtaaatcacaatctgcccctcgctcacccaccgaacgacctacgccagtccatcaacagtcggcgagacgcgcgaagccacatcaacactttgcacgatcatcgacatgaggatgagataaggcgacgagaggagtatgatcaggatcatggcggaccgacgcatagctgtgcaactagaaccgagtcagcggcagcttccactagcaacctagccctaggatgatcgaggcgacatgacgctcgttcgcctccccgggaccaacgacacaatcaccgacgagagggtagggggacatgcagagtctcctctcttacccccgattctgagcaatccagtggccttcaaacttaaaagtctccaacgtcgacaagtacgagcccaagcacgacttgggaggctggttggcagtctacacaaccgttacgccgggctgctggggcaatggaggatgtcatgatagtgtacctgcccattgtcctggggcaggacgcgctgcagtggcttcgacatctaccacgacaatgcatcgatgactgggaaaacttcagccgtcggtttgtcacgaatttccaatccctctctaacaaaccggt

SEQ ID NO: 24662 - DNA, 485 bp, Zea Mays
tttcttcgttgcggcacatcggcgaggttgacgacgaccttctccctttttcaggttatcttcccatttccctctgtatcctttcccctgccctttccctacactctgtaaccttttctcttcctacacagtcgggatttgagccggcgtcgagctgggaaatagggggtctccgtcgaccaagcctgtaacctatcgcgccacttcctctccttctgcaggtaacctgctccctcccctctgtcgtagctcttgtggcagctccttattttgtagcatctgtttcatcattatgtgtaataatttgtgctaacactagaaataggtggtgacaattgcgtgctcgcatcatggatggtaatgatgatgacaccatgtctattgactggagtagctttattattgagaatgctgaaaacaaggataatggggatcagggtgatatgtttagaatctgtgatgaggatgagatgtatgcgttcttg

SEQ ID NO: 24663 - DNA, 571 bp, Zea Mays
ccatcattgacctgtttatgttggaattattcttatcttcctctcggagaattatgttaaaatccccacataaaaaccatggccccacacactcatcacgaaccgttctcaattcatggataaactcctgcttaaaaatatcctgatgaggtccatacacacctgtgaaccaccaggaagaaccagactcatcctgaaaatggacagagacaaagattcttcatgactgaagccacagagacaaaagacccgtcacgctaagcaattaacactcctctagtcccttgggcgggactagaaacaaaattgctgaaaccagacccgagaatagacagaatgtcaaagtccgagatagaacacaatttggtctcctgtagacaaacaatggaaggcttgatatcaaggaccagagatttaactgaatccctcttggcacaatcatttagacccctcacattccaaataagaaaacaactattctccattggaaacaaatcagatcgcccccacctgaggaacctcccagccaaacaaagctgccaaaacagcaacatgcacactcgaaagcgcg

SEQ ID NO: 24664 - DNA, 311 bp, Zea Mays
aagaaccaagtctcccactacgaaagatcgatgtcgtacaaccttatcatgatagagcctcagggtttgctggtatctagctttactgtattcaatcgctcttcctccaatacgtcaatatcctctagtctggtagcctctgcctcaactatgttttcgaagaccagccttggtgccccaaacctgagatcggtaggttgcactacctccgaaccatagaccatgaagaaaggagtatttccatgcagagctcgactaggttgagttcttaagctccaaaccacatacaacaactctctaatccattttcc

SEQ ID NO: 24665 - DNA, 321 bp, Zea Mays
tgcgaacaaaggacagaatgagtctttgatgaatgtgtgcaaggatactgggcacagcaaaagtgaatcgaaggaaagagagaggggagagatgcactcagcccaattattatagacatacaagatattctatactaaattcccggtaggcgcggtagccaatgtttggccagttttgtgcttgtccatttcgtctaattctgggcaagcctgccggcctgaatcccggaataattgggcatagcaattcccatccacgggcaggcaaaaacacaacacccctcgatcgctgaaggcaaccttgtactactactacccccc

SEQ ID NO: 24666 - DNA, 671 bp, Zea Mays
tacactcatgtactggttgctatcgacaaattcactaagtggatagagttcaagcccattgcttctttaactttagctaatgcagtggaattcatacaggacatcatattcaggttcggaataccgaacaacatcataaccgacctaggatccaatttcaccagttcagaattttttgatttctgtgaacaaaagagcatccagatcctatatgcgttagtagcacacccgagagccaacgggcaagtagaaagagccaacggaatgatattagaagcactcaaaagaaagtcttcgacaagaatgaaaaattcgcaggaaaatggatcagagaattgtcgtatgtggtctggagcttaagaactcaacccagccgagccttgcatggaaacactcccttcttcatggtttatggttcggaggcagtgctacctgctgatctcaagtttggggcaccaagattgatcttcgaaaacatagctgaagctgaagctaccagactggaggatgttgatatactagaagaagaacgattgaatacagtaattcagtcagccaggtaccaacagactctgaggcgctatcatgataaggccatacgacatcgatccttcgcagtgggagatcttttccttcgccgaattctaactggggagggacgacacaaattg

SEQ ID NO: 24667 - DNA, 380 bp, Zea Mays
ttcgatttgtttttttggggggtaagcaccaataggtaaacaacaaatttacattgatctggatcgctaattcgttgttggtaaatataaatctaaactaataaaaaaaggaagataatgcgtcggtcgctttcctgaaagctacagggtgcagtgcagggagcagcatcgcattgcattgcatcccacatgaatgcatgcatgcagcgccaagtgtaagtaaggtcgtcaccaaggtaaaagcaggccagcaggggctatcaattctgaatcgaatttggattcgggggtcctggcaaaagtatcggcgtactctgctcctgctgagttacagcaggactatacgtgacctgaactgcactgcagtgcacagtaattgc

SEQ ID NO: 24668 - DNA, 480 bp, Zea Mays
gagaatgtctctaggttcctaacacacagctgacagaagtggtcgtttggccacccctgcagctgcaaaagcgcagttgtccatattctgttctgaagcatgagccaagcgaagaatctgcacttcatatgcagactttgccatgtactgaccatcaggcgaatgtagccaagtgaccgtgccttattgtgattgcagcaggtgtatatcctgtaggcgcacccataaggccacaaattccgtgatgatctgctggctcatattgtgatccacatccatcacccacttgttgtctgtcaatgcctccctcaccgttctatttttcctcaagctgtgtgcatacaaagctggaaaaagtgttggtggcacatctctttggtcttgactcttgagtcttgccatgtgttggttagctgttcatttgtgatactcccgacatccaaaacaagtggggccttaaaacgcatgcagtcagctcaa

SEQ ID NO: 24669 - DNA, 365 bp, Zea Mays
atgaggtgaaggctcatcaagctgctcttctagtacctccaccctcaaagcagaacagaaagaagcttatcgctacgacggttccattctaccccgacgtcctcttcatagggggaagagtggaatcaacccccgtctccgacgatgaaccaactgtgccgagggaggaacctcttcagcgggaatctcgctgacgaaggaaccgacgccgaaatgtccggtgacatcacgaagccggagaacaggatctgacgcaacctgtgtcacaagatgagatctcagaggtaggagaaactctagaggaacgggtcttcaaggaaagaaggaatttctgacgacgtgatcatcggcaagctcaagaacag

SEQ ID NO: 24670 - DNA, 609 bp, Zea Mays
ctcttttgtaaaacggcttcagcgaaggggtatggttatatatggccgcacgattagaatcagtggcgcggattagaccattcctatacatgaaccggtatacgctggtggccgctagatcggagatcgacggctacaacttaatgaaacacgatatgttctaatccgcaggataccgatctgacggcacggatccaatcgcctaaagcggtacaccccaaactaatctccaccgcccatccaaatcctacggccaggacccaatttctcctttcccccaaacaaacactgcgccgacggcgccgcacagcacccccacggcggagcttcgccggagcgcacaaattcctgccaccccgagccccaaactctaaatcgctcagccctcgtgagatttacgacggcccgaacctatgttgcccatcaatttcagctgcaaaacagcgtagacccccgacccatggcgcagtccaatccacggcggggacacacgcgacggcgagcaattgctatggtcatatggttcgaacatggcgcggtataaactcctatcatccagagaagattccgcaagcgagaggagggagttaccgtcaaggatcacagggg

SEQ ID NO: 24671 - DNA, 286 bp, Zea Mays
gtagacgtgagcatgtcgcaccgatttaagtcactaccgacttaaaccgactgctctgttagtagggtctagtggtcaccctgggttaagtaagcgtgagcatgtcacaccgccttaggtcatcgccgacttaagtcgattgctccgttagtagggtatagtggtcaccctgagttaagtaagcatgagcatgtcacaccaccttaagtcatcgccgacttaagccgattgctccgttggtagggcatagtggtcaccctgagttaagtaagcgtgagcatgtcac

SEQ ID NO: 24672 - DNA, 388 bp, Zea Mays
ctcaagtagtagtagcagcagcagcagctgatccggcagagtaaggaggttagccgaggatagcttctgatcatattgccttctaggtctgtcgcctcttgtctcggactcgctccactcctgctcagttcgacccctcagcaccagtcaccactaccagtccaccttcctccactatgccagcttctgccactcttgagcctaccaccacacctcctacaacctccaccacacctgcttccgctgctccctcttccactccaccagttctgcaccccgcttctgagagtgtgacaagactgaggtgtgacctcttgctgtgaaccctcagctgtttgacctttagagagccattgctgccagagtctgtcggttccgtcacgtgcca

SEQ ID NO: 24673 - DNA, 322 bp, Zea Mays
ctttagaggtcacttcataccacttagttgattatctgtaattgcaaaattaagctcttgtgccttccaaaccttatggtgaaaatgttgaattatattccatcttcaaatgaacaatgaaatgctgtgtgttcctagagaaaaagtggagtgcccaagaacaagattgaaccctcttttacattactcttgttaactgaattagcaggaatgattatctgaaaacttgaaatctgtgccagcatagatttccctattgtcttttctcttggtgaaggagaacgttgaattatatgcctgtaatgtgtttagacctccctcc

SEQ ID NO: 24674 - DNA, 985 bp, Zea Mays
aatctgtcttactcagaaaatgagagaaatagctagctgaagatggggggatcagttatctgttgaagattcagaagcactgaaatatctacccttgatatttaccctccttgccgtgaccaactttggaataggatgaagattgggatggtgtgctggcaggggtattcagatttgctcatcactgaaatatcacctgtgcaaatatccagaacagtgccatcctatcttcaccgccctctcttttggccatggataaacttcatcctgcatgaccatactctgtgaacctgcgtggatctgtttgggggagccacgactgcatctagagttcaaagctgtccttgctgcaagttcaagcatccaacccctttgatcttttctctgcctatataaagagcaaccggggagggaaaggcaggaacccacccagtgatccttagttcaccatcaaccatattgagcagccgcgattagtagtactaaacccccaaatcatatcctagacacgcccaagttccatcgatcaaggcactgaacttatttgatgaccacccaggcaacacctcggcttcatgtggccaggcgactgtggtatgtcttaacccccacaagttgatattttagcatccccgtaccttggtgaagctcaccgagaagtccgtttggtccttacggtcttagtttggtcggaacacgggcttgacaccgcgtaaactgccctggtgatgacccactcaagattcagatggtccgagggcaattcttgtgagcatcgtactgcccatgtctagctcgtgccccctgtgcctttaatttgtcgggtccggtgctcaaatcggtcgagcttggaccgcggtgctggagctccgccgtgggtgcggtccggccgctctgtgagttcacaagtcaaatccatggccgaaattgctcggggtaggttagggtttgctctagtcactatcccatgactgctcgggctccc

SEQ ID NO: 24675 - DNA, 478 bp, Zea Mays
ggctgaggtgtgtggttctcaggccacaacgagccggctgattatataatcagaacgacagccttgtcgtccataccgccatcatttgaacatgctgcatgatagagttcctgcttgcttttttatcggttctttgattatttgttggctttgctattcttttttgggggtcgcatttttacgcgtttgttacatggaaaccatatgtgagctagcgatggcttctatgagatagccagggtcactggggatgaaggtcctgaacaatataattactgctctgtacatgtgccagtacatttcatccatagattctcccttgcatcaacatgttgattttagaaagttgtgtctgtcgttgccggcgccgtgtgcctaatccaatgttcttctgctgattccgttttgtcgtttgccctggggcttttgcgttggatttggcaaagatgaggacgagccatggacgcgaggatcttca

SEQ ID NO: 24676 - DNA, 324 bp, Zea Mays
atcatcttgaacactaagatcctccaatggtagctgctcttcaggtaccctgagacatttcttcagctgagatacatggaagacatcatgtacatccacgagatgatcgggtagttccagttggtaggcaacctctcccacttgctttaagatcaagaaaggtctaataaagcgaggggacaacttccctttgactttaaatctcctcataccttggatcggtgacaccttcaaatacacgtgatcaccctccttaaactctagcagtctcctccgggtatccgcatagcttttctgccttgactgcgtagttctcaaattctc

SEQ ID NO: 24677 - DNA, 317 bp, Zea Mays
aaatattccaggatgctaaccataggaggcatataaacgtgtatatatacaaaggcaaaacaccacatagttaagccacatttcttcacatccaaacttacgtacatatgtgtgtatatatagttgccacacacatcaatatatacagctagagagagcatgcatagttgtggccaaattgagattatgcatggcagtaactatcagtatctagatgtttaggtttgggcgccattaaggatagttttattcaggggttgaagagagtcacatgttttctgtggccatcttgtggcgtgacctagaataagtgagca

SEQ ID NO: 24678 - DNA, 305 bp, Zea Mays
ggttgatgttgtttaatgttcgttaagcaggccttatcccgaaggctgagccattgtagcgtttatgctgccctcgctcttgtattgcggtagtgagtgaaaacgctgccctccccggctcgtgataaagaggaagggcaacagaatgcggtgggtatttatttgtgcaaagtggccagtggccttttgttgtgtatgtaaactatgatattgtttgttgtaaaatgagaaagggacttctcttactgcgttgatgtgtgagtgccgaagacacatgcttggttgaatccgtaggtgattttgtg

SEQ ID NO: 24679 - DNA, 325 bp, Zea Mays
ttttgtcactcaacaggggctctttaggaaaagtgtatggccgaaggggtattctcaaatctgggccgtcatatcgcaaatggacggtgcatattagatcccgattcactacgaaccggtacgcaacgtggggcttcccattaaaatcctacggctaggattttatgaggatgggatctaatctcggtcatcgaactaccatcctacggctcagatttatttgacgaaggggtacgctacacacgaccatggccgtccaacacgggatcgacggcgcacaaacgattttctctaatctaatcttggccgaccacgtatggatcca

SEQ ID NO: 24680 - DNA, 408 bp, Zea Mays
tgcatcttctgctcgggcaatcatatgacggtggtgccgagccaaaaaatcataccgtgcatccagggtgagcaggtaggcagtgaggtacacgactgaggggtcgtcctcaagcagctactgcccttccaatgcacgcatcctggccatccagactggacgatctctctgaaagggcgaaaagaatctgagcggggtgtcggccacttcttcttcatagatctgacacagggccctcaatgccttgcgagcgacgacttggcaggtgtctttgaatctatgcccagcagcagtgacactccattccacatggtgcggactggatccaatgtatacaggcacgacacacttctccgtgccatgctcgatgaattcacgaccatcatactctggctggctcctgattcc

SEQ ID NO: 24681 - DNA, 327 bp, Zea Mays
gtcttggtcagcctatccacaatgacccaaatggaatcgtggtgtcgggaggtgttgggcaatcccacaataaagtccatgcaaatgtcctctcatttccaagatggtatggggagaggttgtaaggtacccgctacctttaaatgactggctttgattctttggaaagtgtcgcactcagatatgtacttagcaatctctctcttcatcctggtccaccaatataaggatctgaggtcatgatacattttgtaacttacggggtgcatggaaaatttgaagagatgagcttcgtccaaaattttcttcctgagttctagattcttg

SEQ ID NO: 24682 - DNA, 281 bp, Zea Mays
ttcgcgcgcatgcaatggtaaaagaatgtcatctaaaatttgggcatgtgcacgtggtctaatagctggacgagtttttatgctatctttataaactatttacgttatttgcgtaaaaaacagaatcgcaatttatagcaggaggttagttgttggatcatgaatttgcctaatgcacgtgagttgacctagtacataagcgagggacgcacttcacagcctgatgtgggatgtagttaaacgtactggtgtgatttagtcaggtcgaaagtggtcgatca

SEQ ID NO: 24683 - DNA, 280 bp, Zea Mays
gcaaaccagatatggcggagttcttcagtaatcttgtaacagcttactgtgacccagctctgaaacctttccaacgggcttctaactccgacgaacgcaccgcgccgctcttggcctctctgtctagctccagataagctgtggatggcagctgactccgctgtgtgaatttcgatttgattttggtgtttagatacggctagtagcataggtataattttatgctacattgtaagagtagaacttttgacagacatatagtttcttattgttgttgtct

SEQ ID NO: 24684 - DNA, 534 bp, Zea Mays
aagagctcctgccgcaactggctggtgaaaatgcgatctctgtcggagacaatggaagatggcatcccatgtaagcgatagacatgcagcatgaagagcttggccacactagctgccgagaacggatggcgaagaggaataaagtgaccatgttttgtgaagaaatccaccacgaccagcacgcgattgaaggaggataaccttcaacgaaatccattgatacaacctgccacgctgagctgggtaccgataatggctggagcaacccaggaagacgggagcgatccggtttggcttgctgacagacggtacaggcacgaacaaactgaagcaccgcagatttcatgccctgccaggcgaacaatttcttcatcctcatgtaagtcaccgaaaatcaacagagtccgccacacgacagagctgcacatgaagctcatgagaaattttacgggacaatgcgtctgccacacgattctacgaaccacgcttatacaccacacggtagttgaggcccagcaatttggagaaaacctt

SEQ ID NO: 24685 - DNA, 567 bp, Zea Mays
cacacacgttcgtggtcagatcgacgacccggatctaaaacacccctgactcgatctcgttcgtccatatttgatcagtgacccagatccaacgatccaggggctgtcttcatcccctagaggaccccaatgaaaccgaggtcacacggcggcggacagaacacatggccgcggagctcgccggtgatctacgccccgacgatttcccccaaaatttcgcgggctaaacaacgcaaagatcactgcgcatcaggtggaggtacctcaccggttcatgcagggccgatcgatccagtaagcaatgtaaggcgggtggcggcgcttcttccccaacggcgtggaatccgcgatgccacggtcgatgaagccacataggaaaaccaagattatgcgcaggaggcccaggcgactagcattgaccgcatgccaattccagagccgcgccgccgatgagatgcccatgaggcggccaggatcttctcttaccccgcggcgacaaattttcttctctctctcgctttgatgtcctcatcactccatggatgatggaggcaaggtagggccgac

SEQ ID NO: 24686 - DNA, 557 bp, Zea Mays
agccagtccgtttgttggggcttcagctccttggaaaacttttgactgggattccatctgagaagaaagaaacgaaactatttgccctacccttagggcagtctagacccatctctgaaaacttaacaaaagaaataacagcggcacctcagtttttcttgaatacaatgtctgaaaggctattcaaatttccactatcagataacttatgtgcagcacttttcagtgttcttagtggaaccagtgcacaacaggttattgtacatttgtactaactttatgtcatattgcttttatcttcttttttctgtttcaccagtatcaaccgcatatgtgatctgctgttttctctctataggttccccaggaaaattctgagcctgatccatcaagggatagaaattgcaatattttaagcttgccacccttttcccttcctcagattttgatatgcatctttagatttatgcattcttgtaaagattcctcagcacgcacaagaatcttaaatcttcttcttggtttgctggattcaaactcttcaaacatcgaggcat

SEQ ID NO: 24687 - DNA, 316 bp, Zea Mays
tgccctcgctagccgccttgtgtgaactctcgccacgctagccctagattaggttgcaaaccgcattgcattgcagccccttcttgtttcatcatctggcgcttacctattgcttataccagggaggtttgtgcccctgcattctatagccgccgctagacgccgcaacggttcctaccaatttgtgccctggaaaaccataacttgaggtaccttccataaaacgggcataaatttttcgctcggtgctccgtttgagctcaaatgtttacagcagattcctgactccattctggggtgacccaaacaggcctat

SEQ ID NO: 24688 - DNA, 707 bp, Zea Mays
ggatcaactttaggaccaaatagcgcccaatccagtggatgtttgatcaaggtatttataacaaaatcaaagccagtatgttaaacaacaactttcattcaaacggattggtagcttcccatataaaaatttgagaatgaagctccttaacttgctctgtcaggcgccctgaatgaagttcccatggtacagtaacctcaataagatcaggtgcagtgaatctcgccacctgtgaactcgcgtcgcgattcgcgccatcagccgcgattcatgctcagtggcacgcagataactgcgagaggtaaaaagatcggaagggaggaggatttggtcccggatgtgagcttatcggccacactcgattgccaggcgacgtgtctgcggccgatgtcgacgggggacgctggcgatctcagtcgcgccatgccataggtcgttttaccacatcgtcgcgagccatggagagtaactagtgactgccgtaagaccttgccccagtacgcgccacagtgaactcactttagcaacaatatcccttcaccgtcgtgatccaaatctcgttcaaaattcgaagcaaccgtgaccggcttctataaattgagctcttcccttgctccgcccctttgtcacaaacccaacgcaaccccaaccacgtcctgccatctaccgtagcacgtgaattccggttttccccaattcagtctgcc

SEQ ID NO: 24689 - DNA, 387 bp, Zea Mays
gtcctctgccgaattctaacgggggaggaacggcacaaattgtcgccactatgggaaggaccattcatagtagcagaagtcactcggcctggatcatatcgtcttactcaaatggatggcacagaaatagggaactcatggaatatagagcatctagggaagttttacccctagctagatttcaaaagctattgggacgacattgtattctgtaattgggagatacaccatcaataaaatgacttcattctcaaaaggcactcggattgtttattgtcaatctgcatgcttactcgactcagggtgaccactataccctacgaacggagcaatcgacttaagtcggcagtgacttaaggcggtgtgacatgctcacgcttacttaac

SEQ ID NO: 24690 - DNA, 314 bp, Zea Mays
cgtcgactcacgtacgtagtcacatatcgaaagtgtggcaaacgtaactgaaagacgaccagaggaaacgtggatgactgggccacctgaaataaataaaagaaaccaaagaattgagaattccaatgcctagcttaattgcagcgaattccaagggttggctgcgggtaaccatccggatttacgtacagtgatgtccaacaactctaactacctatgagatgatgaccactggacagagatacagaacgaccatcatggccaacaaccttacaagtgaaaaggaattcgaggaacaccaaaggaattcgagc

SEQ ID NO: 24691 - DNA, 446 bp, Zea Mays
cggtgagtgagagatgttacgacgacggcccatcagaggagtggaaccctagcccatcgaaaccacgggtacactgggcccagcaaacctgcggatatgcctccaaatgcggatatggagatctcgtgtagtgtttgctcgtgggccgcttgtcccgtgaaaatcggtcggttttgagtgtcctcaaacgaggcctaaaagtaaagagagtaccaattgacagatgaattagcaaatttaactagacaaattatcagtttttgcggtttggttgaggtatacgcatttagggtccatcaatattaattgcacatcactttgactagttaagagcaactccaaaagaacgtgtaaactaactccaaaacagatattagtcaagaatagtggtttttcttactccaacagctctctcattcttctcccaaaaaattagcgtcccggat

SEQ ID NO: 24692 - DNA, 281 bp, Zea Mays
ttaggccctgtttggatccacttttctgagaaacgcttatctgaaaagcctgatttcctgagaagacgctttccagagaatttgttgtctagaaaagctgaatgtttggcaatcctgattttttaaatggattctctgtcttggcatgtaaaatgacatatctgcccctgaactatttttgtctcattagagagctgaatgaaaacaaaataatagaaatgatatccttgatattgtaaggaaaaacatcacagcagatagcactggatagtggatactac

SEQ ID NO: 24693 - DNA, 316 bp, Zea Mays
tgcctgtgccggcccgcttgtctccttgccagcggtgggtagccgggttgtgtacttccctcagggccacagcgagcaggtttgtgcacaagctcaccatgcccgtgaatcctatgtcctcttccagtttggctgtcaagctcaacccccttccccacaattatcccactgccagtattttcaaaactcaaaaagttctcccttttacactagttcttggtgattttttgctgcaggtagcagcatcaacaaacaaggaaatggagtctcagatccccagttatcctaatctgccgccacagcttatatgccaact

SEQ ID NO: 24694 - DNA, 427 bp, Zea Mays
gagcttgttactgcaattgtatctttgtgtcagtctcaaagaaacgatcatagtcaaaaggtgcagctctttagcactttgctgttggacctgaagatgtggagttcatgcaactatattttgcagaaaaagcttctttcttcacttgcagacatggtttttgcagaatctacttgcatgcgtgatgcaaatgcactgcaaatgcttcttgatgggtgcagaaggtgttactgggtagttcatgaagcagattcaattgataccttcacacttactggaaacgagagacctttgggaaatgtgaatgctctggtcgatgagcttttggttgttattgaactgttgataggagcagcaccttctacattggcttctgatgatgttcgttgtttggttggatttattgtagactgcccacaacctaacc

SEQ ID NO: 24695 - DNA, 477 bp, Zea Mays
tgttatttcctgtaataaagatgatgtcaaccacatctgtcatgcgtgtcaacttggtcgtcatgttcgtttgccattcagttcatctagctctcgagcttctcacaattttgacttaatccactgtgatttatggaccttcccaattgttagtgtgtcgggctataaatattatctggtaattcttgatgactgctcccactacatttggacgtttccactccgtctaaaatccgagactttttccgcccttgccaactttttcacctatattcgcacccaattcgacaccgtcatcaagagcatccagtgcgacaatggtcgtgaatttgataattcccaggcccgcacattttttctctcccacggcattgtcttacgcatgtcgtgcccctacacttctcagcaaaatgggaaagcagaatgttctcttcgcaccataaatgacattttgcgttctcttttgtttcaggccag

SEQ ID NO: 24696 - DNA, 718 bp, Zea Mays
ctttataatgtcacactctactttactaggtaattctgaagcctctgtggcaaaatcatgcaatattccatgttcgctaagctttggcagcaccaacctttgtggtactctggtgtctacctatgcctctggatcagaaggtactgttctaaatgaacctattgtactaagaaaagaatactcaaggatcttgttggagttcgaggcaggaatttttaagaaatatcaggtataattttgatgatgaaacctactttctactaatttcattgtcacatgcacatttagccgtgtttctatagctagatctctaaattctacataaccgcatcaatatgcagttaccgcgaatcaatggttcctatattctccaatgtcccagtcgaagttttacttgcaccatgggaaactgtggatgtttgcaaggtggtaaagtctcgattgatgctcaagatagactttggagcttcgccattaccattggtggtaatataaacatcaaggggtcaattggggatcaatctattggagttacttcaatgaagatggatgagatattttccagaaatatggtcgatgatgagctaagattagttcagccttggaatgacttctaccgtaattcttattttcatttggatttttcttatgaggcaataagcaaaaagatggaagattataacaccgtatgtcatgtattgaatgggctgtgtgtttc

SEQ ID NO: 24697 - DNA, 333 bp, Zea Mays
gtggatggacgaggagaagagcgatttgggttgaaaggaagaatgaccaaccttgaccgcttttcagacccttgagacaatccttcacccccatatctctttgtttttccttgtcccgaattcttggcttccactgaaagcgttgtgcttatagccctgctataagtgagatccaggcatgtggccatcttgcgctggagtcgatcattcaaacctctcatgaagcaatttttcttctttaaatccgtgtccacttggtcgatagcatgttgggagagatgattgaacttgttgagatattgcattaccgagtctcccccttgctttaaacgt

SEQ ID NO: 24698 - DNA, 793 bp, Zea Mays
gtgctgcagccttctcctcaataaagtgcaccaagggctcggcaaaggagaccttcttgttagagagacgcttggggcgccacaccagcttggagttgggcatgaaagcacctcggccccaggcaagatgatgaacagcatgctggcgacgatattgtgcaggagtgcgagaccactccccctggcgatgagaggaggagtagcagtcgttgatcgaaccatggcaacgggacactcgatcccacacagagcgactacggtgacggcgacctccatggtcgtcctgctcatcgtcatcgtcgcctccctggcgccaagaacggttgccgcgctccaactggcgcccacgctcccgacgctcccccaggtggtcagggacgccataatgccactccatcacccgacgacgcttcctgccaggccccccaccaccacccagggaaaaactgagatcttcaattacctccatgtggataagcaccttgtagagcaggccatgtttgatgccaatcggcctcgcaggatggacagctaccccactgtctggatcagtgatggtcagccaagcctcacgtggcaccaagcaagggtcggagcaccacgcccacaaatcaaaggtcctagttctcctgcgaaaactagactcctcctccacaaagtgggtagcacagtgagagccgatgagcagagctgccaccttctcattccaagcgtgcactgggataccctccaacctaagcctaagatgaaaaccccaacgggtgacagaaccatacctctgctcattccatgc

SEQ ID NO: 24699 - DNA, 282 bp, Zea Mays
taaggattgcgctggcggccagagagggaaagagttactggcgcaagcaaatcgtggctgttaccgtggagagctcaccggcgatcactggacatgtgtaattcgagctactgcgacgtggtaagacaccaaggcacgaggcgcatggctgataggtggctaactccggtgaggataatcctgtccagccactgtcgtagtgggtacggcaggcacaacggtgagcgaacccgagctaatccgagcgccaagatttttactcctctccgttatccatttgcg

SEQ ID NO: 24700 - DNA, 539 bp, Zea Mays
tttgagctgattctacgacctgatctatcgcttgttcaacagccgcatcatctactcctgtcaccggctaatctcctattgcagcatgtacttcaactggtggctgtaatatttcacatatatctcctattgtatgtacatgttgttcttctgttgtatgcactggtggagcctgttctgctgccgtgtttgctgctacatatgctgctactgccatgcttgctgctacatctgctactgctattgctatttgtacttcaattgggagtggcagatgatctgcttcttgtcgaggtggcgtttgtgcctcctgcctaggtgacggtggtggcgctgaacatgtcttgtctccgccttcgccaagtcttaccctctgtcttttgtatgtccgtaaaggactcatcgtcgacgttgcagggttaacagttgagttaataacctcactaagcttgttctgggcttggcaaatgacctccttattcttcttcagctgaacctatgagtctacaatttgcttctctatcacttcaatattggtc

SEQ ID NO: 24701 - DNA, 1430 bp, Zea Mays
ggtcgtcgatgttcaggtacccgttcctccccgtccgtctccgttagtgctcatgcccgcccccgggtaattttgctagatctatcagtttcatgttgcccgcggcgcaaaattgttgggtacttgggtatgatggttggcgtgcggtgggtgaggtggaaagacggatctgtagattccttatgtttacagtcgaagggggatgtttgttttgcatatgaagaggattgcgatttctgttcacctttattccttccgttgttcagaaagaggcgtaacttggtgagcgaaaaatacttttcttctttaggttctgtttggttacagtccctgtatttgtctctagattgccgtgggatctcccgtgggactgaaggaaggactaaactgcttcactctaaaccatattgattccaccggttgccccctttttttctgttgctgcgggaggagggtagtggcgcgagaatggtaaagggtattttattcttcttacaagtcatttgatgagttgtgaacacttttagtcatggaaccaaacatgcagcaactaaactttagttcttggactaaggaaccaaacatgcccttagttggaagtagcaaggtcgaattctttggcttcattatcgaaattataatgatgaaacggtgcttcttgtcatgatggactaaaagaacatactatcctgtatgtatcctagcttctcaaagactaaagaactaagtctagtgtcatttgtctagtatgattcatagttattttcctatgttgatagcttgctctctgaaattcatgaatactcactgctcttgtttttgcatttttctttgcaactggtctctgttctcttggccattctttgtttgccgaggctgaatgagcggcaaatttccagatatggaacacaacgcgacacttgttgctttcccgagctgaattgctgatgaggttcaccacagttagatgcctgatttgagcactttgtctgtgaaattggattaaataaatggagaacagccattggttctactgtttctggtgttctgctatttcttagttcaattctgtggtctgatgaaagagaggagatgttactaatgatttctttggtagaattggatgaacaacacctgtcatgcctccttagtttctgatctgtgggcattctgctcagccagcacaagagttgtgtgcacctgtagagaacaacaacagggacaatgctcatgacacagattgatagatgaagttggaggtcattgccagatctgcatatgttactgctgtagtgggttgaactgatttgattggcttataagatgcaacagaaatcatcatttcattattagtgtttggttgtgttcactgccctggccatgttttcagttgggttcattggcatccttgctgcagatagaatcatgac

SEQ ID NO: 24702 - DNA, 1312 bp, Zea Mays
ggtggaggatagagtaccgacgttaggggtagtgtggtacgatgcacaagggtcagccacctagtcaatgaacgaggtgggcagcgctcgtgtcagcatgccgaacgagctggcaagagactatgtgtcccaccctaggggccccatgagggtgtagcaggggaggttgaaagggacaggaggcccggctggtgctgaggcggagctgagtgagtctagagtgtcgaaggggatggaacaacaaagaaggctagcggtggtgtggcggggtgcggtgaaggagtacccacaaacggtttaggccacatggagatggtgtcggtccacaacttgtagaaggaggtccacacaagagattgagaatgagggtctcgtctatgaccgatgagtcgaggtcatgaagagtgttcgccatggccttcatctatcggtggtactcaataacaaagagaccccctagacgagttggtagaaagcggcgtcaaggtggaggatccatacctgatggttggtgaggaattgagcctcgatagcaacacaggcttagcgagcggtggcccctactcacagacgacatcatggaactcaaccatgagggtaacaaggatccaagagaggaccacactatccatctgacattaggaatgcgtcgacacgatagcgtcggtgaggatgtgtttgtcgacggcgtagtggaggagagtcaacaggacctggtcacaccagcggatgtacttagttgattctagggcaaggactacggagacaagggcctgtattctagggagccccatcgcctaatcatgaagattgatgatgaccgatgcgttggtgtgggaagggcatagtcatcaacggggtgagggtcgtcgcccgggacacccacaaactagcgagtggtttcgatgagctagcgctcgagggtgacgaaggtcgcacactccagctcccaggcacgggcggcagtctacacgcactaatgaatggcggtgagggtagtgaggacatcgttaggagcacgacgttgagaggaagtgagcgccaatgtgtgagtgtagatcgatagggaagggacagagcacgccaagcccctcgcgagagggtaggacccactagctccactcactaggcccaaatatgggaagtgaggagctaaaagctcgacacagagggcagcggtgttgggtaaggagaacgtgggggcgccgccggctcattgagcaagggcggtgggatgaggctactgttgagggccatgtgctggagggaggtggtcgcgctagacattgtggcgttgctggctagagtgggc

SEQ ID NO: 24703 - DNA, 416 bp, Zea Mays
tttccgagactcaggctacacccgcacaggacggcgggttgttttaacgaaaacaggaggtttcttatgtaaaaatgccaggccaaaagggtatccactgatctcggccgcacgatctcacacctacggcttagattagatctacatttattaaaccggtacgctacgaggaccaccagatgttgatccaacggtgaagatcatatccatacccggagtcatccgatcgctgatcgacgctctagatcgacccaacgcgaaacgttacgcaggttttaatctcagccgcaggtttggatccgacggcccgaaacccctcccctacctttcggtcgagcggacggcggcgccgcccaccatcgcggcggaaactcgccggagcaatgctaatctccccctctgctactacatttcga

SEQ ID NO: 24704 - DNA, 353 bp, Zea Mays
gcataatggaagaaatacattacgcgaataattaatgctgacagcacaccaagatctttactggacgctgtgttgctccctctgtcttagtaacgcatgagtaatcagcgggagtcatgatggctgcagtccatgcagcattgatagacagtaacccttttcttggaaacgtacgagtaatggtgagtcattgccctcgctatggtaacgtgtgagtaactgtacggcccacgcaacgtggactgggcgcgccgcctattactggaatggacagacgcacgtcttatccgtaataaatgccaagacgcgcatagcccagaggctttatgtcaggctccgcccgttggcttacg

SEQ ID NO: 24705 - DNA, 415 bp, Zea Mays
gagggaatatactttgaggaggtatttgcggcagtggcacgaatggactcggtgtgcctgctgctcgccctggcagccacaaaggactggagcgttcatcacttggacatgaagtttgcctttctcaacggggagcttgtcgaggtggtcaatgtgcgacagtcgcccgtattcatcgtcaccagagaagagcaaaggtgttgcgacttcggaaggcgctgtacgggctgcgctaagcgccatgagcgtggaacttgaagctggatgctcaccacgctcggcttcatggagtgtccatttgagcatgcattatatacccgacgcacgaaggagggagtgctcatggtcagggtgtatgtttatgacctgatcatcactggatccgagcagcagcagagcaacacattcaagagcg

SEQ ID NO: 24706 - DNA, 287 bp, Zea Mays
caactttgttgggatatggcctatcaccgagcattacacttcaatgttcgcgacgagacacttcccaaacctgctacagaatgtactgcatgcgctaggattctacgtccgacctctatatgacacaaggcgagtgtctgagcctccttgggcttgttactacatcactcgtgtgcatatcagagtgatggattcaggagacagaggtttcaggactctattagcccatgagtctctgacgctgctgtctaccaacgctgcttcagtcagcaatgctactagaagag

SEQ ID NO: 24707 - DNA, 979 bp, Zea Mays
aataggtataactcttgtaactactcagtgaagtggaaggcgaaaacaaaataagatgaagtcgtgtcttatcatgctcttacaaagttcttacaagcactgcagttataaaacaatggtcggtacgagaaacacctggggcgtgagcgtgtgattgcaaaaaacaaaataagatgaagtcgtgtcttatcatgctcttacaaagttcttacaagcactgcagttataaaacaatggtcggtacgagaaacacctggggcgtgagcgtgtgattgcaaaaaacaaaataagatgaagtcgtgtcttatcatgctcttacaaagttcttacaagcactgcagttataaaacaatggtcggtacgagaaacacctggggcgtgagcgtgtgattgcaaaaaacaaaataagatgaagtcgtgtcttatcatgctcttacaaagttcttacaagcactgcagttataaaacaatggtcggtacgagaaacacctggggcgtgagcgtgtgattgcaaaaaacaaaataagatgaagtcgtgtcttatcatgctcttacaaagttcttacaagcactgcagttataaaacaatggtcggtacgagaaacacctggggcgtgagcgtgtgattgcaaaaaacaaaataagatgaagtcgtgtcttatcatgctcttacaaagttcttacaagcactgcagttataaaacaatggtcggtacgagaaacacctggggcgtgagcgtgtgattgcaaaaaacaaaataagatgaagtcgtgtcttatcatgctcttacaaagttcttacaagcactgcagttataaaacaatggtcggtacgagaaacacctggggcgtgagcgtgtgattgcaaaaaacaaaataagatgaagtcgtgtcttatcatgctcttacaaagttcttacaagcactgcagttataaaacaatggtcggtacgagaaacacctggggcgtgagcgtgtg

SEQ ID NO: 24708 - DNA, 638 bp, Zea Mays
cgacgactacatcggtcacttcgctcgtgggggagatagccagagcatgggacgtgccctcgagctctttcttcctggatgtcctctctatccagggaagagtagaggatgctcccatctccaacgatgagcccaatgtacaaggggaggagccttcgcaacatgaggcacgccaacgccggaacagtcatcgtaacattcggcgtcatcatgaaccagagaacatggcccgtgcaacccgcatcccaggacgaggcaactgagacatgagagactcatgatgatagggcgctccacgagcaccacaattcttgacgtcgcgatcgtcgccacgcctaggagcgcgagcgagaatgagcagcgcgtgatgccaggcaccaatgcgagaacccgccccttccttggaacctgctgcccaacttcacccgagccctgaacacactgagcgaggtcggcgaggcgttggctcaaattgccaacgacctaccccgtaccccgaacatggagggctaccgacatatcctcacccaagcagtgataccatcttctccccccacttatccgactctagacatgccgtatgttatcaacagtcggcaagacgcgcggagcaacatcaatgcttcgcgtgattgcca

SEQ ID NO: 24709 - DNA, 377 bp, Zea Mays
catgggtgaggagaaaggaccacatggaggatttgtcgaacctgccaccattgtcacgctggacacttttgatggtgtagtggaactaggtagaatgtaagaaaaaagttaaccaaggtggagaaggtgtcgggcttatcttggagaagaaaaatctagatgaagtgcgagcaatcatcgaaaacaaggaggtaatacttgtaacaagacacattggcaattggagaggtccacatatcacaatgtactaagctgaaattttggagagcatgagaggatgaattaggaaaaagcaaatgagtatggcaatctagttgctaagcatgtcataaagaagtatcaatgcttttatttcaatgaaatgtggatgacttaac

SEQ ID NO: 24710 - DNA, 288 bp, Zea Mays
aaaaacatgactaaccatttgcttttagcttaatggtgattattacagggagcttcggctgatgatggaagccttctcctctgtcgaaggtcttcaagacgaaggcatagcccgaggacgacaacaatgagtgccgaagttgtagcggacaagtaacagtttcggcttaaaacatatgtcgaagatcaaacatgaagctgagccgaacaggaaaatactagctagtccttaatgacttttgtaacagttatgaacaaatgttgtggtcataaatgtacttttacccag

SEQ ID NO: 24711 - DNA, 886 bp, Zea Mays
gggaaagtccacgacggcggtgggcgcagggaggctccggcgagcacctgcaccggccgatttacctaaggattgatgctctacttcggtcgaaaccgaattcacgccccaaccattgattcccctaagttaattgcacaaatggtgaactaatgtagtctagccacggtgagcgcgcggatgaaccaaagatccatgtgttcccgacggtcagtggacccctagtccaattggacgggtcagcaagcatcgtagacatgtgagaatgcttagacgagggagagggagggttggactgaccgaagtacggctggccgcggtgaggttgggcttcgggtggcggagaacagatttggggcgaacgtgaaattggagagctgtggggagtaatcggagctacgcgtgggttctctggacgcacaattacctagcggcactggccgaggctccaatttataggcagcttcgacggtggccgggaattttaatggcgatgtatggcggtcggagataaggaagaggtctggcgtcgtggttacgtgtccccagccgtggcgagctcatcgacgatgatgggacggcagtagggaatcacggcggtgccgtggaaaggctcggacacgcggcggcacagagatggcacgacgacggcgagcggccttatctacggcggtgagcaaaagggggaaagtattacggcttaccggggtggcttccagctcgatggcgacgacgatctttttaccacgcagcgttatccggttgccagcgaacgttaatcttaacgcggcggcacgaatccttgcgtgagggagggtcaccggcggcaagcacgcgatgctggcatcctgatccactcgagctactgtaccatggcgatcccccc

SEQ ID NO: 24712 - DNA, 449 bp, Zea Mays
attttccccaccctgtaatcctgaatgcccttgtcttttatgtggcttgtattttcacgttccagttgatggcgatgacggtgctgtatttgaatttgatgctgatgagaacgagggatacctattcgctggacaatgtactaatttcaatcttttaatgataccaatgcttatgcttatataaatacacatgtcttactcattgtttccataaaaatatcagatgaggataccgatgaggatatagagatagatggtattaaagatgaatcaactgccactaatgttcctgacccgtacgacaaggtgtacaacaacatccctgaagaaacacatatgcttaagactgttcccaactgcggttattgcaccgcgaagaagtttgaatatgagccacctggtttttgttgtcgtggtgggaaggttgagatagccccactggagacccc

SEQ ID NO: 24713 - DNA, 323 bp, Zea Mays
atggaatttctatgaattttacaagtttctagaattgtttttgtattaaaaactaaattctataatcattttctcggtttttaatatccccaggactaggcctcgaattccagaaaactcaggggtctcttcgcaagaagtacgagacccagtgcacagtcagataggatggcgggttgatttgttatttttccaggggctctttaataaaaatgcgccgcgaaggggtatcgggtgttatgagccgttggatctaagtcatgcggccgagattaggtggatcactatccgaaaacgttgagcactgagacccactggatccc

SEQ ID NO: 24714 - DNA, 499 bp, Zea Mays
gaaccatatttccttaagtacaaaaccatttgttccttcttctagagaaaacatcaaacttatgatgtccaatcacacctccaagaccagttggacttgccgatcactgcaaacatcaatactggacctggaaccttatgtttcagcacccaaaattattctgatgagggaactaaccaaagagcctgcacaatgagaagactaggagccatcaaaatgaaaaacaagagtggtgagttgtaagtatttattagaactgaaaagtataaccatcatgattttacttgggtcagcatatcctttttgacagtgcactatcctacactttattttattcatgaaaactgaatcagcaactgatgtgttaggatctggcaaaatttggtgaggacaaggagtaaaaatctttcccttgataaggattcttgaacccttcatagataacaaataccagccaatgtaattaaccaaaaaatcaatcatcctttgtacatcaaac

SEQ ID NO: 24715 - DNA, 382 bp, Zea Mays
tcggaggaagacaaattgtatgcaaaacatcaagaatcagcaaggaaggacgttgagtgcgcttttggtgttctccagtcccgttttgacattgttcacagagatgctcgtttatggaagcggggggatgttgtgaacataatgcaagcttgtgttatccttcacaacatgattgttgaagatgaaaaagaagcagttaaaattccattggatttaaatgaaaacctaggagcaacaattgtgctaccgccagaagtgcagactagtgacaatcccgacccttgcttcgttgaagtgctacaaaggaattctgctatccgtgctcgctcgactcacactcaactgaagagagatttagttgcaaatattgtacacaaatttg

SEQ ID NO: 24716 - DNA, 337 bp, Zea Mays
cctctcatccccttccctactctcgcatcccgaaccctaatccccatcctagcaccctcttagcccaatgaacgtgctcctcctcctcacgctggtgctcatagccactcaggtgactcaggtgctctggctatgcaggtgagttcaagtcttccagatcttactctttgtaccgtgctcctcctcctcgtattgttgttcttctccagatcttgttttttgtaggtatcattcttgtgacgatgcttcttagctgtcgagggatcggagtcgccgacgaggagctggacagatagtggggcttcattggtctaactttctacggcatggacgatga

SEQ ID NO: 24717 - DNA, 584 bp, Zea Mays
ttttgaggggaagttgtagcttttgtgcatatgggcggtgcttgttgagtgcatttatcaacaagggggagaattatacacatacacaagcgtcttgttgagagtgcattcatctgtgaagttttgtgcacttcttcagggggagttcaggaggagatgtttttgttaggaggagatggatgcttttgctattcatgttgagcctttgcctcgttctagagggactgtttttgcttttagagtttttggtgcttttcatcttttgctcttatcattgtatagtggtgttgagcctttttctacctcttcttgagggctagccatttttgtttggttgcgttgagtcgttgctaatgtcttaaggaaacaagctttgctcattttcaatgtctttggtttggcttttgtccggcctttggtcatttgagtgagctcttccttcttccttttttgttgatctttgtgtttgtgcagtggtgttgacaatgcacacattaagtgatagattgcaaccacaaggttgagatgcttgagtttgtgatgagtgattgtcaacagagtaacttcttggttgagtcgtgtgg

SEQ ID NO: 24718 - DNA, 465 bp, Zea Mays
ccggagtgtaacaccttactccactgtgtgatgtattgagctgagagcttgtatgaacttgtgagtgtctaagtgtgcttgagtctgctttagcctcagttagcttgagttgtaacgttgcgtacctccccttttatagctgaagggggcacgtacaagggtgctgagccccgacacgcgtagtatcagcgtgcagtggaagcttcactggcaacgtacgagtgatgatgagcacagtgtatgccgcagcatgggcatactgtccaccaccaaagtgggcgggcacgccgcctgcaggatggcctggacgccacccatcagtagagaggacagggctcatttaatgctgaggcggcacatcgcttgtcagtggagtagacggggcgtatttaatgctgaggtggcacatcatctgctagtttgacaggcggcgcgcctcctctgcaataaatgcgcggcctagag

SEQ ID NO: 24719 - DNA, 521 bp, Zea Mays
ggcggactggactcacggcggcgcttcgccgtcgagcgcggtcaccgcaatacagtgccccaagacctaatccgatgggcaccctacgtagaggagagttgggcaaagggcagggaggtggtcttacctcagatttgcaacgatagcagctccgcccacgttgtagcgcggtcggcggaaatctcccagcgacggcgaggaattcccacgtgacgcaggcacatgaattcaatcctcggccccgcacggccttactgatgatagcggcaccccctcggtcaagaaccgaggacggaaacccagcactggcggagatcaccgacggcggactcaatctctccctcggctaacactaccctctccgcaatgacgcttctggctgggcgtggttgattatctgacggcgaacgcgagatggcggctggtcacctaagtaggacgaaggagggggaggttgaggcgacccgagcgcccacgccgccggtcgtttcgctcggtttgttacggatgctcgcggatga

SEQ ID NO: 24720 - DNA, 401 bp, Zea Mays
gagataccatttgatgatatacaaaataaaccatttcttgcctaagctaaatatccgcaaattgtggtattatgcacttaagcctccccaaactccataaaccatgtccttccttttgtagaccaaaacctgacattatttcctactggaaagtgtccctacaaacttaccttataaaaatggttaccacatgttaaatatcacttgaaattaattttcaaaaatgcggttttggtatttgagaaggtttggacttgcttttgttccttcaagttctcctctttttgattcaaacactgaaaacgaagacattaagggtcaaattttgtggtcctataacatctctcctttaaaacatgaaaaatttccttttgcaaaaggaaagaataacaagaaatttg

SEQ ID NO: 24721 - DNA, 454 bp, Zea Mays
gcgcgaccacgcagtcatcccgagagaattcagcgaagaggacctcgtactcgtctgaacagctcggacagagtccaggggaaagctagagcccaagtgggagggccctttcattgtcaagacgaaggcttcccccagcgcttacaggctcacaacgccaaacggcgaagacctggagcactcctggaacatcgataatctccgcaaattttttgtttgactcatcagggccggttcgcccttgtaattcgcaaaaacaattttattctggcccgcactcttttcctcccagggggtgaggtttttaacgaggcggagccatgtaatatacaagtgaaaaatcccccgcaaaagcatgcgtcgaaaaaagaccgcgacgacggtcttcgacattcgaccaatacaaagtcaccgcgaggctcagcgctggccaccctcgcgtgcgacaactcca

SEQ ID NO: 24722 - DNA, 447 bp, Zea Mays
ggccggtctggcacattaaggcattctgggctatttagggcggcctaacacacataactaattgtgggtcgtactgtgggccgatgactgggccacgtgctggcacgacacgatctataattgtggatgtgcttttgtaggtcgtgcctttatgggccatgcttttgtgggcctgtgttgtgccgggctaggccgagccacatgtatttatatacctgagcccccactgctgggacctagggccttcagccatcacatctttcgtacacctgtgccgcaatgctatagaccccaccaacatcacaaggtactctaggaattggatccccgcctttagctgtgggactatcaactaacatgccaggcgagaggggcagattgtgtcggcttcataaactagaacctccccttgtatctagtggattcgacataagcatggctcgaaaa

SEQ ID NO: 24723 - DNA, 322 bp, Zea Mays
gaaaactcaagctgcatgattggatgcaaaacaaaccactttgtagccattttgttgcatctgctggtacgtatgaaactaccatatgcggtcagccagggccaccggagcccgcgtgtccggacacatgcatccaatcatgggtataatggacgatgttaacaaaaaacaagaagaacacgagcaggtattgtcattatacatattgtgacagccgatccaccatgtactagcagtactatgcatgataggcagatccagcgtgttgatgaggaccgtacgtacctgcctccctccaagtcagaagacacatcacatcggc

SEQ ID NO: 24724 - DNA, 351 bp, Zea Mays
cgagaaccctgtcgcttcatataggggtatagcgctccgagattgagcaacgacacgtcactcccatgtcgtgatcccgccattgacggtgaggtggttggggcggtcactgactacactggcccacccggaagcgtcaccacgaacccgcggagtcctcagatgagccattctctccacctgggcccatgagtcagggagcggcgcacgcaacatggtggagctggtgaaacggtgaatgccatgtgggtccgggatgtcagcactaggcggagggtgtcgggccgcgcacgcgtgagtttgatgggccgacaactagggattgagcccagtgcggggtttccctttttc

SEQ ID NO: 24725 - DNA, 466 bp, Zea Mays
tagacaatatgccacgcgaaggggtatggacggtttctggccgtcagatttcgcgctggcggtatggattagatctgcgcggatcaaaccaagagcgccgcagaaccatccgattggggatcgacggcgaggattttaaatgctaggatcaatacgcgcccgtccgtttatgaactaacggcagggatccgtcttaacgaaggggtacacattgatctaatctacaccgttccttttgcatcctacggcccatgtgctccttctacctccagacggccaagcagcggcggcgcggcaacaaccgcgaggagcgcccctcggcgaactccggacgggtccctcagatccccaaaatcgtcgcagaaagaccctacgcaaagctgaggcaagtgcgaaatcagtgggggaatctttaccggcgtcgaagtgaaggtgatgcgcgcccacgaactgacacggatttgcg

SEQ ID NO: 24726 - DNA, 334 bp, Zea Mays
tgcgccaagagcgagaggagatacgtcaagaaagaagggcgcaacagcaacaacaacaagcgccactgcctccacctccaccaccagttccacctcgggacaagcaccgagaattcatgagccacaaaccaccaaccttctccaactccgcggatccgctgcaagcagatgactggctaaagtctgtagaaaagatgctcaacatagctcagtgctcgaacagagagaaagtactctacgcatcaggtcgtcttgctggtcccgctgcggattggtgggatgcgtactgtgctgctcatgcggctgtcgacacaattacctgggcagaattctc

SEQ ID NO: 24727 - DNA, 446 bp, Zea Mays
catcattcaccgctttttcggacccctgacattccctccactagccgaagcagtctcctttctttcgaagcttcgttcgacacccttctccttcgactacaataggccagtcaaatccgatcctaggggacttagcattgcaaacgggaagggttcagtcattaccttcagtatctctgaaacatcgacagaggaggctggagaggggcccgcagtcttttctggtacatcttgtaccttcatctccgcagcagtcatcctaacaagtctttgttttttgggagacaaattctttggctccgctagagttttttgcttcttaacaaccatccgatcttctttgatggaccagatggcttgcctggccagaatactcacaaccctctttcttttcgccccactagtcccttcgtcaagtctgtcgtaatctaggtactcaaaattca

SEQ ID NO: 24728 - DNA, 436 bp, Zea Mays
gaggttcagtatcacagagacaaaagtttacacttaaaatccctaaaccctattccgccacctacgaaggccctaccgtcgccgtggggtctccggcagctggttcgcccatcgccttcgaagcgtcctcactcgtcagcgcaggggctggcacggggtctttgccagctccagtcagcgcggtccgcgcgggggtcaccgaggggcccttgcccgcatcggatggcggcgccagctccaacccagatgcctcggggagcgtgctatcgggcagcgtgccgtccagatcgccaagatcctcaacctcttcgtcgtgcgccatctacaacaatagcacattcttcagcaaaaccacacatacccaaacatacccacacatataaccacacaaagatgagcctttacctgatcaatcgcctagtcggacctctcccgg

SEQ ID NO: 24729 - DNA, 347 bp, Zea Mays
tccaatacttgattagtcctttcagtctgtccatcagtctgaggatggtaggccgaactaaaattcaacttcgcatccatattctcatgaagacttttccaaaatctgggggtaaactgtgatcctctatccaaaatgatcttcttcggtacaccgtgtagagacacaatccgagccataaataactctaccaattgagatacctcaaaagtagtcttgaccggtactttagttagtctatccacaataacccatatagaatcatatcctttagaggtgcgaggcaatccagtaatagattccataccactagtacttctacttcaaatcctgatacatcttggtac

SEQ ID NO: 24730 - DNA, 298 bp, Zea Mays
cggaggggcgctggccactggatcacatatcgacggctctggttccacgaactgtgcgaaccgttatccacgatctaggccgtcagatcaagactggaccgttatccacgatctgggtgtggtgctctccacggacacgacggcgtagtcgctggaggcgaggcagactagggcttttagggcgctgggggttgatatgggtagccgaagaggttggggaggactcgacaagcattatggtgaggtctgggtggcgagaacgagactgagacaggcagacggcggagggggaccctcg

SEQ ID NO: 24731 - DNA, 521 bp, Zea Mays
ctgaaggctagtagagaaggttatgttccagacataaacgtagtgttgcatgacgtggatgaggaagaaaaagctcgcatgctatgggtgcatagtgagaggctggctttagcatatggcctttctatgacacctcctggccatccaatacggataatgaagaatttgcgttcctgcttggactgccataccatgtttaaagttatatctaaaatagttcaacgggaaatcattgttagagatatcaatcgctttcatcattttgaggaaggaatatgctcctgtggtgattattggtgattttctattgtccatttatttatttgaacatatgatagcatatcctatatagtgctatcagtacagttttgtaggaaagcttcttaccatgacaagacctccaaaatatacatgcatacttgattttctggatgaactgtcctgaaaatgatatgttgcttgatctgaagagtatgctgctgaagtcctgtttggcaaatggtgctgggcaccatgtctcg

SEQ ID NO: 24732 - DNA, 460 bp, Zea Mays
ggaaaatggcgccgcgacggctctgggtggaattgggaggtgaaatcggggctacacggccgtaaggaactgtagtttcaccgtgcacactcaatttgggaagaggtggcagaggcagtgcgaattttggggctttgattaaactctcaggtggagatgtgagtacctcgccgtggatcacggtgctatttatagccacggcggtccggctagctatccacgaccacggataacctcgttagtgcatgcttaccacgtagtgaagagatacagtgaggaaggagcaaggcatgggcgacaccgcgacggatttgactgagtcacggtggccgctggtgattatctccggccacgcacgactgagctcgcggaattgcgccacgttcaacgttatccttcccgcgatcaaattcccaccatttcatctgagctcatctaattccgcagtgcggtagatctt

SEQ ID NO: 24733 - DNA, 1062 bp, Zea Mays
tggcgaaagtctcctccaagcacaataggtttgccaccaaatgatctgtttgcattttctgctttatgttccgatagaatatcacgcatagtcctatctagagcctcaaagcaatgcctatgggtcatcggcgcctcatcccatatgacaagagaagtccgttgtataagttcagacaacatggtacctctcttgacaccacaaacactactctcatctagatcaaagggtattttgaaacgcgaatgagcagtgcgcccttttggtaacagcagcgaagccacaccagaggacgctacagcaagcactattttttgtcaggatctcaaatgcgtgagtatagcgttccacaagaaagttttacccatcccaccatgtccacatacaaaaaataggcccggcgagcagaagagcgtagattcaatcaacatttcaaaaatgaatcgttggtcagcatttagctgcgagacaacagcagtggtagcatggtcacacaacagtaatggttcaggccttagttcgtcgtctatcagtcggttgccaaacacttcatcaccacgggccgataagattggcaggtcataatcagctatgttggcaccactgttagcaaacgtatctgctagtttcctcaaaagcaacgtgaggagttgttcatgtggagttgtgtagtgcgggttgccaagggcttctttaagtccacgatgtatgtcatcggtaaagtagatccaatatttgtcgaatagagcatgaacattgcaaacaggacaatgaacgacaatggtaacgaacagctgacgaagttgagacgccgaggcagagactacagcctcatcaaatagaagggtccacttgttgtcaccttcgagcaaaccacgagcttcgcacgcctctctaaacgtttcgtacacagtattttggaaggtccttatatcaacgaagctcgttgcgccggaaacaaacatcaagagcatgcgtagatagtaaagttccccagctgttgggtggacgtagtacatgcgcccaatcttggcagacgacaacctccttctacgccagcac

SEQ ID NO: 24734 - DNA, 1875 bp, Zea Mays
gaaccccaatgcaaagtgatgaagaaaatcaatgccttctcctatccaccaccaaaccttggtagagtgagaacaatatactccgccagggcgtcctacaagagaagaggagccggcagagaataagaagaccagaagttgacaaacttttcctgttcttcgagaagcccattttctctcttcttctccactagatagagaaaggggagagagagggagccgaggaggagaagatccctctcaccgtcatctgctggccaatctaatctccgtcgtctgcatctgggtctgctcccgtccatggcctagtgacggaggattgtatctctgtccatgtggatggcgataaattagtacttgtttataggtgttgctgtttggttggttggccttgtctccttgtttgaggaagtggggagaggcggaatcttttgttggatcatggcagttccaatgcggccggtgggcttcgcccccccgtgacatggtgagcagttgaggggacggattatctcctgttcttggctgcttccctctgttctattctggcctggccgccattgtttcagcggatgagttcggggtcggaagtcttgttcttggaggttctcccctctgcttattggccatatgatgttctactcctgcctaaattttgcctgtgcgaaaaatttgtgtcctttttgatgttgtggttttggttggataatagtgtgggaaagctgacaactttcttgattttggtttgataatattatccttgcagtgtgcttgtgatgttgcgatttttcagaaagctctgatttttagcgcttcattatttggaatccttctggctctgtagtttgctgtggtttgtgatctcgtcttcaatattttttgtcgcttgcatttatggcccttcacgccttctttttcttcccattccctgacgtcctacaaatgacaaattacaggtctcttgttgctgacactacctggacttttcttctgcttatgacaaagacgaactgataagctggcattcgtagatcggtttcttgggagatacacatacagaagctttagggtcggctcgtagaatctctcagacaccgtcgttttgcatccgagaacttggtaagtagtatgagatgtccttcttgcggttttctgaaccaatgctcgtttaccttctgtttgtcatcagagaagatccttatcctacttgttgatcgaaattgaagtgtttgtaaagaatgctaagtaatgcgtttctttatgtgcatttttgtgatgaggttcgggggtttcgcctctgtgctgtttcattcactttggactaaattttcaacattttcttcaatcgataattactggcactgagatatttccccagcaaaactaattttatggaatgttgattacttgtttaactcccattgcaatttggtatccactctagttgcattatttaaagttgtgatgattactcatggtcagagtttgcagaaattaggggcttactttcagttttctgttttctaattgcttacgagctgtgattgccaattttcaggtcacttctaagtgcattttcctttgctgcaaaaggtgctgaataaactgtctgcacaagtcagtggtccttgaactacagggacctgatctgcagattcttccattgggtactgtttcatatttgaccactttgtaaattgtaagttagatatcttcacacccggtctccaagccatgacgtttatttcagtttttagcttaattttctggaccaattctagaaatgtattagttgtagcacaattaatgatactaacagattcgaacatctgttcataaaattgaatgatacagcttacttttgcgtggtggctc

SEQ ID NO: 24735 - DNA, 380 bp, Zea Mays
taaggtcgatgaggcgcgggatgaccccaacccagcgtcgagcacatcagtacaaacctccatcacaccatcatccgctggctccgataacagatcctctgggaccatatcttcaagagtctgatcaaagttcgccagggacaattcttgtagaccgaggagggcagacaaagcaggaaaaggaactccactactttcaccactggcgacatactgccgactgttcttccgagtcaaagggtcctcatcttcttcctccccgtcgttttcatcagcaacacagacaacacacccattagggtcagcggcagaaggagtacccccattggggtcagcagcagaaggagcactcccattgggatcagcagcaggtggagcac

SEQ ID NO: 24736 - DNA, 545 bp, Zea Mays
gaaaaccataaaacacacacgcccacacgatcggccgtttggcctaggccagcaccaacacctcgctgcgaccgttcccctgctctagccggtaccggagctttctcgcgacagcttctccttgctgcagttacgtccaccattaatggagattagagctaccgttttttctgtagatgaattcatctcttaattaaccgctaaatccgagttactttggtcctaatcccctcggccttcatctcaaccctataatggagcctgtttctcttcaccctctcctataactctcacgcacggacgcttgatgcgtagccactaggaaacgccaatctctcctctgcgctccctcgccgatgtcgtttcccatccctcttctaggcatataaatccatccacccgtgccgagctcctctccgctcgaggctctctgcccttgccgcacttcactgcccagggtcacggcatcctgctgctattttagttccatctctccacagccgtcccctctcatgccggagttgtggccctcgacgctgttcgcc

SEQ ID NO: 24737 - DNA, 396 bp, Zea Mays
acacaacgagtgcgatgagggtacaaacttcttgcattccaggagggtgagagcatctaagatttcacactccaactcataggcatcgtcaaccagctcgccacgctcggagatccttaacccgaccacaaggtcatggagaagtatctccaaattgcatgatcaaggtacaagcagttagtcatttaaattgaggcattgctagatgtttcgacgctttcaattgaagagatcacaagttggctcgtggcctcggaggatgatctagacccccatccttccattcacgccgacggcaagttgtacctcacggaggagcagtggcttgagcgctacaagcagaagaagcaagagggatcgtgcggtgccgatgacaccgggtatcgcggtcgactt

SEQ ID NO: 24738 - DNA, 573 bp, Zea Mays
ccatctgactaggggtgataagcggtgctgaaatctaacttggtgcccattgcttgctggaggcctttccaaaattttgaggtgaactgcgttcctctatctgacactatcttccgcggtatgccatggagcctgactatctccttaaggtaaattcgggcaagggcggctcctccaaaagtggtttttactggaacgaagtgggccaccttggtgagacgatcgattattacccagatagaatcattccctttctgcgttcggggtagtccggtcacgaaatccatgcctatttcttcccacttccattcaggcactgggaggggttgcagcaggcctgcaggcttctgatgttcggcctttgttcgctggcaggtgtcacaccgggccacatactgtgctatttccttcttcattcctttccaccagtatctggttttgaggtctaggtacatcttggtggttcctgggtggatggagtaagctgagttgtgggcttcattgagcaggactttccgtgcctctcccattggtacacacagacggttcttgaaccaaagggctccttgatca

SEQ ID NO: 24739 - DNA, 390 bp, Zea Mays
atctggatcccgaagacatttcttcaattgggacacatggaacacattgtgcactgcagacaatgtttcgggtagttggagttggtatgccactggtccacatctttcaagaatgggaaacggaccaatgtaccggggtgcaagctttcattttacaccgaaatgagatatacccttcattggtgacactttcaggtaaacatagtcttcaacttgaaagatcaagggttggcgtcatttgtttgcataactcttttgtcgagcatgggcttctttcaaattatgtataattcgttgaactttttcttccatctcttttaccatatcaggcctgaaaaccacctttcacctggttcagaccaatttaaaggggtacgacaccgtcgtcca

SEQ ID NO: 24740 - DNA, 1148 bp, Zea Mays
tcagtcgctaccccattcccagaaataatatgacccaaatatgacaactcctttttaccaaagacacacttcctttctttgagataaaatttgtggtgtcgcaaggcagtgaaaaccagccggaggtgctccaaatgagattgccaattggggctataaaccaggatatcatcaataaagaccatgacaaacttgcgaagaaaaggagctaacaccaaattcatggcacactgaaaggtggccggagcgttgataagaccaaaaggcatgactcggaactgatagtggccctgatgagttttgaatgccgttttaaactcctcggagacacccatgcgtatctgatggtaacctgaagtcatgtccagactcgaaaagatttcagtacccgccaattcatccagaatttcctccaccactggcatgggaaaccgattcttaatagtcatatcattcaatttgcgataatcgacacaaaaacgccatgtaccatccttcttctgcaccaagaggactggagacgcaaacgggctcacgcttggagtgatcaaaccggatttcaacaagtctgccacttgtcgctcaatctctgtcttatggtgaggggaatatttgtagggccgagcattaactggtatggaccccggaagcaaaggaatgtgatgatcaaatggccgagatggaggtaagactgtaggtgcctcaaaaatatccatgaattctcccagcaacccttgcaaatctgtatgaatttcgttgatgctcactgcagtcacctcttccaacagagcaaacacccagatatcatttccgcgcaaccaccgctccacttgtaaagaagatacctcctgcaccacttgttgttgtggatgatttcccaccaactggacctcgatccctttgtccacaaaactgatcacctgagcttcccaatcacaatgcataggactgtgccttctcaaccaatcatagcctaaaatagcatcataggcccccagccctagcaccctcatatcattctggtatgtgtgtccgttggcccaccactccagtgatcgcaccattgtgtcactatacataatctctccatttgccaccctcactttacatgaagcacaagggtgcacggtcaggcccattcgatcgac

SEQ ID NO: 24741 - DNA, 961 bp, Zea Mays
agagtgtataggggcatagagttctcacaccgcgcgagaagactccgagtggcgagatccttcacggacaaaccaagggtcaaactccatagaacaagttgtcgatagtgaactaacgaagacaaaaggttctaaataatgtcaggggcaacaagaacgttgcgaatacaaaaagaaccaggaagaaccaagttgctacagaggtgactgcaagaccagaaccattgccaacaataatggaaggagggtaggaaggatgaggggggggagaggataggataccaacatccggagtagtgtggtaggaggcattggagttggccacctagtcgatgatggccgcaagaggggtcaaggttagcgtgctaaacaagttagcaagagcctattgattccacgccctagcccatggtgcctaggactcaaccgagtggggcaacgacagcgggtgcgaaagaagcgagggctggtgcagcgctggcagagccaaaggagatgtccaagagggctcccaggtccgctgaaggacagagtggcaagtagtgacggctgaggttgcgatggtcataacgtcagacaacatggagacgggctgtagagagacggctaggatgtgccacctttttccaggaccaccactacctcctccagcgctgccgccaccaccatgttgatgccaacaatagttgaccccaccaaagctggtagaagaacgaggcgacggggtcctagagataggagtggagggcttggtgcgctgagatggcccaccaggaccgaagctatagagccatcacgatgatagaaggaagctatagagagctcttcaaggatgaggtcgttccgggccgtctaggaggggtatataatggaccacatgatccaagtctttaggttgtcgtagcactcattaaggccgcaaagaaggttgagtacgagggtacagttggagatcggctcg

SEQ ID NO: 24742 - DNA, 495 bp, Zea Mays
aaactcttgcccctatcctacgccactatgcactagtattttttgacgacatattggtttatagcaaaacctgggctgatcacattcaacatttacagtccgtgtttcagctattatgggatgatcagtggcagatcaaattatcgaaatgtgccttcgctcgtcaagagattgcttacctcggtcatgtcatttcaacacaaggagttgcgaccgacccagcaaaggtggctgtggtagcctcttggcctgttccaacgaacagcaaggaacttcgtggtttcttaggcctcgcaggctactaccgcaaatttgtcagacattttgcagtcattgccaagcccctaactcaactgttgaagaagcataccttatatgtgtggacacatgaccatgaccaggccttcaccactctcaagctcgttttgtcgaccactccagtattacagttaccaaaattcagtattccttttgccattgaaacagatgcatcaa

SEQ ID NO: 24743 - DNA, 307 bp, Zea Mays
cggcgaagcagcgcatggcatgtagcggctagggcgctgatgacggctagggctcgattttggtaggagttgacggagggcgctgatggcggctgggattggagggcaggattggagagtaaggaatcgaggcggggcatggcttgcggccgtgattggaggcgagttgggcgcttggcgggcagctttctgcgcattcctggcggccgtgattggaggcggaggtgaggtgcgagaatggcaagaacacgatctcagtttgaatggcaaagaaactgcactgcagtccagaccatcattcgctaaa

SEQ ID NO: 24744 - DNA, 348 bp, Zea Mays
cgaagacaggcttggtgccgatggagaaacagaagtccctgaagtcctggatgtcaaactgtttgccattgtcgactgtgagcttagacgagactccgaattggcaaacaatgttttgccagaagaacttttgggtggtcttcgatgttattgtggacactgccctggcctcgatccacttggtgaagtactcgatggcgacgaaggtgaatttgaggttcccttgaggcgtaggcagtggtccgacaaaatccagcccccagcgttgaagtggccatgtgtgggcgatcagcttggtgaactgcgaagggttgctcgagcggggagaaaacttccggcatgctccgc

SEQ ID NO: 24745 - DNA, 521 bp, Zea Mays
atccatgcctgtttcctcccacttccattcgggcactagaaggggttgcaataagcctgcaagcttctgatgctcggccttagttcgttggcaagtgtcgcaccgggccacatactgtgctatctctttcttcattcctctccaccaatatctggttttgaggtctaggtacatcttggtggtccctaggtggatagagtaggctgagttgtgagcttcgtcaagcaggacttctcgtgcctccccttttggtacacacaatttttgaactaaaggactccttcctcatttgtcctaaagtccggaagtggttccttgcgagccttttccataagacctgctgtctcagtgtccaggcgttgagccttgcatatgaggtcttctagcattggcttgacttctaggctgccattgtctcccaaacatgcattcagctgagctaattctttcttccaatcttctaagaagttggttcctttcttcccgaaaggttttcggctgagggcgtctgctaccacgtt

SEQ ID NO: 24746 - DNA, 333 bp, Zea Mays
tggcccttggccgagcgatctgaattggacggacaagattagaacctaggtatcggtttgatcaaatcaatctggggcattagatccagatcgtacgtgagcgggttgatctggacgattttaaatccgaggcatccgttcatgatctgatggcccctgtcgcacactgaatcattataagctagatctaatctaggccctcggtttttgatcgaacggcctgatgcgaagaatacccccttcggtcgcgtaaacatgcaaataaaccccccctgattccatagaatcaacccgccatccacagcgactgcgccttgagtcctggaatatttt

SEQ ID NO: 24747 - DNA, 292 bp, Zea Mays
caaagagtaaagaacaggcaaaagcagcacaacatccataccttcagaagagctgctcatctttggttggactgctcagctgctgtttttcgcgactaaaatggcggagaaggctgctgctgactgctcacgtctaaaatgggggagaaggctggtgctgctgactgctcacgtctaaaatggcttttggcctcccaaacagcatttaaaggactgctgactgctcacgtctacccaggctgtatctgaagggattgggcgtcctttggcctcccccagacatcatttaagc

SEQ ID NO: 24748 - DNA, 342 bp, Zea Mays
tcgctctgtcaggcgccctgaattgggtgtggcatggaatagtaattgaatcagatcccaggttcactgaacctgccgccagcgtcctcacactgtaatccaatctcgacttggagattcgtgtgaaggagcaaataaccgcggtgaaaagatcatcggggagggtttggattggttcacgggaagaatcattcgccgtacccacttgcacggcatcgtggccgagcagccaccatcatggtggccaccgtctcccgctgttgcgccacgccgaggtccatttaccatgtcgtcgtggtcgtcgtgagtagggaattactaccctgaaccgttacatcgtcg

SEQ ID NO: 24749 - DNA, 402 bp, Zea Mays
ctcattacacattgtctctattaattccaaccattcggcaaagggcttgccaaagcttttctgaaatttaaagcggtagggaagtcgtacaagttcatatttattcccttcttctttcttcttcggcatcccccatccaccagacgttggaaaagttttgttggctaggtattcttgcaccaaatcccgagtactaatatgctccgccacaactctaaattccacttcggctaactggcagggggacccgagttgcatgttgcacaatggccgtgtcataccgaagctcattctcaggggactcatcaccatagtcataagcttctctctcttcttctcatcaactttcacgtaaaaccattcatttgtccagccagtcagcaacttggtgtgatatccaat

SEQ ID NO: 24750 - DNA, 348 bp, Zea Mays
catgccaggtaaagttagtccaatatcattgagtaggcatctaccatgaatgttgtatgacaagatctactggagcatgcagacataatggcctccctttgtaaacttgccacatatagttcttgcatgccggtaggccatagatgaacggtataggagacaaaaaatgttttgctgtggaagcagctgtacaatagaataggtacgataactaaacgcgttgctggtatacacatttttattttacatattggttatgtacaagtctgagttgatcatgcactaagaagtctgtagggggtccgcatcaacggcccgcaacacctcccggtaaacaacgtttcgagt

SEQ ID NO: 24751 - DNA, 314 bp, Zea Mays
gtctgaatcactggggaattagatggggacaatgtgttggaggtaagtttctatatactgcttaacattgttactgccatgttacaatcgccactagtgatcatctggtgtacatatatctcagggctcgcatatgttctctgtcagttccttttgtattgactctgttttgagtcgctctgttgaacattcgtaagaatacttagaggtactatttttttatcttaattctgagtataatcgcttcatctctctcttgctactgctgtccccaaacttcagtaaaagcaaacagtgaaacagcagccagatct

SEQ ID NO: 24752 - DNA, 604 bp, Zea Mays
gcggaccacggacgatgaggacaattgcacgcgttcccggtgaccagtggtttcctagtgcaattgggtgggttggcgagtatcacagacgtatgagaatgcttaaacaagggagcagaggggaggagttgacctgaattgggttgaccacgacggggtgtgttttacggtggcggaaaccgaattgggggaaatccaaaattgaggctcactagcgatcgactgaggatgattcttggcggctgggttcgtgatgatccaacagagctcacggcggggtcaatttgtaccaagtgaaagcggtggccggggatttgagcgacgacccgcggcggtcggagaagtaagagttcactggcgcgcgattagtgtcctattaccgtggcagtcattccgacgagccatggagagtcacaagggttcacggcgatgtggtggacaggtagagacacgccgcggacggcggtgatggcttaacagcggtgagaaccttatccaagggatcagtgagcaaggggagaggcacggcggctagccggagtggcgtccagctcatcgacggctatgctttttcaccccgcgatgttatctacttgccacgagc

SEQ ID NO: 24753 - DNA, 275 bp, Zea Mays
ggacggtacgacccaaagatgaggcgagaggcctcaagagtactctggaactgtggggccgaatcagctgagcaaagatgtgacacaaatattgagcataaggcagctgtcgacgagcacgtagaccatccaggactgtgtcctcgatctcacaaatgagaaaatccacaacatcaaactctgagtgagaaactagggcaccaatggcagaagcgtccgtctcatgagctgatatagaaatctggtcgttgtggtgaaatctgccggagaacatc

SEQ ID NO: 24754 - DNA, 351 bp, Zea Mays
ccaggtagggggctaggcattaggtttttgcttgtttcctcgctcagcatgatggtgcaaatcgtggagcaccgcgccgagacttcaacggatttcctggtggaggaagaagcagtttcttccacgccgcaggttcccaaccgcccagagccgggcattgctgttgtgcacgctgcacagcaacatacaactgtgcagacatcccggactccgtcgagagcagctccaggagcattgtcagtagccagggagttgctgcgtcaccccctaagctccacggcctcaccgggtgccatgaagcggtggcgggacgacgtcgaccgactgctcagcatggcacattctacctcg

SEQ ID NO: 24755 - DNA, 1148 bp, Zea Mays
cgcgcggcggtggggcgccggcgagcgtggaggagatcgaggccaggcttagggaggccgagctccggaggcaggtacgtgtccctttcgtcctgtttccttcttcccgccgcgtgctagtttggtttacgttgcttcttgcttgctcgtagttgccagttgggttgcttcggcgtgaactgtgaagtcgaaataattcgtagcggtcacgataattacttgatcgctttttactggtgcggtgaggcgaggccagggtagttgttctccgcccgtttctgaagctgttctttttttttttctggatttctcctgcgatttcattggccattaattccaaattggagttccttttggcgagacaaaacctgttttactcttttcatgtgcgaatttgttggcaagtaagggtgtaggaacgaggaattgggaggtgcagactgcagagtgtgtggattgtggaaggtttgggaaaattggatgagcaccgttaaaggatctctggtttagaaaatactactgaaagatttagttgtagaaaactagcacctgaaggttgctccgttgtttcgttttaccatccacgttgacttgtccggaaaaaaattggttggagcaacacaagcaccgaccgcgtggattggcttagaagtaacttgacacacatgtacctctgcaaaatttggtgaccaaaaacatggttggagctttttgttgcttaatgtgaattgtgatttgctagtcgatgttttgttaaatttgctctaaaccgtttaatgaggagtctcttgatgggtctctaggggcctaagttaaaaaaattaagcccgtctcttcacggactttcgtagtctttcgtagtccgatggttcttgtcgtagtccaatggttcttgagagttgtcgtgtttactgtttgtttgattcattttgggagtaaagtgtcataggaaacaactattggagtcgaattggactgattgcagtataggataacttgttgacttttcgaatgttgtttttcagcaattccgtgaatggttggcctgcaaagcaaggaagaagccacggagcccgtcgtggtcctctcaagaagaagaccatgggcagcgccttgaagcgaagcttctggctgctgagcataaaagg

SEQ ID NO: 24756 - DNA, 608 bp, Zea Mays
cactcgaatcgacggtcacggtcttcgttggggagatcgaaggtagctggttcttcggctagggagaagaagacgggctcagctcgggttgtggtgcacgacagcgagctgaggaggtgcgaggcatcacggtgcggcgtcgggctcgctttatagacggggaaaggcggttcgcctgagaaaaatctcggccgacgactgtgcgcggcgacccggcacagtgtggcggtgtcttcccgaggctggtcggcaacttgcacggagctgggcacgacttcggtggtgattgaggtgagtggctggtcttcgattaggctgagcgcgcaggggcttgccgggctactgctttcactgcttgatgcgtcgtttcaggtcttctcagctcgacaacgtggtctcaactcccagaccagcatcatggcgcgtgcgtgtattggttctggtcaggggaggtagaagacagcttgcagttcccacacgaaagcttcttgccatggatgcgtgtcctcgtcgtcggggtgtcagtaacggtgagtaggtgctactaccagttgactgtgagttattgtgaggtacggctggctcgagaggcttccgaggcaagaaac

SEQ ID NO: 24757 - DNA, 495 bp, Zea Mays
tcggaacattcctaggccatcgacccctggtaaccttcagcattcgcgcagaaaatccccgagagccaagcatgtctccaacaaatccgcaacaaaacgatcggaagccctccacccgtcagctactgtacctaatttacttttcttgatggccgtgcccggagccttgtcccgtgaggggccctcgtcggccgttgacatcgcctgtttcccccatcgtacagcaacatcggcatagtcatcccctaggtagctagcatacggcaaacagttcaactcaaaaaaaggatcaacctaacatttgaaccacggatgtcccaacttcttagagtctccatcttcggcacatattttcctataattttcgtggcctcggcctccacttcacacacaaacgcgaccgcgttacgaccgcgtaaatccaccacgaaggctagacttcgcaccagctggtggcccagggttggcatccgatgaggggtcacttcgcccaat

SEQ ID NO: 24758 - DNA, 371 bp, Zea Mays
attttatggagaggaggatgaaagcatgcttggcaataatgatgtcattgtggatagggtccatgtgaatccagccaagggtagggctctgggtgatggcaactcttcaacggtgagctgggtgacaaaggattcagactctatggcggtgccttggaggagtaagaagtcgcttgtagagattgttaaggagattgatgagtacttcttgaaagcagcagcaagtgggaatgacgttgtgatttttttggactctgctggtggacggcctgatgccttagaggtagaggcaaagaaaggtaatacgtgcccatgtactatcattatgtacatatttttgatatgtcaatcaataacctctgctctagaat

SEQ ID NO: 24759 - DNA, 334 bp, Zea Mays
gttcttctctgtgatgaactcatgaccttgctgtcattacttaatttgttggaacatgcttgttgttatttgattattgtgtctagtacctctgtcattgcttaatgtgagtgtggctgatatgctattctctgtgatggactcatgaccttgttgtattttggtaggtcgtgagggaacggtgtgcgccaccttgatggtgacgaaaccggtgctccgaccctactgcttacgccattaacgagccgcgtcaagcacagaggtgagatgttcttgatctggctcctcgtacacgatatgctcctgatctattcttctctgtgatgaactcatg

SEQ ID NO: 24760 - DNA, 531 bp, Zea Mays
ctgttcacaacagttgttgggactaggccggaggtgctaggagttgaagtgttagaagaagtcgcacataattttgaggtccatattgaagccatgcagattcatcaagtccagccagaggatttcctcttgattctacctgatgaagaaactgcctcaagagtgcttaatgatggcaaggcatatagggggcctcatttcagtttgaagttcaagcgctggtcgagatttactcatgcatcttcgacgatcatgtctggtatggtggaggttgagattagaggaatcccagagcacgcttggtttcgttctacggcagaaaacatcttgagagactcttgctggatttcggacgtgcatccggatactttgcaaaagaaagattactcagcctttcgggtcagtgcttggtgctttgatcctggaagactacaccgtgatatggaccttctcatcgtcgagcctggattgcacgcacttgagaagagatgcctcacttacaagattagtgtgagcgctaccctgtcagag

SEQ ID NO: 24761 - DNA, 339 bp, Zea Mays
cgggcgattggcagcctcgccggcatgctccgccgagcgtgcggggcggcgccgccgtgttttttctgtgaggtgggaagacacgtgaggaccgttggatgtgtcagtgacgatccagattagatcgggcgtaccgtttcgacacgttagatccaaaccgtagagctataatctaatgggtgagaatcgacctcggctatttataatttggaccgtagatctctgatccagtggcctgcgcggcacaccgcttcgcccatttggcgatctaatctgtaccatccatcgtggatcggacggtgcagatccactgaaacccgtcagccgcgtcagttttgc

SEQ ID NO: 24762 - DNA, 644 bp, Zea Mays
ttcggaggcttgccggtggatcacccgttgacgaattaggggagggaatcaatccagtggcggccggaatccgacatcgcgtccggtggtccgccgtaggaagtctagcaccaattagaccgcggcgttcggtgagctcccaattctttaccctttccgtattcttttacctatctaatgccgcgccgtcatcaatcgtgggcgaattgggcacgaatttggcctttgtgcgggggatgtcgttcgggcgccgcccgtatcgcggtcaggggtattcggttgtgtggcgttcggcaaaatcgtttcccaggtgttcgtccatgggctagcttcgtgttgcgccaactcccttcaaggttgatgcattcgtaccccgcggagacttctccggccatggcgtccgccgtggatttgcctccgccgccgctctcgctcatcggtgtggggaggggagatcttggccgttgatctctcaggcaacggggacgattagaaccgaagcaggttaatgggggacttcggtttgggtcgcgggaaccgtccgattcaaaatgggcggctcagattagaacccttcgcgcaatctagttggaccacagatccttgatcggacggcttagattcgtccataccccttcgggctt

SEQ ID NO: 24763 - DNA, 493 bp, Zea Mays
cgttcggccaaatttgagtctactcgtccatttgcggcgacaagaaatactggagttgtatgcagggcagtcgatgatcgtggaagagagatgaattattacggagttattaatgacatactcgagtacgactttgctggttgcaaaaatcttaaggtggtgtttttcaaatgtgattggtttgatcctaatcaagggactgtagaaaaccaatttggcatggtagaagtcaaacatgagctcaaaacaaatgcatgtagcaaatttgttcttgctcaccaagttgaccaggtgtactacataccatatccatgtacaaagctggaagccacgtgggtagtgtacaaagttaatcctcgtgaacggttacacaacaagggtgaatggttcgagacagaagttgaagaaatttatcaagaagatgaactcccaaccagttttaatatagatactgaggttttgccagaatccttagtgggagattcagaagatg

SEQ ID NO: 24764 - DNA, 373 bp, Zea Mays
cattgcggagaccccagtcactacaagaataattgccctcagttgaagacatccgtgcctacctactccaactcggtgaatggctccaagagtgccccagcacccgcctccaaggcaccctcctccaacagctagctaagcaatagccagtatcatggcagggcacgagtaaaccacgtcgacgctcaagaggctcagcaagccccaggagtagtgctcgttgagttcctagttgaatttactcccactgctgtactttttgattcaggagcatctcattcattcatagccactggttttgtggaaaagcatggcattcccactgcacatctagaaattcccttagtcacccaaaccccagggtcagaccttc

SEQ ID NO: 24765 - DNA, 290 bp, Zea Mays
gtcaccctgagtcgagtaagcatgcagattgacaataaacagttcgagtgcctttgagaatgaagtctttttattgatggtgtattttccaattacagaatacaatgccgtcccaatagcttttgaaatctagctaggggtaaaacttcctgagatgctctatattccatgagttccctatttccctgccatccatttgagtaagacgatataatccaggccgagtgacttctgctactatgaatggtccttcccatagtggcaacaatttgtgacgtccttcccccgtt

SEQ ID NO: 24766 - DNA, 369 bp, Zea Mays
gcgccaacaaatcacacgacgcacaatcacgtactcgagtatacgtgtggcatccagagtcccagcatgaaaaggctagtggcaatcaaactatggtgagctttatttgcaatatgaaagtatatctgctctcgagaacgacgacctactttcgtatgattttttgtgctttgcactcctcctattgcgtctgctttatacacgtggaaatgttgagtgaaagtgtacgtgtttgttaaatctccctggaattcggttcaaaatccttcggccacactcaacacacgccagatcaaatcagaacgcccaatctccgtaatctcacgataacctctcaatccattttctaccatgtaaggcctttttcgg

SEQ ID NO: 24767 - DNA, 725 bp, Zea Mays
attgtgtcttggcgctgcgtgtgtggacaacaccatcatgagcggtcgtccgtgcacgttagtgtgcccggtccctacatatgtcaccatacaaggtacactcctgtgactggcacaagccggtaaatagggcggaagacacgcctggtcagaaggtctataggcgaccgagggagaagatctctgtacatagtgcatttactgctccatgtagtacatattaaatagtagtttgctgggcggaagacacacctggtcagaaggtctacacgacgaccgagggagaagatctctgtccatagtgcatttactgctccatgtagtacatattaaatagtagttcgctagggcccacctgtcgagcctgctcggcaccctcataatgtgccacccttagactataaaagggatgatacatacgatacaaggggacactctctctggactcaagctcattcagactcaccacgctcaagctcttaagcaatacaactcacagtggacgtagggtattaagattcgacggcctaaacaactttaaatcatgttgttcatgtgttcttgcacctctcgacaggcataccctaggcagcccactcttacttaggataaggtgggtgcattccgccacccggctataatttacctccgacattatcaatgtcgtatgttaaggtaaagacttatatcgtgtttggtttgaggaatgaggtagtccatcttct

SEQ ID NO: 24768 - DNA, 278 bp, Zea Mays
gtatcattcttgcatctctttattgaagtattcaagctatggtggttcagtctttcctgttggctagtgctttgtgctgccatcgttggtgatggggacctcctttcctgctcgagtcctggtggagacgaagaggtgatgtgaatgggtcaatgtggatgagctgatgttgctaaattggtgagatcgattgatgtagaggtcgatgttgtcggttcctctaggcgtgctaaaataattgaaatgtgtcgtcgcaagaaatctgtggccgattgtcc

SEQ ID NO: 24769 - DNA, 359 bp, Zea Mays
aaggagaaaagatctgttgtagatatttcagatcattatgatctacattgctcgactgaaccctccttgttcagccccccttttctctctgcttttgctaaagacagactaatatctattaacaaaacttgttcaccaaacaaggatcttcaaagctactatagggttcttggacctaaactacatagatccaaagttatggcgcccaaatatcagctacatcacactggtgccatttcaattttctgaattatggcctacagtcaccatctgcttttcccttctgacaaaggcagtttgagcaacattatttcctagatttatgtggtagcaagccaggccctcctaataaactggtt

SEQ ID NO: 24770 - DNA, 723 bp, Zea Mays
caaagaagcgtttccgattccggtcgtcgacgagctccatggcgcacgcctcttcaccaagctggacctgcggtcggggtatcaccaagtgcggatgcggtaggaggacgtccataaaacggcgttccgcacccacgatggcctctacgagttcctggtgatgccgttcgggctgtgcaacgccccagccatattccaggctttgatgaatgatgtcctgcgaacctacctctgccggtttgtgcttgtcttctttgacgacatcttgatatacatcacctcatgggcggaccacctccggcacctccgcgtcatcctcaacaccctgcgccagcatcgactctttgtcaagaggtccaagtgctcttttggtgttgactttgtcgcctacctcggccatgtcatttcagcggctggcgtcgctatggaccccgcgaaggtccaagccatccacgactagccccaacctcgttcggcgcgagccatgcgtggcttcctcgatttggcaggctactatcgcaagtccgtccacaactatggtgccattgcagcacccctcacgacactcttgaagaaagaggggttcgtatggttcgacgaggcaaccgccgctttcagtgccctcaaaagggcagtgacgacatcatcggtgttgacattaccggacttctccatgcccttcatcgtggagtgcaacgcgtccacctatggcttcgttgcggt

SEQ ID NO: 24771 - DNA, 466 bp, Zea Mays
gggcgccttgctgaagagtgtgaaactcagtatccacgagaaggacatgagtttcacggttgccggtgaactgttgctccagagtgatccaggcgccgcggggcagagggagtcctcgttgtgatgatctcatagaggttgccggtgatagagccatagagccacgacaagacatggaggtccattcgcacccagtgcaggacaacaggaaacgaggcgtcgaaaaggacgtggtcagcgagcacatacatgtcgagggagaggagcatgaggtagcgtcacttggagaaggagggcatgccgagatcgaggacgatcgggacgagggtgtggatgttgaggataccgagagcctgcgtatggagagtagcaagagcgttagcatcaccagtgggtggagcagcgtcatcgtccacgacactatcaaaggcaccgtcagcagtggcatcagcttcctcaagctagc

SEQ ID NO: 24772 - DNA, 373 bp, Zea Mays
gcgaggacaagctaagggtggtgcctgcggaggcgcccaaggcggcgccgtcggcaacaagatgccggcacgagatgacgagcgtcacaactatggcaagcttggccactggctagggaatgtcggcagccacgacacagccagactaacgtcgcataggtagaggtggatgaggaagctctgctcctagcacccacaagcatcgagctacctccagcggcaccgaccgtagcgacactcctgcaccttgatgagtcaaaagcatgcgctttcctcggcgacggctctagtaacgacatgatcgaaggatggtgcctcgacaccagcgccactcatcacatgaccggcctacgggagttcttcaccgagctcg

SEQ ID NO: 24773 - DNA, 291 bp, Zea Mays
caccgaacgacaggttcagtttggcttttgtgcgtttaatagaatattgaggcattacattatatgggcattcctccccctaatgccgagatgttctaaaagcatacaaataatatccccaaccacaatcatccagttgtggtcattgtatgctattgtggtgatttatttgggaaatcttacgcacattacagataggggttttatgcagtgagctttggacttagattaatgtagtggcatgaatactacatatttgtctttcaacgtgaaggattagtctcaacttcc

SEQ ID NO: 24774 - DNA, 657 bp, Zea Mays
caccaacggaaaggctcccaaggcatgcctgatagaaggtttcaggccctgacggaactggctcgccttctccatctcattgtaagccacatgaggaacaaagcggaccatcttgttgaagcccacttcatactctgtgacggacttcttctctttcttgtaggattgcaaatcaatcttcattttctccaggaaggtgaccgggtagaacctcctctcaaactacctgatgaaaacatcataggacaagactcctagtgaagaagagtgagctgcctgcacgcccctccaccagatttgagcctctcccttcagcagttgtgtgccaaagcgaacacgatcaccatacacaatctcaaagacattcatcttatcctccacgtatgttagccaatctgccgcctcgaccggagtaccactgccatcaaaagtgtccaacttcatgcccatccattgcatcagcgaaagaccactgacgggaagaggaacctcagccccgccatctggagcagcacccgcgggaacagcgcccccgggcactcctccaccaccagcaccctgggcagcacccgcaagagcaacaggaatagcctgcctcagaatggccaactcctgctgcatggcctgcatcgcggctaacattgccgccggactcat

SEQ ID NO: 24775 - DNA, 370 bp, Zea Mays
ccgggggtcgccggccggaggaaggcgggcatgtgcagtgcaggtacagccatgcccggcgccgggcgggcaaaagcctcgtgccaacctacaccccagacccaggctcgaaaagccgcgtcgtacgtcgtttcgggcgagttacagcagctagcggtactgaacggtgaaagggaagagaaagagcttgctagcacgggccgacgcatcgtcgatcgtctttctcgctgcgtcgctttcctccctttttcgccgtcgaggttccggccatgatgagtgctctcacgggctacccatctcccggtctcctcttgttcctccttccaggcacaccatcacgagcctctgacagcggcatctcctcctcgct

SEQ ID NO: 24776 - DNA, 320 bp, Zea Mays
agcagttcacccatatggtcatccaaaaatcactacatcattagaatttgtcttgaggagaaaggttgcaacaaaccatcaatagcagccttcatcaaaagattaagagtatccataacaatgatgaacaacaattctacaatgttgaaagtggtatcgagtataaaccacatatattactccctccatccaagaatgataatcatattttgattaaagaaaaaaacaaattacaaattttggccaacaattatcctatgagaagacatcaacttttaacaattaacaacatattgggtcaaaacctaatgtttatgtcc

SEQ ID NO: 24777 - DNA, 306 bp, Zea Mays
gcaattggggatcggtgctgaaccaatcagtgggtaattggtcccagggatcgagatcattggtgcctaatatgagttttcccacctttgatggttctaatccaaaactatggaaacatagatgtgagacttattttgatttctatgctgtggctagagatatgtggattagatttgcaatcatgtacttcgagggcccagcggtattttggctgcaatctatggaacatcatattagaagcatgaactgggaggaattttgtttgcatttaaacaatcggtttggtagagatcagcacaacatgc

SEQ ID NO: 24778 - DNA, 490 bp, Zea Mays
cggagattggtccgattggtccggacgaaagcaacaaatactgagttgcagcaagatgcagaaggacggcggaatattggtcccattgcaccaacacaacaaagttctgacaacaatatagaacctgttgtgatgccaactggacctacaccaccaccggaatcgggcctgaatccagattctgcaaactgcctcactgatctaagattgactgaaccgccagtgtcgcgcacgaagggtaggaagtctgccagtggggctaaatgtgctaaaaatagtgtggaacctgctaatccatacaacacatatagtggtggtcagggcataagagagtgccaaacctgccatgttagggggcattatagcacaacatgccctcagaacccaaacagaagcagagcggccgagaacaaggacaaacagagaagtgtgaaaactgtaggttggactccaagaaaaagaggtcacccaacaataaaaaaaggactag

SEQ ID NO: 24779 - DNA, 639 bp, Zea Mays
ctttacgactacaagcaattgcttagctggatcactttggaatttgctcaatctgttgctttggcggggcactactgcaaaggagcaggcaattgcgttgctgaatcatttactcttcttctttccacacttggttcgtgcctggaggttaggatgctagattagccaagtatataggtactatggtgatgctggtataattaaaatggaaagaaaaactgcttccttggtttttctttgttctggcgtgtgttgggtatctacccactagtgatttggctgctccatctgctgtgagattacactcaaggtttctattttttcgaatgcgccagtttcgagtgtggtacgctgtgggatcattctcatcgattctcctgccgtttctcctctcttcaactacaatcccaaagtcacacagctaaagccagtgggattgtgtgcttccttgggaggtcttttttttcgcagcggtggatcatgtaacgcctttcgggtctatgatgcacacctgtgcgttactgggacctgtccttgttttgagctcaagccagtctgtatacgcgcagtatattccgtatatgaaactctgtttgtccagaagaaaggctaagagaaagaggtgacacgaacgttgta

SEQ ID NO: 24780 - DNA, 351 bp, Zea Mays
ctcgctggtctagtcactttagaggccagtgatccaaacgccgggagtctaccgcctgctgacgaggctgaggtccctctaagtcgcgcctttgatatcattgatgctaatctcccctcatcaagtaatgtatcaactcttcctgctttgggtcttcctttgttcctctccaatctttagttgagtcgactttttctttttactgttcccactggcaaactggcctttttttcttatctttccataatcataggatattcttggtggtgtatctgcccaaatgagatcttgcggtgctcctatccccgatcaagtttcgtctctgatgcagtggaaccctctactgcttca

SEQ ID NO: 24781 - DNA, 361 bp, Zea Mays
caccagcacatttccaaaaatttcccgagactacgacgacaaggcgtcgatcctaccacgcacataaaagcatcacaagcatatttacggaacctatcggttaacttgatcgacacactacacatgttcttcgcccttcaaaatttatcgcacaaccgaaatcatcccacttgctactgacaccaacaatgcttattgatctatcattcacaacacgaacatagttacacgccgcatactagtttctaacataatcctcacataactcgtaattcaactactcagtaacaataaatcacgcatgacaactaccacatcgaccggttaatttatttggacaccgcctgcctagcgtaccact

SEQ ID NO: 24782 - DNA, 533 bp, Zea Mays
gtgtagactctgccactacctcgaaaaatagtccgacaccacgtcgcacagctcgtgagcggctgcatgatctgtgatatcagttgccgccaaaggattgatgtcacgaccatacccggggcgagcacctggaagctcggggcatttttgtggtttcctccttcaccctccgacttcgtgcagtccagtggtcacctatcttcaaggtctctaacagcgaccaaatacaaggccaagcaagacctaggtggctgtatggccatttaagctatggttgcctaggctgccggggtgatggagcacgtcgtgatggcatatctcccgatcgtgctgaggcaaggcgcgctccagtggctttgttatcttcattgccactgcgtcgacaactgagccgacttctgcaattggttcatcgctaatttctaaccactctccgacctacatacgcagtcgtgggacctcaaacctataagatgcaagaacaatgagtccctttgcttgttcctcatgtatttctaatcgatgaggaatcg

SEQ ID NO: 24783 - DNA, 556 bp, Zea Mays
gtctccctcatcgctggcttctacgaggaccctagtgctgtcaccaaaggtgcgctgccccggtgctagctctagtgtacgtgtaccacatcaggctgttcgttattcaacttgatgcaatgttttcacaagccattcagtttactttaattttcaagtatcatgcacgtttagtgtgtcattgcattgctttgacattttcggtagttgttgctactgaactaataatagttggtactcttaaccttatggttgttaaccaaaaaaacatgtactgaatgtagtgcttagtaccaatattttgtaactgagagaaatgcgcataactgacatcctgcacttggttaatattgcttagttgaattaaagtgttatatgttatgccctaatagtgaaacagtgagtattgtatttggcaggatggaaggccaatccagttgagtttgattctgtattcaatcagagtcggcacactatctcatttggaagtccagatattgttcctatattctgcagtaacctacctcacagtacctgggacacttatccccatgaa

SEQ ID NO: 24784 - DNA, 444 bp, Zea Mays
gctacatcgccggtctggccgtattcagtgggcagggatcatcgccggcacacaccacatgtttacatggcctaccggggaggagggcgggactcgccgagaattcgtcaccgaacttggggcgccgccatggatccgctcgacgtcgtggtcacaaagttcggtgccatttctgctggtaaggaactctcccactagttcgcatggatcttctcttcgcatagcattaatcgagtgaagattcgtgcattgggggcatggttttgcgtctcgctggtgatggcgccgccacagggaggtccctgcgtcgcccatgatggccggtgtatgggggttgcacgtcagccatcggatacacggttggtgggcgagattagagttggaataatgatttgtgttcattagatctgaaccgtcgggtggcgatccgaccgtcctgattgg

SEQ ID NO: 24785 - DNA, 371 bp, Zea Mays
gcagagcatggagtatgttaccatataggtttgtgagaaaatcgagcctaaactatggctgtcaggttgactaaaggagttagcccatggtacagtagactgctcgggatcagaacacttcaccgccgacgatcacccctccgccgcgattcgtgtcgtcggtgttaggatttgcgctcgtggcagatggataacgtcaaggggtaatagaatcctcgccgccgatgagctggacgccactccggctagccgcaatccctctccccttgctcaccgcccttggataagggttctcaccgctgtcaagccttcgccgttgcccgccgcgtgtctctgtctatctactgcatcaccgtgactcacccttgctc

SEQ ID NO: 24786 - DNA, 337 bp, Zea Mays
gaccgcaggtgaccctgcgccgccgctctaatctgccgtgggtcgatcctggatgaagaagacgaagccgtggccgtgggatctcaaacgaacgactccgattagatctctggataccgattcggggcattaaatcgtgaccgtagcgatcagatcggtgggctcgggtgcaagtttgacgtggaagaatctgagccgtggatcttggatccaccggctgttagcgcgtaccgattcggtttattaaagaatttgatcctggtcgtccatctgcaatcgtgcggttcagaatcaatcttaccgcttcagtcaggcaattttctaaaagagaccctgg

SEQ ID NO: 24787 - DNA, 524 bp, Zea Mays
ccagaatgtaggtcctactggtcgagcttcagctggcagtgtattggacgtggggggcaagaaaaatcatggttcagttgcgcccggtacaaaaccagcaccgagatggtgtccacctgggttaagtcgtacgcaaaagcgtcgtgtccagcggttgaggactatggaaatgacagaaaagatggaagaggaggaacgtgacagatggtttaacgaggataggccaatggttatccctaagaaaacatggagggagaaacgattggccagggaggaaaaagatgatgacaacagcagtggttccgataaagaagaaagcactgaagcacaaggggacatggatataaacatggtgtttgttttacctactgagttcagagcaggagagggagatgtggctgagctaacattgggggctgagcgtgctgtgtttgaaaaaacaagtgagcagggatctcatctaaaaccattatatgttcgtggtcacattgatgggaggccaatggggggcatgctagtcgatg

SEQ ID NO: 24788 - DNA, 354 bp, Zea Mays
aaagatgataaggccaaagagccacaggtggaaagagtgatagaaatgccagaaatcctgagcctaccgcagtggtagatttgccgaagatgcatagagctcctgttgcaactcccaagaggaggaggatggccaacgtgctggatgctatgatggagactacaaaggccttgagccctgctcctacgaagaaaattgctgaagctgccaaagcgcaagccaaagccaaaactaggcaagcagaagccgaagctacaaaaactcaggctgaagccgaaggtgggccttcagcgcccgtcgcgacgaagcctaccgtgcctgaggaaaaaaatggcagggcagattgcacctgaa

SEQ ID NO: 24789 - DNA, 810 bp, Zea Mays
gaacccagtgggtgtaatctgaccacagctgatcccaatgggtgtaccgtccgcattattgatgaagatgaggaagaggagaatgaagtccccctaattcggaagaacaattggcgctacatagccagcggggaaagtagtggtgttccttctccagctttgtctgctctcgttggtctgcaagaattgtctctagcaaattttgatcagactctcgaagatatggtccaagaggatctgttgtcggagcctgcagatggtgggatgatggatatttgtgctgatgtgcctgatgctgggctggagttatcccgagcggcgtcccgtgcctcatcgaccttggagcgcggtcttaagggtcaggaggctggtctggattgttctactcccatggaagtgggtgaaggtccttcagccttagaggtggctgttacagagagctcggccctcaaggatggcgctagcgcttacccagcccccgagggtgtcgccggggataattcggctcagatgggtagcgtgagctatgacccagccctcgagggtgtccgagttggttctccctctcacacttccatggatgttcacgtagggtcttctcctccgcattctggttgcatggcagcagctcaagctttgggtcaggaagtcaccttagaggccggcgctcctgatgacagagttttgatttctgctgttgatactgacttggtccccactgatgcattgcgggttgctccgggtgttgatccttcatcgagccatcaactgatttcccacgacttgggagttccttcgttcttctccaac

SEQ ID NO: 24790 - DNA, 320 bp, Zea Mays
gggcaataaatatttcttgtggtcagctttggctataatcttgtcggaccatacacttatgacctatgcacacctcttatggtatagaaaatacacttcactcatttacatcatctatctatacccctataaaactcatcacttcaaacaaagctacaaccacccatcaaatgtacccaagttaaatcacgccatcaaaagcaacgctccagatcacttcgtttatctcctagcttttaatcatatcgaacggctagtgtttcgtagatcatccctcgtgaatcaccggtcaagctcatcgatcaattaacgccccagac

SEQ ID NO: 24791 - DNA, 293 bp, Zea Mays
gtgctccgggcgggtcaagggggtgctccgacaagcaatctcggtcgcagtttgagttgatccggtgcactgaggttggcgtgagcttcagtgaggggttgggagtgttcgaggccaggatttgggcactaggtgaggctgcagtagccatgcaccgtggaggcacgacggtctgacatgtaacggctctagcgcactcaaattcactacggtgggacagagttaaggcaaaagaagtgtggggtggggttccttacccatggcggtgctcggggaggcttggcatggcgtcg

SEQ ID NO: 24792 - DNA, 329 bp, Zea Mays
aacaaaaattaaacaacttttacatttggaggtttccaagttttgtggaacaaattgggttaatttgcaaaagtccccaagagcacccctatggcttaactcccaaaaacaatgagattgggctaaatttaggtccctgtatctcttgatccatggagattttgccatgagtcactacaacaaaattgtagagctactatagtagtctatgtttgattaagtggttaagccctggagctgtatggaatttggagaaaaatggactttagaaccattagataactgctagaaccagttgcatcggatcaactctataaccaagtagcgcc

SEQ ID NO: 24793 - DNA, 376 bp, Zea Mays
tctcccactgcatcctttcctcattagcagctctaagactcatggtaacactggggttgcagccatcaaaaatgcatttgtttctatgtttccacaaggtccgggctcccagaatgataagggaatcaagcccttttctagtgagcctagtagcaatattccgcaccgattcccaccagcttagatatgagccaacatcaggttgaggagccaaagaatgcagaccgaaattccttaacaacaggtaccaaaattccctggagaaggaacaggtaacgaggagatgatcaatagtttcatcctcttgatcacaaaaggggcacttctcaggatgactcaaccctcttttagcaagtccattcgcagtccagaaatg

SEQ ID NO: 24794 - DNA, 329 bp, Zea Mays
tgacggaccggttcttcgcgaagagtttatcacttcactactacaccgtgtctcttatagatgtatttatgatcggtttcaggattatgtcatgcagtttattaattgtttttcatttttagaaaactaaactagtgtctcagggttgtacatggcttaagtccctttgaatataataatagtatgcgacaatgcaaagttggtaagatgggagttcaattcatttggtgatgcaaccactactgttagacgcactaacgacatctggtcacccatcggtgatgatccctctaatgtcgctattttcacccttggggtctagacatgaa

SEQ ID NO: 24795 - DNA, 336 bp, Zea Mays
gcggaatctgcagtaagccagatggctttgacggggacaccctccattctggacggttgtacctttggcgccttgaggggtgccttggtgccggaggttgaggggttcctccctccgtcctctaggcgagcagtttctgccaccagggcatgcaacctctctatggctgcaagtgcggtggcacggtcaccttggatggtgaggactccagccggggatggcattttgaggaccaaatacccataatgggcgatggccatgaaccggtacagggccagtctgccaatgatggcattgaaggggaggttgacttctgcaacatcaaagacgacgttc

SEQ ID NO: 24796 - DNA, 322 bp, Zea Mays
gtcggggcactgtggttgctcagacgtcgtacccacttgccggcgacgtggtcgagcgggcatcgccgaggtgtacgctggtcgtagtgattgcgtcacgccgtgacccttttcaccacgtcgttgctagccgtaataactcagcaatgaccgtcgtagctcctcagccagagaccgccatgatagctcgcgttagtaaactccccctctctccggccgccagcacgccttctccaaattggacgccaccattgttggcttctataaattgagtgatcaaccaggtctgctaggttattatgcacccagtgcaccagctctc

SEQ ID NO: 24797 - DNA, 453 bp, Zea Mays
cgagaatcaataaaaaaagttacctgaaatcttttaagaacaactgttaaaatgtttggcacctcatgcacgctcagttgcttcctagctttaacataggcagaacacctgcatttaaagattcaaaatttcaaaacttcaatttattgtggtccaactgaaatgacggtaacaaacttctagccagcagttgcaacactaccttccacatttatacatattatcaccatctaaatcttcaggagcagtgaactgtgtcaaagcatcttgcaaggactctacccagccatgaatctccaaagtaagatccattatattctcatatctttcagactcgtgatagcatctgaggcacttaacctagtatcataaacaacattaattagtatatcatagatcaagatgatgtcttagactcagagtatgataaaccaactacagggttgccatgaa

SEQ ID NO: 24798 - DNA, 282 bp, Zea Mays
cgcgagtgcgcgctacaagaatgtggttttggggttgtcgtccatgtgcggttctatgaatcgtgtcgtgtgggggccatgcacaggggtagacgcgtgatgtccgtcttgacaagcgaggacatggcgccaacctcgcgcagtggctggtcggggtttgtgcaggggctatccgagggtgggacgaggttgctgctgtgcgggatgccgaccgtgagggccactggctgctccgatcgtggtgagtgtcggcagcaagcgcgacgacatggctgagatgac

SEQ ID NO: 24799 - DNA, 521 bp, Zea Mays
ggtgaatctgcaaatatccaattaaaccctatttattttaattataataaggatggcgggtttattataaccaaacagaggggctcttcataaaatttgccgcgtgaaggggtatgaagtgagctcggtcgttggattagattcggacagccaaagatctaatcagaactggtagaccccggtggccgtaatatctgagagcaacggctgagatcctaaataacagaaatcgccagtcgcccgatcgatccaaaatcaacggctcacacaacaccacgaaccggtaagagatcgatctaatcgccatggttgatacctgatccaacggctacgacgcgatcccctacccatctctccttaccgcagaccaaacacagcggcgccgcccgaagggcgcaccggcgacaagccacccatgaaccgatgccctaagctctaattctaccggtgccacgcgacgaggaggacaaggcagactcagatgaggactacttaccgatggttaggctgcaacattcctt

SEQ ID NO: 24800 - DNA, 454 bp, Zea Mays
tgaaggtgactggtatgtagaggtgtcctagccggtactccccctcggtcggcttaatgctaaagaagggggtgtctgtccgggtgaggtcggtgatcaaaattcccaaagcctggagtgtcctggggaaggtgacgttgatgctgttgccaccatccaccagatccttcttgacccagctttcttgaatcactaggtcgacaagtagggggtacttgttggggtgatcgaagttgagccactggtaagcttggttgcgggagtgggtagccagcagtcaagcagcgtgcacttgttcctgaggcctcttgtcccagtgcttgtctggttgctggtttacgtcctttctcggtgctggaggtgcgagcttcgctctctcgatgaggtcttggtctcgttcgtcgacggtgatgtagatgttcgcctcccaaaacaattgttccgatgtggcggg

SEQ ID NO: 24801 - DNA, 387 bp, Zea Mays
agagggcttttcatcattgttatcactaactagatgatgagtctttgatgttaccttgtgccatgatacacttgtgtaatacccaacttttggaatataaaaaaagggataaaactttatgtgtattgccttctatttcatgagaatcattaaggagcatatctaaagtgaataattctctaataaaacataagtaacccctgcatcatgctggagtttggtgtgtttgcgcatttaataaaatagtaatatgggtaaaaatataataataggttgagaattttgatttaacccaaaagtgcaaattgggggaattggaaataatatagaaagagaaatactatacaaaacaaaatagaatttataaataaataaataatcacatac

SEQ ID NO: 24802 - DNA, 583 bp, Zea Mays
tattctgctgcattatttgatgctgggaatgataactgaagagcatatttgagttgttcacctccaagggcaatgaagaggattcctgcgcctgctccctgtagtttcagcgagccatcgaaatacattcaccatacttctgtagcctccgggttgtctggtacttgttgctcggtccattctgatacgaagtcaactagtgcttgagtctttattgctgtgcgaggccaaaactcaatgtcgtgagctcccagttcacaggcccacttggctattcttccaatggcttctttgttgtgaagaatatcccctattggaaacccagtgactactatgactttgtggtcgtcaaagtagtgacggagcatatgagcagttagaagtactgcgtacaatagtttttgaacttgaggatacttctttttagagggtcccagaacttcactgatgaagtagaccggatgctgtactggatatgtgtgcccttcctctgcccgctcgactactaacgcggtgcttaccatgtctgtcgtgcaggagatgtataacagcagatcttctgccggctgatctggcatggctc

SEQ ID NO: 24803 - DNA, 314 bp, Zea Mays
aggtacacataatctccttcctcaaattccagtgatcttcttctgttatcagcgtagctcctttatctggtctgagctaccctcaaattctcccgaattatacggacttgttcttctgcctcttgaataattctaggtccatagaactgtcttcctctagtctgatcccaatatagaggagtcctacatttcctgccatatagagcctcgaacagtgacatcttcagactggcctggtaactattattatatgagaactcagcacaaggtagactcttgtcccaactactaccatgctgaagggcacaagctct

SEQ ID NO: 24804 - DNA, 315 bp, Zea Mays
atttggaactgggaggaaataaattttgttgatctaactactggttgatgagtcaaaaagatttgtgacattcttaacagtgtcagtatttctgatgaaatcatactttatttgaaattcaagtcttcattgtagtgcacgctccccttttgctcgaatactactatagtatctttgtaatgggttttcgaatagccttctttgttagcaatggaggaggaagctctctcactcggcagtcactcccaggagccgaggctcactctcactcggcagtgagttggtagtcgcttgggagggatagttgcttgctca

SEQ ID NO: 24805 - DNA, 315 bp, Zea Mays
ccctgatagaactccgtgctgggctgctggctcttgtttgaaatcagagcgagcgaatgctcctaggcgccctagattggagaatgtctgtttgtgtttgtgtttgtgtttggcgaagacacgtcgaacgaggtcggaacgtgagcgtcgatcgtgcgcgcgcgggagggagagaatgccatgttgatgttggtgacccgtgtgcactgcagtctgctccccaaactcgactgtacatctctgctgctcgagcctgctctctcagctctctcgcagggctcttgaggagatgcacatgacgacggcgatccccag

SEQ ID NO: 24806 - DNA, 445 bp, Zea Mays
ctcagtgaaatagctctcaccactacaccagtcctgcccttcaaaaaactacttttattgtgtaagtgaaggtacaatttaaaatttaagatgcccacatagatcaatctttctgaaagtaaatttgttcttacatgctaaaaatattgtactaaggctcacatgagaagacaactagacaagcactctgttgttagcaaccacatagaatggatttggctttccatcctaatatgccttttgagtttgtaattatgtcaattttgatgtctagtgtttttcacctgagtcattagttcttcagaggctcaatctttgaagtatgccaacttcttcaaatagtttatgataaggcctgattggttgattgagagttataagatgataaagctaaaatatggacatttattcttttgtagacttagactcatgaatggcatttgat

SEQ ID NO: 24807 - DNA, 319 bp, Zea Mays
ggccttttgaatctgttcaatttcttggagtgctcctaatttttagtcctattgctttttacatttcgatgcctcctgaacttaatcttatgatataactgaagttgattcctaatcattgccctcttctactaaacgggcacacatatgaactagcactttgctacaggaattcccaggtaagttgtcctgaatccaaatctgatcacatttcccctgaatgtctcattatataagttgcatcatgcaatactggaacacgatttgctagcgttacgtggtgatatctgaccaaatctgctaatgtctcatgttttct

SEQ ID NO: 24808 - DNA, 280 bp, Zea Mays
cgatatctctctaagatatgcactaagttaaaaggagaattcatgtttcatttatgcaatttgtgatccacttgatatatgttaatcatgacttggaaaaggatcactagttgaagaactctctcttgtgcaaatattttcatatattgtcttgagtataggtcttaagcaactaagactaaggacaaagcgcaatgaagagagcatctctatttgaaggtacaaaagggtaaaactacttcctttcattcaaacttgtacctcaaatcttccttttcta

SEQ ID NO: 24809 - DNA, 347 bp, Zea Mays
acccgcctcccactcaatggtctacgtgttctaggtttgaactccacttatgacctatgggtcctaggcctaagctccactcgtaatctacgggccctaggcctgagtccttcgatgccctacgcagcacacaagacaacaaagggaagacaggaggtagggttgaaaacggacgggtaaaatctcgtcccggggttgaaaatggacgggtaaaatctcgtcctgacctataccgttttctgcatttgacacgatcgtttccgtatttacggaaaaatatggaaacgggacagaaacgagagagggtttattccatccgtttttgtgggatcccgtttttatccgga

SEQ ID NO: 24810 - DNA, 294 bp, Zea Mays
tttggctgtggaattgagcttacttaaacagctggatcgaacaactctgagcagatcagataaaaggatttcagtatcagtatgattggacgcttcactacacattagcaacgtgtgggtctgaactcttaagataaagctattaaaaggagaaaattgtggttactcttgttcaatcctatcacatggaaaaggtgatttggcggttgtttggtttgaaaaatcactgcatctaaaataagatggtgtattatagtccatttttcaaagttggtgggataacttcattcctca

SEQ ID NO: 24811 - DNA, 299 bp, Zea Mays
ctgctgtccacggattgattgcgattttgtcgaatcaaaatatctttatatgtttcagtccacactggtcttggccagtcgttgtcggccatcacgtttgcccgctcatcctcatccatccaccaaaccagatgcgaatagtcccctctccatccattccttctttcatcactagtaccctgtctttctctcggttcatcaattgaatgccctcattttcatcaaggcgactgatgtactcctcacatgcggtgtcacgatcaggaacacggattcttgtgacctcataattctaaaac

SEQ ID NO: 24812 - DNA, 340 bp, Zea Mays
atgaaggatggatcccttgctgtggtgatggagatggaagatgatctttcgttgatggtgggttactggggtcgcatgttcagccacccaatgagactcatggcggtaaactgcatagggttagggaatgacccaatagttttatgagtgatgtgtacatataccaaattaaggtatcctaatatggccccaaaagcccattctaagagaagagcacaacctaatgtggtcctaactaggacaaccctcgactaaaactgctttgacctagtcacatctaccaggtcgactttgaccagatttgtcccgacctgatcattccaacctcggtcgtcccaag

SEQ ID NO: 24813 - DNA, 608 bp, Zea Mays
tctgcttccaagaaagaagctcattcactattgcagaacactcatttggtttccaacctgaaaagcaaacttgatttatgccaatgataagggcatcaagggcatcatcccatagacttgtatttgtaggaagaccctctgcaagtgaagctgatccacctaaagcttcaagagcattgatgtatctgttatggtaccatagcaacaaaaataaaaacacagtgcttccatgagaaaccaagtatgttggaagcatcatagttgaaaaagaaacaaatttatttttaactatgttattacctacttaacaatacaaacgaataatcctcaagcccaatttcacaaagacgccactgcaaaacctcgacaatgaatttaattgaaatacatgcatccaatttcaacacatactttctcaattgtgttttgacaaaataaccttttgtcgcattgcaatagcactatctggagcatcatttctaaggccactttccagacccttcattagaattgatcttagataagataatgacagcaaggtcttcagcaaaacgtgaacgccgccattttcatccaaatcttttgcatcttccagttggtctaaattc

SEQ ID NO: 24814 - DNA, 281 bp, Zea Mays
gggctttgcaattcgagagaaatatgggatgaatcttcgataataaccagccattcccagaaaacttcgaatctgatggacagttgttggcagcttccagttcatcacctcttgcaccttattcggatcaacagctatgcccgcttgagagatagtgtgacccaagaatttgatttcctttagccaaaaatcacatttagatagtttggcttaaagacggtgctctcgcagacgttggagcactacatgcaaatgactggcatgctcttcttcactctttg

SEQ ID NO: 24815 - DNA, 549 bp, Zea Mays
aaattttaatcatcttcgtctatcatgattttgatatcatgtctgtctccatctgtataaattgttctaatttattttgcaaaaaatctgactttagtaatcttccgaaacattagatccaatatcgtttgggttgagccatcgacgtcttgcccaaactctaacatttgaaatcgaatctggttacttaaacttcgtttgaaattctttgacgcctgtgttgcatgtgtctctctgtggtttggctttgtggcgcgtggcgggcgcaaccctgtgggtgacaacgcacagcttctcacttatgtgaaagacatatatcgtctccacggaggtccccgtgtgcaccttatctccctaccgctatccctttcgtttatccgaatcggccaccgattcaactcttcactatgtgtcgcgccttccgtcactccgctgccgcgtgcccgacgtgctagcgagtgtaaaattgggaatcgactgatttcataaatctggactgcgcatgctattcgaggaaaacacacgcaaagtcgataaccaaggttggtt

SEQ ID NO: 24816 - DNA, 299 bp, Zea Mays
agagaagtcaggggcccaggcgtaaatgtaaccgagactcataacactgcagaggtggacggagggttaaatcctaaatagtccaggggctctttaacaaattgcgcacggccaaggggtatcgcgcgcacagagccgcacgatcaagcacggacgcgccagattagacctctactcaaaacaaaccggtatctcacaagcgcccttggatccgaatccaacggtcagggcagcccctacatctcagccgcttactccaaatcggaccgccagcgcttatcttctacctcccgcttcta

SEQ ID NO: 24817 - DNA, 327 bp, Zea Mays
ggcggagccccactttagtttcccaccgtatgctgcggtcgtcgtgatccacttcaccacgcgctgataggaggggtccaccgctcaggcgtggtaactcgtaagcacacaggcgctcgtgatagccactgttgtgtgggggcacgtcgccagaaaaatcttctcgccctagctcgggttaccagattcccataaccaccggatctcaccagctaatcgcccaaatacaatcccctaactatggtgtatatgtatgtaatcatcccacacacccctaagtcgttcaacataccacacggagagctctatgtcgctcggagatgcacc

SEQ ID NO: 24818 - DNA, 289 bp, Zea Mays
atagaagtcatccttatatgagtaattgtaatcacgtcagatcgccttaagtcgctgctgacttaagtcgattgcttttgttaatagggcgtagtggtcaccctgaattgcgtaggcgtgagcatgttgcaccggcttaagttgctactgactttagccgattactccgttagcagggcatagtggtcaccccgagttaagtaagcgtgagcatgttgcaccgccttaagtcgttgccgacttaagtcgattgctacgttggcagggcatagtggtcaccccaggttaa

SEQ ID NO: 24819 - DNA, 297 bp, Zea Mays
ctagatcttacttacagcagagctgtcagcacggcgctagcagtagaagccaagaatacaggcccgggaaaatccaagggatttggaggtgataggtccaatcagggacctgagaagcgaaccaggttggtaatccgaccatttaatcagaattgttcttcgcctcgtccaccctcctatccgttcaaacagcctgttttcattcgtcctaccactgcccccacttctacaaatcagccgagtgcccctggtgctcgtttctccgccctccctagttcttcaactggttgcttcaac

SEQ ID NO: 24820 - DNA, 467 bp, Zea Mays
caccaccagatattgtatacatccaacaaggaattagatttcattttaaagaactgtttgaactttataaagtttttttctatgcactcacttctttatagttcatccttacgttgtatactccctgttgaggtaagatttagggcaacgactgtggtgcaagaaactcctatttacaagcgtgcaagcaacaatccttgaaccttggattcatgacgtacggtagtttatactttaacacataaaccccccaccagatattgatgtttccaaaataaccccctaaaaatcctttgaccgatggaagtcttctcagatcggattgacctgacgtccaacgagacccctaaaaacccttcccccgttccgttcccagattgtttggaagaatattaatttctgcggcagggtgaacatcaattccatgcgctctcttcatgcctgatctgcccgaggcgacgcaaggc

SEQ ID NO: 24821 - DNA, 315 bp, Zea Mays
agaacatcaagcagagaagcttgaactaacctagagagagctggccacgacgaggcgttcacggtggcgcggaaacccgatttgggggaaatgcgaaatttggaggctctgatggacgatcagaggcgagagctggtgaactgggtgcgtaataacctagcggacctggttgatcactcaatttatagaagccaacaacggtggcgtccaatttggagaaggcatgatggcgggcggagaaagaagaaggcctctgacgtgagctaccgtggcagtcattggctgaggagctacgacggtcactggtgagctatt

SEQ ID NO: 24822 - DNA, 627 bp, Zea Mays
gaccaaagtgaatcaggttgccagcgcagcttgctcgtcgacggcgacctccctgcgcgaagattcatgccgccaccgtgattcgtgttcgctggcggttggataactacggcaaagaaaagatctcacggcggggaagggataggatcgcgaattggagtttatcgccgtaagtatagtcgctgcgacgtggccggactaccggagtcgccgtggaagcgccggtgacctcggctgcgccacgccgaagcttgttactacgcggtagtaagcgtggcacccttaggagtattctccttgcgccgttacaccggtgactgctacggttacagccaccgtgttcttccctatctccggccgccaacacatcgcggtcaaattgagagctaccgacctcggggtctataaattgagcgcgtcctcaactccgtcaagtattcacgcagctactgcacccacctgcatcccaaaccccccaccagagaactcgaattttggatttcccccaatctgctcaagaacactgcgcagtttagcctccccgcgaccagcgcgattccggtcagtccgtgtcttctgcttacccgtttaagtattctcatgtgtctgcgatgctcgccgacccac

SEQ ID NO: 24823 - DNA, 272 bp, Zea Mays
gcgcgcaagcaccaaaatatctgtgatgcgtgggacaaggagctttaatcggtttgccgatcgtgcttgccctagcgcctccggtcttgttaatccttttgtccagagcctcttgagtatttactccttgcgatatttctgacgtgcgaggactaccaatgataatatttttcctttgtatttatcagccatatccggccgaaccaagacttttttacccgccagctccattatattaacaagaaatggttgtttataaatttgcatctcct

SEQ ID NO: 24824 - DNA, 352 bp, Zea Mays
atcaaataccatagaaggtaggggtttcggcgtaaggtttacatagactcataaatactcaagtcggacagtgggttgaatactaggttaaccatggactcttaagtaaaatcacgcctgcgaaggggtatcgcggggtatcggccgtccgttctcagatctagggtctagattagatcggcgcggttgcgaacggtacgcgacgagaaccgttggatgcaaatacgacggggaggattttattattctagattcgtgtctatccgtccgatccagatcaacgtaccagaccgaaagccgcgaacgggtatgcgatcatctaatcttagccgttcactaacggatccacggc

SEQ ID NO: 24825 - DNA, 793 bp, Zea Mays
gcgacgggacgtgcgattcacagggtatctgttgcgcgtgtgcgagtcattcgaggaacggaacacgggtgcatcgtctttatgctgtaggagagggctcccctgccgcttcaggggagaatgcgagtctgtaagtgggaccagggcctggctggtggttggaccgctgcttccgtccgtccgttgctacaattactgccggtccgcctatggtcataccaactatcgcatctatccctgcggctgactgacccatgatcatcgcacttaattggcgctgttgggtcatgcgtggggttgcctcgagtcgttgcactagttctgtagtctcaaaaagacacgacattggcgcgagtggcggtgcgattgccttgcacgtagtaaccggtgcactagttacatgacatgtgggcccaggcctccatgctggaccgctggttgcaacgaagctgaaagggtgtacgaccgcggtgcggttgcacgcttattgtgtggcggtccaccttttcgaccgctggtttcggcgaggatgagagagcgcttaaccgtggggtatttacacgcttcgtgtgcggcggttcgccctcttcgtgtttcgggttagttcgtatgacatgtgggacctagccccagtgtcgtagggtgggatcccaccctggagcacgtcggcggagactttgcccgtgacgctttggggtgcgagtagggagatctgcctttaaaaaggtatcgatcccccgggcagtagccatgcctttgctcttctcgcattcatcgcgtctttccatctccc

SEQ ID NO: 24826 - DNA, 516 bp, Zea Mays
gcaaattacataggatgtcaattactgtttgttagcgtttgaagaaagttatactcttagatactggcaaagcgtgctccaagactcctttagtagaagacatgcctatagtggcttggataggagccaatctagcattcttgaggaccaagtcttgaactggcgaggtatcgatccgaccaggtcctaggaccttgcaaaggttctctggtactcctcaagagacccttggggtagcatgtatccagcgccacctactcccctaaccaagtcagcgcacaacgttggacaattgacataaagcccttgtgcatcgtatttatcgcgaagaatgacatagcggtcaaaagtgtcactattaccgcctgaggccttaggtgtacctgcaaacaccatgtgatgtgtatgggtaaaacagtcatcgtagccacacttggggctgtagacgtacccacaagcattataaaggccgtatgaccacaccaactaagaactatacgtactcaacggcatgga

SEQ ID NO: 24827 - DNA, 371 bp, Zea Mays
aaacagatagattttgccctagtgcaaaggttcaaataagggggatagagttccccgctgatttaatagttatgggtaaccaggatacaactatagatgtcatcttagggatgaattggttaaccaagtaccaagccagtcttagatgtgacaagagaataatgaagctagtgtccttatcaggagaagaagtgttagtagagttggtcttgtcaggaccaaggaaagggagttgtcaccaagtcaccgctcatattgaggagattaaaccatcagaggctatcaatgtagtatcagatttcccagatgtgtttcccaaggagttaccgggtatgccacctgaaaggaaggttgaatttgccatagagctt

SEQ ID NO: 24828 - DNA, 365 bp, Zea Mays
ttgctccaccgtttggaatttcagagctttttcgtccactttggccaccatatgagggaccagatcagagatagaggcacccataagctacctatcagccagaaaagggcaatcttgccattacccacatgagtttcaactgcagttgcgaagaaatctctgaccagagcctgaacagggaagtccagaccaggccaaggccaagaggaatcagtttttggaaccgaagccatctagcatgtaaagcccatcccatcagttgcaggtttgggattccaagccctccaaggttcaatggcctggttattttctcccaagacataagacaacttccaccattcacttctttcctccctttccacaaa

SEQ ID NO: 24829 - DNA, 384 bp, Zea Mays
agggggaaggagagggtgcaacttatgtcgaaggagaaggtcggccagggtcccttaacggccacagagattcacggcacgcccccgccacgtacggtgaggtcgttgggagggagaggactgacaatacaggcccactggatagagggattgagggtaaggtggagggaacggctcatgcgtggggtccccaaagtagtgactcgagtgtattgaggcgccaggccactggtcccacacatcagtgcagcgtggacgtggactcacgcggtgaggctggcgagttggacccttatgtcggtgccagctactgcttgggtcgagcacgggtgggttgggccggccagtggtaagtcggcctagtgcgaggttcctgtctttttt

SEQ ID NO: 24830 - DNA, 331 bp, Zea Mays
aaaaatccctaagactcagggcgccccaaatatggacggcgagttgattcctaggttttccagggtctcttatgtaaactggcgcaacgaagacgtatcgaccactatgggccgtccgatcagatgtgagtgacccagattaaattggtgtgagttatgaatggttacacgcccacaaccgtgggatcgacgatcaagcgctaggatttaaaactacttaagacgattgccacacgcacgatttgcatcggacggtggggatgagcacaggccgaatcggtactcggtgttttaatcgagaccgtcccttacacatcctacggtgcacgac

SEQ ID NO: 24831 - DNA, 339 bp, Zea Mays
gtgctatcctcctggtgacagatgcccccccgggtggttgcatcacggagtgggaaacagagcgtaacacgttttcacacagcacttggtactagtagcgatggggtcctatggctatctgtcgaagtgtggttttagtttccacactgtttgtgaagcgcaattttgggttgtaagactgtctccagctgacaatgtaaaatagagggacgttgaattgtagatgacactgtttgacattatttgttgagttgagtttcaaatatgcgttgagatatgggatctacgagagatatagcctaataatttgatttcttgccttagaagtttggagccgga

SEQ ID NO: 24832 - DNA, 316 bp, Zea Mays
catgtgtgatgagtaaaatcatctataaaaatgatgaagtatttatgacctcctttggaaacaaaaggagcaggaccccatacatctaaatgaacaagatcaaaaggactatgggacactaactcattagaatgataaggaagttgaacctgcttgcctagacgacaaccctgacactgatgcaaggactcatgacatgaaactgaacctaaaaaacctcgatgaattagcgtagacagacaggagacacaaagatgaccgagcaatgatgccactgaacaaacgatgaggtagaagcagcagaagcggatctagc

SEQ ID NO: 24833 - DNA, 395 bp, Zea Mays
gaaacttaaaaaaatctatgacgatgccaaagagaatataatttcagtgcggattgatcttattcatttggaacataatcatgagttcttcaaaaaggatacaaaaaagaatcagttacagtgcaacaagacacatgatccagaatacatggagttccttagtgcgatgcaagaaagcaggattccgcaacattgtattatggattttgttttagaaatgcatggtggaccagagaatgtaccgttaactacacaagacatgattaacctgtaagtgatattgttatttacactgacataatgacgttgtgtatgtattgacgtatggcatattgtttaatgttcacaggaagaaagcgcgacaaagagaaagaaatgccaatgatgtgtctaag

SEQ ID NO: 24834 - DNA, 368 bp, Zea Mays
gaagagtattggcgcagtggcttggtgtccagcgtcgtggcaattgctccggcgatcaacggggagccactaaggcttacggcgatgtggtggaaagttagagccacgcggcggacaacggcgacggcttaacggcggtgagaatccttatccgagggcggtgagtaatgggagaggtaccgcggctagccggagtggcgtccagctcaccgacggtgaagattctcttacctcgcgatgttatccatctgccacaagcgcgaatccttacgttggtgacacgaatcgcggcgggactcatcgatgatgagcggaactgtcgcgctggcgttctgatcttcatcaggcactgtaccatgggatgctcc

SEQ ID NO: 24835 - DNA, 324 bp, Zea Mays
tgaagaagtgcctgtgactgaatttacttacgctaaccccaatgggtgtacccaatctgctgctgatcccaatgggtgtgccccttctgttgctgatcccaatgtgggtgctccatctgttgttgatcccaatgggggtgctgcctgtgttgctaacgtggacgaggaggaggaagaagatgaagttcctttgactcggaaaaacagtcggcagttcattgctagtggtgaaagtagtggagtcccttctcctgctttgtctgctctcattggcctgcaagaactgtccctagccaattttgatcagactcttgaggatatagt

SEQ ID NO: 24836 - DNA, 543 bp, Zea Mays
aaaagagttaagttacctgaagattagaaaagaatgaaggcaatcccaagtcatgagaagctgtgttgtagctcgacgaaggaagatcaactggaacaatttgaagagcatcgtcgggggttgattcagccccactagcagatatcagaattctggcatccggctcgccgacctccaatgcgactcgcttgctcgaagttaaaaaagcatgcatcgctatcactccatcagatcgtggtggagacgacccgacgtggacgtccatggaggtgtgggaaggagagctcacttggacaccctcgggggctgggttgtagctcgctccacccacagagtcggatcaccaccggcaacaccctcgggggctaggttgcagctcgcaccacccaccagagacggatcaccaccggcaacaccctcgggggctgggttgcagctcgcgctacccaccagagccggatcactaccgacgacacccttagggctgggtaaccgccagcaccacccttgggggctgggttttctgcaacagccacctctaag

SEQ ID NO: 24837 - DNA, 421 bp, Zea Mays
tatggatttcgttcaccgggtaaagatctcatcgcggatgtgtatgagctactttggcctcgctgtcccctgccccttttcaccggcgacgtggcctcatggccgtcaccggagttgccgtgctttactgcggttgtgccacgctccaagccatccaccacgtcgtccctagccgcaccagctcaccggtaaccgccgtagctcctcaactggtgatcaccgaaggaagcgccacggtgaaagccacccatccccggctccagtatacctgtttccctccggccgccagcataaccttgcaaaattggacatcaccgtcgatgggatctataaattgagccccccctcggcttcgccatgtattccagcagctactgcacccacctgcatcccaaaccccccaccagagagcactaatttc

SEQ ID NO: 24838 - DNA, 646 bp, Zea Mays
cggacgaccaagaccccgccgagcaagtccgcgaggcggggtgaacaatcgagttcccaccgagttgacccacgaggaaggaacgcgttcccggcgatctatggggtcctagctcaattgaacgggtcggtgagtatcaagagcaagcaagggtgttgaaacaagaaagcagagggcgtgatcggacctgaattgggctggccacgacgaggtcaagcagctcggtgttcttgagggatttgggggaaatcccaaattggggagttctaggggaggatttgaggcacaggttgcttcactggttgcgcaattatctagcggagcggacgagggcggcaatttatagcttccaacgatggtggtgtccaatttcatgaggatgtgttggcggccggaggggaaaagaggtactggcgctcaggatgagtggctttcaccgtggcagccctccggcaatcaccggacatgcataccgtgattcgccgtgacgtgggctagcgtttaaaacacgtggcgtacaacagcgagcgatcgacgacggcgaaatctatccggccgcacgacgagcaagtgggtacggtgaacctcatccgcgcccgagcccgagctgatccagtgccaagatctttactccgtcgtggttatc

SEQ ID NO: 24839 - DNA, 287 bp, Zea Mays
tttttgtatagctggccgccgactagtacgaagtcccggcttcggtgcttgaggcgcttggcctcattgacgtcacttgggtggtaatatccttgcagaaacagggttattggggcccgccaatctttagtcataatgaggttgacgatgcgatggccctcggcgtcgttggttacttgtaagccctctgggttgcggacggctggtgtgccaatgacgtggtagaacacgtcggagggcaaggtctcgcctctggccgctgccttagccaacgcgttggcctcttc

SEQ ID NO: 24840 - DNA, 1035 bp, Zea Mays
atttgagcgctcagagaggtttcttccatcttatactcgatcatcgcaagatctaggtggggcaggtgcgtagaaagggaagtacttgagcatcgcaagatccgggcggggctggcgtgtagaatgggaagaatgagatggtagggtggtcctacacttgcaatgggatgcaggccgatggtggttctgtgctagatggcgacgaggggattgggttgtgattcattccatggcggcgaggcgtggattgcatttggggcgtggaggatatgggcggggcatccgcggtgcatgggaagaacgattgggcagtgtggtcctgcgcgcgggggtcgtcgacggtgggatttttgcgtgttggattgctacgaggcgtggatagcggcgaggggatgtgtttccttctgtggcagtggcaggatttttgcttccataaccgaggcattgatcggtgaggggattgcagcgaggaccatgcacatgcagaggtagaggggagagggtgtgcacggggaagaaaggagacactaacatgtgggccatatgcgtcgtgaggaagcagaaccatgcactgcaccatggtctacattagattattatagagtagtatagatttggacagcagccccaagtcttcaacacaatggcatcacaggaccgcgataaacgcccaccgcccagctccctctaaaacttaacttacgcgccagtgccctgctctagcgacgcgatcaggaagtaaattggcagagccccgctcgagcgattatcgacgcgcttcccgacgagcgacatcagacacaaggcatcaaccgaaaacgaggaggcggcgtaggatcagtgggcggtgggctgggaagacagtgaggacgacggctacatccggtccggcgaccctgtcctggccctttgtcatcctcactgcttgctaagtgcggctctgaccacgagctcttttctccatctagatcggctacggcggggtcgcactgcggggcgtcggttgaggcgagctgagagcacctagaggcgggg

SEQ ID NO: 24841 - DNA, 589 bp, Zea Mays
caagaacactgaaacgaaagagcagagggcatgagcggacctgagacgagctggccacggcgaggcctctttcacggtggcggaaaatagaattgggggaaatggcaaattggagagttgtggtggctaatcggaagcaggagcgggtgcttaggcttggtgataacttaatgcagcagaccgtgccgtcaatttataggggcgctaagcggtggccagtgaatttggtttggcgtggtggccgccggagagtgagaagagtactgtcgtgagagcttggtggcatctaccgtggcggctcaccgacgatctcttgataggtcagtacgagtcacggcggcgtggttaaagtgctaaggcacgtggcacaagaccgcgaggtgtctaactccggcgagggttgattcaaggcgatcggtggtagagcggacacggcggccgaacgaacagtgccttaagctcatctagggggaaagatcttttcaccgtgaaacgttatccgggcaccggtgagcacgaatcacctcatcagcgcgaatccacgctcgggtcaccagcggccgattcactgaaccaacagatttttctg

SEQ ID NO: 24842 - DNA, 299 bp, Zea Mays
agaggaggaggagaacatcaacgaggaagccaatgatgaacagcaggaccactacgtggggttatggcctgtcaccgaacattatacatcaatgttcgagacggggcactttcctaacctgctgcaggatgttctgcatgcgttgggaacctacgtccgacccctgtatgagaccaggcgagtgtgcgagccccctcgggcttgctactacatcactcgcattcatgtcagggtgatggatgcaggtgatagagggttcaggactctgtcagctcatgagtctctgacgccgctatcca

SEQ ID NO: 24843 - DNA, 2814 bp, Zea Mays
ttcatgcccatgggcggcatacccacgacctcttccacgatatcaaccaggcaattgcatatgcgctcttcattcctcttcttacccaccctgttagctacttatacctgagaacaacataaacaacgttttttctacctcctaatcgttccttcttctttgagctgttccctaatagcagttgtttcctctgcagcacgctttgtacttcctctatatagccattggcgttttctttgccgcatggataggtaagacgagtttatacatgtttggttgtcgcatgatatgttaacaagagtggaagtaaatctaccaaatctctcacatctacagaggtttcgtgctggattttgaccggggaaagacagacggcagtgattagatcaaagtatgttcaagtcctcttaaaccaggacatgagtttctttgatacatacggcaacaacggtgatattgtcagtcaagtactgagtgatgtcttgctcattcagtcagctctgagtgagaaagttagttcttgtgccaaaccttccatgctcatttgtgtctgtcacatatatatggttactgagtgatttgtcgtttttaggttggaaactacattcacaacatggctacatttttcggtggtcttgtcattggtctggtcaactgttggcaaatagctttattgacattagcaactgggcccttcatcgttgctgcaggaggaatatcaaatatatttctccataggcttgcagaaaatattcaggatgcttatggtgacgcagcaagcattgctgaacaggtgtgtggcatactgattttgcaatttgagtaccttttctttcttttgacttcctcaaaacaaacaatatttacacaatcaagcttgaaactctgaatggtaatttcacaggaaaaatgttttcaatgctgggtcattaaacaaggataaactattaagatggattgaaaatatttctcaaaactgtcattatttttcaatgaagagcatgtttggactgaagatatttctttctgctatctacattttctccatgatactagttatggttgtgacacaatattggcaagttaaaatttatttttaaaaagcaagctttattcagttaacatgatgttgcacaatcaggttcgaagattggacaaaatgaagattttatctaatgtctattattaaatcatccaccaaactgcacctatatgtatggtcgcataataagactcaaggatctgttgaacttgcttgtaggggtgcatcattaggctaggtttctcacaagattgcctcttgaattttgaaagcgccacaagacaagggtaacagaaacaaataagcacacgcccgcccgcacacgcacacacacacacagagatgtatataggataatgtctgcatggagcacctaggccttgaaaactgcagagtgcagacttgttttaagtcaggcaacgacttggtgcattattttagctaggaaaatccactgtttctgttctactggtttactggaagctcaaaaataaactaagcatcaatgcttattttgcaggcaatcttgtacattaggaccttgtattccttcacaaatgagacccttgcaaaatattcttatgctacttcacttcaagcaacactgcgctatggaatccttataagtttggtgcaaggtcttggtcttggatttacatatggccttgccatatgttcttgtgccttacaactttgggttgggaggttcctgatctctcatggaagagctaatggtggtgaagttgtagtagcactgtttgctattatcttgagtggactgtaagaatgtagattttaagagtttgtttttagtttaatttaaaaatgtaccctaatattcatcaaagcttttaactcattgtagtggacttaatcaagcagcaacaaacttctattcctttgagcaaggacgtatagctgcatacagactatatgaaatgataagccgttcaacatctactgtgaaccaggatggtagtaccttgtcttcagttcaaggcaacatcgagttccgcaatgtctacttcagctacttgtcccgccctgaaatccccatcttaagtggattctacctcactgtacctgctagaaaaactgttgctcttgttggcagaaatggttcaggaaaaagcagcataattcctctaatggaacgcttctatgacccaaccttaggtattatcgttggcatctattagtacctaatattttatttttttacatcaattatggcttatgtttacctgtgggactatacttatatgttacaggtgaagtgcttttggatggggagaacataaagaatttgaagctagagtggttaagaagccaaataggacttgtgactcaagaaccagctttgttgagcttgagcatcatggaaaatattgcatatggtagatgtgccacaactgaccaaattgaagaggcagctaaaacagctcacgtgcatgctttcatcagttcactagaaaaaggatatgaaacacaggttctacagctgctatatcacagttgtctattgaattgcgctttttagcaactgtaacatggttatttgattaaaattaatatgacaggttggtcgggctggcctttctctgacagaagaacaaaagataaaactttccattgctcgtgctgtgctctcaaatccatcaattcttctactggatgaggtcactggtgctcttgattttgaggcagagaaagcagtccaggaagcactagacattctaatgcttgggaggtctaccatcatcatagctcgg

SEQ ID NO: 24844 - DNA, 1058 bp, Zea Mays
atctagtttattttgttgcctttttttgtttgctgaagtacttaataaccaagttaaacggccttatcatgcataaactgtgtagcacagacatatgatacatgaatatgccattttcctaaaaaaaagttgtacggggataggttttcgtgtatataaacttttaaataaattataggtcacattaaatttttaaaagctaataccaaaccgagcatctccggaactccattatccaattctcctaatgactttggagtatattgtaagatactcacaaagttgcaactcgcaagtgcttcatgtgaaaactttagggaggattcaagtacacatttgaggctcggaggagatccattgatccagttatttacatggtagttgatacctagaccaggctgctgcttcatccccaattatttctgccagactgggaaaatcaagcaagaagaacacttcatcagctctcatctaattgattatattaacttgctagcaactagggaaggtcaagtgagtagaggtaagaaactaaccaccgaatcactgctgatctgatgtgccaccatgggtgcacatgttgtgtgattgcacatgggcaggcttgtgggcagcgtgtgtcactaccttgcagttgttgctgtgggtcttgaggtggatccgttgctgtgtgactgtgtagttcttagagggtagacatcagaaggaaaagtagtgggatgtagagttagaggagaggaaagggactcacctcactgtcgctagtcaccaggggtcactactgcagtactgctggagttgggatgacagggaggcggtgcagctgtgcgcccacttgttttgctgtggtggccagggcatggaatgacctgagcgagtagtgattgcctttaactgggcagggccatatttaacagaggaatagatgggctgatatgtataaggccaagtatttgatattcatatatttatttttattcctgatactccatggatacttattgtggctgcatcatgcatatgttccgtgttcgtataagatacatattcaatacatg

SEQ ID NO: 24845 - DNA, 371 bp, Zea Mays
aacgagagcaagccgagcaaggtgcaaggctgcgccgggagaatcctctctttgctaggaacatgtaccccgactttgctcatgcaatgaacacgccgagttaagttggaggggtactggcccagatagctgatggcctcccgtgaaccctagacgcggaaggctaccggcggttgcttacccaagcagctaatcacctactacccatcgctcatccttcgaacgacctatgttacgccatcaacagccgatgagatgtgtggagctccatcaacactttgcgcgaccgacgacacgaaaatgagataaggcaccgggaggagtatgaccgggatcacggcgccccggcacgaagtcgcaccacccgtgct

SEQ ID NO: 24846 - DNA, 655 bp, Zea Mays
ggacgggagattcctcctgaatctcgtcggagtcgctgctaaactcaaccacagaggggttgcgacgacgcaccatgattgaaaaggtggtgaaactgtgaagcggatgaagtatgtggaggagaggctctaaaggttgggaagcgaccaaggcgagagtgaatgaagtgggagaagagaaggggtagagtgaagtatatataggcagttgagctggtcctcaggaccagttcaaccgcccccatgggccagttcagctggttctgaccagtgtggtcagagaaccagaaacaacagagggaagaaagaaaaatttaaatttgcgcacagctgctggaagtgaccggacagaaaaataataaaaatctgcatgcgcacccctgctgttgaccgggcagcacacaaaaaaactgtgcgcgcagacaagaaatgacttgactctgcatgcacacccagaaaacgattctccactcgcgtgaaggaccagacaggaaaaagtaaaaagcctctgcatgcacagcccaaaaaaaatttttctgcgcgcgcgaagtgaccggacaggggagacgctgcagtctgcagagcggcagcaacaaaaaaacaaaacactgcgcgcgccaggggaaagtgaccgcacaggggaaaagtagcgccc

SEQ ID NO: 24847 - DNA, 313 bp, Zea Mays
tgccagccccagcaaatccaccaccaaagcccaaaatctccgaacgctccactactgtgtccctacgccacagccgccgtattgctggaatgggagcagaaattggcaagcaagatctttcctcaagagcaacaaagaaagttatgaaggctctcaaggtggtgggggaactagaagaaatcaatcatcaaaccagaaaagattatgaaaaaatattctctaaaagacttcccctcaatcacatagaggctctcgcaaccttctttgggtggaaggtgccggatgagttgagggttgaggccagcagtgctgc

SEQ ID NO: 24848 - DNA, 353 bp, Zea Mays
ctgggtggtagtgtagcccccagtttatcgtccctgccacatggcggaggactctcttgacagcagcgagatgttcctggcgcgacgcctccatgaaccggctgaggtaccccaccgagtacgccagatccggcctggagttgcacatgtaccgcagactgccaattaggctgcggtactcagtggcatcgacgctcggcgtcgtgctctccttcagcagcttcagctttggctccatgggcgtggcgctggcgttgcagccggccaggcctgccttctccagcaccttggtggcatatgcgctctggcggagcgtgatcccgtgcgccccctgggtgacctcaaggccaaga

SEQ ID NO: 24849 - DNA, 433 bp, Zea Mays
ctcacgagggttttccctccatcttgtgggaggtgctctgctccgctggttaccctacacccctctgtacacggtgcagttgtacgaggaacatcgcgtgccacgttgccggtttggctaactctggagcctcaccctctgcagcctggatggcgttcccttgatttcgagactatcgggttcagagcggacgacaccaccgaggccgcagcactgaagaccctgacaaccttctgcgggtatcatcccttggagatggtgatgcacccacagggactcttccccaccgagaagagggatgaccccatgtggtgcaatagagtgagccatgtgaaggacgtgtgggccatgcatcccgaccaagttgggaggatcacttttcaatgtatgagcgcggtgtaccccgcctacaagccctgcagagtgatgctat

SEQ ID NO: 24850 - DNA, 376 bp, Zea Mays
gggacgcccacgattgccttttgctgctctcagttcccttgctccggcggtcgacgacggctgctgacgtcgttggactctgatccggcaaatgtttattgcagtcaacaataagccagctgcctagcatatagtagcatatcgatgtagtagtacaaccaagcccagacgtgcgtgcaacggtaatcgatctgatcgcgttgcggttttgccgacatagaagatggaggaacctcaacttctcgtagctgctcagctcccagcgttggcatgcatgtgcgtatggtacgtaaggaagttggtgcgtttggttggttggtgagccaattggatatggagtggctccgttcccgtttctgagaatagagcaatttca

SEQ ID NO: 24851 - DNA, 689 bp, Zea Mays
gtttttgtgatgaacaagaaaatatctccttccaggatgcaagaaaagtacgctaaactgtttgattcagccctttccagggagcacattgctgctttggcggccttgtttggctgggaggtgcctccactcgggcagacctgatcagtgtagttttggtggagctggtagctggtctattttgtttccatggattgtagcggttttctgatatggaatgtgagggaccttaatgatagtgctaagagactctgttaagtctctgtttttttacatccaaccttctattgtttgtctgcaagaaaccaagttgtgctccatctcagattttgatattctttccattcttggtttgggctatagtaattttgtgtataaccctgcgcatgggaccagggggggtattcttgtggcatggcgcgatggatccttttccattggtgcctcggttatcaaggacttctctgtgtcagtacaatttcagatgatgtctggtcaactttggtggttcacaggtgtgtatgggccttatcaggacaatctcaaacaagcttttctccatgagctgagagaggtcaggaacaaatgtgggggcccatggatcattgcgggtgattttaatatgatttacagatcggaagacaagaacaattccaatgtaaaccagaccttgttgggtagtttcagaa

SEQ ID NO: 24852 - DNA, 370 bp, Zea Mays
cctcagatgccatcaaggactcgtgcgcatgacggtgcgggtacttcccgtggtcgggaacatactcctaatccaccacctgtactaccaacactggccgaggctatcgctgccttggttaatgcgactgccgataatactcgcttcctatgtgaaatggcgggtaatcaattccagcagtatggcggaagggctcctccacagggaccgcgtgaaacctcgtatctggatttctctgaaacacgtcccccactctttgttaaagctgaagaccctcttgaagctgatgagtggataagggtaatggagcagaagttcggattaatccgttgcaccgaaacacagaagtcgttgttcgctgcccaacaac

SEQ ID NO: 24853 - DNA, 384 bp, Zea Mays
gcagaacgatgccgaggaggcacagggcgttgcggaggagacacaacaagacattgagggggcgacaacaggagattctattgcctctggttcgtcgagtgtctacttgcgatcgatacctcttgagagacgtccggtgattcaacccgagggggaaaggtgagtaactttagatattatcactactacttcatataatcttgatattatatgttcaaattcaaaatagaaactaataattttcttaatcacttgggcaggaactggacaactgtggtgagtggaggtgctgacacacaccgagtcaatggcatacccggtcttctttgtaaggaacacttccttggcttggttgagtacgatagagtgatggtgccagcctac

SEQ ID NO: 24854 - DNA, 450 bp, Zea Mays
actcgaggaatgcactggggggaaaaaatatgcgcgctcgtgtacattcctctgcagacaagcgcacaagtttctaggggcagatgtatgtcacacctgagaccaggcagagtacttgccaagattataattctctttggtactttcaagcatgcattggcacctaatcaaggggggcaatggcctaaacaaggcccatattgtgggtagacacacctctgcaaaggccggcatagagaacataaactattgccacgtcttcgcattggtacttcaggcaacccctctgctgcagacatgagcacaccgatcactggatggggcttggggccagggtagtgttccagagcaaagatgtatatattcatctgagtcaaatggttcagcttcaagcagtagagaccacagctcttcagtcttctccattccaactgagcttcatcaccgaac

SEQ ID NO: 24855 - DNA, 340 bp, Zea Mays
ggaggagaagttggtgtcagactcggtcgacatggtgacctaggtgagaggggcaatacagcagagggtgcggtggggaggggaggaaggatcgattaagctgataccatgtagaataaacaggaaaggggagaatcaccacacactgtgggtggggagcctttcatatatagagccaatcaggcatacatggaaggtacataagtagaaggctatcctatcacctatacaaggaagctattcctgggtgctatacatagcaactagcctgtgtacaggatcactctaattgatcctgatttacatatcctaatagacagggtgataggtcggggcctcg

SEQ ID NO: 24856 - DNA, 322 bp, Zea Mays
ctaggggtgtcctcatcagcctccctctcttgagaaggagtcgtcctcgactctgactcaccaacaaatggaagcaagtctttgacattgaatgttgcactcacattggaatattcagaagggagctctagtttataagcattatcatttatttttgcaagaaccctgaatggaccatctcctcggggtgataacttacggtgttgaggaaatcgatccttgcgcaaatgtagccacactagatcacctggtttgaaaagtacttttttcttacccttgtttgcttgcttggcatactgagcagatttcttctcaatattca

SEQ ID NO: 24857 - DNA, 324 bp, Zea Mays
acggagtgtaggtatgccaccgccatagagcatgaacgccactatatgttggcaagaattgtgaggacgaatcggtcgagcatgcatcatgacatacaattttaaattaagccccctatgtagcagtattagtacatgtttcgtccaccctattcctgctatctgtctttgcctttctatgctaccatttcctgttcatgaagactaccaagcttcgaaacaaaggttttggtgaacctgtggcttataaggaacaattgtcagaagatcttccaatagtgcccaacatgttccacgtgtctccgttaaagaaatgtcttcgag

SEQ ID NO: 24858 - DNA, 2013 bp, Zea Mays
cagttcttatatatgctgttccaaacaggccgttagtttgttcgtttgttggtattttttgctaccttgttctcttttgcgaactgtgtacctgacatcttttccccatccgttggttgcatagaaatggaggaggatcactcggtgatactaatatctgaaggtgctattaaaagcatcaaacttagcctctctaccggagaagagatagtgagttctacaaacctggtgtttttaccagtaattccagcataccgagatgccttttctccaatgatgacttaaatgtttttttatttctgaagtgcacatactccataaacgagtgcccagtgacccatcctagccagcttggaaatccgttccttgggttgccacttgaagctgggaagtgtgaatcctgtggtgcctctgaaaatgacaaatgcgaaggtacacaatgtttttttgttcataacactttcatacagtgtgctctagagatcagcttagcgaggacaccttttcctttcgttaacaattaagtttctctgcttatgtaggccattttgggtacattgaactacctgtacccatataccatccatgtcatgtcactgaactgaggcaactattgagcttgatatgtctgaagtgccttcgaatcaagaaagggaaggtacttgtaaaccggaactgcataaccttacttcgttgtttttctatacttaatttcctgatttgtttgaaccttatgtgtttttacactgatgcttaaccttgggttgctatttatgaaatctttttcacctttgcaggtgaaacaaagtaatggaaaaggaaacgcggcaccaactttgtgctcttattgcagggtacacaccagcattcttcttttttgttctggcttgaagtaagagtaaatagataccttggactagttactggtatatgtagggatatggaagtaaatgcccacgctaaaataaagtatatcagtgtttcaaattgaaccactttcctctgtggtctgaatgattgacgagttgttatttaagaggctgaagacataacaggatatactgattcagtgccttagggaggtactatttcacactgaaatttattcaaatgcagctaatctggttatatatccttcataagtaacttcagtatagttgacaaatatagcatacacattgaagtcagtcatatgtccttgttgattagtggatggctttcatacagtaatcttgcttgctgctggtctggtgccagtgcttacactaaacctgtgttggctggatgagtgtccactaatgtttcctgaccatcccagaacttgttgtttataggatattccagccctgtctttgaaggaaatcaagacaacagatggtgcaattcgtttagagttgagagcacctcataataaacacatgacagaacgttcatggaactttcttgataaatatggatttcatcatggtggatgttctcaccataggacactgcttccagaagaggtgatattcttatgagtcatgagttatgctttcacgagatttattttggtagcttttatgaattccaggttgtttgaataacgcactgataattgatttatttcttgattatttgttaggctctaaatatattgaagaaggttcctgatgatactaggagaaagctagctgcacggggatacattgttcagactgggtatgtgatgaagtaccttccagtacctccgaactgtctatatattccagagttcaccgatgggcagagcattatgtcatatgtgagttttctagtacatgtatctggtagtttcttctatttgttgagtcctatctgatgtcctgatttaattgcttttcataccaggacatttcaatagctctgttgaagaaggttcttcagaaaatagaacagattaaaagatcaagatctggttccccaaactttgaatcacatgatgctgaatcatgtgatttgcagcttgcgattggccagtacatacgtctaagg

SEQ ID NO: 24859 - DNA, 568 bp, Zea Mays
tccgtgttgttgaaattgatttcccaccatttcacgcaggaagcacgtgttgttggtggtagcgttgaccaaggcagcgatagcctcggccagggtaggaggtacaggtggtggattgggagtgtcctccccgctgcaggatgtacccaccccatcatgagcacgagttcgcgatgacatctgaggaagaaaacatcctgaattattacatgccaacacaccacctttattacattgcggaacagtaatgattacacatactcagtatacaactcaagcttccttatttatgatacataagtacattacttaaactatactactctaatcctcttcatccttagctgctccactgcccgcttcaggagaccgttcatctgcaaggttcatggaaggaggggccccaaaaaggtctagctccccataagatcctcaatttgctgttccagatggtccagctcccattgctacaacttctggtggcacgttcgggtgcaactgatcatacaacacatgcacctcttcatgtagggtgttgcagtacgcttgcaggttttccagggatgcg

SEQ ID NO: 24860 - DNA, 353 bp, Zea Mays
ggaaataaaacatgggtcacctcgaacaagcgcatcagccatccccgatgtagacgaaccaaccttcaaagacctcatcgacggagactgcgtcttcgccctgcaggccctcaacaaataccaagctcaaacgaaggcctggcgcgaccacgcagtcgtcccaagagaattcaacgaaggggacctcgtactcgtccaaaccacccggacagagtcacgagcaagctggagccaaagtgggagggtccattcatcatcaagtcgaaggcatcccccagcgcgtacaggctaacaacgccatccggcgaagacctagagcattcctggaatattgacaatctccgcaaattttt

SEQ ID NO: 24861 - DNA, 646 bp, Zea Mays
attgcccccttgcccatgagttatgttgggctttaatgttgcccctaggtactccattttgtatattagatctttccagccttctgggaccgaaaagggttcatacccatgtgtgggtgggattatcccacgtccttgagtggctgtgggtgctagaaagacgttagtttggggctggtaggagggttgttggtagtaatttgcattctgttctacatatcctgccatggacgatccggtgtgatattcggatagtccggtgatgtattcggacggtctgcgcgtatagccggactattcgaacatctctgttgtcccgggtgtggtctttggtgtcttgtcgcggaggacagagtcgaccgctgctaggtcggatcgttcggcctcaggcccggactgtctagccgcgcgtaggggcgttggatgctctcatataggtggtggaggatgtggttgtccattataggagttcatcgacatcccataaagtggttaggtttggacatacccatttgcatccgatgggttctataggttttccttagtttgggcatcgtgtgatggaaaactagtaaagacagatttatcaaacgcacatgctagttccctataattctcttgcacgccacctaagattttgttgcat

SEQ ID NO: 24862 - DNA, 427 bp, Zea Mays
agaaaggggtgggtcaagggacgtctctagttgagagatagggctcgttggttcgacaagctcgttgacctccaaggacgggtcacatcatcacgacgaacgagatcggacatgccgagctagctagcgtcatgaggatgacgagcgaggcgggggcaccgggaaggggtggggttgtgcagtgtcgcgacataaggaatgagacatcgaagcggactggatcaggcggtgtcgataagaatgggactgggccatagtcaaaatgtttctgggtcgattggattgaggagcggggtcatgggtcgttggtcgacattttaaaaagggaagtatacatctatgggacgggaatattatgaatttgatatgttgagtctaatgggccgatgatctcaggttgattctatgggtcaagggtcgtgttcta

SEQ ID NO: 24863 - DNA, 283 bp, Zea Mays
aaccaagcttagtccatttatggtagtatatggttttaatcctcgtgctccaattaatttgctacctttaccaaattctgaaataatgaacttggatgctacacaatgttctgaatttattcttaagatgcataaaacaactaagttgcaaattgaaaagatgaatgaaaaatatcgtattgctgctagtaaaggtaggaaggaaataaaattagaaccaggtgacttggtgtgggttcatttgagaaaggatatgtttcctgatttgagaaagtataaattc

SEQ ID NO: 24864 - DNA, 608 bp, Zea Mays
tctaattgggcgaagggacatcaagatgtatctccaccgcccaaatccggatggacgaccaagagaccatctcccccccggtggtggaacacagccgcacacccccaactgtggcggcgacatcatcgaggagcatccaacggtcacgctggggcttgattcgaagcgtaactaggtgctaaacaatgcagaggacgtatagaatcgatcctagggacattaccgatggctgggaggcagagcgatgctgtccacgcggcacggcgggctcacggcgaaaccccatctcctgcgacgaatttacctcacctcgacagcaaaatatgtacggtgaggccgcggtcacctctagcatgttgagtcgaagctccctagatatcttgggttagctcgacggtggcaagcacgacgcccaccaacacccccatggtggcaaggattttctttgctgcctgctccagagaagataaccgggcttcgattgctaggccaagggcggtctcggccgattatatagggcgagggaggacttagacatgacaagcatcccaacggctccccctggatttactcaagcaaacacattagtctaaaagggtcaagttgga

SEQ ID NO: 24865 - DNA, 407 bp, Zea Mays
caaaactctagcatcaggtgcgctggcctctaaggcgacttcctgacccgaagcacgtgctgctgccatgcaatcagaatgtggaggagaagacccgacgtggacatccatggaagtatgagaaggggaacctgctcggacaccctcggggctgggtcatagctcgcgttgcccacccgagccggatcattactagcaacaccctcggggggctgggtaaacgctggcgccatccttggggatcgggttctctacagcagccacctctaaggctggaggattttcagccacttccatgggaactgagcaatctagatcagcctcttgactcttaatatcgtgctccaaggtcgatgaggcacgagacgctgctcgggataactctaacccaacatcaggcatatcag

SEQ ID NO: 24866 - DNA, 288 bp, Zea Mays
atgacattgagttccgacctcgcactgccatcaaaactcaagcactggttgacttcgtatcagagtggactgagcagcaagtaccagataacccagagactgcagaagtgtggcgaatgtattttgatggctcgctgaagttgcagggagcaggagcaggaattctcttcaccgcacctggaggcgagcacctcaaatatgccctccagctgctatttccggcctccaacaatgcagccgagtatgaagctctgatccatggattgaacatcgccatctcattgggcg

SEQ ID NO: 24867 - DNA, 429 bp, Zea Mays
gcaaacttgtcagggctgcggggctgggctgccacgccgcaaactccattgtagtggtgcctcccggttcggaatgattgcctcttccctcctgactgccggtggacgggcgacctgccgtcgcaactgtagcaaatctgttgtcggtctttggtctgtaatgctatcctgctgtctctccaagtctgttgtatggtcatacctatccctgtatgtcacatgtcgccgtggtgtgttccccctctgtcgtggtcgtagtgtgtcccctggtggtctgtcagttcagtcatgagtccgggttgtaaaaactgtgttgtgctctcgtggaacgtccgtggtttaggcgatccggataaatgcactatcgtccgtgatgttatctcccttgcctccccgtccgttgcttgcctacaagaatccaaactctgc

SEQ ID NO: 24868 - DNA, 283 bp, Zea Mays
tgttcatatggccatgaattccaaagaaggggatgagcatgagcttattgagaaaatcaaacttgatggagacagatatgatgcagttatagaatgctacaaatccttgatgattatactcaatagccttctgctagacactaatgatcagaagtaaaaatacaaatcaactaatttcgattgaattaactaacttgttaattgaatttctcagatggtgttgacatgcacattttggtataaaattgcagtattgtcaatgatattgataaaaaagtgactt

SEQ ID NO: 24869 - DNA, 855 bp, Zea Mays
gcaaagggcttcttaactggttcaaacttcgggtatacaaatcagacaccgtataatccactgcattggcaattcccagtatagtgacagttaagtacaccatgtagcatttcatctagcaactgatacccaatactcctatggctgtatatgtgataccatctaatgaagatttaattctaaggaatgtaaatttctgaagtgtgttagatatatacaagaacataaaaagtaaacagattgctagaaaaggtctcaactcatcaattattctagggctttggacaatttggaaccacagaaatagatgcgtatttgatggtctttttcctaacttggaaacagccatcagaagagcaaaggaagaaagagaaatgtgggagctggctggtgccaagagtttggccctccttactgccccaatcccggtgattggctcgtagtgttttttagtttgtttagatggatcttctcaggtttctgagttttagacctccgtaagggagtctttgtaccttgtctgtttttcagaccttcttttccttcttcttaatataacggggcgcagttcttctgtgcttttcgagaaaaaaagtaagcagattgcattcttttgtcgtgtatagaactctgcttactgacatttacatgctgaactgtaaccagaaacatgacggtggttctaatgctccaagcttaggtggtgaccaatctagcctgaggaaagcattggctgccccttggacacccgtagaaattggacttaattctcaaacagagcaagagatgtctaattctcccgagaatctatcagctaacctactgagcattgaccatgaagaatttcattctgat

SEQ ID NO: 24870 - DNA, 332 bp, Zea Mays
gaacttgttgctcggtccactctgatacgaagtccactagcgcttgagtctttactactgtgcgaggccgaaactctatgtcatgagctcccagcttgcaggcccatttggctattcttctgatggcttctttgttgtgaaggatatccccaattggaaacccgataactactatgactttgtggtcgtcaaagtagtgacgaagcttgcgagcggttagaagtaccgcatatagtagtttttaaacttggggatacttctttttagagggtccgaggacttcgctgatgaagtagaccggatcctgtatcggatatgtgtgtccttcctcc

SEQ ID NO: 24871 - DNA, 591 bp, Zea Mays
accaacgtaggaaccgaaaaggatgggagagtaggcacgtcggttaccccaccatctgctgaaacctcacgggctcgtgggcccaggcacacatgcatcaggccgcgagcagagtttgatggaggggtaaggtgacgccgctgtcacttgccgtggtctcgcagtcttcatcgaaattggctggtggtggtggaggagcaggaagtcccgcgggtgatgctccttccttcgatgagtggtggaaacaggtggagtgtcatgtgcccaaaagctcaagaaaggggcttaacattgtcatcatcttaggggcgtggtgtatttggcttcgtcgtaataaagtggtcttcgatggggattccccttcgctgagaaggattcagagaagcttccttgatgaatcagtttgttgggttatggctggtgctaagggccttggatccttggatctcgctaggtctttgaatgtggctgggtccttagacatctagacccttagtcttgttctgtttttttgtgttgtttttcttttcctttttgttcttttggcaggatctctgccttgtaaaaccctttgggtttgtctcctttccc

SEQ ID NO: 24872 - DNA, 303 bp, Zea Mays
gaaagatctaaaagagatatatgcatcacaatcatgggccaatgtcacaaaccttcagtgtcctctaacaaactcaaattagtgatagatgaccatgcctcagtagtccatcaagatggacgggtttgtcgatgagctcactgcatctgataaggtgttagatgatgaagaacttgtctcctctattctgcacgagttagattcagattatgtcccacttgcttcttcaattatgtcacgactaaaatatatatcttttaatgagttgtatgcacaagctcttggttttaatagaaattaggc

SEQ ID NO: 24873 - DNA, 386 bp, Zea Mays
gaatactattgtagctttgcctatccggaattgcgctctgcgctgctggaatcatgcgccggtaatcatccctccgcctaggtccgtcgaccggcctcgtcaccgcaccagcgccggtatgaacccctctattgagttctccatcatctcctctctgtgtagcatctgtctaatcgaagttcgggcatcggggtcgtacctcggcgtgctcctgcgatggcgccgccgtgcctgccgtcgggctggcaccggtgggggagagagagaaataagggaagaagagaggcctcgggccattggatagttaacggacggttgagattaggcgtctagagaccccttcaccagttcggatccggtccgttggatcgtgatctggcggccac

SEQ ID NO: 24874 - DNA, 385 bp, Zea Mays
gtggcagtggatgctttgttcctcattgttggtcagacatcggcaacattgttagggcaatactactacagtcaaggtggcaacagcaagtggctttcgacattcgtgcagactgctggcttccctatactgttcttcggcctgttctttttcccttcaaagtcgccttccagcgaaactccggtcggaaagattgccactgtatacattgtcttggggcttatcataacagcggacaacacgatgtactcccatgggctgatgtttcttccagtctcaacctttacactcatctgcgctagtcagttggccttcaacgtcttcttctcatacgtcctcaactctcagaagctcaccggtttgatcatgaactccgtggtgctgc

SEQ ID NO: 24875 - DNA, 327 bp, Zea Mays
tgcgtgttgaggttagtgcgcagttgcaacaagtgatcgatgatggttcaccagaaggcagcgacctgcatttgtttgccactcatctgttcattgagaaaaaatatagagatatatttgcttcactcaagaccgcagaaggaaggaacgcttggctgcgccatgcattcgagatagatgttaaaaagtccaattagatgttgctggtctgacaacagaggcttatgttgagtattatgttagttgtgtctggtttatgagtcttgtcgtttcagttttatgaggattgtcgtcttagaacataaacttttcgtacgcatcgttttc

SEQ ID NO: 24876 - DNA, 454 bp, Zea Mays
gctgaagttattcctggtgtgagtgctgggcgtaggctacgaagggtggtggcgaaatggtgggtaagtgaggtggagggtggtcgtcttcgtgtggatagggctagcaaacgagaattgttgtcctcgccggctggggcgagtgtaggtgagggggagttgcgaaatctttttgagggtgaggagctgaggataatgttgttcaactacatggagatgggtatcatcccgaaggttgagccaatgtaaagtgcgatgccctcgctgtatgtatgtaaccgtaatttatatgaagctgcgtgccttcgttgatccggtcgtgcccgtaggcgacttgtgcgcggggaaccttttggaaaagacttcgattttgcgtatttattatgctagtccggctgcacccgtaggcgacttttgcacggagagtcttttggagaagacttcgattttgcgc

SEQ ID NO: 24877 - DNA, 272 bp, Zea Mays
acaagtgcatatatacaggtaaccacagtgtgcgccagagctataggcagttgcaaaagaaggtgcatggacccaggcccaagcagcataaacctagctaagccactaatggtctgtctaacagaaacatgtcaacaggttatttgtaataaagagcaggaataacggcctgtttattctgagagatcttggtacacacatgcagcttgtccacgggtatgttctgaaacaagctagaaacatcagtgacaagaaaccactgatttctttca

SEQ ID NO: 24878 - DNA, 394 bp, Zea Mays
ggcgggttcatttctaaagattacaggggcttttatgctattctgacccacgaaggggtatggatcgattagggccgtccgatcaggagcggtcagctaagattagatttaggtttcacatgaatggggacgcgctatcgagggttggatcccgatcgaaccgtcacgatcaaggacatctgaggttgaatcccagccgcgacattacgatcccagggatcagaatgatcccaccgatatgagcacgcaagccctgatccagagcgctcatttacaaaccaacggccacgagctcattactgcactacccaatcttacacgtacgtatacgattggacgactacggcactcatctaatctccaccgtccaacagtcgatctaccacgtatgggc

SEQ ID NO: 24879 - DNA, 573 bp, Zea Mays
atttgagaaagggatttctctcctagatatttatttttaagtaattgttgccacatcccctcctcattgagtaattttaagagatgtttgctaagtaagcttgtgttttttacagctagattaaagacacctaaaccccctaactccttgggttgataaacaatattccatcaggccagcctatacttccttttattgcctcctctctgccaaaagaatctagaccgaatagacgcctgcctgtatctcaaagaacgacatcataaagatagacagactacttaacacaaaattaagtaagactagccgtccaccagaagatagaaatttggccttccaagtactaagcctcttttcaaaccggtctataaccccctgctatttctcaatcttcgatgagacataggaattccgggatatttgaaaggcgttgtcccaattccacaaccaaataagtgtgagtattgcaattcatattccttagccaacccatagcaaaataactcacttttatgaaaattaatttttagtccagacatttgctcaaaaagtgtcaaaagaagtttaatgttc

SEQ ID NO: 24880 - DNA, 340 bp, Zea Mays
aaattcttctgttggttacccgggttgaatcagccaagcctcgatacagataggccggatatgctctgtctttcagtggctgaatgttcttgaaaacaaagtcagtgaccacagcttctgcagttagacccctttctttcaacaatccaacttctgctaacagagcccctgcctcagccacctcctggtctgtgggggattcggtctagctcggagtgcgaacatccggctgtctccctgatcgtggggggagggaattcctatgattctccacgatgaaccattctaggcgccatcccttgatgctatccttgagtgggatgtcgaggtagtcggtctt

SEQ ID NO: 24881 - DNA, 342 bp, Zea Mays
gtgtcaagaaatggaaaagctaaacctggggatcattcaacaagggactctgagtcagttaaagcttgagtcaatcattttgcaaagaataattgatgctcaaaaagataatctgggtatgaagcacattcgagagaagataagggcgggagtagccaagtgttttaaggaagacgatcaaggtgtgatatggtttaaaaaccgcatagtagtgccaaagaacgaagagctccgccagcaaattctggatgaagcacatcttagtcgttattctattcatcccggaagcactaagatgtaccaagatttaaagcaacattactggtggaccaagatgaagat

SEQ ID NO: 24882 - DNA, 479 bp, Zea Mays
atcctacccccttaaaaagaatctcgtcctcgagatttgtatgaaaagaggttcaaaaagattggttgtaattcagcttttagtttataattggttcaaaaatccagagttttttttatatatatagtcaatagtgggtaaataggagggcgtaggtatctagctacttatcaggtaggatataaaagatagataggttagggcaagaatatcctagggtaagaaagtttacggtgagaaaggactccttgttgggtggtaatgcatctgaagatcgagtttgacttctctccttccttgacgtggttgatcttctttggcctttcttcttggagttgccatccgagttaaggacatatagttaggatagccggggtacacgaggtgggtaggtttgaacagagtttttactttgctttttgaacaaatggattaggcaacctatgatgtaggttaggttgttgtttacgggcgagtta

SEQ ID NO: 24883 - DNA, 544 bp, Zea Mays
gtgatcagcaccacccacagccacgtttgcctctagagctggcacttcctttttcctccctttcttcgggcgtttgcaatcttccgcccagtgaccatagatgccacaatttcggcatcgaccttttcgcctcggagttccttcataggttaattttacctgtccagagttgctcccttcatgccgcgacgacatcttggtcttgggaaaagaaacaccggagttaccgccgccgtcgtggtgactaccacgcagacggtgtttgtgcttctctagccattgtacctctgctagaaggagacagcctgtcttgtcgacgaggtgttcgatcttgtcgtcgaatcgatcctccgccgcacgcaggcgccccaccaactcatccacagagagctgttttaaatcacaaaacatctcaattgttaccactacctgggtaaatcgtgcagggaccatgcagagaaatttcttgacgacgcgaacatcttccacgatttcgccgagtgctcggaggttgccgacgaggttggtgattctcatcccgaaa

SEQ ID NO: 24884 - DNA, 476 bp, Zea Mays
gaccccgcatgaacgtccatggaagtaccagagaaagacccctctcgggcatcctcgggggctgggtcacagtttgcactgcccacttgagccggatcactcccggcagcaccctcgggggctgggcagtggcttgcatttcccacccaaatcaagtgatccccgacaacatcctcgggggctgggcacgtgtcaacaccatccttggggtccaagctctccgtggtagccacctctaaggctgatgggccctcaactacttccatgagaccaggacgacccaagtcagtctcgcgatcctcaagatcgtgctctaaggtcgacgaggcacgggatgacctcaacctagcatcaagcacatcagcgcaaacctccatcacaccatcatctgctggctccgataacaaatcctctagaaccatatcctcgagagtctgatcaaaattggccagggacagttcttgcagaccaatgag

SEQ ID NO: 24885 - DNA, 726 bp, Zea Mays
acacataatttaacccctaacaatcgtttcccctcgatcaattgcaaggttctagcccccaaactctctactcacagtgaccatgcaatccggggacaattcaaagtgttcccgtcgatctactccggttcagtgcaattggttggaccgatgagcttcaagggcacacaggaatgctagaacaagagcgaggagaacatgatcggacatatggatcactgactgcgacgagctcacacacacggtgttcttgaccgatttgggggaaatcccaaattggtgagctctggtggacgatttgaggcacgagttggtgtattgggtgcgtgactacctagcggagccaatggcacactctatttatagggcccgaggcggtggcccgtgaatttgagatggcgcggtggcgaccggagagggaagaggttactggcgcaaacaattcgtggacattaccgtggcaagatcttgggagaccaatgggctatgtattgtgattaactgcgacatggtgagatggccgacggtgtgtcatgaccgcgaggaacggcggtatgacgacgagggtcatgcggccacgtcgccggtaaccggataagcgacagagcgttcactgtgcttcaagttcatccacggcgagacctttttacccggggattgttatctgcatttaacggagcgtgaatcgcggtgctggcgcgaatccaaacgcaagatcaccggcgg

SEQ ID NO: 24886 - DNA, 358 bp, Zea Mays
gagaaaccaacagctgtgacgacagagatgaatcgctcaaaccaagcacgaggggcttgtttcagcccgtacaatgcgcgacgaagacgacaaacgtgtcctgagggagtatcaacccccggaggaggatgcatgtacacttcttcacgtagatcaccattgagaaaagcattcttgacatccatcttggagatagtccaagaagatgaggctgcaactgcaatcaaggttcgaacagtagtcatatgtgcaacaggagcaaaagtctcatcataatcaagttcttgagtctgttggaaaccacgagccacaagacgagctttatacctctcaatggaaccatccaattttgtcttaa

SEQ ID NO: 24887 - DNA, 286 bp, Zea Mays
tattatttgatactggagccacgcattcgtttattactacttcatgggtagaagcacataatcttccaataactaccatgtcaacacccattcaagttgactcagctggtggtagagttccagccgatagtatttgcttgaatgtaagtgtggaaataagggcgatagagtttcctgctaacctcatagtaatgggtactcagggaatagatgtcatcctagggatgaattggctagataagtaccaagcaattatcagttgtgataagaggataattaagttggt

SEQ ID NO: 24888 - DNA, 392 bp, Zea Mays
cggccttggcgcggacggtttggtgttgtcgtttttgcttttgttgtgctagtccggctgcacccttaggcggcttctgcacggatagtcttcgcgatagacttcggtttcttcgcacttgttgtgctggtccggctgcacccttgggcgacttttgcgcagatagtcttcgcggtagacttcagttttttcgcacttgttgtgctggtccggctgcacccttaggcgacttctgcgcggatagtcttcgcggtagacttcggttttttcgcacttgttgtgctggtccggctgcacccttaggcgacttttgcgcggatagtcttcgcggtagacttcggttttttcgcacttgttgtgctggtccggctgcacccttaggcgacttctgc

SEQ ID NO: 24889 - DNA, 278 bp, Zea Mays
attaaaaggaattcaatgcaactggaataaattaaaaaggagctaagattaattttctatgagttatataagttctggaattattttggcactagaaatccattttctaaattatttttcctattttctcaaagctctggactgggcctcaatttctggaaaagtaagggggttcgaggaaagactcgccagacacagagcacagctccagaggatggcgggttgaatcgctaaaaggtgaggggctcttcagcaaaataccacggtcgaaggggtat

SEQ ID NO: 24890 - DNA, 294 bp, Zea Mays
aagggtcgcccgggcttgtcctcattccgggagcatcgaattgctcatcgtgcttcctcctccgctgcggtgccgccatctcccgtggatcggagtctgcgccgctacactctggtgagcctctgttctatcgtatccattatcgagatatgggcgtgtagagaccagcgatttagatctttggtacgctagcgctggtatggaaatctccggcgagacctctgccgcgggcgggacagtgtcgctgcgcgcctgaccaacacggggtgaggcgaatctggaacgttcgatttg

SEQ ID NO: 24891 - DNA, 304 bp, Zea Mays
cacgcctaggcttaccatcttagaaccgctgcaccggtgaacgccacgactgagccaccagtgaccttcttcctctccggccgcaagcacgccatgccaaaattaggagccaccgcccttggaaactataaattgatgccccagcctgctccgctgagtaattgtgcacctaatgaactaaccctcacctccaatcgtccctcacaactccccaatttgggatttcccccaaatcagtcaagaaccctaccgtgtgtgagctcgccgtggccagctctccacaggtccgatcacgccctcctcg

SEQ ID NO: 24892 - DNA, 298 bp, Zea Mays
ctctctatctctcatgtggtcagcacgtgctgatgcgaaaaatgggaaagatgatttgattcttgatcatcttgagccacatgcccacattcgaaacctgaatatttctggttattgtggtgcaaggcctcctatttggattgaaaatctccatgtgaagaacctggtgtcacttgagttagcaagatgcatgtattgggaacagctgccttcactcggagaattagaatgtcttaagaaacttttgttggagtgccttcctagcctacaacagattggtcaaccatctcaactttcc

SEQ ID NO: 24893 - DNA, 642 bp, Zea Mays
cagaaacaagaaagctgggggcaggatcggacctgaattggactggccacggcgaggtcccaagccacggtgttcttgagggatttgggggaaatcctaaattggggagttctaggggaggatttgaggcacgagttgcttcactagttgcgcaattacctagcggagcgaacgggggcggcaatttatagcctccaacggcggtggcatccaatttcacgaggatgtgttggcggccggaggggaaaagaggtattggcgctcgggacgagtggctttcaccgtggcagccctccggcgatcaccggacatgcataccatgattcatcgcgacgtgggctagtgcttaagcacgtggcgcacaacgatgagcgatcaacagcggcgaaatctatcccggacgcacgacgagcaagtgggtacggtgaatctcatccgcgcccgagcccgagctgatccattgctaagatttttactccatcgtggttatccccttaccagcgaacacgaatcgcggcgacggtgtgaatcatggcgtaaagatcaccggcggcgagggggatgcattcgggatctgattcagctactgtaccatgggacgtttcagcagacagcctgccaatcgatgtttaggacagattt

SEQ ID NO: 24894 - DNA, 500 bp, Zea Mays
tggggatgaagatggatttcgactgtggcagagtttaacccggcagacagacctcactgctcaattgtgttctattatgaaggatgtaagaaatgtaagaggtagcgcacaaaagaaaattgaaaaattgaggcagctattatcaggagttttcagtgagcttacaaactttgatgaggtaaatttgtattgtttgttaatgctaaaaaatatgatggcagattatctttgcttcgtagctaactgacttgttcgtttgaactgattccagccaattcgttcaccattagcaccaactcttctcctaacaggagttgtgcctcaagaatcgtctatatttaagagtgccttgaaccctttgcgcctgacatttaaaacagcaaatggcggaacatccaagattatttacaaaaagggtgatgacctccggcaagatcagttggtaagtaactaatgttgctttacatatgctatcgaatggtttgcttcagttccagtct

SEQ ID NO: 24895 - DNA, 366 bp, Zea Mays
atactagaatatgtgggtaatcatcctgcagcttcggttgcttcggctagtcagccacaggcttcttggccacaactcccaccttcaccactactacaacctgcttattcacgaggtcagcaaccagaagggagccaacagacccatcagcagcgagatttcagggaggaatccgaagcccacacagtcatcagtactgtgccggaatcaaaacacatctattaagagatatcctacccccgaacttagtttccttaccatttttaatttcttgtaatagcttcgttcttgtcatagtgaaatatatcttctccacagactcatgaagctcaaaaattgctgaatactgaagctcaaaagtcgttc

SEQ ID NO: 24896 - DNA, 396 bp, Zea Mays
tagttatttaaatatgtgacaacttatttggaggatttcttcatgttaaacacacattaaattgtttcatgcttgctgaggatctggtataatagaagaaactgtgctttaacaaccaaactattgtaaactttgtgaatactggtgcaacatcagtgattctaacttgtaaacaaggaacgagtagtgtaaattcaaatttgtcactagtagagatttgttccttattacattgaggtacttttgctttatgatctagaagttcctttttgatgtacagaaacagtttccataactagaacttcattgtgctattctctgtattcacacagttactattggatgtgatgtgtgcattagttgccctgtaaaactgcatctgttcaccagtttatg

SEQ ID NO: 24897 - DNA, 431 bp, Zea Mays
tgtcaaagtagtcatcgcttcctctatatcttgagtcgggtcaatacgcgttatgtgttcatgatttgggaagtaaatgcgtggtgattgcgatgtggagattagtggtttacgattcgtataaattggtcgatgtgcaaatatacttgtgaatctgtgtgtttataaaaatgttgtagtatatgttgtgtctcagatagcgataataatagataagccgacgtgtatgttatttagcggctagatcgtcactctagttagtcgaattgttagatagcttgggttaagcacataatcgcaataaattgtttgttgtagtctaaatgtgtatggttatgatcgcgggtaaaaattgtagtgttcatgtgatgtctaagtgaaaatccaaattagtgtgtgaagggcgcaatcgatatacacatctataccgg

SEQ ID NO: 24898 - DNA, 339 bp, Zea Mays
agagaaagattttagggggactatcttttgaacacaagttgaaggattatttgttagatttaatgttcttatgaccttcattccataagatcattgcactcaaacaaaaatccaaatcaaacattatgcaaatatcactatcacatgtttattataataataatatcaccataaggtttcatcctctacgcgagattgaattattacaatatgactcataatgtacctagagcaacctagtaatagatcctggcgctccatagcgaatcctcttgcgaggcggggacgcatctataatgggaacttgagcttctagtggatctcttccctcaagttgag

SEQ ID NO: 24899 - DNA, 567 bp, Zea Mays
aaaatgtcgatggttggtgggcgaccacatatatccagcctggcagggaggtggtgtggtggggatgcaggtcacaatggctgccatcacggaggatgttgggcatgaaggcgagcgaccacgatgtcgacataggcatgcaattagggatgcctagcctggtggggaggcgagcgagtattcatggtatgaaggcgaatgaacacgatagggtggcgttgagataggacaccacgacaaggaggtggccgccaacgtggaggatgtcgattgtaaaggtggatggctatggatgctcgacctgacaaggaggcaatgtggcggggaggtgggagagcgaccgcggtggggagatgcatgaatgtggtggggaggcgggctaccgcgacaaggaggcggtcgtaagggtgaaggatgacggtcgtgaaggtgggtggtcgcgacgttgtcgggcgttgatgtcgatggcaggtgggtacacgaacgtggtggggtgatggcagggccatgggccaccaaagagatgtgatgagacgatcaccggtgttgagaaagtgccaaagagag

SEQ ID NO: 24900 - DNA, 607 bp, Zea Mays
ttgtgtttctactctgctcgattcagcgtctgcttacttgcaagcgtatgcctgagacgcattttgctgcggatggtataaaagctctcctgtgatccctaatctttatctttactatacgaatcttggatctattcttgaaaagaggagatagccacgtagcttgccaaaaacagtaccgtgtgataaagctggaacggtagatcgttaagctctgagttttctcggcccaccgatactctctcgcctctgtaaaatatctacccgtgtgatttttgtttgcagacagtcatatacattcgcaacgcacaacgaagcagccatcaatccttccgtatgaagagaagctagcggctcattgcatgtatgaatcactttctgcacactgtttccaaatcatgtcaacatcgactcttctgcttggctctgagaatccccaaatctcatcagcaccagcacccactccaccctcccaatcctgtcaacccaaacttccctcaaatctgaatatcaaatcacctctccaatcctccccaaatcccgctttgccctgatgatccctaaatctcatcaccaccagcacccactcccctctccaaaaactatc

SEQ ID NO: 24901 - DNA, 976 bp, Zea Mays
gggtgccacaatcccgcttggcctgagttcgtcccatcagctgggaaggagaagacaagaaaaatggatttccttcgatttggttcccatgtcttaattgggatcagggggccgagggaggatgcagttgacataaggagacaactgatggagttttgtgagagaacatttggtttaaggccagagaattcgatggtggaaattgagcatatcacaagggggattgaattcttggatcatgtgatcacgcgcagggtcatctacccaaccttacgatatactgccagtggagggaacattgtcagcgagaagggtgtcggaacactgttgtctgtaacagcgagcctgcagaggtgcataaggcatttcaggaagcttgagcttgtaaagggggacagggatcctgagccattgccgtgctcaccgatgctgtactctgggcaggcgcacactaattcccagatgaacaagtttcttgagacaatggctgattggtacaggtatgcagataaccggaagaagattgtagggttctgtgcttatgtcataaggagctcactagcaaagctctacgcggcaaggtatagactgaagtctcgagctaaggtctacaagattgcttcacgggatcttagccgtcctttgagagaaagcacaaggaatgatgcaccagaatactctgatcttttgaggatggggctagttgatgttattgaaggtgtacaatttgcgcgcatgtcatcgattccaacgtgcgactacacacctttccctaggaactgggtgccacaccatgaacttatattgcttgagtatattaagctgcaagatccaaagttcttttgtgaacttcacaagactatcaaacgtcaggaaataagttcaccgcaggatgatgtatcaaagatggtgtggtattataaagtccacggtgtttatgatgacaaaagatccttagttggcgccaaggaattga

SEQ ID NO: 24902 - DNA, 323 bp, Zea Mays
tccgcgcaaaagtcgcctaagggtgcagccggactagcacaacaagtgcgaaaaatcgaagtcttcctcaaaaaagactatccatgcaaaagtcacctaagggtgcagccggactagcacaacaagtgcgaaaaatcgaagtcttccgcgaagagtatccgtgcaaaagtcgcctaagggtgcagacggaacaagcacaacaagtgcgaaaaagactacactaaactgtccgcgcaaagaccgactacatgcgcgccagacagacataacaaatacaccagaccaagtgtgcaacgcctttgtgagcatagccgaatgtgcga

SEQ ID NO: 24903 - DNA, 445 bp, Zea Mays
ctttatgccgagctgttaagaccattacaaatgttctccatcgtgcaggttctccatcttccatttactaacttttgacccttctgtacttgagtttgggcctgtttggatccaaggggctaaattttagtcccgtcacatcagtagcggaaaggagggttaaacatatgatgaattagtgtcatatctgtagttgctagaggtgggtatacatggtcttctataagggaggccaatgccacccacacaaatcacgcagttacgttgtgagcacaaagtgaactgctcttttactaaagataaagatactaaagaatattatgctaatttttggtgggtgctttcctatttaaggagggttccaaacaaaacaaatacaaaattttgttggttattgaattattgttaattcaaatgctaaaaatggccatggtgtggccattat

SEQ ID NO: 24904 - DNA, 300 bp, Zea Mays
aacttttcggaatggccttagcctggtgggataccttcaatgtcaccatcagagatgctacctgggcggagtttggaacggctttccgggagcaccatgtgccccaagggatcgttcagctcaaggaagatgaattccgggaactgactcaagacgaaagatctgtcagtgagtacgtgcacaagttcacagagttggcccgctacgcgccgcatgacgtcagcaccgaagtcaagaagatggcccacttcctgaaggggctcagaccagaactcaagaccatcttagccagccaagact

SEQ ID NO: 24905 - DNA, 340 bp, Zea Mays
tctttatggaacttttcttttttgcacactgatattccgattcatttttcatatgcggctgcagatgatgctttatggtgctatctttggttgtttatcaccaattctgtccgttgctgctttcctgagttataaatctccatttctctctccaaaagatgaggtatcatgtgacttcaatgatgaacaatttatgcaacctagatgtgccttgacatttcatgaactttttatttatactacagaagcaaaatgtggagaaagcaaaagccacattattgaatgagaaccttgatggatctagttctgtaacagataataaacaatccgatcacctgct

SEQ ID NO: 24906 - DNA, 466 bp, Zea Mays
caaaaacatgcgtcgaaaaaagaccgcgacgacggtcttcgacattcgaccaatacaaagtcaccgcgaggctcagcgctagccaccctcgcatgcgacaactccgtgcagaagtcgcctaagggtgcagccggactagcacaacaagtgcgaaaaatcgaagtctaccgcgaagactatccgcgcagaagtcgcctaagggtgcagccggactaacacaacaagtgcgaaaaaccgaagtctaccgcggagactacccatgcagaagtcgcctacgggtgcagccagtctagcacaacaagtgcgaaaaatcgaagtcctccgcgaagactatccgtgcaacagttgcccaaaggcgcagccggacgaagcataacaaaagcgaaaacgactacaccaaactgcccgcgcaaacaccgactacacgcgcaccagtccagcataacaaatacacctgaccaagtag

SEQ ID NO: 24907 - DNA, 499 bp, Zea Mays
gttggggttttggaatttttgctcctaatgaagtctaagttatgtgaaacagttgcagatcatgtaaactgattgatcgtcataccatagttcatcaaactaaacgctagtgttgagcagtagtacaaattctgtggctgaaagaggctgagggtggaactcatatgtagggtcattgagacaaaaatctccattaatacagcttactggtaagacccttgccaatcatactaagggcagtcccaatgcatggtttctacaggtattttctagacaaagtataatttagacccgatgctcccaatgcatgatttcttgtagtaatttctatgaagccaaaaatttattgagtacttgtatgctccgcaaacagagaaaaatcaggtgtggcaaagaaacatgtaggagaccatgtcgccacatctcactgtctcttctgtctccaattacgttaataaacaaagcaaaaacgtcaagttttgccagatggacattggta

SEQ ID NO: 24908 - DNA, 663 bp, Zea Mays
gtttttgggtgtgttggggttgggagtttacttctcttcctttacttttctctatataaatgaaattataagtggctcctacatgtttgagaaaaaagatctgatctggtaagtcgtctctaaattgtgtcattaactacaaggctacttgtcgctgcacctatcctaatacaatgcatcttagctaaagatatcctatcaaatttctaagatagctttaattagtattttttcttaatacaagtaaaatgaccatttgctatgtttctaagttattatgtttgcatacaaatgaaatgaacattggttattgttagtctgaatctttcttgtctaaatgtaatgggcctaaagcccagcccatgtaacctaatatatatggaatactcaacctactcaaggtttaggggttttaccccattcaatttggtatatagctagcttattttccatccccctcccctagctgccgcttgcccctggctgccacaacgcttctcctgtcgctgtcgccgctggggctatggccggcctcccctctcctgctcctcttccctcccctcctcacccgttccctgtcactggtcagccgtggttgcctctcctgcccccttctctagatacccgcgctgccacccctacagccgtcgtggcctgtgcgac

SEQ ID NO: 24909 - DNA, 467 bp, Zea Mays
agtaggtgcctcggttctccctgggccgttcggcgttctcgtagcccctcacatcactcataatcttattttgtttgtcggttcaccaccgacaactcttgttccatttttgacccctctgttttttctgtgaaggatctgaccaccaggacccctctcgcccgctgtgacaactcaggggccctctacaggctctgccctaaccccaccggtgcgtctccacctcccgtcctggtctccaccacttggcatcgtcgtctcgaccatcaaggatcatgatcaagctcaccaatagtttagatctttcatgtagtgggggacattttgatggtctctgccatgcttgttagctagatcgatatacttgtctcccattcactacttctagggctaagcaggcttttgatctgggtcattatgatctctggacctcccctgtactcagtttgtctggatataaatactat

SEQ ID NO: 24910 - DNA, 418 bp, Zea Mays
cagtattaaggggtggcgtctagagtggttcatagttgataattaaggaaattctctcccctcctgatcgggaagacaaccaaacgttcgcactccgagctggaccgagtctcccacagatcaggaagcggctgaggcgggtgtgttgctgactgaagttggactgctgaaagaaagaggtctaactgctgaagctgtggtcgctgactttgttttcaagaacattcagccactgaaagatagggcctatccagcatatctgtatcgagggctggccgactcaactcgggttaccaataggagaattccttctgtagacttggtaagccgacttgaaatgatcctcaggggtaaggtgtcaaatgttggtgctccaacggcatactcgacctggaacctgcctcctcccaaagccttc

SEQ ID NO: 24911 - DNA, 387 bp, Zea Mays
tttggaacctgtaatagtggtacctcgacctttgtcgtagtggtacaaatgcatccaaataaattaggaacttctgtgttatgtctgtgatgcatgcgtaaccgatgtaggactgcttgaagctaatgttccttttgtaagaaccttatgtcgaatgcttcatccttttgtatgaaattatgcgaaatgctgcatccttatgatcattttctgtgacccttatgtgcaatgaattcgagtttgtattttctactccaagtttgttatctgttgtccaacttaatgtatctatatatttcattccagaatggctgagaacaacacaaatacaccttttcgaccacctgctgccagccccaattcaggtaaccaaatcttccccccacc

SEQ ID NO: 24912 - DNA, 478 bp, Zea Mays
ccagactccggtcgggacagtcgaagccaacaacaggtgcacaacatagccaatcagcacccagccagagaaaccgtccgccgtcaagaatacccccaaggccgcggcaatggcaccagagggagaggccggggacggacgcagcagccacgcagattctactgcctattccatggcgaggtctgcgcgcacccaacaagagattgtccagaaacgaaggccaccagggacaagatgtccagggtcacagccagccgacaaccagagagttgtcacgcacacataccaccaccaccaacaacaaccttacaacaacgaccacgtccaacacccacccaaccacgcgtaccaacaccgccaggaagtgcaagtcattccaaacccgcctccacctccacatcacccaaatccacaccaccataatcacccccaagcaccaaagcaagaagacttcgccgaacaaccatatcgcggagtc

SEQ ID NO: 24913 - DNA, 360 bp, Zea Mays
aggcatcgcgtcaggagaagaggctggccaagagagaggaagccctgagcgagagggaggccctcacaatagagctctgggccaagctgaaggccctggaccagaccctggaggcccagcgggtccaacaagtggaggccatagagaagataaaaaatgggagcaggagctggaggacaagaccagcaacattgccctcaccaaggagaacctcaaggagaaggatgcgtccctagataggcgggagaaggatctcgcctttagggaggaaatgcttgaaaagcgggagatgttgctggccgagcatgagctctaggcggaggagaaggagcagaagctgaaggagcgggtccgccagtt

SEQ ID NO: 24914 - DNA, 344 bp, Zea Mays
ctgccactaatagatacaaacacaactatactgctatcctcaccaatgaggatggagtctccatctctgggcataatgagaaatacgcctggggtttctgacactccttctatgctcttcaatattgaccctttagttaaacatgtggaaggccttgactcctcggtcatacccttctcttgtactgaacttgatagcattgttcggagtatgccgattgacaaagctcctggcccagacgacttcaatgggaaatttgtaaaatattgttggcatctgaccaaaggtgacttctacaatctcttcaaggacttcttcgacaatcagttgagtttggaaggtct

SEQ ID NO: 24915 - DNA, 280 bp, Zea Mays
atactctatatggttcttcagaagattgacagatggtaggtacgtttacatgctagttacgtttacactattttttgttcaccgccatctcatcatgtaaacactaaaaattcagaagtccaaaattgatgtcaaatgaatatactcacctctgctgtcaatttttgtgcataatcccctcaaacccctatgacagcctcatcgacattggccacgtgtggtgagcatggaccccctcaaaacccttcttcctctccagcactatctccatagctagact

SEQ ID NO: 24916 - DNA, 528 bp, Zea Mays
gcgcattctcgaccgcccgatccactgtgaacgatcacgattagatcgaactattttaaaccctctctcaccagacaccatcggattcctaacatacggcccagatttaatcctgaagacactacagcttgactatctctcatccacacatctgagaaccaacggaccgggatcatcttcaacctaagacttctccccatccattccgcccaggttagacgtcgcgctctccctggaactctctctttctccgatggttcaccagcgtgcactcagcccggacccgaacacgatgccgccgaacagatgcaccaaacaataccgtagtcgtccatctctaggtcaaggaacgtgctggcgccacctaccttgcgctagtgactaacggcggcgcaacacacacccgcggcggcagaccccgccggagcgcaccaaagcctcgccaggcgccccaaacctcaccggatcaactttatgcgcagaagagcatcaaacgagcatagcggggttgcttcttaccggaaatcg

SEQ ID NO: 24917 - DNA, 394 bp, Zea Mays
tttatacctcaagtgtgtggccccgagctatggctgtggaattggtgttgtgtggtggagaagtgcgacaaccttcccatggcgaccatgtcaacctcaggtgcgtggactcaggtgcattgtgcatgtcctccattgcccactccgcttcccctaccttgctccctcgtctgtatgcatgcacatgcaatataagcaacttgtgtatgagatatatgctatgtttagctagataacacagtcgctttaccttttttagccgtttattttctcatttagccaaacttagtgttgcaacaacagattggttgtgttcatgtctcatatgatttgtttttggtcatttgttttgctcatttagccaagcttagtgctgcaacgatggaaacagtgg

SEQ ID NO: 24918 - DNA, 857 bp, Zea Mays
agaaaatgtgttgagcgtttaatcactaaaacaaaatagaaatgacccaagggcatgcttcccttttaggtaggcataatttgggatagccatgaacttcgcataacatggttgcccgaggatggcgtggtaagtcccatggaacccaactacctcgaaggttagggtttcagtcctaaagttggctggcgtcataaaggtgatgagaatatcaattcgcctgagtagggtcgaccttcttcctggtacgactccatggaacgaccctcccattggttagaggtgtccctgatcaagacccatagcatcgagcgtggtagaggatattgagcccgctcctctcgcccgtcaacacctttgtcagctgcatcgacccgacaatggggcttataatgagtgggtatcacccaggttggaggatgtgctctaggtggtcacaacggtcgtatgtaatggcatggtcagactagtcaaggaaggtcgttggcgctggctgagcctagagtacctcacgtcattctgacttccggtgcctcctcaacatgtattagtcaggcccaccgaagatcagcaaacactcggtttcataaggcaaagtggccctcgctttctcttgctcgccatcccagtggggctcgacccctttatcgagtggtgctcctttgctcaggaacttcctaagtaacatgcagtctttgtaggcatgtcggaccgtgtagtggtggttcggacatagggcctcgtgtagtttctcgaaatggtcgatggcgtccttggtcgatgatctctttcccttttggcccggcgcagctaccaacatttcgtcatgcctccgtttatccttctttctcttatcg

SEQ ID NO: 24919 - DNA, 352 bp, Zea Mays
ttcatctcataagatagctcgtgcatgttgcagaagattttccattcggttctagcccctagctcctcatggcccaaataaagatccccatcttgataatagcttcgggtgttagctgatgaaggtaaatttcgaaagcctttaaaacttcaaccagcaatttatccaaaggaaatcgaagccctgccttcataaagcttctataaactaccacctcatcaacttcgagcagagggatattactttctcctccagccctcacaatagagatatcacggaagtaccttcctctcatagcatcaatttgcccttgcttgatagttgacttcccgaagacaacatggcttggtct

SEQ ID NO: 24920 - DNA, 463 bp, Zea Mays
tcgtcggtgcgttgccgcccagcatcgtttgctgctgctctacttcaagtgcaggtatggccccatgcgatgctccacgacctattaaaccatatagattgaagcttggtcgccgggtcgatgggtggggtagtcctagctatagcgccgccgtggggaggaagtgcgatcgccggggtagttagtgagtgggataagaaagagatagaaatgggtgctgctctggtgccgtcagtcttgagataaacggtcaggattaggcgagcacatcccacgtgggcgaccgtcgatctgtgaagtaatggtcaggatcagatcgatcttacctcttcgctatgttaaatcgtgatcgtatatttcacatccgatggtcgtcttggcgtaccggttcataaagaggattgtgtaatctacgtcgttgatcctgcatccagcggtgctcgttggccgataccccttcggc

SEQ ID NO: 24921 - DNA, 466 bp, Zea Mays
tgttgaccaatctcgtggccaagaagagaagaatggccacactgtgtgtctagctaataagaaagggaagtttcagcgccaccacccatatcacgggaagtccacgaaatctagtgctttaggagggagtactccatagtatcgggctgttcctaagcctggtatgggtttggtgtgctttcgttgtggtgaagcgcatcgtcatgctgagtgtcagtggaatggcaaatgttctatttgcagcgaggatcacaaagttgtggtgtgtagaaagaatccgaatggaaaggttaaatgggagctagtgacttcttcagcctctcgtgacactatcaacaagatgacatccactgagtagtagttccctgtaccaccccttagtaaaatttctctatgccagtgactcaacagtacctgtccatgtcgttctttcctcactacatggcagctcccactcctgcatcga

SEQ ID NO: 24922 - DNA, 290 bp, Zea Mays
gcagaagtcgcctacgggcgcgaccggatcaacgaaggcgcacaaccttatcacataaattaatttacggttacatacacacagcgagggcatcatatattacattggctcaaccttcgggatgatacccatctccctatagttgaacaacattatcctcaattcctcaccctcaaaaagatttcgcagctccccctcacctacattcaccccaatcggcgaggacaacaattctcgcttaccagtcccgtccacgcgaagacgaccactctccatctcactacgatgac

SEQ ID NO: 24923 - DNA, 273 bp, Zea Mays
tggcaatgcaatgctgcgaaataaaagctcacatgacgtgctgctactggtccagctgcagacactgaattgaagaggcgataaagctgtcgagcaacttgtgtgggccgccggcgctggacaggcttaatcagatagtagactcgatccaccgccaattgaagagacgataaagctgtcgaggaactgtcagatatcttgaacccaatgtacatgtggtgttcggtggcccatgaggcattgcagcatggcagcacattgtgatatatccta

SEQ ID NO: 24924 - DNA, 628 bp, Zea Mays
atttaaacgatctctggactgggcctcaaatccagataaaaccaggggctattctacaactaatcctgagactcagagcactgttgctctggacagcgggttgttttcacggaaacaggaggtctcttttgcaaaagatacccgcgaaggggtacggtgcaatctgggtcgtccgattagatccgaacgatccagattagaccagcgtgctgcgaatcggtatgcaatcaggggcgttgggtcccgatccgacggtgtggatttaatgcacaccgatctcacctgcaccacccgatctaacttcaatgccctagatcgattccccctgaaccggtaactcatgactaatcaaggccattgactctggatccgacgaccgagaatgactcgccccaaacagaccggaccacggcggcgcaccaaccatccacggcggagcactcgcccttcctgtgacccactgtcgacgccccagagctcccaaactaaaattaataggtcccgacgcaaactataaaggaaagggagctgggccatggccttacccgcactggaaggtagcagaggtcaccggctacggcgcggatggcttcacggcggcaccgaagtcgtcgacgagaaattccgg

SEQ ID NO: 24925 - DNA, 429 bp, Zea Mays
cacaaacatgatctatccaaaaaaaataatagttcttatctagtctaatctgattgcaccaattttgatctcatctaatctaatcagatctaatctgatggacaaacatgatagataatactagaaaaatagaatggaccctacttctatgagcatgttttaacctaaattggtgacttatgtaaactcggctacacccaacaaacttgacctacataataggttacataacctatcccacccgtctagaagcaaacgaccaaaccagattctgactaacctcattaaactcatagccatctactaaaccagctgctctacctacggatctatcttaaccaagacaccaatacgaagaagatcaacctcatcaaggaaaggataagagtcaccgtcaaggaaggtaatcgtcaaggataaaagtcaaac

SEQ ID NO: 24926 - DNA, 1168 bp, Zea Mays
agacgacgttgatgttgccgcaatagccggtgctacgagatgacacgctgtggagttcgtgaagaaggcgatgcaatcaggaagcttcactaatgtcattagcgacaatgtgatactccgcctcaacgctcgagtgggggacgacgttctgacgcttggaggaccaagacgaggttgtagcctagaaacagaacatagcctaaggtggattggtgtgtcttcggacaacctactcgctcaccattagtgtaggcgacgagctcagaggcggaggggtagcgaagaagtctgtcatcttgagtgccctaaagatagcgtagaacatgtttcatctccattagatggggctcttgcaaatcatgcatgtgaagacaaaactgctgaacaacgtaagcaaagttgggcctagtgaacgtcatgtactaaagggtgcccgcgagactccaaaattgtgtggcatccaccataggagggttgaagttggcggtgaacttggcctaaagatccacatgtgtggtgtagtgcttgcaatctgtgattccccgcgctcaagaatgtcacacgtgtagagacactgatgcaggaagagctcatcggatcattgttccaagaaagcggtgaagagatctcatgtcctcattgcaaattccaactacagagctgagatggtgcactgcaaaagctcaatgctagaagctatgagaacaatatcatcaacctatagcaacaagtatatcctctcggtgcctcggtggaagatgaacaacaatgtgtgtacaatcgttgatttgaccaccagactatcgtagtccactcaagccgctgggtgaagccccaaacaacctaacgagccttgtagcgatctagggactcgttactcgttagcatgaaacttatgcttgaagatccacttgccagtgatgacatcgaaactaggtggatgaggcaccaagtcctaggtgccatttgtcattagcgcctttgtcctcttcttctgtagcaaggtgccaatgaggatctgcatgtgtgctgcagacagatgctgagatatgagaaaggggcagtgcggatgaaacaatgatgatcgatcagtccacatgttattgaaagccgtgctcgtcctgcgtggccgttgggtggtggttgacagggctcaacgccagccggg

SEQ ID NO: 24927 - DNA, 720 bp, Zea Mays
cttctctcctctagtttcactaacggctgggtcccacccgccagaagcttcttcaccaaaccaacggtggcgtactctgaagtctgaacacgcgcgacaggcgcttgggcgatgaatgtcgcgcgcccgtgatgcacagaaatcgctaccgcgacttccttcggtgcgaaaataggacagcggcatcaccggataacaaacctttcctctttccccgtgatccgatccggtatccttcatccccgtaccaatcgggatttcagttcctgacagcgggcggaacatggtcgccattatcgggtccccgtgaaccgcgccatggctaatgcggagagagataagctggagagggtccaccttgtgctcatcggattgcagagagattgagagagagaacgtcgtggttcgtgcggctggcgcatggacccgccttgactgcggcaccttctccgcgaattcgttgcaacagcgcgcgcaatcgtgggggtctgttgggattcaccctcctcgcatccggatcgtgagttcgttcatcaaccaaccccctgcccctatataaccatcaggccatgattccttgcctcccagctccgtctccatcatcttctaggcagagcgagccaagaagggataaaggagttctgtcccgttgtgtgtaaagggggtcaccggcgtggaaccagggccctgctgccccatagccttcgggacgcaacctgg

SEQ ID NO: 24928 - DNA, 342 bp, Zea Mays
ctagtttgctctggccacggtgaccgtggacattgcggacagatgaacgcgttctcggcggtcagtgggcttctagtccaattgggcaggtctatgagcatcacaggtacatgagaacactcaaatgagggagcagagggtatgagctgacctgaatcgagctggccgcggtgagggtgttcttgcggtgtttttgagcagattgggggaagttcaaaattcgagctctcggttgtaagattggaggcaatactgggtggtgtggtgcgtgatcaacctacggagcccatggtggcttcaatttatagggatcgaccgcgagcacaacgaatttgagcggcg

SEQ ID NO: 24929 - DNA, 338 bp, Zea Mays
atgaatcataatattgaagactgcatatctcaatacattttcttccttgtatacttggaacatgaaattggaaactatgaaaacatgcattcactgatgtttgtaaaattggagactatgaaatcggggctcaccagagacgcgacattagggttcatcggtggaggacagaccacgatagaaggcacaacgcagaggagtggcagcttgggcagcagtgacatggtgatgtgcaggtgtgatggcaagcaggcgtggtggcggagaagcggcaccgacggctaggtcacaggagaaaggccgacgggagagaaaaaagagaagaagggaagtcgggc

SEQ ID NO: 24930 - DNA, 415 bp, Zea Mays
ctcctgtttgctacttttcacgctgatccctggtcttcgtagcctaacctctagctttgctttgtcgtcttgcatgctctgtagggtgtcggaggactcaggcctagggcacataggtcataagtggaactcaggcctagggctcataggccaagcatggggctttagcttagggcttgtaagccatgagtggacgaggtctagctctttcctataccgtggctcagtgccaggcgtacttaatgtggcgtgtgtggtattgatggtgagaacagtcctttggcctcatgtggaatccactagagtggttccctggtggttcgtttggccccatacctgccttcgcttgcccgaccctcaaactctactcgtgggtgtcatccgagagcggacttacctaagtaggtccctgtcc

SEQ ID NO: 24931 - DNA, 402 bp, Zea Mays
ggagtgggcagagaagaatcattggcatggggaggagcactatcgatgcgactagtcatagaacgatagctttcacgacgagaacacaacacagtggtgtggaggggagcagtggcaagatggaaaagcaggaaaggacaatatggtcatgccactagttgtggaaaaagaagacaacataaataatttataaagagtcaaagtactgttcagaaggataagatcatttataaatattgatagggagaaggttaagaccctctttgatagagctcttgcatcatcagcttcatctttatctcatttagaaaaataacttcctccttatttttaggaagagaattttgaggagcacttcatttggttataaatataactcttattatttcacgggagaaggaa

SEQ ID NO: 24932 - DNA, 510 bp, Zea Mays
cactaatacagagaaggtcggggtttaactcgcaagatatcccagacacagccaaccaccgagtggactacgggttagattctatttaactcggggtcgttttagcaaaaggtgcgcgtcgaaggggtatagggcgatcctagccgtccgattcaatactgatggatcagattagaaccccaacattataaaccagtacgtgactacggtcgtcagatctctatcctatggttcaaagctgaccacgccttcctgtctaccggatcctgatccaatgaccaagaatcaacgctatccccgatctgatctgagacgtccactacacaaacgacgaccagatctggtagctaatcacagtcgtccgcgctcatctatggtcacggcgttttcttctacctcagactcgccgagtggtgacgctgcacccgccccaggaccacggctgcacggcgaccgacccatagattgccagaaccccagaattcgaaccccatgcacgaatcgttgatt

SEQ ID NO: 24933 - DNA, 366 bp, Zea Mays
gcgtaagcagacgggcagagcctgacataaagcctctgggctacacgcgtcttggcatttattacggataagacgtgcgtctatccattccagtgacaggcggcgcgcccagtccacgttgcgtgggtcgtgctgttactcacacgttaccatagcaaggacaatgactcaccattactcccgcgttaccaggaaaagggtcactgcctatcaatactgcatggactgcagtcatcatgactcccgctgattactcatgcgttactaaggcggagggaatctgaacggctccacctataagcctctactcgtgtgtgctgtcagcattaattattcacataatgtaatatttccattatgctcctg

SEQ ID NO: 24934 - DNA, 280 bp, Zea Mays
ggaagatgaacccagaaaaatgtgtcttcagagtaccagcagggaagctactcggattcattgtcagccatcaagaaattgaaggtaatctagaaaagaacgaggccatcatgagaatggaagcgccacgatcacagaaaaaggtgcaaaggcttactggatgcatggcagccctgagcaggttcatatcaaggctaggcaagaaaagggtgccattttacaaattgctcaagaaggtagacaagttttagtggaccacagaggcacaggaagctctaga

SEQ ID NO: 24935 - DNA, 361 bp, Zea Mays
agaaatagaaaggcaagtgacagagttattaactgcaggactgatagtgcccagtgccagtccatttgcatcccccgtattactagttcagaagaaagatggcagctggaggttttgcatcgattatagaaggttgaactccatgaccatcaagaaccgatttcccatgcccttggtggatgagatcctggatgagttggcaggaactcagtttttcacaagtctagacatgactgcggggtatcatcagattaggttggcagaggaggatgggggtaaaactgcgttcaaaactcatcatggccattaccaattccgagttatgccttttggtttgacaaatgcaccagcgacattccag

SEQ ID NO: 24936 - DNA, 599 bp, Zea Mays
ctggagtagagcttgaagtctttatcgtctccagcacatctagtacattgaccatccttttcctcttgggggtcgctgtaagatctttttgtgcctttggcactgtcacttctgccgaagggcttataacttctaatatcttttttctttcgacctctatctcttcaatattatcggccttcggctcagctaatttggccgatgatgccttcggcatagcagtcggctcttcaatcttctgcgtaagcgcaggttctttggctttaatagccgaagaggtctcaccgccaaattagggcactgtggccggttcaatatagcgcggtcggtgagtaagaaccttcatctttctcctcttcgacgcgggctcactcggagcagctgaagtaacatccttcccagaagttgcactctttctcttctgcccccttggcgggtaatggtagtcaggatacataaatccaatagcatcaaaaactctatttagcctcttctttttctggctcccgaaggccgcagataacgcattatcttccgctttggagtacggcccaagcaactcatcacttgtagcttcgatgcacttcagccagtcgtcg

SEQ ID NO: 24937 - DNA, 751 bp, Zea Mays
ccagaatcagaacatgagtacaggtatatttttttcttttctgtatggttatatctgtgttcattgttgaatctggtggactatttccttgatctggtgaggagcataacttactttgcctaatctgattagtctaatatcttcaattcctggcagatgtggtcgtaatcgtcgcggtgtttatattaattggcttattctgcatgcaacactatgggacagataaagttgggtggctctttgcacctttggtgctcctttggtttattctaatcgggagcgttgggttagtgaacatacgcaaatacaacagttctgttctaaaagcatacaatccagtctacatcttccggtattttagacgaggcaagtctgagatttggacatctcttggaggagtcatgcttagcatcacaggtatctcttggacatctcttggcaattcaactttaacttctgcatcaattgtaagatgaaacagagttaccttatctatatgcctttttctatgcagggactgaagcattgtatgcagatctatgtcacttccctgtattggctattcaggtgagtgttcaaatagaaaaattatgaattatgataatacctcaatggattaatcatgtctatgtccagtttgcgttcaccttagtggtgttcccctgccttctactggcgtacactgggcaggctgcctacatcattgacaacaaggatcatgtagttgatgccttctaccgctccattccag

SEQ ID NO: 24938 - DNA, 282 bp, Zea Mays
ggagaaggagatcctcaacatcgatgaaccaataggtgacaacatcaccgaatcaggcttgaataacaagaaaaaggacgggaagaagaaaaggtgcatcaagaagatcatctaccacaacaacgatgcctcctcttcttcaccaagggacgacgacgacaaagattcctcgttgaaaaagaaaacgattaaccaaaactattattttgattactctcgtatcccttacaattcaaattatcatttattgtccattccacttggaaaccccctcactttgat

SEQ ID NO: 24939 - DNA, 507 bp, Zea Mays
gtcgtgagttcgtcgagcatggcacggagaagtgtgtcgtgactgtatacattggatccagtccacaccatgtggaatggagtgtcactgctgctgggcacagattcaaagacacctgccaagtcgtcgctcgcaaggcattgaggaccctgtgttagatctatgaagaagaagtggtcgacaccccgctcagattctttccgccatttcagagagaccgtcccgcttggatggccaggatgcgtgcattggaggaggagcagcagttgcttgaggacgaccccacagtcgtgtacctcactgcatacctgctcacccttgatgcacagtatgatttcttggctcggcaccaccgtcagatgattgcccgagcagaagatgcagagaagctcaaccgtaagctccatgtggatctcacctcagctcaagcccgtgtagctgccttggaaagtcgtgaagccattgctgttgaagccctgaagcaggctaaggatgagcatgtccaga

SEQ ID NO: 24940 - DNA, 763 bp, Zea Mays
cttgttcttgtggtttgatatgataatgcactctaagagggtcatttatttggacacgataggagtatgcttttcttcgttgtagcgtactatgcgttgtgcaccggtgatccttattcaatgcgtagtaaaacaaaagatatcctgttgttgcaattcttttgatatgttttcatccccaacttttgcagtaccatgtgctgatggtgcacttggcttcggaatcaaagaagaccagattacagcactgacaagggatcacaactactctggtctgcagcaatatggaggggtgagctaatcctggtgtcataatcatttgtctcactacttgcttgtgatagtctcaaccttacaatttcctccgcaggtttctggtgtagcacatatgctaaaaaccgatacacagaaggggattagtggagatgactcagatttgctggcaaggaaaaatgcatttggatcaaacacatatcctcgtaagaaaggaagaagctttttggtatgttaaggtttcctgatatagtatgtttcctttctctgggtttgtcacttctgctgactgtacatcatatttaggctttcgtatgggatgcttgtaaagacttgacgctaatcatcctcatggttgctgctgctgtttcactggccttgggcataacaacagaggtggacaacacatctgtagttctttgactcccttaactgtacaaaattgccaactgtgtttgcctagttgaatgagttgttttgttctttttcc

SEQ ID NO: 24941 - DNA, 283 bp, Zea Mays
cagcaatcatctcattcaaaggaaatcttaatcctgctttgaagaagcttttaaagactaccacctcatccttttccggcttcggagtaatttcgtctccgccaaagcgaattagctcctttttggcctcactgaaatagcctaacttcatcaacttaggcatatcatcttcggtaacggtggacctcccaaactccaggtggccgggtttagatggcacgacactataatcatcttcagattcatgttcctcagcaacaacctgctcagcctctgcggcagg

SEQ ID NO: 24942 - DNA, 465 bp, Zea Mays
gtgcgacgagtgagggcggtggcgggggttgcgaccaacgacggagagccacacaaagaagcccatcgacgatgttttcctcaaggttcgctcgctcattccttccttccttgtgctattggcgtgtgatcctagctagcgctctcttgatttcatccttatccacgtgaatcctggatcacattgcatgcagatcggattactggaaggccagaccagctgctcgcattcactggtgcacggtgtgggagctgagagcttcgttcctatggccgggccccacctctcttgggcccttgtgcagatacgcagaggtagtgtcccctaatttgttagtcatgtcccctaatttgtttgtcagagctacttgaggatgtcaatgaggtaggctccgctggttcatcaatattcagtaattacaaggcattatgagttagcatgctccctcctgctaagctagctaaa

SEQ ID NO: 24943 - DNA, 307 bp, Zea Mays
ctcggtgtaccacccgtaatccaacgtcatcgttgagcatgccaatggcaagattttcactgccatcaagaaatgacttcacgatgataaaaagggcaaatgggtcgaccaactacctgaagtggtatgggccctaaacacgacagaatggcgggcaactgggttcacacctttccgcctattgtatggatccaaggccatgatgccgcaagagataaagcatgggtcggccagaacaaacacatcagcaatccccaatgtcaacgaaccaacttccaaagatctcatcgatggagaccgcgtcctc

SEQ ID NO: 24944 - DNA, 408 bp, Zea Mays
gatcaattggccgatatatttacaaagccattggatgaaacgagattttgcacattaagaagtgaaatgaatgtgatagatctctcaaatgtggcttgaggttgaacacacatgtgtagtattgcatttcgcttcttaatatgctccctaggctattaattgggtatttttgatgaatttttcattctcgtttgatctaagtagttttatatgaaaatgtgtattcctcaaatacataatgtgtatatgcatgcatactaacccttggattggtcgaaatgtctatatatgagcgtcaaaatcagatttgaaattcagaatcagaaagtggacaaagtttaaagatttgattatcaggctgcagaccgtccgggtaaggattgcggaccgtccgccgtatcaggatct

SEQ ID NO: 24945 - DNA, 387 bp, Zea Mays
catgagtggaatgaggaccgactcctctgtcatggctcggcgttaggtgtatttattatggtcacacatttatgatggggcagtcctgggcggggtacgaaatctactcgagtggtttcctcttggttcgctcgaccctccccattcggctccacctcgcccgaccaccatgctcgtgctcaaggttactcgggggtgggttattccggggaaaactctccctccgccctccctttgtcttatgggccctaggagcctagggatctaaccccctgtactttgctcctatagttagactagattcaatttgtattcttttggcctatgctactcgccactcttttaaactgtttcaaatgaacatgaagagcaccttcctaaacaaac

SEQ ID NO: 24946 - DNA, 640 bp, Zea Mays
tctatgcctgatcaggactgacacgttgtgccgcattaactgcgcttagcgtcgatccacagagggtgagtcggtccactttccactcatgacctacgggctcatagacttgtatcactcatgacctattaagcccaggcctgagtgtgttggccacctacatgccccgctacacgacgagtcgcgtcgagacctaggctacgacgtccaggggtcagcgcgacacacagacaacaatgatgatgtcgaggctcttcgccacccatgccgctggccattaagagcacaataaaggaagcctgaatgactgaggcacatacgaacaaatgcaaccttaccatgggtggaacgctccgtttaacccacaacacaagagctccttcgcaaggaagctccagtggccaacccccaccttggtctataaaaggaggaggtcggccaaaagacgaaaaagaggaccaaggggatcgaaggcgaagatacacactcgcacacagacaacgagaccagaagacccaaaggccaaagccaaagcatgagccaccatgacattcaaggcttagcttagaactccagtctcgtagtctttaggtccacccactcataagagacttgggagctcctccctctctcgcccgct

SEQ ID NO: 24947 - DNA, 856 bp, Zea Mays
ggtctgtccatgtgcacggcggaaatcgcgaccatgggcacgcgttcccgcataaccagagccgaattgagtaatcagacgccacggtgagtttcacaagtgcacagagttgtcgaaacaacattcaatatgggcaggggcttaccatggtggtccggccacggagcgcggtgtttcgtgcttgccggagacaggaaaggggaaagtggggtcgcggcggctctgggcgaaattgggagatgagatcggggctatagggccgtaagaggttgtgctttcaccgtgcgcaatcgatttgggaggaggtggagaaggcagtgcgaatcttgggttcttctcaagcttgcggttgaggcagtgagtgcctcgccgtggttcatgccgctatttaaagccacagcggaccgacaagcgatcagtggccgcagataaccttgctagcgcatgtataccacgtagaagagaagtacagtgaggtagaattgaggtgagagtgacacggcggcggaaatgactggtgcggtggccgctggtgaatcactccggccgagctcaggagatggcgccacgtatgaatcaccctctccccggcgttatccaatccctaccgcccacgaacccgaacggcggctgcacgaattttggcgcagagaggtcgccggcggtgaacatccggtgctggcagccttatcccaatctgagcactgtaccatggtgctccctcagtcagtcgacctgacagagctctttgaagccagattttctcttaatttcaaatggcaactcaactaactttctgcagcaaggttacacacctataatccatcttcaactttgccacaatgcttaccatcaa

SEQ ID NO: 24948 - DNA, 349 bp, Zea Mays
ctcaccggccgtgcgaaatcactgggggaatcggcctctgctgcaccgaattcgtctgcgcacccagtaccacttcctggtgggtcccacaggtcgggccggttcttctccctaacagattccccgctatcctcggtggtcagctccctcaacccagcctgccgccgcgttttcttctctgctgaccgcaacggattcttccccaaatcgcgctgtccgtggaaatcggctctcggtttccgatctcgtccccgccactcgactatataacgcacccttgatagcaccgagccacctcgtcgccatggccggagagtagacatagaccgtgggagggagaattgccgcc

SEQ ID NO: 24949 - DNA, 281 bp, Zea Mays
gctgtggagatgcgcatcgccgtgcagagtgccagtggagtggcaggtgttctatctgcagtcaggaccacaaggatgtggtgtgtaggaggaatcccaatgggaagctcagatgggagccggtgacttcctcctcttctcagggcactatcaacatgatgtcaagtgctgagcagcagttttcagttcctcttcctccacagcagctttatgtgcctaggacttctcagttcgtgccgatgcacgattttcctcagtatcaggctgtgcctactcctgca

SEQ ID NO: 24950 - DNA, 360 bp, Zea Mays
ggctatacgacatcgatcctttgtagtgggagacttggtccttcgccgaattctaacgggggaaggacggcacaaattgtcaccactatgggaagggccattcatggtatcggaggtcactcaaccaggatcatatcggcttactcaaatggatggcacgaaagtgggaaattcatggaatatagagcatcttaggaagttttacccttatcaagagctcaaaagctatcggagcaacgttgtactctgtaattggagaatacgtcatcaataaaagatttcattctcaaaggcattcaaactgttggttatcaattgacttcgatttgattagacttggaatcaacacacttactcgac

SEQ ID NO: 24951 - DNA, 500 bp, Zea Mays
cttttctgtaacattctacagataattgaggcttggatacggatgcagttacatgcatggggatggggagacagaatcattgcagcctaataatcatcattctttgcattgtagctaacccaactcaaagcattacgctaaccgcatactctgaataagccttttccagggggacgggaataactataggcgcgaggaaataggaacgcgagcgatttatagcaggattagttttgcctctggtgagataatcgtaatctaggggacgggaataaccatacgcgcttcgcttgtgacgcacgacggtcgaaactcgtgctttaaaggagtagatatgtggcatgatagaagtaagcaaaaccaatacatgtatagttataattgctcatagactctgttgtttaaacaaaccttggctattaataaaggaagatactttttttccatagtaggcatggttttaaaggcggctaggcggaactaggcgcccagccaccgcc

SEQ ID NO: 24952 - DNA, 653 bp, Zea Mays
cctcattctcgtcacgttctcataatcgggcgggaggtactggtggagtggcagaggtagagggagcggtggaagcaggtgtggtggaggcagtaggcgtagcttgggtggtggtaggcacttgagtggcggaagttggcgtggtagtgaaaggtggagtggtactggtggctggagcagaggggttgaacctagctagagtggagcatgcccaagacgagaggcacgaacacggaaggctatttgatatgatccaatcctcacctgctctcccttctctcctatctcagccgccgccgctgctgctaccactgcccgtgctgctctagtagctctgtccaacttccttttctttttgccttcgtactgctcaagatagacctccttgcccttgtatagtctgaatgggcgagggggatcatgatcatcgccccctcctgctagggtcacattcttggtctcaccatcctgactgctcactgatcattgacacaccgcacgagaatgagagtagataaatcagcatagcaaagcaagggataagaatggaaaatcgaagatctagctacctggggcacgtctttcgagaaaaaaccaaccagaggaagtcacataagcaggcacgccgacacactgaaatgacaaaataggtg

SEQ ID NO: 24953 - DNA, 400 bp, Zea Mays
tgagtattctaaaaaggaaagccattcagtccgtcaaagaagatcagagggctgtaaagaagcagaaagttctagcagagccaaaggattcggctcccaagaaacgaaagcctatcaggatggctcctgcagagatgaaggtacaagatataccagaaaagactattgacacttctctgtcttcctctgtcgatgtttcagaaatactgaaggtaatgagttaacccttcccatttggaatgctaagtcccctggggtcagatctaactagcctattgcagtcaaaggagaagggatttgaacaaagctcgagagaaaaggagactgcttcggctactgagggaaataccgggggttagaagaaacggcgaatgatggacataatgcaagccatccaaaa

SEQ ID NO: 24954 - DNA, 370 bp, Zea Mays
gcaaggcgcgctctaatcctagccatctgttggagcatcaacggtagtagcccttcctcccaccccgacggccagacgtgggagtgctcatacacccgcggtggcgccatgccagtacaaggcattcagccacaccagagccccaaaccacgcgctagacgtgcctatgtgaagaggagaactaggtgaaccagatggatagcttctcacctctgattggtagccgaggtaggctacctccgatgccaagcggctctgcggcagacgatgcacgacgacgagaaattggcattcatccacgaccttccgctgcgcgaatcaaccttgatcactgtccccgtgcaccggcgaacatcaccatatcactctc

SEQ ID NO: 24955 - DNA, 376 bp, Zea Mays
gcgagggctggtgctctggcttcttaacaacctagcagagttaacggtgcaatcaatttatagccttcgggagcggtgcctccaaatttgaggaaggaagctggcggccgaagagagggggtgagtcaccggcgagcgctatcgtggcattcacagtgcaaggacttatggctgtcactagctatccctcaaggcttgcgatgatgtggtgaaacgaccgagagcgtggcgtaaccgagagaaacggcggcacgacaacgatggtcgcgtggccatgtcgcggcgcaagtgggtacagcgaactgagcggtaacagggtccgagctcatcccaacaccaagatcttttacctcgagtcattattcatgcatcactg

SEQ ID NO: 24956 - DNA, 428 bp, Zea Mays
ctcgtattaaataagatatgtattatgatttagaccttgtttgtcggttgttgaaaatagaatgaaagtgtgccacccacatgtgtgttgtcgttgccgccgagctgagccaagacgcagtgaggagtggcacggcacaatgcgatcacagtcacggagcgatgtagcatgcagttgttttgtcacttaggaaggcaaacaatcagagagttagagtgcgtagagagttatcaaaagtttctaatcctacctacgggtgttaaatgtttgctaatgggactgtattttgctatcatgagtctgcttggttctctgtcttcttatctccagcgcccgctcggttctcgcatttgtgatctattgtgttcgctcggttcctctggctcacctatataagctatatcttgtatttgtttcacttttctact

SEQ ID NO: 24957 - DNA, 396 bp, Zea Mays
gctacacatgctgctccaagggctctaccaaaaaactctaacacagcccttcctcagggaggatcgcaaggtttgccttacttgcatgtgcatttttaccatttatggtggcattgtacaccttcttctctctggctattcaaaccatattttagataggttatactgcatcattaaccaccttcttcttgttgtctatttcttttcaggagaaacatcaaaggggtttaactttcagtttggtagtataaatatgaatgggctaccggtatgattttgttatctattttttttctccagcttgggtcatgtagctctctgtattagcaattaccttttgctttctacttacattacatctatacaattttgtacagcaatttcctgccaggacaa

SEQ ID NO: 24958 - DNA, 748 bp, Zea Mays
aattgccttctgagacttagcctggaccggaccccattcgatcatcctttgcaattccgctgctgcaggaaaggaagtccgaaacacctttggggtgatttgatccacgttccatggaccaagtccgggtagcagcctttccaactctcgaatcacattgtccaggctaatactcccctccaccacttgtattattgccaacctgttctcattgctacccttagtgagcttcttgttggaggggatgtgaaagaaaccgccatttttatggcaaaaccagctgggatagcatgcaccttaggagcgttaaacaccggacatttcagcttgatatggtgtcagtaccacatacttcgcagaataactccgctgtacactcgctcatcacgtggcctttcccgtaacacctatggcagtaccccttgctattcagcttgccctcctccttggtaccttccttctccttgttcacagtaatcttcttctcttcctttgctgacgctgaaggaaggagtggtccagcatttgcactcgcctgcttgtgatcggcggccctgggctccccaacagccttctcagcattcataccttgcaaagcagtgagtgcctgctggagaatcgttgccagtcccgcctggtcgctaacaccagccggcacgatcgtaccactcgacgaaccgtgcccagccgtgttccctgttggcggctggggaaagcaggaaccgccaccatctgtctgcggtctctc

SEQ ID NO: 24959 - DNA, 386 bp, Zea Mays
ggaattgatttgcctcccaatcgacacactcggagaatatatagacaaccccagccacaacctgcagagatggatcctcctaatcctccaccaggcggagttgacccactggttgctgctcagatggcggtgatgcagcaaatggcggacactatggctgatatgcgtgcccagatgcagcaagaacgccaggagatgcgtcgggaaagagaagatatacggcaggagttgcgccaggagcgagatgagatacgccaggaaaggagggcgcaacaacaacagcaatagcagcaacaagtgccactgcctccaccaccaccaccagttccaccccgagacaagcatagagagtttatgagtcataagccacctacattcgctagctc

SEQ ID NO: 24960 - DNA, 310 bp, Zea Mays
cggtgatgatgtggtggatgctggtttggaggatgttgtggaaggtgggagtggggtgaaaacgactaggtatgtaatggaggtggtggaggaagatgatgatgaagaggtggtggtgcttcctttggttcgacgcgaatgacgctccaaggctcggagtaatacttcgattcctcctgccttagcaaggatggttgaaatataggatttgtctatgtcggttgttgatggtatacttgaagaggccattcctgaggagctagaacttgagttactagaaatctactttactaatgttcgcatagatcgc

SEQ ID NO: 24961 - DNA, 296 bp, Zea Mays
gagcttctaaatcaatgattctatctctgcccacatttgtaccaatcagattgaagaagtgatcaactgctgtagccttctcatcatgcccagttaaggtgacatccctttccctcaatgaggtcacaacattcttcctttttcagtgtctggcatgcaaatggaaaagcttagagtttgcatctccatccttgagccacgaaattctcgatctcagcctggccatggtccttttcaaggaagatagtagaagggtatgcttttttaacttattctttaaccagatttcattcatg

SEQ ID NO: 24962 - DNA, 370 bp, Zea Mays
tggaggtgtgattgtctcgctagttggtgagggcaatcccaagctgagcagcatggtcaacttggtcaccgtgctgaacagagttggaccacgcccttgacgagttgggcaaggttcgggcggaggttgcggaattgtgtgctgaatgcgcggcacgccactatcttgatggtggttctcccgcccctgttgggattcagcacccttaccgttcaccgccccgtggtcgcttcgactatggtaccccagactgcaggacccgcatagacatagatccatagatcgatggagtcggagtctgtaataatgcttagttcagtgtctcagtctagtcagtctagttagagttagtttgcttattttatgttgg

SEQ ID NO: 24963 - DNA, 297 bp, Zea Mays
caaggtttctgctttgtgtcgccatagtttaccatggccttttaagttcatctcgagcatgcccagactgagtgggtgctcgacatggtatacagcctgcttggatgggatgcgccggcgttcggcgaaaggatttgcgccggcaccctccaccccggtgaacttgccgctggagagttcgtgccttttgtcctccccagcgggttggtgctgtcggtcttgtctttcctctgctggaggtgcgcggccttgtgggagcggcgctcttccaccggtgcttggcttcaaggatgttca

SEQ ID NO: 24964 - DNA, 989 bp, Zea Mays
cgcacggggaggcgcggtgaacgaacctgcaggggaaggggggcgacagtgggggacacaggggcgggatcgaggaacacgtctagctcggtgagagaggcagtggaagaagaggaaaagaggaaatccaactcgtcgaagatgacgtgacgagagatgaggactctatgtgaggtgaggtcgaggcatcggtaccccttatggtcgggggagtacacgaggaagacacagggagtggagcggggtgctaacttatgaggagtggtggaggcgagattagggtagcaagcgcactcgaagacacgaagatgatcgtaggaggggtggatgtcgaagagagcgaagtaaggagtggggtgagcaaccgccttggtgggcagacggttgaggaggtaggtggcagtggtgagggcctcagcctagtagtgagcaggaagggaggcctgaaagagcagagagcgcatgacatcgttcgccgtgcgaatcatgcgttcagccctaccgttctgaggagacgtgtaggggcatgacataaggaggtggacaccgcgagagagaaaaaaagtcacgggacacattgttatagaactcatgcccgttgtcacactggatactccggatggtgtgaccgaactgagtggagacccaagcgaagaagtgagacagggtgggaaaggtgtctgacttctgacgtaagggaaaattccacaaatcgtgcgagaagtcatcgagaacgagtaaataatacttatagccagaaatgctgattacaggggatgtccatacatcacagtgtataagatcaaaagtgccttctgccctagaggaggaggtggggaacgggagcctaacatggcgacctaactgacaagcatgacagaggtgctcaaaagatcccctacaaccagaaatagaggtactactggagagcttggacatcacatcacgcccggggtggccgagacgacgatgccaagccacagaggagg

SEQ ID NO: 24965 - DNA, 326 bp, Zea Mays
tttactaggcagaatacaagggatttggctttaactttcagtccagaactgcaacaagtcgaaaccttaggactctctactatcacatccacccctcaacaggaccagaacaactctagtgatcaaggcaagtgattgtatgtaatttgtgcaatgcaatctattttcattttgttttcatacaatgattagttacatactctggtaatcggtgaacataataacgagtgtggctcaaaactggagataacttttccatttttaacaaaccattaagcatcacactttgcaattttagagaagcttcttaaccagatactacctaa

SEQ ID NO: 24966 - DNA, 353 bp, Zea Mays
tgatgaagctcccctgcttggctactcctttaccaggtccaaccatcgcgctaaccccactcttgctaggttggaccatgccttcctcaacacccagatgttagcctattttccctccatctccttgaacgctctaccacgccccacatcggatcataaacccatcttagtcgtcatctccacattaatccccaaaacaaaaaaataccgcttcaaaaatgcatggctcctcaaccacgccttcctccctactatgatcccaacttggcatccccctgtccagcttgacgttgctgccacattggttgcacgccttaaaatcctcaaacgttcctacaagcgttgggaccaac

SEQ ID NO: 24967 - DNA, 289 bp, Zea Mays
ccaccttgctgcatgtaggttaaggacatttattttgtgcttgttgctattatggttggggacctctgtttgtatgtgaaaactgaaagcacaagttggagttggattacaaaataaatgatgaaaacattgaaccttaccaaaatccatgtcaggatacttattcggcatgactcttgcaattagctgtttataaatttgattcctgaatgagtgtcaacatttgtggtttaaactcagttcctccctcccacagtttaaatagtcattatagaaggattacaacaag

SEQ ID NO: 24968 - DNA, 449 bp, Zea Mays
gggagccaccgatgtcgagcttggttcagcaggcgatggcgtgagcctcgtggatggctcgcgttccatgggcagtggagtggaccctggtgtgcgctgctctggggacgccacctcctaggcctgtgtctcgacacgaggacgacgcagctcgtagtcgtctacgactgtgaaggagtcctcattgacggcgggtgcgtcgtctccccagtcccaccgcgcgccttcatcgaagacagcatcacgggagacatgcacgcgcttagtggtggggtcgtagaagtggtacgcctttgacccatcctcgtagccgaggaagatcaccttctggccacgatcatccagcttgctgaggtgcgggcgcaggcgcttgacgtaggctatgcatccgaacaccttgaggaagtgcacagatggcgtcttcccatacaacgcctggtacggggtca

SEQ ID NO: 24969 - DNA, 338 bp, Zea Mays
caaaattttgaggtgaactgtgtccccctgtctgacactatcttccgtggaataccatggagtctgactacctctttaagatatatccgggcaagggtggctcctccgaaggtagtgttcactgggatgaaatgggctaccttggtaagacggtcgattatcacccagatagaatcgttccctttttgggtctgaggcagtccgattacaaaatccatgcctatttcttcccacttccattcgggtactggaaggggttgcagtagacttgcaggcttctgatgctctgccttagttcgctggcaaatgtcgcaccgggccacatactgtgctatctc

SEQ ID NO: 24970 - DNA, 291 bp, Zea Mays
tgttcaaccaaatcatttagtagttgtgtatacatcgatgtgtccgtcatctcgttgtccatttgaatcctagctgctaggctcggggttgtattgtagtagatcgacgggccgactgtagaatcaactgtctcatgtgtctcgtctaaatcggcatcacgctcgtcatcgatgatcatattgtgcaaaatgacacatgcacgcatgatcaaaccaagagtacgtttagagtaagaacgtccaggaactgctataatgttgacccgagatttcaacactccaaaagcgcac

SEQ ID NO: 24971 - DNA, 290 bp, Zea Mays
gcgatctcgagccgttggatcaagcacacacgctccagattaaattgcgactcaagtgaaccggtaccatgttatagccgtcggatgatcgatccacggctcacgttgaaccgaaccctgcttcctaatctgggtcacctatttctcattcaacggccgataaccaacttctattatcagccgctcatctagatctaacggcgcaacgcgtttcttcaacctctcggttctctctcgctcctatttctttcctcagccattccgccgcggccgagcgccatagacgcggc

SEQ ID NO: 24972 - DNA, 363 bp, Zea Mays
gttagggtatcatgtaagccatccttttcctagttccacatcacgacctgtcaaaaactttgatttactatattatgatatttcaaaaccctcccattgctagtgagtcagggtacaaatattatcttgttattcttaatgatttctctcattttgatggatgttctctcttcgtttcaagtctaaaacattttctaccatgccacaattttttgcttatgttgtcatgtggtttacatgcactaccaaatctatccaatgtgacaatggttgtgagttcgataatgccacatcccaatacttctttgtcactaatggtgtagttcttcatatgtcataccgatacacttattcctaaaatgg

SEQ ID NO: 24973 - DNA, 539 bp, Zea Mays
atccttggggtactttcttgctggttacggccgagccatgggcgcagagactaccatgtctggatggcgaatccttcgtcttcgaggatttgttcctcgccggtcttcgctttccgtgccacaatttcggggtcgagatccttgataactacaaggtttagatcattagttgaccctgaacacggtggtgactttgagtaagtttgtgtgggccacgactacttttggcagaggcctatatgttgaggtgttcgcaaagcattattatttgcattggcagaagaggactaccagagggttggttgaccggtttgggagttgcatttttacctcgaagacgaggaagattaaagagagggttgttgagctatccccctttttcaaaaacaagtgaggaaggtggatagatcattggttttatgtgcgctgcctagaaggcgaagactagcctcgaccgaacgcgatgtctccatttgagtttgagaccttcccttgctttgctgttgctgagaaggatcattgtgatcgtgccttcggct

SEQ ID NO: 24974 - DNA, 371 bp, Zea Mays
ggggcatccgaggacgtgatgaccgcatacttacccattgtcctcgggcaagacgcgctacaatggctgcgacatctaccccgacactgcatcgacgactggagcgacttcagtcgatgcttcaccgccaactttcagtccctctccgacaaaccagcgcaaccgtgggacctcaaatccatcaagcgccggggggacgaaactcttcggtcatacctcaaaaggttccagaccatgagaaatcgtatccccgaggtcacggaggcggccgtgatcgaggacttctacagaggatccaacgactctgccttcgtccgagccatattgcagaaggcgccgactacctccaagcagctgttccaggaagccga

SEQ ID NO: 24975 - DNA, 568 bp, Zea Mays
aggtgttatatgcattgggtcacctcagtggccccactattgattggtgggatgcatattgagccacacatgctgccgttaacaccatcacatggcataattttcaaccatcttctgaagttatcacattcctaccaggctgatgaagactaagaaggaatttctttcactcaaacaaggagggatgtcagtgaacgagtacagggacaagttcatcaagttgtccaagtatgctccaaaagaggttgtagatgatgagaagtagcaggaactatatatttctagagagactgattgggccactgcagtactagcttatgtctaactcattcccatctttccaaagacttctgaacaaggccatacctctttatcacaaacatgttcagttaggaaagatgaagtggaaggccatcacccagtaacaagcaagcaaaagtagtcgccctcactacactcaacctcaaggtagcccaatttgttcaggagggaagcagccatatcaacaccctatttagcagtcaccacaggccacacctcagacaccacgccctcgtcaggctgccct

SEQ ID NO: 24976 - DNA, 433 bp, Zea Mays
gggtgacctgaaggagcccgagaagccgtcgcagggtattcttgttcctactagcagcaggggagttgaaattcgtgggcgcgcggttggagctctcgggcatcgcgcaatcgccaactcattgtacccgaaggcgtcaacgacggagtcgaagtcggtggctggcgtgagcgacgttgccaggtgggtgttttcttttacctatcccacccagatttggcaggagtagcgaggtttgggaggaggacataccgggatcgaggcgtagaggtggcgctccggcggtgaccagggcaccaaggggcgggggaagacgaaggcgcaacaaccggatgcggaggaagaacggagacgcgagagatggacaaatgagtgcgcgacgacgcggatgaggcggggatgctgctcagccagatcgagaaccccgtccggc

SEQ ID NO: 24977 - DNA, 500 bp, Zea Mays
caccaaatgttgggactggggatagtgggcccaagcactcgcgagcgaaagtgacagatagcacggcaaaacagatggcggagagctcaaatgtcttgtcatgtgtgtcccatccagctacaggtcgggtgtaattatagggtaattgggggcaggtaggcctaagtacggttatgcctgctagcctaagcacaccaagtattctaccctcctcagaggtttacaagtgggaccaccatcgcccggtcggaggtgggccctttgcaggaggcctggacttcgcttacaaggacacgtccttctaggcgaagcaccaaagtcgtttgacttcccaccgggagttagtgcaaggtcttcggttgccaccggtcggggaacttcgcttgttgacgcacattcgtccgcccgtatcctcaccgtagggcttcgcttctgtgatgcgttgtcttcgttgaattagctgcttgggtccctgcccgtgcgatctgagccccctagtt

SEQ ID NO: 24978 - DNA, 275 bp, Zea Mays
aatgcggtaatccaatcagcacggtaccagcagactctaaggcgctatcacgacaaggccgtacgacagcgttccttctcagtaggagacctcgtcctccgtcgaattctaacgggggagggacggcacaagttatcacccttatgggaaggacccttcgtagtagcagaagtcactcggccaggatcatatcgtctcactcaaatggacggcacagaagtcgggaactcctggaatatagaacacctcaggaaattttatccctagctgtattt

SEQ ID NO: 24979 - DNA, 522 bp, Zea Mays
atatcaaggtactcagcctttctaccgcgatggagttcaaggttggctccaccaaccactccatgttcccccattcctggtttgcaatggtacaagtacttccacaatccaaaatgcgggctaatctcgaggtaggcctcacagagatgaacaaagatagcaatttgaagaatagagttgggattcagattagtcaaattgagagagtaaaaattaaaaaggtcgcggaaaaatggagaaacaagtaaacctaggccccgaatcaagaaaggaacaaagactacagattcatgagtatcctccataagtacggtgatcccttgccaaacccgccaagagcacaagtccttcgatggaagaacaccaatctcaactaagtgaagcaagtcggattcggagacaactgaggcataattaccatagaaggaagctgattgttgtgattgattgggggaatgatgggtgcagcgctcccctacttcttcttcctgggcaccatgggacttcactaaggcacgaaat

SEQ ID NO: 24980 - DNA, 411 bp, Zea Mays
ccggcaacaccctcgggggctgggcaaccgctggcaccatccttgaggactgggttctccgcaacagccacctctaaggctgaaggactttcagtcacctccatgggaattgaacaaccttgaccaacctcttggctccgaagaccgccttctaaggtcgacgaggcacgagacgctgctcgggataactctaatcccacatctggaatgtcagaacaaatgtccatcatatcaccatcagttggctcggacagcatatcttcaggaacgacattctcgagagcctgatcaaaatttgctatggataattcttgcaaaccaacaagagcagacaaagctagagaaggaatatcgctactccccccactgactctgtaacgccgactgttctttcgaattaaggggacttcc

SEQ ID NO: 24981 - DNA, 356 bp, Zea Mays
gaacaagattgtagatacagcgtatctcgccgccggtgattcacggtggcactgcgattcgcgcccagtaatgcatggataacgacccctggtgaaaagatctcgccgtggatgaactcggagcattgtggccgctctgtcgcccatccacatgccggcgatgtggctgagcggccgtcgccgggatgtacaccattcactgcgattgtgccacgccgtgaccatttcaccacgtcattaccagccgtaatagctcaccagtgaccgccatagctccttagcctgtgactgccacgatagttcacgtcagggaccttctcctttcttcggccgccagcgcaccttctccaaattgg

SEQ ID NO: 24982 - DNA, 455 bp, Zea Mays
tgattaactactttcatattttcttaaagttgtgttatggtttcaattttagtccataccaaagttctggatagttataaaacatttttgtctgatttatctgatgactaaaacttctgtttgtgtttctggtatggaaggggcatatcttgtacatgtgtatgaaaactgatatttgacatacgcatgcaggagactggttcatagcctgtagaaatattttttgtaatttttgggtagcatctagcatgagttagcttactcgagttttactgtgaatttattattgagttgtgttctttggtttttattctagctttgcacccgcacgtgtcctctttgtgtgttttttagttagctgagggcttgtttggctacccctgtgtctatctcaatacacgtgcattgagatggatttgggtggaatttaaacttacacttcaatgcacaccaac

SEQ ID NO: 24983 - DNA, 546 bp, Zea Mays
ctcaaaaaggtctaactccccgcccagcgcgtgtcctgcaacgtgggagggtccggcttccgcctcagcagggtgcgcaggtgcactacggtgtaattgcgaatacagtacatggacttcctcatgtaacgtattgcaatagacctgcaggtcgtcgacagttgagctaagttccttgattcaggcctgagcccttgcttccttagcacatgccagcaaacgggactatactgcccagtcaagagctaagtcccgatcagcaagctgatcccgcaggtgacggatgtctcttcttagttcatttattctatctccgtccgcaacccaagcgttggtcctatgttgcagctctgcttgaagtcgacttactcgggcttcaagatctcctattgggtcattactcccgctgctactgttctcatgtcgaggggccagttgatgtcggggcacaccgattggtccagttgacttgcgcgtcgttagccttgtgcgtggcggcatctttctaagggggaaaatgttattagtataattcttagcatgata

SEQ ID NO: 24984 - DNA, 429 bp, Zea Mays
tgtctcctccactggcgggggtgggtgaattcatctgcggaagggtatcaaaggtaaagattatggtggaaggaagaaaataaaagagcctggatggttttaaaaggaagcgggttagctcagtttttaattccttttagtttttataatgcatgcatgctgaaatcaacgtctcctctccaaataaaataaaagggggggctcctagggcacccttcaaaagctaaggattggcccacagggcctacatggccacctatttctccctctattcctaaggccttttgtcctaggtctagcggtctagtcctaacgattcttatcagtttctaagcaagttttagattttgaaaattggtattcatggtctattgtccttctctgtggtggtatttgctccgataccagctgtggcagaactgcccgaat

SEQ ID NO: 24985 - DNA, 341 bp, Zea Mays
tgctcacaattcacgtaggagacagggtggtgctttcagatgcaatgcagtgcgaactaacccttgatggcagggaagggatggctggtaggaagcaggagctcgctctggtgcctcacaggcaggcactagcattttgtcctactcaccagtcaccacaaggggtcattagtttattgctcccctctgattctgttgttccttgaggcccctacaccatcacaaccctttgcagttctatatttggagggcagcacatctcgtgcctatccctaagttcaactgtggcagatcagaatataggtggatgatgctaatattccatgattccatttcagcag

SEQ ID NO: 24986 - DNA, 403 bp, Zea Mays
ccacaatcacgtttaggttagttggagacacaccagacggtatgctgtgaggcgaaggggctcaagacggtatattgtgaggcgcagggtctcaagaacagaatgttggaagtgctgtcgctccagctcatggctaacgtggggcgaggtgcataaggcttgcacgacggcggttgggaacgcatgcgagcgaggatggcaggcacgataaggttggtgcatgcgtcgaatgcgggctgccgatggtggagggcacgataaggctgttgggtgagcgtaaaatgcgtagacaacaggcagacgaggatggcggtcacgacatgcacgaatgcggttggagcagacgcggcaagaacagagcacgacatggatttcgggaggccatggttggagtgcctgtggg

SEQ ID NO: 24987 - DNA, 405 bp, Zea Mays
gagatattgttatgcagtatctcaacaaattcaatcatttgtccagtacgcaattgaccaggtcaatactgacctaagaaagaggaattgttttatgagaggcctcaatgaccggctacaacgaaagatggccacctgcctcgatctctcctacaacagggctgtcagcacagcactggcagttgaagctaagtatgcaggtccaggcaaatcaaagggaattggaggtgacaggtccaaccaagggcctgaaaagcgacaaaggttggtaatccgacctttcaatcaaaaccgttcttcacctcgtccaccctcctaccccttcaaacaacctatattcatccgccctaccacttcccccacttcaacaactcagccgagtgcccctggtactcgattccccgc

SEQ ID NO: 24988 - DNA, 308 bp, Zea Mays
gttggatgcaccgtgcacgcacgcccacaaaacgttgcggcatgagcctgcctggcttggccgccctttcctaccaaactactcctactctttcttccctcgctcccatctcgcaagatccgcagccccacatgggggtaccttgtcgccgtcccctcccctcccttccctgcactgcactgcaccgtatggtatggcatggtatggatggatgctttggttaattctactggcctcaatcattggcctccaatgcaaggccaatcaataataatgaatcgaagttgtttccttttggcctggtggcg

SEQ ID NO: 24989 - DNA, 415 bp, Zea Mays
cacgaacgcttcctcctcctcgctgtcgtcgtcatatattaacccgcaacttctcatatcgcctccctcaccctagatcttccgcaccaccatagatgacatcgacctccccctgttgacccagcatctcaaaccgctgccgcaactctcctccgctcgtcgtacgcctctataggcattagggcaagaacaaccaagggagcaaccaaccatgcaaccaccagtccatccaccatgagtgcttcctcctcgtcgctatgtgcctctataggctgcagggcaagaacagccgagagagcaaccaaccatgcaactatcacaagcacttcctcctcctcgttgttgccatcgtatattaacctataacttccatctctttcgcatcttcgcctctctcacctaaattctttccgca

SEQ ID NO: 24990 - DNA, 357 bp, Zea Mays
gccactggcgccgtcgtgccgaggtacgcccactgaccaggtgattggttgaccatctctattgctcttcctcctctccaattatacgttggaagtccgtcagccgccagtgtcgtcgcgccgaggtacccctcgaccctggtgattgattgggcgtcgctactgctcctcctcctctccgtttctacccaaggggagcgaggagacaaacgtgtggcctaccccagcgaggcggtggggatccagtcctccatcccttcaatttggccttctctatctgggtccctctctatttagccacccgttcggcacacgctgctacaagctcttcgtgaccagtaaaaaatagtgacatca

SEQ ID NO: 24991 - DNA, 618 bp, Zea Mays
cagcaaccgccagttgcgcgaccgatgcctccagatgccccacgcgatcctcagcggaagccatgggaagggatgcaccagaaccgcctgaatccgataccagttgatatgggtgttcccgttgataggaacgagttccaggccgcagcccagatcgagtaggctggggcggcaccgggatagctcgccggcgacctatggtagcgattgacggaaccaccggccgtttatcgtcggcgacgcctgagactggaatttgtggaacaagaatgtcccttttctcttctgcctttctcccttttatttccccacaatctctttcctaaacatagaaactatagagccgtgtaatgctcaataaggtaactaatgctaccattacaaaaagggactatttgctaccaaataatcacagccaatcaactcagtgtttcctaaaataaactctatgcggctgggccatatcaatatctcatgcgtctaagggactaaatataagggtcagaaggcgaatgagctggacaatactgggttgaagctttggtacatagggataactgtagatagaaatggagtaggaatttgattgataagagtgtctagaatggtgtggtggag

SEQ ID NO: 24992 - DNA, 399 bp, Zea Mays
gatgcctctagtggcaacctctccctctcaagcgctcggtggcgcttctcaagagcgtcgtgggccaccctcttctcacgggcacgcttcttctccacgtctttcttcttatgtttctactctgcagccaaccagtacgttgcttggctagccgcgtcttccgggaccaggggcaggatgattcagtacccccgtagcccctacgaatgaacaaaaagacaggttgagatgaagaaataagggtgaagatataagcaaggttcaagacttagtgacttgccaaggatacatagcctagcttgggcgcatcgggatgaggacggtgtaattctccttccccaccgtccccttgacccgcttgaggacctcgtcgatggagagggtggccaacgtcatttg

SEQ ID NO: 24993 - DNA, 430 bp, Zea Mays
ggaggatggtggtggtaatgagaggcagaaggcctcaggtcaccatgaatgggtcccggactcggatagggaggaggaggaaagtgacagggccgagcagcctcaggtcaccgggagtgggtccctgacccgggtagggaggaggagaagccgaagtatagaaggagtcatcatactcttcggcctcatcctcaagagtaacgaatggcacaccatactcctgttggtgccactcgttgaggttctcggggtaggtgggggttagaggtggaggacaaacccaggaggcagggatgacctgtggaggcggcataacgacgaaagtcctcatgcaacgccatagtctgtcgcctgtgcacggactcctcgatcgtccggctgcggcacatggtgaatacgctagcgatgcccttggcgagacgcacaaaca

SEQ ID NO: 24994 - DNA, 425 bp, Zea Mays
gccgccggtggtcccgcactcggattcacgccggtattgcgattcgcgccctgtaactcgcagataacaattcccagagcaaagatctcaccgtggatatggttggggtactgtggccggcctgtcaccgtacccacttgcgtcgcgatgtggccgcacgaccatcgccacgatgatcgtcgttcatcggtgtccgccacattactagccatgctaccaccccgctgtaggtcactaaatccagcttcgttgtcaccggagacttagcccagtaaatgccacgttgagcggcctccggtgactcctctcgtttcttacgatagccatccgccgctcaaattcgtcgtactcacggtcgatctctataaattgatgcctcagtgagctccgttagattatcaccaagccagagcacccaccctcgc

SEQ ID NO: 24995 - DNA, 390 bp, Zea Mays
aaattgagatgcgtccgagctttgcctgcaaccccactaacttccctcactcatcctatcgaccagggctctacattcatgggcacggactccttccccaagctcgatcttctccacattaggactggtcaatcggttaactggtttagtttttcggttttattaaagttcgatttctagagaatgggaaccaaaattctatttgaaaatgggaaccgaaccttcagttaaccatatagttcggttctttttcggtttttggtttaacccaaaaacccgaattcgttataggctgggggctaacatacaagcatgagttcctcaaccactaggatgagagtcaccagatgctcactagtaattttcacgtcgatctgttcggtgctcgaa

SEQ ID NO: 24996 - DNA, 384 bp, Zea Mays
aaagacttgggtgagcttcattatttccttggtattgaggtatcacatatgaaagatggcattcttttgtcacaaggaaaatacagtaatgatatacttagaaggacagggatgttgaattgcaaactgtgcagtactccaatgacaaccatagaaaagctatcagcttatgcagggaatccccttagtggtgatgatgtgaccaggtataggagtgtggtaggagcattgcagtatctcactcttacaagaccagatatttcatttgctgttaacaaagtttgtcagtttcttcatgcgcccactactgatcattggactgcagccaaaagaatactgagatatatcaagcacaccttgcatatgggcttgaaaataactaag

SEQ ID NO: 24997 - DNA, 832 bp, Zea Mays
ggtcagcacgaactccagttccctgggctatacaaaccgggcatcgtgcttcctctgcgcctcccctcttcatcgctgctcctctacattttcccaaccgcgcaaaccttcaagccgccataccgccgagcgcgcatatcgaaaataccccgcgaccgtagccattaatcgaccctaggtgcttcggttagtctactgttggcgtttccgagctctctgcggggaattgggggctggcgtccaacgaattcgtcaacgacattgaggtgccgccatgaccgtgctcgctgccgtggacagggcgttcagcacatcgaattaaggtattaacgctgcccttgcattcgctaactcatggggatagagtagaagcagggaatttggttacggggcctcaaatcgggcgcgcgctgtgctccggcgatggtccgccatgtgccctgggcggcgccaccgtagctcgacgtgggtattgggggaggcacctgggtcgttgatgcggaggcggatggctaggattagaagccaggtgaacggctcggctaggactcggtgaccgttgatctggggcttcaatggataggattgaatttggggtatttagatctaggccgccgatgggtgatccagcggctgcgatctagtacccgttcacgatggcgccgatctaatctgcgccacaggtataggatcggacggctctagttaccagataccccttcggcctgcaaatctttctaaagagcccccgaagtatttagatatcaacccgcagtccgcggtacagaattctgagtcttaggaattcttctgaaataacccctgacttctc

SEQ ID NO: 24998 - DNA, 866 bp, Zea Mays
cgcaggtcttggcggccgtgggttccgccatgggcaaggtgctgtgcctggtcgtgcgggctttcagcaggcacacaggcaaggatttgatgctaggcggggaagctttaaccagttcggccgtggtatgaatcatttctccaattccagggttgtccgtggatctagtgctttcagggggagaggggctggtgtgttcaatcgatttggaggtcaggaaccaaggtgtgggcagcgtgcaggttctcaggtgaatttttcaagggcggaagcggcctcttcttctgcagcagtgccgccgtcggctgaggctctggctcaggccgtggccttgattaacgaggcgttttcgaagcagacaccttctgtttcaggtgtgtctctccctgcagttgtgcagcaggttttcgactcaggggataagttggtgggggatgcgcgagaggaaactgtgctgccagggaagaatagtgaacaggaggatgtggtggtccggggtgcagcacagggtaagaccaaggaaggaaagcctccgtattgctggagatgtctgacaaagggtcatgtaatgcagggttgtactatagagctgtggtgtgatatatgcaattgtgatgcccataacactgagagatgccatcagtttagaggggtaaaaccaaatgttttgacttgtgggtatgcagtcgatgggctcggtttttttcacatcccttacactccttcgcagaagcatagaggggattcaaaaaatgctataattaaggtttcagggggtgctctgtccacagcacaggtgtcatcagaacttgagcgtctggtgccggttaggtggaaatgggaggtggagtctgttggtaccaatg

SEQ ID NO: 24999 - DNA, 507 bp, Zea Mays
cttgtcgacaaccttgttatatttcagaggttatttgtttgacatccatccatccatcttctctccaaatttaggtcggatgtacgagctctatcgacgttatagttgtgcctccgcgagtccgagctgacccagcagcgagtcaggtaccagcagtagagttgtttgttttgtcgtcccatactgaaaatttatcatctatgcacatctcttgcctgatcccccttttgccttctgtatcgtggttcagaatccagcagttgttgccaggaggatggttctgaagtcaccacgcctaaggatcaaaaggcctgtcgtagtggcacagctgatgaagggcagccaccgcaagcggcccgcagccaggaaaacaagaactggggacaaggcttcgagtagcacccgccagggaacgccgaatgacagcaatatcacgggtgaggtagatattggagatcttatcgacttccttcgggaggagtacggatgtcgaggaacgtcgacaag

SEQ ID NO: 25000 - DNA, 523 bp, Zea Mays
gcaccagcgatctcccctcatccatccgctgccatgccatgatggttatgctcggggcagaccaccgccgctagggaaggggaggcgagaagtagagaaatcaccgccgcgccatgtgatggacatattgaggtgtgtggaggtccgccgccagcgggtttcgtgcgtgtgctgccgttgggtctacgccgtggaccttggtgttcgccttagcattgggaccatgtccaaggtggcggactagcacattatgactcaacgtcgcagtaatttcacgtcgccgttcgtgtatcacggccatgccacccttcaccgtggtcaagtagctctgcgccctaatgtctggtaagtaatccgtaacagtgttcgccataattctctcctcctatttctggtatctacgtgtggatttggggcttgtgcgccatctggtgggattcgccagagttccagccgtgcatagtagctggcgtcgccgccctgctgtttggggaagaagagagggttgggggaaattcgtgcg

SEQ ID NO: 25001 - DNA, 300 bp, Zea Mays
aaccgacggtccttcttctatgtcttgaggctgttgcacctcgcttatcttcaggagcacgttgaacgcgaagcatgttcccctttccccgggctctttgtccttgatgctaatctctcctcccatcagacgtacctgtgatcaagatcaacatagatcatcgaaaaaatgaacatgagatacatatatgtacatactcataatacatatatttgagtggtaacttacaaaggattgcacgattccgagccccaagcccgtgccgccttggccattgttcacctgaacatagttttcgaa

SEQ ID NO: 25002 - DNA, 438 bp, Zea Mays
tgtattgcccagctcctcacgtggaaccgacctgaatacacgtagcacctcttacatttctgtccccacttcgtgtaaatggattaccccggaggtgctacgtttggaatagcaaggattataagctggcacaggcgggggtgtcacattcaccccctttaagggccgacagcctcaccggctcactacatacgcagcagatgaccaggactacccagaggtgctacatttggaacaacaaggattataagtcggccctcaccctcctaaacttccaaggtagtgacacctttaaacccaccaaccacaaccacacgtgtggtgtgtcaactttacaattattacatgctactagcgggctagggtgttacgttcaccccatttaagggtcagcgccctcagcaggtcactacatatgtcgcagatgaccagcaccac

SEQ ID NO: 25003 - DNA, 746 bp, Zea Mays
ctgagatctgggtcatgcaaattggtctgtcagacgctctgatagtacagtaaactgaataagatctcaggttcagcccccctcaccgccagtgatctcacacccggattcgcgccggcatcgcgattcacgcctagttaaacgcagataacaatccttgggtgaaaatctggcgctgaggatgagcttgggacactgtttcgccctggtcgccgtacccactcgccttatggccggtccagataacctcgccggagttggccgcctgccactcaggtgccacgtgcctaggtgctctaccacatcgcagtgaattgccttagcatgtccgttcatcgccggtggtcatgccacggtgaaagccacaaatcacttgcgccagtgacctcccttctctccggccgccagtgtgcctttccaaaattgggtgccaccgcccttggacactataaattggtgccccagcctgctccgctaagtaattgtgcacccagtgaaccagccctcacctccaatcgtccctcacagctccccaatttgggatttcccccaattctattctctgcgccgccgtgagtgagctcaccatggccagctttctgcaggtccgttcacaccctcctcgctcttgtttcagcactcttgtgttctcttgatgcttctcgacccagccaattgagctagaacacgtaggatcaccgggaacaccttgaattgtcctcgattggcgccatcaccgtgaacag

SEQ ID NO: 25004 - DNA, 318 bp, Zea Mays
ggcgggcgcaccgccgtgggtgtgcctgtatccgccgctcggtccgctagaggaagaagatggatgttgatcattcgattgtagttgggcgatggagataggatcccatagtaatagaactcgggccttcggattgaaaacaagcggtagcgattaaatctggcgcgtaccggtctggtctgatctggtgcgttggatcttgatcgtacgactctcatccgcccataccccttcggctgtagaactttcttaaagagcccctaccatttcttaatttaacccgcagtccaccgaccttattcactgagtctagaaaat

SEQ ID NO: 25005 - DNA, 1394 bp, Zea Mays
cgggaaaggctcaagaaaagggcaagctgagcatagcaaacctgcatcgtcttgccaagacccatgtcatcccctaggattcctcctgttcccctgcagtgcagaacccagagccatcggaggccctcgcgctggtgggcgaaaagcatcttgaatatctttcctgggagcttgtatggcttggatgttgcagcagttccagttggatccatcttgaagtcctctgtcttctcccatccaacatcctcagcattgttctccacagctccaaggttctccttctcctgacccagctcatcgtcgctgacaccatggttcctgaatgttggggtgttgggtggtctccttgtgaatcccttgcttcttagctgcttaacagcataatctgttcttgttccttggtcctcctcgcagtcgtcataatcagaatcggaataagaatcaacaaaggatgaggcctttgataccctatttagcctcccaacatccttggtggtccctttgttcttccccttgccacggacgtcatcacaggcataatgggtacaggctgaggagactaaatcagtttcgatcttgacctcggagcgtctggtgggagccctagcttcatcagagctagaaatttgaaggggtgaggaggcaccggcgtgagcatccacatcatctgggctatggtcatctaggtcgtcgtccacggtgatggcgcacggcaaaggggtgagctgttgtgtcctggacctcgcggcggtgctgggcttctggacggatagagagtcaaatcgtgtggtgaggtcgtctaggatgtcgagtatgctttcaccgtcgtcctggttgtcccactccgcctcctcttcatccactcgctgagtggcggtggtggtggtggcaagcttgcataggcggcggcggccggcgagcttgaccttctcgacttgttcttcggcggcggcttttgcaaaggaagaaattagaaccattaagtagattgaagggcgaggaaaaacaatgaagcaagaagagacgggcgtacagtacctgggggcggaggcggtggcggattggggctagggttagggttttgggtggggcgctggaggctgcgggtgaagcggaggaggtggtcgttgaggccgttcggcgtaggggcggcggcagggagatggcgatccttggggacggcggtgacgggttcatcgatgtcgtcgtcgtcgagatcgccgcagaggtcgaagggagggggagacgccatctagccgcggagacgcccaagaggcaagaggcaaggggacggaatcgaatcgaggatgcgcagtggggatgggtgctcttcctcgtcggttcacacctctctcacttgccgaggagaggaaggagaggcagcagcgagcgtg

SEQ ID NO: 25006 - DNA, 295 bp, Zea Mays
gtcaccgtacccacttgcaccgacaacgtggtcgtgcgaccaccaccgtcgtgccaccattttccccggtcacaacacgccttaagccctttcaccacgtcgtcatgggccatggagaataagcagtaactgtcgtaaactgttgcccagtaaatgccacgataaacgactctggtgactcacctttgctccggccgccagcttacctttcccgaattcggagtcaccgcttgcggactctataaattgatgccccagcctgctccgctaggttgttacgaagccagagcaccag

SEQ ID NO: 25007 - DNA, 651 bp, Zea Mays
cagaaagtcactgctctagtacacaattaacaagaaggaaaattgcatgccatttcatcaacaagaagaaatagtacaaaattgggggggggaggtacttcctccaaaaacaccgcatatacaatgggaaagaaaaatatacaccagctcaaccacatgaactgactcagcccattaatgatttaggatgagcaaagtcactgttttagtaatataccattaccattgaaaggaactggtgagctgcaatatcaacagaaactgctctgtttttaccacttcgtccattaccattgctatttttgtcttctgctttaccacactgtttgatttgaaatacaccctgtaaggtttagctaccacattttctgcgaagtcaggtcaaagtagtagtttcagcccaagcattggccactcgctgcttggtgacgcagcttgtgatttgacagggcgaagacaacctcaacctccatatgccctctgtgattgagtccatttcatgacagaagaataagctaaatgcatcacaccagtcaacaatgtagtaattgtacagaacaaagtattaccccatgtcttcatctgtcactactttttttctcgaacacacgggagaactgttaagaagaaagaaaaaggagtctagacgac

SEQ ID NO: 25008 - DNA, 355 bp, Zea Mays
ttgtctaaggtcattgggacaagaacatctttaggtgggcctaatatcttgggaggttccgtgacatgaagtattctacagcgacaaagacaaacttgaggttaccctgagcggtggagagtggccctactatgtcgaggccctagcgttgtagaagccatgtgtgggagattagttttgtgagctgtgagggtgtcctgcttcaaggagcaaatttctggtaggcttcgcaggatcgcacaatgcgattctccacgcacacgatattcggccagtagaatcctttgcgcatgactttggtggcaagggccctagggccgaagtggcagccgcatgttcctctgtgcatttcgcg

SEQ ID NO: 25009 - DNA, 610 bp, Zea Mays
ttcggcctccgaaggctgaaggttgaaattgacgaagtcgccgaagcatgtcagaaggcatttggtactgttggttcaagagcacatagcatacagagtatggccgcttatagagagctgggaaatgccgaaggagaccatcaccgaatctaatgaaggtgaactagtccggctgaagtacgcattcagatacagagataaatttgatgaaccaaacgatgactggctaaaatgcatcgaagttaccagtgatgaactgcttggatcatactccaaggcggaagacaatgcattatctacagccttcgaaggtcgaggaaaaaagagattgaacagagtttttgacgctattggctttgtctaccccgactaccgttatccactacgaggtcagggaaagaagaggaaaactgctgcttcggccactccggtcgagcctgcgccgaagggcaaaaagttgaaggtccttacccaccggccacgctatattgaaccgaccgtggtgcctgagtttggcgaggagacttcttcagctgctgaaccaaaagagcccattcctcctacgcagaaggctgaagaggcagctacaatgccgaaggaagcttcggtt

SEQ ID NO: 25010 - DNA, 277 bp, Zea Mays
gttgttaatcactagggatgctagtcaccgtatcacttttacatgtataccttctctcttaacattacaatggtagaggataaccataattggagtacatatttggatatggatacaaggtttactgcctttcttggatgtttaggagacaaaattgatgcaaaaataaaattcaattagtactcacaggactactagctgctttgggaattttctggaatatataaaaagaagtgaactcaaaaccattcaactttttatcttagtttcagttgcg

SEQ ID NO: 25011 - DNA, 873 bp, Zea Mays
ccgactcaacacgggtggtgcgacttcgtgccgggacaccatgatcccggtcatactcctcccgacgcctttatctcattttcgtgtcgtcggtcgcgcgaagcgttgatggagctccgcacgtctcgcgggctattgatggcgtgacgtaggtcgtttgctggatgagcgatgggtagaaggtgactagatgtttgagtaagcagccgccggtagccttctacgtctgggttcgcgggaggccgtcagctatctgggccagtacccctctgacttcactcgacgtgttcattgcacaagcaaagtcggggtataggttctgagcgaagagagggttctcccggcgcagccttgcaccttgctcggcttgctctcgttctcagtcctgagcttgtcagcgattgcggcgatgagagtttcacctttctcggtgtactcggtcgtcgggagtttctcccacttctaaagcttcgtcgtgggatacgagctgcgccggatcctattccctagcttcgtgatgtcgccgtatgttccagcgcctgttcctctgtcaccgcgcttcacgctggggaggttcttccccttgcatggtagactcatcgtcggatatgggtgctgactccaatctccccccgatgaagaagatgtcgaggtaaaaaggagccggcgcgatggcgctcttctttccgtcctcctttgagggcgaaggcgttggaaagacgactcgacgtgttctcgtcccctgactcgggatgtttgcttccttttttcgagtgatccgtgtccactcctttgtgggcgaggtggacattggagttctttgggtaggcgagctcccgaccttcggtttgtaaggggtcaccttccctcgag

SEQ ID NO: 25012 - DNA, 785 bp, Zea Mays
cagcgagagcgggttgccgcggtgtgggtgtcggcaggccgtccgctatgcgcccggatcttcccggtgtgtacggctttgggcgtgatttgacttctcgtcgatgtggccgggtcatcgctagggcctcggtaagctttgttcttcctctctttggtattactgaagctagcaagttgccattaccagtcagtagaggcagggtagggcgtgagcgtgagatcttgacaccacgggtgggttccttgcggtggtctgcaccgctgtagatgcatctagcgaggaagataggggttgaagaaggcgccgtagtcggtgcgtgtgtccgggggaagaagaaataaaggaaaccgttaattggtagatgaacgacccagatcagtagacgtattctctctgctagaaatgatcttggccgctaagtattgatcgggcggatgcgtgtgggggcgcaggtgtttaaaagatggaccgttgagattagatctaagggtagatggtggaatcggacttcataaaatataggctgtagatccttgatccgatggttcctatcacttactggtttgtcccgggcgcgatctaatctggaccccagatttcagatcgggtggctcagatcgcccgataccccttcggccatccgttttgcataagaacccctggaatatctgcgaatcaacccgcagtccactcgtttgggctctgagtcctggaatattttgcgcagagccccttatgctttttagttatcgaggcccagtccagagcgtatttaaaataag

SEQ ID NO: 25013 - DNA, 348 bp, Zea Mays
agaaagtgcaggactccactgtattgggatcaaactggtgaaaggcagttgtttgggcctaagattatacaagaagcagaggagcaagttcagcaaataaggaagaatctaagaactgcacaatcaaggcagaaaagctatgctgatactcggagaagacagctagagtttaaagagggtgattatgtctatttgaaggtgtcaccactcaggggtatgagaagattcagagtcaaaggaaagttgtcccctcgctttattggacccttcttaatcttaaagcgagtgggagaggtggcatatcaattggagttaccggatcatcttgcggatgttcatgatgtcttt

SEQ ID NO: 25014 - DNA, 367 bp, Zea Mays
gtgataggctaccacactaaatggttgactgggtggacgaacgagtggttctacgtgaaagatgacgagaagaaaagggagaaacttatgagcatggtgatgagtccgttgagattgaacttcgggatgactcagcccttgtgcaatatgcagttggggtctccttgccagttggccaaagtggagttcagggtcgtggctgagcatatcagcactagagacttagtgcaagaatacctggtgaacaggacatttccgacctctggcagttggggaatgccgaagaagaaagaagaaggaaaaaagtatgaacttgtccggctgccctaccgatttaagttttagaaaagattcaaggaaccatact

SEQ ID NO: 25015 - DNA, 359 bp, Zea Mays
atgacaagttttctttgtcaagcaaagctgtatggtttggttcctgccattgcatagtcccttgcacagatcgattctcatagtgttatgtcattgttgattaagagccatgaactgaagtgtactacgcctttggccttactgtgagtcttgaccatgaaccggtgtcagcaggaagcatgctagtgctgaattgcattatgtgaatgggttcccaaaacaaccctaagatttgttttaatttcatcggatcttgatacttcagaagcttggaaaaatctcattcaatcatcccaaaacatttctagacacaaaaactactctatgactggttagtttcaaatgctatctgtatgtgt

SEQ ID NO: 25016 - DNA, 462 bp, Zea Mays
gtattatgcaacgtcccatactgtcacacttcgtcattagagggtcgttaattgcaagtggaaacgaggttcaagcgtgcttgatggcttaacatccccatagaaccattgattccacctttaagagttaattcagttgggggaaaagtttagtctgataggatgtgtctgaatctaaggattgaaataaggcggatagacttcctcactaacctagtagtaatgggtcctcaagggttagatgtcatcctttagggatgaattggctatacagaaacaaagctactattagttgtgataagaggacagtcaagttggtgtccccatccggaaaggaagtagtaactaaattgttcttgcctgaactagaaggagcctgtcactattttcggtagatgacaaggagggaacctgattgaggatattagaattgtgtcagaatttcctgacgtgttccctgag

SEQ ID NO: 25017 - DNA, 507 bp, Zea Mays
attatcattagggctagccgtggtagtagagcgaggacgacgaatgtaagtctgagtgataggtggtttggaagagtaagactgaggtggtgtggaagtgggaggtggtgtgatggaaataagaacatctggggtagaaacagtagatgatggtggtactgatgaagtttcaaaaatgggaggaaggctcatgaaggaggtagactctgtggaataaaaagaagaatgagtggaagagttgtaaaagaagggtcggttttcattaaagctcacatctcgagatatacacatgcgacaagaagatggatcataacaccgataacctttatgttcagggctgtatccaagaaaaacacactcaacagattgagcagtcaatttagttctttcacggggagataacaatacataacacgtacatccaaaaactcgaaggtggtcatatcgtggaggagttccaaaaagaacttcaccaggtgttttgccagagagtttggatgacagttg

SEQ ID NO: 25018 - DNA, 555 bp, Zea Mays
gcaaataaggatgacaattaaaagcacaacatgcggaactgccagaagacgaaccatgtcttgtagtcaagacaacattgccagccacttcccgtcactctcctaggcatcctgatggattaaaagctattggaactggaagccaaatcgtatcaaaggcaccatctttagagcagactgtagacatcaccagcgtgcttgtgcattgggtcacctctatgcatatggggaccaacaaggcagacacttatctaagccacgtgtgcaccacatagttccggcccaggctgcctgaagacactgcatgcgtgttgccatgactactcccgcatgaacattgtgtcatggtgcagtgtcagcatagttttgtactgtggccatcacgctatcggcctaggctgcctcgccatggttagcaacaccatgcacacgtggcatcgtggccgcaagttctagccacctcgatgtggtcgtatctcggatgtggctagaccgttaagtttaattccgcaattatttcggtcaccaaagcgattaagttttagaacagactat

SEQ ID NO: 25019 - DNA, 339 bp, Zea Mays
catcatgcggcctcctctcgaggatatacgcttaaccaatctggtggttttctctcggctgtcagtcaacaagtagcttaaaaagcagaaatcttatgtgtttttaagaatcagttccagcgctagttattactaattaaattactctcaaattaagaatcatcattgtagctgtagtacatatttgctttctgagtcatggatgatttgtgtatctgtatttttcttatgagtaaaatacactatcagtccctaaacttgtagaggtatgtcatctcagtccctgaactcccaaagtgcatatttaggtccctaaacttgtgaagttgtatcatcccg

SEQ ID NO: 25020 - DNA, 298 bp, Zea Mays
cgaggctccgtcaagtttggggacgcctccggcgtagagatcaagggcgccgacttagtcatcttcaccgccgcgtctggtgagcacaggctgctcaccggagtctactacatccccgcgttgaggaactctatcatcagcttgggacagttggatgagaacggttcgcgcgtggaggttgagcacagagtcatgaggatctgggatccctctcgtcgccttcttgccaaggtacgcaggagtccaaatcggtctacatcctcaaccgctcgtccaccaaggcactcaacgagatgac

SEQ ID NO: 25021 - DNA, 516 bp, Zea Mays
aacagatgaacacatagactaaatgagcaaaaccacatgatatatatggccaaacaagtcgtcgactatgatccagtccacaggagaacagaaacatgagggatttaccttgactagagtagattcagagacagaggagagcagatctagtccatcggagatagagaggatagaggagatgcagatcagcagatccagtccaccggagtccaaagaaggagaggatagaggagataggcgatagggtggtagatccagtccatcgacgctcggtgaggtcatctaagtcgctgcgtcggagcccgaaagccaggaagctaacaaggtgctgaggagaaaggaaacaaggcagccaacggtcgatgtatcgatctcaatggaggaatcgaggaggcgacaggcgaggatacgaggagctatgcgagggagacgaggggactgagtcggggtcaagaagattctaaatgcgagcgtgtggaggtgtggcggcagggctgggtcgctgggagggtatac

SEQ ID NO: 25022 - DNA, 912 bp, Zea Mays
ccagacatggcgagacgaaccgagacagtttgatgcttcggcacaatcgagctgtgggactttgacggcgcggggcgaactctggcgagctgcagggtgatgaagcgaggaggcaaacgggatgacgggcaatggtgacacgcagtagtagatgttggggcgacggtgctgagcgcgggcatgcgaccgagggagaagagcatgagaagaggtgtggtgttgtgggaagcaagcgtgcaggcagcagtcaagcggagaagcgatggagcggttgtgtagaggatttttgatgtggaagcaacgtgaacggcactagacaagggcaaacagaggagatcattgtaagaaactcaccgacgtggtagaatgatgatagcgagttgtagagtatcacgaaacacagaggcgagaacgggacgctcgaactgagctctccgacaagcgacggaaagcggcacaacagctgcagtacacggcgtggaaagaggcttggcattttatagggccagagacgaaggcgaggagcgccggttgctggcactgatggccgaggaggtaacggcggcgttaatggcattgagcagaaaaaagtaacgcccgctgcggcttcatggggaagaagagaaatgaatcgacagtagttgagagaggaacggacgtctgctagcgcacggtcgggcttcagtgcggcgtaatgggtgaagggtggcggcggcgtcttctgattgggcggtggcgtgcgagctagcgtccagacagcgcgcacaggagtgtttcgctggggaagatgaaaagacagagaggctgagagtatggcaaggagggcccacacataagtgaaaataaagaataaagagagatgagatgaatacaaaaaaggctaggtttgaacggtcggttcggccagcgaac

SEQ ID NO: 25023 - DNA, 603 bp, Zea Mays
taattgggctggaaatacctcaggtgacgctggccacggaagagctatccacggcggcacggagaaccaatttggggaaaaacctgaattaaaatgctatggtggacgatcggaggcgagggagggtgctctggcttcgtgacaacctaacggagctaacgacacactcaatttatagtgtccgagagcggtggctccgatttttgaaagggaagggcggtcgaagagagggggcgagtcaccggcgcaggttatcgtggctttcaccgtggcaaagcctccggtgatggacggacttacagctatggttcactgcgacgtgttaaagctactaggcatgtggcgcacagatggtaagcggccaacgccacaaaggatcatctcgtccggccgtagaccaagtgggtacgatgactgggcggcttgatccatcccccttttagatcttttacccctccatgactatcccctcatcagagagcacgaatcgtagcaccggcgcagatcacgatgcgcggtcaccggcggcgaggtgggatgaatctgaagatcttttcgtgcattgtaccatggccatcttcttcagtcgttctgacagcccga

SEQ ID NO: 25024 - DNA, 461 bp, Zea Mays
gcgcggtagggttcaattcaaggtcactacgagtatcagtcatgcatcagacatatgatgctcacctaggtttgtccgaaggagctacgggtttgccggtcgacgtggacattgccttcggcgacattcaccaaatgacacgatggtgttccagttaatcctgtgtagtagagttcaagcgggcaagcgcatgagcttcatcatgatctatagactgcgaaacacgagttaaacaactacgactgaccttaggaaaagctggccacatagttgcctgcttggcggcgctagtgaccaccgatggggaaaaaccggtgttccttgtctatcgatggtggaatgacggaaacaaatggtggcttgggtgcataacggagaggcaggactgagcgcaggctcaatttaaaggaagtcaccccgacggtggcaatttggtcgctgattcatggcagcagcgataa

SEQ ID NO: 25025 - DNA, 353 bp, Zea Mays
ggaagtaatgaccccatcggagatcatgaagcccgtgtgagtcgacttcaaacagcgctgcaacacaggaccgatgcttgggtcgccgacggagatagaatcaatgaactacgaagggacatccgacacttgcaggatcaactcgctgatcgagacttagcacttgactgggccgtacagtctcgtttgctaatgtgtgctaaggaagcaagggctcaggcccgaattaaagaacttagctcgactgtcgataacctgcaggtttattgcaatacgttgcacgaggaagtccatatattatactcacaattacacccaagtgagcctgcacaacctgctgaggcggaagccgg

SEQ ID NO: 25026 - DNA, 1195 bp, Zea Mays
agagccttggcatacgcatctgccccaaacttgccctctacggctgtcacaaactccgtccacaccctcgctccttgtttcaatttctgcacctgccaccatctcgctgcattctgttccatgtgaatagaagcagccgaaacccacagagacgatggaacttgatacatgtgaaaatattccaggcacttatctatccaaacagcaggatcatcaccagaaaatctagggaaagacatcttaggcagtacctgcgtgttcgcgtgcccgatcggcctctcctctcgatgtctatccaccctcggctcagaatgatctcttctctgaaatcctcgctcgaaacccatgttctgctggtgattcctccttcctcgattctccacttcccctgatgaattctcgagctctcttcccatctgatccagccgtaattgagccatctctcgactcgtctcctccagcttcaggtacagttcggttctctcttctgcagcccgttcagcgaccgccgccgcgatctccgcctgcgtcatcaactggttctgtaccttcctcatatccttcacctcttccgtcagtgcttccatcgactcgaacatccgattccacctctcctgcaccgctcgatcggattccgccatggcctccaaaatgaatcgagtctgcacggagggcttcgccttgggagccgtcgtggttgctgccgaggatcgcagctctgataccacttgtgatgcccgtggccgacgtcgcgtcgccgtcgacgtgaggatcaccggtgattctcagagatacagaagacgcaaggtttgccacggtttatggagttctgtttctcttcttcgctaccttcctggtctcacacacagaattatttaagcagtcgcttacatgggcctcacgcccttacacatcatccggcccacacggcccaacaccttacagaatattgagaattcaaaaatcaatcgatgccgtctcctgtcgttggaccggccatgacacagacgcccttcccgacgttcgacaaagtccgcaatgatctgctccttgaggagcttactctcaacgacaaggtgaagacaccctctgcggccctcctctccaccggaagtcgtccctcctccggcaaacccactgcgggcgtgcttggcaccatgccacagcacaccggtggtccctccgttgctagcca

SEQ ID NO: 25027 - DNA, 796 bp, Zea Mays
aattttgaatccggaactgtgttggtgtgccagaaataccctggtgtttcttttcccttttgggctcactatgtacagagatgctctgacgccttgttgggattggagtaaatactcgaggttgaggggaatcaatccttgaatcttaagcaggagagatagcacgaagcatggtatttggttcaggcactgcaacgctggactgtaggccatatgccagtgaccatgctcctgcagtttctgttctacagtttttacggccatatatttttcagatgttaatttagacggtatgccaaaatccatagcaaacctctttatcttcagttcatgttttgttctggtatttggttcaggcactacaacgctagactgcaggccatatgccagtgaccatgctcctgcagtttctgttctatagtttttacggccatatatttttcagatgttaatttagactgtatgccaaaatccatagctaacctctttatcttcagttcatgttttgttctgctcggtggatgaatccatgtcttgccatgctcttgttacagaaatcgagaaaatgattcttttttgggggtttggatttagatttgtactgtttttcatcttatttcaagtctgattagaactctttatctggttggttggagatatggggtgattggggtagtgtattgtagcatgtctccatattcactaattctcggtgatggactcttacctatctgctccagctccttacttgcgctaaaactgaacatgtaccctgaatttgggaattgaggcagca

SEQ ID NO: 25028 - DNA, 361 bp, Zea Mays
gtcggtggctcggtgcatggtggcactgttgtccgacgagacgggcttgagttggcgagtagggaacatgggtggccgacaccagtagtccaaggcagggcgatgtggagctcctgtctagtgtcaccgagtgggtgagggccggggcgaggaggtgagccacgagtctgcaacggcgcaagcacatgcctgagatgggggcacactgtgtgatctgtttgtcgcgttcctggagaaacagtgattctagctatgagggatgctcgacggagaagagaccggatgatcggtgaacaaccagaggttgaagaaaagggtagaaaagacattcccccaccttgaactctaataatcggtgcga

SEQ ID NO: 25029 - DNA, 303 bp, Zea Mays
actgatgtttggggtccagctgttacctctgtaggaggatttcgatactatgtcagttttgttgatgatttcagccgtttcacatggttatatctattgaaacaaaagtccgatgttcagcatgctttttctttatttcaaacccatgtagaacgtcttcttgatacaaaaatccaaactgtccagtcagattgggggggagaatatcgccccctttctcgctatctcagaagtcaaggtattcatcatcgtattacctgtcctcacacgtcccagcaaaacggcattgccgagcgcaaacat

SEQ ID NO: 25030 - DNA, 371 bp, Zea Mays
cattctatcaagcttgacaagagtgggtggatcttgacgattagaccaagtgaatttcctcccatgtaaggccaattctttcacccccagatcattaatgagccttctgaatctgtccataaggtgtctattaaaattgccggagctcttgtcatcatccttgtagatgaggttgaagtcgcccattaaaatccagggcccaggacaagcagatctcacattgcgaagctcttgcataaactgaattttgtcgctgatgccttgaggcccataaacacatgttaaccaccaaggatgttggtcacgtgggctgaactgaattgtcacactatgatgatccaccctagaagcgctggccggaccaatctcat

SEQ ID NO: 25031 - DNA, 552 bp, Zea Mays
gccggattgagtaatcgggcgccatggtgagcttcacaagcgtacggggctgcagaaacaacattcgatttaggcagagccttaccagggtgatctggccacggagcgcggagttttgtggttgccggagacagaaaagggggaaactggggtcgcggcggctctgggcgaaatagggagatgggatcggggctataggaccgtaagaggctgtgctttcatcgtgcgcaatcaatttgggcgaaggtggagagggcagtgcgaatttgacttcgatttggttcactggtgttcgtgatgaccaagccttgccgtgatccagggggctatttatagccgcggaggtccggcgatcacctcgcggccgaggatagtatcgcaagcgcatgtcgaccacgtcggtagaaagtacagtgaggaagaattacggcatgagcgccaccgcggcggaattcgcaggcctcggtggccgccggtgaggtctccggctggactcggagtaaggtgccacgtatgcgctttttaactccgactctatccatttcttatcgc

SEQ ID NO: 25032 - DNA, 549 bp, Zea Mays
gtgtttttaagaatgttaggcacaacgacgatagaagccagtttccccacgttaaaatctaacagcaacaacattaattaatcgtgttcttgacgtcccttattaacgaaagcttctagtaccttgcatggcggtcatggcagcaggacgacgacgggttagcgtcagtcatgatgactactcgagttgattgctactgctagctagatagatagagtagtatatcaccgattcttgctctcttcctcccctgcggcgccgtggcaaatccaccacgacagggacggccactccatttgcacattcccccattccgatccactgcaggtacgtacggtcgccatccagcagctaatctagcgtcgtaaacaccacatgcacgccgccaccacccccattcacccatcatgcatctgacgatgctggatacagatagctatgcatactcgcgatggattggctagctgttcgtataggacggaatccatgcatattactccctccgttcgtttataaatatacgacatccttaatttttttaaaactttg

SEQ ID NO: 25033 - DNA, 504 bp, Zea Mays
cacggggtaggaaaatcttcaccgccggtgtgctggacatcactccggctagctgccgtgcctcccccttgctcaccgaacccgtggataaggttctcaccgccgttaagccaccaccggcgtccgccgcgtggctctacctttccaccgcatcgccgtgactcactctagctccccgttgatcgccggagcaattgccacggcactggacaccaagccattgcgccagtaaactttccctttctctgaccgccgcgcgtcaccgttcaaattcccggccaccgccctcccgtagtataaattgaccctgccgcgagctccgtaaggtagttaagcatccagccaccaagaattagcctcaatcgttcaccagggtgtgcgaattttgaacttcccccaaatccgcgcaagaacatcgtaggagagacctcgccgcggccagctcaactcaggtcagtccaagtccctcaattgcttgttctagcgtccctaggccctcctcaa

SEQ ID NO: 25034 - DNA, 930 bp, Zea Mays
aaaaaggcaatgccaaagcacaccaaaataaatgcaattaaaaaaagatcttgcaaggaagtaagctatttgggatcagtaagccttcaaacctcgtcttattgaggaactttgtctagtgaacataatcacagatgtctctcaaagatacacaaaaaaatatattatagtcagtttattacacagcaataagaataaaaaatcatgtatagaagaaatcagttaatcttcttatatggaatgtaagggaccttaatgaaagagccagatgggatactgttcgcaaaaacagtggattcttgtaaacctgcggtagtctatcttgaggaaactaagttagctaatttctctatttgggatgtgagattcattctggggcaggagttcaatgattttgccttcctggcttcctgccgtccccgggtactacgggtggtattcttgtcgcttggcgcgatggcgtggtgcactctgatcggcgggatatcaggtgtttttctgtctcagtcaagctcaagttgggtgatgagcaaccttggtggttaacaggagtttatggccctcaacaagatgttgagaagatcgctttcatttcagaattgagggaagtgagacatcagtatgctggttcatgggtgttggcagggaatttcaacctcatcctctcagctgaagataaaaacaatgacaacctgaatcgtaagatgatggggcgctttcgtcgcttggttaatgatctggacctcaaagatattcctctccttggtaaacggtacacttggtctaatggtagagtcaaccccactttagtcaagctggataaggattaggaggactcttatccagactgtattcttcagagccatgctacagagctctccgatcactgcccccttattctcagtcttaaggaagggctgtactctaaga

SEQ ID NO: 25035 - DNA, 804 bp, Zea Mays
caccttttcccttctagaattcctcctcacttacacttacaattcttgcacagatggcttcgcctacaccagattacggaggagacacccgtttcagctcgactacctttcccaagagggtttcccctctatcatgtggtaagtgttgagcgcagctgggtaccccatacctccttagtacacggtgcagctatacatggagaactgagtgtcgtgagccgcattgcagggtttggctgaccttggagcctcacccctgcaacgaggttggtgttcgctaaactccgcgacagtcggattccggatagacgacaccacagaggccacggccctgaaaggctctaacgaccttctgtgagtatcacccacttgagatgttgatgcaccccctcggactcttccctgctgagaagagggacgatccaatgtggtgtgacaggatgtggcatgcaatgaatgtgtgggcactacaccctgagcaggttggtagagtgatgactcagtgcatgagcgcactgtatcgcctacaggccctacacagcaaggccatgacactccttactagcctggctcagactaccaagacaaccctcgacgatagggaggtctttgtggtggacttgtcttttgaattggtggagaaggatctccaaatctagcagatgaacacgcacacccgcgagctcgaggagctagtggaaattggggacaacaccattgaggtcctggagaactagctccacgatgtgcaggtcgagctagatgaaaccaatgcccatctggagacgcaacagggcatggagg

SEQ ID NO: 25036 - DNA, 647 bp, Zea Mays
ggggagggacgacacaagttgtcacccttatgggaagggccattcataatagcagaagccactcggccaggatcatatcgtctaactcagatggacgacacagaaattgggaactcctggaatatagaacacctcaggaagttttacccctagctgaatttcaaaggctatcgggatgacaatatactctgtaaaacgggagatatgtcatcaataaagaaggtctcaaagatactcaatttactcatgcttgactagcactcttacttaactcggggtgaccactatgccctgccagcggagcaatcggcttaagtcggcaaagacttaagacggtgcaacatgctcacacttacttaactcggggtgaccactatgccctgctaacagagcaatcagcttaagtcggcaaagacttaagacggtgcaacatgctcacgcttacttaactcggggtgaccactatgccctgctgacggagcaatcggcttaagtcggcaatagcttaagtcggtgcgacatgctcacgctcacttaactcggggtgaccactatgccctgctaacggagcaatcggcttaagtcggcaacgacttgagacggtgcgacatgctcacgcttgcttaatccggggtgaccactatgcc

SEQ ID NO: 25037 - DNA, 838 bp, Zea Mays
ttggtggtgcctagttcctaggttgctactgtgtagcctgttatatggatgttagtgcaggcgagcgaggtgaggaagagggggcatggaggacaaggtggtggtgctggcagttcacatttgtaatggttggagaagtggtctaaaatgagggggaggtgagaatgacagcgatggtcatagttctctgcagctaaggtcaacttgacatcatccaggtgtctgtcttgccacccgaatggctgcctaggtgttcggcagcataggctgtaaaagcgaaggtcagccacctcgtagtgctgatttttttgctacgaatgccatttttagcactaattccctgatgagccagcaatagtgtaatgttcttaatgcaaaattacaaatgtgatgctattgcttggaacaagttgtttaaagggcagttatggagagcagttaatttcttgcttttattaggacattaaaggatagcgtgaagtaacggttcacatttcagaaaactcatgattttctagttcctaaactagggtagtttaatgatgactacatatatccccttcttatacatgaacttcagacacatcatagtgcctcaaatggtttcaatatctcgtgttacaagttacaacactgcaatagcaattctgtgctgcgctaattgctattttaccatgacaacttctgtgaattaaactggttatttttggggtaacgtatttgaattttttaagtgtctaaactgcattggagaattcaaaggcaccttgtggtatctgaaatacaaggatgtagaataggatctgaaggaaaagatccagtcacagttgtccaaccc

SEQ ID NO: 25038 - DNA, 359 bp, Zea Mays
ctcggaggtagtcggcgctttctgcagtatggcgcggacgaaggctgagtcattagatccccggtagaagtcctcgatcactgctgcttctgcgacctcgaggatacgattcctcatggtctgaaatcttttgaggtatgatcggagagtctcatcccctcggcgattgatggatttgaggtcccatggctgcgtcggtttgtcggagagagattggaagttggtggtgaagcgccgactgaaatcgctccagtcgtcgatgcagtgtcggggtaggtgtcatagccattgcagtgcatcctgcccgagaacgataggcaagtatgcggtcatcacgtcttcggttgccccagcggctc

SEQ ID NO: 25039 - DNA, 324 bp, Zea Mays
gacgatcttgacggcatgccatatcctgaataaagttcccacaaagaacaaaaaaatcacaccattcgaggaatgggaaaagagaaaattaaatatctcctatttgcacacctggggttgtttggctaaagtgaatgtgccaattaacaagaagcgcaaattaggaccgaaaactgttgactgtgttttccttaggtatgattttcacaacattgtatataggttcttaattataagatctggagtacctgatatgttggtaggtactattatggagtccacatatgctccactacgattccagactccggtgagctctttctt

SEQ ID NO: 25040 - DNA, 306 bp, Zea Mays
cggagacgcccttgatggagtccaggatgtttgcactaccgtgtgctgccgtgcagtgtgcacagcaggggtgactggtgccgggcgattgggaggctgcggtgtggaggaagtagcttctccctccaccgcaaggtctaccgaagtctcggcgcggtgctctactatctgcaccatcatgtttgggcaagaaatcaagcgaaaacctaatgcctagtacccctacctagcgggccaaatgtcggagagtagatctccggccgggtggcagagtgcacctgccctgagtcctgagatgaggagggg

SEQ ID NO: 25041 - DNA, 286 bp, Zea Mays
attctttcgcgcttcggcttcagcgatttccttctgcttttggatcgtgacttggcacgtccttgttgtgtgtcccatatcctccccacagaataagcagaacaatctcctaggttgaatgttgaaccttcctccaaagcttcttccccctctgcctcttggagctggtggcctgtatgaggtttgttgcattcccgacgattgtgagcattgctggctgccctgggtgtggtttgccctgtcatcatttgtgctgggattgtggattgttctgacatgcctaggg

SEQ ID NO: 25042 - DNA, 326 bp, Zea Mays
gactaactgagggtggtatgagtgcataacagagagacggagcgaaggtagtgctcaatttaaaggagccaactacgtgcttcgccagtttgagacgaaggcgatcacggaggcggtgagatattccactggacgagttcgtcgttgcacccgccggtacaacggctcaagggcagtgactccttgcttgccacagttatagctacgtggtgaaatggtcacggcgtggcgcaaccacaaaggacagttgccaccacggtgatggtcgccccagccacgtcgccgtgcaagtgggtacgacgaactgagcaataacaggacccgag

SEQ ID NO: 25043 - DNA, 425 bp, Zea Mays
ggggatgtgcaccgcatcgcgtagcagggagtagattgatctgcaaggcatcaagggccgggaatcgaactcaccggcggaactcagtcgcgtccggggtacagcgccgccgtggtcagctctgtagaggaagatgagcggtaaccgtgggatgctagatgaacgcccaggattaggtcatcaaataacgtttgcttgaattctgtcgtcaccgtttattggcgatcggaccactcctaggcagttttgggtaagaaggatttagggccgtcagatcatggttgcgcagttgcaggatggcgcttcagtcatggctcatcgtggccgtccatcgatgaatggaggggcgaggggtgaccctggcgttttaaatccagagcattgatatcaaatcctagggctctggatgcatacctcttcatttt

SEQ ID NO: 25044 - DNA, 460 bp, Zea Mays
ctgggttcttggatgaaacaatcgttttatgtcaaaaatgatttgagcaatagggaagatgggaggggtataatctagcaccctgtacggtcacgcttcggcatcaggaggcagtcaactgcaagggggaatgaagtgcaagcgtgtttgatggctttcaacactgtgtgtacttacatcagtaccaaggatttggttcaggagcatattgcttacaaggtgtggccgctcattaatgactaggagatgctgaaggagactgctgccggttctagcataggtggtttggtttacctaagatacacttatcgttacagaagtcagtttgataagtcgaatgaagactggcttgaggctgtcgaagctaccagtgacgagctgttgggagcttagacgaaggcagaggatgaagccatgaccattgccttcggcgctcgcggaaataggaggttgaatagag

SEQ ID NO: 25045 - DNA, 296 bp, Zea Mays
aaatgatccggggaaaaagaaagtgcaaaagatgtggtgaactagggcacggagaaacaagctacaagtgttcgctaaatggaacaaaaaagaggaagaggaagcctcgaaagaataccactaagtatggagagaatgccaaactaccaacaaaaaggagaggccaaaatggggaagagacaaatgctgctgtagaccaaactgcgcaagagacaggtaatgcagacagagatgtgcaagagacaaatgctatcatatcaagtcctatcagaccaaatagagaaacaatattgcag

SEQ ID NO: 25046 - DNA, 318 bp, Zea Mays
cataaattgggcacttaaacagttgcgccaaatacatcgacaataaatgagctttctcagtcacagccatattatggtatgcagatgaattcatatccgagacaatcactgctaccacttgcagtgtacgatgagccagcactgagtacgaccggatggttcgagtataatctaggcccatccgggcctcccacggaccgtccggctccatatacaggaccattcggtgcagcgctaagcccgccacatggcacataggtggtgccaaacaatatcaaatagtccaaaaatataaccacgaaccgccccgttccatag

SEQ ID NO: 25047 - DNA, 411 bp, Zea Mays
attttagcaagcttaacatgtttttactatgtgatctacatctttgatgtgggtgggctagtggaattcttctcttattgccttcactaacaatgaccttgctgctatgtgtgtgcagtacaagctaacatatatttcatgtaaggacacaaggcctttagctttgggaatggatttgagcaatgcaacacccctttcttgtacatgttttttgttgattagggtgtagtttttggctcttatcgccattctactggcagaaccttcatcctttgtctaataagtcatattaagttgttccattattccgtgcctctaaaattttgattttgtgaggtggacagtcctgaaggtcgtaagatgattgccttttgctagtgacaccaattcctagtaaaaggtgcctttggg

SEQ ID NO: 25048 - DNA, 285 bp, Zea Mays
gaaatctgcggtgacaggtacacgaacactgtcaaagagtcctcgagagggagatgaagtggagggcagaggaagaaagcgaggagaggtggaaggagaaaaataagtctgccgtcagaaatgatcttggcaatccaaggtgacggacctgatgtccaggacgtgcgtcctcctggacacaaaataattaagataagtgtatggaaatagggaattcaggggcacagacaggctcattctgtgctatcctaagacagcaattgagtttcacaacctctataggaa

SEQ ID NO: 25049 - DNA, 470 bp, Zea Mays
gttgtctcgagattctagtggcagtgatgattttgatattgacagtgacaacattgatgccgaagatcggccatggaggcctagtcatgttgtgtttggaaaattcactgttaaaaaaggacaaattgaggcgatgaaggcaaatatttccgttatacaactatagtaagggccggaggagagaacattgttcctcttcctgaagctgacaaagtggtagttttcaagggctttatgaaggatggtcttcggtttcctttgcataagatgttggtcgaagtgcttaaaaggttcgagatataccttaatcagcttgccgtcgaagccttgattaaaattgtggtttttatttgggcaatgaggagtcaagggttggaaccagacgccgactgtttctgcaatatacacgaattatcttaccagacgaaggcaatggggaaggaacagtactacaacaactttggctatta

SEQ ID NO: 25050 - DNA, 523 bp, Zea Mays
tctacaactgtggtgagtcacccgatctaatcatggccccgcggtgcgtagaacctcttgcatgaaatttagttcgctggaaaatctgggtcgtgggattggagttggccggcaatggcaccgtcgccctaggcgctctcatccctcgcgtccgtcggtcggagtgaagaagacaaccgggatccattgatccgggagcgtacggctaggattagatcgtgtatacccgttcggccgggacgcttcggggccgttagatcctggttgaaggatagggatcggatcgcaccgtaataaaatcatggcctttggatctgatccgtgggcttgcattgcatgcgcttcatgatctaatctggacggtcaaatagcgatcggacggatcgagttagacagtaccccttcggcttgagtttttacaaaagaaccctcgggttttcaattatccaacccgccgtcctatgcgggggaaaactgagtcttaagcaattttatgagttagaccctgggttctctgttattg

SEQ ID NO: 25051 - DNA, 442 bp, Zea Mays
taactacaccaagttgcaggggatacccacaccttggtgacaatcattacaaagatccaacttcattacatgtccatcataacaagcatccaacataagataagcaaattaactctaactaagactgactagactaagacactgaattaagcattattacagactccgaatttgtcgatctatggatccaaatctatcagagtcctgcagtctggggtaccatagtcgaagcgaccacggggcggtgaacagtaagggtgctaaatcccaataggggcgggagaacaaacatccagatagtggcgtgctacgcactcagcacgtaattccgcaacctccgcccgaaccttgcccaactcgtcaagggcgtggtccaactctgtgttgagcacgacagccaggttgaccatgctgttcagcctgggattgccctcaccaactg

SEQ ID NO: 25052 - DNA, 331 bp, Zea Mays
ctgaaggaaagaggtctgaccgccgaagctgtggtcgctgattttgtttttaagaacatccagcccctgaaggacagatcaaatgttggtgctcctgttgcctactctgcttggaatctgccacctcctaagtcctttttcaatttcgtgtccaatcctcttgctggtgatagtggtctgggtcttagagtgcgaccctctcccgaagatattgaggtcttggttgcttctctttgtgatcttcccaatgatgagaggcaagttcaatttgagatgccagcgagtccagatgatgcagagatgaatgttgtgctcgatatgttggctggag

SEQ ID NO: 25053 - DNA, 546 bp, Zea Mays
tgtcctccttctcgtactcaagcatctgccctaatgaagcatggattttcgatggtgtggatgcggtatgctagacgtccccgggctcccagcgctgtgacatagaagatcctggatttcgaggtgtgtccttcgttcacccagagtgttagccttggggagtttgtcgaggagcaccgcagcggctgcgacgctctgggtcacctaagggagtcgtgggggtctgctcccgtcgcggatcatgtggcgatggacgtatgtcgttgtggcgcgcatccactcaacatcccatcgtgcccgtcgtgatcgttgtcatggtgcccttcgcttcctggtcgggaggcactagctgctttgggaggactcggtctatgcggcaacttccggtagggcaggtcaagctacgggggagcggatgctgccgcgagtatcgttatgctagcaggcgttccctcagggcttcttgtaagtggggaacagtcttccggggaggcggttgtgaaacactcctaagccgagtcaacatagagctgtgtccgtgttctg

SEQ ID NO: 25054 - DNA, 353 bp, Zea Mays
atttgcggaagggaatcaaaggtaaagattatggtggaaggaaaaagaaaaagagagcccagatggttctaaagaaagtgggttagctcaagtttttaattcctctttgtgtttataatgcatgcatgctggaagtaacgttgcctctccaaaaatagggtgctttttagggcatccttagaaatataagtacgggcccacggggcctaattaattagccacctatttctccctctattcctaaggcctttcgtcctaggtctagcggtctagtcctgacgatccgtagcagtttctaggcaagttttagattttgaaaattggtattcatggtttattgtccttctctgtgg

SEQ ID NO: 25055 - DNA, 404 bp, Zea Mays
gtcgtcgtaggcctttaaaaaggaggagagtacgtccagcgcacgaggccgtcttctcttcccaaacccatcccgccgttctcttcctgcttcgttcttctctccacccgtcgctcctccctcctctcggcgagggagacccccctctcttcacagcgtggattattccattcttcgtctgccggtaagtcacccgcactactaccgcgtgctcggatggccggattcccatgtcgggcctgttggcccttgcttccaggcattgcattggttttgttcttctcatctgaaccaaattcctgaccccttccactgtttctatataccaagtttgccgtggcgcgtcatcgatggcttgactctgatcgtcgtcggcggtgttgctgttttccagagctccaaga

SEQ ID NO: 25056 - DNA, 311 bp, Zea Mays
cactaaccacatgtacatttctcgtgatgttgtttttgatgaagtctttcccttcatagaactatattctaatgcatgtgttactgcgttcagagatcaatcttttgccttccaacttactcccttcatccaactttgaaaatatggtggattttgatacagtacagccgatcaatcattgactatttttaatgatgaaaattctggaggatcccatatttgtatgaaggatggctcagggaggatgctaatgatgaacactaggttgaatctagtgatatttcagctataatgatagaatctacgttgca

SEQ ID NO: 25057 - DNA, 556 bp, Zea Mays
cctcgccatccgataaaagatctacggcccgcgctatctcttctcctcctacccaagcagcggcgtcgccgccatggctacacggtggaggacacgaccgagacccaatcggccattcccgagcacctctgtcaaattaaacggggctacacgaagctagtcgaacggtgagcgttatgatgtagttcctaccggcgattgtaatgtgatgaactcctcccacggagttgtgcggacccacgaccaagctgcgcgatctgtgagaaattcaccacgcacggccggcacccagagcaatacaactatgcgctactcactatggtaaatagagagcaccgatcacaaggcttattaccttcaatggcgtcttgacgtgatccacccctggagtagtgcggcctgcggcggagaagtgcttccgacgaggagttccctgctgtccggttgctccccgtgtcccagagatctccacacggttcctggatgccccaccgaagtccaccggtctacccgcgaagcactggcgatggcgtatgccaataccgacggaggcggc

SEQ ID NO: 25058 - DNA, 278 bp, Zea Mays
ctataaaggtcaccttgcagaatgtgagtcaagaaatgacctagggagtgagccccactacaatggtaaaggaaaaaaggattcttcgagcaactcatgctcataggtcaaaactctcatttccacgtaagggttgtgtcagtgtttcgaacttagccccgacaagtaaatttgtgtctatgttctgtggtccggatggtgtactcaatgggcgcaagatttatattggttcaagcagaacgtccctacatctaatcttcggttgcttgagctaccag

SEQ ID NO: 25059 - DNA, 816 bp, Zea Mays
caatacccagtatttctggttacaaatactacctcgccatccttgacgactgctcccacttcctgtggacattccctctccgcctcaaatccgacacatttcccactattgctaattttttctcttttgttgccactcaatttggcaccaccataaaaagcttgcaatgtgataatggtcgtgagtttgacaactcccacacacgagctttcttcctctcccacggtgtccaccttcgtatgtcgtgtccctatacctcccagcagaatggtagagcagaacgtgtcctccgcactgttaacaacatcgtccgttccctactctttcaagctcaccttcctgctccttattgggttgaggctcttcacaccgccacatatcttctcaatctccaccccaccagcaccctaaattcctccactccccatcttgccctctttggtcgccccccatcttacgaccatctccgtgtctttggctgtaagtgctatcccaacatctctgccactgccgcccataaactcgctccacgctccaccatgtgtgtctttcttggttactcgtctgaacacaaaggctaccgttgtcttgatatctccaccaatcgtatcatcatctcccgccatgttgtgttcgacgaatcctcctttccgtttgccgagacccctcccagctcggctcttcccactaaccttgattttttggatttattttctgaacaggtcccggttccacccattggcgcattgccctcgtccactgctgggcagcgcaccagcgccataccacctggaccgctccagcaggctgcccaac

SEQ ID NO: 25060 - DNA, 288 bp, Zea Mays
acctaggccatatcttccgaaatgtgggaactaggtggctcgccttagagcgaggtacgaagctgtaacaaccaaagttgttgtggtactgctcctttctagtagccttcgtctcataagacagttcatggatgttgcagaatcattttgcatctggttccggtccttggctcctcatggcccatataaaaatccccactttaatgatggctttaggagtaagttgatgaaggtaaatctcaaaggtttttagaacctcgaccaacaatttgtctaggggaaaccgaa

SEQ ID NO: 25061 - DNA, 275 bp, Zea Mays
gtcatcaaggagttgcgcgcctcaaagaaacccgtcacgcaggaattggaagccactcgtcacaacattaaagccttagaggatgaccatgttgttatgaaatcaatgtgtgacaaagcaatggacaaagttgttcgtgccgggcgaatcctgatgaaaacacctggttgtggtgcatgaggacatcgttgctgatgttctcgctgtatctgctagtgtgagcaaaccttcttcctatggtaatcctgctggcaaggtcccctgcaagaatgccc

SEQ ID NO: 25062 - DNA, 558 bp, Zea Mays
tggtaatattgctctatatagacaagaaaacaacatcgacactagcatcagaccaagccaatatgaaatgaatgataactcggataaacaaaaatacacttttactaggagaaggtttccatgcagagtaagattgtcgagcaccttggttgaagatatcactgtcgagtcaggaatagggtacccgaaataggcccttcaaaaacgaccaacactatgagacgaatcggatgaccaactctcagatgatgaccgactttctagtgatgatcacctctccagtgatgaccaactctcggatgatgaccaaatcccagatgatgaccaacaatcgatgaccaactctgcgagacgaaccaaatgaccaactctctgatgatgaccaactccttgatgtccaactctccaatgatgaccaactccgccaaacaactctgcgagacggactggatgaccaactctccgatgatgaccaactatgatgaccaactcgccggccaactccaccgaccaactctgcaaggcagaccgactgaccaactctctgatgaccaactc

SEQ ID NO: 25063 - DNA, 296 bp, Zea Mays
cccaaattgcacactgcttttatgccgactcacggtgcgagactattggtacgaattgccgactaacgaagcgacgctattcacgtatacatttagtgactgatgctcagttggactatagatttataccgactcattatctgtggcaagatatgccgactaacagttcaatgataatagtatatttatagcgacagttgtccgatgctaatttggtgttgtggtatagtgagcctcgctggttcccttagttcaatatgccacaattcctgtctctcacactaggcggatttccc

SEQ ID NO: 25064 - DNA, 820 bp, Zea Mays
gcgctggagtctatcatttagtcccctcataaagctattcttgtttttcaagtctgtgtccacttgatcgatggcgtattgggagaggtgattaaatttgttaagatactgcatcacagaatctcccctctgcttcagacgtatgaattcttctagcttcatctgtagcactccttccagaacataatattccctaaatgtcagtttgaactcttcccacgtgacctgatgtcccacaggttgaatggcgtaaacgtttgcccaccaggtgctggcagagactctcaactgttgagcggcaaataggggcttctgagtctcagtgcagcgaattggcctgaactttggttccatcacccgcacccattcatcagcttctaggggttcttccgccttgacaaagaccagtggacgggtctcagagaactctagataggtggtgtatcgtggtccctgaggttgacctcttcctccgtgttgctgaaattggtttctctccatttcacgcaagaagcgcgtgttgtctgcggtagcgttgaccaaaggagcgattgcctcgaccagtgtaggaggtacaggtggagggttgggagtgtcctccccgccgtgggaagttcctgccccattatgagcacgagttcgcgatggcatctgaggaagaaaaaacatcctgaattattacatgccaaacacacaccatctttattacattgctgaatggtaataattatacatactcagtgtacaactcatgcttccttatttattttacatgagtacattacttaaactatactactctaatcctcttcgtccttag

SEQ ID NO: 25065 - DNA, 380 bp, Zea Mays
ggttcatggaggtagactctggtgatggacagaagaggcagctcgacatccccttgacaatcctacaccaccttccgttcataccgaggatctagcgtctatagatgaccgaggaatccgcgaaacagatgacatggcacaaaaatagaaaacgatacaatcctgataagatggtacacacatctgattgtgaggcatggaaacactttgatgtcattcaccgtgagaaagccgaagaggctcgcaatgtacgtgttgcgctggccaaagatggattcaattcctatggaatgagcgttgcctcgtacacatgttggcccgtgtttgttatcccaatcaatctccccccgacatgtgctttcaaaggcagaatatatttg

SEQ ID NO: 25066 - DNA, 363 bp, Zea Mays
cccgagggtgttgccggtgatgatccggctctgatgggcagtgcgagctgcaacccagcccccgagggtgtccgagcgagctccccttctcatacctccatggatgtccacgttgggtcttctccaccacactctggtggcataatagcagcacatgcttcggatgagggagtcaccttagaggtcggcgtaccggatgctggggttctgatgcctgccagtggtgttgaattaatccctagcgatgttcttcagactgccccggttgatattccttcgtcgagccaccacctagcttctcgtgacttgggatttccttcgttcttttctaatcttcaggtaatttggctttttctgttctgg

SEQ ID NO: 25067 - DNA, 274 bp, Zea Mays
ccaagataagatagtaaagtacacatatgcttttagtttgagcatgaatagatgctgttttactttcagttatttgttccttttatcatatgcatgtattatatatagcactagcaactcaaaacttaaatttcttgaagttcaattatttgcaaccaatggttaagatataatttgctgcgtaaagttcacttgtctagttgttcttgcttcctgttttttcctctttcctctcctctctctcctggaggctggagagacctgggtcttctgg

SEQ ID NO: 25068 - DNA, 476 bp, Zea Mays
tgatactcacactgttgccacgcctatggatcttcacttatctcttcgtccgactgatggggcacctttggaggatccatctcgatatagacatcttgttcacagcttaatttaccttactgtcaccaggccagatattgctcatgcggttcacattttgagtcagtttgtctctgctcctacatcagttcattatgggcacttacttcgtgtgcatagatatttacgcgggacaaaaacataatgtttattttatgcctcaaattccccacttcagcttcatgcttactctgatgctacctaggccagtgatcctacagatcgtcgctccatcactagctactgtattcttcttggatcatcccctgttgcttggaaatccaagaagcaagctgctgtatctagatctagtactgaagcagaactttgagccctggctactactactgctaagattatctagatttgttgtctct

SEQ ID NO: 25069 - DNA, 602 bp, Zea Mays
gctgcgtagatcgacgtctcttgcatcgaaggtgattggtatatgggaccattttgtctgaaccactggcccagtgagggcgacgtgattgactctatggtactgatccttcttctgccgtttggtgttgaagtctacacttgatcctccggtaatcatgtggatgaccccacgaaaaggttgttcagcgaagtcctcttgtttgggtgctagtgggggtggtggaggattttggtagtgtggaggtggagggaggacttggatctcttggtgttgctagtacatatggttgggctagttgggatggattggttcattgtggaattgttgctggtggtattgctgggatggtaggtgtgcgcaacaaattgttggttgtcggctggctgatttctggctattatgtctttggtagccttggttttggggcaatccctagtgggatgtgtgcagtcttcaccatgaaagaggcagtagaacctttacggctccggagctcggcctctgcctctgcctctggtgttggcgccactgccctgttgtgtggggtactcctggcgacaagctgtgtctccggtggggtgttggttgacgatgatgtt

SEQ ID NO: 25070 - DNA, 408 bp, Zea Mays
ggccccacaccgtcggcgtggccctgagcagcgtggacactgtaccgcccttggtgcctctgcctctgtctctgtcccgagtgtgtacttcactcctctgtcggtagcactaccccatccgatgttgcagctacccaatctacactcgttgcgtcctcacggctgccaagaccgttgtgactgctgccgcgagtgcgaatgtcgctgctctcgcctagtagcatgaaagcactgttgccgatacccctcgctaggcagcttgctggggctgagcgtcatttgcttgtctctcccatcctgaagcctctcccagagcccccctatggtcgccccttcggcgtacgaggccttcatcatcaccaatctccacgccatggcgacgactgtccagagcatctgttattggtt

SEQ ID NO: 25071 - DNA, 822 bp, Zea Mays
gcaaagttggagctggtctattaggctacaactttgctacagaacaatggtcttgttgccatgtaaaatcaggaggaaattcgccccaaacttgggctgtcaggctggctgaagaacaatcccatggtacagtaatagataggatcaggttctaatcccctcgccgctgacgagccgcgcgtggattcgtgctatcgccatggtgattcgcgctcggatcagttggataacactgggatccataaatatcacgccgtggatacgctccggccactattttactccggccaccgtacctgagcagaccacggttgagttggatgggttcgccggagctagccactgcgcggtcttgcgccacgtgccttgacacattaacctcaccgtcgtgactcatgttagctcgtccggtggtcgccggggagcttgccacggtaattgccaccaatcgcgcgtgccagtaaccttcttcttctcctaccaccgcacgtctctgtcaaattcactggccaccactcaagcctgctataaattgccgaccccgcctgctttgctaagtaattgtgcacccagcagagcaaccagtgcctcgaatcatccactagaactccccaatttgggatttcccccaaatcacccaagaacatcgagcggtgtgacctcgccgtggtcagctcgtctcaggtccgctcataccctctgccctctcgttttagtgttcttgtgtgcccctgatactcctcgaccaactcgattgagctaagctaccttagatcgtcgggaacgcgttagtttggtcgttgatcatacggtcaccatgga

SEQ ID NO: 25072 - DNA, 479 bp, Zea Mays
gcggtcgaagagaaggggggcattggcgcaagcaattggtggctttcaccgtggcgaactcaccggcgatcactagatatgcgtaacccgagctatggcgacgtggtaagacaccgaagcacgtggcacatgatctttgagcggctaacgtcggcgatgatgattccgaccagtcgcggttcaagtgggtacggcggcacgacggtgagcaagtccgagctaatccgagcgccaatatttttacccttcttcgttatccatctgtgctgggcatgaatcaccacggtgggcgcgaatccgagcacacggtcaccggcggtgaggcatctgaacctagcattctgatccggacactgtaccatcacactgcctattcagtcagcctaccagagcaacttgcagggagatttgttcccaaattcatgtagcgactcgatctgttctctgtatcaaagttgtagccctatgatccagctaca

SEQ ID NO: 25073 - DNA, 765 bp, Zea Mays
tgaacagccaaccggtccatcagtccgttattcatacacctgaaacgtgctacgcgaagcagaggaaaggatgagttcaacagggatgtccataccgtaaaccttgcagcgaggtagccagccaacggtgaggggcgattccgccacccgccatgctccgatgagcaaactggatcagtgccccacacgcatctggttcaccgatgccacgcaaagcttcagagggcaccatcgaacatccccaggtctctttcagaggtcgggtcggtggcctgggcatgaatcgaccacgacgacgccattagcttcgaggaggcacacgacggcgcgctgggttgagaggagggcactgtccgtatatatatgcgtgatagaggtccgaggcgactagttcgtaactccgtggaagtcgcgggggagaacaacccaacctgtcgcacgtcatcggtgtccgatgaacacagaagtagcgttcgaccacggttgcgaggttgaggaccagcctgacagagaggtccaccagtcagcgaccggatgaacatgctaatgccctggcagcctggccccacacaccagagagtaagcgagtgagtatggctcacgcaggtaggggaagccgacggttggggcccatctgtcagcacggcgcacaactggtggctggtgcagggaagtgagtcgcgtgcgtaagagtgggagagttgggccgcctggcatggaaatggcccagccattattccttttcttttcttttttcttttcttt

SEQ ID NO: 25074 - DNA, 379 bp, Zea Mays
cctgcgcatcaagatgcacggcacgtagtacctgcaactgcaagtaaggataaacagaaagctgcctttgaacgtcagtcactagctagctaggcgtgtatgcagatcgatcgatgagcagcccaggtgacggggggcacagatgaaaacctgatgggaagagggtcagtgaatgagtgagtggttgtgcaacttttgctttcactgtacggtgagagtttgatcccctggtacggtgtgtgcgatgcatgctcggccggtgttccctccaccatttgcccactctttttttttgtgtgtgccctttctccaattccattggtcatctctgactgcagggcaggcaggcaggcggaaccagagctccgatccagacgag

SEQ ID NO: 25075 - DNA, 552 bp, Zea Mays
aggtgactaagttggaacagtttgtaagccaatcaagaataacctcctctaaaaggttgtttcccagaacgggtttgctcaggttttggagcttgttgagaagaggtatgggaccatggaagctattgttggcaagacgaaggatacgaaggaaggtcaagtttccaagagaggagctgatttggccagccaagctttggccgttgagattgagctccgtgactcgatatggtcgagtggaactgcagttcacaccatgccaatggcagaagtggatgctggtgttccaattgctcaaggctccgtgcggatcactggtgatgcccttcttgaactctagcagagaatgaaaatcttggctgttgttatgatgcgtcgagcaatggactttgtccactgcatgacatagcagtagcagcagtactacaagcatggcgagtttcgacggctgcttccaatgactcattaaggcacgtaattgacacctgtaaaaaataaagaatgatcttggcggcgtactacacagaaactacgtacgctgtgttaaaggag

SEQ ID NO: 25076 - DNA, 442 bp, Zea Mays
tctccctgtcttagtccccttctatgctgaattattttctcggggcagccatttagaataacctgagtagaggaggaaccaagcagcccacaaatgatgtctctccaaagatctccgaaacccatatgcttcataacttcaatcaagaaagcccaggaaatagaatcaaaagcttcagaaatatccagcttaaaaaggagtcgtgccttgctttgggaatggaaaagtcttgcagtttgttgcacaagcataaaattatcctgtatgaatctgcctttgatgaaagcactttgaattggagacaccatattatttaactttttcccaatctgttggcaagaattttggtgactaatttggcaaagttgtgaaccagactaattggtctgaaatccttgacttgatcagccccctccactttaggaaccatagtgatataagc

SEQ ID NO: 25077 - DNA, 494 bp, Zea Mays
agatgaagacgctgagtctaacgatagcgttaggggtcagctgatgaagatatacttcataattatccaaaacttccccaatcatctcgttcaagggaaaccgcaatcccgctctaaaaaagctcttgaaaaccaccacttcatcttttttgggctctggagtgatttcttctccggcaaagcgaataagcttcttctcagtctccccgaagtaacccagcttcaccatcatgggtacatcagccttagacacagtatattttccaaagtccaagtggctgggttttgctaggatgagagtgttatagtcttcctcttcttcatcaacatcttcttctttgatgtcagcctgtttagcttcggcagtaggtgcacctttgtcagtagctccatccgtcacaaccaatctcgattgtctcatcacttcggagatcggggcagtatctgtggcttcgacctcctccccgtcacgggtcaccctcgcagttgaacgt

SEQ ID NO: 25078 - DNA, 306 bp, Zea Mays
gtataaataagaacttgcaccaaccacatttggtacgctgcttgtgccatttgctttgttttctcaattttatagctcttgctcactaacgcttgctagtttttcaagcttcctaggcttcggttaaaaaaacacattttcgtcatttctgaaggggaaaatgtctcaagacaagaaggttgtagctgagacgaagctgactgaagaggagaagctctttgaggaaaagaaggctgtaaatccttacatagctaggtttatcgagtcaatggcaaaatcaaatacagagaagattactaaggaaat

SEQ ID NO: 25079 - DNA, 639 bp, Zea Mays
ctgtcgtgcaatcctcaatgataacctcattccacttgttgcattgtcctacatcacacttttctgcatttctcttgtaataattggcttctacttcatctacagcttgggagaatagctaatcctcatcctcagcctcaacctcagcctcatcacacttctgcttgtaataagcggcctctacctcttcggcggcctaagacataaactcatcctcctcctcctgagcacgtaatcctgcctcagttagtgcgatgagctcactcaaccttgatgtgtcgtcctcctcttcccatgtaatcctgcctcagcgagagcgataagctcactcaaccttgatgtgtcctcctcctccatcagctccaccatcaccatttttttctgaacgtatcttacacgagcctcatctgcaagatagttcacagcacatccaatctctgcaaatgtaatgagacaaataagtttgcaaagtcaggataaataaattgtacaagtgaaactatcatgtcatttttctcactcacttccactgagacgatcagcatgattccccaacatctgtttctcggctctagccgcctcccattcccttgcatcatgtgctctcttctcatttgccgccttcaatctcctctgctc

SEQ ID NO: 25080 - DNA, 311 bp, Zea Mays
cacgacctataaagctttcaggctgagccagatttgacgggtttagcggcgaagtttgcggcgaggatcacgacccgaccgtggtgaagaaccctgggattccggtgcgttctgttgaatcggcgctaagaaatccgccatctgttagcgccagaattagaggaaagatagggcgagagaatcgcgaggtttgcgataatctcggcatggaatcctcagcgttcgctgcatcgtttgggggaaggagatgaagccgtccgcgtggaggggatggagcttccatgtaggtcccgcttgtcggtggattgcag

SEQ ID NO: 25081 - DNA, 305 bp, Zea Mays
tgcagccagaacagcacaataagtgcgcgaaatcgaagtcttttccaaaaagattgtccgtgcaaaagtcacctacgggtgcagccggaatagcacaagtgcgcaaaatcgaggtcttctccaaaagaccccgcgcaaatcacgcctacgggtgcagccggtctaaacaaatgcacaaaatcgaagatttccccaaaagcacccgaacacaaagccgcctatgggcgcggccggatcaacgaacgcacgcagcctcatcatagaaatcatagttacacacatacatcgagggcatcacacattac

SEQ ID NO: 25082 - DNA, 328 bp, Zea Mays
tgcggatcctgactgcaattctatggcaaactctatatcgcagtcgggaggcattccaggcaattccttaggaaagacgtcggcgtactcactaaccatgggaatcctttccaagggtgattcaatcatggagaaagcacaagaatgtgtgtcaccctggctaggatggtataagacgagctctccacaagtaggggagtgtatttcgagggctcaggctacgacatccagcaaagcatggtgttgggtcatccaagcagttcctaagatgatgtccacattttctagccctaaaataatgtgatcagttttgaataatttagtttcc

SEQ ID NO: 25083 - DNA, 643 bp, Zea Mays
atgaataaaataatgtgtttgaaaaagtttttgcatgtgcatagtagtaatcctctccccctggcagatggcttcgaataaaaccatgcctaccgcctccgggattggagcaaggtttcccctaggagctgaaggagaagtcgatggagaagggagtgagacccacctccccgcacctccggagctgccattagacttagcccaagttctggccaaccaaacccgactcattgaggtcctcaccagaagccttgagaaccagcgcccgaatggtggaaggcctcaggacaggatgggagattttctaaggctcaagcctcccacattctctggatccaacaatccgctcgacgctgatgactggatgcgcacaataaaaaggaagtttgaagccatcggatgcctcgagaaccagcgtgttcatctggctgctcatcaactttctgggatggccctatcctggtgggataccttcagcgttgccgtcagagatgctacctgggcagaatttgaagccgccttccgagaacatcatgtgccccaagggatcattcagctcaaggaagatgaatttcgggaattaactcaaggaggaagatctgtcagtgagtacatgcacaaattcacagaatcggctcgttat

SEQ ID NO: 25084 - DNA, 361 bp, Zea Mays
gcgatgacactagagaagggggtggggcgctagagaatggtgcacgtgcgactgtgcgctacgtaatgcgtgtaccgtattggtacaggtagagcaaaacagtgtttgtgttgtacaaatggtgagtcgttccatgtaccagagaccggattagaggcccaaaacaggtataactagtctaccataacccctagccggacgactaatcatgagtagtcgacgactaggatgactaatcgtttgctagtcgctctagtcgagtcaaagaccctaattgagcttgcactagcgattagtcggacgacttaaaaaccttgctctagagtctagccattgttctttgcaaggatgccagccccaa

SEQ ID NO: 25085 - DNA, 406 bp, Zea Mays
atctgggaaaatggtggccgagagatggcccacgaaattataaagaagagtgaaaaagatacccacgatgatagagaagcagcaaaggcagttgaaaaaactatagaacttgaagggcagataggtattgtctaattgcttttgacgttatgttttattcttgtgacttcgagcttattcatgttttatattgcagccgaattatctcctcccccggagccctttgagtcacaaacgaaccccaaagcaaaaagtgaagatgaaattattaagatggccgaagctattatggacaaagttgtaactcaactactaaacgaagctgtggaagtagttctaaaagaagactagctattgttgtaaaaacattcggagtactgatgtaatatttgctgaacaaagtgtg

SEQ ID NO: 25086 - DNA, 337 bp, Zea Mays
gacagcagtgttcgtcctcgctacgttccgtcatagggtacaccaactcgtccaggaggaggaccatgcctagctcagtacactccacaggggtctccactgacacctcccactcgtcaggctgtccccactggcaccccggcgaggcctacatgacagaagactggccctacatgcttcaagtgcagtcaggttgggcactatgataatgcttgtctggtggggaattctggtacaccatctcaaaacaagcaacagactcctagcaagggatactctattgctagggttaatcaagtcagtgtagatgctactcctgatggtgctgacatcgcac

SEQ ID NO: 25087 - DNA, 290 bp, Zea Mays
tcagtggtcgaagaattcatggatgtgtttctagaagaattaccaggaatgccaccagaaagagaagtggaattctacatagatctgatccctggaacgacccccatcgcaaagagaccataccgcatggctcctatcgagttagcagaactgaagctccaaatcgcagatcttcagcaaaaagggtacattcgtcccagctcatccccttggggagcaccagtcctgttcgtctctaagaaagacgggagtatgagaatgtgtattgattaccgatcgttaaatgaagt

SEQ ID NO: 25088 - DNA, 428 bp, Zea Mays
gcaggggcggcgagcatcacggacaccagataggaaggggatagcgacggctattgcgtgggcgagcaggggcggccagggtcgatggcgtggtggtagccgaaatcgatggtgcggactggaatatggtggcgattggggagtgactcccaggggcactcatgaatcgccttcaccaccatttggtcctctactgtcgccgagatctggctggatggagcggatctggttgatgcgccagtggttggatgagggcgacattcacggcgaatggaaggcggagcgcgagcgagcgaggatggaagatcctctcgggcggtggggaagaatgcccgcggatctgttgcggtggcagtggggagaagggtgggagatccgcgggcgttgattggtggcggcgcggtgtgctagcgctgatggtggggcgg

SEQ ID NO: 25089 - DNA, 534 bp, Zea Mays
ggcactggcacttcctcagcaacaggagcagaaggaccggcaccttgatccaagctggacacctgacgaaggcgtctcttcttctttttctccccctcagcaggaaaagaggcttggtcaactcggcgagaacgttttggacgaacattgataggcttctgagcgtccaaggctttgtcagcttcatggatgggcaccaccaccaatgtttcagcaggagcgacatcagaagaatctccagccaacatatccagcatggcacctatctctgcatcactaggatccaaaggcacttcaaagtggacctgccgttcatcatcaggaatttctccaagtaaagcaaccaaagcactaacttctttggcagagggtcgcactctaaggcccaaaccgccatcagcagaagaaggacttgacacgaaataagtaaaggctttggaaggaggcaggttccaggccgagtacgcaacaggggcgccaacgtttgatacgttgcctctaagtatcatttcaagccagttcaccaagtccaca

SEQ ID NO: 25090 - DNA, 663 bp, Zea Mays
gaagaatcggaccaccgagtgccagtcttgctcgccgtcgatttaccctccgttgtgcgtctaggttcatctctagggtccgtagaagccggcgcacggaacaccctagcccgaggtcatctcgagtgcaccgaattgcttgctggggctcacgttctgccgcgggcccgcctaacttcgtgggcagcccctttgtcgccaccttgtctggtaagaccactcccatggcgttcaccgttctgtctactatgattggcatgaattggagaagtgagcgaggtacgagagctctggatagctgttctccggcgagggcccgccgtatcgtgcacgacgccgccgttgctggagttgttggatgcgggaggtgaaggagatagttgtatgtcgtggatcacataatggacagtggagataagatgaagccatacccgttcatttgttaatccgatccgttgatcttgatccgggtggctgagagtagaggtagacgtgatcagctctagagccatagatctcgaatcgggcgattatggttagatcgggtttcataaaatctaggtcattggatctcgatccagcggctgatggcgcatatcagttcggcgagatgcagatctaatttggaccgttcggatgggatcggacgacccaggcttcaag

SEQ ID NO: 25091 - DNA, 477 bp, Zea Mays
ggcaatctacggcaaagcatcgtcttcttcgtttcggtcgagcagagcgacactgcccagctccccgcggtggaggttcatcggcgcgccccaaatccggccatcctgttcaccattctctaattcattcgctctccgcccaacggataacgttatgaattcatttcccttaccaatttctgccatcgtcgagcgcatggctcggtccatggaacggttaaatacacggcggggaagattgctccggtgagcgattgcaggcgccctaagctacaatccgactctaacctcagtgcaccaggtaaccgcgataatgagaaatccggggagaggagtcataccggttgaaaagccgagaaggcgctcggccacgttcgtgcggatccaccgcactaccgccgagggatcgagcagatgtcggtcgaaagtgcgattggccacccgcacccatatggtccccggccaccggtaaacccc

SEQ ID NO: 25092 - DNA, 409 bp, Zea Mays
gtggatatcaatggggaagtaaaaagatctcggggggagtggatttggtcgcggggtgaagcttatcaactgcgcctatagccgtgcgacgtggtcggaccgccggtgtcgccatggtactccggcgacctcaattatgccacgctgtagctctttatcgcgtattagtaaccgtggcacgcctaggcttgccattttagaaccgttgcaccggtgggcgccacgactgagccacgagtgactcatctctctctcctgctgccagccttctccttcaaaattcggagccaccgccctcgggcactataaattgatggtgccgctagctccacaaggtcatcacgaagccagagcacccgcccttgcctctgattagccaccatagcctcccaatttctctcttccccca

SEQ ID NO: 25093 - DNA, 386 bp, Zea Mays
gcgggttgattcagttgtttctcggggtctcttacgcaaaaagcccaggccgaaggggtatcaaggtattctggctgcacgatcctggatgagtggcacggattaaatcaagcgtcgtctgaaccggtacgcagcgcggtccgtccgaccaacggtctacgacatagattcaattaccccgaactcagccatatctgcccgatcagagccaacagctcagacttaaataactgcgatggaatcctagacacacgattcagatcggatggatctgtgtaactggccgaaccggtactctgggttctaatcccgaccggcgcttctagatccagcggtccgtcctcatcttcttccgccgcccaaagccagccggcgtcagagtcctg

SEQ ID NO: 25094 - DNA, 358 bp, Zea Mays
ctttgtcataatatcagctggattgttatcagttctgatcttgcataccttcaccaaccctttttcaatgatatcacgaacgaagtgataacgaatatcaatatgtttggatttctcagtaatcatctgatctttggtgagatgaatagcactctaactatcacaatagatggtaatgcaagacttaattccacatagctctgaatatatacctttcaaccataaggcttctttagtaacttctgcaattgccatatactcagcttctgtggtagacaaagcaacagtatcctgtaaacgagctttccaactcacagcacaatctccaacagtaaagacataacctgaaagagatctc

SEQ ID NO: 25095 - DNA, 355 bp, Zea Mays
gcacaaaagctaaaatcaaagctagttcctccagaaggaggcaaacgactcaacacaactagcaatagctccaaataacacatctcacacttttgaatgagaggaagcccaaaagacaaattctccccctagatagaggaaatgggaaatctcaaaatctctcccccttgttgacaagtgaacttatcaagcatagacagaggtagaaagaaaaaactccccttgacaagagaacctcccctgagaaaaaacagaaatgcaacagagagtatgaaatagagaaaatgcatgagcttcaagagtataccagtcagagtgtaaaaatgctataagtggtattgtgctaagtgtgcag

SEQ ID NO: 25096 - DNA, 625 bp, Zea Mays
aacacaaagaatattaaaactagtgctgcatggacatctaatatggcccaaagatgagctggctgataagtttggcacacttgcatgtatgactgtcatctgtgtggtggactgagcttcaatgtggacatgtacatggaattagaattttatactaaatgattgtgagtttatttccttttaatgattatgacattttccatcctaaggcctaagggcatactcgtgcctttgtctcttgtatgctttattttctttgtttgtggtttctcctaatatggcttctggtaggaaccaccgaactacatcgtgttcttgagtatttagcatgcttgtagccttgtacttgatgtctctgtttagttatttattcacaaaacgtggagaaatcttgcatgtattagcaacagcaaagaagtggtaaagaaagtgtatatcaggtggttgttgcaacttctttaagtatgtaaccggtaggtgtgaaaaatcgtatagatcctacaaaacttgcaatatgcactttattattgtttatttgtttatgcatttgtttttttactttcatgtttttaacgaactagaagggcattggtttcttttcacaccatgcaatttagtaagggtc

SEQ ID NO: 25097 - DNA, 437 bp, Zea Mays
agaccaggaagcacggatgatctcttcccagatcatgtcaaacacattaatgcgggcgagactgttgggagcaaggaggagaagggagacccgactctccccaaggacgttcatttgattctcgcccttcgggagaacggtcattctggacaaagagttaaggtacctgtagtacctatgcatgttagcggtcgttcagaactcccgatcattagagacatgaataaattcagtctcttcacgcatgagcagcctaatgttatgcactcgcatgttgttgccctgaatatcagcatcagagaagcccagaatatgggcaaaacgacgataactgactttgtgccagttatcctggatgaagaaatacatgacagggtaatcatacccatcggcttcctcatctactttcttgatccagagggtggcataaaactgag

SEQ ID NO: 25098 - DNA, 342 bp, Zea Mays
tcagaaactggaggcctgagatgaatacaaagtttgcaaagaaaggcatgaacccaacaaaaaactataaaatctcagtaggtcagtgggcagtatttctagagcagaggagcaaccttgatttcatatctctaagtgatgcaaattcggaactatctaagaagaacaagtaccaccaccacctaggcacaggtggttacaagcattgaattcctaaatggagacaagaagacaccgataagaaggtcgctgggttgccgatgctgtccgagcaacgtggtgaaactctatacaagaaacatgatcgatagaagaaagatgtcaaattactttatggaggag

SEQ ID NO: 25099 - DNA, 294 bp, Zea Mays
cgacggttctaggtgcaactatgctactatcacaaaatagagcacctcatgaacataattcataatctacaagaagaaaagtatattgagtaaattactagtgttcccagtagtggactatttcatcacttatcctaggatggacgctctagcacaagtagataaggagtaaaccctagaaatacatctaagagaagttagagcacaaaaacaatagaaagaacacaagaacaatgcatttatctcgtggtttagattgctaccaaagcttttactccatgttgttgaggaaac

SEQ ID NO: 25100 - DNA, 417 bp, Zea Mays
ggcagacagggcagagcaccgagcattcatgactcatatccttcagcacactggtgttccttttcctctagtgcattctgctccgcctcttgctcttcaggctatagttgtgctagccatacaatcaggaccctagctacactcttttggccctaccatctctccgctcaggccggtcaccttggacttctctacccaggtcgtcggaccagtcaatgctcagccaccagtgcctccagcgtctgttgtaaccactcctattgtggctatctctatgactgctccaactccagcagatcaagcaccgcagccagcgtctgatcagcaccagctccagcctctacagcagatactggatctgggactaactccaacaccttgctcgtgtttgcgctgcttcctcgtcctcaacctgat

SEQ ID NO: 25101 - DNA, 633 bp, Zea Mays
ctttgtcctgaccatgggtccggtgacggctacatggtttacccttcaatagtggtatttattttgttgtttggttttttgaagtcggagctagaccctctagtgatcatatgaattactcccatgaagggtggatcggcgaagtcttcttgcttaggtggtgggggagtggtagttgttggtttgcatgctgtggtggtggtggcagggctaatatttcttggtgttgaaggcatggttgctgggggaagggattgtggttttgttgttgggggtaatatgggtgtttgttttggtattggtggtggtggttgcagttggtaggtatgagcgatggatctttgtttgtctgtcgaggcggccctagccattcggtccttgatcgttgtctttgggaaatccctaatgggttgcgctgagtcttcaccatggaagacacaataaaatcttttgggttgttgaggacctcgacctctgcccctggtcacgttgccaccgcagccttgttgcggagggttgttctaacgccgggggtggacctctcctggttgttgctggttttttatgttatggacttgtagccaaccacattcttgttgggctgggtcttgttgtggaggcctgattcatgtc

SEQ ID NO: 25102 - DNA, 353 bp, Zea Mays
gatcagcgcttacttaccttttttctacctcgctccatcttttccttcttacctctacatcgtcttttataattactcttcttcctctccatccatctatggccggcaaaaacttatacaaaaactaggggctttatggccctggatccgcccccgtgtgagaatgtggcactgcaattctatgtgtgacacaacatgggcctagaggtcaactagagccaagaggatataatcttgggatgagaattccagtatggcgcatggcatgtcactaccggaatccggctctttatcgagtgtccactcggcaaaaaactcagttccggtagtgtgtatatatgatggtatcattt

SEQ ID NO: 25103 - DNA, 558 bp, Zea Mays
ggaagatgcctgaacctcgtgtcatgcagctgctgccagtaggtgtggctgagagaccacatagtccgtttggcagcatcgctgaccgaagagcgtaggtggatagcggtgtcagggactcatgagctgatagagtcttgaaccccctatcccctgcatccatcaccctgacgtggatgtgagtgatgtagtagaaagcccggggaggctcgcacactcgccttgtctcatacaagggtcggacgtaggttctcaacgcatgcagcacgtcttgcagtaggttggggacgtgccctgtctcgaacattgatgtgtaatgttcggtgacagggcccaaaccccatgaaatagtcctgctgagcatcgttggcctcctcgttgacgttttcgtcgtcatcctcctcgtcgtcgtcatcctcatcatcatccctagagtcatctgggtcgtcgcctccgggtgcaggagcttgaactgctggtgcaggcggcgctgaggttgatgacctagctgcgaaggccagtaactctgccaatggggtgggcgtcggcggaagttcc

SEQ ID NO: 25104 - DNA, 602 bp, Zea Mays
caaaatcaaagctggattataggacaacaacttgggttgtcacatgaaaattggagaaaatcgttcctcaaattgctctatcaggcacacttaagaagatcgccatggtacagtgcctgcaaatgatcgcaaattcactgaactcgccgctggtgacccttgcgcccggattcacgtcggcgctgtgatttgtgcccggtgatgcgcggataacgacttagggtgaaaagatcttcgccgtggctgaggtcgaggcacagtggccgccctgttgccgtaccaacttgggtcacaacgtggccgcgcagccatcgcggtgatgatcaccgttaacccgagcatgccacgctcctaccttgttaccacgtcgcaataggtcgctatagatggcctgtctatcggctgagtcgttgctccagtgaatgccacggtaactcgcgccagtgacctccatatctctctggtcgcccgtgtgtcttccccaaattggatgccaccgctattgatctctattaattgatgccccagtgagctccgttaggttattatgcgcttagtgcaccagcttcgcctctgattatccaccctagcgtcccaatttt

SEQ ID NO: 25105 - DNA, 294 bp, Zea Mays
tgctgagccattagctcctgcagagtgggaggcggtggaggagcgcactcattctgaccgcgacgctgtctcccggccatctgaaaaaaccacatatatacttaatacacatcttcaagttcacggtttaatcgcggtgaaggagtcaaaggcaaattgatagattctgacataaacaaaaggatttcaaaaggcataaactttccttccaaatttaaaactgacatcatccatcaaccatgcttccaaaagagtttatcacggttacatcaatggtcccaaaaagactcaact

SEQ ID NO: 25106 - DNA, 440 bp, Zea Mays
agaaatcacagtccattctcaatgcaaataccaaacggtaagctcttgcagacatccccatcaacaagaagctctacatattcagctatgccagctttacagtcggtgcagcaggaatagttctcagtttctacatatcggtatagtagatgtttacaccatagatatgaaacttattcaatttcatccgttctttgacgaagtaaaccaaattgatggccctagactcctagagtgggtgcttgaaaattccctatacaatttcaccctttgttgcggcctaattacggtgctggatcccattgcatttttctgtgtgtccaggaagggaaacaaacaataattgttggcacatgaggatgatgaaatagcgaaagactggaatgctggaattgtgctttcttttggatcatttgtgtactaagagtatccagtatttt

SEQ ID NO: 25107 - DNA, 891 bp, Zea Mays
ttggaccttccaattggcaccacacgtggggaaaacaggggggctggcacctccgagggtggggtggttgcacgagaagaatgcacaaaccgcagggtggccgccagcaccggagtggtcaccggcgtgaggctgtggaggtaggaggaggcgccagcgggagagggagaggttggagggggaggtagggagacgagggtcgaagatgtcattctctctgactactttgttatgtcacaacaccgtaatgatacatctggtagtatatgctactcaaaattgcagaacaaatggatatagcgtaagacaatcctactatattcattaataagaaagcatctcactattaataattaatctgagccggttaaaatgtcatcataatcctgaacccaggccagatcaaccatacaaaataatccatcccccttttattttcagctttacattaccacctcccagacccaagattgctatcaactgcctatgtagcagagcaagactcaagcatgctggcatgctgcaaatccatgacattaactcaagtcaattatcctactagccaacaagacgggaccaacagccaccgatacatggacagaaacacgatccttggaggtcctaacaagtaatagcctacaaagtacaaaccactatgcagcccaatcccaattcaaacacttgtctgttccttcatacagccaattccttaggtggtaatcagttattggaacccacatcagaagactgcgatttgaatccaaagcactatgtaaaactgtgatttaactgggccagacaggtatctatcagccagggttgctactgactaccagctcggcagaggactcgcaaacatctagcaaactcatgacccaaactcaaactggt

SEQ ID NO: 25108 - DNA, 478 bp, Zea Mays
aaatgagattagataacatattgtgggaagtttgcggttggagaggaaggatctggttcaaagcctattatttctgacatatcctggaacacgtacaaaaaactgcatcctaatttgaccaggactgacaaagttctagcttgtacgagatcttttggtacctttttattatactattcagaatcatcggaggttgctcttggttctgttagaaggggaaagagcttgaggaatgatgtgacaaggtattttgcgtattttacataagaatgatttttttagactttacagtgactagaaagcttttgttgctgctgctatatagattcaactttcaaatgtctcagcaagttatgcaagtgggctccccttaaattaggaagatggcttgctgtgggagctattgcatctgatgaaagaggtagaatatatatctcgctgactgcgttggcgttaaagatggaatttattcatggac

SEQ ID NO: 25109 - DNA, 558 bp, Zea Mays
gcagaatgttattggcttcttgttggctttattgctccattagttctgtagactttctccctttagtggggtgcaaagaatgttagattacatgattatcttttcatgatggcaagaacaaggtttaggaagattaggagttttggtttcaatagaactacttgtttcgtggtgctttgaggtgaggtgtttgatcttcttatacattcatgtggtgtggatgtttcaccatttaattaaaatgaattgttgaagttggtaagggttgtgcttagtgcatattaccccttcataaaagagtgttgttttaagacattgatgttgatgtatagctgcatccaaattcgatggtgtgaaattgtagtgttgattgcatctatgacttgctttgagcttcattgcatgttgtttcatgcttgatgtcaggttgtgtactttccttagacaagtagtccaaggtagaagttcttgtgttaattaagaccaataatggacccatgttttgaatggtggtgctatatggggtaccttgggtgttttgcttggagtggccaaatt

SEQ ID NO: 25110 - DNA, 284 bp, Zea Mays
aacatcctagtctattaatacatcaccccaccctattccaaggttagggtttcccacaatgactacgcagtttagggtgtgttaagttgtgtccagtgggtccctatcagctcccgcacaagtaaaatagaggatcctaattactatagaacaatttagtagatcgtgaatgcaaaaaaggtattcctctaacgtcccttgttatagattatctctttcttgtctccctcttttcgcgacatgctcgaactgaaccggttttagggactcgagatcacagtcac

SEQ ID NO: 25111 - DNA, 398 bp, Zea Mays
agatcatgaagcggtatgcaccacggaccgtcggatcagacatcagcggccacgattttattagactggatcaacctacacccgcccgatcacaaatctacgttccacgtgaatcccgactgaagcgttgcgcgcgatctaatcgcatccgcacgatccagatcgaacggcgcccgatcagcacaggacacaatctaatcacatccactagccacagatcggacggctgacgcgctgtcatcctcctcccgctccccacacacggcggtggcgctgacccgaggcccagacctcgccggagcggccaaaccccgttctagcgcctcgttactcgagcgattaggtgctacgcgaagccaaaggaagggtgaacttgattgtggtttcggtaccttgaa

SEQ ID NO: 25112 - DNA, 570 bp, Zea Mays
ctgctatagttcacacttattttgatgcctctatttgtgtctttcgcgttgactctacatgtgagtcctctgatgttctttgtcaggtactttttgagcaagggacttttgcctagttttcaagtcttggtgctcatgctcagaatggtgtggctaagcgcaagcattgtcttcttcttgagacttgtgctcctatgcttgcctcttccatccctcctcatttttaggtcgaggttgtttctactgccacttgactaacattaaaccttcctcagctcttcagagaaagatttttcttttgagcgtctttgtggtaagacgcctgaccattcaagtctttgtttgtttgcttgtgtctgctatgtgtcgctcccacctcgttagcgcactaagtcaattgttgagtcggttgagtgtgttatatcgggtatagtgttgagcataagggatatcattgttgggatccagttgctcgtcagatgaggatcttttgggatgttgtctttgatgaggttcgtcctttttatccatgtccttcttctgatgcttcatcaacatccttggttgatc

SEQ ID NO: 25113 - DNA, 275 bp, Zea Mays
catgagcgaacatgagttaggtcctaggagaccgactggccctgcagttactgcaccaaccaacgcatcatcagcccgcgctcgagcgcgtcgcgtgacacgccaccatgggccaaggccaccttttcgtgatcttccaggaatgcccacctgcggccggcccggacggggttttaggtgtacgacgttggtagggtacgcgacgggtacggggagatgatggccctgctttcagcttcacgagaagcggagaagctatgtaccgtagtccgtag

SEQ ID NO: 25114 - DNA, 786 bp, Zea Mays
cgagaaccatgcttcatgcttacttttgtcttatttgtgacgtttctcgcttaaagatatatgctcattcctgaaattgactctgctattgtgtttatattccttgaaaggtgatgcagttttcaaccaaaattggatgtgaacaaagtttgttaccaatttcatgtgcatgctcttggaagtttggattgaagaatgctggactgctgcttcaattcatgatcagggcatgaacaaccatggaattgggtgcattgatcgtttgttttctttcacaaaaaaatcacgaccatgtgattaaagcagtcgtaagctcagttgtatcttatttggtgggggagagaaagcgcatatagctcagtttaaaggaaaatttaggtctggagtccttacacaccttagcatgcaaggaggacgaagctgtcgtggctgtgtctggagcgagcaaatgtggtggaactttaatagaagagatttattcccgtggaagttggaactgaaaacaaatgttgaaatcatgattcagtttatgtactcaagcctgctcatgatgtgaattaattggacaaaaatgttggacagatccgatggcccttgcattgatgtcacattaattcaagaggttatgttctttttcctgaaaatgaactgtggtcaaggtctgagaattaaccatgtggttaggttccatactgacctgaaaatctgaaataggtactttgcaattggtccttgaaattcgatcaaacgtgctgagaggctatctctagcagattatctcactca

SEQ ID NO: 25115 - DNA, 349 bp, Zea Mays
ggaagctggaatatagccagacgaaggccaatgttcgtacttaatctattattatcatcgtcatggcatatatatgctgcccctgctgcttgtgtgatctcaagtgtcgttttgattttgcagatctcgtcgccatccgttcctgcagtcatggattcctcctattcagagcgaattgtagagaaggctactagctgtttgccaagactagctctggaggcgccaaactcacctgtagtgcctagaccagaagagacatccctgctgcaggtggccgaacagcctaaagctctgaaggagcaggagaaggagaacgaggaaggtgctagccaaacatgtcaagcatcat

SEQ ID NO: 25116 - DNA, 509 bp, Zea Mays
tagttactgaggtcccgctgcagcttcggaaatccaatagtctttgatagagtattaacaatctttgcttcggcccggtcaggattacaccccaaaatctcttcgtacacaccgccaaatagcacaaattcgggcttgtatctgccagcaagggcgaattctttcaattcagaaatatcttcatcggacagttcttggccacccaggtgttgtaggtccaactctttgtcctccggagccttatctatggatactttggctatgtctttctcgagagccacatcagatataagtctgtcaatctctgacaatgtggtctcaaggttctcacctttaggtgtggcttcattagcttcagcttcgacagtatcttcggtattggcaggcacaacaattttttccgccgaagctgagggcagggtcttttggatagcttgcattacgtccatcattcgtcgtttcttctgacccctggcatttcccatggtagccgaagcagtctcctttcc

SEQ ID NO: 25117 - DNA, 343 bp, Zea Mays
ggatttaccatcatattttcatacggttagttggtaagtcttgttataaactttgatatattaacaacacaataacttagaataaagaaaatagaataataccaacaaaacagagggaagaacatttcaaattccatacccaaaacctgaagcctcctacagtgaaggattgcagttacaggctgctgcaggtgttgccttggcccctagagcgtggtcttggcacttggaccgaagatttctcctgctgcttctagccggcaaagggcagggttggccaccatcgatctgccttgcgcattgcacccttacctagcccgctagctgccttgaagctgtccag

SEQ ID NO: 25118 - DNA, 363 bp, Zea Mays
catgaatagaggtgggaaggcttgtctgcttgtaggttgaaggtgaataaggaagatgaccattaggggaggagagatatagtcaactggccaagtatggaggttccacacttgagctgtggagttccactcaaatacgtgaaggttctatgccaccaaaaacaaatgggaagtaatattgtactgtgtatttgggtttgataagtttttatcgatctttgcatatagaaattgagcactttattcactttagcatactggtggtctccccttgataatatgatttttctatacttatttttgaaatataaaatgaattaaacacttcaaatgccttcaagccatatccttttgaattgggat

SEQ ID NO: 25119 - DNA, 351 bp, Zea Mays
tttcttcctcttttgccctttccacttggatagctttgttggagaggtgagagaagttgtggaagtcttggttggcgaggatggtcttaagctcgggtcttaatcctctcagaaaacgggccatttttctggcctcggtgctgacatcctcgggcgcgtagcgggccagttctgtgaacttgtgcacatactcactgactgtccttccgccttgagttaactcccagaattcatcctccttgagttgaactatcccctggggtacgtggtgttcacggaaagctgcttcgaattctgcccaggtagcatctctgacggcttcactgaaagtgtcccaccatgctaaagcca

SEQ ID NO: 25120 - DNA, 420 bp, Zea Mays
agcaaaacaccatcgccaactaacaccccaccggagacacaactcgtcaccaggagtaccccacacaatagggccgcggcgccaacaccagaggcagaggcaaaggccgggcttcacagtcgcgaaggttctattgcctttttcacggtgaagactacgcacaccccaccagggattgctccgaaaccaaggccaccaaagatagaatggccagaaatcagccagccggtaaccaacgagttgttgcgcatacctaccatccccagcaataccaccaacaacaattccacaacgatccaatccatcaccagcccaatcatatgtaccatcaacaccaagagatccaagtcctccctccacctccacaccactaaaatcctccaccacccccaccagcacccaaacaagaggacttcgccg

SEQ ID NO: 25121 - DNA, 332 bp, Zea Mays
gtcttcaacgaggttaacagccgggacatggagaaggtcaacgtgttcagcggcatctttagcagctggatcttcccggcggtcgccggcgccaccgccgcgttccaggtgatcatcgtggagttcctggggactttcgcgagcacggtgcacctgagcgggagactctggctcgctagcatgatgatcggctcgggaagcctgctgatgggcgccggcctcaagttcatccctgtcgatccgggcagtgaaggctcgtctgaccgccacgatgggtaccagcccatccccaccggccccaacgccgtgtgatttccaagaagacctcctgc

SEQ ID NO: 25122 - DNA, 286 bp, Zea Mays
agcatccatgatatgaacggattccgtggcttgacctatccttcccatgtagcataacactattactgaattgatctcgatgttcactcccttcaatccaaactatagcgaccttcaaagtgaagggtacattatataacttctggttcagcgtttggtcaaggttcaaggcgatatggtagtcttcaatgttatcaacgtgccccatactcctaaggtgctcagagtatggtttccccttaagtatttcaaccggctgtttaataactaccttctctttctcaag

SEQ ID NO: 25123 - DNA, 337 bp, Zea Mays
cggctggtgctggatgaccgaggcgagcatgccacaactctggagcaacgacagcaacatggcagcgaggcggcagacgatgtggaatggtgtagagatccccgttgctattgcatcgaaggaggaccgttttggtttggagatccttaacagaaaaaccagaggcgtcaaactcaatggaacagttattgtcgcgagtaagctgtcgaacagataacaaattacgagcaagcttaggagcgacaagaacattattaagatgaaaataacgatcagctataggtaagagagatgtgccacgaccagatgaagggatggactgcccgttaccgaccgt

SEQ ID NO: 25124 - DNA, 564 bp, Zea Mays
actctgaaagggcgagtgattcttcaaccgctgtcggatcatagaagggcctcaacgcgagcctgaggaggctgtataggtcgatgaacgtgctggtgtcgtgccccctgccatcgctcgtccagctgatggcggcctccaagaggcctagagtctcaaactgcgcagctgtaggttcagtttttgctgctgcaaaatgaaacccagttctcagttgttgcgagtatgtgcactgtggcctgacaacgaattcgtattgatttgttctgtgaagaggcagatcatcagggatctcaatcgttctgaatgtgttattttccatcatttttttgtatctgttgaatctgtgctgctgcttgccatttctatcttaaaataaaatgagagggaaaaccttagcatcaatcgacaagtctaaagcctgcagtagagtagggttatttgaaatgattttgaatatcagctttgtggcacatgctaaaaagattcagagatgagaggttgccaggatttcgttccggttctaggatgcatattgtacaactgtggatctccttctctcac

SEQ ID NO: 25125 - DNA, 683 bp, Zea Mays
gctgcccaaattaactactgggcaagcattactgacccgaggtgaacctagaacaggctttagttgggttaatccgaccctgactacacacgaccacgacgacggcgaacaccgaacacaatcccaagcgttccggttgattgagtgtggttaagcataaagggtcgagctgatgagtatcacgagcacgtacgggtgctaaaacatgatcaaagagagcgggagtagacctgggaatggctggccacggtgaggtctctttcacggtggcggaaacccgatttggggaaagtctcgaattggcgagctctggtggccgatttggggtacgagttggtgttttggttgcttgactaccatgtggagccgactgcacactcaatttatagattccaggggtggtggcgcctgaattggagatggcgcggtggcggccggagaggaaagaggtcactggcgcaagtaaatcgtggatgctatcgtggcaagaccaccggcgacgagtggatacaccaaggcaatgtagtgcgacgtggttaagggcctggggcgtggcacaatcgccgtgaaggacgcaaactctagtgacggccgttaggccacatcgccagcgcaaatggtcgagggatagcgtggccacagtgttccgaactcatctgtgacgagatctttttacggccgaa

SEQ ID NO: 25126 - DNA, 369 bp, Zea Mays
gagctggcactcgagagcacgcccaacctgtgccccctgtcggacaccaccgtgtccaagccacgcccgcacctataaaacctgctttgacccccagtaacactccccgcacatccttgaactcaccccgaatagctagtcaccagaatttcgccattgaacctagctccgccgcccaccgttctccccgacgcacggccaccgtggccagagctcaccgctccaccccagccccaactgagacatccattaaactccttatgccctagaaaagctccccagccattccccgagcttgctaccgcgctagtgccaccgccatcgttcatcggacttggttgctctaccggtgaacgtggaccggcctcc

SEQ ID NO: 25127 - DNA, 950 bp, Zea Mays
gaatatcatgattgttgaaaaacttgtgcaaaaacttcagaagcagggctttattgtgtgtctctaatcttaccactcccaggcccccattttttagtctgtgtaatcatactccaagcagccagagcaggtttcttcgaattgacgtcatttcctctccaaagacagtgtttccgataagaatcaatcttcttgaccgtggtaaccggaattttcagtgtgcatatcaaaaaggtcgggagagctgagaacaccgagttaacgagctctagcctgccagcctgggaaaggtgagcagaggtgcatgataatctcttttcaatcctatgaatgagcggtaaaaagtggcagattttaggctttgacagaccaagcggaacaccaagataggtaaagggcattgaacctatctgacagttgagggttccggctaggatctccattttagcgggactgacattgatggggtacatacttgatttattgtagttcaccttcaaccccgtcgaagttgcaaaagagttcagaacggctctgagaaaaaatagttgtctagggcaagcttccattatcagtagtgtgtcatccgcatattgaactatcggaaaatcttgaccacaattcgcggccaggggtaacttgagcaggtcttgctgtcgcgctttattgatgatgctctgtaacagatccgccgcgagaacaaaaagaagaggcgagaggggatctccctacctgaccccacgcttgcaatgaaaggttttccctggaacaccattaaggaggactgatgacgtgccagaccgaagaatatccctaatccagctcatccatctgggcccgaagcctccatgcaacattacctgaagaatcaactcatgctcaagagaatcaaaggccttttcaaaatccaatttgagcacaataatctctttttttgaaatatgacaaag

SEQ ID NO: 25128 - DNA, 276 bp, Zea Mays
ttgcaatctagaggggtaagataggtatcgacatatttgtctcccacatttaataatgatctccgtcatttcccaaaacgaaagattcattattccgtattcccagcacaatgatattgcgcgcattgctaggaacttcatcatgaagatgaacctcttcgtgaggcaaatcaccagcagggcgagttcatcggaggagagttatttacagaccacgtgaatctgcaatcagaacatatgctttgactaaggccaatggatcatattcgcaggcgt

SEQ ID NO: 25129 - DNA, 356 bp, Zea Mays
tggcgcacggctgggtactaggcgaagtgtgccctcgtaggatggcaaccctaggcgtccagttggtgcgaagtcctgcccttgtggtggatttatgtggtcgcaacccggtcgcgtttgtgcgtgaagtggaggccgaggccgcgaagactgtaggaaagtatgtgccgaagacggaggctctgaggagttgggatatccacggttcaaatgttaggttgaactgcgtttttgagtttaaccgtctgtcgtatgccggctacccgggggacgacgatgccgatgctgttgtccgctaggggaaaaaggtgatgacaacgactgacgagggcccttcatgcaaaacagcaccgagc

SEQ ID NO: 25130 - DNA, 360 bp, Zea Mays
ctgattagacatcgcagaggtttgaggcaaggggatcccctctccccaatgctctttgtcctggtgatggatgtgctcagcagccttttcagagtgccagaagaaaaacaattgttgtctagtctggaaggtgccattgtgaagtccagattatctctatatgcagatgatgtagtcttgtttgtcaagcccagggtggaagagctaaactgtgtcaaactcattcttgactgttttggagaagcttctggcctagtaactaatttgcacaagagttgtgccatcccaataagatgtgaggatgatttgctgcaggaagggtgtaacattctgcagtgcaccccttcttccttcccttgc

SEQ ID NO: 25131 - DNA, 316 bp, Zea Mays
gtggcaggccatagtgcacttgagcaagagcgcgatgtggcaggccacaatgcacttgagccagagcgtgaggcgataggctcaagtggacatatgctagagcaggaccacaatgcatttgagcaagcgcgcgaggcggcagagcacaatgcacttaggcaggaggacgagctggcacgccaaggttcactgatgcgtgatgatgatgactatggggaggactacgatggagaggccgatggagaggctgatgacgaggttgttacaacgacacagacaacgaacttcaggtaattttattttgacgaggagttct

SEQ ID NO: 25132 - DNA, 355 bp, Zea Mays
agcgcgattatgtatgtggtttgctgctgaaccagtggcggcaaccacagcacagcatctgaaatcaacaacctggcttttaaacttacaccctgtcctgtctgaaagaaaaatacgataggatcgtcagcgcgacgcgcgcctaagtaatctaatcatccgctaaactcactcttgccagcctggctttgttctcgggtcacagctactttcttttatatatgtttattgggattatgatgttgttcagaggaattgatgggatggttagatagagagggaccggttcttcccatcctcttgatggcaactgctgtccactcacctcaacagtgaccactcaccggtgacgagc

SEQ ID NO: 25133 - DNA, 441 bp, Zea Mays
cgaaggggtcggggccgggttcctcctcggtgcacctaggcggttgcctggcatgaccgtggcaaagatcggggtagagaaaagagggtgaccattggggcgggattaatggactggcgtgctcggggctgtccatggcgccactcggtgtgacgtccgcagtggtgtgtgtagcgggtggaagaagacgaactggcgccatcagattggtgtcgaacgtctcggattagatctaaagataaacccctctcgccacttgatccctacgcatagatcgtagatcgaacgactcagattaggagaaccctagacccttgatccttgatcacacggctgacattatattatgggtcggtctaatctaggcgcttgattcccgatcggacgactgagatctaagaatatcccttcggcctgggaatcttactaaatagtccctag

SEQ ID NO: 25134 - DNA, 644 bp, Zea Mays
cggtttggtgcggtctagttcaatcagaggggtctacgagcaacatgaggcttgagggaggctagaacatcaatcagagaggcttgaactaacctacagagagctggctacggcgaggcgttcacggtggcgcagaaaacaactttgggggaaacgcgaaattgggaggctctggtggatgatccgaggtgagagctggtgcactaggtgcataataacctagcggacctgattgatcactcaatttatagactctatcaggagtggcgtccaatttggagagagtgcgctggtggccggagagaggggaagtcactagcgtgagcgttatcgtggctttcaccgtggcaaagcctccggcgatggatggactcactactacagttcactacgacgtgttaaagctcctaggcacgtggcgcacgggcggcaagcggccaacgccggcgaggattatcacggccgaccatagagcaagtgggtacggtgaaccatccagtgaccatgtccgagcttatctgtgcgccaagatcttttactcccctcggttatccactttgcgtcgagcacgaatcacgacgatcggcgcgaatccgggcgcgggatcaccggcggcgaggttcagtgtatctgagatttttctg

SEQ ID NO: 25135 - DNA, 418 bp, Zea Mays
ggaacatctatttatttttatgtgtggcttctggtactttctattacttaatttgcatgaatattatttgtagcttgatgtagatgtcaatgaggatgaggaggaggacgaggcttttgtagctgcgcgagatcgaggccaaatgttgaaaagagttggatctatgctcaatgcatttggtacgtattatggtgaaacttttcttaacaagttagtgagaagaaaacctagttcaactggctatgattgggtgatgacaacaattagtaatccaaacgattgctatgatatgtttcggatgagtagacctcttattgaaaagttgcatgacttgttgatttcatcatatggactgaagacaactgaaaatatgtgttctttggaaacactttgtatgtttttatggactattggtgcc

SEQ ID NO: 25136 - DNA, 291 bp, Zea Mays
cgagaggctgcttcaaagttcgaacccaagattcggtgacccaacgagacagctcactgcaccaggcctgcccttcaataaatgaaaatagtcatccatttcccatgcacagatgatgagctcagacttcagtaaatgaaaaatgacaaatgcaaatgacaccatgcactaaccataaggaataggttgcaagataggcatgcagcaaatgtatattatcagtcaacaaaagaaaccagaaatgtcagcagaatcttgcatctaaagccatctcatttccaaagttctaac

SEQ ID NO: 25137 - DNA, 385 bp, Zea Mays
gcaagggtggctcctccgaaggtagtttttactggaatgaagtgagctaccttggtaagacggtcgattataacccagatagaatcgttccctttttggatccgaggtagcctgattacgaaatccatgcctatttcttcccacttccatttgggcactgggaggggttgcagtagagctgcaggtctctgatgctctgccttagttcgttggcaagtatcacaccgggccacatactgagccatctcctttttcattcctctccaccagtacctggttttgaggtctaggtacatcttggtggtccctgggtggatagagtaggctgagttgtgggcctcgtcgagcaggattccttgtgcctctcctttcggcacacacagac

SEQ ID NO: 25138 - DNA, 1707 bp, Zea Mays
catatcctctctagcctgtcttttgagacagactgtgtcgccatatcatatctacaggttcttttcccaataactgatataatttgttatttaacttttttcactttttaaattagcgcccgtgaatatttttgtagaattgctttaactttcttatttgatgttattatttgttgatactttgttattgcaaaaacaaccatatttatatgttgctgatcatgtaatttagcttcgaagaattgcttacttatcattgtttatagatgttttgttatcacaatattaacatttacttatatgctaatggtcatgtgacttgtttcaatcatacaactacatattctgttaacctaattgaactggttctggaagaagatagcacacatcatatgacttgcttgaatgttttttgcacggtaaattgttatgttaaataggttatgaattgcgggagggtctgaatattttcatctaattcggcacttaactgccaatccatgaaggcatagagcaagacacttgtgcagatgtaaatttctataaatgtgttttgtccatgttatattgtagttcttcatgctaaataaatccaccagacgaatctatggtcttatggatgggataaagtgtcaaagtttactatgtagacttctgactgtgtactattaaaatggacaaaagatggcataatatatttaagatgttcattggcaatttttctatccatccttcctaagtttcatctttataactagacaaatggtggcttatcatttgagtttggtttatcatgctaacttgtatctacttgctgtatagctgtacttagaatctgtacatgatttactggctccagagaagactaatattccaatagtagaagatgcaaaaactggtgaagtttccttgccaggtgctgcgatagttgaagttaaagatcttgaacatgtttttcaacttttgcaaattggtgaggcaaatcgtcatgctgctaatactaagatgaacacggagtcatctcgtagtcatgcaattttaattgtatgttcctgcattgcaataattagttctgttatcacttctattttaggttccgtaagtaatgatatggatatgcactattgatgccttcttttcagatccatttgcaaagaaacacaagaacaaaagaagaaaatggtagctctttatatgatgttagacatgacacttttcctgatgatctgccacttgttctcaaaagtaaactcttgattgtcgaccttgctggatcagaacgaattgataaatcaggtaaaacttctctccattttttatttttctacttcctccagtctgctttctaaggtgtttgagagttttggaaaagtccagttagtaagacgcatggggtgtccgtgggattattcaacggagagaattaattcttcacgggatcctaagcattgcatgacatcatgcagactatccgctggtgttgcgggcggcaagtcgtgcagtaactcacgagcgcgactatcaaccgagtttcttcactttcttggtacctatgtttctaactttggccccttagaaagtggactggagggagtaattgcaaatcaagttggttactaaatattgtcacaatgtgttcattgctctgtattaccttttttctcaggaagtgagggtcacatgatcgaagaagccaagttcatcaat

SEQ ID NO: 25139 - DNA, 531 bp, Zea Mays
ggagctttatgataggatgtggggtccccatggccatggcatcgtccgggagagggcggacagagcgctggcgcaggtatattgttggtttggagaaaggttttttttggatgtgacatgttgtactatcttcggaggtgatgaatgaggaagaagttgatgaccttgccgaacttgaatgttcggtgacccgggtgagtgacttggcagaggcgggagctgaagggcatacaacacctccagggggtgctgctgaagaccctgcggcggcggctgcttcggcgcaggttgaagggatgcaattggggatgggttggtggttttgatttttgtatgatactgagatcggttgctgcgcaagtttcaacgtccggaactgtgcaagcaaaccctgatgatgttaaaattaatgatgttttgatggatgcgagtgcgacgtttcttaatggcaatgtgtcggagtgatcagattttgggtcgtggtctttggaggatggggaattggggagccctttctcgtgggttgacgaa

SEQ ID NO: 25140 - DNA, 491 bp, Zea Mays
ataaccaaccccggccactcgatcataatcccacgaccacgacttaacgcccccacactctatctttgtatgcccgattaggaaccgacgaatatgatttgatacgaccaagcgttatttaggttccgatctggaccatccaccgccgatccgatggccagcccagcttcttcccaccccggccaatagggtacggcggggcacaggctctgtcatggcggcgcccatggacggacttccccactaccagctccggcgcccatttctagttcggacagatgctacacgttgcgaagagagaggcaaactcaatggaggcgtccttaccaaggattagcatgccgacgaggctatccacgcaccgtggcggatccgcggcggagtttgcacgacggcgagcaattccccgccacccagtcggtcattgcacccggagttgtaacaaacatgaccctcgacacctggcgaggctcccagttctgacttctcac

SEQ ID NO: 25141 - DNA, 490 bp, Zea Mays
gggcagtctagctcaattgaatgggtcgagcagcattaggagaacctaaggatgctgagacgagagagcagagagtatgaacaaacctagaacaagctagccacggcgaggacgctttcacggtggcggaaaccgatttgggggaactttgaaattagcgcgctctagtggatgatttgaggcacgtgttgctagattatgtgcttgactacttagcggagccgagggtgtgcgcaatttatagcgtgcttgagcggtggccggtgaatttgatagagacgcgcgacggtcggagaggaggaggggcactggcgcaaatgattagtggctttcaccatggcggactcaccagcgatcaccagatatgcttaatgcgacctactgcgacgtgttaagacacccgggcacgtggcgcatggtgtgtaagtggccagcgccggcgaggaccaattcggtcgaccgcaatccaagtgggtgcgacgaactcccc

SEQ ID NO: 25142 - DNA, 335 bp, Zea Mays
agaacaacatgccattatcttcgcacacatcaatcttcttatacttcatgccaagaccagacacaatctttttagactggtataagtcttttggcagcttatggttcgatgggatgagatcaataatcagattgattatatcgttatagcaattattcgagaagttatactttgccttcattgccataagacgtgtaaccacctgcaacacgatcacagtggtgtcgtcatgcactttttcctctgacgcgtgaagaagcttataaaactcctgcacttcctctggtgtagcctgttctgaggccaatgttggatactctctactaatatcagcc

SEQ ID NO: 25143 - DNA, 659 bp, Zea Mays
aattaaacaagtttccataattaattttgtgttaaaaatcatttcttaaatgagtttctctgttttcctagaggccaggactgcgcgtcaatttctagaaactacaggggctattgcacaaatgtttctaagactctaagaacagcgcccgaggaccgcgggttatttatcctgaacccgagggactcttttagaaaacggcctcggcgaagggggtgtcactagctctcggccgttggatcttactctgagggtcgcgattagatggcgcattatgtgaaccagtaaacaaccgtgaccgttggatcccaagccaacgcccgagatccaaccacgacagtgccccttcccccccctcggatggacgccccacggtcaagatttaaagtgctgaaagggtatctatggtttaatcccagacgttcagatcaaatcaacggacgtgccttgtcttcaaccctggaagccagatgcggcggtgaccgacccagaggcgattccacggcggcgccatggacggtcaacgctgcagcacacttctacgcccccaaactcaactctaacgggttgtacgcgactatggaatgcaagtgacttcgatgggtggtttttactcaccagagacggggtcgaaggagatcggccacgacgcttggcgg

SEQ ID NO: 25144 - DNA, 438 bp, Zea Mays
aaacaatggtcgaggctacgatcgaaaggcgattacgttaaatagtcatgaattaaaatacttgtctaaacataaccatgttgatttaacaatcgcgctatgcataaaataaagttacgctacgcgcttaattattataaacaactctaggtaaatttaaaggattgtcgtgcgacaaagcgaacgacagcacacgtgatctaaactgaaaactgggacgagttatcgtgtgatgaggcacatgatagcacgcacaaattaagcatcaagggcccaaggcctaaaataccatagtgtctttggttctctactacatgcttcaatattttatgcaaaggtccccttggctacattcttcattgcaccatttttctcacccacatcgaagactgatatgtggacctgacgggcccacgcctgcggctaagtggtcgctta

SEQ ID NO: 25145 - DNA, 349 bp, Zea Mays
tatcagatggctgtcgatagcagtgaagcagacccaattgagagtatcaaggttgtgtctgagtttccagatgtgtttccaaaggacttgccagtgatgccaccagagcggaaagttgaatttgccatagagcttcttcctggaaccgcccccatctttaagagagcttacagaatatctgggccagagttggtcgagcttaagaagcagatcgatgagttgtcagagaaaggttacatccgaccaagcacctcgccttgggccgcccctgtcctatttgtggaaaagaaagatgacaccaaaaggatgtgtatcgattatcgagctctaaatgaggtcaccatcaaga

SEQ ID NO: 25146 - DNA, 625 bp, Zea Mays
tctgattcattgcagttgtattttatttcaatgccttgtcgtcgaacccttaagtgatccattctaattgttactggttaagggcttaaagtatcagctttagattgcaaaaattgcaaccggtaccttcagcttccatgttccaagtgccaaccaacaatttccatgtcgctgaactccatcgaccttgaaaactttgagtacttcttcatattcaacgtttatgcacataaacaacagactgccagcgaggacatgttagacatgtgtcgattatgcgtgcagttgggttaccttaccacttgagttgtattaggggttaggatagagctggagttgaattttatattccagggggccataaatgtgaggcaacctctgttgtaaccatgagatgaattggcagctagtttggatggcggcgagaccgttggatcgcttggatgccggtataactgcttttttatggggagctggtgaggcatgctagtagccatgccaaggggatgtaggcatatcgcaaacctagtgaggtgtgcctgttgtcatgccccagggatgtaggcatatcacaaacctcaataaaaaacattatgcctcggtgtcgttctcattcacatatttt

SEQ ID NO: 25147 - DNA, 519 bp, Zea Mays
gtacccgcttgagtcacggccgctttggataggctcgccggagttagccacctcgcgaccttgctccacatgcctcggtactttaaccgcgccgcagtgagtcaccttagcccatccggtgatcgccggtgagcttgccacggtaattgccaccaatcgcttgcgccagtgcacctccttctctccgaccaccaccacacgagctcaaattcacgggccaccgctcaagggccctataaattgagcacaccctcggctccgttaggtattcaaggatccaatccatctgctcgtgcctccaattactcaccagagagccccaattcgggatttcccccccaaatcggtccgaaacaccacacatagtgacctcgccgtggctagctcgttccaggtctgttcatgctctttgatctcctgtttcagtgcccttatgttctcctgatactcctcgacctgttcaattgagctagactgtgctagatcgccgagaacacttctattcatccgtagttcgca

SEQ ID NO: 25148 - DNA, 563 bp, Zea Mays
tccttcaattggtcgaaatctttcttgtcttcagatattccctctgctttgctggagtctgaggatgagaccctccctttggccatccccaagaaatgtcctgatggcaagttccttgaggctgttctccaggaagattcttctggcaacgtctctgccacctcggacttggctctcgctcatcctcatccaagcctgcggtggtggagtctgaccttcggagaagcaagagacttcgtgatgctcgggctgggttcaggcagggctcctgccagaaaaagaactgtttgatgtgtcagcacaagtttgaggcccccctccctttctgccaagaacatcagacgcctaggggaaagattttgtaacctgtcagaagtggacctgtccgatattgctctgaagaagaagaagaatccctctggttgtgtgggctccgataagcctgggaaaggagacaacggggatcagaatcaagattccacagatgaagacaactaacttgatggtgctgctccggttatggggattttgcaggacttctcttcgccaggctttttggttgt

SEQ ID NO: 25149 - DNA, 322 bp, Zea Mays
cagggagatacgcaccggagatccaagtgatgactggaatgatggccgccggagacgccagatgcggacgacccttcccccggcaagcgctactccaccggcgagcctcacagcggcaatcggcacgagctctctctcacgggtaacagcgcgtttcactctccctccctgatttctctctgcaggcaacgcggtgcatcccgactcgtgggcaactgcggcggcgatgtcatgcgcatggcgatccggggtcttatcccacgacgcggcggactcggtcagtcgttcctcaaatcatgcgtggcggcggagatttcggtca

SEQ ID NO: 25150 - DNA, 448 bp, Zea Mays
aacttcactaacccactgacagtgtcatcaagttgagaaagtgtagacttggtgcctgtcatgtggttactagctccagtgtctaatacccagacttcatctgaacagactgcaggcactactttttcttcagacaggtgtatttcctgagaagttccaccaaatgagtcttgcacctcagcgaagagtagtgctgcattctccacatctccaactgcaaaatttgcctcctgttgtttgtgatccttcttatctctttttggtcttttacagtcttctgcccaatgaccatagatgccatagtttctacatctcccttttcttctaggtgttccttgtgatgtcaatttgaccttgtgaggagtattggagctagcacctttagatttgttagaaacctttgccttccactggtttgtccctccactattactgttcttgtttgaat

SEQ ID NO: 25151 - DNA, 299 bp, Zea Mays
cttagatgtgagttggctgttagtcgctcaacttttcaacaagccaaaagtcattcttggtggtttggctgattagattgaactaatacaacattagatgatgcattcaaccttgtctttttctcctttgctagattacttggtgtcaattctgtaaacaacttgcactattatttacaaattcacgccaaactatttacatgctcatcgataagaagtaaaagtcgtatgctaatctgatttgtaagaaattccccttccggtctgccaatagtctgtgctccttatctttcaatcca

SEQ ID NO: 25152 - DNA, 342 bp, Zea Mays
attgggttatatatccacgagggacgaggccaaggccgtggaaatggccgccaacctcacctggttatcacacgaagctcatttctccctcaatagattggtgaacgcgggtggaagagcagtcctgactgggtaggtccactggtcagcaacggtaactgagctcgtgaggaaaggctgactgagcgaggccatttgcccgagagatgtcccacgcgtggtgtagcacccaggcgcgtggtggaaacgaccgccaacctcacccggttatcacgtgaagctcgttgctccctcaacagattggtgaacgcaggtggaagaggagtcctgactgggtaggtg

SEQ ID NO: 25153 - DNA, 276 bp, Zea Mays
gtactccttactactgtgcaaagacgcagtgtccacgtggctatcacttagtcacgtggtagaagtgctgtgtgtgggatcaagccacggctcgccccaatctcaggcggttaatctccgtccacagcagcacccgactccgccacatgggcgggcccgaagccgccacgtgtccagagaaggtggtgcaccctgaagcattaacagtgagtccaaacccccacgggagagcgccggaccctggatatacagtccggacccccaaagttggtcccg

SEQ ID NO: 25154 - DNA, 287 bp, Zea Mays
tggagttatagtttaggctatagtccagtgtgcctgtatttgccttatgttgcttgacatcttatttgaaggggttgataagatggaaagcaccgaagtccaaactggacgctgattccagatagtaacaccaggaacattctggaggtttactgttcaaagatacacaccataagctgggtgtcaatcgtaacactgtgaatttgctggaggtattgtagtgaaatgcaccatatattttatttcgtcaatctgaattagttgttaaaacatcttatgcataccag

SEQ ID NO: 25155 - DNA, 494 bp, Zea Mays
ttcgttttggcggagaagaaaccactccgacaccagaaaaagatgaggtggtagttttcaggagcttcttcagagcgggattgaggtttcctttgaacgaaatgattggagaagttttggaaaactacgagatctatcttcatcaggtgactcctaacgctatcgttaggctcagcgtcttcatctgggctctccgaagccaaggtacagacccgaatgccgaagccttctgccgagtgcacgagcttcattatcagacgaaggccagagaagatggtcttcatgagaactttggttgttacaatttctcctaccacaaagatatgaagactccggtggttagctaccgcaccaagtggccaactggttggaaaaatgaatggttttatgtgaaggccgatgataagaagagggagaagctcaagacgctagtactgagccctttgagcttaagcttcgggctgactaggtcgctgtgccgtatggagctgggg

SEQ ID NO: 25156 - DNA, 387 bp, Zea Mays
cacccgggcagggtcccacaccctaggacataccccatcgtagttgagccgatctttggcatgaaacgactttccaaggtcctcatggaaagaggaagaaacctcaatgccctgtacgtcgagaccctcgatcgcatgggatgtcgcgcttagcgctgcacccaagcatgaagccaatccaaggcgtaacgctcgacccaggaattcacccgcttgggcgaatcatgctaccagttatgttcggtgctttgtccaatttccgcatcgagcctctgcgcttcgaggtgatggacatccctggagcttacaatgcaatatttgggagaccttgctacgtccagttcatggcgattccaaactacacctacctcaagttgaagatacctg

SEQ ID NO: 25157 - DNA, 343 bp, Zea Mays
gtcacaacaaagggtgcgttaaggcgaagcaacttcgtgtggagcgcatggtcgccggatcaaaaacccaggagttggtccattttgcccccgacagagtggatatgctctatgtaaataggggtagtttagtctagacaaataaccctctatagatagaggtagggctattgttacaactatcttggcagccaaatctctttgagcattagtttagacttccacttgagagagagcactagtttcctgtctagttttgctcatgctagatatccatatatagttttgtactgcatctgtgtaatctccttcgtgtaatccgaggaagggtggccagttctac

SEQ ID NO: 25158 - DNA, 336 bp, Zea Mays
tggtgcaatgtgatcaattaagcagcaaaaagctcagggcgcgtactataccctactcacacacaacaaaatgggagaataactcaatgttcaaaaaaccgcgaaaaaatactatctcaatgaaaagtgttttctgtttgaacaaatcaatgttcgctttcactctctagttactgtgcaggagcatcctcgcaaggaaccttgtccgcagggtcaccagaagaacagggattactcaaagtagccgacacagcgagtacatcagctacaatgtcatcagacaccacaacgtcaggcctcttcatcagaatccggctagcccagactgccttatcc

SEQ ID NO: 25159 - DNA, 656 bp, Zea Mays
cggggagggataacccatacgtggcgccatctcccaagcccagtcggagtcttcaccagtggccaccgtgaccagtaaattttgccgcggtgtcgcccatgcctcaatctccctcactgtatctctttccgacgtggtaggcatgcgcttgcgatgctatccgtggccggaggtcgtctgttgggtcgccgtgactataaatcgcacggtggtccacggcgaggtgtttacctcttcaccagtgaaccgatcgcaaagccaaattcgcgctgcctctgccccctcctcccaaattgattgtgcaggataaaactagagtcccttgccgccgtatagtcccaagctccatcctcaatttcacccgagcacaccacgacgccgttttcccccaaattggtccgccgcaccgcgaagaacagcccgcccgtggctagcccactctggtgagttcctatccaattcaagtgttgtttccatgcctctacatgcttgcgaagctcatggtggcatccgtttgctctagtcgaccatggtgtggcgggaacgtgtgctcccaagctcggtgtccgccgtgatcgtgggcagacggctctcagtgggtttcatgtcaaattaatggttgttcctaggactccttaggtcagtgaagtctcccc

SEQ ID NO: 25160 - DNA, 684 bp, Zea Mays
cggagattatcgatattccaggaatgctctaggtcctcgccagatggcgttgttaccctgtacgcgcttggggacgccttcgtcttgacgatgaatgggccctcccactttggctccagcttgccccgtgactctgtccgggttgttcggacgagtacgaggtccccttcgtcgaattctcttggggcgactgcgtggtcgcgccaggccttcgtttgagcttggtatttgttgagggcctgcagggcaaagacacggtctccgtcgatgaggtctttggaggttggttcgtctacgtcggggacggctgaagcgcttgtccgtggtgacccatgttttatttcctgcggggtcatggcctccgatctgtatagcaggcgaaagggagtgaatccagtcgcccgacactcggtcatgttcagcgcccagactgcttcaagtggcaggtcggcccatttacccttcttgtcgtcgaggagcattttcttgatggcagtgaaaatcttgccgttggcacactccacgacgtcgttagattgtgggtgatatactaaggcgaaggcaagcttggtgccaatggagaagcataagtccctgaagtcctggctgtcaaactatttgccattatcgactgtgagctcggacgggactccgaatcggcaaacaatgttttgccagaagaat

SEQ ID NO: 25161 - DNA, 310 bp, Zea Mays
aaatatcgaggcttcgagcgtatccgaaggtcaacatggacaatgctagacctgatcaagcgatcgtagaccccagtcccagccaactgtcaggatatatattagtttgtttcggagctcaggttgcaaacatctaaattaaattctctttgttaaccaccagtacaattgtagtcacatgggctgcccagggcgcactaaccatcagtacaaattttgtgggtaaagaggaaactaggctcggatcatccctgaaggacagcaaaaccggaagcgctggcaaccacctcccataactaattggtcgttg

SEQ ID NO: 25162 - DNA, 355 bp, Zea Mays
gaccgaggcagcgtaggtggacagcggtatcagggactcgtgagcagacagagtcctgaatcccctgtcacctgcatccattaccctgacatggatgcgagtgatgtaatagcaagcccggggaggctcgctcactcgcctcgtctcgtacagggggcggacgtaggctcctagctcgtgcagcactgcttgcagcaggttggggaagtgtcctgtctcgaacattgatgtgtaatgttcgacaactggaccaatccccatgaagttgtcctgctgggcgtagtcagcttcctcgttgacgtgtccgtcttctccatcgtcttcgtcgtcgtcatcctcgtcatcgccatctccg

SEQ ID NO: 25163 - DNA, 317 bp, Zea Mays
aaaaactctggagattttttctctagagttaaagttgaggtgtttgagtagaaaatctttacttaaacttctagagctatgccaaacggtccctaaccatccaattttattgggagcaaattaagcagtacattaaggggaaaacccatacagaacttcatatgatgcgcgagcgcctgtatgcctatcgattcgattacatacttattcgttaaattaaagaacctaagtatatatgataagaaaatataaagcgagcggctagcaacaagctataattaaagcgcaaattaacatggcggatcgactagctctag

SEQ ID NO: 25164 - DNA, 364 bp, Zea Mays
gtggaattgggaggtgagattagggctacatggccgtaaaggactatggtttcaccgtgcactaccaattttgggagaggtcaagaggattccacgaatttgggctttaactgggctcactgatgaagatgtgaatacctcgtcgtggtccatgttgctatttatagccacggcggtccggctaacgattagcgatcgcggattgcattgttcacgcatggctaccacgtagagaagaggcacaataagggaaaaacgaggcatgggtgacaccgcggcggaagcgaccgagccacggcgaccgccggtgggatatctccggccacgcatgactgagttcgcgggatggtgccacgtccgaagt

SEQ ID NO: 25165 - DNA, 466 bp, Zea Mays
gcgatattccttctccagctttgtctgctcttgttggtctgcaagaattatccatagcaaattttgatcaggctctcgaggatgtcgttcctgaggatatgctgtctgagccaactgatggtgatatgatggacatttgttctgacattccagatgtgggattagagttatcccaagcagcgtctcgtgcctcgtcgaccttggaaggcggtcttcggagccaagaggttggtcaaggttattcaattcccatggaggtgactgagagtccttcagccttagaggtggctgttgcggagaacccagtcctcaaggatggtgccagcggttgcccaacccctgagggtgttgctggtaatgatccagctcgggtgggtagcgcgagctgcaacccagcccccgagggtgttgccggtggtgatccggctctgatgggtagtgcgggctgctacccagcccccgaggg

SEQ ID NO: 25166 - DNA, 671 bp, Zea Mays
cgccgggggactgagcgaggtcttcggtacgtgctcggaactctacggcaagatagcgtcgtgaccgggtctgttgcatcgatgaatcgctgactcgttcgaactcgaggtatgaacccttgaactagtggtagggcctctcggcgggcattactgtacgtacacggcaccagcgttgacgtgtccgatttttccttgctgctgggcgccgccgggcacagtatagccgccctcggccaccaaacttaactcgtcggttccctgttgtttggggctgcgctagctcggcgtcctttggcgttctgcggagaactctcttggagtactgccgtgttcgcaccgtggggtgggggtcgacgtcggggggaagaagggtccctggccggccgatccaaattggaaggtgtggtgcgttctctgattgggaggttgaagataagcgttggcggtccgatttggggtaagcgactgagatgtaggggctgccctgaccgttggattcgtagtggagggcttagatgagggtgcggttggcacttgttgtaccaaatctgggcccttcgactttgatccaatggtctccatagctcaccagtttatattagggcagatttaatcgtggccttagatttcagatcaaacgacctagattgctttatattagaacccgc

SEQ ID NO: 25167 - DNA, 318 bp, Zea Mays
gaacatggtgctagaggtagtggtggtggatggagcgataacggagggtacgatggtatgggggttggagaatttttggaaagattaagtttagccatgccacacaagatttaggtcatgcagcacctcaatcacaatgagagacgagaaacaatcgacgtcgatcggttttgcttcctattgatgatggtagccacaactctgctaactacagttataagtatccgactccacgctttgaccgcgccaacaacacttacgcgtgaccagcatctccaggtgaagtaccaccatcagtcatgtatgggttaggacaac

SEQ ID NO: 25168 - DNA, 849 bp, Zea Mays
tagaaagtgcaggggctcggcataaattttcccaagactcatcctacagctgcatggacggcgggttgttttaacacaagtccagggtctcttacacaaagatacaaggtcgaaggggtatggggacactacgaccatccgatcggaaatcggccgccaggattagaccgtgattcacacagttgggcacgtcaagctcaccatgggattcaaatcgaatggttccggttttatggagccctatctaattttgcccctccgattagatctcaacggtcgagacccacccaagggaacgggtacaccctttaatcccgtgcgttgctggtagatcggatggtgcacggtgtctagacgaaggggggtatggtcacatcaaatccggaccgcccatctaaatccaacagcctagaggccaccatctttcctctacccttttcctctaatccacaccatccatcgcgagatccacggccacgcacacatcttcttccccctggtctcccacggcagccagggtagcggcgtcgcatcccgccacgacggcggctaccaaccagagaagccccgcgcggcacccagagcacccaaaccctcatggtgaattacgcagcgaaggtcgcggcaattgatacagggcattcttaccaatagtatgccgactgtgagtgagggcaacgacgaggttgactggcgacgagtcccagctgctccggtgagcatttctcacatagcttgcctccattcctcatctcgctgatcccgaatacgattcgcaccccttggcgaatcagctcgacccaccaggattggttgaacggcggcgcacgcaggacgcagttgcgacgg

SEQ ID NO: 25169 - DNA, 640 bp, Zea Mays
accagcgagggcgagcccacatgaggcgaggagagcaggcgaaaggaatggagggagagaaacctcaccactgcaggagtggaggaggagacgcacgagcggcgggagtaaggagggagtagagatgagggaagaggaagagtagagaggaaggagtgatgagacgtgactgtggtgggagcagaggcggactccgcatcatggcctcagccgtcacttaagacggcgagacggtcgtgtcctggcacgaatggacgcaaccaacaggctttggagacgtggtagtacgcgtgaagcgtgggggtgaggaccgaggacaaatcagatgtggtttagaaaagattcacgtccgcgaccgcagccgtccacacgttgatctattgatgggcaaaacctccatgaagcgcggacagacctccgaacctgagcggctttgaagactttagatactagtggatacatgaatgcatgtttccacactgaaccaacatggcctgctaaggtatgtaactgaaaattgaagacaacagcgcactttggttctgtttgctttcccccctaaatcccattatccctccacgttaccaatctctcaccccatatatcttcactctatcgcggctaccctaaattctcctat

SEQ ID NO: 25170 - DNA, 587 bp, Zea Mays
cgcggatgaactaacaacctacacgttcccgatgattcatgggatcttagcttaattgggcgagttggtgagcatcaccagcacacagagatgctaaaacaagaacaaggatggtatgattaaacctgtggaggactggccatggtgagctcgacccagcggtgtttaagaacagaattgggggaaacttgaaattggagctcacggttgaatgattgggagcgatactagaaggtgtggtgcatgatgaggttgcggagctaacggtgggctcaatttatagattccagggggcggtggcgcttgaattaaggatggcgcggtggcggccggagaggaaaagggctctggcgcatgacacagtggcctttcaccgtggcaggtgctccggtgatcaccggacatgcaccgcatgattcaccatgacgagagccagcgctaaggcacgtggtgcgcgacggtgacagcacgacgacggtgagggttatccgagcgaccgacggctggggggggagtacggcatgcttagccgcaaccgagctcgagtggatcagacgccgagatctttactgagttgtgcttatcca

SEQ ID NO: 25171 - DNA, 292 bp, Zea Mays
atcatgggcaccaacataggaatcccaccaatcaacagcaggactagtcagacaaccagaagcgtagagaaccttctcccggtcagagaatttggcaatgtttaacatcttctccactgacttcaaccagtcatcggcatgcagaagatctagagaactagcgaaggtaggcggcttgtggctcataaattcccgatgcttgtcctggggtggaagtggtggtggaggtggtggcaatgggacttgctgatgtcgccccatcctctcctgacacacctcctctctctctctt

SEQ ID NO: 25172 - DNA, 289 bp, Zea Mays
ctcgacaccttgccgcgtcaggcctttgaccgacacacttggtccatcgagtaccattgtgtagtctaccaacaaaatcacgagttatacccagaccaatggggaggctacctgcttggtgtgccatacaaatgatgatctccagggtgcagaggcctactcagagcattattctatcactgaggggaacattgccgaggcagccatgcaggatgctacacatcgtgtgcttttgcagtactgttcattgttcagtgaggtggctaacggtctcgacctgaagtattac

SEQ ID NO: 25173 - DNA, 357 bp, Zea Mays
tgggtagaaggtttgtgggcgctagtagaaggcaggggcggtcttcggtgggcgcctctgtcgtaggttgggtgcgctaccgtcacttgtgggtgcaggattgaagataactcgtcggtcgttaatctggcgatggatggctaagattgagacgagggacccacaccctcgttccattttgctatgtaagccgggggcggtcggatggggatcaaatgatccatgattggtgctgacttgcgggccttggatccgcgatccgatggccgatgttagttaagggttaagatgtgatctggtgcatcagctagtgatcggacggtcgtagttgcgagataacccttcgctgtcgcagat

SEQ ID NO: 25174 - DNA, 301 bp, Zea Mays
tttccaaggcagctacacgggcttgagctgtggtgagatccacatggagttgacggttgcgcttctctgcatcttctgctcgggcaatcatctgacggtggtgccgagccaagaaatcatactgcgcatccagggtgagcaggtatgcagtgaggtacacgactatggggtcgtcctcaagtagctgctgctcttccaatgcacgcatcctggccatccaagcgggacggtctctctgaaagggcggaaagaatctgagcggggtgtgggccacttcttcttcatagatctgacacagggc

SEQ ID NO: 25175 - DNA, 346 bp, Zea Mays
gcaaggtggcttgcaacctaatctagggctagcgtggggagagttcacacaaggcggctagcgagggcaaatcgagtaatgtggtgtctcgacttgtaatctgggaaaggtggatgggatagcggcggaaacaaataacagcgacggagcggttgaactacgattacgacatgacctaaaccagcaccaagactcgaacacggacacaaattcaacaaagcaatctgaaacgaaattgcaaggctaaacagggttataggatagcggattttttgtatggcaattatctggagttataggataaaaaaactaaactaaactagggtaagcctgatggtaatacctg

SEQ ID NO: 25176 - DNA, 341 bp, Zea Mays
gaaggaaacacatcccctcgccgctatccacgcctcgcagcaatccagcacgcaggaatcccattgccgacgacgcgcaggaccactcattgcccaatcgttcttctcatgcaccgcggatgccccacccatatcctgctcgccccaaacgcaatccacgtctcgccgccatggaaggaatcgcaacccaatcccctcatcgtcatccagcgcacaggaccaccatcggcctgcatcccatcgcaagtgcaggaccaccccgccatctcattcttcccattctacgcgccaaccccgcctggatcttccgatgctcgagtacttcccattctacgcaccag

SEQ ID NO: 25177 - DNA, 764 bp, Zea Mays
ctctaccatcgacattgtcccagctgaagaacctgtcaatcttgtaatttagtaaaataagctagcacctcgtgaatttgctcttcctttggaggtagaagctaataatcttaccaactcttgtcatgtatctaggtgggcatcagacaataatttcagtgggcagattcctgattatcttgggagtttgactaacttgacccaactgtaagatttatatctgaaaatcactaaggtttcaatattttaaaattgttttcttgacgtcaatagtaggaaggtcattcatttttctagagaagtgcaagatgttgcatatttttctacatcatctgttattttatagcacaattaatttgtcatgaggaactagcataggtattacttctctaatcaaatatctatgtgcttccaggaggctccaagggaactcttttcaaggtcccattcccacaagtctttctaatcttgtcaacttaaaaaaattgtgagtccctagtagtttttgtgattgtaggaatattatgttgcaaacataatagctatggcattaaccatttctatgtaacagaaggataggcgatatagtgaatggaagctcttcgctgtcattcattggcaatttgacatctttgggtgaactgtatgacatgtccctccctttttttatattcaagtttaagggcctaaacatttaattatttaaggttccatcttgcagagtgttgaggaacagcattatatctgatacactagcatcggta

SEQ ID NO: 25178 - DNA, 458 bp, Zea Mays
atccctgaggcgtggcacaatgacgttaacatggacccagagaaaaaggctttgtatgaatacttttcggcccttatggagccttgggatggacctgccctagtgtcatgtaaaaaatatgaaaccatttgactccttaatattttctgtacaagtcctgatggattgacttcacttgttgaccccattctcacagttactgatggccgttatcttggtgctactctggatcgtaatggcttgcggcctggccgtttttatgtgacatacagtggccgcgtgatcatggctagcgaagttggtgtggttgatgtccctaatgacgatgtgatgagaaagggcaggctaaaccctggtatgatgcttttagttgattttgagaagcattgtattgtggatgatgatgcattgaagaaacaatactctggagctcgcccgtatggggagtggcttgagag

SEQ ID NO: 25179 - DNA, 339 bp, Zea Mays
cggtgatggcgccgccgccgtgccctattcctggccatgagttcgaccggagattgaagaatatggccctggccgtccgatgtgctattgacggtttagatttgattagcgcataccctttcgccgtattgaatcctcaccgtcgatccaaattgtacggtcgagattagagcatagaataaactgttcggttacattagttcctggccatcggatctcgatctaatagttaatattgtgtaccggttcacagttatgaagatctaatctgacccgttgatagttgatccaacggccagtagtgaccaatacctcttcggcccgaccgatttacaaaag

SEQ ID NO: 25180 - DNA, 282 bp, Zea Mays
tctggctttgctgtccagagcgttgcacttgatagttgtttccgccttgatttccagagcggaactgcgaaccttgagcgttgttcgggcgggtgttcctgctagactgaccttggaattttcttttgtggtcagataattcctttcttttactctcaaggccaattgccttgttcaacagtgtctggaagttgggaaatgtatgactctgaagttgatagtttagaggtccaattagtccttccagaaaacgctcttggcgcttctcatcagtgtccactt

SEQ ID NO: 25181 - DNA, 480 bp, Zea Mays
ccgccttaacaccgggggaagccctatgcaccgccccgggagaaccatcgccgtggtcgggcagcgccacactggggaagactctgcggcgatctctggcacctgggaccattactcgaccgcgccgcacgtacttgtagcgtcgttgtgcgggggaaccatccggggctccaggaatcgacagtcgggattcaccaccgtcgcaagccaccacgggccatggagaagggtccctgtcgtcaccatctccggtacgtgtgtgctcccatgttcgcaacctcgtccgcttcgagtagggttgattagagtcgagaatcgctaattggagcggattgggggagggctcaccgacgtactccaccatggggagttctggcgccgtcgtgggcaccgtcgggctaggaggatgccctcaatccatcgatcagacaacggacggtgtcgattaggttgggatctaccgatcctggagtgtgctct

SEQ ID NO: 25182 - DNA, 527 bp, Zea Mays
cggcaataagtatatcataaacttgagacaaaacaagcataatccgaggttgttgacagcataaaattgtacaggaaattggtagaatcaaatgcaagaaacacacatgacgatcaaacacatagggtacaatattccagtttagacattcactgatccccaaagttgtcattgacataacataagaaacgtctaccatctttgcccatattatacacacatgactgatctgaagtttagggaaccattgtatacacaatatattacatgtctaaactaaactacatccattagaccttgaatctttggatgtcttcaagcagcgataatgctttgttcttcggatggaatatgatataatgcagcgcaagagaccgtatctcactagtgttgccctgcaagacaataaaattgtgttagttatacatgtgtaccatatgttgccttgtgccaactatagaattaactggtaaatttgtacgtactgcttctatgtctgaccgcagagatccttcgtcgcattcata

SEQ ID NO: 25183 - DNA, 537 bp, Zea Mays
cgacgaccgtgcacgcggttctagatgttgtgtgctctggaacctcctcctaggaccgtgggtttcagtacgcttagccacgtttctaggctaacagcacaattttgtcgactagttctgcaaagtgcagtcacggcggcgtcgtattttgtttgtaaaatgcgctaccatgttgtcctaagattgttatcacaccacatttgatgctttggtcatgttgtttggagaattttctgaattccttttggatggctaaccgatgtgatatatgaggttatgagtgccaccagtgccccattgattttaattcctggagcaacatggcttacgaatgttctactgttctactcctatatatgtgatggtagtgtcgtaacaggcttgcacatcacttgaaatgggcgtattatacgagcctcgcaagaaactgctcagttccatgcctaatagttagctctgtaccggcgtatagggcacttctgtcttatggttgtgtcgttgcatcctttgtctaatcctcaatgtgaatctggttat

SEQ ID NO: 25184 - DNA, 491 bp, Zea Mays
cgataagggcgcatacgaaagggttggcctcctggtattaaaggaatctgatgatcatgatctctctcgggaggtaagccctgaggtactgtgaagaccgactggaacttgttgagcaaagactgaagctcctctggtagagtggacaatattccttgctctttttctgataaatcaatcaattggcaaaactctatgactgaacagtggtctgttgctgtctgcaggccaaacaatttgactgtagacccttggtatgggatggccagccacttttctgcccagtgaaccatcataggactgtaaagttccaaccaatccatgccaactattaagtcataagtttggagaggcaaaatacgtaagttggactggaactcacacgctcccaatgaccaaacagcttggggtatgtgctgcatacactgaatacgatctccattggccacctgaacggacatcatctgtggcaaagaagataccccttgaat

SEQ ID NO: 25185 - DNA, 368 bp, Zea Mays
ccgtagtgagccctcgatctcagagcttccgtagggaatctaggaggggctgtagctgggatcgatgctcccgcggtgcaccccaccgccagtgtcccccgtagcggtcatgacccgcttggtatacataggcaacctcctatcatcattacggaggtagaaccagcgcctctgcgaccccatgtttgaagaggtaagggatgcaggaatgtacaactatgctcgatccgagcgcaactggagcgtgcagcagccgaccctcaccgtatggtggaccttcttcacctctgaagggagggagaacggctccgcacggaagaggtggagccacagatcctagtggggcttgatcccaaggtacccctcgc

SEQ ID NO: 25186 - DNA, 421 bp, Zea Mays
gcggacaaagaatgtcacaccgttagggggaggagatgaccaggaccctcctcgccccttcaaacaggacaaggggcagactatctaccttgagcagcaaggggacgagaagagatggttggacagagccactcgtgcagcgattgccacaatagcagtagtagatcacgcagagcagggaggttagttgaggatttctgatcagattgccttccgagtccatcgcctctcatctcggactcactcctccactgctcggtccactccctcagaccaagtctccactccacctaccacttcgccagctcctaccgctctcgagccttccaccacacccgctgctaccaccacctcaaccactctagcttccactgctcccgctcctgcttccgctccacctatttctccacctcgcttccgg

SEQ ID NO: 25187 - DNA, 436 bp, Zea Mays
gtggttgtggtggtgggttatggttctaccttgcaggtggtggtggtagctctggaatggtcggccatggccgattgagttcttgaactccctacagttaaataggttatggcgcatctccttgtggtaggtacacgagcaatcaaggatcttgtctagtgatctcatgttgttgttgttgccatgaggggaaccatgctaccatgcgggtggcagtcccatggcattgacttcttccctcagcctcttgtcccagtgtcgatcttgtcgtagggcatcttatttattcatggacatgtcgtttcgctagtcgatgaggtcgtgggctcgtttattggcggtgatgtatctgtcggtgtcccggaagagttgctcggaggtcgccaaagccctttggaggatggcctgtacgaaagtgtaacaccctgaatttggg

SEQ ID NO: 25188 - DNA, 1305 bp, Zea Mays
ttcttattggtcctcgacaacgttggagacgaggacgactccaccgagccagaggccacggatgacacacctctcatctccctccacgcaatagccgacgttcactccttgaccaccatgaaggttcgcatcaccatgggcagcgctgtcctctacgccttgctcgactccgggtccacgcacaacttcatcgccgaagacagcgtgccggcaatatgatggacttctaccacaacaacgcgacaagctgaccgtcacggtcgccaatggcgaacgcgtgccctgcgtcggcatgtatcgccacgccacgttcaacatcgaccaacagtcattcgtcgtcgacttctttgtcctgccactcgcaggatacgatgtcatgctgggcacccaatggctggcaacgctgttgtgggacttcgaccacctgaactggccagtccgtgacttaatgcgacgacgaatggcgacctcctcgacgccatcctaatggagttccaacagatctttgccgagccaactggtctaccaccaccgcgcacgcacgaccaccatatcacactactgtccggtgccgttccgaacgccaagtcccatcagcccacaaggatgagttagaacgtcaatgccaagccttgctctaacagggactcatccacccaagccagtcgacattctcctcatcggtcctcctcgtcaagaaagccgacggctcatggcgtttctgcatcgactatcgcacgctgaacaatatcaccatcaaggacacattccctattccagtggtcgatgaacagctggatgaactacacggcgtgcactacttcaccaagcttgacctccgatccggctatcaccaagtgcacatgttcccaagcgacatacacaagacgtcgtttcgaacccatgaaagactatacgattcctcgccatgccatttagcctttccaacgccctgactaccttccaagccttgattaacgagatcctctagccctttccgcgtcgcttcgtcctagtcttctttgacgacatcctcatctacaacaccacctggatggatcacctccgccacgtccgcgcggtactcggggtgctccaacaacatcgcctcttcgccaagcgtaccaagtgtgccttcggcgagcgctccatcacatacttgggacacgtcactcagcagaaggcgtggtcatggatgtagggaagatccagggcatcctggattggccggtattcgtccgggcactctgcggcttcctcggcttggcgggatactaccgcaaatttgtgcaggactatgacctc

SEQ ID NO: 25189 - DNA, 453 bp, Zea Mays
ggaaagtaataatgtgtttaatacctagaactcttagtcgatagtagaatttgttttggcttgtatagagaggtggtgacatgccaaagtagtcatcactttctctatatttttaagtcgagtctagacgatacgtattatgcgttcgataaattatgtttcgcacatagtgtatgattgtgctcacgaattcgagtagacgcttcaagtaagtcaagtaggtttgtgatacaagtgtgtaatggagttagttgttttaggataattattgaaatactcagttcgtatgataaacatgtatgcgttcatgatttggaaagtaaatgcatggggtttgcgaattgtagactggtggtttacgattcgtatgatttggtcggtgtgcgaaaatacttgtgaatatgaatgtttataaaaatgttgtagtgtatgttgtgtctcggattgcgataa

SEQ ID NO: 25190 - DNA, 607 bp, Zea Mays
gtggaggcggaggtggaatcccaaaatcatcatcatcatcatcatcatcaacaactgctgcatcctgagctttgaactgatgaatagtagcatcctcggcctgagtgtcgaaaacaggagcagaagctggcacaggatcctcaggcgctggacggtaggatccaaaaacaaggcgtgaggcctcaagtgtgccctggaactgtggaggccgaatcagttgagcaaaaatgtggcacaagtagtgaacatatggcagctgacgtcgagcacgcataccatccaatacagtgtcctcaatctcacaaataaggaagtcaacaacgtcaaactcagagtgagagaccagggcaccaaggagccagagctggatatgtgtggtagcctcccggtatcccatcctcggcagaagagtccgtctcataagctgaaataagaacttggctgctgtagtgaaatctgccggtgaacgtcgcgacccatccgagaagggcgggtggaacagagccgcgacgtgagctgtacctagagccacactgccgtgagggcaacgaggagggtcagaggtgtcgtagcataagctgtgaagtcgagtcgacgacccgtgaaa

SEQ ID NO: 25191 - DNA, 509 bp, Zea Mays
gagaactccgcctcacccgaagacggcttcaatctcgggagaagactctgcctcacccgatctcgccctcggccaacttccctagcagcagccaccaactcctcgcgaatcccgcaggaggccactccggcgacggttctaaccactccctacacgattgcatgccccagcgtaggtttgaccatggcctcgggaggaacctccacctcacccgagcatggcctcgacctagataacatcgacgaaaggacgcccgacgccaccaacccctccgcagagacaactgacaacggaatggctatagaaactacggggttggtgacaagtctgctttacgccatacgagacgaattaccatgtgctttccaccatacttatcactattccaacaactacgactcggacaacacatccacaagataggctcaggcacgcatcgaagcccccgatcctggcctcggctctctgctcggtcaagatgcgagatacaggggtcggacgtgctcccc

SEQ ID NO: 25192 - DNA, 525 bp, Zea Mays
gtaaagatcatccacaatgtggcgttaaaatgctacggtggcaccacctggttaatcggcggtcaccggaccatcgccgtgactctgcccacgcggtgagctcaccagagcggttacagctccgcgattctcatccaattccggccatcggcctataaattgagcatggatcctgcttcttcaccacatcacacacacaagcccttgagcaatcgactcaatttcaccagaagaactcccaccgcccgcaaaaccattccgccctgctcttcgcgctgtcgtgaagaactcttccgtggccagcactccttgggtcagtaactccccaattgcttcctgttctagcttgtttatagcttcctattgctctcgggtcagtaacaccctctctgtcgacccacttttctgctcttgcccagcccaaattccagcatgtgcataacctctggtgaacccgtgaagcttccccaagcttcaatttgctcatccatgccgttggttgttcggaacgcgtttatccatccg

SEQ ID NO: 25193 - DNA, 317 bp, Zea Mays
tatgggaagttttatgttagactgtgggtgcgatggtcgagtgattttaagggatgatgctttacagattggttcaaaaaaagcatatcctctttcaggttcttcagtccagtggggatgactgcaggggttgtgctattcggatttggcctttccaaaagggttttccctatggtaccgcttgctttgtccaaacctccattttatattatcaacttgtgtgcatgaccagacaagatgtgaatattgtccatccaattgatgtttgatgcgatgatacttcatcaggctgggttttccctatggtaccgtcggct

SEQ ID NO: 25194 - DNA, 388 bp, Zea Mays
ggtccattgtacggttagcctttgaccaatagaatagcgccacatagtataaatccgagaaacgctagttatttaatatacatgttgcgtggcgtgtccgtctcgactcatttcggtcgtagcgacttcgtaataacctcgactacgtttagtaatattatttagtcgcaacacatgttttcgttaattaggtaattaatccaagatttatatgaatgacattctaattaaaattaaggtatatttttaaaatggtgattttatagatgcgaattaatgtggttagttccgactcagatgttttcaaataatatttgtttaatgtaaacatgatgtctgtttagcttttctcgcgaatcgcgcgcgtcattcacgtgtgttatgtgtg

SEQ ID NO: 25195 - DNA, 504 bp, Zea Mays
acatcatccaattctcaagaatcactaactccacaaaactcaacgaactaagtatcacattaagcagcacacaaaaaggagacagaagaaagcacacaggtaagtaaaggctcagataaacaatgggtagaaagtttgcttgtcagcccaaagagagaaaaatccctcattcagagtggtgcatgactttgcatcatcattgcccttataacctagctttcctctgcatcacagaaagaaaggggaacaacagaagagataacagataaaaaatcaagcagtaacacacgatggcaatcaaaatataggacacaaaagagaaaacagatccaaatcaaacaataaaaacacatgcagaagaaatgacgacttggccggctccaccagacagacatggtgacgtgccgaggcaaccttagccgctgtaacataatagcatgagtgtattgactacctagtaaagcagaatttaaacaagacaaacaggtatataatacagtttgc

SEQ ID NO: 25196 - DNA, 315 bp, Zea Mays
caacaagacatttatttatcccatgggcatggaatataatgatttataaagcgaagcatcacattgccatacaacaaaaatcatgacaacaccgatagatactatccactaaccgtttgaaaaactaaacttacttctcgcttgccactgcatcactcctcaatcacatgaccatcatgagcatcctccacaccattatataatagcgacctaagcgccgtgttacacaatacatacatcttttctcgtcgcgagtataaccatattacagcatatacccgcacacctcaatcaattatcttacgccaccaccac

SEQ ID NO: 25197 - DNA, 408 bp, Zea Mays
gtcgcgtcctgtcgtcgcagatcgacgatgcagcgggggcccggccgggagcggtgtgactagtttcctgcaaagccagttctcgtccgtgacgaagcgcgaggaagaagttggatactgtaggcactgaccgtggagcatgacagtgcaaacaagttccctcattcaattcgttctcgtctctctattatcctcgcaacccaaaggcactagcacatcaacgtacacacgcatacctctctagtatgagtatcctctatcgtctctattctccatctatcgtttccccttttgctattcgcagcgctcaagctactttacccaaatcaacaactatgttttggtttattattcctcgattacttcctccaaactgaacccaaggacactaccgttctttcccctttg

SEQ ID NO: 25198 - DNA, 682 bp, Zea Mays
taattgttggagttccttgttcaattccatcattaacattcatagtctggttgaacttgatttgagtggaagattgtacacttggtcaaacaacagggaccctcccacctttgaaaaattggatagatttctggctagtctagaatgggtccttcaattcaaaaatgtggtggtcactggtcttgacatgactttatctgaccatgttcctttatgtcttaaaactgactctcgagtgtttcttaagagagacttcagatatgaactgtgctagaagtttcgaccggaattcaaagatattgtttggaacaattggtctcttccggttagaagtcgttcaaacattgatatttggaaagagaaaattaaaagactgaaaaaacgttgaaagggtggaatattaatgtagaaggaagatattctaaacttaaaaaagagttactccaaaaaattgatattttggataaaaagagtgaaagcaatggtatttccagtgtggaaagacttgaaaatttggatttggagtggaacttaaaaaatttgatggttgaagaatgctgtaagagaaagcaaatggcaagagaaaaattcattactgagggtgatgaaaattctagatattttcatcttattgccaaaggtaaaagaagaaaagttaaaattctttccttagtccatgagg

SEQ ID NO: 25199 - DNA, 410 bp, Zea Mays
gcaagaacttcaaacgaactggtgctacccaagcagataggtaaggcgaactacatggatgagttctcacctgctgccgatttgtgaaggagctcggccacgccgtgatgtggccctatggtcaaacccaaagattgcgagcaattccgggctcccccgcacggataacgcacacccacgcgcggcgatcgatggtgacaagtccgaccacaccaatatcgcactggctcatgggtagccctcgcctccctcgttttctctctctaaatactttcttttctgtgttatccggtcgatgctctcagcccaagcttctttgactacacgatagatgggatcaaggtgggggggctcggcttatataggtgggtttgttaagattctcaaccaatgcctagatccatggaggg

SEQ ID NO: 25200 - DNA, 402 bp, Zea Mays
atcggaggagcaaagcctgcaccggcggcaccgcagcgcgacacgaaccaacaacccgacaaacgttgggagaagaggcctcgtgaagaagtccatgccgctggaccacccgcctctcgcgcccgaggaggacctcgcggaggcgaacgtacactggacgatatcctcgacgcccagtgcccgtaccacaaagacatgcgccacaccctccagaactgcagagacttcaagcactccatggggaacggccgacccttccaacctctgccacctccccaccacgaggaggacctggagaacctcaacaacctcaacagcaggagggggaggaggcgaagcgttcccgtgtgttgatggagaagtcaacatcatcttcggcggacatggatcgcaggaaagtag

SEQ ID NO: 25201 - DNA, 509 bp, Zea Mays
aatgagggggaaaacttgcacggtgctgatcgaggtctcgttggcctccaccccaatagtagctcccccgagggaatggttcatcctgatgggccaatcccgaaatatctatttgaaggggacgaaaactgccctcgatcatctggtgattcaccttgtgagggcccgctggatgtgaccgttgtgaaaatctatggtggtactatttgttatggggtttggctataaatcctggattttgcggtccttgtgttggactgctaccgtgtcactttccataacacggtagatcacacttttcgtctactactacttcactttcattgtcgctgctgcgttactggtcgtgacaacgacaccgaactcctccatgctagcacgcttgaagcctgtcggtcgccaccgtccatagtacgttgtcatgcctcctcttccggacgatggtagtatgatgatgccaccgctgtcaagcaacgggattgacgccactgctcgagggggaattcttc

SEQ ID NO: 25202 - DNA, 631 bp, Zea Mays
atagctagtggggaaagtagcggtgttccttctcctgctttgtctgccctcattggtctgcaagaattatctctgacgaacttcgatcaaactcttgaagacatggttccagaagatcagttgtcagagccggcagatggtggcgcgatggatgtttgtgctgatgtgcccgatgccgggttggggtcatcccgggcagcgtcccacgcctcatcgaccttagagcgcggtcttgagggtcaggaggctggtctggattgccctgctcccacggaagtgactaagggtccttcagccttagtggtggctgttgcaggagactcggccttcaaggatggtgctggcgcttacccagcccccgagggtgttgccggagatgatccggctcggatgggtagcgcgagctgtgacccagcccccgagggtgtccgagtgggttctccctcccacacatacatggatgttcacgtagggtcttctcctccacattctggttgcatggcgatagcccaaaccttgggtcaaggagtcgctttagaggccagcgcacctgatgacagagttctggcttctgctgatgacactgaattggttcccactgatgcgttgcgagttgttccggttggtgatc

SEQ ID NO: 25203 - DNA, 761 bp, Zea Mays
aagccctgagatatctccaagagattcaaatcccattatagatgaggaacagcaagttaaagagccatcaaaagatgacagcactaaaagtatttctgaagctgaagttaaacagactcctgaatcatttgagcatccagcaccttctgagccacaactagagatagttgaggcgaacattaatgcacctaaggaagttattgaagttgaaaattcagaacctgaagatggttggcagcctgttcaaagacctaaatcagctgggggttcaggaaaacagatgaaacattatcgcccaaccaccagaaaggtgtatgaccctgatagtcatgatccaacatatacttcacaatacaaggcaaggaattcctattcaaataaccggtattatttcttaaggaagagaacagttgtacctacaacgtacacagatcctcaacagcatgtgaaagttcagacatttggtgccaggtttggtcgcaagatttacaaggctgtgacctatcgggttaagccagcgactgcaacaacagaggtgctagatacttttaagagtacagagcagatgagtggtaaagcagaatcacaggtagcaaactcacaagcacacaatcctacctcaacagatcacaaaggaagtgagtcacatggaactttagttgcaagtagtggaaatgctccatcatacaaagatgttgcactagcacggcctggaacaattgccaagactcaaatacagaaacctagagacgatgtaccac

SEQ ID NO: 25204 - DNA, 491 bp, Zea Mays
tgtactcgaagaagaacggctgaatgcagtaattcaatcagcacgataccagcagactctaagacgctatcacgacaaggccgtgcgacaacgatccttttcagtggaagatctcatcctccgccgaattctaacgggggagggacgacacaagttgtcaccttcatgggaaggaccgttcatagtagtagaagtcactcggccgggatcatatcgtctcactcaaatggacggcacagaaattgggaactcctggaatatagaacacctcaggaagttttacccctagctgtatttcaaaagctatcgggacgataatgtactccgtaaaatgggaaatatgtcatcaataaaaaaggggcttcaagaatactcagttcgttcatgattgaccgacattcttatttaactcggggtgaccactatgccctgctaacggagcaatcagcttaagtcggcaacgacttaagacggtgcaacatgctcgcgct

SEQ ID NO: 25205 - DNA, 702 bp, Zea Mays
caagagtgtacaaaacagcgtaagtatgtttctaagcactgattaaccctttcggtttgtccgtctgtttgtgggtggtaggagctgctgagacacaattgggttcctgttaagcggaagagctcttgccacaacttactagtgaaaatggggtctcgatcatacaccttagccattgttaaagctgtgaaaggatgtaatagaggtaggaaatgggcatacttcgagaacttgtctaccaccaccaaaatgcaattgcccttgctggaaggaggtagtccagaaatgaagtccatgctcacagtttgccaggcttgttctgggactggcaggggcagcagtaacccgggtatttgactctttctggtttagcttgttgacagatctggcacgaactcacaaattcatgtatatgtttcttcatgcccggccaagcgaaattagctttaactcttctgtatgtgactggaaaaccggagtgtcctcctacggcactgtcgtgtagtgctgtcatcaccatttgttcaaccacttgattgttgcccagccagattctgcctttgtaacgaattacaccattagtgagtgtataatgttcctatttttcccccatggccaaactgaccaacagttgttttgctactgagtcattttcgtacccctgagtaacttgtcgtaaccagttcggaaccacaactgatg

SEQ ID NO: 25206 - DNA, 349 bp, Zea Mays
agcattaaggtaagatcaagggatgacaaaagtaaaggggctaacaggcaaaagcacagcaaagggcagagtcaagacgagtctcataaagtggtgaagtaaagagaacagtaaaagggtaagacaggtaaggttccaacaaaatagttgaagtgaaaattcattattgagggaatttataaggaaacaacgggaccaccaaggatgtgtgaactaaaatggtcactcatgggttatcgagagacaagggtggtcaagggaatgtaaactgaaatgttttaaatagacattggtgtataagataaccatataaaaaagataagagtatgcaagattccaaggatacaag

SEQ ID NO: 25207 - DNA, 423 bp, Zea Mays
agactgaggtcatgggctatcactatcatagagaagaagagaagatgtgtagctcctcctactgctacggaggagccatgccatgctgattgatgagcactatactatacagtatacgcggcgcgtactgcgtgggattggagtaaccacggctcagctgtcagtgtgactatctgtcggcatcggcaacggcaacctcaccgcactgtgttgacagatgccctctctggctgctctgtctatcgaaaaatattggcagttgcaagtctgcctcggcgctagctacacaactgctgtcgtctctgaaatctgaatcctttgtttgcctgtaccctctgccggcgtggaaacgggcgaaataactgaatattacttttactactactatctcccctcccccatctgatctttttcatctgtcga

SEQ ID NO: 25208 - DNA, 376 bp, Zea Mays
ggcaggcagcgtgggactaggagagagaaagtggtggtgggaagccaacaaagaaaatcggcagccatttcttccccttttgccttgcctcgctcctcctccctcacctctcccccccgtctgcttccagtccccagaaatcaaaacctccaccaccacagagctccgagaccctcaccctcctccccgtctgctcgctgcgtggatctaccggcaggatgctctctccatcgcgcgcgccgcccggggagcgcctgtgaagaaggaacggaaggtgagagaactgccggtgttcttcctccgagttcgtgcgtgcggtgtggtttccgtgggcggttctcgattttttgcttgacttgaatccgcgcggtttttc

SEQ ID NO: 25209 - DNA, 282 bp, Zea Mays
ctggacaagtttgtggtagtcttcatcgatgatatattggtctatttgatgaatgaagccgaacatactaagcatttgcatatagtacttcagaggctgcgtgatcattagttgtatgctaagttgtccaaatgtgatttctggttgagggagatcaaatttttgggtcacactaattctcaggaggggatatcggttgatccagagaaggtgcaagaagtgatgaattggaaacctcctaccacagtacgacaaatccgtagtttcctgggattggcaggg

SEQ ID NO: 25210 - DNA, 387 bp, Zea Mays
acctccttgactccaaggaccgcgcgggggcctacaccgtggggtttagtgggcgtcaacggtaggtagaaccccacgatcggtagcgacaggtgggagcacctggacgtggcaatgtccaagtccagggtggaactcgtgcccactagagcacgacatgacaacgacttccacgtcgtcctcaaagccctccaagcagatcacacatcctctagtgttgttgtcgcacgctgcctccgccgtgggatagaagacatgaaatcgacctccatgaagacaccaccgagaactcgtgcccgctagagcacgacatggcggcgacctccacgccattctcaaagtcctccaagcagatcacacatcctctggtgctgtcgtcgcacccag

SEQ ID NO: 25211 - DNA, 413 bp, Zea Mays
tttaattattatcatatgcacccttgacacctctatatcttaccttgatgtttatcttatacctaccctttaaaatcttctctctcccatctcaatctgagaattgtatgttttacctaattttctcttgaacgtattatcttctttgtcaatttcgagtttttaactccatcctttgtcgtgtttttgtttgttattgcctttgcctttctcatcccttaaccttaccttggcgattacattatgtctgttatctacaatctccaatctcccatcccaatttgggagaggtgttttacttacctcaccctcaggtatattctcttctttatcgtgtgtaatcttgtgcgcaactccattctttgttgtactcataccactagctctccaatgccttcatcttttctctcata

SEQ ID NO: 25212 - DNA, 337 bp, Zea Mays
cgcataccgacggggcctaaccctctgcacaacagatagctagctgatcgtgcatgcagcccagcaagatccatcaatcctataagacgagaggagcaagcaacgagaaatgcaatgcaagccaagccaccagagttcagggctttcttggtacttacgagcgagctcatcatcatctcctaccaccctctgttctgttctgttcaccacggacatggaccagaagacacgatagcgatcggcagtagtggttgagcttcaggagttgcgaaaactctctggacgctgtcgtccattaatttcctcctcttcttttttttgttcttcccgagctttt

SEQ ID NO: 25213 - DNA, 353 bp, Zea Mays
cttgctcctagacaaagtcatgtgcgcgccatagctgtccgcgctggtgggaacctgccaattgattttggcttgttgcacctcaactttctccaccaagttcgaaggttttagtacatcacccttgcctctagttcgtccggcttagggatggaccaaagtatcatagctgccacaaccatgttctgcctagtgttgatgaaatattgcgccctgtcactgctctcggcatgctggtcctagaccttctaatgaggacatcacttccattgatacaaccacaacgataacccttcacaagttactaatcaaggacccacacccgtgcacgtgaacttaattattaggtgaac

SEQ ID NO: 25214 - DNA, 379 bp, Zea Mays
agtttcggtccaagacccctattgtaactttgaagaaccttgtttggtgaacaagttttgttaacatagattggtctgcctttagtaaaaatagggagcaaagaggggctaaactgagcaagttcagtcaaacgatgaatatcagaagggcctgaaatatctgaagaaaatatccttgcccgctttggaatccaggtgtgtccaagtgaagtgaagataagccaaagatggtcatggaaggataactttgggcaggatcactgccttgaggattaagccggggaggtaaaaagatctagcctgcatgtgacacttgcttgagtgctccatgctacggtgtcatcggcggccctacctcaatgtgtctctatattacgtg

SEQ ID NO: 25215 - DNA, 298 bp, Zea Mays
gaaaaaggcaatggctaaggtgaacagtatcagccgcatcaagaatagatgataatcaacatgaaaagcacggcaagccagaaattaaaaagaattaaccttaacgaccaccagtactgttccagatgcaggctaattcaactgaacctaatttctcaatgaagatagtatactgggatatgaaatctttaagaggcggatgtaaaagtaatcaggcaaatgatccagaccatctatctgaatcaacaacgctagaagcatgggcaaaattcaacaggccaaagaacctggtgaaaag

SEQ ID NO: 25216 - DNA, 831 bp, Zea Mays
ggaactccgccctctcctccatggactttgcgactgcttgcaccctggtgtcgcccggctcataggatctgatcgagggtgggtcgcgcccgtacaccacgcggaacggagtgtcgcgcagggaggactggaacggtgtgttgaagaggtactcagcccaaggtagccacctgacccattggcgtggtcgatcccccgtcaaacaccgtaggtacatgacgatgacgcggttggccgactcggactggccgtcagactgagggtggaacgccgtcgtcatgtgtagctttgtacccatcaggcgcatgagttcgcgccaaaatgcggaggtgaagaccgtgtcccgatcagagacgatggactgagggacaccatgtagacgaacgatgtcggtgaagaaagcctgggcgacggattcagcggagtacgggtgtgccaggggaatgaagtggcagtacttgctgaaccgatccaccacggtaaggattaccgacttgccgcggacgcgagggagggcctccacaaaatccatcgcgatgtccgtccagacaccctgtggcactggtagaggaaggagcaggcccgccggttgaaggtgctcggatttgtattgctgacacactgtgcacacgcgcaccatgtcctgcacccgttgcttcatgttggggaaatggaagtcacgtcggagccggtgaagggtgcgctggacgccctcgtggccatcttcatggaccgcccccatgatctcctggagtagcggggatgtgggcggaatgtacagccggccggcaaaatgaacgatgccatcaacgagcacccaaggcgcctggc

SEQ ID NO: 25217 - DNA, 413 bp, Zea Mays
ggggaaggttgttgaagaccgggtcgccctgctcctcggactataagagctctaccatcgtaaccctctcctcatccgcatgcgccgacatcctctgccctaatgccgtagtccatcgccgagaacacagagagaggagtggaggtctacggcgccgccgacgtcgtctgtggccatcactgtcgttcagtactcgcgtaaagatttcggggaagcttcgtgccgtgagggacctgggcggacctctctcgcatgggaatttggctggactcgccgggaatttctctccgtcgctcacggttcgccgccgaccacatcacgacgtggccagactcatccgaccgctcctacaccggtaagactcctcctgtgtgcctcgcctagttccgcggtcaacgtagcactcgtctggt

SEQ ID NO: 25218 - DNA, 349 bp, Zea Mays
gtttggtgtcgttttcctcttgacgatgaagggcccttctcatttaggctcaagatttcctcgggattctgttctactggttctgatgaggacgaggtccccctcgtcaaactctttaggagtaacagtgttgtctcgccaggcctttgtttgtgcttgatatttgttcaatgcttcgagggcggcgacacaatccccatcaaggaggccttttgttgttgactcatcgatgtctggtgtggtcgtggtgtttgttcggggtgatccatgcttgagctcctgcggagtcatggtctctgatccgtacattagtctgaaggggtgaatccaatggctcgggattctgttg

SEQ ID NO: 25219 - DNA, 436 bp, Zea Mays
cagcaggactggagggtgcgtgccgtatctaggccgcatgctagctagatagagggtattccatacgaccagatacactagtatccgatccgacttggatcgttcgtatctcgcgcggtcggccccccgggcgcgtaactactccagcatcacaagcgaccaacacaacacagtaacctagtacttgctacttgtaccacaaagaagaagagcagcatttttcgtcctcgtatgaccgaccacatcaaagaccaggaaaagtcgcaaaatgtcacgggcacgcaggccctcacggcatggcgagccagttgatcgatccacaccacatcctatctagtcgacctcggccaatgcaagcacgcgtgccgagcctcagctgttgcgtgcgcgccatattgcagcagtgccatccacaagggtaccgtgtgcctgctgc

SEQ ID NO: 25220 - DNA, 328 bp, Zea Mays
ggaggaggacgaataaagctgtgaccgtaactgctggtgggagacggggacgataggctgagccgcccgcaaggcattttgtgtaggactggggcaggcccagggtctctcttgagaatgcaaacaaacaatattggcccataagtaaaaccggcccaactcacgcgtcctctcgctctggatgtctcatgtcagtctggatgaggatgacgcacgcgcggcgcgagctcgtaccgcacaaacgacaggcgcgactgacgctgggccccgtatcgggaccctaaagattccctccctcggctgtccacggaccactggctgactggac

SEQ ID NO: 25221 - DNA, 321 bp, Zea Mays
aggagatcgatataggagttggtaaaactccaaggccgacttttgtgaacaaaaccctggagaccaatcctagagattaaatgatcggtctattgaaagaatattctgattgctttgcttgaaattacactgagatgctaggattaagccgcgagatagtagagcatcgactacctattaagtctggtttcagacctttcaagcagaaagctagaacatttcgtccagacctactaccataaataaaggacgaaattcactggctgctagaagctaattttattagaccttgcagatacgtagagtgggtctccaatattg

SEQ ID NO: 25222 - DNA, 512 bp, Zea Mays
taaggggatgtcagcagcaacgatatcaaaggcgcggttcggagggacctcggcctcgttagcaggtggtagactcctggcgtctggatcactggcctctaaagtgaccagaccggcgagagccatagatagatgtgtcaccgtggcctcctcggattggattggcggcgatccaacatggacgtccaaggaagcggcggaaggggagcctgcttcaacaccatcgggggctgggtcgctcccagcaccaccctaggggctgggtcctccgtggcagccacctctaaggctgaagatccctcagccacgtccataggagccaggtgactcggatcagcgtcttcgcaaggtagaccgccctccaaggtcgacgaagcatgagaaactacccatgttatctcttgcccagcaggatcatgcggcagaagaccttcatctaggacctctgaacagatagtgggattgtcagcttcaggaggctctgatagaaggtccttagggatgatctcttc

SEQ ID NO: 25223 - DNA, 408 bp, Zea Mays
tgccccctaggtccagaccaaggcgaggattgtggtttccaagaaagctcatcaagaggcgtgatcatcatctttataccaagaggccttgattgcaaaccaagtacgcactttccctgcctccagttctcgtgtcggtacatttttgctaattgcatttcactctcctcccaagccttcattgctgaagtatctagtggagaggatcaggcaccctgagggaactcacccctggaagctcttgattttcttgccaagaccgtcgacacagtggttgtccttcaagatttgcgtgggccggtcagccctgagccagtcgttgatcccatcctcaaaaaggtaagttgtgtttattaagttatatgcatcctctccctttcatgatactgatttttgttttctatttta

SEQ ID NO: 25224 - DNA, 507 bp, Zea Mays
gatgaaccattgcagcgcaaaattgtatcagccctacattgctcggcgattggtggtcattccggcgtcccagctacatacagccgtgtcaagagtctcttttcatggacacggatgaagcaatatgtgaagacattcgtgcagcaatgccaagtgtgtttacaggcaaagccggaccggtcagcctacccaggcaaagtacagccacttgaagttccgctttcggcctgacacacggtgtccttggattttgtcgaaggccttcctcgttcgggcaccgcggattgcattttagtggtggttgataaattcactaagtatgctcatttcatcccattgcctcacccttataccgcactgaccgtggctcaactttttatctctcaagtctatcgcctgcatggctttccagtggctgtgatttctgaccgggaccctgttttcaccagtcagttttggcagcactttttcaagttagcgggtgccgagttgcgcatgagttcctcc

SEQ ID NO: 25225 - DNA, 363 bp, Zea Mays
ggaaatgtgtgagcaaccagtgcatactgtaggggcccattgagtccttctgtgaagtgctcttgcttcctttcatcatctgccacctcatcaggatcataccttaacatctagatgaacttgtcatggtactcactgacaaacatgttgccttgcttcaatgacagaaactccttcttcttgatcttcatcaatccagcaggaatgtggtagaatctgaactgagttgtgaatttcgcccaaataatagtgtcagcagcatcatgggcagcaacataagaatcccaccagtcagcagcaggacccgtcagacgaccagaagcataaagaaccttgtcctggtcagagcattgggcgatgttg

SEQ ID NO: 25226 - DNA, 326 bp, Zea Mays
accaccgacgcctaaaggggaggggtacaagaaaatcctcactcgagcggcgaaccatctcctctcgctagcccacccggaggaagatctacgtcatcatttaaaagaccgacacgacacgcggagtgacatcgactcttcacgtgcccgacgacatgtagaagagatgaggcgatgtgaagactatgaccagaaccatggctccacgcggcgaggggccaaggaccggactgaatcatccatcgactcggtgatgcactcgtctgcacagcggccagcacacgaacgactttaggatttgcataaaccgtcgccactgcgtgaca

SEQ ID NO: 25227 - DNA, 436 bp, Zea Mays
ctggagttcgtggatgtctcaaccaattccactcgcttataagacccggctgcaggtatccctcccctcctcattccattgatacccggcgccgaggggagccgtgcggctctatcaccgaagacccacagagaaatcgcgggtggtgagtgagtcgagtgccgccaccgtgtacccacgccatcaccgattgaccgtcatcgatttggctgttggggacgtcatcgtgggttggggatccttccgtgctcggtggttgtacgggtctggtcttgaccatggctaattgctcactgaaatcccctccgtactgcaaagtcgtgccccgtttaccttttccccctccctggtcatcctcgtcgccgccgtatcactgaccttcgtgcttggcgttctttggagctcggttcaccagtggtgcggtctattggtcttg

SEQ ID NO: 25228 - DNA, 379 bp, Zea Mays
acaagaacaaatgcaatgaatattagggggtatgcaagaggattataagaggctagcacgtgcattggataaatccgatgttgctaattttccatcgcacgagggtaagactagggaaaatacacacaatccatcggttgcaaattggtatgaccaatcccaaccactttataggatgtcgatggacacatatcctggacaatcatagcctcctgcacagattgggggtaaatccaccgatctacgcacggccggaccgtctgcgcctgagtgcggaccgtccggaccagcagtggttagccttgttttccgaaccgagttaccaagtccgcgccagggccaccgcattttgtgcaaaccgtaacagactctttcagat

SEQ ID NO: 25229 - DNA, 332 bp, Zea Mays
gggagatggcctatcagcttgagctacctaaccatctatctgaggtgcatgatgtattccacatatctcaactcaagaagtgccttcgtgtccccgaggaacaactaccaatagaggaactgagtgtgcagggtgatctaacttacacagagtatcctatcaagattattgacactttgacttgagttacaaggaataaaatgataaagatgtgctaagtgcaatggagtcaccatggtgaagatgaggctacttgggagagagaagaagagctacgcatagaatttccccacctctttcctaatccttcctaatctcgaggtcaagattct

SEQ ID NO: 25230 - DNA, 411 bp, Zea Mays
cttggtttgggttagagaaggtagccagcacctgggggcggaaatcaagttttaccggtgaagttggtggtgtgcgccgttgccaatcgcgtcgtacaccatcgataggtgctcggggttgtgtcgtggagctccaccggatcatactgatcgcgctcacggcagaatcaaggagggcgagcgatctggtgcctccaattcgtcatcgtcacggcgaattcaccgcaacgctgtggtcaggattattcggatcgctgtgggccgatacatgttcatgcgttgtttcgaaatcactcgtacatgcgattggatgcattagacttaagctcggcggctgggatcgagggattgcggtttccggcaatggcgccgctgcgtaggaagggcgcgccaccgccgctgctgctcgac

SEQ ID NO: 25231 - DNA, 355 bp, Zea Mays
gatctctagcttctgctcttcctctggtgagcagccctagctcctccccttccctttcctctgtctctcaaatttagtggagctcctgccctttcaagcccaccccttgttgctcaatccaaattctttatattcctatgaatccaagtggtgggatgtgttcttttgtgtctcttgaacatctctgcaggttcctagctccttcgggagggtttccccacctccaatagccatttcattcaaaacctaaatccccgcacatcacatgttcgatgaaatgcaccaaccactcaaaattgctccgattgaacccaaacttttcaggcaccatcacaacacctccagtaacatattc

SEQ ID NO: 25232 - DNA, 275 bp, Zea Mays
gtattggtcgtccgatcgtggacgtatgtgtgtgcctgggtcgccggcgggctgggcgttggtgtgctcgccgcggcggggaagaaacagccagggccctggatccatgagtcaacggttgtgattgaatccatccatatctatgcgtcgaacaaaatcatgccgtcagtttccagatcggtggcctagatatagtctagtgtatccccttcgccgatgagtcctgagtcgtagatctcggtgtgggtggctaggattagaacactcgtaccggt

SEQ ID NO: 25233 - DNA, 322 bp, Zea Mays
gtccaccaatacaagggcttcagatcatggtacattttggtgcttcctggatgcatggagaatttggagagatgggcctcatccaagattttcttcttgagatctttatttttaggaaccaccaatctacttttgaaccacaatataccctttccatcttggcagaaacatttatatttctctgtcttctgacggaggttctctttaatgatttgcactcccttgtcactgagttgggccataatgatctggtcttgcaaagttggctcaatggaaatgtgagacaaagcaccagaaggaatcacttgaatcttcattttac

SEQ ID NO: 25234 - DNA, 367 bp, Zea Mays
atttgggaggttttggtatttgtctgacctttccctccttcctgtgatcgctggaagatttgggttgatcacttccttctttcttcttccttttcctgtcgcttttccccccctcttgttttatctcttgaaaaatcaagtctccgagcagcgagggagggtttataatttcgttctgtttttatgattctcctctaaatcatttgcggaatcatcttatatattacaaatatgatacaaagaacccctccctttataagggagagagtcgacggctccatcttgtttgtttcttaagaaacaatttgatgggtgcaaacctgctaaccagatatcgacgaatggtcggtgctagtggtactacggc

SEQ ID NO: 25235 - DNA, 630 bp, Zea Mays
ctgtggtttacttgcagattttgaagccagctttcaccattttgcttgatagagacaaaaagtctatacttctattaattaggggaactcatagcatcagagatacattaacagctgccactggtgctgtggttccatttcaccataccattgtacaggaaggtggtgttagcgacttagtactaggatatgctcattttgggatggttgccgctgctaggtggattgcaaagctctcagggccttgtctggcacaagcattgcagatgtacccagacttcaaaataaaggtttgagttatttcatagccattttctttgtctttgatgctagagtatgagcattgctacaacataacctttttatgacttatgatgcatcataactatgtttacatgtttctttcaaagtgttgcaattgatgggtgttcatggcaattggcaaatctatttaggttgttggacattcactgggaggtggtacagctgctctgttgacatacgttctgagggaacagaaggagtttgcctctactacttgtctggcatttgctccaggtttctatgctatgctttttttctcttttagaaccttaatttctcaatcaaaccatgaaaacgatgtgtaca

SEQ ID NO: 25236 - DNA, 289 bp, Zea Mays
caaggaaaatcaaagggatttggaggtgacaggtccaatcagggacctgagaagcgaaccaggatggtgatccgaccatttaatcagaattgttcttcgcctcatccaccctcctatgcattcaaacagcctgttttcattcgccctgccactgcccccacttctataaatcagccgagtgcccctggtgctcgtttccctgtcctccctagttcctcaactggctgcttcaactgtgggaagtctggtcattttataaaagactgtccatatccgaggcagaataagt

SEQ ID NO: 25237 - DNA, 313 bp, Zea Mays
caagcaacgtacgcggcgatgatacggagcagcagcaagatccaaatgtagcagcaccgaccgtacctggagcaggagccggagccggagcaggagatccgatcgaggaacgccctcagttaaccagaagtgagatcgaagtagatctgacaatgcgattgttaaaacggcggacgcggaaagcgatggtagtgtgagtgccttttaacttgttgaggagtaatttgggacgcggaaagcgctggtactgcgagcgctagtagttaaactggtatctgacaaacttacccacgtatatttggctttattcttt

SEQ ID NO: 25238 - DNA, 295 bp, Zea Mays
ctacccgtgctaaaccctacaccaaactgtccgcgcaaagactgactacaggcgcgccggaccgacataataaacgtactagaccaagcgcgcaacgcctttataagcatagccggatacgcgcaggcgcacagcctcatcatacaaattatagttacatatgtacagcaagggcatcacaccttacatcggttcaaccttcggaatgattcccatctccctatagttaaacagcattatcctaagctcctcaacctcaaaaagacttcgcaactccccctcacctacactcgca

SEQ ID NO: 25239 - DNA, 467 bp, Zea Mays
cgggtccgtcgcctactccggatggctgtaccttcggtgccttggagggcactttggcaccggaggtcaaggggcttctccctccatcgttcggtcgagcaatctcggccgctagagtgtgtagcttctcgacggccgcgagcgtggcggcacgatcgcctcgcacggtgaggacccctgcgggggacgacatcttgaggaccaaatacccgtaatgggcaatggccatgaaccggtatagggctggcctaccaatgatggcattgaaggggaggttgacatccgtgacatcaaactggacgttctctgtgtggaagttttcctccgtctcgaatgtaacgatgctcccgaggggatacatgggctgtgggcccaccccagagaatgggcgagagggccctagccgggaccccaagatctacaactgcttgaatgctgcatggctgatgacgttgaggcgagcccct

SEQ ID NO: 25240 - DNA, 541 bp, Zea Mays
aaaatctagaggaaatttgccccaaacatgatctgtcagactgactgaaggagttcctgatggtacagtaaccagaaagatctgttggttcagtgaaccggccgccggcgaccccgggcgtggattcacgccggtgaggtgatttgtgcgcacttaggcccggataacgcctcagggtagaaaggtcttcacctctattgagccatggtgtccgctaagccccggtcgctttgaatctaccctcgccagagttagacacctcgcggtcttgtgccacgtgcctcagcactttaaccacgccgccgtgactcatactaacctatccagtgatcaccggtgaggttgccacggttatggccaccgatcgtgtgcgccagtgcccctcttcctctccgaccgccagcgcgccaatccaaaattggaagccatcgatcttgaacactataaattaagcacactgctagctccgctagataatcacgaagccagagcacccgctcctgcctccgattagccaccatagctctccaatttctcttct

SEQ ID NO: 25241 - DNA, 395 bp, Zea Mays
ctcactggctcttttttctgttgaagaggttaaaaatgtggttgataatcttaagcacaatagtgcctagggtcctgatggtctccacactgtgtttttccaaactttctgggatgttattatgaaggacttgctagcactttttggggaggttgatgccttctaagatctttattttgacattttcatctgccctttcaagagtctccctatgaaatatcttgggatccccattgactgtaagaagttggggagttcccatcggctgaccaaagaagaaaaattggggggaaatggagatgtggaaagctaggttccttagtatgggtgggagtcacatcaatcaacaacagtctttctaatgtcccttcatacatgctctctctctgcctggc

SEQ ID NO: 25242 - DNA, 290 bp, Zea Mays
cagcgctacggacaacaggttttgctgagtttggacctcaaaacttggtggcggcggttccagtgagaatcggtagcaacacgtggcatcacaacgaaggtgtgtcaaggcaaagtaacttcgtgtgaagcacctggccgtcggtgttgggcactgtcacatggatgaactgacaggtggacccaaacactcgggggacaggtgagagctcagatgcacaacaaaacaaactgagggaactatcgcttcttgttatgcgtgtctcatcttgctacaggacgagagtattt

SEQ ID NO: 25243 - DNA, 456 bp, Zea Mays
tgtctttcacgcgggcttcccggtccgtgcggtggactggcttgtgctcgtccaggggccaggcacgcacaccgacctcctgtgccataccgtccacacccggccagccactcatggatcgcctgctccagcaatttgaggtggtgttcaccgaaccagcagggctgcctccacctcggccatacgaccaccgcatccatcttccaggcactcctccagtcgcggtttgcccctacagatacccccagctccagaaggacgaactggaacgccagtgtgcagccatgcttgcccaaggcatcattcggccaagcacctcgccgttctctgctccggtgctcttggtacggaaacatgacaactcatggcgcttctgcatcgacttccgagccctcaatgccaagacatctaaggataagtttcccattcctatcgttcaggaattgctcgatgaac

SEQ ID NO: 25244 - DNA, 319 bp, Zea Mays
tatgctaactttgagaagttttgcatacgagggcactcccaatgcagaaactatctagtagtttccatggcccaagaaactacctatagaaatcatacccaacaatagccctgtttgggacagcttatttctgtagagctttcctgagaagctggctgtctgaagaatctgctagctagataattaggtgtttaacaatcctgattttttgaggagacgattgtcctgagtgtgtaatgtcctgagtgccactggaactaatggtgccttgattaattgctgaatagatacatgttgcatcatgaactagtttttgtac

SEQ ID NO: 25245 - DNA, 543 bp, Zea Mays
cgggtgcgcatgtccttcctccacccgctcgactactaacgtggtgcttaccacatgagtcgtgcaggagatatatagtagcagatcttctgccggctgatttggtgcagctcggcgtggcggcttgagtactggtggtgtagtcaagaactttttcagtccttctagagcttcttgtgcctctgtggtccactaaaacttgtccaccttttcgagcaacttgtagaatggcatgcctttctcgcctagccttgatatgaatctgcttaggactgccatgcatccagtaagcctctgtacctttttctgtgatcgtggcgcttccattctcatgatggcctcgattttttctaggttagcttcaattcctcggtggctgacaatgaatctgagtaacttccctgctggtactccgaaaacacatttttttgggttgagttttcaccggtaacgcctcaggctattaaagactagctgcaaatcttcgatgaagctttatgagttttctgttttgatcactacatcatcaacgtaggcttccac

SEQ ID NO: 25246 - DNA, 317 bp, Zea Mays
ttcattcttttcctttgtcccctttagcttcggcatattccattcactcagcgttgggaacaccttataggccagatattcttggactagatctctggtgctgatctgctcggctaccaccctgaattctgccacagcttgttggcacggtgaccccgacgtcatgcggcacaggggcctagtcaactcgaagcttaagctcagcgggctcagtactagcgtctttagcttctccctcttcttttcatcggccttaacatagaaccactcatttttccaaccagttggccacttggtgcgatagctaaccaccggag

SEQ ID NO: 25247 - DNA, 599 bp, Zea Mays
gccggggaacaggatctggtgcaacccatgtcctaggacgaagcctcggaagtagggaaaactcccgatgaacgagtacaccgagaaagacgcgactcctgccgccgcgatcgctgataggctcaggagcgagagcaagaactagctgaacaagacgccagactccggcgagagaaccctctcctcgctcgaaacctataccctgacttcgctcgagcgttgaacacacgagtgaagttggaggagtgctagcgtagatagccgacggccttccatgaaccccagacgcagaaggctaccggcggctgcttacacaggcgacaatcatcttctacccctcgcacatcctgcgaatgacttgcgtcacgccatcaacagtcgacgagaagcacgaagcaccagcagtgcttcgcgcgaccgacgacatgaaaatgagataaggcactgggaggagtacgaccgagatcatggtgtaccagcgtgaggccgtgcaacacgaattgagtcggcgacagcttcgaccagtagtccgttccggggatgatcgagacgacctagtactcactcccctccccgggaccgatggcacgaacatcgac

SEQ ID NO: 25248 - DNA, 699 bp, Zea Mays
aacgaattcagctcctgggggtgggacttggcgatttctccaatttggcgtgcagccgcaaacctcgttgcttgtgtcgaaccagctgggtaatgttaaagaaaccttgcagggatagataatccaacaccccaagatggtcatctgagcaacttatagatagagtatttgagtgggcatattttagcatcgttagttgtatattttcaccaggcaaaggtgcagaccagttgcactctagagaagcacaggacacagcacataactacataccaggagctgtaataacagttatgaaccatatttaaaaaacaaacacatgtgctattaaatagattctctctacagagggagggcaagagattgaaaggatactgtctagtaatgtgaggaggcggtgaagacgggacgagttctgagccataaatgacgcagaggggcagacgtgacatccgaggaagtatactgagggaaggtttacttcagcgcctttagtcagcaatctgccgtaggtaaattactccacatgcatgtaatgtaatagaagtgcacaccagctctgcagaagaacagataaagagaggcaaaacattaagctcgctgcaaccgcagaagagtggagtggccaacagaacacgtaacgtagcatggcgcgcgataacgaaacggataaatccctcccgtcaacaggtggtaagc

SEQ ID NO: 25249 - DNA, 322 bp, Zea Mays
gtttttcccactactgctcttacgtctgataagtgcagtgattctaagctatggtatatacgtcttgggcatatgagtgatctcggcatggaagagttgagcaagagagatggatttatgtgagcactgtattttggtaagtataagagggtaaaatttaatactactattcataaaggtaaaggcatattggattatgtgcatgctgatttgtggggaccctctagaaaaacttctcttgtggttgtcgttatatgcttactattattgatgattactccagaagggtgtggccttattttctgaaacacgaatatgatgc

SEQ ID NO: 25250 - DNA, 363 bp, Zea Mays
ctagattgtagtggaggaaatctcgcattggggaatggggatctatattacggtcaaggaatggagaacggagaatggggaggaagaagaggaaggagagagctcaccggaggtactcacgggcggcagctacaccagcactgacggcgatgcgaacgaaagttgtgcccgcgcagactggttctgacggaggaggcttaatggctctcctcaacgtctaagagagattttgagtccataccggtggctacgtgtcgtgtggatttctaaatcgtcgaatctcttcctaacgtatatgttttgacgaagccgaatatgacgtgtttcataataataaaaatctctaatatatcgggttcttag

SEQ ID NO: 25251 - DNA, 321 bp, Zea Mays
ggcgcggttaagacacgcggcgcatggtcggacggcggcggttcaccggtgagcctatcgctccagtcgcaaagcagaggggaaggcaggggaggccgtcggagtggtgtccagctcaccggcggtgaggatctttaccgagctatgtttatccgatggccacgacgcacgaatcacggcgagcggtgatcaacggtgatggaccaccggcgacgagtagagggataggatcttcttcagttaccctttactgtaccatgggacattcagtttatgacgcctgacagtcatagtttaggctcgattttctcacaaattttc

SEQ ID NO: 25252 - DNA, 366 bp, Zea Mays
atcttgtcaagcgcctcgacgcccaacgtcgctggaccgcggctacgcagttcgtagtcgcgctccagaccttcaccgtgagggattcttcaccggtggcttgagagaggcagaggagaagagcagttttggataattgatctttcttgcttatttcccagtctattacacggcatatatagcctctggttcaaccaatctctcctatgattaaggcatatgaaaaggaaactaatcttaacaaatctctcctatgattaaggcatatgaaaaggaaactaatcttaaccaatccctcctatgattaaggcatgcaaaagggaaactaatccttatctttctaaacttagccactgattgtggcgc

SEQ ID NO: 25253 - DNA, 405 bp, Zea Mays
attggacatcaagtcacttgggaagaattcaagctggcattctgggaacattatgttccggagggagtgctacaaatgaaaatagaagagttcatccgactgaagcaagggggagatactgtgatgcagtatctcaataaattcaaccacctctcccagtatgccattgatcacatggatacagatctaaaaaagaagaattgtttcatgaggggaccaaatgacagacttcagcgtaagatggcaacatgtttggacctcacatacagtagggctgttagtacaacactggcagttgaagctaaaaatgcgggacactagaaatcaaagggatatgcaggtgaaaaatcaactcaaggacctgaaaagagaacaaggttggtgatccgaccttttaatccaaac

SEQ ID NO: 25254 - DNA, 478 bp, Zea Mays
ggtggtctgcagcggcgaacacgaacagcagtggctgggtggctcgctggaccttcccgtcggattgcaaatccagtggcttcttctgcggtagctttggtgcttgcaggagcaatggagaatgcagctgtgtccgcggatttgagccttcctatccagcggagtggagcctcggatacttcgcaaccggttgctcgagaccgagatctcttccgctgagctgccagacgaacggccagactgaacaagacgactcctttatcctgctagacaagctgcaggggctcccgtataatccccaggatggtttagcagcaactgatgaagactgcaaacaagcctgtctcagcagatgctactgcgtcgcgtatgcgtatcactccggatgcaagctgtggtactacaacctgtacaacctgagcttcgcttccagaggacctcctccatacagcaaggtttatgttcgttggggctccaa

SEQ ID NO: 25255 - DNA, 583 bp, Zea Mays
cagaggttgagttccatacgaacatccaaccttctgatgatttttttgtgtgtctgcttgatagcttggtaatggacatggatggtgacctcagattacatcctatgatgagaagagcgccctgctggattatgttatctgtgatcctggttcagtaaaaattcatgctgacccagcaagaatcttgggcagtgaatcaacaatggtggggcccgttcaaagatttagtgggtttcaaagcaatgcctaccgatgcttgctgagtaggtgtgcatcaatggtcctttcgcattgacttttcctcatgaagttgcctgacaattatattggacttttgtgggtcagtcagtcatgttcaggatgaatcttgactcctcagatcaacttaaattgaatagtctgattaaccatcgctttgtacaaatccagctaaggttacaatgattgtggccgttattggaaacccgacctaccactgaaatcattctagaccagaatcaaagtacagcaacctcaagtgcactatgataacgttatagccttttgctatcactcagacttgtggctccctcagtttgtcttt

SEQ ID NO: 25256 - DNA, 486 bp, Zea Mays
gtttggcgaaccctaggccacgggtcatgacaatttggcattagaggaaggtcaactctagagctgtcaagacgacaccggtggtgaaaccgtctgtccagacgcatctcgtgctggaggctatggcgactgtggagcagaagggagaggagaagtgggaacagatgatgaagatgatggatcgagtggtgaagaagttggatacggtggaagctggacagcatcggctcgaaggacaagccgagctctcagctacagtggcaaggaaggcagaagaagagtgtactatattggcaaggcagatggaggagacgggcaaggtggtggcgcagttgtgtttggagatgatggcaaaggacttggagggcgatggtgttggatcatcaagggagggtgctaatcaaggtgatccaaaccaaagaagaagagaaccacaacaggagagagttagagaagaagaagatcgggtgatgggagggcaaggac

SEQ ID NO: 25257 - DNA, 496 bp, Zea Mays
gacgacggtccggttctctcgtctgccttctccctcccatccgagcccactccctttcccccccggccctgctcgttccggatgtacgtgcctctgggcgtggtgtttggcctgcgttggtgccccctcctacaaagtgctgggctgcttctcagtcccatggtgcaaggggtgggtggagcctaggtgtggatgttgcccatggtcctagagatgagggtcaccactctagagattgtgccaaatctctatggtgtgtgatctgcagaaaggaaactcatgttaccgctaagtgtgtgtggcccaaacgaagcaaaccgataatgccaattgtcggtatggcagcagatggattgggattctatgcttctcaatatgcgaaaaatctggctaaaaaatctaagaaaaacatattaggtttggtaagggtgttggagggttatgtgtcggctgaggatctcgaaacggactttgggttccactttccttggggtcg

SEQ ID NO: 25258 - DNA, 404 bp, Zea Mays
tgcctagagatatcccacagttgagggcaatgaaaagaggaagaggggtgtttcagctattgaatctagcttcgatttggatgttcgaagacagcttgatgaactaatagctagaatgttttacactggtggtctgccttttaatcttgcacgtaacccatattttagaaatgctttcatgtttgctaccaataacccaattggaggttatgtccctccaagctacaaaaagttgagaacaactcttcttgtgcaagagaggacacatgtggagagaatgctgcagcccttgaaggaaacttggagctctaaaggtgtgagtattgtttcagatggatggtcagatgctcaaagacgcccactcttgaatttcttggttgttacagaagatggtccaatgtttc

SEQ ID NO: 25259 - DNA, 561 bp, Zea Mays
aaaatccaaaagaataccaagaaccaaggaggccaagctgagcggaggaggaaggcccctccggcaccagctcccgtcaggatagagaatttgtccgacgtcgaggatatgtccctagctagccttgatgaccttctcaaggaatttggggacactttagaaaaagagttcggtagtacctcagagaacgctcgcgtgtagtacgactggtagtagcagtacgcttgtaatgtattggtgtaatgaataaaataacttggttgaaaacaattggcatgtgcataatagtgactctctccccttggtagatggcttcggataaaaccacgcctaccgcctccgggattggagcagggtttcccctgagagctgaaagagaaatcggtagagaggaaagtgagacccacctccccgcacctccagaactacccttagatttagcccaagttctagccaaccaaacccgactcatcgaggtcctcacccgaagtctggaaaatcaacgtccgaatggtggaagaccgcaagacagaatgggggatttcctgaggctcaaacctc

SEQ ID NO: 25260 - DNA, 429 bp, Zea Mays
gttttgatcccacttggtagatccgatccatcacggttagtctttggtctgtcaaagatctgttcaatatccatacggctaggccttgcatggtggatggacgttctggtgactgttgggcagctggcgttagttcggagtggggattgttccgggagtcggctcaggtcagcttttaggcctctgttccagacggcgtacgggtgacgatcattaggcccagccacgtgcaggacgttccggtcgtatggtgaagctttaaccgtagtggttcgaagcctgctcggtgcggataaagcgggatttccaaaggccatcgactctttgcaccaccaaggcgtgaatccgatgcgagcccagggagaacgatcgcctctttatggcctatatgacctggggagccgaacacggctcggactgacatttatg

SEQ ID NO: 25261 - DNA, 894 bp, Zea Mays
ggcccttgcagtttcggttatccgttaagaaccccaggcgactgtttaacgtctcactgacagtttgcagaaacatccccgtgcttctaacctttctcagtctgagtccacagcggcgaaccgtgctgggagctgagctccggcgagctagaccggccggacgacgcgacggctggagctcccgagcgacaggaacacaattggactcctacggatcatttcccccaaatcaattttattgttgggactacgaatcaattggtccacggtgaccgagcggatgggtaagaggatgaaggcattccgagcaaacgacagcgacgacgaccgaattaaggctggggaaaggttcatgggtgcactagggtctacggacattctttgatttgggtagaacaagacccgaagaacgggtcgacggtgggggggttacgacggtgtttgacagcgcacaagtgcgttccagtgaggagcttcggccaaactctaaattgccacatctaagggcaataggagatcaaggattaactaaaacagggagcaatttgagagttactgaccagaggaacgctagcgacgaagaagttcttcacggcggagcaagaacgaagaagagagggaattggggctgcgcaagttctctggcgaaatggagttgattgcttaagcactggggtgcgcaatggagagaagaagcggagtccgagctcaatttataggccgtcgaccggagttggagaagaagcgcggactacggatgcgctggcaagcttttccgcgcgacggattccggtgagggcacgggggtcgccgtttaaccggagttcgccacctcggtaaccttttgccacgacgccaaggatatttaccacggccaccgacgaccagtcacgc

SEQ ID NO: 25262 - DNA, 499 bp, Zea Mays
ctcttctcaacttttttgatactttggcaccaccagtttgagaaccgagtgcatccaggctgagggacaatggctaggaggcctaaattgtgtagaatggacgtccatatttgtcgagcaaacacgcaggagacaagaatatgctggatggattcctcagcctgatcacacagagggcaagcaactggatggggcaggcctctttttgccagtctatcagttgtccaaaccctgtttttgattgccaaccatacaaagaatttgcatcttaaaggggcccaggtcttccagacacgtcgccaaggggcaaaagagatagagccaacaaagaaagcatcataggccgattttctacaataagtaccttgagcagagaggcgccaaaaatgttggtctgcgatgttaggttgaagaactaccccatcaaccaagttctagagctgcagatactccactagaactgatacagataagcctccccttatatctgacacccatt

SEQ ID NO: 25263 - DNA, 409 bp, Zea Mays
agccctcccctttgctggacaccgaattcaaccttatgcgactatttcccctcaatcaatttcactagcgaagctctaaatcatccagtccacggggacagcgcaaacaagtgaacaagagtgttcccggtgatctagggtagtctagttcaatcgaatgagtcgagcagcattaggagaacctaaggacactaaaacgaacgatcagagagtatgaacaaacctagaacaagctggccacgacaagggctctttcacggtggcggaaaacagaattggggagaaagggaaattggagagctgtggtggctatcggaggcaggagcgggtgctctggcttcgtgattatctaacggagctagcggtatgcttaatttatagtgttcaagagcggtggcctccaattttg

SEQ ID NO: 25264 - DNA, 416 bp, Zea Mays
ttatgtgctgttgtctactcaaactttattgtgtggttaaccaacaatatctgtgatgcggtcatgtactcatgtgggcaattgttgctgtgttctcaatttctcatattatccggtggatgtaactttaagcctgtaagctgcaacttgtgaacttatggcttgtactcatgtgactatgtgaggcaatggcgtgagagtgatttgaactgctgtcttgtactcttgctactgttttttacctaacttagttaatatgtatcgggtggttgccgggtatgggttacccgtcaagtaacaatacccactcgggtacgggtatgggtaaacatttctacccgcaactgggtatgggtattgtgtcgggtacatttttttgtcgcgggtgcgggtatggaaagacaatacccggcggg

SEQ ID NO: 25265 - DNA, 549 bp, Zea Mays
actatattgtgttttcatttttacctctttttgatatttacatttgctttttttgaggatgatatttacatttgcttgtgtaggaggagtgcaaacgtttaaggcagagcatgaagtgtgatttaattagcagactaaaagtggtactgctacatgggactaaacacttgtgacctagttttgttttggcccatcagatatgtgtaggtttgattggtgtttgttttgtgttattaatgcagggtgatatcctagagaaagccaagatattgcaatatgtaagagtgaatgatgtaaggacaactcgatatgtatacaatgatatgtttttcttcaaaagatctcaaacttgacttactggtatttataatcgtgacagtggtttgaaaatgaaaagcagaggcttgggcatcttcgtgaccgtgcaagtgaaactgggcgcagaaaggaatatcctattgactatactatggtgtggtgatgcctttattatcacttatattgtttctcatcgactactatgccgctgaattgctatttcttgatttt

SEQ ID NO: 25266 - DNA, 385 bp, Zea Mays
tcttcttgctgaacttggtgtcgaggcagaatatagcagcctacacctcatggagtccacgagtttggctgtcatctcgcaagtcagcatcctagccaatgagtagaagtgtcctagtgcagcggcgagagagtaattaaaccgtggctgcttggggagcgtgaagccgttggagatgtcgagaaggcctgttgccatagaagaatagacgctgcacgggcagcaagtccctaaagactaggttgaatttaagaatgtgggcggcatgccattagctctcatggttgcctcgctgccggcgacggtaagacatcccatgttagtgctgcatgtgacggcagcccccaattgcccatggcagcgcgtcagtgaactaacaccggcg

SEQ ID NO: 25267 - DNA, 529 bp, Zea Mays
ggcagtttttctcttctttccttgccttcgcagtgggtagtgataatcagggtatacgaagccaattgcatcaaacaccctatttaatcttttcttggcccgacccccaaaggctgcggacaaggcatcatcttcggccttggaatatgtcccaagcagctcgtcactggtagcttcaatgcatttcaaccagtcatcattgggttcatcaaacttctctctaaatctgaaggtatacttcaatcgaactaggccaccttcactagattcagcagtagtctcattcggcatatcccagctctccacaagtggccacactctcaaggctatgtgctcttgaattatatctcttgtgccaatgaaggtgtaaacagtgctaaaggccttctggcatgcttcgatgtcactttcaatagccaccttcggccttcggaggccgaagcgagaccagatggggcactggataatttccttgatgtcttccttttaatcagatcatttttaacataaaaccattcctccatccagg

SEQ ID NO: 25268 - DNA, 461 bp, Zea Mays
agggtggtagggatatacaactgcgcggtccgagtgcagctgcagtgtgcagccgctgacccagacggcgtggtgtaccctctttaccttgctagggagggaaaatgcctccgcccggaacatatggagctacaagttctagtggggctcaattcctaggttcccttcacagacggcggtgaagatggccacctaggcgatggagttcgggttgaagttgagcaactccatcccgtagtggtgcggcagtgcccgcatgaaatggctcgccgagactccaaaccctcgctcatggaacaaggtgaagctcaccacataagccgcggatggagctggctcttgctcatcgccgagcgcttaccagtctagctacgggccatgggagcgggcggagcagaccggcgtccaccaacgcctccaaatcctcgtcgctgatggaggagatgggctatgggttgcgg

SEQ ID NO: 25269 - DNA, 354 bp, Zea Mays
aaaagccatagcatctcgacagcgcagctcaatggcgaaggcaggactcaacaccattcgattcttcaaaaagggcatcaggcttagcttcacctcacccaccacctagtcatgctcaagcggccacactccgcaggcaatgaactcttccaccaagtcacatctgctgctcgtcctagaggtgcggcaaagggcatcttcattcgcatccacttttctcaattcaaactgtgggaaggtgacgtagcaatgcgagcacaggatggacggaggcaaccctggaacaccctcagtgtccttcaatgtcacataaaaccaatgatcccaccagttcccccacttgttcttagcaca

SEQ ID NO: 25270 - DNA, 341 bp, Zea Mays
tgcttgatccatcctacgaggtgaggccaaagcatgccagccacgatggtttgtctgtattgttaatttgctaactgtactgtgcgtctgcatatatagacagaaatctcccatctcattcatctctgtaggtggttcttgcgatatgagctgtaggtggttttgtgtctctgtgtgtgtggaagaggaggaaagcacaacagaacacagctttagtgactgtggaggacgttttgctgctggctggctggcggcccttggcatttgtgttggaatctttgctgtgaatacgctcccagctcatgtgcgctggcctggcctggccttgccctgcctctccg

SEQ ID NO: 25271 - DNA, 392 bp, Zea Mays
ccgcagcggatgaactcgaggcctttcgcctgggcgccatctcaactccaacggtgaacagagcgagagccgaattgcaaaaggacagagaagatctgaaggcaggaaagcaagaactagggcacggaaagcagaggcggttgaaagcgcagtacatatgggatattctcgggtcacataccgtttccaaaaagcgcccagtcatcacccggcggttacttctaaaacaccggcgtgccatgtcatcacccggcggttacttctaaaacatcggcgtgccatgtcatcacccggtggttacttctaaagcaccggtgtgccacatcatcactcggctattatctacaaagtggccgacgcagcccgttctaactcggctgttatttctaaaa

SEQ ID NO: 25272 - DNA, 479 bp, Zea Mays
atggtgaaatttggggaccaagtcgttttacagtacagactggaactggacaagtaaactggggcctggaactgaaggggtcatgtccaccatgtctttgtagcatggacccccaaaatagaaagttatcctttttggccactacctgtccttccaaactaatgtctcccgttagtccttatttctagcagttcttgaagcaatacctcatatagcattttacctggatgatggtttatggctagcaatgacaaattagcatgggctaaggacttgaaaaacatgatgatgcaaggggatcttgcagatacttaacagagcagctaaaacagctaaaacagagtgtcctgtcaagttgctgcacatttcaataggtgatgtgtagcagagaaatggtgtggaccggtgcagacttgtcagagcaagagttttactgatctgatgtttgattgatgagcatgtatggcagcgagttccca

SEQ ID NO: 25273 - DNA, 573 bp, Zea Mays
gcgagaggtagaagatgattggctgcctaagtgagtactcgtcgataggcctccgcatctggggttcgcgggaggccattgtctatctgcgctaggacccctccaaacttgcttagcatgtttagcgcccaagaaaagtcatggtaaaggttccaggagaggagcgggttctctcgccggagcctagcgtcttgttctgcttgctcccgcccgtgcacctgagcttggcgacaatcacggtggtgggagttgcaccgttatcggtgcgttctttcgtcaggggtatcaaccatttctgaagctccgtcccgagagatgagctgagccagatctcgctctctgccctagtggtggtgtcgtagatttcaacgcctgtttcgccatcgtcgtgcatcgcgcgggggaggctcttcccccagcatggtgttttcgtcatcgtagataggagacaattccaatctcccctgaatgaagaggatgtctaggaagaaaggtgtgggtgcagtggtgtgttccttctcattctccattgagggcggagcaatcgggcggcagtccgcagcgcttccttgc

SEQ ID NO: 25274 - DNA, 681 bp, Zea Mays
ggcgaggtgaagaatgattttgattaaaaggtcggctcaccaacctggttctcttctcaggcccttgatttgacctttcaccttcaaacccctttgattttccatgtcctgcatttttggcttccactgctagtgtcgtactgacagccctactgtaggtaagatccagacatgttgccattttctgttgaagtctatcattaagtcccctcataaaacaattctttttcttcagatctgtattcacttgatcgatggcatactgagacagatggttgaatttgttgagatacttcattacaacatatcccccttgctttaacctgatgaactcttcttgtttcatgtggagcactccctctggaacataatgctcccagaacgctagcttgaattcctcccaggtgatctggtgtctagccggttgaattgctacaaaatttgtccaccaagtactggcaggccctcttagttgttgggtagcaaacaatggcttttgcgtctttgtgcagcgaatcaacccaaacttctgttccataactcttacccactcatcagcttctagaggttcttctgctttaataaagagcgggggtcgagtctcagagaattcctagtatgtagtttcacgcggtgcttgaggaggaactctcccaccatgctgttggaactgattgcccg

SEQ ID NO: 25275 - DNA, 616 bp, Zea Mays
cgagaatggaactgagaaatgctctatggcagtctacctgggagaaagccgaaactacccaaaccaccctcccttccaagtcaacaccactagacaccacttcccagacacttgccaaagtgttgcccgaaaagccctccgccagctatgccaaaactacagcagggaagtctttgagactccccttcgttactttccacccagcaacaaaaatacccctacctggaggaaaaggctttaggccctgtcaggaagagatcctactgaagatgaccccaccatagtctatatggccggatacctccacactcttgacaaccactatgacgatcttttctcccactgcactcacttaaactcccgggtggaaagcttagagcaacaaatcaaggaacttaaagaggagaaggcgtccctccaagaaagtctcgaaatagcagaaggtgaagaggccaacactcgtgaagcctaccgaaccctgaagatggactacgataagaagttaaagaagctcgcccccactaagaagatccgaaagcgaaccaagagccaaggatgccagactgaacggaaaaaggaagccccaccagcactgcctccctctaggatagaaaat

SEQ ID NO: 25276 - DNA, 273 bp, Zea Mays
cacaatagcaccaatatttctcttgtaaggaaagattttcagctcacgagccaaacgagacgtaaaatagtcatcgtcggtggcctggggtatagggtccttcctatgccatcgaccccggtaaccttcagcatgcgcaaagatgtttctcggagctcaggtgaagtcataacctcctcgggcccagcgcacgtctccatcaactcctcaacaaaaagcctagaggccttcgaccccatcttttcccctccgtaccttgcacatctattttcc

SEQ ID NO: 25277 - DNA, 604 bp, Zea Mays
tagggctacaactattatatagatggattaagtagttactacatgaaattcaataatcatggcccctgaaattcctctgccagacactctaatggtgatcgccatggtacagtactgaaaaagatctccaggttcatcgctcctcgtcgccagtgacttagcgcccggattagcgccggccgctgtgattcgtgcccagtgcaagtagataactgagaggagtaaagatcttagcgctcggattgggtcgggctcgctcaccgttgagcccgccatacccacttggactgtggctggccggggtgatcctcaccagcattagccgcttaacgatcatgtgccacgcgtcttggaagcttagcacgtcgcaatgaatctgtgtagcaagcttgtccatcgcccgagaacttgccacggtgaaagccacgaattccttgcaccagtaacctcccctctccccggtcgcgatcgcttctcctccaaattgagcgccaccgccgttgagttctataaattgaagcctcaaagaactccgctaggtaattacgcattcaatgcaccagcacttgcctccaattcttcaccagagccacacaatttccca

SEQ ID NO: 25278 - DNA, 443 bp, Zea Mays
aaaatatttcagaaagcttggtcttcactttataagttcctttattacctctaattttctttagtgttgtaaggattagatggggtatggatcctagagataaggctgaaaatatcctcccatcattctgccatgtctctatgggcttccttatgggagctctgatgtaatgcttgaggatccaatatcaaaatgtcatctcagaaagctaggcccattcttcattggctctcagctcgctatggtgacaatagtcctaaaccgtgttattttgcaacgaaaaaagtatgatgaagtgaacttgctataatcctgtaaggattatatgggttatggatcttttggagatatgggtggaaatatcctccttccattttgccatgtcataaagggcttcctaatgggagcttccagaagatgctttaggatccaatatcaaaatg

SEQ ID NO: 25279 - DNA, 334 bp, Zea Mays
cttgataaatgttgcacaacgacatcatcacaagacctgtcaaacatcaatgtttggatgggtcgagacatttccctcatagaaccatacaaataaccatgtacctctttctctatcgatgtttcaataagtatgtggcgggcagcacttggaagcaactccatatttgtgatgaattcatctgttatacagacacactcctttttcgaaacagacagtgcaacatcatgcatgaggtcatgaaccttcaaaaatgttgtggaattgtacccgatccttctttgctcctcatactggaaaaatgaccttgagaccatctcattgacaatccatt

SEQ ID NO: 25280 - DNA, 282 bp, Zea Mays
catcatccgctattttagcgaacattttatagttcactgctggagcacatagcggacgtttctaccgctaaatttagcgtacatggccatatagcggcccttgctggagccagtttaaagtggcatgaaggctgcagaagagtggttgcgaaattaaagagcaattaggacaagccctaacaataagacatgcttgtgttagggacaagcaaaaattccagatctaatatcctgtgattgagggtgatgcccatatccttcaggttacagttaggaaaaggc

SEQ ID NO: 25281 - DNA, 377 bp, Zea Mays
attatatgttatgatctttgtttctgatggttttctgagttttgactatttattttctacaaaacaataaatcgctataatcatcgaaattatgcaagtatcgaccgttgtaaagaaaatactatcgaacctggaatttctcaaatcgaaaatacaacatcaggtaatgccactcgacgatgtctacatcttcaggcttgtttccattgtttcagcataactattgcatgccttgtatgttgagcctaacgctgatcgccatcctttgtacctctccttggcaatagaccataacttttcacgcgcatccttattgcttggaaactctcaccttcgctgtttcagttttgatacaaagagaaggttaattttctagt

SEQ ID NO: 25282 - DNA, 414 bp, Zea Mays
cgagaagctaaatgatggctcgatgaaggaacatcaccagggatcaattcgacgccactaacaggcatcagaactccagcatccagtgcgccgacctctaaggcgactcctttacttgaagcatgcactgctagtacaccttcagaatggggtggagaagatccgacgtggacatccatggaggtatgagaagaggagcctgctcagacaccctcgagggctgggttgcagcccgtactgcccatcggagccggattaccaccggcaacaccctcaggggctgggtcgcagtttgcgctacccacccgagccacatcattaccggcaacaccctcgggggctgggcaaccgctagcaccatccttgagaattgagttctctgcaacagccacctctaaggctgaaggactctcg

SEQ ID NO: 25283 - DNA, 356 bp, Zea Mays
tgtcttaggatagcacggaatgagcctgtctgtgcccctgaattccctatttccatacacttatcttaattattttgtgtccaggaggacgcacgtcctggacatcaggtccgtcaccttggattgccgagatcatttctgacggcagacttatttttctccttccacctctcctcgctttcttcctctgccctccacttcatctccctctcgaggactctttgacagtgttcgtgtacctgtcactgcagattttgtgccctctgcgaggttacaggatgggttttggggtttgggcatgcaaaaaccctccagcatgctatgattttcaaataattctcttaaaaattcacagt

SEQ ID NO: 25284 - DNA, 349 bp, Zea Mays
ttggtgaaattaagttaggggaaacatcgattaaggtatgaattaggtgttagtcgacggagagcgccagtcatagccccaatcggccagcgtaagtgctcgccggagctcctccgtgcgctgccgtcgtcgaggacgtgtcgggtaaagaaatagaaaaccgaggactatactgcaaactgtcagtgacacggtgaaacagtaataggacttatctccagttagccaagaacgcgggggtctctgtgcaacgtcgccagggcgcgggcgcgcgcgggcgcctttctccctctgagctgggccactgggctgaaatcagcccagtactattcataagtttttctttttc

SEQ ID NO: 25285 - DNA, 315 bp, Zea Mays
ttcggctgagacgccgatgacttcgccgtcctctgttgcgtcttcgccctctgggggagcgaagcctgggggtggtgcttgtggttgtcctccggagctgcaggtgcgtagagtgccttcgggagtgggttgttcgtggcgctgtctcttgctgagagcttcatcttcgcaggcttcttggggggtgttgtctgtgagggccttgccttttttctcggctagcaacgctgccttcgctgcttcgtcgatggatggggctgcctttgaactagctcgcttgggtgccatcgtgggtggtttgttcgtagcacgaac

SEQ ID NO: 25286 - DNA, 363 bp, Zea Mays
cggagacgaggcgaagctgcaatccgtcggaggaaacccgtggccgaggcgctgacgacacggagatccaatccgccgggccgccgagccggatacgaggttgacgacggtggagttgatttgggcgaccgctgtcgaggtccggagacgaggcgaagctgcaatccgtcggaggaaacccgtggtcgaggcgctgacacggagatccaatccgccgggccgccgagccggagacgaggttgacgacggtggagttgatttgggcgaccgctgtcttcggccaggggcaacatttcagcggaatcgcggcaacataaacgaacgtcgtttttacgaagcattgctggaaaccacactctatcc

SEQ ID NO: 25287 - DNA, 291 bp, Zea Mays
tctgggcagcaggtctcgctggaatgccaatggggacagcctgacgaggacgcgttgtctgcggtgtagcctgtggtgtctgctgagtaggatgctggtgagactactgtcctcctccaggacgagctggtgtacccttgggtggagcatagcaaggatggatgatgatgctcctgtgggcctgggtgatggccttcctcttcatctcgccaagctgaacacgtttgtgttcaagtgtgatggccttgtctagaagattctggaatgatggaaaggtatgagacatcgccg

SEQ ID NO: 25288 - DNA, 451 bp, Zea Mays
ctggactgggcctcaattacaggaaaggtcagggggctcggggtaagaatccagagacacagggaatatcactggtggacggcgggttgaatctctaattaccaaggggttctttaacaaaaagtacccgcgaaggggtacgagagctcctcggccgcacgatcctacatctacggttaagatctcacagcgcgaatggatacgtggtcgtctaatctgagccgtccttgatcgaatcgacggtcgcgacatcgtcacctccctccgccaagaactgagcacggcggcgcaacccaccgtgcggtggcaggaccgccggagcagagaacccgatcccctagcccgccatcttctaattcactcgctcctcgcctaattaatgaccctatgatcttgtttcccccatcaatttctgccctcaacaagcgcagggcaccgcccacggcgcgcc

SEQ ID NO: 25289 - DNA, 351 bp, Zea Mays
gatctgaatgccttcggtttcggtgacgcattttagcatgggttgactgatccccttcttgtatagttggtccccgactagtacgaagtccctgcttcggtgcttgaggcgttaggcctcattgatgtcactcgggtggtagtatccttgcagaaatagtgttattggagcccgccaatcttcagtcataatgaggttgacgttgcgatggccttcggcatcgttggttacttgtaatccctctgggttgcggacggctggtgtgccaatgacgtggtagaacacgtcggagggcaaggtctcgcctctggccgctgccttagccaacgcgtcgacctcttcgttcctggc

SEQ ID NO: 25290 - DNA, 430 bp, Zea Mays
cgcacgcgcacacagagatatctggatatctgaggatattgcataagaaataattgatgtgtttagtgtagtttacctgccagacattgatcatgatctatacctaatatatcatatgattgtcatgattgcactgctcatacccttttttgtgtagttagggcctggaatatagttggcttttaaggatagtgagattgaagtcgttgggggtgatggatcaactaaaaggtatttcacagcgctgtcaaatgcactgagcattgtatatgtgagctaccatcaggagtttgttgtgtcaaaagaatcaactactattgctgaatgctggacaaaatctattttatttgtcatctattgaggcttctccaccttaatcatttccttttaccacctcacctcatcctcacttaattaatctgcatcttca

SEQ ID NO: 25291 - DNA, 296 bp, Zea Mays
gctgactgtgttatttccatcggaagcacatgtatttaatgtgatgggatgtctttgcctgcaagccgaccattgtggcgcgcatgcgcgtgggattcgaagcaacctagcctactttgactcggaacggattggccaacgtctcggtgactacgcatgtccctataaattcacccgagaggagatcttcggttctttactttctcgcttcgccttcctactctagacgccttctgcctcagctgcaaaagtgcacattgcctccttctcgtctccctccttaaccccgatggcca

SEQ ID NO: 25292 - DNA, 465 bp, Zea Mays
cttcccttcccttcccttcctccgtgtgccagttccgttccgccccgccgcctgctgtttcgttcgccgcgagccgctcccgactccccgtcaacgatccactgcaacatggagttttcgctttatttactagttactactagatttatttactcctatatctgtctgtctgtctgtcagcatcaggatgggtccagtcaactcttattaaggcatctatcttccttcagtttcacttgtctgtcagcatcaggatggatccactccatcctcgttgagtagcgagaatgagaatatactctgtatctaaatcgaactgtttatatggacgcatgcacatgatatcgctgctacctgcattcgtccccagcgcctgctgccaccctatccctgctccattccaaccgcgattattgtttcctttgtttgggttgacggtgcagttacatacatgaatgttttcag

SEQ ID NO: 25293 - DNA, 279 bp, Zea Mays
attccatctactctcctcaacactttccttctcacaattacaacctaagatctaccacctctggtaatcccctaccacaattgtggctggaatgttaggtagctgtttcctggtgaacggtggcagttgtttgtttgcggctggcccacgcttttcattatttcttaagttgcttcggttttgtactctatactaaaatttgtcaaactgtccgatcatttccttgctcattctgaggtgctgtgacagacaggtagtactaatttctgactattgtac

SEQ ID NO: 25294 - DNA, 771 bp, Zea Mays
aaagtacctaataccaagatggaagccatgttcaccgtaaggaaacaacagcgggtattgcaaaggcatgtatgctggatgcaagcatgaaacatgttttaggccacactctctatcatgcacaagaacatcgtatgtgtattccccagccgtgtagtcgccaactataatggcagcgatctcgccatttgagggtaggttgtattgtacatcatggcgtgtgttgcagcctagcaatctgagtgttatcttttgatcaccctcacgctcaaggcgctctctcgcgtatcggaacgctttgacaagcgagttgttttcattcagcatatcgagcagcgtcgacgctatttcagggtctggctggccaccagcgccatcatcggtctcaaacatccctagcctattctgggtctcatgttccgtgtcatatgtgtacaactgggcaaattttggttgtgtcccacgctgtggaagtagggtgccaatcttatggtgcaccaccccattaattttgaaaacgtagggtgcagtgccgttatttatcgttctatcgatagctgcaccgaaagaggtgaatgcaaacaatgaattgtaggaccggataagcctcaagaaacgcctcgagcgagtacctccatcaaatctcaaaagattagcaagcaaaggcggcggacgctgaaacgggtttaggtccactttccctcctttgcagcaaaggttgtacacaattttcctctgggtggagcaggaatcgtttttaacacgctcttg

SEQ ID NO: 25295 - DNA, 505 bp, Zea Mays
cgccggcccactcggcaatgcgctggaccccggcgcggtgttctacctagagatcctcgagggccttcctggtggcctccattgcctaggggcccggcgccgcctacgccgcattgaattggcggatctgctcctatagcttcctttctttttcctctgcttcgagctcatgctcggccagcaactcgcctcgccgggtgagcatttcttccctgaaggcgaggtctgtctctcgcctggtgagatccatctcccacctgtccaaggacagctccttctccttaagattttcctcggtgagggcgacgtcgctggccttgccctcaagctcttgctgccatttttgcaccctttccgcggccttgacctgctgggcccattgggcttccagagtctggtccagagcactcagcttggcctggtactccgtcgtgagggcctccctctgggtcacagcttcctccctcctggccactttcttctccctccgggtcgcctccagctc

SEQ ID NO: 25296 - DNA, 703 bp, Zea Mays
aaattgtcgccactatgggaagggccattcatggtagcagaagtcactcggccaggatcatctcgacttactcaaatggatggcacggaaatagggaattcatggaatatagagcatctcaggaagttttacccctagctagatttcaaaagctatcggggcagcattgtattctgtaatcggaaaatacatcatcaataaaaagacttcattctcaaatgcactcaaactatttattatcaatctgcatgcttacttaacttagggtgaccactataccctactaacggagcaatcggtttaagttggcagtgacttaagaacgcttacttaacttagggtaaccactataccctactaacggagcaatcggcataagtcggcagtgacttaagacagtgcaacatgctcacgcttacttaacttagggtgaccactataccctactaacggagcaatcggcttaagtcggcagtgacttaagacggtgcaacatgctcacgcttacttaacttagggtgaccactataccctactaacggagcaatcagcttaagtcggcagtgacttaagacgatacaacatgctcacgcttacttaacttagggtgaccactataccctactaacaaagcaatcggcttaagtcgggaatgacttaaggcggtgcaacatgcttacacctactcgacctagtataaaca

SEQ ID NO: 25297 - DNA, 330 bp, Zea Mays
ttgattcggggtcggtgtatattatcagagttgggggaatatggttaagatagttatggatgaagtaggctacatgatgcaagtcaaaatttggtttgatgtcaaatggtggttgatagattatgcaatccattaagactctattgattgggtaagttatgtaacttgttatataggtcgagttgttgtgtatggccaagttgatataagtctccaaattaggcttaagtgatttaggagtatggccttatcctttctaccagcattaagtaactcacactagattagaccatattaaattagatatgatctagattagactagtttaag

SEQ ID NO: 25298 - DNA, 514 bp, Zea Mays
caggcggtagcctcaccacaagggtaggatgagaagatatatcggcatgaatattgatttctctttttgtttgattcctcccgaccacattactcctataaatgctcatgtggcattgtggcaaacatatggcaattcctaatgcaactaatgacagtatggttataaatttacataagttcatgctgttgccgcattgcgtgggcgggaagccatgcagcttggctaatgtgttgcaccgagctctggcccatgacagtatggttataaattcacattatactgcatgaatacttttgtatgttgtacttttagttcggttaatagagcgcaaatcttcctttctgtccatctattcatctgtgcaaccccgaccctgttcccaagggaatctggacttagttctcttttgggcaaaccatctaaaatagccaagctcaggtttacaaccatgcaaacctgatagaaagtgagacttatatgttgatggagttgtggttaagatgtgctttag

SEQ ID NO: 25299 - DNA, 489 bp, Zea Mays
atgaagacaactagagtagtatagtagtaggtggtttccttatgtaaattaaataaggaaagttgagttgtaccagtgagtatgtataattagtaccagtctgacataatgtaataaaggtggtgtacttgtggcatgttataattaagtatgtttttcttcctcagatgccatcaagaactcgtgctcaagatggggcgggaacttcccacggcggggaggaaactctgaacccgtcgcctgtaccttccacattggctgaggctatcacagccttagttaatgccaccgctcacaacactcgtttcctgcgtgaaatggctggaaatcagtttcatcagcagggaggcagaggtcaaccccaaggccatcgagacaccacgtacttggagtttttgttaaagctgaagaacctttggaagcagatgaatggatacgggtcatggagcaaaagttcggattgattggatgtattgagacccagaagcc

SEQ ID NO: 25300 - DNA, 466 bp, Zea Mays
caaagtggggagtggggtggctcaccgccttcgaagggaagcggttgaggagatgagtagtggtgtttagggcctctgcctagtagaaagcatggtgagacgactgaaagagtaggcaaagaatcatgttggacgtggtgcgaatgatgcgtttagcctagctgttctgggagaggtgtaaggacacgagagattcaactgaatgtcgtgggagagaaagaaggagcgagagatggagttgtcgaacttgcgtttattgtcacattggagggcacgaatcggtcgacggaactaggtagagacctaggcgaagaattgggtgaggttgacaaacgtgtcggacttcaaccgaagcacaaaagtccaaagaaaacgagagaaatcatctaaaatcatcaagtagtatttatatctagaaagactgagtaccggagaagcccagagatcacaatgaacttaattaaaa

SEQ ID NO: 25301 - DNA, 511 bp, Zea Mays
tcgaagttgagccactgatctgcccgggtgaaggtgatcgggtgctccgaccatcggtatggggcgggaggaccggtagccaccaccagtatctagcgatcgttgagcttttgttgtctcttgttctcctgcgatccgtgtccgccgaagatgacattgacctctctgtcgacgcgcaggaaggctccacctcctccctcctcctgctgctggggttgtcacggttctcttggtcctcctcgcggcgggggaggaggtagaggttggaagggtcggccgtgcccgatggagtgcttgaagtctctgtagttccgaagggtgtggcgcatgtccttgtggtacgggcactgggcgtcgaggatgtcgtccaacgtgtgttcgcatccacgaggtcctcctcgggcgcgagaggcaggtggtccagcggtgtggacttcttcgcgaggcctcttctcccaacgcttgtcgggctgctggttcgtgtcgcggtgccgctggtgctggcttcact

SEQ ID NO: 25302 - DNA, 483 bp, Zea Mays
gttactaacccgatgagtgctggccacggaggagtccttcacggcagcgcgaagaacagggcagaatgggtttgtggactgtgtgagttcttctggtgaaattgagtcgattgctcaagtgcttgtgtgcgtgatgtggtgaagaagcaagatccgggctcgatttataggccgatggacggagttggatgaggtttacgacggtgtaaccgcgctggcgagctcacccgctcgacatcaccacgacgatggtccgatggccgccgactaaccgcgcagcgccacctcaacgttttgacgccacgctgcggaagattttttaccgcgaccgcatacccatccccagccacggtggcgatcttatctccggcgggatttttctgaaatctgatgaacagtgcgccacgtttcagttaaaaatcgcctgacagcccatctttggatcaaattatctccaaattcctcatggcaccaaggcttaat

SEQ ID NO: 25303 - DNA, 493 bp, Zea Mays
ctggcataaaactccataagacttacttgctactgaagaacctaaagcacttaggtgcatatgttatcggattgttcttcaattttaaccaggaccgacttatgaatgctacttgcttccaataattcttgggctgcgataacactcgtataagacctctaatcgatcaacaagacatttatttatccaaaggggcatggaatgtgatgattgacaaagcgaagcatcacattgccatacaacaaaaatcatgacaacactgacagatactatccactaaccgttgaaaaactaaacttacttcccgctttaccactacaccaccctttagtcacgtgaccatcgggagagtccttcacacgattatacaatagtaacctaaacgtcgggtcacacaatacatacatatttctttgttgcgagtataaccatatcacagcatatacccgcgcacctcaattaaatatctcccgccaccactactataatacac

SEQ ID NO: 25304 - DNA, 383 bp, Zea Mays
gcggaatcgttccgatccgctcgatcggatcgcaacagtccagatcctatgcctgaatcggtaccactaaggctcaatcgtagccgctcattagcatatcgacgttcgcccaagctgcgcggtggcgcatcgccggcgcaaaagcagcctagcgaccagaggtctagtaccaccccgcgtatggtgattcagagtgagatcacaagggcgacttagttcggctctcttctacggtgattgatggagcagagtgttctgcccacgacggtggacgacgccgaacccgcgccatggccggcagtcatctacagttcgtaaattccacccccgattcgcaactatcatgtaatttgcatagaagaataggcgaactataccgagag

SEQ ID NO: 25305 - DNA, 769 bp, Zea Mays
ctggtcattcaggtcctggaagtccatggtcaagttttgaggatcaggttactgtctttgcaatattgtgggtcttattttttattggttggcaatacactaatttcctttcacaccaggctcttgttgtccttgtccatgatatgggtgaaaactgggaattggttagcgatgcccttaacagcatcatccaattgaaggtaacattttattgaggataactgttttaatttgttatcagtcatttacttttctcctgaatcatcaaaatgtgccatgcaactattttgttgcaacctgttacgagttagtttatgttatttgtgttcctctttgtaaatgatttatgtatataatattccagggctttggatcttaattgttgtaaacttgcaatagtctgttgctaattgaaaaacattttatattttattacttgattcaagattttagcatcttcttcgcagtgcatatacagacggcctaatgagtgtaaggaacgccataaacttctcacggataaaagttgtggcgacggtgctgacagcgctgatgactcaggctcatctcaacactatccttctgcattgcctgggattccaaaggttaattccattattctttcatctatttcacttctcagcttgtatatggaaatgattttttttggaagattacgattctagattttcggtcaagtggcttctatctgctgcatctttcccaaaaatattatggcgattatagaaaggaaatgaatttttttctt

SEQ ID NO: 25306 - DNA, 507 bp, Zea Mays
gagatattgttctttgttttggactcttttcggatgcggatatgtgttggtgggttcagggtgtgggttttctagctggggtccgggatttcagttccgcggcgtcacagctgattcgcgacctgacgtccccgcgctctaaatcttcacccgaaaggtgatacaccatgtaggaacagagacaaacctgtgctcaccgcgacctgaccacgtcaattagggatcgggcggtggtctccaactccggcccgtaatttgtcacacaccgaccacccttctcgctcagctatgcttcgagaacgtgcagctacgaagatcgcactcccccacttttcgtggactaagtgccgatgaacagcaccacctcaatctcaatttatttcctttgttccttaggcattaatttgtacgagagatttctttttctgtgacagtttagagagaattgagttcctgaccttatgttgtttgggccattctgaagcgatgggaaatgctagatgtgaa

SEQ ID NO: 25307 - DNA, 415 bp, Zea Mays
aatccatgagccatatgttctctaggcctctgtcctgcaccaatagaaagacacggggtgagcaaatggcacatcactggggtcaggatacttagaataatatcagtgttgcggcatctgcccataaaaagtgttaggaaaaataccacccatcctcggtccagaagggaagcgatcaccacaagaaggaaactatgatccgctagggaagtaagaaccaaagcaataccacggggtccttggccatatggcacactaccaacaccccatcaggccgaccaccacgtggtctcactacctaaggcctagcagcaagaggcaaaacacctctaggccttgcaggacatctctgaacaggaggatcatgaacaccatgagaagggtggttcatgtttcttctgctcgactcagaaac

SEQ ID NO: 25308 - DNA, 380 bp, Zea Mays
cagcagaagctcgggaaacttcagcgcagcggcttcgcgggctcaagaacgacgacgatgaaagtagaggcaaacaggaaatgatgttgtgcactagagaggagagcgggaggctgtgacctttataggcgagggagagaggtgggattaaagcaggaatcaacgctcctcgatgtcaattgttgtgccatattgattcacagagaaacagaagtcgtaattgctccattgatggagatttgaagcaaaattcagacacaagaatcagaacggtcgcgagaggagaggagagaacgccggtgtgggagagcttgcagcggcaatcaaaatgccatttatggcccgttactgcctgaagagaggagagtggggagaggaag

SEQ ID NO: 25309 - DNA, 567 bp, Zea Mays
ctgagtttccacctcttcaccaaattcttacccagttgtaatggccatcggctcggtgtgggtagagtcggatgattccccagccagcaagctaagcacaacatctatctccgtgtcatcagtgctagccggcatctcaaagtgagtctgcctctcatcctcaggaagactccgaagtggagcaatcaaagcctcaatgttctcagaagagggtcgcactctaagacccaggctatcgtcacaagcaggaaggttggatacaaactcagagaatggcctaagtggtggcaggttccatgcagaataggccacaggagcaccagcatttgaaaccctgcccctcaggatcatgtccagttgactcagcagatcttcagtgggaattcttccgtttgtgattcgggtagaatcgttgacactgctatacaagtaagctgggtaggttctgtcctttaagggttgaatgttcttgaatacgaagtcagcaactacagcatcagcagttagacccccatccttcagcgagcagatctcggcaagcagcactttggcttctattatctccga

SEQ ID NO: 25310 - DNA, 405 bp, Zea Mays
gctaaggtccccttgtaactgaggttgattgaccccacatggcagtgggggcacatctaaggctgtacgtggaggcatccgagcgtgtttgatagcgacctcccggtgctactttggtatgctgcacatatgtccagacgtgggttggtgacgacatgtcttgtcatagctgtcgcaggtcaacagtgtcgggcgggtcctccaccttgcagcattggctgattcggagttggtcggccgcctcgtctcaaacggttactcggtgaggagttggtcgatcgctctgcctcacagagtttgctcgacgagttgttgcctcataggattgcttggcaaggagttggttggctgctctgcctcacaggattgctcgccgtggagttggttggctaatgggccaggaga

SEQ ID NO: 25311 - DNA, 452 bp, Zea Mays
tcggtaatcgatgcacatcctcttcgtgccatcctttttctccacaaataacactggggctgcccaaggcgaggtacttggtctgatgtagccttttctgatagctcatcaatctgcttcttgagttccaccaattctggtccggacactcgataggctctcttggaaataggggcggtgcctggtacaagctctatggcgaattcaaccttcctttcaggtggcatacctggtaactcctcgagaaacacatctgggaactctgatactacattgatagcttctgatggtttaatctcctcaatatgggcagtgacttggtgacaactcccttttctgggttctgacaagaccaactctactaacacttcttctcctgatggggacactaacttcactgttctcttatcacaactaagactggcctgatacttggttagccaattcatccc

SEQ ID NO: 25312 - DNA, 354 bp, Zea Mays
cttcggctgaatacctgaatcaggccggggtttcctgaaggatgaggtagaaagaaggtgcagttatgtcaagaggtcccaatcagatgaaagaaggtgcagttatgtatgtaacaaaactaaatgcagaggggtttcctgaagaaccacttgacgtggttacaaagttttgaaattcctatgggtctactattagagatatagtgccaatcacacttcagaaatggaaggatttagatgaagacacccgcaataagctatgggctaagtttgtctgagtcattcaaggtcccaaaaggcacagaggatgcagtaaggaagtcgatgctctctgctatggccaagatgtttcgt

SEQ ID NO: 25313 - DNA, 324 bp, Zea Mays
cgactgaggacgacgtcggagttttagaggtaactgccgagcgacttgaggatgacgttggagttttagagataactgccgagcgattgaacatgacgttggagctttagaggtaactgccgagcgactgaggacggcgttggagtttttagaggtaacgccgagtgacttgaggatgacgtcggagttttagagataactgccgagcgattgaacatgacgtcggagctttagaggtaactgccgagcgactgaggacgacgttggagttttagaggtaactgccgagcgacttgaggatgacgtcggagttttaaagataac

SEQ ID NO: 25314 - DNA, 442 bp, Zea Mays
cgttgggattcttggccataggggcataaatagcagcgttgcatacccttctcggcctccaagccaatacgcgggcctcatggcggatcgagggatcatggggaagaaacctggcgcagtgaagaatggcgggctggcacggtcggtccctgtcctggctactggtttgccaccgaggcctccaaacttcctagggatgttcgtcggtgccctatgaagctttgcgtggcatcggtgagccggttgcgtctggggcactgctccaaattgttcattggagcatggcggcgtggtggaatcgcccctcaacgtggtcaggactcccatcgctgccatacgcggtaagaagaccttcgtcgggttcgctgctatctctactacgcgtagcgctagggaatcatgaactgaacgtctatgcgtgtggttggggtgctcaggtgat

SEQ ID NO: 25315 - DNA, 349 bp, Zea Mays
aatcaaactccatcagcccatgcaaaggtagcccccatcatccctaacaagccaacaagagtgaggtcccctttcccccaccacaaagagccatccatcgaccccattctgaagtggagtttccacaccaacagctcagagacccctcgccacactccattcacccctagaaccacccctactaagccaaaatctagcccagtttatctcaaggccaatcatagacccccacccagttgaatatcaattcacgtgttcattccctagaccgtcgacaactcaagaatgacacaagagtcatatgcccccgcatctcagcatcgaggatgaccttgtaagttacctagag

SEQ ID NO: 25316 - DNA, 429 bp, Zea Mays
cgtgcacgaagagtcgttcgtggtcgtggtactggttctgcacatagaggttcagctgttattgcttctacttcacctgctacagccttatcatcgtcttgggctcttgactccagggatcttccatgtgacatctgatcagacatagtttcttccaaacctgtcaccgaagatggttctgttcgaactattgatggtactttatgccacatgaaactaactaattttcgtgcacgaagaatcgttcgtggtcgtggtactggttctgcacatagaggttcaattgttattgcttactaccttcacctgctacagccttatcatcgtcttgggctcttgactccggggatctcctttcatgtgacatctgatcagacatagtttcttccaaacctgtcaccgaagatggttctgttcgaactattgatg

SEQ ID NO: 25317 - DNA, 519 bp, Zea Mays
ctacaaccgaagtacacagaccacacagtggctcacgttttaccgaggtgggacctttgactctttccattgcgtgggctactgccatcatgacctccattgtagtgcgcgaggtaccaaggcgaagggtggcaggtggagaagacaggacgacgttgccagagcatccctacacacggtagcgctttggcctatgccacaacctactcctgcgctctgcccgattagatgaggcaagggtacaatgggcagcagtacttcagcctacgccacaacctattcctgcgctttgcatcgattagacgaggcaagggcacgacgagccaggaaatcttcatgaagaccaaaagaagatctattcccccgcgcgtctggccgatgcgatcacgcacgcctgagagactgatggacttgcgctcggtgcgtgacgaaccatcgtaggaaaggatccaccccttatactgcttaaccccccaagcaatccatgaggatcactcgagagctaaaggactacgtcta

SEQ ID NO: 25318 - DNA, 284 bp, Zea Mays
aagagaactccgcataaggtaaactcttatcccaacttccaccatgtttaagagcacatgctctcaacatgtcctccagcacttggttggtcctctcagtctgcccatcagtctgtggatggtaagccgaactgaaatttaatcttgtatccaaggactcgtgcaacttcttccaatatcgagaggtaaactgtgatccccggtctgacacaatcttctttggtacaccatgcaggcatacaatccgtgccatgtacaactctgccaacttggctcctgaatac

SEQ ID NO: 25319 - DNA, 299 bp, Zea Mays
ccaggagtaagtaccaccgatccagggattggacgaggtgttacacaaccagcgcatccccgtgcccgtggtcggccaccaccgcacctgagcagcgtctgctcctataaaaccaaccctgacccttggtctcactcctcgaacttccctgagccgagcccaagccctacccgctagtgaccgccgagcacagtgagctccaccgcctgccattgttcctgagcaccgcccactccaacccatatcctcgatcaagctccaccaattaattccctaaagcccagtgaaactcccccagc

SEQ ID NO: 25320 - DNA, 400 bp, Zea Mays
attaaccacactttgataatgaaaagcaatctgctatctccatcatctcatgcccccttcctacctggctactccccaccccaccaaaacaagaggagggagcaagcaacaagcacgggcaggagacgaaacaagatcaaataaaagaatctagacctaggatcatcagattctacaaatgctaacagcagcagctgcctgcaagcagggagattaatccgcaaggaaggaacaattaaaacattttgttacaccgacgagggaaccacaatggcggtggtcggatccgtcagcatgtcgtcgtctccctccatgagcagctccgcgtccctgtcgtcgtcgttccgcaagtccttccgctccagcttcgagttggccaccacgaacaccagccgttgcg

SEQ ID NO: 25321 - DNA, 276 bp, Zea Mays
tcggcttaagtcggcaaagacttaagacggtgcaacatgctcacgcttacttaactcagggtgaccactatgccatgctaacggagcaatcagcttaagtcggcaacgacttagggcggtgcaacatgctcacgcttacttaactcagggtggccactatgccctattaacagaagcaatcgacttaagtcagcagcaacttaaatcgatctgacgtgctcacgactactcatatagggatgacttctatatcccgtaaacaagtttcaaaaccat

SEQ ID NO: 25322 - DNA, 597 bp, Zea Mays
gcgggtgttcaagtgaattatgtgttccggatcaccaaaggccgggctggataaattgaagctagggagaggttcctgggttcaccagggatcctggacacgctttggtttgggcaatacaagacccgaagagcaggtcgacggtgagggtgggttacggcggtgttcttcagagcaagcacacgttctggtgaaaggcttcggccgaatttcaattggttgataccgggggaaataggaggctaacagcaagcaaaaacatgaaacaattgaataggtactcacccgaggactgctggccacgggggggggggggttctttgcggcggagcaagaatagaggaagagggaaactgggggctacgtaggctttccggtgagctcgagtcgagcgcctaagagtttgtgcgcgggatgcaatgaagaagcaggacccgagcgccatttataggccgacgaccggatttggatggaattcgtggatttgggatgtgctggcaaggctaccgcgcggcggatcctggtgagggcacggtggccgccgattaaccggagcttgccacttcactgctttaacgccacgtcgcaggattcctt

SEQ ID NO: 25323 - DNA, 561 bp, Zea Mays
cgtgttttaattcttgcggcgtcattgcttcagatccatacatcaagtggaagggtgtgaacccggttgctcggcactctgtcgtattcagggcccatacaacttcaggtaattggtcggcccatttgccctttttgtcgtcaaggatccttttcttgatggtgctaaaaatcttgccattggcacgtttgacgacaccgttggattgtgggtggtatacagaggcgaagacaggcttggtgccgatggaactccagaattccctaaagtcttggctatcgaactgtttgtcgttgtcgactataagttcggatgggactctgaagtggcagacaatgttttgctagaagaatttttgggcagtctttgctgttatcgtggagactgccctggcctcaatccactttgtgaagtattcaacgtcgatgaaggtgaacttgaggttcccttgagctgtaggcagtggtccaacgatgtccagcccccagcgttgaagtggccatgtgtgtgcgatgagcttggtgaattgcaaagggttgcctgagcgaggagagaacttct

SEQ ID NO: 25324 - DNA, 596 bp, Zea Mays
gagagtcgtaggcagccgcttgatgtgcggcccacatgctgtgtgaagggaaggggtgccaactaggctcgcccgctactctccatgtgtcctccttctcacccgtccgcatctctttacttagtcttttttccgcgtctcactaaaaaaccatatcagagatcatgtgctaattctaatcacaattgtcattcatgtctctcttgcgattatgaccacagtaacacggtaactatggcagaggaaatggcgttgtatgcatgcttctcatttgtgcgagtggcaactaagtaaacaaattgaggaaatgtcgttcggtgtaaagtaatactttccctctctccctcttctctcttctctctctccctccctccactctctttcctctctcttccctttccctctctcctctcctctctcttccctctccctcctctctcttccctctccctctctcttccctctccctccctccactctctttcctctctcttccctttccctctctcctctccactctcttccctctccctcctctctcttccctctccctctctcctctcctctccctctctctcactctctgcagagacgcg

SEQ ID NO: 25325 - DNA, 296 bp, Zea Mays
gaagatggccttctggcccttcaatctgagatgggcggtcacgattaaacctaatggatactggttcggatgtggggtgcaaaccgttgatatagcatcggatggttctagattgatattcaatactttaaatccgggccgctcgccgttgatccgatggccgggaacgcataccgcttcgcggtgggctcagtctaatctgatccgttgggatcggatcggacgactgagaataattgatacccgttgggttggagacaattgcaaaagagaccctaggttttcacacattcaac

SEQ ID NO: 25326 - DNA, 282 bp, Zea Mays
tccactcgtaacagaacaagctataataccgctcaattcgagagattgcttcaaagatttcacaaataaaatgaagagtttcactaggcaatagaagcagaatatttgcgctacctaggaaacaagactgtacaactcgcagtaatccaaaactaaaaagtaacatcccaactgaaactacttgcaatgcaagctggtagcatggaaaagtattgctcagtctaaattggtttccgaggtatgttcaatggccgtagttgcagcacaaatatagggcaaatc

SEQ ID NO: 25327 - DNA, 476 bp, Zea Mays
caagacgagaaacgctgttgtgggcgcggttcttataggcaagcaagggaggcgagaaacacagcagactttaaggtacttgaaggccatcaatggagaaacgtccgtggagtgttaggcgggcgcgtataatgaagaaacgttcatggagtaataggcgagcgcttaatggagacatacgagcggtcgcgcgggagaagaaacggccgaacacaggcatgcagacggagacaacaggtggcatagtatttgtgtcgggcttcaaatgatggcggcataacctggcaattgagtgtaccagagaaattggagagaaggtgaatgggctggatgggacccacatgtaaagaatagagagaggaggtcacgtacgtaagtgagatggctggttttcaaagcttgagaattggaatggtgggacccactagtcataggtagaaaggaggggagggaggggaatgtgtatgtgacggtgg

SEQ ID NO: 25328 - DNA, 325 bp, Zea Mays
cccaatagcttttgagatatagctaggggtaaaacttcctgagatgttctatgttccatgagttcccaatttccgtgccgtccgtttgagtgagacgatatgatccaggccgagtgacttctgctactatgaatggtccttcccatagtggtgacagtttgtgccgcccttcccccataagaattcgccggaggacgaggtctcccactgcgaaggatcgatgtcgtatggccttgtcatgatagcgtctcagagtttgctgataccgtgctgactgaatcacggtgttcaatcattcttcttctagtatatcaatatcctccag

SEQ ID NO: 25329 - DNA, 471 bp, Zea Mays
cggacccaaacgatgcaggacagaccgcctaccccggtgagtattgtccacatcaggggttccacgaccgtcaaagtctgggggtggtgaacgagaacggtatcgtcgccgctgcctggcggaatcatcgtcaaccacagggtcccgaggaggggggagcaatgcactctgatgggcaaccactttaatatggatctggtataccagggccagtctccccttgccagagggaaggccgtgtggctcaacaatccaaaggttccatgaagaaggaatggttgaagggtcgtagcaccacccagaacaccgaaaaacatcaaggcttcttgattccagagtatcagcatgcacctcctgaacccaagcaaaagggttaagaatctggttgaccgtagaaagctcccatgcatgcagcggaatgccactaagctcaaaatcaaccggagtgataaggttggatcctaaagaacc

SEQ ID NO: 25330 - DNA, 492 bp, Zea Mays
aaacaatcgaccatcatagtaggccaataaaaactaactctatgcaataaccacttcattttggagccgattgatgcttaccacaaacatctttatgaacttctctcatagctattcttgcttgatcaaatcctaaacactttaataacaagtcttccgcattccttctatataacttatcattgtgcaacacaaacttgaacacacttcaccgaacactcttttcaactttagcacttggatcacgtaaatgctttactatgggaactctccaaccattcaactgagcttcaaatgtcattagaattcaaaacaagccgattcgggtcttcgctgagaaagtggcctggccgacttcgtgagttggcctagctgggtctggaaagctagcctggcggccattaggggctgacctagccgggttgggcatacctgcacaaaagagagcaaagttggccttgtcgattcccaattccaacttggtcgattctt

SEQ ID NO: 25331 - DNA, 305 bp, Zea Mays
acaataacattaactgattgatcaaggtgccattttaaatggcttcattaatgaacttgtatatgttgagcaacctttcgggtttgaagaccctagatgtaacaccccattgctcccaaacacaatgggtgtcaccaaatacccttcccacaaattagaaagtataaaaggatggagacagaaagaaaaattcgacagcacctcccttgaaagttgcataacgaggaaaccacagtgtttattcatgatgcaaaagaaaggtaatctacagcgtataatcatgacgcaaaagaaaggtaatccac

SEQ ID NO: 25332 - DNA, 335 bp, Zea Mays
gaaatcttggttggcgaggatggtattgagttctagtctcaggcccttcaagaaataggccatcttcttggcttccgtgctaacatcattaggcgcattgcgagccagctctgtgaatttgtggacgtattcactaacagatctccctccttgagttaactcccgaaattcttcttctttgagctagacgatccctaagggtacatgatgctctcggaaggcggcttcaaatcctgcccaggtagcatctctgacggcagcgctgaaagtatcccaccaggatagggccatcccggagagttgatgagcagctagatgaacatgatggttttcag

SEQ ID NO: 25333 - DNA, 316 bp, Zea Mays
ggaggccaagcccctctagcagcagcacgaagaaagacgggatcggcagcaccaacccactagggaggttggagacgaagaacacaaactctccaacggcaagatcgtcgtgaggagaggcaccgactcagatctttctggtgaacgccgacacaccccatccgagcaggttgtgcaccaagttgagtgccacctcaggctagaggcgctcgggaggatctagcaaggccatggtgactacgacggcataagagcgtggagaactcgagggcgaaagggcgatgcgagcgatgagaatggctaccatgctcggggg

SEQ ID NO: 25334 - DNA, 511 bp, Zea Mays
tgggactatgaagccaaagctctagctcgtgtagcagaacttagcgcatccctcaaaaacctgtaggcgtactgcaacaccttgaacgaagaagtgcatgtattgtatgatcggctgcacccgaacgtgccacctgatgtggtagcaatgggagctagaccatctggaacagcaaatggaggatctgatggggggattgacctttttggagcccctccttccatgaatcttgcagatgaacggtctcctgaagcaggcagcggaacaactaaggatgaagaagattagagtagtatagtttaagtattgtacttatgtaaaataagtaagaaaagttgagttgtataatggagtatgtataattattactgttccgcaatgaaataaagatggtgtatgttggcatgttatatttttccaaatgtttctttgcctcagatgtcatcccggacccgtgcacaggatggagtaggtacatcctgcggtggggaagacactcccaatccgccac

SEQ ID NO: 25335 - DNA, 514 bp, Zea Mays
acgggggcgaaatcataagttatccacagactcagcccaaccccgcagtggaccgcgggttgatatgacaaaaggacaggggctattttataaagctggccggctgaaggggtatggtgagttctgggccgttggattcaaatcgcgcgaccaggattagatctactcacttaatgaatcggtacgcataggaacccttggatccaaatcctacggttacagtttttaagaggcgagatcgcctgggaaccatccgatcttgatctatcggaccaaaactctcccaacaaagtgttacctacaggttctaatcgtgaacttcgctcacgatatcaacggtccgcgcttaactcccctaacccggtgaccccacggcggtgctaccctggactcacgatggcggcgaccattactggagaatccttcacctggtgccccggcgacgtactacacccccagatttagtgtaataaacgcggagttcccgagaccatgataggtacaagtagtgctc

SEQ ID NO: 25336 - DNA, 319 bp, Zea Mays
gtggtcgtggccatgtccccactagtgatcgcaaactctactatgttttccatggtgatgacgctagccactcaactagggactgatgcgccaccaaggaaaccaaagagagattagaagttgaaagggtagcaaggggacaccaaaatcaaccatcgaaggccataaatcataacttccaaccccaattccaccacttgtaccaagaaaggtaccaacaaaatcaataaaattatcagcctctgcccaaccaccctaaaagactacaactcccacctccaccccctcaaccaacacaataccaaaggcagctaccccc

SEQ ID NO: 25337 - DNA, 357 bp, Zea Mays
gcatcttgcagttacgccctccggtgctgacagctaatagcaaatcgtttccatcttaatctgtcatcacaagtgccacatggaatattgcattggtggcaggcattgtgtccggtcaacgcaagacacacatcaactcaaagtaatgatctacactctattgaatgtttgaaaagagcgatgttgtagggtttttcgatccaagtaacaagtatttcacgtgctggtctcacaaatccaaaaggagatctactcatttcggttggcttctacaacaactctgtaatttagatcctttttatctcatcaaccataataccccctcctcctatctctttttttgtatctgcacattct

SEQ ID NO: 25338 - DNA, 458 bp, Zea Mays
caaaaatttagttctttttcgtataacgtgctcttactcatttttattggaactttaataagaattagtttataaacatgaacaattactgtaatgggtgaagccattgatttgcaggccactttttgccaacagcttgctaacaattgtagagacattattggagcaaaatagacaggatgacttgcggaaattagcatgtcaaacactttttgactttataaatagtcaggtatttaaacattcttgtagcatcaatctgcaaaatggatgcatcattcattattagtctctttttagactgttttgactcgtggattattaacttctcactgtaggttgacagtacttacatgttcaatttagaaaaccagattcctaaactatgtcatctggcccaagagatgggtgaaaaggagaagatatgcattcttcatgcagctgggctacaagctctt

SEQ ID NO: 25339 - DNA, 323 bp, Zea Mays
gctggcgcgccatgtcatcactcggtcgttatttccaaaacggccgacacggcctattctaactcggctgttacctctaaaacgccgacgtcacaatcagtcattcggccgttacctctaaaacgccgacgttgccgtcaatcactcggctgttacctctaaaacgccgacattgccattaagtcactcggctgattacctctaaaacatcgatgtcacatccatcactcggccgctatcactaaatcggtaaggtagctccaaaggattcggctgttacttctaaaacgccggtatcatcagcaaccgttcggtcgttatct

SEQ ID NO: 25340 - DNA, 746 bp, Zea Mays
taacactgtcttccaaaaacaggatataactgcgtgatactgagataaccaatccatacccaagataacattgaatgcccccaaggaaatcacaacaagattggccgaaaagacctcatcagcaagaataacggaacacccctaacaaactgaacagctactaatggagccattagcagaaccaaccaaaattgggtgacccgacatctgcaccgaaagaccagcctgcgacaccaaatcctccaaaacaaacaaatagctagcgccagagtcaaaaagagcatgggccacaaacgaatcaactgaaatcgtacctatcaccacgtctccttgctctctgccatccgcagcgggtagcacataagctccggaaatacccacagaagaggaagctcctggagtgaaattaacagaagaaccccactgagccaccgggtgaggcagacgcggagctccaaactgagatggcataggagtagtcggtgcaggagtaggcgcagccagatactgaggaaaaccctacaccgactcgaattgagaagtcccaagcacataaaactgctgcggaggaagtggaactgaaagttgctgctcagcgcttgatatcatgttgacagtgccgtgagaagaggaggaagtcactggctcccatctaagcttcccattgggattcctcctacacaccacatccttatggtcttgactgcagattgaacacttcccgttccactagcactctgcacggc

SEQ ID NO: 25341 - DNA, 372 bp, Zea Mays
atgaagggaagagaacatatgagtttgttccacctccaagctatatgtgtcatatgaagtctttggtattgtgtgctagtgtgatttatatctgatatacttccacataactggcagtggcaactccaagaactaatggagactttgagttctacagaaccacattacatcagatgtattaagcccaataatcatcttaagcctgctacttttgagaacatcaatgttctgcagcaacttcggtgttcagtaagaaatggatcactaatagtgaagtttcaattaaaccaacccccattgtatactctaatggttcgtttgagtttcagggtgttcttgaagctattagaatcagctgtgctggatatccta

SEQ ID NO: 25342 - DNA, 327 bp, Zea Mays
ggccgagcaactacccgaagtcatttgggcactcagcacaacagaatcttgagccactggattcacccccttcatactaatgtatggatcagaggccatgactttgcaagaactcaagcacggatcaccccgaacaagcaccatggctatgccagacatcgatgaagcaacaacaaatgacctcctcgatggggatcatgtatccgcccttgaagcactgaacaaatatcaagcacaaacgaaggcctggccagacagcgttgttactcctaaagatttcgataagggggacctcgtccaaatcagaaccggcagaacagaatcctg

SEQ ID NO: 25343 - DNA, 671 bp, Zea Mays
aaccacaactctagtaacaaccaatcaacaaaagggtacattgacaaccacaaagacaacaaaatttgcacagcattgttaaggacaacattagcccacggccatagagaacctaagtacaaaagagcactgtctggtcaaaatccagttgaacagcatttttacggtttcagtgcatgccttatcactttgcacagtaagtaccattaagttagcattagtaccacaataacaatggtgtgtggtaacccatctagatgtgacatggactgcatgctgagtgcctgactgtaccacatagtaatattcaataacacatgttctgtcaataacttggtccaaccatcaagagacacctgttctagtcaagctagaccgagttctttgttcagttgactgggaactgctcttccccaatgttttacttcaaagtgctgcttcccaggattctgaccattgccccttgcttctggggcttagggataataaatctggaaaacgaaggtttcacttcgaatccttttggaccaagctggatggctttcaggaagttgttcattctggatggaatgctgtgataccggtcccttgcccctttaaaactatagaattgaagctcaaagaaaccgccaaaaggttgcaggcttggagcgaaaagaaggttggtcacg

SEQ ID NO: 25344 - DNA, 272 bp, Zea Mays
cgggtgatatgaagaactcaatttcagctcagcaccaacagacttgaataggtgttgccaaaatgtgcttgtaaacaccgggcccgatctaaaatgattgccactggaaacccatggagtttgtagacatgattcataaacagcttggcaactgaactggcagtgtaagggtgtgaaagtggaatgaagtgaccaaactttgtaaacttgtccacgaccactaaaatacagtcgaaggatctagactgaggaaggccttcaacgaagtccat

SEQ ID NO: 25345 - DNA, 414 bp, Zea Mays
ggcttcggagatctggggattttctatcccacaagccagcatgtggggtgctcggttcactgcgcttgttcgttctagtgcaggagggggtgggaagggaacgggaaaagagggcgcgcttcattgaattcagccagcggccagcgcggagctcgcacgtcatggcctgcctgcaggcgcaattcattcccttgttgccctcatgcaaggggcgaaatgatgatgataagctttgcgaccatccatggattgggacacattttggtgtttggagctgtaggctgtagccggggaaaaaccttgcttggtggagcagtggcgacacacatgcccactttgagagcaaatgcatcctttgaaaagagagagagaggtggtggtgagtgttctctgtccatcttgactcagtgatcc

SEQ ID NO: 25346 - DNA, 463 bp, Zea Mays
acgatatatgccggccgggtaccatgcacctgcagatcgatcggttgcattggtttggtcgggcgctcgtggagagaggagagagactcgatcgatcgaacaggtccaacggcgattcgctgttaacgacgacgtccaggttcatatcaggagtactcgtactccaaagaacatgcaaacgacagggacgtactacgacgacgacgacgtaccaatcatagtactgttcgaccacgacggggctgcaggaagaaaacacggcactgtgtgtccctgtccaaagcgccagcgcgcacgcgagtgaaatctttgtccagcctctgcctctccgctctccgcgtgtagacttgaggaccccggccgccggcacgagatctctgaactctgacaagtacaaagccgtgtttcgttctctaccaattatacatatataccactaataaggcactaaataatatatagc

SEQ ID NO: 25347 - DNA, 409 bp, Zea Mays
tagcaagagcaagttgggatctcacgtgcccggcctgcttttcgctctaggcctgcaaactttttgcagctccttgtaacttcatttccagggacttgaaagggcatgtagccgactcaatagaattccatgcggcaaggacaataatatcctgaaacccctcaagcttggtccagaagaatttaaagtggaaacgcctttttccggatttattatccctaagccccaggagtagaggacaatgatctgaatcttgtgaggcagtactctgaaggagaacattggggaagagcaactcccaatccactgaacaaaacactctgtctagcttgaccagtataggcacattttgttggttggactaagtgtactgcctgccatgcaagggaatttccttcagggccatatc

SEQ ID NO: 25348 - DNA, 437 bp, Zea Mays
gaagaagataatatactacctctggtggctggctgttctggccgccgcctcctccccaggcttcttcttctacctctgattctcccctctgctgctcccttctccaccacacgctaacaatctggtatcagactcaggcactctggatcccagtaccaactgtccacggcgtactcgtgccacctccgcagctatggagtacaccgacgccagtaaccatcaggtgctcgaggaaatgcgcctgatggaagcgcggctctccgagaagttcgccggacgctgcgacaacatcgaacggcgtgttgaggatatccactcccacttcacgacgcgctgtgacaagatccaggagcaggtcgacgtggcggctctccgcggcgacgactgtctcgtggcgctggaggaaatgcgctccgacattgagcgctggcgtccgg

SEQ ID NO: 25349 - DNA, 366 bp, Zea Mays
caagtcctagtcgagcaagtctgcgaggcagggcgaccaaccatgtcccagctgagaaagtctgcgagacgaggcgaccgaccaaagtcccctccgagcggacccacgaggaaggaactcaggccgatgctatcgacccacgacggccgtgacaagacgcaaaatcaccaaccacgtcccgaccgtacgtacagtaccaacagatttctggcagacacgatggaacacccccgtgtgtgcccacaaacatatcctcactgactcgcggagccggtcaactccagtcacgaagacctcgtcaccggaatctctacagtggctcatacaccggaaaggacgagacaataccccataccaggcgtatac

SEQ ID NO: 25350 - DNA, 303 bp, Zea Mays
cacacttgaagcatgccctgttggtggatgtgttaggagcaacaggtcctgctggggtgcttgctagcggaggagcagttggtgcccgttgagtttgttgtccggaactgccactagctggtgtacttggagtggtagtatagcgaggacgtgaactacttccagcctgcccttggttagcagcccttcttttctctccaaactcacacctcttgttttccacagcaatagctttgtcgagtagtctttggaaggatggaaatgtgtgcgataccagttgatattgcaagggtccaatcaaac

SEQ ID NO: 25351 - DNA, 447 bp, Zea Mays
taggaatccagaatcctaaatccaaattgtatatttaataattagaagcagtttctcttggttaatttgttctgctacaactattatcatgacatccttaaaaaaatatgaaactattatccattgttggttgtccatatatcttgagtctgagttgttgtctttccttagtgcattttccagtgagaagctaatttaacgtagagttttctattgagaactgagtgcagcttgcattttatttcggctgttggaggagctagaactaagtgcagcttgcatatatcttggagctctgcataagattagtaacactgattgctttgtttagccattggtcgatgttcaaatatatttgtaccttatgcaatgtgtacctgaggtcatatctcatttgtttgtttgcatgagcgaatcaaaccatatagtatacgagctttggattag

SEQ ID NO: 25352 - DNA, 677 bp, Zea Mays
cccgcgccagcccctgcgctgacgggtgaggacaccgcgaaggcaatgggcgaaccaactgccgaagatcccgcggcggcggccgggccttcgcaggtggcgggatagggtttagggattttaagtgtaaacttttgtctctgtgatactgaacctcggttgctgcgcagattccgacgtttgggcctgcgcaagcaaccgctgctgacaatactgattttgcggcggccttaaccatagtgcctaccgatgatagtttgtttggttctgtgtctgagtgttttgagtctgatggtgaatctgggagtttgtttccttggacggaggagtcctcggatgaaggcttggattattttgttgtgttggatgtggctgcggcggagactttgccgcgtgtggagggtgccggggatcttcctagtgcgggtactgggtgtaggcgacgaagggtggtgggaaaacatagtgtgggtgaattttcgcgaagtggcaggcgccgtcatttggggatggagcgtggccgtctccgagtagaccgggttggtaaacgagaattgttgtcttcgccgattggggcgagcataggcgaggggaatcttcggaagctttttgagggtgaggaattgaggataatgttgtttaattacagggagatgggtatcatcccgaaggttgag

SEQ ID NO: 25353 - DNA, 431 bp, Zea Mays
attttggacttgtttggaaaggcttctggcctccgaaataacgaacataaatctaatgtttatcccatccagtgctctgaggatgatctattggtggtctagaatttattaccatgtgagaggtctaatttcccttgcaactattttggaattcctctatcccttcgcaagctgaccaaggaacaagttcaatcaatcatagatagagtggctgaccgtcttccaagttggaaaactgatcttatgtctagagttggtaggaggattattgtacaacatgtgctcactagtatgattgtctatttggctatggccactgatttcttacttgcacattagaggcaattgataagataaaaaagggttttttttgtaaaggtcataaagatgtcaagggaggacactgtctgattgcctggggaagggtgtgc

SEQ ID NO: 25354 - DNA, 370 bp, Zea Mays
catcttaggatttagggcgggtgcactccgccacccggccggagaattccctctccgacatttggtgcgccaggtaggggcctaggcattaggtttttgcttgtttcctcgctcagcatgatggtgcaaatcgttgagcaccgcaccgagacttcaacggattttatggtggaggaagaagttgtttcttccacgccacaggttcccaaccgcctagtgccgagcactgctgttgtgcacgctgcacgatagcatacaactgcacaaacatcccggactccatcgagagcggctccaggaccattgttagcagccagggagttgctgcgtcaccctccaagctccacggcctcaccgggggccatgaagc

SEQ ID NO: 25355 - DNA, 402 bp, Zea Mays
caagagttcaaataagaaggatagagttccccgctgatctaatagttatgggtaaccaggatgcgactatagatgtcatcctagggatgaattggctaaccaagtatcaagacagtcttagctgtgacaaaagaacagtgaagttagtgtccttgtcaagataagaagtgttagtggagttggtcttgtctggaccaaggaaaggaagctgtcaccaagtcaccgcccatattgaggagattaaaccatcagaggctatcaaggtagtatcagaattcccagatgtgtttcccgaggagttactaggtatgccacctaaaaggaaggttgaatttgccatagatcttataccaggcaccacccctatttccaggagagcatatcgagtgtatggaccagaat

SEQ ID NO: 25356 - DNA, 366 bp, Zea Mays
cggtgaagtagtcctctattgtgcctaaggctaaccctctaaatagtaaacagggacacaaggatgtgtcgattgttaaactagtatagcatcttctggtggtgactaggcggaggtgcatctaaacctatccgaatggaactacctctcccaaccctcttacttcacgctatggtggttgctacaacaatcatctcctactaattgcgatcaagcctattgtgcttctcgtgcatcaactcgataattatgctcttgcccttattgttcctagaagtatgtaatgactcttgctatttgtccccacctaatggaggtggtccaagtctcttggtctagccatagtagttatctaattgactaacc

SEQ ID NO: 25357 - DNA, 324 bp, Zea Mays
cgtggctcgtgaagcgctaaggacactatgctcggtctaccgagaagaagtgggaaccacccccatgagattctttccacctctccacaagacccatcaagagtggaagacccgagtgcaagctttgagagagcaaaggcacagtggagatcccacaacagcataccttgccctctatctgcttgccttggatgaaaagtgtgacaagatagttgctcaattgcggaaaacaaccatgcgagtggagaaagcagaagcccttctgttgcagtgccaaaaggatctggtcgatgcccgaagtcagaatgcagccacaaggaactt

SEQ ID NO: 25358 - DNA, 515 bp, Zea Mays
gcgcatccctagtgttcgtcgatcggaggcaacaagaagaggaaatcaagaaacgtaccggatgatgattggcttctccccctctgacttataccgttgtgctgctaggaactatgcagggaactatccagaatatccacgccaccagggaattcgatgaagggaagaggagctatggcacacagagacgaagagaagacgagcgagggcgcacagagacaaagggaatagcgacggcgcactgacctccctaagatctgcgacggcgcacaggacctttgcctgactctgacaacggggaagaaaccacaagcggcgaggaatccaatggggagacgagcagagcgggaagaaggaagagctcaggtggaaccctagcgtacctccggtgtgggacctggatccgttttggaagaagaacgggaatggccggatggggctcctacgggccaggtcgggctccaccgcgttcagaagattgaataagtaaaatataaacactttcctatcacaac

SEQ ID NO: 25359 - DNA, 567 bp, Zea Mays
caagaatcgagatcttggttgacttttatttatgtcattgaatataggaatcgtcatactatcaagagggatcaacatatggtattggcgttgttgctaaagctcacactctttatttttgagtgaactattttatttcagctccactgtgattgaagtgggctgttcaaccagtccttggcccacctcaaccttgtttctctttggtctccagtaagtacctttactgcaactgttgtggtgattggtatttaagcatatgggatgggtacaacaatcttgtcgtcattttacaggacaagtggaaacttgtttaacaatgaccccgctccaccacctccaccatcaccactagcaccaaatacccctccctattggcaacctgatgttccagcttacccatccccatacttatatttaaactctactcgcgaacggtgcagtctacgatgcagaacaatgtaaaatagtacatatgggtaaactttgggtaatctgctggagtcggcctaaagtctaagatacccagccgaaaatggtggcagacactccaaacttggtgatggt

SEQ ID NO: 25360 - DNA, 381 bp, Zea Mays
gcaaccacagcctgccaagagacacgtcacacgcacaccgtgttgtcaatcgctcatcaccaaggtgctagcccaccggcatctcaatctcccccttgatgagtgcattgacaacaccacaccgcacaaatttattaaacataagtaagtaaaaaaatatcttgatccccaaagacatgggctagcaaaaatagctaggctcgacacaatcaagaaaataaaaaatcactttctccaaagtgaatcaaaattcagcaaaactccctctcaaaacaagcatgtcaagtctcagcaaaaacgaatcaaactccccctgcaaaatgaatttgtgcgctactcactctcccccttgttgacaaagcactccatcaagataaatgc

SEQ ID NO: 25361 - DNA, 471 bp, Zea Mays
tggtagtgtcgctgcttcatcgcatcgtcgtcccccacccggagcggtggctgtctccccagtgattaaccaccatcgcatggtcacgcgcgccaaggctggcttccgggtgccagcattgttccacgccgcccctctatttccaattccgaagacctttcgtggcgctcttgctgatcctaattggcgagctgccatggaagatgagtatgctgcactattgcagaatcacacatgggatctggtaccttgaccccatggggcaaacattgtgaccggcaagtggattttcaagcacaaatttaatgctaatggctctcttgaaaggtacaaggctcgctgggttctccgtggatttacgcaacgacccagcattgattttgatgagaccttcagccctgtcgtaaagcctgctactgtgcggactgtcttatcattggctgtctctagcagctggccgattcatcaact

SEQ ID NO: 25362 - DNA, 305 bp, Zea Mays
tggttttacgtgaagaatgacttgaaggcaagggaggatattaaagaagttattatgcgccccatttggtcccgcttcggccttcgaaggccaaaggttgagattgatgaagctgtcgaagcatgccaaaaggctttcggtactgtttgcttttttattggtacaagagatttaatccaggatcatatagctttcagagtgtggccgcttgtagagaactgggaaatgccgaaggagactgtcaccaagtctagcgaaggtgagctggtttgactgaaatacaccttcagatacggagataaatt

SEQ ID NO: 25363 - DNA, 595 bp, Zea Mays
ctcatccatggttggaagactctcctggtgacaaaaggcagctctcctgctctcaaactcaggatccagattcttcaagaagtgggtcactcttctgtcatttgcccacttatgaacactctgtgcatcctatggacaaatcatttggaggggagcatagtgatctagttccccccacaagtactgaagctcactagcatattgttccactggtctccccatttgtttcacggcatctgccttgctctggatttccatcgtcatcatcacatttccctttcgagagtatatgttactcaaggtcttccatatctgggatgcggtgcgcatagcttctaccctcatgctgacagtgggggaaatggatgccaacaaccatgccactatcacagagtttgttgcatgccagattctccattctatgctaagcttatcaaccagctcaacacatgtctcctccaaataatgctccactcctttgcctcccagaagcacatgcactcttctagaccaactcaagtaattcttgctgccctctaacttcacatcattaggcacaagttccaatttcagctcagacgggcctgtattggcc

SEQ ID NO: 25364 - DNA, 336 bp, Zea Mays
gccggggatggtcggagtaggtcggtccacgtgcacaggcaggggagctcggcggcggtgagggctacggcctatctagggcggtagagttcaattaaatcggtcagtgagcttcactaggtgtcagggaaggcatgggcgcgaggaattgaagaatggttcacctgatagctcggtctacgtgcggtggcgggcggccgaagtccggcgacggtgatctcgttgttccggtgaggcagggcctcaatccttgcttggagaagcttcacggcttctcggggaagctgtccagaggctcgggtgaggctaggggtctatggaaaaggctggttgcgg

SEQ ID NO: 25365 - DNA, 1042 bp, Zea Mays
tatccgctacattgcttcactgtagttagctttgtacattccggcagcaaacaatataatatttaatgtaaatatacaatgaaaaccaggaagcaaacctgcacaataagcatttagtttaaatttttttcacatagcatcactcactcacatcaaagcagccgagcatcaatgatcactgatcacagctcacggtctacacagtcacacatcactaatcacggtctcacacatcgttgatccactgtccacactcacggtctcacatgcacaacagacaactcgcagcaacagcaaggcagcaatacgggtgcagcacacaacaacaaggcaacattgtagcaggaaggcgagcaggaactaaacggacatctgccactgcaaagtagccgagcaggagcaacaaatcgggccaaacgggtatttcgggtaccgtaacgtgatactcgattaggcccgaattaaaatcgggtattaagttttgttacccgcatgaattatttgggtactgagcttcgggctaaataggtacggtctcgggtattttgggcttcgggctcgggttttatgcccagtgctaccgtcacccttcctcctccacatccacgccgtcctctcccacacgagtctctagcccggaggccacacgagggacgggaccttctcacgtagctcaagctcacctgccagcgaaggctacgacacatcgacgaccttgatgttgtgctcggggtccttgatgtcgacatctcctactggtcgtcctcctctccgccgcagcagaggggtctcgcctctaccgtccaggacatcatggtctcggtcgccatcctcgcctctaaatccgccagcgctagggagggcgccgcgccacccaggttcgcgtccttgtctgtcctctatctgttgccgctgtcctcccccaggccaccagaatcgcctagggccaggaccgctgatgggtggtacgactgtatgacccacgtgcctagatgcgggccaattttcccttctcttaaaaaatcccttgttttcttctttc

SEQ ID NO: 25366 - DNA, 322 bp, Zea Mays
tgtatgatgaagttgtgtgccctcgcacattcggctatgctcgcgaaggcgttacgtacttggtcaggtgtaattgttatgctggactggtgcgcgtgtagtcggtctttgcgcggactgttgcacggataattttcacggaggacttcgattcttcgcacttattgtgctagcccggctgcacccgtaggcgacttctgcacggatagtctccgtggaggacttcgattcgtcgcacttattgtgctagtccggctgcacccttaggcgacttctgcacggtaagtcttcgcggtggacttcgatttttcgcatttattgt

SEQ ID NO: 25367 - DNA, 494 bp, Zea Mays
ctggtttccttggggtggcggagggggtggtagtgccaatctctcttggtgtaataattgtggttgttgaggggctctttggttatagttttgttggtatgggtggtgatgtggatgtttgtttttgtagtggtgatattggggatgctaggtatgtgctatgactcgttgattgtttgcgggactgcccgaccatgcggtctttggcctcttttgttactggacagtctctagttgaatacactacgtcttcgccgtggaagacgcaatagagcttcctttgctgctgagggccacagaatggtatgggtggtgatgtggatgttcgtttttgtagtggtgatattggggatgctaggtatgtgctatgactcgttgattgtttgcggggactgccccgatcatgcgatctttggcctcttttgttactggaaagtctctgattgaatgtcgtacgtcttcgtcgtggaagacacaatagagcttcctttgct

SEQ ID NO: 25368 - DNA, 304 bp, Zea Mays
aaggactatgatttggaagtgcattaccatcctagcaaggccaatgttgtggcagatgccttaagtcggaaggcccagtgtaactgtgtgagtatagattccaagatttccaccctgtgtgacgagttgtgcaagctgaacatagaagttgtttcctcaggtgccttgagttatatttcagtggagcccacattacatgagcagatagtcatggcacagattggtgacaagggtgtccaagtcattaaggaaatgatcgaacagaaggtggacaaatacaaatgcttccgtcaggacagcaagg

SEQ ID NO: 25369 - DNA, 416 bp, Zea Mays
cggcgatgatggcgggaacgacgctgatcagtcagtcccctcctgcaatccatccagagaccagagctagcaacacaacacgccagctgtttaacgattgcaaaaccctgaacgaaacccccgttcccccagtcatctcgcgttctgtcctcctgtcgtcctgtgtgcttgctgcttgcttttgcttcccttccgattccgacgcagcgtctcgtgtgggccccgcggtaagagggggcatttgtccatgtagctaggctgctcgatctcgaatcctcgatgaccttgcgcgtgcctgcctggttttcggtggcgatttggttggcatatgttctactcggcttgggctattcagatgcctatgccgtgatggacgacctgcttccacgcttgatctaagcatctttgcccccccc

SEQ ID NO: 25370 - DNA, 348 bp, Zea Mays
atgaatctcaaggtcataatctttgatcagttccagccatcttctttgacggaggttgagatctggctgagtgaagatatacctcagactcttgtgatcggtgaagatgtgacatttgttcccaattaggtagtgcctccatatcttcaaagcatgcactgtggctgccaattccaaatcatgggtgggataattctgctcatgcgacttgagtaggcgtgatgcataagcaatgactttcccgttttgcatcagcacacaccctaagccttgccttgaggcatcacagaagacgaaatcctgatctatatccggtagtgtcaaaacgggtgcggtcgtgagcttctt

SEQ ID NO: 25371 - DNA, 340 bp, Zea Mays
gatcgtcgctggttcgcggtggagctgtccgcgggcgagccaagtagagtcggacggggaagtggtccgaattgcttgccggatcttgtgtgaacctggagaaccaccgtcgccatggattggccttcctcactgcgacaactcgggtaacttcccctccttaggtttcgctttccgcctggcatcatgtagacgcgttcggatcaggctttgggtgtcggggggcctggaattggatgtcaccggtggggtccatcgcgttgaggggcggcgccaccatgtctagtgtggttttggggaagaagtcgctcggccgttggatggacagcggatacccgag

SEQ ID NO: 25372 - DNA, 833 bp, Zea Mays
cttggcacgtgctgcttatcaccttagttgatatgagcaactaactgcaaaattactctacggtgtaactatataatcgtaggtgaataatggaaattgaaatcagtctttgattagtttatttttagactaattccacatttgttctctcggatttggtgtacagatgggttttaactcatcctttgacaatttcggagtatgagaaattgaagaaacagttgaaaccagattttgaggacatggttccctggtactctgggtatgatattagtcaatacactagttcttatactgcaagtaatatggcaaaagttacttacaggctggtaatttgttttgcaggacatcaactgatttatttaaaactgtctttgacctcatgatatctgtgactctgtttgttggtcgatttgacatgcgtatgatgcaggtacatcactttttccctccgccatagtgcctttattgcatggtttctgcttgattccttatgcatttctttccgttataggcacataacagtactgatttatgtattgcactacaaagttattaacagtttttttactaaccttgaccaggctgctatgaataaaactcctgatgaagctaacagccatgaccttttgtatgatcatcttgatggaaaagatgagctttggtttgacttcattgcagatactggtgatggtggcaactctacatatgctgtagcacgattacttgctcaacccttgttagttataaactctgatgactcgaggctaacatttcctcgtgggcaactgcttctcgttggtggtgaccttgcgtatgtttcctgttgacgc

SEQ ID NO: 25373 - DNA, 305 bp, Zea Mays
ccgaagcgaaggttaaaccgagtaatggatgccctagactttgagtaccccgactacgagcgactagacatggatgccgaagggcagaaaaggaagagaatggctggtgctctgaataagatgatgaagaacacctgcagaagaaaaagttgaagcctgatccaaaagtaggtgcttcgaagaagaggaaagctacagctccaaagcagaaggcaattgatgaagaagaagaaactgctgcaacaccctctgccaccgacgtggaggaaattctaaaggtaatgactgaatctttgcctgtcaag

SEQ ID NO: 25374 - DNA, 613 bp, Zea Mays
gctccctccaccgcgcccctacttcctctcctcaccacctgcagcagacctcgtgggggtacatctgaggctcccatgcataccattctcttccgctaagtgccgctgccatcgaagttcattgtcgccatcgcgtgtgggttgctctcggcgtgaggctaatacgggtcaccatctgaagcactgaagaacggagcgtgggtgaaggggggtgagatttgatgccactgctgtcgagctcgcccacaccggtccacggatggggtatcgccatgctatgcactgctcggatgggcgcgtcgccggcggggccatggccacatcaccttggagcttcttcggccactgcgaactcgccctctgttctcctggccacagaatttgtgatcgatgacctgtccaccgtcgcatgcggtatgagcctcggcaggttgcagaacactaggggcgggttcaagcctgatgccatttccgtctatgcctccctcgccggggtgttgccgtcttcgaccgctggatcccctccatgcccacatccacgcattcaattgcttgttcgtccactcggcgacgttcacgcccgtcaccgcggaccaatctctgtgcaatccaa

SEQ ID NO: 25375 - DNA, 389 bp, Zea Mays
gtggatgtaaaccatgtgagcactgatagacagatagctgatgctctgaccaagccactcggcagaatgaagttctcagaactaagaaggcaattgggagttatcagaattcaagaatgacaagattaagggggtgatttgttgcatttttcaccagtttgtaatcctatcatagctaggtgcattagttagtctgcatatttcgttttcgcgtagaatccaggtgctctctggagactgcccagaccacgccgtgaccgcgtccaggcgtatctcccgccacgacacgcatgtcgtgcatgtcgcacgagcgcccgaaaatggtggcacatcgtacagctgcgaggcgtggcggggaactcggatcgtgccatggaaccaagtttatc

SEQ ID NO: 25376 - DNA, 345 bp, Zea Mays
gtttatatcagaatcatcatggacattgctgtccacatctttgtgatcgacaaggggggacctccaatgttgtatattttttacaagcttgaattgccagtatttttctggaaagtttcagatctttgatcaactccagattatctattgcagcagactcagagggacccaaagaaactcctaatctattagctatatctagcaagtctacattattagaatcaagcagtgaaaaagagttagtgtacatacctttgttgaggaaagcatctttggcttcagctctggaaatagctttatcggccaccttcacatcttcattcctctccagcctagagctttttc

SEQ ID NO: 25377 - DNA, 294 bp, Zea Mays
tcagagtatgtcaagtccggttcaaggacaacatctgtcacttcaatggttcgatcaggaacccgaagacacttcttcaattgtgacacgtggaacacattatgcacagcagacaatgttttgggtagttggagtcggtatgccactggtccatatctttccagaataagaaaaggaccaatatatcgtggtgcaagcttccctttaaccccaaaacgcgatactcccttcattggtgagaccttcaggtagacatagtctccttccaggaaatataagggcattcgccgtttg

SEQ ID NO: 25378 - DNA, 451 bp, Zea Mays
aaaagaaaggggggagaaccccaatacagcacacacaccactagagactaactacggatcaccgactaaaacatggaagaaacacgacccacaccgctgttttaagccagcaactcatcgacttggaggaaggataaggccttggcaccagtcatggaccagagcaccgcctcatccctagccatccaaagggccatgaccaagctgggattacaaccatcaaaaacacacctattcatatgcttccaaatggtccaagcacctagaatcactaaagaattgaaaccttttctcacaaaatccgatgcccggaagctgctagacttccaccacaactcaaaggattcctcatgagctggatacagatcccgcagccccactgaattaagaaaatcaaaccagaactgcttagcaaaaacacacttgaccagcaaatgatttatggtttcag

SEQ ID NO: 25379 - DNA, 445 bp, Zea Mays
gggaggcttcactgacctaaggcgacctaggaacaaccactaaactaacatgaaccctattgggagtcgcttgtccacgatcacggcggacaccgatcatgggagcacacgttcccgcagattggggatggtctagttcgatcgggtgggttgatgagcatcacgaatgcacacaggtactgaaacagaaccgcagagagcatgatcagacctggaagtggctggccacggcgagggtgctttaatggcggcggtaaactgatttgggggaaaacggcgattctccggctagggtgggcaatcgagtggaagaacgggtgtgtgggcttcgtgatgacctaacgcagctgcccgggggctcaatttataggcagcttcgtcggtggcgcttaatttggccggaccgtgtgggcggccggagattaggaagaaccttggcgcggtg

SEQ ID NO: 25380 - DNA, 357 bp, Zea Mays
aatttcagcagtcatcttagtgacgccacacaattaatgcggtatttggtgaaattagtaatgggtttgcttggagattggattttggtgcatagcctccagttttctcggtcaagtttaatgtatatgatattctcttcgagatttgttgtagctaaatttgagagcgcacatcgtgagatgatgtcattactgtgctcacagggcttttggggtgcttgcccctccatattatggaaatttattcccttggtggtaaatgcatatttgattgtctagatatttgttcatgctttctccgatccatccatttttcagatatcagttgaacaattcttgaattgatttcttgtttct

SEQ ID NO: 25381 - DNA, 340 bp, Zea Mays
cacaaatggtgttcattgggtatgaaagtggcagcaaggcctggcgtttctacaatccaagcacaaaacgcgtacatgtgtcgcgtgacgtcgtgtttgaagaggatcgcgcctgggactggaatgaggaggagaagactgggataaatgtcccagttggtgctgagttcgtccctgtcgagagctccattcgcctgatggacaagccgggtccttcgtcctcgtcaccaagcacgtcgagtagtggtcgttctgggcctcccactcatcccggtggccaatgggatgttcaggatgaacagcaggtgcccacacctgggataatggctaccgagtatgc

SEQ ID NO: 25382 - DNA, 357 bp, Zea Mays
ctaggccgttggatcttacttcgagggtcacgattagatggcgccttaagtgaaccggtatgttattagacccattcgatccccaatccacggctcccacgcaaccacgtcatccacaaatccgattcgcccatggagacatcaatggctcgggttctatcgttgaagggggtgtcctcagatcccatatgcgccacccgtgattaatccaatggtcctatatgagcatgaccgaatcgacacgcaccatcaatcctaaccttctatcttccgatcaacggtctagagcacgctctcaatcactgcccttccccacggattggacggtcatcgagccgtcatctaccttcagcgaac

SEQ ID NO: 25383 - DNA, 403 bp, Zea Mays
ctggaccgagttcttctctgctggatatcggctcaaccggtttcaataccggctcaaccgatatttgagcagaatagtcaaataaacaactaccttttgggttcctttatatacccttgggcctcaccatctggggttagggtacattgtcaagatatatttttaggagaaataacttagtagatggacataaactaaatgatattaggcagaatttggtttgcctacatcttgttcttgcttgtttcttcaattgctcgcaggaatagaacttcgtgttcaagttgattgtgccaccagcaaggtcaattatcatttggagttggttctgtgattgctaaggcgccacgacatgttcgttcgtaatcggatcacgagagtcacctcctccacgaaatcaaaa

SEQ ID NO: 25384 - DNA, 325 bp, Zea Mays
gacgacgaggagtccttggcctaaaggtctttctgtaatacctacggagctacgaggaggatgcggacacgatcactggcatgccctaaatatcctcaaggctgagcccgggcgtttgttgctcggctagcgagaaccgtggcaaggattacgaccacttcggttgtgattcaacggagttgggtgactgggttcggtgttgttggggatgacacaggggcccaccggtcggtgagtgagactaggcccacggtaccaaagcgagcgttggccaagcgaaaagagaggaggagggggaaaatccagtctccacggcgatggactc

SEQ ID NO: 25385 - DNA, 320 bp, Zea Mays
ctggatctgagatggaaggctcagatttaaacaaacgaaggggttttctggatgtaatctggaccgttggatcaacggtaggcggcacggattgggccgcacacattatgcacctgaactccttagtagtcgtaggatcccgatctaacagtcaccagataaagtcgcgaagggatacatggcttctaatcgcagccgtcggtgatcagatcagtggttcacacacttcccccccagatctaatcatagccgttggcgtcaacatcagcggccagggaccttcttcaacctcacgacgccaggctgagacggcgtacccc

SEQ ID NO: 25386 - DNA, 1691 bp, Zea Mays
gattaggttgttccctccctcacaggcggatggatctcgaatgtagtaatttgtatgtagacctcgtggattaggtgccatttgtagtctgtcgccacaccgatttgtctggtaggtcatttagcgtaggtacttggcaactgcgtgcaccaagaggcctcccgtgatttttcgcacccaacatctatcttgtaagacgtcgcaagcagtctgcctggacctcacccttctagacaccaattgggataagcacgacgtgatatctaacatgtagttgttgttcatccatttgtctttccagaataaggtgttcctgacattacccaccattgtatacatggacaaactgaagaaagcctgtacatggggtttgatttggattgatagcttgctccattctcgctcttgatcgatcttttgtagccataggataggtatgttccaagataggatgaatacgttatccattagaacctacaaccttggtgacttgtttgaagttcaagccatcatggtagtggaggtgttgccagccaggaatagtgtgtccattgctgcaatgtgagatggggttatgggcatcgtgaagatgtcatcgtagaatttcttggccgcaagtgagctcaatgagtgcatacctattaggcccatccttcgcatgagcaggacctcattgtgttttgaggccgagacgtgcgccagctcttgcgccactagacgcctaatgtggctcgacatgcttggttgcagggcaccctctgcttggatggttgacttgtagcggtgtcctcatcttcttctgaacttcttgtcggacaagcgtcaggcggcttcctttggagcaaggttcacttagagttgtctcaacaccctcagctatgcaggcatcatgccctcgccctcggtgtcgtcttctggttgtgtgacgtggtcgaagtgatagttcttgtcatggccctcattccctcgtgttctagcagtgatagaaggttctgcaggagtagttgcccataccaactccgcccagggagtataggatctaggaccatctgtcttacaactctgacaactctgtagaagaaacaggttgagtaccagatccaggcccatcaaatcataatttgaaccgcccactaggcaaggcgaccgagggaggagaacgtggggtggcactgttgtcaggagcgttgctagccgatgggaggccatcatcgccggcttcattcgcggtaccatgtacgatattagaattggcgtaattggatggatgtattgcattgagcctcatgggctaattatatagggtacataggactaacaccccacatgggtagacaatatggtactatttctatttactctaactttcgcctcgtggtcttggtgcggtggtgagaactgtttcactgagttactgggttgctggttcgaacaagcttctttgtatttgcgggagaaagcttgcattggtttatcctttcccttgatcccgctcatgtgggagcctccagcactcttttattcgcttcgtggtctgagtctaggcaatcagagtcatcttggaccacctcattgccttggaccggcctagagaccccacagggaagaagggggggggggggtgagtggcaagagggggaggaaggcactttacctaaagcagcagttgcgcaggagcctttggtgtccgc

SEQ ID NO: 25387 - DNA, 685 bp, Zea Mays
tgccctacttcggttgaaaccgaattcaagtcctatccagtgttttccccaaattaatttcaagattactgtcctacagctctctgcccacggtaaccgtgagccgcgaggacatttgctcgcgttcatggctacccaaggtggtttagcgcaattggacagattcacgagcaataagggacttaacagaggctagaacactaagcgattgggtatgttctaacctgaggagcgctggccacggagaggcggctgttacggtgttcttgagcgaacttggggggaaatccgaaattagtgctcgccagagggggatttgggatgtaggtgggtgcggtagctgctgggatacatggcgaagccgaagggaggctcaatttatagactccgggggcggtggctcacaatttgctcacgacgagctggcggccggaggggagagagtttactggtgtgtgcgataggtggcgaacgtcgtggcaaggccttaggtaatagaaggacggtgtatggtaatcaactgcgacgtggtaagatgaccgacggcgtggcgtaacagcaaagaacggcggcacgccggtgatggccgtgcggacacgtcgccggtaagtggaggagtgaccggacggccactgtgctacaagtttatccacggtgagatcttttcagagtgagcaaaatccac

SEQ ID NO: 25388 - DNA, 638 bp, Zea Mays
atttcgccttactttagatttaactcatcatcaacattattgttaggttgaatatatattttctgacaaaactggcacacttacaagaaatctgatggaattctttaaatgctcaattggtggagaaatgtatggaactggcatcacagagattgagaaaggaggagcagaacgggctggaattagaatcgatgatgatgaggtgtggtgtttgttgttgaagtcgataaattgtaccattacgtctgcaaatatagcaatctttacatttcttttttttactttcatagggcaaaagatctgctaacgcggtccatgaaaaaggattcaattttgatgacgctagaatcatgcgcggtgcatggagaaacgaacctaatcctgaggcttgcaaggtaggtgtttggagattttttaaataagtttgggtcttcagcatgaaaagatatttttattcgtctcttgttacgatgatgtaaaattctagtttgttctgaaaatcaatcttttgattttctgattttatttttaggaattctttagatgccttgcaatctgtcatacagttcttccagagggtgaggagactccggaaaagataagttaccaggctgcctcacctgatgaggctgcacttg

SEQ ID NO: 25389 - DNA, 435 bp, Zea Mays
ctttgtatcttttctataagcaaagttgtagcagccaaagttcttatgaagaccatctgccctggccttcgtctgataatgcagttcatgtacccggcaaaaagcttcggcattagcatccataccctggcttcgcagagcccatataaaaacactgagcctaacgatagcattgggtgtcaattgatgaaggtatatctcaaagttcttcaaaacctcccctatcatgtcattcaatgagaaccgaagtcatgctctgaagaagctcttgaaaacgacaacttcgtcttcttttggttccggaataatttcctccctagcaaaccggacaagcttgctttcagcctccccgaaataaccaagtttcctcatcataaccatgtcatcctccgttacagtagacttcccaaactcaatgtgactaggctttgttgg

SEQ ID NO: 25390 - DNA, 364 bp, Zea Mays
ggtaaatgtcatctatcagtctatcaaggtcgcggtcactaccagtatatggcacacatacctcatctggaagacgaacatcaccatcgtggttagcttcctcagttccaccaccgacacgcaacaaatattctgcaaaccatgggtcactctgtgccctcatgttttgaacaatcttttggtggcacatggattcccagaggtaagaactccgtagagaggcagcaactatctgagcccttgatcccttgcgcacaacagggagaacttgtctgaaatcacccccgaacacaacagtcttcccaccaaagggtagcccaggccatcccattatatcacgcatgctattgtctagcgcctcaat

SEQ ID NO: 25391 - DNA, 1242 bp, Zea Mays
aaacatcaattctcttggtctctgaactgtcacgaacttagtaaactttgtattcattgatctcagaagaaagcaaacaccatgatatgaatcagccatcttgatggtttgtgaatcaattaaaacaccacaggctctaaagctgtcattccacacctttacgaaagaaaagttttcatcctcacacctcattaaaagagttaacatagatagaacttcagcgatctggttatcattacaaggcacatcttcgtatatctcatacactgatcatttgcttatctttccaaatgatacatgctagcttcactatacccttcttattgagtctaacagcttgcatctgctcatcaaacaaagcgtcgcactcgcctcgaacaaatcctttgttgtcatgaagatcatagttgagtaactcaatgttaccataagtgttcctccagtcgtccgcaactacaactctacgttggcagatgtgcttgatgaataactctctattcatacttgtctataacaaagccggtttaaaatgcccttcgtcgcggtgtccatgtcgctctttagatttgtagccattcgatcgattgtcaacggacgtagtcgtttctgtaaatcctccctgccaacgccacctcgctgcttcgtccgccgcagaagctcctccctatgaagcgagtccatggcgctaggatcgccacccgacatggtcacgccgctactcgtgtcccaccctgaggtacgagaactagctaccccttcctgtgtgctctactcttgttgttttatgcacgtcccttgctccccactcctcctgacgccatgggtatcttctagaaagaggacacacaatcaacacgggtagagggaagaaagcattgtggtctccgtcggcgagagcgacgttggtgtgcgcgtcctcctcaacgcgttcgatgcgcgtatgctcttctcccaaagcggccattcctcgtcgcgcttcaactgacctaggtacgaaaagatcatcgaaattcgaatcgtcggtgttgtggttttcgtcacctgctcatcaccgagcaaggacgaccataacactcttcgaatcgtgcattctctgtgctacggttagtttctagccacctgctctgcgcactctgactccattctttctcatcgtcgagcaagaacgaccacaggacaggcgtgttcccatcatcgcctcccccggccacaaattccattaccattgttttacaataaaac

SEQ ID NO: 25392 - DNA, 582 bp, Zea Mays
gcatatccttggtgatcccattgtctccttgtaactccactcggtaatgaatctttacttcaacccttctgttggaaccttacccatctgacccttaattgttttctccactttgtcgtttcgcgagtcttgtcttaactatatcctttgttatgctttttaattattatcatatgcacccttgacacctctatatcctacattgatgtttgtctcatacctgccctttaaaatcgcccctcttccgtctcatgccttctttctcttggtcgtatcctcttctttggctcgcgagtttttaacctcatcctttgttgtgcttttgcttcttattgcctttacccttctcatctctcaatcttaccttggtgattactctatgttcgttatctaaaacctccaatctcccaacttagttcaagcgtggtctcttacttatctcacccgtggttatatcctatactttacctcttgcaagacttatcttatctctattcttgattgtacctagattcctggttcttttatgcacatttgcctcttcctttatatccttgcctattatcacctttgacctttgac

SEQ ID NO: 25393 - DNA, 1022 bp, Zea Mays
gcatcagagatttgtttcagcaacattatagccaaaacatagtaacagtattaaattcttgatgcgttacaaaaatactgatacattttttttataatccaaaaaaatgtttaacatgtagcttggccaataaaccacaggtttctctaacctgaggtctgataaactcaagctgtcttcaatcttgcatcagagatttgtttcagcaacgttatagccaaaacatagtaacagtgttaaattcatgatgcgttacaaaaatattgatacaattttttataatccaaaaaaaattgtttaacatgtagcttggccaataaaccataggtttctctaacctgaggtctgataaactcaagctgtcttcaatcttgcatcagagatttgtttcagcaacattatagccaaaacatagtaacagtattaaattcttgatgcgttacaaaaatactgatacatttttttataatccaaaaaaatgtttaacatgtagcttggccaataaaccacaggtttctctaacctgaggtctgataaactcaagttgtcttcaatcttgcatcagagatttgtttcagcaacgttatagccaaaacatagtaacagtgttaaattcatgatgcgttacaaaaatattgatacaatttttttataatccaaaaaaaattgtttaacatgtagcttggccaataaaccacaggtttctctaatctgagatctgataaacccaagttgtcttcaatcttgtatcagagatatgtttcagcaatgttatagccaaaacatggtaacagtgttaaattcttgacgagttacaaaaatattgatataatttttataatccaaaaaaatgtttaacatgtagcttggccaataaaccataggtttctctaacctgaggtctgataaactcaagctgtcttcaatcttgcattagagatttgtttcagcaacattatagccaaaacatagtaacagtattaaattcttgatgcgttacaaaaatactgatacattttttt

SEQ ID NO: 25394 - DNA, 344 bp, Zea Mays
gtcggagtgggggagcaatgccccgtattcgcgccccgtgcattgtcgtgggcggtaaaggtagaatagaccgtagttgtgtcgtcctttgttgacgttggcaccctcagcggggcaagtggacgtacggacacacattcttgaatcggagtggttgggcgaggcgggtagctccggagcgtcgcccaagacgccctcgggcgaatcaaaaatgcgcttctcgcccgaggccggcctcgtgcgaatcggaatgtgtttcctgccagagattgacctcacgcgagttgcaacttggtctcccgcccaaggttggcctcaagcgagccgtgactgtgtctcccatc

SEQ ID NO: 25395 - DNA, 1067 bp, Zea Mays
tggaaactgaataaatcgattgcaaaagaaatgctgcctacacagcctgttgacttcccagttgagccttggtggggggtttgtcttgttaactttacactggaagagttcaaggtcaggtttgctatatttcttgtaatcgtgatacgttaatgtacttttcatacataatatgatgagacctgctcttaatgagaaaagacgcctagctttatttttctctatgtagagctattattttttatgaagccttcattcatgaaatcttttgacaatagtttgtgttatttgtctaatgtagaaactttcagaagaagagacaacaacaatagacaaaatatgtaaagaggaagccaattcatatgttctttttgatccgaaggttatagatggactttataaaagagggctagtgtacttcgatgtgcctgtttacccagatgaccgcttcaaaggtattaacgagatagggaacagtcagtccagcagaattaacataaccgattggcattgtggctctatgttttgtgttcatgctttctccttatgttatgcaaacaagagtgacgctcagccttataacctagtgtgtttattcaagaagacagcataaaagttggataaaaaaatgaacagagccttctatagctctatatcttatttgcaaaatcatatttggtagatcaatatctgaacaataggaggtccactttcaggcaatggactagcttaacatgcatatagatgtgctaaataaagacttccaaaaataacatgatatttaatttccaatatacatgcataaatattgatatttatgtgatggtctcattttatcctcactaattagcatatcaaaatcccctgatcttgagcctcttttcatgagaatttataaactgcccatctaatttgttattctagactcctatatatcatgaggatttgtgtttacaaattttatattaagttcactaatatagaatttgaaagagttcatcattactgtttttcagtttctaggcttgaaaattttgtttccaataaggatcaatcatatgaagacc

SEQ ID NO: 25396 - DNA, 354 bp, Zea Mays
atccagtgaatgtttgatcaaggtctttataacaaaattaaagctagtacattggacaacaactttgatgtagttgcattagcagtttgtcacataaaaattcaagaaaaacgccctccaatgtgcccttccaggcgctctgaagaagatcctaatggtacagtgtctgaaaatatcagtgatgcagtgcacctcgccgctggtgaccctcgcgccgtgatccgcgccggtactacgattcgtgctctctggcgaggggattgtcgtggaggggtaaaagatccgaagggggagtggatcaagccgacgtcgccgtacccacttgcccggcgacgtggtcgtgtgaccatcacc

SEQ ID NO: 25397 - DNA, 361 bp, Zea Mays
aatgacttcgggggaggaagaggtagaagatcatggcatgctcacctatggctcaaatcgacggtgagggcttgtcctttggtttgaagagtaaggcacgcattgttcagatgtgggggtgacaatgagatggtggctggactgtgaggttccgcggcaagggcatccgtatttataggcggaggaacgacgatttataatggagggagtcttgagcggcgtactgtgattggtgacgttgccacagtgcagtcgcaacatcctgaggttggcagggtaacttggctcatggtggggcattcatttagttgtgattgtgacaagtgactggcgtgtgctcaggcgggtgcacgaggtcttg

SEQ ID NO: 25398 - DNA, 427 bp, Zea Mays
ctgacaggtgggctcaggggggggtgagacgctgacgcgtagggcccatggatcagcagtatgccgatggcgcgctagcgactggatcgcagatcaacggctctggttccacgaaccgcatgaaccattatccgcgaatccgggctgttagatcaaaaatggacggttaggatgggcgttgggggctaccttccccggtcggtcaggggcggtgccatactcgcccgcggcggtgcaactaccagagacgaggtagactagggctcctagggcgctaggggtcggtctgggtagccagaaaggttggggaggactcggcgaatcctatggcagggttgggattgaaggaatggggctgaggtgaccagacggcggaccgggggatactccaacaagcaatcatgcacgactaagggcataccagggg

SEQ ID NO: 25399 - DNA, 472 bp, Zea Mays
cgcgtcataattgcctgtaagtatgttaccaacatgttaaccgttgcccccgcatcgtgtagctttcgtaggattagggtattacgcgcctgggcgccgattcggggggtcaccagcgacggcgccgccgtagtaagtgggtgtcgtggttctgctcggcctcgtggggaagatggtgcgggcaccattggatctaagtgggcgggcaggattagaagtagtcgtacccattcgctcagttggctctcggtcgtcgatctgcttgaacgcttcggattagatattgcgcaccggttcgggtgattggatcctgaccgtaggatctgatcggacggtcaggggtgagcgcggatgagtagctcgcctggatctaatcaggcgcgtccatttatggtcgaacggtcaggatctcccgataccctttcgtcgagccagctttgcaaatgagaccccgagtttgttattaattaac

SEQ ID NO: 25400 - DNA, 534 bp, Zea Mays
aacgtgaacgaacctgcagaaggctggccacaatgagctcattcacggtggcgtagagaacagaattgggggaaatcccaaattggagagatgtgggggatgattggtggtgagggctggttcactgtgtgcacaattacttagcggagcaggctagggcaccaatttatagtgtccaagggcggtggctcccaattttggaatggcgcgctggcagccggagagaaggaaggtcactggcggctcagtcgtggcgtcctctggtgcaatggttctgaaatggcaagcctaggcgtgccatggttactactacgcagtaaagagctacggtgtggcataaatgaggtcaccgaagtaccacggcgacaccggcggtccagccacgtcgcacggctacaggcgcaagtgataagcttcaccccgcgaccaaatccactccaataccgatcttttcaccccctcggtactatcatgcccgagtcctgcacgaatcaccgcgatcagcgcaaatccttgcacggaggtcaccggcag

SEQ ID NO: 25401 - DNA, 765 bp, Zea Mays
tagcaggatgctgtagaagcatccgaaaaattagttaggtctgagaagacgactagaatgagcatgcatcatgattgtcacataattgtctcttgtgcactgacatgcttctctcacctatattccaataataagaacttgtgaataatgtgatgtactgctatggtagaaatgccttacctcgtgtcagtttggtaagtcttgttaggtcgtgctaagtgtttctcttgccttgctagctaggtggtattgtaattgttcaaccctctttgccaataaaaattgttgcctgttttgcccataaaaagagacccctctccaaccaaccttgatttagcaagtgaaacctcttaaaaaaaatcacatgcttgtgttggtgttttctagcccttgagtgttttacccttgaatttacacctgcataacttgtagacccccattgcttaaccgctggccaaaccgaaacttccttgtgcacgtggttatgtcaaaaaaaattgttgtttggtgtctagttgcgcaaaccctatcaaggccatgtttctttccatagatcctgtcccgaatcttcataacctttcttgtgctcatcctaatcgatctcatgtgactacctctcttttcacctagatctggtaaatttttttttcttgtaaatcatgttgtggctttatcatccgaatctccggatcccctattgatcctaccctattatctggatatctgctctaactcgttctcaagtatcagatgttgatataccaa

SEQ ID NO: 25402 - DNA, 735 bp, Zea Mays
gtaactcacagctctcaaactgggacaggagattgtagattttagataacaggcataacgtaatcaccaaggtatggtcgagagatggtaaaggtaaaggcaacactaaacagaagcataacaaaggatggagttgaaaacccgcaagcgacgaggaagaggatatgaccaagagaaaataggtaaaatacaactctacaattgagatggaaaagagaaggttttagaggataggtataatataagcttcagggtaagatatagatctgacaagggtaaggatgacgatagtgagaagcataaccaatgagagagttaaggcaagcatcgcgaagtggcgaagtggagaaaacaatcaagggtaagatggctgaggtttcaatagaatggttgaagtaagaattcattatcgagagaagttataaagggataacgaggtcaccaaggatgtgtaaaataaaatgattgcccatggattatcgagaaacaagggtggccaagggcatgtaaactgaaacgtcttaagcagacattggggtatgaagataagcatacatgaaaatataagggtatgcaagactccaaggatacgagcataccaagacaagggaatagaaaaaggcaaaggataacgacttaacaacggaataagaagggatttcagaagacaagaaattcatggacatataaactgaagtgtttaagtgggcagtagaaattcaggtgtaagtattt

SEQ ID NO: 25403 - DNA, 286 bp, Zea Mays
ccgaaatgttaatctgctctactttaggccctttcgtttttattaacgcacatggcaaaagaccacaagttaaaactggatgctagctgtttttcacccccaagatgaacaaagacatgatgcaggtaaactagctaaaagttgcagttatatcaggtcctgtttagcgatctatatatgttcttgcaaaagtttccgggtttaagggatcaactggctctgaaagataaaaaagttcatgtgactgaaatagcaaaagctgagagaaccaattaaggcatgatgc

SEQ ID NO: 25404 - DNA, 382 bp, Zea Mays
ctcgagaccactctcgggcgggagaggctgtcaagaatcgcccaaggccaagcccggcgggagacgcagtcacgactcgcctgaggccaccctcgagtgggagacataatcacgacttgtctgaggccaagcccgggcgggacaggcagtcacgactcatccgaggccaagcccaggcagcagacacaatcacgactcatccgagaccaagcccgggtagcagacgcagtcacgactcgcctaaggccactttggcagaactgtccgcacccggcctcctccacctcttcctgcctctcgctctaaccgcgccacgttccacatgtcgcggcctccatccacctaacgccctccaatctgcctcccgacgcaattcgcggtc

SEQ ID NO: 25405 - DNA, 305 bp, Zea Mays
ttggagcaatagatgtgcctatgcctgtcatagaattatcatggccaccatcctgttatttccaggtgcaggaaacatataaagtgcctgaagggctcttgtgatctcgtattcagttattttgcatctattcattccaggcctacaatgagttgcaaataccaaaataagcgcacttaaaaaccaaataaaacatttaacaacacttaatcaaattcaatgggatctgggagcagcaaggccaccactgcaagaaattgaacgaagtggatgaacttacaacaaaatctctactactatttacc

SEQ ID NO: 25406 - DNA, 452 bp, Zea Mays
gtacggtagtgttactgactccatcgatgagtacatcaaaataggaaacagttccttattagagtgtctcgagctattgtgtagaggtgttattgcatgttgtagggcggagtacatgcgtcatcccactgctgatgaccatatgcatcaattagctaaggggtagggaagggattttctagtactatagggagtatagcttgcatgcattagaagtggatgaactatcctattggatggagaggacaattcataagaggggacattagatctccgacaatcatgctcgagacggttgcctcacatgacttgtggatctggcatgcttttttagggtgacgacattgaatgataatgtgaatgtgctcaacctgacatgcttaaggatgaagcacaaaatgtgaacttcacggtgaatgaccatgagtacaaccaagggtactacattgtcg

SEQ ID NO: 25407 - DNA, 273 bp, Zea Mays
tggttcgtccaattctattgtagaactctcattccctccattgaacaatttgttgaagtactccttccatctgttcttgatctcttcattcttcactaatagttggtttgcttcatccttgatgcatttgacttggttgacatcccttgtattcctttcacgaatcttggccatcctatagatattcttttctccctgctttgtgtccaaccgttgataaaggtcgtcataggcttgaccccgggctctactaaccgctcgctttgcagactt

SEQ ID NO: 25408 - DNA, 452 bp, Zea Mays
ttgaaaggctgtttttggttcttcgcctggtctcaaacggatttgatgataaccagccttcaagtctagcttgctgaaccacttagcttgagtgagttcgtcgattaactgatcaaataccgggactggatattttcctttcactgtgatagcattgagataacggtagtcgacacaaaatctccatgtccgatcctttttcttcactaataaaactggggatgagaacagactatgacttttctgaattactccttggtccagcatttgtttcacctgcgtctcaatctcgtccttgagcgctggtggataacgatacggacgcacaacaaaaggattggcgcctggcaacaatggaatgacatgatcacactgtcgagtaggaggcaagccaaccgggtcatcaaaaacttctgtgaattgtgagagcactgcctgcaccctgtcgtcgg

SEQ ID NO: 25409 - DNA, 333 bp, Zea Mays
tttaatcacctctcccaatactccatcgatcaagtggatacagacttgaaaaagaagaattgcttcatgagggattaaatgacagactccagcacaaaatgactacgtgtctggaccttacatatggcagggctgtcagcacaacactgtcagttgaagccaaaaatgcgggacaaggaaagtcaaaaggatatgcgggtgaaagatcaactcagggacctaaaaagaggacaaggttggtaatccaacctttcaattcaaattgttcttctcctcgtccgcccacatatcccttcagacaacccgtgttcattcgtcccactcctgcccccg

SEQ ID NO: 25410 - DNA, 354 bp, Zea Mays
ctgaagatgtgtcttgtgcacggtaaaacatcagattactcagaggataactcagaaaagacaaccaagcaccgaaggaatagggacgctggtaacagaagagaatagacttagatagattcaatgacctgtacatggatatctctccagtcggctatataagcctacaaaggtacccctacaaaaactctctcgctcaccattagattgataggtaacttcattttccacctcttgcaaaccacctataacctgcgaacttagagaaatccaatacttagcaccacactggacgtagggtattacacattcacgtggcccaaacctgtataaacttcccgtgttccgacatgc

SEQ ID NO: 25411 - DNA, 287 bp, Zea Mays
tcagcgaaggcacacagccttaccatacaaattatagttacatacatacagcgagggcatcacacattacattggctcaaccttcgggatgatacccatctccctgtagttgaacaacattatcctcaattcatcaccctcaaaaagacttcgcaactctccctcacctacactcgccccagccggtgaggccaacaattcccgcttgccagtcccgtccacacgaagacgaccactctccacctcaccatgatgacgcctatcacttcgcgacaactcactcactc

SEQ ID NO: 25412 - DNA, 433 bp, Zea Mays
gggtgcaggacgttgtagacgtggtggccaagcgtttccagcgagatcctactgatgagtagtcggatctgtggaaagaaagcaaggattccgctgggagcggcttatcatattctggttttgtaagatacatttaagtatttcctgccatgcaacattataacttatctgtatgctactttccttttgctatgtgtgttgttgtcaacttcttccctagtgcttggcccctctgggatgtggtctcgacttgtcgaggctggatgccagtaaacttaagaaggagttggtgacctggcccccagcgggatccgtacctgcacacagtcttagctagggagtttcagtagtgcacccatcggacccattagctggtatccttcatcctttgagttacgtaacatgacctgtagggcctggactggggggccga

SEQ ID NO: 25413 - DNA, 361 bp, Zea Mays
ggaggatacggatgtccttctcttccaaccggccgacgtgcaccaccggcttcgtctatcggagctaccctgcgtgcactaaattctgtgcactgttgtttcctgcctcacagatattgcgttgcagtgtttatcatgaatagctaggacactgcttaccattacattagtgccacgcaggcaataatactacaagaagtgacgatgtacagatggttagtacgtaaagcgtcgtcgatcccaacttgtgaatccgttcaaggccaacgtgtatatattctgagtctgatacacatacaatgtgtaaggctgtacgtcttcaattcaacaggcaacgtatcttcctcatccatgctcttcc

SEQ ID NO: 25414 - DNA, 285 bp, Zea Mays
cctgtgtctggtgatcggattgagtggcgcccaatcggtcttgtactggtggtgctaacctgtcgaatacagatgtttggggtgccccccaagcggggtactgtggcactccaagtggatatggtggcatgccccacatttgatttgggacatatggtggaggtatgtatgcgtatggatatgacataggtggatatgggagtggaggtgtccatgtaggtatgttaggtcttaattggacagtatgaccttccattttttccgattggtggggtggtccaatcg

SEQ ID NO: 25415 - DNA, 301 bp, Zea Mays
ggtatttttattttttcggttgcctctgcaatgttcgtttctttggtttcaaaaggttttaccttggctggctctgaaggcccagcttcagtttcaaattgttgcttcgaagcttcagcaccaacggcttcagtagacacttcagaagtttcaacagttttctttggagttatgctcgaagatttaattgtctctaaaacatctaatacattaaccattctttttctttttggggttacggttggacctttctggccttttcctgtctcaatctttgctgaaggacttaaaacctctgatg

SEQ ID NO: 25416 - DNA, 414 bp, Zea Mays
gttaggggagactaatgggccggatcaaggttcaaggcccaactcgcccatgacagctccagaccccatcgcaaacaactaaccaaagaaattctactgtcttataggtgaatgttttccataaattccaaattcccaaagcgcatcacccgaatgaggaaaaagaacaaaaagaataacctccacttctctttgcaaactgggtatcacagacctttgcgctcggattcacgtcggtcatcgcgattcgtgcctcgggcgagtggattacgctcgacggtaaaaagatctcgtcgcggatgaacacaagacactgtagtcgctccgtctcttgcccacctgcgccggcgacgtggccgcacgaccattgccgcgactatcgccgttctcctcgggtatgccacgttgtggctc

SEQ ID NO: 25417 - DNA, 341 bp, Zea Mays
ctgaaataaagggggaaagaagtggtcgattcaggcatgaactgaagatcgagctctgaaaatatctgatcgtgataagaacaggggcactgttgatttggatgaactcagatgaatcagtggggattcaattgcatgggaataacgcgggatgtggcaccgttccacgggccgagccgtgcgtggccggagttagtcaccggcggccaccgtgactcaatgaattctcgccgcgctgtcacacatgcttcgatttccctcactgtgcatctcctctacgtggtaggcatgcgcttgccatgctatctacagccgcagatcattaaccggctcgctgtggc

SEQ ID NO: 25418 - DNA, 357 bp, Zea Mays
attttgggaagtcgactgtgttcgaagctgatatgcccatgatgacgaagctaggctacttcagagaagccgagaaggggttgattcgctttggcagggaagagactatcccgaaaccagaaaatgatgaagtagtagtttttaagagcttcttcaaagcagggttgaggtttcctctgcacaggatgattgcagatgttttggaaaattttgagatctatcttcatcaactgacccctaatgccatcgttaggctcagcgtatatatctgggctctccgaagccaaggggtggagccgctcgccgaagccttctgtcgagtacatgaacttcactatcagatgaaggctagagaag

SEQ ID NO: 25419 - DNA, 519 bp, Zea Mays
gtcggcattggtgtggcggtagaagagctcgagtgtgctcctcttataggcgcccgaggaggtgttgttctggttggctctagtgaggcaagagagggagcaggggggagaatgttggaggatgtccgacaacgtgatagtcttgcggtgggaggacagagctggtgtagtagggtgtaggagtggagaaggaggacaaggcagtgcctaacttcgatgagacgcgacggtgaggcgaggacgatggtcggtgggggaagcgacgattgttgtgttcctctgctcggcgaggatggcgatgttgaccagcagacccaagctggtagcggctctgactgagggccccatctattagcgaaagaagggaggtctggttggcctaggatgggtagtgggctgaaaaggagggactgcggggcacggcgtagcctaggccaagaggggaagggtttttctttttccctctcttttttgtttctttttttgaagaggcatatatatatatgttcttaccaattt

SEQ ID NO: 25420 - DNA, 277 bp, Zea Mays
actaggtttggttgcgtctactacataggatgacatagtccctagacactcgagctaaaggcaagctcgacccacgctacgctaggccattcagcgtgctggagcacatcggtaatgccgccttccacctgtagctaccaacaggcgctcacctccttgacgtctccgatgtcgggctcctgaagcgccataagggcgatccaccgaccgagccaccacccctgccttcggttgttagatgggcgcctccaatcggttttggacagggccttgcggg

SEQ ID NO: 25421 - DNA, 830 bp, Zea Mays
ccatcgggagtgtgcaggtcactgcggaggcggagtgcggctgcaagctgcgcgtgctgcgcacttacaacggcggcgaattcacgacatctgagtttgtgtcgtactgcgtggatgagggcgttcaacgccactacgcgccgcacagcccgcaacagaacgacgtcgtcgagcggcgcaactagacggttgtggggatggcttgggctctcctcaagcagaggggaatgccagctgtcttctagggagaggcggtggtgacaacggtctacatcctcaatcgctcgcccaccaaggcactcaacgagatgacaccatacgaggcttggcatgggtgtaagcgccgcgtctctcacctacgagtctttggctgcctcgcgttcttggccacatcagcagaagcacccatgggtgttcattggctatgcgaagggctcgaaggcctactacatccttgacctaggaacacagcgtgtgagcacggcgcgggacgtagtgttcgaggaagggcgaggatgggcattatgggacaaggcggtggatgacgacatgactccaacgtacgatgacgacaccatcgagtatgtccacttcgagggagctagggagtaggcaactcttcttctccgagcaggtccccaagtctccactgactccgtgctatgctctccagccacgacttcggctacagtgagctcttcgccaccacgtactccagcaccgacagtaaccccttcgggaatgtcctccccgacgccagctcgtgtcgagcacgacttggtggggcttgttaccccgctctcccacgaagaggagcgcatcgacgcgtg

SEQ ID NO: 25422 - DNA, 416 bp, Zea Mays
aagcgacatttcttaacgactttcagctgagtcaccaaacagacaacatgatgactacgaaggcatgtcaccatttcatcacacccactcatctcctaatcagactgaccaatttgaacgactgttcttccaattattaacatataccacttttctaggttatttgtatgataacacatcataggttaaatctacttatctcgaaagggcgctaacacagttcacacataactcaccatttaggccctactgataattcattgcgaacgtcacattaaatctacgggctaactcaattgaaacactacatatgccattcacatttttagttttatcgtataacaaagcttaatctaatacatcatgggcactaacgatgcctaccattccacgttgcgaacacaaccaactacgac

SEQ ID NO: 25423 - DNA, 429 bp, Zea Mays
tacgggccgtgggattggaggcggcagctcacgtaccgtttgaggtgttgtatggcatgcatggctacacgccgagaaaattgtatggcatgcatctctgttcgcgaatcgggcacactgatgcgtatcccagagacggctcactgctgcttgtgagacttccattatatcgcccttgagctcttgcgtagcaggcagacgcggcacattcactgctccactcagatcaggtagttgcatagttattagttactgcactgccgtcgtctacctcaggttctgcttggagcacggcagcggcacccatggcggcccgcaaggagtaagatattgggacccacaattggggcacccaactggagaccataccatctgattggttgccgtagcagcgtagtcagacttggtcgacatgagccaggataagca

SEQ ID NO: 25424 - DNA, 307 bp, Zea Mays
taattagccatacattatcgacctacgaatttaacactactaagaaaccgacgaacactaaccagcatagctcgacatcacgagtacaagcatttacttaatttgctacgacttttcattagttcttctattgatcacacaaaagcatcccacacaacacaagtttaacagaggacataggcttcaatgtctatgaaaatcctatatcacaatcaactagagaaagaaacatataaaacaggacacatatgcaatctcaagcttagccatggcaagtctacatcagttaagtgctaaccaaacattt

SEQ ID NO: 25425 - DNA, 302 bp, Zea Mays
cttcggtatatatgtaggtcggattctgagctgatggtaacctgaccttagatctatctttgataacacattggctcctctcaactgatcgaataaatcttcaattctgggcagggggtacttgttcttgatagtaacttcattcagagctcggtaatcgatgcacatcctcttcgtgccatccttcttctccacaaacagcactggagctgcccaaggcgaggtactcggtctgatgtagcctttctccgacaactcatcaatctgcttcttgagttccaccaactctggcccggacactc

SEQ ID NO: 25426 - DNA, 452 bp, Zea Mays
ggacacggtaccattctgccccacggcgcagcacgccggtgatcacttccgcctataccccgatgcgtgattctcggctttgatagatcctactcgaagcggatgaattggtgaacctgggagcgcaatccataccagatatggtggcggtagtgaagctccccacggcgacgagcggacgaggtgactgtggcggcgctatccaagcatcgacgaagaattccgagaagtccggcaaccaccccgcccaggcacaccaactattaccaccccgaggagggcataaagctcctaggtccgatttcgcccccaaacggcagcagggaaacgttccccatggcggcggatcttcctccctccaccaccgctgcccctggccctggttttctactgctgcgcgatcaagaagggagagggaaggggaggaggaagggtagggaacgacggacgca

SEQ ID NO: 25427 - DNA, 494 bp, Zea Mays
ctggatgtaggtggtctgacttgtatcgttgacatgtggcgcaggcgcggacgtagtcctggaccgtccgccgtaggtttggggagtggaagtcacgtcgtaggcggtgtagggtgcgctggacgccttcatggccatcatcatgtatggcggtgacgagctcgtggaggagtggcgatgctggtgggatgtagaggcgtccttggaacgcgacgagcccatcaaccagcgaccatgcgcccgtgcgttgtcctgctatgagttcctccttgagggtgaccagagcagggtcggtgtcgtgagcttggcgtagacgctcgacaaagttgaaggtaggacccgatatggcgaggagcaccggctcttctgtgtcgtgcttggacagagcgtcggccaccgtgttggtgctgcccgctttgtactccactgtgaagtcgaaacccaggagcttgcccacgcagtgatgctgcggaatggtggtgaggcgctggtcg

SEQ ID NO: 25428 - DNA, 473 bp, Zea Mays
cttttagaggtgatggccgagtggtaacgggccgcgtcggtgttttagaaataacgaccaagcggttactggcaacgttggcgttttagaggtaacagccgaacgattactggcgacgttggtgttttagaggtaacagccgagtgataacagaccgcgtcgaccgctttgaaagtaatggccgagtgaagttagataatgtcagcgtttttagaaacaacagctgagtcaatttgagccgcgtcggccgttttggaaataacagccgagtgatgacatggcacgccagcgttttagaaataacagctgggtgatgacatggcaggccagcgttttagaaataaccattgggtgatgactgggcactttttagaaacggcatctggcacgggaaaaccccatatgtactgcactgtcgcacgcctccacgctccgtgccctagtttttgcttttttgcatccaggctttctct

SEQ ID NO: 25429 - DNA, 482 bp, Zea Mays
cattgggtgcttgctcgagttgccccttgctctgcatgggaaaggggatatcattgtttaaccagttgggtttaagcggtcgcgtctgttgtggtggtatgaagaaagataaagccataatgacaccgcttggcatgggtgactgacgagataggcgatgtcctgttttgtgtaggcgtgcgaggctgggttgacgtgatagataacatctcacttggtgcagacattttctccgtgcgatgcaacttcccagcgctctgcctaaggcgggagccgtttgccgaaccgacaggatctccgctcagggcccgaggcggccaggagttggagctgcggatcctcccacaccatggttgtggtgggcccatctaccaggcaccgctctacctcctagtgtttgtgtatataaatagaggaagggtcccttgggtcggtaacacttaacatcttcttgcacccttgcctccatttttgccctaaag

SEQ ID NO: 25430 - DNA, 493 bp, Zea Mays
taattgtgaaatactcatactattgagggatggcgggttagttattaagttctgcgaggtttcttttgcaaataaggctcgacgaaggggtatgctttgctaggatctaagttgctggattagaaaccaagggttaggattagatcggccaaaatactgaaccggtacgccacgagatccatcagatctaaatctaatggtactaactcattacgcggtgatctaatcttggccattggctaaagatccagtggcttggattaagtgaccgaagaggtatgctccccgcctaatccccgccacacatctggcaaccgacgacagaagccctatcttccccccatcggtacccaggcacggcggaagagggtgatgtcacgacggcgctttcgtcgagataggtggcctggcggtaaggtcttcactcctacagaactatccggacccacgcgaagaggagagcaaggcgaatcgatctaagggtaactcaccg

SEQ ID NO: 25431 - DNA, 329 bp, Zea Mays
tattgacttgttattagaacgttcccgttgacttcccgtctcccgcttgttctgcctaaccctaggcttattaaatccccttgtctgtagctgggcaaacgttgtctttttgttcatctcctgttttctatccgtatgcttcggtgcgtgcatggagggcttgcctggtgggttggtgggaaattacccactgtttgttcaggaggagaattcctgagaagtcgatttattgccattaatctctacctggcatggagtttagactttggatggtctagcatttgtacagatgatgtagagttgtagttgaacagcatcatagtcggtta

SEQ ID NO: 25432 - DNA, 430 bp, Zea Mays
ccaaaatagtcatcgcttcctctatgtttataaggcgagttaatgcacgttacacgtttgttacattacgcttcgcataaaatgtatggtcgtgctcacgattttgagtagacacatcgagtggtcaagtaggctcgtaatacaagttgtgtaatggagtttgttcattttagaatgagtgttgaaatgctccattcatgtgatgaacatgtatggttattttgaatcaagtcgatgcagtgtaatgatgatattcgtgattaaattggaagtcatgtgtttgaatagtgaagcttaattttaagttacaagcgatgcaggaaatgttgtagttaagatatatgtgaaatgtgaatgagtcattttatgtatgcggtatgtggtgtagtggtggtatgaaaaataggttagcacgcaatcggctagttgg

SEQ ID NO: 25433 - DNA, 498 bp, Zea Mays
cagcatcaggagggacatgggcaaaatctgaggggtcaaaaaggttggaccttaagctagagaggtcgactataatgcttgatgatggtcatcctcggtgatcctaggtgtaagcgactagttagttgtttgttcagggggtgtgcttccgcttgactaaattgcctttgggattgaagaatatgctttgaacctagagtaggtacgagggcaaatcagtcttatgtaatatctatggtgtttataattttcctctaaggatcattgttagtatgatgaatgataatcctagtgttggacattgtgatgatgaagaatgatatcctattgttgtcattatccaccttcgtttttattatttcatcatccaattgtctctccttcatagtttctaacgttttgacaacccatagtgttcaaggactaaggttgagtcaggtcaaggacgcttattcctttccctaatggggcttttattcacgaaagggttcttagaaa

SEQ ID NO: 25434 - DNA, 318 bp, Zea Mays
cttttattcaaatttccctcttgtagatcaatgtcatgaccacacgatggggttctcataaaatctctgctgtcatcaagatctccgccactgcgatccaactggatttcttcactatcacctcctccagattggtcttccggtgcatttgaagtagttcctgatcctgcatacaaatttaaaaaagtgattgaaagcacagagtgatgtgtatgggcaaaattgcaacttgtatggtggatggttgcaacaataatattatgttgtatgcaacaaaaaatacctgctcctgctctagtgtcaattgcaacggggctc

SEQ ID NO: 25435 - DNA, 331 bp, Zea Mays
agaaaattaagattagttagagattccgagggagaggatgcctcggcaaaaggaaatgaggtttcatcaaacacgacatgacgagaaatgatgacacgattagaggaaagctcgaggcatcgataacccttatggtcgtgtgagtaaccaaggaagacacataaggtggaacatggggcgagcttgtgtggcatggtggcagatgtgtttggataacaacaaccgaacacacgaagatgggtgtaggagggagggcgatcgtatagggcttggtgtggagaaatcgagggttttggtggggtggcaattgaggaggtgggtagaagtatga

SEQ ID NO: 25436 - DNA, 498 bp, Zea Mays
agtttgggaagacccctgagggggagctcgggcgaggcggagtttgggaagacccctgagggggagctcgggcgaggcgtggctcttgaccctttgacctcagggaacgtactttgatggtgttgcactgttggaggaggaggtgcacctgctgagggaaagccttctcggggcgaccatcgagtgagatgagtctaagtgccaagccacggaggcctcctcccgtgccgactccctcacgaacaatctcgagactgagcggtctgaggcccatggcctgaggacccaaatgggaggtatgcatcgttacctctactttatccatttggttttctccatcctggctcattgtcttgattatcttccaaagctccagcgggattcagacatttccatcgagacccccggacactctcccactctgcggaccaaaagatcgccgagctcaaggatctatccgatgtggtgatgaacttcagccgaggcctcggagttgag

SEQ ID NO: 25437 - DNA, 318 bp, Zea Mays
ggccttaatatgaagctccaacgcttgatggcacccaatgtggctgaaagttataatgatgtagtcagtcaggccattctaggtgatgataagattcgccttcatcaggagtctaagagaaagaaatttgccgaagaatcctcaagtagcagtagccgacgtcggaggattgtttatcaacctatcatttgttctcttgatcctccatcccggttacctagtccacagtcatgtgtccgacaggttgttgttccttttgtcccacatcaaccggataccctaggcattcatcccgagaacactcctttcaacacgagc

SEQ ID NO: 25438 - DNA, 405 bp, Zea Mays
gtcatacacatagatgttccaccagtgccccgttacatctggtcgaggagatgtgggaactgacaatcgaaggcgaggaagtggtggaagaaactgaaggtaacacagaaggaccagcacatgaaaatgttttggccatatctttggatgcagtaagtggtggtgaaggtaacaaaacaattcgtttatgggcatcgatccactgccagcaagtgcttgtgcttgttgattcgggcagttctgcgagtttccttggaagtcacctgctaggagttatgccaggaatccaacttttgacaacaccattacaagtgaaagtagcggatggaaggacactatggagtcgatatgaggtcccagattgtaaccggttatgtgaaggcttgactttttctagcaatttta

SEQ ID NO: 25439 - DNA, 482 bp, Zea Mays
cttcgtcataacaacataggaagatgatgcaaggagaaggtgctatccaagttgctgaaggcaaaagacaatattgtccctgtgctatttgtaaaccccatgtgtaatctctaaggtgtaatatcgtacgattgcggtatcggtaagggacaacgagaacaaacgaacacggtaggcttccctatcaaccaattctcccaagtgtgctaagaattggcctatatgttcgtgcgtgcttttcttgccttcaccggaaaaaatagagaagtctggtatcctagtccctttggatatggcatggcgttgaattggtggctataaggcttctggtacgattgccctgtgcctgacacactaacaccaagtttgtctttgaacatcccggccaccccatctctgatcttttccgccatgtttagtgaacatccattaagcttcgggtgacaatctcaggttgcctgacattattttgtcagctttcc

SEQ ID NO: 25440 - DNA, 344 bp, Zea Mays
ggcaggtcgtcgacggcggttgtgtcctggcggtggcgattagggttggagaaaattgtgggggagaaagaagaggagtgggggagaaagaggatgagtggaattgtgtcccagcggcgtttgttttagtgatgacgacgaaaaatgttttttggcacccaatttgtttggcaatgcggaggctaatgcatttaaatatattagcgctgggtacatattgaaaacatttgaatagcccaatggtttgacctgctaactatgagactgagatcctagattcaagcgctcacaaggagacattttttgtgtttagcctaccattttatatttattcttagtttttt

SEQ ID NO: 25441 - DNA, 430 bp, Zea Mays
gtggaattaggaggtgagattggggctacacggccgtaaggaactatagtttcaccgtgcacactcaattcaggaagaggtggcagaagcagtgcgaattttgggctttgattaaactcacaggtggagatgtgaataccccgccgtggatcatggtgctatttatagccacggcggtccggctagctatccacggccacggataactttgttagcgcatgcttaccacgtagggaagagacacaatgagggaggagcaaggcatgggtgataccgcggtggatttgactgagtcacggcggccgccggtgaataactccggccatgcccggctcagcttgcgagatggtgccacgttcgacgctatccttcccgcgatcgattcccaccactggatcacgcgagcacatcctgttcaacagtgcccctg

SEQ ID NO: 25442 - DNA, 331 bp, Zea Mays
tgcaaaacgaataagcttcttctcagcttctccgaagtagcctagtttcatcatcatgggcacatcggcttcagacacagtagatttctcaaaattcaggtggctgggttttgatgggatcaaaatgctataatcttcttcttcttcatcagcattttcttcttcctcaatatcagcctgcttagcttcggcaccagaagtaccttcgtcaacgggttccctctgtcacaactaagcccgattgtctcatgacttcggaaatcagagctgtctcagtggcctcagtctcctctccttcacgagtcaccctcgcagtcgagcgtactctggc

SEQ ID NO: 25443 - DNA, 361 bp, Zea Mays
ttacgcccatcatcacgatgtctgtaaatcgggtatgagtccttcccttgcaaggttgtgtcactgaaaggccgggggtaatgattcttgcacgatgcatggcccttagtgcatgggcagttagggtttaacgacccacacgggccatgcatcatatgcttgataaccatctttcgtagttcagggtacttgttgtgtgggatctcggctgagatcaaaaggtcatactgctcagggcacgttagcttgtacttcctctgcatgatgagtagaaaatgggcatgtggcaaaccccgcttttgaaactccacgacgtagacgtaggcccagaccttaccgagaatatcctgtttagtcagcc

SEQ ID NO: 25444 - DNA, 398 bp, Zea Mays
aacacacatttaattgcttcatagcaaaaaattgcaaccagataaattattaaatatactatttaatcaatttaatcaagaatatgtagtcttatgattcagggtaagggaacaatccttgatctatttgatcacatattatttattagtttatagaaccaatattggttctcaaattcaagaccatgcatcaaactcatacaatttcactttgtaaaatgttggaaccaccatcatattgaatgattggactagacacttctatgagttctaggattatagcttcaagtcaagatcaagttcttgtgggtcataattgaagttcttgctggtggactcctccaataggttcccatcgtccttccttttcatgtcaatatgatcatattcctataaat

SEQ ID NO: 25445 - DNA, 517 bp, Zea Mays
cttaacttagggtgaccactataccctactaacggagcaatcgacttaagtcagcaatgacttaaggcggtgtgacatgctcatgcttacttaactcggggtgaccactataccctactaacggagcaatcgtcttaagtcggcaatgacttaaggcggtgcgacatgctcacgcttactaaactcggggtgaccactataccctactaacggagcaatcggcttaagtcggcaatgacttaaggcggtgtgacatgcccacgcttacttaactcggggtgaccactataccctactaatggagcaatcggcttaagtcggcaatgacttaaggcggtgcgacatgcttacgcttacttaactcggggtgaccactatgccctactaacagagcaatcggcttaagtcggcaatgacttaaggcggtgcgatatgctcacgcttacttaactcggggtggccactatgccctactaacggagcggtcggtttaagttggcactgacttaaattggca

SEQ ID NO: 25446 - DNA, 363 bp, Zea Mays
aaagtgtccccaaattccttgagaaggtcatcaaggctggccagggacatctcctcggtgtcggacaggttccttggagggttttcttccttctgctcagtctgacatccttggcttttggtcttcttgcgggggcgagcttcttcagtttcttgtcatagtccatttttagggtgcggtaagcttcacgggtattggtctcttcgccctcagctattgagaggctctcttgaagggacgccttttcttctgaaagttccctgactttctgctccaggctttccacccgggaggttagggaggtgcagtggagggcgaggtcatcatattggttatcaagggtgtgaaggtatccggccatgt

SEQ ID NO: 25447 - DNA, 286 bp, Zea Mays
gctgagcggggcacggcggcgcgccatagatgaagcactgcaaggcgtgcccgagcgccaaaccaaaaaccaccctgtgcaacgaacactgggaacacgtgtgactatatggagagcatcttaccgtcatcgaattggtgaagcatcccagccacgacacgaggcagtcgacggcgaagggtttgctccgttgaggaattccggggtcattagccattcatccaccctgtcacggccacgagcaccaccccagagattccaagtcgcccccaagccagaccacgcg

SEQ ID NO: 25448 - DNA, 733 bp, Zea Mays
actgtgaacttgtaaacttgtctgaaacacaccatttaaccatcaagtattaagggataatttagttgaatgccaccctcaagtttgttattcagaaaaataccagttgttgcgacatggctggtaggtcctgagctcgctggtcaatgacacattgaggccccatgtcggtatttggtaccggcagtgcaccacaggatgtatcacaaggtgttttttgtggttgacgaaattgactgtagcttgatggttcgcgtggaaggtgacgtgacacgagaattatacaggttcaggccgccgaaagacgtaatacccatcgccctgtgtgttgtggtgattgtattgcttgagctcgagattgcattggtgtgcagacgattcaaggttctggtatgagatagctatgagatgggatctaccgatgaatcatgggggtccccaacctgccttatataggctgacggatttagggttacaagttagtttctttcctcatcacaagtgtgataagtcccgcgatctcggggatttgttcttgagtcgcccgtgagtcctcgcaccctccttaatggaaaaatccgtcgctctgccttgatctccaagccttcatgtcgtctttgggtttgagttggtcgatcggtccatgaaatcatctgtccgacctacttagacccttcaacagcccatgtacagaacccacgccatgaggacctaggggatatctatcccccac

SEQ ID NO: 25449 - DNA, 484 bp, Zea Mays
tttacatccattaggtgcaccgtggagctttgagttgatttgatcatcaatcaactcaaatgtcttcatggtcttgcttttgaagggttatgatttgccgtcttgaacgtgatttgcttgacacattggggtgtagccccccgagctgacgaagcggcgagtcggcaagacagacaacagtccagccccgaggtgacgaagtggtgaatcggcaaggcgaacaatagtacagctgacgaagggacgagtcagcaaggcggacaacaacctagttcctgagctgacgaagtgatgagtcgacaaggcggacaacagcccaaccccccgagctgacgacggcaagacgagcggtagtctagcccctcagcggacgaagggacgagtcggcaaggcggacaacaacccagcgatgacgaagcgacgagtcggtaaggcggacaacagcctagcccccgagctggcgaagcagtgagtcggtgaggcg

SEQ ID NO: 25450 - DNA, 380 bp, Zea Mays
atggaaagaacacccttttttggaccaataactggctgcatggtcagtgtgtatcatctcttgaccctcattggctgcatggtcaatgtgtatcttctcagaaagcaaaaaacagtttgggatgctttggcagaaattggttggatttcggatccaaggtgtagttactgttacagtcattgctgaatttcttgatttattggaccttctctcaaaggtggagctgcagctcgatgttgaagacgctcacttttggtatttttgtacgaaagaaaagtactcaacaaaatcaacatttgtttgttggggctgttcattttaaaccatgggagagaatttggaaaagttgggcgactgccaaatgcatattctttatgtgg

SEQ ID NO: 25451 - DNA, 408 bp, Zea Mays
attccctccaaaaggagaaagaatgaaaagaaggcaagaagttgaaagctagttgcagtttgtgtacagatacagatagactggtgatactcgacaggaacataaacagaagcaaacacgccattacaccatcaaaggcaactttgactagcgagtcacatacagttgcaattagagtggtagactagattgttcgaaacccgaaaccaaacacactgagtggactaaggctatctccagcagctctcatatctcattccctatcacaactcatatttcaaactacaccctgcaaacagtgttatctattatgcaaatcagtgttttccaggaccatatgcacgatcttctcaacacatccgagccacttgcagcggcaagcggcgcgtccttgattccacaaatctg

SEQ ID NO: 25452 - DNA, 409 bp, Zea Mays
gcgccaaataccagagagaacaggggtctcggtgcaataaatcccaagacttagaataatccctgctgtggactgcgggttattacccctaaaacccaaggtctctttagtaaaaggggcacggcgatgggtataagcagcccctggctgttggatcgcaagcctagcgcctagattagatttattacccagcgaaccggtacgcgattccgaccctaagatccaacatcaacagtgcagatcatatttgccccgaaatcaccctgatccgcacgatctgacctgaacggtcctgattcccttgcctccaatcgttacgccaggatccaattacagccgtcgatgaacaatcctatggtacccacgacttcttccctcccccgcgctacggacagaggcgccatgcccg

SEQ ID NO: 25453 - DNA, 298 bp, Zea Mays
gcggggtcccgctgggaagcggctttgtaatattttttggtctttgtacgatacttttgagcactatttatcgagcagtattagcacttatctgtatgctatttgtccttgttgtgtgtggcgttaccaactcctccctggtacttggccccctgggatgtaggctcgacgtgtcgaggctggataccagcatacctaagaaagagttggcaacgacccataggaggtagcctcgactgggacctggacctgtacacagctttggctaggaagtgttagtagcacacccataggaccc

SEQ ID NO: 25454 - DNA, 292 bp, Zea Mays
caaaactagatttatggtctgggttccaccagatcatgcttcaactgggggaagaacacaagacagcattctctactcacgagggccatttcgaattcagagtgcttgcctttggactcacgggtgccccagcgacattccaaggcgctatgaacgccacactcaagccccttcttcgtcggtgcgttctcgtcttcttcgacgatatcctagtctacagcacggattaccaatcacatctgctcaacttgcatcaagtcctgtccttgctagcagctgaacactggaaaat

SEQ ID NO: 25455 - DNA, 360 bp, Zea Mays
catcggatgattgagaaagtcgctgacgagggactgcttggacaagttctgcttagaggggctaagcttcggtgctccctctacgcggatgatgcggacgtgttcgttagagctaacaaatcagacttggaggtactgaaagggattctcaacgcgttcgacgggtgttcagggctaaagatcaactatgacaaaacagaaattttcccaattcgatacccgacttcattatggcctgcgctaatggaggtgtttccgggcaaatactctagcctacccgggaagtaccttgggttgcccctacattacaggagagtaaaaaggattgatcttcaacctctaatcgaaaaaattaataat

SEQ ID NO: 25456 - DNA, 597 bp, Zea Mays
gtgggactgtggcatgtttatgcttaaatacattgatttccatagcagaggtatcaaaccatctttcagtcaggtataagttgacatgtgaaaaacatacatacatatctgtaatttcagttgactagaaatacttagattgaggggcttgagttttgccatacttaaaaaaaaagaactttaacttgctgctatgaagcttaacctctgatgtaggagtacaatcatacactggtgtgcaacgtattaagaagtttctgtttagcatgatgtttgtcttaatgttgttcgcaggaacacatgatgtattttaggaaacgaatagcaaaagagatcatggcattaagagccgactgaagaacaccattctgacattgtctcaagtcaggtatttgctttcaaatagcagagatgtgattcttctaaggctgttggtgtgaattcaagtccatgtcgccacaccttttgtaggcttgtatttttttaggacctgattttggtagggaaaagaggggtaaggtaaaacaatgaaaaacgtaggagttcggaaatagttcggcaaaatggccacacctatgtaattgcattgaaactgac

SEQ ID NO: 25457 - DNA, 311 bp, Zea Mays
ataggtgaagcagggcagaacaagaagaggcaggtttcaatctcgaagtgggtagctcttcgctgtgtcactttttgattcgtgatggtctcggatgaaaatctcgggctgagaaaaatgaacgatatatgcaaaagctcacaaggagcaggctgagagatatgtaagtacatatgcttttcatatccatatcaacttgattatgcttgctttagtccatgtcaacactcaaaacagtctacactctggtgttcatttcagagatgaaatagaccaagtaacagctcacctttgattatagcatatctcac

SEQ ID NO: 25458 - DNA, 287 bp, Zea Mays
gccgctggctccaaccaaaatggttttgtgtatctgaagtatacctttcaatacaggagccagtttgatgaaccaaatgatgactggctagatgccatagaggcgactagtggcaagctggttggggcatattcaaaggccaaagatgaagccatgacaattgccttaggagctcagggcaaaaagagattaaatagggtgtttgatgttatcgggtttgtgtacccggactactgttatccttcacgaaagcaagggaagaagaggaaagctgctacctcggcgac

SEQ ID NO: 25459 - DNA, 803 bp, Zea Mays
cacgtattcactgcgtcagtgttcttctccacctccgaccgccgcgcgtcttgctcgaaattcacggccaccgcccatcctccctataaattaagcccgtgtccagctccgtgaggtagtcagctagctaaccaccgctaatcggccacaatcatccactcatctgctcgaattcggagttttccccaattcaagcttccgccaccgtgaaaccaagctcaccgtcgccagcccaactccggtcagctcccgtcccctgcttcctcgtttaagctttctcacatgccttcgatgctcgctgaaccaccaatttgaactgcgagctcaccaatcaccgggaacacgatcaactgtccgccacccattcggttcacgcggacagagctttatagctcactatttgtgcaattaggttggggaaaatggtcggggtagtgttaattccgtgtccgctgctcgaagaaccctgccgttgccctaatcggccggcgtagatgctcgcctgagcacggccgcgcttgaacggcgtcgtggacttcaaatcgtgaatagatagaaaccggagggtcttttgtgaagtgtcagtgactcctcaaaatagtgaaagggctcgttcgctgttagacaaagacgtgagggtctctgcgcaaaaccgccagggcgcgcgggcgcgcgggcgccttccctccctggaactgggccgctgggctgaatccggctcatcactgttggaaccttttcctttttcttttacagcagagctttagaaatatgtagaaaaatgtagaaaaatgctaaaattg

SEQ ID NO: 25460 - DNA, 576 bp, Zea Mays
cagtgcccgaatcaccgcaatctctatacaagatttgtagagtatatatcaaggaacatatcttctgcagtgatcctagtccgattccaaaaagaaaaagacaagaacgaccgcccaatgttggcactgtcacacctgccactgctcactactgtttgacatgtctagagcttccagtctataaatagcggcccacccctctcccttctcccacacacctctccctccctgctccatcatctgtacttgtccatcacgcccccaagttccatggccatcgtaccggttgtcccctgtcccctccgttcagccttcaaccggtgagccccttctccattcgtagtgcacccagctcttccgatttgccagcagcgatgtcatgcttgccgtcaggtcggggcatggccctgcaggtcccaaccaactaccttgccttcggctcaaaccctaggcgtagtatttccctaaccatcctcaactccttattttcccctccctttccattcctcgctgcacggtgctctctctgttcctcactccgtgaaaccaaggaagaagaagccatcttgggtctat

SEQ ID NO: 25461 - DNA, 314 bp, Zea Mays
aaaaaaagaggaaaattgttacttcggccaccccaaatgagcatgtgctgaagggaaaaaagttgaaggttctgactcaccggccgcgttacattgaaccgtccgcgatacctgaatttaacgaaggggcctcttcagctgccaaaacaaaagagaccgctccttatgcgcagaggacggaagagccggctataatgccgaagttaccttcagttaaactagttgagacgacggtggctgataaaatagaagaaataccaaaaatgccagaggttttgagcccttcaacagaggcaacagtgccgaagatgcaa

SEQ ID NO: 25462 - DNA, 307 bp, Zea Mays
gctagatgcacttacaaggtgttattccagaaaaccatgactaactagaccgtgccaagtgttggttctacgtccacggggtagtatatgtgatgatgacaccttagtgtagacatcgtcaaagaagttacagaaaagctaaaatttgtccctgacagagagagaacgacgagcttattgtagcactaaacgtagcagagcattctaaccataaaagaggatatgggagtacgccatggaagtttagatttgtggatagcattcatacctacacaagtcatcaaagaggaaaagacaaggaggtggt

SEQ ID NO: 25463 - DNA, 412 bp, Zea Mays
gaatgtaaaaagtgtcagatataacataaatgttcttacaatagtcactaggttgtcacgtacgacccctctgtaacagacatgtgtgaatctaggtggttaccgtaaatactgagccaacgtgagagatgtggatatcactgggacatggtattcatggttgtaaaattctcatgttttagcataaatagtgttagatatagcataaacgtggtcacaatggtcatcacgatgtcacataggacccccacgcaacaaacatgaacaaatcttggtggttactataaataacgagtcaacgtgaggcatatggatttctttagagcgtggtattcatgatcataaagtcttcaagtttgagtgtaaataatgttagttgtagcataaatgttattacaatggtcagcgcgat

SEQ ID NO: 25464 - DNA, 389 bp, Zea Mays
taagtaatgagcaaacaacggggattccaaacttcagatctggtcataataatttcataaacgaacttaatctcatttgttcccccatcctccaaaataaagttttccattgttacaattgacaatacaagactcaactcctagcttagtataccatgaaaccaaaagctaagctatcttgaggagcgctacttcctatcacatctactcctagtatggcacctagtgggcatatgaggcaacgctagactctagagaaggtggcccccggagcgagctatgctagttgtgtctaagctagaagccggctcgggatcctctccctcaatatccacatcctcatctacttccatgtcttgatgcatctcctggtgatgcatgtccaggtg

SEQ ID NO: 25465 - DNA, 381 bp, Zea Mays
gggctgaggccctcaccactgccacctacctcttcaatcgtctgcccaccaagccggttgctcacccccactccttacttcgctctcttcggcacccacccctcctacgatcatctccatgtcttcgggtgtgcttgctatcctaatctttcctccaccactcctcataagttagcgcctcgttccactcattgtgtcttcctcgggtactcctccgaccataaggggtaccggtgcctcgacctcacctcacatagagtcctcatctctcgtcatgtcgtcttcgacaagctgaatttcccctttcctcttcctcttccactgcctctctcaccgagctcggcgtgttcctcgatcctgcccctgtgtcccccactgtcg

SEQ ID NO: 25466 - DNA, 400 bp, Zea Mays
gttggcaagcaccttggtgactaatttggcaaaactatgtaccaaactaatgggtctgaaatccttgacctgatcagccccctccactttagggatcatagtaatatatgctgaattgagtctgctcatatttgtgaaatttctgtgccaaacagctcccactgcctttagcacatcttttttgataatattccagcatactttatagaaccttccagtgaaaccatcaggcccaggggccttgttagaaggcaaatttctaatagtgtcccaagtttcctgttctgaaaatgggagatccaattcagagagattatgcacaggtaacccaagagcctcaaggtttatagttctttccctccctgcagccagccctataaggttgtatagaagtgatcta

SEQ ID NO: 25467 - DNA, 792 bp, Zea Mays
gtccttcttaggttatcacccactaaaggagttgttcggttcggtgtctccggaaagcttagaccgagatatattggaccgttcactatcttggctcgggtgggcagcttggcttatcgcttgcaattgccggattccatggcaggggtacacccagtttttcatgtctctatgctgaggaagttcttgcgggatccggaccatcatattgagatggaaccaattgcagtgtagcaggatctgaccttggagtgtcgtccggtgcgtatcttggtgtcctcggagcgtgttttgaggaagagatcaattaagtatgtcaaggtcttatggactaaccagtctgagcgcgaggctacgtgggaacttgaggagctgatgcggcagaaatatccggaacttttttgttgtgggtaagtgttgttgattcattaattttttcccttttgtcattccgatagaagcgtcagaattcgaggttgaattctttttaagggaggtagagtgtgatacccggtttgcaaagaggagaagtggaggttattctttttgttctttttcctcattcgagtgatgcgctttgggaatttggaatttgtggaaaatattcacctgtaagacagtagaatttctttggttagttgtttgcgacggggtcgggagctgtcacatgggcgagttgggccttgaaccttgatccggcccattagtctcccctaaccctagccgcccccctttccccttgggatttttgcagccgcccccttcccctccccttcctcttggacgtcaccc

SEQ ID NO: 25468 - DNA, 362 bp, Zea Mays
tccatccatcaatgtaacactcttgtgtttcttcttggggctgggcatccttgtgatgtttcctttttggattacctggcaactcatcgtctgatagtgcatctgctattagttgttcttggggagaccattgactttttatgcccgaaaacaaaattcggttcttctgttttgtagtttcacttccgtttgtactgatctggcgacaaggaattccatagtactcgcaacaacaacatgttccaaggtcacttgtctgatggtttggttgtgcatcattttgggtcttgattgtctgttcatcagctgttttatttagagtgttgttttgacttgccaacacactgtattctttgcactta

SEQ ID NO: 25469 - DNA, 316 bp, Zea Mays
gtggagcattgcgagtggtggcgattggcaattgaagacgcatcgctgctgggatttgtttctttcggcattatactaaggttcaagcttagtaagaacttacccgtgtgatgccgtcggaatctcgaccccttcttcctcggaggcatcttgatgtggtgacaaacaagctcaggtgatatcttgccacgccaccggtcggaggaggttgcgtggaagttgaggatgtggcgtagtttccgtgggaggaagactagagaggaaaggaaggtgggcgttgattgcggggaagctgggccactacttttttatttcg

SEQ ID NO: 25470 - DNA, 434 bp, Zea Mays
tgctacctaaaatcagacaaaattgatgtacaacctgatcaactaatactacgaaaatgtgaatcttacaacaaacattacaacaaacaatttaatagctaagattgtctccaaccatgctacctaaaatcagagatgcattcagcaatctgcgttacgccagagcacaaggtcgcatacgtatttatgatgttctccaacggcagacgcaaatgacaataggaaagactgctgctacaatggtcccctctcgacagttggtttgccagagtttgagtcgtgggtggagaggactcggttttaggtgtcgaggggttgagtgtcgtagatgcgtatttagtttgcatagtccgttggaagcatttcctaagcgctacaatgctacaagaccaagcaatttatgtatgtgtattgtattggctactcggttggag

SEQ ID NO: 25471 - DNA, 895 bp, Zea Mays
atataaacatgaattggaaattacaaaataatatgaaatgtatttatcaaggagaatataaaatcatatataaatggacgtctggtctcgtgcctaaacaacaattaatgggccatcccgccaggccaaggcgcaagagcaccggccaaccacacgtccgcacaggtgtcactgtgccaaactggtgacctcaaccgggtacccgaccgttcggtacccgtatctgacccgaggtttgcgggtagttaccaggtaacagtgactctgtatcctacccatatccggttatacattatcctcccaacaacaaaaatattcgtatatgtatccaaaaaattgggttattttactacccgtatctggtactcggcccgagtacctgtcccgttttaacccctaatcccaagtgtcttatgcgtggagtgaccaaaggactacgaatctggtgctctcgacctagctaagccttcgtcgtggcagcgtgctccttagctttggcctctgtagtcttccatgcgctctggtgtggtcctccgtccatctacgcgtgttgtgtgttggtcgcgtatcgtcccccgtgctcgaccaaccctcccccttttataggccaagatgggggatgaagtcgagtgttatggatggttggggacactacagtacccgcggtgctacaataccgccggtactattttgtgctgcagtaccccgtgctacagtaccagcgggttttgctcatgggttagtgctgcaatcaaggggagggacaagggggtggtggctgcgttgtcaccggcggaggcaaggaggttgtgcacggtgcagggcatcatggttgatctagagagataacttgcggctagggttaggaggtgctggggaggctggccgtagggca

SEQ ID NO: 25472 - DNA, 591 bp, Zea Mays
ctctattgatggaagtacgactcgcagcgattgacgaagacgagcgggtcggacttgccgtcgaagcgagggaagtccatcttctggaaacacggtgaccgatcggtgtggtgttgccagtcgataccgccgcccggcacctgggcgcccgaggacgacgtcttgtccttcttcatcgtgtcgatgtcggtttgaagggtattgatcttgctagtgagaccctcgatcaatttggcaaggtcggtgatcgtgggttcggtcatgacgctgggctggggtgtggcagaggtgggagatgacagtgggttggcggtgttgatggctgctgggtggttggttgcggcggaagtagcggatgaactggaagagtcagatcgacgtgaccgtgataccaggttgttaagggccttagagtctagggaagggggccctcggctacgtaggtcgtaccctcggtccgtcttctccggtgaggttttacccctcttccgaaggcttgagagtggtagggatgcaggatgagataattgtgttattgcttatttctcacaagagccggctacaaggctttatagcctgagttgcaacaga

SEQ ID NO: 25473 - DNA, 362 bp, Zea Mays
ttttaaatatactgagattgcgctcgagccactggattcttgatcaacgaccacggaagcgccacgccacaaccgtcccgagcccttggattcgatctcaacggcccacgtgcatcttccccaaacacagggcacggccgcgcaggagacccctctcatggcgacgccatggccgcaatttcttgttcaccaagcccaagccccattctttaattcaacagacccattatgcggaggagacgatggagaataaggaggtcgtgatctcactggtattcgacacatggagtttcctggccacgacgtgaggcggcccgcggcggaagaattccccgttgagcaattcctgcgactccgacgac

SEQ ID NO: 25474 - DNA, 556 bp, Zea Mays
tctcgagtgcacgccacaacatggttgtatgcgagacaaggtaatataaggtgtgctcgacacgaatgttcggtcgatataagtaggaattgttttggcttaaatagagaggtggtgacatgctgaagtagtcatcgcttcctctatgtttatgagtcgagtcaaaatgtggggtactagtggtacgctaggcaggcggtgtccaaataaattaaccggttgatgtggtagttgccgtgcgtgatttattgttagtgagtagtgggattacgagttatgtgaggattatgttagaaactagtatgcggcgtgtaactgtgttcgtgtggtgaataataggtcggtaggtattgttggtgtcagtagcaaatgtagtcttatggagttttacgccatgtgtaaacgtctccatgatagacccccaaaaatgtgatatttaagtgacttgtgtgttgtccagtttaagttgagaaaaggttaagaaacattaattaacttgctcccacccatgttttgagttgcaatgtctaaatggttcgctaagtcttctactgtg

SEQ ID NO: 25475 - DNA, 274 bp, Zea Mays
tgtggatcgttggatggcgatccattggccaggattcgataccggttcacgtactgcgtcgatctaacttaagccctagatttcggatcggacgactgagaataattgataccccttcggccaccactttgcaaatgagcccctgtattactattgaatcaaccctcagtcctggaagaagcattttgagtcttggggaaacttgcgctgaagcccctgtccttctcggaaatcttacgcgcagtacagagaacatataaatttgataaatagt

SEQ ID NO: 25476 - DNA, 272 bp, Zea Mays
actgctgagtgggaaatgtcgaagactgttgatgctgatattaatataggaaaaagcagtctggtgcgtctgaagtatacgtatcgattcaggaatcaatttggtgagccagacgatgattggctcgatgccattgaggcaacaagtgatgaatttctagggagctacacgaaggctgaggatgaggctatgtatactgccttcggtgctcgagggaaacgaaggttgaacagggtctttgatgctattggatttgtttatcctgattaccg

SEQ ID NO: 25477 - DNA, 549 bp, Zea Mays
gggaggttgccacggcggtggacacgaattcaccgcacccgcgttcttccttatctccggccgcccacattgtccgctcaaattaagcgccaccgcccctaggatctataaattgaccccgcagagagcttcacaacatcatcacccacccagccaccacatattgctagcaattgttcgcccgagctcgtgaattttgaattcgccccaaatcaattctctgccacccgaaacccaacctcaccacggccagccttattccggtcagttcatctccttctctccctcgtttaagctttcccttaagtctatgatgcttgccgacccacataatcgagctaggagccctttggtcactgggaacacgtaccaattgtcctcatcgtccgcggttcacgtggacagagcttgatagcttaccaattgtgaaattgatttaggggaatcgttcggggagggttcaatccggtgtatgtcgctcgagagcaccggtcgtagcgtaaatccgccagtacaatctcaccggagttcgttccccgcgctgccgcc

SEQ ID NO: 25478 - DNA, 376 bp, Zea Mays
tgaagtttagatttaactttctatattaaaattcattttctaatttgttttattattctagctattccatttggacttcggacaatattttgaactcttctggggtgctctacgcaaaattccagggccatactataatgttactacacctgtattggatggcgggttggttttacaaaagccgaggggctcaaacgcaaaatggttatggcgaaggggtactgatcagttctagccgttgaatcttacatgaagggccatgattagatcggggaaggttattatgaatcgatatgcgttcactgccctaggatcaaagatcgatagcccgaaatcgtccacgctacagatccagcaagggcactctgatcgatga

SEQ ID NO: 25479 - DNA, 1329 bp, Zea Mays
gtgagattcttatacaatttgtatagaaacaatcatggcggtgttcttggagatgacatgtgagtattcaaaattgcagatgatcattttctttaaggagattgatgatcctcattccattcttgaaataaccttgaatatcaatcaagagtctatttttgataaatacttactcaatcatattaaatgttggtggggatccatattattttagcaaagcaactactttctcaatgtagtttgttgttgctggtgcataatactaagtaagctcggcttattaaaggttagcatatgcagatatatacactgttgatatagtgacaatcaactcattcctacacgtagaagttaccatgctctttgaatcttattgcatttcctgttcactttttaaaaatgatttctcttgtgatttaggggtttggggaagaccattcaaactattgcttttttgtcttctgttattggaaaaggcaatggccatgggcaatcaacaaacaaaggaaagatgactggtcctgtactcatcctctgccctacttcggtgatccggaactgggaaaatgaattttccgagtgggcagaattctctgttgctgtctatcatggtccaaatcgtgatttagttcttggaaaaattgaaaatcaaggactggaggtactcattaccagttttgacactttcagaattcatgataaggttttatgtggtatctcgtgggaacttgtggttgttgatgaggcacatcgtctcaagaatgaaaagtccaagttatatacagcatgcttggggataacaactcaaaagcggtttggtctcacggggaccataatgcagaataagatcatggaattatttaatctatttgactgggtcgtgcctggctgcttaggggaccgagaacactttcgagcttattatgatgagcctctaaaacagggtcagaggctaagtgctcctgagagatttgttcaagttgctgatgcgcgcaagaagcaccttgtttccattcttagggaattcttattgagaaggacaaaagaggagacaattggacatcttatgcttgggaaggaggataatattgttttctgcaaaatgagtgacgttcaaaaacgtgtttatagaagaatgctgcaacaacctgatatacaaatccttattaataaggatgtccgctgtagctgtggaagtcctttacctcaggttgaatgttgcaagagaactgaaccagatggtgttatatggtcttatcttcacagagagaaccctgaaggctgttctatatgccccttctgtcttgttcttcctttcctcgtcaagct

SEQ ID NO: 25480 - DNA, 450 bp, Zea Mays
gttgtgtcaaaaaaattgttgttgggtctagttgcgcaaaccatatgcaagccatgtttctttccataaattcttgcccctaaaatttcatagtatttctgttgatcatcctagctgatcctgtttgcctacctctccttttgcctggatctggtaatcctttttcttgtgaatcatgttggctttatcatctaaatctcgggatcccctattgattctgcttcgttatctggttatctactataacccgttctcaagtatcagatgttgatcttgcctaaatctctcatttctgttcattctcataccccccttctccgaggatcatgacgctgtgttatcaatttttatctctaaacggtgtatccatcgggttcaatggattccgttgttgtccttagttctctcatgcctctaaaagctcattaatcatgatctcgtgagtgcttc

SEQ ID NO: 25481 - DNA, 679 bp, Zea Mays
gtgcactgaccacagtgagagcttgttcacggtggcggaaaactgatttgggggaactgagcgattcgggggttctggtgagtaattggaggcacgagtgggtgtgttgagtgcacaattacacagtggagtcgagggtgtgctcattttatagggcccttgagcagtggcccatgaatttgtgattacgcggtggcgatcggagggaaggggatgcactggcgcaagcgattagtggctttcaccgtggcgagctcactggcgatcaacgaatatgcataacgcgagctactgtgatgtggtaagatgccagagcacgtggtgcaaggtcgcaaggtggctaactccggcgaacctatccacagcagctgtgactcaggcgggtacggcggccggagtagaatagtggtcggagttcatccatgacgcgatattttcttacccctctgcgatatccaactgcgccgaacatgaatcaccatggcaggcgcaaatacgggtgcacggtcgccggcggtgagttctccgagctggcgttctgatctagtcactgtaccattgaaacccgattcagagcgcctgacagaccgaattgcaatgtctagatctcgaatttttgtgcaacaacttgccaatacatctgtaacaaacttgtagcccttcataccagctacaattc

SEQ ID NO: 25482 - DNA, 309 bp, Zea Mays
ccgcggcggccgaaccctagagattctacccgacgtcgccttcagcgtctccaacgcacagatcgaccgtcgtcgccttcaccttctccaccgcatagaccgagacgtcgttgccttgttcttcttcaccagagagggacccggaatcgcagagatcgagccgtcgcccccttgttcttctccaccgcagagaccgagtcgcatttgatccaccgcggcggccgaaccctagagattctacccgccgtcgcgagcaccgtctccaacgcagagtccgacccgccgtcaacttcagcgtctcctacgcat

SEQ ID NO: 25483 - DNA, 348 bp, Zea Mays
tggtaaccaccgcggcagctagtgttgtaaactctgttttatttatttccaacctaatataaacataaacaagtcttccattttattcttgaaaaaaatataatgagttcactgagcgaaactatttgatgcactattgtttccattttcctgttcaggttaaagtttcttgtacttgtttcaaacaccatagttttaaactgaaaaagataagataaattatagcattgccatcttttgaagtgctctgaaaagtttgtctatcttttgtggtttggatgtggtaaatataagatactaacaaggatactacaattcaatgctgctgtgtttatataactatataag

SEQ ID NO: 25484 - DNA, 371 bp, Zea Mays
cgaaaatgatgttcagtagtttcagtgccgatgccaaaactgactgaactctgtgtcgatctgttaccttgaaagcttaagcagctggtgtccctgcaaccgcctctgggaatattctgttgaatatcttaggtgttgatgcttgtggtgctggtactctggtagtaattcgatgacaccagacatgagttataactacctgactataagagtagggattattttctgttacctatgactatccatgatcgtttagttcattccagttcagctggactcttatgttggatctgtgctgggcactctgtaggcccgtactgaatgtagtagatacatgcacaggtttaaaatgagtagcatgtcttttttta

SEQ ID NO: 25485 - DNA, 285 bp, Zea Mays
cactcgtttagagacaaagtatctcgaaccatgatatttagtatatatatgcaagaaattagttatagacaaaaactttggattggagtggactttcaaatactccaaaaaataccagtctctgctatatttaagtggggacaattaagtatatactaataattttaaaataaaaatagtcaggctagactggaccgcgacactgtgggccgagaagtcgatcgtgacacgatatggttctcgggccagcctacagcactattaaatgacatgtccctttggttg

SEQ ID NO: 25486 - DNA, 362 bp, Zea Mays
agaaattaagataagaaaagttgtaaggactttcctcatcgaccagcttgatccaaagtgtggaataaaactgagcaatgacctcatcattccaatcatattggaatgtcattatattcttcatcttctttctctcacaggccctcaacgcctgtgtcatctccggatctccaatagcctcacatccttcccagttgatgtaccgctgatggagaatgggctgatgtttcttgggaagaattacctagttttaaaaatccacatgctggagagtccagaatcgattcccatcaatcctagcatcacgaatgcgcaatgcaggattctgaaaccggatgtcctgaagaagtgcagaatcccca

SEQ ID NO: 25487 - DNA, 399 bp, Zea Mays
acagtcgatccagtggtcctaggatccaacgggattgatgtgattcttggatgcaactggttgaaaagttgtgatggagtgatacagtgtgccaatataactattatgttgacaagtcctcaaggtgaaagaatccaagttaacatagacaagtcaacagatgaaaaagggaagacagtgatcaatcacttggaagaaaagcccttggaaaatatcaaagtagtgtgtgaatacccagacgtatttccggaggaattaccaggtatgccacctgaccgtgatatagagttttctattgaattagtacccggaaccgcacctatcttgaaaagaccttatagaatggatggcaaagatttagtagaactgaagaaacaaatagaagaattactagaaaaa

SEQ ID NO: 25488 - DNA, 355 bp, Zea Mays
gcgggaccttcagagcatcctccctccggtacgatcccactcccagtttcgcaataaccacggtaaccttcgttgtaagtttactccgagtttctggctcgggatcgtagagttgggcggctctgcaatggcgccaccgcgccaggcagcgcaccgccgttcggacaccggaggaaggagatgatggtcatccgttggatcggaagagaacggtcgaaaatagaagggaggtagcgtctggccctgccccttggattgatccgcaatgatcatgattgagtttaagggcgatgggcgcgtggccgttggatcgggatcgcacgcgttaaactgatcgcggcacattaaaatctgg

SEQ ID NO: 25489 - DNA, 448 bp, Zea Mays
gctatgtagcctttcgaacatttattatgaaactatgttcatgatttgttgtgtgatcacaaacaactctgggagttagggcctacgccactgcagagagctccgggagggaggttgctggtcaacggcagtcacgcggccgcctccatggcatggaagcttgaggggtcatatccatgagggagagcggaggagatccgccgagtccattctatagagtccagactccagaccaggatagagcaaggctgaggcgtccagtttcatcaattcatcacgtcagttaccaggcgcacgccacatggctgattaccaaggcgagcctttcctgtcctcttctcacctttcttgatgtaatgtccagctcccgaacggaaacaccattgaaaatgtgttccttgtttgtgcgtaattcaaaatttactgttagccattgttcctgaacaac

SEQ ID NO: 25490 - DNA, 1001 bp, Zea Mays
taatcttgcttgaagttggactgtcaggctatttaagtctgaaaattcagactgacagtggactgatagcaacttcaagaccaagttcatgcatgatctgctgcctttttgtgacaataccatatagcaaagatgtagctggtttatagcactacaatattgctgcagagatttggacctgttgccatgaagatttgagagaaaggttgctctaaagttgctctgtcaggaggtttttgggtgggattcagaatgaacagtaacctgcataagatcccggttcagggaaccttgacgtcggtgatctctacgccggtgatctcctcaccgtgattcacgccggtgttaagatatgcgcctggataagagtggatagctgtccacggtgaaaatatcggggagggggatggatgtggtctctggcgcgagcttatccgcttcagccagttgctcccgtggtcggccgggacgccatcaccggagtttgatgttccttgcggccacgccacgtaactgagggtgttaccacgtagctgggagtcgtggcgtgaagccagttactaccttaagccattgctccactacgtgccacggtgaacacgctccagcgaagatcttttctgtcaccaccgtgtgcacttccgtcccaaattggcgaagcaagaaatccatccctttaaattgaggacactccctgcttcgcctctctgttacgcacacagcccacccctcactgccccagttcattcaccacagcccccagtcaccggtttttcccgagaaaggtcggtagcgccgccgtgagaagttccaccgtggtcagtcctggctgaggtaatcccagcccaactgctatctgttctagtttcctttaggtgtcgtggtgctcactggcttgggaatttgaactctaccgcagcagagcgtcgagaacatcgcctcgccgtgcagagcaccgctgcagacagcctacgcatcgacccgctgctctgtctgacccc

SEQ ID NO: 25491 - DNA, 843 bp, Zea Mays
ggacctttggtggagaagaagacccccaacaggtgctatacagaaattggagaaaaatatacatgaagttggactgtcagtcaaccttaagactgaatcttgaccattagtgaaattggatgaactttgagatcgatttgcaggggatttaatggatgattgagcaaggtctttgtaacaaagttgtagctggtacattggacaacaactttgatacaggcaggagagtgagttgccacacaaaaattggagaacgaggccatgcaagttgctcagatagaaggactgacgaagatcgctatggtacagtgccaggaaagatctccagtgtcgtgaacctgatgctagtgatcctccgccgtaattcatgctcaattgggagattcgtgccgcgggagagatagataacgccgggatggggtgaaaagatccggggaggggtgaacccagtcactggccagaccggccattgtgtcctaccgcggttagtcgtgttgacatcaccggagctcaccgtttctccggccgtgacaagaaacgatctctcctccgtgtcgtaagggtcgtggcaaccaaccgactatttgccctgatctgtttccctcttgcgcgccacagtgagcaggccactgtaaaatatcccggccacggtgagctcgatttcgatccaaaattcgcgataaacttggctgaagtctataaattggaggcaccccctgttccgcctactcgttacgaacccagtgaaccactcctcactcccgatcgtccaccgtagcgccctaattcggattttcccccaaatccggtctccacaccgctgcgagtaccccttccgtcgac

SEQ ID NO: 25492 - DNA, 349 bp, Zea Mays
cacatggctggctcgatcgggcggggcggggcgggcctttatatatgggatgctgccgttgttggctagcgaagaagcgcacaaaggtaagtgtgtaaggttaggagccagtgtaccatcacatgaagggcccttctttctgtggtggtcgatcgctctttggagcttatagggatggtaggcgacgtgaggaggtgcggcctaggcctggccatggcggtggccctgatgctcactgcactggttgtcgttgcaagcggcggcacagagacgaggcagaaactgcctgctggcagtggcaatgacgacgactactcaaccattcttagccacctgtccaacatcattg

SEQ ID NO: 25493 - DNA, 348 bp, Zea Mays
gttacatagaggttctctagtatgatggatgctagagaatggggtagatggctaatgagtgacctgtcttttgatggggtgtccctaggccttatatactcgaccctggtgcattacatgcgggtatgataactatgtgctcctaagtaatagtgaaccgactgaacttatcttcctattatcctgccgacttatcttcgtttagttccgacgtctgagggcgctgtgcgggagagtcggatcaatgttgtggataatgtttaaacccaatgagccgtgtgggctcgagtctatccaatcttgcgtcgatccattccgccagcgattcctcccctggcccacgaagag

SEQ ID NO: 25494 - DNA, 286 bp, Zea Mays
ggccattgatagagaccacgagctgttctagaagtcaccgcgctgcagcctgcagctcaggggggcctgttccctggatctcgccatcgccattgccgctgccccccacctactactcctgctcctagtcctacacccctcctactccaatccaagaggtgctttggatcgcattgcttcgtgctagagttcggtggtcagcctgcgtgtgggacagtggtactccctccctgcttcttgattcgtctctgtggttgtgtttttagagccactgctttcccccctt

SEQ ID NO: 25495 - DNA, 433 bp, Zea Mays
ctgatcccaatgggtgtagccctgctgatgctgaactcaatgggtgtggccctgctgatgttgatcccaatgggtgtgaccctgccaaagctgaacccaatgggtgtgaccctgccagagctaatcccgatgggtgtgaccctgtgccgtgtattatccgtattgttgatgaggacgaggaagaagaagaggaagtccccttagttcgaaagaacagtcggcgttatagagtcggtggggggagtagcgaaattccttctccagctttgtctgctcttgttggtctgcaagaattatccatagcaaattttgatcaggctctcgaagatgtcattcctgaagatatgttgtccgagccagcagatgatgatatgatagacgtttgttctgacatcccagaggtggggttagagttatcccaagtagtgtctcg

SEQ ID NO: 25496 - DNA, 371 bp, Zea Mays
gagagcctcatattcggcgacattattcgaaaccgctgaggttaatgtgaaggagtatggaatgattccatcatcaggcgtcacaaagacgaccctagcacctgcgccagattttcgacttgcgccatcgaaatacatctgccatatatgatcaggtatctcaatggcaaaaacctcttcatcaggcaaatcatcgtcaatgggaaaatcatcagggatagggtgtgcagctaagaaattggccaatccttgtcctttaatggccttctgaggcacaaacacaatgtcaaattgtgagagtaacatcgcccacttagctaacctacccgataatgtcattttgcttaaaatatatctgagcgggtctgctc

SEQ ID NO: 25497 - DNA, 524 bp, Zea Mays
ggcaaggatcgagcgagatacgcgaacgagagagaggccttgcattggccgatggtccatgcctccatggagatgctagctagggcccagtggagtagaggaggagcacacgacgatggatgaggtcgacacgacgacgagacgaagagagcgattgtgggtccacacagtgctgaggtcaagcccaagacgtgtgtactgcttgctgcgtcgtcatgtgcggtgcttccgattcccacagcccgcgggtcaaccactgctgctatcctagcacagcaacagcagcactcgacgactcgctgttgccgggatatgacccacacccgctgagatctggggaggggagctgtaggggtatgtttgcgacacgtatctgaccggctcgactcgctcgtgtggtctaggctgaagctagccggtcccaattgctgcaacatattttgtttgtgcacttgtaccaagtaagcctggtccatgtgagctggtgtttgccacacgtagacagtcaggctaagagtcacttt

SEQ ID NO: 25498 - DNA, 389 bp, Zea Mays
cacccccttctctccgcccgctgcgtgtctttccctgaattagtcaccaccgctcatggatcctataaatagagcctgtcgtcggttccgcaaggtagtccagcatccaatccaccagctcgtgcctccaattactcactagagagccccaatttgggatttcccccaaatcggtccgaaacaccgcgcatagtgacctcgccgtggctagctcgttccaggtccgttcatgctctttgccctcctatttcagtacccatatgtcctcctgatgctcctcgacccgttcaattaagctagaccgcgctagatcgccgggaacacttctgttcatctgtagttcgcgctgtctctgtggacggggtgatttagagcccaattccagcaat

SEQ ID NO: 25499 - DNA, 437 bp, Zea Mays
cggacttcaaccgaagaggaaaagtccaaagaaaatgggaaaaatcatccaaaatcaccaagtagtatctgtaaccagaaagactgagtacaggggaggtccagagatcacaatgaaccagatcaaaagcctgctcagcccgagaagaagtagtaaatgggagacgagtatgtcggcttaactgacaagcatgacagaggccctcaaaatgtcccctactacatgaaggatctaagctattggtaagtttgctcatgacgttaggtcctgggtagccgagacgacgatgccaagtgatggcggaggtggtggagactaggacgggaggtggagacacgtcggtggtggaaggctggagcgtgtagaggggcctgacgctgtcacatcgggcgagaggggtccaagtggccagatccttcacagaaaaaccagagggg

SEQ ID NO: 25500 - DNA, 482 bp, Zea Mays
ggcgaacaccgcataccaatcaagttgttccggtcgattgagtgtggtctagctcaatgggttgagccgatgagtatcacaagcatgcgtgggtgctaaaacacggacaaggagagcgagggcggacctagagatggcttgccacgacgcgacgtctcacgatggcgtggacaatagattcgggggaacagtgaaattctccggttatggtggctaatcgagggtaggggtgggtgctctggcttcgtaagaacctagcggagctagcagcacactcaatttatagtgttcgagagcggtggctctgaattttgaaaggggagactggcggccgaagagagggggtgagtcaccggcgcgaactaccgtggcgttcacctgagcaatgtctcaagcgatggacagactacctatggctatctactgtgacgtggtaactcttctaagtacgtggcgtggctacaaagggcggcaaactccgg

SEQ ID NO: 25501 - DNA, 294 bp, Zea Mays
aataattgattctcaaccatgattgatcggtggagacggtggcatgattcttctttgttgaggtcatatacttgaatggcatcccatcttccattgcatcgggtacaccttgtttttaccttttacttttaactttccaaaatgtgttgtttgatgcttccggctccaaatttcacatgagctccaaggcaactaacaaggtaatcaccatttacttgctatctatggtagctaattgtcctcgatagtgggtaaaatgtctcctttgggcccaattcttctacaacaattctt

SEQ ID NO: 25502 - DNA, 278 bp, Zea Mays
gttcaggaatgggagaaatatggattggagagacattaccagctgggtctggagaggagtctgaagagagatatgggactggagcttcaacacatccaggttgtggttgctccccctacttcttcgtcggctttcgatagtatactataggttgcttcccctgtttgtcattcacctttaccccaatggaacaatcatgttgctccccctgtttctcattcaacttccctgcagtaggacatgggattgacccaacaatcactgcctcatcatcctct

SEQ ID NO: 25503 - DNA, 374 bp, Zea Mays
tcggactccgtcgagggcaacacctacggcattatctaccgccagggagttgctacgccaccccctagctccacggcttcaccaggggccatgaagcagtggcgtgacgacgttgaccggcaactcagtatggcgcattctacctcgactagatctaggccccggtcatcccggcatcaacgcgaaaccatggcgtctgtgcgctcgccttccgtaaggggtgcacagactgatgacctccgggcaaagctcaaccgcaggcgtacgagagaggacgcctggatctccctagaaagggcacgcgagcgccgccaaaacatcgagggtcgcaacctcgatcaagactttgctgcagcaacactgcagaccccaat

SEQ ID NO: 25504 - DNA, 310 bp, Zea Mays
gactccaaggaagagaatggtaagctttggcttggacttctctaggctacgagatcttgagtccatgctgcagttcctgtatgcatgcgatgaattgctttccgagagctcggaaggttacaacactagcggggagagctacaacccaacccggaatgcctcaacatctacctagagattcctgacgaggaaaaccacctcggcatgcctcgggaaggtgaccaacctcctccgcgcgttcggaaagcaatggagccaggtggagctcggacccctcttgggagccacatggctcacctcgagcagctcc

SEQ ID NO: 25505 - DNA, 440 bp, Zea Mays
gccggaggcagactcggcaagccttcgacatcaccaggagccacatagaaccaaaaatcccaccagttaccccatttgttcctaacgcaggggactatctccacaacctcatccgaagtctttccagtcctcggtgtgaaggtgcatggtccaaattgggctattttgttccctatcttcctcttctaccaatgcaggcaataattcttagcgaagacctccatagacggctgcccgtcgtaggaagtaactgcccagacatacttcgcaagcgccaccactgcgttcggcatcagccagtggacttggacctcaaatcgtcgcaacacctccaccacaaaccgatgtgttaggaggcgaagaccggcagcaaaaaggcctcaaaaactatcaactcgccttcaggctcggggatttcctccgcacccagggcccgcccg

SEQ ID NO: 25506 - DNA, 318 bp, Zea Mays
ctcatggtgacatatgattttcgggccacagaagaacaatctaatcacaggatgagtatcaacggtggataaaaatttaacgaatgcagctcagatcaattaggcagaaatgtgaccttagctgcaaacagcaagtgtcatcacgctaattttcttactaaagagcaatgtggaaagcaattgcaaggaagatctacaaagcagagaagttcttagccttctactggaagaagtggttgtgtggcacaactagggtttccggcaattggttctagctagccaagcttccagtttgggacagttgcaccaaatcaacca

SEQ ID NO: 25507 - DNA, 339 bp, Zea Mays
caagacttagatatcacagctgaacttgattccctatgggatccccaaaatgtttatgttacttaagtcacttatgtcaggcgttgctcatgtgtatgatactccccatgacacttatgttcgatgtgtccactgtctatgctacttcgtatcagtttctatttcaagtgtgcaaaacataagtgttcccagactgtatacttatggtatctgttatgaacttatatggttttcatttccagattgtgagatggttaatcgtttttgcccaatgtttggcgtatttctattatcatattatatttaatattcaagttttatgcaacctatatactgccg

SEQ ID NO: 25508 - DNA, 415 bp, Zea Mays
ggggtcacctgcaccgatggtgaagcccaatgctggcgaagcactcatttagaccacgaatgacgttgaggacgagagtgtcgtcatggaccggctcgccgagatcgccgagaccgagagcgtcagccatctctttgagcttgcggcagtagtcggtgatggagaggtcgccttggcggaagttgcgaaactccgcgtcaaggaagagagcccgagtttcgtgattctcgaggaactgggacccgatggcgagccaatcgtcgcgagcagaggcgtcacatatgagcatggcagcaccaagctcggtggtgatggtgccgacgatccatgacttgacgacgcagtccatttgcacccaacgagaagaggatgcagatgtgtcagtgagcacgtgatctgtcagcgtgtacttgcc

SEQ ID NO: 25509 - DNA, 323 bp, Zea Mays
attcagtgtgataatggatgtgagtttgataactccatgtctcacatcttctttctctcccacggcgtgcagttgcagatgtcgtgtcttcacacctcccctcagaatggtcgagccgagcatatgattcgcaccaccaccaacatgttgtgttgtctcctctttcaggcttctcttcctgcccactactgggatgaggccttgaacattgccacctatcttctcattcgccttccctctaaggcagtttctcattacactcctttctttgccctcttcgacaccaacccctcttatgagcaccttcgggtcttcgagtgtgc

SEQ ID NO: 25510 - DNA, 656 bp, Zea Mays
attgaaacacggacaaggagggtgagggcggacctggaggtggctggccacgacgcgacgtctcacggtggtgcagacgatagatttggcggaagaacgaaattctctggctatggtggctaatcgagggtgagagtgggtgctctgggttcgtaacaatctagcggaataggccgaggcatcaatttatagaggacgaccacgaggagggtgaattaggacggggaagcgcttgctgtgagaaagggggaagagtcaccggagttgctaacgtggcgctcactagtttacggtctacgacagtcactgccaagacttcacggcttgcgacgagtggtgagatgacttaaggcgtgtcacaactgagctagacggtggcacgacggcaacggtcgcgcagccacgtcgccggtgcaagtgggtacggcgacagggcaaaatagtgccccaaggtcatcctcgcgcaagatcttttcaccgtcgaccgttatccgcacgccagagcgcacgaatcggaacaccggtgaggatcacgtcgcggagttcaccgttggcaatgttcattgcatctgtgatcttttgcagatactgtaccatcgtgttcttcatcagttgttttgaaagagcgaattgaagtgctttgttctccaattttt

SEQ ID NO: 25511 - DNA, 331 bp, Zea Mays
ccttgggttgccttagccctcctagcgtcgtccataggggggtgctggcgattcttgatgtggcattctgtcttgtctacccgatgtttttgtccctgtagcttatctgatgccaacatagtggtacacggcgggtcccgcagagtggcctcatggtgaggtttagggttgtatttagtacaacttcatcatctatcatgacccttgcgtcacctatcggtacgcgttggcatacaactggtatggcgtactatcccgttctttcaggtaatccgatcactgtagaggctccgatgctgaggtacctgtgaatgggtttaactggtcccac

SEQ ID NO: 25512 - DNA, 464 bp, Zea Mays
ccacggtggagtgtctcacggcggcgacttcgaccgatttggggaaataccgaattcgggtgctatggtgggtaatcggtggcgaggagcggtgctcggggttcgtaacaagctaatggagcaggccagggcatcaatttatagtgattaacaatggtggatccaaatttggggatgaaagctggcggccggagcaaggtgagtcaccggagttcgcataatgtggcattcactgggcaaaaggttacgaccgtcacctggttatcctcctcaacccgcgacgatgtggtagaatagcttaaggagtgtcgtgatcgaggtaaatggcggcacgacaacgacggtcgcgtggacacatcgccagtgcaagtgggtacggtgaagccggctcaatccactccccctccgatcttttcacgtccgcggtaatatcctgcccgagctgaacacgaatcacggtggac

SEQ ID NO: 25513 - DNA, 348 bp, Zea Mays
cttggcggatgggttcgtgatgatccaacagagctcactgcggggtcaatttataccaagtgaaagtggtggccggggatttgagcgacgacgcgcggcggtcggagaagtaagagttcactggcgcgcgattagtgtcctattaccgtggcagtcattccgacgagccacagagagtcacaagggttcacagcgatgtggtggacaggtagagacacgcggcggacggcggtgatggcttaacggcggtgagaagcttatccaagggatcagtgagcaaggggagaggcacggcggctagccggagtggcgtctagctcatcgacggcgatgctttttcaccccgcg

SEQ ID NO: 25514 - DNA, 353 bp, Zea Mays
ggaaatacatcctcaaactcttcgattacagacatgttttctgctgccaggttaaacatcattggatcgatggcgggcgactgggcttgacaggaaactgcttttccttggcgatcggtgagaaggacggtcttacttgcgcagctgatgatacccttgtgcttagttagccaatccattcctaggatcacatcaatccctttgggatggtaagacggttaagtccaccaggaacactaccccacttaagagaattctgacttgggagcacctgagttggcataggaggtctgatcccggggttcgggtgaccaaagggatggctaggggtgtagaggggatgccatgctttt

SEQ ID NO: 25515 - DNA, 474 bp, Zea Mays
tgggcacagattcagagacacctgccaagtcgtcgcccgcaaggcattgaggaccctgtgtcagatctatgaagaagaagtggccgacacccctctcagattctttctgccctttcagagagaccgtccagtttggatggccaggatgcgtgcattggaagggaagcagctgcttgaggacgaccccacagtcgtgcacctcactgcatacctgctcaccctggatgcacagtatgatttcttggctcggcaccaccgtcagatgattgcccgagcaaaagatgtagagaagcgcaaccgtcagctccatgtggatctcaccacagctcaagcccatgtagctgccttggaaagtcgtgaagtcattgctgttgaagccctgaagcaagccaaggatgagcatgtctagaagttgatggaggcctacttggtaacccataaccaacgtagagccctgcggatccaagagcccgc

SEQ ID NO: 25516 - DNA, 615 bp, Zea Mays
tgaacttgatgctttctgcttgggcgccatctcaatcttgctggcgagcggagcggaagtagtatcgcacgagcgcaaagaaggcttggatacagaaaagcaagaactagggcacgaaaagcagaggcgcgcaacaatgcagtacatatggggttttcccaggccagatactgtttccaaaaagcgcccagtcatcacccgacagttatttataaaacgctggcgtgccatgtcatcactcagctgctattcctaaaaaagctggcgtgccatgtcatcactcggccgttatttccaaaacggccgacacgacccgttctaactcggttgttacctctaaaacaccgacgtcgccatcagtcactcggctgttacctctaaaacgccgacgtcacaatcagtcattcggtcgttacctctaaaacgccaacgtcaccatcagtcactcggctgttacctctaaaacaccgacgttgccatcagtcactcggtggttacctctataacgctgatatcaccagtaaccacttggtcgttaattctaaaaacatcgatgtggccctgccatcattcggacactacttcagaagcgccaatgttgtcaataataactcg

SEQ ID NO: 25517 - DNA, 423 bp, Zea Mays
ttcatggcggtccagttcaatcaaaggggtcgaagagcttgaggagagcctaaggatgctagaacaagcgacggagaaacttgaactgacctgaattgagctggccgcggtgaggctaaaccgagcggagttcggacgtgatttggggagaatccaaaattagagctctctggtggaggatttgaggtgcgggtgggtgcgttagctgcttgaatacatggcagagccgagggggtgctcaatttatcggcctagtgagcgatggccggaaatttgagcgatgacgcacggcggtcggaggagggggaatttcactagcgcagtggattggtgtcctttatcgtggtgttcactccggtgatcaacagagagctaaaacaggtcacggcgatgcggtggagatgcctagacacgtggcacaag

SEQ ID NO: 25518 - DNA, 371 bp, Zea Mays
ttctagtatttgcttgggtcatgcaaaccccgagtcaagccagtgatgtgcttgctcaagtcaccaacaacctcccccactcaccaaagggagaattctatcgacaactcctcaccttggcaacaaatcacctcctacccatggttcccactgaacactatgcacatcactacatcatccaccaccataatgcacgaaacaacatcgaggcttcacgtggacgatggcaccacaaagaggctgaggcaccgagaggaatatgatcaagatcatgtcatcccgcatccaagaggtgccactcaaacccattccattgcggcctcgatgcacaacatagcgcatcaccactcggcccacaaccatttgggtga

SEQ ID NO: 25519 - DNA, 482 bp, Zea Mays
cttagatccggacggttcggccactaggaccgaatggtccgccgtctctacacgaacttgcacaattgtatttgtattttgattttttatggttgcttattcatttgcgttagtttcagtggcctttggtctccatattttctgtggtggtgggaacaatggatgtgtatcattaaatgtcttctccgcctccttttcctttttttcctttgcttgtaagcgctgctatttgcgcttttgagagcgtgttagccccgatggacaccatgaggcatagagtactttgggttagacgttttgctggtaaatcctatgtctttttctcacttattttgaccgacttaccaaaattcatcagtcatttgttattgcttgtatgacgacatctgttgtgcctattttaatgacatctacattggtcgtcctttttgcattggtagctacaactatggatactttctccctatgcccccttgtcgggg

SEQ ID NO: 25520 - DNA, 392 bp, Zea Mays
ttgtggctcataaattcctggtgcttgtcccggggtggaagtggtggtggcggtggtggcaatgggactggctgttgttccccctcttctcttgacgcatctcctctctatcttggtgcatctcttggcgttcctatcgcatctgcgcgtgcatatccaccataatatcagccatctgttgcattatccacatctaggctgcaactgctggatcagctccggatggtggaggatttggaggattcatcttggcttgctgttgttgttgtccaattaccctccgattgtgtcgattggggggtagattaattcctcctctcttcctggtaatgaccatctgagtaagaaacgcatggtaagaaagaaagaattgtaggcaaggcaagtaatta

SEQ ID NO: 25521 - DNA, 483 bp, Zea Mays
gcgggaagtggagggcaaggcccggacacgtgtcagcaccggacccctgctcataccagggtcctcctcgttccgggaccctactggggttcggatttacccggaggctccggacttatatgtataggggtccggtgtccttctgtgggggaccagactgactgggatgtgttgtctttccttgccatgtggcgccgtcccccgcgtggctaggagacgtcgcatgggtgtggcgtcttcatgatgtaggagagggtacccctgatttagggtacggacagtggcccccggtccagccttaggggagggtgcgagcctgtagttgggaccagagtctgattggcggttggaccgctgctctcgtgtgccttttgctgcaattactgtcggcccgcctatggtcatgccaactgtcgcgcctattcccacggctgactggcccgtgaccatcgtacttaatggcactgttgggccatgtgcggg

SEQ ID NO: 25522 - DNA, 308 bp, Zea Mays
cacaattaaacatttcaaagggtcagacaggtaggcccaagtcctacccagctacctcatgcctcaatgaacacaagagacagctgcactcaacggtatggcctcaaaggggtggtcctgtctgtcaaaagcgtgtccccaaaactaaatcacagccacattgtcaatgcacatccacctagcgcctccagctaatgctccggccacttggtgtccccgatcacaatacatgacattaactcgttgcatttctgtcaaaggtctcctgttaccggaaacctagttgctagtggcaacggggacttgga

SEQ ID NO: 25523 - DNA, 342 bp, Zea Mays
ggtatggactatcccatatagattcgccttcgtcaagcatcgtattgcgtcatggttcaaaggataggcttcgtcagggctagcgggaccgctcaacgatctcctatggagatcaccgtagtctgtctgtcgggaggtaggagataagctcacggccctcggattttgaggcgacgatggagattgggtctggagaacggctcggccaggaagtgatgtgggccgtagatcaagggagggacggcacggattaaatctcgcgtaccggttcggccaagtcggtagtggccattgatccttgatcggatggctggaagatcgtgtagttcattatcttttatg

SEQ ID NO: 25524 - DNA, 354 bp, Zea Mays
gattagtgcggctttttttatgcactcgccttttgctttctcttctttttggttgaattgcagcaagaggtctaaactggtgattgaaacaaggtggcacgaactcgaaactctagcggtaagaaaactttagaccagcaactcgacccaaatgcagcaaccgtgaattcaacaagtcgaaaactaagtagtaaagcaaaggctcaaactttttttaggtgaatttctgatctaaatatatctttgggcaaaagtggactgtaggtaaataaaacaaagaaagattgagttctctcaccgagcaacctgagctttgataccacttgataaacccaacgggtagaagggtgcccg

SEQ ID NO: 25525 - DNA, 380 bp, Zea Mays
cgagtttgatctccttcttctcgagtcttgatgtcttcatctaggtttgggacaagaggttaagatagatctataggcaacagatggatagagggtttagtaggtagctatatgctagatgggattagttatgtaacctgttttgtaggtcaagttgttgggtggggtacagttgatctaagatctcaaacttgtttaaaggagcagggtctgatgtattccaccaggattgactatcttgttaggtaactcattttagattggatcatagtagattagatggagtctagattagatcgatatcattagattaaacaatatctaattactttggattaaatcatggttgttacactagtgtggggtaaatatgcttatta

SEQ ID NO: 25526 - DNA, 783 bp, Zea Mays
gatctcgctgctgaggtagaagagctgacggctgctttggctagtcaggataagttgcttaggcaggctgctcgtgataggagagagtttagatccaagtacgagagcacgcttagggaacttgagtctgctagagcttcagttgtggtgtccgacgagactgaatgtgatgagtgcgctctacacatgtcgaacatcaccactttgcagaccaagtacgccaccttgctagatgagcgcgacgagttgagatctaggtccagcttgttgggtgtgtgtaccgtttgtcctggcttgcagactgagctagcagagagagacgctaggatagccttgcttgagaaggctagctcagtgagtgcccctgcacctgtgcagtgtgcactttgtgagggtttgcagtctgcccttgagtcctgcagacacgacaagacaaggatcgaggaagaaaacacataccttcgatctgtcttgagctgggtgtcgtgcagtgagccccagttgggcatgatggtcagtcagttcaagaggggaactggcggaccggggttaggctttgctgctaaggatgggagtgtcgctcgctttggaaaggttggtgagtgcagtggtttgacaccttcagagaaaccttcatccactcccaagcttatcaaaatcacccctcctaagcctatcacccctgtgagagatggtgtgattgaggagcctgtgagagcccctcctcagaaacaagtgtggcttccaaaacctaaccatctcaggaacacacttgacaccctt

SEQ ID NO: 25527 - DNA, 339 bp, Zea Mays
gcgaaccgaggaaatcctcgaaacgccaaactccactttgtggcccggctgtaactctgccgccgccaaatcgctcaaagtatcttcggacgacgaattggtcggcggcgtgtttgcagcagatgaggaagaagatgacatcactacgtaccgtcggcagcggcgtgcagtttgcttgacgcgggctagatctccgatgcagaaggaaccaggagggcaggcgaacggtttcaaaaaactagggttttccggcgcacacaagggtgagagttagcccgctgtgccgcccctttttatacacacgacgcgacgcttcgggaaacccgcagtccaacagtg

SEQ ID NO: 25528 - DNA, 285 bp, Zea Mays
ccggtgatcgccggtgagtccgccacggtgaaagccactaatcgattgcgctagtgcccctcctcctctccgaccaccgcgcgtctccatcaaattcaccggccaccgttcaagcacactataaattgcacacaccctcggctccgctaagtagtcaagcacctaatccagcaactcgtgcctcaaatcatccactagagcgcgccaatttcaaagttcccccaaatcggtttccgccaccgtgaaagcgtcctcgccgtggctagcttgttccaggtctgttcg

SEQ ID NO: 25529 - DNA, 916 bp, Zea Mays
atagcaaaatcaaagctggattatagatcaacaactttgttacagatgaattaacatgttgtcacataaaaattagagaatgaaggcctctaactcgctctgtcaggcgctctgatgggggttctgatggtacagtggcttgacaaagaccagcagatgcagtgcacctcatcgccgatgaccccgcggcgcgatcctcgccgacgctatgattcgtgcccggtggcgcgcggataatgacccggggtaaaagatcttggtgttgggatgagctcagacccgaccactggattattcaccgtacccacttgttgtacgaccaaccgaggtgtcctcgctatagttcgccgcctttgtagtcgtgccacgtgcttaggaacgttaccatgtcacagtgaaccgtaagagggagtctgtccattgccgggagttttgcctcagtgaaagccacgttagcgctcgccggtgatttccccctctctctggccgcccgtgtgtcttccccaaattggatgccaccgttgttgatctctataaattgagcgctcagcgtgctccgttaggttgttacgcaccaagtgcaccagctctcgcctctgatcatccaccgtagcgtcccaatttcacttttcccccaattctgttttccgcgccgccatgaacatctcgtcgtggccagccatctactggtcagttcaagattctctgcttgatgttctagcatcccttaagtttcctgttgctcatagacccgtttgattgaactagaccgcacggaaacaccaagaacacctcggtttgtctccggtattcaccgctgtcgtgggtagatgaactccgggccggattcacgcaattcatagaggaattagggtcgccaggggtaggaataggtgtcgaatgagttagggcatca

SEQ ID NO: 25530 - DNA, 640 bp, Zea Mays
catatattgtcctttttatgtttttttactgcaagttagtactgaaaatagtttctgttgatctattatagctgttgcccttgttgccttcacattttatgttgtattgtagaagaattgaagctcagatcctttactaatatgcttgtctctcgggttgacaattcattagacatacagttgttggttgggtacttgctttctcggtgtgactttccaagagtgcagaaatgatcgatttgcagaatcacactccatttggtttgagaagattctgagtaatttgcaggtgatgtatatacttctgtgcaatttacgtagaatgtatttttgcaattttttaacttactgtgtcctcagaagttagcttgttttttcattatattcagtgctgttgtgtgttacactcttctccttgcattgatgcacagctctctggatacccgagagaaaaaaatgccatttcaatttctgagcaatcccattattaattaaagatgtattaacatatttcaaatgcttgctaggatataccatgaaactgatactgtgtctttgggaggtaattgaagtgatctgcattttttcagttgtattttgctacagtgggcttcttttactgctatgtgctatgaaaacc

SEQ ID NO: 25531 - DNA, 734 bp, Zea Mays
ggccttaacacgtaggatgtcggacaatcctccccaaccttctgttcccccagcgacgagccccatccctgtgacctctagggcagcagctgccacaagcacgtcgcccgctgcgcccgtgtcacaggactccttcattgtgttccagcagcaggtgttggactcccagacattgatcatcaaccacctgtcggcgttgaccgcccggttggggcaatcgaggtgcaatccgcgtcggcctcgtccatgattgatccttcatcatcgtcccacgtcttcccctcgactgcgcaagattaacctatggccctcccgactatgggggcatccaaaccgcacccgatgcgacgtcctccctgtcacttagaggtcaagtaaccctttctatataaggagaaggattatatcaattgaaggtaagcagaagattagaaagaaatcctttctctcttgccgacagtgggcaaagccctgcgaccgacctccccagcgccccatccttaatcgttgcgccacgtccccaataggatctgcaatcctatgaacccaccaaatccggatccctaacagtctcactggggcatgcccccaaaataaattttgttgcatcctcacgtgatgccacgatgggtcagaacaggatgcttgtcatctatggagccctgtgtgactaacaacctcactagggatgttgtcaagctgtgtgtagttgtaggtcttgatatgagtgtgtg

SEQ ID NO: 25532 - DNA, 319 bp, Zea Mays
tttcatgtcgttgttgttgctcatctgcctggcatcaggcacgaccatgtgtgtcatgtggcagtgttgtgtttcctgtccgtctcggcattgatccccctttgcgtttcagtgggttcatggttcgtctggttggattagtcatttctgcaagcggggcgaattgggtgcgattctggtgtctatccttttatctgtggtgtattgaaagaatagggccattttgcttccttcgaactgttttcttctattgttattcttttattttgtgttggttctactcagagcttgctttcggtggtgctaattcctatagaat

SEQ ID NO: 25533 - DNA, 652 bp, Zea Mays
aacaatcaaggatgcttaaacacggcacagaaggggaggagcagacctgaggatggctgaccacggtggagtgtctcacgacggtgacttcgaccgatttgggggaagtaccgaattcgggcgctatggtgggtaatcgggggcaaggagcggtgctcggggttcgtaacaagttaacggagctagctgtgcactcaatttatagtatccgtgagtggtggctctgaatttggaatagggaagctgacggccggagcaaggtgagtcaccagagttcgcataacgtggcattcactaggaaaaaggttatgaccgtcacttggttatcctccacaacccacgacggcatggtagaatagcttaaggcatgtcatgaccgaggtaaacggcggcacgacgatggcggtcgcgcggccacatcgccggtgcaagtgggtacggtgacgccggctcaatccattccccctctgatcttttcacgtccgtagtaatatcatgcctgagctatgcacgaatcgtggcggacagcacgggcgaagttcattgaatctgatcttgttcagctactgtaccatcgtgaacacccatcagtgcgtctgacagagcaagttagagggctttgttctccaatttttatacaacaacccattaa

SEQ ID NO: 25534 - DNA, 453 bp, Zea Mays
ctgaccctcaagatcgcgctccaaggtcgatgaggcgcgagacgctgcctgggatgaccccaacccagcgttgagcacatcagcacaaacatccatcacaccaccatccgctggctctgataacagatcctctggaaccatatcttcaagagtctgatcaaagttcgccagggacaattcttgtagaccaatgagggcagacaaagcaggagaaagaactccactactttccccactggcgacatattgccgactgttcttccgaatcaaagggacctcatcttcttcctccccgtcgttttcattagcaacacagacaacacccccattgggatcagcggcaaatggagcacacccattgggatcagcggcagatggagcacacccattgggatcagcgacagatggatcacacccattggggtcagcgtcagtaaattcaagcacaggcac

SEQ ID NO: 25535 - DNA, 410 bp, Zea Mays
ttgattttgaagaagtttttgctctagtggcaagaatggagactgtcagggtactattggcagtcgtagcacatcatgggtggccaatccatcacatggatgtgaaatcagtgttcttgaatggtgatttggctgaggaggtatatgtcacacaacctcctgggttcactgcaaaaggggaggaaggcaaggttctaaaattgcacaaagctctgtacggactgcgacaggctcctcgagcttggaatgtgaagctagacaaaagtttaggcaaacttggtttcacaagatgcaagactgatcatgcactatatactagaaagaaaggtggtcagagagttgttgttggagtatatgtagatgatttgttaattataggggaatcagacgcacagatcactaaattcaag

SEQ ID NO: 25536 - DNA, 376 bp, Zea Mays
cacactcccctgggctggccgggctcctccctccctcctccagtgtccagttgtcactggatgatactaccctctgcccggctggggctgatgcccgatggcctgtcgccgcctgtggcttgagtctgagcagcggacttggacaaaagctttccatcccttgcttgtagtgcggctgcctgccggcccccctctggcgcctgcctctatcaccctgaccactgctcagttgcaacccaagaacccatgcggccatgctgctggggcctggggtgcgggccgtttccttggtcgcttccccttggcccgacgactgcttggaggaggaaaaaagttggaatcactgctctgcatgcatatatgctcctcgctcttc

SEQ ID NO: 25537 - DNA, 369 bp, Zea Mays
gtttttttatgcctaatcttacctccaaggttggttattttacttttttcattcagctgatgagtggtggaaatagtttagggcatgctagagcaaaggaaattcatgtgcttttggtggaatcacacgttcatacaattatttgaccaatacatttctttcagaggaattgagtcttcttcctctgctgtggatataaagaaggcctaccgcaaagcagcactaagacatcatccagacaaagtatcgtattattttttctctctattgtgactctcattgctctcttgtctaacagtagttatgccacaggccagtaactttcttgtcagaagtgaaaatatcagtgatgctgtatggagagatata

SEQ ID NO: 25538 - DNA, 477 bp, Zea Mays
tgcacttgttgtgtcaaaaaaattctttggtgtctagttgcacaaaccctatcaaggctgtgtttctttccataaatctttgcccctaaaacttcatagcattcatgttgatcatcctagctgatcctgtttgccgatctctcttttcacctggatctagtactctttttccttgtgaatcatgttgtggctttatcatccgaatctccggatcccttattgatcctgccctattatctggttgtctgctataacctgttctcaagtatcggatattgatcttgcctaaatctctcgttctggtcattctcatacccccttctccgaggatcatgacgcttgttttatcaacttatctctaaacgacatatccatgtggattaatggatgttgctattatctttggatctctcatgtctctaaaagcttatcaatctcgatctcatggttggttcctcctcatattaaatatcatat

SEQ ID NO: 25539 - DNA, 299 bp, Zea Mays
aaccaacagctagcgatcataaatggcggagtcaaatctcgtcctcctcctttcgcttcgccgtgcgataacgaatactaggtcactgtgtagccgtgagggagagaaaatccgcagccggcgaaaccacgaatcgtgggcgctcgggcgtcagttggccattccagaccaacgccatagttccagggagctttgacgaccatcaattctgccattggaccctctgtgtccgagcgattgctcgtcgtcgcttgtggttcgccgcgaactcgcataacttcatggccagctcatcaggc

SEQ ID NO: 25540 - DNA, 301 bp, Zea Mays
ttccagctgcaagcgttgaacttccactgatagttcagcaatgcggcggctatcgcgtgcacgctccctactcccgtggcgtaactctgacatgagtcgcgccaccctggcctccaaatcccctatcgggtcgttgcttccactgctgctcccctcatgtctaggagctagctgatgtcggggtacaccatgaggtccggttgctttgcgctgggtggtcttggttcgcgccatatctccataagaggggaaaatttatttagtgtagtttaaacatgatgcatgcataacctaataatca

SEQ ID NO: 25541 - DNA, 457 bp, Zea Mays
cacggctccctcctagtgcctgtactgtacgtgcattcaggaattcagtggcggcttgcgggaagaccacgccatgtccagcgcagaaaatggccgcgtgtacttccagtctgtttggcaatgagcagcccgtactgttcatcatccatggcgccccatatgccaatgccactagtgtacgaactaggaactgaaaggcgatggagtcagtaggttggctgcattgagctgtaggctgttagctatcagcctatcgcaattcacaagggagatcgatgctaccatatggtcccatgtgtgcgtgtgtgtacagcaaagcttgagttgcagtcaccacaaggttcgttgacgtctcagctagaaactgagcaccactagtgagcagcgccgacagagcgttttttgctcgggatgggatgggtggacataccatgcagagaagtttagtgctcctagt

SEQ ID NO: 25542 - DNA, 382 bp, Zea Mays
ccaaacactatctcaaaagcatccatcttatcttccacataagtcagccaatttgccgcctcaaccggagtaccactgccatcaaaagtgtccaacttcatgcccatccactgtatcagagagaccactgacgagaaggggcacctcagccccaccacctagagcagcacccgcaaggacagtgcccccaggaactcctccactaccggcaccctgagcacccgcgccctgagcagcaccagcaggagcaacaggaatggcttgcctcagaatgaacaacttctgctgcatggcctgcatcgcgactaacattgccgccggactcatagaatccccactatgatcttgcgggctgccacgagccctacgaggcggcataact

SEQ ID NO: 25543 - DNA, 596 bp, Zea Mays
cacccttgcaaccatccaatgggatattgctgatgcatctgaagcaaagggtgtattagcggtggcgaagcatgacaccaagcaggatctcatagtcgaagtcacgacgcgaacgaaggctaacaagtatgccttagtgttggcatcatagctatttgagctctaggagactaagcaggggatccataactaggtccttcccgatggtctcatgggtaggtccttggctagccgtctgatgggcatgctcaagcatgtcatttggatcattcgagtgacacttgcagctggtgttcttccttggactgcaaatcaagcagacccaagatgagatttttgtgcactaagtaaaatacacaaaggtgccttgaagaactttgatatgggtgaggccaagcgtctttcgacacccatgtccaccatgacagcgcttgatgccgatgaggacggcaagcccgtggactaaaaggagtataggagcatgatcgactcccttctgtacctgaatgccatgaggccagacatacatttcgccgtgtgtttgtgcgctcgattctaggcttccccgcacacttctcacagataggctgtcaaac

SEQ ID NO: 25544 - DNA, 501 bp, Zea Mays
atcgccagctcagtccctcgccgccgacgagccacgcgcggattcgtgctatcgccgccgtgattcacgctcagattagctggatagcaccgggggttagtaaatatcacaccgtggatatgctccggccactaaattactccgaccaccgtacccgagctagtcacggttgctccggatgggttcgctggagattgccacctcacggccttgcgccacgtgcccaggcatcttaccacatcgcggttagtcgtgttaggcatatccggtgatcaccggagggactgccacggtgaagccactaagcgcttgcgccagtgcccctcttcctctccggtcgccgctcgtcttcatccaattcaccgggccactgctcacggactctataaattgagcacggcatcgggtccgtagggtaatcacacaccaagccaccaagtcatgcctccaattgttcaccagagctctccaatttctcatttcccccaaatcactcaagaa

SEQ ID NO: 25545 - DNA, 435 bp, Zea Mays
ggagtttgcctataagtgcagtgaggttttggcttgttcaagggaaatgaggtggcctgcctccgccgtagtccaggcggtggcggacgttaaccgtcgtggcatgcctccaccctgtaacccgacgtggccgccccatctaccaccatggtactccctatcgcgggttgcttactagtccacgaagggcttgggatcaatggcaatttctagggaggtggattgagctgaggcatggtggatgccgctatgcgcattatgacactggtggaattcccatccgggctttccgtgagaggcaagtagtcccccgttgtattggctgcatgacactactagctagggctgcaacttgcctcactacgcagggaggtgagtccgacctctgatcccggtaggataatgtccaagaatgagtcctgaacggggtccagc

SEQ ID NO: 25546 - DNA, 700 bp, Zea Mays
acatgatcaagagagaggatacgagagaagaagcgtcatgcgtcacctggaagcctccacacacaagcgcacgcgagagcatttcgaaccaacgatcaacgattgaacggtcaagaaaattcggccgacgtggataagctctttggccacgtttccttgctactttaataataaggaaatatgtcgcgacagcatcacatgcgacgctcccgagccatcggatcacacatcaatggcttagattagatcgcatagtaactgaaccggtacactactggagccattggatgagaaatccatgatctagattttatagtcgcgcgatctaatcctatacgcccactcgacgatcgacgtccacgatcaatttggcgaaagggtatgcaacattataatcccagccgcccacgtaggatctgacggcctgtatgcttcttctccctccagcatcagcactggcagcgccatgccgaggtgcggtggcaccgccgccgacgttcgtgcgcacgacactctggtgtgctacttccttcccaacccggtattacgtaatgcggaagttttagcgatctacatagaggtgacatacgacgttgctgcagcgccgagagttgtccttgtcgagcggctacaacccacctccctctctcgttttcagcgtggtgctaatggcgatctctcggtggcggcttggctccca

SEQ ID NO: 25547 - DNA, 543 bp, Zea Mays
ggctttcaacactgtctgctcctttattggcacaagagatttgattcaagaacatatagccttcagggtatggccgcttgtggaaagctaggagatgccgaaggagaccgccactaattctagtgatggtggtctggtccgactgaaatataccttcagatttagggagaagtttgatgagccaaacgacgattggctgaagtgtattgaagctaccagcgatgagttgcttggagcttactccaaggccgaagataatgctttgtccatagccttcggaggtcagaggaagaaaagactgaacagagtttttgatgcgatcggcttcatataccccgattaccgctacccactgcgaggacaggagaaaaagaggaagattgctgcttcggtcaccccaactgagcctgtgtcgaagagaaaaaaggtgaaggttctgacccaccggccgcgttacattgaaccggtcgtggtgcctgaatttggcgctgggtccactccagcaaccgaagcaacactgtctgcttcgattacacagagcgc

SEQ ID NO: 25548 - DNA, 530 bp, Zea Mays
acccttggcactatttcactgtctctctgacgtttgcactaaggcccccagacttttatttcttcacaacactcggtccacgacggtgaacgacgatgagcgcgccctccggcgaacttgtatcggccggaatacgtaatgaccggtgccctaacttggctaacaccaaatcccacccctggcgatcctaatctgacccttaattgcatgaatacggcccggagtccttctgcccacgacgacggcgaaacccgagggaaaactgaggtgttcttggtgatttagtgcagtctagttcaatcaatcgggtctacgagcaactggagactcattggaggctagaacaccaagcagagaagcatgaaccaacctgtagatggctggccacggtgagaagctcacagcggcacgaaaaaccaatttggggggaatcgcgaattgaggagctatggtgaacgtttggaggcaaggagcgatgcactgggcgcgtaacaacatagaggaacacgctgaacgctcaatttatagtg

SEQ ID NO: 25549 - DNA, 665 bp, Zea Mays
gtcatattgatgtgtggtgttttacttgagtggacataaacacaatctaggtatcccttgaatagaggggattattggaaaccaggtatcacaaaaggtcattagctagcccaggtatcacaaaaggtcattagctagcccagtggaaaaaggtgccttacaaccttaacatatgtttggatagttctctctctcaatttggctaaattttccatagtctttattttattttgagaaatgatgtggcaaattgatgtgtggtgttttacttgagtggacataaacaccatctaggtatgccttaaatagagggtagtataggaaacctggtatcacaaaaggtcattagctagcccaataacgtcttcatccactagttaaactctaataccctctagtgtgaatacaacgcccacaatatcatagaaacgtcatttgaggtttaaaaggtgatctattgttttgaattctttatattccaactttttatcaactatatggtggaaaaaagttgccttacaaccttaacctatgtttggacagttctctcgtgcaatttggctaaatttcccatggtctttattttattttgagaaacgatgtggcaaattgatgtgtggtgcatccactagttgtactctaataccctctagtgtgaatacaat

SEQ ID NO: 25550 - DNA, 749 bp, Zea Mays
gccaggacaccagcaagcccaaaacctatgatggtttgtttgggagcattcaatagaaagagatttttagccaaacacgggtatgttcaatgctcccatagcgagctatgaaacaatgattgttttagtaggagataccatagcattgatgaaatcattcatcgcggtcgtcgaaggcatcacacatgattggtataattccttgaaaccactttcaatatgatcatgggatcaaatcaaggattaactactcattacatttcaaaaggcatcatctcaaaaccaaaacaaacaaggatatcataaactctatacagcaagataacaacccactatatatctgattacctaaatggattcatccaactcaaggcacatgcatccaatgtgagagggaaatgtcttttaaccatagtctctaattaatttcggtgcttgatgaccatcatgaccttatgtattgactagtttgcctagttaattgattcacgggtgcataagtccattcatctcgattctaagtcgactgtccggaataacgtagattattctggataagagctcttttttggaaaactcatatatgtgtgaaccgttattgaccatgttagcacccacaaacaattacctgatatcttcaccgaactcttagatgaaaagatattatgtgagcttaggaatgaattgaatgtcttattgtattctcgaaacattgattgaaagattgcacacatttcttatttcatacc

SEQ ID NO: 25551 - DNA, 329 bp, Zea Mays
gtggtggtggtggtagtgtgtgttgctaattattgtgaagctgagcttgcatgtcgaccatggtgttggacatctgttgcagcagctggatttgggcggcgacaggcggaggatttggtggattcgtctctggttctagattagctactgtcctccctcgacaaatgtgtgcgggtagattgacacctcgtcctttcctagtagaccatatgagttagagacataaggtaaagtagatttgtacataagacaaatgagtaaatatgaaacacttgacttctaggttatgatatcttgcggtcacaatagctcagtagattagaatgaca

SEQ ID NO: 25552 - DNA, 289 bp, Zea Mays
tggttcgtggttgctttcgtcgtcagccggcgaggcattgattgttcatcgtttccaagtctatgctccatctcctctcttccccagccctggcccctccgtcaatgtcatcggcggtgccgaaccgagcttgcctcgtctcgccggactgcgctccatctcctctcttcctagccccgacccctccgtcgacgtcgttgtcggtgacaaaccgagcttgcctcaccggtcccactgtcgtgccacgaatccatgaaccacgtcttccactaccttgatttggaacgaa

SEQ ID NO: 25553 - DNA, 300 bp, Zea Mays
atcgatagggcagtcatgaccgagaagaagcgcaaggatatggaagatcggaagcgcaagatgagtggaccacagtctggaagcatcagccatccccgcttctcaggcagttcatctcagcaaggcaggcctggccacccaaagggatatcaacatcagagtcagcgtccgcatcagcagcagtttcagaggcagtacccacaacagcagcagtatcgtcagaacagccagcagggaggtaatcagtatcagaagcagaacaaccaggcacctcgccttcctgcccccgcaacaaatcag

SEQ ID NO: 25554 - DNA, 481 bp, Zea Mays
ttcgtacgtgatgggccggtcctgcactggtcctgacatgttcgtctaagtgttcaccatctgggcagctgatgtcacaaatgttgacgtagatcgtcccaccaagcatgcccgaatgtgtcattgtccaaaacccaccagcgagagacgacaggcgacatgaggagccaggaggctcctaggactgttggtgggtcccggtctctcgatcaacggcccagatcctggtgtatggtcgggcttcaaggtttgcctagcatgccacctgacctatacctgatctggaaggtgtcaacgtgctccgaaaaggttccttgtatacacaaacacacgcaaacatcagtccgagcagtgtttggctccctgggtcgtattggttataaagagccgatcactctcccttgctcgcaccaggtccatgcctcggtggcatgcggagctgatggctcgcaaaacaccacttcgtccatggcgagcggac

SEQ ID NO: 25555 - DNA, 414 bp, Zea Mays
aaactataatcttacttcagttagtacatgtcacttttcctggctagcatctgataaaatatgacactgatgaaataataaacctaatagcataaatgaggtaatacagtttgagcagcgaggtgatgcaaatgaaacaaaaacaaagcaaagttatagaaggtagttgggggaaatacactgccagaccgtttcagataaattttagagagtttaatatttcctgaccttctctttctcccgctaactcttcccatcctatatattatcaaagattaaatgattttatttctagacatcaggcgttatagattttccgagtaatgatattgtcagtgcccccactttgtccaagatattacagatgcagtaacaccaggctagaaattaagatgacaacattttacagcctga

SEQ ID NO: 25556 - DNA, 380 bp, Zea Mays
gtgggctcagaatttctggcattttcattgttttttccacttgtggctcttcgaccttatcatccttagcttcggttggcccgactgcaggtaccttcggcactacaatcggctcttcaacgctctgcataattggagcagcttgttttgcttcggcatttgaagaggttccttcgccaaatttaggcactacgaccggttcaatatatcgtggccggtgggtcagaaccttcattttcttgcctttcgtcatagtagtggtgaccgaagcgacactttttctcttcttcccttgccttcgcagtgggtagtgatagttagggtatacgaagccaattgcatcaaataccctgttcaatcttttttcccctggcccccga

SEQ ID NO: 25557 - DNA, 554 bp, Zea Mays
ggcggacctggagatggttggccatgacgcgacgtctcacggtggcgcgggcaacagatttgggggaagaatgaaattctttggctatggtggctaatcgagggcaggggtgggtgctctggcttcgtaacaacctagcggagctagcagcgcactcaatttatagtgtccaagagtggtggctccgaattttgaaaggggagactggcggccgaagagagggggtgagtcaccggcatgaactaccgtggcgttcaccagagcaatgtctcaggcgatggacagactacctacggctatctactgcgacgtggtaactcttctaagtatgtggcatggctacgaagggcggcgaactccagcgaggacacctcagtcaatcgtgcggcaagtggcatggtgaatagtacggtgataaggctccaacccttccctgcattgagatgtttcaccgccagccgttatccacaaaccagggcgcactaatcgcaacgaccagcgtcaatcgcggcgtaaggtcacccacggcgaggtacactgaatctgaagatctt

SEQ ID NO: 25558 - DNA, 652 bp, Zea Mays
cggccgataaacccggaatttcacaccggagcccggattcgtggtcatgccgccgtgtgctgcagctagctttcctctccgccctccgacgatggtaagcacctccctctgtttcgcaaaaatcctctcttcgtttagcgtcggtcggatcgggggttcgagcactagggcctaggatagaggggtccgttcatgggcgccgccacggcagatttgtgcgccgccgtgccctgtggctggggggagaagaaactcgtgagccatcggatctgtgatgaagggtggggagatcttgaccgtgggatctcgatcgtgggccaaagaatgatgcggtagatggcggctcggaaattcgatctggaccactgatctgttaacagacggatcctgttggatctcatttcataaaatcgtgaccgtaggattaggatcttacggctgtactggttcagatggacttgatttaatctcatacgtccaaccctgatccaacggtccaggatggcccataccccttcggtcgtagatagttgctaaagagccctctgacttcttttaaataaacccgccgtccattgatggcgtaagattattacggttaggtccagatttttacggaatagaccccgaagacttaagaaataatatccgc

SEQ ID NO: 25559 - DNA, 463 bp, Zea Mays
ggggaccctcacttcaatgatgacaatgatgatgaagacaatacctcggtggggttgtaaggctttggcctcccccttttgggccgtttggtgttttctgtacactggttggcaactattttgttggttaacggctggagctggcgcgcatgtggcactctttgctttttctgatacgtactctgatggaatcgaggtttatttcctgtttgatacaattaactttgttggagtcaatgactctttgctgcctgaaatgattaattttgatggctggaggttcggttatttgttaagtgggctctctttgcatttttcctgtcgggcccattggatgccttattcccctcatgtcatgttgattatgtggccctttcaattctactgtttatggatttatactggaacaaggatctattggtgtatgctatgcataccggaattccttaattttaagactgat

SEQ ID NO: 25560 - DNA, 304 bp, Zea Mays
cgaggatttggtctggattggccccacgccattaaaaatggtcgctaaacatgtcttgagctttatacatgggaacccatcttctactgcatgctgcacccaattgctactcccttgtgtgccccgtgcggtcgtatgtcgtccccttcgttggtctatagctccatgttgcccccacggcatgcacgttcattgtcccccatcgcggcatgtgagccacccccaccacgtgcacatgtatcgcctccctctgcctggttgagctccaacgcccatgcctaggcatgcagtgtcttctagtgcc

SEQ ID NO: 25561 - DNA, 312 bp, Zea Mays
gatgacctttcctcccactgcacttacttaaactcccaggtggaaagcctggagcaacaagtcaagaaacttaaaagggaaaaggcgtccctccaagagagtctcgaaatagcagaaggcgaggaaaccaacactcgtgaagcctaccaaaccctgaagatggattatgacaagaagctaaagaagctcgcccccgcgaagaaaatccgaaagaagaccagaaaccaaggatgccagatggagcagaaggaggaagcccctccagccctacctcctaccaggatagaaaactcgtccgacactgaggctatg

SEQ ID NO: 25562 - DNA, 714 bp, Zea Mays
atcagtactaggagggcaggtcaacgaacacacatggaaaagcataagcatacaggaggaaaggcaatgcgcatgatggtcgcatggggtcacgccagtgggcagacggtgcgcgtagtggagggacgatagtgcagaggagtgtcgcacgaggtcgcaatggatcacgcgcacggagcgagatggcgctcgggggatgaggtggacgtgcaatcgaggatcgacgacgtaaggaagagctaggacagaggctaaaacaggacctaagtgtctgataccatgtagaagattagagaatacctcacactaaattagcaatttagcaaggtggctttcatatatatactcaagtacaacttggaatacaagtaagatgatatacatgtgttggactatacatatctctaatacattacctggtatggtttctttggaacaatagcttcacctttctcatcgtattccccagcttttctctttgcctttccttcacaattagcggctagatgccccacctgaccacataagaagcatttgtcctgctgcccaggtgtaaaaactacctgcaaacataaaactcataatcttaaactgaagattttacaagaaaaatgttaaaatgaagtgaatatgaaggagagttgtgtatcatcgtattaaggaaaaaaatgtaataaatccttacagatacacatccacacccactcacactaa

SEQ ID NO: 25563 - DNA, 340 bp, Zea Mays
ttgaccgctaaccaaaccaaagcttccttgtgcacttgtttatgtcaaaaaaagtttattgtctgttcgcacaaaccatgtctttcttcaaattctttttggaaaccttgtccaaaatcctcattaaattctcctctgctcaacctagaagccatctgggttgatgatctctcttttcgcctggatctagtaatctcttcctttgcgaatcatgttgtggcttatcatccgaatctctggatcccctattgatcctaccctattatctagatatctgctataacccgttctcaagtatcagatgttgatcttgcctaaatctctcatttctggtcattct

SEQ ID NO: 25564 - DNA, 354 bp, Zea Mays
acaggaatcatcccacttgctaatgacatcaataagacctacttatctattattcacaacacgaacacagtcacacgccgcattctagtttccaacataatccttacataactcgtaatccaactacccactaacgataaatcactcacgacaactacacaacaaccggttaatttatttggacaccgcctgcctagcgtaccactagtaccccacattttgattcaagctcaataatacatcctttattcgattatacaacagcgacctaagcatcgtgttacccaatgtgtacatcttttctcgtgttacccaatgtgtatcacggcatatacccgcacacctcaaacaaat

SEQ ID NO: 25565 - DNA, 314 bp, Zea Mays
ccaaacacgtacgtagcaagcaggagtgtaatgtatgggcgtggagtatgtacgtacgtactcctacggtagtgcacgcgtcggcgtcgtacgtccggcctgttggacgggatactagtgcagcagacggccacgggcccacgactaccacatgttcgccaggttcgaatccgaatccctgccggtaccccgtaccccccgtacgtgatggatcgacgtcggcccccggaaggaatggatggatcgacgtcgtcctacccgagcagatccacatccacccacgcctgcctggccactgaccaactgacgactcc

SEQ ID NO: 25566 - DNA, 410 bp, Zea Mays
gaaaatacacaaaaccatgcatgaccatttctagctaagtctgagtttattacaggggggaatcacaaaccccggcgggttgcagctaaccacgccacacctagagtcgcaaactttttaggggagagttttacatcatctgccatccaggtaggataatatgcatcagaaaaaacatcaacagttaaaagttccgaaggtggaagtctaccagaagaacaacaaaacgcaaacaccatctgagacattaacatttttaactacagatgcgtctgtctaccggtctccatccaaaatttctattgaaaatttctttaaccagtcttcggatttgcaagcttccttcctgtagggtccttccttccgtctttgtgtggatcatggcattaacattttttaaccacagatat

SEQ ID NO: 25567 - DNA, 372 bp, Zea Mays
tgctaaccccgaatggatcaggactgattgcccaagcaattgatgatgaaccccttccatcacctccagtttctctgtcagctaatccaaaactgccatcatcttttcccaacgaatctcactctgtttcgcttccaacgccatggcaaccaacaccagccgagactgcacagatggcttgattgttgggaccgtcttgaccttcttcaacgccaacacgccttccgagcagccagtgaccgtagcagcaacttggactgagtgaaacagagagcccacactacgctgcgcgacgaaccagattgaagaaaaccagtgatgccttgtgtcgaacaactgagataccccaagtctactgccaccacacgccgc

SEQ ID NO: 25568 - DNA, 465 bp, Zea Mays
ttcttatgctaaagttattgaatgatcaaagaaaatcatgcttataatgcacccattctatttatatggttgacacaaggagaagtggaggagggagccatgccaacccacctcgacgcgaggtgcaggcaccctagcaagaggaacacccgcaaccacagctaccaccacccccaccacagatgacaatggatcttgtgttcacgatgcagactcacgccttgcaaacctcaggacaggtagcggtcgctctttagcaagcccatcaacaaccacccccgccagttcaagtatggatgtcttagctgcctcgtgataagcataaagagttcatgaagggacgtctgcccaccttttctcattcaggagatcccatggatgtggaaggttgacttcatgcaatggagtgagagttgcacattgtttagtgcagttaccatgagaaggttctatacaaccctcgct

SEQ ID NO: 25569 - DNA, 664 bp, Zea Mays
tttctcagggtctcttatgcaaaatggcccggccgaaggggtacgggtaaactctagctgtccgattagaaacctagggctcagattaaatctttcccctgcccaaaccggtactgcatctagaccgtcggatcgccatccaacgctccacattttaaatactagaggtccaccccgatccatccgattgacatctaacggtcgcgggcgaagggttacccagatctaatcctacgcgatcaccgcggaacggacgaccagatgcacctcgtcaattcccccgcaccaacacctgagcaggggcggcgccgcccgaggttacggcggatctaggccggagttgaaggcgtccggcatacccccgcaccaaatttctccccgaaaggtcctatacgacgagaggagactggtaaaccgcatggaggttgtcttacctcagatcgagcgccgggaggggctatccacgtgatgaggcggtcacgcggcggatactggattccgacaaggaattgaagagcttccggtgatcttcacagcgtactggggccacggctaccttcattgccaaacggtgaagcaccctgacccgccagtgcgcccccgacaatgacttggatgaagactgacgtcggcggtcatccccccattccgcttcctcccggtg

SEQ ID NO: 25570 - DNA, 396 bp, Zea Mays
ccgagggggtagctttggcatattcaacaacttccatcttctgtacaatagtcttctccaaagagtgcagcttcggccaatgagtcaaaactttagccctatttgccttcggcgcggcggaagaggtcgtagtttcgattttcctctttattccttgtttccgagcggaaaagtagtagtcaggataaataaatccaatcacataaaaaactctatttagtcttcttttgcctcgagcactgaaggtagtgttcatggcttcgtcctctgccttcgtataagtccccggcagctcatcactggtcgcctcaatggcttcaagacattcgtcattcgactcgcaaaattgacttttgtagcgatagctatacttcaggtaaatcagaccaccttcac

SEQ ID NO: 25571 - DNA, 366 bp, Zea Mays
ctattttacaataagaccatactccaaatagtcttcatataatagatcaaactattctatagtaatactaagtgccttaagatcctttatcaaaaaacaagctcactcgaaggcgttgattaggtcctcatagctttagcatctctcgaggcccctccatgtcatatcctttctaattgaacaaacaaggcctagaccgtgtagtcgcaccgtagaccatgcctaataggatcctatgggatagttgaggcctctgatacctcctcttggacctctgaggtggccccttcatagataacaagaggagctgaggagaccttgtccaaacaatcctcaaattctcctaagtactatttgctattcaaa

SEQ ID NO: 25572 - DNA, 366 bp, Zea Mays
tgcagagcaaaggcacgcacggaccatgatgagatctgctcggaggagttaaagaccaaccagtgccaatctccaatctcgtgaccagatgcagacgcgtgcgcagaggatatcatcatcatcgaccgcaagcagcagagtgccagctccgggcgcagtgctacgaacgcactgactgcactggctaatcacatgtacaagtctcgtccgtagaccgtagtagacagtagtatacgaccgtactcgtacagggaaaaggtggatcatctgatccgatcacggatggatgagaaaaagcgacccgacagagaagagcttcagagttgagtgcatccatgccatggataggtaggcattccgatcccc

SEQ ID NO: 25573 - DNA, 272 bp, Zea Mays
cgccgtgttgtgggctgtagatcccagatcgggtggctagggtcgcgtaccgcttcggtctgtacataatctaatctgcaccgctcgtgctggatcggacggatctcgtttgatcataccccttcgccttgacatttattctaaaaacccccttggcttttctcaaatcaacccgccacccgagtcagtgttaagatcattacagagaagacctcggatttacaaaatgaaccccgaactcctgttaaattgtgcctgcagtacacttattc

SEQ ID NO: 25574 - DNA, 461 bp, Zea Mays
atgtgtaattcccttgaacgaaatctagaagatgatgtttccatcagacttagcctgcatttgttcttggcgggcaatagttgaaaacagccggtttcctgaatgtttgtggactcttccggttcgtcagcgacggccacggtggctgggctttgcttaagacccttgccacgaatatttttcccatggtatataataaaccgtcacctgcttaattaatctgcagagataagagataggtgccgcccgtcagagattaacacgcttttttaacgaaatgacgtgtgagaacgtgacagaccaaaatacatgtagctgagcaaaagaatattgacgtgcaccggcgccagttgtcatgttaggcgttttatattgggacaaaagcgtatgagagatcagagctcagctcagtctctgtgtgaaaatggccatgtcaacaccaacgagtcaatcaagcggtt

SEQ ID NO: 25575 - DNA, 407 bp, Zea Mays
ctaagactaaaccaaatccatgaccaggggagtatttcccccaacataattgcactaatgatcaaggggtgtgctctggccacgatggccgtgaacatcacggcaataccattgtgttcctagcgattggtgggctcctagttcaattcagtggctcggcaagcatcgtagacttaagggaaagcttgaacgagggagagaaggagatgaactgaccggaataaggctggttgcggtgaggttgggtttcgggtggcggagaatggatttggggcgaattcaaaattcgcgagctcgggcgaacaattgctagcaatacgtggtggctgggtgggtgatgatgttgtgaatacgtgtccagtggcgtggcagtaactccggtggcgcttagggtttatagatccccg

SEQ ID NO: 25576 - DNA, 427 bp, Zea Mays
aaaaatcacagatttttggatcctaattgtcttagcgatgtatacgatgtagacagtaattgtgacacggtttaatttgatttaaacccgataaatctttaacggctcagatttgaacgttatcgtgatagttcagatcgtattaaattaatctgaaaccaaacaaaaatctgttcgctatccgggcagttggatcagggtgtaaaacaattggaccaagccaaagaacatcggctttgtatatggagatggggtttgatttagttgaaatcagacgaaaatgtatctgtcctccgaacaccattaatttctttgctgaggacagcgcactcggtcgggtttgtttcggaccaaaaaccgttgtcgttgagttctaattattttgcttgagatgaaatcggagaactgagctgaatttccgaattcg

SEQ ID NO: 25577 - DNA, 439 bp, Zea Mays
ccttgccgccggcgacccccgcgcctggattcgcgcccactagtgcctggataacgcctcggggtgaaaagatcttcaccgtggatgagaccaagggctggccgccgtacccgcttgcctcacggccggtccagatagcctcgccggagttggccacctgctgtgcgatggtcacgtgccttgaagctttaccacgtcgtagtaagccactttagatagctggttcgtcgctggtaagcttgccatagtgaaagccatgcatcccttgcgccagtgaacttctctctctccggccgccagcacgccatgccaaaattaggagccaccgctctgggattctataaattgagcacaccgccagctccgttaggtaatcacgaagccaaagcacccgctcctgcctccgattagccaccatagccctctaattcccctttcc

SEQ ID NO: 25578 - DNA, 1522 bp, Zea Mays
ctctggcaaaacgggttgtgggtcttgctgaatgggctgctcattcacaatccactggtcccactctccatggcccaaatcatcctgctgagccggcaacactccaccctcaggctccggaggaaagtttaggtcaagccctgccggaggcaagggctgacccagcccgaagaagaccggggggagctgatgtccatcctcgggggccggagggatggggtcctcatcctgagcctgtccgccaagcatgagctgctgaataatttcacattgcacagtccaggagtccccagcaaaaccctcagcctccgaaaaaacaataaattgggggacttcctccagcgaagtgactcgaacacggagcagggttctagagatattactttggtcctcctcccataaaatcaatctcccaaacgacccaatggcggcctgcaaatactctgaagaacgataatccaagggaaaccccaaaagcataagccaacactcatggttgaagagaagggcacggtgattccaagcatcattgtgacggaccgcagtgaaagtagcgtctagatattgctgggggccgagcagaaccaagttatctcgctccagcacactacggaattgcaccatcacttgtcccaaatgtgagcgctgaatggcacggacaccaaccctatgatgctcaacaagatactccctgaccacatccctaaccgcagggaacaagacctcgtgctccggtaaaggatgaatattgataatcgcccagtcctcgtgaaatggcggcaaacgctgcgaaactgacctgaccataatcccacgatgttgtaccaccgcggcgctgaatcctggtgggaggaacggctccgggtctacgcgccggtacgccattgacagattctcagacgatcgccggagagccaagggcgaagaagcgggttggggttttgttgaagtgacacccaacgcgagctccaaggacgtttctggcgcctgttcggatttttttaataaaaccgccctggcgaactcaccgaaggaggcaaaggaagggggagtcccacccgtcagggaccgggaggaagggcggaaccaggaaccgaagtccaagagacgaggtgacccttccaaagggcaattactttcgaaggaagggaacgaggagagagggaaaccaaattctgattttttgcgtttgcagaacaattccaaatgtccactggctttacaaaaaaggcataggaaagctgaggaaaccgagcctaacaattccagccttccaattccaagcccaggcctgaaaggcccattacgcagaatgggccgccactgcaacctacgagaccaaggtcgcccaacagttgaatttgaaattggctttgaatttgaaaaggagcaatcatcacagccccgacatccgtgtccaatcctgcacccgttaagcctgggaaaacccaccggaggagcaatcccacgatgaagatcacgcgacgaggcccccgaggtcgaagaggtggcaggaaacctc

SEQ ID NO: 25579 - DNA, 576 bp, Zea Mays
aaaggatgtacaattttcaaaataaccaataacaaaagaatttcagatattatcaatacttttgctacgtactgtttttgtcgaccctctccctgactcttcatttttcctcttttttgtgcatttgaactcacctttctctttgtttccctctctcttttcttctggtgccttttgaacacactgtgtgcttatttttcagcgaaagaacgaacatacatggaaggtggaggttttaggtattctttaagaactactttctttttgaaagttgaaagggaagacatgattaaggtcttgcggaatttgagtttgtttcttttgtctagctgcatgactgtggttatggatgctcgcaaagggatatcaccacttctcttgaagtagctggaagatatcttttttgtgcggaatacttctggcaacttgagtaccttcgaaaattgggagaatttagatccaaaaaaaggaacctaattttggtttgtgacatttcaattcgcagagctgctaacgtttaagagacttctgcatcattatatttgcagaagaggaagaagttgagatacagaatag

SEQ ID NO: 25580 - DNA, 517 bp, Zea Mays
gctatcttcatgacaggtagtagtgcgctgggcttctacgctgaaactaattattagttgttacaaccaagtatactaaaatctatatgcttctacacaggacaataattttgagagcgaggattaaagagcacatgactgtaattataagagatatggcgtgttagaaatttgtagataaatttggggtcgatagctaatcaaatttatttttgctctatctaatctgttcatagtgtttaacacaatagtcacacatatactttcccatcttgatccagctatagtagattttacttcagaatttatttttggtccatctcatttattcacattttaatacaatagttacacatatactttcttatctttgtctaaccgtagtgtactttagttatcaagtactttaacagtttttttcatctttttttatattttttgtttagtaccataactctatgtgtttttatatgtatttgtttgaaaccttagcttgagctatgtgtttgactaaaat

SEQ ID NO: 25581 - DNA, 977 bp, Zea Mays
cacaactcaccgcagtcccaagccctgccaaaatcgaatcctccctctgacccgcagccaaaacagaagtggcaccatcaataggataatcgggtaccacatcatcatacaaggtcagaacaccaggcgccgccagctcctcaaccgcaacacacgggagggtaggggcatcaactggtcctgccaacgaatccgaggagacaggtgccgccaaaacgtccactgtagttaaagggcaacccgaatcaccagtagccatcaacacatccaatagctccacatcattagaaggtccatcacgcgccgacacggaatgaatgcgtgggcccagccgcgagtgcaccgaagctcgaggcaaggaggtctgatcgcccagcctccacacccgccgtgcacgtcgaccctgctccggttcatcatcagagatccggtggaggtggcggcagctgttcctccccaatgacacccttcgacccaataatcttcactatcacatggaacaccaacgagcgtggaatccaaactccgtcttcatcgaggaccgccggctccacagcatgcaggtccaacacctctggcaaccccacgggagagcggcaccatgatctcaacctgatgactgacaagtcctccccgccgatagaatccgggtgcaggccctaaatcaggcagtatggaccaagcaaaacctccggtgtctccagtccccataggtgagcagggataccacggagctcgacgtcaatgagggaagacaagacactgcttcccgaagcaaaagcctgcctagaccatctcttaacatgcaacctcagtggagggacgtggagcgacgatccctcactaaccactcgaacaaccagatcctctgaagggaagaggacaagaaaggagcctaagcagcacgacgtaggcggagcgtatcagcgtcaaggccaaaccttaaggcgagcgcatctctaacctccgtggcacaa

SEQ ID NO: 25582 - DNA, 324 bp, Zea Mays
cgcttggcacgacgcattgtcccgtcttccctggtatgtgggccactattcggactctaaggcggaggtccccttgcgactgaagttgactgaccccggggcagtgggggcacatctgaggccgtacgtggaggcggccggtcatgttcgatggcgaactcccatcgctccttgggtatgttgcacgtatgcctggacatgggttggtgatgatgcgtcttgtcgtaactgtcgtgggtcaacaacgtctggtcaggtcctttccctcatagggttggccgatttggagttggtcagccgctccgtctcacagggttactcgat

SEQ ID NO: 25583 - DNA, 318 bp, Zea Mays
tgacgttatacatcatttattcggatgatgattaagatgatcacgataattacagatttcgcccagagttattgtaacggctagttggtcggttggaggttataaatacgcctcaacccatctattgtaactctcttgcccgttctaacgattgaggaaacccatttaagtgccttggatgacatccttgcacaccaaatatttgtgaacatcttttgcggttagagaaacactccacccacttgcatattgtggatcaccatttggatgagacttaagagctcctagcacatcacacataggtattgtatcttatga

SEQ ID NO: 25584 - DNA, 392 bp, Zea Mays
gattagcaatcaactgcaaggccacttttgaaaccccagacctgctaagggcatcagcctccacatttgccttcctcgggtgataatgaatagacaaatcataatctttaatcaattcgagccaccgacgcagcctcaaattcagctccttctgagtgaaaatatacttgagacttttatgatcggtgtaaatgtcacaagcctcgccataaagataatgcctccacgactttagagcaaaaaccaccgcgtccaattcgagatcatgagttggataattcccctcatgcttcctcaactgccttgagccataagcaatcactctgccttcctgcatcaacacacagccaaatccaatttgcgaagcatccgtataaactgtgaaatgctta

SEQ ID NO: 25585 - DNA, 286 bp, Zea Mays
ctccccagcagccgtcatttcctattccagcacaacagtccactataacagtagcagcaccaaccagcacgggggcacaacgtccatttaagaagctcacccccggcgagatggctgagcgccgcaaacagggactgtgttacaactgtgacgaacaatacgttcgtggtcatcggtgcccgcgtctattctatctggaggtcacagattctgaagaggatacaggaatcgaggatgaatccaatccagaggatccagcacccattatttcactccacgtcttaac

SEQ ID NO: 25586 - DNA, 319 bp, Zea Mays
tgtcgctgcgcgccgtgggcagggggatgagggtcgattccccgggtggatggcggtatgcatgggcttgatgtcttctccgcaccctgttgcgcgtatcgggttcaaggttgtgcaccggggcgttgagttttagtcagcggccatggcgccgccgtgctgggtggaaccaccgtcggcgtcgggtcggtcaggaaggggatgaactggataccattgactcccgatccgacgactcggattagataaacgctgtggccgttgatccttggtcctttggccaccattggatatcgggtcgacttagtacagatctaat

SEQ ID NO: 25587 - DNA, 804 bp, Zea Mays
ctcaattcctgataaattcaagggtctctgcgcaagataacctagactcagggaatagttcctctggacggcgggttggtttcaaagtttggcggggtttcttttgtaaaacgtacccgcgaaggggtatcggtggagatgagccattggatcccaaaccaccgggcgagattaaatcgtgcaccagatgatacggtaagttatatatgcctttggattactatcctacgacccacgggacaccatactacgatcagatctgatccgtccatcggtcaatcaacgatctggatgtaatataacgaatcggtatttaactgcatcccccaccatccgatccaaaacacacgactcctggcgcatcattccaacatctaatctggaccaaccctatgcgatccaacggtggacccgattcttcctccccgatgcgcccaggcggcggcggagcggccacagagacggtgatctcaccggagatacccgatttggcgccaccatgcatgtttcccccaaccaaatttgtgcaaaagcagtcctgaatcacggcgaggatcgtggaaggttactcaccggcctagctgctgcgaaggcgcacgcccacgggagatggcggcacagccccaaatcttgatttccgatgaggaattcggcttcgccttgccccccaatcgcgcccggaatgaccctatgcaccatcagtgtgtctccccgaggcgcgacagcccagattcgaggcctcaactgtgacgcaacctcgggttgacggcaatggctcccatgacccgcggcggtgcccttctc

SEQ ID NO: 25588 - DNA, 623 bp, Zea Mays
taatctagctggtatatgatagttcctgaactatgtactgaactctgcccacgtaatagtgtcagcagcatcgtgggcagcagtatatgaatcccaccagtcagcagtaggacctgtcagacgtctagaagcatataaaaccttctccctatcagtgcattgagcaatgttcaacatcttctctatggactttagccaatcatctgcatccagtggatcagaagagcttgcaaatgtaggtgccttatgactcatgaactccctatgcttatctcggggtggaactggtggtggtggtggaggcaatggtacttgttgctgctattgttgttgttgttgaaattgttgttgttgctgctgttgcgccctcctttcctggcgtatctcctctcattcctggcgtaactcctagcgtatctcttctcattcctggcgcatctcctggcgttcctactgcatctgagcatgcatatccgccatagtgtccgccatttgttgcatcatcctcaactgagctacaatcagtgggtcaactccgcccggtggaggattaggaggattcatctctgctggctgtggctggggtcgtctatatatccaccgagtgtgtcgattaggaggca

SEQ ID NO: 25589 - DNA, 284 bp, Zea Mays
cattcattgtgtatactgtatggatgtgactgcttgggaaaatctattgaaaattcctggacgtcccctccccaatgggtgtaaccaagggacggcttggtacgctgagcgtttagcaaacttcccttgagtagtaacttgacgtgatcgcggggtgtaatcatatcgtccaagcatttgacctcagtcccaatggtgtcgtgttacgtgaaacggcgtttgccgcctgacttgtttctagacgatttgaattgcttattgaatacttacgactgttcagtgac

SEQ ID NO: 25590 - DNA, 277 bp, Zea Mays
cttcgacaagaatgaaaagttcgtagggaagtggatcagagagttaccttatgtggtttggagcctaagaactcaacccagtcgagctctacatggaaacacccccttcttcatggtctatggttcggaggcagtgctacctaccgacctcaggtttggggcaccaaggctggtcttcgaaagcatagctgaagcagaagctaccaggctagaagatattgacgtgctggaggaagagcgatttaattcagtcagccagataccagcagaccctgag

SEQ ID NO: 25591 - DNA, 439 bp, Zea Mays
atctcactcttgtgcttgcgacgtctttgtagatgcccactgaccataactttcttgtctttttgggattctttcctcttttgtcattaaattgccaccatctagcgaactctagtcctttggtattgacatgcttgtacccctttaatgcccttgtttcaaatacttgcctctaaatttctactacctacttagacatttcagtttatatgttcctgaccttcctgtcttttgagagcctttcctcttctattgttaagtcgctatcttttagtaattcgtactcccttggtcttggtatgctcgcaccttcggaatcttgcatactcttactttttatataaatgctaacctttgtacccccaatgtctgtttaagacatttcagtttacatgctcttgaccacctttgtttcttcatgatccatgagcgatcgttc

SEQ ID NO: 25592 - DNA, 417 bp, Zea Mays
gagattcgtgccacaagagaggtagataacgttggggcggggtgacaatatctggggagaggttaatccagtcactggcaggaccggccgtcgtgtctcgccgcggtcagtcgcactggcatcaccggagctcactgttgtctgaccgtgacacgtaatgatcactcctccgtgtcgtaagggtcgtggcaagcagccggttatagtccgtagagcagttccccctagcgcgccacggtgtgcaagccactgtgaaatatcctggccgagtaaccgtgatctcaatccaaaactcatgcccagttcaatcgagatctataaattgaagatatcctctgctccacctctttgttacacgtccaatccacccctagctagcttctatcgtgcaccaccgcgtcctcatttggggtttcc

SEQ ID NO: 25593 - DNA, 272 bp, Zea Mays
atctgaccgccaagatcagatcagacactacataaaccggtatgtactgctggccgctggatcaatagttgacgcttcagattttaaattacctagatcggttttcaagcatcaggtccagatcggacggcccaggcgcggcgggtcgagccagccccgagctgttcaatctcgaccgcccatcacgatttgaacagttggcgcaggatcggacggtcgcgggatggtcttcttcctctagccacgcccgcggggaaaagtgagcacccagg

SEQ ID NO: 25594 - DNA, 279 bp, Zea Mays
tctctgtctcgctcgagcctctcacatctcatgcctcccatctcctccttgcccgaagtcaccttgtcctaccatcgctccatccgtcttgcccgagccagtctcgggcaaagaggataaggcacacctgaaggccagcgggggacactcgcgtttaatgtgcacacctgtcccacgcggaggcacatgagcatagtggcaacaagacaacaatcgcgtccaagtgcaacaacatgattacgcttgcaccattgtgcacgcacgccgcctgccatcccc

SEQ ID NO: 25595 - DNA, 486 bp, Zea Mays
aagtttttccgagggcatatttatattggagaaccaatttaggaattcaattttcccatgcggagaacagggcgcgtaaatattcgtgacaatccaggattcattcgacgaattagcagaaaattcaaccgaaagagcataatcattctggtaaataacactgcccaccaacttcgagctattccaaacaataatgaaaccacccgaatttcccaccaaggggacaaaagcgagtgagtcaaaggagttgggacaaaactttctgagatcagccctgtcgaaaaattccttcttggtttcctgcaagcagataatatcacatctggattccctaatcgcacaatgaataccattcactttaaccactgaattgatcccacagacattaaagcttaaaacagaccattcagaaaaaataactgcgttgtgactattcatcgggggcataatcaggtttgtcgacgaaaggaaacccaaacccaatta

SEQ ID NO: 25596 - DNA, 1146 bp, Zea Mays
gccgcacccaataaggccaccatgaggagggcccccgcccccgcgaccgcccttgcggggtccgcgatcgcctccggagctgggagcctgacaaggaggtccagaaggtgtagggatggtaggagggcacatagccccccctctcgacgacatagggtgagggggctggccgacagaggacgcgatgtacagagtcatggcggacgtggtggactcagcttctagggcgagctcctcgagaagtagctcgttgcggacgtcgtggaaggaggggaagggctcaaagtgcttgatgaaggctttcagatgtttgtagcgtcgctgagactacacagaaggttgaggacaagcgtgcgatcagagacgggctccctgagatcccgaagagagtccaccatgcccttcattcgacggtagtactcattcacgaagaggtccccctaggagaagagccggaaggaggcatcgaggtggtgagggtgggcctctcggttgcagaggaactaagccttgagagcaacccatgcctggcgagcgggtgcccccccgcaagcggacgacatcctaaagctcaacggtgagggtgccaggatccacgagagcatcacaatattcattcggtgccaggacaggagcaggtggggagtggcgttggtgacgacgtggtcattgagggtgtagcgttgaacagtgaggagcacctggtcgcaccagcgggtgtagtgagcggacacggggtcgaggacgacggagacgagtgcctggatgttcaggacacccgctacatgagcgtggaggttggtgatgactgcgacctcgaactccgaaggaagtggtggctgtggggccgtcggaggaggctcgacgacaaaggagccgagaaggtgaagtttcgcctcaaccagctaggaagcgagggcatctgtcgtggtacgcttgtgctcccaggccacaacgactttgacaacagtgagtgccacgactaaggtggattgagctctggcgatgtcggaggaggaccgagcccacgtagttgcagccttgtaggagcagcagggagggatgaggcggggttggaggtagcttgcaccctgatcgacgcgccgacgacaggaacgatatccggcacgggtgctgtagacaaag

SEQ ID NO: 25597 - DNA, 757 bp, Zea Mays
ctcaaagcttcccaagctctgtattgccacaaaggcaagctcacgaagtttgggacaccccctaatcaaggtttaagctttctctattcaaacactcacaaagagagggagaggaatgcccaaggactattctggtcgttgataagagtggggaggatcaacaacatgaaatggtgagtggaagaggtatttatagccatcacgccaaaactagttgtttgagtttgagttgacaaatccgacctagccgggtattcaaaccgactagccgttggcccagaagttggtctggtcgggtttgtggttggggctaaaattttgagtggagttttacttactctctcttactcttgggtttatctgaagcaccattttgcatgcctcgatcttggtgaaacatccctcttgatagtgtggcaatactcaactcacaaaaaataaaaggatctgaaccaccatttgagtttttcttcaattcaatcttggttgccatttttactattgttattttgagggtcttcattacttcaacttcttgagcttgtccatcttgagcatgtgagttgtgtcgaaggtttcaagtcactttgaatattcgattgatcttctacattgacaaccatcacttgattagtgcctcaactcaatgcaagtaaattttttattcacttttagctaggtccatcggctgtcaggccatcgcttgcccttcacctttcacagaagtcaggagcttgcttttgtttcgctccgatga

SEQ ID NO: 25598 - DNA, 452 bp, Zea Mays
cccactcagttctgcatccgatagggtcagctttggtggatactatgcgaattggttgcatgcattccattgaaaacaagttgatcaacgatatttgtaaggcaagcttcaaaggtgttaaggaccctttacttgacacgtacaccaggaaggaagtcattcgcctacttcgctatacattcccaaattatgctcaatatgctcttgaaggtttcaagactgaaggtctgcttcataagcttgggctgaaccgcttaaagcccataccttctattctaaatatttgaacctcaggtaactaatgatttcattgctgttattgatctcagattttctcatcttattctcagattttctgttctaaatatttgaaccataggtacatatcttttgaattttctcctcagtaccagagagttggtgggcagccagttgaacacgctggttttctg

SEQ ID NO: 25599 - DNA, 458 bp, Zea Mays
tgagggctgaacggacctagaaagggctggccgcggtgagcagtttcttgcggtggcggaaacttgatttggggagaactccaaattcccgagctccggcgaacgactgtggctaattggcggtggctggttagctgacaaccctatggagctggtcacgggctcaatttatagggaggacgggcggtggccacgaattttggacgggacacacggcggtcgggagtgaggaagaacgctggcgcatcgaacacgtgttcaccggcgtggcagtaactccggtggtcgacggggagtttagagggagccacggcgacatgatggtgaggttgggacacgcggtggacaatggcgagggcacgacgacggtgagcagctttattcacggcggtgagcaaggggaggagtattgcggccgaccgaggtggcttccagcttgacgacgatgaggatctttt

SEQ ID NO: 25600 - DNA, 307 bp, Zea Mays
attatgtttttggatttgtagttatcctttaatccaattcatttcttttatgtttgataacatcatgtcaggtgagtaattgttattcagcttaactacattttgacattgtgctaatattccttgggtgaactctctatgccactgaaatttaatttcgtgattatcaattacaaataagggatttctaaaattttcaatggcataatagagtaataaacgcttaatagcattttaaagaggtataacactcttctggcaaagtgtcactattatcttctagcaaactgtcactaatagagtaata

SEQ ID NO: 25601 - DNA, 297 bp, Zea Mays
gttggacttgtgcttcggagctaacgggatctggtttaatggaaaccccactccctcccttttttcttcttgctgtagtgcttgtagcgtgctgttgcgccagtatctggtggctcaaaggtctctctgcattgccgccgcagaattgttgatttttgggcttcaagatttctcctagataacccacataaagtacttgtagtcggtgccgtgttaaactggttagtttgtggcttagatgatcacttgacttgcttatgcgaaagttactagtccttctgcccaattcagtgcaaa

SEQ ID NO: 25602 - DNA, 1566 bp, Zea Mays
cttttggtcggctgaccagtgactatgcctgtcagtgtaacaggcgcccaccttaaactccagatcttggtgatggccatcataaaaccgcctagcatgttcctggccctgtaggagtctgtctccgacctccgcgagaaagcagtcccgttcgtgaaacatttcttctatagttggtgtagctgctgctccttgctggtatgggatgagtggaggggggtctctgtcatagaccactttaaacggggttgtcttcagggctaagtgataagaggtattgtagcaatattcagcccaagcaatccagtcaacccaggccctcggacgatcccctgtgatgcagcgcagatacatggcgatagttttattgaccacttcggattgcccatcagtctgtggatgaaaggctgtgctcatccttagtttgacgccggctagcttgaaaaggtccctccaaatgtgtcccgtgaacactgggtctcagtcactgactatagagcttgggaacccatgcagtcggacaatctcatcaaagaatgcccttgctactgtggctgctgtatatggatgactcaatggaatgaagtgggcatatttggagaatgatcgacgactgtaagaatgactgatttgccatatacctttggtagggcttcgatgaaatccattgagatgtctgaccaaatctgagctggtacctccaagggttgcaatagtcttgctggatggagtgtttctgttttgttttgctgcaaactgcacaagaacgaacccaatctctaactagtgccctgtccccgtgaacaaagaaatatgtcctcaacttttgcagggttttctggatgctgccgtggcctgcggagtgggctgtgtgcaggatagcaggaagtatgttggaggattgtggtacaaaaatctgattgccatgcattatgagtccctatctgatctgccatgcattatgagtccctatctgatctgccatggcgcaccctgctgccctatactgatctgattgtgcaggagctgaaactcttggttgcttgcacagtcttgctggaggtctttgtagagttgaaaggttggtgttgagatcgtatagaccgatccactggtggtttccctgcgcgaaagagcgtctgctactgtatttagccggccagccctatattccaccttgaagtcgaaaccaaatagcttactaatccactgatgctgaggtacagttgagagccgttgatcgagcatatacttgaggctgaaatggtctgtacgtaccacaaacttgctgccccacaagtatggacgccaatggtgtactgaatgtaccagtccaatgagttctctctcgtatgcagcgagcttgacatgtcgggctgcaaaggggcggctggaaaaggcaattggtccctcatcttgatgcagtacgatgccaaaacccgagccggacgcatcacagtcaacaatgaatgagttggcaaaatttgggagttgcaagacaggggctatagagagagctcttttcagtgcctcaaatgctttgtttgccttcgggctccactggaa

SEQ ID NO: 25603 - DNA, 348 bp, Zea Mays
caaaggtgacgttcggtataggcccctgaggcatacctgtttcataccccattgtcgtttggtatgaggtgaacctttctggctccctagggatcgaaaaatattcaacctcatgcatgggtgatggcatgctatgactacgatgtgctgtaggtggggtgtagtgtcgctgaggtgagtaggaaaattgttcctgacgtgcaacactctgtcctgtgtagatgtactcggaccgtccgacctgggtggccagacgatccgcgaagggactagacgacccagtactgtacccggactgtccagttgtgctggcatctcatgcgagccatgtggcgggctcggtgtggc

SEQ ID NO: 25604 - DNA, 398 bp, Zea Mays
ctctacgataatcaatatcgaagcgtttttcacccaatagtttgcattttaacttagacatcacatgagcactaatacttttcatccgtgaccatacccatacgcatttagactacaacaagcaaatcatcgtgactacgagcttaactaaagtcatctaacaagttgattagccagagcaacaacctaggccgttatacaacatactcgtcggctagcccattattttcgaaatccgagacacaacatgtatataacaatcacttaacgtaatcgactcctgcttaacacgagttggctaatgacgtgactatttcccaattaccaacatacaccacctttcgccatttttagataacctacgcgacacacagctattgtaatacatctcaagttca

SEQ ID NO: 25605 - DNA, 281 bp, Zea Mays
cgcccgcattaatgtgtttgacatgatctgggaagagatcatccgtgcttcctggtctcctctcaaagggtgtcttcatgcaccctttatcatgaagatgatcgaagtggtcacccagactcacttcgaaaaacctgtcaaacactcccgctacgtaccctactgggttgattcctccaacctagctgctcgtacgaagcgggctccctcagggtctggaggccatgcctcctctgctgagccacctccctagcctcctcatcatccatcttcctctcgcc

SEQ ID NO: 25606 - DNA, 376 bp, Zea Mays
atgaagacgttgagcctaacgatagcgttaggagtcaactgatgaagatagatttcataattttccaaaacttccccaatcatttcgttcaaaggaaacctcaaccccgctctgaagaaactcctgaaaactaccacctcatcatttttcggtgtcggagtggtttcttccctgccaaaacgaatcagcttctccgaagtagcttagctttatcatcataggcatatcagcctcaaaaacggtagattttccaaagtccaagtgactgggtttggctggcatgagagtattataatcttcctcttcttcatcaacaacatcttcaatgtcagcatattcagcttcggcagcagatgcaccttcgtcagcagctacc

SEQ ID NO: 25607 - DNA, 386 bp, Zea Mays
tttgccgcactgcttttggtccaaactccaaagcagtaaatcacatcatagctgtacgcccaaagcacatcaccgccacgcttcccgccgccgtgaagcctgagaatgtttagcacatgggcgaatcttgctggaacgactccgcgtcagcttcattaaacgacatggtcaagtttcaataacaacatatttcttttaataatgaaacaaagtctaagtctctgccgcccgagtatgttactagtcacggtttaaactaactaatctatactactatagtaaggccgtaagggagtaaggctgcaaggggtagcctgcctacatctggttctgcttcgcgcgaatctcgaccgtccatctataccaatcaaatcagcatcgtccgt

SEQ ID NO: 25608 - DNA, 575 bp, Zea Mays
cacaaacttcacagtagatcttgcttcacgccgtgctcattttgaattttggcgtttttgcacaaatggccttgactggcaaatgctaaaagtctattattgtacatgtcgtaattgtgcctctatttgatggcattcttcgagcctcgatccccaaacttacttcatttggagccatcatgtcttcgctctgaattggcctattagaatgttgcgagtctcccactctcagtgtaagcaacaattttgtttgcttaagatattcacatctgactccgatttgctgaagcatacaatatatgctacttaaacctaacactttctttgatgttaacataaaatctccttgtaattcgtatgtcacgacatgccttccactttgtttgcttcctcgatagcttataatcttagcgctaagaggaggtatgatagatcaatggtttttaaaactgtgaacagattacttttcaccttcgattgtgtctataaatatgtacctaatatgacatagcaataataatccttcattattagagactcaatattcaataaagtcatcagaaattttagaacct

SEQ ID NO: 25609 - DNA, 353 bp, Zea Mays
ttggggtatgaaaataagcatacataagaatataagagtatgcaagattccaaggatacgagcatactaagaccaagggcatagaaattgccgaaagataacgacttaacaacaaaataagaaaggatctcagaagacaagaagatcatggacacataaactgaactgtttaaataggcaacagaggtacaagggtaagtactttggatcaagggataagggtattaaaatgtaaggatacgagcatgtcaataacaaaatggaatagaggtcaaatggtagcaatttaataatggaagaggaaagagtctcaaaaaactaaaggctatggccagggggcatctacaaagatg

SEQ ID NO: 25610 - DNA, 272 bp, Zea Mays
aaaatattaatgtcctgatccagacaattacagaaggaaggacatgcaggaagcttgtaaatctgaagactggttaaagaaattttcaatagaaattttggatggagaccggtggatagacacatctgtggttaaaaatgttaatgctttagatggtgtccgctttttgctgttcttctagcagacttctaccttcagaacttttaattgttaatgtcttttctggtgcatattatcctacctggatggcggatgatgcagaactctcccct

SEQ ID NO: 25611 - DNA, 496 bp, Zea Mays
aaggtgcttctaggcttagtcttgtttgggacttctatgtttatatccaatggagttatcacaccagcaatgtcaggtttgctttttttcattctctccacacttcaacttaaatcactaaagttctgttagtggattaaccatgaagaatactatagacatcgaatgaatgtttttattttccatgtcattcaaacttatttcagtgctggagtgttttttccagccaaagtaattatttatccttgaatgtagtgttatctgctgtcagtggcttgaaagttgggctaccaaatacctcacaaggtgatttctttggggttaaaatttctcgtatcttatagcatggagtttatttttaataaattatggcttactttgtgttttcattaaacgttctttgcagatgctgttgtgatgatttcaattgcacttcttgtagtattgtttagtgtacagaggtatgccactagcaaagtggggtttgcaattggcc

SEQ ID NO: 25612 - DNA, 822 bp, Zea Mays
aaggtcttcttttgtagttgctgcattgactcttggccaacttctacctccacgacctctaccatctctgggagcaccactgcctctcccatgattaaagttgaaaggtttcaaacaattacaagcaatgtgtccaacatcaccacaattacaacactctctagcatctttagttttcatagctgaaaacacgaggtgagatggcactagagggctttccctcatcactttgagtcttgacttctgggatatagcagctattgcctcttgcaagctaggaagagtggattgatgaaacatgaaggcacgtcttccctcaaactttgagtttaggcccatcaggaattgaagcacatgtcttttttccacccatttctttgcccagacaacacaatctgagtgtcgtagctgaataggatcataatggtaggcatcagcccacaaacatagcaattcctagacatactccactacagatcgctcacattatttaatattacgaaggcggtcttcattctccaccatcaacataatatttccagctcctgagtacatttcttcaagcactctccatattttagcgacacttataattgtatcaacagtgctagcaattgtcggaatcatataactcaacacccacgctgccaccaaagagtttatagcatctcaatccttccattcagcacttggcttgtctttgggctcaacaacagttcctcaacaacagttccatcaacatagccctcgagcctttttgccttcaacaatcgcatgcctctcctagaccaagccaaataattcttttccccctccaatttt

SEQ ID NO: 25613 - DNA, 369 bp, Zea Mays
attagagagctctagtgctctctctccttaagggggtgaaattggggtcttcaaggggtctttttgcaatgttcccttcctgcatttgttaggttacaaagctactaaatcttgtttaagaactaagatcatgctttggcaatttggttaacttatccactgatccctggcttggaagtctagtgctcttaggtgccctttttagggtttaatcttcttggctccaatgaccattgttccacttgtgtggttgaaacccttgccattcacttctcttagttaacccatgtttccaaggttttatgctcttcttctcttccacatgtgatcacagtcattagtgcataagtgtaccatggtcatggtaac

SEQ ID NO: 25614 - DNA, 292 bp, Zea Mays
tcatttgaggtggttttacacctttgaaagaaaagtttcggggttgaataagccagacatatatagctagggcgatctagcatcctgactaggctgtgtttgggactatgtaaaggtgtgctagcggcgacagggcaatgcggcagcggtggtgcacaggaggcgggcaaaacaaacacgagtagacatgggtgcgagcagctttgtttgctcgtggccgcactagaggggttgtagatttgtcacatgttaagcattggttttcgagatgttggcccgttggaagttgatc

SEQ ID NO: 25615 - DNA, 389 bp, Zea Mays
tcaggtttgagataccgaatagtatcataaccgacctgggatccaatttcgcaagctcagagttcttcgatttctgcgaacaaaaaaacattcagatcaaatatgcctcggtagcgcacccaagagccaacgagcaagtagaaagagccaacgggatgatattggaagcgctcagaaagaaagtcttcgacaagaatgaaaagttcgcaggaaagtggatcagagagttgccatatgtcgtctggagcctgagaactcaacctagccgagctctgcatggaaacactcctttctttatggtctatggttcggaggcagtgctacccgctgatctcaagtttggggcaccgagattaatctttgaaaacatagcagaagctaaggctact

SEQ ID NO: 25616 - DNA, 276 bp, Zea Mays
cacgtacatagttagcattcagtttgtcttgcgaaaccgggtgtggacatcttgtcagtgccacatcttccaagaagccctagaatgccctcaggaagaaattcatctcatccacaaaggcatgcagggtgtaaatccatgtggaacttgctacatcgaagtaacatgaattgtctaccgctgacttcttctagaagaccataggactcgccatcgctgacgctcctctacgcaatgaggagatccttgcctatatgctagtggtgctcccagctg

SEQ ID NO: 25617 - DNA, 305 bp, Zea Mays
caggtgcgtgttccggtgaaaggcttcggctgaacttcaattggtcggtactgagagcaataggaggctacaaatgagctagaacagggagcaattgggaagttactaacccgaagagcaatgaccacggtggagttcttcacagcggagttaagaacaggtagaaaggggatttgcggactgtgtgagttctccggtgaaattgaatcgagtgcttagtcgctgaggtgcgggatgtggtgaagaagcggagtccaggctcaatttataggccgtcgaccggaatcggaggaggagcgcggatt

SEQ ID NO: 25618 - DNA, 291 bp, Zea Mays
gtatttttctgggttacggttacgggagactactgaggaaaaagtaatcacaggcggctcctcacaccaatccccttcctccattcctcttcccgtaccctggcctggcggggtcgcgcttagccagccgttgcaggtctcctccgtttaaaacagggcacctagctgttttggtgagaaaccctagattgattggagttggatgttctggagtggcgaggaaccctagattgattggagttagatggatgcttgctcgttttgttagttcctttaccgtccctcaaatcc

SEQ ID NO: 25619 - DNA, 356 bp, Zea Mays
gaaggcgaagtctggctgagctacagccttagcatgatcacagccaaccttctccaagatggacgtagccccacaggcaccggcgaaggcacaaaagtcccctctgtcgctaagaacttccgaagccatcaagcatcctcgcagcaactccaaagaaaatgagaatgcctagtgtgctagatgctgttatggagtctatgaaaacatcaactccttcttctgtcgaagcgcctagcacgaagggtaaagtttcaaagaaatctgatgaggctggcatagtgcagactatttcggaagctggaccctcagaagttcctaccgaagctagaccttcggaaagcgctccgatagtccta

SEQ ID NO: 25620 - DNA, 272 bp, Zea Mays
attttcatgatgtgtctatagtgagggctgggggagaggacaccgtttcgctgccagaaagcgatgaagtggtagtcttcaggagcttcatgaaagcttggcttcgttcccgctccataagatgctagttgatgttttaaagacttttgcaatataccttcatcagattacccccgaagctcttattaaagtggggtttttatctgggccatgaggagccaaggactggaaccaaatgcaagatgcttttgcaatattcatgagttgtctta

SEQ ID NO: 25621 - DNA, 488 bp, Zea Mays
gagggaagtccccaagtccctagagatgattgaggcaagcgccaatatctaagacagagtgggggagcgtgtgttcgtctacgtgcgtcgatgagtggatgctgatgtcttcgatcttctccctcctccatggagggaccgctgccctatttatacaccaaggggagtgtccttagtgaagtcgggtcttgtattcgaagaagagatgcctggcgtctgatgtgatggtgaactgtgcagtagattcatgcctgctgacttctcgtagagagccgaggccgagatcgaggggttgtccatacgcccgaacccccaagggagaggccgcccatgccgtagtggctgtaacaacgccagggtatgggtcaaaggctgcttacggggtgtgtcatcgtcctgcgtgtgatgacgtcgagattccctgcagcactcatcgagatcaaagcacccgtttggtggatgcagaagtctttctgaggcgttagccg

SEQ ID NO: 25622 - DNA, 523 bp, Zea Mays
ctttgtagccacgccccccctttagccataattgcgatagagcaccgtgtgcttccccacaggaccgagagaaagcgggagggccatcatgggggattcatgtatgatggcgtcgggtccccagtgggctggcagggagaaccataggtgctatctacgtgccatagtggtctttctagatgagaatatttgccaggggcacaccaattgctcactggagtggatgctcctccgccttggatccacggtatgctgtgggcagacaacatcatggcttggatagctggtgagttcctcttcatttggtttgcactcgttgtcgcaccggttggggcttgtttcggtccatttggttcaccatgggcgaggggaaagcttcactccggtgagacttccaccgatggggagctctactccgtcgtcgtgcatcggctgggaaggggggaagtctttgtccgttgatcagctaataaacagccacaatagaatgtatgggtaccgcttcggtgtattaaaatggtgc

SEQ ID NO: 25623 - DNA, 778 bp, Zea Mays
aacaagtaccaagcccaaacgaaggcctggcgcgaccacacagtcgttccaagggagttcaacgaaggagacctcgtactcgtccgaaccacccggacagagtcacggggcaagctggagccgaaatgggagggtccattcatcgtcaagtcgaaggcgtctcctagcgcatacaggctaacaacgccatccggcgaagacctagagcattcctggaatattgacaatctccgcaaattttttgtttaaaccctcagggcctacgtgcccttgtaatccaccaaatagtattattatggcccacactcttttcctcccggggggtgaggtttttaacgaggcggagccatgtaatatacctgcaaaaatcccccgcaaaaactaagatgcaacacatcgaaaaagaccgcatcgacggtcttcgccattcgaccactccgaagtcagtgcgagaggcagcgcagactaccctcgcgtgcgacactccgcgcaaaagtcgcctaagcgtgcagccggaatagcacaacaagtgcgttaatcgaagtcttttattaaaaagacactccgcgcaaaaatcgcctaagtgtgtagccggaatagcgctaattgaagtctcattaaaaagacactccgcatagagtcgcccacgagcgcagccggaccaacacaggtgtacgaatacggccaacaggccgcatcaccatacaaattacaattacatacacacggcgagggcatcacatattacatcggctcaaccttcgggatgatacccatc

SEQ ID NO: 25624 - DNA, 436 bp, Zea Mays
cgcagggagccgagaagggagttcaggttcttcaacgacgaagcacgcaggggcgggccacggtgcttccccataccgcgcgggagtcgtccgcgtccgcgacttcaccgagccggagactggagcatcgctgtcggatcgaagggcaccgtcacgccgagaccttccgtaggcaaccgtatttatgccggtaagaccacgttcctgtaattcgccatcctctccgctatgcgtaggttcgatccgcgctccgatccatactctagggccgcttatccgcctgtccgctggatttgcaccctcccggtgcatggcgccgcaatccggaatgtcgtggggaggaagaagatcctagggccgttgatcgggtaatatgcggtggagattagaccggcgtgtacccgttcgcaggatttgatcggtgccgtaggagggg

SEQ ID NO: 25625 - DNA, 381 bp, Zea Mays
caaaccctaaaatcatccaccggtggttttgaggtctagaccaccaaaccactatggagtagtgtatcttctatgctccctctgtgatatcaacacgtgtcacctttagtccttgattgccaatcaccaagtcctccagcacttccgcttgacatgattgaccaccgtcttaacttggtcaatacagtctccttctccatgtacacttggagttttcaatgtccctaggtgtcagccatcatcgtcagttctatggcttctctagttcctcagtctaagcttcaatgctgtcattcaatcctagtctgtcgcacaaacccgcttgaccttcaccttcatcatcgaccaccgcctctgtgctctatacctatgcaccacaag

SEQ ID NO: 25626 - DNA, 404 bp, Zea Mays
cgaatttgggggaaacgtgaaattgggaggctctggtggatgatccacggtgggagctggtgcactgggtgtgtaataacctaccgggcctggttgatcacttaatttattacattgatcggcggtggtgtcgaattttgagagagagcgctggcggccagagagaggggaagtcactggcgcgagcgctatcgtggctttcactgaagtaatgacttagacgatggactagctatctacggcggtctatggtgacgtggtaaaacggttgacggcgtggcagggccgtgagaaacggtggcacaacgacgatggtcgcgcggccacgttgcggcgcaactgggcacggtgacagagcaactacagtgtctcatcttcatctcttgctcaagatctttcaccct

SEQ ID NO: 25627 - DNA, 669 bp, Zea Mays
gtctaggcacatttcactatcttgaaagtccatcctttatcttcaacaggaattcctccatcttgtctctgtcttccttcttcgtcgtcatctgccactggtttagaaaaccaagacattgaagccacttgtttaggagatttaagcatttttttggagaaaactagaccatttcttgttttccacaacacccaatccacaccaactactatcacccacaaggacttgttcctatctccaccatctttgttcaggcacagctcctggaatttatcaacgatggtggtattttcggccagcccaagctgtcctgacccagcaccaggccaccatcgctataaggcatctgaacagcagatggtccacttgatttttactagatagcatataacttccactatttcgaatgatatatcactacaaaaatcacaagtaaaagtgtcacattggagactgtcactttcttaaatgacttacatttggaatcagaaggagtactatgtttttagattaaagtccatatcagtgggaatgggatggtcaaactttgctctgagagactagatattcacattttaatcacgtgaaaaaacaaaatatatacactgttgcattatttggtgggcttagacactattgtacatcagtgggatatggaatgtgcatatt

SEQ ID NO: 25628 - DNA, 359 bp, Zea Mays
gccttgggaacttgggttgaccagtaggcacttggtcatagggaggtggtcctgggacaaataaagaagatggtgaccacgcactcattactggattacttgaggcatttgaggctaaatgtaaacttaaccgtgactcctgtaactgaggctggacatagtatgggatataaggtgaacattatgaggatgtactacacacttcttttgactgggagggttgagtggctgatgaagccaattccttctacttgttgatagtatgatggcatgttgttgtggtgtggcctttgtcctcgccacaaaacaagcataatggtttccttggaggtgcattgaatctaccaccaaaacttcag

SEQ ID NO: 25629 - DNA, 801 bp, Zea Mays
gtcggggagtcgctcggtgccgcggactggtgcctcggcgtcgccctaaccctggtatgaccaactcatgccttctctctcgaattcataccgagtagcaccgatctatgtaggaagaacgtctctggtagatcgtgaattgctcgtcggcgttgcgcgtggtaatggacctgcgccttcccgtgggtaccgcgtggtgtcgtgttcttcccgattagcagactccgaccagactcatggtgtaccagcaggagtgtagcgcccttggggtgtgtgcttaggcgtcgagagtgagagaagggtggagcatgaatgacgccgccgtgcggatgaacaggtgtgcgccgccgcgctctgcgcgcgactcacgccttcgcggtcgcacggagaagatggggtattagcccttggatgggaatggtgcggttaggattagatcagggggccggacaactcctgaccgtctgatctagatgtgtggctaggattagaacggggaaagttgcaccgcgaccgttgatccttgatcgtgcgggcgttggtcgatcggagctacattaaatccggggcgctaatgttcgatccaacgtctcagattgtgtaccggttcacttatggctggatctgatctgggccttggatttctaatccgacggcctatatcaccccgtaccccttcgcggcgcatttttgcacagtagcccctcggaaatcatagattagaacccgctgtccagctcgggttgcgtctgagtctggggagttttcttagataagcccctgctgttttcagtatttgag

SEQ ID NO: 25630 - DNA, 780 bp, Zea Mays
cccactcatactccaattgcttaagtctgaaagtagtgatattagctcaactttggggccttgtaactttcaaaccataagggttttgccctaggtcaccacatcaattctgtagatctatcaaaggagaacaactttattttagggatgcaacattgttgttatgaaaaatgtgaataaaaatacacccaaagatgggcagtcaggctgtctggagactgaacctggtctgacagtgtaatgaggcaatctttgaacccagatttgaacatgatccagcgcaagtttgggcatgatccccatagcaagattgcagttggttaattgggctataactttgatgcagtgggatgatggggttgtcacatgaaatgaggagaaaagtggctctaattttgctctgacagactgactgcatggtaatcaccatggtacagtgaacgggggggatcaggttcaaagaacctctccgccgatgagccacacgcagattcgtgccttcgccaccgtgattcgcgttcggatcaactggataacgctcagggttgagaaagtatcatcgccgtggatatactccgaccattaaactactccggccaccgtaccgagcttgccacggtcgcttcagatgagctcgctggtgacagctgcttcacggccttgcgccatgtacctgggcacattcaccgcatcaccgtgactcactttgggcgtctgatcatcgccggtgagggctgtcacggtagatgccacgaattccttgcgccagtgacctcccac

SEQ ID NO: 25631 - DNA, 383 bp, Zea Mays
tgacttctttagaagatgaggcctggactcccactgatggaggtggggcctgatgctgaaaaccagaatatggcttcttataatcccgcttctttccaagatcccccgcttcttcctgcaattgagcaagcacaacagcagtatcaaaatcggatgggcgttgtagcattaccacagctttgatatcgtctttcagaccctcaacaaatttcaaagtataatacaatgggtctggcatggtatggtatgcattaagttgatcgattaactgagcaaactcctccacataagatgacacggtgcccatctgttggatatgaaatagtcgtctgagcaatgattggtgttgatttttggcaaagctatcctgaatcaggtggcaa

SEQ ID NO: 25632 - DNA, 394 bp, Zea Mays
gcttggtgtgccgtccagatgttgatctttggggtgtagaggccttctcagagcactactcgatcactgagagggatactaccaaggaaaccatgcaagatgttgcatggcgtgcgcttttgcagtactcctcgttgttcagcggggtagctgacggcctcgacctgaagtactaccctcgtcgttcgaccggcagtgctgaaggtgtgattgtctcgcccgttggtgagggcaatcccaggctgaacagcatggtcaatctggtcatcgtgctcaacaccgagctagaccacgcccttgatgagttaggcaaggtttgggcgaaggttgcgaaattgcgtgctgagcgcgcagtgtgccactatcaagatggtggtcctcccgctcctgtcgg

SEQ ID NO: 25633 - DNA, 479 bp, Zea Mays
cccggattcgcgcccagttaaacgcagataaccatcctcggatgaaaaatctggtgctggggatgagctcgggacactgtttcgccctgggcgccgtacccccctgccttatggccggtctagataacctcgccagagttggtcgcatgccgctcgggtgccatgtgccttggtgctctaccacgtcgcagtgaatcgccttagcaagtccgctcatcgctggtggtcatgctaaggtgaaagccacacatctcttgcaccagtgatctcccctccctccggccaccagcgcgccatctcaaaattagccaccaccaccgatggaacctataaattgccgccccagtgagcttcgctaagtaatcacacacccaacgcatcagcccgtgcctcggattgtcaaccatagagctctaatttagagtttcccccaaatcagtcaagaataccgccgtgtgtgagctcgccgtggccagctc

SEQ ID NO: 25634 - DNA, 713 bp, Zea Mays
gaggggcagcactataactcccagcctcatgatcatgtgagcgtggaggcataggaggcggaggaggaaccccaaaatcatcatcatcatcatcatcatcaactgctatagcctgagtgtcgaactgatgaagagctgcatcctcggcctgagagtcaaaaacaggagcagaagctggcacaggagtctcaggcgcaggacggtaggatccaaaaatgaggcgtgaggcctcaagtgtgccctgaaaccgaggaggctgaatcagctgcgcaaagatgtggcacaagtagtgagcatagggcaactgccgacgagcacgaatcccatccaaaacggtgtcctcgatctcacaaataaggaagtccacgacgtcgaactcagagtgagagaccagggcaccaaggagccaaagctgaatatgtgtggtagcctccctgtatcccatccttggcagaagagtctgtctgataagctcatataaatacttggctgctgtagtaaaatctgccggtgaacgtcgcgacccatctgtgaagggcgggcggaacagagccgcgacgtgagctgtacccggagccacaccgccgtgagggcgacgaggagggtcagaagtgccatagcagaggctgtgaagacgagtcgtcgactcgggaaatccaaagagctggcggatctgactggcagtaatggtgacatcctctcgctcaaaacga

SEQ ID NO: 25635 - DNA, 457 bp, Zea Mays
gttttcgtaccgagcactcacgtagtctcgctcccgcctgcccacgaacgtgttgctacgtggtcgagttatcgtgttcttctcttccacaacgtcgcattgctccacttcgcgcacctcatgcagtcacccctagagaccatccatctcttctcccgcattcaccttctccttgctcaccaagtttgtcgcgaccacacactcacttcccaccacggttggtcgaggaggcccccaaggaaggggcaacactatgacttggttgccaacaaggcatatgcgccaggctgccgctcttcccctcccactggcgatgcttaagcttcaaatttcgtctagctccgccactatcttcaaagctgccatgtcaacatttgtataggaaactggagttgaactgttgaagttggcctttttggcccaagtgcgcaaccagatgcatcagccatcacgacct

SEQ ID NO: 25636 - DNA, 343 bp, Zea Mays
ggacacacaacttggcttcccagactaaatcctgcaggtcccgtgcctgtatcaaaggatggctagtatcaggcgatgtatcctatgggtgtgctgctaacgctccctagccgaagctgtgttcaggtccaggtccagtcgaggctgcctcctgggggccgctgccaactcttttaggtatgctggtatctagcctcgacacgtcgagcctacatcccagggggccaggtaccagggaggagtcggcagctccacacacaacaggggcaaatagtatgcagataagtgctaatactgctcgataagtagtactcaaaagtaccttacaaaagcaaagttatta

SEQ ID NO: 25637 - DNA, 528 bp, Zea Mays
atttcttaggtagctgcataatgcactatgtagaccctgtttggatcagctagagtttgtgtattgtggctttaaaagctctagctggtcctgttagacatatatgtgtttatatatgcgtgtatatagctggactgggccctgggccgtgcgcctcctgccctcctatagcctgctgaccttctctgttggttatcgataggaataggggagatcttgattggttatgtttctatataccatgattaaataatctactatttccgtgcaacacctattgctttcatggtatcatgagttttgggttaatatatatgtgtgtacatagcgtggctgggcctgtgctgtgcacctcctatttcttgttgggttatgtttctatcagcagaggccttctcctctgttgctgttgattatggataggaataagggaggagatcttgttgggttatgtttctataaacccaagatctgctccggactatgtatacatgtacgcctgtaccttgattaatcaatctactattt

SEQ ID NO: 25638 - DNA, 441 bp, Zea Mays
tcggctattagtgcaccactaccttggattgcgctttcctggcaatggcgccgccgtgaatcggagcttcgctgtgggtaggggcctgggcacatcgtttcatggataggggttagccatgagattcatggtggtcgagcattcatgaaaatggagtcgggtgtgtgaattggatggggttcactgtagggcgcgttcgcaggtgtgcttccgctgctctgggtgtgtgccgccgtgtcgtgcgcagggaggtggtaaaaggatgccgcgaccattggatcttgatcctgcggtcaccggatcgcgtgggtgaagacctaatctgagccacacatcttcaatcctacggtcggaatcggatgccaattcgttattgtggccgatctaatcgtagcccttgatgtatgatccaacggcccataatgcaccataccctttcgg

SEQ ID NO: 25639 - DNA, 478 bp, Zea Mays
tgggctataaaacctgaccgtcgtgcccgtctgctcaccaaaaatcgagctaaggagcaaggatttcttgttgctgtagcagggaatgggtggtcgtggcagagaattggtaggcgccgtcgcaccaccgccagttaaccgggatcacgccgtcgctcggggggctaatgattggtctgggaggtgcgccaggtgtcaaggaatatgtgtgtcacataaacataggtggggagtgaacggatgacgaagaattcctcaccggagttcttccattatcgtggagccggcctccaccgtggtctgcgctcctgctcgcgcgattcgtggtaagaaccctctcatcccatgcaccatcgttccctctacgtgtagcagctttcagatcgaagcttagtgcgttgggttgagggcgggtcagtccagtaatggcaccgctgtgggacctgcacgccgccgccgtgatggcattgtgaggtag

SEQ ID NO: 25640 - DNA, 414 bp, Zea Mays
agcgctgcataaatttgatttatgtggggtgcgttactatctttatgtgcgattagtaggatgaaatggactcatgggcggacgtagtcataaagttcctaggatgattaggtcgtggaacaggggattgaggaacatgatatgctccttaaaaaaggtttttcacttcggggatgatattgttcctggaatgggaacgacgttcccggtgacgaacatgtgatggtgctcatgggattgagtatgcataatgaagattttgaggaaccatcatgtggatgtgctggactatggcaacattatcggtttaatgtccaatcacatgtctaaagcatgctggtgatttttataagaattcagacataaacattggcgcccaaaggtttgagcattggtctttgttgtgaactgcat

SEQ ID NO: 25641 - DNA, 867 bp, Zea Mays
tgtagatccaaaaatattgagaatttgccttgggtcaacacatcaagtttgtagagatactaagggagaacaactttgctataggaattaaaccatggtcagacgaagaatttgaagaaaaatgagcccaaagtcgagctgtcagactgccctaggtctgaattcagactaacagtgtgattgggcaatctttggactggaattcaaccatgatctagtgagtgtttggctatagttgctatagcaagattgtagctggatcatcaggcaacaactttgttactggtggattagtaagttgccacatggaaaattgagatccaggccctgcaaattaggctgtcaggcgcactgaatagagaccccattgtacagtgactgaacaagatcctaaattcatcccccttcgccgccggtgatctgccattgcaattcgcgctcgcctgaaagattcgtgccacgagaagtatggataacatcaggtgtggtgagaatatccagcgcggggtgaatctggtcgctagccggaccagtcgccgtgtcttgccgtggttagtcacgctggcatcacgggagttcgccgttatccggccaggctacgtgcctcaacgttttaccacgtcgcagtgagtcaacgtaagacactctctgctactggttcgtcgtcggtgaggtcgccacggttgatgccaccgagctctcgtgacagtgctctcttcactcttcgaccgccaccgcgccaacccaaattcatgagccaccgccccaagtcctataaatagagcacaccgtcaggttcgtagggtagtcacgcatctagccaccaagccatgccttcaattgttcaccagagctcaccaattccag

SEQ ID NO: 25642 - DNA, 355 bp, Zea Mays
ttctgctttcagacttagaccatacaggtacacgccccagcagaaaaatgagattgaaagacaagttaaggagatgttggagaatggagttattcaacatagctctagtccttttgcatcacctattcttttagtaaagaaaaaaagatggagaatggcggttgtgtgtcgattataggcgcctgaatgcctctactgtaaagaacaggtacccaatgcccatatttgatgaaatcacagatgagttgtgtggggctactgtctttactaagttggatcacagagctgggtaccaccaaattagaattaaagagggtgatgagtataaaactgctttccaaacacatcaaggtca

SEQ ID NO: 25643 - DNA, 437 bp, Zea Mays
tcgtgtcgaagtcgacgctgcaccccccagtgatcatgtgaatgactccgcgatacgactgatcggcgaagtcttcttgctttggggcttggggtggtggatgttttgttgttgcgggtgtgggggagggagtgggggaggtacgaattgtaccttctggtggtgttggtatgcgtggtgaggtggatgcggagcggggccgtggttgtatggctgagggggttgttgatatgtgtgtgcgacaactctagggttgtcggctggtggcgcccgtgccatcctgtctctggtggccttcgtctctgggcagtctcttgtagggtgcgcacagtcttcgccgtggaacaagcagtaaaatctgcgcggctgctgcgcacgtccccgaccgcgaccatgagttccgtttccgtggccctagggggatactcctggcggcg

SEQ ID NO: 25644 - DNA, 415 bp, Zea Mays
atcagaccctctcccgtggctgacaaagtgtgtggcctattttcgtggcatgcgtaccatggaggagaagaaggtttggatggcaatgatgcacctcgaaggcattgctgcagagtggtactacgctttggagcgggattatggcatcctcactggcctcgcttcgccgatttcgtcaacatgcggttcggaccgccgttgaggacaaacggtctcgctgagctgaaggatctgtgtcgcacgagcacagtggatgactacatacatcaattttccttggcattatgtcattgtgctgatctatctatgcagcaccaaggtaatttattcacagcaggtctgtgcgagcctttacgcacggacgtggagctgcaggccccatcccatctacaaacagccatgaacctggcccggg

SEQ ID NO: 25645 - DNA, 312 bp, Zea Mays
taatattgctcagtttcatgaagatgaagcttatgtggaggatgaaatctctgatgagggtgaaaacttgcttggcagcaatcatgttagtgttacccctgcagtacatccatctaaaggcaaccctatcaatggtaccccaacaatgcagccctctagcaagacgaccaatacaaccccagtagtgcagctatctcaaggcaaccctactaatgtgtccctagcagtgcaaccctgtcaaggcaacactagagctatcccagcaagtctgcctcttcacactgaacttgtaattttttcatccatccttca

SEQ ID NO: 25646 - DNA, 503 bp, Zea Mays
gaaaattgctgctcagcgcttgacatcatgtgtgagagtgccctgagaagaggaggaagtcactggctcccatctgagcttcctattgggattcctcctacacaccacatccttgtggtcttgactgcagattgaacacctgccattccactggcactctgcacgacgatgcgcatcaccacaaccgaaacacactagacccagcccgggcttaggaacagcccaaaacctctgagtacttcctcctgaagtacccgagtcagaagatttgccacgatagggatggtggcgctgatgctgagactttcccctcttgtgggctggacctccagtgttgcccctcctcgcgtcctggccacgaggctgatcaacacccgaagacttctgcaactccatggtatactggtgttgcatctccacacccagtgcctgctccactgtagtacggaagtccaccaacggaaaggctcccagtgcatgcctgatagaaggtttcagaccct

SEQ ID NO: 25647 - DNA, 355 bp, Zea Mays
cctcgatcactactgcttcagcgacctcgggaatacgatttctcatggtctgaaacctcttgaggtacgaccgaagagtctcatccccttggcgcctgatagatttgaggtcccatggttgcgccgacttgttggggagggattagaagttggcgataaaacaccgactgaagtcgctccaatcgtcgatgcagtgtcggggtaggtgctgtagccattatagtgcatcttgcccaaggacgatgggcaagtatgcagtcatcacatcttcaattgccccagcggcccgggcagcagtcgtatagacagccaaccagcctccctggtcctgcttaggctcgtatttgtcgatgtt

SEQ ID NO: 25648 - DNA, 530 bp, Zea Mays
ttcatttcgaagccgatgctggaccctccggtgatcatggagatgactccacgatatggctgctcagcgaagtcttcctgctttcgtgcttgggggtgattttggtggtgtgggtttgggtgatggggaggcggatgcgggggtggaacaacttgtacttcctgatggtgctggtatgcgtggttgggtggatgagggcgtggtcattgttgttgttggtggtggtatgtgtgcgcgacaactctctggttgttggttgactgtgcgcgagacatcctgtccctggtggcctttgtttccgggcaatctcttgtcgggtgtgcgcaatcctcgccatgaaacaggcagtaaaatatgtgtggctgttgcgtccgtccttggccccaccctctcgtgccattaccgcggtcctggggggatattcctgacggcgagcggcttcaccggcggggtgctggttggcaatgttgtgcacctgctgctgactgcaactgtcccgtccggagtctggctgcgaaggcctagtccag

SEQ ID NO: 25649 - DNA, 634 bp, Zea Mays
tctaagtcttcgccggatggcgttgatagcctgtacatgctgggggatgccttcgacttgacgatgaatggaccctcccatttgggctccagcttgccccgtgactctgtccgggtggtccggacgagtacgaggtctcctttgttgaactctcttgggacgaccgcgttgtcgcgctaggccttggtttgcctgcagggtgaagacgcagtctctcttggcagcgagggccctgggccctgagtgggagccgcaagttccgttgtggacttcgtgtaggatctgaatgccttcggtttcggtgacgcattttagcatggtttgactgatccccttcttgtatagctggtccctaactagtacgaagtccccggcttcggtgcttgaggcgcttggcctcattgacgtcactcgggtggtagtatccttgcagaaacagtgttattggggcccgccaatcttcagtcataatgaggttgacaatgcgatggccttcggcgtcgttggttacttgtaatccctctgggttgcagacggctggtgtgccaatgacgtggtagaacacatcggagggcaaggtctcgcctctagccgctgccttagcaaacgcgtcggcctcttcgttcctggcgcg

SEQ ID NO: 25650 - DNA, 454 bp, Zea Mays
gtctgctagtggtgtcccatccttcggatgaagttttaaatgaatatccattggtgttgcagctgtgcgagtatcagtaattccagagcgatcaagaagatcttgtatatacttggactgagacaggtaaaaaccttttggagtctattgaacttcaatgcccaagaaatagctaagtggtcccaaatcagacatctgaaattccttactaagatgctgcttgacatgagaaatatgttctgagttatcacctgtaatcagcatatcgtccacatataacagaagtaaagtgcgaccttttggagaaacatgaacaaacaatgcaggatcatgttcactcgaagaaaaaccagcagctgtgatgacagagatgaatctctcaaaccaagcacgaggagcttgtttcagcccatataatgtgcgacgaagacgacaaacgtgccctaacggagta

SEQ ID NO: 25651 - DNA, 503 bp, Zea Mays
gcactagatgcgtaacaacctaacagagctcattgggacattgatttatagggtaattagcggtggcgcccaatttgaagaaatcgcgctggcggccgagaagaggggatgagtcaccgcgatgatctaccgtggtgttcactagacaaaggcgtacgactattactggttagcctccacggctcaaagcgacgtggtaaaacgacccaaggtgtggcgcgaccgaatgaacggcggtagtaacggtgatgaccgtgcggccacgtcgccgggcaagtgggcacgacgacagggcgaaacagtgccccaagttcatctcctgtgcgatatttcttaccctgtgtagttatctacactccaccgggcacgaatcgtagcgccagcgaggatcgtggcgtggagtcttcggcggcgagatacagcgaacctgcgatctttttcagtgtactgtaccatcagaactccatttagagcgcctgacaaagcatgtttgagagcgattt

SEQ ID NO: 25652 - DNA, 282 bp, Zea Mays
acatttcggaagaagtggccgggttcttggatgaaggaatggttttacatgaagaatgacctgggtcagagggaggatgtgataggtgttattcaacatcctatatggtcatgcttcagcattagaaggccatcaatagcacttgggaatgaagtgcaggcgtgccaaattgctttcaacaccatatgcacctacattggcacgagagatttagttcaagagaacattgcttacaaagtatggcctcttgcaaacgaatgggaaatgtcgaaggaagctgcc

SEQ ID NO: 25653 - DNA, 533 bp, Zea Mays
gcactgaccaacaggttatactctggatcaaaaactttcagtctgccagcaaacagtctaatgtcacaccctgcctcctctagctgtccaagactaattatgttgcttttcaattgtggaatatagtacacacttgtaagcaccttgtgatctccctgtctagtattcatcaccactgagcctaatccacagattctgacagtagaaccatctccaaatctcactgacccactgacagtgtcatcaagttgagaaagtgcacacttggtgcctgtcatgtggttactggcaccagtgtctagtacccacactccatctgggcagattactggcactactttatcttcagacagatgaattacttgagatgcttcactcactgccccttgcacctcagctaatagaagtgctgcattctccacatctccaactacaacatttgcttcctgttgtttttgatccttgtcatccttctttggacgtttacagtcctgtgcccagtggccataaatgccacaatttcgacatctccc

SEQ ID NO: 25654 - DNA, 339 bp, Zea Mays
attgggggggagaagattggtgtgtgccgtaggattgggtgtttgatcggacggttcagagcgaatcgcgtctcataaaatcgggatcgttgatcccggatccaaccaccgtgattgcgtaccagttcgttttagtacagatatgatctgggcgctctggttataatcggacggctctggtccccgataccctttcggtctgaccgatttacatatgggccctcggagaaaatggaattcaacccaccgtctacaccggggactctctgagtcataggaggaattaccccggggtccctgtgttttctagaaaatgaggcccagtccagagaacagaaa

SEQ ID NO: 25655 - DNA, 372 bp, Zea Mays
aaaagatgaaggcatagaagagccagtggtatgagtacgacaaagaatgaagttaagataagactcacacctagcaaagacgaggttccgaccaagggcgggataagtaaaacacttccctcgaattgagatgagagagggaattttaaataacggacataagatagtcatcaaggtaagatggagagacggtgaaggtaaaggtagtaacagataacgaagggtggagttaaaaactcgcaagcgacaaggaataggatgcaactaagggaaaataggtaaccttcaacttttaaaattgagacgaaagagagaaggttttggagcacaggtataatataggcatcaaggtaagatatagaggtgtcaaag

SEQ ID NO: 25656 - DNA, 308 bp, Zea Mays
tactcagcctggaacctgcctcctcccaaagccttcaccctttttgtgtcaaatccacctgtgactgatggcaatttgggccttagagtgcgaccctctgctgaagaagtcagtactttggttgcttcgcttggggagattcctgatgatgaacggcaggtttattttgaagtgcccctgaaccctagtgatgcggacataagtgacatgcttgatctgttagctgaggattcatccgacgctgttcctgttggtacgttggcagtggtgcccctcccagaggttgatacaactttggatgtcccgag

SEQ ID NO: 25657 - DNA, 393 bp, Zea Mays
cattagagacttgggaactcgtccctctctcgactagtttgtaaccccctattatgactcattgcagggtaatgcaagtcacccaactaggcgtaggaacatttggcccaaactagtataaagttattgtgtcctctttgcacaccatctatactagatgcgaaaatcacatagattactagctggtggtttcagtacaccaatagttggcacgccaagtacgggatcatttgtgcatcatgacactttttcaccacacagccgcggatggctagctatgttgtttgctaggtactgagcacagacatgcattttagtacctcgacttcatcatcaccctcaaatgggagttggcgagggtggagaccaccatcgaatgtcgccaccccgcta

SEQ ID NO: 25658 - DNA, 359 bp, Zea Mays
cccagatggtatcccgatagaggtgtggaaatgtcttgggatattgctatcgtttggctaaccaagttgttcaaccatatttttcgatcaaacaagatgcccaatgagtggaggaggagtacattagtaccaatcttcaagaacaagggagatattcaaagttgtgccaactatcgagggattaagctcatgagccacactatgaaagtctaagaggaatgacacataccaccatgaaccaatttggattcatgcctggaagatcaaccatggaagcaattttcttaataaggcaggtcatggatcgatataaggaggagaagaaggacttgcacatggtttttattgacttggaaaag

SEQ ID NO: 25659 - DNA, 655 bp, Zea Mays
atccaactttagttggctgttctgctatcgactacatcccttttttgtttgaatgcgcagcttgctaggatatcttttctttcttcctttcagaggccataggattgcatgcagcatgttgcagtctagtagaatgatctcatcaagtttcagcactatcattgcactgagatccagcctcttcacagctcatcctgagatatcaaggctcacgagctcattgaatgatcctgtcaagagtacattctctagcttagcacacccagccaatgagatcttctctagtccagcacatccttgatgaatgacgatggtctccaggctgcagcttttttctgtggcagatatgcaactctttccactaattatttcgttattaccagagaggtcaagaaaccgcaagcttttcgaccctgccaacaagtcatctttccagagagttgtaccacattgaattgtagactttgctactccaagtttgcaaatattaggaagctgcccctgtaactggcgtatgtcccaatccttggctccgatcacatttagcaccctcagctgagtcatgaactctagcatctgtccaaacaagatctgatcacagcatgtgtagcgcacatccagcacccacagcctttggaagcactgctggatgcca

SEQ ID NO: 25660 - DNA, 284 bp, Zea Mays
acatccaaatgcagcaaccctattctcagtctctgtctgctctattgtgggcaatagccaaaatactttgctccgggatgatcgatggatacatgggaaatcagcgggtgaacttgctccagcactcctgagctgcatccccaggaaaaatcagaagatcacacattgattgctaaataataggtgggtatcggacttaactggcagtctgtcggctgatgttcttatgggcttcttgatatgggatttaactcaggaagttcagttgcaacctggagtttcag

SEQ ID NO: 25661 - DNA, 322 bp, Zea Mays
gaaaattaaggtgtttgctactctggagcccagtagaacaacttggagtatttcataatacatatggcagctactaaacaatggacggcaaaatgaatagtgctcatgacactaataccgaaacctttaaacgtactgttttccacactatgaattgactagtatgtcaataccaattgctccagtgttacaggaatgtctgatactgcaggttcgatacctctgagctcttgcacttaactggtgtttaataaagaaataacaatttataaacaagttggttgaaatttccaagtcaaagtgtgccctaaacgtatagatc

SEQ ID NO: 25662 - DNA, 558 bp, Zea Mays
agaaaagttcaggggctactgcgcaaagatcctaagacacagagaacagcgcccaaggacggcgggttctatttcaagtaaacctagggtctcttaagcaaaacgcgcgccgcgaaggggtatcttgtgatcacggccgcccgatcagattctaacggcccagattaaaacggaccaacccgaaccgggatacacatagcgagggcaatggtatactactgaaacccgtactcaccagcggtgacgctgcagaagcctcctaccacggagttccccgtcacgcgatggagtttgaatgaccgcgaggacccccggttggtcttcttcacccgacaggctacgatcacgcgtggcccaacggtggttcttcctggtatttcgacggcgcccgcccaatggcgtccagcgccatagcatgatcttcacccctcggtctcgctcacgacgacgggttcatagaggtggacacaagtgaggtcgatggcgcgaccccacatccatggcgaaactaagtcagcgatacccaagctagcgcccagatgccacccctctattctg

SEQ ID NO: 25663 - DNA, 1137 bp, Zea Mays
ggagcatagcgcactggctttctgccgtgcggggcccactccccagcctcccggtgccgtatgcgtcatcttccaggtttgaccggggtatgcgctgtggcttcacggtgggccctaccggtcatctccatctccatcgcgtggcgtaggctctggttgcacaccgcaacagacggcgctagaaccggtcgtttctgtttcccccaccaaaatcggactcgttaatccatgcctacatatatgtgtgaatcgagctcctcctttcccccatgaaccgtgtgggcgagcctcgagggagcgtggagggaaaccttggctcctgtacgggagagggccacctgtgcgctatgaatttctcgccgatggagatcctctgccgctgggccactacgctccgtggttgtgctccaccacttacgtccagctctcgttgatcgacctgggaggatgcgcagcgcacacggatgttcgtcgcagcttcgcctgggtggattcattctcggcgcggctggaatttctcaccgatgtgagctctccgccgccaaagcttcacctgccgtgggcgggcctcgtcaccacctcgcactccggtaagaagcctcactatgatccaccatattgcactcctcgaatagcactgatcggattggagtttggggcacggggcgtctgtggaccgagcgccggtggtgggcgccaccattgtggctgatgcgcctgaccggagttttgggggtgggatggtagaaagaagacaacgtttggggccgttgatctgcgattcggcgcacacgattagatccaggcggtgtcttggcttcgggcatcgtggaccgttgatcgttcatcgaggggaggagattgatttcggctgcattgaattcgggccctcggatcttgatccagtggccgttatttcaataccggttcggggttaatacgttctaatcgtggccgtagacttgtgatccaagggatcaaatcgcttgccagttcgttgttttaatctgagcttttcatctcagatccgacagccatagatcaccaataccccttcgactttgtagatttatacatgagcccctgacaaaaacacaaatcaacccgcggtccatagatactgtgcactgagtctag

SEQ ID NO: 25664 - DNA, 341 bp, Zea Mays
ggtgagggctggttcactgggtgcacaattacttagcggagcaggctagggcaccaatttatagtgtccaagggcggtggcacccaattttggaatggcgcgctggcggccggagagaagggaggtcactggcgcaagtgattcgtggctttcaccgtggcatgaccaccggcgatgaacggacatgctaaggcgattcactgcgacgtggtagagcacctaggcacgtggcacccgagcgataggcggccaactccggtgaggttatctggaccggccgtaaggcgagtgggtacggcggccagggcgaaacagtgtcccaagctcatccccagcgccag

SEQ ID NO: 25665 - DNA, 651 bp, Zea Mays
ctctgtgactgacttcttctcctgcttgtaggactgcaaatcaatctttattttctccaggaaggtgaccaggtagaatctcctttcaaactacctgatgaagacatcccaagacaggacccttggtgaggaggagtgcgctgcctgcacgcctctccaccaaatttgagcctctcccttcagcagctgtgtgccaaagcgaacccgatcaccatacacaatctcgaagacattcatcttatcctccacgtaagttagccaatctgccgcctcgaccggagtaccactgccataaaaagatttcaacttcatgcccatccactacatcagagaaataccattgactggaagaggcacttcggccccgccacctggagcagcacccatagggacagcgctcccgggcactcctccaccaatagtaccctgagcagcacctgccggggcaacaggaatagcttgcctcagaatggccaactcctgctccatggcctgcatcacggctaacattgccgccggactcatcaagtccccactaggaacttgcggactaccctgagccctacgaggcggcatagctgcagccacagggatgagaataataagtaaataagattggcatagcatatcttcagataatgtcaaactagc

SEQ ID NO: 25666 - DNA, 475 bp, Zea Mays
gcgagcgtgagccttcttactcagcaccaaagcagcatgcaaagtattgggaggtgtcggtgtgtcatcagtgtattcagcctcacgagtgacctagcaaaatgagtgaaatagcacataaagtaagaacactcccaggcataccacttaatttggtatttcttgaaatctgctctcaggcataggatctgctccgcgccatcgaacttctcgtcacgctgggctcgtcctccaggtcttgtagagtagagaggcgggtgtgcaaatcagacaggatttaggtgggcacgacaagactggatcagatcgatggatgcactgtagtgcccagcttggtcggttgtgccatgctatacctcatctgaaacgacactcccagtcatgccgtcgccaccaagggactgcacgcaaccgcccccgccgctgagggactacacgagaaagtgtacgacgccaccgccgagggactgcgcga

SEQ ID NO: 25667 - DNA, 883 bp, Zea Mays
tagcagcaatcacattccgtgatcttgtattgtacacaacaaatgaaaaatggcaggtattcattctgattgcaaaactacaattaatttagtaaacaatttatatggcattgcctgatttgagtgccatgtttacaggtagtaaacttgaaagaagcaagagatttctccaacaacaaagggttcatttatgtttttaaggtatgtctttaaggtttgaagctcctgacttgcttccagaagattaatacctgcttttactgtttcgtggttattgcaaactaagactgtcaagctcaaagaatttatgatctcacatatatctattaaaatgcacagaaactggagtggcaatcactgtcagttgatctgttgcctcatcctgatatgttcgccgatgcaagatttaactcttctagtagtcaagacgacaaaagagatgatgatggtgcaaaacgaatgttttttggtggtgaaagatttttggaaggaatatctggagaggctaacgttagtggtttgagttttatttttataacatgttgtgtaacttattaacttgttcatttttgctgaacttcctttttcctgggtttcttggctcacactttgctttgaacgtcagatcacggtccagcggacagaacagaataatccacttgggcttgaggttcagctacatattacagaagctgtctgtcctgccttaagtgaacctggtaaccagttcctatctatgaagcttgaccattcggttcaatacttcaattactatttgcaaaaaattgaacttaaactaatatttttgacaggcttacgggcctttcttcgatttatgactggggtatctgtgtgcctaaacaggggagatatagatccaaaa

SEQ ID NO: 25668 - DNA, 573 bp, Zea Mays
accgcctcatctaaagcacaggtgagtgggtactgtcgattcgccatgatctcctctgtctatagcatcatcggaatcggtgttttaccgaccgagagcgaggagagggtgagaagtgaccatggcatcgccgtcgacatgtggggccactgttggtgttgttggaataagaaggagaaatcgggttcgttcgattcacaacaggcgggtaggattagatctggggtggtaaacatcgtgcggcattgatgctctgatggtcggtcacgattatatcctggcataccggtttggtatgtggagtactagccatccgatggggatcaaaaggacgtagttcgatcttgcgtgaattaaatctcgactgcagatcgctaatccattggctgaaatcacacaccgattgggttaaagtgtagatctaatttgtgccattgatgttggattgggtggctagggtaagttgatacccccttcaccgagtacattttgcattggaaaccctctggtttccattattcaacccgtcgtttacctaatttaaaggaatagcggttgggtcctcatttctca

SEQ ID NO: 25669 - DNA, 404 bp, Zea Mays
ggaagaggtcactagtggcgcaatcgtggcgttcaccggtgcattggttcagagagggtaagctcaattgtgccacggttactacctcgtagtaaagagtcacgctgtggcataactgaggttgccggagtgtccacgacgacaccggcggttcggccacgtcgcaacggctacaggcacggtgataagcttccccttcgaccctatctacctccccgcgagatctttcacctccccgtgaatatccacagcgtgcccggcacgaatcccggcgaccggcgcaaatccggacgtgcagatcaccagcggcgagggggactgaaccctaggatattctagtggcactgtaccatggaagatctgattcagagcgcctgaccgagcaacttgtgacgccaagttct

SEQ ID NO: 25670 - DNA, 274 bp, Zea Mays
agttgttattagatggctatcgatagcagtgaagcagacccacttgagattatcaaggttgtgtccgagttcccagatgtgtttccaaaggacttaccaagtatgccacctgagcgaaaagttgagtttgccatagagcttcttcctggaaccgcccccatctttatgagagcttacagaatatctagacctgagttggttgaactcaagaagcagattgatgagctgtcagagaaaggatacatccggccaagcacctcgccttgggccgccc

SEQ ID NO: 25671 - DNA, 576 bp, Zea Mays
cagaccaagcctaccacgaacacgacctgctactgcatctgtcgatggattactcatttgttttcaacacaacaagaattcatatggatttcagattttgggaacgccaagcttactttgtgtgtgtgtatggccaccgacgttatgtgttgtgtttgtgtggccggcgtcaacattttgaccttctccatgttcatcgtggactgcacgagatcaaacgaattgttcatttgagtagcaaaagacaactagagagcggtcaagaaatgtagcaaacgtaattggattgacctaccttcatccactatgacgtgaagatcttcacctagaccaagacacgccaggagcagcatgcatcgtgcaaagagggccatgaggtagtgactagtgaaacaggaagcgaatagtgcaacgttcttcatgggtatttagcgctaatttttccctccaaaattttcaccggccgccaccacgcgcacgcaattcctttgcccgccaccgcataatgagtcaggaagcaaatgaacgcgcccaaaattccttcggccggcaaaataatctattccttgcatgcat

SEQ ID NO: 25672 - DNA, 1145 bp, Zea Mays
agcatgctgacccagcctctaaaaatggctacagcacatcatgtgcagctgaactcaaaacaaatcgtccaaagaaagcattgatctgtagagtgacaaatactgttgcaaagaggacacggggtgcttgcgccaagaaagatgatgcacgggtaagttctagtttggagttcagtaaagtgacgtctcaagaaaattttgagataatctctcccaaaaaacttgacactgcaaatgctgatgaacaacgaagaaattcacctaagaaaatacagaacaccagagtaaggaatagagccacgaagaggtcatggaaatctgacaccaacatgagcaatgatacagtaatggacaaagctgagacagtggctgctggtgcattgtctgatgacttgcttcccacagacaatgttgaagactggcctaaaaagctttccagtcatggaagtgttagtgactgtgaaacactttctccaaaaaccatatcaaaggccagaattaggaatgcagcttccaacaggaaaataagaactgtagaccacaagtccggcgacaagtttggcaaaattggtagtgccgttaagtctgaaacaaaagctttttcatcaaacagaaccgaagggatttcatgcaatatcagcaaagtaattgctgatccagactccgagaagtccaacaaggatgtggtaagagaggtgtcggggctgttttgccaagattcttgcacgatagacaagcaaggatcatacaattctaagttgagaagcagcacaaggaacaaagctccgactccagatcatgaaaaggagaacagactaggctctagtgatctcaactctaaaccaaacagaactggcagtctgcgttccaaatctgatgcaaaatcgatcaagaaaaacacgcgtgtgctcagtaagcaccaaaggggaaatagaagtgaaccttgcaccttgatcacgagcaaacctgcattgtttatcttaagtggaaatagtgagcagagaaggggttatcgctcgatacttagacggctgaaggggcgagtttgtagggattcacatcactggtcataccaagcaacgcatttcatcgctccagaccctctgaggagaaccgagaagttctttgcagcggctgcagctggc

SEQ ID NO: 25673 - DNA, 430 bp, Zea Mays
acaaggtgtgatggtgtagctatgtcgacccacctaaatatgcaattgtatgtatgtgtcaaggaatagatccctggggcctgcctgccatagtgagcacacgagatgagaactgctggacatccaagggccacccgtcagtgagggagaaggaggactgtctacccgggaaacgcccgtccccgaataaacctcgagacaccgagcccaaggtcaagcaaggcggagctaccgagggggtagggcgagccggaaggaagccactcaagtggattcctcgcttgacccgagaccaacccgtcataagtggtcagaccattaactacgcctaacatcgagtcgtagtagagagccgacccgtctcacactcatgacctgcacccctcccagactacaatgcactcatgacccccgtgtcccttcggtcagc

SEQ ID NO: 25674 - DNA, 374 bp, Zea Mays
cgaaaggtgcacaaggagatggacgagatctataccctggtaagtttaattgattttacaatacattgatctgacagttcttaaacatctctactcctattaatgtatacaataagttgtttgttttgcaatcaacactgcaggcaactataatctcgagaataccatggagtcccaggtcaggttcattgagctaaacatcttgccgaagcactaatgtagttactttgttaaatgggttttggttccatactctacttagatgtagtggttatgatataagcattgggtatccaccgaccagcctacttgtgtctatcttttgatgaaagttgttatgattctttttattgtttgtagtgttggtgtatgtt

SEQ ID NO: 25675 - DNA, 437 bp, Zea Mays
gccgctggagcgtaataccctactccactgtgtgatgtattgagcttgagagcttgtgtgaacttgtgagcctgagctgggtctatgtgtggcttgagcctgagtgagctttagtgagcttcagtgagcttcagtgagcttgagttgtaacgttgcgtgcctcgccttttatagctgaaggggggcacgtacaagggtgttgagccccgacatgcgggcccagggacataacgggtgtaatacttggagcaactaatgctggtcgccagtgcattccccttgcgccctgatatccgcagcctgcgtagtatcggcgtgcaatagaagcttcactggcaacatatcgagtgatgatgagcacagtgtatgccgcagcatgggcgtactacctgctaccggagcggacgggcacgccacctgtaggatggcctggccgc

SEQ ID NO: 25676 - DNA, 587 bp, Zea Mays
gatatcttcgacaatatatctctgataccaattgttaggacccttagaactttgttgtagcaagcacttgaccaagagagcacacaaactcacgtaacagtaacacataagaacacatatgaagcacaggacagtagcgcaaggattgacaaatcacagctgggtggagcatattagaggggccctgtcagtgcaagttctggtcgaaaatttgcaactttgggatcttgtatatgcgctggaactccaagccaacaatctaggcggtcaaacacataaaggctaattttctaatatgggtaacataccaaaacttagcactcaaggtttattttcaacatgtccatgtgaacttgattaggctaataaagggattttgggtctttcgtttgggtgaatttagaatgaggtggtcttggagtatttggcctacaattaagcatctttgtgtgagtttgtgctgttcatgggaggttttatttgattcctttggggattatggaactctgtattttgacatggggaagatttggattgagccatattgtttgaataatgattgtctaacatccatccttatcctctcc

SEQ ID NO: 25677 - DNA, 456 bp, Zea Mays
gtgggatgatggatatttgtgctgatgtgcctgatgccgggttggagttatcccgagcagcgtcccatgcctcatcgaccttggatcacggtcttaagggtcaggaggctgatctggattgctctgctcccaaggaagtggttgaaggtccttcagccttagaagtggctattacaaagggttcggccctcaaggatggcgctagcgcttacctagcccccgagggtgttgccggagatgatccagctcggatgggtagcgcgagttatgacccagcccccgagggtgtccgagttgattctccctctcatacttccatggatgttcacgtagggtcttctcctccgcattctagttgcctggcagcggctcaagcttcaggtcagggagtcgccttagaggccgacgctcctgatgacagagttttgatttctgctgatgacactgacttggtcc

SEQ ID NO: 25678 - DNA, 296 bp, Zea Mays
tgtgattgagtctgtcctttataacgttgtgtgccttcccttttatagtttaagggaggcatatacaaggatgctgagccccgacatgcaggacaaggagcataatggaagaaatacattatgtgaataactaatgctgacagagtaacacatgagtaatctgcgggagtcatgatgactccagtccatgcagcattgataggtagtaacccttggtacgcaggagtaatggtgagtaactgcacggcccacgtatcatggactgagcacgccgcctgttagtggaatggacaggc

SEQ ID NO: 25679 - DNA, 861 bp, Zea Mays
taagagctggagatccaacacacaatgtatttctcttttgtctttatgtgcaaagaacaatgaaggcaaagagttggcccttagtttttctcaaggatcagatttcgttgaaatttcttctgatgttgacaagctgtgttcaatttggagcacagtttctctaagggttgatagttctgaggatgacagtgatgatggaaaaccttacaaggttataccaagaagttcgtaccatcttgtcaacaagaaaaacaactatggcattgcatttgttgatggcttgctagagtttgtgaaaaagccgggaaatccatttaaagtgcaggtttttgatgaatctattttttctgatgcttcaagacttactgttaaccatatgaaatgggacaattatacttacttggatgtggacgatgatgtgcctttttctgtgagggatagattggcaagtggtgcaagttctcaacatgtaatcatcaatgttgacaagattgtttttaccatcactcatgaagtctctgatactgatatttttttcccacttgtccaaacctgcataagtgatatccgtgttgttacgcaaatatttccatctaaaatcaggattctaagttcattcaaagtctcagcgcagtatttcattgcacgaagaaatctgtggtcagtcttgtgctaatatctatatttgttttcctgtctaattgcattttgctggtttcttccaaacttgcaaggagatttggaattgagttcttgctatttgacacacagggaagaactcatctctcctatcacctcctatacattctttcgatttaagttttttaccccagatccagttactaagtatggaaagacggc

SEQ ID NO: 25680 - DNA, 1090 bp, Zea Mays
ggagagtggtgatggtaaccagagccggaaggccgcgggtcaccaggaatgggtcccggacccgggtagggaggaggaggatagtgaccagagccggacggcctggggtcaccgggagtgggtccctgacccgagtagggaggaggaggatgaggaggatccgaggtgtggaaagggtcatcatagtcctcgacctcatcctctagggtaatgaatggcacaccaaactcctgttggtcccactcattaaggtctgcggggaaggtaggggctagaggtggaggagacccgggagggagaggatgaccagtctcggctgcataacgaagaaaatcctcatgcagccggtcggtcctacgacggcgcacagactcctcgaccgcccgggtgcggcacatggcgaagacgccaagaaggcccttggccagacgaatgaaaagtccccggcctctaccccgtccctggctcggaccacttcctctcccgctgcggtccatcggacgtgaggcagcggcggcgcgagaggaggatgggtgatgtggaggctgaggaggtggctcatcagaggaggcagggcctccagaccctgagggagcccgcttcgtacgagcagctgggttggaggaatcaacccagtagggtacgtagcgggagtgtttgatgggtttttcgaagtgagtctgggtgaccacttcgatcatcttcatgataaagggtgcatgaagacaccctttgagaggagaccaggaaacacggatgatctcttcccagatcatgtcaaacacattaatgcgggcgagactgttgggagcaaggaggagaaggaagacccgactctccccaaggacgttcatttgattcccgcccttcaggagaacggtcatcctggacaaagagttaaggtacctatagtacctatgcatgttggcggtggtccagaactcccgatccatagagacatgaataaattcagtctcttcccacatgggcagccaaatgtcatggactctcatgttgctgccctgaatatcagcatcagagaagcccagaatatgggcaaaatgacggtagctgactttgtgccagttcc

SEQ ID NO: 25681 - DNA, 861 bp, Zea Mays
ggaagggagggagttcaggagaaggagaagaaggtagacgaggaaggcatttccatagagtttcagatagtgttccttacaagcataatcctgaagacagacatcatctactacatatacttcacacacaccagggacccatcaggcagactaacagatagataaacccaccacacagagacctgcatcaagcccacttcggaccactcgtacggacattaggacgacgcttgcgagctcctcggtgagtggtttcctttgtgtgcaccggcaacggaggtgtaacattccccggctcttgaagacctgcttgaccccaagcaggggcgaatggaaagcactgttggagagcttcacggtcctcccaagtggcgagatcgagcggtaggccagaccattccacaagcacttgctggacaaggtgatttcccttggtaatacctctggtttgaagaatctgttgaggaacactgaactccggaagagctgatggcaaggtagcagtagtggcatttttgaagcctgaagcaagccggagttgagaaacatggatgactgggtgtattttgctagaagcgggtaaggccaagcgataggctacattacccactctggctgctacctgatatggtccaaagtacttgtagctgagtttgtgatgagcccgcggcataaccgatgcttgtacatatggttgaagcttcaagtaaacccagtcaccaaccgcaaattcccgctcagacctgtgtttatcagcctgacgctgcatgcgaagctgagctcggaccaggtgttggtggacaagatcctgcataatagaacgatcctgtaaccattccgacagctgaccaggcacagtct

SEQ ID NO: 25682 - DNA, 527 bp, Zea Mays
atccattgaaccaaatggatacactgcttagagatagaatcgataaaatggcgtcatgattcttggaggaagagcatgagatcgaccagaattgagagatttaggtaagatcaacatccgatgcttgggaacgggttataggagataaccagataatagggcagattcataggggatcccgagattcggatgataaggccacaacacgattcacaaggaaaaagagtactagatccaggtgaaaagagagatcggcaaacaggatcagctaggatgatcaacaggaatgctatgaagttttaggggcaaagatttatggaaagaaatgtggccttgatagggtttgcgcaactaggcaccaacaacaaatatattttttttgacacaagtgcacaaggagacttgggttggtctagcggtcaagctgtgggggtctataagctgtgcaggtgtaacttcaaaggtaaaacactcaagggggctagaaaataccaacacaagtaggatttttttttaagaaggtttca

SEQ ID NO: 25683 - DNA, 365 bp, Zea Mays
cgccaaacacaaggtctatttgatgttcaatccctctcttgggtggtagccctggtggtacttcattaggaaacacatcctcatattcctgtaatgcatcaaagacaatacttggcaaagtagaatgtaagtcgttagtagaaagaaggttgtccttgtacaggagcataaagaacatggcattaggttcactcaattcttttagatccccctttctagtcatcatgactaatccctcttttcccggtgtcttggttattggaggctgtggagttttatttggctttggaaactcttccttactatttttgtggatcactctcaagtgcttctcgctctctcgctgtttcttctttagatcatcc

SEQ ID NO: 25684 - DNA, 623 bp, Zea Mays
ctgttgcacttgatgagactattgacaaccttaggggggatgtaatttgtaagcttcatcaatttgttcatccaggaataattgctcttgtgagtaccaagaaaaactgtcctagtttcgaaggttgcttattctatttttatatttaacctgctttaattgtcatgctcaggttataaagcctagtgttgttggaggttttgagaatgcagctcatattgccaaatgggcgcagctacatgataagatggccgtcatcagtagcacgtatgagagttctataggtttggcatcctatatacagttagcacattatgttgaccaacagagctctatagtctccagaataagaaacaaagatacatgtagagccactgcacatggacttggaacatatcagtggttaagggaagatgtatcagaacaaaagttaaagatccatgcatccccacttggtgacggaatccgagccacagtagaagatgcccatggttatcttcaccatttaaacataaacaatgagaagataaaaagtacgtatggtgaagaaaaacataggtcatattctatccaagttgatgtggacgattgttcttatctagtcaaacttcgagaggctggtg

SEQ ID NO: 25685 - DNA, 449 bp, Zea Mays
cgaggatgaggaagaggaggaggaaatccccttaattcggaaaaacagtcgtcgttatatagtcagtggtgagagtagtggtgttccttctccagctttgtctgctctcgttggtctgcaagaattgtctctggcaaattttgatcagactctcgaagatatggtccctgaggatctgttgttcgagccgatagatggtggaatgatggaagtttgcgctgatatgcctgatgtcgggttagagttatctcgagcagcgtctcgtgcctcatcgaccttggagcgcggtcttaagagtcaagaggctgatctaaattgctccgtccccatggaagtggttgaaaatccttcagccttagaggtggctgctacagagaacccggtccctgaggatggcgctggcgtttacccagcccccgagggtgttgccggtgatgatccggctcggg

SEQ ID NO: 25686 - DNA, 401 bp, Zea Mays
gagagaaccggtgatgaagaagacgcccgacatcacttgatcatgcgttggacggtaaggattaaagggataaggatgaagaaaccgggaccgtaggatggtgattggagggggtagatttatctcgcgtacccgccgttcatcacgaatcgcacggctttgattagaagcaggaaataccccttcatcccaaccgttatccaccgtagaccggcaatctgacgactaaagcgaaatagtggggatcgtgcgctgtgagtcgtcgatctcagatccgacgatgactcgggaatcaggatttatacccatcgccggtctaatctgggcgctcggggttggatcggacggtccaaacatcactgtaccccttcggccctgcacatttccttaagagcccctcg

SEQ ID NO: 25687 - DNA, 514 bp, Zea Mays
tgcattttccaatcactatctatgtagtgtgcaaccaaacacatataggacaatgtttgattagaagtccatagatcagtagtcaatgaaatataatccactcctttaagggcctttgatagtttttctttttcagactcatacactttcaagcattctgctctaatggttttcctaccaatgaactcatattgtggattcaaatacttcatgacaatgttaaatcatgtatgctcaaccattctaaatgggtactcatgaactataatcatcttggcaattaattttctaacttgctcatgattataatctctaggggatgtgatagtagggagaccagaacctgattcacctgcatttgaaggagcaaagttgagaagagattgatctagtttcttttccaaatgctttgaatatgccccacaactcttcatatgcctcgataatgttgatgtcgttgacccttgcatgtaggcataccttttcttacaatacttgcactttgcctttaatg

SEQ ID NO: 25688 - DNA, 411 bp, Zea Mays
agagccctttgtcttgtccttctttacttgctggttcacttttcatgcaaatttgttatagtttacttgtaccaagtactgaatacaagcctaattagattgttgtttgaacctggcaagctgaagtttcagccgtatgtactgtttcaagttgtaagccatcgtaattactttacccatttgacatatccatccctttgcttactgaagaattaaggctcggtacccatttttgaattttgagataatgaactaaaacctggctgctctagtaacacatataattaatcctgtgatggcaaaactgcttgacacaagaatctgatctttggtgtttactgccttatggacctcttcgctcaagaatcacaagggtgatcctagttgcattgcattttaaaatatcctcaa

SEQ ID NO: 25689 - DNA, 300 bp, Zea Mays
cttttttcatgcagttagacctagtgtcgtttgaatcttggagaaaaaggcttctaaacttggtctatcaggcaaagcgatgaagcaattcagtggtgaacagtggactgaagaagatcctaggttctcggaaccttgtcgccggtgatctccacaccacaatttgggctcgcctgggagattcacactacgatagcacggacaacgcaggggggtaaaagatctcaacgtggaggggagctcaagccttatcatcggactattcaccgcgccacatgtcacgcgatcggccgaggtgcc

SEQ ID NO: 25690 - DNA, 322 bp, Zea Mays
aaagacgggccaacatgagtatgatgatgccatttgaccaaaaggtgtaaagccattggtcgcaaggccgattcgaacattcctcggttcagctgcaaagtctagatcaaacgtgtcgaggtccttccaagcatccccatctgaagggtgcacgattagctcatcgttctcatggacaccttctttgtgccattgcatgtgcatagtggttcttttagatagaaacaaccgtttcactcgaggagttagtggcaagtagcgaagctgcttatgtgcaacatttgtcatcacattgtcaccctcatcattaacaacttccaca

SEQ ID NO: 25691 - DNA, 397 bp, Zea Mays
ggcgaggatgcgccgatagtcctccggatggcggcggtcgggtcgacggagatcgcggcctctacaggcggcacaattctccctccttggatcggtaccatggtcaccgtggggtctaggacattgtcaaggacatcggtcccggcggtgggtggcctaccctcaccaagaccaactacgtcgagtgggctacggtgatcagggtaccgctcctggttcgccacatgtgggaagcagttcggtacggcgacatcgactactacaaggatcgacgagcgctagatgccctcattgctgcagtcccgcccgagatgcaattttcgctttcccagaaacgaactgccaaggaaggctaggacgccatcgctgcgacccgcatcggcagcgaccgtactcg

SEQ ID NO: 25692 - DNA, 417 bp, Zea Mays
cagaaataaacttatttcagaaataaacctgtaacctaacccccagtgatcaacaacgcaaaacactaatgagccacccaatccacaatcaccgaggccaggcaacccaacccatcgcattcgaagctgccacccacatcgagtacacacgtatcaacaaacaggaacaggctaaaacctcgcgcacgcccccacaacgaaacccgaacaggttccagaaagaacagcatactcaacacaggaaagaattgcgcaggatgaaaaggtagtgaattacatggctgatggtgggcgtcggatgtactcgcgtgcgtccgcttggtaaactcgtgtgtgacctccctttggccttttaattgtgctcggatcagatccatggatttttggaatcacttaaagatgcttcaaaaatccaag

SEQ ID NO: 25693 - DNA, 604 bp, Zea Mays
cttcattggacatgtgttgggatacaaacgtctagattgctctagtataggatgcaagttccctccgaatagcatcatcattctgcacatccctgaaaagtgcatatgcctctgagaaccggccatccctgcagaggccatcaacaagagcactaagcgtgaccacatcaggcagcacaccagacctgaccataccctcgtacagagtgaacgcctcctcgatctgcttcatcttacaacactccccaatgagtgcagtgtgtgtgaccacactcggctccactccatccgccttcatcctctctgctacctcccatgcagcatcagcatcaccggagtggcaaaacctggcaaccagggtattgtaccccaccacatcaagcgccagcccttgtgtagtcatcctctccaccatcaccaatgttgcggccatgtcctagactttacagtagccgtcaatgagagcattccatcccaccacacccaagccatcaattcctcggcctcggaccagcgtctccgccaatgccgcggcctcgccgataagtttggtcctgcacagccccatgagcgttgtgctcatggtgactccgtcccagggcac

SEQ ID NO: 25694 - DNA, 330 bp, Zea Mays
gaagaagagaatggtcacctcaagaggaagtttcaggtcctccgagctcagcagcaggacaggcaccagagaattcgatcctttgggtttccacccaagggaccaagcttcaacaagccagctggacccactccgtcatgtttcagtcagcagggtcaaagttcccttcaggccccctccgttgcaagcaaccaacctccagccaatgcctattggcactgcggagaccccagtcactacaagaataattgtcctcagttgaagacattcgtgcctacctactccaactcggtgaatggccccaagagtgccccagcacccgcctccaag

SEQ ID NO: 25695 - DNA, 446 bp, Zea Mays
gcggctcacagcttgcaagcagcacccagctgcatgcgtacctgcgtcatgtcgatctcgctttgggccactattagctagctagtactaataaataagcggcctagcttgatgcccgcatttaacgcaagtaggcagtagtatataccagtatatataaaaagcaaagcaagcaagagatactcaagatacggacagagccagcagcaggcaccgatccaagaatggagcagtggccgtggctgatatggagggtattgatccggcgcagtgctagtattgctaagaccacaagattatgagtattgattagtggtattacaccacctgtactcaagatacggacgatcctgccgcgtgggggccggatggatggagctagcatgcagacagcactgcgtgcgattaagttagccgccggcgtgtcccccgtgaggagccaccac

SEQ ID NO: 25696 - DNA, 846 bp, Zea Mays
gtagaatacgccttcttcccattgactatgaggggataaaagaaggaaaacgaggcgaagggagagggcgtacctttttacgtgtaatgcaaaacgacgctcgttgtgttttctctcggagggggcacgatcatttaatgtgatgggacgtcatggcctgtcagcctgcatccgcgatcggtgccatcagggaagatcatttcttggatgggtctacgatgcgggggtgttgaagatgatggccaaggagtcatcgtgaatcaacgtctcatcccctacctagcacgcaagctattggtgtttttgacctgactacgcacgacggggtatcctaggtgatgcttttgggcaggacgacgtcgttgattgtgactcgatggtacgtgtggatgcatgtcagaacacaacatagtttatacaggtttgggccgttggaatgtgtaataccctatgtctttttgatgctgagtattgagcattgccggtattcaaaggttacatatgagttgttggcggtgatggatgaattctcctatcaatctaatgacgacgtggttgctttaagagggatgatgagatatgatatgggaatgagatgaggtggttttgtaggggtaccccatcatccttatatgggtgactggagggatatccctttacaagctgtgaagtttatctgattcccatctcatatctttgacgtggcaagtgctcctgctcaccaggagttcgatcgcctttcctccaagttatctcctgagtatctagctcttcaggtacatgtgaattgtgtgtgcgagacattagcactccttctgtgtcaaacatgtataactcagctgtttt

SEQ ID NO: 25697 - DNA, 506 bp, Zea Mays
gaattaatcaaggactatgatttggaagtgcattaccatcccggcaaggccaatgttgtggcagatgccttgagcagaaaggcccagtgcaattgtatgaacatggatgcgagagttaccaccctgtgtgatgaattgtgcaagctgaacctggaagttgttccttccggtgaattaaattatatctcagtggagcccaccttacaagagcaaatagtccgagcacagattgaagataagggtgttcaggttatcaaagacatgatcaagcagaaggcagaaaaatacaagtgcttccgtcaggacagcaagggaattttatggtttggagatcgattggttgttcccaaggaccctgagctcagaaaaaagatactggatgaagctcacctttcaaaattctccatgcacccgggcagcaacaagatgtaccatgatctcagatccttatactggtggaccaggatgaagagggaaactgccaagtacatatccgagtgcgatac

SEQ ID NO: 25698 - DNA, 413 bp, Zea Mays
cgccgatgcatcgcatgagaaagaattgggaggagcgcgatatggtggtgttcgggcagataagatctccaccgagggcaggctcaaatgagtccaaaggtgatattttcctttcccctcaaactgatccaaacttcagttattacacaatgttcagaacactccacttcttatctccacactgatattttgaatccctccatactgggatactttctacggctgaggcctctagaacctttgttgaccagcccaaccatatatcaactcgagcacactagagaaaccagcagggaggggaaagatcttcaatttccaattcagtaatgaactccactaaaacagccttactgtccagcacagcccagtccaaacttgatacttcccaattgggaggggcctctagatccttg

SEQ ID NO: 25699 - DNA, 384 bp, Zea Mays
tccttgagaagccgatcgcgctccggccgtccaccaagctgatcaaggaagggttcgagttcaagtacaagacgctggagcacatctatgagaacatggtggagtacggcaaggccattgggatcctgcacaattgatgtgatgctgaccgatcctccgtgtgtgctttggatcttcctgtactctggtcgatcgcgtcacgtcgtcgcaagaggccaaaataactgcgggtggtttgaagtttgaatgtagctgctcagttcccctttaattttctgtatcgcgcgtgtttgatctaagaattacgtaggacgacgggatgatcttgttcttgttttcctttagatggaaaaccgtcctatttcataatcagttgtgaagaat

SEQ ID NO: 25700 - DNA, 519 bp, Zea Mays
acttgatgcactcagaaagaaggtattcgataaaagcgagaagctcgcagggaagtggatcagggaactaccatatgtggtccggagcctgtgaacccagccaagccaagctctgcatggaaacaccccattcttcatggtgtatgggtcggaggcagtgctacctgccgatctgatctttggggcgcccaggttaacctttgaaagcatagccgaagcagaagcaaccaggctagaggacatcgatgtgctggaggaggaacaactaaatgttgtaattcagtcggctagatactagcagaccttgaggcgctaccacaacaaagttgtgcatcatcgatccttcgcagtgggagacttggtcctctgtcgagtactaatgggggaaggacgacacaaactatcaccactgtgggaaggaccgttcatcgttgcagaagtcacacgaccgggatcctaccggctcacttagatggacggcaccgaagtgggaaattcatggaatatcgagcacctcag

SEQ ID NO: 25701 - DNA, 281 bp, Zea Mays
ttcgctgcctcttggctgcgagtatatctttatgtttttgtagatgattatttttaatgcgaagtgctcgtaatttgagctggtcttcagcttagatgccaggacctcgttgtccttgatgacgtcatcagcctataggtgggtgaaaccttgggggtgagggaggccctcagaactgcacgtgtgaatggtgccttcggggttggtgggttctcggtttggagacgcttgctattgaatgctccgtcgtagtttttgagtgcatcttgggtaggcctcgg

SEQ ID NO: 25702 - DNA, 441 bp, Zea Mays
cagaattcggctaacgccaaccatcgtttccatttctttggagtttcagcaactgcacagcggagatacatctcgaggcattggtttactctctcgctctggccatcggtttgagggtggtaggctgtgctgaggagtagcttagtgttgaaccgagtgaacaagtgttgccagaggttgcttgtaaagatccggtcgcgatctgaaacaatcgttttcggaaggccatgtaacttaatcacctgatccagcaattcctgggccacttgcaaggcagagaatgggtgtttcaagggtatgaaatgagccatcttcgagaatcggtcgaccaccactaaaatagtgttgaacccatcagaagaaggcaaaccctcgatgaaatccatggcaatatcatgccacacagtggtaggtgttggcaagggttgtagcaaacccgcg

SEQ ID NO: 25703 - DNA, 901 bp, Zea Mays
cttcttaagaagcccgacatggaagacatcatgcagcttggcacgtgggggcaattcgaggcggacagcaacctcgttgatgcactcggtgatgcgatatggcccaacgaaccgtggtttgagcttgcccttggacagctgcggtagtgaagaggcagcgcgctgtcggaggcgtagaagcacccagtcgcccacggcataggagaccggctggtgcagcttgtcatagaaccttttctggatggcttgagcttgttccagccgcgtgcggacgtcagcgagaagttcctcccgagcaaccatggtcttggccaccgcagccacccgcgtctcgcctggttcataggaccggatagatggggggtcccttccatacactaccttgaagggggtgtcccggagcgatgattggtatgccgtgttgtagatgtactccgcccatggcagccaacgcagccactgcttgggccggtcccctgtgaagcaccgaaggtacatgacgatgactttgttggcagcctctgtttggccgtccgactgtgggtggaaggctgacgtcatatggagtttggcccctgataacctcatcaactcccgccaaaatgttgaagtgaacacggaatccctgtccgacaccatggattgaggcatcccatggaggcgaacaatctctttgaagaacgcttgtgccacagactcgtcactgtaggggtgagccagcggaatgaaatggcaatatttgctgaaacggtccaccacggtgaggatcaccgacttgcccccacccggggcaaagcctcgatgaagtccaagccgatgtcggtccacacggcctgtggaatgggcaggggcagcagcagtcccgccggatggagatgctctgatttgttgtgttggcagg

SEQ ID NO: 25704 - DNA, 485 bp, Zea Mays
agaaaatggcccacttccattttgtatctgggtcccctctgcgaacgctatgccttctcatcgctggacaacctgcagatgtttttaatgtagagaacaatgtcaacagtgactatggtgcatcccatcaacctgtggaggtacttgcaaatttaatgggcctttcagttgttaaatgtttcaatattttaaacatcaagtactgattatataattcaaattcaaagttataaaaacctttttctgtcattgctgatctcctgcatgattaatgattgcataatgtcttgtttactgcagcttcatgacttttgggtatcacttatcaataattttcctagttttttttgtttactctgacttttttttgcaatttgttttttttcctgagtcagcctggtcctaatatgttggatgattgggaggagaatttggctattattactgcaaacagaacagaaggtgacgttctagtaatcacccat

SEQ ID NO: 25705 - DNA, 356 bp, Zea Mays
ccagggaccaaacaatcttatcttcttgatcagatagatttacctgattacaataactaatcaactcatcataaatcaatttcagattacccacaatccttcttctgaaagtaagggatgcaaattttgaagtgaaaacttcgttaacagagacatctttgtcataggtcaagtcaaacaaaacatgaaaacgaatagacaaaggttggttacccaaccaaatgcttttccagaaactagtttttaaaccattgccaacttcagatttacagtatttgtaaaagaagtcacgtaaactcagaagctttttccagaagtgtgaatcattttgtttttgcttaactaaaataaggggc

SEQ ID NO: 25706 - DNA, 375 bp, Zea Mays
cgaacctatataaaccatgtgttccgacgtgcatccgcacgtaccatcgagtagtgatcgacgtcgccgtcctcccaaaagcactacgtggactaccaagtagtgcgcatttgggactaaacatcgaaagctggcgcgctaggtagggggtgcgacatcgatacacgatagctccatggccatcaccttcagcgttgcgatcatcttcaacgccggggaggttttccactttcgaaccttctccttcatcgccgatcggaagggaatcctacatcgtgtcatggacacgggaagggaagccccaggaacccacacaacgccgatcggccctcacaccacctggggtcagaggcacgctcatacctacaccccgac

SEQ ID NO: 25707 - DNA, 459 bp, Zea Mays
ctaggatgaagaactaagccctccagcaagtcacagatatccaaaacctgtgcaagcgccctaactgaaagcgcaccccttatatcagccacccaattcagatttgttagagcatcttttaccagccttttggaagcgacacgcttagggacatgctcaaggacctcaggtgccatctcgccgatgcatctaccattcagccaccgatccttccaaaaaaggatgtcatgcccatcacccaattgagacacaactgccacattgatcaaggcttccaccgctccacaggcctgaacagggaggaccgaccaaggcttagagtgatcggttctttgagccaaggccacctagctcgaagcgacacgctcaaaagccgaagatcagtgatcccgagcccgcctagatctttaggcctagtaaccttaccccacgccactaaacagtgaccaccattggctt

SEQ ID NO: 25708 - DNA, 360 bp, Zea Mays
gccatcaacgatgctctaatggaatgctacagaggggctacgtaaggcaaaggcctcaggatggccgagcaaccgaggccctaccacaatcacgatgcggagtcctcaacattcttcgccgagtctggacaagcagacagctatataaggcgtgacggtccaacagcgccagcgaagatcacatgtcggtccaccgctggcccatcgagtgacgacttcgttggcccacctatcagcatagggtatgggtctaccgtttcgtgtgcgtcgcatgtggtgcacacgatgttgtaactactccgttgtcaggaatattccctgtatatgattggtagccagggataggatcatactttcgac

SEQ ID NO: 25709 - DNA, 398 bp, Zea Mays
gcgggattcccctcgagatgaactttcgttattcttattgctgcaaacttcaactgctcctcttaatccacgccgattcgctctgccttgcgctacatccgcgaagctagattgtttagtttggcttgaaatcgatcgcctgtgggaattgggatcggtggattgagttcagctgggatggtacggttatttggcttgctgtttccctggattgaagcatattgggtatttttgggttcgattgtgtttgcggcgcgagacggggattcagaagattggcgttcctcgagtgatccgattgcgagcatgctgtgaagcacttcgtggagggtttcgcctcgctacccaggtgcatggattgggggattattgaactgcaagtagcgttgtgacgtacc

SEQ ID NO: 25710 - DNA, 851 bp, Zea Mays
cggcgataagaacgccaccgcggcgtgactggtcgtcggtggccacggtaaatatcctcggcgtcgtggcaaaaggttactgaggtggcgagctccggttaaacggcgacccccgtgccatcaccgaaatccaccgcgcggaaagcttgccagcgcatccgaagtccgcgcttcttctccaactccggtcaatggcctataaattgacccctccccgaactccgtagggtagtaagctgtccagccaccacgaatcagccgcagtcgttcattggaatccgcgaatttggaattctccccaaatccactctccgccaccgcaagaaactgctcaccgcggccagccctttctaggtccgttcatccctcactttcctttgtttgagcactcttgtcaccctgtgatgcttaccgagcctccaatttgaactaagagaccaccactcgtcgggaacacgatcaaacgatcatggtcttcgcggttctcgtgggcaggctagaataggtcaccaattgtgcaattaacttgggggaattactcggggtagcttggatttggtgtccgccgctcgggtgcgccggtcatcgcctcaatcggccggtgcagtggctcgccgaagctcctccgtgcgctgccgtcgtcgaggacgtatcaggagaagaaatagaaggggaagggtctttctgtaatctgtcagcggcacacaggaatagtacaggaacttatttccagttacccagaaccccagggacctttccgcaagatcgccagcgcgggcgcgcgcgcgggcgctttctccctctgagctgggccactgggctgaaatcagcccagtactattcatctgttt

SEQ ID NO: 25711 - DNA, 448 bp, Zea Mays
tggtgcttggatgtgttgttcgtgttgtgctcgtcatcaattataagggggtggttgttctttggcaagcttcaattggcgtgctctctcactcttagtccccactcagttgggcggtccttcatcccttcaagggtccctccccttgttgtgcgcaatggagggagacaattgtgcggctttgctacgacgggtggtgtggtgtacattggtttgcgttagcggacaagtgtgttgtttgatggtcatgttctcaagaattcagttgttgttctgcttgtgtcaagtccaggtgtgtgtgcctcctctgtatctcaatgtcgtggtcgtggtcgtgttgtcttttgtcggttggtgtatattgtgttcatgttcactctataatcttatgagcctattgggctatccattaatgaaaatggaacaggtttaggtggggatcccccgg

SEQ ID NO: 25712 - DNA, 905 bp, Zea Mays
caatcatagctagctgccactcgagaatcccagaagcttcctgatatgtagtgggttcaacaattgccacacccgctcgtggaaaaccatagcgttctggaggttcaatggtacctcggtcacggagacgatagccctgattaaaaacatcattagactcatgattgtcagtacaagaatctggtacaggatcagtatcaggaccagccgtaggaatagagcgggaacgacgaatgtaggttttggatgacaggtggtttggaagagtaagaagaagatgatgtggaggtggtgttatgggaatgagaacatcagatgtggatgtagaagatgatggttcagatgcaggaatggaaggaaggcacatgaaagaagtagattctgtgggataatatgaggagtgagtagactggttgtgaaagaaggggcgattttcattgaaactcacatctctagaaattcgaatacgacgagtagaaggatcataacaacgatagcctttgtgttcagggctgtatccaaggaatacacactctacagattgagcagtcaatttggttcgctcacgtggtggtaacaagacataacatatacatccaaacatacgaagatgatcataccgtggaggagtcccaaaaagaacttcacctggggatttgccagagagtttagatgatggttgtctattaatgagatacacaacagtggaaacaacttcactccaaaagtgtgaaggaacaaaagaagatatcaaaatagtacgagcactctcaataatatgacggtgtttgcgttcagcaacaccattttgggcatgagcaccaggacaagaaagttgagccagagtaccctctaaggtcaatatatggcggaaattgtcagataaaaattcaccaccagaatct

SEQ ID NO: 25713 - DNA, 586 bp, Zea Mays
cttctgtgtttcagtacatcggatcagtccgaatttttgctccataacccgtacccattcatctgcttccagaggttctccagctttaacaaaaagcggtggccgggtttcagaaaaatccaagtatgtggtgtctcgtggcccttgaggttgacctctgcctccatgttgctgaaattgatttcccgccaattcacgcatgaaacgtgtgttgtcagcggtagcattgactaaggcagcgatagcctcggccaatgtaggaggtacaggtggcgggtttggagtttcctcccgccgcgggaagttcccgctccgtcatgagcacgagttcttgatggcatctgaggaagaaaaacatcctgaattattacatgccgaaagtacaccacctttattacattatgctgaactggtaataattatacatactcactgttacaactcaacttccttatttaatttacataaggacactacttaaattacactgctctaattatcttcgtccttggccgttcctactccactgccagcctcgggagaatgttcatctgcgaggttcatggaaggaggggctccaaaaagg

SEQ ID NO: 25714 - DNA, 510 bp, Zea Mays
ctttattgtcctcttgtcacaactgaagttgcttggattctgtgcagccaatccatccctaggatgacatctaacccttgagttgccattactactaggttagcggggaagtctatccccttatttcaatccttagattcgggtacatcttatcagactaaacttttccaccaactgagttaactcttagaggtggaatcattggttctacggggatgttatgtgcttctaaccatgatgtacaaacaaaataatgtgtggcactagtatcaaatagtacttttgctggatgggatttgactggaaacatactactgccacatttggtgcatcctagattgctgcagcctccaagtggttcacctttccacagttgtaggcctggccatgacctcctcatgcttgctatggtgctccttgtcttgctggggtgttggagactggctgctgctgagctactttcttcgggcaatgagtcgcctagtgaccttgttccccacagtagaaaca

SEQ ID NO: 25715 - DNA, 500 bp, Zea Mays
ctcaggggccagtgggtaaggtttctcagacctagggaacaacactagtggacggcgagttatttatgtgaaagccgaggggttctttattaaaacatccatggcaaaggggtattggcgaatcacggccgcacgatctgtaatcagtggtccagattagacgacgcaaagcccgatccggtactcacacatgaccctacgatctaccatctacggtcgaggatagtgcctgatgcaacccatctagatccgtttgatctaggattgacgggctggatttaataccgcaaagggatacacgacttctaatcccaaccgtgcattcacgatctaacagacacaattctaaactagcgtgatctaatctcctctgcccaactccaatccaacggcgcacgtatgttcttccacctctttccccccgattgagcaactgtgatttacccggacgctgccatcaagtgtagcggccgcgcgcggccagcgcggttgccccgcca

SEQ ID NO: 25716 - DNA, 543 bp, Zea Mays
ccgagttaagtaagcgcgagcatgttgcaccggtttaagtcgttgccgacttaagccgattgctccgttcagcagggcatagtggtcaccccgagttaagtaagcgcgagcatgttgcaccggtttgagtcgttgccgacttaagccgattgctccattagcagggcatagtggtcaccccgagttaagtaagcgcgagcatgttgcaccggtttaagtcgttgccgacttaagccgattgctccgttcagcagggcatagtggtcaccccgagttaagtaagcgcgagcatgttgcactggtttgagtcgttgccgacttaagccgattgctctgttcagcagggcatagtggtcaccccgagttaagtaagcgcgagcatgttgcaccggtttgagtcgttgccgacttaagccgattgctctgttcagcagggcatagtggtcaccccgagttaagtaagcgtgagcatgtcgcactgccttaagtcgttgccgacttaagccgattgctccgttagcagggcatagtggtcaccccgag

SEQ ID NO: 25717 - DNA, 391 bp, Zea Mays
gtacttccgggacatgactattgtgagggttggaggagacagcgctgctcctaatcctgaagtaaatgaggtggttatttaccgaagctttttgaaagcagggctttggttcccgttgagcaaattcttggtcgaagtactgaagacgtttcagatctttcttcatcaacttacccctaaagctataatcaagatgggtttgtttatttgggctgtgagaagtcaaggattggaaccaagcgcaaggtgtttttgtagcataaatgaacttctgtacgagatgaaggacaccagaaaagagcagtatcacaacaactttcggttgttacagattcgtcgctcgatcccaatgcaagccatccagttcccacattctgaaagagatggcttg

SEQ ID NO: 25718 - DNA, 278 bp, Zea Mays
atttaatctgaatgttcctctgctcaaagaaatcgaagaactccgagctggtaaagttagatcccaggtcagtgctgatgctgttaggtattccaaacctaaacattatctcctggatgaactccactgctttgatgaggtcaaggaagctattggcttgtactctatccacttcgtgaatttgtcgatggccaccagtatgtgagtataccctccttgagctttcttaaaaggcccaatcatgtccagcccctagcatgtgaacgaccaggtcacat

SEQ ID NO: 25719 - DNA, 324 bp, Zea Mays
tagctcgtccaccactggaattggaaatttgtccttgattgtttttgcattcagttcacggtaatcaatgcaaaacctccatggtttatctgtcttcttgaccaatagtacaggtgacgagaatgctgatgtgcactctcgaatgatgccttgtgccaacatctgatcgcactgacgctcaatctcgtctttaacagttgagggtatcggtagggtcgtacagtcactggttctgtaccagctagcaaccgtatatgatggtcttggcgacgtgatggtggcagtccctgaggatcctgaaacaaatcagagaaagaggacagc

SEQ ID NO: 25720 - DNA, 275 bp, Zea Mays
gtctgactgcagaggctatggttgttgactttgtcttcaagaatattcagccactgaaggatagggcatacccggcctatctgtaccgaggcctagctgactcaacccgggtaaccaatagaagaattcctgctgtggacttggtgagccagctcgaaatgatactcagaggcaaggtatcaaatgttggcgcccctgttgcatactcggcctggaacctgcctccttccaaggcctttacccattttgtgtcaaatcctcctgctggtgatggc

SEQ ID NO: 25721 - DNA, 305 bp, Zea Mays
ggagcagtggccattttaaggacttattgattattgcttcacctcatccttgattttgcttcaaaatattagtcatactgactaattctatgtcgtgctcctatatacccccttgccaaaagtattttattctagtgtggtatatacttctctcaatctattagatctgatctcactattatgcttgcaaaatccttgtagatgcccctaaccataaccttcttgtcttttgggattctttcctctttcgtcattaccttgctaccattggacaaatctctactcccttgaaattgacatgctcg

SEQ ID NO: 25722 - DNA, 296 bp, Zea Mays
atttttcatatgttttgattcgaagggcagggggcaggggttgggcatgattacataccaatttccttaggtagacaatcggggaagttggaacgcagaaattcctcagtctcccaagtagcctcttcttctgagtgattactccattggatcttatacattttgatcgatttagcccgagtcgatctttctttgcaatccagaaccttggaagggtactcttggtacgatagatctggctctatctctaattctggttctgctatgatctcagtcggcaatcgaacatatttctt

SEQ ID NO: 25723 - DNA, 281 bp, Zea Mays
ggggcagagatctcggcggatttctatctctgcctgcgctgttccgccgcctgagacaagttccgcggatccgctgctctaccagaaatctacaccggccactgctgttgcggacagggccacagatctgcgacgtcgctgctcccgccagcctccagccactgttcaactcggcttccgcgcctaggacctccgtcaactcgtccaagtcgggctgctctggtttgtttggtctcaggtctcctgttctccctaatttttgattcaattcaatatggcgg

SEQ ID NO: 25724 - DNA, 487 bp, Zea Mays
ctttttaagaagtcagttttcattcgtccaactgctgcccctacccaaaccactgagtcgggtgcctctggcactcgttttccagctttacctggcccgtctaatacctatttcaactgtggaaagcctggccatttcatcaaggattgcccttatcctaagcagaacaagccaaacttccaaaagaattctaggaatacttcttagggtaaaggtaatgtgtcgagcaatcatccaggcaaaggttaaaagaggactggacatgtttattataccgaagtagccactacaccagaaggagaacccatgctaatgggtatgttttctgtcgccaatcatccctcagttattctttttgatttaggtgcatcacacactttcataagcaaggcttttattgagaagcatagtatcctgactgaggaatcaaagaagggtatagtgattcagtcacccaagggtcaacgatataccaaagaaatagtat

SEQ ID NO: 25725 - DNA, 530 bp, Zea Mays
gggagatgggatcggggctataggaccgtaagagactgtgctttcaccgtgcgcaatcaatttgggcgaaggtggaaagggcagtgcgaatttgacttcgatttggttcactggtgtgcgtaatgaccgagccttgccgtgatccaggggctatttatagccgcggaggtccggcgatcacctcatggcccgaataccatcacaaacgcatgccaagcacgtagataagtgatacactgagaaagaatcacggtgcagaggacaccacggcggaaagggctgacgcgatggccgccggtgaatcactccggccgagctcgggagatggcgccacgtatgagtcaccctttccccggcgttatccatcctataccgtgcatgaatctagacggcaatcaacgacggcgagctgagctggcgttctgatccatccgaacacagtaccatggcacatcttcgtcagtcgcctgaaccgacccccttccatcgactagctctcatgattcttgtgaataaccgggcaaaattcc

SEQ ID NO: 25726 - DNA, 506 bp, Zea Mays
cggagttctccactgccagctgctcccatgtcatcgttgccaagtccctttcaccggccatgaacttgctggcacagcctcgccctgcttactgctcgccgcggacgtcgtcagtccctgatcatccgagtgtgtcgtttgtcgacgccgcgctcatgctcatttgctgcgccgtcaaagtttgccggtcctcgacaccaccgttcttcttcccagcgtcacctcggtgctgtcgacccgttcctcactggctgaagctgctactcgcaccttgctgcgtacgtcgtcgtcgtcgcgaggagatctgcccctacacctagctcgccctgttccgggttcgccgcagtgtctctaattcgtcggttttgctctttgctgcacgtgctactcgtcggagactcctcgccatgaggccctgttgttcgtgaatttcccttaccgaagcattattcgtgaagccatgtcgacgtcgccgtttgtcaccactgtgcccgagctatcgcccg

SEQ ID NO: 25727 - DNA, 508 bp, Zea Mays
cgatccttcgccgcgattcgtgtcaccggcgactggattcgtgcctggagttgatggatagcatcgcggggtaaaagatcatcaccccgtgcgctggacgccactctggctagctgtcgtgcctcccccttgcgcactgatccttcggataaggttctcaccgccgttaagccctcaccaccgtccgccgcatgtctttacctgtctaccgcatcaccgtgactcactctagctccacgttggtcgccggtgaagtcgccacgacggtagacacaaatccactgcgccaaggtccttctttatctccggccgcctgcatttgcccgaccaaattacgcgccacctcctaaaccccctataaattgatggccggggctgttgcgccgtataatcccgaagccatagcacccgctcccacccttaatcattcacctagctcttgaatttcaaactttccccaaactggtctccgccaccacgaagagcacctcgccgtggccagcgtgat

SEQ ID NO: 25728 - DNA, 376 bp, Zea Mays
gcgaagaaaatggattttgggcacttggctcggaattgatcgctcgaaacggggaattgagtgaaattgaagcctggtatatcggattggcgtgaaatttggcgaatatgttactggaggtgttgtgaaggtgcctggaaaatttgggattgatttgagcatttttgtctggtttgggtatttcaccgaacacgtggtatgcggtgagttaggtttttggagatatggccatttgaggattgaaaccctcccaaagggagctagaaacctgcagggatattcaagggacacataggaacacctccaaccacatggattcacaggaattcataatattttgaattgatcaaagtggtggaagaggagtgctcactgg

SEQ ID NO: 25729 - DNA, 476 bp, Zea Mays
taagattacagggacttcgatgtaagaatctctaaccatcgagggacgacgggttttatttttaagaaagccagaggctcataagcaaaagaggcgggccgaagaggtatctttgattttcagccgttcgattacaatctgaccgaccagattagatcagccctgatatgaaccggtacgtgtacgttatccctcagatcaaaatcctacggtcatggtttaacgaatcacagatctaatctgggccaagggatcagagatccacggctcagatcagtttcatccaaacgctgtcgaacttctaatcgtggccgttaagtatccgatcgacagccatagacccatcttccacccgcagtcgtgcaagagggaatcaacggcgcagacaacctcttcaccctcttccttaccagccggtcgaccacggtggcgcggtgcacaccgcggcggagctcaccggtgagcatggccgaacg

SEQ ID NO: 25730 - DNA, 441 bp, Zea Mays
atctcgctcaagcatggaggccgagtacaaggcagtggccaatgctaccgctgaaatcatatggatccaagtgttgcttcgcgagctagggatttcgcaacatcgacctccaagcttatggtgtgacaacattggcgctccgtatctatcggcaaacccgatttttcatcgtcgcactaaacatgtcgaagtggattatcactttgttcgggagcgtgtggcatctcgataattggaggttcgttttatctcatccaaggatcaaatcgccgacatcatgactaagccactaccggttactccattctgccatcttcagcgcaatctgaacttagttgcacgtcgtctagattgaggggggggtgtgttaatcatagaaggcaatatctattcatagaatgacagggctatacttagaaacgcatcatctgtatttttgga

SEQ ID NO: 25731 - DNA, 901 bp, Zea Mays
tcgtcttggccaccgctgccacgacatcctctacagagtcttaggcacctcaaccatcccctgcccccgcagcaacgctgcctcgcctagccatgtttgtcagcttgggcgccacactcgcttacccttcccctcttcaatgtcccgaactactcgtcccttttgatctcgtccattgtgacctttgaacatctctgataccaagcatctccagttactagtactatctggtcatcttgaatgacttctctcactacatgtggacctttcccctccgtcgtaagtcgaacaccttcactaccctctcatttcttcgcttgggtgtttactcaattcggctgcattatctagggtgttcagtgtgacaataggcgagagttcgataactccacgtctcgtgccttccttccctcgtgtggcgtatagctacagatgtcgtgtccttacacctcccctaagaacggcaaggccaagtgcatgattcacaccatcaccaacctcatttgcaccctattgtttaaggcctctcttcctgctagttattgggctgagggtccccacactgccacctacctcctaaaccgcctcccctccaagacagttagtcatcccacttctttcttcgccctcttcggcatagtcccttcctatatggacctacgcgtctttggttgtgaatgcgatcctaacacctatgtcaccgctccccacaaacttgtgcctcgattcactcactaccttttcctcagctactcatctgatcacaaggggtatcaatgtctcgatcttctcatccaatgcatctcatctctcgacatgttttcgatgagaacgattttccccttgttagctcctccacacccccgacctcgactctctcctcgatgccgattttgtcggc

SEQ ID NO: 25732 - DNA, 531 bp, Zea Mays
gacgcgcatgatatcctgggaacacggggttcaacttgtaaattctaggacctttctacgataatcttaatactattgtggatggcggatttattgcaagaaagcacagggtctcattcataaaacgatgcggccaagggttatcgattactctcagccgctcgatctattccggacggccctgatcagatctcaccctcgcgtgaaccggtgtgttattacggtcgtaggataaaaatcgtgtgctcacaattaactcgaaacccgtatgaatcggtacgcaattacgactgttcgatccgagatctatggttgccaacgcgaccctctagatctaatccgagtcacacatagccgatcgaatggccagggggcttcttccctgcgcaacagccgagcatggtgacgcatcctggcacacggcggagcctcaccagatttgtttccccccgatgcacaggtgcactaccaccaacattggcaggcacaaatcgaagggatggataacgcgagacaattggcaaagaattt

SEQ ID NO: 25733 - DNA, 403 bp, Zea Mays
taggaaagcgacagatactgtcatgcagtataatgggaaatttaaccacctttctcaatatgctattgagcatgtgaacacggatatcaagaaaagagattgttttatgagaggcctcaactcaaaattgcaaaataagatggccacttgctatgatcttaccttcaatcgggcaataagtgtggctatagctgtggaagaaaaggcacaagtacatcaaaatgtgaagtagacatggaaaggttctaggtcagggttttctcaatcgacggcgaagcaccagaaggtggtaatcaggactgctggttctacaaatgttctttatcgttcaactacctatccattcaagaacaccacttatattcgtcccaccaactggccaaaccaacttccacccacaaac

SEQ ID NO: 25734 - DNA, 715 bp, Zea Mays
cttcctaccagttcatccacttttactctgagtgatgtcctagtggttccctccctcgttcgtaacctcctctcggtacgtcaatttactcgtgacaacaattgttcgattgaatttgatgctcttggtttttctgttaaggatatggcgagtcgtcgcgtgatgcttcgctgcgatagtgatggggacctctacaccattccagctgccacccacacctcaccgcacgcctccattgccatcaccacctccctgtggcactctcggctcggtcatccgtcttctactgctattaatactcttagaaatactttcgccatttcttgtaataaagtagaaccacctctatgtcattcctgtcagcttggcaaacatgtgagactaccttttactccttctcaaacacgcaattctgcactctttgatttaattcattgcgatgtttggacgtctcccgtggctagcatatcagggtgccagtactatttggttttgttggacgattactctcatttttgctggacttttccacttattcgcaaatctgaagtagcctctcacatcactgatttctgcgcctttgtgcaaacccaatttggcgtcacaataaaatctttccaggctgacaatggcactgaatttgctaaccacaccctcacctctattttcatctcgtggcattcttttccgattttcctgcccttacacatcccag

SEQ ID NO: 25735 - DNA, 1193 bp, Zea Mays
ctctgataagaaccacccccgtgaacttcttcaagtaattggtaagtttgtagtctgtactgaggtcacctttgagcataattatgtacccaacttcaaccctgccttataattaacttgattagatttttgtgaaaaatgaaaagatgtctcttgaaaggatactactgttgtcaggggttcattatgttgatgacgttgttttttgcatccatgcgcccttttttttgttgaagattaggattagaaagtaaagagaacttcttagcttgaactttcttgtaaattgtttttaatgtatgtcatttacaattactttgcttgtatttttgtggcagatctacaggttttctcctaattgcaatatctattccatttacaatttctgttaaagtttgtgtactgatttccattctgataattagaattagtttgtttgtattttgtttgcgggttcacaattttcttttaatgatcacattaactattctatttacaatatttgttaaatgattatgtaatgatctttgtgttttacttatctacttctgttcaggcaaagacatgagaatcattgtgtttgcttttatccccagaacacagcaggtaccttatttcaattatgtatggagttgtttcttttagcatatttattttcatgcatgctgaatcttttagattttacttgtgattcttgtcttttcagaaaaatgaagtgtttgatgctttgaggagatacactaaacctgctaatttgtgggatctatatgcattttcttgtgatccatccaccattaagcatgattctgagccaaagtggcgtctcttgagggaatactttcgtctttttaggagaagtttaccgctacagggagtcgaggaagtttctttgtgtaatgaatggtggaggctaactagagttaattctagttattcattgtgttcaacttacccctctgaactcattgtaccaagaagcataaggtacttccatgttcttgacaataacatgtggtagttttgttctcttaaacacatttatgaattatgaggaattgacaataacatgtggtaaattgatactaccatttgtctactacattagtgatgaagatttatttcaagcctccccatttcgatcaggcaagcgcttgcctgttatttcatggtgtgaccctggtatgtatcctcaa

SEQ ID NO: 25736 - DNA, 291 bp, Zea Mays
cgccgacgtggtcatcagtcattctgacgctgacgtggcttcgtcatcactcgaacgctatttcaaaagcgtaaatgttgacaataatagctcggccatcacccctaaaagtgacgatatgacgtccgagttattcagtactattccagaggaatcaacttcacaaataaggcaaaactcgagatcaattgactacgaagcaaaataattgacataggaggaaacgaaatcattcttcattaagggaagttacagtacttacaaatcaactcattatgagttgatacttcc

SEQ ID NO: 25737 - DNA, 286 bp, Zea Mays
ggagcagttattcttgaagtgactggggtctccatagtgccaacagacatttgctggcggttggttgtttgcaaccgagggggcctgaaaaggaactctgactctgctggctgaaacgtgacggagtgggtccagctggtctattgaagcttggtcccttgggtggaagctcgaaggatcgagctctctggtgtcggtcttgctgctgagctcggagaacttggaatttcctcttgaggtgacttttttcttcttcttttgctctttccacttgtatggctttgtt

SEQ ID NO: 25738 - DNA, 321 bp, Zea Mays
gttattatagttatgaaatggtgttcaaagtgttaagtagatgcatagcttaacaaggtttaggtttaagacgtggattaggcgcgaagtgccttggtggatatataggtctagtgtaattgaagtaatcccctttatgcgatacaattgcgtcccctttatacgatacaattgcattcacgtgtctgttataaacattgtgtgtatgtgatgaagtcggtaaattgctttattagtcatcatgttcaatgttagtggccgagtaagtgtcatggttggatattacttgatttttcaagtatttggaatcgaataacatcg

SEQ ID NO: 25739 - DNA, 596 bp, Zea Mays
gagctaaaggatgacaaagaggatacactgcaagctgtatttgtgttcagtgatcccatcattgattctgttaaacacatatattgcaacctgtatgcatcagcaaaccagataactgatggttttccaccttgccaggtgatatgatccttttataacaccactcactatttaattcaaaaagttcagtgacagaacgtatctgagtctcatgtttccctttcactgctcaatgttcagcattgagtttgttctatatacctatttattagtggaagaatatgactgataaaaggaacttctgcatatattttcggtgattttatcatcgtttttttcaaccttttatttccttccgatgatagcaattaggtatccatgattcctattcacagttctgtagcctcttcaacagctatgttaacgcagaacacattgactgaacaggcatgcaagtgccatggtcaccctattgaccttttcaccccaagtaaggcaaaatggacgtgtccaacaactaatcgacagcttgtagtttctgatattgttgatactgctgtaaggattggagaacaaacagtattgtttctacctac

SEQ ID NO: 25740 - DNA, 410 bp, Zea Mays
ccgaagctcacaaagctgaagtcgaagacctaaggaaaaagcttgtcgaaatgaatgaaaactttgaagttgcaaaagtaaagcaataaataagtgaatggacaagttcaagattgcaaaagaatgtggaggagcttcgtgaatccaaggaaagatgttatgagaaatccttggattgcgcaaagaaactgaaagacagttttgcaaaggtgggtgcatactcatcggagcaaaaatttattcgaggcgatcgcgaaggagtcattcaatggattggtgaagaagttgaagcttttgaagaaatacttagcgaccatggggatttttgtgccttcgccggtgcccgaggggttgcagcaattttggagaaaactggttgtgaacatgttaaagctgcagcccaggcagaa

SEQ ID NO: 25741 - DNA, 304 bp, Zea Mays
aattttctttacttcaaccattctgttgcaaccttaccaatcttacccttgattgttttctccacttcgccacctagcgagtcttgcctgaactctatccttatgcttttcattattatcacctttacctttgacacctctatatcttacattgatgtttgtctcatacctgccctttaaaatcacccctttttcgtctcataccttctttctcttggtcatatcctcttctttggctcgcgagtttgtaacctcatcctttgttgtgcttttgtttcttattgcctttacccttctcatctct

SEQ ID NO: 25742 - DNA, 352 bp, Zea Mays
aaatatggtgagtctaactatggtgttcggtgtcaagtaatgcatgaaaatttcatacttcttcagcacctcggtaatcatcctatgcactggcaaacgatggactgtccaaaaaaagctcttgaacattatgacctcatcctcctttggtttgggggtactcttctcgctaacaaaatgaatcaagtctttgttttcaatgtatccaaacctcttcagaactttaatctcacttgactttagaccaccccatataaaaacactgggtttggagggccgaagatcaccttcttcttctgcgacaacgtcatctccctcagcagaaatatcgtcctttgacttaatgccttct

SEQ ID NO: 25743 - DNA, 296 bp, Zea Mays
ttagcgcggtctagttcaatcaaccgagccaacaagcaataggagacctaagggatgctagaacatccaacaaagaagcatgaaccaacctgaggagggctggccacgatgagagacgctcggcagcacggaaaacccgatttggggatattccaaattgaggagctatggtgaacgattggaggcgagggctggttcattgggtgcgtaataacctagcggagctcactagggcagcaattaatagaatctatcggcggtggcatccaatttgaagaaggcgtgctggcggccgg

SEQ ID NO: 25744 - DNA, 517 bp, Zea Mays
gcgaagggcggtagcgaagcgtagagtgagtgaggtggatggcggtcggcttcgtgtgggcagggctggcaagcgggaattgttgtcctcgccggttggggcgagtgtaggtgagggggagttgcgaagtctttttgagggtgaggagcttaggataatgctatttaactatagggagatgggaatcattccaaaggttgaaccagtgtaagttgtaatgccctcgctgtacgtgtgtaactatggtttgtatgatgaggctgtgcgccttcgcgcatccggctatatccataagggcgttgcgcgcttggtctggcacatttattatgttggtccggctgcgcctgtacttggtctgtgcgcggatagtttcttagtgtagacttttgcacggatgtaatgcgctggcgttttggcgcgcttgttgagctagtccggctgcacccttagccgacttttgcacggatagtcttttgaggaagacttcgattttgtgcacttgttgtgctagtccggc

SEQ ID NO: 25745 - DNA, 433 bp, Zea Mays
aaactgatgcgaagtagcatatacattggacacattgaacataagtggcacacggagtatcaaacacatgatcagaggcctgacataagtgacttaacaagtaacataaacagttttgtggatcccacagggaatcatgttcagctatgatatctaagtcttggctttcaaacagcggcgtctccttggagcatacttgaaaggcagcagttctgcaggaaggggggcaaccctgttgttgcgatgaaaggtcaggtaatgcagaacaaaggcacgttggtccaatggttcatcctgaaatagtcataatatcaaattaatgctaggattaaatctgaaggagtaatatatgcaagatcagaacactaatttagtaacataccagagtataaaattctgataagtcgccatcatcaaaatcgtagtagcggag

SEQ ID NO: 25746 - DNA, 692 bp, Zea Mays
gaaaatcttaagaatgtttccccataaaattgtaaatgctgaagatggcttattggctctcttgttattctaatgctctacaaaactgatactttttttagcacaactacaaactattttcctaaaccgtgcaatgaacgtgtccatctacaattctcttggactggctcgattacacatggtactaagataagggatgttcaaaaaccataaatacctaccaatctttttcttttgataaaatcttgtaggaagtgaaaacctgatatgcacttgtggctccagcagaaatcaactccctcgagttgtcaaaactcgaaatgcataaataaacagtcagaagtcccacgtttagcttctcaggcaagtcagcagcaccattctacagaactccaatgatgcacagttctagaaaaattaaacataattccatattgatgattgtgaaggaacggctcagcgtaatggtgagaagtctttccactaagcccaaaggttctaggttcgacgtagcctctctttaaaatgcagggattaaatctgtctcggttattccatcgccaaaccctactcatgtgcaagccgccagcagtgtgggtctatcctgtccagattgatgattgtgattccataggaaatattattctttgcattttaaattaaaaaaacaaagttaatagttaagtttattg

SEQ ID NO: 25747 - DNA, 422 bp, Zea Mays
ggcgagagaggtaggagaggctcccaagactcttatcggggtggaagtggagctaagagctacagactggagtcctagctaagtcttggcttagcggcggggctctggcctcttggtcctcatcggtgctcctcctcatgttcgtcagttcatctgggactcgtccttctgggtgtgtatccaagtgaactcaacccttttcttggggaccaacccctcccttttataggccgagagagagggcgacaagcagtggcttccttaggaaggatctttaaggcaatggtaaaaccagacgttcttacccagggtaaagccacacgtactagtgggccccagggttgcctggctatcttgtatttactatggtggatgacgcgtggctgcgtgggtcctaggcgccatcattttggctatgccga

SEQ ID NO: 25748 - DNA, 301 bp, Zea Mays
ccaccctttttccttggcccgcatagcggcgacgccgtccagcatggcggcgccatggctgtgcatgctaagcaacggtcccaaggccaaaagtccaatcggagtagtactacgcgaggcggttacgatcacgagcataaagagataagtctcaccggttatcgcggcgtggagggcaccggccacggtgcagcacggaccgcggcggagcagaggcattggagagcaattccggcggctatagggtccttccctctcccctgacgcccccataagcttccctgcatatcgccgaacccca

SEQ ID NO: 25749 - DNA, 320 bp, Zea Mays
agatttaggagaatagtcataaaatgttcccaagaatgaacttgaatcacatttatacccctgagataccaaaaacccccattggaaccctggaaaaccctaaatccaaaccctaggggcctatgtgcaaaagttgtgcacatttggactaaagtgtaaaaactacaatgttaaagcatattaagtcctttggttcacaaatatgtgaatttgcaagttaaaccttaagttttgggtctatttgcaaaaatcacctcttaagccctatatagcccaagtctgaatttcagagttatgggctcaaattttgagctttgtat

SEQ ID NO: 25750 - DNA, 527 bp, Zea Mays
acactagccaactcaaggcggtggggtgcgtcacttggaatacatctacaccttgtggctctccaatagaaatggtttgggttccagcatttgggttaacatcccaaacgttcatccaatccatacggagtactatatccaaagacaatctcggcagcactatcaatgtgttcggaagttcctcccctcaatcctaagggttgccccacgaaccactcggtttgttataacgttagcccccactgaacttatttgatacttaaaaccctattctttagatttctgcttataccgatgtgcaaatgcagagctcatgaatgaatgagaagatcctaaattaaataagactatggtagggagacagttcacaaaaaacatatcggccataactggttctccttcagtaatcccatccaccgaggtacgatgaaccctaacaggatagacagttgacttcttaagtctagcgcaatacttagaaaagtgcataaaaggatcatgatgcctaagaggggggtgaattgggg

SEQ ID NO: 25751 - DNA, 433 bp, Zea Mays
gacacagagaacagtgcaagtggactgcgggtttatttctatcttctgcaggggctttttaacaaaaccgacccgcgaaggggtattctctgattctggccgcccgatctccatccgagggctcggattacaccaggggggtttataactcgatgtgcaatgccagctctcagatcgcccgccaacgttcaggatttaaaataaccgagatctattctaacgcctctgattaccatccggcggtcgaggtttaatgaagcgaagggttatgcccggccatctactccatatctgacggcccagattaactgtgaaaccatcaactcctatccctccgattaagatcctacggtgaccaagcatctcctacttcacgccgacacccgagctccccaggcgacggggctggcttcccccgcggcggagcgccgcc

SEQ ID NO: 25752 - DNA, 378 bp, Zea Mays
tcaaaactaagctactatcgttgctagccttcaggagcccggagagtttgtcgagaatgcccaaggaccctacccggcgcgccaactattggtgtttcgaacctccgctatgataagtaaatttctatgtgcaccttctacgctccgaacagtgtgctcggtgggtgcaaggtttatacttgttcgggcagaacgtccctacatctagtcttcggcggctcgcactatcgacacctttgttgctcgatgcttgtagtatgggttacaagagggttacaagcgggcgagagagggaggaaggcctcccaagtctcttatgcatggatggacctaaagactacagaactagagtcttgtgctaagccttggctccagcct

SEQ ID NO: 25753 - DNA, 567 bp, Zea Mays
gtatcatccaatcacggccgtcaatacagagatcaacggcggatatcagatctgaccgaaacgttactatcttctaatcaggatcgttcgtcacaaatcctacggcacggatcaaactccggtggaagggtaagcgtgcatctattactggccatcagatcgccatctaacggtgcgcacccacccggattcggaccatcgatcccaaaatctactgccagatctaaatgggcgaaaaggtatactgcaaccccatctcatccacccattaactgatctacggccaccacaatctctcctttctctctctttttccggccaccaggcagtagtgccagcagtgcagtagcggcggcgccatggccgagattcacatcaggcgcccaagacttttccgaaagcgtggtacaggtagattacgagggcagcacggcgaatgcaatgagatggttcttaccggaagtggtggcaggtacggggcgaccacgactgcgtgcccgccaatggtgttctgcgacccaccgaggagcagaggggtacggtggagcaggagcttgggaacgaggg

SEQ ID NO: 25754 - DNA, 401 bp, Zea Mays
gaagtaaaaagatctcgcgggggagtggatttggtcgcggggtgaagcttatcaactgcgcctatagccgtgcgacgtggccggaccaccggtgacgccgtggtactccggtgacctcaattatgccacgttgtagctctttaccgcgtagtagtaactgtggcacgcctaggcttgccattttagaaccgttgcaccggcgggcgccacgactgagccgccagtgactcatctctctctccggccgccagccttctccttcaaaattcggagccaccgtcctcgggcactataaattgatggtgccgctagctccgcatgatcgtcacgaagccaaagcacccgcccttgcctccgattagccaccatagcctcccaatttctctcttcccccaaatcgg

SEQ ID NO: 25755 - DNA, 576 bp, Zea Mays
acgacgtcgaacaggacgttctcctcggtcccgaatgttaccgggagtgcgatgctcccaaggggatacatcggttgtgggcccactccagagaatgggcgagagggtcccagccgggaccctgggatctgcagctgcttgaatgcagcatggctgataacgttgatgtcggcccctccgtcaatcagaacatggtgcagccgcatgtcggcgatgacaagagcgatgatgagcggtagtacactggcccctgccatgttgtcggggcagtcggatgcctcgaaggagatggtggtgctcctccaccactgatgtggagcacctttcgggacccccgggactgccgaaaggacctctcggcgcagggacttgacgttcctgcgggaggtgagctcccagctcccaccgtacacgatgtacaacttcttgcggcggtagttgtcgtcaccggagtcagagtccccagtgaagacatccttcaggtccccctcgggtgattgatacctgaggtcccgttctcccgcggccacctcacgttcgtcggccctctccttgccaggccggcggcgaggtggg

SEQ ID NO: 25756 - DNA, 295 bp, Zea Mays
ttgtgcaaatacatcatccatcaaacatgctgtccaaattcacagcttgattgaaaaatccacattcaataatgacacaatcgtttgcaattcactgattgatacatatgccaagtgtggattcattagggacgctttgaaggtatttgaatctatagtggaatgcgatgtggtttcatggaattccataatctcagcatatgctctccatggacgagccacaaatgctttggaacttttcgacaggatgaataaaagtgatattaaagcaaatgatgtcacctttgtgtctctc

SEQ ID NO: 25757 - DNA, 310 bp, Zea Mays
gttcaaaataatcattgttgtatcttaatcattttcgcgcataataaagaataaacaaatttttgggccaggtgcggttcactagcggattgaaatgaaaacctgcacccacacccatgaaactatgggttgcacccacgggacaaaatctacactcatactcgcaaccatcgggtcgagtacccgtcgagttttgggtttaaactgccatccctacttatcatcatgttcggctcaaaacatgtcaggtcgtgtagagagaagagaccgccacaataggctatccgcggtgcaggttactccatatcct

SEQ ID NO: 25758 - DNA, 640 bp, Zea Mays
aagtcgtggaggtggagaatcgcccgcggggccttgttggcgcggaacagaccttcgatggcgacccaaaggttgcgggcggtctggttgtcaccgtcgacggcgaggctgaggatggagtcgtcgacggagccgaagatccagctgcgaacgcagcagtccgcttgatcccagatcgggtcttgcgggcgtgggggagcagagccgtcgatgtggtggcgaaggaggaacttgccgcacatcgatttgaagaaggatgcccatcgggagtagttggaggccttcatctccagcttggtcggtacatgagattgaaccgaaaccgtggcatacgagggcaccatgagctgctggatggcgccaaggttggcggtggcgcctaaggtctgctcagacatggaggagaggaggaggggtgccggcggcgtgagagaaagcagagagcagcggaaggaaggccgggatcgaattgatcctgtctgataccatgtagagaattggtttaggggaaagcaccgcacactcaatcaggtgcgtgacttctcatatatatagccaagtggcttggtgtacaaggatacaatctcctaaactaggaaggctgtcacctatacaaggtaaggctaaactaggaaggctg

SEQ ID NO: 25759 - DNA, 330 bp, Zea Mays
gtgaaattaggaggtgagattggggctacacggtcgcaaagtgctactgattcactgggtacacttaatttggggagaggaggaggaggcagtgcgaattttggcttcaatcatgctcactgatgaagttgtgagtgcctcgccgtggttcatggtgctatttataggcacggtcatccggctaacgatccacggccgcggattgcattgttcatgcatggttaccacgtaaagaagaggcacagtaagggggaagcgaggcatgagcgacacggcggcggaagtgatcgagccacggcgaccgccagtggaatatctccggccacgcac

SEQ ID NO: 25760 - DNA, 713 bp, Zea Mays
atcattttagattttatttcctgaaattcccagactctggacggcggccactattttccgaaaactcgggggctaacacgtaaaatcccccagacacatagaactccgcacaggatggcaggttgattttgcataaggtgaggggctcttttggaagacggccaggccgaaggggtacgggccatcctggaccgtccgatcttctatcagcggctacaattagatcatcattaatccgaacggcattcaatacagaccccaggatttgagatctacggcccacagtacgactacatccgatccgcccgcgatcgcaccaacgacccggatttaatgcatcgaagagttatttccccatctaatccccaccgttgcccacagatccacggcccaggctattcttcttcctcccgcgcccttctatcccccctttctctctcttcatggctgaccggcgccggtagcccttccacggcgaggagcaccccggtgaaaaaggcccacgacgaacaggcacaaatatcgtagcagctaggcgtgggttacgtgggtataagacttacgggagggttaacgtaccggagatccagatggccgctggtggtcttgcggcggagcacgagatcaccatggtgagtcgccgaggcgcggtccttcaccaggtggtcatggtaaccgtccccgcgacatggagaagaaccccagcaaagttt

SEQ ID NO: 25761 - DNA, 386 bp, Zea Mays
tcgaagaggtatggagatggctgggcccctggatcgtcgcccgaacgtccggattaaaagaaatgccctatggatcatcaagcgcgggggatcgtcggatttatgatggacgatctagatctaccgaggtggatgccacacactaacacatcgggaccgcacaccctagaatttacggtttagatccgatatcccagcgtctaatcgtggccgtcggaagctagatgggcgatcacgccacaactcagctacacctcgctaatcgacgacgatgcaagcacccaggcgcggtggcgccctctccggagtagggcatcctccctatttccaccgcgatttcgcaattaactttcgctacattaccctaagatcgtggtgagttgatg

SEQ ID NO: 25762 - DNA, 302 bp, Zea Mays
gaagtttgtatttgcgttgtccttgtatttcatatagatctgatgatatcccaaaaaatagttgagtagagacatgacttcgcatcctgctgctaagtcgatgattttgtctattcgtggtatgggaaaatcatcattggggcaggccttgttgaggctgctgaagtctatgcacattctctatttgcagtttttcttcttcaccatgtctaagttggcgagctaggtggggtagttgactggctcgataaacttggcctcaagtagcatgtggacttcgacttttgcaactttagtatttt

SEQ ID NO: 25763 - DNA, 415 bp, Zea Mays
ctgggccacaaatccagataaacctaggggctaaaccacacttattccccagacttagagtaatccgaaggtggacggcgggttctatttccaaaaggtacagggtctcttatgcaaaatggcctggccgaaggggtacgggtgtcgttggaccgttggatccacagtcgagggcacggattagatctagagtgcgccgaaacggtacgctcggtggaacgtcggatctacgatcgagggttagactttaatgaagcgcgatcactttcagcaccgtcccttgaccgatcaacggccaagatttcaggcgcaacagggaaaatgttaacctctaatcgcagccgcacatcacaggatgagcggcggaaacctcacctccaacccgacagcaccccagcggtggagctcagctccc

SEQ ID NO: 25764 - DNA, 302 bp, Zea Mays
gttacaagcgacgtctcctgaatggagaagggctaatgagatgaaaatgatggggttccccctgggccttatatacacgaccgtgggatactccctacgtacatgatgatcacgttcttctagtatatctcctaactaattgcgaatcgacttagcttatcttaaggaaaactcgtcgactgtattccaaactatcccgatattcaagggcgtcgggcgcggggaaaatggacggttccttgagattgtgcgcgatgtgacggacgatccgggcatgaggccattgccctcttcggtcggcc

SEQ ID NO: 25765 - DNA, 327 bp, Zea Mays
attcacgggctaccaattggtggtgtttgttgcgtggtgcgatcaacagtgctagagatgttgaatcgtctttctccaggaatagctatctcgcaacatattatacccgctgttttgtgtctgttacccttatttgggcatgggcatgctttcagtttgcactgctgattgtgacatttagttggaccgttttacatgtttagggtgttctgaaactgagaattatacctactgaccgtgatagagaatttaatcttggtgggcaatttacagcattttcagaagacgaacagctgcctatcctcaatttcttttgatttataactg

SEQ ID NO: 25766 - DNA, 708 bp, Zea Mays
gggtcccgctatttctacacgtaatcgcctctccttcccttgtgacctcctaacatagttgtttctgaaagatatcataggaaccacaagccccctccatatcagcatatctccattgcattcctttgtgcctccaatatctcacaggaccgtgcacgagtgacggcggtgaaacctgggcagacccagtggaggggcaggtgtggaagtgtgacacgtaggtgtgctgatgtccagctgtggcagcagcgacgagaaacccacgtcacctcacccgcagcacttgacctgtagtgttatacgaatattccagcacttgtgaacaagagcccaagcaggaaaacacaccataatgagtgacatgatccagattgtccaatgggtagggggttatggggaggtgtgtagactggacatttcagaaatggggttgggcatgggtgcggcctggtgtgttcataccctcaccatagacaggtctaggagtctttatatgaccaattcatgttttgtgctctgttgttcataatcaacatacgggtaatgactaacgaattatgtagtctataatcagccaggggctgattttgtgtaagctactgggaaatgccttggatgagctatgcaagagcaatcacagtgtattcatgtgaagggcataagctacaaataccataaagcattgccagcctagataaagatggcata

SEQ ID NO: 25767 - DNA, 345 bp, Zea Mays
cgggtatagtagctttatccgctgaagctaggggcggggtctgttcaatagcttccattacattcatcatatgccgcttcttttgcccccccattttcccctcggtagccgaagcgatttcctttgactgcaagaggctagtcagatccaacctgagaggacttagcagtgcaaatgggaaaggttcagtcattaccttcaaaatttccgaaacctcagcagcagaagacgaagaagggctcataatctgcttcggcacatcttgtaccttcatttccacagaacatatcttgacgagtttccatttcttgggagctgattccttcgactccgatagggttttct

SEQ ID NO: 25768 - DNA, 375 bp, Zea Mays
gccggacgtagtactattactatactagcgttttctctagcggcaagcaagcatagatgctaagatcaaacaacaagctaatgaagaaaggcagcgcagccacctcgtcactccccctctatcctccatggccactgcccaatgccagtgcgtgcagcagtcgtcgcaacgtacaatcctgacgcgtgcctcctctacgttttcttcggaaagcgaaagcaaagaatgagagcatacatgagcaattgttgagagcatcatccaccaccgccaccgccaccgctgccgatcgatcccttcttttgcctctttccgctgcgccgcccggcttttagagtttcccccgacgctttggagatccatgcatggcccggc

SEQ ID NO: 25769 - DNA, 285 bp, Zea Mays
aaaagacgaaggcacaaaagagccagtggtataagtacaacaaagaatggaggtatgtcaaggcttacacgtggtaaagaagagaatattatcaaggataagataagtaaaacaccgttctcatattgggataggagattggagatttcagataacgggcatagggtaatcaccaaggtaagatcgagagatgggataggtggaggcaataacaaacaaaagcaccacaaaggacgaagttacaaactcgcaagccaaagaagaggatacgaccaaggtaaagat

SEQ ID NO: 25770 - DNA, 550 bp, Zea Mays
aaatacaagttatatgaggattgaattagtacgcgtatgtgtgtgtgtgtcgtggtgtattatagtgatggtggcgtaagatatttgattgaggtgtgtgggtatatgccgtaatatggttatactcgcaacaaagaaatatgtatgtcttgttaacacaacgtttaggttgatgtcgtataaccgtgtgaagaatgctcccgatggtcatgtgactaaagggtgatgtagtggcaagcgagaagtaagttcaatattttttaaacgattagttgatagcacatatcggcttcgtcatgatttttgttgtatggcggatcgaagccttgtcgtcgtagtctcggggattttttggaagtgtgctggtgctttactgatggggttgtatgtacttgtgatgtattacaatagctgtgtgtcgtgcaagtatccacaaatggtgaaaggtggtgtatgttggtaattagaaaatggtcacttcgttagccaatagccaagcttatgccgagatttaaaatatgggcaagttaaattgaaatcatgcttatct

SEQ ID NO: 25771 - DNA, 366 bp, Zea Mays
catctagaatgaccaggtagcatttgtaaccagagaggctgagaacaggagaagtccatagatcataatgaacaagatcaaagccccgagtagccctttcgtggaagtggagaaaggaagatgagaatgacgaccgagctgacaagcatgatagaggcgctcaaaggagccctgactacaagagatatccaagcgactagagagctaggacatcacgtcagctagggagcaacaaggacgccgttaggatagaacggtcccaaaagaaccatatcacctaatgaggtgaccgagagtgtggaacctttccccatgacgatagaagaaggatgggaggggtgaggaggatgggagtgagataacatg

SEQ ID NO: 25772 - DNA, 344 bp, Zea Mays
ggtggccaagattagcagttggtactgattgtgtcggtggtgtgcgcgaccgcccgatatggatcgtggggatgagattggatcgtgaccaaattcgatctgggccttcaagactgaagcagacgggtaggattatatcacgcataccttttcacgcgatttaatctgggccgttgaatcgaatcggacggccgaagcctatccataccccttcgcgctggtgctttacaaatgagaccctgaaattttaggatataaacccgcaattcaccctgactgtagtttgagtcttaggaatgttgcgcagaaccccctgggcttctctgtttttatgtgcgcaacca

SEQ ID NO: 25773 - DNA, 636 bp, Zea Mays
ggattcttgatcaacgaccacggaagcgccacgccacaaccgtcccgagcccttgtattcgatctcgacgacccacgaccgcgaaggagacccctctcatggcggcgccatggccgcgatttcttgttcaccaagcccatgcccaaatctttaattcaatagacccattatgcggaggagacgatggggaataaggaggtcgtgatctcactggtattcgacacatggagtttcctggccacgacgtgaggcggcacacggcggaagaattccccgttgagcaattcctgcgactccgacgacccccccgggtttggcagagcccttgctgaagtctcgtaggtcctggtaatccaatatgcgtcacccaatacgcaccataatcggaacagaggttggtgggatctggaggggataaatccgacagcttgggcccacgagtcagtgaaacttggcgtggagggccaaggcggtgtgggacagacatcccgggcccgcttggcggtgaccgttagtggtagtcatatagcgagggagtgaggatgggccgcggagtgagtttggcccacagcgcgccgaggacagttgggccaggacgcaataaatgtgcccaaacgcagatccacccacttttct

SEQ ID NO: 25774 - DNA, 346 bp, Zea Mays
gtcggtctcggtgacgcatttaagcatgggttgactgacccccttcttgtaaagttgtccctcaatgagtgcgaagtcctggcttcggtgtttgaggcgcttggcctcgttgatatcgcttggatggtaatataatatccctgcaggaacagggtgattggtgcttgccattcttcggtcatgatgagattgactatacggtggccttcggtgtcgttggttatttgtaggccctctgagctgcggacagctggcgtgccgatgacgtggtagaacacgtcggagggcaaggcctcgcctctggctgctgctttggccaatgcatcggcctcctcgttcttggctc

SEQ ID NO: 25775 - DNA, 391 bp, Zea Mays
gttcaatccatatgtggaagtcatgactcttcatccctaagactcacagagtagataagttcaccccctactcaggttagctgcatacccatcagggaacatcaacatcttgatccactgaagtacttccttcctctgggccctacttaggacaaaatcggccttaggccttctccatgtctttccaccactaggcggcttcatctcttggtttggtctatcacataacgctgtcagatccactcttgcctttacgttatcctttgacttatcaggaatgtccataattgttgcctaaagtgccttggcaacattcttttaagtgtgtatcacgtcaatgttgtgtggaaggagtaggtcatcataataggggagccgagtcaagcctgac

SEQ ID NO: 25776 - DNA, 455 bp, Zea Mays
ggcttctccgcgtgtgacggatgctgaagttgttcctggcccgagtgctgggcgtaggcggcgaagggcggtggcgaagcgtacagtgagtgaggtggatggtggtcggcttcgtgtggacaggactggcaagcgggaaatgttgtcctcgcaggttggggcgagtgtaggtgagggggagttgcgaagtctttttgagggtgaggagctgaggataatgctgtttaattatagggagatgggtatcatcccgaaggttgaaccaatgtaaggtgtgatgccctcgctgtacgtatgtaactataatttgtatgatgaggctgtgtgctttcgcttatccagccgtgtccataggggcgttgtgcacttggtctagcacgtttattatgtcggtccggctgcacctgtagtcggtctttgcgcggatagtttttcgacgaagatttttgcacgga

SEQ ID NO: 25777 - DNA, 342 bp, Zea Mays
gagactgataggaaggagatcgtggagaggacaagacagttgacagggcgaagaaccctagcagtctatcaagccaccatcaggtgggcacggcgagggtcacaatgaagaaggggggatgatacactgtcggctctgcccgggagcggggtggttcacccacccgtgcatgtccctgatagacatgcatagggttggcgtagcgagaaggggctagggccagctagggcacctgggagattcgtaatgccgtgggcgaggtcagagaaggtgagggcaaaggcggggccaacggtgctaccggcagtctagcagaggccatctaggggctcacagtccgac

SEQ ID NO: 25778 - DNA, 311 bp, Zea Mays
tgctcgtccagtccagtcgcgaatcgcgattcagagacaaggctgtggtgccggtggccggtgggtgcgctctgcggttctgtctacgccaatctctaccgccatcattgccttctcgaccaacaacagagacgtattgccacgacgatggccaccaccgacgcggacacctcacatgccgagcaccggcccgccgcccgcccggccggtgcctcgattccgggcggcgatctctcgacgacctccggccggcggtccacgcacgtaaagccattgctaacttattagatagcgactcggagcgcgcattt

SEQ ID NO: 25779 - DNA, 376 bp, Zea Mays
tacgattaggatacacgccggtacggtgtctgcagcgccagcgggggcggatcggaggcacgtacggtagtagcccgatcgagagacagctcgggatgtgtattcttgggccggaattcaatgcaccgcatggatagctctatcttcttctccaggtccaggatgggaggagcaggagagcactgttcatgatttggtgcatgtcgttggtcgtattccccagaacggtgctcgcgtcgtgagcttaattaggccagtcccaacctgaaaatagtagtatcaatcatgccaaataacacgcacatgagcccgacacggtggaatgtttctaggatgcgttggaccgaggcgctatggtgtctgatgaccttgagtc

SEQ ID NO: 25780 - DNA, 439 bp, Zea Mays
gttggagggtatcctgtcggctggaggtaggagaaggaacgggtgccgtcgatcaaggatcgtgcggccagtgagggatggaattgatagtgcgctgcagatcataggattcggatccgacgtgtgaggatgatctcgggttcataagggtctcaggctaatctaggcgcctcgttttggatcagacggctgtgataaccctataccctttcggccagggcgttttgctaaagagtccccggggaattcaccaatctacccgccatcctgtgtggagttctctgtgtcttgggggatttcacgtgttagcccccgagttttcgagaaataatggccgccgtccagagtctgggaatttcaggaaataaaatctaaaatgattttcaggataaaaataaatatgataaacatagaaaattcataacttgatgaatttagc

SEQ ID NO: 25781 - DNA, 473 bp, Zea Mays
ggctgccctatgctccctacctcatgttcatgattgagagggtgacagggatgagattccttaaggattgtgtccacatggtctataggatcaagaagacccgtggttctcgctttgaggacagacccgagagctctcgtggtcacagacgctctaggagtggtgggaggatcaagaagtttgggcagtggatcaaggctatttttgctacttgcacctacacagctaccacagtctaagaggagcgcttggagagcagggaggctatcagggtagctagggagatgcagggacttccacctctaccacatgtccctcctcctccccagtttcctgacttgcctcgcctctctggatcctcttcagacgacgacgatgatgatggtggtgatgatcaggggctgcacggtgactactatgaccccgactttcaggagacactcttcagctactaccagggtcgccggcagtcg

SEQ ID NO: 25782 - DNA, 480 bp, Zea Mays
ggataataaagagtagagacagaaaaggattataggcaatcattgaaatagaaaagggacgatgatgaataagggggaaatgtgttataagtagatcaagctctaatccttagaaagtggtattgacagaagttacctaccgaattgcatattacaagcatgaattggcaagatatattgttaagagaagacacatgatcctattctccttcaaatggatattatacttgtataataaatacgatccggatacaagtgttcgccatggattaaaaaacaagaaatatgtgtgcttatgtagtgacagtatatcatatatttaagaggtaaggacactcaaagggagtatcgtaaaccctgcgttccacaagttccttttagattggctcgaggtagaaccaagtggaggcaggctacccccttgcagccttactatagtagtatatatttatcctctgaaaaggtattgtcaaatatgat

SEQ ID NO: 25783 - DNA, 487 bp, Zea Mays
atttttgttgcatttttaatgaccttactgctagatctagatgctagatgttgaacttgagtcctaatatagataatggagcacaaacctggaatgtgcattgtaaagtctctgtccacagatacaacatccaaacctggaatgtgcattgtaaagcacgaggtcaaagaagagccattgtctgaagaggtgggatgtcatcttaagttgggacttaggaaaaaagcaatggccagtgggtaattagcaagagagtggatgctgatctggtgccgtcttctggtaacgaccatgaccattcaggatacgatgaaaacaaaaactgcatcactcactcaagcaatattgatgatacaaacattgcagatgaaggttataatttagagccagcaacaaatggttatcccatgacccatgtccacgatcttgactcttcatccgcagacgaaaatggtcctccaacatcaacagggcaggatatagtagt

SEQ ID NO: 25784 - DNA, 285 bp, Zea Mays
ctggattggaacgggcacctcgcgatcccaaaatccgccgctagtcctctgcttgcgttcgggtctggtactggattgatggtctcgctggaaatttagtgacagattctgtctttgagcatctggcagttggaggatggtctcgccgtggatttactggcaacttggcaatgttatgtttagagtctttgggatgtgaaagctagatttgttgcgatgagaggtgaagccatccttctcataagtatactcgtcgagtgtcagctttgttactgtggagattgc

SEQ ID NO: 25785 - DNA, 835 bp, Zea Mays
gtgagatctggtgaagggcagggcaggcactgtagtcagtggcggacgcagaacaaaattctaggtggggctgggccgacagtgcatgagacaaatcatcgactagaccataattgtagattaatgataataacatgaatgctaaataataatatctagtgtttccaaaaataatatgaataccaaaaaacctttttggctacctaaagtagagctagagagagaaaataggtggactgattgaggatgaggcactagggcagagtagccgcatcggcacatcgttctggagtcatcaaattttgtcgtgagatggcgttggtgagacgacgacaggtgggaggagcgagtgcaggagacgaggtagcgacagatgacggtgacgataagcgacaaccattgtcgtgttgcgacggcgcgcagagaccctaatgagttagcgagggaccagtgacaccacgatcccaccaatagcctgcccatctgctgatgcggactaggaggcaaaatatcaatgttgtgtgcaggatcccgacgagtcgacgagctgatgggtgatgagaaggcaaggtgcgctgcagtgggtgggttaggtcaccgacttactggtcagtcgatgaccgaataagcgagtgagccacgagtgggcttgcgctagggaagataatcaaatagctcagacgaagagtggactgagcagtgaatagatcaaaatctagtttttattagatttgtccacgctaactatacaaaagtaaaaagtttatttattttgctgtgtacctaaacctaggtataaggagttaaaaaattaaggtggggccatggcccacct

SEQ ID NO: 25786 - DNA, 390 bp, Zea Mays
aagggaggatgaagtcgttgtttttaagagcttcttcagggcagggcttcggttccctctacatgagatgattggagaagttttaaagaattttgagatatactttcatcagttgacacccaatgcaatcgttagacttagtgtctacatatgggctctccgaagccagggtatgagtcctaatgacgaagctttctgtcgggtgcatgagctacactatcaaacgaaggccagagcagatggtcttcataagaacttcggctgttacaactttgcatatcggcaagatacgaaggccctggtaattggctagcttaccaagtggccgaccggttggacaagcgaatggttttacataaaagcggacgagaagaaaagggagaagctaat

SEQ ID NO: 25787 - DNA, 358 bp, Zea Mays
gcgacatgtattatctccaaggttgagagggtagcttcggcagattcaacagtttccatcttttatgtaacatgcgatgtagcagccctctctaaggaatacgacttcggttgatgagttaaaaccttagtcattttcagcttcgacgtggcggaagaggacttagttgtgattttcctctttgttccttagtttcatacgagaaaacagtagtcgggatagataaattcaattacatcaaaaactgtgttcaaccttctctttccacaaacaccaaaggcagtactcatggcttcgtccttggccttcaaataagcccccaacaattcatcactggttgcctcaacggcttcaagcc

SEQ ID NO: 25788 - DNA, 660 bp, Zea Mays
aaacatttaggtagaagacataaatatcgcaagggtcagaggtgataacaaacaagggtataagagaaaagatgaaggcatagaagagctagcgatacaagtacaacaaagaatggaattacgtcaaggcttgcacacggtaaggaagaggatattgccaagggtaggataagtaagacactgctctcagattgagacaaaaaaagagattcaagtaagcatcaaggcaagatttatatattacaagggtaaggcagataacaaaccaaaagtacaacgaaggatcgagttaagacaaggcttgcaagtagcaaagaagaggatacagctaagggtcagataggtaaattaccactctcaaattgaggtggaaaagagtaggatttaaagggtaggttcaaaataagcaccaaggtaaagatatagatattacaagggttaaaggcgataataggcaagggtgtaagagataagaggttaaggtgcacaagaacaaagggtatgagtacaataaagaatagagctaaggtaagactggcacgtgacaaaaatgaggttatgaccaagggtgggataagtagaaccgcactctcgaattgagaggggagaagggaggttttaagtggcagacatatgacaagcatcaaggtaggatcacaa

SEQ ID NO: 25789 - DNA, 310 bp, Zea Mays
tagtaagtaaagtgcaaagtctaagcaacattagcaccactcaactagcaaagaacacaagctaaattagactatctccaacaacttgtccatcctcattcacgtattgaaactctactatgcgaacagtgcggtctatagtacaaaaccgtgtaaaataatgttttgagtgaccatatgagtgaactgctagaggctgtcttagagagctacaacaacttagctacataagctaagcaagcacaagaaaaacaacataaacataagtaaaacaagtgaaacaagcttgtgttataggattgcaaacgag

SEQ ID NO: 25790 - DNA, 509 bp, Zea Mays
atataatttgaaaaaacaatagccaaattggccatggtcgggcaagaagtaaactaagttctgtcctggatagattaacacaagtataggcagcaaatgatctcctgtcctggatagagttgtgctcagctcaagacaactaacatatagtacaatacataattagtttaataattaatatttttccatgcatccataagaacaaagtgcagcagaatctacaacagaatatgaactagctggggaatgaaagtcataactaaaactaaacccatctttcagctggggtatcagtacttgtgaggggcaaaaatatcagcataccttctcagcttggccaattgcttcctcctttcgtaggtatacatgtacatgtgggccggcctggcccggcacggcacaggcccacaaaagcacggcccacaaaggcacggcccacaaaagcacatatctaattatgggccgtgccgtgctagcacgtgtgcccagtcatcggcccacggcacggc

SEQ ID NO: 25791 - DNA, 284 bp, Zea Mays
ccttcacgacattaaatcgaggtcgttgatcaccgatctgacgaatagaaatagatctaggaatcctcgtcgttggatcctaatccctcggttctggttacatcctgagttagccacggcgaaatctaatcctggccgcgcgatttgaatccaacagcccagaactcaccataccccttcagccggccagctttataaaatagcccctgtccttttgtcgtatcaacccgcggtccactgcggggttgggctgagtctgcggatcacctatgatttcaccctcg

SEQ ID NO: 25792 - DNA, 348 bp, Zea Mays
gcgagagactactgatcccaggattcagtctacagagtccatggcgcagtttgagaggcaggaaccgcaaggggttgctacggcctacgaagtcctaagctgatgcagtggcggactgagctgatgctgaaccggcccgacgggttgggtaaagtgacacgacagaggggtgtactaggtcagagcagcgaagagcgcttgctggggcacttgctgtggtgcagcgaagagtgcctgctggggcgcctgttgtggtgtgctctagtgtgcaggcggacgtatgccgcgctgctgtccagtggggctaggccacatcgtgatttgccctgtccatggattgtacaacga

SEQ ID NO: 25793 - DNA, 294 bp, Zea Mays
gtttctactcagtattctacaaaaagaagttgttgttttttcctgaaagcaagaaatattaaacagctttatcatatcttcatcactgttattgaaagttacccaacaacacatcttgggttaggtggtgaattcgtgaacctggggcagcattttagccagtagaatacatttatccagatagtttcagatcaacctgaacttggactaatggatcagtgactcagtgcgtggtttgagctggctaatgacttctggtgcatagcgcagttcgtgcgcacgtgcaagaagctg

SEQ ID NO: 25794 - DNA, 465 bp, Zea Mays
caccagatcgcctgcacctagagctatacatttgggctgggcttggtgggctagcacgaagcacgcaaaaaaaaaagcacggcccaagcacagcacgacacgaaattatttcgggccgggtttgggccgaagccgagacccaagggcgggcacgagtccggcccatttaacaaggcacaaaaaggcccgttacaaggcacgaataggcccgttacacactgttgcatgcagccaccgcccaccaggccaccagccaaaactaatcgtccacagaccacaagttacaacaagcccagcccactgcccaccttgccatttgccactgccagcccaatctcacggagtcacagactcacgaccatgggccacaacgcacaaaaatcctagatcaactgaggcactgacccgtccggtcgtcccaactcccagtcccaagtcccacaaaaaccctagtcgcgtcgcgtc

SEQ ID NO: 25795 - DNA, 354 bp, Zea Mays
gagagattgattatgacatcattatgccatcgaggcccagccatctagattttgggaaatcgactgtgtctgaagctgacatgactatgatgacgaagctgggctatttcagagaagccgagaaggggttggttcgctttggcggggaagagactatcccaaaaccagagaatgatgaagttgtagtttttcagagcttcttcaaagcagggttgagatttcctctgtacggaatgattgtagaggtcttggaaaaattcaggatttaccttcatcagctgacccctaacgtcatcgttaggcttagtgtgtacatctgggctcttcgaagtcagggggtagagccgcttgccg

SEQ ID NO: 25796 - DNA, 283 bp, Zea Mays
atgaaaataggtaggctacttagaacagaattaatcaaaacaagcctccccctgaagacaggaatttggtttccaattactaagtctcttctcaaaccggtccatgacacaacgccactcgctatttctcaatcttcggtgggtcataggaatcccaaggtacttgaaaggcattgggcctattccgcagccaaagagccatgagtaccgagtctcacatgccttagccgacccataacagaaaaattcgattttgttaaaatttatcttaagcccggacatt

SEQ ID NO: 25797 - DNA, 310 bp, Zea Mays
agcggggtagctgatggccttgacctgaagtactaccctcgccgttcgaccggcagtgctagaggtgtgattgcctcgccagttggtgagggcaatcccaggctgaacagcatggtcaacttggccgccgtgctcaacacagagttggaccacgcccttgacgagttgggcaaggttcaggcggaggttgcggaattgcgtgctgaatgcgtggcaagccactatcttgatggtggttctcccgcccctgttgggattcaacacccttaccgttcaccgccccgtggtcgcttcgactatggtaccccag

SEQ ID NO: 25798 - DNA, 450 bp, Zea Mays
gtatgcttcagacaggaaaaagaaggaatcatgtgaggaaattgattgatgataacagatggtgaatctcttgaagctgggggcagggaactttgcgccgggtttcaggtgctccgcaagctggaaaccttggctgtccaaatgagtctggaatgggtggcgcaacttggcatgccaagaacaagtttggagacagatgcaatgcaacaaccctgggactagctgctcgatggagatgtgtgaccgaagcccaaatggttgctcgtttatgttactatctaattatttgcattgttcagtctatctgctctagattgtgtaatagggtagcttagcaggcagcttagctgcccatggggcttgtaacttgcaacctgattcacatgtctagttaagcgagcacccccggccttttgtaatggctctcgtatccgatgattttcttttgct

SEQ ID NO: 25799 - DNA, 361 bp, Zea Mays
aaagaaactaggaactgctaattcctccttctctacctcctgctccagcatcattggtgcccacacatcacttcccttcaaccacttattcacctacaacatagaaacttcttgagatacctctctctttgcatgtacccatctcccttcaattggactggaaccctttatccacaaaggttagcatcttcctttgccaatcacactacatgaggctatgcgactgcaaccaatcataacctagaatcatgtcatacacctctaactccaacactctcaaagaggttgtataagtgtgacctcctggccaacactccatctccaccactcttttattgctcaacatctttctcccatttgc

SEQ ID NO: 25800 - DNA, 403 bp, Zea Mays
agaggtgatatactccaggataccatcagtaggtccggacctcctcaagaaagcgtcggacccctgtacacatagcccggacctccgagtacgatccgggactcccaagtgagcaagccgaaccccttgaatgaggtccggacccctccgagtgaggtccagaccacccacagcaaggtcccgggacagggaataccctgccctaggtcaaggacaggcgagggtccggtactgacacgtgcctaggctttatccagtgcgcttccattccccgctcaggcgggggcccgatgctgccacgtggactatcgcccgtgacgtaagccagcgggcggagcctgacgtaaggcctctgggccgcgctgcctctgcatttattgcggagaagacgcgccgcctgtct

SEQ ID NO: 25801 - DNA, 1099 bp, Zea Mays
ccggattgattataggttgaaggttgagaaatggttgaaaatggttccactgatattggcagttggtgcaaagagcccctcgcaacaacaggcgttaccggctctgtcacctgtgagttggttgaaaatggttccactgatgttggcagttggtgcaaagagcccctcgcaacaacaggcgttaccggctctgccatctgtgtgttggtttgtattacgatcgaagatccagtagcataagcctgtgtctgtctaggcgagtatagtactacaacaggaagaatgagtattagtaactaaaaaataggacaatgttaattatgggcaggaagtacctgtgtcagccttcttcatcgctcgataatcacacattcttttattcctcgcctccctttcttcgttggtttcttcagcctttcttcttgcacggtattctcgttgttttctattcctctcctcccgatgacgctcatgttcatcggacggacctggttgtgggaacatatatttgcaaaaaaggttcgacatcagtaataataaataataaatgaaaacattatgctacttggtttgattatgcatgaacctgtgataatttggttagatatattagtaagcgcagtctgtcgtcttgttcccattgtgtactccataggatcactgggaccagtcgagtccatgtattgcaatccggatgcctgagaaattgttgaacatggtgtctgcaacaagaatctcgtagtatacggtgtctcagcccgtgccacatgtgtgttgtcccctccaggagcttgcattacgatcgaagatccaaaacaataaagttgggactgtccgggcgagcaaaaaaaacgatagaatatattattcataggggatacctgtctcagccttcttcctcgcgcgataatcacgcatcattttatttcttgcatctctttcttctgtggtttcatcaacctttcttcgtgcatagtattctctttgttttctgttcctctcatccctcttacgttcttcgtcatcagatcgcactgtttgtgggcgcagatttcataattaaatagctcgatattattagtattaaacgaaaacatag

SEQ ID NO: 25802 - DNA, 1172 bp, Zea Mays
tcggttgctgcgcaggtttcgacgtctgggcctgcgcaagcaaaccgtgacgataatgtgaatgatgatattttggtggatggaaatgtggtgtttcttagtagtgacgcgtctggtgaatatgatgttgggtcgtgttcttcagaagatgaaaagttggggagcctgtttacttggatagatgacgaatcttcagaagataatttagattattttgcggcgctagatttagctgcaacggagtctccgttgagggttgccccaagcgccggcgacttcgggcggggtagcccctggtgagcagggggacgaaaaaagattggggtatcgaaacaaagtgtcggtatggtaggagagtcttcccaaggtattagaagacatcgccgaatgggcatggagaggccgcgtcttcggattggaccgcgtttggatcaagggactcgccgtgtcttactggtgccgacggccgggtcgtgcttcggggagggggatctgcgggctctttttgacggcgaataattgagactgatgctatttaattttcgagaagctggtcttattccgaaacaagaggcaatgtaacaagtgatgggtgcccgccagttagatttactattcggtgaccgtcggtgtcttgtattatttgcaggccctcgatgtttcttacggctggtgtgccgattgtgtgaaaaaatacgtcggatggcaagggtttgcccttcgctgctgctttggctaacatgtcagcttcttcgttcttgttccgctcaatgtgttgtaaggtgaatcctttgaactgcttttctagacttcggacagcagcgagatattgcatgagtactagttctttggcggagtagtctttttcgatttggccgacaactaccttggaatcagttgactgtgcatgtggttactccgagggctcgcagcttgcgaaggcctaagatgactgcttcgtattcaacgatgttatttgtgcatttatctgagtctagtgcgaaacggagacgtgcgacgtatctgtgtttgagtcctgtgggtgatgtaatgattgctgcagcgccggcgcccgcgtgacaccatgcctcatcgcagtggatggtccagagagtttctgcacgaaactgttgtggctccgaaggccctgtccagtctactatgaaatcggc

SEQ ID NO: 25803 - DNA, 1392 bp, Zea Mays
gcggcaacaacttgcgtggtcgcggtggccctcgtggtcgcggcggtcgcggaaactactcgcatggtggttcttcgtcgcgtcctacagatccgcctggtgctcgacgtcctgccaccaccaacaacaacagccggcccctttgccagatctgtggcaaaataggccacactgcggtacgctgctggtaccgtcatgatgactcctacaacgaagatccaccgatggccaatgtcgcctctacgttgccttcatacaagcttgacaactggtacggggacacaggcgccacagaccacatcaccaacgaacttgatcgccttgcggtccgagaacgctacaacggcaatgaacaagtccaagtgggcaatggtgcaggtttgaaaatttcacatatcggtcactctactattaatactgctgcacgtcctttatttcttcgtaatattcttcacgttctggggattaccaaaaatctattatccattcatcgtttcactcgtgataatgactgttattttgaatatcacccttggaattttttcataaaggaccggcaaacgaggagatgccttctggaagggcaatgtgaaggtggtctctatcccctgacgatctctagcgcacaagacctgacgcatgcattggctgcccgcaaaataaatcgtgatcaatggcatgctcgcttaggtcatccagcttcgcaaacagtccagtccatcttacgtattaataatattatgtgttctagtgagtctttttcatcagtttgtaatgcttgtcagatggctaaaagccaccaacttccatattctaggtctatgaataatgcttcagctcctcttgaattaattcactccgatgtttggggtcctgccgctacatctgttggtggttatcgttattatattagttttcttgatgatttcagtaaattctcttggatttatcttcttcatgatcgttctgaggctccacaaattttcttgcaatttcaagctcatgttgaacgccttttagattctaaaattaagtgtgttcaatctgattggggtggtgaatatcaaaagactcataacacattctttaaaaagttaggcattgctcatagagtatcttgtccgcatacccaccagcaaaatggagctgctgaacgcaaacatcggcatattgttgaaactggccttgctttacttgcccatgcctccatgccccttaaattctgggatgaagcttttctcactgctaccttcttaatcaaccgtttaccaacccgggtcattgataataaaagtcctcttgagcgcctcttcaatatttcacctgattattctacacttcgtgtctttggttgtgcgtgttggcctcatttacgcccttataataaacata

SEQ ID NO: 25804 - DNA, 357 bp, Zea Mays
agaaggaacaccactgctttccccgctggctaggtaacgccggctgttcttccgaattagagggatttcatcctcctcttcctcatcttcatcaacaacgcgaacagtacacctattgggttcagctttggccagatcacacccattgagatcaatgtcatctaggtcacacccattgggatcaatgtcatctaggtcacacccattggggtcagcttcagcaaatggaggcactgacacttcctcagcagcaggaacagaaggaccagcatcctgatctaagctagacactcgacggagacgtctcttcttcgttttcttcccctcagcaggagaagtgggctgattggctcggcg

SEQ ID NO: 25805 - DNA, 471 bp, Zea Mays
caaaacgccatgaactagccattcaaccgcaggtttgagccgcttagcgcgccattgcccgctccacgcgcgctaacaagggcccgagctcctgccgtgcgccgaggccaggaaacacaacgtcgagagcgtgctcgcgcctataaaggtcgctccaccctctgtctttccttcccaactgttgcccagccagccttcaccaaaatttcaccgagatcgagtacactgtcgcccgccattgttgcctaagcccggtcacggtgatccaccacctccggtcacgtgccacctccaccagcgccaccgccaagatcccctgagttccctagggctctccaaggccccaaccgaaactctacctcaccgaaaccgcacaatcaccttcgccggagcatgatttttgccggtgatcgtggacccgcttccacggccaaccccagtccaatttcttcgaggaatcatctccccgac

SEQ ID NO: 25806 - DNA, 675 bp, Zea Mays
tgcttatcctcttgatccgggtctaaggcccagtctgcagtgaggtcccaaaccttgaggaagtcagacaaaacattaacaggatagctcctctaatgtcatgtacccagttccttgaattgagggcatcatggacattcctcattttagctctagaagagaccagcttgaccaaatgaggggccagctgacttagactctggccatcgatccatttacctgtccaaaacaaggtgtttttaccgttgcccaccaccgaagagaccgctgccgagaagaaggccttaaccgtaggatgatcatttattttaaaggatgcccaaggcttgccagtatcagtttttttcagccagagccaacgtaatctaagagcccaactcatcaaatacaggtttaagatacccaatcctccaaattcttttggtctagtaaccttgttccaagctaccaagcaatgtcctcctatagcttctttcctccctctccacaggaaatttcttctgattttgtcaattgctttgaaaacccaagaaggaaggtccatggccatcattaagtaaatagtcattgaagacaagacagtctggacaataatcaatcttccagctctagtcaacagatcggctttccagcagggaaggcgatgcgcaattttatcaatgaatggttgtaggt

SEQ ID NO: 25807 - DNA, 532 bp, Zea Mays
ggaaaagatcttggacccctcaggcccaccgataagggagagcgtacgaggggccagtaaggaggcaagggagtcgtctacccagaaagcacccgccctcggataagcccagagcaccgagcctagggtcaggcgtggcggagtagcagaagggaggtcagatgaaccggaaggaaaccactcgagtgggttcctcgcccggctcgagatcggcctgacgtaagtgaccgaccgcattaactatgcctgacaccaggtcgcagtaaagagtcggtccgcctgcactcatgacctgcgcaacccctcggcttacggcacactcatgacctgcgcaaacctctgatcagtggtgcactcatgacctacgagcccctcggcctacgtagcactcatgacttatcaagcccaggcctgagagcgtgaaccatccacaggacccacaaagtgacaagccacgctgagaccaggtttgcggagactaggggtcggcgtggcacagagatagtaatgatggcaccaaggcccacctgcc

SEQ ID NO: 25808 - DNA, 611 bp, Zea Mays
gttctggccacggtgaccggaagccgtgcgattagattgccgtgttcccggcggttggtggtctcctagcgcaattatgtgggttgtcgagcatcaccggcgtacagagaagctagaacaggaacaaagaggacatgagcagacctgtggaaggctggcaatggtagggtgtagttcttgacggcggagagggatttgggggaaaccagaaattcgagctcgctagtgggggatttgggatgcaggtgggtgcggtagctgcttgggaacatggcggagctgggggcacggtctatttatagagcccacgagcggtggtgaccaatttggccgagccgtgctggcggccggaggtgaagaagaacctgggcgcggtgaattcgtggcaaacggcgtggcaagcttaccggagctgatttgacggccgtaagaagccacggcaacacggtagaaaagttaggccacgcggcacacggccgggaggcggcggtcaccggcgttcttatcggctcaagccgcagggtagagggaaagcacgggggttcaccggaatggagtccagctcaccggcggcgaatattccctctccccgggatgttatccggttacca

SEQ ID NO: 25809 - DNA, 370 bp, Zea Mays
gaaaaaactgtacttttgaattgcagaaactggattttgcagtcaatggtataagcttggcaagaccaaataactcaaaacccaagggaagaacaatcaaggggagtgaacaaaaggttattaaattgggcgcaaaaggtacaaagaaaatgaacaggaaatgccagaagtgtggtattgccgatggtcacaacagtaggacatgtttgtcattggaggagaatagagcatggttggctagccttgctggtcgtaagagaggtcgacctcctggatctatgaacaaggttggaagtaacgctcctcattggaatgagacaacaacatcaaaaaacatgcaattgatatcaacaacagtgagtcacccagt

SEQ ID NO: 25810 - DNA, 320 bp, Zea Mays
gcctgaggtgcgctatagagcgccatggcgggagcagtgatcgcagtggtggagaggcgaagttcctcgagaagcagattgttcttggcctccgtaaaagtgggaaacggcttcatgcaggtaaggatgggcgtcacgcgatcgaagcgagggctcaagccgcaaaggaggttgagcacgaggctctcatcggtgatggggccccgagggtgcggagagtgtcagccatcgtcttcatctgacgacagtactcgtccacagagagatcgccctgagcaagctggcggaaagcggtctcaaggtacagaatccgagtccag

SEQ ID NO: 25811 - DNA, 319 bp, Zea Mays
gtttgcaatcaatttccgaaactggaggtctgagatgaatacaaagtttgcaaagaaagacctagacccgacgaaaaatataaaatctcagcaggtcagtgggcagtatttctagagcagaggagcagccctgatttcatatcgctaagtgaggcaaatttggaactatctaagaagaacaaatatcgccaccaccttggcacaggtggttacaggcgtcaggttcctaaatggagacaagaagacgccgagaagaaggttgcagggttgccgacgttgtccgagcaacttggttaaaggacagctaattggatccgtg

SEQ ID NO: 25812 - DNA, 590 bp, Zea Mays
ctcggtggcatgggctgtgcgactgtcctcagtattccaggtaatacttccacgctcggttcgtcgttgtgtcctccacgtaaatccagcaaacacaaccaagggggggggcttgggaacatcgggttgcagctcgtcggtgtgaaggccaccgaactaggatgcgccactgtgttcctggtgtccggagaaagaagatgagaccgtagccatcgatcggctagcggatggtcaggattagatcgtcgccctactatttgtctgaacgtcgtggatcttcgatctaacggatatcatggcgtaccggttcgattttatgccggtctaatctggcgcgtttggtgttgatccaacggcctaaatcgttacgtaccccttcaccgtggaatttttgtttaagagtccctgactttattgaaaattaacccgccatccacctagttcaaagaaccttgcgattgggtcctgttttattcagaatagcccatgtactctttagaaatgttatctgcagtccacagggtattaagtactataaaatacattagagttactgattttaatataaaaataattctataaactttttt

SEQ ID NO: 25813 - DNA, 299 bp, Zea Mays
taggggatgtgattcctcatggtctgaaacctcttgaggtacgactagagtgtttcatcactctgacgcctgatggatttgaggtcccatggctgcgccggcttgtcagagagagagactagaagtttgcgatgaagcgtcgactgaagtcgctccaatcatcgatgcagtgtcgtggcagatgtcggagccactgtagtgcatcttgccctaggacaatgggcaagtatgctctcattacgtcttccgtcaccccagcggcccgggcgatggtcgtgtagatggccaaccagcccccc

SEQ ID NO: 25814 - DNA, 807 bp, Zea Mays
ttgtgtagcatattttccttattgtataagggcctttatgcattgtgcaatgtatgtactgtgggcttgggccgttactgtgaatacaagcaccattctaacatgatgaattttatatatgataaaggctacggttcgtcaatctgctctctcaaaagttgctacatctggcatcttcaataacagaactctaaatcctcaggtaacaacttttgctctttgcaaatgttcacttctatatgcgcactgttgtattgaagctttcctcagatgatgatcaactgacttctgcttctgaaagagattgaatctgtatagaatagtagattaattattgagagttaaaaaggttatataggggtgaggagatcttggggcaaaaggaaaccgatagtcaagatttcctcagggcaggaaacttctaatcaggatcctatcgtaaggaaacccccaattaggatctcatctaatcaggatcctgtcctaaggaaacccccaatcaggatcccatcaggagtctgtaaccatatatctctacaataccaaatagggccggccggctatagagccaggcgcaggacctcgacacacagtaatacatcaaatgtctaacagtttctaattctgagttcatgcagaagtttatcaatatgcaagatgctatattacgtagtctgtatgatgatgatctaagtgttgtccaagctgctttatccatagaaggactagctgctgttgccaatcctgatagcctgttaaaagcatatgattgcgtgctcaccaaatgcatcaaaatcatcaacaaag

SEQ ID NO: 25815 - DNA, 367 bp, Zea Mays
ccgtaagtagtcatcacttcctctataattataagtcgagtctttacacgttaggcgttccttaaattgtgcttcacaaataagtgtatgattgtgtttatgacttgaatagatgtcttcaagtgaactaataggttcctaaggcaattatgtgtaaggtgtttaacgctttattccgaaaggtgttatgtctgcgtatcaataagagataagtgtattttgtgtagtgtggattgattttgagtgcatggtcgcaagaaacgaattagtgcgcatataggcgatgaatcagtgtgatgaaatagtgacatgccttcgtagtcatcatgtcgtctgttggtgacctaactgatggtcgtagagaagg

SEQ ID NO: 25816 - DNA, 314 bp, Zea Mays
atcagtcgttgtctctgggagcatttgatgaggatcgagactctctcgcgccgatgggttcagataagattcgcatctcgcgtgctgccgttttcagcgcttttgttttgatttttccagtgtcagcctcagggcaagcaatatggcattctagctagtcatggaggatgggcgccagccgccagcagccagcaggtcgagagtacaccgtcgggcgtcagcatgtgcatcgggctgctttttgctactgttggctccgacaagcgcacagtgcttatcgtacaataatgtctccggatttaatccacgtgtcg

SEQ ID NO: 25817 - DNA, 313 bp, Zea Mays
tttgattcctcgttgctctgtaggtgtgtgttaatgtttttgccgttgtttgtgcgaagactgttggtgtcttcgcattctattgtgaggcaatgcacattatgttggctagggatgaagtctctttctatgttcctggccgcctgttggtctccatttatggtgattgcaccctggggtctgggattttcatgcactggtagagcccatgtattgctgccttgaacttgttgatggaccatgtcgactatgtcgaaggtgaattgctcacttcatgcgttcggcgcagtgtcgaatgacagtggtagctata

SEQ ID NO: 25818 - DNA, 340 bp, Zea Mays
attttatcatgccttgctagtgaacctccactcatgagcatgacatgtgggtcccactagtactttctatcctccacctttcttctttcacgctaatgcgaggcagcctgcgagccatttctcctgggccgccgcctggagccatccatccggccccttgcctacccatcctctcgcctcccgcttcagcccgtgcgtgaagcattttgtagctgtcgtgtccgaccgtcatcctctctccattactgcacctgcccacgcctagcctccgccgcgttagccacgatcgcgcccactcagtcgccgtttccacagccgccatgaatagcgatgaaagtta

SEQ ID NO: 25819 - DNA, 585 bp, Zea Mays
ctcacctctctcttctcaaaccgtgagccagggggcataacccggtgagcgtgtcagcgggacgggggcataaccctgccggagttatcatggagcgagagtacgagctccggagtagaggtccggcatccctgctgaacactgctcttgacaccaatgcttctgtttgtgttcgtctcctaggtacgcacctctctctcctcgctcatcttccttccctcccggggatggtcgccgccggtaggccatagctgcactcaaggtccccacacgctctcctgccaccaatggaggtccccatggtgaatcttgtatcacttacgcatcccgttcacgatctccccatggatgatgtccgccttgccaccttccgtggcttcccccacacgtgtcgccacctttcgtggcttcccccttacgcgccaccggcgtgacggcgacagcaatgatgtcgcgagtgccatggctgccctcctcggttgatatattggtgcacccctatctacgccgtcgtcgagaacaacgacatccatgatcaggtcatggacttcgcacctgatgtcaacgccatgattggtgtttgtc

SEQ ID NO: 25820 - DNA, 748 bp, Zea Mays
gctggatgcttgactacctagcggagctgatggcacgctcaatttatagggcccgagtgcggtggcttttgaatttggcatggcgcactggtggccggagagagggacttagtcactggcgcggttgaccatggctattaccgtggcaaggccttaggcaatagaagggttgtgtagtgtggtcagttgcaacgtggtaagatgggtgacggcgtggcataaccgcgaggaacggtggcacaacggtgatggtcgcatggtcacatcgccggcaagtggatgagcgacagagcggctactgtgctccaagttcatccacggcgagatctttttacctagggatcgttatccacatttaactgggcgtgaatcgcggcgccatcgcaaatccgagcgcaaggtcaccggcggcgaggcgggctgaacctgagatatttctgcagacactgtaccatcaggatcttattcagtctgcctgaccgagcgttttgtaaggcctagatctctgatttctatataacaacttgttaatccacctgtaacaaatttgttgtcctataatccagccacaattcgactatagaaaccatggccatttgcttactggattaatcacaaatccactccaaagtccttcagtgttctctatcagtcacagttcagtcctctatcttgactgacagccaaactttctgtccattttactctaatttttgtacagcaccaaggctcaatcagttaagcaaag

SEQ ID NO: 25821 - DNA, 482 bp, Zea Mays
cgcacctccattgatcgcagcggaagcgcagagaaaaattgagatcgcagccgcgatagatggggggaaacaagatgccgtggtcgtttctccgctttcgctggtgttctacgccaccaacctctgttcatgggcttccttgccagtgcaagccggacggatgccgcggcaatggggttgggcgttcggccaccgtcgtgccctccatgttctaccagggtgtttgcagggacctgggagtcttgcacaagggagtaattaactgcaagaagctccatcgatactccaattgttcagcgacgttcgtcaccgcggcgggtccatcttgcaccatggaccggctccaccaggacacctatgccagtaagttccgtacccccgtaatcgttaggacccaagcatccttttgcaccatccgtttgagagttcgaagccttgggcgtggtgttggcctgcgctggccatggcgccgccgaggaaat

SEQ ID NO: 25822 - DNA, 351 bp, Zea Mays
cgggcggaccgcaggcggtggggcgttcgaattgaacggctaatttctcgccggtgtcgattctccgccgtgcgccgttgttgtaactcctggcaatctaattctcggtatgatccccactattaagccctctaccttcccctctttgttttgcaccggattgcgttgagttagggcattcctggcactggttcaagagttcaccggccatggcgccaccgcaggctgggcgccaccacgtccggacgctgggttagggacgaccaatctgccgtcagatagccactggacggattagattagaacgcgcctaccggttggatcccgactgtagagatctgatcggacgga

SEQ ID NO: 25823 - DNA, 636 bp, Zea Mays
tgctcgtgagcttgagttgtgtctaggatggcttgagtctgtcctctgtaacgcagcgtgtcctcccttttatagtctaaagggggcacgtacaagggtgctgagccccgacatgtgggcccagggacataacagatgcactacttggagcgactaatgctcgtccccaacgcaatcttccttgcgccctgatatccgcgatctgcataccattggcgtgtaggggaagcttccctggcaacgtacgagtggtggtggacgggcacagtgcaccttgcagcacgggcgtactgtttggcaatgggatggataggcacaccgcctgtaggatggcccgggcgccgcctgccagctgagtggataggacacattaaatgctgaaggggcacatcgtttgtcagcggggtagtcaggcagcgcgtcttctccgcaataaatgcagagacagcgcgacccagaggtcttacgtcaggctccgcccgtgggcttacgtcacacgtggtagcatcgggtctccacctgagcggagagcagtagcgttatgcagacaggtctgcaccaggctaggcctggacacgtgtcggcactggaccccagcctgagcaatacctgggtttttactgtcctatagtcccg

SEQ ID NO: 25824 - DNA, 330 bp, Zea Mays
aaatagtagagaggaagaagcggggaaggagaagaacagggaactagagcaggtagagtttcttttcataaagcataagtctctgtccttacacaactagatacttaatactcatgcacaccgacagcctgtctgacaacctagacccactcaggtccactcacgaagggatttgggcgtcgtgcgcgacgtggatgattctggactccatcagcggcggtgttgtctgagtctctgttgctggccatctcctgaactagacgtccttcctccaattccttgctgttgacattgacgaccaccggtggcgggttgagagagacgacaaat

SEQ ID NO: 25825 - DNA, 313 bp, Zea Mays
cgaggtttgacgggggtgaaccttgaggcttggtttagattggtgtcgctggtggtggcagttcaggttaatagtgcgaaagatgtgggtgagtgggatttacaccagaataagaagttctcggttatttccatgtatctggcgcttatgtccaatggtcttataagacaaaataatcctctctggaaattgaagttaccgcttaaaattaaggtttttctgtggtatcttggtaggggggtcatcctgactaaagataacttgacgcgtaggaactggaaggggaataagctttgtgtgttttgctctaata

SEQ ID NO: 25826 - DNA, 439 bp, Zea Mays
aggggatcatccaacgctccgtctggtctcgcttcggcctttgaaggccgaccgtggcgattcaaaataatgccgaagcatgccaaaaggctttcaacaatgtctgtgcttttattggtacaagagacctaatccaagagcacatagcctacagggtatggccacttgtggataactgggagatgcagaaggagactgctgccgggtccagtgaaggtggattaattcgtttgaaatataccttcagataaaaagaccggtttgacgagcccaatgacgactggctgaaatgtattgaggctactagcgacgagttacttggggcatatactagagccgaagatgatgctttatcctcaggctttggggatcggggcaaaaaaaggttgaacagggttttcgatgcaattggtttcatataccctgattactgctaccc

SEQ ID NO: 25827 - DNA, 423 bp, Zea Mays
ggcgccgcggtgttggtctgccgtcgagagtagacctggccgaggaagcgaccaggaggccctgggttgacagaggggtgctgtccagcggcgggtggtgatgtgcagccgatagtagaagagcccggtggagaaccgacagtggtgctcttcccaaaagcagatggcgatgtagagctgctgggagagaaacctagtggtgcgccggtagtggtggacttcgatgagcgccaggaaggtctagcaggagggccggctcaagtagcaggcccaatgagcggaacacctggtgtacgggggtcaccggctggtccgctggtggacccaatcgagttcggcgtaggggcaaccggtggaaggccagggttgctggtggtacctgcagtgaagaaaggtgacaactcgaatggaactgaaaccgtg

SEQ ID NO: 25828 - DNA, 677 bp, Zea Mays
ggagcttgccgctcgtccgcaacgcgttgatgtgcagcatgggtggccggagtagaccaatttctcgccgaagctatggatggtcgcggctccgccttgagtcgtggccaggaggaattactctgcgaatcccggtgagaaccatctccactgctaacccatgttcctaatttcatgtagcatcatttgattaggaaatggagcattcgggtgtgcgggctatcacccgaccatggcgccgccgctgtgcctgttcaccgctgtccgtggatgcaggcacgggttggggtgatgagagagatgcccttggaccattgatcggccagcagacggtttagatttgaactagcatgggccgtcgatcttagggtttgcggtcgggattgaatgtgagattaggactaatttgagccgttcgatcagatcagacgggatcagatcgtgagtgttgcagggttgtagatcctcaatccaatggctgagtttcgcgtaccggtttgggtgggcaagatctaatcctagcccttgttttctaatccagcggcctcgattcaccgataccccttcgttggcttatttgcttaagagcccctggttaatgcctgaactaacccgcggtccagtccaggatttcgctgtgtcttgggaagttttgcaccgagacccctagctttctc

SEQ ID NO: 25829 - DNA, 682 bp, Zea Mays
gcagcggcataagttgttctggtggcacaacgtagcgtggattggccagtgcgcgggtgagtgagcggtgaatgtcatccgtgaaatatagccagtacttatcaaataaagcacgaacattgccaaccgagcaatggagggcaactgttacaaagagttggcgtagctggtgtgatgaggcagagacgatggcctcatcaaagagaaggctccattcgttatcgctctcaagaaggcccctcgcctcacatgcctcgtgaaaggtaccatagaccgtgccactaaatgtccttagatcaacataactcgttgcacctttaactatcatcaatagcatgcgcaagtagtacagttcaccggccgttggatgaatgtagtacatccgtccaattttgtgacaagtgattcttttccgccacagtcgatccgaagggtgccaagaccactcagtagggaaatcacagtatgttaagtgtcggtatccaggatttcttgcattggtgttaaaccactcagttagcatggaactttttgatgcgggggactctaggagagacgctaaggtagtacccggttcataccaaacatagttattgttgggcaaatggacaacaagacgttcaaccgcaggtattctaaaatgaatgtcgaactcaaaaatacgccagatggcttcacatat

SEQ ID NO: 25830 - DNA, 279 bp, Zea Mays
ctgagatcaggactgatctttttgtccaagtcgagcctcacagtgtgcggatcacgcagtccagcttttgcaaaatctgcaagtgcgctcggcaaagtggcactaaaaagcaacgtttgtcgtgtatcacttagcttcttcagaatatcatgcaaatgtttggcggaccccatgctgaacaaggaatcagcttcatcaaacacaacatattccactgaacaaagagtcatgtccttaacatcattcaaatggtgcatgagccttcctggcgtggcaatt

SEQ ID NO: 25831 - DNA, 325 bp, Zea Mays
ctttattacatcgaaccggtatgcaaagctgatcgcatgatttcgatcccacggtccggatactccgatggtctcatacgcaaacagaccgttgatgggtatatcaacggtcccgatcttattttccgagattgaatcacagtcaccggatcacgatcggacggttacacctattcaatccaagcggtacactacaacagatctgacccacacattcacggatcgacggctattaacctatctactaacttcgtctcaccgacccgtggcaccgagactccacacgacagcgcgacaatctggcgcggtggagccatggccggcg

SEQ ID NO: 25832 - DNA, 551 bp, Zea Mays
tttatcgcgagggtgatcccgacgacgtgaaggcgcggttcctcggccttgttcgacgtcgacgagcgattcaacgctccagaggcgaagacaatcccgggcgatccttgcgctggcttcaggagatcacagaggtgaatcccgcacactacacggagagcaagtcgacggctagcgaacctgggcgcgtggcggactgagctctactctggcggcggtgtgtttgcgttccagggaacggagaggctgtcaagggtcccggcgatggaaacggtgtctttaaggcgcgcaggagcgcgacggttacgcgactctgaggtccccggagagcttcccatacgaggtgggcacggtccgcgcggcgaagacctcgcgggttcggttacgacggagagggagcttccgacgagccggggccacccattagtgagacacgagcgctgaaaatgcggactggcaagcggccccatgcgacagatagagatggcgcgcgcgcgcgggggaggttttgggccggcgggagtgaggatgtggaaatgggccgaattgaa

SEQ ID NO: 25833 - DNA, 424 bp, Zea Mays
agcgagctcacacacggcggggttcttgactgatttgggggaaatcccaaattggggagctatgggggacaattggaggtgagggctggttcactgggtgcacgattacttagcggagcaggctggggcaccaatttatagtgtccaagggcggtggctcctaattttggcatggtgtgctagcggctggagagaaagaaggtcactggtggctcagtcgtggcgttcaccggtgcagcggttctgagatggtaagcctaggcttgccacagttactactgcgcagtaaagagccacggcgtggcataattggggtcgccggagttccacgacgacaccgacggtccggccacgtcgcacggctacaggcgcggttgataagcttcaccccgcgaccaaatccgctccccctccgatcttttca

SEQ ID NO: 25834 - DNA, 311 bp, Zea Mays
aaaaaatccatttataaataaatttctctggttttatgacattctggactgggcttcaatttctagaaagtccaggggtctcggagaaactttcccaagacacagcgcacaacactagtggatggcgggttgtttatataaaaacagaggggtcaaaattcaaaaccgcgcccgcgaaggggtatcacgatactctatccgttcgatcagaaacgacaggcactgattaggtcgcgattcccccgagctggcgtgcaaaggtgaccgccagatctaggatccacggtaatcactcgccccacacttcatca

SEQ ID NO: 25835 - DNA, 290 bp, Zea Mays
ccaagtcagaattcttttaagtggggtagtgttcttggtagacttaaccgtctttccatcccaagggattgatgtgatcttaggaatggattggttgaccaagcacaaaggtatcataagttgcgcaaacaagacagtccttctcacagaccaccaaggaaagtcagtctcttgtcaggctcagccacccgccattgatccaatgatgtttaatctaacaacagaaagcatatcagtggtagaagaattcatggatgtattcccagaagagttgctaggaatgccgccag

SEQ ID NO: 25836 - DNA, 732 bp, Zea Mays
tccgtgaggaggttcggaagttgttgcacgccggcttcatcgaagaggtccatcaccccgtgtggctggccaacccggtcatcgtgccaaaagcgaacgggaaactccggatgtgcatcgactacaccagcctgaataaggcatgccccaaggacccatatccacttccacgtataaatcagatcgtggactctaccccggggtgcgactttttgtctttcctcaatgcctactccggttttcatcaaatccggatgtctagggaggataggaagcacaccgcttttgtaatggtagatgggctgtactgttatgttgtgatgccttatggtctgaaaaacgccctgctaacatttgttcgggcgatgagtaagaccttcggggatctgatccgggacaaggtggaggtttacgtcgatgacatcgtggtcaagactagaagggggtcgaccgtagtggaggatctaaccctggttttcgacaagctgcgggcaacccgcaccaaactgaacccggagaaatgcatcttcggcgtctccgcaggaaagctgctgtgtttcctggtttcataccggggcattgaagctaacccagaaaagatcaaggctatcgagataatgaggcttcccgcccgtgtcaaggacatccagaagcttgcgggatctctggctgcccttagccgcttcatttcaaggttggctgagagggcgctgcctttcttcacgcttctac

SEQ ID NO: 25837 - DNA, 528 bp, Zea Mays
ataaacacacataccccccacgcccacaccctgtccccgcctcctctctcagtctctctctcacgctcctctctcactcggtctctcccaaaccctctggtgatttggaaagcgcccctcccccgccgcctcatccagtgctatgggcctctagcttaggtaagatggtaagttgttcctctattggtgttctctagatctggttcgaaaccctaagtttggtgctctgatctccaacttttgttcttcttccggtctccatccaacttcggttgcgctaatcctctacaactctatgtatcagtgcctaattgttctttaaccctaatcgtcgtgccatcggggttagatctagtgcttcgtctttggtaagttgctaatcttttgtttgtgcttgtgatttgtgtttgtcgcctctggatctgtggttgaacggacaaaccctaatctagtgccttatgttctgtgttcgcagccgtgagggaccgatttgagtttgaaccctaatctagtgccttcttgttccgt

SEQ ID NO: 25838 - DNA, 725 bp, Zea Mays
ccgggtggtcgtcggtgttgtcctcgccacggctggcgtccgggggtccgcgacgagccgaggtgctttgggtggttgtcagtggatcgcctgtagctagattgggaggaaatcgaccctggggcggctggaattcatcaccgtacacatcgatccgccgcaccgcgtgggtagattggagtactcctggaatcgcggtgagcaacctctcccctacatcgtacggttatcctctacgtgttactaaaattgattcgaagttcgtgcgagtgggccggattttgggcgacaccggccatggcgccaccgcgggcgagacgctctgccgtgctcgttcgccgtaggggagtagagatagatgacgatgcgatcggagccgtcgatcaacctaggggcggtctcgattagacgccgaccgtaccgcttcgggccatggttgggcaccgttgatctcatgacgaacggacatgattaaatgttcgtgtaccaattctccacgttaggtctggtccgttgatctggatcggacggatagaaatagatctagaataataacatcttcacggttgaattcggatccaatggttctcgtcgcgtaccgagtcatccgccgctagatataatcctggccgcgggattgagatctgacggccgaaacggtccataccctttcggttgtgcacattcacaaatgagcccctgcagaatacagaaactaacctgtc

SEQ ID NO: 25839 - DNA, 272 bp, Zea Mays
ggtgagctggtcccaaagtctttttcaagacatggctgagacgctaccctcgctaggttgaagttgtcccagcggggttatggaaatgtgatcattgataggtgacgtcttactgtgggactattggtttcccgatgtgccttttcgggttcataaaagtcgttccggctactgcgaagaaattttttacccgctaggtttacgggaaaccctagtttcttttgctttagcactttctgtgcatctccttctttttctcgctactggtcaac

SEQ ID NO: 25840 - DNA, 428 bp, Zea Mays
tgtttctcttgcttaaatggctcgggctggtggttaagacctaaacaacaacgattcggtggggggtgttatcgatgcgagcctttggtagaggctgatgtgattctgatttctaaaatgtgctcatagtggaggaggttggggtattagtgtcaatttaaattgcgaggttgatgtcgagcgctgttgtatttcgagagttggtttcgaagacttggatggattttttgttcttccataggaagaggttcatgaacattgaggcgtttatttatgcctacatatgtatgtatgtggttcctctgttcagtaaggcccgtgaatggttcactggagaaatgcagctggacgacgtcaggagccctgggcgtcttgtaaagataggaaatgccatggaccggtgcaagaaactctactgaaatctggtc

SEQ ID NO: 25841 - DNA, 453 bp, Zea Mays
gcacaacccggacagagtcacagggtaagctggaaccgaagtgggaaggaccatttatcgtcaagacaaagtcgtctcccagcacatacatattaacaacacaatctggcgaagacctggaacattcctagaacatagacaaccttcgcaaattttttgtttaactcctcagggccaactcacccttgtaattccccaaacagctttattccggcccgcactcttttcctcccggggggtgaggtttttaatgaggcggagccatgtaatatacacgcaaaaaatcccctgcaaaaaattaaagcaacgtcgaaaaagaccgcatcaacggtcttcggcattcgaccacaacgaagtcaccgcgaggggcaactctagctaccctcgcgtgcgacaatccgtgcaaaagtcgcctaagggtgcagccggactagcacaacaagtgcgcaaaat

SEQ ID NO: 25842 - DNA, 393 bp, Zea Mays
gtcaaggagcggattctgcccgtcgagctgcacaaggaggccacggaggcctacatgtcgtacgccatgtccgtgctgctcggccgtgcgctccccgacgtccgtgacggtctcaagcccgtccaccgcaggatactgtgagctctctcgccttcccctctccgcgttcgttcgccccagctactgaagttcgttccatctgtttgtttgtttaagctagcatgtagggagtaggaagtgcatatggcagataagctatcgacttgtatagactgcatagataatatattctacattgtgtttgcttgaaaaatgggaaaagttcaacaatacatatggtggcatggatggatctggaatagcatgccatggggtgtgcacaaagtgctctga

SEQ ID NO: 25843 - DNA, 344 bp, Zea Mays
gcgacgtcgatcgcggatcagatggtgtagattagatctggcatacccgttagagtagatgagatctatgtcgttggatggaaatcgagcgggcggaaatcgatctgaagattttgaatctggagcgttggtattgcatcggagggctctcgattgcgcgcggggtcgcaaggatgcgatctaatctaggcactcagatctaaatccaatggaccagagctctccatacccattcagcctggagatctttctaaagagcccctcggttttgttatattgaacccgccgtccgtgcggctgtagtatgagtcttgagaatgtttcggtttagcccctgagtttca

SEQ ID NO: 25844 - DNA, 311 bp, Zea Mays
cgaacaccgtgcccacggattcccgcgttccgcagcggtgtcatgaagtccggcaaggaattcccccctcatcggagcacctaccctctaatccaccagtgctacgtgttgaggacataaacacgagaggaacagtggtgaattaccggtgaatcgatcggagataaaccctggccgtgagagcaagcggcacggctgcagtggctaactccagtgagcaatccgaaggcgcgtgattccattctggggttgaggaggtcatgagcgtcttcggtgagcacccacagccccaatcaccgagatcaatggcg

SEQ ID NO: 25845 - DNA, 425 bp, Zea Mays
gacaatgtccaggccccagcgcggaaagggccacgtgtgggcgatcagctttgtgaattgcgaagggttacccgagcaggggaaaatttttggcaggcttcgcacgatctcgtgactcgattcgcggcgtagatcatggcaggccagtagaagccttgacggatcaccttggcagcgagggccctgggccccgcgtgagagccgcaagtcccgctgtggacttcacgcaggatttggacgccttcggtctcggtgacacatttaagcatgggttggctgacccccttcttgtaaagctggccttcaatgagtgcgaagtctcgtcttcggtgcttgaggcgcttggcctctttgatgtcacttggatggtaatatccctgcaggaacagggtgattggcgcgcgccagtctttggtcatgaagag

SEQ ID NO: 25846 - DNA, 284 bp, Zea Mays
cgtccccatcctcatactcttctgtgcgcccacgcccgcttcttcatcccctcccactcctgcggtacgatgtggtggtgtgcctggacatactacttcatccccgtccacttcatcaagaggaggccactgcacttgggtagtatgatgtgctggtgtccctggatttttatttgtgtgtggtcgagctgttcccaggcccgttcaaggccatgcgtgcctatctgtgtgccgagggtaacatggagaacaccgtccgccaggctggctggcaagtcgtcccc

SEQ ID NO: 25847 - DNA, 398 bp, Zea Mays
atagtttcagtcgacagcggaaggacaattgcaaagtccagcaaagtagcttctcggagtgggatatgccagtggcctgacacaatcttggaacccatatggttctccaaggacgaagtctccaaagaattcgaagattgccagtacaagattattgtttccttggtctgtactggaatgcatacctcacctgttcttcttggatgttcgcttcctgcttcaatcttgataccattgttgggtctgtcactaacaactgccctcgtgtaatgttctgttccagggatcgacaaaatctggcattcttggggagatttttctaaatctgtctaattttctgaatatagtcgatccaaccgcaatctctttgccactgaagagatgcaacgccggaacag

SEQ ID NO: 25848 - DNA, 520 bp, Zea Mays
cgttctcggaggcaacatcgtcggacccagaaggcacgagacccctgtacgcacaacccggacccccgaagtaaagtagcccggagccattggatagggttcggaccccatcaagtgagctccggaccacccgtaacaaggacccgggagaagaagtgtcgtgacctaggcatgggtccggtattgacgcgtgttcaggctctatccggagcgcctccgctccccactcggccaagggtctaatactgccacatggcttattgtccgtgacgtaggccagcggacggtgcatgacgtaagggctctgagccgcacaatctccgcatttattgcggagaggacgcgccgcctgtctgcccttctgacaggcgatgtgcccccacgacatttattgcgtcctgtccattccactggcagacggcgccagggccaccctgcagacggcgcgcctatccagtccgttgccgaaacagtgcacccgtgctgcgcagtgcactgtactcatcccttgtgcgagaag

SEQ ID NO: 25849 - DNA, 671 bp, Zea Mays
cgggtaacagagtgccaaataatagtatatgtaggaggtaggggatcaacgaaaagttgattccataatcattaggtcatgcatgcatcatgtttaaactatactaaataaatcttcccctcttatggagatatggcgcgtaccaagaccacctaatgaaaagcaactggacctcgaggtgtgccccggcaccagttggcccctagacatgaggggagcagcagcagaagcaacgacacaataggggttctagaggccagggtggcacgactcatgtcagaactacgccacgggagtagggagcgtgtgcgatatagccaccgcattgttgaactgtcataacaggttaatcgtttgcaccaggaaatcgtggaacgagatacgactatcgtctgggccgtaaattcgcgctctttcgcctgggactgtgaggcaaaagctctagcccgggtagcagaactaagagcatccctagagaatctgcaagcgtattgtaacaccctgcatgaagaggtgcacgtgttatacgaccggctcatccaaatgtaccgccagaagttgcagcaatgggagccggaccatctggagcagctagtggaggacctgatggggagttggacttttttggagcccctccttccatgaacctcgcagatgaacgttctcccaag

SEQ ID NO: 25850 - DNA, 627 bp, Zea Mays
gttttgatatggaaagcaaagacgaagatgcggaaaatcggccctggcgaccaagtcatactatcttcaaaaaatcatccattaagcagagtcaaattgacgctatgaaagggagatatttccgagatatttcaattgtgagagctagaggagatagcgctgcacttgctcctgaagaagatgaggtggttgtttacaggagttttatgaaggcaaggctttggttcccattaagcaaattcctagttgaagtactgaagacctttgaaattttccttcatcaaattacccctgaagccattattaggatgggggtttttatttgggccgtgagaagccaggggctagagccaagcgcaaaatgcttcttcaacatgcacgagttgttgtacgagatgaaggctactgataaagagcagtatcacaacaactttggttgttatggcttcgtgccctgccccgatgtaagttacccggtcccaacattccgaaaaaggtggtccagggcctggatggaggaatggttctatgttaagaataatttagttgagagggaagatataaaaggaattattcaacgtcacatttggtctcgcttcagcatcaggaggccagccaccgctcttg

SEQ ID NO: 25851 - DNA, 489 bp, Zea Mays
tatctaaagagaggtgctggatgtggtgcaggtcctgtcagataccgtggtgcagttcaagatgatctaatccccatagccctatcctttgtgtgaaatgttgcttagttaccatggtggttccaatccaatacagtaaagaggctccactatactgcactcactgaggtatggtcaaatcgacatttatccattattctctagattaataattcaaaaccaggtgtatgtgaaaagataaatatgaaaaaaatatgacaccgatgattcttctatattgagacaattgggatgacaaatggtcacatcttgtctacacataccatctgttatttgtttagttacaatcgttcctcattcaccttatcttctttttctactttctatcagacagttaaaaaattgccatctccgtcttttttttcgctgccttttttcttgggatgcattctgattgtgctcttatcatatttgcaattgttagcttgc

SEQ ID NO: 25852 - DNA, 340 bp, Zea Mays
aaaagacatagttgaatggttcagccctcccctcctattttatagggttatttctcttttctaaactatcctagatacatagagcctatccacttatctaggggtgaaatggaccaactcttggaattttggtttgacgaccacacaatcttcataaagttgcttcgcctttacgcatctttcgcgatgacaccacgtgccacctccgattcccctctagaaccatttcgtcgggttttgaggcccaaacccagtgaaacctgcgaattttcgcgctgggtggtttagagacatgtttgtacaaccttgtacacatggtttgccattgacgaccgtctcc

SEQ ID NO: 25853 - DNA, 444 bp, Zea Mays
gtgcagtgcacctacagccggtgatcctcgcgtcgcaatccacgtcggtgctgtgattcgtgctctgtggcgcgtggataactgtgagaggtaaaaagatcggaagggaggtggatatggtctcggacgtgagcttatcggcctcactcgattgctttgcgacgtggtcgagcggccgatgtcatcgtgggacaccggcgatctcaatcacgccacgccataggtcgtcttaccacgtcatcatgagtcgtggagagtaactagtgattgtcataggactttgccccagtgcgtgtcacggtgaactcgccttagtaccaatataacgccaccgccgtgatctgaatttcgttcaaattcggagcaaccgtggctggcttctataaattgagtgtttcccttgctccgcccccttgtcacgaacccaatgcaaccccatccacg

SEQ ID NO: 25854 - DNA, 414 bp, Zea Mays
ccatgcacttttcaccatgcttatcattattttaacaactgtgactcagacaacacgtccacaagatgggcttgggtatgcatccgagcccctgaccccggcctcgactccctacttggtcaagatacaggacacaagaaccatacttccttttcctgatcaaagacaatagcaaggacaggagccattctggtggccatactactacatggactcaggctcacctcctctccacattgcgacaaccttggtgctcctcggtaccctccttgaggctataaaaggaggtgtccatggcttacagggagagaacacttcaccagttttccctccacgatcgatattggcacttgcttcaatcattcgtagagacttgggatccactccctctctcgactagcttgtaccccctac

SEQ ID NO: 25855 - DNA, 839 bp, Zea Mays
cagttttatactcctctccttctcccattcttacttggtggtatcccgaagtcatgtccaagctggaaaaaaatttggtgcctgacagctcatccaagatttcttccacaaccggcataggaaacctattcttgatggtcatgtcattaagtttgcggtagtccacacaaaaacgccatgtaccatccttcttttgaaccaacaaaactggagaggcaaaaggactaacactatgttctatgaggcctgccttcagtaattcagaaatttgcctttctatctcggttttgtgggctggtgaatatttatagggcctggcattcacagggactaaccctggaatctgaggaatgtggtgatcaaatggccgagcagggggtaaagttgcgggaatagcaaacatctctttaaattcatccaacagattctgcaactccacaccaacagttggttcctcagacttgggggttacttccagcaaggccaaagcccagacatcatttccttttaaccatttgtccacatgcatagtagacacctccaccactcttccacactgtcccccagtccccttcaatttgacctcttctccatcaactgaaaaactgatcaccttcttctcccaatcacagtgcattggactgtgttgcttcaaccagtcataacctaaaatagcataatacgcccctaactccaagactctcatgttagtcctgaaagtgtgtccatctgcccaccattccagtgaatgcaccatttggtcacttctgagagtttcaccattagctaccttcacaatagccggagaacacttggatgtaacgagaccaagtctgtcc

SEQ ID NO: 25856 - DNA, 422 bp, Zea Mays
tttagtcactatattttatttcattttagtttttaatttgctaaatacgaaaactaaaacaaggtacagatctgcaaggaaaacataccgagtgcacgaagcaggtctctctcagcagaattggggcatcgtttggtgctggcatgttggctccattgcaacaacaaccccccaaccctcatgttcgtccgattcttggatttggagacggctaataacaacagctcacgcatgcaacgtgtcaccgagacaatgggctggaatacaatatgatcggatgacttttcttgcatgtggagcaagcattgttacaaatcatctgggaaaatatggttattggctacttgattgattggcagtctacaactcagtctgctaggtttcatcctcaagtgttctcaagttgagaattcttctcgctc

SEQ ID NO: 25857 - DNA, 733 bp, Zea Mays
attgtggtggatcataagtgtaggcttttataaaccttttgatgagaacacaaaagagctcacccaagccaaaaagaaatgcttacatcttgaacaccgagctactaacattttatattaatggataagtgataaggtgtttaaggaaattatgtatatggagaccgctcatgatatttggacatatcttgatgacatatatgggaggatctctagcgaggatgttgagcacatccacaacaccgtggttgtgaaagattgctccaccttatggtcaagtgatgatgatgaaagacacaccacaagttcacttgataatgatgattgtgttggctctaactcaagtgatgcaaattatggttctatctcaagcatacttgatgattatggtgattgttcatgcccggacaatgatatcgctaatacaagcccatccattacatcacattgcttcatgtcacaaggtaatatgaagatatataatgctaatgtgactaatcattcatattcatatgatgagcttgttggtatacttgcaagcatgaacattgctttagaaattgagaaagataaaacaagaaacttggaaaatgaaaactcatttctaaagtattcatgtgaacaacaaaagcatctactttatgttgttacttgttcacatgaggagctaaaattgagtcatgaggaacttagtgttgctcatgaaaatttgatacaagagcatgcttttctc

SEQ ID NO: 25858 - DNA, 554 bp, Zea Mays
ccgtattgctttagtaaatgtgtctcgactgttgtacaatgatgttgattgtccgagcttcgaactcttcatgtgcatcatgttgttgttgtacctagtggcgcccttctggctgttgattgtgagacgaagttggagccatgagtggtggtggtgatagctgggcccatgcagcttgtgagtggcttgccgaagcaactgatgttgtggattgttggttgcctacatactcggggatgtatggggaatagcacgaagcagtatgcaggacctgcgttggctgattctgtcgtgcttcggttttagctatttccttttgcttctgaatcgtgacttggcatgtccttgttgtatgcctcttatcttccccacataacaggcaaaacaaccttctgggttgggagctgaatcttcaccgaagcttctacctcctctgcctcttgcagctggtggcctaaaggagctttgctatatccctgatgattgggagctatgctgatgcccttgagtatgatttcccctgtcgttgcttgagctaggattatggatcgtcc

SEQ ID NO: 25859 - DNA, 808 bp, Zea Mays
aatttcttcagtgcctctaaagcctcctgtgcttttgtggtccacttaaatttgtccaccttcttcagaaatttatacaatggcattcctttctcgcctagccttgatatgaatctccttagcgctggcatgcatccagtgagcctttgtacctttttctgagaccatggcggttccatcctcgtaatggcctcaatcttctccggatttgcttctattccccgatgactgacaataaacccatgtagctttccggctggcactccgaatatgcatttttcttggtttagcttccaccggtagcgtctcaagctgttgaagactagttgcagagcctcgatgaagttttatgagttttctatcttgataaccacatcgtcaacataagcctccactcgcttaccctagtgatcggctaagcatgtctggatggctgtctggtaagtcgcttcagcgttcttgaggccaaacaacatggaggtatagcataaagctccaaatggtgtgatgaaggcagtcttctactcgtcctcttttgccagactgatctgatgatacccggagtagaagtctaggaaggagagcatagagtagccagcggtcgaatcaactacctgatctatcctagggagtgcgaagggatccttcgggcagtgcttattgagatcaatatagtcgatgcacatgcgccagtcaactttattctttttgagtacaagaacagggtttgccaaccactcagggtgcagtacttctctaatgaatcctgtcgacactaggcgagctaactctgcacgaataacttctc

SEQ ID NO: 25860 - DNA, 440 bp, Zea Mays
ccagattctgcccttgtagcgtaagataccctccttcaagataaagtgtggcgctgccgttggatcaagcgacaatttagcgatcaaggacagagcctctggatccttttcatagctagtctgaacgtccttcagccattgaggaactactgctgaaacagcctgacactccgcatcaactctgtgcgacaaagcatccgcaacacgattttcagagcccggacgatactgaatcttgtattgcaggcctagcaactttgtgaacaccttgtgctgccaaggtgtgtggaggcgttgctcattaagctgcgttaaactcttgtggtccgtgaggataataaactcagtgtgctgaaggtaataccgccactgctgcactgccaatattacagcaaggtactctttctcataggttgataatcccctagatttaggaccca

SEQ ID NO: 25861 - DNA, 480 bp, Zea Mays
cgcctctcccctcggcgatctcgccaccggggagttcatgctcttcgtttccaacctcgcccgcgggttgtcgctgccgatctcgtctttcttcgtgctgctgctggaggagctcggcctccaacctcagcacttcacgccccgcttcatccttcaggcggtcatcatcgcctacctctgcgagatgtccatgggggcgacacttcttcctccagcatacagacggaagggtgttgcgcagcgaccttccggaggcggaaagcgagctgagctgcggctccatctttcgcgtgagcttcaccagcatcccatggtgcacctccatgaactggtctagctccaactccatggggtggagagcgagctgagctgcggctccatctctttgactttgatggcttcggtgcagcctccaacggtgaccgctggaccggctgctgatactgaagacgccacccgggaggtctacaagatgtcgtg

SEQ ID NO: 25862 - DNA, 382 bp, Zea Mays
ttcaacaccactagccagaggccaaaatctcattgaagcacaaaaggctttatcagagcataaaaaaccaattcagagcataagattagcaaaaaagataaaatcaaagctagttcctccagaaggagggaaacaactcaacacaactagcaatagctccaaataacacatctcaccctcttgaatgagaggaagcccgaaagacaaaattctcgccctagatagaggaaatgggaaatctcaaaatctctccccatgttgacaagtgaacttatcaagcacagacaggggtagaaagaaaaaactcccccttgacaagagaacctcccttgagaaaaagcagaaatgcaacagagggtatgaaatagagaaaatgcatgag

SEQ ID NO: 25863 - DNA, 750 bp, Zea Mays
atttcagggtccgtgaagaacggggaggggctccatgcgcacaccattaaaatgggtgctttcccaagcatcagcgttgagaactcccttatgggcatgtatgctagatttgagcaaatcgatgctgcactcttggtgttcgaaggtatggaggttaaggatattgtttcatggaacaccatcatctcatgccttgccaagactgatcgtgtgaatgaagccatggatattttcagtgttcttcatgctgctgctggtggtgggcttgcgcctgactttgtcacggtcttgagcatgctgcaggcttgctccaatgcaggattacttcatcaagggcagatgctccatggatacgtcatgaaatctggtttcgtgtacgatgtttcaatatgcaatgctctcataagcatgtatgctaagttaggaagaattgattttgctgagatgatctttgagcggatggatatcaaggaccttgtttcctggaattcaatgatcaatgcttatggtatgcatggcgatggtcattcagctctacgggttttccaccagttgaaggatgctggaacacctgcgccaaacgctatcacatttgtgagtgtgatatcagcttgcagtcactctggtttggtttcagaaggtcacaagtgctttgaaagcatgggaagagaccacggcattgaacctagcatggatcactatgcctgcgtagttgatctgcttggaaggtctgggaggtttgcagaggct

SEQ ID NO: 25864 - DNA, 336 bp, Zea Mays
agaaactctccctaagctttaagagttttttccaaaaatgagagtcagtctgtctttgattaacagaaataaggggttttcccttaatatatttttcagcaattattttctgccataaaccattagtattttccaaattccaaagccatttggatagcagcgcatcattcataaaacccaaattcaacacacctaaaccccctaagcttttggaggagcaaactgtctgccaattaaccaagtgcatcttttttgcctgtgaaccaccttgccaaagaagattttttctgaataaatccaattttctagtaaccgatttaggagccggataaatcg

SEQ ID NO: 25865 - DNA, 403 bp, Zea Mays
acttcatcgtcttttggatctggaatcacctcttccccagcaaatcggacaagtttgctctcagcctccccaaagtagcccaatttcttcatcataaccatgtcatctgctgtcacagtagatttaccaaattcaatgtggctgggtttcgttgggctcagtatagtgtaatcttcatcatcttcgttctcactccctccttcaactgtgatctgttcagcttcagcaatcgaggtaccttcggcaacagcctcctctggcacaacaaggcccgattgcctcatcacttctgatattggtgttgtctcggttacttcggcctcgtctccctcacgagacactccagcagtggatcgtactctggccatttcagtgtttacgcttttttgagacgaagctgatc

SEQ ID NO: 25866 - DNA, 625 bp, Zea Mays
atggattatagatctataactttgatgcaaatgaattataaggttgtcacataaaatttggagaaaatctgccttaattgtgctctgtcaagcgccttaaacagagtttcccatggtacagtagcagaaatatctcagatgcaacgcatctcaccgccggtgaccctccgccccgattaacgtcgatcgtcgcgattcgtgcgccgtgacttgcggataaccgtgggcaaggaaagatctcaactcgtggaagggagagaggcttatcgccggactgttcaccatgacacttgccgcgcagtggatagtggtgtcctcatcgcagttcgctggcgattgtaaccgcgccacgtgcttagaagatgtaccacgtcgttgtagatatccgtaggaggtcagttcgtcgccggaggtattaccccggggagcgccatgatagtttacgccggtgactcacctctcctctcggccacccgtctcccctttcaaaattggacaccaccgcttagcgctcctataaattgtcggttgggtctgttgcgccatgttatcacgaagccaaagcagccattcccgccttcaattagccaccatagccagagaatttccttcttcccccaattcg

SEQ ID NO: 25867 - DNA, 296 bp, Zea Mays
gttcttggcagacttagctgtcttgccatcccacgaaattgatgtgatcttaggaatggattggttaaccaagcacaatggcatcataagttgcgcagataagaccgttcttctcactgaccaccaaggaaagttagtttcatgtcaggctcagccacccgcccaagatccaatggtgtttaacctagcagcagaaagcatatatgtagtagaagaattcatggatgtattcctagaagaattgccaggaatgtcgccagaaagagaagtggagttctacattgatctaattcccg

SEQ ID NO: 25868 - DNA, 411 bp, Zea Mays
ggctggtgtgtttccgttgtggtgatgcgcatcgccgtgcagagtgccagtggaacggcaggtgttcaatctgcagtcaagaccacaaggatgtggtgtgtaggaggaatcccaatgggaagctcatatgggagccagtgacttcctcctcttctcagggcactgtcaacatgatgtcaagcgctgagtagcaattttcagttccacctcctccgcagcagttttatgtgcctaggacttctcagttcatgccggtgcagggttttcctcactatctggctgtgcctactcctgcaccgactacccctatgtcatctcagttgggagctccgcgtctgcctcacccggtggctcagtggggttcttctgttaatttcactccgggagcttcctcttctgcgggtatttccg

SEQ ID NO: 25869 - DNA, 366 bp, Zea Mays
agtcctctggtccgttagtcttagctagtttataggatcagattagctcttgtaactgaagtccctattcttgtgcctgagcacagtcctcatgtatatgtaacactccttcactgaatatgagaagtactctcagccatactgtttctctacatggtatcggagggctcctgatccaattctcctctcttccgctgcatcttctctcctccaactgcttcctgccgtgttcctctcggatccatggcgtctcccaactccacctctgcatccgacgccaccaatccattcgccggtcccgaccctcctcccgccaccacagtcgccatgattggcatcaaggctcacgtccctgacacccttgac

SEQ ID NO: 25870 - DNA, 641 bp, Zea Mays
attacatcaggccgaaggttaaacctccttgtattgtcttttggaagggaaatataaaggcaagaaagtaaaaatacactgaattaggaaattttctggtcaaacccccgggttgctttcactagatgtgtcttgattcaggcataatgctattgactgtgcgagcttcggactcctcccgagtatcacgctgttgttgcgcctagcgatgcccttctggctgctgattatgaaccaaggtaggcgccagtggtggtggtggtagctgagcccatgcagcctgagaatgacttgccgaagcaactaatgtcgtgggttgctggttccccacatattcagggatatatggcgaatagcatgaagcagtatgcaagacctgcttcggctcattctgtcgtgcttcggcttcagcgatttccttctgcttttggatcgtgacttggcacatccttgttgtgtgtcccttatcctccccatagaataaggagaacaatctcctgggctgagtgccaaaccttcctccgaagcttctgccccctccgcctctgagggctggtggcctgtaagaagtttgctgtattcgcgaagattgtgaactttgctggctgctctgggtgtgatttggcctgtcatcatttgtg

SEQ ID NO: 25871 - DNA, 652 bp, Zea Mays
tggtatcttgaagacaaacaacattctctccagaggagataataacctctctaacagaatctctccgagctttaccgttgagcccacagacattccaaaaaagtattgaagatggattcatgggatcagtgcaaaataacgaccaaaagcataggacacatcaaatgcattccagcaggtctgcacagcgcatctcctcgccttatccaacagtccatccaaatatggcttcctataggcgtcctgaattttcgtagtaatctgttcattcaagataggaaaacccaggagtagcaacatccacttcttcctgagacttgtgccgatgccttgtcctggtgtaaactcgcaggggaacattaccaacagcaccagatgccgggcaaggtgttgaagatggcggtagaggaagatcagccaagagctcctctgcagattcatccgcagtcagcaaggggaatgggcttgaatcagcctccaggtccaggagagccagagctggctcatcaactggccgagacgactcaagagccgcaccatctgaccatcgtccaatccgcagtccaaagctttggagagcgagaaatccattggcgttaacagggagggaacagcaccacccagttctggaaggggagcagcagccttcaac

SEQ ID NO: 25872 - DNA, 384 bp, Zea Mays
ggggattccgccaccgcctcttgtgccacctcgctcccataatcatgaggtcgttagctctagtgttgctcttgctgcccctctagctattgaccctgccttggctgctattcttcagtcgcttactcagcagcaggctcatatggtcgcagagcaggcccgtcaggcaacagagcaggccagacaggccgctatccagcaacagttgtccaagcggatgctttcgatgtttcagaccattcaggatcgacaggacaccctacaacagcagctcctagcagacagggtcaagcaccgggcattcatgacacatattctccagcataccaacgttcagcttccaccaatgcagtctgctcctcctctggctctttagtatgttgt

SEQ ID NO: 25873 - DNA, 444 bp, Zea Mays
gaattccaggtctgttcatgctccctgttctctcgttttcgtgttcttgtgtgcccctgatgctccccaaccccgccaattaagctaggaccctatagatcaccgggaacgtgttggattggctgttggtcacacggtcaccgtggacagagcgtgtaagagcaccgttagtaaaattagttgaggggaaactcttgttagggtttgaatttggtctcaaccatagtagggcaccagtcgttgcgtgaatggaccggtgtaggctcacaggagctcggttccccgtcgttcgccgtcatggactaggggttgtgaagagaggaaagcgcaagggtgtttctgcaagtgtcagtgagatagagaaatagtgagagggactctttaaagaatttcaaatcgttagggctctctgcacaaaatcgaccgcgtgggcgcacttttgcc

SEQ ID NO: 25874 - DNA, 616 bp, Zea Mays
ctgcatacttctctatcctgagggtggtgtgtactggcaagaaatgagcggtcttggtcagcctgtccacaataacccaaatggaatcatggtgcctggaggtattgggcaatcccacgataaagtccatgcaaatgtcctcccatttccaagatggtatgggaaggggttgcaaagggcctgctgccttcaaatgactagcttttatcctctggcaagtgtcacactcggatatgtacttggcaatttccctcttcattctggtccaccagtataaggatctgagatcatgatacatcttgttgctaccagggtgcatggagaatttggaaaggtgagcttcatccaatattctctttctgagttcagggtccttgggaacaaccaatcgatctccaaaccataaaattcccttgctgtcctgccggaagcacttgtatttttctgccttttgcttgatcatttccttgatcacctgaacacccttgtcttcaatctgtgccctaactatttgctcttgcaatgtgggctccaccaagatatagtttaggtcaccagaagaaacaacttccaggttcaatttgcacaactcatcacacagggtggtaactctcgc

SEQ ID NO: 25875 - DNA, 544 bp, Zea Mays
cgctgcgcgtgataatggtgggcggggcgaccgaaaggagcccgtcgtcaagctcatgtctgaaggtactccacggcgcaaaggtcaatgcagaaactgtggcatctatggccactggaaagaggactgcaaaagaccaaagaagggagagcgcagggaggaagcacatcatgtgcaagcggagaaggagccggcgttgctgctggccactgtgaacgacgtgcgtgttcaggtagcaacgcgacgggttcagagtcacgtagtgaacctgaatgagaagaaagtggtgccaactgatcgcgatgaagatagcaatgtctgggtcctggacaccggggccagcaaccatatgaccgggcggcgggatgtactaacatcgcttgacacgtcgatcggcggtacagtgtgcttcggcgacggatcactcatagcgattgagggcatgggatctgtcatgctccaaaccaaaaaagatgggcataaggtactgactgaagcttatttcattcccaaactgaaaagcaacatagttagtttaggccaa

SEQ ID NO: 25876 - DNA, 299 bp, Zea Mays
tgggttgattaggtgtaaagggcaggggctcttttgaaaactaggtatgacgaaggtgtacggtgcactatgagccgccagatctattttcaacggttaggattagattcagttttataatcgaaccggtacaccgtgaccacctgatttccatccaacgacccaaagtagatcgcgaagcggtacacacaggtggccactggattgcagatgaacgaccaagctttaatgtatccaagatctaatcctatccctctacattagatccaacggttaccatgcgtcctaaccgaaccgtt

SEQ ID NO: 25877 - DNA, 546 bp, Zea Mays
gtcatctcattcctgtcacttccactggcaccgcttaccttccacataatctatcccttaataatgtccttgtctcaccatcctgtattaaggatttgatttatgttcgtcaattcaccaccgataacaattgttctgttgaatttgacccacttggttgctctgtgaaggatcttcctactcggcgcgagatcctcagatgtgatagcacttggccctatacccccttccgctcccggctaccacccttcatgcttcggcaaaatctactatgtctctgtggcaccagcgtcttgggcaccctggtcacgctgtcttatcccacctagccgagtcgtcaatcatttcttgtaataagagtgccactgctcctttatgtcatgcttgtcaattaggacatcatgttcgtcttcctgttcatacatccacctccagggctactaaaatttttcagttaatacattgtgatttgtagacctcccctttgactagtgtctctagtcataaatactatcttgccattttagacgattactcccattttct

SEQ ID NO: 25878 - DNA, 434 bp, Zea Mays
gggctaatgcatataaataagctgttgccgttcaaggttttaagcatagtaatccaatgtagaaagcacattcaagctaatgtatgtataatctataggtgttcagtaatttaaatgatgcattatcaagtacatgtgggattggatttgggaaatccaaagtccaatttaaccctgcctgctttggatgtacatgaatatgatctgtttggatttggacatccaaaaccatgtgatcaaataaagcaaaatattcattggattgcaacacaaaaagtccactgtccattggaactagctggacttggttttacagtgatgacaaccctctcttcaaatgctacatgggggagagaatcaagaatgggtggatgagaggggcagactagactttctcatccgaaccatcaagtgacccccatagaccactgacg

SEQ ID NO: 25879 - DNA, 530 bp, Zea Mays
caaatcctagaaagcgcaggggctctggcgcaagactccacagactcagtgaatagtgcccccaggacggcgggtttatattgaaattcgtcagggcttctttagcaaaagcacgaggcgaaggggtacggtgagatctcggccgctagatccagaaccgagggcccggattagatctagacatcaagtgaatcgttacgcgccctagccactggatcaagatcgtgcggtcgagattacgctcaaccgaaccggtacagggaagccaatcagagccgtccaataaagatctaacggccagaggacgtctcctacccctatctcccccaccagacacatctacgacggcgcgaaactctgggcgcggaggcgccattactgcgagcttcaagaacccgccccagtgacccaaacctggtgctatcctacgcatacgaaggcttagtcgacgtaaaacaatagggttagcaacttacaggtcaacgcgccgccagaagtcccagttccgttggtggcgacttcctgttctt

SEQ ID NO: 25880 - DNA, 351 bp, Zea Mays
ggaaaaaggagggtcagctcgtcgggtttagtgatagcgatcacgccggcgacgtcgacacgcgcaagagtacatcaggcactctgttcttcctcggcgacaatgcgatcacctggcagagccagaagcaaaaggtggtcgccctcagctcctgcgaagctgagtacatcgcgggcacagcagctgcctgccaaggcacttggctcacacgtctcctgtcagagctgagaggcaagaaggagggtgcgatcacgatctttatcgacaaccagtccgccatccagctcagtaagaaccctgtttttcacgaacgcagcaaacatatagacaccagatatcacttcattcgtg

SEQ ID NO: 25881 - DNA, 298 bp, Zea Mays
cgcagtttataggcgccattcttttagctgttcctccttcaaagcttatctccatctttggaactctggcgggcccaactggatcaaggaatggcagctctttttggaggatgaatcaaactcttggactatagtttcctgtggtcgctctgtgaaggcctcctttgctgatgttgctcgttcatccgttctgtctggtgcgaatttggttcccctgggtggacaggtcaggtctggtggattgaaaccacgttcatcggtgttcaatcggatttcgttcccggttcgtcgtcattct

SEQ ID NO: 25882 - DNA, 365 bp, Zea Mays
gtggcggtggcggtggcggtggcggtggcaggacgaggaaaagcgcgagagcgagcaagagcgcaagagaagacgcgaaggcggcgagacgacgacaggtgcatgttggcgggttgcgtgaggagggcgaggatgcatagcagcacatccttcggcctttgtgcattttaaacacgaggaggaagggtctagactctataggaagctgctcagcagtccaccgtcgttggtgaaagcgccccttccagagaagacgagaacaaagtggcagagatgataagaagggataggtaagtagccactgagcgatccatatctgacgactgatattcagaaggcgacgtggcgctctgtatggccgcgtt

SEQ ID NO: 25883 - DNA, 368 bp, Zea Mays
gtcgtgattgtgtctcctgcctgagggtggcctcgggcgagtcgtgactgcctctccccccgaggatggcctcgagtgaatcgtgactgcctctcccacccagggttgccctcgggcgaatcattactgcctttcccgctcggggttgcctcgggcgagtcattactgccagtaccgcacggggttgtcctcgggtgagtcgtgtctgcttgtcccgcccgagggtggccacgggagagtcgtggctgcttgtcccacctggacatggcctcaggtgactcatgcctatgtctcctgcccaagagtgtcctaggacaagttgtgactgtttgtcccatgtaggcttggcctcaagcgagtcgtcactc

SEQ ID NO: 25884 - DNA, 271 bp, Zea Mays
gtaggcacccactttggcgaagctagcttttattttcttcatgcaatccaaggatttctcaaagcacctttccttggacgtgcgaagttcttcagcgtttttctctagatgatttttccaatattcgctaatttcttggttagcttgtgcgagtgcgcaattttccttagcttcggccagttgtctccgaaggtcttcaatttcagttttttgggcttcggcctgagttttgaaactagcttcatcttccttcactttgtttaccaatgaa

SEQ ID NO: 25885 - DNA, 389 bp, Zea Mays
gccttcagaccttgctcaacaagctaacgattcgaagcagaaggctaagtcacaagacctggctggaagttcggttggtggcatgatccgtctaagaaggagttcgtgcaatgtatcttttgcatgaaagtggtgccctctagaataaagaggttcaaacagcacctcgtcggcggattgggcgatacgatgaagtgtgcaagggtcccagaggttgtttcaaaggacatgcgagcttatcttaagaagaacacaaggtctgcacttgttttggatgacgatgaaggtatagaaggagaagacgatgctcctttgttgtctctgctcctccgaagccaactactcaaaaaggtagaaaatcagtagctgccatgctttgcaagagccca

SEQ ID NO: 25886 - DNA, 377 bp, Zea Mays
cagaatcagttcctgaggatgccgacgtggtgtatggtatgtttcttattaactccatacctgcatcaattttctttgattctggagcatctcactccttcgtaccaaagtcatttgtggaaaaacataatataccaaactatcacttgaagaagaaattattaattcgatcaccaggaggtgaacttagagccactcactcatgccctcagactaagattgaaattagaggcctaagatttctagtagagctgataattttggaatcaagtggaatcgatatgatacttagaatagacttcttgaccaagtatgacggagtaatatcatgtgccaaaaggatggttacattaaccagtccgcaaggagaaagaatt

SEQ ID NO: 25887 - DNA, 449 bp, Zea Mays
tcgtcgggaccgctagcttcgaggtgctagtctcacccccttcacccagtttggcgggctgggcggttggtctcagtagctgtcttttgaagacgtcctcaggcatagatgcccaagttaatgacctcgcatggagttcatccaccatcgagttaccgcgagagacatgttctagttccaaggagtcgaagtccttctccagctcgagagaggttacaaacctcgggtgggaaacacagtcacgcctcgcccaaggccaccctcaggcgggagatgtagtcacgcctcacccgaggccaccctcaggtgggagatgcattcacctaggacgagagacgcaatcacctcggacgggagatgcagttacgcctcgcctgaggccaccctcgggttctttttcttcttttccttgctgctgccctgagtagcgacacctgagccacccattt

SEQ ID NO: 25888 - DNA, 490 bp, Zea Mays
caccgggaagagcaagaggaggaagtcatgggtggcatccatggcgggggcatggagatgactcgatggcgagggtgtataccggcgagctccttcttcagcagcggggcgcggataggaagaagccgaccggaggtagcgtccctccacatcgaggagagagactgctaccatgagatagaagggagggaacgggtgagcgttgcggggagaggggtggttctgtagtagctaatgcaaagggagaggacggccgccggaacagctgaacattgccttagctctccgtgcaacccatcacgaattttagacatcatgtggcctgcaaacaagatcgtgcatccgacaggagggatatgttctccacgtcatcctggctctacacgttatcacacaactcaaattttgaagggtctaaaccagtgattagtagccgtttgatttggttgtagatctacgcgtcagctatccatgttgggtccatgcagtt

SEQ ID NO: 25889 - DNA, 278 bp, Zea Mays
acgaacacggataccctcgtcccggcgtcgatgtagaggcgtgtgtggagataagagagtgtatttaaaaatatatcgggggaggttgaagggtcgttttgaaagctaatacacgacggaaagttgtttgaaaatttatcttgcttgcacggttgcttcaagtggttggtttatatatacttcacatcgaattacagacatgcatcaagttaattcttccctgtaaattataaagttagattcctagagacgatatgagttgtgacttttattccgag

SEQ ID NO: 25890 - DNA, 431 bp, Zea Mays
atccgcgtgagaaagatgacgaaatccaaaactacgggggatacccatggtccatctcttacaaatataaatcacgtggggctcggttccagcaaagggagagagagagttcattttggattgtaaagacctgttgaagacgaattcattcgaggcagttgtctgctatctcatcaaagagagggacacatgatctacgtccgagttgtaaaataggcgatggaggggagtgggaggggaccaactatatatatgtgtttaattagtatcacacgatccatccacaaaatgatccaaagtaatatttgtgatggcacataggacaaaacatataatatttagacatattttggtcgccaaatagttgcacttgtaccctatgttaagcatggggtggttgatgcttatatcgtgtatgtgtgagtctgttt

SEQ ID NO: 25891 - DNA, 421 bp, Zea Mays
caccgcctcgatgcgattgtggagaccgtgctgtcatcgacgaagacactgagaagcagttcgtgtgtccgaacattgattatgtgagcccatcgatacgctaaatgtatgaactagttattatttacaataaattactattttttctcctgcagccatacgggtggcgtaagtgtcgtttcagagagtggttgtatggtcctttgtcccattggccagagccagaggtaaaggaaaagagatacaacgggtgggcggaagaagagatcaaatttgatccagtactctgcaaatgtggtattgaagctaagtatggattagttccttccgagcttggtgttggatatttttgtggacatatggtcgattacgatgaggttggtatttttttttgcaccagatgtaatgttatagcggtact

SEQ ID NO: 25892 - DNA, 808 bp, Zea Mays
cggggacttagactcatgagcaccccgaggcacgaggggccccagggggctttgaattgctcatcagtaccatggggcacaaggggcctcgaggacttagattataacagagacatcaggggcactagggacctcaagccttagagtgccccggggcatgggccccgcctatgatggtactagtgattgggctgacttcctaaaccgagatcattgagtattggtagcggatagagatatggctttcattgggcactaacagtgctaaattgctgaaacttgaggtgcatgagatgatttgcattaaattagaagtatgaatgagaactgccaaaatcaaaagtattcatggggatttgaaatatcagataagtataggtggtgcagtacaatttctttaaaatggcaatagagggttgcttatgtggaataaggggaagaactatagctaaagaaagaagggctatgacagaaaattcatcatttattaagtccttaggaaaggtatgttatatttgtatagttataaatgtagaagtcactgtgctcattgttgatagaattaagaaagaatcagaaatttttatgtcattaaaagttcagacggtatataaataagtaaataactaggaagaaaacaagccatttcttcttaataagaagggcacaactggaggaacagtttctccactacttcataataaacaaaacctaacctgaggatatgtaaacattcagatgctgtgttcaatgcagatgtcctactagagaggcctttcatgcatgcgccttcaatcgagcatttgac

SEQ ID NO: 25893 - DNA, 858 bp, Zea Mays
gcggaatggtatttcacgcagcgacgactggaaggcggtgttgaagatgtactccgcccaaggcagccagtgcaaccagccacggggccggtcacctgtcaaacaccgcaagtacataatgatgatccggttagccgactcggattgcccatccaactggggtggaaggtcgtcgtcatctggagcttggtgctagttaagcacattagctcgcgccagaaggtggcggtgaacactatgtctcggtcagagacgatggattgcagattgtcgtgcagccggacgatgtcagcgaagaacgtctgcgccacactctctaccgagtatgggtgtgctagggggatgaagtggcaatacttgctgaatcagtcgaccactgtcaggatgacagactagcctcggacgcgcgacaacgcctcaacgaagtctaggactccacactccttgtggcacgggcagtgggagcagcaggccggccgggaggagatgctcagacttgttgcgttgacagacgacacacgcccggaccaaatcctgcaccgtgtgcttcatgttagggaagtggaagtcgcagcggagacggtgcaacgtgcgctgaacaccctcgtgcccttcctcgtggacggccaccagaacctcctgcaacagaggcgacgcgggtggaaggtacagccgcctgccgtactggaccaacccatcctccagcgcccatggcagcggtctagagcccgcccggatctcatcttgcagggtgatgagggccagatccgtggcttgtgcttggcgaagccgatcaatgaagtcgaagcgcggggcggaaagcaccatcaccgtgtcgccctctggagtgtctcggcg

SEQ ID NO: 25894 - DNA, 295 bp, Zea Mays
aggaaatctaccggataaggctccctggtaaaccaacagaagttggagaaggcaagcctaataatcaaaatcatgccataatcttcactagaggagaagcacttcaagcaattgacatgaaccaggtactctaatcagttatgcaataagttttaacttttaagtctgcagactttttacatttttctgctctgtaggataactatctagaggaagcatttaaaatgagaaatctcttggaagagttccttcttacacatggaaagtcagagcccaccatattgggtgttcggga

SEQ ID NO: 25895 - DNA, 374 bp, Zea Mays
gttgaagcatgtcagaaggcctttaatactgtgtgtgccttcattggtacaagggattaatctcaagagcacatagccttcagggtatggccacttgtggagaattgggaaatgccgaaggatactgttgctgaatcgagtgaaggtggtctggttcgattaaagtatactttcagatttagggagaagtttgatgagccagatgatgactggctgaaatgtattgaagctaccagtgacgagctacttgggacatactcccgggccgaagatgatgccctttccacagccttcgggggccaggggaagaaaagattgaacagggtatttgatgtgattggcttcgtataccctgattaccgctacccgctgcg

SEQ ID NO: 25896 - DNA, 472 bp, Zea Mays
gtggggcagcacatggtggcacagacgaccgatttggcggaagaatgaaattctctggctatggtggctaatcgaagataggggttggtgctctggctttgtaataagttggtgaagcgggctagggcataaatttatagaggcttgaagcggtgactccgaatttgggagaggaaagctggcggccgaagagagggggtgagtcaccgccgcgaactatcatggctttcaccggggcaatgtctcaggtgatggacagactacctaaggcggtttactgccatgtagtaacgcttctcagtctgtggcatccgggcggcaagcggtagactccggcgaggtcatctggaccggccgcaaggcaagtgggtacgatggccagctcacggcctcatccgcggtcaagatcttttcaccaccggccaatatccgcacccagagcgcacgaatcgcaacaccggcgaggatcgcg

SEQ ID NO: 25897 - DNA, 367 bp, Zea Mays
gtaaagtgtgtccacgacgggagtctaagtgtcatcattactccgcatgtctatctatgcctgtgtcagcccctagctttcatagactgtcttcctgccttccttatgtcatcttgtctgttacgtaggacgttggaggactccggtctaggggccataggtcatgagcagggctcaagcgtaggtctagagcgggaggcagaccaattctctcacatgccatgactcaacgtcggacatagttaatgagagttgccctttggttagaagcggagtccattcgagtggttccctgacgctttgtctgaccctgtgcctgggctatgctttgcccaaccccgtgcgtggtgcgggtgttggaacaaag

SEQ ID NO: 25898 - DNA, 702 bp, Zea Mays
atgtaatagcacatctttgaaatcagcatcgaaaacatattgttgtttaattgtttccaagccaaaaatcttaaaatcaagttgagacagcatggtataacggcgagacaaggcatccgcaatgacattatcttttcctttcttatgtttgatgacatagggaaaagattcaataaattcgacccacttggcatgcctactgttcagatttgtttggctccttagatgctttaaagattcatgctccgaatgtataaaaaattctttaggccataagtagtgttgccatgtttccaaagttcgaactaaggcatataattctttatcataagtggaatagttcagactgggaccattcagtttctcactaaaataagcaacaggcttcccttcttgcaacaagacaccacccaaaccaataccactagcatcacattccaattcaaaagtcttactgaaatcaggtaactggagaaggggtctatgagttaacctatccttcaatgtttcaaatgcaacttcttgtgccttcccccaagaaaatggagcacccttcttagtaagctcgtgcaacgaccctgcgatggtgctgaaatctttcacaaatcgacgatagaaccccacaagcccgagaaagcttcggacttgcgtgaccatggtagggactggccagctatgtatggccaccaccttagcctgatc

SEQ ID NO: 25899 - DNA, 779 bp, Zea Mays
atcagaaccaccccggatcgaggaccgacgcttgcgatgacgcctacgacgatgacggggagggagggtccctagcaagcctggatcgtccatatgagacggctccaccggagacgaagaaataaccaacgtaggagtcctcccactagaggcctccagcgcgtggccagagccattgcccccattctgtggggagaccctgcgccaaaccatcctccggacttcaactccacctggaggagacgtcggtgggcgaagacggtcccagacagagccaccagatgcccgggtgtgggccttgggcgctaccggaagccggacagggtctactgagaccaccggagagagtctgccccagacaggtcccttggacagccgccgatgaactggaaccttactggcagacctcccaacaggaacatggcagttgtacgaactatggcccagacccatgcagcggagacatcttgtcctcaaacgacaagacgcagcaaagtgatcttcagcgaagcagttgaagcaccggcccaacaagttccgaggaacagaggtgacggagagcgggagctgcaaacgacgcctcctagccttccgggattccactcgaatcaagccgtcctgaggaggctccggcgctctaaccagaccacgagaccgtaggcgtccagccaaaggagggggcaacgcagtggtctcaagtggtgggagcgcaaccgaagcagcaagcctcgacgaagaactgggtgaagccgacgaacagaggattatatcgcgaaacg

SEQ ID NO: 25900 - DNA, 400 bp, Zea Mays
tgcagttgttggatagctacaagacgagtacatgttgataagagaattaaggacaaatgtatctgaaaccaagccaagtttgacagaaagggaatgaagctgggcaccaacagaaacagatgggaggcgggcagtggcatagaaagcaatgttgagggagtagctatcgagggtcatacatccagaatggcgtagcagggcgagtaaatcgagggatagagatgggaaatgccccaaagagagagatcggaggacagagtggacaagggggagctttgaggagaagacctgaaacaattgactgggagaggaggaggggaatatggcaatgggagagtcgtgggattaaaattgaaagggcatatttgtgttcaggaaaagagcttttggcaatgcagaa

SEQ ID NO: 25901 - DNA, 273 bp, Zea Mays
ttcgtttcttagtgcaatcacttctgaacgaaggttattcagggccatcgtatagctttcgtcttcaatattcttctgcgccctaagggcattactaagaattaagccatgcaagaggaggaaagaattgagtatgacaaataaaatacttcattctcaaattcaaagttaacctttatacctttatagtgttgtaggctaggctgtcggcaagatcatccttcgacaaaattgaaaggccatcttccagcttcgggaatcccatgcttttac

SEQ ID NO: 25902 - DNA, 348 bp, Zea Mays
cccaatgttgacatttttccacctgccactgctcactgccacctgacatgtccagagctctctctccatttatacagctccccatctccagtccggcactcaaagctctgcacccttctcctagcgcagggcgcttccctagccccgggacagctcctccattcggtgccccctgctccaatcctctctgcttctccctccatggacgtcgagacgcaaagcccccatggccgctagcctccatggcacttagccccttgagctcgccttcctcaactctggcagcccgggatccacttctccctgccccctgcacctcccatcgaggcccggatgagcagcagccgc

SEQ ID NO: 25903 - DNA, 1250 bp, Zea Mays
ccgcccgatccgagatctacggatcggatttaaaatacccaaggtggcttcgaatgcgcccgatccccatccaacggtccggatcgacctcacgcagaacgtttactcagatccaatctaagcctttgatctaccgattggtggtcacgatttaacgcagcaggaggtatacacgactccaaatctggtgcgcccgttgagcatccaacggccgaggtcgaaccaacctcccattgtcctgagtccggtgccgccgacgaccagcgcggtggtgccatcgccggtgaaggtcaggacacgattctagcgcgtaaactctcagagtatcggtgttacatgcgaaggagacgatggcgaactcaagagaggggcacttaccgactgtggtgatagagacgaggtcagccatgacgattggcggcacccgagctacggtgagcaattcaccgagacttggttacgccccgagttccgatgcccattgtaaagtctccacgaagctcgaggatgtccttaaacccgaaagcaagaacgcgacgaccgtgtaggcttgattatcctacggcggatctatggtggcggcggcgctctcgagggttgatggaggatggctcaggggagatgccagggcttatatacaagaggtgatctcgcagcccgcccttcaacaacccgagcattgcgcgagagatacggaaaatccattggggttgggggtgcggcatacggagtccgagccatgaatacacgcgttcggttgggtttgacggaaggaagaagatacgccggacagacggggcccacatgccagcgatacaaacgcacagcgtgtaacgatcccggcccaagtggcccacctggcggtgaggggtaccgagtgtgagtgataagccgcagcacaagcgaccagaggctgacatggtggatcccacatgtcacaggcacgaaagaaaaagaaaaggggagggagtagagtgggctggcgcaggggaacttagcgcagtgggccgaaaacggcccaagggttaagagagagttcacccttttattttctttggatttctattttcctttcttatttccatttcaaatcagaccaagttttacattctgaatttcaaatttatgcacagaaaaaaaactccacatgatgcacaatttctacatattatttctttatttattttattattattttaattaggtaatgttttcaacatgaagtacacaccacattatagcaatatatt

SEQ ID NO: 25904 - DNA, 385 bp, Zea Mays
tagggaccggggatcatatcaccgatagtagccctagagggaacaatgtctctcttcgaaggctgatgaagggtcgggcaacatttcgtccttccaccttttgaacgatcatggtgtttattcatcctccgaactagagccatttttatggcatctggtcatctctcggggtggagtcaggcgcttctccgcccctttataaactccgggggtcctttgcttgttggttacccttgacctccctttctctttggcctcttccttgagcgcacctccgaccggttggtgatcggatcttaggtcgtcaggatgtcgcgctccgtggaccacaagccgaggtaggtctcttcctgaaggttcccgcgactcccttctcaggtttgac

SEQ ID NO: 25905 - DNA, 311 bp, Zea Mays
atcagagccgtccgatcggacgttgacgacctagattagacctatacgtggatgaaacggtacgcgccatgatccataggatccagaatccacggtccaggtttaatacagctacgatcggctcatattcacccgatcaaatatcaacggcctagaatcactcacgcgaagggttattgctggcatcaatccgagtcgttcactacgatccgacggttagatttacccggccgagatccaatcgtggccacacgatcccagatcaaaggcccccagtttgtcttcctcctcccacagagcgcacggcggcg

SEQ ID NO: 25906 - DNA, 291 bp, Zea Mays
ttggtgtggggtggggctaggagcatcagtgagaggcagagagcgtactgttgggagagatagagaaagaagatgtcgtggctggttgcggatgtcacaccttgacaccaagatcaatgtactaggttagctgccacatcactgtcatgtcaccatagaccatggcactaagttgttttatctccacgtcgtggcctaagtcgtcgacccctaggccctagggtctaagttgagattttatctagcaaagatgtaaatgtaattctttgaccaagaatggttaaataaatc

SEQ ID NO: 25907 - DNA, 455 bp, Zea Mays
aaccttcgttagaaaatattttcgttaccacaaataataagagttagacacaagatgtttaccttaaaattagaatagaacaagttgccgacaatgtgctgtcgtcggtagcggcttatatccgcttcgagctttgggaagccgatactctttgatagagtaccgacaactttcgcaccggtttgatctcgtatgcagcctaacccttcatcatcaataccaccgaagagaagtgcccccggccgatacccgcaagatatagcatactcttttaattcctcttttttagcttatgttagcttctggccaattaagtttcggaagtcaaaagtttcatcttccgaaatatcttcagttattccttctttctcgggttttgcggccgtggtctcttcggtggctgcagcagtttcttcagcggccatgtttagcagcattttatctatatcagcagc

SEQ ID NO: 25908 - DNA, 296 bp, Zea Mays
ttcggacggtgcttcgggagcaggggatttggcttctttggtcatgcttttctccagagctatgctagtatctggaaattcttcttcggccctctactcgattgcagcgagcttcgtttcaacgagcactgagggcccagcttcggtttccgtatatgttgtagcagcttcggcaatcttcttcacaggagcaggagtcagtgctcttgttgtctccacaacggcgtctagcacgcttgccattcttctcctcttgggagttgtggcgggaacccttgtaaccttcggcagctctg

SEQ ID NO: 25909 - DNA, 502 bp, Zea Mays
ataagtatgcttgccgcatgaactgaatatgacttcatcccctcctgtaaggggaacttttgtgcctggacttacggaccttccatttaattggaccatacccttcttccctataacttctaactcacatggacctccttgctgaaaattaaacatcaaagccaatgaaaatacttgcagactaacacttgagaatgttgaatgttcatgcactccgtggaatgaatatgaaccctaaaaacaagaagatacctcaaggcgccgcagcttgcaaagcactttgctaacaggttggtctttcagccacaaattacagtttttgctttgaccaacagaaatctgatccacactgatgggatagtgaggagtctgcagtgtaaatatattttctatcagtattaagttatttataaatagaatgtttcatgcattaatctacatcattatgaactgaagtcataaacatctacagaaaaaaacatatatgctaaaaaaaccaaca

SEQ ID NO: 25910 - DNA, 293 bp, Zea Mays
ggctgttggatggttgatctgcggctccgattaggtgcgggatactcccttcgcgtaattaaatcaggaccgttggtctcctgatggacgtatctgagtagttatcgagtgttgaggggctgagatctaatcacaaccgtgggattctgatcgggtggttcaaagtgtatacctgaccgctgatccaacggtccacatgtcatcatagcccttcggtcgcgctaaagtgcagatgagcccttgggtttcagaaaaaccaacctgcagtccacccgagttaatctcgagtctta

SEQ ID NO: 25911 - DNA, 299 bp, Zea Mays
aagggtattccccccaacactgcacagccgaccggtggtgcgacaaaactcaccatcacggcagagctcgccggcgagctccccaatctctgcacaaacgtggccctacgcatcgcggaatgggtgctatcccaaatcaagggtttggcggagacaggggagaggtcgttaccgtgagcggtgtcgcgatggttgctaaccacgagcgacggcggaacacgatggtacagcgagcaattggcggtgatcttggtggttcgctcctctcgtgaaggcttcgggcacccttcctacaacgc

SEQ ID NO: 25912 - DNA, 585 bp, Zea Mays
atttcctaagactcagtgagcagtattggtggacggcgggttgatttctgttaatctgagggactctttagcaaatcttccaggtcgaaaggttatcaagcgaacacagccgttggatctgattctacgcctaggattagatctaaaccctagtgaaaacggtgagcatccctagccacagaaacacagatcgacgtcccggatgaccttgctacgcgtttgtatccaatccgtccacgacggattagacgctcaggatttaaaacgctgaagcattaccttcctatctaatctgggtcgtcaatcacgagatcagtggccctggctcatcttctccagacgaacctggtacggcggtgccgcccagcgactacggtggctcctcactggagctgcgctatacgaggcaccgggacgccaaactccacaacgatcggtgccatacgaaatggagatggtggcggacatagggagacaacttaccagaccagaaatttggtgacgagagcaaccatggcgaggagcggacccgcggtgatgcttggccaccggtgagcaattcaccgagaagggggtcgaaatttc

SEQ ID NO: 25913 - DNA, 520 bp, Zea Mays
gcgggggcgttgtgaacagaatcccgctggatctccgggtgagccccgtcaaagctgcccgcggactccattgtggctacttgacgggcctcgcgacctcctcctccccgtgtcatccctcgcggtagaaccaagttgacgccgctcggagaaaagcaaatcgagcgagagagagagagagtgccgccgccgagacctaatctgctttgttgccgcgctgggtatagtacgcctgtgtggggagcttcgccgcgtctcctgggagctgtctactaccgtcgcggaggaatcgaaccactgggtgacccggaatccctcgccggagtggagttctccgccgagctcgtgcctcaccgtggtcgttgccgacccagcgtcgattcgtggtatgaagcaccccacttaattcacatggattgtccacacatgcagcactagtcaggagatagatttggggctgggaatcgccggtgaccacctccggtggggagcgcggccgtggtgtcgaccgccgccgtgc

SEQ ID NO: 25914 - DNA, 443 bp, Zea Mays
cggaagtaactgtggtgtcggtgggaatccgtgaccagcggtgctcgcggaatttctcaccggagctcagttctgtggtggattttcccccttcctgtgggcagagcatggtgcgccatcaacgtcggtaagaacttcccaacgaactcgtgttaacccctattgtattttagagtcactagtcatgccagcgatggtcggggtaccgaattagcctatcaccggcgttttgctgtcgcgaccgtgttgcgcgggtgaggcactcggccatcggggggagaagacgaccccacggtcgttcatcctagaattgacagtgaggattagatctcgcacaacggaacggttgccatcgatctgctcaaggacgggtctgattggattgcgcataccttttcgcgcgattagatctggaccgtaggattgaaattgaaagggcaaga

SEQ ID NO: 25915 - DNA, 746 bp, Zea Mays
ccattgtttgcttgcaggagactaaactcactacaatcgacgatgcaaccatccttcgtacctggggtcagaattttctaaacaacattgctgtgctgcctgcaaatggatctaggggtgggattctccttgcagcttcgaatgactttttctcactttcgcaagtgtacaccacctcacacactgtcttggccatgatcactatgaaggctgacaattcagcttggtggatcacaggggtttatgggccacagtcgagcgctgagaaacttgttttcctttaagaactaagtggcctcacagcacaacgttggacaaagtggttggcgttaggagatttcaatctcacatatcaagcctcagataaaaataattgtaacttgaatcggcgcctcatgggtgcattcaaatcaacactggacaacctacaaatgaaggaaatccacctcaatggccgccgctacacttggagcaacgagcaagtgaatccaacgctaacaagaattgatagatttttttgtacaacggaatgggagctgctttttcctagctgctatctacactcccttccctccctcatgtctgaccacactccgcttctcctccagggagaattgactacgacacatagcccctctttccgtttcgaaaatttttgggtaatgatggagggattcaaggaggctgttcaggctgcctggcttaaaccacttcgttcctcctttacacccatgaagcaccttcat

SEQ ID NO: 25916 - DNA, 794 bp, Zea Mays
tcacccactagttcgccttttaacttagacaccacatgagcactgctaaatttttacccgcgaccataaccacacgcatttatactacaacaagcagttcatcgtgaccacgagcttaactaaagtcatctaacaagttggttaaccagtataaaacttagcaagtattttagacttcgcaactcaaaaacataggtgggagcaggttaattagtttttcttaaccattttctcaacttaaactggacaacacacaagtcacttaaaacaccatattttaggagacctcacatgtcgagcatcagtttataacctaagtgactcaacctctatcacacttgacaactaccacatcacccgatttatctatttagaacaccgcctgcctggtgtactactagtaccccgcattttgactcgacttaaaaacatagaggaagcgatgactacttaggcatgtcaccacctcactacacaagccaaaattattattatttaaccacacgcctagataagcatgatttcaattcaacttgcccatattttaaatctcggcataagcttggctattggctaacgaagtgaccattttctaattaccaacatgcaccacctttcaccatttgtggatactggcacgacacacgactattgtaatacatcacaagtacatataaccccatcagtaaagcaccatcacatttccaaaaattccccgagactacgacgacaaggcatcgatccgccatacaacaaaaatcatgacgacgacgataggtgctatcaactaatcg

SEQ ID NO: 25917 - DNA, 513 bp, Zea Mays
gtctcgaaatagcagaaggtgaagaggccaacactcgtgaagcctaccgaaccctgaagatggactacgataagaagttaaagaagctcgcccccactaagaaaatctggaagcggaccaagagccaaggatgccagactgaacgaaaagaggaagccccgccaacactacctccctcaaggatagaaagcttgtctgacgttgaggagatgtccctggctagccttgacgatcttctcagggaatttggggacaccttagaaagggagttcggaagcaccttagaaaacgctcgcatgtagtgtgatctgtggcaactgtatgcttgtaatgaacttgtgtgatgaataaaataacatgtttgaaaaaaatggcatgtgcatagtagtaatcctttccccctggcagatggcttcggataaaaccacgcctaccgcctcagggattggagcaaggtctcccctaggtgctgaaggagaagtcggtggagaagggagtgaaacccacctcccc

SEQ ID NO: 25918 - DNA, 504 bp, Zea Mays
gcatcgatcctagaccacattcaggatcgagctctggtctgatggtagcctcgaacaactaaagctactagagctgctaggaaatcgaaagaaaagaaaaagaggacaaaactggctaccacaattggaggcgcttacacagggaatagtctggtagtggtctgaccctgtaaacctggtctgctaatatacaaccatagtccagtaaggtcgctcacataaaaatgtctttggtgccttctatggtctagcccggtaagaacaacccttataaacaccaattggagacaaaaaaaagaacaaagaagaaatggatcaacctcgtaaagaaggataaaagtcaaaaccagatcttcagatgtgtcaccgcccagtgcggagcctttccttgccataatatttcttcccccggcatgtccatctcttatcccacatattaggtggttagacaactatgctcttttaatcacccactaatgactattaaaaaaggggagagattca

SEQ ID NO: 25919 - DNA, 426 bp, Zea Mays
tgcctccttccaaggcctttaccagtttcgtgtcaaatcctcctgctggtgatagcggtttgggccttagagtgcgaccctctcccgaagaagttagtgctttggttgcctcactcaaagaaattcctgacgacgagaggcaggttcattttgaggtgcctttgaatccaagtgacgcagagataagtgccatgctggatatgttagccgaggattcttctgatgccgctcctgctgaaacactggtggtggcacccatccctgaggccggcaaagctttggatgctcaaaggtctgacagtgttcacccaaagcgttctcgccgagccaatcaacccatttctcctgctgaggggaagaaaaagaagaagagatgtcttcgtcgagtgtctagcttggatcaggatgccggtccttctattcctg

SEQ ID NO: 25920 - DNA, 279 bp, Zea Mays
ggatgatcgacgaacggcgtgggcacggtcgaggtgctacgcggacgagctccggcggcgagaggaagagcacggaggggttcggttgtaggggctcagtcgaggctgtccgacgtggtccaaagagcaggtcgcgaatgtgaggagctagagagaacttgggggaggaagggaggaggctcggcatccattttataggcaagggcgaggggagatgagagggcaccagggaggaggaaatggtggccgacggccattaacatcgccatattaccatta

SEQ ID NO: 25921 - DNA, 570 bp, Zea Mays
cttctctcaagatatccatcttcacctctgatttctgaggcacacagagacggcccctgaaacgaaccaaatcattctcatcaatggtgaactcccgcggtttaccatcaccaaccctctttcgagcttcctgcaatagacgatcctgctgctgagccgcacgcactctctccatgagagaggattgaataagcatccgagtctcctcgctagcggtgccgacataacacaaagcgatccccaaacggtccagatcagtgatcaacggcaaccacctttggaaccccagacctgctaagggcatcagccaccacattagccttccccgggtgataatgaatggacaaatcataatctttaatcaattccagccaccgacactgcctcaaattcagctccttctgagtaaacatatacttgaggcttttatgatcggtgtaaatgtcacaagcctcgccataaaggtaatgcctccacgactttagagcaaaaaccactatggccaattcaagatcatgagttggataattcccctcatgcttcctcaactgccttgagccataagcaatc

SEQ ID NO: 25922 - DNA, 334 bp, Zea Mays
atttctaaacttggaagaataagaagcagacatgcaggacccagacgacacatagacagcgagtcatgaacaagcgccagtcgccgcgcaaagctgtccaaaatagcttcctcaactgcttcattaatagccacagttaccgtgagaacaatggcacgatcaagcacttcagtcctctggttgaaacttggagaccaagggatgatccgggtaggagcaaactgtggctccgtgcagacatcatcaccagcatcaacagcgatgtcggactccaggcgacgccttctaccacgactcacatctgggagtggcccctcagcatcaacagagcact

SEQ ID NO: 25923 - DNA, 381 bp, Zea Mays
cggcagtggtgcccggccattcggtctaccagaattcaaattctaacacagctagggacaagggagcgcggtagaagtcttgagcgagatgaaattgctcaccggttaacagggtcgcgcaggatccggttcttgatgccgtgacgggtgatttgctccggccacgaatttcggcctgcctgtcggttaatccgccccaccgaggcaacatacgcgtgacgcgtgcactagtactgctccagtggacagccgtctaggaccaagcgccaggccaatcccacgccgacgttcgtggcactcgccttcccttctattggttaatttggtcgccgcagcttggatgtgtttgcgagtggaggatgaaggacatggcgaaccagc

SEQ ID NO: 25924 - DNA, 1073 bp, Zea Mays
gctgtgtgttgatgcaggaaggcagagtgatcacttatggctcaaggcagttgaggaagcatttggggaattacccaactcatgatcttgaattggccgcagtggtctttgctctaaatcatggaggcattatatttatggtgagtgttgtgacattttcactgatcataaaagtctcaagtatattttcactcaaaagaagctgaatttgaggcagcgtcggtggctcgaattgattaaagattatgatttgtccattcattatcacctggggaaggaaaatgtggtggctgatgcccttagcaggtccggggttccaaaagtggccttgcctttgatcgctgatctggaccatttggggatcgctttgtgctatgtcggcaccgctagtgaggagactcggatgcttattcattcctccctcatggagagagtgcgtgtggctcagcagccggatcgattattgcaggaagctcgaaagagggttggcgatggtaaaccccgggagttcaccattgatgagaatgatttggttcgtttcaggggccgtctttgtgtgccacaaaaatcagaggtgaagatggatatcttgagagaagctcataaaacgccttacaccgttcaccctggcgaaaccaaaatgtacagagatttgaagcaaaacttctggtggaagtggatgaaggttgacgtttctaagtatgtggccgcctgtgaagtatgtcagcgcgtgaaggtcgagcataagaggcctgcaggtttactgaagccattggaaattccggagtggaagtgggagcatatcaccgttgattttgtggtgggcttacctcgttctcctcggggaagggatgctatatgggtgatagtggatcgcttgactaagtctgcgcactttattcccatgaagaccacaaattcagcttcagagttggttcccttgtatatgaaggaagtaatcaggcttcacggggtgcttaagtccattatttctgatcgagactccaaatttgtatccaaattctgggagagtcttcacagtgcattgggtaccaagctctcgcttagtgtcg

SEQ ID NO: 25925 - DNA, 465 bp, Zea Mays
caagaaagacaagattttgatttcattggtaaataagctaaaagaagacgaagctcaatacaaagctcaagccgaaacccaaaaagctgaggttgaagaccttcagagacaattggccgaagctaatgagaggtgcgcactcgcacaggctaaccaagagaccagtgaatactggaaaaataagctagagaaaaatgttgaagaacttcgcgaatccaaggaaaggtgctttaagaaatccttggattgtgtgaagaaattaaaaactagcttcgccaaagtgggcgcctactctgctgaagaaaatttaatacgaggcgaccccaagggcgttgttgaatggataagtggagaagccgaagccttcgaggaaattttgagtgatcacggggacatttgcgcgtttttcggtgcgcggggaatctcagctattctggagaaggccggatgtgatcacgttaaggc

SEQ ID NO: 25926 - DNA, 358 bp, Zea Mays
accatagtacctttgtcatcattcttaccctttgtagtaagtatcaagctggtcaggttcgaccccagaagacgtaaagcgataacagagagaggctttgtcattacctctagtatctaggtggcccaagtgttgaagctgaagcactccctatatctttcatactatgtcccacttatgtcaccttcgtaggcctctcctctaccctgctggtagtaacttcagatttcttcctttttgaggaaggtggggtccttgtgtctgattgagaagacccttcaatgtcacttggtcctatcttcagtttcttggccacttcctattgtttcccctttttccctcaatttgcctagtgact

SEQ ID NO: 25927 - DNA, 345 bp, Zea Mays
attttttgacacagttggtttgatttgcattggtggtttattcatcccaatagtgattctgtaattactgatttattgctcttactgtgcttttttcacaccaaatttgttcggcaattgaggtagtgcatttcgcctctctttctaatgttcaggaagactgcttcttgatagaccaagatctatgcctcttagctgttgggatttccgtgtgttccgttagctgttcattggctgagtttctgtttagaaaaattggttttgggttgctttattgttcttctaggaatgactatgatctcgcccggcttgttcagtaataatttggttgccagcaaaactcac

SEQ ID NO: 25928 - DNA, 277 bp, Zea Mays
cacctcagtatgcttaatcttaaagtgggcaaatccatttcacgaccttaccacaaagattgggtgtgtaggggcaaagaccctgcaatcactggatgcaaattgaggtccccattcagtgatagacctgtagcatcctctagcacaaacccctgtaaggactagaagaaacataaattaattggcaagtaggccaaatatcgagaacctcaactatcctgaatcactaatttctaggatgattgttgggtcatgcagattacaattcttagaatag

SEQ ID NO: 25929 - DNA, 450 bp, Zea Mays
cttaattggaatataagagggctgaatgatgacaacaaatgtttcgcggttagacaaaaaattgaggagagttgttgtagcgttttctgtattcaagaaacaaaattggagaccgtcactgctttgcacctaaaaaagcttgcccccaagcgtttcagcaactttgctttcagcccctctataggggcatctggtggcattctcattggctggaatgagtccctgtttcaaggaacgattcgtgagatcaatgccttttctgttactgtggaatttctctctcgtttgtcggctgaaggctggatcctctttgctatctatggtccctgtcacggtcctgatcgtgtggtcttcatcaggtggttgagcaacctgtgtatttccccgggggataactgtatgttgattggcgattttaacttcttccgtttggccgatgatagaaacaag

SEQ ID NO: 25930 - DNA, 350 bp, Zea Mays
ctccgacagaggcaaaactgcggaaggtgcaaaagacttctgccacaactcccaagaggagtaggatggccaacatgctggatgttgtgctggaaactacgaaggccttgatccctgctactacaaagaaagttgctgaagccacaaaaacgcaagccgaaaccaaaactgggcaagcaaaagccgaagctgcgcaagctcaaactgaagccgaagctgggccttcagtgcccatcgagacggagcctgccgcgcctgaggaaaaaacgacagagcagattgcacctaaaaagatcgaagctcctgctcccgaagcttcgaacagaaacgctgactacatcattcgtcac

SEQ ID NO: 25931 - DNA, 324 bp, Zea Mays
tctaacatcgacaaatacgaacccaagcaggacccgggatttggctagctgtctacactaccaccactcgggttactagggcaacgaaggacatcatgacgacgtacttgcccatcgttctagggcatgatgtgctacaatggcttcgacatctaccccgatactacatcgatgattggggagattttagtcgcatgtttatcatgaactttcagtccctctctgataaaccggtgcagtcgtgggacctcaagtccatcaggcgatagaatgatgaaactctttattcattcctcagaagatttcaaacaattagaaaccata

SEQ ID NO: 25932 - DNA, 1664 bp, Zea Mays
gattttaggatcccatccaccacgcccggtcacgggtatgaatctgtcccatgatctcccagattttgatgcacctatgggttctcgagatcattcgactttaattccgaaaatggagtttcctaaatttgatggaaataatccgcgactgtggcgtgatcagtgtgaaatgtttttcgaggtttattcggtggcggagaatctgaagacccggttcgcggcgctcaactttattggtcctgcagcgacttggcgccagacgttggagcgtcgtgggcgtatcctgaattgggaagtgttgtgcagggaagtgtttcaacgttttgacaaggatcaatattcagtgcacttaagacagttggactctcttcggcaacggggttcagtgacggattacgtgcacacatttgaacagttggcacatgggattttgctttacaatagcaactacgatgatacatattttgtcacacgattcttgggagggctcaaagaggaaattcgtgcgtcgattgcgttgcatcgtccgagagatgtagcaacagcaagtgcgttagcactgctacaagaagaggaacttaatctggtgaagactcgggcaatgactaaggagtacaatagaggtcattatcgcacaggcaaggaaaatgacaaaccaaaggatggcagtatggaggtgaacaaaattaaagttgaccgaacggagagaagtgacaagttagaagcattgcgaaattacagaaggaaaaatggattgtgtttcaagtgtggagagaaatggggtcaacagcataagtgccctacccagatctcgttacatgtattagaagaaatcttggatgccattgaattggactatgaacaattcaatagggaagagaatgaaacggtggtggaagaacaagtgttagcagtccaagaaacgatatctgggagtaagaaaagaagtacactgcgattactgggcatcattggcacgcaacaagtcttgatcttggtagactcggggagtattggcacttttgtcagtaagggattagtggatcgtttgatgttaccaacacagagttgtgcccagacacagtttcgggctgctgatggaggaattatgagctgtactgaatgggtgccaaggctgcaatggtttattcagggctattcgtttgtttctcaggccaaggtgttaccattacaatgttatgacatgatattaggcgaagattggcttgaggaagtaagtccattgtgggtggattacaagtcaaagcaactcaggtttacctatcaaggtactagagtgtccttgcaaggggttcaagataacatcacgagctgtcagagtatctcaggacataagttccagggattacttaatcatggagctgtctatcattgcatacagttgcttctgataaatcaggacaatgatttgcctacacaaggtcctgcctctcgagtatgtgagattcagaatattgagcaacagccaatacctctcagaattcagcagctcattgattcttttgctcacctcttcagttcacccacaggacttccaccacatcgcttagctgatcatcgaattcctctaatgcctggtgctcaaccggtgaaagtgagatcttaccgatactctcctgctcaaaaatctgaaatcgagaagc

SEQ ID NO: 25933 - DNA, 586 bp, Zea Mays
gcaggatcaagaacactcgtcgggaaggcattcagagctagtttcactagccaactgccaagagagatgcagttgacctagtctagggatgtgaggtatgtcaatttttagccaagcaacatcatctaccagcacagctacttgggttcatcgttagtcaccgaggaatcgaggccaacccagagaaaatcgaagctacgctaaggatggaaccaccatgattgcaaaagaaggtctagaatcttactaactgcatggtagcgctgaatcgcttcatctcatggctttgcgagagaggccatgtcattctacaaattgctcaagaaggtggatagattccaatggactcccgaggctcaagaaatattagaagcacacaaaaaatcctgacctccccaccggtcctcaaaccacccaaccgagctaccgtcgaccaaacagctgaagatttgttgctatacatctcatgcatgactcccgtggtaagcagcacgttagtagtcgagcacacacatccagtccagcaacatgtatacttcatcagcgaagtctttgggccctccaagattgaagtgtcccaatcctc

SEQ ID NO: 25934 - DNA, 288 bp, Zea Mays
gcgggctatgtcgtcgctctggttagccgacttgttagatggctttggttaagctcgtaatcacaatgaattgcttgttgtggtctaaatgcatatggttatggtcacggatgaaaagtagtagtgttcatatgatgtctaagttaaaatgcaaattagtgtgtgaagggtgcatcgatatacatgtatgtactgggtacgattattgtggtagatgcgtttgttaattgtgtgtggtaattctagcgcacggaatgacttggataaaatttgtaagttggtttgttg

SEQ ID NO: 25935 - DNA, 372 bp, Zea Mays
accttttaggaaggagaaaccacgcatggtccgaccaaggattgataaggcctcgttttcgaaggcagtaaggaatgacgtccatttcattggtaagcctattggacccccgagtctggtagtgatagacaaggttcatcttcaccccttcttccctatatcaattatccaattggtgaagtgactcagtaacccatgaggtgggtgtatcaatgggaggagcctgagtactaaatattaatggactcatggagtacgacttctgcgtggaccagacagacttggacggagtacaaaggaatgttgatgtgtgagcaaggtattatattattctcatcggaagggtataatgtgacatatgatcaatggaat

SEQ ID NO: 25936 - DNA, 302 bp, Zea Mays
ctttggcgtccataggattagcagaatgggaaaagatagggggatggcccctcatgaactctgctcgcttgtctctgggcacttgtggcatctggacttgcacctgaggtttaggtggggtggctgctgctgcacctgctgcattgctgctagagtctgaccaattgcttggactgcttgggtttgcatcaggaacatctgctcaatagtcatcgggggtggcggtggcaactgctgctgagctgccttttcctggggtgcctgctactcctgctgagcacgccttccacttctgcgcctat

SEQ ID NO: 25937 - DNA, 604 bp, Zea Mays
gccagggcgaattggatcgcgggagctattggggcgggcttaattcctcgccgaagaccttcagcgtggtgaatccgcccttcgtcgtgttcgggtgttcttgtgaccttcacgagcggttcggggaggtggtcgtcatcgtggcgagggagacccgcggccgatgaacccagaatttcacaccggagctcggattcatggtcaagccgccgtgtgctgcagctagcttccctctccgccctccgacgatggtaagcacctccctctggttcgcgaacaccctctcttcgtttagcatccatcggatcggagattcgagcattaaggcctaggatggaggaatctgaccatggcgccgccgcatcctcgcttgcgccgctgcgtcgttgtactggacgaagatgaagccctctgggtcgtccatctcggatgtgtggctacgattagagctagaataccccttcggtgcttgtgatcccaaccgttggtaagagatccagtggtagatattcaatcatcgcggtgagtgttgcgagccgtacgattttaatccagcggccttcgcgtgctcactggttggctcaactaagtgatctaatctcgg

SEQ ID NO: 25938 - DNA, 363 bp, Zea Mays
gcatactcggcctggaatttgcctccttcccaggcttttaatagtttcgtgtcaaatcctcctgctggtgatagcggtttgggtcttagagtgcgaccctctcctgaagaagttagcgctttggttgcctcgctcggagaaattcctgacgacgagaggcaggttcattttgaggtgcctttgaatccaagtgatgcagagataagtgccatgcttgatatgttagccgatgattcctctgatgccgctcctgctgaaacattagtggtggcgcccatccctgaggctgacaaagctttggacgctcagaagtctgtcaatgttcgttcgaaacgttctcaccgagccgatcaagcctctttt

SEQ ID NO: 25939 - DNA, 2101 bp, Zea Mays
atagattctacttttattcatactccttttcaactgtgttacttttacagacatcaatcagtcttggcacgacttgcaaactgggaagctattacatcggtaagatagcattgttggtctatttttaaatagtcatgcaatccctatcatgtttatgtgttactggtttgattaaaaaacaacagatgtagtccatttaataagcagtttgactatatttcaatgaattagccggttatatgacatattgtgcttacccccttttttctttcatcagtcacactctatccgggaattcgaccgccatgccacttgtgttgttgcaaaatacgaggtattctttctaatgctaaaacctgcaccaccttcttttgcacaatcagaaaagtattcatattttagattgtctagaagtattggttacagtttcactgctctctttgctcatcagtggtaactttattttaagcaaaaccacaattgatccaagcagaaatggactcacccccaccccaacccccgtgccccacttcatccatggactactctttccattagaatgaactgatacagatacagtagagtgtgtccagccaaaacatattctttttttaccaaaatgttgcctaaaatatgtagcttacatgatggaatttgattatccataataaattgataattccatagcatcacacatctttcaaatatgtgcatgcaactctaaaatattttcgtcaaaacagcatcttgttgactttgggaattgggaaagtggccggtgaccatggaaaatgcagaagttgaagaattttgacacgacagggctatcaaaaaatcatacagcagtcacatcaaaagattaaagagaaaaatccaagagcattcaaaatttaggcgctagtttaaacagtgaaccattgttatcaatcagatgactccatatcgaaaccatgtaatggtctgctcaatctcatgttgcacacttgagcctcttgcttaatttttttcccgaacaacataggagaactgtgtcatttcagtgagagataaaatacaaagggaggggcaaagtcatcccctcccaaacacccctcactcacactcacacaccaggcttttaggctaacagacacaccactttacagatagtaacaaccaggagtagtctaagacgctgaaggaaaagcctcttgcttgattgaatccagcattcagggcagatggttacagaagtgaggttatcgaatggtattttgtggtctcaatagtagcttggactacatgtgtttggtttcagctcttaataaaacaaaggaaacctaaaacacttgctactgatagtgacagtagaagcaagggttacatttattgttagaggacttctggcagcatcaagtattgcagctttagaatgtgcacgtctgcatgggaaattattcaattggacaccttagttatagggcatgtttggtttcgcttctccccaccagcttagattctaagaaacgccacaattctctggattattcaattcttgcttattagttcaataggtgaactatcgattctgtaagaagcggaaataatctagacgtttggtgggattctcgcttattttcatccttaggtggattataagctaaaccgagcagggccctagactgatggcacaacaacacttgtcgagatgaggaagaattattaggaatttctaccagttctagcatatgaattttatttgtagagtatttactttatgggatacaggttacttgagcatgaatcatataattgctatttggtttgggatccaagttccaacagaaatttcatgacctggaaaacttatcaatgcaactcaataataattatgggtgggtcttttgttttagttagctagtgctatttaaaatggtactggcattgttgtaattagctgttgtatagtttttaagagtgaattcatgtagtgactagctcctttcagacagtggacacattctaccgcaagtgcagcagtgcaaattatatcggtaatgtgtcagttccactgctttgtatcagtgccttagatgaccccctctgcacaagggaggccatt

SEQ ID NO: 25940 - DNA, 847 bp, Zea Mays
aaaaaaaatcctgagcagttatatcgacatttcttcattcacatgaaatgtcacttcttagtagattcttctacaagaggcctcctgatggactactggagtttcttgacaggatctatggtatgcatggagaattttactatattgattgccttcttagatcaatgtaacttattttatgacagctcaactaatcacatcttttggcattgtacagtttttgattcatgcttcagcactgaagttttgcctcagggaatgtacccagtgtatttaattgggattcttacagagttgcatgaagagcatgtagaatcctcatttctggcaattaacttcagagatggagataagagaagccagcttgctgatatactacgtgaatacaacattccagtcattgattacccccgtcattttgagggttgtcctgtgcttcctttatctcttattcagcatttccttcgtgtatgtgagcactggttatccagtgggaccaatcagaacattatattactccattgtgaaagaggggcgtggcctttgttggcttttcttttatcttgtcttctcatctacaagaaactgaacagtgctgagcataaaactctggacattatttaccgtgaggcacctaaagggttcctacagcttttttctgcccttaatccaatgccatctcaactccgttacatgcagtatgtagccagaagaaatatatctccacagtggcctccaatggaaagatcactctctttggattgcctgattcttcgagctattccaagttttgattctgataacggatgcaggccattagtccgcatttttggtcgaaatcttcttg

SEQ ID NO: 25941 - DNA, 725 bp, Zea Mays
cggcaatcctgcgttggctgcgagaagcggtggtgatgccttgcggagccccactaactgcagggtcagattgcatcccgacaacaatacaggaggtttacctggagatgtccagggcaagaatccttttgcaaagcgcaaggtggagaagtttgatatgtccaaccttgagtggataaacaagataccagagtgccctgtgtattgtcccaccaaggtggaattcgaggatcccattgcttatatacaaatgatttcacccgaggctgctaaatacggtacagttgcctatagcataatacgtattatgataatatctctcactcattgatctaacggccacgctagacattttgaatagctatgactgtgttgcttctatttcaggtatttgtaaaatcgtctctcctgtatgtgcgtctgttcctgccggtgttgtgctgatgaaggaacagcccagctttaagttcatgactagagttcagccccttcgtcttgctgaatgggctgaggatgatacggtcactttcttcatgagtggaaggtatgcccactgtttgtctattttcgttgttgctttagctcatgttccaaacttcatcatcattggcatgactcttgcagaaagtacaccttccgggactacgagaaaatggcaaacaaagtgttctctaagagatattccagctctagttgtcttccaggtaggtatgtggaggaggagt

SEQ ID NO: 25942 - DNA, 283 bp, Zea Mays
ataaagtcttctcttgctcatcagataattgagatcccaataataccttctgctcggctatgtattcacataaaagcatgagctttggttgatctgctgaagcagccttttctcttttatgcttatattgccaatgagcttcggcttcatctatgttatggatggccttcgaatctgtccatcttccttcggctctcctggcagcctcttggcttccatgtacagcaatgggcccttggtcagaaggtatcttcatgcaatgatatgctaggtggagtatcgc

SEQ ID NO: 25943 - DNA, 369 bp, Zea Mays
tcggagtgcccatcatacatggggagttgtggcagtttgtacgaaggtggccatggggtagcctacaactctgctaccaagggagaaccatcatcaaaagaaaaattaccatggtacatgtcatcataccatccatcatcgttgattggagtttcttgacaaagctctctgtgttgaggccctcgtccttgatcgtcctgcgcgatgtggcacatttcttcagcggcttcgtcgatcttcctttgaagtttggctagccgaagcatcttttcacttttccactgcacttggtgatgtatagcttctaagtctctgatttcctggtccaactcctcctcctgaggtgttgggctggtagcctttctcttc

SEQ ID NO: 25944 - DNA, 426 bp, Zea Mays
gccattggatggcccgaaggcgaggggtgagcgtggagaccccacacgtatcctcttgtcaatgatcatgtcgtcgatcccggggaggggagcaagtattaggtcgcctcgaccgtcctcgggccagactgttggttgaggctgctgctgactcgattcgggttgcacggctgtgtgacgatacaccatgatctcggtcgtattcctttaggtgccttaatttcattctcatgccaacgatcgcgtgaagcactaatgttgctcgtgcgtctcgtcggctgttgatggtgtggcacaggtcgttcggtgggtggacgagaggtagaagatgattgaccacctaagtaagcacccgccgatagccctccacgtcttgggttcgcaggaggccatcgactatctgcgccaggactcctccaacttcgc

SEQ ID NO: 25945 - DNA, 549 bp, Zea Mays
attttgcagctgtcataatgcctttatcatctttgatcttggtgaaatggttccacacatctgatcttggtgccatcttcttcctttcatgttgtgcacaatccctgtcaaggtcaaccacatcttgatcagcagccccttgtgattgtgatggttgtgtttgtgtcccatcattttctagagtgccagtgcccactgattccatacccttgtccaatatgtcttcaggttcaggcatctattaaaaaggaggacacacatagtaagtcaataaggaagatgaatacatgatgcaaggaaaacatctcatgtgcaagaaggaaacacgcaatattaccaattcacacaagaacacattagtacaagaacacactagaattagtactgtacgaggacaagcatgtactacactactagttctactaatcctagctattagtgtattaccaattcaccattcgcacaagtactacactattatctctactgatcaaatctgcttgaacaaaaaaaatcaaacactgagcagtgagcacttaacaattaaca

SEQ ID NO: 25946 - DNA, 301 bp, Zea Mays
gttggatctgttgtgaacgaacaggattagaccatggtatgatgttgtgtgtgtcgttgatctcagcgtaagcggctgcgattaaatcggtcgcaccagtttgggtgaggcctgtgtgaatcgtgcgatcttagatcaatggtcgcgtgtggttatggggataccgattcaagcgtttgatcggcaccgcagattggaaatccaagggtcagggctgggtggtgtgatggatggtgtttgtgccgtggattccggatctgatggccgccagcgcatagtagttccgttttatttagatcta

SEQ ID NO: 25947 - DNA, 435 bp, Zea Mays
tgggagattggggatagttgaccgtcagcaccaacgtcgtgttcggacaccacggtccgccacgactggcggaggagcttcgcctagtcttggtgggtgtgcgcgcgccgaattggtgaagggcgggtggaatctacgcggcaatttctcaccgagcggggacgaccaccacgggattcctcgtgccacggctagcttgggacattgctccacaccggtggtaagcacattcattctctgcaaaacctccccatattcgcgtaggaccgtcctgggagggaagggaatctgaccgatagacgcaatttctcatcggaggaatttccgccgccgcggatacactagtgccgtggttcggcccctgttgcctaaatcattgggtaatagcccaacggatttgcctcggtgaccactccggcactgcgtgaactcgtc

SEQ ID NO: 25948 - DNA, 389 bp, Zea Mays
cgaggttcggtcacaccaccaaggtgccctactcctcgttgaggtgcccacaaagggttaggtctttctcaaccccgttcctcaatgtcgaccacacaggtcaaggcaatccattactcaattttacccacaaagacccggtgatacaaaacgttcttggggtcgtccacaaacttggagactcccaagacaagattacaagcacacaaggagtgacacgttctaagaacaataacatcgcaagtaagaatgatttgcaccaactagagagaaatagatgaagaacttgaatcaaaatcgcgctttagattgaaaacttatctcacaccgatgaatcttcccactgatcaaagggggatgacttagggtgcgagatcaaagttgcaatg

SEQ ID NO: 25949 - DNA, 389 bp, Zea Mays
cccgaacacaaatattatgtgatttaacaatagtgtttacgaataaatgttagtttagaatcaaaagaacattagatttgtatatgatcaatcagatataagaggctaaactactaagcagatttcaagctactacaagaccgcggagacaagattagcacccaaattacatgcaaaacttggaaacagtacacctagacaaatcgtcatataggtagcctacatgaagagcaaccaccaccatctaactagcatcgaaagctagcaacacccaaatgtcagcttgggacaatagatcgcaacaggaaatagggcgtcatctgaagcaagcggaaataccttgtagtactcctcacagcctcacagaccgggttctcggtagcgaaggg

SEQ ID NO: 25950 - DNA, 289 bp, Zea Mays
gcttataacgacagctactaggctagcatcaagatggcaccatatgaggccttatatggtaggcggtgtatctcccctttgtgctgggagactttgggagagagatctctagttggtcctgattgggttcagcagacatctaagaaggttcaggagaatattctgtccgctcagagccgtcagaagagttatgctgatgtgaggaggcaggacttggaatttgtagtgggtgatcaagttcttcttagggtatcacttactaaaggagttgttcggttcggtgtctttg

SEQ ID NO: 25951 - DNA, 354 bp, Zea Mays
gtggagtgccacttagggctgattgggagcctaggaagggagctaagtacacgagggtttgtgactcactatttattttgcattttccatggtaaaggtatcaactcacatagctatatttctatattttaggcctcaattggtgttcctacttcatctcaaccaaacccgtcaacatttgaaggttcaagccaatacaatttggctccatttgaaggccaaaactacatgaacaatgatgaagtcaatggagtctgtcagaacatcgaaggaggacctggaattaggccacaaaagttgttctcaataaggaaaaggaatgattaactgtgatatgtgccttgttaatgtaaa

SEQ ID NO: 25952 - DNA, 291 bp, Zea Mays
aaagaagggaaggtgtttttcgccttcgactcaaaaattgaaagtattggtttcgcccacagcaaagcaattcatacatagacgaagaggtaagattatattacaaggtatggataaatatgtataatattctgctcaaatgtcgattacaatctttcgccaaacagaagtctaagtttttctacagataaatgcaagacgggaatcctagtcttcaggaccttcggaacatgcttcagtctaacggtcttcggcaccaccatcctgcagatagataaaggtataaggcgg

SEQ ID NO: 25953 - DNA, 358 bp, Zea Mays
cggtgaaccagcaatttagacgcggcctcccctgcagcggcatgactcggcgcttcaagaaatcctcgagtacgtgcattgaggtaaagcctccaaccatcagttccctaatcctgtccaagatgggcccgaactccggcacgaggcatggtttcaccctccattgtttctgctcgaggctgggcctatcacttggaagagcaaggcggtcgctggcctcagcgctggcgatcacccagtcgctttgccagttctcccacctcgcaccgccaagggaggcaatataggtcactgtcgggtcttaccttgactggaagtagtaggccccgaggtgatccttgcccttcccagatctcac

SEQ ID NO: 25954 - DNA, 526 bp, Zea Mays
gaagcataagcccttgaaattgttgacataaataatgagacggaaaatggagataaaataatcacaaccacggggtattacaacaacaaagaacaagacatggttctacatatttgtaatgcggggagggggcgagcagtggggtccgatagggggtcacagcaggcggggcgagaagcggcccgagtggatggtccaggagctattagtataggtattagtataggccccaaccgaaggtgttgggaggggagggtccaagcatcggtccaataggtgcttggtcgggagggcccaagcaccagtcgaataggtccttggtcgggagtgtccacgcaccaatccaatagggggttgaacgttagggtctaggcaccagtgaaataggcgcttggtcgcgagggtctaggcaccactccaataggtgcttggaagggagggtccaggcaccaatccaataggtgcttggtcgggagggtccagacaccaatccaatgggtgcttggtcgtgagggtccacgcacca

SEQ ID NO: 25955 - DNA, 361 bp, Zea Mays
acaatgcgggacacgggaagtcaaagggatatgcgggtgaaagatcaaatcaagggcctaaaaagagatcaaggttggtaatccgacctttcaatccaaatcgttctttgtctcgcccaccttcatatccattcaaacagctcgtatttattcgtcccactcctgcccccgctcctaccaatcagccgagtgcccctggtactcgtttccctgcccttcctagttcctccagtggttgcttcaattgtggaaagtccggacatttcatcaaggacggcccatatccgaagcaaaacaaatccaactttcagcagacttttgggaactcgaatcaaggaaaggggaacacggccaactcttt

SEQ ID NO: 25956 - DNA, 574 bp, Zea Mays
acacagactccatgccggagcacaaacacagctagtcatcacttggtcggattccctctgccagggataagcagataacgtttcaccgtggataggcaccaactgacccagtgcatggatatttactacagagacttggccttctcaatttttttgctgcccagtccaactccatctccaactgatgcgcaagtggaacacagcagggatataaagatctttccttaccctccatgccaatgtttatccacttactcaaagtgtccaaaacaacaagagcacacagtggttcagacctatcttatttctctacaaccaaaattttaaaaccccaactaaacctctcctgttcacccccacttatctcacaactcccagcagtgacagagggatcaatctacataaaaattgttcatgaaagcatccattaagactctactagaagatccagaattcataacccctgggatcaacacaaaagggctccaaaaagctggccgaaacctcaacctgctgctcctgttaactgaaacagaaagtgcaatcaacacctgatagaggaaattgaaacaca

SEQ ID NO: 25957 - DNA, 351 bp, Zea Mays
aatttataggccccccgagtggtggcccgtgaatttgagatgtcgtggtggcggtcggagagaagggggtgcactggcgcaagcaattggtggctttcaccgtggcgagctcaccggcgatcaccggatatgcataacgcgagctactgcaacatggtgaaacaccaaggcacgtggcgcaaggtcgtgagggagccaatgccggtgaatctatccgaagcagccgtgactcaggcgggtacggtggccggagtagaatagtggccggagttcatccacgtgcgatatttcttacccttcaacgttatccaactacgctgagcacgaatcaccacggcggacgcgaatccg

SEQ ID NO: 25958 - DNA, 300 bp, Zea Mays
ggaatacgtcatctctaagcaatctcggctgggatgctggaagtagttcttctcagttcacccctccggttttatctgatctgtgttctagccatgaatctcatcttgatgaagatcttgattctgagtcacgtggtttggaacaaggaaatcaatctgtttctgctattcagtcatctacgcggaaggaatctggtgttttggctgggcatccagcaaaacaattcgaatttcctgccggtaatgtcattgtgaatacggagacaaagccaatccataatgttccattacggtctgggg

SEQ ID NO: 25959 - DNA, 370 bp, Zea Mays
ctgtgaagcctgccagaatttttctccacgctcgggaaacccttcgcaattcacaaagctaatcgcccacacgtggcctcttcagcgctggggcctagacattgtcaggccgctaaccacgacccaagggaacctcaagttcaccttcgtcgccgtcgagtatttcaccaagtggatcgaggcaagagcagtatccacgataacgtcaaagactgcccagaaattattctggcaaaacattgtttgccggttcggagtcctgtccgagctcacagttgacaatggcaaacaatttgatagccaagacttcagggacttctgcttctccattggcaccaagcttgccttcgcctcagtataccacccacaa

SEQ ID NO: 25960 - DNA, 327 bp, Zea Mays
gtggtggcttcagtactggtagcgtggtgaagaactttttcaatgcgtcaagagcttcctgtgcttttgtggtccactgaaacttgtccaccttcttgagtaatttgtagaacgataagccctttttgcctagcctcgatatgaacctgttcaaggctgtcatgcatccagtaagcctttgcactttcttctgtgatcgctacgcttccattctcatgatggccttgattttttctgggttggcttcgattcctcggtagctgacaatgaatccgagtaacttccctgctggtactccaaagacacatttttctaggttgagcttcc

SEQ ID NO: 25961 - DNA, 529 bp, Zea Mays
cggatgtcaggcttatcccctccgcgccataccgaacttgagccaccgcattaccagctgggttcgttgcgatcccatctctggagattgagtttggttgttgatatcccggataatccggctgtgtttcaagatataagtgccctcctaccacaacaccgaagcatcggggatcgcaggaagaaagggctacaccgtgcgtcgaacgacatcaccgccgccaccgtcgagggctcatcaccggttgtgtgtcgccgcgggtgaatcaccggcgctgggtccctgaaaaccggttggggagcttcgccatgttgctagaaagctgctagtatccccctctggtggtagccggctctggtgacatgccaattgctcaccgatgtgcgaatgcaatcgggtaatccacactctgacgtgggcaactcgcttgcgtctgcgtcggggccctggcgcgtggtctggtggtactgggccctcgggacatgcgggtggaagtcgtgccctgctattagagtttggtggtcggcgc

SEQ ID NO: 25962 - DNA, 334 bp, Zea Mays
caacaacttgacctacaaaacaggttacacaactaattccatctagcatatagctattgaaccctctacccatcttgtcacaaacccggatgaagacaccaaaggtcgaggaggaaaggatcaactgcgttaaggaaggataagagtcaagccaaatatggtcttcagccccaactcaagccttcaaagatcaagctagatcatcagatgaatcaagatccacaaatcttggatggagtcttcccttaccctactctgtcttacccaaacctatctatgctttatagacatcttttatcctacatgataaagtggatatacatatatataccca

SEQ ID NO: 25963 - DNA, 295 bp, Zea Mays
ttagggtttccaggattcatgcatcatttttgggttcgatcaaatccaaactaggccgtcggttgtttgctagcacaccatattattattctttccctggttcatttcgtagcctataatgtcgatactgaatgaggtctcacctcttttgaggtcacctagctctgaattgatttagaacaaatagcggaattcctagaccaagactctttggtgtgctaggaggccatggataaggaaaacaacgaacacaaaagtgtagacggctacatggcctaagtcatgtcttggtcac

SEQ ID NO: 25964 - DNA, 351 bp, Zea Mays
tgtcgaattctcatataacaacagccatcaggccagtatcaagatgtcaccgttcgaagcattgtatggacgaaagtgccagacccccctaatgtggtccaacgtaggggaaaagacactggaaggacctacctttgttaaagaggccgagaagaaagttgccttgatccgcgaaagattgcttgaagctcaaagtcggcagaaaagttatgcagacaacaggcagagagaactcagatttgaggaaggagacttcgtatacctcaaagtctccccgatgcgtggtgtcaaaaggttccaaatgaaaggaaagttagcaccgcgattcgtcggcccctaccccatcattgg

SEQ ID NO: 25965 - DNA, 312 bp, Zea Mays
catgattgtctgaggtccttaggacaaggacatctataggtgggcctaataccttgggaggtttcgtgacattcaccatatcaaattttctccatgtcatatcacattaaaaaccaacttaatcaatgtctatccttcttctcatctttcttcagcaaggatcacccaaacattccatgacttctcttgagtttgattagtccctcgactaaatgcaagtacttacttattcatcttagccttggtaccttagtcctcttgaccttctcctttgcttagtatgtcgaatcccttttccttgctatcttttca

SEQ ID NO: 25966 - DNA, 610 bp, Zea Mays
taagtacggggagcatcactacaccctaaggaagctagaacaaacggtaattgggctggaactacctcaggcgacgctggccacggaagagctatccacggcggcgcggagaacaaatttgggggaaaacccgaattaaagcactatggtggacgatcggcggcgagggcgggtgctttggcttcgtgacaacctaacagagctaacgacacactcaatttatagtgtccgagagcagtggctccgaactttgaaagggaaggctggcggtcgaagagaggggtgagtcaccggcgcaggttatcgtggctttcaccgtggcaaagcctcctgcgatggacggacttactgctatggttcactgcaacgtgttaaagatactatgcacgtggtgcatggacggtaagcagccaacgcaagcgaggatcatctcggtcggccgcagaccaagtgggtacggcgactgggcggcttgatccatccccctttcagatgttttacccctccgtgactatcccctcatcagagagcacgaatcgtagcaccggcgcagatcacggcttgtgggtcaccagtggcgaggtgggatgaatctgaagatcttttcgtg

SEQ ID NO: 25967 - DNA, 276 bp, Zea Mays
cgccgttgatctggccattggcggcccagatttgatcaagtggacaccggtttggaggattggatctggccgttggtgctaggatcgatggtccggatcggagtaggtgtgtactgtcagatggcgatctgatggctagggttcaataccggttcatgaaaggtcataagttaatccgatccgttgaactctaatcggatggctcacgtggctagataccccttcgtcgatcccgttttgtaaaagagcccctgtactttcacagaatcaacccgc

SEQ ID NO: 25968 - DNA, 755 bp, Zea Mays
ctgttcaaagagaacctcaatacggggtagcggatatttattcttgattgtcacttgattcaaagcacgataatccacacatagcctcttgcttttatctttcttctcaacaaacaacactggggaagcccatggcgacctgctaggcctaatgaaacccttagccagcagatcatccaattgccgcttcaattcaacctgctcctttggagccatccgatacgaggccttatgaataggctgcgtacctggaatcaacttgatttcaaaagctgcatcgcgctctggaggaatgcctggaagctctgctggaaacacgtcggcaaagtcacacaccacccggatgtcctgcactcacagggcagcctcaccctccaccaccatggagaaaaagattcccgacttccttgaccggcgatccagaagcaattgcgccaacaagggtaatgtgaactttgatgaacttcccaagaataccacctccctacccgatggcgcctgcaataacactgtcttccaaaaacaggatataactgcgcaatactgagataaccaatccatacccaagataacatcgaatgcccccaaggaaatcacaacaagattggccgaaaagacctcatcagcaagaatgacggaacacccctaaaaaactgaacaactactaatcaagccattagcagaactaaccaaaattggatgacccaacctctgcaccgaaagaccagcccgcgacacaaaattctctgaaacaa

SEQ ID NO: 25969 - DNA, 415 bp, Zea Mays
gcaaatgttttcctcttgttttcgctgtactcttcgacgatgatgagagtgcgtagatttaccagacctagaattttctttgtgatagctgatctactgtcagtcccagtgccaacaaagagatggcgaacctcctgcggaatatgttttggtgagctatttgaaacgactctgaagcattcgcttccgctgaccctctctgccagctcgtgtagcaggtcatgaatcgtgaacgcctccgtttcagtgccaaaaactgttctttctatctgcagaaatgagaaggtccgcagttcgttaatgtagtgcaggcctatatcttccggttgctctgttgcattaaccctggtgtttatgaacccttgcgctatccagatgtgaaccaactcgtctcgtactaacctgtatcctctgg

SEQ ID NO: 25970 - DNA, 492 bp, Zea Mays
cgaccgcactatctctatagactacaacatccgacctctactcctggtatagcctttgtcctctactcctctgtcctcttcctccactgctacctctctgaatttctgaaatagatgttggttatgttttgaattgttgtagcttgtttgtggtctctgaatttctagaataaaatggctctgttggtggtggtccaagtgatgttggtggtaccgatggtgcttgtgcatatgaccctatggctgatccaaagcggagagcaaagtccaacgatcccggatggaactatgggtattggacagaaattgggaaccgagataaggtcacatgcaacagttgcaagtccgttacaactggatgaatcaaaaggtttaaagaacaccttgcgggtggttttgtggatacattaatgtgttcttagaccacaacagagattagaaaagaaacgaaagcatatttagacaagaataagaaatacatgcctattttct

SEQ ID NO: 25971 - DNA, 778 bp, Zea Mays
gtaaatcttgaaagcttgaagggcaagttcatagatcttgaagaagctcattgcagagctcacatgtccctgagggagaaggacttcattatatcaaatttacttcattctggtattttttttgtatcataagtaactaaagtaatttctaactcagagtttaatatatgtaaaaatcttccatccatgaccaattgttttgttgtaatccattatattgaatagagcacttaattattgaacgtgcaaaggatatgcggaacaccttggagaatgcaaccgaagatatcagtgtacttctgaataaacaaggtaatatctattatgacttaatttaatccagtttatgttttcttctactgaatatgcttgtctttcacaatcatttatagaaaggcaatcaaaaactgaagctgaaaacaaaaggttgctatctggttttcgggctgaattggatcgtagtcttggagttctgcatgctacagtcgttggatcagtatgtgaacagagtaaaattttggagtctataaatgaacaaacaaagttgtactttttagccagaaatgaggtaccattcttgaaatgttatacttttattattactatccctactaggacactaaaatagctgcaacatgcaattgcttccagtcagaaaaccaattggaaagaagaattgcaagagccaaagatatgtatgtctccggggtccaatgcatgaaggagctcgctaataccatgagacagcagtctatcatagattccgagcagatgaggc

SEQ ID NO: 25972 - DNA, 495 bp, Zea Mays
attaccagggggctcatatgtgaaaagaaccagcgaagaggtatgcgcggatgacgaccgtccgatcaaaaatggacagccacgattagatgcacggtggatataaccctgattcccgagtcaccgtcggatccgagatcgacgcgaggaggtcgtcgacccaagatagcgtgtgggccatttgattgggatctacgacccagatcttattaacgcgaaccggtatcctgattctaatctgagccgtacattcacaaatcagtggccaggtcgcaccctcctcttcccggttgaacgccggcgacaaccagtgaagccacggtggcgcgccatggctgggagaccccccgatggtatatgatgcgccattaaccgatacgctaggtgccaaataaagctaggacgacggcggatccagggagggggttggtactcacaaatggcttgaagacgaggctgtccacgaagcggggcggcttcacggcggacggtaaa

SEQ ID NO: 25973 - DNA, 456 bp, Zea Mays
cgctaacagcatgacagggcatggtcccgcgcaagtctgggctcagaagtccccagagggtagaaggccaatcaaccacggcctccccaacttggtgaactccgttctccacctcgcctactaaggagtggacgcggatcacccagcgaagcgaaatggatattctggaccgaggcaggaaggcacaatggacaatcaccccgacacctctgccctcaaaggaagatgagaagaagcacaccactgcacctgctcctttcttccccgacatccttttcattcaggggagattggagtcatcgcccatctctgatgatgaacccaccgtgctggggaagaacctccccagcgtgatgctcggagacggagaaacagatgccgaaacgtgcggcgacatcatgaagtcggagaacaggacccgacacaacccgtctctcaggacaaagcctgagagat

SEQ ID NO: 25974 - DNA, 373 bp, Zea Mays
gttgtgtgacgcttcagtcgcctcgctcgaagggtggagagagagagagatggtggtttaaaaaggaagtcacacatggtcgtaccctttctgacacgaatttgttgcctccttgcttttagtctttcactagtcatcttcctcctcttactccagcacaatcccattcttgcaaacactcctcataatggcggacccatccatcctcaaacaccttccaaaggctcgcactctgaatgaagaggggctagaccaagtccgagagatcctcggctttcgagcaacgtcttccttctaccttcccaacgtggctccatcaagaggacaacgagtatgttaccttttacgcccaccttgttggagtccactttcc

SEQ ID NO: 25975 - DNA, 417 bp, Zea Mays
tgcccttagtcgcacgtgattgctcaccgacgtatccccggtctaccgaggactccccctctgtcgtctggtcgcctcagccccattcctgctatcccgaccccgccataggattcaccgagtcctcccaacatttctggctacccagaccgacccctagcgccctaggaacccaagtctacctcatctcctacagctgcggcaccacaggctcgtatggcgccgcccctggccggctggagaaggtaaagccccctggcgcccatcctaaccgctcaattctgatatgatggcctggattcgcggataatggttcgcgcggttcgtgcaaccagagtcgttgacctaccatccattggccaacgcgtaccgcgtcctcggcataccgctgacccgtgggccccgcgtgtcagcgcc

SEQ ID NO: 25976 - DNA, 319 bp, Zea Mays
gctgtcctctatttttgggggaagtggtcagggggaggaagacgagtgttggacggtcaatgggcagatcaacggccctgggcgtgtcactgcaaggatgatgcctaggccactcgatctagaatgggcgctagagattagacgaagggtagcggttcgaccgcgtcgatgtgagccatcagatcctgatccgagcggtagcatggtctagcgggttatgatctgttgaggagcgttgatctctgatcggtcggatcacgttgaataccggttcgagtggggtacctatctaatatgcagcgtcgaagtttgatcggac

SEQ ID NO: 25977 - DNA, 448 bp, Zea Mays
ggaacagcgacacgtggtggatcggagaaggccggacaggggatcgtgtggtcgagcccggggtggggaccctcgcatcgttggatcgtgcggttgtggtgcagagcagcaaaaaggcccacaggggttgtggcgggaatgtttatttggtggtgtctggtgcacgtacactggtggttggcgttccgtcgcgggcggcgataatatcttgcgcctgtgcttggaaacaaccagctcgtggttggtgttggtttgcctgctttagcacgtcgtaaataaaattggttctaatagatgcggatactacactatccgtctggcctaaattttcccatgggttttgtgttgtttgcgtgtgtcgtttgtaatgttggacatcgctgaagttttactcaaggcctctatctttcttgtcactcaaagatccctttgagcacttaagatttac

SEQ ID NO: 25978 - DNA, 496 bp, Zea Mays
gtgaactggtgtttgacacgattgccggtgagttgcgaactgggtgaggatcgacttctcatcttcttgttcttaagtctgaaaattcactcatagttcatttgtgcagtgtttttagcccatagcttttagatgcctggtcattttagagacagtatgggggtcatgtaggtttttggtttagaaaatggtacttaaatgaaagcaaatgagataaaagggtaactttgtatagacaaggaacattgtccagcactagacaggagagatcatgtcacataaatcctcaagctgaaacaagaacatgttccactggattttattatccttttgttattaaatttggcctggggcttggtaatatctgaatctgccactgcatagagtagttgaaattgattacaatgttaccttttcaaatatatcggcaacatcttttttaggactataacagttatcaaatttgtggagttcctaaacgtgcgatacatctcga

SEQ ID NO: 25979 - DNA, 413 bp, Zea Mays
atttccatcagcgccagcttgaggtcaagcggcttctcaaggggaggagaatgtcagcataccatcggcttcagtacactttgaacaccaatcggcaagcgcatgaacgaatgaagttgttgttggaaggatgggccgccgcgtgcgcagtcctaatacgcgggtgacgggagccgaatggatgacttgactaatgggccgtgggccgtgtccagtatattgttgtacaaatactcgatgggatgctgctaatagagttgtcgaataacagaacaatattcgtccattccttccgttcttcttcctcggacctctcctgctctcttcctcatatccggtgacattcacgacgaaggtgcgtgacaaacccctgcctgaactctaggagctggaggggtcgaaaccacaatatc

SEQ ID NO: 25980 - DNA, 659 bp, Zea Mays
gtagctgatgccttgagtcagaagtcacaatgcaattgcatgatgatggattctcgcatcaataccctgtgtgatgagttgagcaagatgaagattaaagtaattccttctggtaccttgtctcacatctccattgagccaaccttgcaagaccagataattatggcctagctcagtgacaagggaatgcaaatcatcaaggagaatcttcatcagaggttggaaaagtataagtgtttttgccaagacggaaggggatattgtggtttgaagatagattggtggttcctaagaataaatacctcaagaataaaatcttggatgaggctcatctctccaaattctccatgcatccgggaagcaccaagatgtaccatgatctgaagcccttgtattggtggaccagaatgaagagagaaatagcccattatgtatcggaatgtgacacatgttagaggacaaagacaagccacttaaaatctgttggtgccttgcaacccctatcaataccttcatggaaatgggatgacatcagcatggatttaattgtgggtctgcccaacacctctcggcatcatgattcaatttgggtcattgtggaccgattgacgaaagtggcacatttccttccagtgcacaccaccgataaggctcagaag

SEQ ID NO: 25981 - DNA, 352 bp, Zea Mays
ccacccacaaccatacaaccacggccatgcccagcatctacccaaccacgcatatcagcaccaccaggaggtacaagtcgtaccacccccactcccgcctccgtatcaaccaaacccacaccaccaaaatcaccccaagcaccaaaataagaagatttcgccgatcagccgtatcgcggagtcattcacatgatcaccggagggtccagcgttgacttcgaaacgaagcggcaaaagagggatcactaccgaagcgtcaaccacatcgccctcaccggcccagtcgtgcaaacgaagtggtcacatgtgccactaaccttcgacgccaaagatgttgatctgcgcagcgcac

SEQ ID NO: 25982 - DNA, 656 bp, Zea Mays
tggacaccaatccggctagccgccgtacctcccccttgttcaccgatcgctcgggtaggatctcaccaccgttgatccctcactgccatccgccgcgtgtccaaacactttaccacgtcgcggctaactatgctacgcacgtccggtgatcgccggaggagcagccacggtaatagccacgttgtgcggccaccagtgactcaccccagttcatacctatcgcaatcctcgctcctcttccgattccggtcgacggcctataaattgagcccagattctgcttcttcaccacatcccgcacctcagtaactgagcaatcggctcaatttcaccggagaactcacgcagcccacaaattccctcctccctgtacttaactccaccgtgaagaactccaccgtggtcagcgctcttcgggttagtaacttctcaattgctccctgttctagctcgtttgtagcctcctgttgctctcagtaccgaccaattgaagtttggccgaagcctttcaccggaacacacacctgctctatagaacgccgccgtgacaccctctccgtcgacccacgtttctgtttgtgcccagtccaaattctagtgtgtgcatcacctctggtaaacccatgatgcttccccaagcttcaatttggtcatcc

SEQ ID NO: 25983 - DNA, 528 bp, Zea Mays
tcaccctcccccctagtcttttggcgcacttcctcgcccaacccacctcgcctgtgcccgcgccaggcacgccttgcccccattctctcgctgccatgtggaccccgcatgttggcaccatcgtttgtattctcgcactgtctctcactaattcacagggcccacatatcaatgccatcacccacactcacgcccatgtgtcgctaatcgctacctgcctagccccactagttagccctgcctttcccttttcgttgtcgttctaggctcactttttggcaccatcggtttccatcgctcctagtcactggcacgttgaaccccatgtcagctccttcgccccaatcgtcgtccaccccacgctcgcagccgcctccccacatccatgtctccatctcccccacgttgctcggtattcaaaagggagacactgagcctcgcacgttcccccactccccaaacgtacaattactcatccatttcccctacccgcacaccacgcagcgccattgccatgctcacgatcca

SEQ ID NO: 25984 - DNA, 454 bp, Zea Mays
aatgttttcgtcaggacagcaagggtgtcctatggtttgaagaccgattgattgttcctaagaacccagaactcaggaagaaaatattggacgaagctcatctttccaagttttccatgcaccctggaagtaacaagatgtatcatgacctcagatccttgtattggtggaccaggatgaagagggaaattgctaagtatgtatctgagtgcgacacttgccaaagaatcaaagctagtcatttgaaggtagcatgtaccttacagcctctccccatcccttcttggaagtgggaggacatttgcatggacttcgttgtgggattgccgaataccttccggcaccatgattctatttgggtcattgtggataggataaccaagatagctcatttcctgcctgtacatagcacccacaaggcggaaaagtatgcaaagatctatatcgaccaaat

SEQ ID NO: 25985 - DNA, 381 bp, Zea Mays
gctggatcctaccaatgtcgttagggccggtaaaccagcaacacagacgcggcctcgcctatagcggcatgacccggcgcttcaggaaatcgccaagtacgtgcatcgaagtcagaccaccaaccgccagttccttaatcctgtccagtatgggcccgaactctggcacgaggcacgattttaccctccattgcttccggtcgagtctgggcccgtcgctcgaaagggcaaggcggtcgttgacctcagcgctggcgatcacccagtcattatgccagttctcccacctcgcgccgccaagggtggcgatgtaggtcactgttggatctgacctcgtctggaagtagtatgccccaaggtggtctttgcccttcccagacc

SEQ ID NO: 25986 - DNA, 405 bp, Zea Mays
tgggtgaagtcatctgtggaagtggatcaaacgtaaaggttatcgtagaagaaagaaaaatatgtgagcccgggttgttaaaaggaagtgggttagttcaaatttttactcctttaatttctaatcctttcgtgttttaaaacgcatgcaagctgaaaagagtgtctcctcaccgaatcagaatggtgcctttagggcatccttgaaatctaagactggcccatagggcctacttatttagccaccttttttccccactattcctaaggtctttcgtcctaggtctagcgttctagtcctgacgattccaataatggtttctaagcaagttttatttttgaaaagtttgtattcatgatttattgctttctctgtggtggtatttgctctgataccagctgtggc

SEQ ID NO: 25987 - DNA, 373 bp, Zea Mays
tttgctaggttgggaacaccatcctctatgtcatggtagcatccattgtcataatctttcgatagggcatccacggtgagaagatacttgagaagatagccatccacaacctccaggatgcggggaactgctctctttggtggaaaatatgcatgagttgttgagatagagcttggaatgctcctcgctagatgcaactagggctataggggtttgtgacctcgtaactagagccctaaaagaagaaaaagggcaaggtttcagaggagaatttatgctaccactgaaaatagcgagcccatccctagagcaaggagcagccccacccaagtgctctagagcattcggaagtattgccccattcataggtcga

SEQ ID NO: 25988 - DNA, 283 bp, Zea Mays
atttggagctagtatgagtttaatatgaattatataagtttctagaattatttttatattaaaactcaatttctaaactcatttatttgatttctctgagctctggacagcgcgctaaatagtataaagctcggggtctacttgcaaacatttcctagactcagattcctgttgccaaggatggcgggttctattctgtaaaatcataaggtctcttgtgtaaaacgtcaccgcgaaggggtacggtgctctatgggccattggatcaaaactatacggtgcc

SEQ ID NO: 25989 - DNA, 551 bp, Zea Mays
gtccgtttgaggatcagggagaggaggcgataggaacaaggctgggcttctaaaaaaatccacgacgtggagataagagcacgcaggagatattctccgggctcctttggatgctgcattccccacagggatcccggcccaaaccgcgggggagatgagacccgtgcctttttttcactatttatcccgggctgccttttggatgatgtgtgggccaaaaatgtcccgggccttttcactctatccacgttgatccacggggatgaaaaaaaacgtctccaggctcgtgtttctcgttcccttctctagctcgacctccgtgtttcgtgtttctcctccacaagtccgtgtttcgccatggcggctagggtttacgctaccagcgccagccatcaccgctcactcctccatcgctaggaaacacgcccacgccgctcgccgctcctctccactcgacgcgatctgtagcaagtcgagagcgtagcagaagtttcagcccctctccactcgacacaatctacagcaaatccgaagcgtagcagaagtttcag

SEQ ID NO: 25990 - DNA, 381 bp, Zea Mays
gggtattcttaaaaagcaggcaaaaagataagtatcaaggtaaaatctatagatgacaaaggtaatgggggtaacaattaaaaacacctcaagggatggaattaagacaaaacttgcaagatggcaatggggaaaacaatcaagggcgagataggtaaaacaccactcttgaactgggatggaaaagaaaaggctttaaaggttaggttctaagtaagcatcatggtaaagatataaatattacaagggttgaaagcgacaacagacaagggcgtaagagaaaaggtaaaggtgcaggagaacccaagggtatgagtacaataaatgataaagctaaggccagactggtacatggcaaatatgaggttacaaccaaaggca

SEQ ID NO: 25991 - DNA, 287 bp, Zea Mays
gaggtagttcatacctgtagagtagagatggagctagaactccgcttgaaggcggatgtaatacttttgctttttgtaaggtacttttgagtagtatttatcaagcagtattagcacttatctgtgtaccacttgtccctgttgcgtgtggtgtaactgattcttccttggtatcgggcccccctgggatgtaggctcgatttgtcgaggctgcagaccagcatacctaagaaagagtttggcggtggcccccaggaggtagcctcgactgggacctaggcctgcac

SEQ ID NO: 25992 - DNA, 740 bp, Zea Mays
caaagttatgctcacgacacttgcctcaggatattatttactgtgttggtggtgtctccgtatttttcccactcttcactcaattttttgatgctgcaagtgatattgagaaatgttgccatacatctgttgtcaatgataaattggtggctgaggtcattgagctagttgctactgttctggatggaaatgtgtcaaatcagcaacagatgtatcttctttctgggttatctattctaggcttcttgcttcaatcagctaccccacagctcttaaccaccaaaactctttctgcactgaagtatatgtttgacattctgaggaactgcagtaatctctctctccctccctcccctctctcttttagttcgcatgcatgcaataagatggacattacttatacttttctgcatatccaggcatgtcaaaagtcctcctcaaagatgctatctcacaaatttatttgaatccacaaatatgggtatatgcaagctatgaagtacaaagagatctctatatgtttgtgataaactattttgaaacagatggaaggcttttaccacttctatgtggacttccttgggttattgatattgtgtgccgatattactgggaaaaggcagattctaggcatgttgttgcttccaagcctttgtttcattcagttaccaaacaagttattggagagagacctgaggtagttgaaattcgcaagcttcgtcttctcctcctgagtttag

SEQ ID NO: 25993 - DNA, 454 bp, Zea Mays
cccctgaaccaggacgcaatgatagccgctggatcctatatctacggctcagatcctatataaccgagatcgaattgtattcatcggttcactgatctacggttagggttctcttaaacgaaggggtaagccatggacaaattcgcaccgttaatcacccaaatcaacggcccaccggttgtcttcttcccccaagccgtcccgtcgcgtagaaacacggcggcgcccactgtttagccttgacgccccaccggggaacgtcgccctggtgccccggtgcaccatccgcaaccccgggtggttcaacacgaagctactacgacgacgatcatgagcagttaggttttatcggcgatcggacctcgctgaacccccgtgaccgaacgcagcggtatcaccaagccccagaaactccagcgacgaaatcatctatcctcgcccacccattcctccc

SEQ ID NO: 25994 - DNA, 525 bp, Zea Mays
aaaataccagagacttgcacgcaattacaacaataaggttaaggccttggttgtaaaaataaggttcctggacggtgggttaaggtttcaaagaatccagggttcattctgtaagcttatggactattatgcaatgatcttaacactactatggactgcgggttcttttttaggaaactcgaggggctcttaaagaattttgttggggctgtgtaacacgtgggttgtcctagccgttagacctgcgatcaacggttgtcgttcaatgcgtgaaggggtatgggctttctaatcctatctgtgcattgctagatcaacggtcagcgtccatcttctcagcgccgacagcccaggtagcagtgccctaagccagtgcggtggtggccattgccggaccacccaaccatcgtaccaaagccccaaactctgatccaaatgactctaaacaaagtattcgctaccgccaactcgatacctgcactcacaacgtcagttgttgcgctcaaatccccgaccacgacgaat

SEQ ID NO: 25995 - DNA, 324 bp, Zea Mays
tcaacaattcagtcatgggcttcgcaattcgagagaagtctagaatgaatctttgataataaccagccaatcccagaaaacttcgaatctgacggacagttgttggcggcttccagttcatcacttcttgcaccttatccggatcaacagttatgcctgcctgagagatagtgtgacccaagaatttgatttcctttagccaaaaatcacattttgacagcttggcataaagacggtgctctcgcagacgttgaagcactatatgcaaatgaccggtgtgctcttcttcattcgttgagtacaccaagatatcatcgatgaaaa

SEQ ID NO: 25996 - DNA, 286 bp, Zea Mays
gctggcggtctgatccacacaagacactgtaccatgggatgctccattcagttaacctgacagccatagtttagggtcgatttcctctcagatttctatggcatcttgcccaaagatctgcatcaaagttatagagctacaatccagctataactttgctacataggattcctacaaaaagccactggatcctgcttagaattaagcttgaagttcatgccatctttctgtcagtctaaatttcagacttaatcagcctgacagcctgactttgggtgtgtttttc

SEQ ID NO: 25997 - DNA, 583 bp, Zea Mays
gatgatctgggtctatcaaaactatggcataaaagactctgacccactcctcaacatatctgccactgaaggtcaggagagagtataaacctggcagataggtgatatggccctcggactctacatcggccgctgaatagaaagaagtgagatccaaatgccggtgagccctcagagcgatctgagcagacagttgtgccctaaagaaggaatcctgggtcctggtgctaaatagtggtgcaaccgctgggtccctctaagctggcggccacgagtccatgagcatgtgtctgaactgacgtacctcgacagctatggctctctgaagatcaagcagtcgaggatcaacagcaagtggtcacacctcagtctcgtcacgctcccggaagcaaggtggaggaataggtggagcggaagcgggaacgggagcattagaagctggagtggtggaggtggtggtcacatcaggtgtggtggaaggctcgagagcggcaagagctggagaagtgggaggtggagtggtgactggttctgagggagtggaccgagcagtggaggagcgagtccgagacgagaggcgaca

SEQ ID NO: 25998 - DNA, 346 bp, Zea Mays
attacacaagaacaagtagcaggttcagtacaaggagaagaagatcggaatatgaatcaatttcgtgattggatagcagatggcttgttcaatagactgtaatgattattgtgtgtaataaatattacaaaaatgtacttcttgcatttggacaagtatttttggaccggttgtgtgtaacattttcaacatattatattgtttgcagtgttcagtctttgtgtagtgttatgtttgcagtgttcaatctttgtgtaaacgtactgcccagtttttgtgtagattataaaaacagagaaggggaggttagctctttgcaattttacctagagtttttgtagttttg

SEQ ID NO: 25999 - DNA, 513 bp, Zea Mays
atcagatcgacggttcagcccctcgccactgacgagccgtgcgcgattcgtgtcgtcgccgtcttgattcgtgctcggattgattggatagcgctcggggtcacgtaaatatcgtcgccatggataactctggccagtaaacaattccggccaccgtaccgagctcgccgcagtggatttggataagctcaccggcaacagccgcctcacgacttgacgccacgtaccctggcacctccactgcctcaccgtgacccgctgtaatcctctgtccatcgccgaggagatggccacggtaaccggacactaatcgcgcgctagtaactccttgtccttccggtcgccgcgcgtcgtcgctcaaattctcggccaccgctcttgcttactataaattgaggccaccatgagctccgtaggatcatcacacacccatccaccaagtattgccctcaaacgatcactagtgagctccaattttggacttcccccaatctgctcaaaaacaccgcacgg

SEQ ID NO: 26000 - DNA, 425 bp, Zea Mays
gcgggatcccgtttttcccagattgaactcgtatttattccgtaattgacaaatatgggacgagtctaatatgcattagtatataaagtaaatcctcgtgtatttaggtgataaattatagcataattgaccattgtaaccaccggctcttttcaaatgacaagtgatttaaagtcttaaacaacatcggatgtagctaaatgtacacatttagcaaccaaacaacaatagaatgttgcctctctatatctatttgttttatgttattgttctgccaatcaatcactagtcaaacatcaataacatttctatttgtattaaattatgagtttccgttagtattttcgtttccgttcgttttcacaattccgtttatcccgctcccgtttccgttcccgactattccggacccgatctcgtttccg

SEQ ID NO: 26001 - DNA, 498 bp, Zea Mays
gccccgccatgccatcctggcggcgcatgaatgtcgttgtgttgtcctgggtgttgggcacactctcccccgagctgatggagtctgctcgcacctctgatggcactgcgcgccgcgcctggctgtccatcgaggagcagttcctcggcaatcgcgaagctcgcgcatttcgcctcgacgccgagtttcatgttttcatgtagggcgatctctccgtcggcgactattgtcgcaagatgaaggggatggctgaggcccttggtgatcttggagaggtcatccacgaccgtaccatcgtcctgaacatgttgcgtggcctgaatgagaagttcacccacatgaagctccacttagggcgctcgaagccgttcccctccttcaccgacgtccacaatgatctcatcctcgaggagatcgactcccgcgcgcctcacctccgcctccgtccaccgctctcgtcgccagtaccactgcttcctccatcgcccctccccctgg

SEQ ID NO: 26002 - DNA, 626 bp, Zea Mays
ccagccagttcaaggctcctgccctctagagaaggtgtctttgaagcttaaaagattgtccaaaagattgcagtactgggggcacaaagtggtaggcaatgttgggttccaatttggattagctcgggtgctgcatagattggagattgctcaggacagcatggtattgtcagaagaagaagaagtttggtcattgagaaagctgaagcagcacagccttgtccttgcttctctggaaaggacagttgctcgcttgagatcccggatccattacttgaaggaaagagatgccaacacaaggttctttcatatgcaggcttgtattcggaagaagaggaattttatttccaaattggaagatgatggaaggattgttaccaatcatggtcaaatgcaggatgtgctggatggcttcttttcccaatctattgggttctgaaattcagagaccattcacccttgatttggtaaattgccatagaaatgcagttgatctgagcgccttggagactccttttctgaaaaggaggttcgggacacgattgcaagtcttccttatgacaaggcccctgggtcctgatgggttcatagggagattttataaagcttgttggcacatcattaag

SEQ ID NO: 26003 - DNA, 385 bp, Zea Mays
gtgcgtcaggcatcctcatgaagtgcgttctcccgtccactgggaaacaacttctagaggaagtccatgcagggcaatgtgagatacatgcagcatccagaacactagtcgggaaggttttccggtcaggattctattggccaacggcgaagaacgatgcggccgaattagttcagagatgcgaagcttgccaatacttgtcaaagcaacagcacatgccagcacagcagttgcagaccataccagtaacctggcctttcgcatgctggggactggatatgattggacctttcaagaaagctcaagggggatatacccatgtattggtggcaattgacaaatttactaaatggatagagttcaagcccattgcttctttaacttc

SEQ ID NO: 26004 - DNA, 315 bp, Zea Mays
aaaagtattggtggtatggactgaaaagagatgttgctgctcatgtggctaagtgtgtcaaagagttaaggccgaacatcaaagacccgctggactattgcacccgcttaagattcctgagtggaaatgggaagaaattggtatggattttattgttggtctaccccgcactccagcaggatatgactctatttgggtaattgtggacagattgacaaaagtggctcatttcatacctgtgaggactaattatacgggagccaagctagcagaattgtatatgactcagatagtttgtctacatggagtacctaa

SEQ ID NO: 26005 - DNA, 536 bp, Zea Mays
ctgggttgcgcgcagggagaagatcacaggagactctggctccctctgggaagccagaatagattggaattctgcttatctttattccagagtttacagatctatatatagagctatctcaagtctatctactaactttggataagtataactatctagatagagctgatctttatctactaactttggataagtataactaactagatagagcttatctattagctattgggccttgggccccacctgggcagccttggccctattgcgcctaacataggcttggccatacataacagaaatggtacacagttctcctgcgtgttcgaaaaaaatgtgtgtattctactcatcttactgaatatctaacaaaaccttcaaaaccacttagaaattagaagaatcaataccttcaactcaaccttgttaaacaacgattcctgaatctacttttttcctataattcaaacactattcaaatggctatacaacaacctacttgccacccgacacaaaggatattatcaaatcactat

SEQ ID NO: 26006 - DNA, 439 bp, Zea Mays
accactccccagcatttggtcacctggaacaggcttcatagctttctcatccagtatatcatgcataaagaagctcggacgtcatgtccctgatgcatcgaacaccaattcatcagttcagcgagcattgtatcctgaactcgttacttattgtactctctatttatttggacatttggtgttgccatagttgcacatgtttgcattatgttttctttattattaactggaaatatgttgtgagcttgtgtcccttgacgttgtaaaacatggtggctactcttggatctggagaatctcgtgcctctttatatattatggatctttctgaagctgttgacttggcaatcggaccatggactacctacagagttcattcacttgatcgaacaatgtggacagctgattgtagttctgatggcacacatgcagctttcgg

SEQ ID NO: 26007 - DNA, 435 bp, Zea Mays
tttgcgaagaaagagctgaaatatcttggacatattatatccagtgaaggggtcgcgacggaccctgcaaagacagctgctatgctggcatggcctagaccacagaatatcactgagttaagaggatttctggggcttacagggtactacaggaagtttgtgtgtgggtatggagttttggcatgacccctcactcagctgttgcaaaaacaacatggtttcaagtggaatgatgaagctcaagcagcatttgaggccctaaagaaagctatgacgactacttctgtcttggccctaccacgatttgatcttccttttgtggtagagacagatgcatgtgacaccggaatgggagctgtgctcatgcaacaaggaaagcccatagcttatatcagcaaggctttaggagagaggaatagacacttatctatctat

SEQ ID NO: 26008 - DNA, 363 bp, Zea Mays
ggaaaggtcgtcatagtggttatcgagggtgtggagatatccggccatgtagacgatggtggggtcatcctcagtaggatctcttcctgacagggcctgaagacttttcctataggcaggagtatttttgttgctaggtgggaagtaacgaaggggggtttcaaagacctccctgctgtagttttggcatagctgtcggagagcttttcgggcaacattttggcaagagtctgggaagcggtgtccgctgaaggtgacttggaaaggagggtgattcgggtagcttcggctttctcccaggtagactgccatagagcacttctcagttccattctcgtggtattctttccagtcgtactccgg

SEQ ID NO: 26009 - DNA, 492 bp, Zea Mays
cgccaattcctcaacataaaacctagaggccctcaccatttccctctccgtacctttcgcctctatcttccttttccgagtcgctgcaatcatagccttcccctttgaggttgcctctcctgaccgggtcttcaccttcttccctcggtcttccccagcatcagcagaatcaccctccgggtaaggatcgtaccacaaaccattcagttcgaaaatttgattcaacctgatgttggaacctcgtatatcccagctccttatcaactctgtcattggtgaatatttacaaagaattttaatagcctccgactccacttccctaatgaaggcagtcgcatcctgccctcgcagatcaatgtcaaaagcagggctctgcaccatccgaccactcaaaaaggcatcgggcgaagcttgacttcgcccaaattccacccatgagccagcggccatacaccgtaggaaacaaattcttcaaccaaatctcgaccgttg

SEQ ID NO: 26010 - DNA, 619 bp, Zea Mays
aggagtttgaggagagcttagagatgttagaacaaggctagagacaacatgatcggacctgaattgcactgtccacggcgaagtgttcttgcggcttgtttgaaccgatttgggggaattgtaagattcgcgctcgttggggatccactgagggtaattcttggtggcggggttcttgactaccctacggagctagtggcgcactcaatttataggcgcatcgagcgacggtgaagaatttggctaagggggtgctggcggccggagaggagaggcgagctcagtatggggaaaagtggctttcaccgtggcagtggctccggtgatcgccgggcatgcaaccgatgagtcaccacgatgagaactagtgcttaagcacgtggcgcgcggcagtaatcggccggcggcgaggtcttatccgatcagtcgacgcgcaagggaggtacggcgagcctagctacggcagaaccacggtgatggcacggtggccgctgattaaccatggcctgccacctccccgttttaatgccacgttgcaaaagccttttaccgtggccgccgacgaccatccacgctgcggtggcgttcttatcgccggcgcgatttttctgaagatcgg

SEQ ID NO: 26011 - DNA, 527 bp, Zea Mays
agagtgttggttgctgagttgcagttcttcctgctaaatgtgctgttcctctggcaaaataggttgtgggtcttgctgaatgggctgctcattcacaatccactggtcccactctccatggcccaaatcatcctgctgagccggcaacactccaccctcatgccccggaggaaagtttaggtcaagccctgccggaggcaagggctgacccagcccgaagaaggccggagggagctgatgtccatcctcgggggccagagggatggggtcctcatcctgagcctgtccgccaagcatgagctgctgaataatttcacattgcacagtccaggagtccccagcaaaaccctcagcctccgaaaaaacaataaattgggggacttcctccagcgaagtgactcgaacacggagcagggttctagagatattacttcggtcctcctcccataaaatcaatctcccaaacgacccaatggcggcctgcaaatactctgaagaacgataatccaagggaaaccccaaaagca

SEQ ID NO: 26012 - DNA, 940 bp, Zea Mays
ctgacatagaccaatttattaagcctctggtgttctagtcggttcctcttttttgtatggatctaaaaatgcacaattgcaagacatcagattcagcaaataaagggctgacccatacaaccactcaaacaagtgaacaagaacaacaatacttactgctacaaaatctgaccaatttctctcacaacctgaagctgcacaacataggcttataaccctttttgctaagatttgtagttcatatgccagtcctccatatgcaccccaccataggactgttatagttatacaaaaattagatcagttctagtgccaaacagaaacaggcaaacaaactaactaatgctgcaatagtaaaacttactaggactttttctctctctttctcttattgctccagcctttgaaaagcattccccttctgatctttcgtagtcatctgcttgtttacttatttttgtttgctcatcctcatcactgatcattttccacaaaacatcattgaacatagctcgaagtcttgcagcttgcctcctgtctttatccctcaaggtaaagaatttacctggattcaaataaagggctgccccatataatttttgctccatctgagtatcccacctcttctcaaagcatgagattacttcaacaagtaatcgtggcttctctttcaaagactcctgtatggtagcttttgatttgtccatagctgccattatctctggagctgctggcgtctcatcgccgtcagcaatccttagagcaatgagtagtggttgtgaagcccgaagacaattttcaagagtttgccaaaatgatactgaaaggacaatattttcatcttgttcaccttctttaactagggaaaatttagacccgttccattcatcactaacaaacaagccttgtaatttgctcttatgcttatacatgcttgcca

SEQ ID NO: 26013 - DNA, 385 bp, Zea Mays
tagggaggaggaggatagtgtccagagccggacggcctggggtcatcaggaatgggtccctgacccggatagggaggaggaggagcagatgtgtagaaggagtcgtcaaactccttgacctcatcctcaggagtaacgaatggcacaccatactcctgttggtgccactcgttaaggttctcggggtaggtaggggttggaggcggaggagagcgtggacgcaagggatgacccatggaggctgtgtaacctcaaaagtcctcatgcagcgcctcagtccggcgcctatgcacgaactcctcgattgcccagctgcggcacatggcgaagacgccggcgatgcccttggccaaacacacaaacatgccctgaccctaaccgcgtc

SEQ ID NO: 26014 - DNA, 767 bp, Zea Mays
gttctctaccatcgacattgtcccagctgaagaacctgtcaatcttgtaatttagtaaaataagctagcacctcgtgaatttgctcttcctttggaggtagaagctaataatcttaccaactcttgtcatgtatctaggtgggcatcagacaataatttcagtgggcagattcctgattatcttgggagtttgactaacttgacccaactgtaagatttatatctgaaaatcactaaggtttcaatattttaaaattgttttcttgacgtcaatagtaggaaggtcattcatttttctagagaagtgcaagatgttgcatatttttctacatcatctgttattttatagcacaattaatttgtcatgaggaactagcataggtattacttctctaatcaaatatctatgtgcttccaggaggctccaagggaactcttttcaaggtcccattcccacaagtctttctaatcttgtcaacttaaaaaaattgtgagtccctagtagtttttgtgattgtaggaatattatgttgcaaacataatagctatggcattaaccatttctatgtaacagaaggataggcgatatagtgaatggaagctcttcgctgtcattcattggcaatttgacatctttgggtgaactgtatgacatgtccctccctttttttatattcaagtttaagggcctaaacatttaattatttaaggttccatcttgcagagtgttgaggaacagcattatatctgatacactagcatcggta

SEQ ID NO: 26015 - DNA, 379 bp, Zea Mays
cgagtggttagtcgacatcactactagtgtctgtttgcacgatctccatgatatggtaataccaccacggtgaaaacaacaaaactagtctatgatctagtattatgcggatctgatagatattcactatttgtatatattgtccactaaagttaatttgatcctgattcttcgggaaaaactggtcaagatcttgagcatgccttttaagatatctaagtatagtcttaatgtctgcctaatttcttctggttgggtttatattgtgtctagctagcaaacacttcgaatgcaatattaggtctctggtggaaatcgtaaggtatactaatgatccaataacattgaggtaaggaactttcggtcccagtgattcatc

SEQ ID NO: 26016 - DNA, 317 bp, Zea Mays
ccacttccatttgggcactaggaggggttgcagtagacctgcaggcttctgatgctctgccttagttcgctggcaagtgtcacaccgggccacatactgagctatctcctttttcatccctctccaccagtatctggttttgaggtctaggtacatcttggtggtccctaggtggatagagtaggctgagttatgagcttcatcgagcaggattcctcgtgcctctccttttggtatacacaaacggtccctgaatcgaagggtcccttcttcatctatcttggggtccgggagttgttccttgcgagccttttctg

SEQ ID NO: 26017 - DNA, 368 bp, Zea Mays
tgattggtgggctctgggtcagtcgctttccttgccgcatgcatgtgagtactgctcgaccgggccgctgacaaatggaccggcgtcgtcagctctatcttcccagctgcctgccgaaatccccaaacagaatcgcaccggccttgccgagatcccgggctgcgtccgccatttccggtaacaactccaccgcggcaaccgacctttgcaggtttccctcgggtatatatactagctccgcgaccgccccgtggtccatcccagcgtggcgtcaagcaaccgctcctccctgctacctcctcggcgaaaacctctctcctccctccagcctctggttctcgcccaggtcgcgggtacctacgccctcg

SEQ ID NO: 26018 - DNA, 283 bp, Zea Mays
gccgaaggagactgtcactaagactgacgaaggagaactagttcggttaaaatacaccttcagatatgaaggtaagtttgttgagtcggatgatgactggttgaaatgtatcgaagctacaaatgatgaattggttgggccgtactgcagagcagaagataacgcattatctgcggccttcgggaaccgaaaaaagaagagactaaacagagtttttgatgctataggatttgtgtaccctgactaccggtatccactacagggtcagaaaaggaaaggtgcg

SEQ ID NO: 26019 - DNA, 436 bp, Zea Mays
tccatctccatgcattccagttctcaaatttggtctcttttatggagctcatctcgactggctatatatgagaaaggaaggagggaaatgattcgggagtccaattgttttgacaacacctatttcaagaagctgcttaagaagtctcaaacatcttcgagtaggtgtgccttcctcaccaattgctttgatgtctatgcttaccggaacttactgtctgggcttgtcgtgttcctctctgtgaagaagctagcatgccatgttcctctatgaagaacagcttaactagaactgtctgtttctctacaatgttaacaaatctacccctatcccagtgtcaaacataggagttgcactgaaattttaaaaaaacaaagaattttatttggggaaggttgagtgaaaaaatgcttgcattttagattcattcgatctg

SEQ ID NO: 26020 - DNA, 516 bp, Zea Mays
cgtgcattgccgccggtgatctcacgccatgatcctcactggcgttgcgattcgtgtccggtggcgtgcggataactacgttgggtgaatgatctcacgcatgggatgaagtcgtggcactgttaccgcctagtcgtcgtacccacttacgcagcgacgtggccggataatcatcgctgtggagatcgccgttcattgcgattgcgccacgccgtagtcgattcaccacatcgtcataagctgtaaggactcggcagtgaccgtcgtaggtagttagccagtgagtgccacgttagcgacctccggtgactcttcccccttctcacagcgagcgcttcctcgcccaaattcgccctcctcgcaaccgtcctctataaattgatgcctcggcctgttccgtctacttgttacgaaccaagtgaaccactcctcgcgcccgatcgtccatcgtagcgccctaatttggaatccccccaaatccactctttgcgccgccgtgagtacctcctccgtcga

SEQ ID NO: 26021 - DNA, 283 bp, Zea Mays
gccgacgacaaaggtctgctgcgtggtgctccctctgctagcgaacccagaaccggccctacagttaacaacttccttccccaaaacgtgctatgcgcagatagaaacaaagcgaaacggattctgggtcacttaccacaatgctcgcagaggggacgacgatccacgacgacaggcggaatctcgacggcggcggaatcctggcgagaaattcaccgagctctgccaccgcattcgtaattctggcggtagcagaaggttcgcgatgacccaacgatgatcg

SEQ ID NO: 26022 - DNA, 278 bp, Zea Mays
gccgccgatggtgagtcgagacgtgaggagctgatgacgcaccgatataccactatgtggaggaagacgagagaaggggacgaaccatgtttccgatttctgatttgttttcgatttctctcctaccgttgtggtcctgcctttaggctgctccgagttgggcgccatgggagactgaggcccatcgcgtagtgagccggtgccaggtgttacattaccgccccgacgaaaagttgcttgtccccaagcaacaccgtgatctcaaagctagctcctca

SEQ ID NO: 26023 - DNA, 296 bp, Zea Mays
caacggcgaaacaagttcatcatacactacaacacaagtttcctacttgcaattgtagttcatcacaaagaacaacacaacaataaataacatagaagatagaagcataaaaggctctagtcacatcaataattttgcccaaattttcattcattttcttcacgcaccaagttgatctaggcagtcatatctgtcctcattgccaacatctcccttgagctgctcttccaccatgtcccttccaccatcttgacataattgttcatccacatgaaaaagttatattttttgagaac

SEQ ID NO: 26024 - DNA, 400 bp, Zea Mays
tggggaagatgataaaaagtcataggataatggttccagtaaacaaaaatttgggtcactaactttggaacaaaacaaacagcatgttgtttcaaccggaaatagggctacaaggagtaacatggggaagaaagttactgaccagggggtgcagacactactgggttcacaaccaagtgttgttgatacacagattgacagtggaaaggacacaagctgggcgctggttccaggatctcctaatgtctctacgctgagtgctgatctgaacatggctgatgttgggattctatctcctgaagttctggctcttgctgctgtgtcggaagctaacaactcagctaaattacttaggagcaaaagaagggtagctacaagtatgaaggactctgttgctcgg

SEQ ID NO: 26025 - DNA, 552 bp, Zea Mays
ctaaactaaaaatcatttttatgaaatgttttatcctttttattctctgattgaactagggttactattatgcgaaagaccaggggctaattcctatatttctccaagactcatattcaccccgcgtggatggcgggttgaaactctaaatctgcaggggttctttagataaaaatcacggcgaaggggtatcgacgatagtgggccgttggattacgatcgagcggatcaaattagattcaaaccccaccaaaccggtatgcagctccagccgtccaattttgatcaaacggccaggaacaccccacaccatgatctcatctgattcatccgtgggtcgatcgacggcacgaattaatctcaggaaaggggtacgtgcacatcaaccgcaaccgcggatttcaagatccatggccacagtacttcttctccacgcgaataccaggtgtggcagcgccgttcccccccccccctacggcggacgccatagccagaccacccattcaccactcccgggcccgaaattttaatctgaggtacgctacgcgcaga

SEQ ID NO: 26026 - DNA, 694 bp, Zea Mays
gtagtgctgatgtcgcagctgtgggagacaccatgacccctttgacatttcatcaaagctatgatgggcgcctaggctgatagtcacacatgatgctgagatcgaagtgatgaggctcgcagtggggggaccaagcgctatagatgccagtgatgataatagcatagcttctgcattgtacaaaaatgctagcacactaatttcaggactcgccctttggttgaccacttggtgttcacttgtgctgtcatgcacaggaatcacaaagcttgatatctcatggttgctgatggtgaagacgtgaggcggggaggttggatattgtgttggcacagcatctggcatgctcaagctcattggagtgctggcggcgtggaccaaacattttgtcgaacacccgaggggcgagctgctgtttctgtccgccttcggcttgatgatggtgaaggagcagccgagcttgcggtagttgggggcagagaagaaggtgacaagctgacagtcgacagagaactcgtattcgtcctccatcacctggtgcgctctgcaaacgatgtccaggtcctgcgcgcggcggcagtccgtcgcgacgtcggcgccgaaggtgcaggacacgtatcgatccttgttgtccgcccactctctgtcctccatggaagaagggtcggaccagagcaggtcacagaggagaccc

SEQ ID NO: 26027 - DNA, 375 bp, Zea Mays
acaactttgatacagagagatggtcgagtcactacatgaatttgggaacaaatctccctgcaaattgctctgtcaggctgactgaatgagaatccgatggtacagtaaacaaaaatcttctgttcagcccccctcgccgccggtggcctttgcgcctggattcacgccggccgctgtgattcgtgcctagcgcgagtggataactgagaggagtaaagatcttagcgctcggattggttcaggctcgctcaccgttgtgcccgccgtacccacttggactacggccggccgggatgatcctcaccggtgttagccgcttaatgatcatgtgccacgcgtcttggaaccttagcacgtcgcaatgaacctatgtag

SEQ ID NO: 26028 - DNA, 320 bp, Zea Mays
cttcggcagattcaacagcttccatcttttctgtagcaggcaatgcagcagccctctataaggaatacgacctcgatcgatgagttaaaactttagtccttttcggtttcggtgtagtggaagaggtcgtagttgtgattttcctcttcgttccttgttttcgttctggaaaacagtagtcaggattgacaaatccaattacatcaaaaactctgttcagccttctctttccacgagcaccgaaggcagtattcatggctttgtcctctgccttcgtataagcccccaacaattcatcactggtcgcctcaacggcttca

SEQ ID NO: 26029 - DNA, 504 bp, Zea Mays
gcagggaccttcctcagtttctcaagtgttagtagaggtctggccggcacataatgtttaggcacatttttataatctgccttagttgggatctttatctttgttgccattgccttagccttttctacagactcctcgtgctcggccaaatcaacagtacgtgacatgaggtcccgtccaatccctttcaaaaatcgagctgtgccagcagtagtagctttactcttctttttcttgaatgtggacaccaattttggtagagggaatttagatttctttgattgtcgtgaatcccttgatggttgtggagaaggtgatggtgtcctaaatgttgatgcttgtggcggagatggtggattagaaagaggatgaggagcagcatgggaagattgtggaggtgatgatggatgtaaaggtactaaagttttaggaggcggagatgggtggggatgaaatgacgacggtgttggtggatcaaccaattcgacatccctttgaggccaa

SEQ ID NO: 26030 - DNA, 308 bp, Zea Mays
catcggtgatgctacataaacattcaatcgccacttttaatcaatgcaagtttctcatggctagatatctcgtagattatacgatctactatatgtggccgtttcatcggttgtaacttcttcaccgttgcacctagtccatcgacccggaccatcagatatgggatacaaatatcctttttcggatatggatttgagtactccatagtttattaacggtgtcaattgcttgtttttttgaagacattgcctctggtaactatataatatatatgctaattataagtaacacaaacgcctgtgttgac

SEQ ID NO: 26031 - DNA, 514 bp, Zea Mays
taagggcatccttcattccttctcttccaattttatacggaacattttaataattctgacacacatatcataaattagcgagacacggggcaagaaagaacatactcatacacagcatatctaatgtgttcaataaattacacgtatgcatcaaaattagctatacatataccctaatgtcctttttacccatcggatactgccactaccaggaatcggtacaaatatcacaagaaattgacaaaagatctaaaaaatagttacttgaattctgattaaaggaggaaagaagggatcgttaatgccctgcaaccgcaacttccaattttgggtcggactcaaaagctaaggaaactggctgatgcattatcgttatccatccaatttcgggtcggtctccaaaggcctgatctagatgcagtccagctgcttaaatccaacgccctcctttccattcccttctcctggcgcttcctctagtgcctactccgtgctcgctcgctgtcggcttccg

SEQ ID NO: 26032 - DNA, 422 bp, Zea Mays
ggcagaacaagaactgaagagcgggtcgacggtgagggagtcacggcggcgttttacaaagcaagggtgcgttccggtgatgggcttcggccaaattccatttgctcaatacagagagcaataggagactatacacgagctagaacagagagtaattgagaaattaccaacccgaagagcgctgtccgcggtgaagttcttcacggcagaattaggaacatggagaaaggaaattcgtgctacgtgagtgctctggtggaattgagttgattgctcagccactaaggtgcggaatgcagtgaataagcaggatccgagcgccatttataggccgacgaccggatttagatgaaattcacggattgtggatgtgctggcaagcctaccgcgcggcggattccggtgagggcacggtggccgcc

SEQ ID NO: 26033 - DNA, 480 bp, Zea Mays
gcgagagctacggactgccgcaaccgagcttattggaaaccgagcttattcgaaccaagatatcatcaacacaggacttttaaaaattggtatcctgaacgtcgaggagaggaggagcgctagaggagagcagaggagcgcccaagaagaggaccgctcggagaggagctcctcggggagaagacgaactcaaggtagagctcctcggggagaagacgaactcaagctagagctcctcggggagaagacgaactcaagctggagcaaagatccgttctaagctacggggcagtgacatgaactgccgtaacaacgactgcggatcggctaaatcacaccccgatagcaaaattccgaatttgaaaggattatgatactaaaatttctaataccgacgttcgggataccaatttttagaagccctgtgttggtaatatcttggttccaataagctcgccgcaaccgcaacacgcacccccc

SEQ ID NO: 26034 - DNA, 310 bp, Zea Mays
gacgttacatagctagtggggaaagtagtggtgttccttctcctgccttgtctgccctcattggtctgcaagagttatctctggcgaactttgatcaaactcttgaagacatggttccagaagatctgttgtcagagccggcggatggtggcgcgatggatgtttgtgttgatgtgcccgatgccgggttggggtcatcgcgggcagcgtcccatgcctcatcgaccttggagcgcggtcttgagggtcaggaggctggtctggattgcactgctcctatggaagtgactgagggaccttcagccttaga

SEQ ID NO: 26035 - DNA, 648 bp, Zea Mays
gactgacatgttctcctgcttcagcgatagaaattcttcttaatcttcatcagtccagctggtatatgatagttcctgaactacgtagcgaactccgcccatgtgatagtatcaacagcatcgtgggcagtagtgtatgaatcccaccaatcagcagcaggacctgtcagacgaccagaggcatatagaaccttctcccggtcagagcattgtgcaatattcaacatcttttccacagacttcaaccaatcatcagcgtccagtggatcaggagaactagcaaatgtcgatggcttatggctcatgaactcccggtgcttgtcccggggtggaactggtggtggtggtagtggtgcttgctgatgttgctgttgttgttgcacccttctctcctggcgtatctcctctcgctcctagcgcatttcctagcgtatatcctctcgctcttggcgcatctcctagcgttcttgccgcatctgcgcatgcatatccgccatggtgtctgtcatctattgcattatcctcatctgtgttgcaacagcggggtcaactcctgctggtggaggctgtggaggatccatctccggttgctggtgttgtggttgtctatatatcctccaagtgtgtcgattgggaggtagatcaatt

SEQ ID NO: 26036 - DNA, 398 bp, Zea Mays
ctggagtctgtataattattacattttggtaatgtaatatgatggtatgtgctagcatgttatatttttccaaatgtttctttgcctcagatgccatcacggactcgcgcacatgatggtgcggtgactcgcgcacatgatgttgcacggagacgcagaagtcactgttcgctgcacatcaactaagagggactgccagtacttggtgggcaaattttgtagcaattcaaccggctcgacatcagatcacctgggaggaattcaagcaagcattccgggagcattatgttcccgagggagtgctccatatgaaacaagaagatttcatccggttaaagcaagggggagatattgtaatgcagtatctcaataagttcaaccatctgtcccagtatgcc

SEQ ID NO: 26037 - DNA, 478 bp, Zea Mays
ggggaccacgcggtctgtggctcacctcatccccgcacctgtgtcatcgagaaactgcccgagaggtgtgcgtcgtcgccgacaaagtgggaggagcgatcgagaagggggagagggaggaggtgccagggtttagggtgaagcatagtacctcggagatggtctcgctcgccatgtgcatcgccgctacaagataagatcgtcgacgaggtgagaagtggtggtagacggagcgggccatgccgtctccgacaccacacgcaccgccgccgccagttccaccttcctgtgctgagttgggtgactgaggagaggggagacgggcgagtggagatcatggtgggacggacacatgaccacgaggagccagcggttctacgttgttgacttgcgaggcgtggagagacgggtccaagggaggcatggaggagagatgggtctgagaaagcctagaaatagataaaagctcctttgtgta

SEQ ID NO: 26038 - DNA, 308 bp, Zea Mays
tatgctcatcatggctcacgcgttaccgaggaagcagccacgagatattaatactatatggactacgaacattatggcgctgggagatcttctgggcgacactgacattagatacttctatatgtattccctccgttttgccctaggcccacatgtcggggctcagcacccttgtacgtgccccccttgagctataaaagggagggcacacgacgttacaaggcagacccaacttaggctcaagctgacttagactctcagactcacaagttcatacaagctctcaagctcaatacagcacacagtgg

SEQ ID NO: 26039 - DNA, 438 bp, Zea Mays
gtcttcgaaaacatagctaaggcagaagctaccagactagaggatattgacatattggaagaagaactattgaatacagtaattcagtcagctagataccagcaaaccctaaggcgctatcatgataaggccatacgacatcgatccttcgcagtgggagacttggtccttcaccgaattctaacgggggaaggccagcacaaattgtcgccactatgggaagggccattcatggtagcaaaagtcacttggccaggatcatatctccttactcagatggatggcacggaaatagggaattcatggaatatagagcatctcaggaagttttacccctagctagatttcaaaagctatcggggcagcattgtattctgtaatcagaaaatacatcatcaataaaaagatctcattctcaagggtacttgaactatttat

SEQ ID NO: 26040 - DNA, 407 bp, Zea Mays
aaacagtaccgtactgccccacgctgatgagctcattggtctactcgttccttccaaaaataaatgagaaaccaatattataacaaaattactaataataaccccatcagaagttattgatgtaatatgtgttctagggctcggtaaggaggaccgagtctgagtcgatcttcaactaatttcgtcaccaattagccacaaactgcccccaaggccctaccgcgcagggaggaggtgaaccaaacctagacgttgacgctcaagttctagacaccgtggtgacccccgaatgcctcagtccaccttggcccttgtcgtcacgggaattctgtagccgatcgtccgtgcagctgacacaccgaggagttgagagatgtgctgctgctacgaccacccctcttgattgc

SEQ ID NO: 26041 - DNA, 474 bp, Zea Mays
ccgattcttaatagtcatatcattcaatttgcgataatcgacacaaaaacgccatgtaccatccttcttttgcactaagaggactggagacgcaaacgggctcacgcttggagtgatcaaaccagatttcaacaaatcagccacctgtctctcaatctcggtcttatggtgaggggaatatttgtagggccgagcattaactggtatggatcccggaagcaaaggaatgtgatgatcaaatggccgagatggaggtaagactgtaggtgcctcaaaaatatccatgaattctcctagcaacccttgcaaatctgtatgaatttcgttgctgctcgctgccgtcacctcttccagcagagcaaacacccagatatcatttccacgcaaccaccgctccacttgtaaagaagatacctcctgcaccacttgttgttttggatgattccccaccaactggacctcgatccctttgtc

SEQ ID NO: 26042 - DNA, 430 bp, Zea Mays
tatctaccaagttcgtacggtcatccacttcgtgtagcaccttctgttggtcgctttgggggctcggaagggcgttgtagtcatgcgctatcaaaagtcacctaagggtgtagccggataggcacaacaagtgtttaacaccacccaaatggtgcgatgtcatctacaagacgcacattgtgcgagcaaaagttgctcaagagtgcagctggatcaacacaacacatgcgtaacaacacctaccgggtgcgaagtcgtccatggcacgcacacgtctatccacaccaaagtcacctaagggtgcaacaaactcacaataggcacaataaaaaacatgaagccatcacaaaagaacatcgatatatcaatataaagggcacaaaggcgccacccagcggaattcagcgcacaacacatgttacaattccac

SEQ ID NO: 26043 - DNA, 500 bp, Zea Mays
gcagagggactgatgatcatgaagaaggaagacttcctggcactgaagcagggacccatgtctgttagtgagtacaaggacaagtttctatagttgtctcattatgcacctaaagacgtcaactctgacgctaaaaggtcgtacatgttcatgagaggcttggtcaaccctctgcattaccagttgatgaaccacaccttccacatcttctagcacctatttgatggagcaatcatgaccaaaaggaagcgaaaggaaatggaagatcggaagcacaagatgagtggacctcagactagaagcagcagtcatccccattgctcaagcaatctgtcccaacactacaagcatggtcactcatagtgatattagcaacagagtcagcgccaaccccaacaatagttttagaggtagtatccacaacagcagcaacagtactgtcaaaacaacatgtagggaggtaaccaatatcagaggcatgacaaccaagcaccttgtct

SEQ ID NO: 26044 - DNA, 449 bp, Zea Mays
ggccgagtatgctactggggcaccaacgtttaataccttgcctctaagaatcatctcaagtcggttcaccaagtctacggagggaattcttctgttggtaacccgagttgagtcagctaggcctcggtacagataagccgggtaagccctgtccttcaacggctgaatgttcttgaaaacaaaatcagcaaccacagcctctgcagtcagacccctctccttcagcagtccaacttcagctagcaaagccccagcctcagccacctcctgatctgtgggggactcggtccaactcggagtacgaacgtccggctgtctccccgaccgtggggggagagaattcccgtggttctcaacaataaaccactccaagtgccatcccttgatactgtctttgagagggatctcaagatattcagtcttccttccacgacgcatctccaaactag

SEQ ID NO: 26045 - DNA, 711 bp, Zea Mays
gggccattcaccgagttggagtaagcaggtcctgatgccttcaactgggggcagttgttcttgaagtgactggggtctccgtagtgccaacacgcattcactggtggttggttgcttgcaaccgagggggcatgaaaggagctctgactctgctgactgaaccgtgacggagtgggtccagctggtctaatgaagcttggtcccttgggtggaaacccaaaggaacgagttttctggtgccggtcttgctgctgagctcggaggacttagaatttcctcttgagatggcctttttcttcttcccttgccctttccacttgcatggctttgtttgagaggtgcgagaagctgaggaaatcttggctggctaggatggtcttgagttctagtctgagccccttcaaaaagcgggccatcttcttgacttcggtgctgacgtcatccggcgcgtagcgggccaagtctgtgaatttgtgcatgtattcactgaccgatcttccatcttgagttagttcctggaattcatcttccttgagctgaacgatcccttggggcacatggtgttctcggaaagcagtttcaaactctatccaggtagcatctctgatggctgcgttgaaggtatcccaccaagctaaggccattccggaaagttgatgagcagccagttgaacacgctgattctccgggcatccgatggcttctagcttc

SEQ ID NO: 26046 - DNA, 443 bp, Zea Mays
tctaagataagtatcgagacattgattaatgcgctttgtttgcccgtctgtttgaggatggtaagcgctagtcatgtggagactgaccccagttagcttgaagagttccttccaaaaatactcgtgaaaatcttatcacgctcagacacaatagcaactaaaagcccatgcaacttgtaaacgtgctgaaagaaggactgagcaatggtaacaattgaaaaaggatgggacaatggaataaagtgagcatacttagtaaatacgtctaccaccactaatatgcagtcaaaactttaagaccgtggtagcccttcaataaagttcattgagattgtatgccaagcagcttggggaaccaacaaacgttggagcaagccacggaacgagtgcacccagtctaggccggtcgccctgctattgggctcagtttcctctttgctctt

SEQ ID NO: 26047 - DNA, 369 bp, Zea Mays
caggagtggttctatgtgaaaaatgatctggttgaaagggaagacatcaagggggttatccaacgtgctttatggtctcacttcggcattaggaggccatcccttgcccttgggaatgacatacaagcatgccaagctgattttaacacactatgcacttacataggttccatggacttagttcaataacacattgcttacaaagtgtggccactcagaagtgggtgggagatgctgaaggaggctgctgctcggtctagccaaggtggcttaatttacttgaagtatacgttcaaatacatgaaccaatttgatgagccaaacgacgataggctagatgccattgaagcaaccagtgatgaattgctt

SEQ ID NO: 26048 - DNA, 776 bp, Zea Mays
gaggtgtgagaagctgaggaagtcttggctggctaggatggtcttgagttctggtttgagccccatcaaaaagcgggccatctttttgactttggtgctgacgtcatccggtgcgtaacgggccaactctgtgaacttgtgcacgtactcactgacagatctttcgtcttgagttagttcccggaattcatctcccttgagttgaacgatcccttggggcacatggtgctctcggaaagcagtttcaaactctgcccaggtagcatctctgatggcaacattgaaggtatcccaccaggctaaggccattccggaaagttgatgagcggccagttgaacacgctgattttctgggcatccgatggcttccagcttccttttaatcatgcgcagctaatcatcagcatcgaggggattgctagatccggcaaacatgggaggcttgagcctcaggaaatctcccatcctgtcttttggtcttccaccattcggacgttgattttctagacttctagtgaggacctcgatgagtcgggtttggttggctagaacttgggctaaatctaagggtagttctggaggtgcggggaggtgggtctcacttccttctctaccggcttccctttcagctcttaggggaaaccctgctccaatcccggaggtggtaggcgtggttttatccgaagccatctaccaggggaagagagtcactattatgcacatgccaattcttttttttcaaccaagttattttattcattacaccaatacattac

SEQ ID NO: 26049 - DNA, 387 bp, Zea Mays
taaaaacatatgaccatcatgtagtgcagtgtaaggcctgatgtgtatagagcagtggaggacacagaagaaatagtaacacagtttattctactgaagctgttgatggttctggaaaaatttctgttggcacgggcttcacattcagatacacgcttcacattcagatgcctgtataggtgcaaactgtgcatgcctattttgttggtgagataatatagatgtaattttattccaatacaatgaagcaggctactgaaaatcttgacggattccatgcttgtggtgttattccgacaaaagctttactgagtaaattggtgacaacagtgatagccaagaccaactatttctaatccttgcattaaaactagattatcattaatc

SEQ ID NO: 26050 - DNA, 307 bp, Zea Mays
gttcgattggcttatcgctttaagtttgagaaatagttcaaagagccttgacaagagtggctagatatgattgagacaatgtgcaatgaaattttgggaaactacactaaaaaagaagatcaattaatgactgcagccttcggtacccgaccgaaacgaaggttgaaccgagtaatggacgctctgaattttgaataccctgattatgagcgactcagcaagggtgccgaagggacaaagagaaaaaaggttgtcagtgttctgaacaggcaggctgctaggatggtgaaagaggacgaaaaaactc

SEQ ID NO: 26051 - DNA, 381 bp, Zea Mays
ggtgatgagtacaagactgcattccaaacacaccacggacactttgagtatagggttatgccttttggtttaactggagctccggccactttccaaagttttatgaatagactgctggctcccttgctacgaaagtgtgtggttgtctttattgatgatgtgctggtctatagtgcaactcttgaagaccatgtcagacacttgacacaagtatttgagttgctcagccaacaaaaattacatttgaagcagtcgaaatgcttgtttgcacaagagaaattggaatttctgggccacatagttagtgcagctggcattaccactgacccaaagaaggtggaagtcattcagaactggcccataccaaaatcaaccaaagat

SEQ ID NO: 26052 - DNA, 310 bp, Zea Mays
cagtaaaatattccggccgtcgtaccaagctcaccgcggtggaatccgataagcacgccggtgaccgccgccttccgtccttgcgccacgtgtataggcacttccactgcatcgccgtgacctgctctcgctccccgttgatcgccggagtgactgccacggcgtaggacacgaattcgttgcgccagtaccttttctcttctccggccgccagcacaccctggtgaaattggacgccaccgccgttagaggctataaattgccgccaccgttcgctccgttaggtaattacgcaaccagcgaagcaact

SEQ ID NO: 26053 - DNA, 418 bp, Zea Mays
cacatattcctctgcattaaagatactggttagtagtagtgccaaacaatttcagatatcaacctttttgtcctgctacggtgacttgtttgttaaatcattggtgcaaacagagtttcaacttgaacttctcatgcagtctttgttcttctcacgggtaattttctccaagacttcaactgctgttatactttacagtatgatttgttcactgttagtacagtccgctgatgatatgcttgatttagaatgcatgacctcatagaggatttaattacaagtttttctttatcttaaaggcaagcatttcagacggcgaatgctcaaagaacttatcttgcatcaaggtcggcgggatgtttctgaggtactatatctgtccttgttactcaagactacacaagtcctgatggttgtc

SEQ ID NO: 26054 - DNA, 531 bp, Zea Mays
gcgaggcagtggtgttctttcttgtggcttgctctgtcggtagttcggtctgtcgtaattctggttgtgagtcgcatgatgtctccggatgtaagcgtgctgttgacgctggttggctggtcgagtcctgttttttcagctgtgttcctcatgtgtggcactttctggattagtagaggaacttcttttgattaatgaatgccaactgttgtattctgtcatggaatgtgagggggctaaatgacccagctaaaagggcaagtgtgaaacatacgattctctcttctggggcaactattgtatgtcttcaagagacaaagataatgagttggaataataatttactaaaggaaacattgggatgcaagttagtagctcagacagttcatttaccatctcttggagcctcaggtgggattctaattgcatgcgatgcagacttttttgacataactgttattccctatccatcagtatattcgttatccgtcagtatcagctcccgtctgagcgacgtggggtgggacctca

SEQ ID NO: 26055 - DNA, 343 bp, Zea Mays
ccaagcaagggcatgcaggacgaacacagttgccctgcaatgttggccacagacccacagtccgtgacgaccctagcgatagatggacggaccgagctgcggccagcatacgtgttggtcatctatatatagatatgcatgcatggccgttctactgtaggtatgcacgtccggcggccggcctgcactgcatgcgacgacggcgcaagcaatgtgagccctgagtcgacagtcacacgcacgacattgccatgcatgcttgttaatttgctgtcgtaggaatctgctgcagtaacgaactgcagagacgcatggaggataggcccctcgtagttacgagggg

SEQ ID NO: 26056 - DNA, 800 bp, Zea Mays
aagatttggattggttttgtattagaaatctatgttcagggatctgtttgtgagaaaatcgggacttgaatgtaattactagtgtaaatgggagggctcggatgtaaagttgttaccccaggacggtgggttgaggttccaaaaagcatagggtcaattctgcaaagatgcgaacatatatgtaatggtctttgtatagcagtggattgcgggtgaaatagagataaagtcaggggctcttttgcactattctaaggccgaaggggtacgcaatattctaaccgtccaattgaacatcgaccacccatgatagatcttgagaattatgaagtgatacactaccgcagtcgtctgatcagggatccacgatccacatcattccccactgatcgctacgctagccctaatcacggtcgttgatggccaaatcagcgggcacggttcaaaatctccaagatctaatcctatgcattcaccccgaatcggagggtcctgatttactctggttgagctagtacgagttctaatctccaccgtcggttacacgatcaacggccacacgcatcacccattcatccccccattctctggttggcggtgccatgaacctgaccacggcgccatcgccgcccgcgaccactgctggcccggcacccaaactccaccctaaagatagttatgcgttgagaagaatacgacgaagcaacggttggaggtcttgattctggatggagggtcaaacgggggggtatatacttagagaggacctcatgacggccgagaaaaccggagtttgttgc

SEQ ID NO: 26057 - DNA, 503 bp, Zea Mays
ggagccttcaccggcactcgaaggcggcacaaggttgacctcagcctcaggtggcgcgccgaccagacctccaaggtcttcgacatccttggcacgctccatctgcagcaacagcacactcattcagcaaaaccacacatacccacacaaccacacaaaaataataataaccttcacctgttctctcgcccggtcggattgctccctgaccgcctcccgaccatgcggaccccacatcctatcgaacagtgcccccgctgactgcttcaccacggggtcttcggccttaaaaatgtcatgccctaagttctcgtctgattggtcgaagacctcatagtgtctacagccctcgctggacaatgcattcatggccccctcgcaggtgatgagggaggcgaaggacataaaaccctccacaatggtcaggagcaccagcagctcctcctgcaaccattcaaggaagcaaaggcccgcctctccatcgggcatctcgaagtcagcag

SEQ ID NO: 26058 - DNA, 367 bp, Zea Mays
gggtacatgggcgtggggggtggctcgggtgcaccctaggtgatgaatatatatattatacacacacgcgcgcgcacataacatccaccctgtttagggttaggttttccaacactaattatcatggagatatataacacctaaatctgatattcttctcaatagcatgcgagagcatgacagaacaacaatacatgaagccatggagcaacagacaattagcattgcgaaggtactgctgcttttaaaaatagccagtttctgtactattcacagttactagtgtgcactttaactcagcattactacttatttgtcttccaggctggattagttacaacactcagtacaaggactactgtctttg

SEQ ID NO: 26059 - DNA, 289 bp, Zea Mays
cgaatcaacctgtttgctctctcaacagtgttcttcaaccccattgtgcctctttctcactataagtctatagcactaaccctaatcccttcccctctcgactgtctcgagcaagatttccattctcctctagtcctccctcaagttagatctcctctggtggccccttgccggtgactccggtgctttggttggtcaggtgaactctcgattgttagccttttttacttaatgtgttttgaatgtcattgaggagccagagacgtcgtggaggggccagtcacaaatt

SEQ ID NO: 26060 - DNA, 346 bp, Zea Mays
atcaaccctcacccacacgatcgccgatcaacggtcaaggtgcgttctactgaatcggtatgcccgatctaatttgcaccgcccgtttctagatctacgtcccagcgcaatcaccccaacccgagctccgctagcaatacgagcactgtcgcggtggcgccgtcagcgacgggttcccgagcaagcatcaggaaggctctaatttctaacgcgattcagtgcgaaatgaagagggaaaggtggcaggcataatggtggggagcataccgaggattagatcttcaggagtcccgtcaacagcgcacggtggaagttggcgaggtccacgacgccgacgagcaatttg

SEQ ID NO: 26061 - DNA, 407 bp, Zea Mays
gcgacggtgtcgtactccgttaaactggtctgaaccaggtgaaagatgtttcttcaggcctgatatggtaaaggaaatagaagaaaaggttcgacgaataattcataatttgaaagaagcccaagctcgacagaagagttatgcagacaagcgacgtcaacccttgtaatttcaagttgaagattatgtctacctaaaagtttcaccaatgaagggtgaatcacgttttggggtaaaggggaagcttgcaccccggtacattggcccttttcctatccttgaaagatatggaccagtggcataccgactccagttacccgaaactttgtctgatgtgaataatgtgttccttgtgtctcaattgaagaagtgttttcgggttcccgatcgaaccattgaagtagcgg

SEQ ID NO: 26062 - DNA, 290 bp, Zea Mays
caacaagttcaagtcaacaacgcagtgcaaagacatgtcacccacaggacgccaagacatctcccctagaaacacgactgcccccggctcaatagcatgcgtctcttaggtgtataaatagggcagtcataactcctccaaggaggcaggcgaatgactttgtagtttttctcatgtatttcggtattggcacttgcctcaatcagttctaaggacttggggacttcccctctcccgtcgtgcttgtaatccctactacaggcacctcggtgcgagtaatataagcctca

SEQ ID NO: 26063 - DNA, 426 bp, Zea Mays
ctgaccacggcggagggcggaattgcggtggttcctctacttcggcgagaaattgccgcgcgactgcccaagttctggggggtaaggtcatgacaccattgggacacctctacgaccctcccaagccatctatcgaggacagagcgactctggacacaagccgtcgacggcgctcttccgcttttctctcttcctgccgctcccgagctccgactgcgtcactcccctcccgatctctctctcacgctcggtcgcgggtagcatgcgttgatgggaggaaaagacggcagcccaagcgcccagtcttatagccccgaggaaggccgggcgaggattccgccggtgcccaccatcatcgcgcggtcgttgcggtgaacctgtagagggggagatggcgctggggaagtgtggggtgacgcctggtca

SEQ ID NO: 26064 - DNA, 462 bp, Zea Mays
cgtgcatgtattgtttgtcctagcttgtagaccgagctagcagagagagagagagagagacgctaggatagacttgcttgagaaggctagctcagtgagtgcccttgtacctacgtagtgtgcactttgtgaggttttgcagtctgctcttgagtcctacatacacgataagataagaatcaaggaagaaaacacataccttcgatctgtcttgagctaggtgtcatgcagtgagccctagttgggcatgatggttaatcagttcaagaggggaactagcagaccggggttaggctttactgctaaggatgggagtgtcacttgttttggtaaggttggtgagtgcagtggcctgaaacccttagagaaacctttagccacgccaagcttgtcaagctcactccacccaaaaatgccactcctgctgtgagagatgttgtgattgaggtgcatgtgagagcc

SEQ ID NO: 26065 - DNA, 376 bp, Zea Mays
tcgggaggatgatgacagcgggtggccgttggattaaaatgaacggttgtgatcaattgctacgtcgcgattcagctggatcgtttgggaccatggatcataggatagagggacgagattagaccggggatgtaacccttcagtcattggatctgggccgtcgatcttgcatcggacggatcaagtttcttaccggttcgtagtggccggaattctaatctgggcccttgggtctggatcggtcggctcttgtgacccgataccccttcgtggcctcaactttactaaagaacccctggcttttgcactactcaacccgtggtccccatatgtgtaaagattatcacgaatcagccctgttatttgcaaattaaac

SEQ ID NO: 26066 - DNA, 370 bp, Zea Mays
aattgctgagtatgctggtcaagctcttggcattgtggtacttgccctttcatgtttgtagtataacaactcacaggaattttgttctcttaaaaatctctttgataaaagacaatcatgaatattaatgaccatatcagtattgctaaatcattacctcttcctcagattgcagaaacacaaaggtatgctgacatggcagccaagcaggttgttattgaatatgacacagaagatttgagcccaccgatcataactgtggagcaagcagtggaaaaaagtagctattttgatgttcccccagaattctatcctaaagaagttggtgatgtttccaagggcatggcagaagctgatcacaagatcccat

SEQ ID NO: 26067 - DNA, 449 bp, Zea Mays
cggtttgccttctaaaaccgggtgtgacacaatctaagaaagacagtacagaacatccggcggtcgagtctaccacctggtctattctaggaagtccgaagggatcctttggacagtgtttgttgagatccgtatagtcgacgcacaggcgccaatccactttattctttttgagtacaagaacaggattcgctaaccactcggggtgtaatacttctctaatgaatccggccgcgaccaagcgagccaactctgctcggatggcttctctcttgtcaggcatgaagcgacgtaatttttgtcggatcggcctcgcctgggggtaggccttcaatttgtgctcggccagttctctcgggactcccgggccccggcatatccgcaggtttccatgcgaacttgtcccggttatcttgcaggaactggatgagcgtgccttcctatttgtc

SEQ ID NO: 26068 - DNA, 315 bp, Zea Mays
ggatgctatggctctggtgtgcaagtttggtaaaccagacatctttcttaccatgacatgtaaccctaactgggatgagataaggagggagcttctccctgggcagacaccgcaagatcgtccagatcttgtagtgtgtgtctttcatgcaaagctacaggagttaaagcataggctgactaaacaggatattcttggtaaggtccgagcctacgtctatgtcgtggagtttcagaagcggggtttgctgcatgcccattttctactcataatgcagaggaagtacaagctcacatgccctgagcagtatgacct

SEQ ID NO: 26069 - DNA, 307 bp, Zea Mays
gctgatgctgctggctgctgctacagtggttgcttgcgggagcaggactgcagtagacggaccgggaccagagcaacagcacagggctgcagctctagcagccttgccgctgcaggtacacggaccacatccactacagtattgcatatacacggaccacacgacacggcggcctggctagctctctccagtttgcaacgggcgcagcgagcagcagagcagagtgaggcagaggaccaccacaccagtacatgcacgccgccacacagactagtatgctgctgctgctactacttactactacgct

SEQ ID NO: 26070 - DNA, 430 bp, Zea Mays
tttcaggagaatgaggcagtagtggtgatgctagaacaccccctgaatgcccaccactagctccactgagactgtgtccaatactcccagtgccagaatctgaaaaactggtagatggcctacctgagcaggtatattatactgaaactgtatttcacaagttttaggtacacttggaatctgttcagtactgttttcactgtcccaattccaactcttatcttcctcaaacagaacatctctgctcacatgtagcctctcagaggaaggataaaaaaacctgtgacccttcgtgcctgtctcagacatctttccaaggccagtaccaattttcttgacatgacatacacaaccaaaagttctaaggtgaccaacttgtggtttcctgccatgccatacttcataaggagttttgcctttaatactttta

SEQ ID NO: 26071 - DNA, 275 bp, Zea Mays
ttcctcaaagataagggaataccaaggtacctacaagttacaagggaaattgagcacctcacatggctgcttttctttcacaacaagaatatccaatttcgagctctggataggaaacacattgctcttctacacattggttttgagaatagatgcttcaccaaaataaacaaatgatgtccacggttatctctatctggctgtgggcaggaggaaaacaacaaagtcatcttcatatagagaaatcctatgcggtaaggcatgtgcagcaaggg

SEQ ID NO: 26072 - DNA, 337 bp, Zea Mays
taaccctggcgatgctataaccacagttgctacctggagtatgtgtctacttgccctaagaattaccacgagccagtcattagcatagtgacaacctcaccacacttgaagcatgtggtgcctgtagcagtgccatggccagtaggtcacgtcggggtgctagtgggggcagcctgatgagtatgcggagtctatggtgtcacgtgtggtgtctgctaagcaagtcgttggtaggactgttgcccttctccaggacaagctggtgtaaccttgggtggagcatagcaagggcggatgctactgctcccctgaccgtgggtgatatccttcctcttca

SEQ ID NO: 26073 - DNA, 902 bp, Zea Mays
gaagaaatctggccctaaactatggctgtcaggttaactgaatggagcatcccatggtacaatgtcttgtgcagatcagaacgccagcacggcaatcttgccgccgacgaccgatctctgccgcaattcacgccgccgccgttgagatttacgccaccagtgaccagataaggccgccaggtaaaagtcatgcgcctaaggttaactccggtgactcgtcgcggtacctctccccttactcaccgcccttggataaggattctcaccgtcgttaagccatcgccgttgtctgccgcgtggctctaactttccaccgcatcgccgtaagccttagtggctccccgttgatcgccggagcaattgccacggcgctggacaccaagccactgcgccagtactcttcttcctcctccgaccgccgcgcgtccccactgaaattctcggccaccgccgttgagccctataaattgaagcccccgccagccccgcaaggtcatcacacacccagccaccgaaaagcactagcaatcgttcgtcagagagcttgaattttagttttcccccaaatcaagtttccgccaccgcagaaccaagctcactgtggccagtcctccacaggtttaatcataccatccttgttcttgttttagcatctctgtgtgctggtgatgctcaccaactcgcccaattgagctaagatcccatcaatcactgggaacgtgtagattgttagttcatccgcgcgctcaccgtggccagagacattggtgtagttgtttatgaaattaacttggggaaaaccttcactaggccctgaatttggtttagaccaacgtagagcgccagtacttgccccaatcggccgacctacgtgcttgccggagctcgaccgcgctcgacgc

SEQ ID NO: 26074 - DNA, 573 bp, Zea Mays
caaagaaaatgaactagatctctcctaatcccactttggatcaagcgcaagtccagagatgaatgggaggttgtcgaggaaaagatcctcaggcccctacggtccgctggtcagcagaaaggtgagggaaaagtctaccctggaagcactcgccccggatagccccgaggcacttagcctggggtcaggcaaggcggaggcagagagtgaccgagcgagccgagaggaagccactcaagtggattccgcgcctcacctgagactgacccactataagtgaccgaccgcattaactccgcctcgcattgagccacagtgggagagtcggtcctccttccactcatgacctatgagcccctaggcttgtgacccactcatgacttatttagcctaggcctgagtgcactagacgtctataggacccacaatacgaagagccacacctagactaggggtcggtgtgacacaaagacagtaatgatagcgctagagctcctcatcgcccatactgcctgacataaacgacgcagccagagaagcccaaacgaccaaggcacaagccaacaagcatga

SEQ ID NO: 26075 - DNA, 385 bp, Zea Mays
gatacctctaacactgcgacactatgccatgaacagggaattggccctagtacaacttcacggacaggataagaacagagtagttgggttttagccagtgagatctgaggttcatgttatatctctcctcccttgcactataaaaaggagtggttgagtaacgttttaaggcgtccattcgattggattcagactgattccaagccaatagaatttcctctacaaagggcaagcataaaggggggttaggatcagtaggctagaactcccacaaccaagagatgagagggagctaggtcttgatgctcactggtgttcaagctcgtaatattttccttctttatgtttatcaatcgatgagtagcaaaagaacataggatatgtt

SEQ ID NO: 26076 - DNA, 452 bp, Zea Mays
tgtagaaacaaaagaatgtgtggcaccagtatcaaataatacttttgctagataggattcgactggaaacatatctactgccatgtcctgagcatcctggattgcttcggcctccaagtggttcacctttccacggttgtaggcctgaccatggacccctggtgcttgatgtggcgctctttgtcttgctggggcattgactgctggcggttgctgagctgctttcttgggacagttcttcgcccagtggttttgttctccacaatagaaacatgcacgacctcccacttgcgctggggctgcttggccattttggttggttgctagggcaggaaggcgagctgcctgatggttctgacactggtactgatttcctgcaagttgggtgctctgatagtactgctgctgctgctgtcgagaaaactgcctctggtactggtgctgatgctgac

SEQ ID NO: 26077 - DNA, 621 bp, Zea Mays
ccctgatcttctccgggtttgcttcaatgccccggtgtgaaaccaggaatcccagcaacttcccagcggagacaccaaagacgcacttgtccgggttcagcttcgtgcgtgtcacccgtagcttgtcaaagaccagggccaggtcttccaccagagtcgaccccctcctagtcttgaccatgatgtcatcgacgtatatctctaccatgtccctaattagatccccaaaggtcttactcatcacccgtacaaatgtcggcaaggcgtttttcagattgtaaggcattacgacatagcagtagagccaatccactgttacaaaagcggtacgattcctatcttccctagacatctggatttcatggaaaccagagtaggcatctagaaaggacaagaggtcacacccagaggtagagtccatgatttgatctatgcatggaagtggatacgggtccttgggacaagccttattcaggctggtgtagttgatgcacatccgaagcttctcgttttcctttggaacgatgactgggttggccaaccacattgggtgatgaacctcttcgatgaagccagcatcaagcagcttccggacctcctcacggatgaagtcctgccgct

SEQ ID NO: 26078 - DNA, 370 bp, Zea Mays
gcgccatgtgattgctatgtcgcgctctccattaatcagattgctcccgttgagtcagaccgtcatcgctgagtcgcatattttttgaatgccctgtaggcactgtctgtctgacgcgagccaaaattgcgcctgttgcgcacgttgcgtggatttatcgtgtaccccaattactgagccataattatgcctgttgcgcttattacgaaggcttgctatactgtcgtagccctgatggccgcaaccgtgttgccgccagatacgctggagcttgtactcgcggaatgtggtgggttatccgagcccctgaagtcacagcatagcgcaaccttcgtaaataatttcgtttggctctatattttgtttgaca

SEQ ID NO: 26079 - DNA, 618 bp, Zea Mays
aaacatggtatgtcaggctgactgaagaacaatcccatggtacagtaaacagataggatcaggttctgatcccctcgccgccgacgagccgcgcgcggattcgtgctatcaccgtggtgattcgcgctcggatcagttggatagcaccaggggtaagtaaatatcacgccgtggatacactccgaccactattttactccggccaccgtacccgagcagaccacagttgatttggatgggtttgccagagatagccacttcgcggccttgcgccacatgccttggcatgttaacctcaccaccatgactcacattagctcgtccggtggtcgcccgggagcttgccactgtaattgccaccgatcccgagcgctagtaaccttcttcctctccggccgccagcgcatcttcgcgaaattggacgccaccgctgtgggagcctataaattgccgaccccgcctgattcgctaagtaattgtgcacccagtagagcaacccgtgcctcgaatcatccactagaactccccagtttgagatttcctccaaatcaatcaagaacaccgagcggtgtgacctcgccgtggtcagctcgtctcaggtccgctcataccctctgc

SEQ ID NO: 26080 - DNA, 350 bp, Zea Mays
ctctggccttcgtctgatagtgaagctcgtgcactcggcagaaggcttcggcattcgggtctattccctggcttcggagagcccagataaagacgctgagcctaatgatagcgttaggagtcagctgatgaagatagatctcgaagttctccaaaacttctccaatcattttgttcaaaggaaacctcaatcctgctctaaagaagctcctaaaaactaaaacctcatctttttctggtgtcggagtggtttcttctccaccaaaatgaatcagcttcttctcagcttctccgaagtatcctagcttcaccatcataggcatatcagcctcagaaacggtagattttcca

SEQ ID NO: 26081 - DNA, 298 bp, Zea Mays
cgatcatgtccgagaactcaagaattatctttggcgtattgctgaagacatcgtggtactagaacttttccattagaccatcatcgaagtggctgatcatgttttggtcagaatgtccattagggtaaagtgaattttggtgaagcatttgtagtagccacatatgctttttccatccttctacttgtagttttgaggatcgtgcttattggccaaacgaggccatgcactttggaagttgtccatgatttctttgagagagctagctagctatcgatggccgctcaagccaagttag

SEQ ID NO: 26082 - DNA, 1819 bp, Zea Mays
tgtccggcatcgagaacgatcagggggacaccatggcgatacacgagaagctggatcgcctcctagcacaggtgaccacaatgaacaagaggatggatacccatgaccagcatctagcgcaggtcgagggtaccatcgcagagcccaccgacgctgattttccgcccaatgcggacgctgaatcaggcactttcagcggctggaacgacaggaaccgtggcggaagccgtggcggtggcggacacactcagcagcaggacagcggatataggcggccgaacgttagcttgccaaactatgatggggagtctgacccccttacatggctgaacaagtgtgccacgtacttccgtggcatgcgcacgccgacggaagaaagggtgaggatggcctccttgcacttagagggagtggcggcggaatggttctacgcactggaacgcgacaacagcgtcatttcatgggcgcaattcgtcgacttcaccaacctgagattcggcccgccaattcgctccaaccctatggccgaattaaaggacctctaccgcaccggcactgttgaggaataccagcggcagttctcacttcttctctgccgatgcaacgaccttactgccatgcagcaggtcaacatgttcacagccggtcttggggaacccctgcgcacagatgttgaactacaagctcctggaaatttgcagcgcgccatgaacctggcaagggcctatgagagaagggaactggaagcaggaaaaaggggaggatacaaagttgctgggaagagtttggtattcaaggaagccagcaacagcgcaccatctaaggtagctgctgcaccccggcctcgattcaaacggctatcaccggaagaactagcagcgaagcatgcaaaaggggaatgctatcactgcacagagaagtactcagtggaccacaaatgtgttgctcgaggggttttcttgctggaattagaagatgacactggagaggaggagacagtggccgagctgggcatatcactgcacgccctgacaggaattgatgtgggggagactatgaagcttacagttctaatcaaaggagtaccactcacagccctggtagacaccggttccacacacacattcatcacagaagcaaaggtgtctgagctgcagcttccattggaaaggcgccaaggagcagtacgggttgccaatggagacaagatcaccagcccaaggttctgcacaggattatccgtacaaattgctgaagagcggtttgccctgacttgctatgctctaccactagaaggctttgatgtggtgttgggagtccagtggctacgttccttaggcccaatcctatgggacttcgaacgtctatcaatgacgttctggaaacaaggacgcaaggtgtgctggacagggatgggtagctcaaaaccccgctgttgtgtagtttcggagggcaaggaattattggagaacttgctgcaatcatacggagatctgtttgaagaacctcgtggcctaccaccagtccggcgccatgatcaccacatcagactactacccggcacatcgccaatagcggtgcggccataccgctacccccagctcttaaaggatgagatcgagaagcaatgtgaggacatgctgcagcaaggaattataagggaatgcacatccgcattctcttccccagtgcttctagtgaagaaatcagatggaacatggcgattttgtgtggactaccgggagctcaatgggaagactgtgaaggaccgttaccccataccagtagtggacgagttgctagatgagctccaaggttc

SEQ ID NO: 26083 - DNA, 370 bp, Zea Mays
gtggaagccaagtcgtgatgttgttaatggtttaaagcaaggaagcaagtagaagaggaaggcatggcagcactgacgcaaatccctagcacttcttggcttcctgcagcgtaagctcttctcattcaacttcctttggggcatgagcatctactactaggaacattaaaaatatttgtagtatgcatcttcatctcatattattttcaattccagatctgagatgtaagtgtgtgaatcttatcaaccacggatcaacagagcagagcgcgactcggtcacgtcccctgaaaaggatggaatattcgcaaactagccatgatttactattgattgtttaatctctttgacagaagcattaatatagaac

SEQ ID NO: 26084 - DNA, 518 bp, Zea Mays
tcacgggagaatgtgaggtacgatcttggacgtggattcgagcaaatgacctatgggacggtcaccttgcctgtggctcgctaggagcatgctcggtccatcccttgctctatgtgggatttttgaatgcattttgatttatcacctagctatttcgagacagttactattgtggtgcggtaataacgggtagccatcatgatgttacttggtgtgagcgacctgatgggacgtgaaatggttcgtctgtcatgtcgtgcttgggttgcgtggtggtctggctaacctccccggtcgttactattgtacctctcgtggcttatcttcctggtgctctaccccaggcggcgaggtcctgcaaaacacatggtctctttgctctatacccgtggttcctccatcgtttgttcgtggttgtccctggctttgcataaataaaggaagagtgtgctcaaggtcagtttacgcttaccatacccttgcgttatgccttttggaacctctcgtgttgttcttcc

SEQ ID NO: 26085 - DNA, 363 bp, Zea Mays
gaaaagtggtggggaggtctgcaggagatgaaagaagtttgctatgtctatggagagtgggcccactacgaaaagaactggagggatccaaaacaatggagggaaatatagtatgtcagtatactaaattggagggaaataaaataatgggagggaaacagaaaataataccttaattatttaattaattcaatatggttttcaaatattttgctaaaagctgattgtgtaattcaaaatacttgtattgttaaattttaaccataatacagggaagatttgttacacaattataatattaatgtacatttcaattgatacagtcgcgcaataaattgatgaaacacttgaagcagatcaagc

SEQ ID NO: 26086 - DNA, 898 bp, Zea Mays
tctcctttaggtggccatccaatagcactgtgtatgcaactacatcaggcttgattcctaaatttatcatttgaacaaataagtcacatgcttcttgcaaccgaccaaccttgcaataaccattcatcagtatagtgtatacaatgacatcagaaagtcctctttcatccatatcaaggaaccataagtgagcattgtgcatatctctgttctgacaataagctgaaataagtttgctatatgaaattacatcaggaataacattcttttccagcatcatactacacacggttgaagcctcctcaaccttttcatctatgcagaggccatttatcaattttgaacatgaaaattgatccaccatatttccttgtttagcaactctaagaaaaagtgcgtgagcatggtcagtccagcccgagtgcaaataaccacaaaccatagaactgtacagcagttcaatattatctatccctttttcttctactatattaaataatacctctgcttcgctcaagttgcctcctctacaaaaactagtaatagctacaccataggtgagtgaattaggctccaacccttgattcatcatgtgctcaagaaggtcatataccttaataacagtgccattcctgctatacccactggccaatatgttatatgttactacatctggttttacattttccttcagcatctgctcaaatacttgccaggcattttccatttctcctttcagacaataaccattgatcaggcatgtatagtggattttgtctgggaccaaacctcccgccatcatttcagttagtagcttaactgcctcattcatgttcccaagcttgcaataagcatccatagcaatgttataaagaacgccgtcaagatggagtcctag

SEQ ID NO: 26087 - DNA, 426 bp, Zea Mays
agggcacagattagatccagcgcccaccaatgacgcgagttaatctaggtcgtccgatcgggcgccaacgctctagattaaatctcatcgaagtggtatactagttctgatctggctcacccatagcgagatcaacggcccaaaataacccatcgaaggaggcactctggtgatctaatctaaaccgtgagcctcgcatccaacggccacgaagcggtcttctccctcccaagcgcacgcacggcggcgcccgcacagcccacggtagtgctccccggcgagccaccaacccagcacacacgcaatcctacgcatcgcatgacaggtaaaaacccaaattaggggttcggcggagacatgggaaaggttattaccttcaatggctatgtggagaacccggaccacggcaaaggggcggcttggcgg

SEQ ID NO: 26088 - DNA, 274 bp, Zea Mays
ccagaagacccaggtctctccagcctccaggagagagaggagaggaaagaggaaaaaacaggaagcaagaacaactagacaagtgaactttacgcagcaaattatatcttaaccattggttgcaaataattgaacttcaagaaatttaagttttgagttgctagtgctatatataatacatgcatatgataaaaggaacaaataactgaaagtaaaacagcatctattcatgctcaaactaaaagcatatgtgtactttactatcttatcttgg

SEQ ID NO: 26089 - DNA, 433 bp, Zea Mays
ctaaggcatgacgtgacaacaatgttgtcccaagagaattcagcgaatgggatttagtactcctaaggaccaccagaacagagtcccggggcaagctagagccgaagtgggaagggccatacatagtcaagacaaaggcatccccaaacgcttacaggctaacaacatcatctggcgaagacttagagcattcgtggaacatagataacctccataaattctttatttaagatccaaggcccaagcgcctttgtaattcttcaaacaatgttactcaggcccgcactcttttcctcccagggggtgaggtttttaacgaggcagagccatgtaatatacggccaaaaagcccccgcaaaaaatccagccagcatcatgagtgtcgaaaaagaccgcatcgacggccttcgacattcgtcatacaaaacagtca

SEQ ID NO: 26090 - DNA, 767 bp, Zea Mays
gctctccagtagtacttctgtttctggttgtaggggatcttttgagcacctctgtcatgcttgtcagttaggtcgccatgttaggctcccattccccacctcctcctctagagcagcaggcattttttatctgatacactgtgatgtatggacatcccctgtaatcagcatttctggctataagtattatttactcattctcgatgacttctcgcattatttgtggacttttcctttacgtcagaagttggacacttttcccaccatgtctcacttcttcgcctgggtctctactcagttcggtcgcaccatccggagcctccagtgtgacaacgggcacgagttctataacaatgcgtcccgtgacttcttcctctctcgtggcatccacctccgcatgtcatgcccctacacgtctcctcaaaacggcagggctgaacgtatgattcgcacgacgaacgatgtcgtgcactctctcctctttcaggcttcccttcctgctcactactgggctgaggccctcgccactgccacctacctcctcaaccgtctccccaccaaggcagttgcccaccccactctttacttcgctcttttcggcatacacccctcctataaccatcttcgtgttttcgggtgcgcttgctaccctaatctcgcctccactgctcctcataagctagcccccgctccactcgcttgctaccctaatctcgcctccactgctcctcataagctagccccccgctccactcgttgtgtcttcc

SEQ ID NO: 26091 - DNA, 272 bp, Zea Mays
aaaatcctgcaagtccaagaaaactccgcacttgtgtcaccgtcgatggcgttggccaactctgaatagcatgcaccttggcctcatcaacctcaataccctgtggagtgacaacatagccaagaaacgatacgcgttcgatgcaaaaggtgcatttgtcaaggttagcaaataagcgcgcggcgcgcaaagcataaaaaatagcacgtagatggtcaagatgttcagataaacaagtgttgtagatcaagatatcatcaaaataaaccacc

SEQ ID NO: 26092 - DNA, 287 bp, Zea Mays
ggaaaatcagctgcagcggcgtctcccgcggcgactgcaaaatagggggaggagagagaaacactattcttagcgttcaactggatacgaaaaagtggaaccggaggcagggcgtgaggcggacgtggccggaggctgggtaggagagagacgaaaataagtaatagaatatgtggaagttggtatagggtagagatttaaggtgaatatgactgcggaagattgtgaaatagagtagagaatttcgctgaccagaatgaaatattctttttagagtagaaatttag

SEQ ID NO: 26093 - DNA, 339 bp, Zea Mays
catccggaaagtccgacacaaccccgatagcctcaagcgggttggcctccttactatcaaccgagatctggtgacaatctccctccgctgatttaggcatccttagctcagccactacctcctctccggatggggacttcaatgttacggtcctcttgtcacagctaacattcgcttcatatttcattaaccaattcatccctaggatgacatctactccaagggtgtctattactattaggtcactggggaaccctatcccccttatttccacccttatacttgggcatattctatctgcttgcactttaccaccaaccgaattaatcctcatgggcg

SEQ ID NO: 26094 - DNA, 319 bp, Zea Mays
ctttcggaagtcgtaagattgatgaaaaccacaaggactcttcaactgttacttgtggcgagtgtatatcattttgctcaacatatccagctatcctggcaaaggttctttgttctttcttatggccagaaatcttgatatcaccttcaatatatccacctgtttttctaccagctaaaacgtcaagaagggtcgtctttccagcaccacttgagccaaccagtgctgttaagacacgtggcctaaatactccacttacttcagatagcaactgtagtcttttctctcttgatttcatttcctatatgcatgtagaaac

SEQ ID NO: 26095 - DNA, 326 bp, Zea Mays
gtttgagcaacaaaaagtggagatggcgggtcaatttcgcagacaacagctcaggattgagcgtaaaagttgtccattgaacacgagcgtttgtaacgatagaaacaaattgaagggaaacataccttgccaattgacttgtcgacttgcaatcttcttcagcgtgaatattacaaaacgatacaataacaaatcatgttcaaaattaaaggcagtgtaccgagacgtgattgagttgttgttggaggttgtttatatcattgcttgtgagaacttatgaacttattagtttaaatatttgcatgtaagtctgccactggattgta

SEQ ID NO: 26096 - DNA, 352 bp, Zea Mays
ctgtcgggaaagatcctccgcttttatcctctttgtcacaacttttcttaaaactcttgtatggctttcagaaacattacgcttcttaacagctggcataaagtcatcgtcatcagaatccacctctattgtttctttgatcaaagtttgactgtcaacatttggaggatttcccacaatttgacttggattggactgttctgcgcacggaatgtcaacgctgaaacactcctggcttgactgaattgttatacgtttgggattattcggaggacggtccacgtgcttcatgttttttagtcaaaattgcatgcataatacacagaactctaaacattaatctgttggatat

SEQ ID NO: 26097 - DNA, 436 bp, Zea Mays
caaaacaccgacagttggggcgcaaggtaagggccttgcgctttcccgacgaagttcttcgagctccggatgtctagccgtgatgccatcgatcccccaaagtggcaatacgttttgggagcctcgacgcttccctcgatggcaaaggcgaaggtgaagtgtgttaggggcccggaagcctgaccccctccgccgaggagtctccgaacgaccgcaagggccaacagcggcccccacatcgattacaaccctgaagcagccatccgcttcagaaacctcgatattgtcatcaaccaggaggatgatatggtcaggtcgatgcccgcctgacctccttggaccgagaacctcgacaccgtctcagaggcccttagcagccttagccttgcccccacgcgggtggtgtgaggagcacaaactaaccccaccttctaat

SEQ ID NO: 26098 - DNA, 596 bp, Zea Mays
tggctattacactgttcaggtgaatttcaatggatagctttttttcttctagaatatgcacgacagcgtattcagtatctttttcggctacatatatgtgttacatgctcgtacctttgccttcttatagggcaaagaaagatgtctcactgaactgagaaatgagcttaaaatattggagactgaacatgcagaatgtcttgtgaaggcgagatcaaataagcaaatcaagtctttcaggtgaaatatttagtgattagtattggttctcacagtaaaacatatatgatcaaagacttctctgttccacaactccagatttctatgatttttttttcaattttgatgctatttgttggcatgtcgtacttttcatgtttctgtgtggcctagatatctattttcatgttcttgtttctttgtattacctaaacaaactctcctaaatattgaacatcgtcgtactagatatattacaaaataatttacgtgaactgatgtatttcttgtcacagtgtcggcttgcactccaaaggaaacacttgcaatactgaagttataaaaggatttttcagatcttgcctgcatactaccag

SEQ ID NO: 26099 - DNA, 522 bp, Zea Mays
gtacgacacagttgtcgccctctaccggacctttgagattgaagacaccccttcgagcagttccccgtggagacgcatgcttgcgctgagtggccacatgcagagcaaactccgtgaggctttgcatacaggcatgaagcgggcatgagtggttgatctcgagtgagcgagcgagggctacgtcctcccgaaaggtgatgatctcaccgaggtggaagttcggaggcttgtggacattgtcgagggggcaggctcgacgctggcccaacactttgatgtggaagtggttcctcctatgtcttcgctcaacactagatcttactctgttgctacgcctcccagtgacaccgaggctacctaggccatggtaggtgatgctgaccccgagggcactgcttctccccctgatgcctgagttgccgatcttgcgggtccatgtaaaaaaccttgaagtctttttttgtgaatggtgatgtacgaagaattttaactttttacgttcgttgtgcgcttttttccctt

SEQ ID NO: 26100 - DNA, 628 bp, Zea Mays
gtcactaacccaagtaagtgatgcccagagctattcgtcgtggtctctacttcgtttagcactaggttgattcaggattgggcgtcggacggtacgagcagagcccccgccggcgaacctccgccttgggcactcgggtgccgccgtggccggcccgtcgggggagaagaagatgatgcgtggggccgttggatatccatcatgcggtcgggattagatgcaggcgtgtgaggttttgagccatggatttgcggatcaggggccaggatcacccctgcataccccttttcgcttgtgagatcgtgaccattgatcgcgtattcgacggcttagattagatctaggggaaagttggccctcaaccgtcgatcgtgcagggaatggcctggatcaaatctggcgtatcccttcatgtcattaaatccgaaccgtgattcccatatctgacggcctcgatgcggtgccggttcgaagttaatctggacctaatccgcaccgttcatttgcaatcgtgcgacccagataccgccataccccttcgttgggtagatttgcgtctgaacccccgcagaatcacaaaaccaacccgccgtcctcactcactatttattgagtctagggaatcttc

SEQ ID NO: 26101 - DNA, 291 bp, Zea Mays
tttcaacagttttctttggagttatgctcgaagacttaattgtctttaaaacatctaatacattaaccattctttttctttttggggttacggttggacctttctggctttttcctgtctcaatctttgtcgaaggacttaaaacctctgatgtttttgctttttcagtccttggttcttccatcttttctattgctggcacttcggccagccctttgatttctggcagcagagtctttggttcttccaatttttctgttgctggcacttcggccaactctttgatttctg

SEQ ID NO: 26102 - DNA, 662 bp, Zea Mays
aagcctagttgttaagaagaatttagagataattaagctcaaagtcgggctgtcagtcaatccctggactgaattttcagtaacagtgtgatgggatgaactttgagctcgattttgaatgggatttagtgactatttgatggtaagcattgtggcaaagttgaagattaactatagctctacaactttggtacagaggtttgatgaagttcacatgcaaattttagagaaaatgtgacctaaacatgatctgtcacgtgctctgatgaggtctcgccatggtacagtacaccgagtggatcagaatgccagcgtagcttgctcaccgccggtgaccccctgcgcgaagattcgcgccgccgccgttaggattctcgctcgctggtaaccggataacgcttcgagtagaacagtcttcgccgccgtgagctggaagccaccccggtcagccgcggtactcctcccctggctcaccgcccgcgggtaaagctgctcaccgtcgtcgtgccatcgccgttgtccacctcgtgtcctaaacgcgccaccgcatcgccgtgactccctctaaactccccgtcgaccaccggagttactgccacgacgatgaacacgtgttcactgcaccagcgttcttcctcacttccgaccgccgcacatcaacg

SEQ ID NO: 26103 - DNA, 417 bp, Zea Mays
tgtttttgcttgctcatgcaatcctacagccttgtaaaatttcagaatttatgtctatacgtactctgattctatcttcatgatgaaattttatgttcttggtcattttcagaactagcatatttttgctgtgcatctccacagacagacctaccagatagtaaccgtcagtcagattaaactgtcttctgtgtgcagtttgatgcattggagaagttgaatgaacactctgaacctgccgagttttgaaacaaaagataaacatacatcagatatgcttattgcatgacttaatgccaaaacggacacagaaaaatgactgactcctgcccattaatgtcgggtgtattttggttaggtgaaagtagtttaatgtcgatttgactgtcgatttctcttccaatatatactgtcaat

SEQ ID NO: 26104 - DNA, 295 bp, Zea Mays
catctctggtccataagggttggaatctaacacatgtatgcgtccaatctgaagattaacaacatacaatgtccaatgtccagatcgtagcatgggtaccattatctacatgcacacaaaatggaaataacaaatgttgaatacactaaggttgatatgaatgattggattaaaatttaaatgcagcaaaatgaggtgagagtgtgatgggtgaaggaacagaaattaactgatttgtagtcatccaactgcttgaatgaaggcagtgtcttcaataggtaactctccaaaactg

SEQ ID NO: 26105 - DNA, 302 bp, Zea Mays
ggggagtctgcctttaaagaggggttcatccctcgagtagcagccatgccttgcttctctcccactcacggcgtcctctcgcctccgagcgctctgcgcccctttgccttcaaggtctctgctttgcattgccatagtttgtcatggccttgtaagttcatcccgagcgtgcccagactgagtgagtgctcgacatggtataccgcctgcttggatgggatgcgccggcgttcggcggaaggatttgcgccgacgccatccatcccggtgaacttgccgctggagagttcgtgcctttcgtc

SEQ ID NO: 26106 - DNA, 293 bp, Zea Mays
ggagtcttcatgaaatgcattccctcagctactggaaagcaacttctggatgaggtccatgttggacaatgtgggatacacgcagcatctaggaccctggttgggaaggtctttaggtcaggtttctattggccaacagcgaagagtgacgcagccgagttagtccagaggtgcgaagcctgccagtacctgtcaaaacagcaacatctactagcacagcagttgcagaccatacccataacttggtcgttcgcgtgctggggattggatatgatcgggcctttcaaaaaagc

SEQ ID NO: 26107 - DNA, 459 bp, Zea Mays
aggcgccatagggcccgtgacgtgcgccgagcccaagaacgtgctgctgtgtgcatgacaagcacgcagggcacgacttccagcagcggctaggagggaaagtaggggatctttagctattttggttagtccttaattagtggagtttgttactccttttggttgagccgaaaggctataaatataaagatctttagctattttggatggtccttaattagtggagtttgttactccttttggttgagccagaggctataaatatgttgtaatcaaacacttgggaattaagaaagatattaccatctaatcctctctcttcctctacctaagctggcggcagagggggtaacccaccgacgaagaatggcggcaagggggtataacccggccggccatcacggacagcggctacgatctacgtagctaaggtccccctaccctcgggctcactaccct

SEQ ID NO: 26108 - DNA, 310 bp, Zea Mays
ggaggggctatgcagggcctgctcggtcatgagactcacctgcgtcgatggcgatgtactgccggaggaggaggaccgtacgaaggtaatggtaaccgtgtcgaagagacgcctgcacagagggatttggatctgaggaggaagtgaccaggggttatgcgatggatggtaggggtatgtatataagagaacgcgggaggcagttgccaagtttgccgcgggtcgcgttctggttgagcgagagagactgttgcgcgacgaattgcgcgagacagtataagacggagacggagttagacgggtggtggat

SEQ ID NO: 26109 - DNA, 1370 bp, Zea Mays
gaagaaggataaatccaagaagaagtggaagaagtccgtctccgacgtcgcgggcgtcctccgcgtcctcgacatctaccggatggccaccgtcaggttcaagggcgatctcgacctctggttccggtacctcgagttctgccgcgacaagcgacacggcaggatgaagcaggtatgccaccaccatcaacagtccaacaccagaccgattcatctttagttggttgctaagttcaaagttcacctctgtaacttgctgctgttctgctcgatttcacagatgtctcgttctggactatacactgacattctgctatgctcacaagaagatcggggaaacctgaaacctttctatgcctataatgtgctatattccagctacacatctagtacgacgtggggccacacactctaatttggccaacaagttattagccaattattacaatttgcattgcacgttcttcatttatttcttatcaagtaggaatgttcaattttgagctatgatcataaggaagacctttatttgcatacactggcaaactttgatgttgttctgtccttatgcttgtcttcttacttcaggttctggcacaagccattcgcttccatcccaaggttcctgggctttggatctatgcagcagcatgggaattcgatcagaacctgaacgttgccgcggcacgtgcactgatgcagagcggtctcaggtcttgccctcagtcagaggatatgtggatcgagtatcttcgcatggagcttacctaccttaacaagctcaaggctcgaaaggttgctcttggagaggatgtcaagacgctgcaaaagaaagacaacgatgcgagccagtggaaagaggaaaacaaggaactgttcatgccactgaatgaacaggtcaaagatcctaaggagccaggctcggctggagatgccctggaggagaaggaagacctgttttggcgtcaagggttgttaatcattcagaccatatatcatggtgccgtggaagctcttccgtcaagcttaaccttgcggaagaaattcttggagatactaaacagtgttgacttggcacattctgatgagttaaaactggaggtcctggatgaccttaagagagatttctctcatagcgaggactactgggattggtttgctaggcttcagcttagcaacttgaacagttccagtaattcgaatagaaaggatgctatatcaaacaagttgaacagatcaattcaggtaaaggaattgtgtcacagctcccctataaatataaacctccagcatggttatcaacgaaatctcaaacgtgcttcttatttagcgaaatataataaaaagatagggaatgaagttgaatgcac

SEQ ID NO: 26110 - DNA, 419 bp, Zea Mays
cttttgcgttcaactcgctgcaggtgcgaacattgcagcctccgattccttataagggctgaaaagtgtacgtcaaggaattagttgtgcattcacgtgctcacgcgttgttttgttgttgtgtgaccgatgaaggtgtccttctcgtttgaggtggccatagaggttatgactgagcttgtcagccagcaccaagtaagcttgtttagtgatgtctactgtttgattgtggtactgactattatttaccacttgaattgtattttggtagcgaaccgtgattttaacccttgaatcaactatttgactaattcatagacattatttcttttaacctacactttgcaatgttcagagcaacatctagatagttaggtttaacaacaacacaacaataacaacaacaacaataacaacaa

SEQ ID NO: 26111 - DNA, 401 bp, Zea Mays
acggaaatgggagcaggaggaggaatagtggaagcgggagtggtggaggtggtgggtatgacagaagtggtggatggctcgggagcgattggagctggcgaagtgggaggtggagtggtagctgtggcaggagtagagggagcggaggagcgaggctgagacgcgagtcgacgaactctttatgcaatctgatctgacgatatctgcagctatccacctcgctctgcctgcttcgctgctgttgccgctgcaagagctgctcgagatgctctatccaaacacggcttcttgcggccttcctgctgctctaagtacacggtcttgccattgacctgcctgaaggggcgaggagggtccttgtcgtctcctccccctggcgctgacacattcttcgtgcgcac

SEQ ID NO: 26112 - DNA, 1688 bp, Zea Mays
atttgattccctatctgacttcgcggagcatctcgccacaaatgttgacattgtcttcccagtgatccatgggaaatttggtgaagatggaggcattcaggtttgttagtaccagtgaaatctggtttacaagggaaaaaaatcaattcatgcccgttaattctatgattcacttggcattgcactagctagtgtttgaatggttcttagttgactgctgtttacacactcacctgttaacttaatatttgtgggtgtgacatccatatgttcgtaatctctttgaaatattcaggagcttttggagaaagcaaatgttccatttgttgggacaccctctaaggaatgccagcgtgcttttgacaaggtacattgtatgtttctttcattattgctcttgacaatatatgtcatcagcttctccctaccatccttctatgtagttgcatacttggattagccccctgttcagtgccatccccatcccagctttttctgaattgatgggaaagtattctagcattatccgtgaaacttgtctgctgattatggatattgtggaacttaataggacaaattgttccatgtattgagcaattggagtttataaaatgtcatccagtgggtaggttaaaactcaaaaaaatcgctacaatgtacgatcttctaaagatgctatgtgaaatgtgacgtgtccaccaatatcttgttttttcgctattgtaacttgtaatttcatttaatgtcagtggatccatttgttctgttcctgattttaatcttgaacatggctgcagcataatgcgtcgctcgagctcaacgcacaaggtttcttaacagtgcccaactttcttgtggaggtaaggtttgtttgtcatttcatagtgcgctcaccgctcaatgtgatatgcactatatctttattaatgggcataatatgtaatttagttgaaaaacaggcattgagagtcaaaaaaatttaatcttgggcactatgcttttttatgctacatatatttgaaaataagttttggtttaattgatctgtcgcttccagtggactgaatcttaattaatacttggaaaaagtaacaaaagattttcttgtctgtcacaatattaccacagtagttaagcaaaaatgggagtgtggtcactaattctgatgctcttctttggtgacctgatcatgtatcctgtaatttctgttcaaaaaatgtatcctgcaatcgtgtctatcacaaatcagaaggacaagttggctaagccggagttagaggcatggttccaaaccgtcaatctgaacaaagaaaatggcaaaacgattgtaagtaataatgttttactttaaagattgttttcagggttggattggtgaagggataacttctgatatgcttgcacaggtcaaacctacaagggctgggtcaagcattggcgtagttgttgcttatggtgtgaatgatgctgcccagaaagctgaggaaattatttcagaggtgcagaaactttctactatacttctggaatcattcaggttaaactcagtaataattttgagacctgaaatcctctgctgattgacagggaattgatgataaagttatcatagaggttttcattgaagggggcactgagtttacagccatcgtggttgatgttgggattgctaacaacagtgagcctgt

SEQ ID NO: 26113 - DNA, 358 bp, Zea Mays
tgcagcgagtggttcatgaggttggtgttgaaccaactatcacatccttaataggaacaactacaccgacttggcatcattgatgatgctgaggctcaaggcccgagcgctcaaggcagtaatcgatccaggtggcaacatctacatgaggatatggtggcgctatacgtgatggcgactgttgtctcaacggagatgatgttgtccattgccaacaaggtgacacatccaaggaggcttgggacgtgatcacgaccatgcgggtcaaggatgactatgtcaggaaggcaatatgacgcgaggatcaaagtgtcaaggattactcgatgtgtttgggtggtatagtggcacaattggt

SEQ ID NO: 26114 - DNA, 355 bp, Zea Mays
catttgtggaaacaaaaaattgaaaatcatgtgtaacttagactcttataggcgcaaaatatgtaaatgctaattaaccaacatatttctgtcgtttagcaaggaagatgcattgagatgaatagccaagttcgttaattgtccaaacataagttgcaccccattgccattttttgtagaacacatgttgccgcgtaccatataccttagttaaccactgtcactgtgatatgttagacatactatagccaatgaccattatctcaaataatgatatgatgactgaatgatcaggctgattattgcataatgcgtatattagttccatattgatttttctgcggttctccttcct

SEQ ID NO: 26115 - DNA, 385 bp, Zea Mays
cgaaagggtatgctctattctaatctggtccctacacccgagatccgatggtcgagattcctataatgcctgatctaatactggccttgcgatcacgatccaagggctatcctaccatctaatccacatcgtccaacagaatatcaacggcacacaaccatcctccacctctcgaccgcccagagcatggcgccgccgcccaggcaccacgacggacctcgccgtcgccggttcttcttccgctgcggcccacaatttaccaccccgactaatgcaacacgatgccaagattaaaacaaatcgagtttgtaagcttctaccagccgtgacgtcgaggtgagggcggtccacggagagacgcaatccgcggcggccttccttctcc

SEQ ID NO: 26116 - DNA, 365 bp, Zea Mays
gagcgcggagaagttgtgctcgctggtgacagaaaagggggaaaatggcgccgcgacggttctgggtggaattgggaggtgagattggggctacacggccgtaaggaactatagtttcactgtgcactaccaattttgggagaggtggagtggattccacgaatttgtacttcaactgagctcacaggtggagatgtgaatacctcgccgtggtccatggcgctatttatagccacggcggtccggctaacgatcaacgaccgcggaaggctttgctcacgcatggcaaccacatatagaagaggtagagtaagggaggagcaaggcatggatgacaccgcggtggaattgaccgagccacggcg

SEQ ID NO: 26117 - DNA, 305 bp, Zea Mays
caggggcaacagctgccatcgcctgcactatacaataggctggtgttgagtatagctgaaggaccggtgaggcaactagagggggtgaatgggaaccaatcaaattttgctgctaagaactaaaattgagcacttcaattgagatgaagaaatcgctcaaaccaaaagcacatcagccaacagtgatctcatgattttaaaatgaccctaagactcacacaagaccaacacaacaaacggatcacaaaatcaaacaccgaaaagtttgaatcgacccaaaattgtgttgttatctagtgttgttt

SEQ ID NO: 26118 - DNA, 420 bp, Zea Mays
gtccagccggagcaaagaatttggcccagagcctagagaactggacagctctattcctctcctcaatcatctgaaaggctgggtcaggctgccagtcctgatgcagcatgagattcatctccagattctgatggtgaatgttgttaggcccatcaaccgggacctgagggagctcaacctccaaatcctgggcctgatccacctgaggtggtggtccatcaacctcctgtggcccattgaagggggcagcattgatttccattccgttcccaatcagagcatgaccattcactgcaggatgaccattcgcggggggtgcaagctgaccagcaccaatggagctatcagacgacaagccagaatgctgattgctgtgttgcagctcttcctgctgaatgtgttgctcatctggcaaggggg

SEQ ID NO: 26119 - DNA, 1178 bp, Zea Mays
aggttaacctctaggaatttgctccacagatgggagaaggggacaccattcggtgatggaaaaggagcagtgatcagctgcaaggaattgccaaaagaggcttaactccttaattaacattggacttcggatcctttggaaccacaaaatcggtcgtgtgtttgacaggcttactcctaacttggaagcaactattagaaaagttaagggaagtatgggaactagcaggatggctctccaaacggccccaattccgaggctttagtaggtaatatatttttggagcctgctatggatccattcctgtatttttgtttttggccaacgtaaggtgccttttgcactatggtatcagtccttaatataatgttgtgcacctctcttgtgcattcgagaaaaaaagcctagcacttctaaccaagcgtatgcattctatcgtgcagaggagatcacacctaggtatgtacaaacatgaatagtataaaaaatattggaacatggcaatgacattcaaaatgatggcatgaggtgtttggttcatcactttgctacaaggaaaccttgacttgctaagcaacaccatgggagcttaccacgatacaaatcatttttccatggattacccaagtagtgctgcccaaggaaaaaaacaacctacagaactactctttccagttacaaatacttcacaatttgaacaagaccctagaatttttttgatactttaccatgacttttaaataagacattcgaacaccatacatgtgtgttcttcatgacaatatcaccaaaatattggattttgtaaatatcctaataaaaaaagagtagtcaaagctacacattagggactgcatcattgtccaaaacatcaagtatttgtgactggaggaagtctaacgcgatggcaatatgatcaggaactctgctgccatattgacatgatctttagcaatcaaattcatttgattgtgtccaaccatgtacaagttgacaagaaatgaaacccaacacaagattcctatatcaatcaactacattatacagtgtgtagcatacaaagttatagtgacatgatgttcgccatgaaatttgaaaaataccaagcatggtaaaaatgcccccacaacaaggatgcagaaaatgcagacatggacataaaggttactactgcaaag

SEQ ID NO: 26120 - DNA, 4433 bp, Zea Mays
atcgacatcgccgacgccgggagggagtactacaccttttggttcttcaccacgttccagtgtgccctggtacgcagaactgcaccagttctccggatatttgttagtcatgttttcctgtaacgaagaatgcattatcaatccttactgtctcctccggttaaaaagggattgcctaacctttttgctgtaggcagtttttgattcagcatagttgtactgcattgttactgcgccaatgaatgtggctgctccctcaggcctcagcaggcagcaagcactttaagctgtcttctgctgaactgaactgtacaaactgatacacttctcttgttgtgtttcccatagtttattttcccttttggcagaataatatgtttatagcaagtataatttgggactaaaggtgaactttatgctggggtggagagagaagggaagtgggctgttgaagcacattaatcaagaaatcttgtgagagaagaaagtgggccatgtattaatgatgaagtatattcttactgatctactatatggatgggctgatagatgggctatatatttacataaagccagcagtggactgtattattaacttttttaagagtagagacgactatcacattatgtgtgtaggtagggtagagtactctagtgacctagcagtacaatataaaatatgtctttagcttacttcaactcaaatcaaatccgtgcaacctaaggacacatgttcagttgacaaacttttcattcacttctgcttggacggaagccttttggaagtgacgttgcagttgcagccatggtagcatagctgtttacttttttccttgatctcttcagttaatgctaaataatgagactgctcttaattgttgtaaaacatgatttcttgactttaaggactgacattttgtacatttccgcacatgtacttgttatggtgctaaacgacttaacatatcaatatcttcttggtacgtccatctttagtcaggaaatcagcatgcgactttaaacttccggggaataaactactcagctgaaatgtatttaaatgggcacaaggaggtactaccaaaaggaatgttccgaaggcacaacattgatattactgatatcctccatcctgatggtaacaatctgcttgctgtccttgttcatcctcctgatcaccctggcaaaattcctcctcaggggggccagggtggtgatcatgaggttagtctcatatccttcaggttggttttatgtagatttatcctttcgcatatgatttgcaatcgtggataatggagtgtcccatcctattgtattgtgcagatttggattgtcttttgcttctttttttagcaaagctcaaacaagacttgtgttgcttagttgccaatgtgttttccctcggatggtactacacttcaggagatacatagtatcaccttacttgaattgtaatatatacttttatctgagatgctacctgcatcaaatgtgctgaaagcataggtaaaacacacaatggcttgcacatactctgttttggaggccacattccgttgtttgtattctgatgagcagtagcagatccacaggaaattaatacatatttagccaataaaataagaagttggtcctattagaagaggcccagctgctatgtcaattttggatctgcccttgctgggcagtttgggacatgctttactatttgaagtacattttgggaagtatatattgcagtttaaagtgcaactgctaattgcaatatttatttggtctcgtaactactatttaaaaaggaatattgttagttaaagggactactgatgcacaactacaaatgtcaatgtggtcatttcagattggaaaagatgttgctacacaatatgttgaaggatgggattggatgtgcccaataaggtagttgatgatttctgtgtgataaagctacattcttcattagttgatctttggcctcctaagatgtatcacatgttttgagttcccaaactattcagtaactaagttcagaaaccctatactgaagactgctgcaatatctgaatcttttctaacctttcaagtaatctttgacaaataattagaactaattaccaacttttgtttctcttgcacttatggtaaccagtcaaagtagtgtatttgtttttacttattttgcaacagcaaggttttttctttatttcctgttttcattctgttctactatttgcaacatcaacgcctttctgacatatctatttttctggcatcttagggatcgaaatactggtatctgggatgaggtatcaatttccatatctggggtgagtccatgaatccttgttcccttctaatactactttatccatcttttgtcattgtggcatcaccattgatacacgaagaggaggtgcacagagaagaaataactcattgactttaatctttttagaccaaggaccaaacagtccagcttatattgaaagcttaacatgagtatttctggggttaccagcttacaagcattcacataacatccatagaaaagaaacaaccaagcacctcaaacaaaaatccctgaacatgaagataacctatagaccgtgcctggaggtaatcgaacgtctaaactgaccactacagaccaccctgcctaggcgcatttcaccaacttgaaagtccgtccttcatcttctacagcatctccccatcttgagcctgtcatccttcgccaacttctgccatcgattcaggagaccaaacattttgtgagctactcggtaggagttatttaaattatatcagagaacactggttgtttcttgttttccatagagcccaacctgctccagctataacccaccacatgaacctgtttttgttccctcccgatttatccaggaaaacgtcttgaaaattgttaatagaacatgggcttctagaccagcccagattgtttctcacccaacaccaagtcaccactgctagtctgctatgggacattgaaataacaaatgatccactgtctcatctttcccacataacttgcaaactttgaaactataacagtttcttcttctgaattgttttgctgtttgaattctgtcatgccatgccatccgcaagaaaatctgaactttaagaggtatttttgccatccaaatttccatcatcctgatcaatgatcccaccaaaagttatgtatccgtacatgctctttgtggtgaacttccctgagttttctaatttctaaaccaccttctcatcttcttctgttaatgtgattctttaaagcttttccatcatatccctccactctgtcatcttcttttcaccaaaattccttctgaagtccaaaactcaatcccttttcccagcctcctccacatattttaaacagacttgggaaagtaaccttgaaagagcactccatccgtacatacttccaaaatcttgtttgtctacccccttgcactatattgcccttgcccatcataccactctctcactgaatgtagccccctgccaaaattgtgatccacttctactagtactctagcaaaaacctctacctaagatatttccacctcaacaaattcatgtgtaagctatcatctctactttccagtcggaaaatctacttgcataacaaagtcgtgttcattcctcttgtgccaatgaactctaggcccccaaactgtttgggtttgtatagggcctcccatttaatcatgtggtacttcttgtttcccacttcttcacaaaataccttacctctagctgaatcaaacctctggcgaattccttcatacaaccagtaaaaacacatagtgtacataaggatgctggtttcactttgatcttcaaaacagtccttgtgttttacttttttctgtgaggattttctcaagaacttatattgggcttgtttcgctgcagcctgtgaatataacagacccccatctggtttcaacttttcatgatgattttaagaggtcatacctacattgtacacttcagttggagaacaaaagttcttggattgcagattgtaccttgaaaatacaagtttcaactgaacttgaagggaacatttgtttggtggaacaccttcaaagttatgcaataacagttcctcctcaatcagatatagagtacaccattccttctgtaagttagtttcttatttctcaagctactcgtgactgactactgaggcattacctatgctagttttcttcctttcatgataaatatcatgtacacagtcaattgatgtatttattgttctggttgcccaaatgatttaattgctgtgagcttgttgccacagcttactttatccacagtaaaaatgtcagcaactacatatgacagctatacaatctatgcttgttgcctgtcaaccatgctcatttacaggacta

SEQ ID NO: 26121 - DNA, 697 bp, Zea Mays
agtcttatgaggaagatttagactactttgctgcgttggatttggctgcatcggagtccccgccgcaacctgatgcgcacgaagagtctactccctggctagggcgatagctgaagaccactgcaggcgaaaggtggtatcgaagcagagtgttgatgggatgtcacgaagtgggaggcatcgccggatgggtatggagcaatcccgtctttgattagattgggggtagccaacgcgatctactgtcctcgacggctgagacgtgtattggtgagggggacttgcagaatctatttgagggcgaagagttgaagatgatattgtttaatttccaggaggcgagtcttattctgaaggtggagccgatgtagcttttttgctgacctcgctctcgtgttgtgatagtgagtgaaaacgatgccctcccccgcttcgcaatagagagggagggcgacaatgtgatttgtattacttgtgcgatgtggccgatgggcccttcgttttatgtatgtaaactatgatggcatatcacgtgatgcgtttattgtaagattgtctcgatttgtaattgtgtctcgatttgtaatctcgcggacgatgtcgtgcgcttctggcgcgtgcccggctgcacccttaggcggctttttcttggacgtgtcttatagtaaagactttgcaccctgtggctgatgtcgtg

SEQ ID NO: 26122 - DNA, 686 bp, Zea Mays
gctgatcttcctagtgcgagtactgagtacaggcggcgaagggtggtgtcgaaacacagtgtgggtgaggtttcgcgaagtggtaggcgccgtcatatggggatggagtgtggccgtcttcgagtagactggattggtaaacgagaattgttgtcctcgccgattggggcgagcataggtgagggggatctgcggaatctttttgagggtgaggagttgaagataatgttgttcaattatagggaaatgggtataatcccgaaggttgagctgatgtagtatatggtgccctcgctgtgtgtatgtaactgtaacttgtattgtaatgtggcctgatggtcgttttcgcacgcctgtactaatccggctgcacccgtaggtgacttttgcgcggagtgtagattgacgtacttgctgcacttgttcgtcggcacccttaggtgattttggcacgtagtgttttttcggagaaagacttcgattgcgtattttattgtgcctatccggctgcacccttgggcgtcttttgcacggagtgtctttaataaaagacttcgattgacgcacttgttgtgctgctccggctgcacccttaggcgacttttgcacgaagtgtttttttaataaaagacttcgattaacgcacttgctgtgctattccggctgcacccttaggcgacttttgc

SEQ ID NO: 26123 - DNA, 490 bp, Zea Mays
cggagatgcggtagggcccgaagtaccttggctacaacttgccttggatcgtcggtgacagggaggcaactgggcggtgtcaaaggcggagcaggacccagtctcccccttcataggagacctggcggtggtgtttgtcatagtggagcttctgaacatcttgtgcttgctccagtctgtaccacacatcggccaagaactcttcccgttcttccatcgtcttggccacaacggccactcgcgtatctccaggctcgtacgacctgatggacggaggatcccgaccatagaccaccctaaagggcgtatctcgtagggacaactggtaggcagtgttgtacgtgtactcagcccatggtaaccatcggagccaatggtggggacgatcacctgtaaaacagcggaggtacattgtaataacacggttagcagcctccgtctggctatcagactgtggatggaataccgacgtcatgtgcagcttggcacc

SEQ ID NO: 26124 - DNA, 557 bp, Zea Mays
aataaatgccgtttttatacggaataccagaccagttgtccgagggcctgcttgccaagttgtcagtaactgtggagagcacgagaaagtggggcatctactttttttagactactgctctcggcctcctctccgctccattttcgcaattccttcgagctccgctccggtgaagggcgctccattttggagatttcgcaacctctgcctcgttctgccatttttttttcttgcctgcaccaacgtcatctaaccagtcattagttggtgaaatcctccactcccctgcagaccacgtcagccttcaccttgccgtctccgttacgcgccgcgagcccgcgagcgtttggggagttttggagcggaggaggcaagggaggacggacagggaagtttggttgtggaaatggatgtggtggaatcctcgccgtcgtcgtcgccgatatcgtctccggccgggtcttcggagtccatagacctcaacttcctgccgttcctcaagagggagcccaagtcggagcccgcgtcaccagagctcgggcccctgccgctgcctg

SEQ ID NO: 26125 - DNA, 602 bp, Zea Mays
cacaggcccctggggcccgccagtcagtagaaggccaggggaaaggtttgccctagaaggactcgtccccggttagccccgaggcaccgagcccggggtcgggcaaggtagacctgaaaggggtgccagacggatcgagaagaagccactcgagtggattccacgcctgactcaggagtggcccgtcttaagctaccggtcgcattaactgcacctggcaccgagccacaaagggagagtcagtccaccttccactcacgatagatggccccctaggcatgcggcccactcatgacctatcgaccctaggcctgagttcactggccacctaaaggccctgcaatacgatgggtcgcgccaagacccaggcctctaggtatgttgtttgactcgacttccaagcctccaacaatgtgttggaatacgaggccctcgtaaatggcctgtgtatcgccatagatttgggcatttgacgtctcaacgatcggggagattcccatcttatcgtggggcaagtgatgaaggccgagaggtgatgcagctcgaaaggtcaggatgaggctcagggtgtggagttccaactccaaaaatatagaggactt

SEQ ID NO: 26126 - DNA, 479 bp, Zea Mays
ctattttttccaaacttgaccatcgagctgggtaccaccagatcagaattcaggaaggggaagagtttaagactgcctttcagacccataatgggcattatgaatacaaggtgatgccctttgggctcacaggggctcctgctacctttcaggacttcatgaatcatattttgagtccacacttgaggaaatgtgtggtggttttcttagatgatatcctggtgtacagtgatactttggagcaccatgtcaatcatctggaacaggtgttcaaaatactgatgcaaaaccagttgaaactcaaacagtctaagtgtcgatttgctcaggataagttggaatttttgggacatgtgatcagtgccaagggcatagcgactgatccgactaaggtggaggtgatcaggaattggcctactccttcctgtgttaaagacgtgcgaagtttcttgggtattgctggatattacaggcgattt

SEQ ID NO: 26127 - DNA, 346 bp, Zea Mays
ttactggtatggtctacagttgctgtgctggtagatgttgttgctttgacaagtactggcaagcttcgcacctctgaactaactcggctgcatcacttttcgctgttggccagtaaaatcccgacctgaagaccttctcggtagtgtcctggatgctgcgtgtattccgcattgcccagcgtggacctcatctagaagttgcttcccagtagatgggagaatgcatttcatcagaacgcccgaagcaccccttctgtatagtgtttccccaatgagtgtgtagtgagctgactgtctagcgatgcgctcgactgcatttttgtcatctggttcctcttcattcttt

SEQ ID NO: 26128 - DNA, 419 bp, Zea Mays
gtgactcctccggaagccttgtggaggatatacggctttgagcttagtcagatatctccacctgtgatgcagctgcaactccatcttccaaacatgcacatggtggcgtttcacgagaggcaaatggtcgagcgagtcgtcaaccatccaggtgttgataggtcgatgctcacagcatattttgaggcgaataggctacacgatgaggctcgttgcatcctatatcgtgatttccctgagtggtacacttggcagagtggtaagggaaaagtatggcaacggaggaaacgagatacaggtggacaagtcggtagaatagtctctgctcatccggccgagggggagcgctactatcttcgtgttctcctaaaccacgtgactggtgccgccttttatgtggatctaaggacagttgatgg

SEQ ID NO: 26129 - DNA, 805 bp, Zea Mays
gtggatggcgtctagatggtgcaccaacggcttggcatgggaataggttggggcactaggtggctcatcggtagagtgaactagtggacagggacacacatgttgctagtagacattggcaggatcgatgaaatgagccatatgtgtcgagaagtatagggtcgtacgtggcatgatcagaggtgatagggtcatacgtggtacggtcgaaggtgacaggacctcacggggcactgttggactaagagaaagttctgtatgatgttgggagcaacaagtatggtgttgagctacaaggggccaagaaggactaggtcacgtacctaatgaggtgacaggcagagtcgacacattgctgacaatgatggaagaaggaaagatggggttgtagggatggggtaaagagacagtaccttggtcaggagtggtgtggtatgaggcgttgtagctagcaacccaatcggtggaagtagcaggagtgggctacaatgacatgaggtgagaggagagatccaacggagacaccctcccacagagcctctaggatgggtgttagggtcgccactatcgagcaggctcacatcaagtatgggcggtggtgacggcatggcctctatcatcatggagacattatcaacacttcggaacacaatggtcctagagagtggtgggcctcgggagggtggatgaaggctagagggtggtggagctcaacacagtagcagagaactagattcatgtcctgatcaaaggccatgaacgaacgtgccccgaaggaattatgcatcttgaagggatacacgca

SEQ ID NO: 26130 - DNA, 295 bp, Zea Mays
atcaggaaatctaccctaacaaaggaatggcgaccccaactgaaccagcagaggcaccatcaggacaactcactcgagcccgtgcacatgaattaaacttcgtgatgattctaaagaatgaagaaccataagttcctaaagtgcatgcgccatctacgctcatgatgaatctacctagaataaagtctaggtgctccaccacctatctatcttttagtttggaaaggaataatcaacaaggtgttgcaccacataaaaggaatggggatcaaggagatggcatggatgtttgggc

SEQ ID NO: 26131 - DNA, 398 bp, Zea Mays
cttgcacgcgatgattgggatagacgtcaccgaaacactcaagcttccggtctccatcaatggcataaccctcactgcgctggtcaactccggatccacccacaccttcttgagtgatgttgctgtctcgcgactgggcttacaggtgaccaccttacccgacctctctgttaaggtggctaacggtgaacgcatatccagcaaggggcgcaccaccgcgactctcaccattggccaagaaaacttcaccgcgtcctgctactccctgcccctggatggccttgatctggtgctaggggtccaatggctgcgatcactggggcccattgtctgcaacttcgacaagcataccatgatattctggaggcaaggcagaatggtccgatggactggcattg

SEQ ID NO: 26132 - DNA, 469 bp, Zea Mays
tggaactcctaacaagcggctttgacgttgcaatgaactccatgcttggggtggtgtcggtggaggaaataatccgtgatctcccataatcttgatttgaggtctgtttgtttctacaacgtgtatggtcattgggtcccttggaccccggttggtcctaggctctttcacggtccaaggggcactattcgtgggactttttcccattcaccatacccatacgaggcgagcccccgagcctctgctcgatgcatagatccgtctagggggtcgtcccgtcgttttgttttactctccttcgtgcatcccttccgcatcgatgataggaggtgagccaaaccacactttcctcgatggtcgagtaatggcgcttagtgagctgcaaataggtaatctgaatgaggccctaggtcctttcgcaggatccaagcgcggggttcactaggggaccgtcctcatacccccaggc

SEQ ID NO: 26133 - DNA, 751 bp, Zea Mays
caacaacctcctccaattttgtccagtttgtaaaggtaatcatgttctcattgaaaacaggcttgtacaaattgttcgaggctctgacctggaagtatgtgatgttgtagacgactccttcttttatcagtggcttgaacttttgtatgactggtgggaatattgcagcatgttaccgtttccctgaacaaagcagcgatggaggaaacaacaacataatagcaattaatctcataccaatgccaccttccctttaccaaataaataagcgtgcagatgttgtacctcttcgtcaagcagcaccatatcacaatggagcaactttgcttcatcctgaggatcacataaatcccataaacgagaaacacgagcgcatatggtcacagaagtgttcccacgctggagctccgggatcaacacgtctcccatctacaacgtaaaataggaagaaaaaacataagagcaaggacatcagaagccatgcatgaaacagcatgtgcaaagcatgacaaaaaacatggctctcgtaccaacctatacatagcacacattagcagctgcaaacgtagaaacaaaagtataagaaacaaacgtgtaggtactcgacgacgttatttatttacaaacgccacacggggcactacaataaccaagcagaaaaggggctaagtggcagccgcatcagcggcagcaaggacttccttgtaaacaacattccgagtctgtgagccgcacgagccatcttcatttt

SEQ ID NO: 26134 - DNA, 655 bp, Zea Mays
ggctgggccaaaaactttgaagaagtcttgtggggcacagtctgttgggacatcatcatcaaactcatctgtagagtcataaatcctcctctttgtagggtctatgagaacttcataggcctcttggatggacttgaaatggctttctatctcatccttttttgcttgttttgcctcctctgttgtctctgcaagaatcagggcagcctgcttatctggatgatgtttgagagccatctcacggtaacttttccgaatttgatcttcagtggccaagaacctcaagtgccccaacccaagcaaagcatagtggtcctgctgttgactgccagatgacttcttcttccctttgctgctaaaggtatcagaagcagtattaaaatcttggcttttgtcatccgatgaaacgctgtgatcatcagtttctatatcttcatgctccgcaagaccaagcagcttcattgccgcagcatggaacgaataaccagcaggttcatatttcaaagcttttacaggaaggcagtttgatgaaacaaacagaggcaccccatctacaatctcctgggagaaagtgatcagaagacaactcttctgggacgccatatgccaatgatgtcaaattcttaattaacaaagctcctgaggcaagataaac

SEQ ID NO: 26135 - DNA, 317 bp, Zea Mays
agttcttgcagaccaatgagggcagacaaagcaggagagggaactccactactttcaccgctggcgatgaactgccgactgtttttccgagtcaaaggagcttcattctcttcctcatcatcatccacattggcaacacaagcagcacccccattggggtcagcaacagatggagcacccacattgggatcagcagcagattggggacacccattggggtcagcatcaataagtccagtcgcaggcatttcttcagtagcaggaaccgaggtaccagcatcctgatcaaaactggacactcaccggaggcgtcttct

SEQ ID NO: 26136 - DNA, 343 bp, Zea Mays
aaaagataacactcagattgctaggctgtaacacacgccatgatgtacaatacagcctaccctcaaatggtgagattgctaccattattgttggcgactacacgaccggggaatacacatatgatgttcttgtgcatgatagagagtgcggcctcaaacgtgtttcatgcttgcatccagcgtacatgcctttgcaataccctttgttgtttccttacggtgaacatggcttccatcttggtattaggtattttggtgatgacgatgttggttcatcaaaacgaaaatatgtcacgatgcttgagtttgtaaggagacacatgcactacagattggacgagcc

SEQ ID NO: 26137 - DNA, 574 bp, Zea Mays
tttaaaagtgctgtttttgtttgggcattaaaacatacaatttgcaaaataaataattaagcgctgtagtccagattacccaaagagcatcttcgaaggtaaaatggactttctacgcaattgatggcttgtttatatttttgtttacaattttgtgggttgattaaattacaagacaatgttaatgtttagcatttctaaaagtgctgttgtttagttgaacatttttaaacatacaatttgcaaattgaccaattcagtgctgtagtccagattatccaaaagatcaacttgtaaggtagttaagcgtgaaagatcatctgttctagcataagaattgttcatatcaagggtttattggaacctcgttaatttgttgctcaaacttgaagcacattttactcaacatagcctgtagctcaaccgagtcttaatagatcatggaattaagctttggttgtttaaacttcttagaacaggtttacaatcattactatctggttgagctcttaactgtttgatcttgtgatgaaagttgtgtcaaatttagttgtgtcagctattgttgatcaca

SEQ ID NO: 26138 - DNA, 517 bp, Zea Mays
gaaacgccgacaaggatggaagatggtcggtttagaagaacactgaagatcaaactctgacaaatatctgatgaacgcgataagatcgggggcactgttgaatcggatgggctcgcgcgatccagtgatgagaattgatctgggatggataactttgatcgtggtgcgattccgtgaacccagtcgagcgtgcccggagttagtcaccggcggccgccgtgactcagataattccgccgcggtgtcacccgtaccttgctcctccctcactgtgtctcttccctacgtggtaaccatgcgcaaacaaagttatccgtggccatagatagctagccggaccaccgtggctataaagggcaccatgaaccacagtggggtatgcacacctccacccagtgagttgatcgaaatccaaaattcgcgctgtctctgccccatcctcccaaattgaatgtgcacagtgaaactatagttccttacggccgtatagccccaatctccagccccaatttcaccc

SEQ ID NO: 26139 - DNA, 343 bp, Zea Mays
cctcgcagtaaggctgctcggtgaagtcctcttgcttgggtgctggtggcagagggttttgatgtggaggattttgataatgcagtggaggagggaggacttggatctcttgatgatgatggtacaagtgattgggttggtgaggggtctgcttgttgtggtatggttgctggtggtagtgctggggctgataaatatatgcgacaactcgttggttgtcagctggctgatttctggccatcctatctatggtggccttggttttcgggcaatccctggtggggtgtgtgcagtcttcaccatgaaacaggtagtaaaaccttcacagctgctgggtccggcc

SEQ ID NO: 26140 - DNA, 285 bp, Zea Mays
cgaaggtgcctccaatgttgaagctagacaaactgtgatttagggtgatagtgataactagagcgaggaggactacaacattctaaacccgacaaagcctagtcatcttgaatttgaaaaatctactgtatcagaaggtgacatgaccatgatgaaaaaactaggctacttcggagagtctgagagcaagcttgttcaatttgctggggaagacataactccggagccaagggatgacgaagttatcgtctttaagagcttcatcagagcaaggcttcgtttctc

SEQ ID NO: 26141 - DNA, 291 bp, Zea Mays
taggaggcgacacatggcgtcatcacgaagggtgcgtcgaggtgaagtaactacatgtggagcatgtgggcgtcagatgcatatcctaggagttggtccatttttcccccggttaagtggacatgctctttgtatctaggggtagtttagactagtgaaataaactcttataaataggtgagagttttgttgtgtgtagccatctcttttggctctctcattaggcacttgtttagaaaaccctagttttctactatctaggttgcagtagttttagccctgagatctgcg

SEQ ID NO: 26142 - DNA, 333 bp, Zea Mays
gctgtaatccagaaattgatttgggggaaacgattattaggtcttgaatttggtctcggtcaaagcaaggcgccagtcattacgtgagtcggccggtatacgggctcgctggagctctgcgcgacaccattcgccgtcgaggactccgggtggtgaagaattagaagtgcaggggtttttctgcgaatgtcagtgagacgttgaatagaactagggattcttaacggatattcacaacagccggggcctcagtgcaaacctaccatcgcgggcgcgcacgcgtgggcgcgtccctgtttcctatgcagactgggccgagtgggttagtttagg

SEQ ID NO: 26143 - DNA, 463 bp, Zea Mays
cgcgtgtgcggccatcagggctacgacaacacaacaagccttcataataagcgcaataggcacaattatggctcggtaatcggggtacacgataagtccatgcaacgtgcgcaactggcgcaattgtggctcgatgatcacgacagacggacagtgcctacagggcatgcgaaaaatacgtgactcggtgatggcggttcgactcaaccggagcggtccgacaaaacgagagtgcgacatagtaatcacatgacgcagccaagttcgtacgacacaaatactgcatcatgttgccagggctcagccaatgccataactcaaccgattaataacgtagcctgatcggcatgtctgagtacccactatacaatttaatcgctcgacgtgagtccaaaagctcaacacatcataaatatttagagcgatttaaaaatacccaacatagccttcacatgcaatttaa

SEQ ID NO: 26144 - DNA, 371 bp, Zea Mays
tatgaagctatggagaagaccaacgcagaaaagatcaccaatgagatgctggctggattgtctgaggattccagcgatagcgacagttttgacgtggagagtgggaatgaagatgtcgaagatcgaccgtggaggccgagccatgttgtttttgggaagtcaactgtcaaacaagggcaaattgaagcgatgaaagacaaatattttcatgatgtttcaatagtgagggcaggggaggaatcaccgttccccttcctgaagctgatgaggtagtggtcttcaagagcttcatgaaagatgggcttcgctttccactccacactatgttggttgaggttctaaagacattcgagatatatcttcatcaactt

SEQ ID NO: 26145 - DNA, 530 bp, Zea Mays
ttgtgcaaactttgcttgtcggttatgtgcttgtaatatctagactctgcatgtttgtcggctatgtgctctgaaacaatgttctagtaatgaactgggcaaactgtttctgggcaaactgtttttgaactttgtttgaactgtgtatacaaccttcatttgcaagctcaactacagccttccatagccggactgaatcaggaatgtgctccagccctttcctcaaaaccctactcttattcagatcactactctcaagccaaacatcttcgagcctttgcctcatctggactggccaaacggcatgcctcaagccaaacatcttcgttcttggggcactcctcacaaccacgctggatgagctgccgagcaacctgaagcttgccagcaatctcttcgagcctagcagcggcaatccaaccaggtagaatttgggaaatgggcagaaactgggcataaactgggaatggtagtcaatttgttacactgcaaacagcaaacaattgtttcggacgctaacagtgggcaga

SEQ ID NO: 26146 - DNA, 357 bp, Zea Mays
cagttctcatgaagatcaatgttttagtggctgtcacctgcagattacatgccattgttcaggcccatcatgctagcaaccctgattaaaattttatcacaattgaaaattgcaataagttgtgaaaaatgcttaactttggctacactgttattttgaggtagagtctggcctgtgttgcaattgtaccattttattctatctcctgaatcctgatacaacaccatgtaattcacctgtgagttcaaggaaaaaaagatactgctgttttcttttagtggcaagtgctatagtttgttttctcaggttgtttccactcgtgtatcagacatctgttctttggagaggaagaaatgc

SEQ ID NO: 26147 - DNA, 403 bp, Zea Mays
aatgactgaagggttattggccacgagaaacgtacccatcatgaccggctctccctttggcgtagtggccacttgtgtataatagattcgcccagttttcttctcattcttgcccgctgcatgatttgccatgtttcccttgccttggctggaacttcccgggttctgctgattattagagttgttctgcctcagatatggacagtccttgataaaatgtccagacttcccacaattgaagcaaccagtagatgaactcgggagtgcagggaaacgagcaccaggggcactcggctgagttgttgaggtaggggcaatggcacggcggatgaatacatgttgtttaaaggggtaggagggtggacgaggtgaagaacggttttgattgaaaggtcagatcacc

SEQ ID NO: 26148 - DNA, 470 bp, Zea Mays
aaataatcaccgtgcttcagcatgagtttgtcatgaaggattcaggccctctttagtattttctaggtattgccgttaagcctcgccctaggggcctcttcctctagcagcagtagtacactctagacatcctcgagcgggctgacatggtcgactgcacgccctatgtgacctctgtcgacacgaaggccaagctttctggtgatgtcgctctggccaatgaccacaccgcctaccggagcctcatcggtgctctgtagtatctcaccttaatcaggcccgacatcggctacatcattcagcatgtctacgtttatatgcatgaccccacgagccgcactttggtgcggtcaagcggatccttcgttatcttcggggcactatcgactatggccttcttctttggcacaccaccaatgagttgctcgtctacaccgatgttgatcgggcctggtgctcgaacacccgcc

SEQ ID NO: 26149 - DNA, 316 bp, Zea Mays
aaacattttccatattcaaacatgtactgattatttattgtagaaaataattacttagagcaggaaccgtaacataaaatctgctttattcaggtatgtgcagaccccacaaacgaaaccaactgaactagtacacgattccagttctcatttttttcatcgggaagcaaagaaaaccgaaaatgacctgcacacacccacgcaagctggagtcgttgactccacctctttagtcctgcaggcccatcgggatgggcaaggctccaagcctccagccatgcaaatgcatgtatgtgccatcacgtccatgcgtcat

SEQ ID NO: 26150 - DNA, 448 bp, Zea Mays
gatttatgttggtaggtcaagtattagaactttgatggaagaagagatggccagcagcacacagcccttgaagcaagcacaaagcaatgtcgctgggatatgctctgaagatattgatctaaacttggctggaagtctcatggaaatctacagatctcatactgaaggccaagaaaccaggaggtcgattgagtcaggtcgcagttccatttcgactgacgaagagaagaatactgaccctcctgctcatcactatcagatcccatctagtatccagagagctctagaagatgttgctgaagcagttataagacatcaatctgcaaacaaaaaatacataaacagcggtgatgaaactaggtccagagaattcgttgatgccctacagctactgagctcaaacaaggaattgtttgtgatgcttatgcaagatccaagctctaggttg

SEQ ID NO: 26151 - DNA, 502 bp, Zea Mays
ggaaatttgaattcaaattagatttgaatttgaatttaggaaatggatttgaaaacagaaaataaaaatgaaaggaaaactaaagcttacctggaagcccaaagccgcggcctgcttccccatcctctttacgcgcagtcttccagtgaagttgtttctacagcccagctccacaccaaaacgcagcccatctcttcttttctctccgtgctaagcctggtgaagcgtgtggtcagctctagcggtccgcggccgtagcccagcagcttgaggcccagtatcgcgtagcctgtttttgctgaaagcgcgcactccctcttctgtctcgaccaccgacaagtgggtcgtgccttgcttccactgacaaccgggcccgcgctgtcagcttcttcctcttcctcatgctagagttcggatcggacactgtctgatggcgttcctccgctggactccttcccccgcgtgcttcccacgtcaggacggactataaaatgaggaccag

SEQ ID NO: 26152 - DNA, 456 bp, Zea Mays
gtgccagccttgatgccattattttggttataatcttcataaaactatgaattaggctgattggtctaaacaaatctatcttgtccgggttctccctttttggtagaagaacgatgtttgcctcattgaccagatgcagacttttgcatttgtgatgataaaaatcattgatcgctttggagaggtcttctctaatcatctcaaaacagcccttgtagaaaagtcctatgaagccatctggtccaggcgctttctctgaatgcatgcccataaccacgttcgtaatctcatcgtcattgatcatggcgtccatatcagataaatcaaaaggagagtagcccaggttttcccaacaaataacattgttcctctcacctctactcccaagaatctcaaggaaatgccggtgagcctcttgcagcttgtcttcttggctagttaacatgcgggttccac

SEQ ID NO: 26153 - DNA, 290 bp, Zea Mays
atccaaggttgtaccagcttccgggagaggcgccaccaccaatgtcccagcaggagcagcatcagaagagtcctcggccagcatatcaataggggggatcacagcagcggacgaactcgatgcctttcgcttgggcgccatctcaactccaccagcgagcagagcgagagcagaattgcaaaagggcagagagggtctggaggcaggaaagcaagaactagggcacggaaagcagaggcggccgaaggcgcagtacatatggggttttcccgggtcggataccgtttcca

SEQ ID NO: 26154 - DNA, 309 bp, Zea Mays
cttattccgaaggctgagccgatgtaacatgtttgctgccctcgctctcgtgttgcggtagtaagtgaaaacgctggcctcccccagcttgcaatagagagggagggcaacaagatgcgatttttattatttgtgcaatgtggccgatgacccttcgttgtgtgtatgtaaactatgatgacattgcttgttgtgaagttgtcccgatttgtaattgtggtggtgtggcacgtgaaatgggatggggacctctctttccacggcgatgttggacgcttatgacgcgtacctggttgcgtccttaggtgg

SEQ ID NO: 26155 - DNA, 358 bp, Zea Mays
tgtacactgactaattattaagtttgatcatacctactgcaatgaagttattaaattataattttatttattgaataatattcttttctctcctatattttcatggtttgactttcaagttagactttgaattctatggatccattgatatgctattaatgatacatttattttattaagcacaaatgcacgatcaaataaaaactcagcatgatgtatggtttatttaggcgtctttgggggtatttatttaatctcttaagtggggtgttcacatatgatggtaagtagaaataacacacatatacacaggaatatcatttcttcttttaggttctcttacaaagtgggtgctaca

SEQ ID NO: 26156 - DNA, 402 bp, Zea Mays
ttaggacacttcaatattggttgttaacagaatatagcactaaagtaggacccttaagtgtcggttcttacaaacaaatggtactaaagcgtctttagtactatttcttgtgaacaactggtactgaagaccctacaatatcggttctatgcaagaactggtactaaagcatccccctataactatggccttccccatccctcctaactctctttttcttctcgctcctttacccattgaacacatgctctcatcaagcatatgtgccctccccacactgccattgccacatcaagccaaaccacaccctccttgctccgccactacccccatcaagctaggccatgccctccctgcatcaccactatcaccatcgattgttgccatcaccatcgacattgc

SEQ ID NO: 26157 - DNA, 438 bp, Zea Mays
ttcatgtgtatggccttgacacgtctgcaagtgtcacacttagccacatagcgtgcaatttcgattttcatcttcgtccacaagtagtgttgctttagatcatgatacatcttagtgcttcccgaatgaatagaatagcgactaagatgtgcttcatctaagatttgctggcggagttcttcattcttcggcaccactatgcggttattgaaccataccacaccttgatcgtcttctttgaaacatttggctgttccggcccttatcttctcacgtatgtgcttcataccctcatcatttttttgtgcgtcaattattctttgtaagatgactgactccagcttcaaatgatttgaagtcccatgttgaatcattcccaggtttaatttctccatctcctggcataatgtaatgtcagaagtcctcactgttaaacaa

SEQ ID NO: 26158 - DNA, 503 bp, Zea Mays
caggggggatataacaaagtaagtggcttgtataatgcaaaataaatttgggatacattgaagatcgctcatgagggcaatgacatgaccataatcaccaagatggaacttatcgaaggagaatagggaggttcaccatgaagagaggagaggagccacaagagacatacaacaggctcaagtcattgtgaaccaagtgtagaactacggaagcacaatttggactgatcatgacgttgttcaactaatgctaaggtcatttaccgttttagatcctaaacttgtaaacttaatccatgagaaccccaagtaccaaaaattatgcccgaggaagtccttggcaagttcgtgagtcaatgaatggtgtccaaggagggaagatacaccgatgacgccgccaatgggagtccccactacaacgaaccgcaacccatcgccctcaaagcgacgaacgacaaggaggtgctcccaaacaaggtgtcacaagttgaggcggatagcct

SEQ ID NO: 26159 - DNA, 290 bp, Zea Mays
gagcctttgcatggagcaatagctcgatcgagagatgtctcaacttttggttcatatgctcctttttcgcctctccgtgaggaggaaggggggaatgtgccacacttccctcgatgggcgacgagcatgatgtttccattgagctgctaatgggaaatccgagcggggtccaagctccttttgattggagtgagcttcaggtccagagacacgccccaaaggctcctgtgggtaatttgtgtggtcccaaacccgttcgaatgggtccgagggctcgatgcctccctaca

SEQ ID NO: 26160 - DNA, 317 bp, Zea Mays
gaaggataaatagagggacaaattgcaatagaagtaacgacgacaagaagcacatgatttgtttactaaggttcggcttcaaagtacctacatcccgttgaggtgtccctcgggactaggtctcgctcaaacttgtcaagtgatccaccaaacaacttgagcccttagatttcctgcttccgagatgcaaggcactacacataatcaaagcctcttgctagtgattacaattaagaacacaacgaatcaagtgcaaaaacacaacccaaaagcacaacacaacaccgcaaactcatatctcaagagcacactatctt

SEQ ID NO: 26161 - DNA, 471 bp, Zea Mays
agcatcatgataagaggccgactcagaaagaacagtagtcacaaaagttgaaggagagtaacaagcagtaggatgacgaagacgatgattatgtcgaagagactgctccggtgtagaagcaggagaggaaaccgactcaacaagagaggccaagtcaataggaatagatgacacactaggagacatcgacacatcgggagaagatggattaatagaaggagatagctcatcaggcgaagatggcgtatccgaagaaggaatcgtagtgcgacgtgtgtaaacttgtgtcactagaggcttcatggaataaccaggaagcaaagaagaaggcttcaaagaagacatagaagaagactgcaatggtcgtgaaactggtacagtaagagtaggggcatcaagaaagaaaagagatagggtcaactaatgatgctgaagaattatcagaagagggacgaggataaaggacgagtc

SEQ ID NO: 26162 - DNA, 337 bp, Zea Mays
aacaatcttgaataagaaaaatggtatcatccgcatactgcaaacaacagcaaccattctgaataatgtgaggaatcagaccttcaatcagaccttcctcccgagccttcttaatcatacaagctaaaccatcagcaaccaaattgaataataggggagaaaaaggatctccttgcctcacccctttgtgagttgtgaaataagggcccagaatatcattagtcttgatggcaactttaccacctctcacgatcctcatgacccaatcacaccacttactaccaaaaccttttttctccatcatatagtaaaggaaatgccaattcactttgtcata

SEQ ID NO: 26163 - DNA, 378 bp, Zea Mays
ctctgcaccggattcttgtgcatttgattcatctgctatttcatctgttgtagatctgccacgttggagacctggccaacacgcgcacgtcctgaaatcgttcagtccgtcccttcttcagcgatttgaggtaatccttggttccaccgttcctcgcttttttatgttgctttggttttttggttcattgcagtttcttggttgattgtgttcgccatgttttcacgctccttcctgtgccccttacacgcgtagaattttttccctgcctaggaggtaaagaacgatgcccagataagatatgatgagacaacaactagaaaagtaataaagatctggctgatctttggaacctgatatggcgatgttccgcttaca

SEQ ID NO: 26164 - DNA, 486 bp, Zea Mays
cccggtgaccagaggatctctaactaaattaaatgggttgtcgagcatcactgagctatgagaaaacataaacaaggaagagaaggagatgagctgaccgggagggggctggccgcggtgaggtgggttcacggtggcggaaaccagttttggggagaactggaaattcacgcgtgctggtggctaatcgaggatgggagcgggtgctatagcttcaggatgacttagcacagtagcccgagccatcaatttataagaggcttcgtcggtgccgctccatttggccgggccgtgcgagtgaccggagataaggaggaacgcaggtgcggtgaatccgtgtccaccgtcgtggcaacctccccgtcgacgatgggacgtctatagggactcacggcgacgcggtggaaaggcttggacacgcggcacagggctatgcgacggtgatcaccggcgttcttatcctcttctgccgcggtaacgatggta

SEQ ID NO: 26165 - DNA, 282 bp, Zea Mays
cccagatccatcttttgagtctttcatggaacaacgagggggactgttaaaagaatatgtagacggatctattaggaaatgggcgctttcatataagaaacatactgcccctatttttctctcacgtgaatccaatacagaaaccacccgcgccaaacacgtcggatacaaatgggtctccctaggcccaaccatcgtatggtatgccgatgcacatgttcgtgtcaccatcacaaccaccgtcgtcaggcacacgaccggctctaggcacaattggaccgt

SEQ ID NO: 26166 - DNA, 371 bp, Zea Mays
atcatccacaaacacaaccacaaagtcgtccaagaactcatgtaacatcctattcaatgcttccataaaagcggcaggggcattagttaagccaaaagacatgactatgaactcgtaatgcccatacctggtgcaaaaggctgtcttctcaatatcctcctcacgaatcctcaattgatgataaccggagttcaaatcaattttggagaaaacctcggcacccctcaactgttcaaagagaacctcaatacggggtaccggttatttattcttgattgtcacttgattcaaagcacgataatccacacataacctcttgcttttatccttcttctcaacaaacaatactggggaagcccaaggcgacctgc

SEQ ID NO: 26167 - DNA, 277 bp, Zea Mays
ctactttatccttatgaattcatcttgccctaattagcatatttatcctactatagaataacaaccatgagctataatccagtcatatccaacctaatctagattttatctaatctagagtaagttatttagtgttggtacaaaagataaggccatacccctcatgcacttaaaactaaactagggccttaaaccaactcactcacatgcatgaggtctatcccaatcaatagagtcatgatggattgcataatctatcaacccccacctaaaacaa

SEQ ID NO: 26168 - DNA, 487 bp, Zea Mays
gtgacacgggctgcgccggatcatgctctccggctttatgatgttaccgaatatttcggcatcggttccttcgtcggcgagattcccgctgaagaggttcttctcccggcgcggttggttcatcgtcggagatgggggtaaattccacccttccctcgataaagaggacgtcggggtagaatggcaccgtcgtagtgacaaacttctagttctcctttgagggcggagatatctagagagcagcttgacgagcttttaccttgtttgcttcctttttccttgtgatccacgtccatttttccgtagaagaggtggtcagcggagtcctccgggtagtcggatcttctgctcccggctgacgagaggtagtctttgctcggagcgctggaggttgcactatttccggctttgctccgactttcctggagattgttggagaaggcttcctctccggtggatctgtgatgcgatgtagagttccttcttc

SEQ ID NO: 26169 - DNA, 496 bp, Zea Mays
gcaagactatctgcgagatcggccttcgtcatggcacaaaggccagcttcaagcttcggaaaacccatacttctggccatctcccgacagacggataattctttgttgtctaggaggcagtacaaaaagtcatcttcatttgtaccattaaacactagggcccccttcggatactgcaattcccgggcataatgtttggcttcagaaatttcttcttcggatagtctttttcccgaagcatgtctaacgatataatcaaatcttttggagagtacttcaggagtaagggattcgacttctttggccacacttttctcaaaagctatattagtatctggagttattccttcagccctctgctcggttgtggcaagcttcgtctcagcaggcactttgggccctgcctcggtttcagcctaggttattgtagcttcaacttctatttgcttagtatcagctttgggttgcgttttgtcagcttcggcaaccttccctg

SEQ ID NO: 26170 - DNA, 334 bp, Zea Mays
tagttttcaacgggcgaacggtccaggcctgaggtcggacggtacgcacatggcaccggacgatatccacttatctgtttgatggtccgaagtagagatgtgagttttgcacagttcatgtctcaggtgcatcgaggtgtcgtagacggtccgacggaaggtcttggacgattcacgcgcatgtgatttctccaaaagctcccctgtctggaataatatacgttattccggacaatcgacttagaattgagatggatggacttatgcacctgtgaaacaatcaactagctatactactttgtccataaggttgcgatggtcataaaaaccaaaa

SEQ ID NO: 26171 - DNA, 360 bp, Zea Mays
agccttcagggtatggccactgatagacagctgggaaatgccgaaagaaaccatcactaaccctagcgaaggcggcctggttcgattgaaatataccttcaggtttggagaccagtttgtcgaaccagatgatgactggctgaagtgtgttgaaaatactagcgatgagttacttggagcatattccaagtctgaagataatgcactatctgcggccttcgggagccgaaaaaagaaaagattaaataggatttttgatgctattggatttgtgtaccctgactatcgctacccgccacgggggcagaaaagaaagggtgcaacctctggaaaggttgccgcttcggctgctccaagcga

SEQ ID NO: 26172 - DNA, 394 bp, Zea Mays
ctcactacacttgattcagcagcctactatgcaatgcaagcaccacaaggccccgtgcatataaactgtgcttttagagaaccactagattacactaatcaacattggaatgttgattgtttgctaggtttggataagtggtttaaaaatagtgaaccatatactaaatacgtaagaatgaaaacagtttctgcattgggtaattactcttgctcagtaatggaggtcctggagatcatagagaaggcagaacaagggcttcttttagtgggtgctattcatacggatgaagatatgtgggctgtagctttactagctaggcacctatcctggccagttgctacagacattctgtctggactgcgattgcggaaagttgtaaattcattaccag

SEQ ID NO: 26173 - DNA, 463 bp, Zea Mays
ggagagggtcaacgatgatgaagtggccgcgagagagcgagaactcgggtatcaatcacccgagggggacctcaaggacgtcttcactggagattccgactccggggatgatagcgaccgctgcaagaagctgtacgtcatgtacggcgggagctgggaactcacctcccgcaggaacgtcaagtccctgcgacgtgaggtcctgtcggcaactccaggggtcctaaaggctgccccacatcaacaatggaggagcaccaccatctccttcgggcatccgactgccccgacaacatggcaggggccgacatattgccactcatcaccgcccctgtcatcaccaacatgcggctgcaccatgtgttgattgacggcagggcaggcctcaacgtcatcagccatgctgcgttcaagcagctgcaaatcccggggtcccgtctgggaccctcacacccattctccg

SEQ ID NO: 26174 - DNA, 299 bp, Zea Mays
actgtcttccaaaaataggatataaccgcgcgatactgagataaccaatccatacccaagataacatcgaatgcccccaaggaaattacaacaagattggccaaaaagacctcatcagcaagaataacggaacacccctgacaaactgaacagctactaatggagccattagcagaactaaccacaattgggtgacccaacctctgcaccgaaagaccagcccgcgacacaaaattctccgaaacaaaggaatagctagcgctagagtcaaaaagagcatgggccacaaacgaatccac

SEQ ID NO: 26175 - DNA, 588 bp, Zea Mays
agaatttccccccacacagcccacttcccttcctttccttttttgtttttttcccttttttctggtttcgctgacggctgggtcccactctccagagggcttcttcctcaactgaacaccgatgcttccgggcggattccaggcttgagctccatccactgccgccctcaatcccaacagacttccatatatatcgctcaaggctcggggtgttggaggcaggcaccgagatttccatcctctataaacctaggcacctcacccatcacaccagatacccgacgagcaccatcctgctcctgcgatggccactgcctccctattcgttttcccctacaccgatctaggcccgcaaggacttaaggcctcatctgcataactgcctttttgcggtccgcccaagccgcggccggtgatgggcaagctcatccgccaggaccggaatacctcatcgattcgacgtcggtgttgattcctactccacgccatcgccagacaccgattggacggcctggggtgtcacgagtgtgcaccgcgcctcggcaactcaccatggtgatctcgtgctccaccgcaagaccaccggcg

SEQ ID NO: 26176 - DNA, 478 bp, Zea Mays
ggaatcaagcctagatggcgaagatggggcacaaagacgacatggcagtggagtactggagtataagaagcggagatggaacccacagtccaagcggtggagtaggaggggaaaggggcagcagtgggatcgtgggcatgggggcagtggaggacggagaggaggggagcagcaggcccggacccaaacatagatcccgaacaaggctagcgacatgaatactgctaggattactaccaatgtcgagtaacgctaacaacgtcgggtagcacggtcaaggcaacgacggacagcgtgctgatgaggtggcgattgaaggcggagaagacgatgactaggccaatgtcgacgttcctctggaagagcacaaggaccgatgggaggcgaagatgtcgcctagcttggacgcgagcctactagcggagacaaatctgacgtggtgcgtgctgtagaggacgaagacgagctcagaggcgtg

SEQ ID NO: 26177 - DNA, 370 bp, Zea Mays
gcggtctggcgaagcgtgatcctggagtctccctggtgcacctcaatccccaggtaggagagatgccccaggtcactcatttgaaaggtggacttcatctcttccttgaatgctgtcacctctgcatccttggcaccggtgatcaccaagtcgtcgacgtagacacccaccagcaaggcacttcctccattgccccgccgatagatggtcgcctcgtgcgggcttggcctgaagcccattcctttgagcgtggaatccagcttggcattccacgcgctcggtgcctgtcgcaggccatagagagccttgcgcaggcgcaacaccttgccctccttgccagggatcgcaaaacctggcggctggtgtacgt

SEQ ID NO: 26178 - DNA, 534 bp, Zea Mays
gaaaagttcacagggaagtggattagggagttaccttatgtggtttggagcctaagaactcaacccagtcgagctctgcatggaaacacccccttcttcatggtctatggttcggaggcagtgctacctactgacctcaggtttggggcaccaaggctggtcttcgaaagcatagctgaagcagaagctaccaggctagaagatattgaatatagtaattcagtcagcaagataccagcagaccctgaggcgctatcatgataaggctatacgacatcgatccttcatagtcagagacttggtccttcgccgaattctaacgggagaaggatggcacaaattgtcaccgctatgggaagggccattcatggtatcggaagtcactcggccaggatcatatcgatttactcaaatggatggcacggaagtggggaattcatggaatatagagcatctcaggaagttttacccttaacaagagctatcggagcaacgttgtactctgtaattggaaaatacgtcatcaataaaaga

SEQ ID NO: 26179 - DNA, 297 bp, Zea Mays
ccaatgactttatcccaaatcaagcataagtaaccacatatatctcgcaggtgataggggatcacacgacttctaccgtctaggcaagcctaagcattttaagcgtgcttactttaaataggtggcaaggatagggtaaagaaagtagtcagggtatatgcagcaattggtttcaatcaacccctatacctaatgcaacagtataggtaggcagtgaataaattaaagtattgcaaatataggaagttagatgctggggctcgcctttctcgaaggaactagggcggtgatcaggac

SEQ ID NO: 26180 - DNA, 452 bp, Zea Mays
agtggatgcgagattggggtagcaagcgcacccgaagacacgaagatggttgtaagagggatggatgccgaagagagcgaagtaaggagtggggtgggcaatcgccttggtggggagatggttgaggaggtaggtggcagtggcgagggcctcagcccagtaatgagtgggaagagaagcctggaaaagaagagagcgcacaacatcgttcgtcgtgcgaatcatacgctcagcgcggccgttctgaggagacgtgtaggggcatgacatgcggaggtggacgccgcgagagaggaagaagtcacgggacacattgttataaaactcgcgcccgttgtcacactggatgctccggatggtgcgaccaaactgagtggagacgcaggcgaagaagtgagacagggtgggaaaagtgtcggacttctgacgtaaaggaaaagtccacaggtaat

SEQ ID NO: 26181 - DNA, 397 bp, Zea Mays
atccatcgggtgtgctggacgccgacggacgacacatgatacatttgctcgtagtcgcgtcatccttgcccctgtcgggccgggccaactgacctcggtggctgcatctcaaattcatcaggccgccgctgccgcaacctcaagccgcgaccaccgcacagaggacctccgactgggggagaggcttgtggaaaagggaaacacgcaagaatagtttgatggcgcgcaggagaagacgcaaggggagattgggggcgcatcacgaccgcgaagatatgcgtagctcgtcacgaaggattagcgtcgctaaaatttggggcagatttatggtatctgttggacctcagtttttatgtttcccttcctaaaaaacatattagcggtcagattaacaacc

SEQ ID NO: 26182 - DNA, 296 bp, Zea Mays
gtccggtgtgaagtaccagtggacttttgatgctctctgttgtgatgatctgtttccagtgatagctatatcgtgcgctaggttattgttatgacagtttattatatgggcttttagagagcagcaagataaggaaagtttgtggtaactgcttaagtattgtttcattaggtgagtaatgctagctagctgtgcaaaactcatcagtaaggaaggtttacactttacaatgatcttccttaatgggttttggctatttactgtgttctgcctttgtatgtaaagttccaatttgg

SEQ ID NO: 26183 - DNA, 422 bp, Zea Mays
atttggctgagcaaccaaactttgactttatgctcattagacgggtcacgaactggaggatggtaaccgttgtgtgtccatgcaaaggcatttctaagtcttggaggagtttgaacaactcttcaacctcttttgtaggcggatcttcaggattgttgacaaactctgcctgcatatcttctaacatatgatccaatcgatcaacgttttcaccgtcatccacctccatctatgctgatactatactccgtgactcgtcgtggttatcccaaaccttataaccttgaacatacccatgactgcaaaggtgtagtgccacagttctcttgtcatgtgactggatgttcccacatttggtgcatgggcacctaatcacagcgtgggttgactctccacgagcgttctctaaaaacttttctgtc

SEQ ID NO: 26184 - DNA, 556 bp, Zea Mays
gcacgctggccattctccttctcttgggagttgtggcgggagcctttgtcaccttcggcaattctgcctctaccggtgggctcagaattttttggcatcatcactgttttttccaattctgactctctggccgcatcatctttggctttggctggcccgactataggcaccttcggcactacagtagatccttcagcgctctgagcgtcggaagcagcttgttttgcttcggcagcggaggaggtcctttcaccaaattcaggcactacgaccgtttcaatatattgaggccagtgggttaaaacctttattttcttgcccttcggcacaacagtggtggccgaagcggcagttttcgtcttttttccttgccttctcaaggggtagcagtaaacaggatatatgaagccaattgcatcaaaaaaccctgttcaatcttttcttgccccgacccccgaaggctgaggacaaggcatcatcctcggctctggtatatgtaccaaccaactcgtcgctagtagcctcaatgcatttcaaccagtcatcatttggttcc

SEQ ID NO: 26185 - DNA, 976 bp, Zea Mays
ttcagatgttatagaagatatatcaagtgatccagacgacatgccacatgatttctagtttatgtatcgtgtgtttaagactcatatactatgtggttaaaacttcagtgaacatgtatgatcatttatgtgtggtcatgactatgtattgtgtatttgtgtggttgagacttgtatgtggatgtgaatgaacaatcgtgttttaagacttatgtgttgtgtgttaaaatttaagagtggacatgtatgagcgtatgaccaattatatgtggacaagattgtgttttgtgtacttttgtgaatgagacttgtatgtggatgtgaatgaacaactgtgtggttaggatttgtttattgtgagcttttccgattacaggtaccgtttcccgatcaattttgagttattttgctcggatttatccgttttcgatatacaggaatttaccgaccgttatccatttctgactttcctgtttaccgattccaactgaacaaaaaattatgcgggtgaaaacggtgagaagttttttccgaccattaccgaccgctttcaccattacccgggtgtagtgacaaatgtgcaagggtcttcgcatctgtctcaacgggtgcgaggggtaaggaagctagttgagccgactaggatccgtgtaggtagttggaacgtagggtccctcataggtaagctaagagagttagtcgatgcagcgagaaggaggcgtgttagtatcctgtgtccaggagacaaaatggaaagggcaaaaagcgaaggaggtggagaacactggtttcaaactatggtactcagaaatagtagcaaacaaaaatggagtaggtgtcctgattgataagaccctcaaggatggagtggaggacgtcaaaaggcagggagataggattatcctagtcaaactagttttgggggatgtagtcttgaacattataagtgcttatgcccctcaggttggtctcagtg

SEQ ID NO: 26186 - DNA, 533 bp, Zea Mays
cgtttgtcctagcttgcagactgagctagcagagagagacgctaggatagccttgcttgagaaggctagctcagtgagtgtccctgcacctgtgcagtgtgcactttgtgagggtttgcagtctgcccttgagtcctgcagacacgacaagacaaggattgaggaagaaaacacataccttcgatctgtcttgagttaggtgtcgtgcagtgagtcccagttgggcatgatggtcagtcagttcaagaggggaactggcggaccgaggttaggctttgctgctaaggatgggagtgtcgctcgctttgggaaggttggtgagtgcagtggtttgacaccttcagagaaaccttcacccactcccaagcttatcaaaatcacccctcctaagcctatcacccctatgagagatggtgtgattgaggagcctgtgagagcccctcctcagaaacaagtgtggcttccaaaacctaaccatctcaggaacacacttgacacccttcccgacatctctagtgatccccttcctagag

SEQ ID NO: 26187 - DNA, 280 bp, Zea Mays
tagtcataccaacctaatctagattctatctaatctattatgatctaatctaaagtgagttacttaatggaccagttaatacttgtgaaatagattagaccctatccatatgttttaacttagttcaccctacactaaataaagaatgatagaccaacccaaccaatagagtcttgatggattgcataatctgcctatccccacctaacatcaaacgaacttttgacctacatcatgtagtttatctcatccatatctatcttaaccatattccctagcc

SEQ ID NO: 26188 - DNA, 599 bp, Zea Mays
ggcgctgccagattagtgccaacactcttatctcgctctgcaaccctttttccgcgccccgacgaactgttcatagctccagcaggccctctatcccaaagtgcaaaatagaagccacccttggtgctccgtatgcctatgagttctttctcatctccgcacctcaaccttcactttcatccgctcccaccaaatccgctaccaccctgaggatcgaccttcttcctccccccacctattgtcgaatccgcaggagttggtctcatcacgacgctccacctctaagcccacctgctgctcaaggaggactgaagggagtacgtctaagtctgctcctgcatcaacggtgttgcatcctccgtcgagcatcgccattgcgtactctgctccatgctcacgcaccacgctaacaccgcgggtagcttagggaagctcagtcggctcgttgactgcgacactgcacttgcttccagagttctaggaggctcccgatgtttcgcaaggcgtggcctacgaggacattgttggtgtttacttccgactgcgcactacttcagtatatggaaatatcgaatgagttccatatatcctctcacgaa

SEQ ID NO: 26189 - DNA, 382 bp, Zea Mays
ttggagggttggattggagcatcgacatcgcaccatacaaacaactccaaaaggttggattcaagcaacacacaaccaaatcactccatgtcaccatagctcaagtatcataaatgcatcaccatcaccaggacaacacccatggagaatcaaccattgtcatgcctgcatcatcattaccaacgatgtcccacaccaagctagccattctcatatagtgttcgatttcgcttgcacctctttacgaagttgccctacaccgagccaacacccgccaagtagggttggccactgtagatcgctgcaagccatcaaaacgatgaatgaatgccttgttgaagaagcaaaaatggttgtacactttggagttcatccatctttg

SEQ ID NO: 26190 - DNA, 414 bp, Zea Mays
gagagtttgtgcggaggttgaagcagtgataatttcaatataaatgattggtctttcgtgcatttcgtttgcagcgcattcgagtagctggaacttcaaacgtcctcctggtacggcggtggccgccaatactcctcgtctcctccaattctttctcgggaaggtgcagcatgaggacgccgttgcaaacttccaatcgtcggccggggaacaatccttgaacttccaagctccaacgacttctcctggaatgtaaattgggccgtatgtccacggctccacgctgcttggttttcaaacggcccatgcatctgtgggcctaattacgcactgggagcgatcgtcatcgtaccctcgtgagcaagtataataaaatgatataccccaactacaataaatatcatcatcctcccg

SEQ ID NO: 26191 - DNA, 397 bp, Zea Mays
agtcagtctggtcactatttatcttcattgttgcgccctcaagcggtagaggtggaggtcgtggactgggatcgtgctgcacgccgaagggagagcaaggcggtccgcggttgcgccgagatgcccgagcttgacgaggaacaggagagcacggggtgagaccaggagagcaggaccgctgggctgggaaggaggtggtacaagaggatttggtatgggccgcaacaagcagatgggccttcgaggacgcatgcactttctatttgcaagctaaacttagtaccacatcgaccactgaattgtgcagacacatgtttataagtttttgtgcggaacatcttgtgtattcttacctgaccattgctgtcaccccaaatagcaggcttttttggtcaaa

SEQ ID NO: 26192 - DNA, 529 bp, Zea Mays
ggggattcaggactctgtctgctcacgagtccctaacaccactgtccacctacgctgcctcggtcagcgatgctgcccgtcagaccctgtggtcgctcagccacacctaccggcagcagctacagaacacgaggttcaggcatcttcctcagcgtctacgtggaggaagtcagaccagcatcgtcccaggtgaagctggtgaggatcgcctcaacaccctagctggtgtagtggccggtctcaacaccgacctggacagtgccaccctggatctctatagggtgcatttggagctggagaatgcccatgccaggattgcagccctggaagcccaactgcaaggactggatccgcccgaagctcaggtccccgccatggcgttgtctcctccccgcaagaggctgcgctatggagagcccggatccgtcactaggctactttaggagttttgagtcatgatgtaataagttatacttcacgttagacgatgatactctttttaagttatcctattaataaataccaacca

SEQ ID NO: 26193 - DNA, 308 bp, Zea Mays
tgaaggatcaccaaccggaacaaactcgcaatgcatcagtggggaccaagtcagtgtcatcagcagaaatcaaaactctgtcatcgggagcgccggcctctaaggcgactccctgacctgaagcttgagctgctgccaggcaaccagaatgcggaggataagaccctacgtgaacatctatggaagtatgagagggagaatcaactcgtacaccctcgggggctgggtcatagctcgcgctacccatctgagccggatcatccccggcaacaccctcgggggctgggtaagcgctagcgccatccttg

SEQ ID NO: 26194 - DNA, 476 bp, Zea Mays
gccctaaagatctggcgtcattatttgctgggtaatgtctgtcatatttatacagaccacaaaagcttgaaatatatcttcacccagtcagaattgaatatgatacaaaggtgatggctcgagctgatcaaggattatgaattagaaatccattatcacccatgaaaagcgaatgtagtagcagatgcgctcagtcgcaaggtttcctgtcattgtctaacagtgaggacttctgacattacattatgccaggagatggagaaattgaacctgggaatgattcaacatgggacttcaaaccatttgaagctggagtcagtcatcctacaaagaataattgacgcacaaaaagatgatgagggtatgaagcacatacgtgagaagataagggctggaacagccaaatgtttcaaagaagacgatcaaggtgtggtatggttcaataaccgcatagtggtgccgaagaatgaagagat

SEQ ID NO: 26195 - DNA, 296 bp, Zea Mays
cgattttcaaactaaatattcgagaacggaggtactacatagtttaaattaatgctttaactaaacgtatggccaacccacattgggtggatgggtggagtggtcagatcgatcctacatgttcagtgaaccatttcatcaatcgacttgtgttcccccgtgctctacataaaatggttaaccttgatggtacggactctaaagaccttatatcattatatgttggtagaggccaccatcgttcatcaaataaatgtgctactaaatccgcaacatatcataccaacatatacatg

SEQ ID NO: 26196 - DNA, 396 bp, Zea Mays
tcagtatttggaggtacttcttcgtccccttgcttggctgtggcaagcttcgtctcaacaggcactgtgggttcagcctcggttccagcctcaattattgcagttttaccttttatctgcctagtatcagcttcagcctgcgcctcggcacttttggcaaccttctttatggaagagcggcgtttggagtctgttgtttccaaaatgtctaattaatttaccatcctttttcttctaggggttatcgcaaaacttttttctgccttcagcactgttgcttctgctgaaggacttagaatctcgagcatctttgttgcatcttcagtttttgatctttcagccttatcttcgtcaaccctcgtttcaataagcttagtcgaaggcgccttcggcatt

SEQ ID NO: 26197 - DNA, 357 bp, Zea Mays
cacggtttctatcatttctaaccattcttgacatggccttttgaactgtttatcgaatttgaacttataaggtagtcgcacaagttctttcttctcctttgtcccctttagcttcggcatgttccattcactcaacgtagggaacaccttataggccagatattcttggactagatctcttgtgctgatctgctcggctaccacccggaattctgccacagcttgttggcatggtgaccccggctccatacggcacaacagcctagtcagcccaaagcttaagcttagagggctcagtactagcgtcttgagcttctccctcttcttctcatcggccttcacataaaaccactcatt

SEQ ID NO: 26198 - DNA, 465 bp, Zea Mays
gatttgtgcccgatgcgacggattgggttccttccggtggctttccgccaccgtgagctatgcgccgccgtctgctgctcgagggaaggagacgatgcatgtccaccgttggatcggttatgagcgacagagattagggcggtcataacgtttgggccgaagctggtattagccgtagatctttgatcggagagttgggagctcgggtaggtgctaggtttatttggaccgtcggatcgggatctgaccgtactgggcgcgcagcagtaatacgcggagtagatctaatctggaccgacgattttagatccggcggctcttgtaccccgataccccttcgctacgtcacattttctaaagagtccccgtgcttaattgaaataaacccgcagtcctgtaggagtagtctgagtctgggaagattttatggtttagtccctggggtttctgataatgatgtgctcg

SEQ ID NO: 26199 - DNA, 334 bp, Zea Mays
aaaaaatttgcggagattatcaatgttccaagaatgctctaagtcttcgccggatggcgttgtgagcctgtacgcgctgggggacgccttcgtcttgacaatgaaagggccctcccatttgggctctagcttgccccgggactctgttcgtgctatccggacgagtacgagatctccttcgctgaattccctcgggatgactgtgtggtcgcgccatgcttttgtttgagcttggtatttgtttagagcctgtagggcgaagacgcggtctccgtcgatgaggtccttcgaagtaggctcgtccacgttggggatggctgacggaactgtccgt

SEQ ID NO: 26200 - DNA, 377 bp, Zea Mays
ccacacaccgcttcttctcactcaccggagctcgccctatgacccttgctgacgcccaccctcctcttcctttgcactcacaggcacacaccctcctcttcgttcctcctcaccgtcgcccctcactagcgccgctccccaccgacacagcagctcagccagagctcaccaacccactcacagttcaagcagatggagctcgcccgcctgcgtctcaacttgcaccttgttcccttgacactgggccactcattgtaaccggaggtcatctcacgcttgtgcgtgccagtgccaaagctggagctcacattgcctatgcgtgtctatgctgaacccaaagctcgtttgaacatctgtgcttggagcatgcactcttg

SEQ ID NO: 26201 - DNA, 308 bp, Zea Mays
gaaggctacaagaacaacaaaataatgcctcaggatggcgagataaaaaaagagacaaggggacgatgcaagaagcctatgaactcgatgaaaactggcttggggcgcatcggtgaacccttagggatagaaggcaacgatgaccaccctgccccctatgcctccttctgaacctctgtggaatggctgagccatcgagcgacgttcgaatcgctcgggaggaccttggtacctggggacgaaggatcctcccatatctgatccagaggcatagatcaggccttcaggggagccacccctcgctagag

SEQ ID NO: 26202 - DNA, 354 bp, Zea Mays
gttgatgtctggactcccacacctgatgatgaggccgccaagactaatggaaagcaggaataatggtgtaataaaagtagagtagtgtattgtagggtattgtagggtgtactgttgtataataggttgaacttttgtataatgggtattgtatcctgttatgtaatatcgagtctgtatcattactttttatagtaatgtaaaatggaaggttttctctggcacattatgtttacttcaaatgtttttgccacagatgccgaccaggactcgaggacaggacgcagccggaacttctgggggcagggatgttaccccaaacccacctccggttcctcccacgttagccgaggc

SEQ ID NO: 26203 - DNA, 487 bp, Zea Mays
ggcatccccatccacggtgatgaactccggtgggaggaaaggacgagggtccgccgggaagttggccatgcgcaagagaggtgggggcagcaaggagaaaccgtagcactgttgagagagaggatggagacgaaagggttttctcaacaacagtgagagaggagtagccaacgttagaatcaaaaaggcgactgaaaccaggtatagcagacaacccagtaaccgtagccagtggaaggctgtgacggagggagcgaggaataggcaaaacgctttaagggatgggagccgaatagttgccctcgtcagaatgcgaaaaggcacctttactggaagattgagtgggcccggtgaccgaagacaaaggagccttagctaaggcaccgggagcaacttccaacgcaacatgagcatcattgcaacctaccgccaatcctttaatgcagtgcactttaggcctccagagcagtcgtgtcataggttgaga

SEQ ID NO: 26204 - DNA, 740 bp, Zea Mays
tacttcagtagtaatacctgtcctatataggatgctctgcccggacatgccattgttttctatttgctggattttagccgcgcgggagggggggcgctggtcggggctactggagaagatcacttacctttagtgacaatttttgtgcgaattactgacgctgcattgcatagatcagttccgttttgcatgtgtagggcggtgaaagcactccgttactagaattggggatatggacgcggttattctagtttttccgcggcggttttcagtgagtgcagaacttttaaaagttccgagaatggattatgacgtgtgcttcagttctgccgtttcttgttccgaatgtagaacgtggtatcaaagaagattcagtttatatggctgcgtatgcgttactggtatgaattgggggggggggggggctggtcggggctactggagaagatacacttacctttagtgacaatttttgtgcgaattactgacgctgcattgcatagatcagttccgttttgcatgtggagggcggcggaagcactccgttactagaattggggatatggatgtggttattctagtttttccgcggcggttttcagtgagtgcagaacttttaaaagttccgagaatggattatgacgtgtgcttcagttctgccgtttcttgttccaaatgtagaacgtggtatcaatagaagattcagtttatatggctgcatatgcgttactggtatgaat

SEQ ID NO: 26205 - DNA, 589 bp, Zea Mays
cagggtctgagtcttcaacgtgctgcagactttcactcccgcccgcctacggcctacctagctacctacttacctgtagcttctcactgcccgtgtcactctgcagtctgcactgcactccaaagcatcggatcggatcctgagggctagctgacagaagcagctagtccatcttgtccacggtctcccccatgactctgaccgcacgtttcgttccagttaaagtcgatggatggcacgtactttgcggcgagaatcggcgtcagggggggcttgaataagacggtgtgtgaatcgacctttccacgaagaagcacacacgaatgatagtccatgttggaagagtgcacttcttctccgctagctaggccgcgcgacgatgatggagatggaagagtgcgcgctgctactacgtttcctccggaaaagaaaaagaagcttcggctgaagctgctcggtaaccctctgcctgatccaatcaaaccgtttcctcgtccggagtcctgatgtgacatgcatggccgattgatgagcgttggctctccgcgcgcatagggcgggtcggtcggtcggtcggcgaaaggttccc

SEQ ID NO: 26206 - DNA, 851 bp, Zea Mays
gatgtacttgagggaccatcaagagtttccctaaattgtcctataaggtactgtactactgtgctgcacttttcatggaatatgctcactgtaccattttcaaacattgtacattgtcaaatcttacgcatataaacatatatgtatgtagaggaactatttatgactgaccaggtgtccaggaggagggggggggggagtaatacagccctcaggcattttgcttaagcaaaagaccttaacatgcaggtcgagaaaaccaccgaacagttgccccacccatacacaacagcgttgtagcccatgtgtgagtggccacaaccagggcagaatcttaggcatggaacagacaggggaatttttttaacccctgcctgaaatttgcttccatgggagccacctaactagctcagctagatgccctttcaatatggaccttgaggataaataatagttgttttagtgaacaactaatcttagtgtctacttagttgggaataaaaaaaatactgcacatggatggtgatggaaagagtgcaaaagaaataatcgtatcttgaatccatatgatcgcaattcgctatgactatgactacacacagcctcctattgaattggaccatacattcagaatgtaacaactttctggctgcgtctgcaatttctcactcaataacttttagatagttgggtaacattttgaaaatttgatatctgcttgacatatactaatcaatttaatatatttggttgtaaaaacactagatctgccttttgatgttgaacttatttccccctctcctgtcgtagttttaggcgcataaaaactcctatcaaaggccgtctttgca

SEQ ID NO: 26207 - DNA, 818 bp, Zea Mays
gcgcgaatacctcaagggtgggcgaacaactgtgtttcaggggacgtcaaacctgcacaagctggttgcgaaacttgaatgctagttatgtgagaattgtatggcaagagcaaggacatgaagctaagaagcagctcattgtttgtgtgcctctgggattgatgcagacaggaaagaggcaccctgatccctttcttgtaaatgttggtgagcatgttggcattggcatcttgatctgtttccataggtaaggtgaagaggattgtgtaagataaaagggacaagctgtatgtaaagacaagccaaagctgagtgaatttcaggcaccttattgtgtggagggtcctgtgtttgttgagtaggcaacgctcgggctggtgtgagatgatgactgcatttgtgttgtgttggtggtattttcactgctgacatgactgttgtatcggatgacatcttttctgttttatgacagtggcagtgtgatactaggctgttaggaggggacgggggaggtcaaacccaacgtacatcatgagtggagctgctgtaatgtaacagaagtattgcaccccccccccccccccccccaataatatataacatgcttaatttggtgcgaattccttgccgcttgtggagcttagtgaatcgtcaaatataatagtttgtgtttgtttggctgcactcatatccacctcagttttacattcgatccatataatatttaaggtaaattaagggtggaagttaaacttacatttacaatccacttgaatgtatgtggattgaggtgaatatccaagcaaatcttaaaatga

SEQ ID NO: 26208 - DNA, 471 bp, Zea Mays
ctgccgcagatctgaatcagatatccagatcacacacacacacaagaggcagacggagcttgcaggtagtgcggaaatcctggagcactccgcgcgtggctgggacggagtcaatttgaccatcttttgcgcggtcaaccgactcgacatggcaaaagcaggaacgctgctgccctgccactggctcgtacgtgaacgatctgggattatggctggatgatcgtccgtcagatggccgtggcccccagtggaggaggcagctgggcagtgttgcttgcaataatgctaggaacatgtagtgatgaaatgtggtgttgctgttgctctcctaattgaatctgtcgacatccccatccaaggcgcgagtgtagtgtaggcaccccccaccatctcctccggccactgcagctgcaggcagtggatccgggtcaaccgagcactagaacgctcgctcgcccccccgaatcacgc

SEQ ID NO: 26209 - DNA, 423 bp, Zea Mays
aagctttcctcaaaagaaaacccccttaacttcctaaaaatcttctcctctttcccccattaacaacacttcttcttatcttgctaccagatggagggcacctttatccttaagacatactattgctcggaggtggaaggatttccttaccttcgtcggagttgtgcgcttcgcttgggagtccgcaagaagccatagtatgtccggaaggaataccgtgaaaatggagtcgagaagtgctctatggcattctacctgggagaaaactgaagctacccaaaccaccctcctttctaggccaccactactggccacgcttcccagacactgccagaatgctgcccaaaaagccctccgccaattattgcataactacagcaaagaagtcgctgagacacccctccgctactttccacccagcaa

SEQ ID NO: 26210 - DNA, 506 bp, Zea Mays
gcaccatgtgccccaagggatcgttcagctcaaggaagatgaattccgggaactgactcaagacggaagatctgtcagtgaatatgtgcacaagttcacagagttggcccgctacgcgccggatgacgtcagcaccgaagtcaagaagatggcccgcttcctgaaagggctcagaccagaactcaagaccatcctagccagccaagacttcctcagtttctcgcacctctccaacaaagccatgcaagtagaaagggcaaaagaagaagaaaaaggccatctcaagaggaaattccaagtcctccgagctcagcagcaagaccggcaccagaaaactcgatcctttggatttccacccaagggaccaagcttcagtagaccagctggacccgccccgtcacaattcagtcagcagagtcagagctcctttcatgccccctcagttgcaagcaaccaacccctggcgaatgcatgttggcactgcggagatcccagtcacttcaaga

SEQ ID NO: 26211 - DNA, 460 bp, Zea Mays
cggtgactgagaagggggaaacgtcgttgcgacgagctcgagtggaattaggaggtctggttggggctatacggtcgcaaagagctaccaattcaccgtgcacactcaatttggggagaggtggagaaggcagtgcgaattttgtcttctaccaagttcaatggtgaaattgtgagtgcctcgccgtggtccatggcgctatttataggcacggcggtccggctaacgaacagcagccacagattgtattgttcacgcatggataccacgtagagaagaggcacagtaaggggaaaacaaggcatgggtgacaccgcggcacaagtgaccgagccacggcgaccgccggtgggatatctccggccacacatggctgggttcgcgggatggtgccacgtccgaatttatctctccacgatcgactccctccaccggatcactcgagcacatccggttcaac

SEQ ID NO: 26212 - DNA, 424 bp, Zea Mays
tctgttaggagccctgatgagagttcgtgatggtacagtaacctgacgaagatcgccaggttttgtgcacctccgccggtgatcccacaccgtgatccttgccgccgttgtgattcgtgcctggtggagtgcagataactacactgggtggaaaatatcgcacaggacatgaacttggggcactatttcgccctgtcgccgtacccacttgcactggcgacgtggctacgcgaccgtcgccgttgtgccaccgtctagctcggttgtgacacgccttaagtcatctcaccactcgtcgcaagccatgaagactcgacagtgaccaccgtagaccgtaaaccagtgaacgccacgttagcaaactccggtgactcctcccccttttcaccacgcgcacttccccgtccaaattcgccctcctcgc

SEQ ID NO: 26213 - DNA, 433 bp, Zea Mays
agttgccacataagaattggtgaaaacatctatgaaaatgctctatctggcgctctgatgaagaccctgattgtacagtagtctgaagaagatcagcagatgcactgcacctcgctgccggtgacccccgcgcctggattcgtgccggtgatgcgatttgtgcctaaggacgcacggataacgactcagggtaaaaagatctcgcgcaagggatgaagttggggcactgtggccgccatgttgtcgtacccacttgccctgcggccggtccaggtgacctcgccggagtttgccgcctgccgctcgaatgccacatgcctcaaagctttaccacgtcacagtgaaccggcataggaagcctgtccatcgcctgagtcattgcctcagtgaccgccacggtagctcgcgccagtgacttcctcttctctccggc

SEQ ID NO: 26214 - DNA, 704 bp, Zea Mays
gggtgctcaatgtaaataatgggactaacctgcaatatactttgcataatggtggaccgcgggtttatttcaaataatccgaggggttctttagaaagagtagcggccgaagaggtatccatggatttcgaccgcaggatcaccatccgacggtcaccatgtgatcaattcacttaatgaaccagtacctaccctggccatccgatctcttgatcaacgcttcagattctaagtgctgaaagggtatcctcacgttctaatctgagtcgttccttggagatccagcggccacggccccagaatcatccgatcgagatcaaacggctactgccacttctattcttatccgtccatcactagattagcggccctggacccatctccttcctccaaacacccatgcggctcagagcaaagagctccaaggcggcgcagatcatcggcaccataatccccccaagccgccaccccggataactttagagagcgctggtgatccccaatgaccgttctgggcgcatcaatcgctggctagggcgagggacgtccacggcggatctcggtggctgcacccgtacggcggcgagatattcccagggtcacgcaaacccgcgcgcaccacgctccttcctgcaggctccacacgctcagccgagcacccccgaccgtccgtagtctccaaatcggcggtgaaggccagatat

SEQ ID NO: 26215 - DNA, 301 bp, Zea Mays
cacgaccttcatgtccatgcgctcacatctagcgtacctaatgagatgcatgatgcatatgtatgagcataataaaaaataacacaagaccatatgatgtcacacgatagtgaagtaatcactaaatagcaagacactacaaacactcatacacaagcactagctatccatacatcatcggcacatgaatctaacaccacggaagacatgggatactcgaccctgaacttaatttgcacgcaagcataacaggggaaatgacaatcacattagtacacatgctaacttgagaatagcaact

SEQ ID NO: 26216 - DNA, 409 bp, Zea Mays
atttgggggaaaagagaaattaagaggctatggtgaacgattggaggcaaggactggttcactgggttcgtaacaagtagtcggaacaggacgaggcatcaattgatagaggacgaccgtgaggagggcgaatttggacggggaagtgcgcacggtgaaaagggggaggagtcaccggagtttgctaacgtgacgttcactggtttacggtctacggtggtcactgccgagtcttcacgacttgcgacgagtggtgagattacttaaggcaggtcacaaccaagctagacggcggcacaacggcgacggtcgcgcagccacatcgccagtgcaagtgggtacgacgacagggcgaaatagtgccacaagttcatctcctgtgcgatatttttcaccctgtgtagttatc

SEQ ID NO: 26217 - DNA, 302 bp, Zea Mays
tccacaaaagcaggagcagaatgagccacaaccagccccaatccatcgttttcgcagaaaggctttagcttgtcgtttaaaaagaaaacctcctgctccatccacactgtccgacgacgatttcatggatgctccttcgttgaagcgccaattcagatctgcctcaccttctccttcagaacaaatcagtgcaaagaagataaaagtaccttctcctcaagttccgagcgtgaaaagaagtccaaagtctaatatcattacaaaaaaactctcctaaacagaagactcctagaaaatcacag

SEQ ID NO: 26218 - DNA, 747 bp, Zea Mays
aaaagactctccgtgcaaaagtcgcctaagggtgcagccggactagcacaataagtgcgaaaaatcgaagtcttttccaaaagaccctccgcgcaaaagtcgcctacgggtgcagccggaatactagtacgaaaaaattgaattcttttctaaaaaactccgtacagaagcctacgggagcggcctgatcaacgaaagcgcgcagcttcatcacacaagagtatggttacatacatacaacaaggcatcacacattacattggctcaaccttcgggatgatacccatatccctatagttgaacaacactatcctcaattcctaacccgcaaacagacttcgcagctccccctcacccacactctccccagctggcgaggacaacaattcccgcttgccagtcccgtccacacgaaggcgaccaccttccacctcaccacggcgacgcctatcacttcgcggcaactcactcaccctctgtttcgccaccgccctttgccacctatgcccaacactcgcactcagaagatcctcatcacccataacacgcggtgaagcctccgtcgcagccacatccaatgccgcaaagtaatccaaatcctcatccaaagactcctctgtccacacaatcgaactcccagaatcatcagactcaaaacacttagacacagaatcatcagaatcgtcttcagcaaccacggtcgaagccgccacaaaattaggattgacagtagcaattgcgtgcgca

SEQ ID NO: 26219 - DNA, 305 bp, Zea Mays
cacaaatgcacaaattcagaggacccgcgtccctcatgcatattctcatgccgggcagccggagcatcacggcaacgagacgcatggggcgcatggcctcctgatttggtgatcgaggtggagtcactcgtggagatgtcagaggcccggccgtgcgagccacgtgatttctgacgttgaagagcgccggcagtgtgtgtgatcgggttcagacagaattctcctcgcatcgcacgcaggtaatccacgcttgtaccttgcttctgaatgctgtctgcagcgaagtatatagtattacagtatat

SEQ ID NO: 26220 - DNA, 355 bp, Zea Mays
gaagatgtgatgactacatatttgcccatcatccttgggcgagatgcgctgcaatggctacgacacctgccccgacaatgcatcgatgattggagcgaattcagtcggtgttttatcaccaacttccaatccctctccgacaagccggcgcagccatgggacctcaaatccatcaggcgccgaggggatgagactctccggtcatacctcaaaaggtttcagaccatgagaaatcgcatccccaaggttgtggaagcagcagtgatcaaggacttctaccggggatctaatgactcggccttcgtccgagccatactgcaaaaggcgccgactacctccgagcagctattcaggg

SEQ ID NO: 26221 - DNA, 466 bp, Zea Mays
ctcgaattgggttatggggcaccgggggcaagctgtgggtgttctggcgggcgctccaccgtgtggtttatgcgtcgctgtgcgcgggcagtaggattggggaagacgaccacggaccgttggatcaggcgcgtgtggatcagattagatcgggataccggttcgaccatgtccacccatgaccgtcgattggcgatccgatggtggggatcggatctggactacattaaacctaggccgttgatctattgttgaacgactctgattagataggagataccctttcgctcgattgaatcgcatccatcgatgttcaatcgggcgatccaagatgttttggccaccataagatctgagccatctagattaaatcctggggctcctgcgcgataccggttcattatagcacccgatctgatctggaccgtcggttttggatctgatggccagggttagacgatacccc

SEQ ID NO: 26222 - DNA, 335 bp, Zea Mays
cctcgtgtatcaagctcctgagcaagttctcaaggacatcctcactggagactccgacttcggtgacgacaacgaccgccacaagaagttgtacgtaatgtatggcggaagctaggagcttacctcccgtaggaacgtgaagtccctgcgccgagaggtcctttcggcgaccctaggggtcccaaaggcagccccacatcagcggtggcggagcaccactatctccttcggggcatccgactgccccgataacatggcaggggctggtatactaccactcatcaccgcccctgtcatcgccaacatgaagttgcatcatgtgctgattgatggtg

SEQ ID NO: 26223 - DNA, 533 bp, Zea Mays
gagccaggaacgaggaggctgatgcattggccaaagcagctgccagaggcgaagacttgccctccgacgtgttctaccacgtcatcggcacgccagctgtccgcagtccagagggtctacaaataaccaacgacaccgagggccaccgcatagtcaacctcatcatgaccgaagattagcgagccccaataaccctgttcctgcaaggatattatcatccaagcgacgtcaacaaggccaagcgcctcaagcaccgaagccgggacttcacaatcattgagggccagctatacaagaagggggtcagtcaacccatgcttaaatgcgtcaccgaaaccgaaggcatccagatcctgcacgaagtccacagcggaacttgtggctctcactcgggacctagggccctcgctgctaaggtgatctgtcaagggttctactggcccgctataatctgcgccgcgaatccagtcacgaggtcgtgcgaagcctgccagaagttttctccctgttcgggcaacccttcgcaattcaca

SEQ ID NO: 26224 - DNA, 625 bp, Zea Mays
cctcatctcgcaagttgtcaaacagcgagaatattgggagtgatatgctgcgcacagtgcccattggttcctcccgccgagataaagcatctgcagcaccattcaatttgcccggacgatattcaacagtcaaatcatagccaaataatttactgacccatgtgtgttggggaatggtggagagccgctggtccaagatgaacttcaaactgtaatgatctgtcctgactgtaaatgcacgtccccagagatatggccgccagttgcggacggccttgaccaaaccgatcaattcccgctcataagcgggcaatttctggtgatggggcgcaactgcacggctgaagaaggcaattgcaccatcaccttgatggagcacagcgccgaaccctgctcctgaggcatcgcagtccaccatgaagcgcttggagaagtccggcatttggaggagtggtgctgtcatcaaggaatgtttaagttgtaggaaagctgcatccgcagcgtccgaccaccgaaaggcctctttcttcaagagggctgttagcagggcagccacctcgccatagccagcgatgaatttgcggtagtagccggtgaggccaaggaagccccgcagcgcccggag

SEQ ID NO: 26225 - DNA, 449 bp, Zea Mays
taaatgtattccacatcgtttttatttttctgacacggtttttcataagacgatatgagtcataataggaataaaaacacatgactttcattgatggatttaataaagagggagagttgagaagcgaaggatgatctcacccatccatgtcactgatcctggagagaaggacaaacgcaagatcaatggagaacattaacaaaatcaagggctagtgaactggaatagacacctctttgtagtctctctcacataacttaacccatctgaattcccatctctactatcccttaagatgatagtgtagaccaggcacaaccatgcccccgctcccttacgatccgctcgccaccaacgacctctacaccacccgctccaacggtgccccgcaaccccttctatcacggctacaacgtcacgccagtacctgccccatccccgcacgccat

SEQ ID NO: 26226 - DNA, 428 bp, Zea Mays
ccggtgtactgccacggtgaaagccactaacccgagcaccagtaacctcctattcctccgaccgccgcgcgtcttcgtccaaatcctcggccaccgcttagcgatcctataaattgatggtccggtctgttgcgtcatgttatcatgaagccaacgcacccacgcttgcctccaattgtccaccagagaccgcgaattgctcacttcccccaaactgagtttccgccaccgtgaaagaatcctcaccgcggcagctcgattcaggtctgctcataccctctgccctctcgttttagtgttcttgtgtgcccctgatactccctgaccaacttgattgaactaggatcccttagttcactgagaacgcggttgtctgtctgcgatgtccgctgtcaccgtggccagagcaaattgggtagctgttcgtg

SEQ ID NO: 26227 - DNA, 347 bp, Zea Mays
ggtgcccaactttgccaaatcctttccccaggctagaaggggatggatccattgaacaagacttcataggcagacttggctgagtatatcccagagggtgagaattgccaaatgtgaatgtcttcaacatctggatgcaaaacaacttctgataagagatcccaaagtaacaaatattccattagtactgccaatgtaagagcaccgtggatatcagaaatccattgttgattagtgagggcatcgtggactgttctttttctggctctgttagagattgctccaaacatatttggtgctagatgatctgtcctttgtcctttcatccatctatcagtccagaaatt

SEQ ID NO: 26228 - DNA, 387 bp, Zea Mays
ggagacacaatgatgaatcgccctagtccaaccgcgagcgagaaacatagtcacgactcgcttgaggccaaccccaggtcagagacgcagtcatgagtcacccaaagccaaccgcgagcgagagatgtagtcacgactcgctcgaggccaaccctaggtgggagacacaatcacgactcgctaaccttgggcaggagacgtggtcacactcgctcgaggccatccccaggcgggagacgcaatcacgactcacccgagaccaacctcggatgggagacaatcatgactcgcctgaggccaacctcgggcgggagatctagtcacgactcgctcgaggccaacccaaggcgggagacacagtcacgactcggttgaggccaaccccgg

SEQ ID NO: 26229 - DNA, 499 bp, Zea Mays
ctttcatacaaagcttcaaaaggtgacatcttgatgctggcctggtaactgttgttgtacgagaactctgcatatggtaaactagattcccaatttatgttgaaggtcagaacataggctctcaacaaatcttcaaggactttgttgactctttccgtctatccatctgactggggtggtaggtggtgctaaagtggtgcccatagcttgttgtagactcaaccaaaattttgaggtgaactgcgttcctctgtctgatactattcttcgtggaatgccatgcagtctgactattttcttgagatatatccgagcaagggtagctcctccacaggtagtctttactggtatgaagtgagctaccttggtgagatggtcaattatgatctagatggattcattccctttttgggtcctgggtagctcaatcatgaaatccatgcctatttcctcccatttccattcaggcactggaagaggttgcaacaatcctgcaggt

SEQ ID NO: 26230 - DNA, 299 bp, Zea Mays
aagaaattgagtgccatccacaattcggtgagcgagtgctacaagccaaattcaagagataaaaagaaggaagagggagaacatctagttatgctagccacaaaatctgagctgagagaagtgaggaacaacccatatcaagtgctctttgtacttgtgaacaaagatgttttgatctctcctaacgacataacatctcttcctagtgttgtggctgatcttttgcaagactttgaagacatgtttccacaagaaacaccagctggactacctccaattcgagggattgagcatcaaat

SEQ ID NO: 26231 - DNA, 618 bp, Zea Mays
cttgggattcgcttatgaagagctcgatcagtttctgaacggtgcaatggctccatcgcgtgccgcaccgtgccgtgggtggctctccagacatcgtatctgtctccggtaagttcccagctacttttgccacgttcgtagaatcgtgtagctgctgaccaatttgagtttggtgctcgggagggccgttcgggcatcttgtcggcggtgctccaccgtgggagtcacgagcgccgccgtggttggcatatgccgtcatggggatgaagggaatggctgctcgatctgtattgtgcggtgtagattagacagccggataactcttcgtcattgctgatcgtggctatcgatcgtagtatccacgtgtgagatggggttcggacttcatagaattcgggccgtcggatctcgattcagtggtgactatcacgtactgatttactggtgatgggatctaatctgatccgttggtttaagatctaggggccgaaaaggaagcacgtgacatagccaactagtttttcataaagaacccccccaaaaaagttcataaactaagctgatgtccattgtagttgtaaaatcattgcaccaggtcctttattttgcagactaacc

SEQ ID NO: 26232 - DNA, 319 bp, Zea Mays
ttaattaactcccatcgactctcagcctagccgaccagagttaatattaatgactattgcatgcctcttcctcttgcacgcctcttatcatcatgcctattcaatcgctgctatcttaggtgttatcttcgccctcgctgtcgacccctggccaccacagcgcatgccctgaccaccctcaccctcaccccctgccacagcgtgtgccatgcccctagcttgccgcactccaagtagccactatgttccctcaccggctcactgtcaggctgatgactgacgacctcgacatcccatggccacccctgacgaactcgtg

SEQ ID NO: 26233 - DNA, 290 bp, Zea Mays
aatttggatgaagatgagcggcggccggagatagggaagaacgcaggtgcggtgaattcgtggctactgccgtggcaagctccccggcgacgatgggacgggtagagggagtcatggcgacgcggtggaaaggcttggacacgcggcatatggccgggaagcggcggtcgacggcgagcactttaccgcgggcggtgagccaaggggaggggtgtcgtggccgatcggggtagcttccagtccagcggtgacgacgatcttttaactccacggcgctatccacaagtccg

SEQ ID NO: 26234 - DNA, 331 bp, Zea Mays
atcggagacgaggtttggtgtactgagttcgcaacgagtaggcggaacagggggagctttcaatttatagactccagccaagcttagcacaaattttggattgagatcaagggtactgtggctgggatattttactgcggccgactcaccgtggcacttgagtatgaattggtccagggatgataatcgctagcctaccacgacccttacgacgcggaggagtggtcattacgtgtcacggccggagaacggtgagcttcggtgatgccagcacgactgaccacggcgagacacgatggccggtccggccaacgactggattcatccctcc

SEQ ID NO: 26235 - DNA, 359 bp, Zea Mays
ccggtgtgccgccgttcttcgcagttatgccacgccgtcagccatcttaccacgtcgcggtcgatcgcaacacaccgtccttctattacctaaggccttgccacggggtttgccaccaatcacacgtgccagtgaactttccctcctccgaccgccgcgcgtcatcgttccaattctcggccaccgctctcgcttagtataaattgagcccgtcgtgagctccgcaagatcatcacgcaccacaccacccagtattgcctccaatcttgcaaccgagagcttgaatttcgaatttcccccaaatctgctctaacccgccgcaagaacaccctcgccgtggccagtgcaattcaggttag

SEQ ID NO: 26236 - DNA, 297 bp, Zea Mays
cgaggacataaattaaaagtaaaaacacatacctatgcgttgttcaagttctgcaacttattcagctttcctagcttcttgtttggcctgatgagcctgagaaaaacataagagtaagataagcgcgaacagtaactagcatatgcgaaaagtaaaggttcagaatttgaaataacctcttcttcattttgtttgatagcttcatctgctatctctctcccatcattgagccaaacttcataatagaattttttctcccaggctaatatattcagcagaaggttcctttacgtcttc

SEQ ID NO: 26237 - DNA, 525 bp, Zea Mays
ggaccacgcccttgacgagttaggcaaggttcgggcggaggttgtggaattgcgtgttgagtgcacaacacaccactatctggatggtggttctcctgcccctgtcgggattcagcacccttaccgttcaccaccccgtggtcgctttgactatggtaccccagactgcaggacccggatagatttagatccctagatcgatagagtcagagtctgtaataatgcttagttcagtgtcttagtctagtcagtcttaattagtttgttttcttatcttatgttggatgattgttatgatggacatgtaatgaagttggatctttgtaatgattgtcaccaaggtgtgggtatcccctgcaacttggtgtagttattaataaagtcagttatttagttgggtaatccatctatttccactttcctatttatctgagaagctattagtgaagatggtcatttgttcagtgctatgaagattttctatacatcttttcttatgatgaaagactgcagagtcagatttga

SEQ ID NO: 26238 - DNA, 325 bp, Zea Mays
cacccctgtcatcgccaatatgaagctgcatcatgtgctgattgatggtggggctgggctcaacgtcatcagccacgctgtgttcaagcagctgcagatcccaggatcccgattgggaccctctcgcccattctccggagtgggccctcagccggtgtatccccttgtgagcatcgcactcccggttacattcaggactgaggaaaacttccgcactaagaacgtccagtttgatgttgtggaggttaacctcccttttaatgccatcattggcagaccggcccttttccggttcatggccattgcccattatgggtacttggtc

SEQ ID NO: 26239 - DNA, 477 bp, Zea Mays
gcgggggttgtgttgcctacagtgcccgaagaagtccactggggccttacccctttaccctttaaggattggaggagcgtgggatagaggcgaaggagtggaagcatatcgaatcggcctcgacccgggcttacatgagcctagagaccatcgatcgaatgctcgatagttttggagaagtggtttcgattgcccgggcatcgatgacgcaggattttatcccttttggtcaggtgagtgctctcttctggattgcctttcttggctcatttctttttggctgataataagttgattatctgattacacctcatagcgcctcttcatgcggtcgggggcctaagcagagacattactagtcgcccagcgagaagtgaagcagctgcatgtgggggttgcccgtcttgaggaaaaggaatgtgagctcgctggattttgctccgaggctgactggcttcaaagcaaggaggtgtcgcc

SEQ ID NO: 26240 - DNA, 342 bp, Zea Mays
ggaatttctccaagcaaagcaacgaaaacactaacttcttcggcagagggtcgcactctaaggcccaaaccgccatctccagcaggaggatttgacacgaaatgggtaaaggccttggaaggaggcaagttccaggccgagtaggcaacaggggcaccaacatttgataccttgcctctgagtatcatttcgagctggctcaccaaatccacagcaggaattcttctattggtgacccaggtggagtcagctaggcctcagtacagatatgccgggtatgccctgtccttcaaaggctgaacattcttgaagacaaagtcagcaaccacagcctctgcagtc

SEQ ID NO: 26241 - DNA, 424 bp, Zea Mays
ggataaaactttctgaggtgttctatgttccagagttcccaacttcggtgccatccatctgagtgaggcggtacgatccgggccgagtgatttctgctaccctgaagggtccttcccataagggtgataacttgtgccgtccctcccccgttagaattcggcggaggacgagatctcctactgagaagaatcgttgtcgcacagccttgtcgtgatagcgccttagagtctgctgatatcgtgctgattggattaccgcgtttagccgttcttcttcaagtacatcaatgtcctctagcctggtggcctcagcttctgctatgctttcgaaaatcaaccttggcaccccgaacttgagatcagcgggtagcactgcctccgacccatagaccatgaagaaaggagtgtttccatgtagggctcg

SEQ ID NO: 26242 - DNA, 366 bp, Zea Mays
aggaatttcatcatcaagatgaacctctttgtgaggcagatcaccatcaaggtgaattaatcggaggagagttattacagaccacgtgaatatgcaatcagagcatatgctttgactaaggctgatggatcatattcgtaggcgtccccgagaatagatcaaataccaataagtcaaatgtggatatgatattaatcccgggtatatccacatctacatcaggtagaagcattcagaccaatatggttactcctcaacgatttctggcaaactccatatacataggagtacacactaaacgacaagtttagtttggcttttgtgcgttttatagaatattgaggcattacactatatgtgcattcc

SEQ ID NO: 26243 - DNA, 358 bp, Zea Mays
ggtcgacagagagggtgtctacggtggcgttctacgggacgactgggtgttccggagtgtgggctttggtaaagttgaattggccagctccgagagcaatagaaggccaaagacaagctagaataggaagcaatttggtaggtactaacccaaggagtgctggccacggaggggtccttcacggcagcgctaagaacagggaggaggggatttgtggactgtgtgagttctccggtgagattgagtcgattgcacaagtgctcgtgtgtgtgatgtggtgaagaagtagtgcttgggctcaatttataggcagatggtcagagatggatgaggttcacggagctgtaaacgcgctggc

SEQ ID NO: 26244 - DNA, 414 bp, Zea Mays
ccgagaagcggtggttggtgaaacggggccctgggcgcgctactcgctggcgatggcgccgccacggatggagctccgccaccatcgggccgtgtctagggaaggcgataacgcggacccgttggatcctagccaacggtgatctggatggtgaagggctgaggaagtagatggacatgggccgttcgatggtagatgagcgccccagattagatgaaggtaccccttcgcctggattaagtgttgactgttggatttcaatcgggtgggcgcgagtagttctcggctattaaaaatctgagtcgttggtctcgaatcctgcgatcgggatttggcgcgggatgcttaagatatgaatctaatctggaccgtccggatctgatcaagcggttgtgtgatgtccataccccttcg

SEQ ID NO: 26245 - DNA, 427 bp, Zea Mays
gggggaggagcctccacagcgtggggcacgtctccgtcggaatcgacaccacaacatctagtgtcaccacaccgccagggagcaagacccaacccagcctattcccaagatgaggcattcgaggtcgatgagtcccctaatgagaaggtattacacatgcaaaggaatgcccgccgctcaccgtgtcactcaggagcacaagcacgagatggccgaacgcactgttaggctcccgcatgatcctatgcctgttctacacaatctgcagcttgcatttgctcaggccatgcagactccgagctaggtcggcggtgtgctggctcggattgcgaatgacttagctcgcatgcccaacactaagggttaccaacagctcgtcactcgaacaacaaatcatcttcttccactagcccatcatgaggataac

SEQ ID NO: 26246 - DNA, 458 bp, Zea Mays
cacgacggtgttcttcagagcaagcacacgttccggtgaaagctttcgacttaagttcgattggttggtactgggagcaatagggggctaatagcaagcaagaacatgaaacaattgggtaagtactcactcgaggaaggctggccacggagatgttcttcgcggcggagttaagaacaagggagcaagggatttggaggctacgtaggttttccggtgatcttgagtcgggcgcttagtggctgagacatgggatacggtgaagaagcaacgctcgccctcaatttatagtcaaccggccgcaatcggatgagcttcaccggctgtaatcgcgctggcgagctcacccgcacggcagagccacggcgcaagtccggtggccgccgtttaaccgggtagcgccacctcaacgctttgaagccacgtcgcaccagatctttaccgcagccgccgacgac

SEQ ID NO: 26247 - DNA, 499 bp, Zea Mays
aactccctatcgtgttcgtcgttgcccacactttgtttcgcacagagcggatgccggggtaatgcaccagtcaacggagtaagcggggcgccgccgtggagacctccgccgctgtggtacaacgcgtgcgcgctgtcgccaggtagaagaaaacccactggccgttggatgcgcgatatggggctagatctttacttgtcgctcgttggatgaccgcttcgtgtgtccgttagatcaaaaatgggtggctcacatcgatttgagaccagcgctattaaggatcggtctattgaatctggaccgctggggggaagaagttgatcaggtccatcggtcctagattgggcagccaccagtggttgcatactcatgtgagttgagagataatcgggatcgtccagttgtaatcggtcggcccacatcgagcgataccccttcgcgattgcgctttatcatatgaacccttacaatttacagttatcaacccgcggttcgcagg

SEQ ID NO: 26248 - DNA, 330 bp, Zea Mays
actatacaaaaggggcacgacaggagtcctcatgaaatgcattctttcggctactgggaagcaactgctagatgaggtccacgctgggcaatgcgggatacacgcagcatccaggactctggttgggaaggtcttcaggtctggtttctactggccaacgacaaagagtgatgcagccgagttagtccagaggtgtgaagcttgtcaatacttatcaaaatagcagcatctaccagcacagcaactgcaaaccatacctgtaacatggtcgttcgcatgctggggactggatatgattggacccttcaagaaggctcaaggaggatacac

SEQ ID NO: 26249 - DNA, 413 bp, Zea Mays
tcttcacctctgatttctgaggcacacaaagacggcccctgaaacgaaccaaatcattctcataaatggcaaactcccacggtttaccatcaccaaccctctttcgagcttcctgcaatagacgatcctgctgctgagccgcacgcactctctccatgagggaggattgaataagcatccgagtctcctcgctagcggtgccgacataacacaaagcgatccccaaacggtccagatcagcgataaatggcaaggccacttttggaaccccggacctgctaagggcatcagccactacattagccttccccgggtgataatgaatggacaaatcataatctttaatcaattcaagccatcgacgctgcctcaaattcagctccttctgagtaaaaatatacttgagactttta

SEQ ID NO: 26250 - DNA, 1128 bp, Zea Mays
gaaatgagccctctacgccaggctaccaaaatacctcctctagtaccactagaaggtaagaaaacaaaatccccaaactctgagccaagacaggaagcaacatcccagtgagagatagaattcagcttggtttcttgaatacatacaatagtaggcatcacacagtttattaatgatctgagagtatccctgcgatgagggtcattcaaacccctcacattccaaaccagtatagcaaaattattcattgagagatagaatacgaccatgtggggtaatccacattacgaggcttgcagcagcccatcagctggacaaacgaggaactcctcatcagggatctcccatcggaacaaggtagctaaagcctttatctgactgacggaaagaggcttatcaaattctctagcgcagcgatctagatcatccgcagaaacaggagcctctccatttttcaaccccagcttcaaacaaatagtgtgagccgttgagttcaccctaaggggaggaagtttggctacacgtcttgatcttcttggcacgaagttgggcgggatagactttctggctttaagctttggagatgaaggaaccggcaacacatttgtgaggggctttacgatcttgttaatgaatgtcatagccacctcctccactgaagttatacgactttgcttggggagttttcttcgagaatacacttgcaagatcttgcaaggctgctggaccagggtaggagatggccacataaagtccaaagagcagtgaaggttatcattctgctcaaaagacaaatcatcagaatccactgagatctgagaaccgactgtgtccagaagagccaatccaccattatgagcaggttcagacaccataagagcagaagtcaaagagtcatgagcttcttcaatctctgacagcaccaacgagtcatccattattgaatctgcacaagatggcgccaaaacagcaggcaccaaagcagaaaacagggagccagaactagaaacctcccacaaggtagcagagtaacgaaatctctccaccctaggcgtcatccaactaaaatccgaagtcattaatagcactgtctgattaaacatacgggccagggcattaactgccgcc

SEQ ID NO: 26251 - DNA, 593 bp, Zea Mays
cgagagatgatgatgcggtgagagagacgatcaaggcagaggtatcctttgtggtggggagaatacccaaggaagacgcatagggtggagcgaggagatagtttgtggggtgcagtgggggtgagattagggtagcacttgcagccgaaaacacgaagatgttcgtacgaggggtgtttgccaagtaaggcgaagtggggtgtgctggaagcaagtgtctttgtgggaaagatatttagaagatatgtggcagtaccgagagcagcagcccagaaagtgggagggatgctggcttggaagagaagcgtgcggacgacattattgatggagcgaattatgcgttcgaccttgccgttttgggggaagtgtaaggacaagacatgcgtaaaagaactccatgggaggtgaaaaaattgcgagcgttgaggttgtcgaattcgcgaccattgtcacattggacaccccggatggtgacaccaaattgggtgcgaacataagcgaaaaaatttgtaagggtggaaaaggtgtcagacttaaggtgcaagggaaacgtccacaaatagtgtgaacagtcgtctagaatggcgcagata

SEQ ID NO: 26252 - DNA, 464 bp, Zea Mays
ccctgccatctgcagtgggtagcacataagctccagaaatacccgtagaagaggaagctcccggagtgaaattaacagaagaaccccactgagccgccgagtgaggcagacgcggagctccaaactgagacggcataggagtagacgatgtaggagtaggcgcggcctgatactgagggaaaccctgcatcggcacgaagtgagaagtcccaggcacaaaaagctgctgcgaaggaagaggaactgaaaactactgctcagcacttgacatcatgttgatagtgccatgagaagaggaggaagtcaccggctcccatctgaacttcccattaggattcctcctacacaccacatccttgtggtcctgactgcaaatagaacacctgctactccactggcactctgcacggcgatgcgcatcaccacagcggaaacacaccagccccagcccaggcttaggaaca

SEQ ID NO: 26253 - DNA, 290 bp, Zea Mays
acctgctttggctggttctaccgtgcttcggcttcaacaatttccttctacttttggatcgtgacttggcacgtccttgtcgtgtgtcccttatcttccccacagaataggcagaacagtctcctgggatgattaccataccttcctctgaagcttctccccctctgcctctcggggctggtggcctatatgaagtttgttgcattctcgaagactgtgagctgtgttggctgctctgagtatgattggccctgtcatcatttgtgttgggattgtggatcgttctgaca

SEQ ID NO: 26254 - DNA, 375 bp, Zea Mays
cgggagatctccttatttgtttgtttatttgttttgtgagtacacgtggaaagcgcaattccttccctgcaatctgccctccggtggatcggcatgtggttgtggttccattttattatgaccgctccgcgcatgtattgtcgcatctatttgtttctgctatgtgtgcccgtgctttcgcatgtgtatgctgtgcgtctgcgctgcacttgcatgtcgttgaattgcccgttagtcaggttggtttctttctttctttgccattactttgatgtttccatggcaccacgatgagtggtccggaattagcttcccaaacaaacccttactggttgcagtcatgaatgaaactttgcttctttgattgatgattaa

SEQ ID NO: 26255 - DNA, 292 bp, Zea Mays
gcagggaccatctgaatccctacagcgtacgtacagtacacacacatgctgcttgctttcttccacttctccgggttactactagtaggtgggaaaagttcaacgggaagcaggcagggtccagggagaataacaaacaacaaaactctggaattgtgcatgatcgcgtaggtcaggtcaggatcagagggctgccacggaaggtagaggacgaaggatatgatgatcccaagcagtgctccacacgtaagcaccactggttgaagaggaggcctctgttgcaggacagtca

SEQ ID NO: 26256 - DNA, 959 bp, Zea Mays
cccggtccattcccggcctttgcaaattcgctctatcgccccgcggaatttcgagctggatgacgggatgagtttctctttcatcggccacgtattttgtttttcgaaagaaagcgactggggctagtctctctctggcgttttgctgacttttccgaccaataattcagagcagacaaaaaggggtttcggtaccaagaacgaggagtcgaggaccgtatgcgagtggtggtggtcgcctggtcggagcagttgttggcgttgactaaccggggactaactaactaacctcgtcgtgaatgaatctgcagacatctcgcagatactgcaggaggctcagaaccggtggctgcggcccaccgagatctgcgagatactgtccaactacaagctcttctccatcgccgccgagccgcccaacatgccgaggagtacggtttctctccctatgttttttgtgctctctttaggtgcatgctgtggcttctgaacactggcctcataaatatgcttattaaattccattagcaatcgtgatgtatttatgctgtgggctatggaagagttgttgtctgctggcagcttggcatgggcatttcggctgtgtatatttctttggagtagctagtgatacagcttatggtaaatttttcgcttgctttgcgggctcgacaggtcttcctctgcttgctatgaagccatcgaaaacatgttctcattctgaaacagaaatctggcacaacttgatgtgttgggggatctggtgggtaaattttatggtaaatagtttgtgattttcgctaggcaacacaaccacatggcggttttcctttcgagtcattgctgatgatacgtcagccacgcccagtgtcctctttcattagttttttaagaagaaacgtagttttgtttcggttagcacaaatagtacaacagttacattatagccctacagtttg

SEQ ID NO: 26257 - DNA, 324 bp, Zea Mays
gctagacagggttgacagagaggtagatgggactgatgttgttgtagtagacaaatgtactcctggtgagggggctatgaagctcctagaggagttggtgcagccagctcgcctcagccactccattagcaacaacccgatactcagcctcagcactagagcaggagatcacgggctgacgcttggaggaataggagatgaggttgtccctaaggaacatcgcatagccagaggtagatcgatgagtgcctgggcacttgaccactcaacgccggtgtggtcaaccaactcatgtgtggagtgtcgaaggagcatgtagtcgac

SEQ ID NO: 26258 - DNA, 399 bp, Zea Mays
cgccagtgcacttctccctctccggctgccgtgcgtctcctccaaattagccgccaccgctcatgaatcctataaattgagtgtgccatcagctccgctaggtagttgtgcatccagtgtgtgagctcttatcattccctacagctccccaatttgagacttcccccaaatcggtcgagaacaccgcgtgtgtgagctcgtcatggtcagcgctccacaggtccgatcatgttctcctcgctcttgttctagcattcctgtgtgctcttgaagctcatcggcccaaccaattgcactgaatcggagtagatcgacgggaacactttgaattgtccccggattgcacggtcaccgtggacagcgtaattaggcgttagagtcttgcaattgagtgagggg

SEQ ID NO: 26259 - DNA, 490 bp, Zea Mays
gtttactgaagttctaatattctgaaaactcaagaagcaaaactccacctacaggaaagatatttgattcacttctatatggcctgaagatggaaaggagttagaggaggagaacgtgtgtaccggcgaggagtagccaccgtgatagcatggacgccggtcaggcggtgaagaagccactgtcagatctgcaaaatcgaagtagttacctactaaaagctatactggaccagaactaaaattacaacccagcaatgcaccaatgtgcatcatcagacctgtagtgatgcaaataacagggaaaattcactacaaacaaatccttggctactgctcctaatcaccgcacaaattctgactgcaatcagaagcgttggtcggttcagtgactacaatcagcattggttaactggattcttattgggaaggtcttgctacctatacagatatccaagtttatgcgccatgtgtgtgcgcgcatgcatgaatt

SEQ ID NO: 26260 - DNA, 316 bp, Zea Mays
cggatgctttctccgccttgcccaagctcggcctcgcccgagcagggctctgaccttgataaacgcggcaaggaattacgacgtcactccacacagggacgctgatgcaccccgtaaacaggcttttacccatactccgacgctgttacaacaactacggtatgggcgactcctcccctgagggctcgggcgtacgaccatcccctcggcctctgcctcggctctcagcaggaaatcagcggacataagtcaacaatgcagtgcaccgttacgtcggcttacaggacaccaggacaaccccttggactacgacgac

SEQ ID NO: 26261 - DNA, 336 bp, Zea Mays
ctcttcttcagagttttttcgtcctctttcaacattctagcagcctgcctgctcagaacactgacaaccctttttctctttgtcccttcggcacccttgctgagtcgatcataattagggtattcaaaatttaaagcgtccattacccgattcaaccttctttttggtcgggtgtcgaaggctgtagtcattagttgatcttctttttttgggtataattgcccaaaatctcattgcacatagtctcaatcatctccagcctttcttggcagggctctttgaactgtttctcaaacttaaaccgataaggtagtcgaacaagttcattcttcttct

SEQ ID NO: 26262 - DNA, 803 bp, Zea Mays
cgctgagatcggagcagggagatggagatgtggaatcgagggtaggagagagaatttgacgccgcctctagcaatctacgcttgcgtggtggctcgggggtttgggaggacttcgcaggagcaggccagtggccgaccggtggacttggcatggtcgtcggtgcacgctcggaaccgcgcatgtccatggcgaggacgtttcttctcgctttgtcacaaccaccagaccgcatgaattcgtgggcaatctggtctaccgcctctgcgtcaggtatgacaccatgaattgattcgcctaacacgtagcagcatgtagcacctatctgcatttcctaaagtcactctggcaccgtgcggtactctcaccggcgaagtcgccgccatggtgggtctgggcgccaccgtggtgtgggtttcaggaagaagataacgtgatggccgtctgttccatggatgtgcggtcatgattaaatccctgagtcactacgccacaaccgttgatgctagattagacgcttgtgattggaacccgcataccccttcgggttttaaatctaggccgtggatctggttatcgacggcgagcgttcaaccgtggcgcgtaatgcctcgggccgttgatcttgatccaagggctgctagatcacaccacgttaatgaagtctcaatctaatccgcaccgctcaatcgtgatccaacagctctcatccgcccataccccttcgaccataagttttgctaaagacccccttgaaaataggagaaataacccgccgtccgcgcggggtgaatcctgagtcttg

SEQ ID NO: 26263 - DNA, 304 bp, Zea Mays
aacagagtgtctcacctgcggcacaagaggaggttcactagagagctaggtcaggctttaacaacggctggtagtggaacctagatgatatcgctcgtagtaactccagacgctgccatggaaaactcgcaagtcatccggcatgatcctgtagctgtaacctcaaatggcctgtggtctgtggaagtgtggagtggcaccttcagatgcagcctgtagtttagggatgaaaaaggcggatgcagtatggccaggatcaactgctaagcgaaaagattatatccagccgtagccttatcatagg

SEQ ID NO: 26264 - DNA, 293 bp, Zea Mays
ttgcttgtgccagtaacttcttccctctccggccgccaccgcgccatctccaattcataggccaccgccctcgaaccctataaattgagcgtgccatcggctccgctatgtattcaaacatccagcgcacctactcgtgtctcggattgttcaccagagagctccaatttgggatttcccccaaatcgactaagaacaccgcgtgtgtgagctcgtcgcggtcagcgttgcacaggtccgatcatgttctcctcgctcttgttctagcattcctgtgtgcccttgaagctcgt

SEQ ID NO: 26265 - DNA, 479 bp, Zea Mays
cttatcttaaaatatactctattaccttagaggattcatcttatcttgaaaagattttatgtcatcctaatagatctaacccaaccaatagagtcatgatggattgcataatctgcctatccccacctaacatcaaacaagttttgatctacatcatgtagtctacctcatccgtatctatcttaaccacattccccaacccgatgatatgcactcattgcgaatcaatgagaccaagaccggagaagaaaagaccaaccacgtcaaaagaggataagcatcaactcaagtcttcaaggatcaagttggatcgctagaggaatcaagatccagagttcagggagcaggatgaagtctttccttattatacccttgccacaacctctacttgccataaccgtacctcatctgacctaatagatggctagacatacaatatccatattttccaaatcatctactaactgttatgtaaaaac

SEQ ID NO: 26266 - DNA, 485 bp, Zea Mays
aaagtgttcttccccagactgagctgggggaggatagctgcccgaaggatcctggggcagaggataagaagaggattgacccggatccccctggtggggaggcggggcaaactgctcacgatcatcaaagtattcttcatcttcatcttcatcttctggagtcatgaaaggcaccccatatgcctactggtgccactcattgatttctggtggaggaggatgaagaggcacatcaggcgaacggggagcaaatggcatacccatagaggaagcttgacgacgaagattgtcgtcagtctcccgctgccaccgagccagctcatgcacatctgaagatatatttctgcacatggaaaagaatgctgcaatacattgggccaaacgagcacccatcccgcgaccacgacctcgaccacgaccacgtggtgtgggagatccgcgaccaggagatggacgcgagggtccggcagcagcaggtccacgag

SEQ ID NO: 26267 - DNA, 419 bp, Zea Mays
gacaaggagatgaacgtgttccgaccaaacgacgatgaggacgaccgaattgaggctggggaaaggttcacgggtgcaccagggtctacggacacactttggtttgggcagaacaagaaccgaagagcgggtcgacggtgagagggggtcacgacggcgttttacaaagcaagggtgtgttccggtgatgggcttcgaccaaattccaattgctcagtacagagagcaataggagactatacacgagctagaacagagagtaattgagaaattaccaacccaaagagcgttgtccgcggtgaagttcttcacggcagaactaggaaccgggagaaaggaaattcgggctacgtgagtgctcaggtggaattgagtcgattgctcagccactgaggtgcggagtgcagtgaataagcagg

SEQ ID NO: 26268 - DNA, 498 bp, Zea Mays
ccagaatgttgcccgaacagccctccgacaactgtgccagaactacaacaaagtgatctttgaaaccccccttcgctactttccacccagcaacaagaatacccccacctggaggaaaagacttcaggccctatcaggaggagatcctattgagaatgatcccaccattgtctacatggccggataccttcacacccttgataaccaatatgatgacctcgccctccactgcacctccctaacctcccgggtggaaagcctggagcaaaaagtcagggaacttttaggggaaaaggcgtcccttcaagagagcctctcaatagctgaaggcgaggagaccaatacccgtgaagcttaccgcaccctaaaaatggactatgacaagaaactgaagaagctcgcccccgcaagaaaaatccgcaagaagaccaaaagccaaggatgtcagactgagtagaaggaaggaaaccctccaaccctaccccctaccgggttaag

SEQ ID NO: 26269 - DNA, 570 bp, Zea Mays
tttggttgcagaaaagaactgagtgtaggaagtttcaatatgggattcctacatacatggaacacttagcagagatgttccatggaatcgtggttgatgggtctagttcttgtatccctggaagtgacaacagacaatcagaagaagtgtatgaagaagaaggagatgatggagatggtgaaggattcctaaactccacacccactagtagcagccgcaaaagggccagtagtacaacagacacagccactagtccacctaaaaaggaaaaagttctatgataaaggtgttagaaggaataattaatgaaatgcaaacatcaaggactgcagatactgaagttttcacccaaattacaaatacccagcaaaatagaagtacactacccatagaagaaattgaaagttgtttgaacttggcagaagcaagtggagctgataaagcatcagatgaatactttgtggccaccaagttgtttagggatgactacaacagagctatcttcaaccgatttgatacagcagaccaaaggttcaagtggctgcagagatggtgcagggagtactatgg

SEQ ID NO: 26270 - DNA, 339 bp, Zea Mays
gtacgctcctcgcgtggcggtttgccttcttcgcacttggtgaccagcataccgaccgtatgacttgtgggaccgggcctcgtgtcataggcttggttgccctagtgcgcatcgggggagatttcccgtggtgttttggggcacgagcgagagagtctgcttttaaaagggattctccctgcgaggagcagttatgctttcgcttctctcccactcgctgtgcccctttgccttcaaagtctctgctttgcgccgccgtagttgccttggccttgttagttcatcccgagcactttcaggctgagtgggcgcttgacatggtgcgccgcctgcctagat

SEQ ID NO: 26271 - DNA, 276 bp, Zea Mays
caatgacagtaacggtcgccatcagtgatgtccgttaatagctgacatcaatgacagtaacggtcaccatcagtgacgtccgttaatagctgacatcaatgacagtaacggtcaccatcagtgacctctgtaaatagctgacatcagtgacagtaacagtcgtcatcagtgacatccgttactctaggaaaaatatgcaatcgttaggaaggaatattcggaccaaggtccgatctaccatggcccagcccggccggcggcgcgcgtgcgtgtggc

SEQ ID NO: 26272 - DNA, 443 bp, Zea Mays
cctccgacgtgttctaccatgttatcgccacgccagccgtccacagcccagagggcctccaaatcaccaacacgacaccgagggccaccgcatagtcaacctcatcatgaccgaagactggcgggcaccaataaccctgttcctgcagggatactaccatccgagcgatatcaacgaggccaagcgcctcaaacaccgaaaccgggacttcgctctcattgagggacagctttacaaaaagggggtcagtcaacccatgcttaaatgcgtcaccgagaccgagggcatccagatcctacacgaagtccacagcggaacttgcggctctcacgcagggcctagagccctagccgccaaggtgatctgtcaaggcttctactggcccgctatgatttgcgccgcgaatcgggtgacgaggtcctgcgaagcctgccagaaatttt

SEQ ID NO: 26273 - DNA, 279 bp, Zea Mays
gactttactacagcagccaagtacttatttgagcttatcagacggactcttctgccgaggatgggatacagggagcctaccacacatattcagctctggctccttggtgccctggtctcccactctgagtttgacgtcgtggatttccttatttgtgagatcaaggacaccgttttggatgggattcgtgctcgtagacagttgccatatgctcactacttatgccacatctttgcgcagctgattcagcctcctcggtttcagggcacacttgaggcc

SEQ ID NO: 26274 - DNA, 319 bp, Zea Mays
gtcaggggaactattgtgacacgaatatggcaatggaaatccacctgatggctagcagtacaaagagagtgaggtggattggttgagccaccattcggatgcttgggcatggatgtgacagtattgggcttctgaggagttcctggccatatctaatagaaatcggaatcggttgagcaagcctgaggtccacttctttggggcagatggacacactggcaaggccgcaagtatggtgtgtcaaattgcctggtcaattgttaattgcatagatttgtctagactttctaatcatgtgttgcaggaagctcaaatggag

SEQ ID NO: 26275 - DNA, 403 bp, Zea Mays
ggcccataccccgtcgcttttacaacaactacgacatgggcggcctctccctcgggggctcgggcatacggacaatccctcggtctctgcctcggctctctatgggaaatcagcaggtgcgggtcaacagcacagttcgttgtcacgtcggcttgcaaatgccagggtgtctctccttcgaatacaacactcggcttcactgcgggtgcccccttcacgtataaatagggcagtggtccctctagggaggagatccacaacacacacagacgaacgctcacccctccactttgtcttagatattggcacttgcctcaatcatctttagggacttggggactttccctctcctgccgtgcttgtaaacccctactacaggcaccacagtgcgagtaatataagc

SEQ ID NO: 26276 - DNA, 286 bp, Zea Mays
gagaggttacctgttcctaacgatgaagattacaacttagacccggacacatatgatggagagttcttccaagaagatgggctagaaggggatttgagatagacttaaccgaagctatcagaatggacgtagatattgaaatggttgttgatgacgaggatgatgaggtgcaaaatgataatgacttagtaatccttgaaggcaatgacattaatgacgagtttgcgtcttccgatggtgttgagattgaaatggttgatagtgatgatgagagttatgatccggc

SEQ ID NO: 26277 - DNA, 484 bp, Zea Mays
ctagactaacttgaccatatacaactacctaaccatatgcaaccaccttacccatccgatagttgcataactcctcggttttaacctagcaagagattctgacctacctagaccatataatccatcctactcacatatgtcttaaccatatgtcactaacccagatagagacaccaagcatcaagaagaaagacatcaacatcgacaaggcaagaaggaaggcaaaccagatctccaaatgatgcaagaccaatcgttcgcgaaaaaagctttccttaccattatctttcttatcccgaactagtcttgccctaacctacccatcttttatcctacataattaggtggctatacatatatatacccatgcattcctaatcacctgctaatttgtgttatagacttgaacaaaaaatctttcggtattaaaaccaattagaaactgaaacataaacttcaaatccatcttcctgcatctctttct

SEQ ID NO: 26278 - DNA, 286 bp, Zea Mays
aggctctcgaggcgagaggagagctacttaggcacatgcgaagaaggtgccccaaatcgtttgtgtacgacatccaccgcgttcgacaggtaacttttccttctctagctcctccagatgacgttgcatttcaacaaagttctctttggcatcatcaaattttccatgtacggctgaccaaagagggcaggaacaataaaaacggaggggcgtgggagaagaagaacgggtcctaggctcgaggtgaagccataaaggaccctacctttcagagaggccaagagtt

SEQ ID NO: 26279 - DNA, 382 bp, Zea Mays
ctggtcaagaaccccatacctggtactattataggtagtcctaccattatcccatggcatgtggaatggatctggccaatatatgctactagtctcaggaccgttgtaaataagagttaggatattgttagtggcgaagtagaaggcatagaaacctgaatagagcaaacccctagcagaagcagataccaacctagtatctctagtcatcggctgccatggtagaagtgtatcagttggtgagtcgaagcttctccagaggtgacgcccatctgtatccatgacaacaaggttgccgctatcgagaagcatcgcacgatcactgccggacgcggttgtgttggtgctccatatgaccatgccattatagtccacaaggatc

SEQ ID NO: 26280 - DNA, 301 bp, Zea Mays
ccggggatgagatcgatctgatgctcaatgccacagagcggaggaagacctggtggtaagtccataggaaaaacatcagcatactcctacaaaaggttaacaacagcagggggtatatccaaagacggtgcatcatcaagcggaacaagcatgcgcgagcatacaagtgcataacagggcatatgagcttcatggagatcatcaaaatcagcacgtgtagcaagtaaaacaggagagtgcaacttgatttcagatttaataggtgcggttgatgtcgatttgacttgttgtgcagttttag

SEQ ID NO: 26281 - DNA, 407 bp, Zea Mays
ggagggtggtcgtcttcgtgtggacaggaccgacaaacgggaattgttgtcctcgccggctggggcgagtgtaggtgaggggaattgcgaattctttttgagggtgaggagctgaggataatgttgtttaactatagggagatgggtattctcccgaatgttgaaccaatgtaaggtgtgatgccctcgctgtacgtatgtaactataatttgtatgaagaggttgtatgccttcgctgatccggccgtgcccgtaggggacttgtgcactgggtctagcgcgtttattatgtcggtccggcggcacctgtagtcggtcgttgcatgggtagttttttgagagagacttcgattttgcgcgcttgttgtgctagtccggctgcacccttaggcgactttcgcacgga

SEQ ID NO: 26282 - DNA, 363 bp, Zea Mays
ctcatgcatgggtagagtagtaatggaaggacaaaagagatagggtggaaaagaagtggtgtagggccaagtgccaaatgcatagtgaccatggtgtcgagagtgactcaattgatgaggatgaagataatgacaatgcgagtgtgggctctgagctttgggccattcctgatgcctccctcgatgcctcaacaactgactctgtctcgacttttcctggcgaggtgccgagtgcctttcccatcgttgagaagactaagttcccaacactccctgccctttttctagaccaattgcctcggtagcacttgcccctctgcccatcgtgccctcatccgaccggccaccgagggtagcttgtgg

SEQ ID NO: 26283 - DNA, 454 bp, Zea Mays
ccgcggggatagagcgtcgccgtgttgacagccaggggaggaagaagatggtcctgtagccgttagatgggggttgacggctgggattagaaaccggatacctcttcgtcgtattaaatccatgccgcagaactttgatcgggcggataggactaaggcaaacacgtggacgtattacgtccgtggatctctgatcctgcggccatcattgaataccgattcacttaattgttacatctaatcctggccatgtgcatctgatcgaacgactctggatgtccgataccctttcgtccagacaattatacaaaagagaccccgtagatgttagatatcaacccgcagtctagagtgactgtgctctgagtctggggaatcttgcgctgaggcccctgcactttccagatttcttgcgcgcagaccagaagtagtgaaattcagttcagaattaatt

SEQ ID NO: 26284 - DNA, 272 bp, Zea Mays
tttggttgctggagtgctcggcgtctagaaggaaaggaaacgagacctcaacggaaacagacggcgtgcgttaccgtaagggcataatagggataagccgagcgggcccacttgtcaggtgacccaaaaggatccgtgaccttttttggccagcgcgcagactcaagcgacccatttttacaagttgagctaaaggcggtgtattttgcagagcgacaacttagagcgacctatctcgacaaatttctcttcccagatgaggatggagtcat

SEQ ID NO: 26285 - DNA, 479 bp, Zea Mays
gatgaatcctaagaacttaccagctgatactccaaaagcacatttacgtggattcattttcagaccatatcgacgcattttatcaaaggctttgcacaaatcggctatatgagaactaaactcagccgatttgactacaatatcatcaatgtagacttccacagtgtttcccaacagttcgtgaaagatcaaattcatagccctctgataagtagcaccagaatttttcagaccaaatgtcatgacaacccactcaaaaaaaccaatgaagcctagacatataaaggttgttttagacgcatcttcttcggccatgaaaatctgattatatccggcattaccatcaagaaagctaataattctatttcctgacgcattattgattaacatgtcggctatgggcatgggatattcatctttaggagttgctctattcaaattgcgaaaatcaatgcatactctaagcttacctgattctt

SEQ ID NO: 26286 - DNA, 471 bp, Zea Mays
aattgaggagctctagagtaaggggattggttcgaagctgcatcactgtggttacttggggtactgtcgtgcctgcaacaggacaacatggaggacgacaattacatgggggaggagcaccaactaggagagggaatggaaaaggagcactatatggaggaggaggaggggcatccatgggtaccgagaaggatatggataaatgaatagtggaagaggggcatcattggtaggagctttaatggtaggaggagtattgatggtaggatcattatttggagtaggagcatccattgatgaatgacagtgatatagagaaggaggatatgcgtatggaaatagtggttacaaattcaaggaaagaggattgacataaacatcctcccgatgatgatgtataggagatagaccatcaaagaagacatgtctcacatcggtagggtgtcgagacattgtggagattgatcgttg

SEQ ID NO: 26287 - DNA, 596 bp, Zea Mays
ctaacgtgggcgctcgggcgcgtccatgcccccgccatgttttcattgccgtgttgcccccaccgtcaagtctcgcacctcgcctccacctagattccaggaatgcgtagaaatctgtccgctaacacctctcctccaatcccggtcgccagccaacccataccaactctcgagctccaatcccggccgccatgcctcgcctcgattccttactctccaatcctggcctccaatcccgaccgcgatcagcgcccgccgccaacacctaccaaaatagagctccaatcccgttcgccctagccgctacatgccatgcgctgcttcgccgctagtgctccaattctcgcccgctgccaacgcctaccaaaatcgacctctattctagattcgccatgtgcacgactgtggaggagctcgtcatcagccatggccccaccgcctcgcccccatctacctccccaattttagcatgaacacgatctcagacgcaaacctcgcccccacacctcgccatccatccacctccccggatggtgtgccttcctggaattaaaagaccgaagggaggccacacacgagtttaccaagcagacgca

SEQ ID NO: 26288 - DNA, 422 bp, Zea Mays
acagaccacaaatctcctcctccctgttcttagcgccgccgtgaaggacctcttcgtgggcagcccttttcgggttagtactcacccgattgccgcttgttctagcatgtccttagcttcctattgctctcggtgccaactaattgaagtttaccagagtcccatcaccagaacacttcattgttccgtagaacgccgccgtatacaccctctctgtcgacccgcttccctatcctcattcggcataaattcaatcgtgtacctagtccctggtgaacccatgaagcttccccaagcttcaattttagcatcgatcccgttaatcgtccagaacacgatctctaggaccgtttcgtcgccgtaaccatgaacaagcttcacttagggtcaaatcgttcaaattaaatgagggcttttgctcg

SEQ ID NO: 26289 - DNA, 534 bp, Zea Mays
accacgtcgcagtagctcggcttgcgatagttactcatcgccggtgaagtcgccacgacggaagacacgaatccactgtgcgagtaatctcccctctctccggccgccagtacttctctaccaaatggagcgccaccgccgttgcgttctataaattttagcctcctagagctccgctaggtaactgcgcgtccagtaaaccaactcttacctccaatcgttccccacaactccccaatttggaatttcccccaatttggtcaagaacaccgtgtgtttgggctcgtcgcggtcagcccgtcacaggtccgatcatgccctccttgctcttgttttagcatccttgtgtgatggtgatgcttctcgacccggtcaattaagttaagactccatagatcaccgggaacgcgctgggttggccgtagtgcttgcggtcaccgtgggcagggcgctgtagggctgtaatccagaaattgatttgggggaaacaattattaggtcttgaattcggtctcggtcaaagcaaggcgccag

SEQ ID NO: 26290 - DNA, 390 bp, Zea Mays
cttggaattttatgaattgtcgagttcttttgttgaattagagtgtagagcataagaaaagttgtgaattgtttgataaattaactagcaccaggttgttttttgttagtgttgctatagttccggttgtttgatgcatcacagagttctatagtaatgcaagaacatattaacctatcctatgtatttgtatatgacctattgccatcaccatgattttctgctattatgaaatatgacttgctaaaatgtatgtgttatggttgctagatcggtgagggattggagttgctagtggaggcggcacgttacggttcacatgtgaacaatacccgccaatgaactatagatgcatagatggtattggagaggggggtcgatgggtaggaa

SEQ ID NO: 26291 - DNA, 432 bp, Zea Mays
aagccatagcagaacaagacaatataaggcatgtacatatttgggagagcacgaaaatgtcatttgaccaaaattctgtcaggtacacaataaagcgatgtaattttacagaatatactcgtgttctggtaggataatgtacaccgaatattagagtccgacaaaaaggttatctttgcccctagaagtgttatgcaattttgttaaggcttgttacttctttcttcctaaccatcccatgcctaacacatcacctttggcaattagccaactactaacaccaccataaaacaacatgatggttaggccatctcccagcatttatcttcttcattttcacatagtaggaacaaacaaacacattggaatcaagacatggggccaagttccagaccaaactatcagacatatttccctgccatctttttgctc

SEQ ID NO: 26292 - DNA, 312 bp, Zea Mays
attagtgagcgtgaaagtaagatcagaggtgttataggataggactgtcgagagagtgtgcgtggtgctagatgtggagacaagtgtaaagtgagcagtgttccatgcagttgcaattccctctcgttagccatcagctggtaggaaactgtgtccggaaatggagacatgaataaaggatttaaacttctaagcagaagctcatgaagcagttgcaattcccccgagagggtgtaggatgcatggggaggagattcatgtgggttatgatggggaaggcgggtaggtggggctggttagagaccagagccg

SEQ ID NO: 26293 - DNA, 519 bp, Zea Mays
tctaatcctagccgttcgctaaaggatcgacgaccgagatcacctactccacccggacgacgaaacgcggcggcggaaaagaacggcgcggcggcgccatgactggtgagctcctactttgcactctagcgcctaaaacttcgaacccaacggtgctgcgcgtagcggatagggaaccaaggaggatgggggtagttttacctcgaattggggcggtgacttctttgcccacgcggtggtgctgttttccgtcgtcggtgatacgccgatgagcaattcctcacgcacggactcttgatttgccccgccgagaccacagaaggattcaccgcgaacccgcaatgctccacggcccgacaacttgcccagatcggcgaaggggaaggctagccgcagcacgcgacggaagtctgcgggtctatgacgacggtgagcaattcgttgctcggtgatcccaatcaacgcaccaactgtggcgggaaacgcgtgacgaacaccagggatcacacccctactacg

SEQ ID NO: 26294 - DNA, 543 bp, Zea Mays
cgagggaggtctttagagctgcacgtgcgaatgatgccttctagggtgggtgggttttatgttcgaggatgttggctgtttatgactccgtcgttcttagcggctgcctgaagggcgtcatcagcgagggttgccttgcctttcttgttagagagggtcgccttcgcaacatcttccactgaggtgttggctctggttgtcactttctaaggggccatcgcgggtttgttcttttgtagcacgaacggtgagcataaaatgttggatctgtcctgacacgtggtcaggtgggcccaacagttaggagacaagaggattcagctgcacaacgagacagtaggcagagaactgtagcgtcttgttatgcaggtctcgtctgtgtatagggtaggagtatttataggtaatgaggaggggtagtgggtcccaagtactattatgcccccggttaactgctacattccttcgtctgatgcacctgtgtaaaaaatatctgacgtagtcaagttagacacatcgaggtcaaattcggcctccgcttac

SEQ ID NO: 26295 - DNA, 497 bp, Zea Mays
caagtaccaaaaggtgtccgacagacacgatagaacacctccgcgtgcgcccacggataagccctcgctgactcgcggggccggtcaactccagtcacaggggcctcagcaccggagtctctacagtggcccatatatacaccggaaaggacaagagaatacaccataccaggcgtatacctacgcgtgcttgatagtgacacaagtggtatgacgaaagacgaagttgtaccggacacgaccttgaaccttaccataagcgcactttgcgggacccaccaggtatcacaacgctgacaccaagcaagctacagggactcgtataccgaaaggacaaaatagaatgccatactaggggtacggtagcacacgaccctacgaacgacgttaggagactacgccacccgtaggcggcaagccgagctccccctatagaatacaagttcccactataaagtccacccttgagctataaaagggactaggaaactttcaat

SEQ ID NO: 26296 - DNA, 561 bp, Zea Mays
cagaatgataaaaaatgaggcatacgagtttctaataacaagctttgttaaactaatttaataaaatatgcgttggccaaaataaaatgtacaacaactttcgccaaaattagtgaaaacaagtcatactttaattagataaaaaataggctaaaagatagaattatgatctacttatttcttaagtcttatttcctttatattaaagccggtccaaaactcagcctttcagcctatccatgtcggcccgaaaacattcagtcgtccgatcgcgcatctacggttccacacaagacctcgcagccttctcgcgtcgtgccgcgaagcttctaggagccccacccccgcgcggaggtccacttcctctctcgcctgggcgcgccgtcgcgcgcacgccccacccctcgtagcttcaacccccgccgccagctcggtaggtaaccgcccaaccctctcccccggcgccggctcgacaggtcacacccaacgctcagggcctcccaccagctgaccagcatcgcccatgggcggttccaaaccagtggccatcagcgcgccagc

SEQ ID NO: 26297 - DNA, 383 bp, Zea Mays
gggttgtagggcatgatgaaaacggccaacaagagtatgaagttgaactgttgtcgtaaggagtgaaaccatcagtggacaagcctagacgaacacttctagcgtctcttgcaaattctgggtcaaaacgatccagagccttccaagcatcgccatctgatggatgcatcataatgtctggatcttggctcttacggtctccttccttatgccacaacattagcttcgcattttctggggttaaaaacagacatttaagccttggggtgatgggcatatattgaagctgtttaactgccacttttgtagcaaaagtagctccatcctcttttagtacctccgcatatcttgatttaccgcatatctgacaatgggtggccgct

SEQ ID NO: 26298 - DNA, 332 bp, Zea Mays
gacagatcccacatgactagcccgcagtttagacataacaatgtcaaccccatgactatcatcacccaacaaaaacccaacagtatttaagtgagacgcaacttgccttgaagttaaagcaaaaatacacttagagttaccttcgttcagtcgcgccttaagcctttccgcccgctccagagttgattcgtccattgacgcgccccttcttttgctagaccgggtggacttgctacccgccagcatttcaggaatggcagccaactcttgagcgctgcaggacacgctttgatacggttccactgccccgtcttgagccacttgctgcccac

SEQ ID NO: 26299 - DNA, 854 bp, Zea Mays
atcaccagcatacaaagatgctaaaacgagaacaaagagggcatgatcagacctgtggagggctggccacggcgagggtgcgctttgcggtggcggagaccagtttgggggaaaactaaaattcaagctctctgacgaacgattgctagtgatttttggtggctgggtgtgtgatgaccttgcggggctggtggggggcttcaatttataggtatcaacggcggtggctaggaatttcagtggggacgcgcggcggtcggaggaggaagaagagtactggcgcagtggcttggtgtccagcgccgtggcaattgctccggcgatcaacggggagctagagtgagtcacggtgctgcggtagataggaagagacacgcggcggacaacggcgacggcttaacggcggtgagaatccttatccgagggcggtgagtaaggggagaggtaccgcggctagccggagtggtgtccagctcaccggcggcgaagattctcttacccgcaatgttagccatctaccacgagcacgaatccttacgccggtgacacgaatcgcggcggaggagcgatcgtcggcggtgaggtttactgaacctgatcgagttactgtaccatggcaatcatcattcagacgacttgacagtcattctttgagcttgattttctcccagattcatatggcaacacaaccagtgatctgcagcaatattgtagtgctataaaccagctacaactttgatatattgtgctcccacaaaaagtcaatggatcttgcttgaaattgagcttgaagttcatgtcattccactgttagtctgatttcagactttaagtagtctgacagtccaactttg

SEQ ID NO: 26300 - DNA, 347 bp, Zea Mays
cacaagggcgaagggaggcttctaaggaaaggatgagatggatgtttgggtgcgagaatacaataagcgtaaccgaccccaggcaccttcccattctatttatacacaaaaacaaggaagccaagcggcatctaaaaggtgggcccccacgaacaacatcggaggatctgctgtttcggttcataaccgcttcaggcatcgggcgagaaacagtgcattttgtagatcctgtgccgcctcggacagagcgccagaggggcacatggcaagataggcatcggtaacgggtgggacggttaaccaccctatcacgccacctgcgcatgatacaatgaaatggtcatttt

SEQ ID NO: 26301 - DNA, 334 bp, Zea Mays
tcgatccgcacgttgccgtggtcgtgggtgattcactccaaatttaggtatgaagcttcccagatactttcgtcaccacctccgcatcgtttaccgtgtaccggcgttaagtttaggtcatcagctcggtgaggggcatgcatcatctatggcaccgccgcggaaaccgggcgctgtcgtcgtgcttcgtcaccggttggggcgtgcgatctcggtcgtcgatccatgggtggatggctgagattagacgctaggtaatggttcgaccgatgtgtacgcaactgtaggattccgagcgaacggtcatattagatcgcagccccggtatctcctc

SEQ ID NO: 26302 - DNA, 433 bp, Zea Mays
attctcttcagtatctttcgcatacaaggcctgatatttctttctcggtgaaccgtgtgtgccaatttctctccaaacctaccactgaacactggtcggtggttaaaaggattttgaggtatcttcacgaaacgattgatatgagcttatgcttcaacaaatctggtgcccctttgcttagtgcattctcggatgcggattgggccggtgatgcggatgatagaagaagtacaggcggttttgctgtattttttggtggcaatcttatttcctggagttcacgcaagcaatcaacagtctctcggtccagtaccgaggccgagtataaagctattgcggatgccactgctgaagtcatatggcttcaagttcttctgaaggagctgggtatcaaactctcccgaccaccggtgctttggtgtgataatattgg

SEQ ID NO: 26303 - DNA, 277 bp, Zea Mays
tgacgattgaaagcgtgtctaatttcgtgtcattctaatacgattttaatagcgtgttaaaaattgtgtttaggtatctcttcacgttgaaagcgtgtcaaataccgtaacattttgatgcgttcttaaaattgtttcaaataacgtctttatgtaccgccgtagagacgcttttgtgtgcgctacaactaaaacgtacatacaaggggggttttctagtagtgaaatgcccactccacgaattcctccacaaccttcaaccatgcatcagggtgtt

SEQ ID NO: 26304 - DNA, 421 bp, Zea Mays
gattttattgcctgctaagatcagtacatcgagttgatacacagccttggaacaacctcccatgacctctctgcctaagtgataggtacacaacttaatattaaaaaaacattctaagcatactctagtgcattcaaaaagaggcagtaaaagaagacttgaaaggatggagatttagccttgaacaagagtgcatggaaaacaacttacatgtaccgacaccttgacctacctcaacttgtttgggacaaagattttgtagtagtagttgttgtttctctagtgcattcaatcctaagactagattatcacccatatgcccgagtaaagagatcctatgccacttgctccaattattgtgattccgctacaaccatatccgagtttggccactgaggctatctccaccagactatcgatt

SEQ ID NO: 26305 - DNA, 300 bp, Zea Mays
gtcacgcgaccatggagaggtggatgctcctccggagtcggaagtacatgaggacgtagaccaaatggaggacatgctagatgacattggacatgagtatccagcactggagactgaccaacccccatcggaggaagtgcaacagttttacaagctgctagaagcctcggatgcaaaagtacacaagggcaccaacgtgattgtacttcaggtggtaacatgacttatggtgatgaagtcaaagtacaacttctcaaataactgctacaacgacatcgtgaagttgattattgatctcct

SEQ ID NO: 26306 - DNA, 463 bp, Zea Mays
gaaatatctcaggtacaaccccctcgccgctggtgaccttgcgcttggattcgcgccgattgccgcgattcgtgcccggcggagtgcagataactattcgaggtaagaaatatcgcgttaaagatgaacttgggctactgtttcgccctgtcgccgtgcccacttgcccgacgacgtggtcgcacgaccatctccgtcgtgacgccattcctcgtggttatgccacaccatcagccatcttagcacgtcgcaattgatcacagtagacaacccatctatcgcctaaggcctcaccacggtgacagccacggtcacccgcgccagtacacttctcctctctccggccgccagcacctcccttccaaattcggagccgccgctcgaagactctataaatttatgccccagcttgctccgctaagtaattgtgcacccagtgaaccagccctcacctccaatcgcc

SEQ ID NO: 26307 - DNA, 574 bp, Zea Mays
catcatctctcatcgaaagatcgggcacccttctacccattgggtttatcaagtggtatcaaatttcaggttgctcggtgagagaactcaatcttccttgttttatttacctacagtccacttttgcccaaagatatatttagatcagaaattcacctaaaaacagtttgagcctttgctttactacttagtttttgacttgttgaattcacggttgctgcatttgggtcgagttgctggtctaaagttttcttacctctagagttttgagttcgcgccaccttgtttcaatcaccagtttatacctcttgctgcaattcaaccaaaaagaagagaaagcaaaaggcgagtgcataaaaaaaagccgcactaatcagcaaaacaaaaaaagacacgtgcaaaaaaagagagagagaaaaaacagttctgaattttggtagataaaatttgtaagtgcaacaaaacaaaaggcagtttgtgtgccttctttttatagtttcagaaatcagattgctgttctcagcttttggtgatactatttgtgtaacggctcgcgtctctattacggtttgga

SEQ ID NO: 26308 - DNA, 302 bp, Zea Mays
ctgtgtgggtgcgtatgtttccatcagctcagctgtgtcatcggcttgctggcacctgcatcatatgcagctttgtaagatatttacagtaaccaactgcagtagatcaaagaaaacaagatattttttacaacacaccaaatactatatgctggtagaacccaagtttcaatatggacatgtgtttcagtatgaacaagctgccgatgcacaatattttttggcgtgttcaatgatattcatagtaaatacctcatctcaaattaaaggctattttcgcatttctaggtacaatagcttta

SEQ ID NO: 26309 - DNA, 392 bp, Zea Mays
gcctctgcctcttcctctaatgttggtgccatagttttgttgtgcgggatactcctgacgacgaactgtgtcttcggtgggcggtgggttggcgatggtgttgaattgttgctggttgtggctttgcctaccagaattagactgcgccggcctgacccatgttctgctggactgcggagtgtccttgggtttctgctgagactctatcttgcgctggtgcaactctttggacctggcgtatttttcaaacaactgatagagctcttgcaagttttcgggtgggtctcttatgtaatggttgtataagaaaccggcgcggagaccgctgattgcatagtggatgcctatgtggtcatcgatagatggtaactacgacttgagcatgaggaact

SEQ ID NO: 26310 - DNA, 289 bp, Zea Mays
ttttcctctttttcccttgttcccgcagcgggtagaggtagtcagggtatacgaagccgatggcgtcgaaaattctatttaatcttttcattctccggccaccgaaggctgcggacaaggcattgtcctcggttttggagtacgccccaagtaactcgtcgctagtagtttcaatgcacttcagccaatcatcatttggttcgtcaaacttatctccaaacctgtaggtgtatttcagccggaccaaatcacctttgctagaatcattgatggtttccttcggcatttc

SEQ ID NO: 26311 - DNA, 333 bp, Zea Mays
ctccttgatgaaggcaggtccttctagagtcttttcccctacgtttgaccacaacagaggggtttgacacctccttgcatacaaggcttcaaaaggtgacatcttgatgctggcctggtaactgttgttgtacgagaattctgcatacgacaaactggactcccagttgctgttgagggtcagcacacgggctctcaacaaatcttcgaggactttgttgactctttctgtctatccatctgactgagggtggtaggcggtgctgaagtctagcttggtgcccatagcttgctgaaggctcaaccaaaattttgaggtgaattgtgttcccct

SEQ ID NO: 26312 - DNA, 413 bp, Zea Mays
gttcgtctaggttaaaaataatttatgtattcaacgtggtgtgtttggatgtgacaagtagattggaagggtggggtttgtcgaagcactgtgatatcgaatgtgtatatcgaagtgcattgtagtggtaattgtgttaagttaatcggtagtgtctcgagtgcacgccacaatatggttgtatgcgagacagagttatgcgcatgatgggtttagtaaaaatccatcagtgtcactggtgttaagttgaggtttagttgtgcgtggaaagtaataatatgtttaatacttagaactcttagtcaatggtagaaattgtctcggcttaagtataggggtggtgacatgccaaggtagtcatcatttcctctatgtttatcagtcgagtcgagtcgatgcacattatgtgttcg

SEQ ID NO: 26313 - DNA, 453 bp, Zea Mays
cgggcccctaagtgcaggtgtgggccgcacaaggctcaattcgtgactgaatgaggtttagccatgaccgtctccagggccgccctggatctcaacaagggcttcttctctgtcggggcgatggtgtgggacaacggggcctccttccccacactcgctacgtggtgcagggcacccctttggtccatgatgcgtgagaggcatccaaagtggaaaacatctccgatgatgaagctgaagacggtgttgaaaacaatggccctgtagctatcgtatatgaatgttgcgctctctgcctagcgcgccagcaatcggagtttggtaccaacgtcacactacggggtataccacatagtgcttttgggaggatgatgaggtcgatcgcaactcgatgggtcgtgtgaggcacgatggaacacaataaactatacaggttcggaccgctcaagcgca

SEQ ID NO: 26314 - DNA, 354 bp, Zea Mays
gcccaaatcaacttgaatgtagaatcaatagtcgttgcatgggaggaatccaccgcttcctaaaccctaaccctacggaccccttcatcttcctctacacgcaagcccctatgatatctagattctcgtgatagctaggttatccataaatcctgaatttcagaaaagctcttcaaaaaatgttgtaccatacagacccagatggttaggtaatggaattaacacttgtttcttagatggtgttttgaggaaactcaatagagggtagcgaccaccacaaaagcgaaaacatggttcactagagtcatcagactaaaagccactataacaggatccattgtcttattggccaac

SEQ ID NO: 26315 - DNA, 440 bp, Zea Mays
gcttgcccaaagcaaaccgaccattgttaaacttgcactgacctcaactagcctagtactttttatgggaggctgctatggttcggcgtgaccacaactttcacgttacgtgttacttaatcgggaaatatcatcgggtgccttctgccttgttggttcaaaggtgactgaagtcctgaattctcagtctccaataggaccaataccaatagtccttgatgttgtttgcacaccactccttaaatctctaagtatttggtctaatggattatttattataattatgatttgttggataacttgatcttgattagttgagcttggttgatcattaaattgtgctacttaagttgaactagccatttgttgatcttgcactagttgactttgattttgatcatgagaaccacttgtgcttggttgatcattttttgcataaa

SEQ ID NO: 26316 - DNA, 351 bp, Zea Mays
ggaaactatcagcaagtctgacgaaggtgggctggttaggttgaaatacaccttcagatatgaaggtaagtttattgagccagatgatgattggctgaagtgcatcgaaactacaagcgacgaactgcttggaccatattcaaaggcagaagataacacgttatctgcggccttcggaggccggaagaagaataggctgaatagagtttttgatgctattgggtttatgtaccctgattactgttacccgctgaaagggcaaaagagaaaaggtgcaacttctgggaaaggtgatgcttcagttgctctaagtgagcccgcgctaaagaggaaaaaggtgaaggtcattac

SEQ ID NO: 26317 - DNA, 819 bp, Zea Mays
ctgtcaggctacacacaagcacaagatagttaggacccaaggtttatttggcattgaggaataattaagaacccaaactcatgtcaacccgatattgtttctacattttttaagaaactggaactgacgaaaggacactaagaatcaatagaagataatgttactcccttaaaatatcagaaaaaatccagaaataaatccatagtctcaaatgaattactaaatagattaaaaagacaaaaacttgagtatataaattggtgattgcataactgcatccccctaatctctacaaacaaccttttgttctcaccttgcactcttcagcccgtcatggatggcatgtcatctaaagtattaaaagccgctcgagtttgagcgcctctccgtgcttcacgcccgaataacctttcgtgagccgacgcgtgccccagtggtcggacccaaaaattttttctttgtttcagctgagttgtgcttgtgcccgtgcggccgtgtgtcacgtccgcggtatgcccctctccccactccgatggtctgacccaccagaccatcgtcccaccgcccattcagattctgacgacgtccctcccgttgcctcatcctgagttctgacctcggtgtcgtcgctcgagctggccctgcgtcctctgcgttcgatggggcgaagctttgggacattgctggtgccaaagagtgcgtcttggatctcagcacaaagggtctcgtgtcgcgcttgctgccacccacgctgctggcgccactgcttatgcccggttgcctcgtgccaccagtcaggtaccttctaaatccctaacc

SEQ ID NO: 26318 - DNA, 577 bp, Zea Mays
catgaaacagtttgtggtccctacgtttcaattttattccagcacaaagtggcaatgatatgatggctgcattggtctggtattattaattcatgacaatattttagtagcagtaataacagcaaaatttcttcaggcttaggctgacatgcaggagatgatattttgtttccattgctgtgtgctgtatttgccttagctttggcacttaaatattgcatagttactgttgtcatcttaagtagtctggaggaccatttctttgctggcacccaggtattcttttatccataatccatttcctaatgtttcgtctagtagtttttatgtttgataattttcatctgatgttaggtttggtcgagttttatggatgctaagatatggttcctctcgaatgacagcataattgtggtatgtctgacatcttgtacacaaatgccatcaagaatcatttgggacttgacatcttgtacactaatgccatcagcaatcatttggggcttcatgtctgatgtgtgttgtttacatcataactcctggactgttgcatggaataatattgtagctgtagctg

SEQ ID NO: 26319 - DNA, 444 bp, Zea Mays
gctaaccgcgtcctcaccaagtgccatggtgcaaaatcctcctgcggtgttggcgatgaagcatagcctgttcaacttgtcctcgaccctcctctcagtctcctcgtcactcgaggaagatacaacatcgtcggagtcgtggtcgaggtcgctaagggaggcaaggaaggcacgctccttgatctttgccttctgaaggtacttcttcttgagcgcctccttgtcaaatcctcccttggacttgtacttgttggaggagtacttgcccttgcgccgaccagagtgatggtcgcgcaggctagactccgattttcccttcttggggcagctggcaacgaagtggtcgggatcgccacagttgtagcatccgtccttggacccaccacgccgtcggctcatacggttgttgtggaaccgcgtgaaccgactggccacaagtgccag

SEQ ID NO: 26320 - DNA, 628 bp, Zea Mays
agaacgatcagaaatgagagatttaggcgagatcaacatctgatacttgagaacaggttatagcagataaccagataacggggcagaatcgataaaggatccagggattcggatgataatccacaacatgattcataaaggtaacgatttactagatccaggtgaaaagagaggcagtcgcatgagatcgcttaggatgagcagcagaaaggttatgaagatttggggcaagatctatggaatgaaacatggccttgatagggtttgcgcaactagacacctaacaacaattttttttgacgtaacaagtgcacaaggagacttgggatggtctagcagtcaagttgtggtggtctataagttgtgcaggtgtaaaattcaagtgtaaaacacagaagggctaaaaacacaaaaacaagcacatgataataatttttttaaggttttacaagggaaccactaggttgtttggagaaggaggtctttttatgggcaaaacaggcaacaatttttttttattggcaaagagggttcaacaattacaataccacctagctagcaagacaagagaaacacatagcacgacctaacaagacttaccaatctgacacgaggaaggcatttctta

SEQ ID NO: 26321 - DNA, 347 bp, Zea Mays
attaatttggagctaaaatgaatttaatatgaattaaataagttctggatttatttttatactcaaaatcgatttctaaatctcttttcctattttctttaattcctggactgcgaccactaatatcacagaatttaggggctgttttataatttttggggcacagatgtaaatactttacacaaggcatggacgaccggttgattatgtgaaagtacagggtctcttttacaaaacgggatcgacgaaggggtatctagccacgtgagccatccgatctagtatctacggtccggattagatccgacacacttcaaaccagcgagttacccaggctgcctgatttg

SEQ ID NO: 26322 - DNA, 589 bp, Zea Mays
gcatttaactgaatttccaatggtacagtgcccccaatggatcagatcgagcgcagtagaaaaatcccactgctggtgacccctccaccgcgattcatgtcgtcagccttaagattcgtgtgcggggtggattgataacgtcgcggaataaggatccttgccgacggtgagctggagatcactccggtgattcaccgtggcgttctcttttactttgcggcggagcggattagctcgccggtgaaccatcgtgcctcggccctgcgccgcgtgtcctaactgcgccaccgcatcgccgtgactccctctaaactccccgtcgaccaccggagttactgccacgacggtgaacacgtgttcactgcaccagcattattcctcacttccgaccgccgcacatcaacgcccaaattcacggccgccgctgaagggtcctataaattgaagcccccgctagctccgcaaggtcatcctccacccagccaccgctaatcgctagcagtccttcgccggagctcgcgaattttgaattcgccccaaatcgactctccgccaccgtaaaccacccatcaccgcggccagccttccc

SEQ ID NO: 26323 - DNA, 334 bp, Zea Mays
gatggtgtcgagggtggtgttggtggtggcttgggctgtttgtaattcctagagcgtcgtaccagcttcgatttgttctatttcaagcgggccatggcgctcattggtgatgtgaatgtcttctgcgaggccatcaagttgtaggtgcatttgtcgctcaaaatgttgtatgatgcccttggtacgaggggactgtggcatggtgttctcatcctctttaacccccgagggtcctgccataattagtgcaaagaaatgagaacaaggaacaaaataatatgtcctacaactagtttaattggttgtggaactgggtgctcaactaaaaaccgct

SEQ ID NO: 26324 - DNA, 304 bp, Zea Mays
acttgagacttttaagatctgtataaatatggcaagtattgccgagaagataatggcgccagatcttcaaagcatgaaccactgcggcaagctctagatcatgagtagaatagtgttcttcatgtctcttcaactgtcgtgaggcatatgctattacacaaccttcttgcattaatacacatccgatgcccatacctgaagcatcacaatagacgtcaaaaggcttcacaatgtcaggttgggctaacaccggtgccgtagttagcaatttctttagcttctcaaaagtttcattacattctgg

SEQ ID NO: 26325 - DNA, 311 bp, Zea Mays
atttttttttatttttttcataccccactatttgtttaagacatttcaacttacatgatcttgaccacccttgtttcttaatgatgcatgagcggtcattttactttgcatatccttggtgatctcgttgtctccttgtaactccacttggtaattaattttctttacttcaaccattttgttggaaccttacctatcttacccttgcttgttttctccactttgtcagtcttgccttaactctgtccattgttatgcttttcatcattatcacctttacccttatcacctctataccttaccttaatgtt

SEQ ID NO: 26326 - DNA, 331 bp, Zea Mays
agatctcatctcgcgacacaggctacgccggatctcgttctctggcttcatgatgtcgccgggtgttacagtgtcggttccttcgtcgatgagcttcccgctgaggaggttcttccccaggcacagttggttcgtcgtcggagatgggggacgattccactcttccccccaataaagaggacgtcggggtagaacggagttgtcgtgacgacaagcttctttctgttctcttttgagggtggaggtactagaagggcagcttgatgggtccttgtttcttttttcctcgtaatctgtgtccactcttctgtggatgaggtggacaacgggg

SEQ ID NO: 26327 - DNA, 425 bp, Zea Mays
ccatcagcaacaggtggattcaacacaaaagagtgaaggccttgggaggaggcatgttccaggctgagtatgccactggggcaccaacatttgataccttgcctctaagaatcatctcaagtcggttcaccaagtctacagagggaattcttctgttggtaacccgagttgagtcagctatgcctcggtacagataagccgggtaggccctgtccttcaacggctgaatgttcctaaagacaaaatcagcaaccacagcctcagcaatcagacccctctctttcaacagtccaacttcagctagcaaagcccctgcctcagctacctccttatccgtgcgggactcggtccaactcggagtgcgaacatccggctgtcttcccgaccgtgggggagagaatttccgtggttctcaacaataaacc

SEQ ID NO: 26328 - DNA, 349 bp, Zea Mays
tttcatgtaaaaaaaacagtggtaccaattgataaacaataattttataaaattatagaaactgaaatgatttgatttggagctagaatgaattttctatgaattaaataaatttctagaatgatttcaacactaaaaatcattttctaaacaaattctttggttttaataagtgtctggtctgcactcccaataaacagaagcacagggtctaactcgtaagattccatagactcagtccacagctacggtggacggcgggttgtttaccaacaagcttagggactctttaagaaaatgtgctgcgaaggggtatcgggccgttctggccgtccgattagaaacggac

SEQ ID NO: 26329 - DNA, 315 bp, Zea Mays
gggagatgaaaaagtaggggatgaaatgttgatgatgtgacataaaaaagtgatataggagaaaaatgtagaggtaaccgttgctcttagtcttaggttcagtgatcgacagcgggcgcgaaccggatgatgcaggaataacgaccgacacaggtcaatcgacacgcgacatgagtggaaacgggcagcagtcgcaggcccaacaacagtacagcacgcaatgaccgaggggccgacaatacagtgagcaagatccaacaagcaagggcatagcaccgtggccggtgaaaggaagctacgcacagtcgaggatag

SEQ ID NO: 26330 - DNA, 383 bp, Zea Mays
caaaatcgaagactttttcaaaagaccccgtgcacaagtcgcctacgggcgcggccggatcaacgaaggcacgcagcctcatcatacaaattatggttacatacacacagcgagggcatcacacattacattggctcaaccttcgggatgatccccatccccctgtagttgaacaacattatcctcaattcctcaccctcaaacagattttgcagctcttcctcacctacactcgccccagccggcgaggacaacaattcccgtttgccagccccgtccacacgaagacgaccaccctccatgtcaccacgatgacgcctatcacttcgcgacaattcactcactcttcgtttcgccaccgcccttcgccgcctacacccggt

SEQ ID NO: 26331 - DNA, 479 bp, Zea Mays
cagaactaaccacaattgggtgacccatcttctgcaccgaaagaccagcacgcgacacaaatttctccgaaataaatgaaaaactagcgccagagtcaaaaagagcatgggcatcaaacgaatcaactgagaccgtacatgtcaccacgtctccttgctctctgccatccgcagagggtagcacatatgctccagaaacactcatagaagaggaagctccctgagtgaaattaacagaagaaccccacagagtcgcaggatgaggcagacgtggagctccaaactgggatggtacaggagcggtcggtgctggagtgggcgcggccaggtactgagggaatcctcgcataggcacgaactgaggagtcctcggcatatagaactgctgctgaggggtggtacagaaaattgttgctcagcgcatgacaacatgttgacagtgcccagcgaagaggaagaagtcactggctcccatttaa

SEQ ID NO: 26332 - DNA, 403 bp, Zea Mays
ggaggcttgagccttagaaaatctcccattctgtcctgaggtcttccaccatttgggcgctggttctcaaggcttctagtgaggacctcaatgagtcgggtttggttggccagaacttgggctaaatctaatggcagctccagaggtgcggggaggtgggtttcactcccttctccaccgacttctccttcagcacctaggggagaccttgctccaatccctgaggcggtaggcgtggttttatccgaagccatctgccagggggaaagaattactactatgcacatgccatatttttttaaacatgttattttattcaacacacaagttcattacaagcatacagttgccacaaatcacactacacgcgagtgttttctaaggtgcttccgaactccctttc

SEQ ID NO: 26333 - DNA, 455 bp, Zea Mays
agacgggggtagacgagagtcgtctaggggtagacgaagggtaggcgaacgtagacggagtcccgtcgatgcactgcgcgcaagcaaacgcgagcgcgcgcactagttgcgcgacgcacgacacagagaatgacgcgacatacgagaattgttatgtcatgtttatactacgtaagtattgattccaaggtttctaagttgatattaatcacattaatacttatttatagaaaggcaaactcaaaaccatagattaattttaaattggagagctaatataataggcattggctaaacaaatgtgtaatcagttaataaaaacatgagttacgattaatcaacatcattcacgtgcagatgaagtcaatacgaggctatcaccgcttgaataaaacgaaacggacaactaacgcaagagttatcgtttaactactaagttgcgaacttatacgtaa

SEQ ID NO: 26334 - DNA, 373 bp, Zea Mays
cttcgtgtgtgtacaaccttgactcgagacaccatagcacgatagacggtatgacaccccacagtctagacctgctaagctaggggatgcgaagaggacaaggttcataagggatatacacccacaacaatcgctccgacaggcctcggtgtccttgagaccttgctcccccttcaaaccctaatccccaatcttcatccaccctcgcctctctcatggcgccgctctcacgtttctcattattgtctgccactgtttttgtttcgctcgttgtactcctcgtctccattgacctctccaccattgaatacctcctcgcaattgctcctgctcctatatgccccatgatcacgcgcccttcaaaccctaaccc

SEQ ID NO: 26335 - DNA, 508 bp, Zea Mays
attcgttgtgcaggaaatacaacaacgtcttattgttcttaatgccagctgatcggaagaacgatatcattgtcctcaacgctagcacctgcattttgctactagtctactgcaccacatctacttttggatcaagcccaagccaaggtttactacatctagagtactagtagtatatgtaggacatatcttatggggccacttggcctcgagggcctagggcggtcgactgctcgccctaccctagggtcaggcctgtgtacaagtagctgctcatgcggttgctacccttatcgggccgcatcctgtccttcatctctaatgtgtaagcgcacgccaacccctacttttagccagtcgcgaggcacctcctgttcaacggtgacaacatggtgcacacagtctgccaaagttatatgactgccactttactgagatggcatgcctctgggagaagtgtatcctagggtggactgacttccccaaggccatcaacgagttgcacgac

SEQ ID NO: 26336 - DNA, 528 bp, Zea Mays
attgcccactaggacgattaatcactctatatcgcgattaggctgacgataaggccgatcagttcctctgatcgaatcgacacctctgatcgagtactggtagccgatcagaccgactaatcgcggttagttggaggatatgtaatcactgctccctccaatactatttcttaggccggtgcagtttgagaaatttccctcttgttaggcgtcttctaggaaccaaagcaggcattaatggccacatggaaaccaaactgttggctgcaactggacactagcatttttttgtgatgtgctgagtagcaaccacatgcatgtatgcatgcatgatgcatccaaggagtgaatgcagtgaaacaggaatccaacatagggctgtgaccttgcaagtatgagctcacaatactgcgccatttaatgcctcttggtctatggtgtttccgtgatatctggaatttgagcccctgctcctaagaaacggtgctggagggagtaattacctttgccttcacattttatccaaac

SEQ ID NO: 26337 - DNA, 311 bp, Zea Mays
ttgagttcccattactactaggctagcggggaagtctacccccttatttcaatccttagattcgaacaaatcctatcggactgaacttttcccccaactgaattaactcttaaaggcgagatcattggttctatggggatgttatgtgattctacccaaggtgtagaaacaaatgaatgtgtggcaccagtatcaaatagtacttttgttgggtaggattcgactggaaacaccttgtcttgctggggcattgactgctggcggctgctgagctgctttcttaggacagttcttcgcccagtggttttgtt

SEQ ID NO: 26338 - DNA, 605 bp, Zea Mays
tgtttttttaatgaaagagaaggtatggtggtgtgtttgggacaattacctgcctttcatgggtgaggattagtttgatttgggaaatcgggtctcttacaaccctatgcaagtgattaaattggacaaaggtgagctgcaaaagtgaaattaaggttaagtaggtggattaatgcaggttaaattccgatgtcataaccttgtaaagcacacatcatggcaaccagacggcatcttgtgttcttagttcatcctgcattcctgcatcacacacagctgaccaaacagaacactgacttgtatcttctcttcttcaaaccagtttgggttgaggctgtattattggagtcactgctacaagtagaaattgaaagatagctcttttatacagaataggataggaaaccagaggtgcttgtaccaaatcagaaatactactgatattatcgaaattacaattcacttgagtaatacataaattatccatgaagttatatcccaaaacctgatctagctcttcaaatgcatatatggttcaacatgagcattgcacacctaatctgagtcctcacatgtaaaagatttgtcatgggactcgcaggccg

SEQ ID NO: 26339 - DNA, 380 bp, Zea Mays
tccgtctcacttaatttggggctacacttaagcaagtcactacgaaatgttgtatgaattatccaatggcgccgatatcacagcctcacattcacagaagtagatcagcttgctggacacataaatataataaactgccaaaaatgcatcaggcttttccatacaaaaatgcagaaatgcattcatttctcaactgaatgtccacaagctgatactaacatgcaccagtcagtatatttcaagattaaaccatcaatataccaatcagaaacactaaataagtatagtaagcatgtcgacctaccattgtatctatcatataagggccacccaaaaagattgcaaaatgattttctgaaaaattgtgatatcctagcccc

SEQ ID NO: 26340 - DNA, 358 bp, Zea Mays
cttgttccgcctcttcgatccaagagaatgggccggactttcgcaacagcttgaagaagggcagcgccctctcagccagccttgaaatgaagcggctaagggcggctaatgaccccgtaagcttctaggcatccttgatacgggccggaggcctcatcgcctcaatcgctttgatcttctccgggtttgcttcaatgccccggtgcgaaaccaggaacccgagcaactttcctgcggagacaccaaagacgcacttgtctgggttcagcttcgtgcgtgttgcccgcagcttgtcgaagaccagggttaagtcttccactagggtcgaccctctcttagtcttgaccatgatgtcatc

SEQ ID NO: 26341 - DNA, 482 bp, Zea Mays
gggatgttgggggccgcgctagttgcagtctctggctgatgctctagcggccaccgatgccttggggagggatcgcattgaagacgctgaacccagaagccatacacatcggcctacagtctcgagtttttgacgcgggggcttcgtgagtccgcatcgttgttgtttgtttcagctgcgggcgcgcatggtgggtgggttacttggaattcctcactagggattgtcgttgccgcagttccgctcatcaacacggggagggtctcctacacatgatagctcggtaagaattccgtcgaacacctcgcctcagttcttggaccgtgtaacgcgatttgattagcagtttgggcgtactgctcgccggaggggcaccgccgtaagggagtgagcggctctgcctgtttggccgattggagaagacggtcgggtgccgttggatcatgaaaatgcggccaagattagaacatgcaataccggtt

SEQ ID NO: 26342 - DNA, 496 bp, Zea Mays
ctagtcaggacagcagaagccaacaataggtgcataacatagccaaccagcacccagccggagaaaccgtccgccgtcaggaattcccccccaaggttgcggcagtgtcacaagagggagaggccggggacggacgcagcagccgcacagattctactgcctgttccacggtgaagactgcacacacccaacaagagattgtccagaaacgaaggccacaaagtacaggatgtccagagcacagccagccgacaaccagcgagttgtcacgcacacataccaccatcaacaacaaccttataacgaccacgtccagcacccacccaacaacgtgtaccaacatcgccaggaagtacaaatcctcccaccccgcctccacctccgcaccacccaaatcaacaccaccataatcacctccaagcaccaaagcaggaatacttcgtcgaacaaccatatcacggagtcatccatatgatcaccggagggtccagcgtgg

SEQ ID NO: 26343 - DNA, 300 bp, Zea Mays
agtatctttgtttgtccttattgaagaacagtgctttgtcagcaatgagtattttccagttgttgtgctccatatttgtgggcttactgtcaaggtttagatctggactgaaagaggaaattggaatattctttccaatgcttgttctaagggttcttgagaatgtccatcaacctagctttctacaaaaaatgacagttctaaacttgttggagaagatctgtaaagaatctcaggttcttattgatatctttgtgaactatgattgtgatgtagatgcaccaaatatttttgaaaggt

SEQ ID NO: 26344 - DNA, 484 bp, Zea Mays
acaagggcgacagcttccccaatgtgcataattgctacatgatcttcggaggggacaccgtcaacatgtccccaaggcagcgcaagcaggagcaccgggaagtcttcttgatcgaggcagcgaccccggtgtacctagactggtcagatcacgccatcaccttcgaccgggatgaccacccggaccacgtcctgaaccctaggaagtatccactcgttgtcgacccatcatcgacaacacgtgcctcacaaaggtgctcatggatggaggcagcagcattaacatcatctatgcagacactctagatctcctaggggtcgggcactctcaaatctgacctcggaccgtgcctttccacgggatcaccccaagcaagagggtgcatcccctcgggcagattgatctacatgtctacttcgggacccccactaattttttaaaggaaaccctcacgttcgaggtggtagggtttcgaggtacgtac

SEQ ID NO: 26345 - DNA, 321 bp, Zea Mays
cgaagcgtagagtgggcgggtttgatggtggtcgtcttcgtgtgggcggggctggtaggcaggaattgttgtcctcgccagttggggcgagtatgggtgagggggagttgcggaggctttttgagggtgaggtgctgaggataatgctatttaactatagggagatggggatcattccgaaggttgagcctatgtaaggtgtgatgccctcgctgtacgcgtgtaactgtagtttgtatgataaggttgactaccttcgcgcatctgggtgtgttcgtaaggtgttgcgcacccggtctggtatattattgtgtcggtcca

SEQ ID NO: 26346 - DNA, 782 bp, Zea Mays
atgaatacgtccacaagttcacagaacaagctcgctatgcgcctgacgatgttagcacggaagccaagaagatggcccgtttcttgaaggggctgagaccagaactcaaaactatcctcgccagccaagatttcctcagcttctcacacctctcaaacaaggccatacaggtggaaagggctagggaagaagaaaagggtcacctcaagaggaagtttcaagttctccgacctcagcagcaagacatgcactagagagttcgatcttttgggtttcctcccaaaggaccgagcttcaacaagacagcagggtctgctccatcacgtttcagccagccgggttaaagttccctccatgccgcatctgttgcaagcaactaacctccagctaatgcttgttggcactacggagaccccagtcactacaagaataattgtccttagttgaagaaattcgtgcctacctactccaactcggtgaatggccccaagaatgctctagcactcgcctccaaggcaccctcctccaacagccagctaagcaagacccagtttcatggcagggcacgagtgaatcacgttgacgctcaagaagctcaacaagccccgggagtagtgctcggtgagtacctagtcaaatttacccccgctgttgtactttttgattcaggagcatcacattcattcgtagccactagttttgtggaaaagcatggcattcccactgcatctctagaaattcctttggttacccgaaccccagggttagaccttctatgccgc

SEQ ID NO: 26347 - DNA, 323 bp, Zea Mays
tcttagtactattatctgcggtgttgagtgatgacaaggtaagagatgaagggggatttatctaactagacatcttcatcttggctacccccttaaaaatggagggactatgggacacaaaaagggtagaacactctgccatgtcaattgaaactctaaacatctatttgtgatcatatccatgctctttttctttatatttgtccttttattatgatagataaccatcgtcaacgatgcatgagttgtgaggcccgcctagctaatgtgggacgtgggcgggtcgaggcagaggcgcatgcattcatggaagtacttgtatg

SEQ ID NO: 26348 - DNA, 376 bp, Zea Mays
tgaaaaagaggaatactttgcctacaattgcaatgccaccaccaaccccattgcccaaggaccgtttgcgttcaatacacactatttgattagaaaaaaggatgctagtggcaaggtcaaggtcaagttctttcggaccgccaaacaagaatatacctaagaagatttggtagttaagtttttggttgagaagctagtatgctcccatgaagtttaggcgcctaaacatcatgcttgatcttttgttacatgtaattgaactacaagactgatgaaagtcattgagtaattgctagttgatatacctaacatatgaccggtaacctttataggtttacctcactcattgaagaagtgaatgatcgtgaactctctg

SEQ ID NO: 26349 - DNA, 426 bp, Zea Mays
cggcgacggcagatacaccatcgtcattgaaggaatacattgctgttcttcactgcgtggcgctggcggctcaagagcagttgcttcggacggtcacgatatggtgttcggcggcacacgtttcccaccaattgcatatggtcggggttggagttcccgttggcggagttgaaccgcgaggtggaggtctaccacgaccaccgatgtcagctcgttccagggatgattcggatccattagcagcttcgacgttcagatgcagtgactatctccctccatccatggatttccaggcgactggtaatgaaattgtccccttcaatttttctgcagtggtagtcagggacgacggactgaatctagtaacggtcctgttcgctacacctcaatgcctctgctcgacgattttttcaattccagacagag

SEQ ID NO: 26350 - DNA, 284 bp, Zea Mays
cggacaatgctagtggccatctacacttaccgctacttgcaactgtagaaggatgagctcgagcggcagtgccctgccatgctggagcaaggcatcatctggtccaacacttctttgtcctcggcacggtgctgttggtcaagaaggtggaggatttctggaggttttgcatcgattgccatgcgctaaacgataagatgtccaaggacaagttctccttccctatcgtcgatgagctccatggtgccaagtactttaccaagctagacttgcgatctagctat

SEQ ID NO: 26351 - DNA, 909 bp, Zea Mays
ggcatccgtccttacctcctgtactggctctcaaggcatacaccaacaccagattaagcaagtccatgcttttgccatcaagaaaaattttgagttacacatgtttgtagggagttcccttcttgacatgtatgccaggtcagagaatatccaagaagctcggagggtgtttgatatgcttcctgcaagagatgttgtttcctataccaccattttatctggctacacccgactgggccttgatgaggaagccctgaacttgttcaggcagctgtacaatgaagggatgcaatgcaatcaagttacgttctcagtccttctcaatgcattgtctgggctttcttctatggattatggaaagcaggtccatgggctaattcttcgtagagagttgccatttttcatggctttgcagaattctttgattgacatgtactctaaatgtggcaagctgttatactcacgaagggtgtttgacaatatgcctgagagatcagtggttagctggaatgctatgcttatgggatatggaaggcatggcatggcatatgaagttgttcagctcttcagatttatgtgtgataaagtgaagcctgacagtgttactctattggctgttttgttgggctatagtcatggtggtctggttgacgagggccttgatatgttcgatcatatagttaaagagcagagcacactcctcaatactcaacattatggatgtgttattgatcttcttggacgttctggacaacttgagaaggcactacttttgatacaaaagatgccatttcaaccaactcgagcaatttggggttcattgcttggtgcttgtagagttcatgctaatgttcatgtcggtgagtttgttgcgcagaagctttttgacattgaaccggaaaatgctgg

SEQ ID NO: 26352 - DNA, 390 bp, Zea Mays
ctagggttttgcttaatcaaactcgcggtccttcccttaatgaaacagtagccgcggctgaggaaagggcggaggggcttactggtggtaagattgctccggtgaagtggtcgagggtgtaggggaggtcttgacggtcacgccgatgtgcggatcatctccacggatggtcggagtaggccggtctacgtgcgcaggtggatgagctcgttggcggcgagtaatccggcctcctcacggtgcgatggtccaattggttagctcgggaggctcgaccaggtgacgtagaggcggtatgtggaaggaatttgagaatggcgcagagcttacccgcttcgcgttcgccggtgagcggaagaagtctggcgagggtgattcggggtctctgat

SEQ ID NO: 26353 - DNA, 739 bp, Zea Mays
cggagactgaacattcaggactacaaagaccatgcattgtaacctgtcactaattgtaataaggggcccgtgtatagttggcccatgctacaggatcctgcccgtaggccgccatgcggacagagctattagtgggtcagcccatgtttgtaattaattacgttgtaatgacccgccataaccccccaaggggaatattccaggataacgtaggtaactaagggtataatcgtctttgacaaggtagggcctaccctcggttacctataaatatccccgtactgcactattgcgggggatagaaataaacactattgccctaatacactatgtttattggcatcaaattgtttcccattcttccactgtttgagcttggctaaccgcaagttagcgagttccaacaatgacatcgcccacggcgtgcaggagctccacgacgtccaccatgcttcggtgatctatacctgagccctcggtcggtcatcgtgctctgtgtacacgcacaacatgccatgtttctccccgcatcctaggttccaagcaccgatgttgacgagggtctacagtgatggttccttgtagatatctctctctctcatcgctcgtcggacgttggcttggctcatcttgtaccgctccaatcgatcgaggggcggtgaggttcgtttatatagccatgggcggaagatctgggttgatgaatgaacttcgaatatctcggccaagctcattatga

SEQ ID NO: 26354 - DNA, 299 bp, Zea Mays
cggcaccgaagctgaagcaaagcaagcgctacataaacatcctttataacagcgatgaagctagagaaacttagaaggggggatgaggggtgctcttgctttgtgggtgcatatacattaacatgggtaacgaggtctattaaagatgttatttttccttttaggatgtgccacttcatctaagacaagttaatatgtgatgcaattgattacagatgttttgaagatggacagtgcaaacaggattaatgagaggtgcttggaactgcagaagaacaagaagagtaccaaaactaagg

SEQ ID NO: 26355 - DNA, 419 bp, Zea Mays
gaagaacacgtatgagtcgttgatctcatgtggtgcggcttggatcgtgctgggcttatcagttcggtcgggggaaggcaggtaccattgactccatgatctacggtggagatgggattgggggtaccgttttgcgatgcagtgatccttgccattgatcaaccgatggagggatcagtgctgatcgcggtgtggcttgatgaaggctgtggatcgcgaatcttacgtccgttatagcgtaccggttcattacaacgagaatctaatcctgaccgtagattcaaaatccatcggccgagatctagtcataccctttcggccaccactttgcaaaagagcccctgctctttttcagattcaacccgcagtccactctggtggagaactgagtctttggaaaaactatggattagcccctg

SEQ ID NO: 26356 - DNA, 273 bp, Zea Mays
tgagcaaaggacgggttaacactcgtcaacatggtaactagaccaatgaggaaaacgaaaaggggtacacttacttagggccctagactttccaacgaccttggaagcgagacgtccactacccctgctgctgttactgttgttgatgttgctgcccgtgtggcagtggcaagccagatgatgatggcggcggtggtggcggagctgatggtggtgttggtggaggactaacgcacctctgcgaaccctgggagccggcctccccgaccccac

SEQ ID NO: 26357 - DNA, 389 bp, Zea Mays
cctgccgttctgccttcgttcaatctggatcgtccatcgttgttgttcaatctggatcgtccatcgccatactaacctgctagacgcgccctcctcaccccgccccatccgcgcgcgctcgcttcgcacaaaaaatcaacacaagttgacaataccaagagctgattacacgagctgactgcttcctctatagcaggaaggtttataagttgctaccgcaacctttggctggccgatatggtacattatatttgcgccgcggtagcctgcgtgggctgcgttatttggttaacgtatgaggcccatctatcaattaaattctataaggcccatctacttcatcaccgcaggcagtcgcgcggcgctctcatccccgcaggcagtcgcgc

SEQ ID NO: 26358 - DNA, 442 bp, Zea Mays
gtcgagtgacttctgctaccacgaagggtccttcccataagggtgataacttgtgccgtccttcccccgttagaattcggcggaggacgaggtctcctactgagaagaatcgttgtcgcacagccttgtcgtgataacgccttagagtctgttggtaccttgctgattgaattactgcgttcaaccgttcttcctcgagtacatctatgtcctccagcctggtgacctcagcttctgctatgctttcgaagatcagccttggcgccccaaacttgagatcagcgggcagcactgcttccgacccataaaccatgaagaaaggagtgtttccatgcaaagctcggctaggttgggttcttaggctccaaacaacatagggtaattcccttatccactttcctgcaaatttctcattcttatcgaagaccttttttctgagcgc

SEQ ID NO: 26359 - DNA, 285 bp, Zea Mays
gacaggttgtggcgcttctgtgtcaactaccgcgcgttgaatgcgctcacggtcaaggacacattttcaaccccgatcgtcaacgagctcctcgacgagctccatggggcgtgccccttcaccaagctggacctacggtcggggtatcaccaagtacggatgcggtcgacggacgtccataaaatgacgtttcgtacccacgacagcctctacgagttcctggtgatgcgttcgggctatgcaacaccccagcaacattcgaggctttgatgaacgacgtattgc

SEQ ID NO: 26360 - DNA, 438 bp, Zea Mays
cattaccatacaaattacagttacatacacacagcgagggcatcacatattacatcggctcaaccttcgggatgatatccatctccctgtaattgaaaagcattatcctcaattcctcaccctcaaaaagattccgaagatccccctcgcctatgctcgccccaatcggcgaggacaacaattctcgtttaccaacccggtctactcggagacggcaacgctccatccccatacgacgatgtctaccacttcgcgaaaattcacccacactatgttttcccaccacccttcgccgcctatacccagtactcgcactaggaagatccctggcaccctccacacccgacgaagtctccgccgcagccacatccaacgcaacaaaataatccaagccttcatccgaggactcctccgtccaaggaaacgaactcccagatt

SEQ ID NO: 26361 - DNA, 349 bp, Zea Mays
ctaaaattggaaaccttatatccttgtcatcattgatcttattgggattctttttgcataccttcaagtgtttgcataatgcataagttgcgactatagaggtggaatgactagaacctcacgagttgagcgccctaaaattggaaaccttatatccttgtcatcattgatcttattgggattctttttgcataccttcaagtgtttgcataatgcataagtaccattgacttttgcttcacacttgataataattttgcaatagttgcaccttccttcacatcactagaatttttgtctatgattatggtgaatctatgccatgcctctagaagccataacttttctt

SEQ ID NO: 26362 - DNA, 571 bp, Zea Mays
caatagttccaataggctcaacaagaacagtctctatggccagggggttgtttgcaccctttcacttaacttcggcacatcggtcgtctcaatgcgcctaggtctacgtgtcaaaatgttgtttttctttgacctcgacacaccaatagatgccgaggtagcggctttccttttcctcttttgcttccaggcgggatagcagtagtctgggtaaacaaacccaataacatcaaacactctattcaacctatttttgccgcgagcgccgaaggctgttgtcatagcttcgtcttctgccttcgaatatgctccgagtatctcataacttgttgcttctatgccatcgaaccaatcatcatttggctcgtcaaactgattcctgaaccgaaaagtgtacttcagataaaccaggccaccctggctggaaccagcggcggtctccttcggcatttcccactcgctcgcaagaggccatactttgtaagaaatatgctcttgaactaagtctcttgtgccaatataggtgcacactgtgttgaaagcagcctggcacgcttgcacatcattccca

SEQ ID NO: 26363 - DNA, 699 bp, Zea Mays
gctcaatcagaggggtcgaggagtttgaggaggatctaagaatgctagaacaagcgatcaaggcgctggaactgacctgtaataggccggccacggtgaggtgttcttgcggcgtgttcgaaccgatttgggggaagttagaaattggagctcactggtgatcaaccgaggacaatacttggtggctgggtgcgtgatgatcctacggagctctgggaggcttcaacttatagagcgcaacagtggtggcgctcagtttggccgagaagtgctggcggccggagagggggaggattactggtgcagtggattgatggcaacaatcgcggcagcgctcactggcgaggatcagatggttatagtgagtcacggcgacacgacggacgtgtctcgatacgtggcataaggccgcgagacgacggtcaccggcgatctcatctaattccaccgcggcgagcctagtacggcgaccggaattgtttactggccgaggcttatccacgacggcgtgctccgagcgttatccgatcaacctgagcacaaatcaagacggcgacagcacgaatcacagcggagatcgtcggcggtgagctgagctgtaaatctgatctgtttcaggttactgtaccatcgcgagttcctttcagtgcacctgacagtcaaagtttgggctcaaatctctctcaaatttctatggca

SEQ ID NO: 26364 - DNA, 311 bp, Zea Mays
aatcatttagacctctcatgaagcaattcttctttttcaggtctgtgtcaacttactctatagcatactgggagagatggttgaatttggcgaggtattgcatcaccgagtttcccccttgctttaagcatacaaactcttcaagtttcatctgtaaaaacaccaactggaatgtagtgttccctgaacacttatttgaactttgcccacatgaccagatgtccttcaggttgaacaactgtgaagtttgcccaccaggtactggtgttacctctcagttgctaggcagcaaacaggggcttctgggtctc

SEQ ID NO: 26365 - DNA, 316 bp, Zea Mays
gtttgcctctagcgagataagtgtaggaaacagtgagtttacgacgaggttcagggttccctcatattccttgcgtcactatccagtacgcgtagatatactcccagtatcgggtatcgtcttgtctttttcgatgtatgggccactgtagagactctagtgctaaggcccctacgaccgaggttgactggccccatgagtcagtgagggtatatacgtgggcgcatgtgggggtgttccatcgtgtctgctagagaccttttggtactatatgtacggttcagacgtggtttggcgatgttacgtcttgtcgcat

SEQ ID NO: 26366 - DNA, 470 bp, Zea Mays
ctttttgttaataagctgtatgccactatatgtacgtcctctcaacaaacaagttagctagtagaactccaaagtagcctttgtcttgactcaatcctcatctaatgatcaattagtagggcatcagtgtgtgtgtgtccttccacttcaaaataaaaccattagacatgcaagctgccgaatttccttgaattcatttatcttttccgccgtgtacgttgtacttctcatgcgaactttcccctcctcctttgaaattgcgagatggaatattttttcagaattccacacgtgagatgtcgacatatattggatcgggtagccaacacgcaaccacaggccatgcgaaaggaaataaagaaatagatatgccacacacccggtctgccaatcacatgtagtaggtgacgactaagaggaacttctcgaagacgaagagaaacaagtcattgttcaagcgcgcgatcgat

SEQ ID NO: 26367 - DNA, 522 bp, Zea Mays
cattcgttcccgtaccccatgctgaactatctaatacatccactctttctattatctcacacaggtgatggttgcttgctttgtgtgcaaaaatagcttctcaagagttctttcagtggctatattggtaagtacctggctatagctacttctattgaaagtgcttttttttcttttcctgattgtgtgaagaggcttactgagttaattatgtcgttgcaatttcagttcgcttggctattttgaaattttgaatatggcttctgcagtagtggtctaagttgttatatcaatgagcatatattgtttgcctgctagctttagattgttgcatatggatttccaagttctgcagaatggtagatataataatcacctacaatgtggtttctcctttttgcaatattctctcacgtctgtgtattgtgtggtccatctaatcttctgttacagtttcacatgtctaatctaatcttggttaattgcagagtagctgtttgttgcgcaattgggcaaagggaa

SEQ ID NO: 26368 - DNA, 506 bp, Zea Mays
gtcattccccaacatctcatctcagggttgggtcccacgaggtcatgactcctgcaaagtacggaagagctgcacatgacagaacaggcccactaactaatcaactaaaacatgggccacctctccagggaaactacaaacgaaatatcacgcattgctagtggccctgcaaagaaaacaagtgctcgtgctgaacactggagcaccacagacagaatgccaggcatatcagtcgtaacattcagcaatgacaagcatttctcattctgatattctctccctctgtatgtggtactacggatatttgattggtagtaggtactacatcggtacagcttattgccctattggctattttatgatcaaccactagatgtttataatctccaaacaaagaaaattagtttttattcccaacttcacaatgtgttgctagtcaaacaacattttatcatataactcaaacaagtaataaccaagacactaataaattgctggatcttgag

SEQ ID NO: 26369 - DNA, 382 bp, Zea Mays
tcatgaagaccaacaaattcattatttttgcgcaagcgatgtcccaccggaagaaaacgaaaatgcccaaaataaccaattttgctccttaggctgtatgaaagagattgcttatcacaatgaatacatgcaaaaaaaccttttgttttacgccctgaaagagtgcccaaagctggataatcgtggatgcaccataaaactgcagcacgtaggttaaacttttgtccagttagagcatcgtaagtaggtacacctgtccaaagctcaagtaaatcttctataagaggctctaaaaaaatatcgaagtcctttccaggtgatgtaggaccaggaataagtaaagccatcatgaaatttgactcctccatgcacgcccaaggtg

SEQ ID NO: 26370 - DNA, 344 bp, Zea Mays
ctaccaacaacagcgccatgcacggttatgccgaggatcatttagcttcctgatttgtttcctacaacaccggctgttgtcggcgctgccgcagatttgtgccgaggatcgcgccaccattaatcacggatagcaggaaggtggttgacaatctccgccctagcctcctccccacgccatcgatggaaggcagcctcggatccctgtcatcgcgtgtccgtgctgccacagatttgtgccgaggatcgcgccgccatcaatcacggaaggtggccgacgatctctgccctagcctcctccccatgtcgtcgatgtaaggtggtctcggatccaccccatcgcac

SEQ ID NO: 26371 - DNA, 357 bp, Zea Mays
aaacaagtaaaactagtaaactcacagattcttgatagtacggcatctctatactataaaacaatataaatgttcaatacaaccctcgttaacttttggggtcccttctttgccatgtggtcaagcgttacacaattattgtttgttttgtgctgaaaagaacaagaaaggtcaatcacaaaagcaatcgctattttggcaataaggaaatatacaatttatgattgctaattactttgggcaagtttgcatttgtgcgcatggcgcatttgtccaactgtgacatctaacacttgattgttgatccttatcgggtatggtaattagggatacccatattacacccctaaatcgcgc

SEQ ID NO: 26372 - DNA, 470 bp, Zea Mays
cgagcatgactttcccccttttcttggcccagcgaagcacccgagcaatctaactgcgatatcagcacgatagcccgccccgacgacaatccctcaacgatgacgcttggttccggccaccatctagctcgtccttcggggtagcttcatcggaaagggttgcggccaagttttatatagcgccatgacgagtccgtggtgagaatatatcgcttggtttttacggcttaggaggttgagcgtaggaaaatctcaccccgtcgagtatatcctactgcttgggattggagttgagtccgaccaaggggccacaggttagtgggaaaccgggtggttgagcgaacgcaggaagcttgatcgtggttgtaattcatagccagggagacattaatgtaactaatccaacggatgacatggacgtgatgtcgtagtgattagtgaagccttcatcggctagggggaaaaagaac

SEQ ID NO: 26373 - DNA, 595 bp, Zea Mays
cgaacggttatttccctttcttcctctatttatctatatggacttatttatttatctaatatatattttaattattaagttattttaaatttatttcctagttatctatatgtatgtaatattataattatgcgtcgatcgatccctgaggatctccagggtaggtgttttaactgtctggcctcctctcatcgggcggcggattgccgacgttcggtgcgctgctttacatgttgggggctcggacatcgtgcagttaagtgcaaggttcgtgctacgccggtgatcaaagcttcagtatcggtgtgggatcgtcttggccctcagctggttcacaagcctgtggacattcctagacgcgccatggagtggcgcagggtctcttcgccgatcccggccatccagagggccggtgtggctgatcctaccttgggtggcgcgaagaaacgccgccatcgtacgcggggtcgaaggcctaagaccgcccccgttgcaccttcggaggattcccgtgaagttgcacctccacccggttcctcttccccagagccggtcagggtgcatgcccctcaaccggttgttcctgatatggtgg

SEQ ID NO: 26374 - DNA, 564 bp, Zea Mays
gacgatcgagactgggtccggccgtgcgaggtggcgcggatggagatcatcagatggacaactaaccagactccaccggctgtggtagtggtgaaataagctgccggacggacggagggtggtagtggaggaaacaaagaaactgcagtcaccgccggtcttggtgccacatttggcaagtcaacagttgcacatttcggctcaagggggaggatgaggatgaatgggatgcagtacaaaagcgtgttgcactgtaagtactcctctctcggtctggatggatagactctctggactgctgcctgcagcttgtcgcaggatgggcaacgcatacgcatgattatttggagccactaacgttgcacaatggtgggggcactgcgtgcaggtgcagtgcgggagtacgtagaggacagcaaagcatctcggcgacattcctggatttattacagctagctaaaggtcatgcagtgactgtgtgaggcagctttcacctagtactataactctctctctcgatccaagagggaaaatgcattcaagcaagggactgatagatcatag

SEQ ID NO: 26375 - DNA, 463 bp, Zea Mays
ctcgaaacctccgcgtctctttcccctgcatataagtatcggagccatcttgccttctcatgccgcgactacactccgtgctcccatcgctggcatagggaggaaatcggaccaccactcccgcatctcacgctcgtcgtgatttggagtcgcggggaactaccagacaacgtggatctcggacgcgtgaatccttggtcggggaaacctcgcgggcttaggcaatcgctcgttggagttcgaccttcaccccgatccgccccacgtcgcggccagacctcaccgttgttcaatcatcggtaaaaacccctttgttgaatttgctacaatctcctctgcgcgtagcaccttacggttgggagaatagtacaccagtgggagaatccccacaactccggtgtgctccggtgttggctccaccgtgggatcctggcggcgcgaccgtaatcgttcgtcgggggta

SEQ ID NO: 26376 - DNA, 271 bp, Zea Mays
ttgggattgggaccgtaaaggatctcctattaatcatgttgcattctgcaaggcacacatgcatgttagatattgaaaaattatacaacttagtaataataacacatatatgtggaagtatgagtgacacttacaatgcaaacactgttacgagttgcacatcgagtctctgaaggttcatcattaaccacatgtcctcaaatgtaacaatgtccttttcgcttacaccaacaaaagcatgttttcgtatatatacattgatggtgtcgac

SEQ ID NO: 26377 - DNA, 273 bp, Zea Mays
tgtcgatctaactgacaagcatgacacaaactatcgaaatcgcccctgctacgcaaagggaatgtctaaagaaaataagagaaatcatccaaatgagcaagtgatacttataccccgagatgctgaaaagaggtgatgggtacaaaatcaagagcccgagaggaggaactggggaagggaaggcgaacatgttgacctaactgataagcatgacacaaactatcgaaattgcccttgctacaagagattactaagttgtagattgcttggaca

SEQ ID NO: 26378 - DNA, 532 bp, Zea Mays
ctcttttccccgatattaacggacccttcttttctcctaccagatggaaggctcttgggtcattaggacatcctactgctcagaggaggaaggatttcctcacctcctatggagttgcgcgctacgcatggggatccgcaagaagcccgaatatgtctggaaggaataccgcgaaaatggaatggagaagtgctctatggcggtctacctgggagaaagccaaagttacccaaaccaccctcccttccaagtcaccttcatcgggcaccgcttcctagacacttgccaaagtgttgcccgaaaagcccttaaacagctatgccaaaactacagcagagagatctttgaaaccccccttcgttacttcccacctagcaacaaaaatacccccacctggaggaaaatacttcaggccctgtcagggagagaccctaccgaggatgaccccaccattgtctacatggccggatacctccacactctcgataaccactacgatgaccttttctcccactgcacccacctaaactcc

SEQ ID NO: 26379 - DNA, 366 bp, Zea Mays
gatgaaaccaacctcaattatctactttgtgtgtgttttcctcgaataacacgtgcagtccagatttatggaatcaatcgatacccaaattttacactcgctagcacatcggacatgcgacagcggagtgacggaaagcgcgacacgtagtgaagagttgaatcggtggccgatttggataaacaaaagggatagtggtagagagataaggtgcacacggggacctccgtggagacgatacgtgtctttcacgtaaatgagaagttgtgtgttgtcacacacagggttgcgcccgccacacgcgtcacaatgtcgggccaccaagagacacgtgcaacgcaaacatgaaagaatttcaaacgaaat

SEQ ID NO: 26380 - DNA, 373 bp, Zea Mays
gtctgggtccctctgtacatggacattgtggacttatttataggggcgtgacgacgcataccttcgtataaaattacatcattaccctcagttcgtatacacatgatctacagaaacgagcaagggcactctcataagagacatgtcatacacaccaactctatcaccttcatctccatatcatcgcgaacacccttcgatacttcattttagacaatgacgaagctattgcttcttgccttggtttatggagatcttctagacaaaggtcaattcgttaaaccttcatcatagacttgatgaaggtctattcgttataccttcatcatagacttaatgaaggtctagaattcatcagattgaggaccttcgg

SEQ ID NO: 26381 - DNA, 281 bp, Zea Mays
aagctgctttggtatcatgccactgaacttattgtaagacaagtccaggattgcaatatttctcatattctcaaagctctcaggtatgcttccttccaactcgttctgtgagagatccaggaaagaaagctgggtaaggtttgcaacaagcagagatgggatctcaccagataagttgttgccagagacatctagcccagtcatgttgtgaagaccaccaatggtgtctggaatggtgccagtcaaggcattatcagcgattgcaagaacacgaaggttgc

SEQ ID NO: 26382 - DNA, 652 bp, Zea Mays
aacaaagaagccattggaagaatagccaagtgggcctgcgagctaggagctcacgacattgagtttcggcctcgcactacaataaagactcaagcactagttgacttcatatcagaatggatggagcaacaagtaccagacaacccggaggctgcagaagtatggcgaatgtatttcgatggctcgctgaagctgcagggagcaggcgcaagaatcctcttcattgccccaggaggtgaacaactcaaatatgctcttcagttatcattcccagcatcaaataatgcagcagaatatgaagctctgatccacggattgaacattgcgatatcactaggcattaagaggttgatggtatatggagattcactggtggtcataagtcagataaataaggactaggattgctcgactgattctatgggcaagtactacacaactgttcaaaaaatagaagacaaatttgaagggctggaatttcatcacgtggaaagggatcataacgcagcagcagatgcgttgtcgaaactaggatccagtcgagcccaggtcccacctggagttttcgtccaggaggtgtcacgcccaagcattccctcagattaggcggaagagtgcaatgttttgagccagccagagtcagactctaatg

SEQ ID NO: 26383 - DNA, 612 bp, Zea Mays
gtaccatcgagtcacaatcaacgatgtcgtcatgctcaaaagcatcacatgggaaatcctgtggtgcgcagtcaggtcataaacaccggcaactggcgcgctaggtagggggtgcagcgttgattcacgatgactccatggctatcgtcttcaacaccctgatcatcttcaacgccggggaggttttcagctttggatccctctcttgcatcatggattgagaaggcgtcctgcacctcatcgcggatccatccaagaagaggtcttctccgagggcatcgatcgcggagacaggctcgtcccgcctgacctcatcaaaaactacttcgacgaactccaaggcgcgaagaccttaaccaacctccgccccgtgtaggattgcgcctgcgtcggccgggcctaggaccatggcaacacctggcccgatcgaccgaggttgtgcccttgtcgcagcagactcctctatccacatcatccacccaggtgtggaccccgatcactcggcaaaaaggatttgatccttcatgcaccttttagttactcttttgttttgaacgatattcttcacattccaaaactaattcacaacctttttccggttcataaatttac

SEQ ID NO: 26384 - DNA, 389 bp, Zea Mays
gatagaccagatgaactcatcaaccgtaatgcagtgtagccccgtggatctacattctctttgccaacttcgattctaccaaatctaactttcatgtcggggtaaagcgggagaagaggtctagcggtggaggttggtgttgccgtgttggtcccgttttatttgtcacctctctcactctcacacaggcagctggaggtccccaagcggccaagcctcgtctgctgcaacttgtgccggctagctactcgccgcccgtccattgtatataactatatatgagccacgttgctgtcctgcaattatctgaccaagaggaagctatggctctgtaactccttccctagttttccaattcctcgtcagacagctcaacgatgaaaaaaaaa

SEQ ID NO: 26385 - DNA, 1416 bp, Zea Mays
gtcgtcgacgcttgctccgaggaaggggcaccggcgctggaggacgcggtgtgaagctcggccacctgctcgccattgttgctcgccttcatggataacatcaagatcctgtcctggaatgtgcgcgggctgggggctcgtgccagacgcagtgttgttcgcacactcgtagacgacgtggttgccgacattgtgtgtatccaggagtcgaaactgagtaccgtcactcgtgacgttgtaatcgcaatgcttggtttgcgtttttcggattttgcctgcgtccccgtgaatggctccaggggcgggttgctcgtcgcggttcgtgggctagacatctccatcgccgacatgctggccggttcctactcggtttccgtcaagctctcgggccctaggattggggatccttggtggctatccacggtgtacggaccacaaggggtagccgagaaagagctgttcctggaggaggtcgccgtggcgcgtgacgcctgcgaagggccttgggtcgtcatgggtgacttcaatctcattcttgacgagactgacaagagcaacggcagggttaaccggcggctcatgcaggagttccggcattgcgtcagtgatttggagctccaggacttgcatttgcacggaaggttgttcacttggagcaatgagagggagtcccccacgctgattcgcctggatagggcattggtttcgctcgattgggatgagcgctttccagactccttcctccaagcgctctcctcagacacctcggatcactgcccgcttctgctccacacaagcagagatgttggtcgcgggggcaaaccgcggttccacttcgagagcttttggcccaaactcgacggctttgaggacgcgcttcagcgcgggtggcaatgcaacgaccccgtcgccgatccgtacaaccggcttgatcagctctttcgcaatctagttcaagctctacaaagttggtcggccaagaatgttggtactgttagagatcagctgttaatggcccgggaggtgatattgagactcgaacgggcacaagactcgcggctgctctccccggcagaagcgcgtctccgtgctgacatcaagctaaaatgcttgggcctgtcctcgctcgagcgcaccatcgcgcggctgcgatcaagggtacgccagctctctgacggcgacgcgaacaccaagttctttcacacggtggcgagagggaagaagaagagcctggccctccatgaactgcgttccgagggtcaaaccgccgtgtcccatgacgacatgtcctcaatgttgtaccagttcttcgaccagatctttggcactgcagcggttcgggagcgggcgatcgacttggagaccttaggcctatgccccatcgacctcgccgctctccacgaaccgttctcggag

SEQ ID NO: 26386 - DNA, 452 bp, Zea Mays
cgacaacaccttccaacctgtgggaggcggagctgatgggttcgatgttggagcaacgtatgttgacgtcgcttcgggcgcgaagctaacacacgacaggtccctcacaagtcatcggcctgcctggaagcatcggttgggcgaggagcactgctcatagcgcggttgcggttgtttcgtctccatcttctccggtgagaagaacagcggtggaggtttggatgtccctcctctggccaggggagcaagcatggttgtgctccccctgagtgggagggacaatagtcggcgtcagaagggtgtctaggtgggaggagcaccctgtaatagccgaagccaagggacatgaactcgagactcccgaactagattactatgctgagctgcaaagggtgctcaggattggccatctggagccttgatgggaatgtggtgtcaacacgcaactgccc

SEQ ID NO: 26387 - DNA, 428 bp, Zea Mays
agagagagagagagagaagggatgttggcctagaaccactacaatagagcactgacatggcaatttacacattcacgatgtagagaggtatgtgtcatttgagtgtaataccttatatcttttgttggtggatgtataaaagcaagcatgagcatatcttacatactcaggtgatgactgagctagtgagtggaattgggaacctagggacttctagactcaagtggcaactatgggctgaagcctcccttgatcgctggttgttagccctagtgtatcctagccactttggtgcgtttttagtcttggtgtgtttttagccctagtcatgacttttggacgcaacccctttctacgttgttctacgtccccccccccttttatagaacaagggaggagagagttacatccctttctagatggtgggc

SEQ ID NO: 26388 - DNA, 440 bp, Zea Mays
taatccgaccctggatttgcctgaccacggtgatggcgaacaccgtacacagaccaagatgttccggttgattaagtggggtcaagctcaatgggtcgagcagacgacgatcacaagcatgtgtgggtgctaaaacacggacaaaaagagcgagggcggacttggaggcagctagccgcgatgaggtgtttcacggcggcgcagtcgaccaaattgggggaagaaggaaattctttggctatggtgggtaatcgagggcagggatgggtgctttggcttggtgataacttagcgcagcagaccgtgccatcaatttataagggcattaagcggtggccagtgaatttggttttgcacggtggcggccagagaaagaggagatcactggtgcaagtgattggtggcatctaccgtggcggctctccggcgatcactggata

SEQ ID NO: 26389 - DNA, 278 bp, Zea Mays
acccttaggcgacttttgcacggagtgtccttttagtaaaagacttcgtatcgcacacttgttgtgctaatccggctgcacctttggcgacttttgcacggagtgtccttttagtaaaagacttcgattgacacacttgttgtgcttgtccggctgcacccttgggcgacttttgcatggagtaagacttcgtattgcacacttgttgtgcttgtccggctgcacccttgggtgacttttgcacggagtaagactttgtattgcgcacttgttgtgct

SEQ ID NO: 26390 - DNA, 370 bp, Zea Mays
gggaagtggtgccggcttaaattgtgctcgggggaggggaggaggaggaggagcggtgagtggtgcggcttggagaggagcttcgggcactgcttttatagatagtccgggagggaattcggtggctagctggcctccggtgggtggtgaacagcggtggtgcacaacggcggcgaggtgacactatgacgatgaaggacggcgatggcgtgcgggtacacgtgcatagcaggaggaggacgagtggtgccaaactttgttgtgcccatcaatggggtggtaggagaggatgactggtagtgaggctgtgcatcactgttagctcgtgaagtgggggaagctgacaggtggggctaggcgagcagtgaaa

SEQ ID NO: 26391 - DNA, 426 bp, Zea Mays
gtcctcgagatttatgaagatctagggaaaaggtggggaaaatctatgtgaagctcttcttctctttcccatgttgcttcatcttcgccatggtgactccattgcactttgcacatctttataaccttattccttgtgacacgagtcagtgtatccagaatcttgatggggtactcgacataagtcaggtcatcttgaacactaaggtcttccattggtagctgctcttcaggtaccctgagacacttcttcagttgagatacatgaaagacatcatgaacatccgcaagatgatccggtaactccaattgatatgcaacctctcccactcgctttaagatcaagaagggtccaataaagcgaggggacaactttcccttgactttaaatctcctcattcaatgaagtggtgacaccttgaggtac

SEQ ID NO: 26392 - DNA, 580 bp, Zea Mays
catcttggtgacctcacttgatccttgaagacttgagttggtgctcattctcccttgatgaagttgatcatcttcttcggtcttgtctcattgattaagagttagtgtatattatcgggctggggaatatggttaagatagatatggatgagatagactacgtgatgtagattaaaatttgtgtgatgttaggtggggataggcagatcatgcaatccatcaagactctattggttgggttggtttctcattctttatttagtgtagggtgaactaagttaaaacatgtggagagggtctaatctatttcaccagtattaattatcatatttaagtagccacactagattagatcatatgagattagatgggatctagattagattggatatggctagatgagactagttaaagttagatagatcttcctgggtaggatatattttatcaggatatgttaaaaatctctgttaggttaaaacagaggggttatgcaactatctgatgggtaaggtagttgcatatggttaggtggttgtatatggtaaagttagtctagggcaccaattttaggttagat

SEQ ID NO: 26393 - DNA, 390 bp, Zea Mays
atacgaattttagcgtaaatcgtagatctgtttcataacgatgaatggggcctaaaaattagggtgtaaaaatcacgtgcgtccgatcgtgcgtgggttctggctcgggcggttttttgcgtaaaacgtgaaccaaaacagcgataatgggtacaaattttagtgtaaatcatagatccatttcataacgacgaatggagcccaaaaattacggcgtaaaaatcgtgcgtgtccgatcgtgcgcggttctggctcaagcggatttttgcgtaaatgtgaaccaaaacagcgtaaataggtctgaattttagcataaatcgttgatctgtttcataacaaattacagcgtttaaatcgcgcttgtttagcgttagtttccatgcatgtcgc

SEQ ID NO: 26394 - DNA, 514 bp, Zea Mays
ctttctcaccgccctcggattggaatctcatcgctgtcgtgccatcttcgttgtccgtcgcgtgtctctggctatctaccgcatcacggtgactcacccttgctctccgttgatcgccggagcaattgccacggcactggacacctagctgttgcgccagtgctcttcttctttctctggccgccgcgcgtctcgctcgattcaccggccaccgcttgcgagcgctataaattgagcccgcggctagcttcgcaacatcatcacgcaccaccacacccagtattgctcccaatcgttcaccaaagagcactaatttcaaacttcccccaaaactgttttctgccaccgcgaagagtgcctcaccgcggccagcgcaattcgagtcagctcacgccttctgctccctcaattgagtattctcaggtacccgtgatgctcctcgacctatccaattgcattataccgccatgaatcgcttggaacatgttgttcctttaagtttctccgctgtcac

SEQ ID NO: 26395 - DNA, 544 bp, Zea Mays
ctgggatatgccgaaggagaccaccgccgattccagtgaggatgatctgatctgattgaagtataccttcagatttagggagaagtttgatgagccagacgatgactagctgaagtgtattgaagctactagtgatgagctactcggggcatactccaaggccgaagataatgctttgtccgcagctttcgggggtcggggcaagaaaagattgaacagggtatttgatgcgattggcttcgtataccctaattaccactacccgctatgagggcaagggaaaaagagaaagactgtcgtttcggtcaccccagctgaaccgaagagcaaaaaggtgaaggttctgacccaccggccgcgttatattgaaccggtcatagtacctgaatttggcgaagggacctcttcagctgccgaagcaaaacaaactgctccgattgtgcagagcgctgaagagccgactatagtgccgaaggtgcctacagtcgggccaaccaaagctaaagatgataaggccgaagagccacaggtggaaaaagtgata

SEQ ID NO: 26396 - DNA, 474 bp, Zea Mays
aggaatgagggttgtcaagatattcagctggtgataatccttgagcacccaatctgacgaaggaacactggttagccctagatccaagcatcttcacttagccttcacttggtaggcattgacatctatcacaatgttattgtagcatttgacttcgttggtgttctgtgcgacagtttgtgtttgtgtagtatttatattagattccagtgcttttgtaaatgtgccatttttgtgatctaaagtgttagaaagcatcttcatatatcatatgccctcatctatctattgataatggcgttctgtattttccaaatcattatggactttcgagtcacaggtacttcggttgattggctcaaattagggtaatgcacgctgtcctctgccttctgctagctgcttgagcagaagcacccatgaaagcgtcgcctggtgccaggatttggcacgagccagcttagtgcttttttt

SEQ ID NO: 26397 - DNA, 378 bp, Zea Mays
tactgaagccattggaaattccggagtggaaatgggagcatatcaccatggattttgtggtgggtttacctcgttctcctcggggtagaaatgctatatgggtggtagtggatcgcttgactaagtctgcgcattttattcccatgaagaccacaaattcagcttcagatttggtccccttgtatatgaaggaagtaatcaggcttcacaaggtacctaagtccattgtttctgatcgagactccaaatttgtatccaaattctgggagagtcttcacagtgcattgggcaccaagctttctcttagtgtcgcttttcatcctcagactgatggtcagtcagagcgaacgatccaaaccttggaagatttgttgcgcg

SEQ ID NO: 26398 - DNA, 338 bp, Zea Mays
gtccaagcggtccagttccgcctgatcccctgtcgatggcttcgaagatggtgactaccccaaggcggtcctcctggtacgttgggtcctctgctcccccttccttttgtattgtagcttttgtccttgtcccgcgctttgccttctctaatttccttgctttggttagtatgtacgtgccgcgcaaatcagtaaaggatgtgaccccggcagtgagggggagctctccggcaccttcagctcctgaccctccgatgctgggagaaatagacatcgatgtagtgcttgtgccgctcgtgccgacctcccgacccgtctaaggggcactgacagcgtcg

SEQ ID NO: 26399 - DNA, 689 bp, Zea Mays
cggcagaggcgacgacggcaaggcgacgacgaaggcagagacggtaacgacaagggcgatggtgccgaggcgatggcggcgacggcaagaccggtggcataatgctgccaacttaaatattagtatagcgtagcagtagtagtagtagttagtagtagaataatgtagtttagttagtagtgtagtgtagtttaagtagtaatgtaatgtattgtactgatcaggaggtgggatgccgactcatgatgagttgctcaattttgtaatgatctccctcctgtgaatgaaggcctgctttcgaaccaatctgctactgcgtactctgctcttttgtctgatgattcactagcattttagaggtaatgcccgagcgatgcttgctttgctgcaaccaagatttcttccgagctatcggcctgccctttttgtgcctgacttaacatgccaacccatacctttgctgatgttttcctgggctctgaaccctagttctctttttttctccgccgctctctagctttctgagtttctggatccgttcgcgtcgtttgaaaaaaatatgatggcgcctaggaaaagaaaatagagcgctactatcccagatattcctccgattgatcccaatagctagctgccttagctagtaaccatgtttctgttgtttctgaggttgaccttctgcatcttgt

SEQ ID NO: 26400 - DNA, 366 bp, Zea Mays
gagctcatgctgtgttggcatcccttttattcttgcgctgagttgtggatgagctcagtgaccaccaccacccccttgcctatttgctcggtgcctaaaggctttgttcagtggagtactccccctgtcttcgagatccagccagtgtcctcgcgtggtcttgtagttcttgtgctcaagacaaggttagctctctccacagctcatgccctactaacggagcaatcggcttaagtcagaaacgccataagtcggtgcgacatgctcatgctaacatgacttaggttgatcactataccctactaacggagcaatcgacttaagtcggaaacgccttaagtcggtccgacatgctcacgctcacat

SEQ ID NO: 26401 - DNA, 369 bp, Zea Mays
tgtttaaaacaagtaactgctgtgttgctgtcccaaaaatctgcaaatgcgcatttgattgtttagttcaccttttggctaaaaaatgtttagttaacacttaacggaatggacttgtaatgtctaaacttaggttaacatacgtcccatgattaatgtgcttgcttgttgtagttgattgtgatataggagttccgtagttagtgatgcctatgtcgtattcaagcttacgtcgtcttggttggacttgtgtggtcggtgacacttttgcgcagtcaataggggaactaataaaaagccgtatccaaataaataaaatgtgcgtgcttgtgatgttgtaattgtgttgcgtaaataaataacatgttg

SEQ ID NO: 26402 - DNA, 525 bp, Zea Mays
ttcagatctaatttggttgattttgaatctgatttgggtttaggtttgagttctgattagggttctgattttgattctgatgaccaataaaccatgctaaaggctcaaacctatgtgcatcccaatttctcaagaactcgaggagtttcaggcatttaatcatcctcatttgatctgcggtaagaaccacctgaccagctactggatgcaattccaaatcctgaagtgccttttctgacttttattgaagcatgtctgtttatttgagtcttctttgtgatgaccatagactgtggtgtggttatagatgagcgttctttcaagcaacacattttactaactttgtgttttcaggaaatgttctcaacaactgatccattcatctgcaaaatgataactgtgttctaccatcattaacaataattttgttaagaatatactatatcttagctggaggtgcaccagagtagatatcatttttaataatagtatgaccagacacataattactcttaatgccctcag

SEQ ID NO: 26403 - DNA, 442 bp, Zea Mays
cgtgtctagatggttggttcgaatcacttgctcagttttgtcttcgctccagtttttattcaattgtgtgctcgttctctttccgtccttctctctttggatttgttgaagaaccatcgagttcttaggctatgatttgttttgaggattgttgcggggtgagaaacactctttggatcactgcatatacctagttcgagcagtttgtgttcatgatccgagttcttctcatttggagtttgtttagaaaaaactccaacaaaaccctaatcaaagttcacttttgaatctatttgcgcataagtgttttgctctagaccaaacttcacgaaacatcttctttccctctgcgcaaactgcctgcaatttgagcaaattctacgaagttttgccgtgcggcactaccgctccccttgctcaaggatttctgatccctcttgct

SEQ ID NO: 26404 - DNA, 503 bp, Zea Mays
gttcgtcgggcggtcagcagaggagatcgtctgggcgtcagcaacgttggtgcgatgtcgcgaaggcagcaatctgggagtgtggggagaggatggagtggccgggattttatagtgagagaggaagaagagggagcgccgtggagaggaatggacagcggcagccattactggcagtgagaggaaacagccgccataaagaggaagtgaagagggcggacgactgttgatggcacgttccactacagggaaggcgagtagacggggagggaggcgaggtggtgcgcagaccggacgaggagacgagcaggctgtcatcagcaaatcggtggcggctggctctgccaggcacgcgcgcggcgcacagggttagggtttggggacttgggcccctagtgggccggctgggtgaagttggttttttttaattctaaaatgcatttttaaagaactcgaaaaatcataaaaattcaccgaaaatatttataaataaaatacttgtt

SEQ ID NO: 26405 - DNA, 327 bp, Zea Mays
atttttgtttctccattggcaccaagcttgccttcgcttcagtttatcacccgcagtccaacggagttgtggagcgcgccaatggaaaaatcttcacagccgtcaaaaagatgctcctcgacgaaaagaagggcagacggatcgaattattacccgaagcggtctgggcactaaacacgactgagtgcagggcgaccggtttcactcctttccgccttctatatggatcggaggccatgaccccacaataaataaaacatgggtccccacgaacggctccgtcagccgtccccgacgtggacgagccaacttcaaaggatctcatcg

SEQ ID NO: 26406 - DNA, 1058 bp, Zea Mays
ccgctgtcttgaataatctgttaggaacccacaaccactattcaccctctctctaacaattacacagaggtcccctgacctttgtttcttctccaaatagaaccctggccacggcgcgctcgccgtcgatcaccccgcgacttgtactggccatggccggtggcagctatcccaattagttacagggtgagcatttccgaccccaggtgactcaagaacatccttcaattttagtttgcacactagagaaggtcctacccacgcgcatggtggaaaccgtgacgtcgagcccgtgttctcattcactcacgcccaaattggtcaaatggctgctacgatgagcttcacgggtatacagagctgcgaaaacaacactcgagagatgcagagccttaccagagtggtccggccatggagcgcggagacttgtgctcgctagtgacagagaaaggggaaaatggcgtcacgacggctctgggtggaattgggaggtgggattggggctacacggtcgtaaggaactatagtttcaccgtgcacacttaatttgggaagaggtggcagaggcagtgcgaattttgggctgcaatcaaactcactggtggagatgtgaacacctcgccgtggaccatggtgctatttatagccacggcggtccagctaacgatcagcgaccgtggaaggctttgttcacgcatggcaaccacgtatagaagaggcacagtaagggaaatcgaggcatgggtgacaccgcggcagaaatgaccgagccacagcgatcgccggtgggatatctccggccacgcacgactgagctcacgggatggtgccacgtccaaagtttacttctccgcgatcaaatccccaccgattcatccgagctcatccgattcaacagtgcacagatgttctgaaccgacccccttccatccactcaatctcttgattcttgttaaggacagagcaaacttcattaataaagtttgttcacctatcaaccgtcttcaaacttactataggatatttgggtcaaaatcgagtgaatccaaagatatggc

SEQ ID NO: 26407 - DNA, 903 bp, Zea Mays
cacgaaacaatttcctcttcctcctcagcggcaccgtctcgtcgtcacctccctcctcttcccttcccgcggcccccgacgccctccgtccctcgtcgtcatccagtcatcccctacacccgataaaaggtacgatggaagaagcagcctgcaccgctgctccgagcctcccttatcactctccgtggatcaggaccgctcccgtcagagtagtggcgaagatttgcccgggcggagaccccactggatccatgcaggtctccgcccgtgttcccgatccggctaactcctcctccgcttccgtctcattcgtccccataatcaaggagtctgctctttctaagtgagtctggttgcttttcctctagcttatttaagatccggccgatctcatcaactaatctgacttattttggctttgggttgctgaagtatgacccaccgcaaacatcgcgagcacaaactcgattggtgctatctcaacgacgattcgtacacagacatttttcacaacgaggttaaacagcttgtggataaaatcttctcctctgatggccacaaccacgcatgtgtagtcacttgcggttccactagcaaaacccaccttgttatagtatgtttctttcatttatttatattcatgctaattgtaagaattgcatatcttaactgcatgtcttcaatcaagctcactcaattaaatttccaattcaggggtccgatcatcaaccgggcttgctcactatggccatggagcgaatatttgactatgccaaacctattagggcaactgtcagtgtttcctcttatcatgtgcttcaagacagccatgtctttgatcttttggatcctaagaacaacgaggtccttgtgcgagaggatgctgatggaaggactcatctg

SEQ ID NO: 26408 - DNA, 336 bp, Zea Mays
gtgacaacttagtatcctggtcctccaagcgacagaacacgttgtcctgcttcattgctgaggctgagtaccggacggttgcaattaacgtggccgaggcttgttagcttacaccgttgctacaagaacttcatagtctcctaacgtcggtggtgtctacttattgcccaaccctgttcaacatgaaatcagtaagcatatcaagatcgatctccacttcgttcataagtgtgttgctattggtgatgtccgcattctccatgtcttgaagacatcccaatttgctgacatcttcactaaggggcttcctaattctattttttgtgagagttttgt

SEQ ID NO: 26409 - DNA, 573 bp, Zea Mays
gtgattaggacaatactcgaccatgaaatcaaagccaaacaacttggtgatccatcggtgttgaggaacaattgataattgctggtctaagagaaacttgaggatgtagtggtcgatgcgagcgaggaagcgacgagcccagaggtatggccgccaatgctgcatagcctggactatatgccgatttaggctcgtatgctgccaacttgtgatggacgacgaaaggtcgatcgaagaggatcaagggactggacccctggtggagaagggcaccaaaacctacgtcggaagcgtcgcagtcgacgacaaattgccagtcaaagtctggcatttgtaggacaatcgtgccaaggcattcttgcacaacagtcgtgtcagggcacgacaattgtgccaaagtctcatacgaactttcggtagtagccagccagcgtcatgaagctgcgcacgccctggggcaggcagggctctggtgaggatgagactagttccaccttgtcgctgtccatggcgacaacgtcagaggagataacatggccgaggtaggcgacgaacggcacactaaaggagcat

SEQ ID NO: 26410 - DNA, 521 bp, Zea Mays
ctaaggttccggtgtcttcccaaggaggtgagttttgacgttgtggcttagggatttggcgatcccatttcgtgttcttcccttttggatccatttcagtcgagtctttagggatttggattgcaatccctaccctcggccacggatccggagaagggggaggacgaatgggaaccgaaatccaaccaccacataagctagatttcacagttgaaggcaatcgccaaagggatgagaggaaggcagcgaggtgaggaagagggcgacccccaattaggtcattgggaaaccctagttttccagactgcactaccgcacgggggagagaggaagaatgcagagaaggggaggggatacctggggagcgcaaatgtattgacgctcggactgggccgcaaccctccgacacgccgcgctgtttcctgatcggagtcacaactccagaagtccatccacgccataaaccatcgcggggagcggcccaatcctgtagcaccttcctgggcttggagcttttcgat

SEQ ID NO: 26411 - DNA, 512 bp, Zea Mays
gtggccctgtgttgatagagcaaacaaaagaggagaaatattagcgcaaccatgcctactagaaggaaatgctttgacaaggggtgggttatcggtgttttccaaggattgtgtgccaaattattgatttctcctcagccccctctattccagacccctctaactgtcgtttaagggttggggacggtactaagggatggtcaggatatcgaggctatgctaagggtagaattgtcatagatgctcgatgttccacgcattagcgagtatcctgccttcctcatctttagcttggtcatagtacttctccaattataaacaaccccttccagggcgaagatagcttgtgttgatctttgttgctttgtccctgttgaagtacatggtctcccacctccagagttcttcctcgtaagcggcggtcgtgataccttcgtagtgccttttggtacctcgccgaccataggagcgctatgtcgcgggcttcatccaactgatccagcgcgtcttgg

SEQ ID NO: 26412 - DNA, 556 bp, Zea Mays
ggcgcgcggtggacgcccctcgccatccctctgccgcagtagtgcgttgtactttggccgctgtgtacccatgtcgtcctctagctgctgccccacggataagcccttggaccgtgggtttcctcttccctccctcctagctctacaacctacctaccagggtggttgattttccctcctggaaaccatccactcgcccccttcaagcgcaaggtattgtaccgttctttctcaactctgatttgtgcaccaaacgcttgctactacacttgtagatctgcttatcaagtgctacctatgcaccgttgtagtgttgctccgctgcggccctggcgatggcgcaggcatgcaaggcttgtgttgctcttcccgtgtgcaacgtttaaaggtaggctgcttgctgtgttgtggatctcatgtgcgctttgtggtgtgcgttctcttctttgtccatgcaagtttaaaaaaactgtaaatatggttttatgttcgcctgctattggttttgcctgattctcagttgtcctagcagtgtgccagtttttgcaaaacagtt

SEQ ID NO: 26413 - DNA, 575 bp, Zea Mays
tcgcaatcggacttaagccgacaaaaccgtacccagtcccaggtgcacaacatcgctaatcagcagcaaactcgggacaccgctcgtcgtcacgaataccctccgcagcaagcccgcatcagtaacacaactagaggaagggcagaggccaaggcccatagcaacgaaggttctattgtcttttccatggtgaagacttggcacgcccaaccaggggttgccctgaaaccaaagccacaaaggatcgaatggccagaaaccaatcgactgacaaccaaagagttgtcgcccacacctaccatccccaacagtacaaccagcaccagttccacaatgaacattaccatactcatcagcaaaaccacaactgataccagcaacaccaagagatcctaactctaccacctccaccaccacatcatccaaatcaaccattaccaccaccagcagcatcgaaacaagaggactttgctgatcaacctttttgagggatcattcacatgattacaagaggatccagctctgagttcgacaccaaacgtcaaaagaaagaccactatcgaagggtcaatcac

SEQ ID NO: 26414 - DNA, 582 bp, Zea Mays
gtcacttgtaatatatcttgaaacaccaagctgcataaatcaaaaatccatttccacaacttcgcatcaagtatgattccttgtagctggagattattaggcagcggccagcctaaagtttcagaaataattgattcaattcaaaaatatgaagggtatgcacggatatggctgcttcaaacatacaagtgcataagaattctcaaagctactagacacctttaccaacattatccatatcattttgctatgatgtatggcactacagctctgcatggtttgaaggataagacataagtgcaaagcactacggtgatatggcttccacttcacaaaaggagcaccatagaatttccacaaatatggtttcatcctgcaaagctagctaagaacaccagagtccaaagcatttcatctcatctagctccaccactaaaactcaatgacatcaaaataaatacacctcctcaccacctcaccagtaacaccaaaatgagcacatatgaatttggtcacctgaagtcctgaacaacccgtgtatgacattttaaggatgtaaaccaatactgccaacaacagact

SEQ ID NO: 26415 - DNA, 712 bp, Zea Mays
ggcctgctcctgcagtgatttacattggtattattctgtccaccttaggtgcagcactgcagagtttgactggggctccaaggttgcttgcagcaattgctaatgatgacattcttcctgttcttaattacttcaaagtttctgagggatctgagccgcatgcggccactttattcacggccttcatctgtatttgctgtgttgttattggaaacttggatttgattacacccacgatcacaatgtttttccttctgtgctatgctggcgtgaacctgtcatgctttctgcttgatctccttgatgctcctagttggcgccccagatggaaatttcaccattggagcctttcacttgttggggcattgttctgtgttggtatggttcttaatacttttaccattttattttgttttatcacaatcttcagcatgaacagttgatacttgagttaggtccttggtttgagactttgtccacttctattatttttaatctaaccaccttctcttcacctacaatactcaattattatttatcatgttttacaatagcaaatatctaactgaaacagccatgaaagcatttataattataagtgttgacatgaatctttgtatcaatttcagtgattatgtttctgatctcctggtctttcactgttgtctcccttgcccttgcaagcctcatctattactatgtgagcataaaa

SEQ ID NO: 26416 - DNA, 431 bp, Zea Mays
ccgccggtgatctccacgcgtcgattcgcaccggccattgtgatttgtactctatggcacgaggataactgcgagaggtaaaaagatcggaagggaggaggatttggtcccggatgtgagcttatcggcgcacttgattgcttggagacgtgtccacgtggccgatgtcgacggggaacgctggcgatctcagttgcgccatgcaataggccgtattaccacgtcgtcgcgagtcatggagagtaactagtgactgatgtaagaccttgccccagtacgtgccacgatgaactcactttagcaacatatcccttcaccgtcgtgatccaaatctcattcaaattcggagcaaccgtgaccgacttttataaattgagcgcttcccttgctccgcccctttgtcacaaacccagtgcaaccccaaccatgtc

SEQ ID NO: 26417 - DNA, 659 bp, Zea Mays
cacaacaatggaaacacatcctttggttgctcactgggcttcctcatcgtcactaacatctttgggggcatatcaggacaactcgatgaacttatacatatattttatcaccgtcatacctccttggtggggtttcctgaattcaccctttttgagcttcatgatgcattgatgctgctaggaatatgttgtctgaaaatcttaacaaaaccattccatactatgtcaccagcattgacatttgcttcatggtaactctaccaccaagtagtgttggtcccttcaactgttgtccatgtcatcagcatgaacaacttctagcttcatctcagtttctcttagtcaaatatctatctcaactgggtttatcagaatctccaaacttgtgtggttgcagacagttgaaatctccaatcatgttgttgttttgaggggttgctgacttgtagctgccacagttaccctgattaccttgagcttgagttatgagagcggtcgttagcactttggcggccagaaccacatgtgctggtgtgcatggatgtggaggtagttgtccattttgcgctatgtctgggaccacattccgtgcatcttggacacttggttcccctggttgatctcatccccgtcttcttgagttacgaacccatggactc

SEQ ID NO: 26418 - DNA, 361 bp, Zea Mays
cgttaccaacattgagtgaaggtctgatttttcgcaggtatattatgggtgatttacttgctttaacaatgcaattgttgttttacaaaaggatgcgagtattaggacaactaagatagggcccattttaattctgttggctcaaaatatagctgcaaagctacctgttgcagaggtcgtattacatttttgaagcattaggaatagtccaacttacctgacaggtgctgattcttgtgtaattctcctttaatcattgttcactccaaacaagagtgtcgcagtcacaattcttttcttgttattttcatattaggactgtagttttattttcaaatagtgaaattcaaggaatttccat

SEQ ID NO: 26419 - DNA, 683 bp, Zea Mays
agggaatcattgttggagcaaaggacatctagcaatatcccacctttaggtagaagtagcactaggacaagcaataccaccccaccattagctgcaggctctcgtaggcagagtaggatggatatgtactatcggagtccaagtgtgactcaggatatatgtgatatagatttgcaatgcagtaagatgtcaacacagcctaggatagacattatgttgcatgggagtgctaaagagagacttggtaaaacttgggcgaaatggttccatggcaatgatattcctggaaggaaagcagactgcccatattttgtagcagtagtaaactatctcagcaacttggggaaggagtggttgttccaaggagaagagatatagatgggccaatactaaatatgaactatgaggacctacagactcgcatggaccaatacaaggaagattggggtcgctttggggtcactattatgtgtgattcatggacagagccaaccatgatgtgcattattaattttatgttttttgttgcaatggtcgcatgttctttcctaaaaccgtggatgcaactgctcaaatacaaaatgcagaatttatttatgattgcattaaggaagttattgttaaagatattggagaaagttatgttgttcaaattgtgaccgacaatggttccaattacaaga

SEQ ID NO: 26420 - DNA, 303 bp, Zea Mays
gtaagtgaatcagataacttactcaaggtgtcgagttttgatgaactcattcatttccaaggatcattcacccgtgattgtgaacattacaataatcatacaacataaaaatatgaacatcaaccataaacataggacttgagcgaaagactttacaataagataatagacattagcaaacttttaagtttacaaaccaagtagtgtttattattacatgcccaaggtagagtcaaagtgctaacttattacatcacttcggaagatgccatcttcccacaagcacacatacaaacgaaacat

SEQ ID NO: 26421 - DNA, 581 bp, Zea Mays
gtcgacgtgagtgcgctctcgaacgcgttctgcggcggcgaggcgatgttctcgatgccctatcgcggtagtattcaatcggttgggccgacgagctatgttaacattcaaggatgctaaaacatggcacaaaggggaatgaacggacctaggaacggttgatcacggtcgggtacctcacagcggcgtgaatggccgacttggggaaaatccgattcctcgggctatagtggagggattgaggagaggagcggtgcactgggcaagtaacaagaaggcagagcagggagggccttcaatttatagcgactacgcgagtgcttcgcgaatttgggacgagatgctctcgcggccggaagagaggtgagtcaccggagtgcaactgctgtggctctcggtgaggtaggcccctggcggtaaataggttatccacagcgacagattgcgatgtggtattgtccccaatcacgtggcatcctcgcggcgagcgacggacgttgacgatgacatcccggcctgtcgtgaagcaagtgggtacggtggccagctcacaatctcatctgcggtcatgatcttttcac

SEQ ID NO: 26422 - DNA, 537 bp, Zea Mays
tcttgggaactatacgaagaaggaagaccagttgatgactgctgccttcggctcccggccaaaacaaaggttgaaccgtgttatggatgctcttaactttgagtatcctgactatgaaaggcttgacgaaggggccagaggggtcaaaagaaaaagggttgtcagtattctaggtaggcaagctacctgatctatcaaggaggaccagaaagcttcgaagaaaaagaagactctctcggagccgtaggattcgactcccaagaagcgtaaactcgtcaggatatcttccgcggatacgaaggtacaagatgtgccagagaagactataggtcctccttcaccctctactactgaagtttcggaaattctgaaggtaatgaatgaatccataccatttgcactgctaagtcctctaaggttagatctgactagcctcttgcaatcaaaggaaaccgctccatctacggaggagaaggccgggggcagaaaaaacggcggatgataaatgtgatgcaagctattgagcagatgtcgccc

SEQ ID NO: 26423 - DNA, 601 bp, Zea Mays
cagccggactagcacaacaagcgcgcaaaatcgaagtctctctcaaaagactacccgtgcaacgaccgactacaggtgccgccggaccgacataataaacgcgctagacctagtgcacaagtcccctacggggcacgaccggatcagcaaaggcacacaacctcttcatacaaattatagttacatacgtacagcgagggcatcacaccttacaatggttcaaccttcgggataatacccatctccctatagttaaacaacattatcctcagctcctcaccctcaaaaagacttcgcaattccccctcacctacactcgccccaactggcgaggacaacaattcccgcttgccagtcctgtccacacgaagtcaaccaccctccacctcactcactctacgcttcgccaccgcccttcgacgcctacacccaacactcggaccgggaacttctgcacccaccacacgcggagaagcctccgctgcagccacatccaatgctgcaaaataatccaaatcatcatccgaagactcttccgtccacaccaccgaactcccagaatcatcagactcaaaaaacttagacacagaatcacccgaat

SEQ ID NO: 26424 - DNA, 533 bp, Zea Mays
ggcaacaagaggagaggagacacgaagaccagagcgactagatcgaggattagggttacagagagggttgtcggagggataggagaggaggattagagcaccagtcaccagatcgacggatccgtcaacgatcggcataggcttgtcggagtatgcctcggattggaggcgaagtcgtcaagcagaggggagcgaacgagggagaggcggaggccgagaccgaagagcaccagtcactagatcgtcggatccgtcgacgagggagaggcacaggctcaccggcaaccggtgtatgccttggattgggggaagacgaccggaggggagcagacgagggagaggcggaggccgagacggtgagatccgagagtggcaacatgggagagatgcaagagtcgagagcgagaggagaggtcgagaagggaatggattaggtttaggtttcggggagggatggcggccgcggtgcgcgacttatgcgggctgttaccgggccgatccctttgtcatgctaggcccgtgcctgcactgcg

SEQ ID NO: 26425 - DNA, 411 bp, Zea Mays
gtgtttcgatggcaagcgacggcgaagaagcaaggatccctacagacttcgatgaatgtgttagccgccaagatcttgaggcaaacaacaagctcctaaaggagcaaatggaggagacggtccacaagtcagtgcatgatgccttcattgacatgaaccttggcaagacttacgagaggctggatcgacgattgtcccagatcgtcgacagacttgctgtgttggagaagcaacaacaagcaccaccgccaccaccacctcttcgtccacgtcttcccgatgatgtcgtgtttgatgaagaaggtaattatgatgaagcagccaccagagatttgcgcctacgtcgtcgtcttcatcaaaacacagaaggtatgccacaccaacaccgctggcaaggtaataacaaccgtg

SEQ ID NO: 26426 - DNA, 321 bp, Zea Mays
atacgtctgtgtactcacagaccactctaacattttccaaagatttctcctccaaattatttaccactatttctgcttctgctggcatactaaaattgacttcaactctttcttcttgtggacttgttaatgtaaaaattctattagtgcaagatattactccattgtactatgttaaataatctataccaagtatcacatcaattccacagcgtgattaggtacaacacggacggacacaccattaactctacccacacagtggcttacaagtgggaccaggtggcccagagcagttttacatgggcctgacgtttcagc

SEQ ID NO: 26427 - DNA, 501 bp, Zea Mays
gtcaaactaactcgtcaaccctgagtggtagaggcaacactggatgcaggtgaagggggtattccggagggagtcgcattttgatcgggagctggctctaattcctcgggagccttctctccctcgctttctgcctcgtttgcctccatgtcctggtggtgcatctctaggtggtcgttggcttcctcaagttcctcctgcacatcgtggagctggatttccaagatatcgatagtgttatcctggatttccacctactgctctaaggtcgcgatgcgctggcttcactgttccacctataggtccttctccaccaattttgaagacaagtcgaccacgaagtcctctcgattgtcgagggtgagcttagtggtctgagcaaggttagtgaggtgtgccacggcgtcgctctgcagggcctgtaggtggtacagtgcgctcatacactgaacggtgatcctcccaacttggtcggggtgcatagcccatatgtcttttacg

SEQ ID NO: 26428 - DNA, 754 bp, Zea Mays
gaaaaagaaaaacttatgaatagtactgggctgatttcagcccagtggcccagctcagagggagaaaggcgcccgcgctggcgatgttgcggaaaggtccctggggttctgggtaactggataagttcttgtactattcctgtgtgccgctgacagattacagaaagacccttccccttctatttctttacccgatacgtcctcgacggcgttcacgcacggctgagctccggcgagcacttacgccggccgattggggctacgactggcgctctccgttgactaatacctaattcacaccatgatcgatgtttcccctaacttaatttcatcaatcgcgcactaaaactctccggccacggtgaccgtgagcatcgcggcaagaccgacgcgttcccggcgaccagaagctactccgtgcaattcagtgggtcggaaagcatcgtgggcatgtgagaaagcttaaacgaggaagcaggggacggggactgaccggaaaaagggctggcgacggtgaagcttgtttcacggtggcggaagctgatttggggaaaaacggcgattctccggctagaggggctaatcgagggggagagtgggtgctatggcttcggtatgacctagtgcagctggccgggggctcaatttataggaggctctgacggcggccggtgaatttggggaggacgcgcggcggccggaaatggagaagaaggcgggcgcggtgaattcgtgtccagtggcatggcagttg

SEQ ID NO: 26429 - DNA, 334 bp, Zea Mays
cagaaatcaaagaattccgagctagtgaaattggatcccaagtcagttataatgttattcggtatcccaaacctgaatattatatcttgtatgaattccactgttttagccgaagttagagaagcgatgggtttgtactctatccatttagtgaatttgtcaatggcaaccagcacgtgagtatatcctccttgagctttcttgaagggtccaatcatgtccagtccccaacacgcgaatggccatgttacgggtatggtttgtagttgttgtgctggtaaatgctgctgctttgataagtattggcaggcttcacacctctggactaactcgg

SEQ ID NO: 26430 - DNA, 332 bp, Zea Mays
cgggagtgggtgctctggctttgtgataacatggcgcagcagaccgggccatcaatttataggggcattgagcggtggcgcctgatttgaagaaatcgcgctggcggccgagaagggggatgagtcactgtggtgatctactgtggcgatcgctggtcatagatggatgacgatcactggttaaccttcacggtgtaaaacgatgtggtaactacctaaggcgtggcgcaaccggagaaaacgacggtagcctcggcgatgaccgcacggccacgtcgccgggcaagtgggcacagcaacagggcggccacagtgccccaaactcatccgcg

SEQ ID NO: 26431 - DNA, 359 bp, Zea Mays
taggacgcggagatgagtacgcactgcggggtccgatggggataatgagcgtcgtgatgaattctggcggaaacaggtagtcacgctggagctatacggccgtaagggacaatactttcaccgtgcactaccaatttgggacgaggaatggaagacaccacgaattttggcttctaccgatcacaccggaagacagtgaagacctcactgtggttcatggcgcaatttaaagggatggcgacctagctagctacccgcggtcacaaggcacgacgttagtgcatggcgaccacataacaaggaagtatagggtggtagaatttatgtgcgagtgacactgcgatggaaacacccgagcc

SEQ ID NO: 26432 - DNA, 334 bp, Zea Mays
tggtcttccaggtggactatcaatatttatataataagggtatactatgatcataatttatctagagtcaattggctgaaggtagacctataataacactgcaatcaaagggataacactgggtatgaaatcataatacgaggacaatgcatacgtctacgacggttactggaagtaaaagatcccaaacatttgtaatatatgcaggttatgcagagtaacatacaataatttattggaaaataaatctaaaacaataaacatgccattgcctgctaggactaccaaatgggacttacatttacttcaaattgttaggcctcaagtttgttgg

SEQ ID NO: 26433 - DNA, 375 bp, Zea Mays
caccaatcaacagcagactggagacactgctcgtcgccaagagtaccccacacaatagggccacagtggcaacccagaggcagaggcaaaggccgagtcccacaaccgtgatggttctactacctttttcacggcaaagactccacgcacccccaccagggactgccctgaaaccaaggctaccaaagataggatggccagaaatcaaccaaccgacaaccaacgagttgttgcacacacctaccaccccaacaataccaccagtgacaattccacaatgaaccattccacccccaccagcaaaaccatatgtaccaacaacaccaagagatccaagcccttcctccaccaccacatcaccaaaatcctccacca

SEQ ID NO: 26434 - DNA, 477 bp, Zea Mays
gacaaggctactgacacagttgattcgtggagtataccgtggcagactcactggcgatgatcggatggctaacgtgagtcacggtggtgcggttaaaggctggaggcgtggcgcaaccgcggtgagtattatggattccggtgacggccgtaaggccatgtcgctggcacggggaaccgagggacagcgtggccacagtaacttgaacccatccgcgacgagatcttttcgtcgacgatctcaatccacagaccaaatgcacgaatcgcggcgagcagcactaatcccagcaaagggacaccggcagccagctcactgaatctgcagattgtttttggttactgtaccatcacgatctccttcagtcagtctgacagacaaatttgtgacgccaaaatcttgaattttcgcataagaacttactaatctgtttgtagcaaagctgtagccctatgatccagctataaaccgactgtg

SEQ ID NO: 26435 - DNA, 321 bp, Zea Mays
tgcacttggtacagcaaatcagtaatgattgatgaacttcctttctgtctataaatgcatgtgttcatggagaggcaggagctaaacagaaggcaaattttctacaaatattagaagacaaagttcaatatatattcgttttctgctagaaatacgggtgttgaaaacaattcaatgcggatattgtaggactgttccaagtaacaagcttaagatatatttcttgaagatatcacagcatgagcaaagtacatttgcaagattgcaaaattaaaacctaaacaaggtgaaacatgttaaaattaaaagagttgaattgtt

SEQ ID NO: 26436 - DNA, 414 bp, Zea Mays
gggttatagggaggctaccactcacatccagctctggctacttggtgccctgatctcctattcagagttcgatgtggttgatttccttatatgtgagatcgaggacacggtattggatggtcttcgtgcccggcgacagctatcgtatgctcattgtctctgctacatttttgcatagctgatctagccaccgcagttctagggcaccttgaggcctcacgcctccactttggctcctaccggccagcccctgaggacctagtgccagtacctgatccagtgacagacattcaggtagaggatgcgactttccatcagttcgagacttagggcacaacagttcctgatgatgatgatgatgattttgggatcccgcctccgcctcctgtgcctcctcgctcacatgatcatgag

SEQ ID NO: 26437 - DNA, 330 bp, Zea Mays
gttcatgtcaatgaaggcatcatgcactgacttgtggtccgtctcctgcatttgctccttcagaagcttgttgtttgcctcaagatcttggcggctaacacattcatcgaagtcagtagggatccttgcttcttcgtcgttgcctaccatcgaaacacaaaaacaggaaacaaacggtgacggttatccctaataatttcactacacgctcctctcaggtggaacacaagaacacgctctaatgtatcttaccaagctcttacaagtgtctgacgaaatacaagcaaaggatggtacaatcggaggctggttcgtgatacttaccaagag

SEQ ID NO: 26438 - DNA, 443 bp, Zea Mays
gaggtccaaaaatcacaatgaataagatcaaaaatattagctgcacatgaggatgaactagcaaaatacaaccgtgtgtgatgatctagctggcaagcatggcatagctaatgctagtgcttatgacaaactttattaaacactttagaaactaagacaaggcattaggaccagaataatctatacaatgatgccatgtagacactgaagcaactaagacccagtgagtagcggaggcgtgactgtgggcaagtgccgagtgtagaggggtcccgaattattgcacctggtgatcacgttcccgaaagccaaatccctcacaaacaccaatcggatcaaactctatagagcaagagttgtcagtagtgaaacattcaaacagataataagttttgaataatgtcatgagcaacaagaacattattaaggtaaaaggggccgaa

SEQ ID NO: 26439 - DNA, 464 bp, Zea Mays
gttgctatgaataattgggagataagggggctgaactgggaggaatggaatggagcagcaacactaataagtttggttcggtgtctggtttagtcactaaagaattgttagttgactgaatttgtctcagtttggacaggcggctgtttgcttgcttgtttcctgtgtgctcggtgtgggtagcaaaaagaggcaaaagtttgagtgcaggttctggtggccaaagctgaatcaagatacgaagaaatggaaagatatcagccccacgattgtgctgacattgcttggttgatttggttagagagttgcctgggactttctggcgcctggtaaagtggagtcgagctgagaagcttcaggtcctggagaggttcaaagtatctgtggtggagtccgtagttgcctggtcactagttgcgttgcctgcccaagctcgatgccttgctgtgcctataaacctgtgt

SEQ ID NO: 26440 - DNA, 480 bp, Zea Mays
gacgtgaggcgcgctgcagagcgagcagcagccagggccacaccagcactagaaaaggaaagccaggaaatcagtggctagaagaaggaaggaatccacggggcatgcagccgccacctctagagaaggaaggccggctagaagaggaaagagaatagtagaaatcctaaattatagagattagtttccctttagtggagatcctaaatcataggagattagtttccgctttctgttgcaactcaggctataaagccttgtagccggctcctgtgagaaataagcaataacacagttatctcctccctcatccctaccactctcaagccttcggaataggagtaaaacctcaccggagaagacggaccgagggtacgacctacgtagccgagggcccccttccctagactctaaggcccttgacaacctggtatcacggtcacgtcgatccgactcttccagttcatctgctacttccac

SEQ ID NO: 26441 - DNA, 565 bp, Zea Mays
cctcgccgccggtgagctggatgccaccccggccggccgtaatccctccccccttgctcaccgcccgtggataaaggttctcaccgccgtcaagccttcgccattgcccgccgcgtggctctgcctttccaccgcgtcgccgtgactctctggggccggaccatcgtcgccggtgaggtcgccacgacgttagccacgggttcatgcgcaccggaacctccctgcccctttccaaccaccgcgcatcgtcatccaaattcccggccaccgtctaagccgcctataaattgaccctgcagcgagcttcacaacatcatcacccacctagccacgaagaatcgttagcaatcgtgcaccggtgagcttgaattccggttttcccccaaattgattctccgccgccgtgaaccacaaactaccgtggccagccctccataggtctgctcatgccctctttatttctgttctagcctctctgcacgctggtgatactcgacaaccctcacaattgcgctaggagtcctctggtcgccgggaacacgatcaaatgttcgtagtctccgct

SEQ ID NO: 26442 - DNA, 390 bp, Zea Mays
tattcaaatagcagatgtaattcatgaaacaccgtcaccaacactggcatcaaaaattgccattgaccaaactgccgaaactaccgaagctaaaggcgccgcagccgaagccaccagagcggaaattttcgaagctgatactggcgcagccgaagctgccgaggctgaaatcggggccacagaagatccaaacctagaagagacacttgaagttatcgataacatactcctaaaaatgactgaggaagaatctgttgtggctgcggcaagcacagctactgaaaaggggaaagaacaagctgaggacattttggaggaagaagattttgaatttcaagatttacttgggcaaggactgacagacgctgaaaaagcagagcttaaaaaatg

SEQ ID NO: 26443 - DNA, 571 bp, Zea Mays
ctgatacgcactttcgtgcatcagcgcctttagctgctcacggctcactaaacgatgatgtagcagttcaccggtgacaacaactccgaccgccactccaccaagaaccttgggaagcaggagcttgtgtcgcgtgtcctcgctattacggtggggttacgttagattttctggatgagagtggcaccttgtcgttcgaccaagcgaggttgagtgacctgttaagtttttccttctctttcccctttcctccttgtttgggtctcaatggtgggcgctcttgtaggggcttggtattgtcaatgcctcccttcctcctctccctgaaggcgccgctatcaaggtggagaggaagcaggaagcagatgaggcggccgcagtggtgcgtaagaagcgtcgccttgaaagaaaagggagaagaagaaggcacgctggcttatgctaggccggggggagtatctccccatccactaaaacgaaggacatgacctccatgatctctagtgggctagtactcccgacatcggtgggtggcccatcccaccccgataatgttgaggctagttccagc

SEQ ID NO: 26444 - DNA, 280 bp, Zea Mays
gtgcctaacatctgactcattcaattaacaagtatatttcaggaatgtcctcactagcatacaaagctaaacttcagtgggaaacaacatacaaaagcacttcgtctgtacgtaagcaatgaaggtaatatccaaaggtggtgacttcgtccacaagtcaaaaggaagtagctgactgacgaaggctggaacctgtgaagtcaagaatgaagaaaaatacattactgccccaatatcatttgttaatacactataccacaacctggctacaacaacttac

SEQ ID NO: 26445 - DNA, 276 bp, Zea Mays
ctccttcaggagcttgttgtttgcctcaagatcttggtggctaacacattcatcgaagtctatagggatccttgcttcttcttcgtcgcctgccatcgaaacacaaaaacaggaaacaaacggtgacggttatccctaataatttcactacacactcctctcaggtggaacacagaaacacgctctattgtatcttaccaagctcttacaagtgtctgacgaaatacaagcaaaggatggtacaatcggaggctggttcgtgatacttaccaagag

SEQ ID NO: 26446 - DNA, 272 bp, Zea Mays
ccgccacaggattgatgaagagaaccaaatcatcagcataaagagaaacccggtgttgcagctgcctagtagaaagaggttgtaacaaacctccttcctcatctgctttagagaaaagttgaccaagcacatccatgacaagcacaaacagcatcggagaaagaggatccccctgtcgcagacctcttttatgtgaaattaggcttcccgggtgaccattaactaacacccgagtagaggaagtgaggagcagccctgaaatgatatctctc

SEQ ID NO: 26447 - DNA, 402 bp, Zea Mays
cgccatcttgattcgtgctcggatcgattggatagcgcttggggttgagtaaatatcgtcgtcgtggatatcttccggccaataatttactccggccaccgtaccgagcttgccacggtaatcggacactaatcgcgcgcgccagtaacttcttattcctccggccgccgcgcgtctctcccaaattcaccggccaccgctcttgccttctataaattgagcgcgccgtcgggtccataggataatcacgcaccaagccaccaagtattgccttcaatcgtatacccgagagctccaattttggattctccccaaagcactcaagaacaccgtgacaaagacctctccgtggccagctcgattcaggttcgctcatgccctctgccctctcgttttagtgtt

SEQ ID NO: 26448 - DNA, 514 bp, Zea Mays
ttgaggtgcatgccttttttgggatagaattgacacaaaggtatttctcctgcctgaccccttcctgatgggtttggtgtcgagctttgaggcatgcagatatatgagatgtgaagagaggatctccaatccatcagattaagaaaaaagaataatcctctatatcagacaacaggagatcacgaaaacatatataaacctaagttgtaggtgagatgtgctacagcagatagaggattttttgtattccctttatacgtggcagaattttgtttttcctttctggagggtttgtccttcatcttcgtcgtccttcttgttcccgtccgtcgtccgcatctccctgctcatgggatttcggtaggtcctgtccgcccgcctgctctcacgatgccttccatctcctgcttgaggtggcagcgtttgcagagcggcgctgcagctagcgactcatgagctccggtgatgcagtagcggcgtgcggcagcagagcggtcggtgctctcacggcgac

SEQ ID NO: 26449 - DNA, 1400 bp, Zea Mays
gagagtagcagcgtcgggggagagggagaggctagcggcgtggggataaagagagagaggagagcggcggtgttgagtggacgagtcgagccgagctcggtcatgtcgaccctcctttggtgtacgaggtcgttgttgtcgctagcctccatgcccaggcggctagtgtctagaacatccgatccctagtccttatcctcctcaacacggtctccaccacctacgaccgctggtgcgacctcgtcctcatgctgcagcgctacgctttggacaaccatgttctcaccgatgcgatgtccctcactatcccatcccgacgatgaaaggacaatgtggtcctctcctagaactcggggacgatcactgtcgagctgcaggacatcattcgtgagcgcggtggcacaacttgtcaggcctaggttaccattaaggagcactttctcggcaatcatgaagcccgtgtgctccacctcgatgttgtcttttggacttccatccagggggacttcttcgtcaatgagtactaccgcttgatgaacagcatgacaacctccctatgtgacctcgaggaacctatcttcgattgcacactcgtcctcaacctcctccgtggccccaacgagtgctacgatcacctctccacgtggatcactcgttcggggccattcccatgctttcacaaggtctgcaatgaactcatccttaaggagctcggtaaggggccgcttccacgctccaatgtcgcaactcctctctacaccacccttgggggctagacctcgtgctcaccctcctccacccacaccttggggtgctcatcctcgcactcgtttgtccctcccacctttggttccacgcgtcgtcccacccgcctgcgactaggggaggtgcggagtctgggggtggtggtggtcattatcggtggaagggcgaccgtggtggtggtggcccggaggatgccccttgaccctccatctacaacccgtggaccgaccgcaccacaatgtggcctatcccatccctggtggccctcccccacctatacctttgctccagctgactcacttgacgatacctagtttagggtatccttttggccaccctacccctgcatcgccggctcctcaattattgcttttgccactgcctcctcactccactccatcctagaacccgtggccccaggggtgggaccaacattcgttgctagctccttcagcatgatgaccttccctcccattgtcatcgattggttgttgattccagtgcctcctaccacaacactccgaatgatgatatactctcttcttgccacccacccctcctgtcactccttcatctatcattgtgggtgacgtgaatcttctcccaatcacctttgtaggtgattctgttctttt

SEQ ID NO: 26450 - DNA, 319 bp, Zea Mays
tgatatataggagaacaactttgatgcagtggggttggtagttcactgcataaaaatcgaagaaaaaggtccctaaagtcgctttgtcaggcgccctgaattgggtgtggcatggaacaataattgaatcatatcccaggttcactgaacccgtcgtcggcgtcctcacgtcgtgatccgagcttggcttgaagattcgtgtgaaggaacaaatatccgtggtgaaaagatcatcgggcagggtttggattggctcacgggcggaatcattcgtcgtacccacttgcacggcgacgtggccgagcagccatcgtcgtgg

SEQ ID NO: 26451 - DNA, 371 bp, Zea Mays
caaagtcctgctctcattcatgaagccaaacagttctgaaagcctaaatgtatttgatatggtttggcaagaaatcatccatgccgcctgcttccctctcaagggatgtcttcatgcccccttcatcatgaagatgattgaagtggtgacacagtttcaatttgaaaaagggacaagacatctctcctacacccccttctggattgacccaaacaatccaacagggcgattgaggaaagccccttccagctctcgtggacaagctgctgccggtacctcgtgtccctctcctggtcgcggatctcccacaccacgtggtcatggtcgcaggatgggagctcgactgtctcatggtattgcagctttctttt

SEQ ID NO: 26452 - DNA, 503 bp, Zea Mays
gttgcaagccaaggctatatatatctgtaatcggcacttgagggaattgaacaagaatttagtcatccagtcgtcttcctcttttccctgtcaagccgacggctagggggtataaccctgccggcgaagacggaccgagactacgagttgcggagtcgagggccagctaccttaggaaccaactcccttgacaacctggtatcgtcgtcacgtcgatcctcttccactcattcagatcagtcctccacagccaccgcgcccaaactcagccatccaccatcaccacagtcctctactgcctccgccccgcagccgccagccatggtcgatcccactatgaaggacatgatggagatgctcaagtccatcaccacggagatgtccaccatgaagggcgacatggccgctctgaaggagcaatcggcttcgagtccgaacatcggcggccgctcagatgggcagcgcgatcttgatcgcccccctagattccagaaactcgattc

SEQ ID NO: 26453 - DNA, 554 bp, Zea Mays
gctcagacctgcccccctctctggtgagacttccttatccctctctctctttgttcttccctgactgaagctctcactcaaacctttccaccatttgattcaaattccaatttctatcaaatcccatgaatccaagtgcatgattgagtccctttatgttccttgagtactcctgcaggtttctagctccttagggagggtttcacagcctccaatagccatttctccaaaaccctaaatcctcgcacaccacatgctcggtgaaatgcccaaaccagccaaaaatgctacaattgaacccaaattcttcaggaaccttcacaacacctccagtgacatatttgcaaaatttcacgcccatccgatattccatgctttaatttcaccaaattccccgtttcgagcgatcgtttctgagccgagtgcccaaatctcattttcttcgcctaaattcaaaccaagcacacacttcactcatattcacccatataaacctattcgtgaagtatcagctcaattccacgtcatttcgtgcctcaattcgaattccaaac

SEQ ID NO: 26454 - DNA, 362 bp, Zea Mays
tgggagctgagctccatcgccggggcgctgtcgggttggggaaaagagcctgggcgtcggattaggaacgtccggtctggattagatctcagcgtacctgttcactagggttgatccagagtgtttgcggttgatcggacgaatcgggcgattaagggtgatggcgtgatgagcaccgtcggatctggatccaaggaaccacgcgcgtaacggttcgtggagaagtaggttcaatctgggccgttgatcggaatacgtgcggtcaggaatagagcggggcgtggatggatcctgatcgccgatctgggatcctggggctgataacacttaccgcttcacttattacatcaatctaatatgga

SEQ ID NO: 26455 - DNA, 328 bp, Zea Mays
cggccgatgtgtacacaaccataggattccgggcgaatggtcggattagctcccggccccgatatctcgtctaccattgattcaccattgtgtggccacaattagaattaaggtaatgattcaatgcgtgtgatcctggccgctggatggtgatctaagggttgtgataggagcactgtgtggatgtattgtgagccatacgatttagatccgagagctctcggttgcgtactgtttcacaggggcactgatctaatttggcgcgtagattacggatcgtgtggtcgacattaactcataccccttcacggcgtctgtgttactaaag

SEQ ID NO: 26456 - DNA, 1167 bp, Zea Mays
aatagacatgaacttgagcatcaggacaacaccttcaactggaattttcttaatctgaggttcagcgaattcagggaataaatcatctttaccatatgctgcagctgagtagagacggtaacagtggccaggccctgttcttcctgctcttccagcacgctgggatgctgatgccttgcttatccattggacatcataacttgacatcccagtagcatgatcataattcttaaccttttcttttccagtatcaactacatattttatgcctggaattgttagagaggtttcggcaacattagttgccaccacaactaatctttccccctctgggacatcttcaaacacttgaagctgttgtgaagctgataactttgcataaagtggcaagacacgaagtctaccatgtgaaacaggcttatgttctgtgcatttactaaaacaacgaagtgaagtgctggtcttttcttcacatttagcatcacttaattcctcgacactttccagcacatttggtattcccgacaaagctccaaatgatgccttcaacgcagatgagctctcagcatctttcaaaaatgctaatactggaacatcctcttctgtagtttcaatagtaacagactcttcgtcatcggtttcagtatccatttcgctctccgtttcgttgtcagaagaatcaatatttgtctcaacattcataccatcgtcatcatacataccatcgtcatcatacgaggaaaacatgtcatatcggtgctcgggttcatctctgtcaatatcatatgcttcaaaaatttccttttcatctacttttgggcatggaccattgtcttcaccatcagttttcccaggattcttagcagtttgcaccttggatgctcttcgcagtttcttacacaagtactccacttcccgttgtccagtgacaaatacgaggattccacctggtggaagcctcttgtggattgacataacctttttataagctagccctaaataatcatcatgtgtcctctttgagaagtgaactgatactggaaactgccgcacaggtaccttaacagctggtgggatcacgccaaacaaccttctatttgaaataaagtcctttaactgcagagtagcactcatgagcaccacctttaactgactgatcttatcctc

SEQ ID NO: 26457 - DNA, 390 bp, Zea Mays
ggcgaggtcgacgtagtcagggccgtcgaagacggggacacaactgagagagttcatgtagtcaagctgccaaggatgaagcgtgcgttggggtagccaggctcgataacacgttgtggatgaaagtacgaacctatcgtgatttcgatcccacaacaagtagatttgtagattaggtgtgggtcagcgcgtcactgtttcgatggctttgctctggatgagcataaggaagagagtttttactggttcggagagaactacgttcagtatagtgctgaactctttgttgttggctttcatgtgttacaaggctgaacacttggctctcgtgcttgtgtgagaagtgttacaatctaagttagcctgcctctatagttcggctctcgtcct

SEQ ID NO: 26458 - DNA, 271 bp, Zea Mays
ggaattagagagctatggtggctaatcggaggcaggagcgggtgctctggcttcgtgattacctaatggagctagtggtatgctcaatttatagtgtccaagggcggtggctcctaattttggaatggcgtgctggcggccggagagaggggaagtcaatagcgtaggtgataccgcggctttcaccgtggcaatgtctcaggcgatgaactagctacctaaagcggcttactgcgacgaggtaaagcttcaaggcatgtggccatcgcac

SEQ ID NO: 26459 - DNA, 500 bp, Zea Mays
gtgagaagctcaacaatctagatcagttgtggtcttgtgaaagtaggaggttgtgatcgccaagatcaacatcatgcacatgaagatctattgttgtaaacgagtttcgaaccctaaacctaaccttccatacttcatacttgcattccgttttgccaaacaactagaactcgaccagaattttagtacaatagaaagttgccaatttggtttcttttcctataggtttgtttagatacttgctttatgacctttttcccaccaaaagattgcctaagcattgtgttatttttgaaggaaataattggaacgacttaagcccttaggctattggctgtgcttattatatattttgtttatggctacggggtggaggaccaggattccttaggtggtggtcgtggactcgtggtccgtttcaggccgaggtttgacaccccttcaccctgtagtggaagagaaggattaggcagaagggagaggtaggagaagactattgc

SEQ ID NO: 26460 - DNA, 295 bp, Zea Mays
caaaacatagaaacttcaagcacaattaaggtaggaaattagattataattaatgcacaatatgtacttacattgctccagctaagaacttttactgcacgtggcggtgtgggactcaaaagtctgctgtttaagctaacatcaaagccaacaggctgacaaccagatgcagtggtgcagtttccatcactttgctgtaccatagtgctggactgggacttgagaaacttccgagacttatgcatcaaattaagctctgtcaagcatgaagcaacatgcttccgggccaactcca

SEQ ID NO: 26461 - DNA, 711 bp, Zea Mays
cctgagtcctggtgctaaagagtggcgcagcccctgggtctctctgagatggcaatgaagactccataggtacgtgtctgaaccgatgtacccgggcagcagtagcacgctgaaggtcaagcatacggggatcagcatccagtggtttcacctcagtctcgtcacgctccctaaagcgagatggtggaatgggcgaagcagaaatgggtgcgggaggggaagcagtggaagctagagtggtggacgtggtaggtacaatggaagtagtggatggctctagagcgacaggaggtggagtagagacagtggcggaaggtgtggagggagcagtggagcgaggccaagatgcgaggcgacgaactcgataggctatctgatctgaggaaatctggagctggcctccccgctcagcctgctctgctgccgctgcaagtgctgcacgagcagctctatccatacgccgcgtctttctaccctcctactgcttatggtaaattgtcttccctttgacctacctgaaggggcaaggagggtcctcgtcatctcctccccctgacgatgagacattctttgtctgtaccatcctgacttgactgctgcacgatagattgaaaagctaagtaggagtagagagcagctgataggatctcaaatggagtgatagctacctagaaacctcacgagagagagaagatccagacaggacaggag

SEQ ID NO: 26462 - DNA, 503 bp, Zea Mays
gtcgacgattagggtcgattagtcgctcgattagccggttctgcacaactaggtttaggatccagattttttgattttgtgggcttttttggcgggcggcccgactacagggagatggaacgccagcagtctctactctctactaaatcgacggttcacatctctactttcctggcttctcaatctctttccttttcttctcttcttctctattcccctaccggctcctagacttcttgttctaaaatccagacttcacctcaccagtacactcgcggttccaatccagacacgcgtgaatccagttccaagttccgaacttcaccgacccagatttctcgtccagaatccagacactcgcggttccaatccagatacgcgcagatccagaaatccagaaattttgtgtagttctgttcttcaatcttcatccttcatccttgtatgtgttgtgtcattctggactggacttctgaatttttgttcttgtactccatcagtcc

SEQ ID NO: 26463 - DNA, 431 bp, Zea Mays
cgggtgcagccggactagcataataagtacgcaaaatcgaagtattttccaaaaggttccccgcgcacaagccgcctacgggcacgaccggatctacgaaggcacgcagcttcatataaattacggttacatacatacagcgagggcatcacactttacattggctcaaccttcgggatgatacccatctccctgtagttgaacaacattatcctcagctcttcaccctcaaaaagatttcgcaactccccctcacctacactcgccccagccggtgaggacaacaattcccgtttgatagccccgtccacacgaagacgaccaccctccacctcactcaccctctgtttcgccaccgcccttcgccgcctacgcccagcactcagaccaggaagaacttcggcacccatcacacgcggagaagcctccgc

SEQ ID NO: 26464 - DNA, 292 bp, Zea Mays
gggtaggtaggtggatcccttaagtactgttataccccaagttacctgctacaactctagaatattcctccttacggggtcattacattgatcagaagtacaatcttattagacatactatggaacctaccccaaggaggggcatacaaacggggcccaaatggagacgaagcgcagcctgggccccaccattgagcggcatggccttcgcccatgcagcgcccttcgctatgtgaagccgagcctttgacctctctaggactgtcgtcgtatagaaatgtccgagactatg

SEQ ID NO: 26465 - DNA, 421 bp, Zea Mays
gaaagaagaaggggagctataatggcaagagagatggaggacgaggagcctcttctaggctctccgacgacttcgtccaccctccacacgggggaagggaaaggagaagacatggttcagttgcacctggacctggacctggacctggaatccctccgagatttgatggagaggtggatccgagccctcctggtcatggtgcacgtgctcttcatcacgtatctggagctccgcgccaagaggtcgaccgtcggcggtgtcaggactgtcaggaagaccatccgatacatccagatgcttatcggcgtggcaacgccgggagctaccggcgaaacagcaagcagccaggaggaggaggtgacactgttcgcccgattcgccgaggtgagcgttctcaggatgctgaccttcgtcgacgccg

SEQ ID NO: 26466 - DNA, 281 bp, Zea Mays
aagatgaattctgggaactaacttaaggtggaagatctgtcagtgagtacatgcacaaattcacagaattggcccgctacgcgcctgatgacgtcagcacagaagccaagaagatgacccgctttttgaaaggactccgactagaactcaagaccatcctagccaaccaagatttcctcagcttctcgcacctctcaaacaaagccatacaagtggaaagggcaagggaagaagaaaaaggtcacctcaagaggaaattccaagtcctccgagctcagcag

SEQ ID NO: 26467 - DNA, 413 bp, Zea Mays
ccgagttcttaataatggtgcgcggagtgcagtaccaccagacggccgtggtgccccgggagtccatccttaagaccgaggcggagtggctcaactctatcaaggccgaccttgtggtaccaatactatgatcactgatcgttaccggtttatgttgtcactcttctgtctgaacatctctacacaccgagtagagcttaactgaacccacttgagcaaacactggcaggtttcagatgttgtacccgtcgtgtgtagggcagctacagatgctggcattcgatccgtgtgcgtcacgaatttcaggtaagcggcggtcttgttgcttctttgtttccgcgtgtcgttaagagcatggaggaatgctgataaacactagaatacgctatagtctagtatatttaattttgatt

SEQ ID NO: 26468 - DNA, 526 bp, Zea Mays
cggccgcccgatctgatcaacactccagatttaatatggttacgatcacatctcgaccgctaatagctaatcctacggccacagatcaatccacgcgaatagttatatcttggtttaatcctaaccgcccagaacccaatccacggtcgtgagtgcttcttctctcactaaccaggccgacggcggcgctgcacagggacaacacggcggagcatcccggtgagcagtgctccgacacccaggtgccccagctaggctacagatctatgctaaacagagcggagggtaagaagaacttaatggagtgcttcataccggttatggtagcgtctacagtgttgtccatgccgcggcacgaatccacgacatggtcgccaccacggcgagaaattgagcggcttgcagtccaattcccagggtgggaaggttacaagcaccatctgagcaccactgcggtatccctggccaaccgacgaggttgaagcgccacccaaatcatgagtcgaccatggcggacccaatcacc

SEQ ID NO: 26469 - DNA, 321 bp, Zea Mays
ttctttaatctcttcagcgaccgcttgttcagtgatgatttggttttcttctccttcgccatacgatgtttcagtggtggttttctttctcccacgtcttagggttctcttctttttattgagctttcaccatcactttcattgcttaacccatccacgacatcttgagaagtccttgatgaaaaattagcactgtgattcacgatagatgagtagaagatgctaaagggtgttgcatgaatattctagaaatgctaataggagtagcaaaattatgtttaattttaatagttgagaatgacaacaaattagtacttgtga

SEQ ID NO: 26470 - DNA, 351 bp, Zea Mays
tggtgttgctgccttgctgctctgagccttgagtgctggcgtactagcgtgctactgctgttgtgtcgcttagagcctaggaggctggatcgctgctagagccctagactgctgctgcgttttgcatcatgcatattttcagtttgtcttgtctagtgtctctgtatgagtgtgggcttgtggcattgttctgttatagacttctggtgtctctagtggtgttttgcatcatgcatacttctgtactcatgtgtctgcctgctaagtgcttttgtggatttgtggcattgttatgcaaccttggtgcctttgtggatttattttgtttaattatttaattgtgcatttgag

SEQ ID NO: 26471 - DNA, 398 bp, Zea Mays
aatccatgtggtgtgaaatgttgctctgtgcccattgtgtatccctgcaggtttctagctccttagggagggtttcacagcctctaatagccatttcaccgaaaccctagaactccgcacgtcacgtgttcggtgaaatgcccaaaccagccaaaaatgctccatttgaacccaaatttttcaggcaccttcacaatacctccagtaacatattcaccaaatttcacgccaatccgatattccaggctttaatttcaccaaattccccgtttcgagcgatcgtttccgagccgagtgccctaatttcattttctttgcctaaattcaaaccaagcacacacttcactcatattcacccatataaacctattcgtgaagtatcgactcaattccacgtc

SEQ ID NO: 26472 - DNA, 380 bp, Zea Mays
aaacaactgcctgggattggaattgtaacagcaaaggttattaattttgtgattgctatataaacacttttgtatctgcagtcagcataattaattcttgagttgatcacttgccacctcaggctctgaagactgctggagtttatagctttgagaccttggcaactgctgatgcaagaaagatagaattggccacagggcgcaattatccatttgggaatcatatcaaagaatcaatgtcatcattaccacccaaaattgacatacacatagaggaaactggaaacagacttgggaaatcgaccattactgtaacactaactcgtctatcacaggcagttaaatccagtaaacgcaactgtgctgacatggtaccttat

SEQ ID NO: 26473 - DNA, 315 bp, Zea Mays
cgcaccgcggatgaactccggccactattctactccggccaccgtacccgcctgagtcacggctgcttcagatagattcaccggagttagccacctcgcgaccttgctccacgtgccctggtgtcttaccacgtcgcagtagctcgcgttatgcatatccggtgatcgccggtgagctcaccacggcgaaagccaccaattgcttgcgccagtgcacccccttctctccgaccgccaccacgacatctcaaattcacaggccaccgctcggggggcctataaattgagcatgccgtcagttctgcaaggtagtca

SEQ ID NO: 26474 - DNA, 320 bp, Zea Mays
ggcgaagctcgacgttcaggtcagtgtgacctgctagcggctagacgcactggaagcagtcgcgacaatgcacaacagcgctctggagtactgtatggcaccatccatcgtcaccgacaactagggcggactctttgatggcaatgacgctgttgccaacgtcgagcacctcgactccgatgccaacaagttgtggtaatacacgcttgcacgcttcgctcgccgcgacgaaggtcatgctaccatctccaacaacttcttcagcagatcggcaacgaccttctcagcttcgcccttgacttccccgaccttcgctccac

SEQ ID NO: 26475 - DNA, 381 bp, Zea Mays
ggggaacacgacgaaaccttggaagggactcatacctcgctggtggatggtggtggctagagcttttcccctagcggtctcgtctctctctctctccgtctttgaccgcacgcaaaggtggcacaagtgatatgatggttgaggaggggggcagtcgggccctgtatttatgcttgtggatggccgaggggtggctccgggttctatacgcgggtttgttaggcttaccaacaagttcctagatccatggagagttgttgcataacctgcacgcgggatcttcattcgtacacgaggatggtgacgatcctgaccattgggccccacctagcagcggttcccgtgcggacatgtgaggggaaagaagctggggaatgggcc

SEQ ID NO: 26476 - DNA, 317 bp, Zea Mays
gccgtgggaaggggcctaggcgcatcgtttcatggataggggttagccatgagattcatggtggccgagcattcctgaaaacggagtcgggtgtgtgaatcggacggggttcaccgtagggcgcgttcgccggtgtgcttccgccgctctgggtgcgcgcctccgtgctctggcgaggcagggaggttggtgacgtgctcgcgaccgttggatctagctatgcggtcgagattagaatcgcgtaccccttcgatttacgaaagcgatcggcccgttgatcatgagtcgtgtgggtcagggtgaatcaggagagtttt

SEQ ID NO: 26477 - DNA, 310 bp, Zea Mays
gctttgaactttgaataccctgactatgaatgattaaacaagggcgccgaagggcaaaagagaaaaaggattgttagtgttctgagcagacaggctgctaggatggtgaaaaaagatgaagaagctctgaaaaagagaaaatccagtcctgagccgaaggtggctgcttcgaagaagagaaaggctgcagcttcggagccaaaattagctgagatagaggaggaaactccttcaacgccatctgctgctgaagtagaagaaattctaaagctaatgaccgaatccttacctatcaagttgctaagtccac

SEQ ID NO: 26478 - DNA, 429 bp, Zea Mays
gaagtccctctgctgttgtcttcctttcccccaactggcaggcgctcctttcttctcgtcgactctgtcgccgtcgtccgttccttttctttggatccctatttcttttgttttgattcctttccgtctctgcaccagattcatgtgcattggctcatcgttcatgtcgctcgtgtagatctgccacgttggagacctggtgaacacgcacaagtcctgaaatcgtgcagtctgtcccttcttcagctatttgaggtaatccttggttccaccgttccttgctttgttatgttgctttggtttttttggttcattgcagtacacgccattgctcttgtgttcttgtgttcattctgcaactctctaataagtgagcacttaaggactctatggactccgaaatttggtcactaaagtatacaataagta

SEQ ID NO: 26479 - DNA, 534 bp, Zea Mays
aaacagaggtgacagaggtatttttacaatgttttcaatggtgagaatgagactatggacacccaattggatgactccttcgatgatttaaaaagatgctttgtatgcaggatccaagaatcagaggtcagagaagatttaaagaggatgaaagggggcaatgtgatgggcccagatggtatcccaatagaggtgtggaaatgtcttgggatattgctatcgtttggctaaccaagttgttcaaccatatttttcaatcaaacaagatgctcgatgagtggagtagtacattagtaccaatcttcaagaacaagggagatattcaaagttgtaccaactatcgagggattaagctcatgagccacactatgaagctatgggagagagttattgagcatcgcttgagaggaatgacgcatatcaccatgaaccaatttggattcatgtctggaaggtcaaccatggaagcaattttcttaataagacaagtcatggagcggtataagaagcagaacgacttgcatatggttttta

SEQ ID NO: 26480 - DNA, 575 bp, Zea Mays
agatgatcacccctccttccacctctgtccattccgaaattcatgttagacctgtattggctagggttcctagttcaatgagagcattttaactttaacatttaggattgcgttggtgccattgatggcacacatgtattggctagggttcctagttcaatgagagcagccttcatgggtagaaagcacacaacgacacaaaatgttctagcagctgttgattttgatttgagatttacctatgttcttgctggctgggaaggttcagctcatgatgccttgattctatcggatgcattggaaagatctgatggcctcattgtgccactaggtaattccataacatgtttgaatatgcttttaaattacttcacaatcaaactaactagaattctttgaactaggaaaattctatttagttgacgttggttatgctgttagacctggatttctacctccataccgtagcacaagatatcatctaagagaatttggtggaggaaattatccactcaatccaagagaactcttcaatctaaggcattcttcccttcgagtaacaattgagagagctt

SEQ ID NO: 26481 - DNA, 364 bp, Zea Mays
tgctgtttgaaccgctttattcctacagggactatcttctgatagaaaatacattgcacaaaatatttctttgtgggatctggccaccatccataattccatccagggtcttgtgatcgggccttccttttagaatcaacagcttgtgcagccagagcagggggcagtgctgcaatagccttttcagtgagagaggcagcatctggagcaaccgatgaagcagtaccaccagcaccagtactaccaccagcagatgctatcgtggctaggatagcagccacatcaccaccaccagtgctctcttctctaatgtatgagtctcccatgatcacctcaacagctgctgcacgttcacggcgccaac

SEQ ID NO: 26482 - DNA, 1842 bp, Zea Mays
gtttatgggcactattcagggcatggaactgctgatcttgttggactcaggaagttcacattcatttcttagtgctcaggtggcccaacatattcaaggggtatcttccttgccacagatgatgtccgttcaggtggccaatggagatcgtattcagtgtatgcagcacataccccaagctgtttggtcattaggagcgtgtgagttccagtccaacttacgtattttgcctctccaaacttatgacttaatagttggcatggattggttggaactttacagtcctatgatggttcactgggcagaaaagtggctggtcgtcccataccaaggatctacagtcaaattgtttggcctgcagacagcaacaaaccactgttcagtcatagagttttgccaattgactgatttatcagaaaaagagcaaggaatattgtccactctaccagaggagcttcagtctttgctcaacaagttacagtcggtcttcacagtacctcagggcttacctcccgagagagatcatgatcatcagattcctttaataccaggaggccaaccctttcgtatgcgcccttatcgctatgctcccgccttgaagtcagagattgagcgacaagttcgggacatgctgcagtcgggtatcatacaacatagtcggagtgatttctcatcatcagttatattggtgaaaaagaaggacgacagctaccgtttttgtgttgattaccgtcatttaaatgctctcactgtcaagactcgttttcctgttccggttattgatgagtttttagacgagttgcatggggctgcatggttttctacactggacttgcgcgctggttttcatcaaattcgaatggcgccccaggatcaacacaagacagcattctctacccaccatggtcagtttgagttccgggtcatgtcctttggattaaccggagcaccggctacatttcagagtgctatgaaccgtacattgtcctccttgctccgtaagtgtgctttagtattcttcgatgatatcctggtttatagtccgacttgggaggcacatttggcacacttggagttggtgttgcagctgcttgcgcgcgacaattggcaggtcagattgtctaaatgcacttttgcccgcgagcagatcgcttatctgggacatgtaatcagcagtgctggcgtggccatagacccagccaaggtggctgctatttcttcatggcttgtgccgtcctcatgcaaggaattgcgagggtttctcggtctcgtgggttattatcgcaagtttgtgcgcaattttggccttttggccaagcctcttacttccctcctcaagaagcattcagtttttgtctggacatctgtgcaggaatcagcatttgtggcccttaaacaagcactaacttcagcaccggtactggcgttaccagatttttctcgtcctttcacaattgagagggacgcctcgggttcaggcattggagcagtgttgcagcaagacagacatcctctagcgtttgttagcaaggctttgggacctggaaacttgggactgtccacatatgaaaaagagtatctcgcaatcttgttggccgtggatcagtggcgaccatacttgcaacacactgaatttgtcatttatactgatcaacgtagtctttcccaccttacagagcagcgactccacaccccatggcaacacaaggtgttcaccaagttgctcggattacactatcgaattcaatacaagaagggcactgataatacagctgctgatgccctttcgcgtcgtccacatcctactggtgacctctattccttgtcggtggcttctcccgc

SEQ ID NO: 26483 - DNA, 627 bp, Zea Mays
ctggttaggagttatcccttcttatttatggagcctattacacattcctaatcttcccttagatattttatgctaaaccacttaaccctagaggcacaatggtctaagttctcataggtgcatccaatgactataggctcttcattactttgcttcagctcgatgtaagcttcgtgatgacgccacatgcatgtcgcctcccattcatgctataactcaagtaggattttgaggcccaaaccactaaacccctcatgagtagtgtatctaatatgctccctccacaatcttggcacatgtccctccaatcctcgaccacctaatcacttctataaggtccctacttgacttggtcaacatggtctagtccatatacaattgcacttgtcaatgtccctacatgtcataatattctaaatagtgggctaaggcatttagcgatcacccttattaaatagctaatagtgggttgaattgggctatagcggtgtcggtgtttcgaactagcaccgatgagtaaatttttgtatgctcgttttaggctcggatagtttgctcagtgcgtgcaagaattatattggtttggacaaaatatccctgctcttgtcttcaatggttcacactact

SEQ ID NO: 26484 - DNA, 3102 bp, Zea Mays
cagattcacgcaaggtgttgctcagaactatgtcttccccaactcaacaaaagtgtgaaaatcaagaagaaacaaaaaacactatcagtgttaaccagactgacaccgcatacaaatatcctacaaccaagcccaagatcagtgttcaaattccagcttcctatactcccaacatggcaccaccccaatttatgcttccagtaccagggagatcaatgcctgtggcatttcaacagaaacaacctcaagtgcccattgaattcaggggcccaggttttcaaatgcactctattggctctgtatctagttccttgcccgtgaagatggctgtccctctgggtaatgcacctcacatacaaccgatgtttgttcatggtgctcagcctcatgcattccatcagcaatcctttattcaccatggacaaggctttggatgtgctcctccatctaattgttaccttcctcagtttggcaacatgagaaatgtgcaagaattatctcagcagtatcctagaagcggtgatgaacataagagaactatcaagataacacatccagagacacacgaagaactgatgctagatagacatgggcattcctttataaatgttcctgcttctgggcagatgcctttaaacaatataaaccagctacctcactctgttcaaacattttctccacttcagaaagtgtattatcctagaccaggaacgtacaattcagcacatgtctatcttcccaactccactgatgtccctcttgcaagtaggcaattttcctccaaaattcaaccttcgatgcatggttttgattccactaatagcaaccagccatttacttccatcagacctcctatgccgatatctcggcttgatgctacttccgggccattaacaaatttgcatactgcttccgaaatctcaaatttcaaagggatgtttccatcaagcctacctgctccagttcatgttgagctaaagccgcctattacactccctgctgaaatgaatagtgaatctaccatatcaaatcaacaaaattattgcaaaattgggctagaaatgtcccttgaacctgtaaatttagtttatgaaggaaataacaaagattctgttgcaacttgtgacataagttgtaatttaatacctcaaccagtttcaaccccgcagacacagactcggccaacttcagttgatcatgccacaccagttgtagaccctcaaactatcttaaccagtagcctgcctctggaatctactacatgttgtaaatcttcagttaaagcaaaacctattgaggtggaacaatcattagtggttccaacaactttatcatcccatacaaaactcgagtcatcgcatgcaactactagtgtcattttgactgcaacttcattagtttccaagattgatgggacgccaccgactaacaggaactatagatattatggcaatagcattttggggaaacctccgttaatttatgcacaagaaatattgccatcaaagtttgtggggtctaatacatcaccagaaggtcttggaaaggcaaaggtgaatccagttctcttccaagaaaagtttccttctgaacttaatggttcagttccattgcgaaagcatgacttcatgatagaagaacatgttccaaacgaaaaagggatgtgctcagagtcaaagaccgaacaagtagatgtgaccatgccaagtactgcctttggattggaggatgacactagtgttgctaaatctggaagatttcatgcatatcaccagccagttgatttgcatccttccatatacattggtgatatccagacatcagatgacagtcagcaaccttcaccagatttagaaatcataacatctcaatcagagaacaagcagaataacagtagagtagactctgcaagggatgtcaagaatgcagcccctatttctacttcagctatctcccaggggaaaacagaacaagagaggattggtttagaaatatctaatccttgctctataactgctgctttagtggcacaaccaaaaaaagttgttttggagtcaacaaaggccaaaagtaccaatggacgaagaaagaaacgaaaagagacacttcctaagggtagtggacacaagtattatgatcttgatagtgcacacagttctctcaatgagaatgtcgagagttttgttacttcagaggatgttcagtgttccttggcaactgatttaaagctgaattttacatgcgaggctgcaaaggacaattcaactggtgggaatgattgccagaacagaagtgacttgttcagctgggaaaatacaacggaaaactctgcggacaagttgaaactttttgggggtacccattctaaaagtggagcagaagtaaacaaggataaatctgagtttgaccataaaaggtattcccgggattttcttttaacgtttgcacaaagttgcatcgaacttcctgcaggtttcatgattggattcgatatttctgaagcagtaatgagtgtacatgttggtgctccatttatagacaatactcaacttaattcaaaccatgcaaggataaaagatcgaggttcccgaggtagtcgtcatatgactggtaaatttgatgatgataagtggagaaaacagtttttttctactgtttctggacgtaacctgctttctgacaatttttatcaacctgccttttctaatcgggatgcagtacaacatgttgggaacggatctgtaagaagtttatcacaaagtcagccattaagtcaatatagtggcgaggtgctctccggagctatgaaagtagtatctcggcgcagcatgtcacgtggatctgttgatgagagatggcaacatagaactaatgttcagggtatttcatcgccttctcaggtatctatgccaattatgcacaaagctgagaaaaaatatgaaataggtaaggggattgatgaggaagggtcaaaacaaaggcagttgaaagctattctgaataagttaaccccccaaaatttcgaaaaactttttgcgcagttcaaggagttgaatattgataacgtggtcacacttactggtgtcatatctcagatatttg

SEQ ID NO: 26485 - DNA, 272 bp, Zea Mays
caactcacaaaccgggttgaaagaaaagggatgatttaaaggataaatttaaggtaagcattaaggtagaagacataaatatcgcacgggccaaaggcgataacggacaagggtgtaagagagaagataaaggcatagaagagcaggtggtacaaatacaataacgaatggagttaagtctgggcctacacgtggtaaagaagaggatatagtcgagggtgagataagtaaaacatatctctcgaactgagatagaaaagagggatttcaac

SEQ ID NO: 26486 - DNA, 444 bp, Zea Mays
tgagattagagcacggggaacaataattggcttcagctgagattggcgacactgctgacacccatggtgaagagttgccggagacgaggtgagacaaggttttaggaggtctagggtagtcggggtaggctagaaaagttggggttacttggggaatctcgtgacagtgctttggccacgagggagtgaccagagggtttagggcagggaacacgactgtagtagcctccggtctgcacagagagacagaccatgtgattggtagcctggctggctatgtgcaggctcagcgggtgcattgactatagccgtgcacgtgattggtcccctgtgtaggacaagacgagcctgctcacgtgcatgcagcacagttaattttttcatctcccacttgcacgcgtggggatgccgggaggcggcttctctgctggtccaggtcggcgc

SEQ ID NO: 26487 - DNA, 366 bp, Zea Mays
gaggaattgaggataatgttgttcaattacagggagatgggtatcatcccgaaggttgagccgatgtaatatatgatgccctcgccgagtgtatgtaactgtaatttgtatgatgtggcctgttggttgtattcgtatgcttgtgctgatccggctgcacccgtgggtcacttttgcgcggagtgtcttcttaatgagagacttcgattaacacacttgttgcactattccggctgcacccttaggcgacttttgcgcggagtgtcttttaagtaaaagacttcgattcacgcacttgttgtgctattccggctacacccttaggcgacttttgtgtggagtgtcttttaagtaaaagacattgat

SEQ ID NO: 26488 - DNA, 579 bp, Zea Mays
gaaaagttaagactgtagaggaacctattgataatgctggagagcatctgagcaaagatttgatgctctataatgaaagagaagatcagactcgtctacagaattctgccagtgttctggaaagtaaaatagcgtcagtgctacatgaggatattggagaggttgacgatttaattccgctcgtgtgctgctttggacctgccaaatactcctttattccttctggaagaccagcaaataggttgatagaccatgagattcatgatagaatgaaggacatgttttggtctccagacaaatttgtgagggcaccaggagggtcttcatccaatgttgctctagctttagcagcgattggtggaagggttgcattcatgggaaaattaggtgatgatgactacggtcaaagtttgctgtatcacttaaacatcaatggagttcaaactcgagcagtttatatggacccttcagcaccaactgctgtgtctttgatgaaggtcagaaccgaaggaagtctgaagacaaactgtgttaaaccttgtgctgaggattgtttcctgccgtctgatatcaacccgg

SEQ ID NO: 26489 - DNA, 445 bp, Zea Mays
aaaaggcttaccattctacaaattgctcaagaaggtggacaagttccagtggaccacagaagcacaggaagctctcgatgcactaaagaagttcttgaccacgccaccagtgctaaaaccgccacgtcgagccatgccggatcagccgacagaagatctgttgttatacatctcctgcatgactcacgtggtaagcaccgcgttagtagtcgagcgggtagaggaagggcacacatatccagtacaacatccggtctacttcatcagtgaagttttgggaccctctaaaaagaagtatcctcaagttcaaaaactattgtacgcagtacttctaactgctcataagctctgtcactactttgacgaccacaaagtcatagtagtcaccgggttttcaataggggacattcttcacaacaaagaagccaatggaagaatagccaag

SEQ ID NO: 26490 - DNA, 784 bp, Zea Mays
gccaggatcggtgttcccgagtagcggacaccaaatcggaccccgcccgcgcatttcccctaacataatttcaccagaggctacctggtttgctctagccgcagtgaccgtagaccatgcggtcggatgaacgcattcccgacgattggtggactcctagttcaattggttgggtcggcgagcatcgcagacacacgagaatactaaaatggggaagcagaaggcatggactgacctgaatcgcgttggccgcggcgaggctaaactgtgcagtgttcttgagcagattgggggaaattcgaaattcaagagctctggggaacgattcaaggctcgaatgactccactggttgcgcaattacctaacggagcgagtggtggcggctatttataggaggcttaggcggtggtgcgcaatttggtcggacagtgcgggtggccggagaggaagaaaggactctggcacatgacacaggtggcctctcaccgtggcaggtgctccggtgatcaccggacatgcaccgcatgattcactgtgacgagagccagcgctaaggcacgtggtgcgcgacggcgacaacacgacggcggtgagggttatccgagcgaccgacgctggggggagtacggcatgcttagccgcaaccgagctcgagtggatcagacgccgagatctttactgggttatgcttatccatggccacggcgcacgaatcacggcaagcaatcgatcaacggcgacgggccaccggcgacgagatctttttggcgctggcggtctgat

SEQ ID NO: 26491 - DNA, 289 bp, Zea Mays
gtacgagcaaaaccaacatgtctttttctcactcacttgcactcagacgaccagcaagattcctcaacatctgtttattggctctagccgcctctatttcccttgcctcctatgctctcttcttgtttgccaccttcaatctcctcggcttagcatgcatcgggctgtcataacccattgattctgtgaacctacgcatgtcctggctccgatctttaatgttggaattgacgagctgagatccacagtgtatcttctctcccatgagtctctttgactttatggtatg

SEQ ID NO: 26492 - DNA, 767 bp, Zea Mays
gtgatcggtgccggtgcgggtccaggcgctctggtttgattgcatagtaattattgggattacgcccacgaccacgagattgaaggactcctgatcctggtgcgcgctgctggtctgcagcttcatccgtgatgggtatgggacctatgggtcgtggctcgccatgaagaagacgttgccgcaacatctccatgatgtaccgcacaggtaccattatccctgaacaaaggcgcgccaccgtgtctgctccgactcgaacaagccattggaggcatccatcttccggaagctgtcgggggagcctgttctttctcctcgccatggagtcggttagcagcgtttgcgtttgacgagcaagaaatggctgcggtgggagctagggagtcgaggaaagaagcggaggatggcagagattggggttcttggagattggggttgttcttggtggcggagagggagggaggtggaggatggctgtggctgcgcgatggtattcagcagcagaagggagacgggagacgaagaggcacaacattcaacacttataacgaagcacaggcgcgtttccttgtttcttcttttatatacagagcggccgagcgggaccggggagcaatcagcccatccacgggaacgggagacgcagccgcctctctcttcctcctatctctcttcctcctatcctatccacgggaaccggagacgcagccgcctctctcttcctcctatccgatccctcctcccaaacgcagcctccgtctgcccac

SEQ ID NO: 26493 - DNA, 768 bp, Zea Mays
gatagttaacccgttctggtttggcctgctgacatatagaacatgactgcacataggatcggatatccgatttcatactaggccaatagaaaagctgcttcacacgactgtaagtcgccggtacacccaaattcaattgcagtcatgtaaagcacgcagcacaccctggattaaagaaaaaggtccttcagcatccgatttcagacacagtgtggctaacaactgcttagttgcaggatccctgtcatacccagttatcacctcctgtaaccatgtgggagcacactgaaatagagcaaagcaagaaactggtggatggggcatccgagaaagatcatcagcagctgtgttatcggagccctttttgtacacaatgtgatactggagtcccatcaatttagtgtataccttttgctaccatggtgtatgaagtcgctgctcattcagttgagtaagactgatatgatcagtgtgaatggtgaactcggccaactgatggtatgagcgccattgattgacggccaataggatagccatatattccttttcataagtagatagtccctgatttttaggccccaaaacccgactgagaaaggccaacagatgtgactgctgcattagtatagcaccgacaccatgttgggaggcatcagtatggatgttgaacggcttggtgaaatctggtaatgccaacacatgtgctgaaatgagagcagccttgagaatgtcaaatgcatgttgatgttctcctgtccagataaacaa

SEQ ID NO: 26494 - DNA, 2525 bp, Zea Mays
acaaatacacatttatgatctgtcggaacctatggttaatggttctgatgggaaaagggatgagttagcattaacattgggtggctcaagttctagcaatggtggtagtatgaacatggatctggattcatcaagtggaagctctaagcaagttggatccggtttaacaggattagacaatttgggaaacacatgtttcatgaacagtgcagtccagtgcttggctcatacttcaaagctggttgactatttccttggtgatttccacaaagaagtaaacccacataacccactggggatgaaggtatgtcaaagtgttttttacagttaatctattgtatttatactttggaattttattttacttttatttcttcaattcaaatgcaaaatgttccttaaacagggggaacttgcatatgcatttggcgacttgttgagaaagctatgggctattgataggacccctgttgcacctcgccaattcaaggccagacttggacggtttgctccccaattcagtggctttaaccaacatgattcacaggttagtttgctctttatttttggaaacgttctgactctaaaacacacaaactgaaattatttcttattttctttatctaattccattcatagctggctataggccacttgatcctacatttctactaatatcagctttgggattaagtagcttgaaccaaattatgtggtgacttattgtgtttctataggggggccttttaattggggactagtttttagttacatggtcttttagcaattttttctacggatgaaccaatttttattactcgagcaacgaaactacaatagttttgaccacaaaaaaacacgactacaaccctaacttctgctccagatgttatgaacacaacgggtttatccaaccgacaagtgttccaactctagttccacgctccttacccacaacaaagtttcgacaaacaaatgtttaactgctacccaagtttggtgataaacgtacacaggctgaacctaggtcaaaagaccaccatcctttgccccaatgaacaccaagctcaaatgatcgccatcctgttgtctctagtgcccatctgttgacaaaagagtaaggccgctgacttcagaacttctgctccatgctccatctgagaggaatccatgtccttctgtagtcctgtccaatatgtcaacacagtaaatcatacatataatttctgtgggagctttaactctctttccatcaaaacaaatagcgtttgtagtcctccatatgatccaactgactgctgctaggccaactccatacacatctgcctttcggtaagcaccatgaaatccaaatccagaattgatcaaaagaggtgggtcccacattgactccaaaaatgtatgctagaatgctccacgcatatttactcacagggcaatcaaagaacaaatgcttaaccgattcattctcctgacaaaatggacaagatggatctcctttccatttccttatcaagatgttatcttttttcagaattgcattttgaaatgttaaccacacaaagattttgatctttaaaggatttttggctttccataactgcttgtgatagtcacctttactgtttccatataagtgtttatatacaccgaagcaactgagaactttccagatttttcccgtttccaaatagccacatctttgccatcatatgatttatatctgaacagcatattgcataagttcctaagttgatcttgtaattcttcatttatccaccttcggaaacttaatccgcagttctttttattcatgtaattaactgtacaatcttgatcaaagcaaattctgaacaaatcagggaacctttctttcagagatgttccgtaccatacatcatgcatctcataattcttcctttaagatacactcatacacatgcttaattctaatcagatcattccacacaggggaatcgttagctctgtgatatttgtttcactttcacacatttatctttcatgtatttcttcctcacaatttcatgccaaatcccttcattttccagcttccaccaccacttacacagtagacttgtattcatcttcatcagatctttgactcctagacttcttctctttaggtttagttatgatttgcatttgacttaatgatattttctttttgttccttctccttgctataaaaatcttttcctgaccttgtccattttttcaattacagtcaaaggaagcaggtacatggacatggctctttagcaataacttgtgtattacttacctgaagtgtttttgcaatgccaatgaagtgtttctcagataagtttttatgtgttatacgtaggagcttcttgctttcctattggatggactccatgaagacttgaaccgtgttaaatgtaaaccatattctgaagctaaggattcagatggccgtccggatgaagaggttgcagatgagtattggggcaaccatttagctcgaaatgactctatcatagttg

SEQ ID NO: 26495 - DNA, 624 bp, Zea Mays
cggatccccgatctacggccacgagcccattactgcgcgacccaatcctacacgtacgtatacgatcggacgactacggaactcatctaatctccaccgtccaacagtcgatctacgacgtatgggctcctcccctttccgttgaaagcgtgcgactgagcagagctcgcgcggcgccgttctcgccggagagaggtggcgttgcggcacagtgcgccaaatcctatggcaaccggtgctacgtgatacagaggtgacgacaaggcgggtgagaagtccataccgtgaatgaagtagcagcaaggacagtccatgacatgaggcggcgacgccaacccaatcaagcaccggcgacaaatccaccatgattcggtcgtccatccatcaccggaggccagacacgcgatccgccactggtacccatcggcgaacctccacgcgtcaccgaggtcggggcgatggcctaattttcccccgattcctgatttggccaacagcggtgccattcttttttttttctcggtcctaggcaaggcgcacatggcggctgtgttcttggtgctatggtggcacgcagaataggtggatgaggatggggataggactcgccatcggtttggtctt

SEQ ID NO: 26496 - DNA, 441 bp, Zea Mays
ggcggattgacactggccttgctccctccactagtgggatcgagtgatcatagaaacgactgggtggtagggaggtagggggttggaatagctctgaatattgttggagaagtttgagtacaggtgcaggtgcagatatattttctagtacccaaacttgagctgaaggtggtaactcagttgccatttgtctgacttccaacagtgtcccagcaggtaagcttgatgaacagccgcgcaacaccactgactgacccatataagaaaaggataaccacttgttcttctagtcgacaaacatggggctaaacatttcaagccaatccattcccaatatgaggtcataaaatggcaggggcaagattttgaatgtagagcaaaaagacaacccttggagagtccagtcagtttgaggtaattcggtggtgcactgtaattgac

SEQ ID NO: 26497 - DNA, 722 bp, Zea Mays
ggcgttctgccgccaggctaccacgacaaccaccgtgatggcaccgcaacagcaaggcggtggcatggctgacctcgacgtcacgtcctccaaccagccgcttctccccaacgagcagcaagaagtcgttgacgcactctacgtgaatcacgaagctcacaccgccatccttcaaaccgacgaggtcgtccaccgccacggtggaggccacagccccaccgatgatcatcacggtgagcagcaacagcagcagctcttcgactacttctattacgatgccaccgccagcgacgatgcaagtagcaagcctaccatagacatcaacctcgacaacatgcaacaattcgattttgacgatagttgtgccgccgccgagaaagtggatctggctccggcagctggggatggggaaataaggcatcatcagcacctcgacatgaattgccaaattgaccacaaagattatttcgagataaaggcggcgtcactcgtcgacgcctttgacatccggcaggacctgcagccggtggcagacgtgaacgccgaggttgacattgacatcaagacggtggatatgaatgccggcattggcatcgacatgaaggcgatggacatgaacgccaatgtagacgtcaatgccgacctacagggggatgatgccgctgtcaacgtctccacctgtgaagctgaagcagcaaaaatggcagccgagtcatcacatt

SEQ ID NO: 26498 - DNA, 565 bp, Zea Mays
gctctagccacggacaccacgtgtcctcaccgtgcttcattcaccgccgtcgtagcaagccatcggacgctccagccatccacgcagctggtttgaggcccttgtgttgaaccgtcgtcagtaagtccaccacgttattggcctgaggacaccattgaggctaacgtggagctcctcgggctatcgccgccaccatgattccgcggtcaaattgaccaccgtcgtggtgactccctttaaattgagcttgccatcagtcccacctctccattacgcacccaagccaccctttatttccctcgttcaaccgttggtagcctagaacaccaggttcttcccatcggtggtcaccaacgccgccgagtggtgccctcgtgtggtcagcctttcctaaggttgttcatgtttgtttgactcgtgtttcgtaatctataggtcgtggtgaagcttatgtgcttgttcgtttgaactctaccgcgcagggttacccggaacaccgttgtgttatccggtgaacaccgccaagggcagtgtccacgtcgaccggccaaaccatagctcctcc

SEQ ID NO: 26499 - DNA, 293 bp, Zea Mays
gatcaattccagtgttaaatggaacgatattcgttgtgcgattcgggagtctagatgtgatgttatctgcttgcaggaaactaagaaggaatgctttgatgcggctaacctcaaaaaattctgccctaattcctttgattcatttgcttttgtcccctcgatgggaaatttgggtggctccattactgtttggaatagctcaaaattggtgggcaatgttatttttcagaacgaatatgctctttcggtcgaatttttctctaattcatcgaatgattcctggattatcacga

SEQ ID NO: 26500 - DNA, 649 bp, Zea Mays
attggcatctcaaaatgaacttgcctctcatcattgggaatatcaccaagtgaagcaactaggacctcaatatcttcgggagagggtcgcactctaagacccagaccactatcaccggcagaaggattggacacaaaattgcaaaaggacttggaaggtggcagattcaaagcagaataagcgacaggagcaccaatatttgatactttgcctctcaagatcatctccagtcagctcatcaaatctacaacaggaatcctcctatcagtaacctgggttgagtcagtgacaccagtgtacaagtaagccgggtaagctctgtgttttagaggctgaatattcttgaaatcaaagtctgcaaccacaacttcagcgctcagacctctctccttcagcacacaaatttcagcaagcagaatcttggcttatgttatctccaaggctgtaggagactcgatccaactcgcagtgcacacatccggttgtctccctgaccgaggagggagggacttgccatagttttccacaatgaaccactctaagcgccatcctttaatgctgtccttaagtgggatatcgaggtactccgttttcctcccacgacgcatctctaggctcgcaccgcccacaagttggtgctgccccccag

SEQ ID NO: 26501 - DNA, 434 bp, Zea Mays
ccaggaacagccagcgagattaccgggcggcatctgcggcgtgcacaggtaactaacgcgaggttacgagcaagtttttgtcgcggtggcgctactctgtctgctctcaacgatggttccaggcttctcagataatggccaggggtatgtagatataggcaaacaacaagatcatatctgaacaccaccacgattatttttaaagtccggtcgtagaagagggaactgacaagatggtccatagagcaccgacacagggaatcgtcgtgacatcatcagcggctgaagtaataaagaaagaaaaaaaagaacgaaaggggagatgggcttgcaccagtgttaattttggagagcaagtgggccaagcggccatgggctcacgatagtggtgaagcttctccatttttttcttttcttttcagttttcaatttca

SEQ ID NO: 26502 - DNA, 385 bp, Zea Mays
catcaacaacaacgcagaaccacacccacgagtcagactatgcttcagtcgtagacctcgccagggtcactaccacctggcaagacctcgaccctgcaacaaaaccctagtacgggacgccttcgcatcgcgttaagggtccactagcctcagtagagcctttcttttcttcctagaagacttggcgtacttgtccatcacggatgttacaacgacataaatattttgcccgtaacgaaaaaaccttaaaataccaagccagaaaagacgtaaaattgtcctcgcatgaagccatgggaatagggtcatctctgcgccactcaccccgagttacttccaacatccgagcagatgcttctcggaggacgagcgaagtaatgacctc

SEQ ID NO: 26503 - DNA, 425 bp, Zea Mays
cttggataactcgttaagaacccctagccactattcatcgtctctctgacaactacacagaggtcccccgacttttgtttcttctccaatcagacccatggccatggcgcgctcgtcgtcgatcaccacgcggctcggactggccatgaccggtgttggctgcccaaattaacggatgggcaagcaccaccgacccgaggcaaacctagaacgagctttaattggatcaatctgggccaggatgtgcgtgaccacggtgacagcggataccgaacaccgatcaagacgttctggttgattaggtgaagtcaagctcaatgggctgagcaggtgacgatcacaagctcaatgcgctggcggctggagagggagaaggctactagcgcgggtgaaatcgtggcactcaccggctgaggggccacatc

SEQ ID NO: 26504 - DNA, 313 bp, Zea Mays
cggagaccatcgaggccaccacgacatcctctcgttcgagccaagccacggctgccggagataccggacttagatgctgtaccggacttggatgctgcctcagcagtcagcatgtgcaaactgtcgtgctattgaatgtaggtcaccagcgtcgacgagggctgggcgggagccggagcagcagggtctcgtcctgtctcgtctcgtggaaccaacgctttaatttcttgaggtactctacttttttgcaggtagtctgtttcagtagttgatcagtcatccctggtattggcgtcttcgcggctcacaggat

SEQ ID NO: 26505 - DNA, 524 bp, Zea Mays
gtcggactcgtccttgcgacgaaaggctggtatgaccgctctggcgagttcgcctccctctcccctttccctcggtgtagtttcgctctgtttaggttggtaagccgccgattcaccgtgtccggccatggcgccaccgcatgcgagagctccgtcgtgtctgttcgccgggaagagcaggtgatggggaacgacgcgttagaagccattgatctcaagattagcggttaagattagatcactgcttaccccttcgtgcaatcaatcctgaccatagatctcatatccagtggctgcggttagatcttagtatttaaaatctatgtcgtcggatccaaatctgagggccgtggttgcgtaccggttcgcggtgggacggatctaatccgggccatccacgcttgatcggacgaccatcaacgcttcataccccttcggcgtgcgcagtttgtagaaaggaccttataattttaacgaagcaacccgccatccacatggattgtatgctatgtctggggtatttt

SEQ ID NO: 26506 - DNA, 369 bp, Zea Mays
gtgctataacaaagatgaagatggtttaatggtttacaactttgatgcagggccttggatgtgttgccatagaaaatttagagataatctaccctaaacatcatctgtcaggcactcttaagatgactctcatggtacagtagccgatcggatcaggttcagtgaacctcaccgccgatgaccgtcgcactgtgattcacgtcgattgtcgggattcgtgcgctatggattgtggataactgtgggcaggtaaagatcttggcgcctggatcagcttgagttcggtcgcgactaagcccgccgtacccccttgctcatcggtggatcgggatgagtcctcgccgtcgttgatcgatcactgccgtgcgc

SEQ ID NO: 26507 - DNA, 370 bp, Zea Mays
gagcatggccgaatggcagccaagcacccaaatcacccacagaaaacagctacacgatgcggacgtcctagtgaacagcaccagtgtgacttaccgggatttggggcacagacaaagtatgcccacgaagacgcgtgacctacggcggccatggagctgcggcgagcaatcccggtggtctggagcatgattccggtcaggcgaagccgcgacgagcatccgtgtgcgctgggcttcctctcgagtcgatcaccgagggctggacacaggtggtggagcacgacctcggagcgcagtgacccggcgatggaggatctgtactagcgagtaatcccaatgccgtggtgactgatctaggatcgccagacaa

SEQ ID NO: 26508 - DNA, 349 bp, Zea Mays
aagaatatcaacagcctttgtgctggcatggctttcatcttccaacaaactattttctagtgcagctttcaactcgaaaggatcccacaaccatgttcgttcttgaactttagaaacagaagatggcaattttgcataagaaggaaaatgaataacactttcaagaagcttaacatgagctttgatacaatcatgtgctaacatgttcttggaaagtagcttcccttccagagcaacagaataggcagtatccaaaagctttttttctcctaaaatttgtatgaaagctgaagaaatcgtgcttgggtcagcagaatcgaaaaggaatccatggacaccatcactgacc

SEQ ID NO: 26509 - DNA, 446 bp, Zea Mays
cattgatctgcccgagtgaaggtgatcgggtgctccgaccaccggtatggggcgggaggaccggtggtcgccactagtatttggcgatcgttgagcttttgttgtctcttgttctcctgcgatccgtgtccgccgaagatgacgttgacctctctgtcgacacgcgggaaggctccacctcctccctcctcctgttgctagggttgtcgcggttctcctggtcctccccgcggcggaggaggagggagaggttggaagggtcgatcgtgcccaacggagtgcttgaagtctctacagttccgaagggtgtggcgcatgtccttgtggtacgggcactgggcatcgaggatgtcgtgcagcatgcgtttgcctccacgaggtcctccccgggcgtgagaggcaggtggtccggcgacgtggacttcttcgcaaggtctcttctccca

SEQ ID NO: 26510 - DNA, 423 bp, Zea Mays
cttagccgaagttagagaagcgatgggcttgtactctatctacttagtgaatttgtcaatagcaaccagtacatgagtgtatcccccttgagctttcttgaagggtccaatcatatccagtccccagcatgtgaatggccatgtcacaggtatggtttgcagttgttgtgctggtagatgctgctgttttgataagtattgacaagcttaacatctctggactaactcggcggtgtcgctctttgctgttggccagtagaaaccagacctaaagaccttcccaaccagagtcctagacgttgcgtgtatcctgcattgcccagcatggatctcatctagcagttgtttcccagtggccgaaagaatgcacttcatgagaactcctgttgcgccccttctgtatagtgtttccccaatgagagt

SEQ ID NO: 26511 - DNA, 480 bp, Zea Mays
ctggacctctccaacaaccgcttctccggccgcgtgcccaacacgctgggccgcatcaccaccctccgatacctgtgagtagtcttgtcttgttgtctcagccttgaggattcagcaaaccgcctcccataatcccatctccattccagttacaggcgcgagtatatatctcatgctgctctccgtcctgtctgcgtgtgctcttgctgcaggaggctgaacaacaacagcttgtccgggccgttccccgcgtcgctggccaagatcccgcagctctccttcctgtacgtacgcacgcacgcacgcgtctcgtcgaagccatctcggcttcctcgattctactacatgtgcacctgttggctgcttcgtttcccttttgcgctttaaatcgaatttcaatccgtgaactcgatgcggttggtcggtgtctgttcccagggacctgtccttcaacaacctcactggccccgtcccgctctt

SEQ ID NO: 26512 - DNA, 454 bp, Zea Mays
aaagaatgcagataggtgaagagtgtacagtggcccggagctgtcacaccgcgcgaggatcctggtaggaaggtccttcacagacaagccaaaggggttaaactccatagaacaagagttgtcagtgataaattgatgaacagaaagaagactctgaataatgttaggagcaacaaggacgttcttgagacggaaggggccagggagaaccgcatcacctactaaggtgacagagaggaccgacccatcgtcgatgacgatagagcaaatgaaaggtgagggtggaggataaagtatcagcgtcaggggtggtgtagtatgaggcaccggagtcagccacccagtgagtgaacgaggtggccggtgccagagtcatcacgttgaacggtccagcaacagactgtgtgtcccgcccgccaccccaagggccccacgagggcgcaggagggaggac

SEQ ID NO: 26513 - DNA, 404 bp, Zea Mays
atcgatttttctctgtttcgtttacactttacaggttgcacagggcatgctagagaattgagtacatctgcagttccaaattgaatgagggtgccaattagcttttttagatgatggagttgagcatgtcccagcctctgtatccactcatccatagcaaatacatgagagggggtgaggatgggcatttatttgatgttgggttcggctccactccattgctgtttccatgtcagcatgcttaatttcttactgttgtttgtctggatgctttggattgggttactatacattgtcgtttctggtctgtttggattgcatgctgtgggtgaggtttcgtctgttcaaactattaattgcacttagccattttggatttgggtcagtttgcactttctttttgt

SEQ ID NO: 26514 - DNA, 276 bp, Zea Mays
atcatcttcttcctcctcattttcatcagcaacacggacaacacacccattagggtcagcgtcagatgggtcacacccattgggattagtttcagtaaattcaggcacgagcacttcctcagcagcaggagccgaaggaccagcatcccgatccaagctagacactcggcgaagacgtctcttcttctttttctgcccatcagcaggagaagcaggctgattggcttggcaagggcgtttcgggcgaacactgacaggcctctgaatatccaaggc

SEQ ID NO: 26515 - DNA, 852 bp, Zea Mays
tgagatgatcagaggaatttctggcgggcaaaagaaacgtgtgacaactggtatgcatgcaaagcctgcaaaccatgtgcccttacaaagacctatgatcaaatcatcagtttatagttggaaccccaattcattgcatattatctcaggatttgtctattatttttttcatgttttgtgtaggggagatgctaacagggccagcaacggctttatttatggacgaaatatccactggtttggatagctcgagcacatttcagattgtaaagtttatgaggcatttggtccatgtaatgaatgaaactgtcatgatctctctgctccagccaccgccagagacctacaatctttttgatgacataatcctgctatcagaaggatacatagtgtaccatgggccacgcgagaatatcctggaattctttgagtctgtcggtttccggtgccctgacaggaaaggtgtcgcagactttcttcaagaggttacttccaagaaagaccagcaacaatattggtatcttgatcaggagcaatatcattatgtatctgtacccgactttgcagaacgtttcaaatcattccatgcatgccaacagatgcagaaggagttgcaaataccttttgaaaagtccaaaacccatcctgctgcgttgaccaccaaaaaatatgggctttctagctgggaatcactcaaggcagtgatgtcaagggagcagctattgatgaagcgcaactctttcatctatattttcaaggtcacagtgttgatcatccttgcattcgtgtccatgactgtgtttctcagaacaaagatgccccatgggcaaattgctgatggcaccaaattct

SEQ ID NO: 26516 - DNA, 401 bp, Zea Mays
ccggtaccccttgtgatcatggaagtacccgaggaaaagacatcgaaaagagcgaggggaaagtttatgaggcgcggtggcattagtgttgggatagtaggcacactcgaaatcccgaaggtgctcataggagggggtggtgcggaagagagtgaagaacgagtgggatgggaaactgccttagagggaaggcagttgagaagataggtggctgtgtttagggcctcagcctagtagcgggcgggaatgagaagcctcaaagaggaggcaactcagcatgttggtgctggtacaaatcatgtgcgtggctcgaccattctaaggccggggaggtgtcaggtcatgacatccacagctgcacgccgtgggagagaaataaggtgtgagacgtggagttatca

SEQ ID NO: 26517 - DNA, 290 bp, Zea Mays
gcgaccaggttcttttactgtttattcaagtcactgactgtttgcacaaaagtcctttctcttttccctattctgtgtttgaagtccccgacggcgctcgcgcaccgccacgctccggcgagcatctacgccggccgattagggcaacggccgggttctccgagcagcggacacgaaattaacactaccccaaccatttcccccaacttaatttggctattcatcaattatggagctctggccacgatggccgtgagcatggcggctaaagcgtcgtgttcccggcgatt

SEQ ID NO: 26518 - DNA, 455 bp, Zea Mays
tcaaggagttctcaattgctagattttaattgatggaaacaaaaggaaagcaactgatgttgatggaaaagtgttgcccacactggtttatatggctcgtgagaagagacctcaagaacatcatcacttcaaagctggatcactgaatgctttggtggatatttggactctatttatttcagtccatggtttttgcttgtatcctacttgagtcaatctttcttatgtttatataattccctaattatggttgattgtgcagataagggtatcatcagtgataagcaacagcccagtcattatgaatgtggactgtgatatgtactccaacaattcagggtctatcagagatgcattgtgcttcttccaagacgaacagctaggtcaagatattgcttttgttcagtatcctcagaactttgaaaatgtggtgcaaaatgacatctatggcaatc

SEQ ID NO: 26519 - DNA, 300 bp, Zea Mays
cttgagtccagtagacaacagttccagccttgagtccttgacactttgacagcacacgccagacaacagtttcagtaacaagaagcctgacagcctgcaatctcctgcagtcctgcttaacaatatggcaatatcaatacacttatacaccatccaactatgtgaaataaattcccataccattatcaagattcaatagtagtcccctccttcgaaatggtaaggccaccaatatttgtacagttgcattctcaataagtacaattcacaaagcgtgaagtattgaagtacataaaatat

SEQ ID NO: 26520 - DNA, 280 bp, Zea Mays
ttagggattcaatattttttctataagtttttatcgttttgatttgataacagggcacactaattatacataacgatatttttgcagttaatggatcctaagcatacagtatattcggccatccgcgaaaccggcataaataggattgctagagatttgctagtgagacattgccggaaggttgctgcaaactgtggcaagaagcgagtatctgctgttgcttgtgatgattctgaagagttcagcatcccagagccatgcccgtaagacgttgtcagaa

SEQ ID NO: 26521 - DNA, 371 bp, Zea Mays
aacaatttctcaaatatgtagctaatctgaatgccaccatgcaagtctgctcttcgaaatcatctctgcctcagcacatacgtgtccatggcgattgactggcagttagatgactctagtggtgtgccatgccatggtttcaggatgcctatgtggaacaagttttaaaatgatttcttatggttatgggatatgctccaaggttttcaacttcatctaggattggttgatcaacattcatggattttaactgcttcggggtcatactcttctaaatctgcctatccagccttcttcttaggagtttttggtttttatcctcctgaccggatttggcatagttggacgccaagatgtcgttttttcatgtg

SEQ ID NO: 26522 - DNA, 367 bp, Zea Mays
ctcctcttgcagggcttaattcttagcaatgcgcttagggctcagaaaaacattgaagatgaaggatatacgatggctctgaacaaccttcgttcagaggtaattgaattaagaaatgaaggtcttgaaaaatacaaaatcttgatttcattggtaaacaaagtgaaagaagatgaaactagtttcaaggctcaggccgaaatccaaaagaatgaaattgaagaccttcggaaacagttggcagaggccaaaggaaaatgcgcactcgcataagctaaccgagagattagcgaatattggaaaaaccatttagagaaaattgttgaagaacttcgcgcatccaaggaaagatgctttgaaaaatcct

SEQ ID NO: 26523 - DNA, 282 bp, Zea Mays
cggacatgtgtgccatagtgcattattttggtggatacgttaagttcgatcaagtgtttcgaatgcatgctatgatatggttgtatttgaaactgagaagtttaggtattgctcgataagaaggtttggtcgatgtggttagaaattgatttggcttgtatagagaagtggcgacatgccgaagtagtcatcgcttcctatatgctcgtaagtcgaatcaatgcatgttatatgttcgttgaattacgcttcgcatatagtgtatggttgcattcgtagagg

SEQ ID NO: 26524 - DNA, 604 bp, Zea Mays
gcattatgttccggagggagtgcttcacatgaaactagaagagtttatccggttgaagcaaagaggagatacggtgacacagtatctcaataaattcaaccatctctctcagtacgccattgaccaggtggatactgacttgaagaagaagaattgttttatgaggggacttaatgacaggctccagcgaaaaatggcaacatgtttggaccttacctacagcagggttgtcagtacagcactggcagttgaagccaaaaatgcaggacacggaaaatcaaagggatatgcgggtgagagatcaaatcaaggacctgaaaagagtacaaggttggtaatccgacctttcaatcaaaatcgttcttcgcctcgcccgccttcatatccattcaagcagcccgtctttattcgtcccactacttcccccgctcctaccaatcagccgagtgcccctggtactcgtttccctgcccttcctagttcttctagtgggtgcttcaactatggaaagtccggacatttcattaaggactgcccatatctgaagcaaaataaattcaactcgcagcagacctctgggaactcaagtcaaggaaaggggaac

SEQ ID NO: 26525 - DNA, 316 bp, Zea Mays
ccgagccgtcgaaattgctcgccggatcaacatcaccgccgccaacccgctctgcgccgtggtcggttctccaaactccatccccgcctctggtacgcacctagatatcttcgccatgacttgtgttttccattgtagaggtttagagtagggtggaccatggagtggccatttggattgttcgctggaggctcgccgtcgtgaggcgtgcggctgccgtcgctggtgggggtcgaagtggaggtgatgagcgctgactgtagattcttggacggatggttctagttagatctaggaataccccttcacgtgattg

SEQ ID NO: 26526 - DNA, 1475 bp, Zea Mays
ccaccacctccgcctcctccaggtgctcgctctggacctccacctcctccgccccctccaggtgcacgaccaggagctccaccaccaccacctcctccaggttcacggacaggagctccaccaccaccgcctcctccaggagctccacctcccccacccccacctggaggtggtggaagaggacctccaccacctcctgcacctagagggcatcttggtggtcctcctccacctccaccaccaagtggacgtgcaccaggtgtgccacctccacctagagcaccaggtgtgccgccaccaccaggaaataatccatccttaggcagaggacgtggggctgtacgccctctgggatcagcttatggggctgctgcctcacgtaagtcaacattgaagccattacactgggttaaagtgacaagggcccttcaaggtagtctgtgggaagaattgcagcgcaacgatgactcacagaggtatcatatagagtataagtcgtgtacaacatgatcactgcaattaactcgtattgatttttgtttgctgttgctttcgacatacttaacagtgtgaacttctttcctgcagtgtttcagagtttgatatatcagaacttgagagcctttttcctgcagctgttccgaagtccgatgacagctcaaaatctgaacgtagaaaatcacttggatcaaaaccagaaaaagtgcacctagtaagtattgttaacaggtcactcttttgaagtatgagtatgtcaaatgcgttctattatttcctgaaccatcattttttcctgttttggtcctaaatattgtgctgtgatttggaatttcgactactgaagctttggttgttatttagatctgcagtcaaagttaataagcattaatagctaacatcaaattacatgccttgtagtttgaacatggtgaaccattactacatctctaattcagagtttttggtgactctacttatacccaaaatgtttttctcttttctaaattataaatactatggagtctatggttcatagtttcaattatttaatagtttcaccatttttctttgagatcttgtgtattctgacacttaaattgtgaatagattgagttgaggagggcgaataacacagagatcatgctaacaaaagttaagatgccactctcggatttggtggtaagaatcaggacagtgcacaagataaggtgtctcactctttaataatttctgacatgttgccaatgattgatttcttcagagtgcagctctggcgcttgatcaatctaccttggatgttgatcaagtggagaatctcataaagttctgtcctacaaaagaagaaatggaacttctcaaggtgcacaacacgagattgttgctttactggcatggtgaccttattttctaaatttcccttactctgtttttgacagaattacaccggagacaaacaaaatcttgggaaatgtgaa

SEQ ID NO: 26527 - DNA, 271 bp, Zea Mays
caatttgcaggatgctttcagcaccggtgtagccattgaagacaatgaagctcgggcattgatggctgcacaagccattatgtcatgtgaggatacgttggtgaatttacaggaccagaaaaacaaattgactgaagaggcggaggtggagctccgacgagccaatgaggcaattgaaaagctgaaaaccttcaagaacgaatgtggactgcctcatgtgcaaatggatgggcatgatcaccatgaaatagaactggtccatgcactgccc

SEQ ID NO: 26528 - DNA, 300 bp, Zea Mays
gatctggagttttagttctgctaatttagtgggagccatgcggtatggtctctttgtgatgggcgcagcgccggggatttgatctatgtagaactccacttctctttctggcggcattcctagcaattcttccgggaatacatccatgaattcttctaccacagatatgctttctgctgctagattaaacaccattggatccttggcgggtggctgagcctgacaagaaactgactttccttggtggtcagtgagaagaacggtcttatttgcgcaacttatgatgcccttgtgtttggt

SEQ ID NO: 26529 - DNA, 528 bp, Zea Mays
ttcctagctacgggtggactgcgggctgattctgtagttcttagggattctttaacaaaatacaataccgaaaggatatctgtgtataccagccattagatgttgatcgatcggttgggattagttcttagatttacgaaccggtatgcaaaactgaccgctgatggatagatcggcggacgagatttaattacacgagattcgatcgtgttccatggatcccgatcggacgtcacatctcgattttggctgagttgatacccgcgaactgatctcggccgcacatagactatcagacggccaggaggttatctctcccatcccatcacaaatcacgacgacgttcgcggcccacgtggagcaccatcgccagagtgaagtcctcctggggctctggtgtcctattccctgccctgattgattttacacgaagaatagatggtggcagacaacatgggaagcttctcacctgctttctagtggcagtgagccctagcgccgtcgtggtgcagatcgactacacccgcg

SEQ ID NO: 26530 - DNA, 393 bp, Zea Mays
gttctaggccctcagatcccagatctacgctcatagttcaatgaatctagtgcaagtaccgatcgcccgatcagatttgacggtcatgatttaatgtatcaaatcggtaccccagcatgtaatctcagccatccaccgctggatcaatggccgagatcacacgccctaaatacaagccaagcacagcgacgacgcttgcctcccacgacggcgccatcaccggccagcagccaagcagtcccggcgaccgaaatccttaatccgcgaggtgtctaacatagctagggaactggtgagtacggcaggggcttcttatcgaggtattgcatggtgcagcgtcctattgtcgacgacctgtggcacgacggtggagccccagtctggcgagcaatt

SEQ ID NO: 26531 - DNA, 666 bp, Zea Mays
gcggcggacatgaaatcggggttaccatgatcatttcccctaacttaattgcgcttataatcaactacggagctctggccacggtggccgtgagcatcgcggcaagacagccgtgttcccggtgatgggtggcggtctagttcgattaaaggggtcggggagcatcgcagatgcatgagaacgctaaaacaagggagcagaagacgggaactggccggagtatggctggcgacggtgaggctcgtttcacggtggcggagaacgaagttgggggaaatgagcaattctctggctatgggggttaatcggagacgggagtgctggctgtggctttggtacgacctagagcagctggccgggggatcaatttataggcggagcgagcggtggcgcttgaattgacgatggcgcggtggcggccggagatgaggaagaagcctagcacggtgaatacgtgtcctatagcgtggcagtaactctagtggtctacggggagtttagaggaggtcacggcaatgcaatggcgcgattgggacacgcggtggccaacgacgagggcacggcggcggtgggcactttaccgcgggcggtgagccaggggagatagactacggctagtcggagtggcgtccaggtcacgggcggtgacgatcttttgacgccgcg

SEQ ID NO: 26532 - DNA, 443 bp, Zea Mays
ggcatttctgctttgtctctttaggtgatgctagctgctgctaatagctaatatattggagggaagaggaaattagggtcgacagctagctgcgcttcagaacgaagaaacatcaatattatgacgcagaggcggcagcagagctagttgcatgagcttatgatgttaaaattatccaggaataatgttgaaacagctcgcaagtacttttctcatctcttccggtatctgcaaaacaaaaaggagaaaatttcaagaggtttggctactgaagaccctcgccttatcaagaatcgcaccgacaatgtgaaaaccaacacaaaacttcacgataggtcttctactctcagagattccttttcaatatcatgaaccacatatatcttctcgaacatgacaaatattcgatataatggcaacatcattcaaatcattgttggggc

SEQ ID NO: 26533 - DNA, 321 bp, Zea Mays
caacccgtgcccaagttcatgctctacgccatggctagggaaccgcagtgtcgcccgtgcccatgcctataagtagcgcctcgcccttggcctctccctccctggccactagcaaaccattcctcgtcggaattcaccgcagccaagcacaccaccgcctgcattgccacccgagcgccaaccaccgtggtccgacaggtgcagccaccctacaaccgagcaaacgccaccaaaagcttccctgagtcgtagtgaagctcctcagccaagccattcaccctctactcccctccagcaacgtgccaccgctcgtcggacttt

SEQ ID NO: 26534 - DNA, 831 bp, Zea Mays
gctgaaaagagatcgatggcccagcaggttcgggtttctgactccacgcgcatgtgcatcggttcggttcctcctctctttaattttttctatggctgaaaggagaatactctcgatcgccggtgtggtagcagaaggtggtgctccggatctccaccatgaccgacgacaggacgaagcagaaggccatggaggccgtcgcggacatctacggtaaatgaggaaccgcttgctctcgtttggtttggcatatatatatgcagtttactcaatggattttggatggggaaacatggccgtgaaacatgctggtcctctgcagctgtgtttcattattgttggccttattaacttgtgttgctgtgtgagctagccttagctagagctgctagcttagcttattagctgaaaactacgttagctagctagaatcaggaacgaccaatttgtcgtcgtgactgaactaaactattcgatccttgtgatcatcgtatcgaagctagcacggggtcacgttggatcgagagcgatcagtatatctagctatagaaaaccagcagccaaccaccgatcgtggtcgtgagtgaattgctactttgctagctttcttagctgacatgattgcgttgtatatatatagtataacctgttgatttgttcaggcatcgactcgatcgcggcggacgtgaaggagaacaagatgacggtgatcggcgacatggacacggtggccgtcgccaagaagctgaagaagctcggcaaggtcgacatcgtctcggtgggcccagccaaggaggagaagaagcccgacaagaaacccgaggagaagaa

SEQ ID NO: 26535 - DNA, 948 bp, Zea Mays
gaacggcccccgcgtttctgtcaaactgcgaatgggttcagacactatttgaatcagtcactgacaacttgcagataagcccccgactttctattccttcacacagctaagtccctgacggcgtggagcacggccgagctccggcgagctgtctgcgccggccgattgggacaaggactagtgcccagctttggattaaaccaaattcgagttctaaggaccatttccccccaatcaatttcatatttggtgatctatttcgctctgcccacgaggacagcacgtactacggctaacccagcgtgttcctggtgattggtgacggtttatttcaattgggcgggtctatgagcatcacgggtatgtgagatcactcaaacgagggagcagaaggtttgaactgacctcaattgcacaggccacggcgaggtcgggttcacggcggcggaaactgtgattgggggaagtaagcgattctccggctatagtggctaattgagggtgtaggcgggtgctacagcttcgcaatttagagacgaagagttgtgctcagttgatttgaacggagagggtgaggaggcgatgaatttataggcgcagtaagccactgccatggccatggtgataaccattgccggtctttgctggcgatcaacggcggcgtcaagcaatagccattcttacgggcttgccacgtccctgccgcgacagtaacgcagtcacatcagtgcggtgtggatgaacggaggggagcggcgccgatgaccggacacggccgggaggagagatggtcgcgtggcagccggagttagtgccctccaccacgacgatcttacccggagcaaaaagatcttcgcccagagatgctcgccgtccgatcatcacaaccccggcgcaaatcgcggcgcggacaggtcgtcggcggtgaggacagccgcgctggcggtc

SEQ ID NO: 26536 - DNA, 511 bp, Zea Mays
cgaccgttgtcacactgaatgcttttaattgtgcaaccaaactgagtacgaacgtgagcaaagaaatcagacaaagcttgaaaggtgtcagatttgagacgcagaggaaaggtccatgtaaaatgagagcaatcatcaagaataataaggtagtatttaaaactagaaacactgagaataggagatgtccacaaatcacaatgtatcaaatcaaagtttttgacagctctagagtgtgaaggaacaaaaggaagccgagtatgacgacctagctgacatgcatgacagagactctcaagctcatttttattacatgcagggatcaacttggataaagcctcaaatcctagatgaccaagacgttgatgccaaagcgtggttggtgtagcgccagctagcaatgcatggggcgggtgatgcgttgggagatgaagaggatacaatcacccagtactattgcacctgacgatcaggttcctagtgtccagatcctttacagaaagaccaaaag

SEQ ID NO: 26537 - DNA, 343 bp, Zea Mays
gtttctatttcagatttcctggaaatgctattagtggtaaggactaaggagttccctgtcggttcctctgtttgtgttgtggtgccagccaatcatttcaagaacactcagacttttttgtggttgtcgcttcctagaggatttacttttctctagtgggatgtgatgatagcatggacaatgtttggacacttgaagcttgggagaaagtaaggatgcaacgatagcatggacaatgtttggacacttgaagcttggtagaaagtaagacaagttgctgtattaagctgagacttttagtgtttcaatgcaggaggcaaacagaaattggtttaagtggatt

SEQ ID NO: 26538 - DNA, 357 bp, Zea Mays
caggaggaacatcagaggcagcctcccccgccacccccgatgacagtggagcagatgttcttgatgcaaactcaggcagtgcaggctattgggcagactctggcagccatgcagcaagctcaacagcaaccccaaccccagttgcaagtacatatgccctagatgccacgagataagcgtggcgagttcatgagagggcaccctcctaccttcgcgcactctgccgaccccatggatgtagaagactggctgcgtgcagtggaaagggaactgcgcaccgcccaatgtgacgacagggagaaggttctgtatggaccccgccagctaaggggagcagcccagtcctggtgggagtcc

SEQ ID NO: 26539 - DNA, 458 bp, Zea Mays
cgtggatcagcgactagcggtctcacctaagtctcatcacgctccctgaagcgaggtggaggaaagggcggagcggaagcgggagcaagagcgggagcagtggaagctggagtggtggaggtggtgggcatagcgaaagtggaggaggactctggagtgaccggagctggcgacgtgggaggtggagtggaaactatggcggaaagagtgggggagtagtggagcaaggccgagacacgaggcgacgaactcgatatgtaatctgatcagatgaaatctacatcttgcctcccctctcagcctggtctgctgctgctgccgctgcaagtgttgcacgagtggctctgtccatacgtatattctttcttcgctcctgctgctcaagatagactgtcttccatttgacctgcctgaaggggcgaggagggtcctcgtcgtctcctccccctgacggtgtg

SEQ ID NO: 26540 - DNA, 491 bp, Zea Mays
caaattttaacacaagtaagataataaagttatataccacttttctatagcacatatctacagaaaacataatttagttcatcaaacatacaacacaccgaaaacagtacgtgcagcccaaaacagcaatcaatacatttcagctcctatacaattcaagaatttccgcgttctagagacttgaattattctaacgctttaccatttgttagagttaaattaatcaaattaggaccaacaagtagacttactaatttttatacaagttatttcgcgcgctagaactaccatacaccattaatcaaaacattcaccacaatcatcaaatccggcatatatgtatatcaaaacgcttttcacccactagttcgtattttagcttagacaccacatgagcactactaatttttacccgcgaccataaccatgcgcatctagactacaacaagcaaatcatcgtgactatgagcttaaccaaagccatctagcaa

SEQ ID NO: 26541 - DNA, 314 bp, Zea Mays
gggtgatacaccattggcttggcgtgagagtcgggtggtgtacccacccatgcacatcactgatagacatgcacatgttgggcatagcgatgaactggcataggcgagggcactagagagagccccatgggtgggagcgatgtcaaaggagatgccactagggctgaaggcggagccacgaaggtccctagggacccaacatgggttgacaggggtggcacacgggttaataagggccaacagggtggctcggagggaggctgggggagcaggagccatgagggccatcgggtcaccgactgaagctgtgtttg

SEQ ID NO: 26542 - DNA, 375 bp, Zea Mays
tgggaaggacccttcaaggtgacggaaatgtgccgacccaggggtaaccaccttgctatagctggagtacctcttcctaacccctggagcgtctctgtaagtactatccataggagcaagtctgaggggtcgagtttttctcccttttgtaattaggttgtgcacacgtgtacgccagcccggtgaggtccgccctcataagcccggtctgttggcctgcacccatgcatgtcgagttataaagagaagatttacccccttagacgtgcttctatgacagtcttatcctcctgcctccaaggttttaccctgcagtttccggatattattttttatctaacccacccgtgcagttcccatctgttccggcatgat

SEQ ID NO: 26543 - DNA, 271 bp, Zea Mays
gttatgatggacatgtactgaagttggatatttgtaatgattatcaccaaggtgtgggtatcccctgtaacttggtgtagttattaataaagtcagttatttagttgggtaatccaattgtttccactttcctctttatctgagaagctatcagtgaagatggtcaattgttcagttctatgaagattttctatacatcttttcttatgttgaaagactgcagagtcagatttgatttatgtgtgtgatttctatagatgtctgagaatag

SEQ ID NO: 26544 - DNA, 288 bp, Zea Mays
ggttacctggtgttgtgttagggcgctctggcgagccctccgccatggccttgggagaaaattgtgtctggcatccgtcctggtgagaagatgggggcccaaccgtcaatcctgggattgagggctgggaggaagagagcgagtgtgccgtcgatcggtcgttgggcggccacgattagaagcaacttacccctctagcttgattaaatcagatacgtcgagatcagatccgagggcttgggattcgtcatggcgtggatgttttggggctacagatctctgatcctg

SEQ ID NO: 26545 - DNA, 529 bp, Zea Mays
ctgtcaggcgctctgaatctggttttcgatggtacagtgttcggatcagatcgccaggttctgttcatctcgctgccggtgatcccgcgccatgatcttcgtcgccgttgcgattcatgctctgtggggtgcagataactcataagggtaagaaatatcgcatcgtggatgaactcacgccactattccgctccggcctccgtactcgcctgagtcacgaccgcttcggataaactcaccggagttagccacctcgcgaccttgcaccatgttctttggtgctttaaccatgtcgcagtgagtcaccttagccacccgttcatcgccggtgagtttgccatggtgaacgccacgaattgcttgcgctagtaacctcttccctctccggccgccaccgcgccaactccaaatcacaagccaccgtctccgaatcctataagttgagcacaccctcggctccgctatgtaagtatgcacccaacacacccactcgtgccgccaattactcaccagagagcctcaatttgaa

SEQ ID NO: 26546 - DNA, 601 bp, Zea Mays
atgacagataatgacggatgagactcctgtaattgcttctcagctttcagtcgagcttcaccaatgcagcgttgaagatgtcttaacctctcaggaataatttcaaaggttccagtcaaattgcctacatacagataggcggcatgcagaccaaagaaacataggtaatatgcaacctgttttaatgcatacagtacaataagctccatcttatcttcatatttacagcagctatacaggccttctgaaccttcccctgttatcagttcaagaagcttttgctttgaaatgcttaaaccttgcccatcggagaaagaatgccttaagtatgcactttcttgcaaagcagatgtataacttacatggatgtcattgataaggccttggataatatctgagaggttgacaggatgaatttctatgagtttgttaactttaggtctggttgaaattgaagctgcttgttttgaagaggggatgtctaaggtagaaatatcctcagcttttctcactttattagtgccatttctcacattcaagtagaagcttagcccattggactgtgacgttgactcaaacaaggatgattccttttctgaac

SEQ ID NO: 26547 - DNA, 449 bp, Zea Mays
tggtaaccaacccgggggacactcaccagtctgctgcctgtctgattcggccaagagactactgtttgtggccctagctcagtcagacgggagtaggaggctgcagttggactaaacaagcaattttgccccgtatcatcaggtgcacaaggtcattatcttagaagactgcaatgagagggccaggcataattgagatgagatgagatgtgtgtgacatgccaccaccagtaccgacgtctcctccacagaacagaaacaggcatccggcggccggtagcgagcatatctctgtcgtcgtggactcatcctggacctgggactccggctagctactcgcagttgttttatgctgctctaacctcctagtgtttggtgccggggcattttcctaagctactcgcggatcacgcagctaccggactggctactcttcttggcattgggcg

SEQ ID NO: 26548 - DNA, 413 bp, Zea Mays
attgaccacgccctccgtaccacttgttgcacacaccacaacagcaccaccaacctagcacccccagtgcctccactgctcagctcccatgtaatccgccaaccccgtgcctccccatgacaacacaggcacctgtgcagctctcctgggccaatgcatttccacagagagcacctgtgagactcctcgcccatgcccttcttaattgatcccatgaccacacagttcctagccggaacaacatctgcatcgctgtcgagctcttgcctcttccttggtgcagcgccatgaccgagccttcccaccacatagtcgagcaaagcccgctgaagcgtccatgaacgacctgcccccgcgcaccctccttagctacatccgctccgtcacctctggccactgtcgctctagtgttt

SEQ ID NO: 26549 - DNA, 609 bp, Zea Mays
ccatggtacagtgctctgagtggatcagaacgccagctcagctcgccatcgatgatcgtcgtcccggttcgtgcatggtataggatggataacgcgagggagggataactcgtacgtggcgccatctcccgagctcaaccggagttattcaccggcggccaccgaaccagtcgtttctgccgcggtgtcctctgcaccgtgatcctacctcattgtaccactcctctacgtgctaggcatgcactaaagaagttatctgtggctgcgaagtgatcactggaccactgcggctataaatagcttgtgatccatggtgaggtatgaacatcacacacacagtgggttgaatcgaagccaaattcgcgctgcctctgccccctcctctcaaattgattgttcacggtaaaactagagtcccttgcagctgtatagccccaagcaccaccctcaatttcacccgagcacgccacgacgccgttttctcccaaatcggtcagccgcgccgccgagaacagcgcgtccgaggccagcccgctctggtaagattctgtccaatccaagcgttgttttagtagctctgcgtgcttgtgaagcttgtcgtggcaaccg

SEQ ID NO: 26550 - DNA, 331 bp, Zea Mays
attaaattcaaggttcacagaccacaaggaatcgacctagaatccatcaaacataggcctagaaagttcaattcgatcatgtcgtggtagttgcaattagggcgaggctagctctccactgcacttgtgtacaagagtaggtttggagttcatggtgctagtgtgtgtaaaattgtagatctattgcatgccataatctattgtcggtaagagggtgtggggtattatgcacactatagcccaaacctctataaaaatttgtgtgttaagctcttgatgtcatgatcgcatagacgtactctatgaggctaatacatgctccatgctcgcc

SEQ ID NO: 26551 - DNA, 423 bp, Zea Mays
gtctgcaatctctcccccagctgggaggaacccttcaaggtgacggaaatatgccagcccggggggtgcccgccttgctataactaaaggagtatctcttcctaacccctggagcatctctgtaagttcaatccataggagcaagtctgaggggttaagcttttcttcttttgtaattaggtttcgcatatgtgtacaccagctcggtgaggtccgcccttataaacccgtcctgttggtttacacacatgcatgtcgagttataaaaaggagatttaccccctcaaacgtgcttctatgataactttatcctcctgctccacgaatttatcctgcagtttccagataatactatttatctaacccacacgtacggttcccatctgtcctgacatgacgacatccgaattgagtagccaggct

SEQ ID NO: 26552 - DNA, 511 bp, Zea Mays
ccgaaatctgaacatcaaatgtcacaggataatcgttagtaagcagttatcaaattgtcttgattacagggggaagtattaaccacagacgtcgatgcaacctaaaccctaatcagtacatgggggatgaccagatccgtaacagcacatcggggaggagacagggtacacatggaagttacgaatgcacctgcgaagacgggatacgggaggagtccaaccttgcggacgaactggcggcggcgcgggcaaaaccctagcgacgtcaacggtcagggaggtttccgaaacgaggcagccgggggaggacgacgatcggatacggaacagaatggaggaaatgatccgcgtacctgagaacacgacgatgcggcggatgagcagaggggagtgtggtcgaggtccccgacccgacggtggaggaggcggcggcggcggtcgagggagagagctgagtcgcgggcaaggtggaaaccctatcgcgaatagcccggcttccagaggacgcgtg

SEQ ID NO: 26553 - DNA, 356 bp, Zea Mays
cggtgctctgcgctctgatgatcaccaccagttcggcgaagcgtgcacgttacagcatcgtttagatcgtgtaccgagcggcgagtgatccacgatggtttcaagtgttgggtaggaccagatttggcattatcaccgaccaataagagcgatcggcatctacttgtccctagccacatacgacgtgtgttgggtaagctcgcaatcagtcccctgctccagctctcagtctcttcaaggcatgcacaggtgcgcctgctgcgaattcctcgcgtaattagtgaggcagcatctccttaaatggtcacagtcagtgaacggtctcatcaaccctcgcacaaaagcattactggctg

SEQ ID NO: 26554 - DNA, 287 bp, Zea Mays
aactcttttaggtatgctggtatccagtctcgacacatcgagcctacatctcagggggaccaggtaccagggaggagtcggcagcgctagaccactgggaggttggagacaaagagcgcaaactctctggcggtgagatcgctgtgaagagaggcgctgacacagatccttctggcgaacgccggcacaccccatcctttgcgcaccaagttgagtgccgcctcgggctggagacactcgggaggatctagcaaggccatggcggctacggcggcagaagagcgcgg

SEQ ID NO: 26555 - DNA, 345 bp, Zea Mays
gacagacttgagcaagtttgtgatgcatgtactttgggaaagcagcacagagcaccttttccaaagacatcgctttatagggcaaagaggggtctagaattgtttcatgctgatctatgtggccagattagaccacagacagtaggtggaaacctctatttcctattagtagttgatgatttcagcaggtttatgtggattgaactcctgaagacaaaaggtgaagctttgtcatgtctgatcaagatcaagcagagagcagaagtagagctagaaagcaagttgaaagccttgaggacaaatagaggaggagagttcaattcaaggatgttcactacattttgt

SEQ ID NO: 26556 - DNA, 283 bp, Zea Mays
gcctagctcgcgggaacacactggctcttgacattgcaggccagggttacccagctccggtgggtatgactgagggtgcttcagcttccgaaggtgccgctgaggataacccaaccctcgagggtggtgttgaggatgacccaacccccaagggtgctgagcttggttcgtcttcggctgcttccatggacgttcatgtcagatcgccaccggttcaatctgaggaacttgatgtgacgagtcctcctactgcccttgtcggttcggtcactttagaggccag

SEQ ID NO: 26557 - DNA, 463 bp, Zea Mays
gaagaatcaaatctcgagcatgagtaaaagcctcatccttcgcctccatgaaaacaccaatgagtagcgagaaaaatcatcaacagtcaccaacacataccacttccccaaaaagatcatacctgagcacttgccaggttgcttggtcatcaccttggcgacgggggaatgggaagcagcaaccattttaccatgacgacaagggtggaaaataagatatttttcatatttcaatttggtcaatccttggatgaggtcaagtgagcttaattgagacaaaagatcaaagctcaaatgaccaaacctcctatgccacttccaaatctaagagaaagaacttgccacaagacatcgagaagggtcacaagagtgggaaaaatcaacacgaaaaactcatccaaatggagaaatctagcaaacaagattttccttagcctccaaaacaagagaaagctccttaaag

SEQ ID NO: 26558 - DNA, 608 bp, Zea Mays
agggaggtcgacagctgcatgaaggatcaaggattttggaatcaaggcggcggctgcacaactagcattactggactccatgatcatagatatgacccacatgcacttgctcctaattcagcacaacaaatagttttcttatggttcaatccacctaacccacctagaatcaacccatgaatcagtgagctcagtggtggaggttgacgaaccaaaagcataagaactaagcctgatgcaagtcaccggcttttccaatccaatatggtgatcattcaatagagccccaatgcataaaggccgtttaggattgcatctttttcggccgtgaccatttgatcaatgaatcaaaaggaatagaatggaggtgcccccagcctgaatagacaaagggagtacacatgtaccatgggttcatcgtcgtaccattccatatttgaacaggacaacacatcgacgatgagtaggtgggtggaaagcatcctggcatgacaggacgaataggcgatgcttgttgcatcgtctttcgggccattttactcggtcgttttgttttagtgggtgaccggggtttctttgttggccaatcacgtagaaaagccttcttg

SEQ ID NO: 26559 - DNA, 299 bp, Zea Mays
ctagtttggatatttttcttagttgagttgttggatgaagtatagtgacattggttaaccaagtattgtgttgttgtggtgtctgtgctttttgtggagcttttggcaattcttcgatgacctgtgccacgcagaatgttattggctttattgctccattagttatgcagattttctcccttttgcggggtgcaaagaatgttagattacatgattatcttttcatgatggcaagaataaggtttaggaagattaggagttttgtttcaatagaactacttgtttcgtggtgctttgag

SEQ ID NO: 26560 - DNA, 770 bp, Zea Mays
cgtaagtatgtttctaagcattgattaaccctttcagtttgtccgtctgtttgtgggtggtaggagctgctgagacacaattgggttcctattaagcggaagagctcttgccacaacttactagtgaaaatggggtctcgatcagatatgatagcagcaggtagcccatgcaatctgtacacctctgacaaatacaccttagccactgttaaagctgtgaaaggatgtaatagaggtaggaaatgggcatacttcgagaacttgtctaccaccaccaaaatgcaattgcccttgctggaaggaggcagtccagaaatgaagtccatgctcacagtttgccaggcttgttctgggactggcaggggcagcagtaacccggggtatttgactctttctggtttagcttgttgacagatctggcacgaactcacaaattcatgtatatgtttcttcatgcccggccaagcgaaattagctttaactcttctatatgtgactggaaaaccggagtgtcctcctacgacactgtcgtgtagtgctgtcatcaccatttgttgaaccacttgattgttgcccagccagattctgcctttgtaacaaattacaccattagtgagtgtataatgttcctgtttttcccccatggccaaactgaccaacagttgttttgctactgagtcattttagtacccctgagtaacttgtcgtaaccagttcggaaccacaactgatgtcgaaacagtgttgagctgtgtattagtagcatcttg

SEQ ID NO: 26561 - DNA, 428 bp, Zea Mays
gaaactttcaagggaagctacaaataagttgttttccattattgttgttggggaccagcgcaaagtagctagagataaagaagaaagtatttacaatatgctcgtggcaaggttgagcgcggtgtggtatctttggtaagaagttttgtgcagatgatgagggactgttagaggtgaactagaggtgcatcttgtgagcaactattgccttctgatgtgaggaaaggactggaaaaggaagaagttggccagaaatccctgaatagtgggaagccctgccacagaagtcggtaatggtaatggtaatggtagcgccgcgatatcgaacccaaccgatggccgtgatgtaatgtcacgtaattgtcaggtgagcctattcgggacagcaaggtggcaacgcccaggggaaagcgcatggggtaggaaat

SEQ ID NO: 26562 - DNA, 369 bp, Zea Mays
aaaatctgagccatggatctacgatcctacggtctttgctccgtacatgtttgttgggggctgtgatttaatttgagccatgggatgcagatcgggcggctagggttaccccgtacccctttggccttgcctcttttgctaaagagcccctaacctttattgttataaacccgcagtccacttcagttcaacagaaaatacaatccggtcctgaaatttatgagtttgaccctgtgctctcgggtaattatgtccgtagtccagagctatttgtaatattcataactaaatcagaaaaatgattattagtacaaaaataattccagaaacttgtttaattcataagtaattcattttaactcctttttg

SEQ ID NO: 26563 - DNA, 390 bp, Zea Mays
ttcagaacaaatctatacatggaattataatgttccgaataaaatactttaaaagctatcaatagttaaaaattgaagatattgattccatgtatgtccaaaatgacatgtatttgtgatcgatcattgaaattagtactacattatactgattatttaggatatactagggaaaagaacatgtggcatgagtgagggattgtgttcagttgatcccatggtttttgaggtgatgtgctgtcctgtggtgctgggggtacacctaggtgatatggtgtaactaacacttgtggcatcctgtggcatctggggtacgcctggccacctagatgacgatcaaaacacaatggttgaacctagtgaatagccccttacctcttttgtctaggt

SEQ ID NO: 26564 - DNA, 506 bp, Zea Mays
ggcaaacatgagtaaaactctcaatctgggcagattataatcccaaacaaacaccccattaactaagttgcaaaattctcaaggaaaaaactactgaggttctatttccgtaactgctcctaaatgagatatataattttcatgttaatcgaagtaagtgatgcggccagcggataacaagacttttcaacgaatagaagtatctgagcgtaatccaaaaaaaaaaaacaaattgctaaagtcaagagagatcattgacaccatgtctcacatcaggaacagtagtgcacagcattccgtagtgagcagagcactgagcacaaccacgaggatgacacgagttattagttagtacagtcgagtttgacctttccacctcggatgtagatctcccagggcgggtccaacagagtggaaccctccagcctccacgccgtaataccctcacaaatccgcaaacactattaggaaggagtgatagtagtagcagctagcaagcatattcc

SEQ ID NO: 26565 - DNA, 433 bp, Zea Mays
cgcctttcttgccgccacgcgtcccgcgcttggggttgctggggggatgatgtggaggcggtggctccggcttgttggtcgggggcttgtcggtggtagtggcgagaagagcagaagctgggactgtggagtgatgcgcaaaagtgagctcctcaagcagcagatcatttcgtacctccaggaaggtggggagacgtcgcccgcgtcgaagatgaagaccaatgctggtgaaacgctcattgagaccgcggatgacgttgaggatgagagtgtggtcagggaccggctcgtcgagatcatcgagggcgttagccatccctttgaacttgcggcagtagccggtgatggagaggtcgccttggcggaagttgcgaaactccgcgtcgaggaagagagcccgggtctcgcgatttccgagaaactgggactcgat

SEQ ID NO: 26566 - DNA, 338 bp, Zea Mays
aactcttctcatcgaatctagtggtaacctgagtaggcatcaaggaaagacagggttcctcatcccgtagtggagttgatgatctgatcgatccgaggtagggggtagggaactttcggacatgctttatttaaaccccgaaggagtttccaacgagggtccggggtgccgtgtggtgcccgcatgcccccgagtggattttgcctcacaattctttgtccctggatgatggggatacatcgctggaggattcccgagggactgcgtcgatacaactctttttcttctctaagtagcacaaaagcttttgcacgctgagccaggcggtgagcctcagc

SEQ ID NO: 26567 - DNA, 301 bp, Zea Mays
gtcggacaattccggcgaggaattccggccgaggagaggaggtctcaggcgcgctaaggcctgggctagctacaacagggtaaggggaacactatgggctaacacagaggcacgggatcaggctaaaacaaccggccactgcgcgggcacgccaaaccaacacgaccatcattggcgaagttaaattggccaataccagggggaattgggagaaattgagtgtggggacggacatctcactttgggacgggactcgaggtgggttggcgtggctcggggagactctggttggctggacgtc

SEQ ID NO: 26568 - DNA, 370 bp, Zea Mays
gtgacggtgatccatgtagcagattcgcgcccgatgaatctacgtagaatcccggggccgaggggttgtccatacgcccgagcccccgagggagaggccgcccatgctatagtggttgtaaacagcgtcggggtatgggccaaaggctgcttacagggtgcgtcatcatcctgtcgtgtgatgacgtcgagattctctgcagcgctcattgagatcagagtccctatttggttgatgcagaagtcttcccgaggcgctggccgagccatgcgctacagtcgggcagagtggctgtctgcaggattcgcggcagtcggtggccgaggctgagctcaggcaagatagagaattttcccggaaactaagcccg

SEQ ID NO: 26569 - DNA, 504 bp, Zea Mays
atcggcaccaagcctgtcttcgcctcggtgtaccacccacagtccaacggtgttgttgagcgcgccaacggcaaaattttcacggccatcaagaaaaggattcttgacgacaaaagggcaaatgggccgaccaattacctgaagtggtatgggccctaaacacgacagagtgccgggcaaccggattcacacctttccgcctcttgtatggatctgaggccatgacaccgcaagaattaaaacacgggtcccctcaaaaaaacaaatcagtcgtccccgatgtcgacgaaccaacttccaaagacctcatcgatggagaccgcgtctttgccatgcacaaaccctcgacaaatatcaggttcaaaccaaggcctggcacgacaaagcagtcatcccaagggaattcaacgaaggggaccttgtactcacaagaaccacccggacagattcacggggcaagctacagccgaagtgggacggtccattcatagtcaagacaaagac

SEQ ID NO: 26570 - DNA, 375 bp, Zea Mays
agcgaagacctgtaacttaatggggtgagaatgaggatgaaagttcacccataggatccagtgaggacctaaattaggagtcagtcccttcacttgcatggtctattaaggtcgaacctaacaaatcgcctcaccatgactccatataatgatgcaaaatcctcactcgctaactctaacccccatttccttcactcgaatgtcgttgtcccatatgtcaagcctgatttacgtgtgtatatcgtaatatttatactcaataatttatccccactgctcctcgggatcgggtcctcgacagagatggaaaagaaatacttctcgttatgcattttgggtttggggagaggaagagattcggggatcaggacaagg

SEQ ID NO: 26571 - DNA, 346 bp, Zea Mays
agccaaagctttctgcattacgtttcgaacaagcatttcaccgctgaagcgcaacttcgtttgcttagagtctaaacaacaaaatgccagagtaagatcaactgctagggtgacccatcagggagatgagactaaaacgactgagatagctcccatcttagaaatgataaggctttctgggttggttgtgtaggaagaaactattgccgaatgtattactgatgccgaagctgaaaaaaccgtggctgaagctaaaagtgaaaatgaaagtgaggatgatgatagtatcctatgtctgactaagcccagccatattgaattcgggagatccacagttaaagctgag

SEQ ID NO: 26572 - DNA, 536 bp, Zea Mays
caagtttggggcgccaaggttggtttttgaaagcatagcagaagccgaagctactagactggaggatattgatgtactcgaagaagaacggctgaacgcagtaattcaatcagcacgataccagcagactctgagacgctatcacgacaaggccgtacgacgacgatccttttcagtgggggatctcgtcctccgccgaattctaacgggggagggacgacacaagttgtcacccttatgtgaaggaccattcaaagtagcagaagtcactcggccgggaccgtatcgccttactcaaatggacgacacagaaattgggaactcctggaatatagaacacctcaggaagttttatccctagctgtatttcaaaagctatcgggacgacaatgtactctgtaaaatgagagatatgtcatcaataaaaaaaagggggcttcaagaatactcagtttgttcatgattgacctgcattcttatttaactcggggtgaccactatgccctgctaacggagcaatcggcttaagtcggcaa

SEQ ID NO: 26573 - DNA, 327 bp, Zea Mays
ggattcctgtagctgctcccaaaaatgtgccacaaacagtgctcctctgtcagatacaatggtcttcggaattccatgcaaacgcactatctgatcaacatagatttctgcatatttctctgtcttgtaggtggtatgcactggcaagaaatgagctgtcttggtcaacctatccacaatgacccaaatagaatcatggtgccgggaggtattgggcaatcccacgataaaatccatgcaaatatcttcccatttccaggatggtatgggaagaggctgcaaggtgcctgctaccttcaaatgactggccttgattctctggaaggt

SEQ ID NO: 26574 - DNA, 723 bp, Zea Mays
gtcggggcaagaaaagattgaatagggtatttgatgcaattggcttcgtataccctgattatcactacccactacaaaggcaaggaaataagaggaagattgccgctttggccaccacagctgtgtcgaagggcaaaaaagtgaaggttctgacccaccggccgcgatatattgaaccggtcgtagtgcctgaatttggggaagggacctcttcaactatcgaaacaaaacaagctgctccgattgcgcagagcgccgaagagccgattgtagtgccgaaggtgcctacagtcgggccagccgaagccaaagatggtgcggccgaagaaccaaaagtggaaaagatagtgaaaatgccagaaattctgagcccaccagcaagggcagaattgctgaaggtgcaaaaagctgctgccgcaactcccaagaggaggaggatggccagcatactagacgctgtcatggagaccacgaaggccttgacccttgcaactaccaagaaagctgccgaagttatcaacgtccaggccggagctgaagctagatcttcagtgtctattgagatgaaggctgccgcgcctgaggataaaactgagcaacaaacttcagataccggcatggtggtggggcaaggtataacagaagaagcaagatctcgtgcccccgaagcttcgtccgaagatgctgattacattattcgacatgcttcggggaaaaaattgt

SEQ ID NO: 26575 - DNA, 717 bp, Zea Mays
ggaaaaggagaagagatatattcaagagatgaggcaaaaggggaaagaaataaatgaggtatccacgtgttagggcggatacagatagtaggtttggtactctagtgaaagaggtgataaaacacacgctaccttgtaaagcaggagtgattataaaccgtaaaggagtcattgcaagcccgcttgcccgttccttcatcttccttgacccacaacacgatgagatggagatctagtatgatggtatacctcgatggcgtggagccgaatatctatctaaattcatcatgctcgtctgcatgttccttcatctatcttgaccgacaacggatgatattgagaactgtgaaatactttaacggtgtggatgcagatctccacctagactcatcacgcatgcctccccttgatctacctcgatctatagcaagacgaggtggatattgtggacaatgacatagctcgacgtcatggaggtggatcttcgcctcggtttaatatgctcgtgtgctccttcatctgcctcaacctcaacatgacgaggtggagatcgaggatggggacatacgtcaacaacatggaggcggatctctacctctgatccaccacatccccatgcttcttcgtctaccccggcacacaacgcaaggtggagatcgaggatgatgccatatctcaacattgtaaaggcagatatccgtatagattcaccatgcg

SEQ ID NO: 26576 - DNA, 645 bp, Zea Mays
tagtcgacaaggtgttgattagtggttagtcgcatttaatcgtcgaacaggcttgattagtcgagtttagtcgttggtatagttgttctaaatatgtataccaggattgatatgctaggtgtacatttgtactatgcaatattattcaatagtcacttgtgagatttgatctgtgaactgtccatgttccaaactccatattgccgcgtccttgctgactcgctactgaaactgaaacaacaaaatgaaagaaaaagaactgaagtacgtagatgaaaaggaagagtgtaacaaaggagcagtacaatgctagagtcaactctagtctctagagcagctagccaagcccttagccaagagcagagcagtatacactgtacactatacactagacagtagaggctgtagagcacacaattatttgctgaaccatagtagcaagcatacaaccatagtaaccaaacaagttcagtgcataattatacagtgtcatcaaatgataaaagctgaaggctcagctcaacacactgtcgcactcgcacacaaacaccaacatccaacagttcttccaaagcagctagccatccatctaactagggatgtaaatggtacagatattatccgttcgaattcgattcatctaga

SEQ ID NO: 26577 - DNA, 626 bp, Zea Mays
gtactgtgaggagtaatattctgtcacaatattcttttgaagctcgtgcatgcctcgcaagattctgagttcttttatctcttcctcgttcatttctcttttgcaacatgtacagtgtgagcagtagtctagattcagtgtatatagtagtagcaggagtagtaagtaatgcatccgcagatcgacgagagacaacagctagctagcagggcccggccggggtgtccttaaaacacgctctgatctggaccaagctactgcatgcatgcagcgtagtactacgtacagtacagttggtatagctgctactgggtgtagtgtagtgtagctgcttttatttccattccatccgccatcgcttgttgcactactactgctcatatatttccggttcaacacagtgacgacgtacagtacagcccatgtttcgacgaggagacgtgcatgcgtgaccacgaacgaacgagtagcggatcgatcgaccccaatcatccatgcatcatgcgtcaccacgaacgtacgcagccgcctgctactcatccctgattcagtcgccaccttctgaaaaccccacgctagctacttctttccccgcgtacgtgttcgatcgaaacccatgattcaac

SEQ ID NO: 26578 - DNA, 274 bp, Zea Mays
gggcactcggctgattgatctgggcgagggcaggagtgggacgaatgaatacgggttgcttaaaaggatatgtgggtgggcgaggagaagaacagtttgggttgaagggacagattaccaaccttgtccgcttttcagacccctgagatgatccttcacccccatatctttttgactttccttgtcccgaatttttggcttcaactaatagtgttatgcttacagacctgctatagctaagatccagacacgtagccattttgcgctggagtcg

SEQ ID NO: 26579 - DNA, 744 bp, Zea Mays
cgcatgaataaacaaaaggctagaggctagcttaaaagattacccagacacagcctaacccactgatggacggcgggttagtttctaggttccacgggggctcttttgaaagaagtgcacggtgaaggggtatcgttgattcagagtcgtccgatcctggatccagggaccagattagatcccaacccaccaatacacccgagccgcggatcacgagatcgacggccatcatcctacacctgagttgggctgctatgatccagttgtggccgtccatttgcgaaccaacggatcagataccccaagcccaaaccggtaagagttatgcgatccggaacgtcccttcatgatccgatggtttaggttgcatcacgcgcagagatacgattcctcctaatctggcctgcccattacaagaacagcggacaagagccatcacccatactttattcctcagtcccaattctccaccgtcgatccaaggaccaacgaccactactcatgtcccccaaccaagctctcccaacgacggagcacagggcctgtacggcggcggccatggctagcaaacagcgccgatgaacccagttggcccaaaacaccgatccgaatagttctaggcatagaggaagataccgcaaactaagtggtggggttctcaccgttgcgtgtctcgacgaccagtttggccatggtggagcgcgaatcccctgcaatggcgagcaattgccgagccatcgtgtc

SEQ ID NO: 26580 - DNA, 388 bp, Zea Mays
aaaatcatggcaaatcccttgcccctcagtcagggagacaaccggacgttcgcacgcccagctgggtagagtctcccaccttttcaaagataaccgaggccaaagtgctacttgctgaaatctgcttgctgaaggataggggtctgactgctgaagttgtggttgctgactttttcttcaagaacattcaacccttgaaggatagaatttatctcgcttatacaccggcatcagtgattccacctggatcacaaacagaaagattcccaatgaggatttgctgagccgattggatatgattctgaggggaagggtttcgaatgctggtgctcctttggcttactctgcgtggaatctgcaaccaaataggtcattctctaaatttgct

SEQ ID NO: 26581 - DNA, 519 bp, Zea Mays
gactttgtgttttttgacagaggctgtaataatcctgcttcttctgctctagagaataaaagacctaggatgtccatggcgagaataaaaagcatgggagatagtggatccccttgcctaagacccctccgatgaataatgcactttcccgggaaaccattgagaagcacatgggtggaagaagaggaaagcagcccacatataatgtccctccaaatttggccaaaaccaaggtgcttcatgacatcaataagaaagggccaatagaccaagtcgaaggccttagtgatgtccaacttgaggagaagactagcctttttctgatgatgttatcctgtataaatcctgtaaccatgaggtttgctgaaccaacatgaagttatcccgtataaatccccctttatgaaagcactttggttgggtgagaccatctcatgaagccttgtagccagccgattggcaagggctttagtgatgagtttagtaacactatgaaccagatttataggcctaaaatcc

SEQ ID NO: 26582 - DNA, 280 bp, Zea Mays
aagggaagaagactgcttcgacaactgggggtaatgaggggggtcaaaagaaacgacagatgatggctgtaatgaagactatccataagaccccgcccccggtcttggaggaaaaagtgtcgcccctgctaatgtcaaaggtaatgttgatttcgaagctaatgaagctgcccctgaagctaaaaatagcgaaggccctcttggaaccacaatgtcagaaattgacaggattatagctgatgtggttctcgagagggaaatggatgaagtgaccactgat

SEQ ID NO: 26583 - DNA, 452 bp, Zea Mays
cccctttcccctgtgctaaaccggagttgtcgtcaccatcccaagctatggtcgcattcctgtcattgaggagtggccttcgagttgcaccttgaggtaagaaagcacacccgctcctcccgttcactaatttacacccccctgtgcccaatttatcgcaagagtcgtgctccacgtgaccactgcaccctcaccgtcgtgcacccacgtcgacctcatggctgcgacatagcctactcctatcgaatcgactacaccacactagacttgtcccacctaaccccggccacacctgacccctcttgcaaccccgattactcgctaaagctattttcaccctgatagagctgccatgccatcatccacacgatctcgggcaccccgccatgactgggaccctcaccgtcgagctcctcggaccaccctccacctccctagcccaccttacatgc

SEQ ID NO: 26584 - DNA, 352 bp, Zea Mays
cttaagttgagacacatgaaatgtacataagatagattatcaggtagctcgagttgataggccatctctccaacttgcctaaaactcagaatggtccaataaagcgaggggacaatttgcccttaactttaaatctcctcattccacgaagtggtgacaccttgaggtacacatgatcaccttcctcaaactccagtggtcttcttctattatcagcatagctcttttgcctggtttgagctaccccccaattctctcgaattatacgaacttgttttttttcctgcctcttgaataagttcaggtccaaagaactgtcttcctctagtctggtccaaaaatagaggagtac

SEQ ID NO: 26585 - DNA, 467 bp, Zea Mays
cttcagtgaccgcatcctggtgtgcctcggctcgtcctccgagatcttggcatatgccctattcctcctctcatcgttactaacagatatcaggatgctatccacattactctctgcaacagagcattgccgacgccagaacgttagctgcattgcatgaccgactcgttaaaactgaagcaacgacaacgagcacctggctatacctgacattctgtacaaaaccagctccgatgatcaagcgttccctctttgtattacactgcccgatcattgattcggtgcacaaggcagccccaacactgccattcaacggatcataaatacatgtcagaattcacagagtttgtgttcgcatcaaattcggagtgtattacattccagagcggtgggcggataaaacgagggctataagaggcttagttgaacacccagataaaatcgaaaagttggaccaaatcacctac

SEQ ID NO: 26586 - DNA, 282 bp, Zea Mays
ataacaccgaactcgccaaggttgatgccatagcagttgacgtggaattcttcggcttctatcatgatgtccacgtctcgtgccacgccaacacgcattccccattagccaccatcacccaaagagtggggcagggagtagtggctaatttgaggcgatgcatgatgtcgacgttgatgaagttggtcgtcgagccagagtcgagaaaggccaccacacggtggccatgaatgatcatgataggagcatgtcatgcttggtgcggacccccacgatggcgtg

SEQ ID NO: 26587 - DNA, 345 bp, Zea Mays
gccggcatgggcagtgccgcactggcggaccatctccgcggggtgacttggccatccatgttctggccacacctgccggaaaagtacgacggtacatcaaacccgtcggaattcttgcaggtatacgtcaccgctattacggcagcaggtggagacactgctataatggcaacatacttccatgtagccttgtctgggccggctcggacctggctcatgaacctcaccccaggatcaatctactcctgggaaaagctctgtcggtaccctgaatcaggggtaccctctcctacagtatgaaggcgctgcacccgtacgacacctcctggtcacacggagagcggc

SEQ ID NO: 26588 - DNA, 286 bp, Zea Mays
acttggtctggtgtatttgttatgttggtctggtgcgcatgtagtcggtctttgtgcggacagtttggtgtagtcgttttcgcacttgtttaagcttcatccggctgcacccttaggcaattgttgcacggatagtcttcgcggaagacttcgattcgtcgcacttgttgcgctagcccggctgcacccttaggcgtcttctgcacggatagtcttcgcggaagactacgatttttcgcacttattgtgctagtccggctgcacccttaggcgacttctgcacgga

SEQ ID NO: 26589 - DNA, 574 bp, Zea Mays
ctccacccgggctcgggaattcaccttgtaatcctaggctatagatcatgaatttacagcctagtccatagcccagtctcgctccacaatctcccattgcaaacggtcaacctctgctgacagctcggctatatggcggctatcacgcgcatgctccctgcttccatggcacagttctgtcgttagtcgttcaactctgacctctagatctcctatgggatcattacttctgctactgctcccctgatgtcaaggagccacgaggtacacctcgaggtccggtcgccttccgcagggtagtcttggtacgtgccatacctctataaaggggaagattacttattattgtttaactatgatgcatgcatgatctacaattatggaatcaacctctcgttgattccatacctcctacacatagactattatttggcactctgttacccgacttcaaagataagttgttataagaaagaatcaaggtacggatgaaagaatatttaaaggtaactattttaaaatcttttgaagcactaagtaatatcccaagaaatggacttcgctccgataccag

SEQ ID NO: 26590 - DNA, 327 bp, Zea Mays
gaggcctgcaagctcgtggtggaggagaaatcccctgctgaagcggcggcgatgcgccctgaccgcgctgcgtgcaattctgtcctttctggttgctaccgcgggctaggttcgctggcagatgcagagcgggtgctggagactatgtcggcggttggtgtctcgccagatgtagagagctttgggtgtctcgccttcctgtatgcttggagaggtgttcccagtcgggttgatgaactggatacattgtttgatgctctgggcttcagcaagaaggggtttttcaagaacctggttagtgggtacctcaaatctggtgacttcgag

SEQ ID NO: 26591 - DNA, 404 bp, Zea Mays
taggataaggctagttaactatagggagatgggaatcattccgaaggttgaaccaatgtaaggtgtgatgccctcgctgtacatatgtaactatagtttgtatgatgaggctgtgcgccttcgcgcatccggttatgtccataggggcattgcacacttggtctagcacgtttattatgtcggtccggctgcgcctgtagtcagtctttgcgcggacagtttcttggtgtagacttgtgcacggatagtcttttgaggaagacttcggttttgtgcacttgttgtgctagtccggctgcacccttaggcgacttttgcacggatagtcttttgaggaagacttcgattttgcgcacttgttgtgctagtccagctgcacccttaggcggcttttgcacggatag

SEQ ID NO: 26592 - DNA, 327 bp, Zea Mays
cggggttagccggatcataactctcatcatcactatcaaccatttcatagtcaacaccatctaaaggtgcaagttcgtcattaatgtcattgccttcaaggattactaagtcattctcattttgcacctcatcatcctcctcatcaacaaccatttcaatatctacgtccattccgatagcttcggttaagtctatctcaaatcgcccttctagcccatcttgttggaagaactctccatcatatgtgtccgggtctaagttataatcttcatcgttaggaacaggtaatctctcgtgcggcgataccttatacacaacatcccaac

SEQ ID NO: 26593 - DNA, 591 bp, Zea Mays
aaggcagcagtcattaactggtcctccttcttggtgtagttgccaaggatttcattgcacatagtttcaatcatttcaaaccactcttggcatggcttcttgaactctttctcaaacttgaaacggtaagggagccgaacaagttcgtgctttttgcccccatccttcttcttgggcatctgccagccactagaggtcggaaatactctatttgccaataattcttgcaccagattcctagtgctgacttcagccgctaccactctaaactctacttcggctacttggcatggggagccaagctgcatatggcacaaaggccttgtcattccgaagctcaatgtaagtgaactcatgaccatagtcatcagcttctccctctttttctcgtctgtcttcatataaaaccattcacttttccaaccagttggccacttagtacggtagctaagaaccggtgccttcgtatcctttcgatacgcaaaattgtagcaaccaaaattctcatgaaggccatctgccctggccttcgtctggtaatgcagctcgtgcacccgacagaaagctttggcattaggactcatcccctgg

SEQ ID NO: 26594 - DNA, 598 bp, Zea Mays
aataccggtatgcatagcatacaccaataggtccttgttccagaataaatccataagcagaagaattggaagggccacataaccaacatgtcaagaggggaatagggcctccaatggacccgaccggcaaagtgcaaagatagtccacataacaaataaccggacctccagccatcaaaattaaccatttcaggcagcacagagtcattgactccaacatatttaattgtatcaaacaggaaagagacctcgattccatcagagtacgtttcagaaaaagcaaaaagcgccacatgcgcgccaacaccaaccgttaaccaacaaaatagttgccaaccagtgaaaagaaaataccaaacgacccaaaagggggaggccaaagccttacaaccccaccgaggtattgtcttcatcatcattgtcatcattgaagtgagggtcccccacctgttcatcagagaagtcggattcctcatccttgctgtcggaggaagcagccggcctctgaatggcagtaccagtggccttggatctgttcaagtcttccggatttagcttggaaggggacattttacagaattcagcacccaatttcttg

SEQ ID NO: 26595 - DNA, 459 bp, Zea Mays
tctagtatcaccaaattttatagagcatgagcaatctaaaaatatgcaattactcatgacttaagataccaattccttgacttacagaggtaccccagtcctgattgctccatttcttgcttatcttctcttttccaccttgagactgtacaagattgctcaagaaacaattagtctcaaaagacacaagttatgtgtgctccccctcaagttgtgcatcaagtatttgaatgacttgcactttgcacattctagcttcctcagaactagaggggatcacaacataccttggtcaaggcatactctatcactttcatcccaaagagatatcaattaaataccaaattgaaagccacttaataccaattgaaggctaaatgaaaggttgactaaatacaacaatgcatgcctcaggagcacctaagccaattgaatactcacaggaagtctaacatttac

SEQ ID NO: 26596 - DNA, 368 bp, Zea Mays
ctcgctgatcatcaccgacgcggcccgtgtcggccatggccatcgatggctacctcgtctagctaccgagaggacataaccgaccaagggtgacctaggaacactcgccaatttggcatgaacacactgagaacagtctgcccacgtgcacggtggaaaccgtgaccacgagctcgcgttcccgttcaaccctggctgaattgaccaaacagtggccacgatgagcatccattgcataccaagttgtgaaaacggcaccttgagaggcgtagaaccttaccagagtgggctggccatggacgagctatccacggtggcttagagacccgagttgggggaaaatggtgtcgcgacggctctgggtgaaa

SEQ ID NO: 26597 - DNA, 573 bp, Zea Mays
gcggggcacccaagcgtgtagtctgcgctcctgttcctcactggcgccgggttgagctcaccaaatttctctgctgccgtcgtcgcgacttggtcgggatctggtcggttttgctgtgacaccaggggtgagttcttctactgttcgtcgtcatgtaggtttcgggtagtggcgttcgggccgtggtctcgggctcagatggcgagctctgccaagcttgctgtcgcgactatggctcggctgcaggcgtaaggtaggagatgtactggtgccgttgatctgcggggtaacggtctagattagaaaggtggttgtggctgtcggatcgatgacggatggcctagattatatcaaggataccccccttcgatggattggtccagatccgttgatcttggatccatcggttagggctctcgcgtcggtgctttaagggaagatcgttagatcgggatccgaccactgacgttggacaccggttcggagcctgggcttctaatccgcacccttgatttgtgatcgcgcgaccaccattcacccgtaccccttcgctgaaaccgttttacaaaagag

SEQ ID NO: 26598 - DNA, 398 bp, Zea Mays
catttacttcccaaatcatgaacgcatacatgtttatcatacgaaccgagtatttcaataattatcctaaaacaactaactccattacacaacttgtatcacaaacctacttgacttacttaaagcgtctactcgaaatcgtgagcacagtcatacactacatgcgaagcataatttaacgagcgcataatacgcatcatcacgactcggcttataaatatagagaaagcgacgactactttggcatgtcaccacctctctatataagccaaaataatttctacctacaacgaccaaacattcatgtcgagcacactttattttaccatgtctcgcatacaaccatatggtggcgtgcactcgagacacttcaatcaatgtggcgcgaccactaatat

SEQ ID NO: 26599 - DNA, 629 bp, Zea Mays
tggatttgttctcgatccgggtcaaaacgaacaactagatcggattccaatctaggccaatttgttcaacctggaaggaggctggaaacatgccaattcgaccgatacgaacgcgccatgggtgccgacggagttggcttccgagcctgctacgaaaaaggctaaccctcatccgccttgtccaaattacttgcgggaaatgaaaaaatgaaccggaaacactagacccgacgacctcggtcgagggtggcggggaaaaggttcccgacgacataatcgtgctgcctctcccattgaaagcaggcaccaccctcctctttttcaagatcacctttctcagatacgccgtgggagccgcgaggcgaagagtgcttccagaaggaaaaggagccgactcaagaattgcaacaaaagggaggcaaacaatgggccaacgatgctcgccgcccgccgatcgcatagtgacaaacctacgcttcttatgcagtgccccgctctcccatgacttcctgttcctgatggagtgccacacccgccacctacgacaggggcgaccaggggagcccctagagatacgacactcggggcctccgacatgtctgccacggcagggacacctccactagccg

SEQ ID NO: 26600 - DNA, 779 bp, Zea Mays
aggaacatcagatctttatttccctacagagtactcgcaatccacaataggacagttcaaagcctgtctctggaagcaatggctgacttattggcgcagcccggattacaaccttgttagatattccttcactctgttagttgccttgcttctcggctccattttctggaggataggcaccaacatgtaaattttcttgctttcttcatctttggtcgccagtgccggacttacaaatctaaaagagttggtgtattctattgcagggaagatgcaaccactctcggtatggttattggagcaatgtacactgctgttatgtttatcggcatcaacaattgttcaactgtgcagccagttgtttcaattgaaagaacggtcttctacagagagagggctgctgggatgtactctgctatgccatatgccattgctcaggtaaagaaatgtcgttgaactgtgcagacacagtgataactaaggtgctatttgctctccgtagcctctcaaattttatgcttcgcaggttgttatagagataccatatgtatttgtgcaaacaacgtactacaccctcattgtatacgccatgatgagcttccaatggacagctgtcaagttcttctggttcttcttcatttcctacttctccttcctctacttcacctactatggcatgatggctgtctcaatctccccaaaccatgaggttgcatccatcttcgcagcagctttcttttctctcttcaatctcttctcaggcttcttcattccgagac

SEQ ID NO: 26601 - DNA, 545 bp, Zea Mays
ccctgatctagtcgcggcccacttcgaagatgggacctctccatgcccattaggcgatgccttcttacacttcgcgaagactcaccggctctgtttcgacacacccaccctctgcttcgcgagtatcctgcgcccgcaccagtcgaggtcaccggctcctcgcggggggcgaatcgcagcggagactccgatgcagccagatcaaacgccgcaaaataatctaagtcatcttcagaagattcgtccacccacgagcaagggctccccaattccccatcctccgaagactaagacccaaaatcctatccctccgacacattgccactaagagacgtcacattcgcatccatcaaaacatcattaattttaacatcatcagggtttgcttgcgcaggcctggacgccggaacctgcgcaacaaccgatcttcagtatcatacaaaaattaaaaccaccaacccatcccctattgcatcccctcaacctgcgccgaagcagccgccgccgcggggtcttcagcagcaccccctggaggcgttgtatac

SEQ ID NO: 26602 - DNA, 404 bp, Zea Mays
ccatgacgcgcctccggtcgccattgatggtcgtcgtggcgctgacgatgatgaagaagagcgtcgcggctaccgcagctgcaaagaggactcctagagctcccgtctattcaggagcctttcacgctctccacacagggagcaagatcactcggagccacgcaaggatcaccatgacgacagaagatcgaccatcggcggtcaccgacaccttcctcgctctgcggatgacatcttgctagagcaagatgtgcgccaacatgttagcctggatgcctcccccgtccacgtcgcaccacgctagcaagtggacctagacgactctgcaacaagtggaggcggtcgagagcaactgcatcgccgatgcagaggcaggggccagagcatgagcccgacatcgtgtc

SEQ ID NO: 26603 - DNA, 385 bp, Zea Mays
gtgtacccagcttgtcaccagaaacatttcctgaaatcgcactcgcacaggaggacatgatgaacatcggaaaggcgggcaaaagaggaggccgggagaagaagaaaaaaaaaagaggaagggcgcaaaccaatcagggcaaaaaggaaggcaaggcgacgaaggaatcaagcagccacagcccgcgaccattgctgcaacgcattctttctcatcactccaaaaggagggagagaaaacgcccaggcccagctgatgtagacttgcatgaacagcctcaataatgctggcatcatcagcaaaccatggcccgcccccctttcttgcatggaggctcagcacagcagttttcatatattagcagcacggcttcatcattattgcc

SEQ ID NO: 26604 - DNA, 569 bp, Zea Mays
agcaggtggcgttccatggcgcgaacagcgtcttgttccttctctagggcaagagcaatggcatgtgcacgctgccgagcggcctccaaatcaaggcgtgccttctccacggtggcgcgagcaggcgcctgttcttgctcttgtttcttggtggtagcagttgctttctattcgtctgtcaagttggagtggcactcgctgatgttgtccatcatgggaaaaaggaggggctgctaggggagagagggggtgtagcgcaccctaggataggatcagagggcggaagtgaattggatctagtctcgtgataccatgttaaagagatgtggcactgaagtcagatattggattgatgatagaggtacaaggggtgtacaatatataggcaaggatcatctaaggcttatagaaaacacccaaccaatggagatccttgcataacctatggccaactaccataaacaccaatgcacaaatggcagtcataatcagcctatttacatagtctaacaaatagcacaatagaggaaatggtgcaaattgcccatccacgcttgcgcccatggcgg

SEQ ID NO: 26605 - DNA, 326 bp, Zea Mays
cagcaactccggcaccgccggcgtggaagaggagtctcaccatcgatggtgatgaggctggccgacgatggagtgtggatccccggcgaggcgcagacccggtgctcctctccatcatccagcggtcgcaccagaccaccaccaggcggagccgatcttcatggcgctgagccagcagggtggcgcatggtggaggcgcggagggagttgcggttggcggtgccgtagatgatgggcgcacatccacgccagaggccttcccacgcgtgtggatgacacgagtacgacacctgggcggcggcaatcttctctgctactactcgatt

SEQ ID NO: 26606 - DNA, 408 bp, Zea Mays
cctggcgtaagtttaccgagactcagggaatagggtccatggactgcgggttctattctctaaaactgtaagggttctttaataaaaaaatgtgtcgtgaaggggtatccttagatgtgggtcgttggattagatccgaacggcgcagatgaatctttcatcataccgaacccgcatgctacgctagccgttggatccgaattcagcgcgcaagattaaatctgtactaaagcgaaccggtattcaatcacggtagttggatctgggatcaacggttccgattttatgagacgagattcgctctgagccgcccgatcaaactaccaatggctcggatcaaaccgacccgagaggatgccaggttccgatcgaccgcccattccccatctcacggtgcgcgcgttgtcc

SEQ ID NO: 26607 - DNA, 355 bp, Zea Mays
tgtagtgtagtataagtagtaatgtaatgtaatggttgaggggtgggaggccgactcatgatgagtcggatgagtcgatcttaagtttgtaatgatctccccctgtgaatgaagacacggtttcctgctaatctattgttgtgtgccctgtttttgcatctgatggttcacttagcattttagaggtaatgcccgagtgatgcttgcttttctgcgattcaaacttatcccgagctatcggcctaccactttgcgcctgacttaacatgccaacccctacttctgttgatgtcctcttgagttctgaaccctagttctttcttttttttctccaccgctctctacctttctgagt

SEQ ID NO: 26608 - DNA, 302 bp, Zea Mays
tctaattgataggttagttcagagacatgaaatcaaagaagtcacatcagtatattgaaaagcaagctaagtaaataatgtagttaggattgttgcatctcactgagatgcaaaacccctgcttatgtagaaaactaatttaatgtaagtttatctacattaaacaggacacagtaggagggggctcactttggcatgtaatgctctaaacacaaatttccgtaaccacaattttgacagttttgctgtgcggaaatggaactcatacaaataaagtgccagatgtttatgtgacgattgca

SEQ ID NO: 26609 - DNA, 468 bp, Zea Mays
aaacacttctttttttcacttgcaggcttgctaccgcaagaaaagaaacttcatctctagtttgacagtcggagatcgggcggtcacctctcatgagcagaagcatgaagctttgaatgatttctataccaacctgttgggggtggctaaacatagagaattcacactaaacttgggatcttgccacagggacatgggcgatctaggtgtattggacctccccatctcagaggatgaggtccggtctgcagttttctgcctaccttcagatagagctccgggtccggatggttttaccgggagattctataagtcatgctggcatatcattaaggacgatctgcttgcggctatcaatgccctccatcaaggtaattctcgggggttgtggctgttgaactcagcttatcttaccctcatccccaagaagactgatgccacaacagcggctgatttcagacccataag

SEQ ID NO: 26610 - DNA, 301 bp, Zea Mays
gatgaattgggaagagttttgtttacacttgaatacccgttttggtagagatcaacataatttgctgattaggcagttttaccacatctaccagcagacatctgtagcagaatacatagaggagtttgatattctcatgcaccagttacttgctcatgaaacccagttaacttcatccatgatcactgctagatttgttgatgggctcacggatgagattaaatctgtagtagtaattcaaaggccttcagtgtaagtagagggactctaactctcatcaagaggatgacactatgagttg

SEQ ID NO: 26611 - DNA, 833 bp, Zea Mays
ttgtgaagagatttaatagcgtgttgcaccatcatgtaattatcatgaatcgatcttcctttcacaaaagcactttggttagcagccactaacttctgaagatgggggccgagcctattagcaagcaacttggtaaccaatttagcgaagctgtgaattaggctaataggccgaaaatccctggctgacaaggcatccgtttttttggggataagcacaatatatgcagaattcagcagccccaaattatgagcatttccaaaacgaagatagtccaacgcagccataatatcagtcttaatgatgtgccaagcagatttgtaaaacctcccagtgaaaccatcaggaccaggcgctttatcattgggaaggcttgcaatcgtatcctgaacctccctttcggagaaaggagattctaaatcacttaggtcaactggatccctgtggcaatctagcaaattaagagtgaaaggtctctggatttcagtccccaaaagatctgaaaagaaattatccaacagctcctgcatctggtcatgattagtcacagtcctgccctcatcctccaaatgagaaataaagtttctcttttttctaaagcaagcctgcatgtggaaaaaacttgtatttgcatccccttccttcaaatattgtatccgagaccttaaccgggcaattgtcctctgtaaagaggttaggacgagacaatgttgtttcagttttcgcaacaaccaaacctcttctacagccagggtcctaatatcctgggcaatctccagtctgtgcaacacctcgcgagccatgcccaattgagtcccaacattacccaccgt

SEQ ID NO: 26612 - DNA, 362 bp, Zea Mays
cgttgtaccatatgtcatctagcctatatataacgcaacacgctagctcataggaggtcacggcattgttccaaacatacatggtatagagctaaggtttctatgtttgtcattacttctccctccacctctcattcaccatgccaccagctttgctacaatttatattcatcattccatcaccattaggctcacaaagaaaaactatcacatatggcacacacagttgcttcccttcctcatgagctccaatcttatggggtaccttgatggtacaacccttgcgtcaaccacaaaagtggcatcgtccatggacgccagtggagatctcatttcaaatccaatatgagtttggcctctat

SEQ ID NO: 26613 - DNA, 475 bp, Zea Mays
cggcaactgcaaccgcaagcacacatctgcatctgcatgcatgcctagcttcctttccttctgggctagctaagttaagctagctcctgcaaccgcaagcgacgacggcgatggctaaccgctagctaggtctcgatcgatcacaccacctcgctctacaactacgacgttcgttacacttgagacgccgcagcagtacgcgcgctagccgccggtgctggtgatgtgtgtttcgttgtctggtacgttatctaatataaaacctgaagaatcaaaattatttaataataatattgactgatgaagcattcatggatatatgcatgcatgcagtaaaaaacaaagaaagctgctgggtagccggccccacaagtaagtacgtagcacgtactcgtgtcaagtttgcgcagctgatgcctgatgagggcaccacacctaagctagctgctagctagcttcttccttagctgcgtac

SEQ ID NO: 26614 - DNA, 347 bp, Zea Mays
ctggaagcaggtctatgttgacctcaccggcatgactgcgaagcagaggacggcgctgtcaaggaagtttcaggttacacaggtgctacggtgcaaggacgagtgtgcaggacgcagcagcaggtctggcgtgtgccgagcgacagcaacgacgatggcgaacacaatctttgacagccgcaaatcaccgtgtgcgatgacataagaagcgaacacaaaaccagcggccgcgtctgaacgatggcgacaccgatagagtacagagtagaagaagggaggaataaatcgcatgggacgcggagacgaatctgacgcggttgaagctgcttccgacgaccaggaaggat

SEQ ID NO: 26615 - DNA, 521 bp, Zea Mays
tggtgatctcgttgttcctttataacttccctcgataatgaattcctacttcaaccattctattgcaccctcacctaacttacccttgattgttttctccacttcgccactacgcgagtcttgtcttaactctaacatttgtcatgacttttgttattatcaccttcaccttagacacctctatatcttacttgaggtttatcttagaccggcatttaaaatcttctccttttccacctcaatctgagcttcatactttacctacttttcccttggtcgtattcccttctttgtcacctgcgagttcttaactctatcctttgttgtgcttttgctcttcattgcctccacctctctcttttctcgatcttaccttggtaatgacattatgtctgttatttaaaatctacaatctcctatccccatattgagagtggtgttttacttatctcacccttggcaatatcctcttcttcaccgcgtgtaagccttgatgtaaccccattttttattgtacttat

SEQ ID NO: 26616 - DNA, 412 bp, Zea Mays
cttcacagaaagaggacacgagaggaggcgtcgttggagcgctagaggagtgtcctcagccctgtatctgtcagggagaaggcgcgagggggctccgttgaagctaacttaactttagtgtcgatgatcatagccatactccctctcggttacgtggtttttcgctttttcttcgacctgccaagtgtcgaccgtccttcccaatgcaaacacactcttcaccattccaccacatcgaactcgttcttgtccctcttcgcgttagtcgtggccatcacaaccaccatactgaattagctccacaggtctacctccactagcgctcaccacccggtacgtgccctctcaggctctcccatgcatccaaccactatcggagaacagagctcccgtcccttaatttcagtaccaa

SEQ ID NO: 26617 - DNA, 319 bp, Zea Mays
gagaggcgctgaccccggtggcctggacgacttgaccagaaggagaagaggaaccgacggtggcggccctggacagctggggaagaggaccagtctggcagcggccctgttttcctcctcttccatgcaacagcagctgcagctcccagcctgtttcactctctcccgggcaacagcagctcccacctctttccctcctattcactttctattcccgcgcagcagcttttttctattcccgcgcagcagcttccgtgctcaccttttccccgcgcgccgaaccccgcttccacacgcctcctttccgcctcagcgcgca

SEQ ID NO: 26618 - DNA, 455 bp, Zea Mays
ttgataagataagaaaaggttttctatggagaggcagaaaggaagcaaagggaggacattgtttggtagcctggggaaaggtgtgtcgaccccttcagctgggaggcttgggaatctctagtctcctagagctttgttgggctctccacatgagatggctgtggctgcagaaaacagatttggggcggccttgggcaagccttcccatacatgtcccaaagaaagctagggcttttttctctatggcccttatttctaaggttgaggatggttcaaacaccttgttctggaatgatagatggctgcatggcactcgaatctctgatattgcccccagcctgtacaagtcaattccaagaagaattgctaacagaaggacggtggaagaagcacttttaaataggagatggatttcagatattaggggggctcttacagtaagagtcttggttgat

SEQ ID NO: 26619 - DNA, 312 bp, Zea Mays
gggccggtgatcgaagatcggaggggtgtgaatagtgtaggtttcataatatcgggccgtcggatcctgatcttgtggccgcccttgcgtaccgattcactagtgtggtgatctaatcctggccatcagagttcgatcgtgcgtctatcattacgtaccgattcgatgggggcatggatcgaatacgagccattggcgttagatcgtatggctggagtgacctagaaacccttcaatagagcagtttagcaaaagagaccctcacaaagactaaaatcaacccgccatccacaacagttcgaaagtaattaa

SEQ ID NO: 26620 - DNA, 374 bp, Zea Mays
tgacaatgggaggaatcaagaggttaaaagaacatcttgctggtggttatgcggacacattaatgtgttctaagactacaactgagattagaaaagaagtgaaggcatatttggacaagaacaagaggactaggcctactttccttgatgatgatgatcatgatggtcaggggcagcaaggcgaagaggattccaccacatctatgcaacaacctagctcggggacaactgccaaaaggaagagagctgcatttcagtttagaacaactgcacagccacagacatcaaacaaggaaaagaaaaagggaaaattgcaaccatgcttcgaagaactactgaacaagttgtggatgagaggcgctcctcagggtcac

SEQ ID NO: 26621 - DNA, 559 bp, Zea Mays
ctaaacagcttccgccagattttgtcccacgtcgcagtagtcgcttgtcaaagaaaagggaaggcttaaattcaacagtcagacaagtccaggcggagctcatgttgaagttgaacgtcacaaactcacaggtggctgttactgatgaaatgctagaggaatttggacagctgtttgacaaacccctttccaactctcacatcaaggccctggcagctttgtttggatggccggtcccagataatgtgcaagaatgcttggatgttcctttgcttagggagttaagcattgaaacgtgtgcttgatggcctgctgtagcctcacattgtgttggttgtatttctgttatcaatgaatctgtcaaaaatcctcatttggaatgtcagaggtcttaataggaaagctaggagggatgcggtgcgtttaatggttgagtctactcgccccgacatagtgtgtttgtaagaaatgaagaaggaatctatatccagatttatggtcttctccctccttggaaatgtgtttgatcagttcacctttctaccagccattggcactc

SEQ ID NO: 26622 - DNA, 603 bp, Zea Mays
tttgaccctaaaccttggctgtcaggcgcactaaagaagaattcgatggtacagtgaagggatcaggtcgccagctcagcccctcgccgtcggcaatcatgtgctcggattcacgccggtgccgcgattcccgcccagctaaacacggataacgatcctctggagaaaagatctcaccgtggatgatcttggagcacagtagccactctgtcgctcatccacttaccggcgacgtggccgcatgtccatcaccggcgtgccaccattcttcgcagttatgccacgccgtcaaccatcttaccacgtctcagtcaatcgcaacacaccgtccttctattacctaaggccttgccacggggtttgccaccaatcacacgcgccagtgaacttttccccaccggccgccgcgtgtctcgcccaaattcatcagccgccgcttaacaatcctataaattgatggccgagtctgttgcaccatgtaatcacgaatccaacgcaccagctattgcttcaaatcgctcaccagaggccacgaattccttacttcccccaatcctgttctaccaccgcaagaacaccctcaccgtggctagcttatcccag

SEQ ID NO: 26623 - DNA, 403 bp, Zea Mays
tggatgttttgctgttgcgggtgtggaggtgggagtgggggaggtacgatttgtacctcctggtggtgtggtatgcgtggttaggtggatgctgagcggggccgtggttgtatggttgagggagttgttgatatgtgtgcgcgaaaactctagggttgtcggctggttgcacccgagacatcctgtctctggtggccttcgtttctgggcagtcccttgtagggtgcgcgcagtcttcgccgtggaacaagcagtaaaatatgcgcggctgctgcgcccgtcctcggccccgaccacgagttccgttgccgcggccctgggggatactcttggcggcgaggggcctcaccagcgaggtgctggttggcgatgttgtgtacctgctgctgactgcggccgtcct

SEQ ID NO: 26624 - DNA, 441 bp, Zea Mays
tgggggatgcgggcgtggaccgaagacgtcgcagcggttgcgaggacgaaggcgccgccgcatctcagcctctcgagagacgatgcgagggagagctggagggggccacagggcagtgagagcgttggcgggggactgaaacggtaagctgggccagtgccagataagtgcggcgtgctaggcatactagtgggccgcaccaaataacacagcccacgcggactaccgtcgttgtcaccgctgcgcaaatattgtaccataccggccagccaaacattgtgataccagcttataagccttcctactttgaaggaagcaatcgtgttcatgtgtacttgctagtgtcaactcgtggagtttttttgcgcgagctgagtctggcacgtggaccctgcgtgtggggtgtgcaaaactgaggctatcacatggtccgggcgtatg

SEQ ID NO: 26625 - DNA, 440 bp, Zea Mays
cttttttatgccactcaccctcggtcaccttcagcatccgcgacgatgatttctggaggtcacgcaagtcatgacgtcaccaggctcagtgcatgtctccgttaattccttaataaaactctctgagctcgcaacctcaaatgtcttcgtcgtacctttcacctcaacttcaactttttgcttcttcctcgttgccgtaatcacagccttccccttcgagcagccttctcctacccgcgtcgccacctttttcttccctcgttcatccccagcttcagcagattcctcctcaggatacgggccatagcgaaggccattcacctcaaacacacggtttaacctgacatttgaacctcaaatatcccaacttatcgtcatctctgtccttaccgagtactttccaacaattatcaccgcctccgactccacttctctaacga

SEQ ID NO: 26626 - DNA, 470 bp, Zea Mays
cttacttttctatttctcttatgcggtagaatgattggagtagattataagtatggtgctaatttcatataaataataataattgttgctaatttatggtcaagttagtaggataataatttagtccccagaacaaaatgtattgttaagtcttagcaaaagttttaaataaaattgggtgccatgtccgtctggatgcaaaaaagtgaccactttctgcttcgtgctcgcttgcgtgccgtggtggtgcagcacatttgtgcctagaagaagcgggtggcgatgaaggggctacagggtagcgacagttatgtgccttgttttcataattattgccgttgcaatgcacgggcaccgtactagttacatgatgatgtggaaagaaggtatgatccacattaattgcattgtatatcatacttttgtcatgcatagctcccacttgacccgtagacacatatgtcaaccac

SEQ ID NO: 26627 - DNA, 353 bp, Zea Mays
cttcatactgccaagaagaatctgagtcgtctgagcctcatcagcaagccaagtatcatagtcggctaagtccaccatgtagtgctcaaatactgggcataacactccataacctaagcagaaggaggaacaccatcgacccctgcagtgggctcctcgggatgttccggatcagggggaggagatagaccgataaggtgaccccatatacagtggctattgagacacgaacgaaacatagtggaccactcccggaagttagtgccatcgaaggtgacaaagggaagttgcacaacggggttagaacgaggagaaactgccatgctgagtggagggtgaagtgcgcagcagga

SEQ ID NO: 26628 - DNA, 559 bp, Zea Mays
caaaatcaaacggcgaaggggtatggtgcattatgggccgttggatcgactacctacggatcagattagatattcataactgtgaaccggtacgcaactcaagccgttggatcaaagatctatgttctggattttattagggtgcgatcagatctagttcatctgatatctaatcaacggctcggatttaacctaacgaaaggcattcaacacttaatcagggtcgttcattctgatcggatggccaggattctacagcgctgaagggggagactctgattaaatcagagccacacattctccgatcaaaggttagcaaactctcttccctcccgagctctggtcatggcggcgctgcccaccgcggcgtacgctacatcgccgattggtgattccgcccaacgatgggactgccccgagtttgacaagctctacacgaagctcagcatatggtggactcaattcaaaaccctgaacaacctgatgggataagccctggcccctttctatggcgtggcacggcgccactgctctaatggcacgctggtggcaattccag

SEQ ID NO: 26629 - DNA, 338 bp, Zea Mays
agtcacattatcttcgggaagtcaacaattgggaacggtcatatcaaagtactgaaaaacaggcgttgtataagcgatgttgggttggttcgtcttgaaggtgaggagaccacgcctaagcctcaggataatgatgtagtcatattttgaagcttcttgaatgtcgggcttcggttcccattgcacaagatggtgataggggtgttgaaaaatttgacatcttattgcatcaactgatcccaaatgctattataaggatggggtttcttatctgggctatgcgaagccaaggtgcaaagccaagcgtggaatgcttctatcaaattcatgaattacac

SEQ ID NO: 26630 - DNA, 289 bp, Zea Mays
cttgattcctcggacatcttttggtgctttccaatccagaatagctgctaccttcttcacatccacagctaatccgtctcggtttataatatgacccaagaacatgacttcattgagctaaaactcgcacttactaagcttggcatacagctgacaatcccgtagtctctgcaataccttccttaagtgctcttcatgctcttgctcattctgggaatatatgaggatatcatcaatgaacactactacgaatttatctagatagtccatgaacacactgttcagcaaa

SEQ ID NO: 26631 - DNA, 446 bp, Zea Mays
atttattgatgtgacgagtagtttagaaaatgctagttgcgtagaggatgaattattaaaacatgagtatcggagttcatatattagtggttgcgccatattgattgaagtgtctcgagtgcacgccaccatatggttgtatgcgagacgaggttatgcgcatgacgagtttagtaaaaatccatcggtgtcacttgtgttaagttgaagtttatttgtgcgtggaaagtaataatgtgtttaatacttagaactcttagtcgatggtagaaattgtctcggcttaaatagaggggtggtgacatgccaaggtagtcatcatttcctctatgtttataagtcgagtcgagtcgatgcgcattatgtgttcgttaaattatgctttgcatatagtgtatggttgtgctcgcgaattcgagtcgtcacatcgggtggtcaagtaggat

SEQ ID NO: 26632 - DNA, 624 bp, Zea Mays
gggaaagggaagctctgcgtgcgaactaccgtgggtcgacggcgtgacgcggggaccggattgctcgtcggtgccgaggttacgtcgcggaatcgagcgcgtccggtgttgggtgtccgcgccatgtgactataggtgagtagctacctcggaatttcctcctttctctattctatggcttttacgcggtccgtggaggagcggtagccctgagcgaagtgtagatgcggaccgagatctgtgtgcacgccggtggttcaccgggagagggagaaagtgttctggaggccgacgcatgtgcctaggaggctggaggaggaagaaggacagtggatcgtcgatttcaccttcaacggtcgcgattagattagaaataacctttcgctaaggggaaaatctgaccgctcagtttgaatcggacggtcatggtgagtcgaaacctaataaaatctggggcgttggatcgggaatgggcggttctacgttgtccgcaaatttataatgcgcaggatctaatccggggcatcggctgttgatccaacggccagatccattccgtaccccttcgggctggcatatttacacttgaaaccctctggttctaataaaataacccgccatcca

SEQ ID NO: 26633 - DNA, 280 bp, Zea Mays
gtcactttggtggccaatcacttgggtctgccttcttttttacatatttagacaataattgatcaaaggtcgggccagatccgaccagtcgaccagctgcctttacagtgctagttttccatgtacctatttttggtcgtcgtggtttgaaggtaagtggtcatcgtggctcctaggcgttgccggaccgtccacttgaatgatccagactgtctgacgatgtcccggacctttctgtgtctatgagccgggccgtccggacctgcgcctggttatctgc

SEQ ID NO: 26634 - DNA, 377 bp, Zea Mays
gcagagtgtgcagacctcgcgagcttggtgggttgggtattttcagcatcactgaactgagttgggctcttaaaatgcgttgggcttggctgcaaaaaactgagccaggtcggccctgatcatccctgcctcttcatatcccgagaaaaattcgagagtttctacaagtggccttgtattctgagataggaagtcgagcctctacccttttctggagtgatcgatggttgtgtgggcagcggattgtggatatcgctccccgactttttgagaccattcctaagaagttgattaacaaaaggacagttcaggaggcgatcgaagataatttctggattaatgatattcctgggagtttatctgttggtgcacttgca

SEQ ID NO: 26635 - DNA, 324 bp, Zea Mays
cgacgagtatgcaatcctagacaacctctatgcattagagttctatcaaatagttacattatctgatcataagagtcgatgacttacatcgggctagagttaatattttgggaacaaggcaagttgcagaatctattgtttcctgaaaaagtctagtagtatcatgtgcttttggttcaccaagcttcacaaaaaagcaggggcatgtgttgagcaccatatttggcacgtaggcatgggcgaatggtccggccatgtggcccagacggtccgcgaccacaatcagattaactcgagtgagagtacttatcccatgcatggttt

SEQ ID NO: 26636 - DNA, 358 bp, Zea Mays
gtggggtgttacagttggtatcagaggcataggctgtagatcctagcaagtggagtaataataaattgacacactgcacatgtaggatgggatttctgtcttgctattgatatgttatgttattgtatgtgctagtttggcattatctgaagagatgttatgccaatcttatttacttattattctcatccctgtggctgcagctatgccacctcgtagggctcgaggtagtccgcaagctcctagtggggactcgatgagtccggcggcaatgttagccgcgatgcaggccatgcagtaggagttggcccttctgaggcaagccattcctatcgccccagcgggtgctgctcagggt

SEQ ID NO: 26637 - DNA, 544 bp, Zea Mays
tcatgtgcacgcaccccacgtccaccatcgcgtggacggcaccacatttcggtctgacatagcatcgaacagctcccgtgcgtgaaccaggtccccggccttcacatgcccgacgatcataattccttgacaaccatctcgtggaacacgctgcgtgtcggtcccatgtccccaactgcagtgcacctggacgaggctggcggagacgtgaacgtctgagaccatgtggcggatgcggatgagggagtggagctaagctcatgcgttcagctggaggcacacggaggccctgaggtatacagtgggtggggcacaaggtgaagggaggcgaggatgagcagaaagtcggcgcgggtggcgctgatcgacgcttgggacttgggaagaggaaggcgtgtgcctgtatgaggtgccacggtaggaaggagaggaggcaatgaagcataggcgacagaggcgaggactgcagcacgagggaaccgctgtggcctgtctggaagtgtccaggcgtttcaaaacgctgaaaggctgcactggatgcgtg

SEQ ID NO: 26638 - DNA, 342 bp, Zea Mays
gcggggtcggggagcatcagaggcacacaagaacacgaaaacgagagaacagggagcatgaacagacctgtaattcactgaccacggtgagagttctaccacgatggaggaaacagaattgggggaaaagaggaattggaaggctctagtggataatccgaggcaaggatcggtgcgttggatgtgtaattacctagcggagcagcgggtgcgcttaatttataggcttcgggggcggcggcgcatgaatttgggttggtgtagtggcggtcggagatgaaaaggggtcactagcgcacgtgcttagtggctttcaccgtggcagctctcctgcgatcaccg

SEQ ID NO: 26639 - DNA, 505 bp, Zea Mays
gtggtagcacagttgacctcgtggttgtagaattcgataacgcgtcgcgtggacttggcttctaaagctagagcattctggcctcaagctgagtacgacttagttgcccgttgcagcctaggtgtttgtttatatgcgtgcaaatggacaaattgtctgcaattcggggtggatgtgcatgctctgacccctaggtaggtcgtggtttatgattgttggacatgtagccatcttgctaaccgtggactgcaatgacttttgataattgggacttgcttgataatattttagtgctggttattccgcgtcatgtgccttccctgtgcacgccagcacatacactgtagcctgagtttgtccactggtggttattgtgcggaagagagcttgtgcttctgaatatctggttttctgtatttctttgttcaacgctgatgttccatggggcattggattctcgcagatataagtgtcaaagtgtgtgattttctttcctggtttatgt

SEQ ID NO: 26640 - DNA, 1054 bp, Zea Mays
gctaggtgccaactatgcagggagtacggatgccacgacatattaggtgtatatatataactaaggcaacaaattagggagtacagggacacacgcacaagattgttaagggagttctctagataataaataatatttatgtaagtctagatggcagttctcgtcggttcagccaggggcggatctaaggggtgggcaaggtgggacatggccccacctcattttttttaggtatacagcgaaataaacaaacttttgtatagtaagtgtggacaaatctaatgaaaactaggttttgatgttttttctctcgatgcttcactgctcagtccactctccacctgagccattcgattctcttccctagcgcaagcccactcgtggctcactcgcttcttcggtcatcgactgaccagtaagttggtgacctaacccacccactgcagcgccaccttgccttctcatcactcgtcagctcgtcgcgatcctgcacacaacactgatactttgcctcctagtccacaccagcagatgggcaagctgttgttgggaccgtggcatcacctatacctcgctaacttattagggtcccaccacgccgttgcaacacggcaatggttgtcgcttgccgtcaccgtcatctatcgctacctcgcctcctgcactcgctcctcccacctgtcgtcgtctcaccgacgccatctcacgtcaaattcgatgactcaccacaactacgcgtcgatacggctgctccaccccaacgcctcgtcctcagccagtccacctattttctctctctagctctcctttaggtagccaaaaaggtcttttttggtattcatatcattttgtaaaaactagatgttatcatttaacattcatgttattatcatcaatctacatttaactagtagtctagtccgataatttgtcttttgcactgtcggccccacctagaattttgttctgcgtccgccacagggttcagctctggggtatgtatatgtagcccagaagttaaaacagaagcatccaacgtccaaacccgaatttc

SEQ ID NO: 26641 - DNA, 536 bp, Zea Mays
taagcgggctgcaggtcaaccagtggagttgagctttcaagtggattttttagccaactgtccaactggagctagggtttatgttgtggttacggcttacggggattgaatatgaggaattagctatgtgtaggatttgatgtgtctgtatttattatcgacttgtgaatttaaactgctggatctcagctaggcaagatttgaatctgctgcttctgtgctggggattcctgagtattagttttggcattgtctgcctcccggagcttagtaaatcatgtttcatgtctccattttagtagcgtaatcatgttgagttgggctttgcttcatttttctggatcaagcagtcattgtgtggctctgcaaatagtttgagaaatgttgcgagtatgtgaattttggttgagtgtcaattctttttagtttgaattgcattttgagcccaatggtcggtcatttggtgcaggtttataaaatgttggtctaaacatgacattgtgaaacatcatcactatataggttctgctcttccg

SEQ ID NO: 26642 - DNA, 466 bp, Zea Mays
ggcaatcaccacctttacaataaccccgatatctaaacggagcacttgactcaattcctaactcaaactcattgttaatcgcgtattgcctcatagcaagtctgaactctttcatatccttgtacaaactgccaaccttcataataggatttgacctgtcacaaactaaaattctctcttctggtatagaatccccacaatgtaccacaactatttcatcatcaacatcatcggatctgccacgaacattaaatgctctagatctacaagcatcttgccttgcacttgtttcgcgattatcttcatccaataatcccaacctgtcatacaacactagctctgaagcaacctcctgtgctccttctttttcccaattttcctcaacttgtatggtgccccaatcaattgctacatcctacaacaaatgaaaggaacaactacaggcagttagaaaacatgttcaaat

SEQ ID NO: 26643 - DNA, 343 bp, Zea Mays
ctggattggacacgagcccctctatctattgacgaatttcagcaccagtcatcgttccaagtgggcggtctgtcactacgacaccttccataaagttcttgatgtataggcggaatggatgatcgggagggagaaattgtcgatgtttatcgaacaatgaatatttgccatccatctttaaccaaatgaacctaagagcttccttgcaaactgggcatgggaacttaccatgaacacaccaggcgtagaatagcctatacgccggtaagtcatgcatggagtattggtaccaaacaagcattttgaagtttgtcttcgtaactcagtcatacgtccatacccc

SEQ ID NO: 26644 - DNA, 576 bp, Zea Mays
gtagaacactaaatgctaggcttcaaaattgctgcttgtttaaatgctcgatggcagctgaagctgtttagtaatcttctatgtgagcacagtgtgcatggtaggcccatgtactaaaagaaagtctgtccaggcaatggataatattaggcatggaggattgaacgagcagggaaaagggtctcttctaaggtacattgcaacgaagtatggtcggttggagacataggtagtttagaaccagttttggtctgcaaggaagatgtcatttttcatttcccactatggccaacctgtttgcagcataacccctgcatgagttgtgaacatagtcctgctaagtttttggacgcaaaatgacccccgcgtgatctaatgacgttcttagtttctcgatgcattttccttttatctatttccttgagcatatggacaattttgctaacgcagagaataaaaagtggtagcccccacacggatggtaatatgtggttcaggttgcaggctgttcacaggttccttcctatgttatggcaaataaaactggaccacatacacataagtggcaaccaaaag

SEQ ID NO: 26645 - DNA, 389 bp, Zea Mays
tctgcattttcatcagcaaggaaggatggatgggagagacaacaggttggcaatatgagctcgaagtctggtgaagaatgcaggaggctctgacgtctggattgcagcctgtgtagtggtaccaccaatatgggcgtgtaataagaatagtatcgttactagtagttaagtagttaactgtgtttacgtttctggtgatgtgagccggttgggcctgaattgtctggtacagctgtgttggtgtggttgtggtgccggttgggtgaaccctctgcgttcatcccagtcccaactgggcaatttcctaggatggctcagttttattccacaaactcttgtaattccgttgctgatgagtaatgaaattcggttcacccgtggtggaaaag

SEQ ID NO: 26646 - DNA, 316 bp, Zea Mays
atgtacaagtacagcggctcccctggctccggagctaccagtattggtagggacacaaggtgctgcttcaactcttggaaggctcgctctgcctcctcggtccaagagaatgggccagacttccgtaagagcttgaagaagggtagcgccctctcagccagccgtgagatgaagcggctaagggcggctagagaccccgtaagcttctggacgtccttgatctgggccagaggcctcattgcctcaattgccttgatcttctccgggtttgcttcaatgccccggtgcgaaaccaggaatcccagcaacttccctg

SEQ ID NO: 26647 - DNA, 351 bp, Zea Mays
tgtaatgtattgagcttgtatgaacttgtaagcctgagctaggcctaagtgtgcttgagtctgtccgtgtgtaacggtgcatgcctccccttttatagctaaggggggcacgtacaaaggtactgagccctgacatgtgggcccaggaacataatagatgtaatactaggagcaactaatgctcgttgttggagcaatcttcttgtgccctgacatccgtgatctgcgcagtattggcgtgcaggggaagcttccctagcaacgtataagtgatgatggaaacaatgcacctcgcagcatgggcgtactgtttgacaacagactagacaggcacgcggtctgcaggatggc

SEQ ID NO: 26648 - DNA, 448 bp, Zea Mays
atttaggagtggtagtttgagtataaatagaacgatcatcataaaatatttatcgtgctactaagctgtcttgctgctttgagccattacattgcacttgcttttttagcttcggtttcttttttagtttgagctatgatggccgaggacaagaggagctaagatcttgtattagctgggttttatgaagctatggagaagagctatgctataaagattgctgacgagatactagctggattgtcggatgattctgaggatagtgaagactttgactttgatagtgatgctgatgatatcgaagatcgatcatggagaccgagtcatgttaacatcgggaagtcaactgtaaaaacggggcatattgaggctatgaaaggtaaatattttcatgatgtatctatagagaggcctggcggagagaacattgttcctcttcccgaaaaag

SEQ ID NO: 26649 - DNA, 721 bp, Zea Mays
caggatgctggcccttctgctcctgctgctgaagaagtaccggtggaactctttactggagctgatcccaatgggtgtggccctgctgatgctgatcccaatgggtgtgaccctactagagttgatcccaatgggtgtgaccctgccagagctgaacccaatgggtgtgaccctgccagagttgatcccaatgggtgtgaccctgccagagctgaacccaatgggtgtgaccctgccaaagttgatcccaatgggtgtgacccttgccgtttattgtctgtattgttgatgaggatgaagaagaagaagaagaagtcccactaattcggaagaacagtcgatgttatagagtaagtggggggagtagcgatattccttctctagctctgtctgctcttgttggtctgcaagaattatccatagcaaattttgatcaggctctcgaggatgttgttcttgaagatctgctgtctgagccaactgatggtgatatgatggacgtctgctctgacattccagatgtgggattagaggtatcccgggcagcgtctcgtgcctcgttaaccttggaaggcggtcttcggagcctagaggttggtcgaggttgttcaattaccatggaggtgactgagagtccttcagccttagaggtggctgttgcggagaacccagtcctcaaggatggtgccagcggttgcccagcccccgagggtgttgccgg

SEQ ID NO: 26650 - DNA, 281 bp, Zea Mays
aagatgaagaagaagatgaagaatactttgatgattgtgagcagtttgccccgcctccccaccagggggatccgggtcaatcctcttctcatcctccgccccaggatccttcaggaagctatcctcccctagctcagtctggggaagaacactttgcatctcacctggcgcatcagttctttgatccgcatcatcctcctcagtggtgatctttggcttggtggctctctccttttttggttcttgttgccaaaaagggggagaaggattcttatcttggc

SEQ ID NO: 26651 - DNA, 595 bp, Zea Mays
cgacgacttgctggtagtcatcagccaggtaaacaaggactaggactgctcaaccgactcaatgaacagatactgcgctgcagtacgaaagctggaagacaaattcgagggtttggaatttcaccacgtggaaagggaccgcaatgcagcagcagatgcactgtcaaaattggggtccagtcgggcccaagttccacctgggattttcgtccaagaggtacagcaaccgagcatcaccacagagcaagctaaggagtgctatgctttataccaagcagaagcagatcccaatgactagagggagccaatcatcaagtacataaaaaacgaagaagaaccagatgacaaggccatggctgaacgcatcgcaagacagtcggcccactataccatcataggtggtctaatgtataggagaggtgcaggagaagtcctcatgaagtgtgttcactcggctatagaaaggcagctgctggatgaaatccatgcgggacaatatggcgtacatgcagcatcaagaacattggtagggaaagctttcaggtccgggttctactagccaacaacaaagaatgatgcagcagagctggttcag

SEQ ID NO: 26652 - DNA, 520 bp, Zea Mays
tggcagcgctatcctctccaacgaacaccgaggatggcggatcgtagctgtggcgcgcggtcaggtggccctgggatggtgcaccagcacaccgagatccacgggggcataagcttataagttccgtggactccgccattggcgcaggcgtttgaccctgaaaccaacccgtgcgagtaagagcaccgacatcgagagagagagagaaaaggagaagggagaaggtacgcgtggtcttgtacgccgtcttgggctccatatcgtcgcactcggggatctacgacaccttacacgcggaccggagccatggccgtggtcagggactggcggaatcactcaccggcgttcattggcgccgcttctccgccccgcgtcgaggactgtcctcatcaccacaaatcctctggtatggtcgctttcgttggggtcgttagctaattccggtggtgtagaatcacgcgggggaggaaattactcctcattggggcgagaattgcacaccggtgttcacccagcttcg

SEQ ID NO: 26653 - DNA, 293 bp, Zea Mays
gatctggtaatcttttacttgtgaatcatgttgtgactttatcatccgaatctctggatcattcatcgagatctaccccgtcatctggttatctgctataacctgttctcatgtatcaaatgtggatcagtctaatatctcattatgatcgttctcatactcttctctctgatgatcatgaatctgttttatcgattttatcaatagataatgtatccatttggtccaatggatgtcgttgttgtctttggttctctcatgtctctaaaaactcaacgatcttgatctcatgg

SEQ ID NO: 26654 - DNA, 572 bp, Zea Mays
gtttgttcaattacttccattacatttacaattcgtcgtttcttttgttctttaacgttctccttcgtagtggaaggctattctttcctctgtaaaaattttgtcagttctgatcctagaggacttagcagcttcaagggcggggattcagtcattaccttcagaatttcggctacttcggaggcagagggcgtcagaggagcttcttatcatgtctcatctatcttcggctcagaagagggcgctgtgtcaagctttcactttttagagattgttgtctttggctcatgagttgttttgttttcttcaaaactttttcatcttccttcactagcccagtagcttgcctactcaggatgctaacaatccttttccttttcaccccttcgacccctttgtcaagcttctcgtaatccaggtattcgatgtttaatgtgtccatcacccgattcagccttcgtttcggccgggtgccgaaatcagcattcattagttggtcttccttcttggtgtagttgccaagaatttcattacacatcgtttcgatcatttccagccactctttgcatggc

SEQ ID NO: 26655 - DNA, 393 bp, Zea Mays
cgaccactcagtcatcccgagggaattcagcgaaggagacctcgtcctcgtccgaacagctcggacagagtcccggggcaagctagagccaaaatgggagggccctttcatcgttaagacgaaggcgtcccccagcgcgtacaggctcacaacgtcatccggtgaagacttagaacattcttggaacattgacaatcttcgcaagttttttgtttgactcctcagggccagctcgcccttgtaattcacaagacagtttttattccggcccgcactcttttcctcccgggggttgaggtttttaacgaggcggagccatgtaatatacacgcgaaaaatcccccgcaaaaatctacgtcgaaaaaagaccgcatcgacggtcttcggcattcg

SEQ ID NO: 26656 - DNA, 588 bp, Zea Mays
gaagagttgtctactcccccggctccctaaaagtgggcatactcgacaatgaagtcgtcgtatgtcagagtcgagccaccgtccaccgccttgtcccatgcccatcatcgcccttcatcgaacactatgtcgcgggtggtgcgcaaacgttgtgttctagggtcaagaatgtggtaggcctttgagccctccatatagccaatgaacacctcggggtgctcctattgtcgggcttgccgatgtggccaaactccttggtgaacgcgaggcagccgaagacccgtaggtgagagaccgccggcttgcgcccatgccaagcgtcgtacggcgttatcccgttgagagccttggtgagcgagcggttgaggatgtaaacagccatcaccaccgcctcccccggaaggcagccgacatttccctctgcttgaggagagctcgatccatccccacaacagtctagttatgccgctcgacaacgtcgttctgctgcagactgtacgacgcgaagtagtggcgctaaacgccctcatccgcgtagtacaacgcgaactcagtcgtcatgaatttgtcgcctttgttgatgcgcaa

SEQ ID NO: 26657 - DNA, 476 bp, Zea Mays
cacagataatatttctgcgagccaagtactttaagtgacgatcatcacacagaacagataaagcgtcattggctaagtgaccatgtttacattagatgtaagacgcacagcactggtacatcaccatgtgtcatcaacattcaaatccatgttacagaactttaaggaccattgtgaactacatcagacaagcttaccgttagctggaagaattattacaaaaattacatttatgtagatatttcatgccaacagaaaatatcaccataaccgctgtcgtgtcaagcaacatcatccagtaagggaaacactaaacacgtccaaaagttacacccaaatatccacaaattgcatatagcaagaacataccacagtcaaagccacaactcacaagattcataatattcaagtaccaggttgtcaaaccacccatgaaaacattggtatccatcaaatcagatgaatctagattgacg

SEQ ID NO: 26658 - DNA, 300 bp, Zea Mays
attggggtcagcagcagatggagcacccccattggggtcagcagcaggtggagcacacccattggggtcaacgtcagtaaattcaggcacaagcacttcttcagcagcaggaactgaaggaccaacgtcccgatccaaactagatactcgccgaagacgtctctttttctttttctgctcatcagcagaaggatcaagttgattggctcggcaagggcgttttgggcgaacactgacaggtctctgaatatccaaggttgtatcagtttctgggagaggcgccaccaccgatgtcccagc

SEQ ID NO: 26659 - DNA, 657 bp, Zea Mays
gcagctcagatgaggatgatgcaacaaatggctgacactatggcagatatgcatgctcagatgcagcaggaacgccaggagatgcaccaagagcgggaggagatacgtcgagagctgcgccaagaacgataagagatacgccaggaaaggagggcgcagcagcaacaacaacaacaacaacagcaacatcaacaagcatcactgccaccaccaccaccagttccaccccgagataagcaccgggagttcatgagccataagccaccgacatttgctagttctcctgatccactggacgcagatgattgactgaagtacgtagagaagatgttgaacattgctcagtgtactgaccgggagaaggttttatatgcttctggacgtctgataggtcctactgccgattggtgggattcatacactactgcccacaatgctgctaacactatcacatgggtggagttcacacgcagtttaggaatcatcatataccagctagatttatgaagattaagaagaaagaatttctgtcgctgaagcagggaagcatgtcagtcagcgagtaccgcgacaagttcattcagctatccagatatgcacctgatgaagttgctgaagatgagaggaaacatgagcattttattgaaggacttaatg

SEQ ID NO: 26660 - DNA, 346 bp, Zea Mays
caactatacacatttagaccacaacaagcaattcgccgtgattacgagcttaaccaagttatctaacaattcggctaactagagcaacagtataggccgctatacatcatacacgtcggctggtctattattatcgaagttcgagacacaacatgtatataacaatcacttaacgaaatcgactcctacttaacatgagttggctaatcacagcataagacttagcgaactattttagacatcgtaactcaaaaacgtgggctggagcagattaatcagcgtttcttacccatggctcaacttaatttagtaaacacaccggtcacctaaaacagcacattgttgg

SEQ ID NO: 26661 - DNA, 348 bp, Zea Mays
tgtcagaaggcgtttggtactgtctgcttcttcattggtacaagagatttaattcaagagcatatagcattcagagtatggccgcttgtagagagctgggaaatgccgaaggagaccattaccaagcctagcgaaggtgaactggtccgactgaagtatacattcagatatggggataaattcgatgaaccaaaccatgactggctaaaatgcatcgaagttacaagtgaagagctgcttggagcttattccaaggcagaagataatgcactatctacagccttcagaggccgaggaaaaaagagaataaacagagtttttgacgccatcggcttcgtctaccccgac

SEQ ID NO: 26662 - DNA, 382 bp, Zea Mays
ggcatctaaaggctttgcacgaaaattagcgtagctttattttttccactggttgcccctcgctgcaagattatgttgccgaccaaaggaattttgggcgcgttcactcccttcctgactcattatgcggtggcgggcaaaggaatatattagcgctatgcataaaactgccataaacttcctcgctgtcatttactctttaatcatatacagagtaagggcacatgcgtccacattagctagaaaaccaacgcacgtcttgtttcatgggaaaaaattgagaatactagacgccttgtttcatgggaagaagggagtataagtagataccaacccaattaattaagagatcaagattaataacaatacccacaatgcaatg

SEQ ID NO: 26663 - DNA, 646 bp, Zea Mays
ccgatcttcagaaaaatcgcgccggcgataagaacgccaccgcagcgtggatggtcgtcggtggccacggtaaaaggcttttgcaacgtggcgttaaaacggggaggtggcaggccctggttaatcggcggccaccgtgccatcaccgtggttctgccgtagctaggctcgccgtacctcccttgcgcgtcgactgattggataagacctcgccgccggccaattactgccacgcgccacgtgcttaagcactagtcctcatcgtggtgactcatcggttgcatgcccgacgatcaccggagccactgccacggtgaaagccacttttccccgtactgagctcgcctctcctctccggccgccagcacccctcagccaaattcttcaccgtcgctcgatgcgcctataaattgagtgcgccactagctccgtagggtagtcaagaaccccgccaccaagaattaccctcagtggatccccaacgagcgcgaatcttacaatttccccaaatcggttcgaacaagccgcaagaacacttcgtcgtggtcagtgcgattcaggtccgatcatgttgtctctagccttgttctaacatctctaagctctcctcaaactcctcggccctttagtttgaactaaaccgccg

SEQ ID NO: 26664 - DNA, 345 bp, Zea Mays
cactctcaaattaggataagagattggagattttagataacagacataatgtaatcaccaaggtatggtcgagagatgggaaaggtaaaggcaacactaaacagaagcacaacaaaggatggagttgagaactcgcaagcgacaaagagaacgatacgaccaagggaaaaataggtaaaatataactcccagattgagatggaaaagaggagaattttaaagggcaggtataagataaacatcaatgtacgatatagaggtgtcaaaggtaaaggtgataataatgaaaagcataaggatatagctcaggcaagactcactaggtggcgaagtggagaaaacaat

SEQ ID NO: 26665 - DNA, 499 bp, Zea Mays
caaatcttaggggcgcacaataggattataggaggctagcacatgcatttgataaaccttctattactatttttccatcacacgatgaccaaactaaagaaaacctatatgacctatcaattgcaaatggtcaggcccaatcccagtcccttatgggatgtcgataaactcctataacggccagccacatcctccgccacctatataggaacaaccagtcccctgcgcacggccagacggtccagcacagcggcggttggctccatcccccatgacgagccactgaaagtcacgccaagaaaagtagagatgctcggaccatttggctatacgcgcggaccgtctatgcacgtcaacagaccgtctaggtattacaccggaccatccgcgacagggtatgaagagcaaaacatggaatattactagcaaccctactactagcccccaactaacacctctctagcacccacggaccctcaaggacgtgggataatgccac

SEQ ID NO: 26666 - DNA, 313 bp, Zea Mays
atcgcgggagtccttgggatgtggtaggctgatgtgcacgttgtgcaggctgttgcaagacacatgacggtccacggagcaaaccacccttgtcaccacggtgatctactattgccatgcccagaaacatcgggtcctaataatgaggagcctaataatgaggagatgggcactgggtggttatagttgtacatgttcctccgttgagtatgctttgcacatcttctgactcaaccaaccctttgatcaggtacacaatatgggtggtctagatgtgtaccgcaccaggagcccctcagaacattgggcccac

SEQ ID NO: 26667 - DNA, 471 bp, Zea Mays
tggggctggagtggtcttcttcttcttcttctctgtttggcatccttggttggtggtcttcttctggattttcttcttgggagcgagcttccttagcttcttgtcatagtccatctttaaggttcgataggcctcacgggtgttgccttcctcaccttctgctatgtcgagactctcctggagagatgccttctcttgcttaagcgctttgacctactgctctaggctttccactcgggagtttaggtgggtgcagtgggaggagaactcatcatagtggttgtctagggtgtggaggtatccggccatgtagacaatggtggggtcatcttctgtggggtttcctcctgacagagcctggagtcttttcctccaggtgggggtatttttgttgctgggtggaaaatatcgaagggggtctcagagatttcccggttgtagttttggcatatctgtttaagggctttccgg

SEQ ID NO: 26668 - DNA, 298 bp, Zea Mays
acaagccatattctgatcaaattaagtaaactattactagcagtcttcagtaaacaatactgattccagcttctatttggaaaacggcagcagcgccagcttttcagatgcagggaacgatagaaagaagattggtattgttgtttctaaaatgctctctattgaaatagaacatgtgtatagtagactagtagttccaatttatttacaaacatagcattgcgacaaatattgttgcgataaatatagagagtctgttggtaacatagccttttatttaggtgtctattgctaagta

SEQ ID NO: 26669 - DNA, 631 bp, Zea Mays
acatcaaaattgtagaccaaacaaaggagaacaactttgcttaagagagtaagcatagttgttgagaagatgttggagataattaagcccaaagttggactgtcaggctggtggaactctgaaattcagaacttcagtgtaacagagctaactttggacttggatttaaacatgatccagtgcaagtttgggcatgattcccataacaaatttgtagctggtatgtagattcacaattttgctgcagagatctggacgagttgctatatgaatctgagagaaaatgaggcccaaactctgtctgtcagaccgaccgatgaacatatcccatggtacagtactggaaatatcaccgaagtggataactctcaccgccgacgaccaccgtgcacggattcgcgtattgggtcgccgtgattcgtgctgaccaagtggatagcacttgggatcaagcaagggtccccgtcgtggataaactccagccgataaagaattccggccctcgtaccgtgttcaccgcggtggaaaccgataagaacgccggtgactcccatcgcacggccttgtgccacgtatccgaacacctctgtcgcgtcgccgtgactctttacagccatcaaatcgtcaccgg

SEQ ID NO: 26670 - DNA, 1147 bp, Zea Mays
aagaaggtccccggtagtagtgcaggagtcattcatcaacaaacaccggataagaacatctccaaagtcattcgtcaacaaacaccggagaagaccatctccaaaggcagtgcaggtgtcgttcatcagtataagcaaattggtagccactccacaagtgatggtgctaaaccaaaaggtatgttgtagcggtacagcacccgcatatagtcgtacaaaatacggttttgcactatagactgcactgtttacagtgtgaagtttgaaatagaagataaaatgagggataggatgtgtatgctgctagagacaacctaatgctaaaacattgtttatattttaagctatggtaaggtcgttggggttgtatcaggcctcaattgtaccacagtgaaaattatatgcggacatcgtatcagctagggacgaatgatcgaaaagatcggtaacagtgttttctaaacgaaaatgattccctgtcagtcagggactcaccatattttcaatttttaactatttggcggtgacatcaatatggcgctgattgctgaaaggaaatagaaaccaaaagtttattgaaagtagaaataaaaaataaaaaaaatacggtaatggttagaaacggtcataaacaatgtcacttttacggcaaacgatccctagttttagctttgcaatattttttcctgatgttcatggctcttcaatccttcaccttttgacgttgaattaaattttattttttagttctcattttttttcatttccttcgtcttggctccctatcattcacaagatttactttagaacctaccaccacctatttctacccaattatcgcttgagtgcagacagacaagccgcttggtttatgttaactatcataaagttgtctttatcactagtggtacttggtcaaagctatttagtggtggctggtcctattcatttttttgtttgggcgctgtctgatgattgtagttattttgcttttccgtacatctgactcaataatttgtaacatacacagtttccccagcaccaaaagttgaaccatcagatgctgtttcagattcaactaaagtcgcaagagtatggatctttagctttcaaagttgtactttgttgtttcagagctgctatttca

SEQ ID NO: 26671 - DNA, 322 bp, Zea Mays
aggtaacaaattaatagctgaaccaccatcaatcatgatacggttaatgactaagtcatcaatctcaccaagcatgagaaggggtctattatgtttcttgatccccaataacaaatctttatcagcaaaagtcatgttttgagtttgagctaatttcgcttccacctgggaaactttggctctataatcttctggaaaggataatgcagtaacaaatgctttatgcaaatcgggagaaagacataaggcatcatacacagaaagcatagctggtattttcttcaagtgtgcaactacatcatacttgactgagacatttgat

SEQ ID NO: 26672 - DNA, 398 bp, Zea Mays
gcggggtccatggccacgccgttcgacgagatgacgtgaccaaggtaagcgaccgtgtgagtgccgaagagacacttagaacacttgagcgccaacttgtgtgtccacagtaactggaacgcctgcttaacgtgttggagatggtcagcccatgaacttgcggatgaggatgcgtcaaagaagaccagcacgaacttgcggatgtacgacttcaacacctcattaatgagagcctggaaggtagaaggtgtgttcatcaacccgaacagcatcaccaggaactcagtggcctcaatgagtgcggaaggttgtcttggcgatgtcgtcggggtgcatttgcacttggtaatggagttgtcgaggctagttggttacgccatctcttgttggaacttcga

SEQ ID NO: 26673 - DNA, 406 bp, Zea Mays
cacgagtagttctctattttgtaaaccaagtctgtttgtgtttcagagaggtgtggtgttcatatttgagtgctcagagagttgtcttccatcttatactcgagcatcgcaagatttgggcggggctggcgcgtataatgggaagtacacgagcatcgcaagatccgggcggggctggcgcgtagaatgggaagaatgagatggcggggtggtcctgcacttgcgatgggatgcgggccgatggtggtcctgtgcactggatagcgacgaggggattggattgcgattccttccatggcgacaaggcatggatttcgtttggggtgcagaggatatgggtggggcatccgcggtgcatgggaagaatgattgggcagggtggtcctacgcgtgcgggtcgtcggcg

SEQ ID NO: 26674 - DNA, 383 bp, Zea Mays
acatggaccggacatggtttggtgatgttgcgtctttgtcatggtcgttgtgggtcggtaatgtcagcctgggttccctccttgcgggtctgctcggcggggacttgatcgtttgctctgcctcgcaggcttgctcggcgaggacttagtcgttcgtcccgcctcacaggttttctcggccgagatttggtcatccgcccgcctcgcaggtttgctcgttaaatgggtcggagagaggttatgggccttactatgggtaccccattcccaggtacccgacagtagctcccgagttttcgtgcgactccatggagtcgggtggaggctttcttgctggggatcaaagccctaagtgcgcgcaagcgcatcaatatgatgtagcc

SEQ ID NO: 26675 - DNA, 327 bp, Zea Mays
ggcgaaggcgtgagccgaagaagacgactttggatccataggcatcaatatatgaatcaagagagaagaagaataataaggaagcttattccgcgtggaaggaaagggaaaagatagcgtttcccttgtgaaatttgtaagtcatgtgtataagatatgtgtgtgtggttgtaatttcatacgaagatgtatcccacgactataaatagaggaacactgtcatgcattggggttacttttggagtccggaaatgctgattcgctccgtctttgaagataccttgagatactttcgatttcccattcgcgaagttgaagatatatttg

SEQ ID NO: 26676 - DNA, 323 bp, Zea Mays
caaaacagaatgcgtgcatctacaactttcttagagtggagaacttaatacttgaggaagatggatgtatttttatttccccttagtccagaatcataggtgctctattaaacgcatgtcgcctacgtgtttactcaacacattgggtggaagctctttattgagcgaatccgcaaacatttgatctatatgtatatgctcaaggtcaattatttgatactagactctctcctttacaacataatacttagtgtcaatgtgctcgacaattgacttgttataagagtatcatattgttggttcattatcgcagtataacgtta

SEQ ID NO: 26677 - DNA, 355 bp, Zea Mays
gccccagagagtgcttcttcaatttaaccttgagccagttttcacttagcgttaaagaccgagcatcttgggcaagaacaactttctggattggtggggcaagataagtgaaatgacaatgggttaaaccaagattgggattaactctctagtttcgcttggtgcttgggccttatggaaacaccgaaaccaatgtatcattgaggacatcaacccgagtattgttgttgtattggcgcaggttggagaagagagaagtttgtgggagatggcaggggctaaatttcctagcagcaaccctctcagctgattgttgtttattggtgtagttttttccttggctcggtttcatgga

SEQ ID NO: 26678 - DNA, 608 bp, Zea Mays
tgtcaaggttgaagaggtgagcaggtttggtgaattatggtcaacctgttagcattggaagttaggtgtttgagaggagtcattagggagggttcagtcgagttatttgtttcagggattgatcagactctgaaaaagatcttcacccatgccgtgctccacttgtgctgctctagctcgaattgaggataagaacgggggcacgaggggtactaggggtgaggagtttgacgtggctgacgcctgagtcgtgagcagcatgtgagttatccacgccggtgactcacctggttgtttatttctggtttgctcgtcactgatcctgcctacatggcttcggcctaatatcgagcgtgcgtggtacatatgcatggacgccatgtaaacatgtcctagcagctgctaacaacgtaccaccccaatcctcccagatctagcctcaccttgagctgtgtctggcactgtctttagctcagtgtcgctgctgccttcgggtttagcaaaattcaccgtgcccgcgagttcatcacccaaattgataacacactatgcttcgccaccctcttgcgcttgtgtaaccacaacccagccgcatgtcttcacccgag

SEQ ID NO: 26679 - DNA, 611 bp, Zea Mays
ctaaggtttgcaaaccagtgaaccaaggaggtctgggtctgcacaacttggatgttcttgggtgggctctaaacctgaggtggctctggcttaaaaaaacacaaccggacagaccctgggcagaatttgacatccaaattcatccaaatgcagcagcccttttttctgcttgtgtgtgttactatgttggtgacggtgcttcaactctattctggacagatcgctggcttcaggggcaatcgattaagaagattgctccatctctgattcgtcgtatccccaaaagaatccagtttatcagaacagtccaagaagctttgatcaatagcagatgggtgaatgatatcaggggtagtctgccggaacaagttctacttgagtacttcaatatttgggatttgatttagggggttcagcttcatccagaggttcctgacaggcacagatggctacctacatcctcaagggaatactctgccaaatctgcaaataaccggtttctagttcgatcaactttgtttgagccagctgaaaggatatggaaaagttgggctcctccgtgatgtgtgtgtcatttcattaagaagaaaaaaataccacatacatcaaag

SEQ ID NO: 26680 - DNA, 311 bp, Zea Mays
cttgcctttaactttaaatctcctcataccccgcatcggtgacacttttaagtatacgtgatcacccacttcaaattccagtggtcttctccgggtatccgcatagctcttctgcctcgactgtgctattctcaagttctctctgatcatccgaatttgttcttctgcctcttgaataatttcaggcccgaagaactgcctctcaccagtctgatcccaatatagaggggttctgcactttctgccatataaagcttcaaacggggacattttcagatgggcttgataactattattataagagaactccg

SEQ ID NO: 26681 - DNA, 476 bp, Zea Mays
aaaaattcttcagatttaccccccctcgcctccgttgaccttcacacaaggattcgcgctgatcgcagtgattcgtgcaggactcgggcaggatagtaccgggggtgaaaagatcggaaggggagtggatttggtcgcggggtgaagcttatcaatagcgccagtagccatgcgacgtggccagaccgccggtgtcgtcgtggtactccggcaacctcagttacgccacgtcgtggctctttaccacgtagtattaatcgtggcgcgcctggacttgccatttcaagagctgttgcaccggcaagcgccacgactgaaccgccagtgatcttccctctctcaagctgttagctttcatttccaaaattcggagccgccgcttaacacccctataaattgatggcccggtctgttgtgccatgttgtcacgaagccagagcacccactcccgtcttcgattagccaccatagccgga

SEQ ID NO: 26682 - DNA, 404 bp, Zea Mays
tccataaccagttttttttacacaaacaagacaaaaaacaataagttgcatggctccacacttccacggcactagtttgttgatgcttcctgtagactatagctgagttcgtctcactcgggacggagaaaaaagggagaggaggaaatagtagtggcgtgctgctgtggtggggacctacgcctgcttggatcgatcagtccaacgcatgatctggtggtgcagaggacatgaaaacatgcacatggcatcttggagcctgttttgtcctgtcctgcccacacacaactcgcgaggcacaagatgatcttgttagggcgcatgtcaacaactgtcattttgtttatctgattcgagggcaccttttttgtttagtttaatccaaagcttagagcctaccaccc

SEQ ID NO: 26683 - DNA, 1297 bp, Zea Mays
ctcgtccccttccccccacttcttcctcagataaggagaggccccaggccagagaaaaaagcatcgaatttccccccgttaattggcctgagccctcagccgtctaccagcagcagctagaggtacgattctcgcattgcttgctccctgcgcctgccctcgatttttgctgttttttcgagctcctcttccagttcttttgccgtgttggaaccgcatctatgcagcctagcgcggggtactagcgtgattcggtcagtggatcccgtcgggctgctgcttcctcgcggctgatttgcgagaggaagcaggtccccgggaagcgatctcatttttcgttatttttttagctccctacaccaaagaccagagtcagatccgaggctacccgccgccccggcaaggattttacccggccggagctctgcaacatcggtgggatcgatggctgcgacctccacgagctccggtgcccacgaatcgaagtcagcagcgccgtgtggactgagtcacgtgcctggttcgccgtcctgtccgacgcttctcacctcgagagcccgtcgctgttgcctcggactcgagggagctggcggcgcaaacgccgtgcggccaaaatcgagatccccaccatccgaatcgaggtcctctctaccagaatcagttcccgccgccgcgtcgaggtagctgtcacccaaattgagctttccgtcgctgctggatgtgttggaatcggaagcttcgggcgcatagcttgagctcgctcaagtgtatcgagcaagcaaaccaagcgttgggggtcttgctttgcgcctttgccgcgctagcttagcctatctatccgtgctaggaatccccctccctttcggtgtgatgtttttgacttgccactgcctggtgttgctggggctgcttttctcttctcctttggggctctgaatgaagactgaagaaatcgaaagagaggaaagctacgcctgagtcggggaacgcctacgaagtaagttttggcttaaaggtggaagcttttgaggtttctccttgcgaaataaatgcttttttcgatgttatttgatggatttggttggtactcggtcaaaaggtgttcttggtttgccctttctatgctctggctgctgttgcaactgcaacttccctttcccttagagtttggcgctctaaaagttggttcactttgcacgaaggatttctgtttcttgttgctgattgggttgtttggatctatctgcaggcagacaagctaggttttactgcttcattgagcacaaagatccgctga

SEQ ID NO: 26684 - DNA, 346 bp, Zea Mays
aacagggtaacaaagaagttctccctgccctttcgatgaaggcggatgggaatggacatttctcagtggatttccatgcaggattatcagcattgcaggccttttctatctgcgtctctttgcttcactgttctgaagcttcttcagacattggtatcgagaagtttaagaacaagctatactccagctcgctgaagattctcctgaaggaggaagtgaggcagttaattaattcagtcacgcccaaggagaagaaaccaaagagcaggaatgaaaagacacctccatctattgtcatcgaccctcccttttctcccatgggtagagtatagcatgtggataagca

SEQ ID NO: 26685 - DNA, 473 bp, Zea Mays
agttggtttattttattgtctctcaattctacactcattttatttatttgttgtagttgtagaaaatgaagagaagtagaacaatagcatcatattttactcaatcgatcactccgataatacaatccagtcaacctactcatggaataaatttggaaccggtagtagagatggtagaaacttaagctcaacctagtaatgtgtagcaaactattcctggtgttgtacctaatcagaatggagttatagctgatcttggccttcgagttccaattgaggatttggatccaaatattagggatgctataaaaagagagtatattttgatgggtccatgtcaaccaaaaggtcatagttttccacaaagaataatatgtggacgcaatcggtgatttcaggaagtttggtttaataatcatgcatggttggagtacagtattgccaaggatgcagcctttttgtttttattgcta

SEQ ID NO: 26686 - DNA, 303 bp, Zea Mays
acgtggcataaggccgtgcgacgacggtttaccggcgaacccatcgaactttccaccgcggcatacacagtacggtggccggacttgtttatggctggagttatccacggcgaggatattatgtgacccaaagtgctatccaacttagtcaagcccaaatcgcggcaacagcagcacgaatcgcggcggcaggtcaccggcggtgaggaccgttgcgctggcgatctgatcccctttggtctactgtaccatcgcgaactgccatcagtgcgcctgacagtcaatgtttgggctcaattttct

SEQ ID NO: 26687 - DNA, 545 bp, Zea Mays
cttgaatcattctagcactttaccacttcttagagttaaattaattaaataaggactagcaagtaggcttacaaattttatccaaatcatttagtgcactaaaattactacaaccaattaacaacgcattcttcacgacaatcactcaacaatttgtgttttaaattagacatcacatgagcactactacttttcatccgcgaccataaacatacgcatttagactacaataagcaattcactgtgattacgagcttaaccaagtcatctaacaattcggttaactagagcaacgacatagccgctaaataacatatacgtcaacttgcccattattgccgcaatccgggacacaacatatactacaacattttcataaacacacagattcacaagtatattcgcacacagaccgactcatatgaattgtaaaccacaaatctctaaatcgcaatcaccacgcatttacttcctaaatcatgaacgcatacatgtttatcctacgaaccgagtatttcaataattatcctaaaacaactaactcc

SEQ ID NO: 26688 - DNA, 534 bp, Zea Mays
tggtccctgggcccaccggttaggaagcgcactgcaaacaatccctaaacactagggcgtggaggagatggataccgtctagcatgaaggcacccgccacttgatgaacctcgcggtaccaaacctgaggtcggacgtggcagaacctggcagggggtcgggcgtgtcggagggaaccactccagtggattccacacccaggctaggactaacccgtcataaataactggtcgtattaactacatctagcaccgagccgttgcggaggcaccagtccgcctcccactcacgacccacgaacccttcggtatgtggttcatttatggcccacacgtcccttgggctgcgacacactcatgatctattgcgactaagcctgagtgcgcaggctgatggtagagcgcaaaactacgagccacgtcgagcccagcctacgaagcccagagtcggcatagtctaaatgatggcacctgggactcgcaaatcccacgccatccgccataaataatatgagacaatcaggcgatcccgggc

SEQ ID NO: 26689 - DNA, 311 bp, Zea Mays
tcgccggagttgaggaacccgctgaactcacgctccatcgtggctagtgacaaccgtgctgcgattcatgttgaatctactcctgctgcattcgccatcacctagggatcgtgtagatactctagaactcgccctagggctctgcgtatctatccgggggtactcgtctgagtgctccgtcgcgtgcgggataccaccaccgcgttcggccaacgtgagggacgagaaggccctcgaattcaccgtaccccttcgagcgtggctggtttggtaaagagcccatgtactttattattataaacccatcgtcc

SEQ ID NO: 26690 - DNA, 403 bp, Zea Mays
gtggaggtcaccggcgggatgacgggcggtgatcagggccgggagggggtgaacggtgaccgtgtgaaactggtaaagcttctgagatagcttaatttggatctaagtgcctaagaagtgggtggtgaggaactcaccggagatgaggcagtggcggcgatgctatctcgaattgagctgaggggatgggagggggaggtgaggtttgcgagctagaaaggagccttgggtgtcccttttataagcgacctgggagaggagcgatggccgactggactctggcaagcggcggacagtggcagtgaacagggggtggggatggcagaggacagtggtgacatgacgccacagcgatgaagggcggtggtggcgtgcgagttcatgtgtacagcggacggaggac

SEQ ID NO: 26691 - DNA, 324 bp, Zea Mays
cagcgtttggagctggtttcctgaaacaggtcagttcctattagatgaccatgatcatgcctgccactggcttaattctgttgtgtcctaagaaagaagatccgaaattggaaggttaaattcctagggccagacaaagagtccaatctcattcatcatatcagcaggtgcaaaacatgacacccttgctacatgtggttcgttggtcaacaagtagttactcagatcttgatcaatcgaggtcaaaaaaaggaaagtaggaatcggtccaaagtttgacagaaaaaaatagattactcagcctgtggttctgctgcatataaa

SEQ ID NO: 26692 - DNA, 484 bp, Zea Mays
cctagctgtccaaaccgagacaaaacttgtgccaagtcgtgtcaaacgactttgggtttggttcaaacttctccagggtgttctagaggtactttggtgccactttgtcaattgggccatttggttttaagtttgggatcaagatgaacatgtttgatctttggaaagggggtggttttggacttaggagaattctgatttttcctttgtgctcaccccttgggtggatcttttggggtttttctaaatactttttggggtcattttctgactatcatttgtggggtatcaagtgtgctacatcttttataattggcccaaatcatgatcttgtggttttcatacccttttgttcatgcttacttctagtgctccacttgtccaaaaggggtttgaattagggcttgggcaattctccccattatatgtgcataacaagcaatggtatgacttttaaggtgggtttcacttacttagaatcttg

SEQ ID NO: 26693 - DNA, 304 bp, Zea Mays
gacccgcagaacgtgaaggaaagggttgggcaaacacccagggggactcacataccggaatccgagcactggcgcgcgtgacgacggggaaaggcggatctatggtggggctcaactccggcgacgaattgaggtggctccgaggattccccggcgggtaagggttgcggtagtattccttgaaccaatctgacttctcgccagcaactcgctggggtcagggacggtgcggatgactccccggtgcagcggcactcccccacacgacggagctggttctctctttcttcgatgacggcgcggc

SEQ ID NO: 26694 - DNA, 349 bp, Zea Mays
attaatattttttccaccaccgataaataccggcgtgcacaaatatcaagagaagggggccgtttggcgcgcccctagctgcagagggagatagaagacagcgaccatatagagggaggtgtagcgtgcaccggtgcagagaaaaggggtgctctgtagccgccaaaggaagaggagagggtctctggcgggaaccgttgaagctagtcttacacccgtttccaccactcggttagacattgtccgaccgttgtgcggcgttggcagcactgtaccaccgcgggaaggggaagcatggcggcgtaccgaagtcaatggcgagtggcgcttttcatacaggccagcgcgg

SEQ ID NO: 26695 - DNA, 280 bp, Zea Mays
gagtggtggaggtggtaggtatggctaaggtggtggatggcgtaggagtgactggagcgggcgaagtgggaggtggagtggtagcagtggcgggagtggtaggtgcggaggagcgaggccgagaggcgagacgacgaacgcgataagcaatctgatctgaagaaatccgtagctgatctcctctctctgtctgctcagcggctgctgcttcttgcgggcttcctgctgctccaagtagacagtcttccccttgacctgcctaaagcggcaaggagggtcc

SEQ ID NO: 26696 - DNA, 673 bp, Zea Mays
aaaggtaagcgtttatatagaagatatcaatatcacaagggtcaaagatggtaacggacaagggtataagagaaaagatgaagacatagaagagtcagtggtactagtataacaaagaatggatttacgcccaagcttacacgcagtaacaaagaggatgttgccaaaagtgagataagtaaaacactgctctcaaattgggataggagattggagattttagagaacagacatagtgtaatcaccaaggtaagatcaagagatgagaaaggtaagggtaatacccaaccagagcaaaagcacaacaaaggatagagttaaaaactcgcaagcgacatagaagaggatacgaccaagggaaagtaggtaagatacaactctcagattgagatggaagagaggagattttaaagggtaggtattaaataaacaacaagtaagatatagaggtggtgaaggtgataaaaaggcattacaaaggatagagttaaggcaagacttgcaaagtgtcgaagtggagaaaacaatcaaggataagatatgtgaggttccgatagaagagttgaagtaaaaaaatcattaccgaagaaagttacaagaaattaacgagattaccacggatgtgcaaaataaaatgaccgctcatggatcattaagaaacaagggtggtcaa

SEQ ID NO: 26697 - DNA, 379 bp, Zea Mays
aaaacaaaaaaaccctggtcctaaagagaggcgatcatcacaagaatgaaattgtggtcagttggggaagtaagaaccaaagccactgccacagggtagcactccgtcgggcatgaccaccctgtggtccctgttgggacgaaggcgaacacgtccccatcactcgacgattgccacatcaacatatacaagactgaaggccctaaagattaagccccacaagctaagcctaagaacgatgcccaagcgaaggctcaagagctcccttcgccacggcgagccggagtgaagaccactaaaggcttcgaggctcggacaatcaagacgtcgaagaccctacatcttgacgttcctcgatgtaaaaagcggtccatgttca

SEQ ID NO: 26698 - DNA, 416 bp, Zea Mays
ctcgattgaggccatcctatcttggattaaggcaacacaagctctacccacgtctagaggcggatctgcggtagcagaccaagtccaatgagcaattccttgctcaaagcacaatcatgcaccctgtcatcgacctccacatgatacatgtctattgccgaacactgcaatcaaatctttggacgcagagcagcgacaaggatgagaattgatcgtggcgtccgtggttctcccctcccccatggatgcatttcatggcttggagcagggcgtacagatgaatagcatgaggcagggattcacggaggcttcgactttatacgcctagggaatggttcggatgagatcacatcctgggacacaagatggagttgttgtgcatggctcagactcgtaacaacctagggaaggagatg

SEQ ID NO: 26699 - DNA, 567 bp, Zea Mays
attcacttcttctactcaggagctcctgaatggctcgcctggtaatcatatttttcatcggagaggtcttcgccagggagatcctctttctcccatgttatttgtgatggttatggatgtacttagcagcttgttccgggttgctgaaaatagaggcttgttgcagagccttgggggagctgatgtccgcagtagagtctccatctatgcggatgatgtggtccttttcataaagccaattgaagcatacctgaattgtgctaagataatactaaactgttttggttcggcttccgatctggtaaccaatatgctcaagagcagtgctattccaattagatgtgatgatcagcaggtgcttgctggctgcagagtactgcattgcaatcccgctgcgtttccttgcaggtatctggggttgcccatctctgataaaaaattgaggaaatgtgaccttaagttatggattgagaagattgcagaccgtctacctaactggaaggctcggctgctcaacctggctgggcggactgcgctggtgaagtctgttctatcggccattccgac

SEQ ID NO: 26700 - DNA, 369 bp, Zea Mays
aatcctaccttatttttgtttgcacttgtccctatgtaccaaagcttggagttgatattgtccacctccttcgttttctgacccttctatttagtcttttggacacataagataaactcttagtcgctgcttcaactaacttctttaacttaccagtaagcggccctacattccaactacctaaatggtcgactaacttctttaccttttgcacccgtcaatgatgtgaaggcccttgctcatttttcactacattagggcgatgatgtagcgcgccattaagaaagcagcgatccgattcttgctcatttgacaccgtgcccaaatcacgacacaatttgtcaccaagagggtgctgatctggccctt

SEQ ID NO: 26701 - DNA, 322 bp, Zea Mays
ctttagtcgcaccactgtagcctctttagtaaatgtgctttgattcaggcacagtgctattgactgtgggagcttcagactcctcccgaaggtcgcgttgctgttgagcatggtgttgcccttctagatgctgactgtgtgctagtggtggtggtggtggcaactaggcccaggaagcttgagaatggcttgccgaagcgatagaagccgtaggctgttggttgcccacataccccaggacataaggagaataacacgaagcagtgtggaggacttgcttcggctgactctaccgcgtttcagcttcagcaatttccttctg

SEQ ID NO: 26702 - DNA, 434 bp, Zea Mays
atgctaaggcgattcatgcgatgtggtagagcacctaggcatgtggcacccgagcggcaggtggccaactccggtgaggttatctggacaggccgtaaggcgattgggtacggtggccagggcgaaatagtgtcccaagctcatcccagcgccagatttttcacctgaggatcgttatctgcgtttagctgggcgtgaatcacgacgccggcgcgaatccgggtgcgagatcactagtggcgagggggatgaacctgagattttattcagtttactgtactatcagactttcatcagagcgtttgacagaccgatttgcagggcccagatctcagatttttatgtagtaactacttaatccatttgtatcaaagttgtagctctataaaccagctacaattcggctatagagaccttgctcatttacttactcc

SEQ ID NO: 26703 - DNA, 410 bp, Zea Mays
tccactggcgggggtgggtgaattcatttgcggaagggaatcaaagataaagattatggtggaaggaaaaaaaaagaaaaagagagcccggatgattttaaagaaaaggggttagctcaaattttaattcctctttgtgttttataatgcatgcatgctgtaagaaacgttgcctctcaaaagaaaatagggtgccttttagggcatccttaaaaatataagtattggcccacagggcctaattaattagccacatatttctccctctatgcctaaggcctttcgtcctaggtctagcgatctagtcctgacgatccgtaacagtttctaagcaagttttaggtttgaaaattgatattcatggtttattgtccttctctgtggtggaatttgctccgataccagctgtg

SEQ ID NO: 26704 - DNA, 540 bp, Zea Mays
atttcttaaacgcaacggaaatcaaatctgggccaccagacatgtagacgagaataaagaaaaacattaccgtctgcttactacgcaaagctagcaatgaataaagaaaaacaaatctggtgaacatgtagacgagaagctagtagtagagggtagggcaggacaaccggacaaaacaacattaccgtcgagctcctccgcggcagatctgggccgccgtctgcttactacaccatcgagaagctagcagtagagatctgggccaccatctgcttggtcatgaggtcctccacggcaggggcaggtgagcagcgtgtccacaggtcaccgcctatagatgctatgccgcctttctacgagcaccacactatctgaagacgaagaacacatgggttgcagaggatccacctccctgctccatgggctgcacccttttgtttgatccaaacgtacgtttgggccatgtttggtcacagatccatgctcatccttttattagaatggcccaattcaactctgccctaattagtggaaaaccca

SEQ ID NO: 26705 - DNA, 475 bp, Zea Mays
tcacaaagtaacgctcgaggtcacagagagcgactggccacaggggatcctttgtgggacccgcccattaaccgcgcctctcgtttcgactttcgaatggccgaagggcacaaacccgaacctgtcgcctgttgcagggcccgactctgtccccgcccctctcctgttcctgatggccccgcctctatgggccccgccccacagagaagtggatagggatgccgcgagtggggaaaggaaagcagggctcacacggaagattcggagggatcaaaagcctgggtacggtgcaggtgcagctgcgggaaatcctttgcgtctcgtgtcgtccagccgggcggggcggccagctgcgtgtttttgtgctcaaagatagtactacccctacccacctagcctactgtctacccatatctctttacccataccggagtatatgcctccgaaatggcgttggtatgcaaccgtacgcaac

SEQ ID NO: 26706 - DNA, 434 bp, Zea Mays
cttggtgtttatccattgccggtgcccatcctgtctacctgtctctggtttgtgtgtgacttaggttcactgctctaccgtggattcgatcgggcatggtgcttgtgccgtgaagccgcgtgtgcaggtttaagcagctgctggcaccatcgaggtccttccctgctgtgatcaggacaacttcagccaacgcctatttctgtaactcgtggccatggttctctaggtgtgtagcgctcctccttcacgcgctcaggcgcgtcctccacgttcggcgtcttactgcccctcgtgcgcgctcggccttacctcccctgaccacattgctctctctagctctcgcgtgtcatcttccctagcggctggtcgtgcctctatcctactccgacgttcaccagcgcgcatgctttgcacctgctcgccggtcatccctg

SEQ ID NO: 26707 - DNA, 602 bp, Zea Mays
ggacaatgtggcagttcaccggcgagggcgactctgatcgccactccactgtgaacctagagaaggagaaagtggtggcccgcgttctcgccatcatggtgcgggtgacatccgacttcatggacgatagtagagcattttgtgccgacgatgaggaccttggagaggcgtttcatgctgacaatggcctcgacgacaagggggtaagtcccgtgatgagggattttgctcggatggtcacgtcggtcgaaggcgatcgggatctccatccagcggcgacgtgggggatttgatggttccaccgtgttcacctcctgggtgcttgatttgtggcaacgcttgttgccgacggcttcgggggctagcggtggagcctcccccgcttgccgcttaatagtggtggcggattggccgagactttgcttctctgcttcattccccatgaaatgttctagagcggtgcctgcgttgactgactcgtcggggcaggcaaggcagagcgctccggttgcggtggagaggaagtcaagggtgtcaaacttgacgtggctcctaggggcgaatgctgatgaaccggccatcagaatgaagaatgtcgcttg

SEQ ID NO: 26708 - DNA, 382 bp, Zea Mays
attatctgcagtagcgttgaccaaggcagcgatagcctcggccggcgttggtggtacaggtggcggattaggagtatcttcccgaccacgggaagtccctgcatcgtcatgcacatgagtccttgatggcatctgaggcaaagaacatttgggaaaaatataacattgccgatacacaccatcattttacattaacaaaacgtaatgatacagactcaagtgtacaacatgacatcattacttattttacataggtatagcttctaaactatactagtctagtcttcgtcatccttggtttcttcatttcctgccgtgggagaccgatcgtcagccaggttcatggaaggaggaggcctaaaaaggtctagctccccatcag

SEQ ID NO: 26709 - DNA, 310 bp, Zea Mays
gggcccagatttagccactgatgagaacgttcagcgctcaatcatggccgttggtttacggatcagtggttacgacccgtctcctccacccgtatacaccgcgtggtgaacaccacaccccatggcggcacggtccgctggttgatatgaatccccacgtgcgacagtgcccctccccaacactacatggtagaaacaccctacggttcatggcgagctcgacagaggggtttctcaccggcgatggcgttgctacgggggtcggccacggcgaccggcggttcagcagcgccccatgaagtccgacgag

SEQ ID NO: 26710 - DNA, 399 bp, Zea Mays
agacaaatgactagcgagctgtgctgtgcggaacgaaactgcccagtagcttctcgtgacagaagaagtgagtggtgttggtcggactagagggcaatagaaacgtactgtacgttttggtgtgggttcgagcagtaggagcgacgctattgtcacgcccaggaaaaagcaggtggtggcgctcattcaccgttcagtattgaacgcccgcgggggcggggcatggaaagttgttgggtttgtcctctggttttgagagcgctagcgcactatgggctagctagttgaatggaacagttgtcgatgggtaggagaaatgtttgcttttccctgtaggtgagctgctgcttttggggtcttgcgggagggagggagggagaatatggagctaggtacggg

SEQ ID NO: 26711 - DNA, 1713 bp, Zea Mays
atgggtatacaactcccctcccgaacgcttccaggccttgcgggtttcttctgcacgacgacgaagacgacatgaacgaggcattcttgcgggaggtggacgccatctgcgaggagcgtgcgcggtccacggccaggaaggaggaaaaggagaaggagaaggagaaggagaagaagccagcagaggagcataaggggacgggcggagtggcgctcatggcggcagcgggcacgattgacgccgctggaacagagacagcaacggtacggttcttgtttcatcgaagtgcctggaaatggggttaggaatccggtgggtgtattttatttacaaatgctggatattcagattctaaggaaatatggagagccaatgcacgaaggacgttattatttgtttaactggggtttgctttgaagtggaaacgccatttagtgacattttttgaaaaaggaactcacattgttgctctcttatttggacggaaattagcttgacgatgctttctgggaggaggtgagcgccatctgtgaggagtgtgatgcccagtctgctgccaagagccaggagaggacgaaggaggaggggagcttggtgctgtcctgcgatgatgcttcactcccccctgctatttccatcaccgcggagggtggggaggtatgtgaatattctgtgttcatgatgtttgtttttgattccatgaatcagaggaggaaattgggacgttcttgtatcgagtatggtgcatgggattgttatagatttggggagaatccttaagttatgagagcacttcacaataacttaattttttgtttcatgaactgaaatgattttaggaaatgtctgtgaaacatagcaaattcatgtttattgtgtgtgtggcgaagataggaaataggcatgcacaatttggggtttattgtttcttgaaatgcgactgtgttaatgtaccttatttgtaagagaaatttattgtgttgaatctctgttgaatttcttttgagatgaatttagtttgaagatgcattctgggagatcaatgccgttatggaggagcacaatgccaaagctcatgccaagtatcaggaggggctcaagggaatggaggagaaagatggattgttagcactgtgcggtgatcatgatccttcagtttccccagtaatatccgttgcaatggggggtggagcggtatagcttttttcttcagacaatggaacaccgagtagttgtaggacatcagacagtttttgtttcctgtgtctggaaattagcatcagtaccaaatggaaatttgtactgagtggttttagtctggaatgaagtctctaactgagttcatttgattccttttctcttgggacatatttagcttgttgatgcactccttggtgaggttgatgctgccgtccatgatgggcatgctgatatgtctgctgctaagggccaggtggaacagcaagatatggaactagaaaaggaggaagatgaagcgtgtgctccaaagaagtacaatgaatatttgcactccttgaatgataggcagaaggaggctgcatgtaatgatgttgctgttcctctaatgattgttgctggtccaggaagtggaaaggtatacatacttgtccttttatctttgtgtattcagcgcgtgtatttttttgaccgattagagtccaatattttagacatatgaaatatagttaactc

SEQ ID NO: 26712 - DNA, 637 bp, Zea Mays
ctccacttccctgtccaactggagtctgttcccctgctgtttgggctgaaggttcacccatttcagtatcttcatctactatcggctctctgtcagagatttcatgatcaaccacaaaagtgtctgttgtttgcatgtcagtttcacacaagaagttgtcccagtcccaatgcttactctcctcaaaaatgacatccctgctgaccacaagccttctggagattggatcaaacagtctgtacccttttgtacccgattcatatccaatcaagaccattttacttgacctgtcagataatttattcatgcctggaccaagttgcttcacatgtgctacacacccaaacactttcagatgactgaccttgggctttctaccatgccaaacttcaaaaggagttctactgtccagggccttggtaggtgacctgttcagtaaatacactgcagtcctgattgcctcaccccaaaatattgttggaaccaccattgcttttaacaaacacctggccatttcaaccactgtttgatttcttctttccaccactccattctgctgaggggaatatggagtggtagtgtagtgtttgatgccatcttgactgcagaaagtttcaaacagaatagaggtaaattc

SEQ ID NO: 26713 - DNA, 302 bp, Zea Mays
ccgccattgggaccgctgtccctgcgccattttccacccacaggtgtacctcgtagaagaccttggctacttcgacatccaccgcaaagggaattgcctgtggatcgatcacactgacctgcatcctacatatgccatgatgtctgtaaaacgccatatcaacatcggatgcaacccccagggtcgagccaacaccccaaatgtgaggcaccgtacaaaattcaaccggcaacccattaaactgaatccaagtatcaaccaacttagctttgacacgacctccagacgagcataccttaaac

SEQ ID NO: 26714 - DNA, 470 bp, Zea Mays
actagttctagtgcagcaagagcaaattggtacgccccctcgctcatggagtgttgctcaaaaatttgcattgcccactcatagtagttaagtctccacaaagaaatagatctagattcccctgaaaaaaacaaatggttagaatataagttaaatgcagtatacaacaagtaaagctaggagaatgatatcaccagaaacttgaaaccctgtttccaatgaaaagttctccaaagcctttggagcttcatacccggatgcagccctgttttccaaagtatttgtcaagtcaataccagagagagcgccaacaggtagtccgattataagttcataacaaaaatacccagcaattttaaaaatgaaatagacaacgaggcaagcatacacatccaaaagttttattcttaacaggcgaaagggcctctagcctagtggttaaaagctaacaagtagcacctccaagtccc

SEQ ID NO: 26715 - DNA, 439 bp, Zea Mays
atgccaagtggtggaggaggtggtggagaccagggcaggaggcggagacgcaccagaggtggatggccggagcgtgtagaggggccccgagctgtcacagcgggcgaggggagtcttggtggtcagatccttcacagagaaaccagaggggtcaaactcaatggaacaggagttgtcagtggtgaaatgacgaacagaaagaagattatgagtgatgtggggggctatgagtacgtcgttgaggtagaacgatccagggagaaccgaggcacctactgaggtgacgggcagagtggaaccatttccaacgacgatcgatgaaggatgagaggaatggggggatgggagcgagagagcgtgcctgtagtgggagtggtgtggtaggaggcaccagagtcgatcacccagtcggaggaaggaggggtcatcgccatggtgc

SEQ ID NO: 26716 - DNA, 362 bp, Zea Mays
cgccgtagttcgaattccaccgcgggacttcaccaccgtgtggccgggaccgccaccgctataattcgaggtgataattccctcaccttgttcatcttgtcgttcatgttgagtagtgcttgaccatagtggattcggggcatcgctgtagctaggcgacctcgccggacaccgcgccatggggcggcgccgccgtgtccttgggcgggttggagaagaatgccccgggaccgttgatcaacggattgagggcagggatcggttagagcttacccatccgcgtatctcttctgcaccattgcatccatttgtagcaaacacgattagaagatctttacctttttgttgaatcgattgcgaac

SEQ ID NO: 26717 - DNA, 602 bp, Zea Mays
caaagctatccttggtaaagcacgcatcattgacactctattgagcaaaggcattttgctctagtgaagaagaatgtcaggtccaaaaggatttatatagacaatcaatcatgcatgggggctgaaagcaataatggagacaaatcagatccatcaaaaaataggaaaaggcagagtcgcgggtacaaggtacatattgcatggaaaaacaataatggaaggcatatcagagagagaatcagatgacagatttcatatcaacaaagtaatgagacagacacatccgatacaacaataaaagtccaaaaaacattgataagtgttgcagaacatcaacactaacctcgacgacaatgcatcaaggttcgtcgaagaggttaatcgaaggagggcaatgtgtcatctttggagaagagcgcacaagagagtgagcaagactccgattagatgtgggattggaagagcttccggaggcttaagacaaatataccacctccgacggcctaccaagatatattctagtcccactaatgatcacctaacctccaatactggaacaacccgaataacggatagatgaacaagagtgaccgactgaacag

SEQ ID NO: 26718 - DNA, 378 bp, Zea Mays
cgactttcacgtgcctgttccacagtcactgtcgaaccctcgccgtgtccgttgccccagtgagcttcgcctcgatgtcagcaactcgggacacccctcggttcgcccctcccctctatttctctctatccacgctcactggcccttcctccgccactgtcgacctgagatcccaccgtgcctcgggcaccgttcaagggccctggagccttctctcgaggtaaccaacctaccctcgcccctattttccccttgtctgccctcggttgtgcacgattgctcgtcggagtagagctgtgccgccgccgaggcacctcgtcgtggaccagcaccttccaatgctcctatgctggtgccatgctcatggccgggttcgcc

SEQ ID NO: 26719 - DNA, 336 bp, Zea Mays
atgaggagtgaaaaccctcccgaaggagccaagaacctgcagggatacacaatggggacaattgaacacattccaccaactagattcattggatttgtcaagaatttgaagaatttgcaagaggtggaaaaaggtgcttactgtaacacagcagggaaagagacagagggaaagagacagatgaatgggctgctcaccaagaggaagaaggcgagcccaggcacacgatcgccggagcacggtggtcgccggtgggggagatcgccggcgacggggaggagtcgccagagacagagaggaaacgggcgctggcagggagaaagactgagcctctgg

SEQ ID NO: 26720 - DNA, 373 bp, Zea Mays
gctagattcagtgtatcgccaccggtgatcccgcgccgtgatcatcgccgccattgcgattcgtgctcagtgaagtgcagataactgctcggggtaagaaatatcgcgttggggatgtgctcgggacactgtttcgccctggccgccgtaccccccttgccttacggccggtccagataacctcgccggcgttggccgcttatcgaccatgcgccatgtgccttagggtgttaccatgtcgtagtaaaccactgaagcgtgtccgttcatcgcctgtgaccttgccacggtgaaagccacgaatcccttgcgccagtaacctcccctctctccggccgctgcgcgtcttttccaaaatcagccaccaccgccg

SEQ ID NO: 26721 - DNA, 551 bp, Zea Mays
acggacgttgggcctcacaaacatgcatgtgcaggcagcgttcctccatgattttcctgcatgcgtacagattctagagccaaaacgaaattgccgatcccttggatatcgtatttccctccccagccaggctgcatgccagagaaataatccttaaggattctctgtgccccaaatttgtggccctaggtgtggcttgtttcgaccaataaaaatgtgccacgtcgttattaatctgcgattagttaaaatatattaacttttgcgttagacatctgaattaatatgtttctattgagttagcttcgtaataatatcatgcacacattaaacatattatcttgtcataacgtatgtttgttttacttaattgtaagttggtctgttggttattaacatagcaatttagttaaaactattttatggttttaagttacacttttataaatatacgttaaaatgattaataccaactcaaataagtactaatttaattattaccaacttaaacgtttggattcgatactggtttagtataaatatgtcatcta

SEQ ID NO: 26722 - DNA, 409 bp, Zea Mays
ccagaaattagtgcgccccatttccttaatcagcattgttgtgtttggcaagccgaagctgcaatcagatttgggcgcctaccatctttgtttttggcaagcagcccactttccctaacacgccccctccttctttccttattcagggatttgggtgtgcccatttccttgtccagcagtttttgtttttggcaagcggcacctccatatttggtgcgccaaagctttccaattcaggctattcgattttggaaagcaaaccttgtttcctcattgagggatttgttgcgcccatacattttgggaagctagcttgggcgccactttttccagccggggttttggtacgccttctccatcttttgcacacctcccttacacgccccatccttgccttgttctgttcggt

SEQ ID NO: 26723 - DNA, 412 bp, Zea Mays
gcatgccagaggttgatactgggttttctcagcggtccacgccatgtgtcgtaggagacacggcaacaccgtgtttcgcctggtgagggaggcaacgatcggcactgctctaccttgtgtcatctccttttccgcccatttattggtgatctgcaaaaaaggtatccctgcacatggccttgttagggcgctcgatggcgtatctatgggttttgcttttaatctactggattttgttttggagcctcatcgagtagggtctcagggcctgtcccttggccaggatgaggtctaggcattttggggctagccctatgttctggaattgccatcttaggatggtggagtgtgcgtgcttagggtgctggactaggctaagagggtacacggctccggaccaccattgaaaaag

SEQ ID NO: 26724 - DNA, 371 bp, Zea Mays
acaactcggtggttttgagcctcaaccatgaaatcgtggtgagtaccgcagagcatgcgcgaaacacatcctagacatgtgtctcgttagtcctcgaccgtagtggtgacacgatcctctctcccacatcctcgtgcctatgcgtgtcccaagtgccagccaccatggctagtcacctgtttttctggtccctcggtcaagtcccacgctcgtccttcatccctcctagtccatcggcatgatcccacatgaccttcaccttcaccgccatccaacatccttgtgatccacacttgcacgccacaagctaacaaacatggttgcacaaccaaatatgctcacaccctagttagtccatgacttaacccgag

SEQ ID NO: 26725 - DNA, 310 bp, Zea Mays
aaaatatatatagagtttactaggatatctgtgaaaacccagtatattaaggtatagtaagtaataacataaaatcgaatcatatgcctttgtgattctatgataaagataagccgtggttataagcaacttacctgaatgtccagaacaatgcagcccagcatgctttgtcatttgctttgtgtgcaatgtgtgaggtacataatcatcttgggttgtggtagcggaatctctagaacaggaagcagattagaacaaagttagctatgaaccactgctttctgaaagggaaatagtcttacaccttttc

SEQ ID NO: 26726 - DNA, 277 bp, Zea Mays
ctagatcgtgatttcatggataagttggtctaagactccaatttaagcttaagacccatttataggagtatggtttagttaatacttgtaacatagattagaccatattagtttaggtagagctgccagggtagaatatatattattaggatatgctagaatcttttgagataagatggactctatggtgtaggtaggtcagaatctctgtcggttaaaacagaggggttatgcaactatcagatggttaaggtagttgcatatggccaggttggac

SEQ ID NO: 26727 - DNA, 534 bp, Zea Mays
taacaaacgacgagccgccgagaccttgacggggtgagatcgacgcgtcactgcttgttaagacgtactactagtttattactgcaaggtagtagtggggaggctttctttttgttgtcatggtccgagagtattggaatgaaatatcgttgcagcaaaagaatatctgggagcgtccccaccaggcaccagctactacgacatcgtgaacaggacaggagcatgtgttcctatgcgtatgggtatgttgtggagatttgaacgaataaggcccatgcggccatgcctgctgctgaattggctcatgcgtcaagggacaaaagcttatgctagcgactgaatttggtggcggtccaggaatatgacttttatatattctagttgatgattctgagcttgccctggatcggtcttcttatccagacttatccccaactgagctgagtcctttactatggccttcgtaaaccagaactcacgtttggctcaatccatccattacggaggaggccggacaggaacatctgcctggat

SEQ ID NO: 26728 - DNA, 769 bp, Zea Mays
ccctcgaaagaattgagttcgtggcgggtttgggaagggattaccgtgcccacagaggacacccatgagtccgttgtcttcgttcctttcttgattcggggtctaggtttacccgtctccccctttttccgtggccttcttgattactattcccttaacctgacccacttgaatcccaattctgttcttcaaattgccattttcgtgcacctttgtgaagcctttcttaggattagcccgcattttggattgtggaggtatctctaccattgcaaactggggatggcgagtggacagcatcaggtagttggtggggccagcctggaacttcgccgaggcaggaaagttgaatatctggatatccccctgaaagacagtattaagggatggcgtcttgagtggtttactatggagaatcacaacaattccctacctccccgctctgggaggcagcctgatgtgcgagtacccagttggatagagggtccaactaactctgaagtgaccgaggcaagggttctgttagctgagattgccaacttgaaagacagaggtctgactgccgaagccgtagtgatcgacttcgtattcaagaacattcagcctttgaaagacaaagttcatcctgcatatgtgtataccggggtcagagaaccctctcgtgtgatgaacaggcgaatctcacaggaggatgtcttgagccgagtcgagttgatgctaaggggtgccattgtcaatgatggtgctcctcgatcttattctgcctgga

SEQ ID NO: 26729 - DNA, 591 bp, Zea Mays
caggcatcttagtatgttgctgggacaaaacccctagagcgtttgctatgttgggtgacttgttgtgtggaagtgtttgaatcagagagagtactggtggcatagttatatttgcgatgaagttttgtaactgcaagctgttagtgctgtttggctgagaatccggtggtaaactacaagcctcctgactatgctgggttactgccgtaactgttgagggtactggacattcgtcttgagcagcagtcacattacagacttgctcggcatagatatcatttgattctacttggggctcgacaacttgaaacccctgctgcgactgctgatgcacgtccacatttgagatcttaggattcagagaattatggaggtttgagataggactggggacaggcttactaggaagtggggctgttgcagtatctgaagagagcttcgatattaccttgggagatgtagcagtttccatggcgaggtcgttctggatgtcgaatcaattggctgcatcttgggcggggctttcgtcagcgaccatctcaacaacggctccaggggacgacccatcagtgcgaagagcacctgcagaga

SEQ ID NO: 26730 - DNA, 670 bp, Zea Mays
gctttttactgaatctggtgcactgttcacggtcttcagaaaaatcacgccgacgatgaggatgccacggcggtcgggataggtcgtcggcggccacggtaaaaggctttggcaatgtggcgttaaaacggggaggtggcaggccccggttaatcggcggccaccgtgccatcaccgtggacctccgcggctataaatagcccatggttcgcggcgaggctcggtcatcacccacataccagtaaaccaaatcgagtcaaattcgcactgacctctccacctttgcccaaatcgtttgagcacggtgaaaagcatagtttcttacgtccgtgtagccttaatccccgcctccaatttcacccagagccgtcgcaacgccgttttccccaaattggtctccgccaccgtaaagcaccactccaccatggtcagtccattctggtaagacaccatccgattcgcgcgttgttcttatgtccatgcatgctggtgatgcttgacaaaccaccgaattgaactaggagcccgctaatcgattggaacacgagcacatgtccgcgccgttcactgtcctcgcgggcagagcttggcagatcaccaaccgtaaaatttattggggggaaatggtccttagaacttgaatttggtttcgaccaaagtaggacaccaa

SEQ ID NO: 26731 - DNA, 463 bp, Zea Mays
gtgggttatcaaacatgtgtgccgaagtgcgttgtagtagtgattgtttaagttgaaccgaagtgtcccaagtacatgccgggatatggttgtaattgagctaataaattataagtgttgcgtgctatgagactcgatcgatgtagttaatattgattgggcctgtagagaggtggtgacatgctgaagtaaccatcgcttcctctacggttaagtaggagtcatgtgtgatgatgttacttatggggtgaatgcgtattgaaatattttatgtcgtgtaatatgattagaaatgtgaaggatagatagggtttttcggaaatgttagccaatagatttggacaagcgtgatagaggttgagtcacttatgttataaaattgatgctcgacatgttaggtctcctaaaatgtggcgttttaggtgactcgtgtgttatccaatttaagttgagcaacggttaa

SEQ ID NO: 26732 - DNA, 439 bp, Zea Mays
atctgaatgcttttttgctcgcagaaatcgaagaattctgaacttgtgaagttggatcctaggtcagttatgatgctgtttggtatcccgaatctgaatattatgtcttgtatgaattccacgaccttagctgaggttaaagaagcaatgggtttgaactctatccatttggtgaatttgtcgattgctaccagtacatgagtgtatcctccttgagctttcttgaaaggcccaatcatatccagtccccagcatgcaaagggccaagtcactggtatggtctgcagttgctgtgctggtagatgttgttgcttcgacaagtaccggcaagcttcgcacctctgaactaactcggatgcgtcattcttcgctgttggccaatagaatcctgacctgaagaccttcccgactagtgtcttggatgctgcgtgtattccac

SEQ ID NO: 26733 - DNA, 295 bp, Zea Mays
ccctccggccgccagcacaacctcggggaattggacaccaccgacgatgggaactataaattgccacctccgcccgctcctttaggtaactgcgcagccggtgaagcaatccgcaccttgaatcctcccctagaattcaccaattttggatttccccaaatctgctcaagaacaccgtaatagcaacctctccgtggccagcgctcctcagtttaaaacatacccaattacttaatgttctagcctctgttaagtcccttgttgctcatgaacctatccaattgcgctaaaccac

SEQ ID NO: 26734 - DNA, 380 bp, Zea Mays
cgtgccgaccagtaggcgagcgtcgggtgacctgtaacggtgaaaggtgtagcgtgtaggcatggcgcggtcggctgggcctggggtcgtgaggttgaagatgagcggggaccgtccattttgtgatgaacgctctagattgaaaggaagaagatggccctgtagccgttagatgggggttgacggctgggattaaagccggatacctcttcgtcatattaaatccatgccgcagaactttaatcgggcggataggattaagacaaacacgtggacgtactacgtccgtggatctctgatcctgcggccatcattgaataccgattcacttaattgttacgtctaatcctggccatgtgcatctgatcggacggctctgg

SEQ ID NO: 26735 - DNA, 371 bp, Zea Mays
gtcagacacaaactcagagaaaggtctctgcaacaaaaagaacaacaccgacagtataggcaacagaataacccggcatacgacaattcaaggctaagtaaccaaaacttacagtagggggaagattccatgcagaataagcccaaggggcaccatcattgacaatgacacctctcagcatcaactcaactcggctcaagacatccctctccatgattcttttgtctgttacatgagaagggtccctgacactggtatactgataggcgggatgcactcaatctttaagaggttgaatgtttctaaacacgaagtcgatcacaacagctctgatggtcaagcccctatctttcaaattagcgacctcagct

SEQ ID NO: 26736 - DNA, 378 bp, Zea Mays
cacacgatttcgtttgcatcatttattgttgttggctagaagactccctgtcggtacgcctttcccaccattgtcatagctcctgcatggtcgtcgcaaatgttagagtggatgtcttcaagtaatacttttccttcattagcatcgaaggcatgatataggttcgggatctcggagtaagataataccctacatattgtttgtggtgtctattgctatgtaatatgatctgctgatctaccatctaggggttacatgactcttcttttagattccaaggagggacaatatttacatgatatgtatctaggtcggttataagatatggattgcaaccgagtctaagatgaaattataattgagcctatctcgaattat

SEQ ID NO: 26737 - DNA, 534 bp, Zea Mays
gacgaacatggcagcctaactggcacgcatgacaaagatgctcatcatgtgatctagtacatgggatagtggcactacgagtaagctgcatcaaggcatcgcatccgaggtgaccaaggcgacgatgccaggtggtagaagacgtgatggcagcaaaaacagcagctatggcaggtgacgaagatgaagaaggggtggcgtgcggaagccgaagggtgtagagggggccggtgctgtcagatctgaggagggggcgccgagttgccgagtccttcacagtaagactagaagagtcaaactcgacagaacaagaattatcagtagtataacggtgaatagaaaaaagattgtggaccaaagaaggagcgacaagaacattgggaatgcgaaaagagccgggagggccgacggtgcccactgatgtgacgggaagacacgagccattcgccaccatgatggacgaagggagagaggaagaaggagggcgaacagaggtgagtataccagggtcgggagtggtgtggtaggtagcac

SEQ ID NO: 26738 - DNA, 1205 bp, Zea Mays
atcttgctctaacttaaaaaagttacactcagtaatcagcatgagctttctatatcactaaaagaatgcaaaaaattataacagtaagaggctatgttcattaagaatgattgagatcatatattgaggacttgagacatagcattaccatttttcaattctccccacttactgcactgaatacatgcaactccaacaatcttctgtactggccttgttcaatctcagcttcatttgcaccatgcagtagcaggagctcaatgatgcaatcttcccaatcaatactgtcacaggaacctcttcgtctctttttcctagcacctgaacaacctgtcatattgtcactgggaaggatatgatcgatatcatccttcttctttccccctcgattcttcatggtcaatttttttcttacaacgtcttctgagttatttgcttttgcagctggagcagcaggagccttcctagttgcatcaattcgctgcttagcagcttcaatacgtgctctcctctgcttctgcaactccaaaccagcagtaaacgatggtggaggtgcatcatagccaacgtcaatatccaccacatcctcaagcagcatgtcctttctccaaccattattcactgtgtccatgcatggctccagctccagtcctcctttcaatcgcttcctcctgtcagtacctttaccaaccttcccaagtttctgtagctgggcaagcctatttaagacattttggtaagcatctgataggcccttctctgagatattctgattttcaaattctttctcctctggctcaagattatcgaaatcaaagtcatcagaacccactggagtaatgtgaaggtatttagacacttcgtcatcaactttagagttagcctgcacaattgcagcaatgttcggagcgcagctcataagaaactcttcagaagggtccgattgtgaccgcatctccatgagccggagcaagaccggagcgttgaggagcaggttcttggcattgacatcggcaccccatggaagcaggtgccccgcgacatgcaccagggcgtcaacgagctccttgtatcggagcaggctggtcctcaatcctgccgagatgtcccttgcaatgtcctccaaagagacagaagtgaccccgttcacctccgcagagaaggcgagcagagccgcgacgaggggaagtggaaaccgccccgtg

SEQ ID NO: 26739 - DNA, 612 bp, Zea Mays
gaccagttcaagacagcgtagtatttaggcgattgcctgattgatcagaagtgttgcgccagcactcccagcggcgtaaaccagagtactgtactatgtctgtcacagtccatcttgcatgcccaaacacaaccatggaaagctagaatcaaccatgcaactctcaaaatctctagaatctagagatgacctcggtgactattttcagttaaaaatgcatcgtctttgatgcatcaatctaggtcaaaagttgacccaaagcctgctgtgtgtagcacacacaagattcagaacgcaagacagtgatccctagaatacagtaagcaatctcctgcctcataattaagccgattttcactatttgacgagaattcagaacaccagacatatgcatgggactcaatcagatgaattaattatgcgttccaatggcaaagcaatgaagaattcagaacactagaccgataatctatatccaaggaacaaaacaagacaaacaggatacagcagcagcagacgccattaaggctaacaatttgaagaacagttgggttattgttcggcctggtatgaagttgagggaattagacaaattactgactagtcagctgg

SEQ ID NO: 26740 - DNA, 622 bp, Zea Mays
cggccgattacagtcgtccgatctgaaacgaggcgcctagattagatccgtgacaacgcgaatcggtacgcaatcacaaccgctggatcgactacctacgtccaagattcaaaatgaccttgatttcccctcgcctgcatgatttctaccctgcggtccagatctactagcgcgaaggcgtatccttggcctaatctcgtccattcaaccatgatcgagccgctcaggttcgtcttcttcctttcccccacgaaacggcggcgcgagtccgatacacgacagcgccctgaccggtgcaagccagtacgactctcaggcgagctaacaagtccatagttcgccccaaaacaaggcgaagattattacgaacacgtgggaaacggtttcgccaaccgccacgcagttggacacccccgaccgcaatacgggcgacgcccgaacgacattccgcgcacatgggccaaattcatgcccaattcgcccacgattaatgacagcgcgacaatagctaggaaaagggatacggtgagggtaaagaaccgagggctcaccgaatgcggaggtcaaattggcgctagacttcccacggcggatccgcttagccgccgtgctccgacgagaa

SEQ ID NO: 26741 - DNA, 430 bp, Zea Mays
ttgacgccttgatcaacggcataggcacgttcttcgtcccagctgcccagcagacccaaaccacggcggcgcagagcctccccacaaccgcgccatcgccggaggtcaccgcatcgaccaagtgcaccaaagaccgattgaacgaatgctatgcgaatagggaacaaaggcgtatccgataatcgtgaacttactggctatcgagacgcagttggcgttctacacgagagcttgcagattcgaggcgcctcaattacttcgacgagcaattcaacaggcctgggtagatcactacgcctgacgaggctccacgaaggtctcctgagctctcgcgcttcaccagggcaccattatttgggctctaatcctaggttcgggcataacccagacgacgaccattttctcgctcccgaccatggcggtgctcggc

SEQ ID NO: 26742 - DNA, 314 bp, Zea Mays
agagagggaatatcgatacccctcgccgcctctatagaaacgattgttcttgcggatcagtgggatttcttcttcttcctcctcttcatcctcgtgaaacatgccgccagtagcctgtgcattgtcacaacctttggcatcaaccttgggaatggcgtccgccgggacatcattagggattggtacagaaggacaagcatcctaatccaagcccaacagtcgccgaagtcgcctcttcttctttttctcctcgacaggtctagtcgggcggttcactcgtcgtgaacgctctgggcgagcaccttcaattttcc

SEQ ID NO: 26743 - DNA, 354 bp, Zea Mays
cccttatcttatcatcaaatcgatcgccaacgggcatgatctgatggctccctcatcatagcctctgctgctgcaccgcagcaaaatggccctggtttagtttagtcctcaagatcccgcctttctggtgctctgtttggctagtgtcgtgccgccgcgcgaggacccggagattcgattccggtccggtgtatctctaggctgcttggtttgggttaggatttagtgggcagggttgtgcagctggtgtctcgtggaggaagaatttcgtgggaggattttgaccgggtttgggcaaagagcgcgccgttcgggaggaggtgattctcgcgtggttgcgtgctttgctgggag

SEQ ID NO: 26744 - DNA, 360 bp, Zea Mays
gccatcctcacggaagacaaccgcgtcgtggtggccactgacatcgaggtcgacgatcctcacccccgtcacctcgccgacccaggcatcggtgatgaggaacatgttctgtgtatggccgtggtggaggcacagtttgtcatgtcagggagcccagaagtgctgcttgctgttggcgaccgggtcattgcggttgacgaggatggcgtacaagtgcttggggaagagctggagattggacccgtgcagaagatggcagtttcacccaatggcaagctcctcgcagcatttgcacatgatggtcgccttctcgttattcccaccgatttctctaggatcatattcgagtatgagtgcgaa

SEQ ID NO: 26745 - DNA, 366 bp, Zea Mays
tatagtagatcacataaagaaggaaatctacataacgaacggaatcaagaacaactgaattgactgcccaaaaaaggacttgcccgtaacgcttaaactgcaggcaagtttgttggtcaacgatcagatttaggcatatctgaactccatgtaattagcaaactaataagaagaaaggcggctttcgggaagggaacgaaccaatggtgcgaggccggtgttgtagattcctgtaatagcccccgagacacctaccttctttagcaaccagctcgccgcagacgcgcctgggggtctcgtttgggagctaaaacccaagtcccggaaccaatcacaaggacggctactgccgacagagccttcttt

SEQ ID NO: 26746 - DNA, 274 bp, Zea Mays
cgcgaatcggagctcctccgtgggcagggcacagggcgcattgtttcgggattgtgagtcagccgtgtgattcgaagtagtcatgtgttcatggaaaccgagttcggtgcgtgaatggggtggggattcaccgtggggcgcgttgccggacttctccaccgcgcggtgtgtgcgcgccgccgcccggggaaatggaggtaggcgatggctcttggtccgttgatcgagattcatacggctaggattagtttcgtggtattccttcgctgcgtgg

SEQ ID NO: 26747 - DNA, 359 bp, Zea Mays
gctaccatcaacacttgagatgagaacatcatcaacggtaaaattgcaactaaaaccgaaatcacatagttgagctacagatagcaaattaaagttaagagattcaactaagagtttggaatggtcatttgaaatagcaattttacacaaacctttaacatttcctttgcgattgtctccaaaagtgatgctatcataggttgagcaaccttcctcactcatttcggtgaacatcctcatatcactggtcatatgttgagtacaaccactatccaacacccaataattttctcccgccttataatttaccttagcatctcctttagccataagacaaagaggagatgagaaaagtgagg

SEQ ID NO: 26748 - DNA, 306 bp, Zea Mays
ctccaccaaaaggcaaggggcatgtgttgagcaccacatttggcacatgtgcatggatggatagtacatgcccgggatcagattaactcgagcgagagtacttatccatgcgtggttatcctaacctacccatggaaatctattggatcccgcctaggaacatgtctagacctcatatcctataattataaaagggtgcggcggattgagaaccccaaacacattccaattgaacccatctatttactttctgtatcattcattccttaggagtagatgtagcgtagtcctagttgtagctccaca

SEQ ID NO: 26749 - DNA, 747 bp, Zea Mays
tgtcagtctgtctgaaacctgaattatggtattcagaggcatgtgatgaactttaggggccattttgaagatgatcccgtggatgtttgagcatggtgaatgcagttggtttatagatggatcattagacaacaactttgatactggtcgatcaacaacttgccatgtaaatttaggagaaaatcaatgccaaacttggtctgtcaggttaactgaagaacaatctgatggtacagtagccggataggatcaggttcaggtctctcgccgccgatgagctacgcgtggatccgtgctttcaccgccgtgattcacgctcagatcagttggatagcgccgaggtcagtaaatatctcgccgtggaaatgctccggccattattttactccggccaccgtactgagcagaccacggctggttcggatgagttcgccagagacagttgcttcacggccttgcgccacgtgccttggcacatccaccgcatcgccgtgactcgcattagccgcccattcatcgccggagaacttgccacggtaataggtcacgaatccaccgcaccagtaacccctgtcttctccgaccgccgcacgtcttcgtccaaatcctcggccaccgctcatgtctgctataaattgagcccgctgtgaactccatagggtaattacccatccatagcacccacgcttgccttcaattgtccaccaacgaccgcgaatcgctcatttcccccaaacctgctctctg

SEQ ID NO: 26750 - DNA, 737 bp, Zea Mays
aaaacattaaagtgtgcagcgggcaagtgacctggggaccgaacgcaccaaagatgtgacgcgtcttcgtctgtgagagatattcctagtcgcgcccagaagccaacagcaaaagggcagcccgaaatcagatgcactgagctctccacggccgacaagcaaagttcacagatatcattctccacgcagtgttttttgagaagattatctttggtttgaatcctgttttgcaccaatagccagccaaagaacttaactttagggggagcacggttttcccagataaacttgtagtactcgcatccctgaccattagtcacaacatcttggtagacagtcgatgaattgagtttatgtgccatgtcttcccacgggcacaaccggagatcaggagtcgcagacaaggatacaccatcaaggagcgcctccagctgctccaattctctagcagccacggtggagaggcaagggacaaatgcaaggcgaagggctgtagacaggacattgcagaccgaggtttccttgcgtcgggcgtgcgagtagagcgccgacatggcgtccacaagaggccccgtagacaaccagcagtcgtgccaaaaggttgtagagcgaccatcgcccacctccaccgtggtaagtaagtgatagtcaggcagaaggcgtcggagggcagcccaatgagtaccagctgtcgtgttgtctggagcagacatggggcctccaaattccacttctaa

SEQ ID NO: 26751 - DNA, 772 bp, Zea Mays
ttgatattagattgttctgtctcttaatcccccatttagtcttatagtgttcactgtccaatgatgaaatattttattgttgtcgggcttaaaataagcttactgcattttaagatatgtccacggaaacatattgtgatgtttagttgtttttattggaagagagtattcagatacccccatgtatagtgtttagttgtttttattgaaacatatattgtagggtatacaatatatgtaagcatgtctagggttccccctaaccctaagaggctataatggaccgccaggaggggatagcgggaaacaccatgtcggtgaggacatggtcattgagggtgtagcggtgggcaaggtcgcactagcaggcgtaggaggaagaagccgagtcgagaagaacgggaaccagtgaccagatattctagacatccgtcgcttgggccatggaggttgatgatcacgacagcctcatatgctcaaccgtcgggaaagttgggggtggatcaacacaggaaggaccaccgagatggtgctcggcctcaacaagctaacctgcgagggcatccacaactgtacgttcctactcccaaacgagggagaaaaggaaaccccccttacactgggtccctttagctaattagtattttaactatgaaattaattctctttcaatttaactaattgataataatgtgtattacaatgcgccaaatatcgtatgtttttaaaactccaaaagtttacgtataaaagccaaatagctcagttaaat

SEQ ID NO: 26752 - DNA, 316 bp, Zea Mays
caacaagtactagacaacccagaaactgcagaagtatggcgaatgtattttgatggctcgttgaagctgcagggagcaggtgcaaggattctctttatcgcacctggaggtgaacaactcaagtatgctcttcaactgttatttccggcatctaacaacgcggccgaatatgaagccctgattcatggactgaacattgctatatcactgggcatcaggagattgatggtatacggagattctctggtagtcataagtcagataaacaaagaatgggattgttcgagcgattcaatgggaaaatactgcactgtcg

SEQ ID NO: 26753 - DNA, 391 bp, Zea Mays
gattcttagtttgggaagattgatagaatcacttatttgacttatcaacctttcctccttctagacacactgtgtcatgagttgatctatataacacttgtccatttagacatgtgttttactgatcatgaaatgtctcatattctggaatagcaccctcataggatcctggatgagactcttattgtgaccaagtacaatacacttggatctttttcagttgaccttatagatgctgtactgcgccatcttaaggtcatcctaaggtgagcctactgtaggcttagtgggtttcttaaaccacagtgaggaatctatttcattcactgcagttatcatttcaatcttttccggccataagtgacaataaataccacatagcggtttaatc

SEQ ID NO: 26754 - DNA, 872 bp, Zea Mays
ttgatcagcatgttatacgagaaattatttggcttaattccctttgtcaccatttcctcaagcaacgccatactccgatcaacattcccctctttgcagagggctttaatcaggccattgtagctaataacatctagctggcaaccatgaagtagcatttcacttgcaagccttaggccctcctgccaccttccgttgcgcagaagtgcatgaatgagagtattataagttattccattggcaacaacaccctcttcaattaagtttctgaaaatatgttctgcctcctccatcaggtcattgttgcacagatgataaatcattgtattgtacgtgcaaatatcaggcttgcacccctgactcttcatctcttggacaagccttgtcgcttgatcaagcttgccatccttgcataaggcatatatgataccattgtatccttgggagttcatactaaagcccttggctaacatctgatccagcattgctcttgcgtcatcccacatgccattcctgcaaaatgaatgcagcaaggtagagtaggtcacgatatttggtgcacaacccttctcctccatctcatcaagcatccgcactgctgaaccaaatctcccaagcttgcaaaggccatgcatcaaaatactgtatgtgtgcacatcaggcgggcatccttttgaacccatcatctcatacaactctgttgccctggccagcttcccctccgtcagacatccacggatcaccgtgttaagcatcaccacgttcacctccggcaacctcccgagcatggcgcacgcctcgtccgcctgccttgttcggcacagcccttgcaggaggaacccatatgtcaccacacttggcatgcatccctg

SEQ ID NO: 26755 - DNA, 296 bp, Zea Mays
tccataggagcaagtctgaggggtcgaatttgtttcccttttgtaactaggtaacacatacgtgtacgccaacccggtgaggtccatccccatcaacccagcctattagtctacactcatgcatgataagttataaagaaaagaattaccccctcagatgtgcccctatgatagtttcatcttactgctccttggtcttaccttgcagttttcagatattattttatctaacccacccgaacagttccctttccgtcagacataatgacttctgaattgaacagccaggattgcag

SEQ ID NO: 26756 - DNA, 352 bp, Zea Mays
aaaaatgggttggtagtccggctgtgagtttacgttagtatgtgtcactcgtgagtatttgtattgtgacgggctggtgatgttcagctctggagagtatctgtgtcacaagtctttgttcggtagccagaaggctggatgtgagcagtggctgaagttagcaacgagttgggcaataaataatagtaggagcagtggcaatatgaaactagacccgtttgtttctgattataatctgtgtagattatataatccattgtaaataatcaagatgacaaacaatcaagcagattatgagtagattatacaatttgaagcctagattatgataatcattttatctctcctcaaa

SEQ ID NO: 26757 - DNA, 369 bp, Zea Mays
gggcaacctctcaagcaagaattgcgaataaggggaaaaggctaaaccagacacctcggagaggaggcgctctccaccgtgtccagtgtcgagtcagattgaatcggatcatgtctctttgttggacatgtcaggatggatttttcggattggatcgttttttggctttaggtcagggtggatcgggttttgggtcaatccgtgtctagaccgtgtattactatgggtcaaaagctacgacccatgtccacccattgcattggtcggatcgggttggaccagtttttttttcatgcgggtcaggtaaggtgtctgtgctcaggtttaccgacgagccagatgtcgaaaatgcccgtgagggagtgtatg

SEQ ID NO: 26758 - DNA, 640 bp, Zea Mays
ctcctgggtcctgcttgggttcatacttgttgacatttgagactttaaagttcggaggccattgaattgctcggagtaggggggtaagggaagagactccacacatccccctatcctcccagaggtgatcatgtcaacggtcctggggcggtgagcgagcgtcatgtcaccttaatcaactcagggctgaactgttggtggaggctactgtcgactcagttctggtagcacggttgtgcaccgctgcaccatgatcccgattgtactcttttcaccgcctcatctcttccttgtgttggcgatcacgtgaagcattgatgttgctccatgcgtctcgtctactattgatggcatggcgcagtacgttcggtgggtgagcgagggggagaagatagtttgtcgcttaggtgaccacctaccgatagccctccgcatcgagggtgtgtggtaggccattggcgatctgagccaggacccctccaacctcgcttggcatattcagtgctcgagcaaagtaatggaataggttctgagcaagaagtggattctcacattggagcctaacgtcctgctcgacttgttcccgctcgcgctcctgggcgtggcgacgatcacggcggcgggagttgtggcactctcg

SEQ ID NO: 26759 - DNA, 316 bp, Zea Mays
gtaaatcgtacctataagtaatcaagtcatgccaccagaatgaggtgagcagcccaatctaatcttttaacttggtatcgcagagccaagatccattcttccttccatcctccctcgccatgtcaacaaccactacacacagcagcttctcaggcgttacctctgctccttccctcagcaccgccatcaccatccgtctctcccgcaccaattttttcctgtggaaagctcaagtcacgccgatccttcgtgctcatcagttgttcggccatgttgatagctcgcttccaccaccgactccggtcatcaccaccgg

SEQ ID NO: 26760 - DNA, 446 bp, Zea Mays
tgggagtgtaaacagtgcggtgatcagtaagggaagcctgatcaagaagcccatgaatgtatttctcaggagaaagggatagaaaccctccagagtagaggaaacctcaatcttaagaagaaatcgaagaggaccaaggtcaaagataagaatctactcacttaagaagtgccttcacaaaggtaataaattgagtcatccactgtaaaaaccatgtcatcaacataaagcataagagtcctaccatgagatgacatgtgcaccaacaaagcaggatcatgaatattggtagagaaactagtagaagtgaccacagaagcgaaacacacgcgaagacaaagattagaccctcacaaaagccgtgcctgaggactagggaaacctcaagccgcgcctgcctgagcgctgccgtgcgagcgcctgggtgccttcttcgaaagaacgac

SEQ ID NO: 26761 - DNA, 349 bp, Zea Mays
caacacatgggatccaaactgaaacagagatgcagcgtgcaaagaccatcgcaacacatgggatccaaactaaaatatagttgcagcgtgcgagagaaacatagtccagggacatacctgaacaatggcaacaacaacaatggcagacccatttaaaagcacctacaggacctactatgatctgcggcaagaacaaaaaatagggaaggaatcaagcacaacacgcaggaacatgttcagtttctattgatgcatagttgctcttggattgcagaagtagtaattaaacaaagtgagactcagatctgccaccaatgcctgccatgcatatggtgtctgcagatttcgc

SEQ ID NO: 26762 - DNA, 359 bp, Zea Mays
atacaacctatcaaggttatcgcgagaagccgcaagtacctgtttctcctcctatagacaagaatcagctctcaagtattcagtaagcagtaaaaacacagcagaaaaagacaagtaagcttacctcgttagccgccctttcagagtcaagctaagcactaagagaagaattcaaagaattggcatcgtctaaagaagcagaaacccgagccaggtcaatctgaccttgggaatacttcccatcgagtttagagtaccgccgggtcatatctaacaaaaaacagtcgaagaaggacacacaattaaaaacagactaatcaatcagccaaggaagaaacaaaggtactaaccagcgttgg

SEQ ID NO: 26763 - DNA, 318 bp, Zea Mays
gttcatgtagtgctccaacagatctagcaggcaatcgtaggaagttagtagataagatgactggattttcatgtgtgaagggctacatcctatttcgttcagatttcctttgtgtcgcttaggaatcgtttgtttgctagattgccactggtgggcaaaatgtaacaggatcaccattgtttgtttttgtcattgataaatcagtacaacttcatgccactaaggcagggtattcaactattcatcagtttctcagttatgcaaaataattctcagctatgtaaaattattattgtcttctctgactttcgtatgtca

SEQ ID NO: 26764 - DNA, 956 bp, Zea Mays
cgagccattgtggaggctcttatccaagattgcgatactgtacacactggagcccatcttcaccatcatattcgtgatcaatataactatcatctgggagcaggttatggcaaggctgcggagccagatatttcgaaggattctgatccaaaaggtgctttcagccgacatcccctgttttattaatgcttttttttattctgcattctgacaacattggatgtgcttgtatgaatgatgaattgatatttgctgattacttgcatggctttgttaccttgaccatagctcaaaaaagttatcatcaagtgttttttgtacaccttcagagatataattattctccgtgtcatgatggaatgattcacattgttttccctcttagggtgtagaagcatttaatatagttctactaggtaaatatactacgtagtacgtacctggatgatactggcagcaagttatttaaatattcatgtaatatcaacactccagtgcagtaggcattctatgcatcgatgatgaaaataaatctttaaaacaggttgtgctttagttgcctatttgtgtactagtaatcctgttaatgtatagcctattaactctcaatgtattatgggtctatgactattgctttcatagtcatagtgcatatgtttctttatccatagaatttgttggaggctgcatttctcattacattttcaatttgccactcagcaaaagagtgcatttacttcttgttgttaatagctccttgcttggaaccccgtctaaactttcttatttttgccttttgcagatgttattttttgatcgtcacaaggtaacatattttctagcaattacagcaccatcttcatacttaatcatggtagttatgtgaaagaaaacctcattaacaaagtacacatccctcacttgtgacttaaaagtatgtactttttgaaatatca

SEQ ID NO: 26765 - DNA, 384 bp, Zea Mays
gggaaaaaacagacctgaagatggtctgacagtagagcacaaccgtgaaactggactgacagtaaactaggaccaggtttgagagctattttgagcatgatctaatgagaattgaagtatgatgactatagtgaaattaaagtcagattgtaggagaacaaccttgcttaaggtgggttagcaagttgtcacatggaaatttgagatctgggctctgcaaacagctctgtcaggcaccctgatgagaaccctgatggtagagtggactgaacgagatcgcaggcgcagtgcaccttgcctccggcgacccctgcgcctggattcacgccggcaaggtgattcatgctcatcggtgcccggataacgtctcgtggtgaaaagatc

SEQ ID NO: 26766 - DNA, 384 bp, Zea Mays
catgtcatctgccttccatccctagtcggacgaccagacggaggcggccaactgcatcatcattatgtacctctgctacttcaccggcgaccgtcctcgacaatggcttcgctggctcccatgggttgaatatgtgtacaacacgtcataccagtcttcgctccgggatacgctgttccaggtggtgtatggtcatgacccaccctccatcatctcgtatgagcctagggagacaagggttgatgcgatcgcacgcgatatggaggagcacgaggccttcctcaccgatgtgcgctatcacctcaagtaggcacaggcggtgcaaaagtgccactatgacaaggaacacaggacattgacctacgcagtcggtgactaggcgct

SEQ ID NO: 26767 - DNA, 362 bp, Zea Mays
accttcctattctatttgttccataaatattcataaacaatgtatataatacatcataaacttgcctcggattggcgatcgatcttaggtccaactgcatagcatgtctcggtcgagcttcggaactagaaataaaattgaagtgactgtgagtaaccaactgtgtaaatgtgcataaccaactgtgaaaatatgaataacttacttcacaatgtccgaaaggttcagccccatggcgtaccttcctcttgtcagctttggtcaaagcttttatgctattcttatcaaagaatttaatgcgaggtgtgccagtattattttggggggcagcggctgtatgcaggtgatccaagtaatacaac

SEQ ID NO: 26768 - DNA, 329 bp, Zea Mays
cgcccccttctccaaaggacggtttttggggacatgtatgtgggcgattttcttgtgcacagtgtgcatcttgtaattgtaacattacgtgtctttcattgtgttgtatgcactaagttgcacatggtagcgtcttcacgcgcttgggtgtcattaatatgtttatattgatctgattgttggtagtcttctgtctaggtgacgacttcacctttttgtgatgcgcttattgtgtgaatccagctgcacccttaggcgacttttgcgtggatagaaatatgcgtctcggagacgacttcgcacctttgggtgttgatacgcacttgttg

SEQ ID NO: 26769 - DNA, 471 bp, Zea Mays
gtcagtttaggatcatggcgtgagtttaggatcatggcttgagtgctggccgagtcttttggctgggtcgggtgggcatttgtatgtactttgggtctataaatcaatggaaaaaggcaaggcagtgaatctgttcgaccagaaaactctctcctgttagtttctctcgtgcgtgtgtgtgttcaccagaaagcaaactagttcttcaagtgcttgtgattagcacttgccgagtggagtgattccaacaattggtaccagagagagctagcgatcctgtggcgatgtcaagtgacggcagcaaggatggagggctgtacacaccaccacccaagcgcaacagcgacaacgactcaccgtcgagcaaagccaaggcgagtggaagcttcggcaacccggcgacaatgacaacgaggaggctcccgctcccgatgctgacaaggacgaattacgcggtatgggcagtgagga

SEQ ID NO: 26770 - DNA, 320 bp, Zea Mays
gttcctatatctatatgtatgtgtaggtgggctggcaccagtgttgggctgccgacccatgaaggttagagtttcctgtgtctatatatatatgtaaccatcttctatgcattacaagcaagcctagggtttccaagcgtcatggggacctgagaagcgcttaggttggatccatcatcatcactccaccgctgcgcttggagcaacccgtaggaacaggagatggagaggaaaccagtgccggggaggggatgtgagtggccgccgggcctggagtaggcacggggttgtggggggcagaggcaccggtggtggaggga

SEQ ID NO: 26771 - DNA, 932 bp, Zea Mays
cctgtagcgtgctggccacggcgagctcacttagtacggtgttctgaaccgatttgggggaagtctcaaattggggctctctggtggataatcggaggcacgggtgggtgcgttgggtgcttgagtacatagcggggctgatggcacgctcaatttataggatccgagggcggcggcgttcaatttgaagagattgcactagcggtcggagagggaagaagctactggcgcaagcgattcctggactttacattggcaagaccaccagcgatgaatgggtgggctaaggcaactcactgcgacgtggttaaagggtcagggcgtgtcacaatcacggcaggcgatgtatacctcgacgatggtcgcttggccacgtccctggcgcaagtggatggacgacagagcggccacagtgtcccaagctcacctgtgacaaagatcttttcacgaccgagcgtaatccacttacccgaggcacgaatcgcggcgaccggcgcgaattcgagcgcacggttcaccggcgacgaggggagctgcacctaggatctatgtcagttactgtaccatcagaatgttattcagaacacctgacagagcagattgcagcgcccaaacctcaaaattccatgtaataacttgctaatccacctttaacaaagttgtagtcctatagtccaactacaattcgactatagtaaccatccccaaccgatcactagatcctactctaattcgacttcaaagtcctgctaatgtcacgggtggccataattcagttatcactgtgactgacagctcaactttgagctcattttactccaaattttatatgtgctcaaggcttagctgataggaacgggggtgcccgatcttccgtcaggtgaagataaccatcgatttggtggagatgtcacacaaacgatccggcttcc

SEQ ID NO: 26772 - DNA, 426 bp, Zea Mays
tgctactaacaggccaaaagcactggatgttgctctttgtcggcctggtcacttctccaaaaaggtgcggtcttggagacttggtacttttactctaggagtaagtggtctgcaacttgggccatacatgaggagacaatgggatcctggtattacaaatgggcaattggtgatgagccgcgaggagctagctttacagatcgcagtgtttcttggggacaagcaacatttcgtcggggcggtaatgtaacacccggcaccggctcaccacgcgatgggcctcgatgtcccatggcccaactcggagcagcctaaaggcaggaccacaacggcaggagaaggatggaaatcaaatcagaaatcggaaacagggttcgtccccttcgctcatctcgtcttcctccacggagaggcggcatatcggtg

SEQ ID NO: 26773 - DNA, 570 bp, Zea Mays
cttattgacaaaatcagaggagacattgctatccttacattgctcgccgaagtattatgtcttttggacatgattgtaaattcttttgcgcatacaatatctacaaagcctgttgatcgctacacaagaccagagttcacaggtgtgcaatttagctcctgtcatgtatttctcttagaccatccattttgttaatatatatttgttcaagccaaccgatgtgcatgggcgaatgaaatgctctatacatgcatgtgtgctgtaattgcacactttgaattgaacatttgttgaaaaaagttcctattgcctggactttatgataggcataaaaaggagaatctcaacaaaacatcctcagttaaactctggacaatatttgaaatgagcactcccaagattatggacaaacttagtggaaggatctactgcaagtgtgaattatttcattttagtgttataggtaccatctctagttcatgaattttggttctttgtaagcagatgatggtccaatggcaatcaatgctggacgacaccctattcttgagaccttgcatactaattttg

SEQ ID NO: 26774 - DNA, 289 bp, Zea Mays
gcggctgccgctctcgccccaaatcctcgtccaccttcaacgccggcagtcgcaccacaaattcctccccacgcgctgccttctccccatcaatggcgcccttccccaatggctgcggacgccaatgcgcttccccaatcgctgctcctttgaccaggtgcttcggtagaaggtacgagcccaccatcttttcgacctatccgtgcgagatgtccgtgcttgaggtagctctatgtcgagggaaagcgactgctcctctcccagcctaacctcctctgaattcacgtcc

SEQ ID NO: 26775 - DNA, 582 bp, Zea Mays
gaggggaagaaaaagaagaagagacgtcttcgtcgagtgtctagcttggatcaggatgccggtccttctgttcctgctgctgaggaagtgctagtgcctgcatttgctgaagctgaccccaatgggtgtgacccgactgctgtggatcacaatgggtgtgacctagatgacattgaacccaatgggtgtgatctagccaaagctgatcccaatgggtgtactgtccgcgttgttgatgaagatgaggaagaggaggatgaaatccctctaattcggaagaacagccggcgttacctagccagcggggaaagcagtggtgttccttctccagctttatctgccctcattggtctgcaagaattatctctggcgaattttgatcagactcttgaagacatggtcccagaagatctgttgtcagagccagcagacggtggcatgatggatgtttgcactgatgtgcatgatgctaggctggagttatctcgggcggcgtcccgcgcctcatcgaccttggagcgcggtcttaagggtcaggaggctggtctagattgttctgctcccatggaagtgggtgaaggt

SEQ ID NO: 26776 - DNA, 292 bp, Zea Mays
aaaaattagccctttcattatccatccacttggaatagtatccaccctttctgcgttttaatatttgtaacttgttttttgaaggagcacctgaccacctctcgctagaagaatctatatagaaagaagcatgttacggttaattggtaatttttttcactctcgaatatgcaggagagctgtgtatcatcgcattaagaagaatttaaatatttacaataatctcacatcccacacaccagacaaacttcaggttacatactcggtggagacaaaagataaacccaaccaa

SEQ ID NO: 26777 - DNA, 489 bp, Zea Mays
ctcgccctctggtgttgtagccacttgggtataataaatccgccctgttttcttgaagttcttgcccgttgaagtattagtcgtgttcccctttccttggttggaattcccagagttctgttggaagttagttttatttttgcttcgggtatggacagtccttgatgaagtgtccagactttctacagttgaagcaaccagtagaagaactaggaagagtaggaaaacgagtaccaggggcacttgactgattggtaggagcgggggcagtagtgggacgaatgaaaataggctgcttaaagggataggaaggtgggcgaggtgaagaacgattttgattaaaaggtcagatcaccaacctggttctcttctcaggcccttgattcgacctttcacctccaaatcccttggattttccgtgtcctgcatttttagcttccactgctagtgcagtactgacagctctactgtaggtaaggtccaagcagg

SEQ ID NO: 26778 - DNA, 309 bp, Zea Mays
ggttttcaccgtaacaaattgcatccggatgatctaattccattcgctatctttcctggtacgcgtaggggtggttgaattagaagtccgagcactgatttgaattagggcccactcatcagtctctgctggcgtgtgccctttctcccttgtgttgttgccaggcgggcccggattgtcagacatcttcccctttcttcgctcgcacgactccgctgtggttaatctcggcgcgcttctctggtgccattgcagcgacccgccaaccttgccttgggtacaaaaactagacgcaggccttctattccc

SEQ ID NO: 26779 - DNA, 280 bp, Zea Mays
atcccggatccattcagtgagatagcagaaatggcatgttttggtgtagtttgtcacctttgtaccgtggaccgttcgggtctcggtgccggaccgtctgtagccctgaccagagaagttgccgaattacacaagtccctgagtgtttgtgcaaaccatccggtcgaggtcggcggaccgtccataggtgccaatatggatttaggactgcattgtgtgtttttggagatttgtactacagactgtccaaggcttgagctcggacagtactgacttctag

SEQ ID NO: 26780 - DNA, 379 bp, Zea Mays
caccacatttcagtttgtgcaggtattcgtatcacttacaaactaggcatgacaaatggacaacatcaggtggtcgggggagccagtttggaactctgatgaggtagaaaaattgtatacttggatattccgttgaaggataatatcaagggatggcggtacgattggtttactatggagaatcataacaactctctctccttgttctagaagacaaccagatgtgtgggtccctagctagatagagcgcccgactgattccgagatttctgaagcaaaagcattgctagctaacattcccaatttgaagaacaagggcttgaccgctgaagttgttgtaattgacttcgtgttctagaatattcagccattaaaagat

SEQ ID NO: 26781 - DNA, 504 bp, Zea Mays
cgggtgggcagcttggcttatcgcttgcaattgccggattccatggcaggggtacacccagtttttcatgtctctatgctgaggaagttcttgcaggatccggaccatcagattgagatggaaccaattgtggtgcagcaggatctgaccttggagtgtcgttcggtgtgtatcttggaatcctcggagcatgttttgaggaagagatcaattaagtatgtcaaggtcttatggactaatcagtctgagcgcgaggctacgtgggaacttaaggagctgatgcggcagaaatatccggaactttttgttgtgggtaagtgttgttgattcattaatttttgtcccttttgtcattccgatagaagcgtcagaattcgaggtcgaattctttttaagggaggtagagtgtgattcccggtttgcaaagaggagaagtggaggttattctttttgttctttttcctcattcgggtgatgcgctttgggaatttggaatttgtggaa

SEQ ID NO: 26782 - DNA, 276 bp, Zea Mays
gacaaaaccaagtatggaacaccctcaagatctctcatgaagggaatgacatcaccaagatggagttgattggaaggtgagctagggagattccccatgaagagaggggaagagacaactgaaacgtacaacaggctcaagaccctgggaaacaagatccgaagctacgagagtataagatggatggatcatgacatcgtgcgactaatgaaagtcatttactgtcattgatcctaatcttataaacttattcgtgagaaccccatgtacaccaaa

SEQ ID NO: 26783 - DNA, 346 bp, Zea Mays
gctttcactagtgcatgcgtaggtatccttgttctcttgggactgggcactcgcgcagttcggttggtccatgattgtaatgtaaaatatcatttcattaacgttgcttgtattcacccaacttgcgtaaacatcatcagtaacgaatttatagttttgcgaaacgataatcttgacactggatagcgcttcaccgaactgtggaatggtactattgaggcgacctagtttgagagtgaagccttggcggccacgtattggaatgctgcagcagcctaacccttcacagacaccataaccagtgtttgcgctctccatgatctctctgttatctgtgcaaatactc

SEQ ID NO: 26784 - DNA, 321 bp, Zea Mays
cttctatcaattgcttatcgaaagggtcttgtccacaaccgagcattagttgaagctggtttgaacagtagcttcatcttcactatgatgactccattgcactttacacattttgatcactttatgcctcgtaacacgagtcaaagtatcaatgatcttaatagggtactcagtataagtcagatcatcttgaacactcagttcctccataggcagttgctcttctggtaccctaaggcacttcttcaactgggatacatggaatacatcatgtacatacgcaagatggtcgggtagttccagttggtaggcaacttcccc

SEQ ID NO: 26785 - DNA, 379 bp, Zea Mays
aatgattaaatccgagccgtgggtagcgaatcggagggtcataggcgcgtaccccttcgcatcgaactcaacctaatctgatccgtggatgttagatctaatggttgaaaagaggtatacattatatgctgcacgatctaatcatgtgcgtcggtttgtgatcggacagatctggtttatccatacccttttcggccgagtaaatatgcataagagaccctgggttatcactgaatcaacctgcagcccagtttaactgtgcgctgagtcttaggaaaacttgcgagttggccctggcttctctggaaattgaggcacagtccagacagtgagaaaaacctataaaatcatttagaaaatgatttttaatatgaaaaca

SEQ ID NO: 26786 - DNA, 537 bp, Zea Mays
aaggttcatgtcaatgaaggcatcatgcactgacttgtggaccgtctcctccatttgctcctttaggagcttcttgtttgcctcaagatcttggtggctaacacattcattgaagtctgtagggatccttgcttcttcttcgtcgcctgccatcgaaacacaaaaacaggaaacaaacggtgaaggttatccctaataatctcactacacgctcctctcaggtggaacacaggaacacgctctattgtatcttaccaagctcttacaagtgtctgacgaaatacaaagcaaaggatggtacaatcggaggctggttcgtgatacttacaaagatggagtgaaaccgcgattgaaaggtcacagctgtattgatcagaagaaagtatgtggagcttgggaggccaaaaactaatatcaaggattagcaaaaatcgagtgcagattagcgaagttcaataagtgttcaaagcacaagtcacaattgctggctaagatgtgtcctatcgaagcacaacaaggtaaaagtaacaaaccagc

SEQ ID NO: 26787 - DNA, 504 bp, Zea Mays
cccacctagaggaaaagacttcaggccctgtcagggagagatcctaccgaggatgaccccaccatcgtctacatggccggatatctccacactctcgataaccactacgatgacctttcctcccactgcacccacgtaaactccagggtggaaagcttagagcagcaggtcaaggaacttaaaaaggagaaggcatccctccaagagtgtctcgatatagcagagggtgaagaggccaacactcgtgaagcctactgaaccttgaagatggattacgataagaagctaaagaagctcacccccacgaagaaaatccaaaactagaccaagatccaaggatgtcagactgagtggaagaagaaagcccctccagcaccacctccctccaggatagagaatttgtccgacgtcgaggatatgtccctagctagccttgatgaccttctcaaggaatttggggacactttagaaaaggagttcggaagtacctcagaaagcgctcgc

SEQ ID NO: 26788 - DNA, 599 bp, Zea Mays
aacaaacggcgctagaaccggcaggttctgttttcccccaccagatcggactccgcgtgaatcccgtggattttgccaggaagttgtgtcccgactggcggtgtataaattggggcgcgtttgccccatctctcctccaaactgtatctagccccaaagcaaatcaggaaccgaatcgtgaggtggagttggtcgccatcggggtttggcaagtttaccattgtcggggtcctggagctgggtccgtgagcttcgttgtggtgcagcgagggtggccgtggctcctgcgctaaggttggactgctcgccatcgtcacgcactttggaaaaaccgcacctcaccgtgggtcgagatacccactacatcattgctggtgagaagtactcctctaggttcgccttgatctcctctacgcgtagcatcgtcgggatcggagttcttgcgactgtgcgcgggtggggctgtcggccgtcaatggcgccaccgtttggggcctctgcaccgccgccgggcctgtgtggggggaagaaggtacgctcaccgtccgatttggattgtgtggtggagattagattagtagggtgatgtggtgtgcgcc

SEQ ID NO: 26789 - DNA, 679 bp, Zea Mays
tgccacggtcacgaagatgatacccctgagtaaaaacaacatgagagtcatcattgttagtacaagtatcagcaacaggatcatcatcaggactggccgtgggagtagagcgaggatgacgaatgtaagtctgagtgacaggtgatttagaagagtaagactgaggtggtgtggaagtggaaggtggtgtgatggaataagaacatctggggtagaaacaatagatggtggtgatactgataaagtttcagaaatgggaggaaggctcatgaaggaggtagactctgtggaataaaaagaagaatgagtggaagagtagtaaaagaagggtcggttttcattaaagctcacatctcaagaaatacgcatgcgacgagaagatgaatcgtaacagtgacaccgataacctttatgtttagggctgtatccaagaaaaacacactcaacagattgagcagtcaatttagtacgttcacgaggtgataaccgtacataacacgtacatccaaaaactcgaaggtggtcatatcgtggaggagttccgaaaagaacttcatcaggtgttttgccagagagtttggatgacggttgtctattgatgagataaaccgcagtagaaactgcttcaccctaaaaatgtgacgggacaaaagaagatatcaacaaagtgcgagcagtt

SEQ ID NO: 26790 - DNA, 323 bp, Zea Mays
atcgttgcagctggcgttgtaggagccaaggccggcatgctcagtgggcgtgctggtgggcgtcgaagggcggccattgtgggtagggtgtgtcgctcgtatgctcgggctagggccatggcctgctgtaggtcggtcgggcaacatagctcgacgtccacatggaggcgaccaggtaggccaacagtgaaaagttgtgcttgctggtgtgggggaggaagtgcaatggcatggcaaaggagcgccaggaagctctcctggtagccttaggtcgtcaatcaaaactggagacatgctgactcactctagtggttgctccggag

SEQ ID NO: 26791 - DNA, 392 bp, Zea Mays
gttctctcatttgggggtcttaaccgacccgagagtaagctggatggcgactaaagggctagagattacttgtgaaccacatatttttgatggcacacattttgcacagtggaaaacttgcatgagtcattattttcatacaattgatgcaaaattgtggtggatcataagtgtaggtttttataaaccctttgatgagaacacaaaagatctcacccaagaaaaagagaaatgcttacatcttgaacaccaagctactaacattttatatcaatggataagtgataaggtgtttaaggaaattatgtatatggagaccgcccatgatatttggacatatcttgatggcgtatatggaaggatctctagcgaggatgtggagcacatcctca

SEQ ID NO: 26792 - DNA, 312 bp, Zea Mays
ggatacatgacaacataccaagggcagaggcggcgcgacaatcttcagatgagctagcccagagcacgcgtcgacggtggtcggcggcgatcagcggcggtgaagatgaaaatagagagaaccgagcgtcgggcacaacagtacaaacaaagaaaaccaacaacaacatatttatagacactcaaaaaaatacatacaaagtatgaacaataatgctagtccaatcaacattaaataaacttcacacccttcgagacaactcaaccgatgatcgagggcaacgttcgtaccattctccattgacttcgggat

SEQ ID NO: 26793 - DNA, 363 bp, Zea Mays
cgcacgccgacgagctcgccgtctgggactgctcgggcgccgccgctctaagcgctcaatggggaagacaggggatggccctagacttcgagatatacggctaggattaggtccgaggagtaatcagcgtgggtcgttgatttgtctgcgtgcggctgggattagaccagggaaaggattcggtcggatctgataacctccgttgatgcgtgaatcgacggttggggattgaatccgacttgattgaatctgggccgtcgatcacggatccggtggtccctagtgcgtaccgcttggatatggatgcgatctaatctgcaccgtgcgaagacaatccatcggccctggacgcatgatacctct

SEQ ID NO: 26794 - DNA, 545 bp, Zea Mays
gcggaggaggtggaactgaaaattgttgctcagcgcttgacatcatgttgacagtgccctgagaagaggaggaagtcactggctcccatctgagcttcccattgggattcctcctacacaccacatccttatggtcttgactgcagattgaacacctgtcatttcactggcactctgcacggcgatgcgcatcaccacaacggaaacacaccagtcccagcccgggcttaggaacaacccgaaacctctgagtacttcctcccaaagtacctgagtcagaggatttgccatgatagggatggtggcactgatgctgagcttgcccctcttgtgggctggacctccagtgttgcccctcctcgcgtcctggccacgaggttgatcaacacccgaagacttctgcgactccatggtatactggtgttgcatctccacacccagtgcctgctcactgtagtatggaagtccaccaacggaaaggctcccagggcatgcctgatggaaggtttcaggccctgacgaaactggctcgccttctccatctc

SEQ ID NO: 26795 - DNA, 308 bp, Zea Mays
gactgcatggcactgttcgacgcattcgtctacatcgagatggcttccactgtcctgcgcgtctagtggtaattccatgacctataacagcaatagttcttggtttacggggtagaaaattttgttttgcgctagtgtagcctcccaataatcctacattggtatcagaggcaggttctgcgtagtttttggtctagatctaggtgcaggagatggatctacttgatgcatggtttgattagatcaattgattataaggggttaaagtagattacattgtatatgactgaagagatcagtttgtcctt

SEQ ID NO: 26796 - DNA, 629 bp, Zea Mays
ggagctccgcgtctgccttacccggcagctcagtggggttcttctgttaatttcactccaggagcttcctcttctgcgggtatttctggagcttatctgctacccgctgtggatggcagacagcaaggagacgtggtgacaggtacgatttcagttgattcgtttgcggcccatgctctttttgactctggcgctagctattcgtttgtttcggaggattttgtgtcgcgggctggtctttcggtgcagaggttgggtcacccaattttggttagttctgctaatggctccattagtagctgtttagtttgtcaggggtgttccgtcattcttgctgatgaggtcttttctgccaatctggtggtgatttccatgggggcattcgatgttatcttgggtatggattggttatcccagtattgcgcagttatatcctgtttttggaagacagtgttattgcaggcgccgtcgggtaaggaggtggtattcatgggaagttctccaaagttcacgttatccttgttgccgcaattgcttctagatcgccgatcaaggaagtcagggatctttttctccatggtggtggagggtgaggctgccttgcgggtgcaggacatccgggtggtgtg

SEQ ID NO: 26797 - DNA, 477 bp, Zea Mays
gttagctgtcgctagaggataggctaacccttttggatagtgttcctaggagtaggaacatgtcttatggagtaaggccgatgtaatgatggcttctgacacaggcgtgcgtgtgtttgaaaaacactcttttggttggttgtgcatgcgagcggaataatttgcttgtatgtgcatttatatattatgaagtatgtgacgatgttgttgcgcatgttgggatgtgattcttgccttacgattttttacatgaagttttcttctatgagatattgtacgacatgatttccttacttcacatatgtgcaacgtcactcgtcgcttactcataataaaaatgtgtcgatagtgactactcgccgcattaacccgggggccgcaagagcttctagtagtggtaaccaggagagtgactaggaagcaccacttcctccacctccgccattcgcacctgagcagttcttcgcccaatttctt

SEQ ID NO: 26798 - DNA, 274 bp, Zea Mays
caccacatgggcagatcaaggggcaccatatggcaaggaaagatgatacatccaggatgtgtcagtcgagccggacctccgcaagggagcaccggacccctgtacgcacaacccagacccccaattgtggcccgagactcccgagtaagcgtgccaggtcccttggatggggtccagatccctccaagtaaggtccaggccgcaacaaggtcctaggacaggggaaaccctggtatgagcaagggttcggtgctgacgcgtgaccgggctttac

SEQ ID NO: 26799 - DNA, 491 bp, Zea Mays
gtaaggaggaagaagagtggcggcgaacgagcagtagaacttggagaagaagttgtagtgaataattcttacatgcccttcacgaggcaactctcgttctacttattcgcaaagcgagcacagctgcagcccattcacccaatccggcccatacacctttgtagatttcttggtcggcctgctaatccgttgcgccacaatggtcccagtagcagaagatgtagtaccgctaacagtcccccttgctgaaaacgctgattgcccccaaacagcggcctttggaaattgttgcttcaattcatgcacatcctcccaagtggccaattcagctggcatgaacgaccattgcaccaaaacttgatcacaagcattgttccctctcatgacagtacgacgtttcaaaattttgccagggacactgaaaccataagcatcagtaggcaacgccggtgaaacattgaacccactacccagagcctttttaagctgag

SEQ ID NO: 26800 - DNA, 374 bp, Zea Mays
cccccttccgccttctatatggatcagaggccatgaccccgcaagaaataaaacatgggtccccgtgaacagttccgtcagccatccccgacgtggacgagcccacttcgaaggatctcatcgatggagaccgagtcttcgccctacaggctctaaataaataccaagcccagacaaaagcatggcgcgaccacgcagtcatcccgagggaattcagcgaaggggacctcgtactcgtccgaacagctcggacagagtccaggggcaagctggagcccaagtgggagggccctttcattgtcaagacgaaggcttcccccagcgcttacaggctcacaacgccaaacggcgaagacctggagcactcctggaac

SEQ ID NO: 26801 - DNA, 288 bp, Zea Mays
gtatgagagatttcaaggagatgagcataccaataccaagagacaagaaattgccgaaagatagcgacttaacaacagaagaggaaagggtctcaaaagacaggaaggtcatggacatataaactgaaatgtttaagtaggcagtagaaatttagaggcaagtatttgaaacaagggtattgaagaattcagagatacaagtatgtcaatacagaggacaagagtttgccagatggtagcaatttaatgacgaaagaggaaagaaccccaaaagacaagagggttatg

SEQ ID NO: 26802 - DNA, 1562 bp, Zea Mays
aggacctgttgcatgagccgactgcccttggtgatgcctcgggactgaataatctgcaacggaacgctgatctctgggatatcatcaggtagtggaagaggttctggatctttgaatcctttagcgagcttaagttgagacacatgcaccaccggatgaatgcgactagaagcaggtaatgccagtcgatatgccacatgtccaattctgtccagaattttgtagggaccgaaaaacttgtaactcagtttgtgatgtgcacgtggcataacagaagcttggacatatggttggagccggagatatacccaatcgccctcttgaaatgtacgttctgacctgtgtttatcagcatgtcgtttcattctggactgggcgcgcagaagatgctgacgaataagctcctgcatcactgagcgttcctgcagccaagcggacaaacttgctggagcagcgtcattgatagtgagaccaagggtcctaggctgtcggccatacaatgcttgaaatggggaacaaccgagggatgaatgcaagcttgtattgtaccaaaactctgctgcagacaaccaatccttccacttttttggacaagcactggtgaaacagcgtaaaaaggtttccaaacattgattgacacgctcggtctgcccatctgtttgggggtggtaggacgagctgagtttcagatcggttccagtgattttgaatagatgctgccagaagttgttggtaaagactggatcccggtctgagataatggcagaaggaagaccatggagcttgtacacgttgacaaagaacacttgagcaacagaactggcagtgtaaggatgtgataaagggataaagtgagcatacttggtaaacttatccacgaccactagaatacagttggcatggcctgatgaagggagcccatcaataaaatccattgtgatcgtttcccaggccccagatggaactggtaagggttgaagtttcccggggtatgctgaccggtctggttttgcctgtaagcatatctggcaagtttgtataaattgttggactgtggtcttcatatttttccaagcgaagagattcttgaggcgactataagtaacaggaatgccagagtggcctccaattggtgaagtatgaagagcagccaccagtcgttgttgcggaactttgtcattccccaaccagatacgacccttataacgcagcagaccattagtgagagtaaagtggggcacagccgaaggatccaaagctaatttggccatcaaggattgagcagccggatcatgactatagctgttctggacatcagtgagccattgtggaacgacctccgaaccaacattaatctctggagaaatccgacgggataacgcatccgctacccgattggaatggccttgccggtagatgatcttatattggagccccaagagtttagtgaacaccttatgctgccatggagtatgcaaccgttgctcattgagctgggacagactctggtgatcagtgagaataataaactcgccatgctgcaaatattgacgccactgctg

SEQ ID NO: 26803 - DNA, 384 bp, Zea Mays
ctgcccctcgcggtgacttttgtgtcggtcgaatgccgaagaccgttgatgcggtctttttcgacgtagtttttgtgggggatttttcgcgtgtatattacatggctccgcctcgttaaaaacctcaccccctgggaggaaaagagtgcgggccggcttaaaactgttctgcggattacaagggcgaagtggccctgaggagttaaacaaaaaatttgcgaagattatcaatgttccaagaatgttctaagtcttcgccgaatggcgttgtgagactgtacgcgctgagggacgccttcgtcttgacgatgaaagggccctcccattttggctccaacttgccccgggactctgtccgagctgtctggacgagtacgaggtctc

SEQ ID NO: 26804 - DNA, 771 bp, Zea Mays
tgaagaagggggtgggcattgaacttgttgtcctggaggtctcttggctgctctttttaaagctttctttcctcctttgaatcatatgagtgtgaagcctaacatcactacacctttaaagtgggagtttcatcgtgcgttgggccaggccatggcactattaaatgggtcgtgccttgggcccgctaggcacaacccatttggccatctatagtcaatagtctagtactcctccctcatcatcgtacctgatctcgtgagtgtggaaaaagatgagagaaaacacttcatcttgtttgaccccacaccacacagtcacatacctcgccatccgcactcacctaatctatgtgtttggatcgtgtttgaataactatcccatttaagcaatgtctacctatatgatatatagaaaccgtagcgatgcactggcaactaactatgaattagtcatgcaggagctcattcagcaaatggcgaatgtgcagtacaccgagaacatgacagaggaacaggttgatgctatggcaggaagtgagactttgcggcagcaagcttcactgttcggagcaacaagaaactataaggttgaagggacattcatctatctcagcagcatatttggatcaaacaattgtcttaccaaaaaatgtaattcttacgcaggtgttgagtaagtccacaaacaggctaagggattcgttgcttccaaaagatgagcccaaacttgcagttcctatgttactgcttattgcccagcatcgatccaag

SEQ ID NO: 26805 - DNA, 846 bp, Zea Mays
ctgttttagagttcaacagtgcataaatttgtagcagcaaaagggctgtgtgatggtttttgagacttgtttgcgggatatagaagtcatccctcgagttacgtaagcgcgagtatgtcgcattgccttaagtcattgccaacttaagccgattgctccattagcaggtcatagtggtcaccccgagttatgtaagcgtgagcatgttgcaccgtcttaagtctttgccgacttaagccgattgctctgttagcagggcatagtggtcaccccgagttatgtaagcgtgagcatgttgcaccgtcttaagtctttgccgacttaagccgattgctccgttagcagggcatagtggtcaccccgagttatgtaagcgtgagcatgttgcaccgtcttaagtctttgccgacttaagccgattgctccgttagcagggcatagtggtcaccccgagttatgtaagcgtgagcatgttgcaccgtcttaagtctttgccgacttaagccgattgctccgttagcagggcatagtggtcaccccgagttatgtaagcgtgagcatgttgcaccgtcttaagtctttgccgacttaagccgattgctccgttaacagggcatagtggtcaccccgagttatgtaagcgttagcatgttgcaccgtcttaagtctttgccgacttaagccgattgctccgttagcagggcatagtggtcaccccgagttatgtaagagtgctagtcaatcatgaataaattgagtataattgaagtcttctttattgatgacatatctcccgttttacagagtacattgtcgtcccgatagcttttgaaattcagctagggg

SEQ ID NO: 26806 - DNA, 777 bp, Zea Mays
ctttcctattctgttgttaagttgctatctttcggcaattcgtactcccttggtcttggtatgctcgcaccttcgtaatcttgcatactcttactttttatataaatgcttacctttgtaccccaatgtttgtttaacatttcagtttacatactcttgaccacctttgtttcttcatgatccatgagcgatcgttccattcctcacatccttaatgatctcatcgtttccatataacttccctcggtaatgttttattttacttcaaccattctattggaaccttacctaccttactcgtgattgttttctccatttcgccattttgtgagtcttgccttaactccatcctttcttatgctcttcattattaccacctttacccttgacacttctatatattgcattgatgttcatcttatacctaccctttaaaatctcctctcttccatctcaatctgagagttgtaacttaccaacttttttccttggtcgtatcctcttctttgtcacctgcgagtttttaactctatcctctgttgtgttttgtttgatatttcctttacccttctcatcactctatcctaccttgtgattacgttatgtctgttatctaaaatctccaatctcctatctcaatgtgagagcagtgttttacttacctcacccttggctatatcctcttctttaccgcgtgtaagcttgggcacaactctattctttgttgtactcataccactggctctctaatgccttcatcttttctctcataccctt

SEQ ID NO: 26807 - DNA, 516 bp, Zea Mays
ttgcatttatttctacatttctttcgaattgtctttagacatctctcgattggatagcaccaacatccctgcacgcccccccttcgtgcctcataggggagatgaagaatcaaatgctgcattggattgaagaagctgggtgaaaatatcttctcaagcttacacggtaacacgggtgccaatctttccaagtctgcaaccatggtccgagataactcttttgcacaaagctgacgaaagaaatggctcaactctgaaagcgctagccagacatgcttagggacatagcctcgaaccagcgcaggaagaatccgttcaatccatatgtggaagtcatgactcgtcatccctaagactcacatagtagataagttcacccccttactcaggttagctacatacccatcagggaacatcaacatcttgatccactgaagtacttccttcctctgggccctgcttaggacgaaatcggccttaggccttctccatgtctttccaccacttggcggcttc

SEQ ID NO: 26808 - DNA, 293 bp, Zea Mays
atacgatacaagagccgtagaataacagaaacggcacaagcgtccgtgctgcaccccgccgctcaactcgacagaaatcgattcaattttccttctgtggagccgggctgaaagctaccgttagcaccgaagcagccgggttatggtcgttccacagggaaaccgatcatctaaaatattgtaccactcgagcctggcttaaccaatatacgggtaactcatcacgcccaaaaagctccctagcagtacatctagtctagatcccgtgcatccagcagcctctactgtctgct

SEQ ID NO: 26809 - DNA, 314 bp, Zea Mays
aactaatcaagagcgagtgaagaaagcagctgggcaagtgggctatttaaagaggctgaggggtgaccgtccacttcctaccccgctcaccgaacagtctcaagaatttaataagcaattcaaaccgcctgaaaatgagtctggcgtctggcgtcgtttcgtgtaacacggcaccagttggattcaagtcaattgctcaggcaaatgattacacccctccatcatatcaagttagtacttcaggacaacgcgataaacacctttcgtggggcagacaccctttgggcacacccattgggtgtaccgcctggccg

SEQ ID NO: 26810 - DNA, 519 bp, Zea Mays
gatggcgcaccaggttgagcgtcccctcagactagaaacgctcgggatgaattagcaaagccagggtgactacggcggcagaaagcagaagagcgcgaatgcaaagaggcgcagagagctcaaaggcgaaagggcgcagcgattgggagagaatgcaaaagtgtaactgctgcacacagggtgaatccctcttcaaggcagactctctcgctcgcgccccgagacgctacaagaaatcccgaccgacgcacacctcacgcccaggcgacccagtctatgacatgggtgcccgggtccacaagtcatatggattgtgcgctgaactttgggtgcggaaaaggcgaaccaccgcgcgcgctcgaagcgaaccgccgcccgcggtagcgcgcctcttcatctctgtcacaagaaacaacagcccagtctatgacatgggggcccaggcccacgagtcatactccttgggtgctggttcccgggtgcggaaaaagcgaaccaccgcacgcgccggtagtgcgc

SEQ ID NO: 26811 - DNA, 629 bp, Zea Mays
caaccattatattcactgtcaacaagttagggaacaaaccaacacgttccatctcatcccgtatcacataggcctcctcaacccttccagccatgcaaagcataccaatgatgatgttatatgtagaggaatttggctctgcatcctttttcattgcctcaaacaagatcagtgcttgatcaacttcacacttcttcccaaggcaagtgagaatcgaattaaatgacacaacagatggaatacaacccctatcctttaactgatcaagaagcttataggcattctcaaactggcctgctgacccataacccatgatcattgtattatacgcatacgcacaaggcacagctctttctgtctccatctgaccaaacagctcctcagcctcacttagcttccctgccttgcacaacacccaaatcatgctcgtgtacgatacatcatctggcttgaacccttgcgacttcaactcatggaagaacttccaggccatgtccacattcccagccttcccgaaacaatcaatacacacattgtacagcacaatgtcaggctcgaggcagttccccttcacctcgtccactagtgccagggctccctcaacgcgcccctcacgggccaaagcccgc

SEQ ID NO: 26812 - DNA, 812 bp, Zea Mays
gcatcgcatgttcttcttgcatagccttgacgccttggcgttgctaatccttccatctaccaagctcgtgtcttcatcattcttggcgctgatcgattatgacgccgaaaagtcagcatgcatgcatggacagtagtccactcttcgtaccgcgcccgcatcctccgttctccagaacgccgtcgttgatgtccggaactgagaaatttgcaagatcaccaccccggaaaggtggcttcgctgcattgccactatcaactgatccctcactgttgcaggcccaggcgaagctggattgaccgccgaggatcatcagaaaagccatcctttcatgtgtggtggagttcctgctgaaagtgtagtcagcgtttcatggccgacagtcagctgttcctgctgatattgtgttgttatacgggttgctgaaattgtagcacccacttcttggtctgcagtttgttgagttgttttttcaagcaccccttcatcagtagcagcctttgaagatgtagcccgaagttcttttgaaacccaatttagggtcgacgggtcagtggccgccgccacggcaacttaggagctggcggtccctaaggacgccagcgaacttccatctatggcgccatccatcggttggtgaagttcaaactagttagctaaggaggaagaaagtaagagggaaaggggtgacgaactcaccggatttctctcctcggagtcacggcatggtgagaatgacagggggacaacttttggaggcggcgacgcgacaggacggtgatggcgacgatctggccttaatcagagctaaa

SEQ ID NO: 26813 - DNA, 329 bp, Zea Mays
gatctatcaagtgcaattcatgatttctatcaccatagatgcaaaaacctgaacctcgttaatgagacaaatatcacacttttacaaaaaagggagggtgctgacatgattgacatgtttagaccgaccagtctcatcaatagcttcatgaaaatattgaccaagattttagcaaataggcttgcgccaagaatgaattagatcgtctccactgctcaaaacacgttcattaaaaacattcaattcacgataactttctctacgtccaaaaagttattcagaaacttcataagaacaatcagccagccctttttgtcaagcttgacata

SEQ ID NO: 26814 - DNA, 368 bp, Zea Mays
gccgattgtttatgaatataaacgttttactttctatcgtcagttgtgtttatctgagtagtcgatacaaaagttgtagcttttctatgtaaggcaagcactatttctccaagtgaggtgatcgatcatcctgattgtgccatcaactggtgtcactcctttagctagatagaatttgcacacgaagaaagagtttttggagcagaaggggaaaaacaaactaggacagttttccctatggagcaaacaaaaagaaatgcagtaaaatctgctgtttagattgagatggcatgcccaagtttgtcaaatctattgacaattctgaagtcatgtgatctagtaatctctcaccggcattgatgtagact

SEQ ID NO: 26815 - DNA, 906 bp, Zea Mays
cggtgacctctgtggcccgatctcgccacctacgccggccgggaacgcctacttcctgctgttggtcgacgacatgagccgttacatgtggctcacgctgttgcgttcaaaggcagatgcaccagcagcgatcatggcgttccaggcgcgtgtcgagcgtgaaaccggcaagaagctgaaggtacttcgtaccgacaatggtggtgagttcacatctgtgcagtttggcaaatactgtgcaggagaaggcatccaacgacactactcagcgccgtactcgccgcaacaaaatggcgttgtagagcgccgaaaccagatgatagtgaacacggcgaggagtatcctgcgtgcgcggagcatgccggggtacttttggggagaagcggtgcacaccgctgtcttcctcctcaaccgggcgcccaccagcgcgctcgacgggctgacaccgtaccaggcgtggtacaagaagaagccgcccatgcacttcctcaaggtgttcgggtgcgttgcttacatcaagaacctgcgtccacacctcagcaagcttgatgaccgcgggcagaaggtcgtcttcatcggctaccaggacgggtcgaaggcgtatcgtttctacgaccccgtcaccgagcgcatccatgtctcacgcgacgccgtctttgacgagagcgcgcgctgggactggggagaagcattgacggcgggaagcgaggactcgttcacggtggagtacgactacaggagccacgatgaggtggctgtacccagatcgtcatcgctggggacaccgtccccaccgggcacaccaccttcgacaggcgcaccggccgcaccgggcacgacgactacacctgcttcgccatcaactgctccacgagctgtgactccgcgaccagcaacacctggtgc

SEQ ID NO: 26816 - DNA, 369 bp, Zea Mays
cagagcagccagcacaactcacagtttttgagaatgcaacaaactttctataggccactagcccagagaggcagagggagagaagcttcggaggaaggtatgataattagcccaggagattgttctgcctattctatggggaagataagggacacacgacaaggacatgccaagtcacgatccaaaagtagaaggaaatcgctgaagccgaagcacgacagaacccgccgaagcagatcttgcatagcgcttcatgctattctccatatatctttgattatgtgggcaatcaacagcctacgacgtccgttgcttcggcgagtcactcccaagcctcctcggctcagttgccaccaccgctaccactgg

SEQ ID NO: 26817 - DNA, 339 bp, Zea Mays
cttcggtcggatatctctccgtctgggattcttgctcatgatctgttacaccgccttggactcctctcatcctgggtatttatacgagttatggcctaccccatgaacctccatccatgtcaccgtgccaatgcaagccttaggccaacagaataacgacgccaataaatgtgaggccgagcgtcaaactccgtcgtgctactcccttgctccgccatggctctgatcatctgtatgtcgtctagaacgtacggtattatctctgtatatatattgagagagagatagagtacatattctagctcttcgtcccactccaagggaatctctagagttttg

SEQ ID NO: 26818 - DNA, 388 bp, Zea Mays
atccaaagaaaataggggaggagaacatggagaactgtagtaggagcatagatttttctacaccgtaactaatgtaggtgaggtggggcgtaggcagggtagcggcgcaccgactggactgcccgtctaggagctagggcctataggtggggatgggcgcggggtagaattatgctgggtagcgtcgtgccggctggactggccgtccacgggccaaggactttcgaccatgagggaacagtggtgctggcgatgcctcatcgacaatgccgcacagtggcttctcctacatcaccatcatccccaactcctcaccctggccggctgttgaaagaaacaggcagtaacatagctagtattccaacaaaacataccttgttgaaaggaa

SEQ ID NO: 26819 - DNA, 289 bp, Zea Mays
gccgtgactcactttgtctgtctgatcatcaccggtgagggttgccacagtagatgccacgaatcccttgcgccagtgacctcccactcctccgaccgccgcgcgtcgtcgtttgattcaatggccaccgctcttgccttctataaattgagcacatcgtctggtccgtaggataatcacgcactaagccaccaagtattgcctccaatcgtatacccaagagctctaattttggatttcccccaaactgagtttccgccaccgtagagacaccttcaccgcgaccaac

SEQ ID NO: 26820 - DNA, 549 bp, Zea Mays
gcggggtcaagggtggggccgaaccgatggcgaggaagtagcgattgccatctgaagatccactggtccaaggatggaaggtcgtgcattccacaggagccccctcccccaaatcagcgcccgtgagggcgaggaaggagcgcagtctgcggcgtggaggcgaagcccgatgtggtggtgacgaaggaaggtggcgggttgacgggggcacggtaggaaggtggagattgaggtggcgtggtagacttgtaacgaggagcgacatgctggggacgaaggaaaggataggattgaccggtgttcggtgggagctcagtatacactgtagacgcctacactgtgttcttatacctcatgtttggttgctagcatcctccacgcctgactgaggcagacctacatcggttgagatggaggattcttacttccccacgcatgcaagccaatgagggtaaaaaagtcatgatcgtgcacctgcccaagtgcggtcaacgcatgcacgaggtctaggcacggaggcccaaccaaccaatcatacagatatagtac

SEQ ID NO: 26821 - DNA, 596 bp, Zea Mays
cctttgctcatgttgctcatcggaccactgttcatacccttgttgttgcctctattctccagtgggctatctcacaacttgacatgaagaatgctttccttcatggtgaattgcatgaggaagtctacatgtatcctctgcctatataccttgttcctgatggtcatgtatgtcggcttcgtcgttctctctatggccttaagcaggctcctcgtgcctggtttgagcgcttcacctctattgtcactattgctggcttcgtggccagaaacataatcccactctctttgttcacactttatctcgagttcgcacccttattcttctctatgtttatgatatgttgatcactagtgatgatctcgactacattgccttagtcaaggcatgactcaatgcgcagttccacatgtcttacttgggtcctcttagcttctttcttgggattgaggtcacctccacacctgatggctattacttctcacaacgcaaatgcattcaagacatccttgaatgtgctggccttactaatcatcgttctacggacactcccattgatcttcaccttcgtcttcatgtcaccgatggtgttcctg

SEQ ID NO: 26822 - DNA, 352 bp, Zea Mays
gcaattggaaaccttcgtttggaggtaataactttgagaaacgaagctctcgaaaaggataagatcctgctctctttggtggaaagattaaaatctagtgaagctaggctttctagccttttcgaagcagagtagagggtaaaggggtttgaagagaagcaacaaaatgatgcgaagcacattgctgacttggagtatgtgtggggtacagatatcccccgggtccactagaagccaagaaggcctcgcgcgggccttgggccagttacctcgcaaggctatcccttcgtgggccgggttagaactactggcggagtgggccgacacgagaaagaagcagactcagatccag

SEQ ID NO: 26823 - DNA, 353 bp, Zea Mays
gtactcactgtggcgaccaaaatggataaatagacagaggctccataccggtggtgaggtcatgcagtaccacccacggaggtgcatcttccgtagagaacaggtacgacggtgaggaattctgcccgcctcgctcggtttcaccacccacccacgattctcactcctttgacaagactaagtgaccccacccaggctccagacggcgtcggcgacgagccagaagcttggtggcacacccgatcgcactctcactctctattctatctatgcacccgatcgccagaagctcgagtagccgcttatagcgtgtccccacatgtcggcgcgcggatgtgaagagagacggaccg

SEQ ID NO: 26824 - DNA, 406 bp, Zea Mays
ttggggtcagctagtggagatatatctcaaatcttttcaaaacttccctatcatatcgtacaggggaaccgaagcctcgctttgaagaagcttttgaacacaactacctcatcatcttttggctctggggttacttcttctccagcaaagcgaataagtcctttttcattttccccaaaatagcctagatttttcatcacaaccaagtcctctgatgttacgatcgattttccaaattcaaagtgactaggtttcgttgggctcagaatgctgttgtcctcttcactttcattgtcacttcctccttcgaccacagtctgttcagattcaatgttcgaagcaccttcggcagtagtttcttctggcacaactagacctgatcgtctaatcacttctgatattggtg

SEQ ID NO: 26825 - DNA, 500 bp, Zea Mays
aaaaaaggttggtaaagatgagaaaactgagttaaccaactccaacctcccggcttgggaaagaaagttagaggaacatgacaatctcttttcaattctttggattaggggtaaaaatgttgaagtcaaggttttgaaagccccagaggcattccaagataagtgaaaggcattgaccctgtctgatagttgaatgttcttgatagagtctccattttctcaaggttaacattgatcgggtacatacttgatttgctataatttaccctgagaccagttgaagttgcaaatgaattgagaattgcctttaagaagaataattgttttggacaggcttccattatcaatagagtgtcatcagcatgttgaacaatagtaaaatcttgcccacatctttcagttagtggtagctgaagcaaattcagctgtccagctttattgataatgctctgaagaagatctgccgccaagacaaacaacagaggtgagaggggatctcc

SEQ ID NO: 26826 - DNA, 493 bp, Zea Mays
gcggtccgtagggaaatcgttcgccgggacttggatttccgccgtgaccgtgcctcctcgtcgacgcagctctgctgggtgccatctatggtgagaaccttcttcacgcattcactcttgcccctacatcatgtagcttccgttaggttggatttcgggtcgcctggggcacgggtggccagctcggtaatggagcgccgtcgtgggtctgtgtgcggtcaccggagttcgctgggaggagggcgacgaccgggggccatcggatccggcttgatcggctaggattagatcacgacggaatatgaccctggccgtccgatcgggatcggatgacggtcatcgctctaggcttcattaaaccaagggcgtcggatctggatccaacggatcgcgcagcataccggttcgccgtgatccagatctaatctcgagcgtccaagttcaatcatgcgacccatattagatcataccccttcagattgggtcatttaca

SEQ ID NO: 26827 - DNA, 996 bp, Zea Mays
ttcttcatcagtacctgtatgtcccacatggttaaccaaactcatcacatcctccatattgccatcaaaggaaaacaatggtgtcccatctttctctctgccgtgaggtcctctcaaggcaaccatcatgtttgatttccaccgaatggcatccggcaatacagtgctgtcccttataaactttactatttgctcttccaagtcccagcgtttactcttgttaaaacctatcaacaatgatgttattgtaaccaaatcaacactgaagccttgctgctccatctccttcaccaactctacagcctctgcaacttggtccccaatcccctccttgcagaactccctcaccatgatactataagcaattccatccaacagttgccctttcctccttagctcgtaaaaaagccgacatgctgcttctgccctcccattattaaacagcccatctatcacagtgttgtgtgtgcttgctgagcattggattccatcagccaccattgtctcaaaaaaactgcatgcctcatcaagcttcttcactttaaacagcccatcaagaagtgaattgtacaccaccacgtcactcaccccaatgatgccccgcatctcatgaaacacacgcagtgcatcatccatccgaaaactcttgcagcacccattcatgactgctcgataagtgaatacatctggctcgattccagaagatttcatttcatcatagatcaccaaagcatcaggtacccgcccaccaacaacaagggcccggatgactgaattataggtgcatatgtccggctcaactggaggagtggcggccttcattgctgcgaaaagccccagcgacatgtccagctgcctccacttgccaaacgcgtggatgcaaatgttgtataaccttacattcgaaggaaggcccctcctcgacatttcttcgaacacatagcggaagtcatcggagaggttctccttcgataatgccaggaggaggcggttcgt

SEQ ID NO: 26828 - DNA, 314 bp, Zea Mays
agatatcaatatcgcaagggtcaaaggcggtaacatacaagggtataagagaaaggatgaaggcatagaagagccagtggtacaagtataacaaagaatggatttacgtcaaggcttgcacgcagtaaaggagaggatatttccaagagtgagataagtaaaacaccgctctcaaactgggataggatattggagattttagagaacggacatagtgtaattaccaaggtaagatcgagagataaggtaaaggtaatacccaaccggagcacaacaaaggatagagttaagaactcgcaaacgacaaggaagag

SEQ ID NO: 26829 - DNA, 392 bp, Zea Mays
acgaactgaacctagaaccagtcagatgtaagttggccgaggaaagacctgctgtagtgtagacacgatggaaatggtgtttgcgttggagaacaaaacgaagctgatggttgccacactgctatggctgtagtggggtgagagaaacatgcagagggaggaagggcatggatcgatcggcattggaagctgcgtacggcacggcttcaatgtctgtccagattccgacaacagagaagggaactcatgtgcgggccaatgttcagacaaagagacggaggaagatcgaggaagccacctgacggtgttctgaaaccgaatacgggtggcgcctttctcagtcaggagaagtcaggggggcggccggacggggattcgtcgtcagagatggc

SEQ ID NO: 26830 - DNA, 281 bp, Zea Mays
tggttaaccaagtattgtgttattgtgctgtcagtgctctttgtggagcttttggcatttcttcgatgacctatgccgcgcagaatgttattcacttcttattggctttattgctccattagttctgtagattttctcccttttgcggggtgcaaagaatgttagattacatgattatcttttcatgatggcaagaataaggtttaggaagattaggagttttgtttcaatagaactactttgtttcgtggtgctttgaggtgaggtgtttgatcttcttg

SEQ ID NO: 26831 - DNA, 431 bp, Zea Mays
gttcctgctgcgtcctgtcctcgagtcctggtcggcatctgtggcaaagaacatttgaaataaatataaaatgccaaagaagccttccattttacattaccaaaagtaatgttacagactcaagactcttacaacagggtacaatacttagtatacaatagcattacctattatacaccagtacaacctacaatacactaccgtacttttattacaccattagtcctgcttcccattactcttggcggcctcatcgtcaggtgtgggagtccagacgtcaaccaacctcatggaaggagggggctcaaaaaggtctaactccccacccagcgcgcgtcccgcaacatgagagggtccggcttccgcctcagcagggtgtgcaggtgcactagggtgtaattgcgagtatagtacatggacttcctcatgca

SEQ ID NO: 26832 - DNA, 362 bp, Zea Mays
gtgttgttctggtttaaattctccctggtttaaacagtttgtagcgaggttagctgtaacccgctggggtgtgatcttccccatgtaataaagtctgacttagctagaattgaccatgagtggttgggtgtattttcctttttagaatggtttttctgtttaggattaattccgcttgctttcttcggttgacagtcttctaagtcgtagttttttggtggatatatgttggtcatgtatgaaactcgtttcctatttcttaatggtggaaacccctttttgttaaaaaaaatatccagaagagcagcgtctctcctattcaatgctctcaagaagacttgcctcttgtttagaccatctat

SEQ ID NO: 26833 - DNA, 358 bp, Zea Mays
gcacaacatagccaaccaacaccccgccggcgaggccactcgccgtccagactatccccccagggccgcgggcaatagcacgcgtggccggggtcggggacgggcgcagcaaccgtgcagatattactacctgtttcatggcgaagactgcacgcacccaacgagggattgcccggaaacaaaggccaccagggacaggatgtctcgggcacaaccagccgacaaccaaagagttatcgcgcacacatatcaacatcaccacccacaaccatacaaccacgaccacgcccagcatctacccaaccacgcatatcagcaccaccaggaggtacaagtcgtaccacccccactcccgcct

SEQ ID NO: 26834 - DNA, 394 bp, Zea Mays
caaccacggggcggtgaatggtaagggtgccgaatcccgacaggggcgggagaaccaccatccagataatggcgtgctgcgcacttagcatgcaattccataacctccgcctgaacctttcccaactcgtcaagggtgtggtccaactctgtgttgagcacggcagccaggttgaccatgctgtttagcctgggattgccctcaccaactggcaagacaatcacacctctagcactatcggtcgaatggcgagggtagtacttcaggttgaggccatcatctaccccgctaaacaacgagcaataatgagaaagtgtccgtcgtgctgcatcttgcatggctgcctctgcagtatccctctcagtaacagaattgtgctctaagaaggcctctg

SEQ ID NO: 26835 - DNA, 342 bp, Zea Mays
cctcccccgcctataaatggagcccatgacggagcctcctcgtgctctccccttcgctgccgtcgtgccaaaaatttcgccacgccgaacctccactcgccctgctgctcaaggcccccatagttctctactagttctgtttgtcgcgcacctcagtgctcaccgccgattccctatccgcatcgaactcgcccctgctgctgcaccatcctatacgcccacgctcgcgtcgtgctgccacgctcgtctgtgttatttgccgtcgatctggttgctcgccgacgcctcactagagctcgcaccctcgtcgtgtcgtgcctcgccgagcctctacgccctcag

SEQ ID NO: 26836 - DNA, 273 bp, Zea Mays
tctgccatccacagtgtgttccatgtatctcaactaaagaagtgtgttcgattgccgactaagatcatagcagaaccagaattggagatagaaccagatctatcgtaccaagagtacccttccaagattctagattgcaaggaaagatcaactcgggcaaaatcgatcaagatgtataagatccaatggagtaatcactcagaggaagaggctacttgggagactgaagaatttctgcattccaactttcttgattatctgcctaaggaaatt

SEQ ID NO: 26837 - DNA, 279 bp, Zea Mays
cccatgccactcattggtgcaccactgtttgctagtacaacaacgtacaaacacacaaacgctagatgcatggaccggcttctgaatccagctagctggattgtttctaactagctagttaataatgtaggtcaatatatagctacgcatggggacgggatcaggagcttagttaattaattatgtggtctcgctctaatagatagtaaccttgctttgcactacaggctactgtacacactttatacacatacatacaacttcagctagcgcaacaca

SEQ ID NO: 26838 - DNA, 687 bp, Zea Mays
gaagagcacaaacagtcggggtataccatgtgcgagaggcacaaagcgacatagtcgacaacgatgtagggacaacgacgaggatgacgacagacggtggcggggcaaacccaatcacaaattgggaagaataaaaggactcacaacagcaacagatttgagtcgagggtgatggagcctgtgggcccgatcgggtctatccacaactatcaccacaatggcgcacgtaggggagacatggatgtcgtggcccccataatcatcaccaccacgtcatgcaggagagacaaggcatgatccaaccggaaggagagaccaagcagccactaggacgatggagaaaccagtgagtccttgatccgacgtgtcaacgacgatggatgcgatagatcaaaagggttggccgcacatcctaactacgagagcgcaacccccagcagagatcgatctccctaggagcggcgcggtggcaagagcggaaggggaagcctagatcgtaacctaaactcgtgataccatgatggagaataaaactggtgtaattggatggatgtattgcattgagcccttaggtgatttatatagagcacatgacttaggagataaggcaacccataaatacatatggcagtcaacgagacagatatctaaactacagaattactctaacataaagtctagcctacc

SEQ ID NO: 26839 - DNA, 545 bp, Zea Mays
gaataaattttgccctaataatcattttctaagcgaatttccatagtttattctctgaccggactgagctgctataattagaaagttcagggtccactgcgcaaaaaggttctaagactaggaatcccactgacaggattgcaggttggtttccaagttttacagggacttaaatgcgaaagggtccgtccgaaggggtatctaggatgtcatatcgtcagattagaatctaacgatcaggattatacccgtgctatgcgaatcggaggtgcactattggacgcacgatctcccatctacggtcgagaatccatcagcccgaagagtttttctacttctaatctgtaccgcccaatacaggatccacgtcgccaagcacgcatcggcacacacccatctccatcgcagatcacagatgcgacagccagcagccttcttctacctcacaaccccaccagacggctgcacgggactggtggccatgcagaccacgacggcggcatcgacgagaaacagccatcgaggccgagtgtcagcaacagtct

SEQ ID NO: 26840 - DNA, 315 bp, Zea Mays
tcgggtagttccagttgataggcaacttccccactcgctttaggatcttgaagggtccaatgaagcgaggggacaacttccctttaactttaaacctcctcataccctgaactggtgatacctttagatacacgtgatcaccttccttgaactctaattgccccttgtgggtatctgcatagcttttctgtctagactgcacagttcttaagttctcccttattatccgaacttgttcctctgtctcttgtataatttctagcccaaagaacttcctttcaccagtttgatcccaatatagcggggttctacact

SEQ ID NO: 26841 - DNA, 471 bp, Zea Mays
ccgcccctgggatctataaattgaccccgcagagagcttcacaacatcatcacccacccagccaccacgtattgctagcaattgttcgcccgagctcacgaattttgaattcgccccaaatcaattctccgccacccgaaaccgaacctcacctcggccagccttattccggtcagttcgtctccttctctccctcgtttaagctttcccttaagtctatgatgcttgccgacccacacaatcgagctaggagccctttggtcgccgggaacgcgactgtcttgccgcgatgttcacggccaccgtggccagagcaagccattgggccatagatggaattaggttaggggaaatgctcgggctaggtccaatttgatgtccgccgctcgggaaccctagtcgttgccccgttcggccggtgcaggcactcgccggagttcggctgggcgtgaacgccgtcgaggacctccc

SEQ ID NO: 26842 - DNA, 390 bp, Zea Mays
cgcccgagctctgccgcgcatctgacttcgaggggtgagcagtgcctggttgaggctgttggctgctaccctgaacaccatgagcttgtggccgacggcttgggtctggggaacactggcatggagagcttccatgggccctcctcaccgcggctggctacctcatgcatgatgaggttgtcgaaggcgcaactcattaatggcttgcttgctggtctccacccgcacgtcgagggatttgggactcaatcccctcaagtttgtgcggtggaatgccgtggccgccacatacgctgggggaccaggatgcagaccagcatagtggactgcgctagccttgctcctggcccatgggaccccaccaatggtttctagggaggtcatgttggc

SEQ ID NO: 26843 - DNA, 599 bp, Zea Mays
aagagatcggtgattaaggatcgacggggtcttaagctaccatagctaagagttgcattgcactaacaaaaaatacatgagatcttgtgccctgacgatcatcatcagaggcacacagcccttgagcagtaaacaagtgtgcctcgtgagggagagaagagagctggcgtcccatccgatccccagcccccaggcgcaaaagctttggaaactctgcacatgcgtaatttgtatcgctcgcttgtcccgtaatcctcctccccatcctcttggggtgcgatgcgaggctgcatctacaagtcactgaccgtcccagtctgtttcttaaccgtaaccgatgacttgcatgccgttgctgccctcaaaatcatggcaaaatgaaacgtgaaccgtgccggccggcgagctcctgtcctggcctcacatctggtctatgcgactatgcgtggtagactgactggtagtgacgggacgagaaattatcacgcaaccgcttgggacgtggacgtgccggctggtgctgggtgcggaatgggctgcccgtgaacgacggcaggccggccaaggtagcaatgaccagggaacagcttgctttatcg

SEQ ID NO: 26844 - DNA, 655 bp, Zea Mays
acactgttggtttgccgatcaatgacccagatcccaactttgcgagagggggtacacaactctcaatcaccacagcaggcgaccgattcaatggccgagcaccatcatcttctcctggtcatcccagtcacgacggtggtcaaggaattgcggcggcaccattgctggccaacctccacactgatcggctacacggctagcaccctagatgctaactaaacgttgtggaggacacggagagtagacccaaagtaccttcttcgaagattgtggtaaggatgcagctgtccacggtgagctgagacccgacgttgattttcctctccggtgacagcctacggtcacattcagccgccacagcgctctccgaggttatgcatgaggacggtgcgcttctagggacctctccgaacaccacgtgatccgacgacatccccctgaacccaacgatgttgtcatggcggtcgtggttcaccttctctctctcctcggttcgcacagtctgctcgatggcacagtgatgctcaggtcccaatggcgtaggtatgggatggttgagggggcgatgcgattgggttttacagccagcgacgcaaggatcccgcccgggacatcggccgatcaggaggagtccggtgaattaggtggctctgtt

SEQ ID NO: 26845 - DNA, 287 bp, Zea Mays
gagcgaaacccatcttctcagatattacatagtacttcaaaagtattttcaaacactcacctggaaatattcttttattcttaccttatcactttctagtagtcccttatcttgtaaagttgggtaacagagtgcaatatatgtaggaagtaggggatcaacgaaggttgattccataattactgttttatgcatgcatcatgtttaaaaatatactaataaatcttcccctcttatggatatatggcgcgcactaagactacccagcacaaatcaactggacctca

SEQ ID NO: 26846 - DNA, 796 bp, Zea Mays
gtactggctattacaataaagggcatcacatcattaaatgtttatggctctaggccatcatcacatgcatcacaacaagcataggcgaataaagttattacagacccagtgttcattacaaaaataaaaagcccctgagggctaccaagccaagctgtcaatccttctccccctttttggcaactagcaccaaaaatgaagagaaacatcaaccacaaatcaccacggaggagttggatcaaagaactgagacgccaagttagctgcaaagttttcttccctaggctgagctgggggggatagctgcccgatggatcctggggaggtggatatgaagaagattgacctggatccccttggtggggaggcggggcatactgctcacgatcatcaaaatattcttcctcttcttcttcttcttcatcttcagctgtcatgaagggcaccccataggcctgctggtgccattcattgatttctagcggaggaggatgaaggggcacatcaggcgagcggggagcaaatggcatacccatggacgaggcttggcgatggaggttgtcgtcagtctcccgctgacgccttaccaactcatgaacatcggaagatatgttcctgcacatagaaaagaaagctgcaataccatgagccagtcgagctcccatcccgcgtccatgacctcgaccacgagtccacgaccacgaccacgtggtgcgggagatccacgaccaggagagggacgcgaggtaccagcagcagcttgtccacgagagctagaaggagctttcctcagtcg

SEQ ID NO: 26847 - DNA, 717 bp, Zea Mays
ctgctaataggtcttgccctaggttttataaatcttattatgatttttactcgttttactgtgaatttcgtacgaccgctgacgattgaagctccaagctaatatagttgtgatacctggagtggtgcaagaaaggttgggtcttgaccgatggacgatggtagacttggaaaaaaagcttgggctccacgagccggcttggacttgggtcgtcacgtgagccgagccgagccacatttctcatcttgggcaaccggcgagccacctcacgcgagttcacaagccggccaactaggtactttgtgccttcggtggaatgggccagcccatgccacagaggcccaacaaggacgtgaattcctaaaccctattcgttgtacacagagcacaccgtcgttctttcaagtcatctagaaacttcatggcgctgttgtgcgttgtgtacctttgtctttgtgccgacgactgaccacttgagcttgacgcctcgacggcccaacacgtcctgcttccggcctctgccctccatactcgcatctgtcatactcgtaggccgatcgccggcagcagaccacctcagtcctcacctccccagccccacagctgacggttccactccattgcagttcgccaccccacgccaggcgcggatgtgctcatccgaccacccgtgtctagtgtccggtcgtccggcgtccgccaaaggatgatcgctcg

SEQ ID NO: 26848 - DNA, 346 bp, Zea Mays
ttatgatctccatgatgtggaggcttatggacaggtggtttttagcttttacctgatcttattttgtgtctgtggttaatgtttaatacaagtgatttgatctaattaaacatttgtttcccaaattatctagatgctcaagaatgctggtttcagtcatgtcattgctgaagaccgaactgatcaggtctacctatctaaacagatgtaatatgcatgttcttattcctgtctaatgcctcgccacgtctcgacatttgtaactactgagttctctttgttgttctgttctgttctgacccaattctctgtgctgcttttagcttcatggttctctacaaccgcg

SEQ ID NO: 26849 - DNA, 968 bp, Zea Mays
gaaaccctttggattttagtaacatcttattaatgcagtgttgcattgtatagttatcttaaggctagcggtctttaaactatatatgatcagctgcctgagtttagttctcatttatttcttttacttacatgatgatttgactattttcttatttttttccttgcaggtatattgtgcctgccaagtctgcagtcaaaaacgtgtcaccagctggagagggctcagtaaatatttaccccataatgctaagagtttcagccagcagagatacatatacactaaccgtgaagatcggcaaaaaggtgcacacaaagtacttgtattcttgtagtttgcaagagttctctctttttttttaaagaaagtttgtttacttaatgatcttaaccattcccttttaagcaatgtatcttaactttgtgttttcccctcattttgatacactcaggacaactcaactgagaactttaagagagcatgcaagatcctgactgcagactctgagccggtattcctatgagaattcttttgcccacttactagtaatggtaaatagccgaagttatttttcttgtattgcatgtttgcaggttcacatatgggatttctctgggcgaacaacatacatagttatgactgaactgaaccggtcgccccatgactcaaaatctgcagatcaggaggtatcttcttctccatcaagtcttccatctcatctcatactcttacagttttgctgggattgtattgttctggtagctacttttgtcttttttgttgcataaaatgccaatgatgattttttatgcttcactttagttctgcttaccaccgactgcagaatgtctagtttgtcaaggttcttatcttcttttctgatgtaggtgcatttaatctgtactaagttagcacatctatgattcatattgtcaaaaaaaatctcattttttcgaattgaactcttt

SEQ ID NO: 26850 - DNA, 1085 bp, Zea Mays
gagacgctgctacaagctctttcttcctggatgacctctttatccagggaagagtagatgacgcacccatctctgaagatgagcccactgtactaggggaggagtccccgcaacacgagccacgccaacgtcagaacagacgccgtaacattcgccgtcaccataatgccggggaatgggatcctactcagcccgtatcctggggcgaggcatctaaagcaggagagacacctgacaacagggtactccacgagcgtcgcaattcctaacgccgtgatcgtcgccatgcccaggagtgcgagcgggtatgagcggtatatgatgccaggctccgatgcgagaacccactccttcctcagattctcatgcccgactttgctcgagccctgaacacgctgagggaagtcggcagagactaggattagatcgccagcggcctgccgtgtaccccggacgcggaaggctaccggcagatcctcacctaggtggcaaaccatcttcttcccctcgcccatccggtaccggacatgcactacgtcatcaacagtcagcgagacgtgcggagcaacatcaacacttcacacggtcgacgacgcgaagatgagatgaggtggcggcaagtgtatgactgagatcatggtgcaccggcacgcaaccatgcaaccaggacaaagtgagcagttgcctctatgaatagcatggcaccacaccggttgctagggagaggtgacacgacacacggtgtcactcgccgcccaaggactaccaccatgaccacactcgagaagaacgccgggaggaccggggtacatgcggaatctcagtccttttcccccggttccagccaattcaatggccacctaacttcatggtctcgaacgtcgacaagtatgagcttaagcaagatccaggcagttcattggctgtctatacgaccactgcccaggccactagagcaatagaggatgtcatgatagtgtactttcccattgttcttgagcaagatgcgctgcagtggctccgacaccttcctcgccatttcattgacgactaggacgacttctgccactggtttgttacgaatt

SEQ ID NO: 26851 - DNA, 476 bp, Zea Mays
ttataaaggagtcttactttgaagttcgagtaaagtaagctgtcaatgatgtgctgacgtctgtagtagctgatatccttttcaagctttgccaatccaatgctctttgacagagtgcttataatttacccctagcatggtcgcggatgcatcccacaatttcttcatcaaccccaccgaagagcattgatccaagctggtagccgtaggatatggcaaattcctttaactctgatatgtcctcttcgaaaagctattgggcgcctaggtgccgaaggtcaaagttcatacttttagaagcaatttggctgtggcagtagcttcggcatcgacgggtatggtagctttgtctaccgaagctgagggtggggtatgttcaataacttccattatattcatcatatgccactgcttttcccccctcgtttttctcctcggcagccgaagcaatttcccttgactgcaagaggctagtc

SEQ ID NO: 26852 - DNA, 493 bp, Zea Mays
ggctgtaccaccgcgcacctacgtggctctgccgtggtgcggtcgagcaggccgctgccgtaatggcttggggggttggtgaaggaagataatgatggacagttggatccttgagacacggcctagattggatctggggataccaattcgggaatcaaatctgaaccctcggcgttggatccgatggcctgtgtgtgtcactggcagagcacggattaaagtggcgtgtgccccattcgcttgactgaaaacgaaccgttatatttcgatctgaggaacatggtggaatcatgcctattccctcccttcggtgctatgatcttgaccgtccgtttggagttgtggggtggagataagctcacgctttaataaaatcctaaccctaggatctagaaccgtgtgttgtgatcgcataccggtttggggggcgctagctctaatctaggcccttgatcattcgtcgggtggctctggtggcctcataccctttcac

SEQ ID NO: 26853 - DNA, 353 bp, Zea Mays
gtaatcaattccagcagcatggcagaagggctcctccacagggaccgcgtgaaacttcatatctggacttctctgaaatgcgtccccactctttgttaaagctgaagaccctcttgaagctgatgagtggatcagggtaatggagcagaagttcggattaatccgttgcaccgaaacacagaagccgttgttcgctcccagcaactgagaggcgctgccagtacctggtggggaaattttgtggcagttcaaccagccggacaccaggtcacttgggatgaatttaagctcgcattctgtgaacactatattccagaaggagtgcttcacatgaaacaagaggaatttattcg

SEQ ID NO: 26854 - DNA, 418 bp, Zea Mays
gtgaacaccgacgaaggcaatcccttagtgaagatatcagcatactgggaggaagtaggaacatgtaaaactcgaactgcaccggccgcaactcgttctcgaacgaaatgtagatcgatctcaatgtgcttcgtacgctgatgattcactgggttcgaggagaggtagactgcactaacattatcacagaagacaacagtggcgcgcttcaggggaatatgcatttcctgaaggagctgtcggagccaggtggtctcagcaactgtgtttgccaccgcacgatactctgcttcagcactggaacaggatacagtgggctgacgcttggatgaccacgagacgaggttatcaccaagaaaaacagcaaacccagaggtcgaccgaccggtgtcaggacaaccggcccaatcagcatcag

SEQ ID NO: 26855 - DNA, 544 bp, Zea Mays
tcctccagtaagcagaagcgcagctgacaacgggagaaaggggaagcgtcgtgcacccttcacctccgcgtgtttgccggcccgcggtccatctgctctcctcccagctctcccattcccaatcatgttgctgcctaacgcaggcacaaaatcgaactcccatcagcccatccccaaacgcagattccacatttatgtatctccttggtgttagtgttgacctctaccttgtcgctataggcgctcccacaccattagtgctcaactgctcatcgacgacgagggacagtgagaacagacgcgttcgcatcgctccctgccccccaatgtatagtttacttcccactacagagcttcgttctgataaatttccctaaatcgctaagcatcgagcatgtcgtaggttattgcttccccgttgcacatatggagcacaattaattggtccgtaatcgttcgatttacaccgcctatcaatgtgcaaatctgtttttcttttcgtttccttcttcttctgtatctatacgcataagacatcaacttt

SEQ ID NO: 26856 - DNA, 391 bp, Zea Mays
gaccatggggcggtgagcggtaaggatgctgaatcccgacagggacgggagaaccaccatccagatagtggtgtgctgtgcactcagcatgcaattctgcaacctccgcccgaaccttgcccaactcgtcagtggcgtggtccagctctgtgttgagcacgacgaccaggttgaccatgctgtttagcctgggaatgccttcaccaacgggtgagacaatcacacctccagcactgtcggtcgaacggcgagggtagtacttcaggtcaaggccgtcagctaccccactgaacaacgagcaataatgagaaagtgtctatcgtgctacatcttgcatggctacctcggcagtatccctctcagtaatatagtagtgctctgagaaggcctc

SEQ ID NO: 26857 - DNA, 414 bp, Zea Mays
aacaattgaaggcatgagttgatggattgggtgcttgactaccttgcggaatcgatggcatgctcaatttatagaatccccgagcggtggcccatgaattttacatggcgcggtggttgtcggagaaagaaaagagcactgtcgcaagagattggtggctttcaccgtggcggctcaccggcgatcaccggatatgtgtaatatgagctactgcgacgtggtaagacaccaaggcacgtggcgcacaatcgttgagcggcgaactccggtgagctcatccgaatcggccgtgagttaggcggacacggcggccggagtgaacagtggctcaagttcatccacacggcgatatttactaccccgagcaacaatcaatacttacttgagcacgaatcgtagcgtttgtcgcaaatc

SEQ ID NO: 26858 - DNA, 425 bp, Zea Mays
gcgggatgggcctgacgtaagaccactgggccacgctgcccttgcatttattgtggagaagacacgccgcctgactaccccgctgacaggcgatgtgtcccttcggcatttaatgcgcaatgtccactcaactggtaggtgacacctacgccatcctgcaggcgacgtgtccgactatccccgttgggcaacagtacaccggtgccatggcatgcaccgcatccatcataactcgcgcattaccgagggcgttgtagcaagatatcaatactgtacgcactatggatattatggtgcacggagattacacgggcagggcaagcagcagttccatccttccatttgtccctgggcccgtgtgtcggggctgaaaacccttgtacacgccccccttgaactataaaaggggaggcatgcaacattac

SEQ ID NO: 26859 - DNA, 412 bp, Zea Mays
ctgagttatggcattagctggatattgactgcgccatggcaacacgatgcaatatttgtgtcattcgaacttggctgcgtcatgtgattgctatgttgcgttctccattaatcggatcgctcccgttgagtcagaccgccatcgttgagtcgcgtattttttgcatgccctgtaggcaatgtctgtctgccgcgagccacaattgcgcctgttgcgcatgttgtgttgatttatcgtgtaccccaattaccgagccataattgtgcctgttgcgtttattacgaaggcttgctatactgtcgtagccctgatggccgcacacgcgttgacgccagatacgctagagcttgtactcgcgtggattgtggtgggttgttcaaggtcctgaagtcacattatgtgcaaccttcat

SEQ ID NO: 26860 - DNA, 307 bp, Zea Mays
gatcttcagggccaatactgccacttcggcaacggtattccttatgcaagaccttcggcaacagcttcggggccaatactgccacttcggcaatggtattccttatgaaagacgttcggaaaaagggattttctttatgaagcgtgaaaagacgggaaggtgttttttcgcctttggctcaaaattggtacgtacgataatttcacgctacacaaagaaatatattacatcatgaattacatagtttacaattgttccttgtataaatgcagcatataaattttacaatatttttcacacaacgatt

SEQ ID NO: 26861 - DNA, 619 bp, Zea Mays
ttgcaacaacaatcctcgagaatatactgtatggaaagccagatgcaactattgcagaagttgaggctgcagcgactgcatccagatccaatgcacatagtttcatatctcttcttccgaatggttacaacacaatggtatgtctatattttttcgacatacatctaagtctggtctaataaattaaatactaatttcttcattttttccatccgcaggcaggtgagagaggcatccagctctctggtggtcagaaacaacgtatagcaatagctcgtgctatgctgaaaaccccaaagatcctgctcctggatgaggctaccagtgcattagattcagactcggaaagcattgtgcaagaagctttagaccgtttgatggttgggaggatgactgtaattgttgcccaccgtctgtcgacgataagaaacgtgaacatgatcgctgtgatccaacaaggccaagttgttgagactaggaaaataaaatgtttgcatgtcatatttacttgatatgagacaatggatatgaacgggggttgtggcgataataacttgagtttgaattacatcacatgatgatgccttgtatggctttttagcttgcagttcacattgca

SEQ ID NO: 26862 - DNA, 280 bp, Zea Mays
gcaaaaaagtggtatgtgggctcgaagacgcgtgaaccgaccccgcgcatgcagaggacgtgacttccttcccaaagactcgctgacttcgagataagtcggagtcaattttggggatagagagggggttgtaacaatcgtgcggagtgtgtgaataactcgggttctgccgacataaggcagaagaggcacccctatgaaaatcagagatctcctagtaggcatagtcatcttcaataccatcatcagcttcaccataggataggttttccactttgga

SEQ ID NO: 26863 - DNA, 441 bp, Zea Mays
tgaataattaatgctgacaacacacaaagatctttgttgtacgctgtgttgcttctccgactggctactgccatgtcttgtcgtgtccgcaggtgggtgatggcttgttgcagtagaatacggagtagcctgggacgcctgttgtgcgtagaggtgtataggcggagccatttagattccctctgccttagtaacgcatgagcaatcagcgggagtcatgatgattgcagtccatgcagcattgataggcagtaacccttttcatggaaacgcgtgagtaatggtgagtcattgtccttgctatggtaacgtgtgagtaacagcacgacccacacagcgtggactgggcacgccgcctgtcactggaatggataggcgcacgtcttatccgtaatgaatgcaaagatgcgcgtagcccagaggcttcatgttaggttccgc

SEQ ID NO: 26864 - DNA, 486 bp, Zea Mays
attgaactgacagtgaaccagaaccaagtttaggagctattttgggtatgaatcagtgagaatttaagtatagttgctatagcaagataaaagttggattgtagatcaacaactttgttacaggaggcttaacaagttgtcatataaaaatctgagatctgggccctgcaaatcggtctgtcaaacgctctgatgaaggtctgatagtatagtaaactgaataagatctcaggttcagccccccttgccgccgatgatctcgcgcccggattcgcgccagcatcgcgattcatgcctagttaaacgcagataacgatcctcgggtgaaaaatctggcgctagggaagagcttgggacactgtttcgccctggccgtcgtacccactcgccttacggccggtccagataacctcgccggagttggccgcctgctgctcgggtgccacgtgtctaggtgctctaccacgtctcagtgaattgccatag

SEQ ID NO: 26865 - DNA, 336 bp, Zea Mays
cttgcttagtcgcagcagggttcattagagaagtactgcatcctgagtggttagcaaatcctgttcttgtactcaaaaagaataaagtggattggcgcatgtgcgttgactatacggatctcaacaaacactgttcgaaggatcccttcggacttcctagaatagaccaggtggtagactcgaccgccgagtgttctgtgttgtccttcttggattgctactccgggtaccatcagatcagcctggcaaaagaagacgaggaaaaaactgcattcatcaccccgtttggagctttctgctatacctccatgtcgtttggcctcaaaaacgctggag

SEQ ID NO: 26866 - DNA, 988 bp, Zea Mays
ccgacgaggaccaggaggctgaagccccgccaagccaagacttcgctaggactccaccttgcagctcctaagctccagttccatcccgataagagatatgagagcctctcctcactctctcgactacttgtaatccctactacgagtttgatcatcgattgtgctggtagcgcaagacaccgatgactgaaagtagggacattctacctgagctagtataaatcttgcgccctcaacgcacacccttgaacgtgtacaataaatttaattgtcggagcgaggtacgaaacaccgacaattggcgcaccatgtaggggacttgtgtgttccgcgatgagatcatccaagcttcggatggctagtaacaacagtggcgtggtctagacccctgggacgcccatttattttgggagtctggatttcgtcatcaacaaagaggcagagatgatgagggactcgatagacccgtctcccttggcaagcaacttgtcggacgtaccggaagtctcggcgaccttcaactcgacgcacctcaagagaaccatgggtcgcagggcttgccaccacccgatcatactgacgtactaggagtactagactgtgtccgggcattcctggatatgctctcgtcagggtcagaagacggactcacgtccctgcctagcaaggcaagctgcgaccctggtcaagaatgccttacaaccaacaccataggagatcattttccccacatgaggagccccagcgagaactcgcttagcatcatggagcgcaccgtgatgtccacctcgcatcagctcaatctgcctccccaggagctgtagttacgcccgaacctctcgcgaagcaaacaacaccccacgacaaacaaggaagcctgtggggggacggggtgaccatgccaagcaatggggcaacaccacgccacgacgataaaagcatgccattgcctggtttatggtaggggcgcagcgccgcgtttccctcg

SEQ ID NO: 26867 - DNA, 438 bp, Zea Mays
ggggatttccgaattccctggctacggtggatggcatgatgtggttggggttgcgttgggttcgtaacaaggggttggagcagggagagtcttcaatttaaaggaatcggctcggctactcgtggatttgaacgaagttacaatcacggaggtgacgtgatatttttactaaggcaagttcaccatggcacgcgatggggcaaagtcctatggcaatcactggttactgtccacgactcatgatgacatggtaagacggcctatggcgtggcacaattgaggtcaccagcatcccacgatgacatcggtcgctcggccacatcgcagagcaatagagcatggccgatgagctcacgcgagagaccataccacctcccttccgatcttttacctctatcagttatccacgcgccaccgagcatgaactgcaacaccggc

SEQ ID NO: 26868 - DNA, 366 bp, Zea Mays
tcgtggtagaggctgtggtggctccagggccaacgtagctaccactgaagagagtatctctgttactctgtccggggaacaagctaagcaatgggagcagtggcagaagggcaagtcttccgagtgcctcacttcaattgatgggcaagccaccaactccttcggtaactttgccaactacgcccacatgggcgaaggtacacaggcacaagtctttgcatcctcatgtagtcatcacatagattgggtcatagattcaggagcatcaaagcatgtgactagcatgtccacccctttcaaaacatacattccttatacacattctgagtcagttcaaattgctgatggtacatctcaacaaatccg

SEQ ID NO: 26869 - DNA, 437 bp, Zea Mays
gcaagcaccaacggagcggaccctaatgcagatgcagacggcatgagggggtgtagcagagcaaacgtggacttacggagtcacagacaatgtctacggggcggcgggcggcaggagcagagcccacgctcccatgacgacggtgggtgcccaaaccaaagtggcgaacaacgaccaagacggctggagaggctatcggttccaggacctaataaggcgaacatgaattgaggagagagggaagaaaatattaaaggggaggaaagtacctacagtcgtgcagcacagagcgcggtgctgtttgagccatgtttgtaactgttgaggcatgggagcgagggagatgacaaccggtatgacgacgacgactacgcgcccacccgttctttccctacaggctgcacgtggacccgcacggcgtcacggaccacttaagc

SEQ ID NO: 26870 - DNA, 422 bp, Zea Mays
cgaacatccgcatttgagaccaccacatgcctttcttcaaattcttggtccgacccctcattaaatattttatcaaaaaatacatggtctgcagcaaccatatggatctcatgccagatgacagttgaatacgacgtttccctagatactttgagaccaccacaaacagacaacactaatgcattgttatccacctgcttgcactgcatctggtcatccatctcttcaactagctgctctcgtaagccatgtgaattactgaagccatcacactcacagaaaactagcacatcatgcacatggatgagatttagaacatggacaacgatctgatttgtatctagaatcaactcattgctatctaagtactcttcacccccggtgagtggccgagattgcatgcattttctcagagtagtcac

SEQ ID NO: 26871 - DNA, 625 bp, Zea Mays
tgcggagctgggatacgtgaaacacattgtggatgtcagacatggattctggtagttcaaggcggtatgctgcgggtcctactctgccaatgatgggatagggaccgacgaatcgcggtgctagttttcctattacttggaacctcctgacaccacgcatcggggagaccttgaggtagacgaaatctccttcttcaaatctgagctccctccgcctattgtccgcataactcttctgccgattctgagcttcaagtagtctcctgcggattagggcaactttctcttctgcctctttgacaaaggcagatccttctaatgctttttcccctacgttggaccacatgagaggtgtctggcattttcgtccatacaacgcttcgaatggtgacatcttgatgctggcctgatagctgttgttgtatgagaattctgcgtagggtagactggattcccaacttctatcaaatgctagcacacacgctcttaatagatcttcgaggactttgttgaccctttctgtttgcccatctgtctgagggtgataagcggtgctaaaatctagcttggtgcccatagctttctgaaggcttgtccagaatttggaggtgaactgggttcccct

SEQ ID NO: 26872 - DNA, 356 bp, Zea Mays
aactagatcacgctagatcaccgagaacacttcggatcgtcctcggtttgcgccatcaccgtggacagagtgattgagagccataaccttgcaattgagtgaggggaaagggtcattaggagtagaattggttgtcagccacaccgaaaccctagtcattgcgttttccagccagtcttggctcgccggagccactgctccgccgtccacggtcggggatcgcgggttgtgaagaattagaaagtgaagggcctcggtgtaaacgttagtgacacattgaaatattgcacgggactattaacggggttttcaaatcaccagggttcccagtgcaattccggcaatgccagcgcgcg

SEQ ID NO: 26873 - DNA, 735 bp, Zea Mays
gtgacatcgagcgaagaagccttgaagccgagaaacctcgggtgaggaaggtgtgtgaccaacttgccaagagcagcgacggggcataatacttcctcaatcccggacaaaacatggtcgcagtagccaggatgctttggtccatcctcgagatagacgaaccgaaggcaagggcgatgtaccgaaacctccacaacttattggagaaagccacgacacagtaaggccaaattgatcggcagtttcccaccgacatggatagctataccctgcacacggcctcatcctagagtatgggtgcgaccctcccaatccacgagaacgtgcatcccactaaaggatcacctcggggacatctacgacgaccgacacatcatcaacaaccaacgtcgggagcaagaagaggtcgagcaaccacgggaaagaagacgcgagcatagccctagcctacctaggccagggccacacgcctttggacgcgcaatccgcaaggcccagttccctacaaaagtgagggcgccagcaaatatttccaaatatgacaggtctttgaatccctgtgtatggttggaagattaccaccttgcttgccgcatggcaggactcaaggacgaccagctcatcatccaattcctccaaatccactttgcggagggggcgagggcctagctcgagcatctgccagccagcaccatccatgactgggccgaccttaggaaggcctttgtcgaaaac

SEQ ID NO: 26874 - DNA, 426 bp, Zea Mays
gaattaggaaatggaggatgggagggccggaatcgcgatctctggtgagctcgccgccgtacggtgacctgctccgccgtgggtagtgacggggggagagagatggggtcggcaccgttgatctattcgcggacggctggatctgggcgtcggacaccgcttcgggggggatgggatccgtgccgtggattgggatccaacggtcactggttaattccgaccacataaaatcctggccgtagattagggatccaatggatccggttgggtaccgcttcgttgaagtagtgatctaatccgtgccctccgctgcggatccaacagccctgagtgcaccgtaccccttcgccgtgcatttttgttaaagagaccccgcactttacacgaatcaacccgccatccaggggccctgttccctgtgtctgc

SEQ ID NO: 26875 - DNA, 430 bp, Zea Mays
cgcataccactagagtagcctagttggacgttgtgcaatgccaacatttggacgagacctgtctatattcttcgtgtgtttcatggctgtctgaagagaagagaggatccgaggggaggaccaccgccgatttgggttggaggagtgggaaggttccaagcacacgactcccaagtcccaactcccaaccaagagtggtgtccagctacaacatgattgatgccgaacaaaggtcagtgattgacagtcagacagacagacgggtctacgtaacggcacggcctatacacacatcgcgtccagctcacggtccggccagcctttggacttggagttggagccccagaagaaacgccgtgctatggctgctgcccaccactcgcgacctcggaattctctaactggagcctattccagtcacatgccatgc

SEQ ID NO: 26876 - DNA, 408 bp, Zea Mays
attttccaggaaaatcaggggctattctacaactaatcccgagacacaggcgcacactgagtggaccgcgggttataatacgtaaacagagaggtttatatgcaaaacttgcgcagtccaaaggtgtgggtggatctcggccgtcagatcggacatgggtgttccagattagatctggagtggatcgaaacggtacacgtcgaccaccgcacgatcaaatctctacgctctagattcaatactctagcgtcacttgtcatctatccgatctaaatcggacgactcacaacccccaaacccgaatcggtatacaagttctaatcgtagccgttcctgcccaatacaacgatgcacgcagatccgcccgaccctggcccttgccgacgatgagggcgccccgcacggcgg

SEQ ID NO: 26877 - DNA, 447 bp, Zea Mays
acagcaatttgagaaggcggagacggttgggcctgcgacgaattcgaccaatcaagcaattcgacatcccttcgaggccaaaggataaaattcttgatagcttgtccaagtttctcgataccttcgggcccagggatgtctaacatgtcgtcctcggatccttggacaaccgacgtcacttctactttgcaataatcatctggaatatcgtttccatggaacttgcgtcctgggatcgcaaggcctgtggctactttctttgtacgtttattgttaataccatatcttataaccagtgtgcacgcctcaggccttgtgatgtcatcaactggataacggaccttatttcccgttgaagcaacagagcttgggaatgtcgtacaatcggtggaagccggcggttgagctgctggaattatttgtatctgtggagtggtcatctgttga

SEQ ID NO: 26878 - DNA, 491 bp, Zea Mays
gagtgatagactggagaatcgaagcaagagcagggtccatagcctgaggggtagcaggggcagcactagaactcccagcctcatgatcatgtgagcgtggaggcataggaggcggaggaggaaccccaaaatcatcatcatcatcatcatcatcatcaactgttgtagcctgagtgtcgaactgatgaagagctgcatcctcggcctgagagtcaaaaacaggagcagaagctggcacaggaatctcaggcgcaggacgatagaatccaaaaacaaggcgtgaggcctcaagtgtgccctgaaatcgacgaggctgaatcagctgcgcaaagatgtggcacaagtagtgagcatagggcaactgccgacgagcacgaatcccatccaaaacggtgtcctcgatctcacaaataaggaagtccacgacgtcaaactcagagtgagagaccagggcaccaaggagccaaagctgaatatgtgtggtagcctcc

SEQ ID NO: 26879 - DNA, 420 bp, Zea Mays
atcatgtggtacctattatggcggcaacatttgatttctaaactgtactgctatgagctatcatatacagtgccttctgtgaaaaattggaatggagaacagaatggtattgttctatctaccagaaaatgcaaccattactgatgcattaagttgaaggaacaaaccttcaccaaaccagaaaaaagttgagcaacctgacatagatcaaaaggcatactatagagcacttgcaataataacacacaccctgtaaatgtaaatgacaggtccaaatatagagcactaacacacacatgaaattggctaccaagatctacaacaatatatgaacttaggaactaacaaagtcatcttcaagtaatgttttggaccataactacaaggtgtgacagaaagcaaaacacaacaacatccttg

SEQ ID NO: 26880 - DNA, 288 bp, Zea Mays
tgaatgagttccttggcaatagttggcaggtggtgatgcaaccaacgcaagcttgatgtctctgaagttcagattgacaactgaaatgggaaatgatataaacctttgtgcaggtcgatagggcagaaaacaatgacacgcttggtgtccaaatcctaaaggcacgcggcatttttgtaggcccaaagtggtactggattggtgttggagcattgcttggatacatcatgatcttcaatttactctttgtactgttccttgactggcttggccgtgagtactctccag

SEQ ID NO: 26881 - DNA, 286 bp, Zea Mays
ttttacatttactccaaggaaaacattcctagccatctagtagttatgattatgaaaaacatagacaaagcctgagtcatccagaggtgtgcaagaaaactgccagtttaattggtgtgcaaggaaactgccagtttattagggtttaatggctttgttggtcatgtgaataagtttaatgtgatcattttaatgcagcattaggtttagcttacttccattgaatcaacactcctgccactacttgttaactggcttgtgtgattagagcaatcctagccaacac

SEQ ID NO: 26882 - DNA, 565 bp, Zea Mays
caatcattcctctgattcttcccaactagaagtctggatgtgcaacgctgtgcaagtttacaaatgcagtgtcaagtgcggcgcatgggaactgaatctgcagcgaatgtgcaagaaatacacggcatcatatttcacagttcacaccgagcaacatttaatttctttttcctgttaacttacactaccgctgtctgtattttcattgaattactgtcaagaacaaactgcaactctagcagtttgagatgtgaaaccacccgatctgtaaacatgttgacagaaacctagaacccaaaaccatgtttttaaaaaccaattaaatcaatatttactctgctcatttatgtgccattttatctggcgtctgcttggtggttgggccttcaatagtgatattttggccatagggacggtccctcctgcatgacagaatgctttccttagcttgacagttagtcggagatcgacgcgacctgattgacctcgaaaagccttctgctgctgtcggagggacgcatatcctgcggcgatgccgacatgaccttaataattgggaagccat

SEQ ID NO: 26883 - DNA, 544 bp, Zea Mays
gcgaggtggagcgactgaccaagtccctgccaagcaagtccacgaggcagagtggctgactaggtccctatcgagcaagtccgcaaggcggagtggtcgaccaggccctgccaagcaagttcgtgagaaaagataaccacctaggtccctgccaagaaagtcagcaaggcagaagcccaagtcaagtgtcgcgaagtccacaccaactaggacaagacatggcaccccataccaaggactgccacgcaaacgttaggcaagggcacgccgagtgatcgctatcaacatgactgcgcctccccaaatacatcctcagacacgctcgcactaccttgggggccgaacgacctttttcataaaggacctcagcctcggagtttctatagtggcccgaataacaggcagtacgcctatgcacaccaatgagtgacgcgtgattgtgatggcgagcaagattgcacaatgcacgactgctccatacgactgacctacgaacccccccgcactaccacaaggacatcagcgggagaccagctacagggac

SEQ ID NO: 26884 - DNA, 448 bp, Zea Mays
ctggtgagtaattggaggcacggcttggtggattgggtgcttgactaccttacgaacccgacgacacactcaatttataggcttcgggggcggtggcgcgtgaatttgggttggcgcggtggtggacggagaagaaaggggtcactggcgcacaagattagtggttttaaccgtggcggctctccggcgatcaccggatatagatgacccgagctattgcgacgtggttaaaggcctaaggcgtggcgcaatcacggtgaacaacacggattccggtgacggccgtaaggccacgtcgccggcgcaaatgaccgagggacagcgcggccacagtgtcccggaccaatccgcggtgtgatcttttcaccggcgagctcaatccacagacctaaagcacgaatcatggcgagcagcaccaatcacgacgaagggtcaccggcggcgagat

SEQ ID NO: 26885 - DNA, 275 bp, Zea Mays
aaagttgtagcagttctcaggcaatactacgattagtactacactggactagggcgcaagcctgaaccaatataactcactgtctcacaccccctcttctggaatccccaccgaacacaaattctgtatccaccggtttctgaaaaccacgacactatgcatgtagtgttcgtaaatcgctaggtactgagactggagggacaagttgaccatgcttggaagcagcaatttctaacgaacttctaggtgcgatgtggttagggatgaaaatggat

SEQ ID NO: 26886 - DNA, 619 bp, Zea Mays
ctacatcatccactgattacaacgcgctaaaacacagaagactaagactaaaaaaggactagtgggtcagttttcatttccacctaatagaccacgcaggaggtaaagaccctttgcgcctgctaaactctagagcttcaaatcatcctctgccacaattaaaagattagcaaggttaggagaggtcacgtcaaacacacatctattacgatgtctccacaaacaccagactcccaagatgatggctgagttcaatccttttcttaccagaccagtggtagcctggttacatctcctccaccaattctcaaaagaaagatctcctggctgtggacagagggactggaggccaattatctgcaggagctgaaaccagaattgcctgaaaaaaagactagtgggttgtggttgattccgatgactgttgccaagtctgaatgtctgatatgattacctgcatagttaacctgttttactttggatattggtatgttaggctaatagattgatagtttgacctaaggtacacggaatggtccgcatataatttggattgacacacataatgatgggaaatggagattttatgatctcatgcttaatgtctgctggttttgca

SEQ ID NO: 26887 - DNA, 366 bp, Zea Mays
cggagggcatcaaggacgagatgaacatgttgtacgtgctcagaccatgatgaattatagatcaaaatgttatcaaagaaaacaagcatgaagttgcagatggaagggctagaggacttcgttcataagcgcctagaatgtggtcaacacattagagaggccaaagagcatgatgaagaacttgaagtgactatggtgtgtcatcttctcgatatcatcgggatgcatccgcacctcgtgatagtcgaatcgcaagtctagcttggtgaagtacttggcagcatggagctcatcgatcaaagggatggggaacttgtccttgtacgtcttgtttagtgtggtgtagttgatacaaaacctctagga

SEQ ID NO: 26888 - DNA, 275 bp, Zea Mays
ccacaaggtattctctaaccacatccctcaccgcggggaaagtaatctcatggtcaggtaaaggttgaatgctgataatagcccagtcctcatgcaaaggcgggagacgccgagagactgacctggccataatatcccggtgaaggaccaccgaagcgctgaagcccggagggaggaagggttcgggatcaacgcgcctaaacgccatctgagcaggaagcgaggatcgacaaccagcagacgaagacggagcaagttggggttttgttgaagtg

SEQ ID NO: 26889 - DNA, 450 bp, Zea Mays
tggttccagacgtgggcaccgggcgtgagatttttaatgcctactgctcgctccacatgatcatttatcactggctccagcatgtcatgctgctcatgctgctgcaaggtaggattgtgctctaaacctatattgatttcaccttttgatgattgtagttgtccaaccctgactcaagatcatccgccctcttcccgtttgatggaatgcgtaacccatacctttttatatacataaaactgatcagactaatatggaatctgtctttcctcttgggtagcatccgtcctcttccgcttgtgcccaaggacggttacaccatttgttgctaggaactggagctaccaaatggcttatcctcgtttctatttcccaaagaatctggaatttgtcactatgcgagtgtttcaggatcaggtcagtaatagtgattacttccttatatactct

SEQ ID NO: 26890 - DNA, 370 bp, Zea Mays
ggacaggggattcaggactctgtctgctcacgagttcccgacaccactgtccacctacgctgcctcggttagcgatgctgcccgtcggacccagtggtcgctcagccacacctaccggcagcagctgcataacacgaggttcaggcatcttcctcagcgtctgtgtggaggaagtcagaccagcatcgtcccaggtgaagctggtgaggatcgcctcaacaccctagctggtgtagtggccagtctcaacaccgacctggacagtgccaccctggatctctctagggtgcacttggagctagagaatgcccacgccaggattacagccctggaagcccaactacaaggactggatccgcccgaagctcag

SEQ ID NO: 26891 - DNA, 278 bp, Zea Mays
caccgatgccgagaggcaatacaagttcatgagaggtctggttgaccccctgcattaccagctgatgaaccacaccttccccaccttctagcacctcatcaatagggcaatcatgatggagatgaagcgtaaggatatggaagactggaagcataagatggaaggaccacaattgggaagcagcaaccgtccccgccttttcaagcaaatacccacaacagagtcagcagccacggtagcgatatcagcaacagagtcagcgcccacccccaacacca

SEQ ID NO: 26892 - DNA, 366 bp, Zea Mays
cgggttatgtggtgagcttcaccgctttccacgagcaggggatcagggtgctggcgagtcacttcatgcgggcgctcccgcactactactgggtggagctccacaacttcaaccccaactccatcacgcatgcgcccatcttcgtcgttgtctatgaagggtacctggagattgagccccattgggacctatggctccacctcttccgcgcggagacgttctccctctcattcgacgtgaaaaagatatgcagcatggtctaggctggtgactgcacgctcctgctgcgctcgaaccggacgcaactgtacatctctgctacccttgcctcgtcgaacaaggggtggcacagtcgatggtcctacc

SEQ ID NO: 26893 - DNA, 532 bp, Zea Mays
atatataacccgtacatccattaataacatatccacaagaaaatcaatgagtcaaacgggaaatgatgaaagaaaaaattgcacagttattgagctctgttgtgggagcaaaacatcagacatgtccataaaataactatgaactgcaatctaaatatatcatccatcttgtgcctgcaatctaaatatttcattcagaacatgaactgcatagagtaaaatgttatttgtaatgggtcagccatggtgcaaactaagatatcctaaatgagatatttagttatatatgagaaagtgtttaagtgctacagtaaattgcaggttctaatgtatagcttaaacacatcaaagagtttgatatcaaaaatactataattgataattcatagttgataactgatgatataatacatgagttgcttggctcaaacaaacatgcaaaagaaaagggtcggtagttaacctaggaattctgatagccatcaatttcatttcattatcttcttgcatctaatctgtgccggtcaaaact

SEQ ID NO: 26894 - DNA, 675 bp, Zea Mays
agcggagacagtcaatggaaccgcgtgttcccagtgatctatggcggtttagttcaatccgaggggtcgaggagtttgaggagagcttagggatgctagaacaaatgactgagaagcttgaactgacctgggataagctggtcgtggtgagggtgttcttgcggtggtagaacaggattgggggaagtaaggaattcatggtctctggtgagcgatttgaagcaacagctggtgcgttggattcgtgattacatggcgcaacagacccggccatcaatttataggattgttaagcgatggctgatgaatttaggcgagacgcgcggcggccggaggtgaaaggagctctatgcttggaacaggtggctttcaccgtggcagtcactccggtgatcaccggaaatgcaccccatggttcaccatgatgaggactagcgcttaagcacgtggcgcgcaacggtgacagatcgacggcggtgaaggttatccgatcgaccgatgagctggggggggggtacggcggctagtcggattggtgtccataacccaacggcggtgatgatctttttaccccgcgacgttatccagactaaaatgggcacgaatcacctcatcggcgcgaatctacgcgcgaggtcgccggaggcgaggtgagcggttgatctgatcttcatc

SEQ ID NO: 26895 - DNA, 313 bp, Zea Mays
atcccgaaccccacacccgtgcacccttgtcctcgcgcacagtcgcagctgggagcttgtgatgcgctctgctcgtcacacacctcctattccagccatgtatgtcgaccccatgtcatcccctttctcgccaagttcagcctcaaccgccattgccaggtccgagtttgcaactcatgtctgctgtcgtcttcctcggccgggagcagtgccttcgcctctgagccccacaacaatgaacgcctgtttccctattgtgcagacccatgctcgccactcctccatcgctcagggcgatcttgctcaagttacg

SEQ ID NO: 26896 - DNA, 350 bp, Zea Mays
cgatcactacctacaattaaccaacgcaacacgatatcacatgtgcaagcatttatcgcattcgctctaatttttcattagttcttttattattataatagttaagtacacataagttttctatgacttatatatttggacagacttagacagaaagggatattcatttaatcggggttttacaattattcacaatattctcatgcaagcacacaccaaagagaatacacatgaggagatagtttaatcgtcattacatgttatactactttaatgacgttggttacttagtagtattagcagaaagccaaggacaggacattattcattttgtttccctaatatatcac

SEQ ID NO: 26897 - DNA, 585 bp, Zea Mays
aggacgaatatttctactccaatcttttgtggcttgcgatactggcgccaaattgctcgtagtaaggggttacaagcagtcgagaaaggtaattgctcccaagtctctaatgtgtgtgtgtgtgtgtgtgagcgtgcatatggtggtcaagattgagtcagagccctcttaagtccaagtatttcaagactctagggtcactcactcgttatcgtgtgagttatctctaaaagtcctctccagctgaggtcgacccttccttttattgctcaaggaaggagcctcttacaaggaccttccccgtgggggagtatgtagaaaggtaaaagggtcttctgttggtgagggtcctgcaatgtgctggtactatgtttcatacttgcctacgaactttggttgaggtgcttctgcattgcttacatggatacaatgctccgtacccttaaaggtacttgaccttgactggtagcatagtgtcatctgtaatggtgacataagctcctcggatgggcctacgccatggaagtttcattcgtaccatccaattccgttgaccctcataccccgtagtccgcttgcaaggtc

SEQ ID NO: 26898 - DNA, 342 bp, Zea Mays
gctgtacaagaaggggatcagtctgcccatgctgaagtgcataactgaaatcgaaggcatacaaatcctctgcgaactccacagcggaacttgcggctcccactcaggacccagggccctcgctgccaaggtgattcatcaaggattttactggccctcaataatttgtaccaccaatcgagtcacgaggtcatgcgaagcatgccaaaagttctcccctcgctaaggcagctcttcgcaattcaccaagctcatcgcccatacatggccacttcaacgctaggggctggacatcataggaccactgcctacggctcaagggaacctcaaattcaccttcgt

SEQ ID NO: 26899 - DNA, 489 bp, Zea Mays
cgcaaggaacaattcccggacctcaggacggatgaccaaggagtcctttggttcaaacactgtctgtgtgaccaaaaggggaggcctgagaagccctactcaaggaagctcacgactcggcctactccatccaccccggaactaccaagatgtacctgtatctcaagaccagatactggtggaaggggatgaagaaagaaatagctcagtatgtggcccgatgtgacatctgccaacgaacaaaagccgaacaccaaaaacctgctggcctattacaacccctcccgatacctgaatggaagtgggaagaaataggcatggatttcgtaaccggactaccccggacgcaaaaagggaatgattccatctgggtaataatagaccgcctcaccaaggtagcccatttcattccagtgaaaactacctttggaggagccacccttgcccggatttacctcaaagagatagtcagactccacggcatcccaa

SEQ ID NO: 26900 - DNA, 364 bp, Zea Mays
agggttgtatggctccagtgatggcgaaaggccggctgtaataaagaacataatggtgagtttagaagctagaaacaaacaacaagacaaagctttaaaaggatacctataatcattgcgcattcagcagcttcttcagcttaatttgcctcttctcgggcgtcatgagattctttttcactctcttttatggcttcatcggccatctcacggccgcccttcatccaaacatcagaatagaacttcccgcctatcaaagaagcatcaaccaaaagttccttcgtgtcgtctactgagaagatggcttctgcctgggttgtagccttaacatgttcctagccagttttctccaatttgctgcaac

SEQ ID NO: 26901 - DNA, 453 bp, Zea Mays
atggctgacgtggacagcgtggtggaggccgtttcccacctgctttgtataataggaaatgcccttatggaacggaaaagctatgcgatatgaatcttcaatgcgctagattccatgtggctgcatatccaataattttatatgttgtggcttcatgattaatgacatataaatgactcctttatgttatacatgacatgcagtatttgcagcagatagaaactgaagagcttcggatgcaatagatatcgaaccagcatgaacaattaaatctgactaaatagtcctacgatatttatagcagatagaacctgatgagcttcgaatttaatggatgtcgaaccaacattaacaaatagatcaaaatagtactcattgcatacacatgaagataatcgttgaaaacgagttagcaatatttaccaaaacgcatgttctaagaattgacgcatg

SEQ ID NO: 26902 - DNA, 295 bp, Zea Mays
ggcctatacgaagggctgcctggtgaaggacatcgatgacacggccatgggtttccgcctcctacgactgcacggctacgaccatgtctctccttgtaagtgctactactcaaacttgtgtgcagatagagcatcatccgtcatctcatggaactgaaaaatgaagccccctatatgtcttaatatgctgaagcgtgtgttttgatatgaacaatgtatatgaaggtgttttcaagcggttcgagaatggcgacgggcagttcgtgtgctacgcaaggcaatcgagccagtcggt

SEQ ID NO: 26903 - DNA, 478 bp, Zea Mays
cgaggtaacctaatactcgctcccctccccaggatcgacgccatgatcatcgacaagaggatacatgcggggtctctacgctcaccccttgcctccgagccatccaatggcctcccaatttcaaagtctccaacgtcaacatatatgaacccaagaaggacctagggggttggttggccatctacacaactgccgctcgggctactgcagcaaagaaggacgtcatgacagcatacttgcccatcattctagggcaggacacactacaatggctccggcatctacctcgacactgcatcgacgattggggagattttagtcaccggtttatcgcaaacttctagtccctctccgaataacggcacatccataggatctcaaatccattaggcgacagaatgatgaaactcttcattcgttcctcaaaaggtttcaaacaatgaggaaccgtatccctgaggtcgctgaggtggctatg

SEQ ID NO: 26904 - DNA, 358 bp, Zea Mays
caagggagataatgcttcgaaggacgaaggtctctaatcgttaacaattgtgttgctttgttcttggtatttagcatccgagaacaaggaccaacattggcgcccacctctgataaactcatttgaccaccttcggcaagcattaaccttcgtcatgctgccgaagaagacagcagggccaggggcagcactgcagccactggacgttaatcaggagatgctacgcgaagctaggagccagaagaggaaggctaccagcccaacaccttaggaggaggaactagatcaagaaatcagggacctcgaagctatccatcaataggttcaaaagaagagagagaaaatgcttcgactcgcc

SEQ ID NO: 26905 - DNA, 343 bp, Zea Mays
catgaaggcatcaaatattggttagtgagcccacagtttccttatttgctttcattactcagcttattcttagtcatgcactcttcttctgctgctttatcagatttggctcagtggtgctctgacattgaagagaagtattctcagagacaggccgacttaatccagacttctgcttttctggacagtgctcattccctaaactcctctctgaatgcacaactcaattccgagaagatggcacacgaggtaaacttccttggctgcttctgctttgctctccttgcttcaatgcttagtgctgttcttgcttgtaggaagaaaaacaaacaattgcttcccg

SEQ ID NO: 26906 - DNA, 489 bp, Zea Mays
gccgtggactgactggagcagtgccggattcaatgtaaggacttgctccccatgttttcccccttcccaattccatttcgcgcttagtttgcctagcaatcgtgcaccgtaggatgaggtgagaactccggccatggcgcagccggctgtgcttgggcgccgccgcacgtggccgatgaagtgggaagatgtcgtgcgccgtccgatctgaatcgtgaggatgagattggatctagtagtgggcgggtctctggccgttagattaggatcgtgtggatcagggtgcataccagtagggtgatgtggccttctgatctgggccgtaaatcttagagcgggcggttgagttcgcataccggttcggggatgatcgatctgatccggggcgtccagatctaatcctgcggccgaaatcatccataccccttcgccttggcatttatgctaaagagaccttggcaaacacctgaatcaacccatcgtcccccg

SEQ ID NO: 26907 - DNA, 318 bp, Zea Mays
ggcgaaaatatccagtgtggggtgaatctggttgctggcggaaccggccgtcgtgtcccaccacagtcaatcgcgttggcatcaccggagttcaccgttatccgaccaggctacgtgcctcaaagccttaccacgtcgcagtagaccgccttaggtagcttgttcatcgcctgagacagtgccctggtaaaagccacgatagtgcttgctccagtaatttctcctctctccggtcgccagcgcgccttctcaaaattagacgccaccgccgtaggactctataaattgctacccccgtgagttccgctaggtaattac

SEQ ID NO: 26908 - DNA, 416 bp, Zea Mays
acctacatgggttacgattcctgaagatttgttgatacgcacggatggtgatgccgctgcgtccctcatatccgaggtctacccaaatttgttagagagatatatggaccctacatacttagctacacgtgccattgtatgtcctaataaccttacaactgataaaataaatgactacattgtctcattgctccttggacatggtgtacaatgccttagttgcgacacaatctcaaagtcatctaaacgcatacctgattttgacatgctatatcctactaaattcctaaactctattaatgcggcaaatttcccctgccacaaactcgtgctaaaaagaggcgtaacagtcatgctgctacgtaacttgaactagaccgcaggactttgtaatggaacaaggatgcttgtaactg

SEQ ID NO: 26909 - DNA, 316 bp, Zea Mays
acttatattatgtgtaggttaaccttactagtttggatatttttcttagttgagttttggatgaagtatagtgacattggttaagcaagtattgtgttgttgttgtgatgtcagtgctctttgtggagttttggcatttctttgatgaactgtgccgcgcagaatgttattggcttctatcgactttattgctccattagttctgtagaccttctcccttttgtggggtgcaaagaatgtgagattacatgattatcttttcatgatggcaagaacaaggtttaggaagattaggagttttgtttcaatagaacca

SEQ ID NO: 26910 - DNA, 442 bp, Zea Mays
gctgcgcaggttccgacgtttgggcctgcgcaagcaaccgctgctgactatactgattttgtggcggcctcaaccatagtgcctgccaatgataatttgtctgtttatatgtctgatgattttgagtccgatggtgaatctgggagtttgtttccttagacggaggagtcctcggatgaaggcttggattattttgttgcgttggatgtggctgcggcggaggcttcatcgtgtatggagggtgccggggatcttcctagtgcgggtggagggcgtatgcggtgaagggtggtggggaaacatagtgtgggtgagttttcgtggagtggcaggcgccgtcgtattgggatggagcgtgaccgtctccgtgtaaaccgggttgataaacgagaattgttgtcctcgtcggctggggcgagcataggcgagggggatcttcggg

SEQ ID NO: 26911 - DNA, 569 bp, Zea Mays
aaagggcacacgtctcagggggaggtctggagctgcgtgactgcttagcccggtcccgtaccgtaagcctacgcactccaccaccatgcgacaagtaccctagtaattagaagccatgacccagggggtccagacacacgggtcggccccccagtccagatcctacaggtcatattgcgtaagtcaaaggatgaaggataccagttaatgggtccgatgggtgcactactgaaactccctagctaaggctgtgtgcaggtccgggtcccagtcgaaataccctcctgggggccaggtcaccaactccttcttaagtatactggcattcagcctcgacaagtcgagaccgcatcccagaggggccaagtaccagggaggaagttgacaacaacacacatagcaaagggaaagtagcatgcagataagttgtaatgttgcttgacaagtaatacttaaatgtatcctacaaaaccaaaatatgataagccgcttccagcggaacccttgctttctctccgcaggtccgactactcatcatcagtaggatcccactggaagcgcttggccac

SEQ ID NO: 26912 - DNA, 566 bp, Zea Mays
ctcaggctagcgaatctgcaggatctgtctccccaacaagttgatctctcctttgaaacctggtggaggaatagttgttctagagttgcagttcacctcaagaattgtctcaactccatggtcatcttgggcgcttggatcattctgaagcataggaataagtgtgtgtttgataagtgtcgtcctattgttatttctgctcttatatagtggttgaggaggagcttctgtactggtctatggccgacgctaaagctctctcctctctttaggtcagtggttaggcttttagtgtgttggtcgtggtagtgtttgattgtatcaggtgacaattgcgtgtgtcctctttgtaatagggtctttaccctcccccttttcttaatataatgatatgcatctctcctacgtattcgagaaaaaaagagaaaaaacaatgcaaaatatctaaataaggaaaatgtttggcatttcgtctataactgctcggtgcctttagttgacctcagtcataacatatcttcccgtctcttcatagaactcgtccttgagtttgacgtcatgataga

SEQ ID NO: 26913 - DNA, 329 bp, Zea Mays
gagaggtagaagatgattggccgcctgagtaagcagccaccgataaccctccgtgtctggggttcgcggaaggccgtcagctatctgcgccaacactcctccgacttcactcggcgtgttcaatccccgggcgaagtcagagtacaggtttcgagcgaggagatgattctctcgccggagtctagcgtcttgctcagctagttcccattctcgttcttgagcctgtcagtgatcgcgatggcgggagttgcgtctttctcggtgtactcgttcatcaggagtttctcccacttctgaagcttcgtcccgagatacgggttgcgtcgggt

SEQ ID NO: 26914 - DNA, 337 bp, Zea Mays
cttgcttgggggcgtgggggttgttgatgttttgttgttgctggtgtggaggtgggggtgggggaggtacgatttgtacttcctggtggtgttggtatgtgtggtgcggtggatgcagggcgggagcgtggatgtatggtggagggtgttgctgataagtgtgcgcgacgactctagggttgtcggcctgttgcgcccgtgccatcctgtctctggtggccttcgtctctgggcagtctttggtttggtgggcgcagtcttcgccgtggaaaagacagtagaatcggcgcggcggctgcgcgtgtccccgacccctaccacgagttccatttccgcg

SEQ ID NO: 26915 - DNA, 445 bp, Zea Mays
accatgtacctgaggtgcctcacgggtgatcgaccacgacaatggctgtagtggctctcgtgggcagaatacctcttcaacaccacctaccagagctccctccgtgacacgccattccggatcgtctacgtctacggacgcgatcctccatccatgcgatcctatgagcgggggacacacgtgttgctgctgtggccagaaccatggaggaacgcgaggagttcctcgctgatgtgtgccatcgtctggagcaggcccacgtcgtccagaaaaagtattatgaccagggacaccgcgtcgtcacatatcaggtgggcaagtgggtgctgctccgcctccgccaccggtcccctgcctccctcaacaccgacaccaccagcaagctaaagcctaggttctatgggccgtacagagtgctggagatcatcaacgaggtcgctgtccg

SEQ ID NO: 26916 - DNA, 483 bp, Zea Mays
cggggcaggaggacaggtggccgccaccagtatctgacgatcgttgagcttttgttgtctcttgctttcttgcgacccgtgtccgccgaagatgacgttgacttctctgtcaacgcgcaggaaggctccacctcctccctcctcctgctgctagggttgtcgaggttctcctggtcctcctcgcggcggtggaggaggtagaggttggaagggtcggtcgttccccacggaatgcttgaagtctctgcagttccggagggtgtggcgcatgtccttgtggtacgggcactgggcgtcgaggatgtcgtccagcgtgcgctcgcctccgtgaggtcctcctcgagcacgagaggcgggcggtccggcggcgtggacctcttcacgaggcctcttctcccagtgtttgtcgggttgctggttcgtgtcgcgtcgcggtgctgtcggtgcaggctttgctcctccgatgaggtcttgagctcgttc

SEQ ID NO: 26917 - DNA, 307 bp, Zea Mays
acctagccaaagaaatattccccatgtatagggatgaatccagcgacggggtgagcggggctcgagccccccctaccgcttccgatcccatggagtcccacaagagcctaccgtaatttaaaatatacataatataacgtataaggggcttctatactgcatcagtttagttcagtccctcctaaaccttttctggctccgtacctgcccatgtactgttttgtcatggttcctggcccctgctttgtcaacattgtccggtgactgaatccgacaattggagcgccgaccgaagtggaagtagccg

SEQ ID NO: 26918 - DNA, 537 bp, Zea Mays
gagatgtcacaaggatgggcaccaagcctcccgttgcccctcctataaagagagcagtttgaagattgttgaacagcaaagcaaaacttcatctccaatctctgaaccaccgtacaaatcctacctccaagttgtcaagggtggtcaccaggacatggccacataccccggcgacccgcgcgcacggccagggcgtgtggactgtgcggtgtcggcaaatggagagattaagcgtgagagggacaacctggttggtaaatcggtggtgtgttctcatgatggcaacaaccatgcctcagagcccaggcatgtcattgaagcactatccgagcaactagggatcagaggaaacaagatgaaggttttgaagcatcacccggagcagtacctcatcatctttgaggagcagcaagatcagagaagggtgctgcaccaaagtcgcctccatcaccgtggctgggttttctgctttgctaagtggaatgaacaacgctacagctccgtggtgcgctgggacttccatgttcggctgcggct

SEQ ID NO: 26919 - DNA, 357 bp, Zea Mays
tagtctcaaagactgcactcatcagtcatcactacgagaaaattggccaacccaacggactgagaaaactcgattcgaagttcactgaatatacaaggaagaagaaaagaaacttcaaactgcttggaatcacaattgatctcatgtgcattaatcgctgcaaaggaaatacaacactaacatgtaggaaacccctgcaatttctggataaaaccacaggttaacataacgctaagtgcctaagtcgctaacataaaacatgatatactcctttaacctcttttccggaaggtagatgagacacatatacaagtttcaatgggaatattcaaacaggtaaaagaagaaacgaaaaga

SEQ ID NO: 26920 - DNA, 601 bp, Zea Mays
cgcaggggctctggcgcaagaaaccagagacacagtaaatagcgcccccaggacggcgggttggtttcctgaaaactgaggggcctaaatgcaaaacgcgcgcagcgaaggggtatcgggtgttatgagccattggattagaacccaagggctaggattagatctcccataaaatgaatcggtatgcaactagggccattggatctaacttcaacagtctggattttatttgaccgagatcggcacgaatccatccgatctcacgtcaacggctgggattcaaacatgaaggggggtagctaccaattaatcagagccatccgtttacgatcctatggccaacgttcctttccctgcttttccccctcccagcttggccagacggcggcgccgcccaccaaatcacggggccatcgccggagtagtgcccgcactaatcccgccgccctccagcaattcacttgcgctacactgacataagaccatgggaaacacgatggaggtgaagaataccgggaatcgggcgcgcagacgggttgttctcgcgttggggcggcttagcggtgttgaagacactccgacgagcaattgccggagtcat

SEQ ID NO: 26921 - DNA, 1011 bp, Zea Mays
gagataagcatgctcaaactttggatgtcaggctggattcattctgaaattcagcttttaagtataacagggtcaactttgagtttgaattcaaccttgatccagtgctcaaataagtttaaaccctatagtcgagttgtagctggtatgtagcactacaactttgatgcagagacttagacatgttgccacagggaattgagagaaattggagctccaaagtactctgtcagctgctctgaattggtgttcaccatggtacagtgctctgttgaagatcagaccgccagcgccaaaagatctcaccgccggtggccgtcgtcgttgatcgattgcgtgctgcgactcgtgcgccgtggccttggataagcacaaaccagtaaatatcccagcgtctggtccactcgagctcggtctcggctaagcatgccgtactttcctcccagccgtcggtcgctcagataactctcaccaccgtcgtgctgtcaccgtcgcgcaccacgtgccttagcgctagctctcgttgcggtgaatcatgcggcgcatgtccggtgatcaccggagttactgccacgccctaggacacgtaaccacgcgcgccaggcttcttcttcacctctggccgccagctcgccgtgggcaaattgagagccaccgctctcggagtctttaaattgagcccaccgttagctccgcaacctcatcacgtaccccatcgtccagtatcacccccagtcctgccaccgtgagctccaattccaagttttccccaaacctgttcgaatccaccgtgaaggtccgttcaccgcggccagcacaagccaggtccgatactgtcatcctcagtcttgttctaacattcccttgtgcccttgatgctctccaaaccatccaattgaactagaccgccatgaatcgacgggaacgcactcatcggtccgccttgtccacggtcgccgtggctagaccaaaccttgtgtccattaacgaaattatgttgggggaaatggt

SEQ ID NO: 26922 - DNA, 416 bp, Zea Mays
ggagaccatcaccgaatctagtgaaggtgaactggcccggctgaagtacacattcagatatggggataaattcgatgaaccaaacgatgactggctaaaatgcaacgaagttacaagtgatgaactgcttggatcatattctaaggcagaagataatgcactatccacagccttcggaggccggggaaaaaagagattgaacagagtttttgatgccattggctttgtttaccccgactaccgctatccgctgcgaggacagggaaagaagagaaaaactgccactcctgccactccagatgagcctgtgccaaagggcaaaaagttaaaggttcttacccaccggccgcgctatattgaaccagccgtggtgactgagtttggcggagaggcttcttcagctgctgaaccaagag

SEQ ID NO: 26923 - DNA, 335 bp, Zea Mays
cagttcttagctaccgcacgaagtggccaactggttggaagagtgagtggttctatatgaaggctgacgagaaaaagagggagaagctgatgaccatggttatgagtccactgactttgagcttcggaatgacaaggcctttgtgccatatgcagcttggctctccatgccaggtagctgaagttgaatttagagttgtggtgccggaaatcagcactagagatctagtgcaagattttttggcaaatagagtgttcccgacctctagtggctgggggatgcccaagaagaaggatgtaagtaagaagcatgaacttattcggctcccctaccgg

SEQ ID NO: 26924 - DNA, 331 bp, Zea Mays
aagatctatagctggttttcaacagtctatggcaatatcgatggaagcttaatcccgaaatgtcttcggggtaccagcaagaaagttactcgggtttattgtcagccaccggggaattgaagctaatccagataagatcgaagctatcatgaaaatggaggcaccgcgatcacaaaagaaagttcaaagacttaccggatgtatggcagccctgagcagattcatatccaggctaggagaaaaaggcttaccattttataagctactcaagaaggtggataagtttcagtggacttcagaagcacaggaagccctagacgcattaaaaaag

SEQ ID NO: 26925 - DNA, 411 bp, Zea Mays
tgagaagatgcccgctatgaccttgctaaggaggtttgcttggtggcacgacatcgtcaccaccaccgatgcggctagcgagtctagctatagagtattggagtctcgaccgcgaactctcaccaatggttggcaacatgcacattttctccacgtgcatgtggataaaaactctatatggtgcggattagatgagagtttatatctgcgggcatggtgcgggtttgattctcaatctgaaaggtaaaattcacatcgttcagctggtgtgtcttcgtatgcatgattctcgtgaacctcacttcgcgttgatcaaacttatactttggtacatcaacgtactctacctcacggtctccatcttcatgcctcgttaacgaacaccttgacaatctatttgtgaagctgccc

SEQ ID NO: 26926 - DNA, 357 bp, Zea Mays
tcaactgatctggcatcatccacgcctcggattaatcgtggcattcttcatccattctgtcattcttcagctcacccgtttagctacagtaccttccactgtttacaagtcgtccgattaatcgttcaagtcggtttaaaccaatcacaattagtcgtccaagtcggtcagccgccagaatggtagcttctcaatatccactcccgttctatattccaaattgcaattgaaaggaaaacaacacaaaccatgctgagattaaaacagcgtccaccatccattaacctattctctcagagcgaaactacaaaatgacagttttcccccaacagcaaatggagtttacagacatcttcc

SEQ ID NO: 26927 - DNA, 376 bp, Zea Mays
ttctaggtttagatggacagttactgctatatggtgtttcttgagacttggtagtgccaacatccttcccttttcctttgcctccaccaccaaattcttcaattaatcaacaaattccccaatactgttgttattgatgtgccaaattccccaatacttatcgtatttctcttccattctctttcccatctctcctgcgaagtatcttcactatccatccaagatttaatcaacaaatggatttcaccaatctcatgaaagagcgtattacaagtgacatggagagtagatgagacacaaacagtaagattgtggaaatgctctagaagttcagccatctactttacattctcctaatcatagtcattgggatgac

SEQ ID NO: 26928 - DNA, 540 bp, Zea Mays
gcgcgtccccaaccggtatgcatcaccagccgctggattgggatccgatggtccagagtttatgaatcctgatctagctaccaccgttagattcaagatcaatggttcagaattatccccgaaccggtacaaaccaaaactaatcgcatccgatgaagcccgatccaacggccacccaacgtcgtccacctcccactcggtgaccacatagaggacccaggtctcccctccgcggcggcgggtgccagcgaattgcatgtagccatgcacctacccccttgcttgaacgggtgaagagaaatgaacgcgaagtccagtgttaacccatggcattagcgcatgtaatcgaaccacgacgagtacgggttaccgcgccctgtggcccaatcggcggtgcccaggttggcacacgacgccggccaacgtctaccccaattgctaaccccgaggaacatagcacacaaaggataacagggaaaacgcaggccgtagttctcaccctgatcacacgccggagttgaagcttccagccctgcggcg

SEQ ID NO: 26929 - DNA, 349 bp, Zea Mays
cccaagagcaaggaacagtggtcagcatcctgagatgctgcactctggataatcacattggggaaagctatttcccaatctactgaatgaaacactctgtccagcttaaccaggacagggttatcttgttgattagaccatgtgtattttgcgaccatacagcgggatttctttaagaactaaatcattaatcactcttctaccctgttcatgttggagttattcttgtcagatgccttgtaaatgagattgaaatcttcagccaacatccatggcccatcacagatagctctcacatatctgatttcctgaaggaaatgaatcttttaattgtttccttgtggaccat

SEQ ID NO: 26930 - DNA, 358 bp, Zea Mays
ataaaaaaggaataacaatgaattaattatgaatttaataagattttggaattatttctatactagaaaccattttctatatgaatttacttgatttatttaatccatgtactgtgggtcctatttaccagaagctcagggtctcttctataagaatgaggacttgtattaaactactctatacacagtgtgggtcgcgggttatttacagcagcgaagggatacgagcagaatctggttcagcgtcccctcatcgagggccaggattagatctgacccatccccacaccaatacacttcgtacgccctcggatcctgaatctgtggccagcaacacaccacgcccaccctactctca

SEQ ID NO: 26931 - DNA, 383 bp, Zea Mays
agcggacacatcggcgtgttgccatgataagtcgataagaccagccctcccatcgcaagatggtgacgatgaggcgacaacttgaagggggtagcgagggcaggcagtggcaagcaacaaccattgccgcattgtgacggcgtggtgggaccccaataagatagcgagggtaggtggtgccatggtgccaaggcatgatcctactgacagcctgcccgcacatcggtgcgggctaggaggcaaagtggtggcgttgtgtgggatccctgcgacgcgacaagctgacaaggagtcaaggtggaacatgcagctggcggactaggtcgcccactaaccaaccagtcaataaccgaaggagcgagtgagccacgagtggattagct

SEQ ID NO: 26932 - DNA, 367 bp, Zea Mays
aaaagaaatagacaaaacattttcagatggttcccataaccgaacagtcaaatgtattatttgatttaaatgctgattgcacataatgatttaagtcaagagatgattggaaaaaagacatgatttcctctgaatttctgtatgtccttgtgacaatgttacatcaaaccagctaaatcagttaaaaccatcaagaaccttctcttgtaaattgtaactgaaattaagtactttgctaatttgcagaaccagctactttcagtagtactgtttggggtttcgaatcctggctacttcatcagcagaagtcattaaggaccagccacataagaactttgttaaggtagtgaatagtgacagatcgagc

SEQ ID NO: 26933 - DNA, 309 bp, Zea Mays
tggagttcgagccaatccataccaataatcagatcataagtttgaagaggcagcaccctcaatgtagaatggaaatcataatctcccaatgaccaaagagctcccaccaactcttgattacagcgaagctatgcaccatcagctatttgaactgacaactgacttgctaccggcgacaacccttggaggttgacagctacttgtgaactgacaaaagaatgcgaactccccgagtctatcaacaccaacagttcaaggccctgaatatgccccaccatctgaatggtcttaggcgctgtattacccgtg

SEQ ID NO: 26934 - DNA, 465 bp, Zea Mays
cacttccaatcttaatgataaacgtcactgcggacgacgttcggttcagtgctggtttatctgtaataatatttgtcctcggttggattgctgacgccggtgcacatcatgtgttgcacataatgtactggaagctgataatgatgcgggttattatctgggcatgacaggcttaagttaggacatttaactgcaggatgccatgataaatgtgacaccacgttatttatggtgacgtggaagaaagagaaatggagagagaaggaaagcggattgcccactaagtagccagctgaaagcgggctattcacggactctaatacaatttgtgagagaaagagatggacccatttttaaatgtacaacttatatcattagagagttattatatgagtatgtttttagttgtctatatatgacataacattataaagctcactgttggctatattattaaacttattc

SEQ ID NO: 26935 - DNA, 392 bp, Zea Mays
gaacaagagcaatgcaacaggcgtccccatgaacatgacggtgacagtgagtgagtaactctggcgatcgatatttcactacaattgagctgtcatgcatgcatactataaatcagaacagaactattaatttgctgctgctactgcagatgccttgggtcacgacttcatagcatagaacctgacaatcagaaacacagcagggccggaaggcaggtaggctgtggcgctaaggtcaaattcgaacaagtcagtcatctacaggagcagcattgaaggtcatgaggacaccttgtacgtggagaacgggatctagttctacctgcagacctcgatctggggcatcgtggactttgtatttggcaatgcacagccaagttccagagctgccc

SEQ ID NO: 26936 - DNA, 710 bp, Zea Mays
aacaccagagggaaagcgcgcgcccgcggggaagactttgcagaagagccctcagggtttaggctaattggaattgggttcggtcactgttgcactgagtcgctgactgtttgcagaaaagaccccggtttctatttcttcgcaggggaaggtccccgacgacggtgaacgcggtcgagctccggtgagctagcagaccggccaaacggagcaacgactggcgttctcgagcggcagacaccaaagcagacctaccccaagcatttcccctaagttaattgcacagttggtgagctatcaagctctgtccacgtgaaccgagggggtggcggatagatgagtgcgttcccggtgatccctggtggtccagttcaattaaaggggtcgaggggcatcaccagcatgcaaagatgctagaacaagaacagggagggtatgagcagacctgtggagggctggccacgacgagcttggttctacggtggcggaaacttgatttgggggaaacaagaaatttgggcacactggtgatcaattgctagcaattcttggtggctgggtagttgatgaccttgcggaactggtggagggctcaatttatagggagagtgagcggtgatgatcaattcggtcgagccgtgctggctgccggagatgaagaagaaccttggcgcagtgaattcgtgtccaccgtcgtggcaacctccccg

SEQ ID NO: 26937 - DNA, 403 bp, Zea Mays
cgcgtgctggccaggtgtgggctgtatacaaggactagagccgcgcatggagcttcaaagattacagtagatgcgagtatcttctggtcgaggtcatggaggtttctgatggtgatataatagtgtcgtgccttactaaagcgtagggctttagcatggtgttcatgccagagcagaacggtgaatccaggagaatagcaaggagtgacttgactatgttctctcatcaggttccttcctaccgcttgtcagacgaaactagcgatctttgtggttacttggagcttgatcctgcgtctttactggaagttttattggtcaggaagaccaagtgaaacattgttgagctgatagagaggggttttggcactgtgaaaactgaaggtatggttttgaacagaga

SEQ ID NO: 26938 - DNA, 302 bp, Zea Mays
atatttttatgtatgcttatctttcataccccaatgactgttgaagacatttcagttaacatatccttgaccacccttgtttcctaataatccatgagcggtcattttattttgcacacccgtggtaatctcgttgattccttataacttccctcggtaatgaattcttacttcaaccattctattgaaacatcacctatcttaccttgattgttttctccacttcgccatttcgcgagtcttgccttaactctatcctttgttatgcctttcgttattatcaccttcgcctttgacacctc

SEQ ID NO: 26939 - DNA, 278 bp, Zea Mays
tggtcgtcgagctccaaacgggttatctaagtgagattcaaccaccttttggtggggttcggtttcagtgagtggtcccactagggggctcaacccgctaggggcttctcatttagtcctttcttatccgatcccgttccggccctttggtcgggctgcccgaccaaagaggggcctcatggccaccccgttagctgggtttccacaggagaatgtgaggttcgaccttagacgtagatgcaagcaaatgacctatgggtcgatcacctagcttgttg

SEQ ID NO: 26940 - DNA, 436 bp, Zea Mays
cggtgcttggtataagctctatggcaaattcaaccttcctttcaggtggcataccttgtaactccttgggaaacacatctgggaattctgatactacattgatagcttctgatggtttaatctcctcaatatgggcggcgacttggtgatagcttcccttccttggtcctgacaagaccaactccactaacacttcttctcctgatagggacactaacttcaccgttctcttgtcacagctaagactggcttggtacttggttagccagttcatccctaggatgacatctatagtcgcatcctggttacccataactattagatcagcgtggaactctatcccccttatttgaactcttgcactagggcaaaatctatctgtttgggttctaggcgaggagtatagaagttgcttgggagttaaagtgcctaattt

SEQ ID NO: 26941 - DNA, 354 bp, Zea Mays
cagcagaggcgtctgtctgcctcccactcatggcctacgagcccctcgaggtgaagcacactcataacctacgaacccctcagaatgtggcgcatttatgcctcacgcgcccccagcctttggcgcactcatggcctatcgggtctaggcctaagttcatagactgcctgtagggcacaacaaggcaaacgacatcaaggcccatgatacgaatgccaggggtcactgtagcacgaatgatgacgctcgagccccactctgcctatgacgtccgctataaaaaaatatgagacaaccagacaacctcgaggctcatggacgcatgtggcttcaccagggtagaacgctcgattt

SEQ ID NO: 26942 - DNA, 292 bp, Zea Mays
aggggggtgaatattccggccgccacgcggtcactgatctttccggccatgcttggtcaccggcgccgctctcctctattcgtccacgccatcaccgatttgactgctttacggtcgcggttgaacgtggcaagctctaagagaagtaccgcgctcggtgtcgtcgttgatcgccagcagggtccggtgatggttatcaccgtgaccgtcgcaatactcatggagcctataaatccaccctgctctcacttcgtttgtctcaaatcaaccaagcccagctcttcattcctca

SEQ ID NO: 26943 - DNA, 391 bp, Zea Mays
aaactgttgacgcaattcagccacatcctcccaagtagctaattctgccggcatgtgagtccatttcaccaaaatttgagcacaagcagtagtacccctcgctactgtacgatgctgcaaaatcatttcaggaacattgaaagcaaaatcaccagtgggaagagtaggtgaagctttcagaccgacacccaacgccttcttcagttgcgaaacatgaaataccggatggaccttggacgtatctggcaacaacaacttgtaggccactgctcccacacgctgcaccacacgaaacggcccaaaaaacttgaaagctagcttctgatgcgcacgtggagccaccgaagactgcacatacggctgcagtttcaggaaaacccaatctcccaca

SEQ ID NO: 26944 - DNA, 558 bp, Zea Mays
tttcgatctggatctgagaatttgggttccataccgcgattgcgtgaatgaaagggcctcctgcggccgcgggtgcattggtctacctgcacggagaaatttatgctgtactacttcatgcacctttagtggatgcgtttgctctccgtctagattatgtttttgctttgtagggcgtgatgcgaatgctctctggtgcagcgacataggttttgtaggggcggttaactggaattatgataacctaaatcattatcgcattatgagctctgtttatattttacggtgaactcttctttgcatgaacattgtgctgtgcatcatttgttaaacaacttccatatgctgtggttatgtcaagaacataaaagttacttcatattcgttatttttgcattggaatgcccattatacatggttaagtaagtgttaataagacaaatctacccataacatttttatacctccaaactgaatattttgagaatatgggttgactctgatcataatttagtcgatctgtcatatatgttgtagttggagggaatatgttgacaa

SEQ ID NO: 26945 - DNA, 303 bp, Zea Mays
gatttatgtagtgataacccttgtgacccgaggagtaactaaggaaaacacaacgagtagcgaggggcaagcttgtgagtagtggcggcggcgatattggcataacaagcacaaccaaagacacgcagatgatcataggaaggtgacttgccgaaaaggaccgcgtgagggatggaggcagaaatcgcgttgcttggaagacagttgaggaggtaggtggtagcgtggagactttcaacccagtagtgagcgggaatagaggattagaggcctgaaacagaagggagcgaatgacgttattaa

SEQ ID NO: 26946 - DNA, 339 bp, Zea Mays
cggtgttctgttgggattcggttgagggagcactgtgaggaccgcgcggcttctgtttcgcccgccgttaggaactgaaatcccgattggtacggggaggaaggataccaaatcagatcacggggaaagagggaaggtttgttatcggtgatgccattgccctattttcgcactgaaggaagtcgcggtagtgatttctgtgcatcatgggcgggcgacattcatcgcccaagcgcctatcgcgcgtgttcagagtacgccaccgttggtttggggaagaagcttctggcgggtgggacccaaccgtcagtggaactagaggagagaagcaggctgacc

SEQ ID NO: 26947 - DNA, 338 bp, Zea Mays
ccgagagaagcgcctgagcaacacaccgaggcctaggagatgtcaaatcgcctgcacggcggcggcggcccagcgcctatttctttggttttccgcctcgagttgatgttgggggctcggatagatggataagggagcgggagtggctgggttatataggggcggggcgatgcagtcggccgagaatctcggcaatttagttgaggagcccccggattccggtgatcactcacgatcgttatgagctcaccgagcagagcgtgcacggaaaggggaatcgccaggattccgcgtaggtcgttggggaggaagacaacgctgaccacgcgggtccaccc

SEQ ID NO: 26948 - DNA, 494 bp, Zea Mays
gggtgggttgacagctccaaggggtgaaatccgcagaaggttgtcagcacatgcagagccatgaactcaacagtatcctcggccttgaaaccaaaagactctgagtccaaggaacaccagcctggctgcaagggatgaggctccaaggtcatgctcaccctacagcaaggtacccggtgctcctcgaacagctgcaccgtgtactggggaggcgtagcgtaacccgctccctgcagaacttcccacaaaatacggggaaaaccctctcgtgcaagaccgtcggtgtgggaatgtacgttccctccgtccgtgggtacgtgagaagtcatctgtgtaagggtaagtttaagaaaaaaagaaaaagaattcaaaaaaaaaaaataaaaggaagctagtgcttggcttttctagggttaattggaaatcttcgcttatagctttcactccatgttatgaaggtttctttatttatgtaccttactgttgataattac

SEQ ID NO: 26949 - DNA, 640 bp, Zea Mays
ctagaacaggctctaattggattaatccggccctggatttgcctgcccacgataacggcgatcaccgagaccaaatccaggcgttcccgacgagtggatgccgtcaagctcagttagttgagtcaacaagaatcacaagtatgcgagggtgctaaaacacaaacacggagggtggggcggacctaggagcagctggccgcgatgaggtgctacacgacagcgcagtcaaccaatttgggggaaaccccgaattcagcggctgtagtggctaattgaaggtgggaatgggtgctctggctttgtgataacatggtgcagcagaccgggccatcaatttatacgggcttaaagtggtggccagtgaatttggtcttgcacggtggcggccggagaaagaggagatcactggtgcaagcgattggtggcatctactgtggcggctctccgacgatcaccagatatagataacccgagctattgcgatgtggttaagggcctgaggcatggtgcagtcgcggtgaatgacgtagactccagtgacggccgtaaagccatgtcgccggcgcaagtggtcgagggacagcgaggccacagtaacccaaacccatccgcgacgagatcttttcactgctgagcgaaa

SEQ ID NO: 26950 - DNA, 407 bp, Zea Mays
gccgaggataatgctttgtccgctgctttcgggggttggaagaagaaaagattgaacagggtatttgatgctattggcttcgtataccctgattatcgctacccgctgcaagggcaagggaagaagagaaagattgctgctttggtcattacagttgagccgaagggcaagaagataaaggttttgactcaccggccgcgttatattgaactggccatgatacctgaatttggcaaagggacctcttcagctgccgaagcaaaataaattgttccgattgtgcagagcaatgaagagccgactatagtgccgatgatgcctacagttgggccaaccaaagctaaagataataaggccgaagagccccagattgaagaaataatgaaaataccagaaattttgagccc

SEQ ID NO: 26951 - DNA, 278 bp, Zea Mays
tctttccaccaaacagttgctaataagtaggaatataaagaattcaaaacaataggtcaatttttaaactaaaaatgatgtttccctgatgtaaagggcattgtattcgcacgagaggatattagagtacaactagtggatgaagacgttatagggctagctaacgaccttttgtgataccaggtttcctataatcccctctattcaaggcatacctagatgttgtttatgtccacttaagaaaaacacatcaatatgccacatcgtttctcaaaata

SEQ ID NO: 26952 - DNA, 394 bp, Zea Mays
ggcgtacataaattaggttcttgatgagacttggtgagacaagaacgttattttgacgaagggagtcagacagaatggtggaaccagtggaggtaacgggaatggagttcctgttaccgacaataattgaagaaggaaagggatgatgtgaaggaaataaatgggagagagtaccagcatcagaggacatatgtgtggtggcgccggagtcaaagaaccactcgttttggcgtggtggttgaagtatcatggtgctgaagttggagaggagcgcctgctgatcccaggatagagtggtggtagtcggaaatcctagcggcggtggtgtagaccatggttgttgtggcgcccctggctagggaccttcaatgccagcgatcaaggattgagacag

SEQ ID NO: 26953 - DNA, 555 bp, Zea Mays
cccggagctatcatcatcaacccgagccaccattgtgtcatcgccaccactgagaggtccctgaggctccccctgatgtaaggaacctctactgccttctccattttccctcccttgctctctattgtgtgcgattcctcgctgaagatagttagcaccgccaccgagtcaccctcaccatgggtcgccaccctctggtgcccctaccttggctcagcccccaccattgggttccccacaccctccccaatcttcttaggccatcccagccgctctaggaccctcgaattgcccacacccctcgtcttcggcaagctcctcgctgcggacgtatgtggcaccacctctggtggctagaggaaagggccgaagttggccacccgatccccgtgttcaccccaaatccaatgatccgatatttaacctgagcctaaccctaaccgccccccagatctgacatcctagacaccgcacccgtgctagcactcacaaatctaccctgggctccacctgccagccgtccgagccctgctccgtgtcctcggccgaggcgag

SEQ ID NO: 26954 - DNA, 411 bp, Zea Mays
caacagtctgtagagaatgaatatcttctcttggtcgtcgtatatatgtcctcgcttgttgtgcccttgccccgtgggagtcataatgacagcagcccaagtggcgcgtggagtcaatggtctttgcctcgataacgtgcaagttattgtgcggcccatgtactatgaacgcaccgcctgccactggagtgggtaggtatatgtcttgtccgcagttaatgtagagacgctttacatagagtctgacgtcaggctttctcgatggcttacgtcacacgtcgtagaacaaatggcagcactgggcctcgccttgtgtggggagtagtgattgggaccgccattcctcgtgacaactccggaccaccaatgactagaggttcggatggtgtttgggggaggtcccgtctcctc

SEQ ID NO: 26955 - DNA, 318 bp, Zea Mays
atgaaacacggtgaggacgtgtggtgtccgtggctagagcggtaactcgatcaacgaatccaagccagagatccttttaccccttcattgatccacgtctcagcggcaccaatcgtggcgcgagctcgaatcacagtggatggacgtcggcggcgggcacacgaaactcaatcttgtttagttcattgtaccatggtgatgttcattcagcgcgcctaacagagcgatttgaggagttcctttctcaaatttttatgtgacaacttgtttatccgactacatcaaagttgttgtctatcatgccagcttcaattttgt

SEQ ID NO: 26956 - DNA, 449 bp, Zea Mays
gagctgcccatcgccacagaccgacgacgatatcgctgcaatcgaagccaacaccgcgcttcaaattggggaaaagttccctcccacgacacctagggcaagaagtagagtgggctcatcatcctgggccacatgggcttgtagcttgctcctccttaccttggcaatccttggcccaattgtctttcttggcataaattttgcacacatcgttgcctcgttggggttggcatggcccgcattcgtcccgatctatgaaccgttgttgctgtcagtgccgtgtcctcggccccatcgctggagtttgacctgccacggctagacctctagtcctgcttcttgtagtgctcaatgtactgctcctccgtgagcaacaacttgccaccgacggattacgccagtgcaggttcgttgtcatctgttgccttgagccttctagtcacctcgat

SEQ ID NO: 26957 - DNA, 324 bp, Zea Mays
gtcacttcaatggtttgatctagaacccaaagacacttcttcaattgagacacatggaacacattgtgcactgcagacaatgtttcgggtagttggagtcggtatgccactagcccacattgttcaagaatgggaaacagaccaatgtactggggtgcaagctttcctttcacatcgaaacgagatacacccttcattggtgaaactttcaggtaaacataatcttcaacttgaaagtacaagggttggcgtcgtttgtctgcataactcttttgtcgagcttgtgcttctttcaaattatgtataattcgttgaactttttct

SEQ ID NO: 26958 - DNA, 297 bp, Zea Mays
aaaatttcttcgtcgatcccgccaaagagtatggaccccggctggtaaccaaagaatatagcaaactctttaaactctatcttatcctcttcggaatgttcttggccacctaggtgccgaaggtcaaaatctttctcttgcgaagaggcatcttcaattctctttcctttaccaagcgttgcggccatgttttgctcggcaaccacatctgatatgagtttgtcaatttctgacattgtagttgccagttcttcagcttcggcttcggtagcatcttcagtatcggcagaaatcgct

SEQ ID NO: 26959 - DNA, 356 bp, Zea Mays
tgcggggaggaaggaacgtgctggtcgtccgttccgtttttaacggatgggattgattggctgggtgagtgtttcggttggagggtgatgaaccttggcccttgatctggttgcggacgatctagattgtgccgtagctactttaaatccgggctgtgggattcggatcgggcgggcactgtgtgagttcgtgttgggtcggatgcgatctaatcctcgccattggccgttgatcggacgactcaagacagtcggtaccccttcgtctagacgcattagcatagaagtccttatgattccttgaaaccaacccgcggtcctcggatcctgttgactgagtctgggaaatattctgg

SEQ ID NO: 26960 - DNA, 423 bp, Zea Mays
ctcttaatggtagtacgaaattgcgtggcaacgtaggagaaaaagtgagcaatagtggagaacgtgtcggatttgagacaaagaggaaatgtccacaggtggtgcgagcagtcatcgaggattgcaagataatacttaaaaccagacatactgggaaccggagaggtccagagatcacaatgaataagatcaaaagggtaccaagcacgagactgggaagaggaaaagggaagacggacatggcgacctaactgacatgcatggcagaggtcagcattattgatatttttattacaagtaatggaagcagtgctggctaagcgggagagggcttcagaaccaggatgaccaaggcgttggtgccattgctttggagacgcagtggtgaggaagccagtggcagctgttgaggggcgaagcggg

SEQ ID NO: 26961 - DNA, 361 bp, Zea Mays
cgcgtggggtactcgtaggtgtgctagagagcaaggagaagagctcacggagaggaggtcgtggaggtcctagagacaggggatgcgggtgtggaccgacgccgtcgcagcagcagttgcgaggacgaaggcgccgtcacatgtcgacctctcgagagaccgatgtgcgagggtgagctggaggggggctccactggacagtgagagcgttggtaggggactgaaacaccaagttgggccgggccagagaagtgtggcgtgatggccatgctagtgggctgcaccaaataacacaacccacacgtcgtcgtcaccagctcaccgcggcacaaaaattgtaccatatcggtcagtaagtccc

SEQ ID NO: 26962 - DNA, 320 bp, Zea Mays
tcagtccatgaactagagcttcgtattctgctgcattgttggacgcagggaataacagttgaagagcatatttgagttgttcacctccaggcgcgataaagaggatccctgcgcctgctccctacagctttaacgagccatcaaaatacattcgccatacttctgcagtttccgggttatccgacacctgttgctcggtccactctgatacgaagtcaaccagtgcttgagttttgatggcagtgcgaggtcgaaattcaatgtcatgagatcccagttcataggcccacttggctattcttccgatggcttctttatta

SEQ ID NO: 26963 - DNA, 609 bp, Zea Mays
gtgggaggggcagttatgactcgcctgaggcaaagccaaaacaggacaggcagtcacaactcttcctaggccactctcgggcgggagacacagtcacgactcgtccgaggccaagcccaggcgggacaggcaataacgactcgcctgaggtcatccgcgggcgggacagacagtcacgactcacccaaggccaaccccccgggtgggaaacacaattacagctcacccgacgctaaccccggtgggatacaaagttacaactcgcccgaggccaagccaagacagaacatgcagtccgcccgaggcaacccttgggtgggagaggcagtcatgactcgcccgaggccaagcctaggcaagataggtagccatgactagcccgaggccatcctctggcgaggcaggcagtcacgacttgccagaagccaacccccaacgggagacacagtcacgactcacatgagaccaagccctggctggacagttagccacgactcacctgaggccatccttgggtgggataggcagtcacgactcgcccgaggacaaccccaggtgggagaagtagtcatgactcgctcgtggccatcatcaggcgggacaggtagt

SEQ ID NO: 26964 - DNA, 466 bp, Zea Mays
gttggacccgattggtacgaggcaagctagggagagggaaacgggcgggaatctcagccaccgcgtaggggagaagaagaggatgatggccgacaggtaggagaggagggtgagaagaggacgactggctgccgcacggggaggagaacgggtacgactcgttagggtttaacacatactatgttgtatattgttacagaagtggggccatgcggtggaggaacgggagacggtggatgagcggacaaagaagaggtggagaatcgcaagctcaccctggtgaagtgaaggggcgaggggaggagcagtcggcggcagaagaggcgacgcagcagctcctcgcgttggtggcggtgactcaagaggagcatggagtgggcatcgatggttgacagacgaggatatctaatttcagtgggacagggacacaaatcacgggccgggggcacgacgcacccaggtggac

SEQ ID NO: 26965 - DNA, 436 bp, Zea Mays
gaacaaccaggcacctcgccttcctgccccagcaaccaaccagaacaatcaagcagtgccagcgcaaggagatgactgtggatgtttccactgtggggaataaggccactgggcaaatcactgcccgaagaaagtagttcagcagccgccagctttcaacacttcagcaagacaaggagcaacacaacaagcaccaggaggctgtggccaggcctacaaccgtggaaaggtgaaccacttggaggctgaagcaatccaggatgcactagatgtggtagtaggtatgtttccagacgaatcccatccagtaaaagtactatttgatatcgattccacgcattcttttgtttctacatcatgggtagaagcacataacatccccatagaaccaatggttccacctttaagagttaattcaattaggggaaaggtttag

SEQ ID NO: 26966 - DNA, 672 bp, Zea Mays
caacggaatggcatcgtcgagcgcaagaatcggactcttgttgagatggctaggacaatgcttgataagcataggactcctaggcggttttaggccgaagcgatcaacactgtctgcaatgtgtcgaaccgcatctttcttcgagctttcttgaacaagacttattatgagctgcagtttggacagccacccaaggttagtcatttcagggtgtttggctgcagatgctttgcgctgaaacaaggaaatttggacaattttgagtctcggtgttctaatggagttttcctaggttatgcattacattctcgtgctcatcatgtttgtaacttagagactaaccacactatggagacttgtgatgttacatttaatgagaccgcaccttgtccatcccctgtctttgaggctatagatccagatcatatgggacaaaccatctttgtggaggaggatcacgacgacaccgattgggatgatcttgagtcgactccaccggctaccctagtcgaacctgcttccactacttctattgatagactagacatcacttcttctatgatttgggggtccaatcgagcctgagcctgctaagcctagaggcagtaagcctgctgttgagggggaggccacttcctcgagggagacaccacaacacattcaacgtcgtca

SEQ ID NO: 26967 - DNA, 317 bp, Zea Mays
ggcacatactggttctctgaccttcagacacttaacagattgcacactccctctaggctaatataaggcgttcggctgcagcaaacagctgctgctcctgcaagcccccccacacggctactatagcagacactgtagcaacagcttctactttgaggagtggaacatggtcagactgttgttttaggacgtacatcattgttttggaagtccccaattctatgatcgtcattgttgctaacgagaattgttgctaatgagatttggaagcatcgtaacaattgcttcttcagctcggtctctacattgaggaggat

SEQ ID NO: 26968 - DNA, 328 bp, Zea Mays
tttttgatgggtcagtagccaccccttgctgactaatgacatgtcccaaatagcctattttctgttgggcaaaggcacatttagacatcttgataaaccattgatccttctgaagaatttggagaacttgctgtaagtgattaatgtggtctgtccaggttttgctgtagatcagtatatcgtcaaaaaagaccagcacacatttcctgagaagaggagcaagagttgagttcattgcactctgaaaagttgctggtgctcctgaaagaccaaaaggcatcaccctaaactcaaaatggccgtgatgagtttgaaatgcagtcttgtg

SEQ ID NO: 26969 - DNA, 470 bp, Zea Mays
aagtcgacgctggaccccccagtgatcatgtgaatgactccgcgatacggctgatcagcgaagtcttcttgttttggcgcttgggggtggtttgggtggtggatgtttggctattgcgggtgtgggggtgggagtgggggaggtatgatttgtacctcctggtggtgttggtatgcgtggttaggtggatgttgagcggggtcgtggttgtatggttgtgggagttgttgatatgtgtgcgcgacaactcttgggttgtcggctggttgtgcatgagacatcctatccctggtggccttcgtttccaggcagtcccttgttgggtgcgcacagtcttcgccgtgaaacaagcagtaaaatctgcgcggctgctgcgctcgtccttggccccgaccacgagttccattgcctcggccctggggggataatcttggcggcgaggggcctcaccagcggggtgctggttggcg

SEQ ID NO: 26970 - DNA, 488 bp, Zea Mays
acgaaattctccgactatggtggctaatcgagggcagggaggcatgctctggcttcgtgacaaccatgcggagctagcaacaccatcaatttatagtgactgggggcgatggcttcgaattttgaaaggggagaccggcggttgaagagaggggtgagtcaccggcgcgaactactgtggcattcaccggggcaatgtctccagcgatagacagactacccacgactatctactgcgacgtggtaactcttctaagtacgtggcgcggctacgaagaacagagaactccggagaggacacctcagtccatcgcgcggcaagtggcacattgaatagtccggtgattaggctccaaccctttccctgcgtgatctttcatcgccagctgttatccgcaaaccagggcgcacgaatcgcgacgaccggcgtcaatcgtggtgtaaggtcgccggtggcgagatacaatgaattagaagatctttttcaat

SEQ ID NO: 26971 - DNA, 1411 bp, Zea Mays
aatatttctctagtctggatatgacagcaggataccatcagattaggatgggattggaggatgagtacaaaacggctttcaaaacccaccatgggcactaccagttcagagtaatgccttttgggcttactaatgcccctgcaagttttcagtgtgctatgaactccattttggagccctatttgagaaagtttgtgatggtgtttatagatgatattctgatatacagtgcagatttgactcaacatttggaacacttaagattggtgttctctactttgagggctcaacagttttacctcaaaagaaagaagtgtgtctttgccaaatctgagttgcagtatttgggtcatattatatccaaggatggggtgtctactgacccagcaaagactcaggcgatggtggattggccagttccttcctcacttactgagttgagaggtttcctggggttgacaggttactataggaaatttgtcaggcattatggtgctattgccaagcccttgactactcttctccaagggaagaaaagatgggagtggacaaaagaagcacaacaagcttttgataagttgaagcaggctatgattcagaccccagtgttggccctaccagattttgagcttccttttgtggtggagactgatgcctgtgagaatgggattggggctgttttgatgcaacaaaacagacctgtggcttttttaagcaaggctttgggagttaagaatagtcagttgtccatttatgagaaggagttcttggctttaatgatggcagtggataggtggaggccatatcttcagagatctcagtttgtgataaagacggatcaccagtctctgacctttttgggtgaacaacaattgcagtctgaatggcaaaagaaggctatggctaagctgatgggtttgcaatttcagattgtctacaagaaaggaaaagagaatgtggtggcagatgccttgtccagagtgggaatggcgatggctatatccacagttacagagttgcaacctgtttggatccaagaggttactaattcctatgtaacggattcacaggctcaacaattgttacaaaagctcgcggtgcatagccccgatgaggcagggttctctttgcatcaaggagttattagaaagcagcaacaaatttggattgggcagaattcagctcttagaactaaagtcatttctgcttttcatgactcagtggttggtgggcattcgggcattaccgctacttatcaaagggttaaacgaatgttttggtggcaagggctgaagactgatgtggagagttttgtcaaacagtgttcggtgtgtcagcaggccaaaagtgaaaaacagctgcctactggtctgttacaacccttgccggtgccaacaggggcctggaagga

SEQ ID NO: 26972 - DNA, 419 bp, Zea Mays
tagtgcctcaagctcatccgtggtggagatcttttcactgcgagatgttatccaggtaccggtgagcatgaatcaccccgccggcgtaaatccaggcataggggtcaccgggggcaaggtgcactgcacctgcgatcttgttcagtcctctataccatcagagttctcatcagggtgcctgacagagctatttgcagagcccagatctcaaatttccatgtggtaacttgctaatccacctttagcaaggttgttctcctataatctagctttaatttcactatagtcaccatacttcaattctcaatagatcatgctcaaaatagctctcaaacctggtcctagtttattgtgagtccagtttcagggttgtgctcgactgacagaccatcttcaggtctgtttttctcccatttcca

SEQ ID NO: 26973 - DNA, 606 bp, Zea Mays
gtcatcgctacatgcagcctatctatatatcataagctgccttgtctgatcgtcagcaactcagcatcacacttggattgcgtgattatatataattggttgttggttttgttacgtagtcaggtatcagcacagactgcagcatcagacttatttggctggagaaatcagggatcatcagagtcaaaggcaacaagattctgctaccatatcagtgcaagcgaatggctgactgtttaaagacatgcctggatcttctattgtgaattcgcagttctttcatgggtggattgtcaggatcccaaactggtagaggtgggggatggaattctctgctcttctgacttcagcggggataaacatcgctgtctgcgtgctcttcttgtccctctattcgatcctcaggaagcagcctcacaacttcagcgtctactttgggaggcggcttgctgaagagaggttccagaggcaggacgattacttctcgtttgagaggctactgcctactgctggttggattgtaaaggcgtactggtgcaccgaagaagagattcgacaagttgctggcttggactctgttgtgttccttcgcctcttcattttcag

SEQ ID NO: 26974 - DNA, 758 bp, Zea Mays
cagggagctctgagaaatctgcccccacggtggagaagatgtttaccgccgtgccggagaaggctaaggtggaatcggccatcgacgtatcgagagaaacatcacacacaagaatggccaaaaaatcagagatcgcactcacatcatcattgtcttcatcctcatcagttgagtgagtctcggcgccacgattccctacacatctgatgctctgccctgcgacgcctcttcttgaccctagttctcttttccctcctctaatgctccaccattacgcgggccgccttcttctcagccacactttttggtaaaggaacggggtcatcttacagcaccagaaaaagaaggctaggaggaagaagaagaagagggatctggggacgcaaaatcggagtcgaagaggaacatggtgaacttacaaagcctggcttgcgacacatctgagggcaaccggggaccaagaaaacatacgaaatgatggccttatctactcccttgcgaacctccatggattctctaagctaggggacgattctcgaatcgctaggagacaaggcactcaatcgcgagccctccaggggagcgtcgacagaaatcttgtacatatgtaacctcctagccataaggggagctaccccggtatgaaggtagttcctaataaccccttccaatgtgaccctcggtcgtggagaatcaatacgaccgtaataggtccggtcgtcttcttctccccatcttccgagatgccccatacccag

SEQ ID NO: 26975 - DNA, 745 bp, Zea Mays
gcggacaccctcacaaaatggcgtcgagacggacgatcatccttacggggatatttgcgaccgacctttttaaaccaaccgttagatatgacgaagcccaccaaaaatggtaggaaactcacgggcgtggacacgttgaccccggaaccagttgccattgtggaggagacggacccccagccaaccccatggccaactggagagcaccgtatcgtgactttttaaccaacgatttgctgcctcgagatgaaacagaggcatgaaagcttcatcggtgggccaagtccttcgtcgtaattagggaagacctctaagggagttgtgcatcccaattgaacagggaaaacaactcctagaagacatccatggcggcatctgtggcaccatgctgcctcgaggagcctcgtggggaatgcctaccgacagggattgtactagcccaccgcggtgtctaacgcgcatcaggtggtgagaacctgcacagggtgttagtactacacgcagcaaacccatctgcccgcgcagacactccaaaccattcctatcacctcgttgtttgccatctgggggcttgatctagttggacctcttaaaagagcactcgagcggctacactcacatcttgctcgcaatcgacaaattctctaagtggattgaggcgtggcccctcgcaaagatcacctccgagctggccgtaaaatttgtcaccaacatcatccaccgttttggggtacccaactcgatc

SEQ ID NO: 26976 - DNA, 520 bp, Zea Mays
gctgcctggacgcacaacctaacagccctgtgccacgactgatttactatgggctttcagctaacgtgagcaatatcccccctgctctgtttgcagactggttgactattcggataccatcaatgatgaaaatgttgaagcctcaaaaaggatgcgatcacctgcatcagagttcacacgcatggtcaagtcaccaccatcagataccagaggcaatatcaggtcatcatctgtagattttggcagcaacaactcagtccagaatcttcatgcatatgctgatgtccagaagtaatacttttttttctttgaatttgtttcgtttcatgttagttttggttagagtgttgattttgggtagtcataacattttaacatgcagcagtagttagcaaaaaaagtgagagctcttattgtgccttttgatcattgatactaatagttgttttttgtgcaattattacaggtctgatgcatccttttccaagttcagaaatcaaatacaatcacgcattggtgg

SEQ ID NO: 26977 - DNA, 472 bp, Zea Mays
acaagagtatgcttacatacatacagcaagggcatcacacattacattggctcaaccttcgggatgatacccatctccctatagttgaacaacattatccttaattcctcaccagcaaacagacttcgcagctcccctcacccacactcgccccagccggcgaggacaacaattcccgcttgccagtcccgtccacacgaaggcgaccaccttccacctcaccacgatgacgcctatcacttcgcggcaactcactcaccctctgtttcgccaccgcccttcgccgcctatgcccaacactcgcacccggaagatcctcatcacccattacacgcggtgaagcctccgccgcagccgcatccaatgccgcaaagtaatccaaatcctcatccgaagactcctctgtccacacaatcgaactcccagaatcatcagactcaaaacacttagacacagaatcatcagaatcgtc

SEQ ID NO: 26978 - DNA, 312 bp, Zea Mays
agtatggatttcattgtcgggttacccaaaacctccaaaggatatgattctatatgggtaattgttgatcgactcaccaagttggcacacttcttgcccgtgaaaactacttactcagtcaagacttacgcagaattatatattgctcggatcttaagttttcatggagtccctaagatcattgtatctgatagaggctcacaatttgtatctagattttggaaagagttacacaactcgttaggaaccaaactgattcatagttctgcttatcatcctcaaacgagtggacagactgagagagtgaatcag

SEQ ID NO: 26979 - DNA, 396 bp, Zea Mays
gaggaggccaagaccagtgcttagcatcggcctaaaccaaattcattacctagagaacgtttcccctaagttaatttgaagaatggcactctactttgccctgcccacggtgaccgagaacgttacagagggatgaaggtgttcacggcgagtggtggtgatctagttcaattggacggttcaaggagttcgcgggatgcctacggatgctagaacaagcaaccgaaggacgcgagctaaccggaatcgagttggccgctgcgagctgttctttacggcgacggagaccgaatttggggagaattggaaattcgcgcgtgctggtggatgatcgagggtgggagcgggtgctatagcttcgggatgacttagcgcagtagcccgagccatcaattt

SEQ ID NO: 26980 - DNA, 283 bp, Zea Mays
gtcaccggtgagcacgaatcacaacggcggcgtgaatccgggcgcacggttcaccggcggcgaggttctctgaacctgaccctatccattcactgtaccattggaaacgttcaacagagcgcctgacagagcaacttgtaacgcctagatctcggatttttgtgccagaacatgccaatccgtctgcagcaaacttgtagcccattatttcaactataattctgctatagcaactaccctcaatcgagcaatgaatctaactctaaatcgagctctaagttca

SEQ ID NO: 26981 - DNA, 353 bp, Zea Mays
actggatgacatcctcgacgcccagtgcccataccacaaggacatgtgccacaccctatggaactgcagggacttcaagcactccgtcggacatggtcgaccgttccagcctctaccacctcccccaccacgaggagggcccggtgagcccaggcagcctcagcagccagaagggggagggggtggagcatttccacacgttgacagtgaggtcaacatcatcttcgaaggacatgggtcgcaggagaacagaaggcagcaaaagctcaatgaccggcaggtcctagcggcaaccaccagtgccccagccccttatcggtggtcagagcacgcgataaccttcaaccgggcgg

SEQ ID NO: 26982 - DNA, 666 bp, Zea Mays
gtgatgttcggccggcgacaggtacaagcacagtgagaagggcgttctgctctaggttcgggatgcacgaagaagacatcacggtggtgcagcattacccagaggatttcttcatcaacttcgagcaccagcaccaccgtgacgcggcggtggcatgacgcgatttcacctacgacaacattgacattcgggttaggccatggcagctccctattcacggtgaccgcatcaacttcgactaccatgttcgtctctgcctcgaaggcattccctctacatgcgtggaacgagggcatcaccaagcgggcggtggctaagagctgcgtgctagactacgtcgagtctcagtcactgcgaaaggaggacacaaggacactcaacctctgggcgtggacgcggaacccttcagacatcccaaaggtaacttggctaaccattgttggcaggaacatcattgtccacaatgtgccaccggcgggacaaagtggcttaaccttcagggtcatcgtccaccttgaccttgtggagggttccccgggcaacgagggtcaaggaagtacacatgtgttcgactggaggcttggagttgttgatggcaagagtgctccacgcgacaggcacgacccttcacctcgacgcaacgatcatcaccgggacgacggcgac

SEQ ID NO: 26983 - DNA, 578 bp, Zea Mays
aacaaaaagttccggatatttctgccgcatcagctcctcaagttcccacgtagcctcgcgctcagactgattagtccataagaccttgacatacttaattgatctcttcctcaaaacacgctccgagaattccaagatacgcaccggacgacactccaaggtcagattctgctgcaccgcaattggttccatctcaatctgatggtccagatcccacaagaacttcctcagcatagagacatgaaatactgggtgtacccctgccatggaatctagcaattgcaagcgataagccaagctgcacacctgggccaagatagtgaacggtccaatatatctcaggctaagctttccggagacaccgaaccgaacaactcctttagtgggtgataccctgagaaggacttggtcacccactgcaaattccaaatcccgcctcctcacatcagcataactcttctgacggctctgagcggccaaaatattctgacgaatttcccaaaccttttcagaagtatgctgtacccaatcaggaccaactagggatctctctcccaaggtctcccagcaaagagggg

SEQ ID NO: 26984 - DNA, 352 bp, Zea Mays
ctttgctcaaaaatgcaagtggatggccattctgcataaggactgctccaatgcctgttttgcaagcatcggtgtaaatgcaaaatgggagagaaaaatcaggtaatgccagtaccggagccgagattaaagcttgctttaatgtgtcaaaagcatgttggtgtgtcggtttccaaacaaatgatgtgtgcttcttgaggagatcagttaagggccgactgattaagccgaagttcttcatgaactttcggtaaaatcccgctaagcccaggaacccacgcagttctcttgcattaacaggtactgaccactgttgcaccacctgcacctttgccggatcggtggccacacc

SEQ ID NO: 26985 - DNA, 347 bp, Zea Mays
gtcggaggcagcgctgccagcagatctgatctttggagcacctagattaacattcgaaagcatagctgaagcagaagcaactaggctggaggacatcgatgtactagaagaagaacggctaaatgtggtcattcagtcggccagataccagcagactctgaggcgctatcacgacaaagcagtgcgacatcgatccttcgtagtgggagacttggtcctccaccgagtgctgacgggggagggacgacacaaactgtcaccaccataggaaggaccattcatcatcgcgaaggttacacagctgggatcctatcggctcactcaaatggacggcaacgaagtgggga

SEQ ID NO: 26986 - DNA, 323 bp, Zea Mays
gacgtggaattgagccgatacttcacaaataggtttatatgggtgaatatgagtgaagtgtgtgcttggtttgaatttaggcgaagaaaatggaatttgggcactcggctcggaaacgatcgctcgaaacggggaatttggtgaaaatgaagcctggtctatcggatgggcgtgaaatttggcgaatttgttactggaggtgttgtgaaggtgcctgcaaaatttgggttcaattggagcatatttggctggtttgggcatttcaccgagcatgtcgtgtgcgaggatttaggtttttggagatatggccatttgaggattga

SEQ ID NO: 26987 - DNA, 506 bp, Zea Mays
cccgatccgggcctcggctctcttattggtcaagatacgggatataggggttggacatccttctcttgatcaatgacaacaacaaggacagaagccattccgatggccatactactgcaggggcatgggatgcctcctctccacattacgataaacctttgtgctcttaggatcccttcttgaggctataaaaggaggagtccagggcttccaggaaaaaggaggatagcacacttcaccgattgccctccacgaccgatattggcacttgcctcaatcatccacagagacttaggattcactccctctctcgaccatcttgtacccctactacaagcacttaggtgcaagatgatacaagtctcatccccctttgctagaagtagggccttctattgctcgaaccagaataaatcttatgtcttcttgcatcaccatctggacgggaacacgcatcacacattaacgtgttggtttggaccctctgatcaaaacaccgacagttg

SEQ ID NO: 26988 - DNA, 556 bp, Zea Mays
attaacacagagaatgggtatgcgatggggcgaaatcagtcgctcactaaggatccaacggtccacagtgcgaccaaccacacctcctctctccccgatgaacaataggcggcgatgccgatgcttctcacggcaaagctacgttagagcccggttgttcgatgccctggtgccgtattccaaaattggataggtgctatgcgcagtgcaaagagtggcgagctacaggtggtggtcacactacaaatcgcatcgtgatgacgccgagccatagtgaggtgcggatccatggcggtgataaacaatggcgagcaatcgccaatgccctaatgctctaatctaacctaaacttggtatatacactagtgaagatgaggcgagcacaggatggaagcattaccagcgcctggagttgcggaggtgaccggccatagcgtggaggaggtccgctgtgcccaccccactccagcgagcagttcacgacactgcggtgctccacaatgatgttgatagccacaaccggcccacaacagaccaaaggtacccccaagctgcg

SEQ ID NO: 26989 - DNA, 312 bp, Zea Mays
gtgctgcaaagctgaagttcttgtttcccagaggaggcggatcgaggaggaaccaatcgatcgatgaacgcggcgtagacgtagcgcagtagcagaggctgaagcacgatagatgtctatgccaagggttaggtgaagtagtgttaatggcaattcaaggcctgcatatgcatcgtcgtcgttcagtccagactagagtcaggctacagagtactgtatttactgggggggatacagttgagtactacacactgtgtgtcgctgaagcttcatcagcctttgagcagtccgagaaaatggctgacgatcgag

SEQ ID NO: 26990 - DNA, 1082 bp, Zea Mays
ggactagatcggcttggctctgagagtatttctccttgaagtcggagcactattgggtcaacttggcccaactttgtgaatacttttcttcaagatcagagcaccgctgggccatatctgacaatgtagctgaaaagggacgcatgattaagaacaaggatgatcgataaaaacagctaagaaaactgcaaggtcgctaaccagcgtttgatgccttcgagttagcaatctgtttctgaagtagcaaggggttccattgcattagagacagagcttcttccggaacagcggcaccgcacaacctcagctggacagacattccatcaaccaaagcctacgattgcagacagatgagcaaaaggaagataattcactaatatgggcaatataaggcaacaggacgactcgcctgaagattggagaggaacgatggcagacccaaggcagaagaagctacatcatggcttgacgagggaagatcagcaggaacaatttgaagggcattatcagggcaatctcagccccgccagcagatagcaggtttctcgcatctggatcatcgacctctaaggcaacttgttcgttcaaagctgtggaagcatgcgccgttgtcgcccatcgaaccaaggtggggacgacccgacgtggacatccatggaagtatgggaaggagagcccacctgaacacccttggggctgggttgcagctcgcgctacccaccagagccggatcactaccaacaacactcttaggggctgggttgtagctcgcgctacccaccagagctggatcactaccgacaacacccccgggggctaggtaaccgccagcaccaccctcgggggttgggtcttccgcagtagccacctctaaggctgagagctcttttgtaacctccatgggagtcaggtgactcaaaccagcatcttgacattgaagactgccttccaaagtcgacgatgcgcgagataccacttgggatacctccaatccatcgcctggaacctctaagcaaatagccatcacatcatcggcagtcggctctgtcagcatgtcctcggggatgacgtcctcaagtgct

SEQ ID NO: 26991 - DNA, 328 bp, Zea Mays
ggcccgtgttgataaggaagcgcggagcatctcgtcctcggcgagcaggcctgggccggctcggacgaccacacggaatgcgacggggaaaaagactacataaacttttgaccatatataattcaccagtttaaactttacaaaattcatctaatcaaatcactctcacacacataacctccattaaatcaataaaacaaactgtaatcggacttaacacactatcaaaatcaacggtttagatcggtggataactctctctcccttaaattaaatggacaatattatttagattatcaattatccttccccctctcctgtgtccccg

SEQ ID NO: 26992 - DNA, 330 bp, Zea Mays
caaatgcaaaatattatagggggtatgcaaaacgactatagaagattagcgtgtgcatttgacaaatctagcattgcaaattttccatcacacgaggtagaattagggggtaacacgcgtaatacatcggctatagtttgtcacaaccagtcacaacccctttacgggatgccgatggacacgtaccctgagcaaccgcaaatcggcagtaaatcagccgatctgcacatgtctggactatccgaccatgagcgcggatcgcccgggacagccacggccgggcccatttttaatgagttacctagacatgcacctgagccaccacatacg

SEQ ID NO: 26993 - DNA, 439 bp, Zea Mays
gcaagatacaaaaaaatataaaaaagaagaagaaagaaggcaaccaaaattagcgcacctcatttccataatcagcattgttctatttggcaagccgaacctgcaatcaaatttgggcgcctaccatctttgtttttggcaagaagcccactttcccttacacgcccctcctttccttgttcagggatctgggtgcgcccatttccttgtccaacactttttgtttttggccagcggcacctccatatttggtgcgcctaagttttctaattctggctatttgattttggaaaccaaaccttgtttcctcatttagggatttggtccgcccaggcatttttggaagctatcttgggtgccaccatttccagctggtgttttggtacgacttctccaccttttgcacacctcccttacactccccctccttgcctagttc

SEQ ID NO: 26994 - DNA, 547 bp, Zea Mays
gccttactggggtgccagtgggggcagcctgacgagtgtggggtgtctgtggagtcccctgtggagcgtactgagttggtcgcggtcctcctccaggacgagctggtgtaccctagggtggaacataacgaggacgaacactgctgctaccctgtccctgggtaatgaccttccacttcatctgtcctagttgaacacgcttgtgttcaatagctagagctttgtccaagagtctctaaaatgacgggaaggtgtgagcgaccagtgcatactgtagtggtccattgagtccctctataagtgctcttgcttcctctcatcatccaccacttcatctggagcatatcttgatagttgaatgaatctgtcacggtacttgctgactgacatgttgccttgctttaatgacagaaattccttctttttaatcttcatcagccagcaggaatgtgataatttctgaactgtgtggtgaattctggccaagtgatagtatgagcagcgtcatgggcagcagtataataatcccaccaatcagcagtaggac

SEQ ID NO: 26995 - DNA, 312 bp, Zea Mays
tgcttgatgaatggtgatgtttttgaaggaggcaaaagaccagagttctgggaaacttgcagatttgcacaaaccattccaattgtcatgccacaggagtgtagtttttccatctccaatctccacccgggctaactccttatatgcgccttgaattttaaggatatctttccaacagaaggaaccaacgggtttaactgaaggtagcgaagtgccgtagtggttggcccaaataatgttgacccacagaatgtcagctctattatagaatttgtgaaggcatttcataagaagggctttgttttgtaaatc

SEQ ID NO: 26996 - DNA, 347 bp, Zea Mays
tgaacttagcacgggagttttgccactagggcccttgcgattgccggctagagttgttgctccgccgcggtcccgcatgttgtcgtggctggggtttgacgctgtgtaatcactggtaattgctacctccattcattcgccctactttgtattgtatattgcacctgtcagtccgtaaattcgtgcaccactatggcctatgcacatcacgccggtgaactcagggtgaggccctggttcttcctccgtgtcgcccaactgaaggtagacgaagggacgactgccattggatgtgtgacgaacgacctgaattaggctaggatgcaactcaggagcgtttggtcggg

SEQ ID NO: 26997 - DNA, 577 bp, Zea Mays
gtgaatggcagccaccttggccgggtccatggccacccctgcggccgagatgatgtggccaaggtaggcgacagatggtgcgccgaaagaacacttcgagcgctttgatgaacagctgatggcgttgtagctcatcgaggacgacccgtagatggcggaggtgatcggcccacgtgctgctgtaaattaggatgtcatcaaagaataccaggacgaaccgtcggaggaatggtcggagcacgtcattcatcagggcctggaacatggcgggggcgttgcagagcccgaacgccatcacgaggaactcgtacaagccgtcgtgtgtgcggaacgcggtcttgtgcacgtcctctggccgcatccggacctggtgatagcccgaccgtagatccagtttggtgaagaatttggcgccgtggagctcgtcgagaagctcctccacgaccgggatggggaacacgtctttgatggtgagggcgttcagggcccggtagtcgacgcagaagcgccacgagccatcgggcttctttaccaggagcacgggcgacgagaatggggagtcgttgcgtcgcacgat

SEQ ID NO: 26998 - DNA, 525 bp, Zea Mays
cataaatcaaaatgggcataatttttcttacatgtatttctgcatgtggttgttcaacttatatggttcttaagaccctaacactgagtaaataagtcggaagtgcttatttgttcaacttatgtaagtgtttgttcagtttgaggatacgggcagtgtctggctattggctaaagccagaccatgttacattcattagtgtactcaccgcgtactcacacacgcaggggaagttgagatcaaactaagatacctcaatgcaacgaacaaaagctgcaggttggagcctaaaaatgagtactacagttgtgttgttgatttgttgggcagaaatgttaagttttccggtgcttctaggcccatcagtcactaaaccaatagaatctaagcagaccttccttcttgcaactggtatttgctgagctgaaatggtccgccatatccatgatcagttggatttagaatctgaagtggagctaaacagctaactgagtaatctcggaaggagcacttactgcaagggag

SEQ ID NO: 26999 - DNA, 341 bp, Zea Mays
gttccaacctttcgaaaaaggttacccggggcctggatggaggaatggttttatgtcaaaaataatttgattgaaagggaagacataaaggggattatccaacgccccatctggtcttgcttcggccttcgaaggtcgactattgcgcttgaaaatgataccgaagcatgccagaaggctttcaacaatgtttgtgccttcattggcacgagagacctggttcaagagcacatagcctacatggtatggccacttgtggataactgggagatgccgaaggagactgctgctgggtccagtcaaggtggattggtttacttgaaatacacctttagatacag

SEQ ID NO: 27000 - DNA, 487 bp, Zea Mays
tccctgttcgcgcgcggacgaatcgctgatcactgggatcggtgtgtcagctccttcttcttcgctgaccgccgaaacagaatcccctaaatccgcgccgcccagctgccgttcctctcagcgcggactcactccatgcctctcaacagcgcaacgcggtgtttgcttgaaactaccgcgtggggccacctcgtcggatgaatcttcttcgttctgttaggattgtgccgcaaatccccattgccgaatgacgaagcaggatctccgtggctctagggtatatataccggtggcactcccctccttgaaccccaagtctcgacggttagtatctacgcctcgccatgacctccgagcatgaggaaacgctggtgggagatcgaacgggaagcagagaatgggatgaaggggggagtctcggattggggcaggagaccgtagcatcgtggcctggatcatgacttgagcttatgggatcatccgtgtc

SEQ ID NO: 27001 - DNA, 823 bp, Zea Mays
cttgcttcaaatgtctgacatggtctgcaatagtagcactatagaccagcacatcatcaataaatacaaccacacactttcgtagcaaaggagccagtaatttgttcataaagctttggaatgtggctagagctccagttaaaccaaaaggcataactctgtactcaaaatgttcatgatgtgtttggaatgcggttttgtactcatcgccttccttgatgcgtatctgatggtagcctgaccgatgatccaatttagaaaatatggatgctccttgcaactcgtccactatttcctcaaaaataggcatgggataccggttcttgactgtataagcatttagttttctgtaatccacgcataaacaccattcaccatctttcttcttgactaataaaataggtgatgcaaaaggactgaaactttgttgtatcacgccactgtccaacatttccttaacttgcttctctatctcatttttctgctggggagtataacgataaggtcttagccgaaaaggttgggcacctggcaagagctcaatagcatgatcaattgccctcttgggaggaagaccggtaggtttcacaaacagatgttgatattggtccaccacttgcttgatcgactcaagaatcaatacagtagccgtatccatactctccactccctgtaattccaagagttgctcaaccgcctcttgtctgatcaaagatcccaattggaaacaggttaaactgttgcaggtctgaattttgggctgaactccttgtaactgcacccttctgtgattatagtcaaactccaaccatttttctgccca

SEQ ID NO: 27002 - DNA, 339 bp, Zea Mays
tgtttatttatactgttgctgcaattaatagtgcatctttccttttatgcttcattttagcttttcacagggagtttgttctaagtttctcaagcataattttctcttcattgtaatgtttgctcttctggcaagttttgttcttattagtatcatgaatcttcctagtcgtgatcttgaatcggattaacttgatcagaaacgattatctgcatctgccctgctgacatattattaagtgttctatgcaaatgttagactaaaggctattgatacttgctacctgtacaaaagtaggtatctagcataaactttgttacacgcataatttgtttaaat

SEQ ID NO: 27003 - DNA, 479 bp, Zea Mays
tgaagacacgccggtggacgacgaccggagtgtgtagaggggcccgacgctgtcacatcgggcgagtggggtcctggtggccagatccttcacagaaaaaccagaagggtcaaattcaatggaataagaattgtcggtggtgaaccgacggacagagaggagattgtgggtgatgtgaggggctacgagaacgtcgttaaggtagaacggtccaggaagaaccgaggcacccacagaggtgatgggaagagtggaaccgtttccaacgacgatcgaggtggggtgtgaggaaggaggtgggtgggagtaagatagcatgtctgtggtgggagtggtgtgataggatgcaccagagtcgatgacccagtcagaggatggtgaagccaacgccatggtgttgtaggcggcgacgagggcgttggtgtcccaaccaccagccaacggggaccatggtgttgtggtagatggacccgtaggct

SEQ ID NO: 27004 - DNA, 397 bp, Zea Mays
ggggaacagagaaattcgcgggctctggtgagtaattgaaggcacgagtgggtggattggatgcttgaatacctaatgaagctgagggtgtgctcaatttataggctccgggggcggtggcttatgaatcggggatggcgcggtggcggccggagagaagagggtgtactggcgcagtgattagtggcttgtaccgtggcgagctcaccgacgatcaccgaatatgcttaacgcgacctactgcgacgtggtaagacgcccgggtacgtggcaaatgaccggcaggcagccaacgccggcgagcttatcggtacaggccgcaaatcatgggggcacgacggctggccaccggagttatccctaggtgaagatcttttgtcttggagtattatccggt

SEQ ID NO: 27005 - DNA, 649 bp, Zea Mays
ggtgcacgggtcgtttccattgtgaggaagcatgcatcaggcaaccctttaggaaacaagccaaggaacaattaattcatggcaggtggaggagtcctaattacctagtggtggtgggaccctagggcagaagcagcacatgatggtgttgatgcaccatataaaaggctttcctccaattttgttgcctaagggcggatctaggattcaatcacgccctaggatggtctattagatataatattctttcaatatattttggtctataacaacaaatataactggagatatatggatcatgccccaaacccactgattgggtggctcaaggcttgtatctacccctgtcgttgcccgtagtttgctcccaagccctttgcctttgccaccctcacctttttatttttcttgtgccttccctagctttgtttgttagccaccaacaagtgatatggaggaatagactactgccattgctcctcagttgtggtggttgttcccatgctctacgtgcattgagacgtgtgcgtgtacaagtgacaaagagctttctacaggaggtattcgtatagagggtgatactgggggcaaatgaagccaagccataggcaaggggaggtggtggtgacgatctagcactttgagagtg

SEQ ID NO: 27006 - DNA, 591 bp, Zea Mays
tcgcgattcacgcccggttgaacacggataacgctcctcggtaaaaatcgggcaccacggatgagcttgagaccctgttccgcccggtcgccgtgtccgcttgactcacggtcggttcagataagctcaacggagatggctgcctgccgatcagatgccacgtgccttgaagcttcacacgtcgcagtaaaccgctccatattgctggctcgtcgccggtaagcctgccatggtgaaagacacgcagctcttgcgctagtgacctcttcgttcttcggccgccaccgcgccatcccaaattcacaggccatcgcctccggagcctataaattgagtgtgtcgtcgggtccgtaaggtagtcaagcacccaatccaccaagtcgtgcctccgattgctcacccgcgagccccaatttcggatttcccccaattcgatccgaaacaccgcgccttgtgacctcgtcgtggtcagcgtgctccaggtccgctcatgccccctactctttcatttcagtatccttgtgtgtccctgatgctccccgacccagccgattaggctagaaccccttagttcaccgggaacacttcatg

SEQ ID NO: 27007 - DNA, 489 bp, Zea Mays
tctctccgatcgccaccgcgcaatcgcaaattcacgggccaccgctcaagggccctataaattgagcacaccctcgactctgctatgtaattatgcactcaacacacccactcgtgcctccaattactcaccagagcccccgaatcgctcagttcccccaaatcagttttccgccatcgtgaacaagctctcaccgtggctagtgcacttcaggtccaatcttgccctctgctctcttgtttcagcactcttacatgccactgatgctcctcgacccattcaattaaactagaccgcgccagatcgccgggaacacttctgttcatccgtagttcgcactatctcggattgtgcaattgaggactcggattgtgcaattgagcgaggggaaacgattattaggtgttgaattaggtgacagccaagttagggcaccgaccattgcttatcttggccggtacatgttcgctggagctcggttcatcgccg

SEQ ID NO: 27008 - DNA, 642 bp, Zea Mays
cacggattagcggttttgattttatgtttgcccgagctgcccataaccaccggatagaagatctacggctatgatcgaatccaccgaatctgtacgaggatcctctaatctggaccgttaacgccgatccaacggtcacaacgccatccccacctcagaccctgattgcgcggcggcgccaccatgcccacgtggtgaagttcgccggagcgcgacgatcaaatccccaggtgcccgactacccttgtaaatgggtgtagcagagagaggaagcaacagggaacacgacagaggggtgtattacctgcaatgaaccgcgcggaccccctggccatggcatcctgcggccaacggtgaacggaccgttccggcgagcaattctcaatgcgccacccattctttttgcccggccatgtagtgtgaactatctggcgatttgcgtgacaccccaggttacccagcacgcaccgaatggccattcaagcgagttactcgcgcggtggaatctcaccccaatcttcgcctgctcgatggcgcgagggagctcaccatgggtctggtttgggttcaagggggcacggccatggatttataggcccgagcgcgacaggattccgacccagttttccccagctcccgcaa

SEQ ID NO: 27009 - DNA, 480 bp, Zea Mays
tgtacgttttttgtgcttttgctattttgggtaacattcatgttagtgaatatctgtaataaactctgttgcgaacatccgattttaagtcatttatagctactgttcatcaccatgccatcttatgtctccaacttctatattcctccagccgcctgtctagcattctctttttgaaacttgggaactcaaataaagcttctatttcctactttaggctctagtgcccaatcaaactttatctggctctttaatcttcctctaggcttatggtaagaacttgaacatgtgttcttttttctttttaagtttggtgttaattgcttttccaagagaaaaaaatatagttgtattgcgctttagtctttaataatcaaatgtggcaggttcatgtcagcctgttctatttaccaccatgatgcagcacatgtgattcaacatagaagtatttacattttacaactccgttttattagtgta

SEQ ID NO: 27010 - DNA, 565 bp, Zea Mays
gttccaggcagctctgtgcggtacaaatcaatcagacaggcgcgtaagcttcaccacaggtgaaggatactagaacttgagaaaagagacacggagggatattaaatgcaactggccacggtgaggggaaaagatgtccgtcgtggtcactgacctcagtacccaccgcgagttcaaggtttctcagtgggatcagagggatgtgggaggttgagaacttaaactagatgtgtgggattggtgtgatgcggtgagatgatcagggaatcaactgtgatataggaagtgcagttttgcgccctatttcttcatgaccagcaactaaagagggatggagtttctgggttaaatgggcacctcaccgggtaataccagtttacatgttcaacccttccattgcatggtcaccacgtaggatagaggcacaggagagtagcagctgtggccaaatctccactggacaacaagtcatcaggtagatacgcagcaagtaaatggcctgatttctttccccccttatcctatccttggtacaacaaggcgtatttcagatgaccgcccttgc

SEQ ID NO: 27011 - DNA, 333 bp, Zea Mays
ggttatactagttcaggcttgcgccctagtccagtgtagtgttgttgtattattgcttggagcgtgttacatttgagtgcttgtgtgtagaagatgggggttgtcttgcccttttatagctcaagggtagatcttacagtgagaactcatattcttcttgagaggagtttggcatgttgtcttgggttgccttagccctcctggtgtcgttcgtagggggggtgccttgacgtattcttaatgtggcattccgtcttgtctaaccggcgtttgtgtccctgtagcttgtctgatgccaacgtagtggtacccgatgggtcccgcagagtggcc

SEQ ID NO: 27012 - DNA, 311 bp, Zea Mays
ccagatgaaggcaagcaaggcaaacatcttacctggcttcaagggttttccctacatgttctctctctccctcgttcgctgtcgtgccaccactatatactcaagccaccatggtgtctttctgaagtcaggaattctgacccccaaccccaatctcacattcctacacacttcgcaaccgcgataagctcaaggagtctatcactcatattttaaggtatcgcgacaatggtatcaccaagagagctctttggatgtcttgtacctagggatcaatcaatgcttcactggcatcatgtctatttgctcaa

SEQ ID NO: 27013 - DNA, 452 bp, Zea Mays
gttttcttcttatttttggatttagaaaagttcttcatcttcatgggcatgaattgctaatgtctgttttgataacttgaatcactttccttggttcaattgtttcctgaatgcatctcttgtttgctttgcttttcaagcttatactgcctgttttttaattagtattttctcatattgtatctgatctaactcataaaaaatatcctgcacacccagtgtttggtattccatcccatcaattcctccccctcaatatctacatccaaacagagccttataattgttgatgcttctcttgtttgctttgcttttcaagcttatactgcccattttttaattagtattttctcatattgtacgttatctaactcatcaaaaatatcctgcacacccagagtgtttggtattccagcccatcaattcctccccctcaataactacatccaaac

SEQ ID NO: 27014 - DNA, 873 bp, Zea Mays
gtgggattggatgaacttagggctcaatcttaagcaagatcttgtgaatttttgtgggggcacgatgtagcaaagttggagctggtctattaggctacaattgctacagaacaatggtcttgttgccatgtaaaatcaggaggaaattcgccccaaacttgggctgtcaggctgactgaagaacaatcccatggtacagtaacagataggatcaggttctgatcccctcgccgccgatgagccacgcgcggattcgtgctatcgccgtggtgattcgcgctcggatcagttggataacaccggggatccgtaaatatcacgccgtggatacgctccgaccactattttactccggccaccgtacccgagcagaccacagttgagttggatgggttcgccggagctagccactgagcggtcttgcgccacgtgccttgacacattaacctcaccgccgtgactcatgttagcttgtccggtggtcgccggggagcttgccatggtaattgccaccaattgcgcgcgctagtaaccttcttctccagccgtcgcgcgtctctctcaaattcactggccaccgctcaagcctgctataaattgccgaccccgcctgctccgctaagtaattgtgcacccagcagagcaaccagtgcctcgaatcatccactagaactccccaatttgggatttcccctaaatcacccaagaacaccgtgcggtgtgacctcgccgtggtcagctcgtctcaggtccgctcataccctctgccctctcgttttagtgttcttgtgtgcccctgatactcctcgaccaactcgattgagctaagctaccttagatcgccgggaacgcgttggtttggtcgttgatcat

SEQ ID NO: 27015 - DNA, 302 bp, Zea Mays
ctgaccgaaaggacatatatatatcgtaagtaaattacaaagctggtccttatggtccaatgtgcctccaaactcccgccacgaaaaaccccggggaatctagcatgtatgacttatggccttatggggctctttgcaccctcaaacgtcatataagaaggccaccgggactccacgcatcctagagcatttgcaggtaagatctctagaggccactcgcatcccagggcattagataagaagcaagctctcaaggccctgagacctcagacaagtagatcctagggccccttgcactccgc

SEQ ID NO: 27016 - DNA, 276 bp, Zea Mays
gaagacaaggcatgaccgagggccaacgagggacacctacattcaatgcacatacctaccctacacggcactacaggtgcacaacagcaacaagaccgcggtcttgtccaaggccaatagcatgattacgcatgcgccattgtgcatgcatgctgcctaccacccccagacaggacatctaatacgacagactggccctcgagcgcaaactcagcctcgcccgacgctgagctcgacctcggacaccgtttctgcctcgcccgagctcggccacgg

SEQ ID NO: 27017 - DNA, 1188 bp, Zea Mays
tccagtgctaaacaaggaggcctgcaacacagaggaggcaagtacattttcaggatctagatctttgcagcactgtttggcacagctcctcctagttctgactcctgctacagtaggcccctagttcattttgggggtctagctcctgctgcagtgccatttccaggaggagacggagctggcatagaacttgccaaagggggcctaactatgattcattgtgatgaacttgttctacagttgcaggcaagggaggataagaagcgtcatggagttgggcatgtgaatgagaagagggttttggaagaaactagtatgattgatactggtgaattgaaatctgattcgactgttatggagattagcatggctgggttaagacaaggaacactcaaccaatgtgcttcaagttcggagaaggtgagaacaatttccgtttcaatgtatttttttttccgtttgaccaatagctgatgcatctcagtcacaggaagaagcagtgcaggagaagcatgatcagggattggtagatgaaaacacaaacagaggttcagctgacaatgatgcacttgaatgtggtggagtgaatcctgatgtggccataacaatgtttcatgaaactattcttacaacagaagctgtcaatatagctgggtctaaaatttcgtctgagaaccagcaaaaggaagcaccctttgaagtacactctataacagaagtcgaaggttctgaatcaaatgaatcatcaagaaaggagcctgaaggagctcttgctcttccacaagagcctggcaacctggtaaaagttaaacaagaaagtttggagaatgaaaccgagatgtccatttttagggagaatgacaaagtttctggaaaagatcaggcatcagcagagtttataattgatccttcaaatacggatgaacggagggagaatgatattgggcggcccgatgaatcagcaaaaggctgtgaaaggttaacttctgattctataaacacagttcactccaaatttggcaagtctagtaatgaagaggataagagaacacagaacaccaggtctacggatccaaaagatataaaggaatcattgggtagaattcgtgccgaaccatcaaacagggtacacacaaccagtgttgggtattactctcagcatgcagctcatgatccgatttcatcttg

SEQ ID NO: 27018 - DNA, 462 bp, Zea Mays
gttagaaacttcacaatgccgataaatgatattggtaacaatgagatatcttcgttgtggcaagaagatcctatggatcctttagctctcattgcacctaatgctgaagaagcggtaattttcacttttatgttgtctttactggcataagatcttgcaatgatatgatgcccttatctttttagttttgcttgtgttaataggtgattttgaaaggaattgaaaaaggagatatcacaaacagtttggcacaagcttgcaaagatggttctgatgacaaaaatattccaggcgtggcagcattagaacaaatgaaattaagtgagaagcagctcctcggttttgctatcaatctgcagaagttcttgaattatgtgttaattggtttttgcttcgctttatgcaggtggaagagaagatcaaacaggaaacaatgaagaattcaatggtaaaatgaccatt

SEQ ID NO: 27019 - DNA, 368 bp, Zea Mays
cacagattctggaaatctgttgcaacaacttgatgacgggtttcgctagggagtagggggtggagtcaccttgcgcttgggtataaaaatctgtggccgcgtttcctggattccaaaccaaagtcaccgtggagctcaccgtagaatagggcatgtgccgccaccacggaattcgccttaccgacgctcgtgaatttatcttggtgggtctgggggcttcgcctagggctgtagaaagcgcaccttgtctctctggttgggattgccgatcgggggccccatgattccttgccggagctcggacgctgtcgtagcaccgccatactccgtggccagggattatggctgcgcgactcgttgtaatctct

SEQ ID NO: 27020 - DNA, 463 bp, Zea Mays
cggtgatctgtcgccacaattcgtgcccgcctgggagattcgtgctgcgagaagagtagataacatcggggcggtgtgaaaatatccagtgtggggtgaatcgggtcgctggccggaccggccgtcgtgtcccgccgcggtcaattgcgctggcatcaccggagctcgtcgtttttttggccatgacacgtaacaaccactcctccacatggtaagagtcgtggcaagccaccggtcatcgtcctcagaccagttcccccttgtgcgccacggtgagcatgacacgatgaaatatcctagctggataaccgtgatcttaatcccaaaattcatgctcagttcaatcgggacctataaattgacgatgccctctgctccgcctctttgttaagcatccaacccacccctagccagcttctatcgtgcatcatcgcaccctaatttgggatttcccccaatccgg

SEQ ID NO: 27021 - DNA, 699 bp, Zea Mays
gggtgcgaagtctctactattagacaaatccgagcaaaagccgcctaagggtgcagccgaggatgcataaatacacgacatcaccctaatggtgcaaagtctattacgatcccctcaaaggtgcgaagtctgtactatctgacacggttgaacaaaaaccacctaagggcgcagccaggtacgcgtcataagcgtccaacatcgccgtggaaagcgaggtccccatcccattctacgcacaacgattacaagtcaggacaacctcacaaaaagcgcagcatgcgatgtcattgtagtttacatacacacagtgaggggcccgccaaccatattgcacaaacaaaaaaatcacatcttgttgccctccctctctattgcgagccggggagggtagcgttttcactcactaccacaacacgagagtgagggcagcagacatgctacatcggctcagccttctgaataaggcctgcctctcaaaagttaaacaacatcatcttcaactcctcgccctcaaaaagattccaaagatccccctccccaatacacgtcccggatgtcgaggatagcaaatctcgttggccgcctcaatctagccgaagacgggatcgttccatccccatccgtcgacgcctcccacttcgcgatatcacgccaacattgtgcttcgactccaccttccgccagcagcgctcttcg

SEQ ID NO: 27022 - DNA, 287 bp, Zea Mays
gatctaccggtctaatgatatctactaccagtttgctcacattgttgagaactttgtcgaatttcctactgcatctttcaagtgatctagtaaatcgatcttcatcttgtcttactgattgaggagcaccacaaatccataaaaacagacctaaagcctctattgatgacatccttttagtgcttttcagcctatttgaatccaccagcaagctatgtaatttttcaaacactatcctgctcatcctaaacatgttgtagcaactagttctgtttgctagtgttttc

SEQ ID NO: 27023 - DNA, 288 bp, Zea Mays
gaagcaatattgcaggagagcagagaaagcctggatgcagaaaagcagaaactagggcacggaacgtggaggcgtgcgacagtgcagtacatatggggttttcccgggctcggcgccacttccaaaatgttggcatgccatgtcatcgcccgactgttatttctaaaacgcgggcatgccatgtaatcacccggccgttatttctaaaacgcgggcatgccacatcaccactcggccgttatttccaaaacggccgacgcggcccattttaactcatcggttatttct

SEQ ID NO: 27024 - DNA, 401 bp, Zea Mays
gaggaggagaacatctacaaggaagccaacggtgaatagcaggaccactttgtggggatatgacctatcaccgaacattatacatcaatgttcgagacagggcacttccctaacctgttgtaggatattctgcatgcgttgggaacctacgtccgacccctgtatgagaccaggcgagtgtacgagccccctcgagcttgctactacatcactcgcattcatgtcagggtgaaggatgcaggtgatagagggttcaggactttattagctcatgagtctctaacaccgctatccacctacactgcttcggtcagcgatgctgctaggcgaactctgtggtccctcagccacacttaccagtagctgctgcataacatgaagtacagacatcttcctctgtg

SEQ ID NO: 27025 - DNA, 375 bp, Zea Mays
agtggacaaaatcaagagataggctcttcgcgaaaagcttctcttcaagactatcacgtacctaggaaccgagtgcccgaagaaggcctccaaaaaatggcccactaatcgaccagcctgcctaccaagtgactcagtgtggtggcccaaaaggtttccaaaaacagcccactaaccaaccagccctgcctgccaagtgactcagcgtggcgaaccaaaaggcctcccaaagggtcctcagcatcgaggtctctatagtgacccatacgctagaagggatggggcaatacgccagcaacacgacaactgacactttagccagcacctctgtaggagggaagattcgacctagtactatcaagccacgatggtaag

SEQ ID NO: 27026 - DNA, 288 bp, Zea Mays
acagcagtgtggatcagatcgactagcgagtagtgcagcaccagaagcaccttttattatctgccccagtcgttatctgagatctgtcatcaggcaaagtagtggtagcgaagaactgaaacatctctctgcctctgcactcggtactctgccaaagaaagtagaaacactcacacctctgcttagcccctctgtgctcgcttcgatctggtcaattctttctggaacctgtgatttctcatcctgagaagatgacgctttctggtacgccagatcgtgatgatggaa

SEQ ID NO: 27027 - DNA, 275 bp, Zea Mays
cacaagtcagccaccaatcacatccccatccttacagaactgattggagatgctatgattagcaatcctgttttgtcctgaatatctcaggtgttgcttccatgccacaaggatgcctccacttgcaccagccgatggaagaaaaactgattcactgaactctgaaccaagcatagagaggatagtgcttctggggacaatttgcattttggtctcctgaagacaaaccacttcagcccgagaagaatcaactaaagctctaacggagcttgtcg

SEQ ID NO: 27028 - DNA, 519 bp, Zea Mays
ggagactactgctgaatctagagaaggtggactagttcgattgaaatataccttcaggttcatggaccggtttgatgaatcgaatgacgactagttgaaatgcattgaagctactagcgatgagttgctcagggcatacaccagggccgaagatgatgctttgtcctcagccttcgggggtcggggcaagaagagattgaacagggttttgatgcaattggcttcgtataccctgattactgctaccccttgtggaggcaaggaagaaagagaaaaattgtcgtttgggccaccaatgttgtgccgaaaggcaagaaattgaaggttttgacccactagccatgatatatcgaaacggctgtagtgcctgaatttggtgaagggacctcctctgctatcgaagtcgctcccgccgaggctgaagccgaaggttcgactgtattgtcgaaggcacctatagtcgggtcagctgaggccaaagaaccagaattggaaaaaacagtgctgctgccaaaaatt

SEQ ID NO: 27029 - DNA, 339 bp, Zea Mays
gcgagcatgttgcaccgtcttaagtcattgccgactcaaaccgattgctccgttagtagggtatagtggccaccctaagtcgagtaagtgtgttgattccaagtctagccgaagtcaattgataaccaatagtgtgaatgcctttgagaaggaaatcttttattgatgacgtattttccaattacagagtacaacattgctctgatagctttttgagtcttgctaaggataaaacttcctgaggtgctctatattccatgagttctccacttccgtgcaatccatttgagtaagccgatatgatcttggccgagtgacctccaacaccatgaatggccc

SEQ ID NO: 27030 - DNA, 290 bp, Zea Mays
catctacatatttgggaaagcacgaaaatgtcatttgaccaaaattctgtccggaccacaataaagcgatgtaattgaacagaatatactcgtgttctggtaggataatgtacaccgaatattagagtccgacaatagaaaggttatctttgcccctagaagtgttatgcaattttgtcaaggcttgttacttctttcttcctaaccatcctaggcctaacgcatcacctttggcaattagccaactactaacaccaccataaaacaacatgatggttaggccatctccc

SEQ ID NO: 27031 - DNA, 677 bp, Zea Mays
aacggttagaggtccggggcttgcactcgaacacggagttcggtctccgcctcccacggtaccgacccccgcatccgccgcgtgcatctatatatattcggccatcgtgtccgcctaacgcctcaatcacgccacgctctctaagtccacaaagtcaccgctcgatttcctacctgcctagtgcccacctctcgagcgatcagcgcctctccatggcgctcaccaagccaccggcggcgaccgatgacgaccaagccgagcgggagtatttataaatggtaacggttagaggtctggggcttgcactcgaacacggagtccggtctccgcctcccacggtaccggcccccgcatccgccgcgtgcatctagatatattcggccatcgtgccgcctaacgcctcaatcactccacgctctctcagtccacaaagtcaccgctcgatttcctacctgcctagtgtccacctctcgagcgatcagtgcctctccatggcgctcaccaagccaccggcggtgaccgatgacgaccagaccgagcgggagtatttataaatggtaacggtaggtctggggcttgcactcgaacacggagtccagtctccgccttctacggtaccggcccccgcctccgcctcgtgcatctatatatattcggccatcgtgcctacctaacgc

SEQ ID NO: 27032 - DNA, 493 bp, Zea Mays
ctcccggtcagtgcattgtgcaatattcagcatcttctcaattgacttcaaccaatcgtctgcatcaagtggatctggcgaacttgcaaatgtaggtggcttatgactcatgaactctctatgcttgtctcggggtgggactggtggtggtggtggaggcaatggcacttgctgctgttgttgctgttgttgaagttgttgttgtagctgctgttgttgcgccctcctttcttgacatatctcatctctctcctggcgcaactcctggcgtatatcttctctttcctgacgcatttcctggcgttcttgctgcatctgggcacgcatatcagccatagtgtccgccatttgctgcatcaccgccatctgagcagcaaccagtgggtcaactccgcctggtggaggattaggaggattcatctctgcaggctgtggctgaggttgtctatatatccttcgagtatgtcggttaggaggcaaatcaattccacca

SEQ ID NO: 27033 - DNA, 377 bp, Zea Mays
ggccactgtcggtaccctgaatcaggggtaccctctactacagtatgaagacccggtgcccatacgacgttccctagccgaacggtgaacaacacctgaccccaccacgtgggcggctcaaggggcaccgcgtggcgagaaaagatggtacatcccaggatgtatcagttgtaccggacctccgtgagggagcaccggacccctgtacgcacaacccggacccccaattacggctcggaactcccaagtaagcatgccaggtccctcggatggggtccagatccctccgagtaaggtccgggccacaacagggtcccgggacaggggagaccctagcataagcaagggtctggtactgacacgtgtccaggccttat

SEQ ID NO: 27034 - DNA, 316 bp, Zea Mays
aattatgatagaagaaatgaatactcacagggcaaacaccaaatggttcgcctccctggcgaggcttatgcttatcagccattgacaacgcccttatgatattcttattaaaatactttatgtgtggagtgtcacttctgttgttgggagctgcggcatggtgcaagtggtccaaataatacagctacataacatatatatatcatgagagtaatatgcaaatgaacgtaaacacataatatatgtatgtattttcagattgcaattgattaatctaataaaagatttgccaaattaagtatgaaacttacaagaa

SEQ ID NO: 27035 - DNA, 292 bp, Zea Mays
ccaaggttggggatgtggcgagcgcgcggaggctgctcctgggattaccctgcagggatgttgtttcttggacggccatcgtatcagggtgcgtgctcaatgctatgctcgaagaggccctcggggttttcctcatgatgctggaggacggcgtcctccccaacaacgtcacgatgctgagcgtcattcaggcgtgcgctttgatgggcgcctcggaattgtttggtccagtgcacgctcttgttgtgctgttggagctcgagcatgatgcctcagtggtgaactctctcat

SEQ ID NO: 27036 - DNA, 299 bp, Zea Mays
agagacagcgcgaatttggcttcgattcaacccacggtgtgtgtgatggtcgtgcctcgccgggaatcacagggctatttatagccgtggcggtctggcgatcacctcacggccacggatagcatcgcgagcgcatgccgaccatgtcggtaggagacacagtgagggagatcatgacatgagtgccactgtggcaaaatttactagtcacgatggccgccggtgaggactctggttggactcggggaatggcgccacgtacgagttatccacccccggtgttatccactccatactgc

SEQ ID NO: 27037 - DNA, 327 bp, Zea Mays
gctagcgcaaaaagtacccaagactcaggacctacccgcggtggactgcgagttagttttctagaaaccgagggttctatttgcaaggtggcgcgaccgaaggggtatcctaagatcccaaccgttggatcggatccgagggaccagattagtttgcgttgcggtaagtgatgaagcgatcctaaccgttggtatctggatccacggcctgaaatcacccacgccaaaaatctcacccaaaccgatcgatcgcaatctaaaggttcctgttatctctatccaaagcgttacgcatgatataatctcggtcgcccattaagatctaac

SEQ ID NO: 27038 - DNA, 272 bp, Zea Mays
aaccctcggtcaccttcaacattagcaaagatgtttcccagagatcgggcgaagtcataacctccctaggtcccgcacatgtcctcgccatttcctcaatgaaacacctagaggccctcggcctcgccattatcctctttgtaccttttgcctccatcttcctcttccgagtcgccgcaatcatagccttccctttcgaggtgccttcttctgaccaggtcttcacctttttccctcggtcattcctagcatcagcagaaccacctccgggt

SEQ ID NO: 27039 - DNA, 323 bp, Zea Mays
agtcgccgatgtggcctccttcgggaatcgcggggagttggatgttgctgccatggcagttggtcaaggccgagctcgggcgaggcggagtcttctcccgaggctgaagccgtcttcgggcgtggtgttgtcttctcccgatgctgaaaccgtcttcggacgaggcagagttctctcctgagagtgaggctgtgggcgtacgcgtgcatgtcatattcggatttgttcgagaacaatagccgacgtgggggagcagtgtccgttattcgcgggcctgtgtcatcgtagtcggcgaaagtagatgggaccgctgtcccgtcgtt

SEQ ID NO: 27040 - DNA, 476 bp, Zea Mays
ctgccacggcgaaagccactaatcgctcgcactagtacaactctccttctccggctgccaccgcgccattccaaattcactggccaccgccccccggagcctataaattgagcgtgccttcgggtccgtagggtagtcaagcaccaaagcaccaagtcgtgcctccaattgctcaccagagctcgtcaatttcggatttcccccaattcggtccgaaacaccgcgccttgtgatctcaccgtggtcagcgtgttccaggtctgttcgtgctccctgctctcttgtttcagcatccttaggttctcctgatgctcctcgaccaattcgattgagttaagctaccctagatcaccgggaacacattggattgtccgttgatcgcacggtcaccatggacagagcgagttagagctccgctagtgaaattaattaaggggaaacacttattagggcttgaattaggtctcagccgaagt

SEQ ID NO: 27041 - DNA, 329 bp, Zea Mays
agcctaagtctatatatgaagtttagttggttagtctatttagttcagttggttagataagaatgtgacaattttaatttcgccaccctcttgcttagtctatgtgaccttgtgctgaatttacatagttcttattattatccatccatacatggcagctcgctcattaattcattatggcgctttcagaattgaaacttgtgccttgagaactgaagctcactcataatgtttaccaaattgcaatacattgttcagtttgtgcatagtacctgggatttgatatgaatacttcaggttacttcaatttagtcagtgtcagcttgtgg

SEQ ID NO: 27042 - DNA, 281 bp, Zea Mays
cataactatttgcatcaacttctctatcttcgtctcatcggccttgaaataaaaccattcactcttccagccagtaggccacttggtgcgatagctgaggaccggagccttcgtatccttgcgatacgcgaagttataacaaccaaaattttcatgtagaccgtcttccctggccttcgtttggtaatgtagctcgtgcactcggcaaaaagcttcagcatttgggtccatcccttggcttcaaagggcccagatgaaaatgctgagcctaacgatagtgt

SEQ ID NO: 27043 - DNA, 591 bp, Zea Mays
cgcgttttaaaaaacggcctccagcccgagccgagccagaggctctgtttcttctcccagccgcccagctctctgcgtctggcgatttccccctcgccgacgatctccaccggcggccatcttctccggccgtgctccggtgaccttgggctctcctcctcttccccctcggtgagcagcttctcctctccccttctctgctgttctctgcctgacagacagtggagctcccccctttctcacccttttgcaaatctttcaaatttctgtgaaatcccatgaatccagttggtaaaatgctttgcattatctctattgtgtatccctgcttgcttttagctccttcgggagggcattcccacctcaaatggccattttcctaaaaccctaactccccgcacaccacgtgctcggtgaaatgcccaaaccagccaaacttgctccaattgaacccaaatttttcaggcacgttcacaacacttccagtaacctacttgccaaatttcacgccaatccgagaccccaggcttaaatttcaccaaaattcccgttttgagcgatcgttttcgagccgagtgccctaattccttt

SEQ ID NO: 27044 - DNA, 617 bp, Zea Mays
gtcgcaccaaggctccagcctccaggccaagcgtcgcgctcgcacactagttgcagacttgtgcagtgcaggagcacatcaacacatcccgtcaccgctacaaggattgatcaagcattcaaggttccagctccagagtccatagaagtgtgtacacgagcacaaaaaagtattccaggtttgcggccacatgctcgcctaatcgcctacaggctacaggtatctatcaattcctctccttcaccattcgattagttgtcatatttattgatccctcataggctcgtactagaaaatccatgctattgtgtttatttattaatccatgtattccatttaatttagcggttgtggccgctacagatccttgcctagctccagccactgcccattgatgtcagcaccatgacttcctcctcactgcctcaaagttcaggcgacgacggcgacacaagaaggtgagaactgagaacataattcccactccatatttactttggaatttggatctacctgtataatcttatatgattgtggatggcttaattgttgagtgactaacgctaacccaccggtgatcctcacaaagggacacctcgaacaagaactggctacca

SEQ ID NO: 27045 - DNA, 514 bp, Zea Mays
gagacttacacccagacatgacagcaacaacatggctgcacttagttacacccgctcaagacctgcgactcaaacattagtgtgacgcacgcttcttccacgctcaccaggatggagttcctcatgtggagtatctgacaatggcggtgtaacagcatgcatgtgattagtggctacatgcatgcaatcgtgggcagtgcgtgtgtgcatataagctgaagcctgtatgcaaagcgacagtggtagtattgtgcttgtgtctagagttagtgtgcagtgtcgagagaaaagtagagtttgtgttggttctggtgtgcagtgccgtcatgaaacaagtgtgtgcctgtgttgtgagcatcctgtattcctgtgtccaccgagagaagctagcaacgcctacttgcttgtgttgtgcccaccctcttctgatctccttgagtcaagcgtaagagtgttgtgagagagagtggagttccaaggctgctaataattcacccgtgtgaccacctaaaac

SEQ ID NO: 27046 - DNA, 383 bp, Zea Mays
gaaaagtccataagtaatgtgactagtcatccagaatgagcagacaatatttattgccagaaacgctgagtacaggggatgtccggacatcactgtgaacaaggttaaaaatgcctgctgctctatgagaggagcaagaaaaaggaagtctaacatgtctacctaactgataggcatgacagaaatgatcaaaagacccccgactacaagagatgacagaattgctagacagcttcaacatcacatcatgctcgggatggccatggtggtggtgccaagtgatgaacaaggtagcagtggtcaaggcatgcggggtggaggtcgaggaaagggaggcagacaggcgaagggtgtagagcggcccagtgctgtcacatcgcgcg

SEQ ID NO: 27047 - DNA, 783 bp, Zea Mays
gtttccgaatgcgattcaataaatttcaaagatcggtgcgctttcacttgtcaatgaggcggtactacagacagtgatagataatgcgatacaatcggtggattatgcgaaattaaagcataaatgggagggatggggatggggtgtggcgaacctgaaggcgactgtactatgcgaaataatgtagggaaatggaacaaagaaggagagggggaaacgaaccagggcggagaacggcagagggcaaataatgaagcacagcgattagggtgagtgggggaggtgggggcggtcgtcgatggagatcgtaggagcgggtgacggcgaggagcggatttttttagggtttcggtggggccacgacgagtgggttgattgtggttgggtgggtctcggatattgaccatattggctcggtcggctagcgggagcgacgcgggactgtggggacccgtagtgtgcgcatgatcagttggtcagtgtgtgtacgtcgtgttcatatgaagcataaagtgttgtccaaaggatcgtaaacagtttatacaagcattaatcccgaaccacagcccgcacgtggtataaattgttgtgtgtacgttgtgttcatatggaggataatttgttgtgtaaaggatcgtaaacactgtgcgttcgattgatatgcagttgttatcatcaatttatacaagcataaaccccgaaccacaaccccacaacgacccgaccacaccgctatgtcgatttatgtaaccgttggcgtcaaaatacacatgcatacacggc

SEQ ID NO: 27048 - DNA, 293 bp, Zea Mays
ttaagagagaccatccagtttggatggccaggatgcgtgcattggaagggcagcagctgcttgagcacgaccccatagtcatgtacctcactgcatacatgctcaccctggatgcacagtatgatttattagatgattgcccgagcagaagatgcagagaagcgcaaccgtcagctccatgtggatctcaccatagttcaagcccgtgcaactgccttggaaagtcgtgaagtcattgctgttgaagccttgaagcaagccaaggatgagcacgcccagaagttgattgaggc

SEQ ID NO: 27049 - DNA, 980 bp, Zea Mays
aaaagacccaatttggaagccttcctacctctcattcagaagactgaaagaagacttgcttcaacctctatttttctttcgcaagctggcagacttcaaatggtcaacgcagtattttcttctctcccaaccttttatatgtgcaccctgaagctcccaaaaactgtgatcaaacagatcgacaaactccgaagacattgtctctggagaggggcagatataaacgcaaaaaaacttcctcaagttgcttggaaatcagtctgcaggccaaaatcccagggggggtcttggagtcatcaacattgagtggcagaataaagcgctccttatgaaatgccttcataaattctttaacagagtcaacatcccatgggtgaacatcatctgggatacccattacagtaactctctgccctcatctaaattagttggctcgttttggtggaaagacattctcaaaatccaagattcttttaaggaattcgcccaaatggagattggaaatggtaaatctacgctcctgtggcatgatcgatggaatgagcaacgtttatctgaaaagttcctggagctttggtcttttgcatctgtaaaggagctcaacatttatcaagctcggttggcttccccggatgaaatattccatacccctctttctactgaagcgttcgagcaacttctctctctgcaggacacccttgataatatacagctgcttgatcacgatgatatttggcgatgtagtgcctcttccaaccggttttcttctcagaaggtctattctcacttgactggtacccatcaaacgccccctatctttgtttggctatggaaatctaaatgtcaacccaagcacaaagtgttcttctggctagtgctcaaaaatagattgaatactcggtccctcctcaggtgtcgttctatgccattggattccttcacctgcgacaattgtattctccagattgaagaaacgccta

SEQ ID NO: 27050 - DNA, 273 bp, Zea Mays
cacagagtagtcgtacaactgtgttggacgccactccctttgaccgggcatctcacagaactggacttgaccctaccgcacatgcaacaccaccacacaccatagtagtcaccatcgctagctctgcctctccacctaggcgccacctggcgctatccataaccgcagtgccaccaccatggacgtggcccctgcctcgggagccttggatctggccaccagagcactagctttggtgccctgggccggtgccgccgccatcttcaccgccca

SEQ ID NO: 27051 - DNA, 478 bp, Zea Mays
cctaacttcaccttttgcattcgaaccattcctctgcttccctaaaatttcgagcctgctcgcttttccggaaggatcgcgatggccccaaagcggaagaggcagagtaccactgttgcaatcatcccgcccatcgaccccaacagtcagcttccatttgctggtaaccatatttctgtcatttccgaatccgatcttcttcatctcattgaagttggggttttgcttccgaaagagctctgctcttggcggattgctgcggtgtcaccgttccgacagaggatactcatgaattcgtcgtttacattccttttctcattcgctggcttgctcttcccatctcccctttctttcgtggtctccttgatttctatgagttgaacttgacgcatctaaaccgtaattccattctgcaagtttccattttcgtacatctgtgcgaggcctttctcgggattctcccccacttcgatctctg

SEQ ID NO: 27052 - DNA, 477 bp, Zea Mays
gttttaaagacgagatgtgcgaatgatcggttagtgtttcacttgtctagtcgataaacgttgtcataaataattgtgctaaaattggtcatgagaatgcagtggggacacgtatgcgtgtgtgtgccgtggtgtattatagtggtggcggcgtaagatatttgattgaggtgtgcgggtatataccgtaatgtggttatattcgcggcgaggaaagatgtatgcattgggtaacacgacacttaggtcgttgttgtataatcaaataaaggatgtattattgggcttgagtcaaaatgtggggtactagtggtacgctaggcaggcggtgtccaaataaattaaccggttgatgtggtagttgtcgtgcgtgatttattgttagtgagtagtgggattacgagttatgtaaggattatgttagaaactagtatgcggcgtgtaactgtgttcgtgtggtgaatagtaggtcagtag

SEQ ID NO: 27053 - DNA, 375 bp, Zea Mays
caaagactgcatggctagagtcgtaccagcaaacaactagagagccatcgctcacgcctaccatcctcattcttacctccaccctcattaccaaaacgaacatccataccgcccccaacatcagcagaactacaaccatgcttttccccagcaaccgcgcctacatcaccaagaaagattagcactgccaccataggcaaaccagcaaccccctctaccaccaaaacaggaagaagaattcgccaacctaaagtttagggggtcatccatatgatcactcaagggtccagtgtagaattcaataacaagcgatacaagaaagatcactaccaaagggtcaatcatgtcgctcccactagctcggtggcccagtgg

SEQ ID NO: 27054 - DNA, 322 bp, Zea Mays
gacatagagacgtcaatgatgtcgccgatgctcttcggcacccacgtcgcccgccataaagagcgaccatggaagcctaaacgatcgaggcacaaacggacaaacacaactttaccaaggctgaacaccctagtgtaccacaatatagtagctccttccttgggaagctaccggtattcgacccccaccttggcctataaaaaggaggaggtcgccaaaacatagaggacgaaggggacacacatacatacatgcacacggacgacgagaccagaagacccagaggccgaagccaaggtagcctaggcctgagagcactagt

SEQ ID NO: 27055 - DNA, 332 bp, Zea Mays
agacagggcgtggactgccatgaagcttccttgtgacaaaactgatgaagatctcttcaatgcttccacaactgtgacggtaggcaatggaaatatagctgaattctagaattctagttggatccaatgccaagcccctaagaacattgcgccaacactattcaagaaggcaaagaggaagaacatcacggtcgccaaagcgctcactaacaacaattgaattcgattatgctccccatacacgggtgagggggagtttagagagttagtctctctttggcaggccataggtaacatgcaagagcttaacggtttggaagacaacatttctt

SEQ ID NO: 27056 - DNA, 345 bp, Zea Mays
cttaaagtcaggctatcaatcaaccctgaagctgaatttcgactgacagtgaactgggacaaactttgagagcaattttgagtaagctcttcaattcactctgtcagaacaagctgaatgtgattctgatggtacagtaacttaactagatcgatgattcagtgaacctgtcgccgcccgtgagcatgcgccacaatcctcgccggtgttacgattcgtgcgctctggcgtgcggataactgtcgacggtgaaaagatctcgcgcgaggatggaattggggcactattttgccctattgtcgtacccacttgcaccggcgacgtggctgtgcgaccgcctccgtc

SEQ ID NO: 27057 - DNA, 371 bp, Zea Mays
aatagatcatatctctacaactgaccctatccacaaaatagatcatatctctaaaaccgaccctatccacaaaaccgaactcccacccttccaacacctcgccagaaaccctgattcggagtccaaacttaaaatagccgtaactttcgcctcggaactcgaatcgggcccattttttcaaatcgcacagaattaaattttgcatctgattatttccggctttgccggactctctgtttttaaaattctcaaattcggcttggaaataggacttctcattttccaaacatttattccgattttagggcaaacttgtagaaattccagaggacgcgtcattgcacaaaaaatctgaaacttggtgtgttttc

SEQ ID NO: 27058 - DNA, 318 bp, Zea Mays
cgctaggctatggcgagagaaccctctcttcgctcagaacctgtaccccaactttgctagtgcaatgaacacgccgagtgaagtcggagaggtgctggctcagatagccgacggactcctgcaaactccagacgcgaaaggctatcgacgtctgcttactcaggcagctaatcaccttctacccctcgctcacactgcaaatgacctgcgtcacaccatcaacagtcggtgagacacgtggagctccatcaacgcttcgcacgactgacggcacgaaaatgagataaggcaccgggaggcgcatgaccaggatcacgg

SEQ ID NO: 27059 - DNA, 516 bp, Zea Mays
acacgattgggtgcgctgggtgcttgaatacctagcgaagctgagggcatgctcaatttattggattcatgagcggtggcggctaatttggggaaagacgcgtggcggccgaagagggggaagagtttttggttgctcagtcgtggcgattgccgatgcaatagctcttgaggtggtaaatccagatgcgccacgattactacagcatggtaaaggactatggcgtggcacattttgggtcattggcgtaccacggcgacatcggtgatccggccacgttgcgtagctgcaggcgcgtttgataagcttcaacccgcgatcaaatccactcccttgctgatcttttcaccctcccggtactatcctgcccgagttctacacgaatcactgtgatcagcgcaaatccttgcgcggaggtcaccggcggcgaggttcactgaatctgatcctatccaatcattgtaccattggaaccgttcatcagagcgcctgacagagcagattaaaggccttggt

SEQ ID NO: 27060 - DNA, 545 bp, Zea Mays
ctgctaaccagcagagtgttgctcaactttctgccccgtttccatctggcttgtctaatgtgggatcgaccatggaccctcctactattttagcaaatctaccacaatcaacacaagcaaaaggataccttatccatcagatgccttcatcagctcctcagccatctcaacatccaaatatggccctacctcatgctcctccacagtattccaatgttccatcacatatacctatagttcatagttagtcacaacaacctttgcaaagtcctgcaataaataatcaacagttgcaaccacctttgccccaattgtcaaggccaccatctatgccgcctttacctcatcagatgcattcacaagtaccaaattcatttgggttgactcatgcaaatgctccgcagcacatgttacaacaaccaatgtttcatgtaagatatatcccaaatccatatggtcctgataactagatatcatgctctgcatactgatagatgatgtttggaattttgcagccggttgcgaatcctcaaactaatttcctc

SEQ ID NO: 27061 - DNA, 312 bp, Zea Mays
tttaatgtgttttgtttgctattgcctttaccattgcgatcctacctagatgctgtcgaggtctgccacttaaaacctcccttctcccctctcaattcgagagtggtgttttacttaccccacgcttggtcataacctcatctttgccacgtgcaaatcttgccttaactccattctttgttgtacccatactcttggttcttctatacctttacctcttctcttacacccccatctgttatcgccttcaacccttgtaatacctatatttttaccacaacactttctttgaacctagcctttggagccttc

SEQ ID NO: 27062 - DNA, 628 bp, Zea Mays
aaacaaactctcaaaaacggccacccatgtttgggtggatctccactgctgataccgatgctgatggttctttttctagtttattagcatggtgatagcccaatcgattatcgttcattccttttgtagtttattactattattattgatgacgcctgtttctgaccactcctttcggccggccaaattaactctggaatttattccatgccttcctcggccctgtttgttctgcatgtcttcaaagggttgtgaccccatatagccggatgtcagtcaattcatccatggcgatcaatccattcctcgagcaggccaaggttcttctctgggttttgaggtagggacgtaaacgtctgctggctttatattttcagaaatttatgctttatattttcagaatcactgaaacaggcatggtctacactaatatcacagttttgagtgtccacatcctgtgtatttcgatttcgtttcccttttcttttttattagcctctaacggttaaggatttttaggtgaaatattgatcagttgcattctgtaacctgcaagaaggtttaatcggtgaaccattgtaatgtttggcttcaggaaggacccatctgcgatgctcatctaattaag

SEQ ID NO: 27063 - DNA, 418 bp, Zea Mays
gcgatggcgaagcggagagtgagtgaattgtcgcgaagtggtaggcgttattgtagcgagttggagagaggtcgtcttcgcgtggatgggactgggaagcgagaaatgttgtcctcgccgattggggtgagtgtaggtgagggggagctgcgaaatctgttcgagggtgaggaactgaggataatgttgttcaactacaggagatgggtatcatcccgaaggttgagccaatgtaatatgtgatgccctcgctgtgtgtatgtaaccataattttgtgtgatgaagctgcgcgctttcgttgatcaggtcgctcctgtaggtgacttctgtacagagtcttttggaaaagacttcgattttgcgtacctattattccggctgcacccgtaggcgacttttgcgcggagtcttttggaa

SEQ ID NO: 27064 - DNA, 503 bp, Zea Mays
cttcgttctccgccaccgtgaaacgagcctcaccgtcgccagccatactccggtcagttcccgtcttctgctcccttgtttaagcgttctcatgcatctttgatgcttaccgacccacccaattgaactgggctgccaaggatcaccgggaacgcgagcgccaagccacgatgttctcggccgctgtggccagagagttctagtgcgtgattggcaaaattaagttaggggaaacctcgagtaaggtacgaattaggtgttagtcatcggagagcgccagtaatagtcccaattggccggcgtaggtgctcgccggagctcggctgggcgtgaacgccgtcggggacttcgaaccgagaataaatggaagtgcaggggtctatctgtaaacgtcagtgactttgttaaatagtgtttgacgcccgttctgattaaccgaaaccccaaggctctttttgcaaggtcaccagggcgcgggcgcgcgcgggcgcctttctccctct

SEQ ID NO: 27065 - DNA, 427 bp, Zea Mays
cgctaatgacatggttttgttagtaaaaaaagttgtacggaggcagacacttctaacttgaaggtagtagacttgctcggagtgagtagttcagacagaggcaccatgagcgtcgggtagagctccaagttgacgacgaagactcgatcaagaggatgaagaccttgtgtcgacatatggcgcaacaaagatggggacacatgggagcaacaatccagtgtctcaaagatgtgtgtagtgcttggtgacaggtgtcacatgagctgagtggatcgcacgtagtcggttgtactatctgagtacgtcgaggctgagcgaaggcggaagaagttggcggaggcctgttgatctgtggtggtggtgtgagccagctatggagacatgtgaacaagatgaccaagaagtgacgcgggaaggcaccccctcg

SEQ ID NO: 27066 - DNA, 776 bp, Zea Mays
gcgcaacttcctggtggcggcgcaggagatcggcctgccgtgcttcgaggcctccgatttggagcaggttcgtgtccaaacgagtcggggcggggcaccgccacttggctttgcttgcagctgcagcaacttctcaccgcacccttgctttctacacacacactcgcgtagcctgtgaccttgatgtgccctttttgcatttctgggcgcagggagggaagagcgccagggtggtgaactgcgtcctcgcgctgaagtcatactgtgactggaagcaatgcggtggcaccgggccgtggaagtacggggggaatcttaagccatcagtgtccggcaagtccttcgggaggaagaactctgagccgttccagaggagccaatcgatcaatgaaggtgaagtgccctatgaggaagctgggttcaatggctacgctcattttgattccagcgacatggttagcttcatactctaacttcctagttgcatcgatttctctttcttgttgcaatctagttgatttattgatcttttatatgtgttccaagcagtcaacatggcgcccccttaaaatgttggtcagtgcagttttgtccgacaaaaggccagatgaagttccacaggtatactaatttgcttcactactttttgtaagttacctgttcaatggacttatataatcgcttttattgttttttatcctatgggattaccagttccatgatgtttttattctgttgtttgtatgcagctcttggagtccatgctgagcaaactt

SEQ ID NO: 27067 - DNA, 759 bp, Zea Mays
ggatggtgcgcgaggcgatggcggttttcgctgggatgtggcctgatggctgtgcccctgattcgcacgtctacagcataatggtgcacgggttatgtggggcaggacgagctggagaggcggttgcgctgctcacagacgcaatggggaagggatttgtgccgaatgttgctgtatacaatgctttgatcgatggctactgcagtactggggacttggagctcgcaattgacatcttcaaggggatgcagagtaaagggtgcttgccgaacgtccgcacatatactcagctgatatgtgggttttgcaagtcggggaaagtagagagggccatggtactatacagtcggatgattgaggcaggtttagctccaaatgtggtgacatacacaaccttaatccagggacagtgcagcgaggggcacttggaacatgcttttaggctgcttcattcaatggaggcttgtgggctggcccctaatgagtggacttgcttagtgctgattgatgctttgtgcaaacatgggagaattgaggaagctcagcagtttctcgggtctcttgttcagaagggaattaaggtgaatcaggttatctacaccagtatgatagatgcattgtgcaagtcgggaaagtttgatggtgctcataatctgatgcagaaaataatcacagaagggtttgtgccagacgcccacatgtacagttcgcttattgatggactatgcagggaaaacaagctgttggaagcaatatcac

SEQ ID NO: 27068 - DNA, 600 bp, Zea Mays
ctaaaaagccatttcagctgctggtgtccacttaaaagcccctttctgtagtaacttcgtgagtggccgagcaatgatcccatacccttgcacaaagcgcctgtagtaccctgtcaaccccagaaagcctctcaaatccgtgacattctgtgggtgcggccacttgagcatagcgtcggttttctgagggtcagtagccacgccctcacccgatataatatgacccaaataaatcagctcctttttaccaaacacacatttcttcgctttgagatagaatttgtggtcccttaaagcagcaaagaccaacctgagatgctccaaatgagaaggccaagtggaactataaatcaatatatcatcaataaagaccataacaaatttccgaaggaaaggagctaacaccaaattcatcgcacactggaatgtagctggagcgttagtaagtccgaaaggcatgactcgaaattgataatggccctggtgagttttaaacgcagtcttaaactcttcagagggtcccatgcgaatctgatgataccccgaagtcatgtccagactggtaaagaactgagtaccagcaagctcatccaaaatctc

SEQ ID NO: 27069 - DNA, 329 bp, Zea Mays
ggcgagagggaagacagccgccgggacctgctgctccatccccgcgctccgtgtccgctctccctgctgctccatccccgcgctccgttgcatttggactgaaatttagctgaatttggctcgttgcggacttgtagctgagatttagctgaatttggactgaaataactgctcaaatatctgaatgtaactgaatgtagctgaaaaggcaaaactgtgcacctatctgaatgtaactaaatgtagctgaaaaggcaaaactgtgcacctatctgaatgtaactgaatgtttgaactgctcaaatatctgactgaatgtttgaactgct

SEQ ID NO: 27070 - DNA, 366 bp, Zea Mays
gaagctattagtgatgagctacttggggcatactccaaggccgaagataatgctttgtccacaactttgggggtcggggcaagaaaagattgaatagggtatttgatgctattggcttcgtataccctgattatcgctacccgctgcgagggcaagggaaaaatagaaaacctgcctcttcggtcaccccagctgagccaaagagcaaaaaggtgaaggttctgacccaccggtcgcgttatattgaaccggccgtagtacctgaatttggcgtaggaacctcttcagctgccgaagcaaaacaaactgctccgattgtgcaaagcgctgaagagccaactatagtgtcgaaggtgcctacagtcg

SEQ ID NO: 27071 - DNA, 362 bp, Zea Mays
tgactgctgaagctgttgttactgactttgttttcaagaatattcagcctttgaaagacagggcctacccagcttatctgtatcgagggctagccgactcaactcgggttactaacagaagaattccctctgcagacttggtgagtcgactggagatgatccttaggggtaaagtgtcaaatgttggtgctcctgtggcatactcggcctggaacctgcctcctcccaaagccttcaccctttttgtgtcgaaatccacctattactgatggcagtttgggccttagagtgcgaccctctgctgaagaagttagtgctttggttgcctcgcttggggagattcctgatgacgaacggcaggt

SEQ ID NO: 27072 - DNA, 312 bp, Zea Mays
tagcggtagtcggggtacataaagccaatagcatcaaagactctgttcagtcttttcttcccccgacctccgaaggctgcggacagagcattatcttcggctttgctatatattccaagtagctcgttgctgataacctcgatactttttagccaatcatcatttggctcatcaaaccggtctctgaacctgaaagtatattttaatcgaactaacccacctttagttgtttcagcagtagtttccttcggcatatcccagttttccacaagcggccataccctgaaggctatatgtttttgcattaaatcc

SEQ ID NO: 27073 - DNA, 386 bp, Zea Mays
ggcgccgccgtgaagatgggggctgccgtggttgggttgagttggggaagatgatcatctgaacgctcatctcaaaatggacgaccgtgatggcaacgccgcatacctgctcgcgttgttacatgctgaccgtagatcgtcttatggagggatgagaggtgatcctggaattttaatatctagggcattgattttagatccaagggctcctactgcttaccggttcactgaaatcgtgatctaatctgggccctcggcttttgatcggacgaccctgattgactcgtaccccttcgcgagtgaacgtttacgtatgagactctaagaaatcctgtattaaacccgcagtccgtcccagtgttagctctgagtctgggaaatatttc

SEQ ID NO: 27074 - DNA, 388 bp, Zea Mays
cttggctgccgccggtgtctggtgcgtgcgtgaagaagacatgtccaggggcgttgatctgttaacgagtggcgcagattaaatggtgaatgccgattaggtcagatgtagtgtgggtcgtccgattctgatcgatcgggtgaaagtcaatttagggtatttaaatctagaacgtccgaatcggatctattggctcagattgcataacggttcgctggggggtagatctaatcggggccgctagcggttgatcggacggcccagatacaaccataccccttcggcgtgtacatttcttaaagaacccttctgtttatagggattcaacccgtggtccgtcctggcagatgactgagtctaaggagtttttatagatcgacccctgtgc

SEQ ID NO: 27075 - DNA, 300 bp, Zea Mays
ctccgagacaggcgcatcaagggtatcaaggtcataagatggcatccacagagcatccagatcaacagtaacatcccttattcagttccaaggagcccttgataaaaatcaaagaaggctgctgccttgccttcatgggcagtccagatttgcccatcctctgagtgtaccgctgcaatgaaattcttcttcctgaaccttgtttgtgcatgaaaaagagaggtattggcatcaccttctttgatccacccaatccgcgatttcagccttgccatggtacgagagagagagagagagaga

SEQ ID NO: 27076 - DNA, 304 bp, Zea Mays
gagtcaggcaaaggtcctgtgcgccgtcgcagatcttagggaggtcagtgcgccgtcgctattccctttgtctctgtgcgccctcgctcatcttctcttcgtctctgtgtgccatagctcctcttcccttcatcgaattccctggtggcgtggatattctggatagttccctgcatagttcctagcagcacaacgacataagtcagagggggagaagccaatcatcatccgatacgtttcttgatttcctcttcttgttgcctccgatcgacgaacactagggatgcgcttcgaaccagtagcc

SEQ ID NO: 27077 - DNA, 310 bp, Zea Mays
gcaacgaggtacccgatgctcctcatacaactgcaccgtgtacaaagggggcgtagggtaaccggcggagttaagcacttcccacaagatggaagggaaggcatcgtgagagaggaagtcaaggctgaaacgagtgtctcctctgctggcgggggtgggtgaattcatctacggaagggtatcagatgtaaagattatggtggaaggaaaaataaaagagcctggatggtttgaaaagaagtgggttagctcgaatttttacttctttaattcttaatccttcaaaattttataatgcatgcatgctgaa

SEQ ID NO: 27078 - DNA, 384 bp, Zea Mays
ttaaagctgacaggtcagacttggaggtgctcaaagggattctcaacgtgttcgaggggtgctctgggctaaggatcaactatgacaaaacagaaatctacccaattcgttacccgacaccattatggcatgcgcttatggaggtgtttctaggcaaatactctagcctccccgggaagtacctcgggttaccccttcatttcaaaaaagttagaagaaatgaccttcaacctttaatagaaaaaatcaacaacaggttggcaggctggaaaggcaaattgctgtcaaaggccggtagagaaactcttgttaaagcggtgctatccgcacaaccaatctaccatttaacggtttttccacctcaaaaatggctgctgcaaacaa

SEQ ID NO: 27079 - DNA, 295 bp, Zea Mays
accgtacccacttgctctgcgggcggccgagatgatcctctccggcgttggccgcttgccgctagtgcgccacatagtcagtggtgttaccacgtcgcagtaaaccgccttaggtagtttgtccatcgcctgagacgttgccccggtgaaagccacgatagtccgcgccggtgactcacccctctctccggtcgccagccttcttcatcccaaattcgaacccaccgctcctggaggctataaattgagtgcattgttagctccactaggttgttacgaagccatagcaccagcc

SEQ ID NO: 27080 - DNA, 279 bp, Zea Mays
atgccacccggatctagcgctgccaactactagtagcgcatgccgtaagaagctagtgccactgcctcgctgggaggcacgtcaccactgggtgtgctgatgtcctcaatcctcatgattgagtgctaccgcttggatctgaactctgggacttgggagatcatcttgcgcagctgctgaaggttctgagataggtgcactctagctatgctgaccggtcagttcctggctgcttggtcatttagatcgtcgctttccttatgttttgttgaaattgat

SEQ ID NO: 27081 - DNA, 280 bp, Zea Mays
gctccagccgctgaagctgtcggtacggtatgtttctaagactgaacaatttcaatggaacccagaaaaatccatatcatctactcctctgaacccttttgcagaggcacccagggatcgggtttgagtagaagtattcctcctgccttgggcttgccccacgcaatctctcgtacggacctccgagtctattctcatgttgcttcctcaccacagtctggaactcagtccaggacatagaaccttcatccagcttgtcaataagctccacaaacttcag

SEQ ID NO: 27082 - DNA, 565 bp, Zea Mays
gacagaggtactcatggacagtgagatagagggatccgaactggtaccaggctcaggtgctccagatttgtcttttggtgatggggccgtagttagcaagatttcaagtttgttaactcctgaaggcttagcacttgcggcagtgccggaggcagtggttggctcctctgtcatgaagagaagtaagaggagagcagcatcaagcgcaggtgactccattgtgagagcttccaagcttaaggctgcatggaatttggacactgcgttcagtgaaggtatggtgcactcatcttctgttacaaattttgatcacaatgaagttctttcaaacctacagtcattaggcttttctttccataatgaatctgttgggttacgcaagtttgtagaatttctggttaataataaaaattctgggcctagtttgcaggttagtcatgatgtttttagtagagctatagaaaaaggcgagagagagttgttagaagaagcagagcttgataagctcatgttaagtaatctctgtagcgtggttttagaggaggtgatggacgcacacagtgag

SEQ ID NO: 27083 - DNA, 315 bp, Zea Mays
aaatgatccttagaggtaaagtatcaaataatggtgctcctgttgcatattctgcttggaatctgcctccttctaagtcctttttcgattttgtgtccaatcctcctgctggcgacagtggtttgggtcttagagtgtgaccctctctcgaagaagttgaggttctggttgcttcacttggtgatcttcccaacgatgacaagcaagttcactttgagatgcctatgagtctaggtgatgcagagataagtgctatgctggacatgttggctgaggattcatctgactcggtccctgttgaaacaatggctgttg

SEQ ID NO: 27084 - DNA, 404 bp, Zea Mays
ggaacaccaacgaacgtggactccaaactccgtcttcatcggggaccgctggctccacagcatgaaggtccaacaccttcggcaactccacgggagagcggcaccatgtactcaacctgatgaccgacaagtcctccccgctgatagaatccgggtgtagtccctgaaccaggcaatatggaccaagcaaaacctccgctgtctccagtccccaaaggtgagcagggataccacggagctcgacgtcaatgagggaagacaagacactgcctcccgaagcaaaagcctgcctagtccatctcttaatatgcaacctcaatggaggggcaacgagcgacggtcctccactaaacacctgcccagccagctcctccgaggggaagaggacaataaaagaatctggc

SEQ ID NO: 27085 - DNA, 365 bp, Zea Mays
ctacctgccgacctcaggcttggggcaccaaggctggtattcgaaagcatagctgaagctgaagctaccaggctagaggatattgatgtgctagaggaagagcgattgaacacaataattcagtcgtccagataccaacagaccttgaggcgctatcatgataaagccatacgacaccagtcctttgtagtgggagacctggtcctttgccgaattctaacgggggaaggatgacacaagttgtcaccactatgggaagggctattcattgtgtcagaggtcacccggccaggatcataccggcttactcaaatggatggtgcggaagtagggaattcatgcaacatagagcatcttagaaagtt

SEQ ID NO: 27086 - DNA, 384 bp, Zea Mays
ctcttggggcactaggcgtcaaactagggacgctcatcagctttctctgtcgcgggtggatcgccattgccactttcggccggcatgggggatgaaaggggtgcaccatctgatcctacgccaatggccatgatttgtggcagggtaccggatcggtgggtttgatgacagccatgggatgcggatcgggtggctatggacaaacgtgacatggtgaagcgctggccattggatctccaatccaacggtccctaatgtgtatgggttcataaaagaagtccatgtaatctgcgccgttaatcctgcatccagcggtgctcgttgtctgataccctattggcttggcgactttgcataagagccctcgtaaaactagcaaaccaa

SEQ ID NO: 27087 - DNA, 412 bp, Zea Mays
ttgagttccatcttgttttgcaatcaaggcacaacttcttagttatagtgtctttcacaaatttagcaatttcttccaatttttcaactctttttggtgttgctgtccaaaaagctacactatcatgaatcctttcaatagccttatgtatgatatctaaaccatccttcacaatcaagttgagaatatgggcgcaacaccgaatgtgcaatgtgctaccctttaacataagtttatctttccctatctttctcactaacaagtctatgaccttatcatttgtagaaaaattgtcaacagtcggagttgataccttctcatcaagattccatgcaactaaggattcattcaactcttcagcaataacttcaacagtatgtggacttggcacataaatgaacctacaatagtg

SEQ ID NO: 27088 - DNA, 336 bp, Zea Mays
aaatcgcaccaaagtttccaaagctaaaggacacaatggttttattatttttatttctaaatctgatcagaatggcaaagaatcctctgtatcaaaaatgcattttcttgagttggcaggtatgtactttgcatacgtgaactgcaattttatattctacattatatgactaaataaaattttattctttaatttttattagaccatatcaatgataagcaaaagagccatggtgaaagatttgttcaacaaaattccaagaagtccttatatgccgtgatggatgttgtgcaagctctaaacagccaccagagcttcataccctatagaaaaagc

SEQ ID NO: 27089 - DNA, 373 bp, Zea Mays
tcattttctaattacttttccctggttttctagtttcctggactaggtgcaaaataaccgaaagcgtagggtttaaatcaaaagattcaccagactccagctacacctgcacgaggactacgggttggttatgtggaaggccagggtctcatacgcaacattctctggccgaatcggtacatgccgatctcaaccgcccgatcagcgatgtggggtcacgattagatctaggttgacccacaacccgcacacgacgactgtccttgaattgtggatccacggtcaggattggtcgcacgaaggaggtatcacgccgttaatcacggtcgtccatccagccacctacggtcatggtcaacactcccattagccg

SEQ ID NO: 27090 - DNA, 317 bp, Zea Mays
gggacaaaggtgtccttttggaatgatgcgtgggtgcaagggttaagaccgaaggacattgcgcctctcattttcaatgtgtcccgaagaaagaacaaatctttgagtgaagcgttgtggaatcatacttggatttgggacctcaacctgttttctgttgaggtgacagagcaacacattgtggagtactgtagcctttggtcaattttgcaaagaatatccttgcaaccgggtatttgcgactctattagttggaaactctcagaagaccgacaatattcggcgaaatcagcataccttgcccaattcctcggctc

SEQ ID NO: 27091 - DNA, 280 bp, Zea Mays
tagtggtcaccctaagtcgagtaagcgtgcaaattggtaataaatagttcgagtacccttgagaatgagatctttttattgatgatgtattttccgattacaaaatataatgctgccccgatagcttttgaaatctagctaggggtaaaacttcctgagatgctctatattccatgaattccctatttccgtgccatccatctgagtaagccgatatgatcctggccaagtgacttctgctaccatgaatggcccttcccatagtgggacaatttgtgtc

SEQ ID NO: 27092 - DNA, 663 bp, Zea Mays
gttgggatgggtagcggaaggaggcccgttggatgtaggtgctccgatttatacctttggcgtgtggcgcaggcgcgcacaaaatcctgaacgacacgacgcatgtcggggaagtgaaagtctcggcgaaaacgatgcaaggtgcgttgcaccccttcgtggtcgtcctcatgtactgccgccaccaactcctgcaggagcggcgatgttggtggcacgtacagccggtcgtcgtaggtcaccaagtcgtcggtgagagcccatggggccgaacgagatccagcaacaaactcctcgcggagggttactagtgccagatcggaggcctgaacgtcgtggagacgtgtgatgaagtcgaagcgcggtgcggagacagcgagaaccgcgtcgttgttagcctcctctgtatcgcagcgggagagggcatccgccaccgtcttgagggcacttgatttatattcgacggcgaagttgaagccgaggaacttgccgacctaatgatgttgcgagatcatggcgaggcgttgatcaagtagaaatttaaggctataatggtctgtccgcaccgtgaaacgtcggccccacaggtacaaccgccaatttcgaatggcttgcacaagaccgatgagttcctgctcataggcagctagggatcgatgccag

SEQ ID NO: 27093 - DNA, 304 bp, Zea Mays
gcgatctctatgccttaccagctgatcaattggcataaattaggaaaagattccaaaaaccagcatgccacgctcacttctgcaaatagcaactgttgaattctaatgtcatagctttcaacgccaaggacacattctaatatcctaccgagtatttgagcgcactgatcacacacacatatagttcacaaatgcattcagtatcttctaaacacaacaaaacttctctactcggcaatgtctttcgcaggagaaatcgaggaggaagggcgactcgaagcatcaggcgtagccttaacatccg

SEQ ID NO: 27094 - DNA, 624 bp, Zea Mays
aaatctgaagctgaatttgtggtcttcatgggaataaaatgcgcagacttagtcaagcgatccactaccacccatatagcatctctgcctcgaggagaacgaggtaaacccaccacaaaatccatggtgatatgctcccatttccactccggaatttccaatggcttcagtaaacctgcaggccgcttatgctcggccttcacgcgctgacatacttcagaggcggccacatacttagaaacgtcaaccttcatccgcttccaccagaagttttgcttcagatctcggtacatcttggtttcgccagggtgaacggtgtaaggtgttttatgagcttctctcaatatatccatcttcacctctgatttctgaggcacacaaaggcgacccctgaaacgaaccaaatcattctcatcgatggagaactcccggtgtttaccatcgccaaccctctttcgagcttcctgcaataaacgatcctactgctgagccgcacgcactctctccatgagggaagattgaataagcatatgagtctcctcactagcggtgccgacatagcacaaggcgatccccaaatggtccagatcagtaatcaactgcaacacaacttttggaacctcg

SEQ ID NO: 27095 - DNA, 566 bp, Zea Mays
cgaggacgttcaagtagcaataaaggagaagaaataatgttacaggagcttgttccatgataggagcatggtcaacatagataggtataaggtagcaaagaagactgcaaggcaagctatgagtgaggcaaagggtcaagcctatgatgatctttaccaaagactaagtacaaaggaaggggagaaggatgtctataagatggctaggattcgggaaaggaagacgagggacctaaaccaagttaaatgcattaaggatgagatggatcaacccttggtgagaggacaagacatcaaacataggtggcagaggtattttgacaatcttttcaatggtgagaatgagactatggacacccaattggatgactcctttgatgatttaaatagatgctttgtacgcaggacccaagaatcagaggtcaaagaagctttaaagaggatgaaagggggcaaggcgatgggcccggatggtatcccaatagaggtgtggaaatgccttggggatattgctatagtttggctaaccatgttgttcaaccatatttttcgatcaaacaagatgc

SEQ ID NO: 27096 - DNA, 716 bp, Zea Mays
ctgggctcgtggaacgtgttactggtggatcggcgctgggactgcctcggacgtcgactgaattcctcgccggagctcaaccgatcccaccattccgccactcgccgtggtcgggttcgtctgcgacaaactgcgaggtaattggtcattgattgcatttgttggatgtagagcatcatgtagcaccgtcaaaatagggcgttaggcgttgtaccgagagcttggggtcgccgggcatgccttgccgtcgtgggtgctgtccgcgccgccgtcgcgtttcgtcgccagggatggtggataatctcggtcatctgattgatcatcgacggttaggattacaagtgcgtaccgattcgccccctgctcatctcagccattgatcggagcacgagcgggtgagatcgtgctctggcgtttatgtttgcggagcaaatatgggccgtaggatctagatccaaggctccacattgagtaccggttcagaggagatcagatctaatctatgccgcacgttgttgatcgagcggccagtgctatccgatacccgttcacctggataatttgcagatgaaacctcatagatttagagattagaacccgccgtccctctccactgtacgctgtgtctcaagaaatttaccccgtagcccctgtactttccaggaattgaggcctagtccagagatgacttaaaatcgaataaatgaatagaaaat

SEQ ID NO: 27097 - DNA, 906 bp, Zea Mays
gtccaaacctctacgagctagacgatcagtcgtccaacaatgattaatagaggctagccaaatgaagaagccttgttaaacagaggttggattgctgatattagaggggcattaactgtgggagctttgactgactatcttcacctttggaactctttatctggtatggtgttgcaacctaatactaaggataaacatattttttcagttgcccctgatatccaatattctgctagttcgtatacaatggcctctttttggatctgtttcctttgaacattatcaaaggatctagaagtcttgggcacccccaaatgtaagttcttttttgttgttggtggctcataatagatgctggactgctgacaggctggaaaaaagaggcttgaatcaccctcctagatgccccatttgtgattaagagccagagaccaaccatttgctggtatcttgtgttttctcaagggtgtgctggtataacattctaagaaagtttgggtcctcttcatgatgacactcacttcctattgtggtggaaaagaatttcagccattgtgtctggcttgacaaggattggactctctgctcattcttggggcatggttgatttggaagcataggaacggagcgatatttgatggtgtgtcaccaagcctcaccatgctcttggattttgtcaatgagaagagggagaaatggcaagctgctggagcaaagggtctctcctttttggttgctcccagtaccagtggtggagggctgcagtctcggtgtttttatggatagttttgtgtatgcttgtttttggccgccgtagcgagaggtttgtatttgggtgctcctttgggcccctttttcttcttatctccggttgggccgttacagagtggaccgttgacgaggccc

SEQ ID NO: 27098 - DNA, 349 bp, Zea Mays
atcgacgatgagaaaaagggaaaagtgtggcggctagccggattggtgtctagctcaacgacggtgatgatttttctaccccgcgacgttatccatttaccctgggcacgaatcgagatgccggcggcacgaatcgcgtcggagagatcatcggcggcgaggttctgaaccttatcctcccggggcactgtaccatggcgaggatcattcagtgcacctgacagccaaagtttagggcgaattttctctcaattttatgtagtaacatgatcatcaccctttagcaaagttatagctctaagatccagctacaatattgttatagcaatcctaagcaaattcttgctcg

SEQ ID NO: 27099 - DNA, 617 bp, Zea Mays
agtacatcgtgcatgtgctctctagcgtctatgacgagaccgtcaacataacaagaaggaacgtgatgctgatcagcgatggggtcagtgccaccgtcatcatagggaacaagagcaatgcaactggcgtccccatgaacatgacggtgacagtgagtgagtaactctggcgatcgatatttcactccagttgagttgtcatgcatgcatactgtaaatcagaactattaatttgttgctgctgctgcagatgccttgggtcacggcttcatagcatagaacctgacaatcagaaacatggcagggccagaaaggaggtaggacatggcgctaaggtcaaattcgaacaagtcggtcgtctaccggtgcagcatggaaggtcatgaggacaccttgtatgtggagaacgggatctagttctacctacagaccttgatctggggcaccgtgaacttaatttgtgtttggcaatgcccaggccatgttccagagctgcccgctgctggtgcgccgcccaccgaaaggcaagcacaatgtgttgacggcgtaaggctgcaacaacgccagccgtgagtccaacttctcgttccacatgtgcaccgtagaagcggcaccgg

SEQ ID NO: 27100 - DNA, 297 bp, Zea Mays
agttgatggaactgcctctttctcgggagatctctgggcccaggatgtcttcactggcgctggttacgtctgccagctccagatcattcactcctggtccttgtcctcttaggatgatgatcagtactcctagtccgggatgtcttcctctgggccggggatatatattactgtcactggtggtcaatgtttggtcaattagggggaaagcctggctacccaaaaaaggtggcggtttaggtgtacatgacctccagctccagtccagctgcagtgcaactgcttcatcgagctcac

SEQ ID NO: 27101 - DNA, 327 bp, Zea Mays
cgggaacgctctgcctcctcccccttcctgctgttgaggttgtcgaggttctctgggtcctcctcatggtgggggaggtggtagaggttggaagggtcggccattcccaacggagtgcttgaagtctctgcagttccagagggtatgacgcatatccttgtggtacgggcactgggcgttgaggatgtcgtccaatgttcgttcgcctctgcggggtggccctcgggcacgagagacgggtggtccaacgacatggacttcttcacgaggcctcttctcccagcgcttgtcggtttgctggttcgcgtcgcgccgtggtgcagatgg

SEQ ID NO: 27102 - DNA, 552 bp, Zea Mays
gtccgtttcgagtccgacgtgccgagcgacgctgggtccgtccgcttctctggctctgtgatcatttcgattttgttttttttcgggtagagaaaaccaactgcgtacggctagtgctgtccttgcggaaagcagaggtttgtcatggtatctgcttgtcgtctgatgcccgaggcacatactgtgtgatttcctatgatgtctgggtgatggcactggtagtagactactagcgcatgtcgggggaattactttatttatgcgtggtcgtagggtgtccgaaggcgatgttggatgcgtacgaagtcatgtgttctctgctctgcgtttcaccggcactgggttgacgagggagggatagtttcgcctgtctagcttagctgctgtatgggcattttggtggtggggaagaaagcctaagtaattgatcactaaacattgataaacagtaccaaaaattaccgtatagatagacagtgaaaattacgttgggcagcttgctcttaattaagctccgcctccggctgtaggtctgcttcctcgaaatggata

SEQ ID NO: 27103 - DNA, 415 bp, Zea Mays
cggatgtgtatcattaaatatttcctctgtctcctttctctgctctcctttgttcttaggtgctgcaatttgtgcttttgagaccgtgttagacccaatggacaccatcggggcatggagtattttaggttaactgctttgctggttgctcctttgtctttctcctcatttgtcttagatgatttaccaaacatcattagcccttcattgttcccctgtatgacgacatctgttgtacccatcttgatgatatcttcgcctgttgtcctcttggagctcgtagatattgtctctccacgtttccttgtcgaatcggtcggccttcgtggtcgagtagtccggcaatcttgctggacctatgactagggaccagtttgaggtgaactcgatcgatcttgtactggtggtgtcaacc

SEQ ID NO: 27104 - DNA, 343 bp, Zea Mays
gtagcgggtgcttcggcttagcaaagaactctagttttactgcgcacacttaatttgagaggagggggcagaggtagcgcgaattcggcttcgattcaactcactatgtgtgtgatggtcacacctcgccgtggaccaccgtgctatttataaccacggcgacccgacagacgatctccagccacggatagcattgctagcgcatgcataccacgtcgataggaagcacagtgaggcagatcgcggcatgagtgacaccgcggcgaaagttaccgagtcacggtggccgccgatgaagaacttcggctggactcgggagatggcgccacgtacgagttatcca

SEQ ID NO: 27105 - DNA, 1009 bp, Zea Mays
aagaagagcgccattttgatagagatcggaaccttggatccggtttagctagtcgtgatgttcccgatgaggccaaggcttttcctgtgaagtcagtaacgtcaaagggttcaggtgaaaggagtgatctttcttcatcaaagcaaaaaaatgtctcacatcataaccatttggaaaattccaagaaagcaaggcaagattatgtaggttttcctgaagacgagagcaaggaatattttcaccagtcagatgtgcaaagatcagatttgtctagtaagaagaggatagtgaagaaatgggaggagagtcagtacaatccagtagctcaggtaagcaaaggagctatcaaggaaacctatagggatcagaacttaaaggaagcaaagttgatgtcattgaattctgaagaactgttttctatgacgagctccaaaccaccgaaagctcaacatgctgatcaggttttgttttatgatggggggcgtacgaacagcgagttagttgaggataacacacactttagtggcaaaacaggtctccctgagcaagaaaatagtctttctgataaggctttagacttgggcaaacctgctagtgatgtggcctatattcagacttcagctgtaacttcaagttcttcaaaggcttcagtctcacaaaaaaagaagcagaccactcaagctatgaagacatcgtcaattgagtctctttctttgtcaccacagagaaactctaacattgacaatgtctctgcctctcatagtagagtttcaggtaaggatggatctctgaatgctaactcaagcactgtgccggccatggcaaaacaactaaatactcaagttggtgtagcagtcaatgatcaatggtctagtgaacctattttggttggttcttcccgaagaaaatctgatagagataatggacaggttcagttaactcaaggtcatgcctctgatggtattcatcctgaaaggggtttgaatgaggacctgcagcctgaatctgg

SEQ ID NO: 27106 - DNA, 376 bp, Zea Mays
gtagcgaataggtagctggtcaaacacgtagttgatgaagccgttgaggcccgcactaccgtcgatgaggaccccgtgcaacttgatgttggcaaccatcgaggatatgatgataggaaggattttggccctagccatgttgtcaggatagtcaaaagaatcaaaggtaattcgagtggatgctaattttagaggcctagacccatgtggcttcggggcaacaacagcgatgtcccagtgtaacgtcttgatagcccacttggagaccaggctagctataccaccgaagatgatgaccatggtgtaaaaggcctcctataagtcgaggtcctcgattggggctagcatcgtcaacccaccaggggctgagctctcc

SEQ ID NO: 27107 - DNA, 559 bp, Zea Mays
gtcgtcctccggatgggctggtggaagaaggtgatcgataaccctccatgtcggtcgtgcgaggtatgtcgttcatgatccgagccagtacactgtcgacctaactaagagtctacatgtcccgagcgaactcaagctacagattccgtgggagaggtagacgatcgcacaggagcctagcgttgcattcagccatctcaagctcacgctcctgagcgatgtggtggttcctgtgcctaccattcatttgcatgtggaatcccctctcgttcagggactcatcaacctcgaacccctcgtccctagaaataggttgagttgggtcctgcttaccgatttcgatggagacgtgcatcgcgcttgcgaaggttcctccccttgtatggtgggctcttcgtcagagatgggatcattgtctacccccttgatgaataggacgtcggggtagtagaggggaggctctgcctccactagcttgatgattggacccgcgggccgagtgaccatggagttaatcaatcgtgttctaggggtcttgatggtggtagggcccttgact

SEQ ID NO: 27108 - DNA, 445 bp, Zea Mays
aatcagcggctagctgttttgcttgctgaatggctgactgaatgtgcgtgctacagtgaggtaggtggatgttctggacttctggtaggtgcatattatttctggtgaatgttttgctagttgtttacatttgtgaatggtaaatgtattttgggctgctttgcttgttgcaatcagcggctagctatttttgttcgaggtgcattttaaattgtaggtgagaatgtgagttgtgagatcaatgacttggatgtttgctagcgttgccaggctacctgggatgctgccggtcagaaggttccgagcagccaggaagtaaacaagcgaggagaggtctgggaactgggatcgggccgtcgaggctgttcgtggaatttgggacaggcatgatcatgggaggatctgtctaagtgtctactgtctagtgaaaaccgctaaaacattt

SEQ ID NO: 27109 - DNA, 461 bp, Zea Mays
tattaagtgggcttactttatataagctcttaccaaactaggcagcaagtagtgaatgtaaaaatagttcagtaattagggggggggggtattattgctcccagatttcacagatctatatgattattgctcccagatttcatcagcaacgaatatggaatatcatcctatccttaattcagaaagatagatagataccacatatttattgttaccttcatattattagataaccactgccaagacatattaacaaataggtctgaaatgttactggaacacaatacaaaaacacaacggttctttcaacggatgccttaagagaacatgcggggccaatgtgcaaatgttcatctgcatcagtacttccccgcacaagatgtggaccatgcaaggatatcaatgaattatgaaattaccaaagcggcaggatgtgaaccatgtggttcccgcaagatgaa

SEQ ID NO: 27110 - DNA, 717 bp, Zea Mays
cctctgcttcgctcaagttgcctcctctacaaaaaccagcaatagctataccataggtgagtgaattaggttcgagcccttgatccatcatgtgctctagaatgtcaaataccttcataacaaggccattcctgctatatccactggccaatatgttatatgtaactacatctggttttatatttgccttcagcatctcctcaaatacttgccaggcattttctgtttctcctttcagacaataaccattgatcaggcatgtatagtggattttgtctggtaccaaacttccagccatcatttcattcagtagcttaactgcctcattcatgttcccaagcttgcaataagcatccatagcaatgttataaagcacgccatcaagatggacccctaaatctctaaatttctggaagtgcacaattacttcagataccatgcctaacttcctgaggcactgtagaaggtaagcaacaatgtaacaatttatctcaatgccatgggataccatgtcttcaacatgataccatgccttctctaggttacccattttgcaatgactatgaatgagatagctatagctatatagatcaggggcagatccatgtctggtcttgatctccaagaccttttcagcctccttcagtttcatttctttgcatagtccatcgattaccatattataagccatggcttcaattggaaccctctcttggg

SEQ ID NO: 27111 - DNA, 456 bp, Zea Mays
ccttccgctactatctctactccacctcccacttcaccagctcttgtcactccagagccatccactacttccactgtacccagcacctccaccactccagattccactgctcccctcccgctcccatttccgctccgcccattacaccacctcgctttagggagcgtgacaagactgaggtgagaccactagctgctgatccgcgtctacttgaccttcagcgtgctactgctgcccaggtacattggttcagacacgtacctgtggagtcttggttgctagctcagagggaccctgcggctgctccactcttcagtaccaggactcaggagtccttcttcagggcacaactgacagatcagattgctttgcaagcgcaccgacttttggatctacctgcttttctgttagccaccggtgccgactcagaggctcaccttacttatctgccaagtc

SEQ ID NO: 27112 - DNA, 318 bp, Zea Mays
gagagcctcatcaaacaaagaaccctccataattgatccttccgggtgactttttgtacgcacatagcccttgcattttttagaaacctatacatgtaaacaacaacactcatcatgttattgaaaaattatatcgttatttgtttgctatgtaatataccaaagaaaattacctctccaccggccacatgcttcgaaaatggattgggcctgccactcttgcttgggtaggaagatgtaccatcaaatgtacattaatggtaaaaaatgatggagggaaaataatctctaaaaggctcaagatttcagctatctcag

SEQ ID NO: 27113 - DNA, 460 bp, Zea Mays
gcagctaagaaatatttcatcacatttattgatgatgctactagatattgtcagctctatcttgttaagccgaaagatgaggcacttaattgttttaagatctataaggcagaggtagaaaaccaactagaaaagaaaattaaatgggttagatccgatagaggaggggagtatctttctaatgaattcggtgaaatattgtgcgaaacatgaaatcatccatgggacaacaacaccctactcacctcaatcaaatggggtggttgaacggaaaaactgaactttgacagacttggttaatgccatattggatagttttggtttacctaagtcatggtggggcaaagctatttttgttgcatgctttgttctaaaccaagtttcatcagctaagggtgataaaacaccctatgaaggatggaaaggtataaagcctactcttggatttctatgtgcatgg

SEQ ID NO: 27114 - DNA, 388 bp, Zea Mays
gtgagtttgagaaattttcaagatttgaatttttggggtgctacagcgaccaactcccgtcctccaggttactcctctggggcctataaataggatagcctacagcttcaagaggcaagggaacacttcacaagttttctcctcctcacggtattggcacttgcctcaatcatccctagggacttggggtccttccctctccttcttcacttgtacaccctactgcaagcacttaggtgcgagtaatataagtaccattcccctctgctggaaatagggcctctcttgtcccaaaccaggataaaagacttgtgtcaacttgcatcaccatctaggtcaggggcacatggcattatttcactagttggttaggtctatggatccaaac

SEQ ID NO: 27115 - DNA, 364 bp, Zea Mays
ccgggacggggtcagcttctccctgccagcgtcagcaagcagggtccgccttgcaagtcgcgattcatgccgccaccgcaccaaggagcggctgtttgtccgcgaaccgtctggaagcgagctgaacttggcgtgactgtcatctgcccctcgatgaactaactaacagcttgcatattgcctgacaccgatgctttccgaaggaggaccatcaatggatgcatcattaagcaggacgaagctctgccagtcttgcgttgcgcccacggagcgttgaaggccttgacagtctcaggtcttctggtgtcccatcccaagcgactctcatgccgtgaagcaatcccagccgccgcacgatcactca

SEQ ID NO: 27116 - DNA, 442 bp, Zea Mays
cagatgccacaacactagaattattctcagtatcctaacctaagtactgtaccatttcctcaccccgtgcctttctattgatacgggatggaggcctcgagaacatatggttcatggattctggctattcacgccacatgatcggaagcaaaaaaatggttctccagtctcgaccccgtgattggtaaggaatacattacatttggggataagtcgagaggtaaggtaatctcttgtggctctgttcgagtgaacgagagttttgttctcaaggatgttgctttggtttcaaatttgcatttcaatctattttctattttctaactccttgaggatgactattaagtgcactttaaaaagggcatgtctcgggttttggatgcccacggggatcttgtttctcatatttccccttttggccgagttttctgtgctgattttg

SEQ ID NO: 27117 - DNA, 366 bp, Zea Mays
gtgatgtcgttggtaacggcataagtccgcttccagcttcggcaggccaatgcttttggaaagggttctaacaattttggcttcagtacggttccgaaggcatcttaatttcccttcgttgaccccaccaaaaagcatagcccctgatttgtatccgcaagatatggcatattttttcaattcctccttttcggcgtccgttaattcttgtccgagcaaatcctgaaaagtaaaatcttcttcttctgaaatttcatcaatttgctctttccccttctcagttgccgtattcactgtagccgcggtagcttcctcttcagacattttcaccagtatattgtcaataacctcaagtgtggcttcaag

SEQ ID NO: 27118 - DNA, 313 bp, Zea Mays
gtctgtgatgacatttcagaaagaacatgagcattatgtgaacacacaattgaacaaacttggttcctaagtttacctttggagttatatattactgggattgtggggaaagttagcaacatggtatttgttatccttttgccaaatgataatgacagtggcaggaaaacatggtattttatttggttcaaagagatgtttactggtgccaatcttatcaattatctggtttactccagttgtcagttgatcacatatcaatctaaaattaaacatgtgtctgagttctaaataaaaaattcagcccacacta

SEQ ID NO: 27119 - DNA, 858 bp, Zea Mays
ggaagctagtgaaggtgcacggtgtgaccctctggagtcttcgacgatgatccgctcctgcaacctcgaaactaggcgcttgcggtgggatatccggtcgtagttggccgggtcggcgctggccttggtgagccttttcttttctctctctatgtctctgcggtattacagaagctatcaaggattccattgccggacagcaggggcagggttgggcgtgcgctttggatctagacagcgttggcagattcttgcggggtccgatcgccggtaaaacttacctgctcaagttcatcgttgtagtagttttgtgtagcactttttagtttgggtaaatgattatcgaatcgccgggatggatgtctctggcgaggccctcgccgtggtgtgtgaacggcatcgccggggctcctggctgtgaaaggagatgaaaggggaatcacgcctcaccattggatatggagcaagtggtgagattagaggaagagtaccgcttcggccagattcgttatgggccgttgatggcgtgataatgcaatcgcagattagatcaaggcgtggggcggtgctgaccgttgatcttttctcggacgactacaattatgttagggcaatacctattcgtggatgcgtctgttccgtccgatttgggcgtggcgtgtgttgggccgtcgatcgtcgagtgggctgtcaagattaaatgtcaacataccgattcgcgagcagtagtgggccatacgatctaaatccaatgtctcgtatgcgtaagcagctgtctgaccgcgctatcttactaaagaatcccttcattttatagtaatagacccgccatcctcagcaataggaaatctttataac

SEQ ID NO: 27120 - DNA, 329 bp, Zea Mays
gcagaatagtccatacgctggtaagtcatgcatggagtactggtaccaaacatgcattctgatgtttgtcttcgtagctcggtcatacgtccataccccttcctcccaggcacgtaccaattcatcgatcaaaggcttcatgtacacgcccattttattctctgggtgtccgggaattatcaacgacatgaatatattatgcctttgaaagcacacaccagggaggagattgattgggataacaaacacgggccaacatgtgtacggggcagtgctcattccatagggattgaacccatctgtggccagcgcaacacgtacattacgag

SEQ ID NO: 27121 - DNA, 1229 bp, Zea Mays
ggaaaattggtttgacaattttaggatttttctacaattttctataattgttggagttctgctggaaaaagaaaaagataaagaatgaacagttcctgggccgatttcagcccagggagcccaacaccagagggaaagcgcgcgcccgcggggaagactttgcagaagagccctcagggtctaggctaattggaattgggttcggtcactgttgcactgagtcgctgactgtttgcagaaaagaccctcggtttctatttcttcgcaggggaaggtccccgacgacggtgaacgcggccgagctccggtgagctagcagaccggccaaacggagcaacgaccggcgttcccgagcggtggacaccaaagcagacctaccccgagcagttcccctaagttaattgcacagttggtgagctatcaagctctgtccacgtgaaccgagggggtggcagacagatgagtgcgttcccggtgatccctggtggtccagttcaattaaaggggtcgaggggcatcaccagcatgcaaagatgctagaacaacaacagggagggtatgagcagaactatggagggctggccacggcgagcttggttctacggtggcggaaacttgatttgggggaaacaagaaatttgggcacactggtgatcgattgctagcaattcttggtggctgggtagttgatgaccttgcggaactggtggagggctcaatttatagggagagcgagcggtgatgatcaattcggccgagccgtgcttgctgccggagatgaagaagaaccctggcgcagtgaattcgtgtccaccatagtggcaacctccccggcgacgatgggacagctctagggagtcacggcgacgcggtggaaaggcagagccacacggcacaaggccgagaggcggcggtcaccggtgaagttatcggagtccgctgcggtgaacatggtactgtggccggagttgtttaatggccggagtctatccacggcgaggatatttacgcgaccccaagtgctatccggttaccagtgagtgcgaatcttaacggcggcgacgatcccggcgcgaagtcatcggcggcgaggggagcggttgatctgatctgtccaggcactgtaccatggcaatgcttaatcagtgtgtctgacagccaagatttagggccagattcctcccaattttctatggaaacatccccaagtctctgcatcaaagttgtag

SEQ ID NO: 27122 - DNA, 756 bp, Zea Mays
agagtgcggtaggcctcatgggtgttggtttcctcgccttctgctatctcgaggctctcttgaagggacaccttttcccttgtaagttccctgactttttgctgcaggctttccacccgagagtttaggtgagtgcagtgggaggcaaggtcatcatattggttattgagggtgtgaaggtatccagccatgtagacgatggtggggtcatcctcaatagggtctcctcctgacagggcctgaagtctcttcctccaggtaggtgtatttttgttgctgggtgggaagtagcgaaggggggtttcaaagatcaccttgttgtagctctggcatagttgtcggagggctttccgggcaacattttggcaagtatttgggaagcggtattcggtgaaagtgacttggaaagaaggatggttcggatagtttcggctttctcccaggtagactgccatagagcatttttccataccgttctcgagatactccttccagacatattctggctttttgtggattcccatgcgaagcgcacaacttcgcaacagatgtgggaacccctccacctctgagcagtaggatgtcctaatgaccagagagtcttccatctggaataggaaaagaagggtctgtcaatatcgggggaaaaggagagaagatttttcttgaggtaagaggtattttcttttaaggtaacttttaaggtcagggctgcgacctacggccagtcctatgggctctgataccacctgaagc

SEQ ID NO: 27123 - DNA, 452 bp, Zea Mays
ggaacacacattggatggatcgaaaggcaactttgtgggtgttatagggacgtaggttgagccatatggtgcaaccgaagatacgaagggaagtgtagtcaggttgttctttaaggaggcgatagataggtgtttggtagtcaatgaacttactgggaaggcaattgataaggtatgtggctgttaggaatgctttgttccagaacttaagtgtcatagatgtgtttgctaatagggcaaggccaacttcgacgatgtgtcgatgtttttgttcagcagccttgttttatttatgtgcatgagggcaagaaactctatgggcaatcccaagttgttggaagaaagggttgagcccttgatactctccccccgagtcagttcgcatggagataatctttttgttaaaacgccgctctacaagattctagaaattgcgaaaaacttggatgaca

SEQ ID NO: 27124 - DNA, 774 bp, Zea Mays
ggctgtccatggacggcgcgcacggggctgcgctactggcgctagtgccataaggagtgatggtgacaacgaattggggctaggcgcggtggaatcgaagggcggagagggaggatgcagtgcctcatgctgtgcaattgggagggggcggcaccggcctaaccatccccgatctatgttgctgcctcgcccatctcctattcatgtccattattccttgatcctccaaatcttttaatgcattttcagaggcacacattgttgtttgactgttgcttctcgactgattccatgggtgaggatgagtatcaggattactcgagtggcattgtcgcgcaattgaccaattgtaggattttttttccggacacatcacttatggcatccaatttttggtctggggacaaaagaagccggatatcagatatttcatctgagtatgacatgacagtaatggactacccacaacagtatgaaggatgtccgctgcttcagctcgagatgatccaccatttcttgaaatcatgtgaaaattggctatcagtggaaggacaacataacatgcttttaatgcatcgcgagagaggaagctcgccagtgcttgaattcatgttggccggactgcttttgtattgcaaaatatacatcggcgagcagaggacactagaaatggtctacaagcaggctcgcagggactttatacagcagttctttcccttgaatccccagccttcacatttgagatatctgcactatataacaagacaaagaggt

SEQ ID NO: 27125 - DNA, 439 bp, Zea Mays
ttcaaatatttttttatatttttctcttttgcagcagcacataaaaagaaaacacaccaagtttcagattttttgtgcaatgacgcgtcctctggaatttctacaagtttgccctaaaatcggaataaatgtttggaaaatgagaagtcctatttccaagccgaatttgggaattttaaaaacagcgaatccggcaaagccggaaagaatcggatgcgaaatttaattctgtgcgatttgaaaaaaatgggcccgattcgagttccgaggcgaaagttacagttgttttaagtttagactctgaatcagggtttctggcgaggtgttggaagggtgggagttcggttttttggatagggtcggttttagagataggatctattttgtggatagggtcggttgtagagatatgatctattttgtggatagggtcggtttt

SEQ ID NO: 27126 - DNA, 484 bp, Zea Mays
gccgtcgtggccgccgctgtcggatggcgaggaggaaggccccttgtccttcttcaacgactcgacgtcattttggagggcagcgaccgtgcccgtgagcttctcgatcatcgcagccagatcgtcgttggttttggtggtcataatggaggaggccgacggcggagacggtggagggctgggtggtggttgggtgacgtcgagggactgatcggaggtgtgggatcgagaggacgaagatcgcctgacttgtgataccaggttgtcaagggcctgggcgtttagagcatggggttgtagccgcggttcgtcttctccggcgtggttatcccccacagccgtaggcttagatggtagagagaggtggagaggagataacttgtttgctgccctttattcctgtctccttgtgccgcatatatagccatcggcctgctgtcctagagcctttattttaggcaagcctaaacatggtaacactaat

SEQ ID NO: 27127 - DNA, 458 bp, Zea Mays
cgagtgacttctgcgattatgaatggcccttcccataagggtgacaacttgtgtcgtccctcccccgttagaattcggcggaggacgagatctcctactaagaaggatcgttgtcgcacggccttgtcgtgatagcgtctcagagtctgctggtaccgtgctgattgaattactgcgttcagccgttcttcttcgagtacatcgatgtcctccagtctagtagcttcggcttctgctatgctttcgaagaccaacctcggtgccccgaacttgagatcggcgggtaatactgcctctgacccatagaccatgaagaagggagtgtttccatgtagagctcggctaggctgagttcttaggctccaaacgacgtagggcaattcccttatccacttccctgcgaacttctcattcttttcgaagacccttttcctgagtgcctccagtatcatcccgtt

SEQ ID NO: 27128 - DNA, 317 bp, Zea Mays
acagctttctgagacgacattttgatattggatcctaaagcatcttctggaagctcccattaggaagccctttatgacatggcagaatggagggaggatatttccacccatatctccaaaagatccataacccatataatccttacaggattatagcaagttcacttcatcatacttttttcattgcaaaataacacagtttaggactattgtcaccatagcgagctgagagccaatgaagaatgggcctagctttctgagatgacattttgatattggatcctcaagcattacatcagagctcccataaggaagcc

SEQ ID NO: 27129 - DNA, 328 bp, Zea Mays
ataggattccccagtaacttaatagtaatagacacccctgggatagatgtcatactagggatgaactggttaatgaagtatgaagcaaatgttagttgtgacaagaggaccataacattgaagtccccgtcaggagaagaggtagtggccgagctaaggatgcctaagtcggaagagggagtctgtcaccagatttcagttgatagtaaggagcctaacccgctcgaggctatcaaggtcgtgtcagactttccggatgtgtttcccaaggagctaacgggcatgccacccgagagaaaggttgaatttgccatagagcttatccctg

SEQ ID NO: 27130 - DNA, 372 bp, Zea Mays
caggggggcaggtacaagggtcctgagcccgacatgtgggcccaggggcaaaacggagggaatacatatcgaagtatccaatgccagtgtcgcccagaagatgtccgagcgccataatgtttgtagtccatatagtattaatatctcatggctgcttccttggtaacgcgcgagccatgatgagcacagtgtatgccacagcacgggcgtactgcctgccaacggaatggacaggcacgccgcctgcaggatggtttggtcgccgcccgtcagcggagtggatagggcacatttaatgctgagacaacacatcgcctgccagtggagtgacagggctcattaaatgctgaggcggcacatcacctgccagtt

SEQ ID NO: 27131 - DNA, 628 bp, Zea Mays
gttcatagtacaaaaggaggtttgccataacatacatgccttagaagccttaattagaatcctcacgtgaataattgttcatggtacatgttcaagtaaataattgttcatggtacatgttcaaatactatatggcatttgtttagaaaaattaaacgatgggaacgagagagtattgagtatgtgtatacgtgcaacaatactgatgtgtatacgagagagtatgaggttgtatgtctgagtcatctccgagccgttcgacacgtctgtgggcatctaccagagattccctactagggatacggagacgcccccattccatcctcatctgctcgctccgtctcccggttcatgccatccccatacggccactaactcctacattccacagatgtgtttccgtagcaattccttgcctggtgggaaactcagggcagatttgaagactgccggcaaagatccagcgaggaggtggcgtatccatcccaaaatcgcaacatctggactaagtgaaggagctgaataagcacgtatcaccctcgtcgtcctcgccgccaatgcctccacggccgaggcgccactcgtcgtcgcgcacaagaatgcttcgctctactgccagatccgatcc

SEQ ID NO: 27132 - DNA, 646 bp, Zea Mays
tgaagatcctcggtcagaacaactaacgaagcctctgatggtacagtggcaaaagatctacggattcagtgaatctcgccgtcggtgaccctacgccgcgattgacatcgatcgtcgcgattcgtgcgccgtgacttgcggataaccatgggaaatgaaagatctcaactcaggaaaggagtagagacttatcaccggactattcactgtgactcttgcagcgcattggacagaggtgtcctcgtcggagttcgccgtcgatcgtagccacgccatgtgcttagaagaactaccacgtcgaagtagatatccgtatgaggtctattcatcgtcggaggcattaccccggggaacgccacgatagttcacgccggtgactcacctctcccctcgaccgccggtctccccctttcaaaattcggcaccaccgcttagcgcccttataaattgacagcacggtctgctccgctatgttatcaccaagccagagcatccatccctgccctcgattagctactacagccgttgaatttgggtttccccccaaattggtcgactgcaccgccgtgaatcaccccatcgcagctagctgctcccaggtccgcactcaccctccgtgttcgtgttttagcaccctcgtatactt

SEQ ID NO: 27133 - DNA, 385 bp, Zea Mays
atggaaaaccatggcaagtccctcccccctcggtcagggagacagccggatgttcgcactccaagttggattaagtctcctacagacatggagataacagaagccaaggttctgcttgctgaaatttgtttgttgaaggagagaggtctgaccgctgaagctgtggttgcaaactttgtttttaagaatattcagccactgaaggacagagcatatccggcttatttgtatagtggtgtcaccgactcaacccgggttaccaacaagaggattcctgctgtggatttggtgagccgactggagatgatcttgaggggcaaagtatcaaatattggtgctctcgttgcatattctgcttggaatctgccaccttctaagtcctttt

SEQ ID NO: 27134 - DNA, 318 bp, Zea Mays
ggatgttgtgctcgcggggaagctgcttgcaggggagcgcgcggaagatgccctcgttggccgagggatgttgtgctcgaggagaagctgctcgcacgggagatcgcggcaaggcgccacttcgctaggggaagagaggtcgtgtaaccgagtagccgagcagctatagagcgttgtggggaactggccagtgagtttgttgtaggaaaggtcgagatactaacgctatggggattgagtagccgagcagctgtagactgacgctgttcatgcactgacccctgcccagttgcagtagccagaaggacgctgtccatg

SEQ ID NO: 27135 - DNA, 658 bp, Zea Mays
cgccaccgtcaagctggaagccacagccacggtactcccccccggccgtcggtcgaccagataagtctcaccgccgtcgtgttgccgccgttgcacgccacgtgcctctgcgctggttctcaccgcggtgatgcaccggatgcatgtccggcgatcaccggaaccactgccacgataaaagccacgtcttccccgcccagagctcgctttccctctccggccgccagcacggtttagccaaattgctcaccaccgctcgtcctccatataaattgagtgcgccacaatctccgtagggcagtaagctatccagccaccgtgaatcagcctcaatcattcactgagagccgcgaatttggagttctccccaaatcgttttccgccgccgtgaacccaccccccaccgtggccagaccactctggtaaagttccgcgcctctcaagtattgttttagcatctgtgtaggcatgtaaagctcaccgtagcatccgtttgcccaatccgggcctgcataattgggaacatgggatcgacgccgcggttctcgccgtgtgcgtggacaggccgttcgcagggcgctcttgtgaaattaatgcgtgttccgaggccatccttggtcagtaaagcctccccgatggttagtccgggcagtcgtcg

SEQ ID NO: 27136 - DNA, 278 bp, Zea Mays
gaccccaaaaagatttcagaaaaaccccaaaaggttcaccaaagggttgagcataagagaaaaatcagaattcttctaagtccaaaaccaccccttttccaaagatcaaacgtgttcaccctcattcaaacttcaaaaccacttgacccaattgacaaagtggcgccaaaatacctctagaacatcctggaaaagtttgaacccaaccctaagtcgtttgacatgacttggcacaagatttgtctcggtttggacagccaggacaaagacaacttccc

SEQ ID NO: 27137 - DNA, 402 bp, Zea Mays
cccaaacaggctctatcagactgactgaatgagcagcgcgatggtacaatgtccgaatcagaacgccagaaccagatgcctcaccgccggcgatcgtgcgcctggattcgcgctcaccgcggtgattcgtgactagcgcagctggataacgcagaagggtaagaaatatcgcgccatggatgaacttgagccactattcactccggccgccgtgtccgcctagctcacggccgcttcggaatcatcctcgccagtgatagccacctcgtgaccttgcgccacgtgccttggtactttaaccacgccgccgtgagtcaccctagcccattcggtgatcgccggtgagcttgccacggtaaatgccaccaatcgcttgcactagtgcacccccttctcttcggc

SEQ ID NO: 27138 - DNA, 555 bp, Zea Mays
ctttaattggataggaactcaccagagtggcccagccacgggcgggctgttcttcgcgatgcggcggaccaatttgggggaaaacggcgtcgcggcggctctaggtgaaattgggggtggagattgaggctatacggccgtaagaggctgtgttttcattgtgcgcaatcaatttgggcgaagatggagaggacagtgcgaatttaacttcgactgagcttcactggtggagatgaaagcacctcgccgtggctccttgctcaatttataggcacggcggtccggtgattgattcgcggccacgaggtgggctgttagcgcatgtcgaccacgtaagaacgaagcacagtaagagagatcgacgtatggcgacagcgcggcgaaccgcgctaagtcacgacggtcgccggtgagtaactccggccgagctcaggagatggtgccacgtacgagttacccttttcccggcgttatccatccttcaccgtgcacgaatccgggcagcgatcaacggcggcgagctgagctggtgttctgatccacccaaaacactgt

SEQ ID NO: 27139 - DNA, 364 bp, Zea Mays
ccttttgcaccgacaaggtagtgtttcttggatttgttgtatcaggacaaggtgtggaggtagatgaagaaaagatcaaagctatacgcgactggatgcctccacaaaatgtgagccaagtgagaagcttccttgggctcgctgggttctaccggtggtttgtaaaagactttagtactgttgctgctcccatcaacgaattgaccaaaaaagaagtaccattcaaatggggagaagcacaacaaaaggcatttgaagaattgaaaacgaagttaacaacagccccagttcttgcactcccagacttcggtaagacatttgaaattgaatgtgatgccagtggaattgggatcggaggcgtgct

SEQ ID NO: 27140 - DNA, 1054 bp, Zea Mays
ctcaaagtaaccaaacaacttatgctgatacaaatgatacttcttcatatgattaccctcgtttgtccgattggtatgatttaggtgaaattgaaatctttgaagacattgagaggagagaaatggaggaggcaagttttacccccttttttgggaagacctctctaatcttgtccaatgatattttctttttctaaattggcaaactaaatcaaatatgctgttttgcaatgtagattgatgaaagggtggaaagacctttgttatcatgggatgaagtgtacaaaaacgctcgtaaatcagaaaggctaaagtcagaaggaaatgaacgtgacgaaggtgaactagaaaggactgggcaacctgtgtgtatatatgagatctatagtggagagggggcatggccatttttacaccatggatctttgtatcgtggtgttacacttgtaagtctcggcaagtttatttcactgcatgtcttatccagaagctcatatcatttcccacttttcacgagatgctcgataatattatgtcatttagttttcatcatctctaccacttaatatttgagatatttatactatgtactggggaagcatcggcctagttcagtctgtatgcattattgaacatacactggtgtcctctacttaaatatatttcatcaagtcgccatcaccatgattcagcctgagttttgtttgaactgattgtctgatacactaaatgatcaatagttagtagcatttggagtgctttctatttattaatacatataggaattccctccacagcagttaatattctgtgcacgtgtttattcaaagcttatgcctatttttgcatattatctcaagtcgaaaggaggaaggcgaccaagatcagatgatgttgatgctgttaccaggctttcagttctagacaacccatactatcgagatcttctttgtgaatttggtgctatatttgccattgcaaacagagtcgatactgtacataagttaccatggataggtttccagtcatggcgggctgctggaagaaaggtacc

SEQ ID NO: 27141 - DNA, 643 bp, Zea Mays
ccctgacaaactgaacagctactaatggagccattagcagatctaaccaaaattgggtgacccaacctctgcaccgaaagaccagcccgcgacacaaaatcctccgaaacaaacgaatagctagcgccagagtcaaaaagagcatgggctgaaacgaatcaactgaaatcgtacctgtcaccacgtctccttgctccctgccatccgtagcgggtagcacataagctccagaaatacccgcagaagaggaagcccccggagtgaaattaacagaagaaccccactgagccactggatgaggcaggcgcggagctccaaactgagacatcataggagtagacggtgcaggagtaggcgcggcctgatactgaggaaaaccctgcatcggcacgaactgagaagtcctaggcacatagagctgctgcggaggaagaggaactgaaaactgctgctcagcacttgacatcatgttgatggtgccctgagaagaggaggaagtcaccagctcccatctgagcttcccattaggattcctcctacacaccacatccttatggtcctgactgtagatagaacacctgccactccactggcactctgcacggcgatgcgcatcaccacagtggaaacacaccagccccag

SEQ ID NO: 27142 - DNA, 731 bp, Zea Mays
aaccagaagcaagaatcatgtggaccgaatggatccaaagatcgtatactaagatcaacttctcgttcatcatcttccagagaaaaaactatggagaaatcatgcagttcagcacacaagggcaaaagaaccttatggggccgtacttcagtaagtgaaaatgttattggtatagttcatattaatactggtaggataatcttacaattttatgggaacacttgatatacaggcaagaaaagacctgtcaacagaggagattgaatgctgcagcgatgatgagtaagtggcctgggaacctttgacctttgggcatatcctagctgtttattgaaagaattgcaaacatatatcctttaaaagcaccacgattctttttccagcttttctttatcaatactttattttttacttgtgatatcggtccatgtttaataccatcgcaaatttgccattcactgtgaagttgcccttgcatttgatgtttgcatgttgacttcaactagtaaaattataacatacaaacttaacagcagtttggaacgaaaaaaaatgcaaggaagcttttacaatttctggctgacatttgaggtattttctgatgtggcttctgaacaagggcccttgttgagaaacttgagagtaacaagattgatctccaatcaaaaattgcaaaggaggtaaagccttttctcctaggatcacatgaattgggttaagtggcattggat

SEQ ID NO: 27143 - DNA, 296 bp, Zea Mays
gcaaagtagccatcaaaactaatgataatctgggtccttatttcactactcacaaaggggttaggcaaggggatcctttttctcccctactgttcaatttggtagctgatggtttagcttgtatgattaagaaagcttaagatgagggttttattgagggtctgattcctcatatcattcacaatggttgttgctgcttacaatatgctgatgataccatttttcttattcaagattgcttagaagaggccagaaatcttaaattcattttgtgtttgtttgaaagcatgtcaggc

SEQ ID NO: 27144 - DNA, 298 bp, Zea Mays
acacacacggctgacgacgttcctgaacagcacacacgtcagcacagtctcttttggcagcccatgacgccacggtgagctctgcatcaggtctcccttggcctttggctgagaccggtcctctgatagttgacctcctaacggaaagtagccgagagccttgtttgtcaaatagtgcactggcagccaccccacccctgctgtgcctggtgctgagttgaacgaagcaagtggcgagtggtttgtgtgtgcgctgcgcaccaccagcgttcatcactggctaagccacatgcagaca

SEQ ID NO: 27145 - DNA, 458 bp, Zea Mays
cgtgggcacagggtaactcgcctcagatcgaggcacgaagctgtaacaaccaaaattgttgtgatactattcctttctggtcgcctttgtgtgataagacaactcatgaatattgcaaaagcatcttgcacctggttccagtccttggctcctcatggcccagataaaaaccccactctaataagagcttcgggggtaatctgatgaaggtatatctcaaatgttttcaaaacatcaactagcatcttatgaagcaggaaacgaagcccgaccttcatgaagctcctgaagactaccacttatcgctttctggcaggggaacaatgtcctctcccctagccctcactatagatacatcatgaaagtatttccccttcatcgattcaatctgaccttgcttgatggtggatttcccaaaaacaacgtggctaggtctccacagctgatcttcggcattc

SEQ ID NO: 27146 - DNA, 849 bp, Zea Mays
acgagttgtgcaagctgaacatagaagttgtttcctcaggtgccttgagttatatttcagtggagcccactttgcaggagcaaatagccatggcacagatcggtgacaagggtgttcaagtcattaaggaaatgatcgaacaaaaggtggtcaaatacaaatgcttccagtaggacagcaagggaattttatggtttggagaccgattggttgttcctaaaaatcccgaactcagaaagaaaatattggatgaagctcacctttccacattctccatgcaccccggcagtaacaagatgtatcatgatcttagatccttgtactggtgggccagaataaagagggagattgctaagtatatatctgaatgcgacacttgccagagagtcaaggccagtcatttgaaggtagcaggcgccttacagccccttcccataccatcttggaaatgggaggatatttgcatggattttattgtaggattgcccaatacctcccggcaccacgattctatttgggtcattgtggataggttgacaaagacagctcatttcttactagtgcatacaacccataaggcagaaaaatatgcagaaatctatgttgatcaaatagtgcgtttgcatggaattccgaagactattgtatctgacaagggagcactgtttgtggcacgcttttgggagcagctccaaaagtcacttggaaccactgtgattaggagttcagcataccatcctcagacagatggtcagacagagagagtcaatcaaattctcgaagacatgttgagggcatgtgtgctacactatgggaagaactgggacaagtgtctttccttggcagaat

SEQ ID NO: 27147 - DNA, 617 bp, Zea Mays
ttgtagtaggtggatgatgcagctgtgacttgtgaggctggaatggcatgccgtaggcgtgtgtgatgccggtgaggatgccgatgtcgtggtatctagctgattgtgattgcgatgtgtgtttgccgtaggcgtgtgtgatgccggtgaggatgctgatggcagatttgtttagaagtggctgagaacaacctacctatcttctgtagtactagatactattagtcccttaaaggcttctttttagtttgcttgtttaatataggcggatgttgatgcatgcattgatgccagttgatggaatagtatgtggtcactgcttgagagatggagcagaggcagactggcaggaggaaagcagagttcagctggttgcagataacattcaattcagacctttagactggatttgaagtgtacttgttggttggtttgttgttgttgatttgatggaggaggatcttaacttattgctggatacttatggtgtatatatatgtctagtaatcactttctcatgtcacgtcactttcgctcggtccttcccctggattttctaagaaaactgggaggtgtctaaactttttttaagatgaattcaagcaatattcgttagc

SEQ ID NO: 27148 - DNA, 487 bp, Zea Mays
cggtctgccactgcctggcctgctcgcgcccacgcctatcagacagcccgagcccttagccttgctctcctgcacgcccctcactctcgcctgagctcaatcgcgagtaatcacccaagaatcgagagtaccaccacccacccttgtcacccaagcttgactaccgttgccagccattcccagagaccccagcccctcctgagctccccatgagcttccctaagtcgcggtgaagctccctaaagtcctagcttgtgctctacctcactagagtggccagtctaccctcgctggagatccaaaccccaccggcgcacgtggccagaggacttaggtgaaccattgttcaattactcttgcacacacactccacaacacctagtgaagctctccgagcgatttgattgaacgctaccaccgtggataggccggagcagacgccgccgatgaccaccaccttctgcgctcgtgtccagaagtattccag

SEQ ID NO: 27149 - DNA, 353 bp, Zea Mays
cggacaagtagccttgccatggtaagacactcggtttttccacggtataacaactccttctcaaagaggccaccgacgaccgacctcccaccttggcctataaaaggaggaggtcagcttcgaggaccaaggagatgaccaacaccagcaccacgacagacctagagaagacactcgacagaaggccatcacctacgcctaaagagacctgaagacttgggggccggagccaaggcttagcgtaggactccagttccgtagtctttaggtccacccccgcataagggacttgggagcccttccttcctctctcgtatgcttgtaacccctactttgagcatcgagcaacagag

SEQ ID NO: 27150 - DNA, 624 bp, Zea Mays
acgaagtggccgtggcggcaggcctcatggacatggagtcatgaagagggaggtggaccatggcgcatcatcgatctcatcagagtggggggagctagctaggacaagaggagggaaggaataatgccggcgggggcacaccacacgctgcactgcatgcagctgaaagctgatgaggcggcgagagagccagcagcaacagcagctgggaagggaacaaagatttctgtcccctgggagtggggatctcagattctcatctcatctactccggacctttctatcgcatccccgctccggtcacgtcgcggtccggctgcttgtattggcatctgttctacttctatctcctagctcctccttgagtcgtcctgaccaaaagattcagagctacctctcgcttctcttgctgcctcagctctcagtgcgtgtcgatttccatactcgatcgatctctcgtggtcaatgaaatgctcatactcgtgaaggtgctggttaactaacgcaagaaattaatcaaggagctgaaatattctctgcacagctgagaagttcagacatttttccaactccaggcacccaaagactgatctctccgtctccgatgcatgcatgcatgttcgt

SEQ ID NO: 27151 - DNA, 468 bp, Zea Mays
cagacccattgcatttcttagcaaagctctaagtgagaaaaatcggatgctatccatttatgacaaggaattcttggcccttttaatgtcagtgcaaaggtggcgtcaatatcttcagagagctaaatttgtgatccgaacagatcacaaggcattgagttttctaaatgagcaagtattgcagttgaatttgcaaaagaaggccatggcaagattaatgggactgcaatacaaaattgtctataagcaaggtaaagagaatattgctgctgatgctttgtctagagttgggcatttgatggcactgcagactttgactaaagtgaagcctttgtgggtacaagaggtgcttaactcttatgtgactgatgatgaagctcagagattattagctgagttagtccttcatagtcccaatgaacaagggttttcagtgcagaaaggtgtgattagaaaagggaaccagat

SEQ ID NO: 27152 - DNA, 668 bp, Zea Mays
agacataactcgaagagttgttcttgactgatttcaaggtcgactgaagccagaagctcatccgacagagagaatataaccctggtgaatcttcgtcctgctacaatcagacccagcgctgtaagtaaatacgatgacatccaatctcttcgatcttacgtagaggaacagtggggatagatgcaacaaatcttaggggcatacaagaggattatacgaggctaaacatgtgtttgataaatctgttattactagtttttcatcacacgatgcacaaactaaagaaaacctacagtacccatcggctgcaaaatgggcatgcccagtcccaacccttttatgagatgccgatgaactcctataacggctagccacatcctccaccaccctatatgggaacaacccttgcccctgtgcatagacgaatagtccaggcctgaggccgaacggtcgggtccaacagtagttggtaccgtccctcacgacgagccactgaaagctacacaagggacaatagagatgctcggaccatgcggatatacgatcggaccgtccgggcacgtcaccggaccgtctggatattacaccagatcgtccgcaatagggtatgaggagcagaacatagaatattaccagcaaccctactaccagcccccaactaacgtctt

SEQ ID NO: 27153 - DNA, 462 bp, Zea Mays
ctaaccagggataaagatgaccggctaactaatggggataagtccatcgctaaataaccagggaggatgattccttgttattctcatatactaacttaaaaaaactagcaatagctaaccttcttggcaccggcccctctctagccacgattgtgctgctagtactggcatcgaggaaagagtccagaataaaccctttgtacatgaatccagcgatatgtctaaaacaaggttttgtgaccatcctcgactacagaaacaactgcggagaaaaaggcctcaacacatggatggacttgaacatgaaaattgtccatggatgactaagattttttttcagccatggccatttttgcttgatgcacccatccaaggttctgaaggttagagatgccaggtcgaccaagctcacgaggaagatacactttggttcaagttacaaggcagtgaagtgacctccca

SEQ ID NO: 27154 - DNA, 675 bp, Zea Mays
tagggccctcactgccaaggtgatccgtcaaggattttactggcccacaataatctgcgccacgaatcgagtcacgcggtcgtgcgaagcttgctagaagttttctccccgctcgggcaacccttcgcagttcaccaagctgattgcccacacatggccacttcaacgctgggggctggatatcgtcgggccactacctacggctcaagggaacctcaagttcaccttcgtcgccgtcgaatattttaccaagtggatcgaagccagggcggtatccacaataacgtcgaagactgcccagaagttcttctggcaaaacattgtttgccgattcagagtcccgtccgagctcatagtcgacaatggcaaacagtttgacagccaggacttcagggacttctgcttctccatcggcaccaagcttgccttcgcctcggtatacgcgtcgttgagcgcgccaatggcaagattttcactgcaatcaagaaaaggcttctcgacgacaagaagggtaaatgggccgaccagctacccgaagtagtctgggccctaaacacgaccaaatgtcgggcgaccggattcacaccttttcgtctactatatggatcggaggccatgacgccgcaggagataaagcatgggtcgccccgaacaagcacatcagcagtccccgac

SEQ ID NO: 27155 - DNA, 554 bp, Zea Mays
ggggccttagggtaaactgtcctagacacagtaaacagatgaatatggacgtcaggttgaattcctgtttacgagggggctcttatgaaaaacgtgatcgcgaaggggtatttagaaaccatggccgttcagattagatccagaggcaatcattagatcacaattactttaaaaagggtcgcacactgactaccactggatcatgatcgaacggcgcactatctctcacccgtccacgaccgcaggatcactgatccacgacctaaaccgaaatcccgaatcagtaagcttcggttcaatcgtaactgtacaacccgagatcaatggctccagctctctcccctaaccaggcggtcaacccggcggcgccgccccgccaacgacggcgaaacacgccggcaatgccccaaactcgttcaccactgcccatacctcaaattgcgactacctacacgatgcggacaagaaggtgaaacagataatagctaacttacccctgtcacggcaaggtcgtggcctggcggcggcaatggcggacgcggcctccactgaac

SEQ ID NO: 27156 - DNA, 295 bp, Zea Mays
gtgggagcgggtctctgcaccaccatcgggggtaataacccatccattctcttcgtttcgcgttgtgcttcgtgtagcgtgtctccaatccgagattagctcactaggcgatgatcggggcgtcagaggaaggtctccgccatggggttatgcgctgctgcccggggtctggtcagaggttgaagacacgcctttgaccgttcgattcggtgggcggtcgggatttgacgaagggttggtctgtgtgcgccgttgattttggagtgagcggtagagattagaaattagcataccc

SEQ ID NO: 27157 - DNA, 558 bp, Zea Mays
cgatatgatcctaggtatggattggctagaatgtcatagccctatggatgttcattgggcacaaaaatggttggagtttgagtatgaccaaagaaaggttcggttgcagggagtgctgcccaacacacaaacctgcaacaacatcacttgtttgcagctgaattccttgatcaggcaggaaggagtcgagcagttactcgaattgcaacaaatgaaatagacaacaacaactgaacttccagagccaatcaagcaattattgagtcattatccacagctgttcagtaaaccccacggcctaccacccaaaagaacagttgatcatgccatcgatctgatacccgatgcaccacccttcaggcggaccttaccgctatacacctcaacaaaaagatgaaattgagaaacagatccaagagatgctagacagtggcattgttcaacaaagttctatcccatttgcttcggcggtattgctagtgaaaaagaaagatggagaatggagcctttgtgtggattacaggagactaaattcgtatacagtgaagaatcggtacc

SEQ ID NO: 27158 - DNA, 371 bp, Zea Mays
atatcctataataacactcttgctaggtttcacactcatcttctgttaatagaagaagcgtgtggtgcagccgtgcagggatctggaagcaagtaaagtacaaaagagaaatacgaagcagatctgatccgaatttggtgacgccgtggtgcaggatggcgacagaagggggatcctagctagaggcggaggccgccaaggcgaggttgtccggcagggcgtcatcggtccacacccggtcgtccgtgtccttggttcacacgcagtgcaagcggctaggaacagcgccagaagtggcaaggcggatagatcaaacatcaagcagtgcccccgcgtggatttgtggggagaaggtgtcagcagtagcacgc

SEQ ID NO: 27159 - DNA, 282 bp, Zea Mays
gacgtaggtcctcgacacaatgtgttgcaccgaccaggaggtaggggccaccttcccgctcaccactgggttcgtccaccccagcagcgtgcggtacaccgtgagcatcgtctcgttgctcactctctacacgaaaagtgcaatcttctttgccgagggtgccatcactacttctggagattatgaccagagaaggggagaagagctatcgtggaaggcaaatgggcactttggcagaaagaaagatgggtgcttaggtgcttgagtactcttattcgaaca

SEQ ID NO: 27160 - DNA, 313 bp, Zea Mays
atttaggtcatttacgcaccacgatgctattcctgtgttttacaatagtctattcaattatcactagaaatgtgtgccaaataattagagtaaagtgcatttccggtcgaacttgtgcgactgtgtaacccggtccataagcttttaaagtgatctgtttgggtctatgttacgtccaaagggatccaaacagacccgataagaggtcttcttctttatcgagccaacacggggagggacatgcgtttgagaggagcttgctagcgacaaccagcagcttcttgggccccacgccagagctgatcctgttcct

SEQ ID NO: 27161 - DNA, 320 bp, Zea Mays
cttccctttttatgtctctccctctctcctcttcccttctcagactcattttccagccgccgccaccctcttgttctcctctctctcaccttcacactcctcgtcaaaaactttctcgagccctcactcttttggaagagtggttggagatccgttcttcccggcgtgtttccaccatcttcctccatctcattgggagatcttgaccaaatcttcggatcgaggtattgctctatattatttccttgtactcgatcctacgcgttcttgattatcatatgtatcattcattgggtacattttagtttaagtgattgcaa

SEQ ID NO: 27162 - DNA, 432 bp, Zea Mays
ggatattgggttgcaacgaggctaatctgtagtggaggaaggccggtcagcggagcaagaagtgcgatgagaaattgccaccagatctcgccaccagagctcaacagtaaccgtagacacgttcctcaagagaaagcaaagctctctgactcaaagttccaacccgagcggcgatgctccccaactttaccggtggcggcacttcttctcgatttcctgcgtgcttggtggctctcgttgcgtggctcacggaattgggtgagcagaagggcaatgggctcggtcctttatatacccggcaatgtaggtcgaaggtcggcagatgctcctcgatttccctagtgaagtcggcgcaggttgttgggcagcgccgcagcggtggtgtccgcgtggagtaagggggaggggtagagcgccgacactctaggccca

SEQ ID NO: 27163 - DNA, 505 bp, Zea Mays
cttgatctttgccttctaaaggtacttcttcttgagcacctccttgttgaatcctcccttggacttatacttaccggaggagtacttgcccttgcgctgaccagattaatggtcgcgcgggccggactctgccttgcctttcttggggcagctggcgagaaagtggtcgggatcgccatagttgtagtttttgtccttagacccaccatgctgtcggctcatacggttgttatggaaccgcgtgaaccggctggccacaagtgtcagctgctcaaagctctccacctgctcctctatgatagacaacaaagaagatagagcaaacatagaaggtgaggggttagaagcagaaccacctccagagaccaaggccatggtgggtgcaccagggttctcaatcttagcccgagtctggtggtcaatctctgtggacttgagcttgctgaagagctcatccacggtgagagactcgtagttgggccactcgatgatcgccgagaccttc

SEQ ID NO: 27164 - DNA, 710 bp, Zea Mays
agctcagtctgagatttaatttttcctttgtctgcattcactatcttcttttctctagctttgtgttcaatcagatagtccatttttacttttacagattcacttgttctacattcatgcattataggcatggaaccaccagatcttgcttcacaatccatatttatgtcatcaatacttgcctgatcatgacttggagtagcagatcgtttggtggcatgcacttgcgtggcagtcctatttgacaactgtttcacatgaggttgaccttcccgcataggagcatatcgtttctggttttgcacttgcatgtctctcctaccaggggatattgatttcatattggatggctgcttcatgcttgaaggagatgcaggatgaacctacctttgctgcatatcagaatatgacctatcctcaagttttgcttgactatgacttgcatcagcacatcgttttagggcttgcacatttttatcactcaagactgagcttgaacctagggaataggtgacatgaaacagaacaacatattttctatgtggacctatctatcaagtcatgtcaaaaatttctatggcagataggtccaccatagactgaatcataaggaaaaagtatcgagtaccacacaaagctaaaggatatatccagtcatatctttgaacaactattttcaacaatagcaaattaaatcacttcatatttga

SEQ ID NO: 27165 - DNA, 389 bp, Zea Mays
gtgtgcatgtgtgccgcgaacggtctgctgaccggcagtatgtcccatcgcattaaatgactgtgtcccctctgaggaaaaactcgtcgagcgccattccacatcccgcctcaaaaggtatgccctctaccctcgactactctgccctttatcctctcggcaattgaactagaaagaaacgtcttttgcctcaggcaacccccctcaaaaagggagcaacgaattggaaaaagtcgtcttctgcctcggcatgtcactccaggaggaaaaaaggcatggaaaaatattgtttagaggtttgaaggttcgacccttggcagaaccgcctcaggacttcagggctccgagcccaatattgataagggttttgaaggttggcccctctgaag

SEQ ID NO: 27166 - DNA, 317 bp, Zea Mays
agaggatccactaatcacaaaaagtgagatgagaaacgagatgaggaatatgattcaggaactcatggggctaggtatgattggtcccaaggctttgcctatctcatccgaattaaagttggaactcgttccaaatgatgtgaagctagaagggagcaagaattacttgagttggtctaggagggtgcgagtgctcttgggaggtaaaggagtggagcactatttggaagagggttgtgttgaacccgttgataggctcagccctgaatggagggtttggtataccaccaactcgattattgtggcgtggttgttgg

SEQ ID NO: 27167 - DNA, 392 bp, Zea Mays
ctcctatcgcgcgcacgcaaaaaccaaaatcctctctctgtagcgcctaaatcttttcgtgggccgcactacctattcatttcaccaatagaaatcaccaccatctctctcatccaaaattccccacacgcaaatagggaccagcagtccaccagaccaccacgccgttggcgtcgcaccctctgctcaagtgctcagtggcggcgacagcggcacctgtgcgacggttgtgctggaccgatatgctcttggcctacttccataacactatgacagtgcatgtacctccttccaccgctatgttggattgctgctcttagcctcttaggcagcctccttcccctttctaatttgtaccccacgaacaaggacaaaggaccatccattgtttc

SEQ ID NO: 27168 - DNA, 366 bp, Zea Mays
ctattttcttgctgcacccatatacttgtacctcctttcttgtgccttggtctaactgttctattacattttctaggccagcaactaggacgagtacttggaacacttattcaacattgctatctgttactgacttgtgtgccacatatatatatttagtcagccttcccagaactctagctttctctcgagcagaacaggtactcctttgcaatcacaccacgctcgttggacagtcacaccggtcaccgtttgccacctgcagtgctggtaagaacgttgtaagagtggggtaagacgcttcataatttgtattccaccaccaccaccaccaccaccctgagagatagttgtagggttcacatt

SEQ ID NO: 27169 - DNA, 1000 bp, Zea Mays
ccaagacttccacaatggttggtagggtgctcacacttctcaaagaggtatggttttatgtttggtataatcactatgtaagtggtacctaataatagttgaagctcacatagtcacacatctcctaatggctagggtattccaccaccaaacattcttgctatgacattcaccacggctgctgcctcagaaatgagagagaggatagggacagtggtgggaaaggcagttgccaaggatattgcaataagcacatttcactcattttgcttgcagctttgcagaacacatgctgaaaagtatgttttcccctgttggtacattatacttaggtgcagtggatttttgtatgcttctgctccacaaactgagttgccacatattaagaaagtcactgatgtacagcacttttaagctatgaagaaaatatgaacttatacgatgaaatagagcctgtgaaaaaaaatcatgttcaatgtaaattccatgttatcaagatttacttagattattttcagctgtggcaacaagcaattaatagtcctagatgcataaatgatcatgatcacttttaagctttatcaaattatttataatatataactccaatttgatatctggcaaagtcaaaatatatacaattattaatcagtatatcgcactatctaatgttatggtcttgtttcatctttatgctctgttttaataccttgctctttcttacagtttatcaagcatactaactgttgcagatacttgaaggcctggatatgtagacatttatttaataaattttagttcccctttataaccatttgaaggctaggacgcacatctgaattcataatctacggacatggacagcaacgaagggcgcttattgagacagagcgccttttggaaaatgacaaaaataatggtgttggagatacaactaaacagtatgatggggacataaaaaattctttcaaagacaaagctaaaaagtggcagaaattta

SEQ ID NO: 27170 - DNA, 328 bp, Zea Mays
tcgagcggtgtgagaggaggtcgtgcggtggatagataatagcccaggcgattggctttctcgcagaccaaaaattatgaccatgccgagcactatcgaaccatgcgacactgtcctcgcgaggacggtcactgctcaagaccatgccggttactgtcgagccgtgcgatgttgtcctcggcgatgacggtggcgttctcgctgcatcgtggggccaaacggaaagtgcaggcaagcctagctgtgtgtgtgtctgtgcagctgtggagggctccgcgcgtcacgcggtggaagtgcgctcgctagcgcgaagcgcgggcgtgcgctg

SEQ ID NO: 27171 - DNA, 287 bp, Zea Mays
tccgaagtccgatcaacgacccacggtgcttctcacattcccctctctgtctaccccgtgcacggcgacatgtctgcacacccggcgacgcactcgccggagtatggccatctggcatccagtgccccaatcctctagaataactagcgcaatgcgaagaggagaaccaggcgaatagtattagaggtattctcaccgtgagtcgtagcgcagatgccccaggccacgacaaagggcggtatacgacagagctcacgctctggtgagcgattcgtggctctccagcg

SEQ ID NO: 27172 - DNA, 385 bp, Zea Mays
aaagaatctattcttcgtcctccttcttccttctgttgtctccgttcctatctacttgctcctcctctgtatacccttctgctaacaattggtatccagatccaatcggtcatcggtcgttgctatggctcccccttcccccactccgtccgatgccgctctaacaatggcattagagaaccagacccgcgcccttctcgtggagctcgacaagagattccagaccttcgacaccaaatgggaatcccaggtcggcgcgctcgaatcagcagccgacgagtccggccatcacctctcagccctgtctgcgtcactatgggcggacatcgaggcccacctcacggaggcggatgtcaacactaattcccggcttcgccagatcgag

SEQ ID NO: 27173 - DNA, 310 bp, Zea Mays
ttgtcggcctccattttctcgtggatatgtttcatgcccttatcagtcctttgagcatcaataatcttttgtttcataactgactcaagcttcaaatgcatcaaggttccttgttgcactatccccagatttaatcattccatttcctgacataaggtggtgtcaggcaattttgcagtgaggcaatggcaaaaggctttatgacttaacgcatcagcaaccacattagcctttcctggttgataatgaatttctaggtcatagtccttaatcagctcgagccaccttctttgtctcatgtttaatttcg

SEQ ID NO: 27174 - DNA, 339 bp, Zea Mays
ggcctctaacgtgatggagacagtcccaacttcaaacttagttagagtgtgtgccctaagactgggtgtagcatcattctctgaagggtgtagaggtactattgttgccttgatagttgcgtctactaggtagactaagactggtgactctccatatgtttgttcctagtgcatggaagacaccgacttgagatgttgagacataatcattgtcagttggccctcaagctctacccctagtgatagtagggctcatcaccaagcatagtgggaattttgttagggacctaggagtcaaggacaccaccattgacctaatcctaggggactcatttccaa

SEQ ID NO: 27175 - DNA, 376 bp, Zea Mays
gtagaagcttcggtggaagattcagctcccaaccaagaaggttgttttgtctattctgtggggaagataaggggcatacaacaaggacatgtcaagtcactattcaaaagcagaaagaaatagctgaagccgaagcacgacagaatcagtcgaagtaggtcctgcataccgcttcgtgctattccttgtacatccccgagtatgtgggcaaccaacaacccatagcatcagttgctttggcaagccactcacaagctgcatgggccccactaccaccaccaccactcatggctccaacctcgtctcacaaccaacagctagaagggcaccgccaagtacaacaacagtgtgatgcatgcgaagcatctgaagctcg

SEQ ID NO: 27176 - DNA, 327 bp, Zea Mays
ctgcctcacggtcttgctcgaccaagacttgattgctcattccgtctcgtggacttgctcagcggggacctggtcggtcgctccgcctcacgttggtgtgtggcgttgtgttttgccaattcccgtctcgtgatcctgggctatgcggcgatctcgacgccgagagttccgttgttcacggaacgctcgatcatctggggtttcccccgctttagacgctttgtcccgagaaattggctgagcagggtcccgttctccggtcgcgtggtgacaccgaatgttccggtgctggttatgatgatggcatgcctcatgatgcgggggctc

SEQ ID NO: 27177 - DNA, 461 bp, Zea Mays
gtggagaatagcccgcggggccttgttggcgcggaacagaccctcgatggcgacccaaaggttgcgggcggtctggttgtcgccgtcgacggcgaggctgaggatggagtcgtcgacggagccgaagatccagctgcgaacgcagcagtccgcttgatcccagatcaggtcttgcgggcgtggtggagcagagccgtcgatgtggtggcgaaggaggaacttggcgcacatcgatttgaagaaggatgcccaccgggagtagttggaggccttcatctccagcctggtcggtacatgagattgaaccgagacggtggcatatgagggcaccatgagctgctggatggcgccaaggtcggcgctggtgcctaaggtcggctcagatggcatcccagacatggaggagaggcgccagcggcgtgagaggaagcagagggcagcggaaggaaggcctggatcga

SEQ ID NO: 27178 - DNA, 368 bp, Zea Mays
cgggcgctcgttcaccggggaggaaggagatgattccctggccgtccatccgggtttggacgctagggattcggttatggggaaagcgattgggttaatacaccggaaccgtccgatctaaatcgtgtgcacaggattagatattaggtttttaaatcgggagcgttgcattgggatctgacggctgagatcgcataccgcttcgtgggagatcagatctaatcgcagtcgtccctggttgatctcacggctaggattagttgataccccttcgcgggtacattttgctaaagagaccctagggtattttataatgaacccgccatcctctggcactatgcgctgagtctgcggattattgccccgtg

SEQ ID NO: 27179 - DNA, 360 bp, Zea Mays
ccgatgtgtgttgagcggaggaggttgaaggtggcaaatgagaagagagaacaggatgcaagggaatgggaggcggctagagtcgagaaacagaggttggggaatcttattggtcgtctgagtgcaagtgagtgagaaaaagaacatgttagttttgcttgtacattatatttatcttgtctttgaaacttatttgtcacatcatatttgcaaagattggatgtgccaagaactatatcgcatatgaggctcgtgcaagatacgtacgttcaggaaaaactggcgacgatggagctgatggaggaggaggacacatcaaggttgattgagcttatcgctctcattgagacagaattacat

SEQ ID NO: 27180 - DNA, 513 bp, Zea Mays
attgaaatactcggctcttgtgataaacatgtatgcgttcgtgatttgggaaataaatgcatggtgattgcgatttggggatcagtggtttacgattcgtatagattggtcgatatgcgaaaatacttgtgagtatgtgtgtttataaaaatgtggcagtgtatgttgagtctcggattgcgataataataggcaaaccgacgtgtatgttatttagcggtctatgtcgttgctctagttagccgactgttagatggctttggttaagctcgtaatcacggtgatttgcttgttttggtctagacgcgcatggttatggtcgcgggtaaaattagtgttgttcatgtgaagtctaagtaaaaatacaaattagtgtgtgaagggcgcaatcgatatacacatttataccaggtttgattattgtggtgaatgtgtttgttgattgtgtacggtaattctaacgcgcgaaataacttgtataaaaattagtaagtctatttgttagttctcact

SEQ ID NO: 27181 - DNA, 442 bp, Zea Mays
gtaagagcaggtcctttggcttcagtagccgtagaggtctcaccaccaaattcgggcactgaggccggttcgatgaagcgcggtcgttgagtaaggaccttcacccttttcctctttgtgcggcctcacttagagcaactgaagcatcaccttttccagaagttgcgctttttctcttttgccctttcagcgggtagcggtaatcagggtacataaacccaatagcatcgaaaactctattcaacctcttcttcttccggcctccgaaggtcgcagatagcgcgttatcttctgtctttgaatatggtccaagcagttcgtcgcttgtagcttcgatgcacttcagccaatcatcatttggctcaataaacttaccctcgtatctgaaggtgtattttaacctaaccagtccgccttcgtcaggcttgctgatagttttctt

SEQ ID NO: 27182 - DNA, 586 bp, Zea Mays
tgggggtagtggtaggacgaatgaaaacatgttgtttgaacggataggagggtggacaaggcgaagaacgattctgattaaacggtcgaattatgaacctagttcgcttctcaggtccctgattggacctgtcacttccaaatccctttgattttccctggcctgtgttcttggcttctactgccagcgccatgctgacagctctgctgtaagtaagatctaggcaggtggccattttctgttggagccgttcgttgagtcccctcatgaagcaattcttcttcttcaggccagtgtttacttggtcaatcgcatattgggataaatgattaaacttgttgacatactgcatcacaatatcccctccttgttttagtcaaataaattcctcttgtttcatgtgaagcactctttctggaatatagtgttcacagaatgctagcttaaattcatcccaagtgacctgatgtccgactggttgaacttccacaaaatttccccaccaggtactagcagggcctctcagttgttgggcgacgaacaacgacttctgtgtttctgtgcaacagattaatctgaacttctg

SEQ ID NO: 27183 - DNA, 310 bp, Zea Mays
aaacagaagaatcggattttgttttctagcataaaaagacaatggtctccccaagaacaactaatagcagattctcaaatacctaatgcactgtcagacgatgaattgtcacgtattccgaaaaggaaacatcacaaggatgcccagcaccaaaaagaagcacatgagtgttacattgatggatggactattacctgcacacagtttcagccccgtcgccgcatcaggtccaagaaacaaaaatggaaacatggaaaaagtcaagaaataacttcaagaaaagcttgttatctatgtggacgtgaagatc

SEQ ID NO: 27184 - DNA, 372 bp, Zea Mays
cagggttaccgtggcacttcaccgtggcaagaccaccggcaatgaccggatacgctagggcgagtcactgcgacaaagtactgcgtttaggcacgtggcacccgagcggcagacggctaactccgacgaagttatctggaccggccgtgagacaatcggacacgacggccaggcggaacagtgtctcaagctcatccttagcgcctgatttttcaccgaggatcgttatctgcgttcgaccgggcgtgaatcgcgacaccggagtgaatccaggcgcgagatcaccggcggtgaggggggctgaatctgggatcttattcagtcactgtactatcagacaccattcagaacacctaacaaagcttatttggg

SEQ ID NO: 27185 - DNA, 374 bp, Zea Mays
ctcaacagagttcacttgtcggctggcttgtctgcccgcctctcgcccgtgtaggccaccacccacaccgacgactttgctcacctgtgtctgttgcctctgcttagtcaagcgctgtgtgaggcctcctgcgttgctccttcatctatgaactcgtcacattcacaattccatgaccgttaagtccttaaaaaagaagttcattgcctgcttgtctgagatgttgccgtcttcctccaacggtggtgttcccatcgctatccgctgctatttgatgggaccaactatcatgcttgggttcctcgcaagcgctggcacatgtgtggcctgtgcctccaagagttcctcactggcgagcttccatgcccaccttg

SEQ ID NO: 27186 - DNA, 340 bp, Zea Mays
cgcgatgcaattcgttgcgcaaacggagaccggttctagcagatcgcgccaacggtagcgcatccatgaaatatcagctcgctcgcaaatatcaaggcttcgggtggcaccgcgcatcgccgagacatgtcatttttccgcaatgcggagaacctcgcgaatacgcgcgacgcggagagagcacctgcattttttgcgcgaccgcatgcgtgcgccatctggttgcacgcgtgaacaatgctcatttcttactcaaaatccgcatgcgcggccctagttgcatcctgctggaggtaacctgatgtaaatgagtctcgactcactaaataggttcctcaac

SEQ ID NO: 27187 - DNA, 557 bp, Zea Mays
catttctaaggcacgaggaatagttcctgtggatggagggttgaatactaaataacagagggttttatttgcatttgtgcaactgaatggagtgcggatgaatcccgaccgtccgatcgaatgccaacggagaggattatatccataatccagcgaaccggtacgttgtgtggtcactcggatctagatttgacggtccatattttaatgtgacaggattcgatcgcatccgaccgaacagagatctatggctagggttctctcggtcgaagggttattcacagctcagatcacgatcgctccctggctatccaacggccgagacccgtccttcctccccagaatcgagccgagcaacagcggcgagctcggcggtggagcaccaaccggcgaacatcaggtttgcggcgccagggccccaatagctaaatggtgtgcatctacacgatccccagagaatggtgaatgcgatggggtaggtcataccactgattatgtcgcagagatccctgtccacggtagaaggcggtcgacggcgatgcctccccgctccgacg

SEQ ID NO: 27188 - DNA, 629 bp, Zea Mays
gtgatgggcgtcattgtggtgaggtggagggtggtagtcttcgtgtggatggggctggtaaacgggaattgttgtcctcgccggctggggcgagtgtaggtgagggggagctgcggaatctttttgagggtgaagagctgaggataatgttgtttaactctagggagatgggtatcatcccgaaggctgaaccaatgtaaggtgtgataccctcgctccgtgtatgtaactataatttgtatgatgaggctgtgtgccttcgctaatccggccgtgcccgtaggggacttgtgcgcttgatctatcgcgtttattgtgttggtccggttgcacccgtagtcggttttttgcacggatagtcttttgaggaagacttcgattttgcgcacttgttgtgctagtccagctgcacccttgggcgacttttgcacggatagtcttttgatgaagacttcgattttacgcacttgttgtgctagtccggctgcacccttaggcgacttttgcacggatagtctttttgatgaagacttcgattttgcgcacttgttgcgctagtccggctgcacccttaggcgacttttgcacggatagtcttttgatgaagacttcgaatttgcgcacttgtt

SEQ ID NO: 27189 - DNA, 346 bp, Zea Mays
ctgatattgatgttcggaaatattgtgtgccatagattcaattgttaaaaggaaaaggaatggttggagtgctgtgaagtggagtgcggaaaagaaagactcgtggctaaaaaagccagcacatagaagagtcaggtatcttgaggtgcgtctaagtatgtgtgacaaaatgatgggacatgtttcgataggcaatttcttttgtaaagaatgcttgaaggacaactctagaaaatatagagtctatgtttagtagagactagtgtgtgtggctcaaagaggaacaaccatgacctcgtatatatgttgaaatgctactattccatatttgattgcgtgattggct

SEQ ID NO: 27190 - DNA, 400 bp, Zea Mays
gagggagcagcagcgcctccttgtgcatctgtggagattgtggggacgatgttggtcaaatatggtagattgagtcatgtctctcgcgatcatctcgcccgggcagctgggcatgtggcagagagattcgagaggtcgctcagcgttgctgcctactcacacgtcttgcgcggctgaccgacgaaaacgatagatttccgtgtagctatgcatgccatccttaaccacgggctgattcaggcatcgacgacaaaaatggaaccagatacatcatctctcctatatcttcaaatttctttggggttttaaaatgtgtattggactgtttgcgatgccaattgtacagatcaagacgcgtattggactaagtttgccgatgtcatttgtatagattcatgag

SEQ ID NO: 27191 - DNA, 366 bp, Zea Mays
agaggcgaaagtgttgcttgatgaggtctgtttattgaaagacagaggtttgattgttgaagttgtggtcgctaatttcgtcttcaagaatattcagcctttgaaagatggggcatacccagcttatttgtatagtggtatcaatgactctacataggtcaccaacaagagaattcctactgaggatctggtgagccgactggtaatgattctgaggggcagagtgtcaaatgttggtgctcctgttgcctattttgtctggaatctgccaccttataggccattttctgaatttgtgtccaaccctcctgctagtgatggtggtctgggtcttagagtgtgaccctctcccgaggacattgaggc

SEQ ID NO: 27192 - DNA, 415 bp, Zea Mays
gtgtggatcaggccagagggttcattcacgcctgtggtaggaactgtgacttgtgtctccttgacattccagaccgcgtccatgaggccatggagtttgggttcgctggagcgtggttgtgcctttcgccatcacgcagctacacttcggtggtgacctctgtagcactattggtttgccgagggttcaatggaggaagatctagatcgcctgatagatgactttgatgccatcacgaatgttgtgcttggggacgtgtccgtggaagagaattcatagcctctcgtagctttgcttacgatcccttcggtctcgacacttcgttatcatggcatttttgcattgttgacgtgtgtggattttgggtcccctagatgcaggcttgtgccaggttgctttaagagggcgcttttcg

SEQ ID NO: 27193 - DNA, 312 bp, Zea Mays
gccagatcagagtccaacggttgtgattaaaatctatcccttgaacacccgcgctcatccctgaccatcggatccgcgatccgcggcccagatccaatcgcgcacacaactcctctgaaccacccgatatactctaacggtcctgatttaatgcaccgaagcggtacaccgcttctaatcctagccgtccctatccaaatcaacggcgcacgcggatctgccacactcaaaacgctcgccggcggcgagaacccaccaaattcccccccacggcggcgccattaccgcccggtccgatcacatgcaatcgag

SEQ ID NO: 27194 - DNA, 471 bp, Zea Mays
cccagctcagttttcttttctcaacgtactattaggttaagatgatttcactattactggcatatagtggatttccatttgctagtgctagttttatccgagataggcattctgtgaatttagtgcagggtttatttatataaaacaaaataaagaagtgatgtgcgggctctactaataaggaatcatctgctcttgctctcacggaacatgtagagtggatagcaacgacaatatgcagtcacatgccaaagcagcaaagctagtagagcgtctgctaacaaacagtcgatcaacaatcatgcagcaacggagtgagagtgcaaccaaaaaataagcaaatgattgaccttatcagttcaatgctctataatgaattgaatgaagcatgactgcatgagagtaccacaagcgcagtcagctatcgatcagaaacttgcactgggaacaagcgtgcagcaggaatatgga

SEQ ID NO: 27195 - DNA, 621 bp, Zea Mays
tgtactggtgccactgagtgcacttgagcctggacaatggctggtgtggagtcttacgacctgcctgaagtgctcgtgttcatggcataaatgcgtacttgcatgttgtatcagagctgtttgagttactttactacgttactttcactgtaatggaactaataatcaacttcttgagaagcaagtttttttcaagattgtttcttgctaagatttatatcccaccatttttttctctaaaagctgcagaaatggaaaataataggcatgtgaaaaagatgtgggagtaccttccatgagcgcaaaaacattgccattagagcatatctaggagtttggtatagttacttgctaaactaatagatctagcaaattaacagaagaaatagcaaccttaaattttgtccttctccaacagtattctgtaataacttcctaaacaattttgcatagggaactccgaactgtttctaaccaaccaaacctttttttaatagtttctttgtctcttactgctttctcatttggaatattttatttttcttaacttactcatgtgtacaatttactccgatctcccaagaataactttggacagggagcagatgcagagttcttctc

SEQ ID NO: 27196 - DNA, 380 bp, Zea Mays
aaaaaaacagtatcgtcttcttgcctcggaaaagctgccacttgatacagatgaaatcctatggatttcattttttttccctttctctttgcggcaaatggcgtgcaagtatcagtaacttgcattgctcgacacttgtaccacatatctaatcagaagcatcacctgttgagacatggaccaccgataaagtagtagcacctgaagtgttgtggatatctcagagtgaagcagggaagatatccgtctgcatgatactaaggatgcggccacgtgcgttgtctactagggtttggatactaacccgtacccagctacctgttaccaacctgctaagccaaaccgttactgcattgtaatttcagttccttgttcttggc

SEQ ID NO: 27197 - DNA, 275 bp, Zea Mays
gggaacttaccgtgaacacaccaggcacagaatagcccatatgccggtaagtcatgcatggagtactggtaccaaacatgcattctgaagtttgtcttcatagctcagtcatacgtccataccccttcctcccaggcacataccaagtcatcgataaaaggctccatgtacacgcccattttgttccccgggtgtccgggaattatcaacgacacgaatatattatgcctttgaaagcacacaccatgagggagattgattgggataacaaacac

SEQ ID NO: 27198 - DNA, 609 bp, Zea Mays
ttcgcctcgcccgagcagggctctgatctcgataaacacaatagggaatcacgacgtcatcccgtgcaaggacattgacgcaccccgtaagcaggcctttagcccataccccggcgccgttacaacaactacggtatgggcagcctgtcccccgaggctcagacgtacgaacaaccacttggtctctgcctcggctctcagcatgaaaccaagaggcacaagtcaacaatgcagtgcaccgtcacgtcgtctcgtagggcaccgaggcatctctcctttgaatacaacgacaccaggcttctgcggacatccccttcgtgtataaatagggtagtagagttcttccagggggagagacaagcaggacacacaaacgaacactcagttctccactcggtctttgatattggaacttgcctcaatcagttctagggacttggagacttcccctctaccgccgtgcttgtaatccctactgcaggcacctcggtgcgagtaatataagcctcatgccccctttgctagaagtagggctttgcattgctcgaactaggataaattgcttgtgtcaactcacacacaatctagaatctagccacacggcattat

SEQ ID NO: 27199 - DNA, 295 bp, Zea Mays
ttgacaatcctatgacaccttccgttcataccgaggatccagcgtctgtacatgacagaggaatccgcgaaacagatgacatggcacaaaaatggaaaacgatacaatcctgacaagatggtgcacacatcagatggtaagcatggaaacactttgatgccattcaccgtgagaaagtcgaagaggctcgtaatgtacgtgttgcgttggccacagatgggttcaatccctatggaatgagcactaccccgtacacatgttggctcgtgtttgttatcccaatcaatctcccccc

SEQ ID NO: 27200 - DNA, 410 bp, Zea Mays
tcaaggggggcacgtacaagggtgctgagctccgacatgtgggcccagggcaaaatggagggaatacatatataagtatccaatgccagtgtcgcccagaagatccccgagcgccataatgtctgtagtccatatagtattaatatctcgtagctgcttccttggtaaggcgcgagccatgatgagcacagtgtatgccgcagcacgggcgtactgcctgccaacggaatggacaggcacgccgcctgcaggatggcctggtcgccacccgtcagcggagtggacatggcacattaaatgttgaggcggcacatcgcctaccggtgtaatggacaaggctcattaaataccgaggcggcacatcgcttgtcagtggaatggacaggcggcacaccttatccgcaataaat

SEQ ID NO: 27201 - DNA, 410 bp, Zea Mays
gggcagcctgcctctgcttatggatatcgagttggaaggggtccctgctcacctctggggggttggaactgctgagctcctattggatggtctgtgcatggttcagggacttcacccagattcaatagacagtatggatatggctgttctcaagctcagagcgtggtgtttctctccggatagcctgccagcggtattagatctacatgtttaggaacctcttgttgttggggaggatggatccattgtccctcgcactttggtttatcccatttctgtgagggtgattactcctggtgattggccggcaggggacatgtctgaggtattgccttctgttatcgaagatgaagatgacaaggatcagtttcagcagaggcgacgcattattgggcatgatctttcagctt

SEQ ID NO: 27202 - DNA, 855 bp, Zea Mays
cactcccgctcgaggaacttgttgatgcgcaaaacctcgagggcgacgtcctcgacacgcttgaccagatccggacgccagcgctcaatgtcggagcgcatttcctccagcgccacgagacggtcgtcgccgcggagagccaccacgtcgacctgctcctggatcttgtcacagcgcgtcgtgaagtgggagtggatatcctcaacacgccgttcgatgttgtcacagcgtccggcgaacttctcggagagccgcgcttccatcaggcgcatttcctcgagcacctgacggttactggcgtcggtgtactccatagctgcggtggtggcacgagtacgccgtggacagttgttactgggatccagagtgcctgagtctgataccaaattgttagcgcgtggtggagaagggagcagcagagggaagaatcagaggtagaagaagaagactggggaggaggcggcggccagaacagccagccaccagaggtagtatattatcttcttctgtttcatcatgctctcgatcgttcctagggtctgattatttataccacttcattacaatacggcccatccagccttacacggcccattccggcccagaaactctcacgttccggcgtttcacccgtggcgtccgtgtagcagctccttcctctggctcgccaccagctttgttgtctgctcccacgttgtcttgggtgtcggtgctgacagatcgctagacgccagagctactcgttcgcgcttcacagaggttgttggcactctcgtctccgccaacaagagcataactgccatccttcagacttgcccagcgcagcttcctatccttcccctattctcgtgttca

SEQ ID NO: 27203 - DNA, 284 bp, Zea Mays
ggtggcacgaaacttcaggtccacagcagcgacgtcacacgatggagttttctctccggcgagcgattatcgacgcgtagagcttcgattgcgcccagttgatccacgcacgcactccagggaccacgcagagacaccccggccaactaccacggccacaccgatgttgttagcacaggaccacgacgacagtgagttccgcccgtgagaatcgcggcggcgaattggtggttggcaagaggttgagaataaaggagggagaagaagaggtgcatgggtcgccc

SEQ ID NO: 27204 - DNA, 387 bp, Zea Mays
atagtgatagtgatatggacgaggacaagaagagaaagaacaaaatggagaagaaaatgtactaccacaagaagaagggctgcaatgtgcattttgggagggaatggaactccaacgaaagctccaccgactcctaagatgaggacgccaccaacattgctgtcaacaagggtcttcttttcctcaacatcatccacaagtgtctcatggccaaggagcgcaaaaagaaggtacaatctataaccacccccaattacactacttccgatgatgagggtgattctagtgataatgaacaaaacctatctttgctctttaaaggccttagcttcaagatagttgataaaataaatgaattagtaaaattcattaacgagatgaatgaac

SEQ ID NO: 27205 - DNA, 683 bp, Zea Mays
gttttgtgtggattacagacatttgaatgctctgacgatcaagaccaaatatccagtgcctatcatagatgaattcttggatgagctacatggagctgcttggttttccactcttgacctgagagctgggtttcaccaaatccggatgcatccacaggaccagcataaaactgcgtttcaaacccaccatggtcactttgaatttaaggtcatgccatttgggctgtcaggagctccagctacgtttcaaggtgctatgaactccacattgggtccgcttctcaggaaatcggtgttagtattctttgatgacatacttatatatagcaagacatggcaagagcatcttgtccatctgcagcaggttcttcagatactatacacagaacagtggtatgttaagctgtccaaatgttcatttgccaagcaacaaattgcttatctaggccatgtgattaccccgaatggagtggctactgacccagaaaaaatcaaagcagtatcctcttggccgacgcctgtgaattgcaaggagcttaggggtttccttggtcttgcgggatattataggaaatttgtcaaaaatttcggtgtgattgctaggccattgactgatctgcttaaaaagggaatgctttttgtttggacccaagtacatgcaacagcttttaatacactcaaac

SEQ ID NO: 27206 - DNA, 307 bp, Zea Mays
gatacttggcacgatcaggttttgcactctgacagatatggcacgattgaacaaaggcctttatctgctctttcatccctggccagctgaagatggatttggctcgcctggtggttacaggaaaaccagaatggccccctagagcactatcatgtagtgcctgcataaccttcgtttgaagtgtttcattatggcccaaccaaactcgtcccttgtgtctgatcaccccatcagtcaactcatacggaggtaactcacctcctgttgctagcacttccagtattttctgggcttgggcatcattctc

SEQ ID NO: 27207 - DNA, 550 bp, Zea Mays
atgtttaaagcctcattcatgtgtcaattaaatttaatcgataattgagattacaatggagaaaacaaagatgaaacatatacatgtttttgcggtgtggcgtcaaacatcggcaagtgggaagacggatatgagctcatagggttgcagtctggtacatgtcgatgagacatgtttatgtcgctcggcatattattgccaacattaaaatggaaatcctgtatacattattatggttttgtctaatattttggatgcaaattggaaattaacatataatgtaaccatgatgagactgcataaaataccttgcttttccgcgtttgagtttgtgttcgtctccaaatctagggcagccctcaaaatgcacgacgcatttgttgttgcttttcgtgtatttcctcaaactgggtacctgtcaactccgtattcggttgtgaatatggcgtagtcagatcctgagtattctgggtacccttatggatgtgtgcctctgtaattaaaaagttgtagtatttaaacagcaagaactgataaatgcatagagtta

SEQ ID NO: 27208 - DNA, 395 bp, Zea Mays
tgaaggacattgaaaataagttcgggaaacacaatttagcattgtctggaatttggaagaaaaaatccatattttggaggttaccttattggcgcgatctaagtgtgcgtcattgtcttgatcttatgcatattgagaagaatgtgtgtgaagctttgattggtacaatttttaacataaaagggaaaactaaggacaacaccaacacccagtgtgaccttgatgagctgaacattgaaaagccccaggaatggtatactctgaccaaggaggaaaaaattaaagtttttgatctgttacatgatgtgaaagttccatctggttattcagcaaatattagaagactcgtgtcaaataaagacctaaaactgtcaggtatgaaaactcatgactgc

SEQ ID NO: 27209 - DNA, 278 bp, Zea Mays
agatgctttcaggaacaaagtgtttcaacgattttatggtcctcatacattttaggtatatttgtattcacctcaatacacagttttgaagtaattttgggtaaaagagtccacggtaatccactccaacaatgcatatgaattgatgcactagcggatccggagctttttaggagccgagctaagcagctaagtaggtctaatctcctttatacatgggatgcagcatactagttaataaatttagtgaagtcgaacgccaaggagctcaggcagac

SEQ ID NO: 27210 - DNA, 330 bp, Zea Mays
tgatgggccttggatcttggcaggtgattttaatcagatttccaggtctgaggacaagaacaactcctgtatcaacagggccctgttgagaagattcagaagatggatagatgaattggagctgaaagaaattcctttgataggaagaagatacacctggtctaaccagagacaggcccccactcttgttaaattagatcatgtcttctgcacttcgagctgggaagggttgttcccagcttctactttattcagcaaggcctcagaagattctgatcattgccctttgattttaaagctgcgtgaagaagaaggtacggggaaaaggag

SEQ ID NO: 27211 - DNA, 424 bp, Zea Mays
gatcacaagttcacagtataacaagttcataaagatcacaagttcacagactcaaatttcacaatatccactcgatttagttgacatgacatgcttactcatgaaatattttttcctcacataaagggttttttcacagcctcacaggaaaactctaaaatctagtgtgtgaaaaagacagactgtcggctatctatcattatatattactaatacataacatgtgcatagaaaatggtggattcgttcgagagaccaaatcgttaatctcaactgccttccaataccatctaaccccaaaaaaatcttaaaacatccaaaaaataaaaaataagtaatacttatccagagatgtataggcgatgcgaaaaaatcacatgctggaaaattccgaaaaaaattccgaaaaaattccgagacacaa

SEQ ID NO: 27212 - DNA, 438 bp, Zea Mays
gacaaatatctgatgaacgcgataagatcagcggcactgtggaattggatgagctcggatgaatcgatggggaattaatccgggatggataacttcaaacgtggtgcgattccatgaatccagtcgagcgtggccggagttagtcaccggcgtccaccgtgactcagttgattttcggtgcagtgtcatccatgcctcgatctccctcactatgtctctttcctatgtggtaagcatgcgctaacgaagttatccgtggccggagatcgctagccggactatcttggctataaatagcactatgaactacggcgagggatgcacacctccactcagtgagatgatccaagcccaaattcgcagcctctgccccctcctcccaaattgattgcgcacggtgaaactacagtctcttacggccatatagccccaatctcc

SEQ ID NO: 27213 - DNA, 659 bp, Zea Mays
agggggggaaggagacgggggctcgaacgcaagaatacggtaagcataaccaacccctggcaccctccttctctatttatgcaaaggaacagggagacagaacggcgtctgaaaggtgggcccaccgcaaatggcaccgaaggatccgccatcttgatcgccaaccacctcgggcatcgagcagggaggactgtatgccttgcaggttttacaccacttgggatagagcaccagagggacgcaccacaggggatacgccagtaacaagcaaggcggttaaccacgccatcacgccacctgtgcacgatgcagtggtcgggctgtttcgtgtcccatcaagccgcccacgcctaggcgatgccatgatgacccctcttttaccacgccgccacagcaactacctcacgccggccaggtaaaaaccaacccccccaaaaaaaccctcacatagagcgaggggtgtaccgagcaagctcccagcagagccacaagctaggtgaccggcccataggtcatttgcttgaatccatgtctaaggtcgtacctcacattctcctgcagaaacccggctgacggggaggccatggggcccctctttggtcagccagaccgaccaaagggccgatataggatcgaataaggaaggactcaatgagatg

SEQ ID NO: 27214 - DNA, 1334 bp, Zea Mays
ctctggttcaaccaatctctcctatgattaaggcatatgaaaaggaaactaatcttaaccaatctctcctatgattaaggcatatgaaaaggaaactaatcttaaccaatccctcctatgattaaggcatgcaaaagggaaactaatccttatctttctaaacttagccactgattgtgtcgcctgccttggctgcgcgatcagcagctctcctggcgtcacgacggcgcctgtaagtgtggccgtacatgacatctctccccccctcgacgatcaactcgtcctcgagctgaaagtggggaaatttgtcgcggaagtcggcggcatcttcccatgtagcatcagtagtggcctgccctttccagcggatgagcacctgttgaatacccctggccaacctgtaccgaacagcctgctccggttctgggatcaccgtcccattgtgagtgggtggaagaggaggtggtgtagctggtggggcgccgacgaacttcttgagaaggccgacgtggaagacatcgtgcaacttggcacgcggaggtagcgctacgcgaactgccaccggattgatgagctctgtgacttgatacggcccgacgaagcgcggcttcagcttgcccttgggcgcgtggggaagggaggaggctgcccgatgacgcaggcgcagcagcaccatgtcgcccacggtataggagaccggtcggtgcaggcggtcgtagaacttcttctggacggcctgggcttgttccaggcggtagtgaacatccgctaggagctcctcgcgttcagccattgtcttggccaccgccgccacccgggtatcgccaggctcacaagagcggatggagggaggatccctgccgtaaaccaccttgaaaggagtgtccctgagtgatgattggtacgccgtgttgtagacgtactccgcccacgatagccaacgtagccactgacgggccggtccccagtgaagcaccggaggtacatgtcgatgactttgttggccgcctccgtctggccatcggactgcgggtggaaggcggacgtcatgtgcagcttggtgcctatgaggcgcattaactccttccagaacgccgaggtgaacactgagtcccggtccgacaccatggactgaggaatcccatggaggcgaacgatctcaccgaagaacgcctgggccacagactcatcactgtaggggtgagacagaggaataaaatgacaatatttgctgaacctgtcgaccacggtgaggatcactgatttgcccccaacgcggggcagcgcctcaatgaaatccaagccgatgtcggaccacacggcctggggaacgg

SEQ ID NO: 27215 - DNA, 434 bp, Zea Mays
aaaacagacctgaagatggtctgtcagacgagcttaaccctgaaatcagactgacaatggcctagaactaggtttgagagccattttgagctagatctgttgctcgattgatggttgttgctatagcataattgtaaatggtatgaagggctgcaagtttgctactagcgaattagcatgttcttatgaagaaatttgtgttctggatgctacaagttgggttgttaggggctctgaagtgcatttccgatggtacagtgtcccgatcggatcgccagctcagtccctcgctgccgacgagccgcgcgcgttttcgtgctgtcgccgccgtgattcgtgctcagatcaactggataacgccgggaggtcggtaaatatcacaccgaggatatgctccggccactaaattactccgaccaccgtacccgagctag

SEQ ID NO: 27216 - DNA, 630 bp, Zea Mays
taagagcggggtaagacgcttcataatttgtattccaccatcctaagagatagttgtagggttcacattgtttgttgcctttttgtctctgttttgtgctaaccatgcatgaccaaagaatcaaatggacaaggacaaggggcctaagcttaacgacgatgagtgtgtctctcagatggaattgaaggagatgatgcgcgcgatgactgaagcttttaaaaaataccatgactctgcggcgacatcgtatgagcagcttgatcgacgagttgctaaacttgttacacgcatggacgtactggaggcttgtcccccaccaccaactccagccccagctcactctcctgtggacgacgacgatgacgacgatgtttatgcaccgctgggacaacgcctcgcacgtaatcgaaaaggtatgggaggtaatggtagacgtcgtcatcataatcctgaaccagaccatgatccatttgctaagattaagttctctattccaccgttcatgagttcttatgatgctgaagcttacttagactgggagatgacggtagaacaaaattttaattcccatcttgttcctgagcagcatagggttagacaagccactagtgaatttagagattttgctat

SEQ ID NO: 27217 - DNA, 287 bp, Zea Mays
gtgacaactaatgtttgggaggacatgaagcaattgcttttgtgctggtgccctacccattttatatggcacccgtatgaccaggggccacaacctgataagtgtttgcacaacatgctagcggaggagtatgctttcctccacgcgctaacatggttcttgccaatagttgtttttaaaatacgttcgcaccagacatatctagtgatagcaccaaacatcacacataacttctgacaattcaatgttgaaatttactgttataatgcattttggaagcatcaaat

SEQ ID NO: 27218 - DNA, 422 bp, Zea Mays
caatttataggctctgggggcagtggctggtgaatcagggatggcgcggtggcggccggagagaagagggtgtactggcgcaacaattagtggcttgtaccgtggcgagctcaccgacgatcactggatatgcttaacgcgatctactgcgacatggtaagatgcccgggcacgtggcaaacgacagtgagggatcaacggcggtgagatcctacccgagcgatcggtgaacaagggggaggtacggcggctagccggattggtgtccagctcaatgacagtgatgatctttctaccccgagacgttatccacttaccccgagcacgaatcgagacgctggtggcacgaatagtggtggagagatcatcggcggcgaggggaagaatcagatgatctgatctatttctggtcactgtacaat

SEQ ID NO: 27219 - DNA, 385 bp, Zea Mays
aaaaaagcaaagttagggttcactgccaggggactcccagcgaggatgtataggcgcgcactaagtcaggcgcataaggaggaaagatgtaactccgaccagaccctcaacaaagtgaaatcagtcgagctatcagacagaggcgctaactgagaatgtcagtcgaactcttcaacggaaccagtcagtcaggaattatcataatggactcacgtaaccgaaatcgtcaggcaacgcataagccgagcagaagactgaacagatcagaggaaagcagcaaacaaaatttttcattcattagaagtggctcattacaaagggagagggtcggccctctaggaaccagccccaacatcctacacatactacctactactaaaactac

SEQ ID NO: 27220 - DNA, 526 bp, Zea Mays
cggccttcggagactgaagcgagaccaaatggggtgctggatgatttatttgatgtcttcccttgcttttaaatcatttttaacataaaaccactcccccatccaggacccaggctatcttttctggaatgttggtaccgggtggctagcattggggcgagcaataaatccataacaaccaaagttgttgtggtactattctttaccagtggccttcgtctcatacaggagctcgtgtatgctgcagaagccacttcgcactcggctccagcccttgacttcttacagcccagacaaaaaatccccatccttattacagcttcaggggtgatctgatgaaggaaaatctggtatgtcttcaacacttcaactacaaacttgctcaaaggaaatcgaagaccagccttaaaaagcttcggtggataacaacttcattttcctcaggggcagggacgatgttgtctccaccaactctcacgatagacatgtcgtgaaagtatcttcctctcacgttgtcaagatgact

SEQ ID NO: 27221 - DNA, 753 bp, Zea Mays
tactgctgcagcggctagctggttgtcggggatcgctgggctgtcttgccggtgttgtcgccggagcgggacggcgactcttcactcgaggccggcgatgcagatcttgaaggggcccacatacagggttataaaagcttgtcccacttgtgttttgtctttctgcatgcggcccccgcgtggagtccgattgttttgcgggaaggttgactggtatagaggttggccgaattagtagggaatttctccatgagccattttttccctgcactattttagctcggtactttccgacacgatccattgtgcatcgttcttaagctggaccggcacagcgatcgtgccgtgtttaggctcaaggctagcacgtcgtgctcgatctggcttggcacagaacaacaggaggcacaacaccaactcgactcccccgatgccctacacatgcataacaccgacgccccccacgtggccccacactcactcatttctggcactcgaaaccataatcctaatccctccctcctgctcctggcgatcggcgaaattcccctctcccagcgacgacttgtttggacatctatactctcgattctcttctgcttctcctcatcctcttccatgtcctcacatcccgacccctaatccccatcctggctcctcctagcctaactagtcaacgaatgtggtgttcctcctcacggttgtgctctcaagcgactcaggtgctccggctacgcaggtgagatcccaaac

SEQ ID NO: 27222 - DNA, 837 bp, Zea Mays
gacagaggaagatgaaagaggcaaagaaattgaaaaggtatactcatctgtgccccccatctcattttgattgatgcttctctgttcaaaaaagttgaggccccctggatttttgcagaagaaaaaaaattcccatgctcaaaataaacaacacagcatctctgcccactctttcaccccaaccaaaaaagtcagagctcccatggctttccgtgccacgagatgctttctggtttaaaacaccatcgctgatacgtacttgccggcgttagcaagctggttcatgtcatggccttcttccaattaccttcttagacactagcatgcagcagtagaccattttagttagtatgatgagcagatagatctgctagattcgttcaatgtcagtctacctgcattgctcgccagtagtatagcaggaaagagagcatgtatgccaggtcttgaattgggagctgctggtacagcttccatgcgcgtgagttctgaaagtttcagccatgaagtagcacccccgtgaactcgaggtgtcttagcagtgggatctgcaaaacaagacattttgagccgcaacgtaatatgtacaatggctagctctccatgcatgcctagtgtacggctgagcacagtttacctggctggttagccggtcagccatgaagaaaatccgccatcagaacctgcaagacaaggcatcctggtagatcagatcaaatgatctaattcaaacagacttgacagacagacagatatctcacccactcctagtttgtattacttgacaaacatcccatgctcggatttttcttaaacaccccatgtaaaaaacacctg

SEQ ID NO: 27223 - DNA, 350 bp, Zea Mays
cgaccaccttcgtcaagtgaactctacaatcaccttcgtcatgctgtcgaagaagacaacggcgccagggggtgttcttgctccccaagacaccaatcaagatgggatccttctaagggaggcccgaagccagaagaggaaggccactagcccaactccacaagatgaagagctagaccaagcgatgagcaacctggaagctatacatcaacaagtggaagagagaagggagaagatgcttcggccggctgagctccaaaataatattgatgaagcagccgaggaaatgcgacatatcgcataggatactgagcaagggcataaaccacaacaaagagaccttcatcaag

SEQ ID NO: 27224 - DNA, 1129 bp, Zea Mays
tgcaggaagcaggacatactaagctcctgtgatgaaggatttctttaatttttgtatctgctgaacagttctggaatgaattatagaacatatatagatactatgtggaacaaaggcttccttttcaggtatagatggcattatttctttgtggcatgtcaatcaggttttggtgtttggtgggaaaatatcgcttcgaggcactaagcagaatagcaaaatacttaaattggtgatgtgcatgcctaccattcttaggaaaatcattggggtactgtggtgttggtctaatttatagaaatacccttttctctgtttagggagagtagggatacttttctttcaaaaccccccttttgtccacttagggggaactgggatattgtttatgggcaactgggatactttttattcatctgtgtggaatttccaggtgttcattgagggatagtttttattcacctgtgtggaatccgatctgttcattgtttgaaacttaacttactagatgcaatcagcttttgcttactggcccttgagcataacttcagcaggtcaagccctaagctgacttatgtacttgagctcaccatctgttgaataagtttgtgacaggggaactttttttatttgccagaaccttctttatcccatcccttcctgtttccccacccattctgctactctagattggccaaatgggtgcaagctgacatcctcaatcaatgatacgtaccagtcctctttctcaagttatagcaagtggattctgtttacgagctattggtgcttcttttgagatgatccacgagttgtgcacactacacgttcccaggcaggcagtattgtgtttcattgttagagacttaacatttattgtcagctgttcactggccatgtgtttactcatgcaattcttgtgatttgtgaagcatctataatttgaatttctttctggttgttaggcataacttcttccctggcagtggtcagtaccccttggcttttgaatagtgaatacagatatagaaaccggcttcaagtttagatttaattagagaagttaaccggctaacttccagttccagaaagcattatttaggcaggggcagacctacgttcaccccag

SEQ ID NO: 27225 - DNA, 603 bp, Zea Mays
ctttgggatacatacttattgcgaagcctgaatttatgctacaaaaggatatgttgaatctcatagagacagcactctcttctgaggttgattatagattcaaggtatgccattttgtatttgcatcttcttttggtagttattttctgtttaaaaaattaagtaaattaatccacctgttcagattcaaggacttcaaaacctctacgagtatcttagagatgctgaaagccaacttactgctgagagtactgcgaaacctcctgggcagtgtgaaataaatggcagaagtgaagtgcctgttgctgctggtgctggagacaccaacatatgtggtggtattatccaattgtattggagttctattcttgaaaggtgcttggatacaaatgatcaagttcgccagagtgcacttaaggtgaatcaagcaggcattatatttcacttcacactttatcttatcattttacaatagaaataagttatttttcttgtagattgttgaagttgtacttcgtcagggtttagtccaccctattacctgtgtacctcaccttatagcacttgaaatggacccgctggaggggaattcgaagttggctc

SEQ ID NO: 27226 - DNA, 790 bp, Zea Mays
ctcagttagcagtgcatagtccagatgaaaagggtttctccttgcagcagagagtgatcaggaagggtgatcaggtttgggtggcaagcaactctgctctgagaacaaaaattatagatgccctacataacagtgttgtgggggtcattcaggaggccaggccacataccacagagtgagaaggctattctggtggaagggtttgaaggctgatgtggtgtgctttattaagcagtgtgcagtatgtcagcaagctaaagtggagagggttcatccaccaggtattattcagcctttacctatacctaaaggtgcctggcaagatctcacaatgggttttattgaaggactgcccaaatcagaaggggttgacactattctagtggtggtggacagattttctaaatatgctcattttttccctcaaacatccttcctctgcagcaaaggtggcccaagtgtttttggataatgtggttaaactgcatggcacacccagatcactggtttctgacagagacaaagttttcactagctatttttggaaggctctattttcctcactcaacactaaactggctctcaccacagtttatcaccctcagtctgatggtcagagtgagacagtcaatcagtgtttaaagatgtatttgaggtgtgcaatatctgattcacccaatctgtagaagaaatggcttcctttggctgagtttttgtacagctcttcttaccactcatctttgggatgttcactttttaaggctttatatggatatgagcctgtgttttc

SEQ ID NO: 27227 - DNA, 534 bp, Zea Mays
catgggtccattgttggactggtcctataggtgaacttatatttcttgctagatgcctattgaatcggattccgagtatgcccggttgaggctgcacatctcatcatcgagggcaccagcaggcatcgtgacaactaggttcattgggtgatcaagtgcaaggggcagattgaactaggataggatgaagcaacccaccacaacatagtagattcataccatgattagctattctttaagttctgtctccaaaacttgccaatatgccatgcatgcccagttgtctatcattgttgtctttagtttgaaagccaaagtgttggtagcagtcatgtcttgtgtctgctccctttgatagcaggcatgtcttatgtttgctccctttgatgtgatgttacatacctcacgcccagaaccctatcattatatggaagaaaattaattgttgataattttttgcatgtaattttatttggtaatccttgtgaattttgagcaagggattaggtctcaagtgcacatgatagagttgtt

SEQ ID NO: 27228 - DNA, 651 bp, Zea Mays
gcgctggtcgcatccgtgccttccgccgtgttcccgggggcagctcctaggctcgctcctgttctgcatctgtggcgtttctttattggcccggagcagcggcagcgcttaactgtttccgccattgatccggcgacctcagctctggctttgcccttgtttgtggaaccggaaagccttttctcagcgctcaaaatcccgcatatgatctggtgctgggggttgccaccaacaggttgttgcccctgcccccgtaatccttgccccctttgctccttgctttcttctctgtgctgcctttgaagtgttgccagatcgctcttgggagatcactggttcgttagccggcccatagtttgtggacaaacaagggccagttcggtctatttcatttcacagaaggggaaaaaattaggcggcgggatcctgctctttcctgcatggtcccttttggagatactgtttgggttgggaggaagtaaaagcggacaagcttggaggttccgaggagggaggaacatatccctttgtagctgcatgaggaggcactgagacaatgagagatgacaactcaagcaagaacaaggtaagcgtgtttgcacctccatcatgtttgtagtcacgtttccatgttcgtctctgatcctgttt

SEQ ID NO: 27229 - DNA, 1185 bp, Zea Mays
attgatagcaagactttcttgaagtaatttcttgactttttccatgtttccacttttgtttcttggaactgatgcgacgacgaggctgaagctgtgtgcaggtgatagtccatccatcaatgtaacactcatttgcttctttttggagctgagcatccttgtgatgtttcctttttggaaaacctggcacttcatcgtctgacaatgtatctgctgttagttgttcttgggaagaccattgactttttataccagaaaataaaattcggttcttctgttttgtagtttcactttcgttcgtactgatctggcgacaagggattccatagtactcacaacaacaacatgttccaagatcatttgtctgttggtgtgcatccttttgttcatcagttgtttcatttctagtgacgtttcgacttgccaacacttgctggtatgaggaggtgagttgcgatacattctgtattacaagagcttgtgcatgtaacagcttttctaagtcaactatcgagggtgatgttgtggttgatgtcatatggttatcggtagtctgctcatgtgctataaattctgctaaatcaacttgttggagtctagctaccacttgagatgttgcttgtagaaactgtgcatgcgccttcttgaactgttccatctgatccttagctggaggagtcgctaacaccatgtattctttgcacttagtgacctcacttgtagttgacattccaaggtctgacatctgtatgggtatggaagaatggaagggacgaaaaggttgagcaaagacagattatagagcagagaaaacccatttacctaaggtttttcctagctaactgatgtcattgtggacaaaagtcacacaatacaacaacaatcattacaaagaagcaaatcaaacatagtcacaaatataactaacatgaactcaaacatatcagcacaacacaatccaattctactcattcaaccaaaacaaaaggtgagacaaggttttggaataagaaggatattataacatcaaggagttgggtaagaattatcaaggagttagacaagacatatttgttggtggccaagagtgaaataagataaccatgaattattaaagtgaggataaatgatacaaccaaggatatgaagtgagttagggagaaaactttatcaaggagacaaaat

SEQ ID NO: 27230 - DNA, 523 bp, Zea Mays
cgagaaggtgctaggcacgtcttactagcagcgtgagcacggaggtggtttgtggaggggggcctggccggtggggctaaggcagggtggtgtagggtgtggcttggctaggcctagctggggatggccatggccgactagggctggactggggttggccagggttggctatgtggcttttctcctcctactatttgaattcaagctcaagcaaagatattcatatagaaagaatgcacatcaagcaaaggaaataatgagctctagcatgatgcaacatttcatgactcccatgaggttttacactctcactccatacacactcccaaagtatctctctttcctcaaacaaggatgaaataaaattaggagagaaagaagggtaacacatgaatttccatgggtattataaaagaaattttatacccctaaattcaaggtgttacacagacccccaacactggacttcttacaacggccactataacagggtgcttatcgatgacatcgtgccacctaggaa

SEQ ID NO: 27231 - DNA, 450 bp, Zea Mays
ggagttcgtacgccacggactatgcgttcagtagccatactctccgtctgccatcggaatcgcgagggagagagagagagagtgtgtccatggctgccgggttgatccgagggagaaagggggggggtgctgaaacagtggtgctctggctcaggctgctcgtcctcgcccgccaattctcgaagcacattggtgcccgacgccgtcagctgccgcacccaggggagctctccgtcaccgcgcgacatccgaccaccgcggaccgaccttttcgccgcgacgattgctggtgagaacacctcctccagtctcgccatggcctagtagagctatcgcacacgttcaattagaaaatgggggcagggatggcaaggccgggcaacaccagcgaggttggggaatggcgccgccgtgtggagacctggccaccgcgcgttggggaattaggcg

SEQ ID NO: 27232 - DNA, 472 bp, Zea Mays
cgtccatcaccatgatgtccatgcatatctgtgacatcaaacatcttaatagcagctctgcctctagagtctagaccttgctgaacaaagaggaatgaagaatagagggggggggggagagagcagagaacaaagagtgaagaacaggcaaaagtagctgcagcacaacatccatacctttagaagagctgctcatctttggttggacttctcagcagctgtttttctcgactaaaatggcggagaaggctgctgctgctgactgctcatgtctaaaatgggggagaaggctggtgctgctgactgctcacgtccaaaatgtcttttggcctcccaggcagcatttaaagggttgctgactgctcacgtctacctaggctgtatctgaagggattgggcgtcctttggcctccccaagacaacatttaagcctaaaatggcttttggtctaccaggcctatcggctgatcgc

SEQ ID NO: 27233 - DNA, 544 bp, Zea Mays
atcggcttcatgtatccagactacatttacccctcatgaaagcaggggaagaaaagaaaaattgctgcctcggccatctctgttgtgccgaagggcaagaagatcaaggttttaacccaccggccaaggtacattgaaacggccacggtgccgaaatttggtgaaggaacatcttccactatcaaagcagaacaagctgctcatgtcggtcggagcaccaaagaatcggctgcagtaccgaaggtttctgcaaccggatcggccgaggtgctgatacaaactaccgaagctgaaggaaaaacgaccgagaagccagaccaagaggaaacaacaggaccgtcggaggcagaattgccgatggtggcaataacaccgccctcagcacccacaaaggcagagcctgctgcaactgaaagagttgagcaagaatctccagatactagcatggctctggagaaggatgcgcccgaaaaagctaaatttcctattcccaaagcaccgtccgaagatctcgactttattattcgacatgcttcgggaaaaa

SEQ ID NO: 27234 - DNA, 305 bp, Zea Mays
ctcatatttaacttgtgttgccttgattttcaacgccttcagaggattgaaatcaagtatccaacattggcgcccaccttcggtgattccacgaccacatcatcatataccatgtcgccgaagaaaacaatgacaactggctctatccttgcacccatcgatcctaatcaagggaatgaagatctcatcagagaagcaaggaatcagaagaaggccactagcccagcaccccgagaagaggagcttgatgaggagatcaacaaccttgaactcatccatcagcaagttgagaagcacaaagagaa

SEQ ID NO: 27235 - DNA, 522 bp, Zea Mays
tgtggatcaggttgccagcgcggcttgctcaccgccggtgacctctttgcgccaaattcacgccgccgccgtcctgattcgagtacggtatggagtggataacgtcggggaggggtaactcgtacgtggcatcatctcctgagcccggccgaagttactcaccggcggccgccatgactcagtaaaattctgccgcggtggcacgcatgccgtagttctcccccactgtaccttttaccgacgtggtcgacatgccatagtgatgctatccgtggccgcgaggtgatcaccggagttattgccacggtgttagccacgtattcactgcgccgccttcttttttatctctggccgccaacacggctcggccaaattgagcaccaccgcccgcggacgctataaattgaccgtgcctccagctccgccatgcatccaagcatctactgcacccacctgcatcccaaaccccccaccagagaacttgaatttggaatttcccccaaaccggttgaagaacgccgt

SEQ ID NO: 27236 - DNA, 741 bp, Zea Mays
cccgcggagatggagtctttcccatcgtgttcctgacgatatagtaaaacaacatccaaattaagggcacagtaagctttagcgacgttccagagctcaagaacgacatctaggaaggcggttgaagggacaagacagtgggtcgacggaggggtgctcacggcggtgcggaaaacggaatttgggggaagtttgaaattcgcgagctacagtgactaatcggaggcaagagctagtgttctgagctcgtaataagttggcgaagcaggccgaggcatcaatttatagcagatcaaagcggtggctccgaatttggaaggagagcggagcacggctgtgacaagacattgtactggcgggtccgtcgtggcgctcaacggcatacaaacgcagggacagtaattctgagcgtgccacggttacgactacatggtaaaggatctcagcgtggcgcaattgagctcaccggcgacccacgatgacattggtcgttcggccacgtcgcacggtcatgagatgcatccgataagcccctgcccgcgaccgaatccatcccctgccagatcttttaccccccccccccaccccgcgcggttatccactttgcgatgagcatgaatcgcgccttcggcgaggatcacggcgtggagttcaccggcggcacgatacactgcatctgaagatcttttcgtgcactgtaccatggccatcttcgtcagtcgttctgatagagcacgtttg

SEQ ID NO: 27237 - DNA, 721 bp, Zea Mays
caaaatcgaagtcctctccaaaggactctccgtgcaaaagtcgcctaagggtgcagccggattctccgtgcaaaagtcgcctacgggtgcagccagaccagcacaataagtgcccaaaatcgaagtcctctccaaaagactctctgcgcaaaaggcgcccacaggtgcagccggactagcacagtaagcgcgcaaaaccgaaagtatttcccaaaaggttccccgcgcacaagtcgtctacgggcacgatcggatcaggaagacacacagcctcatacaaatcacgggtacatacatacagcgagggcatcacacgttacattggctcaaccttagggatgatgcccatctccctgtagttgaacagcattatcctcagctcctcaccctcaaaaagattccgcaactccccctcacctacactcgtcccagtcggcaaggacaacaattctcgtttgccagccccgtccacacgaagatgacttccctccacctcactaaccctccgcttcgcgaccgcccttcgccgcctacgcccagcactcgcactaggaataacttcaacacccacaacgcgcggagaagcttccaccgcagccacatccagtgccacaaaataatccaagtcttcatccgaagactcctccgtccacacaaccgaacccccagaatcaccagactcaaaaaacttagacacagaatcatccgaaacatcttcagc

SEQ ID NO: 27238 - DNA, 361 bp, Zea Mays
gaggcgaggccttgccctccgacgtgttctaccacatcatcggcacgccagccgtccgcagtccagagggcctacaaataaccaacgacaccgagggccatcgcatagtcgacctcatcatgatcgaagattggcgggccccaatcacgctgttcctgcagggatattaccatccaagcgatgtcaacgaggccaagtgcctcaagcaccgaagccgggacttcacaatcattgagggccagctttacaagaagggggtcagtcaacccatgcttaaatgcatcaccgaaaccgaaggcgtccagatcatgcgcgaagtccacagcggaacttgtggctctcacttgaggcctggggccct

SEQ ID NO: 27239 - DNA, 375 bp, Zea Mays
cacattcgccatccttcttctcttaggagttgcggtggaacccttttgtgccttcagcactgttgcctctgttggagggctcaagatctcttgcattctcgttatttcttcaattttcggccctttagccttatcagccttcgtctcaactagctcgactgaaggtaacttcgatattacaaccgactgttcagtgctctgcgcagacagaacaatttcttttgttttggcagctgaagtggccccttcgccatttgaaactactgcgacgagttagggtaatgtgaccggtgagtcagaaccttcatcttcttgcccttcggctcagctgtgatagccgaagcagcaacttttcccgaagcagcaatctttctt

SEQ ID NO: 27240 - DNA, 299 bp, Zea Mays
acagttaccacaagtcgcactacacgcgagcgctttctaaggtacttccgaactccctttctaaagtgtccccaaattccttgagaaggtcgtcaaggctagctaaggacatatcctcgacatcggacaaattctctatcctggagggaggtagtgctggaggggcttccttcttccgctcagtctggcatccttggctcttggtcttctttcggattttcttcgtgggggcgagcttctttagcttcttatcgtaatccatcttcagggttcggtaggcttcacgagtgttggcctct

SEQ ID NO: 27241 - DNA, 310 bp, Zea Mays
gtggcttttgcttcttgatttgctgcttgcttccttcttttgccaatccagcggtttcttgcattgaaaatgtggagctaaagtgtgtatgttttgttacacaaacgttggtgttgttgtgctccttttgctgaagcactgccttttacggttagcgacactcaatgttcgatcacttgtacaaaacaagatatgtattttcttttgagcaattcttttaaaatatatgggggcaatgaagagcttcatattgtgttgaacctcagtctgtaatattaagttgcaagtgagagttttatacttacgacat

SEQ ID NO: 27242 - DNA, 811 bp, Zea Mays
gccgttggggctgaccacgtgactgagagacttcttgatgaaggtgacgtgggagaagttcctataggggcggccaaggtaggtctccacgctgtcgaggtccacgcccagcgccgcttccacggtgcacatgtggaacgggaagtcggactcgtggctagcgttgttgcagccctacgccatcagcacattgtgattgcctttcggtgggcggtgcaccagcagagggcagctctagaacatggcctaggcattgccaaacacaaaataagtacgcggtgcccagatcaatgtctcaggtagaactggatcccgttctccacgtacaaggtgtcctcatgacgttccatgctgcaccagtagacgaccgacttgttcgaatttgaccttagcacgagatcctacctcctttccgaccctgccatgtttctgattgtcaggttctgtgctatgaagccgtgacccaaggcatctgattaatagttctaatttacagtatgcatgcatgacaactcaactgcagtgaaatatcgatctccagagttactcactcactgtcgtcgtcatgttcatggggtcgccagttgcattgctcttgttccctatgatgacagtggcaccgaccccatcgccgatcagcatcacgttccttcttgttatgttcaccgtctcatcgtagatgccagagagcacatgcatgatgtacttgtcctcctcagcttcttgtggtgcatcatccagggctgcctagatgctggtgtagcaaggcagcggagcagcgataccaccgcaccgcttcaccacgacagca

SEQ ID NO: 27243 - DNA, 480 bp, Zea Mays
cagcgacagaattctgactcttccgcttgggcgccatctcaatctcgtcggcgaactgagcggaagcgagatcaaagggaaacagaggaggtttggaggcagaaagtaaagctagggctcagaatgcagaggcatgcgacgacgcggtacaagtggggttttctcgggtcagacaccatttctaaaaaagtgcccagtcatcactcggtcgttatttctagaacgccgatgtggctcggtgtaactcggcagttatttctaaaaacgctgacatcaccaatcctcactcggtcgttatttctaaaacaccaacgtggcttgatgtggctcagctgttgtttctaaaacactgatgtcaccactaatcactcggccgttatttctaaagtgctgatgtggctcgaaaggactcggttgttacctctaaaacgccggcatcgccaaaaaccgttcggccgttacccctgaagacaccggcag

SEQ ID NO: 27244 - DNA, 333 bp, Zea Mays
tttgtccagccgttacttcagcaaaaacaatatggtgttagtgatgcttatgtcgacaaaggtagtagatctataatgtcgttcccttcagcgcttgccgcatccaataggcgatgccaacgcagtagagtacgtcacatggtaactaacgagccattgtcaaccacgcttcctttggacaggtcatacgtagatgctctaaaaggtgtgtattatgcccaacaattctggtaacattcttcctgctttgctgtggtgctaccctttctctttttcatgtgtagatgcctaccctgagaggtcatactacggtggacccgaacacgtatgccc

SEQ ID NO: 27245 - DNA, 383 bp, Zea Mays
gtcatactacttgacgaagaataacttattatttaatgaagttaaaaccactacgggttaatatgccacacactgaatagtaagtatttccttattttaaataacattctttccgtataactggcttgaacaactgacggatagaaaacatttaatattcaacaataaaataccattgtgtcattgtgtggctggattggattgctctgcggctgcgacaaaaagtggaaccaaccatcattgcatgcatgcagatgcttgatgcttttggtcatgactcatgagagagaatggtcaatggtgtgtgtatggctgtgcacatgcagatgcacttagtctgttggacgcggggacctgaattaaccggttggctgttgtgtgtg

SEQ ID NO: 27246 - DNA, 309 bp, Zea Mays
gtgaattgtcgcgaagtggtaggcgttatcgtagcgaggtggagagaggtcgtcttcgcgtggatggggctgggaagcgagaattgttgtcctcgctgattggggtgagtgtaggtgagggggagctgcgaaatctgttcgagggtgaggaactgaggataatgctgttcaactacagggagatgggtatcatcctgaaggttgagccaatgtaatatgtgatgccctcgctatgtgtatgtaaccataattttgtgtgatgaagctgcgcgctttcgttgatcaggccgctcccttaggggacttgtg

SEQ ID NO: 27247 - DNA, 395 bp, Zea Mays
tcgagagggggctcagggggagagagagagagacgaaggcaaacggaaattgtgcacagctcttggtaccagactatcagttgacagccaaacaactttatagaggtgagaggaaaacaaagaccaccatagtacaaaaagatctgacatataaagtaccatttatcattgtcttgttcttttcttgcatctcccatcctcttacgtctctgctaatctcacttctggtactccacaagcatttctgttgcttcatacccccgctgctacaaagctgtccatattcccatatgctgccaacaccttgacaacatgcatactgctaaatagtgaagacttcacaacaaataacaaaagacacactagagatggaacagggattggtcctaaataag

SEQ ID NO: 27248 - DNA, 496 bp, Zea Mays
gtttggctgatgcgggtgcggaggatggagcgggggaggtacaatttgtacctcctgatggtgttggtatgcgtggttaggtggatgttgagcggggtcgtggttgtatggttgtgggaggtggtgttgatatgtgtgggcgacaactcttgggttgtcggcgggttgcgcccgggacatcctgtccctggtggccttcgtttctgggcagtccctcgtcgggtgcgcgcagtcttttccatgaaataggcagtaaaacctgcgcgactgttgtgcccgtcctcgaccccgaccacgcgtgccattgctgcggccctgggggataatcttgacagcgaggggtctcaccagcggggtgctggttggcaatgttgtgcacttgctgctgactgaggctgtcccgaccggagtctgactgcgaaggtcttgtccatgttcggctggactgcggaaggtccttgggtttcctctgggactcgaccttgcgctggtggag

SEQ ID NO: 27249 - DNA, 303 bp, Zea Mays
cctcactctgacaggtaaatttattgttcgcgttccggactccggaggatgtgcatgatgggcgcaagatttataccggttcaagccgaacatccctactttcagttatcggtggcttgcgctatcggcaccattgatgattaaaactcgtagtgtagctctcaagtctcttgtcagggtggaagtggagctaatagctacagagtggagtcctagctaagtattgggactcttggcttggcgacagggctccgggtcctcgtcggtgctcctcctcctattcgtcagttcgtctagggtccg

SEQ ID NO: 27250 - DNA, 294 bp, Zea Mays
ggcgacctggctagctatccgcgatcacaaggctcgacgttagtgcatggcgaccacataacaaaggagcacagtgtggtagaatttaggcgcgagtgacaccgcgatggaagtactgagccatggcggtcgccggtgagatttgccccgaccccggcctaatcagcacgatggtgaatcggctcgaagttatcccgccccggccgtctctatctccatttcgcttggacacatctgaatccaacagtaccatggatcttttcttcagatatttcctcgagccgctgatcttcc

SEQ ID NO: 27251 - DNA, 298 bp, Zea Mays
ggcatacctagtaactcctcgggaaacacatctaggaaatctgatactacactgatagcctctgatggtttaatctcctcaatatgagcggtgacttggtgacaactccctttccttgatccagacaagaccaattccactaacacttcttctcctgatagggacactaacttcacttttctgtcatcgcaactaagactggcttgatacttggttagccaatccatccctaggatgacatctatagttgtatcctggttacccataactatcaaatcggcgaggaactctatccccc

SEQ ID NO: 27252 - DNA, 483 bp, Zea Mays
ggcagtttggtgtagtcgttttcgcttttgttacgcttcatccggctgcgcctttgggcagctgttgcacggatagtcttcgcggaggacttcgatttttcgcgcttgttgcgctagcccggctgcacccgtaggcgacttctgcacggatagtcttcgcggtagacttaaatgtttcgcacttgttgtgctagtccggctgcacccttaggcgacttctgcacggatagtcttcgcagtagacttaaatgtttcgcacttgttgtgctagtccggctgcacccttaggcgacttctgcacggatagtcttcgcggtagacttaaatgtttcgcacttgttgtgctagtccggctgcacccttaggcgacttctgcacggatttgtcgcacgcgagggtggctagcgctgagcctcgcggtgactttgtattggtcgaatgtcgaagaccgtcgtcgcggtcttttttcgacgcatgtttttg

SEQ ID NO: 27253 - DNA, 537 bp, Zea Mays
acgattttctggagcacctattgacgtgctccgccaagttttccggagttggagctatcccaaacatggtacatataagcaaggttattaaatcgacgactactgaccaggatgattagtcgacaaccaggacgactagttgaccctggtcggtctagtcgtctatatatttgacctacagatggcaatgagtgaagacccgccaggttttgttagcccaggcccggccccgctagactaaaaactccctgcttcaatacctgtacggctgtacccgtgggcgggtacaattccacactcatacccggacccgccaggtattccatacccgatgggtacccatacccgtctagagtggagttgtgtctgtctgcccaacttagtttatggtgaatgctaggcaccgagaggcaacatccgaccttccgtcttccatcttctaggtctgggcgtgtcgtgtgcctgcatgtggcttggtcgcttcgaatgcacattaacgaggagtcgcatctcagaagcttggagccttggacacgc

SEQ ID NO: 27254 - DNA, 352 bp, Zea Mays
ggtaattccagcgttctatctagggtaaagccatgtgtactcatggggcccaggcttgtctatttcgtatttaccatggtggatggcgtggggctgcgatggtctcagacaccatcattttagctatgtcgacccctggcctttgtagcctaaggctcgacatggctcgtcatgtggtggactgtcagaggtccacgcactcaggcctaggctgatatgccatgaatgcaccacaggcggaggggcgcggggggctttaatgcaccgcagtccgggaggctcataggtcatgagtccaacgcgactagaggggtcatgagtgggaagtggatcggtgcctgctgaaagtcac

SEQ ID NO: 27255 - DNA, 588 bp, Zea Mays
gctggagtccacttcatggtaaattctaaattcaaaaaaaaatattagagaaaccgagcataaacataatgtagacggcaggcatcaaagcaagtgtatgcatggctctggcctacacccacgtactacggcggcggcggcagcagcatcggagttgagagtaccgtcgcacgtgacgtgagacgttcaatggtccatccatgatatggatggaatcatttgacgctactactacgaggcgggaggggagatgataagcatccctgctactgctactgctacgcaagcaggccatcaagtttggcacgcgcgaatatgttcttcgttagctttatatatagaagaataagaaatatatactatgatcttatggtcgctatgtttgtgcgatgcgttgtcgatcgctccctccgactgtattattaacgtgtgtgtgtgtgtgtgtattcagatagatagatgccttggtcaagagcatctgcagtgcctcaatgaccattagctgtatacgtactatggagcaataatagagcgccacctgatttctaattatttggaccataattaagcactcgacattgatttctt

SEQ ID NO: 27256 - DNA, 337 bp, Zea Mays
ctagtgactgggcatttcgatgtaagagacggagccacacccaatcatcaatgctgaactcgagctcacggtgtcgctcatcataaaacctgtgtgcgtgttcttgagcttgtagtagcctgtctctgacctccccaaggaataggtcacgttcatggagcatttggtccacaatttgagttgcagcagtcctaggttgatatggaacaagtggtggatgatctcttccataaactacacgaaatggagttgttttcagtgctgagtggtatgatgtattgtagcaatactcatcccaggctagccagtccacccaagccctaggtcgatcccccgt

SEQ ID NO: 27257 - DNA, 600 bp, Zea Mays
cggaggcaagggcgggtgctctggcttcgtgacaacctaacggagctagcgacatacttaatttatagtgtccgaaagaggtggcttcgaattttgaaagggaaggctggcggccgaagaaagggggtgagtcaccggcacaggttacgtggctttcaccgtggcaaagcctccggcgatggacggacttgctgctatggttcactgcgacgtgttaaagctactaggcacgtggcgcacggtcggtaagcggccaatgccggcgaggatcatctcggtcgaccgtaggccaagtgggtacggtgaacccaccagtgaccgggtctgagcctatccgacatcaagatctttactttgccacgactatctcctcacccaagagcacgaatcgtaccaccggcgcggatcacggcgcgagggtcaccggcggcgaggtgggatgaatctgaagatcttttcgtgtactgtaccatggccatcttcttaagtcgttctgacagcacgatttgaggagccttgttctccattttccatgtgacaacttactaatctgtttgtaacaaagttactaacctacaatccagctataattcaactata

SEQ ID NO: 27258 - DNA, 335 bp, Zea Mays
tagttgatgactacatttcacaagtcattgacatggagatgtcgaactaataatgtgggcgcatgtatgacatgaggctggaccaacccaatgcaatgtgagatattgtaatatagttatctttttgcaacatgtatactgtgtccatagacctgagattgtcgcatgttctcaagatgtggattgaccaacttagggactatcaaacgctactccgtaactgggtagttataaaggtagtttcgggtttgtcaggaagcatgctgtgaggcatggtcagtcaagatggaatttgtccctctcttcttgagagagatatctctgggcccctcgag

SEQ ID NO: 27259 - DNA, 495 bp, Zea Mays
gtgaggcaagcacgacactggtgccactagggatgagccccatccaagtgtcggagctgccggtgtcgatctccgatgccctcccggtgctggactccatcgccgatcgcctctggtgcctggatcagatcctcagggcccgcctagaggcagagggcagcaagctctgtggggtggtggttgaatacgtcctgacgtgcttctagagtcacaaccccgccatatccttggcgccggtgatcgatggtctggtagctgctgcagaagacgacgcccgggagagcgtacaagatgtcgtggagatggtggctgcgcgcttccagcgtgatcctgccgacgccgagtagctgaatctgcagagacaaggcgagggttccgttgggaggcggctgtaataacttttggtcttgtaacatattttaagaaccgttaatcaagtaaaactggaacttatcttgtatgttatttgtccttgctgtgtgtagcgtcatcaac

SEQ ID NO: 27260 - DNA, 312 bp, Zea Mays
cttatgactatgtgactaatacgtgctcacctcttctgtcatttcagtgatttcgcctgctcgcttgcacatctcctgtcctacctggatcttttctctctcgagaagttcccaggtagctatcactctatttgatgacttatctactgctctctactctcgcttatcttttcactctatcttgcagcagtcagttcaggatggtgagggcaaagaacgtcacaccatcaggggaggagatgacgaggaccctccttgccccttcatacaggtcaagggcaagaccgtctatcttgagcagcaagagggcag

SEQ ID NO: 27261 - DNA, 290 bp, Zea Mays
gtcattatttgatatgaaggcatgataatcctcattgctaagagaattgcttaagatgtcataagctaggtagtttaagcgaaaacatctttgatcctcatcggagataatttttccattataaccaggagggaagatactcttgtctataatttattctaattgtggatctacggttccaaaggcatttataaccctagtagaccaagaatcataattagaacaatcggaaagtaatatttcaagagttacctcattgatctccttcggagttgtcttcttgttctttt

SEQ ID NO: 27262 - DNA, 486 bp, Zea Mays
cacgaccctacagaagacccatcacatcgacctaggaagatatatgtttctctttatctctcttgcttgtcaaaagtaaggcacctatgtaaggtttctcccttgaaatataaaagggacgacactccccctactcacacacgagcacactagttgtaacatgccacaaagcaatactacgatcagcactatactggaccagggcgtgagcctaaaccagtataaccccactatcttaaacccacgttcgagcctcaacgattcaccattcggagtgagcctatgctatcatccccacagaacacaaatcctattgtccctaatttccaaaaccacgacagttggcacactaggtagggggtcgttagcatgccagtatacatcttccactccgatggcccgatcctctatgttcgctagaggggagacttttgctcctagagggcgcatcacatttggctccctcgacttcctcgccaccaccgc

SEQ ID NO: 27263 - DNA, 434 bp, Zea Mays
aggtagaactgcggtggttcgttttgtgctctttgccattctggtttatctccttattgccatgagtgtcccgagatgggtgatcaaagcaattgacaaggttagaaggggtttcctttggaagggaaggaaggatgtgaagggtgacagttgtttggtgccctaggaggtggtaacaaggcctctaaacctcagagggcttggaatacctaaccttaaattacagggatgggctctgcaagctaggtggctatggttgcagaagactgatgctagcaggtcatggaggggtctggatcttcccatacaaccgcaggccagaaagtttgttgacatctcagtagttacagctgtgggaaatggtgcaaacacgttgttttggtctgatcgctggttagaggggtgctccgttttttaggtcgctttagaagttt

SEQ ID NO: 27264 - DNA, 373 bp, Zea Mays
gtttgggtgagacccatgtagatcctattgagatcgatattatcgtcggctctagaatagggactggcacaggctccacgagcccgctagagttagtccctgattctgatgctggtggtagcaactcaaactcgaagaaaagatccaagtgctggaatgactttgatgaattaactaagattgtgaatggtaagaaagtcaggtatgttgcttgttgcgatttctgtaagcaaacgcttactgctcgatctacttctggtactggacatttgcttcggcataattccctgctaagaaagcacatgaacgctctgggcaagtctaatctgtgcttaagtacaatgttgatggtactttgcaatgttgggaatac

SEQ ID NO: 27265 - DNA, 404 bp, Zea Mays
ttcatggtggtccagttcaatcaaaggggtcgaggagcttgaggagagcctagggatgctagaacaagcaacggagaaacttgaactgacctgagttgagctggccgcggtgagggtgttcttgcggtgtttttgagcagatgggggaagttcaaaattcgagctcactggtgatcaactgggagcaatactgggtggtgtggtgcgtgttgctcttgcggagctgacggcgggctcaatttatagaacccatgagtggtggccgggaatttgagcgttgacgcgcggcggccgaggaaacagggagctactagcgcagtggattggtgtccggttaccgtggcaacctctccggcgatcaacgaagagctaaagcatgtcacgacgatgtggtggagatactc

SEQ ID NO: 27266 - DNA, 623 bp, Zea Mays
gataatttgtctgtttctatgtctgaagattttgagtccgatggtgaaacctgggagttcgtttccttggacggaggagtcctcggatgaaggcttggattattttgttgcattggatgtggctgcggcagagacttcgtcgcgtatggagggtgtcgggtgtcttcctagtgcgggtggagggcataggcggcgaagggtggtggggaaacatagtgtgggtgagttttcgcggagtggcaagcgccgtcgtatgggatggagcgtggccgtctccgtgtaaaccgggttgataaacaaaaattgttgtccttgctggctggggcgagcataggccagtgggatctttgaaagctttgtgagggtgaggaattgaggataatgctgtttaattacagggagatgggtatcattctgaaggttgagccgatgtaataggtgatgccctcgccgtgtgtatgtaataagcgatgccctcgccgtgtgtatgtaattgtaatttgtatggtgatgtggcctgttggccgtatttgtacgcttgtattggtccggctgcgtacgtgggcgactttgtgcggagtgtctttgtaatgagagacttcgattaacgttattccggctgc

SEQ ID NO: 27267 - DNA, 575 bp, Zea Mays
tttatttccaatgcagtggcgaagctcgtacgtttatttcattacatacccttttttttatgatcagtgacatgtctttcgatacacgctgaactgaaggatcacttccaattgatgaatcgacttttccatcagcaattaagatggctcgtgccacaatggagagattttttttttggctaaccattcgaactcgtatatagcaacggaacatgtgatttttttttatttttttttgctaacggtttaggctcctatagtgcgagcatgatgattattattattattattttttgttgctaacagtttaggctcgtatagcattggagcatgatgatgattattattattattttttgttgctaacagtttaggctcgtatagcgttggagcacaacattcttttatgcaaagtagcgctttaagaacttcccatttactggcggtggacaatattcgccatccggagatatgatccgataagcgctgctagagtatacatcttttacaatgtacgggccttcccatttaggttcaaatttgctttgcatcttatgagtaatattcataggccg

SEQ ID NO: 27268 - DNA, 310 bp, Zea Mays
cgcgtccgagtcgctgggcatgaacgggagacacgttctacggccatggggatggacgtggtcatcggtggaacgtgagaagcgctcatgcgcatgtattttcctttgctatatatatgaaataaaaaagaaaacgcggtggtcgttgttgccgcaccaaaactttctctgtgtccacttcgtgttccagttcgcttgggtgatcacccaggccgtcgtcggtgcaagtcgccggagcaacgctgttaggcttgagcacgaacgcggcgtgaccgacaagctcggtgaggtggagcacgatgagcgagac

SEQ ID NO: 27269 - DNA, 307 bp, Zea Mays
atagtatcagcagcatcatgggcagcagtataagaatcccaccaatcagcagcaggacctgtcagacgtccagaagcatatagaaccttctcctggtccgtgcactgtgcaatattcaacatcttttcaacggatttcagccaatcatccgcgtccagtggatcaggtgagctagcgaatgtaggtggcttatgactcatgaactctctatgcttgtctcggggtggaactggtggtggtggtggaggcaatggcacttgttgctgctgttgctgttgttgtgccctcctttcctggcgtatctcat

SEQ ID NO: 27270 - DNA, 309 bp, Zea Mays
ggcatgtagaacctcaaatggttgagcatggacaaatatttggggttcctgtatttcagattctcatttccatcagagagtgacgacggatcgtgtgctttgaagtaatattctttgaggcgagctgactccagttgccgaagaacagaacagtatgaggaattaagccatttgaaattgtctatgttctccacatgaacagttgccagttgaggaggatgagtaatgaaccacatcttcatggctgcaaaattaagtctatcagtgacaatgtggaacacgtgcttctctggttcattggcatttgcc

SEQ ID NO: 27271 - DNA, 411 bp, Zea Mays
ccttaatagcccatgcaccctcagaccgtggtgcacttatggcctatcggactaggcttgagcgcgtagacctcccgcagggcactaaatggcggactgcaccaagccccaagctacaaaagccaggagtcggtataaccagaatgatggcgcctagcaccgtcgcttccccgcgataaatacacaatagccaagcatccctaggccccacgagtgtgcgtggactcacccacgggtggccgacccatgttcgacctataaaagggagaggatggcctctagacaagaggatcgagaaaaaggaaccgaaggacacttggggaggaccggacgcctttagatggagacgaacccacaaggacaaacaggaggagtgtcgacgaggatcaagaggtcgaagcccccgccaag

SEQ ID NO: 27272 - DNA, 730 bp, Zea Mays
ggaaaccgaaacaactgaaactgaaactgctccaatctccgaagttatgaggcggtcgggactagttgtgacggagggcgcttctgacgaaggcgcccctgttactgaagatgttgaagagggcgatgttggtgaagaagaaattgattataacaccgctatgccatcgaagcccagccatttggattttgggaagtcaactgtgtctgaagctgatatggctatgatgacgaagttaggctacttcagagaaaccgataaggggttgattcgttttggtggggaagagactatcccgaaaccagaaaatgaagtggtggtttttaagatcttcttcaaagcagggttgagatttcctctgcacgggatgattgcagatgtcttggaaaattttgagatttaccttcatcagctgacccctaacgccattgttaggctcagtgtttacatttgggccctccgaagtcaaggggtggagccactcgccgaagccttctaccgagtacatgaacttcactatcagacgaaggctcgggaagacggactgcatgagaactttggctgctacaactttgcttatcgcaaagacatgaagacaccggtggtcagctatctcactaaatggccgaccggttggaaatctgaatggttttatgttaagattgatgagaaaaaggagaagctagtgcagagcccgctggagttaaccttcgggctaactaggcctcag

SEQ ID NO: 27273 - DNA, 677 bp, Zea Mays
aacttccagatgctgctttgccttttctgacatttcagaagcagtgcgagctttgagttgttccataagattcttcaaatttcttgactgatgcttctcttgcaataaactcacctgcagggagtcaagttctctttcgcactctgcaatgagcatatccttgaaaacagtatcatgcccttggatgacgttaagtgaattcagagtttctgcaaaaccataaagttgattcacctctagctcaacttctgccacttttgttgctgcagcctcaagaaggtgctcgatgtcaacctgaacagattcaacagtttgttgaatatcagaaattgcaatttctttctctgctattagtgtataccgatctgctttctcttgattaaacatttccatgagctcctgctccctgcatgcaaatttctgctcaaagaatctaatccgttcttccagctccagaagttttttgtcggagacctcaacaatttcatagtacctgttcttcacttcatgaatagacttctcatactccatcttgataagacttcccaaatcaagtttctggaccatgttttcctcttctagcacaacgatgcgttgctgaagcttatcaaccatcattcctttatcattaatgataccacataactcctgcttttcttttgtatgacactcatcag

SEQ ID NO: 27274 - DNA, 704 bp, Zea Mays
gtgatcgccggtccggtggccgataccgaagacgccgcccgggggagcgtgcaggatgctgtagacgtggtggccaagcgcttccagcgagatcccactgatgatgagtagtcggatctgcagagagaaaataaggtttccgctggaagcgacttatcatattttggttttgtaagatacatttaagtattacttgtcaagcaacattacaacttatctgcatgctactttccctttgctatgtgtgttgttgtcaacttcttccctggtacttggcccctctgggatgtggtctcgacttgtcgaggttggatgccagtatacttaagaaggagttggtgacctggcccccaggagggtatttcgactgggacccggacctgcacacaaccttagctagggagtttcagtagtgcacccatcagacccattaactggtatccttcatccttagaattacgcaacatgacctataggatctggactggggggccgacccgtgtgtctggaccccctgggtcacgacttctaattactagggtactcgtcgcatggtggtggagtgcgtaggcttacggtacgggaccaggctaagcagtcacgcggctccggacctccccctgagacgtgtgccctttctttagagccggacctcgggtttccggacctacaggactatagttccggatactaggacacccgcc

SEQ ID NO: 27275 - DNA, 275 bp, Zea Mays
caccatggacccgagggggatgaaggcgctactgctcaaaagcttggggagggagtttggggaggccaagggtgtccatttgtaggcgagggagcataagagcttggacatgtggcggtaatggaggtagcaagctctgtgcattggtgggcatgggtggctgctaggcaatgttgttttccttttggacgaagcaacgaacacacattgggcgcccatttttgtcattttctcttgggaatcggatctggattactgtaggagattgtaacacc

SEQ ID NO: 27276 - DNA, 445 bp, Zea Mays
gccaggagcgcgggaagagcgccacaacacccaagagctccatgataccgtcggtgaagaagtagaaggtggacatcttgtgcttgagctctctaaacttcttgggtctgccattgatctatacccagcaccaccgactccacggccgtcatcgagcctgaacctagtctctctcgtcttctttgtctctaaacaacgtttgtgtactctaacactgtcatggtctatttcaacccatggaccacggacactaaccatacatgtggagttgagtttggtgccaaaaaccttgtagtgtcgtattgtccccccaatccacgaatcatgtatgacagtggtttcagtcagctagttatttcacaggagacatggtatgccttttgtcagcatcctttgatgtctcccttttgtcggcatcctttgatgttttgtcctctgatcgtgg

SEQ ID NO: 27277 - DNA, 343 bp, Zea Mays
cggtgacctctacgcaaggattcgcgctgatcgcggtgattcgtgcaggactcgggcaggatagtaccgggcgggtgaaaagattggaaggggagtggatttggtcatggggtgaagcttatcaaccgcgcctgtagccgtgcgacgtggccggacagccggtgccgtcgtggaactccggacctcaattatgccacatcgtggctctttattgcacaatagtaaccgtggcacgcctaggcttaccatttcagaaccgctgcaccggtggacgccacgactgagccactagtgaccttccttctctccagccgccagcacgccatgccaaaattaggagcca

SEQ ID NO: 27278 - DNA, 306 bp, Zea Mays
gaacatcaaaagcctgcaggattactgcaaccccttccagtgcccaaatggaagtgggaagagatatgcatggatttcgtgactggactgccatggacccaaaaagggaatgattaaatctaggtcataattgaccgtcttaccaaggtagctcttttcataccagtaaagactacctacagaggagccaccctcgcccggttatatcccatggagaatagtatcaagacagaggaacacaattcacctcaaaattttggttaagtcttcagcaagccatgggcaccaagctagatttcagcatcg

SEQ ID NO: 27279 - DNA, 477 bp, Zea Mays
tcagccaccacgacattcagctgaactcgccccctcttagcacatttaaggatatggccaggctcgaacttctcaccacaggcatagcaaagaccattgactctttggtactccctcagttctctttctctcgataaatctccaccaactggttgtacctttccttccccctattgccaggttggtactgttttggcacatatccttggcgaactcctttcggtctgctcttctccaatacttcctattgtatcagagccagcaacacagccttatccaccatagcaggttgatgcatttgaaccacactctgaatctctagcttcaacccatgtatgaattgagtaacaaaaacgtctcatccaacagcggattatgcatagatgtcatgtaacgagcctgatcaaactctcccacatacttttccaatgtatccacctgattcagactccttatcttccttagggacttggcata

SEQ ID NO: 27280 - DNA, 596 bp, Zea Mays
tcaattttgaatagtaaattttagcccctccaatcctcttcattttccttctcctaaacaagtccatttgagtggcactttagtcctgatgccatcggagcggtggcggcgatgcatgctagagcctagaggaacatcatatgttgctaccacgattgtcttttaccctacaacctcaggagtattcttaacccaatatcaagttaagaaaagtatttctaaagctacaccatactaatcatctatctaacacggttagactggtgtgtcatataatactacctgacgcgacagatatgacttattggtgtggtatgtcgcgccactaacacctggtgcgcctatcgccatgcaaacttgtgtgtcagagtaggagattacatagtcgtgcatggagctctcttctcttcctccctgctcttcttctccccaagaccgtgcaagcgcccttcgctgttgcaagccacctcatcagttgaaatcaacggaatttggtcaagattgcgttggagaatcctcctccctccttgggtcctctataacagtaaggcaaggtgttcctccactcatatgcttgtttttaatttgctcctagg

SEQ ID NO: 27281 - DNA, 418 bp, Zea Mays
ctccagtcacatattcctatatgcatactcgcttttgtgcatactccctctatcccagaataaatagattacactacacctctgaaatgttcgttggattatatcattaattccgatatacaaggcaaaaggttaggctccaatcacatactcctatatgcatacttgcttttgtgtatactccatccatcccagactactagagttgtcttaagtcaaagtttttatacttggctagaatttctagaaaaaaccatcaaaatttataacatcaaattaatatcattagatagaacatattttcataataagcgcattgatcacagggattgaattacttggggacggagggagtatcagaatctgtaactgatggcaaactctcaaaccccgcggctagggactccgcactaagcaa

SEQ ID NO: 27282 - DNA, 584 bp, Zea Mays
ccttagagcaacgtcgagggcgccaccagcgaggggggtcgagcctggtgcgctggtgagcaccggagatggagaagggagaggggatggggtagctgtaggggaggaagaaaaagaaacctagcttgataccatattgaaaaccctaaccctaaccagtgttggatgatgtattataatagaggtaagtgggcctaagcccaatatagggacaatcacacacaatacatcagtacgcacactggcacacaatacatctaacacttagtgcctgatagcaactaaacaggttacatggcaggtaatcacatggtaggaggtaggtgggctagcagctagctattggtcttccataatattggttgactgatatttgtttgctgatgtcgtttttctgcggcatttatgaactgccatcacttttttgtgttgtgcatatcatgtggttttctctctctgaatggtagatgaacactttctatatctgtgtcccaatctcctattgtggtagaacacaaacatttgttttgtttcatgatttgtaaatgtaaggagactatctcgctatggtgataactgataaa

SEQ ID NO: 27283 - DNA, 366 bp, Zea Mays
tggagatgcaaataaacttatccgtgcactgggacttgggtatgtttcaatccatgtgtgcctaaataactgtgttttgtttcggaagaactatgcaaagcacgatcaatgtccaatttgcggtgaatcaagatggaaatatacaaatagacggattcctcagaaggtactgcgccattttccgttgatccctaggctaaagagaatgtttgcttccaaagaaatagcaaaacaagcacaatggcataagttcaagaggaaacatgtggagaatgagcttagtcatccagctgatggggaggcatggaaagattttgatagaaaatatggctggtttgcagaagatgcaaggaacattaggcttgg

SEQ ID NO: 27284 - DNA, 398 bp, Zea Mays
caccaaagagatccaactccccataaggtcctccgccagctgctcccgatgcaccagctcccattgccgcaatctctggtggcacgttcagatgcaactagacatacaacacatgcacttcctcgtgcagagtgttattatatgcttgcagattttccagggctatgcttagctcttccacctgggctcgggcagtcgcctcgtaatcctaggctatagattgtgaatttacagcctagtcaattgccctatcccgctccacattctcccgctgcaaacggtcaacctctgctgacaactcagcgatgcggcgactatcacgcgcacgctccctgcttccatggcacagttccatcgttaggcgttcaactctgacctccagatcccctatgggatca

SEQ ID NO: 27285 - DNA, 697 bp, Zea Mays
tattttggaacttaaaccgataaggaagtcaaacaagttcatacttttttccttcctcctttttcttcggcattccccacccaccagaggtcggaaacgtcctatttgccaagtattcttgcaccaagtccctagtgctgatatgctctgccacaactctaaattccacctcggctagtaggtagggggaccccaactacatgttacacaggggtcgagtcatgcgaagctcagtctcaagggacccgttaccatgctcatgagcttctccctcttcttttcgtcagccttcacataaaaccactcatttgtccacccggtcggccacttagtacgataaccaatcatgggggccttggtatccttttggtatgcaaaattgtagcacccgaagttcttgtccagaccatcggctctagccttcgtttgataatgaagttcgtgcactcgacagaacccttcggtattggcactttttccatggcttcgaacagcccaaatatacacgctaagtctaacaatggcattgagggtcagttgatgtaggtaaatttcgaacttcttcaaaacttcaccgatcatctcataaagggggaaccgaagtcctgccctgaagaaggttttgaagacgacgacttcatcctcttttggctctagaatcacctcctctccagcaaaacgaactagttcgtcatca

SEQ ID NO: 27286 - DNA, 304 bp, Zea Mays
ggccttggagtatgccccaagtagctcgtcgctagtagcttcaatgcacttcagccagtcatcatttggctcatcaaatttatccccaaacttgaaggtatacttcagccggaccagaccaccttcgctagagtcggtggtggtctccttcggcatttcccagctctctacaagcggccataccctgaaggctatatgttcttgaattaaatctcttgtcccaacgaaggagcaaacagtgctgaaggctctctgacacgcttcgacagtgtcatcaatttccaccttcggccttcggaggccg

SEQ ID NO: 27287 - DNA, 318 bp, Zea Mays
cacgggaagtcctgctcgatgaagctcacaactcagcctactccatccacccaagaaccaccaagatgtacctaggcctcaaaaccagatattggtggagagggatgaagaaagagatagcacagtatgtggcccggtgtgacacttgccaacgaacaaaagccgagcaccagaaacctgcaggcctgttgcaacccctcctagtgcccgaatggaagtgggaggaaataggcatggattttgtaaccggactaccccagacacaaaaagggaacgactctatctgggtaataatagaccacctcaccaaggtagccc

SEQ ID NO: 27288 - DNA, 715 bp, Zea Mays
ccatgtggattgctcggaggtttatgcagtgtaaggggcggaccctttcctacgatggttcgtcacgcaccaggcgtgagtccatcggcctctctggcgcatgtgatcgcatcggccaggtgtgcacggggagcagatcttcttctggtcttggtgtagatctcctggcctgtcgtgcccttgtctcgtataatcgaggcaaagcacaggaataggttgtggcatcggctgaagtgccactagccgtcgtgcccttgcctcgtctaatcggggcagagcacaggagtaggttgcggcgtagactgaagtgctactgtgtttagggacgctcaggtgacgtcatcctgtcttctccgcctatcacccttcgccttggtgactcgcacgttacagtggggccatgatggcatcagcccatgcggtgcagagagtcagatgtcccgcctctgtaacacgcaatccattgtgtcgtccgtgtacttcggtcgtagcgcccgccctggagtgggcaggtatacgtcttatccgcatttaatgctaaggagcattgtactccgaaggtcgatatcgggtttccccggtggcccatgctatgtgtcgtaggatacgcgacagcagtgtgcttttcctagtgaggggagcagcggtcggcaccgctcttccttgtgtcagctccaatttgccacctcacctagtaacctataaaaaggtgtcc

SEQ ID NO: 27289 - DNA, 436 bp, Zea Mays
aatttgtgtttggtgtgaatgttagtgtggactcattctgaatggtgaagcgctgggactcgaacatggggtttgagacagagaatttatacttgtttagggttgcgtcctattctagtgtagtgctaatcgcagtattggcttatagtatgttacaattggtgcgtgtgtatggagaaagaggagagtctgcccatttatagctcaaaggtaggaccttacaatagagacatgttctctactggtaagagggcgacctatggccccaggttgacgtagtgttcccgacgtcgtccgtaagggtcgtgcgtaaccgtactcccggcaaggcgtaccgtcccactcgttcgtcatacgggtccctgtagcagtccactgctaatgtcttcgtagtattgtgcggcgagtcccgtgggtcaatctcatggtgcgccca

SEQ ID NO: 27290 - DNA, 371 bp, Zea Mays
tctgggagttcgattgcgtggacggaggagtcttcagatgaggacttggattattttgcagcgttagatgtggctggagcggagccttcgccgcgcgtggagggttccgaggggctcccgggtgcgagtactgggtataggcgccgaagggcggtggcgaaacagagagtgagtgaattgttgcgaagtggtaggcgtcattgtagtgaaatggagagtggtcgtcttcgcgtggacgggactggtaagcgagaattgttgtcctcgccgattggggcgagtgtatgtgagggggagctgcgaaatctttttgagggtgagtaattgaggataatgttgttcaactacagggagatgggtatcatcccgaa

SEQ ID NO: 27291 - DNA, 332 bp, Zea Mays
tcttcatcctctttcccatgcacttatttgggtttgccaatttcagacaagaagcttagaaggaataatctcatggtttgggtcaacaaaattgtcaatcggcattgtaattggaaggctcggctgcttaatcttgctggtaggacaactttggtgcgcttcgtgctttcggccatcccggtatgccttctcattgccatgaatatttccaagtgggtgattaaatctatagacaagattcgaagaggatttctttggaaaggaagaaagaaggtatctggaggtagttgtcttgtcccttgggatataattaaaaggcctttaaatcttgg

SEQ ID NO: 27292 - DNA, 388 bp, Zea Mays
tgttgaagcccacttcatactctatgaccgacttcttctcttgcttgtaggactgcaaatcaatcttcattttctccaggaaggtgaccgggtagaacctcctttcaaactgcctgatgaagacatcccaagacaggactcctagtgaggaggagtgcgctgcctgcacgcctctccaccaaatttgagcctctcccttcatcagttgtgtgccaaagtgaacacgatcaccatacacaatctcaaagacattcatcttatcctccacgtaagttagccaatctgccgcctcgaccggagtaccactgccatcaaaagtatccagcttcatgcccatccactgcatcagagaaagaccattgactggaagaggcacctcggcctcgcc

SEQ ID NO: 27293 - DNA, 283 bp, Zea Mays
tcatctttgacttcttttcagggttttgtcatggatctttaaccacctaaagaagaggtaggccttgacatccggcatcgtcccctccagatctcctttgcccgccccaggtgagcatccatggctcgttcatcgatgtgctcgtttcaattctattcgtttgtgtttgggaataccataattgcagaagttgtagcttttttagatgcagactgcggacatgtgggctcgttgcattgtagtaggtgagtgtttctttgcctgttttgacaaaagatatttt

SEQ ID NO: 27294 - DNA, 603 bp, Zea Mays
aacaagtttcgtgatttatggagctctaaacctcaagatatgaattttagaagacgtcacaagaatctgcaaatttcagtacaagaacatgacacaagggcccgcatgtcatagacatataagggtttcttctaccttggactgcttggacgtctgcttcttttggtcgatggctgaaattgtgaagcgatgccaggagcgagattgattaaggctctggccagcagcgtggaggtaaggtcatgcgtcctggaggagctggacggtggctgcacagactgacaatgcggctgctcgtcctcaacgacatggagcagggcgccacgggaggagctcggagcagggggtgtcgacggggaagatgttgctggggagagggacgccatggggaggagaggatgctcctgcgctgaaccagaggggaggaggaaaagtggcgtggggagaggagaagagctggtgctaccatttatagagcagagctctgcacatgtcagactgcaccagcaggtggcaggtggaaatgtatggacattgggcggccatttttagcgtcttcctcttggaatcggaccttggccactgcacgaaatatcttccttg

SEQ ID NO: 27295 - DNA, 601 bp, Zea Mays
gttagttgggacgggacagggcatcgcacaccagtcctcacagagttggggatttgtttgagattcgcctacccggcgatggtgacagagggaggtcaagagatagctgctcattactgggctcattgggacctcaagccgtacgggaatgatgggacacacacaagtaaagtgtgggatttgttttgggtaagtctcttgtgatattcaaattgaattcagattttgcatttgtaagtctctagtgatctttaaatttgcagggccaatttcgcgtgtgcgacccctataccttggatgatccatatgtgtgtgaggtattaatggcttagcagatagagctataaagagcatgatgtataaagcacgattgagggccgtcacggtgtaccaaaagcgtcaggggaactattgtgacgcgaatatggcaaaggaaatccacccgacggctcagcagtacaaagagagtgaggtggattggttgagccaccattcggatgcttgggcgtggatgtgcgagtattaggcttctgaggagttcctggccatatctaataagaatcgtatgaatcggttgagcaagccaggggtccacttcttc

SEQ ID NO: 27296 - DNA, 743 bp, Zea Mays
ctgctctggcctcgatccacttggtgaagtactcgacggcgacgaaggcgaatttgaggttcccttgagccgtaggcaatggtcctacaatatccaacccccagtgttgaagtggccatgtgtgggcgatcagcttggtgaactgcgaagggttgctcgagcggggagaaaacgtttggcatgcttcgcaagacctcgtgactcgattcgtggtatagattatcgtgggccagtaaaatccttgacagatcaccttggcagcaagggccctgggccctaagtgggacccgcacgttccgctgtggacttcgcgaaggatttgaatgccttcggtttcggtcacgcattttagcatgggctgactgatccctttttgtatagctggcccccgactggtgcgaagtcccggcttcggtgcttgaggtgtttggcctcattgacgtcgcttgggtggtaatgtccttgtagatacaaagttattggggcccgccaatcttcagtcatgatgaggttgacgatgtgatggccttcggtgtcgttagttacttgtaagccctctggattgtggacagctggtgtgccgatgacgtggtagaacacgtcggagggcaaggtctcgcctttggccactgccttagccaacgcgtcggcctcttcgttcctggcacggtccacatgctgtagggtgaagcccttgaactgcttctcgagactgcgaacagccatgagatactacatgagcg

SEQ ID NO: 27297 - DNA, 561 bp, Zea Mays
cccagaaccatgggaaattccacatcgcgggagcacacagccacggagcatcgctcgccgtagctagcgttcaaccctgcctcaagtgcggtaagaaggcctctaacgagttcgctgctatctgttctacgcatagcgctaggcaatcgagaattgaatgttgtgggcactggattgggaacacgtcggcgatgccccgccgtggtgtgctctgcgccgccggtgggtcagccgatggggagaagaagctgggtgggccgttggatcggcaatggatgggcgaggggtcgcggaccggtgatccatccgtgaacggtcgagattaaaacgtcgacaccgtttcgagttgatcgcttccacaccattgatcttcacgtctagggtcgggatcgagtccatgttactttgaatcgccaccctcggttccggatctatgggttcatataagcatactacggtgatctaatcggggtcgttcaattctggtcgggtggctgataataaaccatagctcttcagcgtggtaatcttgctaaagagaccctgccttatttcaaaaac

SEQ ID NO: 27298 - DNA, 366 bp, Zea Mays
tgctggtgctcccgactattgtgcagggtttcatgtccttcgcctccctcgtcacctgcgaggggaccctaaatgcgttgtcccgcgaggggtgccgacactacgaggtcttcgaccaatcagacgagaactttgaacgtgaaattttcaaggccgaagaccctatggtgaagcagtcagcgggggcactcttcgataggatgtggggtccacacggttgggaggcagttaaggagcggtctgaccgggcgatatagcaggtaaaggttatcttttgttttgtgtggttgtgtgggtatgtgtggttttgctgaatgagtgtgctgttgctgcagatggcgcgttccgaggacgtcgaggaccttg

SEQ ID NO: 27299 - DNA, 360 bp, Zea Mays
cgcactctaagacccagaccactatcaccagcaggaggattagacacaaaattgaaaaaaggacttaggaggtggcagattccaagcagagtaggcaacatgagcaccaacatttgatactttgcctctcaagatcatgtctagccggctcaccaaatccttagcaggaattctcctattagtaacccgagtggagtcggtaacaccactgtacaagtaagccgggtatgctctgtccttcagggactggatgttcttaaaaacaaaatcagcaaccacagcttcggcggtcagacctctttccttcagcagacagacttcagcaagcagaaccttagcctctgttacttccagggcagt

SEQ ID NO: 27300 - DNA, 909 bp, Zea Mays
gccacactcaaagcgttgggttcctaaattaaaagctaaagctgtttctttcgctgttccgctgatttctgctgtgtggcctttcgtgggcgaagagggggcggctggtgctgacaggctcttgctgaatggtggcactgaagctggcatgctggaggcgcttggcttccatgccggagggggatcaccaacaaagctgattgcacccaaggtaattgctggtgcaggtttctctgcaggtgctcttcgcactgatgggtcgtcccctggagccgttgttgagatggtcgctgacgaaagccccgcccaagatgcagccaattcattcgacatccagaacgacctcgccatggaaactgctacatcttccaaggtaatatcgaagctctcttcagatactgcaatagccccacttcctagtaagcctgttcccagccctatctcaaacctccataattctctggatcctaagatttcaaatgtggacgtgcatcagcagtcgcagcaggggtttcaagttgtcgagccccaagtagaatcaaatgatagctatgccgagcaagtctgtaatgtgactgctgctcaagatagtcaggaggcttgtagtttaccaccagattctcaaccaaacagcactaacagcttgcagttacaaaacttcatcgcaaatataactatgccaccagtactccctctgattcaaacccctccacacaacaagtcagccaacatagcaaatgctctaggggttttgtcccagcagcatactaagatgcctaatcaggtccccacctccggcaagcgctatagtgtcagattggctgcaaagaaaaaattatcgttggggcgttctagagattcaatagccaaagctcaagatattctaattgctaaactatataattcaac

SEQ ID NO: 27301 - DNA, 344 bp, Zea Mays
gtaaaaagaaaaagaaaacaggtgaatagtactgggctgatttcagcccagtggcccagctcagagggaaaaagcgcccgcgctggtgatcttgcggaaaggtccctggggttctgggtaactggaaataagttcctgtactattcctgtgtgccgctgacagattacagaaaggcccttcggttttcatttcttcacaggggaaagtccacgacggcggtgggcgcagggaggctccggcgagcacctgcaccggctgatttacctaaggactgatgccctacttcggtcgaaaccgaattcacgccccaaccattgattcccctaagttaattgcacaaatg

SEQ ID NO: 27302 - DNA, 392 bp, Zea Mays
ggttgttgtaaccgccttgccaggcatatctgctccgagaactcgtccgtgcagatcgttgattgcgccgggaatctctggggttctgttgaggcctggactctttccatttccaaatataaaaccaacaagactacgacccctcgccaccagccgttgggcagattcctgagggaaccaaacaccataaccacgcaaggacagagaacttggtagccgccgagagccacagcggctactccgcccgcgtgccatcgaagggctttaaccgaaaagctggggtgcgcaggatcgtgccggcattagagagcatggagtggaccaccggttcagcaccgtcatggattcaacgctgggatattcctccaccgcgagaccgcgtagcaccatgg

SEQ ID NO: 27303 - DNA, 756 bp, Zea Mays
ccttataaggtgcaaggtacccctttctatttggataacctgaatccacaagatagtatttacctgcacaaacagaaatataaagttcaatacttaagacataaatgaatatcgtatgatacaaaagtacaacatacttatttaccttccggtggatgggggaacctgtccgcataagttatcaaagtatcttgtaatactctagtgtcatgtactgaacctggccaccctgtgacaacaaatgtgaacctcatatcgaagtcacaaacggccattacattctgtgatgcgtaaccgtgcagactaatatatttggcttgctccgaggccgggacagacgctggaaagtgactaccataaattggtcctacgcaatccttgaagtggggccaaaatctcccctctcgcaaacgaggatgaatctctatgaaatttgggtctttgggcttgattacgtcagatgacatcttatatagtgcattaagtacttcactatacttgcgactaatagtttccaaggagtgaccaaacttattccttatctgcctaaatgattgtggatccccacatgcccacaagaaaatacctagagcttccatagtactgacaccacggcttggaagcagaccataactttccaccaacgtctcatgcaatcgtctaaaaacagtacgtcgcatgcgaaacatgtcaaagcagtcgttactattctccaaagttcgctcaacccattgaatacctgtttcaaccattgtt

SEQ ID NO: 27304 - DNA, 378 bp, Zea Mays
cctcgcctgacaccgagccacagcgcagcgctggcccacttcccactcatgacctacgagccccccacccgactacaccatgttaatggctcacacacatcttggtctgcgacgcacttatggcctatcggactagacctgagtgcacataccttcgacatgcactacacgacgggctgcgccgagccccatgctatggaggccaggggtcggtgtagctaaaatggtgacgcttaggactatcgtcgcccttacgccatccgccacgataaatacgagacaaccagataccctcaggccccacgagtacgcatggctccacccagggtaaaatactgattttacccttgccttacggctccttcccaaggaagccac

SEQ ID NO: 27305 - DNA, 368 bp, Zea Mays
gtcgataatgattttcggcaaagaagagagtaagcttacatatattctgagatgacaaggggcttcggtggaaggtttcatccaagacatgttagaacaatccacaacccaggccaaagtgaagacaagaacaaccaaaatcaagggtaacagagtaactcccaatcaatagggacgcaccagaattccttcagaccaccagccccaagaggcagaggaggacgaagcttcggaggaagatacaactctcaaccaagaacattattcttcctattatgtggagaagataagggacacacaacacggacttgacaagtcacaatacaaaagcagaaggaaatagttgaggctgaagcacggcagaatca

SEQ ID NO: 27306 - DNA, 297 bp, Zea Mays
ctttcaatggctgaatattcttgaaaacaaaatcagcaaccacagcctcagcagtcagacccctctctttcagcagtccaacttcagctagcaaagcccccgcctcagttacctcctgatccgtgggggactcggtccaactcggagtgcgaacatccggctgtcttcccgaccgtggggggagagaatttccatggttctcaacaataaaccattccaagtgccatcccttgatactgtctttgagagggatttcaagatactcagtcttcctcccacggcgcatctccaaactag

SEQ ID NO: 27307 - DNA, 454 bp, Zea Mays
ggagaggtggatgcgtcaaccctaaaagaatccacccctggtcaaaccttgtggcaccgagcccaaggtcgggcgtggcggaacctgacaagggagaccagacatgtcggaagggaaccactcgagtggatccagtgcccaacccaagactgacccaccataaatagtcgaccgcatttaaccacacctggcaccgagccacaacgtaagtgtcggtgcgctttccactcatgaccctcgggtcatgaagcactcataacctacgagtccctcagactgcgacacatttatgactcgcacaccccttggcccacgacattatcattgattatcgaactaggcctgagtgcgcggacctctaacagggcactacacgatgagcgatgccgagccccaagctactgaggccaggggtcgacatagcccaaaatgatggctcacaaattgagagcac

SEQ ID NO: 27308 - DNA, 522 bp, Zea Mays
aattagcatagcatggtctcccaaggatagcattgtagcatctcaggaaatccaccacctcaaattgcagttgttcagtgcgaaagttgggggtccctgaatgtgacgggcagagtgatctacccaagggggttggcctggtggttagggatgacgccatggaacaacgtcgagctagggcgcaacgctgagtgcaagatgcccaaacaatcgaaggtcccgatgtacatgatgttgagaccgcttcccacgtccatcaacaccttggtgaggcgctttgatcccacgatcggtttgacaatgaggggttaggtcctgagatgtaggatcatgtcagggtggttgtggcggttgaagactgtcgggattctgaccaccagaggtatcgtgggacgacgggctccacggcgaacacctctcgttgagctgccttgcggtggagtctgtcaccttatgcttctcccccactaaagatcatgagacatcccgtgatttcggggatatcttccatgggggtttctt

SEQ ID NO: 27309 - DNA, 659 bp, Zea Mays
gtgggcagtcgttcattcaacatacttcccatggcccccacgagtgagtcggccatttgatgcaattaagcccgagagacagggggctcttcgtctccatggtttccaccgtgaatacttgaattggatcctgccatgttagagggaagcaagagaaagtagaatatgaaagtatttgtggaacactcgatctcaccacttacttacttgagctctttcctgatctctaggactgtgatggtgctggtgtgacagcttcgacagaggtggtagagcggtcgaaaggatcacaagtcgaacgtcccggttcaggttttttgtggagctataggaggctgatcaaggtgggctatggtactgttaaccaagtgtgttgacatgctaagagatatgaaattgttgctggaaacattctcaccaaatcaatgtaaactaaaattttcagcaacacactgcaacacaatcccctttcacaatttttttgacttctttttttatacttctttctcttctttttttataacactgatggggtgctgagatcaaatgcaatgacacaatatgaatacgatggtggtaactagcaacttgaggaattttaaacaacacaaggtaacagtaccgccaaagggttataggtttttttgtggctttggact

SEQ ID NO: 27310 - DNA, 986 bp, Zea Mays
ctttaggaacaacttgttgtcacggaggacctggaatacctgcttcacgtgctgcaagtgttctgcccatgtcgtactgaagatgagtatgtcatcaaaaaaataccatgacaaacttccgaatatatgatttaaggacgtcattcattaaggactgaaaggtggagggtgcgttcgtcaacccaaaatgcgacaaggaactcgaattttccgcggtgtgtgcggaaagccgtcttgctgatgtcatccgaatgcatgcaaacttgatgatattcgctgtgaggtcaagcttggtgaagaacctggcaccacggagttcatccaatagctcatccactactggaatgggaaacgaatcttttgctgtcttgctgttgagctcgcggtagtcgatgcagaacctccacgacccatctgccttccgtaccaggaggactggagaggagaatcccgatgaacactccctgatgatgccttgctgcagcatagcctcgcattgcttctcgatctcatctttcagcagttgcgggtaacgatacggtttcaccgcaatcagtgttgtacccgacagtactgtaatgcgatgatcatggcgtcgaggtgggaggccacgtggttcctcaaagatgtcggcgaaggagtcgagtagtgttgtcaggagatcacgagtgatggccaacatggagagctgctgctgggggccgcctatcccggaccagcggacgtcacgctccttgtgctagaacgccattgtgaggtcggcgaagttccacaggatcggccctagagtgcgaagccactgcactccgaggacgatgttgaagccctccaccgtgagggtgtaacaggagatgtcgaaggtgtcgttgttgatggagatgaccaccttgcgacacaccccagtgctggggacacgggacacggtcgccgttcgccacctccatggagaggtcgggtcggcgatccatcgtgagccccagcttgtc

SEQ ID NO: 27311 - DNA, 329 bp, Zea Mays
gaatgaagccttgaagaccatccaagccaccatcgagaggcaaacgcagaagcaaccagtggatacttcatcagcaccggccagagatgcatcagcttccgctcatctgggagcggtggcgaatgatgcgatgcatggggaaacttgccaccgattcgttgaaaaccaccggaggttgggtggtgggatcgaaacgatctagacaccccctccggtcggaggtacgtccttcacccctgagagccctcaaatgtttgttgattggggttctgtaggcatgatatggctaattggtcgcagtggtcggcatttgtcatgcctaacatgaa

SEQ ID NO: 27312 - DNA, 356 bp, Zea Mays
ttgaattgaatctgtgacttgatttgcccggttctgtgaacacgtggaggttgatcctcgcggcatgttctcatatgtagtagttttttgttctgtttgggtgctgtttcgtgccatatgatgttttgcgagctaaggattatattgatgtagcttgaaaagcacttagcagcgtttactgtacattgtcattttttgttcttgtcaatcttctcagtgagctacagttttgtttctctccagagttttgctataaatgatgggaatatgctatgattatgttgaaggttacagtggtaatcttcacggtttattggtttagctatgtaaatggtgggaggctgggagccttacac

SEQ ID NO: 27313 - DNA, 405 bp, Zea Mays
tcacaaatgaggaaatccacaacatcaaactcggagtgagagaccagggcaccaagtagccaaagctagatatgagtagcagcctccctgtaacccatccgtggaagaagcgtccgtctcatgagctgatatagaaacttgaccgctgtggtgaagtctgtcggagaacatcgcgaccatctgagaagggcggtcagaacagagctacgacgtgagctgtaccaggagcaactccatcgtgagggcgacaaggaggatcagaggtgccatagcacaagctgtgaagacgagtcgatgactcgttgaatccaaacaactgacgaatctggctggcatgaatggtaacatcctctcgctcaaagtggaatctcatccagtggtgatcagggtcgatccatacagtag

SEQ ID NO: 27314 - DNA, 293 bp, Zea Mays
ctgccaaacccagaaaactacggatctgtcgtacggtggtaggaggtttccaattcatcacttcttgtactttttcaggatcaactgataccccatcctgagaaattgtgtgacccaaaaattttatctccttcagccagaattcacatttggacaatttagcatacaactgatggtcacgcagtctctgaagtacggtatgcaaatgcttagtgtgctcggcttcatttttggaatacaccagaatgtcatcaatgaaaaccaccacaaacttgtccagttctggcataaag

SEQ ID NO: 27315 - DNA, 306 bp, Zea Mays
agagcggtggcttccaattttggaatggcgcgctggcggtcagagaggaagaagatcactggtggcttaatcgtggcgttcaacagtgtagcggttctgatagggtaagcctaggtgtgccacggttactaccacgtagtgaagagtcacggcgtggcataactgaggtcgccggagtgtccacgacgacactggcggtccgaccacgtcgcaacggctacaagcacagtgataagcttcccctgcgaccacatctgcttccccgcgagatcttttacctccccgtggatatccattgcgtgcccg

SEQ ID NO: 27316 - DNA, 339 bp, Zea Mays
cacaaacccgatagcatcaaacaccctattcaatctctttttgccccgagctccgaaggcagttgtcatagcttcatctttgtcctttgaatatgctccaagcaactcatcgctagtcgcctgtatagcatctagccagtcatcatttagttcatcaaactggctcctgtatcaaaagatatacttcagatagactaaaccattttggctagagccagcgacagcctccttctgcatttcccatctatctgcatgtggccacactctgtaagtaatatgctcctggaccaaatctcttatgtctatgtaagtgcacactgtattgaaggctgcctggcg

SEQ ID NO: 27317 - DNA, 565 bp, Zea Mays
acgactcgcatgccccagcgcccacccgcctagctcccttatcatcctcctcgcggacaccgacgcgcgcctgactgttttgacgtttgcttgctggcaaggagccgtcttcttcctcgccgggaaatctccttcgctgcctcgcttgcgtccctgggcttcttgttccacaccatcgcctggcttcgtcccctgcaaattttgaaactgtcagaagcctaggtaatgcatgtggtttggggatctatgagctgtcagtgagctgggattagggcttgttaatcggccttgtaagggagaatcactcctataaatacctgtacttggtgattgagaaggaataacagaaataatacaaccaaataccaaaatcgaagtccacttgcctaactgactcacctggtgacgtctcggctcatcgctgcagtgacctcaccgtcgctggaaatctcacgctgtagtggaaatccccttcccacggccagggggtcatcacatctggtatcaaagccatcggagccggcgatcgttgaagagaagacgcaacggctccctctgcaaaacc

SEQ ID NO: 27318 - DNA, 316 bp, Zea Mays
tgctgtttgtggtgtcgaggacagtccgcacagcatctctgctgtttgtggtgaggacagtctatgtagaggacagcagccctgcaagtcttagtagaggacagtcatgtggtcttagtagaggacagcagcagccctgcagtcttagtacttagtagaggacagcatctctaggtagaggacagccagtgttattaaaaaggcgcttaagcaccttttaagcgctactgaggtggtaaagcactgtaatgtttcatgaatcaacgtaaagcgctcgttttaagcgctaaagcgccactttttagcgttaaaacac

SEQ ID NO: 27319 - DNA, 409 bp, Zea Mays
gtagcaagcaagctcccagcagcaaccttcgcataacacatttcgtccacctgctccaagaggcggaagaggaggccaaagttttggtggtagattcaatgcacctccaaggaagccattctgcttgttttgtggtgaagacaaaggccacaccacaagaacatgccatcatactatcaacaagaagaaggaacttgcttcgttggccactcaaccctcccggtcaaaagaggtatttagtacatcgtcgtattgttcaccttatatcccacattatgtctaacctcagctacaggagccaaggctaagtttaccttcagcctcaaacgcattaagaaatccagtgatgagcgcatggtcaccatctgcctccttcgtcccagaaccacctccctatggccaagttcct

SEQ ID NO: 27320 - DNA, 921 bp, Zea Mays
ctgtcatagatacattccaacaccctccctcagtctaatcgggagtgttacgaacgcaaagactggacctaaaatcagtaaatagttacaggtaaccctttggtcataatatcagcaaactgaagtgacgatggaacacggagcacccggacctgtcccaaagcaaccttctctcgtacgaagtggatgtcaatttcaatatgctttgtgcgacgatgatggacggggttggcagtcatatagacagcactgacgttgtcacagaagacgattgtcgccgaagagatgggtgcatgaagctcctagagtagctgacgaagccaacaagtctcagccacagcgtgcgcaacagcacgatactcagcctccgcgctcgaacgagaaactgtagtctgtcgtttggaggaccatgagactaagttgtcgccgaggaagacacagtaccctgaagtggagcgccgagagtctggacagcccgcccaatcagcgtcggagtaggcagacaaacccgtaatgctgctggtgccgatgtgaagtccagtggagagggtacccttgacataccacaggacccgcttgagcagggccaaatgaggctcgcgtggatcgtgcatgaataggcgcacctgctgaacggcataggcgagatccggccgagtcagcgtgagataccgtagagctccagcgagactgcggtatagggtggcatcagccaccggggcgccatccgtagcggacagcttggcttgagtgtcaacaggagtcgccgttggagcaggtccgcagcatactgacgctgggagaggaagaggtcgtccttggaacgcgtgacagagatcccaaggaagtggtgaaggtccccgagatctgtcatggcgaactcggagtgaagaagctcggtgaggcgacgaagaagctggg

SEQ ID NO: 27321 - DNA, 311 bp, Zea Mays
ggatctggggctactggatctcacccttgatgtatggatacaatgctctagctgttaatgaattctatgcccctcggtggatgaataagtttgtcctggtacagtcactactacgtagatttttcactgcttgacgattttctcttgttgacaaggtgtatgtgcttatgtctgtaggaccaaaatggtgttcccaaaagactggggatagctatgcttgaaggtgccaacatctttgttgacaaaaactggtactggattggagcagcagggctcttgggtttcaccatcttcttcaatgtccttttcac

SEQ ID NO: 27322 - DNA, 410 bp, Zea Mays
acaccagtggctagaaacaactagactaaattgtagacaaaagaaccaagtttgcagcctttttgctatggacaccatacaactacagaacaaccttggagacagttttgctttgctctaatcctagaatacaggagatcttgtaccatagataaccaaatcccaacaactagatagggagaagcatatcatttaacttgtcattgggattccctagtaaggcattggaaatgtttaaatgaggattaagtagctgatacaaatgtttctcgtggaggattaatagatatatgcatgttttattgtactaggcaaaagcacagcatctcagcccccctgaccaaaactaaaccacaaagcagatattttagttctatgtaaccccatctttttcacatggcactcatcag

SEQ ID NO: 27323 - DNA, 344 bp, Zea Mays
gcttgtcgcccagacgccatgtactgagaagcgataccacgtcgcagtaaaccgccttaggtagcttgtccatcgcctgagacattgccccggtgaaagccacgacagctcgtgccagtgaactccctctctcttcggtcgcccgtgtgtcttccccaaattggacgccaccgctgatgaactctataaattgatgccccagtgacctccgttaggttgttacgcgcctagtgcactagccctcgcttctgattagccaccacagctcgcaagtttcaaacttcccccaaatcggttggaacgccgccgtgagacatctcgccgtggccagccccctacaggtt

SEQ ID NO: 27324 - DNA, 529 bp, Zea Mays
cggatgtagacgacgtgagtgtccatgattttaatcaaagaggttaccaagtaatggagtgttcttgttcgttttagcgagtggcctattctctgcttttccatatcagctaatcccctgcctacgcctccaaaacgtcgaagccgcacgtgagaatctccataatagcaaatttctccctctagaggagacatgagaggcgcgcggagcagagcagagtggtggtatcaacaagggaagagggcccgatgatggaataagcgacggatgcacgcctgtgccgtgcgtgcgcgctcgctgtgctgagcgcctttttttctctcgttgctgttccctgcactctccgctggggaacgcacccacggtcatggtgtccctttctctctctcgcttctccttcctcgcgtacccatcaatgaggagctttttggaaccatgtgatcaccaagactgggcttctaaaaaaagtatcccaaacaacgcaattggatttttagtattataattcgttgaacttcgcatatttgct

SEQ ID NO: 27325 - DNA, 325 bp, Zea Mays
actcggttgaagcacaaattcgtggaatcctctccacctctcccaaaattggtagtgcacggtgaaaccatagtcctttgcgaccatgtagccccaacctcacctcctaattccgcccagacccatcgctgcgccgtttttccccttttgtgtcaccggcgagggaaaatccaccgcgctccatggccggctactcccaggtctgctcctgctctttttaatcgtgtttcagcacccatatatgctcatgatactcatcggctccaccctccttgcttggccacgctcaatcacccggaacacatgaacttgtgttcggtattcc

SEQ ID NO: 27326 - DNA, 312 bp, Zea Mays
atgtgtcaaccagttgacagcaataatcatgaaaccttgagagctcctcctgctctgaggacagggaacatcttaaccgacaatactcagttgaccaacttcatcgcggcaataacaacgccaccagaaccaccactgatcccatctctgccgaaaagtaacacgaccaattcatcacatacattaaaatttcagaagcaacccatcactagaagatcaagtgttaggttggctgcgaagaaaaactttaatactggtactaaccgagatgcaatatccaaagctcaggaaatcattcgcgccaaacttaac

SEQ ID NO: 27327 - DNA, 337 bp, Zea Mays
ccacgcataactttcacccgagctgatggattgaatcacgacggttacgatttaatgcaccaaaatgttaaactacttctaatctcgacccttcatttagcatccgacggctagcacataatcccttctcctgagtcacccccaatcccgacggcgcgctcaccgcggtggagcgtcatgactggaggacccactccaacccacggtgcctgatccgcacggcaacctgacgccacacgacgagtagtaccaagtgatggacgcgaaggtgttaatacaagctgtcgaccccgacgaaggctccaaaagcagaggatggtggggtaggggagcaacc

SEQ ID NO: 27328 - DNA, 389 bp, Zea Mays
tgagatcgccagcgcgactgtcctcaccgccgacgactccctccaccgtgatttgtgctaccgacgtcgcgattcgtgcccagggtggatggatagcgtcgcggggtgaaagatcttcgccgccggtgagctggacgtcactccggctagccgcggtacctctcccctttctcaccgcccctcggattagaatctcaccgccgttgtgccgtcgccgttgtctgccgcatgtccaagccttgccatcgcaccgccacgattcactttagctccctgtggctcaccggaatagctgccacggcgttgaacacgtattcactgcgccggtattcttccttatctccggccgcctgcgttgctcggccaaattgcacgccaccgtcgaagct

SEQ ID NO: 27329 - DNA, 323 bp, Zea Mays
gccgacaacagctgagcagcactacaggcttgcagcagagggacaggcggacaacagccagccaccaggccagccccctcaatttccacgacgcttcatgagtggagggagacacgatgcttgcatgcaacagcttctcggcttgcatgcaggttctgcagcagcttgtgcggcttgcatgtggcttacatgtggtttgcatgtggcttgcatgcagtggaggttgagcagcttgtgccgcttgcatgcggcttgcatgcagggaggttggtgcatgcgaagcgcgagcgggggcacggtagtggtctacgttagagtcttaa

SEQ ID NO: 27330 - DNA, 640 bp, Zea Mays
agccactccggctagccgtagttcatctcccctggctcaccgcccgcgggtaatgtgctcaccgccgccgtgccctcaccgttggccaccgcgtgtcccaaccgcgtcatcgcattgccgtgacctcctctgaactccccgtagaccaccggagttactgccacggcgataaacacgtgttcaccgcaccgccgttcttcctcactttcgaccgccgcgcatccttctcaaaattcacggccaccgccttaccctcctataaattgagggcggggatagttgcgccatgtaatcatcaagctattgcacccactcccatctccactcgctcaccgtagctccgcaattcgggttttcccccaaattgatctccgccaccgtaaaacaccacctccccgtggactgtccgttctggtaaggcaccatccaattcgcgcattgttctagcaccctttcatgctggtgatgctccccgacccctttaatcgaaccaaaccgactgggaccgccgggaacacatcgatctagccgccatgctctcggccaccgtggccagagttccttagtcgatcattagccaaattaagttgggggaaaggtttagggcagatccaatttagtgtctgctgctcggagaacc

SEQ ID NO: 27331 - DNA, 346 bp, Zea Mays
ctcacaaaggcgcttggtcgaactcggttccaggagcttcgtggttggatcggcatgaaaaaacttgtataaataataatcatgggcttaggaggagattgttatagtaagcccagaattagtgtttatttcttagcaagtagattagcacacaatcaccttccaggtattgtgatttacttaccaatttctactgcatgtaattcctttataaagagatagagaacaaccagaaaatgcagtctgattgacagcaccaaatccatcgtctcctctgtatgtgcttctcgtgtgtcatcatcctcgccggagttctaacacccctcaaggtcaagctccatcgcgc

SEQ ID NO: 27332 - DNA, 307 bp, Zea Mays
atttgatgaccagtaggatggatagccacataattttcccaccaagtgctggcagggcctcacaactgctgcgccgcaaataagggcttttgagtctctgtgcatcggagaagcccaaacttttgttcgataacccggatccactcattcgcttcaagaggatcttcagccttgacaaataatgggggacgtgtctccgagaattccaaatatgaagtttcgcggggtccttgcggatacgctcgcccgccttgttgttgcatttgttgtcccgccatttcccacagaaagcgggtgttatcggctg

SEQ ID NO: 27333 - DNA, 359 bp, Zea Mays
gcgtcgtcggcgtgagctcgagaacaactcaggcgatcgccgggtaccaaacaaccagcaggttggttcacttgtggtttctattctctttttcctctctctctcaagtattacccatgatttatactaccacactagcacgacccacatggcccattaccaccgactcattataatccaacacgaaactacattcggcaccatcctcaggcttcagtctccgttcattggtctcaaacatgattcaaactctcggctctctttagttgtgacagttcgctcgcctataaatcctccgtccccttcctaccattccccttgaatgaaccagcagcgatacggatcgaaacaaaccaaac

SEQ ID NO: 27334 - DNA, 331 bp, Zea Mays
gcctaagtgaaaacaacaacagtaattaatctaagaactgataatcagggatagccattgattaacaccttaatgtgtttgaaccattgattaacctaagcatttgattaacctaaccatttgattaacctaagctatgattcaaacacatatatatccagctgtgtattcaaacacatatatgattcaaacacaagtaatctgccatcaattaacatatatgattcaaacagatataggaaattcgagccatgaacttagaagaaattaacctgaactttgaccttactacgagaggaagaagaaagagcttggggacggcggcgcttcg

SEQ ID NO: 27335 - DNA, 571 bp, Zea Mays
gggacctcgggtatcagtcacccgagggggacctgaaggacgtctttaccagagactcctactccggtggtgacaactagatggacccccagagcgaccccgtgctccccagtctatgaggccgaagcctgccttcccccgaaaactcctctggactccccacgggtccaggcctctaacaagtccatgcagaaatggctacaacgcgaggacgaggactccctcatcaaatgcagatgagaacccagggtcgggacctgaccctacggcaagtaccaaaccaataagggctctgcaactctcccccagccgagaaggacccttcacggtgacgggaatacgctgacccgggggcgactaccttgctatgatcgaaggagtacctcttcctggcctctggagcatctctgtaagtgctatccataggagcaagtctcacgggtcgaattcttctcccttttgtaactaggtagcgcatacgtgtacgccaacccggtgaggtccgcccttataagcccggtctgttggtctgtacccatgcatgacaggttataaagaaaaatttaccccc

SEQ ID NO: 27336 - DNA, 376 bp, Zea Mays
gacggtgctgacggaagacgacgtcgacgcgtgcagtgcaaaagtgcactactcggttcgttccagagcttccgccagaagagcaagggggagtaggtggccatgctcgagcctttcgtgatgtcgtgagggtcactcttcctctcgaaccaatccgcattcctcctgttcagagacagctagcgtccaggaaactgatggtattggtaggcagaaccctccaccagacatgaagggccaggcgtcgtgacctcgccttcactccagtgttgtgtagcatagcatgcatgccctttgctgatgatagtggcaagcctatgcctaccccaacttgacaggacagctcgtgaccgttccacttgcacggtgatctgat

SEQ ID NO: 27337 - DNA, 681 bp, Zea Mays
gaaaatatctcctacagtgaccaagatccaaatccaaacggaaaaggccaaaaattgttgcccaaagtctctattgtagcatccgccacatataaggaaaacgagctctaacagcaatgccgcccatgcccaccaacttccagttatgtaataagtggtagcactcaaactccaataatgtaataagtactatctccctatattgttacacaaacatatgaatgtaattaagttattgtaatcctttccgctttactccgatttatgctgtaatgtccgtgagatgggttctcgctcttgggagatgacgaagacgatgcaagatctaggtcctatcaagctattgggtgcacctgcatggctgtctaaagtccttgggacaaagacatgtgctggtgggcttaatatcttgggaggttccatcacataacctgctattgtcctatagggctcatgcacccgggttgactactggtgatgcccgcttgccgcacagtaatgagggtagaacctagcgggttttgtggagggtaggctctaggatcggagggaccaagggtgtaggccatgtagttaaggcaatggatgttttttggaccgtggggcaacgatgaccgaggcaggaggtggtcatggttaggcaaatggaggccatagtcatggtgctcgcagaggcaacca

SEQ ID NO: 27338 - DNA, 484 bp, Zea Mays
caaaaaatgaacagtccaatgttatttacttactagtatgacaactgagcatccatatatcgtcgtagacacgttagaagtgcttcttgtatgccacttttgtgcagcttcgcagaggtcgttaaaaattaagtggcaccagtctgtctcatggaaacggtccatttcttccgtcaataacacctcatggttagatatcccccagctggaagtggggaacaacaatctattgaacaatatcaaaaagaagcatctgatagagaggtcatcatcgtttccttttctcaatcggtcctgaagagatgcaacaacgaactcatccttagacaatccaagttcagccctcaagttattgcccgccacttcttcatcgattcctagtggcttaccaccgcaagcattcagtaggcctagtataaggtggacagtttctttcgtaatctttagttccttgccttgaccggggcgaatagtcatatccttg

SEQ ID NO: 27339 - DNA, 473 bp, Zea Mays
gatttttgctttgggagaatgatttcgcaaggggagatattttcaggggaagagactctggattttggagcttttgctagttgtgttgaaccatttgcctctttctagggggggctagcttggatttcagcttttgtgttgtgtgctcagatctggttttgtctgttggctagtggcgttgagcctacttttgcctcttcttgaggactagctatttttggcttggtcatgttgagtcgttgcccatttctttggagaccaagctttgcttgctttgattgacttgtttgacttttatctggcttttggtcgttcgagtgagtttctcttcttcatcttctttctacttatatattttcatgtggtggtgttgacaatgtattcatcaaggggaaaactgcgaaaataaggttgacttgtcccttgtggctcgggttgatgatgagtgattgtccacatacaacaccctaggg

SEQ ID NO: 27340 - DNA, 288 bp, Zea Mays
tttctcgagcacacgtctcagtgttcaggggaaggtcataccctataacaatacgctttcgaatatctcattcgcacaccgacactagactcgtatcctaagacccatgccgcaagagactaatactcggctctaggtaagtgtgaagcccttaggccgaaataccaaagtctaagaccctcccagtctttagggccctcctcgctaagtggacaaatcctgagggtctcaagacctccgtgaccctgtcgttctcctcgaccttatagagtctaggacctttccttc

SEQ ID NO: 27341 - DNA, 490 bp, Zea Mays
gatgataaggccgaagagccacagatggaaaatgtgataaagtgctagaaatcctgagcccaccggcagaggcagatttatcgaagatgcaaaaagctcctactgcaactcccaagaggaggagcatggccagcgtgctagacgctattatagagaccacgaaggccttaactcctgctcctaccaagaaaactgccgaagctaccaaaatccaagtcgaagccaaagctgggccttcatcgcctactaagacgaaggccgccgagcctgaagataaggtgggtcagcaaatttcagataccggtaagacgacagagcaagatatggcagaaaaagcaaaatctcctatccccaaagccttaactggagatattgattacattgttcgacatgcttcggggaaaaaattatctgaagaagaaatcttggaggccaaacactatgcccaaagactaaaatatccgaagggggccttagtgttcaatggtac

SEQ ID NO: 27342 - DNA, 428 bp, Zea Mays
cccacctgcaaatctgtttttttggacagcaacatacccggattcaaacagcgatatctaccaaaatataactccgaatcgagcgcataagtacttgttggaaaggtacgacaaagctctacatgattatcatactgattatcaccgattacctacgaaaaatccccagaaactgtcaatactactgttgttcgcccacctgcaaatctgtttttttggacagcaacatacccggattcaaacagcgatatctactaaaatataactccgaatcgagtgcataagtactcgttggaaaggtatgacaaagctctatatgattctcccactgatcccactaattacccacgaaaaattctcaaaaatcactagaactactgctgttcgcccacccactaaatttttggacagcacctctaccaattcgc

SEQ ID NO: 27343 - DNA, 309 bp, Zea Mays
gaagaacgcgaggcaggtgccaaggtcggtcgtggtcactctcgcatcactcggcgcgcttggatgcttaggtttagtagctgctcttgtccttctggtccacaagaggtgccgcagacagaggaaggcaagccaacccgtttcctcggcgatcgatgaacagttcgggagggtctcgtaccaagcgttgtcgaatggaaccggtggtttctcggaggcggctttgctcgggcaagggagctacggcgctgtttacaaatgcactttgcatgatcatcaggctggtaacaccatcaccacggctgtaaa

SEQ ID NO: 27344 - DNA, 718 bp, Zea Mays
aacagattgggtacacccattggggtcagcgtcagtaaattcagtcacaggcacttcttcagcagcaggaaccgaggtaccaacgtcccgatccaaactggatactcgccggaggcgtctctttttctttttctgctcatcagcagaaggatcaggttgactggctcggcaagggcgcctcgagcgagcactggcaggcttctgagtatccaaagttgtatcagcctctgggaggggtgccactaccaatgccccagcaggagcagcatcagaagagtcctcagccagcaaatcaagcatagcgcttatctctgcatcactagggttcaggggcacctcaaaatggacctaccgttcatcatcaggaatctccccgagcgaggcaaccaaggcactaacttcttcaacagagggccgcactctaaggcccaaactgccatcagtgacaggaggattcgacacaaaaagagtgaaggctttgggaggaggcaagttccaggctgagaatgccactggggcaccaacatttgacactttgcctctaaggatcatctcaagtcggttcaccaagtccatagagggaattcttctgttagtaacccgggttgagtcggctaggcctcgatacagataagctgggtatgccctgtctttcaacggctgaatattcttgaagacaaaatcaacaacaacagcttcagcagttagacccctctcc

SEQ ID NO: 27345 - DNA, 389 bp, Zea Mays
cgtgatggtacagtgaccggatcagaacgccagcacagagaagctcagcgccggcgaccgtgcgcctggattcgcgctcgtcgcggttattcgtgctcggctcaattagaaaacgccgaggggtaaggaaatatcgcgccgcggttgaactccggccactattttactccggccgccgtacccgagtatgtcacggccgctttggataggttcgtcggagttagccacctcgcggccttgcgccacgtgcctcggcatttaccacgtcgcagtcgctcgcgttatgcatgtctggtgatcgccggtgaacccgccacggtgaaagccactaatcgcttgcgccagtgcaactcttttctccggctgccaccgcgccaacttcaaattca

SEQ ID NO: 27346 - DNA, 413 bp, Zea Mays
gtgttttcggagcttcggcagcttttcctggagtagagcttgaactctttatcgtttccagtacatctaatacattgaccatccttttcctttttgggatcgctataagatcttttttgtgccttcaacactgttacttctatcgaagggctcagaactgatattgtgtctttgactccaggctcttcaattttgttaaccttcggctttacagccggttcttcaatcttctgtgtaaaagtaagttctttggcttcagtagccgaagaggtctcaccgccaaattcgggcacttcggccggttcaatatatcgcggccagtgagtaaggaccttcacctttttcctcttcggcacgagctcgcttgaagcagctggagcaacatctttcccggaagtggcactcttcctctt

SEQ ID NO: 27347 - DNA, 367 bp, Zea Mays
gtttcttgactacatggtggagctacgggcgaggtcaatttatagagccctcaagcggtggccgcgaatttaagcgatgacgcgcggcggccggaggaggggaagagtactggcgcagcggcttggtgtctaatgccgtggcagttactccggtgagccacggggagtcacaaaggttcacggtgacacggttgaaacacttaaatacgtggcacaaggccggaagacggcggttcaccggcgagcttatctgctcaagccgcagagtaagggggctacgacggtgagtcaccggagctatccccagccgtcgagctactacctggcagacttatctagttactgacgacgtgaatcgcaacggcgg

SEQ ID NO: 27348 - DNA, 331 bp, Zea Mays
cagacaaccagttgcactgtgggatctaatcattcgtgtatggtgccgattttagttcctcattgtcgcttggtttatctgggaggtttgctccctgagagaaagaacaaaaacaaaaggaacctaaaagaatttctgttattacatccaccgtatgggttgtaatatactatgtctgtttcattggttcattggtttttttaggtttatggcacgatgattcatctcagagtttctgattcttatgttttgtcacaagggcaagacgacaagtcattttgctgctaaagtgttaatatgcaaactgtgtgtttgatcaggcgagaatttt

SEQ ID NO: 27349 - DNA, 481 bp, Zea Mays
ctcgcggggaatggcgcggtccgcagcctcaccgtcaactgcagcctcctcgacgactccgccgcctccgtcatcgccaggggtagcctgcgcgacctctcgctgctcaaatgctccttctcgatgagcttctttgtggctcttggtggggcatgccacgatttaaggtgtgcttcttcagcactttctggttcatgtttttgtgtatgcacgcggatgcaagttatgaaattgaactatacaagtaatggtctggagtttgggctattgctttcaagccatagtgattgacaagtccaagcattctttaacccaagtttgaatgtagatcgttgaagctggagatggcggtttgtccatacactctatatccttgcctagcacctgtctacgtgggatgtgttcacttggaggtgagatatttgtctgatatggatatgatattcttcctcacctagaaacatggcaattttgtagaaat

SEQ ID NO: 27350 - DNA, 281 bp, Zea Mays
acaacgtaggcgaaatcgtaccgggttaagacaaggtactgtagggcccccggcaagactccgataaccggtgggatcattcaccgggagccgtcatcggaggagtccttgccatgagtgtccatcgaagtcgtacaaggcttacaattggccatgccagcgcactcaaggatggcgacgatgtactagtgctggtggagaaacaggccctagaccggcgctccacggtgatccccaggaagtggtgtagctcatccaggtccttcatcgtgaactgctgc

SEQ ID NO: 27351 - DNA, 286 bp, Zea Mays
gcggattctttgctgcctccatgatacccttaactacgatcttctttggccctctccgacttctatgctaatcgtctacaccaacacatattgggatgactacctcgacacgttctgatccacctttgggtacactgtgttctttggcacaaacctcgtcttctggtcctcgaagcgataacccgtcatctctcgctccaccgttgaggcctagtatcgtgttgtggccaatagcatgggcgaggcttcttgactctgtcggctactccaggagctccatattccc

SEQ ID NO: 27352 - DNA, 318 bp, Zea Mays
ttaacgagagtggcaagtttggtcatctgttcgggcagacctgcaaccacctcacctacaacttcaccgccccctcggcctgcctgcctgcctgctgcatactcgaactaataaccagtcgccatcacaaaacttgaggacccatctccaaccaaagaaactaaacgacgcttgcgaaacaaacttgccccgcttacaaagatggcggatcgtcgtcgtccgtttcacttcaccgcgcgcgtctaaatcagcctcgatctctccccatcatcaaccgctcgatcagatagatcatcatctactcgatcttgcgacggt

SEQ ID NO: 27353 - DNA, 610 bp, Zea Mays
aaagctttgaagaaagcaagaatagcacaagagccaaagatggtaatttctaagaagcaaaagcttagcataatgtcttcttctgagtcgaaggcaggagaagaagctccttcgacgccctctgctgccgacgtagcagaaattctgaaggtaatgactgactccccgcccttcaaggtgctaagcccactggggatcagaactgacaaaatttttatagaagaaaggacaaccttcggctgcagaggagaaagtaaaagagccaaagaaacaacgaatagtaaatgtgatgcaagccattgaacgaacaccgccttcagcttcggcggctaagaccgtgactgctgtgggtgccgaagctaaagctaaagctgctgtcgaagcaaaggaagctggtgaagccggagctacaatgtcagatattgacagtcttatatcagatgtaattaaagatgtgactgtagaggaggacatggccacagcgccaggtaaagaaagggaaattgataccaatccttcgggcggagaatatttcaacctttggcacctgagcggtcaggagctttctgaagaagagaagtcggagttaaaagaatttgctatgtcgtgc

SEQ ID NO: 27354 - DNA, 329 bp, Zea Mays
ctccacagcggcaacaacagcgccggtgccgcgcaaatgggtgcatggagtagcagcgagtggttccgcgacacgaagaggcagcaccgagacgtcgccaacatgccttggtggagtcgcggacgttgaggagaaagcgaggggcgaaggggagggcggctgtgatggaggtgggaccgaggtggggagctgcggcgagcagcgaggccaaaaggtgggggtgcagtaggaggagtggaagcaggagggaggcgtgcgcggaagagaggcagagcgcaatgggagaatcagcgacaggggtggatttagggtcgcgaaggcgcgacctc

SEQ ID NO: 27355 - DNA, 641 bp, Zea Mays
cccgccagggaggtagaaccacagaacattatctcataagcagatttggccgaatagataccattggaagagaacctccaataatgtttatctggaactcccgattgaagatcaacgtcagccacaacatccagcaaaatgaagtcagcaatgacctcccatgttaccactccccttaaatccccaaagcatcagccactgtccttcgcttcaccagccttttaggaaccaaactaaaaacatgaggggccaagtctgcaatcctctgacccaagatccatctgtcatgccaaaaaagagtggactgcccatcacccactatggaggccattgccaaggagcacaagctatccaaaaaccggtttgattggaacgtcaaatcagtccacggtttggaagaatccgttttttggagccaaatccatcttacacgtagggccctatttaagcattgaagatcagagataccaagtccccccaactctttggggcgtgttaccttgccccaggccaccatacaatggccaccattagcctctttacgccctctccacaagaacctgcggcggattttatcaattgctttaatagcccacttaggtaaatccagagccatcatttggtaaataacagtagccgtg

SEQ ID NO: 27356 - DNA, 614 bp, Zea Mays
atagatatcagatttttgtagcatacttcggtcttcgtggttcaccagcatcatacgggcccatattaacatcttccgacatacaggcacatccaatcgaagctgcggccgacagtcgttgaaccaccttgatgagggatgcttgaccattttttgagctagtgtggaggtcgagctaggaatgtcgagtgacctcttggatgagtccagtaccgggtgaagaatgtgtgcacgaccagcgtaatctgacacgggcggttcttgtgggttcttttgaatgccaaagggaatattatccggggtggtggtcgagagggtcctcgacgaagttggaacacgacatcgtttccgattttttcgttctttttcaataatttcatgtcctggttcggtaacaagctgataacctcgtccaagtcctaaacaattagccaccaaagtcataaaatcatcaggattttctgctttcgcgtcgtcgacgtcccctgcatgatgcattactgagtttgcatctgcaaagaaatcaaaatctttgcgccggagatatatctcttcttcttcctctggcggtgcttgttctgcaggcccactaaataaagtataaaatgtgcgct

SEQ ID NO: 27357 - DNA, 622 bp, Zea Mays
tcatcaagaaagcttctctgaatcttctcagcgaaggggaatccccatcgaagaccaccttattacgataataaagccaaatacaccacgccctaagatgatgacactgttaagctcctttcttgtgcttttgggcacatgacactccacctgtttccaccactatgtgaaggaaggagcatcaacagctggttgtagaggacagagctcttttgcccaccttggcagctacttctggtgcaatgtccctgattgccgccccatgcatccaattgtcagtctagaacagggtactgaccccattcccaataatagatatcacagattttgcaaataagtctttgacctgttgctgcacaagaatgttaagaccctgccatggtctatttgggtcggttttttctagccataaccactttgcttgcagtgcccagctcttaaactgcaggttaggtatcccaagacccccgagagagataggctttgtaactgtttcccaagaaaccagacaactgcctccattagcttccttcctttccaaataaatcccgttctagttttatcaatttcttttatcacccacttgggggtattcattgcaatgagaaggtagatggagatt

SEQ ID NO: 27358 - DNA, 354 bp, Zea Mays
tgctggatatatggttagggtttttcatgggagacagcaacttatactgtgcgacagatagtgtcctcttggcaagtcttggaggcagtgcttccattttaaaccgatcaataggactacccggcatcttaaggggactaccaacataacttctgccgatcaaatcctcgtggctgttgggttggaaagggggttgcacagttaatggaacgggattggattcgggtgagcttgccgcgggcatagaatccaaacccataagcctagccacaacagtcggacttcttcttgactgagcttcttcatcaattactgaagatgagcagctgtgctcactgctttccttcaaacttg

SEQ ID NO: 27359 - DNA, 356 bp, Zea Mays
gcagcgtcgaggggtacttttttggcctcttcgttgctctgtagctaggcccatattgtctcctctttgattgggcgaaggtttatgaggtcttcactttcggtggtaaggcagtgtacgttgtgttgaccgagtacgaagtctctcttgatatttctggtgacttgctgatctctgtatacagttatcatgccctgagggcctaggaatttcatgcacatgtacagtccatgtacggatgcctcgagtttgtttatggatccccaccccataatatcattgtatgggtaaaccatatcaactatgtagaaggtgatttgctcggtttttgcattcagagatgtgccgagtgatag

SEQ ID NO: 27360 - DNA, 795 bp, Zea Mays
gctagcagtttgtcacatgaaaattggagaacaaagctccttgagttgctctatcaggcgcactgaagaagatcgcccaggtgcagtaaacccgccgccggtgaaccagcgccgtgatccacactggtgttgtgattcgtgctcagtggcgtgtggataactgctagaggtaaaagattttggcgtagggatgagctcgggtcctgttacttctcagttcgtcgtacccacttgcacgacgacgtggcattgcgaccatcgctgtggtggccgtcgtccttcacggttgcgccacgccatgatcatttcaccacgtagctataaccatggcaagcaaggagttactgcccttgagccattgtaccggtgggcgccacgacaaactcgtccagtggaatatcgcaccgccgtcgtgattgccttcgtctcaaattggcgaagcacgtagccggttcctttaaattgagcattaccctcactccgcctctctgttacacactcataccaaccttagttagtctctctctgcaccgtagcccctagtcatcggatttccctcaaatcgggtcactcacgccgccgcgagacaccctatcgtgatcagccgttcccaggtccgttcatacctctctatgccgtgttttagcattcttgaatgttaaagaagctcgttggctaaaccgattgagcactaccgtgacagggcatcaagaacatcacctcaccgacgcggaacacttccgagactgcactcacatcgacccactctcccacgcccgctccatccaaattcac

SEQ ID NO: 27361 - DNA, 628 bp, Zea Mays
cggaagccgggtcggctgcggcgcgagctcgctggacggacggaggaaggtgaacggcggcagcgtgcgtacagactacataggagcggcatgccacaggtgagtgcgagagaacgagcagccggggtggggaaagaggtgagcccggccatggcttttatagccaaggaggagggagcgaaggggcgtcggattgaagagcatcaagaccattaatggtgctttaactgtgtgggggaagaaacggtcgcgagtaacggcatggcgtgatggagaggcgaatggtcatgggggcacagctgtagttctctactgcagcagctgggcaggcgcggacaggggaggcgatgagaccgagtggtgcacgagcgacgacggcgcaacgttactggcgagcagacacacggatgaacacgagctggagaagcatcacgtgaggaagaagaaagaaatgacacttagatgtcggccctacttgtaagagagagaagagagggagcgttaggaacacgggatgggcaatgggctcgtgcgttcatttattttattttatttttttctttatttatttatttcaaaattccttttttattttttatttttttaagtaggtaattcattaaaaatt

SEQ ID NO: 27362 - DNA, 624 bp, Zea Mays
agacagccatgcacctagcgtggacctacgagcattgcgtcgcggccaccatgctagctctggcatagtagaccgcctggcctccccaacgctcaccattagtgctacttgccctgctgcacgcaattgttatggccacgcttgtgtcatctatgtcacctgtatcaccgccaatgacagccctatttgctccctcgcgctagttctgtcacctcttaccggagaagatgagcgagcatcgtcgccaagggttgtgttacaattgtgatgaaccatatgtatggggccaccatggcaacatctgttctatcttgaggtcatcgactacgtgcttgacaagtcgctcgaggacaagagcgtcgaggttgtggctgaggatgggtctgatgcctcaataatctccctccacgccatggtcgacatacatatcaaggacaccatgcacccccatgcctacattcatggccaccggcttcttgccctcctagatagtggcttgacccacaacttcatcaatatcagggtcatgcgtcgcatcagactagtgccggcgaacaacaccaacatgcgggtcacggtgtccaacagtgaccatgttccctgcaagggcgtggcacacacgtg

SEQ ID NO: 27363 - DNA, 487 bp, Zea Mays
ccacccatacattcatccatgatgctattgtgccaagactgggactgcatgtgactccaacagcaagactgcctatcaaggttgcaaatggtgagaaggtgttgagtggggcgtctgttcttagaccccactcactgttggcgaagagaattttaccacaacctgctacactcttcccctggatggctttgatgtggtgctcagggtagaatggttgcgttctttgggtcccttcatctgcaactttgagaagttgacgctgtcgttttggcaccacggacacatggtgtgttggacaggcattagcggctctcaaccccgctgtaatgctctagacatggcacacaaactattggataccttgctgctatcctttgaagacctctttgtcgagccctagggacttcctccaccttgccaccatgatcatcgcatccggacttctgccagggacagtactagtggcggtacgaccataccgctaccc

SEQ ID NO: 27364 - DNA, 352 bp, Zea Mays
ggcgacagccgcctcacgacttggcgccatgtgccctggcacctccaccgcgtcgtcgtgacccactgtaatcctctgtccatcgccgaagagatggccacggtaaccggacactaatcacgcgccagtaactccttgtccctccggccgccgcacgtcgtcgctcaaattcccggccaccgctcatgcttactataaattgaagccaccatgagctccgtaggatcatcacgcacccagccaccgagtattgctctcaatcgatcactagtgagctccaattttgaacttcccccaatttggttttcgccaccgcagacaccctcaccacggccagtctactctatgttag

SEQ ID NO: 27365 - DNA, 280 bp, Zea Mays
agacaccttcgtggtgactcgttagctgcatgtccgacgatcaccggaatcactgccacggtgagagctactttttcccccgcaccgagctcactggccgctaacacccctcggccgaattcgccaccgaccctcgatgcgcctataaattgcggatgccgcgggctccgtagggtagtaagctaaccagccacctcgaatcagcctcaatcattcactgagagccgcgaattcggagttctccccaaatcattttccgccgccgtgaaacccaccccac

SEQ ID NO: 27366 - DNA, 467 bp, Zea Mays
gtaaagtgcaagcagataaaatatgctcaaatataagggtggagataagggggatagggttccccagtgacctaatagtaatagacacccctgggatagatgtcatcctagggatgaattggttaatgaaatatgaagcgaatgttagttgtgacaagaggaccgtaacaatgaagtccccgtccggagaagaggtagtggctgagctaagagtgcctaaaacggcagagggagattgtcaccagatttcagttgagagtaaggaggccaatccgcttgaggctatcagggttgtgtcggactttccagatgtgtttcccgaagaattaatgggtatgccacccgagagaaaggttgaatttgccatagagcttatccctggtactgcccccatttccaaaagagcctatcgagtgtctggaccagagttggtagaactcaagaagcagatagatgagatgttagag

SEQ ID NO: 27367 - DNA, 477 bp, Zea Mays
gttcgttgtgctatatcctgctagcctattggtgtcgctcgtacagttgccacacacgctggccatgctcgctcagagttagagcaagtccttctagaagagctcagagttagaacaagttcttctagaagaaactgggaagcttatccagatttccagagggacaggcatgtcctcggtttaacccaatattcactccttgtggtcccaaaaccagaaaacagaaccgatcaaccgacccatcacatcccctctattcttctaacctaacacactatttagggcgtgtttgcgcctggctggctcggttccctggccgtctcggtctatccaactggtctaggctgaggctagtctatcccagctattacaactcactttatttatgcacttgtaagaagccttgcgccatgaacagtcaggctcttaggaaacggaccttgatcttgtttctgtggagccaatctaaaaggccaa

SEQ ID NO: 27368 - DNA, 465 bp, Zea Mays
tgaccggcattccctgctgcatcaccggcggtaactttccttcacctgggttaacaatcggctgctctctgtgttgaatcattttgcatagggattgctcatgggtttggccgggtggccatcgccggtgtgactgacgcctctgctcggccgtcgggtatggacgaaacacaacgaccgtgggatcctattcaacggctaggattagatgggggtgtccactactagatcttggacgaacgggtcagattagaagtagtatacgccttcaccatattatatctgagtcgtaggtattggaatggttgggcaggattggatcgtggcgtggtcgtgtgaggaccgctgatccatgatccaggggccacagttgatcgccgttccctttaaatactagggtaatccgggctgttcaactgtgatccgatggatgagatccgaggataccctttcagccatggtcgt

SEQ ID NO: 27369 - DNA, 291 bp, Zea Mays
ggaaactgatatttggtagtgtcaagggcctgggcgtttagagcagggggccctcggctacgaaggtcgtagccgcggttcgtcgtcttctccggcgtggttatcccccacagccgtaggcttagatggtagagaggtggagaggagataacttgtttgctgccctttcctgtctccctgtgccgcatatatagccatcggcctgctgtcctggagcctttattttaggcaagcctaaacatggtaacactaatcaatcactaatcaatctctcctttccttccctcaact

SEQ ID NO: 27370 - DNA, 623 bp, Zea Mays
gagatgttttgttagccaaatattcttgaactagatctctggtgctgatctgttcggctaccaccctgaattctgccacagcttgttagtatggtgaccctgacgtcatgcgacacaggggcctagtcaacccgaagcttaagctcagcgggctcatcactagcgttttcaacttcttcctcttcttttcatcggcctggacatagaaccattcacttttccaaccggttggccacttggtgcgatagctaagcaccggggccttcatatccttgcgatatgcgaagttataatagccaaagttttcatgcagcctgtcttctctagccttcgtctagtaatgtagctcatgcactcggcagaaagattcagcattcgggtccactccttggcttcaaagggcccagatgaagacgctgagcctaacgatagcgtaggggtcagctgatgaagatatatttcataattatctaaaacttccccaatcatctcattcaagggaaaccgcaatcccgctctaaaaaagctcttgaaaaccaccacttcatcttttttgggctctggagtgatttcttctccggcaaagcgaataagcttcttctcagtctccccaaaataaccca

SEQ ID NO: 27371 - DNA, 381 bp, Zea Mays
acggacgggacaaggtggctgctgctgtcgactgaactagatcaggcagtctgaaaatatctcaggaaaaagatctgcatccactagctgttccagatgactttgaataagtgcaaaacaacaagaatttcgttctggtaaaaggggggtcacattggatatttttactgcctaaggggaggaaatgtggcagacttgaaacctatctagaaggtggtgacgcagctacttgtgatttggtgtcaaagccacattaaaccaccatacggtgtccctctattcatggatcctgggtggaagatagcagtgcaaccacgtgccataaccctgtctctgttggaattccagagccctccttaaccggctttcagtgaaccccgt

SEQ ID NO: 27372 - DNA, 585 bp, Zea Mays
cctctttgccatcgaatgtgggaaagagaaggttgtggtgggagggttttgccgtggtaggtaagcggtatggtggggttcagaaaagcccgggattggcgatggggagtgtgggaagggtatctaatggatgggtatgggcatggtagatgtgggtggcagcaaggctgaggttgtcggtggaaggttggttgaggtggatcggagtggagcggctgtggtggtgatcggcgctgatggttatgggtggcgcgacggggtttgacaagggaggtatcccaccataacctggcatgccatatgggatggaagtagggctggtggatgctgggggcggtggtggtgttggcggcctactgatcatttgagtgatggcggtggtgagatcggcaagggccttcgtcatggtgtcgatcttttgctctagcgccgcgttggcagaattggtcgcgacagcagatgcgacatcgctggtgttgtcgtcgttgcctagcatctctgataccagattgttggagctgcagcttctctgataccacgacgtttgggcaccattgtactagggttagggctactggctggaag

SEQ ID NO: 27373 - DNA, 420 bp, Zea Mays
atcctcttgttgcctggagttgcaactgcgctctcttgcaccgagcctatggctcaatgagccagcagctgtacagctaggtggccacatacaacagttcgctcggggtgcagatcaaagtaatagaggcagacatgggagataaggtagaagatgcagaatttagtccaacttgagtgatatggcacaaaaccagatgatgtggcataaatcagtgccacattggattaaaaccagatgcaggcaggaggggggccatgttcttagtcactattcctttctagggaattccagaaaccgttttcgattttttcgatcggattcacctgtaacggtaatttttggaaacggaatcggttatcgaaattttgcatcaaaaccagtatcgaaatcggtgtggctttttactgactgtttcct

SEQ ID NO: 27374 - DNA, 549 bp, Zea Mays
ctcagcgtgggagctcgacgagtcgtggcgagtgttgcattgatctctttgtaatcgtgtcaaatgaacacgtatctcattttgatgcatgtaggtagtttgttttagtaacaaatcatgcatatttggcgtagaatcgcgggtgagctggagactgcccaatctcacgccgtgaccgcatttttgtcaggaaagaaccaccgcagcagatttgccgtgcatgtcgcactgggcgttccggaaataacggcgcaccgtgcagcgatctgttgcggtggggaacacgggggaatccctctataaaaggaacaaggattgcattggtgttgattgcacgcatttgcagagaaatctcgtgtcctctcttgtactctcgttcctaggtctgtagcgtccgcggtcaccaccggccggcgtcgcggactcgccggcgtcgatcttcgacaggtggttccaacacgtggtatcagagccgaggggagaggtatacggtggatccagtggtccatcaagagagagagtgaaccgaggaagagatcccaagctccg

SEQ ID NO: 27375 - DNA, 318 bp, Zea Mays
gatttttgtgcaaatatgaaggtagggggtggtatgcctctggactaattcatgatgaatacacgagtaccccagatccaaattaatgtaacaaaatcgacacatctgctagtctacgcatatatgaactctaaatctatctatgcacaaatgaaacagatctaagcgaagagggcagtgaggagaggtatttcaccttccttgacgacgatggaccaaatcgatgaagaggacgatgacggagacgggctgcgcttccttttctctgcatcgaccttccttcgaggagggaacacaggggtggaggtgtttacagac

SEQ ID NO: 27376 - DNA, 283 bp, Zea Mays
ctcccctatcatctcgttcagaggaaagcgcagtcctgccctgaagaagttcttaaaaaccactacctcatcatccttcggtgcaggagtagtctcttctccagcaaatcggacaagttttctttcggtttccccaaagtagccaagcttcatcatcattggcatatcatcttcagacacagtagatttctcaaaatctagatggctgggttttgatgggatcaaaatgctataatcttcctcttcttcatcaacattttcttcttcaatagcagcctgttca

SEQ ID NO: 27377 - DNA, 518 bp, Zea Mays
ctgggcatcaaattctataaagtgcaggggctaaatcataaactttctcagactcagtaaacaatctgagtggacggcgggttttatttttaagaaagtcaggggctcttatgcataataggcgggcgaaggggtatcggccaacttgagtcatccgaacagaattgagggcccagattagaaccatgctttaagtgaatcggaacataatgtgggccacccaatcaagatccaacactccagatcagaccccaaactcgtatgccgtcctaaccattagatcgaggatcgatggctaggatccgacggacgaaagggtatgtggtggcgtgatgtcgtccatccaccacccatccgacggccaaaagatcatcttccaccccccggttgtgacagggagagggcaaccggagcactgccggcgagcagacgaccccacaccccagtaacctaatcgcgatatggtttgatcccacacaaagaggagaaaaatgtgcatcgatctaggtacaactcac

SEQ ID NO: 27378 - DNA, 315 bp, Zea Mays
gggctttagagcccattggattatagatctacgatcctgattagatctaggctacttgaattcgagccaaaagatgaggagtcaatggtagagatcaggtgattggggctggtttgccttcctcggttgggtggcgcaacaccgctcacgagacgctacagggcttcgccggcacgtgacaagaggatgtttcccctagggttctaggctagaggaatggcttggtgaactcaggacaactttttggtctcaagaaaggggcttggtgtggacagtgatggccgaaggagggttcattgtggcccatgatctggc

SEQ ID NO: 27379 - DNA, 373 bp, Zea Mays
catgtcagaaggcgtttggtactgtctgcttcttcattggtacaagagatttaattcaagagcatatagcattcagagtatggtcgcttgtagagaactgggaaatgccgaaggagaccatcaccaagtctagcaaaggtgaactggtccggctgaagtatacattcagatatggggataaattcgatgaaccaaacgatgactggctaaaatgcatcgaagttacaagtgatgagctgcttgcggcttattccaaggcagaagataaagcactatctgcagccttcggaggtcgggggaaaaagagaataaacacagtttttgatgccatcggcttcgtctaccccgactaccactacccgctatggggaca

SEQ ID NO: 27380 - DNA, 460 bp, Zea Mays
aaaacatagcagaagctgaagctactaggctggaggatgttgatgtactcgaagaagagcgactgaatacggtgattcaatcagcacggtatcagcaaactctgaggcgctatcatgataaggccatacggcatcgatccttcgtagtgggagatctcgtcctccgctgaattctaacgggggagggacgacacaaattgtcacctctatgggaagggccattcatagtagcaaaagtcactcggccgggatcatatcgtctcactcagatggacggcacggaaattgggaactcatggaacatagaacacctcaggaagttttacccctatctatatctcaaaggctgctgagatgacaatgaactctgtaagctgagaaatgtatcatcaataaaaaggcttcaaaggcactcaaattgtttgctgtcaattggcacgcttactaaactcggggtgac

SEQ ID NO: 27381 - DNA, 391 bp, Zea Mays
cgcccgcgatggtgtgcgctaagtgtaagattaccctttccgtcgtcccgatcgtggatggtgtgcatccccgattcctttttgccctagatagaggactcgtgctgggatctgtactgtaaccgcttttttccccctgcccttacctaggacaggagtatataagaagggctgatggaatttgggatgcaggcgagaagaagctcgggaagtgtaacacccgacactggctcaccacgtgatgggcctcgatgtcgcatggcccaactcggagcagcctaaaggcaggaccacaacggcaggagaggtattgaagacaaatcagaaatcggaaacagggttcgtcccttcgctcgtcttcctccacggagcggcatatcggtgcgtcacc

SEQ ID NO: 27382 - DNA, 339 bp, Zea Mays
gccggtgctccttcccattccccggccatctctatccccagcgtcgaccctccatcttcctctcctccccactcccctcttctccaggccggtaacggtcgtagtaatggccaacgccattaatggcgtttgatggttgtcagccgccattcatcccttcccagcgtcttctctcctccccactctataaaaccccggtcgcgcccttggagccttgccctaaccacagccacctcgcgctctcctctctcgctgtgtagctcgccgacagagccccgccgtgcccttcaccgccgaccggagccagagtgtcgttcaccaccgcatcgttgaagccgc

SEQ ID NO: 27383 - DNA, 332 bp, Zea Mays
caccgcccccggagcctataaattaagtgcgccatcggctttgctatgtattcaggcatctagcgcacccacccgtacctcagatcctccaccagagagctccaatttgggatttcccccaaatcaaccaagaacaccgtgccttgagacctcatcgtggctagccccattcaggtctgatcctgccctctgctttcttatttctgcaccctttcttgctcctgatactcactgacccgttcaattgagctgagctaccatagatcgtcgggaacgcagtagaatgtccgttgatcatacggtcaccgtgggtagagtaggttagagcccca

SEQ ID NO: 27384 - DNA, 301 bp, Zea Mays
gccggaagcagtgcttgattctcgactgtctcgtaaaggaaatacgacagtttctcaggtgctgatcaggtggtcggggtggcctgattcgttggctacatgggaagatgagcaagctctgaagcagcagtttccgatggcaccagcttggggacaagctgttactgaagaaggaggggatgttagcatcgcagatggcctggttggcggacaggaaggaaggaaggcaaagctgatggtcgctggacccacaagacgcagccagcgtgtgattaggccaaatgtgaggattagcggtgcc

SEQ ID NO: 27385 - DNA, 618 bp, Zea Mays
gtgggttcgggttcgcggcgttcgtgtggcgatagagggagccagggcggttaggtgagagaggggcgtggagaggatcgggggagctgttgctcacgcggggcgtgggcgtgatgcggcgtgcgacaaggatgagcacggggatggcgggtcatgcggcgtttgcggtggggagggcgcacgcattgaacggggtgtgtttgctgttggacgcggcttgggagggaggacgcgcatcggacggagggggcacatcggacggttgagatcgatgagaggcagaacggcaggctacccttgcagtcttaatagagtagtatagattttttcttgaagttcagcctcgcgctccataaccgctgtcatttttccaacattcatagccacaccctttagatcaccttggacttcatttaacatgtccaaaagagggtcacttgatccactcttctccttcccagatgtcctcctcctcttcacacttgatgatgctgaatcagtagaccacctaggggttctatagatctcatgccctcctcttcttcatgatcattaccatacccagtagcaagctcttgttctaagttcccaacggcttcatcaatcccttccgcacct

SEQ ID NO: 27386 - DNA, 510 bp, Zea Mays
agaatttgagcgatgacgcgcggcggttggagaaggagaggagcactggcgcagtggattggtgtcctattaccgtggaaatctctccggtgatcaacggagagttacaacgggtcacggtgatgcggtggagatacgagggcacgtggcgcaaggttagcaggcgaccgtcgccggtgaacttatctgcgccggccgcaagacaagggggtacgacgaacctcatccgtcttcgagtctgagttaatccagtgcccagatctttaccttgtcatcgttatcccttgccagcgaacacggaccgcagcgacgacgtgaatcacggcgtaaagatcgtcggcgtcgagggggggatgcatcgggtattttcttcagttactgtaccatggcatacatctccggttgacctgacagagcaacttgaagctggattttctcctaaattcgcttggcaaccaatccaaggctctgcagcaaagttgtagtctaacataccatcttcatctttgt

SEQ ID NO: 27387 - DNA, 461 bp, Zea Mays
tcctatatatacacgtgaatacagcccctagagggcaatgtgccttgcgccattccttacatggtaacagagcccaggatttttcctccaccacgatgcctacctcatcttcttcctcctcctccaccaccgccaccattgcaatccatcatgccgtgacaattcgcctcactaagtccaactttttactgtggcgtgcccaattgcttccttgccttcgtggtctgaaccttatgggtttcatcgatggatccgttgctgtacctgccaaagaagttccgtcttccaatgatgtcggtgcccctcttgttcccaatccggcatacacaacatggtacaatgaagatcaacaggtccttagcggcctcttatccacgatgaaagaagaagtcctctctgatgtggtcgccgccactacatctaaagaagcctgggatattatcaagaagatgttttcttct

SEQ ID NO: 27388 - DNA, 389 bp, Zea Mays
aaggtaataatcaagttacacttcattcaaatgaaaataagaagtgtagtgaatgctttgaagagggacacttgattaggtcctgtccctacatcaaaaatggcttgattattaacaaggatgatagactttgctttatatgctcaaagaagggacacttagttaaatcttgtccctatttaaagcaaaaaggcatgaggttagaaaagaaagtttttactaaccatgtagcaagcaacaaacaaggaaagaagaaatctccaggacttcaaaaacgcctatgctacacatgccggaaaaagggacatcaatgcaaggattgtcccgttggtaaaaatcccactcctaacttgtcatttgattcatataatactaggcaacccaagatt

SEQ ID NO: 27389 - DNA, 413 bp, Zea Mays
tctgaagaaaattggtgaatctatactttctgaaattgatgaaggcaactgtggccaccacggaaaccttcaggaggttactcgtcatctccaaagagtacttgatggcaagaaattcttggttgttcttgatgacttatgggaagacaattggatccaattgcaaaatctgaaggcaatgctcagctgtggtgcaaaaggaagtaagatcgttgtgactacacgcactgggaagattgcttccctgatggatcattgcatgccttacaagatggatgtcctatctgatgatgattgttggattttgtttaagagaagagcctttgttcctggaagggatgatcctaggatagaagtgattggaagggatatagtgaagaaatgcaatggtgtgcctttgtctgcacaagctt

SEQ ID NO: 27390 - DNA, 271 bp, Zea Mays
atttaatttcgctaatatattagcaaccaaaactaaaaatattagacttaatccttgacgcaagactaaaaagtaagagactaaagaactagatcgttagttaaacttccatagtctcgattaaaaaccaaggactaaagagctttttcgaccatgactagcatttctcactgctgttgctgtcaggcaggagccattagatgggtgatccacaagatgcttgagaacagtgaagcaatagtgttcacagtgacatacatgcctgccagtt

SEQ ID NO: 27391 - DNA, 307 bp, Zea Mays
caagactggagaaggacctgacgcctggaaagcctaaacgggagaggaggcccaatgtgaaatggtctgggccggagtgggccaaatgaggtgcgcgctgcaactgtgaagcaatactgtattttagccatccagggagggagggttttggtcagggggtgggtgaacggaagactgaatccagctgcgtccggcgatcgggagagagagccctacgctcgatccctgtaatctctacctgttccctgcactctgatttcccctgttaattctggaacttcttgagaggaggagagcaccgggagcg

SEQ ID NO: 27392 - DNA, 359 bp, Zea Mays
gcgtgggtcccgggtgctatcattcaggctatgttgacccaggcctttgtagctaggggctcggcacggctcggcgagttgtgccttactagtggtctgtgcagtcagacctagccccgataggtcatgagtgcgtcataggctgaggtacgtgtggaccataaacgcgccatagtccgaggggttcgtaggtcatgaacgttatgcggcccatggtgttcgtaggtcatgagtgggaagtggaccgacgcctgcgctatggcttggtgccaggcgtagttaatgcggctggttatttacgacgggttagtcctaggtcaagtgtgggatccacttgagtggtttccctccaacatgct

SEQ ID NO: 27393 - DNA, 506 bp, Zea Mays
ccttgttttgcgtgtgtgatatgtttaggttgttcaccttgaaataaaagtatactattgttaaactgggtgaactattagtttggatggtgggattttatttatctagatccggtgttaacaaaataagattttagacaagaattgcgctctaataatttgttagaccaactgagcaactctagagtctgtaatttctttatctcaatttgtattccattcatgtttgcatgtatataccttgttttgcttgtgtgatatgtttaggttgttcaccttgaaataaaagtatactattgttaaactgggtgaactattagtttggatggtgggatttttatttatctagatatggtgttaacaaaataagattttagacaaaaatcacgctctaataatttgttagaccaactgagcaactctagagtctgttagaccaactggtgggatttgtagctgcttgaacgcagcgtggctgatgacattcagtccagccccaccgtcga

SEQ ID NO: 27394 - DNA, 550 bp, Zea Mays
gggggtgttgttccccatttccgtctttggtgtcacttcttctcggctgagctactttgggaatagcctacatcaggtgcgccaatggaggtggtgcaaattgggtgcacgtccattcacctatgaggaacacacacaataggataccgtcccctgcacctatgctcttctaacgagggttggcataggcagtggttttatctttgctactacgaatctcccctcaccgacggacatgaggcgcttccagaagccctacaaagctggatctaggggtccctgaatgcgagaagaaaagggtcaccaagtccatctctatcgtcatgaacctccatgagaggggagtgacgatagtgggggtgataggaatttacctctgctgggggtggcccctcttatggcaagaagactccttctgttcaagatgatggctgacgcctcatcaaaggacatagagttggatgcagcagaccctagcgacatggatattgcctgttggttgtgaaacgccatggaggcctccaaagatgtggacgaggtcaccatctcg

SEQ ID NO: 27395 - DNA, 482 bp, Zea Mays
gaagaatccaggtttagtgaactcgtcgtcggtgatctccgcgccgcgatccccatcggcgctgcgattcgtgcactgtggtgcgtgcatatcggctggcagtaaaagactcgcgcgggggatgagcttgggcactgttaccgctcagtcaccatacccacttccaccggcgacgtggctgtgcgaccgtcatcgggtttgccgccgtttacctcgatcacgacacacctcaagcagtttcaccacgtcgtcgtgggttgtggaggataaccagtgatggccgtaagtctttgcccagtgaatgccacgttagcgagctctggtgactcattccctcatcacagtgcgctcttctccgttcgaatttgtcgtactcgcagtcgcccgctataaattgacgccccgtcctgctccgctaactagttacgaacccaatacattgctcctcaccagccaccgtagcgcccgaatttggaatttcc

SEQ ID NO: 27396 - DNA, 364 bp, Zea Mays
gtgggtcaggtccgtcagctgtagtagtggaagcaggctcgactggggcggccggtggagttggctcgagagcaacccaatcggcgtcatcgtgctcctccataaagatggtttgtcccatctgatctggacctgcaggctttaagacaggggatggacatggtgcaatctcatcgaatgtaacctcacaaggctccataatgtggttagtctctaggttaagaacacgataagcatgagaatgtaatgcataacccagaaaaactccatcagaagaccaggactcaaacttgtccagattaccttgttttagcacaaagcatctgtagccaaataccctgaaatgactgaccttgggtggccg

SEQ ID NO: 27397 - DNA, 284 bp, Zea Mays
gcatgggttagagccagggtgctgggaaggggcggtatatataagaccagaactgaagcctggagcttaattgctggagtggatatatacatatcagtgtaactgaataatctgtttatagtttaaagaaattgtacttaggcatttatcttgaataattcgccattgtatatgaacacttgaacagggctagctccagatatatattataataaccattgcggtggctatgttttcctctcctctctagtagtgctagcacctgctttcttgctcgcattctt

SEQ ID NO: 27398 - DNA, 548 bp, Zea Mays
cgcgacaatggggggctgaccgtcacggtgttgggtctcgccgtggtcagggtgcgccacatcaccatctctggtaagacctactaatcaaatcgtagtagacttctcatggtttttcgcccaagtgtatagaggatagaggtgtggggagtgttcgtgtgttcggcagccatggcgctgccgcttggatgtgtgcgccgccgtgggtgtccgttgggaggaggaagaggcatccgtggccgtcgatctggtagcgggcgggcgagatcggttcaccgaatacgccttcggtagatcaaatcatatccgttcgatcttgatcgaagaggctacatcgggtctcggggtgatttgatctaggtcactgatcatttaatggatggccgagaatgctgggtagcgtagtgatccatctggccgtaaacctagaatctaacggtcgctgcttgatcctggatattttgaggtgggatctaatccgagccctcgattgatgatccgacggctcaagatcttgcataccccttcggccgtgtaaattttcgaac

SEQ ID NO: 27399 - DNA, 318 bp, Zea Mays
catagcagtatcaccaagcagaacaacaaaaggataaggtcaaaactactaacctcgatgacagactgccacagattttctgtcatatttgatgcaaccttactcaatatatcttcgagcatcgaaaatgctgatatcttcatatcccaaatattggaatttttactattcgcagatccagaattgcgggaagaaatgccagtggcatttgctggtttatcagagatgttcagttcagcttgcaagaatgatacaatcgagacgagcactgttagtgaatgtgaactttcagctaatgaaatgcctcttccataatcc

SEQ ID NO: 27400 - DNA, 459 bp, Zea Mays
cggtggacataatgcttgcccccaaccttcacctccaccggtcatcagcagacggcagcgccagcatccctatggcggcgccatggtttccccacggtggaagtcgccagagttcttcgggacggtgccccattgctccccctacccctcaacaccgagattcgcaacgaggagaaagatttgaacacgtcggggatacttaccaccgttgaagggctacagagggagctggcctcatttgacaatggcaccaagcgcggaggtgagccataggtgagaactcccggccatgccctgccgccatcacaccagcagatgcgttgcctaggtgcagcgcagattggagtatccccagcttccctcataaggccattaccattgcttgactacgaccccgatgtgcactctctctcctttccattccccggatccctggcaaccccaaggctgcagcccgac

SEQ ID NO: 27401 - DNA, 388 bp, Zea Mays
gcggtacgcgcgaccaatctcacgcgcacgatctggcatcaacgacatccgatcaaccgaccgaaaggatacgctagatctaatcccgatcatcgtcttgtaatccaacgttcatggttcgtctatccacacaacgtcacccaccagccaatccaaacacggcggcacaatcatccacgtcggcaccatggcacgcgcacaatacacagaggcaacagggccccaaccttgaggctactcggtgctacacaatgagcagacgaaggcgagtatacgtgacaagtccttatcagaattcgtgtagtcgtggggcctatccacgccgaggggtggatccgcagcgccccaattgctccagtgagcaattcgtcgcttgatgccaacgcgt

SEQ ID NO: 27402 - DNA, 803 bp, Zea Mays
gagataggcaagaacttaatgcacgggattgaagcatgcagtgaagttcttgaatcaacggaaccagatattgatgatgacatgaggcatgggtttttgtgtactcgagcagcattgtacctaaaggtttgtttgctttctttatcatttgtgagagctctgttccacattaaaagtagggatcatagaattttgacctacagaggaagtggaaaaatgatgtttacatggcgattcgggattgtaatagagcgcggaagattgatgccacatcatatcaagcgcacctacatatggctgaggcactattgcaggtaagcagaacaacctatggatttcctgtcaaatagtctggtactctggtacttctgtatttgtatggaatcggtcaagccttccttgagtatgttcttttagaatgttaagtttcacaatagcatgaaatgtttgataaatttgttagtttttatgttttcctattccttctcaggaaaatataatcataaacattctcttagtttaggggccttaattatccgaacaatctgtcctttttgtttaattatgtcatctgcttttggttttgttagtcctgtattcaatatagttagttttagaatttttgactttgggacttgctaatggagtccaaatcctcatttaaatgagctgccaaaatagtatgacaataaccttccatctgataaatacttgcatgccttgtgtagttaggaagactgaaggaggcatctgagtatgcagaggcagcaaataggcttcttccccctcattgtcaattgagc

SEQ ID NO: 27403 - DNA, 375 bp, Zea Mays
catggctacccattttcagcatgtttcatcagcgacctaggattccgttcctatacggtctcattcgtgaattcttcagtagtggatcagcagaaagatgtgcacgcagacgcagggcagcttggttagctggggtagggtagcagagagacactagacagcccagcagccagcatgactatgagcagcaggagggtatggtggtttcagctgcagcaaccaaaaagctcacacatcccacaggcttgtcttgtccaacggttcatccgccaaatggcggcaggccgcaggttgcgatcgacacgacacttgaaaagatgccatttgcagaccaaaaaaaacacgagataaagggctgggtccagccaatctaaa

SEQ ID NO: 27404 - DNA, 337 bp, Zea Mays
caaggggtaggcctagtggccaggtatgattccatggaatggtgtcgtgctaggtcacaacgtggagtgtgtgatcctcggtccgttgatggtcacaatatacatgatcttgaggccacttcccccatccatgagcaccttggtgaggcgcttagagcctacaactggctcgatgatgaggggtaggccccaggatgcgggatgctgtcggggtggtcgcagtgatcgaagacggttagaaactctgaccaccaaagatatagtgggatggttagctctgttgcatggacttctcggtgggcggctttgatgcgatgcttgtcgccgtaggcctcag

SEQ ID NO: 27405 - DNA, 323 bp, Zea Mays
actctgacaccctgagtagagaatccagagggactggatgaagaggtgagaatgtcggaccgaaggagtgcaactaaggtcctggctgaatggctggcacccctgaaatctgaagaggtggggcaaagctgactatactggaggcacaggaacaccggtgtgcagaagaatatgagtcataaatgtccgatgctctgccctatctgtcaagagctgctgctaaagggtgtcctggtgatcctgaatagtctaaaaaatagatagcatccgctcggacaacaactgcttgataactgcctgacgagcctgcttagctaccaagt

SEQ ID NO: 27406 - DNA, 308 bp, Zea Mays
tccagcagggcgctacatgatgaaccatgtcgagccccaggctacagaggtcaggggtcgacaaagccaaaatgatggtgcctggggccctcgtagtcccgcgccatccgccatggtaaatacgagacaacaaggcaaccctgggcccaaaagtacgtgtggctttaccccaggtagaacgctggttttaccctcgccttacgactccttcctaaggaagccaccgacaaccgacctctctctcggcctataaaagggagaggttgtactccaggcaaggggacgtttctcggacatcttagacgaag

SEQ ID NO: 27407 - DNA, 499 bp, Zea Mays
ggcggacagtaacctcgttgatgcactcagtgatgcgatatggcccaacgaaccgtggtttgagcttgcccttggacagctgcggtagtgaagaggcagcgtgctgtcggaggcgtagaagcacccaatcgcccacggcataggagaccggccggtgcagcttgtcatagaaccttttctggatggcttgagcttgttccagccatgtgcggacgtcagtgagaagttcctcctgagcagccatggtctcggccaccgcagccacccgcgtctcgcctggttcataggaccagatagatggggtcccttccatacactaccttgaagggggtgtcccggagtgatgattggtacaccgtgttgtagatgtactctgcccatggcagccaacacaaccactgcttgggtcggtcccctatgaagcaccgaaggtacatgacgatgattttgttggcagcctctgtatggccgtccgactgtgggtggaaggctgacatca

SEQ ID NO: 27408 - DNA, 460 bp, Zea Mays
ctccctcaccaccaccttcagctcgcactttgccaatgcgcccctcaccatcaccaacgtctatgccccatccaaccaccaggactccccaaccttccttgatgaactctcagacctcctccccagcatctctggtccttggcttctgatcggtgactttaatatgttgcgcggtgctgctgacaaaaaccagggtcacctggataaccacctgtgcaccatgttcaacagcaccatcgactcccttgccgttgccgaactccagctacaggactgcctcttcacctggtccaacatgcgttctgttcccacactcgctcgtctggatcgagcctttgtgaacaactcccacacctcctcattcccctccacctccctcaccaccctgcccaggcaaacatccgaccataaaccactgctggtctccatgtctacctccatccccaaatcccaaattttc

SEQ ID NO: 27409 - DNA, 362 bp, Zea Mays
ggtagttgtagtagccctgtagctgccatgtcgcgctcccgccgctgcagcgaaagggacaccgaagccgaagcagatctgaatctgaacctgctcttgaatctgacgagagggcgggtgaggaggaagaaccttctccgctctgctcttatctagctgaaaggctgcgcttccgttgctttgaaccttctctgctctgctctgctctgattctcgaagcggatccatggaccatggcgtgttcattcaaggagcatgcaagaaaacaacgacgacggaagaacactagttacatgttcgttcacggaccggaccattcatggtccaggcctccagctcgcggcaacgctcgatcgatcgtc

SEQ ID NO: 27410 - DNA, 354 bp, Zea Mays
cagtagcttacctctatagtaacatgtacttgattctgaataacaaataatttccactactgggactgaaacttagtatccatctactgcttgattagaacatggcttagaaaatgtcatttttcacctgagtagtcaatttgacttaccgttgatgacaatttatgcaagacatggttcgctgagtaaagtaacacatgggattgtgaagaacataccgaggttcttcttggatagggggcattttaactatgattttagcattgtcaaacacggtccaggatcctacaggtttcataccttcttactagacagagtagggtcatgctgattttacaacctgtccattatcgc

SEQ ID NO: 27411 - DNA, 343 bp, Zea Mays
gtgatctcgttgtctccttgtaactccactcggtaatgaatctttacttcaacccttctgttggaaccttacctatcttacccttgattgttttctccactttgtcgtttcgcgagtcttgccttaactatatcctttgttatgcttttaattattatcatatgcacccttgacgcctctatattctacattgatgtttgtctcatacctgccctttaaaatcacccctcttccgtctcataccttctttctcttggtcgtattctcttctttggctcgcgagtttgtaacctcatcctttgttgtgcttttgtttcttattgcctttacccttctcatctct

SEQ ID NO: 27412 - DNA, 727 bp, Zea Mays
gttctttataggtttctggaatattttagcaagtttgactgggacaactattgcataagtttaaatggccctgttgctttgtcgtctttgccaaacttaattggtgggctacctttcatattttcattggcagattaatgtattgaggcatattctctaagttatctcgaaattttatcctgcttgcagttgaagctacagttacacataccagtgacttattgtttgacaaagaattcctcaagagctccatggataaagcaactgtacctccaaaaaattccgattcatgctatccgaggtttcgtcctaaacatctaaacatagttgatccactgaaggagtacaacaatcttggcagaagtgtcaacagaggtttgaatttgatctaaccaagatatacatataactcttttctaagttttcctatacaatattttgctgctgcttgtactcataattgcatcccaatttattaagtcttgctgctgcttgtactcataattgcataaacccatatgtgtagctagctagcattgggtttgcctggcctcatctgcttaatttaataaggtgattttgtgcagctagctttaatcgcattcgaacagctttcttatatggtgctcgaaagcttggtcatattgtcacgttaccatcagaagttattcctgatgaaatttatgagtttttcaaaaacactttgggaaggaatgaactaggggca

SEQ ID NO: 27413 - DNA, 785 bp, Zea Mays
gcgagtcgggctaggcgcgttggcgatcgtgccaagcccaagcgaggagcggtcgaccataggagccttaggtgccctaggcgtggcctcagtcgcacatgacatggctatgcagaagagtcgttggggagtcttgtagaaggggaaagtatgatggtgctagaggggccatcacaatgttagtagagagtaaaaactaaaaattcttggaagttgttggagtccgttgaaaagggaaatggcgtctcattgaagacaacatatcatgcctagaaatattgatccggttggaatactgatcaagacaacaataacccttatggtgaggggagtaacggaggaaaacacacaaggaggagcgagtttgaggaccagtggcagaaaggttggggtagctttggcagctgaaaacacggagatgagtatatgagggtggggatccaaagagagcgatatggggtgtggataagttgattgctttagttggtagaatattgaggaggacattatcctgaaacaaggagcgaacgacactattgatggtgcgaaacatgcattcggttttacccttttgaggcgaagtgtaggggaaagacatatgaagttggatgacgttggagtgaaagaaattgcgggcgctatgttcattgaattcgcgacctttatcgcattggatgccctaaatgggaacaccaaattgtgtgatggcataggcaaagaaattaaacatggtggaaaatgtgtcagatttcagttgcagggggaacgtgtaatggtaatgcgaa

SEQ ID NO: 27414 - DNA, 358 bp, Zea Mays
acctcagactcttgtgatcggtgaaaatgtgacacttgttcccgattaggtaatgcctccatatctttaaagcgtgtattatggctgccaattccaaatcgtgggtggggtaattctgctcatgcggcttaagtaggcgtgacacataagcaatgactttttcgttttgcatcagcacacaccctaagccttgcctcgaggcatcacagaaaacgacaaaatcctgatggatatctggtagtgtcaaaacgggtgcggttgtgagtttctcctttatgatctggaaacttccttcacattttggggtccacacaaatttatggtctttcttgagaagctctgtcataggtctcgctat

SEQ ID NO: 27415 - DNA, 440 bp, Zea Mays
ggaaaaggcgacaactacggggagtctgcaacaggtaagtgaaggcactgcagatctgcacaaaaagtatagcaatggtaacctgggtttacgaagccgctgacaatgcgcaggtcacggtgggcaacagcagcacatcaaatggtcccatggcgacggtgggtggcaaaaccgaagtgatgagcagcgaggaagacgaagtcgacaaactctcagtccagggctaaataagacaaccaggagccagggagaggcgaaggaaatattaaagtgatgaaagtactcaccgtcgtaccgcacagagcgtcgccctgttttggccatgcctggaactgctgacgcgatggagacgaacgacagcatgtggacgacggctacgcgcccatccgctcctctccctacagcggctgcacgtggacccgcgcggcggcagggaccac

SEQ ID NO: 27416 - DNA, 525 bp, Zea Mays
caagcccaccatctatttaagaaatcctccttgtgtaacacccgtggaacttccacaggcaaggccgccacccgcccatcccaacctcatgcacaagcaaccgtgaagcttccacaggcaatagtgaaacgtaatctgtgcttgttgttcatctgttcaaaagtcctacagtaagttctcgtctaatttgtgttagtcttgtttagttccgttgtctctgttctctcaatggttcagtacaatcttgtttatttcattgttaggtttagttcaatggtgtacatgtcaatttaattgttctaattttagtgtactgagttcgaggtaatatataccaaacactggtattttgaatacatgtttggttcttgttaggctatatcagttagggtcttgttcagctagggtgtagttcttacattttgcatcaaagcatcgtaattttagctctaattttaacggatagagcacagagctgggcttgaatagaaaagcacatctgacccagttaatgttataggccaa

SEQ ID NO: 27417 - DNA, 288 bp, Zea Mays
ctaggctggaggatgttgatatactcgaagaagaacggctgaacatggtaattcaatcagcatggtaccaacaaactctgaggcgctatcacgataagaccatgcgacattgatccttcgcagtaggagatctcgtcctccgccgaattctaacgggggagggacagcacaagttgtcacctctatgggaaggaccattcatagtagcagaagtcactcggccgggatcatatcgcctcactcagatggatggcacggaaattgggaactcatggaacatagaacacc

SEQ ID NO: 27418 - DNA, 369 bp, Zea Mays
gcaaacttgcaatgaacctgtatgactatgttgcttgcgttactattcatattgtgtaactgtgttgcaaacttgcaatgaacttgtgtggctaatgactatgtcattgtaattaagttgaaagttgatatcaaggtccatgtatattttgtaagtgtacaaacaaagttcatgtgctacacttatttttttagaataattagctttacattgggttgatatactacccggtaagtatctggtacgtagaaatatccgcctagataatatccgatatccgtttactatccgctcggatattatccgatcccatcctatatcctacccgatattttactatccgtatccggtcatgtatccgattaaaat

SEQ ID NO: 27419 - DNA, 410 bp, Zea Mays
cgacgtgctaggctaaataacgccctagaccagcatgtcgacgactttgcactccaattcgtccttatggacctacgagtagcggtagggtcggacagcgactgttgtcgtgtctggctgcaagtgaatgcaatggtcacatgcacgagttggtggcaatccagaaggcatggcgaagacatcgatgttggcgagaagatcgtcaaggagtggtcgcggctcaggcagaatagtgtggagggctatcgacgtcgttgcacaacattgagagccgacacccttccaatggacctgttgacccgtgcgcccaaaggccatgcaaagaccattgaggtctcaaagaatgggcctaagggtgtgtaagaatgccacacagaggacgatgtcataacccccaaggtcaatgctgt

SEQ ID NO: 27420 - DNA, 500 bp, Zea Mays
ccaccgtctgcagtggggaattcttgcggcggcaactggaggaccgtgcgcgattctctgccatcgtcgggaattggagcgccaaaacgtgctgggtgatcgctgtctcttgctgcgggtgttggacgactcctcgggtaaggcggtcaactagggtcgtgggaattcctcgtcggtgtccgatttgccaccgtgaacccgcatgtctccgtgggcggtgagtcctgctacacgattcacggtaaaattgctcccatttggttcgacatcccttcctcttccgtttgcaccatttagcgctcgggttagggctatgggggtcggtcggccatgttgccggtgggcgcaccgccgggtggcttctccgccgccgtggctaggattgattgaggaagacggcgcctcgaccgttgatcagcaagggaagggcccagattagatcggcgaaaattgattgtgggccatagatcctgaggcgtgcggcttagatgtaatacgta

SEQ ID NO: 27421 - DNA, 492 bp, Zea Mays
agaacgtcgagcatggtgggttgctagtcatgagaagtagggtgggggtagatgactccacgatgacatggcgagcgtgacgaagtcggaggggaggctattggatgtcgaagttgataacagaggcgagatcgatgatcaagcctcacattttgtcgagcaagtggcacacgagacgcgatcgggaagagttcgacatgtcaattcttgtgaagatgcgacatcgacgacaatcaactcttgacgatgaaggtgtatgacgcggagttagggaccgtcgcggccacaacagtacggcaggggcgtggccaaagtgcggctcatcggagtaccatgacacgagtagcgctgacgtcgatggtagagtctgccacccgtgctggggtggatcgggcgcatacgcttttcgtggatgcgtatcatgacctcggcgcgcagactgcccccttcaacaaatcagggaaggaggtggggacccgcttcttggggtgg

SEQ ID NO: 27422 - DNA, 600 bp, Zea Mays
ggtcgatattgtgttagcctattctgtttatatctcgaccgcgcttaagtaccagaacttagaccggcgtgtgtttgatttaaaatatagataaatactaactattcaaaacttcggtagtttaaactcgaatcgagttgtgccataatcttaaggtttaaatttaagattgattggtgtgaaaaaaatacgaatcgtgaagtaaattagttattgcttgacagaatgaatattcctttgagttatcctcaaccaccgcttaacattatctcctatttgccgtatcctgtatttccatatcctctcgtcgttttttttcctctgcccgctggtcgcgcaagctctagctcttgtccgtaccggccaccgccccagcctgtcgatctcatctccctgtgattttttatcagccgtcggggggagaaaaatcttccctgttcttatcccccgtcgccctgctcagattttccagccaccgctgtactgatattttggcgcgcgatgcctattccttgcgcgctcctctctgccgagcggcttcttcacgcgtgtctctctctccctggtgcctgctcgcgacaagctcctgctcccttccgt

SEQ ID NO: 27423 - DNA, 308 bp, Zea Mays
ctgttttctccagtaaaaaaatctttgcttgcctgacttactctgctattgcgatctctttaagatcaaatattttttgagtgcatacactttatttcatcttggtttcatggttgggtacctttctattcaatgggtaaataattacagaagggtattatcagatgtattcatgaacaaacatatatactcatgttaagtattaggcaaatgaggatgtatatataagatgatgacaattagaatcttcataactgaacaaggcaaagatagtgaataaactaaaccacagaaccccttaaccaaaa

SEQ ID NO: 27424 - DNA, 415 bp, Zea Mays
aaggcccaaagcaggaagagttgacatattacttgatgaggggagatcagcagcaacgatatcaagggtgcgactcgaaaggacctcagcctcatcagcaggcggcagactcccgacatttggatcactggcctctaaagtgaccagatcagcgagagccgcagaaaaatgtgtcaccgcagcctcctcggaccgaactaagggcggtccaacgtggacatccatagaagcagcagaggcggagcctgccccaacaccctcaggggctgggtcgctaccagcaccaccctcgggggctgggccctccgcagcagccacctctagggccgaagattcctcagccacgtccataggagctggatgactcggtttagcgttttcgcgaggaagattgccctctaaggtcgatgaggca

SEQ ID NO: 27425 - DNA, 360 bp, Zea Mays
acaggtctctagtacggtggccgtctgcgcccacaagatggtcgaggcagtgcccgagaccccaataaatagcctggatgggaaatcctgcagttggcgtggaggaaaacaaacccggaatctcacgcggtgggtacggtgatttgttgccatgaattgtgtggccatggattttatcccatccgagcgaggaagaaaacgctgacagaggtgggtccaccagccagagaaataggagatgcgtgcgcgtttccgatgcacgagcaggtgctgggtgaggctgagcggaggggaccgcgtgtaagcgacaacaacggggaaaacaggagcacgcggtgcggaactgtggatggcatgcgg

SEQ ID NO: 27426 - DNA, 450 bp, Zea Mays
tgggattccatgcaagcgtactatttggtcaatatagatctctgtgtatttttctgtcttgtgggtggtatgcactggcaagaaatgagctgtcttggttagcctgtccacaatgacccaaatggaatcgtggtgtcgggaggtgttgggcaatcccacaataaagtccatgcaaatgtcctcccatttccaagatggtatggggagtggttgtaaggtacctgctacctttaaatgactggctttgattctttggcaagtgtcgcactcagatatgtacttagcaatctctctcttcatcctggtccaccaatataaggatctgaggtcatgatacattttgttacttccagggtgcatggaaaattttgagagatgagcctcgtccaaaattttcttcctgagttctggattcttgggaacaaccagtcggtcttcgaaccataaaat

SEQ ID NO: 27427 - DNA, 353 bp, Zea Mays
cggccgtattcattagagaagtgttacaccctgagtggttagcaaatcctattcttgtactcaaaaagaataaagtggattggcgcatgtgcgtcgactatacggatctcaacaagcactgtccgaaggatcccttcggacttcctagaatagaccaggtggtagactcgactgccggatgttctatgttatctttcttggattgctactccgggtatcatcagatcagcctggcaaaagaagacgaggaaaaaatagcattcatcaccccgttcggagccttctgctatacctccatgtcgtttggcctcaaaaacgctggagcgacttaccagagggctattcatacatgc

SEQ ID NO: 27428 - DNA, 928 bp, Zea Mays
gggggccgcccaggtcctccatattcttttccatggttcaaaaggtagtgcacccctgaaaaaagctctgtatgcagacttggaacccaaaaaccccattaatgttatgtctccaaatatgtttatcatttgtatcttctacatgaaaattttctatgacatcccacagctatagatattgctcaatgcccgcaagagaaagattaccctgtatgtattggacccaagaaagagacgaaagggcctgctccacagtcctttccttttgaactttttagtaactgcagccacaatactcggtgctacatcttcaatagaggtcccatgaattcatttatctgtccaaatataagttgtgactccattaccaatattggtgattaaagctatccgaaataaggctctggcatggggtgagatattaagatcgaggccactccaaggcttagcagggcttgttttctgaaaccacaaccaaatcatttgcagagcccaactcataatgacgagatttggtattcgaaggcctcccaactcaataggcctagtaaccttctcccaagctataagacagtttcctcctcgagtctcttttctgccattccacaagaaatttctcctaattttgtcaagggcttaataacccattttggaacattgagggcaacaagcagatagactggtatggcagagagcacagatttaattaagattattctcctagataagtttaagagattagctttccaacctggaagcctacttgcaattttctaaatctatggaataagatcaccagaattgagtcttttattagttaagggaagacccttgtaagtcatgggaatactttttgaggcacaacctaaaatttgggcagccaactcctccattcatcattacaccgaatagtgtagaaaatgttaga

SEQ ID NO: 27429 - DNA, 732 bp, Zea Mays
gtctattaagttataaatttgttgtagagtgttggtcacgttgctatagaaatctgagaggaatttggccctaaactgtgactgtcagttcatctgaatggagctcgccatggtacagtaacttaagtggatcagactgccagcacagagctctcaccgccgacgactgatctccgctgcgattcgcgtcgctgccgttgtgatttacgccaccggtgaccggataagcctgccagatagtagctcttcgcctaacgataactccggtgactcaccgtcgtgccttcccccttgctcaccgaacccgtggagaaggttctcaccgccgttaagccatcaccggcgtccgccgcgtgtctctacctttccaccgcatcgtcgtagcctactctcactctctgttgatcaccggattaatcgccacggcataggacaccaagccactgcgccagtgctcttcccttcctccgaccgtcgcgcgtccttcttcaaattcgcggccaccgcccactagctctataaattgaagccaccgcaagctccgtaaggtagtcaagtaccccgacacccagtattgcccccagccgatcaccagcgagctcgaattttgcattttccccaaaccggttcgaatacaccgcgaagaacagctcgccgcggctagctcgattcaggtcagtgcaaaccttctgctccctcgtttaagcagtctcatgcgtctgtgatgctcac

SEQ ID NO: 27430 - DNA, 345 bp, Zea Mays
gttcttaactgtcatggcgttgagccggcgataatccacacacaatcgccaatctcctgttttcttacgagccaagatgataggagaggcgaaaggactggaacttggttgtatcataccactttggagtaattccgagatctgtcactctatttcatttttttgagccggattgtaacggtaaggtctcaagctaaaaggtgaagcacccggaagtaagggtatagagtgatagtgagaacgagggggaggcaggcctgatggtttgtcaaaaagggagctatattcgtgaacaaggcgttgtatctcatctaggacagcggttgtgagatctgagttaacctt

SEQ ID NO: 27431 - DNA, 509 bp, Zea Mays
tagaatatatacatctgctaaattttggggccctcaatttttgaggccctgtgcgagcgcacggcttgcacatgccctaggcccggccctgtgttcaactaatagcaactagcaagtaaacactcacaaacaaagtggaatgaaatgtgcaatagtccacaagcacaagcataacacaaaaacaactaaagtgaaatgcaatgtccacaaccacaaaggcacaaacatagcacaaaagcaactaaagtagaatacaatgtccacaattgcaagcacacaagcgttattcaatctccctctatcatatctcaataaccatcatccaaatcatctataccaccatcattcttgactttgtcttgctcatcatcatagccaacactattgtttgttgcttcatcatcataaccaaaatcagaggagaatgtgagcagatcaatcgggaaggggagaaggatgagagcaggggcaggggaagcaaagggaggcagtggcgagcgtgaacggca

SEQ ID NO: 27432 - DNA, 650 bp, Zea Mays
ctgataatggcggaagttcaagtggaggtggagctgctgcacctacacctgttcttgcagcgaggccatataaacacaactcttcagtgccagaactaattgatttggatgagctacctagggatccagcaaaaaggaagagaatgtgtgactaccaccccaatcagcaaaatgaaataagaagaaagtatttactatgggggccttatcaacctcgcacttatgattttcctttcaggattattgcgggtaagaggcgtcgattcaatccagattggtttggccagtatgctaattggctggaatatagtgagaaggaggataaagcatactgcttgtgttgttacttgtttagggataaaaatattgacacccatcatggccatgaggcatttgtggtacaaggctggaattattggaagaacagtgatagattagcacttcatgtaggtgatcgcaccagttttcacaacaaggctctcaaggattgtgaggatcttttgaaagaagatcagtcaatcactgctgctatgaaaaaacaaagtcagcttgagaagaatgagcactctattcggttaaatgctgccattgatgtttgtagatttttgttacaccaggggcaagcttttcgaggccatgatgaatccaag

SEQ ID NO: 27433 - DNA, 398 bp, Zea Mays
tggagaattttgaaaggtgagcttcattccaatatcttctttctgagttcagggttcttgggaacaaccagtcggtctccaaaccatagaattcctttgctgtcctgacggaagcatttgtatttttctgctttctgttcgatcatttccttgataacctgaacacccttgtcacccatctgtgccatggctatttgttcttgtaaggtgggctccactgaaatataatttagagcaccagaggaaacaacctctaggtttagcttgcacaactcatcacatagggtggtaactcttgcatccatgttcatacaattgcacgggctttcctgcttaaggcatctgccacaacactggctttgctaggatggtaatgcacctccagatcatagtccttg

SEQ ID NO: 27434 - DNA, 371 bp, Zea Mays
attaactttaccatcatgatgaagttgtagatccacatcaagggcaaacacacctagtgttgctggtggataccgctccacccatatgttcatgagagacagtggtggtatgcatcgacgttttagtaacactgcaactagtgccgacggtgaacgtcaccaattgcaagcagattgctagcgagggtgtttctcctaggctggacttcaccatcgaagaggccttcaccaccacatgctatgcactgtccttggatggactcgacgtggttctcggcgtctagtggctacgatccttaggactagtgttctggaacttttataatctaaccatggatttttggcgacatggtcaccaggtttgctgaata

SEQ ID NO: 27435 - DNA, 989 bp, Zea Mays
aatttgtatagctccagtgttgtcgcagtgaagaagcgtaggcgagtcacaagaaacgcctagatcagccaagagccaacgaatcaagataatctcagcagtagtagtagccagacgaagttttgcttcagtactagatctagatacaacaacttgcttcttggatttccaagcaacagggaatgatccaagaagaatacagtaaccagtaatggagcgacgatctgtaggatcactggcccaggtagcatcagagtaagcatgaagctgaagtggggaatttgagtcataaaataaacattgtgtttttgtcccccgtaaatatcttagcacacaaagtaagtgtccataatgaactgatgtaggagcagagacaaactgactcaagatgtgaaccgcatgagcaatatttggcctgttgacagtaaggtaaactaagctgccaacaagatgtctatatcgagatggatcctccaaaggtgtcccatcagtcggacgaagagataagtgaagatccataggcgtggcaacagtgcgagtatcactaataccagaacagtcaagaaggtcttgtatgtacttggcctgagaaagataaataccattttgagtctgctaaaccttaatgcccaagaaataactaagtgcccccaagtcagacatttgaaattccttactcagatacgccttcacatgagcaatatggtcaggatcatcgcctgtaatcaacatgtcatcaacatataataatagcaacgtgcgtcctcgtgaagaaacatgaatgaacaatgcaggatcatgatcactagaatagaaaccacaagccttgatgacagaaacaaatctctcaaaccaaacacgaggagcttgtttagaaccatacaaggctcgacggagacgacatacatgccctgagggaacctctatcccaggaggtggatgtatatagacttcctcatgtagatcaccatgaagaaaagcatttttga

SEQ ID NO: 27436 - DNA, 329 bp, Zea Mays
caaatattatgcaattctagcattgaaattttgtcccaaaagaatgcagtcctagctaggtaggggctatctttaaagccatgcatgcaacgttttggtagagtacattttctttggaattcgcatgcaacattaattacctagactaacaagccttccaatgtatcatttcactgtcaattaatctgtctgggaatttctaggattgtattactctgggggtggagagagtttttagcaagatccctgtgaagcttgttaggctcgtggtttcataggtttaaattctgtgaatgttaacatgtttactatatgcattatggttatag

SEQ ID NO: 27437 - DNA, 719 bp, Zea Mays
caatgggtgtgctccatctgctgttgatcccaatgggtgtgccccatccgatgctgatcccaatgggtgtgctgcttatgttgttgatgaaaacgacagggaggaagaagatgaggtccctctgacccggaagaacagtcggcagtatattgccagtggggagagtagtggagttccttctcctgctttgtcagccctcgttggcctacaggagttatctctggcaaactttgattagaccctggaggatatggttccagaggaccttttgttagagccagcggatgatggtgtgatggaggtttgtgctgatgtgcttgatgctgggttgaggtcataccgcgcctcatcgaccttagagcgcggtcttgaaggccaggagactgatttggatcgtctcggtcccatggaagcaactgaggggccttcagccttagaggtggccactgcaaagaacttggctctcaaggatggtgttgacgcttacccagccccctagggtgttgccgagggtgactcggcccgggtgggaagtgcaagccactgtccagcccccgagggtactgccggagatgatccggctcgcgtgggtagcgcaaactatgacccagcccccgagagtgtccgagcgaagtccccctcttgtacttccatggacgttcatgcgggatcacccccgcactccgactgcatggtgattgcccaagcttcgaaccagg

SEQ ID NO: 27438 - DNA, 319 bp, Zea Mays
ggaggcctgaagctgtggtgcaagagggttttattcatcaaggtaatttaacccttagaaggcagatggtgcgaagactagcatgtgaggtgacaagggtttatgttgagtgcggtggcctactcctgctggtggaggtcctcgccctgcatttccgcgatttgttgttctagctctctggctttctgctcttcttctaggattatctgcttgactttggattgcatgttgatgcgctagcgcttggccgcgagtatctccttctgtttttgcaggtgattgtttttaatgcgaagtgctcgtaactttagctggtctt

SEQ ID NO: 27439 - DNA, 340 bp, Zea Mays
cccagccactagcgcacgattggatggtgcacctacgtcttcaccacccgactagccaggacggcattgccaccactctcaccggacagagcatcaccggcgaggcccccttatgcgccccgatacctgattcccaataccgatatgtcccaaacgaggcttaagctaccgcaaattgatttaatgtgttacttaccagttatagcagctggagcagagcagcccacgcgacccgacgacttcacagaggattcgtggcttcgacgagcaattgtgccctcctcggccaccggaccctcccgagctctcgacccgcgctaagctattcccccggatctac

SEQ ID NO: 27440 - DNA, 340 bp, Zea Mays
caggagggccaacgcatggctgccgtgatcgggagcagcaacctctcgcgcgggcagggccaagcggaaccgtcggctgcctcagccggcgtcggcggtagaaagggcgtcacctcctgggcggatactagtagtagcagccgcggaaaagggaagacgaccgagctgccgatgcgaagtacagctgggacgagcttgggaccagtagggaagagcgctgtaaaaggtaacaattatgtatgctgttttttcttttccaagctagtttagtttagctatcaagtatgggcctggaagctggctattgattttgtcaaagctaggagttaattttttgctg

SEQ ID NO: 27441 - DNA, 340 bp, Zea Mays
cttgtctgggtcgtctctcgtgtccaattttgcgtcctggaggaacctagccagctggaaactacttcagactgaatgccactatatgcagccgccggttacggtattttcttgtgtttataatgctaagcaaatgcatgaagtgagctagtactttcatgctgccatctccaactaaagatgtaggccagcactgcataagttgatagctaccattgtagaggaaatggctaattacgcgtttccataacttgcaaagatgtgctatcaagagttgtagatcccaatcgtatcatgcaaggcaagctaactacacggtacaccttaggcttagagcacc

SEQ ID NO: 27442 - DNA, 848 bp, Zea Mays
gttgtagggctgctatagtagtgcaagtttgtgtaagggacctagccctaaaaccatgtggaacctagtgtaaaatgtccccaaagtgtggctgtcagactgagaatagttctgaaactgaagttcagtgacattttctcaactttggaatccaattgtggctgatccagtgggggtaaggtttgggtcactatgacaaagtggaagcctgtatatcaaagaacaactttgcaaaagggaggtaggtatgttactgcttggaacaggaagtaatagtgacctaaacttgctctgtcagacggtttttgggtgggattcagaatgaacagtaaactgcataagatctcggttcacggaaccttgacgtcggtgatctctacgccggtgatctcctcatcgtgattcacaccggagttaagatacgcgcctggataagagtggatagctgtccacggtgaaaatatcaggggagggggatggatgtggtctctggcgcgagctcatccatttcagccagttgctctcgtggtcggccgggacgccatcactgaagtttgatgttcctcgcggccacgccacgtaacagagggtgttaccacgtagctgggagtcttggcgtgaagccagttactacctgaagccattgctccactacgcgccacggtgaacacgctccagtgaagatcttttctgtcaccaccgtgagcacttccgtcccaaattcgcgaagcaagaaatccatccctttaaattgaggacactccctgctttgcctctctgttacgcgcacaaccacccctcactgccctagttcattcaccacagcccccagtcaccggtttttcccg

SEQ ID NO: 27443 - DNA, 280 bp, Zea Mays
aaggtacaatcctccccctaatgccgggaaatgctcttcatcgaagatgtatcagcgtaccgaaccgtgaatagatcccaagttctaggctctaaatatttgattatggacagagattcataaccaacatagatccccaacttccggtgaggtcccatagatgtacgctggggtggtgatattggcacgtatacagcacaaccgaatttttgcagatgggaaaccactggttgttgaccacgcgttaactggtggggagaagcggagtggtaagcagatg

SEQ ID NO: 27444 - DNA, 592 bp, Zea Mays
agccccctattgctcccagtaccaaccaatcgaacttaagccgaaacctttcaccggaacgtgcggttgctctgtaaaacgccgccgtaacccaccctcaccgtcgacctgctcttcggctcgtattctgcccaaaccaaagagtgtgcataactcctggtgaacccgtgaatccttcctcagcctcaatttggtcgaccccgccgtcgtttggccggaacgcgttcgttcctataaccatccgcctgtcaccatgaaccagttgttttagagctccaattcaaaaattgagtgaggggaaacctcgggttaggtcggaatctggagtcagtcgtcggtgagcaccaatccttgcgtgctccgcccagtccagctcgtcggagaatggctcccgcgcggttcgccgtcggggatcagtcggtgtgaagagatagaagtgggaggacttttatgcaaactgtcagcgactgtgttaaacagtggaagaccggatcccagttagtgaaaaccccgaggacttttgcgcaaaacagccagcgcgcggacgcgggcgcacttttcctctggtgttgggccgcttgggctagaattg

SEQ ID NO: 27445 - DNA, 303 bp, Zea Mays
gactgacgcttttaaatcttgctgtagttgtgccaccagcgacggaggtacgtgacgaccactgtttgcctccacctgcgacagaggtgcgcgactgctactgccggtctccacagtacgagaggccagttgatgcttgggcatgcctcacggtccaacatgcatgcggggcgtctgcttagggggagccattctgaatttttaaagaataaagatacaagaaaagatcaaggattagtagagttagtcagaaaaatttttaaacccacatatattctggtaaccatcttgtgttagggggaa

SEQ ID NO: 27446 - DNA, 363 bp, Zea Mays
attcggatcagcaaatgtccattcgtaactatattttacaatcaatatttactagtgaccatacacgcgcagaaatttatatccatatttttctcatcggattttggaggagttatagatatacgttgatatgactgacgcaatcatctttcaacaattcaatagtataattaattatttttttctcaattcactatcgtacacaattaaaatgcaataaaaattaatatggacttatgggtcggctggagtttagaaggggcaactgctggctgtgttgtggcctatggaaattggaaggaggcacgacacatgaagctagtaagaccaacttcagcaacgtcgccctccgtatctgtatcc

SEQ ID NO: 27447 - DNA, 810 bp, Zea Mays
cttgtctagtctttacacaaggtaaagccactttaaaagttttctgacacctgaatccctgttgttgggtcttcttttgaggagggcaaaatcttgctcctggtagcattgccttgaaattttctttagccatcactatggttctaggctacgacattccagactccaaggttctcttatgccgctttgatacagtgtagggtttgttgttgttctcctgagtcaaacaatcactgacgaaatcattgaaagatgtacaagacgagatttccatactcttcatcatctttgggcttatgcccctcttgaaactagcaaatattttggcctccgtgtacacatagtcaagcgcgtagcgagacaagctgttgaaagcatgtagatactctatcactaactgggtgtcctaagttaatctcatgaattccgacaccttcattgccattagaccaggcggaatataactccctcagaagctgtagtgaactattgccaagcgatgggtgcattttcagggtaggcggtgtggtaatgagaccattacattcctgcgggtccctataactgatgtgttgcatactcgatcttaagatctcccataagtctcaacaaatgaaacttctgctccatagtcttaatccactcatcttcctctaagggttctgctaccccttgaatataggcggtctagtgcccatgaaatccttgaaaatgctatactgaatgactccatatgcgtcctgaggctgcccatggctagtgttgtcaacaatgttgtgaagctttacttccatgttttgctgcaagttc

SEQ ID NO: 27448 - DNA, 324 bp, Zea Mays
ctcgttttcttttgttactgccaggggcttattctaagtaaggctttgaaagcacagaaggatgccgaagttgaaagcacttgaatagccttcgtaaacttacgttccaaagttataacccttcggcatgaagctattggaaaagataaaattatgcttttcttggtcagcaaactgaaagagagctaggctgaattaactaagttttccaaagaaggttcattacttacaaatctagaataagaaaagaaagctgatgttggaactcgctaactcgcgattagccaagctcaaacagtggaagaatgggaaacaatttgatgc

SEQ ID NO: 27449 - DNA, 327 bp, Zea Mays
gagagagggcgtgggagaggagggagatggcagctgctgtcttgggtaggtgaggcagaggagaagggagacgctgcggttacacggcgaaaacaaagagaaagaaaaacgaacaacaatggaggttgcccaccggagaagaaaaccctcaccggagccgaggaaaaaaccgttgattgactgatattcgttggtccaatcgacgaaccagacacgctgcaatgaagccgtcgacgagacaaacgctgcggtagtctcggatctcgcatatgatgcacggattgggagtaattgctcgccagagttgtcgctggatttggaaccgct

SEQ ID NO: 27450 - DNA, 479 bp, Zea Mays
tgcaaaatgaagaacaattgggttgatttccggactttgtgtgggatatgaggaagttgatgctactgtttgccacagctaatagtgtgggcttcgtgtagccaagacaaggaaggttctacaccagtgttctgctgctagcctcagaatcctacgtatcgttaaatctgctgtaccagtaactgatgagagttaggcccataatcaatccattccctctgttgagcatgagatacaatacaagctagagagcctgagatagctagcagccacaaaactttctgaccgacaagtttcacggcattaatttggatagatccggtttcttatgttctcctcttccacatagttttttacaaggtaccttcatccgatgctctttctatacttcattctaatggtaaaggattatatgccaagttttttttagagggttcctcaatccaatgctctttcagtggatactagtagatctcgtt

SEQ ID NO: 27451 - DNA, 314 bp, Zea Mays
ttgaaatgccttaagaaattacctggagcttctgtgcaagaaataccttctagcacaaagagaattattcagaatatacctaggtatcacgtccaaaagtgggcttctgatgaagaagtacatgagcttctcaagaaactgccacagcaaataaaagatgcgcttttacccttccaacttgaaggagtgatgtttgggcttcgaaggcgtggacgttgcctaattgcagatgagatggggctcggcaagactctccaggtgggcatatagcatggattcttgcatagtgcaatccttgctgttttgtatacgag

SEQ ID NO: 27452 - DNA, 657 bp, Zea Mays
gtactcttcacaactgaaatgtgcaagatgtttatcatatgttttattcagggtcaatcaattattttatgagacatgtgaccaataggatttaaaaaaaacttatgcagctctacttttgttattttctggcatgtaaatatctatatctcctaatgctaataatatacggatgctgatgttctgtacaaggattttaccaacgtttaagcacaaaaggaaggagagaaagacatacataggatggatagggtctatgagagaaagataaggaacttcaattaagttaagtgcattaaggatgaaacatagcaactcttgatgaaggagaatgtgattcgacgtagatggcgggagtattttgaaaaaaatgttcagtgggaagaatgaggacacaacctttcagttggatgactcttttgatggcaccagtaggcgctttgtgtataggatccaagaatctaaggttagatggacattgaaaaggataaaagggggtaagacgatgggccgtgatggtatcccaattgaggcatggagatgccttagggacatagctatggcatggctaactaagttgttcaactatatcttcctgttgaacaagatgtctgaagagtggaaaagtatattggtactgatatacaagaatcagag

SEQ ID NO: 27453 - DNA, 574 bp, Zea Mays
ctgtttgctgcgtttggcaagctgtagcactgggcttttgacgtccctgtctgaacaccttcaaattcgagcagataggataggagtacagtaaaaaaaagaaaaggctgtgtattttcaccgttctcttttttttcgcactaaaggctacgtaaaggagaaaaggacgatcatggagaatcctctcttggcttggcgagcagagcaggcacctggcccgtcgtccattgacatggcgaggagatcgatgtggactgcagagaaagattgtgttgtgtgccgctgccctgcctttttcttttctagtgctgcgtgtttcaggacagcagagactgactgctgagtaagctatatgtgtttgtgtgccccggagccgagccggacccctcaacgtagcaggtagcacgcagaggcttttgctttgcccttttgcctgactcggcgatttgactgctcctgtcacactcaacacgtacacggtcgtcgcggtctggggtgctgcctttttgaaactcactcgtcttctctcgcgcgtggagccgcaggtggaggaagggtgcgccctggcgacggc

SEQ ID NO: 27454 - DNA, 407 bp, Zea Mays
cagggggcatgcactgctgctacgtggtgccatgcacatcagcgagcatcgcatctgcacatacacaaaaacgagctcgcgtcccgtccgtccgtccgtcgctgacgaacgacatggccgtgtgttaggtctcacgtccattcgtgaaagctccaacgacgacatgatggccagtacacgcacactgtgcctgctttttctgtcatgctgtgtatagtattagtagtagaagcagaaggccgctgtcagcatgcgacgagcagccctcatcagctatagctgctactgtaattaagtgatgctaccacacgcacatatatacatacatatcctgagttttccgaggtctatagcgtgatcaaaatttgtggtccctcgcattagtcattttaattacacacttgttt

SEQ ID NO: 27455 - DNA, 561 bp, Zea Mays
ggtgaccatggtaccgtacaaaaaaatcttcagatacatcacccttcgccactggtgacccccgttccatgattggtgccgatcgccacgattcgtgcttcgggtttgtggattgagctcgacggtgaaaagatcgcatcatggatgagtttggactactgtggcctcgctgttccccgaccacttgcgccggcgatgtggccttacggccatcaccagagtccacgtcgttcaccgcaattgcaccacatctcaggcctttaaccacgtcgcaatagctcgggtaatcgatatcgagtgatcgccggagagctgccacggtagatgccaccaatcgtttgcaccagtgaccccctctttctccggctgccaccgtgcgagaccaaattcattggccaccgcttaaaggccctataaattgatggcccggtctgttgcaccatgttatcacaaagctagagcacccatccccaccttcaattagccaccatagacagagaatttcattcttcccccaaataatctatctgcgccaccgtgagatgtcgcgttgtgaccagc

SEQ ID NO: 27456 - DNA, 919 bp, Zea Mays
tatatttactgatgtgacgagtagttcagaaaatgttagtggcgtagaggatgaattattaaaacatgagtatcggagttcatatattagtggtcacgccacattgattgaagtgtctcgagtgcacgccaccatatggttgtatgcgagacaaggttatgcgcatgatgagtttagtaaaaatccatcggggtcactagtgttaagttgaggatgatttgcgcgtggaaagtaacggtgtgtttaatacttagaactcttagtcgatagtagaaattgatttagcttatgtagagaggtgatgacatgccgtaagtagtcatcacttcctctataattataagtcgagtctttacgcgttaggcgttccttaaattgtgcttcgcaaataagtgtatgattgtgtttatgacttgaatagatgtcttcgagtgaactaataggttcctaaggcaattatgtgtaaggtgtttatagtgacgctttattccgaaaggtgttaagtctgcgcatcaataagagataagtgtattttgtgtagtgtggattgattttgagtgcatggtcgcaagaaacgaattagtgcgcatatagacgatgaatgagtgtgatgaaatagtgacatgccttcgtagtcatcatgtcgtctgttggtgaactaactgaaggtcgtagagaagggtcgattacctgtgtgttattattgtcaccttgcggttctgtatgaattgcaatgtgaagtagtaggctctctatgtgatgctagatgtctaggtagacttcatgaattgtggtgctcagaccgtcgagatgaaggttaagtcggtctatgccgattaggtagttaaaatggttaatggaataatcatggggttaaaactagaaactagtgttctcgcacccgtttgggatgttgtag

SEQ ID NO: 27457 - DNA, 353 bp, Zea Mays
caaagttagagctggtttatcaggcttcgtctttgatgtagagtaatggttgagtaatcacataaaatatagagcaaagttgatcccaagcatgctctgtcaggccaactgatgaagcttcgcgagggtacagtaaccggattggatcactagctcagagacctcgccgccggcgaccacgcgcacggattcgtgctatcaccatgattcacgctgaattaaacacggataacgatcacggggtgaaagatcttgccgcggataggctggaatgtactatgtgcttgatggttcatcagtacacacaggcgacgtggtcgtgcggcaatcaccggcgtgttcgccgttcaccg

SEQ ID NO: 27458 - DNA, 492 bp, Zea Mays
ctggcttcttcttcgttgcctgccatcgaaacacaaaaacaggaaacaaacagtgacggttatccctaataatttaactacacgctcctctcaggtggaacacatgaacacgctctaatgtatcttaccaagctcttacaagtgtctgatgaaatacaagcaaaggatggtacaatcggaggctggttcgtgatacttaccaagaggtagtgaaaccgcgattgcaaggtcaaatctgtattgatcagaagatataatatgtggagctataggacaggcacaatatgtatgtgaatgtggaacaaaatcgagtgcagatgagcgaagttcaataaatatccaaagcacaagtcacaattgctagctaagagatgtatccaaggcgtatcacaacaagttggaacaaagaacaatggaaatagcagaatgggagtaccataaatattgtactcacgaggccaaaaaaaggcactagtaggattcactggtgat

SEQ ID NO: 27459 - DNA, 437 bp, Zea Mays
cctcaatcgatagggacggccgggtcacaatcgccactaccgtacccactagtacatattagagcaaccgttggcctcctccaccgtttcgctgctcgtcaccatcatgctgctgctgttgctgccgccgtcacttgcttgctcctcactgagttgcaggcttgacttcaccagcgtggcactgctctcttgctaggggacgaccccacaaaaccctactgcctcatgctgcgatgccctcttctattgcatcgacatctggccaattcatgaactggaaaaaggtgtttgctgcctatgtgtgtacatggtttcaaggaacactacctttgacctacctatgtcttacgtctcatgcgggggtaaagactcaagtaatatgctgcagtggaatgccatcatccctcgccctagagactgcaatggtaagtcacgga

SEQ ID NO: 27460 - DNA, 465 bp, Zea Mays
agccaacggacgcacctcggtctcgtctcgctaccgaaagcggactggtggaatggatggagcggaaatgggagtagaaggaggagtagtggaagcgggagtggtggaggtggtaggtatggctgaagtggtggatggctcgggagcgactggagctggcgaagtgggaggtggagtggtagctgtggcgggtgtagagggagcggaggagcaaggccgagacgcgagtcgacgaactctctatgcaatctgatctgacaatatctgcaactgtccacatcgctctgcctgctctgctgctgctgccgctaccgctgcaagagctactcgggctgctctatccagacgtcgcttcttgtggccttcctgctgctctaagtagacggtcttccccttgacctgcctgaaggggcgaggagggtcctcgtcgtctcctccccctggcgctgacacattctttgtgcg

SEQ ID NO: 27461 - DNA, 290 bp, Zea Mays
gtatccatttgcaaccagtcttgctttgtatctgtctatctttccctcaagggtctgttttacagtgaaaattcacttacagcccacagccttcttcccttctgggagcagagcaagttcccatgttttgttcctcatgagatcatgtaattcttctttcatagcctccttccaccttggattctgttttgcacatctccagtctttcggaacacacagtctgtagggatgcgatgaaggttctatatgcagacgacacatgacagtatgacatgtggttagctatattg

SEQ ID NO: 27462 - DNA, 328 bp, Zea Mays
ggccttggtattccatgcaaacgcactatttggtcaatatagatttctgcataatttttctaccctgtgggtggtatgtactggcaagaaatgagttgtcttggttagcctatccacaatgacccaaatagaatcatggtgccgggaggtgttgggcaaacccacaatgaaatccatgctgaggtcctcccatttccaagatggtatggggagaggttgtaaggtactaccttcaatgactagccttgattctttggcaagtgtcgcacttagatacatacttagcaatttcccttttcatcctggtccaccaatataaggatctgag

SEQ ID NO: 27463 - DNA, 306 bp, Zea Mays
atttagggggggctgattcagtttaattgcttctttgcctttgcccataagacattttcgcctttctgaagaaatgattcacagtagatacatacaactaagatcttcaatcttgggtcaatggtgtttctttaccctaatgaacatgttgaatgtcttattgctgtgtcctgggcttgcaagataccaagctgtttatggcctgtgttccctttctcattgattgactggaaagttcaatctatttagtttgtcaagtctaataacaagaaattcttatgttatccctctgttcatggatcgttg

SEQ ID NO: 27464 - DNA, 570 bp, Zea Mays
gagatgaggacaacggaggttgttggcgacttggcgtcgttccgatgtttgcggtcggggcagcccgtgcgcggagtggtaaaaagctcgattgatctacatgatacactgcgcatttggaataaagttgtcccgtccgtggattgaaagggtgcgaaataaaccaaaccatataaaaaactgaattcgaacaacagctacatatccgaatctatctagatcactacctcacaagagtttactgtgcgtcctaaagataaacccctcctaacttcagaaattaaaggttttttttacatgcagacgcttccctcctcgaaatcagaaagaaacgaaactgaataccaaaatatgtccccgcccatttaccatctagtataagcgcgatcattttcgataatcaaaatcatgcgaaaaaaatgagagagagaaagcagtgtttaggggaccaaggatcgcagacggagcgggcagacgccactgtccactgacgggagcccaccggaaggaatcaccaccctccatccggcaagaatcggctgggcagacgccactctcccagttttgcca

SEQ ID NO: 27465 - DNA, 584 bp, Zea Mays
aggatatgagcggacctgaggcgcgctggccacagcgaggtcaacccgagcggaattcttgagtgatttgggggaagtaaggaattggagctctttggtggacgattggaggcaagacttggtggcttggtgcgtgattaccctacggacccgatggtgcgctcaatttatagagtccgcgagccgtggccagtgaattagacgacgacgcgcagcggccgaaaagataagaagttactggcgcacgcgattagtgtcctattaccgtggcaagctccccggcgatgaatggagggttacagtgagtcacggcgacgcggtggatgtgccaaggcatgtggcgcaaggccataaggcggctatcaccggcgaactcatccgaatccaccgtggcttactcgatacggtggtcggagtaatttagtggccagaatatatccacgacgatgatatttactcaaccccaagcgctatctaattgatccaagcacgaatcaaggcggcgaaggcacgaatccgcgcgtgactcgtcggtggcgagggactgagctggtggcctgatccagtcactgtaccatcgcgaa

SEQ ID NO: 27466 - DNA, 569 bp, Zea Mays
taaagctgcaattgccttttatgaaggggctaatcttgaaccagagaaccaaaaatatctcagcacctagtactatttcttgtccaaagaacatggcttccattagagtggatagggtcatgctttgatgctctactcattaatcctttcttttttccactattaaacaatagggatgctgttgaggagggaatgaagtcgcaagccaaacctaaccagtcttccaccgcagccaggagtcttttcggcccaaatttgatgtgatgatgacgtgacaaatgattgagtgttttgcaccagaatccaaaacagttgcaacacaatttgtattttagggaaagtgttaaactgtaatttgacaaattgtgatgttttgccacgtttgatgatgtaggtctggggcttcacgaccagtaggttaagcgcataggacagatgcactgtttggtgctggtttagcatatctactaatagcgaaatatctctgcaccatgagctctcgaacctggccactacacgtcgttccaaaatcaggacctttggatggatcttaagcttgatctcaaccg

SEQ ID NO: 27467 - DNA, 518 bp, Zea Mays
gtggaccgacgtgtgtcgagacaaccagtccaatcggcgttggtgtagatggtgaggtaagtggtcgcagatcgacgaagaagaaggctgaagtcagtggtgcctcggaggtaccacaggatccacgtcatagcgatgagatgaggctcccacggggcgtgcatatggaggcacatctgctggacagcataggcgatgttaggatgggtgaagacgaggtactgcagggccccagcaagacaacaatagctagttggattagccaccggagggccgtcgttggaggagaccttgccctgagtgtccaccggagtcgagcagggcttacaaccagccatgccagcatgctcaaggacatcgatggtgtactggggcttgcgctcgacggtgatccccaaaaagtggtatagctcacctagatccttcgtcgcgaacttgtcacacccggatttttaggtacagcttccgaaggtcccgcctcagcatgagcaaagctactggcagtaatcatctccgag

SEQ ID NO: 27468 - DNA, 299 bp, Zea Mays
ctcgacaagagactgactttccttggtggtctgtgaggaggactgtcttgtttgtgcaacttatgatacctttgtgcttggttaaccaatccattcctaagatcacatcaatcccttgggatggcaagacggttaagtctgccaagaacactaccccacttaaaagaattctgacttgggagcatttgagctggcatagaaggtctgaccctggggttcgggtgaccaagggaaatttcagaggggtagaggggatgccatgcttttccacaaaactagtggctataaaagaatgggat

SEQ ID NO: 27469 - DNA, 331 bp, Zea Mays
gtgatgtcactaagtgcaaagaatacatcgtgttggcaactcctacagctaaggatcagatggaacagttcaagaaggcgcatgcacagtttctgcaagcaatatctcaagtggtagctagactccaacaagttgatttagcagaaattataacacatgagcagactaccgataaccatatgacatcaaccacaacatcaccctcgatagttgacttagaaaagctgttacatgcataagctcttgtaatacagaatgtatcacaactcacctcctcataccagcaagtgttggcaagtcgaaacgtcactagaaatgaaacaactgatga

SEQ ID NO: 27470 - DNA, 656 bp, Zea Mays
tttagctggccacaaacctacaccaaaggaactggataatctacgtatgaaagggatgaatggaggtccatgtttcgttgaatggttccacgagcatgtaattatctctttataatttttctttgtgtacttagtttgctcatatgacttgctatttaccaatatctttttttctgctctatgtagtgtaagaaacttgactctctagtctcggatgatttgcgacagatatcacatgatcagttgaaagcaagaaaatatagccgctatgatattaatggataccgttttcgaacatcaaaattagaaaaaaatccgcccgcaggcagccacgacaaacagtggagtagtagcaactgccacaaatgcagacggaggcactcatgactattatggtgttcttcaagatataacggagtacactcttggtggggccaaagagttcatgtttgtgttatttgattgtgaatggtttgatcctcaacaaacgcgagaggatgaatttggaattgtggaggtaaagcatgaatcacggtttaaaggcagcgattatagcaatgttgtgcttgcacatcaagcacaacaggtgtactatctaacatatcctcatgaaaacttgaagtcttgttgggttgtatacaaaattaatcccgaag

SEQ ID NO: 27471 - DNA, 449 bp, Zea Mays
aagatcaccttgttgtagctctggcatagttgtcggagggctttccgggcaacattttggcaagtatctgggaagcggtatccggtgaaagtgacttggaaagaaggatggttcggatagtttcagctttatcccaggtagactgccatagagcacttttccatcccattctcgagatactcgttccagacatattctggcttttttgcggattcccatgcgaagcgcacaacttcgcaacagatgtgggaacccttccacctctgagcagtaggatgtcctaatgaccagagagtcttccatatggaataggaaaagaagggtatgttaatatcgggggagaggagagaagacttttcttggggtaagaggtattttcttttaaggcaagttttaaggtcagggctgcgacctacggccagtcctatggctctgataccacctgaagc

SEQ ID NO: 27472 - DNA, 371 bp, Zea Mays
taacccagaaaggcatctcaatccctgattcttctgatcaggttgggcttgtcgtgatcgctgaggttagggagggtaaagtaatctctgaagagatcgtagacagtatcagaacacgtgtagcggaggagcatggtgtaactattgcatctgtcaagcttatcaagcctagaaccatatccaagacaacatctgggaaaatacggagatttgaatgcatgaagcaatttgtcgataatactcttagcttggcaagtggtagtcgtatatctaataagaagtctctttttcggtctctcactacaggaactggcatggacatcaggagacctttcttgaagcacactgttgatcctaccattcgccctcag

SEQ ID NO: 27473 - DNA, 389 bp, Zea Mays
aaggaatgacaacctgtttttcacaagactgaggtgagctagacagctggggtggagaagaacgaggataataaacagattgataaacaaccctccggcactgtttgattttaccagagaattcttctgcaattttctttcttttagactcctgatgaagtcaaatcttgttatcacccaaaacaacttgactgaccacctcattatatctttcagccaaactggttgccatcaagccctgaagcttcttgttgaggccatgtaggaagtagaactttttcttctcattggtatttacaaaatccaagacatactgggataggcgaggaaacctttcaaaatattccattacactctcttcttcgccttgcttcaaatctaagaactca

SEQ ID NO: 27474 - DNA, 623 bp, Zea Mays
gtgggcatgctttagctagaaactttctaagaccaggacgttcagacaagacaaaaggttgttcatcctcaattatcatttcagcaaaactattctttaagtcatccatatcaaatttccatgttgaaacagtaccaacactactattgccaggacgaggttgtagttgtaaagtaccttgattatcaattactagtttgtttggattcttcttgcaaacttttagatgacctttcagagaagatgtaccatttgtccttgtgtcatagcgaaagagcttgccacaatacctacacttggctctgtcttcccctccttcagttctaactttgctgaaatgttcccatacatctgaccttggagcaatagctttccttttcttgccatcctcctctgttggtgcatcattgggttgctcttccttgcctttgtctgcatctgtcgctatcggttcttttgcgttcacttcattaacagcaacatcatcagtgcccccatctacaagataaagtttgaaaataaaaaatcagaaatctattaatagctcaaagaccacagttgacatttgacaacactacacagatctaaaatgaagcattcagtatccagtatcttcactaaga

SEQ ID NO: 27475 - DNA, 784 bp, Zea Mays
cagcaatcccctcgatgcagatgactggcttcgcacgatcaagaggaagctggaagccatcggatgccccaaaaattagcgtgtccaactggctgctcattagctttcaggaatgactttagcatggtgggacacctttagtgaggccgtcagagatgctacctgggcagaattcgaaacacccttccgtgagcaccatgtaccccaggggatagttcaactcaaggaggatgaattctaggagctaactcaaggcgggagaacagtcagtgagtatgtgcacaagttcaccgaggtggcccgttacgcgcctgacgatgtcagcaccgagtctaggaagatggcccatttcctgaaaggactaagacccaagcttaagaccatcctcgccagccaagacttcctcaacttttctcacctctccaacaaagctatccaagtggaaagggcaaaagaggaagaaaaagggcacctcaagaggaaattccaagttctccgagctcaacagcaagaacgtcaccagagagctcgaccctttgggcttccacctaggggaccaagcttcaataaaccatctggacccactccatcgcgctacagtcagcagagtcagagctcccttcaggcaccctccgttgcaagtaaccaaccgccagcaaatgcctgttggcactgcggagaccccagtcacttcaagaataactgcccccagttgaaggcacccggacctacctactccaactcggtgaatggccccaagattccctcggcacctacctccaag

SEQ ID NO: 27476 - DNA, 377 bp, Zea Mays
aatcaccccacatccataacttcaactaaatacactaaacaaattgcacccaaacttgacacaatcaaaaccaacggtttagatcgttggatacccccacctccttactcactcaaatctaacggacaatattatttagatcatctctcatccttcatccctctccccttcctgtgcgatcccactacccccatactcctcgtccctcgtgtccccaccgttgttgccgccaacccctcccctcgcgtcgtcgctatcgtcggcccctccattcacctatgtgggatcgtagatgctagtcttaaacataaacactcatatttcacttgaactttgcaatcacgctggtgtcgtttctggtaatgacgatgttgtct

SEQ ID NO: 27477 - DNA, 973 bp, Zea Mays
caagccagtcctcctcagctaacaacagtcgaccagttttgtcagttacttgctcaagcttgtcttcaaaccgatcctcagctgcacgcaagcgtccaaccaagtcttcaactgtgagtgtcttcaggtcacagaacatttcaattgagactgcaacctgattaaaacgaggtggtacaactcgcagaaacttctttactacccgagtgtcatcaacagattccccaagtgacttgatgttggcaacaagatttgttattctcatcccaaaatcctcaacactctctccatctttgaactcaatattttcaaattcttttaaaagtttctgcacgtttacctctttaactcgatcggctccaatcctcatgttcatcacagcctcccatgcctccttcactgtccttttggcgccaagggttccccacatctcctttggcacagatctcatcagagcacccattgcctatcgatcttgcgagcgcttgacagtggttcccggatcaatgacatcccagatttccattgcctcatagttaatctgcattaacatggcccactctgcataattcgatcaagtcaacataggccataccagggaactctccttgatgtcggacgacgccgcacttgaactggtcctggtgtcacccatctcctgatccttcacaggcgatctccaaggaacgacgaacttcttccttggggttctcgcggtggacagacagatccaccgtagaacataaaccgcgctctgataccagatgttggatccccggccggatcaacgagcgacgagtacagccgcgacggcgaacgcagacaggtgtggtgactgcagcgagagcgaggaaggctgagcgcgcggacacacacaggttagaacagatgatttttgcctgcgcaatgtgccgcagcttttttgggttttttcactgaataaatgaacggtgcttacacaggcttgaaagcc

SEQ ID NO: 27478 - DNA, 701 bp, Zea Mays
caacggttcattttcgaaaagctgactgaatctgcgctggcttgctcgccgggcatatttttcgtatgtggccatggtgggacgggtaaaactttcttgtggaacgctatactcacacatttgaggtcccgacaaaaaattgttcttgctgtggcctcctctggcgtggctttgttgctattaccaaaaggccgtactgctcattcacgtttcaaaataccatttgatctagatgagagaggtgtatgtggtgtcaagagaggtaccatgctgtctgaacttatacaacggacttctcttgtcatatgggatgaggcgccgatgacccataggcattgctttgaggccctagacaggactatgcgtgatattctttcggaacatagagcggaaaatgcgaacatcccatttggtggcaaacctattgtgcttggaggagactttcgccagattctacctgtggtgcgcagaggctcacgatctgccatagtgaacgcatcgattaccagctcaccgttgtggcagcatgcaactgttttgaaactacgaacaaatatgaggctctccaacccgtctttacatgggaaggaacgcgcggacttggaacaatttagcaaatgggtgttagatatcggcgatggtgctttgccagccatgacaagaggagacgagtccgaacctacatgggttacgattcctga

SEQ ID NO: 27479 - DNA, 702 bp, Zea Mays
gcctgattaatctgtgaagattttcggtatgatctttataccaaaatgaaagaccattagtccaggtacaactttgatgcagactcgattgcatgtagtcgcataaaatttggagcaatagtcgtttgaattcggcctggcaggcgtactgttcaccagaattcagaaaaatctcgccggggataagatcaccaccgcggctgaggattggactgcggtcgtggtaaaaatcttgcgcgacgtggcacataaacactgaggtggtgcttcccagttaatcgacgatcaccggacgctcgccgtgactctgccagcgcgggtgagctcgctagcgcacatgcagatccttgaatctcatccaccaccggccatcttcctataaattgagcccgaccgctgcttcttcaccacatcacacagacacgagtgcttgcgcaatcgacccaattccaccgaagaactcagataggccataaatctcctcctcactgttcttagcgccgccgtgaaggacctcttcgtgggcagcccttctcgggtcagtactcgcccaattgtctcttgttctagcatttctttagcttcctattgctctcgatgccgtccaattgaattttaccagagccccaccaccagaacacccgttgttccatagaacgccgccgtatacaccctctatgtcgacccgcttccctaccctcg

SEQ ID NO: 27480 - DNA, 380 bp, Zea Mays
cgcgcgtcccgcaacgtgagagggtccggcttccgcatcagcagggtgtgcaggtgcactagggtgtaattgcgagtacagtacatggacttcctcatgcaacgtattgcaatagacctgcaggtcgtcgacagttgagctaagttccttaattcaggtctgagcccttgcttccttagcacatgccagcagacgggactgtactgcccagtcgagtgctaagtcccgatcagcaagttgatcctataggtgacggatgtcccttcttagttcatttattctatctctgtccgcgacccaagcatcggtcctgtgttgcagcgccgcttgaagtcgactcactcgggcttcaagatctcctattgggtcattactcccac

SEQ ID NO: 27481 - DNA, 764 bp, Zea Mays
ctcagcgcaagtgccaccaagaaacagaacccaactacgtggaccgcgggttgtttttaggtaaaccgaggggttcttgtgcaaaattaactggcgaaaggggtacggggtgatataggccacaggatcatggatgaacgatcctgattagatcggcatcaactgcgaaccggtatcgtatcctggccgacggttcgcaatccaacgatccacattttaaataccagaggtcccccgcgatccatccgatcgccaacgaacggacgcggacgaaactctaccagatctaatccccaccgcagcaaaaggatccgacggctagcacaaggctcccttccccggttcatccccaatctcgacggcaagcccaccgcggcggagcgccatgactaggaccgagcgaggagcttctcccagtggtcaccatcgaattgaaacaaagctacacgttgctgagactacgacgagcaggtatagggcacacttacccgcagctaggaagtcgagataccccgaccacgggcggggcggatctatggcggcacacgaacgacggtgagaaattcctcgacaaccagccggtctttgctcccagcgccgcatcgagcacgcccctgagcacatggcgaagcccatagatctatcttcatgctccgaacggccataggtccttgaatcgatggcgacggcgcgttcgacatcccgttttatccctcttctcgctcttggtgctcggttacggcagcgcgatgccagagcacaag

SEQ ID NO: 27482 - DNA, 372 bp, Zea Mays
ctcggttctagtcacacagctacacgccggtgcgccatggtcccaatcatactcctctcgtcgccttatctcatcctcgtgcaagcgatcgcgcgaagcattgatgttgcttcgcgtgtctcaccggctgttgatggcatggcgcaggtcgttcagcgggtgagcgagggacagaaggtgatttgccacctaggtgagcgtttgcctatagccctccgtgtatggggtgcgcggtagaccattagcgatctgtgccaggacccctccgacctcgctcgttgtattcagtgcccgagcgaagtcatggaataggttctgggtgagaagcgggttttcgtgagccgggcgtcttgctcggctggttcccgctcg

SEQ ID NO: 27483 - DNA, 535 bp, Zea Mays
ccgtgacgccggctggctatgctgcagcgtgcggctagcaacgcctactcctggtggtgggcatcacacatccgcaccacccagtccaagtggcttgaaataactgtcgttggtaagcatcccatttattcacccctgtcgtatgacgagttcgtattgcacattgcccaatgattggttgattttttttttcctttcttttgttgtgcagagatggaggacagagtaaaggccatgctcaacctcattggggccgatggcgattcgttcagcaagaaggcagagctctatttcaaaagccggccagagctcatcaatcacgtggaggagatgttcagatcctatcaggcccttgccgacagatatgaccggatatccagtgagctgcacaaggccaaccacaccattgccaccgtgtttccggatcaggtgcagttctcaatggaagagggggatagtgaggggttttctaaggcaataggtgggattgatctcagcaacttcaagttccctgcactggaaggcttgtccgtgg

SEQ ID NO: 27484 - DNA, 396 bp, Zea Mays
tggtatttaggttgtctcaaaggcacctcaaaaacaaccccaaaccgtatctttgggtaggactatagcaactagagctctcaaatgcatgcccctagctatccgcttacggaatatgaggggaaggaacaatttcccgcattcgtgccatgtgtacgacatcctgggaaacactattcgtgcgcacaacgtggaatcagctatcacgacgtacagaggaagaacaagattgtcattttttaagttagttggtatagggggagaaagataagaggaaccgttggagataaactatatatagagatggaatcttttagggggaggtgttaaaatataatagaaagtatatatagggggagatggatagagggaattgttggagatagccttatgaac

SEQ ID NO: 27485 - DNA, 496 bp, Zea Mays
atcggggccatgagtataagaacgggccccgtaccccctccttcgaccactagccttggatcggatgggcgtcgagatgtacagagatagcacgccatcgagtagaaccatcgctgtagggcgtagattgtgggagaggaggccgccactgcaatacttctcctctgcccttgaaccggagtcagatggcgttcaagagtgttcgacaggacttggattcgttggcctcgaagtttccccaaatatggaccaccgggcaactcggaatttctcgccggtggatttcttgttagttgggtattttccgtccgcagcgctgctgggatttccctgtgttcattctgggtaagtaattgcctctactattttcgttgtatcctcagtgtctatctcctggtcatgaccgtgtaggattatccgagcaccgattcgaggaacgccagccatggcgccaccgtcaggcctggccgccactgcggtgtagcgcgcctgggcg

SEQ ID NO: 27486 - DNA, 325 bp, Zea Mays
ccaactgatccaagcgaccaagccatagccaattagccaagcactcaactgctatgtttgtggactactacctgtaacctgtgtgactgtctttgtgaaatgtgaactattttatgtattatctgtcttcactcttcaactgctatgtttatggtcttatggactactgggctgccttaatccttatgcccttatgtatttgttaatttgtgtgcacttgtattctcgcggggtgctttatatatttgtaatttgtggactactgtcagtactagcctgtgtattgctgttttttttctgacttccgattatatttttgctgttg

SEQ ID NO: 27487 - DNA, 591 bp, Zea Mays
gtcgtctccaggagctgggaagtttggttacctgaagatccgacgtcgttgtccctagtggctgattgggaaacgaagaacttcagttcgagctttgtcacatatcactcaattgttaagaacctcactccaactctccaagccattgtagaacatagaggcgtattgccacttgcgatgattcgtcgttcacacacaaaatattatcatgtgctacaccaattctggaagctactagaggaaaatgtgaggaatataaagaaactcttgttgagcagatgtagtctagtggtctccgtgtgcttgctgcagtgtaaccaaactccaagtagatgtgctctgggctctggcatgtggtatgtgatgaagtcgaggatggtttcttgccgtttgatgaccagtgtagtcgttggttaacttgtcagtcgtaaactgatgttgtcagttaggagcggataaagtttgtgtgtgttgtcagtgtatctgtgtgtaagtttattggacagaccgaaagatacaccacgaacccagatgaagtaggtaatagtcgtatgtgaagtttttatcattagggttgcaaatgcattaaat

SEQ ID NO: 27488 - DNA, 526 bp, Zea Mays
gtttgcgcagctttacatatatgacactgaacacgagatgcaaaataggttgggcatgttcgagagtgaggctgacgtccatgatcgtccagacccagaggtggcccgtttattgcttaacatgctagatgagcataacaagctggtcgcggcatttcgctttgctaaagaacgtttagacgaagaagggaaccaaaaggtgacgttgcgattgttaggctgtaacacacgacatgacgcacagtacaacttaccagccaatggtgagcttgctgctgtaatagtgggcgattgctcatcttcacagtacaagtacgatgtcctcgtgcaggctagagagggtggcctcaaacatgtttcgtgcttgcacccgtcctacatggccttgcagtacccgcttcttttcccttacggtgatcgtggataccaccttggaataaaatattctgacgtgggaggaggcgatgcctcatgccgcaagtatgttacaatgcttgaatttgttaggcatcgttcccattacagg

SEQ ID NO: 27489 - DNA, 402 bp, Zea Mays
attccccaaggctcagaatgtccctgccaggactgcgggttgttttctaaaaagggcaaggtctcttatgtaaaatgctcagcgcgaaggggtatgagggcatctgagccgcacgatccaaattggacgcgcgagattagatctaggttttaacgaaatggtacgtgatcccggccacccgatccaagatggacgcaccagatcacatcttaacccataactgacctcggccaccgaatcgtggatctgcggcctcgattcaatatcgcgaaaggttatcgtccatctaatcgtagtcgtcgacccaggatcaacggtccgaggacatcttcctccctagatctaggggtacggcggcgctggctttcccccgcggcagatgccatggctggtgcaagcccc

SEQ ID NO: 27490 - DNA, 344 bp, Zea Mays
gtggcggtgggttgggccgaactggagtagagttattgaattgtagatgggttgtggtggctccaatggcagataagaagaggaactacgggcaagagggacgtgtttgtgcgaaacacgtcgataatcggttggatgggcttgtgcaggtgatggacctctagttaaatgttattcatcgcctagggtgattgatcccatggtccataaactagatcagaagtctaattagaccagcccatcaagacaccaaccacaccagaaaattagctggaccagggcgcaccagccaaccagaagttaaaacgggccctcgtgcacttaatggggctgatccacctgcc

SEQ ID NO: 27491 - DNA, 339 bp, Zea Mays
gctatcagaatggtatatgtatttttatttatggatacaacgttgatacaacatacattacacaattgcatctccgtggttaaagttctggtgttgactaagggtgcgttcgtttcttcagaattgaggcggggaattgtttcaggtgtatcaaagttttatacaaattaggtaaatcatttctggtcagattgatttatatatagacgatggttccgggacgatgtctcgaaattttgctgattgatgcttttgctccgtgcggcgatgcggccgactcaagccggtttccctggttgccccttgcctgaggaaacaaaagggatatgtggattctga

SEQ ID NO: 27492 - DNA, 483 bp, Zea Mays
gtggataactccagccagtaaacaatttcggccaccgtaccgagctcgccacagcggatttggataagctcgccggcgacagccgcctcacgacttgacgccacataccctggcacctccaccgcgtcgccgtgactcgctgtaatcctctgtccatcgccagggagatggccacggtaaccggacactaatcgcgcaccagtaactccttgtccttccggtcgccgcgtgtcgtcgctcaaattcccggccaccactcttgcttactataaattgaggccaccatgagctccataggatcatcacgcacccatccaccaagtattgccctcaaacgataaccagtgagctccaaatttggacttctcccaatctgctcaaaaacatcgcacggtcaccctcgccgtggacagcttgctccaggtcagttccagcgccttgatcgtttgttctagcgtccttaggtcctcctcaagctcctcg

SEQ ID NO: 27493 - DNA, 504 bp, Zea Mays
ggtgattaggccgtgacaggagcgtccacgcacgtacaggtacagctcagcgttcgttcgttggggtgggaggggagccagctagccaagccaactaacctgaccagactgtcgtgtcgtatcgtatccccgcgtgcctgcgtttcttccttccccctgtactaccaaccaggctagggaatcgacgaaatcaattcaaaaacaaggttagcgaatcgtacagcgtagtttagcgccagccaagcctaccttaaccgtccagaagatggcgccaggtggacggaggttgaacagactatacctgtatatcactactatatatatagtactgaaaattttgaaatgtgggcctccactaggcacacagctatgggcctatggccggagccggcgacagcccatatcgggattccggatcggggaacgtggggcccaaaaccaagacgcatggagcctcgtaacgcaacgcctgacggtgacctgtcaaatttcgttggggccggg

SEQ ID NO: 27494 - DNA, 537 bp, Zea Mays
tggtacccagctgtcatatccaaactggaaaaatattgtgcctgctaattcatctaaaatctcatccaccaaaggcattggaaacctattcttcattgtcatatcattgagtttcctgtaatctatgcaaaaccttcatgttccatctttcttctgtaccagtaatactggagaagcaaaagagctcacacttggaacaatcaagcctgctttgagcaactctgccacttgtctctctatctcatctttgtgtagtggagaatatctatatggtctggcattcactggaactgaccctggcagcaaaggtatatagtggtcaaacacccttttaggaggtagggttgtatgctgagagaataaatcctgaaattctgtgagtagtgctgctaactgctccttcaccttttctttcctttgcacaacctgttccagcagcacaaaagcccaaacatcattcccttttaaccatttctgtacctgaacagcatgcacttgaggaatttttgtgaccttagcacaatttccttgtatctg

SEQ ID NO: 27495 - DNA, 344 bp, Zea Mays
gccgaaaccactgaagctgaaaccgccggagccgaagctaccagagccgaagccaccgaagccgaagccgggaccaccgaagattcaaacctggaaaccacacttgatgttattaacaatatacttctgaaaatggctgaagaagaagctgttgtggctgcggtgaacacggctactgaaaaaggaaaagagcaggttgaagacattttggaggaaggaaattttaactttcaagatttacttggacaagaattaacaggtgcttggacaagaattaacaggtgctgaaaaagaagagctgaagaaatatgccatatcctgtggatataaaccagggtctatgc

SEQ ID NO: 27496 - DNA, 401 bp, Zea Mays
tttggatacaacctgtatccttgccttgttgcaggaagaggtctctgaacctatgaggcgccgcgagatgcccaagttgagtcagggtaattggtcgaaatctgattctaaaggaccctttccattgccacctccaccccaggttgggcgctctattccaacagtacctgaccgccgactagtggctcaacccaaaaccatggaagaacgcatgtcagctttgcgtgcgtacagaagggttaaaggattatgtgaatgttgtgcggagaagtggtaccgagggcacacttgtagcactattgttcagttgcaagcaatgcaggaggtttgggagtgacttcctgaggaggaaacatcatccccaactcattcgaagacttctccagaagagcagttgttct

SEQ ID NO: 27497 - DNA, 346 bp, Zea Mays
gagaattcggacaaagatcagaaaaatggcaagccccatcctcgttttaatttggttgcccatttcaggttgcttgcacgggacgctttacggtttacctagcgtacacagccacctggcacctggtgcggacaggaccctccatcctcatccacttccatcacgtacctataaatatagagccacctcgtcgacacagcaccttccatcttccaccggctacagacgcgctgcaagatcagtactctgatcgatccaccaccacggcatgacgtgctctctagcagcgacggcggcgtccacctccaatctatgccaccctgcgccacagctttctccatgggca

SEQ ID NO: 27498 - DNA, 342 bp, Zea Mays
cccctctctctcggccaccagcgtgatttcttcaaattggacgccaccgccgtagaactctataaattgctgccctcgtgagttccgttaggtatttacgcatccaacgcaccagcccttgcctcggatcatccaccagagcgcctcaatttctcatttcccccaaatcggtcagaacgccgccatgagagagctcgccgtgaccagacgtctacaggtccgttcataccctccttgccctcgtttcagcacccttgtgtgctatggatgcttatcggtccagctaattgaactagaccacgttagatcgcagggaacacctcgggttgtcctcaatttgcg

SEQ ID NO: 27499 - DNA, 519 bp, Zea Mays
gggcattgacatccgcagctgcacgtcgtgggagagaaagaaagtgcgagacatggagttatcaaactcacgtccattatcgcaccgaacagcccggatgatgtgaccaaactgagtcgacacccacacaaagaggtgagaaatactggtgaaggtgtcagacttgcggcggaggggaaaggtccacatgtagtgagaaaaatcatccaggatgaccaaatagtactggtaaacggagatgcttggaatatggggtgtccaaatgtcacagtggatgaggtcaaagggatgagtagctcgggacatggaagaagagaagggtaagctagtatgacacccaagctgacaggcatggcaaagcaaggtggcggtgtcgcgggggcaagggatggttgaagtgccgagagtcgagggaggacgtcgtggccagggtggccaagacgacgatgccaagtggaggcagaggcagtggaggccatggcatacggtgtgacaatatgggcggaggaaggtgggtgg

SEQ ID NO: 27500 - DNA, 297 bp, Zea Mays
gtttggggcactatggccaccctgttgctatgcccacttgcccagcgacgtggtcgtgcgatcatcgccggggctgtcgccattgtctctagttacgccacgccttaggccatttaccacgtcgtcgcgcgccgtagtgactgcccggtaaccgccgtagcttcgcaaccagtgatcgccacggtagatcaccgcggtgactcatatcttcttcccggccgccagcgcaatctcttcgaattggacaccaccgctcatggactctataaattgagcatgccatgagctccatagggt

SEQ ID NO: 27501 - DNA, 354 bp, Zea Mays
gagccaacagacgcatgaaaacgactacactaaaccctgccacatgctcgacgccgtgccgaatgggctgagcgagcattggccctcctccgggcgcgcccgctcgtgcctataaagccctcctcgggtgcgtggcagatcactcctcaccccacctcactcccctgagcaaagcctcacctccggcgagctccacaccacccgccattaccgcccgaggctcgccatcgtggctagcccgccccaaccaccccatcgcctaaccaagcgcgccagagacttcatcgcaccctcccacacctagcatcctcgttcgattggactctaccacgctggaagggtcttgcaaccgct

SEQ ID NO: 27502 - DNA, 484 bp, Zea Mays
ctagaattctgatgttgctagttccagtatggtggaaacatttcatcacagcaatgaagtagttttggatacctctaacattctaacatcatgtacaactctgcctgcacttcaggagggccgtgtgattggtaatttggaattttcattttgattacaatgcagtaattcatttcaaaatgattttcccttcttttgcaggatatagcaagatgctcccctcagaacagtgcttgggcaggtttatggagctttgtttattaaaggtgacatatgatgttccttgctttctctttgtttttattccataacatgattttttaggagtaggttctccgtatgacctttttctcaaacagatctttcatatgaccttttttatttcatgatttgtgtttgcagcatgggttagatacaaactgcaattatcatgtagcagtcaaactcacttatggagcttcatgggaaacaaaatggttattgc

SEQ ID NO: 27503 - DNA, 552 bp, Zea Mays
gcagtgctgatacaagatggtcacccactggcatttgtaagcaaggccctcagtcccaaaaaccgtggcttgtcaacatatgaaaaagaatatcttgccatactgttggcggtggagcagtggcgccagtatctgcagcactctgagttcagcatatacactgatcaccgcagtttggcccacctttcagaccaacgtttgcacaccccatggcaacaacgggtgttcacaaaactcctcggcctccaatacaagatcatctacaagaaaggcgtggacaatggagtggccgatgctctatcccgaagaccacatgatgaatcaatgcttttcagtatttcatcaggttctccccagtggcttcacgcagtggtcgatggttatagtgaggaccccaaagctcagcacctgctcactactctgtcgctacagccctctgcatctggtcactactctttgcaaagtggagtcattaagtacaaaggtcgtgtttggctcggcgctaaccatacattgcaacagcaggttatttctgcccttcacgacagcccc

SEQ ID NO: 27504 - DNA, 621 bp, Zea Mays
aattgattccaagatagtcactggccaaatcaaaaaggattgttctgccaaagaaccagtcctcatgcaatatctctcggtcgtgcgaatcctaaaaacagttcaaagaattcacattgcagcacatagagcacaacaagaatgaagagaccgacatgttggcgaaagcaccagcgaaaggcgacccactgccatctgacgtgttcttccacacaatcgacacaccagctttaagaaacctcgaaggcctacagataacataagacccccgacgaccgcaaaatcgtacatctaataatgaccgaagactggcatgaacccatcactttatacctccaaggtcattatcacccctctgaccagagcgaagccaaaagattcaagcacagaagtcgtgacttcgcattgatagatggacaactatacaaaaagggaataagccaaccgatgctcaaatgtatcacagcagtcgaaggcatacaactccgtcgtgaggtccatagaggaacatgtgggtcacactcgaggcctaggaccctcaccgccaaagtcatgcgccaaggtttctactagccagctattgtgtgcatagccaacatagtggtccgctcgtgcgaagcg

SEQ ID NO: 27505 - DNA, 360 bp, Zea Mays
agccaagaaaatcaatcccagccagtgccagttaatactaagatgtctcatttggaacaaaatgatagaacccaggaatttcctctgcagaatattgctagttttcaggtacctcgtgtgacttataaaagggagttctctttgcagtagatgtctttttgtgtattgattatgtatctaatgtctattatcacctttgtttctagcaaatatctttcatataacatttattcatatatcaggatatacctgctaaattagaacccaccttttagttgccacacaataaggtattgtggtgtttgctaagtattcctctaagctgggttgctcgaggtttccagtgctatttctgcattg

SEQ ID NO: 27506 - DNA, 333 bp, Zea Mays
atttgtcgatcgccaccaatacatgagtgtatcccccttgagctttcttaaaaggtccaatcaaatccagtccccagcatgcgaaaggccaagtcactggtatggtctgcagttgctgtgctggcatgtgttgttgctttgacaagtattggcaagcttcgcacctctgaactaactcggctgcatcgttcttcgctgttggccaatagaatcctgacctgaagaccttcccgactagcgttctggaggctgcgtgtattccacattgccctgcatgaacctcctccagaagttgcttcccagtggatgggagaatgcacttcatgaggatgc

SEQ ID NO: 27507 - DNA, 472 bp, Zea Mays
cagccggagagagggggtgagtcaccggcgcgaactaccatggctttcaccggggcaatgtctcgggcgatggacagactacctacggcgatctactgtgacgtggtaactcttctaagtacgtggcacggctacgaagggcggcgaactccggcgaggacacctcggacaatcgcacgacaagtggcacggtgattagtccggtgataaggctccaactcttccctgcgatgagatctttcaccgccagtcgttatccgcataccaggtagcatgaatcgcgacgccggtgaggatcgcggtgcggagttcacaggcagcacgttcactgcatctaaagatcttttcattcaatgtaccatggctatcttcgtcagtctgtctgaccgaacaacttggagggctttgttctcaaatttttgtgtggcaactcactaatccatctgtagcaaagttgatctcctacaaacca

SEQ ID NO: 27508 - DNA, 483 bp, Zea Mays
cgagtgaccattggagtttaaccagcagccaatacccgtctggtaaatttcctaaggtctcagtgggtatcatgattccgaaggcaggtagtataccaagagccagaggtggagatgctaccccaactcctacatttgacaggaacttgtctcaaggaactgatggtttatctagaccaaaaggtgataatacttcacttcgtgtttcacaagaagctctgaaccatgatgtatccactgaaggggctcctaaagctgatcctgttacgaaggtctctgtatcacaacctgatgacaatacatgtgagcaaacaggaaccttttcctttggaacaagaagagaacaaggcatcagcgttgaaaaattggagacacctgagtttttaagttcccaaagaaaacggaacacggagtctgcagataaagccaaacccaatagtgagatgctcaggatgaagttgtgggagatccttggtggcactt

SEQ ID NO: 27509 - DNA, 639 bp, Zea Mays
aaaatatcctaagactcagactgacactgttgcggactgcgggttctatttcaaaaaaatacagggtctcattaacaaaagtctccgcgaaggggtatcgcggatccagggccattggatctaagtcacgtggccgagattaggttgatcaccatccgaaagcgttgagcaatgagatcctctggatcctgcaccaacggtgtggattttaagtgcatacgatttgctttcacccacacgatcccggatcaacggttaaggccaaccggtacgcagagactaatcgggaccgcccatccacgaatcaacggctctagtgccgtcctcaaccccctgactccctctctctctctggctaatccccacgaccgagcgccattgacaccgcgctcagatccagcaactcgaaccccaatcctttgatcccgatagagctacgtataaagcaggtagtagcaggggcgatgagatgatgctcaccagcgaaccaacgacgaagaattctagccgcgagaaggtgcgatccggtgatgagatacggactccaacgagcagttggcggccacctagcaccaagctctatccgcaggagacacgagcagcttccccgcaatcaagcgaagctcgtctgccagtcgc

SEQ ID NO: 27510 - DNA, 533 bp, Zea Mays
tgggaacgaagtgcaagcatgtttgatggccttcaacgcagtgtgtacttacattggcaccaaggatttgattcaagagcatattgcttacaaggtatgacctcttgtgaatgactagaagatgccgaaggagactgctgccggctccagcgaaggtgttctggtttacttaagatacacctatcgctatagaagtcaatttgacgagccgaatgatgattgacttgaggctgttgaggccaccagtgacgagctgttgggagcttattcgaaggcagaggacgaagccatgacaactaccttcgacgctcatggcaagaggagactgaatagagttttcgatgtgatcgtatttttttatcctgattactgctttcctgcctgaaaacaagggtcaaaaagaaaagtggcaacttcatcctcttccgtcgcgcctaaaccgaaaagagctaaggttttgactcgcaggccgaagccacgttctttagagaggacagctgcagtgcttgatacataaaagatggagattgttg

SEQ ID NO: 27511 - DNA, 298 bp, Zea Mays
gcgatcgtaatctgaccctcaattgcacgaatccgacctagagttcatctgttcacgacaacgacgagacccgagggaaaactgaggtgttctagatgactcaacgcggtctagttcaatcaatcgggtctacgggcaacaggggactcatggggtgctagaacaccaaacagaaaagcatgaactaacctgcaaatgcctggccacgatgagaagctcacggcggcgcggaaaactgatttgggggaaatcccgaattaaggtgctacggtggacgataggaggcgaggagcaatgc

SEQ ID NO: 27512 - DNA, 488 bp, Zea Mays
ttagtttacaactggcaattcttgttctatggagtttgacctttttggcttgtccgtgaaggatcttgtcacctagagtcttcttgctcgatctgatagctttgggcccatgtacactatgtggattcctgctttcactacttcatcttcgtcgatgcggcatgccactatagctccatccaacacttggcatcgttgcctcaatcgtcctagtcttgatgttgtccaaactatctcgtagtttagtcatctcttgtattaggggcactcatgagcatctgtgtcatgcttgtcagctagaggtcatcatattagacttctcttccctagctcctcctttcaggttgcagatatttctggtctcattcactgtgatttgtgcacctctcatgtcagtgttttagatattagtattactccgtggttcactggttcataatgattgctcccattactcatgaaattttccttcgtgcttgaagtccgat

SEQ ID NO: 27513 - DNA, 480 bp, Zea Mays
aaaaaatgtacatgtactatccaaatatttatattgccgtcaatctaatttacaataaatggaaatcacaaaacattatattttaaaaaaatgaaagggaggttatagaaaggaatataatttaccttgcatagaaagtattgatttcatggatctctggaagatttatataccagcggcatgcagctgtgccactaagaaaaggtggtgatccacgataggatttgactgatgttccaacaaagataacaattacatgattcatttcactggctttaaagacttgttgtcctgggaattcctctgctcttcgtccccatagtgatacctcaattttatttccccttcattaaattagaattttgttacaacagtaacataccattttatacatatgtttcaatggagcaatgggcatttaccttagatccacaaggtggatcagccttttcatgcgaactattccactgctagtctgaa

SEQ ID NO: 27514 - DNA, 452 bp, Zea Mays
ggcgtacaacaaaaaggtcaggccgaaagaaaatcaggccggagatctggtatgggaaccagtgctgccactcggaacaaaagatgcggcatacgacaaatggtctccgaactggcatggaccctacaaagtcgatcaggtcctacctaggaacgcatacatactcgaagaattaaacgggactaagttcccggtggcggttaacggccaacacttgaagaagtatttcccaagcatatgggacgatgaacagtgagaggccaacaggccgacgatgtgagtcagaaattcataaaatagtctgctagcaacgactcgatgggctgccacgacagttcaacggaggaaatcatcaacagcgcggatggcttcgacacgaacacggtcaacctcagcaatgacggtatcgtcgtccctgtcctcacctgccactatctgccgactcaatgtac

SEQ ID NO: 27515 - DNA, 416 bp, Zea Mays
tgctcaacccgggcaccactattcctcttcccgaactgcttctcccacttggcacacgcccacgatgtgaaaatttagcaattgtcgctcgttcaaaacacccggcccgtctctcccctccttcaaacatccaggaaccacccctcgcacctatcgtcgtgcacacacaccttgtcgttgcaccatgagctctgtcgtgctcacacgcccggtggcacccctgtgccttgccatctacgctccaccctaaccgtgcatggtgagatgttagggtaagcgtctaccctctctcctctcccttccctccttccccttgcccctcccactttgatattgggcattactggccggcaggccctgttgcgtgccccagtgagcatgtcgatgcctctgccaccatgccccatacaggcccc

SEQ ID NO: 27516 - DNA, 519 bp, Zea Mays
aagctcatagcctaacatttcataatatagcaacaacaacatatagatgaactgattagcaagattgagaatattgaggtagtgaaattaagatatattcatggcttagcatatacacatcaagcaaacaaaaaaagaacaataactgcaaatctggcattattcatatggtatagggcagtgcaaactgcaaaggacgatacacaaaatggaaagaggtcgtgttactgaagaattaagatctttgtggtagccttgcaggcatggtacagtgcaactacaaaaagacactcgcttgatatatagacctaacatatagtacttagttttgcaatttgttgtccatcatattgggaaatgccatttgaaagagttcactcattttaatcgatctctacacctactctaatattgttgcgaaagaggatcgaatattgtagcgtgtcatattgatacagtgataaagtgaaaacagaaagcatagatacatctcaggaatttccatgcacataaaaaaag

SEQ ID NO: 27517 - DNA, 360 bp, Zea Mays
gagcattacaacctctcattcagaagatcgaacgaagacttgcgtcaacttctgtctttttatctcaggctggcagactgcaaatggttaatgcggtattttcctctctcccaacttattacatgtgcaccctcaagctcccaaaaatggtgattaagcagattgataaattcagacgacactgcctttggagaggatcagatataaatgcaaaaaaccacctcaagttgcttggaaaacagtctgcaaaccaaaagctcagggggctaggtgtcataaatctcgatttacaaaacaaagcccttcttatgaaatgccttcacaaattctataatagagatgacattccgtgggtcaaca

SEQ ID NO: 27518 - DNA, 535 bp, Zea Mays
ccatagcccaagggtgattaaagaattaagcccttttttgcaatcccctgcagctgctcactggttctactccaccactgcattgtgctctcttcccccagctgaggaacaaaaccaggcagattgacttgtccaagcagctggaaccaaaaattcctagcaaagacacaacccaccaaaatatggtctatactttcttgttcttggtcacacaaaggacatttgtcaggatggcttaaacctcttttctctagtcggtatgctgtccaacatcttcttaaatcagcaagccataggaagaatttacatttaggagaccaagttttccaaattaattcccaatgttcagcttgggtcgacccaatgaagaaaccctcataggctgcttttgctgagtagtttccatcagtagcaagcctgaaaatatgtttgtcctccatgtctggatgtagctggattgtttgaagtgcatcccagagttctaggaggtcagcaaaaactcctactgtcaaggcccctttaatatcagttaatc

SEQ ID NO: 27519 - DNA, 358 bp, Zea Mays
gattgatttgcagtcctacaagcaggagaagaagtctgtcacctagtatgaagtgggcttcaataagatggtccgctttgtccctcatgtggcttataatgagatggaaaaggcgagctagttccgtcagggtctaaaaccttctatcaggcatgcactgggagcctttccgttggtggacttccgtactatagtggagcaggcactgggtgtggagatgcaacactagtataccatggagtcgcagaagtcttcgggtgttgatcagcctcgtggccaggacgcgaggaggggcaacacgggaggttcagcccacaagaagggcaagtctcagcatcagtgccaccatccttatcgt

SEQ ID NO: 27520 - DNA, 503 bp, Zea Mays
ctgcttaacacgagttggctaatgacgtgactatttcccaattaccaacatacaccacctttcgccatttttggataacctgcgccacacacagctattgtaatacatctcaagttcattcaaccccatcagtagagcactagcacatttcagaaaatttcctgagactacgacaacaaggcattgatctcatcatgcacatcaaagcatcacaagcgtttttacggaacctatcggttaacttgatcgacacactacccatgttccttgcctttcaaattttatcgcccaataggaatcatccccatttgccaatgacaccaaccatacctactgacctattgtttaccacccgagcatagttacatgccgcacactagtttctaacatgattctcgcataactcgtaattcaactactcactaacaataattcacgcacgacaactaccacatcgactaagagttctaagtattaaacatattatcacattccacgcgcaa

SEQ ID NO: 27521 - DNA, 381 bp, Zea Mays
aaccaaaattttgaggtgaattgcgttcctctgtctgatactattcttcgtgggatgccatgcagtctgactatttccttaagatataaccgggcgagggtggctcctctgttggtagtctttactggtatgaagtgagctaccttggtaagacggtcaattatgacccagatggaatcattccctttttgagtctggggctgtccgatcacgaaatccatgcctatctcttccacttcaactttggcactggaaggtgttgcggtaatcgtgcaggcttttgatgctctgccttagtccgctgacaagtgtcacaccgagctacatgctgagttatgtcctttttcattcccttccaccagtatctggttttgaggtcta

SEQ ID NO: 27522 - DNA, 616 bp, Zea Mays
gatgtacaatttttccaattgcttctgcatttggaagtccacctttctgtgttatctttgctatttccgacttaatagaatccaaatagtattgaacactaagaaaaatacaaaatgagatggagttgtgttgactgaaaaacatatgtatgtagcatttggaataaaaaatacactttaagtattcaagtaccagataatgtcagacaagggattaatgccgcagagcaaagtacactttaagtattcagtcggctagatgatttgtttgattagtgccataccggccactgagagagacggaacgtggcttaagcgttgacgtggatcatgtgttgctcactctaactcctccagctctagtgccacactgaggtgcgtctttttacgtggggttgcttgggtgatttggagggtgtacgaccggtggggcccacatgtaggagacatgtacgaccggtgggggcaggtagatggcagaacacaggtcccacggttcaaaggcagaacagccggtggcagaacatgtcagaggcagactactattggagatagagatttcatcaggtggaataattttgggtctaaccctggacaaccgaagaggcccgaagga

SEQ ID NO: 27523 - DNA, 529 bp, Zea Mays
ccccgagctcaacccgtgtccgccgccgctattgttgggttcgtgggcgacctcccgctcgtcctagacccggtcacctggggataaaaaggacttacccatggtcgtattgcctcgcacccagctgtgagaccctgtcgagttcgccagtagagaggaagcgaaacctgggcgtgccgccaccgccgtttgaggtcaaccgtgctgactcatcttcaccagtagtcgaccaggggagaaagccatagacccgtcatcgttctggtgagtcgcattgtcgagcagtatcgacatcgggtggtcgacgattgctcaccgtcgtggagcatctgctcgtggccgcaactctccatggccagggcgcttcacggcgcgatactcggtatggacccatacaccctgctcgccaagtcatcctttacgcgtagctcggtccaatttaggtttggcgctcgggaacggccaattggatgtctcgccggcgtgctccaccgtgagagctaggcggcgccgtcgtctctggttggaa

SEQ ID NO: 27524 - DNA, 473 bp, Zea Mays
aaaataaatacctagtgactagtgagggagaaatgttaatatttaaccctcaatacgtgcacctctacatttgacatctaattcacacgcctttgaaaatttaaccctgcataaacgaactctttgaatctgagggttttctctcttttgctcccatttcttagttgcaatagtctgttctcactattcatgacatgggaaaaaggcaaaaatactaaagacctggacgccctccctctccctctgtccaagtacacctcctcgccgtcatcttccgaccgtccggttccccttccccagcagtcaaatggcagtacacagatccaacatatttgatcaaaattaatgtaaacaaagaacacaatataattttgttgttgcaacatagcagtggatgagaatgcattcaccttaaaacaccaaatagtttctgttagatgctacgtatgcgcttagctgagataaggctagct

SEQ ID NO: 27525 - DNA, 320 bp, Zea Mays
ggctgcggggcggaggcagtagaggactgtggtgatggtggatggctgagtttgggcgcggcgactgtggaggactgatctgaatgagtggaagaggattgacgtgacgacgataccaggttgtcaagggagttggttcctaaggtagctggccctcgactctgcaactcgtagtctcggtttgtcttcgccggcagggttataccccttagtcgtcggcttgacagggaaaagaggaagaagactagatgactaaattcttgctcaattccctcaagtgccggttacagatatatatagccttcgcttgcaacaactcc

SEQ ID NO: 27526 - DNA, 272 bp, Zea Mays
acgccatcaatcctataaaacctggccccaggtaccacaacccacccggactagaataccacagtaatccaactttttgggtcccgccttactgttgtctcatgtgacacagttggtaggaacagttgccaccaacataaacctctgaccaagaatagcccagaaataatttatggcactccgctcaaaatacatttgattttccaaataaatctaaatattcaaattctggaatatttcaggaatattccttttccctttactttttattc

SEQ ID NO: 27527 - DNA, 373 bp, Zea Mays
ggcgatttggaagagaagcaccgggaaccaaatcaatttggtgctcaatgccacgtatgggagggagaccatcgggcacctcatcaggaaacacatcctcaaattcctgcaataaatcaagaacagcagttggcaatgtcgagggtaaggtgttagtagaaatcaaagtgtccttgtgcaaaagcacaaagaattgggctgttgtgttttgtatttctcgcaaatctcccttggtcactaataaacatttggtattttgtggcaatcttttattttcagtgggctttatggagtggagtggtttaggattctctcccttactattgttgtgtgtctcactcatttttcttttctcactctcttctctattcat

SEQ ID NO: 27528 - DNA, 331 bp, Zea Mays
acagttgatgtttaaacacaatgtgtgcaacttagatatttgttcttttgaattatgaaccagcacagcctatgatgtatagagtgtttgcattgcttgatttggttttcttgtgtgtagaaaaggtcagatctattgttttaaattaattcatttgacagtcagtggaaggttctttgctacttgcattcctgtattaatgtgatatcttggtattacagtgctaccacttatttctattgatgatttatgcggcatagttgtcacaacgatgcttaggcatcctgttggttgttgtatgtgggttcatgctatgatccggcatctttct

SEQ ID NO: 27529 - DNA, 654 bp, Zea Mays
aacggactcacgaacgcgcgggcaaatggctttatagtgagggggaagaggagagagcgccaggggagggagaaggtcggcggtgccattaatggcattggcgcgccactagaggggagagggcgtcggcatcagccacttcagaggaggggaaggggtgagggcagccagctgctagtgctgttagcccctgtacttaggatgcctatgaccacatgcaagacatgcagaacaggagagcgccaagggagatgggccgccgtgctaggaggcccagcatcagctttgccagcccagaatggtgtagctgtacagtagctttccttatatgttgtaagcgaaaggacatggaactcggcttgtatgaaacatctatctgaataccctaaattacatggaggggacatttctagttcctccgtatccctctctccctcttctccaattcgtgttcgttcctgttagcagtcaggctgctaagaaatggtatcaaagccaacgatcgctgagcctagagccgttgcaccactacacgaggagtgcacggatggctggggctttggatctgagcatcgccgtcgcgttggaagaacagtccaagtcactgaaggctcaagccaaatcactcgattccacccagaagctcctccagca

SEQ ID NO: 27530 - DNA, 1450 bp, Zea Mays
gaacattgtacctatgatcctggattggccggtggtattgttaagagctttcacgtgatcctacaacttgcaactgaacaaactctagcttctttcaagtcaattgatgtgctcactagagtcctgaaggttgcatgccttcaagcacaagaaataaggaagctgtcccaagatgacttaaatcaaaatggttctcaatccagaaatgctcagacgacttattcagatgagagaattaagaacacttgtgcatttgtgaaactggctttcaaccttttcaaggagtatgccacaatatctgacattggaaggattacagttttatgcaatgctaattgcatcgagtgtttatttgatttgttccaagaagaatacctcaggaaacacatattggagcaagtacttgccttatttagggtaagtcgtatccaccctcttttcttatattgttctttatactattgtctggatcttaaacctctcctgttctttcttacaatcagttaccttcgtcatcagcacaacaccacgcagcaaagatgctactatgctccaaatatcttgagactttcactcgtgcaaaagaaaaggaaaaggcttttgcagaattgtcaattgatctattagtcaatatgagagaggtcataatgatagaccgtgtggtatgttttttgttctcttgtaaagatggatctgcacatggtacttacattttttggtatttctcttcgcatcataatccacctcgtccctgacagttttaattgtttttcactattatatttttggcagtattatcaaaatctgtttcgcaatggggagtgcttcttgcatatagtctctttgctgaatggaacttttgatgaagcagttggggagcaattggttcttaatgtccttcggacactgactgctctacttgctgaaaatgatgagtcaaaggtaacaaaatatttcgctatagttcatgcatgtgctacataaactgtactaagcaagtactttcaagcctgctgttaccattttggttgttcctggaaaggcacctgtatcttgttttcatggatgtcctcctgggttaccgttggcaacttaatccctgcagtgttgcataccactgtaccagcaacattagtgctgcaccattaccgtttgcgtgttggcactattcattggtacttaatctggcacatacatgtggtaaagttcataggcctacacacatggcacagcactaggtggaaattagactattagataggtctaattatggccttatgggtgtgagcacagcccacccaatccacctgttacacccaaccaaatcatgaaacaaagtgatgcatggattgggtaaaaacgggttggaaactaattggacccagggtcacctcactgtgctgccatccctgcatttgttggcctctctgatgttgcacttctttcctcc

SEQ ID NO: 27531 - DNA, 464 bp, Zea Mays
ggcaccctgtgggcatcaccagcgccgcctaccaccgcgacatcaccggcactctgatcaggaatatgcgtgtgagtctccagccccttgttgatactctattatcccgacagtcccatcccaagcaaaatttctctcatcttcttccgcccaggtgagtctccagccccatgcgatgtgctaacgatcgggtattgagcgtgccaagcggcgatgcgcgtgtctagggctcacactcgttttcatgggttggtaagatcgtctaattcggaggtggtcaagggattggttggcgtcatcctggatttgacaggaagctctctcctctctatttctcttcccgtctagtctatgattgattcgacctgttgttttgggagaagttagagtagtcttcagtgcaggttgctgcatttttcagtatattgttctatgctgcaatttgagtggagctttggggcttc

SEQ ID NO: 27532 - DNA, 386 bp, Zea Mays
tcaacaccaaattaacctgcttgtggtccaaaacattatcagtgagacatgacatgtattcattcgactcaacacagacagatcgaaaaaaaccattttaacagtattaccagaactttatcagtatgcccagataactgatggggtatgattggatattgaactggagtggagatccaacgacgtggaattctacaataccattctaggtaacaattccttgcatgggtagcatctcaagtccttgtttcctggcgcttaacaacagagatgagcctgttctcccattccttaataatgtagttatcatggtaagtaggccaatgctgatcagctttaccctgcactgtaacaggttcgtcaatgttgattagctttaccctgca

SEQ ID NO: 27533 - DNA, 407 bp, Zea Mays
atgttagttgtgcgaaatgccaaagcgggaaaccatgatgaccggagttgtagcctgtcatctcgaccagttccaaagtgagtatcaccatcgtggggaggagacatcagccgtggggagagggaaagccaacgagggtagtagaaccactgtaaccatcgctaggaactccaaagcgacgagcgctagtgcgggaacgtgtgtggaggggatgtagccgtggtaaaggtcatcacggggagcagggatgacataaatgaagtttggagtcgtggtcgactgtcgtgactagatccaaagcttctacctctgatacagggtggggatggccattgcagatagcgtggaagtcgatgatgtagagcgaggccacgactgatctttgagagcagcgttggagtgacata

SEQ ID NO: 27534 - DNA, 326 bp, Zea Mays
gccaggggctgccctgtagccactggacaccaaccaagaaacactctcgttgagagaagctcggagccaaaaaaggaaggctaccagcctaacaccacagtaggaggagttggaccaggaaatcagagacctcgaagccatacatcaacaagtacagaggaagagagagaagaagcttcgtctagccgaactttagaggaagatcgacgaagctactaaagaaatgcgccacatcacccaagatgaccaaggacgaaggcctccacagagagagcttcgtcaagaaagtccaaccaatgataatggatggtatgatgacttttatc

SEQ ID NO: 27535 - DNA, 517 bp, Zea Mays
aagggagtaaatgtggctcaaagaagctctgtcaggcatctttggaaagggatttagagtgaacagtaactgaacacgacctgcttcatccccatcgtcgccggtgatctcgcgccgtgattcgagcttgccgtggagatgtgtgctgggattggagtagatattgctggaggtgaaaagatcggcgggtggaagaacttgggcacggagtcggccgaacaccagtgaccacttgccccgacgtcatggcaaagttaccgccgtcatgatccgtcggtcacccttgtcaagccacacatatccttgcttcaccccgtcttagcgagggtggcggacggtgaaacaagtccccaagtcactgagctaaatgtgcgccatggtgaacgaacctagtgagaatatctcgtcgcctccatggatactctcatcctgaatttgcgaagcacgcaatcgatctctttaaattgagtgttccccttgctccgcctctctgttatgtgtctagctgactctcaac

SEQ ID NO: 27536 - DNA, 418 bp, Zea Mays
ctcgcctgaggacatcccgagcgatgctccagaaggtgcccaactccaccgaccaactctaccaggtggaccaaccggccaactctccggctcgcttgaggccaatcccggacgagcaatgcattttttacttgcccgagggcgtctcggacgatgctctagagggtgcctaactccgccgaccaactctgcgaggtagactggctgaccaactccgccaaccaactctatgaggcagaccggtcgaccaactccccaacaaccaactcactgtcaagcgacccgacgaggaaaatagctgagtccagcgttactgctccacatcagctacgacgggacgcgtcaccatcgagccacgtccggacatgcagacagcacgctgaatgggcaccggggtctctacagtgacccgtacatc

SEQ ID NO: 27537 - DNA, 341 bp, Zea Mays
ggtgaatccaggcactggacaacctcatacgccgtacaccctagccggtactatggcgaagctgtcgccgcgggggtggtttccactcatcctcatcgtaccaagcagcaactccttcaccacgtctctacggtcatggaaagcagtaatttattgtctctgagctattgcacttctatgcgccacggagagtaagttctagtgaactatctggtcacgccgacaggttcggtgtcatccaaattcgtggcaagagtggccgatgcctttaaattgagtgttctccctgctccgcccctatgttaaacacccagtccatcgccagccaccttccttcgtcc

SEQ ID NO: 27538 - DNA, 290 bp, Zea Mays
tgctggacattcgctcgattgtactaggatttgttagggctgccttagaaaccggtttgattaggcttggttcttggcgtgtgtgtgacatgtgtctggacaggtgccgaaggcgtcggatcggactcaggtggagagcaaggaagtgcggctaccgggcatgcctcccatcactcttgatgacacagacgtgcggaccgtaagtttccttcatacttcccacttcccagtaacttggtgtagtgtacagtcatttagctagtgtcgcttgattatgttgtctatgtaaa

SEQ ID NO: 27539 - DNA, 521 bp, Zea Mays
ccgggcctagctagaaaccagtcgccgtctggtccacgcgacctcgacctcttgccggtttcacctgcattattatgcacactagtagttccgagaggggggaggagggatttaccacttaccagcggtttgggtggctgattgagtggaacgaacaatggaataaggcccgggtacctcatatgaaagccatcgcacgtccgttcagtgtgacgtgcctaggctgcgccgtaaacgtaacagaaagcagcagcatcttcccgccgttgttttacccatgaatgcatcggcggctgcaggtgggccaggagccgtttgggcgcaataataaaatctggaaacagctggcgcgacgcacacccacggagtgaacagacagagtgtgccccccacccccacgcgaggaaggaacgagaccagctgtaaagcgggcccggcctactggggcggccatcgaaggtctgccccacttgcgcccaaaaagccaccgaccactgtcccccctgccccgggctcggcgg

SEQ ID NO: 27540 - DNA, 340 bp, Zea Mays
gaggatttatcggtatgattggcattatagattacatgcactaggaatgagaaaagtgtccaactgctttgcagggctagtatagaggccactacaagaagctaactatcattctagaggcggtagctagctacaatatttagatttggcacgctttctttgggatgccgagatctagcattgatataaacatgcttcatcgctcaccagtgtttgatagcctggctagagggattggtccacaatttagctataaagtcaatggcaagaattacagcatgggattctatcttgttggtgagatatatcctccatgagaaactctcaaaggccccatatc

SEQ ID NO: 27541 - DNA, 519 bp, Zea Mays
atccaatgtagccttgccacctattgccttctccaaatctcgagttagagcattgacctttcttactaacacctcattctcaacaataatttgtgattcatcacaaacaatattatcattcatgagagaaatattgcatttactataaagagtgttagtaggatgtgtttcacttgtaggactgtcaggggaaagatccctgggtctctagggcccactggtcagagagagcgcatgagataggagcctccgagctaccaggggccacttgttagtgagggagtaagggaatcgtctacctcggaagcacccacccccggataagccccaggcaccgagcctgggcttgggcgtggtggagcagtagatgggggtcgggcgaaccaaaaggaaaccacccaagtgggtttcttgcctggcccgagaccgacccactataagtggacgaccgcattaactacgcctgacacctggacacagtagagagtcggtccgcctcccactcatggcatgcacagc

SEQ ID NO: 27542 - DNA, 468 bp, Zea Mays
gcttcataacttgtgttccaccaccaccaccatcctaagagatagttgtagggttcacattgtttgttgcctttttgtctctgttttgtgctaacaatgacaggaccaaagaaccaaatggacaaggagaaggggcctaagcttaacgacgatgagtgtgtctctcagctggaattgaaggagatgatgcacgcgatgaccgaagcttttaaaaaatacctagactctacgacaacatcctatgagtagcttgatcgacgaggtgctgaacttgttacacgcatggacgtactggaggctcgtcccccccccccaccaactctagccccagctgctggtgcagtactgctctctcctgtggacgacgacaacgacggtgatgtttatgcaccgctgcgacgacgcctcgcacgtaatcaacaaggtatgggaggtaatggtagacgtcgtcatcataatcctgaatca

SEQ ID NO: 27543 - DNA, 475 bp, Zea Mays
acttgtacttgccggaggagtacttgcccttgcgccgaccagagtgatggtcgcgtgggccagactctgatttgcgcttcttggggcagctgacaacgaagtggtcgagatcgccatagttgtagcatccgtccttggacccaccacaccaccatacggttgttgtgtaaccgcgtgaaccagttggccacaagtgccagctcctcatccccaaggctctccacctgctcctctgtaatagacaataaagaagatagagcaaacatagcaggtgtggagttagaagcagaatcacttcgagagactagggccatggtgggtgcactagggttctcaatcttggcctgagtctggtggtcaatctctgtggacttgagctttctaaagagctcgatcatggtgagagtctcgtagttgggcgactcgatgatcgccgagaccttcacctcccaaaccctccgatctagagcatgta

SEQ ID NO: 27544 - DNA, 331 bp, Zea Mays
aacttgtacctccacaagtgccatatgtacccccaaccaagggaggtccagggctgccatgtctgcatgcgctcccagtccctgctctccgcttaggcagggatatggtgttgccatgtggcctatggagcatcacgaaagccgccagacatagcctgacatgagactctagcatgggggctacctatattaagtacgagcaggaggcgtgcctgtgcgcactagtcataggcggtgtgcaccccacattaaatgcaagcggtgtgtgtagtccacaagacctaggctgcgctagtaacccgcgcgttaccaaggcgaagatcattgactc

SEQ ID NO: 27545 - DNA, 818 bp, Zea Mays
gtttatcaacgacgtgcacaagagggtgccccacctagctctcaggttgagctggcggtgtatcaccctctacttcaccgcaaacaccgtcacgtccaaccaatggttacctatcaggacgctagagttcttcatcctggcgactgtcttgtccttttcgcatcctcctcttcgttagtgtcccctgtgacatcttctatccatcgcgccctcactgatcctcactagtgttacaccatggaggaagagtgtgacacccttcttgccaaccacacctgggacttggtgtcgcaccctccatgcggcaatgtgctggctagcaagtgggtttagacccataagtggatttctatctggacaggtacagggctcattgggttctccgaggattcacccagcgcccgagcgtcgattatgatgagaccttcagtctaatggtgattggtgcagtctgcttgtcccattcttagccagtctatcagctagatgtcaaaatgcttttttctcgcacccttactgagacaacttattacagccagcctgctggatttgttgactccgctcaccccgactgggtctgcaagctcaacaagtctctgtatggacttaagcaaggacctaaggctcaacaagcctttttacgaactaaagcaacaaccaacacttcgtacagccgatttgcttcctacttgctcttcctaggattcactgaggctaaatctgatactatcatgttcatctactagtgtgacagtgacattgtctactcctataagttgacgacattgtcctcactccctcttcttcaactcttctgc

SEQ ID NO: 27546 - DNA, 664 bp, Zea Mays
tgcagtgagagggaacgcgcagagcaagactttaaggcagatcttgtaaagcagatagcgcagaaaaggatctccgcttcagagaagaggaaatggaggatggatgggtcgccggctcttctgcaggacttcaatccgccggagggcttgaatgcgtgctgtgacttgtcttatcggagtggggagagcggcggattgatgccatgtgacagattgtgcagccctatctttaggtcgtgcgacgggacggggaagactgacgccttggcgacagacgatgaaggttggtctgttgtaaagcctaaattctggtggcgaaaaagcttagatttccatggggatggccctttcaagcagcaaagtgagaggaacggcaccgattttttcaagaaacagctccgaggcaaatgcttcaactgcctggcgactgatcactttgcctatctttgctcggctcctgttcgttgctggcaatgtctacaagctggccatagggctaggtcttgtcctggcaatatcttccatgggagatccccttcaattcgagatctgcctgggtcactcaagcattcacttcagagagacaacattatctcctcgagctaccagcagcaggaacctcacctcggctctcttcaaaaggggcaggagcggcatcctgggc

SEQ ID NO: 27547 - DNA, 457 bp, Zea Mays
cagcagtgcaccggaatcccctcaacacgaactttaactctaaattcaaagtttgtcctcctagcatagctgtcctccgaccagtcaccaaagtggaaaacccggccacgaaacgagacagatttcctatccaaagcccactgtttcgaccttggatccgagaagacaataaagaattgctccggaaagtgcttgacaagttggtactgaccgtggtgtagattgaacttttccctcagcatatctcctgcagatagagcatcaacttcatggctgttgccatcaaaggaacaaacgacggccttggcgatcagctcatccctccggcgactaaaggagcctgtcgctgagacagcacagaaggcacgagccggccttccccggggatctccagggtaacgcgcctccatatcgtggtctccccgaacagcctgaaggtatgacttcttgtggagca

SEQ ID NO: 27548 - DNA, 408 bp, Zea Mays
aagccatacactacctaaaaaggacttaccttggtcgtggagtgttccgcccgattatatgcaaactccacatgcggcaaacacccttcccacattttcaagtttttcttcaatattgctcgtagcattgcagacaatgttctattcacaacttccgtttgtccatcagtttggggatgacaagtagtagaaaacaacaattttgtccccaatttgttccatagagtacgccaaaaatgactcaagaatttaacatcacgatctgaaacaacagtagaaggcataccatgcaaacgaacaatctctttgaaaaagaggttagcaatatgaatggcatcatccattttgtgacaaggtataaaatgtgccatcttagaaaaacgatcaaccacaacaaaaacgctatcg

SEQ ID NO: 27549 - DNA, 405 bp, Zea Mays
aagtaaaaatccatcggtgtcactggtgttaagttgaggattatttgcgcgtggaaagtaataatgtgtttaatacttagaactcttagtcgatagtagaaattgttttgacttatatagagaggtggtgacatgccaaagtagtcgtcgccttctctatatttataagtcgagtcgtgacgatgtgtagtatgcgttcgttaaattatgcttcgcatatggtgtatgattgtgctcacaatttcgagtagacgcttcaagtaagtcaagtagatttgtgatacaagtgtgtaatggagttagatgttttaggataattattgaagtactcggcttgtatgataaatatgtatgtgttcgtgatttgggaagtaaatgcatggtgattgcgatttggagattagt

SEQ ID NO: 27550 - DNA, 385 bp, Zea Mays
gcgccgttggacaacctccctcccagcgcggcatttttttttctgttaacgttgactttgtctacactatatatctggtcttagctatctctgacgacttactcatctccattgtctattttaaattttactttgtacacagtataatctataattgctggagataattagaatgtctccaacaatccacccatataaataatgtaaaatagatgcagtctatccaaaatattatttatactgttttatattgtagactatatataatgtttacataataaagttcaaatatgaatacaaggatgctatacaaccggatggtaaactgtccacttcaatgtgaactgataaatggtcagacttgacttgtggtattatagggtgc

SEQ ID NO: 27551 - DNA, 477 bp, Zea Mays
ctcgtgccctgccatgatactgggtcttgctctactggctgttggaggagggtgccttggaggcgagcgttggcgcattcttggggccattcaccgagttggagtaagtaggtcctgatgccttcaattggggcaattattcttgtagtgactggggtctccgcagtgccaacaggcattagctggtggttggttgcttgcaacggagggagcctgaaaggagctttgaccctgctgactgaaatgtgacggagtgggtccagctggcttattgaagcttggtcccttgggtgtaaacccaaaggattgaattctctggtgcctgtcttgctgctgagctcggaggacttggaatttcctcttgaggtgacctttttcttcttcccttgccctttccacttgtatggccttgtttgagaggtgcgagaagctgaggaaatcttggctggcaaggatagtcttgagttctggtcttag

SEQ ID NO: 27552 - DNA, 375 bp, Zea Mays
ttggagcactataagtgagtatgaccaaaaggctataaaaaccacatgatcatgacttgggccaattataacaattatagtaaacctaataccctactaaaaatagtaagaatgtgaccccaaaaaggtttcaaaaaaaccctaaaagggtcaccaaagggagaaacttaagagaaaaatgagatttcttctaagtccaaaaccaacccttttccaaagatcaaacatgttcaccctctttcaaacttcaaaaccacttggcccaattgacaaagtggcgcctaaagacctccaaaacaccctggaaaagttcgaacccaaccctaagtcgtttgacatgacttggcacaagttttgtctcggtgtggacagctc

SEQ ID NO: 27553 - DNA, 310 bp, Zea Mays
gatggttgatgctcttggtgatcttagtgaggtcatccacgaccgtaccctcgtcctgaacgtgttgtgtggcatgaatgagaaatttgcccacatgaaggtccacttcaagtgctcgaagatgttcccctccttcgccgacatccacaatgatctcatcctcgaggagatcgactccagtgagccacctccacctccggccaccgctctcatcgccagtaccactgcttcctccatcacccctccccctggaggtgtcacggtgcccgctggtggtaccacccaacccactagcaacacccatggcggg

SEQ ID NO: 27554 - DNA, 495 bp, Zea Mays
ctggaactaccactagacctggcccgagttctagccaatcagacccgactcattgaagtcctcactagaagtctggaaaaccagcgcccaggtggtgggagaccacaggacaggatgggagaatttctgagactcaagcctcccacgttcgcggggtccagcaatcccctcgatacagacgactagctgcgcacgatcaagaggaaactggaagccatcggatgccccgaaaatcagcgtgttcaactggctgctcatcaactttctgggatggccctagcatggtgggataccttcagcgaggccgtcagagatgctacctgggcagaattcgaaacagccttccgtgagcaccatgtaccccaggggatagttcaactcaaggaagatgagttccgggagctaactcaaggtgggagaacagtcagtgagtatgtgcacaagttcacggagttggctcgttacgcgcctgacgatgtcagcactgagtccatg

SEQ ID NO: 27555 - DNA, 307 bp, Zea Mays
cggaggaagagcaggagctgggacgccaggagttggggtcaggaacagtgcgtgcgcgcgtacggcgacagcgtgcatgaggtagagatggtgcgacagcgcggtgggcttgcttgcttggccaccttcactttacatgctggtccaacatcacctctcctgttttggctcttgcctgcctcgcttgttcttgtttgttaactctcttcccaccccgcaatacgaaagaagaggagaagacaatggagggcaagggaagttttgtttgttgcctgctcctctgcaggggccatgacacacgagactt

SEQ ID NO: 27556 - DNA, 457 bp, Zea Mays
ctgtttcactgtcgcattgggcccactcatcatctctcctccaccattgccgtgaatcacctccccataagtgccgcagccgtagtagatttcttccccacgacgcggactcatcgtgaccccatatatgcgcagcgcggaccttcctctatatcctttccgtgagccctaccatactcgtgctcgaagaacaccatcgccgcccaccgcaacaaagtgaggggagctcgggatccaccgtgggagttggggccaacatcgtcgcttcgcctccgttcgttgctctgggatgtcggtcggtcgtcgcgagagctcgggtgggcgtaactggtgaatcggagcattactggcgcgacaattactcgccggagtccttgctttggccctgatccaccgcacgtcgttcggtgttcatctccagtaagtaaaccctaagccatgttcacttgtcacccac

SEQ ID NO: 27557 - DNA, 304 bp, Zea Mays
attttgttcatacaaaattattttattaaccttacctctttaaacatcaactaagttgacattttctcttatagatggttcgtaccattcaaaccactcggatgaacaccaacttcatccctccgccacgacaagttcctgtctacccagtggtagtcgaggaaattcatgtggatctccctcgcattcgggtggagaacagagtcattctggaggacagctcggaggagtttctgcctacgcccaccccgttggcagaatcactagccttcgcagctggatcgtcagcttcagcaccgccagc

SEQ ID NO: 27558 - DNA, 649 bp, Zea Mays
ggcgaccctgatcgctctcctcgatatcggttcaacacgcaatttcatcggcgaggaggcggctctccgcacgaatctacaggtccgggctcgaccaaggctcacggcgcgggtggccaacggggagcgcatcgcatgcccgagagtcttgccgcaggcgccgatctccattgagggtgtttcgttctgcgtcgacctctacatcatgccactggcggacttcgatctggtccttgggacacaatggattgccaccttggggccgatcgtctgggacatcgccaaccacaccatgcagttctagctccagggacgcacggtccactggtccggaaccacgttgaccgcgacatcgcccttcagtgtcaccaccggcagcgaccagctcctcgacgcgctgctggctcacttcaccgacatcttcgctgagcccacgggtctacctccccaatgggaccgtgaccaccgcatcatcctcgttcccggcgcagctccggtcgcagtccgaccataccggtacccggtggctcacaaggatgagctcgagcggcagtgcacaaccatgatcgaccaaggcatcgtgcggcgaagcgaatcagcattctcctcgtcggttctcctcatcaagaagcccgacgggtcatggcgg

SEQ ID NO: 27559 - DNA, 411 bp, Zea Mays
gctatgcttgctgaggttgggctgctgaaagaaaggggtttgactgcagaggttgtggttgccgacttcattttcatgaacattcagccactgaaagacagagcataccccacatatctatatcgaggcctggctgattcaacccgggtaactaacagaagaattcctgttgtggacttggtgagccggctcgagatgatactcagaggcaaggtgtcgaacatcggcgctcctgttgcatactcggcctggaatctgcctccttcccaggcctttaccagtttcgtgtcaaatcctcctactgctgatagcggttcgggccttagagtgcaaccctcttccgaagaagttagtgctttggttgcctcactcgaagaaattcctaacgatgagaggcaggttcattttgag

SEQ ID NO: 27560 - DNA, 443 bp, Zea Mays
cgtcggaccatatacaccataaatctagagatacacacgtgagagtaactatatccttgaaagtaggaaataaattatgtatataattttgttgattacaaactagactgccactgaaagttgtcatgggcaatctgttgggtacgggcggccggccagggcagcagcagtatataaggtcggatctgatctggcatactgccatctggggccataagcccagcccatgacagaagatataattaaatctcaacacatcagtgtgttcaatttatctccatcagaggataaaatgagatctgtaccacagaatcgatcgcaatggatgctccaccttccatctgctcaatggtgtcaagaagtctctcattgtctaatattgctaggagacctccagcagcacgaacttgaacatcgcttccaagatccatcatggaattaag

SEQ ID NO: 27561 - DNA, 302 bp, Zea Mays
cttaagtctaaactttttgtgacagtgaagttggatgaacttagggcttgattttgagtaagatatgttgctcgattaaggatagtggccatagtcgaattgtagctggattacagggctagaactttgttgccgagagattaaccagttgttacacaaaaaacatagattaatgccctgcaaatagccctatcagatagactgaatggcgttttgattgtacagtgactgaaagagatcacaggttcacaccccctcgctaccggtgatcttgcgcccagatccacgccggcgtcgcgatt

SEQ ID NO: 27562 - DNA, 452 bp, Zea Mays
gcgaagttgttgatgtccttgtctggccagaacgccaagggatcccacccatgatacaacttctgctaggtggtttttgcgtttgtggtcgccactgatgcgtgccgtggggatggcgtcccaggtgtacttggcggtctccttgtccgtgaggacgagcaccatctccagtgggacaatggcaaggagggcctctggtctgctagttctcgtcgaagtcattgtcgtcgtacgagaccacatcctgcacctctcggccctgcaacttcactttcatcaccaagaaccactcgttgtagttggttttggtgagcacggggcatgggccatgtgctactgccagactccttggtgatggtttgatgatggaggagcctttatcttcttctttgctttggcagatgaggagagaagtcgttgggaaacagctggggcgaagagcctatgttctc

SEQ ID NO: 27563 - DNA, 441 bp, Zea Mays
gtttttctgctttactatgttatgttattgtctgtgctagtttgacattatctgaagaggtgctatgccaatcttgtttacttattattctcacccctatggctgcagctatgccgcctcgtatgtctcggggcagtccacaagttcctagtggggactcgatgagtccggcggcaatgttagccgcgatgcaggccatgcagcaggagttggccattctgaggcaagctattcctgttgcctctgcgggtgctgttcaaggtgctggtggtggaggagtgcccgggggcgctgtacctgcgggtgctgctccaggtggcggggccgaggtgcctcttccagtcagtggtctttctctgatgcagtggatggacatgaagttggatacttttgatggcagtggtactccagtcgaggcggcggattggctaacttacgtgg

SEQ ID NO: 27564 - DNA, 480 bp, Zea Mays
cgtcgtgccctcggcccacctggccaccatgactccatagcctagcaggtcgcgcgtgcgcccataccccacaccccgcgcccctccatgcgcacccacggtcgttgccgtgccatgcaccccgctccgtgccgcagcccacccaacaaccacgcgcgacactcagttagggaccctcacgtcaagacaatcttctccaacttcctccgtgtgcacgccaaatagtcgcccacatcgcacagctcacgcaaccaccactcacgacacccatattcacatctggcactctcatctaacccctccccacactcccaaaccggtacgcatctcttcctatgcctacacattgcttcgccttgcctcttgcctagaaccaccatccaccggtaccacgatgcgctgagcatcgccgcgtttgtgccctgcctcgttgcgtcggagcttcgccaagccaccaccgcgaccatctctgtcgagctc

SEQ ID NO: 27565 - DNA, 491 bp, Zea Mays
gtaaacacattctgaacaaccgacgacatggatgacaaaattgaagcttggggaagctttacgggttcaccagaggttatgtacacgcttgaatttggactaggcaagagtagaaaagcgggtcgacagagagagtgtcgcggcggcgttctacggagcagaggagtgttccggtgatgggactctggcaaacttcaactggtcggctccaagagaaataggaagctagaacatgaagcaatcggggagttactgacccgaggagtgctagccacagaggagttcttcacggcagcgcgaagagcagggcaaaatggttttgtggactatgtgagttcttctggtgaaattgagtcgattgctcaagtgcttgtgtgcgtgatgtggtgaagaagcaggatccgagctcaatttatagatcgatggccagaattggatgagaatcgtggagctgtaaccgcgctggcgagctgacccgcgcgggcagagcc

SEQ ID NO: 27566 - DNA, 581 bp, Zea Mays
gaatgtaacaaatatgcaattgaaaaaattggaagccattatcggatactacatataatgaggcgattcaattaatttcgaatcaattaaagggatgtagaaggggcggggcgaacctgatggacattagcgacagaactatgtaaaagaatggggggaactcgaaagaatgagaggggaaacaaaccagggaaggagaacgacggcggtgaatcgatgaagcgcggagattacgacggtggaagaggtgggggcggtcgtcgatggcgatcgcaggagcgaatgacggcgacggggaggaactgattattttagggtttgggtggacccgagctgaattaattgaaaggggtatgatttgtctggctcgttgaccatattagctcggttggcccgcgggggagcggcgagggactgtgggtccactagtcagcgcacagtcagtgtgaaggtttggttactgcgtgttcataataagcataaatagctgtgcaaagtatcgtaaacagtttacaaaaaagaattaatcaagacccacgccaaagtacgtaatataataaatcccaattgatatgtagttg

SEQ ID NO: 27567 - DNA, 279 bp, Zea Mays
atacgtggaacacattgtgcacagcagacaagttttcgggtaactagagttggtatgccactggtccatatctttcaaggataggaaaaggaccaatgtaccggggtgcaagcttcccctttaccccgaaacatgatacacccttcattggtgaaactttcaggtagacataatcttcaacttgaaagtgtaagggttgacgtcgcttgtctgcataactcttctgtcgagcttgggcttctttcaacttatgaattattcgttgaactttctcttctg

SEQ ID NO: 27568 - DNA, 313 bp, Zea Mays
gtgagtgtatatgtgtatgtgtatacaattgtaggtagcatgtgcgtgaaaactatattgatcgtgatagaaaccactagcaaactcggagatgaaaatatatgtccaacgaagggactcataccaagacatttgagactccattcacacgaatcgatattatgtgttgctcggattgatggatcacagattcacagccggtgcaagtagttgtcgttcgcattattatcccccggacatccaccaagatggcaacaaacaagattagcgaaagcagtagaaaaagaagacacaccagtcaccagaggttagc

SEQ ID NO: 27569 - DNA, 345 bp, Zea Mays
ctcggcaatgatggcactgaatatctcgtgtacgtcctatggaagaaacgacgcctttggtggaaggagctgcaggcttggttgtccccgtgcgcggtgtagtgctgggcgtaggaggcgcaaggttggaaggagttgaactatgtgtcagaccccatcctgcaaaggagttagtatatgtcctcgaccatcgtccttgcacttcacgttcagctttgcaggcatattcaaacaatatggtgatatcaaaataatccttgtaatcaagtatatcctgaatttccctattcaaaccaccacgaaaatgtgtcatagcagcgtcatccgattctatcaaaccacaac

SEQ ID NO: 27570 - DNA, 308 bp, Zea Mays
aaattttaatcatcctcgtttatcatgatttggatatcgtgtttgtctccatctgtttaaattgtcctaaattatttcacaaaaattcggactttagtaatctttcgaaacatcgaatccagtatcgttttggttgagccatcgacgtcttgcccaaactctaatcctagaaatcggatctggtcccttaaacttcatttgaaattctttcacgcttgtgttgcacgtgtctctctgtggcctgacatcgtgacacgggtggcaggtgctaaccggtgtctggatagcgcacaacctctcgcccacgt

SEQ ID NO: 27571 - DNA, 357 bp, Zea Mays
tcagtggagcccaccttacaagaacaaatagccatggcacagatgggtgacaagggtgttcaggttatcaaggaaatgatcgaacagaaagcagaaaaatacaaatgcttccgtcaggacagcaaaggaattctatggtttggagaccaactggttattcccaagaaccctgagctcagaaagaagatattggatgaagctcacctttcaaaattctccatacacccgggcagcaataagatgtatcatgatctcagatccttatactggtggaccagaatgaagagggaaattgctaagtatatatctgaatgcgacacctgctagagagtcaaggccagccatctgaaggtagca

SEQ ID NO: 27572 - DNA, 303 bp, Zea Mays
cccggatgttgaaccagtcgcttacacgccaacttcggattatctgcctaccaacctggaagggtcccctgaatcgactgtgattccatctgatcagtaggcgcctacaggtggtactgcaaatgaaaatttggcccgttcgactgaggtttttcccccttctgctcccgcacatcgctatggaacaagacttcaacataatattcgacgaccaaaattgaggattgatggtacagtgtcttattctgtggcctgggtttcatctgctgaaccgacatctcatgttactgctttaaagcatcc

SEQ ID NO: 27573 - DNA, 759 bp, Zea Mays
tgggtgtaagatttatactggttccgggagaacacccctacatccattcttcggtggctcacgctattggcacctggttgctcaatgctcgtagttagggttacaagtgggcgagagagaagagctcctaaaaatctcttatgcatggctagatctaaggactacgggtctggtgctctctgctaagccttaagcgtcgtggtggttcgctccttggcctcggcctctgtggtcctctgggtcttctggtctggtcgtccgttcgtgtgtatgcctgtgttcgtatatggctctcctttctcatgttggccgacctccccctttttataggcaaaggtgggggttaactaccggtaccttctaaaggaaggagctacagtgttgtggtaaaacgggacgttctaccttggtaaagttgtgtttgtccgtatgtgtctcggtcgtctggtcttccctggtcgcgctctttatgatgggtgatgtgggcggcgaagagctccggcataatcattatcgtctctatgctacgccaacccctaaccttcaaccttcgtagcttgggcctgggctcgatagataatgagtggaccgtagacctaggggcccataggtaatgagtggaacgtggatcgactccctttgtggctcgatgtcaggtgcagttaatgaggacggtcacttatggcgggtcaatcccgagtcgagcatagaatccactagagtggattactcccgatccccctccccttccgactctgc

SEQ ID NO: 27574 - DNA, 440 bp, Zea Mays
ccacgccaatccctcgccatccgtaccctcacctcggccatctgcacgtcgtgcacgccctacgcccctctcccatgccttccacgccttctcccccaacacagctttagcttcatctgcccgtccacacccacgcgtccctcctcgtcaatgcgcagccgccaatttctcctcctcctcccccgtgtgcggtggatcctccacgaatttggtgcctcaagcacatggtagcgggcccatacctttgcagcgtcctcgcagctgacattgaccccatcatcccaaacctcctctttttcggcgcctcctcgcccacgatcaccgtcattgtgcttcacgctatactcccccgacatctcgcatatggattgactatctcaggcccccttcctccctctcaccaaaaaccctagcccacgcctggccgccgccaccctcac

SEQ ID NO: 27575 - DNA, 379 bp, Zea Mays
caggcacaactcgtcgtcgtccttgtcaaggtcgtcgtcgtcgttgggtttggttgtcaaggtgcctgtgatgttcttcttcctctccttgttagcttccataagagctgcctccaggagcgccttggcctctaggctattgtaactcagcagcagctcaggcacacggtacgagagagtgacgacgcggctggtgagcgggtgctggcgcccggcgccgtagtagtcggggaggccgagctcgagatcgtcgggggtcttgcgagccgctgcactgacgctaggaggggcctggcgctgtgggtgtgcgccgtcaacgatttcgggcataggtgtcggagttggaacgagcgtcgaacaccttgtgggcatggtgctg

SEQ ID NO: 27576 - DNA, 447 bp, Zea Mays
gttacgcaactgaggccgtgcgatctgaatcccactgatccagttctgcgcaaacgcgatagttccctggccccacgatcctgatcgcgcgacattccccaaacgtaagtcgtctgggacccgagatccaatcttacccctaggtttaagatcccacggttgagattcaccccctacctcgacgacgcaagacggcggcaccgctggtcaaccacggcggcaaatccgtcggcgcgcgacgaccacgtgtaatagtgctctatctgaccccctgaacggcgctacgcgtggagaagaagataacagaggtgatgggatactactcaccagcggtcaagaggcgaagaagtccgtccacgaggaagtgtggctcagtggtgaagtaattgcttcgacgagcaattcaatggtggggaggcctctgccgcgtgcacaatccacccgaaa

SEQ ID NO: 27577 - DNA, 303 bp, Zea Mays
ggagtgggggaggtacgatttgtacctcctggtggtgttggtatgcgtggtgaggtggatgcggagcggggtcgtggttgtatggctgagggggttgttgatatgtgtgcgcgacaactctagggttgtcggctggttgcgcccgtgccatcctgtctctggtggccttcgtttctgggtagtctcttgtggggtgcgtgcagtcttcgccgtggaacaaacagtaaaatctgcgcggctgctacgcacgtcctcgtccccggccacgagttccgtttccgcggccctggggggatactcctg

SEQ ID NO: 27578 - DNA, 362 bp, Zea Mays
ttgaaggacaggttttccattccttgcgaagtgcctgcagtgtggtcttgcgggcacggtcgctgcctatgcgggtcgctgtgatggcgtcccaggcctccttaacagtctgcttctaggaaagcgaaaactgcatttcggacgggactgcagcaatgagggcatccaacgcccgtcgatcctcgtattagtcgacgtcgccgtatcgaactacttcccacttgtggcgaacctggagccgtaccctcatcaccgtggcccactcgacgtagtcggtcttggtaagggtaagccacccaccgccacgaccgatgtccatgacaacaacttggacaccggggtgaccatggtaccgatccggg

SEQ ID NO: 27579 - DNA, 393 bp, Zea Mays
gaaatattggacactctggcccatcttgcagtgcacctgcatatcagttgtttcgccctgttactcgttctatgacccgtgggtctgatcctatcgtggcttcacctggtttcaaggcaggaggatctgatagcgcaagcacacaaagaagtatttcatatgcttcttttagcgctcaattagttgcctcacgactgactgccactcgtacccggacccctctaaaagtgacttcatctggttggaagcctcttactcaacctgttgctctgaacgaagagaggaaatgtgcaaaccttacaatcaaccctactgctaagcgttccagagttacttcctccagagctgtcaaagattcaatcaacaattcagcttcaaaagccaactcaagtg

SEQ ID NO: 27580 - DNA, 545 bp, Zea Mays
aaagcaactaactttttagaagactggaagagagaatcagcccagctaaacgcttgcttaggggacaatggtagcctagaagttaagacgatgctagaagacctcatacgcaaggctcagcgcctggacaccgagacgacaagtcttgtagagaaagctcgcaaagaacaactcccggacctcaagacagatgaagaaggaaccctttggtttagggaccgtttgtgtataccaaagggagaggcacgaggaatcctgctcaatgaagctcacaacttagcctactctatccacccagggaccaccaagatgtacctagacctcaagaccagatactggtggagagggatgaaaaaggagatagctcagtatgtgccccagtgtgacacttgccagcgaactaaggcagagcatcagaagcctgtaggtctactgcaacccctcccagtgcccaattggaagtgggaagaaataggcatggatttcgtaatcagactgcctcggacccaaaaagggaatgattctatctgggttataatcgaccg

SEQ ID NO: 27581 - DNA, 390 bp, Zea Mays
gaaactatcgccgaatctagcgaaggtgagctggtccggctaaagtacaccttcagatatggggataaattcgacgaaccaaacgatgactggttaaaatgcatcgaagtgacaagtgatgaactgcttggatcatattctaaggcagaagataatgcattgtccacagccttcggaggtcgaggaaaaaagagattgaacagagtttttgacgctattgtcttcgtctatcccgactaccgttacccgctgcgggggcaagggaagaaaaggaaagctactgttgtggccgcctcggccgaacctgtgtcgaaggctacaagcaaaaagatgaaggtccttacccactggccacgctatattgaaccgaccgtggtgcctgagtttggc

SEQ ID NO: 27582 - DNA, 463 bp, Zea Mays
cgggcgcggatgagattcaccgtacccacttgctcgtcgtgcggccgggatagacttcgccgccgttgatcgctcaccgttttgcgccacgtgcttaagcgctagcccacgtcacggtaaatcatggtatgcatgtccggtgatcaccggaggactgccacggtgaaagccactcatcccgagcgctagtaccccttttcccctccggccgccagcacatcctcgtgaaattggacgccaccaccgttggaggctataaattgccgcccccgtccgctccgctaggtaattgcgcaaccagtgaagcaacccgtgcctcaaatcctcccctagaactccccaatttgggatttcccccaaatccctcaagaacaacgagcagtttgacctcgatgtggccagcacgtctcaggtccgctcataccttctgccctcccgttttagcgttcttgtgtgcccctga

SEQ ID NO: 27583 - DNA, 450 bp, Zea Mays
tggagatcgacgctcgatccagcgaggcagtcgtctcacggcgcctgtatcccttggcagctcgattaggaggaggtgggccgatccagggaggaggcgtcccacaacgattggatcaggcgacatggctcgcggctcatgctagaaggcagccaacagcggcgggcagtcggttccggtgagaggaggttccaacatgatatcgcattgaccattgtaacaatatttatgttgtgtctgacactttttactatcaaacttaaggatattatgctcatgaatatgacatcccagagatatccacgtatcttaagttggctcgtttttttacggtaaccacctggattcgtgcacacctgatatgtgggggtctcacgtaacaccacgctaaccattataagaacatttatgccatatctgacactatttacgttcaaacttgaggatttt

SEQ ID NO: 27584 - DNA, 298 bp, Zea Mays
ccgtggtcgttatgcttatggcacccctgactgcaggacctagatagatttggagccatagatcgacagagtcggagtctgtaataatgtttaaattagtgtcatagtcttattcagtcttagtcagttttagtttgcttatcatgtctttctatgtttatcgtgatgaagttggatctttgtaatgattgtcaccaaggtgtgggcatcccctgcaacttggtgtggttattaataaagttagtcatttagttgggcaaccttttgtttccactttcctctttatctgagaagttgt

SEQ ID NO: 27585 - DNA, 624 bp, Zea Mays
gtcgaaacggtatggtttagcttcggccgatggatcgcggatgaacgttcctgattagatcggcataactacgaaccggtatgcattgtggaccggccgatcccagatctacggatgcggtgcggacacccccgggatctaatctctaccacccgtcactcaatcaacggctcggatgggcgcccagaaatgatacgcaccaaccagatcaccgccaccccatgtgaatccaacggcccagacaccgtctaatctccaccgtctatctctcacccaacgaaccatggtcgtcttcttcctccccgcgccctaccatccccctttctctctcttcgtggctgtttgctcgccgacgaacggcgaatccggccctctgaccactattccccaacccgagatgtgctatgcaaggataggaacaaggcagagtgttgagagtgctcaccatcggcagtagatcgacgagctccccacaccatgaggtgtggcaacgcagcagtggcgcgccattggtgcaaagacacccgtcctctggtcatccctgcttccccgcgactagcagcacgcacccggtatggtccagcgcacgcaccagcctgcgtccaggataccgggatgaagcac

SEQ ID NO: 27586 - DNA, 437 bp, Zea Mays
acactacttcaacttgccatagaactgattctcccttagggcacccagaatgagacggagatgttgctcatgctcagcctcgatcttagaataaatcagaatgtcatccaggaacacgaccacaaagtcgtccaagaactcatgcaacatcatattcattgcttccataaaagcagcaggggcattagttaagccaaaagacatgactatgaactcataatgcccatacctggtgcaaaaagcggtcttctcaatttcctcctcacgaatcctcagttgatgataaccagagttcaaatcaattttggagaacacctgggcacccctcaactattcaaagagaacctcaatacgggggagtggatatttattcttgatagtcacttgattcaaagcgcgataatccacacatagccgcttgcttttatccttcttct

SEQ ID NO: 27587 - DNA, 324 bp, Zea Mays
tggaaccatatcttcaagagtctgatcaaagttcgccagagacaattcttgtagaccaataagggcagacagagtaggagaagggactccactactttccccactggctacatattgccgactgttcttccgagtcaaagggacttcatcttcttcctccccgtcgttttcatcagcaacacagacaacacccccattgggatcagcggcagatggagcacacccattgggatcagcgacagatggatcacacccattgggatcagcgacagatggatcacacccattggggtcagcgtcagtaaattcaggcacaggcacttc

SEQ ID NO: 27588 - DNA, 1697 bp, Zea Mays
catgattcaactcatgcacattctctgcaggtgtggaagacgatggtgagggcaaagcatccctagccatgacattgggtgcatcttggacaggtgaaggagatcatgttagcaacaccacacaagtgagttgaggtctttctgctcatgtttgttcaggggacattaggggtttacacttggagttgacaggttcatactgataattggccctttgatgtgaagtctgagatttttggagacaattgctctatctgctagatttctagtctctctctaggacagaaatgactgtcactcttactcgacattcttccccacagaaccttttttttctcaaacacggaggagggatgtgtatcattgtattaaagagaaaaagaacggttctgtacaacacaacccccttatctcactagagaaatagggcttgccataaaaacttaaaaacacatttttgaatgcaagaaactaagaaacacgttcacctgatacaaataccgcacgctggactaatcaagttagtcttagcccctggtctatacaattcctgaaactttctagctccagccaggggccataatctcgattcctctgtgaaatactgattagttttccatgagagagaggtaggtgccatcaaagacactttattcctgcgaatccacaaggtccaagcatataaaatacagcactgttaaatcccttcttgcttgtctggtcaatccttcgactagctttcctccaacaatctgtgaagctcagttcatagtgccttggtgcagctcgttccagcccaaggggaggtaatatcccatgccagaactgtcatgcaaaaacacaagtggtgagaccgattcttctccttgatcacaaagtaaacatttctcaggataaggaaagccatgtcgtactatcagatctgctgtccaacacttgtcctgaactgctctcagcacttcttttctttgtgctctgaagtctgaataatctgttatacctatttatgacaacttgggtcttttgggacaatgggagcaatttggttcacgtcgagacaatggcaattggtcaatatactacaggtgcaactaaatctgaaaatatctttggccatttatgatttaggatattcttgatctgtttttctgacacaacatgcatttgcattgcttggaatttgctacaaaactacttgtagtattgttagaaagaaagccttacggtccatccaatgcatggaacttttttctagcttactgctatgaagcttcattgcgatttcttttttcaaaagcactttggcattgcataaaacatggcattgcgctgcagggaggaaaacagcttgttggtttggtaggaaagcctgataaaaggaacgacatcagggagagcatggatctcgatggagttcggtcaggggcgaagctccgcaaatgaagcatgccatgacggtgcagcctcgcagggcccaagatatttggttaatggttgatcttgtgccagtatcatgcaaaagtgctgataaggctgcaccagtgttttgtcatgtggacctaacgtagtggtattattatacaaggttatcctaacttagtagcgtgtgtaaccagtggcagtgatggtgctatggttggacatgaataagaagtttctgcaacatgctatctacctctctttagctctgtttagta

SEQ ID NO: 27589 - DNA, 568 bp, Zea Mays
atagtagtcatagctttccatagacatagagcaacgcttgccatagacatagagcaacaacgcatagtcaccgagtagcagagcatgttagccaagcatcagtgttgaggcatagagcagtgaacagagcagagacgtcaggtagagacctagcaacgacaaactaatagtatgctcatgttatttgagacgatataggctcgataggatcagtttaagtagtcgttgttagctgatcgtgcatagaacctggcttacttcaacacctatttcagtagttaggagcagccatgccgccaccactagtatacatggcacctccacctgccatacagactctagtggttccaacattacagtctacggacttcaggcccgagtttgtatcagcacatctaccttgtatgctcgatgaccttcgacttcactactcctgtattggaccagttcgtagggtttggtagagtgacttcgaatctaccaatacctacactttagactcagtcaaccatagttattattgctacaacacctcttgttccaactatagtggttgcttaggttaggc

SEQ ID NO: 27590 - DNA, 389 bp, Zea Mays
tcactcggctgttacctctaaaacgccgatgttgccatcagtcactcggttgttacctctataacgctgatatcaccagtaaccacttggtcgttaattctaaaaacaccgatgtggccccgccatcattcggacgctacttcagaagcgccaatgttgtcaataataactcggtcgtcacccctaaaagcgacaatgtgacctcgagtgactcggccactacttctgaggcaccaacatcgcaggtaaagcgaacggaataatgactcgggaactccaagttactacccaagcatagcagacagagaacatcatggacaataaatattgcaacaatcgtcaactgaccaggaggcaaagtaattaacacaggaggagacgaaatcatt

SEQ ID NO: 27591 - DNA, 523 bp, Zea Mays
attctgatggaatgttatggaccacaaatgatttgaatgagtatgatgtgtcggtggtcgagccaataggattttctcctttttgtttctttgtttttttcctggctgaaagcgacaggaaacaaaacaagatgtggatttgaataaatagaactgcaaattcactgtatttagctatttatccgatagtatcagatgttctattgaattgatgaacatgttcacagtttgcgatttgcacatttccctttctcagaagtaaaaataccatacttcactgaatgctagcagttttactgtggctatttttcaatactcttccgcagttgtttgaactagcaaggttaagaatatctaggttttcacaggtggcatgtccaaagattgttatgtgaaaatgaatttgcacgttgattttctaagttaattagcaccacaagttagtttagcagttactttttccataagtagatgctgtaaaaacattatgcatggtggctctcagtcaccctataaataacac

SEQ ID NO: 27592 - DNA, 470 bp, Zea Mays
tgaagaacaggtttcgtatcttggacaacaagccctttcacaagtataagacacaagtcaagcttgtgttggcatgctcgatcctgcataactggattttaggctttggcattgacgaagtagtgcctaatgaggagggtttcactggcacaatggtagatccactagatgacaatggtagccagagccaagattccagtgccatggctgcaaagagggatgccatttgcaatgttatgtgggaagggaggggaagctctaggatatgatggtttgtttaccctgctatggaactcatgtttgtttgttgataatgtaataatatgatggacatggctgagaccaatttttttcattcccatttgtctcttcttgttgtgctgatattattatcctaatttgtacatgcaaaccagtggtaagatgccttcagtcccagctggtgatcagggtgggtttgtcccagctac

SEQ ID NO: 27593 - DNA, 356 bp, Zea Mays
gttagcaggcagggcgagctgataggcgactggattgattttcttgacaatctggaacgggccgaagaagcgaaatgccagcttgtggctcttgcgttctgctactgaggtctggcaatacggttgcaacttcagatacacttgagcacccacctcaaatgtctgctctgatcttcctttgtctgcttgccgcttcatcctctgttgtgcacgtagcaagtgcattttgacttgttgcaacatctcctgcctggtgtgcatcaaactcttcagatccaaaacagtgcactggtcggcggtgtccaagccaaagtgagatggagcatgaccgtatagaacttcaaatggagatttac

SEQ ID NO: 27594 - DNA, 583 bp, Zea Mays
cagaaaatcagatgtacgtacgtgcgtaccttggaggacgtaggtaagtcggagtagctggagagcgtcgggccaccggcgccgagcagatccaccaccgctatcgcttgaggggcctcggtacgactttttgtagccaagttggtggacggattaggatgagtaaaatggctccaccccactgctgctgaaaccgctttccctcgtttctatgcatggaagacgcgacgtgtgtgggtctgctggaattgctttccccgtcccctacggagcgacgttcatgggttgtttggctcatgtcacggtgcatttggcatgagaccacttgccatgtcggtcgttgctatgaacgaaagacatggcgtgcatgggtttgtgccattttgtgggtgactgaggcgcgcacgcacagcgcggggcgcgggttcgctgaggtcgggagtggatagacaaattggattagatgcgatcgatgtgaagagaatgtgtcttgtgggccatttcaaacaatagaaggggttatttgtagtaatatgacgcgggacaaccgtcaaaactggtgctttcatatagtagagattag

SEQ ID NO: 27595 - DNA, 573 bp, Zea Mays
gcttgcacgtcattcctaagtgcaatgagtggcctcctaatgccgaagcgagaccatatgggacactgaataatcccttttatatcctcccttttgatttaggtcaatcttcacataaaaccattcctgcatccaagagcctggctactttttccgaaatgttggcacaggataactagcctctgagcggggcacgaagctgtagcagccaaaattgttgtggtattgttctttcccagttgccttcgtctaatatgataattcgtgaatattgcagaaacacctggcatctggctctaatccttggctcctcatggcccatataaaaaaacactactttgataacagctttgggggtaagttgatgaagataaaattcaaaagtttttaaaacttcgaccaacatcttatccaggggaaatgaagtccagctttcatgaaacttctgaagatcaccacttcgtcagcttagggaagaggaacagtattctcccctctggttctcacgattgaagtatcacgaaagtatctgactctcatagcttcgatctacccttgtttaacagttgactt

SEQ ID NO: 27596 - DNA, 383 bp, Zea Mays
aaaaaatcatcgccagtggcctggggtaataggatcattactatgccatgaacccaccttcagcatgcgcgaagaagtttcccggagctcgggcaaagacatcacttccccgggaaccgcgcatatccccattaactcctcaacaaaaatcccataggcccttggcccagtctcatcgtcccccatacctaatttcctttttcgagtggctgcaaccagagccttcccctttgaggtgccctcttcagcccgaggcttcacttgcttgccgcgatcatcaccgacgtcagtggagtccccctccgggtagggaccatatggcaaactatatattcaactcaaagacacggttcaacctcacgttggaaccgcggatatcccag

SEQ ID NO: 27597 - DNA, 292 bp, Zea Mays
gtagtcctgccgactcctctagctctggctcttcgaccatttttccttggcttcgacaggatgcttcggcgcttcggtcgactcggctttctcctgtcccattactttcggcacttcaaccgattctcccttggtaccggtaggtgcggcgaattctggctcagcggcggaagaagtcctctcagcaagcttcggcaccctggtcgtttcaatgtacctaggtcgatgtgccaaaaccttgatctttttaccctttggcgtagcagagatggttgaagtagcagcttttctt

SEQ ID NO: 27598 - DNA, 549 bp, Zea Mays
ctttgaagccctatatcttccaaatatgaagattttgccctaggtcaacacatcaagtttgtagagctataaaaggaggacaactttgctatagggattatgccttggtgccatgaagtattttgagataattaggcccaaagatgggctgtcagactgcctaggtctgaattcaggctgatagtgtgattggacaatctttggacttggattcgaccataatccagccagtgtttggctatggttgttatagtaagaatgtagctggatcattaggctacaactttgctacagaacaatggtcttgttgccatgtaaaattaggaggaaatccgccccaaacatggtctctcaggctgattgaagaacaatcccatggtacaataacagatagaatcaggtcctaatcctctcgctgccgacgagccacgcgcagattcgtgctatcgccgtggtgattcgcgctcggatcagttggatagcaccgggcgtaagtaaatatcacgccgtggatacactccgaccactattttactccggccaccgtac

SEQ ID NO: 27599 - DNA, 401 bp, Zea Mays
aagacaactgtctttgacagtattatacaaattgtaaactcagcaactgaggtttgtagcacttttttgagttttttaatctctttatgctgtagtggtactccagtagctcatactctgcagcctgcaccttgtaattctatacgatacagctttatgcatccagttttccagtacctgtaatattaatctatgttcttacttcaaggctcaacatgatacgagaagcttggcctactggctgtccaacttatccacattgtcagttctcctgcaacgttcatttaaagccaccagggcaactgcctcaactccacatagacgaagaatttcctgtgaaaggatttttcaagccaatcaaacttcaagcagtggacttgcttgtctcagtgctcaatcag

SEQ ID NO: 27600 - DNA, 322 bp, Zea Mays
ccttgccatggatcctagatccaccactcgtcctcgccttctggcgccaagtactgcactactacgatgccgctgatagatacctatagctagctactgcttacttggtactttcgaggcagaggcaacacatttttcagatttgattttgtattgacacgaaggagggcagctgctggagtgcttgggtgctatatgttcatctgcttgatctggtctcacctagaagtttgattgggcctttgtttgctaatagtgcaccttcgttgtgccatgttggatttgcaagtcgacatgtgttgtagtatgagttgattatacc

SEQ ID NO: 27601 - DNA, 395 bp, Zea Mays
ctcgaatggcgagctcgggcaattcgctgccgtgtcttgggcgctcggccgcggcaaattgactggagaaagaaaagagagaagagagagaatcggctggaggtagacgacgcgttgggttggggacgacggtagcatagttgggagcactcctgtggccgtccaacctcccctgtggcactcgtgctaggtcctgggcgagcgcagggtagccggtaatggcgggtgaagataggtttaggcgtccgccgtcgtgggcgctcgagccaccgtgtctgggcgcggtttggagaagacacacggtttccgatcatttacaaaacaagggtcaatattagatcgcttaagggctggctgtaaaccattgtcaggttgatgaacgaaccagatccgaa

SEQ ID NO: 27602 - DNA, 415 bp, Zea Mays
tgagcaaaaccttatcagattcatgggatacttgtctgcgtgtaggaaccatgcaggtagaaaatggagatttcgggtggctgttttagatgtccacggcgatggcgccgccgccctggatactgccgcgccgctgtcctggggtcgcggggtgggagacgacgttctgaccgttagattttattggttggtgtggattagatctgggtagcccttcgcccgcaaccgttagatgtcgattggatggatcggggtggacctctagtatttaaaatgtggagcgttggatggcgatccgacggtctagatgcagtaccggttcgggcgggggaaagatttaatctgagccctaggtttctaatcggacagctagagtttacccgtaccccttcggccgggccattttgcataagag

SEQ ID NO: 27603 - DNA, 511 bp, Zea Mays
tggcgaccttttctcccactgcaaccgcctaaactcacgggtggagagcctagagcaacaaatcaagaaattaaaagaggagaggcatccctccaagaaagtctcaatacagcagaaggtgaagagcccaacactcgtgaaccctaccgaaccctgaagatggattgcaataagaagttaaagaagctcgcccccactaagaagatccggaagaggaccaagagccaaggatgccagactgaacgaaaagaggaagccccaccaacactgcctccctccaggatagaaaacatgtcagacgttgaggatatgtccctagctagccttaacgaccttctcagggaatttggggacaccttagaaagggagtttggaagcaccttaggaagcgctcgcgcgtagtgtgattggtggcaacttatgcttgtaatgaacttatgtgatgaataaaataacgtgtttgaaaaagaattggcatgagcatagtagtaatcctctccccctggtagat

SEQ ID NO: 27604 - DNA, 600 bp, Zea Mays
aagaaaagaaatactatagaatacaaaacaaaatttataaaaatgtaaactttatccatactagtaagatcaagatctacctttactttgagtacaaaattcacattcatagttgaattcaaattggaattcaaaagataaagagaaaaaagggaaaacatagaagaaataataaaaggggacatcctgcgcattgggcccaattcattggaaccggcccatcccccaacaccactgcacagcccttctctctgcgttgcgtgcgcgttcagtcaatgtcacgcgggtcccacctgtcggatcgatcttctctttccccgcacagcagcaatttgacctgggcattgtgtctcttccatccggccacatcatctccctcctccgctcaccacggctgggctagtaccgttggatcggacgagatctccgctaccagaagtctacgaaatccttggaagcgatctccttgccgcgcgacgtggacctccaccatggacgcatcgcgagcaccacgggtgagagctaggatttcggaatcctaacgaactcggacctcgggcgataaaggggagctcccgtgacctatttcttcccctctgc

SEQ ID NO: 27605 - DNA, 303 bp, Zea Mays
aacaagaaatgcatgctgaggaaagcggtgccatccctgctatccaccttgttgttgacggtgttgctgacactgccctctcgaattgggacacattggaatggacctagcctgggggtgtggaggcatggccattgcgcgcctcccttgttaccattgtcattgttgccagtgttggtgctaccattgccgtggtgcggcgacaagtgccattagtgttgggaggagcaagtccagtggagccgctggcgatggcagttgcaagttgatatctctggcatcatcatcagaggagcctagggc

SEQ ID NO: 27606 - DNA, 274 bp, Zea Mays
actcaatgggccactataatatgcattggtcgctcatacatttccatcatttcaaaggctgcttgataaagttcttgctattgaaaacaagcgtgttcaaatgggagatctgaagaggaaggcgatatcccagggacagggaagcagcagtgttcgtcctcgctatggttcaccctagggtacactagttcgcactgaaggaggccagcgcccagctcagcactcacctcaggggactccatcgactcgtcaggctacccccactagcaccccg

SEQ ID NO: 27607 - DNA, 510 bp, Zea Mays
acgcgtccctgacccagcccgagcacgagttcaccggcgtttgcccagagaaccccgtaccagcggctgcacaagccatgaccaccgtagaccggccaagccagccatcctccaccccatccgacccttgggatagcttctccgaacctcagtgaagctccccgagccgaggatcgaacaatacctcaccggagacgccagatcgacgtcgccggacttcaaccggccatcgtcgcacgtagaccgagccccacggtaagtcattcttcgattccttgtacctatagcatccttagcatcccgtgaagctccatgtgccatttgattgagccctaccgtcgtgagaaggctggagcacatgccgccgacgagcccgaccgcctgcgcacgcgatcaaccctatttcggccatcaccgtcgatgatccgcacctcgacgtgactgtcagaacctcccggacctcacccagccctttaccggaccttcctcaccaccaataagctgcgccac

SEQ ID NO: 27608 - DNA, 306 bp, Zea Mays
aactcatttatcggcaacctccgttattttttctcggtaaactgaatcgccaagattaccttttggctgcttacaaaatgttagtgcacacaccaccaactttatcattcgttttttggaaacaaatcggaaagatatatcagcactttgtgcatctcacgtaaaagatgcctgttgttgggacttgggaggaggtcgagcttttgtgccagaccatcaacacgtatgtgttttggcgagattcagtttctgttctcctattctgccagcccaaagtaatagactcaatatcgaacaagaatatag

SEQ ID NO: 27609 - DNA, 453 bp, Zea Mays
gcaggattcaaggtttttgccgtttctaatacaacatctagcacatttaccatcctccttctcttaggagttgtggcagaactcttttgtgtcttcagcgctgttgcttctgttgaagggcttaaaatccctagcatctttgttacttcttcagtttttgacctttcagccttatctttgtcaaccttcgtttcaactagctcaaccgaaggtgccttcggcattatagccggctcttcggtcctctgcacgggaggaacagtttctcttgattcagcatctgaagaggcctccccgccaaactcaggcaccacagccggttcagtgtaacgcggccagtgggtaagtaccttcatctttttgcccgcagccttcagcacaggctcagctggggcggccaaagcagcagcttttctcttcttcccctgtccccgcagcggatagcggtagtcg

SEQ ID NO: 27610 - DNA, 418 bp, Zea Mays
gaatcccagcgatgcagagataagtgccatgctagatatgttggctgaagattcctctgatgcagctcctgctgaaacactggctgtagcacccatcccagaggctagcaaaactttggatatttagaggtctgatagtgttctcccgaagcgtcctcgccgagtcaatcaaccaacttctcctgctgaggggaagaaaaagaaaaagagacgtcttcgccgagtgtcatgcttggatcaggatgtcggtccttctgctcctgctgctgaagaagtgccagtgccagtttttgctgaagctgatcccaatgggtgtgacccgactgatgctgatcccaatgggtgtgaccttgatgatgctgaacccaatgggtgtaatctggccacagctgatcccaatgggtgtaccgtccgcatt

SEQ ID NO: 27611 - DNA, 278 bp, Zea Mays
taacacgtgcattcgataaatctatcatttctagttttccatcacacgatgtccaaactaaagataacctacaagatccatcggctgcaaatgggtatgcccaatcccaaccactttatggggtgctaatgaattcctatagcgaacagtcacatcctctgccacctatatgggaggaacaaacgcccttgtgcacgactggacagtccaggcctgaatccggacgatccggcctagtggcagtcgactctgttccccacgatgagccaccgaagaca

SEQ ID NO: 27612 - DNA, 322 bp, Zea Mays
cgtgaccggggttggggaatagccctcgccgtggatcgtcgcgtggacggccatgattagaagcggagtatcggttcggccaagggagtgctggtcgtccgatcggtatcttacgggactagggcgtgttccaccgttttagatctagaccgtagatccgccatcgactggttctggatcgatctctggttgtagtgaatctcagcctttaatcattaatcatacggttactgcgtcataccgcttcgggttgagggtagtctaatctggtctgttggtttgtaattcgatggttccgatcgagggatagcctttcggtccg

SEQ ID NO: 27613 - DNA, 293 bp, Zea Mays
cccatgcatatcactattcaactctactattaaaaaccattatctagtgaaattaaagatgcgcattttggcattgaaattaacaaattgtatgatcaacagtcgatgccctttgggtcaacatagagtcaatcgccaagaaacagtaccgagaatcgatgatcacgacaagggacctacgcagagagatatgtattacgaatatcgcaaatcgcgggcaccctagcgatccgataatataccacgcatcaacgactgtagcgatcgctacgagggggcgggtgtagcagctc

SEQ ID NO: 27614 - DNA, 528 bp, Zea Mays
ggaactgcagcacagaaacaattggagcatccttggcttgcaggagcgtgcatgtcgagacggagaacaaggatgagcaaggtatcaggcgaactgagtaaatgacacgtgacacacccgagtaagctatgaattgcgggcgtcgactataaatccggcgtgagcgtcgtcttgctcttgctcccagttgccttgccttgcctgtccccatcatggcctcaaacctcatctccgcctccagcctcgagacagagacagccatggcggatcctggcgaaggacctactgctccacccccgccacggctgcaggaaatagctcacgatgtgcccgaccatactgtcacgcaattttcagcctcacaagacactgaaaccgccgccggcgatgctgccacccacgactccgctcagcctaaagcggagtcggcccattgtgcggttggcgagccggagcaaaccacgacagaggcagacggtcagccacatgtcgcaaccatgccacaggaagttgccgcattgccgtcgc

SEQ ID NO: 27615 - DNA, 354 bp, Zea Mays
gggtgttagagtgttgtttacgttactggctatacctacacatccattgtaatgggcctaggctcacaacactcagctatttatatacactccctaccctgattagggttagggtttcccattccaactgaaagattagctctcaaaccagaggcatgccaaaaacagtccaacagatccttaaccatgagaaggtcattccttgagggtctcaaaaaaagaaccacatcatctatatatagggagatctgatcgaggttatgaccgctagcaagctgtagatgctatccaactaaatacaatgctatgctacataatgcttaccacatatctgagcaacgtgatgcattggcg

SEQ ID NO: 27616 - DNA, 419 bp, Zea Mays
gggaggtccaatctggtggaatcgacgggcaccgatcgagctcgattggggatttcggggctgggtcatcagagtgggcccaacggcttgatcttgatctgaggtggggcggaggcgagagaaaagttaagcgattcgggggagggagttcgtacctaggggcagggcgtcagagcttccttgtgtgcacggaggggtccaggaggaggtagcagggcatcgttgtgtgcacatcaacggtgcaggccgcggagaagcaaacaacacagagcatgaaaatggtacaatacgtaactacatatgttgtagtgtatgcccctgtattagtctatctttctcatgcatctattaaaagaatagttacacacttaaagaaaatggcacatctaactcacaatatccaacaattaaccctaatc

SEQ ID NO: 27617 - DNA, 391 bp, Zea Mays
tcaatggtgttgttattgatgtgccaaattccccaatacttatcatatttctctttcccatctctgctgcaaagtatcttcactatccatccaagatttaatcaacaaatggatttcaccaatctcatgaaagaacgtattacaagtgacatggagagtagatgagacacgaacggtaagattgtggaaatgctctagaaattcagccatctactttacattctcccaatcatagtcattaggatgaccacgtccttgcctctcttcagatagctcaattacatagttaagttcctatttagccattctcatgaacacctcatacacaattgtggccttcaacatttggtatgtgtagttccatcttattgggacgtcaagcttcaaaaat

SEQ ID NO: 27618 - DNA, 475 bp, Zea Mays
cggagatctcggccgcccaattacaaacaagcggcccagatcaagtccagaaggtagtgtttgagcggtcaacgtggaccgccgattccatgatggacggttcggattttgaaatggctagatccaatcgcgctcgtcagatccgaatcgaacgccgcagatttacttggacgaaccattagctagggtctaatctcgaccgcacacggtttaatctacggctagcagttgtcttccttcctcagccgaaccagcacggcggcgcgacacagaccgtggcggcgacggcggccattgccggcgatcccataccccacgatttcgcccacacaattcctaactgtctagcgcatctcaatgctaggattcaatttgagtcgagggcgaggaattaccagagaagtagatgagtgcggtgctatccacgcggacgcggtggagaagaactccggtgaggaatcaaggtctcaccgcc

SEQ ID NO: 27619 - DNA, 621 bp, Zea Mays
atttttcttctgctaatgtggatggttgtttgtcgttcttttggttctttcttccaggactcatgaattccacaggtaacaacctttgttattctaggatatgttaattcattcttctttaccagcatatgttattacagaatttctcactggccagtttttttaaaatgcagcccatattctgtaaaagtttttgtgccatgcccccaaaatgcacgggtgactctgaaggttgatctaatatttgaagaatatggtaatatcaccatccggtagtactttccttcaatgttgagtctcggtagattattcacatatcatttttatgcttacatagtttatgttttcaatgatatgctgaagttggtcttgatgtccacaagaagcatgtagtaagcagggaagatggtttgtacgtgaccaaggagcatgggatagataaccttgaacctacgtacaatatcccttcagagatttgtttggttagctccaggacaactcgaacaagccgatctcaatctcacactgaacagaaccctctttccaaagaggtttatgtcatagaagatgatggcgctgctgtgagtgctgtcagtgctctcgagaaagctgatgatgcag

SEQ ID NO: 27620 - DNA, 787 bp, Zea Mays
ttaaatggacaagggccaggtcaacacccccttagtgatgtgtcgtgtcatgatttgggcacagtgtcaactgagcaaggatcaggttgctactgcctaagtggtgcgctacatcgatgtccaggtgtagtgaaaaatgtgcaagggtcttcacatcatcgacacatacgaagggtaaggaagctagtcgaaccaattagaatttgtctagatagttggaacataggatcacttacagataagttaagggaattagttgagacagcaactaagaggcgtgtaaatatcttatacgtcctagagactaaatagaatggtcggaaggcgaagaaggtgggcaatactggcttcaagctttggtacatagggacaactacaaatagaaatataggagttttgattgataagagcctcaataacagtgtggtaaatgtgataaggcaaggttataggattatcttagtcaagcttgtcgtgggtgatttggtcttgaacataattagcacctatgcccccaaaatagaccacgatgagaggactatacctattagtgagaagacttagatagttagatggcatggttagagctatacctattagtgagaagtgtttcataggaggtgacttcaatggcatgtaggtacaagtgcaggtttcgacgcagttcatggaggttttgggtacggtggtaggaatcaagagggagagaaagtcttggaccgcggtagcttttgacctattgatagccaacacttcctttaggaagagactcccatttagtgacata

SEQ ID NO: 27621 - DNA, 344 bp, Zea Mays
ataaattcaagagatgcctcacgacttgggaatactcctccaccccaaattttgcattgacatctctagagaattgcatccaatttcccaatccatgcttcatcttgtgcacttgtagccacatcacaacattgccttccatgtacatggctgcagatattgcccaaactgccttaacaacttggtagatggtgaagtagtcttgacatttctctaaccaaattctaggatccgcccttggaacttggggaaagagtacttgggttgtgctggttatccatgtcctcctgcaccctgatctccaacatctctgaaccagttggaatttgctcttctttctcctc

SEQ ID NO: 27622 - DNA, 323 bp, Zea Mays
gcagccgtcttgcattgcatctttggcagcaggcaacatatgagacctaactacagtctacaggccacagatctgcagatctggaaggaaaaccacatcagtccagggaggaagcatctcaagctcacctccatatgcatgcaggtgcaggcaggcactcattcattgaagctcacatgctacacacaggacacagctgagccaatggtaccatcggcaggtcaggttgaattgagttcgacagcaagacaaggatgaagatgcacagaatctctctttctcatcagggagggagcgaccgtcctctaagtattatattaaga

SEQ ID NO: 27623 - DNA, 315 bp, Zea Mays
gaaaggaagttgttatcagatggctgttgatagcagtgaagcagacccactagagatcatcaaggttgtgtccgagttcccagatgtgttcccgaaggacctaccaggtatgctaccagagcggaaagttgagtttgccataaagcttcttcctggcaccgcacccatctttaagagagcttacagagtatctagaccagagttggttgagctcaagaagcagattgatgagctgtcagagaaaggctacatccggccaagcacctcgccttgggtcgcccttgtcctattcgtggagaagaaagatggcaccag

SEQ ID NO: 27624 - DNA, 428 bp, Zea Mays
tcgacacaaatgttcggttggtataagtagaaactgttctggattaattagagaggtggtgacatgccaaagtagtcatcgcttcctctatgtttataagtcgagtcgacgtgcattatgcattcgtaaaattatgcttcacatatagtgtatggctgtgctcacgatttcgagtagacacttcaagtaatcaagtaggttcgtgatacaagttgtgtaatgcagttagttgttttgggataattattgaaatgctctgttcatatgataaatatgtatgtgttcatgatttgggaagtaagtgcatggtggttgcgagttggagattggtggtttgcggttcgtatgatttggtcgatgtgcgaatatacgtgtaaatatctatgtttacaaaaatgttgtagtgaatgttatgtctcggatttcga

SEQ ID NO: 27625 - DNA, 424 bp, Zea Mays
gttacatgtggctagtcagttcacacgatttcacaacaatcgctagaaccagcggcatggcaggttgaatgatgtatgcttaaactgtggcaaccccaaccacttcatcgctagtttcccaaagaagggcaagcaggaggttggccagcgcgaccaccactctggtcagagcaagggcaagtgggagtacacctttgtcaagtacaagtccaagggatgattcaactaggaggctctcaagatggagtacctctaataggaaaagatcaaggagtgtgccttcctcgctcgctcagcgacctcgaccatgactgcgacgatgcaacttcttccttaagcgatgagtagactaagaagcaggtcaacgacaagctgaatatgctatgcttcatcacaaacactgtagggggcctttgcaccatgg

SEQ ID NO: 27626 - DNA, 299 bp, Zea Mays
aaaagtctaaagtatatttttacccagtcagaactaaacatgaggcagagaagatggcttgagcttattaaggattatgaattagaaatctattatcacctaggaaaggccaacgtagtggcagatgcactaagtcgcaaggcttcctgccattgtcttacagtaaggactccggacaccacattatgtcaagaaatggagaaattaaacctggggatgatacaacatggaacctttaaccaattgaagcttgagtcgatttttctgcaaagaattattgatgtccaaaggaatgataa

SEQ ID NO: 27627 - DNA, 458 bp, Zea Mays
cgtctggccacgacgaggtgttcacgggtgcggaaaactgatttggggaaagaaagaaattggagctctctggtggctaatcggaggcagtagtggatgctttggcttcgtgatgacttaatggagctagggatgtgctcaatttatagtatcccagagcggtggctcccaatttggtcaaggcatgctggcggccggagagagggaagagcactagcgcaatcgctgcgtgtctttcaccgtggcaggcttactgtcgacgatccagcaatatagaacgacttactgcgacgtggtgaagcttcaaggcacatggcacccggtctgcaggcggccaactctggtgagcttatctgagccggccgtaaagcaagggggtacggaggccagcccctggcgttatcggcggtgaagatctttttaccctaaagcgttatccgggcaccagtgagcacgaa

SEQ ID NO: 27628 - DNA, 1003 bp, Zea Mays
gaacggcaaaacatgagatacattttttttcttgcacacccaggcaagctatttagatacaaatttgtatagcgaattggatgtctattgctgctttatcttatgatgttcattcacatgcttttaaaatggttgctgtaccaggcaagaagacataatgtgtatagttatagtgaaaattgttggatgttatcatgtatttgctatggtgttgttctcttgtggttgatgttctagatttttatgtcctgttactaattaaaggtttttttcttttactttttagtggatctgtagaggactttaattctctgaaggagtgcaatggtcaagttgcctgcactgagaatgaagaggatgtttcatggtgatgattgtgctaatgagttcaaaatcaggaccatgaaatccatgaaagtttcacactttcatgtcagcgagttagagcagtcagctatgtcgaacttatcagataaaactcctcaagatggtaagtaattatatgactggatgttcatagacttggctatatttcttggaatgtggtcgattgctattttgttttgcatgaagtttgttttccttttcttgcaaggacacctttaaattagctcaattttttgttggttatctttgatgccgtgtcactgggaatgcatttatcatttatgatacatttagaaagtctacaaacggtcacacaatgtttagcttgataatctcattaataattttcctcaaaaaaatctcattaatatttcacagttttttcttttaaaattgttaccagaaatttgctacaacaacaaagcctgttccgaacaatgtatttacatcatgcattgttagcaacatccctaggcatgtgctgatgtgtatattttatggattaacagcatctccttgttctgcagagccagacccaaccattcaacttgctgaccaggatattagggtaacagaagcttctggcttgcatgatctgattggaggaaaatccatg

SEQ ID NO: 27629 - DNA, 556 bp, Zea Mays
agcagtcccagggatctaatcccgaccgatcagaccgagattgatggctcggatacactccggacgaccaggtacgctcaccaaatcccggtcgctagcttctcatccatcggccaaccaacgccccgcgtgtttcttctccctttcagccaggaacggtggcggcgccagataccgagcggtggcgaacccgccggagctcggctccgagccaacccgacagccccgcccaaaccgaagtccctacacgcactgaggatgacaagttgagcatgcaggtagccgacttacctgccattgaagcagtggagggagcctgaccaacgtccagcggcatcgctgtccaacccagcgacgaagcgacggagggctcactgtgaagctattaacaagctctggagattccccgatgccacgaagagatgccataggcactggagatcatctcggattgcgccctgaaggctatggggcagcagggcccaggttccgcgccggtgatcccctcctttcttctctctctcaacgggacataacttctctctggacgactcga

SEQ ID NO: 27630 - DNA, 359 bp, Zea Mays
ctcttatgtaaaaatgaaatggcgaaggggtatccgttgacacgagccagatcagattcagatcctatttcccgcaaaccggttggagcaggagccacacgattcaagatcaacgttcagggcttaatgaatcctagatcggatctccaccactggattctgcatcaatggtcgccactcgctccgattgaatcactaccaagcttttaatcccagtcgttcaacaaagatcgaacaacaaaggtttgtcttcttcctcccacctcaatagacggcggcgcaagcccgatacacggcagcccttgtgctggcgacaggatctaccacacatcggagcactgcccgaaccccgcctagtg

SEQ ID NO: 27631 - DNA, 895 bp, Zea Mays
aaaatcatggttctacttgttaggcaggtagttttgtgtctttccaggttatcacacctatatatggctagcattttggcctaggatggagggatttcatgatgtggtagctcaatcttgggtgtttgttccagcagggccttgcccacttatcactttggccaagaaattaaagacaacggctaggagtctgcagagctggaatgacaaaaaagttgggaagattaagctgcagcttgagatggctagggagctcctacatcaattagaggtggcgcaggacaatcgttccttatctcctgccgaattgtggctccgaaacatgctcaagaagcactcccttgccctgtcctctatctctcataccatggcaaggttgaaatcgcggattgggtggctcaaagaaggggatgccaatacctctctttttcatgcacaaacaaggttcaggaagaaaaagaatttcattgcagcaatacactcagaggatgggcaaatctggactgcccatgaaggaaaggcagcagccttctttaatttttatcaagggttacttggaactgcagaagtcagggatgttacagttgatctggaagctctagggatgccatcttatgaccttgatgcccttgatgcgcctgtctcggaggaggaagtctgggatgcaattaaggcccttccttcggacaaatccccgggtcccgacgggttcactggtagattttacaaaagttgttggtcggtaatcatggctgatttcatggcggccgttcactgcatttgggctagaaattttagaaacttgggcccgctgaattcaactttcattactcttctgcccaaggtggagggggccactagtgtgagagacttccgcccaataagtctggttcat

SEQ ID NO: 27632 - DNA, 594 bp, Zea Mays
agcaccatatcacaatggagcaactttgcttcatcctgagtatcacaggaattccataaacgagaaacacgagcacatatggtcaaagaagtgttcccatgctggagctccgggatcaacatgtctcccatctaaaaggtaaaacaggaagaaaaaacataagagcaaggacatcggaacccatgcatgaaacagcatgtgcaaagcatgaccaaaaaaacatggctctcgtaccaacctatacatagcacacatcagcagctgcaaacgtagcaacaaaagtataagaaaaaaacgcgtaggtacttgatgacattatttatttacaaacgccacacggggcgctacaacaaccaagtagaaaaagggctaagtggcagccgcatcagcggcagcaaggacttcgttgtaaacaacatttcaagtctgtgagccgcacgagccatcttcattttcaatcaggattataagtccatttctagacattgaacgggagacagccacataaagttggccatgtgtaaagacaggtctcttgaggtaaatgccaactcttgataacatttgcccttgacttttatttatcgtcattgc

SEQ ID NO: 27633 - DNA, 434 bp, Zea Mays
taatttattatatccaatggcaactgctcatttaggttaatcgagagacaaatttatttaggggcacatagagatggactcttctcagatcgctcaatataaattggtcaacttgtcccaaactattcaaaaccggatatcaatctagcatgccaatacatcacaaatagcatgcgaagatgttacgctttacaatggtcgaacctatataaattgtcgtcttgtgtttactattgagtttagattaatgtcgatgctcaccaatctctacgtactccccttaagcctgcaatatatagacgacgttgacagtcatcagacaccaccaatagtatggttctgacaatagtatttacgcgcatcacgtgatcctcatcgtcagaaatgctgaatcttgcttcaatataatggcagaggcatctattttaaattaa

SEQ ID NO: 27634 - DNA, 762 bp, Zea Mays
gtcaggcactctgaacaaattctcatggtacagtaactgaaaaagatcctgggttcagatcccctcgccgtaggtgatcccgcgccgtgatcctcgtcgtcgttgcgattcgtgctctatggggtgcagataactcttaagggtaagaaatatcgcgtcgtgggtgaactcaggccactgttctgctccggctaccgtactcgcctgagtcacggccgcttcgaatagactcaccagagttagccacctcgcgaccttgcgccacgtgctttggtgctttaaccacgtcgcagtgagttacattagcccaccctttgatcgctggtgagcttgccacggtgaacgccatgaattgcttgcgccagtaacctcttccctctccggctgccacggcgccaactccaaatcacgagccaccgtccccgagtcctataaattgagcacaccctcgactccgctatgtaattatgcacccaacacactcactcgtgactccaattactcaccagagagcctcaatttgaaactctccccaattcggtctagagcaccgccctgcgtgagctcactgtgcccagcgtgctacaggtccgttcatgccctctgctctcctgttttagtacccttatgttctcctgatgctcctcgacccattcaattaagctagaccacgctagatcatcgggaacacctctgttcatccgtagttcgcgctgtcaccgtggacagtgtgattaagagctcagatcgtgcaattgatcg

SEQ ID NO: 27635 - DNA, 275 bp, Zea Mays
atagagacctctactaccttgggtgctgacgcggtatccttgaggtccgttgggtcgaacgtggccgtactcccggcatggtgcaccgtgtcatccgtccagtgtacgggttagcgagcccgatattgtcgtggtggcaatgcagctttgtctttcatcacaaaccttgtgtcactctcctgcatgcgtaggcatacacctagtgtggtgtatcacctcgtcctttcttgtatgtggattactatagagacatcatgttgatagggactcctcgg

SEQ ID NO: 27636 - DNA, 452 bp, Zea Mays
gagaattgtggacaaactgactttgcagacagagcctgcttcacctgtcagggttaaggtggctaatggggagttcatgttgagctcgaggagggtggcagcattagagtggtgggctgatggacatacctatatcagtgacatgagagtattggatttagaagcttatgacgccatcttgggatatgattggttgaagggtcatagtcccatgcaatgtgattgggataacaaggttttggtgttcaaggatagaggtgtggaggtgcaattgaagggagatagcatggagaacaaggaggtgctgcaagtgtctgctgctcagctgcagaggtggatgaaagggaatgaggtatgggttctggtgctgttagagtcaatgcaggaagaagaggttgaaaagcatcaagaaccattgcagctcatactcaaggagtttgaggatgtttttg

SEQ ID NO: 27637 - DNA, 686 bp, Zea Mays
aaactatccctgtcagaaagaaggcagtggggtgaataactgaaaattggttcaggcaaactgaaatggtaaccagaatttatagtcaacttttggatgccatagcttctaatctgagaagtttgggtctatgaaatctgtagaaaattggtagaccttggattactaaacaagttctattaacagtgattaatctgtcttactcagaaaatgagagaaatagctagctgaagatggggggatcagttatctgttgaagattcagaagcactgaaatatctacccttgatatttaccctccttgccatgaccaactttggaacaggatgaagattgggatggtgtgctggcaggggtattcagattggtgcatccctgaaatatcacctgtgcaaatatcctgtacagtgcacctcatccttaccccctcttttcttttgcccatggataatctccaccctgcgtagctaggctctatgtgctggcgtggatttactggaggaagccacgactgcatttagagttcatagctgtccttgctgcaagttcaagcatccaacccctgtgatcttttccctgcctatataaagagcaaccggggagggaaaggtaggaacccaaccagtgatccgtagttcaccatcaaccatgttgagcagtcatgattagtagtactacaccccaaa

SEQ ID NO: 27638 - DNA, 302 bp, Zea Mays
tactacgatgtggtaacgccctaaggcacgtggcccacggtcggtaggcggccaactccggcgaggaccactttgcccgaccgcagcccaagtgggtacggcaagctcaccgtcgaccggatccgagcctatccagtgccaagatttttaccctgccgtgataatctccttgccagagagcacgaattgtggcgacgacgtggattacggtgcgagggtcaccggcgacgaggggagctgcatctgtgatctttttgtggcactgtaccatcaggacgatattcagagcacctgacagagcg

SEQ ID NO: 27639 - DNA, 324 bp, Zea Mays
aacttttctagtcagtgaagatatggaactctccctgcaataaatacgaccgccaatggtctattgctaccaaaattgcaaggtaatctttttcatatgtcgacaatccttgagtcttctgccctagaggcttactgatgaaagccaaggggcgaccgtcttgcagcaaaactgccccgacaccattgtggcaagcatcagtctctatacaaaaagttttgttgaagtctattaaggaaagaactggagcagtactcaggagatgctttaaggagagaacctgagcagtactcaggagatgctttaaggtgcggaatgttacct

SEQ ID NO: 27640 - DNA, 316 bp, Zea Mays
agggcaaatcacaccagaacagccagcaaagctcacaatcttcaggaatgcagcaaacttcctacaggccatcagccccgagaggcagaggatggagaagttttggaggaagatttggcactcagcccagaagattgttcagcttattctgtggggaggataagggacacacaacaaggacgtgtcaagtcacgatccaaaagcagaaggagatcgctgaggccgaagcgcgacagaatcagtcgaaacaggtcttgcatactgtttcatgctactcgtcatatatcccttaatatgtgggcaaccaacaacccac

SEQ ID NO: 27641 - DNA, 317 bp, Zea Mays
gacatgaccataggtgggccgacagtaattgcgtcaacaggcgcgcaggagcagcaagctaaccgctaatcaagctttggccccacctgcaggctcgcatcctcccctgaggcgggcccgggggccactgtcggtacccttaattaggggtaccttcttctacagtatgaaggtgttgtacatatacgacgtctccaggtcacgcggagaatggcacccaaccccaccacatgggcaggtataaaggcaccgcgtggcaaggaaaggtaatacatcctaggatgtattactaggtttggacctccacagtaggacac

SEQ ID NO: 27642 - DNA, 428 bp, Zea Mays
gtgaaggctctggtgtaggctgcggcgtagactgactcatcgacttgcataggggagtaggtgggtggtgttgtcttgtcccctccgcctatctccgtcgtctgcctgtgtagcaggaatagtagaaatcattatgggagttgcccatgcgcgacacagtggttcaatggtctttgcctcggtaacgtgtgggttactgacgtgccccaggccttgtgtgattgcacatgccgcctacgtttaatgtgagacgcaatgccgcctgcctgtggtgtgaataggcgggcaccctgaccatctttaatgtgggcgcgccccacactagaggcccgtgtcaagctacgcctggcagctttcgtgatgcgccataggccacatggcaacaccataccccctcctgggtagagagcagtggctgggagcgcatg

SEQ ID NO: 27643 - DNA, 589 bp, Zea Mays
gttattgtttatttttctcaccacaagtatttttgtagtccagaatgcaatgtccaaaccaaattgagtaaaacataacacaaaatgagtaaatatgttttaatgttgattataaatcaagactatgcatccactttgctacattatgttttctgtgattttttgtttctacctataggtcatctattgtgcctagctatagcctgagtgactacaaagctatgatgtatgggaaatactgaaattcgaacggtaaatttgaatgtattgtgttccctgaaaacatgtatacctcaaatagctgcttttgtaacaatgaatatttacttgtgttcctagcagcctgtgatgaagatggatatattttcgtatgactattcacctgattttggtagcgtcgcccgtgagctgcttgtacctaccaaggcctttccatcaccataattttgactcgatatgcttctaccaccgctacaacaaatgatagatctaactacattcagtacaaagcaaatcctttagcaaatttaaatatgaattcattaagattcacaaatgatatagtaaggaccatactggtattatctct

SEQ ID NO: 27644 - DNA, 520 bp, Zea Mays
ctcagcaaacatcactgccatgttcatggcagctaagcattaaatcttctaacgggggttggatttttcaatgtctggatttttctctgagaaaatgaaaagttgggacaagcaatacaaacaaggacatactctacttatcggtgacagaactattagaaaagacataacaccggctttcatccagagccattctgaattataaacaaatatgtggcaagtaaaagcgtagctgaggtttcagcaatcatgttaaacaaattattctcctctgatcacattgccaagtgaacacaacttccattccctactctacagccattcgacgccaaatttgttagaacaggacagcaattgattaaggcattcagttaagaaacggtaaatgaacactatcattgtccatttcgacgagagaatatatacgaccctacagttaaaaccacagaatattttcttctctgtgaagttcgaggatgaaggtctatccaacattgtgaccatcaattgctcccaaact

SEQ ID NO: 27645 - DNA, 322 bp, Zea Mays
tttttatgatgatcgtgagcagtttgtcccgcctccgtatcacggggatccgggacaatcgtcctcttaccctccgccccaggacccttctggcaatgctcctcctccggcccagtctggagaggaacactttgcctctgacctggcgcaccacctctttgctcctcatcatcctcctccccactggtgatcattggattggttctctctctttttggttcttgttgccaaaaagggggagaaggtttattatgcagtaccctttatgtcgtacgcctttatttttttgtaatgaacaaacggtctgtaataactattcggt

SEQ ID NO: 27646 - DNA, 276 bp, Zea Mays
ttgacacggacctgaagaagaagaattgcttaatgagaggtctaaatgatcgactacagcaaaagatggccacttgcctggacctcacttacagcagggccgtgagcacatagctttcggtggaagccaagaatatgggcaaggaaagacaaagagatataggcgtgaaggggtgaaggatcctctcaaggattagagaagcgatcgaggttggtgattcgaccttttaactcaaatcgctcttttgctcgtccacccgccttcctttcaagcaac

SEQ ID NO: 27647 - DNA, 352 bp, Zea Mays
gaacgattgaatacagtaattcagtcagccagataccagcaaaccctaaggcgctatcatgataaggctatacgatatcgatccttcgtagttggagacttggtccttcgccgaattctaatgggggaaggacggcacaaattgtcgccactatgggaagggccattcatggtagcataagtcactcagccagggtcatatcggcttactcaaatggatggcacggaaataggaaattcatggaatatagaacatctcaggaagttttacccctggctagatttcaaaagctatcgaggcagcattgtatcctgtaatcggaaaatacatcatcaataaaaaagatttcatt

SEQ ID NO: 27648 - DNA, 335 bp, Zea Mays
ggcagatcgggcagccgacgtcaagcacccagatagcctccctgttctgtacgtcaagaggtagaagtagtctggtctcaatgacacgcgggtccatgtggcatgttcttgtgctgaaaatttcaggtttttgcgcgtgttccaaaatccatatctctagtttggaagctcctaaaaatcatggaacttgtttggtcggttttcttataaaattctctacctattagatgtataatatgtcatgttttagaagaaaatttctgcggtagaaatttatatttaaaactggtttagtaaataaacgaacttacttctccccatattttgagttttat

SEQ ID NO: 27649 - DNA, 333 bp, Zea Mays
atccagtcttcggcgacttgcgctaacgacaccttgttgctcaatgctcacagtaggggttacaagcaggcgagagagggaagagttcccaagtctctgtgcgtagtggattctaatggattacgtatagggtgttcactacctagctaagtcgtgaaggtatcaccgctccgtcatgtgtgtcgtcctcctggcatttctccctctaggctgttattgaccctcctatttgatagaccaaggaggggattggttaccagtggcttatcgttggaggagttactgtgttggggtagaacagagtgttttacccctggtagaaacgtgtcagtt

SEQ ID NO: 27650 - DNA, 440 bp, Zea Mays
aaaaatacattttctaattcatttattcactttaaaacggcactggactgggccatcatttctgagaacagcaggggcccaggcgcaaaagatcctacgactcagaatactatgcagtaggacgacgggttgattcaaacattttccagggtctcttttgcaattatggctcggtgaagtggtacagtgcgcggacggacgtccgatcaagtgttgacggcccagattagatccgaaggggtacgggacagtgaccgtgagatcacagatcgacggccacgatcaactcacgtgaatcgttatccctcttccaatccagcccgtctacgcagtgatcaacggcccataacgatccgccacatgttttaatctacaccgttcactagaaatcaacggcttccaggttatcacccaccccgggcggccaaaacggcggcgca

SEQ ID NO: 27651 - DNA, 476 bp, Zea Mays
ataggaagcataccgcttttgtaacagtggatgggctttactgctatgtcgtaatgccttacggtctgaaaaacgctttgccgacatttgtgcgggcgatgagtaagactttcggggacctgattagggacaaggtggaagtgtacgtcgatgacattgtagtcaagactaagagagggtcgaccctagtggaagacttaaccctggtgtttgacaagctgcaggcaacacgcacaaagctgcacccggacaagtgcgtctttggtgtctccgcatgaaagttgctggggttcctggtttcgcaccggggcattacagcaaacccggagaaaatcaaaacaattgaggcgatgaggcctccggcccgtatcaaggacgtccagaagcttacggggtcattagccgcccttagtcgcttcatttcaaggttggttgagagggcgctgcccttcttcaagctgttgaggaagtccggc

SEQ ID NO: 27652 - DNA, 621 bp, Zea Mays
ttcaactatacttgcgtgaacagtaaaagaattttcaccgaccaacgcgtcaatgtccatgttgacatcataatcttgaatctgaaaatcaacacactcatcatcttggtatgacagctccacaccctttgatatttcattgcttgaaatttcagccacattccacaaatgcctatgtgagaatttttgaacaactcgccagtctccacgatatttggtgtcttccaattaaaatacctttgtcgcctgtgtggatagaataaaaggatcatccttgtagcaaatacatgcttggttgatgcttctaaaaaatctgtcatctttcatccttgccctgttactacatgtatcaatccaatcacaacgaaatagaaccactgaccgatgtcgctagagtctgcattgtactgcagctgaattatttctttcaaacggccataaaattcaatatcttctccattatgtgtgccatcaaccataactccactattctgtgtccttctatttttctcacgctcgatagtgtggaaccttacaccaccaacaatacatgctgaaaatattcttactcgcagatctggttgacatgacaaagcatataggtcaccacttacatcttca

SEQ ID NO: 27653 - DNA, 465 bp, Zea Mays
cgggacatggatagcgagctggcaaggctgagtacccacgcggcgtgggcctagctaggtggtgttcgaccgacgacaagtacaagcacagtgagaagggccttatgctccaggtttgggatgcgcgaagaagacatcacggtggtgcagcattacccagaggatttcttcatcaccttcgagcaccagcaccaccgtgacgcggtggtggcgtgacacgaattcacctacggcaacattgacattcgagttaggccatggcagctccctgttcatggtgaccgcatcaactttgactaccatgtttgtctctgcctcgaaggcattcttttgcatgcgtggaacgagggcatcgccaagcgggcggtggctatgagctgcgtgctagactacgtcgagtctcaatcactacaaaaggaggacacaaggacgctcaacctctgggcgtgggcgtggaacccttca

SEQ ID NO: 27654 - DNA, 351 bp, Zea Mays
caagacttcggtgacctgacgcaccagaacagtctagtggtgcgccagaccacttctctagagaaggctgcaaagagaagctcaaggacttcaagggaccggaccagtacagtgtgcaccgagccagtcgggtccaatggatacttcagggtttagactccaatggctagctgacttgacaggacacgtggcaaggtctggtggtccaccggactagtctggtgccacatggcaaggcaagtagacagttagatcccgcttattctgtagaccgttggaggtctggttgtaacaccccatccactcccggaccgcaatgtacttactcctggctgccctctaggatcatag

SEQ ID NO: 27655 - DNA, 350 bp, Zea Mays
tacagactcgcgagccaaagaagaggatacaaccaagagagagaaggtatgagacggaagaggggcgattttaaagggaaggtatgagatgaacatcaatgcaatatatagaagtgtcaagggtaaaggtgataataacaaagagcataggaaaggatggagctaaggcaagactcacaaaatggcgagatggagaaaacaatcacgagtaaggtgggtaaggttccaacagaatggtttagtaaaagaaattattaccgagggaagttataaggaattaatgagatcaccaaggatgtgcaaaataaaatgaccgctcatggatcattaagaaacaagggtgatcaagg

SEQ ID NO: 27656 - DNA, 354 bp, Zea Mays
gggaagattgcttcagcgagggtgtagggatgatttatagggcgagcgagaggaaatgacaccatgggaagaggatcggaagaagccagcgccattattggcatggaggagtaggggaagaaaccacaagtagtgggaggatgcgaaaatagtggaggagagagtgtcaccacccctagtcaacgacgggaggattccatcggcgtgagcacgaacaccgaacgcacacgggtggttcaggtacgagctggatctgtttctattctgtatttgagaatctcagtttgttacagcttaacatatatatgcccacaccattggccccacgcacacaacccagaatcacatcacggc

SEQ ID NO: 27657 - DNA, 933 bp, Zea Mays
cttaaaatgaaacatggcttgtctcctagaatcccttgtatttaggttcagagtggaaggaaataagaacgggagttaaaggagggaattcacatcccctgtggggttttgagtggaaaattatataagacatcatgaacggggatgaatgatgatgcattcatcatttactacaagcacaattttcaaccaatcaccacccttcccaaggaagtgatccgtgacacccccccccccccccttaactcccagttctttccaccaaaaacgcatagtcccaccaaacaaacaaaagatttcataaaccctatatccaaactcccattccatcctttcaattactgtcagtgtttgtcctattctatattcatatctataccaatatataatctatcagtttaaaatttacaaaactcacccaaccaaatcacctctccatccttaaatacaataaataaattacatccaaacttaatacaccatcaaaaccaagatcactggataatctcatctcccttactcacttaaatccaatggacaatattatttgaattatctcacatccctttcctccacgtcccctgcccccggtctctctctcccctctcctctgtgtccacaccgcctcctcccctcactcgcgttgttgtggttgtcaatccctcctccacgccgctgccaccgctgttgtcgacccatcctctctcctctttgggattgtagcgataacacaagttatatgctaatacctgaagttgaacactttgaaagaagagatgtagttgtaccgtattgtttaggagtatgcttggaatcatttcacgtggatttttctttccctgaaacatatcctaagaggtacgacagtcatcatctcgggagtagttattccctctttggcatgaagagaaaattgttatagatgaagagctg

SEQ ID NO: 27658 - DNA, 517 bp, Zea Mays
caacaacaaaacccccttgctagcaacccaaaaaaatagttcatatgttggaattttcaggcgttgcgccgcaaagggccaactgaagaaagcaagtggacctgcccctttgtggatgacaacaccgaatcctattcctgaggcgtcacattcgacgatgcacaacatgtcgaagtttgtagttggaggacaggcacggttgacagagtgcgtttgagtgcattgaacgcctctgttgcttcgagcgaccaggtgaatccatccttgcgtagtagccatgtaagcggggctacgagaaggccaaaatccttgatgaatttgcagtaatagcccgctaggccaaggaagccttgtaagccccaggtcgagcgtgacgtaggccatgttgtcatggcctccaccttgttatccatgattgccccatccacggagatgatgtgccccaagtactctatcgacgatgcgccgaacttgcacttggagtgcttgatgtagaggtggttgtcgaggactgtgg

SEQ ID NO: 27659 - DNA, 350 bp, Zea Mays
gtggaacattgcaacagatgagatgttcttcatcatatagcgacatatccaatcaaggattccaaaacactctgaggaaacactcgaagcttttctctagtaagcaagtaggtaccattattactttgatgatcggagtaacttccatttagtcgacttcttgaatcaccccattttccatcagatctcctattttcgttgtactcatccttgtcatcctgcaaggtggtgatcaatgaacacatagtgaaattcaaagagaataatatgtttccaaagtaaggattggttattaaggagaaacatttaaaccaataaggatacaacataacctttgctaacatttcaca

SEQ ID NO: 27660 - DNA, 301 bp, Zea Mays
cctgcgggcgaggatggtggtcgcggttggagctcctgcgattataggtgggttcatggcgagcggaggggttgcgagatttctggggcgctcgggtcagttgcaagctccatgttaatagaggcgtggtggaggcggcttggggaaggaggtcacaaagaggtgacatgtggagcagcaaagtggggagggatgttgtgaggagattcggacgagtggaggcgtggcgtaggcggcatggggagaaagggtgcggggaggcggcgtagggagagaggttggggacgaagatggtgtgggc

SEQ ID NO: 27661 - DNA, 464 bp, Zea Mays
cccgggtgggacaaataataactgaagtgacgacgcgggagatagctgaaaatctcgaagaatattgaacgtgtataccgatggtgcgtgtgtcctgcagagggatcaccttgtgtgtccgcagagggatcacctgaactctaaagacgcgtcctgagcacgaccgagcaccggatcactcaaatgataacttggagaaggaaaccaagcaccgaaagaataggcatacttgtagcaacagaaagtagactcgattggactcaatgatctataaagggatgtctcttcagtcaactatataaggctgcaaaagtacccctacaaaaaagagagagcactccattagattgatagtcaacttcatcttccacctcctacaatcacctgtaatctgcgaacttagagcaatccaatactcaacactacataggacgtagggtattatgcacttgcgcaacccgaac

SEQ ID NO: 27662 - DNA, 948 bp, Zea Mays
cggcgggttgtttaccaacaagcttagggactctttaagaaaatgtgctgcgaaggggtatcggtggagatgagtcgttggattagatctgtacggtccacaacagatcaagggaaggttggactggtattagatctaagccgcaggatcaagatcaacggctaggatcctataataccgggattcattcacatacctcggattataaacttacgaccgggatcttgttgaatgaagaggtacgcagaatctaatccactctttccgccgagagatctacggtccacgccccaactcttcggatcaaatctcaaccattgccatcaagaccaacggtcgagtgcctgtcttctacctaccgacggctaaacacagcggcgtggccccgcccggtggtgcccctcgctggtgagccataccaggcgccccgatgctccaaagtccaacccgtacgaacaacacatgaatatgaatagcgcgaatgcaagagaggcttcattacctcgattaacacgacgttgcccgtacccgccgagcacagaggtggtcggtatttggtgaagaatttcggcttcaacggtggtcaatccttccttccccggccacgagcacctcccaagaaacacaaagaatctcctaaacccacagtggactccaggacgccggttgggaatgaggtcggtgctggcgggcattttctgctcctaatcctctcccctcgatttccgacgtgtatgcactctcctcatgaactggcgagacctgtgatggtgcgtcaccaggtcttcggcggtagggacactactggtgattccaggaagggaccgatgatgcccaccattatagccgcgagggagggtggacgggagggcgacggaatcggatctcgcccggtttctcgcggcggctggtactcgtatttatacggctgcgactaggagggtccag

SEQ ID NO: 27663 - DNA, 323 bp, Zea Mays
cgatggcgttgttcgagtggtcatcggtaagcgtttcccctcgctcgcacctgctcggcgtatctatcattagcgtagcgtgcataccactgttgaagccgggtgcgggcaattgctcgccgtggtgagagctccgccgtgaatccgcctctcgccatggatagtctccctcggaccgtctcctgcgctggtatgtcgttcaccccctttgtcgcacttgtggcattgcgtaggtcgacctaattggagaattagtggccctagcactagaatcgggcgaacgccggcgagaccgccgccgcggtcactgttttcgtcgtcgc

SEQ ID NO: 27664 - DNA, 305 bp, Zea Mays
ggcgagtacgtgctttacagtcactgtctctcaagtaataagacatgcatgattaccttgtttgaatcttacgttgttggatcgtcgacgaggtgttgtttatttgctttgttccttttgttcgttcccatggcttgaagataagatgtatcatctagtagacatgcatatgcatgcaccggtgcggtacgtgagaagaatatttacgcagaaatgaaggctaacatgatgagatcgagtcgtcgaaccattatattggaagaagactagctgcgtacaagtactactggaccgcattgcttgat

SEQ ID NO: 27665 - DNA, 388 bp, Zea Mays
gtaaattggacaacaactttgctacaaatgtattagtgagttactacataaaaaattggagaatgaagcctttcattttgctctgtcaggcgctctgaagaagatcccgattgtacagtgtctgaaaatatcacggatgcaatgcacctcgccgtcggtgacctccgcgcctggattcacgccagccgccatgattctgtgctctctggtgtgcggattatgatcggcagtgaaaagatcttcaccgtggatgagatcgtgagttggccccatacccacttgccctgcggccgatcctggtgacctcgctagagtttgccgcctgccactcggatgccacggggctcgaagatttaccacgtcgcagtgaactagaataagaagcgtg

SEQ ID NO: 27666 - DNA, 332 bp, Zea Mays
tgctcacctacaagtcttcggtcctttgccaacatgaaagagatgatggcggctgggtgaaggtggaaggctgtcgagctcgctggcaacagtctcgcctctcaaagcctcctcccagattagtccctgctgacctatgtggaaggtgtttcaattatttctccctctcccatcgtgctgttaagtgtcgctagagggtgcgttgtttcctgtgccggctgcctggacaccgtgctaacgtgtgctcgcgccggcaggcagctgagccctagccgcgagcgtcttggtgtggcgcccaatcgcccaagtatctcccactgcgtcgcccgtgg

SEQ ID NO: 27667 - DNA, 570 bp, Zea Mays
gagagatagaagatgattggccacctgagtaagcacccgccgatagccctccgcgtttggggttcgtgggaggccatcggctatctacgccaggactcctccaacttcgctcggcgtgttcaatgctcaggcaaaatcagggtacaaattttgggcgaggagcggattctcccattagagcctagcatcttgttcggctagttcccgcttgcgttcctgagcttgacggtggtcgcggtgacggcaattgtgcagttctcgatatgctctttcgtcgagggtctcccccatctctgaggctttgtcccaagagacgggctgttgcgggtcctgttctccgacttcgtgatgtcactgcacattatgacgcatgtttctccgtcgccgagcatcatgctggggaggttcctcccccagcacggtgggttcatcatcagatatgggcgatgactccagtctcccctgaatgaagaggatgtcggggaagaaaggagctggtgcagtggtgtgcttcttctcatcatcctttgagggcaaatgtgtcgaggtgattgtccgttgtgctttcct

SEQ ID NO: 27668 - DNA, 429 bp, Zea Mays
aggtgagagaaattgaggaagtcttggctagccagaattgtcttgagttctggcctgagtcccttcaggaaacgggccatcttcttgctctcggtactgacatcatctggcgcgtagcgggctaactctgtgaacttgtgcacatattcgctgacagatctcccgtcttgggtcaattctcggaactcgtcctccttaagctgtacaagtccttggggcacatggtgctcccggaaagctgcttcaaagtccgcccaggtagcatctctgatggtgacgttgaaggtgtcccaccaggctaaggccatcccagaaagttggtgggcagccagttgaacacgctgattttctgggcaaccaatggcttccagtttccttttgatcgtgcgcatccaatcgtctgcatcgagggggttgcttgatccggcg

SEQ ID NO: 27669 - DNA, 466 bp, Zea Mays
ggaaaacttcgtagccattcatcctgaaggtcatctcatcacgtgggcaaagtttaagcaagtgttcagggagcattacattctagatgtcattcttcagatgtagcttgaagagtttgttcgtctgaagcaaggcagtgactctgtaatgcagtaccttgccaagttcaaccacctatctcaatctgccatagaacaagtcaacatgaacttaaataagaaaattgcttcatgaggtgtttgagcgataggctgtagcgaaagctggctacctgtttggatcttaccttcgatagggtcgtaagcatggcgatatcggtggaggcaaataattcaggacaagggaagacaaaaaggtttggacgtgaaggaggtgagggatcctcttagggattcgagaagcgatcaaggctagtgatctgttccttcaacccgaatcgtgcttttcctcgcccaccctcctacc

SEQ ID NO: 27670 - DNA, 802 bp, Zea Mays
caattttataatctgccttagttgggatctttatctttgcggccattgtcgtagccttttctgcagactcctcgtgctcggccaaatcaacagtacgtgacgtgaggtcccgtgcaatccctttccaaaatcgagctatgccagctgtagtagctttactcttctttttctcgaatgtggacaccaattttggtagagggaatttagatttctttgattgtcgtgaatcccttgatggctgtggagaaggtggtggtgtcctaaatgttgatgcttgtggcggagacggtggattagaaagaggatgaggagcatcatgggaagattgtggaggtgatgatggatgtaaaggtactaaagtttgaggaggcagagatggttggggatgagacgacgacggcattggtggatcaaccaattcgacttcccttcgaggccaaaggatgaaatttttgatggcttgtccaagtgtctcgattccttcgggcccagggatgtctagcatgtcgtcctcagatccttggacgaccgtcatcacttctaccctgcaataatcatctggtatgtcgcttctatgaaacttgcgtcctaggatcgcaatgcttgttcctactttcttcgtgcgattattgttaataccatatcttataactagtgtgcacgtcactggccttgttatgtcatcaacaggataacagaccttatttcccgttgacgcgacagagcttgggatggttgtacaatcggtggaagccggcggttgagctactggaattttttgcagctgtggagtggtcatctg

SEQ ID NO: 27671 - DNA, 473 bp, Zea Mays
atttatggagaagaaggatggcacaaagaggatgtgcatcgattatcgagctttgaatgaagttactatcaagaacaagtatcccttgcccagaattgaagatttattcgatcagttgagaggagccagtgtgttctcaaagatagatctgaggtcaggctaccatcagctcagaatctgaccctcagacatttcgaagacagccttcatcaccaagtatggactatatgagttcacggtcatgtcattcggtttgatgaatgcgccagcttacttcatgtacctgatgaacagtgtgttcatggactacctcgacaagttcatggtggtatatattcattgatgatattcttatatattcccagaatgagcaagagcatgaggagcatttgaggaaagtacttcagaggctatgagattgtcagttgtatgccaagcttagcaagtgcgagttctggatcagtgaagtccta

SEQ ID NO: 27672 - DNA, 332 bp, Zea Mays
gaaatctccatgtccagttatgactttgtcgagggcctcaacttcattctcaatatgctcgagggctccggggatatcttcgatagaaggggtgatttcttcggatgcggctccgaacgagttgaatatccccttcaatcgaccattacattgggtggcaaagccgaaacatttatcccgaagatttttgacagtttcgcttaattccgcgttcttttcagcttctgcttcgacttttgcattcagttccctggattcacggtcgaagcgctctgatctcttatccaaggtcgctcgagcttcgtctagccctctacttagtttatcatttt

SEQ ID NO: 27673 - DNA, 282 bp, Zea Mays
gaatcatggcagctcacaggttgctcggtgatgacagatgcatggacagacaggaagggtaggggagtgatgaacttggttgtccatagtgcacatggggtctgtttcttagatttagtggattgctcagcagtaaagaaagatagaaaatatgtgtttgaccttgtggacagatgcatccaagagataggggaagaaaatgttgtccaagtggtgactgacaatgcaagtgtcaacaccgcagcagcaagtctaatggcggcaaagagaccctccatattt

SEQ ID NO: 27674 - DNA, 621 bp, Zea Mays
tccgagtgctgggcgtaggcggcgaagggcggtggcgaagcgtagagtgagtgaggtggatggtggtcggcttcgtgtgggcagggctggcaagcaggaattgttgtcctcgccggctggggcgagtgtaggtgagggggagttgcgaagtctatttgagggtgaggagcttaggataatgctatttaactataaggagatgggaatcattctgaaggttgaaccgatgtaaggtgtgatgccctcgctgtaagtgtgttactatagtttgtatgatgaggctgtgtgccttcgcgtatccggctatgtctataggggcgttgcgcgcttagtctggcgcatttattatgttggtctggctgcgcctgtagttggtctgtgcgcagatagtttcttggtgtagatttgtgcttggatgtaatgcgcttgcgttttggcgcgcttgttgaattagtccggctgcaccctcaggcgacttttgcacggatagtcttttgaggaagacttcgattttgcgcacttgttgtgctagtccggctgcacccttaggcgacttttgcacggatagtcttttgaagaagacttcgattttgcgcacttgttgtgctagtccggttgcac

SEQ ID NO: 27675 - DNA, 451 bp, Zea Mays
ctggagcctagatggaggaatggttttacgtgaagaatgacttgaaggcaagagaagatattaaataagttattatgcacctcatttggtcccgtttcggccttcgaaggccgaaggttgaaatcgatgaagccgctgaagcatgccagaaggccattggtactgtatgcttctttattagtacaagggatttaatccaagagcatatagcctttagagtataaccgcttgtagagaactgggaaatgccgaaggagtctgtcaccgagtctagcgaaggtgacctggttcgactgaaatacaccttcagatacggagataaattcgatgaaccaaacgatgactggctaaaatgcattgaagctaccagtgatgaactgcttgggccgtattccaaagcagaagataatgcattatccacatccttcgggggccgaggaaaaaagagatt

SEQ ID NO: 27676 - DNA, 561 bp, Zea Mays
caagattgtactgaaccattgagagaacagagacaacggaactaaacaagactaacacaaattagacgagaacttactgtaggacttttggacagatgagtagcaagcacagattacgtttcactgttgcttgtggatgcttcacggttgcctgtgcatgaggttggagtgggcgggtggcggccttgcctgtggaatttccacgggtgttacacaaggaggatttcttaaatagatggtgggcttgctgtaatctgtgcttgttgtagacctaaggtagatggcaagctctaatgcctcgaaggggatccaagcgtgaagatggtggatggaagggaggcgcgtaggtgttcttgtggaagggaggcggagatggctggccaatggaatgggatcgctgccgttggacggagggcaccaaggatggaagggccaatggcgtcaaggatggaaggggatccaagcgcgattcaaggcgggagcgatgatcgtggagattgcttccctctccccacggcaggcgtggattccatcatgtttccttgcatcgggagagcgcac

SEQ ID NO: 27677 - DNA, 425 bp, Zea Mays
gacggatcccacgtgagtgtacatgcatgcatgtgtgcagcacatctgcacatgctatgagcggggtgtcaggctgctggtaaggcgtgcgtcgtctctcccggtcccggtcccagccccggccagctttcgcaatcgcaaggacgtacgcatgcagcagctagccacgggacacttctctctttagctagctagcttggtgcactgtatgtgaccacatgcaatgcaagatggctggcttgacagagcgacactgacaagtgtacaactattccatcatatatgcacgcttcttgcgtgcagcagtcgtcgatccatgggctgcacagtgtcccaaccaccgcactagctagctagctgcctatgtggtcctcggatccgtgcaaggagacgtacgtacgtttggccagctagctcgtgcttgt

SEQ ID NO: 27678 - DNA, 338 bp, Zea Mays
cggggaggacctcgcggaggcgagcgcacgctggacgacatcctcgacgcccaatgcccgtaccacaaggacatgcgccacactcttcggaactgccgggacttcaaacactccgtcgggcacggccgacccttccaacctctacctcctcctccgccgaggggagggccagaagaaccacgacaaccccagcagcaggaggagggaggaggagctttcccgcgcgttgacagggaggttaacgtcatcttcggcagacacggatcgcaggagaatagaagacaacaaaagctcaatgatcgccagatattggtggcgaccaccggtcctcccgcccc

SEQ ID NO: 27679 - DNA, 380 bp, Zea Mays
ttccttgccctcgcagcgggaagcgataattagggtatatgaagccaatcgcatcaaagaccctgttcagtcttttcttcccccggcctccgaaggctgtggacaaagcattatcttcggccttggagtaagctccaagtagctcatcactggtagcttcaatacacttcagccagtcattgtttggctcatcaaacttctccctaaatctgaaggtatacttcagtcggaccagaccaccatcactagaatcggtggtggtctccttcggcatatcccagctttccacaagtggccataccctgaaggatatatgctcttgaatcaaatcccttgtgccaatgaaggcacaaacagtgctaaaagccctctgacatgct

SEQ ID NO: 27680 - DNA, 343 bp, Zea Mays
ttactcaccggtggccgccgtgactcagtgaattccgccgcggtggcgcgcatgccgtagttctccctcactgtagcttctaccgacgtggtcgacatgccatagtgatgttatccgtggccgcgaggtgatcgccggaccgccacggctataaatagccgttgggttcacggcgaggtgctcgttgttcttcaagtaagctcgagtacaactagaaattcccactgctccctccaccttctcccaaatcgattgcgcacggtgaaagcaccgcttcttacggccaagtagcctcaatccccaaccccaatttcacctagagccgccgcgacgccgttttccc

SEQ ID NO: 27681 - DNA, 450 bp, Zea Mays
aaaaaacatcagcccattatttactgccaattgccaaattccatatccagttatccacccccaaaattttatttttactgcatgcgtcccgttcctcttccccggccttctgttcgtcagatcgcctgtgtgctactcctttatttttgtcaacccattttatgtcgatgtgcttattagctcaccggttcggtcactagagctgtttgaagcccccatctgctgatctatatgctactgttccattggagtgtatataggtggaacgatagctgatgctcatcgagatctcaaaatgctgtctcacatctttcttgagtcctgtgtagactgtagagtcatatcaagcagctcagcgcatacatcatgcaatactgtgaagtttcaacgtcttgctttcatcattgtgcgtaagcaccataaaccgatgtgcagcgcattatttacccg

SEQ ID NO: 27682 - DNA, 306 bp, Zea Mays
gcagtgcaaaacagcgactaatcattttcagcttctatttactttaagaattagtcgtgttctagatactcgacttattctaacttatatcaagacacacttaagcatagtcacacaatagatgacgtgacggctacgtactcatgccatcacttcaccccacaatcccaagtaacaaaataactctaactgaacttggcatttagtcgatcgattcctaacccatttttcttaccaccactacacgacatgcctaatacgttaaatgacttgttcacaattcacatacatctttaccaaaacatt

SEQ ID NO: 27683 - DNA, 478 bp, Zea Mays
aaacgatagttgagtttgatgaacctaaagattaaacagccatagaaaacaaagagggtataatcctttcatgtctaggatgtataagtccaacatattaattcaacacaattttgtacatggttcttaaggtggtaagacaaggcacgtcgagcgccaccttctggacgcctacaaacaccaaaatggataacgccacaaaaaattcagaagcaaacagtacctattggcagttcttagcattcaattccataataataagttgagtgctactagagcactagcgcccaacacaaaatagcaaaataacaaatatgaaatgtttcatctctcaatagatagaaactagtctctaatgacataatatggcatcaaacaacaggcaagagattgtgtcctctgtttttatgcaacccaaataaacaaagcatgtccatctttaaaaagcagaggaagtgggaggcgagaggaccagagg

SEQ ID NO: 27684 - DNA, 330 bp, Zea Mays
tcaataactggatatgtgttcctgagattggcagcctccgtgagactatactgaaggaagcccatgactctgattactctattcatcctggtagcaccaagatgtatcaggatctgaagcaaaagtactagtggtatgggctgaaaagagatgtggctgcacacgtggttgtgtgtgatgtatgtcaaagagtcaaagctgaacatcaaagaccagctggactgctacacccattaaaggtacccaaatggaaatgggaagaaattggtatggatttcattactaggttacctcacacctcgaagggctacgattctatatgggtgatcg

SEQ ID NO: 27685 - DNA, 301 bp, Zea Mays
aggatgtcatagaagctagcgtaagaagtgctccaaaggtttgacgctagtggttgatgcatgaagtgatccaaaggccagaacagatgccctgagggacaaaatacaaattctaggagccagggcatagggcggacacaagaattgctttagggaggtggaacaggtgtcctagcgagtgaacgctgcctataaggaaactgcttgcaatagttgagccagttcaagggattctccttaccgtcataggtgaaggacatgaacatcgtccatacccccatcatcccattgggaaagcttg

SEQ ID NO: 27686 - DNA, 376 bp, Zea Mays
caaaaccccagctacacagatcacaaaagaaaagggaaaaagaaatttaacttcttttcagaaaattgggtatcacactctacccccccttaaaaagaattcaacctcgaattccgacgcttctatcggaacgacaagaaaagatcagcgacaacaaaaactcaccccataacaaaaagttcggggtacttctgccgcatcagctcctcgagctccaaggattctaggatacgcagcagacgacactctagagtcaggtcttgctacacgggaatcgactctagctcgatttattgatctggattccacaaatactttctcaacatagagacatggaatacatggtgtactctgatcatagactccgacaattgca

SEQ ID NO: 27687 - DNA, 429 bp, Zea Mays
cccaacaagagtatgaagttgaactgttgtcgtaaggagtgaaaccatcagtggacaagcctagacgaacactcctagtgtctcttccaaattctgggtcaaaacgatccagagccttccaagcatcgccatctgatggatgcatcataatgtctgggtcttggatctcacgttctccttccttatgccacaacattagcttcgcagtttctggggttaaaaacagacgtttaagccttggagtgatgggcatatatcgaagctgtttaactgccacttttgtagcaaaagtagctccatcctcttttagtacctccgcatatcttgatttaccgcatttctgacaatgggtggtcgcttcatattccttccagaacaacatgcaattatcttcgcacacatcaatcttcttatacttcatcccaagac

SEQ ID NO: 27688 - DNA, 362 bp, Zea Mays
tttaccacgtcgtcgcaagctgtaaggactcggtagtgaccgccgtagatagttagcctgtgagcgccacgttagcggcctccagtgactcctcccccttctcaccgcgagcacttccccgtccaaattcgccctccatgcaaccgtcctctataaattgatgccttggcctgttccgtcttgttacgaacccagagcaccagccctcgcctccgatcatccatcgtagcgccctaatttcgttttcccccaaatccactctctgcacaaccgcgagtcacctcgtcgtggtcggccatctacaggttcgctctcgccctcctggttcgtgtttcaatactctagcatgcttgtgatactcg

SEQ ID NO: 27689 - DNA, 414 bp, Zea Mays
gtcggtagaggacattgatctccaacttttgactgtgggcgacagcagcatgcgcagcttcttgcaggtaagcccacatgcatcgtttatagcctttagcttgttatgaatatgttgtaaactaatatgtatttggcatgcagcgtttatctaggcgcctacgtggagctgctgctcgctgtggctgcaggactaatgttgcacatgacgtccatgtaccatcgtgtacccacacagcaacgccctccacaggaattggtgctggctttgactacgatcacgacgaggtaggaccttcacagcttcagggggctccttcgacacaaccattacaaccacaagatcgtaggcgacaccgctctccacaacgttacactccaggcaccgacgctttaggcaagggtaagactagga

SEQ ID NO: 27690 - DNA, 359 bp, Zea Mays
gcatcaaagacaatacttggcaaagtagagggtaagttgttagtagaaagaaggttgtccttgtacaggagcacaaagaacatggcactaggttcactcaattctttttaatcccccttcctagtcatcatgactaatccctcttttcccggtgtcttggttattggaggctgtggagttttattttgctttggaaactcttccttactatttttgtgggtcactctcaagtgcttctcgctctctcactgtttcttatttagatcatccttcatactttcctctgatgtcaaaggaagcaaagagattcgctctcctttgtacaagaaagacaacttgttggttcttccaaaaatctg

SEQ ID NO: 27691 - DNA, 853 bp, Zea Mays
accaaaggaagcttggtgtcctaaagggtggagcacctccaacagtggatgtaagtctaaacaaacgatcttctagtagctcggtggaaatcatcttgtactcacatatgaattcagtatcagtttatatcacaatatttggttgcaagtttttattcatgatctccatgtttgttgatactcttgcctttctcgacactaataacttcttatgcgagtatataaataagcacaaattcaggtttttagcaatgtaagtagaaccagtatgtcaattttatgactgaacctcaacatatatagatttatgttccatagaagaactaccgggtggctaaactaacatctgaattgcagtccttctatctaaaagcaactatcttactatgaccatgttttcagaaaccaaaacgacgaacaccagcatttacaggaagaagttcaggacaagataaatctcatcgttcaagaagcatgtccactagcccagatcgtccacgtgttcgtggaaggtctccagccttcaatatgttaacttctgcctttgagaacacgagcaataccaggaacctttccacccctccccctgttgtgagaaagcctttctcaaaatctggatgtcctgaacactcaagggtgtcacccaaaaaatcagctatcagttccctcaccaggtcttttgaaggtcacatgaaaagtacaataccaaaatcagtaaaaggtatagtgaatataactctttaaatttcaattgtgacaaaacatggatagcaaatgtcgagttacttatttctcccatttctgaatctttttgtcaaactaagtgagccctgagctagagaaggcgacacag

SEQ ID NO: 27692 - DNA, 372 bp, Zea Mays
gcttatgtctatggtgatgagtccctagagaatgagcttcggcatgacacggcctctgtgcaatatgcagctcggctcccctgccaattagccaaagtggaatttagggttgttgcggagcatattagcactcgagatttagtgcaagaatacttagccaataaaacctttccaacgtctggtgggtggggaatgccaaagaaaaaagaagggaataaatatgaacttttgtggcttccctaccgcttcaaatttcaaaaatgtttcgacaagttgtgcgttgtatggttggaactgatagagaagatgtgcaatgaaattcttggaaattatacaaagaagtcatatcaattaatgacagcttccttcggc

SEQ ID NO: 27693 - DNA, 491 bp, Zea Mays
cttagctcaatcgagttggtcgaggagtatcaggggcacacaagaacactaaaacgacagggcagagggtatgagcggatctaagacgagctgaccacggtgaggactctttcacggtggcggaaacacagtttgggggaaatgagcaattcgtggtctctggtgaagaattggaggcaattgctggtgctttggatgcgtaattatcctacggagctcatggcgtgctcaatttatagcaggcttgagcggtggccagtgaatttgaggagagacgcgcgacgactagagaagaagaaggttacttgcgtggtgattcgtggcctattaccgtggcaagctctccggcgaccaccagacggctaacgtgagtcacggcggtgaggttatcattccaaggcacgtggtgcaaggccgcgaagagacaatctccagtgaacctatccaaggcggccgcgacacgctcgggtacggcggccagagtaaaattg

SEQ ID NO: 27694 - DNA, 385 bp, Zea Mays
ctggctaatgcttagtgcaaatggggcaagttccatgggttagatttctctcattttcatgtttcaactgtgtgccttgatttgcttagatttacttttccaaattaaacaataaaaaaatcatgtggatggactttaaagaagtataatagatctaaatatgtgatagtataacagatatgattagcaattgttgaggttctcacgagggagttcaacagcggggaacattgtcttttatttgttggggctgcagttgtcgatgccacgatcacactattgagctctagcctgttgttgatgatgattgttcgttgtttgaaattcgtctattgacctctatatatgcctgaatttcctagacaacattatgtctatgtttgtg

SEQ ID NO: 27695 - DNA, 609 bp, Zea Mays
gacagagcgaggtacctcagcaaaggaattaacatctcccaggtgaatggctctctcctgtgtatctgattgaaataacggattatcagtatgatcagacacgtgacaaagcaatgaaggaaaatttgcaaaacccttctggtgattaagtaaattaccagtagacataattagttcgtcgatcaactcgttgtccacctgggaattattactggcatcaattaaagccaaaccagcaccaccaccactaagtggctttgatgcagcctgggtctgcaaactgtcatcagccaaattcagcccgccagcaccatccgtcataccagcaagtatcgaacagcttggaaccagatcgtaaaggctgctaagattcgcatcctcgccaacattttctggtgtctgatcaagatcaccaggtgagagatcggtaaggccaatttttggttccagaacgagtgcttcggcagacttaggtactagcagagcatactgagcagaacaagaggaggaagttggcatcaaagttgtcggctcattgaaagtcgaatcttcagactcaacacctgttcctatcgttgagccataattgttctgattcccttgcagaac

SEQ ID NO: 27696 - DNA, 369 bp, Zea Mays
gggtaatccatttatcaccactttcctctttatctgaggagctgtcagtgaagatggtcacttgttcagttctatgaagatcttctatacatcttttcttatgctgaaagactgcagagtcagatctgatatgtgtgtgattcctacagatgtctgagaacaggcgcagaggtgcgaggcgtgctaagccagaacagcaggcaccccaagaggaagtagccccgcagcagcagttgccaccgccatctccgatgaccattgagcagatgttcttgatgtagacccaagcagtccaggccattggtcagacattagcagccatgcagcaggtgcagcagcagccaccaccgcctcagcctccagtgcaag

SEQ ID NO: 27697 - DNA, 319 bp, Zea Mays
ctagagcccaatgatccggagtcaagggtgatgtaccgaaacctccgcaacttggtggagagggccgccgtgtagcaagccaagatcgaccgcagtttcctctcgggaccgaaagctaaggctcacacacagcctcgtcctagagcaggggagcacaaccttcccaatccacgaagacgcacgtccccatgaataaccgtttgggggggatccgcgatgcccgacacatctttgacaacggcgccaggaacaataggaggttgagcagccacacgaaagaaggcgtgagcagagccctagcctgttcgggtcagggcca

SEQ ID NO: 27698 - DNA, 487 bp, Zea Mays
gcgagagcttcactccaggaagccacatgatgtttggctctcttgacttccttgccactgccaccaatgaaccctgcctcgtccactccgatagcatccatggcgtctcgccgacatcgggcacgccaggggttgcaagggtagcgctaagatctccatggtccaccacgatgatcatcagtcgagccccatggcatatgaggttgccatcatcagccacaatccaagctccaccctcgacacctacgaggacggcccaagtcgtcgcctaaccgaagaagtctgacacctgtaatcattcgagcaattggcgtggctcctgtaccattcatccaaaaggtagcatgagagtgatctcttctttcataataggatagcgtttacatgtcatctagacggtgaggtccgtcctcataaacccggtctctggaatccatcgcaagctctagtttcattattcaaatggttgagcacaacaaagtaggag

SEQ ID NO: 27699 - DNA, 399 bp, Zea Mays
ctgcagtaataggttttctgctttatctactcgcatggttgtttttctgcaactgagtgactatcttgtcacacttttcatccaaggcaagcagatagaggacaaggtatgctgttgtgggatctccaatatgcctttgctctctcaaagcttgcacttaggccttccactcttgatgggtcttgtggagagatggaaagaatctcatggggtggttcccacttcttcctagtagaccgagcatagtgtcctcagcgcttcacgagccacgagatggcaagtgtctttgaacctatgcccagttgtcatggaacaccatctagattgccggttacttgacccaatgtacgtggtaaccatgtacttctttttaccatgttccatgaactccattccaaa

SEQ ID NO: 27700 - DNA, 542 bp, Zea Mays
gggacaccaatctcaagcctgtggtgtaggtcgtcgcccctataacagtaagcaagggcagctcagcgggcgctggctgggtggcggccagtggccggaggccggtggccagctagggcgcgagcatgcgggacacgggcgcacgccgcatcaaggtcaagaaccagcaggtctcagatctgcaggtggtcggctgcttctttgcgatcagacatcgaccaaaaaccaaaatcctaggcaagcagctcaaactcgattaagatggatatgtggagtacaccgacacaccattaatacggttggatcaggtttcactctactgctctttgattatttgattttgcttttcaagtgattaatgttcatacgtataggagaatcttctattccttggtgagttttagtagaaaccatgaacgttcagtaatcgactcagtttttcttagcattgtagtgagactgagagcatcagcttcaagcaggaaaatcgttaaggcaaaatagattattactgttttctactaacaccagatgcatcattg

SEQ ID NO: 27701 - DNA, 286 bp, Zea Mays
ctttatcaatgatcttgcccttaaagaagttcctctccatggtcggcgttttacttggtcaaatcaacaagtggagcccattcttgtcaggttggacatggtgctatgcttagttgactgagagctgcttttccctaatgtgttgctacagagttctacttcccaagactctgatcactgccccttaattctgggtctttgagataataaatcagggatttcatgatactgtgcacgatgcctaggaatctgttggaaccgtgaactgcccttttcttactcttca

SEQ ID NO: 27702 - DNA, 596 bp, Zea Mays
ctcgtataagggatggtgagcacagcgcgccgtgcagcacgggcacactgtttgacaatggactggacaggtgcaccgtctgtaggatggccctggtgccgcctaccagcggagtggataggacgcattaaatgctgagggggcacatcgcctgtcagcagggtggagaggcggcgcgtcctctctgcaataaatgcagagaccgtgcgacctagaggccttacgtcaggctccgcccgttggcttatgtcacgggcaacaagccacgtggcagcatcgggtctctgcttgagcggggagcgcaaacacacaagataaggcctagacacgtgtcagtaccggacccttgcttatgccagggtctcccctgtcccgggaccttgttgtagcccggaccttactcggagggatctagaccccatccaagggacccgacatggttacttgggagtcccgggccgtaatcgggggtccgggttgtgcgaacaggggtccggtgctccctcatggaggtccgatccaactgatacatcctgggatgtatcatcttttctcgccacgtggtgccccttgagccgcccacatggtggggtcgg

SEQ ID NO: 27703 - DNA, 379 bp, Zea Mays
ttattcttcgtttttaaaaaggatgtccgaaatcacaattcacaaagttgaatttcatatgttaaaatcacaatcgcacttccatccaaggacaaaaacacaacaaccccaatttaatttgtttaggacatgaattgcagcagccctctgagcgttagtacaccataaatcacaattgagatgaggactaccatgtgtcaccattgtcgcctcaagcaccaccaccgaggcatagagagtagtaggggatgttagttaatcagttgaattgtgaaaccgagcgtagagagtagtgccgacaagctgaggcacaacgacgctagatagacatgatgcttattttgttcgagaccatctaggttcaacatgatcaattcta

SEQ ID NO: 27704 - DNA, 328 bp, Zea Mays
cgctcccccagctccccctccgcttccccagctccaccgcgcttggcgcgtttggtttggctggtgggaaaggcccaggctcccgcatcccgtaatccccgcccacgacaacccccggtgagcaatctccgcgcatttgtgctacaatctcctcaatctgcgtgcccccaatctcctacatcagcctcgatggaatctcccccatcctcgaacatggaaacccaattatccaccgcaatcagcattcgtcgtcgattctcaccttccatcttcggcgagtgaatgggaaccatcctcggtgccgatgacaaccatcctctgctagccg

SEQ ID NO: 27705 - DNA, 375 bp, Zea Mays
gtttggtagcgtcgaggcgagtagggaaagctagcaggtggactactgagaggacgaggttgggtgtcggcgagtaaagtcaccgggcccctggttctggcggcggccaacgaagggctctggcaaatgacaacgtatgacagcagggcgctcgggaaacttcagcgcagcggcttcgcgggctcaagaacgatgatgatgaaagcagaggcaaacaggaaatggtgttgtgcactgaagaggagagcgggaggctgtgacctttatagcgagggagagaggtgggattaaagcaggaatcaacgctccttgatgccaattgttgtgccatattgattcacagagaaacggaagtcgtaactactccattgatat

SEQ ID NO: 27706 - DNA, 573 bp, Zea Mays
aggagagacactagagtatgagacatacttagcaatgtcatgttcataacaataacgagaaggaggtttcccagcatttactctaggaacccttctttgggcaagaggtaattcctcatgttcagaaatgggagaaacagggattggagagacattaccagctgggtctggagaggagtctgaagagagatatgggactggagcttcaacacatccaggttgtgattgctcccccttcttcttcgtccgctttcgatagtatactataggttgcttcccctgtttgtcattcacctttaccccaatagaacaatcatgttgctccccctgtttctcattcaacttccctgcagtaggacatggaattgatccaacaatcactgcctcatcatcctctgcctcatcttcctctgtctcctccagaatattaatagttggatcaccatgatccccactactttcatctttactcaatatctgcatagttatccctttctccacttctggtggaatcatacctccaacaatcacccttcctgaagctccactagcctcatcaccactagcctcctc

SEQ ID NO: 27707 - DNA, 325 bp, Zea Mays
ttgaaagatccttttgtgccttcggcattgtcacctcagccgaaggacttataacttctaatgtccttgttttctcaactctcatctcatcaatgtcagtggccttcggctcatctgttccggctgatgatgccttcggtgttgcaattggctcttcaactttctgtgtaattgcaggtttcttgccttcagttaccgaagaggtctcaccgccaaattcgggcactgtggccggttcaatatagcgtggtcggtgagtcaggaccttcacccttttcctcttcggcgcagactcgcttggagcagctgaagcaacatctttccc

SEQ ID NO: 27708 - DNA, 306 bp, Zea Mays
tgcgaacggccaagttactggtatggtctgcagttgctgtgctggtagatgttgttgctttgacaagtactggcaggcttcgcacctctgaactaactcgactgcatcactttttgttgtcggccaatagaatcctgacctgaaggccttcccaactagtgtcttggatgctgcgtgtattccacattgcgcagcatggatctcatccagaagttgcttcccggtagatgagagaatgcacttcatgaggatgcccgatgcaccccttctgtatagtgtttccccaatgagtgtgtagtgagctga

SEQ ID NO: 27709 - DNA, 328 bp, Zea Mays
ctggtgtgggaacataaggtgcaggggcctctggatcaagaactccagaaatcaatcgctctagcgttcccatcccaacgatgtcgatgaactcctctgggtcttctgcctccggctaagcttctataatgttctcatcatcttcatcggacaagtccgtctctcctgaggatacgttcccattagatatcttgtgctccaagtcctcgtcgtcatcatctagaataacaacttatgggaccatcggtgctacaggcaactcgggttgagcatcctgctgaagctcaacatccaagttctactggggcagatcctagggttgctcgac

SEQ ID NO: 27710 - DNA, 293 bp, Zea Mays
tgaattgcgattgctagctggtccggccgtcctgtccacttgccgcacggtcggccaagcttatcatcaccggagctcgccgtttcactcaaccatgccacgccgcaatgcattctccacgtcgtaaggatcgtggaggatagttagttacccctcctgcaccgttttctcctcgtgcgccacgatgcacagatcactgtgaaatatctaggtcgccgtgagctgatccccaatccaaattcgtgataagttcgaccaaggcctttaaattgaaggtgcccccgatttcgtct

SEQ ID NO: 27711 - DNA, 308 bp, Zea Mays
aattaagtgttttggctgcacccatgaacctgtgtggcactgtgattgtatgccacgtgtggaggccatgcagtgctagcaccatatagaccactctccactgcctgcatggtgtgctcatggctgtttgctccctcgttcagccaccttagggtttggttttgtgaagtttttcccctactcttgagctccaaatttgtggtcatcgtgtgagtgatgtggcagtgttcaggcctgggtaacctccctttcaaacccccaaatctgatttgctcttgtgctatgtgccagctccctagttggtgacc

SEQ ID NO: 27712 - DNA, 324 bp, Zea Mays
tgattcgttgcatggcattagaagtgaatataaacctcatatatagttgcgcttcatcaattccatgctcttcttggcggctactaccagctctatattggacaatctggatggacgatagaaattaatgatatatatagcatccgataacaagaaatctactacctttatgcatgccattttttacagcaaccaagtactactagtttcgaatgtggtagctgctgcgtacgttacgtaataataaggtggaaggaacgtgaaagatggctgaagactcttttttggagacttttagctatttttctattcaatatctagact

SEQ ID NO: 27713 - DNA, 312 bp, Zea Mays
ctgatgcctgctggtgatgttgagttgatccctggtgatgttcttcagattgccccggttgatattccttcgtcgagccaccacctggtttctcatgatttgggatttccttcattcttctccaatcttcaggtaatttggcttttcctgttctggctatactccaggcaaattactgtctttgtactcatttgttttcaatatcaggctttggacctttggtcgacgggatggctggtcaattgagatcacaaggtgcctccgtcccagaaggagctctgtctctgacgcaatggaatctgatgctgcttc

SEQ ID NO: 27714 - DNA, 439 bp, Zea Mays
cgagagaggtagacttcccaagtctttgagttggtgttgctattgttctatgtgtctcatatggtgtgtgttgtgttgtgtgtgctcgtgtctctgggctcgttagccaacccctccttttatagaacaaggaggggatgccattacaatgaattctcttggaagggagggctaaaaggtaaaaactattcacccttggttaaatcttgcagtatgccaatatccttctacgcgtgagtctttagttctgttcggtggcgtgagcctcgggtgctcatcagtacggatttttgtttgtttcctcctacgccgacctccctttcctgtccataggtcctttccctacttcctgtatgggatagcaaggcctcttggtagactcaaacctaccgatcgtaggtcatgagtggaagaggggcgtgctctgcccgcgataaac

SEQ ID NO: 27715 - DNA, 326 bp, Zea Mays
ctcatattcaaagctaaattttttggtatattctatcctttcaagcctctttttgcttcaattatcaacgtcggtcttcccctttctctcttactatcgtgtctttagatcccactatgtgctgatgcttctgaaggcctctgttggatatgtccaaaccatctcaatcggtgttggataagcttttcttcaatggtgctatccctagcctatcatgtatcatcatttcggactctatcccttacattgttacaaattcaacataacatgtattttcgcaacacttatctgttgaatgtgatgtatttttataggccaatattcaa

SEQ ID NO: 27716 - DNA, 429 bp, Zea Mays
gccattgatagacagctgggaaatgccaacagagagcatcactaaccctagcgcaggtggtttagttcgattgaaatataccttcaggtttggagaccagtttatcgaaccagatgatgactagctgaaatgtgttgaaaatactagtgatgaactacttggagcatactccaagtctgaagataatgcactatctgcggcctttaggagccaaaaaaagaaaagactaaatagggtttttgatgctattggatttgtgtaccctgactatcgctacccgccgcggggtcagaaaagaaagggtgcaacttctggaaaggctgctgcttcggctgcttcaagcgagcctgcaccgaagaggaaaaagttgaaggtcctcacccaccgaccgtgctacattgaaccggccatagtacctgaatttggcgg

SEQ ID NO: 27717 - DNA, 274 bp, Zea Mays
gtttgaacattttgcctagtgaatgcattctaagtataacaaacacatgatatgccaatgcttatgatgttatgctcaagttttagttgcagtaacacaaggggtgttacatccttcctcccataaaagaatctcgtccagagattaaaagtcctaaggcaagtaatggaaaaggaaacgcgacatatctttatttccttatttttggtacaaggcaggggtggtgtggggttcattcctttattacaacaaatgtacacatcttacaatttac

SEQ ID NO: 27718 - DNA, 340 bp, Zea Mays
ttagttacgttaggggatccggtgatcgccggaggaagcgccacggtgaaagccacccatcccgagcaccaggatccctgtttccctccggtcgccagcacaacctcatgaaattggacaccaccgacgatgggaactataaattgacacctccgtccgctccgctaggtaactacgcagccggtgaagcaatccgcaccttgaatcctccccaagaattcaccaattttggatttccccaagctgctcaagaacaccgcgtgtcttgacttcgccgcggtccgctcaattcttgtctgattttgccatttatgttcttgttttagcacccatgcttacc

SEQ ID NO: 27719 - DNA, 351 bp, Zea Mays
ctagcttttagtatttcaatggtgttattggccatgaaagacataaataactctttaatgtggtctgagatggtgaatgttggcttgcgagcactgtttgtttgatgtgagttgcgatgtgagatggttaatgttggtgttggggcgaaggcggactgcccccttgctcgggtcatttataacaagagagataaatcatgatggacaagcgaaggtccttagacagagaagcgaatgccctaaggtggagggaagtgtttaacgcaggtgaaggctctgccagttccaagaacggccaggaatggcgaaggcctcaggtgacttttgaagactcggtgtacggaacatggg

SEQ ID NO: 27720 - DNA, 795 bp, Zea Mays
tgcatccatagtgctccattcttggaacaatgcgacagtactcaaccatttgattaaagatgctccaaccttcttgcaacaaacctccatgagcacaagcaccaagtgcagcaacaaagactgtatcatccagtgtgactccttctctgcacatatcattgtagaccaatagggcttctctaaactgtccattataagcaaaaccagatatcattgttgtccatgtaatggtacatcttgttttcattttattaaaaactaaatgtgctcttcctacatctccacattttgcaaacatatctacgagtgcatttcctaatgcaacggttatatgagtgttgcttttactaatgtaagaactgatccagttgcagtattcaacactgcctagctgagcgcaggctgagacaacacttactaatgttgcttcatcaggcatgaatcttccctcaagcatcatctgctgaaatgtgcacagtgcatcatcatacctcaagttgtggttgtaccctgtaatcattgcattccacgaaaccaaattcttatcaggcatctgatcaaatagcactctagctgaatctagttccccaatctttgcataagcagagaccatagcagtccaggaaactacatccttccgatccataatatcaaaaagtgaccatgcagattcaacattgccacttgttgcataccctgagatcatgagattccaagagatggcatctctgatcggcatcctatcaaacacagcacgtgctgacaccatgtcccccgccctcgtgaatgcagcga

SEQ ID NO: 27721 - DNA, 609 bp, Zea Mays
atgcatacgacatgtatagtttgtaacacgacttcacgatgaaaaaagtctcaaactgacgatagttaaaaactataacaacagcaccaacatagttcgaaccagcagcatcgttgtcggacgagcaccatctaactggacttaacattcatctcaaaagcacggcgcggccaagcgttccttccttctttggtcttcagggttgcaaatacatctctataccgtttctccatcaacaaatgagtggcaaagaaatgtaagtcgctgccttcctctgaaccatcttcaatcacttgttgcaactgagcagcaacctcgacacgtactgggtcggtctcaaatgaggttatggacttgttagtgttcatggaacacgactcaaaagcctccactaggcgtttcatgtattcatccttcgtatcttttttcttcttaggtttaggagaatcatgcagcaccttacgcttccctgttgcatttgagcaggggtcaggtgtgctcttttcacccccacctaaattggcttggacatggtcatcagatgaagaatttgcatcctcaactctaggaacaagggttgtttcattggtgcagacaatgggtccaaac

SEQ ID NO: 27722 - DNA, 365 bp, Zea Mays
attcaaaggcagaagataacgcgttatccgcgaccttcggaggccggaagaagaagaggctgaatagagttttcaatgctattgggtttatgtaccctgaatactgctacccgctgaaagggcaaaagagaaaaagtgcaacttctggaaaaggtgatgcttcagttgctctaagtgagcccgcgtcgaagaggaaaaaggtgaaggtccttactcaccgaccgcgcttcatcgaaccgaccacagtgcccgaacttggtggtgagacctctacggctactgaagccaaaggacctgctcttacatagaagaatgaagagccggctatgatgccgaaggctgataatattaaagaaatagaggcc

SEQ ID NO: 27723 - DNA, 446 bp, Zea Mays
catcgatctacaacaccacgcgggggaaaagggaaccagaaatgcgtgaaaaaacatatttaaaaagcacccgaaaaaacaagcagaaagctcaaggctgtccccttcgggcttcggcccttccctacgcccacatgtcaacaccataggcatccagaaaagagcgtgcgacccactccgcagcgtaacagagcactcccgaaaagaattacgaagaaaacgcctcagcggcggaaacacacgcagggatgaacagatctaccaaccccacgcacggcggtgcggattcctccgccgccgccgcgacacagcagattcacgaagcagcgcacggacggacgcagaatcaaacatcaacggatcgaaataaataaaagcaacgagacggccgcgtatgccaccaaccacgcacgcacgctacagccgaaccaaaccgccaagttgcc

SEQ ID NO: 27724 - DNA, 274 bp, Zea Mays
ggatatcacaaaagcctttgattcagtctcgtggtctttcctgttagaagtgatgaagcatttgggtttcggtcaaatttggtgtgacattgtgagtaatctgcttgcttctgcatcaactcaagtgattcttaatggcgaaccaggtcagaaaattcaccacagaagggggcttcggcaaggggaccctctgtctcccatgctgtttattctggttatggatattttatactacttgttaaagaaggcagctgaagacggtctgctgaaatct

SEQ ID NO: 27725 - DNA, 286 bp, Zea Mays
cgaaacaggatcgaataaggaaggactcgataagatggccctagcaggtcgagcacccttagcgggaatgttcgctgagagatgccctcacaagaggatgatcaaatcttacttggataatctgcttgtagctcaatggcccctacccctcctcggaaaagattgaaggagaaacactccaagggggaagcgtgtttgacaaaaacaagtggcaagtggaggaagcaagccaaggaatgacggcaaagcgacaacagatggactctcgcccagcgcgtgacgaacc

SEQ ID NO: 27726 - DNA, 419 bp, Zea Mays
tctagtattgctggaatgagtgtggaggaggctggtacaagcacccggttgccatgcattattagtccctcctgtgtatgccatggatcccccaagctttcttctttgatctgcgcactgagctgctgcccttcctcgctgtgtgcacattcttctagatctttgtacagttggaaagtgggtgctgtcagagcttaaactgattcattggttgtatcacgacgcgataatgcatccaccactgtgttaagtcttcctgccctatattctactttgaagtcaaatccaaacagtttactaatccactgatgttgtggtactgttgacagtcgttggtccagcatatatttgaggctaaaatggtcagtacacaccacaaactgtctaccccataagtacggacgccaatggcgtactgc

SEQ ID NO: 27727 - DNA, 273 bp, Zea Mays
aaaggagcatgaagacatcccttcaatggaaagcaggcagcatgaatgatttcctgccaaatcatatcaaagacatttatactctctgagctgttgggtttcatgaatgagagtaagaccttgctctctccaagaatgttcatctgattacccccttttggaatgagggtcatcctgcagagggagttgatgtatcgataatacttatgcatgtttgtagactcccaatacttcccagactcagagagatgaagatctttggcttcatctcta

SEQ ID NO: 27728 - DNA, 670 bp, Zea Mays
cggactcctaacgtaacagaatcgctatcgtctgcgtgaggttgggcggacgtctggggaggtcgccagtgcggatttctcgcctcaatcctacctccttgcgcctttaaataccggctggggtgctctgcgattcaacaatcccgtaatgtatcgaggctgggagatcgcagcgttgagcggagcatcaaaaccagtggaagaggtcggagagagatagagaacggccggtgcggatcttcatcaagcgcggtgtcgagcaaaggaaatggagaggggagagaaaagatgaagccgccgtcgatccataccctcggcttgctgcgtcctgggtgggtgtcctaggagatccaccataataccgtgattgctcgccggtgtaaggatctaaccgctgggccgcgggtcacgtgcgcagggcacctcgcagcttgtaccaaggtatgatgactcccccattatgctcacttccgccccctcttgcatctgcgcttggtttgccgttgatggacctgggagcaccgtcgggtgcgactctgatgtgctcgcggccgtgggggtttgggcgccgcctgtactgatcaggggaggaagaaaggctcctcgccatccaatccgtgatgaagggtgggtcgatcttgaccgtgggttttcgatcgtggggccaaag

SEQ ID NO: 27729 - DNA, 402 bp, Zea Mays
atcgtccttcggattagagttttgcacttgggttcaaaattgggggcggctgtcgatggtgccgctgcggcggtattccctgccgccgcgcttgctccggggggaggaagatggcgtcctgaccggtgatctggtgatggatggctaggatttgatcggccaggggaatgagttgacgtagatatctggggcggttgatcaacacgcgggtggatacgattaaatcagagcatacccctttggcacaatggatctcgatcgtagatctgcagatcaacgacccccggtttcacgcacgcactcggttgtggcaacctttctaaagagtccccgagtttcttaagaatatacccgcagtccacaccagggattctctgagtcttaggaatatttgcaccgtgg

SEQ ID NO: 27730 - DNA, 442 bp, Zea Mays
cttttaggaggggtaggttagccctgtaacaccccaggtgttattcaaggccctagccaatgagcacacttttggcctcttaccctctatgctaaatttaggaagtgaaggcactaaaagcttagaaaacatggttaagccaagtattgatcatcacaaaaaggaaccctagccttcatacaattttcacccataaacaaggttctaaaaccctaattcccctcttaagccattaaaccctaaccatgggattaaaggggaaagagagggcaaatggccaaatcacaaaagggaacctttacccaagataaagtatattagaaaatctacaaaatgtattaagagaagtaatacaaaaaggccaaacaaaaaccccaaaacaattcaccaagtggggagcacactagagccattcaaaaattctctaagtccccaaaaccac

SEQ ID NO: 27731 - DNA, 464 bp, Zea Mays
atttgaacagatcataggagcttaatacttcttgaagattaacctaagatttggttaccaccaacttaggatcagcgaagaggatatctagaagactgcttttgtcatctagtatggccagtatgagttcacggtccttcagtctaaccaactcccatgccttctttatgaatctcatgaataagatgttcatggaagagttagataattgtcgtagtattcattaacgacgtcctaatccactctaagagctaggaagggcatgagaagcaccttcgaatcgtcctcagaaggcttagagcaaaccaactctacgccaagtttagcaagtgtgagttatggcttgagaaaattgctttcttagggcatatcttgactacaaatggagtggaagtagatcctaccaaagtagaagctatgtcaaatttgaatcaacccatcaatgttagtgaaatcagaagttt

SEQ ID NO: 27732 - DNA, 595 bp, Zea Mays
gtcggtgttctaatttggcagatacctaattcaacatctaacacacgtttcccctcgatcaattgcacggttcgagctcccaacctctctgctcacggtgaccgcacaatccggggacaattcaaagtgttcccggtgatctgatgggttctaggttaattggccgggtcaaggagtatcaagagcacattagagtactgaaacgagtgaacagagggcatgaatggacctgaagcacactggccacggtgagagtctttcacggcgacggaaaaccgatttggaggaagtgagcaattcgggggctctggtgaacaattggaggcaagtgctggtgctttggatgggtaattaccctactaagctcagggtgtactcaatttatagagtaagtgagcggtggtgtccaattcaaaaggactgcactggcggtcgagaagggtgtgagtcactgtggtgatctgtcgtggcgatcgcagggtaattgagctacgacgattactggatagtcactacggctcatgacgacgcgataaacgtcctaaggcgtggcgtccccatggtgaatggcgaacacgctggtgatggctgctcg

SEQ ID NO: 27733 - DNA, 573 bp, Zea Mays
gtaggtcggtccatgtgcgcaggcaggcaagctcgtcggcggtgaggattccggcctatccaaggcagtatagttcaatataacgggtcagagagcttcactggatgctagagaagacgtaggcgcgaggaattggaaaatggcttaccagatagctcggttcacgtgcggtggcgggtgaccgaagtccggcgagggtgattctgctcctccggtgaggcaatgcctcggctcaagcttggtgaagcttcacagggtcttggggaagctatccaagggcttggtggaggctgaaggcctctagaaatggctggccacggtgaccggcgctcgggtggcttgggcgggtggcacaggtactcgtcggagctaaggggggtgtctggccagcgagggtgagcgcggagtgtggttaggtgcatccatgggtggtcttaaaagcgcgagtaagcacgacctaggggtggctctgacatgtgctcggggtgtgcgcgggtgagcgccagtgcgcgctctggcgtctgggcacagcgtcgagcatgaggtagcgcagagagaggtcatgttcaagcg

SEQ ID NO: 27734 - DNA, 745 bp, Zea Mays
tactatgcagatgtggtgttgaagctaagtatggactagttccttcagagcttggagtaggatatttttgtggtcatatggtagactacgaagaggttggtaattgtatttaatgtcatgagatatattgttgcctccgtactaatgttttgtttcgtatgcgtaggagaccaggaaatgcacttgggagtactacgatgataaagatgaagtgaagcatgagataaggtcgaacaaactcatgggagagaagatgcagtgtggatctcagctcattgattcgtacattaaacagtgcggacagaagatacgtaggtttgccgaagaacttggctgtaatagcccgatgcgtgttgagcggagaaaaaggaaggtggcttacgagaagagggcacaggaggctagggaaatgccggcggccagagccgaggaggaaatgctggacaatcttgctggtcatctgtgtaccagtgagtgacacaaagacgtgttgtttttgctcccaaattgtatttgtgctgtcgttgctagctacttgtctttgttaacttgcagagattggatgcaccgggaagcacatcgtagaggaggcccgtgcaagatacgtggagcagaaaatggcagaggtggagttgctggcggaggaggaaggcgacacttcaagattgagtgagcttctggagctagctgagactggattacatgtggaggaggaggaatttatgtctcaggctgccgatcaagc

SEQ ID NO: 27735 - DNA, 386 bp, Zea Mays
gttggggtgtatatagccccaaccaccccaaatagtcgttagaaagctgggttaaacactgtacctgcaggtggtgcactagacccactataatgttggcccggtgcactaccgaaccgtctgtatcgacatagggcaggtgaccgttcggactatcagaggcaccagaccatgaatagtgaaggtctagtgacctccggaccctaccacgtcagcatagtcgttggagcaaagatgagctttgggatttgtcagacggcctagtgcgccaccggaccggtccaacgcgccagctccaaaaaccctaaatacatcctatctgtgtaaccagttcgaatagccatcggaccggtttggcgcgctagctgagaaaggccaagtctcgg

SEQ ID NO: 27736 - DNA, 543 bp, Zea Mays
taaatagaaggtactgccaggctaagaaaccttctccccctttttggcaacaagaaccaaaaagagagagagccgccaatccaaagatcaccagttaggaggaggctgatgaggagcaaagaagtggtgcgccaggtgagaggcaaagtgttcttccccagactgatccgggggaggagcactgccagaaggatcctggggcggagggtgagaggatgattgacccggatccccgtgatagggaggcggggcaaactgctcgcgatcatcaaaatagacttcttcttcttcttcttcgtctgctaacataaatggcaccccgtaggcctgctggtgccactcattgatctccaggggaggatgatggagaggtacgtcaggcgagcgaggggcaaagggcatacccatagtggaagcttgacgacgaagattgtcgtcagtctcccgctgacgccttgccagctcatgtacatcagcagaaatgttccggcacatagagaaaaatgccgcaatcccgtgggccaagcggacacccatccctcg

SEQ ID NO: 27737 - DNA, 354 bp, Zea Mays
ctgggtcatcctgcgaatgggccagctgaaggtaaccaggcgaggcaagcccactcggaactggcaaaaggtcaacgcccaagttaagcgctacaggagcacgagcatatcgggtggacggttgtgatcacccgacaggttgagccctcgacggtaactcatacagataaatgaagatgattccagagatgtaggaggacgctttgctacaaacagagagatagcgaatggattacgtttatcacttgcgcaggatagctctcctcggacgtatatataaggccaggaagcacccctaccattttcatctcaccgtgaaacacaacactcatagttcccaacttgtaatctctc

SEQ ID NO: 27738 - DNA, 342 bp, Zea Mays
gccaccgtgggagcttcgctccgccgcgtgggtgtgcctaatggcatggggcgtggtagtcatcagataccggatgaacgcacatgattaagccatcaaataacctttcggttggatgaatcttcaccgttggatcaagatctggtaatcaagaaagcatatcggttcagcatttaatctggaccgttcacgtgaccatgagcggacttgattaaaaggttagcataccccttcagtcttctaacctgagccttgaatttagatccaacggccagatcatgcccatgtataagtcgtcgcgacaactttacaaatgagaccctagaaaatagtgaaactaac

SEQ ID NO: 27739 - DNA, 295 bp, Zea Mays
tttgagattggtgtcgttctttcgtggattcgccttacgccggtggctgcgccgccgcaaggagtccggctggcggtgtccggtcggcgaaggaagaagaacgaccgtggaccgtcgatctgcttgtgttcggtcacgattagatgttagggtaccggttcggcgggaacaatccggtccgtccgtctctaatcgggcgcataggattcaccgtgggcagtattagatccgggcggttgatttctgatccgacagtcgtgggcgcataccgattcgtgcgggccacagatttaat

SEQ ID NO: 27740 - DNA, 370 bp, Zea Mays
gaatttgtctctgtattcacttactgacgtgcctccctgtttgagggataggaacttctttttcttgatcttcatgagaccagtaggaatatggtaattccagaagttagtggagaatgctgtcaaggtaatggtgtgagcagtagcatgtactgtgcagtatgcatcccatcaatctgtagcagggccagtaagacagcccgatgcatatagcacttcatgtgggtgcaatgagctgagcatcttgtccatggactttaaccagtcatcggcctatagtgggtctgaggagttagagaatctaggtggcttgtgactcataaactcctggtgcttatccctaggcggagctggtggtggtggaggttgt

SEQ ID NO: 27741 - DNA, 359 bp, Zea Mays
cagattttcataaaggtatttaattggcctacatcattcattatggtatttttctaacaattggttattcaatattgaaaggaatttttacgcaaataaaatttatcttaaaagcaaatataaaagatgcgctagaaacaaactctggatagggttgcagttgcactgtattgtgcatctcgggatgggaacaggaacaaactctggacgtcaggacgtaagttatgtggaaaaaggggaataaaaagggaggaaccaatttccttcagaagaaatagatgtggaaagggtggttataattcattgcttaccagtcgactcatgatacatcagctagcagcatggggaagttatttaat

SEQ ID NO: 27742 - DNA, 524 bp, Zea Mays
tgcatattgacaataaacagctcgagtgcctttgagaatgaagtctttttattgatgatttgtttcccaatttacagagtacaatgtcgtcccagtagcttttgaaatctagctagggatagaacttcctgggatgctctatattccatgagttcccaatttctgtgccgtccatttgagtaagacgatatgatccagaccgagtgacttctgctattatgtatggcccttcccacagtggcgacaatttgtgtcgtccctcccccgttagaattcggtggaggacaaggtctcccactgcgaaggatcgatgtcgtatggctttatcatgatagcgcctcagagtttgctgatacctggctgactgaatcactgtattcaatcattcttcttctagtatatcaacatcctctagtctagtagcctcagcttcagctatgttttcgaagattaatcttggtgccccaaacttgagatcagcaggtagcactgcttccgacccatagaccataaagaagggagtg

SEQ ID NO: 27743 - DNA, 437 bp, Zea Mays
aacgggtcgaggagcatcaggagaacataagggcactgaaacgggagatcaaagagcatgaacagacctgtagcacgccagccacgacgagcttacttcgcatggtgttttggactgatttgggggaaatcccaaattggggttctctggtgaacgatttgggacacaagtgggtgcgctgagtgcttgaataccttgtggagctaagggtatgctcaatttataggattcatgagcagtggtctgtgaatttgagatgtcacggtggtggtcggagagaaggggggcactggcgcaagcaattggtggctttcaccgtggcgagctcaccgacgatcaccgaatatgtgtaacccgagctattgcgacgtggtaagacaccaaggcacgtggcacacgatcattgagcggctaacgccggcgaggatgatcccgac

SEQ ID NO: 27744 - DNA, 424 bp, Zea Mays
ccttcgatatgggtggtgggcccaatgttctatcatgaggagacgggggtgagtcaccaaccaggaaacaaaggtttgacattacgcgcatgctgagctgtggtccttgccgacctttgcttctcgcccttctatcgtcttgtcgtctgacgtctccctcccccctttggcaatgctcctcgcctctccgcccctttgtcacacgtaaggaaggtcatatttaagaagcgaaaaatggtgtctgccctcggtggggatggcagggtgtcagtgctaccggaattccttcagtcgtcggcccctgtcaaggtcgccatggtcaacactcctggttcgtttctcccgctatctttggcaattcttgtttggtctagatcatgagggctaagggtcattcctcctctgtagcgaacttagaagtctc

SEQ ID NO: 27745 - DNA, 334 bp, Zea Mays
tcggcctggcaaggagaaggtcgacgaaggtggcgcggccgcgggagaacgggacctcgggtatcagtcccccgagcaagacctcaaggacatcttcactggagattccgactccggtgatgacaacgaccgccgcaagaagttgtacgtgatgtatggcggaagctaggagctcacctcccgtaggaacatgaagtccctgcgccgcgaggtcctttccacgatcccaggggtcccgaaggcagccccacatcagcggtggcagagcaccactatctccttcggggcatctgactgccccaaaaacatggcaggggccggcatactaccgctc

SEQ ID NO: 27746 - DNA, 664 bp, Zea Mays
aacacaggggcctcgagataagatttcctaagacacagagcgtccctggtgcggacggcgggttattaaactaaaaactgaggggtctatctgttaactcgactggccgaagggttaggcacggatccaagccgtccgactacaactctgcgacccagattaaatcgcccttacatcgaaccggtacgcggttgagtccgttagatcaaggatctacggtgctgatttaaagtgccctagatccatccggggccatccgattgacatccagtggacacgaaacctcaccgcgaatcggtatacgacttaatgatcacaaccgtccatctacccatccatggtacagatgtactcctctaccactcacgccgaagcacggcgacgcaaaggccagggcggcgaactctccggcaaatcgcccaggcgcaaccccgcatcagtacccgccccgattgaaactacatgatcaccgagctaaagcgaaatgggtaataggtaactcaccagagatcaggcgacggaaacagctgccctcgctccacgcagatccgccgtccagaagagcgacgacgagatattacgggcgtgacagaggctcccgatctcccgggtcaacgctactgcgtttgcgcccacatgagggagcccctaactctcaccctgg

SEQ ID NO: 27747 - DNA, 454 bp, Zea Mays
cttgaccgctagatcaacccaagtctccttctgcacatgttacaaaaaatgttgtttggtgtctagttgcgcaaaccctatcaaggccatgtttctttccataaacccttgcccctaaaacttcataacattcctgttgatcatccagctgatcttgttgcctacctctcctttcacctggatctggtaatcctttttcttatgaatcatgttggctttatcatccgaatctcgggatcccctattgattctgccccgttatctggttatctgctataacccgttctcaagtatcagatgttgatcttgcctaaatctctcatttctgatcattctcatacccccttctctgaggattatgacgctgttttatcgattttatctctaagcagtggatccatttggttcaatggattatgttattgactttaattctctcatgtctctaaaagct

SEQ ID NO: 27748 - DNA, 466 bp, Zea Mays
gaggagcggtgacgccgacggaacgaagatgcgaccgtcgtaagtgagtagcccatcgacaatggcccaaggtgcgccgcgtaagcctgctgccagctcgtcctttagtgccactaccaccgggtggcttgcctattcctgccgcagctgggcaatgtagtcgaagcgtggcgctgaaacaatgaggattgcaccatccggcatgtcgcggcgagacagtgcgtctgcaacagcattctgagcacctggcttgtactcgacgctgaaatcaaaccccagcagcttgcccacctagtgatgttggggaatggtagctagtcgttggtcgaggagaaacttcaagctgtagtggttggtgcatacgatgaactgtcgcccccatagatatggttgccagtgccgggcgacatgcacgagttcgatgagttcccgctcgtatgcagtgggagagcagtgccggggcgcc

SEQ ID NO: 27749 - DNA, 528 bp, Zea Mays
catgttactcagtctgagtccctcaatcgatcgagtttgagttccttgatcccaccactcagtgacttcattgttggagtgtcttaggtacccctggtttatatccttaacacattgctctcaccaaatatccgctatagagcaaagcgattgaaatagacaaaaaagaacacttacactaacaacatggtagccgatgacttcagccaacgtcgaatcccccacctagaggatgtctcttcgtattgtgcaatgcaaaagaatcgacacaaacttctaagaacttcatgccccttgatgggaaggtgtccaatgttctagtaatcaaagccacatgccatctttgcactataggagactcctagaaaaccagcaatctagtaagactcttccttggtctgatccatctcccctaaagagctagaacttgagtacagttgtggataaccatagtcgtgatgttttgctcccaacttcaaacccccatggcccaaattaaaattggacatctaccatgtcatgggcgac

SEQ ID NO: 27750 - DNA, 366 bp, Zea Mays
agatggtggtgggagatagctatttctacgtttccataaaacccaaagaaaaattgcactaatagttattactagctacacgaccagtttttgatgtcaagcaatagttgtcagctgcttgctgaaacctttgaattggctccaaatctttggttgtatgttcttcctcgaaaaatacctgaacatattcatgttgtgcagcaatgtcattatcaggagcttgctccagtatgccaggaattttctgttagaattcggctcctttagcctatttatggctggcccaattcattttatgaagctaatatggtgtgcagagatggcataggggtttagaaagctaatcggtgcgtagatatggcttaa

SEQ ID NO: 27751 - DNA, 676 bp, Zea Mays
ttgagcttgtttgaacttgtgagcctgagctaggtctaagtgtgcttgagtctgtgtgtccattggagtgtgttcgtctttctgtccccttgtaacgttgcatgcctccccttttatagctcaaggggggtgcatacaagggtgctgagcccccgacatgtgggctcaggaatataatggatgtaatacttggagttgcttggagcaatcttcttgcaccctgacatctgggatctgcgtggtattggcgtgtaggggaagcttccctggcaacgcataagtgatgatggccacagtgcacccttgcagcacgggcgtactgtttggcaatggactggacaggcacgccgcctgcaggatggcctagacgccgcctgccagctgagtggacaggtcacaataaatgctgaggcggcacatcgtccgtcagcagggtggacaggcagcgcgtcctctctgcaataaatgcagagaccgcgtggcccagaggccttacgttagtctccgcccgctggcttacgtcacgtgcaacaagccacgtggcagcatcgggtcttcgctcgagcgaggagcgcaatcgcataggataaagcctggacacgtgtcagtaccagacccttgcttaggccagggtatcccctattctaggaccttgttatgggtggctcgatcctta

SEQ ID NO: 27752 - DNA, 296 bp, Zea Mays
ggatggggcggctagggttctaaaaatcgcccctagacggtcgcggaccgtccgctaggatggcacggacagttcggcccccctggcatggacagtccggctccctagcgtgaacagtctggtccctgacagaaagttttactttctttctctatgttgtggcgttatcaactattcaccagtggctatttgtcatatatattgcagtggtctgggtggtcttaggaagaagcttgccggtcgtttcaagtcgaagcgccctcgtgcagatgatgcagattataatccagctacag

SEQ ID NO: 27753 - DNA, 301 bp, Zea Mays
ctcaacaccgagctggaccacacccttaacgagttgggcaaggttcgggcagaggttgcggaattgcgtgctgaacgcgcagcgcgccactatcaggttggtggttctcctcctatcgggattcagcacccttacctttcgtcgccccgtggtcgctttgattatggcacccctgactgcaggacccagatatatgtggagtcatagatcgacagagtcagagtctgtaataatgcttaattcagtgtcttggtcttagtcagtcttagtttgagtcagtttgcttatcatatgttttgat

SEQ ID NO: 27754 - DNA, 298 bp, Zea Mays
caaggaaaatcaaagggatttggaggtgacaggtccaatcaaggacctgagaagcgaaccaggttggtaattcgaccatttaatcagaatcgttcttcgcctcgtccaccctcctatccattcaaacagcctgttttcaatcgtcctaccactgccccaacttctacaaatcagccgagtgcccctggtgctcgtttccccgccctccctagttcctcaactggctgcttcaactgtgggaagtctggtcattttataaaagactgtccatatccgaggtagaataagtccaacaatc

SEQ ID NO: 27755 - DNA, 376 bp, Zea Mays
acagtttgacagccaggacttcagggacttctgcttctccatcggcaccaagcttgccttcgcctcggtataccacccgcaatctaacggcgtcgtcgagcgcgccaacggcaagattttcactgccatcaagaaaaggcttctcgatgacaggaagggtaaatgggccgaccagctacctgaagtagtctgggcactaaacacgaccgaatgccgggcaactggattcactccttttcgtctactatatggatcggaggccatgaccccgcaggaaataaagcatgggtcaccccgaacaagcacatcagccgtccccgacgtagacgaaccaacatctaaagacctcatcgacggagaccgcgtcttcgccctg

SEQ ID NO: 27756 - DNA, 431 bp, Zea Mays
caagtgtactatacagttcactattttgaaagaaaacatcatcggacaaagcaactagatcatctcacattatcacaagcctcagttcaatattttcaatgaaacaacaacaaacagcctgaggccctcaaatgaatataacatgcatatgaactggcatcttcaactatgcactgtcaccacaaacatctatatgccctcagttatttttcagcaaaaataaccaagtgtagtatacagttcactattttgaaagaaaacatcatagggctaagcaactagatcatctcacattaccacaagcctcagttcaatattttcaatgaaacaacagcaaacaacctgatgccctcagctaattttcacaaaaagacttagtgtagtcagttcaatattttcaaagaaaacatcacagggcaaagcaaatatat

SEQ ID NO: 27757 - DNA, 292 bp, Zea Mays
gtcgattcataattccagtacaaatgacaacaggggaaatcatacccaaacacaacaacacagctctcaatcatcaggggcgcaacaaagttctttaaggccatcaactccaagaggtagagggggcagaagctttagatgaagatatggagatcagcctaagaaactgttttgtttgttctgcggcaaagacaaagggcataccacaggaacgtgccaggttacattcaaaagcagaaagaaattgccgaagttgaagcatggcagaatcagccgaagcaggttctacata

SEQ ID NO: 27758 - DNA, 695 bp, Zea Mays
gcgaggaactcatagtgcaggagtttctgatcgtgtagttaatcaggtaagaaactgtctcctactctccttgctggtaaaatgataaaatattattgtcattgttatttccagaaaacaaaagaacaatctaagcctgcgttttttgtttgtaagcagttcttgacggaactggatggtgtggaaaccttaactggagtattcgtatttgcagctacgaggttagtgctgtgcaaagcatgacaactgttataatttgtgcagtcctagtctcaagctcttgtattctgtacttttacagacagatggaattgccctgaagatattttttgggctaaccttagggaaaactaagtggcttgtttatttagggggtgtttggctcccacctccttaactttagtgactaaagtttagtaattttagtccctaaattgccaaacagggtgactaaaggaggtctcccaaatagaaattctagggactaaaatttagtcattaaagcttaggagggtgactaaagaaaccaaacacccccttagttttttttgtgttgtgtcttttgatgtgattacttattgtttttgcacagcaagccacagctaatcgatgctgcgctcttgcgacctggaaggtttgatcgtctagtcttttgtgatttccctcgatgggatgaacgtttagaaattctgaag

SEQ ID NO: 27759 - DNA, 338 bp, Zea Mays
cttgcttcgcgtctttctcgcctctggtggcttccgagttcgtcgcgcgaaagtttctgtggggggtggatctcctctccgtttcgcccgccttcgcttggtgaggagtggcctcttccgggccgctctggtgtgtcggctccgatggattcgaaaaatcgaaaccctaactgggatcgatggggtccgaaggaggcgccgcagggttctcagtcgtggggaaagaatcggaacctcagctggcgattgaagactggatccggaaaatctgatgtcaaagaagatattcctgtctccactcccggtgatgccggtctgccaggtatcctcaaaacccc

SEQ ID NO: 27760 - DNA, 479 bp, Zea Mays
caaagggagaagaaaagtgttgggcaccaaacgatgaatccacctcgtcgacaggtttgttctccactaataataagtgttttattgctaacaatgacggtggagacaaaagtcatgatgaggaggaatatgaggatgatagcgaggatgaatgacattaatgacagggaaaatgagaccgatgatgtggaagaagatgagattcgtcgtttctacatccatctcaacaaagaggacaaagcactcttggttaagctgttgagaaggaacaaggaacaaggcgagatgcttctcaggctagaggagtccctcatcaaaaccaacaacagcctggagaagatgaccaaagaaaatgaggagctaaagtgctctcatgatgatttggtccaacggtatgaatctattttaattgagcaaagaaataatcatgatgcattatctaatgttgctcaacttagaacggaaaatttcatgcttag

SEQ ID NO: 27761 - DNA, 480 bp, Zea Mays
ctttaatacaacaccagggctgaaggggtacggggccacacggccgcacgatttaatatctaccgtccagattagattcggcgcatgacgaaccgatatcgcgagtctacaaccgtccgattagaaacgaacgacccagatttgctctgttattaattgaaccggtgcgcatccaggaccaaccaatcccgacccgacgactcacgatgatttccctcaaatctaatcggggacgttgattacgaatccaacgacgcatacttgactaccctgagatctaatcgtgactgttgaatacgatccaacggcccaagcgacttcttcttcctctctctgactacgacgcccgcactacgtctcgacacctaggtgcagccgaccgcgcgccatggccgacgctctatcgctcgcagagaaagggaataaaagaaagaaagaaaaatagagctcaccggaggctagtgcgtttaggaggaattg

SEQ ID NO: 27762 - DNA, 293 bp, Zea Mays
cgtatcgcaaggatatgaaagctccagttcttagctaccgcaccaaatggccaaccggctggaaaggtgaatggttttatatcaaggccgatgagaagaagagggggaaactgatgacgatggtcatgtgcccgctggatttaagcttcagaatgaccagacctctatgcaacatgcagctaggctcagcatgccagctggccgcagtagaattcagggtggtggctgaacaaatcagcaccagggacttggtgcaagaatacctggccaacaggacatctccaacgtcaagt

SEQ ID NO: 27763 - DNA, 523 bp, Zea Mays
atggactttgttgattccacttgacaacggcaatcgacaaaaaggaatagggtaatgtctgactcgacacatgtccaaccctttatcagtcctcgaagggagacactctaccctcgggggctcaggggctactatcagtgaaatgattcccgatccttgggcccaccggtcattgagcacgctaaggaaagagcccctaatcattggggcttgttagtcagtcgaaagaggcagatacatcaaccctgaaaggacttgcccccgatcgaaccccacggcaccgagcccaagttcgggcgtggcagaacctgataagggaggctaggcgtgtctgaagggaaccactcgagcggatctcgcgctcgaccactgattgacccaccataaatgactgaccgcattaaccatgcttggtactgagccacaacgtaggcaccgatctacttcccactcatgacctacagacccatcgagctgcatagcgcccatgacctacgagcgcttagcatgcggcgcattaatg

SEQ ID NO: 27764 - DNA, 528 bp, Zea Mays
gcaaggggaccatgtgttttgcaggaccactctgcctgaggtagagcaccaggaagatacgttgcgacagatatagttgtcatgggacaaaggttaaccaagcccccacgctacccgagcgcgacgcgacagacgaaccgtttttagtcccatcaggacacccatgccaaagcaacattatgatggccgcccattactggtgcaccacaactataactccatcgagccaaccaggtaagaaaccgaaacacacccaaaaaaccccaagtagagcaaggggtggaccgagcaagctcctagtgagtcacaagctagatgatcggcccataggtcatttgctcgaatccacatccaaggtcatacctcgcattctccctcgaaaacctagctgacggggtggccacggagccccctttggacggcgagactgaccaaagggccgatatgtgatcgaacaaggaagaacttgatgagatgccccagcgggccaagcccccagtgggaccactcgccaaaaatacacccagg

SEQ ID NO: 27765 - DNA, 494 bp, Zea Mays
ggagcggcagacgacatgctgccacttcgataaccaggagacgaggttgtcagttaagaaagcccgaagtggaccggcgcgtgtcgagacaaccagtccaatcagcgtcagtgtaaacgatgaggtcggaggccaaagaacgtcgaagaagcaggtctagtcgagcgtgccccaaaggtaccaaataatccacttcacaacggtgagatgcggctctcgtggatcatgcatgtggatgcaaacctgttggatggcataggagatgtcaagcctggtgaaggtaaggtatcggagagccccaacaaggctcctttaggcggtggaattgctaactagagcaccgttgtcagagatcttagcctgagtgtccataggcgtggcacgaggcttgcagtatatcatcccagcccactgaagaatgtctagagtgtactgccgctgatggaggaacatgccacacgcatgacgttccactataacacccaagatttggt

SEQ ID NO: 27766 - DNA, 304 bp, Zea Mays
ttgtaagccagcctctaaccatgttaagtctttgtgctttccccggtggtcagcccccttcgcaggctggttcgcatgaccgacttcgccatttacaggagggttgagattttatgccttcggtattgttcttcgactttcgtcttctgtagcttcgaccgtttgttcttgtggtcaaaggggggtgttctatctttgctccaatatgagcccatcgagaggttagttcaactttttcagtcaatcctgatgtcttgtgaaggctacgaatgaatgctgccctcgatcacatgttgaaccggtt

SEQ ID NO: 27767 - DNA, 423 bp, Zea Mays
tttatatgggtaaatatgagtgaagtgtgtgcttggtttgaatttaggcgaagaaaatggaatttgggcactcggctcggaaacgatcgctcaaaacagggaaatgtgtgaaattgaagcctggtatatcggattggcgtgaactttggcgaacatgttactggaggtattttgaaggtgcctgaaaaatttgggttcaattggagcatttttggctggtttgggcatttcaccgaacacgtggtatgtggtgagttaggtttttggagatatggccattttgggctgtgaaaccctcccgaaggagctaggaacctgcaggtgattcaatgggacacaaaggaaccacatccaacactttgattcatagaaaattcacagatttgatatagggaatcaaaggtggggaagaggtgagctcac

SEQ ID NO: 27768 - DNA, 571 bp, Zea Mays
cttgaggtttcggaactaacagtgtaaacattgcctttgtaggtgggagcgatgggttccttttatcggggtggtgtgtcgttttgggttggcttagcctttgtgcccttcggttgggtgtcgatatctctggtggctaaagtaactctagtttgtttggtgttatcagcggagactgccttcgtcatctcaatgggggtagagttggatcgagtggttttctaggaggcatcatggggtctggttttcgtcgcgagcacgatggctgccaaatgttgggccagacaggtggaccctaacactcgggggcacatgataaacatggtgctccaaaaaacattaggttgggaacagtagtgtctcgtcaagcatgtcccatcagttacaggtcgtgtatttatagggcgactagggcatgtaaatctaaatacaattttgcatccgactactggctacatccccggtatatgttgtgctatggggtaattacagtacaatattaacgcttcggaactaagtacaccagggcactcacccaccctgtaggatgaagagtgggcctagcagggca

SEQ ID NO: 27769 - DNA, 367 bp, Zea Mays
ggtgaggaggggtgctgccgccgagtagggagatggaggagagagagggaggggctgcatgtacgggaacacaaaaatgtagaaactccatggacaacaatgaagggaagtgcaccgaagaagaggaccctcgccggaaccgaggaaaatccgtcgattgacggcaaactggaggtcggatcatcgaatcgaaagcactaggacaaagctctcaacgagacgaatggagcggtaccatcagatttcaccaatgacgcatggattgaaagtaattgctcacgagagttggaaccgccccgaacttcgatgagcaattccaggaattgtggatctaaactgggaaacggtttcaggatttgaaaagggt

SEQ ID NO: 27770 - DNA, 718 bp, Zea Mays
aaactctgtctgccagaccgactgatgaacatatcccatggtacagtactggaaatatcaccggagtggataactgtcgccgccgacgaccaccgtgcatggattcgcgtattgggtcgccgtgattcgtgctgaccgagtggataacacttgggatcaagcaagggtccccgccgtggataaactccagccgataaagaattccggccaccgtaccgtgttcaccgcggtggaaaccgataagaacgccggtgactcccgtcgcacggccttgcgccacgtatccgaacacctctgtcgcgtcgccgtgactctttacagccgtcaaatcgtcgccggtgagctcaccacgactgaggacacgaaccgactgcgccatgatccttccctgtttccggccgccagctctgcccggccaaattgagcaccaccgtcgaagccctctataaattgatggccgggggagctgcgctatgtcatcttgaagccgtagcacccgctcccacccttaatcattcacccgagcccgtgaatttcgaacttcccccaaattcgatccctgccaccgtgaagatcagctcgtcgcggccagcttgattcaggttagctcgagtccctctgctgcttgttctagcatccttaggtaccccgcaaacccctcgacccctttaattaatttggaccgccagggatcaccgggaacacactcatctgtccg

SEQ ID NO: 27771 - DNA, 360 bp, Zea Mays
atgggaagcttcggatgtgcatcgactacaccagccttaataaggcttgtcccaaggacccgtatccacttccacgtatagatcaaatcgtggattctacctccgggtgcgacctcttgtccttcttagatgcttactctggtttccatcaaatccagatgtctagggaagataggaagcataccgcttttgtaacagtggatgtgctttactgctatgtcataatgccttacgatctgaaaaacaccttgccgacatttgtgggggcgatgagtaagactttcggggatttgattagggacagagtagaggtatacatcgatgacatcatggtcaatactaagagagggtcgaccctag

SEQ ID NO: 27772 - DNA, 367 bp, Zea Mays
cccaaccatttgcgttttaaattagacatcatatgagcactaatacttttcatccgcgaccgtaaccatacgcatttagaatacaacaagcaatttaccgggactacaagcttaactaaagtcatctaagagtcggctagctagaacaacgacaccgcccgctagacagcatacacgtcggcttgcctattattatcacaattcgagacacaacatatataacaatcacttaacacaatcaactcctaccgaacatgagttggctaatgacgtgactatttcccaattaccatcacacaccacctttcgccatttttagatgaccggcacgacacagctattgtaatacatctcaagtttattcaac

SEQ ID NO: 27773 - DNA, 360 bp, Zea Mays
ccggatcaatggccaggatgaacctgggctgaaacgttaggcgcagaccaatctggccacagatcccgcgatcgacggccagaaactcatcggccatacccgctatctcgatcggcggcgccaccgtgcgacttagacgtgacggacgccattgccggagctccgaatctcgctatacagcgcgctattctccattctacgggatgctacacaatcagatggggctagtgaacaattgtgcaaggaatactcaccggagatgggtacggagattcctggcgatggcgcactgcggcactgcggcggagattgcactccggtgaacaattgcggatcgttccgtcgtcgatttggcccaca

SEQ ID NO: 27774 - DNA, 284 bp, Zea Mays
tatcgccgtgattcacgctgaattaaacacggataacgatcacggggtgaaagatctcgccgtggatgggctggaatgtactgtgtgcgtgatggttcatcagtgcacaccaactacgtggccaagcggcaatcaccggcgtgttcgccgttcaccgggtggatgccacgccttaggaggtttatcgtgtcaatatgagccgaggtgactatccaatgaccgccgtagttcagtcgctctgcggttgccacggtagatcgccgccgtgactcattcccctctcg

SEQ ID NO: 27775 - DNA, 425 bp, Zea Mays
ggacgagcctccagtacgtccatgcatgtaacaagttcagcaactcgtcgatcaagctgctcataggatgtcaccgcagagtcctggtattttttaaaagcttcagtcatcgcgcgcatcatctccttcaattccagctgagagacacactcatcgtcgttaagcttaggccccttgtccttgtccatttgattctttggtcctgtcattgttagcacaaaacagagacaaaaaggcaacaaataatgtgaaccctacaactatctctcagggtggtggtgaaggtggtggaatacaaattatgaagcgtcttaccccgctcttacaaggttcttaccagcactgcaggtggcaaacggtgaccggtgtgactgtccaacgagcgtgggtgtgattgaaaaggagtaactgttctgctcgagaga

SEQ ID NO: 27776 - DNA, 600 bp, Zea Mays
cacatcaatattgtagatctatggaaggagaataactttgctatagaactcatgccttggtaccatgaagaattctgagataaatgagcctgaagttggactgtcagactgcttgaaatctgaaattcagattaacagtgggatggcatggagttagggctcggatttaaacatgatccagtgcaagtttgagcatgattcccataacaaatttgtggctggtatgtagcactacaactttgatgcagagactcgggggtgtttccatagaaaattgggaggaatctggccctaaatcttggctgtcagacacactgaataagcatcgccatggtacagtgcctggacagatcagatcaaccgctcccctcgccgccgatgacttcgcgccgggatcgtcgccgccgttaagattcgcactcactggtaaccggatagcactcggggtcgcgtaaatatcctcgtcgtggatagactccggccaccgtaccatgttcaccgcagcggaatccgataacttcaccggtgaccaccgcctctcggccttgtgccgcgtggctctgcctttccaccgcgtcgccgtgactccctatagctgtc

SEQ ID NO: 27777 - DNA, 317 bp, Zea Mays
ccaacctctatactgaaagaccagcccgtgacacaaaattctccaaaacaaacgaatagctagcgccagagtcaaaaagagcatgggccacaaacgaatcaactgaaactgtacctgtcaccacgtctccttgctctctgccatccgcagcgggtagcacataagctccagaaatacccgcagaagaggaagctctcggagtgaaactaacagaagaaccccactgagtcgccgggtgaggcagacgcggagctccaaactgagacggcataggagtagacggtgcaggagtaggcgcggccagatactgagaaaaa

SEQ ID NO: 27778 - DNA, 293 bp, Zea Mays
ggagcaggccacacactcaatttatagcgtctgcaagcggtggctccgaatttgggaaaaggtaagctggcagtcggagcaaaggtgagtcaccggagtcgcttatcgtggcatttactgggcaaaggtttacggcggtcactacttagtcttcatggcccgcgacgacgtggtgaaacggcctaagccgtgtcgtgaccgaggtaaatggtgggcataacggcggtggtcgcgcggccacattgccgatctagtgggtacgacgactgagcagtacattgccccatgttcat

SEQ ID NO: 27779 - DNA, 293 bp, Zea Mays
caaagaagctaggtgactagccatggtcactaacacctgggacacacactggcgcgaggatgtgacagagcggatcatgtcaacgatgtggtcaaggactagcgagacacgtgtctaggacatggggattcacatgcggtgcgctactcgcgacggttttggtggttgagcatcaaaaccactcagctctacgtatggcgagttttgctgagtttgaacctcaaaacttagcggtacagatctaacggtaattgaaggcggtgtgtggtgtcgttatgaagggtgcatcgagg

SEQ ID NO: 27780 - DNA, 727 bp, Zea Mays
gtcctgcatgcatgcagctgccctcccactcaccccgcttcctgttatggcgccctgcatgcaggcatgcagctgccctcccactcacctccccctcccgttatggcgccctgcatgcaggcatgcagctgccctcccactcacgctacatgcaagtcgtactgtcatcctgcataacgcacgggcacggttgtagactgcgtacgtagatgttggtattggcgtagccggcggctgtgagaacgcgcacgacatcaacttgtctgctacgggagcatcggcagcagccagccccagcccctaggtcctcctactcccagcttcccaggcgagaaatttatttgtccatttgtccatagctagttggagctttgattagtcttggtctgactacctaagggagtgtgctacgccaatacacgacatcctctctccgcatgcagagcaggcaacctcagcccacgactcttatatattaaaccataccacgtatccattgttttcaagtgatttgttcacactcgacaaagtcggatgatgtcgagatgaaacgacactaatgttctggcattacagtaccaaacaagcaatacaaactaaactcgatccagagcgtctcctcctcctcctctctctcggttgtttagccacacatcactggctgcagcgcaagacggtaatgcttatcttagccaactaatgacgtgccccccctcatccactcatg

SEQ ID NO: 27781 - DNA, 596 bp, Zea Mays
tttgtccatttgccaactctactgcaagccccatttccaaattgctgggacgcttcacaaggggggaacacctctaccagtattgagtcttcaaattccagcccagccttgccatacaacattcaatgaactaaaaaaacatatcccattcagtttggcatcaatctcaacacgggagttctccaaaatgagtatactacatccctctcattgatcattcagagcaattcgttccaaaggggattcagcaccacgctgcaagaatttcatcaaacagtaagtcatagccaaggctaagcactgagccacactcctggatattctcagctctaaccacattgcaaaagcctcccaatatgacaaatcaaatacttgcaggttcatcgctgtattgtaacataaagatctggcttttctttctaagaaaaaaatatatatacatatacagccacatttcttccatggtttcggctcaacagcataaacatatttcctaccaggacaccttaaacaaacgcaacaggatacaactgccagctaaacatgacactgtgactcttcatagaatgttcgcctgcctacagtacgagcaggag

SEQ ID NO: 27782 - DNA, 307 bp, Zea Mays
gttgattttggtggattccggaagttcacattctttcctttcgacgacagtggctgatcaattgtcaggaattacaccgatgacaactcctgttcaagtgcaagtagccgatgggggcagattgtcttgttctcgtcaattattgggcgcgatttggacggtgcaacggtgttcctttgccactgattttcgtcttttggccctatcttcttatggtatgattattgggatggattggctttctcagcatagcccgatgaagacccattggctcgaaaagtggatggtcattccttatagatcagca

SEQ ID NO: 27783 - DNA, 766 bp, Zea Mays
aaaaaaataaaaaatgtgagcatctaaaatttcttttcattcaacttttttaatataataatgcaattgcttacttgttagcctaaatatgtaggagataactggtgttgggaaatttaagaataggcctctccaaaatgaagatgatatgaaggtgatgtttgggagcatcattaatgaagagacagatcattggaatcctatgtcttccaacccgatcatgccacctagtgcagatcaatcccctcacattatctatgtgtgtgtcttgtggacaagttatctatgtgtgtgtcttgtggacaatttatctatgtgtgtgtcatgtggacaatttatctatgtgtgtgtcttgtggacaatttatctatgtgtcttgcagatatgtagcgatgatgatggtgatgagattgaggattgtttcagaatggtcttaggcggtgctatgttggcacaaatatatgttgacatgtaccttactaaaaaccctacaaggacgtctacaacaagtggaatgggatttatgttagagcttttcaacactccaggggaatgccatagacaacttcacatgagcatagaaattttctttgacctccatgggttattggttgacaggtacgggctgaaagaatcactacacatgtcaactattgagagtctaggtattctgttattcatttgtggagggaatgagtccatcagtagagttgttaatagattcaagcactcgggtgaaactattagtagaaaatttgaagatgtt

SEQ ID NO: 27784 - DNA, 550 bp, Zea Mays
gcgagggtggcggtaggagtcggcaatgggggtgggcgggtggcggcgggatggtagtagatggaatcaatggtggaggcgcgacggtggtagagggaagtgtggcgcgaatggtgttatggtggaggtcgctcgtatgctgttgtaccccgtcagtccgtttagaaagctaggtgggtagatgatggaagagacgacagactgtcgggcttctagagcagcgagccgtgtggactgctggacgcccatagcgcttagccacacaaagagcgatgtgggctgctgcatgatcatgcggtggaagtcactatcatgctggggtcgggcgcaacaggggagtcggtggagatggctgcagatgacgtcagcgcgtctccacctcccgtcctggtctccaccaccacctccaccatttggcatcgtcgtctcggccacccaggagctgacgtcataaccaagcttaccagcagtttagattcttcttgtagtaggagacattttgagggcctctgtcatgcttgtcagcttggccgacatactcgtctccctt

SEQ ID NO: 27785 - DNA, 373 bp, Zea Mays
gtggagcacaggatgtatcgtggctgagttgtttgctggcaagccaatcatgccaggaagaaccgaggtagttctaatttgattattgatgcttcttgtcgttttgcttccagacatcgatcaccaattaatataatgagcccgaaatcgttgccattgccaggtggagcaaatccacaagatatttaagctgtgtggctccccatccgagaactactgcaagaaatcgaaggtgccagaaactgcaatgttcaagcctcagcagcaatacaggcggtgtgtcaccgagactttcaaagatttacccactccagctgtacttctcatcgactcattgctttcgctagagccagaaggacgtggaacagccacc

SEQ ID NO: 27786 - DNA, 393 bp, Zea Mays
tcacgagtcgtcgactcgacttcacagcttatgctacggcacctctgaccctcctcgtcgccctcacggcggtgtggctccgggtacagctcacgtcgcggctctgttatgcccgcccttctcagatgggtcgcgacgttcaccgacatatttcactacagcagccaagttcttatttcagcttatgatacggactcttctgccgaggatgggatacagggaggctaccacacatatctagctctggctccttggtgccctggtctctcactctgagtttgacgttgttgacttccttatttgtgagattgaggacaccgtattggatggtatgcgtgctcgtcgtcagctgccatatgctcactacttgtgccacatttttgctcagctgat

SEQ ID NO: 27787 - DNA, 288 bp, Zea Mays
ctttgactgaggtactaaaactgaagtgtcatagcatcaaggggagacactagctaaacaaacctgttgtttgcttatgtaaaatatcatgcttgttttgtatctattggtagttcataatattatcttatatagaaaatgccaaagtttgtattgcaggtccaccgtttcatgattttcatttaccgacctcctcccaacaaaatgaagatcggttcagtctggcatgatttctctagcagaatgccttgtgcatatatatagcgaccttattttgtgatcgtagcg

SEQ ID NO: 27788 - DNA, 537 bp, Zea Mays
ctcattctcaaacatgcccaacctattttgtacctcgtgttcagtgtcatatatgtaaagctgtgcaaactgtggtcgcaatccatggctgggtagcagcgagccaatgcgatggtgtacgacaccattgattttgaaaacataaggtgctgtaccgttatttatcgatctatcaacgacggcacccagtgaggtaaacgcgaaaagggaattgtatgagcgaatttgcctaaggaaccttttggcacgattatcaccatcgaatcgcagcaggtcacttaagggaggcggcggacatttgtaaggctccaaaacaatcttacctcctctgcaacacaggttgtacacaagcctgcgctgcgtaattgtagaagcgcttttgacccgttcttgaaaccagaaaacagcgccacaatgtcggcactcgtctgatgggccaccatagtatgagcgatctttgtaggtctctacatgcaaagatgggtccaggatgcatggattacttgaggaatacgtagacaaaataatctaggcagg

SEQ ID NO: 27789 - DNA, 304 bp, Zea Mays
aagacattcaagaagatccaatagaagtgtctcatctgcctaagtcaatgatttaaccaaatgaaactcggggcatttacctacaaatccaatagaatttactgttgaacattcttgttgtctcatttgagagatctaccaaggataatggaacgtaattagagagataggattaagcttcataaggaattcttaaaaagtttttggtagagttaaatttttgggtcgctacacacaagcattgcaaatcacaagcttcataattatttaagcatcattacactcgtgtagggatagaagcaac

SEQ ID NO: 27790 - DNA, 690 bp, Zea Mays
aaaagtcgcctaagggtgcagccggatcctccgtgcaaaaatcgactacgggtgcagccggaccaacacaataaatgtgcaagatcaagtgcacaagtcgcctacgggcgcggccggatcagcgaaggcacgcaggcttatcatacaaattatagttacatacatgcagcgagggcatcacacattacatcggctcaaccttcgggatgatacccatctccctatagttgaacagcagtatcctcaattcatcgccctcaaacagacttagcagctctccctcacctacactcgccccagccggcgaggccagcaattcccgcttgccagtcccgtccacacgaagacgaccaccctccacctcaccatgatgacgcccatcacttcacgacaactcactcactctccatttcgccatcgcccttcgccgcctatgcccagtactcgcacccggaagatcctcatcacccattacatgcggagaagcctcagccacagccacatccaatgctgcaaagtaatccaaatcctcatctgaagactcctctgtccacaccatcgaactcccagaatcatcagactcaaaacacttagacacagaatcatctgaatcatcttcagcaaccacggtcgaagccgccacaaaattagcagtgtcagtagcggttgcgtgcgcaggcccaaaatcct

SEQ ID NO: 27791 - DNA, 399 bp, Zea Mays
ggaaaacagatttgggagaaagagaaattagagagctatggtggctaatcggaggcaggggcgggtgctctggcttcgtgattacctaacggagctagcagtgtgcttaatttatagtgttcaagagcggtggccttcaattttggaatggcgcgctggcggtcggagaggaagaagatcactggtggcgcaatcgtggagttcaccggttcagttgttcagagagggtaagcctaagtgtgccacggttactaccgtgtagtgaagagtcactgcgtggcataattgagatcgccggagtgtccacgacgacaccggcggtccggccacgtcgcaacggctacatgcacggtgataagcttcccctacgaccgcatctgcttccccacaagatctttt

SEQ ID NO: 27792 - DNA, 505 bp, Zea Mays
gacagactatttaggtccaaggaaaccttgagtaggaagtttgagaaagttttgaattgtcttaacaaactagctgttgacaacataaggcctttagatcctgagttcactacaattcaccctaggctgcagtcacgaagattctctccttactttgataattgcataggtgctatagatggcactcatataccagttgtagttccagcaaatcaggttgtgcaacatactggtaggaaggggtacactagtcaaaatgtgttggcaatctgtgacttcaacatgagattcactttcgtcgtcgcgggttggcctggatctgtacatgatatgagagtctttaaagatgcagttgacaaatatggcaacaagtttccccatccacccccaggtaaatggttcatttcatttgtttgaatgcccagttgtacataaaatgcgtgacaatgaatgtgtttgtttgcaggcaagttttatcttgtggattcgggatatcccaacaggc

SEQ ID NO: 27793 - DNA, 323 bp, Zea Mays
aagctccttctctctctcggtctcacaaccctctgccagatcgatggcggatcccaccaacaccccatggtggttcgggcgggccttatagggagcaaggaagtccgagcggagcagtagcgagatccccgcacgcggatttcggcggtcaacccggaccgattcgcacgagcttgaagagggatctggcggatgggccccacaaaccagcgccagtgggtggatttggcgcgtgcgaagtccggctgacggttggggcccgcaggtcggcgctactctgaagtcgggctgtgcgggagtgggctaggtgctagtgggccggt

SEQ ID NO: 27794 - DNA, 349 bp, Zea Mays
agtggaggtctagttgatagaagtgaaacaccaatcaagctgaacaagaaaaggattcgactatatattgctccaagtgtagcttctacccttcaaagggatttcaatgattccaatgctgctgataattgagttgaagagattcatgtctgacacattcccacctaccttatttccatcctccaccgagcggcagaagttgaaatcaccaattagcatccaattatccaccgagaaatgtaaaagttgctaaaccagctgatgaaggccatccaattagcatccaattatccaccgagaaatgtaaaagttgctaacacaagtacaagggagatcccttgagggagaa

SEQ ID NO: 27795 - DNA, 458 bp, Zea Mays
cgggatgcctcattgccgctgccttgattaaaaatatccttctgcagcggccccgaggtggcgcgcgattgtgcgtagcggttcgctccccacgtggcagttcgctcttttcgcactcaaagaccggcacataaaccatatgacttgtggactcgggcccccgtgtcatagaccaggttgtcttggtcctcggtgcccgtcgggcgagatctcctgcggcgattgaggggcgcgcggaagggtttccttgagtgaggactccggttttcttgaaaaagggttcaccctcgcgtgcagcagttaccctttcgccttctcttccaatcgactacgccctttcaccttcgtgctcctctgcgcccctttgccttcgtgctcctgtgaattacgctcgcggcgccgtagttgccatggcttcgctaggtcatcccgaccgctttcagtccgaggcagcactc

SEQ ID NO: 27796 - DNA, 338 bp, Zea Mays
gagaaggacaataaaccatgaataccaatttttaaaacctaaaacttgcttagaaactgttacggatcgtcaggactagatcgctagacctaggacgaaaggccttgggcatagagggagaaataggtggctaattaattaggccctgtgggccaatacttatatttttaaggatgccctaaaaaggcaccctattttcttttgagaggcaacgtttcttacagcatgcatgcattataaaacacaaagaggaaattaaaatttgagctaaccccttttctttaaatcatcctggctctctttttctttttccttccaccataatctttatctttgat

SEQ ID NO: 27797 - DNA, 399 bp, Zea Mays
agtatacattcccgcggattgggagtggtctagttcgatttaacgggtcggtgagcatcacaagcttatggagttgcagaaacaacactcaatttaggcagatccttaccagagcggtttggccacgaacgggctgttcttcacggggcggcggaccgatttaggggaaaatggcgctgcggcgttcacgagtggaattgagggcagagctttgggctatacggctataaggggttctagtcttgctgcgcacaaccaatttgggaggagggggcagaggcagcacgaatttctgcttcggttcaacctacggtgtgcgcgatgctcatacctcaccgcggagcatggctatttatagctgcgccggcccagtggtcacctcgcggccgagaagagcat

SEQ ID NO: 27798 - DNA, 392 bp, Zea Mays
ttagggataacgtgttctattgttttagcatcaaatatggtgggtgatgaccgtcgatagatgtatgaaggttggcgtatgaatgatccctcggcgaagtggataagaaagacaaagaattttattgatcgtgctttttctttgttaagaaccggcacggatgtgcggtgtccatgtcatatgtgtcggatttgtagatgtcaagacaagagaactctatcagcacacctttgcaaaaaatggctacatgtctaactatgaagtctgggtgtatcacggtgaggagttttagctgaaaatgtgatgaaagcccacatcaatgacgaaatggaatatgatagaatggacgagatgtttgaagattttagagaggatcatgatttagtgtttcc

SEQ ID NO: 27799 - DNA, 314 bp, Zea Mays
gctggaggagaaaggaatgtttcaggagcatgcactattgtatgactcatatgcacaatatctaattgctcatgggaaattggttgaggctgataaggtgtatggaatcggtatttctaggttagtgtgagtggaaaataatttccacttgaaattctactctttttaagcatatacaacctgatattcacacgtccatgtgatgttaaaatatggtctgtggcttaactaggaaagcagagccccttgataatttgaagaagatgcacttgacatttctaaaacatctggagaatattttagaagaagcagat

SEQ ID NO: 27800 - DNA, 354 bp, Zea Mays
gggcaaatgacctgtgcgactataccgataactactccatccgttctaatttatgctataaccaaagcaaaagtagatccaatctactaggcaaatcacctagatgcaaaccatcatgataaaaatatgtgcatgaacgactttggtttcattgaagggaaatgggtacaatcaagataacatgcgagtagaagatcatggatcattaccagtagatgtgcagcacagcgaaaaaaacgtgacgatgcagtggaagtcgtcgtacgtcctcacttaccaccaacacgttaatctatgctcctatttgttgctgatcaacaccgcagtagcgtctccatggtaaccacacttgcg

SEQ ID NO: 27801 - DNA, 315 bp, Zea Mays
aaacagcacctaacccaataccactagcatcacattcaagttcaaacactttctgaaagtcgggcaattgtaagagtggagcatgggttaacttatctttcaaagtgttgaacgcctcttcttgtggggggtcccaagcaaaatacacacctttctttgtgagttcgtgcaaaggggcagcgatggagctaaaatcacacacaaaacggcggtaaaatcctgcaagtccaagaaaactccaaatttgggtgaccgtcgttggtgtaggccagtcctgaatggcttcaaccttgctgctatccacctcaatgccct

SEQ ID NO: 27802 - DNA, 331 bp, Zea Mays
gtgggcctccgctttctcggatggctgcaggaggagttggaggtgctcctaatgattttgatgggcctcatgtccttcgcctcgctcatcacctgcgaaggggccgtgaatgccctgtcccgcgagggatgtgggctctttgaagtcttcgaccgatcagacgaggacttcaagcgcggaatcttccaggttgaggacccggtgctgaagcggtcagccgaggcgctttacgataggatgtggggccctcacggtcgtgagactgttcgggagaggtccgaccgggcgatggagcaggtatggagcatatgtgtatatttgtgattttgtg

SEQ ID NO: 27803 - DNA, 757 bp, Zea Mays
ctgatattaacagacccttcttttcctattccagatggaagactctctggtcattaggacatcctactgttcagaggtggaggggttcccacatctattgtgaagctgtgcgcttcgcatgggaatccgcaaaagccagaatatgtctggaaggagtatctcgagaatggaatggagaagtgctctatggcagtctacctgggagaaagccgaaactacccgaaccatccttctttccaagtcactttcaccggacaccgcttcctagatacttgccagaatgttgcccgaaaaaccctccgacaactatgccagggctacagcaaagtaatctttgaaacccccctccgctacttcccacccagcaacaaagatacccccacctggaggaaaagacttcaggccctgtcaggaggagatcctatcgaagatgaccccaccatcgtctacatggctggatacctccacaccctcgataaccaatatgatgaccttgcctcccactgcactcacctaaactcccgggtggaaagcctagagcaaaaagtcagggaacttacgagggaaaaggcgtcccttcaagagagccttgagatagcagaaggcgaggaaaccaacacccgtgaggcctaccgcactctgaagatggattacgacaagaagctgaagaagctcgcccccgcaagaaaaatccgcaagaaaaccaaaagtcaaggatgtcagactgagcagaaggaagaagcccctccagccctgc

SEQ ID NO: 27804 - DNA, 462 bp, Zea Mays
cgggcgagcgcactccccatcgggagtcacatccatcgcactgcaagagcgttcgcatgatgctttttcatcggtactagatttgcaccatggaagcagatttggaaaagctcttgcagagaataatagatagatgctggacaaaagaacatcttgcgaagcgtggcttgccacaccctactgtttgccctctttgtgaccaagctaatgatattgtccagcatatcttggtctcatgtaatttctaggtaggtttgggtggtcattcttctcctgcgtcgttcaagaaaataaaatttagctagctttcatatgatatgcttcattgcttcaagacaacaggtcgtgctaccttttctagcaccttttgatgacataataacaggtggacatttagatctctctatactgatagctagtttcgttgttagagtatatttggtagttagaatattgtaatct

SEQ ID NO: 27805 - DNA, 320 bp, Zea Mays
cacagttgtccgattacgtatctacggaccagatcgtccctacgagtggttattcccaaaccaatctagaccgtccccgcatgaatcaaggccccacgacgattcttcctaaccgagatgcgtgggtgcctgggccccgccttacactatggtgagctcgccagtgctacgatgaacgactccctagaatccccaccgtcgagccaacccggaccatccgaattcaagggaacaacaggcataggggagaacgatctagagggtcgctggcagggggagaaagagtaccagccaccccgtgagataagtctgcggcggtg

SEQ ID NO: 27806 - DNA, 316 bp, Zea Mays
cacaaaatggtctccacaaaaaatctaataatgtggtttatgtcaagtaaacatgtgtggggtaagtaataggagactctaacacatgaacaataggcatatggccaccatttttggtcgaaaacgaccaaagggtgagtttccgtttatatcgaagactaacacctacagatttttcaccaataaatggtctccacaaaaaacaaataatctggtttatgtcaagaaaacatgtgtggtcaagtaataggtgactatcactcatgattaatggcatatggccagcatttttgaccaaaaacgaccaaagcgtgag

SEQ ID NO: 27807 - DNA, 275 bp, Zea Mays
gagagagcagtggatcaagaatggcgtcgccgtgcgaaagaaagagggagccgccacgccagtgtaggattggggaagaaacgaccagggccgtagatctctctctaggcggccaggattggaagttgtaaattcttttgtctgctggtttatgcatcgtcgatcttggatcggacgagcatgaagtggtctccgattatttaaatctctgacgtcgctctttgatcttgtggccaccaaagtctactggttcaaaggaggattagatctaatcg

SEQ ID NO: 27808 - DNA, 445 bp, Zea Mays
atttttgtgagcagtgagcagtagagtcttatctgctaactattggtgggagtgaactggacagcagagattctagtggctttaccccttcaaaaatatcagattttcgacctctttatgctcagccactggtggtgtgctcagtcatgttactgcctgtctgtgttctttggacaggggatattttggctgtagaaaaatatcaaccaggtgcagtgtatctgctgaacctgtgaatctgagtggtatgtgtgcatgtgagccacatagataagttcatgtattgctggcactctaggaaacactctccactgcatgctgaacatgtgtagggacaccttgcccatattcaggtacttatagggcatggatatgggaagcttccttactgtccttgagctctggattccctgcataagtaaggtggtccttgtgccatcaagat

SEQ ID NO: 27809 - DNA, 313 bp, Zea Mays
cagcctggccgctcgcctagccgctcgggtcagctaggcagaattttcaccagttaaggctgtgcatataatcttatttcttggttcattttttctccacaccagtaaaaccgaatttcactaccaaagcctcgaaattacagagtttaatagtttaacaacaacgtgaagcaaacaacacaatgatgttgttcaccaagggaacaaatgcatgaactgactaccgccactcctagaaacaaagttcagaacaactgaccaaaaatctctgaaaacacagctaagtgttccttatagttacagggcacctgcc

SEQ ID NO: 27810 - DNA, 395 bp, Zea Mays
ggattgtggttattaaccctaagtttgtattgttcttccacctccggttctcccaccttcggttctcccacttatgctcttcttcctgactgtctcctatctttgttcttcttcctttgttcccctaagaccctaaccgtgttcctgtctgtcgacctgtcgagatttacttcgatgctccggctgaggtaaggtggtgcttgtgctttctattacgcctgacatgagcaacaataggggcgtcagtccgtctctcgctgatgacctacaaacccctcaggccacatagcaccatgacctttgaacccctcgaactggtgcatttatggcttacacgccctcggcctgcggcacactcatgacctatcacgactaggcctaagtgtgcaggccga

SEQ ID NO: 27811 - DNA, 365 bp, Zea Mays
ctaacacccagccgccatctaacaaatggctgggcctaattattctggcgcctggcatattgccggcccacaaaagagtctataacacttcccccctcctcgacaaagagctcgtccgcgagcgcgaatgttggatgctgctgtttgaattcttccacctgttcccatgaagtatgtgcatctgaacgcctaatccatttgaccaacacttcccagactcctctgttgagtctggcccttagaaccttttctggcgctgggataacacgcccatgtagaagaggtggcagtggaaccaactgggatggggcaggtccctcaaatttctttaggagagagacgtgaaacacatcatgaattcttgc

SEQ ID NO: 27812 - DNA, 486 bp, Zea Mays
ggaatagcacaagtgcgcaaaatcgaggccatctccacaagactccacgcaaaatacgcctacgggtgcagccggtctaaataaacgtggaaaatcaaagatttccccagaaacacccggacacaagccgcctacgggcgcggccggatcaacgaaggcacgcagcctcatcatacaaatcatagttacacacagcgagggcatcacacattacaacggctcaacttcgggatgatacccatctccctatagttgaacaacattatcttcaatccctcaccctcaaaaagatttcgcaactcaccctcacctacactcgccccagccgacgaagacaacaattcccgtttggcagtcccgtccactcgaagacgaccaccctctacctcaccatgacgcctatcacttcgtgacaactcactcaccctccgcttcgccactgcccttcgacgcctacgtccagcactcacacaaggaatatcctca

SEQ ID NO: 27813 - DNA, 428 bp, Zea Mays
caaccggatacgcactagaagcgctcgacatcgcccgcgggaagcgaggtccccatcccatctaagtgccacgccaacacgattacaagtcgagacaatcttacagtaagcgcagcacgcgatgtcatcatagtttaaatacacaaaacgaagggcccgtcggccacatcgcacaataatacaaatcacattttgttgccctccctctctattgcgaaacaggggagggcaacattttcactcactatcgcaacactagagcgaggccagcaaaaatgctacatcggctcagccttcggaataagacccacctcccgaaaattaaacaacatcatcttcaactctttgccttcgaacagattccgcaagccccctccccaatacatgtcccggacgtcgatgatagtaaatcgtgttggctaccccga

SEQ ID NO: 27814 - DNA, 657 bp, Zea Mays
caaatatccctagttgctattgatgaagctcactgcatttctgaatggtgagttgatatatccttgtagttcagttgatatactgcatgctgttctttgcagttagtaccatagcttctctcttttctgctttgtatcttcttgttttctttgatacatcctatgatcgttgtttttctcccttcttgctttttatgtacttgctctgctctgatcattgcttattgttagttcaacaataactatgtcttgatagttgatattgaacaatggcaggtctcataattttagaccttcatatctaaggctccgtgcatcactacttcgaagaaaacttaatgttcaatctattcttgcaatgactgcaactgcgacaactcaaaccttggaggagatagtgactgtcttagaaataccatctgataacctcattaaaacatctcaaataagggacaatctgcagctgtttatcagcatgagcaataacaggtaggtcactttatatcgttctattctaagtttctgtgggtcattttgatgacaaggcgggattgtttagtatggtttacttatgtaagaagccatgccacctggtttccatgggcacatgttgatccagtcctttaaaaacacagactgaaggatctattgctgttg

SEQ ID NO: 27815 - DNA, 396 bp, Zea Mays
agtgcctgtccatgaggtctgcgtattatcggattcgcgtaactgcatcccatgtcgtgatccgtctgcctgggcactggtgttatcctctctggcataatcaccaatgcgtgttctctgttgccgtggggttcgatgtcggggaggaagaagggtgttagccattaatgttaggattggtggggcctacgccggttgaagtcgcgccgccgtagggagacctgtgcgccactttggctctggccggaggtagatgatgccctgagcaccattggattgagtatgggcgtgtaggattagatggtgcggtgagtgatggcttgccgtcgtggatgattaggcgtcatcgcgtcgtcacagttctcgaccggagttgaggagagagagtgacgaggg

SEQ ID NO: 27816 - DNA, 373 bp, Zea Mays
caccgacctggggcccatagactagatcgaaagcgaagaactcatcaacatcggtgttggaccacttgaggaggggctcggcgtggcacagatcgacagaggggacaggtgtggatcttcgatcgtcgtgggcactgatctctgaccgtcatgagaccggcaatcttgaggatcctccggccatagctggactcgacctcagattcgacgatagccatcgcggcctccatcacggtcgcacactttgttttcttcacatggaacatgctccgccgtattcacctttgtgtgctcagcgcacagtggcctagatgactcgggccctaggctgaccttccactctccttctccatcgtttccacgtgccccccgc

SEQ ID NO: 27817 - DNA, 384 bp, Zea Mays
tgttggtcatcaatcaccaaaacacttatagaaatggctcaaggcacattttcctttcaacccgttaatgactcttcttctcttctcgctcccttccacctcctccggttggacacttgtggtggtgctcgtcggggccacgataccggttgggctaacgtggcataggccatggtggctcatcggtcgagcactctctccctttccctatttaatctccatcggctccccactagccctagcctctttctagctaccattgccaccgtcaaagcttccttcgtcgaccgcatagtgtgtctccactacctctctcttcgattggctactcattgtgcttccccttgatcacccctatctttccactgtgctcccaaccctttt

SEQ ID NO: 27818 - DNA, 581 bp, Zea Mays
ggagttgtggtcagggatttttttttacagatatttttctgttttctgaaccccagccacattagctcgactgaacccataattttatccctcatctggctccacaatttcaatggtaccaagtcaatacagttagacaaacatgtcctccgaccatagcactatcaacttgactcacttgcccaaaaccaagggtgcaaggatcaagagttatcaggtccaaaaaatggtgagcacaacactaaaaactggtttcagttaacagaaacgacacctgacagtggacattttggggcttatttctccaacttcggttcaaccccaagacataatcacttcaagagacttactcacctttgtatggcctttcacattgccagaacatttcaaggccaaaagcgcacagatcacaagttacaggggcccaagagttatagtgcttcaaagtggggtaaaaatacaaaaattcagattcagctatctgaaccaaattcagttttagtaaactgcaccaagtctgaaatttttgaaaccgaccaaccccactttggaccactttttcactcagttgcatatggttt

SEQ ID NO: 27819 - DNA, 557 bp, Zea Mays
ttggctgtttgtgggaggatcgctgatgcaaaactggtgtttgatggcatggaacaacacaatttggtgtcctggaatgctatgttgactggttatgtcaagcccatggatctggccggtgctttagatttgttccagcagatgaggcagaggagacgaaggagcttgatgtagttacactggcttctgtactcaatgcctgtacagggctgcttgaccttgggaaaggtgaggagctccatgcacttgtgaggttgtattccaaatgtggatgcctgaggactgcagaacgtcttcttctatttgaaatgggatcagagagagagagagagagagagagatactcctggaactcgatcatctcaggttacgaacgccactccatgagtgcggacgctctcagcatgccctacccctacgtgagatgcaatccgaggcaaaacctagccagtcaacgtttttcagctctgcccttgcagcctgtgcgaacatatttctgcttaagcatgggaagcacattcatgcatacatgatcagaaacaggaacgacattgacg

SEQ ID NO: 27820 - DNA, 403 bp, Zea Mays
taccaggattaagccatactcttaagtcacataagcctaagttagtgtcatagatcaactcaaccatacactcccaataagtggcacaatccatttatgtgaacctattgattaaaaaaaaatgtcctactcatatacccaattatcttaactatatctccctagctcaaatgaagacaccaagattggagacagaagatgatcaacctcatcaagaaagaatgagcaccaactcaagtcttcaaggatcaagtgaggtcaccaagatgaatcaagatccacaaaatcttggatgaagtctttccttaccctacactttcttacccaaacctatctatactttaaagacatcttctatcctacataataaagtagacatacatatatacacccatgctttcct

SEQ ID NO: 27821 - DNA, 550 bp, Zea Mays
gaggaaacaagcaccaggggcactcggctgagttgtggaagtgggggcagtagcagggcggatgaatacaggctgtttaaaggggtcgaagggtggacaaggtgaagaatggttttgattaataggtcggatcactaacctttgtcgcttttcaggcccttggttggacctgtcacctccaaagccctttgactttcctgggcctgcatatttagcttcaactgccagcattgtgatgacagccctgctgtaggagaggtcgaggtaggtagccatcttccgttgtagccggtcattaaggcctctcataaaacagttcctctttttcaggtcagtgttgacctggtcaattgcatactgggacaaatgacttaagcttcatgaattcttcttgcttcatatggagcactccttctggaatgtagtgctcccaaaatgccaatttaaattcgtcccaggtgacttgatggtcggcaggctgaatggccacataacttcctcaccaggtggtggcagggcctcttaactactgagccgcaaataatggctt

SEQ ID NO: 27822 - DNA, 354 bp, Zea Mays
agaacacctgcaaattgtcatacaaatactgtatcaaatgagtaatcagcttgcgtatctaatctgtatttgtgatgccacacatattttggatttgagctaattccttagaagtagcacactagggtttgcagttgttgatatctaaactgtttatagatatatgtatgttgtatccatgttgtatacaattaatgaatttctaattgacaaacctagtaccagaggctcccacatgagtcgagtttggtgcagggataaactgaggcaagtctttcccctcaaatgcatagagactgcttcgaacccgtgagccgtgacctagtgacttagtgagatagctctcaccactac

SEQ ID NO: 27823 - DNA, 365 bp, Zea Mays
cggctcgacggagagctctgccacgtcggcaatcagctcactacccgcgttccagttccagcactgtaccggcaatgggcataccaattgtaaacgctggatgagacatatgagagagagaagctgggcgcactccatttgtagtcttgactctcgagacgggttacgctacgctatgcgcctcaaagaagaatctacgcatgttgttgttgtttgcaagcatgcaagctacatgatgaacaatgccaaaaatgcagctgacataacgagtgcgatcctccctttacccgttcgcatgaccaaaaccgctgtcagcctgtcattcgtggctgaaacgcagcacagtggaggtggttctccacgca

SEQ ID NO: 27824 - DNA, 276 bp, Zea Mays
ctgtaatataaccagaaagcaaggctatcactggcagaaatagaaatgatcatcaaatgatcacctcctgtcatcttccccatagtagagcagaatgaaagcggccacgctggaccagaaatgagcatttgagatctgttatcagtccaaacagaaatgagctgacagaaatagaaatggcactattttggtctgaactggagaaaactatcaagggtgttcagtccaaacagaaatgagctgacaacacagtacattgaacacataacactctaa

SEQ ID NO: 27825 - DNA, 365 bp, Zea Mays
aaagagcctccgcgctttaaatcaaggctagttgccaaaggttttagtcagattctaggaattgattactctgatgtctattctcctgttgtcaagcatagttcaattcgtacctttcttagtcttgttgctgtacatgactatgagcttgaacagttagatgtgaaaactgctttcttacatggtgatttggaggaggacatttatatggaccagcctgaggggttcattgttcctggaaaagaagactatgtgtacaggttgaagaagtccttatatggtctgaaacaatctcccagacagtggtataagaggtttgattcatttatgctttctaagggctttcagaggtctcaatatgatag

SEQ ID NO: 27826 - DNA, 613 bp, Zea Mays
gactaatcatgaattcgtcgccgtagtggagactccgctgcgggatcgcgacatcacgggggcaggagaatcttcggctcacatcgaggtaaatggtataccatcctctccgcttttcgatgggcatcgcgttggggggcgcagattaagctttggggccttgtggtgtggattggcgggcggtccggtggtgggctaccgtgcttggggcgtcgccgccgtctggttgttcggtgagagagagaagacgaaccgtgagccgttagattagagtcgacggcccggattagatgccgcataccgtttcgattagataggattcggaccgttggatctggcgcgtgcggatcagattagatcgggatgccgatttgatcgcgtccacccatgaccgtcgattggcgatccgatggtggggaatcggatctaaacttcattaaaccttggccgttgatcttgaatcgtgcgtatcctgctccgtaccggttcgggggaagcgcagatgtaatctgggccgccggtttctaatcgggcggctgtgggcttctaataccctttcggcctgacacattttcttatgagtccctacagtttgttgatatcaacccgcaat

SEQ ID NO: 27827 - DNA, 450 bp, Zea Mays
gtcgtgtcttcttttttgcttgtgttggccaattcaccaatcatcggtccttcgacatctgtcgttcctattttgatgacgtctccttttatcgtcctattggaggttgtacctgtatgcccccctgccggattaatcggtctttgcgtccgagtggtccgacaatcttgttgggcccgtgctcgtggaccagattgaggggatctcaatcgatcttgtactagaggggtcaacctgtcaaaaacagatgattgaggtgccccccaggtggggtattgtggtatcccgaatggatatggtggcgcgccccacatctgattcgggatatatggtggcggtggtatgtatgtataatgacatgacatgggtgtatgtggaggtggaggtgtccacgcaggtgtattaggtcttaattgaacattatgacctcatgtcctttccgattggcga

SEQ ID NO: 27828 - DNA, 638 bp, Zea Mays
tttactcctgctcgttgcttctggtacatatttgtatttatactattttaagttgaggatataaagagacccctgttcctatcctatgtattattctcagtttgtcaggaagagtttctcccccaagtagtttgtcttataaggcgaaccaattcgaaagcactattatccattgaatgctggtcaaaacctgcatttggtgttcttagatgggattgaaaatcaattggacctctgtttgcagttcttagatggggttgagttaacacttgtactggggaacatatatttgttcgcaaccctatgcttggtgaaaagtagatgtaatgcaagtggaatttataagagccgaaagagctcatgtagtagtgtaattagagaatgttgtagtgcaagctcttagttacttgaataacagacctttacacaaaagatactcgaaactatttcactatctgtcatatacaatcttgtttagggtcaagagtttatttagttgtactttttcatacgccatctgtttaatgggatgaatattctatctaatgaggtctctcttttgctctcatgtctggtggatggcgtcatggcttgcctcctacgtgttaccttggttgtatggcgatcggtagtttaag

SEQ ID NO: 27829 - DNA, 540 bp, Zea Mays
gcagttcctccgcccctggtggttctgggaggtcggagggagagaggcggcaccgattatgtcgtgccgacggatctttcgttggggacccgccccttgattcggacctctctcagaagcgccagaaaacagctggtagggtcagggaggctggctccccggcccagggcttgcaggggcgcgtcagccctccgccagtactatcatcggtcccgccgccgtcaccaccatcatctggcctgccaccgccataggggcagcagcatcgacaacgggaacagcagcaaagccagtggacgtctcgcttccaaggtcgttggaaggtccagggtcccaagtaagtgtaccccttatccttaccccatttgtctagttaccgcgttgatgagtattaactcgtcctttgcctatcagggcttcttctccttctgtctccaaggctgcccccactggtgagtctggcttccagcagcaggtgtctgccggtcttgatgccaacaacctgccttcaactgctgctgttgaggcggcgccatcggg

SEQ ID NO: 27830 - DNA, 325 bp, Zea Mays
gagggccttgctcacaaataccaacggatgaccctcctgctgcagaacagcccccactccagtaccagaggcatcagtttctatggcaaatggtttatgaaagtcaggcaacgctaatacaggagttgaagataacgcttgcttaagagactgaaaggccaattcctgaacatcagtccacacaaagacaacatgcttcttaagcaatgaagttaatggtttagtaataattccaaaattctttacaaacttcctgtagtagcctgctagacccaaaaatccccttaattccttgcaagtcataggtactggccatgacacaaca

SEQ ID NO: 27831 - DNA, 472 bp, Zea Mays
aaaaaacaaaagaaaacaaaaatggcatgtcctggagctcaggtacatgaacttttacattcttctttgaaaaaacaaacacaacgtgaataagtgtctgatgtgaaaccagacgtactctaatacatgcaggattgtacgtaggacgtggtagaagtttggtcaataatatgctactagaacgagcagcagcaacccagattaaaggaaatacatatacgtgggtggtgcttattcgtcactttagtaaaacagggtattttcgacagttaaagccatcagacataagttattttcgacgtacggtcgtaggcttatgttcgacagtacccatccctctgtcataaagggtcaaaaatactcttatttccgacggtggccattggacataagctatgtctgacggcacctttcggccatcgacgtttatcctcggtaacggtagttaacggtcgtccatcgcttatgtctg

SEQ ID NO: 27832 - DNA, 483 bp, Zea Mays
ccctccagcgaggatgatacacgcgccccaacctggcctgcccatctggcctctctttatgtgttgaccatgcggcggctcccatttggttgcctgcttatatgatgccaatgttgcacccacggctgtaggtcaagccaaaaacatctctcctggttgcatgcatagatacgcaaggagcgtcccgtttccagcagaacagggtcgcatgagccatgccatgcttacacaccgaaccaatcagacgaattgtgtcccactccaacaagccgtgcaaagatctccaatgtcctcccggtgctcaagtaccacagcgtctgcgctaacgtgtacctctgcagcaccatctctacaacaccctcacgaagatgaacgtcgcggcgctcgagccatcctcagagtaggggcaaagggccagatatcgctgttggtattgcttgggggtaataccttggtctaacccaaccaagcaccagcggtaaa

SEQ ID NO: 27833 - DNA, 361 bp, Zea Mays
cctcgaattccagaaaaatcaggggctagcgcgtaagttttcccgagactcagaacacagtgaacgtggacggcgggtttattatgtgaaaacagagggtctctttatgaagtttgccacgcgaaggggtatcgtgcgctccagaccgcacgatcagaaccaatggccaggatcagatctcgcccattataaaccagcaagcgccctagatcgttcgatcacaatccaacggtccagactctaaataacactgatggcgtaacagccctacgatcgcagatcgacgcgcaggatacaacctacctaacgggtacgcgtgggctgatccgatccgtcgaccgcgggatcgacgatccgcgcc

SEQ ID NO: 27834 - DNA, 303 bp, Zea Mays
ctccaagttttgcaatgcatgaagccgcttttcctccaagttgtctaattcttttaagcgcaattttgtcgcttcgtcttctgtgagtttttcttaaatggcaactcgtaaagaggcgatttgtacttctaatggcaagactgcttctcccccatatacaagagagtaaggggtcatccatgttgctgttcgcgtcgtaactctatacgcccacaaggactctagtagcttttcatgccagtgcctcttattatgtgagaccatctttttaagcaatttgcataacactttattaaatgcttc

SEQ ID NO: 27835 - DNA, 422 bp, Zea Mays
cgaacatcctcatttgagaccaccacatgcctttcttcaaattcttggtccgacccctcatcaaatattttatcaaaaaatacatggtctgcagcaaccatatggatctcatgccagatgagagttgaatacgacgtttccctagatactttgagaccaccacaaacagacagcactaatgcattgttatccacctgcttgcactgcatctggtcatccatctcttcaactagctgctctcgtaatccatgtgaattactgaagccatcacactcacagaaaactggcacatcatgcacatggatgagatttagaacatggacagcgatctgatttgtatctagaatcaactcattgctatctaagtactcttcacccccggtgagtggccgagattgcatgcattttctcagagtagtcac

SEQ ID NO: 27836 - DNA, 470 bp, Zea Mays
ctgatggggattcccccgctcaaccagaggccgtagaggtcatatcctctgtgtctgtcgacggggtgatgctctcccctggactggcgcgagcaagatgagcatgtttcttctccctctttctcttatgacgatgcttcttgtgtgatgccgccaccacttcctccgcctcccgctttcacttcttctccgccttaatagcagtttcttcaggaagagggggcacaaaaatcgtgacgttcccaagcccctgcaaaggcgcataataacgaaaaccctaacaaaaccaaaagagggagaggagaaggctcaccaggtaattcaaccttgcctggttgaagggcagagaccactcacgtccataaaatctgacatcacatttgttgtgatagtaaggatgtgggccaccacctcctccttcatcaggttcatgcacggagtggcgatcgtagttgcccgcgccagtgaac

SEQ ID NO: 27837 - DNA, 376 bp, Zea Mays
gccacctaggtataatagacccgtctagttttcttgaaatttttgcccgttgaagagttggctgtgttcccctttccttgatttgagttcccagaagtctgctgaaaattggatttgttttgcttcggatatgggcagtccttgatgaaatgtccggactttccacaattgaagcaaccactggaggaactgggaaggccagggaaacgagtaccaggggcactcggctgattggtcggagcggggcaggagtgggacgaataaatacgggttgtttgaatggatatgaaggtgggcgaggtgaagaacagtttggattgaaagtttgaattaccaaccttgttctcttttccggtccctgagttgatctttcacc

SEQ ID NO: 27838 - DNA, 300 bp, Zea Mays
gaggaattgaggataatgttgttcaattatagggagatgggtatcatcccgaaggttgagccaatgtagtatatgatgtcctcgctgtgtgtatgtaaccgtaatttgtatgatgaggctgggcgccttcgttgatccagctgcactcgtaggcgacttctgtatggagtcttttttgtaaaaaagactttgatatttgtgcagttattgtgctatttcggctgcacccttaggcggcttccgcacggagagtcttttaggaaaagccatcgattttgcgcacttattgtgctattccgg

SEQ ID NO: 27839 - DNA, 362 bp, Zea Mays
tcttcatgatagcttcaatcttttctggattagcctcaattcctcggtggctgacgataaacccgagcaactttcctgctggtaccccgaaaacacatttttcgggattaagcttccatctataccgtctgagactgttgaaaaccagctgcaagtcttcgatgaagtcttccgaattttccgttttgattaccacatcatctacgtagacctccacacgcttgccccaatgatcggctaagcatgtttgaatggctctctgataagtcgctctagcgtttttgaggccaaacggcatggaggtataacagaaagcaccaaacggagtgatgaacgctgttttttcctcgtcttccttcgtc

SEQ ID NO: 27840 - DNA, 482 bp, Zea Mays
ggatttcaccttggtgggctctgaaggcccagcttcagtctcggacttatgttttgaagtttcggcatcaattgcttcaatatgcacttcggaagattcaacaattttcttcggagttgtgcttgaagacttaattgtctccaaaacatccagcacattaaccatcctttttcttttgggggtcactgctaaacccttttggctttttgctgcctcaatttttgctgaaggacttagaacttctgatgtctttgtttcttcagccctcggttcttctattttttccgtcgccggcacttcggccatcccttcaatatttggcaggggagttggttctttagcttcggtgaccgaagaggtctcaccgacaaactcaggcactatggtcggttcaatataacgttgccggtgtgtgagaacctttacccttttcctcttcgacgccggctcgctaggagcagctgaagcaacttccttcgcag

SEQ ID NO: 27841 - DNA, 350 bp, Zea Mays
gcgagatggcgagcgcgcaagtcataggggcacatatgggggttgcatatacactgctaggtagagtccgtgaggcagaacgatggtcggttccgtcccaggattcccggcgtccgcttcggtaatccagttcatgcgcacggcaggtttggagaggaagacgggaacaccgctgaccatgcaaggatacgagcgcgtgaggagggtgagtttgcagccgcgagagactcgggggttgttacggtgcctgaccatgcgcctggtatgcacggcggggaagaggaacaggacgataaactcgaaatgcccatacctagtgctaaaagctgtcttctcaatatcctcctcgc

SEQ ID NO: 27842 - DNA, 506 bp, Zea Mays
tgattagtgtcacctgatgagctatgtttcgcgataataatgtcatgttggctttgataacttttgttttagggatctcaagtttgctgaacgcgaagggcgaggggggtgggcaccttttcattctccggcaactctctaatcattgacatcctgcttgagtgaggtatgagacctgtctttttctgaactaatgtgatgattgttactattatttctgttcactaggatagaagcatccctctttatttctgttcacttagactaatctatgaggattgttaatttatttctgttcactcggatagagacaccctctttgtttctattcacttggacataagatggtaatttagaatttgcttcctcctgccttttttgaactagcatgcttccgcctaaacaaggttgggagtaggcatagttcactctgagtcatgtatcctcctgcttaagttcaatatttttgtgaagtctgaatgttcgaattctggtgtcatcttcta

SEQ ID NO: 27843 - DNA, 517 bp, Zea Mays
gtagctcgttgatgacagggatcagaaacatgtcctcggctgtaatagcgttcagctagcggtagtcaatgcagaaacgtcacgagccgtctccagcaacaccggtgatgagaacgctgatgtgcactccctgatggtaccctgctgcaacatgttctcacattgccgttcaatttcattcttcaacagttgtgggtagtggtatggccacaccaccattggtgttgatccaggcgtcaacctgatgtggtggtcatggcggcgttgtggtggaagaccgtgtggttctgcaaagatgtcggagcaagaatccaataggggctatagaaggtcgcggtcccttgtcaaggctgagcagtgaggcagtggagcgcctagcctagtccacgtcacaatgtgtccattacactaaattgtcatggctcgagcatcaaaattccatagtatgagaccaagagagtggagccactaaactcctagcactatgtcaaagccggcaattggtaaaacatagcag

SEQ ID NO: 27844 - DNA, 354 bp, Zea Mays
ccaccgaccgcgttatattgaaccggacatggtgcctgagtttggcggagagacttcttcagctgctaaaccaaaggagcccatttctcctacgcagaaggctgaagatccggctataatgccgaaggtaccctcagccgagctagctgagtcgaagattgataaaggtaaggtcgaagagccaaaaattgaaggaacacaaatgttagtttaagcccttcggcagaagtaacagtgccgaaggcacaaaaaagtcttgcggcaactcccaaaagaagaaggatggcaaatgtactagatgtgttagaaacagtaaaggctttaagctctactccttcagggaaaatcgccgag

SEQ ID NO: 27845 - DNA, 454 bp, Zea Mays
cggccaccacaatggtgatcatcatcctcattatcatgaggtggaggttccccatgctgttgctgaatggaatgctgaagttgttgcattccttgcatcaattgacacatttgttcatgcacctcctgaaactcttgagcagaaacagtatgggaagaggaatcttcgtttcctgccatgttagtatcaaaggtagacgcaataggacaaaatatatgtggaatcactcccttaccacttacaaaacaagttctttatcttcctgaaaagagcaagaaccggggttgcaattagttgtggaagagtgattgtaacagcgaagacggtgcaacaactcacggtgcgttttaagtggagcttggtgggtaatatgtaagtagaatgcgttgaaaaatgtagtgatgcaaaaccgaataataatccaagaacataagtctaatttgctgaatataaa

SEQ ID NO: 27846 - DNA, 323 bp, Zea Mays
gatcgaactgtttagattgaccagtctcatcaacagtttcatgaaaataataacaaagatctcgacaaatagactagcaccgagaattaatgagattgtctccacctcacaaaacgtgttcgtccaaaaacgatcaattcaagataacttcctttatgtatagagagtgataaaaaaggtccataggaacaaccagcctgctctttttgtcaagcttgacatatcaaaagctttcgattccctcgattgggcatatcttttagatgttttgagagctctagaattcacttagaagtggagaaattggatcgccgcaatcttag

SEQ ID NO: 27847 - DNA, 284 bp, Zea Mays
atttcaggccaatgagcctaattcacagtgttgctaagttggtcacaaaattatttgctaatcgtttgggtcctcgtctacatgaactggtagcatctaatcaaagtgctcttgtcagaggaaggtcgattcatgataactttatgctggtccaacaatcgatcaaatcccttcacaagagaaaggttgctagtctgtttctgaagttagatatttccaaagctttcgactcagtttcgtgggcttttcttcttgaagttttatctcacctgggtttcggtcct

SEQ ID NO: 27848 - DNA, 1578 bp, Zea Mays
cgctggtcgacgagctgctcggccagtaccggaccgcgctcggggagctcaccttcaactccaagcccatcatcaccaacctcaccatcatcgccggcgagaaccttcaggccgccaagcccatagccgctctcatctgcgccaacatcctcgaggtgacctttgtctttgactcctcttacgctcgtcaaactgccgtcttcccctcctctttctcaattgaccatgtaaaagtaattctaaggcgccatcaagtagtgacaagcacccactggctgtctgttatgctagatatatcacatgtgctcggtggtgcggtaggattaccaggccgctgtacattgtatacactagtgtccatgctagctatcaagatcaatagctgtgatgttgcgaagccagttgttctgcgtacaatagatgcaaaagcaaatgctgatttacctatcgttgctgagaaatctccccccatctgttctctccctcttgctctcttgtgtctacggaacacactttgtgatgctatataaagggcagaccctgtgctggaggctcccactttgtgatgctgtatatatggtttatatgatttcaaacgtgaagtttgtcgctcaacttcgattctcaagtgttcaattgttcatgggtttataaattccatactcctgtgacactgcaaaacaaatatgaacattgtggtttgaaccacactctactaattagagggctacagcagttaccactggtacggaaacatcataattatcagcttatggttgactatcgaaccaggcttcaaaaagcatttcattcctacgctccccacaaacttgtgcacagattacatcctcacgctgcagtaactactatactgttctcatgctgaccagtgacaaagttatcaacttgtgtaccccaatcagttgaatggcaatgtgttccaggtttcagaaagttctactacaaactgaagtttatgatacaccgtcatgtacatatgaaaaatatattgatgcactgataaaagggcaggatattgtgaagtataatatatgccaccacaagcgcggcctgcactgggcttctccttacactcctggatagccggctaactgctgagcgttggttgacttggtttgtgtattactttgtgtaaccttgctgcaatacacggtttgagacggcatgttatctatgctcattttttttccttggttgtattttaaaaggaaaaattactggatgctttagaagtaaggttgagtcttagtcactggataaaaggaatgacaaataaacaccattgaaccttctcatctatgtagctatgtgaattgtaagacacaccgttgtatatggtctgttgtcaaatcatatctgccagtgttcttgtcttgaatccacattgtcgaggcatatcagcatttggtttttcttgttgctctgcatttactataatccattatagggttatgcaattgttatccactatgttggagggggtgtatctattttatttgatggttacttgtccttgtaggttccaagtgaacagaaactaccatcactatatctact

SEQ ID NO: 27849 - DNA, 348 bp, Zea Mays
gtgtgttgggtgcataattacatagcagagccgagggtgtgctcaatttataggacccctgaacggtggcccatgaatttgagatggcgcggtggcggctggagagaagggggtgcactagcgcaagcaattggtggctttcaccgtggcgagctcactggcgatcaccggacgtgtgtaatacaagctactgcgacgtggtaagaaaccaaggcacgtggcgcacgatcgttgagcggctaacgccggagatgatgattccgaccagtcgcagtccaagtgggtacggcggcacaatggtgagcaagcccgagctaatccgagcgccaagatttttacccttcttcg

SEQ ID NO: 27850 - DNA, 312 bp, Zea Mays
cttgcgaggaatcagttagcggttatctcgtgatctggaatggatctcagctttactttaggaaattctgaaagacatagcatggatccggtgaaacttgctgtcccccttgtcaattcgaaattgcaaacggatgatttgtttgtgtcaattatggacttgccttcagattaggaaggtgagatttctcagtagtaaggccggtgccatattcaagtgttgttcagtgtctgtgctgtttgttgagccatgattttagatcggatggcaaccgatcaacttgaattacagcctggttttccaattcaaatc

SEQ ID NO: 27851 - DNA, 350 bp, Zea Mays
gtgagtacttttgcactcaaaaagtatcccactattttgcaattacaaaagctataaagtgggttggctcaagtggttgctttttgttggtcaagttttattttacttggaaagcatacaaatccaagtttgtaaagaatttatcagtataaaccacaatttaaaactagtaactacaacattcaatccatgccatagtgaacatttcatcaagtctcatggtgaatcattatagtaaagtaactttgaaaattggtgtgatacccagtttgcaaagaagagaagttggagtttattctttcttgttttttttgcttctcgtttgggtagtgcacttttggagtttggaa

SEQ ID NO: 27852 - DNA, 638 bp, Zea Mays
gccggaaggaaggatcttatatcaataaaagcttgctaactcttggaacggtgggcctcattcgctaatcactctcagattatacgtccctgtaatatcaccattaatgcactatggtagatgctgtgttcatgcaatcatgcttttgagattatgtgttgctgcctatgcattatttgtgcatacaagagcttaattgttttcatttttatatttcatatttgaaccataaatgtgatcaatagaaatcttgaattggatagatatatgtaactatccaaagtcctgaaacacaggtcacaccaatatatgcagcatttctttttccactgaccaggtacatttataagcattgagacaacaattgggacttgtgagaaaagattttcataagtatttctacttcatgcgatttgtcaatgcttgtctaccccatggtttatgaccaatctattaagctgagtttgtccttttatgttcttctattttgcaagatgttagccaaccatgtggataaagaaaattagcttgcatatttcaggtgatatcaaaactgactgatggaaaagctactcatgttccatttcgagattccaaattgacacggttactacagtcatccttaagtggccagggac

SEQ ID NO: 27853 - DNA, 399 bp, Zea Mays
ctgaatgtaaccgggagtgcgatgctcccaaggagatacaccgattgtgggcccactccggagaatggacgagagggtcccagtcgagaccctgggatctgcagctgcttgaatgcagcgtggctgatgacgttgagcccagccccaccgtcaatcaggacatgatgcagccacatgttggcgaagactggggcggtgatgagcggtagtataccggcccctgccatgttttcggggcagttgaatgccctgaaggagatagaggtgctcctccatctctgatgtggagcagccttcgagacccctgggaccactgaaaggacctctcggcgcagggacttgacgttcctacaggaggtgagctcccagctcccaccgtacatcacgtacagcttcttg

SEQ ID NO: 27854 - DNA, 531 bp, Zea Mays
tctccaacacatctagtacactggccatcctttttctcttaggggtcgctgctagacctttttgtgccttcagcaccgccactcctgccgaagggtttagaacttctaatgttttcgtcccttcgattcttggttcctcaattttgtcagtcttcggcattgtagccggctcttcaatcctttgcgtaggagtaggtcctcttgcttcaatagctgaagaagtttcaccgccaaattcaggtactatggccggttcaatgtagcgcggtcggtgggtaaggaccttcaactttttcctcgtcggtgcaggctcgcttgaagcagccgaagcagcagcctttccagaagttgcaccctttcttttctgaccccgcggcgggtagcgatagtcagggtacacaaatccaatagcatcaaaaaccctatttagtcttttctttttttggctcccgtaggccgcagatagtgcattatcttcagacttggagtatgctccaagtagttcatcactagtattttcaacacatttca

SEQ ID NO: 27855 - DNA, 295 bp, Zea Mays
taaagatgtggtacagcagtacatgcacactttgtataatctccagaatgcaagtaaaactcttacatatctatattttactcccggctcaacacaagacatgcagatttcaacaaatgaaatcatccatatcttacgcgctaaaatttacgacaactcttgacaattttcactaattgctcaggcctcaagtttaacctagcaaaaacggaaatctttccaattcgttgtccatcagatacggtcagctcactcattcatctttttcccgggaggatctcgaccttccctggaa

SEQ ID NO: 27856 - DNA, 284 bp, Zea Mays
taacaccattaaatgacggcaaatattttatgtatttatgcaacaccactacgacaccacaagtacgcgcattttatttatttggacacggcttttcattagttctctagtgatcacacaaaaacatcccaaacacaagtttaaccgatgacataggcatcaatgtctatggaaattccatatcacaatcaactaaagaagaaacatataaaacaatacacacatgtcatctctagcttagctatggcaagtctatattacttaagagcaaaccaaacattttt

SEQ ID NO: 27857 - DNA, 369 bp, Zea Mays
ttggtttgaatttaggcgaagaaaatgagatttgggcactcggctcggaaacgatcgctcgaaatggggaattgagtgaaattgaagcctggaatatcggattggcgtgaaatttggcaaatatgttactggaggtgttgtgaaggtgcctgaaaaatttgggttcaattggagcatttttggctggtttgggcatttcaccgaacacgtgtgcgaggatttagggttttagggaaatgactatttgaggtgtgaaaaccctcccgaaggagctaggaacctgcaggaatgttcaaggcacacataccacaacttggtttcacaagaattcacagagattttgaattggtacacaggggtggtgcactg

SEQ ID NO: 27858 - DNA, 468 bp, Zea Mays
aagtctgaaccagggccggctactcaccattggcatagcgccgcacgcaggccaccctgtgtcggggttgaagcttcctgcgcacgacgtccacggtgagctccttcctagtgcttcgcctggtggtccgcattgttatgcactccgccactgggttgatcggtcccgagattgttggatcagggtgctccaattagcttgccggcatgagcttcggcacctcgtgctcggccgtggacatgaggtgggtggtaggctcctaaccgtgcgatctgatatgggcggttgtgaatagaagcgttataccctttcatccaaattgtccgcggaccgtttatctctgatcccgcgattgatattacatacccgttcggattactgcatatctaatcgtagccactgattgacgatcggacggttcaggatgcttggtaccccttcgccgtgcacttctttcgaaagaacccc

SEQ ID NO: 27859 - DNA, 685 bp, Zea Mays
gtaggtaggtgcggttctttggtggacaaacgtgagttggaggagtggcatggtattacgtagcagagcatcctacaaatgaatcttcgtggaatatggtgaacaagaaaaaaaagagagagataggtatcaaatcgtgttacagtacagcgtattgaacttgtaacatgtactgctataattatatatatttttaaacgagaaatggacagctagttttggcgcgggtcccagcagcaaatcacgcagcggttgctttcagctgatgtgaaatcctccgaggaccatggggcggcggcaaaaaagtgggaggcacgtgcacgaacaaacgtaaagcagagtgctaatctagtttctactgctagactaagatgcaacaatatgggctgtctacacatgcaaattaaaggcgaagttgcgtgccttgctgacagaaaacaaacctctcaagagacgtaaacggagctagataagtatcgagcctgtcatgttcaggaggaaacgggatgcaggtgcagccaaaggaaaatcccaaataaagtgaatttcgtcggccaatttcgtggaccagacgctctccttgcactagcactagcagatgtgcagaatcttgctggaaattcacatggccagcgaagattcacctttcaagacacgggtcctgcagccgttctgttgcggcggg

SEQ ID NO: 27860 - DNA, 584 bp, Zea Mays
atacgtgctcacctcttttgtcatttcagtgatctcgcctgcccgtgttcccgtctcctgttctgcctagatcttctctctctcgtgtgatttccaggtagctatcacttcatttaagattctatcggctgctctctcgcatgcttagcttttcactctatcgtgcagccgccaggtcaggatggtgcggatgaagaatgtctcatcgtcagggggaggagacgatgaggaccctcctcgccccttcaggtaggtcaaggggaagacagtttaccttgagcagtaggagggcaggaagaagtgatgtttggacagagccgctcgggtagcacttgcagtggtagcagcattagagcaggctgaacagggaggatatatgcagatctcctcagatcagatagcctatcgggttcgtcgcctcgcatctcggcctcgctccactactccctccacaccttccaccactgtctctactccacctcccacttcactagctcctgtcgctctagagccatccaccacttccgctgtacccaccacctccaccactccaacttccactgctcccctcccgctcccatttc

SEQ ID NO: 27861 - DNA, 549 bp, Zea Mays
tgatgatgttggtgttaatgaagtgaacgcaaaagaaccaatagcgacagatgcagacaaaggcaaggaagagcagcccaatgatgcaccaacagaggatgatggcaagaaaaggaaagctattgctccaaggtcagatgtatgggaacatttcagcaaagttagaactgaaggaggggaagacagagccaagtgtaggtattgtggcaagctgtttcgctgtgacacaaggacaaatggtacatcttctctgaaaggtcatctaaaggtttgcaagaagaatccaaacaagctagttattgataatcaaggtactttacagctacaaccttgtcctggcaatagtaatgttggtactgttccaacatggaaatttgatatggatgacttaaagaatagttttgctgaaatgataatagaggatgaacaaccttttgtcttgtctgaacgtcctggtcttagaaagtttctagctaaagcatgcccacgttttgttatgccatctaggagaactgtcactagaaactgtgtgaaagtgtatgatgtgca

SEQ ID NO: 27862 - DNA, 612 bp, Zea Mays
ggaagggaactgggagatacatcaggaggatcggaagaggaactccctaatcgagatcagaatcgcattcctcaacaaaacagacaggtgaagggggagcaaggaaagggaaacagagaagggcgacacccatttgatgctaacaaagaggtattgcctaaacttccttttcccaagtttggcagtggagatccagtggtttggattgatcagtgtttggattatttcactatctatcgtgttcccgagtcaatctgggtgtcagcagcaaccatgaatttggaacagaatgctgcccagtggtggagatgttataagcttagtcatggaattgggaattggcaggagtttgttgcagctgtgactgaacagtttggtgctgatgcctatccaaaagccttgaggaagttgttggctctgcgtcagactgatagtttggagacttatgtggatgaatttgaacgagccaagtatggagtagtagttcataatccaaggatgggtgaaccattttttgttactcagtttgtgcggggactcaagtttgagatacaaaatgtggttcaagttcaagtacctaccaccatgaatcgggctattctgttggcccgc

SEQ ID NO: 27863 - DNA, 511 bp, Zea Mays
gacaaattcagagaatagcctatttggaggcaggttccacgcagagtaagctaagggagcaccagcattcaagactctgcccctcagaatcatatccaatcggctcagcaagtcctcattgggaatctgtctgtttgtgacccgggtggaatcattgatgccggtatacaaataagtgggataaactatgtccttcaagggttgaatgttcttgaagacaaagtcagcgaccacggcctcagcagtcagacccctatccttcaacaagcagatttcaacaagtagcactttggcctcggttatctctgaaaaagtgggagactctacccagctaggcgtacgaacgtctggttgcctccctgactgaggggggagggatttgccatgattttgcatgatgaaccaataaagacaccatcctttaatgctatccttaagggggatatcaggatattccactttcctcccctggcgaagctctaaacttgcaccaccaacaagctgatgctgc

SEQ ID NO: 27864 - DNA, 316 bp, Zea Mays
ggaaaaagtagggcgacaatgggtctcatcttagtctgcgcttgaagaatgttttgaatcaaggtgcaccacaggttgttgaagccacgagccattagaattgcctgcaagctttccctgttaaccatgtcaaaagcctctgtgaagtccaacttgatgacaagtgcagggacttttttctggagacaacgctgtacaatgtcaacacaaagataaaagtttctgagatggatctgccacgcaagaatcctgtttgactactgtcagtcgtccctgagatctctctctgcagcctctgagtcaggatcttttcaat

SEQ ID NO: 27865 - DNA, 294 bp, Zea Mays
cacggagacagtccgtggagcggcatgacttcatccgtgaggaggtccggaagctgttgcacgccggtttcattgaagaggttcatcaccccgtgtggctggccaacccagtcatcgtgccaaaggcaaacagaaagcttcgaatgtgcatcgactacaccagcctgaataaggcatgtcccaaggacccgtatccactgccacgtatagatcagatcgtggactctacctcagggtgcgaccttttgtccttcttggacgcctactccggtttccatcaaatccggatgtcta

SEQ ID NO: 27866 - DNA, 413 bp, Zea Mays
atccctttcctcaccaaatttaataatttgtcatgttcgctcctcctcagctgcccccagcccccattcgtcgtccttagctcccaagtacctctgtcgtcgccctcgaccctctgtcgtgctcgtccgatagggagcaagctccctttgcgcccgacctcggccccctctgcgacagtcaagctcaagcctcaagctcgtctggaagggagcaagccgtagccgatccaacccgaacaccggtgacctctcgcgtgtccgcgcctcgtgcttcggctgcctccggtctgtcatccggcgccccacacttcaccgcccactgctctctctctctgccccgaccttctgtgcacttgtgtcaccctcaaccccatccgccgccctcagcttcctcagacaaagatctcggtccc

SEQ ID NO: 27867 - DNA, 686 bp, Zea Mays
gaagatttggactctgcttttgatagtatttcagctttttcaagcaagaaagacaatcaagaggctgtgtttggatcggaagaaaccattcttgatatccggtatgcttggaacttccaaatattgtagtattgctacatttacattgtcgtatctatagaatgggttcaaattttagtagtgactggtttctgaaattgatgctagtgcaaagtgtttatgaaaccaatcagaagtgggtttttgtatgctacttcaactatttgctgggtatggttttttcttttttgacagaaaacattgtaaaaacgattttaaactgctggtatctgcttgagcttttgctcttggaacatctttaaacctagatgaagtcaaatgctaattacgccaagctgcaaagctcatgattgaaatgttccttcttagcatcttataagtgcttttcttgacaattttctcgtttttgtacttgcagtgaagcaaaactagcatatagagccgaagtttttgagttacaaaagcagcttgtgcggcagcaagcacaatttgatttgcttgcaggccaggcttcaactcttattcaaggtagaagatcacgtgtatctgctatgtctgcagttagtggagagcttatatcgctagatgagatactttcttccagaaacttggaggtataactcaac

SEQ ID NO: 27868 - DNA, 353 bp, Zea Mays
ataagaaatcatcttcattactcccgttaaaaaccaaggctcccttcggatatttcaactttcgcgcatagtgcctggcttccagaatttcttcttcggacaacttcttccccgaagcgtgtcgaatgatgtagtcaacattttcgatcaaagcttcgggagcaggagtctcgatcttttcaggagcaatttgctctgccgctttttcttcaggcgcggcaggctccgtctcgatgagcactgaaggcccagcttcggcttcagcttgagcttgcgtagctttggcttctgtttgcctagtttcggcttcggcctgtgatttggcttcagcttgagcaattttctttgcagga

SEQ ID NO: 27869 - DNA, 959 bp, Zea Mays
aagatatcaagggaggccattgtgctgttggatggacaagggtgtgtagaccacttaagtttggcggcttgggtattcacaacctggaaatccttggtttgcctcttaatgtgagatggctctggctcagaaaaacacaggttgagaggccatggactgagttcgacataaaagtacatcccaatgctgaagctctcttccaagccttggttcactcttctgtgtgggatggtgctataaccctcttttggacggatagatggattcaagggtagtctattgcagtttttgccccttacctgatatgtcgtattccaaggagggtcaggacaggccgcacggtgcaggaggctcttgctgataatagctaggttcacgatatctctgggagtctgactgctgttgtcattagggagttccttcttgtttgggatctgattcaagatgttcatttacagacaggagttcttgatgtccacctttgggtgccttgcgcctctggcctctattcctctaagatggcttataacagcttttggaccggtacaacatcttttgaaccggctaaaagaatttggaagagttgggctcctccaaaatgtaaattcttcatttggctagcatcactgaaccggtgctttacgactgacagattggcccggtgaggtacggatcatcatgacaaatgcctcttttgcgatcaacacgaagaaacagtccaacatattttgctctcttgtgtgttctctagaaacatttggtggcaggtgttgtgtaaagtggggctgcaatacctggcacctggacctgaggacatgattttccaagattggtggagaaatgccgaaggccaccaggtatctaaagagaagaaaaaaggttttaacacattggtaatccttgcggcttggtggctttggaagcattgaaacacctgtgtcttcgatggagcatccccg

SEQ ID NO: 27870 - DNA, 363 bp, Zea Mays
agcagtgctgaaactgaaagaaagtagttgatacgcacaatgccgacgaagccagcacagctgtgttagaaaggcactagatcgcagtccggtgatcaccggcgccggagaagaagtctagacctcacaaaacacacacgcactgaactgtactcagtagaatttgtgccgctgccacttgcgacgattttctgatgcactttatatcaaagcaaaacgaataccaggagctcgagtgtgtccacgatgtccggtattgacgcgtccatcccacgaccgtacaccgcgactgcgcccgcgtccacagtcatgcgcgctgctactaacccactaggccactacacatgccgtccacataagtcg

SEQ ID NO: 27871 - DNA, 620 bp, Zea Mays
gccaccattccccctatccaaacaccacagcagaaaccatccggtggttcacgctaacaccgcggttactttgcacgctccgaacggcttttcaagccagttactcgcacggcgcccccacgctcccccctcactcttttgcaccggcgcctggttagcccctacccaaaccatggttcaggggatcgaggcagtgcatacgcatttatactctcgccacggggagtccattctggtggcgaacgacgggctaatcgttctgttgtcgtgaatcatgggggaaaggggagtacgctcgagtttgttgggatggcgtcgagctcgggaatagaacacagttcggccagaggagcaaggtacgcccgacaaggcaggcccgcgatttggtgtaatgcgagtgtgttcgtgcgctacgggtgaccggcccaggggccccaccaatcagtgagcctgtgagcacgcattagggaaggttggctgatgaattgggccaccggtcagcgacacgatttggttgttgagttgcacgagagagattggggatgtgccaagtagtggtttcggcccatgacacaggttggtcttcttttctctttttctttttatttttttcagttttc

SEQ ID NO: 27872 - DNA, 582 bp, Zea Mays
tcgcatctttgtattaatagaagaataagaaaggggggagagaaccccattacagcacacacaccgctagagactaactaaggatcaccgactaacatggaggaaacacgacccacaacgctgttttaagccagcaactcatcgacttggaggaaggacagggccttggctctagtcaaggaccagagcaccgcctcttccctagccaccataagggctgtgaccaagctaggattacaaccataaaaaacacatctattcctatgcttccaaatggtccaagcacctaggatcactaaagaattgaaaccttttctcaaaagatcagatgcccgagagctgctagacttccaccacgactcaaaggaatcctcatgagctggacacagctcctgcagccccactgaactaaggaaatcaaactagaactgcttggcaataacacatttgaccagcaaatgatttatggtttcagcctcttggtcgcacaaatgtcaaataactcacttgaattataacaccgcttgacacattattaaggtggaatatatggccgttgtctgtcgggttatgcagggcagt

SEQ ID NO: 27873 - DNA, 288 bp, Zea Mays
cgatgggtatgatcgaggctgcttcagcttctagtgtgccgctaaggataatctagcccccgagggtggtcctgaggacgacccagcccccaagggtgctgagcttggttcctctttagctgcttccatggatgttcacgttggatcgcccccagttcaatctgaggaacctatggtgacgaatgtgcctactacccttgtcggtccaatcaccttagaggccagcgacctagatgctggaaatctgccacctgatgtcagagatgaggtcctcccgagtgatactct

SEQ ID NO: 27874 - DNA, 341 bp, Zea Mays
gcggggtgaccgcggtggctggtgctcataggcaagggtggcgcgtgagaagctcgctagaactgggtgctgtctcgagaaagtgtgataacgagctgagggagcaactgagggcatgactgagggctcaatcgacctctataggcgtgggcataggcgtggcacgcccctagtcgaggtcgagcacatggcgacactcatgtagtcactttcaaatgttcattggctccatatctttgcggatttgtgcaaacatcccattaaagatttcctctccactctatgttctatcacatttgtacagggcccgaagcgttttgtgccaaaggtaaggagttgcc

SEQ ID NO: 27875 - DNA, 682 bp, Zea Mays
ggaaaattggaagtagtggtgccatcatttgttcattacttagaagttcttgaaggcactgatggagacaaactgccaggtgttgtttcaatgccattttacattcttagctcttccttgcagattctgaaaagaagtcttctctgtactttaagtgatgccgtaatacctttttagctcctggaaaagttttaggagatttctcttgaacttttaggacatgctaaaataaattggttttgggtattgttcctgttaatatatatttgttatacacttttcaggatggcctgcatttcatcagtcaaatgttcattcaagtcctcttctgtatgacattgacaaggatggtgtacgggaaatagctttggctacttacaacggtgttgtaaatttctttaggtaaggaactctatgactatgatgtacaggtttatccctgtcaaatgtagcaatatttatttatttattatgtagggtgtcaggttatatgatgatggacaagcttgaggtacctcgtagaaaagtacgtaaagattggtatgttgggctaaatccagatccagttgaccgctcccatccagatgttaatgacagttcaattgccaaagtggctacttctaatgaaactcccctaatagatcagaataaatcaggtatccaataatcttctatgggagtg

SEQ ID NO: 27876 - DNA, 526 bp, Zea Mays
gataccacagccgaagactccaaagaagacacggaagaaagcacaatagaaggcgtcaagcgggaaacaacacacggatcataacaggattagatataaacaagaggacgtgggtcaacaagagatgttggggaaacaataggagggtaaaaaggacgagactcatcaaaaaccacacctcgagacacccgcataagttgagcggttgaatcccaacaatgatatcccttgtgcttagcactatacccaagaaaaacacactcagctgactgagcaatcaacttagtgcaatcacgaggtttaagaagcacattgcacaaaaccaaaaggacgaaggctggagtagccaagcatcttcccacaaaggtgctcaaaaggaacaccaccctgaagagccgaagaaggttgaatgttagtgagataggtgctcgtagagacagcctcagcccagaaatgaggaacaaaataggcgagcataagagcacgagcagtctcaagaagatgacgatgcttacgctcggcaaaa

SEQ ID NO: 27877 - DNA, 528 bp, Zea Mays
tcgctcggaaaatcgtgcctggctgggacgatggtaaggtttccaaacccctcgagctcccttttttagagcctagagctcagagctgtgatgttttggccttcccccactcttcccttctgggtgtttgcgtgcttgcctgtgattttgatttcagtttaattggtcgaaactgcgacttggttgcagcttccagcgaagtgcgtcaggcgtataaacaatttatcggggccgttgtggagttgttgagcggagaggcagtgtctgaagaactctaccaagttgcgcagactgtatatactctatttggtggcgatgacacggagtatgttggtgctaaaaaagtcctttccaaaaggtagcaaacaaacatgccatgtctctcttttttcaagcctcacaaacttggcaattcgtttggcttttgtgctcttaaatgaggttcaattctatgcattgcaactcgggagctcttaaactgccagtagtaaattaccgaggtctagatggcagatggccataatctcc

SEQ ID NO: 27878 - DNA, 302 bp, Zea Mays
ctcagctccactagtctctagtctacaaagcgactccaagtattcgaactcctcatacctcaacacctaataaaagaatcaacatgttagagcctcagtacatgaaatgcattcctaatcgaaaagtaaaaataatatcacctactccatcgcccgccgagtcctgtccctaaccacagagcagccatgcgtaccccacatatggtaaaatagggcactagaagatcgcttcttagacagttcctcaacttgaaaaacttcttggtcgaagtccagactacactgctcaaatctcttgaaat

SEQ ID NO: 27879 - DNA, 350 bp, Zea Mays
tcgcaatctcgtcggtggattgaacggaagcgaaatcagaggaaacataggaatgttttgaggcagaaaggggaagttagagctcagaatgcagaggcgtgcagcgacgagatataaatggggttttcccgggttggacaccgtttccaaaaagtgctaagtcatcactcaggaaagacaagatttcttggcataactcggcagttacctctaaagcgccgacgtggtccagcgtaactcggttgttacctctaaagcggcggcgtggcccagcataactcggttgttacctctaaaacgccgacgtggcccagcataactcggctgttacctctaaaacaccgacatag

SEQ ID NO: 27880 - DNA, 337 bp, Zea Mays
gtcaaagtcgtgtagggaggtgtgtgtccaaagaatcaatagaggcacacgagaatacatattcaccagtttcctaataattactgcaaatataaagatgaggttgttcagatatgtatctacaagcacaggcactagatgaggcttctcaaatatatcaacaagcactcgcattgcacgtttttcaggcaacaacgataatggtgatgatttttggtggtcgtggaaccagacatagactcaaattgagagccagggtgataaggactagcatcatggtggtgccagtctaaatacatgtcgaccataaagatggcttgatcatgaatagtgtcag

SEQ ID NO: 27881 - DNA, 433 bp, Zea Mays
caaaattgggaggctctagtggatgatccgaggcaagggcttgtgcgttggatgcgtaattacctagcagaactcacggggcagcaatttatagagtcctacggcggtggcgtctaattttgagaaggcacgttggcggccgaagagaggagaaatcactggcgcaagcgctatcgtggcttttatcggggcagtgtctcaggcgatgaacaagctacctaaggcggtctactgcgacgtggtaaggctttgaggcacgtagcctggccggataacagtgaactccgatgatgccagcgcaattgacccgacaggacacgatggcccggtccggccagcgaccggattcaccccccattggatattttcgccccaccccgatgttatctactcttctcgcggcatgaaactcccaggcgggcacgaattgtgg

SEQ ID NO: 27882 - DNA, 407 bp, Zea Mays
gttttgagctctcatcctctggatccactgactctgcaagcattccttatttatccttcctctagagtagaacaatggcaaaagggaagaaattgagctcgttaaaactttgtgcaacatgcaagaaatcacatcttgcgtttctgacaaagatgtctgaaacacacacttttgacgcttcttgatagtcatctccaacgccttctaccaagcgggaaaaatatatcaaatattcacgccaaaaaggcgctcaaaattcaaacatcgagcaagtagtggctgctaaagcagaaagcaaatcggactggcaccgaagcccgattcatccgcggcgtggtcatagggtcgctcctaccttcaccaacaacatgtaaaaagcaaaggcaaggctggtggactatcagggg

SEQ ID NO: 27883 - DNA, 491 bp, Zea Mays
gtattggtggtatggattgaagagagatgtggttgcacatgtggctatgtgcgatgtatgtcaaagagttaaggctgaacatcagaggccaacaagactattgcatccactgaagatacccgagtggaagtgggaagagattggtatggatttcattactggattgcctcgcacccagaaaggatgtgattctataggggttattatggatagattgaccaaagtggcttatttcattccggtcaagactacttataagtgatctcaattggtagagttatacatgactcggattgtgtgtttacatggagtaccaaagaagatcgttttggataagaggatcacagtttacccctagattttggaaaagtttttatgagaatatggatacaaagttgaattttagtttggcttaccatcctcagactaatggataaactgaaaggactaatcaagtattggaggacatgttgagagcttgtgcccttcag

SEQ ID NO: 27884 - DNA, 343 bp, Zea Mays
aaagatattacctatatgtttttctcgctctgcagcttcttcagcttgtctcgcttctatctgggtgtcatgggtgtctttttcactcttctttataattcatgagccatctctcggccgcgttcacccaaacatcattatagaattttccgcccatcaaggttgcttcagctgaaggatccttcgtgtcatctgcagagaaggcagcttcagcttgggccagggtcttgatgtgatcacatcccgccttctccaaaataggtgaaatcccccgtgcaccggaaaatgcacagatatccccgcgatcacttaaaatttcttcgaagctctcggcctccccact

SEQ ID NO: 27885 - DNA, 341 bp, Zea Mays
atgccattcaccgtgagaaagccgaagaggctcgtaatgtacgtgttgcgctggccacagatgggttcaatccctatggaatgagtgctgccccgtacacatgttggcacatgtttgttatcccaaacaatctcccctcggtgtgtgctttcaaaggcaggacatatttgtgtcattgataattcccggacacccgaggaataaatgggtgtgtacatggagcctttgttttatgaattggtacgttcttgggaggaaggggtatggacgtatgaccgagctacgaagataaacttcaaaatgcatgtttggtaccagtactccatgcatgacttaccggc

SEQ ID NO: 27886 - DNA, 728 bp, Zea Mays
gaacagggggtcctaactgaatcgctggcacaacaggagcgtgaagcggaggaggtggagcagactgaaccggaggaactgagacaccagactgctgtagcataagagccatgaatgccctgctctcagcccgatcctggagtagctgctgctgaagcgaatcctgcctgtcctgtatggtctgaaacatcgagagcatcctctcggataaccgggtctgctcggctgccaggtgagcctgctgctgagtgagagactagagaattgaagcaagagcagggtcaatagccggaggggtagcaggggcagcactagaactcccagcctcatgatcatgggagcgtggaggcataggaggcggaggcggaggaggaaccccaaaattatcatcatcatcatcatcaactgctggatcctgagtgtcgaactgacgaagagccgcatcctcggcctgagagtcaaaaataggagcagaagctggcacaggagcctcaggcgcaggacggtaggatccaaagacaaggcatgaggcctcaagtgtgccctgaaaccgaggaggctgaatcagctacgcaaagatgtggcacaagtagtgagcatatggcaactgtcgacgagcacgaatcccatccaaaacggtgtcctcgatctcacaaataaggaaatccacgacatcaaactcagagtgagagaccagggcaccaaggagccagagctgaatatgtgtg

SEQ ID NO: 27887 - DNA, 467 bp, Zea Mays
gccggattggggtatggtgcgcccagggttggatcggtcgctcgccggtgactttcggtagtggtgtagtcatgagcgccgccgctcggtctggctcagggaagaagggaacgtcgtggccgttgatggggttaatcaacggtgtgaattgggggctggatatcgggcagcgggggccgtagatttcgaatctggcggttgtgggttaattggatttcataaaatctgggccgcagatctggggatcagcggtgctcagtgcataccggttcaggaagttgatcgatttaatctgtgtcgtccatatccgatcgcacggctcaggatgctagataccccttcgccatgttcattttactaaagagaccctgaacgtttatgaaatgaacccgccatccatcctaagccaaaataaattgtagccgagcccagaagattatgctttagcccctgcattccgagaaaat

SEQ ID NO: 27888 - DNA, 538 bp, Zea Mays
cgggagtgcaacttctcactaggccagtgagagtaaaagtggctgatgggagaacttttgtgagcaaatattgtgttcccaagtgcaagtggctttgtggtgggctgacatttactactgattttaaggttttacctctgggtggttatgatataatcttgggtatggactggttggagtgccacagtcccatggaagttcattgggcagaaaaatggttggagtttgactataatcacagaagggtgcagttacagggagttcagcccaaaattcagacctgccacagtttaacctgtttccaactgggatctttgattagacaagaggtggttgagcaactcttggaattacagggagtggagagtatggatacggctactgtattgattcctgagtcgatcaagcaagtggtggaccaatatcaacatctattcttgaaacctaccggtcttcctcccaagagggcaattgatcatgctattgagctcttgccaggtgcccaaccttttcggctaagaccttatcgttatactcc

SEQ ID NO: 27889 - DNA, 359 bp, Zea Mays
ccgacgttgtcttcaagtcgctcggcagttaactctaaaactccgacatcatgtttagtcgctcggcgttacctctaaaatgccgacgttgtcttcaagtcgctcggcagttaactctaaaactccgacatcatgtttagtcgctcggcgttacctctaaaacgccgacgttgtcttcaagtcgctcggcagttaactctaaaactccgacatcgtgttcagtcgctcggcagttacctctaagacgccgacgtcgtcttcaaattactcggcagttatctctaaaactctgacatcatctgcaagtcgctcggcggctacttctaaaggcatcgatatgatgcccgagttattcactt

SEQ ID NO: 27890 - DNA, 442 bp, Zea Mays
atcccataagtgtatggtggcatgacccatatgtgatttgggacatataggtggggcatgcatacatgagggtatgagaattgaggtgggtatggcataggtgaatatggaggtggaggtgtccatggtggtgaagtgggttgtgggttggggaccaactgaacaacattgtgggccaatttatttggccttgtttggtgggaagacccaactgatttcgcatgcctccctcgggcgggtgaatagggtcgctttgccaggcgatcactgtgactggcctttttgttgacatatttggacaacaattggtcgaacataaggcctgctttaattagtcgaccagaagcttttgccatattttgcttccacgtacctatttcgggtcatcgcggcttgaaggtacgaagtcggtactgcctctggccactaccggaccgtccgc

SEQ ID NO: 27891 - DNA, 442 bp, Zea Mays
tgcagaggggcccatgcgtcggtggcgggcgaccaaagcgcacgcgcgtgaaggctgccaggtggttgaggggttaaagccaagatccacccgcatcccacgcaggttgttgggatccaaatccgagcggacagcatctacgggtgtggcggatagcagctggaggatagggatgacgaggtggtcccacacgtcagcgagctgagcacacaaccgaggcaacggagacaccgacagagatggcccgcgtgtcggcgccaaatggagaattgggctgcgcgggagataaaagtggagatggccgacgcgggaattgggccgaggtgggttagctggccggcccaacacgtgaacttttcccccctttttattttattccccatttctttcctttcttattattatttttttatttgctatccaatttcaaaattgagttcaa

SEQ ID NO: 27892 - DNA, 302 bp, Zea Mays
ctgagattatacaggaagcagagggacaagttcagcaaataagggagaatttgagaactgcacagtcaaggcagaaaagttatgctgacacccggagaagactacttgagtttaaggagggtgatcatgtctatttgaaggtgtcaccacttcggggtatgagaagattcaaagtcaaaggaaagttgtcccctcgctttattggacccttcttaatcttaaagcgagtgggaggggttgcataccaattggagttactggatcatcttgcggatgtacatggtgtctttcatgtatctcag

SEQ ID NO: 27893 - DNA, 343 bp, Zea Mays
ataggaagggatctcaaaagacaaggaggttaagaacatataaactggaatgtttaaataggcaacatagtttttcagaggtaagtactagaaacaagagtattgaagaatctaggggtacaagcatgtcaatatcaagggagtagagatttgtccaatggtagcaaggtaatgacgaaagaggaaagaatcccaaaagacaagaaggttatggtcaggggcatctacaaagatgtcgcaagcacaagagtgagatcagatctaatagattgagagaagtatagaccacagtagaataaaatacttttggcaagggggcatataggagcacgacatagaatta

SEQ ID NO: 27894 - DNA, 598 bp, Zea Mays
tgcaacatccgcaacggcaaaaggatgagggcttaattcaccaaattctgcccctttatattgctgcatcatctgagtatcatacagatggggcagtcttcggaagggatttacagcaatcaaaatattcccagtatatgtctggtttaataatgaataagttagcaaacacatgtcagaaaagcatggccagctcagttagcaagaagctgtggagaatatataggacatatggttaggctataccggttatcctaataacttacataaatttcattcatgtcatatctagctttcagattctgaagaaccccgggttcgtgcagataggcaagctttgtcatgtcatcgactccgcatggcgcttcctcgggatccttagcatgaacattagacgctttcaccgtaacctaaacaaagggccaggtttcaaaactcaagtgtgcatgtcatccataactgttaagtgccttgccaattatagaaggtgtgcctcagcataggtgcggcccttcttaaccgtttgccttttatatacaagcctagcagtgccgaaacttgccaacataccgtcttatcattggaacatctgaccgta

SEQ ID NO: 27895 - DNA, 420 bp, Zea Mays
gtcagacactctgaataccgttcaccatggtacagtacttgggggggataaagatcagcccctcgccggcgataaggacgccaccgcggcgtgggatgggtcgccggcgtgtgcggtaaaggattcctggcgacgtggccaaaagttactgaggtggcgcaacccggttaaacggcggccaccggacttgcgtcgtggctctgccgtgcgggtgagctcgccagcacgattacagccggtgaagctcatccgattccggccggttgactataaattaagggcgagcgttgcttcttcaccgtatcccacatctcagcaactaagcgcccgactcaagatcaccagaaaacccacgtagccccaaatccctcgctcccttgttcttaactccgccgtgaagaacatctccgtggccagctt

SEQ ID NO: 27896 - DNA, 299 bp, Zea Mays
ccgtgtcactcgcgcctcaactctacctcactgtgctctttcattacatggtggccatgtgctatcgatgcgttccgtggccaggcgaacctggtatggttccatgcatttgaattgttgttttagcagccctgtatgcccttaaagctcactatggcagtcgtttggccattatgggcacagttttgtgggaacgcgggatcgacgttgtgtaccctaccgtgtacaacgcttacgtcgaccaactaggattctattgaaccaacactggtttttgtgagcaccgtgacctacgtgac

SEQ ID NO: 27897 - DNA, 342 bp, Zea Mays
gttgtcttgttcttgatgtatagcatttgaggacaaggaacaacattggcgcccaccgtgggtgacctcaatcgaccaccttcggcaagcatcgactttcgtaatgtcgccgaagaagacaacagtgccaggggctgccttgcagctattggacacaaatcaggagacgctgcgagaagctaggagccagaagaggaaggctactagcccaacacctcaggaggaggagatagattaagagatcagggatttggaggctatccaccaacaggtgcaaaggaagagggaaaagatgctttggctcgccgaccttcagaagaagatcacgaagctgctgaggaa

SEQ ID NO: 27898 - DNA, 344 bp, Zea Mays
ccctcgtagccctctgaatccgttttgtatatcaccagagctcctctctcctgagagcatgggggttaagctaaagccaatcaagacacgagccaaccttaaagcataggaacaggtgatgagaatgcgtaggaactgatgcgcatcccttgatttttttgtgctgaagtgacatagctattgtttccgtgatgtacataagacaagaggttagtcgggtcagggttgggtgggtggtcgattccattgatttgtagcctttaaaacagttgtacattgtcacagatttatttgttgaagggagaagaaataataaggggagatgagatgttgccaaaagttag

SEQ ID NO: 27899 - DNA, 407 bp, Zea Mays
aagccatgaagactcggcagtgaccgtcgtagaccgtgaaccagtgaacgccatgttagcgaactccggtgactcttcccccttctcactgtgagcacttctccattcaaatttacccttctcacggccgtccactataaattgatgcctcgacttgttccgctagattgttacgaagctagagcacccaccctcgccctcgattagccaccatagccggagaatttcgttcttcccccaaatttgttgtctgtgtcaccgtgagacgtcgcaccgtggccagccacctccaggtccaccctcgctctccttgttcgtgtttcagcacccacgcatgcttgtgatgctcatcggctcaacccattgagctagaccacgctcaatcgaccggaacaccttgatttgtg

SEQ ID NO: 27900 - DNA, 290 bp, Zea Mays
caggatttctggcgtttttatcaccttttccaccggtggctcttcagccttatcatctctagcttcgactggcccgactgtaagcaccttcggcactacaactggctcttcagtactctgcacaattggagcagccctcttagctaggcagctgaagaggttcccgcgccaactttaggcaccacgaccggttcaatataacacggccggtgggtcagaaccttcatctttttgcccttcggctcagctgcaatggccgaagcgacagcctttctcttttctcttgcccc

SEQ ID NO: 27901 - DNA, 314 bp, Zea Mays
ccgggtatcagcataacttttctgcctggattgtgcagttctcaaattctcccttatttgctgaacttgttcttctgcttcttgtataatctcaggcccaaataactgtctttcacccgtttgatcccaatacaatggagtcctgcactttctgccatacaaagcctcaaacggtgacatcttcaaactggcctgatagctattattataagagaactccgcatacggtagaatcttatcccaactaccaccatgcttaagagcacaagctcttaacatatcttccagcacttggttagtcctctctgtctgcc

SEQ ID NO: 27902 - DNA, 276 bp, Zea Mays
gaacaacacttcgatatcgattatcggggagaatgcgttgttaattaaatatagtacttctagtgctcataatgacacggataaaaattagtaagtccacttgttagttctcaattggttatttaactctaacaaatgttaaagtgttacaataattcaagtctctagaacgcggcaattcttgaattgcatagaagctgaaatgaattgattgttgttttgggctacacatactgttttcggtgtgctgtatgtttgatgaactaaattatattt

SEQ ID NO: 27903 - DNA, 449 bp, Zea Mays
tcgctatgtatcaccccagggtacactagctcgtcctggaagagggaaagagtcctactagcaaactactcagcagacaccacaggcgacaccgtagactccgcatactcgtcaggctgcccccactggcaccccgacgagacctgctggctggggcactactacaggcaccacatgcttcaagtgtggtgaggtgggtcaatatgctaatgtttgtccaaagaggaaccccaacacaccagctcgtggtaattcttagggcaagcagacatagacgccaggcagcaacctatagcatcgccggggttaatcaaatcaacgttgaagctactgaggatggtcctaacatcgtcattggtacgttcttcattaattcagtgctagctactatactttttcattctagagcttcgcattcattcatatctactcgttatgttcatgcaaat

SEQ ID NO: 27904 - DNA, 349 bp, Zea Mays
cggcggtggtgttggggaagcagcgacacctgaatacccggagctcggtatacgatggcgccacgccaaagaggagctcgtgaggtgttgtagagcgggtcgcacggcaggggcgtcggttgatcaggtacgtagctgtagcaagagcttctgcccaaagtgcgagaggagctgcactatggattagtagtgtacgcaggcaatcattgacagtgcgaagtattctctcagctttcccattttgctgggatgtgtatggacaagaaagacgtagttgggtgccaagagatgacagaagaagacgcatagcagtagaatcatattccccaccgttatcagtctgaaacgc

SEQ ID NO: 27905 - DNA, 297 bp, Zea Mays
ggaaagttaagccacatcgctttggcgtcgactagttgtatacttgtcctatcatgattagacaatgactagccatgatttatcgatgagtacaaatctggagagcacatctcttcattttgggagaaagattacttggaaatggcagtgaagcatcaccactaacaattacagcccaatgtctaaaacacaattgacttcaagattgggaaagagaaaaactttgacgctcaaagtcattgcagcccaatgcctaatcaactcccgatgaaaattaagcatctagcttgcctctag

SEQ ID NO: 27906 - DNA, 636 bp, Zea Mays
ggcagcaggggcagcaccactggaactcccagcctcatgatcatgagtgcgtggaggcataggaggcggaggcggaggtggaaccccaaagtcatcatcatcatcatcatcatcatgagggactgctgcgccctgagtctcgaactggtgaaaggtggtatcctcggcctgagtatcaatcactggagcaggtgccggcacaggatcctctagagctggatggtacggcccaaagatgaggcgagaggcctcaagagtaccctggaactgtgggggccgaatcagctgagcaaagatgtgacacagatagtgagcataaggcagctgtcgacgagcacgtagaccatccagtacggtgtccttgatctcacaaatgagaaaatccacaacatcaaactccgagtgagaaactagggcaccaaaaagccaaagctgaatatgagtggcattctccctgtaacccatccgtggcagaagcgtccgtctcatgagctgatatagaaacctggccactgtggtgaagtctgccggagaacgtcgcgacccatctgagaagggcggtcggaacaaagccgcgacgtgagctgtaccaggagcaagtccaccgtgagggcaaccaggagggtcagaggtgct

SEQ ID NO: 27907 - DNA, 319 bp, Zea Mays
tcttcgactccggtgccaccccacatatttcctctgatgctagtactctctccgatttatttccttcacatcattcctttccttcctcaattatcgtcggtaacgggaactccattcccattacctccactggttccaccattctgtctgacttccttcgccttaataatgttcttgtctcaccaagtctcatcaagaacctaatttctgtatgtcagtttacttctgacaataattgttttgtggaatttgacccccttggctgttctgtgaaggatcttcactctcggaaagagatcgtccgctgtgacagctccgg

SEQ ID NO: 27908 - DNA, 659 bp, Zea Mays
ctcctccgactgggtgatcgactccggtgcctcataccacaccactcccactgcaggcacgctctctcgctctcatcctccccttccctctcacccatcctcgatcatcgttggcaaccgttccactctgccagtcacctcagtaggtgcctcggttctccctgggccgttttacctcaacgatgttctcgtagctccccacatcactcacaatcttctttctgtccgtcgattcaccactgacaactcttgttccattgagtttgacccctctggtttttctgtgaaggatctggccaccaggacccctctcgcccgctgtgacagctcggggccgctctacacgctccagccctccaccgccggcgtgtctccacctcctgtcctagtctccaccacctcctccaccacttggcatcgtcgtctcggccatccaggacccgacgtcatgaccaagattaccagtagtctagatccttcatgtagtaggggacattttgagggtctctgtcatgcttgtcagttaggccgacatactcgtctcccatttactacttcctctcgggctgagcaggcttttgacctggttcactgtgatctttggacctcccctgtactcagtctttctggttataaatactatttggtgatgatttttc

SEQ ID NO: 27909 - DNA, 504 bp, Zea Mays
cgaccgaaggggtatcctggcattctgaccgtccgatcaacacccgacggccaagataaaatctatgcgatacataaacatgtaatccaccacgatcgtcagatccaaaatcaacggatgaaggacgactccgccccgatctgacctaaaccgttcaccgccgcatcaacgctccagatcaaaccaagcgaacaggtacgcctcgatctaatcctgaccatcctgaaaccttctgacagcgcctgcacttcttccctacagcactactcgccgaccacgcacatacaggggagaacagaccccgacggcggcgccatggccgaaactgtccaaaccccgacccttgcatccaactccaatctaaagaaagtaacatgaagcgggtgaccacatgacatcatcgagaggcaactcaccaagtttcaagaagcgatgagcctcgcccacggcacgcggcggaacacggggtccagcgacaaattccatacgccacaccaatcaatc

SEQ ID NO: 27910 - DNA, 458 bp, Zea Mays
cccgcctgaaaacttcattccagcaaccgaaaaacgaagagctgaggattgcgagactggtataggaggtctcaccacggtttgtagcgcggacagccctggccacgggaacccgtggattcaccaacaccggcaagggatttcgcgatcaccggtgatcttccccctccccgacttctaactccatgcggcgaggttctgcgtgacgaggtgagtcaccctgaacacctatttcggtaccgaccgatggcgaggatgacatctagcatcggtggcgatctcttccctttcttttccctctctccgtcgattctctacgcgacgaaccacacggagatcgctctgctcgcacatgatgacgtccaggaaacaccccccaggcaccggattttatacccgagtttggttagaatctcaactgaaaacccaaaattcttggaattctgtttcacggttcg

SEQ ID NO: 27911 - DNA, 422 bp, Zea Mays
ctaaattacataaggaaacaacctactactatactactctagttatctgcgtccttggctgctctcgttccactgtagctttatttgcgaggttcatgaaaggaggggctccaaagagattcaactccccataagttcctccgccagctgctcctaatgttccagctcccattgctgcaacctctggtggcacgttcggatgcaactggtcatacaacacgtgcacttcctcgtgaagagtgttattgtatgcttgtagatttgccaaggctacgcttagctcctccatccgagctcgggcatttgcctcgcaatcccaggctatatatcatgaatttacagcccagtctatagccctgtatcactccacaatctcctgctgcaaatggtcaacctctgctgacaactcagcaatacgacgg

SEQ ID NO: 27912 - DNA, 351 bp, Zea Mays
aattttcaagggtccgatatagtcattgactagtacactctgttgcttttccagttggaccaggggtacacgttaagacccaactaacattgttttaatactaatggttacctagtgaaagcatctatagagtttttgagtccatcattggggatcagtaaatttcataagaagaccaatcctttttcagatgacatttgtagttcatttgcaaataatcaattactgattagctacctgcctgctgtatgtgatatttactggcattattcataaaacaagctaagtgaggggaagtacagaaaaaacagtttggtcaactgtaaccttccagctatagagaacagtgtt

SEQ ID NO: 27913 - DNA, 948 bp, Zea Mays
ctagccacaacactccaggtcatttcactcccctgccaatagaaaatcagcttaactcaaatgataacttgcagatcttcattgagtcaatcacaaacataccagaaccatccctaatccactcccctccaaacagaaacaggtgtgccatatcaccagtagtgcgggggtcagacaatttaggtgtaaatgcaaataaaaatattatctcgactggtaaacgatcgagtggcaggttggcagcaaaacaaaaattaaagattgggggcagccggatgccatctccaaagcgcaggaaattctcattgcaaagttaaataattctgcagccatacaatacaaatgttcaagtgcttccacctccaataatcatgtaaatttgactgaacagattgaaagcctcttcgcaaaacccctcaataaggagcagatggaggcaattatggagctggcaaatcaaggcaaggggaagaaaggaagtaggtccaggggcagcaaggtgtcgccactcaaagcccccatcatcgaggttgttccagaaatatgagctgagcgtcctgttcagctaccagtggttctagtctttttttatgtatcccaagttaactctcccttgctcgtgccagggggcagagcaagatgtcctgaaggttcttttgcttcactgttggtcgtcgcatggtagttggtggtcctggaggtggttttcgaatcattggatcattgtacctctgtatcttactattttcagtttggaacttttgtgtgcctcatgggacatatgtatcttactgttggtgaacaagcttgccagtctgcatcaaatgttagctatgttatattctttatgtggcaatgtctgttcgagtagaggagggttcatcttttaatgaatacaaactgttgtattttatcttggaatgtgagaggtttgaatgctcgtgctaa

SEQ ID NO: 27914 - DNA, 395 bp, Zea Mays
gccggactagcacaacaagtgcgcaaaaccgaagtcttcttcaaaagactatccgtgcaaaagtcgcctaagggtgcagctggactagcacaacaagtacgcaaaatcgaagtcttcttcaaaagaatatccgtgcaaaagtcgcctaagggtgcagccggaccctccgtgcaaaaaccgactacaggtacaaccagaccaacacaataaacgcgcaagatcaagtgcacaagtcttctacgggcgcggccggatcagcgaaggcacacaacctcatcacacaaattatagttacatacatgcagcgagggcatcacacattacatcggctcaaccttcgggatgatacccatctccctataattgaacaacattatcctcaattcatcgccctc

SEQ ID NO: 27915 - DNA, 346 bp, Zea Mays
caccagcagctggggctggagcttgtggtgggggacgagcctccagcacgtccatgcatgtaacaagttcaacaacacatcgatcaagatgctcataggatgtcgccgcagagtcctgatattttttgaaagcttcagtcatcgcgcgcatcatctccttcaattccggctgcgagacacactcatcgttgttaagcttagggcccttctccttgtctgtttggttctttggtcttgtcattgttagtactaaacagagacaaaaggcaacaaacaaacagtgtgcaccctacaactatctctcaaggtgtggtggtggaacacaagttatgaaagcgtctaccac

SEQ ID NO: 27916 - DNA, 273 bp, Zea Mays
attgttgtggatggatctagtgcatgcacacccggtgaagtgtttggagggaatgatgaagaagaggttgctatggatgttatggtggagatgattgtgatagatttgcatcacctgctactagttcctatactctaaaaggaagtttctcccgaaaccgagcaactactagtactactacaagtccattgaagcccaagaaccaaatggtcaaagtgatatagaatattcatgccactctgatggaaaattataaaattgcaaacaaagtca

SEQ ID NO: 27917 - DNA, 610 bp, Zea Mays
ggcggatccaaggggtgggcaaggtgggccatggccccatctcaatttttcttaaccccttatacctaggtttaggtacacaccaaaataaacaaatttttgtatagttagcgtggacaaatctaatgaaaactagattttgatctatttttctctcgatgcttcactactcagtccactcttcacctgagccatttgattctcttccctagcgcaagcccactcgtggctcactcgcttcttcggtcatcgactgaccagtaagtcggtgacctaacccgcccgctgctgcgcactttgccttctcatcactcatcagctcgtcgactcatcgggatcctacacacaacgttgatattttgcctcctagtatgcaccagcacatgggcaagctgttgatgggaccgtggcatcacctatccctcgctaactcattagagtcccaccgcgccattgcaacacgacaatgggtgtcgtttgccgtcactatcatctatcgctaccttgcctcctgcactcgctcctcctacttgtcgtcgtctcaccaacgccatctcacgacaaattcgatgactcgccagaacgacgcgctgatgcggctgctccgccc

SEQ ID NO: 27918 - DNA, 519 bp, Zea Mays
ctgtcagtaattcctgggtccgccactggctaggagcgcccggtgatcgccggagataccgccacggtagaagccacctagcgcttgcgctagtgccttcttcttcctctagccgccgcgcgtctcgcccgattcaccagccaccgccgttgagccctataaattgaagcctccaccagccccacaaggtcatcagctacccagtctccgagaatcgttagcaatcgttcgccagagctcgcgaattttgaattcgccccaaatcagttctctgccaccccgaaatccacctcaccgcggccagccccattccggtcagttcatcctcccctctccctcgtttaagctttctcatatgtctacgatgcttgccgacccacgcaattgcgctaggagccctctggtcgccgggaacacgactgtctagccgcactgctcacggtcaccgtggccagagcaaacctattggtcattagtgaaattaggttgggggaaaggtttgggatgggtccaattccg

SEQ ID NO: 27919 - DNA, 525 bp, Zea Mays
gtcctccgccgaattctaacgggggagggacgacacaaattgtcaccactatgggaaggaccattcatagtagcagaagtcactcggcctggatcatatcgtcttactcaaatggatggcacagaaatatggaactcatggaatatagagcatctaaggaagttttacccctagctagatttcaaaagctattgggacggcattgtattctgtaattgggagatacaccatcaataaaatgacttcattctcaaaggcgctcgaattgtttattgtcaatctgcatgcttactcgactcagggtgaccactataccctacgaacggagcaatcggcttaagtcggcaatgacttaagacggtgtgacatgctcacgcttacttaactcagggtgaccactatgccctactaacggagcaatcggcttaagtcgacaatgacttaaggcggtgtgacatgctcacgcttacttaactcagggtgaccactatgccctactaatggagcaatcggcttaagtcggca

SEQ ID NO: 27920 - DNA, 391 bp, Zea Mays
ttgcatcttcggcaaatttgcctctgctggtgggctcagaatttctggcatttttactgtttcttccacctttggctcttcgaccgtatcatccttagcttcggctggcccgactgtaggcaccttcagcattacaatagactattcagcgctctacacgatggaagcagcttgttttgcttcagcagttgaagaggtcccttcgccaaatctaggcactacgaccggttcaatgtattgtgccggtgggtcaaaacctttattttcttgcccttcggcatagcagtggtggccgaagcggtagttttcctcttctttccttgccttcgcagtgggtagcgataatcagggtatacgaagccaattgcgtcaaacaccctgttcattcttt

SEQ ID NO: 27921 - DNA, 407 bp, Zea Mays
gtaaagacatgtatccctcaatcaaacaactaaatcaccagtaatgaaaacaagtcatccctattcaggtagctgatgacatatatgacagcgttataatcgtgcctattcaggtggattataccaaatgtccttatatttgtggacaaaatccaatgatctgcagtaaaaatagacagcagattgacttatttgtgaaatagataataataacagagtactaacaaaaggtaaaaccaaaagcttcagaaattacgaggcacaattgagacttcagtgagtttgcactaagagcagtttatgcttcagcgtagtaaaggactggaagatggctatgatacacaatacacatacataagttatattacaaataaactcaactaatttacaggtaggaccgtagaagc

SEQ ID NO: 27922 - DNA, 321 bp, Zea Mays
ccgccggtaccgcccacgttggccgaggctatcgctgccttggtcaccgcgaccgctgacaacacccgcttcctacatgaaatggcgggacatcaacttcagcaacaaggcggaagggcttatccgcagggaccccgcgaaactttgtatctggatttctcggaaacccgtcccccacttttcgtcaaagctgaagatcccctcgaagctgacgaatgggtatgggtcattgagcagaagtttggactcatcagatgcacggatacccagaagccattatttgcggctcagcagttaagaggccctgccagtacctggtgg

SEQ ID NO: 27923 - DNA, 343 bp, Zea Mays
gtcagcaaccaggcgtccagagatgatgtcgaagacatgagccgtgcaagtggtgaagctgaagatggcgagctcaagaaggtggtcaggatccgtaaaccaaacgtgcgcgtgggtggtccggagtgggtaagggcgtagaagtctggtcaggtcaccaacagaaaggttgtatgtgtgagtggttgagtcatgtaatggcttagttaaaaagaggaaagcgtggagaagaagggtatcaattgtaacagaattttgtttccctacgaaaatactcaaccacttcgcccattctctcttgttctctgctatttctgctctcttgttcttgctggagattggc

SEQ ID NO: 27924 - DNA, 982 bp, Zea Mays
acggttgaggatggcgggttgattagctaattcatgaggggctctattgcaaaataaacacaggggtatcagttgatcacagccgtcggatcaaccatcaacagatctgattagatccgaactcccaaccctgctatgcccgttgatcacgagatcgacggcaactaccccgtcagtcttggcaccatccgatctggatcagacgggtgacattcactatggcgaaccattatccgacttctaatctcgcatgtccacgcataggtccatggctagaaatcaccaccctgatccgtgttttgggtacggcggcgggattgcccccatggcggtgccattgctgaccatggggatttccaaatttaacgtcctacgaccctaaccaatcgcgaaacacgtagtgcggatcaattgaagataggagagccaatactcaccgaggatggcatgcgcaggagtttggcccgcggcggactttgggttggcgccggtgcgagagctctgaagagaaattcccaggtgactttccaccatcgatgcctgcaacctccacacacgtgttcgggatgctccggcgatggcccccgacctcttctacaactccgagcggtggcgcgatgacgagatgccgacgtcgactcggttccccccctctctcccacggctcacgacactggcgcaatcttcgagttactcgtgaaggtggtgcggtcaggatgttcatttataaagtccaaggccgcagaacacaagggagaaggaggatagctgtcgtggtcggctgttacaagagctagttgttgctgcaacggccatggcagagaaggtgggctgacgcctgggccccacgcaacggtgacggtgaacgcgctcgacgagtagagcccacctgtcagtgaccgggaagaagcacgtggcacaaggggggtgcgactgacatgcgggtacgacctgtcggcgccaggctgcgcgagccgcagct

SEQ ID NO: 27925 - DNA, 303 bp, Zea Mays
tggggctgaggtcaccccgggtggtgttcttgagattgttccagttgatcttccctcgtcaagccatgctccagttcctccagccttgggccttccactattcctttccaatctccaggtgagttgtttttttgctctatattgtttgtactagtgaattatctttcttctgctcatctgtctatgaccacaggattttgttgatgaagtatctgcccagttgaagtcctgcggtgttgttactcctgaacaagctctatctctaatgcagtggaatcctttgctgctctagaaacagataga

SEQ ID NO: 27926 - DNA, 357 bp, Zea Mays
ttttttaaaaaaaaggaggtggaggtgagataagatgagtaatctgttggggatagtataggtgcaaagaggatatcgaggaaaagaaaggagtgtgttatttgtattatatgcattatggtctagtaaatgtatgtatacacatgttcaggcatcgtcgtcgcattgactatcagggcgatccctgagtcacaccgcagattcggcgaagtcggcgtcgtaataacggactgtctttaaattgcgtctctctagagtgagagagtttacctaacactaacatgccaacaggaatgaagccacatctcaaactgctgtccgtttgtagccgtgaaacataccttgattcacactgtc

SEQ ID NO: 27927 - DNA, 655 bp, Zea Mays
gttcattacctccaaaaccgtggctggacttgtcttttatactgctataagtggagagctgcaatgcaactaatggatgcaacttagctcatttcatttatttgttagccattgattgattcaaatatgcatgtcataaagtatggcaatgtgccaaatttcatctgattatatgtttcactgtggttgtgtgactggcattctggcaatattattactgtgcaatatatagtggtatgcactatgaaatttggttaattttgactatgctgttaagatgatctgctgctaaggttctcgtgttgctgtggtgggtgatgggctggtggcaactagggagctgtaagtgcctcaaggtactgctgtgcagtgctcttttttcctattattgtaaaccacatttggcacttaaatgttgcagggatgatttagcatttgtaccttttctttgggattctcttcaccatgtttagtgggataaaacttcgatgtttgattgggtggctaagaaaatttgtatccttgtttgcacttgtttttcatgtgaatattgtgttatgagtatggccattaatgtgttttgtttcaatggctgagtaagtcagcttaatgctgttcttggaatgtctctatatcggtgcgcattaatgaaaag

SEQ ID NO: 27928 - DNA, 438 bp, Zea Mays
cggctccaaacagggcacagtgactcgttgaggcgtgtcatgactacgatggcacgagtttttgaggtgtcggctagaaacagaatcgacgacgagcagctggggcagcaggctatggctagcagctgcttagcggcgcgttgcagtggctgtgggtgagagagcgcacgaatctagcaagtaagggaaaaggggaagggctcacgggcacagaggaagaagagaacgagtgcaacaccatttataggctaggcatgggagctaggacgacgccgaggatagtcaaggaggtggcacgaacggcagacattaatggctagagaagaaacaataggaaacggctgctgcgatgggaggagaagcgacgtgatgatgctctacttgaatgacgcaatatggagaggcgagggggttgcaggcgtgaagcggtgttttttt

SEQ ID NO: 27929 - DNA, 487 bp, Zea Mays
actgagcgcctccttgagaaaagaagcaacaagttcaattcttcacttgtatttcatcctggaagatatgtttaaaatgcacatgaatcaaaacatcgctattattcccacaccgagtttatttcaagtttgcttgtggcagaggaaagcctggaatcctccagttactagttttgccattcagtccgctcactaggggcgtgattagttctggtttctactttctaggtagccaggctgacatgtggcagccagggtctctgcatgtaggagcaccttctttggttcatgtttccatccataccatctcatcgcatagcttgattggttggtctctccctactcgccttgtgcaggcgccaagagagcagcagacatgtgacgtgcactgcgtgagctaggctccccagaaacaaaatcccatttcatttcttggcctaatttgcacccacaaatccttgcccatgtggacgtccgtcgaaccaaa

SEQ ID NO: 27930 - DNA, 549 bp, Zea Mays
ccaagtgatacgctagaactaatctgggccacccatttcaaatcgacggccccgaacccttctcctacccagggaccaaaccgcggcggcgctgccccccctacggcggagtcatcgctggcgatgtcccgcacggcaaaccatgactcccaacacacgactaacccacgcaacgtgaaatggagagctaggcggattctaggacatgattctcacccgtgtcggtgttgtggagggtgcttgccgtggcactccttgacgtcggcggcccaaccgaactccgtcgaggaattcagggcacacgatggtctcactcgcgccatggatcacccgagcaccacccttgacccccgacaaacaccattgaccaaacgcttggcgtagatcgatggtttggctgagatacgtcgatggcggcatctcctgcttctctctacgctccctcatctccctctcggttcggcgatggtacacacggtcaatcggttctatgcgatgcaagagagctgagagggggcaagttttatagggtcagaggcgagcccgagg

SEQ ID NO: 27931 - DNA, 722 bp, Zea Mays
cgtggagaaccaaattgggggaagagagaaattgggaggctctggtggataatccggggcaaggactggtgcaatggatgcgtaattatcctacggagccacggttgcactcaatttatagtaggcttgagcggtggccagtgaatttgggttgggtgcggtggcggtcggagaaggaatgagtcactggtgcggtgattcatggccttcactgtggcggcctcaccgacgacgaaccagtagcaaagagtggcttacagtgactcactacaacgtggtaaaatgttgaggcacatagcctggcccggataacagcgactccggtgatgccagcgtgacaaaccacggcgggacacggcgactggtctggccagcgaccggattcaccccgcgctggatattcttaccacactcgacgttatccatacttctcgtggcacgaatctttcaggcgagcgcgaattgcaacggcggatcaccggcggcgaggggatcagaacctgatcctatctattactgtaccatgggattgttcttcagtcagcctgacagtcaatgtttagggcgaatttcctcccaattttccatggcaactaaaccaatgctctgcagcaaagttgtagcctaatgatccagctacaatcttactatagcaaccatagccaaacactgactggatcatggtcgaatccaagtccaaagattgcccaatcacactgtca

SEQ ID NO: 27932 - DNA, 671 bp, Zea Mays
aagccataagtaccaagcacccatgatgatgacactgttagtgcctcttcttttagttttgtgcacttgcttacacaccttcctccaccactcagcaaaagatctcattaatagcaggagaaagattaacaagccccatcggcgatagaatgcaatgccaaaactgtctagcaaaaatgcaagtgtacaggagatgttggatattttccggctcctggtcacataaaggacagacctctgggtgatccaaccctctcttctgtagtctatcagttgtccaacatctattccttattgccagccatagaaaaaaaatacatgtgggtggagcccaagacttccataacctattccatgattcaaagttaactgaacccatgaacaaagccttatagcaagacttagaatagaactgcccagaggaagtatggatccacacatgtctatcagcctcttgtgtaagtaccactcctatagcgtcccataaatgcaggtactgctgcaacccaaccaaagaaaaaggggtctcgatgtcactgacccactgtcagttttcaagagcctgggccaccgttctagaggaaacagccctcttcccaacactagcagctacagcaggggcaaagtctttgatacaagccccatccaaccatctatctgtccaaagtaag

SEQ ID NO: 27933 - DNA, 708 bp, Zea Mays
ctctaatatctcctgctgcatgtgagctaaaataactgctctatccacagactatggcaaatgacacattacacccccttgtaattatgtcttcagtcccttcacaaactgattgacaaaaaatctcatccatccccgggttgtgaacagtcgtggcatgccttgcttcttcaaactcttgagcgtactcttcaactccattcttctgatacaggttcagaagatgtctcatggccttgggatattcttccactccaaatttggccctaacagctctgccaaactgcatccagtttcccagtccttgcctcatcttgtacacttgaagccacctcgctgcattcccctccatgtgcatggatgctgatattgcccacaaagcttcaggaacctgataaatggtgaagtagtcttggcacttggccaaccatattccacgttccttcccttgaaatctgggaaacgaatatttgggcaaagatggatgtcctcgccctcccatcacttgatcttcttcttctcttactctctcctgttgtggttctcttcttcttcggatttgatcaccttgattagcaccctcccttgatgatccagcaccatcgccctccaagtccttcgccatcatctccaaacgcaactgcgccaccaccttgcctgtctcctccatttgccttgccaatatagtacgctcttcttctgccttcc

SEQ ID NO: 27934 - DNA, 433 bp, Zea Mays
cggcgcgtaggaccgtaggaatcggagtttaacgcgtgggctgtggggccggggacctctggcaatggcgccgtcgtggtccagagggggcgccaccgctcggcggggttgaggaccggcgtgatagtggaccgttggatgcggggtgtatggtctagattagatgttggcgtaccgattgggggaagggcggtggatcgtccgatcgggatcggatgaggatcagtcctttgggcttcattaaatccggagcgttggatccgaatccaggggccctcgtagtataccgattcgtgctggtcgtgggtctaatccgggccagtcgtttctgatcgtgcggtcggaactggccgatacccctttggctcgcgcagtttgcaattaaacccctgcactttacataatccaacccaccgtcctcggcaactatagc

SEQ ID NO: 27935 - DNA, 505 bp, Zea Mays
ggaacagcgaattgctcgtcgacgtccttctcccgcggggatttacgctctcccatggcaagcctttctcaccgtcgatcgtcggtggtaagcatctctgtcgaattggactgtggcccctctacgcgtaggactgttcaggtaggagatgatcaccggggaggagcgtggttgggctcgccggcgtggctccgtcgttggcatatgtgccgccaggtctaactggtgggaggaaggggaaagtgcactagccgtccgttctgtgactaacagatgggattggatcggctagataagcgattcggcgatgaaatctaaggtgttgatcattgcaccaacgaccacgattagaaccgcataccggcttggccagatccgattggggccgtagatttcgaatcgggcggttgtggctggattgggtttcataaaatctgggccatcagatctcgatccagtggctcatagcgcataccgtttcaggtagcagaaaatctaatctggg

SEQ ID NO: 27936 - DNA, 352 bp, Zea Mays
agcgaagtgaatcgtgttgctagcatgatcgagaactgatagggcgtgtacagaatgtggaggatgtgtgtggggtacgctaattgcggtggtttgttggttgacccttaaaaataccgtcatcacgagaaaccgatggacgttcgtctggcggttaacacactagagccagtagatacactgttgatgcgactatctctcctgaacgtggctttgaccacctccaagtgctagagacagccaggttccagcagtggtggatctaggaacgaattaaaggaggagctactaagggtgcatttggttcaactttctaaaccagattcgctgccaaaactctagaatctctgca

SEQ ID NO: 27937 - DNA, 367 bp, Zea Mays
gattcttcaggtaatgtcgcatagaggttttgggcccaggtggatgagttggattagggatattcttcggtctggcacgtcctcggtcctccttaatggcgtaccagggaaaacttttcattgcaagcgcggggttaggcagggagaccccctctcgcctcttctttttgttctcgcggcggatctgctacagagcatcatcaataaagcgcgacaacaagacctgctcaagttgcccctcgccgcgaattgtggtcaagatttcccgatcgttcaatatgcggatgacacattgttgataatggaagcttgccctagacaattatttttttctcagagctgttctgaactcttttgcaacttcgac

SEQ ID NO: 27938 - DNA, 326 bp, Zea Mays
ggggcgacgccgctgcttctgcggcacacacagggcccgagcggccggcctagacattctggcgatgaaatcaatggtggtcgctgactgagcagccgagagaggggattgttgagcagcagcccctctgcgcttccttctgaaatatttgatgggggaacaaggccacatcctgagatctgccccaatagccttcatggacggcttcaacacattccccactcgggtggcgatggcaggaccactcggaagggatgaagatgaactcaaagtctccaccgctggaacagaagagtcaacatcggctatggacaagaagacctcgc

SEQ ID NO: 27939 - DNA, 445 bp, Zea Mays
tttgaaagtcaggctaaaccgggtcttcaagttgaacggtcttcagtatggcccgtatcctgaggagggttctactaattttggggatattgatgatcgcaagagaaatggtgtggcgacacgtggtggtgtggatgaggggtgctctaaaggtaaggtcatggctgtggtggtgaggaaaaagagaagagttgaagctaaagcgaagggtttgacaaagacatctggggtggcaggggccttggacatatttgttgaggagttggtggagacgtgcgccgagccagggcaagtcatgacctcacccaacctccgggaagcatcttctcggatgctgaaagtaacctggatgagtggtgcggaaaagaccctattcccgtggctcccgacgaggataatttcacgtcttatctggctcagtcttttaaagtttttccttacagat

SEQ ID NO: 27940 - DNA, 376 bp, Zea Mays
cttcgctagtgcaccatcctcacacgttgtttaccgacaaaatgtcatttatcacctattcgatgcataaacagagaagagggcacttgcttggacctttttgcccctgctccaaatcaagacatggcctgtccgccgccgatctgctgccggttctcagctgcagcacaaacagaggagagagcattttgcacttggctgttgcgcccaggttgcaagttccagaacctactgcgcccaggctacagcacaacagcaagcaatagctgataagagaaaaaaaaaagaaactgctacccagaaaaaaggactacaaccattggagatctaaaccgatgacagcagcaagcacagaaaaatgatcaccgcaacaagg

SEQ ID NO: 27941 - DNA, 413 bp, Zea Mays
tggtaggccaaactaaacttcaaattcgtatccaaattctcatgaaaacttttccaaagtctggaggtgaactgtgatcctctatccaaatcgatcttctccggtacaccgtgtagagacacaatccgagccatatatagctctaccagttgagatcacttataagtagtcttgaccggaatgaaatgagccactttggccagtctatccacaataacccatatagaatcgtatcctttcgaggtgcgaggcaatccagtaataaaatccataccgatctcttctcacttccattcggtatttttagtgggtgcagtagtccagcgggcctttggtgttcagccttaactctttgacacacatcgcacatagttacatgtgcagccacatctctcttcagtccataccaccag

SEQ ID NO: 27942 - DNA, 337 bp, Zea Mays
gacggttttactgcggagcggaggaaacgaaacgtgcatgcggcgcgaggggaaagagtggagcgtcacgtacgatgctgtcaagtccaaggcaaggctaggtagggaaggggcccatcgtctgtcgagagcagtcgagctggagaagtggttccggctgcgttggggacggatggcgacggtggccgtccacaggcacagctagagcgggagagggacagctacctcgggttaggttaggcgaatagctaggcgccaagctcgtccatgcctgttggattggatcgtccagccacagacgttcgttttaggcgacaacacagcaggtgggggtttt

SEQ ID NO: 27943 - DNA, 359 bp, Zea Mays
ataggaacagcttgacagcaccagacctcccagactctcccgcgggtaatctaatcgaataaggaaacaagaccaccagttctcccagcaagcaaccgaatcaaatcgcgaaaaaaacattcatttcaacaaatcgtcaacctacaattcttaatttcttattgaaccttcactttcaacaaacccgtcaacatacgattcttctcgcctcccgacaaaaatgaaaatgagcgatgccacaatcgcgctgatgagcattagaatcgcatcatttctcgcacaacaatgcctacctcccaggaaagaataaaagattggggaaacagagggatcacgattcaccaaaaccctgtcccccg

SEQ ID NO: 27944 - DNA, 798 bp, Zea Mays
gtttatcatcatggcgtgttgtcgcccagtcacttggtgtgttgcgccgtcagccccgtcctcccccgtgggctttctcgtcttttttgccgcggggtgctggtcgctccatgagaggctttgatcgacagtggcccttggggaagcgggttgagctgaggcggggcagacatcgcagtacgcaccatgatactgggcgaggcctcatctaggctccccgcatgggggagatgatctcccgtggtgttggctgcgagacatccctgactagggttgcagttggcctcgctaggcggggacgtgagtctgtcttctgacctagatagaaggatgtcgaggaatgagtctcaaacgtggtccggtacccccacaacctcgacacgattgggtcatggcgatccttgcggtccacagttcctctgaggtggttcgagacgaaggtcaccgagacttccgactacgtcgggcaagtcgtgtgccaagggagatggggcttccaaggccctcaccatctctccttcttcgttgacgacaaagtccagactcccgaagcgaatggtcgtcccgggagtctaggccacatcgctatcgttgctagccatccagagttttagaaatatcgtcgcggaatgcgcaagccctacctggtgcaccaattattggtgtttcaaacctcgctctgacaagtaaattcattgtgcatgttccgggctccagagggtgtgcgtggttggtgtaagatctatactggttcgggcagaacgtccctacttccagtaatcgacgacttacggtacc

SEQ ID NO: 27945 - DNA, 338 bp, Zea Mays
tccttggacttggtacaaaatgtaaatccactaatgtcataggtttgccatgtcgtgacctggcgtgatggtccagatgccacccccttgatggtttgttcttctattgtatctccgtgtggaatgtccttcacaattagccatgtgttgaaccgctgcttatgttgcttcattacccaatcatctgtttgaccaggattttgctcgtgaagctcattgatgtgttattggataaatggctccattatcgctagctgatgtaggatgttgtgatgtgcctcaagtactgtattgtaatccggtgggatgaaggatttctgtcccatcctaccacttcc

SEQ ID NO: 27946 - DNA, 304 bp, Zea Mays
tcacatccacccgctgaaggcccacttatcctttcaagacgacaacttaatcccttgcttactgcacctaacaaacaaaactgataaacacattgcttttatgcttagcagtacgacagaagagcagccctttgaagcgacaccactaaaccacgacattgtgatgtcgagatccatatatactcttgatattaaaatgccgacagataaacaaaagtccaatctgatcttgcagagcagtatatatggggataaatacatctataggttcacagaccaatcagaatgcgatcaattttttaag

SEQ ID NO: 27947 - DNA, 294 bp, Zea Mays
ttggttgggccgacatggatccctagcatgcaagggtgctgaaacaagggtaaggagggcaagaatggacctggagacggcggtccacggcgcagtggctcacggcggcacgaagaaccgatttgggggaaatcacaaattggggcatggtggtggatgatcggaggtgaggactggtgtactaagcacgtaataacctagcggagctctgcggcatcaatttatagagagtgctcgatagtgcgatgaatttgggcgaagaagagctggcggtaagataggggagcagtcacc

SEQ ID NO: 27948 - DNA, 622 bp, Zea Mays
gtcagcatcgtcatcatcctcatgtctgaatggggatcccgcgtgctggttacgcaacaactcaccaaggatctaggaaatttttggtaagcctacaaacccgtgcatagaacccggaaccacccctcggccatctgcaagcataaatacagggcccgactgccccctcctcaaccatcatagcgcatgtaccaccattgtgtggggtcaaagacggagagaaagtgacgagaccgccggggaaaagctctagccaccatcatccaccaacgaggtaagagtcccttccaaggtttcgacgtgttgcccgccctcataacagcgttttgtttggtgttggctcccctgggtgtggttatggatcccatccatggcgcccctaaggtgggtcggccaccaccgtcttggcctggggtctaatgatggaggggaaacaatggtgaccgtagatctgttgatgaacgcgcgggattagggtttcatcttaccccttcgactggatggaaccccgtctgtcgatctcagatccaaagactatcaccgcgtaccagtcactttaagggaggcctaatctacacccttgacgggggatcgaacgactcagactgagcacagattctta

SEQ ID NO: 27949 - DNA, 545 bp, Zea Mays
ttcaattcggtggtttggcaagcatcacggggttatgagaatactcaaacgagggagcagaaggtgtgggctgacctgaatcgcgctagccgcggcgagctgttcttcgcggtgtattcgaaccggtttggggagaatctgaaattagcgctctctggtggggggtttgggatgcaggtgggtgcagtagttgctggaatacatggcgaagccgaggggggctcaatttatagatcccatcgacagtggtgtccaatttcgcaaggttgtgatggcggccggaaggaacagggatactggagcaggggatgggtggctttcaccgtggcgcttcctccggtgatcaccggttgaggagctacgacggttaccagtgagctggtgcggctagggacgacgtggtggaaggcttggagcgtggcacagccgcagtaaagtacggcaactccggtgacggccatgaggccccgtcgccggtgaaaaggggcaggggacagcgaggccacagtagctcatgcacatccgcgacgagatctttacccgat

SEQ ID NO: 27950 - DNA, 966 bp, Zea Mays
ctgaaattagcagaactccacaaatgaatagtgccatctgctgaacctgtagttatatatggagtgtccggaagggaaatgacagaaacaactggcgacatgaaaacatccattgtctggacgcattccttttccttcaaggcccatgcctcatttgacaaaaatatagcatggatcagtagcaattgttatgcgcggaactataatgtgtctatacacacagacaacatcgataccttggcagtacagtcttgagatccactaatcaaatattgctgaccatcatgtgtgacgaaatccaagcaattcactttgtccgaatggccgtgcagagtacactctgatgtgggagatttcaggcaccaaagctgatgtacatcaaagcatagcttattaatcacactatcgcacagtcattgtttcaaaggaaattaattacacttatcttggtatattttctttatcgaacttgcaggagaactgtgcatcttataaagagtaaaaaggcttacaaagcagcgaaacctgctaaatagaagcataaacagagggggggggggggactacattttggcaccaaccataacccaacacactaattcatccaagaagcttctctgcagccttgctaaggaaggaggttccccattaaaaaccaccttgttacgatgaaaaccatcttggtatattttgaatgttgtgttaattcaatataagaatcaaaacaagggagagaggctcaaacctttattgtgtgatcacttgaaacactggcaaaactgtcatttgggctaaatgccacttgaagtatggaatcagtgtgttccctaccaaatttttgtatgcacttccaatcatcgtcccagtcccaaagcttcatttcttcacaggtagagagcaaatatggctgggttggatgaacgataagcgctctggacgagcaaataccccagtctatgatcccag

SEQ ID NO: 27951 - DNA, 294 bp, Zea Mays
catacatacatgcacacggacgacaagaccagtagacccagaggccgaagccaagggagcctaggcctgagagcactagtcgcctacacgaccctcaacacgatgggccgcaccgagacccaggctacgacggccaggggtcggcatgacatagagacgtcaatgatggcgccgatgctcttcagcacccacgccgcccgccataaagagcgaacagggaagcctagacgcccgaggcacatacggacaaacacaactttaccaaggtcgaacaccccagtgtaccacaacaga

SEQ ID NO: 27952 - DNA, 326 bp, Zea Mays
gagacacatggcaagatggtggggttgcctcttgcctagccagaagactagcagagggtgcaccgtccgagcattctacacgaacgtcgatgcccctaacctcaaaaagatcgagcaaaaggtcctcgggaataaccttctctagcgcgctgtcgatggcggacatagtcattccctagaggctaaccagccctgagagaacgaggtttggaatgtcattgttagccttactacgacgatccctatgtaccatgggagcacatcttcttcatcaccatcatcctcctcctcttccataacatatctgctgaccctcacaccaccac

SEQ ID NO: 27953 - DNA, 583 bp, Zea Mays
gggtgccgccggataagcgcaacaagtacgtcaatcgacactcctcgcaaaaagtcgcctacgggtgcagccggatcagcacaggcgtgcgaaaacggccaacaggccacattacaatacaagttgcagttacatacacacagcgagggcaccatatactacatcggctcaaccttcggggtgatacccaactctctataattaaacaacattattctcaattcctcaccctcaaaaagatttcgcagatccccctctcctatgctcgtcccaatcggcggggacaacagttctcgtttaccaatccggtctacacgaagacggtctcgctccatcccaatacgacggcgcctaccacttcgcgaaacctcacccacgctatgctttgacaccacccctcgccgcctgtacttggtcctcgcactaggaagatcagccgcctcgccaacctccacacgcggcgaggactccgccacggccacatctaatgcagcaaaataattcaagccttcatccgagaactcttcagtccaggaaaacgaactcccagattcaccatcagactcaaaacactcagatccag

SEQ ID NO: 27954 - DNA, 578 bp, Zea Mays
gtcaatctttgtatcagtgtcttcagtctcttcagttagatacttttcaagttctgactttgttgtgctactagaatagttggtcattttcatcctcttggcaattacttctctaagtttgcctcctctaccaccctttgcttcactaggatcagttacttcagttggagcataaatatttttgtattcttcaaacagctcacgaacacaagagttaatagctgcccaaactaattggcccctatcctcaccaaatatctcctcaacaataatcttcatatacatagataatttgtatcttggatcaagaaaagctgcaacaaaaatgagtagattaatgttctctttatccttctcctttccctttcccctcgcctttcccctctccttctccaactccatctcttgcacatactcgttctccttattgtttgtgtgccaaactccccaatgcatgagataggtgtagttccatctagttgggacatcaagctttagaaatgccttggtgttcaacccctcttcctcagcaatttctttgaacttaaccaatcttgaagtcccatctttgatatatc

SEQ ID NO: 27955 - DNA, 317 bp, Zea Mays
gtaacacacttaaactcattgtcgattttacccaatatataatgccatcatagccaagcaaatatttcagcacactgcatgctttgacaagaggggtctcaaggacccatcctccattcaaatgcagggacccgatcatcttgatgcattgcgatgtacagtttttggtccacgcagagtctctacacatttgaagcacaaagctgtttctagagtatttgaagcttttaaattacagaacattagatatgctcgtgcttaagcactaacttgctgaaagttgcttttgatgatctgaccgtcttctccattttctc

SEQ ID NO: 27956 - DNA, 481 bp, Zea Mays
aaaggtaactgttgcacgcggggtgaatcctttttcaagtaaacctgaatccttgttcagggaaactcttccacacgcccctgaaacgctgcaagaaatcccgttcgacgagcacctaggacctaggcagcccagtgtctgacacgggggcccgggtccacaagtcatacagttcgtgtgccagatttcgggtgcggaaagagcgggatgcaaactgccgcacgcgatagcgtgcctccttggggccgctgcagaagacaaaaggttattttaaaccagtgcagcggcaacgaggcgccccgcgcgtggcccgacgaaaccaccagatgtggggaccgtgggtcagtcagctgcggggacagatatggcagttgacgtgactgaaggtggattgacagtgggcacgtcagtagacgtgctaaaacagcgcgccaatcaccaatcaggtcatgttgaggcaaagtacaagctttggccccac

SEQ ID NO: 27957 - DNA, 324 bp, Zea Mays
ggctggttccactctgaaattcagatgttcagtgtaacagagtcaactttgggtgtgaattcaagcttgatttattaagaattgaaccatggttgttatgacaaacttgtagctagtttatagctctacaatattgctgcagaaagttaattgagttgccatttgaaattgggagtaaatcagcgctaaacctgctctgtcaggcgctctgatgaagtagtgccatggtacagtgtccgataaggatcagactgccagcgttggatcctcatcgccagtgacctccctacgcaaggattcgtgctgccgccgcccggattcgcg

SEQ ID NO: 27958 - DNA, 647 bp, Zea Mays
aggatttgtttgtttcttgagtggagttttgcaagccatctttgatattaggttcaaaagtgagttgggatcagttggcgatagtaacccacccactcggatggtcggggaactggactctggagccctatgtgatctacaaagggggattgattgcgggattggtgggtggcgttgacgaggaagtttccattccgtcttcaatggatcttcgtcttcctagtgtcaaaggcatgctgacagggaagtcggtgatgcccaagttctgctcgagtcaacgagcttcttttgcagctgtatgcccccgactccacagttgccaatccttagttgttgcaacttctgctgaacttttgagcctcaaaaccttgcagtccgcagtcgtatggccactgttgcttattagtcacttgatctgaaccaaatcacaaggatgtcacaattcttagaattctgatttcatttctgcgaaatttgagcctcagaatttggtttcaacggggtggagagattaattgtggatgtctcgcttattatgcttgcaatttcaatgcttttcacccagatggagcagaagggcgccggtccgggagcacggagctcccacgccatcacgctgctcgggggcacggcctactcgttcggcg

SEQ ID NO: 27959 - DNA, 358 bp, Zea Mays
aagaagattctgatggtacagtaacctgaaccagattgcctgattcagtgaatctcgccgccggtgatctccgcgccacgatccccgctggtgttgtgattcatgccctgtgacacgcggataatgacttgcggtaaaaaaatctcggcgatgggatgagcttgggcactgttcggtcgatgtacccacttgctagcgacgtggccgagcggccatcgccgaggtggatgttgttcctcacgattgcgccatgccgtgaccctttcaccacgtagttataaccgtggcacgcctggaattaccatctttgagcctttgcaccggcaggcgccacgacgaactcgccagtgaaatatcc

SEQ ID NO: 27960 - DNA, 314 bp, Zea Mays
gtgtgccttttggctttctaaagttgcttttctgggtcatgtgattaatcagcatggcattgcagttgaccccaagaatgtcgctgctattgtggagtggaagaggccttctagcgtctctgaaatctgaagtttcttggggcttgctggatattatcagtgtttcatgccaaacttttccagcattactaagccattgactaaactcttggagaagggtgttccttttgtctagaccaatgattatgaggtcagctatcaggcattgaaggacaagttggtgaatgctcctatcttagccttgcctaagagtg

SEQ ID NO: 27961 - DNA, 461 bp, Zea Mays
gggtactccgcataagtcaggtcatcttgaacactaaggtcctccagtggtagctgctcctcaggtaccctgaggcacttctttagctgggacacatgaaacacatcatgtacatctgacagatgattgggtaactccagttgatatgcaacttctcccactcgctttaagatcaagaagggtccaataaagcgaggggacaacttccctttaactttaaatctcctcataccacgaagtggtgacaccttcaaatagacatgatcaccctccttaaactccagtagtcttctcctattatcagcatagctcttttgccttgattgtgcgattctcaaattttcccttatcattcgaacttgttcttctgcctcttgaataagttcaggcccaaagaactgtctttctccagtttgatcccaatacaggggtgtcctgcatttcctaccatacagagcttc

SEQ ID NO: 27962 - DNA, 1412 bp, Zea Mays
tggatttggattagggtttatggttaagggttagggtttagggttttgggttagggttagagttagggattagggttaggtttatagttagggattagggtttaggattagacatagggattagggatagggttagagtgagggattagagtttatggtttagggttaagggtttagggttatgcttagagtcacagattagggttagggtttagggttatgattaagcgttatagttagggtttagggttatgattaagcgatagtgttagggattaggatttagggatatggtcagggttagagtcaaggattagggttagggtttatggtttagggttaaggctcaatgtttaggattatggttagagttagtaattagggttaggctttagggttatcgttaagggttagagttagggattagggttagggttaaagtcaggttttagggttagggtttatagtttagggttagagttatgggtttagggttatggttagagtcaaggattaggttggtgtattcatatatgtgataatgtgatacttagagttttgtacttggtgtattcatatatgtcataatataatacttacagttctatacttggtatattcatatatgtgataatgtaatacttagagtcctatacttggtgtattcatatatgtgataatttaataattagagttctatacttagtctatacttgttgtattcatataatacttgatataatcatacaatatttgttgggatgaagcttcattttactttttagcgcattcgtacaatacttgtgtctacatacatacttggagtatttacgatgtcgatatccattttatttttatctgatccaatatgtatcatatctgatctgatccgaactcaataatatctatatttgatccgaactcgataatatttgtatcaacacaactcaataatatctgtactactctccctctctatacgttcaatatgactctccctctcccactctagattttctatatgaatttccctctctatacgttctatacgagtctccctctctatatgtcatatacgaatctccctctctccctataggattaggattagggtttagggtttatggttaagggttaggtttttgggttttgggttaggattcgagttagggattagggttagggtaagggtttagggttagatttagggattcgggttaggtttatagtcagggattagggtttaggattagacttagggattagggttagggttagagttagggattagagtttattgtttaggattaagggtttagggttcagtgttgagggttatggttagagtcacggattagggttagggtttagggttatgattaagctttagagttagggtttagggttatgat

SEQ ID NO: 27963 - DNA, 327 bp, Zea Mays
gaaaaaagttgcagatcctttcatcgctggattttatgagtccatggaataaagagaaaattactaaggagatcatggagggtttatccgaagattctgaagacagtgatagttatgacgtagagagtggagatgaagattctgaggatcggccctggcggccaagtcatactatcttcagaaagtcgactatcaaatagagtcatattgacgctatgagggtgaggtattttcgcgacatgtctattgtcagagttggaggagatagtactgcccctgcttcggaggaaaacgaagttgttatttaccaaagcttcttgaaggcag

SEQ ID NO: 27964 - DNA, 294 bp, Zea Mays
ggcgttaggagtcagctgatgaagataaatttcaaaatctttcaaaacatccccaatcatttcatgcaaaggaaacctcaatcctgctttaaagaaacttctgtaaactaccacctcatcattttttggcttcggagtaatttcttccccgccaaaacgaatcagcttcttctcggcttccccgaagtagcctagctttatcatcatgggcatatcagcttcggagacagtcgactttccaaagtccaagtggctgggtttggatggcataatggtgttataatctatttcttc

SEQ ID NO: 27965 - DNA, 334 bp, Zea Mays
ctcatgaataaacatgactgaagcaaattgtagcaagaatcattactaccaacaactgaaatacttcggctttatgtaagcagcagcatatcacaactatccatatgcataataattcggttgcaatcctccataatataaagacgcatatggagcaaaatgatgccataaacgataaccgaacgtaccttgggacgacgtatatggcatagctgaagaatatggacgatgcaatgaccaatagctttgttgagctggggcaaacctttcacccaaccgtcttgtacttgctttcttttttgtgtttgcctttgctccacttcttccaaaagca

SEQ ID NO: 27966 - DNA, 410 bp, Zea Mays
accctaatggcgcaaagtctactacgatcccctcaaaggtgcaaagtttgtactagcgaagtctgtattatccggcacggtcgaacaaaaaccacctgaggatgcaaccaggtacgcgtcataagcgtccaacatcgccgtggaaagcgaggtccccatcccatttcacgtgccacaccaccacgattacaaatcgggacaacctcacaacaagcacagcacgcgatgtcatcatagtttacatacacacagcgaagggccgccggccacattgcacaaataatacaaatcgcatcttgttgccctccctctctattgcgagccgggggagggcagcgtttttactcactaccgcaacacgagagcgagtgcaacaaacatgctacatcggctcagtcttcggaataagg

SEQ ID NO: 27967 - DNA, 471 bp, Zea Mays
gaaggaggaagcaggtagagagggagcttggggaagaagatgatagtagatatatattttctttcttgtttccctccagttcggatacgacaaaacatatataatactcttgggctagcgagacacaaatctaatgcacccattctgggcccatcacccggctactgggcctaaccctcctctttggccttgaagcttgtacttcatcagctcccctgtccgcgatgacaaccagaggagcttggactgttggcgttgtctcctgagtgctgacataaagttaacgcttacacaaaagatatggaggtggcgggcctttcctcatacctcgtgtagcctcttccccggagcgagtccattagtcctcttgcattctattgttggcggccaggtgagcgggcctgttttcttggcactcgtgaccctgttggtgcactgcatgatgaaggtgaagaaaatgccagtgttttt

SEQ ID NO: 27968 - DNA, 349 bp, Zea Mays
taatcctcggtacagatcttctcctccgtttcgatggtccttcaattcggttttcaccgggtagcgatggcgatttgggctcgggatcgagctcgggcatggtacagcgatggcgccgccgcgatttgggtgccatctgtcgtcgtcggcggcatccaggttggggcgctgtgcgccgttagatccaagggcagcggtggagattagatcagatcttaccggttcgctggattcatctgggtcgtttatctggccccggacggatgcgatcggacgcgtttattttaaatctgggtcgtgcattagggatccgatggtgtctggtgagagcgagggtttaatatggttt

SEQ ID NO: 27969 - DNA, 310 bp, Zea Mays
agttactgctggtgtctttagaggtaatagccgagctaggctagattacgtcggtgctttagaggtaacagccgagttattctgggtcacgtcggcattttagaagtaacagccgagttatgttaggccacgtcggcgctttaaaggtaactgtcgagttatgctgggccacgtcggcgccttagaggtacctgccgagttatgctaggccacgtcggcgctttagaggtagctgccgagttatgctgggccacgtcggcgctttagaagtagctgccgagttatgctaggacatcttgctttttccgag

SEQ ID NO: 27970 - DNA, 349 bp, Zea Mays
tcgctgaccaaaggtgacctaggaacacccctttatttgacacaacccctactggaaattatccgtccatgatcatggcggaaaccaagctcaggaacacgcgttcccgccaactcatggccgaactaggtaaacgagtgccaccgtgagcttcacaagcatacagagacatgaaaacaatgtttgatttggacggtgtcttaccagaatggattggccacggttgagctgctcttcgtgatggtggagaccagtttgggggaagtttgaaattcaagagctcaagtgaatgattaagggtgggagcgggtgctatggcttcacaaagaactctagttttactgcgcac

SEQ ID NO: 27971 - DNA, 340 bp, Zea Mays
agtgagaaattatacattatcgaatgattgttagttttatggaaacccattcaaaatagaaaacacaagatcatagtatccatggtgcaaacgagttcatgctttcaattaaaatggttgtagcaaccgactatcagcatgtcactccgtaacatctagcaatgcacaggatgcacaggatctaactcagaccataatacttagttaagcagtaacagatctaactctactaccacaatgactcctataccaatgacccagatccagaccagcagagcatgattaaaggcagatcagaggcgacatagttcagatccagctcactaaccttgtctccagt

SEQ ID NO: 27972 - DNA, 661 bp, Zea Mays
tttgttttgttgagttaatttttacaagatcacctattcacccccgctataggtgatctcaattcttgcctcggccgagggcacgacgcggggctcggacggttgacgaattctcgcctcgatcgagggcacggcgtggggctcgggcggcggatagattcttgcctcggccaagggtgcagtgtgggactcgatcgactgatatgcgaggcacagaggcagggacgcgggtgtggcacggtggctaggccatcagatttcatgcggatggtttggattaggctcgggttaaaccgttggattcggggtgaccggcggggatagggtgaccggcttcggtccttctcctccgaccaccagaggcggtgccgctcgcatccgccatgaggagcttaccggagacgagcggtgcgggtgcttcgggggtcttaaggtagctgggatggcctaggaagattcaggggtgcgaggaaccaaatggtgggggctgaaccaaggtaggggcaccggagggtggaggtccatggtgaggtgactctatggcggagctacaaactccgacgagcaattacatggagcagagagcgagggagggaactagaggggcaggggaggttcctttcctcaaggtgaaccttagggacctctcggtggcggcgat

SEQ ID NO: 27973 - DNA, 382 bp, Zea Mays
agccgctccatcacgtgcctcctctgttaatcactatcgtgtggggcaagcaactcagattcgtcccctctagcagaatgtcgagggcgccgctagggaatccgtgcggggggtatgctgattaccgccgcgccgcagaccacgaaaccaaactccaccaagcgtgtaccagtcgtgcggggcctttcctctggctgcttggtggggaccaactcgtcagctttatcctctccacacctcggtcaatggacacccgagctctggcggatgcgcgtagccgttgcgcaatcgtacccaccatccggccgcgcttcaaggtataaaatggaacctgtggtgatcctcccctcggcctaaaccatccctgcccctttcgatttca

SEQ ID NO: 27974 - DNA, 550 bp, Zea Mays
atccacttgccaatcacaacgttccctcccgaaggatgtggcaccaagtcctaggtgtggttggcaaggagggcctcatactcttcatccatagtgacacaagtgaggattggcgaagggcactacgaactaaagatgatacgtgagtgaccgacagagaggtcatcgcggagaggacaaggcggtcgacgtggccaagaaccccaacaacccatcatgttaccatcaagtggacgtggcgggggtcgcggtgaagaagagggggtggtacaccgtcggctcagtctgcgagtgggcgatgcacctgcccgcacacgtcgttggtagacctataaagggtcggcatagcgaggaggggccggtgtgtcctagggcaccaatgacgatgacatggtcggaggcgttgttggtgatgagggcggtaacacaggtcccaccggcgggtcagcggggagcgacaaggccgtaggcggggacaccgagactgtcgatggtccgacgggggacgattgggctacacccgctgtggctggtagtggcacaacaatct

SEQ ID NO: 27975 - DNA, 279 bp, Zea Mays
gagattagggttccaaaccttgggttaaattttgggatgttacaaacctaccccacttaaaggaatctcgcccttgagattcagactaagcttgagaaaaggtaagggtattccctcctcaaggagtcctcactctcccaggtagcttccttttctccttctctgctccactgaactttacaaagtctcacttctgagtttcgggtctttcggaatgccgagtcaagaatttttactggcttttctcggtactgaagatccttctgaatctggattgtc

SEQ ID NO: 27976 - DNA, 5001 bp, Zea Mays
gcaatccccaaccatccaatgccgctgccgcctttgggttctccgatagtgaggacgatgacttcgatcttcctacgtcgcctttgaggacgtcaagccttcgccgcaaaggaaagaaccaacgccccctcaaggcccctcagctcaaacctcacttgcgggctcctccgccacccaactcttccagccataatccgaaacggtccaaatttgcctccgatgtgaagctttccaacagtgaggacgacgatttcgacctcacaaaaacgttaagcctcaacagcagcacaaataggcaacacatccagaagcgtccacagcacaagccccgtttgcagcatcgtcagtcctttggctcatcttgcggcaatcagaagcattccaaggctgttgccaccacacggctatctgacagtgatgatgatgacttcaacatcacggacaatgactttgaccttccagcttcgcattcaaggatatcacgcccacgccgcactactagttgccgccggttgacgagttttgctattgacatctctgaggaagacgaagaagaccttgctgatgatgacttcgactaccaagacccaaggcctccccagcaacgctcctctggccgccgctttgtggtcggggacgatgatgacagtgatgtgcctgtagctctggaggaggaggatggggtgaattggtcggagctggagaaggaggacgtagatgaggactacaatggggtgagaagtgtacatgtggaggagcccgagggagatgtagtgggaatggcattgcacaaatgttcacgcatctcgtcagatctgcgcaaagagctttttggttcatcagcgcagaattgtgaaagctactgtgagatagatgcttccacttgtggtattgttactcaggtaattgtatggtactctggtacatgctatttttttcttctgttgagatggaaatttaagggttttggataacgaatgtgttgaaccattgagatttgtgaatgtcggagcaggaagacgtaaatgctgcatgcacacgtgagaagtctgggtttgagcctgtgttgaagccttatcagcttgtgggagtcaatttccttctcctactgcatcggaaaagcattggtggaggtgaagctttttatgcattgagcagctgaacttgagcactctcaattgctcacaacatttttgtcgatggtgtagcttgtgatcattgtgagagagcatcctgttgtttctgcagctgttgccttttgcaataagcagtcctgcatttgctagttccttttatacactgatcactgatgtagattatgtgagtagcgatcagccgatcacattgatgaaaatcatcttgattgaaaacacttaataataccttttgattattttagcattagcattttttgagagaaactatcaggagaagctcctattgttgtatcatgcatgttatgtcagtttgatgctagggtgcatactacatatgtggatgtgtaactggtgatcaacaatgtctctccttaggtgtcacctatcatggatttccatagagcataggaataatcaccctccccccacatttttgttcattcagtttatgaagatgctgtcgaaccttagttttttttgagcaataaattgttttctattatgtattcactttaaggaaagcggtatgccactcattactgtgtgctgcatgtttgaataccatttgctatgttttatcatttacagtgccaaaaaactagaatattcctaattcatttaaatatatctctcctctttgttttaacagcaattttggctgatgaaatgggtctagggaagacagtgcaggtaagcaaccatggtagtatcctaacatgatttctaaattaggggaatcctgaatgttttgtcatatagctatatgattgttgtattatgccaactgcattctacaatgtatcatgtactccctccattccaaattataagactttttttttgtcttctctagatacattccttcaactatgtatctagacatagtgtatatctaagtgcatcaaaatcaatgaatctagaaaagccaaaatgtcttataaccttataagttataatttggaatggagggagtattatctatgctagttcatatgtgttattcaattgtattgtgctgaaatatatcattggatgatttatttatctaaactttctatcactgcacacagttactgtaaaacattgtctgattaatgtatacaccaggaagaagattagaacactgaacacaccatttgttggatggtgcatatttgtatcaatttatttttcttagtgtttgatttttttttgttttattcttgcaggctgtcacttatcttaatctattacagcatctatataatgacccaggtccacatctgatagtttgcccagcttccgtgttggagaattgggaaagagaactcaggaaatggtgcccttcgttttcgatcatcatgtttcatggagctgcaaggactacctactcaaaggaattaagctccttaggaaaggctggctgtccagctccatttaatgtcctccttgttggctactcactttttgaaaggcggaggtttggagtgactgctttagtgcttttgcatgacacagcagaatgtcatattcagaacattgaaaatttatttataatttaaaacgtttatgtagtgctcagcaaaaggatgatcgtagggccctcaaaagatggcgatggagctgtgttttgatggatgaagcacatgttttgaaagataagggtagcttccgatggagaaacctgatggctgttgcgcaacatgctcgccaaaggctaatgctgacaggaactcctctccaaaatgatttgcatgtaagtctttttgagaaatgtttggtacatggcagtccattaaacataaatcctgttctcttaccaaatgcatgagtagaaaaacatccacctatgtgatgaaattggtgtacggaactttctggaaaaaaatgcagcgtatattggctagggggaattcagaaaaaaatgtgcacacttaaaacgtagtaataaagtgtgcagcagcagccattcaacaatagatttgtaactactagcactgagtagcacctttttagcgatttcaagatcatgtaataaacaaaatagtgcccagaagcaaatactctaataccaattgtatgtttctttgaacttgtggactttatttaaatacaagatattctataacatgaacgtacattcaaccatttctttcatatttattgaacaactgctcagtgtcaatatatgagtttacaactttatatctgtcatgtgtgtgccccaaataacctatcaaccagtggcagatccaggatttagcattagggcattctgagaacatttccccccatccaagacagcaagaaacaactcaggtctaagagtactaactactaaccagagtggaggatgtgaactttcatctcttacagtcaggaatgggcccaagtggctgagacgaagggtggaagtttcaactgacggacttgcttgtctctgtgcctgctttctgcgctgttgggtgctgcccgccagctgccacttgcgcctgcgctagggctgtggaacttgggtgcaattgggggaacaccaggcggccgctcggggagtcggtgatgattgcgataggaataacacgttctctttttcctgtagtcctgaatccttgtatcattgcggggctgtttgatatgtttgtttgtgccttgttggactggttgaacaggatattatagtatacataatacatattcattttttacgaaaaacattggcattccaaggattcaaggaataccccttctgctgtcctgctatcaaccatctacctccaaaaatataaagaggaccactgaagtgctagaataagtgaagggcattatgaatttttctttcttactctttaatctgtgtgcggaaagctatagtggtttatttatcccttcctcagaccccatttatgtgggagcctccggttctggatctgcctttttttatatagcacatgaagtccttatttgcatcttgctgttatgtgctgtgttttatgtttttcttttataacactaacatgttctgcctagcgacatgacacgtgtaatgacagttaaaattctaaaaacaaatatgtaatacattttttatttatttgagatttctacaatcactgtttttataggcactattaatgcttaaaattctatttcatcttaaatcaccatgtacctaaaacttcttttcatggagttcttggttttaatatggtatgcaggagctatggtcattgttggagttcatgatgcctgatatatttgctactggggatgttgatctgaagaagctgctgaatgcagaagatcgcgaactaatttcacagataaagtccattttagggccatttattcttagacgtttgaagtcagatgtaatgcagcagcttgttcctaaaatccaacatgtgcgtgactctttttacacactggcaattagttgtgtctctattttttcagcataaattcatctcgcttgcaggttaagtttgttgtcatgggcacagagcagtctgaagcttacaaaaatgccataaatgagtaccgtgctgcttgccaggctcgtagtgccaagtcttcagatggcatttccaataatgttgctggattgattccaaagcgacaaatatcaaactattttacacagtttcgtaaggtgagcatatcttatgatgcagagtttgagaaatatgtttatggttatcttcaaaggttatctcattgctccacagattgcgaatcaccctttgcttataaggtgtatttatggtgacaaagatgttgatcgaattgcacggttgctgtaccctaaaggtgcatttggcttcgaatgctccttggagagagcaatacaagagctaaagaactacag

SEQ ID NO: 27977 - DNA, 577 bp, Zea Mays
tgacttcataaaagaacaacatgctggttttaagattaaaaaacaacaccacttcaagtgtgctgaggcattgaacagacaattcaatatgggggtcactgctactcaagttgaaagacgttacaggcattataaagagaattggaagtttgttgctgcagccttaagcaagagtggtaacacttttgacacaacaaggtctatggtagtcatatctgaatcagagaaagctaacctaaaggtaataaactcttcgatgcatttttctaatttctagtttctttatggaatgtgcatttccttcatatgcttgaaatcatacatgttagatactatttgtcgtgcattctaggtgcttgctctgtttattatatgtatttgttcctacatgtacctaaaaattcctatttatgctctatgtttctgtatgcaggatagggcaaggaggctcctttctaagcctatcaagtttttcaatgaaatgcaagagttgtttattaacagcagtgctgatggctctctagccatggaagctacaacttgcatgaatgaaactcatcctggagatgacagtgac

SEQ ID NO: 27978 - DNA, 299 bp, Zea Mays
gtgatctcgcgctgagatccgagttcgccggggagattcgtgtgtggcacgaagtggataatcacggaggggtaaaagatctggcgaggggtagatttggtcgcgggcaggagcttatcggctgcacttgatggtcgtgcgacgtggccgagcggccggtgtcgtcgtgggacaacggcgacctcaattgcgccacgtcgtgaccctttcaccatgtagctataaccgtgccatgcccggaattaccatctttgagcccttgcaccggtaggcgccatgacgagctcgctagtgaaata

SEQ ID NO: 27979 - DNA, 483 bp, Zea Mays
attttctgctgtgagccgatcgatctacatcggaccgccaagatcaaatcagccatcgtgtgaaccggtacccttttatgaccgcaggatctgagatcaacggccctggagtttaaagtactaagattgccccccatacacatgatttgaatcagacgacatagatctgaccacgaaagggtacgcgggccttctaatcacaatcgttcatccattgatccacggcggaagggtcttctctccctgacacaccgtcggtgacggagaacacccaccacggcggcgccattgacggtgaatcctgcacgagcgccacgtgattatgcggaaagcggagaggggaaagtggcgggtaacaaggtggtggctataccgcggattatgcactcagacgacccgaccacgacgcacgacggaaagcccagggatccttggcgtcggcgagcaattgaggaacgaacggctggtttccgccctcccaag

SEQ ID NO: 27980 - DNA, 294 bp, Zea Mays
catcaatagacaaccgttatccaaactctctggcaaaacacctggtgaagttcttttcggaactcctccacgatatgaccaccttcgagtttttggatgtacgtgttatgtactattatcacctcgtgaacgtactaaattgactgctcaatctgttgagcgtgtttttcttggatacagccctgaacataaaggctatcgatgttatgattcatcttctcgtcgcatgcgtatttctcgagatgtgagcttcaatgaaaatcgtcctttcttttacaattctttcactcattc

SEQ ID NO: 27981 - DNA, 838 bp, Zea Mays
gacgcttctaacaggagcgctcctcatttctgccggtggaacggcgtgacgtgcagcagccaccagcacggcagccatgtcactgccttgcgcctgcgagccttcggtctggaaggcaacatctcccagtcgcttgggaatcttagccacctccaaaccctggatctgtcgaacaacaacctagaaggcgagataccttccagtatcggtaacttgtttgctctccattttctcaacctaagtgttaaccacctgtccgggaacgttcctcagtccatcggccgtctttccgaactcgaaattctgaatttccgcgacaatgacatcgtaggaagcattccttcttcagtgctcaaccttacaggactcacaatgcttagtgccaccgaaaattacatgacagggaggattccagattggttgggaaacttgacggatctgacagatttgaacttggcatggaataacttcagtggacagatcccacaagctttaggtaagctacctaaccttgctagattgactatgcaaggtaatcaattggaaggtttaatctctcctacactgtttaacatttcatcccttgagaatttaaatctcggctataacaagctttcaggttctctacctccaaatattggatttacacttccaaatattgtagcatttagtgtatgctataacaaatttgagggtccagttccatcctccctgtccaatatttctgtgctccaacagctcatcctccacgggaacagatttcatggccgaattccacctaatattggtgtccacggcagcttaactaatcttgaattaggcaacaatcagcttcaag

SEQ ID NO: 27982 - DNA, 639 bp, Zea Mays
actcttgttgatcctgaaaagaaggagaaagaaaggtcttcccagatcctatgtcaggccatttttcagtactacacgaaagacatttctcacctgctcatattaatccttttcaatttatagggtggagagagagtacaaaatcacaattcgaattgccgggagaacagatttctaccaccttcagcagtttctgcttggaagacagagggatatgcctcaggaaaccatacaagtacttgatgttgtcctcagggagtcgccgtcttggaagtataatacctacactcaagttcttgctctgaattttgtttgagtaatcttttacccagggtactgacaactctttggtaaaaaaattgtcactgcagttatgtcacagtgtccagatcctttttctctacaacttttggtcacagaggtgatatcggtgaggggcttgagtgttggaggggttactaccaaagcctgcgcccaacacaaatgggcctttcgctgaatataggtaataccctgtttatgtcgttgttcctcagcaaaaaaatgtttttgttggtctatgccttttgtttgatatattttggtaattaactttggttataatgttgccttttcagatatttcagcaacatccttttt

SEQ ID NO: 27983 - DNA, 542 bp, Zea Mays
agggccagattacaatgatagtttgcagatgttgggcgggaactggcacgcttcgcacttctggaccaggtctgttgcatccctcttcattgttggccaataaaaaccagacccgaaagcctttcctaccaatgtttttgatgctgcatgtattctgcattgccctacgtggatttcatccagcagctgcctccctgtagccgagtgaatacatttcataaggacccctgtcgcacctcttctatagagaaggccccctatgatggtatagtgagaagactgccttgcaatgcgctccgtgacaaccttgtcatctggttcttccttattttttatgtacctgataattgactctctccagtcgttgggatctacctctgtctcgtctaccgcgttgcattcttcagcatgtcttgttgcgatgcttggccactgcacctcctggacaaaaactccgggcgaaacctgggcccgactagaccctagtttcgataatgcgtctgctgctgcattgcgatccctttccacgtgatggaattcca

SEQ ID NO: 27984 - DNA, 383 bp, Zea Mays
gaagttttaaagactttcgaaatttacattcattaggttacccccgaagctatcatcaaggtgggggtctttatttgggccatgaggagccaggggctagaaccaaatgcaaaatgcttctacaacatgtatgagctgtcatatgagagaaaggccattgggaaagaacaatatcactacaacttcggttgctacagcttcgtgcctcgctctgaggtgagctactcggttcctacatttcgaaagagatggcatggggcctggatgcaagagtggttctatgtgaagaacgacctgattgaaagggaagatattaagggaattatccaacgtcctatctggtctcgcttcggcattaggaggccatccactacccttgggaa

SEQ ID NO: 27985 - DNA, 448 bp, Zea Mays
taggcatctttgagagtcgcctatagcaaccatccttgcggtgtcttccttcatcgcgggttccaaaggagtgttgatcctcctccacaccagccttcttctatgggagtctgcagcagagtcaggcggggatatctgctgcactgccaaacgttgccacaccgaaactctcttgctctagttactcagtcgttgccacacagacttcttcctcgctgcttctgggagggatggacatccggcggcctggtgtccaagcttgtagcacttgaagcatcaattaggccggcggcaggtcacagcaaggtgtgtggaggaaaatcaattataacattttccccagaggtccacagggaccatcgacagggaaggtgatcaccgcgagacttacttttgtgttgcaccacttgccagccgtcttcgtccagtcgctagggcaccggccgac

SEQ ID NO: 27986 - DNA, 429 bp, Zea Mays
aacaggtggaacattaacaatgcattggtcccaatctccttgaatgttgtctactggctgagcttggacattgtcttctggcgggaaattaagatcctagcccaccgccggcacaggttgacccaaaccaaaaaactcaaaagggagctgctgaccatcctccgggaccactggcaccgggtcctcatcttgaggctgacccccagcaaagtttgttggatgatctcacactgcaccgtccacgagtcaccaataaagccatcagcttctgaaaaaacaatgaactgcgggacctcctccagagacgtgacccgcaccctgagcagagtcctgtaaacattgcatctgtcctcttcccacaagatcaatctgccaaaagagccaatagccgcctgcaagtattctgatgaacggtaatccagagggaat

SEQ ID NO: 27987 - DNA, 389 bp, Zea Mays
gccgagttggtagctgggcttagcacatgcaattgtcggaatctattatcagagtacaccatgtattccatgtctttatgttgaggaagtatttgaggaatctagaccatcaaatcgagctagagctaattcccgtgtagcaagaccagactctagagtgtcgtctgctgcgtatcttagaatcctaggagcttgaggagctgatgcgacagaagtacccggacttttcgttacgtgtgagttttgttgattcattaatctttcttgtgtcgttctgatagaagcgtcggaattcgaggtcgaattctttttaaggggggtagagtgtgatacccaattttcaaaaaaagaagagatattgaagattattctttttttctttgttttct

SEQ ID NO: 27988 - DNA, 405 bp, Zea Mays
gcctgacaccgtgggcacacgacccacacgctccacctagaacaaggcagagaagcggtgcctaaaaaggcgcgccactaccttaaagaggtgcctcaacaggcacaccgatgtcatcgaaagaaaggcggtgggagcctcatcttcaactctagtggtcttcatcggtcaccagccaacatccgtcctcgacttgctcaaggacaattcaagccacgactcgaccggggataactctgatgccaaagaagtgctggaaagggcctacttcttggcaacaccacctcgaaatgacaatggcgcggggacaaggaggcccccaatcaagaagagtaccaacgccagcaccaagcgtgcatcctcactcgtgaggcctcccttcgccagcaacaagaagaactctac

SEQ ID NO: 27989 - DNA, 542 bp, Zea Mays
attttgagttcgtgaacggatgaaaaagggaaggagcaataccgaagcgcgtcatgtatagctcagtcaagtgagccatgctgacaaagaaaacgaaagtttagtgcgaccattttgagttcgtgaacggatgaaaaagggaaggagcaataccgaagcacgtcatgtatagctcagtcaagtgagccatgctgacaaagaaaacgaaagtttagtgcgaccattttgagttcgtgaacggatgaaaaagggaaggagcaataccgaagcgcgttatgtataactcagtaaagtgagccatgctgacaaagaaaacgaaagtttagtgtgaccattttgagttcgtgaacggatgaaaaagggaaggagcaataccgaagcgcgtcatgtatagctcagtcaagtgagccatgctgacaaagaaaacgaaagttcagtgcgaccattttgagttcgtgaacggatgaaaaagggaaggagcaataccgaagggcgtcatgtatagctcagtaaagtgagccatgctgacaaagaaaacgaaa

SEQ ID NO: 27990 - DNA, 407 bp, Zea Mays
cggcagcacacctgtgcacacaaccatcgaattgaatccccgtcggacgagaaataggaaaggaagagaagaaatggatgagaaaaattagggacaggcagatgttctcgaggcgagggacattattgacgtacagaaggccgggaatctcatcggaaggatgagccaccatatgcataggcgaagacggtcgagctgacgtagttgaaggtgagtgagggggggatcgcgcgatctgcggcgggggcgagcatcgcatgccgtatcgggcaagcgaggcaatgttttccttcatgggtaggggcggtgtccgtgcttgtggggaggatagaaggggctcgcggatgatggggcaacaattgtctcggggctcaggggcagggcaggagggagggggcggggacccc

SEQ ID NO: 27991 - DNA, 330 bp, Zea Mays
gggaaattggcgagctctggtgatcaattgagggcatggcttggtggcttggtgcttgactaccctacgggcccgtcggggtgctcaatttatagtgtgcttaagcggtggcctccaattttggattggcgcgctggcggtcggagaagaaaggagtcactggcgcacgagattagtggctgcaaccgtggcaacctcaccggcgatctctggataagtcagtacgagtcacggcggtgtggttaaagtgttaaggcacgtggcacaagaccatgaggtgtctaactccggcaagggttgattcaaggtgatcggggtagagcggacacg

SEQ ID NO: 27992 - DNA, 336 bp, Zea Mays
attatgatacgattgacctttgttgtatgtttatagagctttagttggctgatttcttcacaatggcgcagaccagggctcaacataggttttatatctctaaattcaatgtgtttgatccactttaagtttgaggggtgttagatgcctatgcatttgtccttgtattcagtctcatatatagagtcgttgtacacggtccctatcctatatcagtgtatatattcaggcctagtgccctcatattgaacatagtgcaattcataacactcttcaataatggttatttatcacaatcaatcatcaaatatacattcagcaaattatacatttcaa

SEQ ID NO: 27993 - DNA, 473 bp, Zea Mays
tccgggccgagtgacttctgctactatgaagggtccttcccataagggcgataacttgtgccgtccctcccccgttagaattcggcggaggacgagatctcctattgagaaggatcgctgtcgcacagccttgtcgtgatagcgccttagagtctgctggtaccttgctgattggattaccgcattcagccgttcttcctcaagtatatcaatgtcctctagcctggtggcctcgacttctgctatgttttcgaagatcaaccttggtgccccgaacttgagatcagcgggtagcactgcctccgacccatagaccatgaagaaaggagtgtttccgtgcaaagttcggctgggttgggttcttaggctccaaacgacatagggcaattcccttatccattttcctgcgaatttttcattcttgtcgaagacctttttcctgagcgcctccagtatcatcccgttggctcgct

SEQ ID NO: 27994 - DNA, 965 bp, Zea Mays
agccacctcagttgcttacttgggtcatgtgatttcagcagacggggtagccatggacaatagcaaagtggaagcggtctcctcatggccggttccccaatcaacacgtggattacgtggcttcttgggattggcaggctactacagaaaattcatcaaagattttgggtctattgcagcaccattaacagcactactaaagaaagaaggtttcaagtggggtttggctgctgacacggcattccaggaactcaaaaaggctctttctacagccccagtgttgcagctgcccaacttcgatcaaatgttcattgtggactgtgatgcttctggttctagatttggggcggtcctgcatcaaggatctgggcccctggcattctttagtaggccgtttgcagcccgtcatgtcaagctcgcagcttatgaacgtgaactcattggtctcgttcaggcagttcgtcactggcgatcatatctctggggtcgtcgattcacagtgcgcacagatcacttcagtctaaaattcatgctcgaccagagattgtcaacagtgcctcagcatcagtggatcagcaaactatttgggtttgactttatcgtggaatacagagcaggccgattcaacacagtggcagatgccttgtcacgaaggcagactaccgacggcatgattgccacgttgtctagccccaccttccatttgtatgaagagttgcgtcaggagtgcacctctaaccaagactgtcaacgcatttgtactcagatcaaagacggcaccctcactgaaccatggcgaatggttgatgggctcattctgcatggccgacaaatctttgtgccgccaaattcatccctgctgccggccatactcggtacagcccactcggctggtcatggtggaatccagaaaacattacaccgactacgggccgatttttttgttcccaaagatagagccttgg

SEQ ID NO: 27995 - DNA, 335 bp, Zea Mays
ccctgaatggcgatgatcgtggcagagatggggaaggtggtggatgtacaataggaactgcagtttgagcaggcgaagagggttgggcagaggacgacgacggcggtggtagatcaaccaattcgacatccctttgagaccaaaggatgaaattcttgatatcttgtccaaatgtctcaatacctttggtccagggatgtctagcatgttgtcattggatccttgaagaccgccgtcacttctaccctgcaatagtcttctggaatgtcgcttccatggaacttgcgtcatgggatcgcaaggcatgtggctactttcttcatacgattgttatt

SEQ ID NO: 27996 - DNA, 349 bp, Zea Mays
ggatttctagcaaagtactatgttgctaggccttgacgaagacccttgatcattgctttgatgacagtgtcatcaggcacactttgtgcctgagcctaaagtcgaagaaaccttcggacgtaggctcggaggtattcatcttactcttggacacattgaaatagggcttgagcggttatgggattcgtttgaaagccttggaagcttgttaggagaaggtctttagtttttgtcatgaggagatagatcttggttggagagaagaataccatgtttgtgctacattttttactgccatgacgaatgactttgccatagttgtagagttgccaccgtatgaggatatgtg

SEQ ID NO: 27997 - DNA, 334 bp, Zea Mays
tcccattattccattatgcccgctgctgatccatattttcagtctatggtgcatgcttgatttcgtatggtggccaacagctgaaactgaagtctctgcattgtccaacttgtaactaggagcaagaaccttttcttctacctgagaagtatttccaccattggcacttgctacatttgcagtatcattactagtagatggtgtgaagaaccattgccaacatgtgcatccagtggtttggcttcctgaagttgtgtcatcatgtttcttagaacacttaggacaaaggtggctcagaagcacatttatgcccttccacttgactgaatgcatc

SEQ ID NO: 27998 - DNA, 474 bp, Zea Mays
gcaggactcaggcaggatagtaccgagagggtgaaaatatcgcaaagggagtggatttggtcgcggggtgaagcttatcaaccgcgcctatagccgtgcgacgtggccggatcgccggtgccgtcgtggagctctggcgacctcaattatgccatgccgtggctctttactgtgcagtagtaaccgtggcacacctaggcttaccatctcagaactgctgcaccagtgaacgccacgactgagccactagtgaccttctttctctccggctgccagcgcgccattccaaaattgagtgccaccgcccttggacactataaattggtgccccagcctgctccgctaagtaattgtgcacccagtgaaccagccctcacctccaattagtcaagaaccccgacgtgtgtaagctcgccgtggccagctctccataggtctgatcacgccctcctcgctcttgttttagcactcttg

SEQ ID NO: 27999 - DNA, 459 bp, Zea Mays
aaaacattgtttgccgattcggagtcccgtccgagctcacagtcgacaatggcaaacagtttgacagccaggacttcagggacttctgcttctccatcggcaccaagcttgccttcgcctcggtatatcacccacaatctaacggcgtcgtcgagcgcaccaacggcaagattttaactactatcaagaaaaggctactcgacgacaggaagggtaaatgggccgaccaactacctgaagcagtctgggcactaaacacgaccgaatgccgggcgactggattcactccttttcgtctactatatggatcggaggccatgacctcgcaggaaataaagcacgggtcacctcaaacaagtgcatcagccgtccccgacatagatgaaccaacgtccaaagacctcatcgacggagaccgcgtcttcgccctgcaggccctcaacaaataccaagctcaaa

SEQ ID NO: 28000 - DNA, 500 bp, Zea Mays
ccacatctgggcgacgtcgtccaggtagtacgacgccagtgccacgcgctcctccgccatagttctgtgttggtggaaataggcgtcgcatttgtggaggaagagcatgggatcggtcgtaccgtcgaagcgaggaaaatcccactttctatgtttgtggtggaagtcttgatcacgtaggccttccgcacgtcgggcagcaacgttgccgccggaggatgaagacgtgtccttgatggccgccatgtctgacttcaaggtcgtcatctccgcggtgagggacttcagctgtgccatgatctcggcgagggagggttctgccatggtgttgctgttggtgtctgaggcagtggatggtgggctagcgatggcagcagctgcggtggaggagcggctggggcgggtgggggaggatcggcgtgacctctgataccaggttgtcaagggcagtggtacccaaggcagcaggaccccggctacgtagttcgtagtcgcgatcc

SEQ ID NO: 28001 - DNA, 701 bp, Zea Mays
cttgtgtgtggggcccaccagcagtccctcacgtacccagccaagtctgcttcccaatcgtttctagctctgaggaaaaatgaccggccaccaggatgcgacctcgccgccgatcggtttttcggctccctgcgcccgcctcctcatcttccctaaagtggagctcgccaacctccgtccacgacacgtcctctccccttccttccccagtgcgctcacgtcgcagaccgtttcccctcctccgcgacagtttcttctatctccattaatggctacaattgctcctccccataattcctctctcggcgtacgtttcttcttccctgggatataaatcaaagcaccgcgcctgtgacgattcccttctagatttcccctgtctcttctcctcccgtccttgcctataaatggagccacaatgcagttgctcctcctcccccagctgctctcttcctgctttgctctgacgcccatcttcgtgctactcgcccggagcagcgccaccgctcaccactgagccttcctctccagcagctccctcctctatttggcttcctgctcacgacgtcaagactccgttgctatcatcacatgctcctcggcgccatcgctcatcgagccgcgccatgctgcatcgtcgctggtacctcctactacgtcgacttctctgctggtgccctcctcattgccgctataaatcc

SEQ ID NO: 28002 - DNA, 460 bp, Zea Mays
ttctgttcatcattctacttctcctttggagattattcactcggatgtttggggccctacccctagctctgttggttgtttttcttattacatcagttttattgatgactttagcaaattttgttggatttacttaatgcatgctcgtactgatgttcctcgtatcttcatagagtttaagactcatgtagagcttctccttgatagaaagatcaaatgtattcaatctgattggggtggagaatatcaaaaaatacacaacactttcttccgctccatgggtattgcccatcgcgtctcgtgtcctcacacacaccagcaaaatggctcagccgaatggaaacattgacacattgtagaaaccggtcttgctcttttagctcatgcaaatgttcccattaaatgttgggatgccacttttctcaccgccacctatctaataaatcgcatgcctattcgt

SEQ ID NO: 28003 - DNA, 389 bp, Zea Mays
cgaccgtccgatcagatcctacgatcaggatccaaccacccgaaccggtgcgcgagatcaaatccgaagcgttcaagcgaagagcaacggccgagagccagctgagcaaaaggggcaccctattccaatccacgccgttccttcattatccaacggccgaacccacttctaccccaacaccactccacacagcggcggcatcgccgcgagcggcggcgaaattcaccggagaccctgattcaggtgccctgagccccaaactatggtccacacaaccataccggaagcctggtatcatccgaagtcaacactctcccacgcaacaccggatttctgcgcccgcgcacgtcttctccgatccgcaacaggccacggcggcgcgactctgc

SEQ ID NO: 28004 - DNA, 406 bp, Zea Mays
atttgaacgaagcgagtatgggaaagtgggtcgacgggagcgcgctctcagacgtgttctgcggcggcgaggtaaggttctcgatgtcctgtcgcggtaatattcaatcggttgggccgacaagctatgttaacattcaaggacgctagaacatggcacagaggggaaggaacgaacctgggaatggttggtcatggctgggtgcctcacgacggcgtaaatgacgacgatgggggaaaactggaatttgtgagctctggtgggtaattggaagcgaggaagggtgcgctaggcgcataaccagaaggcgtatcagggagagcctttaatttatagtaactacatgagtgcttcgcaaatttgggatgagaagatctcacgaccgaaagggaggtgagtcaccgga

SEQ ID NO: 28005 - DNA, 407 bp, Zea Mays
ggatgatggcaaggaggatctccaggaaggtgcagcagcgaccatcgtcatcaggatctccaggaaagtgcagcagcggttgtccaccatcgggatccttgtggtcggggccctgccatggggatcagaccgcatgcgggtgcacagatcagagggctagcgtgcgaggacgatgcaggatgcaggttctgggagccaagatctgtgggagaggcagcgggctggtgatgggaggatgaggtggctagcgaggtcggtggcgatgggaggttaggtttttgggtgccgatgtgcatgtgagggtgtggaggcgttcggtgggggtcgggttgaccaggcccattagctgagaatgagggcggacgtgggttaggttagcccaagtgggcgtgcgatggtcagggctt

SEQ ID NO: 28006 - DNA, 305 bp, Zea Mays
tggcttggtgttgtcaggttgagccagcactggggctgtggtcaaatgctgcctcaaggtatgaaaggcatcctcacacttttggctccactcaaatttgactcccttttttaacagttcggtcattggcttggcaattctggagaaatccggaataaatcgtcgataataccctgccaatcccagaaaactccgaatctgcttcactgtagtcgggggtttccaatccatcacctcctgcaccttctcaggatcaacagatatcccatcttgagaaattgtgtgacccaagaatttgatttcct

SEQ ID NO: 28007 - DNA, 339 bp, Zea Mays
gggtttgaggcagcaacgggccgacctgaaagtttatcaggtttgccaagagatctctggatcgaagcacggacattatcaaatagttcagtctcaaggctttccatcgcccaggtttcactttccagagttgaggttgttgactcccctgatctcctcgtttcctcaatgattccaggcagcctggaaccttgggccttacgataggtgctgtttacaatggctaattcctcagtgtcgagaacccctgcatagaccaggaaagattaagagttgcgatcaatctgcataattaaggtttaccagagtgtataacgagaggcaataattccagaaaac

SEQ ID NO: 28008 - DNA, 632 bp, Zea Mays
aacaaacgaatcaactgagaccgtacctatcaccatgtctccctgctctctgccatccgcagagggtagcacataagctctagaaacacccgtggaagaggaagctcccggagtgaaattaacagaagaaccccacggagttgaaggatgaggcagtcgcggagccccaaactgggatggtacaggagcggttggtgcaggagtaggcgcggccaagtactgaggaaaacctggcataggcacgaactgagaagccccgggcatatagaactgctgctgagggggtggtacagaaaatgactgctcagtgattgacatcacgctgacagtgccctgcgaagaggaagaagtcactagctcccatttgagcttcccattgggattcctcctacacaccacatccttgtgatcctggttgcatatagagcacctgccactccactgacactcggcacggcgatgcgcttcaccacaacgaaaacacaccaaccccagcccgggcttaggaacagtccgatacctctgagtactccctcctgaagtaccccgaatcaaaggattttccatgataggggtggtgacgctggtgttgcgactttcccctcttgtgggctggacccctagtgttggcc

SEQ ID NO: 28009 - DNA, 380 bp, Zea Mays
cctggtcggtgccctccctacgacccacgcccgtatggccccaccaccccatgtttatatatatggtctggtcggctccctcctccacgacccacgccccgtatggccccactaccccacatcccacgtccagatcatgtgggtgcgctattttagggatctgtttttataacagttttatgcgtgataccttgttttctagtgtaaaaatcatcacgtttgagcataaaatagtatccgacaaagcataaaatcatgtttccgtcacctcgcatgcagggtcctatttttatgtaaggtacagtcaacacccaccagatatacatgcgattttcgatttttatggtaggtgttgtttcaaatccgaaaattatggtagg

SEQ ID NO: 28010 - DNA, 383 bp, Zea Mays
gaaaatttaaactaacgtataattcgaaacaaatgcatgcatggactacatactggagaagaaaaagtgttagtggatgtgcaacgatggcttatgttacgtacatctcacaaataatactgtccaaagaacgaccagagagtgacaaaggaatattatatcttaaaaataacctagaattttcgaaacacgcgaacatgttgtgaacatatgttcaaagagcgatcatatatagtcgtttcgtcgcatgggttaatagctttctctccggaacatcactttcactccgttgcgatggagacgtccctttcttaacccacgcgagattccatggtggctcaaaaaaaaagtgagctagatttttgtgttgccaccttttcaaa

SEQ ID NO: 28011 - DNA, 399 bp, Zea Mays
gtgctatctgctttgttcttctggatgcctcttctcgctgtcgctgaaaattgtggctgctcattgtcactggtttgagagctatgtaggttcaagctccatgataaaattggccactcatgcttcatgctggaattcagcttttccaatgctgaaagggaacgttcaaacatcgaattagtatgattggacagttctctatttaggtgtcataatgaggattgtggattgtgctaaacctgatttgttaatcccgctgttctgtcttctgagagtcaccaggttactttctgaaaacttggtcactgtggttatggccgcagggtttgtgcatgttcaccatatctttgttgcaaactttgctcattccattcaatagagtttggcttggcacctttt

SEQ ID NO: 28012 - DNA, 292 bp, Zea Mays
acggctgatcagcgaagtcttcctgttttggtgcttaggggtgattttggtggtggatgtttggctgatgcgggtgcggaggcggaagtgggggtggtacgacttgtatctcctggtggtgttggtatgcgtggttgggtagatgctgggcggggccgtggttgtatggttgtgggggtgatgttgatatgtgtgcgcgacaactcttgggttgtcggcgggttgtgcccgagacatcctgtccctggtggacttcgtttctgggcaatccctcgttgggtgcgcgcagtct

SEQ ID NO: 28013 - DNA, 467 bp, Zea Mays
ggacactccgcagtccagcaggacatgggtcaggcctgcgtagtcgaactcatgccggccaaaccgtaaccggtcccaagtgcacaccatctctaatcagcagctgactggagacaccgctcgttgccacgagtaccccacgcaaaaaggccatggcgaaaacaccagaggcagaggcagaggccgagtcccccaacaacaaaggttctagtgtcttttccatggcaaagactcggcacatcctaccagggattgccctgaaaccaaggccaccaaggatagaatggccagaaattaaccagctgacaaccaaagagttgtcgcccacacctaccatccccaacaatatcaccaacaccaattacataataccatccccacaagcaaaaccacaacatgtaccagaaacaccaagaaatccaacctctactgccacctccaccacatcaccaaaatccaccaccacc

SEQ ID NO: 28014 - DNA, 334 bp, Zea Mays
caagaagtattgggcaatcctacaattaagtccatgcttatgtcttcccacttccaagatggcatggggagcggttgtaaagcaattgtcgcttttaaatgacttgcttggatcctttgaaaggtgtcacactcggacatatacttagctatctccctcttcatcctcgtccaccagtagggttttaggtcatgatacatcttatttctcctagggtgtatggaaaatttggagagatgagcttcatccaaaattttcattctaagttccaaatccttgggaacaacaagccagtcttcaaaccataatatgtccttactgtcctagcgaaaac

SEQ ID NO: 28015 - DNA, 453 bp, Zea Mays
gcctcctacacactaagatccaatctctctgtggtctcccaatcctaaagatatatcatccgatctatttattgtctagtggttaggacgttaggttacgggttaaggtcgtagattgctaacatagtgctcagtaaatcttgcacggaacatgttgagtgcgcaacggttgaaccatggaattaaattcagaaatgactcccctcattctgacaacgatttgctcacgtagttgcgtgtcctgttcttctgaccagccatgcgtttccacaggttctaccgtaatagatgtcaggtttgatggcctacacatgcctgatccaagattggtattactatataaccatgtcattggacttacctggatccggcacatgcatatgttcttcccgatgaggcacacgtgcctcctgataatgctttcactgcaataagcactgacctgtcccgaac

SEQ ID NO: 28016 - DNA, 529 bp, Zea Mays
gaaggaggcaggttctaggccgagtatgcaacaggggcaccaacatttgataccttgcctctgagtatcatttcgagccggctcaccaagtccacagcaggaattattctgttagtgacccgggtggagtcagctaggcctcgatacagataggccgggtatgccctgtccttcaatggctgaatattcttgaagacaaagtcagcaaccatatcctctgcagtcagacccctctccttcaacaatccaacttcagctagcagaacccctgcctcagccacatcctggtctgtgggggattcggtccagctcggagtgcgaacatccgactgtctccctgaccgtggggggagagaatttccgtgattctcaacgataaaccactccaagcgccatcctttgatgctgtccttgagggggatgtcaagataatcagtcttccttctgcggcgcatctccaagctcgcgccccccaccagctgatgctgtcctccggccatcccagggcgacaatgatacaaatatttcc

SEQ ID NO: 28017 - DNA, 654 bp, Zea Mays
tactgtaggaaattgtcatggaaaccaaaactaaaccaaaatatagacgactgacggtaattccttccaatccaaacctctcggaaacggacattgtggcatgcattgatgcgagtcccctctcgttgccatgtgtgatggccagatcacattgaagatacccaggctgacccagccagccagggccacggatttcttgtcacttctctcaccatggattgcgatggacggaccatcaagaagtccatgtctctctcatggagtggcttggcttgggtagctctaccctcctcccatggatctgccgtgcaatgcagttacccaaaaggaccctttggccccttgcctttatttgttgctgtttggctttggcaggctggacgtacatgcacgcctcatgcttcaccttaaagttagattagactaggacatcaccttcttgctcctcctctggttctagatataaacacaccatcgtcatggttcatagttcttaatctggcacaatttgacgaataacattttcattcaaatggaaacatattgcaaaattatcgttaatgatgaaactagtcacatcacagagcttgacttagggataatgcaaaatgggattatattcagtacggctcgtgttagattggccagtcctcc

SEQ ID NO: 28018 - DNA, 545 bp, Zea Mays
gttcttggtgattcaaggcagtctagttcaattaaatgggtctatgagtattaggagacttaagggaggctagaacatcaagccaagaagcttgaactagcctgcagagggctggccacgacgaggtgttcacgatgtcgcgaaaaacaaatttggaggaaacgtgaaattgagaggctctggtggatgatcagaggtgagagttagtgtgctgggtgcgtaataacctagcggacctggttgatcacttaatttataacatcgattggcgatggcatccaattttgagagagcgcgctggcggccggagagaggggaagtcactagcgcgagcgctatcgtggctttcactgaagtaatgacttagacgatggactgactatttacagcggtctgtggcgatgtggtgaaatggatgacggcgtagcagggacgcgaggaacagcggcatcacggcgatggtcgtacggccacattgcggcgcaacttggcacggtgacagagcactacagtgtcccatcttcatctcttgcccaagatctttc

SEQ ID NO: 28019 - DNA, 276 bp, Zea Mays
ggaataggccgacacgaggaagaagcagacttaggcccaggcggctcgttggatttaagcattatccacagcactgatccgattctcccgcgcagcaccctcggacgtcggaacaaaataagtataagtcagcaagattaaaggaagataagttcaatcagttcactattacttaggtacacatcatcatcatacacgcatataatgccccacggtcaagtatataaggcttagggggtactccatcagattcgtggaccatctacttagccacta

SEQ ID NO: 28020 - DNA, 306 bp, Zea Mays
gtcatcaccaacatgaagctgcatcatgtcctgattgatggtggggctgggctcaacgtcatcagtcacgctgcgttcaagcagctgcagatcccaggatcccaactaggaccctctcgcccattctccagagtgggccctcagccgatgtatccccttgggagcatcacactcctggttactttcgagactgaggagaacttccgcactgagaacgtccagtttgacgttgcggaggttaacctccctttcaatgccatcattggcaggccggctctgtaccggttcatggccattgcccattac

SEQ ID NO: 28021 - DNA, 425 bp, Zea Mays
ccaggcttggtgcctccataaactggctcaggtagctgacactggaagtcagttcaggcctagtgtgcaacaggtacctcagactccaaatcagacttctgtattcagatgaatcaactcgtgaagaatcattgtctttggaaagtttcagcttagcttccattggagttgaacacgggttgcactggctcagtccgaccttttctagcaacttcttcacataggaagtttgacaaaggctgatccctttgtctccttggtgcacttcaatacccagatagtatgatagtgcccctaaatctgtcattttgaacaccttcatttcagtcttgaaagcaattaactcactattggactcccccataatgatgaggtcatccacatacactcccaccaccaatctgcaggagttcttgacccttgtg

SEQ ID NO: 28022 - DNA, 280 bp, Zea Mays
cactaccatacccaaaacctccatgaaccgtctcaaaacctacacttgttgcacatgcatgcccattgaggtctcttatgaaaagcttcacgctaataggtatagttttaaccatgccatctaagtcttcctagaagtctcttagcactctcaccatgccctgcttaggggtatacgcactaattacgttcaagacgaaatcacccactacaagcttggctgagataatcatatcttattgccatctcacatccaccatgagtcatgtaattacaaaaca

SEQ ID NO: 28023 - DNA, 656 bp, Zea Mays
caaccaaggatgaggttacaaactcgcgagccaaagaagatgatacgaccaagagaaataaggtatgagacggaagaggggcaattttaaagggcaggtatgagacaaacatcaatgtaggatatagaggtgtcaagggtgcatatgataataattaaaagcataacaaaaggatatagttaaggcaagactcgcaaaacgacaaagtggggaaaacagtcaagggtaagataggtaaggttccaacagaagggttgaagtaaagattcattaccaagtggagtgacaaggggacaactagatcaccaaggatatgcaaagtagaatgaccgctcatggatcattaagaaacaagggtggtcaagggcatgtcaactgaaatgtatcaaacagatattgggatataaaggtaagtatatataaaaataagagtatgcaagatttcaaggacacgagcataccaagacaagggaatagaacaaagccaaaagataacgacttaacaacggaataggaagggatctcaaaagacagtaagatcatggacatataaactaaaatgtttcaataggcggcagagtttttattagaggttggtattgaaacaagagtattaaagaacccagggatacaagcatgttaataccaagggaatc

SEQ ID NO: 28024 - DNA, 337 bp, Zea Mays
cggtgatgaacccgtattacatgcatcatccctatgctaattctggctggggcaccatagctctgtaattattgacccattgatcaagtggtcatggccgagaaatatgcattcctaaacggtctttatgcattaggactgtattaagtgatcaccctattagattgaaaaagtcggtgacatgcatcgggcttagttcttactttgggaacataatgacttgtgagatttattatttctcgaagggtgctgatagtgcatgtgcttctggttcgtcaacctccaccaaaaggcatgtggcatgggttgagcaccaaaataggcatccgaacggtac

SEQ ID NO: 28025 - DNA, 277 bp, Zea Mays
attttggagggtgtgtacggccggtgggggcccacatgtaggaggcgtgtacgaccgatgggggcagatagatgacagaacaggtcccacggttcagaggcagaacgacgccacactgaggtacgtctttttgtgcggggttgcttgggtgattttggagggtgtgtacgaccggtgggggcccacatgtaggaggcgtgtacgaccggtgggggcaggtagatgacagaacaggtcccacggttcagaggcagaacggccgttggcagaacatgtc

SEQ ID NO: 28026 - DNA, 368 bp, Zea Mays
ggaaatgagaaattgaggggctctagtggatgatccgaggcaagggctggtgcgttggatgcgtaaatacctagcggaactcacgagggtggcaatttatagagttctacggcggtggcgtccaatttgaagaaatcgcgctggcggccgagagagaggggtgagtcatcgtggcgatctaccgtggcggtcactgggtactgagctacggcggtcactgggcagtctctacgactcgcgacgacgtggtaagatgtcctaaggcgtggtacaatcgcggtgaatggtgtacatcctggtgacgaccgctcggccacgtcgccagcgcaagtggatgagcgatagagcgcaacagtgccccccaagtt

SEQ ID NO: 28027 - DNA, 438 bp, Zea Mays
ttaccacgttgtcgttggtcgcaataggtagcctgcctgtcctctgagtcgacgcgccagtgaatgccacggtaacccgcgccagtgaacctcccctctctccggtcgccagcacatcttctcaaaattgggcgccaccactgatgaactctataaattgatgccccagtgagctccgctaggttattacgcatccaaagcaccagctctcgcctctgatcgttcaagagagcctcccaatttcgtatttcccccaaatcggtcggaacaccgccgtgagacatctcgccgtggccagtcgtctacgggttagttcatgcccttctgtgtgatgttctagcctccctcaagtctcctgttgctcgtagacccgtttgattgaactagaccgcattaaatcgtctggaacaccacgatttgtctctgatattcgtcgct

SEQ ID NO: 28028 - DNA, 366 bp, Zea Mays
gtttcgaccaggtctctgtcaagaactcggtgaggtagatgtttcgactaggtctctgccgagaaactcaacgaggcggaggtgttggccaagtctatgctgagcaacttaatgaggcgaaggtctcaaccaagtctctttggagcaactcggcgaggtgaagactccgaccaggttgtgattcgacatgtgcccatgggcccgcctatcagtctccgaataattattcacatatgcttgtgcccgcctagggtgaaaatgaggagagtgtcgttgatccatgttagccacgaaaggccctatcgtcaccaaaatctatccaaatcaatggcacgacacacccaagggggtgccgggaagtctcca

SEQ ID NO: 28029 - DNA, 305 bp, Zea Mays
gcggggaaaaaaagccttttgcacaccatatcatccaaggacgacaaggtagccttttgcacatgcatggtcgtcgcgttcacaccatatctcttcactctttgggggtgttgaaatatgtcacctagcttgcacaagtcagatttgcattgtggttgtggagccgtatattcgctctgtttaaaatgtggtcatccagatcatggcaaagatatatatacatatttctaaatattccttgcgcatttgctcacacaagaaagaacaagtccgtggtgtgcgcactttcttcgcgcggcgggatt

SEQ ID NO: 28030 - DNA, 334 bp, Zea Mays
caatggcataggaaataccctgttccccgggccactggcgatgactaccttacgtcccgtatggctcgtgagtttaaactctttccttataggcgaaacattggtgttgttgtgccaacagtaatggaaaatgaccgtcaggagtccctgcggaagaagtggaaggcctcgcttcggctggtggacccatgacacgaaggtgtcacatcccagcgtgaagggggctggcacggctgctgtgatgccccctccagtggcgccaacgacttccaagagggtgtcttcttcaccacgcgctatcgaggcggcaattttggagactgacgggacctgc

SEQ ID NO: 28031 - DNA, 1022 bp, Zea Mays
gcgaggagtaagcatggagactccacacgcattctcctgccgatgtttgcgccgtcagtcctggggaggggagtcggtattaggtcgtcttgaccgtccctggaatggactattggacgaagctgccactgactcgattcatgttgcacggcttcatgacggtataccatgatcttggtcgtactcctcccgacgccttatctcattttcgtgctgttggtcacgcgaagcgctgatggtgcttcgtgtgtctcgtcggctgttgatggcgtgacgcagatcgttcgctagatgagcgaggggtagaagatgattggccgcctgtgtaagcatccgccggtagccttccgtgtctggggttcacggaaggccgtcggctatctgcgccagcactcctccaacttcactctgcgtgttcaacgctcgggcgaagttggggtacaggtttcgagcgagaagagggttctctcgccggagtctagcatcttgttttgttagttctcactctcgctcttgagcctcttggcaatcacagcggcgggagttgcgtctttctcggtgtactcgttcatcaggtgtttctcccacttccgaagctttgtcctgggatacaggttgtgctgggtcccgttccctagcttcatgatgccgccacacattccggcgtctgtttctccgtcgccaggcatcacactgggggctcctccccttgcaggttcatcgtcggagacgggcaatgactccaatctcccctgaatgaagaggatgtcggggtagaaaggagcaggtatggtggtgtgcttcttgccatcctcctttgaaggcggaggtgccgagaagattgctcattgcgtcctccttcctcggcatgggacattcacttcctttttctgagtgatccgcgtccactccttagtgggtgaggtggacaacggagttcttcgggtcggagataccccaactgactggccctccatcctccgagggctcttgagccctagcttgcgaggggccatcttccc

SEQ ID NO: 28032 - DNA, 707 bp, Zea Mays
tatgtaaggatcaaatctcatccactggtggttgatctgacgactcaagcatcatcactcccacggccgaaccagtatgccaggagcgatcccagccgtctgctatggatccagcggccgcgacatcatcttccccattcaggcacgtggctacgacagcgccgccccaaaaccacaaccgagccagtgccaggataccccgccctgttctagcctctagcacctaaatcgaccggctcaacataaatcggaggtaaaagcgaaccatcagagagagtccttatattggtcaatggcgcagacatttctgcccgcgatgaggggcagcaccgttgtgaaccagcaactccggtgagaaatcgaagagctttggcgcacaatcccaactaggatggcaaggatcaccatcccccggatgacctgaagcacacggactagcgcacaagccccaaatgtcaccatgggcgagtgtccacgatagcgtgcggatccaggacgagcaccacaccggtgaggaatcgccaagcgtcggagaccccatctcaccctctgattccatggacggctcaaccctgcactggaaaacccccacggtgccactgccgagcccccaacgcagccgttttacgaatggtcgacggtgcggaccagagttcacacgccaccgcgagattctctctctctctcccgattggtgaatatgaggc

SEQ ID NO: 28033 - DNA, 653 bp, Zea Mays
ggtaagtaagtgtcccatctgtactcaatactggcaggccctatgtcagaggcttttgtcaggcatcgtctggtggcttacgataggggcgtctggccacatgttggcaccggacccctgcttggataagggacaggcaccggaatgagcgatgacatggcattcccaagccttctctgtctgtgagctcggaccgtactcgagggggtccaggctccgaccgcccatgtttggatacgtggcaacaccggacctcacctggcctgaggtctggatggtgttttccatacccggagccattctggaggcttagtgttgtagctagagagtgccttttcctccggggctttgtgtcccctccggtcccctttgtccaggaatctaacgagcccacaaggaggtctgggtcctatttgcaggatcccagacctatagctgaagttcttgattccttccctttatggggtttggtggagacggcgatccagcccaggagacaagcctgggctggccacgactccatatggtgggccttagccccgtgttggttgcccgtggaatcctcaatggtgaccaccgagatctcaccttaacatagcaggggtgggtaccccgtattcagggtaccaacacataccattttggaaaaagaa

SEQ ID NO: 28034 - DNA, 280 bp, Zea Mays
cagaacatggccgcagtagccatgatgctccgatctatcccagagccatatgagccagaggcaaaagtaatgtaccgaaacctccacaatttagtagagagggccatcgtgcagcaagccgagatcgatcggtagccccctcttgtggttgaaagctttggcccacgaatggccttacaggtcggtgccacgtgccttcagacgcgcgatacacaacgctcaataccctgcaaaggtgagagcaccgaccaacatttccaaatacgacgggtcttcaaac

SEQ ID NO: 28035 - DNA, 428 bp, Zea Mays
aaatgaaattatggatatggccgtggatatgtcgcttgacttttgtgttgacaaagttctcgcggaggaagatggcgaatacttggaaggagcagctgatggcatttctattgacatggtggctgaatctcccactgtttgtcccatgaaggttgtgattgctggctcactagatggtgtgctggtggacaatttgcctgctgcgtttttctgtggttggaggggtatctgatgatggtgtgtgcagtggtggatctccttctgaggccttgttgatggctgatactggggccacaatggtggctgctgatctggtgcaggaatcgcatcctagtcggccgctggaaagccttgcggtttatgcgcgccgtggggctgtctctgcgccgccttgctccaggagggggctgcagcagcctggacttggc

SEQ ID NO: 28036 - DNA, 734 bp, Zea Mays
ccaaaatacggaccacccccattttccgagtgtatcgcatatccactttctgtgttgcacccaaaatagatcctactgcccacaaaggaagaaaggagcggatctcaaaaggaaccccataaacattcacccaagctttctgcagataagaaattggttctattttttggttaacctcctgaataactaaaataccttctccacccagtgtatgaacatacttcatagctatcatgcgttgaagctcaaccctgcatggaaacggtactagaaaactgtctgcatgcttctgaactgaccaattccacttcactggtataagtttagagagttcagacttaacaagttcagcagtaacattaccttccttcacggttatgaatgcagttacaccatccgaccttggaataacaccctttgcacccccaagtatgaatctggaagaaaccagactcaccacctgcaaaaccacatagagctgcctgcggcttcggtccgttaaacaccgggcactcctcggggacatgattgtcttcgcaaatttcacaacaaagttcatcccgtcgtttcttccccttgtcagcaacgccggatgtaacgtctgcaacctgtttacaagccggctcggtctgcataccactactgtgagctacaatcaccctggcatcagagccgaacgacccaccatacgtgtgaaaccggttgccgcggcgacgccatgaaccacgccctcg

SEQ ID NO: 28037 - DNA, 478 bp, Zea Mays
cgcacgcacgcacgcacgcgtgggggccataatgtcaacttatcaggaacggttttcgcgggggtcgacagcagaatcaaaccagcacggaggaagaagaagagaagaagcttcttctccttctcccccaccgacgagcactgccggggccgaccagcccgtgacaaccagccccctcgtgcaacaaaggaacccgctgagatcttcagagccatcgattgaatattcaggctgtcttctctgtactgtaccactagacaaactgatgaagagacacagtgaacatgagctgtccatctttttcaggacaacgattccggcaccatgaacctaccgatcaatgatcgtgacatgactaacctgccgaccggacgattctgacattgttaacctgctcaccacatacgacataaatcgatttggtgttaaagtgaattaattgctcttgttgagatctccgtttgggagcagatcttcc

SEQ ID NO: 28038 - DNA, 285 bp, Zea Mays
caaatgttgagattagttgtgagttgtgactatatttaggtaccactaagtgaaccagatgtgctaactcatccctcagtaatgagcattgctactcaagtgctcgccaattttagtggtttgaatttattaacaactatattgggatttctcccttatcaattctttcctagacatgctaccaggacaagtccagaaagctatactggattccttgtctaactttgctattgggctgtgagagcaaatatttccttgccactgaggatagctaatttagtttcc

SEQ ID NO: 28039 - DNA, 301 bp, Zea Mays
ctctttgtgccatccttttccataaacagcgttggggctgcccaaggcgaggtacttggtctgatgtagcctttctccgacaactcatcaatctgcttcttgagttccaccaactctggccaggacactcgataggctctcttggatacaggggtggtgcctggtaaaagctctatggcgaattcaaccttcctttcaggtggcatacccggtaactcctcaggaaacacatctgggaactctgatactacattgatagcctttgatggtttaatctcctcgatatgggcagtgacttagt

SEQ ID NO: 28040 - DNA, 360 bp, Zea Mays
ctggcgtcaacgtgtgtgtggccatcaaggctacaacaacgaataagcctccgtaacaagcgcaacaggcgcaattgtggcttgatagtcggggtacaggataagtccacacaactcggtgatggcggtccgactcaacgggagtggtccgactaagtgagagtacaacatagcaatcacatgacgcagccaagttcggacgacacaaataacgtgtcgtgttgccagggcgcaaccaatgctcgccaatgccataactcaaccgatttaacaacaaagtctggtcgacatgtttgagtacccactatatagtttaatcgctcgatatgagtccaaaagctcaacataatataaatattt

SEQ ID NO: 28041 - DNA, 532 bp, Zea Mays
ggcaggctgcccagactctcgacgatctacctctggcttctgtgtctatctcggcgacaatctagtttcatggtcctccaagcgccagaccacggtgtcccgctctagcgccgaggctgagtatcgggctgtggctcacattgtggctgagtgctgctggcttcgacagttactccaggagctacacatccagctgccttctgccacaattgtcttctgcgacaatgtcagcgccgtctacatgacggccaaccccgtccaccacaagcgaacgaagcacatcgagatcgacattcacttcgtccgcgaaaaggtggcccttggtgaaattcgggttctccatgtgccctcctctcaccagttcgccgacatcatgactaaagggcttccgacagcactctttcgagaatttcgatccagcctttgcgtccgggagcctcccgctgcgactgcgggcgggtgttaggcaatagaatatgccatctgtggatatcctagctgctatagatagcagatgtaaatcagggatgga

SEQ ID NO: 28042 - DNA, 1064 bp, Zea Mays
ctcgggtgtcctagacctgtgaagtcggtctgggagcggctttcaccggcggtacagggaagggtccaacgaccggcagggcgtcgtccggtttggcagcgtattgctccaccagaagccattccggtcgtcccttctgtcccggtgggcaacatgctgggcgtctcggctgcacagggtaatggcggccctgccagctccaggcgcaaacggtggaggaagaagaagcgcaaggagcgtgaagataagccggctttggagatttcggctccacctcctcccgagcagacgcttccggcgagtgatgagactgcttgtgttattgattggtcggttcagatgtctattgcggaagataatctcaagacggctgtggtgatcacagtggttagctctagagacgtcagcgctgacgagatcgcgttggttttggccccacggctggaaatggaggtgggaggattggttctccgtcagttctcccagtccagcttcttggctgtcttacccaaccatgtgcagctcgacacgctggtggatcgcttccatatcatcagagaagaaaacttcatgctctcctctaggcgttggacgaggttcgggggtgctgttggtaattccttgaagcatctcgtggaacttgagatcagaggtctgccgttgcacgcgtgggagacttcggtggtgcaacatttgatcaacccccatgcttgcatttcccaggttctgcccgacacgctggaaatcaggaatctggaagtctttcgatgccttgcttggtgttgtgatcctgaacatatcccatctaagaaggacctctggatcactgaaccagaccaggcttctgctgctgaagggaagaaggctctggtgtatccggtgcaaattcgttggggccctgttgatttgaatctcatacctggcgctccacagccgccagttggtgctggtgatcaggacaaacctgatacccccccttcacttagaagatgtggtgacaaccctccacccactcaacatgctgcagcctttgaagaccccgacataatgacccacaatcagcg

SEQ ID NO: 28043 - DNA, 282 bp, Zea Mays
gcatggtatgccttctactattgtttcagatcgtgatgcaaaggttttgagtcacttttggcatacactatggaacaaattgggacaaaattgttgttttctactacttgccacccccaaacggatggacaaatagaggttgtgaatcgcacattgtctacaatgttgcgagcgatattgaagcacaatttgaagatgtgggaagagtgtctgccacatgtggagttctcgtataatagggcggaacactcaaccaccaaggtaagtccttttcaggtagtg

SEQ ID NO: 28044 - DNA, 438 bp, Zea Mays
gcaccatgtgccccaagggatcgttcagctcaaggaagatgaattccgggaactgactcaagacggaagatctgtcagtgagtacgtgcacaaattcacagagttagcccgctacgcgccagatgacgtcagcaccgaagtcaagaagatggcccgcttcctgaaggggctcataccagaactcaagaccatcctagccagccaagacttccttagtttctcacacctctccaacaaagccatgcaagtggaaagggcaaaggaagaagaaaaaggccacctcaagaggaaattccaagtcctccgagctcagcagcaagaccggcaccagaaaactcgatcctttggatttccacccaagggaccaagcttcagtagaccagctggacccaccccatcacggttcagtcagtagagtcagagctcctttcatgcccc

SEQ ID NO: 28045 - DNA, 919 bp, Zea Mays
atttcttaaaagatcaggggcctaaatcaaacttttcctaagactcagattcaccctgcgtggatggcgggttgattgcttaaaattccaggggctctttagcaagtgatacaccgcgaaggggtattttctattctaggccgctcgattagaaatcaacgtcgcggatcactctaacattttaaatgaaccggaacgcaccgtggctcgttggattaaaaacctacgatccagattaaaaacaaccgcgctccatcctcgttcgcacgatcccaaatctatgctcctgatttcattgcgcgaagaggtattcacattctaatctaagccgtccaggaagggatcgacgaccccctacccttcttcaaccccgtcgtcctaccgctctccctctcactcgccaatgcctggacggccagacaaccattggcagcgacagtgcttcaccggcggataccacaccagtgccccgacgacgaaagctaaatgcgaacaagtgtgatgcgtaatgggaaataaagcaagtcagggcggtaagagctcacccacatctgggcagcaacgacgccatccatggtgctcggccgctttggtggttctccgtttttctcccggcaaggcgcgactcttcttccaacatggcgcacacccggattgcccagtactgctgggttccatccacggctacggtcgctcccggctactatggtggcgctgccaaccaacggttcacgctggcgtctatctcctcggtggtggcgtgcactagctcctatgcgtggttatggccgaagggaaacagtcggctgaattatatactcgttggagaggggtgtccgaggtgcttggtcaagcaaacctcatgctgatccggtattcacggagcggtcagcgacaaacgcgtcgaggaagacggctc

SEQ ID NO: 28046 - DNA, 274 bp, Zea Mays
gtgatctcagccccgccagcagacatcaggctcctcgcatctagctcgccgacctctaaggcgacttgtccgtttaaaactgtggaagcaggtacaaccgtcgccccatcggactgaggtggggatgacccaacgtggacatccatggaggcgtgggaaagagagtccacctgaacaccctcgggggctgggtcatagcttgcactactcaccagagctggatcactaccggcaacaccctcgggggctcggtaactgctggcaccaccctcgg

SEQ ID NO: 28047 - DNA, 414 bp, Zea Mays
gttgacttgagtcagagggaggttataaaaggggttattcagtgccccatatggtctcgcttcgctattaggaggccactcattgcacttggaaatgatgtgcaagcgtgccagatagctttcaatatagtgtgcacttatatcgacacaatagacttggtccaagaccatattgcttacagagtgtggccacttgcaaacggatgggaaaggtcgaaggaggctgccgctggctccagtcaaaatggtttagtctatctgaagtatacctttcgatacaggagccagtttgatgaaccgaatgatgactggctagatgctatagaggcaactggcgatgagcttcttaaagcatactcgacggccgaagatgaagctatgacaactgccttcggtgcttggggcaagaagaga

SEQ ID NO: 28048 - DNA, 289 bp, Zea Mays
gtacggcttctgcgaaagaaactgcttcagctgctcctagcgagccagcgccgaagagaaaaagagtgaaagttctcacacaccggccacgttacattgaactagccatagtgcctgaattcgacagtgaaacgtcttcggcccccgaagttaaggaatcaaccccgctgccaggagccaaagagctgtcctaagtgccaacaacaaaagaattggaggaaccaaagactctgttaccagaaaccaaagagctggccgaaacgccatcgacaaaaaagatggaagaagc

SEQ ID NO: 28049 - DNA, 436 bp, Zea Mays
actagagtcctagcctggccgatacctaattccaccctcggcgacactaatacctcaattaattgcacgaatccggcccggagttcgtctacccacgacgacgacaagatccaaggagaaactatggtgttctaggcaattcagcgcggtctagttcaatcaaccaatcctacaagcaataggagacctaagggatgctagaacatccaacatagaagcatggaccaacctgaggagggctggccacggtgagagacccttagcggcgcggaaaacagatttgggggaaatgtgaaattgggaggctctagtggacgatcagaggctagagctggtgcactgggtgcgtaataacctagtggagctcactatggcagcaatttatagaatccatcggcggtggtgtccaatttgaaaaaggcacgctggcggccgg

SEQ ID NO: 28050 - DNA, 609 bp, Zea Mays
gaggacattgaggctttgattgctccacttcggagtcttctagaggatgaaaagcagactcattttgagatgtcggctagcactgatgacgcggagatagatgttgtgcttagcttgctggctggggaatcatccgactcaacccacactgagccaatggctatcatagctgggcaagaacttggtgaagaagtggagagtcagaaacccgaaggcgcccgcccaaagcgtccacgccgagtgagtcgtccgactgcacctgtcgaggaaaaaaggaagaagaggcaacttcggcgactgtcatgcttggaccagggtgtaggcccttctgctccggttcctgatgatgtaccggcagaggcccttcctaaggttgatgccaagggttgtgatcgtgcacgagctgctgtttgcctatttgacgaggatgaagaggaagaagaagaagaaatcccgctgatccgcaagaacaaccggcactatagaggtagcgagggggtagtgatattccttctccagctctatcggctcttgtcagtcttcaggggctttcaatatcagactttgatcaagtactggaggaagtcgtccccgaagacatgctatcag

SEQ ID NO: 28051 - DNA, 472 bp, Zea Mays
gctcgccgatgtacagggaagaagccaccatcgtcgtcgctccctgcctgtgccactcggccggtctcagtgtctctgatccccccttcttcctctgttggttgggcgtggcggcgatgtcacggtcgtggttgctaggagcgccgcctccctgcttgaccatcgggaggtggaagaagcatggagcccattgatctggagatcaacggtggctacgggatgatgacgtggatgagccacggaccgttgatctcgtgttgactggtctagattaaatattgggaccgcttcgagggaaccaaatcaggtgcgttgatctctgatcgaacggtttggagtggatctcggtgttttaaatctgggcggtcgatcccagatctagcggatagcatggtgtaccgcttcgggttaatggctgatttaatctgcgccgtcggacgatgatccaatggctgtcgtgtgcggatacccc

SEQ ID NO: 28052 - DNA, 377 bp, Zea Mays
cttctgggggcttcataacaatttggaaaggctctctttttgatggggagattattgatcaaaattctttcggtcacacaatccgattccatacaaagcttaccaatcaaacctggtggctcaccaatatttatgccccttgtactcctcataggatagaagaatttctctcttggttttccagcattgagattgatgataacaaattatggattttcctcggtgactttaatatgatcagatcccctgataactgcaacaaaccgggtggggatcacctcagaatgatgagttttaatctggcaatcagtcaactggggctgcaggaaattccactcaaaggacaagcctacacttggtcaaatatgcaacatcac

SEQ ID NO: 28053 - DNA, 766 bp, Zea Mays
ggaggatggaagtgaggcaagtcaacatcgtaccagggcgacctcagccttggcactatgaggagaggctcgatagctttcgggacatggtctcgattgctcgggcgtcgatgacacagaatttcatcccctttgggcaggtaattgtcgcttatcggttactccttgtttcttgccattttatcgtcacctaagatgatcaccgggttaccatttcgtaatgtctctttgcgcgatcaagggccagggcggaggagtttctatccgttcagtgggaggtggagcagctccatgtggtggccacccatttggtggcgaagcagcgcaagctagtcgagcttcgctctagggccgagcgtcttgagagcgaggaggcccaacttcgctctaagggcgagggtgctcggacagaagccgatcacctctggggagatgagacacaacttctggcggtccttcgtgaggtgagtcttcaggtcggtgaggtcgagtcttcccttggtgaggccaacacccacctggagaggacaaatgcggagcttttgtgagagcacggcgccactgagggtaggtcccctttcgcacttctgtaccctatgtctttgattgttttttcctttcttcctcctcatagctccggaagatgctctctcaggcagatgacgcaaagaggacagctaaggagatgaaggcagtggctgaggcccgggtgcgagaggtttcgcttgctcacaatggtgccattgttgcatcggccgaggcggcc

SEQ ID NO: 28054 - DNA, 567 bp, Zea Mays
gcgagaaagagaaactcttgactcaccaagcttgataaacacgagggtaagtcattttgtttgccttatgcaacaacagcagtatgctgataggcaacttactcaacatgaagctacaggcacagcgctgctgcacgagactggcatttctagaataagacgcgggtatggccccacctgcgggttcgccgcctcacccaaagtgggtctgggggcctctatcgataccctaaatatggggtacccactccagctatgtcaaagtaagaccccaatggctaccattgagggttttacggatggctagctaaggcccaccatatggagtcatggacggggtaagctcatctcctgggctagatcaccatctccataaaagccctataaagggaggaattgacaacttcaactatagatctaggatcctacaaatggaactcggacctcctcgtgggcccatcgaatccctggagaaaggggtctggagggacctcatgacccttgagaagaagacattctctggctacagcaccaagccttcagagtagctccgagcctagaaaatac

SEQ ID NO: 28055 - DNA, 399 bp, Zea Mays
gcctgtagccgtcgatctgtgattgggcgcgcatgattagatctgggggggaactgaatcctaaccgttggatccagctggaacggccgagattagatcccaggtactggttcggccagaagtaatccaagccgttgatcgatggatggaggggccaagggtgatcctggcgttttagaatccagggcattgatctcagatccaagggctcatattacataccgtttcatttaaagcacgatctaatccgggccgcccgatttctatcctgcggctcagctctaaccgtaccccttcgcgagcgtgtttttcaaaagagtccctggactatataagaatcaacccgccatcctacgcgactatgctctgtgtcttaggagttttaccccgagccccctg

SEQ ID NO: 28056 - DNA, 591 bp, Zea Mays
ctgggggccagttctagagaacatgtacttgtctactagggtggtccggagctgtgtagccgtttagcttggttccgtaccctaagcctgcacactccaccactctgtgacaggtaccctagtatttgggactatagtcctatgggttcgataatcggggcccggttctagagaacggacacacatcccctggggtggtccgaagctgtgtggttgctcagcctggtcccgtaccctaagcctacacgctccaccactctgcgacgcgtgccctagtatttggagctgcggtccagggggtccggacacacagattggcttcccggtctaaatcctgcaggtcctgttgcgtgaatcaaaggataaaagataccagttagtgggtcctatgggtgcgctactaaagcttcctagccaaggctatgtgcaggtcctggtcccagtcgagactacctcctagggaccaggtcatgaatttttcttaagcatactggcatccagcctcgacatgtcgagccttcgtaccaggggggccaagtaccagggagaagttggtaacaaacgcacacaacaaaggcaaatagcatacag

SEQ ID NO: 28057 - DNA, 377 bp, Zea Mays
aaagtacactatgactatgcaggcatcacttgcacataagggaattgtctatggtgaacaagtatgtactaacttaaccactttactgtatttctctgtttgaacatttcgctgtattcctctgtttgaaccactaagtttggctttccattgcagaagaaaaatgagttgtcctcaaaaaagtacgcacttattgtggaatttgaaactgagttggatgaaatcttttgtttctgtgatgagttcaagacaccagcggtaatggcatgtagaaccatgtctcctacaaatcgcagcagcagcaacacaggatctattcagcccttcacccgccagactcggcggaggagctcagaagttggtacgtctgagtcatc

SEQ ID NO: 28058 - DNA, 451 bp, Zea Mays
gaacaaagctgcgcaaatacgtctcaagacattgattgacgcgctctgtctgtccgtccgtctgaggatggtacgccgaactcatctgcaactaggtgcctgatagctgaaataattctttccataagttgctagtgaaaattctgtcgcgatccgacacaatcgattctggcataccatgaagtcgatacacagctgccatgaatacctgggcgacctttagtgcagtaaacggatgacgcaacggcacaaaatgagcatacttggtcaagcgatcaactaccaccaagatagtattgtaagatctagactgtggcagcccctcaataaaatccagcgaaattgcttgccatgcttgggaaggaaccggcaatggctgaagtaatccaggatatcgagacctgtcaggtttagcctgatgacacacttgacaagctacgacaaattcgcg

SEQ ID NO: 28059 - DNA, 382 bp, Zea Mays
gtccaatgtgacaagagacaacttcaaaaaattaagataggaacttagacgtggttacactttgacaagggtgagtctaaaatcaattcaagttattttggtagtaaatggtagatttatcttgacgggtcatatcaataaatccatgcattgcacggatcacactcatccttctagcatcatgtccgactttctcttactactggcatgggttggtatatggtggtgatttggtccaactttctcttcctactagggtcatactgcctactgtatatggtggatattggctgtatgtagagttgggtgtatttagaagcttcaaacactaagctgaaaattactccataccctatgccctatgtcaattattcaccctccc

SEQ ID NO: 28060 - DNA, 805 bp, Zea Mays
cgacagggacacaattgaacccctactgaacacttcccctcacttaatttcgcaaatgggtgcctggttggctctggccacggtgatcgtgggcgttgcggacagacaatcgtgttcccgacgaccagtgggtttctagttcaattgggcgggtcggtgagtatcaaggacaagcatgggtgctgaaactagaacacaattggcaaaatcggacctgatttgagcggaccacggcgaggttagaacacgcggtgttcttgagcagattgggggaaatgcaaaattgaagctctctggtggagtatttgaggtacgggtgagtgcgctagatgtgtgattacataacgaagttgatggtgcactcaatttatagaccccgaggtcggtagctctcaatttgaccgcgatgtgttggcggtcggagatagggaagaacacggtggttgtaaccgtggcagtcaccggtgtaacggcgcaaggagaatactcctaagggttccatgcttactaccgcgtagtaacaagcttcggcgtggcgcaaccgaggtcaccggcgcttccacggcgacttcggtagtccggccacgtcgcagcgactataatcacggcgataaattccaatttccgatcctatccattccccgccgtgagatcttttctttgccgtagttatccacccgccagtgaacacaaatcacggcggcggcgtgaatcacggtgtagagatcgtcggcggcgaggttgctgcgctggcggtctgatccactcaaagcactgtaccatggcgaatggcattcaattggcc

SEQ ID NO: 28061 - DNA, 278 bp, Zea Mays
gcggtgaagaagaatccccccggagtcagagggggcagcctgaggcacgctgtagagcatcgtggcaggagcggtggtcgcagtggtagagaggcgaagctcctcgagaagtagattgttcttgctcatgcgggtaaggatgggcgtgacgtgatcgaagcgagggttcaagcagtgtaggaggttgagcacgaggttctcatcggtgatgggggctctgagggtgtggagagtgttcaccatcgtcttcatctgatgacagtactcatccacagaga

SEQ ID NO: 28062 - DNA, 782 bp, Zea Mays
caagaacacgagagggtggtggaacaataacacagagggcgagatcggacctgagttgagctagccgcggcgaggtgttcttcgcggtggcggaaatcgatttggggagaattcaaaattcgtgagctctcgcgaacgattgagggtgggattgggggctttggtttcgtgatgatatagcgcagctgccccggccttcaatttatagagggcttaggcgatggcacgcaattcgaccgagcaatgctggcggccggagatagggaagaacactggtgcagcggattcgtgtctaccgtcgtggcaacttcaccggcgacgattagacagctattagagagttacggcgacgcgacggaggtactagagcatgtggcacaagaccagtagacggccatcaccggtgaacttatccaaacccgccacggagagcttggtacagcggccgaagttgtttactagccggggcttatccacggcggcgatatttacgtgaccccgagcattatccaggcactggtgagcacgaatcacctcaccggcaggaatcgtggcgtgagggtcatcggcggtgagggtcactgaacctgattcgatcggctactgtaccatgggatgcttcttcagtatgcctgacagtcatagtttagggccaattctctctccatttcttatggcatctcacccgaagatctgcagcaaagctgtagagctacaaaccagctacatttccactataggaactgaactgagttgagcactagatcatgcttgaattcctg

SEQ ID NO: 28063 - DNA, 311 bp, Zea Mays
agaaagatctgaaatatctttagcacttcaaccacaaatttgctcaatgggaaccaaagacctgccttcataaagctctggtaaacaaaaaaattcattttcttcaggtgcaggggcggtgctgtctcctccaaccctcacaatagacatgccacgaaagtatcttcccttcatggcgtcaatctgactttgtttaatggttgactttccgaagatggtatggcttggccgccagagccaatctttggaatcttcatctccactttccacatcaaagtcatcactgtcattagagtcttcagataaatccg

SEQ ID NO: 28064 - DNA, 408 bp, Zea Mays
cgagtatatatttggtaaggatattgaaatcctgtgttttgaggtggtgttttacctactaagtcttctactccatttatacctcccgagggctcaatgcaatatatccacacattatacacaatcatgtttgctttcactaaccacgagtttaggttttgatcctgagtcaacgcttccactactgccaatacgccaataatcgatctgccaccttattgtcgagcagcaacaaatcatcaggatggctcgccaagtcgccgtcatccatgggttaccacgctactattgtcattgttgattctctacgctgtcctgctaagtggccatcgtcgggaattgccacaccctctctagccgtgcctgatctgcctcagccctcctcggcacgcgactgctgctgccttt

SEQ ID NO: 28065 - DNA, 372 bp, Zea Mays
cacactgtagttagggagatctatacaagttgctcaatcctcaattacatacgtgtcgattcttttgtctgagaacttctacttcacgctaggtagtttgtttcatagagaatgtagctgctggtatcatggatagtgcagctgctggtatgaacttagtgctatgccgaaaattggtatcatttcgatcattgcaatgatgaacaagcatgctcaagtgctattgttgctgtctggttggaggtctttgttttgtaaatttaaccttcttttttactctggcatgtgtggttctttcggtaattgattgattaacatgtttgtgctatttaaacactctatttcctcttaatgaaaaacatgctatggcac

SEQ ID NO: 28066 - DNA, 371 bp, Zea Mays
gcagtcccaacccttgttgacctgactgatgacaactacggaatccccataagccgtcaatctcttgatcccaagtgagacaacaatgttgagtccatgtatcaaggcttcatactctgctacatagttggaagctggaaatagaagctacaacgcgtacttgagctgatctccttcagtggccatgaagaggattctagcccctactccctatagctttagtgacccatcaaagtacatcttccagacctccattgattcgaggtttttagggatatgttattcagtccattctgatataaagtccaccaaagcctgagttttgatcatcgtgcaaggtcggaactctatgtcatgagctccaagttcac

SEQ ID NO: 28067 - DNA, 794 bp, Zea Mays
agctctcatatcatcccaaacttggtacgtttcagttaaccttccttctttgcagaatccatgcataagtgctgtaaggctaaaactatttagcacagcacagttgttttctagatcagcaacaaattccttagctttcatggcacctagcgtcaaacaaactacacttatcagtgacctgtaagtgtaattgtcaggtgttaggcctctatctagcatctgatcatataactggaatgccttcctaatattgcctacacggcaatacccttctatcataacattaaaagtcacttcatttggcactagggaactctccatcattttatgaaacaacctagttgcttcatccatatttccatccttgcagaaaccactgataagagctgtaaatgtatatacattccctgaaacagcattcctggtcatctccctgtggagctccattgcactggccagatcccctttcctacataaaccagctataagaggggaatatgatgctggacttggtgtcaatcccttcgcaaccatctcattcaaaagacctcttgcctgatgaaaattgttgtgtttgcagtaaccattaattaaagagttgtatggataaacagtcattctgattcccttctccctcatcctatcaaacatgcaaagtgcatcttccatcatacccctcttgcacaaggaatgtatcagtatagcataggtcacctcatttggatctagacctctgtctgccatccctctgaagagcttttctgcctccctatatcttccatccttgcccaatc

SEQ ID NO: 28068 - DNA, 274 bp, Zea Mays
tgaattagagcaccaatggcgcttatgcgcatcgcgccgacgagctcatggcggagcccctgttccttccgtcgtgccgcgctgcgtgaggtgggtgatggagcgacagccgtaggatttgggatgaacgacctagattagaagttttatacccctacgtcatattaaattccccgtgtagattgatgatccaatggccagggtgtgtcataatcgagggcgattatcggccgtggatatttgattgtgtggtcggcattgaataccggttcac

SEQ ID NO: 28069 - DNA, 498 bp, Zea Mays
ggttgatccaccaacgtcgtcgttgtctcatccccaaccatctctgcctcctcaaactttagtacctgtacatccatcatcacctccacaatcttcacatgttgctcctcatcctttttctaacccaccgtctccgccacaagcatcaacatttaggacaccaccaccttctccacagcaatcaagggattcacgacaatcaaagaaatataaattccttgtaccaaaattgttgtccacattcgagaaaaagaagagtaaagctactactgctggcacagctcgatttttgaaaggaattgcacgggacctcacgtcacatactgttgatttggccgagcacgaggagtctgcagaaaaggctaaggcaatggctgcaaagataaagatcccaactaaggcagattataaaaatgtgcctaaacaatatgtgcctggcagacctctactaactcttgagaaattaaggaaggtccctgctggtattaaaaggttgca

SEQ ID NO: 28070 - DNA, 414 bp, Zea Mays
gtgggggtttggtgccgccgcctgtgctgactcggggaggaagaaggtcttgtgaccgttgatctgctaatcagataggccaccaacggtgtagatttaatcaggtgtatgctagttgtcgtgtgatccgggccgttgaatccctggcgagcagttcggattagaccaaggcgtgataaagcttgggccatttgatctttatccaacggtagagatcgcgtaccggttcgcttctgtggtattctaatcgtggccatagaattctaatccgacgtctgccagcgctcgatacccgttcgttctgggtaattgcaaatgagtccctcgggaagtaggaaattgaacccgcagtccacactgtggggaattctgagtctggggaacaattgctagttagtccctaatcctcctgga

SEQ ID NO: 28071 - DNA, 278 bp, Zea Mays
cgcggaccctggcacggaatggagggaagtcgcccacgcccgcgaggatcacggcggcaaatccgagcaacccatggaatccacagttctgttgagctcgtatcgggagtaaaaatgagcgtgcactgaggcccacctacagacccacggtcgcgccaagagcaagggggtgagaggaagttggtcggtggggtttgttgaggcaagtccggttagaagcgagagaatcgctcggcttgttgagattccagtccaccgcggtcgctgcttcagttggg

SEQ ID NO: 28072 - DNA, 327 bp, Zea Mays
gtgtgccttcgcacattcggctatgctcacgaaggtgtcgcgcacttggtctggtgtatttgttatgtcggtctttgcgcgtatgtagtcggtctttgcgcggatagtttggtgtagtatttttcgcacttgttgtgcctggtccggctgcacccttaggcgacttttgctcggatatttttcgcggaagacttcgatttttcgcacttgttgtgcttgtccggctgcacccttaggcgacttttgcacggatagtcttcgcggaagacttcgatttttcgcacttgttgtgcttgtccggctgcacccttaggcgacttttgcgcg

SEQ ID NO: 28073 - DNA, 481 bp, Zea Mays
gttccttctccagctttgtctgctctcgttggtctgcaagaattgtctctggcaaattttgatcagactctcgaagatatggtccctgaagatctgttgtgcgagccgacagatggtggtatgatggacgtttgcactgatgtgcctgatgtcgggttagagttatcccgagcagcgtctcgtgcctcatcgaccttggagcgcggtcttaagagtcaagaggttgatctagattgctccgttcccatggaagtggttgaaaatccttcagccttagaggtggctgctacagagaacccggtccccaaggatggcgctagcatttacccagcccccgagggtgttgccggtgatgatccggctcgagtgggcagcgcgagctatgacccagcccccgagggtgtccgagcgggttccccttctcatacttccatggatgtccacgtcgggtcttctcctccacattctggttgcatggctg

SEQ ID NO: 28074 - DNA, 276 bp, Zea Mays
taagtcgtgtaagcgtgagcatgtcgcaccgacttaaggcgtttccgacttaagtcgattgctccattagtagggcatagtgatcaccctaagtcaagtcatgccgatttcaagtcaagcccaatcgaagtcagttgtcaatcgagagtctgaatgcctttggaaaatgaaagctttattgatgatgaaatcttttggttacagagtacaatttcccttcaatgggttttgaggccttgctaagggtagaacattcttgggtgttctatgttccat

SEQ ID NO: 28075 - DNA, 347 bp, Zea Mays
cgtagctactgaagcacccatgggcccgcgactacaactcggacgacgaggactcgaggaggaaggttgaaagttccctatgcccgggaacaggatctagatatcgcctagaggggggtgaataggcgaattataattatcacttttaaaacttaaattcttactctactcgaaggctggatcgcagtggaatgaaaaacccttcgagtaggttgcagcggaatagaagatcctgtcttaaaatgccctgcacttcaaatataacttgtagcacaaataagtgttgaaatgcagatataaaaagtaagaaagacagagacacaacacagagcagagcacacaggcgc

SEQ ID NO: 28076 - DNA, 519 bp, Zea Mays
cccacatctaggcgactttcaagtgcatcaaatcgaactgcttaggtgttttcagaactgaatgtgccaagtagtagcagcgaggctaagggagacagcacgaggactttgactcacctgtttcgttgtggccctacgggaagtacacgatgcacgtgccgacggtggggaggcagatgagcgggccagcgcatgcatgccatagctccgagttgaggcacttcttctctgcagaccacagtgcaccatcataagcaaaaaacgaattgatcctgaaaccaacaacacaacatagggaagcgaaacctagtaaagcaggcactgacacacttcgcatgtggagtcatccattgccacggcgagggagagccctaggtatgctcctccaccaccgactcgttgatgaatgaggaagaggacgacgcggtcgccatcgccgtcgcttccgcttccgcagttaggagaggagcggacggatctctagtgcttgggttcgggctacgccggtggggagccctc

SEQ ID NO: 28077 - DNA, 1034 bp, Zea Mays
gccaacacaccagctgcccaaccgattgagcttagtgaggattcagaattgtttacatttcaaaactgtttaaacagcgccctgggggtctgcccaggtgctgatctgggcgctgtcagtccggccgggtgtttagagcctcttcctgcgatcgttaatcaagatactagcgacaaccttctcaatctgtgcacaaataatccagccaacacaccagctgcccaaccgattgagtttagtaaggattcagaattgtttacatttcaaaactgtttaaacagcgccctggagacctgccctggtgttattcttggcactgacggtccgaccgggagtttagagcctcaccttgcgattgttaatcaatatacagattgcaccacgtctgttgttgatcaggctgttcctgctgatagcggctatcaggttcctttaggggcttcgcctgctctgggaacagggtcccatccacagctgcttaatttcattgctgagattacccatccgccagagccacctctgattccgaccccaccaaaaagacatactttaaaactccagaagcaatccatcactaaaagggcaagtgttaggctggctgcaaaacatcgttttaagtccgggaataacagagatgcaatatccaaagcccaggaaatcttactggccaagcttaacaactcggcagcaaaaaatgtcggtcgctctaagtctctaatcatgctgatttcgatgattcacttgaacaggtggcaagtattttcacaaaacctcttcccaagaagcatatggaggcaatcttggagctgataaatcaagatattgtgaagacagcgaagaacaaaaagaaagggagaaaggtgacacctgccctcgtggctgtggatgtgggagagagctgagcccctggtctgggcaggtcggtggtgcttttggtgaacaatgtatcctcagatggatagcctcgctcggcgcagctccgttccatacgttcttggttgtacctctgctagctttagcgattataggcagtg

SEQ ID NO: 28078 - DNA, 605 bp, Zea Mays
gttttttcaacatctttgagctctcctttgtaaagtacaaaggtatctttgtaatcattcattaaagagaaggagaagttgaactcatttcttttaatgtttttactatgacatctttataatatgcttcatagtataatttctatatacgtgaatgaaaacatgtgttattctcttgtatttcaagattcctatcatacattatcttctcccattcattaactctccttaaagaagagatttaatcaacgggagaataaagggtcttcttacttgtgttgccttgtacttggtttccccttaggagccaacaacgagtgaccaacattggcgcccacccccggttcacccatggccacaaaaaggagcttcaacatggctccgaagaaagtcatagcggctggttctattctcacccccatctatctgaaccagtaatgctgcccttgttcatgagacacaaagccagaaatggaaggccatagatcctcccctagaaaataatcaacaagatctagatcaagaaattcgcaatctcgagtccatccaccaaaaggttgataagcaaagatagaaaattcttcgggcctttgaactctagaaaa

SEQ ID NO: 28079 - DNA, 522 bp, Zea Mays
gtcatggttcataattaaaaatgtgcttttgtgggtgtgccgttgcattttgttgttggtgcacaatgcagttgcagttgcgggcggtattcgaataaatgtttattgactgatctggtgttggccagcggagtcatcagcttgggaagactgttgccacgaatgacgtgtgagaacgtacgtgcgtgacaggccaaaatacgatagctgggaggcaaaagaacgtgtacgtaccgaggcggccggcgccaattaattgtccatcacatattttctcacgtatatacacgtcacctacggcctgatatgacgcagagccttgcagctcatgacgtgtaccgtacgtgtatatccttgccatcgatctcaacgtcttcttcctccacaacgtcaacgtgttgtcctccacacactcgcttgcttggccctgcaggaacagtacacacgctcataatatataacccattccgtttctaaagttgccacgtcgtccagtcctcatcagtggtcctttcgataatg

SEQ ID NO: 28080 - DNA, 571 bp, Zea Mays
gagcgtggaggcataggaggcgaaggaggaaccccaaaatcatcatcatcatcatcatcaactgctgtagcctgagtgtcgaactgatgaagagctgcatcctcggcctgagagtcaaaaacaggagcagaagctggcacaggagtttcaggtgcaggacggtaggatccaaaaacgaggcgtgaggcctcaagggtgccctgaaaccgaggaggctgaatcagctgcgcaaagatgtggcataagtagtgagcatatggcaactgccgacgagcacgaatcccatccaaaacggtgtcctcgatctcacaaataaggaagtcaacgacatcaaactcagagtgagagaccagggcaccaaggagctagagctggatatgtgtggtagcctccctgtatcccatcctcggcagaagagtccgtctgatgagctcatataaatatttggctgctgtagtaaaatctgccggtgaatgttgcgacccatctgagaagggcgggcggaacagagccgcgacgtgagctgtacccggagccacaccgccgtgagggcgacgaggagggtcagagg

SEQ ID NO: 28081 - DNA, 408 bp, Zea Mays
gtcgaagaactggtcacaccggtttaaccactggatggggtcctcgccatcaaacgtggcaaattctagtcggtggaaacggggaacgccgaccatggatggtgggaatgggttgctaggcatgtgctgtggaatgtttggcatttgtggcagaggtgatggcgagtgcggcaagggcagtaggtggattggcaggggtgtggtggtggttgtgtatgcggcggcggaggtgtggatgggctgcgggggtaaggatccctcagggactagtgtggttggcggcaggccgccgtaccctggcatgccgtaggggcagccagatggaggtgtatcagctgaggttcctggatttttttccatggccgtgacgcgagatgagatggaggacatatgggagttgaactcccc

SEQ ID NO: 28082 - DNA, 499 bp, Zea Mays
agccagaattgtgtctttgttcattctgggactagaaatgcggctctgtcctgtgattcatggacctggatattgtctggtcaagtcatttggattgtgttgtgcgcaggggtcaaatacattacaagacaaacaatatggggaagaacatggctaaatctacagtgagtttgcttaaccgcagtgctaattttgcatcaaggacttcacaagatgccgtggatgggttaagcgatgaaagtgacggtgaaacctcaacaaaaaagaagagaaccccaagacgtggaagaaagaaagccaccgttgaaacatcgagagatgtaggagaagaaatcgaagtcatcactgaacaaacggccgctgaagagactaaggaagttaagaggagaggccgcaagaaaggtaaatacctacatattggttgcatttttgcagcacttctgtttctatatgctgcggttttcataatttttctcgactgggaacagcttagcaagtc

SEQ ID NO: 28083 - DNA, 780 bp, Zea Mays
ctttggatgatattattcggacttccatggctttgcgtgccacttgctctcggacaaagtggaaatccacttccatgtgcttggttcttccgtgaaacactggattactggttaagtaagttgccccaatgttatcgcaccataaccttggagccttgtgcagaaacactcccaattctttcatcaatgactgtatccagattagttcagcagtaacattggcaatggctttgtactccgcttcagtgcttgagcgtgagacagtcacctgcttccttgagctccaggacactagattgcctccgaggaatactgcaaagccactagttgatcgtcgatcatcggggcagccgacccaatcagcatccgagaagcctgaaatcattgttgatgttgatctctgaatctgaaggccatggtccagtgtccccttgatataccgtagaattcggttcactgctgaccaatgtgcatcagttggattctgaatgaactgacatactttgttcactgcaaatgacagatcaggtcttgtcaaggttaggtattgcaatcccccaaccacacttctatatctgaattgttcttcttcattgagtattgttccctgatgcttggacaatttttcagtggctgacattggagttgagataggcttgcaattgtccatctttgcccttttcagtaaatcaagagcatacctcctttgagacaataagattccagtcttcatgttcttgacttcaatacctagaaaatactcaagattgcctaaatctt

SEQ ID NO: 28084 - DNA, 319 bp, Zea Mays
ctggcatagtgctctacttcagcaatttgttctgatgatagctgctttccctaagcgtgtcgaacaatgaattccaactcaccatgagaaggtgctttgggagcaggagatttagatttttcaggagcactttcttccaccagccctatcggtgtggcttccaaaggtccggcttcggcaagaacattagtcgtgcttgcagtagttgcttctttggcatctccaaatgtttcactagatgcttcggcagaagcagaaactggtgcctttacagattctaaaacaggatctaagatgctacccattcttcttttccttg

SEQ ID NO: 28085 - DNA, 435 bp, Zea Mays
ccgggctataaaagcgagccctggcgaccaccttcctcctcgaaccggggcaccaaaacgactctgcagagcatcacatcgacgaccagcgtgggggtgggcgcagccgtgcatggaatcagtgtgcagcgtcgttgtccacctaaatatagtatgggaagaatcggtcgcgccaaccacgcatcctggtgacctcctctgacgggggaattggccggagtgccggcaattgctcaccagatttcaagaaattgcctcggaccgcccttcatcgtcggcgtagcggcctgctacttattccacggtgagttacccttagatcgattcgccttgctctcctcttcgcgtgggtccggatagttctgtaggagtgaagaccgtaccgccaggccacctatctcgacgaaagcgccgccgtgacatcaccctccgctg

SEQ ID NO: 28086 - DNA, 386 bp, Zea Mays
atggtgacgtctttgtggcactatctggtgctgttctggtttaaattctccttggtttaaacagtttgtagcgatgttagttgtaacccgctgggtgtgatcttccccatgtaataaagtctgacttagctagaattgaccatgagtggttgggtgtattttcctttttagaatggtttttctgtttaggattaattccgcttgctttcttcagttgacagtcttctaagtcatagttttttggtggatatatgttggtcatgtatgaaactcgtttcctatttcttaatggtggaaacccctttttgttaaaaaatatccagaagagcagcgtctctcctattcaatgctctcaagaagacttgcctcttgtttagaccatctat

SEQ ID NO: 28087 - DNA, 341 bp, Zea Mays
ccggggttaaatttacaaaagtctaccagactcagactaattccgtggggactgcgggttcattatgcaaaaactcagggaccattttacaaggcagtcgcaccgaaggggtatgattgaatgtcgaccgtccgatcagcatctgacctcctagattagatctgccctgatctaaaccggtatatattcatatccctccgatcaatgaccgacgacgcggatttaaaatactccaacccatcccagaattacccgatcgagatcaaacggctcataagcagactggacaaaccggcatccaaatctaatcggggcgcccacgatccaacggctcacacact

SEQ ID NO: 28088 - DNA, 314 bp, Zea Mays
gcatttctatgcttccaaatctgccaagctactaaaattacaatagagttgaaaccttttttcttatgcttagacaccaatctttctgcctcactccaccaatcttgaaaccctgtagcatcagacgtaggagcaagatgttgcaaacccagcctgcttagcgttctaaaccatacttccctcgtaaagacacaagccaccagcatgtgatgcactgtctcgtcctgctgatcacacaagggacaactatctggatgatccattccatgacgtgccagtcgatcagccgtccaacatcggttgagagatgcaag

SEQ ID NO: 28089 - DNA, 282 bp, Zea Mays
cagtgacaaaagatctgagatgccgtgcatctcaccgccggtgactcgccgccgtgattagcgccaatcttcacgattcgtgcgctgggactcatggataatcatgggcagagaaagatctcaactaggggataagagagcaagctatctctggactgttcaccgcgacacctgccgtgcagtggacgacagtgtcctcatcggagttcgccggtgactataaccgcgccacgtgcttagaagatgtaccacgtcgctgtagctcgcggtaggtagatagtt

SEQ ID NO: 28090 - DNA, 779 bp, Zea Mays
atggccaaatggttcttctcaatgtcatgaatgccaagtacatctgctgaatacagccttgaaatcgtacttgctcatgctactatagagggaaaggctccttgtggtgggaacaactgcaacacatgcctgcagtaggtagaaagtgtagaaacttgagggtggcacccaagcacagcacagctacaatccatccttctctctactgcagccatgattccagctttagaagaaaccccctgcattggccctgaagcgttgacctgctgaagccaacatgtcatagccccaccatgaaattccctcaggatgcaggctcacctcattgcagcaggctaaacgacacgccccttgtcggcaattatggccgtccgtcttcctttcccggatcgacaattttcctcgagagcccgtgcgctaggactggtgatgggagtagctgatacaggcgatgaaactgtgctgaaagatgaaaggagtggcctcagcagaaggatctggtgaatgatgcgagggctcacgagaaagtagcggctggaattcaaaggcgtggcggcaaaaggcgggaggatcttcaggtccaggtccatggatgactcctggatgaaaaaacaaaatgcgaattgagatcagctccaggaactgtgtgttgtttgctccccgtcatttgacctgcagacagcaagtagtgtgccatgctctgacacgcaattcctgaaatggcccccagtaacccaggccacatctcattccatctactccagtcacagccattgaac

SEQ ID NO: 28091 - DNA, 349 bp, Zea Mays
ccaagacccaaatacgctgctcttttaatacccggggatggcggttttatttgaaagaaatctagggtgtcttttcggaaaacggcgcagtggcaaccacagcccgtcctaggccattcgatcgtatgcctacggataagattagatcctagtcttcccaaaccggtatacttccaccaccacaggattccccatcaacggccaaggaagcgccacgccgcaacatccctagagccctcggattcgatcacgacgacactggcttaattaggccaaagggatacgagcatcgaatcgccactatccattgccagatcaacgccacccctcgccttccaccttagctccc

SEQ ID NO: 28092 - DNA, 527 bp, Zea Mays
gtcgcacttgtttgtcgttgtcggaggtcttgacacgggatggacgaggtagggctacgcttagcgtgagggccaggtgtgagggcctttcttttcgattgcgggtgaacatggtggataggcatggaagccgacacgtatgggtaataacgagttagcacgacgatggcagcaggaaggcacgagcatggtggcgatagccaggagcgggggtggacacgaggtgcggtgggcgaccgagcgatacacaatggcaggggggcaaggaagtggtagcgtgtagccgcacgcaagagctaggggcacacaaacaatgtcggctagccaaggggcggcgacagtggcatggagagtgggggtagccttaagccagaaaaaatagacttaatttcagtggctagaccatagctgctgaaaataaatacttatttttgacaatatcccatggttaccgagaattatcttatttacgacaattaataaaggcagccgaaagtaatagatttatttttgctggcattctagag

SEQ ID NO: 28093 - DNA, 553 bp, Zea Mays
cgtgcgcctgtaaccacttcgtgatactcaccgccagagagagggctagtagccaccagggacctctgtcgtcgtccaccatgctctccatgaattggtaccctgtgcgcggtcgggtgggtccgcattggctcttagattgcgttgaaggtggtggctaggtagtagtgcgaccagggcaccatcaatttgacgccggcgccgcaagtctggagcgcgtcgttggcaggagtcggcgctgcgtgagcatcgtaagaactccctttaccgaactcgccatcgtgtcaatttcattttgtgatcatcaggactagtagctgtgcaccgtggggtgtgatgggtgttccgattacggcctccccgccgcggcatcactgtaggtcgccggtgttggaccggaggtaggggaagggcccggtgtcgttgatctagtaaccaatggctgagattagatttccaagggaagcgtctcggccgttgatcctcgaacgggtggctacgattagattccagataccccttcgttgttttggatctggcgtgttgatcgggg

SEQ ID NO: 28094 - DNA, 359 bp, Zea Mays
ccggaccacccgtctctcgtgcctgaggtgcgccccgcggaggcgagcggacactggacgacatcctcgatgcccagtgcctgtatcaaaggatatgcgccacaccttgcgaaactgtagagacttcaagcactccgtcgcgaatggccgacccttccaacctctaccacctcccccaccgcgaggagggcccggtgaacctcaacgacctcagcagcaggaagaggtaggaggtggagcatttctgcgcatcgacggagaggtcaacgtcatcttcggaggacatgggttacaagaaaacaaaaggcaacagaagctcaacgaccgacagatactggtggcaaccaccagtgctcccg

SEQ ID NO: 28095 - DNA, 464 bp, Zea Mays
aaaaaccacagagccgaccaaacaaaagttggagaaaccatagccgacgaagaaatcgacggatctcaccaaaccatcagtcaccagagcggacgatgcagcgaggataaaagcgatggaagacgagacgacttggagagggaagaggtagagggagcaaggaaaaagagagacaagcggcagtatcgaggagacgtggccatagttaaagcatctgctagaagtcttgagaagcgaagggagtttccttgaggccagcagagcattgttgtacacaacatgaagacaacgacaaatggaagccattgattgtcgatcgagcggcgaggaaattttctgttgacgtggatagtcctatatgcgccgttttgaaccggctttgtaatataaaaatgtgtttggtttagctataggttcaagtgaactgtgagtaagctgttgctagttgacggctgtgtgagaaa

SEQ ID NO: 28096 - DNA, 278 bp, Zea Mays
gaaggatgtaacacctctggtgttactgttactaaaacttgagcataacatcaagagcattggcatatcatgtatttgttacacctagaatgcattcactaggtaaaatctcaaacaagttgtgatgttatgagttgatgtgtggaaaaccctaaggtagagtacctaaccctaaattgggcttatgagtgaaaatgaagcccaaataggtgaaaacctcaaaagacatgagacatgatcataaaatatcacatttgaaggactttagtaacaccaaa

SEQ ID NO: 28097 - DNA, 271 bp, Zea Mays
ggtggaggctcctggggttcttgttggcactgttactagtgagcctgttgttcagctggtgtctactgttctatctatgtcagctgcaccgcctggttctgggaatcaggtgactgaggtccttccggtcagagtgatgtgaatactcagtttggggtttctgtgcaaggaaatatttggactgttgaacctctgaacagattgtcttcggtttttctcagcaagatgattcatggttggaaggatgatactcccagcctcaaggtttatt

SEQ ID NO: 28098 - DNA, 368 bp, Zea Mays
attattacagactccgactctgtcgatctaaggatccaaatctatgtgggtcctgcagtctagggtaccatagttgaagcgaccacagggcggtgaacggtaagggtgctgaatcccgacaggggcgggaggaccaccatccagatagtggcgtgcaacgcactcggcacgcaattctgcaaccttcgcccgaaccttgcccaactcgtcaagggcatggtccaactctgtgttgagcatgatgaccagattgaccatactattcagcctgggattgccttcaccaactggcgagacaatcacacctccagcactgccggtcgaatggcgaagatagtacttcaggtcaaggccatcagctaccccgc

SEQ ID NO: 28099 - DNA, 403 bp, Zea Mays
ctagacttaagattaacattgttctgatctctaaaaaaatattactattgctctgttcaatggttctactgattagcaatgacatcaagcaggcaaggaaacgaactttttacctacgaaaatccaggattaggtggtgtcttgttagagcacctccaagagaaaatgtaaaacaactcccaaaagcttttataggatcaaaaacagtttttagccatccaacagactcttcaacttttccccaaaacattcgcatcctgaatccacagctccctctcccacaaatattctcgtcaaccaaatctccccaatcagacactgcacgcgcagagaaagttgtttcgcgccaagattttgcccgcgtgaatgtcttgttgatttctaatgccctcgctcgtctcac

SEQ ID NO: 28100 - DNA, 551 bp, Zea Mays
aattgtgtagctcttgtcaagccgggaagcaagtggcgaatactcatccaaataagagtcaaatgtctactcatcggcctttggaattactccacatggacttatttggaccaacatcttttgtgagtattggcggtaattcctattgccttgtgattgtggatgattattctagattcacttgggtttattttcttcgggataaatctaatgtgtttgaaacattcaagtcatttgctatattggcttaaaaccaatttaattttgatatcaagaaagttagaagtgatgaatattgtgatgacaagggtattaaacatgaattttcttccaaatatactccgtaacaaaatggtattgttgaaaggaagaataggactctcattgatatggctaggtctatgctagcggaatataatgtgtcggattcttattgggccgaagccataaacaccgcatgtcactcatcaaataggctatattgtcacaagctcttgaagaaaactccctatgaattgctcattggtagaaagccaaatatctcatatttt

SEQ ID NO: 28101 - DNA, 427 bp, Zea Mays
attttcagtggctgaaggatttcaaggggtctcctggacagttcagtgcgacatagtccagcaattcatgcttggtgctcagcctcaagatgaagactccgtgcccccctacccccacgatggtcattagcttccggtggaattttttgggatggggcagcctgtgtcaaatttccaatttgatctcaacatccctcccattggtgaaattgaagaagaagccgacaatgaaaacaatgctgatgatggttgggatttctggccggttcaacaggcccaacaagcgcaaccccctgctccagtgccaaatgccaacaacgaggaggagcagtttagttatcaactttctggtctcgaggacctgccctctgatgaatctgtgggtcttttcaatgacatcattatccctcaagaggttcgattccct

SEQ ID NO: 28102 - DNA, 378 bp, Zea Mays
attgaggcgcagacatgtgctagtggtgcattgcggaagtttctttttagagcatgatgttctcgctttgtagctgctgtcttaagcaacgggggaacatgtgttggctagttaacagcctaatggagacgacatagccacatataggtgagactgtgtgtgtgagagagggagaggcaaaagaaggggggcaggatcggatcctctgttccagtatcaccggctctctctccggacagtcacatggcttgcatgcgtctgtccctgggcaagcccacaggacatccctatgttctgctcgctggtcatatgctgttggattggagctcaccaacactaatcagcctctgattctgtggcctcactgccctgctctcc

SEQ ID NO: 28103 - DNA, 332 bp, Zea Mays
gtgggacaacgctgccgttgggcatatttgctggttcttggatttcttggttattgcgttggtgtacaatccttctgttatactatgttctcggattcctgcgttagtacttcgttgcttactcatgggttgcatggaaatgtaagaggcttgggttgctagtccttgttctgctggtgcgctgggaggcagaatcgggatgatttctacctccgttcttttctatttaccgctcgctagtttatttttgaactaaactaccacaaataaataaggaggaagtatatgtgaatatcattatcagaattctaggtgacgaccctgtaataagg

SEQ ID NO: 28104 - DNA, 600 bp, Zea Mays
aaagggggcgaggatggggtgaatttatagccgcggtgagctcgacccagcggtgtttcagaacagaattggggcaactcgaaattggagctcacggttgcaagcttgggggcgatactggacggtgtgatgtgtaatgagttcgcggagctaacggcgggctcgatttatagcttccagggacggtggcgcttgaaatgaggatggcgcgatggcggccggagaagaagcgagtcaccggcggggtgattcgtggtagttcacgggacgagaagccacgacagtcactgggtaatgatcatagttcacggcgacgtggtcactgaccggaagcgtggaacaatcgcggcggaggatggaaactccggcgactgccgcacggccactttgtcgatgcacgtggttgggataccgcgaggctacggcaacccgaaaatatccacgacgcgatcctatcccttccccgccgtgagatcttttctttgtcgtagttatccaaccgccagtgaacacgaatcacggcggcggcgtgaattttcgcgcagggaggtcgccgtcgacgagcaagccgcgctggcaaccatatccgttcagttactg

SEQ ID NO: 28105 - DNA, 299 bp, Zea Mays
tcttcctggactcggtgctgacatcgtcaggcgcgtaacgggccaactctgtgaacttgtgcacatactcactgacttttcttccgccttgagttagctcccggaactcatcctccttgagttgaactatcccctggggtacatggtgctcacggaaggctgtttcgaattctgcccaggtagcatctctgacggcctcgctgaaggtgtcccaccatgctaaggccattcccgaaagctgatgagcagccagttggacacgctgattttctgggcatccgatggcttccagtttcctc

SEQ ID NO: 28106 - DNA, 585 bp, Zea Mays
gaaataagagccatagagaaaaaagccctagctttgtttgggacctgtatgggaagacttgcccaaggtcgccccaaatctgttttctgcaaccacaaccatctcatgcggagagcccaacaaagctctaggagactagagattcccaagcctcccagccgaaggggtcgacacacctttccccaggcaaccaaacaatgtcctccctttgcttcctttctgcctctccatagaaaaccctttcttatcttatcaatggcatctaaggcccattagggaatgtcaattgccattgctaaataaaccgtcatgcctgtgagaacatgttgcacctgaattctccttcctgctctggacatcaagtcagctttccaattagggagttgatctgcaattctttcaacaaagggctggaactgctgccgagaaagcattcagatggcaaccttcccctgcaggtatttggggctccccctatccgtggagaggcattcagagggacacttgttggaaaatgtttctaaatgaaaagaattggaaactaattaaaaatgcttgaataaacattagttatttctaaatggc

SEQ ID NO: 28107 - DNA, 742 bp, Zea Mays
ttgggctgagagacagatccgacttgacccaactttttctccaagttccaagcctatctacactcgggactcacatagaaaagataggatttggcgcagggaagataccttacaagggattcttaccaagatttgcacattagcgtgaccaaacagacacttggacaagagcagaagcaaacctccacgtgttcgatctttgctggcaacgccgagcgcacattggtcgctcccgacgcgtgctccgagcatcgatcggcccgaccccacacccatgactacgccgcacctataagatagctcgagcccttgacctttctctcccgcacgcccttcaccctcaccaaggccttgatgccggcgatcgccccagcccctctccaaggccttgatcaccgcccgcaaggtaacccaagccccggccaccatggtccaaccatcctagcccctctcaactcaatcgagctccatcatttgcttccccagaggccagtgaagcttcccaaagctccttggtcgaacgctacctcgctagagagaagcccgatcaccctcgccagactttacccacccgtcggtgcacgtggtctaggtaatccagcgagccattcttcgattccttgcgcacacacacccttcatcacccagtgaagctccttgtgcaatttgattgacctctaccatcatggtttggccggagcaggtgtcgccgacaaacactaccgcctgagctcatggccag

SEQ ID NO: 28108 - DNA, 433 bp, Zea Mays
tggaaacactttgatgccattcaccgtgagaaagccaaagaggctcgtaatgtacgtgttgcactggccacagatgggttcaatccctatggaatgagcgctgccccgtacacatgttggctcgtgtttgttatcccaatcaatctcccccccggtgtgtgcattcaaaggtagaatatattcgtgtcgttgataattcccggacacccggggaataaaatgggtgtgtacatggagcctttgatcgatgaattggtacgtgcttgggaggaaggggtatggacgtatgaccgagctacaaagacaaatttcaaaattcatgtttggtaccagtactccatgcatgacttaccagcgtatgggctattctgcgcatggtgtgttcacgataagttcccatggccagtttgcaaggaagctcttaggttcattt

SEQ ID NO: 28109 - DNA, 318 bp, Zea Mays
gctatgggggaggtccatgagggtatgtgtggcacacatcagtcagcccataaaatgaggtggatgctaaaacgggcagggttttattggccgaccatgatggaggattgttttagatatttcaaagggtgtgaggcgtgtcaaaggtttggggatattcagtcagcgccagcgagcacattgcatcctattataaaaccatggccatttagagggtggggtttagattttattggtgagattcatccatgctcatctagaaggcatcaattcgtgttagtggctactgattattttactaaatggactgaagctgtg

SEQ ID NO: 28110 - DNA, 287 bp, Zea Mays
tggcatcgagattcgtgccctagacacgtcaaatctgggatttcctctcggagttcagtagtgagacaaaccaaacttcatccctccatatcttttgatccagtaagcaaaacccataagcctccacacacaaacaacaaaggaatgtcaggggaagagatctctcaacggtatcatggccataatcgcgaagatttggagccaatccgcgcttgaacttgacctctctctgcgctgcctcgtgctcgatgccgtgcccaggcgctagagcgcgcactggcgctcgc

SEQ ID NO: 28111 - DNA, 592 bp, Zea Mays
gtcgctgacaggttgcaaataaaccctcgatcttctatctcttctccaaaaacacccctggccatggcgcgctcgtcgttcgtccttgacgtggtccgtaccggccatggccggcgacgactattacggctaactaccggggaggcatcactggcttaaggcgacctaggaacacgcatcaatttgacaagaacacactgagaacggcctgtccacgtgcacggcggaaaccgcggtgtcgatcccgtgttctcaattatccatgctcggatcggctaaacggccactacgaggagcttcacgaacacatagagctgctaaaacaaggcttgaatcggacagggacttaccagagagggctggccacggagcgcagggctttacgttcgtcggagacagagaaagggggaaatcggtgtcgcgacggctcgggttgaaattggggttggggattgaggctacacggccgtaagagactgtagtttcaccgtgcaccatcaatttgggaagagggggcagaggcagcgcgaatttggacttcttctgagcttcactggtggagatgaaaacacctcgtcgtggctccttgctc

SEQ ID NO: 28112 - DNA, 316 bp, Zea Mays
ccaggacgggcagcaaaagtggccgcgcactaggagagtacggagcagtgcagtgcgggctggtacctcctgtcgcttttacggttttacataccacgtacgcatggcaacggaggacgtagtagtagtactggggctcgggccggcggtggaagagacgaaacagcaaggggctggctactcatgtcttgtagtagtactccactacaacttgtcgccatgtgtgtggacggataacgtgcgacacacatgcatggcgtccatacacactacacacacatggagctatctatcatctatgttttacttccctcca

SEQ ID NO: 28113 - DNA, 520 bp, Zea Mays
ctagaataaaattgttttgcgaattacaagggcgagctggccctgaggagtcaaacaaaaaatttgcggagattatcaatgttccaagaatgctccaagtcctcgccggatggcgttgtgagcctgtacgcgctgggggacaccttcgtcttgacgatgaaaggacctcccacttgggctccagcttgccccgggactctgtccgagatatccggacgagtacgaggtctccttcgctgaattccctcgggatgactgtgtggtcgcgccatgcttttgtttgggcttggtatttgtttagagcttgtagggcgaagacacggtctccgtcaatgaggtccttcgaagtgggctcgtccacgtcggggacggttgacgggactgtccgtggtgacccatgttttatttcttgcggggtcatggcctccgatccatatagaaggcggaaaggggtgaacccagtcgccctgcactcagtcgtgtttaatgccgagaccgcttcaggtaacaaattggccca

SEQ ID NO: 28114 - DNA, 309 bp, Zea Mays
ttataggatgaggcaaataggtctggaggagtgggaattcatgcagtcagtggattggcctcagatccaactcttgactttttgatgcaacatggaataagttcaatgccaaaatctgtagtatatggttacactgcttctggctatggttttgttcaagacatgccctatgctttcatacatgagtttactagaacctctatggctggcaagatccgacgtttcaagcatggttacatgagtctgtgggataaacttagtcagtcattaccatttgaagttctttgtggcacggaggttctcagagtc

SEQ ID NO: 28115 - DNA, 432 bp, Zea Mays
gctcggcttgactcattagtagcttgatttgactcggctcaattgaaatgggtcacgagctaagccaacattttagtttggttcttaacgagccgaacgagctgcacacagcacaaccgcacgtttagagaagcccagcctaggtgccaagtggcccagctcacaggtcaacactcaataacaatgcactgaggccatcctccacatccatgccataggacatggcagaccactaatgaacgacatggcatgaaacactaaaaccctagtgactgggtcccatctgccatatcccagacccaccgttgggcgaccaactaccatcctccatcttactgctccatctaatcaaaacacaggcgcagaccttggtgtaggttgcggcatagtctaatacactgtcgtgcataaggttgtgtggacggtatcgtc

SEQ ID NO: 28116 - DNA, 329 bp, Zea Mays
cgcgggatgggtgctcgtctggcccatggtattgcagcattcttttccatgtgcaggaacatatcttccgatgtgcatgagctggctaggcgtcagcgggagactgacgacaacctccatcgtcaagcttcttccatgggtatgccatttcctccccgctcgcctgatgtgcctcttcatcctccgccaccagaaatcaatgaatggcaccagcaggcctatggggtgccctttatgtcagctgaagatgaagaagaagacgaagaatattttgatgatcgtgagcagtttgtcccgcctccccccagggggatctgggtcaatcctct

SEQ ID NO: 28117 - DNA, 276 bp, Zea Mays
cagctatctcttgatcgccctctgtcaccatcgctgggtaggcgaatcgcaaacaaatccccaactctgtgaggactggtgtgcgatgccctgtcccgtcccaactaacctccttccatgccctggtgcctttcggttcaataaccctccgctgatcgaagggtttagaaggcttcaatgtgagggaccgatgaaaactgcaaatgaaagtttgttatttcacaatgaaaatcatttatttaaaacttcaaattgacaataaaacttcaactcaac

SEQ ID NO: 28118 - DNA, 383 bp, Zea Mays
catttattaaaggccggttcatccaagacaattttatgattgtgcagcaaactgccagactcctccatcagcaaagacatataagaattcttttgaagcttgacatcactaaagcttttgactcagtatcctggccatttctcctcgaagtgcttcaaaaactggggtttgggcagatttggacagatgttttgagtggactgctatctacctcgtccacacaagttatgcttaagggagtagcaggtgaaagaattcagcttaaaaagggtttaaggcagggagaccccctctcacctatgttgttcatactagtcatgtacgtgctaggctggttaatcttaaaagctgaactggaaaatctgctgcaacccttgttctcc

SEQ ID NO: 28119 - DNA, 307 bp, Zea Mays
gtcggacatgattatcggcgctcacattagtagtgctctcatcagtttgtatgctagttgtgcgaacatggagatggcagaaaagctatataacgaaatgccaaggaaggacttggtctcatcaactgccatggtttctgggtacgccaggaatagaaaagtcgagattgctcgctctatatttgatgggatgccagagaaggatgttgtatcttggagtgccatgatatcaggatatgttgatagtaaccagcctaacgaagcactgagtctgttcaatggtatgcaagagtgtggtatcaggtct

SEQ ID NO: 28120 - DNA, 508 bp, Zea Mays
tggccctcctcctcctccaggtggaagaggaatgcctgctccacctggcggaagaggacatggccttgctcgctcgttaggcccgacattacaaagtgcagtacgaagatcatctctaaaaccactacattgggtcaaagtaacaagggcaatgcaaggaagcttgtgggcagagctacaaaaacaagtggacgctaataggtactataaactgtccaatagtttctccactttttaactagattcacaatagaaaagggtctgataataaaatgtcatgatgaacttaattcagttcccacatatttacttaatttgaatcacatatttttcctgattgtagattctagtggcattcaatgtatgtttttcatcttattaatattctaacgggtaatatgatcattgcagtcgtgctgaattcgatgtaaatgaattggaatctctatttaccattgctccaaagacaaaagctggccccaaatcagaaggccgtggaaaatctctt

SEQ ID NO: 28121 - DNA, 412 bp, Zea Mays
gctaaatactggaaatccaggggctaacgtataaaattccctagactctgattgccctgtggtggacggcaggttagtttctaggttcttcgaggactcttatgcaaaatagccatgaggaaggggtatgcaacgatttaggccgttggatctaccttggacggtcgcgatttgattcctaaacccctctacactggaaacaacccgtggccatccgacttaggatcaacggccaaaagcaatctcgcgaaagggttatgtgtcatttaatcctggctgtctgagcggagatcagcgtctagctctagtcgatccctaacttctaatcgcagccgttcaaatcagatcccacggttaccgagactctcaccctttcccctgtcaagctgggtacgacagcgccgcacagtac

SEQ ID NO: 28122 - DNA, 453 bp, Zea Mays
gccagggagaggcggtggcactggggcgagcaacacgtgcgatggaagtggtgtagagagaacaagctgagaagaacacagcgtgcacgagtaagggcagctgacgtgcgggcttgggtgtgaaaagggatttgaagtcgtggttatgggcacaccggacagtgaataagacactaccaagtgcacaccggacagtctgcacagaggcagagcaagccgaggccaagccggagcaccggactatctggtgagcctaaactgagggtattttgaatttttttctaagaacatttgtgccaaaccaaatcaaacttataagcacacaaaataacacctattgagacagatattggcaccctcacatattctctcatagttttcaaaatattttgccataggctatgtagtttttagaaaaatgagcaattggtgagagttggcatttgtgagtta

SEQ ID NO: 28123 - DNA, 364 bp, Zea Mays
aagaactcagttggccacggtcgaccattccaatcgctacctacacccccaccacgaagacgttacaagaaccactgccgaaacaaagtggggtggtggaggcgccatcccacgcattaacagggaggtcaatgtcatcttcaggggccacgggtcctaggagagaaaaggtagcataatcttaccgatcgacaggtcctagtggtaacccacagtgccccgacgctgtatcggtggtcagagcactccatcattttcagctgagctgactagtggctcaacttcgatcaccctggcaagtacactcttcttgttgaccctgtgttccaagagagtcggttgaagaaggttctggtggatggtg

SEQ ID NO: 28124 - DNA, 380 bp, Zea Mays
gttaaaatggaccgcgtcggccgctttggaaataacgaccgagtgatgatgtggcacgctcgcactttagaaataacgaccgggtgatgacgtggcacgccagcgttttagaaataacagctgggtgatgactggacgctttttagatttggcatctagccttggaaaaccccatatgtactgcactgtcgcacgcctccgcattctgtgccctagtttttgcttttccgcatccaggccttctctgctttcctgcaatactgcttccgctccgctcgtcagcaaggttgagatggcgcccaagcggaaagcttcgagttcgtccgtcgcagtcattccccccatcgatcccaacagttagttgcccttcgcagataacc

SEQ ID NO: 28125 - DNA, 375 bp, Zea Mays
ctcctgctcccttcccatccggtctccctttcttttcgcggcctcgcctcgcctcgcctcgcctcgccggcggcctggtggtcgcggtctcgctccagcaccgataaagcccacctcgagttctgctctgctccaccccccggtaccggaatgcagatccgccaggacctggattgattccttcttctgtgatcaatcaaaagtgaaagggttaaactggggttcgatttgactgcaaccgcttactgtactgtttcaccgttctaatgtctatccacatgctttatccaggcttcagccgcagcttgtggtggaatcggagcttcttatccgagagcagacatggagcagagtagtgatgggttgccaatcagc

SEQ ID NO: 28126 - DNA, 425 bp, Zea Mays
gccgaaacgaaggctaaatcgggtaatggatgcactgaacttcgagtatccaaattatgagagacttgacgaagggactgggggagcgaagagaaaaagagttgtcagtattctgagcagggaagctgctcggtccatgaaggcggatgaaaaggctctgaagaaaatgaaagtagcgccagagccgaagatgcaagaccctaagaaaagtaaacttgatgagataccttctgccaaaccgaaggtagatgaagtgctgaaggaaaccttgagcccttcgtcgcccactgctgccgaggtgacagaaatttgggaggtaatgactgaatccccaccattcaagctgataagtcctttgagatcggaactgaccaaccttttacagaagatgaaagtgccttcagctacggaagagaatattggag

SEQ ID NO: 28127 - DNA, 383 bp, Zea Mays
cccggagtgaaattaacagaagaaccccactgagccaccggatgaggcaggcgcggagctccaaactgagacggcataggagtagacggtgcaggagtaggcgtggcctaatactgaggaaaaccctgcatcggcacgaactgagaagtcccagacacatagagttgctgcggaggaagaggaactgaaaactgctgctcagcacttgacatcatgttgatggtgccttgagaagaggaggaagtcactggctcccatctgagcttcccattaggattcctcctacacaccacatccttatggtcctgactgcagatagaacacctgccactccactggcactctgcacggcgatgcgcatcaccacagcggaaacacaccag

SEQ ID NO: 28128 - DNA, 334 bp, Zea Mays
ggattccttctctttttaattggtcatgactatccattgctatctctggattctgtttatactacgtggattatcgttccttttcattatgtataaactttatgttctactcgttatactactttcaggggaggtgctgccggattttgctttactttttgtctctatttcttttcttatgttgtttaagttatttgggaagggtatttggtaacatacattgtgtgagagcaatggggtgttacagttggtatcagaggaataggctgtaggtcctagcaagtggaataataataaattgacacactgcacatgtaggatgggtttcctgctt

SEQ ID NO: 28129 - DNA, 289 bp, Zea Mays
tatgtttgtagactcatctaacataatgggagatgtaataaaaatgctaagcaaagaagatgagttttcatactccaccgtgcaatgttgtttcattacacatcgctttcatttgcatttccttctaaagacctttgtccttcggatttgtgttaagctaaggatgaaggttcacacttctaacttgtgttgccttgattttcaacaccttcacgggattgaaatcaagtatccaacaacacacgaccagcaccccgctaggcacgaccaccacgtggggtcactgctt

SEQ ID NO: 28130 - DNA, 628 bp, Zea Mays
ggcggaccggtcgagcaactctacgaggcgggacggccgaccaggtcctgtctaggcagaaaggcacaggcctacaatggtggcaaatacatctatgggccactattatatgccctcttgtctcgcgcatgtcaggagcatgcatgtatccgcctgatgaagaggtagggcaggcacggttaccccacgctagccactgtaaggcacgttgccaccacacactatctcagatgacgccacagtgcgtcagaggggtgacagagtgtctctggccatgggacaagacgtcaccatgtacagcctctgtatcccttgactatgtccattgggtcccgctaggcgtcgctacatagaacatcaacaccggagtccctacagcaacccgtgtatcgggtagatggagcaatccgccatactaggtgtacaactacgcacgaacccaaaggcaacgtcaggaaaaccacattagctagactactgtagataataggtcgcaccctacttctgacacaaagtccccttgtaataacctctcccttgaactataaaagggggacatccagcttgaattctcgactccctcattctcacacttgcacttggtgcgatatcctagccctggaggatt

SEQ ID NO: 28131 - DNA, 441 bp, Zea Mays
accatgacaaaacaaggtgctcacaaaaattttcactggagcttccatagccaagtgttcgcttgcttagtcagaaggtatattacatgataacaagaaaaacaactacaagctaaacgatggatcttagcctaagggtcctgtgatacctcaattttttgaaaagaagttaaatttccatttctcttttctttcatgttctgtggcattggggtttggagtttcaggaggcattccttagggaaacagtagatcttttggcatttttccgctggggtcgggagctcagatgggagagcgagtttgggccattgatctcgatccgatggatgggagcccccctctcctccccaaccctagccaaccccctctccctctccccaattgttgcagccgccccctccctcttcatctcctccccatttgcagctgccctctacc

SEQ ID NO: 28132 - DNA, 381 bp, Zea Mays
ggtctttccttactctgtgtcatttactatgttgtggcctgactcttttttcctgtgataatcataactatatgcattgtatgtttataagcgggaaatacattgtaagataatttgctgttcctttttgatcttttgctgcagagagttggtatgttggtcagctcttgctgtccatctagagtactgtaggagtatggcaataggccaactatctagtggcatacatcagccatgtagtagttgggggctgagctaagacatgtactagtgtaccatatagttggtacttggcttgtatatatactagagtactagacaatgcaatagagaaagcagttcagtttgctgcacattcagtgcctatgtgtgtgctctgtt

SEQ ID NO: 28133 - DNA, 280 bp, Zea Mays
tccgaagatgagtacagctgcgggatgccaagtaaacctagtcatttggactttggaaagtccaccatttctgaagctgatcttcttaaaatggtgaagatgggttattttagtgaggccaagaaggaattaattcgttttggtggagaggaaactatcccaaagccaggaaagaacgaggtagtagtcttcaaaagttttcttaaagctggtctaaggttccccctgaacaagatgattgctattgtactgaagaagtttgggatttaccttcatcagc

SEQ ID NO: 28134 - DNA, 428 bp, Zea Mays
ccgcgacgaaggggtacgcttcaatcccagccgtccgatcaaaagctgagggccccgattagatgtggcttatgctaaatcagtacaaagccagaaccgtgggattcacgccgaacggacgagatacatgtgatatccccaagccgtaggatggacgatcaacgaccagcttttgatgctatgaaggggtatcgctatcatctgatccgagccatctacgcagagatcaacgacagatagcggatctagtcgaaccattaccctgacctaatctctgccattaacttgggatgaacgccaggaaccatcccccacttcaccggtctacctaggatggcgccgccctgccgcacggtgggccgccacaggtgagcgccaggaactaagtacccgcccaaatccagtcactacctggtgcaaacgaatgc

SEQ ID NO: 28135 - DNA, 485 bp, Zea Mays
ctgcaacaaaggtgctcaatggaggaagagttctcagagggcctcagtttaatattcagttcaagcgctggacaaggctggctcatgcaacggcagctccattgccgtcgctggtcgacatcgagatacaagggattccgttgcacgcttgggggcggtccacagctgaacagctacttggtaattcctgttggatcacagatgtgcacccggctacttccctgaaaagtgatttttcatccttcaggcttcgggcttggtgttgcgagttagagaagcttcaacgtgccatgaatctggtcattgttgagccaacgccagcggatcatgtgaaacggtgtttatcctacagtattgaagtgactgtcaccccagtcgagaagccactgtcagatgggacccctccacttcctcctcctggcaacgacaacaggcatgaagatggcgatcgtcgccgtcctgaggctccaccccctcgacgccgg

SEQ ID NO: 28136 - DNA, 568 bp, Zea Mays
ggcggatctggtgaacaatttgaggctggtgttagtgcactggatgcgtatttacctagcggagccgcgggtgcgctcaatttatagcatgcttgagcggtggccagtgaatttaatggagacgcgcggcggccggaaaaggaggagatcactggtgcaggtgattggtggcatctaccgtggcggctctccagcgatcaccggataccgatgacccgagttattgtgacgtggttatgggtctgaggcgtggcgcaatcgcaatgaacaacacagattccggtgacggccgtaaggctgcgtcgccggcgcaaatgaccgagggacagcgcggccacaatgtctcggacctatccacggcgtgatcttttcaccagcgagctcaatccacagaccggaagcacgaattgtggcgatcggcaacaatcacggcggaggatcaccgacggtggcattcaaggatcctgttgatatttgtgtgcactgtaccattgcgatttttcttcagaacaactgactgagcatgtttggggtcaatttgctccatattttatgtggtgacccaacc

SEQ ID NO: 28137 - DNA, 406 bp, Zea Mays
gcgtcgaatcggctgcacgccggtggaactccgccgtggggaggtcctggcgccgcctcaggccggtgagggaagggggaaggtgtgctagccgtccgttccgtgattagtggatgggattgaatcggctaggtgagctattcggcgattgaaatcaggatgttggtctgttgatctacggccgagagcggggcatgctattttaaatcgagatcgtggatcttagatctaacggctataggcacataccggttcgcgaggcttgggatctaatccgggcggttagatcttgatcgaacggtcctggtcgaggggtaccccttcggcttggaaactttacatatgaaacctcgatcttctaatatatcaacccgccgtccacctcgggtcagggctgagtctggta

SEQ ID NO: 28138 - DNA, 512 bp, Zea Mays
aatggaccttcccactttggctccagcttgccccgtgactctgtccgggtggttcggacgagtacgaggtctccttcgttaaattctcttgggatgactgcgtggtcgcgttaggccttcgtttgagcttgatatttgttgagggcctgcagggcgaagacgcggtctccgtcgatgaggtctttggatgttggttcgtcgacgtcggggacggctgatgcacttgttcgaggtgacccgtgctttatttcttgcgaggtcatggcctccgatccatatagtagtcgaaaaggagtgaatccagttgcccgacattcggttgtgttgagtgcccagactacttcaggtagctggtcggcccatttatccttcctgtcgtcgagaagcctcttcttgatggcagtgaaaatcttgccgttggcgcgctcgatgacgccgttagattgcgggtgatatactgaggcgaaggcaagcttggtgccgatggagaagcagaagtccctgaaatcctg

SEQ ID NO: 28139 - DNA, 429 bp, Zea Mays
gagagatgttatggttgggcaccactataggcaccgaccacaagtcacgggcgggcagagagattagatagggcttatctaatagaagagcgattatctcaggttagttagatatagatgagagattatctcaagttagttggatatggattagaagagatctcagatctcttatccttagatcaagataagcattggcagggatataaatacttgtaagtggtcgtctaatggaatcaagcagaagcaaccattgttgctacctgcgcccagcagcccctctcgcctcctctctgttctgtgcagcacccagcagtacctgcgcccagcagcccctgcctcctctctgttctgcaccaggaacgccccattcacggtgtcccgacgccgggatctccagcccactccatcatctcacccctattctct

SEQ ID NO: 28140 - DNA, 297 bp, Zea Mays
ggcatgttttaaatgcaggcaggtccgacattatgccaacaactgtcctaacaagactgcttaccctactccgactctgatgaatcagagccaagcctcattaggtaaaagccatcccttatttgtcaatcatgggaaacaaaacttctcacatagccaagtcaaccatgtggaagcacaaactgaccttgtagagccagaagactaggaagagatggcgggagaaagtgaagaagctattgagcagcaaaattagagtctttgacctttgtaataatctcgaggtcgagattctct

SEQ ID NO: 28141 - DNA, 371 bp, Zea Mays
cacaaccacctatgtcaaaacacatgcgtgaagaaattgcaagcctgcctctagccgccttagcatttgtgcatcctggcaagccccaccacaccctctaccctgagatagccttgtcgtgcacgccgagctgctatattaaagtgtcatgttgcaaaccttgaagtgatgccttagtgcagaaagccactccagcaagacctcgcgcacccgcctgagcacacaccatccacttgtcacaatcacaactaaatgaatgctccaccatgagccaagttaccctaccaatctcgggatgttgcaactacactgtgacaacgtcgccgctcacagtacgtcagtcaagactctccctccattataaactgtct

SEQ ID NO: 28142 - DNA, 284 bp, Zea Mays
gacggtaagttatggtcatatgcttgtgattgtactgatactatggttcactactataggttgggtatatttgatttgtcgattgactctagggatctaagatatcgaggacgatggttcgtatcatcgtcgtcgcaggcatcacgttctcgcacctccacccagggacatgtagattgcagtgctgaggcaacagtcagagtgtcagagggaagtgttgaggcaacatgtggagtatcagaggcaccagagatagaaggacgagcactatgcgaacgtctcgg

SEQ ID NO: 28143 - DNA, 684 bp, Zea Mays
agccaacggtatgagtacaaccaagaatggagtcacgtccaagcttacacgcgataaagaagaggatatagccaagggtgaggtaagtaaaacatcactctcaaattgagataggagattggagattttagataacatacataatgtaatcaccattgtatggtcgagggatgggaaaggtaaaggtgataacaaacagaagtaggcaaaggatggagttaaaaactcgcaagcgacaaagaagatgatacgtccaagagaaaaataggtaaaacatacaactctcagattgagatggaaatgacgggattttaaagggccaaaataagataaacatcaaagtaagatatagaggtgataagggcaaaggtgataatgatgaaaagcataatccatggacagagttaaggcaagactcacaaagtgatgaagtggagaaaacaatcaaggaaaagataagtgagattttgacataagagttgaagtaaaagttcattatcaaaggaagttacaaggaattaacgagatcaccaaggatgtgcaaaataaaaatgactgctcatggattattaggaaacaagggtgaacaagggcatgttaactgaaatgtcttgaatagtcattggggtatgaaggtaagcatacatgaaaatatgagagtacgcaagattccaaggatatgag

SEQ ID NO: 28144 - DNA, 442 bp, Zea Mays
agtaacgcgcggataacgaccctcgatgaaaagatctcaccacggatgaactcagagcactgtggccactctgtcgcccatccacttgcgctggcgacgtggccgaccggccgtcgtcgaggtatacgtcgttcgctgtggtcgcgccacgccttgacccttttaccacgtcgttgctagccgtaatagctcactagtgaccgtcgtagctcctcaaccagtgaatgccacggtagaacaccgcggtgactcagtccctctctccggccgccagcacacttctttcaaattgggcgccaccgccgttgaactctataaattgaagcctcagagaactccgccaggtcgtcacgaagccagagccccctacctccgattagccaccatagtgccctaatttctttcttcccccaaatctgctttccgcgccaccgtgaacgcc

SEQ ID NO: 28145 - DNA, 618 bp, Zea Mays
tcctgggacctcaagaggtgcacccagcgaagtgggaaaagcctccgagattacatccaaaggttttgccagaaaatgaacaaacttcctaatgccaccgacaccgacgtggtgagtgccttcccctacgttacaaccaatgaggcactcgtccatgaacttgggcgggggagaccaagaacgattaccaacctcctcgacatagtgaccaatttgccaacagggaggacgcagtaggtgcaattttttgcaatgccagcgaaccaagcggctagaagagggagcgttaggagcaccccaacaggcgctttaggaaccatcacccctggcatggtgaataagaagtcggcaccacggatcgcccacctagaccaccggtgaagagaagtggcgaccattccagaagctgatggactcgtcgtgccaacaccatggcttccctgtccaccacaagctccgggagtgcgaagttcttcatctccaagcccctcgccaagaaagtaaagccagaggagctggccaagccagcggagcaggaggctcccaccgaggatttccctgagacaacagggtgcctcataatattcagtggggccaaggcgtatggcgacaagtgcc

SEQ ID NO: 28146 - DNA, 573 bp, Zea Mays
catttgttcttgttcatcttcagcaggagaattgtcatcttcacgtatgtcttgagctgtagctgctgcatttatgggtcgttttctggttctagcatagctttctgtctgagtctgcgaggaggaaccggcacctgcagcagcagcagtcctaggcaaatttcggccacggggaccctaagttgcacctagagcttcatccacagcaccacaaatgttatcaccatcaggttcttcttcaactcattcattttgccacataaactcttcaagcaacagtggattgcttctctttcccttggaacctagctctcttatatttgtgaacctattatccatcttcttgttgtagcttacatatgccaatttatttagcctctggtgctccagtctgttcctcttttttgtatggatctgcacatggacatagtgacatacattattactcatgtaactcaatatgaactctgaagtatgaacaaaaaaaaaagagtacttactgctgcaaaatcactccagtttctttcacaaccagatgctgagcaacataggcttataattcttttgcaaggc

SEQ ID NO: 28147 - DNA, 503 bp, Zea Mays
gatggggcagggcctgggcaagggcggtcatctgaaatatgccttgctgtacccagaataggataaggaggaaaagaattcaggccatttactagctgcgtgtctatctgatgacttgctgtccagtggagatttggccacagctgctactctcctgtacctctatcctacatggggaccatgcaatggaagggtggaacatgtaaactggtgttacccggtgcggtgtccatttagcccagaaactccatccctttttagttgctggccatgaagaaatatgacgcaaaactgcacttcctatgtcacagttgattccgtgatcatctcaccacatcacaccaatcccacacatctagtttaagttctaaatcctccacatccctctgatcccactgagaaaccttgaacccacggtgggtactgaggtcagtgaccacgacggacatttttccccctcaccgtggtcaggttgctctatggtataacccgcttgattggcc

SEQ ID NO: 28148 - DNA, 575 bp, Zea Mays
cggccacaaggtgattagagaagtaaattgaatagattagtgtcggtgtttaggcccgacgacacactacaaggtgtactgcatagtgcttttgggagggtggcgaggtcaatggcaactcgatggtttgtgtagggcatgacgaaacacgaaaggttatataggtttgggccgcttgagcgcttaatacccgatgtcatgtgagtttgtggagttgtattgcctagtgtctttggttatagagggttctggcggtggaagatgactatgcctactgagatctatatctccttttcgtaggggctcccccactgccttattcctgaccgaggagaagttgcacgtatgactcagtgaacgtccttagtatacccaccttgacaagagtcgtgtcgacttgcccaaaggtcaatgagtctttagggaatttgcacatcccctgcatgtgcggaatgcgacctagaagccttcatgcccacacaactgccttcctcgtaaccgcattcctcataacctccttcctcgttatgcttctggttacgcccgactgatgtcctctaaaggctatgcccctg

SEQ ID NO: 28149 - DNA, 325 bp, Zea Mays
gaacttcactgctgaagtagaccagatgctgtactagatatgtgtgtccttcctctgcccgctcaactaccaatgcggagctcaccacgtgagtcgtgcaggagatgtataacaatagatcttccgccggatgatttggcgtggctcggcgtggcggcttgagtactggtggcgtggtcaggaactttttcaatgcttctagagcttcctgtgcttctgtggtccactgaaacttgtccaccttcttgagcaatttgtagaacggtaggccctttttgcctaaccatgatatgaacctgcttaaggctgccatgcagccagtaag

SEQ ID NO: 28150 - DNA, 634 bp, Zea Mays
tgtttgcctcccctcggttggggctagtggtggggtgctgatcacttggagagcaaaattggggagaatcgttgcctctcgagtggactccttcagtgtttcagtaaaattcaaccctgctgatggcgaggcttggtggcttacctacgtgtatggacctcaaggacatgacagaaaaattgcctttataaatgagctgagagagatcagagttgcttgtgccgggccttggctcctagggggtgattttaatctcattttcagagatgaagacaaaaacaaccttaatatcaatcgagccatgatggggaggttcagaaggtgcatcaacgatttaagcatcaaagatattgaccttttaggtcggaaatatacgtggtctggcgctaataatgtgcaagtcaggctggaccgggttttctgctcttcggattgggaggaaaaattccccaattatctgctgcaaagctcagcttcagaggattcagaccattgccctctcctgttgggattgaaggacaaccacacagggaaatgaagatttcattttgaatccttttggccctggtttgatggctttctagaagcggtaactaatgcctggggttctgttcagcagtcctcttgtcccctc

SEQ ID NO: 28151 - DNA, 567 bp, Zea Mays
cccacgcaccccagctcccttttgagcaccgcccacacctgcactctctcccctgcctcactacgcacaagctcacccactctcgcgctctgctttcgcctctcgcgctcgccggagttccgtgcccactgtgccagctatctagcccgttagaagctgcgccaagccaccccgagctccgtcccgaggtgaggaacatgttcccgtgcttggtttcccttattcgcgcctaaccttagccaattcggcctcgccggagtttatctatgccggtttgccgcaccccacacggtgattggccaatttagccccgtcctgtgcccctgtgttagcccatagcactcccctaccctcgctggagctagtccaagccttatcgcacccgatcgcccctccccgtgcccgggattcttcaccagagttaccccaacccgcctggagctctcctctccgccgttcttccacctttggtcccggtctcatggccggaaccccaccagtgagttcgtcgggttcttctcgccgatcctggccaacctcggtgacctcggaacccatgtagctcac

SEQ ID NO: 28152 - DNA, 387 bp, Zea Mays
tgttccagcaatgcataaattggaatgacttgttatccttgtctctagacttaaacagagccattgcttgaacaatctgcaggtgtcatgcaaataaatcatccaatgttgtgtgaaacatatgaaaacaaagaaaaataatacaacagttaccttgtcttgcaaggttacaccactttgccttctaccttcgatatctgatatacaagcacagaacttgtttactgcctccaaaatagaaccccatcgatgagatattgaactctgtgatcgagcagaatcaaatgtcttattggtgtggaagtaattataaactctcttccaaaatgtaccacgagtctgatttgtgccattcacagcatccaaactaatgtttagccacgcgga

SEQ ID NO: 28153 - DNA, 473 bp, Zea Mays
cggctccaaaggaaaatggccacctgcttagatcttacttacagcagagctgtcagcacggcgctggcagtagaagccaagaatacaggccaaggaaaatcaaagggatttcgaggtgataggtccaatcaaggacctgagaagggaaccaggttggtaatccgaccgtttaatcagaatcgttgttcgcctcgtccaccctcctatctgttcaaacaacctattttcattcatcctaccactgcgcccacttctacaaatcagccgagtgcccctggtgctcgtttccccgccctccctagttcctccactggctgcttcaactgtggaaagtctggtcattttataaaagactatccatatccgaagcaaaataagttcaacaatcaacagaactctgggagctctaatcaaggcaaagggaacatggctaataattcagtgggcaaaaatgtcaagaagactgagcgaat

SEQ ID NO: 28154 - DNA, 623 bp, Zea Mays
tgggtttccacccaagggaccaagcttcaatagaccagctggacccactccgtcacgtttcagtcagcagagtcagagctctttttagtctccctcagtcgcaagcaaccaaccaccagcaaatgcctgttagcactacggagaccccagtcacttcaagaataaatgcccccagttgaaggcatcagggccgacttactccaactcagtgaatggccccaaaaattccccagcgcccgcctccaaggcaccctcctccatcagccagcagagcaagacccagtatcatggcagggcacgagtaaaccacgtcgatgctcaagaggctcagcaagctccgagagtagtgctcggtgagttccttgttgaatttactcccactactgtactttttgattcatgagcatcccattcatttatagccactagttttgtggaaaagcatggcattccctctacccacctagaaattcccttccaaaccccagggtcagaccttttatgccagctcaaatgctcccaagtcagaattcttttaagtggggtagtgttcttggcagacttaactgtcttgccatcccaagggattgatgtgatcttaggaatggattggttaaccaaac

SEQ ID NO: 28155 - DNA, 440 bp, Zea Mays
ccgcacttggataaggccctcgcagacagactctggccgggacggccgcaatcagcagcaggtgcacaacatcaccaaccagccccccgctggtgaggccccttgccgccaggagtatccccgttggccgaggaaatggaactcgcggtcgaggacaggggcgtgcacagcagccacgcagattttactgcctgttccacggcgaagactgtgcgcatccaacaagggactgcccagagacgaaggccaccagagacagaatggcacgcgcacaactagccgacaaccctagaattgtcgtgcacgcatatcagcaaccccctcagccatacaaccacggccccgctccgcctccaccgcaccacgcataccaacaccaccaggaggtacaaatcgtacctcccccaccccacccccacaccatcaacagcaaaacatcc

SEQ ID NO: 28156 - DNA, 744 bp, Zea Mays
aaaattatatgcggttttctgcaaagtggcatggcgaaggggtatgctcagatgagggccgttcagatccaatccgaggaccaagattagaccccgcactttacgagtcggtacgaaactatgcccatctgatcccgatctaacggtaagcgtttaatgaatcctaaagttgttttccaccgtaggatcacacatccatgaccaccatttggccggtcaacgcgacacaaggcaactaatcccagccgttgaagtccggatcgacagtccctgagccatcaccaatctcatgaccacccctgacggcacccaccagcccgcggcggcggagttcgccggagaccacgccccggcacaccagtgcactcaattcccatgcgaatagttctacaggaaatacaatcgaccgcgaactttaaggtgaacctattatcggtagtgatgcaacaagggctcccatccacggcgaagtgcggtttacggtggctggatgtttccggcgaggaatcccggaggcgttagctatgtttcctacgtggcgcgactttgactaccttctatcaatccttgggaaggctcagagagtacctcgatagtccggtcgaagcagaggcgaagtatccccgcagcggcaccgtgatagcaccccgctgccgcctccatggtttcgctggtagttcgtgcgttgcaatgcgattgcggtgtacagaagggtgagggggttttgtcgtagctcaaatttat

SEQ ID NO: 28157 - DNA, 531 bp, Zea Mays
tggggacactattttgacaaagtccagggtgctctgcacaagatttccgggccaaactgtaatagttttcaacaagcgagggatggcgggttattttcaagcttcctcgaggactctttagcaaaaagacccggccgaaggggtatccaacgaccctggccgttggatcagagatccatgacccagatcaaaaggtatcgtggctgattcttaacggtctagatctagatcgagggtctggattcaatctcgaaggggtatgcccacgatccgatcccagccgtacactctacatcctacgactcgcacgaatttcccccaaccctctcttcttccccaatcagcagggcggcgacgaagcagagctccaccctgggagctcgctggatttcctccgcccagcgcactggcgtcaaaatccaaacgcgaacgatgctaaacattggggaaagaaaggcgaagtgatggatagtatccttaccggcgatcggagcgatagtagcatctctgcatctgcccacggcgacacac

SEQ ID NO: 28158 - DNA, 518 bp, Zea Mays
tttttgtttcatactttgatccaagtattttgaaatgatatatcatgagttcacgatcaatccttatggtatcttactactcatgtagttgcctatttttgttataccttacaggtcataaggaatgaagcactgttacttcttacttatttgactcgggatgcagaggttaaacctgtctaatattagatgttgatttgttatgttactggaattttttcaacaccccattttataattaaattagctttaattctcttcatttcaggaaattcaaaaaattgttgtatttgagggtgtgtttgagaagatatttagcattattagagaggagggctattccgatggaggtgtagttgttcaggtgaaaaattgcttatttgtgttctttatttgaaataggatgctattttttttagtttccatataaaggttttaggcatataaaatttagttggtgctaatatgttccttattagagcaggattgccttgaactgttaaataatttaattcgac

SEQ ID NO: 28159 - DNA, 398 bp, Zea Mays
gtttgagtttgataaggttgtgtcgaatgatgagctcgtgggggcaagggcaagcgtggacaatcatgagatttcatctaacttaagcatggttgaatatgaccacttgtaatgtccggccttatcagagaagtacatctccatggccatggctgagatttttgtggtgcttaatgtggggataaatgatatttaatcagtggtccggaactgcctggcaaatccatacggaaagaaggaaggtggcttatctgaattagttggaacagaagcacaggacaagtcacatgtgtgcacatggcttagagacccacatctgcatggacttccaactggatttggctatatgcattgcaggtgcaaacaaaactttctgcaagagctaaaggacgaactag

SEQ ID NO: 28160 - DNA, 307 bp, Zea Mays
ggaaaatgcaacggctatgcttcttctttgcttgacccctaattctaaccctggcgacaagaatccctcaactaattgaacagttctaggtcgagaactctctatccacggggatggcgcacaccgagaacaatccacggtattcccggtgatctagcgtggtctagttcaattgaccgggtcgctaagcatctatatcacacagggatgttgaaacgagagcaaggaagacaggaatggacctgtagagagctagccacggtgagctcactcacggtggagttttgactgatttgggggaacttca

SEQ ID NO: 28161 - DNA, 600 bp, Zea Mays
aatttactgaggctgatcccaatgggtgtgaccaatctagtgctgaccccaatgggtgtactgtccgtgttgctgatgaaaatgaggaggaagaagaagaagaaatccctctgatttggaagaacagtcggcgctacataaccagtggggaaagtagtggagtgccttctcctgctttgtctgctctcgttggtctgcaagaattatctctggcggactttgatcaaactcttgaagacatggttctagaagatctgttatcagaaccggcagatggtggcacgatggatgtttgtgttgatgtgctcgacgccgggttggggtcatcccgggcagcgtcccacgcctcatcgaccttggagcgcggtcttgagggtcaggaagctgacttggattgtcctgctcccatggaagtgactgagggaccttcagccttagaagtggctgctgcagagaactcagccctcaaggatggtgttggcgcccacccagcccccgagggtgttgccggggatgattcggctcgggtgggtagcgcaagctgcgacccagcccccgagggtgttgccggagacgatccggctcgaatgggtagcgcaa

SEQ ID NO: 28162 - DNA, 381 bp, Zea Mays
atcctctcaatgaatcagtactacctgcgatccctcggattacaaatcgacggcgcacggctaatgtggccgcgatccagctcccaccgttgatctgtctacgtgcgccccggatctttttttacaagggtatgggcagatctaatcatgggcgtcggctgaggatccagcggcccaggggtttcttctacatcgtgaccgacagactcacgccccacaccacccatggtggcgacgcacggcggagatatcgccggcgcactactgtttgctgccccggtgcactaccactagttccgttgatcgcaaaatgaaattgacacgatggcgagtccggtaaggggagttattacgatgctcacgcagcgccgtttcccgtcc

SEQ ID NO: 28163 - DNA, 447 bp, Zea Mays
agtaaaaccagcaccagcggcaccgcgacgcgacacgaatcagcagcccgacaagcgttgggagaagagacctcgcgaagaagtccacgccaccggaccacctgcttctcgcgcccggggaggacctcgtggaggcgaacgcacgctggacgacatcctcgacgccaagtgcctgtaccacaaggacatgcgccacacccttcggaactgcagagacttcaagcactccatcgggcacgaccgacccttccaacctctacctcctcctccgccgcagggaggaccaggagaaccgcgacaaccccagcaacagaaggagggaggaggtggagccttccagcgtgttgacagagaggtcaacgtcatcttcggcggacatggatcgcaggagaacaagagacaacaaaagctcaatgatcgccaaatactggtggcgaccgccggtcc

SEQ ID NO: 28164 - DNA, 435 bp, Zea Mays
aaactccttatctggctgttgctggcatggtcgttgtgtgaacccatagaaaggcattagggcggctgcattagacacatggtataattttaatgcatcactgttctgtgttcacaagctctgttcattgttttggacgggtggataactagaattttcgctcgtggaagtttcaatctggacgccacggatcttctcactctctaggaaatcgatatgtgttctgggatgcctattggaaattatgaagttcatgtatgaactatatgtttggatatgtataatttgtttcccatgaacagcctgaccctagggtgcataggcaagtttcggtttgttggtaacgatagcctcgattgataaatggtgcttagtttttttttgtaaacattaggacatgtcattactttatttgttaatctatattgcatcgac

SEQ ID NO: 28165 - DNA, 519 bp, Zea Mays
ctagtgctgatcatgcgaggaagtatggtgggacagggcttggccttgcaatctgcaagcagttggtatgaacttcagttcccatgcattgatgcattttaaggacacaatattgtataatggtgctcgttttattttgcaattttctttctgagaatagttatcatacatggaactcagattagtaatggtacttatgcatacatggaattcagataagtaatagtacttatgcatacatgggacagagataactagagatacaacagtaacacctgtaactttaggtgtaggttgtaacttaaagcagccccatggcaactgataaaaatgtgtgtttctataatgatttaggtggagttgatgggtggtactctgacagtggtcagcaaagagaatgaaggatcaacatttacatttgtgctgccttgtaaaatccctgtaaaagatgagcatagtgatgatcccgacgaaatgcacagttctcagaatgattctgcaaatagtgatatagaaggt

SEQ ID NO: 28166 - DNA, 488 bp, Zea Mays
gggagcagatgtggtcgcgggggaggcttatcaccgcgcctgtagccgttgcgacgtggccggaccgccggtattgccgtggaaactccggtgacctcagttgtgccacgctatggcttgttactatgcggtagtaaccgtgtcacacttaagagtacaatctttgagccattgcgccggtgaacaccatgcctcctttgcgccagtgctctttcccctctccggccgccgcgcgtctcctccaaattagccgccaccgctcatgaatcctataaattgagcatgccatcagctccgctaggtagttgtgcatccaatgaaccagctctcacctccaatcatcccctacagctccccaatttgagacttcccccaaatcggtcgtgaacatcgtgctgtgtgagctcgccgtggccagcgcgctacaggtccgttcatgccctctgttccctcgttttagtactctggtgtgctcttgatactccctg

SEQ ID NO: 28167 - DNA, 600 bp, Zea Mays
caagactcagactattctgagttggatggcgggttgtttattaaataccacgagggctcttatgcaaagtgctatggccaaaggggtatgaataactactggccgttagatccggaatccgcgcaccaaaaccacccacatcgcgaattaatctcagcctttcgatccccgatcgacgacccagaagtaacgagcccgaatagcttttctacttctaatctgggccgcccaataccggatccacgactcccagcacacatcgccatcctctcatcaccatcgcaggtcctggatctgacggttcccagcgtttcttcctccctgcgccctcctacttccttctctctctttctggcggcccgacgccggtagttcttcccccaacgcgacaagaaccagagcactggcgcgtcggccatgctccaccagagataacccgcccgacacctagcgtctaaatatctagcgtgaatcacggagacaggaagacatttcttacccaagatcacggtgttgccaggcgttgttccgcttcggcgtgcagcaggaggactctccggctagcctcatccgtggcggcggcaacacccttctctcccc

SEQ ID NO: 28168 - DNA, 339 bp, Zea Mays
tggtgacaaaggtttcatataaacagcttcggcacatgcctctcactcttagagtgaaacatttgtttctctcgaggaagactgctatgcacatgaggtggcacaaagatcgtatggacaaaaagatgggttaatggtgcactcgtcagatggtgatgcatggaagtctcttaacacctttgacccagagttcgccagcaattcaagaaatgttcgtatcagctcggcattaatggtttcatgcctttcaatatgaccactacgtcctactcatgttggcatgtcttcaccaacctgtacaaccttccaccttctatttacatgaaatatgagtttatg

SEQ ID NO: 28169 - DNA, 415 bp, Zea Mays
ccggggagggataactcgtatgtggcgccatctcccgagctcagccggagttattcaccggcggccaccgaatcagtcgtttccgccgcggtgtcctatgcaccatgatcctacctcactataccactcctctacgtgctaggcatgcactaaagaagttatccgtggctgcgaagtgatcgccggaccgccgcggctataaatagctcgtgatcaaggacgaggtatgaacatcacacacacagtgggttgaatcgaagccaaattcacgctgcctctgccccctcctctcaaattgattgtgcacggtaaaactagagtcccttacggccgtatagccccaagctccaccctcaatttcacccgagcacgccacgacgccgttttcccccaaatcggtcagccgcaccgccga

SEQ ID NO: 28170 - DNA, 301 bp, Zea Mays
ctagtacctagattatttgatgtcattccgaaaagaataagtaacagaagaacagtttaggaggcgttgacaaatagaagatggatttcagatatcacaggaactctttctgtgggggtcttagtggattatcttcatctctggaatctgatttcagattttgagctgctaccagatgtggaagataaacatatattcagtattgctgcaaatggggcttatttggctaagactgcatatgaagggttgttcactgggcctgttcatttcagtcactatgaaagagtttggaaaacttggg

SEQ ID NO: 28171 - DNA, 524 bp, Zea Mays
tttgatatcttcttttgttccttcacacttttggagtgaagttgtttccactgttgtgtatctcattaatagacaaccatcatctaaaactttctggcaaatccccgggtgaagttctttttgggactcctccacggtatgatcatcttcgtgtgtttggatgtatatgttatgtcttgttaccaccacgtgagcggaccaaattgactgctcaatctgtagagtgtgtattccttgaatacagtcctgaacacaaaggctatcgttgttatgatccttctactcgtcgtattcgaatttctagagatgtgtgtttcaatgaaaattgccccttctttcacaaccagtctactcactcctcatattatcccacagaatctacttctttcatgtgtcttccttccattcctgcatctgaaccatcatcttctaatccacatctgacgttctcattcccataacaccacctccatgtcatcttcttcttactcttccaaaccacctgtcatccaaacctacattcg

SEQ ID NO: 28172 - DNA, 617 bp, Zea Mays
ttttttcttatgtttgtacccagttcggctgcaccagcgtctagtgcgaaaatgttcatgagttcgacaacgcctccacacggtcccttctcacccatggcgcccttctaccatcttgtgtccctacacattccctagaacaacaaggttgagcgtatgattcattccatcaacaacataattcgcttccttcagtttcatgcatccttgcctcctcgctattaggttggactccacatcgctacacatttgttaaaccacctctccacaaaaaccctctcgcaccctaacctcttttttgctccccatggcacctcgccttcctacgagcacctttgggcatttggccacacctactaccccaacctattcgccaccactccccacaaactcgcccctcgctccacactatgtctttcttggctactccaatcacaacggataccgatgtattgatctcccttccaaccacatcgtgatctctctccatgtcgtgtttgatgataatagtttctcgttctctcgagtacagtctcccactaatgagcttaatttttttctctgtgatggactttgtggttgacattggcccacctccccctataggtactcggtct

SEQ ID NO: 28173 - DNA, 275 bp, Zea Mays
tggatatgcaagaaatcttatggcaaggtttggtcctagtggcgctcccttcttggtctctcatttcatctggaatgagttacagtttgtgatcgaggattcccacaagacgttccctatgcgcctcatgtaatgtttatcaatgagcgggtgataggatttatctttccacatgatggtctacatgagactttcagagtagaaaggactcactcctctacctatgttgaccctagccaacatcttctactagtggttgccctagggcatcgttt

SEQ ID NO: 28174 - DNA, 406 bp, Zea Mays
cttcatccgaacttgttttttggtttcactaactcattttagaccaagtttgttttgttgaactatttttacaggatcaccaattcaccccctataggtgctctcacaagcccccgccgagcaagtctgcgtggcaggacgaacgactaaatccctatccagcggatccacaaggaaggaacccgggctgacgttgtcgacccacgacggtcgcgacaagaaacaacgtcaccaaaccatgaccaggacgtacctacaatgccaaaaggcatcagatagacacgatggaacacccccacgtgcacccacgaatatgccctcactgactcgcggggccggtcaactccagtcgtggaggcttcaacatctaagtctctaaagtgacccatacaccggaaaaggacta

SEQ ID NO: 28175 - DNA, 277 bp, Zea Mays
tacacgaagaccaggaaaccatcgaagtccccaaaaactgacaagtccgagatctcgcaaaatcatcatcagaataaccacacaaagacagaacggaagaagaagagtaccataaaacaaactcaggagtgaagcgcgggtacctcataatctgtttcacaaccaaactcagagtgaagtgtgtggggcgacttggaaacgggcgcacagacacactgcaaagtgtatatctagcctcgttgaggtcaagtataggagagagagccaatcatgctcc

SEQ ID NO: 28176 - DNA, 399 bp, Zea Mays
gagaggaaaaaacaaaattatattatctctgaagctagctaactagctagcgtttgttgtgcgaacccgatgcgcgaaaacgtcgaacacgtgcagggatgagaataattcgttgattgacaaacagatgggacttccgatgctagctagtaactgattcttgtccgtgctctgtgcatgctgtgtgctttcacggcctttgagggatcctccatatccatggcaatgcaatgccaatgcaagcttctcagtccggctccacgacctgcatgccggccggccgggcgggccgacgacggcgagcccatcatttcgagccagagagccgcgaaacctgactctgggtacgtgaacgtgatgatggcgttctgctatactcgtatcgatccgccactgcag

SEQ ID NO: 28177 - DNA, 315 bp, Zea Mays
ataagtgactccggaactgcttactcgctaacaataggggaaaatacaatgaataaggacaatccgggcatggagaaaattgattttttaggaccgataatattaggtttctcatatttatgacttcaaatgttggctttgcaaaattagtacttatatcattgacatcttgattaatacagtatcatagtttatttcttgttttctaatccgttttcaaaaatgcttgccatctaagatgaccatcatgtccctgtgtcattaatcgtgtgagtctgatccttgtccgccacaccacattcgtttctaccctcc

SEQ ID NO: 28178 - DNA, 649 bp, Zea Mays
ggccgtgtccggtcatcggcgccgctcccctccgttcatccacgccgcactaatgtgactgcgttactgtcgtggcggggacgtggcaagcccgtaagaatggctatcgcttgacgccgccgttgatcgccagcaaagaccggcaatggttatcaccatggccatggcagtggcttactgcgcctataaattcatcgcctcctcaccctctccgttcaaatcaactgagcacaacacttcatctctaaattgcgaagccgtagcacccgcctacaccctcaattagccaccatagccggagaatcgctcacttcccccaatcatagtttccgccgccgtgaaaccaacctcgccgtggcctgtgcaattgaggtcagttcaaaccttctgctccctcgtttgagtgatctcacatacccgtgatgctcatagacccgcccaattgaactaaaccgtcaccaatcaccaggaacgcgctgggttagccgtagtgcttgcggtcaccgtgggcagggcgctgtagggctgtaattcagaaattggtttggaggaaatgcttgggagggactcaattcggggtaagtcgcttgggggcgccggtcttggagcgatttggcaggtgcgcgagctcgccggagctctgcgcaac

SEQ ID NO: 28179 - DNA, 670 bp, Zea Mays
aacgacgcagatcgactgaccaagtccacgcagtgtaaaccagcgaggcggagctgccgaccaaatcctcgacgagcaagccagcgaggcagagcgaccgaccaagttatcacccgagcaagccagcgaggaagagctactgtccaagtccccgtcgaacaagctagcgaggcggagcggtcgaccaagtcctcgtcgagcaagtcagtgaggtggagctactgaccgaatctctgcgcccacgagctatgcccacgaggtggaaatctgaacccagtgaagcgagcccatgcccaccacgaaagacacgtcttcaccacaccacgcctgaacgtgcacacactgcacaagacaagcccagggggaagaccttagcatagtactcccaacagtagcacgcgtatcgagaaagacgagacaacacatcatagtgagcgtatgtatcgtataggatgggaggagacgcaaagcgtgcgacgggtgaagccacgccatgtacgaccacatccaaggacatactcatgggacctgccatgtactgccactaggacatcatcaacggactcgatataagaaccggcacggaggacggagccaagtcaggggtacatatatgcacaaaaatgggacccagttcgttgacccaggcggatagggctgcctttcttct

SEQ ID NO: 28180 - DNA, 470 bp, Zea Mays
gagattcgtgccgcgggaagagtagataacgtcggggcggggtgaaaatatctagtgtggggtgaatccagtcactggccggaccggccgtcgtatcccgcctcggtcagtcacactggcatcacaggagctcaccattctccggccgtgccacatgcttaggaacattaccacatcacagtgaagcatagtagggagtccgcctatcgtcggaggctttgccacggtgaaagccacgatagcactcgcgccagtgacttcccctctccggccgccagcgcgccttcttcaaattggacgccaccgccgataggttctataaattgctgcccagtgagctccgctaggttattacacacctagtgaaccagccctcacctccaatcgttcaccatagctcctcaatttggaattccccccaaatcaggttttccgcgccgtcgagtctctcaccgtggccagccctcctc

SEQ ID NO: 28181 - DNA, 1104 bp, Zea Mays
accaagttagttagaagaatattctattttatgacgccaaatattcctcgctagaaaattgaatatttacaccatgtgccaaccgcctacctattttgctctgcttggtgcgaaagcttcggtctcctcctgtccgtgtccccttagtcttctgccattcccgctatcgcggagcgcgcgggggtcatgcttgttgcctcacctactccagaggcgtcaaaggtttccgtctacttctcatccaactcttcgatcactttcttgatttttgccacggtggcggtgctggagctgaggtctaaggtttcgaacatgcggtagaagcaccatataagcctttccataatggaattccaaactagaagatggaatatttacagttagttagaagaataatccattttctgatgccaaatattccttactagaaaattgaatatttacaccgtctgccgcccgcctacctatcttgccctgtcgggtccgaaagcttcgctctcctcctgtccgtgtccccttagtcttccgccattcccgctatcgcggagcgcgcgggggtcatgcttgttgcctcatctgcttcagaggcatcaaaggtgcgttgctactcctggcaacttttggtttctcattttctccatggtttcttcctagagctttttccccaaccactgatggagcagcaggtgattcagatttatcgacagccgttggaagagccggacatgttttgggcgccgattgagctcagcatcgcgagtgacagccaccacggactacaggtacgtaacgaggatcgcctcctcgattacacttatccattggtcttcagttgaatctgggcaaaaatgatgtatcgtgagcgatgcctactgacgacacaccgatatgaaaagttgtatcatgactgataggatttgtttgccctgtccacaatatgtatcgtgagcgatgcctactgttctccgtgtgaatggctgtatcatgactgattgggttcgtcggccctgtccacaagttgtatcgtgaacgatgcctattgttgttggccttgtccacaaaatgtattgtgagtgatgcctcggacatcatcaccaccctaag

SEQ ID NO: 28182 - DNA, 636 bp, Zea Mays
tgtacattggttcagagttgtgcttgacgaagcacacatgataaaatcttctaaaagtttgatatccctagctgcggctgctctgactgcagatcggcgctggtgtctcactggtacaccaattcaggtgagaatatgtgtagatctatcggtctttgttagaattccctgaacatatcatgtttatccctaatgcaggattatggagccgacattttactcttatttttcacgcatgtatttgcgtactaggtgcttatgcattcaaatttatgaagtttactttactcacagaacaatttggaggatttatacagccttttccggtttctgaaagttgaaccatggaggaactgggctttgtaagtgtgtttttattggttttcattgacgtttctagttgaacttgacagctctaaattaattggacttttgaaattcataatggtttctcacattatttaccactttctatttattgtacacatcacgggagcatttgaggttgtgtagatgattaatttgtttcatagcagtggcagaggattagaacagttattaagggagccaaacagaaagagataaatcataaagaggagttaggaattttctactgcatttacatgttagatttca

SEQ ID NO: 28183 - DNA, 736 bp, Zea Mays
ggctggggtctgctaggcccaggccaaagagggttgggctaggggctgtcgtggaaggggcggttagggctagggtgtcggtggtcggaccgactagggcgccaattacagggccgaccaggcccctaatcgcgggagggtagacatgacgaaggtggcatagagggtcaggggcactgggagcgatcccctagcaaccagccctagcagccgcgacgttagaggtggtcaacgagtagggtagcatccttacgacgacatgagacagaggtggtatgtcggctagaggaaggaggtgcggtcggcgcatgcatgaccaccatgacctagcaatgagagtggggtggagaggagggaggaggtctgtaagattatggggaggctaaactagcgcaaaacaaaaatttcacccctataaaaccaagatctactgctgttataggtcacaagattaccactagacgtgcaggactgcgaaaatcgtctcgatgtagatgaacacgtcgaatagtgtcgtgtagtcgttgatgtctttcatgtcctcatgcggttcgtcctaatgctccaaatgtatcacctctaaggtatccacacgtggaggatgtgtcatgtacttgactgctaggtccatgatggcggtatggcgagggtggggaagcgcgacggctggtgtgctggtgggcaaattaggttaaccataacgatgcttccacccttaatatataagtgtccttat

SEQ ID NO: 28184 - DNA, 460 bp, Zea Mays
ggctgagcctgagatagggacgccacacccctaggcgtgccctcccgtacacccaccaacaagttatcctaaagagtccctagtttaggtagaattggtaatttgctctattatgttgtctccttcggctacaatctatgctttcattaatgaaataatctatagggccttgtgatgtgtgtcgtcttgcctgcctccctcccttttccaccatcgtgcccaggcgcttccatctcactcagcctcaccctggagtccactccagacccggtggccacccccaaaacagtgagaccagcgcactcagccaccatccttgtggagacactggaacagagtccctctgcgcctctgctcctagtaggcaggtccaaggagcagcagtgggactccagccccatttctatcccccgacagcgtccctaagccacccactatcgagcaagtgagacacaccgtt

SEQ ID NO: 28185 - DNA, 386 bp, Zea Mays
caggagcgcgatgggcccatgccgggactagtcgcagtttgggcgtaatcatgttgaggccattcattttcccacacctgacatcctcaaatgcctgagataacttggagcggaggtgtcggatttttctcgggacagtgaaggttgtttgctattaactaggagataagcaggaaaagaatgatcagcatgtacgcaggaagcaccctacgggcatgtatataaggccaaggaggatcccctccattttcatctgattagcatcttacagcttggaagacaccacctgtaacaccactcacatacaaagccatgccaggaagtagggtattacgctcctcaaagcgacccgaacctgctgaaatccacttctctctctgtctctc

SEQ ID NO: 28186 - DNA, 414 bp, Zea Mays
gaaacaaatagagcctaaatcaagatgccaacgcagatgctctccaacgcctcctcatcgaagctgttgtggctctccttcagcgacgacgactttgaccgtagcgcagccacacttacaactccccgcagatctaccgaaccctacaaaaatcaagaacccttatatcgcaaccacacttacaactccccgcagatctatcgaaccctacaaaaatcaagaaccctacacgagagaggagatgcgaaggatgggggacacgacaaacttacgggcaagaaagttttggctactggagaggacagatgccgccagggagattgcagcgccgccgcttacgtcgcctggcgctcgtgtctcgccgttgcttacgtcgcttggtgctcatgtgtcgtgtcgcttggtgctcatgtg

SEQ ID NO: 28187 - DNA, 593 bp, Zea Mays
cagtgaacttctagttggatggttatttaactttacaacaactagaattcagattgcattccttgtttactattctccaccaagctccacgtataagccatcgtaatcggtactctggtcttgtattcgctcaaccatcactttattgttaccaccacacatttttcttgcaacccgcagggacctcataagagctttggttggtaagagtggtgaggttgtgagattctatatagcttcatattccacctatattgttgccttgtcaccactaatttcgcaggaagatggatcctaacgctgagattgaagaatgtgtcaccatgatacaattcaatgagctcaaacaaagcatagaagacaagcaagatcggttggcacaagatcttcagacacttatggctgaaatcagaggtcgtcgtcgactcccagatggtgcaagaaaccataatgaagacggggaataaggtgaaggaaattattctagaagagcaagtgaacatgggaggagaaatcaaggtgctgcacgtggtagaggaagaggccggaatcgaagaaatgatgacaatgaagaatctgaatttggggatgat

SEQ ID NO: 28188 - DNA, 303 bp, Zea Mays
aaaggtttcaccttgcagcacgtggaccgagccaaaaatgaggaggccgacgcattggccaaggcagccgccagaggcgaggccctgccctccgacgtattctaccatgtcatcggcacgccagccgtccgcagcccagagggcctccaaataaccaatgacagcgagggccaccgcatagtcaacctcatcatgaccgaagactggcgggcaccaataactctattcctgcaggggtactatcatccaaccgatatcaacgaggccaagcgcctcaaacaccgaagccgggacttcgcactc

SEQ ID NO: 28189 - DNA, 316 bp, Zea Mays
gttcttactttgttagagaccttgattgcagatgcatcatttctggatcattggtcatttgaccagtttcaagatcttgtcaacaggtcttttgacgatattaaattgaggcagttactcctacaagataagttggttatatttttgcatttactgggttgtgataccaatggccatgcacaccgaccctattcaagcatatacctgaacaatgtcaaggttgttgaccaaatagctgaaagtgtgtacaatcttatggagaactacttcaatgacaatcaaacagcatacgtgtttactgcagatcatggaatga

SEQ ID NO: 28190 - DNA, 273 bp, Zea Mays
tgatcattcattccacctagacatcaagaactttatgaaaggtgtcgtagtgacagaccgcccacctgcaacgatgactggtgccgaaatttgtcaatagatagatggactcgtggccaatacataaggtggttttgtgggatatggtgagcagcatatgtggacacataagtcgggcttgactcggctccctattatgacgacctgctccttccacacaacattgacgtgatgcacactgaaaagaatgttgccaaggcactttgggcaaca

SEQ ID NO: 28191 - DNA, 352 bp, Zea Mays
ctaactcgtaagttttcgggacataaattaaattctacactacacccgatggactgccggttagtttcctcaaagtgcaggaactcttttgcaaaacgatcggaccgaagggtatcccctgatccgaaccgtcggataaaaaacagacgacctagattagactgtcatcttcacgaaccagtacacgaactcaaccattggattagagatctatggccccataacttcctcactccgatcacatccgatcagatccgatggcccaaaacagtcccccgcgaatcgttatggtcaattcgatcctcaccgcacagacccatctaacggctgaagcgcgctccaccgagaatct

SEQ ID NO: 28192 - DNA, 360 bp, Zea Mays
attcagataagtgcaccgttcctgctcaccccgttttcgtttccatctaggaatcaaaattgtgtgatctttacactttcgctaattgtgctttccttcccccaaacattcatgattttgaatatgtccctgttgatagctctcgtggtggtattatcactgcttgagactcctctcgcttctccattatctcttgcacccgaaaaacctactcactaaccacaatcctctcctcgtctatctttgacgccttgataaccattacaaatgcctatgcccctgcttaccaccctatccgccccaccttcgttgtcgagctatctgagctcttcatctcaatgcaagggccttggctccttc

SEQ ID NO: 28193 - DNA, 494 bp, Zea Mays
cgggcgacagaactgggtggatacctaggcgaagaagtgtgtaagggtggtgaatgtgtcagacttcaaccgaagaggaaaagtccaaagaaaatgggaaaatcatccaaaatcaccaaatagtatttataaccagagagactgagtacaggggaggtccagtgatcacaatgaaccaagtcaaaagtctacacaacccgagaagaagaggtaatgaatgggagacgagtatgtcagcctaaatgacaagcacaatagaggccctcaaaatgtcccctactacatgaagaatctaaactgttggtaagcttggtcatgacgttaggtcctgggtggccaagacgacaatgccaagtagtgaaggtggtggtggagactaggatgggaggaggggacgtgtcggtggaggaaggccggagcgtgtagaggggcccagcgctgtcacatcaggcgagaagggtcttggtgtctagatccttcatagaaaaaccaga

SEQ ID NO: 28194 - DNA, 444 bp, Zea Mays
tgattacataataatagaggggttcttttacaaaactgcagtcgcgaaggggtatcgcgaagtcctggccgcccgatccgaaacggacgcaccagattagatccaggcgagttacacatccgcgttcaaccctagccgtcggatctggaattcaaggccctgatttaatgactcgaaggggtacgccaggattcgatctaagccgtccatctaatatctacggctcccacactctcaaccatccatctaatcgtcactgttgaagatgagatcaacgatccaccgtcattcttcaacctcaagcctcccaggctgtgcaccacccgcagcggccagcccctctctccgacagtgcacagatcgtcgccccgcgcacaaccataaaaacgaataaaacggagcgtgaaaaggagtctcaccgccggtgaagtgaacacggccaac

SEQ ID NO: 28195 - DNA, 553 bp, Zea Mays
tcataagcgaaaacaatttaataacgcgcgaaagacgcgtgacgacacgtgacactgtgtgaaacagcatgcgaacggcacgcggaataatgcacacgacagcgcgtgacacgcgcgagtcaacgcgactacgcgcacgaacagcacgatgtcacacaaacgatgtcgtgcgcgaacaacaaacaaaataattaatgaaaagtatttcagttggtattaatcacgttaactaacatttatttataaaagcgcgagttaaagctataaaacagttttaattagaaggtcgttttaataagtatggaatgaatagctaattaaacaatatagacttgtgacatgttagaatacattactaatacggaatcgacgcgactgaacaattaatttagaacgaacacaatatgccgcagcgctaatcgatatcatgtctatactaaccaaacataaacgaaaacgcttcggattgacacaactaccttaatagctatcgatgaagcgtgtaattaaaattacaagttcattctcggtcgaattgttattttaatcaccg

SEQ ID NO: 28196 - DNA, 292 bp, Zea Mays
tcccccgaagcgaattagctcccttttgtcttcgctaaaatagcctagcttcagtaacttagccatatcaccttcggtaatagtagacttcccaaactctaagtggctgggtttagatggcattgcaccatactcatcttcaaattcatcttcttcaacgtcagcttgtgttgcttcggcagcaggtgtgtcctctgatgttaccagcccagaacgcctcattgcttcggagatcggaacagtttcagtggcttcggtctcatcttcctcacgctcaaccctggcagtggaa

SEQ ID NO: 28197 - DNA, 298 bp, Zea Mays
cctagactcaaccaaggggattgaagctaatccaagcaagatagatgcaatacttcaaatggaaccaccaaagtcaagatagggcgcccaaaggttggcaaacatgcttgcatctctcaacatattcatctcaaggtctacagagcggaatataccattctttgaagtattaaagtcagccaaattgtttaaatggggactagcacaacagcaagccttcaaagatttgaagcagtaccttatccacttgacagttctatcaccaccttcaccaggggctccactcctcttatatgta

SEQ ID NO: 28198 - DNA, 386 bp, Zea Mays
ggggaagtaaaaagatttcacgagggagaggatttggtcgcgaggtgaagcttatcaccggcgcctgtagccatgcgacgtggccagaccactggtgtcaccttggtacttcggcgacctcagttatgccacgccatagctctttaccgcgtagtagtaaccgtggcacgcctaggcttgccattttagaaccgttgcaccggcggacaccacgactgagcctccagtgacctcccctctctccggccgccagcacgccattccaaaattaggagccaccgccgtgggacactataaattgagcataccactagctccgttaggtaatcatgaagctagagaacccgctcttgcctccgattagccaccatagctctctaattcct

SEQ ID NO: 28199 - DNA, 367 bp, Zea Mays
gcctcctcggaccggactgagggcgacccaatgtggacgtccatggaagcaggagagagagagagcatgctccaacaccctcgggggctgggtcactgccagcgccaccctagggggctaggtcttctgcgacagccacctctaagactgaaggcccctcagccacctccataggagttgggtgactcggattagcatttttgcatggaagattgccctccaaggtcgacgatgcatgagaaaccacccgagttacctcttgcccagcagaatcaggcagcgaaagtccaccatctgggatctctgaacagatggttggaatgtcagcctcatgaggctctgataaaatgtcttcaggaatgacctc

SEQ ID NO: 28200 - DNA, 304 bp, Zea Mays
aagacttcaggccctgttaggaagagatcctactgaagatgaccccaccatagtctacatggccgtatatctccacacactcgataaccactatgacgaccttttctcccactgcacccacctaaactcccgagtggaaagcttagagcaacaggtcaaggaacttaaaaaggagaaggcgtccctccaagaaagtctcgaaatagcagaaggtgaagaggccaacacgcgtgaagcctaccgaaccctaaagatggattatgataagaagttaaagaagctcgcccccactaagaagatccga

SEQ ID NO: 28201 - DNA, 312 bp, Zea Mays
agaagatctagtcacggtcactaaggcattaagaagcctcctatttgggccatctatagtcttctcccctctgcacgcctccatgttttcctccctccttctgttttttatagctattcctaaaaacctagtttattctctttacatagatccatggatcttggtcataaacatttgttgtatttgtgcaagtaatatatgacctaaccctgactacatatgtatccccttggtatgaaacatgtaagaatgtcttcttcttgcaagtcacatgcatcttgttgtgcagtagccactattgaggtaccaaag

SEQ ID NO: 28202 - DNA, 365 bp, Zea Mays
gttgctctctggtttgatctttcgagtagcagcaaggttagtagcaaggtgtccttaagtagctgctctctgataggacattgcaatagcaaggacacttgtttgaaacctggtggctcaagaagtagtagcaaggtgtcctttcgagtgtggtctgttcacatgttaccgccatgtcatatgatctccaagatcagtagtctagctgagggagaggatgtcctgaagctgagccttcaaattcacaatctgttgactatagagaacatgtattcatttattatttacaagtgtcctcaccccgtctccttttgtaaaactaatgcatatatatctataactacatgtgtcacaacaggattaag

SEQ ID NO: 28203 - DNA, 499 bp, Zea Mays
atctaatctagtgagggttacttaatgctggtacaagggataagtccatacacttaagcctaaattggtgacctagatcaactcggccatacccaacaacttgacctacataacagatctatcttagcctcttgtcccaaacccggatggagacaccaaagagcaagaaggaggagatcaacctcgacatggaagaataggagtcaaatcagatctcgagatgattcaagatttaccaccttggatggagtcttcccttaccaagttcttcttaccatcagctaacctcactctcaccatctctcctcttacctaactgtgtgtctaaacataaaagatacccatgcattttctaattacttgctaaatagtattaaagaaaagagagagagagagactcttaatttttgaatcaattagaaactacaatctcaattacaaaccaatcttggtataatcctttttcttacaaatctcgaggacgagatttctattaagg

SEQ ID NO: 28204 - DNA, 393 bp, Zea Mays
cagcgacaaccacgtactttcgaacctcgatgactagaaataggtacgtggaagacaaacatgtttaaggcatccggtcgaccggtcaaagccatctcgacctttggtcagttattatctaaatatgtaaaaaagaaggccgacccaagtgactggccagaaaagcgacctcactcacttacccaagagcgactacaggtaagatcgattgggtcatctcaccaatcagaggagtcagcacattacgatattcatttaagatccaatgtacctacatggacacctccacccccataccacatgtgtcatataagtatgcatacctacaaccaacttatatcctaaatcaaatgtgggacatgctgccatatccatatgggatgccatagtacc

SEQ ID NO: 28205 - DNA, 550 bp, Zea Mays
cagacataggctgcaacaaattattcctggaagccatttgaattagggaattaaggacatccataatcaatatgaacagtaagggggagagagggtctccctgccgaagcccacgaagatgagagatagatctcccaggaattccattcaataggacttgagagcttgcagtggacaagatctgacaaataaggttgcaccactgctggccaaaccccaagtaacgcattacttctatcagaaaaggccaagaaattgtataaaaaagccttcgagatatccagcttcagaaggatgtgtggttccttgcttgtgtgaagtgttctgacaagatgttgcacaaagtaagaaattatcatgtatgcatctgcccctcacaaaaagcactctgattgttggaaactaggctgggtattaaaggtgctagccggttggcaaggattatggttaccaacttttcaaagctatgatgagacttataggtcgaaagtctttcaccgaactagcatctgtcttcttaagcagcaaggaaacataagcagaattcagc

SEQ ID NO: 28206 - DNA, 380 bp, Zea Mays
ttgctcctaacttaagaggacccaacttagtttgggtaccatcaaaacgtggatgatcatgaacaggtaccttgggcattgaaggcttgattcgataatattcatttaatcatcatgttgaattaagtgttgaagactaataaaattctatcccaatgccaagtcaataataagtgaagtccaaattctaccaaatacaagtgctttattcaagttggttaaattatgaatggattgtaaataagttaagttcaaacttgctattggatgatcatgaggtatataaagtataatatttgttgatcaaattgatttgaatgcatatgagttgattgaattggatatatatgcatatgttgcttgctgtaagatgattgaat

SEQ ID NO: 28207 - DNA, 531 bp, Zea Mays
cccgaccgccactggcggcgccacccatcgaatcgcggcgcgacattgccggagcagtgccccataggcattccagcgcccctgacccaatctaaagtgtgctacacgaagcgcatgctagtatgaacaacaggggagggtctttactgtcactggctgagagttgaagccggtccacgacgataggcggttttcgtggcagttccctacgacggcgagcaattgccgatcacccggtaccgatccctcacgacgatgcgactcgcacgaaaggcgaagactcgacggccctcctcgatcactcctcggggtcacagagtcactcacggttgagaacactggcggcgacggcactagtccattatctgcgtcggtggtgagggcttggggtatggacgctagttcaatagggacgagaagtcaaagaggtgcgccggtacttatacacggagaagagggtcaaagtgattgcacgacccgagctatcccccgcgatttgcgtcccccagcttcggcgcgcgcaattttgtt

SEQ ID NO: 28208 - DNA, 357 bp, Zea Mays
acggaaaaacacgggcgttcacgacaacccagggcggtctagttcaatcaaaggagtcgtgaagcttgaggaggacctaaggacactagaacaatcgaccagagcgcttgaacgaacctggggcaagctggccacgacgagggcaaaccgtgcggtgttcttgagtggattgggggaaatgcgaaattgaagctctctggtggaggatttgaggtgcggacgggtgcgctagctgcttgaatacataacgaagtcgatggtgcactcgatttatagactccgggggcggtggctctcaatttgatcacgacgtgctggcagccggagatagggaagaacacggtggttgtaaccgtg

SEQ ID NO: 28209 - DNA, 923 bp, Zea Mays
gacgttctatgtgattaaattactaaactatattatgaattggttagtataaatcatatgagagaagatattaaagtaataattgattcaaaaagagcaggggctcttatgcaaatccacacagccaaaggggtatcaagcgactgcagccatccgatcaaccaacagcggccatgattagttcaaacatataagcggactggtattcgcgggtggccgccagatcacgatccaacggaccggatctgaactggtgaaggggtatctagacgcctaatctcaatcgtctgttaactatccaatggcccgaggcctctcttcttcccttatttctctctcccccccaccggtgccagcccgatggcactgagcagaggcacgacggcgccatcgccgaccccgccaaaccattggcccgagcaccaatccatgacccggacagtgctacacgaactatggagcaaggtgaattaaataaggtgattctcaccgacgattgggacgcgcagaatcactgccacgaagatgcgtaacactacagtggagaaaggattcctatgagaaatctcgcggtcacctgtgctccacgactctcccaacgctctcccagcaagttccgagtcgatccccgagagctcgtcgccggcggaaatccttcttctctttcttctcctcccatggtttcgctcagcctgcgctcggcttggtgctgtccgctccgacctagcctatctgtagagggggcgatggtgctcgagttttatacccggtgtttaatctgtggttcgccaaatcccaacaaccttgacgaataccccggaatccgcgcacctgagtgacggggtttgttacgcgagatccacggagtctgttggtgctcaccccggttcgcgacgacgaaggagaagagcattacaagtggg

SEQ ID NO: 28210 - DNA, 493 bp, Zea Mays
atcaaagtgaccacggcgcggcgagcggtaagggtgctgaatcccgataggagcgggagaaccaccatcctgatagtggtgcgctacgcactcagcacgcaactctgcaacctccacccaaaccttgcccaactcgtcaagggcgtggtccagctcggtgttgagcgcgacgactaggttgaccatgttgttcagcctaggattgctctcaccaacgggcgagacaatcacacctccagcactaccggtcgaacggtgagggtagtacatcaggtcgaggccatcagctaccgcactgaacaacgagcaatattgtgaaagtgcacgtcgtgtagtatcttgcatggatgcctcggcagtatccctcttagtgatagaataatgctttgacaaggcctctacaccccggagatcatcgtccgaacggcacaccaagcaagtagcctcccactggtctgggtataacccgcaacgatgctgatagactacacaa

SEQ ID NO: 28211 - DNA, 827 bp, Zea Mays
ctaggactcctaaggaaggtccaataaaatcctaagtaacaatatctaatcttatctttaattgacccaaatctaatccaatcatttatccttctaattgatcctatgcattcctaactgacgcctcataacactctcccacccttgagaaacagatcgccctcgagctgtagatgacatggtggcagtatccctttctcaaggatcccatggaaatgcaaatgtgttcatgtatacatgtggacacgcatgcatagcctgtgcaaaacgtacatcacagtacagcctggtgttgtgaggttgcccagactctgattgggaagtacgcattggagctccgagcactggacaaagaactgccacacttactgctgtagctgatgcaagcaggaatggtattttaattagcacaaaggaacctgctgagtgctgactggcttggtagctacacctagtgatgtgggggctgggactgggatcattgaaggcacagggttgatcgctgcctgcgtcgccattgtagtttgcctcaccatgaatccttgcgctgccacctgtagtcgcacagttgcctccatttgagtgcagaagcaggcaagcattgctgtccagagatcttcctcgtcagccagatggcgggaacactcaaagatggcagcaattgtgtggttcaatgatggtgatggatcactggcagcacaagtcatgagaaaggagccctgactcatgataccagatgttatgaaccttagttaatttggggacaaccatagtcaggaaggtagctgggtaaagttggcttggcgggagactagagtatttggggg

SEQ ID NO: 28212 - DNA, 328 bp, Zea Mays
acagtaactcgcacgttaccgaggcatgaccattgactccctgtgctgcatgagctgctgtcattatgactctaattatagcccacacgttaccgaggcaaaaggagataggcgaagaagacaggccgccgccgcctaagcacccctacgagtggtagcgcatcagcctacgccgcaacctacacctgcgccctgctccaattagacggggcaagggcacgaaaagccaagagatctactcgaagaccaagagaagatattcatccaccccaagccaccacttcgccttcgacatacctagcattagatttactaggctaaaactccg

SEQ ID NO: 28213 - DNA, 614 bp, Zea Mays
ttgacgaggatgccagtaccttagctcctactgctaaagaaatgactgcaactggccttgctgacattgatcccaatgggtgtgctccgcctgctgctgaccccgctgaggatgctgttcgtgctgttactgtggaagatgaggaggaagaaaatgacactccattaactcggaaaaacagtcggcagttcgttgctagcggtgggagtagtggagtcccttctcctgctttgtctgcccttattggtctgcaagagctgtctatggccaattttgatcaagctctagaggatatggtcccagaagagttgctatcagagcctgtggatgttgatgcaacagaaacttgtactgccgtgccagatgctgggctgaggtcatcccgtgcctcgtcaaccttagagcatgatctcgagggtcgggatgctgacttggaccgtcctgatcccatggaagtagctgaaggcccgtcaaccttagaggtggtcacgacagagagcttggatcccttgaataatgttggcacgtgcccagcccccgaggatgtcgccggggaggactcagctcgggtgaggagtgtaggccactgcccagcccccgagggtattgccggg

SEQ ID NO: 28214 - DNA, 293 bp, Zea Mays
caaattagcacggattgttatgcgctagtaagtagcgcgtaagtatttttcttctttaatcagctgacagcatctgctgttcagcggtaaaagtatctgcagtgcggtcactgccaaaatacagcagcaaatcagaacgaaaagagaagaacactacagatctcatcgtaacttcagcgtcgcctggagaacttttctatcagaaattttatttcataaggcgaactacatgcagtaaatataaaccaacaggtggctcgctgaagccgaggttcagcacatcagatattgag

SEQ ID NO: 28215 - DNA, 273 bp, Zea Mays
atttttgtgggtacaattccaacttccctaggtaatccttcgagtctagaagccctagacctatcaaacaatcatttcagtggcaaaatcccaagttcttttggaagactttcaaagttacagattttaaaccttgagctaaacatgcttgaagcaagggatagtgaaggctggcaattctttgatgccctggcaaactgtagttccctgaatatactttcagtgtctcaaaatcttctacatggacctataccaaattcgatttcaaatctg

SEQ ID NO: 28216 - DNA, 372 bp, Zea Mays
ctcaggataagtattgcgattttgtcccaatcaggtttattgtttctctgtttaatcatctgaggcaaaggttaacgcttggatcgatcgtggataaaaatttatttgattcgaaaatactcaccaaatcaagtgcaatcctagtatcgtactctgtttagtttgatctatcaacatctcgcccaaaccctaatccttgaaattgaatttggttcgttagacgtcgctttggactatcacacgtctgtgttgcacgtgtctttctgtggcttaacctcgtgacgcgtggcgggtgtaaatttgtgtgtgacagcgcccagattctcgcctgcatgaacaacacgtaatatcgtttctgtgaaatttagtgta

SEQ ID NO: 28217 - DNA, 360 bp, Zea Mays
cacgaatttggacgagacacacggcggccggaggaaaggaaactttactggtgcagtggattcgtggcctctaccgtggcggtcattccggtgatcaacggagaggctagagggagtcacggcgatgcggtggtgaggttgggacacgcggtggacaacggcgatggcacgacggcgatgagatccaatccgagggcgttgagaaaggggaggggtatcacggctggccagggtggcatccagctcaccggcggcaaggatctttactgagtcgtgcttatctaatggccactgcgcacgaatcacggcgagcaacgatcaacggcggcagcacgaatctatgcgcagggaggtcaccgg

SEQ ID NO: 28218 - DNA, 443 bp, Zea Mays
ccccactatcgccactttcaatccccatcaagccgatcgaccgtttactctcttccctaatgttatcaatgacgttggtccttccgttcttattctcggcgcagtttaatctcccctcggccctataaaagcacccgcgcgctgtatcaaagccatcccagcctttccttccgctcctccgcaccatgattctctgcgtgctgctgctatcatgtggagccgctgctcgccattgggtgctcctgatcccgacccacgctagagatcctcggcgacctctatcgtcgacttcctcaccccagctcatagcgcagcgcagcactcgcattcctgctagagcatcaccaccgtcattcatcgcctatttccggtagccacagccaccccgccacatgtgaccatgccgtcgtattccctatactttcctcctctgtcgttttcac

SEQ ID NO: 28219 - DNA, 309 bp, Zea Mays
gaaaactttgaagaaaagatgttagagatcattgcgaggcaatcacttgggttcggggtaccatgtagtataagtcacaaataatacaatgaagaggcacatgtggatcacacttaagaaacaacacaactaatggatgagggcatcttgcttcctccaccatatatagcattagtgcctaagatgatgagaacatttgagaaggataccaacccatatggtgacatattatctatgttttgggttcttagcaaaaagaatgacaacaataatgatgcttttggaatcaagggaaaggatggagaatct

SEQ ID NO: 28220 - DNA, 1554 bp, Zea Mays
ggacgcgcgacaatcggggaggcggttatgagcgcatggtcgagcacgtcgttgtggagcgagctgctccgtcgaggaactacccgatcttgacgaagaccaactaccatgactgggcggccctcatgcgcgtgatgctgcaggcgaggaacctgtgggacgcggtgagtgaaggcacgacgacttacgtcaacgaccggaacgctttggagatactccccaaggcggttccaccagagctgatgggagccgtggctgggaaggcaatcgcgcaggatgcgtggaagatgcttcgactgcacaacgtcggagtcgaccgcgtcaggagggcaaaggcgagtacactgaagagggatttcgacgccttcaagttcaacgacggcgaaagcgtggatgatttcggtgtacggatcacaagcatcacgggtgaactggcggtgcttggtgatgaatacaccgaggaggaagttgttaggaagtttctgcaggccctgccatctcggtttgatcagatagcggcttcaattgagacgctacttgacttgagcgagatgtccgttgatgagctaatcgggcgtctgaaggcagctgaggaacgactcgcccaggagcgcgcagtggccctgccccgactaaatctcacagaggatgaattaattgccaagataacttcacgtctgaagattacaggtgataaaccatcaggttttggtgggggctcgtcggtgtcaggaaatttccgtggccgaggacgcgggcgcggaagaaacagtgggagacgcggtggccgcaacagcggccgtggaggaaagacggccgcgaacgacgaatgtcgttattgcggaaatactggacactgggcgcgggactgcaggaagaagaagcgcgatgagcaatcccacgccgtgcatactgaagaagtggacgaagccttgttactagcgagaaccagcgtcatcgacatacaagagaacctcgacgacgccccggcttcgctggggccgcaccatgtcgttcatctcagggaggacaagctgtacgttcagcttggtgacaaagtgaaggaagaggcgcggtggatcctagatacgggagccacaaatcacatgacgggtgagcgctctgcgttctcctcactgaatgagaaggtgcaaggtacaatgcgattcggcgatggttcagtcacgaccatttgtggtcgcggatccattcttctccactgccggaatggtgaccacaagactctgacgggagtttactacattccgaggctcaccacgaatatcgtgagacttggacaattggaagaaggtggacacaagatcctaatgctgaacgggcgtctgaagatctgggatactcagcgtcggctactggcaagtgtgccacgatcggtgaaccgactgtacgagctggatctcgacgttgcaaagccagtctgcctcgctgcgcaaggaggcagcgcagcgtggaggtggcacgcacgccttggacaccttaattttcgaagcttgagacgtctagccgaagaagaaatggtgcgcgggctgccac

SEQ ID NO: 28221 - DNA, 278 bp, Zea Mays
tgaagtggctgaagatgaaagaaagcaggaacacttcatagaaagactcaatggacctctgcggtatgctctagtggctcatacctttccattgaacacaagcgtgttcagttcaaggacatgaagaggaaggtgatatcccagggtcaagggagcagtagcgttcgccctccttatgttcctgaaagttccctatgcctgggaaaaggatctgaatgtcgcctagaggggagtgaataggcaaataataattatcactttaaaactggaaattctta

SEQ ID NO: 28222 - DNA, 501 bp, Zea Mays
tcgctgccctggtcaatgccaccgctgataatacgcgcttcttgtgcgaaatggtgggcaatcagttcccacaacacggaggcagagctcctcctcaaggaccgtgtgatacgacatacttggaattctctgagactcaaccctcgctcttcatcaaagcagaagaacctctagaagccgatgaatgggtaagagtgatggaatagaagtttgggttaattcaatgcatagagatgcaaaaccactgtttgccgcacaacagctaagagggcctgccagcatttggtgggcaaatttttcagcaatccaaccagctgggcatcagattacatgggaggaattcaagctagcattctgggagcattatgttccagagggagtgctccatatgaaacaagaagagtttatccggttaaagcaagggggaaatactataatgcagtatctcaataaattcaaccatctctcccagtatgccattgaccaggtgaatacagatct

SEQ ID NO: 28223 - DNA, 465 bp, Zea Mays
aaatctgaaaaggaaagtctcgtgtgtcgtggcccctgcagaggagcaggcaacaaacaaaacttcccttgcccttcattgtcttctcctcttctttcgtatcgcggggtgggaagagagttaacaaacaagaacaagcgaggcaggcaagagccaaaacaagagaggtgatgttggaccagcgtgcaaagcgaaggtggccaagcaagcaagcccaccgcgctgtcacaccatctctacctcacgcacgccgtcgccgtacgcgcgcacgcactgttcctgaccccaactctcggcgtcccagctcctgctcttcctccgtcgcctatgatgcctccctgagacgcatcagctctgccttcgcaagctggaggtagatcgagcagagcgcctcttcttcatcctctttgtacttggactccagcacagcaaccctccgagacacatcagctctgcctccacgag

SEQ ID NO: 28224 - DNA, 273 bp, Zea Mays
ctaccggcaccattgatgatcaaactcgtagtaggggttacaagtggttgagagaggaaggagaggctccctagtctctttatcggggtggaagtggagcttataagttgtagggtggagtccttgctaagtcttggcttagtggagcttcggcctcctggaattcatcgacgctcctcctcctcctgttcgtccttatgggttcgtgtccgtctgaaggcgtccggttgccccaagagctctctcctttcgatgcccttgcctagaggctag

SEQ ID NO: 28225 - DNA, 318 bp, Zea Mays
ttcggggtggaaaattgatatggacatggacagtggatttgaggaaacagaaacactattgcagaactcataatacaccaaagcctctttaaagcttaatacacagacaagttaggagtcaatcttgattctttttcaagacaagagaaacctatgaaggccagatgaagggaaaagtggatgattttgtgacatggcaattttactaagtcgagcaattaccctaaagaaacaaagtggttgtacacagtttctccaaatagcattatattagaagcacactacggcatatacataacagtaatgtgtatagcaggt

SEQ ID NO: 28226 - DNA, 435 bp, Zea Mays
aggacccatatccacttccacgaatagatcaaatcatggattctacctttgggtgcgacctcttgtccttcctagatgcttactctagttttcatcagatccagatgtctaggcaagataggaagcatactgcttttgtaactgtggatgggctttactattatgttgtaatgccttacggcctgaagaacgccttgccaacatttgtacgggcgatgagtaagacctttggtgacctgattagggacaagatagagatatacgtcgatgacatcgtggtcaagactaagagagggtcgaccctagtggaagacttaaccctggtctttgacaagctgcgagcaacgcgcacgaagctgaacccggaaaagtgcgtctttggtgtctccgcagggaagttgctgggattcttggtttcgcaccggggcattgaag

SEQ ID NO: 28227 - DNA, 405 bp, Zea Mays
aagatctcaagcactctagtttaccaaaataaatgaacacgatattccaacactcaaaactatagatctctaaaacctaactgtcatatgaacacactttagtatccatcatagcctttgatgtgatcttgaatctcttcataagataagtttagtgtataaaaacttaccaaaacctgtaacaacctttgagtactttaaacactcaagcaagttaagaaatgtatagtcttcacccttaaaaccattggaaaaaggtttgatcgattttatgcatactaacatattatttgttgggtggtcctcgatactgtatctaattgttggtcttgaccattgccaccacttttaccttcattgaatgatccatgcatcaagttgctcctatggtgcactatatcaatt

SEQ ID NO: 28228 - DNA, 533 bp, Zea Mays
gggccgctctgcaccatggactggcttcaactcgcgatatgagccggtaatagcccttccctgctgttcatagtaccccgcacttcatctagcatggttcgggttgggtcctgggcgtcgggatgaccattgggacgttgctccgacgatgcgccgccgtgcgggtcgtggtctccgtcgtgggctaccggcagtgtctgtgggcgggaccgtaaccgttgatctcggtggcaacggtcaggattgggaccgcataagcggttcacgttaggttgatctggggcgtagatcatggatcggatggatctgggctgatctccggggatcgatgatctcaaccgttagtattagatctggcgggtgttgtgcgatccgtgcgatgcaaaacctgggtcgttggatctagatccaaaggcccatatagcgtaccgattcgttataagtgagataagatcctggcgcttgatgtgtgatcgggcggccgagatcggcgcgtaccccttcgcgacgccagatttactaaagagtccccc

SEQ ID NO: 28229 - DNA, 342 bp, Zea Mays
agctcaagcataccagccacgtgtttgacccgggatggcatgccagagcgtgcccaacccgtgtgcgcgccccggcacccacggtcggccacttcccttccacttgcgctcgtgcttataaaggccaccctaaccctcaggcaatacctctgacactcctccagcctagtgccaagctctacccgagaccttgtcaaatccggtgagctcagcgccccaccattgcctccgagtgccagccaccgcaaccaatcgacccaggtcatgttccatcccactccgttgctctgaaaacttccctagagcattgagaggaatcaccaagctatagcacaagctaag

SEQ ID NO: 28230 - DNA, 374 bp, Zea Mays
aactacggtgaaccaagcagcagtgccacaccccgacgacgacaacacgccggagcggcgtgtccctgcccttttccccatctatttcatatacgaaagatgctacacgaacgggtaacaacggcgaatctgaagaggagaatcacactggtgatcgcgcagcaccacggtctggccacgatcgcactgagttccgcggcagcgccacaagtccggcgataaattcacgatccatgggcgctcaaatgaatacaatgttcggtgctaagctatgaggggacagaggtgaaggcgtagaggaaaatctcacacgaggaaggcagtgcaagactccggtccacgcgatggcgcattctccgccatggttccaggaa

SEQ ID NO: 28231 - DNA, 318 bp, Zea Mays
caaattatgaagtgtcttaccccgctcttacaaggttcttaccagcactgcaggtggcaaacggtgaccggtgtgactgtccaacgagcgtgggtgtgattgcaaaggagtacctgttctgctcgagagaaagctagagttctgggaaggctgactaaatatatatatgtggcacacaagtcagtaacagatagcaatgctaaataagtgttccaagtactcgtcctagttgctggcttagaaaatgtaatagaatagttggaccaaggtacaagaaaggaggtacaagtatatgggtgcagtaagaaaacatgcttg

SEQ ID NO: 28232 - DNA, 343 bp, Zea Mays
tccaaggctagtcattgaaaatcacaccataattgtgtactcactcaatgcagagtattcgcatgtcacactgaaatcttgtgtactcccaagtccaagtctaaggctagccattgaaaaccacacatctatttagtcattggacatgtatagtgcgtacacgtcaactagttgttggaactacctgttgtcgaccattttagtatgggcatctggtgattttaccagcgttacactggatacattcgttgcattatagccttccatgggttgttgtgcaatctctatgagtatcctatccgacatggtatctagtggcagactagacatgtttggtaccttg

SEQ ID NO: 28233 - DNA, 423 bp, Zea Mays
tcaagatatattcgatcaccgccggacagagcctgctgccctctgcctccaggcgggctccaagaatttggtccaggtgtcggaggtggagtccagcaccgggaccacatcggagatcgatgctggcagctctgacactggaatagggctcatccctagcggcaccagcgccatgcttgcctcaccgacccacacagcaatacactggacccggcgcggtgctctgcctagagatcttcaagtgctttcctggtcacctccatcgcctggggacccggtgccgcctagaactgccagatccgctcctccagtttcttctctttctcctccgcctcgagctcgtgctcggccagcatctcgcctcgctgggtgagcatttcttcccagaaggtgaaatccatctcccgcctatccaaggactgc

SEQ ID NO: 28234 - DNA, 453 bp, Zea Mays
gtaccaacagatcagagtaaattgagattgagatgcaacacttttccatgatttcctcttcttttactagagcaaatcttctttattaaaacttgactccctttgcagctctccccgcgtttcacgacttcggcgccgatcacgagctgacgcgtgtctctcctcacgaagccatcgttgggaaccagtgttgaaaccagtgcacgcgttcactcgagtcttggctcacggacgcgaactttctagccttgccctcgacggtggccacacgaacacgacgcctagtcgcccacttcgatctcttcactgccaccatccctctgctcgtctcaccgtcgactgtgtcctatctgtgccgcagcgcagggaaagtcagctcctgctcctgctacgatgcctcgaccccgcgcctctccgcctcctccatcctcctccacgtggttgtgctccctg

SEQ ID NO: 28235 - DNA, 342 bp, Zea Mays
cccaatcactgctactcaacagccaactctttcgcaaccaaatatttcttctggcgttttggggtttgcaaaccgctatcaacattggagttggagcagaatgtgatctgtccaattcttctcttgtcttatttttggcgtgctttgctcttctttccccctatttcctgaggaggggttcccgtcttaatctcttgcgtttagtgtggcttcgaagagttagcagctgccatggcacataatgtgtgggaggcggacaagatgtgagtttgcattttcttctcaacctgttccctagttgatctccgtgaccggactgctttgatcagtgaacaagctgct

SEQ ID NO: 28236 - DNA, 664 bp, Zea Mays
cgacttccttgaccggcgatccggaagcaattgcgccaacaaggataacgtgaactttggggaacttcccaagaataccacctccctacccgacgttgcctgcaataacactgtcttccaaaaataggatataattgcgcaatactgagataaccaatccatacccaagataacatcgaatgcccctaaggaaatcacaacaagattggccgaaaagacctcatcagcaagaatgacggaacacccctgacaaactaaacagctactaatggagccattagcagaactaaccaaaattgggtgacccaacctctgcaccgaaagaccagcccacgacacaaaattctccgaaacaaacgaatagatagcgccagaatcaaaaagagcatgggccacaaacaaatcaactaaaaccgtacttgtcaccacgtctccttgctctctgccatccgcagcgggtagcacataagctccggaaatacccgcagaagaggaagctcccggagtgaaattaacagaagaaccccactgagccgtcgggtgaggcaaacgcggagctccaaactgagacaacataggagtagtcggtgcaggagtaggcgtagccaaatactgaggaaaaccctgcatcggcacgaactgagaagtcccaggcacataaaac

SEQ ID NO: 28237 - DNA, 276 bp, Zea Mays
ccagtggaaggtagagaatcagcaacagaacatgtagatgcagtgagtcacagaaccaatagctcttgcaggtgtagaggccacatggagatgaagtagcatgagcaattgggcctccgtagtcgtagccaaactcctttgagttcctcaccaccagtaccctatcatgaatggcgagcctatgccttcttcctgaaatagtaggcttccacatgcctgtcacgatcatagtaagcacaatgaggatcactatgctcccgtgcgcagaaggagaca

SEQ ID NO: 28238 - DNA, 1133 bp, Zea Mays
ctttattgcatatgtggtcacatcgtggacaagcataacatctgaactcactcaaattactgctcttttctgtcatctgtggggaaagtgtgcgaagtgttgcaagcgggattactccaaagctccatcaatgccttattatagtgaaattccacggattctcttgtttgggcttattggactcgcatattttattgtagccccccttatcctaccatttgtattggtctacttctgccttggctacttcatattccgtaatcaggtgagaacattgcagttattttcagttcttaaaaagtcttcataaatcctcaacatattgtcacgcaacctgcatggattttgagaggttagtgatattgatatctaattgtgttcatgttttggaaggcagatagatctcaaagaaaaaagatatgtcttcatacttttgaaaaaaagaactggaaattgctttattccgcctaagaatttactggatttgattcttctgagttaatatgttaagtgaactaattataaaacaaaatacttgcaaaatcctgacaatatgggcgtaatacataaaattactaacttctccattaatgatgttcatatggaatactaaatttgttgaactaaagtggggtgatagagttagaaacccttggtcaccggttcaggcccttattaacaactcctaaatactacacatgttttctaggtttctaggagtggaatattctcttaccagacaaatacagtattcttcaatctaaaatttgaaatgctctttccaacattgtagttgatcaagcagtgccagcagaagaacagtatatttgttttagaaacggtctagctttgtttttccagctattttgaccagatttttgcaccctgcacatatttgactgtaacttcaaacggtacaaatgcagctttttaatgtatatgcgccaaagtatgatactggagggaaattttggcccgttgtgcacaacacaacgatattctctctggttgttctgcatataattgctattggagtatttgggataaagaagcttccccttgcgtccagtttgctacttcccctaccaccgctgacccttctgttcaacgaattctgccggaacagatttctg

SEQ ID NO: 28239 - DNA, 572 bp, Zea Mays
cttggccttgccttcaggctggcagtgattcacgacctgtatatttgcctatggaggtactgtgtccatgatcattcagttgtacctgaattattcatgttatgttcatagtttcaataaaaatggttgtaggtttgcaagattgtagaagggcagagatactctaagaagcttaatgacagacaagtgacgaacatacttagagcaacttgtaaacgtccccaggagagagagaagagcatacgtgatgtatgcttctagacctttattcctctgctgtttttagaataattattatctcttttggatatcatttttattgacattttttatgtgctgcatagatggttctgcataacaagtatgcagatgataagtttgctcaggagtttggcatcgaagttagcagtgatctagtgactgttccagcccgtgtgctgcctccacccctggtaaaattgctaagttcttttttgcaaaatgtgtgtccatgaatcacttttgttttattatttgaggaataatcaatttctttgttgtatttcagttgaaatatcatgactctggtaggg

SEQ ID NO: 28240 - DNA, 1208 bp, Zea Mays
gtttggcccccaccgttttgaccacgcgtttcccagtcaccgacggatgggctctggcatcactgccactggcgtgtggacccaacgcctcagctcgtcttcgtcaacccatggagttcagaacagtagccgctgagatccgatttctgcgccgtttgcgtgatcggcgcgatggtggctgttgtgggatttaaaagggccaggaccccctttcacctccgtgatcctctaaaccaatgcgtgcacgcggccggggccagttcctcaagcttcctccccaacaactcctccgcttcctgcgcgtgaatactgctggtgccgcaacaaactactccgtggtcagcgcgaggaatccggccatgggccgaacgacgtgaattctctccccgcccggctataagccccaacctcctcctttatcgcctgggtaatagaaacccttctctgttcgccatctcgaatcgtcacctcctcccaactttaccttgagctatcctcgtcgcgacggagtgggcggagcttggcgtgtatctgcctgactggtagaatcgcggcggtgcttgtcattcggggagagcaggaggtcgccgccaccaagtctggccatcttccacgtcgcgctctgccgttgttggtcaccagtatgattttcgggggcgaatagaagaagtcgcgacttcggcgctgccgcagggccacacatcggcgtggtctgggttccctgcgcgttcaccatcggtaagaatcccctctccgagccgccatgattataaacatcacgttgagtcctgcggttttggaatcgagtgttggatccgtcgcatcacgaccaccagggttgctcgtcgtcgggtgtgcgtatcgccgcccaggtgtatgggtcgccctggtaatggcttgcgaagagagagagagtattgggcgtggggtagaagataaccagggaccatccgattggtaacgtacggctgcgattagaacatggatttacccccttcggatgtttaaatcacgatcgttcattgccgatccaacgcatctcgtagcgtatcctttcgggttataactgagtccatcggatctggatcgtgcggccgagatatagagataccccttcgccgtgcccatttgctaaagagcccctgaaaaataaaagaaataacccgcagtccttgttctactgttacctgggtctggtgaatcttctg

SEQ ID NO: 28241 - DNA, 1509 bp, Zea Mays
gcccggagctcggcttcagcactagaacgagatatggccgcttgcttcttggatttccaggcaataggtgaggatccaagaagaatacagtaacctgtagtagaagaacgatcaacaggatcacttgcccatgtggcatcgaaatatgcatgaagctgaagtgggctatcagaggcatagagtaaacatcttgatcttgttcgacgtaagtatctaagcacacgaagcaaatgaccataatgaactgaggtcggtgtggatacaaattggctcaaaatatgaacaacatgagcaatatcaggtctggtgatggtgagataaacaaggctacccacaatatggcgatatcgagttgggtctgctagtggtgtaccatccttcggacgaagttgtaaatgaatatccattggtgtcgcaactgtgcgtgtatcagtaagtccagagcgatcaagaagatcttgtatatatttggactgagatagataaaatccttttggagtctgttgaacttcaatacccaagaaacagctaagaggacccaaatcagacatctgaaattccttactaagatgcttcttgacatgagaaatatggtctgagttgtcacctgtaatcagcatatcatccacatataatagaagtaaagtgcgaccttttggagagacatgaacaaacaatgcaggatcatgttcactcgaagaaaaaaccagcaactgtgatgacagagatgaatctctgaaaccaagcacgaggagcttgtttcagaccatacaatgcgcgacgaagacgacaaacatgccctgagggggtattaacccccagagggggatgcatataaacttcttcatgtagatcaccattgagaaaagcattcttgacatccatttgggagatagtccaagaagatgaggctgcaactgcaatcaaggttcgtacaatggtcatatgggcaactggtgcaaaagtctcatcatagtcaagtccttgagtctgttggaaaccacgagccacaagacgagctttatacctctcaatagaatcatctgattttgtcttaactttgaagacccatttacaagtgataggaacaacatgcgagggtaaaggaactatatctcatgtgccagtgcgttcaagagcagccaattcatcaatcatagcaagctgccactcaagaatcccagaagcctcctgataagtagttggttcaacaattgccacactagctcgtggaaaaccatagcgatctggaggttcaatggtaccacggtcatgaagatgatatccttgattaaaaacatcattagactcagtattgttagtacaagaatcaggtacatgatcagtatcaggaccagccgtaggaatagagcaggaacgacgaatataggtctgggtgataggtggtttggaagagtaagatgacgtggagatggaaggtggtgttatgggaataagaacatcaggtgtggatgtgaaagatgatggttcagatgaaaaatcaggaac

SEQ ID NO: 28242 - DNA, 332 bp, Zea Mays
caagacttaaagcaacattactggtggacaaagatgaagatcgaaattgcacgctatgtggctaagtgtgacacctgtagacgtgtcaaagccatacatttgaaagctgctggtccattacagtcattaccaataccgacatggaaatgggaagacatcagtatggactttattgtgggattgcccaggaccgcaaaaggatatgactctatttgggtgattgttgatcgacttacaaagattgctcactttctaccggtcaagacatattatccggtacttacctatgcggagttgtacattgcccgtattctcagtttgcatggtgtccc

SEQ ID NO: 28243 - DNA, 490 bp, Zea Mays
aagaccactcgcccgtacctgtcatcattgatgtagcgtatggacgggtcgaattggggtttcatgcacttaaatcgtggattaatcttgccagcgttggacctcgccgtgtcggcgtaggactgtgggagggaaggtgctgtctggaggaagacaagtggagatgcgctgagagccgtgtgatatggatgggcggcctagattgacatagccatacgtgtcgtgggatgtcgggtctgcggtcgggattaaaagatgagcacccttcgttcttttaatatgggccgtggatcacagatccaatgggtacgattgcataccggtttggtatgggtaacttctaatctgtgtcgttgaatctgatcggatgacagatattcacccataccccttcgccgtttacgttttctaaaagagcccctggatttctaaataatcaacccgccatccctaatcgttgtaaaaccattgcacttaagttcaaatgttt

SEQ ID NO: 28244 - DNA, 401 bp, Zea Mays
gaaaaccgaaatccttctcaagatcctcagccgagatcaaaccctcaacaattttaaccagaccaataaaactgcgcttcggtttatttgacaacggtttggagaaatgagaagagtaaaaccctaatccatccgccgccatcccaacaataggcatgctaggtttgttttgcttggggagaacgcaccgagcggtattatgcgtttccttgcgacagatctcacaccacaaagaattgaagcactccctagcatgatggccatccataccgcatttttgacagaaaaccctatgcaccatttcattctctaacttcagaatgggaggaggaggggttttaagaataactgactggccgccatcgccggaagacgagatagggatatcatctttgttctca

SEQ ID NO: 28245 - DNA, 378 bp, Zea Mays
gtcatgatcatcccgaccaccaagtgggggttggtcaacctggggaagtaattccgacgatttgccaacacctttttgcaaagctgcatctcaagaacaagtgagactaggtttcaagtttctgcagaatgcaattctcacatgtgtacgattccaactccattttccgtcgcttgagcatctctcttgtgttgagcctgtcatgcaagatcaaccagaaaaacatctattgtttcggctagcatttggagctccatagtcgcgaaaaggtccgtgaagcttgtgaatatgagagactcatcttataagctttatgagaagagaaacacgtggaaccccacgctacccccatttgtcactttgctcccttatatgaac

SEQ ID NO: 28246 - DNA, 315 bp, Zea Mays
gaatcttgcatactcttatattcttatgtatgcttattttcataccccaataactgttcaagacatttcagttgacatgtccttgaccacccctgtttcttaacggtccatgagcgatcatttcatgtcgcccatccttggtgatctcgttgttactttataacttctctcgatagtgagttcttacttcaaccattctattgcaccctcacctatcttacccttgattgttttctccacttcgccactacgcgagtcttcccttaactctatcatttgtcatgacttttgttattatcaccttcaccttagaca

SEQ ID NO: 28247 - DNA, 321 bp, Zea Mays
gccgtgttcccctttccttgatttgagttcccagaagtctgctaaaagttggatttgttttgcttcggatatgggcagtccttgatgaaatgtacagactttccacaattgaagcaaccactggaggaactgggaagggcagggaaacgagcaccaggggcactcggctgattggtctaggcgggggcaggagtgggacgaataaatagggttgtctgagtggatatgtaggtgggcaaggagaagaacggtttggattgaaaggtcggattaccaaccttgtcctctttttaggtccctgagttgatctttcacccgcat

SEQ ID NO: 28248 - DNA, 523 bp, Zea Mays
ggtgaggtggtcaagggtgtaggggaggttgcaacgatcatgtcgatgtgcggatcgtcgccgggaatggtcggagtaggccggtccacgtgcgcaggcgggggagctcatcagtggcgagggctccggcctatccagagcggtagagttaaattaaaccggtaggtgagcttcactaggtgtcaaggaaggcatgggcgtgaggaattgaagaatggttcacctgattgctcggtctacgtgcggtggcgggcggtgatctcgctgttccggtgaggcagggcctcaatccttgcttagagaagcttcacggcttctcagggaaactgtccagaggcccaggtgaggctagaggtctctagaaaaggctggccacggtggccggtgctcgggtggctcgggcgggcggcgcagagctcgccggagctaaggacggggtctggtcagcaggggtatgcgaggagtgcggtgttgtggcggaattgtccgaattatttcatctgaagtactgaaggaaacaggt

SEQ ID NO: 28249 - DNA, 338 bp, Zea Mays
agcaactgcagcaacaaggcaggagggcttatccacagggaccccacgaaacttcatatttggatttctcgaaaacccttcccccactattcgacaaagccgaagatcctctcaaagccgacgaatggattcgggtcattgagcagaagtttggactcctccgatgcacggagacccagaagccctttttgcagcttagcagttaagaggccctgccagcacctggtggggaaattatgtggccattcagcttgctggccatcaagtcacctgggacaaatttaagttggcatttcgggagcactacattccagaaggagtgctccatatgaagcaag

SEQ ID NO: 28250 - DNA, 382 bp, Zea Mays
gtgctcaccggtgcctggataatgcttctgggtaaaagatctttgccacaggataacaccggaggctggccgtcgtacccccttttgctttgcggtcggcttagataagttcaccggagttggccgcccgtcgatcggatgccacttgccttgaagctttaccacatcgccgcaagcagctctatatcactggctcatcgccagtgagtctgccacagtgaaagccactaatcgtttgcgctagtgccccttctcctcttcggccgccgcgcgtctccatcaaattcactggccaccgctcaagcacgctataaattgagcacacccttggctccgctaggtagtcaagcacctaatccagcaactcgtgcctcaattcatc

SEQ ID NO: 28251 - DNA, 361 bp, Zea Mays
ttggacttggcattgtttccatgggttttggaagtaatgaatgacatgcatccataagacgtattttgatattttattgcaatgccctaacagggtttggaaggtatgtcatgttgtgacgtggacacttggttaattttatgattacgagtgaccatgacatggtacacatactttctgtgttttaccaacactataagtctataaccaatggtatacattaatgtatctgatatcctttacctgcacaaagtttggaaacccttcagttagaagttaatggatgtttatggtaaatgatgcaccatatccggtcaatgtcttggagaacatcgtcaacttatactgtagatggcattgc

SEQ ID NO: 28252 - DNA, 472 bp, Zea Mays
gactcatgctctgccctggtactgggtcctgctctgctgactgttggagggaggtgccttggaggtaggtgccgagggaatcttggggccattcaccgagttggagtaggtaggtccgggtgccttcaactgggggcagttattcttgaagtgactggggtctccgcagtgccaacaggcatttgctggcggttggttgcttgcaacagagggggcctgaagggagctctgactctgctgactgtaacatgacggagtgggtctagctggtctattgaagcttggtcccctgggtggaagcccaaagggtcgagctctctggtgacgatcttgctgctgagctcggagaacctggaatttcctcttgaggtgccctttttattcctcttttgccctttccacttggatggctttgtttgagaggtgagagaagttgaggaagtcttggctagcaaggatggtcttaagctcg

SEQ ID NO: 28253 - DNA, 674 bp, Zea Mays
agcgggtgctttggcttcgtgatgacccaacagagctgatggcacgcttaatttatagggctcgagggcggtggctcttgaatttggaatggcgcgctggcagccggagagaggggagagcactggcgcaagagatgcatggctttcaccgtgacgagaccaccggtgatgaccagacatgctaaggcaagtcactgcgatgtggtattgcgcttaggcacgtggcacccgatcggaaggcggccaaatccggcgaggttatctggaccgaccgtaaggcaaggggggtacgacgtccagggcgaaacagtgtctcgagcacatccccaacgtgatattccttaccccgagcagttatctgtacttcaatgaacacgaatcgcaacagcagcgatgatcacggtgcgggatcaccggcagtgatacactgaatctggcgatcttcgtcagatcactgtaccattagaacaccattcagagtacctgatagagcttacttgggggcgatttgctccaaatttcatgtagcaacttgaccattaatttgtatcaaagttgtagctctgtaaaccagctacaaaatcgactatagagacctggctcatttacttactccttcgagcttgaatggagtccaaagtttagcagaactcactgttagaccagtatcagac

SEQ ID NO: 28254 - DNA, 667 bp, Zea Mays
ttttggccccacgatcgaaatcccacggtcaagatcgacccacccttcatcacggattggatggcgaggagcctttcttcctcccccgatcagtacaggcggcgcccaaactcccacggccgcgagcacatcagagtcgcgcccgacggtgctcccaggtccatcaacggcaaaccaagcgcagatgcaagaggggcggaagtgagcataatgggggagtcatcataccctggtacaagctgcgaggtgccctgcgcacgtgacccgcggcccggtggttagatccttacaccggcgagcaatcactgtattatggtggatctcctaggacacccacccaggacgcagcaagacgagggtatggatcgacggcggcttcatcttttctctcccctctccatttcctttgctcgacaccgcgcttgatgaagatccgcaccggccgttctctatctctctctctctccgacctcttcctctggttttgatgctcggctcaacgctacgatctcccagcctcgataccttacgagattgttgaatcgtagagcaccccagccagtattttaaggcgcaaggaggtaggattgaggcgagaaatccgcacttggcgacctccccagacgtccgcccaacctcacgcagacgatagcgattctgttacgtt

SEQ ID NO: 28255 - DNA, 406 bp, Zea Mays
ggagccagagccgttggatcctgtggcggcagtgaggattagatggagcctacctacttgactcgtgcatatcctgaccatccaatcttgattaggcagatgtggtgtgatcgggcatattttagaatcgtaacccttgatcgctgatccaatggctcacattccataccgcttcaatataaactgtgatctaatcctggcctctggatctaatctgaacggcccacatcagcagacaccccttcgttgtgacgatttagcatatgagtcccttggtttaatacaaatgaacccgcagtccaattcggaattaagctgagtctagggaatcttgcgccagacccccctgccttttctggtaattgaggcccagtccagaaaactcgaaaaccagagaaaataaaat

SEQ ID NO: 28256 - DNA, 310 bp, Zea Mays
tgggcatccgatggcttctagctttcttttaaccgtgcgcagccaatcatcagcatcgaggggattgctagatccggcaaacgtgggaggcttgagcctcaggaaatcccccatcctgtcttgcggtcttccaccattcggacgttgattttccagacttcgagtgaggacctcgatgagtcgggtttggttggctagaacttgggctaaatctaagggtagttctggaggtgcggggaggtgggtctcactttcctctctaccggcttctctttcagctctcaggggaaaccctgctccaatcccggag

SEQ ID NO: 28257 - DNA, 331 bp, Zea Mays
cttcgcatcacatcacctgcctagaacggctcaaacagtttgctgaatgaaaacaaaaatgatcgtctgatgtttgatcaagccatgggctgcagtgctgcacgcagttactccctccgtcgaaagttatagttcaacttttctaactctgaccaagttcatagagaccatctacaatatcaaaatgatttcatcaatttcttcgtgaaaaatgtcttgatagtttatttgaacatatacagagggagtatatttttttataaaatacttaggtcaagtcaaagttaaaagaagttttgatttagaataaagctaaagtgaactataattt

SEQ ID NO: 28258 - DNA, 355 bp, Zea Mays
ctggggtggtgggcgtgttcgcttgtgaaatgccaccgtggtgcgcgtggcaccaccgtcattggccggggtgatgggggacttcgcgtagccgtcggatcccgaagaacttccgagattcgatttgggtgtgagtctgggtggaaacgtttttgtgctgccgataggctatctggcggttaggatgtcacatgggttcgaaccgtagatctctgatctaagggtcatgggcgcgtaccacttcgcaatgaactcgacctaatctgatccgctgggacagatcggacgatccagatcccgtgataccccttcgtggcgaccactttgtgaaagagcccctcgcaaatgtctgaat

SEQ ID NO: 28259 - DNA, 509 bp, Zea Mays
tgaggattcaggtaacaatcctcctcaaaaaactctacgctggaccgtccacttggatatgcggaccgtccggtgatatgcgcggactgtccaggtatgtgcacggaccgtccgtgattatacgcagaccgtctattgctgtatgcggaccatccaactgggtaattttgattctgtgcagtacgttgtggctcgggtgcatgtctctgtaattcattaaaaacgggcccagccggtgctagcccgaacggtccacgctcatgtgcggacggtccggtcatgtgcagatcgactaatttattgtcgatgtgcgtaggaggttgggttgcccaggtcatgtatctatcggcatcccataaaggggttgtaactagtcgtgacaacttgtagccgatgaattacgcatgtttcccccaattcaaactcgtgtgaaggaaaatttgcgacagtagatttatcaaatgaacgtactagcctcctataatcgttttgcatatcccctatgatat

SEQ ID NO: 28260 - DNA, 398 bp, Zea Mays
attgtgttgttgttgtgctatcaatgctctttgtggagtttttggcatttcttcgatgaaatgtgtcgcgcagaatgttatgggcttcttgtcggctttattgctccattagttctgtagactttctcccttttgtggggtgcaaagaatgttatattacatgattatcttttcatgatggcaagaacggggtttaggaagattaggagttttgtttcaatagaactacttgttttgtggtgctgtgaagtgaggtgtttgatcttcatatacgttcatctggtgtggatgttttaccattgaattaaaatgaattgttggagttggtaagggttgtgcttagtgcatattaccccttcataaaagagtgtggttttaagacattgatgttgatgtat

SEQ ID NO: 28261 - DNA, 454 bp, Zea Mays
ttcaaatcttatccgacacaactcaacaatatccgtatccgatccgaagagaaaatatgaaaacaaatatggaacgagtaatatccatccatatccgatacgattacatccctacatctgacgatctaaataatcaaatcatcattcaattgaaatcctccatctccaggtgttgcaggtctagatccatcttgatccattcttatttctgaatcagatccaccttgctggtcttgtgaatcatgatcatcactgtcatcttcagcaatatcctttgtaccagcaccaggtgacttccatggagtttcctcttcctagtataagtctggctggctgggatagcagcacgagcagcggcagcactaggaacattataaccaccaatattttcatccacttgaccccaagtaatagcattgacatcagctgtatgaattggttcacaattttcatc

SEQ ID NO: 28262 - DNA, 280 bp, Zea Mays
cccacactgacggacttgcacgagagggttttccccgcattttatgggaagtgcttcagggagccggatacacgacaccccctcagtacgcggtgcagcagttcgagaagcatcgagtgcctcgctgtagggtgaggatgactttggagcctcatcccctgcagccaggatggcgctccttggactccgagtccttcggataccgagcggaggacacgatcgaggcgatcgcgctgcacggattgactactttctgcggattccatcccttggagctggc

SEQ ID NO: 28263 - DNA, 376 bp, Zea Mays
tacttccctcctttgtgccttgctcaggacgaaatcggccttagtccttctccatgtctttccactactatacggcttcatctcttagtttggtctatcacataacactgccagatccactcttgcctttacattatcctttgacttatcaggaatgtccatgattgttgcccaaagtgcctcggcgacattcttttcagtgtgcatcatgtcaatattgtgtggaaggagaaggtcatcataataggggagccgagtcaagcccgacttgtgggtccacatatgttgctcaccatatctcataaaaccaccttctggattgaccacgagaccatctatctgttgacgaacttcaacatcagtcatcattgtaggt

SEQ ID NO: 28264 - DNA, 586 bp, Zea Mays
gcgtggagtatgtggcaacggcggagaggagggggaaagggactcgacgaggctgtgtatagactccaagagcacgggatgcgcggtgtttattaataaacagggtgatgaccaaatcttaacaacttcccctggaatcccaacgaatccaacggatatggcggcaatacaggccactggcagcatgcaagccacccatggcggaagaagagggcccagtcccaggagccccacctgattagccggctgtgaaattggcaacgttggtttctcgcggccggtatacgtataatacttatacggctgtgttaatttgcatgcttatgtcatgctaatgtatggtgacaaaggttatggcaaatctctactattacttaagacattagtgtagacgtccacatttttttggtgcacggttctgccatccgtcgccctctctcctctcttgcgcccccgctctctcgtccgctatcatggaaggagaatcaacacatctagggaaggtccgcgtggttccatggaaggtccgaccctgctctcctctctgctgtctctctcgcccgccatctctgcgcccccgctctcc

SEQ ID NO: 28265 - DNA, 744 bp, Zea Mays
acaccttcatggcctcactctagaatccagcacccgtcctcaccccatttttccctttttcgttgctcccatcttcttcgaccagctgtgcatgagaagtttgccgtcgctgaggagaacttcatcaaagtgtagcaccacttagaggagctagaaatggagaaacaccatctgtcagaggaagtggacatcacacgcatgcaatctggggagcttccttcgcctgggcctgagtccttgatatctagcttcaagtgcttcatggattgagctcagcttggagtggtatcctttcgtcaagggttgagccagaccctcgtcgtcgctacgtgttagactcacgatgtcacgctcacagtttcactccggccagcgtcaaaactgatcgccgccgccgtcacagccgtgttctggttctcagttctgttcgtggtctgaggtctttcccctcggccaagtcaccttattacacgtatgtgtttacagggccacttgggctccaaattcacttggaccactcatctcccgaataacggatgttgggccgtctcactcgctgggctctcctgggcgccgtcccgtgatccacttctccattcaacatccttccagctccttctccatggacgctaacattttccctccctttagaaccagcttgaccccaagctggagcgcggggaaacctccgccggacgtcttgttcttcctcccacgtagctagtgatggatgccaaccactcc

SEQ ID NO: 28266 - DNA, 534 bp, Zea Mays
aagaagatcagattcatcccacctcgccgccggtgatcctcgcgcggtgattcgtgcccgggttaatatgtgtgctctttggtcgtgtggataactgagggagggtaaaagatcggcgaggaaggaatttaggcacgggttcagcttgtccgctatgtccacttgccctgcgcccaagccgagctatcgccgccggacgcaagtgcatgttcaccacatcgcagtaagtgtgcgagactatgacacacgtctcagagcccttcgattacccgcgtgccacaaagaccgagcaccagtgaaatatcctgccgtcgccccaaatagtttcatccaaaattcgtatcatatgtaacttgtctctttaaattgagtgcactccctgctccgcccctctgttactcgctcagtccaccctcaaccacctcccaccatttaccatagcttccagtcacctgaattccctgagaacggtcactagcgccgccgtgaggagcgccaccatggccagcactactccagttagttcatactctt

SEQ ID NO: 28267 - DNA, 603 bp, Zea Mays
ggaagctctgaggtttccaggtgatgttgtgtgcacgcacacacctgcaactcagctgctgcgcgtttcctgggcgactctgtagctgcaaggttttggtctggcgtcgacgacggtcatgccatgtgctactctcgtgtagtcgggttgtttgttaagtcacagtctcccactctcccgggtagatgctctccaggactggacttcaggtggtcaggcacttctcatttacggcttgcttggctcggtatcctttcaggcgctgcttttactgccttatcgaaaagactggagttttgttgccatcttttgcagagcccgaatataggactttggctatcaatgcctgggtggtgagttgggaatgaatttttatttggcttccatgtgcctctatggtttacctttcgttatgtttttaatgggttccttttgaggacctgaatattcgatgcagttacaatgtcagaaacaacagacaagagcatccaattattttaccgcttttattttcatggaagcatccaattattttaccgcttttattttcatggttattccatcttcgggacattatttaagcatgaagtgacttctagattg

SEQ ID NO: 28268 - DNA, 608 bp, Zea Mays
ggaggaggtcacgaagaggacaaggcgaaggaccctagtgggttggagagtgaccattaggtggatgtggtgaggatcgtgatgaagaaggggttatacactgttacccacctaggcacgtcactgataaacatggaaaggttggatgtagcaacgaggagtcgacataggtgagggcactagagagggccccaagggtgggggtgaggtcaaaggagtggacgctaggaccgaaggtgaggccacatgagccaatagggctctaactggggttgatgaggtgacacacgagttggcgaggggcgaagggacagcctagagggagttggggcacaggagccacgatggcactaggccatgggctaaagtggtgtgggggaacctgaatggtgaaaaaaacaatggctgatcagagggcgccacgaagtcaggatcatgaagaaaatccaactcggtaagggaggtagtagtgggatgagaggtagacaagaagggaaaatcagtctcgacaaagttgacgtgacaggagatcaagagacgatgggttgtgaggtttaaagggaaataggcaattaagccatttctatacgttttggtgattgaatgtc

SEQ ID NO: 28269 - DNA, 370 bp, Zea Mays
tggaccaagacctcgttgaacggtctaaatgggtctagaggatggtccagcagtacctaggagcagtgacgaccacataccttcaagccacgatgaccataattaggtacgtggaagaccaatacatctaaagcatcaggtcggctagtcatagccgacccaacctttgatcagttactatccaaatatgtgaaaaataaggttggtcccagcaagcggctagcaaaacgatctcattcacctccccatgagagacgggcatgatctattgagctgcctaataatcatacccaattaatacccaatgtacctacatggacacctccacccccatatccacttgtgtcgtatcaatatgcatacataccac

SEQ ID NO: 28270 - DNA, 296 bp, Zea Mays
cacggtcctaccggttgtggtagggcaacctggagggagtccaggggcacatgagccatgaaaggcaccggtgccataggcaggagcggcgtggggaaacctgcaaggggaaacaaatggtggatgactagatggagatgcagagttaggatcacgaagaaaattcaactcgggaagggagtcgatggtgcactgggagggagtcgaaaaggggaaatccgtcttgacgaagatgacgcgacgggagatcaagagaggatgagtggtgaggtcaaggcataggtaccatttgtgat

SEQ ID NO: 28271 - DNA, 489 bp, Zea Mays
acaaaaaatgctgtctaaattatcaatcaatgttgcagttgtacctaattttgtgctaaaggatggtttattgcgctacaaaggtcgcctctggcttggtaatgacgtgcagcttcaccacagggttctgtctgctctgcattcttctcctttgggtggccactctagggttccagtgacctaccgtcgagtaaagaagctctttgcttggaaagggttgaaaacttctgttcagcactatgtaaaccagtgtcaaacatgtttgcaagcagaggccgaccgtgcggcatacccagggaagctccaacccttaccagtcccttcatggccatgggctactattaccatggattttattgaaggacttccccgttccggtgctgctgattgtattctggtaattgttgataaattcaccaaatacgaccacttcttaccactctcccatccgtatacatccagttcagtggctcattgcttcaagactca

SEQ ID NO: 28272 - DNA, 352 bp, Zea Mays
gaagtacatctaagtgggtattcaaaagtaaaactaacttggatggttcttagagagatgtgcttggtttgagctttttgtatcaatggggctgctggtttcaaacttagtgatcatgaccctgctttatttattcatctcacacccatgggccatggttatactttgcttcttttatatgttggtgatatgttgattacgggtttctcatgtgaagcaacaacttggtgagcaatttcagatgtctactttaggttctctcagctatttcttaggcattgtggttaaacagtctactagggtataatctgtctcaatccaaatacatacaagagcttcttgattgttcggc

SEQ ID NO: 28273 - DNA, 376 bp, Zea Mays
tagaggtccgcctcagtcatccgtgccttcttcgagggcatcgtttgtctatacgatttccccatctccattgtttgcaaccacgaacctgtcctcaccagtcacatgtggcttgacctcttcaagatggtcggtgtcaagcttcgcttgagcacgacgcgatgttccaccctctgacagacggtccgtcgaacgtcgtcaacaaggtgattgttgtgtagctctgttgtgtcacgggggaccgtccatacgtctgtttaattggcttcctactttgttctacatggcgctccacgccatgccctttgggtggtgtagagtcgatcccgctgcctcaggggccactcagataggtaatggatagccttctatgcga

SEQ ID NO: 28274 - DNA, 308 bp, Zea Mays
attcggtagtctcccaacaagaggtcggggtctgattctcccgaatattttgcgatgttggaggatgtcctataccgatgcggtacccgtgctcgaaggatgtggtggctaaaggcttgaggcccaaatggtggcaggctcgggcttcggttcctatcggggtcgaagcggcctccacgatgttggttgttccgatgagtttcacctgacccattatgtacctcctcaccaggcccatggtcaggcgtgctctacgtgcttcggcctggccttaggtggtggggaggtgggacccacaccgcgcattc

SEQ ID NO: 28275 - DNA, 363 bp, Zea Mays
tgcgctaacaacccacctcgtggccacggaccgattccggacctccgcgactataaatagccattaggtccacggcgaggtgttttcatccccaccagcgaagctcagtcgaagtccaaattcgcgaaattccctccaccgttcccaaaattgatagtgcgtggtgaaactatagtcctttacggacgtgtagccttaatcccgcctcccaattcagcccgagaccgctgcggcttcgtttttacccttttctgttacccgcaagccaggatcctccgcgccccgtggtcagctcgtcctaggtctgctcctgcttgttttaatcatgttccagtatctatatgcgcgagtgatgctcatcgg

SEQ ID NO: 28276 - DNA, 455 bp, Zea Mays
ctgggatggagtgtggccatacaaaacctcaaacggggactgacccagtgcagtgtgaaaacaagtattataccaaaactctgcaagagatagccaattggaccactgtttagggcagccatggacaaagcatcgaagataagcttccacacattggttgacccattcagtttggccatcggattgggggtgatatgcgctactgaggcataattttgtgcccaccaacttaaacaattcctgccacaagttactggtgaatattggatccctgtcagagatgatagacaatggtaggccatggagtttgtagacctgtgataggaacagcttggccacagatagagcagtaaaaggatgggacatggctaggaagtgagcatattttgaaaatttatctactaccaccaatatgcagttgaagcgtcgggatgtaggtaatccagaaataaaat

SEQ ID NO: 28277 - DNA, 455 bp, Zea Mays
accagatgtacgtactccgagctgggttgagtctccaagtcctatggaggtaacggaggccagagttctgcttgctgagatctgtctgctgaagaagaaaggtctgactgtcgaagttgtggttgccgatttcgtcttcaagaatatccagcctttgaaggacagagcataccctgcatatctgtacaacagcatcaatgatggcacccgggtgacaaacaagagaatccccgctgctgatctgctaagccgactggatatgatcctgaggggcagagtttcgaatgttggtgctcctgttgcttattctgcctggaacctaccatctcataggtcctttttcgagtttgtgtctaatcctcctgcccgtgatggtggtctgggtcttagagtgcgaccctcccctgaggacattgaagctttaattgccccactccggagtctcccagagggtg

SEQ ID NO: 28278 - DNA, 272 bp, Zea Mays
aaaggagcatgaagacatcccttcaatggaaagcaggcagcatgaatgatttcctgccaaatcatatcaaagacatttatactctctgagctgctgggtttcatgaatgagagcaagaccttgctctctccaagaatgttcatctgattaccccttttggaatgagggtcatcctgcagagggagttgatgtatcgataataattatgcatgtttgtagactcccaatacttcccagactcagagagatgaagatctttggcttcatctcta

SEQ ID NO: 28279 - DNA, 294 bp, Zea Mays
gtttgtactgacattccggctgtggggttagagtcatcccgagcagcgtctcgggcctcatcgaccttggagtgcggtcttcagagtcaagaagctggtctaggttgctctattcccatggaggtaactgagaatccttcagccttggaggtggctgttgtagaggactcggtcccctaggatggtgccagcgattacccagcccccgagggtgttgccggcaatgatccggctcgggtgggtagtgtgagctacgacccagcccccgagggtgctgccggtgatgatccggct

SEQ ID NO: 28280 - DNA, 992 bp, Zea Mays
tccatgtattgaaattttgatgtagctgaccttatgggtagtggctagtctatcagttcgttgtaatttaccttgcctagtatcagccaccttaatcttctttaattcaatacatattattaatgtttgcattataccatgaaatctagaaagatgagttatgaggtagccgaggaccttatggatagtagaagtatttctgaatgttggttgcaaatcctcgtactcctttgcctcttgctctctctttatgaaatacagattagtagtttagcaaaaaaattatagggggtattgagtagcgctactttttgctggggctgtagctgtggctgctgctgtatattgtaaaatatctatgttgtgttgtagaaacagccatagcgcagccacaacaatctgaagcgaacaaggcaatgtaatgcaatcatacctgagagtatgttttttcattgtccatcctgaattcttgattttgtgtctcaacatatacacgctgatgaaaaataactacaagatgaagtagtaggtactaaaatgtaagaaagtgcggatgtgtaaattccatacagatgcctactttacgttttgaagacgtttgaaattgattcgctggaagatcgtccaaacatccctgtcatagcaaacaaataaccaaatggattagatgttacacatagacctactgtatgaactgattgtgaaatggagttcaataattttgcatgtacactttgatgctgttcgaagagtacactcttttgttgcaactcttgtatagtagcatcttgcttctgtacatggtttacgagtttttccatctgaagtttcaaagagacgacatcttcacttgttgttgggtccaaagatgttacatgtagctgattaagacgtcttgatgttgtcccatctaacactttgttcgggtttggaacaagaccaaggccatgcacatgaccaggcttctcttctcctaatatcttgtttagtgc

SEQ ID NO: 28281 - DNA, 621 bp, Zea Mays
catttaatcgatataaaccagtactggactgggcctcaatttctgataacagcaaggggctgggtgcaagttttctaagacacagggaacaaggtccctggacggcgggttgatttctataaactacagggactctttaacaaaactccagggctgaagggggtatcctctaatttcagccgttcgatcagacgcggatggtccagattagatcctaaccattacaaaccagcaagcgctctagatcgtccgatcacaaatcgacgcccccgattttaaagtcatgcgattgcctttcacccgtccgatctggatagatggcccggatccaatccaccgaaaagttatctccctatctaatctccaccgttggacaagaatccaatggcacaaccatcatcaccttcccccgctcatatgggcacggcggcccggccagtctaccgcagcggcggcagaattatagggtcccgtcccctactcgatgccctaaatcgcgcacatacgatggaaatacatacgggacaatgcggtgaatcaattgggaagggtattacctgttgattgggtcgcgaagggggccggccacggcgtggggcggacggtcgccgccgaacgaag

SEQ ID NO: 28282 - DNA, 450 bp, Zea Mays
ctcatcgtgtgacgcacaacaggatgaccgtgcgacgaagcagggcggaatcacggcatgatctcgcataggtgcgcaatcccgggtcaccaggtcgtcaatcccacaaggcaaagccgcaatccatccccggagttgcgcagtgaagcttcgacgacagagcccaagcgcagcggcacccgatccatactctctctcgcaatttcctgtgcttccgtctctggcggtgatggtggcatcccctgtctatggtggcccctggtacggcataagtgagatgggaagcggttgtcgtgactttataatctcatatgccggtcccaagctgggagatcggatctggcgcgagaatcccgggcggattctggtcagcgcgggcgagctccgcgccttcagttgcggaacagaacggaggacagggacgctcctgacggacgaggcccacaacac

SEQ ID NO: 28283 - DNA, 374 bp, Zea Mays
cagccaacatgtctagcataacactcatctctgcatcagctggactcgtaggcatctcaaagtgaacttgcctctcatcattgggaagatcactaagtgaagcaaccaggacctcaatatcttcaagagagggtcgcactctaagacccaaaccactatcaccggtaggacgattggacacaaaatcgaaaaaggacttagaaggtggcagattccaagcagaatatgcaacaggagcaccaatatttgatactttgcccctcaagatcatctctagtcggctcaccaaatccacagctggaatcctcttgttggtaacctgggttgagtcggtaacaccactgtacaaataagtcggatatgctctgtccttc

SEQ ID NO: 28284 - DNA, 478 bp, Zea Mays
agaacttcatctttttgaccgtgcacttcattgataaagaatggaacttgaataggaaaatcattagatgttgctttacggggtgtgaagactttgatgctgagtattttgttagcatgtttccgaatttgcaatcatgccacaatttcattaatgggaatgtgagagcagctgaagaagaaatagtgaaagaggcagtacaaaattggaggcttgagtggaagcttctaggaatttcatcacgtaagtcattagctgatgctgctgtactggctcttgagaagaatcttacagaacagaactatcttcttgccaaatgtaagttgttgaatctcccctgcataatagatgccctaaatgacctttttggttatgaaatcaatgaatatgtactaagtacaagtaagatgtggtttcagtacatgacatgcaccccactacgtagggataaatacaaagaaatcctgtcacgcctgca

SEQ ID NO: 28285 - DNA, 422 bp, Zea Mays
gttaaagcacgcatccccccgaaccaaccaatcagccatccccgacgtcgacgaaccaacctccaaagatctcattgatggagaccgtgtcctcgccctgtaggcccaaaacaaatatcaggtccaaactaaggcatggcgtgacaacaatgtcgtcctaagagaattcaacgaaggggatctagtactcgtgaggaccaccaggacagagtcccggggcaagctagagccaaagtgggaagggtcgtacatagtcaagacgaaggcattcccaagtgcttacaggctaacaacttcatccggcgaagacttagagcactcatggaacatcgataacctccgaaatttttttatttaagatccaaggcccaagcgcctttgtaattcctcaaacaatgtcattcaggcccgcactcttttcc

SEQ ID NO: 28286 - DNA, 688 bp, Zea Mays
tgctattaaaagacaaatcaatcctgtggcttatgaactggctttaccagctggcagttctattcatccggtcttccacgtttctcagctcaaggcggtcattggatctcgtatcccggtgagtccagtgttacctgatttgtctcataatcttcaggtgccagttgctgtgcttgataccaggttgaggcgtcaagcggggaaagtccagaatcagcttttgattcaatggagtggatggcatccgacattggccacctgggagggagaaagcgacatcaagcggcgttttccattcgctccagcttggggacaagctggcgtttcaggaggggaaaatgtcagcgtaccggcggatggagatgcaagcgtcagtgtgggagagagatggggaatggagccaggtgtgcgcgctgatgggcctaggagaagccaacgggtgacacggcccaacgtccggctctcgggccatgaatgggtgaaatgatttaggcccagatggtttagcagctaacagagagaagaatatacactgccgtggagaggaggaaaggattggactggaacttggaactggacccggctgcgtccggcgaaccgacggtgtgccgtcgtgtaccctatccccatacctactgctacctccataaacttcgagagaggatctgagcgccgggagtggtgctcg

SEQ ID NO: 28287 - DNA, 373 bp, Zea Mays
agttgctatccgtactaatgatgtggtcgggccctacttcaaaacccataaaggtgttcgccaaggtgatcctttctcccctctcctttttaatgtggctgccgatggtcttgcttgtctgattcaaaaagccaaggatgaaggtattattaaaggtcttattccccatattatttctggtggctgctgttgccttcaatatgctgatgacacaattttcctgtttcaagatgatttggaaaatgctagaaatttgaagtttattctctgcatctttgaacagatttctggtcttaaaatcaacttccataaaagtgaaattatctgtttgggaaatgctcacaatagagagcatttgtatgctgacatcttc

SEQ ID NO: 28288 - DNA, 1039 bp, Zea Mays
cagcaggtagatccagcttataggcaacctcacccactttctcaagcacccgatagggaccatagaatttcagagctagcttggggcaaggacggttgacaacagaacgttgtgcatatggttgtagtttcagcaagaccatctcacccacttgaaaatgtctttcagttcgaccccgatcagcttgcatcttcatacgattttgtgcagcagccaactgttccttgagcatttctgtaaaaacagcacgatcagccaacacctgagccacatcagcatcagttgcatctggaatcagaggagcagctggaaatggagggtcataaccataaagcaccttaaacggggaacagcccaaagtagtgtgataagatgtgttgtaccaaaattctgctaaagccagccaattcttccactgatgaggataattgtgaacggcacaacgcaagtacatctccaagcactgattcacgcgctcgctctgaccatccgtttgaggatggtaagcagtactgagactgagtttagtgcccaaaagcctgaacaaatgtgtccaaaaagaactagtaaacaccctatcacggtcactgactatagaccgaggtaggccatgtaatttcaccacttgctccaagatgacctgagccacttgctgagcagaaaaaggatgcttcatcgccaaaaagtgggcatacttcgaaaaacggtcaacgaccaccagaatagtatcatggcccccagatttaggcaacttctcaataaaatccattgttatatcctgccacatgccttgaggaacaggtaatggctgtaacaacctagctggatggagtctttcagccttggcttgttggcagacctggcattgttggatgaaatctgccacatccctcttaagacctttccaagtgaataactttttgatacggtgataagtagcctgaaccccggaatggcctcctagcacgctatcatgaacagcagcgatcagtttagtgcgaagtgctgaattgttgccaacccatatcagtttctcctt

SEQ ID NO: 28289 - DNA, 323 bp, Zea Mays
tccttcttgaattggtgggaggaggtttcagaggtggtctcaggtgtcaccagaaaaggtctaaactcccttatcatcctgggtgcttggactatttggatccatcggaacaaatgtgtcttcgatggattgtctccatgcctcacctatatccttgcttgggcagatgaggagagaagtcgttgggaggcagctggggcgaagggcctatgttctctggctgcctctgcagctgctccctagggtggtgtgttgttttttcctttcacaggatgagttcttttttgtatgctattttctggcccccgtgaggaggcctgttg

SEQ ID NO: 28290 - DNA, 508 bp, Zea Mays
cgaggggggtcgcctgaggcagatgatgtttcttcctagttcggttgccgaggggagtaggaggcggtatagtcgaggggagagggtgtaccttttgaggtgagtgtggaacaacgctcgtcatgttttttcctcggaggggatatggtcatttaatgcgacgggacgttctgcctgccaactgaccgttagcgacacacgtgctcgcggaattcaaaacggtcatcgtctagccacttttcgaatcatacattggtggctctgtccgtcctataaacctgaccgagagggagggctttggaccgttacctttgtagtttcaatcctttgccttcaaacaccattttcaccttctgcccagagagctctccgtcttctgtttgtttcgatggcggaaaagatcatcgtccttcctcccagtgacccgtggactatgtattccattaccgacgtggatctagaagcgttggttgatgccggcctactctagcatcgaaccaccggcccg

SEQ ID NO: 28291 - DNA, 504 bp, Zea Mays
accaaatggattgaagcgagggcagtatccactatcacatcgaagacagcccagaaattcttctggcaaaatattgtttgccgcttcggagtcccgtccgaactcacgatcgacaacggcaagcagttcgacaaccaagacttcaaagatttctgcttctccatcggcaccaagcttgccttcgcctccgtgtaccaccctcagtccaacggagtcgtggagcgcgccaacggcaaaattttcacagccgccaagaaaatgctcctcgacgacaaaaaaggcaagtggcctgacctgttacccgaagtggtctgggtgctgaacacaactgagtgcagggcgactgggttcacccctttccgccttctatacggatcggaggctatgactccgcaagaaataaaacatgggtcgcctcggacagtcgcgtcggccgtccccgacgtagacgagccaacttcgaaggacctcatcgacggagaccgtgtcttcgccctataggct

SEQ ID NO: 28292 - DNA, 332 bp, Zea Mays
agcgcagatcacgctgctcccgtccatgatccatccaccctcttctccctttctcatcaggccttgactgttctcgactcccctaatcaccagctcggtctattctcctcttcctcgccgcgctccgtcctgtctccgacacacacacgccatctgctgccgcgtaaacaccgggaaataccaggccttcctttcctgctataagcaagtttcaactccccaagttcgctgcttttggtcaatcttatctgcgctcccaggtctcagcgtcgccggtccccttttacttcgatccctctatccgatcactgcaattctaagcttcaattacc

SEQ ID NO: 28293 - DNA, 510 bp, Zea Mays
tgggaatgagataacatgtcggcgtcgggagtggtatggtaagagggcctagagtctaccacccaatccgacgcggtgggtggtggagtcgatgccatggtgttgaacaagtcatcgagggactgttgatcccagccgctatccagcagatactgtgggtgaggtgggggtcctcgggagtggaaggaggggcagaagcgatgattagtgctgaggagggggtgcttgaggtggaggggcgatgtagtggggtgtgaccagcaaagccgactaaagagagagcgttgaggagggaccgacggctgggctcaaccacatagagatggtcccgatccatgggttgtagaaggacaaccatgcatgaccccctcgtccagaagggacaccattgtgctggccaccatcccacagtcacccttgcagtggtggcgaccgccccccggagctggcaacctgacgagggccctaggagcagaagtggaggcaggagggcacgaaggaggcccatcg

SEQ ID NO: 28294 - DNA, 549 bp, Zea Mays
ttcatgtatagtgcggggtctctttagcaaatcatacccgcgaaggggtatggagggtgttctggccgctagattagaggtgaatggcacagatctaatctaataattatccgaataggtacacgattatggccgcgggattaaggatccacgaaccagatttaatatgactacgatcgactcctcgttcgcccgatcccgaatctacgactcagatctgtttgcgcgcaagggtacgctcggtcagctaatctcggtcgcaggtgtcagatctaacgactgcggttcatcgtcttcctcccgtgaccagcgtgctacaaggacgcggccgaggcgacgacctcgccggcgttctcccaacccggccaaatactgacctgacctaagcgagacctacaccatttcgaggagaaggaaagtgcggatgttcatggaagctcaccggaaagaaaggcgatccgcagacacctgtccacgacacgaagcggcccaggacgatatctggactctggcgagcaatttccagtgttctgacggtccgctcacccg

SEQ ID NO: 28295 - DNA, 2321 bp, Zea Mays
gtggagcttgcgctgacgcagaggagcgcgatgagatgcactgcgtcagtcacggatgatgaggcggcggacgcggcggcctggatgaagcagtgcggtcgccggttggaaagccgctgagatgtgaacaaaaccgcagcgagcaggtaagtgcgtaggaaagaaaccctaaccctaatttttggctctcataccaataccatgttatgaatatcacttgtattcaatatgaggctcgccagtatatataagtacataaaggtaaatatgcactaagccccttatacaatggggaaatacaaaaggcacagatatgcatctatatacatctaacacaatcaacgtacccacaactgcaattaatatcatattcattcaatattcaatgtccaataattcaataattgctcaatggtttattaaattagtataatgtcaggaacctaatggagagacacatattatatattgttttagagtagaaaaaaatctacttagcccccaaatttattggtagttctctactccatcccttcacctataaaaccatgtatcctaccctttaaactattgagaactgtctaaatggttgactatataacccactctcaactataaaactttatattgagcatctaataatgctcaaatagccctcttggatggtcttgttgggccgtttagatatcgcatcccaccacactggcctaagcacccatgcttgcacgcaaaccctattggttgtctccctctccctactctttccaagcttgcgccatcttaccatgagcaccacattgtctcttgttccatgtcacgtcacttctcgagacatattgagctcttgcactgcatcttcgcccttgtcatctggcttctcccacatcctcaccccttctcactctcttgtggctacctaaaaagctaaatgacaattggatggatgatgtggtgcttgagtttaatatcatcgatgattgataggagctgaaccaagagacaatatgtcgcatgctgcttattgggcggtgggccagcctagaaagagtagggaggtgaagggaaggaatggacctatgtgcataggtacttaggccagtgtagcggtgtatggtatccaacaaccctacaagatcatcaggtggtcatttgaacataattagatacttggtcatatttttaggttttatagttgaagggctatgtagtcaacccttgatatgttagaggattatgtaggttttttagtatgccatgttagggaaactaccttagggggttatttatacgggtttcaatagtttaaggcgcataatacatggttttataggttgaggtcatgaaatagacaaccatcaataggttgggtgcttaagtcaaccctttcctttagagtaaggtatgaatttttgcctcagtcatgattagtggtgctaaagctatttcatagctaagacaaatagtggtgtttagtagagctagagcatctttagcggcaatagtggaacaattgacaatatcatagtgtacttagcagtagtcagtataccctataaaaagttatagtgggctatttagaaccttgatggcatatgacaatcaaaatgattaatgtataacaatggagacatttttgaagtttgaatgtcttatttttggttggaggtactacctcatcactacggaaaaaaacatttcttctctaccacttagtagattggttgggagtggatattgagaaggattttagaatatatttttcaagtttatttgcagttttgtgcttctttattggagtattatggtcaaacttatggaaaacctgttttgagaacaattctgaaagatgaatttgttgagagctgctaacagaatgatctttaggataaaatttcatcatgctggaaggtaatagttgtatgcacaaatactggtgttttctcactgttgtctaatttaaggtctattcatgatccaacgaagttacacagaactacactggttgctgaatcctccttcctcgaaagcacttgattctgataaaattggaagttactgacatttcttatcctgccactattactcacttacattatttgtacccccaatcgtacagaccggtgttgctgtcaaacattgtaaggagggcactgagagctctattttctggtcttctcttggtggaaagcagagttatacaagtagaaatgttgtacctgatgttgttcttagagaacctcatttgtataccttctctcttaggaatggttagtagtcaaaccttctattcacagtgtttctcaatcttaccacattctggg

SEQ ID NO: 28296 - DNA, 381 bp, Zea Mays
gtagcacctgaagttcttgtgtagaccatcggctctggccttcgtctaataatgaagttcatgcactcgacaaaacccttcggcatcggcactttttccttggctttgaagagcccaaatatacacgctgagtctaacaatggcattgggggttagttggtgtagataaatttcgaacttcttcaaaacttcagtgttcatcccataaagggggaaccgaagtcctgccctgaagaagattttgaagactacgagttcatcctcttttggctctagaattgcctccactccaacaaaatgaagtagttcatcatcattctctccaaagtatcctagtttcttcattaaaactaaatcctctgccttaactgtggatctccg

SEQ ID NO: 28297 - DNA, 606 bp, Zea Mays
cattgtccccttcgagtgtgcgtcggcctaggaaatagtgctcacagcgattgacccagctcaacggttcctccttgccgtcaaataaggggaaagtgagtttgtgaaaggtattgggatcatgatgtggtgtagtcaagtcatcggtgaatggtggtagggatggggagtgagggaaggggattaggtgaattggcagggtttaggctggtggcatgatcccattggtgtgggatggcaggtgtggggattgtgtggttgcgggtgcggtggtggacatggtggtggttgctagaatggtgtcataacctggcaggccgtaggggtagctggctggttgaacggatgaggacgtcccaaccgaggatatgccgggaagctgcagctccatggaggacatccaggaggagagcaatgtgagttgctacaccacgaagcgctggtaaagtccaatgtggcctactgcgggtcgctagcggctgggcagattctagcaccgtcgccgctggtgtggagctcggggttgggggactttgttggaacctggcatctctgatagtagattcgtagagctcgagttacagggttggtagtggtggtgagtag

SEQ ID NO: 28298 - DNA, 2063 bp, Zea Mays
gttgccctcgacaggacgacgctcgctgtcctgctcaagtcatgcggtggcttggacgacctggcgcttggtgttcagatccatgcgctggcggtgaagacgggcctggagacggatgtccgggccggtagcgctctcgtcgacatgtatggcaagtgcaggagcttggatgacgcgctgcgcttctttcatggaatgggtgagaggaattcggtctcgtggggtgcggcgatcgctgggtgtgttcagaacgagcagtacacacgggggatggagctgttcgtgcagatgcagaggttggggcttggagtcagccagccggcttatgccagtgcctttagatcctgtgcagcaatgccatgtctgagcaccgctaggcagttgcatgcgcatgccatcaagaatgtttttagctctgaccgtgttgttgggacagcaattgtggacgtgtatgcgaaggctggtaacttggttgatgcaagaagggcattcattggtttgcctcaccataatgtggagacatgcaatgccatgatggttgggcttgtgcgcacagggctaggagctgaggccatgcaactgtttcagttcatgaccaggtctggtgttgggtttgatgtaattagcttatcaggtgttttcagtgcttgtgctgaggttaaggggtactttcaagggttgcaagtacactgcttagcagttaaatcaggttttgatgtggatgtttgtgtcagaaatgcaattctggatctatatgggaagtgcaaagcattagtagaagcataccttgtattccaggagatggagcaaagagattcggtctcttggaacgctattattgcagctctcgagcaaaatgagtgttatgaggatactatagctcatctaaatgaaatgctgcgctctggtatggaacctgatgatttcacgtacggcagtgttcttaaggcttgtgcaggtctacaatctttggaatatgggttggtggttcatggcaaagctatcaagtctggacttggtttagatgcttttgtttcaagcactgttgttgacatgtactgcaaatgcggcgcgataacagaggctcagaaactccatgatagaattggggggcaagaacttgtttcgtggaactccatcatatcaggtttttcactcaccaaacagagtgaagaggcacagagattcttctcagagatgctagacatgggtgtaaaacctgaccattttacttacgccaccgttcttgacacttgtgctaatctggctaccattgagttggggaaacagatccatggtcagattatcaaacaggaaatgcttggagacgaatatatctccagcactcttgtagacatgtatgccaagtgtgggaacatgccagactcgctgctaatgttcgagaaggcgcggaaactggatttcgtatcatggaacgccatgatatgtggctacgcgctccacggccagggacttgaagccctggagatgtttgagaggatgcagagagcaaatgtggtgccgaaccacgcgactttcgtcgcagttctgcgggcatgcagccatgtcggcctgctggacgatggatgccagtatttccatctgatgacaagccgctacaaactggttcctcaactggaacactttgcttgcatggtggatatactgggacgctcaaagggcccacaggaagccctagaatttatcagaagcatgcctattgaggcagacgctgtcgtatggaagactctgctaagcatttgcaagatccgtcaagacgtcgaagtggccgaaactgccgctagcaatgtcctacggctagacccagacgacgcgtcggtttacattcttctctctaacgtatacgctggatccgggaaatgggtcgatgtttcaaggaccagaaggctaatgaggcagggacggctgagaaaggaacctggttgtagctggatcgaggtgcaatccgagatgcacggtttccttgtcggcgataaggttcatcccaggtcgaaggaggtgtatgagatgctgaatagtctaatcggtgagatgaaactctc

SEQ ID NO: 28299 - DNA, 276 bp, Zea Mays
ctttgctaaatctgctatcttcatcagttactagaccatcattctgctcaatctaatttattcagctagtgcttagggcattgggccactccagtgtataggtattaggtagtatagtattcttgatctgcggacgttcttatatctgtaagcaagacaagtcatcgttgcaacaatggatcagcagaaccgtactagtagccaactctagtttctcttgcagctttgtgcctagtgcctagcgacccacttatcttatcgtgctggagtaataat

SEQ ID NO: 28300 - DNA, 308 bp, Zea Mays
ctaagataaagtatgtttggtagaggcgctagtggatgcggtgaccgtcttcgagcggtgggttgagggtaagcgtcgtggcaacgttcacgcagctctggcgtgctgcaggagcttgcaggtctaccacggtgtcgcttgcagcttgtgtcttgcaataggcgtctgcgcgctactagtcacttgaggtgtgttagcaatatgtgttggttcgtggttgcgtcccatatggcggcgtgggtgcacagtgcacacatggccctatgcagcagtgctgaagcatggacaaggttcgacgtggatgtgca

SEQ ID NO: 28301 - DNA, 870 bp, Zea Mays
cctcgacgagccaatcgatccgctgtccagcagcgatttaaaaaagccagccaaatgaaaaatttacatctcggagatgcccaacttttccagacccttgctgccggttcaaaggtgagcatctcctcaaagaaacgatgataaacagatttagaggagtattcccctgaggcagaaggggtccagtggtgttgatctgaaactcctgggtgaagttggaagccttgaatcagatcccagaccatgaagtactcagatagaaattgagttgatatgcttgctgagatatcatctacccggccattttcagtcaaggcgtcctttactgttctactttgtataaatcatttacccagcctttcgttggctagagaaacatgtgttggactattgataacctggagaagggggtcttgagcactcgggtagttgccatttttatgatcaagagagtgaaacggtgcagcacattctcacttactgtgtcttcacccaacagttctggtaccatctttttgctccttttggggtgggtcatctctgttcaagggtcgatgatgtttcctttgagtggtggaggaccaacaaaatagcgtaaggaaagataagagagaaaggggttcaacagtgctaccattttgggtgtttggtgtcttcggttatagagaaatcaagttgttctttgataaggatcgtccctccattcgaaaagtgtagcagcaattcctttatgagctagtgtgctcaatcaaggctggtgctaagcatccgagtgagctaggtctatctaactccaacttcatgagaaggatcgggtcgagtccttctgctataatgtaatcctacctgtgggtcttttccttttctttt

SEQ ID NO: 28302 - DNA, 358 bp, Zea Mays
tggcatacgatctccaccagctacagtattatggtgtgacaatcttggagcgacttacttatcagctaatcctatttttcatgcaaggacgaagcatatagagatagattatcactttgttaaagaaagagtagcagacaagaagcttcacatcaaatttattagcaccgatgatcagatagctgatggtctcacgaagccattgatgtcccggaagcattatgaatatgtgcacaatctcaacctcagaaatcccggttaagattgaggaagggtgtgaaacagatagatagatgcatgtatggcaagtcacattgtaacaaatctaaccgagatttgtggtggactgcatccttga

SEQ ID NO: 28303 - DNA, 383 bp, Zea Mays
tgagtgcacacacccgcagtagttacccgatctccgttggccaccttcaccgtcagacctggacgaggttcaacttgaagctgcagctgactgaccacagaatcattgatgaaggaatgtgtcgaaccagtgtccacgagggccactaactgacggccatacaaacaaacagaaagtttcatggtagtgccaatatcaataccggtgagagcatggagagagatgccaacatcatccaatgtttcaccaccctcatcatcttctgttaattccagcaagaaaacccctttgtttgcacatctgtgatcggcagtatacttttcagtacaatggtagcactcaccactagcccgctttgctgctaattcttcactggaaagacg

SEQ ID NO: 28304 - DNA, 902 bp, Zea Mays
tccaatgcgtcagagacagagctctttctgggacagaggcaccctgtgatctcagctgaccagccatctcatcgaccaaagcctgatattgcaaacaaatgagtgtagagacagtatttttcctggagtatagccgaattgagaaaagctaaattacctgaagattgttgaagaatgaaggaagccccaaatcatgagaagccagttggtggcttgacgaaggaatatcaactgagccaatctgaagagcatcatcaaggatcaactcaacatcaccagcaggaattagaactctagcaccaggtgcgccggtctctaaggcgactccctgattcgaagcacgtgctgctgccatacaatcagaatgtggaggagaagacccgacgtggacatccatggaggtatgagaaggggagcccgctcggacaccctcgggggctgggtcgcagcccgcactacccatcagagccggatcaccaccagcagcaccctcgggggctgggttgtagctcgcgctgcccgccccgagccggataattaccggcaacaccctcgggggctaggtaaccgctagtgccatccttggggacatggttctctgcagcagccacctctaaggctgaaggattctcagtcacctccatgggaatggagcaacctagaccagctccttgactctgaagaccgcactccaaggtcgacgaggcacgagacgctgctcgggataactctaaccccacatccggaatgtcagaacaaacgtccatcataccaccatctgttggctcggacagcagatctttaggaaccatatcctcgagagcctgatcaaaatttgctatggacaactcttgtagaccaacgagagcaaacaaagctggaaaaggaatatcactactctc

SEQ ID NO: 28305 - DNA, 611 bp, Zea Mays
agcaggtagagcaagtagagaggaagaagcgggcagattaagacggtatgccacttggccaacccgatcgagcacctggaatgggccaaagtatttgaagccaagcttatggtgggagcgggacatcgctgaagattgcacatatggctgtagcttaaggtaaacccagtcattgatctcaaaacagcgttcggaccggcgcttatctgcctggcgcttcattcttgtctgagcacgtaacaaatgctaacggacgagctcctgcattgctgaacgctcctgcaaccaagaggacaaggtagccggagtagtgtcatccactgtgatacccagagtacggggctagcgaccgtatagcacctcaaatggtgaccgacccaaagctgaatggaaactagtactgtaccaaaactcagcagcaggcaaccactctttccacttgcgagggcaggcgctagcgaaacagcgaaggaaggtctccaagcattggttcacgcgttccgtctgtccgtctgtttgtgggtggtaagaagagctgagctgaagctgagtgccagtcaatttaaagaggtgctgccacaacttactagtgaatactgggtcacgatctg

SEQ ID NO: 28306 - DNA, 794 bp, Zea Mays
gtttttgcttggtgcttaagttgttgtattgggccattggcaaaggcatgtgttgtacatcacattcagtactgattatcaggatccatattaggtttttgagctggttgtattggtggtgcctaagttcttatcttgtattctgcagcattacacttctgaagagacatgtttgagcacttttcagtcacctgttgatccaagtacaattttaggtggttttccaggaagcaattttaccgaggtaatatttgattacacctttgtagtaatataaacatattacatattctgataccccactccttatcaacttgatgttgctgggcaggcttcggcatttgtaataacttatcctgtgaacaacaaggttcaaacaacaggaaaagagaacgggaaggccatggcttgggaaagggcttttattaatcttgttaaggttggccatgctaattcagtttctcttgtcgttgcatgtgcttagcaagtacatttgattgaagtatatactctaatacctgttctatacaagtcaatgcttctgtctattcttgaagcagttcctgtaacatattcagtatttcccgtagcaaacattgctcaaaaagaacgttttgaacacacggtcctatgtcctcataagatacaacagtgtgcaaaacttggataaggcgaccaagtgtattcaactttatatcttgttatagcttgccaacccatctctcatgttctaggtccatttggttgaagtttgtattatttgggtgggttatttgagaatatgccatctgtca

SEQ ID NO: 28307 - DNA, 305 bp, Zea Mays
gagcgagtgagaagagaacaatcgaagctcaaatgatcacaagaccttgcgacactcaaatgcactagccgctatatctctcaaacaaaaatcgattgaatacggtgcgggaatggctttgaatgcgtgaagttgcacttaatgcttagaaggttggaggaggtcttctgtcttcaatgtgctggttgagggggtatttatagcacccaaccactcaaatagccgttcgagtaaatgtgtaaaagttgtctgtcgagtggtgcaccggaccatgaatagtgcctcttcggtgcacacaggacaac

SEQ ID NO: 28308 - DNA, 543 bp, Zea Mays
cggggaggggataggatcgcgtcgtggatatgttcgtgctgccgtggcctcgcggtatcccgaccacgtgcatcgacaacgtggccgtgcggccatcgccggagtttgcatcctccaccgcgattgtgccacgcttccggtcagtgaccacgtcgccgtgaactatgatcattacccagtgactgtcgtggcttctcatcccgtgaactgccacgaatcaccccgccggtgactcgcttcttctctgaccgccaccgcgattgtgccacgcttccggtcagtgaccacgtcgccgtgaactatgatcattacccagtgactgtcgtggcttctcatcccgtgaactgccacgaatcaccccgccggtgactcgcttcttctctgaccgccaccgcattcaaccccaaattcccggccaccgctcacttgatttataaattgagcgcgtcctcagctccgtcaagtattcacgcagctactgcacccacctgcatcccaaacccccaacccgagaactctaattttggattctccccaattcac

SEQ ID NO: 28309 - DNA, 436 bp, Zea Mays
ccattaagtccttcaataaaatgctcttgcttcctctcatcttcagcaacttcatccggtgcatatctggatagccggatgaacttatcgcggtactcgctgactgacatgctcccctgtttcagcgatagaaactctttcttcttaatcttcatcagtccagcgggaatgtggtaatttctgaactgagtagagaattccgcccatgtgatagtatcagcagcatcatgggcaacagtgtatgaatcccaccaatcagcagcaggacctgtcagacgaccagaagcatatagaaccttctcccggtcagagcattgtgcaataatcaacatcttttccacagacttcagccaatcatcagcgtccagtggatcaggagagctagcgaatgtcagtggcttatggctcctgaactcccggtgcttatctcggggtg

SEQ ID NO: 28310 - DNA, 448 bp, Zea Mays
agaaaacacatttgttgtcgatgtgtttggcacaattgtttcggtgcccaattcatgtgacaaaaaattaggcgtatgagattttacaaatgcatgcgtcattttctctatatcctatgtcatactttcaatccggttatcaaaagaaattttaatagattgaatatcatcgaatgatgcggtgtcacttacaatggggagttgctgcaacaagctgacagtgaatcgcagtttatttcattctcccggacgaccttctggtggcaatctatgctgaagcgcgagaggtaccgcttctccatcccctcatgcttctaagcttgttgtcgctagaactcctcgtcccacttctttatgtactcttttaattcctcatgctcaatggccgataaattagttagccttgtgtcgctgtctagagaaacatcgttgagacctttagaatcgg

SEQ ID NO: 28311 - DNA, 535 bp, Zea Mays
cttcgcaccaatggcctcgcagagtaaaggatctctgcaggacaactacagttgatgactacattacgcagttctccttagtgctatgttgttcatattgctcatattgttcatattttgagccaatttgtatcaacaccaacctcagttcattatggtcatttgcttcgtgtgcttagatacttacgtcggacaagatacaaatgtttactctatgcttctgatagcccacttcagcttcatgcatattccgatgccacttgggcatgtgatcctgttgatctttcttctactacaggtcactgtattcttcttggatcctcacctattgcctggaaatccaagaagcaagcggccatatctcgttctagtgctgaagccgaagcttcaggctcttgctactacaactgctgaaattatttggctgcgctagctcttgaatgatcttgttgtctcttgtgacactcctacacctctgttatgtgatagataacatgagtgctaaacagatttctcatgatccagtgaagcatga

SEQ ID NO: 28312 - DNA, 531 bp, Zea Mays
atcaaatgttggtgccccagtggcatactcggcctggaacctgcctccttctaaagccttcactcattttgtttcgaatccacctgttgctgatggcagtttgggccttagagtgcgaccctctgctgaagaagttaacgccttggttgcctcgctcggggaaattcctgatgatgaacggcaagtccactttgaggtgcctttggatcctagtgacgcagaggtaagtgctatgcttgatttgctggctgaggactcttctgatgctgctcctgctgggacgttggtggtggcgcctctcccagaaattgatacaaccttgggtattcagagacctgtcagtgttcgcccaaaacgcccttgccgagccaatcgacttgatccttctgctgatgagcagaaaaagaaaaagagacgtcttcggcgagtatctagtttggatcgggacgttggtccttcagttcctgctgctgaagaagtgcctgtgcctgaacttactgacattgaccccaatgggtgtgctccatctgc

SEQ ID NO: 28313 - DNA, 344 bp, Zea Mays
agaatttgaggactgcacaatccaggcagaaaagctatgctgatacccggaggagactgcttgagtttaaggagggagattatgtctatttgaaggtgtcaccactccggggtatgaggagatttaaagttaaaggaaagttgtcccctcgcttcattggacctttcttgatcttaaagcgagtgggagaggttgcataccaattggagttaccggatcatcttgcggatgttcatgatgtctttcacgtatctcagctgaagaaatgtctcagggtacctgaagagcagttaccaatggaggaccttagtgttcaagatgatctgacttatgctgagtacccc

SEQ ID NO: 28314 - DNA, 743 bp, Zea Mays
ctcgggcctcgcgcagctcaagaacctgaggtttctctccctctccggcaacaatttcagcggcgagataccttccggtttgggccagctggggtcgctggaatttcttaatctgtccaacaattctctatcaagggaggttcctgctgatcttgtggcactgcgaaatcgcactgtcttactgcttggcaacaacaaactatctggggaggaggagataactgctgctgctcccggctcaccagttcatgtagttactgctcattcagttacaggtgaactgtttcctgtttctcctatagcaacagctatccgtaagctgatcgatacaggtccaggcacttctaatggcagcaccacgaccaccagcagcagcaatggtggcgatggtggcttgggaaccaaagagattgctgccatagcttcagcatcagccattgtggtgcttctgttagttgcactcaccctgtgcatctgcacaaggaaatggcgtctgaaaccatcagagcgctcctttgcgagcaaagaagtcaaggttttcgctgatgttgatattggagcccccctgacatatgagaccgtcgttcgcgccactgggaatttcaacgctagcaactgcattggtaacggcggctttggcgcgacatacagagccgaggtggcacctggagttcttgtggcaataaagaggcttgctattgggaagcagcacggcgacaaggagttccaagcagaagtgagga

SEQ ID NO: 28315 - DNA, 299 bp, Zea Mays
aatttccttaaatttcactattctcgaaccaccatttctaatatatctaacagcagctctaacacgcttcacagagaggtcgacttcttttaggccatcatgcacaatgagattaacaatgtgtgctgcacacctcatatgcaagtacttgccattagctatattatttccgctcaaatgcctcctcaaataaccaataccagtgtcattggcacttgcattgtcgactgttacagtcattactctctctattccccattcagccatgcatctcatcacattttttccaatgtcatcac

SEQ ID NO: 28316 - DNA, 677 bp, Zea Mays
ctagttcactaccctcatgaaacatacacaggtcattggtaaatacacacagggaaaataagatacaataaaatacatcaggttcttaggaactgttagactttagactccagtactccacaacctaaatagatgataattgatatgaattcaaaacagaggatgtgctatgctactctccagttctccactgtccacacacggcacttccgcacttgtccagaacaccaagtctccagcacttgtccagcaagataacacttggcttggcacacagtagcacactagcacggtagcaccactgcagtctgcaccagcacacttcacaccactctccagcacttggaacacacggacacaccactacacatctacaggctacagcagtgaccagtctacagagggaaacaatctcatctctcatgtagagacacagccataccatacagccgctagtctgccaccaacgaaggagacacagggacagacagacaatcaccaataagccagacatgcaccacagtccacagctcactgttgtgttgcttaagacttggaagtggaagtaacctcagttctttttcctttgccaccatttccaaattcttcaattagctctgcaattaaaggagtggaaccatgcagctatcaattagaaatgattaaacatcaaatac

SEQ ID NO: 28317 - DNA, 1023 bp, Zea Mays
tgcgtcatatgcaagcaaatgcatggtgcctgcacacaatgctacaaatgctctacctattaccacgcaatatgtgcgtcaagagctggatattgcatggaggttgaatactgcacattttgcagtgttttgtttgatgaaaattgaaaaaaaatgtttatgtttccctgattcattaatttatagtgcttaacaataatgcaaaatgttatttacatatgatatacagttttcaagccctgtctgcttaataggttgatcttatgttattgtcatatgtcaggcagtgtcccaaaatgtatggtggtattgtttaccatcattattttgctgtgtaaaatatacccttttttgtgtgttatgtttttatattgccaaatagtttcattgcagctaggttttagagtaatttaagcatggcttgtacatttgtttacactgaaatatttatgttatccaaatttttggactggtcattaaactgtgatctttttgttcttgtagttgcaatgctctgaaagaagtggcaggcacattacaaaaatggtttcatactgtgattttcataggtaactttctttccaagtgtaatatctcttttgttcttgtcaaatcatttcagttccctttgtggttgtttttgtttatatatacaaaattaactctaatgtagggtcatgaaaatgtaaatgtgttctctcaagactttttcatggagaccttatatctagcaaatcatgcaattctgttatcttgattatcatttgtagaagtggcaatatacctgaagtagtacatgccacaaatatatgtggctgacaactgatatgcaattgtttcctttgtagtactcctgacccagacaatgtgttgatagtgaagacaccggaaggtgttttctctaccaaattttttctccaaaatggtgagaaacagacagctgcaagactcgtcaggaaggaaaatcaccaggagaaagtgcttcctcctataatttctgactgtctagtcgcaaagtgcctg

SEQ ID NO: 28318 - DNA, 379 bp, Zea Mays
gcatagtaccatgtctaagttgcgcatgcgaggtggtaggaagcgagccagaactaatccaaggcatggatgctgcccatgaaagaaatactcagtgattgaaccaattaacagggccctccttaccatcgtaggtggagacgtggagcttgctgaagcgaggaacgtccaaaccggcaagtgtgcgggtagcgtcttcattggagggcacccacacatatgagaaaggtggcccctatggaaactttggtagtgaggatggcaaggaggggaattcgatctggtggatgggaagaggaacaataggctgttgtgatgtgcaggagggtggcattgggcatgacaagcagggtgacagagggtgtcacaacggtggtgg

SEQ ID NO: 28319 - DNA, 277 bp, Zea Mays
cacaaattagggtttccagggttctctttaggggtttgagtgctctagggtttgtgtgccactcaaatccatcaattttagtctcttatgaacatttccaataacttttgaggtaatactcaatttggcctcacatacacctatataccctaatcccatggttaagtaccctactctagggttaagaagcacttcaagacaccacatcacacttgttttgaagttttagcctagtggatgcattctaggtgtaacaaacataatgacatgtcaatgc

SEQ ID NO: 28320 - DNA, 512 bp, Zea Mays
ggcgaggcaacaattcttctggcgctacagatgcagatacctcctcaaggccacgatgccaagtttgctcaagagttggccatacggccctaaattgctggtacaggttcgatgagaattatgtgccggatcagcgctcggcgaattcttccgctcatcaaaattgctccaatgttccttggtacacggacatcggagcgacggatcatatcacaggagatctggatcgtttgacgatgcatgacaagtacctcggcactgatcagatcattgctgccaatggtacaggtatgactattagcaatattggtaatgcaattgttcccacatcatcccgttcattgcatttacgttctgttcttcatgtttcatccacccacaagaatctcaaatcggttcatagacttaccaatgataacgatgtgtttattgaattccattcatctcattttcttattaaggatcggcaaacgaaggccgtactgctccatggcaaatgtagagacgacctc

SEQ ID NO: 28321 - DNA, 379 bp, Zea Mays
cagtttcattggacttcgttgaaggcctccctcgctccggcactgctgattgcatcctagtggtggtcgacaagtttaccaagtttgcccatttccttccattatcccatccttacaccgctgcttctgtcgcacagttattcctgtctcaagtgtaccgtcttcatgggttccctatggctgttatatcagatcgtgacccagtctttactagccagttttggcagtcactgttcaagttagcaggtgctgagcttcgcatgagttcatcttatcacccccaatccgatggtcaaacggaacgagtcaatcagtgcctcgaaacattcctacgctgctttgtaagtgcctgtcctaaaaagtggtctgcgtggcttcc

SEQ ID NO: 28322 - DNA, 393 bp, Zea Mays
cacgaaatggtggctgaaaacaacgcctgaaatggccagaccgttcccagttctctgtgttctccagagttcagaaaaatcatactgcatgtagctagacaagtcgtggatttgttggccacaaccacaagccacggtcaccactcaccaggtagacaagtcatagtcatagtcatctggtgccacaaccagagacctgcagatggagcacgccttcaagaaatggagctagacaagtcatagtcatctggtgcctcacgtcgtggatttgttggccacaaccacaagccatagtcaccaggtagcttcatctgcaggtcgtccttgatgctcagcaacggctgcatgcaccagcagtccagcactgtctcactgtcgggctgcacacactgc

SEQ ID NO: 28323 - DNA, 325 bp, Zea Mays
gattgctacttgtaggataaaataaagcggtttaaacatatgtatttatcacaaggaaatatcgccaaaaatatcattagccactcatcagatagaaaccgtcattaaccatcttcataaacattactgcgctgtaacgccaattaaaacagcacatttagaactttcctgacagataatgccagaatctgttaccttgagccattcagattcctctcatagccatcaccgctaataactttggttactccatcatgtaaattgtgcttccagatctggtgttgcccagccattgcaatatacacggcctcctctgcgggatcgt

SEQ ID NO: 28324 - DNA, 329 bp, Zea Mays
ggtgcatgtccagtgatcaccggagtaactgccacggtgaaagccgcttattccacgcacagagctcgtctctcctccggccgccagcactactcggccgaattcatcaccgccgctcgctaagcctataaattgagcacgccgcaggctccgtagggcagtgaactatccagccaccacgaattagcctcgattgttcgccggagctcacgaattttgaagttcccccaattcgggtttccgccaccgtgaaacttacctcaccgcggtcagcgtgaaccaggtcagcctacgtcttctgctctctcgtttaaatattctcaccaccc

SEQ ID NO: 28325 - DNA, 435 bp, Zea Mays
atatggcgatgttcaacccatggatcagtgcctcgtattttgctgcattatttgatgctgggaataatagctgaaacgcgtacttgagttgttcacctccaggggcaatgaagaggatccctgcgcctgctccctacagcttcagcgagccatcgaaatgcattcgccatacttcagtagcctctggattgttaggaacttgttgctttgtccactctgatacgaagtcaacaagtgcttgagtcaaagtagtgaaggatatcccctattggaaacccggtgactactatgactttgtggtcgtcaaagtagtgacggagcttgcgagcggttagaagtaccgcatacagtagtttttgaacttagggatacttctttttagagggtcccagaacttcgctgatgaagtagaccggatgttgtactggatatgtg

SEQ ID NO: 28326 - DNA, 418 bp, Zea Mays
ggcagaggcaatgcgaattttggattgcggtcaactcactgggtggaggtgtgcataccccgccgtggttcatagcgctatttatagccacagcggtccggctagcgttctccgaccatggataacttcgttagcgcatgcttaccacgtagggaagagacacagtgagggagatcgaggcatgggtgacaccgcggcgaaagttatttgagtcacggtggccgccggtgattaactccggccacgctcggctcagcacgcggaatggtgccacgtcccgagttactcccttgcgatcaaatccccaccgattcatccgagctcatgcaatccaacagtgctgcagatcttttcttggtgttcttcagatttttcagtgtattggatcttcagaacttgtctgaactgaccatcttcc

SEQ ID NO: 28327 - DNA, 752 bp, Zea Mays
gaataaaatactctacacacgattcagtcaaggaagcaaaatccacatagatctaggcaccaagcgaaatgaatgcaccaaccaccaatttttaagaaaaccaagatacaccacagttgtataatgattggaagaaatttgctggtccaccttcgttagtccaattaatgccttgagccaccttgccgagatgtgcatcacggccgcagcaacctgaagacgcaaacattaatgcgatgtcgtttgaggggagggagggaggatggacctcctggcggctgcccgagcgggccgagcggcaccgcgacgaccgtttggggaggagggatgacgcttcctccggcgtggcatgggaagtttgagacagaggggatggagctcctggcggtaaattgagtcggcactggggcactatgccgctgtgtgtgtgttttttttccgggtgaaagtaagggtgccggggggttcgcgatgcttctagttctagggacaccaacgacgccaggtgtcggcggacagaggataccacgcgaagtcggacacaagacgcttgatattgaacgctgattggccatcggacgacagtcattttttaagattacgtggctcaacgacgtgggagagttgctcccacggttaatatagtgaatctggaacacccaattgcagctgcacttcagcaagtaaatcgcagagagcaagattattggcaatagcactaatcgataatgaaccctggatatcaagaatcc

SEQ ID NO: 28328 - DNA, 556 bp, Zea Mays
cattaatgcgctgcagtctgaggggctcgtagatcatgagtgctatgcagtttgaggtgcttgtaggtcatgagtgggaagcgaaccgacgtcgtgttgtggctcggttccagacatggttaaatgtggtcgggtatttatggcgagtcagtttggtgccgggtccgagattcactcgagtggttcactttcgacatgcccggcctcccctgtcaggttcctccacacccgacctcgggctcggtgccatggggttcgaccgggggcgggtcctttcagggttgacacatctgcctctcctaactgactaatgggccccagtgatcaggggctcctttcctcaacgtactctctgacgggcgggtcctagggaccgagggtcattttcccaacagatggttaggttattgcacacaaataaattagcaatcatattactcacaaatatgacactaagtagaacaaagacaacccttaaaggttcaatttcagtattaaaaggtatagttaaacctttttaagtaaaataaaacctcatactttagagtaaaactta

SEQ ID NO: 28329 - DNA, 361 bp, Zea Mays
aagtaacagcaccggcgatttgtaccctatgcgctccacatcgtcttcgccacctgatgtctcccttcaggtctccgtcgatcagtggcacgctcgtttgggtcaccctggccagcctgctctcagacgtctcctcaataacgttgtctttgattgtaagcccacaaataatcatagttgtgcatcctgtcgcattggcaaacatgtttgtcttccgttttctgaatcaaacacagtctctccctttcctttctgtcttgtgcattgtgatgtgtggacgtcgcctgtgctgagtaattcaggttatcagtactacctcgtgcttctggatgactactctcactatacgtggacatttccc

SEQ ID NO: 28330 - DNA, 432 bp, Zea Mays
tgggggatcgattaggccactggttcgtcgttgtttggtgcgccggcgaggtgccgccatggagattcctgttcaccgtgatggttgaccggtgagcaaggggatgggtctggtgccattggattgttggtgtgtggctgcatttggatggaggataaggcttcggccgggaatatctgtaccgtctgatctaatcgagcggttggtgtgagatgtggcgtcatgaaaatcctaaccgtgggtctcgggatcgacggtctaaaatgcatgccattttgatgaagctctaatctaatccgagccgcatttatcatatcctacggctgatactgggtgataccccttcggcccgccccttttgctaataagcccctgcacttaccagaaactagcccgccatccacactcagcgtaaagtaattactaaaagat

SEQ ID NO: 28331 - DNA, 481 bp, Zea Mays
aggatttttgatgctattggatttgtgtatcctgactatcgctacccgtcgcggggtcagaaaagaaagggtgcaacttctggaaaggctgctgcttcggctgcttcaagcgagcctgcaccgaagaggaaaaagttgaaggtccttacgcaccaaccgcgctacattgaaccggccatagtgcctgaatttggcagtgaaacttcttcagctattgaagcaagaggacctgctcctacgcagaggattgaagagtcggctgcactgccgaagactgacaaaattgaggaaccaagaatctaagggacaaaaacattagaagttctaagcccttcggcaggagtggcggtgtcgaaggcacaaaaaggtctagcagcgacccccaagagaaaaaggatggccagtgtactagatgtgctggagacgataaaagcttcaagctctactccacagaaaattgccaaggcttcgaaagtgcaaa

SEQ ID NO: 28332 - DNA, 343 bp, Zea Mays
cgagaaaggcatgtcgttttataaattgctcaaaaaggtggacaagtttcagtggaccacagaggcacaggaagctctagatgcactgaaaaagttcctaactacaccaccagtattcaagccaccacgccgagccacgccgaatcagccagcagaagatctgttgttatacatctcctgcacgactcacgtggtgagcaccgcgttagtagtcgagcgggtagaggaaggacatacatacctggtgcagcatccggtctacttcatcagcgaagttctcgggccctcaaaaatgaagtatccccaagtccagaaactgctatacgcggtacttctaactgct

SEQ ID NO: 28333 - DNA, 992 bp, Zea Mays
ttccattttaaacagctttggactaggcctcaattcctggaaaatccaggggctaacccgcaagatcaccaagactcagcgaacagggtcccaggaccgcgggttcattcctaataattacagggtttcttatgataaatgccagagcgaaagggtatcctttaatctagaccgcctgatctagtgcctacgcgccagattagattggcgcgagttatgaaccggtgtgcgacagcaaccgttggatcctaaacctacgactcgcgggacaccatactacgatcagatctgatccgtccagcggtcaatcaacgatctggatataatataacgaatcggtattcaactgcatcccccaccatccgatccaaaacatacgactcctggcgcatcattccaacatctaatctggaccaaccctatgcgatccaacggtggacccgattcttcctccccgatgcgcccaggcggtggcggagcggccacagagacggtgagcacgccggagacacccgatttggcgccaccatgcatgtttcccccaaccaaatttgtgcaaaagcagtcctgaatcatggcgaggatcgtggaaggttactcaccggcctagctgctgcgagggtgcacgcccacgggatatggcggcacagccccaattcttgatttccgatgaggaattcggcttcgccttgcccccggatgcccacagaagccctgtcgtgatttcacagacttatcgcgactgaatccctgattgcagagtgatggagatgggaatggatggccgctacagccaggggctctagctcgcgcggcgactactaagatccgcctgcagcggcactctatgcggaggtggagttagaaggtggatgaccgagcggatcgacgagggaggggcggcttcgcggcgctcggagtttataaacaagccaccccatgtccgcgccccagggcgccattatcgggtgaccatctcagccacggtagtt

SEQ ID NO: 28334 - DNA, 512 bp, Zea Mays
ccctctgcaacgcatacttgaccttgcaaccaaccatggcacactttccccgttgcctgaagagacggctagatggagaaccttgttatacgcagatgctgctgccattctcctaaacccggtcagacaagacatgcaggcggtcatggagattctccaggcttttggccatttctctggtctccgcataaacctaggaaaaagctccgttcatccaatacgttgtgaagacatcgagctagaccacgtccttgagcccttcaatgggatcagagaatctttcccatgccgctaccttggcctgcagctccatacacgccctctaaagaaagtgcacgttcagccgctcatcgaacatattgctcatagactccctggctggaaagggaagtggctgaatagtgccggctgtctcactcttgtctcatcggtcctctcttccataccaacctatcatctgacggtgttcccgctcgcagtctgggctcgtaagagaatcgacggaatcagaa

SEQ ID NO: 28335 - DNA, 319 bp, Zea Mays
tgaaagctgcggacaaggcattgtcctcggccttggagtatgccccaagtagctcatcgctagtagcttcaatgcacttcagccaatcatcgtttggctcatcaaatttatccccaaacctgaaggtatactttagccagaccagaccaccttcgctagagtcggtggtggtctccttcggcatttcccaactgtctacaagcggccataccctaaaggctatatgttcttgaattaaatctcttgtcctaataaaggagcaaacagtgttgaaggccctctgacacgcttcgactatttcatcaatttctaccttcgg

SEQ ID NO: 28336 - DNA, 281 bp, Zea Mays
cacaaactttttaatgatgtgatgtgatgaccttattgtaatagccagtagtaacatttcatatcttatgctatgcaatgatggacttgtttgtgtaatactattctttttatcatcacatcctatataattctgttgcatccctcagtttttgtgtattgtgttggttgttcactctctccaaatatgttgcaaattgacatatcaagtcaatattaatatcacaaaactcatgcacatatttagggggagctgcacatacacaagtacttttatctcgc

SEQ ID NO: 28337 - DNA, 472 bp, Zea Mays
cgaggagatactcattgcgctcggcaattcacatcccgctctctacgcacccaaaatctggcacacaccctgtatgaccgatgggtctgggcccctgtgtgatagattgggttgccaggtttctgggtgaacgctgaacatgattccttacggcgtttcgggggcgcatgggagagttcgtctaaataaggattcacaacacgtattgtggttatctttttgtgttcacattccctctcaagcagtcacaccccttcgccttggtgctccttcactccacgctcgtgctatcgcacgcgcaatggcatcccttgccatcctcaccgctttcaaactgaggcggagctcgatctagtgtgccactttcttgggtgggccgcatcagggtttgtcggagggatctacgtgagctctcttcctctcggcgtcctgcaccgtggggaatttgtgttgttcacttcgtacatctcca

SEQ ID NO: 28338 - DNA, 505 bp, Zea Mays
cacacaccaccgttgatctcgccatcctcagccaaagcgccgcccttgctcatgtcacccgacaccggccatgaagtgcattcaagctaattttttctcccctcttccctctcccgatgtcgtgtaatttaaccacacgagttcaccgacattcaactagagtccgactgcgctgctcatgccggagccacctcccttcaatctatggcgcacttctataaaaggagacctcttgcacgctctgctcacctcacttcgagctacgagctaaaagagccccctctgttctagagcttcggagcacgcgttctgtcctcgctggagcaccctcgaccctcccaccgatgtcaccagcttcgctagagctcaagaagtctaagacaagctccaccaaaggtctaccgacatcttatccatggacttcgtgacccgagctgaatgatgtcgccacaccattgactgccactcctcgacccacaccaagcgatcgaccagtacgaagcac

SEQ ID NO: 28339 - DNA, 338 bp, Zea Mays
caccacgattctatttgggtcattgtggataggttgaccaaaaacagcgcatttcttgccagtacataccacccaccggacagaaaagtatgcagaaatttatattgaccagatagttcgtttgcatggaataccaaggactattgtgtctgacagaggagcaccattcgtggcatgtttctaggagcaattgcaagaatcacttgggacccatgtaataagaagctcggcataccaccctcaaacagatggtcagacagaaagggtgaaccaggttttggaagacatgttgagggcatgtgtgctacactatggtaaggattgggacaagtgtcttt

SEQ ID NO: 28340 - DNA, 614 bp, Zea Mays
gaatcgtcataaaaacacatcatcataaccttctccaaataataattatgatgatattgcataacaatgcacatatattatccatgttagctcgcgtgatccaccactaaggttagatcccattgccacacaagctttcaagtttgacatgttgtcacacatgataatatggttaccacaatgttatttttcataataattaaatacaatcttggataaaaataaataaaaatatacaatataaatggcttgaatctgtgacctaagggttggccaaagcctattcctcgactatgcttttgatatatttgttgctaaataagtatcttatttatgttatacccacatatttgtcaatatataattagatatacatgtttacagggaggaggcctcgttatagcctagtgcggcgctcgccaaacccatgcaaaatttccattgtccctagtaattttgtagaccatcatgtcaacgttggctagcaacaaccacaaaagttgacaataggtaggtccacctccacacctctcacctccacagctctctcctgctcgtagggcaccgacaactccatctgaacacctccatggcatgtcggcgacgccgcggtg

SEQ ID NO: 28341 - DNA, 333 bp, Zea Mays
acctgctggaagaggacttggtcgattacggggctacgccggaacactcaggtatggacataaatttacattcttcgctgattttactattatcggtgacgatgaacccatcgtcgctcaattcgattttggtcctaaagaggatgccttcactaagccaaaagaatcagtcaaccatctaaagccgctcttcgtgcgcaaccatattgatggaataccgattgctaagatgttagtagatggaggggcggccgtaaatttaatgccttactcaatgtacagaaaattaagaaagcaagaggacgaacatgtcaagaccaacatgacactcag

SEQ ID NO: 28342 - DNA, 638 bp, Zea Mays
caaaacacatcaatatgccacattgtttctaaaattaaaataatgaccttggaaaatttagccaaattacgtgagtgaactgtacaaagataggttaaggttgtaaggcaccttttttccaccatacagttgcgaaaaagttggaatataaagaattcaaaacaatagatcaccttttaaacctcaaatgacgtttctatgatattgagggcattgtattcacaactagtggatgatgacgttattgggctagctaatgaccttttgtgatactaggtttcctataatcccctctattcaaggcatacctagatggtgtttatgtccactcaagtaaaacaccgtacatcattttttccacatcgtttctcaaaataaaataaagaccatgggaaatttatccaaattgcgtgtgagatctgtccaaacataggttacggttgtaaggcaccttttttccaccatacagatgctaaaaggttggaatataaagaattcaaaacaatatatcaccttttaaacctcaaatggcgtttctatgatattgagggcattgtattcacacgagtgggttttagagtacaactagtggatgaagacattattgggctatctaatgatcttttgcgatactaggt

SEQ ID NO: 28343 - DNA, 351 bp, Zea Mays
cggcagacgatgtggaatggtgtagagatccccgttgctattgcaccgaaggaggaccgttttggtttggagatccttaacagaaaaaccagaagcgccaaattcaatggaacagttattgttgcgagtaagctgtcgaacagataacaaattacgaggaagctgaggagcgacaagaacattattaagatgaaaatagcgatcagctataggtaagagagatgtgccacggccagatgaagggatggactgcccgttaccgaccgtaatggagcacggtggggaaggataacgggaaaggagtataccgtcgttggaggacatgtgggatgtcgcttcgctgtccataac

SEQ ID NO: 28344 - DNA, 388 bp, Zea Mays
agaagtcgaagctacaaaaactcaggctgaaaccgaagctaggccttcagcgcccgccacgacgaaacctaccgcgcctgaggaagaaatggcagggcagattgcacctgaaaagaatgagactgcttctcccgaagctccaattgaaaatatcgactacatcgttcgacatgctttggggaaaaaattgtccgaagatgaaatcgctgaagcaaggcattatgctcaaaaactaaaatatctgaaaggagccttagtttttaacggaagcaatgaagatgatttcttatactgtctcccggacaacaaagaaatatccgtttgccgggagataggtaaaagcatgggattcccgaagttggaagatggcctttcaattttatcgaag

SEQ ID NO: 28345 - DNA, 351 bp, Zea Mays
ggccagagtacgctcgactgcaagggtgactcgtgaaggagaggagaccgaggccaccgagacagctctgatttccaaaatcatgagacagtcgggtttagttgtgacagagggaaccatttatgaagatacacctgctgccgaagctgaacaggctgatattgaggaagaaaaagctgatggagaagaggaggattatagcattttgatcccatcaaaacccagccacctagattttgagaagtctactgtgtctgaagccgacgtgcccatgatgatgaaactgggctactttggagaagctgagaggaagcttgttcattttgccggagaagaaaccactccaatgcc

SEQ ID NO: 28346 - DNA, 353 bp, Zea Mays
cgggaatcgcggtcgcaaggaggaggatagcttgaagcttcgtccaaggaggtccgaggagtctgtttggcttttggccaaggtccctcctttcggccattgctttccttttccccccaattttgatctttagtattttttgaggagatatgatctttagtattttctaaacttgaaaaacttgtctggctcttagggttgatgcatatacatgtgttgctattacttgcttgctccttgtcgacgatggtatagatagcagtagcactgtacacaagcagcaagcaacaccccacctccttgcattgactgttgcattttttatgaaacctaaagttgtgtttccatctgat

SEQ ID NO: 28347 - DNA, 704 bp, Zea Mays
gagaaagtcaataccaaggcattcttgtgtcttgatgttgtcacacgctggaactcaacatataacatgttgaatgcagcagtagcatatgagaaggtttttgagagatatgcagaagatgatccatactacacaattgatttaaatgctaacaaacaacctggagtgcctgattctgatgattgggaaaacgcaacaaagatggctgagttcctgcagcatttccacaagctgactcttcgtgtttctgtcaccctccaccctactgctcacatcttctttcatgaggttgctgaacttatcatcttgctgcggtcctggtgtgaaagtagtgaccctttacgcaaggaaatggctaaaagaatgttagtaaagtacaacaagtattggggcgatcatactagcttcaatattctcatatttgtggctgttgcacttgatccaaggtataaactttcaaactacacaaagattgctaccttagagatgtttggtgaggtcaaaggagaggaggtttggaaacaaatgactcaaacacttaccgagctatttgaagagtatgagaaaaaatatactccaagtgagaaggtaaccaaatcaaatgaagaaaagagggaggatgaagaggaaggtggcagcttgatgaggattttgattgctaagaggatgaagatgaataattgtggtgttagtgtttcaaaatc

SEQ ID NO: 28348 - DNA, 349 bp, Zea Mays
ggaaagtggaaaagtataagtgtttccgccaggatagcaagggtatattatggttcgaggaccaacttgttgttcccaaggatcaaaacctaaggaagaatttggatgaggctcatctctccaaattcttcatgcaccccggaagcaacaagatgtatcacggtcttcgatcccaatattggtggactaggatgaagagggaaattgctaagtacgtgtatgaatgcgacacctgccaaaggatcaaggcaagtcacttgaagacaccaggcaccttgcaaccactccctataccatcttggaaatgggaagatatcagcatgtattttatttgggattacccaatacc

SEQ ID NO: 28349 - DNA, 474 bp, Zea Mays
tgaatcttcaacacttccacctgaaacacctggctgctgcaacacctgaccaggcacagtgtactgaaactggaattcacaaggaccagattctgttagcttgctgaacattttcatcactgtcccaattccaccccacttcagttgttactgcttctccccagaatacctcccaatttcagctctttgttttatcttctgtagtgatgccaatgcctgatcctttgtgttcaacagatctacccacatatacctgctgtaatcatctactacaagtaggaaataggattttccaccaactgtctttggtctgatctgcccacacaaatctgcatgaaacaattctagtcccttttgagatctgaattcagacttccttagaaatggtgttctatgttgttttcccaaagtgcatccatcacagacctgttccaccctgtctactaagggcatcccttccaccatcttcaatct

SEQ ID NO: 28350 - DNA, 318 bp, Zea Mays
atctttatagcatttctgctgctcatcctagcagatcttgatttcctacctctccttggtccgaatctggtaaacttttttcttgtgaatcatgttgtagccttatcatccaaatctctggatcatttaatgtatgccctattatctggttatcttctataacccgttctcaagtatcggatgttaatttatctaactctctcatttctagtctttgtgatgctcattctctaggcatcatgacgtcgttttatccattttatctgtaaacagtgtatccctttggttcaatggattatgctgttgactttagttctc

SEQ ID NO: 28351 - DNA, 704 bp, Zea Mays
ctgagcttcacagttttcaggctcctgttccgttcaaggactcctctaagctctttggtccatttggactttagtgggacacttgacatgtccagtgttgtcactgtggtattccatggcagagcacaagcaacccgttgcagccctgttgagctaatgctgctgtagatcttcatgctcccagtctcaggcaggaattcaacaattttacagctgttcgtgccaccttttgtaccacaaccgtgtccccatatgtgaacctccactctacggttgcgtgcgagtacagcagagataagtggagccactgtaatggagctgttgtcaaggatgatcaacttcttcagcataaagttcacctcaatcatcttggagagttcttctgcccccttggatcctatggagtcctcccatatttggaaatcctccacacttctgttgtttgccaaagctgaagcaagcaacgtggctccagttgatccaattctacattcagaaaaaacaactgctttgatggtgttgttctggtgaagcatctccgaaagtggaacaaaagcatgtcctggttttgtgctgaaaacattcttcttgaattccacctgcttcacgcttgagccagggcctaaaagtgaacagagaagttgcaacccttgaacctgccattcaataccatggaataggatgtttctcaaattcatgtaatt

SEQ ID NO: 28352 - DNA, 470 bp, Zea Mays
caagggcattagttaagccaaaagacatgactatgaactcataatgcccatacgtggtgcaaaaagcggtcttctcaatatcctcctcacgaatcctcagttgatgataaccagaattcaaatcaattttggagaacacctgggcacccctcaactgttcaaagagaacctcaatacgggggagtggatatttattcttgatagtcacttgattcaaagcgcgataatccacacatagccacttgcttttatccttcttctcaacaaacaatactggggaagcccatggagacctgctaggcctaattaaacccttagccagcaaatcatccaattgccgcttcaattcaacctgctcctttggggccattcgatacggagccttatgaatgggctgcgtacccagaatcagcttaatctcaaaagatgcatcgcgctctagaggaatgcttggaagctctgccggaaac

SEQ ID NO: 28353 - DNA, 1361 bp, Zea Mays
tactaacataagaaataaaattattccaccaaatttaagaaatgtacttatgatgatggagcgactctcttagttctttgcagctctttggttattgagaattggtaacatcttttggacgcgggggatgactttgcagtttgcagcggcactcaaggcccctactttttctcgaatcccaactcatttcttcctcctcttctggattatcatctgggaggcaaaggggtgacttgtcgtagagcattttatgtcaaagatgccctgctttaccgacggagacagaaaattagtgaagacagagatatacaccatacaaccaccttcgatggacgcgggggatgacattgcttgacatggactgcgtggctgaggcaatcggcatacagtacttgcagcctgtactactatacatagacagttctgttttcctccaaagtgctttatccttagaccattctcttctgtcatatccactcccgctccactccatactgagcgtgcgttcttgatccatactgagctctgccgagtgctcgctccaatggctgaacttgcagccagcctggtggttgccccactgctgtccatgttgaaggagaaggtgtccagctctctcctcaaccagtacaacgtgatggagggcatggagaagcaccacaagaccctcatgcgctggctgcctgccatccaagaagttatcgctgacgccgagaggcagacgtctcgccgcggcgtggagaaatggctcgagcagctcaagacgacagcgtacgaggcgaatgaggtctttgacgacttcgagtacgaggcgctccgccgtcgagccaagaaaaatgggcacatcgccaagcttgccattatggcaagggtaaaacttttccctacccacaaccgtgttgcattccatatcaggatgagctacaggcttcgcaggattgttgacaccttcaaggaccttgtggaagaaatgaacacctttggattcaacaagcttgagcccgaggcaacaacgacatggaaggagtggcgtgagacagattctattatcgttgatcctgaaaatattgttgccaggtctagacatgatgagaggaagaaaattgttaacttattggtcaatggtcatgttaccgatggtgatcttatggtcgttcccattgttggaatgggaggactaggcaagaccacactcgctcagctcatctacaacgaccctcaggtcaaggagcacttccatctactaaagtgggtatgtgtgtcagatgatttcaatctccgtaatctttccaacaagatatgtaatgtgtcagagacaatccttgaggatgccctaaagaagctacaggaacatcttaagg

SEQ ID NO: 28354 - DNA, 381 bp, Zea Mays
ggaaaactaaaattcaagctctctgacgaacgattgctagtgatttttggtggctgggtgtgtgatgaccttgcggggctggcgggggcttcaatttatagggatcaatggcggtggccgggaatttcagtggggacgcgcagcggtcggaggaggaagaagagtactggcgtagtggcttggtgtccagcaccgtggcaattactccggcgatcaacggggagctagagtgaatcatggtgttgcgatagataggtagagacacgcggcggacaacgatgatggcttaacggcggtgagaatccttatccgagggcggtgagtaaggggagaggtaccgcggctagccggagtggcgtccagctgactggcggcgaagat

SEQ ID NO: 28355 - DNA, 582 bp, Zea Mays
aaaatttcatgaaattgcaggtcaatactgaagttattgcatctgaaggcatgattgtcactgctggtggcatagattgccatgtccactttatatgtcctcagttggcagaagaggcaattgcaagcggttaggcttcttgacttctaccatatattaggtgcaaccaaatacacttcatttgattatcatggaaatttcaccattttacaaacaaagggtatcaaatcaacactggggtaaatcattctggcagagctttggttgcttgtaaattttttatgtttgaaaatatatttcttagttaagtttcaaatatgatgtgtgtcttatgtgccatgtgacccaggttagtcagtgatatacatgaaaactttaagttatatctatatttgtgtaggcatcacgacattggtgggtggtggaaccggaccagcacatggaacttgtgccacaacttgcactccagcaccatctcaattgaaattaatgttgcagtccactgatcaattgccaattaacatgggattcacaggcaaggtataaatctgtatgctgtgaaattaaactattagaaaattc

SEQ ID NO: 28356 - DNA, 307 bp, Zea Mays
aacatctgtcaataccgaagctgcaaaaatttatgaagctaagttataaagggtatacctataagtctggcccgctcagcagcttcctcaactcttttagcctcttctaaggcatcatgagattctttctcattcttttcaatggattcatcaacaatttctcgtccacccttcagccatacttcggaataaaacttcccacccaaggtagtagcttcggctgaagggtttctaacatcgtcaactgagaaggcaaaatcaggctgagctacagccttggcatgatcacaaccaatcttctccaaaa

SEQ ID NO: 28357 - DNA, 439 bp, Zea Mays
gacgcgagtatggcggaagtggggcgaccaaattcgcctgcgaccatccgtgaagggagggctataatactgggtcctcgtggtttgccttcgaccgttccattgccgtaaaccacgaaaccaaacgaaggtgagtgccgcagaaggccgggagagggagccacgtcctgggatcgtcgccacgggtgaacctcatcgcacctacggtcggagccaggcagttgtgcattggggcttctctggacttgttgggaggtggtcgtagcctctccgctcgggattgcttgtcggcgcctcaagaatttcttgctgtcgttatcggtccaccgcggacagcatcccctacgtggtctgggctcgacaccgagtaagcgccggtatgaatccacttcctatgctcgttgggccattctattcgcgttgcgcgtctcggtttggg

SEQ ID NO: 28358 - DNA, 332 bp, Zea Mays
tggacccatgttttgaatggtggtgctatatggggtaccttggatgctttgcttggagtggtcgaattcgaggacgaattctttttaagggggtagagtgtgataccccaattttatgaaaagaagttaaatttctttttctcttttctttcatgttctatggcattagggtttggagtttcaggaggcattcctcagggaaacagtagatcttttggcattttttccgctggggtcaggagctcagatggaagagcgagttcaggcctttgatctcgatccgatagatgggagcccccctcctccccaaccctagccgacccctctccttc

SEQ ID NO: 28359 - DNA, 447 bp, Zea Mays
cgtccgctggttctggcgaggatgagggaacgcttataaccgcagggcggtttcatgccttgcatgcggcggtttgcctccttcgcgtcttgggtcagttctgatgacgtgtgggacccggccctcgtgtcgtggggtgggaaccctggagcacgtcggtggaaactttgcccgtgacgcttgggggcgcaagtgaggagatctgcctataaaaggggatcgatcccccgggcagtggccatgccttcacactcctctcttgtattgctcccttcaaccttccgtgtccccagatggggcgcgcctgtgtggctttcttcttgctgttgtttgagaagcgcaaccttatgggggttggcgctctccagtcgtcgtttagctttaaggattttcatcatacagcccggctgcattccctcaccaatggtcatccgtagggatgatcac

SEQ ID NO: 28360 - DNA, 394 bp, Zea Mays
cattcatccacttatcaacgtacaggagcagatttggggccgtctgggccatggcccattgagtggaggcccaggcggtggcggcggctcactctctgtctctctcccctagtagtagtccccctcggacctcgccgccaagcctcggatggtatcactgtccgcctccattgagtgcctgtgccggggaaacttcgcggccgcacaggtgctggccaacacatcggtgtccttccccagcctcggcgaccaccaccgcctcccctgccacagcaatgtcaaatccgagtccacccccgcgtccgccacctccgtctcgcagccgtggtcttcgccggctacgagcacccaccgggtgtgccttcccactcccctctctgccgctcgaaaccga

SEQ ID NO: 28361 - DNA, 425 bp, Zea Mays
gcgccgccttgggggagagctctccgccgcgctgttcgcgcgtgaggaggaagatggggcgccgatcgtctgttgccggatgtgcggccatgatttgaagtggggtactctttcgaccagggttaatctatgccgtagaatctggatcaaaggggggctcgggcttgttgggtgcgtgggcaacttctataccgttgattgcgtagggatcagcctggattgatgggtggataacgcttcggccgaggctcttgtggttgtcagatcgggtatgggcggctttgatcggctccaggatacctctttgactgatctgaatccgcgtcgtgggatgtgtaatcagtggccgcgattaggttacatgatcagtaaaccgagaccgtacagatctaatccaactgctcatctccaccgataccccttca

SEQ ID NO: 28362 - DNA, 331 bp, Zea Mays
tgcacgtactcgctgacagatcttccaccctgagttagttcccgaaattcatcttccttgagctgatcgatcccttggggcacatggtgctctcggaaagcagtttcaaactctatccaggtagcatctctgatggcagcgttgaaggtatcccaccaagctagggccatcccggaaagttaatgaggagccaattgaacacgctgattctctgggcatccgatggcttctaacttcctttaaatcatgcgcagccagtcatcagcatcgaggggattgctggatccagcgaatgtgggaggcttgagcctcaggaaatctcccatcctgt

SEQ ID NO: 28363 - DNA, 406 bp, Zea Mays
caggggtcaaagcttttgtggtctccatgacagcatctagcatgctagccatcctccttctcttgggagttgcggcagaagcctttggtacctttggcaattctgcctctgacggtgggctcagaatttctggcatcatcactgtttttccaattctggctctctggccgcatcatctttggcttcggctggcccgactgtaggaaccttcggcaccacaatcgatccttcagtgctctacgcagcgggagcagcttgttttgcttcggcagaagaggaggtcccttcaccaaattcaggcactacggtcgtttcaatatatcgaggccggtgggttaaaacctttattttcttgcccttcggcacagctggggtggccgaagcggtagttttcctctttttcctt

SEQ ID NO: 28364 - DNA, 373 bp, Zea Mays
tgctttttaatttgtacggtacttaaagtcagctgttgcacaggttctggcgcctgggttgccgcaggcagattttggttacaatggaaatgacaaatcgttgatgtgctaaagtttgatagtgcttagtagtgggaaatctgatgttgacccgtggtcatcggaaagtgaggagttgctaagcccgtttgctaggatggcgcaggttccggcgcctgggcctgcgtaggcagattttggtgacaatggaaatggcatatcgttgatgtgcaaaagtttgatagtgcttagtagtggggattttgatgttgacctatggtcatcggaaagtgaggagtttctgagcccgtttgctaggatggacgatgagttt

SEQ ID NO: 28365 - DNA, 381 bp, Zea Mays
ctgggttggacttggggtagacgcttcgggttggtgacatcgccggggagccatggcgcagctcctagccgcaccgccatgaccatgtgttatggggtggggaaaacaggatgatgatcgttggccatgggattataaacgggcgactatgattagattgtgtcttccttgaatctagaccgcaagatcgtaatggacggacgatatttgatctcacttgtaccctttcggtcgtataatctcatgccttgatttatgatcgggcggccaccagcgcaaaccggttcaattgtgctcggatctaatcctagccctcggggcgcgatccaacggctgagattgaagcataccccttcgccgtgacttttagctaaagagccc

SEQ ID NO: 28366 - DNA, 279 bp, Zea Mays
gcaataatggattggaagacaccaagtacagtttcggagatctggagtttcttgggactcgcaggttattaccggcgattcatgaagggttctccaagattgctaagcctatgacctcattattagagaagggcaaggagtttaagtggactgagaaatgccaagagagtttcgatcagttgagatctaagttgatggctgctccagtactgattatgccagatctacagaagaattttgatatatattgtgatgcaagttgccaaggcctgggatgtg

SEQ ID NO: 28367 - DNA, 346 bp, Zea Mays
gtcgatgcatgtgctgcccttccgaagaaaggaagccatggccgcctgaccggagagaggcgaacgggggacctaacatgtgaacatccggagggtcgtccaatcgagggagcagtcagcttcggatgtgaactgaaccttgagtactttcagcgtgtggtggatcacagctcaaccaaaccaagactcagtgtcagcgtcagcgtttggctgcttgctcgattcgtctgactgtttgctcatttgctggtacatgcggccagggcttggaatcaggggtccgtccacgagaagatgaccgaagaccagtccagacactgcagagcagcaacgtattgctccccgg

SEQ ID NO: 28368 - DNA, 422 bp, Zea Mays
gatgatagggcagaagagcaggaggttctcggccatataccaccttaaatggagagcatcagagagcagtctgtaaggaagtgttgtagcagaattcggcccatggaagccatttaagccactctcttggtctatcccctgctaggcaccgaagatacatggtaataattcgatttaccacttctgattgtccatcagattgggggtggaaagctgaactcatgtgcagcttaactcctgctagctggaacaattctgaccagaatgtgctagtaaatattgtatctctatcgctgacaatggagcatggcaacccatggagacggacaatgttatcaaagaaggcttttgctaccgatgctgctgtgtaagggtgtcccagagcaataaagtgtgcaaacttggagaaacggtctacaact

SEQ ID NO: 28369 - DNA, 551 bp, Zea Mays
tcaggctgatggaactctgaaattcagaattgcagtgtaacagagctaactttggacttggattcaaccttgatccagtgctcaactaagtttaatccctatagtcgagttgtagctggtttatagcactataatattgctgcagagatctggatgtgttgccacagaaatttggaagaaatctggccctaaactatggctgtcaggcttactgaaggagcactcgccatggtacagtaagtcccaaattgaagaagatcacgattccccccccccctcgccggtgatctgtcgccggtggttgattgctcgccgcgattcgtgcaccatggtcaatagataagctcgggcaggtaaatatctggcgccgggattgggttgagcctcgtggcggctaagcccgccgtacttcctccccagctcaccggtcgctcggataactctcaccgccgtcgagcggtcgccgttgcgcgccacgtgcttatgcgctagctctcgtcacggtgaatcatgcggtgcatgtccggtgatcaccggagcacctgccacgg

SEQ ID NO: 28370 - DNA, 320 bp, Zea Mays
cttttccgacctagtcggcgtgagggaaggggtcattgagcagcaaggggttatccaagtgagatttgtccagtccttcatagggtgtggtctcggcgagtactccactagggggactcgacccgttgggggcatctcatttagtccttccttattctatcccgtattggccctctggtcagtctgatcaatcgaatggggccccgtagccacccgtcaaccgggtttccatacgagaatgtgaggtacgaccttggacgtgggacctagcaaatgacctatgggccagtcatctggcttgcaactcgctgggagcttgc

SEQ ID NO: 28371 - DNA, 429 bp, Zea Mays
cggcaaccgtttgggtgggtccgcggagtctggggggaggtagtcagcaccttacccgtggctcattgggacccattactctagaatctctcacctcacttcatgttctgtgaccatccgcctcacgtcgtggccggcccctttcgtgacccaatcagccggtaagatctccctcaaccgtgacccacctcatcttcccttatgaattgtcgttgtcagtgcgtgaattggggcatcgggagggggacaggaccccgtattccgccaccgccaccatggttgaccagctcgccaccgccttggtcggtgcggaagaagatgagagtgtgaatcgtcgatctagcgtggatggtgtagattagaggcattggcacccactcgtgactttaaatccgagtcgtcggtggatagatgtgtggttcggggtag

SEQ ID NO: 28372 - DNA, 315 bp, Zea Mays
acgagtttcatgagttgtggcatccaatgcggctacgctggaggcacatggggctatgggggtattgggactggaagcagtggacccaagcactcggggacaatgtgataggtggcaagtgggtagcacgacaaaacggatggctgggagcacaaatgtcttgtaagcgtgtcccatcctgctataggacaagagtatttatagggtaacagaggaactgaggcctaaaataccgtagtgcactcgattacctactacatgtcccgaatatactgtccaacagggtaattgtggatcaccttggcactattcttt

SEQ ID NO: 28373 - DNA, 723 bp, Zea Mays
tggactgggcgcacaattttataagaatgcaggggctaaaacataattttctgggctcgactgcaatttgttttggcttaggatggatggcgggttggtttctagaaagtgtaagggctcttttgcaagttgacgcggccgaaggggtacgggtgaatgcggaccgcccagattagatcctatggtgcagattagatctaggcgctttataaaccggtacgcaacgtcaaccgtacgatcagagatccacggtccacgaatgcccacgatccaatctactgcgagccacacgattaaaatccgatggctcagacttaaaatgacgaaggggtattctctcttctaatctggaccctccgctccctgatcaacggtccacaatcgcaccagccgaatcgttattgcgcaactaatcacaaccgtcgcagatcgatccaatggccatagacaacccacatccgaccgatacgcccatctaatctacgcccttcatcttggatccgatggctctctagcttcttctcccccccggtgttcttccacggaggagcatctcaaccccgcggtggcacacaaaaccggcgaccagatcgacgcccaagagccccaacagctaccccggatggtgctacgtgtattcgagacaaagaagaaactatggaagcaattcttaccaagcttagcggcgcggaatcctctggccacggcgaaaacggatctacg

SEQ ID NO: 28374 - DNA, 286 bp, Zea Mays
tatggtttgcagttgctgtgctggtagatgctgctgctttgacacgtactagcaggcttcgcacctctggactaactcggctgcatcattctttgctgttagcgagtagaaacccgaccaaaagaccttcccaaccagggttctggatgctgcgtgtatcccgcattgcccagcatgaacttcttctagtagctgcttccctgtagttgagagaatgcatttcatgaggactcctgatgcgccccttctgtatagcgtttccccaatgagagtataatgagccgat

SEQ ID NO: 28375 - DNA, 988 bp, Zea Mays
ctggtttgttgttgtgcccgattggtaggtaagcactggaggaggatccctgccataaactactcgaaatagggtagtgtgcaatgctgagtgataagctgtgttatagcaatattctgcccatggtagccactcaacccatgcttgtggacggtctcttgtgatggaacagaggtacattgcaatgattttattaacaacttttgattggccatctgtttgtggatggaaggttgtactcatccgaagtttgacacctgatagtttgaacagttctcgccaaacgttcccagtgaagacggggtcgcggtcactgacaatagactggggaaaactgtgaaggcgaatcaccccttcaaagaaagctcgggctacacttgttgttgtataggggtggcttaaggcaatgaagtgtgagtatttggaaaatcgatctactattgtcaagataactgacttgccatgcacctttggaagcccttctatgaagtccatggatatgtctgaccaaatctgggagggtacctcaagaggttgcagcagcccagctaggtggagagcttcagttttgttttgttggcagactgaacatgccctaacccaatcccttaccaaggatctatctttgggaacaaaaaaatcggcccgtagtcggtgtaatgttttctggattccaccatgaccagctgagtgggctttatcgagtatggctggcagcagggatgaattaggcggcacaaagatttgtcggccatgcagaatgagcccatcgaccatccgccatggttcagtgagggtgccatctttgatctgagtacaaatgcattgatagtcttggttagaggtgctttcctgacacaactcttcatacaaatggaaggtggggctagacaacatggcgatcatgtcgtcggtagtctaccgtcgtgacaaggcatctgccactgtgttgaatcggcctgctctgtattccatggtaaagtcaaac

SEQ ID NO: 28376 - DNA, 552 bp, Zea Mays
attttcaccgatcacaaaagtctcaagtatatttttactcagaaggagctgaatttgaggcagcgtcggtggctggaattgattaaagattatgatttgtccattcattatcacccggggaaggctaatgtggtggctgatgcccttagcaggtccggggttccaaaggtggccttgccgttgatcgctgatctggaccgtttggggatcgctttgtgtcatgtcagcaccgctagcaaggagactcagatgcttattcaatcctctctcatggagagagtgcgtgcggctcagcagcaggatcgtctactgcaggaagctcgaaagagggcgggtgatggtaaaccgcgggagttcaccattgatgagaatgatttggttcgtttcaggggccgcctctgtgtgcctcagaaatcagaggtgaagatggatatcttgagagaagctcataaaacgccttacaccgtccatcctggcgaaaccaaaatgtaccgagatttgaagcaaagcttctggtggaagtggatgaaggttggcgtttctaagtatgtg

SEQ ID NO: 28377 - DNA, 319 bp, Zea Mays
accccccctaaaaatggtagttattactttttagagctagaattgtccatggactggtaaccgccctggcctcctagttcattggtacaccggttaaaacgacatttagaaaaaaggggtaaaatgcatgacttcaaaaaattttgtgcatgaatttcgtatgaaggaaataagacaaccatactccatggtaactggggtgagaatgtacatacctttgcccccaacatcctatattcaattcataggttctacaacaacaattatagacgaaaagaagttccaagggtccagctagatggctggccgctcaaaatca

SEQ ID NO: 28378 - DNA, 545 bp, Zea Mays
gtccatgctagatatggccggttggatttacatcctactggcatgccagaggtactggttaactgtttgagtgtaaaagcgcaagatggagcataagtataacttttgttgaagaaacgacatctaagaccaaagggaaaactgaccataaacccacacacatctagatgtcactcttctaaaggatgcaaacccaccgtaactgctctatacacacgtggcacccaagtatcgaaacaaagtaacaaactgtgtcaaccaaagatgcagtatgcatagcccgtccctcacaaatctaggtatctggaacccatcccaacacaaacacacgcaccaaagagtaagaatccaccaaccacacacggattgtgcaccggatgaccgacggtaacacagttcttgcaaagagcaaacaccctaatgcagcaagcaccaacggagccgaccctaatgcagatgcagacgatatgagggggtctagcagagcaaacgtggacttacggagtcacagacaatgtctacggggcggcgggcggcaggagcag

SEQ ID NO: 28379 - DNA, 371 bp, Zea Mays
gcgtgtagctcacggagctgctcgaggtccacaatctgacaccctgcgggggtatgaacctcaccttattccctttgctctccggcatgtggggctggtgccggggtgttggcctctcgaggcatgacaagttggtttccttcaccgtgctcctcatgcctgacatggaagcactctcgagtcgagtcataaccctcatcatcggagttgtagtcatcggaaccgtcggagaggtagttgtcacacatggacaagaaatgtcgcatggtcctgagatcacgtagcccagagaagtctaggctaggaccaaaatcatcctctgcctcagagcctacgtacaccgagtttggagaggttgcaagcaggtctaa

SEQ ID NO: 28380 - DNA, 349 bp, Zea Mays
atcatgaacaggaggccagtgaaagcgctcattgactacgttgatgattggagtctaagttcggacagttcaggactgtgtgattgggaggcctaggtcaggtggatttgcggctaggagcagggagctgtggaaggtacaatggcttgtagaggacaggattgtgtgtggttagcagccattcatggagggctgagaggggcagagaggttggggttacttgggtcacttgaatagagctaaatgaatcgggcaatccagtggcagttgacgccttgccggtagaccgggacttccaatggaaaaaatataatttgagtttttatagtgacaaatcaaattattagtc

SEQ ID NO: 28381 - DNA, 388 bp, Zea Mays
aaaaaggaaaagcaacaacattgatgggctcaatttagcccgagccggcccaagagaggcagaacccgcccacgggcgcgcctgtattgtcggatttgcacaggggaccctggtaatttgaaaaccccgttaatagtcccacgcactgttcctatgtgtcactgactctttgcacagaggcccttcactttctaattctacgcgggctaaagtcctcgaccgaggacggcggagcagcggctccggcgagcatgtactggccaagatacgcaacgaccggtgctctagagcggttaacacctaattcgacccctaataatcattacccctcaaccaatttcaaggctctagctcctaatctctctgcccacggtgacagtgcgctcaa

SEQ ID NO: 28382 - DNA, 589 bp, Zea Mays
atacttgattagggttctaacccaagagtatggtgactttttgcccaaggaagacacatgtgataataggtcatgggtgtgtattgagttaactctagagctgacaccttaggtgtcacacgctccccgcgtgtgccctaagcgctggtcagccacccatcgcacccatgcccttgtgcgcttataaagcccgtcgtggcctcagtaacactccccgcacatccctaaacccatccctgagcacgcatcaccggaatttcatcgccaagccgagctccgctgtcgttgtttatgacccgactacgcaccatgaggttccccacatgatgcttttgagcaggacgacatcattgattgcgacttgatggtacgtgcagatgcacatcgaatcacacaagggtttatacatgttcgagccgctagaatgcgtaacaacctacgtcctgtcgaggctgaatatttgagtaccactggtctacacgggttacagatgagcagtgggcggtggagggtgggttctcttgttgatctactggtggcctagttgctattagaaggctataagctatgaggtggtgatgggatggga

SEQ ID NO: 28383 - DNA, 478 bp, Zea Mays
tatgctcacgaaggcgttgcgcacttggtcttgtgtatttgttatgtcggtctggcgcgtatgtagtcggtctttgcgcggacagtttggtgtagttattttcgcacttgttgtgcttggtccggctgcacccttaggcgacttttgcacggatacttttcgcggaagacctcgattttccgcacttgtgctagtccggctgcacccttgggcgacttttgcatggagacttcgatttttcgcactttttgtgctaatccggctgcactcttaggcgactttggcacggagacttcgatttttcgcacttgttgtgctaatccggctgcacccttaggcgacttttgcacggagacttcgatttttcgcacttgttgtgctagtccggctgcacccttaggcgacttttgctcggagacttcgattttttgcacttgttgtgctaatccggctgcacccttaggcgacttttgcgcgg

SEQ ID NO: 28384 - DNA, 385 bp, Zea Mays
gctgcgtccatggatggagcagggagcgtcgagtggaactgcagctcggccagggggaataggggcacttggctggagagaggagcagggaggtggagctgctgctgggcgttgctcgaggtggtgcagggacaggggaacctaaacgagcagccatgaatgccaaggaaaggggagcagcagccaaggaaaggggagcagcgagcatggagagggagtctgcgtccaccatggggaggagaggggaggggcgccagagcaaggccaccaagcaccatggctccctacgcaaggaacaagaggagtttgcttcttggggaaccagagaggaggatggcatgggggagaagagtggctggcggctggaaaaagagaggggtgggag

SEQ ID NO: 28385 - DNA, 279 bp, Zea Mays
tgtatgtccactttattatgtaggatagaagatgtccttagagcatagataggtttagttatgaaagggtagggctaggaaagactctatccaagattgtggatcttgattacttttgaagatctagcttgaatcttatccttccttgatttgatgagctcgatcatcttcgatcttcgttcttgaagtttttatccgaattagggacatgtagttaggataacttgtaggtaaggacatatggttaacagactggtggcataagataagtgtattatg

SEQ ID NO: 28386 - DNA, 277 bp, Zea Mays
cggttcggttagaggtagatgtaatctgatccgtgggttgctaatcgtgtggttcccgtgcgatgataccccttcgcccgaaacaatttgctaaagagccctcgtattttaatggattcaacccgcagtccactgggactgttcacagagtcttaggaattttctgtactagccccctgagttttccaggaattgacgcccgatccagagcccgtttaaaatgtataaatgaattagtaaatgtatttttaatacaaaaataattcctagaacttag

SEQ ID NO: 28387 - DNA, 307 bp, Zea Mays
aggagatctgattccgagacaacagacatgtggttacctgcaaacggcaactggctgttgggatcgatgggaggaatgactaccgcagcagaactctggttcttccgcttgggcgccatcgcaatctcgccggcgggtcgaacaagggcaaaatcagagataaacagaggagtggtttgaggcggaaatgtgaagttagggcttagaactcaaaagcgcatgacgacatgagtataaatggggttttcccgggttgggcaccgtttctaaaaagtgccaagtcatcactcgggaaaacgagatttcc

SEQ ID NO: 28388 - DNA, 331 bp, Zea Mays
tagcaggcgtgcgtgttattttcttcttagagggccttgttgcttcggcagtagtacagggaactgaagaaaaaacaatggacgaaaaccagttcatccttctccagtttcgatcgcttgcatttcagagatgagagatctgtcctaacaccagtgctagttttcttccgaaagaaaaggtgtgtactgtcattgatgaccaccgaatttgtcctttcgctctttgcactgtatgccgcaggagtttatatgatcgcgatggaaaaacggtggagtagcctgtactgccttatcattacatgcggaggacatggacctaccctagctagcc

SEQ ID NO: 28389 - DNA, 386 bp, Zea Mays
ggattgtcggagagcgactggaagttagtgacaagctcacaaaacggtcccatgaaatcagcctagttgtcgacgcattggtgagaaaggtggcgaagccactggagtgcatcttgccccatcacgattgggagatatgatgtcatgacatcctccatcacccgatagctttggcagccgtggagtaaacggctagctagtcgcccaggtcttgcttggcctcatacttgtcaacattggagaccttgaagtttagcagccactggaccacacgtagtcgagagatgaaggcagataccctgaacatgcctcaagctccccgagtgctcgcccaggcttgattgtgacatcgatcccgtggcggtgaatgatgtcacggatcatgc

SEQ ID NO: 28390 - DNA, 431 bp, Zea Mays
tatgacgagcaggtcccgctcggtcagcgactcagcttccctagcgccgcacgtgcgaatcctgcgcccgaactgcacaagccaccccaccgacaaatgggcccacgccgcaacccccttatcacgtccacgcggtaccggttgggatgaaactgctaggtggggctgattcaccagcgccttcatcgtcaaccgcatggcggacctcacgtggattgcgatggtcgtttcgaccaatagccagccggatgccagcttcgcgaaccgatgaagccttggcataaatacagtgtgcccgcgacctcctccccttttcgtccatttgccccaaagccatccaccatcagtgaggagcagtgtgttaggaagggctgagttagattgccaccgccgcctctgcgatttgccccagtcttcaccgcccgggtttc

SEQ ID NO: 28391 - DNA, 463 bp, Zea Mays
ttccagtgtcgatgacgacatcaatctagggtgacctgaaggagcccgagaagccgtcgcagggtattcctgttcctaccggcagcaggggagttgaaatccgtgggtgcgcggttggagctcccaggcatcgcgcaatcgccaactcgttgtacccgaaggcgtcgacgacggagtcgaagtcggtggctggagcgagcgacatcgccaggtgggtgttttggtttacctatcccacccagatctggcaggagtagcgaggtttgggaggaggacataccgggatcgaggcgtagaggtggcgctccggcggtgaccagggcaccaaggggcaggggcagacgaaggcgcaacaaccggatgcggaggaagaacagagacacgagagagatggacaaatgagtgcgcgacgacgcggatgaggcggggatgctgctcagccagatcgagaaccccgtccggc

SEQ ID NO: 28392 - DNA, 441 bp, Zea Mays
acggaccaggcatgtgaggtggttagctctatttatgactgtagcaccattgatttcacaaatttgtcaacacaagatattgcaggtataacaatcacatttttttgtcacatttgcactatctattatgttaactctttacttatgctaaaatgctaaatgtaggtggagacgaacaagtaaatctggatgcatatgatgatagcgattggttgcataggaatgagacattccaggcaaacaacattgtcacaagtaaagaccttctaacaccaggtacatgattgttcgcttggctaaatatgtaaaaaacaacaggtttcaaatcgttaaacgtagacatgccttattccaggttgtgtgcatgaaactgttgataacatacctaagcatactatgaaaagggccgcctactttagtgagtggtacaaaaacatgact

SEQ ID NO: 28393 - DNA, 442 bp, Zea Mays
aagtggagacaaatgggttacccaactaaataactaactttattaataactacaccaagttgtaggggatacccacaccttggtgacaatcattacaaagatccaacttcagtacatgtccatcataacaagcatccaacaaagataagcaaactaactctgactaaaactggctagactaagacactgaactaagaattattatagactccgactctgtcgatctaggggtctaaatccatgcgggtcctgcagtctggggtaccatagttgaagcgaccacggggcggtgaacggtaggggtgctgaatctcgacaggggcgggagcaccaccatcaagatagtggcatgcaacgcactcagcacgcaattctgcaacctctgcccgaaccttgtccaactcgtcaagggtgtggtccaactctatgttgagcacgacga

SEQ ID NO: 28394 - DNA, 354 bp, Zea Mays
ccctcaggggctagataactgccagcaccaccgtcaggggctgggtcttctgcagtagccacctctaaggctgagggctcctctatcacctccatgggtgtcgggcaactcggagaagcatcttggcattgaagactgccctccaaagtcgatgatgcacgagacactactcgagatacctccagtccaacgtctggaacctctgaacaaacaaccatcacatcatcggcagtgggctctgacagcatatcctcagggaagacttcctcaagggcctgatcaaaatctgatattgacaatccctgaagactgacaaaagccgacagagctggagaaggaatatcactccccccc

SEQ ID NO: 28395 - DNA, 307 bp, Zea Mays
cggatacctccacactctcgataaccactacgacgacctttcctcccactgcacccacctaaactcccgggtggaaagcttagagcagcaggtcaaggaactcaaaaaggagaaggcgtccctccaagagtgtctcgatatagcagaaggcgaggaggccaacactcatgaagcctaccgaaccctgaagatggattacgataagaagctaaagaagctcgcccccacgaagaaaatccaaaagaagaccaagagccaaggatgccaaactgggcggaagaagaaagcccctccagcaccacctccc

SEQ ID NO: 28396 - DNA, 275 bp, Zea Mays
ctgagatggcgaatggccaacagattccagttgactgtgtgtcgtgctagatttaggttggatttgatttgtaattttgaaggaaggaaccaatctaaacgcaggggtgcagacagagtgtattggagcagcaacccagcagtagcagggtttagtgatgctggcgaggtgcaaatgctgcagtttcgggcaccagggacacggacggcaggcacacaaacaagcgagagcgaaatcaaccaaacagagcacaggcaattccgtcgagcacacac

SEQ ID NO: 28397 - DNA, 450 bp, Zea Mays
agcgtgagcatgttgcactgtcttgagtcgttgccgacttaagccgattgctccgttagctgggtatagtggtcaccccgaattaagtaagcgcgagcatgttgcaccgtcttaagtcgttgccgacttaagccgattgctccgttagcagggcatagtggtcaccccgagttaagtaagcgtgagcatgttgcaccgtcttaagtcgttgccgacttaagccgattgctctgttagcagggcatagtggtcaccccgagttaagtaatgcacgagcatgttgcaccgtcttaagtcgttgacgacttaagccgattgctccgttagcagggcatagtggtcaccccgagttaagtaagcacgagcatgttgcactgtcttaagtcgttgccgacttaagccgattgctccgttagcagggcatagtggtcaccccgagttaaataagaa

SEQ ID NO: 28398 - DNA, 365 bp, Zea Mays
gcaggacggtaagatccaaatacaaggcgtgaggcctcaagggtgctctgaaaacgaggtggctggatcagctgcgcaaagatgtggcataagtagtgagcatagggtagctgccgacgagcacgaatcccatccagaacggtgtcctcaatctcacagatcagaaagtccacaacatcaaactcagagtgggataccagggcaccaaggagccaaagctgaatatgagtggtagcctccctgtatcccatcctcggcaggagtgtccgtctgatgagctcataaaggtactttgctgctgtagtgaagtctgctggagaacgtcgcgacccatctgagaaaggcgggcgaaacagagccgcgac

SEQ ID NO: 28399 - DNA, 393 bp, Zea Mays
gtgaaccctatagacagcaaggaggcaaactgaccataccaagggtgaggagcctgcttgagtcaataggctggctgcagtagaccatctcagacatagatccatggagaaaggcgttcttgacgtcgagctaataatctgtccaatcacgtaagagggctagtgcgagaacggtccaggcagtcgtcgacttcacaaccggattgaaggtctcgtcgtagtcgatgccaggccactgggtgaacccgcggagaacccaacatgccttgtaccgctcgagggtaccatcggcatggagcttatgcttgaaggtccacttgccagtgacgacgttggcgctaggaggacgagacacaacgtagtcgaagcgtgcaccagcaccttcacgccaac

SEQ ID NO: 28400 - DNA, 304 bp, Zea Mays
catgcacgcactaggccacaacctagccctaagccgccaaacccttgtctcatctacgctgaaacaattgcaatgcttctgcgctaccagatctgatctgacagccaacattcatctagggtacgtataaaagacgcctttttcggttcgcatggggaaccctaaatcattttttcactatagtactctctctccctctcccgttctcgatcccatccatgagtgtattccctcttcttccaccttcctctgatctctagtaatattaaaagatcaggatggaacgttggtgccatctagttat

SEQ ID NO: 28401 - DNA, 281 bp, Zea Mays
tttgaactgacctcaattgcactggccacgacgagggtgttcttgtggtgggatgagccggtttgggggaagtaaggaattcgtggtctctagtgagcgatttgaagcaatagttggtgtgttggcttcgtgattacatggcgcaacagccccggccatcaatttataggattgttaagcggcggctgatgaatttgggtgagacgcgctgcggtcggaggaggtagaaagttactggcgtagtggattcgtgtcttccgtcgtggcgaactcaccggcga

SEQ ID NO: 28402 - DNA, 694 bp, Zea Mays
ccgaagggcttacaaataactaatgatgccaaaggccatcacattgtcaacctcatcatgactgaagaccggcgggcccctataactttgtatctccaaggacattaccacccaagtgacgtcaatgaggccaaacgcctcaagcaccgaagccaggacttcgcactagtcgagggctagctgtacaaaaaggggatcagtcagcccatgctaaagtgtgtgtgaccaaaaccgaaggcactcaaatccttcatgaagtccacagcggaacttacggctcccactcaggacctagggccctcgccgccaaggtgatccgtcaaggattttactgccccgcgataatctgtactgcaaatcgaatcttgaggtcttgcaaagcatgccagaagttttacccccgctcgagcaacccttcgcagttcaccaagctgatcgcccacacatggccacttcaacgctgggggctggacattgtcggaccactgcctacggcccaaggaaacctcaaattcaccttcgttgtcgttgagtacttcaccaagtggatcgaggctagagcagtatcaacaataacgttaaagaccgcccaaaagttcttctggcaaaacattgtctgccaattcggagtcccgtccgaactcacagtcgacaacggcaaacagtttgacagccaggacttcagggatttctg

SEQ ID NO: 28403 - DNA, 610 bp, Zea Mays
tacctagagccaaaaactcttttaccatgagacattgcccattccttcaaattccatgtaccatgcttcataagccctattattcccccttgtgtatcatgtttcccatttacctaaagcatccttgtgaaccatatccatgtccatattgtgatctacaccatgcaccttaatttaaaatccttgctcacttttagtgtgttgtgtatatgattcatattttcataatcttttatgactgtgtgactcatgtgctcacctcttctgttatttcagtgtgacggtgtgcctgctcgcgttagtcttcccctgtatgttttttcttgagagacgtgccccaggtagcaaacctttcttatctccacacttatctactgctttgctgctcttacttatctcctcttattcttgtgcagcatatcagttgttagtgggtagttccagtagtcagggtttgtggtcagttctagagcagggcccaacagttagtatggttaggacaaagaatgtcactctaggagggggaggtgatcatcaggaccctccatgccctattagacaggataagggaaaagtagtctacctagagcagcagggtggcaagaagaag

SEQ ID NO: 28404 - DNA, 306 bp, Zea Mays
gcacctctagatcgttatcattatccacgttctgttgccgtaattgttgaaccaactacttatcaggaagctgctagtattcatgaatggcaacttgctatgattgaggagtttgctgcacttgaccgcaccggtacttgggatattgttccttaccgtcacatgctgtacctataacatgcaaatgggtcttcaaagtcaagaccaaatcagatggttctgttgagcgatacaaggcttgtcttgttgctagaggttttcagcaaagtcagggtcgagattttgacgagacttttgctcctgttg

SEQ ID NO: 28405 - DNA, 426 bp, Zea Mays
tgacaactttgttagagcatatgatcacacaacaacaacaacaaattgtaccaaagcaacaatggttacctagagagcagcgaaaaatgttggttgatcagctatgatgtgaggtcaagcacagataagacagtgtcgccaagctacatgttagggtcagtttcaacaacagttgctagcagatcttgcctataactttgcattttctagcacttcctatagcaaaccagagtagcaatgccaccgtagccagtacaaatggctcatccagctgccctacaaactccagtagttccatctatacagtcttgtgtactttagggctatagagtctataccaggttgccccgctagtctaatgtccatcactcatatcactcgagctcctcctttgttggttgacttacctatagcactagagccatc

SEQ ID NO: 28406 - DNA, 471 bp, Zea Mays
tcggcccaaactcgtttccttctataagcaatggatgagaaggctcgggcgattcagggaaactgggaccaaatgtttcaatctatggaggcaatgacatgaagactgaaggaggtggagagagtgcagcaatagttgctgatgtagtttgaattggcagcagttgtggctgaacaagcggtttctgagaggaatgatttgtatcggaagttggaggagactggacgagaggcatctcaactgatgttggagcagatgggaagagaattgggagattcatccacttcaactcatgtgccaatcggagatcaagtaccacaacgtgatcggcagtttcaaggtggtcaagagtgtgatgaccaccaacgtggtggtaggggtgatcttcgccaacatgctgacacaggtaatcaagcaatacccaagctgcctttcccaaaattttcagagggcgatcctatgtgtaaggaa

SEQ ID NO: 28407 - DNA, 335 bp, Zea Mays
gtcgtgcaagagatgtacaatagcaaatcttcagctggttgagtcgatgtagctcgccgaggtggtttcagtactggcggtgttgtcaagaattttttcagagcatctagagcttcttgtgcttctgaagtccactgaaatttatccaccttcttgagtaacttgtaaaacggcaaacctctttcccccagtctggatataaatctgcttaaagctgccatgcatccagtaagtcgctgaaccttcttctgcgatcgaggtgcttccatcttcatgatagcttcaatcttatccggattagcctcaattcctcggtggctgacaataaacccgag

SEQ ID NO: 28408 - DNA, 461 bp, Zea Mays
cctggaagcatctgtctcagcacgaccaaaccactgaatcaacaattcctaaacacctctgttgagcctggcacgtaccaccttggatagtgttggtaggacacgaccatgcaagatcacaggtaatggtaccacttgtgttggcgcctccccttcaaacttcttcagcaaggaaacatggaagacatcgtgtattcgagcatgaggtggtaactgcagcttgtatgagaccagccctacccgaaggaggacctggtatcgaccgtagtactttggcccaagtttggagggagcagcagaagtcaacctgactgctgtgcactgttgtaggcgaagccacacccaatcgccaacatggaactccacctggcgacgtttcttgtcctagtaagctttcatggttacttgggcctgaagaagacgctcccggatttccaccaagaacgtgacgcggtcctgca

SEQ ID NO: 28409 - DNA, 426 bp, Zea Mays
tccaggtttgtcgtaaatagaagaggaggcgagcccgagcgcctatagcaacatggccacaggaatggcctttgtacttgcggttgacttggatcggggggagacgtctgccccatgtatctcgcatcttgaccgagcagagagccgaggccaggatcggaagctcggacgcatagccgaacctaccttgcggatgtgttgtccaagccgtagttgttagaatagtgataagtatgggaaaagcacatagtaagtcgtcctgtatggcataaaagcagacttgtcaccaacccccatagtttatgtagccatcctgttgtgagatgtctccgcggaggggttggtggtgtcgagcgtcctttcgtcgatgttatctagggcaaggcggtgctctagcgaggcggaggttcctcccgaggccagtgt

SEQ ID NO: 28410 - DNA, 374 bp, Zea Mays
tgcggcccacacgaacccatcgacccaattcgatcaaagtcgcatcttatcatatcaacggttcagatcggaccccacaatttatgtaacggtgtgaaacctcatccattagatcttgaatcgatggcctgagaaatgcccacgtcaacgttcatcatcatcgttcaaacaggatccaatggacctgccgctatcttctcccccacgccaccagggtgcgacggcgaccccaacctcactggcgagttcgccgagcagtagccaaaatcgcgacaccgaccacaattcaccaccgcgctaactccacacaatgccgctgacccgacgaccctaacaagtggtttcctacccgcacatacatcgcaatgtctcca

SEQ ID NO: 28411 - DNA, 704 bp, Zea Mays
ccgtgcgccttgggatagagtcatggcttctcgggccataaatacgatgcgtcgaggttgacttcttcccttactcaccataccgcaacaaccgaaaccattaagagggtgcaccgtcgagtcgggcggaacgagggtgtgtgtgttcgtgtattcgcgcgctcaaaggtgtgggtctcggtcagtggggctcagtggggagcgcaagtgcaaccgcccgtttgtagcgtagtggcgggcatcggcagcgtccagggtgttgggaatttctcgctggagcccaaccaatctcaccaatccactactcgtcgtggttgggttcgtccgcggtgaattggaaggtacgtgcccgttcgtagcattcgccagacgatgggcatcgtgtagtgtcctacgagttagtgttttgcgtgtggtaccgagaaattgggagatccgatcatggcgccaccgcgctggacggcggtgttgccggtaagcctggcggctggaggaagacagctctcttgtcgtctgatccgttacggacggtgtagattagatcaatgtgtaacccttcgctggaacggatcctagccgttagatcataaacggacggacgtgtagtgatcctaacatttaaaatccctaccgttggtccccaatcggatggttctgcggcgctatgagtttgatccgcgcagatctaatccataccacccgcg

SEQ ID NO: 28412 - DNA, 304 bp, Zea Mays
ggaagagagagatcgaagagaatcagggtaatgcagatgggatcgatggaattcgtagcgtcggcgttggaggagcttttgccggaactttccctcgaggagcagccacagttgcagaaccaatcccgcgagcatgactgcatccggaagcgacataacaagcactctcctcctccccgtccgtcgttgatctcggtacggtacgtgatggagatgggatcgatgggaatggatttcgtggcgccggcgttggaggagctgctgccggatctttcccgcgaggagcagctacggttgcaaaaca

SEQ ID NO: 28413 - DNA, 573 bp, Zea Mays
tttcagcctcttctgtttcaatgcaacaataggcttatcaagatcaatgtcatcttctgttttaacctgattcttaatgccacatccttccaatgtgatttttgaaatcttccgattcttagctttacactgagtcctgagatccttgagtaatacatcatgacaattgtgttcactatccttgtcactgacagaaccaacacttagttcagaatcaattacttcagttttgatcctcttaaaagaagaaggatccctgtcagaatcttcataaactacatgaatatccttaaaccttgtagatctcctaggacaaccagaatcgagatttttgtgagcagaagcaggcattgtgggtctggaaagcaatggtacagacagaaaaatatttcctatttcctgtagaaatgcagaaaatcaagtgttatgatcaggtgcatgtggttaggagcaaacggttaggctctgcctagcacctaggcagttatactattttccaagcaattagagtaagccttgttaaacacagaagatattgcatattaaaagaaaaacttcaacattagcacatgt

SEQ ID NO: 28414 - DNA, 416 bp, Zea Mays
gttatttgtgtgtgtgcatgagctgaattgaatcttggtgaaaggtatgtgttaagttcctacaaactaaatggttgatggatatttatttttgaagaaacctacaattttatcacacagtcaaaatactatttcctataaagagtaatatatagttcatatttgaagcatggcctaataagttaacaaagtaattaataaatataatttaaatattagcatcctatgctggatccctgtttgtgcatttaagtttgatgtttgaatttgaataacaagttgaaaactgaaatacaaaagaaaacagaaaaatattaaaaagaagagagcctatcagcttttcgggcctaaactgttttcctagcccaatatcacgcacccgccggcccagccaaaccccacagcggcccacttac

SEQ ID NO: 28415 - DNA, 1723 bp, Zea Mays
gtcatgataatgctatgtcaggcaaaggtacagctattgctccaacttttcagggaaatacacagtccatcagttcactggggaagctaaaaggttcccttgatggagccaatgtggcaaatactttggagtcagctggtatgtcaaagccctcaaagaatctgcatgctccttcaagtagaaacttctctaaactgaaggaaaaaaggaagctggtggaatcatcagataaaggtgcaccacctaagtgttgttgaagtttactaatacctttctgttgttttgtttctaaagattcacatttctttaggagaaattgttggaaaagaccaatcacgtcgaatgagaagcagtgtaggggttgatcatgataacctgcgagcatcaaagaaaatgaagaaagaatccaatggccctgtgatgaagcatcaaccctctgagtttgaaataagcaaaagtagtcctgccagtgagactctgaaaaacattcagaagcgcagttgcatttctcctggcatgggaaagtatggtttatcttcatcaggtaaacattctcatggtgaggataaagatttctcagctgtggtcattaaaacatcagatacagagaactctggccctcgagactcatccattaagaagagaaaactgaaacaaaggcagtcaagccagcattttcgggatccacactgtagcaacaatgacacaaatggtattacaaaacaaaatattactgaaattaatgctgtgaagaaaaaatccaggtcagaattgaatttgttaaagacagataggatagctactgattctagaggcacagttggtggagttgatgataggatatctactgataaggagtgtttaagtgagcaacttcaagaaaatacccatttccagcatccgtcactcgtagaaggcaccacaaagagggaaatccgtcatgcacaaacacctatagctgcgacttcgagttcatccaagatgtctaactccaacaagtatatagctcattttcaggaaacgagggcctctcctgtagagtcagtttcttcctcacccttgagatcttctgataagaatcctttgggtcgacatagaagctcttcatggacaattacagaaaatgtgcattctcaagagtcagggaagataaattcttcatgctcgaacagaaactatgatcttgggtctgattgtgataaagctaaggctcgtatttctggttgctttaacggagatgtgagtcatcatgttcagaaggatagggactttctgaaagataaacaagatgtgatgaacgcatgtcttataaacaaaggttctggatttggtgctagaaatttccagctgagtcctgaacataaagtcaatccagatgtcctttcatcacatgacaacgatggtcacaagcaaccaacagttcgtcagaatgggaaaacacagccccatttcggttcaaaccaaggtgaccatgcaaatttgacttatgggcatattaagcctggtaaagggaatataccaaataaggaccagaaaacaaatccatctgcagtcaaagcaagcaagcagcagccatccttaaacaatgcatcaaatggtgatgcctcttacaaggcaaggcaaatagaaaaggctgttattgaaaatttggacacgaggaagcacatcactctcaatggtgatgcttcaaatctaacaagtgcatctgttctactgaaggaag

SEQ ID NO: 28416 - DNA, 463 bp, Zea Mays
gcgcttctctccctctctacggctgcctggtggtccccactggacaggttcccaccgcacgatctgcgcgcttgtggatgacacgtgtgggcccgcctagtcagtgtcttcctttgccgcgcagattgcatccagtggctgtcttgcgggccctctctgccaggtcgttcgtcctcaaacagaacgcgcgaactccgtaacaaccctaggcgaacgccgcaatcttcgatgatgatctctgcgcgtatggtttggaagatcagggcaattccgggcttctgtatcggacttcgctgcttggctataaaacctaggccatgagctcttccataccgtcttcattaaccaccgttgtgcgccatggcggggcatgaacagatccaccgctgggggtcgtagtcgacggcatgccaccgctcggtctctggcgattgttcggggagcttcgcctggatgcagtgga

SEQ ID NO: 28417 - DNA, 804 bp, Zea Mays
tgggcataaggtggggagcgtgaaatcagttctagaaagccagtgctgttgacacttcgcgtattttttctgaactacagagagctgtggttatttaattaaggtagaaaaaagagtacacgagtccagaaggacccaaacccggactacaggaacactacacacacacaaacaccccagaaaatagatcacggtcgtgccacaggctacaagaaaaaacaaccagtgatctcagggcttaaaatccaagggccagcaacctgagcaggagctcttcgagcttcgatgcccctgctgaacactagaggccacctccatgcttactgacctaagcacagcctgagtacttggactcaaattctcaaacacactatcatttcggtgtttccagacctcccacgccaccaagatcatcaaggagctgaggcccttacacatttcttttggcactgcagtgattaattttctccaacatccagaaacgacccactgaaggatcaggtgctaattgtgttataaccaggtgctgaaaaattgaggtccagacttggcaaggaagaacacagccaaccagaaggtaattaatcgactccttggcttggtcacagaaggggcaaacctctgagtggggcagaccccgttttgctaggcggtcaaccgtccaacaccaattatgtaccaccatccagatgaagaatttgcaacacaagggggtctcagacaagtatttgcaacagctggctcaaaacacctatcatatttggagctagtaaaattccattttttcaacaagactaacgaaag

SEQ ID NO: 28418 - DNA, 389 bp, Zea Mays
acacgggggtcgaactcgtcagatcctcctcccaacagcatgaccgagctaggcagaggggtcgcgccattgtcgcggggtcagttgcggcccgaccctccgcacgcttataagggagggaagcagtgctcccgactttgcccttctcctccctccacctccctaaactcgcgaccaccccagttcggccgtggtgaaaacgacgccggagagatcaagatccgcgccaccatagaaattcgtgggttggtaacagttcggggttctctggtgatcggtgaagtattgccggtgctggtaacggaggttgcggcttgaaacaccacggcgcgctggtggaatttcactaattcctcgtcggtgtcgatcggcggaaccgcgtccaccgt

SEQ ID NO: 28419 - DNA, 371 bp, Zea Mays
atagaatttatatgcatcatcaacatccttgaaagtcatccctaccgttggcactatagttggatcaatgttttttgcctgctatttcattgtcattgttgtttgtaccatggaatatgttcgcaacaatatattcaatcaataatcaaattcagcgattggacttacatgtgaatgcagtatttgtggcgtatccatctccctggagctaatattggacataggaggtcgaaccctttgttctccttcttcccctatgctcatctcggcgatctcaggacccagtagagcaggaggtggtgtcaccagtgagttaccaccaactcctccctctgtctctggatcaagacgaacgccatctccttccatcg

SEQ ID NO: 28420 - DNA, 518 bp, Zea Mays
agaagatctaggccgcggtactccttgtacccgagaaaaagacaacgagtggatcagtgtgcaagtttgtgagaagcattggacagagttgttgggatgcaatagcaagcatacccgaagacatgaaggtgatcataggagggacggtgccgaagagggtgaacaacggagtaggatgggggaccgcctttgagggaagacggttggtgaggtaggtggctatgttcagcatcttagcctagtaacagacgggaagagaagcctgaaaaaggaggcaacacaacatgttgttggtggtgaatcatgcgctcgtctggaccattctaaggggaggtgtgaggttacgacatccgcagttgcacaccatgggagagaaagaaggtacgagatgttgagttatcaaactcccgactattatcgcactgaacagcctagatggtgcaaccgaactgagtcaatacacacacaaagaagtgacaaagactggtgatggtgtcagacttacggcgaagggaaag

SEQ ID NO: 28421 - DNA, 351 bp, Zea Mays
atggcagtcttcagtttttcaaaggcagagctagtaacgtccgtccagataaatccctccttcttgagcaatgcggtcagaggtgcagcaatggtgccaaaattcttgatgaatttgcggtaataacccgcaagtcccagaaatccgcggatggctcgagccgagcgtggttgaggccaatcagtcacggcgcggaccttctcaggatccatcgccactccatcggccgaaataatatgcccgaggtaggagatggatggaacaccaaaatcacatttggacttcttaacaaatagttggtgttgatgaagaacagtgagcactgtacggaggtgacgcaagtgctcagtg

SEQ ID NO: 28422 - DNA, 348 bp, Zea Mays
aaatcgacaaacggtttcctcatctaggcaatgttggaaggtggcaaggaagtagctgtcaaaaggctcagtaaaggctctacacagggggtcgaggaatttagaaatgaagtagttctgattgctaaactgcagcacagaaacttagttagacttcttgattgctgcattcataaagatgagaagttactgatatatgaatacttaccaaacaaaagcttggacgccttcctttttggtacgttctgacttcatttcacatattacgaaacaattttagactaactgaaattgtgactcacaatacattcatgaagatgctacaaggaaatctttgcttgattggcc

SEQ ID NO: 28423 - DNA, 367 bp, Zea Mays
tccaatgcacgcatcctggccatccaaactggacggtctctctgaaagggcggaaagaatctgagcggggtgtcggacacttcttcttcatagatctgatatagggccctcaatgccttgcaagcgacgacttgacatgtgtctttgaatctgtgcccagcagtagtgacactccattccacatggtgcagactggatccaatgtatacagtcacgacacacttctctgtgccatgctcgacgaattcacgaccatcatactctggctggctcctgattccgaggcgaactgtgcatgctctcagcaacttggggaaaccatcttcattctggcaaaagctggtttggcaatggacctccatctgac

SEQ ID NO: 28424 - DNA, 343 bp, Zea Mays
cttactctgtgctccctaaggaacggctttggtgcttcagaacttactctacgctcccttagggacggctttggagcttcggaacttactctgcgctcccttaggaacgactttggagcatcggaacttactctgtgacacgcgatggtgtagccacatatttattacatcgagctagaggttaaaccttcatgtattgtcttttgtgaaggaaacataaaaggaaaaaatagtagaaataaaacgagttggggctttcttttggccaaaacattatgccatcttcagtagatatgcctggactcgggcacagtactgttgactgtgtgagcttcagactgct

SEQ ID NO: 28425 - DNA, 558 bp, Zea Mays
cgtatatggcgtaagccttttgggtgtgggcatgtagaaacatgagaaaaacatgaccatagtagcatgtttagggcgacttaggtttttccatgtgaaactagataaggcctagtttaaaaaactgattaatgatccaattgaatcccctctctctaagtgttcagaatatagtgtccctacattttggagggaacttatcataccttttactctctctctctctctcccctcccacacaatctcaatcaacatcactctctcccctctttatttctctctcacatagaatggtatcaagggtagcatggtgcttaggtgtctacacgtgggaagaacaataactcggtatgggatgagcaaagcaggggtagcacaggaatgcacatgtttggatatgtaggagcaaggtgatgactagtggtatacctattagggtgattgaatgtgtatgtggtccaatagatttagcaatgaccatagtgaagatgagataaaggggtgtagctgctatgaagatgatgacacaacaaatacaataacaggatagtcagcaaa

SEQ ID NO: 28426 - DNA, 504 bp, Zea Mays
aatgatcgaagtcgaaccattgattcgctcgagtgaaggtgatcgggtgttcggaccatcgatacggggcgggagcactggtggccgccaccagtatctggcgatcgttgagcttctgctgcctcttgcttcttgcgatccgtgtccaccgaagatgacattgacctctctatcgacgcgcgggaatgctccgcctcctcccacttcctgttgtggaggttatcgaggttctccgggtcctcctcgtggtggggggaggtggtagaggttggaagggtcggccattcctgacggagtgcttgaaatctctgcagtttcgaagagtatgacgcatgtccttgtggtacgggcattgggcgtcgaggatgtcgtccaatgttcgttcgcctctgcggggtgcccctcgagcacgagagatgggtggtccagcgtcatgaacttcttcgcgaggcctcttctcccagcgcttgtcggtttgctggttcgtgtcgcgccgtggcgcgg

SEQ ID NO: 28427 - DNA, 301 bp, Zea Mays
atccttctggtgccatctttcttctccacgaataggacaggggcggcccaaggcgaggtgcttggccggatgtaacctttctctgacagctcatcattctgcttcttaagctcaaccaactctggtccagatactctgtaagctctcttaaaaataggggcggtgccaggaagaagctctatggcaaactcaacttttcgctctggtggcatacctggtaggtcctttggaaacacatctgggaattcggacacaaccttgataatctcaagtggatttgcttcactgctatcaacagcca

SEQ ID NO: 28428 - DNA, 1118 bp, Zea Mays
ctggacatttgtgctgacgttattattggcgatgagatgatcagaggaatttctggcgggcaaaagaaacgtgtgacaactggtatgcatgcaaagtctgcaaaccatgtgcccttacgcagacctgtgatcaaatcaccaatttatagttggaaccctaattcattgcaaattatctcaggatttgtctattcttttttcccttttgtgcaggggagatgctaacggggccagcaagggctttatttatggacgaaatatccactggtctggatagctcgagcacatttgagattgtaaagtttatgaggcagttggtccatgtaatgagtgaaaccgtcatgatctctctgctccagccaccgccagagacatacaatctttttgatgacataatcctgctatcagaaggatacatagtgtaccatgggccgcgcgagaatatcctagaattctttgagtctgccggtttccggtgccctgacaggaaaggtgtcgcagactttcttcaagaggttacttccaagaaagaccaacaacaatactggtatcttgatcaggagcagtatcattatgtatctgtacccgactttgcagaacgtttcaaatcattccatgcatgccagcagatgcagaaggagttgcaaataccttttgaaaagtccaaaactcatcctgctgcgttgaccaccagaaaatatgggctttccagctgggaatcactcaaggcagtgatgtcaagagagcagctattgatgaagcgcaactctttcatctatattttcaaggtcacccagttgatcatccttgcactcatgtccatgactgtgtttctcagaataaagatgccccatgggcagattgctgatggcaccaaattctttggggctctgacttttggtttaataacaatcatgttcaatgggttcgctgagctacaattaaccataaagaagcttccagttttctacaaacatagggatttcttattcttccccgcttggaccttaggagtggcaaacataatcttaaaagttcctgtctcgttcgtggaatcagcagtatgggttgttctcacgtactatgtgatgggctttgcacctgctgcaggaaggtat

SEQ ID NO: 28429 - DNA, 293 bp, Zea Mays
gtagtttcacgaaacaaagcgggacaacgaagttgctacaaaaagcatcgctcattatctaggatgaggcatcaatgactaagagataagcaattgaggcgctagacaatagcatgcgtgatataacggaacggcctgggctgccctttggtgggaagactgttgtgttcgggggtgatttcagacaagttctccctgttgtgcgcaagggatcaagggctcagattgttgctgcctctctatggagttcttacctctgggaatccatgcgccacctaaagcttgttcaaaac

SEQ ID NO: 28430 - DNA, 483 bp, Zea Mays
ccgaggcctctcttcttcccttatttctctctctcccccaccggtgccagcctgacgacaggcacggcggcgccatcgccgaccccgcccaaaccattggcccgagcaccaatccatgacccggacagtgctacacgaactatggagcaaggtgaattaaataaggtgattctcaccgacgattgggacgcgcagaatcactgccacggagatgcgtaacactacagtggagaaaggattcctatgagaaatctcacggtcacctgtgctccacgactctcccagcgctctcccagcaagttccgagtcgatccccgagagctcgtcgccggcggaaatccttcttctctttcttctcctcccatggtttcgctcagcctgacggccaagcacgacggcagtgagctctgactctctctgtccaagtcctcaccgccccacaacagccgaacggcggcgaacgccgaaagcagtggcttcagt

SEQ ID NO: 28431 - DNA, 421 bp, Zea Mays
gtgatgtataaatacaacggctccccagggtctggagctaccagtactggtagggacaccaggtgctgcttcaactcttgaaaggcttgttccgcctcttcgatccaagagaatggaccggacttccacaggagattgaagaagggtagcaccctcttagctagccttgaaatgaagcggctaagggcggctaatgaccccgtaagcttctggacgtccttgattcgggctggaggcctcattgcctcaatcgccccgatcttctccgggtttgcttcaatgccccagtgtgaaactaggaatcctagcaacttcccagcggagacaccaaagacacacttgtccgggttcagcttcgtgcgcgtcgcctgcagcttgtcaaagaccagggtcacatcttccaccagagttgaccccctcc

SEQ ID NO: 28432 - DNA, 280 bp, Zea Mays
attcggtcatgatgaggttgactatgtggtggccttcggtgtcgttggttatttgcaggccctctgggctgcggacggctggcgtgctgatgacatggtagaacacatcggagggcaaggcctcgcctctggcggctactttggccaatgcgtcggcctcctcgttcttggctcggtccacgtgctgcaaggtaaagcccttaaattgtctctcaagactgcagacagccgtgagatactgcatgagtgcggggtcttttgctgcataatctttttcgac

SEQ ID NO: 28433 - DNA, 374 bp, Zea Mays
catcacattcaagttcaaatgttttattgaaatctggaagttggagcaagggtgcatgagttaacttatctttgagcacgctgaaagcatcctgttgagcagcagcccaagtgaaggttgtacccttcttagtgagttcatgcaatgggtctgcaatggtgctaaagtccttcacaaagtgacgataaaatccagcaagtcctagaaagcttcgcacttgggtgaccgttgtgggaaccgaccagctgtgaatggcttcaaccttggcttgatcgacttgaattccctatggtgtcacaacatagccaagaaaagagacttgatctgtgcaaaaggtgcacttctcaaggttaccaaacaaacatgcatcacgg

SEQ ID NO: 28434 - DNA, 357 bp, Zea Mays
tcacggggtcgaggctggagaaccattttgagcttccagtcatgtagcgcgaacagccggaatccatagtaagacccggggtgagcaaatggcatagcactgggtaagtaaattgtgaagaataccagtgctacggcatttgcccctaaaaagtgttaggaaaaacaccaaacatccctagtcccgaagggaagcgatcaccacaagaaggaaattgtggttcgctggggaagtatgaaccaaagcctctgtcacatggtccttggccatatggcacacgaccagcatcccgtcgggcatggccaccacgtggtctcactgcctgaggcctagcggcaaaaggcaaaacacatctag

SEQ ID NO: 28435 - DNA, 407 bp, Zea Mays
attttctacaaattaaacaagtttctgcaattaatttaatactaaaaatctatttctaatttaatttccctagttttcctgctctcaggactgggcctcaaataccagaaagagcaggggctttggcgcaagattaccgagacacaaagaatagtactctctggatggcgggttctattcttcagaatcataaggtctcttttgtaaaatgtacccgcgaaggggtatgaaaggtttctggtcgaccgatcttgcgtggacggcgcggattaaaccccatccgcgacaaacatgtatacaacgagatcatcctcacacgtcagatccaaatcctacgatccgcagcacactaacaattctattccacactggccgcacgatccgtgatcgacggcgctcgttccttc

SEQ ID NO: 28436 - DNA, 464 bp, Zea Mays
caactacttcgcgccacatctcccctatcttccccgttctctatacccgatccaaactaaactctagcgcccgtgcggtgggagctgtgtacaccacgaagctccaatcccatccaccaccgacgaacggagttctgtgcttgcgctagggagccacgaggagtcgctggtgaagcgtcgtcgccagccgtggggagattgtcacagtggtgaccagaattcgtgctcggacaccaaggtccgaggcactccgtggacaggatctccccgacttcgatccgcggtgagcaccttcagtagtaataccccgtcattaccgctacctgttgctactgtttaatcggagtttagacgtgagggtcggaggttaggtagttccggccatggcgctgccgcggagcgtggcctgccactggggataatctctggtgggaggaagacgtagcgtacgccgttggatttag

SEQ ID NO: 28437 - DNA, 287 bp, Zea Mays
atctcccttgcgcttcctggtcccttgttgtacatgggtcgccgtgtatgtgatgcgcttgaactggtaggcttctaagtgagacttgtctgcattctgctcttcgaaagccatcatatcctccgtagcagtccctggttgaaggttggtttcatatttacttccttgattagcaccattgtagcttatagaaagtaaaacattggcggatggcaaagtcagatccccatgaatatggtccttttccactgacccaatatttgcagagacaaatgggatgattccac

SEQ ID NO: 28438 - DNA, 801 bp, Zea Mays
ctgaggctcaagcctcccacgtttgccggatctagcaatcccctcgatgctgacgattggttgcgcacaattaaaaggaagctggaagccatcagatgcccggaaaatcagcgtgttcaactggctgctcatcaactttccggaatgaccttagcctagtgggataccttcaatgttaccatcagagatgctacctgggcagagtttgaaacggctttctgggagcaccatgtgccccaagggatcgttcagatcaaggaagatgaattccgggaactgactcaagacgaaagatctgtcagtgagtacatgcacaaattcacagagttggcccgctacgcgtcgaatgatgtcagcatcgaagtcaagaagatggcccgctttcttaaggggctcagaccagaactcaagaccatcctagccagccaagacttcctcagtttctcgcacctctccaacaaagccatgcaagtggaaagggcaaaggaagaagaaaaaggccatctcaagaggaaattccaagtcctccgagctcagcagcaagaccggcaccagaaaactcgatcctttggatttccacccaagggaccaagcttcagtagaccagctagacccactccgtcacggttcagtcagcagagtcagagctcctttcatgccccctcagttgcaagcaaccaaccaccagcgaatgcatgttggcactgcggagatcccagtcacttcaagaacaactgtccccagctgaagccatcaggacctgcttactccaactcggtgaatggccccaagaatacctca

SEQ ID NO: 28439 - DNA, 297 bp, Zea Mays
gaaaagagtatctcaaattccaagaatcgtcagacacaaaagaaaattatcagccagaaataaataatggagaaaactagaaacttacagaaaattgatttgccaatacagcattatcttcacaagatcctggaaacaattgccaacgttggaaatcgcctttgtagcttcttccaatacttcctgcactacatttccaacaatcaggaaaatacataaatatggcaacaagcttcatcgaacaagaggaaaacatttttagtgtgtgcactacttgaaactgttatttatatcaac

SEQ ID NO: 28440 - DNA, 597 bp, Zea Mays
taggtatgttctcagtcgaatcttattcagcaaaagtgctatttgatactggtgcaactcattcatttgtcactgcaacgtgggtagaaatgcataacatctcagtagaggcaatgatgccgcccatgaggattaattcggttggtggcaaagtgcaagcagataaaatatgctcaaatataagggtggaaataagggggatagggttccccagcgacctaatagtaatagacacccctggggtagatgtcatcctagggatgaattggttaatgaagtatgaagcgaatgttagctgtgacaagaggaccgtaacattgaagtccccgtccggagaggaggtagtggctgagctaaggatgcctaagacagtgaaaggagattgtcaccagatttcggtcgatagcaaggaggccaacccgctcgaggctatcaaggttgtgtcggactttccggatgtgtttcccgaggagctaacgggcatgccacccgagagaaaagtcgaatttgccatagagcttatccctggtacagcccccatttccaaaagagcctatcgagtgtctggaccagaattggtggaactcaagaagcaga

SEQ ID NO: 28441 - DNA, 444 bp, Zea Mays
tttctaggggctcttatgcaaactcactcggccacaacagtggaggtcaagactgatcgctggatctcgagccgagggctcagattcatccagccgaaccggtatgggggtccttctaatcctgaacgtccatctaacaggtgatggctagatctttaatgtgcgagggcggggtacgtacgttatggtcttggccgcccattcgagattgccgacccatatcctgtttgatcccaatctaatcctcacctcccccactagatcctatggcacacacacccccttcatcctccagttgaccgcgcatagcggcgccaccctggaccgcggcggagacatccccggtgatcgccatgtgacggttccctcgcttcgattcccaaaccgaaggactctacacgatgctagaaccatggcgggtcagagaaggacattctcaccaac

SEQ ID NO: 28442 - DNA, 297 bp, Zea Mays
aagacgtgttaccacctgcagtacgctcacactggttccttcatgcactttagcctctgaggcttcaagaagcttgtagaactctctcacatcctctggaaaagcttgattattctgtagttctgggtactcatttctaatatcttccaacatctcttccattcggtctacatcctggtccccatccgactcaacagtatggtccacctctccatgctcatgccataccagatagtttggcataaaaccatgtttgaaaacatgatacgagagctccacttttttcaatcgaaccaa

SEQ ID NO: 28443 - DNA, 396 bp, Zea Mays
gtgagatactccttttaattttattcacagctcttgttagatgttgtagtgagatggtcgtcggttttgtcgttgtgcatacgtttgtaagtaggcatgtgcacgagtatgtttttggcgtagattaaatgtacgtggaggaaaaagtggtacgcatgtgtatggtagtcgtgattgtgttaacttgaacaaagagtctcaactacatgtcgtgctatggttgtatttgagattgtaagttataagagttgcgcgatatgaggttcgatcgatgtagttaatatggattggactgtagagaggtggtgacatgccgaagtagtcattgctttctctgcggttaagtcgaggtcatgtgtgatgacgctatttacgtggtgaatgcgtttgttaaat

SEQ ID NO: 28444 - DNA, 448 bp, Zea Mays
gcggaggcttcgccgcgtgctgcggatgctgaagctgtgcctggtccgagtgctgggcgtaggcggcgaagggcggttgcgaatcgtagagtgagtgaggtggatggcggtcggcttcgtgtgggcagggctggcaagcaggagttgttgtcctcgccagccggggcgagtgtaggtgagggggagttgcgaagtctttttgagggtgaggagcttaggataatgctatttaactatagggagatgggaatcattctgaaggttgagccgatgtgaggtgtgatgccctcgctgtaagtgtgttattatgatttgtatgatgaggctgtgtgcacttgcgtatccggctatgtctataggggcgttgcgcgcttggcctggcgcgtttattatgttggcttgcgttttggcgcgcttgttgaattaatccggctgcacccttaggcga

SEQ ID NO: 28445 - DNA, 411 bp, Zea Mays
gtgagggaggatgagtatagaactatagatgtccaagcagggcagccgaccagcagccagagcctagagggcggagagtagcactaccacgagatagtgaagaaggctagtaggtggcaaccgaaggccagatcagaaagcaatagccaccagcaagtgccgagcagacaacaccaacacacacggagatgtgaaaacaaaccaagcagatcgataaccggacgtcaacgaggagcaccagctagcagacattggatccagaggagattagggtgaaatgaacaaaccatgcacaatcgacgcaccaaagacgttgaccagtagccgaggagtaaggaccatcggatctggagggattaggattagggattgagagacgcagggagggataagggaggaactccaagtagg

SEQ ID NO: 28446 - DNA, 364 bp, Zea Mays
cttgggtagtttggctactttttgttatttggaccaaatggttttggtgccagcaaatgggtgaacacttctgatctttaggttagggctgattttggacttagagaaaaatggattgccctagtgcgctctccacttgggggcttgatttggggtttttgttgggcctttttgcaatactttccttactacattttgtaggtacattaatgtactccaaatttggtaaagggttcaattcatgaatgagtcatttgcataatttttcctttaatccaatgtttggggtttaatggctcaagaggggaaattagggttttagaacctttttcataggtgaagatacatgaaggctagggtatcc

SEQ ID NO: 28447 - DNA, 561 bp, Zea Mays
cgaatgacatgaccgtgaactcatacagtccatacttggtgataaatgttgtcttcggtatatctgaaggtcggattctgagctgatggtagcctaacctcagatctatctttgagaacacactggctcctctcaactgatcgaaaaaatcttcaattctgggcaggaggtacttgttgttggtagtaacctcattcaaggatctatagtcaatgcacatcctctttgttccatcctttttctccacaaatagcactggggctgcgcaaggcaaggtactcggtctgatgtagcctttctctaacaactcatcaatctacttcttgagttccaccaactctggtccggacactcgataggctctcttcgatataggggcggtgcctggaataagctctatggcaaattcaaccttcctttcaggtggcatacctggtaactcctcgggaaacacatctgggaaatctgatactacactgatagcctctgatggtttaatctcctcaatatgagcggtgacttggtgacaactccctttccttgatccacacaagaccaatt

SEQ ID NO: 28448 - DNA, 416 bp, Zea Mays
gcttcctataggacctagtatgccctttaggctcaaaaccaaattccctgagagtctttgccacttgctctctaacaccctcatatctctcaccctcacatgttgtatgtgtgattcccgatgctgatagcagtgctccctgtccccattcttgtaatcatttggaacaaatccttgtgggctcctgttccctataggcggaataggtggtccatatgccatactctgataatatggttgttgtaggttaaagttcattactgaatccccacccctctcattaacagtttggtttacattattatgcgtagctgctccgttacaactaggcgcatatgaaagattttctacacgcttcccctgcaattctccttgaacctgttgaactatagatcgaatctgtctaggcatattat

SEQ ID NO: 28449 - DNA, 981 bp, Zea Mays
atgtaaataatcgaacaaggccttatggcggccaaacccgcacatatacagactgatccatactaacagaaagaatacaccacccctacaccagtactatcgatggccatatcctccttagtactaactagggctcacaggatattaccggaaattcattgcaagttgtggcaacatcgttgcaccactaactgccctattgaagaaggaagcattccagtggtctgaagcatcaacagaggcattcctcgcactcaaacagacactcatgactgatcccttgctgcagattacggatttcagcaaaagatttgtggtttactgcgacacgtcaggttcagggtttggggcagttctccaccaaggtgcaagggcagtggcatatttcagtagagctgtggcaccacatcaccagaaactttcggcatatgagagagaactgattggacttgtcaaagcagtccgcaattggcggccatatttgtgggggtgagcgttcacagtgaggactgatcacttcagtttgcaatacatactggaccagcgcttatccacaataccacagcacacatgggtcagcaaactatttgggtatgacatggaggtggatataggccagggaagatgaacggaacggctgacgccttatcaagaagggatgaagaaccagcagcagcagtgaatctgttgtccaccccaactctagaagtctttgatacactcaggaaggaagcattgatagatccacaagtccaggaactaaagacacatttggcggcaggaactgcaggagaaggatgggctgaaagagatggattgttggtatgccggggcagagtcttcgttacagataattcaagtgtgtgggatcagttgctgatagctgcccatgcagcaagtcatgagggagtagagaagaccttgcatagatggaggagctcattccacaatacccatatcaggagacgggtacaaaaattt

SEQ ID NO: 28450 - DNA, 395 bp, Zea Mays
caattgccaggttctagctcctaatcgctctgcccacggtgatagcgcaaactacggatgaactgaggcgttcccggtgatcctacgtcttctagctcaattggtcgggtcaagaagcagcaagagcacacaagtgcagaaacaagagcgaggagggcgtaatcggacctatggagagctggccatggcgagctcacacacggcagaattcttgactgattttggggagatctcaaattggggagctgtgggggacgattgaaggtgagggctggttctctaggtgcacaactacttagcagagcaggcttgggcaccaatttaaagaatccaaggtctgtggctcctaatttgggcatggcgtgctggcggccagagaggaagaaggtcattgg

SEQ ID NO: 28451 - DNA, 431 bp, Zea Mays
aactcataatgagttggtttttaagtttggtaatacttcccctccctttataatgaagaagatttcatcccattcggcgtgcgtttctttgctttcccatcgctccttttctagtcgatcggtcgactgtgtttatgcttaatgtagccgttgagttctcaggctccagacaacatatggcaactctctgatccactttcctgcgaacttttcattcttgtcgaagactttctttctgagcgcctccaatatcatcccattggctctttctacttgcccgttggctcttgggtgcgccaccgaggcatatttgatctgaatgcttttttgttcacagaaatcgaactctgagcttgtgaaattggatcccaggtcagttatgatgctattcggtatcccgaacctgaatattatgcatgtcctgtatgaat

SEQ ID NO: 28452 - DNA, 565 bp, Zea Mays
gtggaggtgatccatccatgtggtgctgtagatgaggatgtcgtcgaagaagactagaacgaagcgacgcaggaagggctagaggatctcgttcatcagggcttggaaggtggccagggcgttggagatgccgaacgacattacaaggaactcgtatagtctgtcattggttcagaacgccgtcttgtgtacgtcgcctaggaacatgcgctcctggtgatagctggaccagaggtcgagcatggtgaattagtgtgccgtgtagttcatccagcagttcatcgaccactggaatagggaatgcgtccttgacggtgatgctgttcaatgcgcggtagtcgatgcagaaacgccctgagccgttggctttcttgacgaggaggaccggcgaggagaatgcctggcttgggcggatgagtccctgttggagcaaggcttgacattgacgttctaactcatccttgtggctcaatgggtacctgtatggttgcacaaccaccgggcgacaccaggcaacagtgtgatatggtggtcgtgcgtacgcggcggcggtagaccggtcggc

SEQ ID NO: 28453 - DNA, 333 bp, Zea Mays
tggctcataaattcccggtgcttgtcccagggtggaagtggtggtggcggtggtggcaatggggcttgctgctgtcaccccatcctctcctgacacatcttctctcgcatatcttgcctttcttggcacatctcttggcattcttgttgcatctgcacatgcatctctgccatagtatcaaccatttgttgcatcatctgcatttgggctgcaaccactggatcagttccaactggtggaggatttggaggattcatctcttgttattgttgttgtctaagtactctccggctgtgtggattggtgggtagatcaattcatcctcccttcctg

SEQ ID NO: 28454 - DNA, 283 bp, Zea Mays
cagagttagccgcctgccgtgtgatggccacgtgccttgaagctttaccacgtcgcagtaagccgctttagatagctggttcgtcgccggtaagcctgccacggtgaaagccacacatctcttgcgccagtgctctcccctctctccggccgccagcgcgccattccaaattcaagagccaccgccctcaggccctataaattaagcgtgacatcagctccgctaagtaattacacacccaacgcaccagcccgtgcctcagattgtccaccagagcgctcca

SEQ ID NO: 28455 - DNA, 450 bp, Zea Mays
gaaagatctttcaggatgcagaatgaatttatacagtaggcataggatgaaatctacgcacttcgtgcctccatcgtatcgcactatttcttgcacggagagatttaaatgattggacgatcggggggacgaggggaccgaatccatccatcaaatgaatgatgagctagcagcgggggaacactgctgcagctcgtgcttccctgctacacttgacagcttgcgcatgcatcatgtactccgtgctgataccgaatccatccatgggcatgcgacttggacgccggtgcagtcccagcgacacatggcaggaactcagctcctgcaaagccaaaagggggggcatcttgctgctgcaaaagcaacaaagcggtagaaaagaaagggaactactgaactagtagcaagctgaaggaagggaggcaatcaaagccgctttgggcaggggat

SEQ ID NO: 28456 - DNA, 717 bp, Zea Mays
gacttaaagtcgggctgtcagtcagcccttgaactgaaaaatggccacgagtgacatttggttaactctgggggcggttcgtggttgattcaatggagttaaggtcagggtaactatggcaaatttgaagctctaacattagtgaacaactttgctatatcgagatggatcaggtgctgaacaatttctaaagaaaatagccctcgaatatgctctgtcaggtgctctgaatggcattctgatggtatagtagactgacaaagatcctaagtacgctgcacctcgccgccggtgaccctcgcgctcggattcgtgccggcgatgcgattcgtgccgttggcacacaaataacgactcagggtgaaaagatcttcaccgtggatgagaccgggtgctagccgtcgtacccacttgcctcacggccgatccagatagcctcgccgaagttcgtcgcctgccgcgcgatggccatgtgccttgaagctttaccacgtcgctgtaagccgctttaggtagctggttcatcgcctgagacattgccatggtgaaagccgcggtatcacctccactagtgacttcccctctctctgcccgccgcgggtcttctcaaaattagccgcaaccgccaatggaacctataaatttccgccccggtgaactccgctaggtatttacgcatccaacgcaccagcccgtgcctcggattatccaccaaag

SEQ ID NO: 28457 - DNA, 692 bp, Zea Mays
aacaaccgacgctacatagtcagcgaggaaagtagtggtgttccttctccagctttatctgccctcattggtctgcaagaattgtctctggcaaactttgatcagactcttgaagacatggtcccagaagatctgttgtcagagccggcagatggtggaatgatgtatatttatgctgatgtgcctgatgccgggctggagttatctcgagcagcgtcccgtgcctcatcgaccttagagcgtggtcttaagggtcaggaggctggtctggattgtcctgctcccatggaagtgggtgaaggtccttcagccttagaggtgtctgttacagagagttcggccctcaaggatggcgctagcgcttacccagcccccgagggtgtcgccggggatgatccggctcggatgggtagcgcgagctatgacccagcccccgagggtgtccgagttggttctccctctcacacttccatggatgttcacgtagggtcttctcctccgcactctggttgcatggcagcaactcaagcttcgggtaaggaagtcgccttagaggccagcgttcctgatgacagagttttgacctctgttgatgatactgacttggtccccactgatgcattgcgggttgttccggttggtgatccttcatcgagccatcaattaacttcccacgacttgggagttccttc

SEQ ID NO: 28458 - DNA, 333 bp, Zea Mays
ccgacttcttgtcccatttcgagtccaaggccacaaatctcttgtacatttcctcaaggagcatcttcatgatcggatccatcgctccacgacattgctagtagtgagttaaatactcgtgcgtcggggactgatccagcgctatcggatgcccagaactgtcgaattcgataccaaatgttacgattaatggtactagtatgagtatccagatacaattcagagttcgggagggagaggaattgtgaagaacatggaagacgtggaaaggaagaaagtattcaatattatatcgcatgccgatgttggctccactcacactaggcataaaac

SEQ ID NO: 28459 - DNA, 344 bp, Zea Mays
cagggcccaggtgaccgaggaaaccaacccgtgcgggcacagccgcgcatctcctcgcgaaaccgtgcaaggatgaaggaaacaggtggaggccttatccccttggttcccagttcccacgacgcagtcccggaaccccgttaacccactcccacagtccaactccgacaggcaaagaaaagggaggacgacgacagaatcgctcgccgtagatcggatcggatgagaacgagacggactactgtagataataccacacttttgttttccccttttcttttctcccgcgagctgactgacggctcgtttatcccctcgcgcgcgcatccatccctcgctcctcg

SEQ ID NO: 28460 - DNA, 361 bp, Zea Mays
gtaacggttgcggatagccttaccttctttaatgcccaccccctctctcgtgtcccgctgcgctgaaccacctcgcgctcgcggccaccgcttcgtccactgttgcctacgactgcttccacgctaagactacccgcatcgaggactgaaaaccgaacgctaccaacgtatgcagtagagaaactgccgcaacggggcacctcgtctacaaatggcaataaggctgtccgcactggtgactgtaagcaccaaccttaaatatttacagcgcgaggacagctgcaacggtggactggaagcactactgtaagcttacggttggctaggagaaccttatatctagcgcacccttttcttcaac

SEQ ID NO: 28461 - DNA, 768 bp, Zea Mays
gcagactgaaccggaggtgctgagataccagaatgctgaagcatgagagccatgaatgccctattctctgcccgatcctgaagtaactgctgctgaagagcatcctgcctgtcctgcatgctctgaaacatcgagagcatcgtctcggataaccgggtctgctcggctgccaggttggcctgctgctgggtgagagtctggagaatcgaagcaagagcagggttcatagcctgaggatgaggaggggcagcacgagaactcccagcctcatgatcatgtgagcgtggaggcataggaggcggaggcggaagaggaaccccaaaatcatcatcatcatcatcatcagcagctgtaccctgagtgtcaaactgtcgaagagctgcatcctcggcctgagagtcaaacacagaagcagtagctagcacaggaatctcaggagcaggacggtaagatccaaatacaaggcgtgaggcctcaagggtgctctgaaatcgaggtggctgaatcagctgcgcaaagatgtggcacaagtagtgagcataaggcaactaccgacgagcacgaatcccatccagaacggtgtcctcgatctcacaaatcaggaagtccacaacatcaaactcagagtgggagaccagggcaccaaggagccaaagctgaatatgagtggtagcctccctgtatcccatcctcggcagaagtgtccgtctgatgagctcatataagtactttgctgctgtagtaaagtctgctggagaaagtcgcgac

SEQ ID NO: 28462 - DNA, 565 bp, Zea Mays
agaagttggatatgttctgtttgataaatactcttgcactaagtctctagtactgatgtgctcggctaccactctaaattctacttctaccagttggcagggtaaccccaattgcatattgcataagggtcgagtcatgccaaagttcaactttaacggactcataactatgctcattagcttctccctctttttctcattcgctttcatgtaaaaccattcattagtccatctagtcagccacttggtacgatagccaataaccggggccttcgtatccttccgatacgcaaaattgtagcagccaaaattcctgtgaaggccatctgctctagccttcgtctggtagtgaagttcgtgcacccgacagaaagcttcggcattcgcatccattccctggctttggagagcccatatgtagacactaagtctaacaatagcattgggggttagctgatgaaggtatatttcaaagttcttttgaacctcccctatcatgtcatttagcgggaaccgaagccctgctctgaagaagctcttaaagacgataacttcgtcatccctc

SEQ ID NO: 28463 - DNA, 395 bp, Zea Mays
gggaggaagaggtcgaagatcatggcatgctcacctacggctcaaatcgacagtgatggcttgttctctggtttgaagagtaaggcaagtgttgttcggatgtgggggtgacaatgagatggtggttggactgtgaggttctgcggcaagggcatcagtatttataggcggaggaacgacagtttataatggagggagtcttgaccggcgtactgtgagtggtgacgttgccacagtgcagtcgcaacatcccgaggttggcagggtaacttggctcatggtggggcattcatttagttgtgattgtaacaagtgactggcgtgtgctcaagcgggtgcacgaggtcttgccggagtggctttctgcactgaggtatcacttcaaggtctgcaac

SEQ ID NO: 28464 - DNA, 464 bp, Zea Mays
ttatgcacaaatttcaaaagcaaggccttgttttgcgtctccaacctgaccactccaaggcccccattgctctttggctgagtaatcatgctccaagcagcaagagctgatctgtttgagttcacatcatttcctctccaaagacaatgcctccgaaaggcatctatcattttgacagtggcggcaggaattttcagagtgctcatcaggaaagtcgagagagcagagaaaacagagttaactaactccaatcttccggcctgggagaggatagcagaagtacagggcagtctcctttcaatcctttgaataagcggtaaaaagtggcagattccaggttttgacaggcctagagggacaccaaggtaagtgaaaggcatatatcctgtctgacaatttaaagttctggctagaatctccaaccgtgctgggcaaacattgattgggtacatacttgatttatg

SEQ ID NO: 28465 - DNA, 309 bp, Zea Mays
gagaaaaccttccattttacattactataaaaagtaatgatacagactcgatattacataacaggatacattacccattatacaagagttcaacctattatacaatagtacaccctacaatacactactctacttttattacaccattattcctgctttccattactcttggcggcctcatcgtcaggtgtgggagtccagacgtcaaccaacctcaaagaaggagggggctcaaaaaggtctaactccccacccagcgcgcgtcccgcaacgtgagatggtccggcttctgcctcagcagggtgtgca

SEQ ID NO: 28466 - DNA, 468 bp, Zea Mays
tccgagagaaactgaaggggagccggaagaacggaaatgctaatcttgtaggtcagacatctcgcctcctgattaaatggcccctgctcaatgatgtggaggtccatatccctgtgaagcttcatcagatccaaacaccatgcccgaagcttgagtgaggagagatcagacttgctcgcagaggcgggatgcaactccaaaatgtgataggagtcgtggagaagctccttggctgtggtcagaccccacgcgtgcgctgagatcccacggatctcaatatccatcaaatgaggcagtgacgtagccgaagcgtgtgtaaatcttgtccactgcttgaacacgagcgagaacatagggcctctgaatggccttccttcgttaagcactcttatcgccacttcttcatccggcaaaaacagaaggaagtcttccggcatggtttgatgaatagacatgtcatcaatattg

SEQ ID NO: 28467 - DNA, 689 bp, Zea Mays
ctaattcatttattcattttgaatcagttctggaccgggcctcaatttctggtaaactcagggggctatgcgcaagatatcccagacacagagaacagggtccctggactacgggttaaattctatttcactcggggtctctttagcaaaattctcgggcgaaggggtatcgactcaccagaaccatccgattgaaaatcaggggctcggattagattacatgaaaggggaaccctgcgttcgtttgatatcgcatcaatggccagcacataccctggtcgaataggtaaactctactgaatcctagtcgtccatttcttatcccgcggtatagccacgataaaatcccgtacgtccatattaagatcgatggcaccctggcttcttctacctccggccagagccgaagtggcgcacaggcctacgcgccacaccgactgcctgacaccctccccgacggcgaaccgctcaccaccccacgcgtgtaaatgtaggaaatattacaaagcgcgaagaagaaatcttaccacacccgaagtgaacagatcgacgacgccgttgtggagacgaactccacgatgctgcggcggtacttcgcgatgactcggctggacgatgtcgcccgcgcagttcgttccggcgatcagcagttcaccaacggcaacccacaccacgactctatcctcgac

SEQ ID NO: 28468 - DNA, 362 bp, Zea Mays
ggcgggtgctgaggtattcttggggccattcaccgagttggagtaagcaggtcctgatggcttcagctgggggcagttgttcttgaagtgactgggatctccgcagtgccaacacgcattcgctggtggttggttgcttgcaactgagggggcatgaaaggagctctgactctactgactgaaccgtgacggagtgggtccagctggtctaatgaagcttggtcccttgggtggaaatccaaaggatcgagttttctggtgccggtcttgctgctgagctcggaggacttggaatttcctcttgagatggcctttttcttcttcctttgccctttccacttgcatggctttgttggagaggt

SEQ ID NO: 28469 - DNA, 653 bp, Zea Mays
aagcatcaaagcaaaaacgcaacaggacaactgtctatcctacgacaaaacactttgctccgaacaaacaaaatacagcacaacggcacccccaaaacaagcaagcaacacaagcgagtcatcagcgtgagcctaacggcacccaaaacaagcaagcaacacaagcaagtcatgcaaagtcctaactcctagccaatcccatcccaagaaccagaaacagacaaccaaccataaaccgctgctcatcccctcccctccactaccccccaacaagcaaatcatatgactaggagtatgaaaaaaatcactctgagtagcataaccaaacacagacaccgaggccctccctgagaattgcccggccaccaactagaaacagaagtatatccagagacaacaaaaccacgtcaggagacgtccaaatcaagcctaacgaccggtaaggcgactgtgctagcgttgcccgaacaaaccagcgcgcagcaaacatcaagcagaatctagcgaagcaatttaatggaacagtagtacgaagccacgggcggtagggcatcacgtcaggacgcacagggccgcagcaggaccgacggctgaaacgggggcggcatgaacgccccaaagtcagatgaattcagagaggataggaggaatcc

SEQ ID NO: 28470 - DNA, 424 bp, Zea Mays
cgacgacgccaccaactctgctctcgtcacgcccttggtgaggttctttccctatcgtaccttggggagtgctccgcattcgttttactagattgaggggcataaggattgctagtgcaccagggaagcttcctagccatggcgccaccgcgccaggattctagcgccgccgccctgggaacgcttgggtggacgatggttccggaccgtcggatcacggattgggcggtctggatgtagcatgtgggtaccggttcgcctggaccaaaggataatcgttgatcacagatcgtagggttatgtgaggatcacgtttcattaaatctgatccatcagatcgaatccaacggctaaaatcaagagatacctcttcgccgcgcacgttttgctgaagagcccttagatttttagaaaactaacccgc

SEQ ID NO: 28471 - DNA, 308 bp, Zea Mays
actaacaagtagacttactaatttttatccgtgccatttagtgcactaaaattaccacataaattcaacaaacacattcaccacgtaaataacatgatcacacatgacctcgacttaaccgcagaggaagcgatgactacttcggcatgtcaccacctctctacagttcaatcaatattaactacatcgatcgaacctcatattgcgcaacttttataatttactatctcaaatgtaaccatagcacggcatgcacttgagactctttgttcaagttaacgccattactattacaacgcacttcgaca

SEQ ID NO: 28472 - DNA, 434 bp, Zea Mays
cttctttccccgtcctcgcagcgggtagtagtagtcgggataaacaaaaccaatggcatcaaaaactctgttcaatctcttttttccccggcccccgaaggatgtggataatgcattatcttctgctttggaatatgacccaagcagttcatcacttgtagctttgatacatttcagccagtcgtcatttggttcatcaaatttatctccatatctgaatgtatatttcagtcgaaccaggtcaccttcgctagactcggtgacagtcaacttcagcatctcccagttctctacaagcggccaaactctgaatgctatatgttcttgaatcaagtctcttataccaatgaagaagcatacagtaccaaaggccttctggcatgcttcggcggcttcatcgatttcaaccttcgactttcgaaggccgaagcggg

SEQ ID NO: 28473 - DNA, 380 bp, Zea Mays
cctattttgcagaaacccttgatcaaggcctcataagtcattgcatttggttcataccgccgttcgaccatgtcatcccacaccctaccagcctcctgtaactctccattctcacataatcctataataagcgagttatacgtcagcaagctaggcaagaaccccctctcgagctcatcaaatagcttcctcgcctcctgaaccattcctttcttacataaccagtagatcaatgtgctgacgacagtgttatctggagggacgctcttcttcaccatctgtctccacatctcattcgcctctcctgcctttccatcctggcatagcacatcaaccaccttagcacacagtggtgtgtccggtacatatcctgcccctag

SEQ ID NO: 28474 - DNA, 644 bp, Zea Mays
acgtcttgatcttcttggcacgaagttgggcgggatagactttctggctttaagctttggagatgaaggaaccggcaacacatttgtgagaggctttacgatcttgttaatgaatgtcatagccacctcctcctcctctgaagttatacgactttgcttggggtgttttcttcgagaatacacttgcaagaccttgcaaggctgctggaccagggcagaagatggctgcataatgtccaaagagttgtgaaggctatcattctgctcaatagaaaaatcatcagaatccactgagatctgagtaaagaatgtgtccagatgagccaagccaccatcctacagagaatcaactcccgaaagggtcaatgagtttttagtgtccagggataaccgactgtccagatcccttcccaactgaatcaaatctgaagacatggatgcagtgacccgagcaggttcagaccccataagagcagaagtcaaagagtcatgagcttcaccaatatcttatagctccaacaagtcatccacttttgaatttgcaagggatagcaccaaaaccgcaggcatcaaaatagaaaccgaagagccagaagttgaaacatcccacaaggtagcagagtaccggagtctctccaccctag

SEQ ID NO: 28475 - DNA, 398 bp, Zea Mays
ccgctatgcgtgtgcagggtgagcctctgagtctctgttcgatacaaagatccatctaggggacatgttctatctttatatttttactctcccccacaagtcctgttcgcggggaagaggagaggtgagtcataccacacttttctcaatgggctagcaatggtgctcggtgagatgtggtgagatgcaatcaggtaatctgagtgaagccctagatccttttgtaggacccaagcacgaggtaagttggtgactgtcctcacacttccagacactaactcatatagttactggctccattcgacctaacccaatggctcgctgcctctccctacaataaaccatgagtcaaacattcctgaggctcgaacacaagctggtgatgcccttggcgcttg

SEQ ID NO: 28476 - DNA, 303 bp, Zea Mays
cggagtttgtatattagtggtcgtgcatgatttattgttagtgagtagttggaattccgagctatatgaggattatgttaaaaactagtaggcggtgtgtaactgcgttcgtatggtgaataataggtcggtaggtattgttgatgccttgtgcgtgtcgtggggacacgtaggtgtgtgggtgagccgatatgttatttggttgttggattggatatatgtgtaggtacaatagttcttttgtgcgtcgtagaggtgggtcgcagatgtattaattgtttgctaaagcacttcgtcgtaaag

SEQ ID NO: 28477 - DNA, 531 bp, Zea Mays
gctatcacttcttttaagatcctatcggctgatctctacttcttcttatcttttcactctattgtgcagcagtctggtcaggatggtgtggatgaagaacgtctcatcgtcaaggggaggagacgatgaggaccctcctcaccccttcaggcaggacaaggggaagacggtttatcttgagcagcaggagggcaggaagaagcgtcgtatggatagagcggctcatgcagcacttgcagcggcagcagcagcagagcaggtagagcggggaggacagttgcagatctcttctgatcagatagcctacagagttcatcgcctcgcatctcggccttgctccactgctccctccacaccttccgccactgtgtctactccaccttccagttcaccagcttctgtcgctctagagccatccaccacttcctctatacccaccatctccacgactccagcttccactattccccctcccactcccatttccgcttcgcccattcctccacctcgcttcagggagcgtgacaagac

SEQ ID NO: 28478 - DNA, 354 bp, Zea Mays
tgctcctcatattggaaaaaggaccttgagaccaactcattgacaatccttttacctatggtttcagcaggttcattttcttgatccgagataaaaccattggccatccatagttggataagtttgtccacatcaatatgataatcctttggatatagagcacaaaaggcaaaacattgcttcatgtcaattggcaagtcattataactaagcttgagtataggcaaaattccagtctcatcattacatatggtgcttcgttgtaacacatcctcccattctccatcagtggtcttgttacgcagtacagaccctattgcttttgctgccaatggagaccccgcacatctctca

SEQ ID NO: 28479 - DNA, 292 bp, Zea Mays
ggtcaattttgtgtcagacatatcgttgcccatactcgatgtgctaatgtggtgagcctatattgtgatattctacctgtggcacccttcagcttacctcttctgatattgattttcattgtataaattccaggttgttgtggcccctaatgacaaatacctctgcacaggaggaagcgatcagaaagttgtgagttgcttatttgtccttttagtttcttatgtggcttatgttatgtcatactggaaaaggtatgtttggattgttttgttggttaacaactgaaatcag

SEQ ID NO: 28480 - DNA, 276 bp, Zea Mays
atcaaattagcttagttaaattctccatgaaatatgtgttgataatgtgccttgcatgtcggtttggaagcgcttggagtggtcgaaggggaaggctccccataatgttattccggcacctcgagggtcaacctccgttgtgaaggtcctttcatgaagaaatagaccttggtctggagtaaggttgagcagtaggagaagaaaaattttaagttgatcggttctctagttcatggcaagggccttgatccggtgatgcggggaatgtgccctaga

SEQ ID NO: 28481 - DNA, 433 bp, Zea Mays
acaagatgttaaagtcgctccctccatacatgagcaccttagagaggttcttcaggccgacaatgagcttaacgacgagggggtaggtcccggcatacatgatcttctctatatgaacacaatgataaaaaatgttcatgaactccaaccatcggaggtgcttcggaacgatggagtccaccacttataccttgcgatgcgctgccttgaggcgacgcttgtcgtcgtaagccttgggatcaccaaccatgagacatcttgttggatcgggaaagtcttctgtgggaggtcctgctccgccatgttggctacttccttgggcttcgcctttttgctgggaggcttggtgataaagcgctttagaacctcacactcgcacagtttttggtggacggggaagttgtggttctaacacggtgcatccattagtttc

SEQ ID NO: 28482 - DNA, 525 bp, Zea Mays
ctgaggagtagccctgaattcatatctctaagcgaggcaaattcagaactatctaagaagaacaagtaccaccaccacttaggcacaggtggttacaagcatcaagtttctaaatggagacaagaagacgccgagaagaaggccacagggttaccgactctttccgagcaacttggtgaaaggatggctaattggatccgtgttagaaaccccagggaaactaaggcgggtgtatcttttgatgatccaattgtcgaagaagctgcgaaaaacatatatgcaatggcagctaagcagagccaaggatcatttaagccacaaagggagggagacatcctaacggctggtctcggtaaccctgagcatcctggtcgtgtacgaggaatctcgtctaagtaaggatggaaggaaggattcgaaccataatgggaaggtttgtacaagaaacgtgatcgatacaaagaagagttgttggattattttaagcaggaggcaaagaaagagttcaaagacctgatgtctcaa

SEQ ID NO: 28483 - DNA, 477 bp, Zea Mays
aaaatgatgatcagctggaaagagacttactgcagggggtgcctgccaaagggataccctcagtagaatctaggtagaggtcatgagtgccacaatcatttgtaggatcacttaatgggatcatattgggggcagattgagcatcaggcacagttggcacgacctcggcaccacgatcatagttttcatctccagggcgagaggcaactaacaaacggcgtaccactacctccatgacttgcttttgtatcttcatagctgatttaacataattatcccactctcgctgacacttaattgggatgataagtctttgcacgttgggtggaggacctacgtttagcaccccatcaacgtcaatgtcatcaacatcatgccaaccaatcttctccttagccgtagcaacaacctcactaaaggaaggtctatcattgaatatcacagccacatgttgcatgtcaacgaactcagcatttc

SEQ ID NO: 28484 - DNA, 429 bp, Zea Mays
caagaactacctaacttaggctaacgattgtcagtttcatatggaggcgatgcagctaggaaaggagatcgtccgactgagtccaaacgacactgtcatatagcttcatgagaagacgaaaactgctatcttcctaaggtgacacatccacatagacttgaagatggagtatctagaggtgaaagaccctctagtattgtggacgaagctgcgagagagcttcaatgtgcagagacacgtgatgcttccgttggtgccacaagaatgtgccgcactccgtttcctcgacttcaagactgttgaggcttacaacaccgtcattcaccgtattgtcgctcaacaacgcttctatggctaaatagtcatagatccgaagatgattgagaaaaactctctagagcttacacccatccaacatggtgctcccgc

SEQ ID NO: 28485 - DNA, 529 bp, Zea Mays
gggaactccactactttcaccgctggcgatgaaccgccgactgtttttccgagtcaaaggagcttcagtctcttcctcctcatcatccacaatggcaacacaaacagcacacccattggggtcagcaacagatggagcacccacattgggatcagcagcagattggggacacccattggggtcagcatcaataagtccagtcgcaggcatgtcttcagtagcaggaaccgaggtaccagcgtcctgatcaaagctggatactcgccggaggcgtcttcttttcttcttctgctcgtcagcagaaggatcaggctgattggctcggcaagggcgcctcgggcgagcactaacaggtttctgagcatccaaagtcgtatcaacctctgggaggggcaccactgtcaacaccccagctggagcagcatcggaagaatcttcagctagcaaatcaagcatagcgcttatatctgcatcactagggttcagaggcacctcaaaatgaacctgtcgttcgtcatcaggaatctcc

SEQ ID NO: 28486 - DNA, 372 bp, Zea Mays
ctgggcgcgtccagggtatagtttggggaagcagtactactaatggaagctactcactatggttaatggtcgaagcacggatcactaaactggctcctgcctttttcccctcccccgggttgctctttaaataggcattgaaaagatcagagctagctggattcctgagtttacagggggataactatgtgcatggggtgtagtcgtggctcactcaagaaggcccaagccagtgttgcagggtgaagattatccatggcaaagggagggggtaaggataggagagcactgtagtggatatttctactagtgatatttctgctgatggcctgatttgaatatctctgccctcccttatctctaccatctccc

SEQ ID NO: 28487 - DNA, 612 bp, Zea Mays
tagtcgtcgccgccggtgaatctcatcactgcgggttgtctgaccacattgttgggccgggggggatcgtcttcgcctgggggaagccgtccgtgccctcaattcgagttgaactccaccgagactcgagtaattgctcgtcggtgtccagccttctccatcgggccgcaccttctcatggtcggacttcttcatcgcttaaccgttggtgagtattatctcatcgcctctactactatctgctttatgcgtagcaccgttggaatcaaactttgatgtgcgggttgcgggatcggagatttctggcgatggcgccgctgtctccatcgatgttgcaccgccgctcagctgggtggggatcaggtgtgaccgtgcactgttagatgcatggtgtgcggtcccgattagtcttggcataccgattcacctgagtcgatctcggccgtagatcaacagatgaacggacgagggaggaaatggacttgtggaccattggattggaatccagcacccgcgggttcgtaccgattcacaatctaatccgaaccacacactagtgattggacgactgggagttcacgataccctttcgtgataacggttttgttaaaa

SEQ ID NO: 28488 - DNA, 462 bp, Zea Mays
ttgcctttgctggctgggctggggcgacttgttgggcgcggccaggggggaggaaaaaagaaaagatacgggtggggctgagtagacgagacgacagacgagttcaaagtccaagcgaaagcaaaaggggatgagggtggttgagcgcaggggagctctttctcgtgattcgttatgttcttccgcacctttgatctccttccggtttgcttgagtgagatctcctctcctttctctttctttctttaaacggttggttcgtcgtcgatgcctcctattgttgagtgaaatctctgcccctagcgattcttttacttgtctttgtacaattgtactaaccattcgctctccggctcaaaagtctcctccagtatgaccttcgccgtttccttgttgctgatcttcgccgtttcatgagtaacatcacgggggactgcagtctgcaagtctgttatggttatt

SEQ ID NO: 28489 - DNA, 514 bp, Zea Mays
gcaagttgaaagggcaaaggaggaagaaaaagggcatctcaaaagaaagttccaggttctctgggcacagcaacaggaccggcaccagaagactcgatcatttggattcccacccaaggggccaaacttcagtagaccagctggacccaccccgtcacggttcagccaccagagtcagagctctttccattccccctcagtggcaagcaaccaacccccggcgaatgcatgttggcactacggcgatcccagtcacttcaagaacaattgtccacagctgaagccaccaggacccgcctactccaactcggtgaatggccccaagaatacctcggcatccgcccccaaggcgccctcctccgtcagccagcagaacaagatcccgtaccaaggaagggcacgagtgaatcacgtcgatgcccaggaggctcagcaagctccgggagtagtgctcggtgagttccttgttgaatttactcccgctaccgtacttttcaattctggagcatcccac

SEQ ID NO: 28490 - DNA, 480 bp, Zea Mays
attcatttggtgaacttgtcaatggcaaccaacatgtgagtatagcctctatgagcttttttaaagggtccaatcatgtccacccccagcatgcaaatggccatgttacaggtatggtctgcagctgttgtgccagtaaacgttgttgctttgacaagaactggcaagcttcacatctctggactaacttggcggcatcactctttgctgttggccaatagaaaccagacctaaaaactttcccaaccagagttctggatgctgcatgtattccacactgtctggcgtggatttcatccaatagttgcttcccagtagttgagaaaatgcacttcatgaagactcatgtcgcaccccttctgtacagtgcgccccctatgagggtgtagtgggccgactgtctcgcgatgcgttttgctgcagccttatcatccggttcttcttcattctttatgtacctgatgataggctctctccagc

SEQ ID NO: 28491 - DNA, 723 bp, Zea Mays
tgaaccttctttggtcgtgaatggagttggtactgtgtaagtgtgagttgtaatacacacccagccaccctgggatgtttaatctttttggggggtctttttcttcttaattaaatgacgtgcagctctcttgcgtggttcgagaaaaaaaaaggacttccctgattatttctttaatgcttgtgtgaaatagcattttgcagataggttatatattttttagtattataatcataagctgaattgcccaatgtctgtaccattggttcattaatggctcttcttacaccacaggatgagatagttgttgaaagtcactcagtaaaaatgaaatttatttcatggtaatcatcatgctgtaatcatctatcagtctatgaaaatgattgccgagctgattgttttgttttacaaggtggggaagttgggtaaaggttacaatagtgtgcctatattgctagtgctaatacattgctccatgagtttgttaagtattccatttcttatagctttgttaatcaggtacagtacagcaaggaaaactcattgtggttcccttattaggatttgaataagctaagtcattacatttaaggtaaatttttgagtacctacatcacataataacctctctcaagtaccaggctgcgcaaattacacctaatgtatttttttacaaatttatcataaagtaactgttctttagaattaaatgtaataata

SEQ ID NO: 28492 - DNA, 649 bp, Zea Mays
ctaccatggcaaatcctttgaatcgggtacttcgggaggaagtactcagaggtttcgggctgtccctaagcccgggctggggctggtgtgtttccgttgtggtgatgcgcatcgccgtgcagagtgccagtggagtggcaggtgttctatctgcattcaagaccacaaggatgtggtgtgtaggaggaatcccaatgggaagctcagatgggagccagtgacttcctcctcttttcagggcacagtcaacatgatgtcaagcgctgagcagcaattttcggttccacttcctccgtagcagttttatgtgcctgggacttctcagttcgtgccgatgtcgggttttcctcattatctggctgcacctactcctgcaccgactactcttatgctgtctcagtttggagctccgcgtctgcctcacccgtcggctaagtggggttcttctgttaatttcactctaggagcttcctcttctgcgggtatttccggagcttatgtgctacccgctgcggatggcagagagcaaggagacgtggtgacaggtatgatttcagttgattcatttgtgacccatgctctttttgaatctggcgctagctattcatttgtttcggagaattttgtgtcgcgggctggtctttcggtg

SEQ ID NO: 28493 - DNA, 729 bp, Zea Mays
aaacaaagggtggcttgggtgcgtaacggataggcgagactgagaggaagctcagtttcaagggagtcaccacaacggtggtcaattggaccgctgaatcacgacggtggcgatagcccgaggagttccatgttagcctgaacggtgtccacaggccaataacgtggcagacttatcgtggaccctttacgatggtgcaacatgagagcctccaaccagctgcgtggacgacctggagcgtccggtggtttgctacggcgacggtgaatgaaacacggtgaggacacgtggtgtccatggctagagcggaaactcgatcaccgaatctgagccagagatccttttaccccttcattgatccacgtctcagcggcaccaatcgtggcgcaagctcgaattacggcggagggaccaatcgtggcgcgcacatggaactcaatcttgttcagttcactttatcatggcgatgttcattcagcgcacctgacagggcgatttgaggagttcctttctcaaatttttatgtgacaacttgtttatccgactacatcaaagttgttgtccgtcatgccagcttcaattttgttataaggttcttgctcatacctccactcgatcaagcacaattcggttccaaagttgatgtaatgccactgtcagtctaactttgagaccaacacacgactaacagcccaacttccaagccattttgccccaatttctgtacag

SEQ ID NO: 28494 - DNA, 534 bp, Zea Mays
cggctgatcaaccactaccaggcgacctgcctgactaatcgcgattaatcccgattagtgggacacttgaaaacagtggaaaatttatcaggggaagtggaagggttattttgaaaactgatgcacgatgggagggttgttttggaaaattatcatgactgcttgcacggtttggaccaagtggttggtttgcacctgatacattccctttacacaatatttactaatgatggattttgtagtgcagatgaagactggatgtgttgcacttgtattatgtttaaacataagtgttgatccacctgatgtaattaaaatttccccttgcgcaagattggagtgctggataggtaaacttttagttgactatatatttccaaatttcaaattagttgaaaaaatacagtaaatgaactgcttttcacggtgaaaccatgtctttcttttttatgaattgcgtttctgaatgccagatgagagcatattgttaatcagaagtacacaagtcttttaatcctaggcacattggggtag

SEQ ID NO: 28495 - DNA, 722 bp, Zea Mays
ctccagtgctatgacgttatcttgggtatggattggctaacttcacgaagtccgatggaaattcactgggaagaaaaatggttggcgttcacagttggacagcagagaattgtgttgcaaggtctggtcccagatttattcacaatggatcacatttcagctccccatctctgtcacttggaaaagttggatgaactctggtgtacagttgaactacatacaaaggttaactcagatctcacaactgctgtcccagaggagatacagcgccttgttcaagaatatagctccctttttgacaaaccatcaggcttgcctccccctcgttctcactgtcactctatacccttacttccgggtgcttcaccttttaggttgagaccttaccgttacaatccggctcaaaaaaatgaaatagagcgacagatcttggaattactccaaagtggtatgatacaaccaagttccagtcctttcgcctctcctatcatcttggctcgtaagaaaacaggagactggcgattgtgtgtggattatcgccggctgaacgccatgacaattaagaacaaataccccctaccaattattgatgagttattggacgaattacatggatcacaatggttcaccagtttggatctctgttcgggataccaccaaattaggatggaaccagtggatgtgccaaaaacagcattccagacccataatggacattacga

SEQ ID NO: 28496 - DNA, 652 bp, Zea Mays
gacaggggggccaggggcagtggtgtgctgagggcgcaggctttaggccgttggatggggaatcaaggaccctagttcaacgaaccgacacgaattgatatccaaggatctggacccttgaatcgggggtgggctgtcaagatcgggtgccgagggggtttaacggctccggctgaccagggcggcgccactcgagcccttggtggcatggccactggagacaaagcgggcccgagatctatattagccgagcatcatggagacgcggcggtccgacgagcagtggatctggtgagctcaaatcctccacgacaagacagaattaaggcaaaagaagggaggagtggggttccttacccaggggtggtgctcggggaagcttagcacgacgtcgggaggctctggtcggctggacgacgaggaaacacggtagcgacgatcaccggtctacacagggagggagttagacgtggacgaggtaaaggggccggtgaaaggggaaactaaggcgagttcccggtgcaccgcactcaggtggagctcaccgtggtcgaggcgatggtagacactcggcgacgacggtggaacgacagtggcggtgctacgagctgggttagggcaaggtgcagggagagagcgaatgaggggctgg

SEQ ID NO: 28497 - DNA, 389 bp, Zea Mays
agaaaggagtatctgactcagtgatgtcgtcgatggtgacccccagggcctagagtgttcagagaaaggtgacattgatgttgctgccaccatccaccagcaccttctttacccgtatttctcggatcacaggattgatgagtagcggatatttgccagggtgatcgaagttaagccactgatcaactcggctgaaggatattgtgtgttccgaccatcggtaaggagtcggagcactgttcgtggccactagaacttaccgatcattaagcttttgttgcctcctgctttcttgtgctccgtggcctccaactatgacgttgacctccctatcaacacgcgggaaagcttcgcctctccccccttcctactgctcatgctgcctacgt

SEQ ID NO: 28498 - DNA, 309 bp, Zea Mays
gtattgctcagcaacctgggcataaacctccatgacctgagtaggaggaacaccatcagtccctatagtgtgctatgcatgacgctttggtacatgagaaggagacagaccagtaaggtgaacccatatgcggtggctattgagacacatgcgaagcatggtggaccactcccgaaagttggtgccatcaaatgtgacgaaaggaagttgcgtaagaggggtggaacgaggacgagcgaccatgttgagtgtgatgtggagtgggatgtggaggtgggattaggcatacgaagttgcagctagattgag

SEQ ID NO: 28499 - DNA, 291 bp, Zea Mays
caattccccaccgatttttcgctgcctgctgtagcagtatgcttgcatgtacttatctacacgcgattccacctacttactcgtgctatgttagtagagcagtgttatgttaatagagtagatgctctcgctcgtgcacaactagtttgatggctgcccttatccattgcttcaggcgtttgcttcccaatcgaatgaatctgaccatatgtacgcattcctcaccgtgtatatagttgtattcttggtttaatcatcctaaggttttatcctggctttcctgcaattgat

SEQ ID NO: 28500 - DNA, 354 bp, Zea Mays
cttatgccgagttctcatataataatagttacgaggccagtccgaagacgtcaccgttcaaggctctgtatggtaggaaatgcaggactcctctatttttggaccagactacaggaagacagttctttggacctgaacttattcaagaggcagaagaacaagtctgtataatcaaggagaacttgagggtagctcggaccaggcaaaagagctacgctggtaataggagaagaccaatggagtttgaggaaggtgatcatgtgtacctcaaggtgtcaccacttcgtgggatgaggagatttaaagttaaggacaaattgttccctcactttattggaccatttagagttttta

SEQ ID NO: 28501 - DNA, 304 bp, Zea Mays
gcagtgctccgctctgaaccggctcacaatccaccaacagactggtcaggcgcgccgtctactggacgactctgacaccgcctgccaacggattggacaaggcgcatttaatgtcgagagggcttgtcgcctgtcagtgtagtggcaggcggcgcgtccccttcgcaataaatgctgaggtcgagcggctgcatgggccttacgtcaggctcggcccattggctcacgtcacgggcctcaggccaagcggcagcagtggtgctccgtctgagcaggaagtccccctcgagaggtggacacgtgt

SEQ ID NO: 28502 - DNA, 319 bp, Zea Mays
cacagggattggtactgttttgaactaatccgcgccgtggatgaggaaatcgacgatcgaaattcctttcccccccgcggacataggaacgcggcggcgcgcatcgcccgcggcggaggacattgccggaatccgactcttgttgatacggcgatccaaactcgatgaggcttctgctacgcgatgctatacgctaaacaaagaagacggttgggaacttaccccgcaatctctcgtatactgtcacggcgacggcaacccgcggatcaccgacgtcggtgaagaattgcacggcgacgcagacacctttgcgcccgcg

SEQ ID NO: 28503 - DNA, 310 bp, Zea Mays
cttggagtagttatgctttgaagattgcttgtgttggattcttgttaataattgattaataatttccaagatcgtaatcatgcttgcttaatcatgattgtgtgctttagaggttatgtcttttgaatcatttaatgggtagcttttcattagatatattcaccacaattaactctttttgtgttcgtgaataaacctgcatcccgttgtgagttatgctatatggttttaatgattagcctgtgtgcaaatatgacatattgcttagtttatatgatgaccctattttggcactatgtgttatgcctct

SEQ ID NO: 28504 - DNA, 532 bp, Zea Mays
tgccgccattgtggacatgcggtgcattattgctgttcttgtgggagctgtgaactgtgaagcgaagaaagctagcgcgtgtgcgactatagaggggcgaggatggtggatggatactagctgctttgatgaatgtgtgcgcgtgtgcgtgttcttcttgtgtggtcaaatcgtgtccatgcaaatggggtgcaggagtgtcagacgccggggtcggatgagtaaagttttgagcgtgtgcttcgtgtaagacactctccagcaggatgtaaaataggagacttatgatatgggatctaagttactgtacaccaaccaatgctttgcctttgtttgcttatctctctctctctcacctcctcctctctcacatggaggtgtatttgctgctgctacttgtagacttgtaggctgcctcgatctgacgactgatggaacttgagcgaactgcgcgctgatgggcagcgagccagcgacactgcttggatggctttgggaaaaaagaatcttgctcgtgcatgctagattgcta

SEQ ID NO: 28505 - DNA, 510 bp, Zea Mays
gccgatgtcacctgaatgcaggcttttggtgctgtatagttgtgctttgtctatttttgccctccttttgttggttctatccgtgttttctttttttacatctatgtgttcttattgtttatgtatttacttgttcttattatttacaattgttgcttcaggaatttgcagcgtgcttcgtcttctgcccacgtgctcgctccaccgaatacgctgctacgtatcaggtatgtcgcaggttttgcgtgctccatgttatttcctgtgctttggttaattgttatggtttacttgttacgtttgcacttgcttcatacatccatactctgatttatcctatatgcttctcctttttggcatcttggctttacctccctacttgttgttacctctggtggtattcagaactgattccaatgtgatacctgtgctcttgtcccatacctagagcctccatttgcgattctagaaactgctgaccaatggaccatggaccatgtcagagtactg

SEQ ID NO: 28506 - DNA, 421 bp, Zea Mays
ctgtgggccaccgtcgtggtcccttgccttcactagcattcgagtgctcagcgtggtcgttggtgttcgccggtgcatgggggagctttcggatgggtcgtcgtgggaaatccctaccccattcctagcaaattgctcaccagagggcaaacatcaccgtggatccgcaagaaactgtggccaagtctgtcgtcgcctagattcacggtaaaaagctccatgattcgattcgccttgacctactctatgttccagtctagttgtgcattgccctacttgcttggggcgctagattttgtgtgtcggtgacatcaccggcgtgggttaggcccggtgccgctcgggcgcagccaagggatgaagatgtgtccctagccatcgaacggctaatggatggcctggattagatccgtgcttaccc

SEQ ID NO: 28507 - DNA, 371 bp, Zea Mays
gtggcgaagcatagtgttggtgagagctcgcgaagtggtaggcgccgtcggatggggctggagcgaacttgtcttcgtgtagatcggggtggccaacgtgacttgctgtcctcgtcgtttggtacgagtattggtgagggggatctgcggaatttgtttgagggtgaggaattgaaaatgatgttgtttaattatcgggaggcgggcattatcccgaaggttgagccgatgtagtatgtgtgatgccctcacttgtcgtgcgatagtacaggacacaattgtatatatttgtgcggtgggtcaggtgacccttcgctgtgtgtatgtaatatgcgacttgtattgtaatgtggaatgttgcccttcacgtg

SEQ ID NO: 28508 - DNA, 529 bp, Zea Mays
gtgggagagtacctatatattgatggccattttctcaaacgtgtatttgggcacaaaaatatttgggtctcgtctttcggctgactgcataacacgaacgtgtatttggattcccatttttgcatattattgttagagttagccttagattgaaaccgttacattacctatatatttatagcccctattggacttgtattaaaaacaaactagagcagtagtctttatagatttggacactcctttcctaacaaaccaatattctttcctaaataaactttattttatttactccaaacttatcaaaggctttctttagatttcatctattccatattctcctcaactggatggacttctggggcggcaggggttgcaacccctcactcacgcgcctcctttacgacacccaaggtgagattgcggttcacaaggggccggtgttgggcctccgttgcccgctaggcccaatgctgcagcccacatttaggcctatgacatctcccccttctccactcagcgtgtcctc

SEQ ID NO: 28509 - DNA, 541 bp, Zea Mays
gttagaaacaagtaatcgtgctctacctattgcgtcaaaggaaatatggtgtgttgattaattaggagctaagtgacctaatatagaaaagtagttaagaaaactaatcgaattgcttttagctatattttacaataagatgtctaaaatggtgaaactagttttgttggtctcgtggtgttatgattgagaaaaatatgaacttgtgtatgaattactattttttttcatgctgtgttagccaactcttgttaaatagaggaattcaatcgcgttaagtaattgttatatataggtgtttccagtacttcaagtggttgcaagttaattagtagactctctatgtgacgctagatgtctaggtagaattctgaaaatttatggtgcccaaattgtcgagttagaggtttaattcgatcaatgctgattaagtggttgaaaataactagtaaagaagttgtagatgtaaaactggaaactagtatgcatatgtcctcgtatgatgttgtggtaccttgatgacattaaaatgatcatgtgt

SEQ ID NO: 28510 - DNA, 406 bp, Zea Mays
gcgagattggttgtaacagaggaagttattgatgaaggtccacctactgccgaagttgaacaagctgacatcgaagaagaaaatgctgatgaagaagaggaagactacaacactctgaccccatcaaaacccagccacttggactttgaaaaatctactgtgtctaaggctgatgtactcatgatgatgaagctgggttacttcggagaagctgagaagaaacttatttgttttgccggagaagaaaccactccagagcccaaaaatggcgtagtggttttcaagagccttttcagagcgggactgcggtttcccttgaacgagatgattggggaagttttggataattatgatatctatcttcatcagctgacccctaacgctatcgttaggctctacgtcttca

SEQ ID NO: 28511 - DNA, 309 bp, Zea Mays
aggaatccacagaacccaaaagagctcttcaaccttagacattcatcactaagggtgacaatagagagggccttcggtgctttgaagaacagattcaaaatattatacaacaaacctttccatccatacaagacacaagtaaagctagtcctagcctgttgtatccttcacaattggattcttcatcatgggaatgatgaacatgttccactagaagaaacatgggctgcaaatgaagttcatgaggaagctccccttgaccttgtcatggacaatgctgcctggtctgctaccagagacaattgggct

SEQ ID NO: 28512 - DNA, 356 bp, Zea Mays
atttgggaacattagtagcaattagcaattaaatagtatttgcagaaagaacatgtctaaccatggtggccctgccagccctgttcgttagagatgctttccaagatggaagcttgtctgcaattttctccacccaaggcaagaggtcaatttttctcagtttcttattggatagaggcagccccaagtacacacaaggaaaaactgccctggaacaaggtaaaatctcatatgtggtagctaaaacatcttccccacaagcgatatggatcaagctgctcttagatttgtatgcagccctgaggcctcaccaaagatatttaggatgccttttgtagttaacaactcagtggctg

SEQ ID NO: 28513 - DNA, 325 bp, Zea Mays
tttgcgatgggtgctgtaccaggaatcagatctatgtagaactccacttctctttctggcggcattcctggcaactcttctgggaacacatccatgaattcttctaccactgacgtgctttttgttgctagattaaacaccattggatcattggcgggtggctgagcctgacaagaaactgactttccttggtggtctgtgagaaggactgtcttgtttgcgcaacttatgatgcctttgtgcttggttaagcaatccattcctaagatcacatcaattccttgggatggcaagatggttaagtctgccaagaatactaccccac

SEQ ID NO: 28514 - DNA, 285 bp, Zea Mays
agatcctggagtttgctgcctgttctgaactggagtagtagcaatcctctgtgggcagacatttgcataatgaccagtcttcccacacttgaaacaagtagtgcctgaactctgtcctgaaaacttcgtcggggtgccagtgggggtaacctgtcgagtaggtgtccgtgtagacccctgtggagcatactgagctgtacgtggccctcctggtcgagtcggtgtaccctgtggtggaacatagcggggacgaacactgctgctaccctgtccttgtgagatagc

SEQ ID NO: 28515 - DNA, 518 bp, Zea Mays
cgagctgggagctcacgacatcgagttttggtctcgcacagcaataaagactcaagcactggttgacttcgtatcagaatggtccgagcaacaagttcctgacaacccgtaggctacttaagtatggcgagtgtatttcgatggctcgctgaaactgcagggagcaagcgcaggaatcctcttcattgctcctagaggtgaacaactcaagtacgctctttagttatcattcccaacatcaaataatgcagcagaatatgaggctctgatccatgagttgaacattgccatatcactgggcattaagaggttgatagtatacggagattcactggtggtcatgagccagataaataaagactgggattgctcgactgattctatgggcaagtactgtacagccgtccgaaaattagaagacaaatttgaagggctggaattccatcacgtggaaagagatcgcaacgcaatagcagacgcgttatcgaagctaggatccagtcgagctcaggtcccac

SEQ ID NO: 28516 - DNA, 279 bp, Zea Mays
gccagattttcgctggtcaccatgattcgtgcttggcacgcagaggatatccacgggaaggtaaaatatctcacgggggaatggatttgatcgcggattgaagtttatcaccgtgcctgtagccgttgtgacgtggccggaccgccagcgtcgtcgtggaagctccggtgacctctgttgtgccacgccgtagcttgttactgtgcggtagtaatcgtggcacccttaggagtataatccttgagccgttgcaccggtgaacgtcacggtcacagccac

SEQ ID NO: 28517 - DNA, 302 bp, Zea Mays
caagccgtcggctagggggtacaccccaaccagcgaagaatgacgagggggcataaccccgccagctaccacgggccgagactacgaactttgtagtcgaggtccgacgtccttgggcacgtacgcccttgacaggcaattctctggaaggtatgacttaacaatcttgggtgtggcaattctttacaatacttcaaagttatttgagcctttctgcaaggtatgtctttataatctttgagttgcttacatattttatcaaatatgttgtctgacatgttccatgaatacatcatgtcctg

SEQ ID NO: 28518 - DNA, 610 bp, Zea Mays
gttctgtttctaatacatctacaccttttgaactcgttcattgtgatgtctggacctctccagttttgagtatttcgggctataaatattatcttgtcatacttgatgattttactcatttttgttggacattccccctgcgccataaatctgaagttcatgaacatattgttcagttcactgcttacgctaacacacaattcagttcttctgtgcgctgttttcagaccgataatgggactgagttcattaacagtgccactgccgccttcctggctgcccgcggcatccttcttcgcacctcgtgcccctacacatccgccgaaaacggcaaagctgagcggatgcttcgcactctgaacaatgttgttcggacgcttctgattcatgcggccatacctcctccttattgggccgaggctctctccaccgttgtgtttctcacaaaccggtggccttcatcgtccatacataacagtattccctagcatctcctttatcgcaaaatgccagattactcactccttcgagtttttggttgcctgtgctatccaaacctcagtgccacgaccccccacaaatcgtctcctcgctctgcggcgtgtttttc

SEQ ID NO: 28519 - DNA, 304 bp, Zea Mays
gtattctccttcagtcggcacaatgtcgaagaaaagcctaggagtgtccgagggaaggtgacgttgatgctgcttcccccgtccactaatactttctttaccctgctctcttggatcaccagattgacgaggagcgggtacttgctcggatgatcgaagttgagccattgatccgcccgggtaaaggtgatcgggtattctgaccatcgatagggggcgagggcactagtggttgccaccagtatctaccggtcgttgagcttctgttgtcttttgttctcctgcgacccgtgtccttcgaaga

SEQ ID NO: 28520 - DNA, 579 bp, Zea Mays
gctgagagcctcccagccatccgtcctgctgcactagctagtcgctgctagctagctagggcggacactacgctagctaggcagcaagggggcaagcaaaacgccaaaacctgtctgcatcgtgagatatcgggatacatggctgtgtcggacggacgaaagcgacgagtctctcctctccaaacatggacggatcggaggggaggccccatgtgtcatgtggtggtggagactggagactggagagagaaaaatgcgatgcgatggccgatgggaaggaggaggctgtgcctgtgcctttctttctcctcgtcaaatgagacagggcttgtgtgttgggtgggccggatccgtggcgatcgaaaagatgcagctggaccgcaacacatcacacccgttggcccaatataagttctgcggcccgctcgttcgtttcgggcttcgactttgtttggcccgttcgctcgccaccggatcggctgcctgcccttcaggtaggagactagggctaggagaggcaggcaacgacatgtctgcgtctgcctgcccgccctgctggctgctgggcagcctctccac

SEQ ID NO: 28521 - DNA, 389 bp, Zea Mays
taaaaacactgagcctaacaatagcattgggtgtcaattgatgaaggtatatctcaaagttctttaaaacttcccctatcatgtcatttaaggggaaccgaagtactgctctgaagaagctcttgaaaatgacagcttcatcctcttttggttccagaacgatctcctccccaacaaaccggacaagcttgctctcagcctcccggaaatagccaagtttcctcatcataaccatgtcatcctctgttacagtagatttcccaaactcaatgtggctaggctttgttggactcagaatattgttatcttcttcactttcattgttactttcgcctctagctacaatctgttcagcttcggtattggaggcaccttcggcagcaacttcc

SEQ ID NO: 28522 - DNA, 428 bp, Zea Mays
tcatcagcaggggtcaaaactctgtcatcaggagcgctggcctctaaggcgacttcctgacccgaagcttgggctgctgccatgcaaccagaatgcggaggagaagaccctacgagaacgtccatggaagtgtgagagggagaaccgactcaaacaccctcgagggctgggtcatagctcgcgctacccatccgagccgggtcatccccgacaacaccctcgggggcttggtaggcgctagcgccatccttgagggccaagctctctgtaacagccacctctaaggctgaaggaccttcacccacttccatgggagcagaacaatccagaccagcctcctgacccttaagaccgcgctccaaggtcgatgaggcacgagacgccgcccgggataactccagcccagcatcaggcacatcagtgcaaac

SEQ ID NO: 28523 - DNA, 427 bp, Zea Mays
ttcaaccggaccttgtcagctataacacgctgatcagtggctatagcatgaagggtgacataaaggacgctttgagagtccgggatgagatgatggataaggggttcaatccaacacttatgacatataatgcgcttatacaggggctgtgcaagattagacagggagatgacgccgagaacctgatgaaagagatggtggcgaagggtatcaccccagatgacagcacatatatctccctgattgagggacttaccactgaagatgaacgaatggctgcagcagatgctgcaaaagcttgagcttgctaggaagcacatcataagctcaatgttcgcagtggaccaaagacttgtttgttcaacatgtgctggattgtattatagcattttacaacgccatagcatttcctgacaaagcagtgaat

SEQ ID NO: 28524 - DNA, 487 bp, Zea Mays
ttaaatcttctcataccccggattggtgacaccttcagatacacgtgatcaccctccttaaactccagtagtcttctcctattatcatcatagctcttttgccttgattgtgcaattctcaaattctcccttatgattcgcacttgttggtctgcctcttgtataagttcaggcccaaagaattgcctttctctagtctgatcccaatacagtggagtcctgcattttctgccatatagagcctcaaacgttgacatcttcaaactggcctggtagctattattgtaagagaactccgcatatggtaagctcttatcccaactcccaccatgcttaagagcacaagctcttaacatatcctccagcacttggttagtcctctctgtctgtccatcagtttgaggatggtaggccgaactaaaattcaactgtgtatccaagctctcatgcaacttcttccaaaaccgagaagtaaacagtgatcctc

SEQ ID NO: 28525 - DNA, 662 bp, Zea Mays
gacagtccacgacgcccgatgccaagaggccacccagatctaatcgtgcgcgcccaccatggatccaacggctggcacgccatcaccttcctccagccgcgaccaagcacagcggcgaacaccgccgcggccatgttcacgccggagatgttcctacggtgactagagcgcataccgaaaagtcttctaagcaaaatgcgaataggagaacaaggttaaacgagtggggtgcttcataccgtgaattgatgcccgggtgatgtcggccaccgcaccaggcggaaccgtggtgaaagaggagcgccggtgagcgattactcacgcgtagacggcacaccgagcccaatgacacaacatccgcactccacacgaagtgccgaggccccagacccatgctccgaagacgatgcaccaacaggggcgggaatcctcggtggcgccctctcatctctcttctcgatttctctctgcacatatacgcggcacagaggcaactcgcttcggcttggcgtatccacagaggagcggcaggggttatataggggcggcacgagcccgggctcaagaatcacaaggatccgcaacaacccccgccagcgcaggtcacggagcggtagctgcacgcggaatctgttagaggatagggacgaatctgactcctg

SEQ ID NO: 28526 - DNA, 365 bp, Zea Mays
atgaaatgcgcatatttcgaaaatttgtccactaccaccatgatacagctgtacctgcgagatttgggtaggcctgttatgaagtccatgctgatggtctgccaggagtggtccggcacaggtagtggaactagcagccctggatacttggcacggtcaggttttgcactctgacagatatggcacgattgaacaaaggcctttatctgttctttcatccctggccagctgaagatggatttggctcgcctataggttacaggaaaaccagaatggccccccagagcactatcatgtagtgcctgcataaccttcgtttgaagtgtttcattatggcccaaccaaactcgtcccttgtgtctgat

SEQ ID NO: 28527 - DNA, 309 bp, Zea Mays
tctgcacggaatgattgcagatgttttggaaaattttgagatttatcttcatcagttgactcctaacgctatcgttaggctcagcgtgtttatctaggctctccgaagccaaggagtggagccgcttgccgaagccttctgccgggtacacgaacttcactatcagacaaaggctagagaaggtggactgcacgagaactaccacaccaagtggccaaccggttggaaaactgaatggttttatgttaagattgatgagaaaaaggagaagctagttcagagcctgctggagctaaccttcgggttgac

SEQ ID NO: 28528 - DNA, 340 bp, Zea Mays
ttcaattggcagggtcggggagtatcaggagaacccaaggatattgaaacaagacagtagggagtatgaacagacctgggattcgctgaccacagtgagggctttttcacggtggcggaaacacagtttgggggaaatgggcaatttgtggtctctggtgaacgattggaggcaattgttggtgctttggatgcgtaattatcctacgaagctcacggtgtgctcaatttataggacttgggggcgatggctcgtgaatttgagttggcgcggtggcggtcggagagtgaagagagtactatcgcgagagctcggtggcatctaccgtggcggcctcacc

SEQ ID NO: 28529 - DNA, 395 bp, Zea Mays
ctagccctaaaacaaaaaaaaggagtggaagggaagactcgagcatgtggtgctagtgcgttgtacttatcgaataggtggcactgtggccagtgccctcggtgtatagtatgtgtagagacttgggaggcactcttgtcggacgccagagtggcccgatcggtactcattcatcttcttccacatctgatgacactagctactctgctttccatccagcatcaactcatgtctgacgtcgcttgcttaatgcctctggctggcctccagttggcttggtgaacggcatcacctatggttgtgatgtgtcgtccgacttagatcaactccaagagaatgcgtaaaacaccccaaaaacatttattggccaataatcttctcgttttcaaccctcc

SEQ ID NO: 28530 - DNA, 363 bp, Zea Mays
cttttttgtgccttcggcactgtcattcctgccgaagggcttgtaacttctaatatctttgttttctcggcctctatttcttcaatattatcagccttcggcatcatagtcggctcttcattcttctatgtaagagcaggtcctttggcttcagtagccgtagaggtctcaccaccaaattcgggcactgtggccggttcaatgaagcgcggttggtgagtaaggaccttcacctttttcctctttggcgcgggctcacttagagcaactgaagcatcatttttcccagaagttgcactttttctcttttgccctttcagcgggtagtggtaatcagggtacataaacccaatagcatcgaaa

SEQ ID NO: 28531 - DNA, 334 bp, Zea Mays
cgtcagatgattgcttgagcagaagatgcagagaagcgcaaccgtaagctccatgtggatctcaccacagctcaagcccgtatagctgccttggaaagtcatgaagccattgatgttgaagccctgaagcaagccaaggatgagcatgtccagaagttgatggaggcctacttggtcacccataaccaacgtagagccctacggatccaagagcccgcttcatccaacccagttcaacccatgagagctgaacatccccagattctggaaggtcacccggtctctatcagaggagagaagaaggcttgggaactcccggaaagagccatagtcc

SEQ ID NO: 28532 - DNA, 305 bp, Zea Mays
agcatcagtaatttccacatcagtgtccatagaggttgcagcatgagaagggcgtcgagtttcagtactaggagaagggtgtcgcacatcaccagtaggaggacgtcgcacatcagcgggagacggtgctcggtgcatctcagcggaaggtgattgaaggatgtctgtggcagtgccaagaatgccggcaagccacccatcgtcttgtacagctgatgtgtcgacgtgagtagcccaattcgcatccaaagacccggcacttgttggtaccacaccctcgcccacagcaccagtggaaccacgac

SEQ ID NO: 28533 - DNA, 384 bp, Zea Mays
cgccgaccttcgccagttcgccaaatccactagatgctgatgattggttgaaatctattgagaagatgctcaacatcgcccaatgctctgaccaggagaaggttctttatgcttctggttgtctgacatgtcctgctgctgactggtgggattcttatgtcgctgcccatgatgctgctgacactattacttgggcagaattcacaactcagttcagaaactaccacattcctgctggattgatgaagatcaagaagaaggagtttctgtcattgaagcaaggcaacatgtctatcagcgagtaccgtgacaagtttatccagttgtcaagatatgctcctgatgaggtggcagatgatgaaaggaaacaagagcacttcacag

SEQ ID NO: 28534 - DNA, 326 bp, Zea Mays
atgctcagtttgacaaggttggtaagttgagtggattgaaaccaacagagaaaccttcagccactcccaagcttatcaaaatcaccccacctaaacttatcacccctgtgagagatgttgtgattgaggagcctatgagagcccctcctcagaaacaagtgtgggttccaaaacctaaccacctcaggaacacacttgacactcttcccggcatctctagtgatcccttcctagagcgccacagccacccaaaaagcccaaaacacacaaatagacaccactaaagagagggtgagctttcgttgtgactattgtgagggatggcc

SEQ ID NO: 28535 - DNA, 623 bp, Zea Mays
aaaaactgagaagcgcaggggtcacgttgtaaatatttccaagacacagttcgccctacgcaggactgcgggttgattccaataaagaacaaggtctcttatgcaagaaacccggccgaaggggtatcgttgtatcgtagccgcacggtctgatctgggcggccaggattagattaggttgacactctaatcggtacgcaacgcacgccgtaggatcaaacatcgacggcacagacttcattaaggcgagatatgatcacgaccccccatctaaccaccaacggtcccgagccatcctttcccagatccaatcccagccgtaaactccaaaatctatggtcgtgcacttctctctctctcactcgatcctgaccacggcggcgacgcaagtcctcacggcggggcacgccggcgagagaacgaaaacgcgcctggtgaccctaaaccccacgccgattacaccaaattggaccagagaaaatagctagcctaggggtgcattcaatcggaggtccgaggcgacggaggcggtctgcccacaggcgcagcggttccacgttcaacaaccactccggcgagcaattctaagggctccggtcatctatagtctagcccgatcgatg

SEQ ID NO: 28536 - DNA, 340 bp, Zea Mays
cgacatcattgatcgtgactcgacggttcatgcggtggcacgaccggggaaacacacaggcttatacaggttcgagccgtgtgggaggcataacaccctatgtcatgtgatgatctttgtattgggatgacatcacaagctgtgaactatgagaacgatgggctgaggtgagatgaaaatggtaggggtgcctcttggccttatatacacgaccaagggtagctatccccgcacaggtgataaatgtaatccgttcgcctatttcccgatttgtagcaaactgtcctcctacatctagggaaccccctatgctcatctgcccaagttaccgccagaggct

SEQ ID NO: 28537 - DNA, 370 bp, Zea Mays
caaaaaaataggttagagccagaagagttgcagttgatggggagagggcgcagtgaaaagacctgcactcaaaaagaaacatactcagtcagaaggggggaatgcttgttctgtagatggaaaaaatgactctaaactgtaatactatggcctaaacgctagcatggcttgtcccagtgtaatactgccgagtctttaatatgggcggaacatattctgaaaatctacccgagctataatgctgtggttgcttcaagtaattttccgagatagacaccagttctgtgcgcagtatgtgcgcagcatgtggtgttctcgacaaatgatgcatagtaacctctttttagcatatgttctgctgagttcgcgg

SEQ ID NO: 28538 - DNA, 278 bp, Zea Mays
ttgtgtcttattaggtagccatgatgtggtcactacaagtccatgagctttttgaactagttgagaccagctcgtggccatgtcctctggttgtgttggtcatgctgatcgcgaggacctcacatggggcatggtggtcgtggggcttgaagttggtcgatcgacgatggtgaccacttacctcttgtgtggttaggggaagttcctgggtgatcgcctcttcttcctccagttgtgggggcgtgtggctcgagctcatggttggggcaccccttcgc

SEQ ID NO: 28539 - DNA, 444 bp, Zea Mays
gtgaaactaaccacataccccggcagcggagtcgggtcggcctcgctcgcgggggccatccactccggttgtgacccaccggagaggggacggagcaaaccatcggcaacaagggccttcagatcctccacagtgacggtggagaaaggccacgggtcgcgtggcagaacgacggtcaccttgtcagccatcgccaaacgaaggaggtggaggcggaggggataaggtgcgcggttttcttttctctggctattctcttaggttgcggaaaccaaagcagaaggcaagcgcgaatggcagagtaaagaaccactgccagcccctcttccgggtatataaaggcccgagcgagatccattcaaaacttcgcccgaactcgccgctaaattcaaactcgaaggtgaaacgcccgttcctcgaacgactcgcgcacgtgcaacggct

SEQ ID NO: 28540 - DNA, 468 bp, Zea Mays
ccgccgcgctgtccccggaatccgccgcgtggtacgctcgccagcgcgatcccgagcttcccaagcctcatccgtcgccggccagccatctataaatagagcgcgggcactgcgtcgtcaccgcattccgcacatccgcagctaagtacttgactcgagctcaccagaaatacccgcgcagccccaattccctctcttcttcgttcttgctccgccgtgaagagcttcttcgtagccagcgctcctctggtcagtaatgatcaaattgctctttgttttagttagtatgtgatctattattgcccctggatgcaacaatttggagtttgaccaaagcctcttaccggaacgcacctaggcaccgtcaaacaccgccgtgacccccctcaccgtcgacccgttcttcgggccttgttctacccaaatcaaagaatgtccgtagaccctagcacacccatgaacctttcc

SEQ ID NO: 28541 - DNA, 289 bp, Zea Mays
ggttacttggttcctcaactactcaagtgctgctcaatgggtgtcctggcaataaaatccaacatagaagggggctcaggcaaggggatcccctctcccccatgttatttattttagtcatggatgtcctttgccttctatttgccaaagatgaagagatagggttgctgcaacaattgtccaacagaaagaaacttcatagaatttctatttatgctgacgatgtggccctcttcctgctcccaactcagaatgacatttccactactctggacattctcaacatctt

SEQ ID NO: 28542 - DNA, 701 bp, Zea Mays
cggcgtacgatatatggtggcaaaaaatctaggaaaattcataaccattggtaacttcaggtgaggctgcttcaattctatgaactcgatcgtatatatactacaaattaaaatccctgataatatgcatatatgattctcactcacgtccgtcttctgcacagcatgctcgaagatggaggcacttctcttagttttggcaaaacatgtgaaagatgtcaactaaaatgtgtgatacgggttcacaacccccagttctattggaaggttctgttcgttatcccttcgtctagcttatttcatccttagcttttaattaagctgccttctaattaatttcttcatcacgtatacgtgactaacatctaggctttgtctcatgcatccttctattagattgcaaccgaaggagaccctggttttgcatattcctacatcaatggttatatctcgtttgttgataaaaaagaaggcatccagaatattgtcgaggtacgtatatatacacagtggtcggcccataaatattgtaaaatcaaataaaattgttatactaaacggaagaaggcacaatcaagattattacacttcatgacgaactaatgtctctttgcattaattcgctcactaaatttatagcccgtatggtacacagattattattgctaacagaggtgaacggaaaaggttgagcagtaccc

SEQ ID NO: 28543 - DNA, 410 bp, Zea Mays
atttatctttaaaaaaaacatgagacaaatgaacagtcacagcgacatggaagggggagatcttacatgagagcagaatatgtcagaggtaactgaacacacagaataatatattccaattacaggaaaagttgcaggtaccaacaatcacatgatgtggatgctaaccttagaagtccagagccgatagccaatacgttttatgcatgactaacacaaatgtatggcaatgccattgtaattaattgccactctttgcacctttgctgtgacagatgatccggaccaccgaaatcgtacccagcaaccaaatatcgcatggactaatgaattgagccggagattggtttgcaagaagactatctgttccagtaaccaaggctcccgaacccaggcagcctccagccatg

SEQ ID NO: 28544 - DNA, 339 bp, Zea Mays
ggcaaggcttatgttaggcgccgcaagcccattagtggctgatagcggataagcaagggtagggccaaggcccatagttagatgtgagaggtttatctagatagttagatttatttgagagagctattagattgatttgagagagctatatatacctgtaaacactattggattggatcaagcagaaacaagtattgtttccggcttcctttagggagtcgggagaatccaaccctagctgcctcctgttccaccgaactgcatcttcaaccacgacgccaggccgccgtccctcgcggttcaagcctcgtccgccgatctctcatcgctacaacctca

SEQ ID NO: 28545 - DNA, 455 bp, Zea Mays
ggggtatggtgtgatctcggtcgtaggatccgaaacacgtggcccagatctgatcgccaaaattggaccgttacgcgttggtggccataggatccgagattgatggctaggatttcaatggacgaagggatatgccctattctaatcgcagcccttcaattgagatcccacggctaccagcgcatcttcccccaaaaacccgagccgcggcggcgcagaattccccacggcgacgcacacgccggcaagcgattaagcgcaccacggaacactaatctgagcactactagctaccacgtgttcctatagccatggccaacacctagagcaaggactcaccggggatgatgttgtggtgaggttggtgcgccacggacagtgtcactgcgacggccacccaacatcgacgaggaattaggaacggcccgcatgatctccgactcccacgaatcacg

SEQ ID NO: 28546 - DNA, 564 bp, Zea Mays
aggaagaggagcggcgataggtacccaaaagaagagatcggtggcttcgaccaaagatgtacagggaggggggagggagggggcagcggcgccctagggtttgggatggcaaacagagaggggaagggagccagtggcgccataagtaagggtcgatagctaaggggtggggtgaggcacgcaagcagcagagtggagccagggttaggctcggactcatgataccatgtgaagaattagggagacaccacacacccatagcagatggtgaccttttagtatataggttgtgtggcttggtgtacaagtaggatgtatgcttgatgtacaagtaaggtgagtacaaagatatacacgcctatacatatctctaacaggaatgtgtcggtgtgttcaggaggagtatggcttggtgtacaagtgaggtgagtacaaagatatacacacctatacttctctaacagtatgtgtcggtttgttcgggaggggcttattttaccgtttgtttggttaacctcaccgtctcgtcttggaccaccatatatgttgactctgtctgagctt

SEQ ID NO: 28547 - DNA, 328 bp, Zea Mays
ttgtccgtggtgacccatgttttatttcctacggggtcatggcctccgatccgtatagcaggcgaaagggagtgaatccagtcgcccggcactcgatcgtgttcagcgcctagactgcttcaggtagtaggtcggcccatttacccttcttgtcgtcgagaagcattttcttgatggcaatgaaaatcttgtcgttggcgcgctccacgacgtcgttagattgtgggtgatatactgaggcgaaggcaagcttggtgccaatggagaagcagaagtccctgaagtcctggctgtcaaactgtttgccattgtcgactgtgagctcgga

SEQ ID NO: 28548 - DNA, 355 bp, Zea Mays
ccgagaatcagcgtgttcaactggcagctcatcagctttcagggatggctttagcatggtgggacactttcagtgaagccgtcagagatgctacctgggcagaattcgaagcagctttccgtgaacaccacgtaccccaggggatagttcaactcaaggaggatgaattccggtagttaactcaaggcggaaggacagtcagtgagtatgtgcacaagttcacagagctggcccgctacgcgcccgaggatgtcagcaccgaggccagaaaaatggcccgttttctgaaagggttaagacccgagcttaagaccatcctcgccagccaagacttccacagcttctctcacctctc

SEQ ID NO: 28549 - DNA, 909 bp, Zea Mays
accttttgagtctttgctgtgttgtccttatcttcttttggctgttcatttttcttgcacttctctttctgcttcacagtcaacttatcccgcccattcttagatacattgacctccgccttgttcaaggactgctctccatgatttagatatctgatatctctattttcaggaacaatattcaggtgcttcatgttcatgccatcttgccttgtagtttcttgtggtaatgtttcagattgaacatttatcatcatttgaggtgctatagatccaactttgttaaccacagaaggctggaacaaaatttgtgctgtcttatcagtgcaaacttctgcatatgcactagcacgaagtggattttttttctgaacacaacttggggcattctgatgatgcccatcatttaggcaattgtattgtagagcatctgcttggttgagaatcatatcaaatgcttcaatactagtagccgttttcatattatgatctatcggactgccaggacttttgcaaacaggatttagatattcatcagccccatttttgcattctccaactaaaacatcatgactggccatgggaagggcacactctttttgtagatcatcactatcctctactctattgttaagtaaggaaactgtttcagattcactaatcttgttgcttctaccatcaacttccatattgatgtttctcaatttctcagcatccagtggaggaagattgacagaacaagggcaatctgaaaaacctgttggcaccagtgctaaagacatgttcccaatagccaagtcatcgtcacctctaagaggctggtcaagtttgtgctgaagatcaccgagaaatgtgccgagactgggaagcctatcctgcaacttttgcataacctccaaatgtacctga

SEQ ID NO: 28550 - DNA, 410 bp, Zea Mays
atccctttacaagtcgtgaaatctatctaactccatatgagtctatgtttgacattgcaggtgctcctgctcatcaggagttcggttatctcccgagtatctaactcttcaggtacaagtgaaccgtgcgcgcgaagcatcagcgctccttctgcgtcaggcgtgcatagataacgctcttgtgtcgtattttacgggatcatttcatgttttgggtgtcacccttcttagttagactggctcttcctggacgtggcccaaacagtacgccatgctaggcgaactgttggggggccatcaagcagcccatggaacacttctgtgcttacaagtactcattggatatctatctcccacaattaccttggagcattttttgtgttgctactctaccgttgagctaccaagtt

SEQ ID NO: 28551 - DNA, 400 bp, Zea Mays
gtagttgctacgcctgcgcaactttgacatgcagatagatgggacaggatcacgaaggattaatggtaggcgaggcttagcggtgggtgccctccccctcctctcgaggggaagtgctggctacgagagatggggatgcatccttatctaggcagtcgcactcctccttaccggtgatagtgttggcgacgtgagaagcgggcgggcgggggtttgttgcatgtgtagatcgtggctagcacgaaggtctcggtaggcgagtcgcatggcagacatggaggtctcggctagggatgtcaatcgggcaggtagtacacgaatatatagttcgtgaattcatacctgcgagacaaaactcaacacataacagtacccataaatgttcgtgggtatggatctg

SEQ ID NO: 28552 - DNA, 416 bp, Zea Mays
caagtctgtgaggtggggcggacgaccaagtctctcaccgagcaagtctgtgaggcgaggtagaagaccaagtccccatcgaacaagtctgtgaggcagaacaggcgaccaagtcccccgccgagcaagtctgcgaggcaaaacgagcgaccaagtcccctgccaagcaagtctgcgaggcgaaacggctgaccaagtctcccgccaagcaatccagttgggcagaaatatcgaccaggcacctgttgggtgagcctaagcactagccagggtcacaaggatacgtcaaccacaacatggcatatcgccaagagcccacgcaatagtcgcagacacgactgtacgtacctttcatataataagcataccacgttgtctgatgggacgaggcagccccggtccaaggcgacctcagc

SEQ ID NO: 28553 - DNA, 417 bp, Zea Mays
cccacagtgcttagcacagcccggcccgttaaagcgagaggcacgacggtggcccgatatatatgatataccgggcgcacgcccacggcctccgcctcgccccttcaccttagttcacattttcgtcttagtctgcctctgcctcgccttgctaactccgtcgtccgcccgaaccctaatcctctctccactctctcggatacgcggtcccccgccggctgccgccgtcgtctccaatgcccagagtctccgaccgcgcaaggatcaacttctctgtcctccaaatgtcgtgcttctcccggatccatggttcgctgacagtcattgccgtcgtcttcggtgctccgacctctgagcctccgaccacgcaaggatcaacgaatacatccctcgcgtgccgtgcttgtacatctatac

SEQ ID NO: 28554 - DNA, 1079 bp, Zea Mays
ctaggcgttaccgagaaggctgagaaagatgaaatcgtgaaggccgcgatggagttgaaaaatgctgggatagaagatggatacacagctgaggtctccactttcagacaggttcctgattagtttctgcaactatatctatttatgtaccccatgttttgttttgtgagggaatgcaataatcctgatgttaatcatttgcgtgttgccttttgtcaggctctcctagtagatgtcagagataaacttctgttcgaacaagattatgcaggaaacataaaagagaaggttccacctaggtcctctcttcatataccttggagctggttgcctgctgctctgtgtattttgcaggaggtaatgcatcacacagacatttctcatcaaaatgtctgttggaaccagtaacacgctgctatgaagttaatgctggttttgtttggttgagacttttcactttatttggctatgatcagtgagttagttgttattacagcgactatctttaattttctcattgcaccaaattaagatatattttgtggagtactatctgtatgtggtttaaatcgtacatgtgtcatgttcttcttggtaatatacaattcacgtgtcaggtattatatttaatacgccaaattatttaatataacttaacaggaataagagcagaactctgttaacttaaatgtccctaagctttgaaatatttatgaaagggcgtagccaggtacctttaggatcatgtttttcagtgtgtaaataataactactgttctttcttcagatcaggacatcaggcaagacagtgtaaagtgccaaaattgtcactattgaaaattttccatgctgaaatgcactgttagctttgaaaatcccagcacgaaggatgtcttagcatcctaattttcgaagttaaacatgcattttttgcttgccattatgtattgcaatactggtttattcgctcttcatccatgtatgatgtttcagtcttgtttcaggttggagaagagaagctagttttggaaattggtcaggcggctctacgacgccctgattctaaaccttatgttcac

SEQ ID NO: 28555 - DNA, 469 bp, Zea Mays
aggggaaacctcgggttaggtcggaatctggagtcagtcgtcggtgagcaccaatccttgcgtgctccgccccgtccaactcgtcggagcatggctcccgcgcggttcgccgtcggggatcagtcaaggtgaagaaatagaagattgaggacctatctgcaaatcatcggagactcctaagaatagtaaccgaacccatctccagttagataaaactccgagggccttcctgtgaagttcccaccgcgggcgtgggcgcgcccgatttccctgggttatgggccgtttgagctagtcttggcccaatactgttacactttttcctttttctttttcagtggagctttagaaatatgtagaaaattacagaaaaatcctaaaaatgtgaaaccaattttcctaggctccttattttccctagaatttaataaaaataagtttgtgatttttagtggaagtaagaaatttt

SEQ ID NO: 28556 - DNA, 298 bp, Zea Mays
gaagtaatgaccttcacgtccacattgatagcaagcttttcttgaagttgtttcttgactttttccatgtttatcttttcgtttcttggacctgatgcgacgacgaggctgaaactgtgtgcaagtaatagtccatccatcaatgtaacactcctgtgtttcttcttggggctgggcatccttgtgatgtttcctttttggaatacctgacaattcatcgtctgacagtgcatctgctattagttgttcttggggagaccattgtctttttataccagaaaacaaaatccggttcttc

SEQ ID NO: 28557 - DNA, 343 bp, Zea Mays
caagcaccagtcactcataaaacgcgccctcaatcgctgacaagtggaccaaagccgtcatcttcccctcatgccttgaccgctcactaacaccgtggggccaactcgtcagccctcgggcgcatccatgccttgcgctatgtctctgactcgcggggccggatagttaggatttcccactcctgggaaccgcgggtgactcgggtcaccgcaacgtgggctcggttcgtcagctgccttctccgcccaatccctcgatgtcggctcgcgagtggtgatggcataacaggatttcactgatctcgtgtggactgcaacaaactcccctcgcgccgataaattc

SEQ ID NO: 28558 - DNA, 706 bp, Zea Mays
cgggtttgcctggccacggggacgcggagagaagtacacacgacggggtccgatgggcgtcgcgatgaattccggcggaaacaggaagtcacgttggagctatacggccgtaagggactacaagttcaccatgcactacccaatttgggacgaggaagggaagacactacgaattttggcttctactgatcacaccggaagatagtgaagacctcactgtggttgatggcacaatttaaagggatggcgacctagctagctacccgcggtcacaaggcacgacgttagtgcatggcgaccacgtaacaaagaagtacagtgtggtagaacttaggcacgagtgacaccgcgacggaagtgcccgagcccgttctgatcttctgtcccggatccgctcgcctcggtgaataaataaagtcgtcaccgcgacacccccaaacccaaagctaatcagacagtgaaccaccattgccgcagttcccgccgccgctgaagcacgcgaccgccgacgtcgggctaccccaagccattcagggagcttcgcctcaacaccctgtcgatgtccgtggtctcaccacacaagtttcgtggccgggttggtgtgaatttgtcgttggaggaagagctccgctgtccacccgctctccgccgtggccaacactacctaggcaataattgttgatgagaatgccaccatcaagctcgc

SEQ ID NO: 28559 - DNA, 336 bp, Zea Mays
tttgaagtgtttcttgaacttaaaatgatagggcagccgaacgagttcattcttcttcttctctcctttaagcttcgacataccccattcccttagcgttgggaatactctgttggctaagtattcctgaactaaatccctagtaccaatatgtttagacacaactctaaattctcccacaacatctggccatgatgcccccggcgtcatgttgcactgaggcctagtcaacccgaaggttagctccaacggactctgaactagcttctcctttttctcatcaatcttaacgtaaaaccattcagttttccaaccggtcggccatttggtgtgata

SEQ ID NO: 28560 - DNA, 501 bp, Zea Mays
aggagcccatggaggtagaaccaaatgaagatctgcatcagtgggatatggatgttgagtttcaaccggatgcccgacctgagttacctgcagcactagtgggaccagaggtcgtggtcttggatgattatgatgaggactcagaacaccagccatctaatggagatgtctccactggagagatggattcgtctgatgaggaggacgaggacatggatggggaggacattgcaacaattgagccaggagaataagatctagaggagttcatcgacatcatggggatgggaatgccagagccacatattcctggagtacccgacccagtggctcccgtactagagccccctgcaccagagattcccgagccggaaagcccaacacctgtgtttattccacaaccgctatggatgacttcggttcactgtagtagtggcctaacctttaagtttccttgcatgcctcggaacttgctcagggcttcaggattgaacgaagtca

SEQ ID NO: 28561 - DNA, 277 bp, Zea Mays
tggagatccattatcacctagagaaagcaaatgtggttgcagatgctctgatcagaaagagtcaagttaatatgttggccgctcacctgatgctgttcgagctagcaaaggaattctacaggctatgtctcggatttctgaacaacactcaaggagtgacagtcgagctagaacccaccctagagcaagatatcaggaagggccaaagggaggatgaaaagatcaacgagatccaacaactaatcatagatgggaaaggtccagatttccatgaaga

SEQ ID NO: 28562 - DNA, 334 bp, Zea Mays
acccttaccatcaacctcggcgacgacaatgtcacatccaccgagggcgaggctaccccagatggcagtgttgctgctactgcctccactacgacaagcataggtaggaagaggaaatgcacatccgatgtctgagaggacatggataatatttttgccactgagaatggtgtggaggtaatattaggagctagatgtcatttctgcaagaaagaacttgctactcattctaccattggcactggccatttggctcagcacaaggaaaaatgagaggtttcaacaatgtccatgcactattgtctcaacttacacatttgaaagtcgcctagag

SEQ ID NO: 28563 - DNA, 571 bp, Zea Mays
ttcatcgggtccccaggaatgtactcatggcttcgggaggaaggattggacctgggtgtgccctgaaatgctcatcgtcgtgagactgtcgccgccggtagctccacgctgtgggcagctccactgccccgccatgtacggtaagaccagtgatctcaagttcaccatagcctcttcttcgggtagagacttctgggataaagtatcgcgctccaggaggctggtctggtggggctcatcggtcgccgccgtgggagtttggcgccgccgcctgtgctgactgggggaggaagaagggccctcactgtcgatccggttgcggacgactggatctgtgcgttggataccgcttcgggtgggagaaacgactgccgttgatcctagatcgtatggccgattggggcactcggggtatgaccgtggattgaaatccaatggccccaagtgcataccggttcatttaaatgataggactgatctgggacgtccagatcagatcgggtggctgggacatgttcttaccccttcggccagaacgtgttacaaaagagcccccaaggatttagataat

SEQ ID NO: 28564 - DNA, 394 bp, Zea Mays
acaaaacttgggttgtctgctgtcgcgcgtacaggagagaaaccttcaacaagcagtagctgcccgcgtacaggagagaaacaagattgggaggagagaagcaagttttaccggcgtacaggaaaaaagcaagcaactacaggggtctggcgtacaggagagaagcaagcagctacaggggtcttctctaccgcatgttttctctccttccttccttttttggcgtacaacttctttttctggcgtacagtcctttactctgccgcgcgccagccttttctctaccgcgcgcgtcctattttctcccccgcgcgcgccattttctctcctgcgtgcgcgaccttttcccgcccgccattttcactctgccgcgcgccagccttttctctaccgc

SEQ ID NO: 28565 - DNA, 299 bp, Zea Mays
aattccgttcttgggtcatattttgtctgccgaaggtgttgcggtcgacccaagtaaagtcaaggacattttggaatggaaaccacctactacagtgcatcaggtccggagtttccttggaatggcgggatattatcgtcgttttattccagacttctcgaaggtatctaagcctattacagagttgctaaagaataatgtgaagttcaattggtctccagaatgcaacgaggcctttgagaagttaaagaagttgttgacaactgcacccgtgttggctcaaccagacattgagaaac

SEQ ID NO: 28566 - DNA, 371 bp, Zea Mays
ttgctgccagggtgcatggagaactttaaaaggtgagcttcatccaatatcttctttctgagctcggggtccttgggaacaaccaatcgatctccaaaccatagaattcccttgctgtcctgacggaagcacttgtatttctctgccttctgcttgatcatttctttgataacctgaacacccttgtcttcaatctgtgcccggactatttgctcttgtaaggtgggctccaccgagatataatttaattcaccggaaggaacaacttcccaggttcagcttgcacaattcatcacacagggtggtaactctcgcatccatgctcatacaattgcactgggcctttctgctcaaggcatctgccacaacat

SEQ ID NO: 28567 - DNA, 621 bp, Zea Mays
ttattttgggagaaatgatgataacttgataaggtttgcgggtgaagaaataattccagagccaaaggatgatgatgaggtggtttttatgagcttccatgccgggatttgattcccgttgtacgagatgattggcaaagtgctaaagagatttgagatatatcttcatcagctaacaccaaatgctatagtcagactttgtgtctcgaagtcagagaaagagtgataatgctgaaggattctgcagagttcattaactccattaccagaccaaggcgagagcagatggtctgcacaagaacttcggatgctacaattttgcatatcgaaaggatacgaaggcccttgtgattggatactgcaccaagtggcccaccggctagacaaattaatggttttatgtgaaagctgatgagaagagaagggagaagcttatgagtatggtgatgagtcccttgaaactaagcttcggcacgacgaggccattatgcaacatgcaacttggctccccatgccaactagccgaagtagaattcagggttgtggccgagcatattagtactcaggacatgtttcaagaatacctagcctacaagaattttcccacgtcaggtgggtgga

SEQ ID NO: 28568 - DNA, 333 bp, Zea Mays
ctagttggaggtaggattgctattgtgccactggaagcaaaattgccatgtattccttctcgtatgtggaaattccttggttccttggtcccaatgccttgctaaggaagtctatagggtgtcctttctgcattagaaccgcaccaatgccgctatgacacgcatatgtatatatgcaaaatggggtcgagaagtctggcaaggccaaaaccggtgccaagatcaatgcctgcttcagtgtctcaaacgcctgttgatgctccgaggtccacacaaacaaggtgtgtttcttgagtagctctgtgagtggcttactaattatcccaaaatggc

SEQ ID NO: 28569 - DNA, 512 bp, Zea Mays
tcagttttatgccaccctctgggtcaagaaagtagatgaagaagtcgatgggtatgattaccctgtcatgtatttcttcatccaggggaactggcacaaagtcagttaccgtcgttttgcccatattttgggcttctctgatggtgatattcagggcagcaacatgcgagtccatgacattaggctgcccatgcgggaagaggctgaatttattcatgtctctatggatcgggagttctggacgaccgctaacatgcataggtactataggtaccttaactctttgtccaggatggccgttctcccgaagggcgggaatcaaatgaacgtccttggggagagtcgggtcttccttctcctccttgctcccaacagtctcgcccacattaatgtgtttgacatgatctgggaagagatcattcgtgcttcctggtctcctcttaaagggtgtcttcatgcaccctttatcatgaagatgatcgaagtggtcacccagactcacttcgaaaaac

SEQ ID NO: 28570 - DNA, 368 bp, Zea Mays
attgtcacacacacttacacatagttatagatacacattgatcacctagaaagatgtcccctttttgatcaagagggagatacaattgatcatctccttgtggcttgtatcttctccagagaatgttggttcctcattcttaggctatttggtctccaagcattagcaccacaaccaaccactcgaagtttcatggcttggtgggaagaagtcaacgaaactgttaatggtcttttcagggatgatctcgattcccttattagtttgggtgcctgggtgctgcggaatcatagaaataggtgtgtatttgatggcctctctcctagtattgctgcagttttagttcttgctaggaaggagcgtcagat

SEQ ID NO: 28571 - DNA, 321 bp, Zea Mays
gtttggaattcgaattgaggcacgaaacgatatggaattgagccgatacttcacgaataggtttatataggtgaaaatgagtgaagtgtgtgcttggtttgaatttaggcgaagaaaaaggaatttgggcactcggctcggaaacgatcgctcaaaacgggaaatttggtgaaatttaagcctgggatctcggattggcatgaaatttggcaagtaggttactggaagtgttgtgaaggtgcctaaaaaatttgggttcaattggagcatttttggctggtttgggcatttcaccgaacacgtggagggcgaggaattagg

SEQ ID NO: 28572 - DNA, 322 bp, Zea Mays
tgccagggctgcagttttaacgtggtcgcaaccagccttctccagaattgccacaatacttcgagcaccagaaaaggcacaaatatcccctcgatcgttcaggatttcttcaaaggcttcggctacctcgcttatccaaccaatgacgccttcggggtcacctcgaataaagttctcttcagaagaataagcacctacttttgcaaagctgcttttcaattttttcacgcaatccaaggacttttcgaagcacctttccttgaattcgcgaagctcctcaacatttttctctagcctagttttgaccattcactaatttctt

SEQ ID NO: 28573 - DNA, 540 bp, Zea Mays
gctatgcactattttttgagcggtgtggtgtgggcaggcctagaatgccagcgcggaggggtgaagctgtggtagcaccaagtgtccacattaggttcttaatagagtagtatagattagatcttcgagtagtctagtcgtagtttagctttattcgtagtttcccaacctcaatattcacctctcttcgtctctacaccgtctagaggagctttgggtcttctgctggcacgaaagcaataccaagatccttcctcccccacgggtcctttctgcgaggcgagaccttggttcttcaccgagttctctacgccatcgcagacggttcaccgcccacacgtggatgatccatgcgtctgcaaaggaagagcacatctttctgtgtagtcacggatggtctggctacccatcgcggacggttcgcgctcccatatagaggaccctaaggtcctacatgccgcgcataggttctaggttttgtttgctgtttagccaaaaaaggtgacaacacatgcgttagagcatatgatggtattattt

SEQ ID NO: 28574 - DNA, 511 bp, Zea Mays
cctgcaacaatatcacctgtttgcagctgaattccttgatcaggcaggaaggagtcgagcagttactcgaattgcaacaaatggaacagacagcagcaactgaaattccggagccaatcaaacaattattaagtcattatccacatctgttcagtaaaccccacggcctaccgcccaaaagaacagttgatcatgccatcgatctgatacccggtgcaccacccttcaggctaagaccttaccgctatacacctcaacagaaagatgaaattgagaaacagatccaagagatgctagacagtggcattgttcaacaaagttctagcccatttgcttcgccggtattgctagtgaagaagaaagatggagaatggcgcctttgtgtggattataggaaactaaattcatatacagtgaagaatcggtaccccatgccgatatttgatgagattgttgatgagttggctggtgcatcggtattctctaaacttgatcaccgctcgggctacca

SEQ ID NO: 28575 - DNA, 622 bp, Zea Mays
ctggaggatagcgatatggccgcacatgaactggtgtcgctcccggcaacaggggaatggcgtgatcacaagccctcgaaggaggcagccctttcggtggtgcaaatacctcagcaaattccttcaacactgactgcactgacaccggtaaattcaagtcatccaaagaaggagttacagtactcaccatggccacttcaaccattgaccctggcaacaaggctgctgacaagccttggagaagcactggcaatttgtgataagtgataaccatccacttatgcaaccaatgcaccttcatggggctatgaagtgccaaccaatccataccaacaatcaaatcgtacgaagataaccccaagacatgaaaatctgtgataaaggagcactgttggacagaccaagaagccccccagcaactgttgtgagcagcgcagacgacccccatcagccacttggaccatagaaggatttggcaattcagacagaccagataattgagcagccaacttagaagagataaaggaatgtgaactgcccgaatccaccaataccaatacttccctattctgaataattccagtgaacttcatggtatgcattgcttcaacgccctgaaccg

SEQ ID NO: 28576 - DNA, 355 bp, Zea Mays
gaaaatgtgcaccctgtccctgtgccggccggccgcgcatccaagtgtggggacgacgacgtcgggttgtatgcatcatgcatgggtctcgcgtacgtacgtgattttgttcgacgcccgccactaatgctggctagcttttcactagtgggtactatactagcttcatgggctcgaagtgttgttgcgcactccgcaaaaagatggtgacagaaacttccacggtgaacaacgcgaacgatacatgtctatagaaatataccacggtaacctcacagacggatatgtaatattcatacaactatattattcactagtttcaactttactaaacccacccaatagcgtaggcata

SEQ ID NO: 28577 - DNA, 469 bp, Zea Mays
aactcgccaaaacaactttaaagggtccaataaagcgggggaacaatttgcccttgactttaaatcttctcattccatgaagtggtgacaccttgaggtacacatgatcttcttcctcaaattccagtggtcttcttctattatcatcatagctcttttgcctggtttgagctaccctcaaattctcccgaattatacagacttgttcttccgcctcttgaataagttcaggtccaaagaattgtcttcctctagtctggtccaaaaatagaggagtcctgcatttcctgtcatatagagtctcgaacggtgacatcttcagactggcttggtaactattatttgagaactcagcataaggtagactcttgttcatactactaccatgataaagggcacaagctcttaacatatcttccagcacttggttggtcctctcagtctgcccatcagtctgtggatggtaagc

SEQ ID NO: 28578 - DNA, 381 bp, Zea Mays
agatctaccatggtaaagcggtggctcctctccaagatggttatagaattgctggcgtcacgatataacttatccagattgtcgcgagaagctgcgagtgctcgtttctcctcctgcagacaagaatcagctctcaaatatccagaaatcagtaaaagcacagcagatccaattaagtaagcttacctcgttagccgccctttcagagtcaagctgagcattaagagaggaattcaaagaatttgcatcgtctaaagaaacagaaacccgagccaggtcgatctgaccttgggaatacttctcctcgatctcagagtactgccgagtcgagtcggcttggtgctggagatgtttctcctcatgttcagaataccgccgggc

SEQ ID NO: 28579 - DNA, 629 bp, Zea Mays
aaccacaagtggtgcaagaacttgatgcactcggaagaacaccaactgcaacagtcacagcctgcgcgagcttcacaagtactcaagtagcctcaatctgaataagagattctaagaccgtttacagcagtctacctaaagtttacctaaaaacactgctttacattgtagagttactgttcgtgtagactgcagtttaaatatgggtacggatatgctaggtatggatatgctagagataacctaatagaaacttaaacaggagatgaacaaaaaagatgcattctagagttccaccaaagagatatccagattgtaatctgcacatgctacattaaccttgttatttaggtgggccgtattgattaatttgtccactgcacactgatatgaggaagggaaatcaaggagaacgaggatctttttgctccgaatgagaggagatatgtataatccagatccgtgagcatcgagtccagaactagcgagaaataatctgaatgcaagcagcagcgatgtaccttgagatccgacaagccatgtgagacgttggcggcgtcgccgcactgactggaacgcaacggagccgcgccgggaatgcgtacacggcaggtggacgcaacgccgtg

SEQ ID NO: 28580 - DNA, 356 bp, Zea Mays
ggcccctttggtgatgttttggtaattaatgacaactgcttgtggactaacgattcttcgagaaataagaatgcagggttggaccacataaaacaggaaatgttggagaatcataaacattggttgtggatcagataaaggcaaaggtataatataggttttgtttttgccggtcttgaggagtttagagaagatacctgaccggattagtaggctagatagccgtactattaagaggggtcaatgactttgatctgtgtgaaacttagtgcctcatagagcatcaagtagttgcatttgcatgaggactaacagcgcttcaaatctcgtgagttaaaagttctatcaaaccaagt

SEQ ID NO: 28581 - DNA, 480 bp, Zea Mays
aggagacagctcggtctattgtccctgcaaagaatgagaagaaagaatcctcaggcattggcaagcgagaaactgggaaatctacaaaaaggactggtaattcaatctcttagccctgacacaacatatgcacattgtgtgacttggtgaaaacttatgcacaaaattttccagctcctatagacaaggctaagactgctaaagaggaggccagagagttgctcttgaaggaggaagcatctgtgcgtatgaaggttgggcaagtgcagaaggatctctccttaatgttggatgctcttggcaagttggctattgctaatcctatatttactcatggtcaactgccgtcactggtcagcaatctttttcttccctctgtagcttctttctgttttcaccgttactaggcagctagcccatatattgtgcttgtcaggacttcacgacaatgaaggttgctagatagagggaacaatatgc

SEQ ID NO: 28582 - DNA, 403 bp, Zea Mays
gacgatgctagctaatgtgtctagctagctagctaatagggttcgaaatactaatcttgacttgaactcaactaaacctaatgcatgcatggtctaaatcaactaatgctaagtgttagggggcttgttgaatgcctcaacgacagaaaattctgcaaagattgccgtaccaaattaattatctattaataaggaagctaaatattcctcagcaatgaagtattgcacggttagcttactgctggagttataggctcattggacgacttcctgttaacaacaaaaggtgagaaaattataaaccagatcaagcagtagcgcctggacactgtagctgccgtaccagctagcagcctagcagcatctctctgcagcatgaagtgtcactatctttgcttctttc

SEQ ID NO: 28583 - DNA, 625 bp, Zea Mays
agggacggcttcgagcaccaaacttggacaaagcaactggggtgactgagggggttaacacaagcgtaaagggatgatgagccttggtgaacaatcaaacggagcgatggggcacgggaacagcgaaattcagccagaacccgagactacgatagcggagagctaacagaaaccgagttctcgtggccttattggagcttaatatggagggagccagagcgagcacatctagcttcactactgcacggacaccacatatgtccaagggcacagagaaacagtaaacggtgaccaatagtgttcggactggaggcaagcagacaggcaaacatcatagtcaacagataggcttcacctcttcaatccaatccttggcagtgaaactatcccaagttatcccaccctcatcctgccagcacaaactcttatccctaacttacccagaagcaactggaacacatagtggatggagatctttctcaaactctgaatctgctgaaactggattcacttggttcacctgcaccccttctgttcacccccagttttctcacaaattctaatggcaccaggttgctacagcaatccaaggtcgaaatcacacagaacaaaagttacaaatgct

SEQ ID NO: 28584 - DNA, 277 bp, Zea Mays
cgcacccctttgttttggttgttgcattagcactcacatatatatcgccgtgaccaagctgagaaggtgacgcgccatccaccctgatgcatactcgctcgtccagtgagtgcataagctggaaagagcgtgcattcatgcagttggtgagatatagcttcttcgtgcccacgtgcaccagaaacgctccatgcatctgcctgttgctccattcatgattccctctcctctctcaatgaagagagacaagactccggccacaggccagccgggcaca

SEQ ID NO: 28585 - DNA, 821 bp, Zea Mays
atgtaagaaaataatagtatcataattgggagaacttacatggctttgaagaatatgaggtgtgtcctgttcatgcgccccaatatgtctcatggggatgtgcttatctgtgccgaccatgtctgtcgattttgtgtgctcatcaatatgtccaggtgccctcaatgccgcgggggagtaacagatacaccctctgtgtaaccggtgatcgcagacgctacaggatgcatgtccattgaaatagacgtacatgttgatctatgcacaggcgctacaggttgcatgtcatcgccagcaccggtgctggacattttctcgccgttaatcgtcgcccggtgctctcccttccgccgccgttaaccgccgccaatatcacagatacgaacgtggatgagcggctgtaaattagaatttatttcctcctgtaactgtgcctttatttacgtgaacgtggagcacgtctttccttatcttagaccggtggagatttatataatgcatggtttatactatcatgttacacaacgttatgcagtcgtaaacggtgtgcacatggtaatattcgttcccgtgattcgtggcacaaaagattccttctatgcatgatttatgcacattaatacatatatttatgcgtgcgtatatcgcctgtcgtgtatcattcgggattcgtggctatcatatgcatagctgacgcaagctcgcgtacagtgggccgaccgcgacctggttggcgtcctggttggggcttcccccactaacggaagcccagggcttccattacctccaccattaccttaaaccaccagcatgacttaaac

SEQ ID NO: 28586 - DNA, 407 bp, Zea Mays
gtaggatacatttatatatacaacaaattagtccgaaatcaatcattttctttccaaaacaaccttctgtcatgtcattttgttccgcccaaattaccacaaatgttctatttacctttttgtgacacacgtactactaaatatccctgcgtttgggtcaacaacttaaatcatgtttcctatggatatcgttctctgactcagcaaactcaggggaatgggctggtagtgtggtaccagcaaagcaccttatcggaattcttgtacaatcatgcttggtgtgaaattgatgactactgatgaaactataaccaaacagaaggcagccggtaaatattagaagataagactgtgacagaatattccgctgaaattcagaagaataggactgtgacaggacaatgaat

SEQ ID NO: 28587 - DNA, 373 bp, Zea Mays
cgacaagctaccagatccatctgcgagtgtccctttggtttgttgagtactgtacctgtactactccggaatggccgttggccaacgcccatcgtgctcactgctcagagatcacaagggaggcgtggtaattgtttacggttgcgcatacaatccacagatcccacgaaatgcacatgctcagtgaggagccacacacgggcccacatttcgcactccacctgcctagttcgcctcgctattgacaaccaatgtctcgttctgagctccgaatcttttgcgatggtggggtgattgcgcgcgtcgtataaaacactagtttacactaatttatacttgaactatactgtttatataatgcagtttgagataa

SEQ ID NO: 28588 - DNA, 485 bp, Zea Mays
gtcatgtccggatatgtgcacatcacaccaaatgggcacaggggtctctacaatgacttgtacatcagaaggacaaagcagcgcgccacaccaagcgtgctcgtgctcacgctggcaggtgacgaagggcccatgacgaccggagaagccacaccacgcacgaccacactttgagtccgtggaactaattacaaagacgtcagcgttagacttgttataagagccagagcaacgagaaaggacgacgccatgccaagagtacgtctacgcacgaccctacgaaggaccaaccacgccaacccgacgagcagatctatctctctctccaatagaatacaagtcccactataaggtcctacccttgagatataaaaggaaggtccccctccttctcctagacacgaagacaccaattgtaacaggccctcaacaatactacaatcagcactacactgaactaggatgcaaacctgaaccaatataac

SEQ ID NO: 28589 - DNA, 954 bp, Zea Mays
aggaaggggtctctgcgcaaagatcctaagacacagtgcacagacgcgaggactgcgggtttattatttaacaacaccagggactcttttgcaaagtactatggtcgaaaggggtacggtgagatttaggccgtccgattacgcgcggatggtgcggattagatcctactcaaaacgaaccggtacgagacgctgcccgccagatcacgatcctacggccacggatttaaaacagccacaccctatttgtctccgtccgtgagccgatcaacggcccgggttggattcggccgaactcctgtgacgaatcaatcacaaccattgatcacgatcgaacggcgcagagcgcatcttgaacccccgacactctctctcctcacctcctaccggtctaacctcggcggcgcgcagcaggcatcgcggcagcgccatcaccggtgtgcagcagaccgagccccaggtgtcccaaggtgtgattcgaacggctcttacgcgtggatgaaaagaatgtgatcctagggaagacaatctcaccagaaatcgtgcagtgcagggctttggcgacatcacacggcggacgttggtgaaggagcctgaccatgcgtgtagcagccctggcgacggactccaagtccggcgagctaccctcgcccaaccgcggcactaggtccccaagattctatcctactaagatctactcgcggtggggagagcggtgaagcacagagacgaggtcttaccggagttttccgtaacgaagccccccagcgacggtaatggcggatgcggccctgatctgccgactccggcaagaaatcaaacggcccccgccagcaaccctggtctgccgccagcgagcgcacaactcccacgatgctccccgacacagcgcgagtctcacgaggcaactggctactggcttactgctgatatcttcgcgagctcacccctcca

SEQ ID NO: 28590 - DNA, 741 bp, Zea Mays
ctaatttttacccgcgaccgtaaccatacatatttagactacaacaagcaaatcatcgtgattacgagcttaaccaacccatctaacacttcggctaactagagcaacggtatagcccgctaaataacatacacgtcggcttgcctattattatcactatctaaggcacaacatacaccacaacatttttataaacatacatattcacatgtatattcatacatcgaccaaatcatacgaactgtaaaccactaatctttaactcgaaaccatcatgcgcttacttcccaaatcatgaacacataacgcgtattgacccgactcaagatatagaagaagcgatgactactttggcatgtcaccacatctctaattaagccaaaacaatttctacttatatcgaccgaacattcgtgtcgagcacaccttatattaccttgtctcgcatacaaccatgttgtggcgtgcactcgagacactaccgattaacttaacgcaattacctctacaatgcacttcgatatacacgttcgacatcacagtgcttcgacagaccccacacttccaatctacttgtcgcatccaaacacaccacattcccactgcattctcatgaccaattttagcacaattatttacgacaacatttatcgactagacaatgaaacactaaccgatcattcgcacatctcatcttaaaaacactaatcacatgtcacataatttatatcttcgatccac

SEQ ID NO: 28591 - DNA, 324 bp, Zea Mays
ccggaaactaccataggccatagcaccaggcagggtgtcccgtgctcccaaataaaatcaatgatgtaaaatgttaggcctcgataggttcacctaccgtgtgtttggttgggcgtatgttggaaggctggctcgctgcatgcgttgactagacctccgcgcgtgttaggttgcccgcatacaaatatttagacctgcatgcaccggtgcatctcagtctttgcgggagctttttacctgcattggtggatacgcatggaagtgacgtatgtgctgggccaagctcgcgcaagcccggctgcacgtacccaggcatccaatcac

SEQ ID NO: 28592 - DNA, 272 bp, Zea Mays
gtcacgaatagtcaactttcctaggttgtagactgtccatgcccatgtgtcggaccgtcgatcggttttaaaaaatgtgcaaagtcaggtgagaagagctctgtgtgcttaagtttcggggtcggtggactgcccatgtctcacgttttgatagcttttcaaatgaaaagtagcagttaaattaaggggtggactctccgaccatagggcgtagaccgtacatgggtgcacagaaaagggacaataggtccataatggttagtttgttgggg

SEQ ID NO: 28593 - DNA, 485 bp, Zea Mays
tagcagcattgctcaccgaagcagcataggtagacagtgacatcagagactcatgggctgatagagtcctaaaacctctgtctcctgcatccatcactctgatatgcacccgagtgaggtagtaacaagcccgaggaggctcagacactcgccttgtgtcatatagaggtcgaacataggttgctagagcatgcagtacattatgtagcatgtttgggaagtgtcccatctcgaacattgaggtgtaatgcttagtgacaggccatatcccaacaaagttgtcctcctgctcatcgttggcttcttcattgttgttttcttcttcttctgcctcatcgtcatcatcttcaccatcaccagaatcatctggatcgtcgcctccaggagcaggggctcgagctactggcattggcggtgctgaagatgaagctccaactacaaaggcatgtgattctgacaacggggtgggtgttgccaaaatctcc

SEQ ID NO: 28594 - DNA, 310 bp, Zea Mays
gtgttgaggagcgccgaggtggcggacttgacgtcctggtgcgtgggactgaaagaagagggcacgaccgatcgcgcgaaggtgtgtcggctggcggacaaagtccgtcgcatgaaggcagaggcggacctacgccaggaggagatgcggcagatgaagggaaaccttcaggtggtgatggtgcagtgggacaagtctcggtgtcaggtcgccgaagcttccctccacgttgactccctctccaagcacctggaggccgagcggtccgagggtcaagccttaaaggcccggataggaggtattttgctga

SEQ ID NO: 28595 - DNA, 1132 bp, Zea Mays
aaacttccgaatataagctttgaggacgtcattcatcaaggactgaaaggtggagggtgcgtttgtcaacccaaagggcatgacgaggaactcaaattttccgcggtgtgtgcggaatgctgtcttgttgatgtcgtccggactcatgcgaacttgatgatatccgctgcggaggtcaagcttggtgaagaacctcgcatctcggagttcatccaacagttcatctactactgggacaggaaaggagtcctttaccgttttgctgttgagctcacgatagtcgatgcagaatcgccatgacccatccgctttccggaccaggagaaccggggaggagtatgccgatgagcattcccggatgatgccttgctgcagcatagcctcgcattgtttctcgatctcatccttcagcagctgcgggtaacggtatggttttaccgcaactggtgttgttcctggcagaagtgtgatgcgatggtcatggcatcgagggggtgggaggtcgcgcggttcgtcgaagatgtcggtgaaggagtcgagtagggtcgtcaggagatccctcgtgacggccagcgcagcgagctgcggctgagggccaccgatcccggaccagcagacaacccgttccttgtgccagaacgccatggtgaggtcggcgaagttccacaagatcggccctagggtacgcagccattgtaccccgaggacgacgtcgaagccatccatcgcgagtgtgtagcaggagatgtcgaaggtgtccttgtcgatggagatagccacctggcggcatacgcccgtgctggggacacgatcgccgttcgccaccttgatggagaggccggtccggcgttccaccatgatccccagcttggacaccagtccctcctggatgaaggtatgagtcgatcccgagtccaccaaggcgaccagggagactccgttgatgacgactgggagtttcatcgtgttgcccacgtcgatccctgttaaggcgtgcagggagatccccagctcttcttatacggactccgcgtcggcgtcgtcgtccatctcgatgaggaaaacgcccttgcctgcacacttgtggtctgtcgtatatttctcggtgcagtgatagcactcaccattggcg

SEQ ID NO: 28596 - DNA, 464 bp, Zea Mays
gacattgctgaatatgatgagtagcaactggatgcagtttacttttgttattaatgacctcatgcaaacattcaattaatcataattgatgctacttgattattatgtctattagcatgtaattgttgttgattgattatgactaccatcatgtaatttatattgatcgattaaaacaatcaacatgaaaaccgacatggctttactatctataatttcaaagttgatgctctcatgtgtatcgagtgctgacacatgagagatatgcaaatcttcctatcttggtagtatacaactcttgagacaccaagacactgccattgttctatctattgtagtagcattcttgattcgttgccattgaccttctacatgcacaaaacaaggaattagacctttgaaccatttatgttcttatggtcttactcatgataagtgacaacacatgtttttagggagcgcac

SEQ ID NO: 28597 - DNA, 353 bp, Zea Mays
gatttctcaagtccagttccatactgatttcgatttgttgtttgcgatgccaaaggttatgatgtcagtagcaagtatgcatgttacctcccgacgcaagttctgaccgaatttcctggatggatggataggctgagcatggttagtttcgatccacgtccagtgccaacttttcctgggattaatgtttcttcgtacttgatgcctagctcatcctgttcgtattcaatatcacacctccgacaaaactgattgataaaagaatcactgttgtattgccatttggagtcattccgcttggaattttaccagctctaattgctgctccttctctaatcagctgcttccgtgtt

SEQ ID NO: 28598 - DNA, 296 bp, Zea Mays
gaatcagaagatgaagatgatgtggggtctcgtccctcggttgggatgtaaggctttgccttcttccttagatcagccagtctttgctgtgcttcggttggcgatatcttttggtgttattatgtatctcaccaaaacttctctttctggtgatgggcttgtcgtgccctttttgtctgcctcaacaaacttggctcgagattatatcttttgggtggttggcacgaatattcatgttatgcgaaaattacgtggtttgttctggtccttctgggagatttcatgttcgaatttcg

SEQ ID NO: 28599 - DNA, 550 bp, Zea Mays
gcgaagatggcaccataaattgagtttgatttatagaatttcacaaatccacctttctgcggatatcttcatacatatcaaatgaaactggttaaattctaaaaatgcataacatgtgcactctaggatcattccaagagctgtctatctatctatatattcagaaagtcactaaaacaattagggttactgaaatgaataataacatgaatgattcaactatatttaaaaattgtaagcctaacaatgagaataataacatgaatgattccaaatgtagtcattggctaagccaaaatttgtatttcataaagtaactaagatcagtgtttgtctggatcgtgacaaggttgtagcttttcccataatcgatcagaccatatcctaggattaaggatgtgcaacagaacccttttgttgtcgacgatatcaatgagcttcagtttttttcacatccataactatataccaagcctttttgccacatttgcaagccacaccatcgctatgaacagaaaaactattatgttagatccatcttctatccgca

SEQ ID NO: 28600 - DNA, 802 bp, Zea Mays
cagcaccagcaggtaacggaacaacatcccatgtacatgtgcgatgaagggcattcaatccatcagtcatatcaagctgccactcaggtataccagaagcctctttataagatgatggttcaacaatgactgcaccagcacggggaaacccataacgttctggagctgcaatagtgccacggtcacgaagatgatacccctgattaaaaacaacatgagagtcatcattgttagtacaagtatcagcaacaggatcatcatcaagactggccgtgggagtagagcgaggacgacgaatgtaagtctgagtgacaagtggtttggaagagtaagactgagatggtgtggaagtggaaggtggtgtgatgggaataagaacatctggggtagaaacagtagatggtggtactgatgaagtttgagaaatgggaggaaggctcatgaaggaggtagactctgtggaataaaaagaagaatgggtggaagagttgtaaaagaagggtcagttttcattaaagctcacatctcgagaaatacgcatgcgacaagaagatgaatcataacatcgataacctttatgttcagggctgtatccaagaaaaacacactcaacagattgagcagtcaatttagtacgttcacgaggtgataatagtacataacacgtacatccaaaaactcgaaggtggtcatatcgtggaggagtgccaaaaagaacttcaccaggtgttttgccagagagtttggatgacggttgtctattgatgagataaaccgcaatagaaactgcaccccaaaaatg

SEQ ID NO: 28601 - DNA, 280 bp, Zea Mays
ctcctgtagcctattatgcgtggaacctaccgccaaataggccattctttgaatttgtctccaaccctcctgctcgtgacagtagcccgggtcatagagtgcgaccctctcctgaggacattgaggccttgattgctccactttggagtcttcccgaggctgagaggcaaactcactttgagatgccagccagcactgatgatgccgagatggatgtcgtgcttagcctactagctagggaatcgtccgactctacccgcacctagctgatggctatcac

SEQ ID NO: 28602 - DNA, 715 bp, Zea Mays
cttaagtcgtcgccgacttaagtcgattgctccgttagtagggtatagtggtcaccctaagtgtgagcaggttgacagtaaacagtttgagtgcctctgagaatgaagtctttttattgatgatgtatttcccaatttacagaatacaaggccgtcccaatagcttttgaaatctagctaggggtaaaacttcctgagatgttctatattccatgagttcccaatttctgtgtcgtccatttgagtaagacgatatgatccaggtcgagtgacttctgctactatgaatggcccttcccatagtggcgacaatttgtgtcgtccctcccccgttagaattcggcggaggatgagatctcccactgcgaaggatcgatgccgtatggccttatcatgatagcgccttagagtttgctggtaccgggctgactgaatcaccgtattcaactgttcctcttctagtatatcaacatcctccagcctagtagcttcagcttcagctatgttttcgaagatcaatcttggtgccccaaacttgagatcagcgggtagcactgccttcgaaccatagaccatgaagaagggagtgtttccatgcaaagctcggctgggttgagttcttaggctccagagcacatacgacaactctctgatccactttcctgcgaacttttcattcttgtcaaagactttctttctgagtgcttccagtatc

SEQ ID NO: 28603 - DNA, 426 bp, Zea Mays
cgtttgttatttgatctgctgcctggattcgtaggctaattagatgtgagacagtgagtttggcaccttcattgtcagtttagggcgttttattgtcagtttagggcggtcgagaaggatttccagcccttgatgcttaattacattacttttgccgtccactggaaaagcttgttagggaatgttgttggagtgtatgcacctatgagtgggggatgtgtgtagctcctggtttgagtgttgattgaagaactggtaggtttgtgcattggcgtaagggtggtttcctcactccaggatgctgtaaagaggtattttgtctttcagtattagacatctatttttttgtacttttgttgattgaaaagccattcggcttgattgttaggattaatatttacgttatgagccatgtggcagaacata

SEQ ID NO: 28604 - DNA, 590 bp, Zea Mays
gccaagggtacactagaggagtaatggggcttcagatttggcttcaggattgcaccatgtttcatctttcttccatcgcgccttcccatgtccagcagcacgtcctcctgtaacaaggcgagcgtgcaagcagtattgaggttgggaggacgttgaatcacaataacagatttaatttcatctctaagcccgtctataaatgtagtggtgatcatggtcggggttagctggttttcatgggcgagcagctggtggaccaattgatcgaacaactcaatgtactcccccaccgaagagttctgttggatgtgatagaattgcctgataagtataatgtgttggtccctcccaaaccgagtggtcaaggctgggcataactcttcccagttcatttccctgattctagactcaatagactgcagccaaaacaatgctgagccctcaaaatgcatggttgctagtccgatccacctttccatgggcacaaagtaaaactcaaaataggtctcacaacgatgtttccataatttaggattggatccatcgaatactgtaaagtttatcccaggcattctagatcccgatccgtg

SEQ ID NO: 28605 - DNA, 326 bp, Zea Mays
ataatggattggacctaaaatttatcggctacaatatttagatatgcttaatttggtgaaaactccggagtcatatgaattttaattagttatttatatctgaagttgtagatctgagcgagaagcaacagaccaaattaaaacaatagttcggctacatatattattttcgtagactttgaaataggacaccgaatcagctaacaactgttctagtttatttaaacagtctgcccctagtagcgtatttaccgaatttatagagattgctcgaaccgagcaaaatacttaagtgacaattttagttcgtcttaattaattttaaa

SEQ ID NO: 28606 - DNA, 292 bp, Zea Mays
ggagcagaccgctattgggctaggctaagaccggtccagcagttacatatatgtatggttattcaaaacattgttttgtactgttcctataatggagtttgcatacatggataggtaagttgctgaaatagtctaacaaacactaaaacaatggaacacacattccgtccagaaaaccagtatgtgtttagttgcaacgatagaacgatttttaaataagattgtttagtacagagtcataaattgggacagaaccatctctagctattcgtcagaattagacggacaaaat

SEQ ID NO: 28607 - DNA, 380 bp, Zea Mays
taccctaagacatttcttcagctgagatacatgaaaaacatcatgaacatccgcaagatgatccggtaactccaattgatatgcaacctctcccactcggtttaagattaagaagggtccaataaagcgaggggacaactttcctttgactttgaatcttctcataccccagagtggtgacaccttcaaatagacataatcttcttccttaaactcaagcagtctcctcagggtgtcagcatagcttttctgtcttgactgcgcagttctcaaattctcccttatttgctagacttgctcctctgcttcttgtataatctcaggcccaaacaactgcctttcaccagtttgatcccaatacagtggagtcctgcactttc

SEQ ID NO: 28608 - DNA, 404 bp, Zea Mays
tgtaaacatacattattcaatatttaatctaataaagtactggttatcagcaacatatatagatattgatttttttatatatatgatcaaactttaaagtatttgactttttaggaaatgaaaatggaacttacttttattttttgggacagaggaaaaagtacaagtgaggttcaatcaatcgtgggttgagcccctaaacatggcagcacttgatgttccatcggaaaaggacacatgcattcaccggaagtacaaatcgacatactatcatcttggggacaccactgtcctaagacaagattccaagacatcgttttcatgaacacaacgaggagagcacggcctccgcttggcccgactttcacgggctcctgctccggcacttgtcttacaagattaac

SEQ ID NO: 28609 - DNA, 445 bp, Zea Mays
tgctgtaatgaactggtgtaatgaataaagtaacttgtaaaaaaatgtggcatgtgcatggtagtaactcttttcccctggcagatggcttcggataaaaccacgcctaccgcctccgggattggagcaggatttcccctaggagcagaaggagaagctggcggagaagggagtgagacccacctccccgcacctctagaactaccactagatttggcccaagttctagctaatcagacccgactcattgaagtcctcactagaagtctggagaaccagcacccaggtggtggaagaccacaagacaggatgggagaatttctgagactcaagcctcccacgttcgctggatccaacaatcccctcgatgccgacgactggctgcgcacgatcaagaggaaactggaagccatcggatgccccgaaaatcagcgtgttcaattgg

SEQ ID NO: 28610 - DNA, 539 bp, Zea Mays
cgcgtatcttggactgggaccgcgcgcggtagcactggaatcagaccgtgattctcgccggtggttggcaacatccctacgcgcggatcccgctgatctttccaaccgccagtcggaatcccctcgcagcagaataaagaggaccgaacacccccatcgtgtagtcaccgttgccgccgtggggagacccagccgccgcgcctgggatctctccgcgttaccagtgctctctagaaccttagccctgatgctctgttagaccgtgccagtactcgcggtactctcgccgtgttcatccggtggtctgggcgaccggaatttctcgccggggatcgaacttcgccgcggacccgcatggttccatggactaagacctcctcaccatccttcctcgtatgaactaatttcattggttcgccgtgtgcgtagcatcgcgcagcttcgtccgattaggttttaaggctctaaattgccgaccgcatgaacgtcggtgagctccaccaccgcggggttcctgtacgccgtgtccggtaagcttg

SEQ ID NO: 28611 - DNA, 332 bp, Zea Mays
cttcactctatatgtaagaattttaggaagtatcaaacatttagatatagagcataaaacaattatcttttttctgaatatattcaattcggtcgtcgtgcggaaggtcacggctttgtatccggatgcttgctgaatgccttctttttatcttcactggaaattaattttctttgtgcagtaggcatatgtaaaactataaaaaccacccagcactgctactaaattggtacccatgaagttcagttcatagcaacaagacatgacttgccgatccaatttgcacatcgtccatgccagtcgataaaattcaataaatacaaaatccatca

SEQ ID NO: 28612 - DNA, 352 bp, Zea Mays
cttgtgtatatggtggccatcatcagattgaatgtgacggaacgacaccaaacatcctactactactacaatcatttccgttccaacatctcaacaaattagtggcgccacacgcactgggtactaccgccgtgatttcagtcgcttgttaggatttatagggtgatagagacggtttggttcactgccttaattaccacaatttaccacgccgaatgattatgcaggtttgactaagttagatatgtatttggtttatagccatacttgtagtaagatttctcttctcatgtgtagatcttactcgtcaatgacttgtaaaagtatagaaagtggaatggagggggtcgag

SEQ ID NO: 28613 - DNA, 358 bp, Zea Mays
ctcaaaaagattccacatatcctcctcaccaatactcgtcccaatcggcgaagacagtagatctcgtttatcaaaccgatccactcgaaggcgggctcgctccacccctatctgacggtgccttccacttcgcgacatctcaccaacactacgcttcgaaaccacttttcgtcatcgtcgctcgatccccgcactggggaaatcagacacttcgccaacctccaaccgcagcgagaactccaccgcggccgcatctaacgcaacaaaataatccaaatcctcatccgacgactcttcggcccaggaaaacggactcccaaactcatcacatgaaaaagacctagattcagaacccgac

SEQ ID NO: 28614 - DNA, 524 bp, Zea Mays
ctaagacttagtgcacaagtcccttacggacaaggccggatcagcgaaggcacacagcctcttcatacaaattatagttacatacgtacaacgagggcatcacaccttacattggttcaaccttcgggataatacccatctccctatagttaaacaacattatcctcagctcctcaccctcaaaaagacttcgcaattccccctcacctacactcgccccagctggcgaggacaacaattcatggttgccagtcctgtccacacgaagacgaccaccctccacctcactcactctacgcttcgccaccgcccttcgacgcttacacccaacacttggaccgggaacttcagcacccaccacacgcggagaagcctccgccgcagccacatccaatgccgcaaaataatccaaatcatcatccgaagactctttcgtccacaccaccgaactcccagaatcatcagactcaaaaaacttagacacagaatcacccgaatcattttccgcacccacggtcgaagcc

SEQ ID NO: 28615 - DNA, 335 bp, Zea Mays
caagaccctcctcgtcccttcagacatgataagggcaaggacgtctatcttgagcagtagggaggcaataagaagaggaagttagatcgggctactcgagcagcagtagaagttgagagagcagagcagggaggacagttgaggatagactctgatcagatcgccttttgggtccgtcgcctctcgtcttggactcgctctacacttgctcgatttgacccctcagctccagtccccactaccactccaccttcctccattaccctaggttctaccactcctgagcctaccaccacacctcctatgcctacagcctccaccacacctgcttccac

SEQ ID NO: 28616 - DNA, 443 bp, Zea Mays
gatggaaagaccacattgctgcactttgttgtgcaggagattgttcggtccgaaggtgtccgcgaagcaaggctagccatggaaaacggaagaagtccagctcatagtgcttcagatgacacttccaatggatctcttgaagaggacggtgatcactactccaaccgcggacttagcattgtgtcaggacttagcagtgagatggacaacgtcaagagggtagccgcactggatgctgagcctctgtttgccactgtggtgaccctcagacaagagttgctgaaatcaagggagttcctgaatgaaattgcgacagtagaagagacgagtggattcagacgttcgttggaaagctttgtggaacacgcggataatgagacggggtttttgttgaaagaagagaagaggttgagatcgttggtgaagaaaacaatccggtattt

SEQ ID NO: 28617 - DNA, 415 bp, Zea Mays
aacctttgaacgactaaatttggctttttttgtctttccttcacattcaggagacacccaatattcagaaagaaacttccaatcctcatcactaacccttccactatgtttgttcttcatgtcctcttctgttaaattctcattaaaatactgcgcctttagggttgacttaaaatccttccatttccttccaacagtggttaaaaaccaattaaaggcagcatcatctacatcgaagattttctgattttccaaccaaaaaaagataatcacaatttggtctaatggtcagaaacaaattcaacctaagaaacgataataatgtacttgggcaaatacctttaggtcggtccagacttcatacttcttctcaccatccactagtctccagtcaacactgctaactgacaacttc

SEQ ID NO: 28618 - DNA, 429 bp, Zea Mays
ccgggttgtgcgtacagaggtccggtgttccttcgtggaggtccggagccaatggtgcaccctagggtgtatcacctttccttgccacgtggtgcccctagacctgcccatgtggtggggtcgggtgccattctccatgtggccaggagatgacgtacgtgtacaacgtctttatactgtagtagggggtatccctgatttagggtaccgatagtggccctaggctcgcctcaggggaggatacaagcctgcaggtggggccagagactgattggcgattggcctgctgctcctacgcgcttgttgatgcaattactgtcggccgcctatggtcacgccgactgccatgcctgttcccgcggttgactggcctgtgaccttcgtactcaatgtcactatagggccatgcgcggggtgcctcgagtcgct

SEQ ID NO: 28619 - DNA, 298 bp, Zea Mays
ggttgaagtagattacatcggatatgactggagagatcagttcatccttctctgttatgtgcgcgacttgcccctaccgactggaatcaccatcggggctaactgcgtacacaactagcagattgatgtaacagatcaatgtcatgagtgtaatcttctttgggtcgaaagtctcggatttgggttgatttgatcaaccgcatgagatttccagtggaatttccatacatacgatgcatggaatcctgtgagatttccagtggaatttccatacatacgatacatgggaccgccgtgg

SEQ ID NO: 28620 - DNA, 462 bp, Zea Mays
ggagaaggcagtgcgaattttgacttcaattgaactcactgaagaagttgtgagtacctcgccgcggtctatggcgctatttatagccacggcagtccggctaacgatcagcggccgcggattgcattgttcacgcatggctaccacgtagagaaaaggcacggtaaggggaaaacgaggcatgggtgacaccgcggcagaagtgaccgagccacggcgaccgccggtgggatatctccggccacgcacagctgggttcgcgggatggtgccacgtctgaagttatctctccgcgatcgactcccttcaccagatcactcgagcacatccagttcaacagtgccttagatctttatcagcgttcttcagatatttacagtgtttggatcttcagcgttttactgaaccgaccacctataatccccactttctcatgattctttttaagaacagggtaaccac

SEQ ID NO: 28621 - DNA, 379 bp, Zea Mays
acggacgcaaacgactaagcgcggcgtggtggaacacagagcttcggcaaggggtttcccaccacgcgacagcgcagcgatgcttgagcagaaagagcaggcgtacgagacgagagtgagcaggggagggagttgagctcggcgtccattttatagaggagggaggagatgagaggtcggctgggaagagatgtatggctggcggtttcaggccattgatggcattcacggagcttcaatgagggagagagaaacggatgcattgaagttcataacgcaggagagaaacggacgagcggtcgaggtcgcttgcggttcagctgcttggtcgggtttctttggtcggtcctgggcgcctggtcgtcggggttggccggcc

SEQ ID NO: 28622 - DNA, 368 bp, Zea Mays
atagatgggagcaacatgtgtgatctgcttatcaatcaatgccagttcatctggtggtcagaatgttgtcggtgagagttcccatcccagcgtcgaggattaataatttatctgttggtgggtgatgagcatcgggtagtagaataaaggagaacatgttggcataaaatagaagcagcaatttgggttccttactgtcctattggcaaggccgtattggatttggaggagggcacatgggcctctaagtgcccgtttggatattttctactatcactgaactaatactatagtagatttccgtaggttttttttatatgatgtgtcacatatgctcaacctatgcactggccaaagtgagaccggcg

SEQ ID NO: 28623 - DNA, 290 bp, Zea Mays
ctcgagaagtcaaccatagaagccattttcttaataatacaagtgatggaggagtatagggactagaaagacttgcacatggttacagatggatgcaagaaaaacaagcataaaatatcaagagattttatatggtgggcttcggagaaacataaagttccaacgaagtatgttgaactcattaaagacatacaataatgttggacataacaaaggcttttgactctgtctcttgacccttcctaattgaagtaatgcagcatatgggttttggacatatctggcgagac

SEQ ID NO: 28624 - DNA, 528 bp, Zea Mays
gccgcaacggacgccttacgctctagagcaaggcacgttagacgccccaccttccacgttcgccttagtgcctaagcgacgcttcaaggacgccttgataatcatggagattgtacaattacatatataggggaggtgagacttgaggctaaaggaaacctcctacatctaagggaaccgccaggagacaatcctggagataatcctactgatcatgatctcctcccctgatttctctctaaccataaacctcctataggctgatcgacataatgccaggcgcatgccataagtgataggtgactgtctaacccctcgcaatggaagattccgtggagcaaacgttaagactggaccgaaaatcagtgaacacggaagacgacaatgccttcgacagtccaggaaaccgtggcgtcgggagcgacagaggccctgggactggaggcagagacttcgacagtctagggaagagcgacgccacctggagtgggatgctcggggctggaggtaggagccacgacagcccga

SEQ ID NO: 28625 - DNA, 419 bp, Zea Mays
cgcaaggtcatcagctacccagccaccaagaattgctagcaatcgatcaccagtgtgcccggattccttgtttcccccaaatcctttctccgccaccgtgaagatccgttcaccgcgaccagccctttaccggtcagttcatccctcactctcacttgttcgagcactcttgacgctctgtgatgcttgacgaacccccaattcgtacggagtagctttagatcaccgggaacacgtaccaattgtcttcatcgtccgcggtttacgtgaacagagctcgagagcttaccaaatatgaaattgattggggggaaatggtccttagaactcgaatttggtttaatccaaagctgggcactagtacttgtcccaatcggccggtccaggacctcgccggagcctctccgcgcgcgtcgccg

SEQ ID NO: 28626 - DNA, 499 bp, Zea Mays
tttggagaccgattggttgttcccaaggaccctgaactcagaaagaagatcctagatgaagctcacctttccaaattctccatgcaccctggtagcaacaagatgtaccatgatctcagatctttatattggtggaccagaatgaagagggaaattgccaagtacatatccgagtgtgacacttgccagagggtaaaagctagtcatttgaaggcagcaggccctttgcaaccccttcccataccctcttggaaatgggaggacatttgcatggacttcatcgtaggactgcccaatacctccaggcaccatgattcaatttgggttattgtggacagattgaccaagaccactcatttcttgccagtacacaccacccacaggaccgagaagtatggagagatctacattgaccagatagttcgtctgcatgggataccaaggactatagtctcagaccgaggagcaccttttgtggcacgattttgggagcaattgc

SEQ ID NO: 28627 - DNA, 394 bp, Zea Mays
ttgatggtgattatttgaaggaaattctttaggccattggacctgaggtgatactcaagagcacagaaattctgaaaattttggaagagataaaaaggaagcgaaggagagtttgtatggtgtcaaaatatgttcttatacactagacaatgctatgttttgtgcttggattgctcatcctaaagactaagtatggttggttgtcctgttgttccatttatatgttacctctcttgccatggttgctcccacaaccaaactcacttctcgtcaacacatacaaagcggaaaaggttaagttcattaacaatgggggttgaaaaaatccatgcattcccactattatttaccgtggaaatatgttcaagtcactagataattaatccacgtatga

SEQ ID NO: 28628 - DNA, 274 bp, Zea Mays
gttggcgaagctagcctttattttctccacgcagcccaaggatttttcgaaacaactttccttggatgcgcgaagttcttcaactgttttctctaaataatttttccaatattcgctgctctctcggttagcttctgcgacagcgcatttttctttagcctctgccaactgtttccgaaggtcttcaattttattcttttggatttcagcctgagccttgaaattagtttcatcttctttcactttgttcaccaatgaaatcaatattttgtct

SEQ ID NO: 28629 - DNA, 273 bp, Zea Mays
gtcgagatccgtgcgcaggcaaacgtttcctggtaatgatcttgactgttgatctcatacgaatgtctcatattagaataaagggtagcgctttgcgcggggatcagatccattggatcatgatcggatggtctcgggttgatcatgtatatttagaatctgtgtcgtagatgcgggatccgacggctatcatggcataccgctttgggggaaaatgcgatctaatcctagcctctggatctgatctgaacagcccacatcaacagatacccc

SEQ ID NO: 28630 - DNA, 330 bp, Zea Mays
gtggaatggagtgtcactgctgctgggcacagattcaaagacacctgccaagtcgtcgctcgcaaggcattgaggaccctatgtcagatctatgaagaagaagtggctgacaccccgctcagattctttccgccctttcagagagaccgtccggtttggatggccatgatgcgtgcattggaaggtcagcagctgcttgaggacgacccctcagtcgtgtacctcactgcatacctgctcacccttgatgcacagtatgatttcttggctcggcaccaccgtcagatgattgctcgagcagaagatgcagagaagctcaaccgtaagctc

SEQ ID NO: 28631 - DNA, 688 bp, Zea Mays
accatacaaaatcgggaggaaattcgccccaaacatgatatgtcagactgactgaagaagatcctgatggtacagtgaccagaaaaatctgttggttcagtgaatcggtcgtcggcgacccgcgcatggattcacgccggtgaggtgattcatgctcaccggcgcccggataacgtttcacggtgaaaagatcattccccccggatgagcttaaggcactgttcgtccggccaccgtgtccgctctaccaccgatcgccttgaatcaaccctcgctggagttagacacctcacggtcttgtgccacgtgcctcagcactttaaccacgccgccgtgactcgtactgacctatccggagattgccggtgagccgccacggtagatgccaccaagctctcgcgacagtactcttctcactctccggccgccaccatgccaaaccaaattcactggccaccgcttagcgccactataaattgatggcacggtctgctgcgttaagttatcaccaagcctgagcacccgctcctgcctccgattagccaccacaactctccaatttcccatttcccccaattctattttccgccaccgtgaaagaggcctcgccatggccagctcgtctcaggtcctctcatgccctctgctctttcgtttcagtgttcttgtgtgtccctgatgctccccg

SEQ ID NO: 28632 - DNA, 361 bp, Zea Mays
atgaaagtcagcatcaagataatgtgctcagtaagccgggaagaccacccaaaaagaagagataatgaggattttgacttggaatgtcaggggcagttcattaaagagaacatctctcaatatgatttacatggcgtagcgtgtgtggctttggatacctgccagtggcaattcaggaggcaagcagatttggattaacagtagccttctagagattgaggggagtctgataattgtggaatgattggtattttaccaatcagattgttgtctttttggtattatgtcatttatgcctatggtttgtaggtttatctgtgtctatgatttgtgggtttgatggcaaaattttgaagcccac

SEQ ID NO: 28633 - DNA, 340 bp, Zea Mays
tgcattttcagggccttgctcagcaacagactctgaaagacaaattaaaagtaagatccatattaccgaaatacttaaattggcatgatgaaagaaaaaatagtaaaggaactttactttaaagtttgagtaaaataagctgccaataatgtgttgtcttctgtagctgttgatgtccttctctagtttcgggaatccgatgctctttgatactgtgcttataattttagctccagtgcggtcgtgaatacatcctaaaatctcttcgtcgatgccgccaaaaagcatggatccgggatgatagccgcaagatatggcaaattccttcagttctgatata

SEQ ID NO: 28634 - DNA, 1534 bp, Zea Mays
ctgtggggtgctctggctcgtcagcgtcgaggtgagcccactgccttcgatccggtacgggttttggcgggcgggcggtgggagctgagtacagattcggggcggagtggtcgggaaagttcggggggctcagcgtgctctcagcggatttggtataggctgatgcgggcatcgtgtttggaggttgatttcagatatttggcttccctgctgcgcgtagggttttactgtttctctgcgcacttttggggcaacaaatatttgtctgtctctcggagctatttttggatgcttggggcgcgaccaaatttaggtacacctagggttttatcatttatatgtggattgcttgacgtttgctctctctttcgtgaacatttgggcttcttataacttgcgttcaagtaccattgtaaggaggaaccgtgctttttgtattgatcccgacgatttttctttcaattcttttctcgtgttgcagattgtgttggttctagtctgcactcgcggagctggtgcggattctggtgaaagcaaaggatcgtttctgcaagactctgaagctggagaaaaggatgtctaccttagccactcctgcatccacgacgagatactacatcaacggcgacgagctgggaggaaggagtactctgtcatgccacaagtgtaccatgagtctcgggaggatgcggagcgtgtaagaggacgacacttgttgggcatgtcatcttggcgtgctccgcacgagaatgccaggaagccaatacgaatatacctcaattatgatgccgtcgggcattcgcccgaccgtgattgtaaaaatgttggcgacatcgtgaaggtcagtttgtcacattagcttttctcattgcaccaccagctattttatctgtgtagtagaattgaaactgttgtttctatttggtagcttggcgaacctcctgtatcatcagcaccaggaacacctatatgcgatcctcatggtgatccaccactggtgggagactgctggtacaattgcacccttgaggacatagctgggaaagacaagaggcaacgtctccgtaaggtgcagttctcatgcttttgttgtctctctgaaggttcagttcaaatgcataccgaacactctggactggtatagaagctgtatcatccatatccccatttccatatttttctgacttctgttttgttgttgagaatcatttaacaggcactggggcaaacagtagagtggtttagaaaagctctagctgttgaacctgtcaaggggaacctacggctcagtgggtactcagcttgtggtcaggatggaggtgtacaactacctcatgcgtatgttgaaggtaattttcagttttaatgaatcagtttagcaatcttgcattcttgcctgctaattgcctgactatgttttcatgtgaatctctcctcaattgcagatggtgttgctaatgctgatttagtcctcttagtaacaactagaccaacaacaggtaacacccttgcatgggctgtggcctgtgaacgt

SEQ ID NO: 28635 - DNA, 367 bp, Zea Mays
ggacgtccttgatgcgggccagaggcctcattgcctcaattgccttgatcttcttcgggtttgcttcaatgccccggtgtgaaaccaggaaccccagcaacttccctgcagagacaccaaagacgcacttgtccgggtttagctttgtgcgggttacccgcagcttgttgaagaccagggttaagtcttctactagggtcgaccctctcttagtcttgaccacgatgtcatcaacgtacacctccactctgtccctaatcaggtcccgaaagtcttactcattgcccgtacaaatgttggcaaggcgttttttagaccgtaaggcattacgacataacagtaaagcccatccactgttacaaagcgg

SEQ ID NO: 28636 - DNA, 349 bp, Zea Mays
tcagcccttgagccaaagaccgagcgtgttcaccttgatccctagctcaaatcctaatgaccccattgacaaaaatgtgcctaactaacccctctacctcataccagaagatggcatcaggacgcatgctctggacacgtcaaacccgggatcttctctctgtgcgcggcagtgagacaaacccgatttctcccctctctatctcttgatccagtcagcaaaacctgcaagcctccacacacaaacgacaaaggaatgtcaggggaagagatctctcaacgggatcatggccataatctcaaagatttggagccaatccgcgcttgaactcgacctctctctgcgctgc

SEQ ID NO: 28637 - DNA, 350 bp, Zea Mays
ttttcccttttctttcgtgatctgtgtagctggggttttggatttctttgttttaggaagcattcaccagtaaaacagtagaattcttgtgagacatgcgctgggattgggagcagacgtgagagcaagttgggccgtggatctcgatccggcccactagtcccttcacttaaccctagccgcccctcccccctaatcccctttttggttgcagccgcccccccttctctcttccttgcttggccgccccccctctctcccactcctcccaagtgtttgcagccacaccacctaaccctagccgacccccatctcctcctctccaaggtgtcattccttgccgcttggat

SEQ ID NO: 28638 - DNA, 278 bp, Zea Mays
gactgaagagtcagcaccgggtacaaagaagaccagaaatgcgcatgcccatcaacagcccccaaaaacagccactttacagaaacacacacctacacaggccacatagctaccagcgacccaaattataccctaagagcaggttggcgagtgaggagctcctgaagagcagaggcacccgcagcacaccaaagggtacattcattggccacaacctgcaaaacagtatgaacaccagcccattgcccttcgaacacacaatcattccgatgcttcga

SEQ ID NO: 28639 - DNA, 774 bp, Zea Mays
cgacgagagagcgaccgagagagtagcgggaataaagtgtcgccgcagtgggggagtttcaattcagctgtggctgtcgtcgtggaggtgtccggggccttcaccagacacggggtggtgcgaccgaggtcgtgccgctcgtgatagtcggccagcttcaccacaattgctcgccgatgatttcggtcaactgcggatccgcttgacgccgtagacagcgctgcttagtcgtcggcccccggtaaggaacccttaatccgaaccaccatgttctgtttcccgtaaaagagtttcttacgtttggattgagacgttggggcgccatgagaggccagctccggtcatcctccagtggggttggggcggagcgtctgtataccggcgggaggaagacgacggtgcagtggccatcgatctacgaatggacgacgaggattgcgcactgcgtaccgattcgagcggaacaattgagaccgtggatcgtaggatcgagggatgagattagattgggttgtagttctccagtcataaaatcggcgccgttgattcataatccaacagatcttgtcgcgtatcgtttcgcggtcgcaccgatctaatccggggcacacattttggatccaacggctagagctccacgataccccttcgctgcgcactattgtcacatgagcccctgagtttagttagaaacaaccgcaatccatagggaatgtagcctgagtctggtatttcttgcgcagagacccccgagcttctctatttttatgcgcc

SEQ ID NO: 28640 - DNA, 330 bp, Zea Mays
acaatctcaagggcataccttgagagagatcacactgcacgggcatatacgccgttgtggtctatcagaaaggtctactgcaaggtaagaaaagctcccatgttgatataccgtttcttgtcttctttgccatcgtggaagaattatgttcttcgactcgtgttgtttatacgaaatcaggaacaagtgctaaggtcgatatcatgccaaaaataattatactccacacatatgtataaattatcgtgaatatatgcggtaagttgtacgtggaaattgaaattctatgttaataatgtttaaaaaatatatttgcgcgctccatcggca

SEQ ID NO: 28641 - DNA, 285 bp, Zea Mays
tatccagtttggatcgggacgttggtacttcggttcctgccgctgaagaagtgcctgtgactgaatttactgacgctgaccccaatgggtgtacccaatctgttgctgatcccaatgtgggtgctccacctgttgttgatcccaatgggtgtgccgcctgtgctgctaacatggacgacgaggaggaagaagatgaagttcctttaactcggaaaaacagtcggcaattcattgctagtggtgagagtagtggggtcccttctcctgctttgtctgctctcattg

SEQ ID NO: 28642 - DNA, 459 bp, Zea Mays
cgtttcgtcggcccctaccccatcattagccgagtgggacccgcaacatactgccttgagctaccagaatctatgtcagatattcacaatgtgtttcatgtgtctcagctccgcaagtgcctacaagtaccagaaaaccacatcgaggcagaggcaatttagattcaaaaggatctccagtaccgagaaaagccagtgaagattctcgactcagcagtccgaaggacccgcaactcagaactgagactctgtaaggttcagtggaacagagatggagaagaggaagccacctgggaaagtgaggactctctgaggaaggaataccctcaccttttctcgagccccgtttgaatctcgagggcgagattcctttaagtggggtaggtttgtaacatcccaaaattctaacccaggtttgaaaccctaattccccccttcttatcttctatcccaaaactc

SEQ ID NO: 28643 - DNA, 548 bp, Zea Mays
gttctccactgctccaccgtcggtaaaatactccaagaattattcttggttgagtccgcttcacgttttgctactccgattggggctcggtcgtcggggttctggtttcgtgggcaccggtgatggtctccgccgtagggggcagccgccgctggtgcgggatctgctgcgcgcagctatcggtggtggaagacaacccatgaaccgtagatcgcattatcagtggccaggattagaagatagggccaacttgactagagcctatctccaccgttcgatcatttaccaacgtgtaggattagatcgcgttcaaaagtgacctggaccattgatccattatccaatggccctcgctgctcaccagcacataacacgccagatccaatcttcaccgctagatctaatctggatggcttgaaccgctcgataccctttcgtcgttcacattttctaaaagaaccccttcccttttgttatattaacctgcagtccacactgtgggagttctgagtcttggtgtcttttgcgcagaaccccctgggtttctg

SEQ ID NO: 28644 - DNA, 676 bp, Zea Mays
ctttacgatcattgctagtgtattatgattttatgaaagatgatggtactatgtgaggtcaaatgaaagttatgatatgccttccttctgatggccagaatatgttaattgatcagtttggataccattgcgataagtagctgtctagatacaccagtacccacaaattctctcacacccaatatgccgacatggtggggtaaatcatcgtcaaaagatgttaagaaaaccaccaaggaaaacctgatcgatacatttcatcgcttgataagtccaaatgagcaaaagggaagcacaaaatcaaaacggaattgcaggcgtggcaataatacagctgctgagaaagtttgcaaatcaacaacagtgtcacgtccaacttctccatcgaaagaagtttctcgctgccaaagtttttcggctgataggctgcatgcccagccacttcctattcctggagtacgccctcgagtaactcgtgcagttgctgatgtcaatgtttcaaagcccatattggaaaaacgtggcaaacctccactgcttttgccacttcctaaacccaatccacttcaccggggacctggaagcagtgatattccttcagaaatagtggttgcttctgtctctagcaattgttctgctgatagtgaggatcgtgcagattctcagcttcagagcc

SEQ ID NO: 28645 - DNA, 546 bp, Zea Mays
ttcccagtcacggcgccgttacaccgtttcctccgtcagccagccacgtctcccacgtttccggtttctaaaaccgtcttcgcgcaatcaacggaggcaaacccgcgccgataggaagaaaaccccagtggccgcgcagtctttcctttcgtcggaggcgactcgccaggcgatttccgctgctctaatctagcgcaactccaatccagcgccgctccaatccagcgccgttccaatccagctgacctccttcaatctcccagcattggagcccgattcaagaagttccaggtaatccaacattgaaatacatcgagttcgccgtcgattttttgaagcatttctgtcgattgaagtggatttgattgtaacccttattctccagctaaatgtgtgatttgtatccgtttatacatctctctaatcgggtcattgcaacgcgcattgcatctcttttttgttcaggagccccgatattagagcatctgtatttattctagatcccctctatcgcccgacattcatagatctagacaaaggctgtgg

SEQ ID NO: 28646 - DNA, 321 bp, Zea Mays
aatttcatcagctggcccatttccaccgccgtgctccactactgccgagtcgttgacatgtggggccaccccgtcggtcaccttttctgtcgcatgggcgggtgcgcgcctggttgagttatcactggctcatggggcccacctcgtcattctcacgcgcctccactcgtttctctgtcatgtggggtcgcactatcagacttccttcaacctcccaccgccgagtttgccgcgcggattcccctccccgtatcacgctccggccgggtatatcggacttccctgaccctataaatgtcgcccggggtcgcctccgcattc

SEQ ID NO: 28647 - DNA, 513 bp, Zea Mays
cggaatgaccgagccacggtgaccgccagagaaatatctccggtcacgctctggctaggttcgcggaatcatgacacggcccgaagttatctccccgcggtcgatcccttccccaaatcacttgaccacatccaaatctacagtgccccggatctttgtcatcattcttcagatattttcagtgctctgatcttcagtgtttcactgaaccaaccccctttcgccctctctttctcttgattcttgttaagaacaaggtaatctccattaataaagattgttcactaaacaacagccttcaaacttactataggatccctggaccaaaactgaatggaatcaaagatatggtgcttccaatttggccccatttcactgtgaccattccttttcttgaattcagttttcagtaacacttcaacagctcgacatagttctgacacagcaactttgggctgttgttttctttaatttttgtacaacaaccagggaagatgactgtaccaaagttac

SEQ ID NO: 28648 - DNA, 361 bp, Zea Mays
gtgggaggctagcatgggcccattgtgtaggataacgcatctgttcctgtaccctgacttgaaggctatgattttgtttcctttttctttatcaagagtttttagtgcttggaaaacaggttgagcaataatgctgagagttgtgtgtcgttcatccttatcttccctcaaattgtcttgtatccatttgccacttcaggttagatgacaagataacctttcttggtatgatgatttgcagatatacgaacaccaaaggatccaaccttaagagtcgactctatataaagcacataggtgtgcaagcggttgaggtcgcaaggtacgtattagaacttcgaaactgtcacaccaacccggc

SEQ ID NO: 28649 - DNA, 528 bp, Zea Mays
ctgggctacagctttaacatggtcacaaccagccttctccagaattgctgcaacccctcgagcgccggcgaaggcacaaatgtccccgcgatcactgaggatctcttcaaaagcttcagcttttccgcttatctaatcaataacaccctcggggtcacctcgaatgaaattctcttcggaagaataagcacccaccttggcaaagctggttttcaattttcttacgcaatccaaggatttctcaatgcacctctccttggattggtgaaactcctcaacatttttctccagcctagtgttagaccattcacttatttcttgcttcgcttttgcaagttcaaaattttcattagcttcggcaagttttttctgaaggtcttcaacttcggctttatgagctttggattgagtgttaaattttgctttgtcttttttttcactttattcaccaatgaaagcagaattttatctttttccacggcttcatttctcagcttgataacttctgaccgaaggttgccgagggct

SEQ ID NO: 28650 - DNA, 1176 bp, Zea Mays
atttgcatctgcattctatgtttaaacactacctgttggatgccaggcgctatctgagtaggtcattataatgtctgatttacaccaagcatctaactggtttcaatttatatttattcttaactagatatttgaagggctgtgataacatcctagcacagcttcacactgcacatccagaattttgtgacaaagttggaggaattctagccatgcatattgatgacttaagggctttagcacctctgtggctctcaaaaactgaagaagtgaggcaagataagtcccattggtcaaccaatattactggcgatatatatggcatgggttggatcagtgagatgtacgggtattcatttggtgctgcagaagtaagctgacttacactctccttgctatgtgtctttgctaaagtaaaaaattctcattatggactgtaaatttcttcctttagcttcattatctggtcatatgaacaggtaggtctacggcacaagataaatgatgacataatgatctacccaggttatactcctagacctggcattgagccacttatcttgcactatggtttgccatttaaagttggaaactggtcattcagtaaattagaacaccatgaagatggaataatttatgattgcaaccgcttgttcgatccacctccttttcctagagaggtaaacaatcttccaatcattgtttgggtaattgggtgtgctcatttatatctacttatgatgaagattttttttatgctctaaactttgtaggttgagatgatggaatctgacccaaatataaaacgtggcttatttctaagcatagagtgcattaacaccttgaatgaaggactcttgttgcatcatgcatctgctggatgccctaaaccacagtggtcaaaatacctgagttttcttaaaagcaggaggttttcagagcttacaaaaccaaaatactggaagggtgaacaggttgacagcataatgaccatgcaacatgttgcattgtccaaggcaaacaatgaatatccaaaaatacacacccttttctctaccgaatgttcatcatattttgactggcaaactgttggacttatgcacagttttcgtttaagcggacagcctggtaacatcacgcgcttattgagctgtacggatgaggacttaaagaact

SEQ ID NO: 28651 - DNA, 825 bp, Zea Mays
ttcatgtgtgttcaaggttctttgtgtctcatcagaaacttcctagtttccttcatttcatggtacaacgtgtctgctggtattaatcaataccgctatttacttttgacctaaagacgacacatccacccacggtatatgtgttgacgaattgaagatggtctgtcaagagtttgctgtttcagtatttaatgtcagtcagaatcaggcttgaagtaccataggttcatactgctacagttacccacttgtcacagataaaacagtgggtccaggaaagcagtgctgtagtcgaatgttacttgctggatttctgcagatgacagagagaatttgagcactatgacattcatgacagatagtacatactcggagaacagtggcgtgccggtgctggtagaggtttttggttgctcatttgatgagttttcatgacttggggtgcctctgaaatctgaatcctgcattcctgccaagcacggcatggtattatggagttcctttgtcctgtgagaactggattttcgaatttacatacatacatattgggctgccctcgcacgccactccgaggggtcggccatgttcatgtcatgaggccatattgcccgtgtgccaggctgaccggaaggacggacggctttgttggcgagggtcgctgctgcattaaaagtcgtacgaggactttgtgatgaatttcgtgacgcagatgacccactgacctaggtgagttgcagctggaggagcgtgtgggcattttggcgtggcgtttcttcgtgcctgtttcttcaaaagcatgccacatcttagcactgtcaatccatc

SEQ ID NO: 28652 - DNA, 285 bp, Zea Mays
atcggaagccttttgaatgagcaagttcagaacatccataaccaaaatgaacaacataggggatagtgggtctccttgccttagacccctctggtgtgaaatgatctccccaggaacgccatttagcaaaattcttgtggaggaagaagccaacagtccacaaacaacatcacaccaaatctgcccaaaccccattttcctcaaaacctcaatgagaaacggccatgacacagagtcaaaagccttagaaatgtctaacttgaagaggatacgagcttgtctttg

SEQ ID NO: 28653 - DNA, 370 bp, Zea Mays
cttttaatttcttgatttgttgctctaggctctccactcgggagtttaggtgggtgcagtgggagaagaggtcatcatagtggttgtcaagggtgtggagatatccggccatgtagactatggtggggtcatcttcagtaggatctcttcctaacagggcctgaagtcttttcctccaggtaggggtatttttgttgctgggtggaaaataacgaaggggtgtctcaaagacttccctgctgtagttttggcatagctggcggagggcttttcgggcaacattttggcaagtgtctgggaagcggtgtccagtgaaggtgacttggaaaggagggtgatttgggtagtttcggctttctcccaggtagac

SEQ ID NO: 28654 - DNA, 311 bp, Zea Mays
taggaagcataccacttttgtaacagttgatgggttttactgctatgtcgtaatgccttacggtctgaaaaatgccttgccaacatttgtgcgggcgatgagtaagactttcggggacctgattagggacagagtagaggtatacgtcgatgacatcgtggtcaagactaagagagggtcgaccctagtggaagacttaactctggtcttcgacaagctgcgggcaacacgcacgaagctaaacctagacaagtgtgtctttggtgtctccgcgggaaagttgctggggttcctggtttcgcaccggggca

SEQ ID NO: 28655 - DNA, 365 bp, Zea Mays
attttgatgtgttcatgacgactcagggtagtctagcacaattggataggtttacgagtaacaggagacttaatggaggctagaacattaagtaatttggtatgtactaacccaaggagtgctggccacggaggggtcccttgcggcggtggaagagaccgattccagggaactccgatgatctctaagggtggtggaccaaacaaggtggctagtgattcgttggcttcgcaactaagggacaaagagctgtgcttggttgatttggatgaagggggtgagagcgtggtgaatttataggccagtgagccaccatgatggccatggtgataaccatcaccggacatagctggcgaccaacgaca

SEQ ID NO: 28656 - DNA, 315 bp, Zea Mays
gctggagaagcgagccagcacccagcagagcaagaaagccacaaggagatactgaggacgcgaggccaagctcccccgacggcattagagtaggagggaggaggggaagcagagagggacggcccttctcgtcctcgcaccctgtgaaacgcggcccgcgaccgacagcagctcgctcgctgtcatctctcgaggtaagcatcctcatcctccgatcccaactcgaatggtcgcacgcgtccgtgtgccctctcgtatcgaatcgggtaatattggtagctcgcgtgtgcaaggcgataagacgctcagggaatg

SEQ ID NO: 28657 - DNA, 580 bp, Zea Mays
tttgaattgggagcacgataagtttcagtaacttaccaggactcaagaacgacggctaggcagacgggtgaagggatagaacgatgagtcgatggagggagtgttcgcggcggcgttccacggtggcgacccggcgttccagtgttccggctgtggtagagttcaatcgggtgggtccatgagcatcacgacatgtaagagaactcaaaacactcacaggtccgaccatggttaccttagagggatctggccacgacgagatgcctcgcggcggcacgggtgaccgatttgggggaaatctcaattcctcgggctatggtggatggcaggacgtggttggggttgcattgggttcgtgacaagggggcagagcaagggaaacgctcaatttatagaagtcggtcatggttgctccgaatttgaacgggattcggatcacggcggtgatgagatattgctaataaggcgtgttcaccatggcacacactggggcaaagtcctatggcaatcactagttactctccatgactcgcgacgacgtgctaagatggcctatggtgtggcacgactgagatcgtca

SEQ ID NO: 28658 - DNA, 349 bp, Zea Mays
atcgaaccagatccaacggttggcaacagctaactgacatggtagctcaggaccgggtgtgtggcatgtcgaaccgtcactatagttggcagtcgctgatgactagctgtcgtggagggcaccaacaactttcaaggtgtcgtgattcctttcaccagctaccgatgtagctttcaccagaacaacaaatcgtatacaccatcaccaactctgaatcatcggaggcattcagtggcgcctacatgaagacaaagcgtcggtaagaggaacgacgaagggatgtgcgtgaaatggacgggagcgaaacctaggaggcaaacttgagaccggagcgacgagtggcgtcgat

SEQ ID NO: 28659 - DNA, 397 bp, Zea Mays
ataagataccgatgcataaaggtgtgctacccgtattagacatgtggcttaccttcttcttcttgtggacctttctgacttatgtgcctccttgtgttcaccatcaaggtcgtctgcgatgacccaaatccagcgatggttaggatttaggggttagcgagagaaatgtggatggggcgtgttaggtggaaggggcgagagaaatgcagatggcaatgagatagagcgggatgcggcgagtgaagtcggcgacgatgcagctcatcgacgcgatgagaggtaagggggcggcggttaggtacctggtcgaggaggcaggtcgtcgacgaaagatgtgtcccagcggcggcggtgaggtacgtggtcgagggggcaggtcgtcgatggcggttgtgtc

SEQ ID NO: 28660 - DNA, 464 bp, Zea Mays
agctactttcctcgacgtccagaacgtgcattggagagtgggacttgcgggacctgtttgaaggcgaagagttaatgatgatgttgtttaatttctgggaggcgggtcttattccgaaggtagagcctatgtgacatttttgttgccctcactcctcttgttgcgatagtgagtgaaaacgctgcgctccccctcttcgcaatagagttgtgagtgtaacagccgtgatttgtattattacgcgatggtgttgttgagcccttcatttgttgtttatttgtgattgcgtgttgtatgttgtgcttattgcgagttggcttcgatttgtaatcgtgtttgtgtcgtagggatgactgcaagacactttaattatcggttgcacccctaggcgatatctgttttgggagttgcttttgtaggggacttcacaacctgtcggtggtgacgcacacttacgcttttgc

SEQ ID NO: 28661 - DNA, 315 bp, Zea Mays
agatggcagcttcggcctgagccaaggttttaacatgctcacaacctgacctctccaaaatagctgcaattcccctcgcaccagagaaggcacagatgtccccacggtcactcaagatttcctcaaaagcttcggcttcgctgttgatcaactcaattgggccctcaggatcgcctcttatgaagttgtcttcactcgagtacgcgcccacgttggcgaagctagtttttatcttgttgacgcattctatagatttttcaaaacatctttcttttgatgagcgaagctctgcaactgttttttcaaaataatttt

SEQ ID NO: 28662 - DNA, 336 bp, Zea Mays
acgcgctgggggatgccttcgacttgacgatgaatggaccctcccatttcggctccagcttgccccgtgattctgtccgggtggtccggacgagtacaaggtctcctttgttgaactctcttgggacaaccacgttgtcacgccaggccttggtttaggcctgatatttgttgagggcctgtagggcgaggacgcggtctccgtcgatgagatctttggatgttggttcgtcgacatcgggaactcctgatgtgcttgttcggggcgacccatgctttatctcttgcggcgtcatggcctcggatccatacaatagacgaaatggtgtgaatccgg

SEQ ID NO: 28663 - DNA, 846 bp, Zea Mays
cccatccatctcaatgacgagtcagccagtccaatgcagcagctgcacaaccggccctttaaaatgctctgtccctggtctcgacgaatggtaccgcctctccatcatggaccggttccttgtgccaccaacggccgagtcaccgtcagtcgctcacagtcacagacatgagtaacttggaatcctcatctttgtggtcgtgcacgaactgactgacactaccaacctttcgctcgcgcttaagcacttgctagagataaagcaagaggggttgctgttaaccaagctcgcggggattaaaggaagccggcggaaatggccggtgtggtgtggggtgcaaggactcggtggctgcaagcaacatgggacttgtgagctaccgcccaagaccaccaccctttttccttcggggcctcctcttccctctttccttgggtggggcctctcgcgccactcccgctcgtcatcctcgccgctttattcttttttcaaatcattagtgtgctgccgctctgctctgttctcctctcatcggcatataattctctctctccttttgttttctccaagccagcagcacctcatctcctcctccaagaaccttttttttgtttttctgatcatctcactttccttgccagctcccacttagaatctacttgtcgccctccgctcgatgcgtccagccaaatattttgtgaacaatgtgggaggaaaagaaaacatcccctgtcaattggtgcttagcatcaccctcatcccgtgcggtactctcggtgcccgccacacgcgtcggtctctgccatcgccagggcgccacgccaggcacacggttcagctccagca

SEQ ID NO: 28664 - DNA, 309 bp, Zea Mays
tgtgggtcgaaatggttaatacccatgagtgtagatgagtttgcataggcatgggctttcatgggtcttcacccatccgtagaccgtaagactgtattcgagtcgacttccaacttagtcccaaatcccaacgtacccaactcaaccttaactctctaagtcttcacccgtgtaccggcggtcccatcctgctttctgccctggcggccggcactcccctctccctaagtcttcgcctcgacggacggagctcccctgacccctgctgacacccgacgctaattatacactttcacacttagacggcga

SEQ ID NO: 28665 - DNA, 313 bp, Zea Mays
ccagaattgcttggtgaaaacacaagcaaccaatagatgattaatattttcaggtttctgatcacacagcgggcagcgttccggatgtgatagcccacgctttgcaagcctatcagctgtccaacatctgtcatgctccacaagccaaataaaaaacttgcattttcctggtgcccaggttttccagaccctttttgttggctcaaagcctactgatccttggaagagggctttataagccgagctagccgtatattcacccgaagtgctgaatttcgaaatatgctgatcctgaataccatgctgcaaaaac

SEQ ID NO: 28666 - DNA, 301 bp, Zea Mays
gagaacactaaaacgagagggcagagggcatgagcggacctgagatgagctaaccatggcgaggtcacactgctcggtgttcttgagtgatttaggggaaatcccaaactagggagttctagtggatgattcgaggcacgggttgcttctctggttgcacaattacatagcggagtaggtggggcggcaatttataggcttccacagcggtggtgtccaatttcatgaagatgtgttggcgaccgaagaggaagaaagttactagtgctcgggattagaggctttcaccgtggcaagctcc

SEQ ID NO: 28667 - DNA, 292 bp, Zea Mays
atggaatcttacttggaagtttcaggttatcacgcacacaacaaaactagggcctccatcttgccatgaagcataaaagagtcccaagttccagaaaatcgccactatccacagcacatatgggggaaaatactgtttcactttcatgtatttatggatcaggagtgaagcatcagggcaaatggctcacatactactcccaagtgaataggatttgcatgcatcaatgaatatgtacccaggccatgaacacgccatggaattggtttcgcccaaagcatggaccaatgat

SEQ ID NO: 28668 - DNA, 420 bp, Zea Mays
caggcatgcgaaaacggccaacatgccacattacaatacaagttgcagttacatacacacagcgagggcaccttatactacatcggctcaaccttcgggatgatacccagttccctataattaaacaacattattctcaattcctcaccctcaaatagatttcacagatccccctcacctatgctcgtcccaatcagcggggacaacggttctcgtttaccaatccggtccacacgaagacggtctcgctccatcccaatacgacggtgcctaccacttcgtgaaacctcacccacgctatgctttgacaccacccttcgccgcctgtacttggtcctcgcactaggaagatcagccgcctcgccaacctccacacgcggcgaggactccgccgcggccacatctaatgcagcaaaaaaa

SEQ ID NO: 28669 - DNA, 379 bp, Zea Mays
caaacttttcttttttcttttaactttgaacatctgttttatcatgacaaatattgtgtgtttaatacattcctcatcaaacaaatttggtgtcatatgctcaaaccaaacccttcagcagtccacaaccctagttctgcaaatccacctacaagacacgaataaggtatttcctttagcactttctacaatttatcaatacgaaattgacatacaaaatataatttagcatgcctgctccattttctttcttggtatctaaaatagaaattttatgaacaatttgacctttatgagttctactaaaacttgaaatttatataaactaattgtactccagttatctcgttgccgtcttttcgtaataggtttcttaaac

SEQ ID NO: 28670 - DNA, 361 bp, Zea Mays
cacaagatggacaatcaatcatgaagaccataaagtaacaaagagaataaggatttcaacaactatcagatcgaagcattatattaccctctggagctcggaccatacgatcaagctaaccttagccatcagataataggagcgtcgaaccagcactgataaagacatcaaaccatacaatctcactaaacacacgtagaggtgtgttggactgaacgtcaaactcacaatagagatggtgtcatagtaaatgattacactatttacgctcagaagagcatcaacatcaaaccatcagagatgaagtctgacagacacaagaaatatcccttagaggagaaaagggtgttggactagtttg

SEQ ID NO: 28671 - DNA, 327 bp, Zea Mays
caacaagttcaaccatttgtcccagtatgccattgatcaggtcaacactgatctgaagaagagaatttgttttatgaggggccttaatgactggctacagtggaaaatggccacctgcctcgacctctcctacagcagggctgtcagcacagcactggcagttgaagccaaatatgcaggcccaagaaagtcaaagggctatggaggtggcaggtccaaccaggggcctgagaagagacaaaggttggtgatccgaccttttaatcaaaaccgttcttcaccacgtccaccctcctacccctttaaacaacctgtctttatttgccc

SEQ ID NO: 28672 - DNA, 297 bp, Zea Mays
gttcatcgatgcgtgatgatgatgactatggggaggactacgatggagaggccgatgacgaggttgttacaacgacacaggcaacgaacttcaggtatttttattttgacgacgagttctattttctgttggattgatattattacccgtgcacaatttacaattttgtaggtttcggcggtcccttagagttccaccgacacgacccttggaccaacgtagggtcataaaccctgcaggagagaggagctgggtggaggtggcatggagtggcaaaggtcaccggacaccagttaa

SEQ ID NO: 28673 - DNA, 751 bp, Zea Mays
tgcaattatatcgcatctggtacacccttttgtcctcgtcctttttggtcgttccactccagtgatacagattttttagttctatgtaacttcctgttgttggttatctttcagacgaaaactgccaaattaaagattggattatcactatctgtggataattcacaatcaatgaaagcggacgagttcatagcaaaaagaggtagacatatatctatagtgaactttagttctactgtattttatcggggaatcaatttagatgttgataaggatgaagatgtttgctcaatacttttatatatctatttgatgttctcagttctcaccgtattatcatgcctctagtgttgcctttctatcaatatgttttgtagcttggcagcttgcaaaacacagatgaactgtgagaattaggtaaataccaccttcaagctccagattgatcaaaatccgcgtttgtctcatgttttggttacacatttattgatgctgtggatcctacaattatctgatataatgaaggattaaaaactctcaacgatagtttatttgttacctgtgagcctatgactatggttttctttaatttttaattgcatgtggacttctttcccagctatggaggcagttggagctgctgaaacacgacatggagagtggtcagtaacaagattacgttctgctgcacatggcactgcttatattgagagcttaagtttgggtgttggaccaaggggtgggcttggag

SEQ ID NO: 28674 - DNA, 589 bp, Zea Mays
ggatttttgacagaagatgcttgattcattagtaaagtatcatgtttctgactggtagaaaactgatcttctgtacggatctcagggacaatatgcttgttgcagacttcctctttagtgaacccattagtcttctgtatggaaaaaaaatcttctaaagtatctgtttgtggcctctctgcaaaggtgaattctacatcatcgacattagtaacaggagtatcatccatcttggtaacaggaagatcatcctgaaaaccagcaatgggacatctcaaagttttcttgctagaattctcaacaggttgactatcatcaggtacatcctcaacactccagttctatctggggagctccatggaacaatctgtaacagtattatcagtgcaaacaacattcagatcactcccaattgacatagcattagtgccaggattggttattgtttccaactgaacattatctgatcctactactaataatcttggtgatgcttcaggcatggtatgaagaatattctatcttccataaaaccttctacatttcttgagcatgtagactctgattctggttccaaaattaccaggcg

SEQ ID NO: 28675 - DNA, 384 bp, Zea Mays
ctgacacgatcttcttaggcaccccatgtaaacatactatccaagtcatatacaactctgcaagcttggctcccgtgtaacaggtatgaagtgagccacctttgtcagtctgtccataatcacccaaatggagtcataccctataggagtgcgaggtagtcgaataatgaaatccatgccaatttcttcccatttccactcgggtatcttaagcgggtgcaatagtctagctggtctttgatgtttggccttgactctttgacacgcatcacacttagccacgtgtgcatccacatctcttttcagcccataccaccagtacttctgcttcaaatcctaatacatcttagtgctaccagggtggatagagtaatcagaatcatg

SEQ ID NO: 28676 - DNA, 343 bp, Zea Mays
tacctgcggtccatgtgtgaatgtatgggcttcctgagcctgtgcgttctttcatttcaaaacataattccgtacgtcccaactcatcaaatctggtaactttcggccaaacttgtgtcgcgtctctcacgaaacaagttggcaatctcgatttcgcgagtccccagtacgatgccagccttgggtaacatgtagtgcatcggatcgacaacagagagtacgagtagatgtattaccggcgtctctagcaagcaacaacttgcacgcggcaaagtgctcaaatgcagcgcgcacacagacgcctaccataccagctggctcgatctatcaaaagagacaggcc

SEQ ID NO: 28677 - DNA, 330 bp, Zea Mays
aaaacaggagaggtgatgatggaccagtgtgcaaagcgaaggcggccaagcaagcaagcccaccgcgccgtcgcaccatctctacctcacgcacgtcgtcaccgtacacggtgctcctgaccccaactctcggcgtcccagctcctgctcttcctccgtcacctacgatgcctccttgagacgcatcagctctacctccgcaagctggaggtagatcgggtagagcgcctcttcttcatcctctttgtacttgtactccggcgcagcaaccctccgagacgcatcagctctgcctccacgagcccgttcttgccactcatcttcacctcc

SEQ ID NO: 28678 - DNA, 387 bp, Zea Mays
atcgcaccctcgcaaatgcatattacattccccgcctcactacgagtataatcagtgttggccagctcgatgaggtggggtttgaggtgcacgtaaggggaggagtgatgcggattcatgacaaggcgcgtcgtctgctcgccaagatctaccggagcccaagccggctctacatcctcgacgccgagattgctcgaccagtgtgcttggcggcacacgcgaaggaagatgcgtggttgtggcacgcccgattcgggcatgtcaacttcactgcgctaaggaagatgggccgggagaggcttgttcgaggcatgcctctactcgaccaggtggagcaggtgtgcgacgcctgcctggcagggaaacgtaggcgctcgccgtttccca

SEQ ID NO: 28679 - DNA, 398 bp, Zea Mays
acaaggcaatgccccccatttatctctttgcgacctctccaaagaaagcctcttcggattttatcgattgcttttgtgatataagttgggagttcaattgccattgctaagtagatgagcatcccagtaagcacaaaccacacttgaactgttcgcccagcccttgtcatcaagtctgccttccatccaggaagctgatttgcaaatttgtcgataattggctgcgtctgttccttggttatcttccgtagtgttaatggaagtccaagatatttacaagggaaggacgaaattccacatgatagcaaactgttggaatacgaacccatacccctaaccagggatggggagcagtattaataggcttagtaactgggccaggcccattacagtgaggg

SEQ ID NO: 28680 - DNA, 701 bp, Zea Mays
ggtctggccacggtaaccgcgcggatgaaccaaagaaccacgcgttcccggcgattggcggcggtctagttcaattaggtgggtcggcgagcatcgcagacacatgagaatacttaaacgggtaagcagaagacatggactgacctgaatcgcgttggccgcggggaggctaaactgcgcagtgttcttgagcagattgggggaaatccaaaattcgagttctctggtggggggtttgggatgcaggtggatgcagtagctgcgtgaatacttgatggagttgaggacacgctcaatttatagaccccgaggtcggtagctctcaatttgatcgcgatgtgttggcggccgaagatagggaagaacacggtggctgtaaccgtggcagtcaccggtgtaacggcgcaaggagaatactcctaagggtgtcacgcttactaccgcgtagtaacaagcttcggcgtggcgcagccgaggtcaccggcgcttccacggcgactccggtagtccggccacgtcgcagcgactatactcacggcgataaactccaattcacgatcctatcccttccccgccgtgagatcttttctctgccgtagttatccaaccgccagtgaacacgaatcacgacggcggcgtgaatcttcgcgtagggaggtcaccgtcgacgagcaagccgtgctggcaacctgatccacttt

SEQ ID NO: 28681 - DNA, 359 bp, Zea Mays
gccgaggggaggggaggaaagaagtgacatgaggaggggaggagggctcacctgcacacgaaggattccaagtgacggcgggctctggctgctgcgtggggagggacagaggagggcgccggcacttatgcgcatgcacacatggacattagttccattttatgcgcacgcacgacacaaaggtgcgggcagggtcaagaggagaggcggttttggaaaggatgattatgacgtgtggggccgatagatcaatgaaacggttgagcaagggggtatgcttgtgctgctgacgggcgggactcaagtcaggaacagtttcaggtgatttcgtgcgcgcgacatggcacacaaccgagctg

SEQ ID NO: 28682 - DNA, 459 bp, Zea Mays
gcgactgttggctggcgatgatttcatgatgatggatgcatggggagccttcaattctccgtgcgtggcgtgccgggccttgttagcggtactacatcttctgctactgggaccattgtggcgcaacgggttagcaggccgactaagaaatctacaaaggtgtatgagccggattgggtgaatgggctgcagctgtgctcgctttgcgaataagtagaacgagagttgcctggtgaagggcatgtaagaattattcactacaacttcttctccaagttctgctgctcgtccgccgccactcttcttcctccttaccttctgctactcctaatcgtcctctgctactcttaattgatgttctcttctactgctaccttgtatccataccgagttgttaacagtggtatcagattcaacgatccttggccgatcctcgcgttctcgcgctggatccttctg

SEQ ID NO: 28683 - DNA, 462 bp, Zea Mays
ctggcacctcactttggtatctgtgtgtttctaggctactccctagactgcaaaggctatcagtgcctcaatctctctaaccatgtcataatctcccaacttatagtctttgacgagtcatttccgtattaatctacgtcctctagccctttcttcacaagttcgtgctcgtctttttcgatgatattttaatctactgttcgtcgtggttccagcacctgcgtcatgttcatctcatccttgaggcccttgatgcacatgacctccacttgaagtggtcaaagtgctcctttggagcgttgttggtcgcctacttcagccatgttatctctgccaacggtgtcgccacgaacgacgacaaggtggaagttgtctcgtcctggccagagccctgctcgccctagggcgtgcgcaacttcctggactggtagactactatcagaagttcatccgggacttttg

SEQ ID NO: 28684 - DNA, 308 bp, Zea Mays
tggtggtcaaaggatttggcctactggttctagagatatggagcactcaagtaggatctgtctcacagcccgagctcgaggcaaatccttggttttgtcgtgtctaaagctagaatcccaatgccattttcagatatgtggtagaggggttagtttagcatatatttgttaatgggagctcacggttttgaattaggaatcatggtgaacgcgctcgagtttgggtgaggggctgaatttcagcaatctgaaattctgatttctatagaaggcctccgcttgaatggcttatttggggattttaaaat

SEQ ID NO: 28685 - DNA, 328 bp, Zea Mays
cacggtacagataggccgggtatgccctgtccttcaatggttgaatattcttgaagacaaagtcagcaaccacagcctctgcagtcagacccctctccttcaacaatccaacttcagctagcagaacccctgcctcagccacatcctggtctgtgggggattcggtccagctcggagtgcgaacatccggctgtctccctggccgtggggggagagaatttccgtgattttcaacgataaaccactccaagcgccatcctttgatgctgtccttgagggggatgtcgagataatcagtcttccttccacggcgcatctccaagctcgt

SEQ ID NO: 28686 - DNA, 358 bp, Zea Mays
tggaaatatcttctcaagcttacacagtaacacgggtgtcaatctttccaagtctgcaaacacgatttgagataactcttttgcacaaagctggcggaagaaataactcaactctataagcgctagccagacatgctcacgaacatagcctcgaaccatcgctggaagaatccgttcaatccatatgtggaagtcatgactcttcatccctatgactcgcagagtagataagttcaccccctactcaagttagttgcatacccattagggaacatcaacatcttgatccactgcagtacttccttcctttgggccctgctgaggatgaaatcggtcttaggccttctccatgtctttc

SEQ ID NO: 28687 - DNA, 502 bp, Zea Mays
gtctcgagtagcgtcccgtgccttgtcgaccttagagcgcggtcttaagggtcaggaggctggtctggattgttctgctcccgtggaagtgggtgaaggtccttcagccttagaggtggctgttatagagagttcagccctcaacgatggcgctagcgcttacccagcccccgagggtgtcgccggggatgacccggcttgggtgggtagcgcgagctatgacccagcccctgagggtgtccgagttggttctccctctcacacttccatggatgttcacatagggtcttctcctccgcattctggttgcatggaagcagctcaagctttgggttaggaagttgccttagaggtcggcgctcctgatgacagagttttgattccttctgttgacactgacttggtcgccactgatgcattgcaggttgctccgggtgttgatccttcatcgagccatcaactgatttcccacgacttgggagttccttcgttcttctccaac

SEQ ID NO: 28688 - DNA, 829 bp, Zea Mays
tgcacactcaactgctactgacaatgctaattttgtggcggcttcgaccgtggttgctgaaggtgattctgatgattatgtgtctaagttttttgagtctgatgattctgggagttcgattgtgtggacggaggggtcttaggaagaggacttggattattttgcagtgttggatgtggctgcggcggagactcctcccacgtgtgatgggtgctgaggatcatccgggtgcgagtgctgggcataggcggcaaagagtggtagcgaaacggagagtgggtgacttgtcgtgaggtgaaaggcatcatcgtggtgagatggagggtggtcgtcttcgtgtggatgggactggcaaacgggaattgttgtcctcgtcggctggggcgagtgtgggtgagggggagctgcgaagtctgtttgcgagtgaggaattgaggataatgttgttcaactatagggagatgggtatcatcccgaaggttgagcctatgtaatgtgtgatgccctcgctgtatgtgtgtaaccataattatgtgtgatgaagctgcgcgctttcgttgatcaggctgttctcataggcttctgtgcggagttctttagaaaaagacttcaattttttgtactagtattccagctgcacccgtatgcgacttttgcgcggagtcttttggaaaagacttcgattttttatgcttattattccggctatacccttgggcgacttttgcacggagagtggttttgtgcacttattgtgctagtccggctgcacccttaggcgacttttgcacggagagtcttttggaaaagacttcgatttttcgcactt
